(19) United States
(12) Patent Application Publication
(10) Pub. No.: US 2019/0136230 A1
(43) Pub. Date: May 9, 2019

(54) GENETICALLY ENGINEERED CELLS AND METHODS OF MAKING THE SAME

(71) Applicants: Juno Therapeutics, Inc., Seattle, WA (US); Editas Medicine, Inc., Cambridge, MA (US)

(72) Inventors: Blythe SATHER, Seattle, WA (US); G. Grant WELSTEAD, Cambridge, MA (US); David A. BUMCROT, Cambridge, MA (US); Ari E. FRIEDLAND, Cambridge, MA (US); Jon JONES, Seattle, WA (US); Morgan L. MAEDER, Cambridge, MA (US); Chris NYE, Seattle, WA (US); Eugenio Marco RUBIO, Cambridge, MA (US); Ruth SALMON, Seattle, WA (US)

(73) Assignees: Juno Therapeutics, Inc., Seattle, WA (US); Editas Medicine, Inc., Cambridge, MA (US)

(21) Appl. No.: 16/098,845

(22) PCT Filed: May 6, 2017
(86) PCT No.: PCT/US2017/031464

§ 371 Date: Nov. 2, 2018

Related U.S. Application Data
(60) Provisional application No. 62/333,144, filed on May 6, 2016.
(60) Provisional application No. 62/332,657, filed on May 6, 2016.

(51) Int. Cl. C12N 15/11; C07K 14/725; C12N 5/0783; C07K 14/705; C12N 9/22; C07K 16/28; A61P 35/00; A61K 38/17; A61K 31/7088; A61K 38/46; A61K 39/395

(52) U.S. Cl. CPC C12N 15/11; A61K 2039/505; C12N 5/0636; C07K 14/70521; C07K 14/70578; C12N 9/22; C07K 16/2803; C07K 16/2878; A61P 35/00; A61K 38/1774; A61K 31/7088; A61K 38/177; A61K 38/465; A61K 39/39558; A61K 39/3955; C07K 2317/622; C07K 2319/30; C07K 2319/02; C12N 2800/80; C12N 2310/20; C12N 2501/2302; C12N 2501/2307; C12N 2501/2315; C12N 2501/998; C12N 2310/336; C12N 2310/317; C07K 2317/73; C07K 14/7051

(57) ABSTRACT

Provided are CRIS PR/CAS-related methods, compositions and components for editing a target nucleic acid sequence, or modulating expression of a target nucleic acid sequence, and applications thereof in connection with cancer immunotherapy comprising adoptive transfer of engineered T cells or T cell precursors.

### CROSS-REFERENCE TO RELATED APPLICATIONS

[0001] This application claims priority from U.S. provisional application No. 62/333,144 filed May 6, 2016, entitled “Genetically Engineered Cells And Methods Of Making The Same,” and U.S. provisional application No. 62/332,657 filed May 6, 2016, entitled “CRISPR-CAS-Related Methods, Compositions And Components For Cancer Immunotherapy,” the contents of each of which is incorporated by reference in its entirety.

### INCORPORATION BY REFERENCE OF SEQUENCE LISTING

[0002] The present application is being filed along with a Sequence Listing in electronic format. The Sequence Listing is provided as a file entitled 735042006440SEQLIST.TXT, created May 4, 2017, which is 12,031,926 bytes in size. The information in the electronic format of the Sequence Listing is incorporated by reference in its entirety.

### FIELD

[0003] The present disclosure relates to CRISPR/CAS-related methods, compositions and components for editing a target nucleic acid sequence, or modulating expression of a target nucleic acid sequence, and applications thereof in connection with cancer immunotherapy comprising adoptive transfer of engineered T cells or T cell precursors.

### BACKGROUND

[0004] Various strategies are available for producing and administering engineered cells for adoptive therapy. For example, strategies are available for engineering immune cells expressing genetically engineered antigen receptors, such as CARs, and for suppression or repression of gene expression in the cells. Improved strategies are needed to improve efficacy of the cells, for example, by avoiding suppression of effector functions and improving the activity and/or survival of the cells upon administration to subjects. Provided are methods, cells, compositions, kits, and systems that meet such needs.

### SUMMARY

[0005] Provided are compositions that include an engineered immune cell containing a recombinant receptor and an agent capable of inducing a genetic disruption of a PDCD1 gene or a genetic disruption of a PDCD1 gene encoding the PD-1 polypeptide, such as for use in adoptive cell therapy, for example, to treat diseases and/or conditions in the subjects. Also provided are methods for producing or generating such compositions or cells, cells, cell populations, compositions, and methods of using such compositions or cells. The compositions and cells generally include agents capable of inducing a genetic disruption or prevention or reduction of expression of a PDCD1 gene, or a genetic disruption of a PDCD1 gene. Also provided are methods for administering to subjects the provided compositions, cell populations or cells expressing genetically engineered (recombinant) cell surface receptors and contain a genetic disruption of a PDCD1 gene, such as produced by the methods, for example, for adoptive cell therapy to treat diseases and/or conditions in the subjects.

[0006] In some embodiments, provided are compositions containing (a) an engineered immune cell containing a recombinant receptor that specifically binds to an antigen; and (b) an agent capable of inducing a genetic disruption of a PDCD1 gene encoding a PD-1 polypeptide, wherein said agent is capable of inducing said genetic disruption in, and/or preventing or reducing PD-1 expression in, at least 70%, at least 75%, at least 80%, or at least or greater than 90% of the cells in the composition and/or at least 70%, at least 75%, at least 80%, or at least or greater than 90% of the cells in the composition that express the recombinant receptor.

[0007] In some embodiments, provided are compositions containing (a) an engineered immune cell containing a nucleic acid encoding a recombinant receptor that specifically binds to an antigen; and (b) an agent capable of inducing a genetic disruption of a PDCD1 gene encoding a PD-1 polypeptide, wherein said agent is capable of inducing said genetic disruption in, and/or preventing or reducing PD-1 expression in, at least 70%, at least 75%, at least 80%, or at least or greater than 90% of the cells in the composition and/or at least 70%, at least 75%, at least 80%, or at least or greater than 90%, of the cells in the composition that express the recombinant receptor.

[0008] In some embodiments provided herein, the composition includes engineered immune cells that express the recombinant receptor on its surface.

[0009] In some embodiments, provided are compositions containing a cell population that contains an engineered immune cell that contains (a) a recombinant receptor that specifically binds to an antigen; and (b) a genetic disruption of a PDCD1 gene encoding a PD-1 polypeptide, said genetic disruption preventing or reducing the expression of said PD-1 polypeptide, wherein at least about 70%, at least about 75%, or at least about 80% or at least or greater than about 90% of the cells in the composition contain the genetic disruption; do not express the endogenous PD-1 polypeptide; do not contain a contiguous PDCD1 gene, do not contain a PDCD1 gene, and/or do not contain a functional PDCD1 gene; and/or do not express a PD-1 polypeptide; and/or at least about 70%, at least about 75%, or at least about 80% or at least or greater than about 90% of the cells in the composition that express the recombinant receptor contain the genetic disruption, do not express the endogenous PD-1 polypeptide, and/or do not express a PD-1 polypeptide.

[0010] In some embodiments, provided are composition s containing a cell population that contains an engineered immune cell that contains (a) a recombinant receptor that specifically binds to an antigen, wherein the engineered immune cell is capable of inducing cytotoxicity, proliferating and/or secreting a cytokine upon binding of the recombinant receptor to said antigen; and (b) a genetic disruption of a PDCD1 gene encoding a PD-1 polypeptide, said genetic disruption capable of preventing or reducing the expression of said PD-1 polypeptide, optionally wherein said prevention or reduction is in at least at or about or greater than at or about 70%, 75%, 80%, 85%, or 90% of the cells in the composition and/or of the cells in the composition that express the recombinant receptor.

[0011] In some embodiments, provided are compositions containing a cell population that contains a population of engineered immune cells, each containing (a) a recombinant receptor that specifically binds to an antigen; and (b) a genetic disruption of a PDCD1 gene encoding a PD-1 polypeptide, wherein said genetic disruption is capable of preventing or reducing the expression of said PD-1 polypeptide, wherein: the engineered immune cells, on average, exhibit expression and/or surface expression of the receptor at a level that is the same, about the same or substantially the same, as compared to the average expression and/or surface expression level, respectively, of said recombinant receptor in other cells in the composition that contain the recombinant receptor and do not contain the genetic disruption, or the engineered immune cells do not express the PD-1 polypeptide and on average, exhibit expression and/or surface expression of the receptor at a level is the same, about the same, or substantially the same as compared to the average expression and/or surface level, respectively, in cells of the composition that contain the recombinant receptor and that express the PD-1 polypeptide.

[0012] In some embodiments, the recombinant receptor is capable, upon incubation with the antigen, a cell expressing the antigen, and/or an antigen-receptor activating substance, of specifically binding to the antigen, of activating or stimulating the engineered T cell, of inducing cytotoxicity, or of inducing proliferation, survival, and/or cytokine secretion by the immune cell, optionally as measured in an in vitro assay, optionally in an in vitro assay, which optionally contains incubation for 12, 24, 36, 48, or 60 hours, optionally in the presence of one or more cytokines. In some embodiments, the engineered immune cell is capable, upon incubation with the antigen, a cell expressing the antigen, and/or an antigen-receptor activating substance, of specifically binding to the antigen, of inducing cytotoxicity, proliferating, surviving, and/or secreting a cytokine, optionally as measured in an in vitro assay, which optionally contains incubation for 12, 24, 36, 48, or 60 hours, optionally in the presence of one or more cytokines and optionally does or does not contain exposing the immune cell to a PD-L1-expressing cell.

[0013] In some embodiments, the level or degree or extent or duration of the binding, cytotoxicity, proliferation, survival, or cytokine secretion is the same, about the same or substantially the same as compared to that detected or observed for an immune cell containing the recombinant receptor but not containing the genetic disruption of a PDCD1 gene, when assessed under the same conditions. In some embodiments, the binding, cytotoxicity, proliferation, survival, and/or cytokine secretion is as measured, optionally in an in vitro assay, following withdrawal and re-exposure to the antigen, antigen-expressing cell, and/or substance.

[0014] In some embodiments, the immune cell is a primary cell from a subject. In some embodiments, the immune cell is a human cell. In some embodiments, the immune cell is a white blood cell, such as an NK cell or a T cell. In some embodiments, the immune cell contains a plurality of T cells containing unfractionated T cells, contains isolated CD8+ cells or is enriched for CD8+ T cells, or contains isolated CD4+ T cells or is enriched for CD4+ cells, and/or is enriched for a subset thereof selected from the group consisting of naïve cells, effector memory cells, central memory cells, stem central memory cells, effector memory cells, and long-lived effector memory cells. In some embodiments, the percentage, of T cells, or T cells expressing the receptor, and containing the genetic disruption in the composition, that exhibit a non-activated, long-lived memory, or central memory phenotype, is the same or substantially the same as a population of cells the same or substantially the same as the composition but not containing the genetic disruption or but expressing the PD-1 polypeptide.

[0015] In some embodiments, the percentage of T cells in the composition exhibiting a non-activated, long-lived memory, or central memory phenotype is the same, about the same or substantially the same as compared to the percentage of T cells exhibiting the phenotype in a composition containing T cells, containing the recombinant receptor but not containing the genetic disruption of a PDCD1 gene encoding a PD-1 polypeptide when assessed under the same conditions, which optionally is compared in the absence or presence of contacting or exposing the immune cell to PD-L1. In some embodiments, the phenotype is as assessed following incubation of the composition at or about 37° C.±2° C. for at least 12 hours, 24 hours, 48 hours, 96 hours, 6 days, 12 days, 24 days, 36 days, 48 days or 60 days. In some embodiments, the incubation is in vitro. In some embodiments, at least a portion of the incubation is performed in the presence of a stimulating agent, which at least a portion is optionally for up to 1 hour, 6 hours, 24 hours, or 48 hours of the incubation. In some embodiments, the stimulating agent is an agent capable of inducing proliferation of T cells, CD4+ T cells and/or CD8+ T cells. In some embodiments, the stimulating agent is or contains an antibody specific for CD3 an antibody specific for CD28 and/or a cytokine. In some embodiments, the T cell containing the recombinant receptor contains one or more phenotypic markers selected from CCR7+, 4-1BB+(CD137+), TIM3+, CD27+, CD62L+, CD127+, CD45RA+, CD45RO−, t-bet1^{low}, IL-7Ra+, CD95+, IL-2Rβ+, CXCR3+ or LFA-1+.

[0016] In some embodiments, the recombinant receptor is a functional non-TCR antigen receptor or a transgenic TCR. In some embodiments, the recombinant receptor is a chimeric antigen receptor (CAR), such as a CAR containing an antigen-binding domain that is an antibody or an antibody fragment. In some embodiments, the antibody fragment contained in the recombinant receptor is a single chain fragment. In some embodiments, the antibody fragment contains antibody variable regions joined by a flexible immunoglobulin linker. In some embodiments, the fragment contains an scFv.

[0017] In some embodiments, the antigen is associated with a disease or disorder, such as an infectious disease or condition, an autoimmune disease, an inflammatory disease or a tumor or a cancer. In some embodiments, the recombinant receptor specifically binds to a tumor antigen. In some embodiments, the antigen that the recombinant receptor binds to is selected from ROR1, Her2, L1-CAM, CD19, CD20, CD22, mesothelin, CEA, hepatitis B surface antigen, anti-folate receptor, CD23, CD24, CD30, CD33, CD38, CD44, EGFR, EGP-2, EGP-4, EPHa2, ErbB2, ErbB3, ErbB4, FBP, fetal acethycholine receptor, GD2, GD3, HMW-MAA, IL-22R-alpha, IL-13R-alpha2, kdr, kappa light chain, Lewis Y, L1-cell adhesion molecule (CD171), MAGE-A1, mesothelin, MUC1, MUC16, PSCA, NKG2D Ligands, NY-ESO-1, MART-1, gp100, oncofetal antigen, TAG72, VEGF-R2, carcinoembryonic antigen (CEA), prostate specific antigen, PSMA, estrogen receptor, progesterone receptor, ephrinB2, CD123, CS-1, c-Met, GD-2, MAGE A3, CE7, Wilms Tumor 1 (WT-1), cyclin A1 (CCNA1) or interleukin 12.

[0018] In some embodiments, the recombinant receptor contains an intracellular signaling domain containing an ITAM. In some embodiments, the intracellular signaling domain contains an intracellular domain of a CD3-zeta (CD3ζ) chain. In some embodiments, the recombinant receptor further contains a costimulatory signaling region, such as a costimulatory signaling region containing a signaling domain of CD28 or 4-1BB.

[0019] In some embodiments, wherein the agent capable of inducing a genetic disruption of a PDCD1 gene contains at least one of (a) a least one guide RNA (gRNA) having a targeting domain that is complementary with a target domain of a PDCD1 gene or (b) at least one nucleic acid encoding the at least one gRNA. In some embodiments, the agent contains at least one complex of a Cas9 molecule and a gRNA having a targeting domain that is complementary with a target domain of a PDCD1 gene. In some embodiments, the guide RNA further contains a first complementarity domain, a second complementarity domain that is complementary to the first complementarity domain, a proximal domain and optionally a tail domain. In some embodiments, the first complementarity domain and second complementarity domain are joined by a linking domain. In some embodiments, the guide RNA contains a 3′ poly-A tail and a 5′ Anti-Reverse Cap Analog (ARCA) cap. In some embodiments, the Cas9 molecule is an enzymatically active Cas9.

[0020] In some embodiments, the at least one gRNA includes a targeting domain containing a sequence selected from the group consisting of GUCUGGGCGGUGCUACAACU (SEQ ID NO:508), GCCCUGGCCAGUCGUCU (SEQ ID NO: 514), CGUCUGGGCGGUGCUACAAC (SEQ ID NO:1533), UGUAGCACCGCCCAGACGAC (SEQ ID NO:579), CGACUGGCCAGGGCGCCUGU (SEQ ID NO:582) and CACCUACCUAAGAACCAUCC (SEQ ID NO:723). In some embodiments, the at least one gRNA includes a targeting domain containing the sequence CGACUGGCCAGGGCGCCUGU (SEQ ID NO:582).

[0021] In some embodiments, the Cas9 molecule is an S. aureus Cas9 molecule. In some embodiments, the Cas9 molecules is an S. pyogenes Cas9. In some compositions, the Cas9 molecule lacks an active RuvC domain or an active HNH domain. In some embodiments, the Cas9 molecule is an S. pyogenes Cas9 molecule containing a D10A mutation. In some embodiments, the Cas9 molecule is an S. pyogenes Cas9 molecule containing an N863A mutation.

[0022] In some of the embodiments provided herein, the genetic disruption contains creation of a double strand break which is repaired by non-homologous end joining (NHEJ) to effect insertions and deletions (indels) in the PDCD1 gene.

[0023] In some embodiments, at least about 70%, at least about 75%, or at least about 80% of the cells in the composition contain the genetic disruption; do not express the endogenous PD-1 polypeptide; do not contain a contiguous PDCD1 gene, a PDCD1 gene, and/or a functional PDCD1 gene; and/or do not express a PD-1 polypeptide; and/or at least about 70%, at least about 75%, or at least about 80% of the cells in the composition that express the recombinant receptor contain the genetic disruption, do not express the endogenous PD-1 polypeptide, or do not express a PD-1 polypeptide. In some embodiments, greater than 80%, 81%, 82%, 83%, 84%, 85%, 86%, 87%, 88%, 89%, 90%, 91%, 92%, 93%, 94%, or 95% of the cells in the composition contain the genetic disruption; do not express the endogenous PD-1 polypeptide; do not contain a contiguous PDCD1 gene, a PDCD1 gene, and/or a functional PDCD1 gene; and/or do not express a PD-1 polypeptide; and/or greater than 80%, 81%, 82%, 83%, 84%, 85%, 86%, 87%, 88%, 89%, 90%, 91%, 92%, 93%, 94%, or 95% of the cells in the composition that express the recombinant receptor contain the genetic disruption, do not express the endogenous PD-1 polypeptide, or do not express a PD-1 polypeptide.

[0024] In some embodiments, both alleles of the gene in the genome are disrupted.

[0025] In some embodiments, cells in the composition and/or the cells in the composition that express the recombinant receptor are not enriched or selected for cells that contain the genetic disruption; do not express the endogenous PD-1 polypeptide; do not contain a contiguous PDCD1 gene, a PDCD1 gene, and/or a functional PDCD1 gene; and/or do not express a PD-1 polypeptide.

[0026] In some embodiments, no more than 2, no more than 5 or no more than 10 other genes in each cell in the composition, or each cell in the composition that expresses the recombinant receptor, on average, are disrupted or are disrupted by the agent, such as no other genes in each cell in the composition or each cell in the composition that expresses the recombinant receptor are disrupted in the cell or are disrupted by the agent.

[0027] In some embodiments, any of the compositions provided herein further contains a pharmaceutically acceptable buffer.

[0028] Also provided herein are methods of producing a genetically engineered immune cell, including: (a) introducing into an immune cell a nucleic acid molecule encoding a recombinant receptor that specifically binds to an antigen; and (b) introducing into the immune cell an agent capable of inducing a genetic disruption of a PDCD1 gene encoding a PD-1 polypeptide including one of (i) at least one gRNA having a targeting domain that is complementary with a target domain of the PDCD1 gene or (ii) at least one nucleic acid encoding the at least one gRNA.

[0029] Also provided herein are methods of producing a genetically engineered immune cell, including introducing into an immune cell expressing a recombinant receptor that specifically binds to an antigen an agent capable of inducing a genetic disruption of a PDCD1 gene encoding a PD-1 polypeptide including one of (i) at least one gRNA having a targeting domain that is complementary with a target domain of the PDCD1 gene or (ii) at least one nucleic acid encoding the at least one gRNA.

[0030] In some embodiments, the agent includes at least one complex of a Cas9 molecule and a gRNA having a targeting domain that is complementary with a target domain of a PDCD1 gene.

[0031] In some embodiments, the guide RNA further includes a first complementarity domain, a second complementarity domain that is complementary to the first complementarity domain, a proximal domain and optionally a tail domain. In some embodiments, the first complementarity domain and second complementarity domain are joined by a linking domain. In some embodiments, the guide RNA includes a 3′ poly-A tail and a 5′ Anti-Reverse Cap Analog (ARCA) cap.

[0032] In some embodiments, introduction includes contacting the cells with the agent or a portion thereof, in vitro. In some embodiments, introduction of the agent includes electroporation. In some embodiments, the introduction further includes incubating the cells, in vitro prior to, during or subsequent to the contacting of the cells with the agent or prior to, during or subsequent to the electroporation. In some embodiments, the introduction in (a) includes transduction and the introduction further includes incubating the cells, in vitro, prior to, during or subsequent to the transduction. In some embodiments, at least a portion of the incubation is in the presence of (i) a cytokine selected from the group consisting of IL-2, IL-7, and IL-15, and/or (ii) a stimulating or activating agent or agents, optionally including anti-CD3 and/or anti-CD28 antibodies. In some embodiments, the introduction in (a) includes: prior to transduction, incubating the cells with IL-2 at a concentration of 20 U/mL to 200 U/mL, optionally about 100 U/mL; IL-7 at a concentration of 1 ng/mL to 50 ng/mL, optionally about 10 ng/mL and/or IL-15 at a concentration of 0.5 ng/mL to 20 ng/mL, optionally about 5 ng/mL; and subsequent to transduction, incubating the cells with IL-2 at a concentration of 10 U/mL to 200 U/mL, optionally about 50 U/mL; IL-7 at a concentration of 0.5 ng/mL to 20 ng/mL, optionally about 5 ng/mL and/or IL-15 at a concentration of 0.1 ng/mL to 10 ng/mL, optionally about 0.5 ng/mL.

[0033] In some embodiments, the incubation independently is carried out for up to or approximately 24, 36, 48 hours, 3, 4, 5, 6, 7, 8, 9, 10, 11, 12, 13, 14, 15, 16, 17, 18, 19, 20 or 21 days, such as for 24-48 hours or 36-48 hours.

[0034] In some embodiments, the cells are contacted with the agent at a ratio of approximately 1 microgram per 100,000, 200,000, 300,000, 400,000, or 500,000 cells.

[0035] In some embodiments, the incubation is at a temperature of 30° C.±2° C. to 39° C.±2° C.; or the incubation is at a temperature that is at least or about at least 30° C.±2° C., 32° C.±2° C., 34° C.±2° C. or 37° C.±2° C. In some embodiments, at least a portion of the incubation is at 30° C.±2° C. and at least a portion of the incubation is at 37° C.±2° C. In some embodiments, the method further includes resting the cells between the introducing in (a) and the introducing in (b).

[0036] In some of any such embodiments provided herein, the Cas9 molecule is an enzymatically active Cas9. In some embodiments, the at least one gRNA includes a targeting domain including a sequence selected from the group consisting of GUCUGGGCGGUGCUACAACU (SEQ ID NO:508), GCCCUGGCCAGUCGUCU (SEQ ID NO: 514), CGUCUGGGCGGUGCUACAAC (SEQ ID NO:1533), UGUAGCACCGCCCAGACGAC (SEQ ID NO:579), CGACUGGCCAGGGCGCCUGU (SEQ ID NO:582) and CACCUACCUAAGAACCAUCC (SEQ ID NO:723). In some embodiments, 59-78, the at least one gRNA includes a targeting domain including the sequence CGACUGGCCAGGGCGCCUGU (SEQ ID NO:582).

[0037] In some embodiments, the Cas9 molecule is an S. aureus Cas9 molecule. In some embodiments, the Cas9 molecules is an S. pyogenes Cas9. In some embodiments, the Cas9 molecule lacks an active RuvC domain or an active HNH domain. In some embodiments, the Cas9 molecule is an S. pyogenes Cas9 molecule including a D10A mutation. In some embodiments, the Cas9 molecule is an S. pyogenes Cas9 molecule including an N863A mutation.

[0038] In some embodiments, the genetic disruption includes creation of a double strand break which is repaired by non-homologous end joining (NHEJ) to effect insertions and deletions (indels) in the PDCD1 gene.

[0039] In some embodiments, the recombinant receptor is a functional non-TCR antigen receptor or a transgenic TCR. In some embodiments, the recombinant receptor is a chimeric antigen receptor (CAR). In some embodiments, the CAR includes an antigen-binding domain that is an antibody or an antibody fragment. In some embodiments, the antibody fragment is a single chain fragment. In some embodiments, the antibody fragment includes antibody variable regions joined by a flexible immunoglobulin linker. In some embodiments, the fragment includes an scFv. In some embodiments, the antigen is associated with a disease or disorder, such as an infectious disease or condition, an autoimmune disease, an inflammatory disease or a tumor or a cancer. In some embodiments, the recombinant receptor specifically binds to a tumor antigen.

[0040] In some embodiments, the recombinant receptor binds is selected from ROR1, Her2, L1-CAM, CD19, CD20, CD22, mesothelin, CEA, hepatitis B surface antigen, anti-folate receptor, CD23, CD24, CD30, CD33, CD38, CD44, EGFR, EGP-2, EGP-4, EPHa2, ErbB2, ErbB3, ErbB4, FBP, fetal acethycholine e receptor, GD2, GD3, HMW-MAA, IL-22R-alpha, IL-13R-alpha2, kdr, kappa light chain, Lewis Y, L1-cell adhesion molecule (CD171), MAGE-A1, mesothelin, MUC1, MUC16, PSCA, NKG2D Ligands, NY-ESO-1, MART-1, gp100, oncofetal antigen, TAG72, VEGF-R2, carcinoembryonic antigen (CEA), prostate specific antigen, PSMA, estrogen receptor, progesterone receptor, ephrinB2, CD123, CS-1, c-Met, GD-2, MAGE A3, CE7, Wilms Tumor 1 (WT-1), cyclin A1 (CCNA1) or interleukin 12.

[0041] In some embodiments, the recombinant receptor includes an intracellular signaling domain including an ITAM. In some embodiments, the intracellular signaling domain includes an intracellular domain of a CD3-zeta (CD3) chain. In some embodiments, the recombinant receptor further includes a costimulatory signaling region, such as the costimulatory signaling region including a signaling domain of CD28 or 4-1BB.

[0042] In some embodiments, the nucleic acid encoding the recombinant receptor is a viral vector, such as a retroviral vector. In some embodiments, the viral vector is a lentiviral vector or a gammaretroviral vector. In some embodiments, introduction of the nucleic acid encoding the recombinant vector is by transduction, which optionally is retroviral transduction.

[0043] In some embodiments, the immune cell is a primary cell from a subject. In some embodiments, the immune cell is a human cell. In some embodiments, the immune cell is a white blood cell, such as an NK cell or T cell. In some embodiments, the immune cell is a T cell that is an unfractionated T cell, isolated CD8+ T cell, or isolated CD4+ T cell. In some embodiments, any of the method provided herein is performed on a plurality of immune cells.

[0044] In some embodiments, subsequent to introducing the agent and introducing the recombinant receptor, cells are not enriched or selected for (a) cells including the genetic disruption or not expressing the endogenous PD-1 polypeptide, (b) cells expressing the recombinant receptor or both (a) and (b). In some embodiments, any of the methods further include enriching or selecting for (a) cells including the genetic disruption or not expressing the endogenous PD-1 polypeptide, (b) cells expressing the recombinant receptor or for both (a) and (b). In some embodiments, any of the methods further include incubating the cells at or at about 37° C.±2° C. In some embodiments, the incubation is carried out for a time between at or about 1 hour and at or about 96 hours, between at or about 4 hours and at or about 72 hours, between at or about 8 hours and at or about 48 hours, between at or about 12 hours and at or about 36 hours, between at or about 6 hours and at or about 24 hours, between at or about 36 hours and at or about 96 hours, inclusive. In some embodiments, the incubation or a portion of the incubation is performed in the presence of a stimulating agent. In some embodiments, stimulating agent is an agent capable of inducing proliferation of T cells, CD4+ T cells and/or CD8+ T cells. In some embodiments, the stimulating agent is or includes an antibody specific for CD3 an antibody specific for CD28 and/or a cytokine.

[0045] In some embodiments, any of the methods provided herein further includes formulating cells produced by the method in a pharmaceutically acceptable buffer.

[0046] In some embodiments, any of the methods provided herein produce a population of cells in which: at least about 70%, at least about 75%, or at least about 80% of the cells both 1) include the genetic disruption; do not express the endogenous PD-1 polypeptide; do not include a contiguous PDCD1 gene, a PDCD1 gene, and/or a functional PDCD1 gene; and/or do not express a PD-1 polypeptide; and 2) express the recombinant receptor; or at least about 70%, at least about 75%, or at least about 80% of the cells that express the recombinant receptor include the genetic disruption, do not express the endogenous PD-1 polypeptide, or do not express a PD-1 polypeptide.

[0047] In some embodiments, any of the methods provided herein produce a population of cells in which: greater than 80%, 81%, 82%, 83%, 84%, 85%, 86%, 87%, 88%, 89%, 90%, 91%, 92%, 93%, 94%, or 95% of the cells both 1) include the genetic disruption; do not express the endogenous PD-1 polypeptide; do not include a contiguous PDCD1 gene, a PDCD1 gene, and/or a functional PDCD1 gene; and/or do not express a PD-1 polypeptide and 2) express the recombinant receptor; and/or greater than 80%, 81%, 82%, 83%, 84%, 85%, 86%, 87%, 88%, 89%, 90%, 91%, 92%, 93%, 94%, or 95% of the cells that express the recombinant receptor include the genetic disruption, do not express the endogenous PD-1 polypeptide, or do not express a PD-1 polypeptide.

[0048] In some embodiments of any of the methods provided herein, both alleles of the gene in the genome are disrupted.

[0049] In some embodiments, also provided are a genetically engineered immune cell produced by any of the methods provided herein.

[0050] In some embodiments, also provided are a plurality of genetically engineered immune cells produced by any of the methods provided herein.

[0051] In some embodiments, provided are such genetically engineered immune cells wherein: at least about 70%, at least about 75%, or at least about 80% of the cells both 1) include the genetic disruption; do not express the endogenous PD-1 polypeptide; do not include a contiguous PDCD1 gene, a PDCD1 gene, and/or a functional PDCD1 gene; and/or do not express a PD-1 polypeptide; and 2) express the recombinant receptor; or at least about 70%, at least about 75%, or at least about 80% of the cells that express the recombinant receptor include the genetic disruption, do not express the endogenous PD-1 polypeptide, or do not express a PD-1 polypeptide.

[0052] In some embodiments, provided are the plurality of genetically engineered immune cells wherein: greater than 80%, 81%, 82%, 83%, 84%, 85%, 86%, 87%, 88%, 89%, 90%, 91%, 92%, 93%, 94%, or 95% of the cells both 1) include the genetic disruption; do not express the endogenous PD-1 polypeptide; do not include a contiguous PDCD1 gene, a PDCD1 gene, and/or a functional PDCD1 gene; and/or do not express a PD-1 polypeptide and 2) express the recombinant receptor; and/or greater than 80%, 81%, 82%, 83%, 84%, 85%, 86%, 87%, 88%, 89%, 90%, 91%, 92%, 93%, 94%, or 95% of the cells that express the recombinant receptor include the genetic disruption, do not express the endogenous PD-1 polypeptide, or do not express a PD-1 polypeptide.

[0053] In some embodiments, also provided are compositions including any of the genetically engineered immune cells provided herein or any of the plurality of genetically engineered immune cells provided herein, and optionally a pharmaceutically acceptable buffer.

[0054] In some embodiments, also provided are methods of treatment, including administering any of the compositions provided herein to a subject having a disease or condition.

[0055] In some embodiments, the recombinant receptor specifically binds to an antigen associated with the disease or condition, such as a cancer, a tumor, an autoimmune disease or disorder, or an infectious disease.

[0056] In some embodiments, also provided are any of the pharmaceutical compositions provided herein for use in treating a disease or condition in a subject.

[0057] In some embodiments, in any of the pharmaceutical composition for use, the recombinant receptor specifically binds to an antigen associated with the disease or condition, such as a cancer, a tumor, an autoimmune disease or disorder, or an infectious disease.

[0058] Provided herein is a method of altering a T cell including contacting the T cell with one or more Cas9 molecule/gRNA molecule complexes, wherein the gRNA molecule(s) in the one or more Cas9 molecule/gRNA molecule complexes contain a targeting domain which is complementary with a target domain from the PDCD1 gene. In some embodiments, the T cell is from a subject suffering from cancer. In some examples, the cancer is selected from the group consisting of: lymphoma, chronic lymphocytic leukemia (CLL), B cell acute lymphocytic leukemia (B-ALL), acute lymphoblastic leukemia, acute myeloid leukemia, non-Hodgkin's lymphoma (NHL), diffuse large cell lymphoma (DLCL), multiple myeloma, renal cell carcinoma (RCC), neuroblastoma, colorectal cancer, breast cancer, ovarian cancer, melanoma, sarcoma, prostate cancer, lung cancer, esophageal cancer, hepatocellular carcinoma, pancreatic cancer, astrocytoma, mesothelioma, head and neck cancer, and medulloblastoma.

[0059] In some of any such embodiments, the T cell is from a subject having cancer or which could otherwise benefit from a mutation at a T cell target position of the PDCD1 gene. In some of any such embodiments, the contacting is performed ex vivo. In some of any such embodiments, the altered T cell is returned to the subject's body after the step of contacting. In some of any such embodiments, the T cell is from a subject suffering from cancer, the contacting is performed ex vivo and the altered T cell is returned to the subject's body after the step of contacting.

[0060] In some of any such embodiments, the one or more Cas9 molecule/gRNA molecule complexes are formed prior to the contacting. In some of any such embodiments, the gRNA molecule(s) contain a targeting domain that is the same as, or differs by no more than 3 nucleotides from, a targeting domain from any of SEQ ID NOS: 481-555, 563-1516, 1517-3748, 14657-16670, and 16671-21037. In some embodiments, the gRNA molecule(s) contain a targeting domain that is selected from SEQ ID NOS: 563-1516. In some cases, the gRNA molecule(s) contain a targeting domain that is selected from SEQ ID NOS: 1517-3748. In some instances, the gRNA molecule(s) contain a targeting domain that is selected from SEQ ID NOS: 14657-16670. In some aspects, the gRNA molecule(s) contain a targeting domain that is selected from SEQ ID NOS: 16671-21037.

[0061] In some embodiments, the gRNA molecule(s) contain a targeting domain that is selected from SEQ ID NOS: 481-500 and 508-547. In some cases, the gRNA molecule(s) contain a targeting domain that is selected from SEQ ID NOS: 501-507 and 548-555. In some embodiments, the gRNA molecule(s) contain a targeting domain that is selected from SEQ ID NOS: 508, 514, 576, 579, 582, and 723. In some cases, the gRNA molecule(s) contain a targeting domain that is selected from SEQ ID NOS: 508, 510, 511, 512, 514, 576, 579, 581, 582, 766, and 723.

[0062] In some of any such embodiments, the gRNA molecule(s) are modified at their 5′ end or contain a 3′ polyA tail. In some of any such embodiments, the gRNA molecule(s) are modified at their 5′ end and contain a 3′ polyA tail. In some instances, the gRNA molecule(s) lack a 5′ triphosphate group.

[0063] In some aspects, the gRNA molecule(s) include a 5′ cap. In some cases, the 5′ cap contains a modified guanine nucleotide that is linked to the remainder of the gRNA molecule via a 5′-5′ triphosphate linkage. In some instances, the 5′ cap contains two optionally modified guanine nucleotides that are linked via an optionally modified 5′-5′ triphosphate linkage.

[0064] In some of any such embodiments, the 3′ polyA tail includes about 10 to about 30 adenine nucleotides. In some of any such embodiments, the 3′ polyA tail includes about 20 adenine nucleotides. In some embodiments, the gRNA molecule(s) including the 3′ polyA tail were prepared by in vitro transcription from a DNA template.

[0065] In some embodiments, the 5′ nucleotide of the targeting domain is a guanine nucleotide, the DNA template includes a T7 promoter sequence located immediately upstream of the sequence that corresponds to the targeting domain, and the 3′ nucleotide of the T7 promoter sequence is not a guanine nucleotide. In some cases, the 5′ nucleotide of the targeting domain is not a guanine nucleotide, the DNA template includes a T7 promoter sequence located immediately upstream of the sequence that corresponds to the targeting domain, and the 3′ nucleotide of the T7 promoter sequence is a guanine nucleotide which is downstream of a nucleotide other than a guanine nucleotide. In some of any such embodiments, the one or more Cas9 molecule/gRNA molecule complexes are delivered into the T cell via electroporation.

[0066] In some of any such embodiments, the gRNA molecule(s) contain a targeting domain which is complementary with a target domain from the PDCD1 gene and wherein the gRNA molecule(s) guide the Cas9 molecule to cleave the target domain with an efficiency of cleavage of at least 40%. In some instances, the efficiency of cleavage is determined using a labeled anti-PDCD1 antibody and a flow cytometry assay.

[0067] In some embodiments, the Cas9 molecule is guided by a single gRNA molecule and cleaves the target domain with a single double stranded break. In some examples, the Cas9 molecule is a S. pyogenes Cas9 molecule.

[0068] In some embodiments, the single gRNA molecule includes a targeting domain selected from the following targeting domains: GUCUGGGCGGUGCUACAACU (SEQ ID NO:508); GCCCUGGCCAGUCGUCU (SEQ ID NO:514); CGUCUGGGCGGUGCUACAAC (SEQ ID NO:576); UGUAGCACCGCCCAGACGAC (SEQ ID NO:579); CGACUGGCCAGGGCGCCUGU (SEQ ID NO:582); or CACCUACCUAAGAACCAUCC (SEQ ID NO:723).

[0069] In some embodiments, the Cas9 molecule is a nickase and two Cas9 molecule/gRNA molecule complexes are guided by two different gRNA molecules to cleave the target domain with two single stranded breaks on opposing strands of the target domain. In some cases, the Cas9 molecule is a S. pyogenes Cas9 molecule. In some instances, the S. pyogenes Cas9 molecule has a D10A mutation.

[0070] In some embodiments, the two gRNA molecules include targeting domains that are selected from the following pairs of targeting domains: CGACUGGCCAGGGCGCCUGU (SEQ ID NO:582) and GUCUGGGCGGUGCUACAACU (SEQ ID NO:508); CGACUGGCCAGGGCGCCUGU (SEQ ID NO:582) and GGGCGGUGCUACAACUGGGC (SEQ ID NO:510); CGACUGGCCAGGGCGCCUGU (SEQ ID NO:582) and GGCCAGGAUGGUUCUUAGGU (SEQ ID NO:511); CGACUGGCCAGGGCGCCUGU (SEQ ID NO:582) and GGAUGGUUCUUAGGUAGGUG (SEQ ID NO:512); CGACUGGCCAGGGCGCCUGU (SEQ ID NO:582) and CGUCUGGGCGGUGCUACAAC (SEQ ID NO:576); CGACUGGCCAGGGCGCCUGU (SEQ ID NO:582) and CUACAACUGGGCUGGCGGCC (SEQ ID NO:766); UGUAGCACCGCCCAGACGAC (SEQ ID NO:579) and GGCCAGGAUGGUUCUUAGGU (SEQ ID NO:511); UGUAGCACCGCCCAGACGAC (SEQ ID NO:579) and GGAUGGUUCUUAGGUAGGUG (SEQ ID NO:512); or ACCGCCCAGACGACUGGCCA (SEQ ID NO:581) and GGCCAGGAUGGUUCUUAGGU (SEQ ID NO:511). In some cases, the S. pyogenes Cas9 molecule has a N863A mutation.

[0071] In some embodiments, the two gRNA molecules include targeting domains that are selected from the following pairs of targeting domains: CGACUGGCCAGGGCGCCUGU (SEQ ID NO:582) and GUCUGGGCGGUGCUACAACU (SEQ ID NO:508); CGACUGGCCAGGGCGCCUGU (SEQ ID NO:582) and GGGCGGUGCUACAACUGGGC (SEQ I GGCCAGGAUGGUUCUUAGGU (SEQ ID NO:511).D NO:510); or CGACUGGCCAGGGCGCCUGU (SEQ ID NO:582) and

[0072] In some of any such embodiments, the gRNA molecule(s) are modular gRNA molecule(s). In some of any such embodiments, the gRNA molecule(s) are chimeric gRNA molecule(s).

[0073] In some embodiments, the gRNA molecule(s) includes from 5′ to 3′: a targeting domain; a first complementarity domain; a linking domain; a second complementarity domain; a proximal domain; and a tail domain. In some cases, the gRNA molecule(s) contain a linking domain of no more than 25 nucleotides in length and a proximal and tail domain, that taken together, are at least 20 nucleotides in length.

[0074] In some of any such embodiments, the gRNA molecule(s) guide the Cas9 molecule to cleave the target domain with an efficiency of cleavage of at least 60%. In some of any such embodiments, the gRNA molecule(s) guide the Cas9 molecule to cleave the target domain with an efficiency of cleavage of at least 80%. In some of any such embodiments, the gRNA molecule(s) guide the Cas9 molecule to cleave the target domain with an efficiency of cleavage of at least 90%.

[0075] In some of any such embodiments, the one or more Cas9 molecule/gRNA molecule complexes produce fewer than 5 off-targets. In some of any such embodiments, the one or more Cas9 molecule/gRNA molecule complexes produce fewer than 2 exonic off-targets. In some aspects, off-targets are identified by GUIDE-seq. In some instances, off-targets are identified by Amp-seq.

[0076] Provided herein is a Cas9 molecule/gRNA molecule complex, wherein the gRNA molecule contains a targeting domain which is complementary with a target domain from the PDCD1 gene, and the gRNA molecule is modified at its 5′ end and/or contains a 3′ polyA tail. In some embodiments, the gRNA molecule contains a targeting domain that is the same as, or differs by no more than 3 nucleotides from, a targeting domain from SEQ ID NOS: 481-555, 563-1516, 1517-3748, 14657-16670, and 16671-21037. In some aspects, the gRNA molecule contains a targeting domain that is selected from SEQ ID NOS: 563-1516. In some instances, the gRNA molecule contains a targeting domain that is selected from SEQ ID NOS: 1517-3748. In some cases, the gRNA molecule contains a targeting domain that is selected from SEQ ID NOS: 14657-16670. In some cases, the gRNA molecule contains a targeting domain that is selected from SEQ ID NOS: 16671-21037.

[0077] In some embodiments, the gRNA molecule contains a targeting domain that is selected from SEQ ID NOS: 481-500 and 508-547. In some instances, the gRNA molecule contains a targeting domain that is selected from SEQ ID NOS: 501-507 and 548-555. In some aspects, the gRNA molecule contains a targeting domain that is selected from SEQ ID NOS: 508, 514, 576, 579, 582, and 723. In some cases, the gRNA molecule contains a targeting domain that is selected from SEQ ID NOS: 508, 510, 511, 512, 514, 576, 579, 581, 582, 766, and 723.

[0078] In some of any such embodiments, the gRNA molecule is modified at its 5′ end. In some cases, the gRNA molecule lacks a 5′ triphosphate group. In some instances, the gRNA molecule includes a 5′ cap. In some embodiments, the 5′ cap contains a modified guanine nucleotide that is linked to the remainder of the gRNA molecule via a 5′-5′ triphosphate linkage. In some cases, the 5′ cap contains two optionally modified guanine nucleotides that are linked via an optionally modified 5′-5′ triphosphate linkage.

[0079] In some of any such embodiments, the 3′ polyA tail is includes about 10 to about 30 adenine nucleotides. In some of any such embodiments, the 3′ polyA tail includes about 20 adenine nucleotides. In some aspects, the gRNA molecule including the 3′ polyA tail was prepared by in vitro transcription from a DNA template. In some embodiments, the 5′ nucleotide of the targeting domain is a guanine nucleotide, the DNA template contains a T7 promoter sequence located immediately upstream of the sequence that corresponds to the targeting domain, and the 3′ nucleotide of the T7 promoter sequence is not a guanine nucleotide. In some instances, the 5′ nucleotide of the targeting domain is not a guanine nucleotide, the DNA template includes a T7 promoter sequence located immediately upstream of the sequence that corresponds to the targeting domain, and the 3′ nucleotide of the T7 promoter sequence is a guanine nucleotide which is downstream of a nucleotide other than a guanine nucleotide.

[0080] In some of any such embodiments, the Cas9 molecule cleaves a target domain with a double stranded break. In some examples, the Cas9 molecule is a S. pyogenes Cas9 molecule. In some cases, the targeting domain is selected from the following group of targeting domains:

(SEQ ID NO: 508)

GUCUGGGCGGUGCUACAACU;

(SEQ ID NO: 514)

GCCCUGGCCAGUCGUCU;

(SEQ ID NO: 576)

CGUCUGGGCGGUGCUACAAC;

(SEQ ID NO: 579)

UGUAGCACCGCCCAGACGAC;

(SEQ ID NO: 582)

CGACUGGCCAGGGCGCCUGU;
or

(SEQ ID NO: 723)

CACCUACCUAAGAACCAUCC.

[0081] In some of any such embodiments, the Cas9 molecule cleaves a target domain with a single stranded break. In some cases, the Cas9 molecule is a S. pyogenes Cas9 molecule. In some examples, the S. pyogenes Cas9 molecule has a D10A mutation. In some cases, the targeting domain is selected from the following group of targeting domains: CGACUGGCCAGGGCGCCUGU (SEQ ID NO:582) and GUCUGGGCGGUGCUACAACU (SEQ ID NO:508); CGACUGGCCAGGGCGCCUGU (SEQ ID NO:582) and GGGCGGUGCUACAACUGGGC (SEQ ID NO:510); CGACUGGCCAGGGCGCCUGU (SEQ ID NO:582) and GGCCAGGAUGGUUCUUAGGU (SEQ ID NO:511); CGACUGGCCAGGGCGCCUGU (SEQ ID NO:582) and GGAUGGUUCUUAGGUAGGUG (SEQ ID NO:512); CGACUGGCCAGGGCGCCUGU (SEQ ID NO:582) and CGUCUGGGCGGUGCUACAAC (SEQ ID NO:576); CGACUGGCCAGGGCGCCUGU (SEQ ID NO:582) and CUACAACUGGGCUGGCGGCC (SEQ ID NO:766); UGUAGCACCGCCCAGACGAC (SEQ ID NO:579) and GGCCAGGAUGGUUCUUAGGU (SEQ ID NO:511); UGUAGCACCGCCCAGACGAC (SEQ ID NO:579) and GGAUGGUUCUUAGGUAGGUG (SEQ ID NO:512); or ACCGCCCAGACGACUGGCCA (SEQ ID NO:581) and GGCCAGGAUGGUUCUUAGGU (SEQ ID NO:511). In some instances, the S. pyogenes Cas9 molecule has a N863A mutation.

[0082] In some embodiments, the targeting domain is selected from the following group of targeting domains: CGACUGGCCAGGGCGCCUGU (SEQ ID NO:582) and GUCUGGGCGGUGCUACAACU (SEQ ID NO:508); CGACUGGCCAGGGCGCCUGU (SEQ ID NO:582) and GGGCGGUGCUACAACUGGGC (SEQ ID NO:510); or CGACUGGCCAGGGCGCCUGU (SEQ ID NO:582) and GGCCAGGAUGGUUCUUAGGU (SEQ ID NO:511).

[0083] In some of any such embodiments, the gRNA molecule is a modular gRNA molecule. In some of any such embodiments, the gRNA molecule is a chimeric gRNA molecule.

[0084] In some embodiments, the gRNA molecule includes from 5′ to 3′: a targeting domain; a first complementarity domain; a linking domain; a second complementarity domain; a proximal domain; and a tail domain. In some aspects, the gRNA molecule contains a linking domain of no more than 25 nucleotides in length and a proximal and tail domain, that taken together, are at least 20 nucleotides in length.

[0085] Provided herein is a gRNA molecule that contains a targeting domain which is complementary with a target domain from the PDCD1 gene, wherein the gRNA molecule is modified at its 5′ end and/or contains a 3′ polyA tail. In some embodiments, the gRNA molecule contains a targeting domain that is the same as, or differs by no more than 3 nucleotides from, a targeting domain from any of SEQ ID NOS: 481-555, 563-1516, 1517-3748, 14657-16670, and 16671-21037. In some cases, the gRNA molecule contains a targeting domain that is selected from SEQ ID NOS: 563-1516. In some cases, the gRNA molecule contains a targeting domain that is selected from SEQ ID NOS: 1517-3748. In some examples, the gRNA molecule contains a targeting domain that is selected from SEQ ID NOS: 14657-16670. In some aspects, the gRNA molecule contains a targeting domain that is selected from SEQ ID NOS: 16671-21037.

[0086] In some embodiments, the gRNA molecule contains a targeting domain that is selected from SEQ ID NOS: 481-500 and 508-547. In some cases, the gRNA molecule contains a targeting domain that is selected from SEQ ID NOS: 501-507 and 548-555. In some instances, the gRNA molecule contains a targeting domain that is selected from SEQ ID NOS: 508, 514, 576, 579, 582, and 723. In some embodiments, the gRNA molecule contains a targeting domain that is selected from SEQ ID NOS: 508, 510, 511, 512, 514, 576, 579, 581, 582, 766, and 723.

[0087] In some of any such embodiments, the gRNA molecule is modified at its 5′ end. In some cases, the gRNA molecule lacks a 5′ triphosphate group. In some aspects, the gRNA molecule includes a 5′ cap. In some examples, the 5′ cap contains a modified guanine nucleotide that is linked to the remainder of the gRNA molecule via a 5′-5′ triphosphate linkage. In some embodiments, the 5′ cap contains two optionally modified guanine nucleotides that are linked via an optionally modified 5′-5′ triphosphate linkage.

[0088] In some of any such embodiments, the gRNA molecule includes a 3′ polyA tail containing about 10 to about 30 adenine nucleotides. In some of any such embodiments, the gRNA molecule contains a 3′ polyA tail which contains about 20 adenine nucleotides.

[0089] In some embodiments, the gRNA molecule including the 3′ polyA tail was prepared by in vitro transcription from a DNA template. In some instances, the 5′ nucleotide of the targeting domain is a guanine nucleotide, the DNA template contains a T7 promoter sequence located immediately upstream of the sequence that corresponds to the targeting domain, and the 3′ nucleotide of the T7 promoter sequence is not a guanine nucleotide. In some cases, the 5′ nucleotide of the targeting domain is not a guanine nucleotide, the DNA template includes a T7 promoter sequence located immediately upstream of the sequence that corresponds to the targeting domain, and the 3′ nucleotide of the T7 promoter sequence is a guanine nucleotide which is downstream of a nucleotide other than a guanine nucleotide.

[0090] In some of any such embodiments, the gRNA molecule is a S. pyogenes gRNA molecule. In some embodiments, the targeting domain is selected from the following group of targeting domains: GUCUGGGCGGUGCUACAACU (SEQ ID NO:508); GCCCUGGCCAGUCGUCU (SEQ ID NO:514); CGUCUGGGCGGUGCUACAAC (SEQ ID NO:576); UGUAGCACCGCCCAGACGAC (SEQ ID NO:579); CGACUGGCCAGGGCGCCUGU (SEQ ID NO:582); or CACCUACCUAAGAACCAUCC (SEQ ID NO:723). In some cases, the targeting domain is selected from the following group of targeting domains: GCCCUGGCCAGUCGUCU (SEQ ID NO:514); or CACCUACCUAAGAACCAUCC (SEQ ID NO:723). In some instances, the targeting domain is selected from the following group of targeting domains: GGGCGGUGCUACAACUGGGC (SEQ ID NO:510); GGCCAGGAUGGUUCUUAGGU (SEQ ID NO:511); GGAUGGUUCUUAGGUAGGUG (SEQ ID NO:512); ACCGCCCAGACGACUGGCCA (SEQ ID NO:581) and CUACAACUGGGCUGGCGGCC (SEQ ID NO:766). In some instances, the targeting domain is selected from the following group of targeting domains:

(SEQ ID NO: 511)

GGCCAGGAUGGUUCUUAGGU;

(SEQ ID NO: 512)

GGAUGGUUCUUAGGUAGGUG;

(SEQ ID NO: 766)

CUACAACUGGGCUGGCGGCC.

[0091] In some of any such embodiments, the gRNA molecule is a modular gRNA molecule. In some of any such embodiments, the gRNA molecule is a chimeric gRNA molecule. In some embodiments, the gRNA molecule contains from 5′ to 3′: a targeting domain; a first complementarity domain; a linking domain; a second complementarity domain; a proximal domain; and a tail domain. In some embodiments, the gRNA molecule contains a linking domain of no more than 25 nucleotides in length and a proximal and tail domain, that taken together, are at least 20 nucleotides in length.

[0092] Provided herein is a method of making a cell for implantation, including contacting the cell with one or more Cas9 molecule/gRNA molecule complexes, wherein the gRNA molecule(s) in the one or more Cas9 molecule/gRNA molecule complexes contain a targeting domain which is complementary with a target domain from the PDCD1 gene. In some cases, the gRNA molecule(s) contain a targeting domain which is complementary with a target domain from the PDCD1 gene and wherein the gRNA molecule(s) guide the Cas9 molecule to cleave the target domain with an efficiency of cleavage of at least 40%. In some aspects, the efficiency of cleavage is determined using a labeled anti-PDCD1 antibody and a flow cytometry assay.

[0093] In some of any such embodiments, the gRNA molecule(s) are modified at their 5′ end or include a 3′ polyA tail. In some of any such embodiments, the gRNA molecule(s) are modified at their 5′ end and include a 3′ polyA tail. In some embodiments, the gRNA molecule(s) lack a 5′ triphosphate group. In some examples, the gRNA molecule(s) include a 5′ cap. In some cases, the 5′ cap contains a modified guanine nucleotide that is linked to the remainder of the gRNA molecule via a 5′-5′ triphosphate linkage. In some embodiments, the 5′ cap contains two optionally modified guanine nucleotides that are linked via an optionally modified 5′-5′ triphosphate linkage.

[0094] In some of any such embodiments, the 3′ polyA tail contains about 10 to about 30 adenine nucleotides. In some of any such embodiments, the 3′ polyA tail contains about 20 adenine nucleotides. In some cases, the gRNA molecule(s) including the 3′ polyA tail were prepared by in vitro transcription from a DNA template. In some embodiments, the 5′ nucleotide of the targeting domain is a guanine nucleotide, the DNA template includes a T7 promoter sequence located immediately upstream of the sequence that corresponds to the targeting domain, and the 3′ nucleotide of the T7 promoter sequence is not a guanine nucleotide. In some cases, the 5′ nucleotide of the targeting domain is not a guanine nucleotide, the DNA template includes a T7 promoter sequence located immediately upstream of the sequence that corresponds to the targeting domain, and the 3′ nucleotide of the T7 promoter sequence is a guanine nucleotide which is downstream of a nucleotide other than a guanine nucleotide.

[0095] In some of any such embodiments, the one or more Cas9 molecule/gRNA molecule complexes are delivered into the cell via electroporation. In some of any such embodiments, the Cas9 molecule is guided by a single gRNA molecule and cleaves the target domain with a single double stranded break. In some embodiments, the Cas9 molecule is a S. pyogenes Cas9 molecule.

[0096] In some embodiments, the single gRNA molecule contains a targeting domain selected from the following targeting domains: GUCUGGGCGGUGCUACAACU (SEQ ID NO:508); GCCCUGGCCAGUCGUCU (SEQ ID NO:514); CGUCUGGGCGGUGCUACAAC (SEQ ID NO:576); UGUAGCACCGCCCAGACGAC (SEQ ID NO:579); CGACUGGCCAGGGCGCCUGU (SEQ ID NO:582); or CACCUACCUAAGAACCAUCC (SEQ ID NO:723).

[0097] In some of any such embodiments, the Cas9 molecule is a nickase and two Cas9 molecule/gRNA molecule complexes are guided by two different gRNA molecules to cleave the target domain with two single stranded breaks on opposing strands of the target domain.

[0098] In some embodiments, the Cas9 molecule is a S. pyogenes Cas9 molecule having a D10A mutation. In some examples, the two gRNA molecules include targeting domains that are selected from the following pairs of targeting domains: CGACUGGCCAGGGCGCCUGU (SEQ ID NO:582) and GUCUGGGCGGUGCUACAACU (SEQ ID NO:508); CGACUGGCCAGGGCGCCUGU (SEQ ID NO:582) and GGGCGGUGCUACAACUGGGC (SEQ ID NO:510); CGACUGGCCAGGGCGCCUGU (SEQ ID NO:582) and GGCCAGGAUGGUUCUUAGGU (SEQ ID NO:511); CGACUGGCCAGGGCGCCUGU (SEQ ID NO:582) and GGAUGGUUCUUAGGUAGGUG (SEQ ID NO:512); CGACUGGCCAGGGCGCCUGU (SEQ ID NO:582) and CGUCUGGGCGGUGCUACAAC (SEQ ID NO:576); CGACUGGCCAGGGCGCCUGU (SEQ ID NO:582) and CUACAACUGGGCUGGCGGCC (SEQ ID NO:766); UGUAGCACCGCCCAGACGAC (SEQ ID NO:579) and GGCCAGGAUGGUUCUUAGGU (SEQ ID NO:511); UGUAGCACCGCCCAGACGAC (SEQ ID NO:579) and GGAUGGUUCUUAGGUAGGUG (SEQ ID NO:512); or ACCGCCCAGACGACUGGCCA (SEQ ID NO:581) and GGCCAGGAUGGUUCUUAGGU (SEQ ID NO:511).

[0099] In some instances, the S. pyogenes Cas9 molecule has a N863A mutation. In some embodiments, the two gRNA molecules include targeting domains that are selected from the following pairs of targeting domains: CGACUGGCCAGGGCGCCUGU (SEQ ID NO:582) and GUCUGGGCGGUGCUACAACU (SEQ ID NO:508); CGACUGGCCAGGGCGCCUGU (SEQ ID NO:582) and GGGCGGUGCUACAACUGGGC (SEQ ID NO:510); or CGACUGGCCAGGGCGCCUGU (SEQ ID NO:582) and GGCCAGGAUGGUUCUUAGGU (SEQ ID NO:511).

[0100] In some of any such embodiments, the gRNA molecule(s) are modular gRNA molecule(s). In some of any such embodiments, the gRNA molecule(s) are chimeric gRNA molecule(s). In some examples, the gRNA molecule(s) contains from 5′ to 3′: a targeting domain; a first complementarity domain; a linking domain; a second complementarity domain; a proximal domain; and a tail domain. In some instances, the gRNA molecule(s) contain a linking domain of no more than 25 nucleotides in length and a proximal and tail domain, that taken together, are at least 20 nucleotides in length.

[0101] In some of any such embodiments, the gRNA molecule(s) guide the Cas9 molecule to cleave the target domain with an efficiency of cleavage of at least 60%. In some of any such embodiments, the gRNA molecule(s) guide the Cas9 molecule to cleave the target domain with an efficiency of cleavage of at least 80%. In some of any such embodiments, the gRNA molecule(s) guide the Cas9 molecule to cleave the target domain with an efficiency of cleavage of at least 90%.

[0102] In some of any such embodiments, the one or more Cas9 molecule/gRNA molecule complexes produce fewer than 5 off-targets. In some of any such embodiments, the one or more Cas9 molecule/gRNA molecule complexes produce fewer than 2 exonic off-targets. In some aspects, off-targets are identified by GUIDE-seq. In some examples, off-targets are identified by Amp-seq.

### BRIEF DESCRIPTION OF THE DRAWINGS

[0103] The drawings are first briefly described.

[0104] FIG. 1A-1G are representations of several exemplary gRNAs.

[0105] FIG. 1A depicts a modular gRNA molecule derived in part (or modeled on a sequence in part) from Streptococcus pyogenes (S. pyogenes) as a duplexed structure (SEQ ID NO:42 and 43, respectively, in order of appearance);

[0106] FIG. 1B depicts a unimolecular (or chimeric) gRNA molecule derived in part from S. pyogenes as a duplexed structure (SEQ ID NO:44);

[0107] FIG. 1C depicts a unimolecular gRNA molecule derived in part from S. pyogenes as a duplexed structure (SEQ ID NO:45);

[0108] FIG. 1D depicts a unimolecular gRNA molecule derived in part from S. pyogenes as a duplexed structure (SEQ ID NO:46);

[0109] FIG. 1E depicts a unimolecular gRNA molecule derived in part from S. pyogenes as a duplexed structure (SEQ ID NO:47);

[0110] FIG. 1F depicts a modular gRNA molecule derived in part from Streptococcus thermophilus (S. thermophilus) as a duplexed structure (SEQ ID NO:48 and 49, respectively, in order of appearance);

[0111] FIG. 1G depicts an alignment of modular gRNA molecules of S. pyogenes and S. thermophilus (SEQ ID NO:50-53, respectively, in order of appearance).

[0112] FIG. 2A-2G depict an alignment of Cas9 sequences from Chylinski et al. (RNA Biol. 2013; 10(5): 726-737). The N-terminal RuvC-like domain is boxed and indicated with a “y”. The other two RuvC-like domains are boxed and indicated with a “b”. The HNH-like domain is boxed and indicated by a “g”. Sm: S. nutans (SEQ ID NO:1); Sp: S. pyogenes (SEQ ID NO:2); St: S. thermophilus (SEQ ID NO:3); Li: L. innocua (SEQ ID NO:4). Motif: this is a motif based on the four sequences: residues conserved in all four sequences are indicated by single letter amino acid abbreviation; “*” indicates any amino acid found in the corresponding position of any of the four sequences; and “-” indicates any amino acid, e.g., any of the 20 naturally occurring amino acids.

[0113] FIG. 3A-3B show an alignment of the N-terminal RuvC-like domain from the Cas9 molecules disclosed in Chylinski et al (SEQ ID NO:54-103, respectively, in order of appearance). The last line of FIG. 3B identifies 4 highly conserved residues.

[0114] FIG. 4A-4B show an alignment of the N-terminal RuvC-like domain from the Cas9 molecules disclosed in Chylinski et al. with sequence outliers removed (SEQ ID NO:104-177, respectively, in order of appearance). The last line of FIG. 4B identifies 3 highly conserved residues.

[0115] FIG. 5A-5C show an alignment of the HNH-like domain from the Cas9 molecules disclosed in Chylinski et al (SEQ ID NO:178-252, respectively, in order of appearance). The last line of FIG. 5C identifies conserved residues.

[0116] FIG. 6A-6B show an alignment of the HNH-like domain from the Cas9 molecules disclosed in Chylinski et al. with sequence outliers removed (SEQ ID NO:253-302, respectively, in order of appearance). The last line of FIG. 6B identifies 3 highly conserved residues.

[0117] FIG. 7A-7B depict an alignment of Cas9 sequences from S. pyogenes and Neisseria meningitidis (N. meningitidis). The N-terminal RuvC-like domain is boxed and indicated with a “Y”. The other two RuvC-like domains are boxed and indicated with a “B”. The HNH-like domain is boxed and indicated with a “G”. Sp: S. pyogenes; Nm: N. meningitidis. Motif: this is a motif based on the two sequences: residues conserved in both sequences are indicated by a single amino acid designation; “*” indicates any amino acid found in the corresponding position of any of the two sequences; “-” indicates any amino acid, e.g., any of the 20 naturally occurring amino acids, and “-” indicates any amino acid, e.g., any of the 20 naturally occurring amino acids, or absent.

[0118] FIG. 8 shows a nucleic acid sequence encoding Cas9 of N. meningitidis (SEQ ID NO:303). Sequence indicated by an “R” is an SV40 NLS; sequence indicated as “G” is an HA tag; and sequence indicated by an “O” is a synthetic NLS sequence; the remaining (unmarked) sequence is the open reading frame (ORF).

[0119] FIG. 9A shows schematic representations of the domain organization of S. pyogenes Cas9 and the organization of the Cas9 domains, including amino acid positions, in reference to the two lobes of Cas9 (recognition (REC) and nuclease (NUC) lobes).

[0120] FIG. 9B shows schematic representations of the domain organization of S. pyogenes Cas9 and the percent homology of each domain across 83 Cas9 orthologs.

[0121] FIG. 10A shows an exemplary structure of a unimolecular gRNA molecule derived in part from S. pyogenes as a duplexed structure (SEQ ID NO:40).

[0122] FIG. 10B shows an exemplary structure of a unimolecular gRNA molecule derived in part from S. aureus as a duplexed structure (SEQ ID NO:41).

[0123] FIG. 11 shows results from an experiment assessing the activity of gRNAs directed against TRBC gene in 293 cells using S. aureus Cas9. 293s were transfected with two plasmids—one encoding S. aureus Cas9 and the other encoding the listed gRNA. The graph summarizes the average % NHEJ observed at the TRBC2 locus for each gRNA, which was calculated from a T7E1 assay performed on genomic DNA isolated from duplicate samples.

[0124] FIG. 12 shows results from an experiment assessing the activity of gRNAs directed against TRBC gene in 293 cells using S. pyrogenes Cas9. 293 cells were transfected with two plasmids—one encoding S. pyogenes Cas9 and the other encoding the listed gRNA. The graph shows the average % NHEJ observed at both the TRBC1 and TRBC2 loci for each gRNA, which was calculated from a T7E1 assay performed on genomic DNA isolated from duplicate samples.

[0125] FIG. 13 shows results from an experiment assessing the activity of gRNAs directed against TRAC gene in 293 cells using S. aureus Cas9. 293 cells were transfected with two plasmids—one encoding S. aureus Cas9 and the other encoding the listed gRNA. The graph shows the average % NHEJ observed at the TRAC locus for each gRNA, which was calculated from a T7E1 assay performed on genomic DNA isolated from duplicate samples.

[0126] FIG. 14 shows results from an experiment assessing the activity of gRNAs directed against TRAC gene in 293 cells using S. pyogenes Cas9. 293 cells were transfected with two plasmids—one encoding S. pyogenes Cas9 and the other encoding the listed gRNA. The graph shows the average % NHEJ observed at the TRAC locus for each gRNA, which was calculated from a T7E1 assay performed on genomic DNA isolated from duplicate samples.

[0127] FIG. 15 shows results from an experiment assessing the activity of gRNAs directed against PDCD1 gene in 293 cells using S. aureus Cas9. 293 cells were transfected with two plasmids—one encoding S. aureus Cas9 and the other encoding the listed gRNA. The graph shows the average % NHEJ observed at the PDCD1 locus for each gRNA, which was calculated from a T7E1 assay performed on genomic DNA isolated from duplicate samples.

[0128] FIG. 16 shows results from an experiment assessing the activity of gRNAs directed against PDCD1 gene in 293 cells using S. pyogenes Cas9. 293 cells were transfected with two plasmids—one encoding S. pyogenes Cas9 and the other encoding the listed gRNA. The graph shows the average % NHEJ observed at the PDCD1 locus for each gRNA, which was calculated from a T7E1 assay performed on genomic DNA isolated from duplicate samples.

[0129] FIG. 17A-C depict results showing a loss of CD3 expression in CD4+ T cells due to delivery of S. pyogenes Cas9 mRNA and TRBC and TRAC gene specific gRNAs

[0130] FIG. 17A shows CD4+ T cells electroporated with S. pyogenes Cas9 mRNA and the gRNA indicated (TRBC-210 (GCGCUGACGAUCUGGGUGAC) (SEQ ID NO:413), TRAC-4 (GCUGGUACACGGCAGGGUCA) (SEQ ID NO:453) or AAVS1 (GUCCCCUCCACCCCACAGUG) (SEQ ID NO:51201)) and stained with an APC-CD3 antibody and analyzed by FACS. The cells were analyzed on day 2 and day 3 after the electroporation.

[0131] FIG. 17B shows quantification of the CD3 negative population from the plots in (A).

[0132] FIG. 17C shows % NHEJ results from the T7E1 assay performed on TRBC2 and TRAC loci.

[0133] FIG. 18A-C depict results showing a loss of CD3 expression in Jurkat T cells due to delivery of S. aureus Cas9/gRNA RNP targeting TRAC gene

[0134] FIG. 18A shows Jurkat T cells electroporated with S. aureus Cas9/gRNA TRAC-233 (GUGAAUAGGCAGACAGACUUGUCA) (SEQ ID NO:474) RNPs targeting TRAC gene and stained with an APC-CD3 antibody and analyzed by FACS. The cells were analyzed on day 1, day 2 and day 3 after the electroporation.

[0135] FIG. 18B shows quantification of the CD3 negative population from the plots in (A).

[0136] FIG. 18C shows % NHEJ results from the T7E1 assay performed on the TRAC locus.

[0137] FIG. 19 shows the structure of the 5′ ARCA cap.

[0138] FIG. 20 depicts results from the quantification of live Jurkat T cells post electroporation with Cas9 mRNA and AAVS1 gRNAs. Jurkat T cells were electroporated with S. pyogenes Cas9 mRNA and the respective modified gRNA. 24 hours after electroporation, 1×10⁵ cells were stained with FITC-conjugated Annexin-V specific antibody for 15 minutes at room temperature followed by staining with propidium iodide immediately before analysis by flow cytometry. The percentage of cells that did not stain for either Annexin-V or PI is presented in the bar graph.

[0139] FIG. 21A-C depict loss of CD3 expression in Naive CD3+ T cells due to delivery of S. aureus Cas9/gRNA RNP targeting TRAC.

[0140] FIG. 21A depicts naïve CD3+ T cells electroporated with S. aureus Cas9/gRNA (with targeting domain GUGAAUAGGCAGACAGACUUGUCA (SEQ ID NO:474) RNPs targeting TRAC were stained with an APC-CD3 antibody and analyzed by FACS. The cells were analyzed on day 4 after the electroporation. The negative control are cells with the gRNA with the targeting domain GUGAAUAGGCAGACAGACUUGUCA (SEQ ID NO:474) without a functional Cas9.

[0141] FIG. 21B depicts quantification of the CD3 negative population from the plots in FIG. 21A.

[0142] FIG. 21C depicts % NHEJ results from the T7E1 assay performed on the TRAC locus.

[0143] FIG. 22 depicts genomic editing at the PDCD1 locus in Jurkat T cells after delivery of S. pyogenes Cas9 mRNA and PDCD1 gRNA (with a targeting domain GUCUGGGCGGUGCUACAACU (SEQ ID NO:508)) or S. pyogenes Cas9/gRNA (with a targeting domain GUCUGGGCGGUGCUACAACU (SEQ ID NO:508)) RNP targeting PDCD1. Quantification of % NHEJ results from the T7E1 assay performed on the PDCD1 locus at 24, 48, and 72 hours. Higher levels of % NHEJ were detected with RNP vs mRNA delivery using the exemplary target gRNA (SEQ ID NO:508) claimed).

[0144] FIG. 23 depicts percentage of cells negative for PD-1 surface expression following electroporation of primary T cells with Cas9/gRNA RNP comprising different labeled gRNAs targeting the PDCD1 locus.

[0145] FIG. 24A depicts genomic editing at the PDCD1 locus in activated primary T cells after delivery of an S. pyogenes Cas9/gRNA RNP targeting PDCD1. Primary CD4 T cells isolated from multiple healthy donors were treated with the same RNP and PDCD1 expression was assessed by flow cytometry after reactivation. The average of the percentage of PDCD1 negative cells from multiple experiments is plotted and the standard deviation is depicted by the error bars.

[0146] FIG. 24B depicts surface expression of CD4 and PD-1 in primary CD4+ T cells following electroporation with Cas9/gRNA RNP comprising different labeled gRNAs targeting the PDCD1 locus or control AAVS1 locus.

[0147] FIG. 25 depicts surface expression of CD45RA and CD62L in primary CD8+ T cells following electroporation with Cas9/gRNA RNP comprising different labeled gRNAs targeting the PDCD1 locus or control AAVS1 locus.

[0148] FIG. 126 depicts surface expression of PD-1 and a surrogate marker (EGFRt) for anti-CD19 chimeric antigen receptor (CAR) expression on CD8+ or CD4+ T cells transduced with anti-CD19 CAR or mock transduction control (mock), following electroporation with Cas9/gRNA RNP targeting PDCD1 locus (PD-1KO), Cas9/gRNA RNP targeting AAVS1 control (AAVS1-KO) or untreated control.

[0149] FIGS. 27A and 27B show mean fluorescence intensity (MFI) of T cell surface marker expression of CD8+(FIG. 27A) or CD4+(FIG. 27B) T cells transduced with anti-CD19 CAR (CAR) or mock transduction control (mock) following electroporation with Cas9/gRNA RNP targeting PDCD1 locus (PD-1KO) or Cas9/gRNA RNP targeting AAVS1 control (AAVS1-KO). The MFI of surface markers CD45RA, CD69, 41BB, CCR7, CD27, CD25, CD62L, TIM3 are and CD45RO are depicted.

[0150] FIG. 28A depicts the percentage of cells containing an indel at the PDCD1 locus in T cells transduced with anti-CD19 CAR (CAR+) or mock transduction control (mock) following electroporation with Cas9/gRNA RNP targeting PDCD1 locus (PD-1KO) or Cas9/gRNA RNP targeting AAVS1 control (AAVS1-KO). FIG. 28B depicts the relative number of reads from MiSeq sequencing analysis that contained a deletion or an insertion at each position relative to the PDCD1 gRNA used. The position of the guide RNA is depicted as a thick vertical line around position 60 on the x-axis.

[0151] FIG. 29 shows T cell proliferation of primary CD8+ and CD4+ T cells that were transduced with anti-CD19 CAR (CAR+) or mock transduction control (mock) and electroporated with Cas9/gRNA RNP targeting PDCD1 locus or Cas9/gRNA RNP targeting AAVS1 control. T cell proliferation was assessed after co-culture with CD19-expressing cells or ROR-1-expressing control cells as measured using CellTrace™ Violet.

[0152] FIG. 30A-C depicts cytokine secretion in cell supernatants of primary T-cells transduced with anti-CD19 CAR (CAR+) or mock transduction control (mock) and electroporated with Cas9/gRNA RNP targeting PDCD1 locus or Cas9/gRNA RNP targeting AAVS1 control following co-culture with CD19-expressing cells or ROR-1-expressing control cells. FIG. 30A depicts IFN-γ in cell supernatants. FIG. 30B depicts interleukin-2 (IL-2) secretion in cell supernatants. FIG. 30C depicts tumor necrosis factor alpha (TNF-α) secretion in cell supernatants.

[0153] FIG. 31 depicts activated CD4 T cells treated with pairs of either S. pyogenes D10A or N863A nickase RNPs. After restimulation with PMA/IO, the expression of PDCD1 was assessed by flow cytometry using a PE-conjugated anti-PDCD1 antibody. The percentage of PDCD1 negative cells is graphed with the error bars referring to the standard deviation of duplicate samples. Samples 25 and 26 are D10A and N863A with a single gRNA which served as negative controls while sample 27 is wild type Cas9 with a single gRNA which served as a positive control.

### DETAILED DESCRIPTION

### I. Targeting Pd-1 Knockout in Cells Expressing a Recombinant Receptor

[0154] Provided are cells and cell compositions, including immune cells such as T cells and NK cells, that express a recombinant receptor, such as a transgenic or engineered T cell receptor (TCR) and/or a chimeric antigen receptor (CAR). The cells generally are engineered by introducing one or more nucleic acid molecules encoding such recombinant receptors or product thereof. Among such recombinant receptors are genetically engineered antigen receptors, including engineered TCRs and functional non-TCR antigen receptors, such as chimeric antigen receptors (CARs), including activating, stimulatory, and costimulatory CARs, and combinations thereof. The provided cells also have a genetic disruption of a PDCD1 gene encoding a programmed death-1(PD-1) polypeptide. Also provided are methods of producing such genetically engineered cells. In some embodiments, the cells and compositions can be used in adoptive cell therapy, e.g. adoptive immunotherapy.

[0155] In some embodiments, the provided cells, compositions and methods alter or reduce the effects of T cell inhibitory pathways or signals involving the inhibitory interactions between programmed death-1 (PD-1) and its ligand PD-L1. In some embodiments, the upregulation and/or expression of either one or both of a costimulatory inhibitory receptor or its ligand can negatively control T cell activation and T cell function. PD-1 (an exemplary amino acid and encoding nucleic acid sequence set forth in SEQ ID NO:51207 and 51208, respectively) is an immune inhibitory receptor that belongs to the B7:CD28 costimulatory molecular family and reacts with its ligands PD-L1 and PD-L2 to inhibit T cell function. PD-L1 (an exemplary amino acid and encoding nucleic acid sequence set forth in SEQ ID NO: 51209 and 51210, respectively; see also GenBank Acc. No. AF233516) is primarily reported to be expressed on antigen presenting cells or cancer cells where it interacts with T-cell expressed PD-1 to inhibit the activation of the T cell. In some cases, PD-L1 also has been reported to be expressed on T cells. In some cases, interaction of PD-1 and PD-L1 suppresses activity of cytotoxic T cells and, in some aspects, can inhibit tumor immunity to provide an immune escape for tumor cells. In some embodiments, expression of PD-1 and PD-L1 on T cells and/or in the tumor microenvironment can reduce the potency and efficacy of adoptive T cell therapy.

[0156] Thus, in some embodiments, such inhibitory pathways may otherwise impair certain desirable effector functions in the context of adoptive cell therapy. Tumor cells and/or cells in the tumor microenvironment often upregulate ligands for PD-1 (such as PD-L1 and PD-L2), which in turn leads to ligation of PD-1 on tumor-specific T cells expressing PD-1, delivering an inhibitory signal. PD-1 also often is upregulated on T cells in the tumor microenvironment, e.g., on tumor-infiltrating T cells, which can occur following signaling through the antigen receptor or certain other activating signals.

[0157] In some cases, such events may contribute to genetically engineered (e.g., CAR+) T cells acquiring an exhausted phenotype, such as when present in proximity with other cells that express PD-L1, which in turn can lead to reduced functionality. Exhaustion of T cells may lead to a progressive loss of T cell functions and/or in depletion of the cells (Yi et al. (2010) Immunology, 129:474-481). T cell exhaustion and/or the lack of T cell persistence is a barrier to the efficacy and therapeutic outcomes of adoptive cell therapy; clinical trials have revealed a correlation between greater and/or longer degree of exposure to the antigen receptor (e.g. CAR)-expressing cells and treatment outcomes.

[0158] Certain methods have been aimed at blocking PD-1 signaling or disrupting PD-1 expression in T cells, including in the context of cancer therapy. Such blockade or disruption may be through the administration of blocking antibodies, small molecules, or inhibitory peptides, or through the knockout or reduction of expression of PD-1 in T cells, e.g., in adoptively transferred T cells. The disruption of PD-1 in transferred T cells, however, may not be entirely satisfactory. In some cases, the disruption of the gene encoding PD-1 may not be permanent such that elimination of PD-1 expression on the surface of the cell may be only temporary. In other aspects, the efficiency of genetic disruption in cells is not sufficiently high such that a relatively high number of cells targeted for disruption retain expression of a targeted gene. In some cases, certain disruption methods, such as using CRISPR/Cas9 can lead to off-target effects due to limited cleavage specificity that may lead to non-specific disruption of a non-target gene or genes. In some cases, such problems can limit the efficacy of engineered cells into which disruption of a gene (e.g. PD-1) is desired.

[0159] In some embodiments, the provided cells, compositions and methods result in the reduction, deletion, elimination, knockout or disruption in expression of PDCD1 in immune cells (e.g. T cells). In some aspects, the disruption is carried out by gene editing, such as using an RNA-guided nuclease such as a clustered regularly interspersed short palindromic nucleic acid (CRISPR)-Cas system, such as CRISPR-Cas9 system, specific for the PD-1 gene (PDCD1) being disrupted. In some embodiments, an agent containing a Cas9 and a guide RNA (gRNA) containing a targeting domain, which targets a region of the PDCD1 locus, is introduced into the cell. In some embodiments, the agent is or comprises a ribonucleoprotein (RNP) complex of Cas9 and gRNA containing the PDCD1-targeted targeting domain (Cas9/gRNA RNP). In some embodiment, the introduction includes contacting the agent or portion thereof with the cells, in vitro, which can include cultivating or incubating the cell and agent for up to 24, 36 or 48 hours or 3, 4, 5, 6, 7, or 8 days. In some embodiments, the introduction further can include effecting delivery of the agent into the cells. In various embodiments, the methods, compositions and cells according to the present disclosure utilize direct delivery of ribonucleoprotein (RNP) complexes of Cas9 and gRNA to cells, for example by electroporation. In some embodiments, the RNP complexes include a gRNA that has been modified to include a 3′ poly-A tail and a 5′ Anti-Reverse Cap Analog (ARCA) cap. In some cases, electroporation of the cells to be modified includes cold-shocking the cells, e.g. at 32° C. following electroporation of the cells and prior to plating.

[0160] In some embodiments, prior to, during or subsequent to contacting the agent with the cells and/or prior to, during or subsequent to effecting delivery (e.g. electroporation), the provided methods include incubating the cells in the presence of a cytokine, a stimulating agent and/or an agent that is capable of inducing proliferation of the immune cells (e.g. T cells). In some embodiments, at least a portion of the incubation is in the presence of a stimulating agent that is or comprises an antibody specific for CD3 an antibody specific for CD28 and/or a cytokine. In some embodiments, at least a portion of the incubation is in the presence of a cytokine, such as one or more of IL-2, IL-7 and IL-15. In some embodiments, the incubation is for up to 8 days hours before or after the electroporation, such as up to 24 hours, 36 hours or 48 hours or 3, 4, 5, 6, 7 or 8 days. In some embodiments, the incubation in the presence of a stimulating agent (e.g. anti-CD3/anti-CD28) and/or a cytokine (e.g. IL-2, IL-7 and/or IL-15) is for up to 24 hours, 25 hours or 48 hours prior to the electroporation.

[0161] In some aspects, the provided compositions and methods include those in which at least or greater than about 50%, 60%, 65%, 70%. 75%, 80%, 85%, 90% or 95% of cells in a composition of cells into which an agent (e.g. gRNA/Cas9) for knockout or genetic disruption of a PDCD1 gene was introduced contain the genetic disruption; do not express the endogenous PD-1 polypeptide; do not contain a contiguous PDCD1 gene, a PDCD1 gene, and/or a functional PDCD1 gene. In some embodiments, the methods, compositions and cells according to the present disclosure include those in which at least or greater than about 50%, 60%, 65%, 70%. 75%, 80%, 85%, 90% or 95% of cells in a composition of cells into which an agent (e.g. gRNA/Cas9) for knockout or genetic disruption of a PDCD1 gene was introduced do not express a PD-1 polypeptide, such as on the surface of the cells. In some embodiments, at least or greater than about 50%, 60%, 65%, 70%. 75%, 80%, 85%, 90% or 95% of cells in a composition of cells into which an agent (e.g. gRNA/Cas9) for knockout or genetic disruption of a PDCD1 gene was introduced are knocked out in both alleles, i.e. comprise a biallelic deletion, in such percentage of cells.

[0162] In some embodiments, provided are compositions and methods in which the Cas9-mediated cleavage efficiency (% indel) in or near the PDCD1 gene (e.g. within or about within 100 base pairs, within or about within 50 base pairs, or within or about within 25 base pairs or within or about within 10 base pairs upstream or downstream of the cut site) is at least or greater than about 50%, 60%, 65%, 70%, 75%, 80%, 85%, 90% or 95% in cells of a composition of cells into which an agent (e.g. gRNA/Cas9) for knockout or genetic disruption of a PDCD1 gene has been introduced. In some embodiments, the provided cells, compositions and methods results in a reduction or disruption of signals delivered via the immune checkpoint molecule PD-1 in at least or greater than about 50%, 60%, 65%, 70%, 75%, 80%, 85%, 90% or 95% of cells in a composition of cells into which an agent (e.g. gRNA/Cas9) for knockout or genetic disruption of a PDCD1 gene was introduced.

[0163] In some embodiments, compositions according to the provided disclosure that comprise cells engineered with a recombinant receptor and comprise the reduction, deletion, elimination, knockout or disruption in expression of PD-1 (e.g. genetic disruption of a PDCD1 gene) retain the functional property or activities of the recombinant receptor (e.g. CAR) compared to the recombinant receptor expressed in engineered cells of a corresponding or reference composition in which such are engineered with the recombinant receptor but do not comprise the genetic disruption of a PDCD1 gene or express the PD-1 polypeptide when assessed under the same conditions. In some embodiments, the recombinant receptor (e.g. CAR) retains specific binding to the antigen. In some embodiments, the recombinant receptor (e.g. CAR) retains activating or stimulating activity, upon antigen binding, to induce cytotoxicity, proliferation, survival or cytokine secretion in cells. In some embodiments, the engineered cells of the provided compositions retain a functional property or activity compared to a corresponding or reference composition comprising engineered cells in which such are engineered with the recombinant receptor but do not comprise the genetic disruption of a PDCD1 gene or express the PD-1 polypeptide when assessed under the same conditions. In some embodiments, the cells retain cytotoxicity, proliferation, survival or cytokine secretion compared to such a corresponding or reference composition.

[0164] In some embodiments, the cells in the composition retain a phenotype of the immune cell or cells compared to the phenotype of cells in a corresponding or reference composition when assessed under the same conditions. In some embodiments, cells in the composition include naïve cells, effector memory cells, central memory cells, stem central memory cells, effector memory cells, and long-lived effector memory cells. In some embodiments, the percentage of T cells, or T cells expressing the recombinant receptor (e.g. CAR), and comprising the genetic disruption of a PDCD1 gene exhibit a non-activated, long-lived memory or central memory phenotype that is the same or substantially the same as a corresponding or reference population or composition of cells engineered with the recombinant receptor but not containing the genetic disruption or expressing the PD-1 polypeptide. In some embodiments, the provided composition comprises T cells comprising the recombinant receptor (e.g. CAR) and one or more phenotypic markers selected from CCR7+, 4-1BB+(CD137+), TIM3+, CD27+, CD62L+, CD127+, CD45RA+, CD45RO−, t-bet1^{low}, IL-7Ra+, CD95+, IL-2Rβ+, CXCR3+ or LFA-1+.

[0165] In some embodiments, such property, activity or phenotype can be measured in an in vitro assay, such as by incubation of the cells in the presence of the antigen, a cell expressing the antigen and/or an antigen-receptor activating substance. In some embodiments, the incubation is at or about 37° C.±2° C. In some embodiments, the incubation can be for up to or up to about 12, 24, 36, 48 or 60 hours, and optionally can be in the presence of one or more cytokines (e.g. IL-2, IL-15 and/or IL-17). In some embodiments, any of the assessed activities, properties or phenotypes can be assessed at various days following electroporation or other introduction of the agent, such as after or up to3, 4, 5, 6, 7 days. In some embodiments, such activity, property or phenotype is retained by at least 80%, 85%, 90%, 95% or 100% of the cells in the composition compared to the activity of a corresponding composition containing cells engineered with the recombinant receptor but not comprising the genetic disruption of a PDCD1 gene when assessed under the same conditions.

[0166] As used herein, reference to a “corresponding composition” or a “corresponding population of cells” (also called a “reference composition” or a “reference population of cells”) refers to T cells or cells obtained, isolated, generated, produced and/or incubated under the same or substantially the same conditions, except that the T cells or population of T cells were not introduced with the agent. In some aspects, except for not containing introduction of the agent, such cells or T cells are treated identically or substantially identically as T cells or cells that have been introduced with the agent, such that any one or more conditions that can influence the activity or properties of the cell, including the upregulation or expression of the inhibitory molecule, is not varied or not substantially varied between the cells other than the introduction of the agent. For example, for purposes of assessing reduction in expression and/or inhibition of upregulation of one or more inhibitory molecules (e.g. PD-1), T cells containing introduction of the agent and T cells not containing introduction of the agent are incubated under the same conditions known to lead to expression and or upregulation of the one or more inhibitory molecule in T cells.

[0167] Methods and techniques for assessing the expression and/or levels of T cell markers, including inhibitory molecules, such as PD-1, are known in the art. Antibodies and reagents for detection of such markers are well known in the art, and readily available. Assays and methods for detecting such markers include, but are not limited to, flow cytometry, including intracellular flow cytometry, ELISA, ELISPOT, cytometric bead array or other multiplex methods, Western Blot and other immunoaffinity-based methods. In some embodiments, antigen receptor (e.g. CAR)-expressing cells can be detected by flow cytometry or other immunoaffinity based method for expression of a marker unique to such cells, and then such cells can be co-stained for another T cell surface marker or markers, such as an inhibitory molecule (e.g. PD-1). In some embodiments, T cells expressing an antigen receptor (e.g. CAR) can be generated to contain a truncated EGFR (EGFRt) as a non-immunogenic selection epitope, which then can be used as a marker to detect the such cells (see e.g. U.S. Pat. No. 8,802,374).

[0168] In some embodiments, the cells, compositions and methods provide for the deletion, knockout, disruption, or reduction in expression of PD-1 in immune cells (e.g. T cells) to be adoptively transferred (such as cells engineered to express a CAR or transgenic TCR). In some embodiments, the methods are performed ex vivo on primary cells, such as primary immune cells (e.g. T cells) from a subject. In some aspects, methods of producing or generating such genetically engineered T cells include introducing into a population of cells containing immune cells (e.g. T cells) one or more nucleic acid encoding a recombinant receptor (e.g. CAR) and an agent or agents that is capable of disrupting, a gene that encode the immune inhibitory molecule PD-1.

[0169] As used herein, the term “introducing” encompasses a variety of methods of introducing DNA into a cell, either in vitro or in vivo, such methods including transformation, transduction, transfection (e.g. electroporation), and infection. Vectors are useful for introducing DNA encoding molecules into cells. Possible vectors include plasmid vectors and viral vectors. Viral vectors include retroviral vectors, lentiviral vectors, or other vectors such as adenoviral vectors or adeno-associated vectors.

[0170] The population of cells containing T cells can be cells that have been obtained from a subject, such as obtained from a peripheral blood mononuclear cells (PBMC) sample, an unfractionated T cell sample, a lymphocyte sample, a white blood cell sample, an apheresis product, or a leukapheresis product. In some embodiments, T cells can be separated or selected to enrich T cells in the population using positive or negative selection and enrichment methods. In some embodiments, the population contains CD4+, CD8+ or CD4+ and CD8+ T cells. In some embodiments, the step of introducing the nucleic acid encoding a genetically engineered antigen receptor and the step of introducing the agent (e.g. Cas9/gRNA RNP) can occur simultaneously or sequentially in any order. In some embodiments, subsequent to introduction of the genetically engineered antigen receptor (e.g. CAR) and one or more agents (e.g. Cas9/gRNA RNP), the cells are cultured or incubated under conditions to stimulate expansion and/or proliferation of cells.

[0171] Thus, provided are cells, compositions and methods that enhance immune cell, such as T cell, function in adoptive cell therapy, including those offering improved efficacy, such as by increasing activity and potency of administered genetically engineered (e.g. CAR+) cells, while maintaining persistence or exposure to the transferred cells over time. In some embodiments, the genetically engineered cells, such as CAR-expressing T cells, exhibit increased expansion and/or persistence when administered in vivo to a subject, as compared to certain available methods.

[0172] In some embodiments, the provided compositions containing recombinant receptor-expressing cells, such as CAR-expressing cells, exhibit increased persistence when administered in vivo to a subject. In some embodiments, the persistence of genetically engineered cells, such as CAR-expressing T cells, in the subject upon administration is greater as compared to that which would be achieved by alternative methods, such as those involving administration of cells genetically engineered by methods in which T cells were not introduced with an agent that reduces expression of or disrupts a gene encoding PD-1. In some embodiments, the persistence is increased at least or about at least 1.5-fold, 2-fold, 3-fold, 4-fold, 5-fold, 6-fold, 7-fold, 8-fold, 9-fold, 10-fold, 20-fold, 30-fold, 50-fold, 60-fold, 70-fold, 80-fold, 90-fold, 100-fold or more.

[0173] In some embodiments, the degree or extent of persistence of administered cells can be detected or quantified after administration to a subject. For example, in some aspects, quantitative PCR (qPCR) is used to assess the quantity of cells expressing the recombinant receptor (e.g., CAR-expressing cells) in the blood or serum or organ or tissue (e.g., disease site) of the subject. In some aspects, persistence is quantified as copies of DNA or plasmid encoding the receptor, e.g., CAR, per microgram of DNA, or as the number of receptor-expressing, e.g., CAR-expressing, cells per microliter of the sample, e.g., of blood or serum, or per total number of peripheral blood mononuclear cells (PBMCs) or white blood cells or T cells per microliter of the sample. In some embodiments, flow cytometric assays detecting cells expressing the receptor generally using antibodies specific for the receptors also can be performed. Cell-based assays may also be used to detect the number or percentage of functional cells, such as cells capable of binding to and/or neutralizing and/or inducing responses, e.g., cytotoxic responses, against cells of the disease or condition or expressing the antigen recognized by the receptor. In any of such embodiments, the extent or level of expression of another marker associated with the recombinant receptor (e.g. CAR-expressing cells) can be used to distinguish the administered cells from endogenous cells in a subject.

[0174] Also provided are methods and uses of the cells, such as in adoptive therapy in the treatment of cancers. Also provided are methods for engineering, preparing, and producing the cells, compositions containing the cells, and kits and devices containing and for using, producing and administering the cells. Also provided are methods, compounds, and compositions for producing the engineered cells. Provided are methods for cell isolation, genetic engineering and gene disruption. Provided are nucleic acids, such as constructs, e.g., viral vectors encoding the genetically engineered antigen receptors and/or encoding an agent for effecting disruption, and methods for introducing such nucleic acids into the cells, such as by transduction. Also provided are compositions containing the engineered cells, and methods, kits, and devices for administering the cells and compositions to subjects, such as for adoptive cell therapy. In some aspects, the cells are isolated from a subject, engineered, and administered to the same subject. In other aspects, they are isolated from one subject, engineered, and administered to another subject.

### II. Genetically Engineered Cells and Methods of Producing Cells Expressing a Recombinant Receptor

[0175] Provided are cells for adoptive cell therapy, e.g., adoptive immunotherapy, and method for producing or generating the cells. The cells include immune cells such as T cells. The cells generally are engineered by introducing one or more genetically engineered nucleic acid or product thereof. Among such products are genetically engineered antigen receptors, including engineered T cell receptors (TCRs) and functional non-TCR antigen receptors, such as chimeric antigen receptors (CARs), including activating, stimulatory, and costimulatory CARs, and combinations thereof. In some embodiments, the cells also are introduced, either simultaneously or sequentially with the nucleic acid encoding the genetically engineered antigen receptor, with an agent (e.g. Cas9/gRNA RNP) that is capable of disrupting a gene encoding the immune inhibitory molecule PD-1.

[0176] In some embodiments, the cells (e.g. T cells) can be incubated or cultivated prior to, during and/or subsequent to introducing the nucleic acid molecule encoding the recombinant receptor and/or the agent (e.g. Cas9/gRNA RNP). In some embodiments, the cells (e.g. T cells) can be incubated or cultivated prior to, during or subsequent to the introduction of the nucleic acid molecule encoding the recombinant receptor, such as prior to, during or subsequent to the transduction of the cells with a viral vector (e.g. lentiviral vector) encoding the recombinant receptor. In some embodiments, the cells (e.g. T cells) can be incubated or cultivated prior to, during or subsequent to the introduction of the agent (e.g. Cas9/gRNA RNP), such as prior to, during or subsequent to contacting the cells with the agent or prior to, during or subsequent to delivering the agent into the cells, e.g. via electroporation. In some embodiments, the incubation can be both in the context of introducing the nucleic acid molecule encoding the recombinant receptor and introducing the agent, e.g. Cas9/gRNA RNP. In some embodiments, the incubation can be in the presence of a cytokine, such as IL-2, IL-7 or IL-15, or in the presence of a stimulating or activating agents that induces the proliferation or activation of cells, such as an anti-CD3/anti-CD28 antibodies.

[0177] In some embodiments, the method includes activating or stimulating cells with a stimulating or activating agent (e.g. anti-CD3/anti-CD28 antibodies) prior to introducing the nucleic acid molecule encoding the recombinant receptor and the agent, e.g. Cas9/gRNA RNP. In some embodiments, incubation also can be performed in the presence of a cytokine, such as IL-2 (e.g. 1 U/ML to 500 U/mL, such as 10 U/mL to 200 U/mL, for example at least or about 50 U/mL or 100 U/mL), IL-7 (e.g. 0.5 ng/mL to 50 ng/mL, such as 1 ng/mL to 20 ng/mL, for example, at least or about 5 ng/mL or 10 ng/mL) or IL-15 (e.g. 0.1 ng/mL to 50 ng/mL, such as 0.5 ng/mL to 25 ng/mL, for example, at least or about 1 ng/mL or 5 ng/mL). In some embodiment, the cells are incubated for 6 hours to 96 hours, such as 24-48 hours or 24-36 hours prior to introducing the nucleic acid molecule encoding the recombinant receptor (e.g. via transduction).

[0178] In some embodiments, the introducing the agent, e.g. Cas9/gRNA RNP, is after introducing the nucleic acid molecule encoding the recombinant receptor. In some embodiments, prior to the introducing of the agent, the cells are rested, e.g. by removal of any stimulating or activating agent. In some embodiments, prior to introducing the agent, the stimulating or activating agent and/or cytokines are not removed.

[0179] In some embodiments, subsequent to the introduction of the nucleic acid molecule and/or the introducing of the agent, e.g. Cas9/gRNA, the cells are incubated, cultivated or cultured in the presence of a cytokine, such as IL-2 (e.g. 1 U/ML to 500 U/mL, such as 1 U/mL to 100 U/mL, for example at least or about 25 U/mL or 50 U/mL), IL-7 (e.g. 0.5 ng/mL to 50 ng/mL, such as 1 ng/mL to 20 ng/mL, for example, at least or about 1 ng/mL or 5 ng/mL) or IL-15 (e.g. 0.1 ng/mL to 50 ng/mL, such as 0.1 ng/mL to 10 ng/mL, for example, at least or about 0.1 ng/mL, 0.5 ng/mL or 1 ng/mL).

[0180] In some embodiments, the incubation during any portion of the process or all of the process can be at a temperature of 30° C.±2° C. to 39° C.±2° C., such as at least or about at least 30° C.±2° C., 32° C.±2° C., 34° C.±2° C. or 37° C.±2° C. In some embodiments, at least a portion of the incubation is at 30° C.±2° C. and at least a portion of the incubation is at 37° C.±2° C.

[0181] A. Cells and Preparation of Cells for Genetic Engineering

[0182] Recombinant receptors that bind to a specific antigen and agents ((e.g. Cas9/gRNA RNP) for gene editing of a PDCD1 gene encoding a PD-1 polypeptide can be introduced into a wide variety of cells. In some embodiments, a recombinant receptor is engineered and/or the PDCD1 target gene is manipulated ex vivo and the resulting genetically engineered cells are administered to a subject. Sources of target cells for ex vivo manipulation may include, e.g., the subject's blood, the subject's cord blood, or the subject's bone marrow. Sources of target cells for ex vivo manipulation may also include, e.g., heterologous donor blood, cord blood, or bone marrow.

[0183] In some embodiments, the cells, e.g., engineered cells, are eukaryotic cells, such as mammalian cells, e.g., human cells. In some embodiments, the cells are derived from the blood, bone marrow, lymph, or lymphoid organs, are cells of the immune system, such as cells of the innate or adaptive immunity, e.g., myeloid or lymphoid cells, including lymphocytes, typically T cells and/or NK cells. Other exemplary cells include stem cells, such as multipotent and pluripotent stem cells, including induced pluripotent stem cells (iPSCs). In some aspects, the cells are human cells. With reference to the subject to be treated, the cells may be allogeneic and/or autologous. The cells typically are primary cells, such as those isolated directly from a subject and/or isolated from a subject and frozen.

[0184] In some embodiments, the target cell is a T cell, e.g., a CD8+ T cell (e.g., a CD8+ naïve T cell, central memory T cell, or effector memory T cell), a CD4+ T cell, a natural killer T cell (NKT cells), a regulatory T cell (Treg), a stem cell memory T cell, a lymphoid progenitor cell a hematopoietic stem cell, a natural killer cell (NK cell) or a dendritic cell. In some embodiments, the cells are monocytes or granulocytes, e.g., myeloid cells, macrophages, neutrophils, dendritic cells, mast cells, eosinophils, and/or basophils. In an embodiment, the target cell is an induced pluripotent stem (iPS) cell or a cell derived from an iPS cell, e.g., an iPS cell generated from a subject, manipulated to alter (e.g., induce a mutation in) or manipulate the expression of one or more target genes, and differentiated into, e.g., a T cell, e.g., a CD8+ T cell (e.g., a CD8+ naïve T cell, central memory T cell, or effector memory T cell), a CD4+ T cell, a stem cell memory T cell, a lymphoid progenitor cell or a hematopoietic stem cell.

[0185] In some embodiments, the cells include one or more subsets of T cells or other cell types, such as whole T cell populations, CD4+ cells, CD8+ cells, and subpopulations thereof, such as those defined by function, activation state, maturity, potential for differentiation, expansion, recirculation, localization, and/or persistence capacities, antigen-specificity, type of antigen receptor, presence in a particular organ or compartment, marker or cytokine secretion profile, and/or degree of differentiation.

[0186] Among the sub-types and subpopulations of T cells and/or of CD4+ and/or of CD8+ T cells are naïve T (TN) cells, effector T cells (TEFF), memory T cells and sub-types thereof, such as stem cell memory T (TSCM), central memory T (TCM), effector memory T (TEM), or terminally differentiated effector memory T cells, tumor-infiltrating lymphocytes (TIL), immature T cells, mature T cells, helper T cells, cytotoxic T cells, mucosa-associated invariant T (MAIT) cells, naturally occurring and adaptive regulatory T (Treg) cells, helper T cells, such as TH1 cells, TH2 cells, TH3 cells, TH17 cells, TH9 cells, TH22 cells, follicular helper T cells, alpha/beta T cells, and delta/gamma T cells.

[0187] In some embodiments, the methods include isolating cells from the subject, preparing, processing, culturing, and/or engineering them. In some embodiments, preparation of the engineered cells includes one or more culture and/or preparation steps. The cells for engineering as described may be isolated from a sample, such as a biological sample, e.g., one obtained from or derived from a subject. In some embodiments, the subject from which the cell is isolated is one having the disease or condition or in need of a cell therapy or to which cell therapy will be administered. The subject in some embodiments is a human in need of a particular therapeutic intervention, such as the adoptive cell therapy for which cells are being isolated, processed, and/or engineered.

[0188] Accordingly, the cells in some embodiments are primary cells, e.g., primary human cells. The samples include tissue, fluid, and other samples taken directly from the subject, as well as samples resulting from one or more processing steps, such as separation, centrifugation, genetic engineering (e.g. transduction with viral vector), washing, and/or incubation. The biological sample can be a sample obtained directly from a biological source or a sample that is processed. Biological samples include, but are not limited to, body fluids, such as blood, plasma, serum, cerebrospinal fluid, synovial fluid, urine and sweat, tissue and organ samples, including processed samples derived therefrom.

[0189] In some aspects, the sample from which the cells are derived or isolated is blood or a blood-derived sample, or is or is derived from an apheresis or leukapheresis product. Exemplary samples include whole blood, peripheral blood mononuclear cells (PBMCs), leukocytes, bone marrow, thymus, tissue biopsy, tumor, leukemia, lymphoma, lymph node, gut associated lymphoid tissue, mucosa associated lymphoid tissue, spleen, other lymphoid tissues, liver, lung, stomach, intestine, colon, kidney, pancreas, breast, bone, prostate, cervix, testes, ovaries, tonsil, or other organ, and/or cells derived therefrom. Samples include, in the context of cell therapy, e.g., adoptive cell therapy, samples from autologous and allogeneic sources.

[0190] In some embodiments, the cells are derived from cell lines, e.g., T cell lines. The cells in some embodiments are obtained from a xenogeneic source, for example, from mouse, rat, non-human primate, and pig.

[0191] In some embodiments, isolation of the cells includes one or more preparation and/or non-affinity based cell separation steps. In some examples, cells are washed, centrifuged, and/or incubated in the presence of one or more reagents, for example, to remove unwanted components, enrich for desired components, lyse or remove cells sensitive to particular reagents. In some examples, cells are separated based on one or more property, such as density, adherent properties, size, sensitivity and/or resistance to particular components.

[0192] In some examples, cells from the circulating blood of a subject are obtained, e.g., by apheresis or leukapheresis. The samples, in some aspects, contain lymphocytes, including T cells, monocytes, granulocytes, B cells, other nucleated white blood cells, red blood cells, and/or platelets, and in some aspects contains cells other than red blood cells and platelets.

[0193] In some embodiments, the blood cells collected from the subject are washed, e.g., to remove the plasma fraction and to place the cells in an appropriate buffer or media for subsequent processing steps. In some embodiments, the cells are washed with phosphate buffered saline (PBS). In some embodiments, the wash solution lacks calcium and/or magnesium and/or many or all divalent cations. In some aspects, a washing step is accomplished a semi-automated “flow-through” centrifuge (for example, the Cobe 2991 cell processor, Baxter) according to the manufacturer's instructions. In some aspects, a washing step is accomplished by tangential flow filtration (TFF) according to the manufacturer's instructions. In some embodiments, the cells are resuspended in a variety of biocompatible buffers after washing, such as, for example, Ca++/Mg++ free PBS. In certain embodiments, components of a blood cell sample are removed and the cells directly resuspended in culture media.

[0194] In some embodiments, the methods include density-based cell separation methods, such as the preparation of white blood cells from peripheral blood by lysing the red blood cells and centrifugation through a Percoll or Ficoll gradient.

[0195] In some embodiments, the isolation methods include the separation of different cell types based on the expression or presence in the cell of one or more specific molecules, such as surface markers, e.g., surface proteins, intracellular markers, or nucleic acid. In some embodiments, any known method for separation based on such markers may be used. In some embodiments, the separation is affinity- or immunoaffinity-based separation. For example, the isolation in some aspects includes separation of cells and cell populations based on the cells' expression or expression level of one or more markers, typically cell surface markers, for example, by incubation with an antibody or binding partner that specifically binds to such markers, followed generally by washing steps and separation of cells having bound the antibody or binding partner, from those cells having not bound to the antibody or binding partner.

[0196] Such separation steps can be based on positive selection, in which the cells having bound the reagents are retained for further use, and/or negative selection, in which the cells having not bound to the antibody or binding partner are retained. In some examples, both fractions are retained for further use. In some aspects, negative selection can be particularly useful where no antibody is available that specifically identifies a cell type in a heterogeneous population, such that separation is best carried out based on markers expressed by cells other than the desired population.

[0197] The separation need not result in 100% enrichment or removal of a particular cell population or cells expressing a particular marker. For example, positive selection of or enrichment for cells of a particular type, such as those expressing a marker, refers to increasing the number or percentage of such cells, but need not result in a complete absence of cells not expressing the marker. Likewise, negative selection, removal, or depletion of cells of a particular type, such as those expressing a marker, refers to decreasing the number or percentage of such cells, but need not result in a complete removal of all such cells.

[0198] In some examples, multiple rounds of separation steps are carried out, where the positively or negatively selected fraction from one step is subjected to another separation step, such as a subsequent positive or negative selection. In some examples, a single separation step can deplete cells expressing multiple markers simultaneously, such as by incubating cells with a plurality of antibodies or binding partners, each specific for a marker targeted for negative selection. Likewise, multiple cell types can simultaneously be positively selected by incubating cells with a plurality of antibodies or binding partners expressed on the various cell types.

[0199] In some embodiments, one or more of the T cell populations is enriched for or depleted of cells that are positive for (marker+) or express high levels (marker^{high}) of one or more particular markers, such as surface markers, or that are negative for (marker−) or express relatively low levels (marker^{low}) of one or more markers. For example, in some aspects, specific subpopulations of T cells, such as cells positive or expressing high levels of one or more surface markers, e.g., CD28+, CD62L+, CCR7+, CD27+, CD127+, CD4+, CD8+, CD45RA+, and/or CD45RO+ T cells, are isolated by positive or negative selection techniques. In some cases, such markers are those that are absent or expressed at relatively low levels on certain populations of T cells (such as non-memory cells) but are present or expressed at relatively higher levels on certain other populations of T cells (such as memory cells). In one embodiment, the cells (such as the CD8+ cells or the T cells, e.g., CD3+ cells) are enriched for (i.e., positively selected for) cells that are positive or expressing high surface levels of CD45RO, CCR7, CD28, CD27, CD44, CD127, and/or CD62L and/or depleted of (e.g., negatively selected for) cells that are positive for or express high surface levels of CD45RA. In some embodiments, cells are enriched for or depleted of cells positive or expressing high surface levels of CD122, CD95, CD25, CD27, and/or IL7-Rα (CD127). In some examples, CD8+ T cells are enriched for cells positive for CD45RO (or negative for CD45RA) and for CD62L.

[0200] For example, CD3+, CD28+ T cells can be positively selected using CD3/CD28 conjugated magnetic beads (e.g., DYNABEADS® M-450 CD3/CD28 T Cell Expander).

[0201] In some embodiments, T cells are separated from a PBMC sample by negative selection of markers expressed on non-T cells, such as B cells, monocytes, or other white blood cells, such as CD14. In some aspects, a CD4+ or CD8+ selection step is used to separate CD4+ helper and CD8+ cytotoxic T cells. Such CD4+ and CD8+ populations can be further sorted into sub-populations by positive or negative selection for markers expressed or expressed to a relatively higher degree on one or more naive, memory, and/or effector T cell subpopulations.

[0202] In some embodiments, CD8+ cells are further enriched for or depleted of naive, central memory, effector memory, and/or central memory stem cells, such as by positive or negative selection based on surface antigens associated with the respective subpopulation. In some embodiments, enrichment for central memory T (TCM) cells is carried out to increase efficacy, such as to improve long-term survival, expansion, and/or engraftment following administration, which in some aspects is particularly robust in such sub-populations. See Terakura et al. (2012) Blood. 1:72-82; Wang et al. (2012) J Immunother. 35(9):689-701. In some embodiments, combining TCM-enriched CD8+ T cells and CD4+ T cells further enhances efficacy.

[0203] In embodiments, memory T cells are present in both CD62L+ and CD62L-subsets of CD8+ peripheral blood lymphocytes. PBMC can be enriched for or depleted of CD62L-CD8+ and/or CD62L+CD8+ fractions, such as using anti-CD8 and anti-CD62L antibodies.

[0204] In some embodiments, a CD4+ T cell population and a CD8+ T cell sub-population, e.g., a sub-population enriched for central memory (TCM) cells. In some embodiments, the enrichment for central memory T (TCM) cells is based on positive or high surface expression of CD45RO, CD62L, CCR7, CD28, CD3, and/or CD 127; in some aspects, it is based on negative selection for cells expressing or highly expressing CD45RA and/or granzyme B. In some aspects, isolation of a CD8+ population enriched for TCM cells is carried out by depletion of cells expressing CD4, CD14, CD45RA, and positive selection or enrichment for cells expressing CD62L. In one aspect, enrichment for central memory T (TCM) cells is carried out starting with a negative fraction of cells selected based on CD4 expression, which is subjected to a negative selection based on expression of CD14 and CD45RA, and a positive selection based on CD62L. Such selections in some aspects are carried out simultaneously and in other aspects are carried out sequentially, in either order. In some aspects, the same CD4 expression-based selection step used in preparing the CD8+ cell population or subpopulation, also is used to generate the CD4+ cell population or sub-population, such that both the positive and negative fractions from the CD4-based separation are retained and used in subsequent steps of the methods, optionally following one or more further positive or negative selection steps.

[0205] In a particular example, a sample of PBMCs or other white blood cell sample is subjected to selection of CD4+ cells, where both the negative and positive fractions are retained. The negative fraction then is subjected to negative selection based on expression of CD14 and CD45RA or CD19, and positive selection based on a marker characteristic of central memory T cells, such as CD62L or CCR7, where the positive and negative selections are carried out in either order.

[0206] CD4+ T helper cells are sorted into naïve, central memory, and effector cells by identifying cell populations that have cell surface antigens. CD4+ lymphocytes can be obtained by standard methods. In some embodiments, naive CD4+ T lymphocytes are CD45RO−, CD45RA+, CD62L+, CD4+ T cells. In some embodiments, central memory CD4+ cells are CD62L+ and CD45RO+. In some embodiments, effector CD4+ cells are CD62L- and CD45RO.

[0207] In one example, to enrich for CD4+ cells by negative selection, a monoclonal antibody cocktail typically includes antibodies to CD14, CD20, CD11b, CD16, HLA-DR, and CD8. In some embodiments, the antibody or binding partner is bound to a solid support or matrix, such as a magnetic bead or paramagnetic bead, to allow for separation of cells for positive and/or negative selection. For example, in some embodiments, the cells and cell populations are separated or isolated using immunomagnetic (or affinitymagnetic) separation techniques (reviewed in Methods in Molecular Medicine, vol. 58: Metastasis Research Protocols, Vol. 2: Cell Behavior In Vitro and In Vivo, p 17-25 Edited by: S. A. Brooks and U. Schumacher © Humana Press Inc., Totowa, N.J.).

[0208] In some embodiments, the cells are incubated and/or cultured prior to or in connection with genetic engineering. The incubation steps can include culture, cultivation, stimulation, activation, and/or propagation. In some embodiments, the compositions or cells are incubated in the presence of stimulating conditions or a stimulatory agent. Such conditions include those designed to induce proliferation, expansion, activation, and/or survival of cells in the population, to mimic antigen exposure, and/or to prime the cells for genetic engineering, such as for the introduction of a recombinant antigen receptor.

[0209] The conditions can include one or more of particular media, temperature, oxygen content, carbon dioxide content, time, agents, e.g., nutrients, amino acids, antibiotics, ions, and/or stimulatory factors, such as cytokines, chemokines, antigens, binding partners, fusion proteins, recombinant soluble receptors, and any other agents designed to activate the cells.

[0210] In some embodiments, the stimulating conditions or agents include one or more agent, e.g., ligand, which is capable of activating an intracellular signaling domain of a TCR complex. In some aspects, the agent turns on or initiates TCR/CD3 intracellular signaling cascade in a T cell. Such agents can include antibodies, such as those specific for a TCR component and/or costimulatory receptor, e.g., anti-CD3, anti-CD28, for example, bound to solid support such as a bead, and/or one or more cytokines. Optionally, the expansion method may further comprise the step of adding anti-CD3 and/or anti CD28 antibody to the culture medium (e.g., at a concentration of at least about 0.5 ng/ml). In some embodiments, the stimulating agents include IL-2 and/or IL-15, for example, an IL-2 concentration of at least about 10 units/mL.

[0211] In some aspects, incubation is carried out in accordance with techniques such as those described in U.S. Pat. No. 6,040,177 to Riddell et al., Klebanoff et al. (2012) J Immunother. 35(9): 651-660, Terakura et al. (2012) Blood. 1:72-82, and/or Wang et al. (2012) J Immunother. 35(9):689-701.

[0212] In some embodiments, the T cells are expanded by adding to the culture-initiating composition feeder cells, such as non-dividing peripheral blood mononuclear cells (PBMC), (e.g., such that the resulting population of cells contains at least about 5, 10, 20, or 40 or more PBMC feeder cells for each T lymphocyte in the initial population to be expanded); and incubating the culture (e.g. for a time sufficient to expand the numbers of T cells). In some aspects, the non-dividing feeder cells can comprise gamma-irradiated PBMC feeder cells. In some embodiments, the PBMC are irradiated with gamma rays in the range of about 3000 to 3600 rads to prevent cell division. In some aspects, the feeder cells are added to culture medium prior to the addition of the populations of T cells.

[0213] In some embodiments, the stimulating conditions include temperature suitable for the growth of human T lymphocytes, for example, at least about 25 degrees Celsius, generally at least about 30 degrees, and generally at or about 37 degrees Celsius. Optionally, the incubation may further comprise adding non-dividing EBV-transformed lymphoblastoid cells (LCL) as feeder cells. LCL can be irradiated with gamma rays in the range of about 6000 to 10,000 rads. The LCL feeder cells in some aspects is provided in any suitable amount, such as a ratio of LCL feeder cells to initial T lymphocytes of at least about 10:1.

[0214] In some embodiments, the preparation methods include steps for freezing, e.g., cryopreserving, the cells, either before or after isolation, incubation, and/or engineering. In some embodiments, the freeze and subsequent thaw step removes granulocytes and, to some extent, monocytes in the cell population. In some embodiments, the cells are suspended in a freezing solution, e.g., following a washing step to remove plasma and platelets. Any of a variety of known freezing solutions and parameters in some aspects may be used. One example involves using PBS containing 20% DMSO and 8% human serum albumin (HSA), or other suitable cell freezing media. This is then diluted 1:1 with media so that the final concentration of DMSO and HSA are 10% and 4%, respectively. The cells are generally then frozen to −80° C. at a rate of 1° per minute and stored in the vapor phase of a liquid nitrogen storage tank.

[0215] In some embodiments, the methods include re-introducing the engineered cells into the same patient, before or after cryopreservation.

[0216] B. Recombinant Receptors

[0217] In some embodiments, the cells comprise one or more nucleic acids encoding a recombinant receptor introduced via genetic engineering, and genetically engineered products of such nucleic acids. In some embodiments, the cells can be produced or generated by introducing into a cell (e.g. via transduction of a viral vector, such as a retroviral or lentiviral vector) a nucleic acid molecule encoding the recombinant receptor. In some embodiments, the nucleic acids are heterologous, i.e., normally not present in a cell or sample obtained from the cell, such as one obtained from another organism or cell, which for example, is not ordinarily found in the cell being engineered and/or an organism from which such cell is derived. In some embodiments, the nucleic acids are not naturally occurring, such as a nucleic acid not found in nature, including one comprising chimeric combinations of nucleic acids encoding various domains from multiple different cell types.

[0218] In some embodiments, the target cell has been altered to bind to one or more target antigen, such as one or more tumor antigen. In some embodiments, the target antigen is selected from ROR1, B cell maturation antigen (BCMA), carbonic anhydrase 9 (CAIX), tEGFR, Her2/neu (receptor tyrosine kinase erbB2), L1-CAM, CD19, CD20, CD22, mesothelin, CEA, and hepatitis B surface antigen, anti-folate receptor, CD23, CD24, CD30, CD33, CD38, CD44, EGFR, epithelial glycoprotein 2 (EPG-2), epithelial glycoprotein 40 (EPG-40), EPHa2, erb-B2, erb-B3, erb-B4, erbB dimers, EGFR vIII, folate binding protein (FBP), FCRL5, FCRH5, fetal acetylcholine receptor, GD2, GD3, HMW-MAA, IL-22R-alpha, IL-13R-alpha2, kinase insert domain receptor (kdr), kappa light chain, Lewis Y, L1-cell adhesion molecule, (L1-CAM), Melanoma-associated antigen (MAGE)-A1, MAGE-A3, MAGE-A6, Preferentially expressed antigen of melanoma (PRAME), survivin, TAG72, B7-H6, IL-13 receptor alpha 2 (IL-13Ra2), CA9, GD3, HMW-MAA, CD171, G250/CAIX, HLA-AI MAGE A1, HLA-A2 NY-ESO-1, PSCA, folate receptor-a, CD44v6, CD44v7/8, avb6 integrin, 8H9, NCAM, VEGF receptors, 5T4, Foetal AchR, NKG2D ligands, CD44v6, dual antigen, a cancer-testes antigen, mesothelin, murine CMV, mucin 1 (MUC1), MUC16, PSCA, NKG2D, NY-ESO-1, MART-1, gp100, oncofetal antigen, ROR1, TAG72, VEGF-R2, carcinoembryonic antigen (CEA), Her2/neu, estrogen receptor, progesterone receptor, ephrinB2, CD123, c-Met, GD-2, O-acetylated GD2 (OGD2), CE7, Wilms Tumor 1 (WT-1), a cyclin, cyclin A2, CCL-1, CD138, a pathogen-specific antigen and an antigen associated with a universal tag. In some embodiments, the target cell has been altered to bind one or more of the following tumor antigens, e.g., by a TCR or a CAR. Tumor antigens may include, but are not limited to, AD034, AKT1, BRAP, CAGE, CDX2, CLP, CT-7, CT8/HOM-TES-85, cTAGE-1, Fibulin-1, HAGE, HCA587/MAGE-C2, hCAP-G, HCE661, HER2/neu, HLA-Cw, HOM-HD-21/Galectin9, HOM-MEEL-40/SSX2, HOM-RCC-3.1.3/CAXII, HOXA7, HOXB6, Hu, HUB1, KM-HN-3, KM-KN-1, KOC1, KOC2, KOC3, KOC3, LAGE-1, MAGE-1, MAGE-4a, MPP11, MSLN, NNP-1, NY-BR-1, NY-BR-62, NY-BR-85, NY-CO-37, NY-CO-38, NY-ESO-1, NY-ESO-5, NY-LU-12, NY-REN-10, NY-REN-19/LKB/STK11, NY-REN-21, NY-REN-26/BCR, NY-REN-3/NY-CO-38, NY-REN-33/SNC6, NY-REN-43, NY-REN-65, NY-REN-9, NY-SAR-35, OGFr, PLU-1, Rab38, RBPJkappa, RHAMM, SCP1, SCP-1, SSX3, SSX4, SSX5, TOP2A, TOP2B, or Tyrosinase.

[0219] I. Antigen Receptors

[0220] a) Chimeric Antigen Receptors (CARs)

[0221] The cells generally express recombinant receptors, such as antigen receptors including functional non-TCR antigen receptors, e.g., chimeric antigen receptors (CARs), and other antigen-binding receptors such as transgenic T cell receptors (TCRs). Also among the receptors are other chimeric receptors.

[0222] Exemplary antigen receptors, including CARs, and methods for engineering and introducing such receptors into cells, include those described, for example, in international patent application publication numbers WO200014257, WO2013126726, WO2012/129514, WO2014031687, WO2013/166321, WO2013/071154, WO2013/123061 U.S. patent application publication numbers US2002131960, US2013287748, US20130149337, U.S. Pat. Nos. 6,451,995, 7,446,190, 8,252,592, 8,339,645, 8,398,282, 7,446,179, 6,410,319, 7,070,995, 7,265,209, 7,354,762, 7,446,191, 8,324,353, and 8,479,118, and European patent application number EP2537416, and/or those described by Sadelain et al., Cancer Discov. 2013 April; 3(4): 388-398; Davila et al. (2013) PLoS ONE 8(4): e61338; Turtle et al., Curr. Opin. Immunol., 2012 October; 24(5): 633-39; Wu et al., Cancer, 2012 Mar. 18(2): 160-75. In some aspects, the antigen receptors include a CAR as described in U.S. Pat. No. 7,446,190, and those described in International Patent Application Publication No.: WO/2014055668 A1. Examples of the CARs include CARs as disclosed in any of the aforementioned publications, such as WO2014031687, U.S. Pat. Nos. 8,339,645, 7,446,179, US 2013/0149337, U.S. Pat. Nos. 7,446,190, 8,389,282, Kochenderfer et al., 2013, Nature Reviews Clinical Oncology, 10, 267-276 (2013); Wang et al. (2012) J. Immunother. 35(9): 689-701; and Brentjens et al., Sci Transl Med. 2013 5(177). See also WO2014031687, U.S. Pat. Nos. 8,339,645, 7,446,179, US 2013/0149337, U.S. Pat. Nos. 7,446,190, and 8,389,282. The chimeric receptors, such as CARs, generally include an extracellular antigen binding domain, such as a portion of an antibody molecule, generally a variable heavy (VH) chain region and/or variable light (VL) chain region of the antibody, e.g., an scFv antibody fragment.

[0223] In some embodiments, the antigen targeted by the receptor is a polypeptide. In some embodiments, it is a carbohydrate or other molecule. In some embodiments, the antigen is selectively expressed or overexpressed on cells of the disease or condition, e.g., the tumor or pathogenic cells, as compared to normal or non-targeted cells or tissues. In other embodiments, the antigen is expressed on normal cells and/or is expressed on the engineered cells.

[0224] Antigens that may be targeted by the receptors include, but are not limited to, αvβ6 integrin (avb6 integrin), B cell maturation antigen (BCMA), B7-H6, carbonic anhydrase 9 (CA9, also known as CAIX or G250), a cancer-testis antigen, cancer/testis antigen 1B (CTAG, also known as NY-ESO-1 and LAGE-2), carcinoembryonic antigen (CEA), a cyclin, cyclin A2, C—C Motif Chemokine Ligand 1 (CCL-1), CD19, CD20, CD22, CD23, CD24, CD30, CD33, CD38, CD44, CD44v6, CD44v7/8, CD123, CD138, CD171, epidermal growth factor protein (EGFR), truncated epidermal growth factor protein (tEGFR), type III epidermal growth factor receptor mutation (EGFR vIII), epithelial glycoprotein 2 (EPG-2), epithelial glycoprotein 40 (EPG-40), ephrinB2, ephrine receptor A2 (EPHa2), estrogen receptor, Fc receptor like 5 (FCRL5; also known as Fc receptor homolog 5 or FCRH5), fetal acetylcholine receptor (fetal AchR), a folate binding protein (FBP), folate receptor alpha, fetal acetylcholine receptor, ganglioside GD2, O-acetylated GD2 (OGD2), ganglioside GD3, glycoprotein 100 (gp100), Her2/neu (receptor tyrosine kinase erbB2), Her3 (erb-B3), Her4 (erb-B4), erbB dimers, human high molecular weight-melanoma-associated antigen (HMW-MAA), hepatitis B surface antigen, Human leukocyte antigen A1 (HLA-AI), human leukocyte antigen A2 (HLA-A2), IL-22 receptor alpha(IL-22Ra), IL-13 receptor alpha 2 (IL-13Ra2), kinase insert domain receptor (kdr), kappa light chain, L1 cell adhesion molecule (L1CAM), CE7 epitope of L1-CAM, Leucine Rich Repeat Containing 8 Family Member A (LRRC8A), Lewis Y, melanoma-associated antigen (MAGE)-A1, MAGE-A3, MAGE-A6, mesothelin, c-Met, murine cytomegalovirus (CMV), mucin 1 (MUC1), MUC16, natural killer group 2 member D (NKG2D) ligands, melan A (MART-1), neural cell adhesion molecule (NCAM), oncofetal antigen, preferentially expressed antigen of melanoma (PRAME), progesterone receptor, a prostate specific antigen, prostate stem cell antigen (PSCA), prostate specific membrane antigen (PSMA), receptor tyrosine kinase like orphan receptor 1 (ROR1), survivin, Trophoblast glycoprotein (TPBG also known as 5T4), tumor-associated glycoprotein 72 (TAG72), vascular endothelial growth factor receptor (VEGFR), vascular endothelial growth factor receptor 2 (VEGFR2), Wilms tumor 1 (WT-1), and a pathogen-specific antigen.

[0225] In some embodiments, antigens targeted by the receptors in some embodiments include orphan tyrosine kinase receptor ROR1, tEGFR, Her2, L1-CAM, CD19, CD20, CD22, mesothelin, CEA, and hepatitis B surface antigen, anti-folate receptor, CD23, CD24, CD30, CD33, CD38, CD44, EGFR, EGP-2, EGP-4, OEPHa2, ErbB2, 3, or 4, FBP, fetal acethycholine e receptor, GD2, GD3, HMW-MAA, IL-22R-alpha, IL-13R-alpha2, kdr, kappa light chain, Lewis Y, L1-cell adhesion molecule, MAGE-A1, mesothelin, MUC1, MUC16, PSCA, NKG2D Ligands, NY-ESO-1, MART-1, gp100, oncofetal antigen, ROR1, TAG72, VEGF-R2, carcinoembryonic antigen (CEA), prostate specific antigen, PSMA, Her2/neu, estrogen receptor, progesterone receptor, ephrinB2, CD123, c-Met, GD-2, and MAGE A3, CE7, Wilms Tumor 1 (WT-1), a cyclin, such as cyclin A1 (CCNA1), and/or biotinylated molecules, and/or molecules expressed by HIV, HCV, HBV or other pathogens.

[0226] In some embodiments, the CAR has binding specificity for a tumor associated antigen, e.g., CD19, CD20, carbonic anhydrase IX (CAIX), CD171, CEA, ERBB2, GD2, alpha-folate receptor, Lewis Y antigen, prostate specific membrane antigen (PSMA) or tumor associated glycoprotein 72 (TAG72).

[0227] In some embodiments, the CAR binds a pathogen-specific antigen. In some embodiments, the CAR is specific for viral antigens (such as HIV, HCV, HBV, etc.), bacterial antigens, and/or parasitic antigens.

[0228] Among the chimeric receptors are chimeric antigen receptors (CARs). The chimeric receptors, such as CARs, generally include an extracellular antigen binding domain, such as a portion of an antibody molecule, generally a variable heavy (V_{H}) chain region and/or variable light (V_{L}) chain region of the antibody, e.g., an scFv antibody fragment.

[0229] In some embodiments, the antibody portion of the recombinant receptor, e.g., CAR, further includes at least a portion of an immunoglobulin constant region, such as a hinge region, e.g., an IgG4 hinge region, and/or a CH1/CL and/or Fc region. In some embodiments, the constant region or portion is of a human IgG, such as IgG4 or IgG1. In some aspects, the portion of the constant region serves as a spacer region between the antigen-recognition component, e.g., scFv, and transmembrane domain. The spacer can be of a length that provides for increased responsiveness of the cell following antigen binding, as compared to in the absence of the spacer. Exemplary spacers, e.g., hinge regions, include those described in international patent application publication number WO2014031687. In some examples, the spacer is or is about 12 amino acids in length or is no more than 12 amino acids in length. Exemplary spacers include those having at least about 10 to 229 amino acids, about 10 to 200 amino acids, about 10 to 175 amino acids, about 10 to 150 amino acids, about 10 to 125 amino acids, about 10 to 100 amino acids, about 10 to 75 amino acids, about 10 to 50 amino acids, about 10 to 40 amino acids, about 10 to 30 amino acids, about 10 to 20 amino acids, or about 10 to 15 amino acids, and including any integer between the endpoints of any of the listed ranges. In some embodiments, a spacer region has about 12 amino acids or less, about 119 amino acids or less, or about 229 amino acids or less. Exemplary spacers include IgG4 hinge alone, IgG4 hinge linked to CH2 and CH3 domains, or IgG4 hinge linked to the CH3 domain.

[0230] Exemplary spacers include, but are not limited to, those described in Hudecek et al. (2013) Clin. Cancer Res., 19:3153 or international patent application publication number WO2014031687. In some embodiments, the spacer has the sequence set forth in SEQ ID NO: 51213, and is encoded by the sequence set forth in SEQ ID NO: 51212. In some embodiments, the spacer has the sequence set forth in SEQ ID NO: 51214. In some embodiments, the spacer has the sequence set forth in SEQ ID NO: 51215. In some embodiments, the constant region or portion is of IgD. In some embodiments, the spacer has the sequence set forth in SEQ ID NO:51216. In some embodiments, the spacer has a sequence of amino acids that exhibits at least 85%, 86%, 87%, 88%, 89%, 90%, 91%, 92%, 93%, 94%, 95%, 96%, 97%, 98%, 99% or more sequence identity to any of SEQ ID NOS: 51213, 51214, 51215 or 51216.

[0231] This antigen recognition domain generally is linked to one or more intracellular signaling components, such as signaling components that mimic activation through an antigen receptor complex, such as a TCR complex, in the case of a CAR, and/or signal via another cell surface receptor. Thus, in some embodiments, the antigen-binding component (e.g., antibody) is linked to one or more transmembrane and intracellular signaling domains. In some embodiments, the transmembrane domain is fused to the extracellular domain. In one embodiment, a transmembrane domain that naturally is associated with one of the domains in the receptor, e.g., CAR, is used. In some instances, the transmembrane domain is selected or modified by amino acid substitution to avoid binding of such domains to the transmembrane domains of the same or different surface membrane proteins to minimize interactions with other members of the receptor complex.

[0232] The transmembrane domain in some embodiments is derived either from a natural or from a synthetic source. Where the source is natural, the domain in some aspects is derived from any membrane-bound or transmembrane protein. Transmembrane regions include those derived from (i.e. comprise at least the transmembrane region(s) of) the alpha, beta or zeta chain of the T-cell receptor, CD28, CD3 epsilon, CD45, CD4, CD5, CD8, CD9, CD 16, CD22, CD33, CD37, CD64, CD80, CD86, CD 134, CD137, CD 154. Alternatively the transmembrane domain in some embodiments is synthetic. In some aspects, the synthetic transmembrane domain comprises predominantly hydrophobic residues such as leucine and valine. In some aspects, a triplet of phenylalanine, tryptophan and valine will be found at each end of a synthetic transmembrane domain. In some embodiments, the linkage is by linkers, spacers, and/or transmembrane domain(s).

[0233] Among the intracellular signaling domains are those that mimic or approximate a signal through a natural antigen receptor, a signal through such a receptor in combination with a costimulatory receptor, and/or a signal through a costimulatory receptor alone. In some embodiments, a short oligo- or polypeptide linker, for example, a linker of between 2 and 10 amino acids in length, such as one containing glycines and serines, e.g., glycine-serine doublet, is present and forms a linkage between the transmembrane domain and the cytoplasmic signaling domain of the CAR.

[0234] The receptor, e.g., the CAR, generally includes at least one intracellular signaling component or components. In some embodiments, the receptor includes an intracellular component of a TCR complex, such as a TCR CD3 chain that mediates T-cell activation and cytotoxicity, e.g., CD3 zeta chain. Thus, in some aspects, the antigen-binding portion is linked to one or more cell signaling modules. In some embodiments, cell signaling modules include CD3 transmembrane domain, CD3 intracellular signaling domains, and/or other CD transmembrane domains. In some embodiments, the receptor, e.g., CAR, further includes a portion of one or more additional molecules such as Fc receptor γ, CD8, CD4, CD25, or CD16. For example, in some aspects, the CAR or other chimeric receptor includes a chimeric molecule between CD3-zeta (CD3-ζ) or Fc receptor γ and CD8, CD4, CD25 or CD16.

[0235] In some embodiments, upon ligation of the CAR or other chimeric receptor, the cytoplasmic domain or intracellular signaling domain of the receptor activates at least one of the normal effector functions or responses of the immune cell, e.g., T cell engineered to express the CAR. For example, in some contexts, the CAR induces a function of a T cell such as cytolytic activity or T-helper activity, such as secretion of cytokines or other factors. In some embodiments, a truncated portion of an intracellular signaling domain of an antigen receptor component or costimulatory molecule is used in place of an intact immunostimulatory chain, for example, if it transduces the effector function signal. In some embodiments, the intracellular signaling domain or domains include the cytoplasmic sequences of the T cell receptor (TCR), and in some aspects also those of co-receptors that in the natural context act in concert with such receptors to initiate signal transduction following antigen receptor engagement, and/or any derivative or variant of such molecules, and/or any synthetic sequence that has the same functional capability.

[0236] In the context of a natural TCR, full activation generally requires not only signaling through the TCR, but also a costimulatory signal. Thus, in some embodiments, to promote full activation, a component for generating secondary or co-stimulatory signal is also included in the CAR. In other embodiments, the CAR does not include a component for generating a costimulatory signal. In some aspects, an additional CAR is expressed in the same cell and provides the component for generating the secondary or costimulatory signal.

[0237] T cell activation is in some aspects described as being mediated by two classes of cytoplasmic signaling sequences: those that initiate antigen-dependent primary activation through the TCR (primary cytoplasmic signaling sequences), and those that act in an antigen-independent manner to provide a secondary or co-stimulatory signal (secondary cytoplasmic signaling sequences). In some aspects, the CAR includes one or both of such signaling components.

[0238] In some aspects, the CAR includes a primary cytoplasmic signaling sequence that regulates primary activation of the TCR complex. Primary cytoplasmic signaling sequences that act in a stimulatory manner may contain signaling motifs which are known as immunoreceptor tyrosine-based activation motifs or ITAMs. Examples of ITAM containing primary cytoplasmic signaling sequences include those derived from the CD3 zeta chain, FcR gamma, CD3 gamma, CD3 delta and CD3 epsilon. In some embodiments, cytoplasmic signaling molecule(s) in the CAR contain(s) a cytoplasmic signaling domain, portion thereof, or sequence derived from CD3 zeta.

[0239] In some embodiments, the CAR includes a signaling domain and/or transmembrane portion of a costimulatory receptor, such as CD28, 4-1BB, OX40, DAP10, and ICOS. In some aspects, the same CAR includes both the activating and costimulatory components.

[0240] In some embodiments, the activating domain is included within one CAR, whereas the costimulatory component is provided by another CAR recognizing another antigen. In some embodiments, the CARs include activating or stimulatory CARs, costimulatory CARs, both expressed on the same cell (see WO2014/055668). In some aspects, the cells include one or more stimulatory or activating CAR and/or a costimulatory CAR. In some embodiments, the cells further include inhibitory CARs (iCARs, see Fedorov et al., Sci. Transl. Medicine, 5(215) (December, 2013), such as a CAR recognizing an antigen other than the one associated with and/or specific for the disease or condition whereby an activating signal delivered through the disease-targeting CAR is diminished or inhibited by binding of the inhibitory CAR to its ligand, e.g., to reduce off-target effects.

[0241] In certain embodiments, the intracellular signaling domain comprises a CD28 transmembrane and signaling domain linked to a CD3 (e.g., CD3-zeta) intracellular domain. In some embodiments, the intracellular signaling domain comprises a chimeric CD28 and CD137 (4-1BB, TNFRSF9) co-stimulatory domains, linked to a CD3 zeta intracellular domain.

[0242] In some embodiments, the CAR encompasses one or more, e.g., two or more, costimulatory domains and an activation domain, e.g., primary activation domain, in the cytoplasmic portion. Exemplary CARs include intracellular components of CD3-zeta, CD28, and 4-1BB.

[0243] In some embodiments, the CAR or other antigen receptor further includes a marker, such as a cell surface marker, which may be used to confirm transduction or engineering of the cell to express the receptor, such as a truncated version of a cell surface receptor, such as truncated EGFR (tEGFR). In some aspects, the marker includes all or part (e.g., truncated form) of CD34, a NGFR, or epidermal growth factor receptor (e.g., tEGFR). In some embodiments, the nucleic acid encoding the marker is operably linked to a polynucleotide encoding for a linker sequence, such as a cleavable linker sequence, e.g., T2A. See WO2014031687. In some embodiments, introduction of a construct encoding the CAR and EGFRt separated by a T2A ribosome switch can express two proteins from the same construct, such that the EGFRt can be used as a marker to detect cells expressing such construct. In some embodiments, a marker, and optionally a linker sequence, can be any as disclosed in published application No. WO2014031687. For example, the marker can be a truncated EGFR (tEGFR) that is, optionally, linked to a linker sequence, such as a T2A cleavable linker sequence. An exemplary polypeptide for a truncated EGFR (e.g. tEGFR) comprises the sequence of amino acids set forth in SEQ ID NO: 51218 or a sequence of amino acids that exhibits at least 85%, 86%, 87%, 88%, 89%, 90%, 91%, 92%, 93%, 94%, 95%, 96%, 97%, 98%, 99% or more sequence identity to SEQ ID NO: 51218. An exemplary T2A linker sequence comprises the sequence of amino acids set forth in SEQ ID NO: 51217 or a sequence of amino acids that exhibits at least 85%, 86%, 87%, 88%, 89%, 90%, 91%, 92%, 93%, 94%, 95%, 96%, 97%, 98%, 99% or more sequence identity to SEQ ID NO: 51217.

[0244] In some embodiments, the marker is a molecule, e.g., cell surface protein, not naturally found on T cells or not naturally found on the surface of T cells, or a portion thereof.

[0245] In some embodiments, the molecule is a non-self molecule, e.g., non-self protein, i.e., one that is not recognized as “self” by the immune system of the host into which the cells will be adoptively transferred.

[0246] In some embodiments, the marker serves no therapeutic function and/or produces no effect other than to be used as a marker for genetic engineering, e.g., for selecting cells successfully engineered. In other embodiments, the marker may be a therapeutic molecule or molecule otherwise exerting some desired effect, such as a ligand for a cell to be encountered in vivo, such as a costimulatory or immune checkpoint molecule to enhance and/or dampen responses of the cells upon adoptive transfer and encounter with ligand.

[0247] In some cases, CARs are referred to as first, second, and/or third generation CARs. In some aspects, a first generation CAR is one that solely provides a CD3-chain induced signal upon antigen binding; in some aspects, a second-generation CARs is one that provides such a signal and costimulatory signal, such as one including an intracellular signaling domain from a costimulatory receptor such as CD28 or CD137; in some aspects, a third generation CAR is one that includes multiple costimulatory domains of different costimulatory receptors.

[0248] In some embodiments, the chimeric antigen receptor includes an extracellular portion containing an antibody or antibody fragment. In some aspects, the chimeric antigen receptor includes an extracellular portion containing the antibody or fragment and an intracellular signaling domain. In some embodiments, the antibody or fragment includes an scFv and the intracellular domain contains an ITAM. In some aspects, the intracellular signaling domain includes a signaling domain of a zeta chain of a CD3-zeta (CD3ζ) chain. In some embodiments, the chimeric antigen receptor includes a transmembrane domain linking the extracellular domain and the intracellular signaling domain. In some aspects, the transmembrane domain contains a transmembrane portion of CD28. The extracellular domain and transmembrane can be linked directly or indirectly. In some embodiments, the extracellular domain and transmembrane are linked by a spacer, such as any described herein. In some embodiments, the chimeric antigen receptor contains an intracellular domain of a T cell costimulatory molecule, such as between the transmembrane domain and intracellular signaling domain. In some aspects, the T cell costimulatory molecule is CD28 or 41BB.

[0249] In some embodiments, the CAR contains an antibody, e.g., an antibody fragment, a transmembrane domain that is or contains a transmembrane portion of CD28 or a functional variant thereof, and an intracellular signaling domain containing a signaling portion of CD28 or functional variant thereof and a signaling portion of CD3 zeta or functional variant thereof. In some embodiments, the CAR contains an antibody, e.g., antibody fragment, a transmembrane domain that is or contains a transmembrane portion of CD28 or a functional variant thereof, and an intracellular signaling domain containing a signaling portion of a 4-1BB or functional variant thereof and a signaling portion of CD3 zeta or functional variant thereof. In some such embodiments, the receptor further includes a spacer containing a portion of an Ig molecule, such as a human Ig molecule, such as an Ig hinge, e.g. an IgG4 hinge, such as a hinge-only spacer.

[0250] In some embodiments, the transmembrane domain of the receptor, e.g., the CAR is a transmembrane domain of human CD28 or variant thereof, e.g., a 27-amino acid transmembrane domain of a human CD28 (Accession No.: P10747.1), or is a transmembrane domain that comprises the sequence of amino acids set forth in SEQ ID NO: 51219 or a sequence of amino acids that exhibits at least 85%, 86%, 87%, 88%, 89%, 90%, 91%, 92%, 93%, 94%, 95%, 96%, 97%, 98%, 99% or more sequence identity to SEQ ID NO:51219; in some embodiments, the transmembrane-domain containing portion of the recombinant receptor comprises the sequence of amino acids set forth in SEQ ID NO: 51220 or a sequence of amino acids having at least at or about 85%, 86%, 87%, 88%, 89%, 90%, 91%, 92%, 93%, 94%, 95%, 96%, 97%, 98%, 99% or more sequence identity thereto.

[0251] In some embodiments, the chimeric antigen receptor contains an intracellular domain of a T cell costimulatory molecule. In some aspects, the T cell costimulatory molecule is CD28 or 41BB.

[0252] In some embodiments, the intracellular signaling domain comprises an intracellular costimulatory signaling domain of human CD28 or functional variant or portion thereof thereof, such as a 41 amino acid domain thereof and/or such a domain with an LL to GG substitution at positions 186-187 of a native CD28 protein. In some embodiments, the intracellular signaling domain can comprise the sequence of amino acids set forth in SEQ ID NO: 51221 or 51222 or a sequence of amino acids that exhibits at least 85%, 86%, 87%, 88%, 89%, 90%, 91%, 92%, 93%, 94%, 95%, 96%, 97%, 98%, 99% or more sequence identity to SEQ ID NO: 51221 or 51222. In some embodiments, the intracellular domain comprises an intracellular costimulatory signaling domain of 41BB or functional variant or portion thereof, such as a 42-amino acid cytoplasmic domain of a human 4-1BB (Accession No. Q07011.1) or functional variant or portion thereof, such as the sequence of amino acids set forth in SEQ ID NO: 51223 or a sequence of amino acids that exhibits at least 85%, 86%, 87%, 88%, 89%, 90%, 91%, 92%, 93%, 94%, 95%, 96%, 97%, 98%, 99% or more sequence identity to SEQ ID NO: 51223.

[0253] In some embodiments, the intracellular signaling domain comprises a human CD3 zeta stimulatory signaling domain or functional variant thereof, such as an 112 AA cytoplasmic domain of isoform 3 of human CD3 (Accession No.: P20963.2) or a CD3 zeta signaling domain as described in U.S. Pat. No. 7,446,190 or 8,911,993. In some embodiments, the intracellular signaling domain comprises the sequence of amino acids set forth in SEQ ID NO: 51224, 51225 or 51226 or a sequence of amino acids that exhibits at least 85%, 86%, 87%, 88%, 89%, 90%, 91%, 92%, 93%, 94%, 95%, 96%, 97%, 98%, 99% or more sequence identity to SEQ ID NO: 51224, 51225 or 51226.

[0254] In some aspects, the spacer contains only a hinge region of an IgG, such as only a hinge of IgG4 or IgG1, such as the hinge only spacer set forth in SEQ ID NO:51213. In other embodiments, the spacer is an Ig hinge, e.g., and IgG4 hinge, linked to a CH2 and/or CH3 domains. In some embodiments, the spacer is an Ig hinge, e.g., an IgG4 hinge, linked to CH2 and CH3 domains, such as set forth in SEQ ID NO:396. In some embodiments, the spacer is an Ig hinge, e.g., an IgG4 hinge, linked to a CH3 domain only, such as set forth in SEQ ID NO:51214. In some embodiments, the spacer is or comprises a glycine-serine rich sequence or other flexible linker such as known flexible linkers.

[0255] For example, in some embodiments, the CAR includes an antibody or fragment that specifically binds an antigen, a spacer such as any of the Ig-hinge containing spacers, a CD28 transmembrane domain, a CD28 intracellular signaling domain, and a CD3 zeta signaling domain. In some embodiments, the CAR includes the an antibody or fragment that specifically binds an antigen, a spacer such as any of the Ig-hinge containing spacers, a CD28 transmembrane domain, a CD28 intracellular signaling domain, and a CD3 zeta signaling domain. In some embodiments, such CAR constructs further includes a T2A ribosomal skip element and/or a tEGFR sequence, e.g., downstream of the CAR.

[0256] The terms “polypeptide” and “protein” are used interchangeably to refer to a polymer of amino acid residues, and are not limited to a minimum length. Polypeptides, including the provided receptors and other polypeptides, e.g., linkers or peptides, may include amino acid residues including natural and/or non-natural amino acid residues. The terms also include post-expression modifications of the polypeptide, for example, glycosylation, sialylation, acetylation, and phosphorylation. In some aspects, the polypeptides may contain modifications with respect to a native or natural sequence, as long as the protein maintains the desired activity. These modifications may be deliberate, as through site-directed mutagenesis, or may be accidental, such as through mutations of hosts which produce the proteins or errors due to PCR amplification.

[0257] b) T Cell Receptors

[0258] In some embodiments, the genetically engineered antigen receptors include recombinant T cell receptors (TCRs) and/or TCRs cloned from naturally occurring T cells. Thus, in some embodiments, the target cell has been altered to contain specific T cell receptor (TCR) genes (e.g., a TRAC and TRBC gene). TCRs or antigen-binding portions thereof include those that recognize a peptide epitope or T cell epitope of a target polypeptide, such as an antigen of a tumor, viral or autoimmune protein. In some embodiments, the TCR has binding specificity for a tumor associated antigen, e.g., carcinoembryonic antigen (CEA), GP100, melanoma antigen recognized by T cells 1 (MART1), melanoma antigen A3 (MAGEA3), NYESO1 or p53.

[0259] In some embodiments, a “T cell receptor” or “TCR” is a molecule that contains a variable α and β chains (also known as TCRα and TCRβ, respectively) or a variable γ and δ chains (also known as TCRγ and TCRδ, respectively), or antigen-binding portions thereof, and which is capable of specifically binding to a peptide bound to an MHC molecule. In some embodiments, the TCR is in the αβ form. Typically, TCRs that exist in αβ and γδ forms are generally structurally similar, but T cells expressing them may have distinct anatomical locations or functions. Generally, a TCR is or can be expressed on the surface of T cells (or T lymphocytes) where it is generally responsible for recognizing antigens bound to major histocompatibility complex (MHC) molecules.

[0260] In some embodiments, thethe TCR is a full TCRs or an antigen-binding portions or antigen-binding fragments thereof. In some embodiments, the TCR is an intact or full-length TCR, including TCRs in the αβ form or γδ form. In some embodiments, the TCR is an antigen-binding portion that is less than a full-length TCR but that binds to a specific peptide bound in an MHC molecule, such as binds to an MHC-peptide complex. In some cases, an antigen-binding portion or fragment of a TCR can contain only a portion of the structural domains of a full-length or intact TCR, but yet is able to bind the peptide epitope, such as MHC-peptide complex, to which the full TCR binds. In some cases, an antigen-binding portion contains the variable domains of a TCR, such as variable α chain and variable β chain of a TCR, sufficient to form a binding site for binding to a specific MHC-peptide complex. Generally, the variable chains of a TCR contain complementarity determining regions (CDRs) involved in recognition of the peptide, MHC and/or MHC-peptide complex.

[0261] In some embodiments, the variable domains of the TCR contain hypervariable loops, or CDRs, which generally are the primary contributors to antigen recognition and binding capabilities and specificity. In some embodiments, a CDR of a TCR or combination thereof forms all or substantially all of the antigen-binding site of a given TCR molecule. The various CDRs within a variable region of a TCR chain generally are separated by framework regions (FRs), which generally display less variability among TCR molecules as compared to the CDRs (see, e.g., Jores et al., Proc. Nat'l Acad. Sci. U.S.A. 87:9138, 1990; Chothia et al., EMBO J. 7:3745, 1988; see also Lefranc et al., Dev. Comp. Immunol. 27:55, 2003). In some embodiments, CDR3 is the main CDR responsible for antigen binding or specificity, or is the most important among the three CDRs on a given TCR variable region for antigen recognition, and/or for interaction with the processed peptide portion of the peptide-MHC complex. In some contexts, the CDR1 of the alpha chain can interact with the N-terminal part of certain antigenic peptides. In some contexts, CDR1 of the beta chain can interact with the C-terminal part of the peptide. In some contexts, CDR2 contributes most strongly to or is the primary CDR responsible for the interaction with or recognition of the MHC portion of the MHC-peptide complex. In some embodiments, the variable region of the β-chain can contain a further hypervariable region (CDR4 or HVR4), which generally is involved in superantigen binding and not antigen recognition (Kotb (1995) Clinical Microbiology Reviews, 8:411-426).

[0262] In some embodiments, a TCR contains a variable alpha domain (V_{α}) and/or a variable beta domain (V_{β}) or antigen-binding fragments thereof. In some embodiments, the α-chain and/or β-chain of a TCR also can contain a constant domain, a transmembrane domain and/or a short cytoplasmic tail (see, e.g., Janeway et al., Immunobiology: The Immune System in Health and Disease, 3^{rd} Ed., Current Biology Publications, p. 4:33, 1997). In some embodiments, the α chain constant domain is encoded by the TRAC gene (IMGT nomenclature) or is a variant thereof. In some embodiments, the β chain constant region is encoded by TRBC1 or TRBC2 genes (IMGT nomenclature) or is a variant thereof. In some embodiments, the constant domain is adjacent to the cell membrane. For example, in some cases, the extracellular portion of the TCR formed by the two chains contains two membrane-proximal constant domains, and two membrane-distal variable domains, which variable domains each contain CDRs.

[0263] It is within the level of a skilled artisan to determine or identify the various domains or regions of a TCR. In some aspects, residues of a TCR are known or can be identified according to the International Immunogenetics Information System (IMGT) numbering system (see e.g. www.imgt.org; see also, Lefranc et al. (2003) Developmental and Comparative Immunology, 2&; 55-77; and The T Cell Factsbook 2nd Edition, Lefranc and LeFranc Academic Press 2001). Using this system, the CDR1 sequences within a TCR Vα chains and/or Vβ chain correspond to the amino acids present between residue numbers 27-38, inclusive, the CDR2 sequences within a TCR Vα chain and/or Vβ chain correspond to the amino acids present between residue numbers 56-65, inclusive, and the CDR3 sequences within a TCR Vα chain and/or Vβ chain correspond to the amino acids present between residue numbers 105-117, inclusive.

[0264] In some embodiments, the TCR may be a heterodimer of two chains α and β (or optionally γ and δ) that are linked, such as by a disulfide bond or disulfide bonds. In some embodiments, the constant domain of the TCR may contain short connecting sequences in which a cysteine residue forms a disulfide bond, thereby linking the two chains of the TCR. In some embodiments, a TCR may have an additional cysteine residue in each of the α and β chains, such that the TCR contains two disulfide bonds in the constant domains. In some embodiments, each of the constant and variable domains contain disulfide bonds formed by cysteine residues.

[0265] In some embodiments, the TCR for engineering cells as described is one generated from a known TCR sequence(s), such as sequences of Vα,β chains, for which a substantially full-length coding sequence is readily available. Methods for obtaining full-length TCR sequences, including V chain sequences, from cell sources are well known. In some embodiments, nucleic acids encoding the TCR can be obtained from a variety of sources, such as by polymerase chain reaction (PCR) amplification of TCR-encoding nucleic acids within or isolated from a given cell or cells, or synthesis of publicly available TCR DNA sequences. In some embodiments, the TCR is obtained from a biological source, such as from cells such as from a T cell (e.g. cytotoxic T cell), T-cell hybridomas or other publicly available source. In some embodiments, the T-cells can be obtained from in vivo isolated cells. In some embodiments, the T-cells can be a cultured T-cell hybridoma or clone. In some embodiments, the TCR or antigen-binding portion thereof can be synthetically generated from knowledge of the sequence of the TCR.

[0266] In some embodiments, a high-affinity T cell clone for a target antigen (e.g., a cancer antigen) is identified, isolated from a patient, and introduced into the cells. In some embodiments, the TCR clone for a target antigen has been generated in transgenic mice engineered with human immune system genes (e.g., the human leukocyte antigen system, or HLA). See, e.g., tumor antigens (see, e.g., Parkhurst et al. (2009) Clin Cancer Res. 15:169-180 and Cohen et al. (2005) J Immunol. 175:5799-5808. In some embodiments, phage display is used to isolate TCRs against a target antigen (see, e.g., Varela-Rohena et al. (2008) Nat Med. 14:1390-1395 and Li (2005) Nat Biotechnol. 23:349-354.

[0267] In some embodiments, the TCR or antigen-binding portion thereof is one that has been modified or engineered. In some embodiments, directed evolution methods are used to generate TCRs with altered properties, such as with higher affinity for a specific MHC-peptide complex. In some embodiments, directed evolution is achieved by display methods including, but not limited to, yeast display (Holler et al. (2003) Nat Immunol, 4, 55-62; Holler et al. (2000) Proc Natl Acad Sci USA, 97, 5387-92), phage display (Li et al. (2005) Nat Biotechnol, 23, 349-54), or T cell display (Chervin et al. (2008) J Immunol Methods, 339, 175-84). In some embodiments, display approaches involve engineering, or modifying, a known, parent or reference TCR. For example, in some cases, a wild-type TCR can be used as a template for producing mutagenized TCRs in which in one or more residues of the CDRs are mutated, and mutants with an desired altered property, such as higher affinity for a desired target antigen, are selected.

[0268] In some embodiments as described, the TCR can contain an introduced disulfide bond or bonds. In some embodiments, the native disulfide bonds are not present. In some embodiments, the one or more of the native cysteines (e.g. in the constant domain of the α chain and β chain) that form a native interchain disulfide bond are substituted to another residue, such as to a serine or alanine. In some embodiments, an introduced disulfide bond can be formed by mutating non-cysteine residues on the alpha and beta chains, such as in the constant domain of the α chain and β chain, to cysteine. Exemplary non-native disulfide bonds of a TCR are described in published International PCT No. WO2006/000830 and WO2006037960. In some embodiments, cysteines can be introduced at residue Thr48 of the α chain and Ser57 of the β chain, at residue Thr45 of the α chain and Ser77 of the β chain, at residue Tyr10 of the α chain and Ser17 of the β chain, at residue Thr45 of the α chain and Asp59 of the β chain and/or at residue Ser15 of the α chain and Glu15 of the β chain. In some embodiments, the presence of non-native cysteine residues (e.g. resulting in one or more non-native disulfide bonds) in a recombinant TCR can favor production of the desired recombinant TCR in a cell in which it is introduced over expression of a mismatched TCR pair containing a native TCR chain.

[0269] In some embodiments, the TCR chains contain a transmembrane domain. In some embodiments, the transmembrane domain is positively charged. In some cases, the TCR chain contains a cytoplasmic tail. In some aspects, each chain (e.g. alpha or beta) of the TCR can possess one N-terminal immunoglobulin variable domain, one immunoglobulin constant domain, a transmembrane region, and a short cytoplasmic tail at the C-terminal end. In some embodiments, a TCR, for example via the cytoplasmic tail, is associated with invariant proteins of the CD3 complex involved in mediating signal transduction. In some cases, the structure allows the TCR to associate with other molecules like CD3 and subunits thereof. For example, a TCR containing constant domains with a transmembrane region may anchor the protein in the cell membrane and associate with invariant subunits of the CD3 signaling apparatus or complex. The intracellular tails of CD3 signaling subunits (e.g. CD3γ, CD3δ, CD3ε and CD3ζ chains) contain one or more immunoreceptor tyrosine-based activation motif or ITAM that are involved in the signaling capacity of the TCR complex.

[0270] In some embodiments, the TCR is a full-length TCR. In some embodiments, the TCR is an antigen-binding portion. In some embodiments, the TCR is a dimeric TCR (dTCR). In some embodiments, the TCR is a single-chain TCR (sc-TCR). A TCR may be cell-bound or in soluble form. In some embodiments, for purposes of the provided methods, the TCR is in cell-bound form expressed on the surface of a cell.

[0271] In some embodiments a dTCR contains a first polypeptide wherein a sequence corresponding to a TCR α chain variable region sequence is fused to the N terminus of a sequence corresponding to a TCR α chain constant region extracellular sequence, and a second polypeptide wherein a sequence corresponding to a TCR β chain variable region sequence is fused to the N terminus a sequence corresponding to a TCR β chain constant region extracellular sequence, the first and second polypeptides being linked by a disulfide bond. In some embodiments, the bond can correspond to the native interchain disulfide bond present in native dimeric αβ TCRs. In some embodiments, the interchain disulfide bonds are not present in a native TCR. For example, in some embodiments, one or more cysteines can be incorporated into the constant region extracellular sequences of dTCR polypeptide pair. In some cases, both a native and a non-native disulfide bond may be desirable. In some embodiments, the TCR contains a transmembrane sequence to anchor to the membrane.

[0272] In some embodiments, a dTCR contains a TCR α chain containing a variable α domain, a constant α domain and a first dimerization motif attached to the C-terminus of the constant α domain, and a TCR β chain comprising a variable β domain, a constant β domain and a first dimerization motif attached to the C-terminus of the constant β domain, wherein the first and second dimerization motifs easily interact to form a covalent bond between an amino acid in the first dimerization motif and an amino acid in the second dimerization motif linking the TCR α chain and TCR β chain together.

[0273] In some embodiments, the TCR is a scTCR, which is a single amino acid strand containing an α chain and a β chain that is able to bind to MHC-peptide complexes. Typically, a scTCR can be generated using methods known to those of skill in the art, See e.g., International published PCT Nos. WO 96/13593, WO 96/18105, WO99/18129, WO04/033685, WO2006/037960, WO2011/044186; U.S. Pat. No. 7,569,664; and Schlueter, C. J. et al. J. Mol. Biol. 256, 859 (1996).

[0274] In some embodiments, a scTCR contains a first segment constituted by an amino acid sequence corresponding to a TCR α chain variable region, a second segment constituted by an amino acid sequence corresponding to a TCR β chain variable region sequence fused to the N terminus of an amino acid sequence corresponding to a TCR β chain constant domain extracellular sequence, and a linker sequence linking the C terminus of the first segment to the N terminus of the second segment.

[0275] In some embodiments, a scTCR contains a first segment constituted by an amino acid sequence corresponding to a TCR β chain variable region, a second segment constituted by an amino acid sequence corresponding to a TCR α chain variable region sequence fused to the N terminus of an amino acid sequence corresponding to a TCR α chain constant domain extracellular sequence, and a linker sequence linking the C terminus of the first segment to the N terminus of the second segment.

[0276] In some embodiments, a scTCR contains a first segment constituted by an α chain variable region sequence fused to the N terminus of an α chain extracellular constant domain sequence, and a second segment constituted by a β chain variable region sequence fused to the N terminus of a sequence β chain extracellular constant and transmembrane sequence, and, optionally, a linker sequence linking the C terminus of the first segment to the N terminus of the second segment.

[0277] In some embodiments, a scTCR contains a first segment constituted by a TCR β chain variable region sequence fused to the N terminus of a β chain extracellular constant domain sequence, and a second segment constituted by an α chain variable region sequence fused to the N terminus of a sequence α chain extracellular constant and transmembrane sequence, and, optionally, a linker sequence linking the C terminus of the first segment to the N terminus of the second segment.

[0278] In some embodiments, for the scTCR to bind an MHC-peptide complex, the α and β chains must be paired so that the variable region sequences thereof are orientated for such binding. Various methods of promoting pairing of an α and β in a scTCR are well known in the art. In some embodiments, a linker sequence is included that links the α and β chains to form the single polypeptide strand. In some embodiments, the linker should have sufficient length to span the distance between the C terminus of the α chain and the N terminus of the β chain, or vice versa, while also ensuring that the linker length is not so long so that it blocks or reduces bonding of the scTCR to the target peptide-MHC complex.

[0279] In some embodiments, the linker of a scTCRs that links the first and second TCR segments can be any linker capable of forming a single polypeptide strand, while retaining TCR binding specificity. In some embodiments, the linker sequence may, for example, have the formula —P-AA-P—, wherein P is proline and AA represents an amino acid sequence wherein the amino acids are glycine and serine. In some embodiments, the first and second segments are paired so that the variable region sequences thereof are orientated for such binding. Hence, in some cases, the linker has a sufficient length to span the distance between the C terminus of the first segment and the N terminus of the second segment, or vice versa, but is not too long to block or reduces bonding of the scTCR to the target ligand. In some embodiments, the linker can contain from or from about 10 to 45 amino acids, such as 10 to 30 amino acids or 26 to 41 amino acids residues, for example 29, 30, 31 or 32 amino acids. In some embodiments, the linker has the formula -PGGG-(SGGGG)₅-P— or -PGGG-(SGGGG)₆-P—, wherein P is proline, G is glycine and S is serine (SEQ ID NO:51227 or 51228). In some embodiments, the linker has the sequence GSADDAKKDAAKKDGKS (SEQ ID NO:51229).

[0280] In some embodiments, a scTCR contains a disulfide bond between residues of the single amino acid strand, which, in some cases, can promote stability of the pairing between the α and β regions of the single chain molecule (see e.g. U.S. Pat. No. 7,569,664). In some embodiments, the scTCR contains a covalent disulfide bond linking a residue of the immunoglobulin region of the constant domain of the α chain to a residue of the immunoglobulin region of the constant domain of the β chain of the single chain molecule. In some embodiments, the disulfide bond corresponds to the native disulfide bond present in a native dTCR. In some embodiments, the disulfide bond in a native TCR is not present. In some embodiments, the disulfide bond is an introduced non-native disulfide bond, for example, by incorporating one or more cysteines into the constant region extracellular sequences of the first and second chain regions of the scTCR polypeptide. Exemplary cysteine mutations include any as described above. In some cases, both a native and a non-native disulfide bond may be present.

[0281] In some embodiments, a scTCR is a non-disulfide linked truncated TCR in which heterologous leucine zippers fused to the C-termini thereof facilitate chain association (see e.g. International published PCT No. WO99/60120). In some embodiments, a scTCR contain a TCRα variable domain covalently linked to a TCRβ variable domain via a peptide linker (see e.g., International published PCT No. WO99/18129).

[0282] In some embodiments, any of the TCRs, including a dTCR or scTCR, can be linked to signaling domains that yield an active TCR on the surface of a T cell. In some embodiments, the TCR is expressed on the surface of cells. In some embodiments, the TCR does contain a sequence corresponding to a transmembrane sequence. In some embodiments, the transmembrane domain can be a Cα or Cβ transmembrane domain. In some embodiments, the transmembrane domain can be from a non-TCR origin, for example, a transmembrane region from CD3z, CD28 or B7.1. In some embodiments, the TCR does contain a sequence corresponding to cytoplasmic sequences. In some embodiments, the TCR contains a CD3z signaling domain. In some embodiments, the TCR is capable of forming a TCR complex with CD3.

[0283] In some embodiments, the TCR or antigen-binding fragment thereof exhibits an affinity with an equilibrium binding constant for a target antigen of between or between about 10⁻⁵ and 10⁻¹² M and all individual values and ranges therein. In some embodiments, the target antigen is an MHC-peptide complex or ligand.

[0284] In some embodiments, the TCR or antigen binding portion thereof may be a recombinantly produced natural protein or mutated form thereof in which one or more property, such as binding characteristic, has been altered. In some embodiments, a TCR may be derived from one of various animal species, such as human, mouse, rat, or other mammal. In some embodiments, to generate a vector encoding a TCR, the α and β chains can be PCR amplified from total cDNA isolated from a T cell clone expressing the TCR of interest and cloned into an expression vector. In some embodiments, the α and β chains can be synthetically generated.

[0285] In some embodiments, the TCR alpha and beta chains are isolated and cloned into a gene expression vector. n some embodiments, transcription units can be engineered as a bicistronic unit containing an IRES (internal ribosome entry site), which allows coexpression of gene products (e.g. encoding an α and β chains) by a message from a single promoter. Alternatively, in some cases, a single promoter may direct expression of an RNA that contains, in a single open reading frame (ORF), multiple genes (e.g. encoding an α and β chains) separated from one another by sequences encoding a self-cleavage peptide (e.g., T2A) or a protease recognition site (e.g., furin). The ORF thus encodes a single polyprotein, which, either during (in the case of T2A) or after translation, is cleaved into the individual proteins. In some cases, the peptide, such as T2A, can cause the ribosome to skip (ribosome skipping) synthesis of a peptide bond at the C-terminus of a 2A element, leading to separation between the end of the 2A sequence and the next peptide downstream. Examples of 2A cleavage peptides, including those that can induce ribosome skipping, are T2A, P2A, E2A and F2A. In some embodiments, the α and β chains are cloned into different vectors. In some embodiments, the generated a and β chains are incorporated into a retroviral, e.g. lentiviral, vector.

[0286] In some embodiments, the TCR alpha and beta genes are linked via a picornavirus 2A ribosomal skip peptide so that both chains are coexpression. In some embodiments, genetic transfer of the TCR is accomplished via retroviral or lentiviral vectors, or via transposons (see, e.g., Baum et al. (2006) Molecular Therapy: The Journal of the American Society of Gene Therapy. 13:1050-1063; Frecha et al. (2010) Molecular Therapy: The Journal of the American Society of Gene Therapy. 18:1748-1757; an Hackett et al. (2010) Molecular Therapy: The Journal of the American Society of Gene Therapy. 18:674-683.

[0287] 2 Vectors and Methods of Engineering

[0288] The provided methods include expressing the recombinant receptors, including CARs or TCRs, for producing the genetically engineered cells expressing such binding molecules. The genetic engineering generally involves introduction of a nucleic acid encoding the recombinant or engineered component into the cell, such as by retroviral transduction, transfection, or transformation.

[0289] In some embodiments, gene transfer is accomplished by first stimulating the cell, such as by combining it with a stimulus that induces a response such as proliferation, survival, and/or activation, e.g., as measured by expression of a cytokine or activation marker, followed by transduction of the activated cells, and expansion in culture to numbers sufficient for clinical applications.

[0290] Various methods for the introduction of genetically engineered components, e.g., antigen receptors, e.g., CARs, are well known and may be used with the provided methods and compositions. Exemplary methods include those for transfer of nucleic acids encoding the receptors, including via viral, e.g., retroviral or lentiviral, transduction, transposons, and electroporation.

[0291] In some embodiments, nucleic acid encoding a recombinant receptor can be cloned into a suitable expression vector or vectors. The expression vector can be any suitable recombinant expression vector, and can be used to transform or transfect any suitable host. Suitable vectors include those designed for propagation and expansion or for expression or both, such as plasmids and viruses.

[0292] In some embodiments, the vector can a vector of the pUC series (Fermentas Life Sciences), the pBluescript series (Stratagene, LaJolla, Calif.), the pET series (Novagen, Madison, Wis.), the pGEX series (Pharmacia Biotech, Uppsala, Sweden), or the pEX series (Clontech, Palo Alto, Calif.). In some cases, bacteriophage vectors, such as λ610, λGT11, λZapII (Stratagene), λEMBL4, and λNM1149, also can be used. In some embodiments, plant expression vectors can be used and include pBI01, pBI101.2, pBI101.3, pBI121 and pBIN19 (Clontech). In some embodiments, animal expression vectors include pEUK-Cl, pMAM and pMAMneo (Clontech). In some embodiments, a viral vector is used, such as a retroviral vector.

[0293] In some embodiments, the recombinant expression vectors can be prepared using standard recombinant DNA techniques. In some embodiments, vectors can contain regulatory sequences, such as transcription and translation initiation and termination codons, which are specific to the type of host (e.g., bacterium, fungus, plant, or animal) into which the vector is to be introduced, as appropriate and taking into consideration whether the vector is DNA- or RNA-based. In some embodiments, the vector can contain a nonnative promoter operably linked to the nucleotide sequence encoding the recombinant receptor. In some embodiments, the promoter can be a non-viral promoter or a viral promoter, such as a cytomegalovirus (CMV) promoter, an SV40 promoter, an RSV promoter, and a promoter found in the long-terminal repeat of the murine stem cell virus. Other promoters known to a skilled artisan also are contemplated.

[0294] In some embodiments, recombinant nucleic acids are transferred into cells using recombinant infectious virus particles, such as, e.g., vectors derived from simian virus 40 (SV40), adenoviruses, adeno-associated virus (AAV). In some embodiments, recombinant nucleic acids are transferred into T cells using recombinant lentiviral vectors or retroviral vectors, such as gamma-retroviral vectors (see, e.g., Koste et al. (2014) Gene Therapy 2014 Apr. 3. doi: 10.1038/gt.2014.25; Carlens et al. (2000) Exp Hematol 28(10): 1137-46; Alonso-Camino et al. (2013) Mol Ther Nucl Acids 2, e93; Park et al., Trends Biotechnol. 2011 Nov. 29(11): 550-557.

[0295] In some embodiments, the retroviral vector has a long terminal repeat sequence (LTR), e.g., a retroviral vector derived from the Moloney murine leukemia virus (MoMLV), myeloproliferative sarcoma virus (MPSV), murine embryonic stem cell virus (MESV), murine stem cell virus (MSCV), spleen focus forming virus (SFFV), or adeno-associated virus (AAV). Most retroviral vectors are derived from murine retroviruses. In some embodiments, the retroviruses include those derived from any avian or mammalian cell source. The retroviruses typically are amphotropic, meaning that they are capable of infecting host cells of several species, including humans. In one embodiment, the gene to be expressed replaces the retroviral gag, pol and/or env sequences. A number of illustrative retroviral systems have been described (e.g., U.S. Pat. Nos. 5,219,740; 6,207,453; 5,219,740; Miller and Rosman (1989) BioTechniques 7:980-990; Miller, A. D. (1990) Human Gene Therapy 1:5-14; Scarpa et al. (1991) Virology 180:849-852; Burns et al. (1993) Proc. Natl. Acad. Sci. USA 90:8033-8037; and Boris-Lawrie and Temin (1993) Cur. Opin. Genet. Develop. 3:102-109.

[0296] Methods of lentiviral transduction are known. Exemplary methods are described in, e.g., Wang et al. (2012) J. Immunother. 35(9): 689-701; Cooper et al. (2003) Blood. 101:1637-1644; Verhoeyen et al. (2009) Methods Mol Biol. 506: 97-114; and Cavalieri et al. (2003) Blood. 102(2): 497-505.

[0297] In some embodiments, recombinant nucleic acids are transferred into T cells via electroporation (see, e.g., Chicaybam et al, (2013) PLoS ONE 8(3): e60298 and Van Tedeloo et al. (2000) Gene Therapy 7(16): 1431-1437). In some embodiments, recombinant nucleic acids are transferred into T cells via transposition (see, e.g., Manuri et al. (2010) Hum Gene Ther 21(4): 427-437; Sharma et al. (2013) Molec Ther Nucl Acids 2, e74; and Huang et al. (2009) Methods Mol Biol 506: 115-126). Other methods of introducing and expressing genetic material in immune cells include calcium phosphate transfection (e.g., as described in Current Protocols in Molecular Biology, John Wiley & Sons, New York. N.Y.), protoplast fusion, cationic liposome-mediated transfection; tungsten particle-facilitated microparticle bombardment (Johnston, Nature, 346: 776-777 (1990)); and strontium phosphate DNA co-precipitation (Brash et al., Mol. Cell Biol., 7: 2031-2034 (1987)).

[0298] Other approaches and vectors for transfer of the nucleic acids encoding the recombinant products are those described, e.g., in international patent application, Publication No.: WO2014055668, and U.S. Pat. No. 7,446,190.

[0299] In some contexts, overexpression of a stimulatory factor (for example, a lymphokine or a cytokine) may be toxic to a subject. Thus, in some contexts, the engineered cells include gene segments that cause the cells to be susceptible to negative selection in vivo, such as upon administration in adoptive immunotherapy. For example in some aspects, the cells are engineered so that they can be eliminated as a result of a change in the in vivo condition of the patient to which they are administered. The negative selectable phenotype may result from the insertion of a gene that confers sensitivity to an administered agent, for example, a compound. Negative selectable genes include the Herpes simplex virus type I thymidine kinase (HSV-I TK) gene (Wigler et al., Cell II:223, 1977) which confers ganciclovir sensitivity; the cellular hypoxanthine phosphribosyltransferase (HPRT) gene, the cellular adenine phosphoribosyltransferase (APRT) gene, bacterial cytosine deaminase, (Mullen et al., Proc. Natl. Acad. Sci. USA. 89:33 (1992)).

[0300] In some aspects, the cells further are engineered to promote expression of cytokines or other factors.

[0301] Among additional nucleic acids, e.g., genes for introduction are those to improve the efficacy of therapy, such as by promoting viability and/or function of transferred cells; genes to provide a genetic marker for selection and/or evaluation of the cells, such as to assess in vivo survival or localization; genes to improve safety, for example, by making the cell susceptible to negative selection in vivo as described by Lupton S. D. et al., Mol. and Cell Biol., 11:6 (1991); and Riddell et al., Human Gene Therapy 3:319-338 (1992); see also the publications of PCT/US91/08442 and PCT/US94/05601 by Lupton et al. describing the use of bifunctional selectable fusion genes derived from fusing a dominant positive selectable marker with a negative selectable marker. See, e.g., Riddell et al., U.S. Pat. No. 6,040,177, at columns 14-17.

[0302] C. Gene Editing of PDCD1

[0303] In any of the embodiments provided herein, an engineered immune cell can be subject to gene alteration, or gene editing, that is targeted to a locus encoding a gene involved in immunomodulation. In some embodiments, the target locus for gene editing is the programmed cell death 1 (PDCD1) locus, which encodes the programmed cell death (PD-1) protein. In some embodiments, gene editing results in an insertion or a deletion at the targeted locus, or a “knockout” of the targeted locus and elimination of the expression of the encoded protein. In some embodiments, the gene editing is achieved by non-homologous end joining (NHEJ) using a CRISPR/Cas9 system. In some embodiments, one or more guide RNA (gRNA) molecule can be used with one or more Cas9 nuclease, Cas9 nickase, enzymatically inactive Cas9 or variants thereof. Exemplary features of the gRNA molecule(s) and the Cas9 molecule(s) are described below.

[0304] I. Guide RNA (gRNA) molecules

[0305] In some embodiments, the agent comprises a gRNA that targets a region of the PDCD1 locus. A “gRNA molecule” refers to a nucleic acid that promotes the specific targeting or homing of a gRNA molecule/Cas9 molecule complex to a target nucleic acid, such as a locus on the genomic DNA of a cell. gRNA molecules can be unimolecular (having a single RNA molecule), sometimes referred to herein as “chimeric” gRNAs, or modular (comprising more than one, and typically two, separate RNA molecules).

[0306] Several exemplary gRNA structures, with domains indicated thereon, are provided in FIG. 1. While not wishing to be bound by theory, with regard to the three dimensional form, or intra- or inter-strand interactions of an active form of a gRNA, regions of high complementarity are sometimes shown as duplexes in FIG. 1 and other depictions provided herein.

[0307] In some cases, the gRNA is a unimolecular or chimeric gRNA comprising, from 5′ to 3′:
[0308] a targeting domain which is complementary to a target nucleic acid, such as a sequence from the PDCD1 gene (coding sequence set forth in SEQ ID NO:51208); a first complementarity domain; a linking domain; a second complementarity domain (which is complementary to the first complementarity domain); a proximal domain; and optionally, a tail domain.

[0309] In other cases, the gRNA is a modular gRNA comprising first and second strands. In these cases, the first strand preferably includes, from 5′ to 3′: a targeting domain (which is complementary to a target nucleic acid, such as a sequence from the PDCD1 gene, coding sequence set forth in SEQ ID NO:51208) and a first complementarity domain. The second strand generally includes, from 5′ to 3′: optionally, a 5′ extension domain; a second complementarity domain; a proximal domain; and optionally, a tail domain.

[0310] These domains are discussed briefly below:

[0311] a) The Targeting Domain

[0312] FIG. 1 provides examples of the placement of targeting domains.

[0313] The targeting domain comprises a nucleotide sequence that is complementary, e.g., at least 80, 85, 90, 95, 98 or 99% complementary, e.g., fully complementary, to the target sequence on the target nucleic acid. The strand of the target nucleic acid comprising the target sequence is referred to herein as the “complementary strand” of the target nucleic acid. Guidance on the selection of targeting domains can be found, e.g., in Fu Y et al., Nat Biotechnol 2014 (doi: 10.1038/nbt.2808) and Sternberg S H et al., Nature 2014 (doi: 10.1038/nature13011).

[0314] The targeting domain is part of an RNA molecule and will therefore comprise the base uracil (U), while any DNA encoding the gRNA molecule will comprise the base thymine (T). While not wishing to be bound by theory, in an embodiment, it is believed that the complementarity of the targeting domain with the target sequence contributes to specificity of the interaction of the gRNA molecule/Cas9 molecule complex with a target nucleic acid. It is understood that in a targeting domain and target sequence pair, the uracil bases in the targeting domain will pair with the adenine bases in the target sequence. In an embodiment, the target domain itself comprises in the 5′ to 3′ direction, an optional secondary domain, and a core domain. In an embodiment, the core domain is fully complementary with the target sequence. In an embodiment, the targeting domain is 5 to 50 nucleotides in length. The strand of the target nucleic acid with which the targeting domain is complementary is referred to herein as the complementary strand. Some or all of the nucleotides of the domain can have a modification, e.g., to render it less susceptible to degradation, improve bio-compatibility, etc. By way of non-limiting example, the backbone of the target domain can be modified with a phosphorothioate, or other modification(s). In some cases, a nucleotide of the targeting domain can comprise a 2′ modification, e.g., a 2-acetylation, e.g., a 2′ methylation, or other modification(s).

[0315] In various embodiments, the targeting domain is 16-26 nucleotides in length (i.e. it is 16 nucleocides in length, or 17 nucleotides in length, or 18, 19, 20, 21, 22, 23, 24, 25 or 26 nucleotides in length.

[0316] Exemplary Targeting Domains

[0317] In some embodiments, the target sequence (target domain) is at or near the PDCD1 locus, such as any part of the PDCD1 coding sequence set forth in SEQ ID NO:51208. In some embodiments, the target nucleic acid complementary to the targeting domain is located at an early coding region of a gene of interest, such as PDCD1. Targeting of the early coding region can be used to knockout (i.e., eliminate expression of) the gene of interest. In some embodiments, the early coding region of a gene of interest includes sequence immediately following a start codon (e.g., ATG), or within 500 bp of the start codon (e.g., less than 500, 450, 400, 350, 300, 250, 200, 150, 100, 50 bp, 40 bp, 30 bp, 20 bp, or 10 bp). In particular examples, the target nucleic acid is within 200 bp, 150 bp, 100 bp, 50 bp, 40 bp, 30 bp, 20 bp or 10 bp of the start codon. In some examples, the targeting domain of the gRNA is complementary, e.g., at least 80, 85, 90, 95, 98 or 99% complementary, e.g., fully complementary, to the target sequence on the target nucleic acid, such as the target nucleic acid in the PDCD1 locus.

[0318] In some embodiments, the targeting domain for knockout or knockdown of PDCD1 is or comprises a sequence selected from any of SEQ ID NOS: 481-3748 or 14657-21037.

[0319] In some embodiments, the targeting domain is or comprises the sequence GUCUGGGCGGUGCUACAACU (SEQ ID NO:508), GCCCUGGCCAGUCGUCU (SEQ ID NO: 514), CGUCUGGGCGGUGCUACAAC (SEQ ID NO:1533), UGUAGCACCGCCCAGACGAC (SEQ ID NO:579), CGACUGGCCAGGGCGCCUGU (SEQ ID NO:582) and CACCUACCUAAGAACCAUCC (SEQ ID NO:723). In some embodiments, the targeting domain comprises the sequence GUCUGGGCGGUGCUACAACU (SEQ ID NO:508). In some embodiments, the targeting domain comprises the sequence GCCCUGGCCAGUCGUCU (SEQ ID NO: 514). In some embodiments, the targeting domain comprises the sequence CGUCUGGGCGGUGCUACAAC (SEQ ID NO:1533). In some embodiments, the targeting domain comprises the sequence UGUAGCACCGCCCAGACGAC (SEQ ID NO:579). In some embodiments, the targeting domain comprises the sequence CGACUGGCCAGGGCGCCUGU (SEQ ID NO:582) and CACCUACCUAAGAACCAUCC (SEQ ID NO:723).

[0320] In some embodiments, targeting domains include those for knocking out the PDCD1 gene using S. pyogenes Cas9 or using N. meningitidis Cas9.

[0321] In some embodiments, targeting domains include those for knocking out the PDCD1 gene using S. pyogenes Cas9. Any of the targeting domains can be used with a S. pyogenes Cas9 molecule that generates a double stranded break (Cas9 nuclease) or a single-stranded break (Cas9 nickase).

[0322] In an embodiment, dual targeting is used to create two nicks on opposite DNA strands by using S. pyogenes Cas9 nickases with two targeting domains that are complementary to opposite DNA strands, e.g., a gRNA comprising any minus strand targeting domain may be paired with any gRNA comprising a plus strand targeting domain. In some embodiments, the two gRNAs are oriented on the DNA such that PAMs face outward and the distance between the 5′ ends of the gRNAs is 0-50 bp. In an embodiment, two gRNAs are used to target two Cas9 nucleases or two Cas9 nickases, for example, using a pair of Cas9 molecule/gRNA molecule complex guided by two different gRNA molecules to cleave the target domain with two single stranded breaks on opposing strands of the target domain. In some embodiments, the two Cas9 nickases can include a molecule having HNH activity, e.g., a Cas9 molecule having the RuvC activity inactivated, e.g., a Cas9 molecule having a mutation at D10, e.g., the D10A mutation, a molecule having RuvC activity, e.g., a Cas9 molecule having the HNH activity inactivated, e.g., a Cas9 molecule having a mutation at H840, e.g., a H840A, or a molecule having RuvC activity, e.g., a Cas9 molecule having the HNH activity inactivated, e.g., a Cas9 molecule having a mutation at N863, e.g., N863A. In some embodiments, each of the two gRNAs are complexed with a D10A Cas9 nickase

[0323] In some embodiments, the two targeting domains can include a gRNA with a targeting domain that is or comprises any of the sequences in Group A can be paired with a gRNA with any targeting domain from Group B (Table 1A). In some embodiments, a gRNA with a targeting domain from Group C can be paired with a gRNA with any targeting domain from Group D (Table 1A).

TABLE 1A

| Group A | Group B |
|---|---|
| UGACACGGAAGCGGCAGUCC | GCGUGACUUCCACAUGAGCG |
| (SEQ ID NO: 600); | (SEQ ID NO: 567); |
| CACGGAAGCGGCAGUCC | ACUUCCACAUGAGCGUGGUC |
| (SEQ ID NO: 601) | (SEQ ID NO: 590); |
| | UGACUUCCACAUGAGCG |
| | (SEQ ID NO: 592); |
| | UCCACAUGAGCGUGGUC |
| | (SEQ ID NO: 593) |
| Group C | Group D |
| CAUGUGGAAGUCACGCCCGU | AGGGCCCGGCGCAAUGACAG |
| (SEQ ID NO: 597); | (SEQ ID NO: 594); |
| AUGUGGAAGUCACGCCCGUU | GCCCGGCGCAAUGACAG |
| (SEQ ID NO: 598); | (SEQ ID NO: 568) |
| GUGGAAGUCACGCCCGU | |
| (SEQ ID NO: 571); | |
| UGGAAGUCACGCCCGUU | |
| (SED ID NO: 599) | |

[0324] In some embodiments, the two targeting domains can include a gRNA with a targeting domain that is or comprises any of the sequences in Group E can be paired with a gRNA with any targeting domain from Group F (Table 1B).

TABLE 1B

| Group E | Group F |
|---|---|
| CGACUGGCCAGGGCGCCUGU | GUCUGGGCGGUGCUACAACU (SEQ ID |
| (SEQ ID NO: 582) | NO: 508); |
| UGUAGCACCGCCCAGACGAC | GGGCGGUGCUACAACUGGGC (SEQ ID |
| (SEQ ID NO: 579) | NO: 510); |
| ACCGCCCAGACGACUGGCCA | GGCCAGGAUGGUUCUUAGGU (SEQ ID |
| (SEQ ID NO: 581) | NO: 511); |
| | GGAUGGUUCUUAGGUAGGUG (SEQ ID |
| | NO: 512); |
| | CGUCUGGGCGGUGCUACAAC (SEQ ID |
| | NO: 576); |
| | CUACAACUGGGCUGGCGGCC (SEQ ID |
| | NO: 766); |

[0325] In some embodiments, the two targeting domains can include a gRNA pairs from the following pairs in Table 1C. In some embodiments, the pair of Cas9 molecule/gRNA molecule complex include a gRNA pair from Table 1C, each complexed with a D10A Cas9 nickase. In some embodiments, the pair of Cas9 molecule/gRNA molecule complex include a gRNA pair from Table 1C, each complexed with N863A Cas9 nickase.

TABLE 1C

| | |
|---|---|
| CGACUGGCCAGGGCGCCUGU | GUCUGGGCGGUGCUACAACU; |
| (SEQ ID NO: 582) and | (SEQ ID NO: 508) |
| CGACUGGCCAGGGCGCCUGU | GGGCGGUGCUACAACUGGGC; |
| (SEQ ID NO: 582) and | (SEQ ID NO: 510) |
| CGACUGGCCAGGGCGCCUGU | GGCCAGGAUGGUUCUUAGGU; |
| (SEQ ID NO: 582) and | (SEQ ID NO: 511) |
| CGACUGGCCAGGGCGCCUGU | GGAUGGUUCUUAGGUAGGUG; |
| (SEQ ID NO: 582) and | (SEQ ID NO: 512) |
| CGACUGGCCAGGGCGCCUGU | CGUCUGGGCGGUGCUACAAC; |
| (SEQ ID NO: 582) and | (SEQ ID NO: 576) |
| CGACUGGCCAGGGCGCCUGU | CUACAACUGGGCUGGCGGCC; |
| (SEQ ID NO: 582) and | (SEQ ID NO: 766) |
| UGUAGCACCGCCCAGACGAC | GGCCAGGAUGGUUCUUAGGU; |
| (SEQ ID NO: 579) and | (SEQ ID NO: 511) |
| UGUAGCACCGCCCAGACGAC | GGAUGGUUCUUAGGUAGGUG; |
| (SEQ ID NO: 579) and | (SEQ ID NO: 512) or |
| ACCGCCCAGACGACUGGCCA | GGCCAGGAUGGUUCUUAGGU. |
| (SEQ ID NO: 581) and | (SEQ ID NO: 511) |

[0326] In some embodiments, an engineered immune cell can be subject to gene alteration, or gene editing, by additionally or alternatively targeting to a locus from one or more of FAS, BID, CTLA4, CBLB, PTPN6, TRAC and/or TRBC. In some embodiments, one or more of the FAS, BID, CTLA4, PDCD1, CBLB, PTPN6, TRAC and TRBC genes are targeted as a targeted knockout or knockdown, e.g., to affect T cell proliferation, survival and/or function. In an embodiment, said approach comprises knocking out or knocking down one T-cell expressed gene (e.g., FAS, BID, CTLA4, PDCD1, CBLB, PTPN6, TRAC or TRBC gene). In another embodiment, the approach comprises knocking out or knocking down two T-cell expressed genes, e.g., two of FAS, BID, CTLA4, PDCD1, CBLB, PTPN6, TRAC or TRBC genes. In another embodiment, the approach comprises knocking out or knocking down three T-cell expressed genes, e.g., three of FAS, BID, CTLA4, PDCD1, CBLB, PTPN6, TRAC or TRBC genes. In another embodiment, the approach comprises knocking out or knocking down four T-cell expressed genes, e.g., four of FAS, BID, CTLA4, PDCD1, CBLB, PTPN6, TRAC or TRBC genes. In another embodiment, the approach comprises knocking out or knocking down five T-cell expressed genes, e.g., five of FAS, BID, CTLA4, PDCD1, CBLB, PTPN6, TRAC or TRBC genes. In another embodiment, the approach comprises knocking out or knocking down six T-cell expressed genes, e.g., six of FAS, BID, CTLA4, PDCD1, CBLB, PTPN6, TRAC or TRBC genes. In another embodiment, the approach comprises knocking out or knocking down seven T-cell expressed genes, e.g., seven of FAS, BID, CTLA4, PDCD1, CBLB, PTPN6, TRAC or TRBC genes. In another embodiment, the approach comprises knocking out or knocking down eight T-cell expressed genes, e.g., each of FAS, BID, CTLA4, PDCD1, CBLB, PTPN6, TRAC and TRBC genes.

[0327] In some embodiments, the targeting domain for knockout or knockdown of FAS is or comprises a sequence selected from any of SEQ ID NOS: 8460-10759 or 27729-32635.

[0328] In some embodiments, the targeting domain for knockout or knockdown of BID is or comprises a sequence selected from any of SEQ ID NOS: 10760-13285 or 40252-45980.

[0329] In some embodiments, the targeting domain for knockout or knockdown of CTLA4 is or comprises a sequence selected from any of SEQ ID NOS: 13286-14656 or 45981-49273.

[0330] In some embodiments, the targeting domain for knockout or knockdown of CBLB is or comprises a sequence selected from any of SEQ ID NOS: 6119-8639 or 32636-40251.

[0331] In some embodiments, the targeting domain for knockout or knockdown of PTPN6 is or comprises a sequence selected from any of SEQ ID NOS: 3749-6118 or 21038-27728.

[0332] In some embodiments, the targeting domain for knockout or knockdown of TRAC is or comprises a sequence selected from any of SEQ ID NOS: 49274-49950.

[0333] In some embodiments, the targeting domain for knockout or knockdown of TRBC is or comprises a sequence selected from any of SEQ ID NOS: 49951-51200.

[0334] b) The First Complementarity Domain

[0335] FIGS. 1A-1G provide examples of first complementarity domains. The first complementarity domain is complementary with the second complementarity domain described below, and generally has sufficient complementarity to the second complementarity domain to form a duplexed region under at least some physiological conditions. The first complementarity domain is typically 5 to 30 nucleotides in length, and may be 5 to 25 nucleotides in length, 7 to 25 nucleotides in length, 7 to 22 nucleotides in length, 7 to 18 nucleotides in length, or 7 to 15 nucleotides in length. In various embodiments, the first complementary domain is 5, 6, 7, 8, 9, 10, 11, 12, 13, 14, 15, 16, 17, 18, 19, 20, 21, 22, 23, 24, or 25 nucleotides in length.

[0336] Typically, the first complementarity domain does not have exact complementarity with the second complementarity domain target. In some embodiments, the first complementarity domain can have 1, 2, 3, 4 or 5 nucleotides that are not complementary with the corresponding nucleotide of the second complementarity domain. For instance, a segment of 1, 2, 3, 4, 5 or 6, (e.g., 3) nucleotides of the first complementarity domain may not pair in the duplex, and may form a non-duplexed or looped-out region. In some instances, an unpaired, or loop-out, region, e.g., a loop-out of 3 nucleotides, is present on the second complementarity domain. This unpaired region optionally begins 1, 2, 3, 4, 5, or 6, e.g., 4, nucleotides from the 5′ end of the second complementarity domain.

[0337] The first complementarity domain can include 3 subdomains, which, in the 5′ to 3′ direction are: a 5′ subdomain, a central subdomain, and a 3′ subdomain. In an embodiment, the 5′ subdomain is 4-9, e.g., 4, 5, 6, 7, 8 or 9 nucleotides in length. In an embodiment, the central subdomain is 1, 2, or 3, e.g., 1, nucleotide in length. In an embodiment, the 3′ subdomain is 3 to 25, e.g., 4-22, 4-18, or 4 to 10, or 3, 4, 5, 6, 7, 8, 9, 10, 11, 12, 13, 14, 15, 16, 17, 18, 19, 20, 21, 22, 23, 24, or 25, nucleotides in length.

[0338] In some embodiments, the first and second complementarity domains, when duplexed, comprise 11 paired nucleotides, for example, in the gRNA sequence (one paired strand underlined, one bolded):

(SEQ ID NO: 5)

NNNNNNNNNNNNNNNNNNNNGUUUUAGAGCUAGAAAUAGCAAGUUAAAAU
AAGGCUAGUCCGUUAUCAACUUGAAAAAGUGGCACCGAGUCGGUGC.

[0339] In some embodiments, the first and second complementarity domains, when duplexed, comprise 15 paired nucleotides, for example in the gRNA sequence (one paired strand underlined, one bolded):

(SEQ ID NO: 27)

NNNNNNNNNNNNNNNNNNNNGUUUUAGAGCUAUGCUGAAAAGCAUAGCAA
GUUAAAAUAAGGCUAGUCCGUUAUCAACUUGAAAAAGUGGCACCGAGUCG
GUGC.

[0340] In some embodiments the first and second complementarity domains, when duplexed, comprise 16 paired nucleotides, for example in the gRNA sequence (one paired strand underlined, one bolded):

(SEQ ID NO: 28)

NNNNNNNNNNNNNNNNNNNNGUUUUAGAGCUAUGCUGGAAACAGCAUAGC
AAGUUAAAAUAAGGCUAGUCCGUUAUCAACUUGAAAAAGUGGCACCGAGU
CGGUGC.

[0341] In some embodiments the first and second complementarity domains, when duplexed, comprise 21 paired nucleotides, for example in the gRNA sequence (one paired strand underlined, one bolded):

(SEQ ID NO: 29)

NNNNNNNNNNNNNNNNNNNNGUUUUAGAGCUAUGCUGUUUUGGAAACAAA
ACAGCAUAGCAAGUUAAAAUAAGGCUAGUCCGUUAUCAACUUGAAAAAGU
GGCACCGAGUCGGUGC.

[0342] In some embodiments, nucleotides are exchanged to remove poly-U tracts, for example in the gRNA sequences (exchanged nucleotides underlined):

(SEQ ID NO: 30)

NNNNNNNNNNNNNNNNNNNNGUAUUAGAGCUAGAAAUAGCAAGUUAAUAU
AAGGCUAGUCCGUUAUCAACUUGAAAAAGUGGCACCGAGUCGGUGC;

(SEQ ID NO: 31)

NNNNNNNNNNNNNNNNNNNNGUUUAAGAGCUAGAAAUAGCAAGUUUAAAU
AAGGCUAGUCCGUUAUCAACUUGAAAAAGUGGCACCGAGUCGGUGC;
and

(SEQ ID NO: 32)

NNNNNNNNNNNNNNNNNNNNGUAUUAGAGCUAUGCUGUAUUGGAAACAAU
ACAGCAUAGCAAGUUAAUAUAAGGCUAGUCCGUUAUCAACUUGAAAAAGU
GGCACCGAGUCGGUGC.

[0343] The first complementarity domain can share homology with, or be derived from, a naturally occurring first complementarity domain. In an embodiment, it has at least 50% homology with a first complementarity domain disclosed herein, e.g., an S. pyogenes, S. aureus, N. meningtidis, or S. thermophilus, first complementarity domain.

[0344] It should be noted that one or more, or even all of the nucleotides of the first complementarity domain, can have a modification along the lines discussed above for the targeting domain.

[0345] c) The Linking Domain

[0346] FIGS. 1A-1G provide examples of linking domains.

[0347] In a unimolecular or chimeric gRNA, the linking domain serves to link the first complementarity domain with the second complementarity domain of a unimolecular gRNA. The linking domain can link the first and second complementarity domains covalently or non-covalently. In an embodiment, the linkage is covalent. In an embodiment, the linking domain covalently couples the first and second complementarity domains, see, e.g., FIGS. 1B-1E. In an embodiment, the linking domain is, or comprises, a covalent bond interposed between the first complementarity domain and the second complementarity domain. Typically the linking domain comprises one or more, e.g., 2, 3, 4, 5, 6, 7, 8, 9, or 10 nucleotides, but in various embodiments the linker can be 20, 30, 40, 50 or even 100 nucleotides in length.

[0348] In modular gRNA molecules, the two molecules are associated by virtue of the hybridization of the complementarity domains and a linking domain may not be present. See e.g., FIG. 1A.

[0349] A wide variety of linking domains are suitable for use in unimolecular gRNA molecules. Linking domains can consist of a covalent bond, or be as short as one or a few nucleotides, e.g., 1, 2, 3, 4, or 5 nucleotides in length. In an embodiment, a linking domain is 2, 3, 4, 5, 6, 7, 8, 9, 10, 15, 20, or 25 or more nucleotides in length. In an embodiment, a linking domain is 2 to 50, 2 to 40, 2 to 30, 2 to 20, 2 to 10, or 2 to 5 nucleotides in length. In an embodiment, a linking domain shares homology with, or is derived from, a naturally occurring sequence, e.g., the sequence of a tracrRNA that is 5′ to the second complementarity domain. In an embodiment, the linking domain has at least 50% homology with a linking domain disclosed herein.

[0350] As discussed above in connection with the first complementarity domain, some or all of the nucleotides of the linking domain can include a modification.

[0351] d) The 5′ Extension Domain

[0352] In some cases, a modular gRNA can comprise additional sequence, 5′ to the second complementarity domain, referred to herein as the 5′ extension domain, see, e.g., FIG. 1A. In an embodiment, the 5′ extension domain is, 2-10, 2-9, 2-8, 2-7, 2-6, 2-5, or 2-4 nucleotides in length. In an embodiment, the 5′ extension domain is 2, 3, 4, 5, 6, 7, 8, 9, or 10 or more nucleotides in length.

[0353] e) The Second Complementarity Domain

[0354] FIG. 1A-1G provide examples of second complementarity domains. The second complementarity domain is complementary with the first complementarity domain, and generally has sufficient complementarity to the second complementarity domain to form a duplexed region under at least some physiological conditions. In some cases, e.g., as shown in FIG. 1A-1B, the second complementarity domain can include sequence that lacks complementarity with the first complementarity domain, e.g., sequence that loops out from the duplexed region.

[0355] The second complementarity domain may be 5 to 27 nucleotides in length, and in some cases may be longer than the first complementarity region. For instance, the second complementary domain can be 7 to 27 nucleotides in length, 7 to 25 nucleotides in length, 7 to 20 nucleotides in length, or 7 to 17 nucleotides in length. More generally, the complementary domain may be 5, 6, 7, 8, 9, 10, 11, 12, 13, 14, 15, 16, 17, 18, 19, 20, 21, 22, 23, 24, 25, or 26 nucleotides in length.

[0356] In an embodiment, the second complementarity domain comprises 3 subdomains, which, in the 5′ to 3′ direction are: a 5′ subdomain, a central subdomain, and a 3′ subdomain. In an embodiment, the 5′ subdomain is 3 to 25, e.g., 4 to 22, 4 to18, or 4 to 10, or 3, 4, 5, 6, 7, 8, 9, 10, 11, 12, 13, 14, 15, 16, 17, 18, 19, 20, 21, 22, 23, 24, or 25 nucleotides in length. In an embodiment, the central subdomain is 1, 2, 3, 4 or 5, e.g., 3, nucleotides in length. In an embodiment, the 3′ subdomain is 4 to 9, e.g., 4, 5, 6, 7, 8 or 9 nucleotides in length.

[0357] In an embodiment, the 5′ subdomain and the 3′ subdomain of the first complementarity domain, are respectively, complementary, e.g., fully complementary, with the 3′ subdomain and the 5′ subdomain of the second complementarity domain.

[0358] The second complementarity domain can share homology with or be derived from a naturally occurring second complementarity domain. In an embodiment, it has at least 50% homology with a second complementarity domain disclosed herein, e.g., an S. pyogenes, S. aureus, N. meningtidis, or S. thermophilus, first complementarity domain.

[0359] Some or all of the nucleotides of the second complementarity domain can have a modification, e.g., a modification found in Section VIII herein.

[0360] f) The Proximal Domain

[0361] FIGS. 1A-1G provide examples of proximal domains.

[0362] In an embodiment, the proximal domain is 5 to 20 nucleotides in length. In an embodiment, the proximal domain can share homology with or be derived from a naturally occurring proximal domain. In an embodiment, it has at least 50% homology with a proximal domain disclosed herein, e.g., an S. pyogenes, S. aureus, N. meningtidis, or S. thermophilus, proximal domain.

[0363] Some or all of the nucleotides of the proximal domain can have a modification along the lines described above.

[0364] g) The Tail Domain

[0365] FIGS. 1A-1G provide examples of tail domains.

[0366] As can be seen by inspection of the tail domains in FIG. 1A and FIGS. 1B-1F, a broad spectrum of tail domains are suitable for use in gRNA molecules. In various embodiments, the tail domain is 0 (absent), 1, 2, 3, 4, 5, 6, 7, 8, 9, or 10 nucleotides in length. In certain embodiments, the tail domain nucleotides are from or share homology with sequence from the 5′ end of a naturally occurring tail domain, see e.g., FIG. 1D or 1E. The tail domain also optionally includes sequences that are complementary to each other and which, under at least some physiological conditions, form a duplexed region.

[0367] Tail domains can share homology with or be derived from naturally occurring proximal tail domains. By way of non-limiting example, a given tail domain according to various embodiments of the present disclosure may share at least 50% homology with a naturally occurring tail domain disclosed herein, e.g., an S. pyogenes, S. aureus, N. meningtidis, or S. thermophilus, tail domain.

[0368] In certain cases, the tail domain includes nucleotides at the 3′ end that are related to the method of in vitro or in vivo transcription. When a T7 promoter is used for in vitro transcription of the gRNA, these nucleotides may be any nucleotides present before the 3′ end of the DNA template. When a U6 promoter is used for in vivo transcription, these nucleotides may be the sequence UUUUUU. When alternate pol-III promoters are used, these nucleotides may be various numbers or uracil bases or may include alternate bases.

[0369] As a non-limiting example, in various embodiments the proximal and tail domain, taken together comprise the following sequences:

(SEQ ID NO: 33)

AAGGCUAGUCCGUUAUCAACUUGAAAAAGUGGCACCGAGUCGGUGCU,

(SEQ ID NO: 34)

AAGGCUAGUCCGUUAUCAACUUGAAAAAGUGGCACCGAGUCGGUGGUGC,

(SEQ ID NO: 35)

AAGGCUAGUCCGUUAUCAACUUGAAAAAGUGGCACCGAGUCGGUGCGG
AUC,

(SEQ ID NO: 36)

AAGGCUAGUCCGUUAUCAACUUGAAAAAGUG,

(SEQ ID NO: 37)

AAGGCUAGUCCGUUAUCA,
or

(SEQ ID NO: 38)

AAGGCUAGUCCG.

[0370] In an embodiment, the tail domain comprises the 3′ sequence UUUUUU, e.g., if a U6 promoter is used for transcription.

[0371] In an embodiment, the tail domain comprises the 3′ sequence UUUU, e.g., if an H1 promoter is used for transcription.

[0372] In an embodiment, tail domain comprises variable numbers of 3′ Us depending, e.g., on the termination signal of the pol-III promoter used.

[0373] In an embodiment, the tail domain comprises variable 3′ sequence derived from the DNA template if a T7 promoter is used.

[0374] In an embodiment, the tail domain comprises variable 3′ sequence derived from the DNA template, e.g., if in vitro transcription is used to generate the RNA molecule.

[0375] In an embodiment, the tail domain comprises variable 3′ sequence derived from the DNA template, e.g., if a pol-II promoter is used to drive transcription.

[0376] In an embodiment a gRNA has the following structure:

[0377] 5′ [targeting domain]-[first complementarity domain]-[linking domain]-[second complementarity domain]-[proximal domain]-[tail domain]-3′

[0378] wherein, the targeting domain comprises a core domain and optionally a secondary domain, and is 10 to 50 nucleotides in length;

[0379] the first complementarity domain is 5 to 25 nucleotides in length and, In an embodiment has at least 50, 60, 70, 80, 85, 90, 95, 98 or 99% homology with a reference first complementarity domain disclosed herein;

[0380] the linking domain is 1 to 5 nucleotides in length;

[0381] the proximal domain is 5 to 20 nucleotides in length and, in an embodiment has at least 50, 60, 70, 80, 85, 90, 95, 98 or 99% homology with a reference proximal domain disclosed herein; and

[0382] the tail domain is absent or a nucleotide sequence is 1 to 50 nucleotides in length and, in an embodiment has at least 50, 60, 70, 80, 85, 90, 95, 98 or 99% homology with a reference tail domain disclosed herein.

[0383] h) Exemplary Chimeric gRNAs

[0384] In an embodiment, a unimolecular, or chimeric, gRNA comprises, preferably from 5′ to 3′: a targeting domain, e.g., comprising 15, 16, 17, 18, 19, 20, 21, 22, 23, 24, 25, or 26 nucleotides (which is complementary to a target nucleic acid); a first complementarity domain; a linking domain; a second complementarity domain (which is complementary to the first complementarity domain); a proximal domain; and a tail domain, wherein, (a) the proximal and tail domain, when taken together, comprise at least 15, 18, 20, 25, 30, 31, 35, 40, 45, 49, 50, or 53 nucleotides; (b) there are at least 15, 18, 20, 25, 30, 31, 35, 40, 45, 49, 50, or 53 nucleotides 3′ to the last nucleotide of the second complementarity domain; or (c) there are at least 16, 19, 21, 26, 31, 32, 36, 41, 46, 50, 51, or 54 nucleotides 3′ to the last nucleotide of the second complementarity domain that is complementary to its corresponding nucleotide of the first complementarity domain.

[0385] In an embodiment, the sequence from (a), (b), or (c), has at least 60, 75, 80, 85, 90, 95, or 99% homology with the corresponding sequence of a naturally occurring gRNA, or with a gRNA described herein. In an embodiment, the proximal and tail domain, when taken together, comprise at least 15, 18, 20, 25, 30, 31, 35, 40, 45, 49, 50, or 53 nucleotides. In an embodiment, there are at least 15, 18, 20, 25, 30, 31, 35, 40, 45, 49, 50, or 53 nucleotides 3′ to the last nucleotide of the second complementarity domain. In an embodiment, there are at least 16, 19, 21, 26, 31, 32, 36, 41, 46, 50, 51, or 54 nucleotides 3′ to the last nucleotide of the second complementarity domain that is complementary to its corresponding nucleotide of the first complementarity domain. In an embodiment, the targeting domain comprises, has, or consists of, 16, 17, 18, 19, 20, 21, 22, 23, 24, 25 or 26 nucleotides (e.g., 16, 17, 18, 19, 20, 21, 22, 23, 24, 25 or 26 consecutive nucleotides) having complementarity with the target domain, e.g., the targeting domain is 16, 17, 18, 19, 20, 21, 22, 23, 24, 25 or 26 nucleotides in length.

[0386] In an embodiment, the unimolecular, or chimeric, gRNA molecule (comprising a targeting domain, a first complementary domain, a linking domain, a second complementary domain, a proximal domain and, optionally, a tail domain) comprises the following sequence in which the targeting domain is depicted as 20 Ns but could be any sequence and range in length from 16 to 26 nucleotides and in which the gRNA sequence is followed by 6 Us, which serve as a termination signal for the U6 promoter, but which could be either absent or fewer in number: NNNNNNNNNNNNNNNNNNNNGUUUUAGAGCUAGAAAUAGCAAGUUAAAAUAAGGCUAG UCCGUUAUCAACUUGAAAAAGUGGCACCGAGUCGGUGCUUUUUU (SEQ ID NO:40). In an embodiment, the unimolecular, or chimeric, gRNA molecule is a S. pyogenes gRNA molecule.

[0387] In some embodiments, the unimolecular, or chimeric, gRNA molecule (comprising a targeting domain, a first complementary domain, a linking domain, a second complementary domain, a proximal domain and, optionally, a tail domain) comprises the following sequence in which the targeting domain is depicted as 20 Ns but could be any sequence and range in length from 16 to 26 nucleotides and in which the gRNA sequence is followed by 6 Us, which serve as a termination signal for the U6 promoter, but which could be either absent or fewer in number: NNNNNNNNNNNNNNNNNNNNGUUUUAGUACUCUGGAAACAGAAUCUACUAAAAC AAGGCAAAAUGCCGUGUUUAUCUCGUCAACUUGUUGGCGAGAUUUUUU (SEQ ID NO:41). In an embodiment, the unimolecular, or chimeric, gRNA molecule is a S. aureus gRNA molecule.

[0388] In some embodiments, the targeting domain in the exemplary chimeric gRNA is or comprises a sequence selected from any of SEQ ID NOS: 481-3748.

[0389] In some embodiments, the targeting domain in the exemplary chimeric gRNA is or comprises a sequence selected from any of GUCUGGGCGGUGCUACAACU (SEQ ID NO:508), GCCCUGGCCAGUCGUCU (SEQ ID NO: 514), CGUCUGGGCGGUGCUACAAC (SEQ ID NO:1533), UGUAGCACCGCCCAGACGAC (SEQ ID NO:579), CGACUGGCCAGGGCGCCUGU (SEQ ID NO:582) and CACCUACCUAAGAACCAUCC (SEQ ID NO:723). In some embodiments, the targeting domain is or comprises the sequence GUCUGGGCGGUGCUACAACU (SEQ ID NO:508). In some embodiments, the targeting domain is or comprises the sequence GCCCUGGCCAGUCGUCU (SEQ ID NO: 514). In some embodiments, the targeting domain is or comprises the sequence CGUCUGGGCGGUGCUACAAC (SEQ ID NO:1533). In some embodiments, the targeting domain is or comprises the sequence UGUAGCACCGCCCAGACGAC (SEQ ID NO:579). In some embodiments, the targeting domain is or comprises the sequence CGACUGGCCAGGGCGCCUGU (SEQ ID NO:582) and CACCUACCUAAGAACCAUCC (SEQ ID NO:723).

[0390] The sequences and structures of exemplary chimeric gRNAs are also shown in FIGS. 10A-10B.

[0391] i) Exemplary Modular gRNAs

[0392] In an embodiment, a modular gRNA comprises first and second strands. The first strand comprises, preferably from 5′ to 3′; a targeting domain, e.g., comprising 15, 16, 17, 18, 19, 20, 21, 22, 23, 24, 25, or 26 nucleotides; a first complementarity domain. The second strand comprises, preferably from 5′ to 3′: optionally a 5′ extension domain; a second complementarity domain; a proximal domain; and a tail domain, wherein: (a) the proximal and tail domain, when taken together, comprise at least 15, 18, 20, 25, 30, 31, 35, 40, 45, 49, 50, or 53 nucleotides; (b) there are at least 15, 18, 20, 25, 30, 31, 35, 40, 45, 49, 50, or 53 nucleotides 3′ to the last nucleotide of the second complementarity domain; or (c) there are at least 16, 19, 21, 26, 31, 32, 36, 41, 46, 50, 51, or 54 nucleotides 3′ to the last nucleotide of the second complementarity domain that is complementary to its corresponding nucleotide of the first complementarity domain.

[0393] In an embodiment, the sequence from (a), (b), or (c), has at least 60, 75, 80, 85, 90, 95, or 99% homology with the corresponding sequence of a naturally occurring gRNA, or with a gRNA described herein. In an embodiment, the proximal and tail domain, when taken together, comprise at least 15, 18, 20, 25, 30, 31, 35, 40, 45, 49, 50, or 53 nucleotides. In an embodiment there are at least 15, 18, 20, 25, 30, 31, 35, 40, 45, 49, 50, or 53 nucleotides 3′ to the last nucleotide of the second complementarity domain.

[0394] In an embodiment, there are at least 16, 19, 21, 26, 31, 32, 36, 41, 46, 50, 51, or 54 nucleotides 3′ to the last nucleotide of the second complementarity domain that is complementary to its corresponding nucleotide of the first complementarity domain.

[0395] In an embodiment, the targeting domain has, or consists of, 16, 17, 18, 19, 20, 21, 22, 23, 24, 25 or 26 nucleotides (e.g., 16, 17, 18, 19, 20, 21, 22, 23, 24, 25 or 26 consecutive nucleotides) having complementarity with the target domain, e.g., the targeting domain is 16, 17, 18, 19, 20, 21, 22, 23, 24, 25 or 26 nucleotides in length.

[0396] In some embodiments, the targeting domain in the exemplary modular gRNA is or comprises a sequence selected from any of SEQ ID NOS: 481-3748.

[0397] In some embodiments, the targeting domain in the exemplary modular gRNA is or comprises a sequence selected from any of GUCUGGGCGGUGCUACAACU (SEQ ID NO:508), GCCCUGGCCAGUCGUCU (SEQ ID NO: 514), CGUCUGGGCGGUGCUACAAC (SEQ ID NO:1533), UGUAGCACCGCCCAGACGAC (SEQ ID NO:579), CGACUGGCCAGGGCGCCUGU (SEQ ID NO:582) and CACCUACCUAAGAACCAUCC (SEQ ID NO:723). In some embodiments, the targeting domain is or comprises the sequence GUCUGGGCGGUGCUACAACU (SEQ ID NO:508). In some embodiments, the targeting domain is or comprises the sequence GCCCUGGCCAGUCGUCU (SEQ ID NO: 514). In some embodiments, the targeting domain is or comprises the sequence CGUCUGGGCGGUGCUACAAC (SEQ ID NO:1533). In some embodiments, the targeting domain is or comprises the sequence UGUAGCACCGCCCAGACGAC (SEQ ID NO:579). In some embodiments, the targeting domain is or comprises the sequence CGACUGGCCAGGGCGCCUGU (SEQ ID NO:582) and CACCUACCUAAGAACCAUCC (SEQ ID NO:723).

[0398] 2 Methods for Designing gRNAs

[0399] Methods for designing gRNAs are described herein, including methods for selecting, designing and validating targeting domains. Exemplary targeting domains are also provided herein. Targeting domains discussed herein can be incorporated into the gRNAs described herein.

[0400] Methods for selection and validation of target sequences as well as off-target analyses are described, e.g., in Mali et al., 2013 SCIENCE 339(6121): 823-826; Hsu et al. NAT BIOTECHNOL, 31(9): 827-32; Fu et al., 2014 NAT BIOTECHNOL, doi: 10.1038/nbt.2808. PubMed PMID: 24463574; Heigwer et al., 2014 NAT METHODS 11(2):122-3. doi: 10.1038/nmeth.2812. PubMed PMID: 24481216; Bae et al., 2014 BIOINFORMATICS PubMed PMID: 24463181; Xiao A et al., 2014 BIOINFORMATICS PubMed PMID: 24389662.

[0401] In some embodiments, a software tool can be used to optimize the choice of gRNA within a user's target sequence, e.g., to minimize total off-target activity across the genome. Off target activity may be other than cleavage. For example, for each possible gRNA choice using S. pyogenes Cas9, software tools can identify all potential off-target sequences (preceding either NAG or NGG PAMs) across the genome that contain up to a certain number (e.g., 1, 2, 3, 4, 5, 6, 7, 8, 9, or 10) of mismatched base-pairs. The cleavage efficiency at each off-target sequence can be predicted, e.g., using an experimentally-derived weighting scheme. Each possible gRNA can then be ranked according to its total predicted off-target cleavage; the top-ranked gRNAs represent those that are likely to have the greatest on-target and the least off-target cleavage. Other functions, e.g., automated reagent design for gRNA vector construction, primer design for the on-target Surveyor assay, and primer design for high-throughput detection and quantification of off-target cleavage via next-generation sequencing, can also be included in the tool. Candidate gRNA molecules can be evaluated by art-known methods or as described herein.

[0402] In some embodiments, gRNAs for use with S. pyogenes, S. aureus, and N. meningitidis Cas9s are identified using a DNA sequence searching algorithm, e.g., using a custom gRNA design software based on the public tool cas-offinder (Bae et al. Bioinformatics. 2014; 30(10): 1473-1475). The custom gRNA design software scores guides after calculating their genome-wide off-target propensity. Typically matches ranging from perfect matches to 7 mismatches are considered for guides ranging in length from 17 to 24. In some aspects, once the off-target sites are computationally determined, an aggregate score is calculated for each guide and summarized in a tabular output using a web-interface. In addition to identifying potential gRNA sites adjacent to PAM sequences, the software also can identify all PAM adjacent sequences that differ by 1, 2, 3 or more nucleotides from the selected gRNA sites. In some embodiments, gGenomic DNA sequences for each gene are obtained from the UCSC Genome browser and sequences can be screened for repeat elements using the publicly available RepeatMasker program. RepeatMasker searches input DNA sequences for repeated elements and regions of low complexity. The output is a detailed annotation of the repeats present in a given query sequence.

[0403] Following identification, gRNAs can be ranked into tiers based on one or more of their distance to the target site, their orthogonality and presence of a 5′ G (based on identification of close matches in the human genome containing a relevant PAM, e.g., in the case of S. pyogenes, a NGG PAM, in the case of S. aureus, NNGRR (e.g, a NNGRRT or NNGRRV) PAM, and in the case of N. meningtidis, a NNNNGATT or NNNNGCTT PAM). Orthogonality refers to the number of sequences in the human genome that contain a minimum number of mismatches to the target sequence. A “high level of orthogonality” or “good orthogonality” may, for example, refer to 20-mer targeting domains that have no identical sequences in the human genome besides the intended target, nor any sequences that contain one or two mismatches in the target sequence. Targeting domains with good orthogonality are selected to minimize off-target DNA cleavage. It is to be understood that this is a non-limiting example and that a variety of strategies could be utilized to identify gRNAs for use with S. pyogenes, S. aureus and N. meningitidis or other Cas9 enzymes.

[0404] In some embodiments, gRNAs for use with the S. pyogenes Cas9 can be identified using the publicly available web-based ZiFiT server (Fu et al., Improving CRISPR-Cas nuclease specificity using truncated guide RNAs. Nat Biotechnol. 2014 Jan. 26. doi: 10.1038/nbt.2808. PubMed PMID: 24463574, for the original references see Sander et al., 2007, NAR 35:W599-605; Sander et al., 2010, NAR 38: W462-8). In addition to identifying potential gRNA sites adjacent to PAM sequences, the software also identifies all PAM adjacent sequences that differ by 1, 2, 3 or more nucleotides from the selected gRNA sites. In some aspects, genomic DNA sequences for each gene can be obtained from the UCSC Genome browser and sequences can be screened for repeat elements using the publicly available Repeat-Masker program. RepeatMasker searches input DNA sequences for repeated elements and regions of low complexity. The output is a detailed annotation of the repeats present in a given query sequence.

[0405] Following identification, gRNAs for use with a S. pyogenes Cas9 can be ranked into tiers, e.g. into 5 tiers. In some embodiments, the targeting domains for first tier gRNA molecules are selected based on their distance to the target site, their orthogonality and presence of a 5′ G (based on the ZiFiT identification of close matches in the human genome containing an NGG PAM). In some embodiments, both 17-mer and 20-mer gRNAs are designed for targets. In some aspects, gRNAs are also selected both for single-gRNA nuclease cutting and for the dual gRNA nickase strategy. Criteria for selecting gRNAs and the determination for which gRNAs can be used for which strategy can be based on several considerations. In some embodiments, gRNAs for both single-gRNA nuclease cleavage and for a dual-gRNA paired “nickase” strategy are identified. In some embodiments for selecting gRNAs, including the determination for which gRNAs can be used for the dual-gRNA paired “nickase” strategy, gRNA pairs should be oriented on the DNA such that PAMs are facing out and cutting with the D10A Cas9 nickase will result in 5′ overhangs. In some aspects, it can be assumed that cleaving with dual nickase pairs will result in deletion of the entire intervening sequence at a reasonable frequency. However, cleaving with dual nickase pairs can also often result in indel mutations at the site of only one of the gRNAs. Candidate pair members can be tested for how efficiently they remove the entire sequence versus just causing indel mutations at the site of one gRNA.

[0406] In some embodiments, the targeting domains for first tier gRNA molecules can be selected based on (1) a reasonable distance to the target position, e.g., within the first 500 bp of coding sequence downstream of start codon, (2) a high level of orthogonality, and (3) the presence of a 5′ G. In some embodiments, for selection of second tier gRNAs, the requirement for a 5′G can be removed, but the distance restriction is required and a high level of orthogonality was required. In some embodiments, third tier selection uses the same distance restriction and the requirement for a 5′G, but removes the requirement of good orthogonality. In some embodiments, fourth tier selection uses the same distance restriction but removes the requirement of good orthogonality and start with a 5′G. In some embodiments, fifth tier selection removes the requirement of good orthogonality and a 5′G, and a longer sequence (e.g., the rest of the coding sequence, e.g., additional 500 bp upstream or downstream to the transcription target site) is scanned. In certain instances, no gRNA is identified based on the criteria of the particular tier.

[0407] In some emobdiments, gRNAs are identified for single-gRNA nuclease cleavage as well as for a dual-gRNA paired “nickase” strategy.

[0408] In some aspects, gRNAs for use with the N. meningitidis and S. aureus Cas9s can be identified manually by scanning genomic DNA sequence for the presence of PAM sequences. These gRNAs canbe separated into two tiers. In some embodiments, for first tier gRNAs, targeting domains are selected within the first 500 bp of coding sequence downstream of start codon. In some embodiments, for second tier gRNAs, targeting domains are selected within the remaining coding sequence (downstream of the first 500 bp). In certain instances, no gRNA is identified based on the criteria of the particular tier.

[0409] In some embodiments, another strategy for identifying guide RNAs (gRNAs) for use with S. pyogenes, S. aureus and N. meningtidis Cas9s can use a DNA sequence searching algorithm. In some aspects, guide RNA design is carried out using a custom guide RNA design software based on the public tool cas-offinder (reference:Cas-OFFinder: a fast and versatile algorithm that searches for potential off-target sites of Cas9 RNA-guided endonucleases, Bioinformatics. 2014 Feb. 17. Bae S, Park J, Kim J S. PMID:24463181). Said custom guide RNA design software scores guides after calculating their genomewide off-target propensity. Typically matches ranging from perfect matches to 7 mismatches are considered for guides ranging in length from 17 to 24. Once the off-target sites are computationally determined, an aggregate score is calculated for each guide and summarized in a tabular output using a web-interface. In addition to identifying potential gRNA sites adjacent to PAM sequences, the software also identifies all PAM adjacent sequences that differ by 1, 2, 3 or more nucleotides from the selected gRNA sites. In some embodiments, genomic DNA sequence for each gene is obtained from the UCSC Genome browser and sequences are screened for repeat elements using the publically available RepeatMasker program. RepeatMasker searches input DNA sequences for repeated elements and regions of low complexity. The output is a detailed annotation of the repeats present in a given query sequence.

[0410] In some embodiments, following identification, gRNAs are ranked into tiers based on their distance to the target site or their orthogonality (based on identification of close matches in the human genome containing a relavant PAM, e.g., in the case of S. pyogenes, a NGG PAM, in the case of S. aureus, NNGRR (e.g, a NNGRRT or NNGRRV) PAM, and in the case of N. meningtidiss, a NNNNGATT or NNNNGCTT PAM. In some aspects, targeting domains with good orthogonality are selected to minimize off-target DNA cleavage.

[0411] As an example, for S. pyogenes and N. meningtidiss targets, 17-mer, or 20-mer gRNAs can be designed. As another example, for S. aureus targets, 18-mer, 19-mer, 20-mer, 21-mer, 22-mer, 23-mer and 24-mer gRNAs can be designed.

[0412] In some embodiments, gRNAs for both single-gRNA nuclease cleavage and for a dual-gRNA paired “nickase” strategy are identified. In some embodiments for selecting gRNAs, including the determination for which gRNAs can be used for the dual-gRNA paired “nickase” strategy, gRNA pairs should be oriented on the DNA such that PAMs are facing out and cutting with the D10A Cas9 nickase will result in 5′ overhangs. In some aspects, it can be assumed that cleaving with dual nickase pairs will result in deletion of the entire intervening sequence at a reasonable frequency. However, cleaving with dual nickase pairs can also often result in indel mutations at the site of only one of the gRNAs. Candidate pair members can be tested for how efficiently they remove the entire sequence versus just causing indel mutations at the site of one gRNA.

[0413] For designing knock out strategies, in some embodiments, the targeting domains for tier 1 gRNA molecules for S. pyogenes are selected based on their distance to the target site and their orthogonality (PAM is NGG). In some cases, the targeting domains for tier 1 gRNA molecules are selected based on (1) a reasonable distance to the target position, e.g., within the first 500 bp of coding sequence downstream of start codon and (2) a high level of orthogonality. In some aspects, for selection of tier 2 gRNAs, a high level of orthogonality is not required. In some cases, tier 3 gRNAs remove the requirement of good orthogonality and a longer sequence (e.g., the rest of the coding sequence) can be scanned. In certain instances, no gRNA is identified based on the criteria of the particular tier.

[0414] For designing knock out strategies, in some embodiments, the targeting domain for tier 1 gRNA molecules for N. meningtidis were selected within the first 500 bp of the coding sequence and had a high level of orthogonality. The targeting domain for tier 2 gRNA molecules for N. meningtidis were selected within the first 500 bp of the coding sequence and did not require high orthogonality. The targeting domain for tier 3 gRNA molecules for N. meningtidis were selected within a remainder of coding sequence downstream of the 500 bp. Note that tiers are non-inclusive (each gRNA is listed only once). In certain instances, no gRNA was identified based on the criteria of the particular tier.

[0415] For designing knock out strategies, in some embodiments, the targeting domain for tier 1 grNA molecules for S. aureus is selected within the first 500 bp of the coding sequence, has a high level of orthogonality, and contains a NNGRRT PAM. In some embodiments, the targeting domain for tier 2 grNA molecules for S. aureus is selected within the first 500 bp of the coding sequence, no level of orthogonality is required, and contains a NNGRRT PAM. In some embodiments, the targeting domain for tier 3 gRNA molecules for S. aureus are selected within the remainder of the coding sequence downstream and contain a NNGRRT PAM. In some embodiments, the targeting domain for tier 4 gRNA molecules for S. aureus are selected within the first 500 bp of the coding sequence and contain a NNGRRV PAM. In some embodiments, the targeting domain for tier 5 gRNA molecules for S. aureus are selected within the remainder of the coding sequence downstream and contain a NNGRRV PAM. In certain instances, no gRNA is identified based on the criteria of the particular tier.

[0416] For designing of gRNA molecules for knocking down strategies, in some embodiments, the targeting domain for tier 1 gRNA molecules for S. pyogenes are selected within the first 500 bp upstream and downstream of the transcription start site and have a high level of orthogonality. In some embodiments, the targeting domain for tier 2 gRNA molecules for S. pyogenes are selected within the first 500 bp upstream and downstream of the transcription start site and do not require high orthogonality. In some embodiments, the targeting domain for tier 3 gRNA molecules for S. pyogenes are selected within the additional 500 bp upstream and downstream of transcription start site (e.g., extending to 1 kb up and downstream of the transcription start site). In certain instances, no gRNA is identified based on the criteria of the particular tier.

[0417] For designing of gRNA molecules for knocking down strategies, in some embodiments, the targeting domain for tier 1 gRNA molecules for N. meningtidis are selected within the first 500 bp upstream and downstream of the transcription start site and have a high level of orthogonality. In some embodiments, the targeting domain for tier 2 gRNA molecules for N. meningtidis are selected within the first 500 bp upstream and downstream of the transcription start site and do not require high orthogonality. In some embodiments, the targeting domain for tier 3 gRNA molecules for N. meningtidis are selected within the additional 500 bp upstream and downstream of transcription start site (e.g., extending to 1 kb up and downstream of the transcription start site). In certain instances, no gRNA is identified based on the criteria of the particular tier.

[0418] For designing of gRNA molecules for knocking down strategies, in some embodiments, the targeting domain for tier 1 gRNA molecules for S. aureus are selected within 500 bp upstream and downstream of transcription start site, a high level of orthogonality and PAM is NNGRRT. In some embodiments, the targeting domain for tier 2 gRNA molecules for S. aureus are selected within 500 bp upstream and downstream of transcription start site, no orthogonality requirement and PAM is NNGRRT. In some embodiments, the targeting domain for tier 3 gRNA molecules for S. aureus are selected within the additional 500 bp upstream and downstream of transcription start site (e.g., extending to 1 kb up and downstream of the transcription start site) and PAM is NNGRRT. In some embodiments, the targeting domain for tier 4 gRNA molecules for S. aureus are selected within 500 bp upstream and downstream of transcription start site and PAM is NNGRRV. In some embodiments, the targeting domain for tier 5 gRNA molecules for S. aureus are selected within the additional 500 bp upstream and downstream of transcription start site (extending to 1 kb up and downstream of the transcription start site) and PAM is NNGRRV. In certain instances, no gRNA is identified based on the criteria of the particular tier.

[0419] 3. Cas9

[0420] Cas9 molecules of a variety of species can be used in the methods and compositions described herein. While the S. pyogenes, S. aureus, N. meningitidis, and S. thermophilus Cas9 molecules are the subject of much of the disclosure herein, Cas9 molecules of, derived from, or based on the Cas9 proteins of other species listed herein can be used as well. In other words, while the much of the description herein uses S. pyogenes, S. aureus, N. meningitidis, and S. thermophilus Cas9 molecules, Cas9 molecules from the other species can replace them. Such species include: Acidovorax avenae, Actinobacillus pleuropneumoniae, Actinobacillus succinogenes, Actinobacillus suis, Actinomyces sp., Cycliphilusdenitrificans, Aminomonas paucivorans, Bacillus cereus, Bacillus smithii, Bacillus thuringiensis, Bacteroides sp., Blastopirellula marina, Bradyrhizobium sp., Brevibacillus laterosporus, Campylobacter coli, Campylobacter jejuni, Campylobacter lari, Candidatus puniceispirillum, Clostridium cellulolyticum, Clostridium perfringens, Corynebacterium accolens, Corynebacterium diphtheria, Corynebacterium matruchotii, Dinoroseobacter shibae, Eubacterium dolichum, Gammaproteobacterium, Gluconacetobacter diazotrophicus, Haemophilus parainfluenzae, Haemophilus sputorum, Helicobacter canadensis, Helicobacter cinaedi, Helicobacter mustelae, Ilyobacter polytropus, Kingella kingae, Lactobacillus crispatus, Listeria ivanovii, Listeria monocytogenes, Listeriaceae bacterium, Methylocystis sp., Methylosinus trichosporium, Mobiluncus mulieris, Neisseria bacilliformis, Neisseria cinerea, Neisseria flavescens, Neisseria lactamica, Neisseria meningitidis, Neisseria sp., Neisseria wadsworthii, Nitrosomonas sp., Parvibaculum lavamentivorans, Pasteurella multocida, Phascolarctobacterium succinatutens, Ralstonia syzygii, Rhodopseudomonas palustris, Rhodovulum sp., Simonsiella muelleri, Sphingomonas sp., Sporolactobacillus vineae, Staphylococcus aureus, Staphylococcus lugdunensis, Streptococcus sp., Subdoligranulum sp., Tistrella mobilis, Treponema sp., or Verminephrobacter eiseniae.

[0421] A Cas9 molecule, or Cas9 polypeptide, as that term is used herein, refers to a molecule or polypeptide that can interact with a gRNA molecule and, in concert with the gRNA molecule, homes or localizes to a site which comprises a target domain and PAM sequence. Cas9 molecule and Cas9 polypeptide, as those terms are used herein, refer to naturally occurring Cas9 molecules and to engineered, altered, or modified Cas9 molecules or Cas9 polypeptides that differ, e.g., by at least one amino acid residue, from a reference sequence, e.g., the most similar naturally occurring Cas9 molecule or a sequence of Table 2A.

[0422] a) Cas9 Domains

[0423] Crystal structures have been determined for two different naturally occurring bacterial Cas9 molecules (Jinek et al., Science, 343(6176):1247997, 2014) and for S. pyogenes Cas9 with a guide RNA (e.g., a synthetic fusion of crRNA and tracrRNA) (Nishimasu et al., Cell, 156:935-949, 2014; and Anders et al., Nature, 2014, doi: 10.1038/nature13579).

[0424] A naturally occurring Cas9 molecule comprises two lobes: a recognition (REC) lobe and a nuclease (NUC) lobe; each of which further comprises domains described herein. FIGS. 8A-8B provide a schematic of the organization of important Cas9 domains in the primary structure. The domain nomenclature and the numbering of the amino acid residues encompassed by each domain used throughout this disclosure is as described in Nishimasu et al. The numbering of the amino acid residues is with reference to Cas9 from S. pyogenes.

[0425] The REC lobe comprises the arginine-rich bridge helix (BH), the REC1 domain, and the REC2 domain. The REC lobe does not share structural similarity with other known proteins, indicating that it is a Cas9-specific functional domain. The BH domain is a long α-helix and arginine rich region and comprises amino acids 60-93 of the sequence of S. pyogenes Cas9. The REC1 domain is important for recognition of the repeat:anti-repeat duplex, e.g., of a gRNA or a tracrRNA, and is therefore critical for Cas9 activity by recognizing the target sequence. The REC1 domain comprises two REC1 motifs at amino acids 94 to 179 and 308 to 717 of the sequence of S. pyogenes Cas9. These two REC1 domains, though separated by the REC2 domain in the linear primary structure, assemble in the tertiary structure to form the REC1 domain. The REC2 domain, or parts thereof, may also play a role in the recognition of the repeat:anti-repeat duplex. The REC2 domain comprises amino acids 180-307 of the sequence of S. pyogenes Cas9.

[0426] The NUC lobe comprises the RuvC domain (also referred to herein as RuvC-like domain), the HNH domain (also referred to herein as HNH-like domain), and the PAM-interacting (PI) domain. The RuvC domain shares structural similarity to retroviral integrase superfamily members and cleaves a single strand, e.g., the non-complementary strand of the target nucleic acid molecule. The RuvC domain is assembled from the three split RuvC motifs (RuvC I, RuvCII, and RuvCIII, which are often commonly referred to in the art as RuvCI domain, or N-terminal RuvC domain, RuvCII domain, and RuvCIII domain) at amino acids 1-59, 718-769, and 909-1098, respectively, of the sequence of S. pyogenes Cas9. Similar to the REC1 domain, the three RuvC motifs are linearly separated by other domains in the primary structure, however in the tertiary structure, the three RuvC motifs assemble and form the RuvC domain. The HNH domain shares structural similarity with HNH endonucleases, and cleaves a single strand, e.g., the complementary strand of the target nucleic acid molecule. The HNH domain lies between the RuvC II-III motifs and comprises amino acids 775-908 of the sequence of S. pyogenes Cas9. The PI domain interacts with the PAM of the target nucleic acid molecule, and comprises amino acids 1099-1368 of the sequence of S. pyogenes Cas9.

[0427] (1) A RuvC-Like Domain and an HNH-Like Domain

[0428] In an embodiment, a Cas9 molecule or Cas9 polypeptide comprises an HNH-like domain and a RuvC-like domain. In an embodiment, cleavage activity is dependent on a RuvC-like domain and an HNH-like domain. A Cas9 molecule or Cas9 polypeptide, e.g., an eaCas9 molecule or eaCas9 polypeptide, can comprise one or more of the following domains: a RuvC-like domain and an HNH-like domain. In an embodiment, a Cas9 molecule or Cas9 polypeptide is an eaCas9 molecule or eaCas9 polypeptide and the eaCas9 molecule or eaCas9 polypeptide comprises a RuvC-like domain, e.g., a RuvC-like domain described below, and/or an HNH-like domain, e.g., an HNH-like domain described below.

[0429] (2) RuvC-Like Domains

[0430] In an embodiment, a RuvC-like domain cleaves, a single strand, e.g., the non-complementary strand of the target nucleic acid molecule. The Cas9 molecule or Cas9 polypeptide can include more than one RuvC-like domain (e.g., one, two, three or more RuvC-like domains). In an embodiment, a RuvC-like domain is at least 5, 6, 7, 8 amino acids in length but not more than 20, 19, 18, 17, 16 or 15 amino acids in length. In an embodiment, the Cas9 molecule or Cas9 polypeptide comprises an N-terminal RuvC-like domain of about 10 to 20 amino acids, e.g., about 15 amino acids in length.

[0431] (3) N-Terminal RuvC-Like Domains

[0432] Some naturally occurring Cas9 molecules comprise more than one RuvC-like domain with cleavage being dependent on the N-terminal RuvC-like domain. Accordingly, Cas9 molecules or Cas9 polypeptide can comprise an N-terminal RuvC-like domain. Exemplary N-terminal RuvC-like domains are described below.

[0433] In an embodiment, an eaCas9 molecule or eaCas9 polypeptide comprises an N-terminal RuvC-like domain comprising an amino acid sequence of formula I:

(SEQ ID NO: 8)

D-X1-G-X2-X3-X4-X5-G-X6-X7-X8-X9,

[0434] wherein,
[0435] X1 is selected from I, V, M, L and T (e.g., selected from I, V, and L);
[0436] X2 is selected from T, I, V, S, N, Y, E and L (e.g., selected from T, V, and I);
[0437] X3 is selected from N, S, G, A, D, T, R, M and F (e.g., A or N);
[0438] X4 is selected from S, Y, N and F (e.g., S);
[0439] X5 is selected from V, I, L, C, T and F (e.g., selected from V, I and L);
[0440] X6 is selected from W, F, V, Y, S and L (e.g., W);
[0441] X7 is selected from A, S, C, V and G (e.g., selected from A and S);
[0442] X8 is selected from V, I, L, A, M and H (e.g., selected from V, I, M and L); and
[0443] X9 is selected from any amino acid or is absent, designated by Δ (e.g., selected from T, V, I, L, Δ, F, S, A, Y, M and R, or, e.g., selected from T, V, I, L and Δ).

[0444] In an embodiment, the N-terminal RuvC-like domain differs from a sequence of SEQ ID NO:8, by as many as 1 but no more than 2, 3, 4, or 5 residues.

[0445] In embodiment, the N-terminal RuvC-like domain is cleavage competent.

[0446] In embodiment, the N-terminal RuvC-like domain is cleavage incompetent.

[0447] In an embodiment, a eaCas9 molecule or eaCas9 polypeptide comprises an N-terminal RuvC-like domain comprising an amino acid sequence of formula II:

(SEQ ID NO: 9)

D-X1-G-X2-X3-S-X5-G-X6-X7-X8-X9,

[0448] wherein
[0449] X1 is selected from I, V, M, L and T (e.g., selected from I, V, and L);
[0450] X2 is selected from T, I, V, S, N, Y, E and L (e.g., selected from T, V, and I);
[0451] X3 is selected from N, S, G, A, D, T, R, M and F (e.g., A or N);
[0452] X5 is selected from V, I, L, C, T and F (e.g., selected from V, I and L);
[0453] X6 is selected from W, F, V, Y, S and L (e.g., W);
[0454] X7 is selected from A, S, C, V and G (e.g., selected from A and S);
[0455] X8 is selected from V, I, L, A, M and H (e.g., selected from V, I, M and L); and
[0456] X9 is selected from any amino acid or is absent (e.g., selected from T, V, I, L, Δ, F, S, A, Y, M and R or selected from e.g., T, V, I, L and Δ).

[0457] In an embodiment, the N-terminal RuvC-like domain differs from a sequence of SEQ ID NO:9 by as many as 1 but no more than 2, 3, 4, or 5 residues.

[0458] In an embodiment, the N-terminal RuvC-like domain comprises an amino acid sequence of formula III:

(SEQ ID NO: 10)

D-I-G-X2-X3-S-V-G-W-A-X8-X9,

[0459] wherein
[0460] X2 is selected from T, I, V, S, N, Y, E and L (e.g., selected from T, V, and I);
[0461] X3 is selected from N, S, G, A, D, T, R, M and F (e.g., A or N);
[0462] X8 is selected from V, I, L, A, M and H (e.g., selected from V, I, M and L); and
[0463] X9 is selected from any amino acid or is absent (e.g., selected from T, V, I, L, A, F, S, A, Y, M and R or selected from e.g., T, V, I, L and A).

[0464] In an embodiment, the N-terminal RuvC-like domain differs from a sequence of SEQ ID NO:10 by as many as 1 but no more than, 2, 3, 4, or 5 residues.

[0465] In an embodiment, the N-terminal RuvC-like domain comprises an amino acid sequence of formula III:

(SEQ ID NO: 11)

D-I-G-T-N-S-V-G-W-A-V-X,

[0466] wherein X is a non-polar alkyl amino acid or a hydroxyl amino acid, e.g., X is selected from V, I, L and T (e.g., the eaCas9 molecule can comprise an N-terminal RuvC-like domain shown in FIGS. 2A-2G (is depicted as Y)).

[0467] In an embodiment, the N-terminal RuvC-like domain differs from a sequence of SEQ ID NO:11 by as many as 1 but no more than, 2, 3, 4, or 5 residues.

[0468] In an embodiment, the N-terminal RuvC-like domain differs from a sequence of an N-terminal RuvC like domain disclosed herein, e.g., in FIGS. 3A-3B or FIGS. 7A-7B, as many as 1 but no more than 2, 3, 4, or 5 residues. In an embodiment, 1, 2, or all 3 of the highly conserved residues identified in FIGS. 3A-3B or FIGS. 7A-7B are present.

[0469] In an embodiment, the N-terminal RuvC-like domain differs from a sequence of an N-terminal RuvC-like domain disclosed herein, e.g., in FIGS. 4A-4B or FIGS. 7A-7B, as many as 1 but no more than 2, 3, 4, or 5 residues. In an embodiment, 1, 2, 3 or all 4 of the highly conserved residues identified in FIGS. 4A-4B or FIGS. 7A-7B are present.

[0470] (4) Additional RuvC-Like Domains

[0471] In addition to the N-terminal RuvC-like domain, the Cas9 molecule or Cas9 polypeptide, e.g., an eaCas9 molecule or eaCas9 polypeptide, can comprise one or more additional RuvC-like domains. In an embodiment, the Cas9 molecule or Cas9 polypeptide can comprise two additional RuvC-like domains. Preferably, the additional RuvC-like domain is at least 5 amino acids in length and, e.g., less than 15 amino acids in length, e.g., 5 to 10 amino acids in length, e.g., 8 amino acids in length.

[0472] An additional RuvC-like domain can comprise an amino acid sequence:

(SEQ ID NO: 12)

I-X1-X2-E-X3-A-R-E,

[0473] wherein
[0474] X1 is V or H,
[0475] X2 is I, L or V (e.g., I or V); and
[0476] X3 is M or T.

[0477] In an embodiment, the additional RuvC-like domain comprises the amino acid sequence:

(SEQ ID NO: 13)

I-V-X2-E-M-A-R-E,

[0478] wherein

[0479] X2 is I, L or V (e.g., I or V) (e.g., the eaCas9 molecule or eaCas9 polypeptide can comprise an additional RuvC-like domain shown in FIGS. 2A-2G or FIGS. 7A-7B (depicted as B)).

[0480] An additional RuvC-like domain can comprise an amino acid sequence:

(SEQ ID NO: 14)

H-H-A-X1-D-A-X2-X3,

[0481] wherein
[0482] X1 is H or L;
[0483] X2 is R or V; and
[0484] X3 is E or V.

[0485] In an embodiment, the additional RuvC-like domain comprises the amino acid sequence:

(SEQ ID NO: 15)

H-H-A-H-D-A-Y-L.

[0486] In an embodiment, the additional RuvC-like domain differs from a sequence of SEQ ID NO:12, 13, 14 or 15 by as many as 1 but no more than 2, 3, 4, or 5 residues.

[0487] In some embodiments, the sequence flanking the N-terminal RuvC-like domain is a sequence of formula V:

(SEQ ID NO: 16)

K-X1′-Y-X2′-X3′-X4′-Z-T-D-X9′-Y,

[0488] wherein
[0489] X1′ is selected from K and P,
[0490] X2′ is selected from V, L, I, and F (e.g., V, I and L);
[0491] X3′ is selected from G, A and S (e.g., G),
[0492] X4′ is selected from L, I, V and F (e.g., L);
[0493] X9′ is selected from D, E, N and Q; and
[0494] Z is an N-terminal RuvC-like domain, e.g., as described above.

[0495] (5) HNH-Like Domains

[0496] In an embodiment, an HNH-like domain cleaves a single stranded complementary domain, e.g., a complementary strand of a double stranded nucleic acid molecule. In an embodiment, an HNH-like domain is at least 15, 20, 25 amino acids in length but not more than 40, 35 or 30 amino acids in length, e.g., 20 to 35 amino acids in length, e.g., 25 to 30 amino acids in length. Exemplary HNH-like domains are described below.

[0497] In an embodiment, an eaCas9 molecule or eaCas9 polypeptide comprises an HNH-like domain having an amino acid sequence of formula VI:

(SEQ ID NO: 17)

X1-X2-X3-H-X4-X5-P-X6-X7-X8-X9-X10-X11-X12-X13-
X14-X15-N-X16-X17-X18-X19-X20-X21-X22-X23-N,

[0498] wherein
[0499] X1 is selected from D, E, Q and N (e.g., D and E);
[0500] X2 is selected from L, I, R, Q, V, M and K;
[0501] X3 is selected from D and E;
[0502] X4 is selected from I, V, T, A and L (e.g., A, I and V);
[0503] X5 is selected from V, Y, I, L, F and W (e.g., V, I and L);
[0504] X6 is selected from Q, H, R, K, Y, I, L, F and W;
[0505] X7 is selected from S, A, D, T and K (e.g., S and A);
[0506] X8 is selected from F, L, V, K, Y, M, I, R, A, E, D and Q (e.g., F);
[0507] X9 is selected from L, R, T, I, V, S, C, Y, K, F and G;
[0508] X10 is selected from K, Q, Y, T, F, L, W, M, A, E, G, and S;
[0509] X11 is selected from D, S, N, R, L and T (e.g., D);
[0510] X12 is selected from D, N and S;
[0511] X13 is selected from S, A, T, G and R (e.g., S);
[0512] X14 is selected from I, L, F, S, R, Y, Q, W, D, K and H (e.g., I, L and F);
[0513] X15 is selected from D, S, I, N, E, A, H, F, L, Q, M, G, Y and V;
[0514] X16 is selected from K, L, R, M, T and F (e.g., L, R and K);
[0515] X17 is selected from V, L, I, A and T;
[0516] X18 is selected from L, I, V and A (e.g., L and I);
[0517] X19 is selected from T, V, C, E, S and A (e.g., T and V);
[0518] X20 is selected from R, F, T, W, E, L, N, C, K, V, S, Q, I, Y, H and A;
[0519] X21 is selected from S, P, R, K, N, A, H, Q, G and L;
[0520] X22 is selected from D, G, T, N, S, K, A, I, E, L, Q, R and Y; and
[0521] X23 is selected from K, V, A, E, Y, I, C, L, S, T, G, K, M, D and F.

[0522] In an embodiment, a HNH-like domain differs from a sequence of SEQ ID NO:17 by at least one but no more than, 2, 3, 4, or 5 residues.

[0523] In an embodiment, the HNH-like domain is cleavage competent.

[0524] In an embodiment, the HNH-like domain is cleavage incompetent.

[0525] In an embodiment, an eaCas9 molecule or eaCas9 polypeptide comprises an HNH-like domain comprising an amino acid sequence of formula VII:

(SEQ ID NO: 18)

X1-X2-X3-H-X4-X5-P-X6-S-X8-X9-X10-D-D-S-X14-X15-
N-K-V-L-X19-X20-X21-X22-X23-N,

[0526] wherein
[0527] X1 is selected from D and E;
[0528] X2 is selected from L, I, R, Q, V, M and K;
[0529] X3 is selected from D and E;
[0530] X4 is selected from I, V, T, A and L (e.g., A, I and V);
[0531] X5 is selected from V, Y, I, L, F and W (e.g., V, I and L);
[0532] X6 is selected from Q, H, R, K, Y, I, L, F and W;
[0533] X8 is selected from F, L, V, K, Y, M, I, R, A, E, D and Q (e.g., F);
[0534] X9 is selected from L, R, T, I, V, S, C, Y, K, F and G;
[0535] X10 is selected from K, Q, Y, T, F, L, W, M, A, E, G, and S;

[0536] X14 is selected from I, L, F, S, R, Y, Q, W, D, K and H (e.g., I, L and F);
[0537] X15 is selected from D, S, I, N, E, A, H, F, L, Q, M, G, Y and V;
[0538] X19 is selected from T, V, C, E, S and A (e.g., T and V);
[0539] X20 is selected from R, F, T, W, E, L, N, C, K, V, S, Q, I, Y, H and A;
[0540] X21 is selected from S, P, R, K, N, A, H, Q, G and L;
[0541] X22 is selected from D, G, T, N, S, K, A, I, E, L, Q, R and Y; and
[0542] X23 is selected from K, V, A, E, Y, I, C, L, S, T, G, K, M, D and F.

[0543] In an embodiment, the HNH-like domain differs from a sequence of SEQ ID NO:18 by 1, 2, 3, 4, or 5 residues.

[0544] In an embodiment, an eaCas9 molecule or eaCas9 polypeptide comprises an HNH-like domain comprising an amino acid sequence of formula VII:

(SEQ ID NO: 19)

X1-V-X3-H-I-V-P-X6-S-X8-X9-X10-D-D-S-X14-X15-N-K-
V-L-T-X20-X21-X22-X23-N,

[0545] wherein
[0546] X1 is selected from D and E;
[0547] X3 is selected from D and E;
[0548] X6 is selected from Q, H, R, K, Y, I, L and W;
[0549] X8 is selected from F, L, V, K, Y, M, I, R, A, E, D and Q (e.g., F);
[0550] X9 is selected from L, R, T, I, V, S, C, Y, K, F and G;
[0551] X10 is selected from K, Q, Y, T, F, L, W, M, A, E, G, and S;
[0552] X14 is selected from I, L, F, S, R, Y, Q, W, D, K and H (e.g., I, L and F);
[0553] X15 is selected from D, S, I, N, E, A, H, F, L, Q, M, G, Y and V;
[0554] X20 is selected from R, F, T, W, E, L, N, C, K, V, S, Q, I, Y, H and A;
[0555] X21 is selected from S, P, R, K, N, A, H, Q, G and L;
[0556] X22 is selected from D, G, T, N, S, K, A, I, E, L, Q, R and Y; and
[0557] X23 is selected from K, V, A, E, Y, I, C, L, S, T, G, K, M, D and F.

[0558] In an embodiment, the HNH-like domain differs from a sequence of SEQ ID NO:19 by 1, 2, 3, 4, or 5 residues.

[0559] In an embodiment, an eaCas9 molecule or eaCas9 polypeptide comprises an HNH-like domain having an amino acid sequence of formula VIII:

(SEQ ID NO: 20)

D-X2-D-H-I-X5-P-Q-X7-F-X9-X10-D-X12-S-I-D-N-X16-V-
L-X19-X20-S-X22-X23-N,

wherein
[0560] X2 is selected from I and V;
[0561] X5 is selected from I and V;
[0562] X7 is selected from A and S;
[0563] X9 is selected from I and L;
[0564] X10 is selected from K and T;
[0565] X12 is selected from D and N;
[0566] X16 is selected from R, K and L; X19 is selected from T and V;
[0567] X20 is selected from S and R;
[0568] X22 is selected from K, D and A; and
[0569] X23 is selected from E, K, G and N (e.g., the eaCas9 molecule or eaCas9 polypeptide can comprise an HNH-like domain as described herein).

[0570] In an embodiment, the HNH-like domain differs from a sequence of SEQ ID NO:20 by as many as 1 but no more than 2, 3, 4, or 5 residues.

[0571] In an embodiment, an eaCas9 molecule or eaCas9 polypeptide comprises the amino acid sequence of formula IX:

(SEQ ID NO: 21)

L-Y-Y-L-Q-N-G-X1′-D-M-Y-X2′-X3′-X4′-X5′-L-D-I-X6′-
X7′-L-S-X8′-Y-Z-N-R-X9′-K-X10′-D-X11′-V-P,

[0572] wherein
[0573] X1′ is selected from K and R;
[0574] X2′ is selected from V and T;
[0575] X3′ is selected from G and D;
[0576] X4′ is selected from E, Q and D;
[0577] X5′ is selected from E and D;
[0578] X6′ is selected from D, N and H;
[0579] X7′ is selected from Y, R and N;
[0580] X8′ is selected from Q, D and N; X9′ is selected from G and E;
[0581] X10′ is selected from S and G;
[0582] X11′ is selected from D and N; and
[0583] Z is an HNH-like domain, e.g., as described above.

[0584] In an embodiment, the eaCas9 molecule or eaCas9 polypeptide comprises an amino acid sequence that differs from a sequence of SEQ ID NO:21 by as many as 1 but no more than 2, 3, 4, or 5 residues.

[0585] In an embodiment, the HNH-like domain differs from a sequence of an HNH-like domain disclosed herein, e.g., in FIGS. 5A-5C or FIGS. 7A-7B, as many as 1 but no more than 2, 3, 4, or 5 residues. In an embodiment, 1 or both of the highly conserved residues identified in FIGS. 5A-5C or FIGS. 7A-7B are present.

[0586] In an embodiment, the HNH-like domain differs from a sequence of an HNH-like domain disclosed herein, e.g., in FIGS. 6A-6B or FIGS. 7A-7B, as many as 1 but no more than 2, 3, 4, or 5 residues. In an embodiment, 1, 2, all 3 of the highly conserved residues identified in FIGS. 6A-6B or FIGS. 7A-7B are present.

[0587] b) Cas9 Activities
[0588] (1) Nuclease and Helicase Activities

[0589] In an embodiment, the Cas9 molecule or Cas9 polypeptide is capable of cleaving a target nucleic acid molecule. Typically wild type Cas9 molecules cleave both strands of a target nucleic acid molecule. Cas9 molecules and Cas9 polypeptides can be engineered to alter nuclease cleavage (or other properties), e.g., to provide a Cas9 molecule or Cas9 peolypeptide which is a nickase, or which lacks the ability to cleave target nucleic acid. A Cas9 molecule or Cas9 polypeptide that is capable of cleaving a target nucleic acid molecule is referred to herein as an eaCas9 molecule or eaCas9 polypeptide

[0590] In an embodiment, an eaCas9 molecule or eaCas9 polypeptide comprises one or more of the following activities:
[0591] a nickase activity, i.e., the ability to cleave a single strand, e.g., the non-complementary strand or the complementary strand, of a nucleic acid molecule;
[0592] a double stranded nuclease activity, i.e., the ability to cleave both strands of a double stranded nucleic acid and create a double stranded break, which in an embodiment is the presence of two nickase activities;
[0593] an endonuclease activity;
[0594] an exonuclease activity; and
[0595] a helicase activity, i.e., the ability to unwind the helical structure of a double stranded nucleic acid.

[0596] In an embodiment, an enzymatically active or eaCas9 molecule or eaCas9 polypeptide cleaves both strands and results in a double stranded break. In an embodiment, an eaCas9 molecule cleaves only one strand, e.g., the strand to which the gRNA hybridizes to, or the strand complementary to the strand the gRNA hybridizes with. In an embodiment, an eaCas9 molecule or eaCas9 polypeptide comprises cleavage activity associated with an HNH-like domain. In an embodiment, an eaCas9 molecule or eaCas9 polypeptide comprises cleavage activity associated with an N-terminal RuvC-like domain. In an embodiment, an eaCas9 molecule or eaCas9 polypeptide comprises cleavage activity associated with an HNH-like domain and cleavage activity associated with an N-terminal RuvC-like domain. In an embodiment, an eaCas9 molecule or eaCas9 polypeptide comprises an active, or cleavage competent, HNH-like domain and an inactive, or cleavage incompetent, N-terminal RuvC-like domain. In an embodiment, an eaCas9 molecule or eaCas9 polypeptide comprises an inactive, or cleavage incompetent, HNH-like domain and an active, or cleavage competent, N-terminal RuvC-like domain.

[0597] Some Cas9 molecules or Cas9 polypeptides have the ability to interact with a gRNA molecule, and in conjunction with the gRNA molecule localize to a core target domain, but are incapable of cleaving the target nucleic acid, or incapable of cleaving at efficient rates. Cas9 molecules having no, or no substantial, cleavage activity are referred to herein as an eiCas9 molecule or eiCas9 polypeptide. For example, an eiCas9 molecule or eiCas9 polypeptide can lack cleavage activity or have substantially less, e.g., less than 20, 10, 5, 1 or 0.1% of the cleavage activity of a reference Cas9 molecule or eiCas9 polypeptide, as measured by an assay described herein.

[0598] (2) Targeting and PAMs

[0599] A Cas9 molecule or Cas9 polypeptide, is a polypeptide that can interact with a guide RNA (gRNA) molecule and, in concert with the gRNA molecule, localizes to a site which comprises a target domain and a PAM sequence.

[0600] In an embodiment, the ability of an eaCas9 molecule or eaCas9 polypeptide to interact with and cleave a target nucleic acid is PAM sequence dependent. A PAM sequence is a sequence in the target nucleic acid. In an embodiment, cleavage of the target nucleic acid occurs upstream from the PAM sequence. EaCas9 molecules from different bacterial species can recognize different sequence motifs (e.g., PAM sequences). In an embodiment, an eaCas9 molecule of S. pyogenes recognizes the sequence motif NGG, NAG, NGA and directs cleavage of a target nucleic acid sequence 1 to 10, e.g., 3 to 5, base pairs upstream from that sequence. See, e.g., Mali et al., SCIENCE 2013; 339(6121): 823-826. In an embodiment, an eaCas9 molecule of S. thermophilus recognizes the sequence motif NGGNG and/or NNAGAAW (W=A or T) and directs cleavage of a target nucleic acid sequence 1 to 10, e.g., 3 to 5, base pairs upstream from these sequences. See, e.g., Horvath et al., SCIENCE 2010; 327(5962):167-170, and Deveau et al., J BACTERIOL 2008; 190(4): 1390-1400. In an embodiment, an eaCas9 molecule of S. mutans recognizes the sequence motif NGG and/or NAAR (R=A or G)) and directs cleavage of a core target nucleic acid sequence 1 to 10, e.g., 3 to 5 base pairs, upstream from this sequence. See, e.g., Deveau et al., J BACTERIOL 2008; 190(4): 1390-1400. In an embodiment, an eaCas9 molecule of S. aureus recognizes the sequence motif NNGRR (R=A or G) and directs cleavage of a target nucleic acid sequence 1 to 10, e.g., 3 to 5, base pairs upstream from that sequence. In an embodiment, an eaCas9 molecule of S. aureus recognizes the sequence motif NNGRRT (R=A or G) and directs cleavage of a target nucleic acid sequence 1 to 10, e.g., 3 to 5, base pairs upstream from that sequence. In an embodiment, an eaCas9 molecule of S. aureus recognizes the sequence motif NNGRRV (R=A or G) and directs cleavage of a target nucleic acid sequence 1 to 10, e.g., 3 to 5, base pairs upstream from that sequence. In an embodiment, an eaCas9 molecule of N. meningitidis recognizes the sequence motif NNNNGATT or NNNGCTT (R=A or G, V=A, G or C and directs cleavage of a target nucleic acid sequence 1 to 10, e.g., 3 to 5, base pairs upstream from that sequence. See, e.g., Hou et al., PNAS EARLY EDITION 2013, 1-6. The ability of a Cas9 molecule to recognize a PAM sequence can be determined, e.g., using a transformation assay described in Jinek et al., SCIENCE 2012 337:816. In the aforementioned embodiments, N can be any nucleotide residue, e.g., any of A, G, C or T.

[0601] As is discussed herein, Cas9 molecules can be engineered to alter the PAM specificity of the Cas9 molecule.

[0602] Exemplary naturally occurring Cas9 molecules are described in Chylinski et al., RNA Biology 2013 10:5, 727-737. Such Cas9 molecules include Cas9 molecules of a cluster 1-78 bacterial family.

[0603] Exemplary naturally occurring Cas9 molecules include a Cas9 molecule of a cluster 1 bacterial family. Examples include a Cas9 molecule of: S. pyogenes (e.g., strain SF370, MGAS10270, MGAS10750, MGAS2096, MGAS315, MGAS5005, MGAS6180, MGAS9429, NZ131 and SSI-1), S. thermophilus (e.g., strain LMD-9), S. pseudoporcinus (e.g., strain SPIN 20026), S. mutans (e.g., strain UA159, NN2025), S. macacae (e.g., strain NCTC11558), S. gallolyticus (e.g., strain UCN34, ATCC BAA-2069), S. equines (e.g., strain ATCC 9812, MGCS 124), S. dysdalactiae (e.g., strain GGS 124), S. bovis (e.g., strain ATCC 700338), S. anginosus (e.g., strain F0211), S. agalactiae (e.g., strain NEM316, A909), Listeria monocytogenes (e.g., strain F6854), Listeria innocua (L. innocua, e.g., strain Clip11262), Enterococcus italicus (e.g., strain DSM 15952), or Enterococcus faecium (e.g., strain 1,231,408). Another exemplary Cas9 molecule is a Cas9 molecule of Neisseria meningitidis (Hou et al., PNAS Early Edition 2013, 1-6).

[0604] In an embodiment, a Cas9 molecule or Cas9 polypeptide, e.g., an eaCas9 molecule or eaCas9 polypeptide, comprises an amino acid sequence:
[0605] having 60%, 65%, 70%, 75%, 80%, 85%, 90%, 95%, 96%, 97%, 98% or 99% homology with;
[0606] differs at no more than, 2, 5, 10, 15, 20, 30, or 40% of the amino acid residues when compared with;
[0607] differs by at least 1, 2, 5, 10 or 20 amino acids but by no more than 100, 80, 70, 60, 50, 40 or 30 amino acids from; or
[0608] is identical to any Cas9 molecule sequence described herein, or a naturally occurring Cas9 molecule sequence, e.g., a Cas9 molecule from a species listed herein or described in Chylinski et al., RNA Biology 2013 10:5, 727-737; Hou et al., PNAS Early Edition 2013, 1-6; SEQ ID NOS:1-4. In an embodiment, the Cas9 molecule or Cas9 polypeptide comprises one or more of the following activities: a nickase activity; a double stranded cleavage activity (e.g., an endonuclease and/or exonuclease activity); a helicase activity; or the ability, together with a gRNA molecule, to home to a target nucleic acid.

[0609] In an embodiment, a Cas9 molecule or Cas9 polypeptide comprises the amino acid sequence of the consensus sequence of FIGS. 2A-2G, wherein “*” indicates any amino acid found in the corresponding position in the amino acid sequence of a Cas9 molecule of S. pyogenes, S. thermophilus, S. mutans and L. innocua, and “-” indicates any amino acid. In an embodiment, a Cas9 molecule or Cas9 polypeptide differs from the sequence of the consensus sequence disclosed in FIGS. 2A-2G by at least 1, but no more than 2, 3, 4, 5, 6, 7, 8, 9, or 10 amino acid residues. In an embodiment, a Cas9 molecule or Cas9 polypeptide comprises the amino acid sequence of SEQ ID NO:7 of FIGS. 7A-7B, wherein “*” indicates any amino acid found in the corresponding position in the amino acid sequence of a Cas9 molecule of S. pyogenes, or N. meningitidis, “-” indicates any amino acid, and “-” indicates any amino acid or absent. In an embodiment, a Cas9 molecule or Cas9 polypeptide differs from the sequence of SEQ ID NO:6 or 7 disclosed in FIGS. 7A-7B by at least 1, but no more than 2, 3, 4, 5, 6, 7, 8, 9, or 10 amino acid residues.

[0610] A comparison of the sequence of a number of Cas9 molecules indicate that certain regions are conserved. These are identified below as:
[0611] region 1 (residues 1 to 180, or in the case of region 1′residues 120 to 180)
[0612] region 2 (residues 360 to 480);
[0613] region 3 (residues 660 to 720);
[0614] region 4 (residues 817 to 900); and
[0615] region 5 (residues 900 to 960);

[0616] In an embodiment, a Cas9 molecule or Cas9 polypeptide comprises regions 1-5, together with sufficient additional Cas9 molecule sequence to provide a biologically active molecule, e.g., a Cas9 molecule having at least one activity described herein. In an embodiment, each of regions 1-6, independently, have, 50%, 60%, 70%, or 80% homology with the corresponding residues of a Cas9 molecule or Cas9 polypeptide described herein, e.g., a sequence from FIGS. 2A-2G or from FIGS. 7A-7B.

[0617] In an embodiment, a Cas9 molecule or Cas9 polypeptide, e.g., an eaCas9 molecule or eaCas9 polypeptide, comprises an amino acid sequence referred to as region 1:
[0618] having 50%, 60%, 70%, 80%, 85%, 90%, 95%, 96%, 97%, 98% or 99% homology with amino acids 1-180 (the numbering is according to the motif sequence in FIGS. 2A-2G; 52% of residues in the four Cas9 sequences in FIGS. 2A-2G are conserved) of the amino acid sequence of Cas9 of S. pyogenes;
[0619] differs by at least 1, 2, 5, 10 or 20 amino acids but by no more than 90, 80, 70, 60, 50, 40 or 30 amino acids from amino acids 1-180 of the amino acid sequence of Cas9 of S. pyogenes, S. thermophilus, S. mutans or L. innocua; or
[0620] is identical to 1-180 of the amino acid sequence of Cas9 of S. pyogenes, S. thermophilus, S. mutans or L. innocua.

[0621] In an embodiment, a Cas9 molecule or Cas9 polypeptide, e.g., an eaCas9 molecule or eaCas9 polypeptide, comprises an amino acid sequence referred to as region 1′:
[0622] having 55%, 60%, 65%, 70%, 75%, 80%, 85%, 90%, 95%, 96%, 97%, 98% or 99% homology with amino acids 120-180 (55% of residues in the four Cas9 sequences in FIGS. 2A-2G are conserved) of the amino acid sequence of Cas9 of S. pyogenes, S. thermophilus, S. mutans or L. innocua;
[0623] differs by at least 1, 2, or 5 amino acids but by no more than 35, 30, 25, 20 or 10 amino acids from amino acids 120-180 of the amino acid sequence of Cas9 of S. pyogenes, S. thermophilus, S. mutans or L. innocua; or
[0624] is identical to 120-180 of the amino acid sequence of Cas9 of S. pyogenes, S. thermophilus, S. mutans or L. innocua.

[0625] In an embodiment, a Cas9 molecule or Cas9 polypeptide, e.g., an eaCas9 molecule or eaCas9 polypeptide, comprises an amino acid sequence referred to as region 2:
[0626] having 50%, 55%, 60%, 65%, 70%, 75%, 80%, 85%, 90%, 95%, 96%, 97%, 98% or 99% homology with amino acids 360-480 (52% of residues in the four Cas9 sequences in FIGS. 2A-2G are conserved) of the amino acid sequence of Cas9 of S. pyogenes, S. thermophilus, S. mutans or L. innocua;
[0627] differs by at least 1, 2, or 5 amino acids but by no more than 35, 30, 25, 20 or 10 amino acids from amino acids 360-480 of the amino acid sequence of Cas9 of S. pyogenes, S. thermophilus, S. mutans or L. innocua; or
[0628] is identical to 360-480 of the amino acid sequence of Cas9 of S. pyogenes, S. thermophilus, S. mutans or L. innocua.

[0629] In an embodiment, a Cas9 molecule or Cas9 polypeptide, e.g., an eaCas9 molecule or eaCas9 polypeptide, comprises an amino acid sequence referred to as region 3:
[0630] having 55%, 60%, 65%, 70%, 75%, 80%, 85%, 90%, 95%, 96%, 97%, 98%, or 99% homology with amino acids 660-720 (56% of residues in the four Cas9 sequences in FIGS. 2A-2G are conserved) of the amino acid sequence of Cas9 of S. pyogenes, S. thermophilus, S. mutans or L. innocua;
[0631] differs by at least 1, 2, or 5 amino acids but by no more than 35, 30, 25, 20 or 10 amino acids from amino acids 660-720 of the amino acid sequence of Cas9 of S. pyogenes, S. thermophilus, S. mutans or L. innocua; or
[0632] is identical to 660-720 of the amino acid sequence of Cas9 of S. pyogenes, S. thermophilus, S. mutans or L. innocua.

[0633] In an embodiment, a Cas9 molecule or Cas9 polypeptide, e.g., an eaCas9 molecule or eaCas9 polypeptide, comprises an amino acid sequence referred to as region 4:
[0634] having 50%, 55%, 60%, 65%, 70%, 75%, 80%, 85%, 90%, 95%, 96%, 97%, 98%, or 99% homology with amino acids 817-900 (55% of residues in the four Cas9 sequences in FIGS. 2A-2G are conserved) of the amino acid sequence of Cas9 of S. pyogenes, S. thermophilus, S. mutans or L. innocua;
[0635] differs by at least 1, 2, or 5 amino acids but by no more than 35, 30, 25, 20 or 10 amino acids from amino acids 817-900 of the amino acid sequence of Cas9 of S. pyogenes, S. thermophilus, S. mutans or L. innocua; or
[0636] is identical to 817-900 of the amino acid sequence of Cas9 of S. pyogenes, S. thermophilus, S. mutans or L. innocua.

[0637] In an embodiment, a Cas9 molecule or Cas9 polypeptide, e.g., an eaCas9 molecule or eaCas9 polypeptide, comprises an amino acid sequence referred to as region 5:
[0638] having 50%, 55%, 60%, 65%, 70%, 75%, 80%, 85%, 90%, 95%, 96%, 97%, 98%, or 99% homology with amino acids 900-960 (60% of residues in the four Cas9 sequences in FIGS. 2A-2G are conserved) of the amino acid sequence of Cas9 of S. pyogenes, S. thermophilus, S. mutans or L. innocua;
[0639] differs by at least 1, 2, or 5 amino acids but by no more than 35, 30, 25, 20 or 10 amino acids from amino acids 900-960 of the amino acid sequence of Cas9 of S. pyogenes, S. thermophilus, S. mutans or L. innocua; or
[0640] is identical to 900-960 of the amino acid sequence of Cas9 of S. pyogenes, S. thermophilus, S. mutans or L. innocua.

[0641] c) Engineered or Altered Cas9 Molecules and Cas9 Polypeptides

[0642] Cas9 molecules and Cas9 polypeptides described herein, e.g., naturally occurring Cas9 molecules, can possess any of a number of properties, including: nickase activity, nuclease activity (e.g., endonuclease and/or exonuclease activity); helicase activity; the ability to associate functionally with a gRNA molecule; and the ability to target (or localize to) a site on a nucleic acid (e.g., PAM recognition and specificity). In an embodiment, a Cas9 molecule or Cas9 polypeptide can include all or a subset of these properties. In typical embodiments, a Cas9 molecule or Cas9 polypeptide has the ability to interact with a gRNA molecule and, in concert with the gRNA molecule, localize to a site in a nucleic acid. Other activities, e.g., PAM specificity, cleavage activity, or helicase activity can vary more widely in Cas9 molecules and Cas9 polypeptides.

[0643] Cas9 molecules include engineered Cas9 molecules and engineered Cas9 polypeptides (“engineered,” as used in this context, means merely that the Cas9 molecule or Cas9 polypeptide differs from a reference sequences, and implies no process or origin limitation). An engineered Cas9 molecule or Cas9 polypeptide can comprise altered enzymatic properties, e.g., altered nuclease activity, (as compared with a naturally occurring or other reference Cas9 molecule) or altered helicase activity. As discussed herein, an engineered Cas9 molecule or Cas9 polypeptide can have nickase activity (as opposed to double strand nuclease activity). In an embodiment an engineered Cas9 molecule or Cas9 polypeptide can have an alteration that alters its size, e.g., a deletion of amino acid sequence that reduces its size, e.g., without significant effect on one or more, or any Cas9 activity. In an embodiment, an engineered Cas9 molecule or Cas9 polypeptide can comprise an alteration that affects PAM recognition. E.g., an engineered Cas9 molecule can be altered to recognize a PAM sequence other than that recognized by the endogenous wild-type PI domain. In an embodiment a Cas9 molecule or Cas9 polypeptide can differ in sequence from a naturally occurring Cas9 molecule but not have significant alteration in one or more Cas9 activities.

[0644] Cas9 molecules or Cas9 polypeptides with desired properties can be made in a number of ways, e.g., by alteration of a parental, e.g., naturally occurring, Cas9 molecules or Cas9 polypeptides, to provide an altered Cas9 molecule or Cas9 polypeptide having a desired property. For example, one or more mutations or differences relative to a parental Cas9 molecule, e.g., a naturally occurring or engineered Cas9 molecule, can be introduced. Such mutations and differences comprise: substitutions (e.g., conservative substitutions or substitutions of non-essential amino acids); insertions; or deletions. In an embodiment, a Cas9 molecule or Cas9 polypeptide can comprises one or more mutations or differences, e.g., at least 1, 2, 3, 4, 5, 10, 15, 20, 30, 40 or 50 mutations but less than 200, 100, or 80 mutations relative to a reference, e.g., a parental, Cas9 molecule.

[0645] In an embodiment, a mutation or mutations do not have a substantial effect on a Cas9 activity, e.g. a Cas9 activity described herein. In an embodiment, a mutation or mutations have a substantial effect on a Cas9 activity, e.g. a Cas9 activity described herein.

[0646] (1) Non-Cleaving and Modified-Cleavage Cas9 Molecules and Cas9 Polypeptides

[0647] In an embodiment, a Cas9 molecule or Cas9 polypeptide comprises a cleavage property that differs from naturally occurring Cas9 molecules, e.g., that differs from the naturally occurring Cas9 molecule having the closest homology. For example, a Cas9 molecule or Cas9 polypeptide can differ from naturally occurring Cas9 molecules, e.g., a Cas9 molecule of S. pyogenes, as follows: its ability to modulate, e.g., decreased or increased, cleavage of a double stranded nucleic acid (endonuclease and/or exonuclease activity), e.g., as compared to a naturally occurring Cas9 molecule (e.g., a Cas9 molecule of S. pyogenes); its ability to modulate, e.g., decreased or increased, cleavage of a single strand of a nucleic acid, e.g., a non-complementary strand of a nucleic acid molecule or a complementary strand of a nucleic acid molecule (nickase activity), e.g., as compared to a naturally occurring Cas9 molecule (e.g., a Cas9 molecule of S. pyogenes); or the ability to cleave a nucleic acid molecule, e.g., a double stranded or single stranded nucleic acid molecule, can be eliminated.

[0648] (2) Modified Cleavage eaCas9 Molecules and eaCas9 Polypeptides

[0649] In an embodiment, an eaCas9 molecule or eaCas9 polypeptide comprises one or more of the following activities: cleavage activity associated with an N-terminal RuvC-like domain; cleavage activity associated with an HNH-like domain; cleavage activity associated with an HNH-like domain and cleavage activity associated with an N-terminal RuvC-like domain.

[0650] In an embodiment, an eaCas9 molecule or eaCas9 polypeptide comprises an active, or cleavage competent, HNH-like domain (e.g., an HNH-like domain described herein, e.g., SEQ ID NO:17, SEQ ID NO:18, SEQ ID NO:19, SEQ ID NO:20, or SEQ ID NO:21) and an inactive, or cleavage incompetent, N-terminal RuvC-like domain. An exemplary inactive, or cleavage incompetent N-terminal RuvC-like domain can have a mutation of an aspartic acid in an N-terminal RuvC-like domain, e.g., an aspartic acid at position 9 of the consensus sequence disclosed in FIGS. 2A-2G or an aspartic acid at position 10 of SEQ ID NO:7, e.g., can be substituted with an alanine. In an embodiment, the eaCas9 molecule or eaCas9 polypeptide differs from wild type in the N-terminal RuvC-like domain and does not cleave the target nucleic acid, or cleaves with significantly less efficiency, e.g., less than 20, 10, 5, 1 or 0.1% of the cleavage activity of a reference Cas9 molecule, e.g., as measured by an assay described herein. The reference Cas9 molecule can by a naturally occurring unmodified Cas9 molecule, e.g., a naturally occurring Cas9 molecule such as a Cas9 molecule of S. pyogenes, or S. thermophilus. In an embodiment, the reference Cas9 molecule is the naturally occurring Cas9 molecule having the closest sequence identity or homology.

[0651] In an embodiment, an eaCas9 molecule or eaCas9 polypeptide comprises an inactive, or cleavage incompetent, HNH domain and an active, or cleavage competent, N-terminal RuvC-like domain (e.g., an N-terminal RuvC-like domain described herein, e.g., SEQ ID NO:8, SEQ ID NO:9, SEQ ID NO:10, SEQ ID NO:11, SEQ ID NO:12, SEQ ID NO:13, SEQ ID NO:14, SEQ ID NO:15, or SEQ ID NO:16). Exemplary inactive, or cleavage incompetent HNH-like domains can have a mutation at one or more of: a histidine in an HNH-like domain, e.g., a histidine shown at position 856 of FIGS. 2A-2G, e.g., can be substituted with an alanine; and one or more asparagines in an HNH-like domain, e.g., an asparagine shown at position 870 of FIGS. 2A-2G and/or at position 879 of FIGS. 2A-2G, e.g., can be substituted with an alanine. In an embodiment, the eaCas9 differs from wild type in the HNH-like domain and does not cleave the target nucleic acid, or cleaves with significantly less efficiency, e.g., less than 20, 10, 5, 1 or 0.1% of the cleavage activity of a reference Cas9 molecule, e.g., as measured by an assay described herein. The reference Cas9 molecule can by a naturally occurring unmodified Cas9 molecule, e.g., a naturally occurring Cas9 molecule such as a Cas9 molecule of S. pyogenes, or S. thermophilus. In an embodiment, the reference Cas9 molecule is the naturally occurring Cas9 molecule having the closest sequence identity or homology.

[0652] In an embodiment, an eaCas9 molecule or eaCas9 polypeptide comprises an inactive, or cleavage incompetent, HNH domain and an active, or cleavage competent, N-terminal RuvC-like domain (e.g., an N-terminal RuvC-like domain described herein, e.g., SEQ ID NO:8, SEQ ID NO:9, SEQ ID NO:10, SEQ ID NO:11, SEQ ID NO:12, SEQ ID NO:13, SEQ ID NO:14, SEQ ID NO:15, or SEQ ID NO:16). Exemplary inactive, or cleavage incompetent HNH-like domains can have a mutation at one or more of: a histidine in an HNH-like domain, e.g., a histidine shown at position 856 of FIGS. 2A-2G, e.g., can be substituted with an alanine; and one or more asparagines in an HNH-like domain, e.g., an asparagine shown at position 870 of FIGS. 2A-2G and/or at position 879 of FIGS. 2A-2G, e.g., can be substituted with an alanine. In an embodiment, the eaCas9 differs from wild type in the HNH-like domain and does not cleave the target nucleic acid, or cleaves with significantly less efficiency, e.g., less than 20, 10, 5, 1 or 0.1% of the cleavage activity of a reference Cas9 molecule, e.g., as measured by an assay described herein. The reference Cas9 molecule can by a naturally occurring unmodified Cas9 molecule, e.g., a naturally occurring Cas9 molecule such as a Cas9 molecule of S. pyogenes, or S. thermophilus. In an embodiment, the reference Cas9 molecule is the naturally occurring Cas9 molecule having the closest sequence identity or homology.

[0653] d) Alterations in the Ability to Cleave One or Both Strands of a Target Nucleic Acid

[0654] In an embodiment, exemplary Cas9 activities comprise one or more of PAM specificity, cleavage activity, and helicase activity. A mutation(s) can be present, e.g., in: one or more RuvC-like domain, e.g., an N-terminal RuvC-like domain; an HNH-like domain; a region outside the RuvC-like domains and the HNH-like domain. In some embodiments, a mutation(s) is present in a RuvC-like domain, e.g., an N-terminal RuvC-like. In some embodiments, a mutation(s) is present in an HNH-like domain. In some embodiments, mutations are present in both a RuvC-like domain, e.g., an N-terminal RuvC-like domain, and an HNH-like domain.

[0655] Exemplary mutations that may be made in the RuvC domain or HNH domain with reference to the S. pyogenes sequence include: D10A, E762A, H840A, N854A, N863A and/or D986A.

[0656] In an embodiment, a Cas9 molecule or Cas9 polypeptide is an eiCas9 molecule or eiCas9 polypeptide comprising one or more differences in a RuvC domain and/or in an HNH domain as compared to a reference Cas9 molecule, and the eiCas9 molecule or eiCas9 polypeptide does not cleave a nucleic acid, or cleaves with significantly less efficiency than does wildype, e.g., when compared with wild type in a cleavage assay, e.g., as described herein, cuts with less than 50, 25, 10, or 1% of a reference Cas9 molecule, as measured by an assay described herein.

[0657] Whether or not a particular sequence, e.g., a substitution, may affect one or more activity, such as targeting activity, cleavage activity, etc, can be evaluated or predicted, e.g., by evaluating whether the mutation is conservative or by the method described in Section IV. In an embodiment, a “non-essential” amino acid residue, as used in the context of a Cas9 molecule, is a residue that can be altered from the wild-type sequence of a Cas9 molecule, e.g., a naturally occurring Cas9 molecule, e.g., an eaCas9 molecule, without abolishing or more preferably, without substantially altering a Cas9 activity (e.g., cleavage activity), whereas changing an “essential” amino acid residue results in a substantial loss of activity (e.g., cleavage activity).

[0658] In an embodiment, a Cas9 molecule or Cas9 polypeptide comprises a cleavage property that differs from naturally occurring Cas9 molecules, e.g., that differs from the naturally occurring Cas9 molecule having the closest homology. For example, a Cas9 molecule or Cas9 polypeptide can differ from naturally occurring Cas9 molecules, e.g., a Cas9 molecule of S. aureus, S. pyogenes, or C. jejuni as follows: its ability to modulate, e.g., decreased or increased, cleavage of a double stranded break (endonuclease and/or exonuclease activity), e.g., as compared to a naturally occurring Cas9 molecule (e.g., a Cas9 molecule of S. aureus, S. pyogenes, or C. jejuni); its ability to modulate, e.g., decreased or increased, cleavage of a single strand of a nucleic acid, e.g., a non-complementary strand of a nucleic acid molecule or a complementary strand of a nucleic acid molecule (nickase activity), e.g., as compared to a naturally occurring Cas9 molecule (e.g., a Cas9 molecule of S. aureus, S. pyogenes, or C. jejuni); or the ability to cleave a nucleic acid molecule, e.g., a double stranded or single stranded nucleic acid molecule, can be eliminated.

[0659] In an embodiment, the altered Cas9 molecule or Cas9 polypeptide is an eaCas9 molecule or eaCas9 polypeptide comprising one or more of the following activities: cleavage activity associated with a RuvC domain; cleavage activity associated with an HNH domain; cleavage activity associated with an HNH domain and cleavage activity associated with a RuvC domain.

[0660] In an embodiment, the altered Cas9 molecule or Cas9 polypeptide is an eiCas9 molecule or eaCas9 polypeptide which does not cleave a nucleic acid molecule (either double stranded or single stranded nucleic acid molecules) or cleaves a nucleic acid molecule with significantly less efficiency, e.g., less than 20, 10, 5, 1 or 0.1% of the cleavage activity of a reference Cas9 molecule, e.g., as measured by an assay described herein. The reference Cas9 molecule can be a naturally occurring unmodified Cas9 molecule, e.g., a naturally occurring Cas9 molecule such as a Cas9 molecule of S. pyogenes, S. thermophilus, S. aureus, C. jejuni or N. meningitidis. In an embodiment, the reference Cas9 molecule is the naturally occurring Cas9 molecule having the closest sequence identity or homology. In an embodiment, the eiCas9 molecule or eiCas9 polypeptide lacks substantial cleavage activity associated with a RuvC domain and cleavage activity associated with an HNH domain.

[0661] In an embodiment, the altered Cas9 molecule or Cas9 polypeptide is an eaCas9 molecule or eaCas9 polypeptide comprising the fixed amino acid residues of S. pyogenes shown in the consensus sequence disclosed in FIGS. 2A-2G, and has one or more amino acids that differ from the amino acid sequence of S. pyogenes (e.g., has a substitution) at one or more residue (e.g., 2, 3, 5, 10, 15, 20, 30, 50, 70, 80, 90, 100, 200 amino acid residues) represented by an “-” in the consensus sequence disclosed in FIGS. 2A-2G or SEQ ID NO:7.

[0662] In an embodiment, the altered Cas9 molecule or Cas9 polypeptide comprises a sequence in which:
[0663] the sequence corresponding to the fixed sequence of the consensus sequence disclosed in FIGS. 2A-2G differs at no more than 1, 2, 3, 4, 5, 10, 15, or 20% of the fixed residues in the consensus sequence disclosed in FIGS. 2A-2G;
[0664] the sequence corresponding to the residues identified by “*” in the consensus sequence disclosed in FIGS. 2A-2G differ at no more than 1, 2, 3, 4, 5, 10, 15, 20, 25, 30, 35, or 40% of the “*” residues from the corresponding sequence of naturally occurring Cas9 molecule, e.g., an S. pyogenes Cas9 molecule; and,
[0665] the sequence corresponding to the residues identified by “-” in the consensus sequence disclosed in FIGS. 2A-2G differ at no more than 5, 10, 15, 20, 25, 30, 35, 40, 45, 55, or 60% of the “-” residues from the corresponding sequence of naturally occurring Cas9 molecule, e.g., an S. pyogenes Cas9 molecule.

[0666] In an embodiment, the altered Cas9 molecule or Cas9 polypeptide is an eaCas9 molecule or eaCas9 polypeptide comprising the fixed amino acid residues of S. thermophilus shown in the consensus sequence disclosed in FIGS. 2A-2G, and has one or more amino acids that differ from the amino acid sequence of S. thermophilus (e.g., has a substitution) at one or more residue (e.g., 2, 3, 5, 10, 15, 20, 30, 50, 70, 80, 90, 100, 200 amino acid residues) represented by an “-” in the consensus sequence disclosed in FIGS. 2A-2G.

[0667] In an embodiment the altered Cas9 molecule or Cas9 polypeptide comprises a sequence in which:
[0668] the sequence corresponding to the fixed sequence of the consensus sequence disclosed in FIGS. 2A-2G differs at no more than 1, 2, 3, 4, 5, 10, 15, or 20% of the fixed residues in the consensus sequence disclosed in FIGS. 2A-2G;
[0669] the sequence corresponding to the residues identified by “*” in the consensus sequence disclosed in FIGS. 2A-2G differ at no more than 1, 2, 3, 4, 5, 10, 15, 20, 25, 30, 35, or 40% of the “*” residues from the corresponding sequence of naturally occurring Cas9 molecule, e.g., an S. thermophilus Cas9 molecule; and,
[0670] the sequence corresponding to the residues identified by “-” in the consensus sequence disclosed in FIGS. 2A-2G differ at no more than 5, 10, 15, 20, 25, 30, 35, 40, 45, 55, or 60% of the “-” residues from the corresponding sequence of naturally occurring Cas9 molecule, e.g., an S. thermophilus Cas9 molecule.

[0671] In an embodiment, the altered Cas9 molecule or Cas9 polypeptide is an eaCas9 molecule or eaCas9 polypeptide comprising the fixed amino acid residues of S. mutans shown in the consensus sequence disclosed in FIGS. 2A-2G, and has one or more amino acids that differ from the amino acid sequence of S. mutans (e.g., has a substitution) at one or more residue (e.g., 2, 3, 5, 10, 15, 20, 30, 50, 70, 80, 90, 100, 200 amino acid residues) represented by an “-” in the consensus sequence disclosed in FIGS. 2A-2G.

[0672] In an embodiment, the altered Cas9 molecule or Cas9 polypeptide comprises a sequence in which:
[0673] the sequence corresponding to the fixed sequence of the consensus sequence disclosed in FIGS. 2A-2G differs at no more than 1, 2, 3, 4, 5, 10, 15, or 20% of the fixed residues in the consensus sequence disclosed in FIGS. 2A-2G;
[0674] the sequence corresponding to the residues identified by “*” in the consensus sequence disclosed in FIGS. 2A-2G differ at no more than 1, 2, 3, 4, 5, 10, 15, 20, 25, 30, 35, or 40% of the “*” residues from the corresponding sequence of naturally occurring Cas9 molecule, e.g., an S. mutans Cas9 molecule; and,
[0675] the sequence corresponding to the residues identified by “-” in the consensus sequence disclosed in FIGS. 2A-2G differ at no more than 5, 10, 15, 20, 25, 30, 35, 40, 45, 55, or 60% of the “-” residues from the corresponding sequence of naturally occurring Cas9 molecule, e.g., an S. mutans Cas9 molecule.

[0676] In an embodiment, the altered Cas9 molecule or Cas9 polypeptide is an eaCas9 molecule or eaCas9 polypeptide comprising the fixed amino acid residues of L. innocula shown in the consensus sequence disclosed in FIGS. 2A-2G, and has one or more amino acids that differ from the amino acid sequence of L. innocula (e.g., has a substitution) at one or more residue (e.g., 2, 3, 5, 10, 15, 20, 30, 50, 70, 80, 90, 100, 200 amino acid residues) represented by an “-” in the consensus sequence disclosed in FIGS. 2A-2G.

[0677] In an embodiment, the altered Cas9 molecule or Cas9 polypeptide comprises a sequence in which:
[0678] the sequence corresponding to the fixed sequence of the consensus sequence disclosed in FIGS. 2A-2G differs at no more than 1, 2, 3, 4, 5, 10, 15, or 20% of the fixed residues in the consensus sequence disclosed in FIGS. 2A-2G;
[0679] the sequence corresponding to the residues identified by “*” in the consensus sequence disclosed in FIGS. 2A-2G differ at no more than 1, 2, 3, 4, 5, 10, 15, 20, 25, 30, 35, or 40% of the “*” residues from the corresponding sequence of naturally occurring Cas9 molecule, e.g., an L. innocula Cas9 molecule; and,
[0680] the sequence corresponding to the residues identified by “-” in the consensus sequence disclosed in FIGS. 2A-2G differ at no more than 5, 10, 15, 20, 25, 30, 35, 40, 45, 55, or 60% of the “-” residues from the corresponding sequence of naturally occurring Cas9 molecule, e.g., an L. innocula Cas9 molecule.

[0681] In an embodiment, the altered Cas9 molecule or Cas9 polypeptide, e.g., an eaCas9 molecule, can be a fusion, e.g., of two of more different Cas9 molecules or Cas9 polypeptides, e.g., of two or more naturally occurring Cas9 molecules of different species. For example, a fragment of a naturally occurring Cas9 molecule of one species can be fused to a fragment of a Cas9 molecule of a second species. As an example, a fragment of Cas9 molecule of S. pyogenes comprising an N-terminal RuvC-like domain can be fused to a fragment of Cas9 molecule of a species other than S. pyogenes (e.g., S. thermophilus) comprising an HNH-like domain.

[0682] (1) Cas9 Molecules With Altered PAM Recognition Or No PAM Recognition

[0683] Naturally occurring Cas9 molecules can recognize specific PAM sequences, for example the PAM recognition sequences described above for, e.g., S. pyogenes, S. thermophilus, S. mutans, S. aureus and N. meningitidis.

[0684] In an embodiment, a Cas9 molecule or Cas9 polypeptide has the same PAM specificities as a naturally occurring Cas9 molecule. In other embodiments, a Cas9 molecule or Cas9 polypeptide has a PAM specificity not associated with a naturally occurring Cas9 molecule, or a PAM specificity not associated with the naturally occurring Cas9 molecule to which it has the closest sequence homology. For example, a naturally occurring Cas9 molecule can be altered, e.g., to alter PAM recognition, e.g., to alter the PAM sequence that the Cas9 molecule or Cas9 polypeptide recognizes to decrease off target sites and/or improve specificity; or eliminate a PAM recognition requirement. In an embodiment, a Cas9 molecule can be altered, e.g., to increase length of PAM recognition sequence and/or improve Cas9 specificity to high level of identity, e.g., to decrease off target sites and increase specificity. In an embodiment, the length of the PAM recognition sequence is at least 4, 5, 6, 7, 8, 9, 10 or 15 amino acids in length.

[0685] Cas9 molecules or Cas9 polypeptides that recognize different PAM sequences and/or have reduced off-target activity can be generated using directed evolution. Exemplary methods and systems that can be used for directed evolution of Cas9 molecules are described, e.g., in Esvelt et al. Nature 2011, 472(7344): 499-503. Candidate Cas9 molecules can be evaluated, e.g., by methods described in Section IV.

[0686] Alterations of the PI domain, which mediates PAM recognition, are discussed below.

[0687] e) Synthetic Cas9 Molecules and Cas9 Polypeptides with Altered PI Domains

[0688] Current genome-editing methods are limited in the diversity of target sequences that can be targeted by the PAM sequence that is recognized by the Cas9 molecule utilized. A synthetic Cas9 molecule (or Syn-Cas9 molecule), or synthetic Cas9 polypeptide (or Syn-Cas9 polypeptide), as that term is used herein, refers to a Cas9 molecule or Cas9 polypeptide that comprises a Cas9 core domain from one bacterial species and a functional altered PI domain, i.e., a PI domain other than that naturally associated with the Cas9 core domain, e.g., from a different bacterial species.

[0689] In an embodiment, the altered PI domain recognizes a PAM sequence that is different from the PAM sequence recognized by the naturally-occurring Cas9 from which the Cas9 core domain is derived. In an embodiment, the altered PI domain recognizes the same PAM sequence recognized by the naturally-occurring Cas9 from which the Cas9 core domain is derived, but with different affinity or specificity. A Syn-Cas9 molecule or Syn-Cas9 polypeptide can be, respectively, a Syn-eaCas9 molecule or Syn-eaCas9 polypeptide or a Syn-eiCas9 molecule Syn-eiCas9 polypeptide.

[0690] An exemplary Syn-Cas9 molecule or Syn-Cas9 polypeptide comprises:
[0691] a) a Cas9 core domain, e.g., a Cas9 core domain from Table 2A or 2B, e.g., a S. aureus, S. pyogenes, or C. jejuni Cas9 core domain; and
[0692] b) an altered PI domain from a species X Cas9 sequence selected from Tables 4 and 5.

[0693] In an embodiment, the RKR motif (the PAM binding motif) of said altered PI domain comprises: differences at 1, 2, or 3 amino acid residues; a difference in amino acid sequence at the first, second, or third position; differences in amino acid sequence at the first and second positions, the first and third positions, or the second and third positions; as compared with the sequence of the RKR motif of the native or endogenous PI domain associated with the Cas9 core domain.

[0694] In an embodiment, the Cas9 core domain comprises the Cas9 core domain from a species X Cas9 from Table 2A and said altered PI domain comprises a PI domain from a species Y Cas9 from Table 2A.

[0695] In an embodiment, the RKR motif of the species X Cas9 is other than the RKR motif of the species Y Cas9.

[0696] In an embodiment, the RKR motif of the altered PI domain is selected from XXY, XNG, and XNQ.

[0697] In an embodiment, the altered PI domain has at least 60, 70, 80, 90, 95, or 100% homology with the amino acid sequence of a naturally occurring PI domain of said species Y from Table 2A.

[0698] In an embodiment, the altered PI domain differs by no more than 50, 40, 30, 25, 20, 15, 10, 5, 4, 3, 2, or 1 amino acid residue from the amino acid sequence of a naturally occurring PI domain of said second species from Table 2A.

[0699] In an embodiment, the Cas9 core domain comprises a S. aureus core domain and altered PI domain comprises: an A. denitrificans PI domain; a C. jejuni PI domain; a H. mustelae PI domain; or an altered PI domain of species X PI domain, wherein species X is selected from Table 5.

[0700] In an embodiment, the Cas9 core domain comprises a S. pyogenes core domain and the altered PI domain comprises: an A. denitrificans PI domain; a C. jejuni PI domain; a H. mustelae PI domain; or an altered PI domain of species X PI domain, wherein species X is selected from Table 5.

[0701] In an embodiment, the Cas9 core domain comprises a C. jejuni core domain and the altered PI domain comprises: an A. denitrificans PI domain; a H. mustelae PI domain; or an altered PI domain of species X PI domain, wherein species X is selected from Table 5.

[0702] In an embodiment, the Cas9 molecule or Cas9 polypeptide further comprises a linker disposed between said Cas9 core domain and said altered PI domain.

[0703] In an embodiment, the linker comprises: a linker described elsewhere herein disposed between the Cas9 core domain and the heterologous PI domain. Suitable linkers are further described in Section V.

[0704] Exemplary altered PI domains for use in Syn-Cas9 molecules are described in Tables 4 and 5. The sequences for the 83 Cas9 orthologs referenced in Tables 4 and 5 are provided in Table 2A. Table 3 provides the Cas9 orthologs with known PAM sequences and the corresponding RKR motif.

[0705] In an embodiment, a Syn-Cas9 molecule or Syn-Cas9 polypeptide may also be size-optimized, e.g., the Syn-Cas9 molecule or Syn-Cas9 polypeptide comprises one or more deletions, and optionally one or more linkers disposed between the amino acid residues flanking the deletions. In an embodiment, a Syn-Cas9 molecule or Syn-Cas9 polypeptide comprises a REC deletion.

[0706] f) Size-Optimized Cas9 Molecules and Cas9 Polypeptides

[0707] Engineered Cas9 molecules and engineered Cas9 polypeptides described herein include a Cas9 molecule or Cas9 polypeptide comprising a deletion that reduces the size of the molecule while still retaining desired Cas9 properties, e.g., essentially native conformation, Cas9 nuclease activity, and/or target nucleic acid molecule recognition. Provided herein are Cas9 molecules or Cas9 polypeptides comprising one or more deletions and optionally one or more linkers, wherein a linker is disposed between the amino acid residues that flank the deletion. Methods for identifying suitable deletions in a reference Cas9 molecule, methods for generating Cas9 molecules with a deletion and a linker, and methods for using such Cas9 molecules will be apparent to one of ordinary skill in the art upon review of this document.

[0708] A Cas9 molecule, e.g., a S. aureus, S. pyogenes, or C. jejuni, Cas9 molecule, having a deletion is smaller, e.g., has reduced number of amino acids, than the corresponding naturally-occurring Cas9 molecule. The smaller size of the Cas9 molecules allows increased flexibility for delivery methods, and thereby increases utility for genome-editing. A Cas9 molecule or Cas9 polypeptide can comprise one or more deletions that do not substantially affect or decrease the activity of the resultant Cas9 molecules or Cas9 polypeptides described herein. Activities that are retained in the Cas9 molecules or Cas9 polypeptides comprising a deletion as described herein include one or more of the following:
[0709] a nickase activity, i.e., the ability to cleave a single strand, e.g., the non-complementary strand or the complementary strand, of a nucleic acid molecule; a double stranded nuclease activity, i.e., the ability to cleave both strands of a double stranded nucleic acid and create a double stranded break, which in an embodiment is the presence of two nickase activities;
[0710] an endonuclease activity;
[0711] an exonuclease activity;
[0712] a helicase activity, i.e., the ability to unwind the helical structure of a double stranded nucleic acid;
[0713] and recognition activity of a nucleic acid molecule, e.g., a target nucleic acid or a gRNA.

[0714] Activity of the Cas9 molecules or Cas9 polypeptides described herein can be assessed using the activity assays described herein or in the art.

[0715] (1) Identifying Regions Suitable for Deletion

[0716] Suitable regions of Cas9 molecules for deletion can be identified by a variety of methods. Naturally-occurring orthologous Cas9 molecules from various bacterial species, e.g., any one of those listed in Table 2A, can be modeled onto the crystal structure of S. pyogenes Cas9 (Nishimasu et al., Cell, 156:935-949, 2014) to examine the level of conservation across the selected Cas9 orthologs with respect to the three-dimensional conformation of the protein. Less conserved or unconserved regions that are spatially located distant from regions involved in Cas9 activity, e.g., interface with the target nucleic acid molecule and/or gRNA, represent regions or domains are candidates for deletion without substantially affecting or decreasing Cas9 activity.

[0717] (2) REC-Optimized Cas9 Molecules and Cas9 Polypeptides

[0718] A REC-optimized Cas9 molecule, or a REC-optimized Cas9 polypeptide, as that term is used herein, refers to a Cas9 molecule or Cas9 polypeptide that comprises a deletion in one or both of the REC2 domain and the RE1_{CT} domain (collectively a REC deletion), wherein the deletion comprises at least 10% of the amino acid residues in the cognate domain. A REC-optimized Cas9 molecule or Cas9 polypeptide can be an eaCas9 molecule or eaCas9 polypeptide, or an eiCas9 molecule or eiCas9 polypeptide. An exemplary REC-optimized Cas9 molecule or REC-optimized Cas9 polypeptide comprises:
[0719] a) a deletion selected from:
   [0720] i) a REC2 deletion;
   [0721] ii) a REC1_{CT} deletion; or
   [0722] iii) a REC1_{SUB} deletion.

[0723] Optionally, a linker is disposed between the amino acid residues that flank the deletion. In an embodiment a Cas9 molecule or Cas9 polypeptide includes only one deletion, or only two deletions. A Cas9 molecule or Cas9 polypeptide can comprise a REC2 deletion and a REC1_{CT} deletion. A Cas9 molecule or Cas9 polypeptide can comprise a REC2 deletion and a REC1_{SUB} deletion.

[0724] Generally, the deletion will contain at least 10% of the amino acids in the cognate domain, e.g., a REC2 deletion will include at least 10% of the amino acids in the REC2 domain. A deletion can comprise: at least 10, 20, 30, 40, 50, 60, 70, 80, or 90% of the amino acid residues of its cognate domain; all of the amino acid residues of its cognate domain; an amino acid residue outside its cognate domain; a plurality of amino acid residues outside its cognate domain; the amino acid residue immediately N terminal to its cognate domain; the amino acid residue immediately C terminal to its cognate domain; the amino acid residue immediately N terminal to its cognate and the amino acid residue immediately C terminal to its cognate domain; a plurality of, e.g., up to 5, 10, 15, or 20, amino acid residues N terminal to its cognate domain; a plurality of, e.g., up to 5, 10, 15, or 20, amino acid residues C terminal to its cognate domain; a plurality of, e.g., up to 5, 10, 15, or 20, amino acid residues N terminal to to its cognate domain and a plurality of e.g., up to 5, 10, 15, or 20, amino acid residues C terminal to its cognate domain.

[0725] In an embodiment, a deletion does not extend beyond: its cognate domain; the N terminal amino acid residue of its cognate domain; the C terminal amino acid residue of its cognate domain.

[0726] A REC-optimized Cas9 molecule or REC-optimized Cas9 polypeptide can include a linker disposed between the amino acid residues that flank the deletion. Suitable linkers for use between the amino acid resides that flank a REC deletion in a REC-optimized Cas9 molecule is disclosed in Section V.

[0727] In an embodiment, a REC-optimized Cas9 molecule or REC-optimized Cas9 polypeptide comprises an amino acid sequence that, other than any REC deletion and associated linker, has at least 50, 55, 60, 65, 70, 75, 80, 85, 90, 95, 99, or 100% homology with the amino acid sequence of a naturally occurring Cas9, e.g., a Cas9 molecule described in Table 2A, e.g., a S. aureus Cas9 molecule, a S. pyogenes Cas9 molecule, or a C. jejuni Cas9 molecule.

[0728] In an embodiment, a a REC-optimized Cas9 molecule or REC-optimized Cas9 polypeptide comprises an amino acid sequence that, other than any REC deletion and associated linker, differs by no more than 1, 2, 3, 4, 5, 6, 7, 8, 9, 10, 15, 20, or 25, amino acid residues from the amino acid sequence of a naturally occurring Cas9, e.g., a Cas9 molecule described in Table 2A, e.g., a S. aureus Cas9 molecule, a S. pyogenes Cas9 molecule, or a C. jejuni Cas9 molecule.

[0729] In an embodiment, a REC-optimized Cas9 molecule or REC-optimized Cas9 polypeptide comprises an amino acid sequence that, other than any REC deletion and associate linker, differs by no more than 1, 2, 3, 4, 5, 6, 7, 8, 9, 10, 15, 20, or 25% of the, amino acid residues from the amino acid sequence of a naturally occurring Cas9, e.g., a Cas9 molecule described in Table 2A, e.g., a S. aureus Cas9 molecule, a S. pyogenes Cas9 molecule, or a C. jejuni Cas9 molecule.

[0730] For sequence comparison, typically one sequence acts as a reference sequence, to which test sequences are compared. When using a sequence comparison algorithm, test and reference sequences are entered into a computer, subsequence coordinates are designated, if necessary, and sequence algorithm program parameters are designated. Default program parameters can be used, or alternative parameters can be designated. The sequence comparison algorithm then calculates the percent sequence identities for the test sequences relative to the reference sequence, based on the program parameters. Methods of alignment of sequences for comparison are well known in the art. Optimal alignment of sequences for comparison can be conducted, e.g., by the local homology algorithm of Smith and Waterman, (1970) Adv. Appl. Math. 2:482c, by the homology alignment algorithm of Needleman and Wunsch, (1970) J. Mol. Biol. 48:443, by the search for similarity method of Pearson and Lipman, (1988) Proc. Nat'l. Acad. Sci. USA 85:2444, by computerized implementations of these algorithms (GAP, BESTFIT, FASTA, and TFASTA in the Wisconsin Genetics Software Package, Genetics Computer Group, 575 Science Dr., Madison, Wis.), or by manual alignment and visual inspection (see, e.g., Brent et al., (2003) Current Protocols in Molecular Biology).

[0731] Two examples of algorithms that are suitable for determining percent sequence identity and sequence similarity are the BLAST and BLAST 2.0 algorithms, which are described in Altschul et al., (1977) Nuc. Acids Res. 25:3389-3402; and Altschul et al., (1990) J. Mol. Biol. 215:403-410, respectively. Software for performing BLAST analyses is publicly available through the National Center for Biotechnology Information.

[0732] The percent identity between two amino acid sequences can also be determined using the algorithm of E. Meyers and W. Miller, (1988) Comput. Appl. Biosci. 4:11-17) which has been incorporated into the ALIGN program (version 2.0), using a PAM120 weight residue table, a gap length penalty of 12 and a gap penalty of 4. In addition, the percent identity between two amino acid sequences can be determined using the Needleman and Wunsch (1970) J. Mol. Biol. 48:444-453) algorithm which has been incorporated into the GAP program in the GCG software package (available at www.gcg.com), using either a Blossom 62 matrix or a PAM250 matrix, and a gap weight of 16, 14, 12, 10, 8, 6, or 4 and a length weight of 1, 2, 3, 4, 5, or 6.

[0733] Sequence information for exemplary REC deletions are provided for 83 naturally-occurring Cas9 orthologs in Table 2A. The amino acid sequences of exemplary Cas9 molecules from different bacterial species are shown below.

TABLE 2A
Amino Acid Sequence of Cas9 Orthologs

| | | REC2 | | | REC1_{CT} | | | REC1_{SUB} | | |
|---|---|---|---|---|---|---|---|---|---|---|
| | Amino | start | stop | # AA | start | stop | # AA | start | stop | # AA |
| Species/ | acid | (AA | (AA | deleted | (AA | (AA | deleted | (AA | (AA | deleted |
| Composite ID | sequence | pos) | pos) | (n) | pos) | pos) | (n) | pos) | pos) | (n) |
| Staphylococcus | SEQ ID | 126 | 166 | 41 | 296 | 352 | 57 | 296 | 352 | 57 |
| Aureus | NO: 304 | | | | | | | | | |
| tr\|J7RUA5\|J7RUA5_ | | | | | | | | | | |
| STAAU | | | | | | | | | | |
| Streptococcus | SEQ ID | 176 | 314 | 139 | 511 | 592 | 82 | 511 | 592 | 82 |
| Pyogenes | NO: 305 | | | | | | | | | |
| sp\|Q99ZW2\|CAS9_ | | | | | | | | | | |
| STRP1 | | | | | | | | | | |
| Campylobacter | SEQ ID | 137 | 181 | 45 | 316 | 360 | 45 | 316 | 360 | 45 |
| jejuni NCTC | NO: 306 | | | | | | | | | |
| 11168 | | | | | | | | | | |
| gi\|218563121\|ref\| | | | | | | | | | | |
| YP_002344900.1 | | | | | | | | | | |
| Bacteroides | SEQ ID | 148 | 339 | 192 | 524 | 617 | 84 | 524 | 617 | 84 |
| fragilis NCTC | NO: 307 | | | | | | | | | |
| 9343 | | | | | | | | | | |
| gi\|60683389\|ref\| | | | | | | | | | | |
| YP_213533.1\| | | | | | | | | | | |
| Bifidobacterium | SEQ ID | 173 | 335 | 163 | 516 | 607 | 87 | 516 | 607 | 87 |
| bifidum S17 | NO: 308 | | | | | | | | | |
| gi\|310286728\|ref\| | | | | | | | | | | |
| YP_003937986. | | | | | | | | | | |
| Veillonella atypica | SEQ ID | 185 | 339 | 155 | 574 | 663 | 79 | 574 | 663 | 79 |
| ACS-134-V-Col7a | NO: 309 | | | | | | | | | |
| gi\|303229466\|ref\| | | | | | | | | | | |
| ZP_07316256.1 | | | | | | | | | | |
| Lactobacillus | SEQ ID | 169 | 320 | 152 | 559 | 645 | 78 | 559 | 645 | 78 |
| rhamnosus GG | NO: 310 | | | | | | | | | |
| gi\|258509199\|ref\| | | | | | | | | | | |
| YP_003171950.1 | | | | | | | | | | |
| Filifactor alocis | SEQ ID | 166 | 314 | 149 | 508 | 592 | 76 | 508 | 592 | 76 |
| ATCC 35896 | NO: 311 | | | | | | | | | |
| gi\|374307738\|ref\| | | | | | | | | | | |
| YP_005054169.1 | | | | | | | | | | |
| Oenococcus | SEQ ID | 169 | 317 | 149 | 555 | 639 | 80 | 555 | 639 | 80 |
| kitaharae DSM | NO: 312 | | | | | | | | | |
| 17330 | | | | | | | | | | |
| gi\|366983953\|gb\| | | | | | | | | | | |
| EHN59352.1\| | | | | | | | | | | |
| Fructobacillus | SEQ ID | 168 | 314 | 147 | 488 | 571 | 76 | 488 | 571 | 76 |
| fructosus KCTC | NO: 313 | | | | | | | | | |
| 3544 | | | | | | | | | | |
| gi\|339625081\|ref\| | | | | | | | | | | |
| ZP_08660870.1 | | | | | | | | | | |
| Catenibacterium | SEQ ID | 173 | 318 | 146 | 511 | 594 | 78 | 511 | 594 | 78 |
| mitsuokai DSM | NO: 314 | | | | | | | | | |
| 15897 | | | | | | | | | | |
| gi\|224543312\|ref\| | | | | | | | | | | |
| ZP_03683851.1 | | | | | | | | | | |
| Finegoldia magna | SEQ ID | 168 | 313 | 146 | 452 | 534 | 77 | 452 | 534 | 77 |
| ATCC 29328 | NO: 315 | | | | | | | | | |
| gi\|169823755\|ref\| | | | | | | | | | | |
| YP_001691366.1 | | | | | | | | | | |
| CoriobacteriumglomeransPW2 | SEQ ID | 175 | 318 | 144 | 511 | 592 | 82 | 511 | 592 | 82 |
| gi\|328956315\|ref\| | NO: 316 | | | | | | | | | |
| YP_004373648.1 | | | | | | | | | | |
| Eubacterium yurii | SEQ ID | 169 | 310 | 142 | 552 | 633 | 76 | 552 | 633 | 76 |
| ATCC 43715 | NO: 317 | | | | | | | | | |
| gi\|306821691\|ref\| | | | | | | | | | | |
| ZP_07455288.1 | | | | | | | | | | |
| Peptoniphilus | SEQ ID | 171 | 311 | 141 | 535 | 615 | 76 | 535 | 615 | 76 |
| duerdenii ATCC | NO: 318 | | | | | | | | | |
| BAA-1640 | | | | | | | | | | |
| gi\|304438954\|ref\| | | | | | | | | | | |
| ZP_07398877.1 | | | | | | | | | | |
| Acidaminococcus | SEQ ID | 167 | 306 | 140 | 511 | 591 | 75 | 511 | 591 | 75 |
| sp. D21 | NO: 319 | | | | | | | | | |
| gi\|227824983\|ref\| | | | | | | | | | | |
| ZP_03989815.1 | | | | | | | | | | |
| Lactobacillus | SEQ ID | 171 | 310 | 140 | 542 | 621 | 85 | 542 | 621 | 85 |
| farciminis KCTC | NO: 320 | | | | | | | | | |
| 3681 | | | | | | | | | | |
| gi\|336394882\|ref\| | | | | | | | | | | |
| ZP_08576281.1 | | | | | | | | | | |
| Streptococcus | SEQ ID | 185 | 324 | 140 | 411 | 490 | 85 | 411 | 490 | 85 |
| sanguinis SK49 | NO: 321 | | | | | | | | | |
| gi\|422884106\|ref\| | | | | | | | | | | |
| ZP_16930555.1 | | | | | | | | | | |
| Coprococcus catus | SEQ ID | 172 | 310 | 139 | 556 | 634 | 76 | 556 | 634 | 76 |
| GD-7 | NO: 322 | | | | | | | | | |
| gi\|291520705\|emb\| | | | | | | | | | | |
| CBK78998.1\| | | | | | | | | | | |
| Streptococcus | SEQ ID | 176 | 314 | 139 | 392 | 470 | 84 | 392 | 470 | 84 |
| mutans UA159 | NO: 323 | | | | | | | | | |
| gi\|24379809\|ref\| | | | | | | | | | | |
| NP_721764.1\| | | | | | | | | | | |
| Streptococcus | SEQ ID | 176 | 314 | 139 | 523 | 600 | 82 | 523 | 600 | 82 |
| pyogenes M1 GAS | NO: 324 | | | | | | | | | |
| gi\|13622193\|gb\| | | | | | | | | | | |
| AAK33936.1\| | | | | | | | | | | |
| Streptococcus | SEQ ID | 176 | 314 | 139 | 481 | 558 | 81 | 481 | 558 | 81 |
| thermophilus | NO: 325 | | | | | | | | | |
| LMD-9 | | | | | | | | | | |
| gi\|116628213\|ref\| | | | | | | | | | | |
| YP_820832.1\| | | | | | | | | | | |
| Fusobacteriumnucleatum | SEQ ID | 171 | 308 | 138 | 537 | 614 | 76 | 537 | 614 | 76 |
| ATCC49256 | NO: 326 | | | | | | | | | |
| gi\|34762592\|ref\|ZP_ | | | | | | | | | | |
| 00143587.1\| | | | | | | | | | | |
| Planococcus | SEQ ID | 162 | 299 | 138 | 538 | 614 | 94 | 538 | 614 | 94 |
| antarcticus DSM | NO: 327 | | | | | | | | | |
| 14505 | | | | | | | | | | |
| gi\|389815359\|ref\| | | | | | | | | | | |
| ZP_10206685.1 | | | | | | | | | | |
| Treponema | SEQ ID | 169 | 305 | 137 | 524 | 600 | 81 | 524 | 600 | 81 |
| denticola ATCC | NO: 328 | | | | | | | | | |
| 35405 | | | | | | | | | | |
| gi\|42525843\|ref\| | | | | | | | | | | |
| NP_970941.1\| | | | | | | | | | | |
| Solobacterium | SEQ ID | 179 | 314 | 136 | 544 | 619 | 77 | 544 | 619 | 77 |
| moorei F0204 | NO: 329 | | | | | | | | | |
| gi\|320528778\|ref\| | | | | | | | | | | |
| ZP_08029929.1 | | | | | | | | | | |
| Staphylococcus | SEQ ID | 164 | 299 | 136 | 531 | 606 | 92 | 531 | 606 | 92 |
| pseudintermedius | NO: 330 | | | | | | | | | |
| ED99 | | | | | | | | | | |
| gi\|323463801\|gb\| | | | | | | | | | | |
| ADX75954.1\| | | | | | | | | | | |
| Flavobacterium | SEQ ID | 162 | 286 | 125 | 538 | 613 | 63 | 538 | 613 | 63 |
| branchiophilum | NO: 331 | | | | | | | | | |
| FL-15 | | | | | | | | | | |
| gi\|347536497\|ref\| | | | | | | | | | | |
| YP_004843922.1 | | | | | | | | | | |
| Ignavibacterium | SEQ ID | 223 | 329 | 107 | 357 | 432 | 90 | 357 | 432 | 90 |
| album JCM 16511 | NO: 332 | | | | | | | | | |
| gi\|385811609\|ref\| | | | | | | | | | | |
| YP_005848005.1 | | | | | | | | | | |
| Bergeyella | SEQ ID | 165 | 261 | 97 | 529 | 604 | 56 | 529 | 604 | 56 |
| zoohelcum ATCC | NO: 333 | | | | | | | | | |
| 43767 | | | | | | | | | | |
| gi\|423317190\|ref\| | | | | | | | | | | |
| ZP_17295095.1 | | | | | | | | | | |
| Nitrobacter | SEQ ID | 169 | 253 | 85 | 536 | 611 | 48 | 536 | 611 | 48 |
| hamburgensis X14 | NO: 334 | | | | | | | | | |
| gi\|92109262\|ref\| | | | | | | | | | | |
| YP_571550.1\| | | | | | | | | | | |
| Odoribacter laneus | SEQ ID | 164 | 242 | 79 | 535 | 610 | 63 | 535 | 610 | 63 |
| YIT 12061 | NO: 335 | | | | | | | | | |
| gi\|374384763\|ref\| | | | | | | | | | | |
| ZP_09642280.1 | | | | | | | | | | |
| Legionella | SEQ ID | 164 | 239 | 76 | 402 | 476 | 67 | 402 | 476 | 67 |
| pneumophila str. | NO: 336 | | | | | | | | | |
| Paris | | | | | | | | | | |
| gi\|54296138\|ref\| | | | | | | | | | | |
| YP_122507.1\| | | | | | | | | | | |
| Bacteroides sp. 203 | SEQ ID | 198 | 269 | 72 | 530 | 604 | 83 | 530 | 604 | 83 |
| gi\|301311869\|ref\| | NO: 337 | | | | | | | | | |
| ZP_07217791.1 | | | | | | | | | | |
| Akkermansia | SEQ ID | 136 | 202 | 67 | 348 | 418 | 62 | 348 | 418 | 62 |
| muciniphila | NO: 338 | | | | | | | | | |
| ATCC BAA-835 | | | | | | | | | | |
| gi\|187736489\|ref\| | | | | | | | | | | |
| YP_001878601. | | | | | | | | | | |
| Prevotella sp. | SEQ ID | 184 | 250 | 67 | 357 | 425 | 78 | 357 | 425 | 78 |
| C561 | NO: 339 | | | | | | | | | |
| gi\|345885718\|ref\| | | | | | | | | | | |
| ZP_08837074.1 | | | | | | | | | | |
| Wolinella | SEQ ID | 157 | 218 | 36 | 401 | 468 | 60 | 401 | 468 | 60 |
| succinogenes | NO: 340 | | | | | | | | | |
| DSM 1740 | | | | | | | | | | |
| gi\|34557932\|ref\| | | | | | | | | | | |
| NP_907747.1\| | | | | | | | | | | |
| Alicyclobacillus | SEQ ID | 142 | 196 | 55 | 416 | 482 | 61 | 416 | 482 | 61 |
| hesperidum | NO: 341 | | | | | | | | | |
| URH17-3-68 | | | | | | | | | | |
| gi\|403744858\|ref\| | | | | | | | | | | |
| ZP_10953934.1 | | | | | | | | | | |
| Caenispirillum | SEQ ID | 161 | 214 | 54 | 330 | 393 | 68 | 330 | 393 | 68 |
| salinarum AK4 | NO: 342 | | | | | | | | | |
| gi\|427429481\|ref\| | | | | | | | | | | |
| ZP_18919511.1 | | | | | | | | | | |
| Eubacterium | SEQ ID | 133 | 185 | 53 | 322 | 384 | 60 | 322 | 384 | 60 |
| rectale ATCC | NO: 343 | | | | | | | | | |
| 33656 | | | | | | | | | | |
| gi\|238924075\|ref\| | | | | | | | | | | |
| YP_002937591.1 | | | | | | | | | | |
| Mycoplasma | SEQ ID | 187 | 239 | 53 | 319 | 381 | 80 | 319 | 381 | 80 |
| synoviae 53 | NO: 344 | | | | | | | | | |
| gi\|71894592\|ref\| | | | | | | | | | | |
| YP_278700.1\| | | | | | | | | | | |
| Porphyromonas | SEQ ID | 150 | 202 | 53 | 309 | 371 | 60 | 309 | 371 | 60 |
| sp. oral taxon 279 | NO: 345 | | | | | | | | | |
| str. F0450 | | | | | | | | | | |
| gi\|402847315\|ref\| | | | | | | | | | | |
| ZP_10895610.1 | | | | | | | | | | |
| Streptococcus | SEQ ID | 127 | 178 | 139 | 424 | 486 | 81 | 424 | 486 | 81 |
| thermophilus | NO: 346 | | | | | | | | | |
| LMD-9 | | | | | | | | | | |
| gi\|116627542\|ref\| | | | | | | | | | | |
| YP_820161.1\| | | | | | | | | | | |
| Roseburia | SEQ ID | 154 | 204 | 51 | 318 | 380 | 69 | 318 | 380 | 69 |
| inulinivorans | NO: 347 | | | | | | | | | |
| DSM 16841 | | | | | | | | | | |
| gi\|225377804\|ref\| | | | | | | | | | | |
| ZP_03755025.1 | | | | | | | | | | |
| Methylosinus | SEQ ID | 144 | 193 | 50 | 426 | 488 | 64 | 426 | 488 | 64 |
| trichosporium | NO: 348 | | | | | | | | | |
| OB3b | | | | | | | | | | |
| gi\|296446027\|ref\| | | | | | | | | | | |
| ZP_06887976.1 | | | | | | | | | | |
| Ruminococcus | SEQ ID | 139 | 187 | 49 | 351 | 412 | 55 | 351 | 412 | 55 |
| albus 8 | NO: 349 | | | | | | | | | |
| gi\|325677756\|ref\| | | | | | | | | | | |
| ZP_08157403.1 | | | | | | | | | | |
| Bifidobacterium | SEQ ID | 183 | 230 | 48 | 370 | 431 | 44 | 370 | 431 | 44 |
| longum DJO10A | NO: 350 | | | | | | | | | |
| gi\|189440764\|ref\| | | | | | | | | | | |
| YP_001955845. | | | | | | | | | | |
| Enterococcus | SEQ ID | 123 | 170 | 48 | 327 | 387 | 60 | 327 | 387 | 60 |
| faecalis TX0012 | NO: 351 | | | | | | | | | |
| gi\|315149830\|gb\| | | | | | | | | | | |
| EFT93846.1\| | | | | | | | | | | |
| Mycoplasma | SEQ ID | 179 | 226 | 48 | 314 | 374 | 79 | 314 | 374 | 79 |
| mobile 163K | NO: 352 | | | | | | | | | |
| gi\|47458868\|ref\| | | | | | | | | | | |
| YP_015730.1\| | | | | | | | | | | |
| Actinomyces | SEQ ID | 147 | 193 | 47 | 358 | 418 | 40 | 358 | 418 | 40 |
| coleocanis DSM | NO: 353 | | | | | | | | | |
| 15436 | | | | | | | | | | |
| gi\|227494853\|ref\| | | | | | | | | | | |
| ZP_03925169.1 | | | | | | | | | | |
| Dinoroseobacter | SEQ ID | 138 | 184 | 47 | 338 | 398 | 48 | 338 | 398 | 48 |
| shibae DFL 12 | NO: 354 | | | | | | | | | |
| gi\|159042956\|ref\| | | | | | | | | | | |
| YP_001531750.1 | | | | | | | | | | |
| Actinomyces sp. | SEQ ID | 183 | 228 | 46 | 349 | 409 | 40 | 349 | 409 | 40 |
| oral taxon 180 str. | NO: 355 | | | | | | | | | |
| F0310 | | | | | | | | | | |
| gi\|315605738\|ref\| | | | | | | | | | | |
| ZP_07880770.1 | | | | | | | | | | |
| Alcanivorax sp. | SEQ ID | 139 | 183 | 45 | 344 | 404 | 61 | 344 | 404 | 61 |
| W11-5 | NO: 356 | | | | | | | | | |
| gi\|407803669\|ref\| | | | | | | | | | | |
| ZP_11150502.1 | | | | | | | | | | |
| Aminomonas | SEQ ID | 134 | 178 | 45 | 341 | 401 | 63 | 341 | 401 | 63 |
| paucivorans DSM | NO: 357 | | | | | | | | | |
| 12260 | | | | | | | | | | |
| gi\|312879015\|ref\| | | | | | | | | | | |
| ZP_07738815.1 | | | | | | | | | | |
| Mycoplasma canis | SEQ ID | 139 | 183 | 45 | 319 | 379 | 76 | 319 | 379 | 76 |
| PG 14 | NO: 358 | | | | | | | | | |
| gi\|384393286\|gb\| | | | | | | | | | | |
| EIE39736.1\| | | | | | | | | | | |
| Lactobacillus | SEQ ID | 141 | 184 | 44 | 328 | 387 | 61 | 328 | 387 | 61 |
| coryniformis | NO: 359 | | | | | | | | | |
| KCTC 3535 | | | | | | | | | | |
| gi\|336393381\|ref\| | | | | | | | | | | |
| ZP_08574780.1 | | | | | | | | | | |
| Elusimicrobium | SEQ ID | 177 | 219 | 43 | 322 | 381 | 47 | 322 | 381 | 47 |
| minutum Pei191 | NO: 360 | | | | | | | | | |
| gi\|187250660\|ref\| | | | | | | | | | | |
| YP_001875142.1 | | | | | | | | | | |
| Neisseria | SEQ ID | 147 | 189 | 43 | 360 | 419 | 61 | 360 | 419 | 61 |
| meningitidis | NO: 361 | | | | | | | | | |
| Z2491 | | | | | | | | | | |
| gi\|218767588\|ref\| | | | | | | | | | | |
| YP_002342100.1 | | | | | | | | | | |
| Pasteurella | SEQ ID | 139 | 181 | 43 | 319 | 378 | 61 | 319 | 378 | 61 |
| multocida str. | NO: 362 | | | | | | | | | |
| Pm70 | | | | | | | | | | |
| gi\|15602992\|ref\| | | | | | | | | | | |
| NP_246064.1\| | | | | | | | | | | |
| Rhodovulum sp. | SEQ ID | 141 | 183 | 43 | 319 | 378 | 48 | 319 | 378 | 48 |
| PH10 | NO: 363 | | | | | | | | | |
| gi\|402849997\|ref\| | | | | | | | | | | |
| ZP_10898214.1 | | | | | | | | | | |
| Eubacterium | SEQ ID | 131 | 172 | 42 | 303 | 361 | 59 | 303 | 361 | 59 |
| dolichum DSM | NO: 364 | | | | | | | | | |
| 3991 | | | | | | | | | | |
| gi\|160915782\|ref\| | | | | | | | | | | |
| ZP_02077990.1 | | | | | | | | | | |
| Nitratifractor | SEQ ID | 143 | 184 | 42 | 347 | 404 | 61 | 347 | 404 | 61 |
| salsuginis DSM | NO: 365 | | | | | | | | | |
| 16511 | | | | | | | | | | |
| gi\|319957206\|ref\| | | | | | | | | | | |
| YP_004168469.1 | | | | | | | | | | |
| Rhodospirillum | SEQ ID | 139 | 180 | 42 | 314 | 371 | 55 | 314 | 371 | 55 |
| rubrum ATCC | NO: 366 | | | | | | | | | |
| 11170 | | | | | | | | | | |
| gi\|83591793\|ref\| | | | | | | | | | | |
| YP_425545.1\| | | | | | | | | | | |
| Clostridium | SEQ ID | 137 | 176 | 40 | 320 | 376 | 61 | 320 | 376 | 61 |
| cellulolyticum | NO: 367 | | | | | | | | | |
| H10 | | | | | | | | | | |
| gi\|220930482\|ref\| | | | | | | | | | | |
| YP_002507391.1 | | | | | | | | | | |
| Helicobacter | SEQ ID | 148 | 187 | 40 | 298 | 354 | 48 | 298 | 354 | 48 |
| mustelae 12198 | NO: 368 | | | | | | | | | |
| gi\|291276265\|ref\| | | | | | | | | | | |
| YP_003516037.1 | | | | | | | | | | |
| Ilyobacter | SEQ ID | 134 | 173 | 40 | 462 | 517 | 63 | 462 | 517 | 63 |
| polytropus DSM | NO: 369 | | | | | | | | | |
| 2926 | | | | | | | | | | |
| gi\|310780384\|ref\| | | | | | | | | | | |
| YP_003968716.1 | | | | | | | | | | |
| Sphaerochaeta | SEQ ID | 163 | 202 | 40 | 335 | 389 | 45 | 335 | 389 | 45 |
| globus str. Buddy | NO: 370 | | | | | | | | | |
| gi\|325972003\|ref\| | | | | | | | | | | |
| YP_004248194.1 | | | | | | | | | | |
| Staphylococcus | SEQ ID | 128 | 167 | 40 | 337 | 391 | 57 | 337 | 391 | 57 |
| lugdunensis | NO: 371 | | | | | | | | | |
| M23590 | | | | | | | | | | |
| gi\|315659848\|ref\| | | | | | | | | | | |
| ZP_07912707.1 | | | | | | | | | | |
| Treponema sp. | SEQ ID | 144 | 183 | 40 | 328 | 382 | 63 | 328 | 382 | 63 |
| JC4 | NO: 372 | | | | | | | | | |
| gi\|384109266\|ref\| | | | | | | | | | | |
| ZP_10010146.1 | | | | | | | | | | |
| uncultured delta | SEQ ID | 154 | 193 | 40 | 313 | 365 | 55 | 313 | 365 | 55 |
| proteobacterium | NO: 373 | | | | | | | | | |
| HF0070 07E19 | | | | | | | | | | |
| gi\|297182908\|gb\| | | | | | | | | | | |
| ADI19058.1\| | | | | | | | | | | |
| Alicycliphilus | SEQ ID | 140 | 178 | 39 | 317 | 366 | 48 | 317 | 366 | 48 |
| denitrificans K601 | NO: 374 | | | | | | | | | |
| gi\|330822845\|ref\| | | | | | | | | | | |
| YP_004386148.1 | | | | | | | | | | |
| Azospirillum sp. | SEQ ID | 205 | 243 | 39 | 342 | 389 | 46 | 342 | 389 | 46 |
| B510 | NO: 375 | | | | | | | | | |
| gi\|288957741\|ref\| | | | | | | | | | | |
| YP_003448082.1 | | | | | | | | | | |
| Bradyrhizobium | SEQ ID | 143 | 181 | 39 | 323 | 370 | 48 | 323 | 370 | 48 |
| sp. BTAi1 | NO: 376 | | | | | | | | | |
| gi\|148255343\|ref\| | | | | | | | | | | |
| YP_001239928.1 | | | | | | | | | | |
| Parvibaculum | SEQ ID | 138 | 176 | 39 | 327 | 374 | 58 | 327 | 374 | 58 |
| lavamentivorans | NO: 377 | | | | | | | | | |
| DS-1 | | | | | | | | | | |
| gi\|154250555\|ref\| | | | | | | | | | | |
| YP_001411379.1 | | | | | | | | | | |
| Prevotella | SEQ ID | 170 | 208 | 39 | 328 | 375 | 61 | 328 | 375 | 61 |
| timonensis CRIS | NO: 378 | | | | | | | | | |
| 5C-B1 | | | | | | | | | | |
| gi\|282880052\|ref\| | | | | | | | | | | |
| ZP_06288774.1 | | | | | | | | | | |
| Bacillus smithii 7 | SEQ ID | 134 | 171 | 38 | 401 | 448 | 63 | 401 | 448 | 63 |
| 3 47FAA | NO: 379 | | | | | | | | | |
| gi\|365156657\|ref\| | | | | | | | | | | |
| ZP_09352959.1 | | | | | | | | | | |
| Cand. | SEQ ID | 135 | 172 | 38 | 344 | 391 | 53 | 344 | 391 | 53 |
| Puniceispirillum | NO: 380 | | | | | | | | | |
| marinum | | | | | | | | | | |
| IMCC1322 | | | | | | | | | | |
| gi\|294086111\|ref\| | | | | | | | | | | |
| YP_003552871.1 | | | | | | | | | | |
| Barnesiella | SEQ ID | 140 | 176 | 37 | 371 | 417 | 60 | 371 | 417 | 60 |
| intestinihominis | NO: 381 | | | | | | | | | |
| YIT 11860 | | | | | | | | | | |
| gi\|404487228\|ref\| | | | | | | | | | | |
| ZP_11022414.1 | | | | | | | | | | |
| Ralstonia syzygii | SEQ ID | 140 | 176 | 37 | 395 | 440 | 50 | 395 | 440 | 50 |
| R24 | NO: 382 | | | | | | | | | |
| gi\|344171927\|emb\| | | | | | | | | | | |
| CCA84553.1\| | | | | | | | | | | |
| Wolinella | SEQ ID | 145 | 180 | 36 | 348 | 392 | 60 | 348 | 392 | 60 |
| succinogenes | NO: 383 | | | | | | | | | |
| DSM 1740 | | | | | | | | | | |
| gi\|34557790\|ref\| | | | | | | | | | | |
| NP_907605.1\| | | | | | | | | | | |
| Mycoplasma | SEQ ID | 144 | 177 | 34 | 373 | 416 | 71 | 373 | 416 | 71 |
| gallisepticum str. | NO: 384 | | | | | | | | | |
| F | | | | | | | | | | |
| gi\|284931710\|gb\| | | | | | | | | | | |
| ADC31648.1\| | | | | | | | | | | |
| Acidothermus | SEQ ID | 150 | 182 | 33 | 341 | 380 | 58 | 341 | 380 | 58 |
| cellulolyticus 11B | NO: 385 | | | | | | | | | |
| gi\|117929158\|ref\| | | | | | | | | | | |
| YP_873709.1\| | | | | | | | | | | |
| Mycoplasma | SEQ ID | 156 | 184 | 29 | 381 | 420 | 62 | 381 | 420 | 62 |
| ovipneumoniae | NO: 386 | | | | | | | | | |
| SC01 | | | | | | | | | | |
| gi\|363542550\|ref\| | | | | | | | | | | |
| ZP_09312133.1 | | | | | | | | | | |

TABLE 2B
Amino Acid Sequence of Cas9 Core Domains

| | |
|---|---|
| Cas9 Start | Cas9 Stop |
| (AA pos) | (AA pos) |

| | |
|---|---|
| | Start and Stop numbers refer to |
| Strain Name | the sequence in Table 2A |

| | | |
|---|---|---|
| Staphylococcus Aureus | 1 | 772 |
| Streptococcus Pyogenes | 1 | 1099 |
| Campulobacter Jejuni | 1 | 741 |

TABLE 3
Identified PAM sequences and corresponding RKR motifs.

| Strain Name | PAM sequence (NA) | RKR motif (AA) |
|---|---|---|
| Streptococcus pyogenes | NGG | RKR |
| Streptococcus mutans | NGG | RKR |
| Streptococcus thermophilus A | NGGNG | RYR |
| Treponema denticola | NAAAAN | VAK |
| Streptococcus thermophilus B | NNAAAAW | IYK |
| Campylobacter jejuni | NNNNACA | NLK |
| Pasteurella multocida | GNNNCNNA | KDG |
| Neisseria meningitidis | NNNNGATT or | IGK |
| | NNGRRT (R = A or G) | |
| Staphylococcus aureus | NNGRRV (R = A or G; | NDK |
| | V = A. G or C) or | |
| | NNGRRT (R = A or G) | |

[0734] PI domains are provided in Tables 4 and 5.

TABLE 4
Altered PI Domains

| | PI Start | PI Stop | | |
|---|---|---|---|---|
| | (AA pos) | (AA pos) | | |
| | Start and Stop | | Length | RKR |
| | numbers refer to the | | of PI | motif |
| Strain Name | sequences in Table 2A | | (AA) | (AA) |
| Alicycliphilus denitrificans K601 | 837 | 1029 | 193 | --Y |
| Campylobacter jejuni NCTC | 741 | 984 | 244 | -NG |
| 11168 | | | | |
| Helicobacter mustelae 12198 | 771 | 1024 | 254 | -NQ |

TABLE 5
Other Altered PI Domains

| | PI Start | PI Stop | | |
|---|---|---|---|---|
| | (AA pos) | (AA pos) | | |
| | Start and Stop | | Length | RKR |
| | numbers refer to the | | of PI | motif |
| Strain Name | sequences in Table 2A | | (AA) | (AA) |
| Akkermansia muciniphila ATCC | 871 | 1101 | 231 | ALK |
| BAA-835 | | | | |
| Ralstonia syzygii R24 | 821 | 1062 | 242 | APY |
| Cand. Puniceispirillum marinum | 815 | 1035 | 221 | AYK |
| IMCC1322 | | | | |
| Fructobacillus fructosus KCTC 3544 | 1074 | 1323 | 250 | DGN |
| Eubacterium yurii ATCC 43715 | 1107 | 1391 | 285 | DGY |
| Eubacterium dolichum DSM 3991 | 779 | 1096 | 318 | DKK |
| Dinoroseobacter shibae DFL 12 | 851 | 1079 | 229 | DPI |
| Clostridium cellulolyticum H10 | 767 | 1021 | 255 | EGK |
| Pasteurella multocida str. Pm70 | 815 | 1056 | 242 | ENN |
| Mycoplasma canis PG 14 | 907 | 1233 | 327 | EPK |
| Porphyromonas sp. oral taxon 279 str. | 935 | 1197 | 263 | EPT |
| F0450 | | | | |
| Filifactor alocis ATCC 35896 | 1094 | 1365 | 272 | EVD |
| Aminomonas paucivorans DSM 12260 | 801 | 1052 | 252 | EVY |
| Wolinella succinogenes DSM 1740 | 1034 | 1409 | 376 | EYK |
| Oenococcus kitaharae DSM 17330 | 1119 | 1389 | 271 | GAL |
| CoriobacteriumglomeransPW2 | 1126 | 1384 | 259 | GDR |
| Peptoniphilus duerdenii ATCC | 1091 | 1364 | 274 | GDS |
| BAA-1640 | | | | |
| Bifidobacterium bifidum S17 | 1138 | 1420 | 283 | GGL |
| Alicyclobacillus hesperidum | 876 | 1146 | 271 | GGR |
| URH17-3-68 | | | | |
| Roseburia inulinivorans DSM 16841 | 895 | 1152 | 258 | GGT |
| Actinomyces coleocanis DSM 15436 | 843 | 1105 | 263 | GKK |
| Odoribacter laneus YIT 12061 | 1103 | 1498 | 396 | GKV |
| Coprococcus catus GD-7 | 1063 | 1338 | 276 | GNQ |
| Enterococcus faecalis TX0012 | 829 | 1150 | 322 | GRK |
| Bacillus smithii 7 3 47FAA | 809 | 1088 | 280 | GSK |
| Legionella pneumophila str. Paris | 1021 | 1372 | 352 | GTM |
| Bacteroides fragilis NCTC 9343 | 1140 | 1436 | 297 | IPV |
| Mycoplasma ovipneumoniae SC01 | 923 | 1265 | 343 | IRI |
| Actinomyces sp. oral taxon 180 str. | 895 | 1181 | 287 | KEK |
| F0310 | | | | |
| Treponema sp. JC4 | 832 | 1062 | 231 | KIS |
| Fusobacteriumnucleatum | 1073 | 1374 | 302 | KKV |
| ATCC49256 | | | | |
| Lactobacillus farciminis KCTC 3681 | 1101 | 1356 | 256 | KKV |
| Nitratifractor salsuginis DSM 16511 | 840 | 1132 | 293 | KMR |
| Lactobacillus coryniformis KCTC 3535 | 850 | 1119 | 270 | KNK |
| Mycoplasma mobile 163K | 916 | 1236 | 321 | KNY |
| Flavobacterium branchiophilum FL-15 | 1182 | 1473 | 292 | KQK |
| Prevotella timonensis CRIS 5C-B1 | 957 | 1218 | 262 | KQQ |
| Methylosinus trichosporium OB3b | 830 | 1082 | 253 | KRP |
| Prevotella sp. C561 | 1099 | 1424 | 326 | KRY |
| Mycoplasma gallisepticum str. F | 911 | 1269 | 359 | KTA |
| Lactobacillus rhamnosus GG | 1077 | 1363 | 287 | KYG |
| Wolinella succinogenes DSM 1740 | 811 | 1059 | 249 | LPN |
| Streptococcus thermophilus LMD-9 | 1099 | 1388 | 290 | MLA |
| Treponema denticola ATCC 35405 | 1092 | 1395 | 304 | NDS |
| Bergeyella zoohelcum ATCC 43767 | 1098 | 1415 | 318 | NEK |
| Veillonella atypica ACS-134-V-Col7a | 1107 | 1398 | 292 | NGF |
| Neisseria meningitidis Z2491 | 835 | 1082 | 248 | NHN |
| Ignavibacterium album JCM 16511 | 1296 | 1688 | 393 | NKK |
| Ruminococcus albus 8 | 853 | 1156 | 304 | NNF |
| Streptococcus thermophilus LMD-9 | 811 | 1121 | 311 | NNK |
| Barnesiella intestinihominis YIT 11860 | 871 | 1153 | 283 | NPV |
| Azospirillum sp. B510 | 911 | 1168 | 258 | PFH |
| Rhodospirillum rubrum ATCC 11170 | 863 | 1173 | 311 | PRG |
| Planococcus antarcticus DSM 14505 | 1087 | 1333 | 247 | PYY |
| Staphylococcus pseudintermedius ED99 | 1073 | 1334 | 262 | QIV |
| Alcanivorax sp. W11-5 | 843 | 1113 | 271 | RIE |
| Bradyrhizobium sp. BTAi1 | 811 | 1064 | 254 | RIY |
| Streptococcus pyogenes M1 GAS | 1099 | 1368 | 270 | RKR |
| Streptococcus mutans UA159 | 1078 | 1345 | 268 | RKR |
| Streptococcus Pyogenes | 1099 | 1368 | 270 | RKR |
| Bacteroides sp. 20 3 | 1147 | 1517 | 371 | RNI |
| S. aureus | 772 | 1053 | 282 | RNK |
| Solobacterium moorei F0204 | 1062 | 1327 | 266 | RSG |
| Finegoldia magna ATCC 29328 | 1081 | 1348 | 268 | RTE |
| uncultured delta proteobacterium | 770 | 1011 | 242 | SGG |
| HF0070 07E19 | | | | |
| Acidaminococcus sp. D21 | 1064 | 1358 | 295 | SIG |
| Eubacterium rectale ATCC 33656 | 824 | 1114 | 291 | SKK |
| Caenispirillum salinarum AK4 | 1048 | 1442 | 395 | SLV |
| Acidothermus cellulolyticus 11B | 830 | 1138 | 309 | SPS |
| Catenibacterium mitsuokai DSM 15897 | 1068 | 1329 | 262 | SPT |
| Parvibaculum lavamentivorans DS-1 | 827 | 1037 | 211 | TGN |
| Staphylococcus lugdunensis M23590 | 772 | 1054 | 283 | TKK |
| Streptococcus sanguinis SK49 | 1123 | 1421 | 299 | TRM |
| Elusimicrobium minutum Pei191 | 910 | 1195 | 286 | TTG |
| Nitrobacter hamburgensis X14 | 914 | 1166 | 253 | VAY |
| Mycoplasma synoviae 53 | 991 | 1314 | 324 | VGF |
| Sphaerochaeta globus str. Buddy | 877 | 1179 | 303 | VKG |
| Ilyobacter polytropus DSM 2926 | 837 | 1092 | 256 | VNG |
| Rhodovulum sp. PH10 | 821 | 1059 | 239 | VPY |
| Bifidobacterium longum DJO10A | 904 | 1187 | 284 | VRK |

[0735] g) Nucleic Acids Encoding Cas9 Molecules

[0736] Nucleic acids encoding the Cas9 molecules or Cas9 polypeptides, e.g., an eaCas9 molecule or eaCas9 polypeptide, are provided herein.

[0737] Exemplary nucleic acids encoding Cas9 molecules or Cas9 polypeptides are described in Cong et al., Science 2013, 399(6121):819-823; Wang et al., Cell 2013, 153(4):910-918; Mali et al., Science 2013, 399(6121):823-826; Jinek et al., Science 2012, 337(6096):816-821. Another exemplary nucleic acid encoding a Cas9 molecule or Cas9 polypeptide is shown in black in FIG. 8.

[0738] In an embodiment, a nucleic acid encoding a Cas9 molecule or Cas9 polypeptide can be a synthetic nucleic acid sequence. For example, the synthetic nucleic acid molecule can be chemically modified. In an embodiment, the Cas9 mRNA has one or more (e.g., all of the following properties: it is capped, polyadenylated, substituted with 5-methylcytidine and/or pseudouridine.

[0739] In addition, or alternatively, the synthetic nucleic acid sequence can be codon optimized, e.g., at least one non-common codon or less-common codon has been replaced by a common codon. For example, the synthetic nucleic acid can direct the synthesis of an optimized messenger mRNA, e.g., optimized for expression in a mammalian expression system, e.g., described herein.

[0740] In addition, or alternatively, a nucleic acid encoding a Cas9 molecule or Cas9 polypeptide may comprise a nuclear localization sequence (NLS). Nuclear localization sequences are known in the art.

[0741] SEQ ID NO:22 is an exemplary codon optimized nucleic acid sequence encoding a Cas9 molecule of S. pyogenes. SEQ ID NO:23 is the corresponding amino acid sequence of a S. pyogenes Cas9 molecule.

[0742] SEQ ID NO:24 is an exemplary codon optimized nucleic acid sequence encoding a Cas9 molecule of N. meningitidis. SEQ ID NO:25 is the corresponding amino acid sequence of a N. meningitidis Cas9 molecule.

[0743] SEQ ID NO:26 is an amino acid sequence of a S. aureus Cas9 molecule. SEQ ID NO:39 is an exemplary codon optimized nucleic acid sequence encoding a Cas9 molecule of S. aureus Cas9.

[0744] If any of the above Cas9 sequences are fused with a peptide or polypeptide at the C-terminus, it is understood that the stop codon will be removed.

[0745] h) Other Cas Molecules and Cas Polypeptides

[0746] Various types of Cas molecules or Cas polypeptides can be used to practice the inventions disclosed herein. In some embodiments, Cas molecules of Type II Cas systems are used. In other embodiments, Cas molecules of other Cas systems are used. For example, Type I or Type III Cas molecules may be used. Exemplary Cas molecules (and Cas systems) are described, e.g., in Haft et al., PLoS Computational Biology 2005, 1(6): e60 and Makarova et al., Nature Review Microbiology 2011, 9:467-477, the contents of both references are incorporated herein by reference in their entirety. Exemplary Cas molecules (and Cas systems) are also shown in Table 600.

TABLE 600
Cas Systems

| | | | Structure of | Families (and | |
|---|---|---|---|---|---|
| | | | encoded | superfamily) of | |
| Gene | System type or | Name from | protein (PDB | encoded | |
| name^{‡} | subtype | Haft et al.^{§} | accessions)^{¶} | protein^{#}** | Representatives |
| cas1 | Type I | cas1 | 3GOD, 3LFX | COG1518 | SERP2463, |
| | Type II | | and 2YZS | | SPy1047 and ygbT |
| | Type III | | | | |
| cas2 | Type I | cas2 | 2IVY, 2I8E | COG1343 and | SERP2462, |
| | Type II | | and 3EXC | COG3512 | SPy1048, SPy1723 |
| | Type III | | | | (N-terminal |
| | | | | | domain) and ygbF |
| cas3′ | Type I^{‡‡} | cas3 | NA | COG1203 | APE1232 and ygcB |
| cas3″ | Subtype I-A | NA | NA | COG2254 | APE1231 and |
| | Subtype I-B | | | | BH0336 |
| cas4 | Subtype I-A | cas4 and | NA | COG1468 | APE1239 and |
| | Subtype I-B | csa1 | | | BH0340 |
| | Subtype I-C | | | | |
| | Subtype I-D | | | | |
| | Subtype II-B | | | | |
| cas5 | Subtype I-A | cas5a, | 3KG4 | COG1688 | APE1234, BH0337, |
| | Subtype I-B | cas5d, | | (RAMP) | devS and ygcI |
| | Subtype I-C | cas5e, | | | |
| | Subtype I-E | cas5h, | | | |
| | | cas5p, | | | |
| | | cas5t and | | | |
| | | cmx5 | | | |
| cas6 | Subtype I-A | cas6 and | 3I4H | COG1583 and | PF1131 and slr7014 |
| | Subtype I-B | cmx6 | | COG5551 | |
| | Subtype I-D | | | (RAMP) | |
| | Subtype III-A | | | | |
| | Subtype III-B | | | | |
| cas6e | Subtype I-E | cse3 | 1WJ9 | (RAMP) | ygcH |
| cas6f | Subtype I-F | csy4 | 2XLJ | (RAMP) | y1727 |
| cas7 | Subtype I-A | csa2, csd2, | NA | COG1857 and | devR and ygcJ |
| | Subtype I-B | cse4, csh2, | | COG3649 | |
| | Subtype I-C | csp1 and | | (RAMP) | |
| | Subtype I-E | cst2 | | | |
| cas8a1 | Subtype I-A^{‡‡} | cmx1, cst1, | NA | BH0338-like | LA3191^{§§} and |
| | | csx8, csx13 | | | PG2018^{§§} |
| | | and CXXC- | | | |
| | | CXXC | | | |
| cas8a2 | Subtype I-A^{‡‡} | csa4 and | NA | PH0918 | AF0070, AF1873, |
| | | csx9 | | | MJ0385, PF0637, |
| | | | | | PH0918 and |
| | | | | | SSO1401 |
| cas8b | Subtype I-B^{‡‡} | csh1 and | NA | BH0338-like | MTH1090 and |
| | | TM1802 | | | TM1802 |
| cas8c | Subtype I-C^{‡‡} | csd1 and | NA | BH0338-like | BH0338 |
| | | csp2 | | | |
| cas9 | Type II^{‡‡} | csn1 and | NA | COG3513 | FTN_0757 and |
| | | csx12 | | | SPy1046 |
| cas10 | Type III^{‡‡} | cmr2, csm1 | NA | COG1353 | MTH326, |
| | | and csx11 | | | Rv2823c^{§§} and |
| | | | | | TM1794^{§§} |
| cas10d | Subtype I-D^{‡‡} | csc3 | NA | COG1353 | slr7011 |
| csy1 | Subtype I-F^{‡‡} | csy1 | NA | y1724-like | y1724 |
| csy2 | Subtype I-F | csy2 | NA | (RAMP) | y1725 |
| csy3 | Subtype I-F | csy3 | NA | (RAMP) | y1726 |
| cse1 | Subtype I-E^{‡‡} | cse1 | NA | YgcL-like | ygcL |
| cse2 | Subtype I-E | cse2 | 2ZCA | YgcK-like | ygcK |
| csc1 | Subtype I-D | csc1 | NA | alr1563-like | alr1563 |
| | | | | (RAMP) | |
| csc2 | Subtype I-D | csc1 and | NA | COG1337 | slr7012 |
| | | csc2 | | (RAMP) | |
| csa5 | Subtype I-A | csa5 | NA | AF1870 | AF1870, MJ0380, |
| | | | | | PF0643 and |
| | | | | | SSO1398 |
| csn2 | Subtype II-A | csn2 | NA | SPy1049-like | SPy1049 |
| csm2 | Subtype III-A^{‡‡} | csm2 | NA | COG1421 | MTH1081 and |
| | | | | | SERP2460 |
| csm3 | Subtype III-A | csc2 and | NA | COG1337 | MTH1080 and |
| | | csm3 | | (RAMP) | SERP2459 |
| csm4 | Subtype III-A | csm4 | NA | COG1567 | MTH1079 and |
| | | | | (RAMP) | SERP2458 |
| csm5 | Subtype III-A | csm5 | NA | COG1332 | MTH1078 and |
| | | | | (RAMP) | SERP2457 |
| csm6 | Subtype III-A | APE2256 | 2WTE | COG1517 | APE2256 and |
| | | and csm6 | | | SSO1445 |
| cmr1 | Subtype III-B | cmr1 | NA | COG1367 | PF1130 |
| | | | | (RAMP) | |
| cmr3 | Subtype III-B | cmr3 | NA | COG1769 | PF1128 |
| | | | | (RAMP) | |
| cmr4 | Subtype III-B | cmr4 | NA | COG1336 | PF1126 |
| | | | | (RAMP) | |
| cmr5 | Subtype III-B^{‡‡} | cmr5 | 2ZOP and | COG3337 | MTH324 and |
| | | | 2OEB | | PF1125 |
| cmr6 | Subtype III-B | cmr6 | NA | COG1604 | PF1124 |
| | | | | (RAMP) | |
| csb1 | Subtype I-U | GSU0053 | NA | (RAMP) | Balac_1306 and |
| | | | | | GSU0053 |
| csb2 | Subtype I-U^{§§} | NA | NA | (RAMP) | Balac_1305 and |
| | | | | | GSU0054 |
| csb3 | Subtype I-U | NA | NA | (RAMP) | Balac_1303^{§§} |
| csx17 | Subtype I-U | NA | NA | NA | Btus_2683 |
| csx14 | Subtype I-U | NA | NA | NA | GSU0052 |
| csx10 | Subtype I-U | csx10 | NA | (RAMP) | Caur_2274 |
| csx16 | Subtype III-U | VVA1548 | NA | NA | VVA1548 |
| csaX | Subtype III-U | csaX | NA | NA | SSO1438 |
| csx3 | Subtype III-U | csx3 | NA | NA | AF1864 |
| csx1 | Subtype III-U | csa3, csx1, | 1XMX and | COG1517 and | MJ1666, NE0113, |
| | | csx2, | 2I71 | COG4006 | PF1127 and |
| | | DXTHG, | | | TM1812 |
| | | NE0113 | | | |
| | | and | | | |
| | | TIGR02710 | | | |
| csx15 | Unknown | NA | NA | TTE2665 | TTE2665 |
| csf1 | Type U | csf7 | NA | NA | AFE_1038 |
| csf2 | Type U | csf2 | NA | (RAMP) | AFE_1039 |
| csf3 | Type U | csf3 | NA | (RAMP) | AFE_1040 |
| csf4 | Type U | csf4 | NA | NA | AFE_1037 |

[0747] 4. Genome Editing Methods and Methods of Delivery

[0748] a) Genome Editing Approaches

[0749] In general, it is to be understood that the alteration of any gene according to the methods described herein can be mediated by any mechanism and that any methods are not limited to a particular mechanism. Exemplary mechanisms that can be associated with the alteration of a gene include, but are not limited to, non-homologous end joining (e.g., classical or alternative), microhomology-mediated end joining (MMEJ), homology-directed repair (e.g., endogenous donor template mediated), synthesis dependent strand annealing (SDSA), single strand annealing, single strand invasion, single strand break repair (SSBR), mismatch repair (MMR), base excision repair (BER), Interstrand Crosslink (ICL) Translesion synthesis (TLS), or Error-free postreplication repair (PRR). Described herein are exemplary methods for targeted knockout of one or both alleles of PDCD1 encoding the protein PD-1.

[0750] (1) NHEJ Approaches for Gene Targeting

[0751] As described herein, nuclease-induced non-homologous end-joining (NHEJ) can be used to target gene-specific knockouts. Nuclease-induced NHEJ can also be used to remove (e.g., delete) sequence insertions in a gene of interest.

[0752] While not wishing to be bound by theory, it is believed that, in an embodiment, the genomic alterations associated with the methods described herein rely on nuclease-induced NHEJ and the error-prone nature of the NHEJ repair pathway. NHEJ repairs a double-strand break in the DNA by joining together the two ends; however, generally, the original sequence is restored only if two compatible ends, exactly as they were formed by the double-strand break, are perfectly ligated. The DNA ends of the double-strand break are frequently the subject of enzymatic processing, resulting in the addition or removal of nucleotides, at one or both strands, prior to rejoining of the ends. This results in the presence of insertion and/or deletion (indel) mutations in the DNA sequence at the site of the NHEJ repair. Two-thirds of these mutations typically alter the reading frame and, therefore, produce a non-functional protein. Additionally, mutations that maintain the reading frame, but which insert or delete a significant amount of sequence, can destroy functionality of the protein. This is locus dependent as mutations in critical functional domains are likely less tolerable than mutations in non-critical regions of the protein. The indel mutations generated by NHEJ are unpredictable in nature; however, at a given break site certain indel sequences are favored and are over represented in the population, likely due to small regions of microhomology. The lengths of deletions can vary widely; most commonly in the 1-50 bp range, but they can easily reach greater than 100-200 bp. Insertions tend to be shorter and often include short duplications of the sequence immediately surrounding the break site. However, it is possible to obtain large insertions, and in these cases, the inserted sequence has often been traced to other regions of the genome or to plasmid DNA present in the cells.

[0753] Because NHEJ is a mutagenic process, it can also be used to delete small sequence motifs as long as the generation of a specific final sequence is not required. If a double-strand break is targeted near to a short target sequence, the deletion mutations caused by the NHEJ repair often span, and therefore remove, the unwanted nucleotides. For the deletion of larger DNA segments, introducing two double-strand breaks, one on each side of the sequence, can result in NHEJ between the ends with removal of the entire intervening sequence. In some embodiments, a pair of gRNAs can be used to introduce two double-strand breaks, resulting in a deletion of intervening sequences between the two breaks.

[0754] Both of these approaches can be used to delete specific DNA sequences; however, the error-prone nature of NHEJ may still produce indel mutations at the site of repair.

[0755] Both double strand cleaving eaCas9 molecules and single strand, or nickase, eaCas9 molecules can be used in the methods and compositions described herein to generate NHEJ-mediated indels. NHEJ-mediated indels targeted to the gene, e.g., a coding region, e.g., an early coding region of a gene, of interest can be used to knockout (i.e., eliminate expression of) a gene of interest. For example, early coding region of a gene of interest includes sequence immediately following a transcription start site, within a first exon of the coding sequence, or within 500 bp of the transcription start site (e.g., less than 500, 450, 400, 350, 300, 250, 200, 150, 100 or 50 bp).

[0756] In an embodiment, NHEJ-mediated indels are introduced into one or more T-cell expressed genes, such as PDCD1. Individual gRNAs or gRNA pairs targeting the gene are provided together with the Cas9 double-stranded nuclease or single-stranded nickase.

[0757] (2) Placement of Double Strand or Single Strand Breaks Relative to the Target Position

[0758] In an embodiment, in which a gRNA and Cas9 nuclease generate a double strand break for the purpose of inducing NHEJ-mediated indels, a gRNA, e.g., a unimolecular (or chimeric) or modular gRNA molecule, is configured to position one double-strand break in close proximity to a nucleotide of the target position. In an embodiment, the cleavage site is between 0-30 bp away from the target position (e.g., less than 30, 25, 20, 15, 10, 9, 8, 7, 6, 5, 4, 3, 2 or 1 bp from the target position).

[0759] In an embodiment, in which two gRNAs complexing with Cas9 nickases induce two single strand breaks for the purpose of inducing NHEJ-mediated indels, two gRNAs, e.g., independently, unimolecular (or chimeric) or modular gRNA, are configured to position two single-strand breaks to provide for NHEJ repair a nucleotide of the target position. In an embodiment, the gRNAs are configured to position cuts at the same position, or within a few nucleotides of one another, on different strands, essentially mimicking a double strand break. In an embodiment, the closer nick is between 0-30 bp away from the target position (e.g., less than 30, 25, 20, 15, 10, 9, 8, 7, 6, 5, 4, 3, 2 or 1 bp from the target position), and the two nicks are within 25-55 bp of each other (e.g., between 25 to 50, 25 to 45, 25 to 40, 25 to 35, 25 to 30, 50 to 55, 45 to 55, 40 to 55, 35 to 55, 30 to 55, 30 to 50, 35 to 50, 40 to 50, 45 to 50, 35 to 45, or 40 to 45 bp) and no more than 100 bp away from each other (e.g., no more than 90, 80, 70, 60, 50, 40, 30, 20 or 10 bp). In an embodiment, the gRNAs are configured to place a single strand break on either side of a nucleotide of the target position.

[0760] Both double strand cleaving eaCas9 molecules and single strand, or nickase, eaCas9 molecules can be used in the methods and compositions described herein to generate breaks both sides of a target position. Double strand or paired single strand breaks may be generated on both sides of a target position to remove the nucleic acid sequence between the two cuts (e.g., the region between the two breaks in deleted). In an embodiment, two gRNAs, e.g., independently, unimolecular (or chimeric) or modular gRNA, are configured to position a double-strand break on both sides of a target position. In an alternate embodiment, three gRNAs, e.g., independently, unimolecular (or chimeric) or modular gRNA, are configured to position a double strand break (i.e., one gRNA complexes with a cas9 nuclease) and two single strand breaks or paired single stranded breaks (i.e., two gRNAs complex with Cas9 nickases) on either side of the target position. In another embodiment, four gRNAs, e.g., independently, unimolecular (or chimeric) or modular gRNA, are configured to generate two pairs of single stranded breaks (i.e., two pairs of two gRNAs complex with Cas9 nickases) on either side of the target position. The double strand break(s) or the closer of the two single strand nicks in a pair will ideally be within 0-500 bp of the target position (e.g., no more than 450, 400, 350, 300, 250, 200, 150, 100, 50 or 25 bp from the target position). When nickases are used, the two nicks in a pair are within 25-55 bp of each other (e.g., between 25 to 50, 25 to 45, 25 to 40, 25 to 35, 25 to 30, 50 to 55, 45 to 55, 40 to 55, 35 to 55, 30 to 55, 30 to 50, 35 to 50, 40 to 50, 45 to 50, 35 to 45, or 40 to 45 bp) and no more than 100 bp away from each other (e.g., no more than 90, 80, 70, 60, 50, 40, 30, 20 or 10 bp).

[0761] b) Targeted Knockdown

[0762] Unlike CRISPR/Cas-mediated gene knockout, which permanently eliminates or reduces expression by mutating the gene at the DNA level, CRISPR/Cas knockdown allows for temporary reduction of gene expression through the use of artificial transcription factors. Mutating key residues in both DNA cleavage domains of the Cas9 protein (e.g., the D10A and H840A mutations) results in the generation of a catalytically inactive Cas9 (eiCas9 which is also known as dead Cas9 or dCas9). A catalytically inactive Cas9 complexes with a gRNA and localizes to the DNA sequence specified by that gRNA's targeting domain, however, it does not cleave the target DNA. Fusion of the dCas9 to an effector domain, e.g., a transcription repression domain, enables recruitment of the effector to any DNA site specified by the gRNA. While it has been shown that the eiCas9 itself can block transcription when recruited to early regions in the coding sequence, more robust repression can be achieved by fusing a transcriptional repression domain (for example KRAB, SID or ERD) to the Cas9 and recruiting it to the promoter region of a gene. It is likely that targeting DNAseI hypersensitive regions of the promoter may yield more efficient gene repression or activation because these regions are more likely to be accessible to the Cas9 protein and are also more likely to harbor sites for endogenous transcription factors. Especially for gene repression, it is contemplated herein that blocking the binding site of an endogenous transcription factor would aid in downregulating gene expression. In another embodiment, an eiCas9 can be fused to a chromatin modifying protein. Altering chromatin status can result in decreased expression of the target gene.

[0763] In an embodiment, a gRNA molecule can be targeted to a known transcription response elements (e.g., promoters, enhancers, etc.), a known upstream activating sequences (UAS), and/or sequences of unknown or known function that are suspected of being able to control expression of the target DNA.

[0764] In an embodiment, CRISPR/Cas-mediated gene knockdown can be used to reduce expression one or more T-cell expressed genes. In an embodiment, in which a eiCas9 or an eiCas9 fusion protein described herein is used to knockdown two T-cell expressed genes, e.g., any two of FAS, BID, CTLA4, PDCD1, CBLB, or PTPN6 genes, individual gRNAs or gRNA pairs targeting both genes are provided together with the eiCas9 or eiCas9 fusion protein. In an embodiment, in which a eiCas9 or eiCas9 fusion protein is used to knockdown three T-cell expressed genes, e.g., any three of FAS, BID, CTLA4, PDCD1, CBLB, or PTPN6 genes, individual gRNAs or gRNA pairs targeting all three genes are provided together with the eiCas9 or eiCas9 fusion protein. In an embodiment, in which a eiCas9 or eiCas9 fusion protein is used to knockdown four T-cell expressed genes, e.g., any four of FAS, BID, CTLA4, PDCD1, CBLB, or PTPN6 genes, individual gRNAs or gRNA pairs targeting all four genes are provided together with the eiCas9 or eiCas9 fusion protein. In an embodiment, in which a eiCas9 or eiCas9 fusion protein is used to knockdown five T-cell expressed genes, e.g., any five of FAS, BID, CTLA4, PDCD1, CBLB, or PTPN6 genes, individual gRNAs or gRNA pairs targeting all five genes are provided together with the eiCas9 or eiCas9 fusion protein. In an embodiment, in which a eiCas9 or eiCas9 fusion protein is used to knockdown six T-cell expressed genes, e.g., each of FAS, BID, CTLA4, PDCD1, CBLB, or PTPN6 genes, individual gRNAs or gRNA pairs targeting all six genes are provided together with the eiCas9 or eiCas9 fusion protein.

[0765] c) Single-Strand Annealing

[0766] Single strand annealing (SSA) is another DNA repair process that repairs a double-strand break between two repeat sequences present in a target nucleic acid. Repeat sequences utilized by the SSA pathway are generally greater than 30 nucleotides in length. Resection at the break ends occurs to reveal repeat sequences on both strands of the target nucleic acid. After resection, single strand overhangs containing the repeat sequences are coated with RPA protein to prevent the repeats sequences from inappropriate annealing, e.g., to themselves. RAD52 binds to and each of the repeat sequences on the overhangs and aligns the sequences to enable the annealing of the complementary repeat sequences. After annealing, the single-strand flaps of the overhangs are cleaved. New DNA synthesis fills in any gaps, and ligation restores the DNA duplex. As a result of the processing, the DNA sequence between the two repeats is deleted. The length of the deletion can depend on many factors including the location of the two repeats utilized, and the pathway or processivity of the resection.

[0767] In contrast to HDR pathways, SSA does not require a template nucleic acid to alter or correct a target nucleic acid sequence. Instead, the complementary repeat sequence is utilized.

[0768] d) Other DNA Repair Pathways

[0769] (1) SSBR (Single Strand Break Repair)

[0770] Single-stranded breaks (SSB) in the genome are repaired by the SSBR pathway, which is a distinct mechanism from the DSB repair mechanisms discussed above. The SSBR pathway has four major stages: SSB detection, DNA end processing, DNA gap filling, and DNA ligation. A more detailed explanation is given in Caldecott, Nature Reviews Genetics 9, 619-631 (August 2008), and a summary is given here.

[0771] In the first stage, when a SSB forms, PARP1 and/or PARP2 recognize the break and recruit repair machinery. The binding and activity of PARP1 at DNA breaks is transient and it seems to accelerate SSBr by promoting the focal accumulation or stability of SSBr protein complexes at the lesion. Arguably the most important of these SSBr proteins is XRCC1, which functions as a molecular scaffold that interacts with, stabilizes, and stimulates multiple enzymatic components of the SSBr process including the protein responsible for cleaning the DNA 3′ and 5′ ends. For instance, XRCC1 interacts with several proteins (DNA polymerase beta, PNK, and three nucleases, APE1, APTX, and APLF) that promote end processing. APE1 has endonuclease activity. APLF exhibits endonuclease and 3′ to 5′ exonuclease activities. APTX has endonuclease and 3′ to 5′ exonuclease activity.

[0772] This end processing is an important stage of SSBR since the 3′- and/or 5′-termini of most, if not all, SSBs are ‘damaged’. End processing generally involves restoring a damaged 3′-end to a hydroxylated state and and/or a damaged 5′ end to a phosphate moiety, so that the ends become ligation-competent. Enzymes that can process damaged 3′ termini include PNKP, APE1, and TDP1. Enzymes that can process damaged 5′ termini include PNKP, DNA polymerase beta, and APTX. LIG3 (DNA ligase III) can also participate in end processing. Once the ends are cleaned, gap filling can occur.

[0773] At the DNA gap filling stage, the proteins typically present are PARP1, DNA polymerase beta, XRCC1, FEN1 (flap endonculease 1), DNA polymerase delta/epsilon, PCNA, and LIG1. There are two ways of gap filling, the short patch repair and the long patch repair. Short patch repair involves the insertion of a single nucleotide that is missing. At some SSBs, “gap filling” might continue displacing two or more nucleotides (displacement of up to 12 bases have been reported). FEN1 is an endonuclease that removes the displaced 5′-residues. Multiple DNA polymerases, including Pol (3, are involved in the repair of SSBs, with the choice of DNA polymerase influenced by the source and type of SSB.

[0774] In the fourth stage, a DNA ligase such as LIG1 (Ligase I) or LIG3 (Ligase III) catalyzes joining of the ends. Short patch repair uses Ligase III and long patch repair uses Ligase I.

[0775] Sometimes, SSBR is replication-coupled. This pathway can involve one or more of CtIP, MRN, ERCC1, and FEN1. Additional factors that may promote SSBR include: aPARP, PARP1, PARP2, PARG, XRCC1, DNA polymerase b, DNA polymerase d, DNA polymerase e, PCNA, LIG1, PNK, PNKP, APE1, APTX, APLF, TDP1, LIG3, FEN1, CtIP, MRN, and ERCC1.

[0776] (2) MMR (Mismatch Repair)

[0777] Cells contain three excision repair pathways: MMR, BER, and NER. The excision repair pathways hace a common feature in that they typically recognize a lesion on one strand of the DNA, then exo/endonucleaseases remove the lesion and leave a 1-30 nucleotide gap that is sub-sequentially filled in by DNA polymerase and finally sealed with ligase. A more complete picture is given in Li, Cell Research (2008) 18:85-98, and a summary is provided here.

[0778] Mismatch repair (MMR) operates on mispaired DNA bases.

[0779] The MSH2/6 or MSH2/3 complexes both have ATPases activity that plays an important role in mismatch recognition and the initiation of repair. MSH2/6 preferentially recognizes base-base mismatches and identifies mispairs of 1 or 2 nucleotides, while MSH2/3 preferentially recognizes larger ID mispairs.

[0780] hMLH1 heterodimerizes with hPMS2 to form hMutLα which possesses an ATPase activity and is important for multiple steps of MMR. It possesses a PCNA/replication factor C (RFC)-dependent endonuclease activity which plays an important role in 3′ nick-directed MMR involving EXO1. (EXO1 is a participant in both HR and MMR.) It regulates termination of mismatch-provoked excision. Ligase I is the relevant ligase for this pathway. Additional factors that may promote MMR include: EXO1, MSH2, MSH3, MSH6, MLH1, PMS2, MLH3, DNA Pol d, RPA, HMGB1, RFC, and DNA ligase I.

[0781] (3) Base Excision Repair (BER)

[0782] The base excision repair (BER) pathway is active throughout the cell cycle; it is responsible primarily for removing small, non-helix-distorting base lesions from the genome. In contrast, the related Nucleotide Excision Repair pathway (discussed in the next section) repairs bulky helix-distorting lesions. A more detailed explanation is given in Caldecott, Nature Reviews Genetics 9, 619-631 (August 2008), and a summary is given here.

[0783] Upon DNA base damage, base excision repair (BER) is initiated and the process can be simplified into five major steps: (a) removal of the damaged DNA base; (b) incision of the subsequent a basic site; (c) clean-up of the DNA ends; (d) insertion of the correct nucleotide into the repair gap; and (e) ligation of the remaining nick in the DNA backbone. These last steps are similar to the SSBR.

[0784] In the first step, a damage-specific DNA glycosylase excises the damaged base through cleavage of the N-glycosidic bond linking the base to the sugar phosphate backbone. Then AP endonuclease-1 (APE1) or bifunctional DNA glycosylases with an associated lyase activity incised the phosphodiester backbone to create a DNA single strand break (SSB). The third step of BER involves cleaning-up of the DNA ends. The fourth step in BER is conducted by Pol β that adds a new complementary nucleotide into the repair gap and in the final step XRCC1/Ligase III seals the remaining nick in the DNA backbone. This completes the short-patch BER pathway in which the majority (˜80%) of damaged DNA bases are repaired. However, if the 5′-ends in step 3 are resistant to end processing activity, following one nucleotide insertion by Pol β there is then a polymerase switch to the replicative DNA polymerases, Pol δ/ε, which then add ˜2-8 more nucleotides into the DNA repair gap. This creates a 5′-flap structure, which is recognized and excised by flap endonuclease-1 (FEN-1) in association with the processivity factor proliferating cell nuclear antigen (PCNA). DNA ligase I then seals the remaining nick in the DNA backbone and completes long-patch BER. Additional factors that may promote the BER pathway include: DNA glycosylase, APE1, Polb, Pold, Pole, XRCC1, Ligase III, FEN-1, PCNA, RECQL4, WRN, MYH, PNKP, and APTX.

[0785] (4) Nucleotide Excision Repair (NER)

[0786] Nucleotide excision repair (NER) is an important excision mechanism that removes bulky helix-distorting lesions from DNA. Additional details about NER are given in Marteijn et al., Nature Reviews Molecular Cell Biology 15, 465-481 (2014), and a summary is given here. NER a broad pathway encompassing two smaller pathways: global genomic NER (GG-NER) and transcription coupled repair NER (TC-NER). GG-NER and TC-NER use different factors for recognizing DNA damage. However, they utilize the same machinery for lesion incision, repair, and ligation.

[0787] Once damage is recognized, the cell removes a short single-stranded DNA segment that contains the lesion. Endonucleases XPF/ERCC1 and XPG (encoded by ERCC5) remove the lesion by cutting the damaged strand on either side of the lesion, resulting in a single-strand gap of 22-30 nucleotides. Next, the cell performs DNA gap filling synthesis and ligation. Involved in this process are: PCNA, RFC, DNA Pol δ, DNA Pol ε or DNA Pol κ, and DNA ligase I or XRCC1/Ligase III. Replicating cells tend to use DNA pol ε and DNA ligase I, while non-replicating cells tend to use DNA Pol δ, DNA Pol κ, and the XRCC1/Ligase III complex to perform the ligation step.

[0788] NER can involve the following factors: XPA-G, POLH, XPF, ERCC1, XPA-G, and LIG1. Transcription-coupled NER (TC-NER) can involve the following factors: CSA, CSB, XPB, XPD, XPG, ERCC1, and TTDA. Additional factors that may promote the NER repair pathway include XPA-G, POLH, XPF, ERCC1, XPA-G, LIG1, CSA, CSB, XPA, XPB, XPC, XPD, XPF, XPG, TTDA, UVSSA, USP7, CETN2, RAD23B, UV-DDB, CAK subcomplex, RPA, and PCNA.

[0789] (5) Intrastrand Crosslink (ICL)

[0790] A dedicated pathway called the ICL repair pathway repairs interstrand crosslinks. Interstrand crosslinks, or covalent crosslinks between bases in different DNA strand, can occur during replication or transcription. ICL repair involves the coordination of multiple repair processes, in particular, nucleolytic activity, translesion synthesis (TLS), and HDR. Nucleases are recruited to excise the ICL on either side of the crosslinked bases, while TLS and HDR are coordinated to repair the cut strands. ICL repair can involve the following factors: endonucleases, e.g., XPF and RAD51C, endonucleases such as RAD51, translesion polymerases, e.g., DNA polymerase zeta and Rev1), and the Fanconi anemia (FA) proteins, e.g., FancJ.

[0791] (6) Other Pathways

[0792] Several other DNA repair pathways exist in mammals.

[0793] Translesion synthesis (TLS) is a pathway for repairing a single stranded break left after a defective replication event and involves translesion polymerases, e.g., DNA pol□ and Rev1.

[0794] Error-free postreplication repair (PRR) is another pathway for repairing a single stranded break left after a defective replication event.
[0795] e) Examples of gRNAs in Genome Editing Methods

[0796] Any of the gRNA molecules as described herein can be used with any Cas9 molecules that generate a double strand break or a single strand break to alter the sequence of a target nucleic acid, e.g., a target position or target genetic signature. In some examples, the target nucleic acid is at or near the PDCD1 locus, such as any as described. In some embodiments, a ribonucleic acid molecule, such as a gRNA molecule, and a protein, such as a Cas9 protein or variants thereof, are introduced to any of the engineered cells provided herein. gRNA molecules useful in these methods are described below.

[0797] In an embodiment, the gRNA, e.g., a chimeric gRNA, is configured such that it comprises one or more of the following properties;
[0798] a) it can position, e.g., when targeting a Cas9 molecule that makes double strand breaks, a double strand break (i) within 50, 100, 150, 200, 250, 300, 350, 400, 450, or 500 nucleotides of a target position, or (ii) sufficiently close that the target position is within the region of end resection;
[0799] b) it has a targeting domain of at least 16 nucleotides, e.g., a targeting domain of (i) 16, (ii), 17, (iii) 18, (iv) 19, (v) 20, (vi) 21, (vii) 22, (viii) 23, (ix) 24, (x) 25, or (xi) 26 nucleotides; and
[0800] c)
[0801] (i) the proximal and tail domain, when taken together, comprise at least 15, 18, 20, 25, 30, 31, 35, 40, 45, 49, 50, or 53 nucleotides, e.g., at least 15, 18, 20, 25, 30, 31, 35, 40, 45, 49, 50, or 53 nucleotides from a naturally occurring S. pyogenes, S. thermophilus, S. aureus, or N. meningitidis tail and proximal domain, or a sequence that differs by no more than 1, 2, 3, 4, 5; 6, 7, 8, 9 or 10 nucleotides therefrom;
[0802] (ii) there are at least 15, 18, 20, 25, 30, 31, 35, 40, 45, 49, 50, or 53 nucleotides 3′ to the last nucleotide of the second complementarity domain, e.g., at least 15, 18, 20, 25, 30, 31, 35, 40, 45, 49, 50, or 53 nucleotides from the corresponding sequence of a naturally occurring S. pyogenes, S. thermophilus, S. aureus, or N. meningitidis gRNA, or a sequence that differs by no more than 1, 2, 3, 4, 5; 6, 7, 8, 9 or 10 nucleotides therefrom;
[0803] (iii) there are at least 16, 19, 21, 26, 31, 32, 36, 41, 46, 50, 51, or 54 nucleotides 3′ to the last nucleotide of the second complementarity domain that is complementary to its corresponding nucleotide of the first complementarity domain, e.g., at least 16, 19, 21, 26, 31, 32, 36, 41, 46, 50, 51, or 54 nucleotides from the corresponding sequence of a naturally occurring S. pyogenes, S. thermophilus, S. aureus, or N. meningitidis gRNA, or a sequence that differs by no more than 1, 2, 3, 4, 5; 6, 7, 8, 9 or 10 nucleotides therefrom;
[0804] (iv) the tail domain is at least 10, 15, 20, 25, 30, 35 or 40 nucleotides in length, e.g., it comprises at least 10, 15, 20, 25, 30, 35 or 40 nucleotides from a naturally occurring S. pyogenes, S. thermophilus, S. aureus, or N. meningitidis tail domain, or a sequence that differs by no more than 1, 2, 3, 4, 5; 6, 7, 8, 9 or 10 nucleotides therefrom; or
[0805] (v) the tail domain comprises 15, 20, 25, 30, 35, 40 nucleotides or all of the corresponding portions of a naturally occurring tail domain, e.g., a naturally occurring S. pyogenes, S. thermophilus, S. aureus, or N. meningitidis tail domain.

[0806] In an embodiment, the gRNA is configured such that it comprises properties: a and b(i).

[0807] In an embodiment, the gRNA is configured such that it comprises properties: a and b(ii).

[0808] In an embodiment, the gRNA is configured such that it comprises properties: a and b(iii).

[0809] In an embodiment, the gRNA is configured such that it comprises properties: a and b(iv).

[0810] In an embodiment, the gRNA is configured such that it comprises properties: a and b(v).

[0811] In an embodiment, the gRNA is configured such that it comprises properties: a and b(vi).

[0812] In an embodiment, the gRNA is configured such that it comprises properties: a and b(vii).

[0813] In an embodiment, the gRNA is configured such that it comprises properties: a and b(viii).

[0814] In an embodiment, the gRNA is configured such that it comprises properties: a and b(ix).

[0815] In an embodiment, the gRNA is configured such that it comprises properties: a and b(x).

[0816] In an embodiment, the gRNA is configured such that it comprises properties: a and b(xi).

[0817] In an embodiment, the gRNA is configured such that it comprises properties: a and c.

[0818] In an embodiment, the gRNA is configured such that in comprises properties: a, b, and c.

[0819] In an embodiment, the gRNA is configured such that in comprises properties: a(i), b(i), and c(i).

[0820] In an embodiment, the gRNA is configured such that in comprises properties: a(i), b(i), and c(ii).

[0821] In an embodiment, the gRNA is configured such that in comprises properties: a(i), b(ii), and c(i).

[0822] In an embodiment, the gRNA is configured such that in comprises properties: a(i), b(ii), and c(ii).

[0823] In an embodiment, the gRNA is configured such that in comprises properties: a(i), b(iii), and c(i).

[0824] In an embodiment, the gRNA is configured such that in comprises properties: a(i), b(iii), and c(ii).

[0825] In an embodiment, the gRNA is configured such that in comprises properties: a(i), b(iv), and c(i).

[0826] In an embodiment, the gRNA is configured such that in comprises properties: a(i), b(iv), and c(ii).

[0827] In an embodiment, the gRNA is configured such that in comprises properties: a(i), b(v), and c(i).

[0828] In an embodiment, the gRNA is configured such that in comprises properties: a(i), b(v), and c(ii).

[0829] In an embodiment, the gRNA is configured such that in comprises properties: a(i), b(vi), and c(i).

[0830] In an embodiment, the gRNA is configured such that in comprises properties: a(i), b(vi), and c(ii).

[0831] In an embodiment, the gRNA is configured such that in comprises properties: a(i), b(vii), and c(i).

[0832] In an embodiment, the gRNA is configured such that in comprises properties: a(i), b(vii), and c(ii).

[0833] In an embodiment, the gRNA is configured such that in comprises properties: a(i), b(viii), and c(i).

[0834] In an embodiment, the gRNA is configured such that in comprises properties: a(i), b(viii), and c(ii).

[0835] In an embodiment, the gRNA is configured such that in comprises properties: a(i), b(ix), and c(i).

[0836] In an embodiment, the gRNA is configured such that in comprises properties: a(i), b(ix), and c(ii).

[0837] In an embodiment, the gRNA is configured such that in comprises properties: a(i), b(x), and c(i).

[0838] In an embodiment, the gRNA is configured such that in comprises properties: a(i), b(x), and c(ii).

[0839] In an embodiment, the gRNA is configured such that in comprises properties: a(i), b(xi), and c(i).

[0840] In an embodiment, the gRNA is configured such that in comprises properties: a(i), b(xi), and c(ii).

[0841] In an embodiment, the gRNA, e.g., a chimeric gRNA, is configured such that it comprises one or more of the following properties;
[0842] a) one or both of the gRNAs can position, e.g., when targeting a Cas9 molecule that makes single strand breaks, a single strand break within (i) 50, 100, 150, 200, 250, 300, 350, 400, 450, or 500 nucleotides of a target position, or (ii) sufficiently close that the target position is within the region of end resection;
[0843] b) one or both have a targeting domain of at least 16 nucleotides, e.g., a targeting domain of (i) 16, (ii), 17, (iii) 18, (iv) 19, (v) 20, (vi) 21, (vii) 22, (viii) 23, (ix) 24, (x) 25, or (xi) 26 nucleotides; and
[0844] c)
[0845] (i) the proximal and tail domain, when taken together, comprise at least 15, 18, 20, 25, 30, 31, 35, 40, 45, 49, 50, or 53 nucleotides, e.g., at least 15, 18, 20, 25, 30, 31, 35, 40, 45, 49, 50, or 53 nucleotides from a naturally occurring S. pyogenes, S. thermophilus, S. aureus, or N. meningitidis tail and proximal domain, or a sequence that differs by no more than 1, 2, 3, 4, 5; 6, 7, 8, 9 or 10 nucleotides therefrom;
[0846] (ii) there are at least 15, 18, 20, 25, 30, 31, 35, 40, 45, 49, 50, or 53 nucleotides 3′ to the last nucleotide of the second complementarity domain, e.g., at least 15, 18, 20, 25, 30, 31, 35, 40, 45, 49, 50, or 53 nucleotides from the corresponding sequence of a naturally occurring S. pyogenes, S. thermophilus, S. aureus, or N. meningitidis gRNA, or a sequence that differs by no more than 1, 2, 3, 4, 5; 6, 7, 8, 9 or 10 nucleotides therefrom;
[0847] (iii) there are at least 16, 19, 21, 26, 31, 32, 36, 41, 46, 50, 51, or 54 nucleotides 3′ to the last nucleotide of the second complementarity domain that is complementary to its corresponding nucleotide of the first complementarity domain, e.g., at least 16, 19, 21, 26, 31, 32, 36, 41, 46, 50, 51, or 54 nucleotides from the corresponding sequence of a naturally occurring S. pyogenes, S. thermophilus, S. aureus, or N. meningitidis gRNA, or a sequence that differs by no more than 1, 2, 3, 4, 5; 6, 7, 8, 9 or 10 nucleotides therefrom;
[0848] (iv) the tail domain is at least 10, 15, 20, 25, 30, 35 or 40 nucleotides in length, e.g., it comprises at least 10, 15, 20, 25, 30, 35 or 40 nucleotides from a naturally occurring S. pyogenes, S. thermophilus, S. aureus, or N. meningitidis tail domain, or a sequence that differs by no more than 1, 2, 3, 4, 5; 6, 7, 8, 9 or 10 nucleotides therefrom; or
[0849] (v) the tail domain comprises 15, 20, 25, 30, 35, 40 nucleotides or all of the corresponding portions of a naturally occurring tail domain, e.g., a naturally occurring S. pyogenes, S. thermophilus, S. aureus, or N. meningitidis tail domain.

[0850] In an embodiment, the gRNA is configured such that it comprises properties: a and b(i).

[0851] In an embodiment, the gRNA is configured such that it comprises properties: a and b(ii).

[0852] In an embodiment, the gRNA is configured such that it comprises properties: a and b(iii).

[0853] In an embodiment, the gRNA is configured such that it comprises properties: a and b(iv).

[0854] In an embodiment, the gRNA is configured such that it comprises properties: a and b(v).

[0855] In an embodiment, the gRNA is configured such that it comprises properties: a and b(vi).

[0856] In an embodiment, the gRNA is configured such that it comprises properties: a and b(vii).

[0857] In an embodiment, the gRNA is configured such that it comprises properties: a and b(viii).

[0858] In an embodiment, the gRNA is configured such that it comprises properties: a and b(ix).

[0859] In an embodiment, the gRNA is configured such that it comprises properties: a and b(x).

[0860] In an embodiment, the gRNA is configured such that it comprises properties: a and b(xi).

[0861] In an embodiment, the gRNA is configured such that it comprises properties: a and c.

[0862] In an embodiment, the gRNA is configured such that in comprises properties: a, b, and c.

[0863] In an embodiment, the gRNA is configured such that in comprises properties: a(i), b(i), and c(i).

[0864] In an embodiment, the gRNA is configured such that in comprises properties: a(i), b(i), and c(ii).

[0865] In an embodiment, the gRNA is configured such that in comprises properties: a(i), b(ii), and c(i).

[0866] In an embodiment, the gRNA is configured such that in comprises properties: a(i), b(ii), and c(ii).

[0867] In an embodiment, the gRNA is configured such that in comprises properties: a(i), b(iii), and c(i).

[0868] In an embodiment, the gRNA is configured such that in comprises properties: a(i), b(iii), and c(ii).

[0869] In an embodiment, the gRNA is configured such that in comprises properties: a(i), b(iv), and c(i).

[0870] In an embodiment, the gRNA is configured such that in comprises properties: a(i), b(iv), and c(ii).

[0871] In an embodiment, the gRNA is configured such that in comprises properties: a(i), b(v), and c(i).

[0872] In an embodiment, the gRNA is configured such that in comprises properties: a(i), b(v), and c(ii).

[0873] In an embodiment, the gRNA is configured such that in comprises properties: a(i), b(vi), and c(i).

[0874] In an embodiment, the gRNA is configured such that in comprises properties: a(i), b(vi), and c(ii).

[0875] In an embodiment, the gRNA is configured such that in comprises properties: a(i), b(vii), and c(i).

[0876] In an embodiment, the gRNA is configured such that in comprises properties: a(i), b(vii), and c(ii).

[0877] In an embodiment, the gRNA is configured such that in comprises properties: a(i), b(viii), and c(i).

[0878] In an embodiment, the gRNA is configured such that in comprises properties: a(i), b(viii), and c(ii).

[0879] In an embodiment, the gRNA is configured such that in comprises properties: a(i), b(ix), and c(i).

[0880] In an embodiment, the gRNA is configured such that in comprises properties: a(i), b(ix), and c(ii).

[0881] In an embodiment, the gRNA is configured such that in comprises properties: a(i), b(x), and c(i).

[0882] In an embodiment, the gRNA is configured such that in comprises properties: a(i), b(x), and c(ii).

[0883] In an embodiment, the gRNA is configured such that in comprises properties: a(i), b(xi), and c(i).

[0884] In an embodiment, the gRNA is configured such that in comprises properties: a(i), b(xi), and c(ii).

[0885] In an embodiment, the gRNA is used with a Cas9 nickase molecule having HNH activity, e.g., a Cas9 molecule having the RuvC activity inactivated, e.g., a Cas9 molecule having a mutation at D10, e.g., the D10A mutation.

[0886] In an embodiment, the gRNA is used with a Cas9 nickase molecule having RuvC activity, e.g., a Cas9 molecule having the HNH activity inactivated, e.g., a Cas9 molecule having a mutation at H840, e.g., a H840A.

[0887] In an embodiment, a pair of gRNAs, e.g., a pair of chimeric gRNAs, comprising a first and a second gRNA, is configured such that they comprises one or more of the following properties;
[0888] a) one or both of the gRNAs can position, e.g., when targeting a Cas9 molecule that makes single strand breaks, a single strand break within (i) 50, 100, 150, 200, 250, 300, 350, 400, 450, or 500 nucleotides of a target position, or (ii) sufficiently close that the target position is within the region of end resection;
[0889] b) one or both have a targeting domain of at least 16 nucleotides, e.g., a targeting domain of (i) 16, (ii), 17, (iii) 18, (iv) 19, (v) 20, (vi) 21, (vii) 22, (viii) 23, (ix) 24, (x) 25, or (xi) 26 nucleotides;
[0890] c) for one or both:
[0891] (i) the proximal and tail domain, when taken together, comprise at least 15, 18, 20, 25, 30, 31, 35, 40, 45, 49, 50, or 53 nucleotides, e.g., at least 15, 18, 20, 25, 30, 31, 35, 40, 45, 49, 50, or 53 nucleotides from a naturally occurring S. pyogenes, S. thermophilus, S. aureus, or N. meningitidis tail and proximal domain, or a sequence that differs by no more than 1, 2, 3, 4, 5; 6, 7, 8, 9 or 10 nucleotides therefrom;
[0892] (ii) there are at least 15, 18, 20, 25, 30, 31, 35, 40, 45, 49, 50, or 53 nucleotides 3′ to the last nucleotide of the second complementarity domain, e.g., at least 15, 18, 20, 25, 30, 31, 35, 40, 45, 49, 50, or 53 nucleotides from the corresponding sequence of a naturally occurring S. pyogenes, S. thermophilus, S. aureus, or N. meningitidis gRNA, or a sequence that differs by no more than 1, 2, 3, 4, 5; 6, 7, 8, 9 or 10 nucleotides therefrom;
[0893] (iii) there are at least 16, 19, 21, 26, 31, 32, 36, 41, 46, 50, 51, or 54 nucleotides 3′ to the last nucleotide of the second complementarity domain that is complementary to its corresponding nucleotide of the first complementarity domain, e.g., at least 16, 19, 21, 26, 31, 32, 36, 41, 46, 50, 51, or 54 nucleotides from the corresponding sequence of a naturally occurring S. pyogenes, S. thermophilus, S. aureus, or N. meningitidis gRNA, or a sequence that differs by no more than 1, 2, 3, 4, 5; 6, 7, 8, 9 or 10 nucleotides therefrom;
[0894] (iv) the tail domain is at least 10, 15, 20, 25, 30, 35 or 40 nucleotides in length, e.g., it comprises at least 10, 15, 20, 25, 30, 35 or 40 nucleotides from a naturally occurring S. pyogenes, S. thermophilus, S. aureus, or N. meningitidis tail domain; or, or a sequence that differs by no more than 1, 2, 3, 4, 5; 6, 7, 8, 9 or 10 nucleotides therefrom; or
[0895] (v) the tail domain comprises 15, 20, 25, 30, 35, 40 nucleotides or all of the corresponding portions of a naturally occurring tail domain, e.g., a naturally occurring S. pyogenes, S. thermophilus, S. aureus, or N. meningitidis tail domain;
[0896] d) the gRNAs are configured such that, when hybridized to target nucleic acid, they are separated by 0-50, 0-100, 0-200, at least 10, at least 20, at least 30 or at least 50 nucleotides;
[0897] e) the breaks made by the first gRNA and second gRNA are on different strands; and
[0898] f) the PAMs are facing outwards.

[0899] In an embodiment, one or both of the gRNAs is configured such that it comprises properties: a and b(i).

[0900] In an embodiment, one or both of the gRNAs is configured such that it comprises properties: a and b(ii).

[0901] In an embodiment, one or both of the gRNAs is configured such that it comprises properties: a and b(iii).

[0902] In an embodiment, one or both of the gRNAs is configured such that it comprises properties: a and b(iv).

[0903] In an embodiment, one or both of the gRNAs is configured such that it comprises properties: a and b(v).

[0904] In an embodiment, one or both of the gRNAs is configured such that it comprises properties: a and b(vi).

[0905] In an embodiment, one or both of the gRNAs is configured such that it comprises properties: a and b(vii).

[0906] In an embodiment, one or both of the gRNAs is configured such that it comprises properties: a and b(viii).

[0907] In an embodiment, one or both of the gRNAs is configured such that it comprises properties: a and b(ix).

[0908] In an embodiment, one or both of the gRNAs is configured such that it comprises properties: a and b(x).

[0909] In an embodiment, one or both of the gRNAs is configured such that it comprises properties: a and b(xi).

[0910] In an embodiment, one or both of the gRNAs configured such that it comprises properties: a and c.

[0911] In an embodiment, one or both of the gRNAs is configured such that it comprises properties: a, b, and c.

[0912] In an embodiment, one or both of the gRNAs is configured such that it comprises properties: a(i), b(i), and c(i).

[0913] In an embodiment, one or both of the gRNAs is configured such that it comprises properties: a(i), b(i), and c(ii).

[0914] In an embodiment, one or both of the gRNAs is configured such that it comprises properties: a(i), b(i), c, and d.

[0915] In an embodiment, one or both of the gRNAs is configured such that it comprises properties: a(i), b(i), c, and e.

[0916] In an embodiment, one or both of the gRNAs is configured such that it comprises properties: a(i), b(i), c, d, and e.

[0917] In an embodiment, one or both of the gRNAs is configured such that it comprises properties: a(i), b(ii), and c(i).

[0918] In an embodiment, one or both of the gRNAs is configured such that it comprises properties: a(i), b(ii), and c(ii).

[0919] In an embodiment, one or both of the gRNAs is configured such that it comprises properties: a(i), b(ii), c, and d.

[0920] In an embodiment, one or both of the gRNAs is configured such that it comprises properties: a(i), b(ii), c, and e.

[0921] In an embodiment, one or both of the gRNAs is configured such that it comprises properties: a(i), b(ii), c, d, and e.

[0922] In an embodiment, one or both of the gRNAs is configured such that it comprises properties: a(i), b(iii), and c(i).

[0923] In an embodiment, one or both of the gRNAs is configured such that it comprises properties: a(i), b(iii), and c(ii).

[0924] In an embodiment, one or both of the gRNAs is configured such that it comprises properties: a(i), b(iii), c, and d.

[0925] In an embodiment, one or both of the gRNAs is configured such that it comprises properties: a(i), b(iii), c, and e.

[0926] In an embodiment, one or both of the gRNAs is configured such that it comprises properties: a(i), b(iii), c, d, and e.

[0927] In an embodiment, one or both of the gRNAs is configured such that it comprises properties: a(i), b(iv), and c(i).

[0928] In an embodiment, one or both of the gRNAs is configured such that it comprises properties: a(i), b(iv), and c(ii).

[0929] In an embodiment, one or both of the gRNAs is configured such that it comprises properties: a(i), b(iv), c, and d.

[0930] In an embodiment, one or both of the gRNAs is configured such that it comprises properties: a(i), b(iv), c, and e.

[0931] In an embodiment, one or both of the gRNAs is configured such that it comprises properties: a(i), b(iv), c, d, and e.

[0932] In an embodiment, one or both of the gRNAs is configured such that it comprises properties: a(i), b(v), and c(i).

[0933] In an embodiment, one or both of the gRNAs is configured such that it comprises properties: a(i), b(v), and c(ii).

[0934] In an embodiment, one or both of the gRNAs is configured such that it comprises properties: a(i), b(v), c, and d.

[0935] In an embodiment, one or both of the gRNAs is configured such that it comprises properties: a(i), b(v), c, and e.

[0936] In an embodiment, one or both of the gRNAs is configured such that it comprises properties: a(i), b(v), c, d, and e.

[0937] In an embodiment, one or both of the gRNAs is configured such that it comprises properties: a(i), b(vi), and c(i).

[0938] In an embodiment, one or both of the gRNAs is configured such that it comprises properties: a(i), b(vi), and c(ii).

[0939] In an embodiment, one or both of the gRNAs is configured such that it comprises properties: a(i), b(vi), c, and d.

[0940] In an embodiment, one or both of the gRNAs is configured such that it comprises properties: a(i), b(vi), c, and e.

[0941] In an embodiment, one or both of the gRNAs is configured such that it comprises properties: a(i), b(vi), c, d, and e.

[0942] In an embodiment, one or both of the gRNAs is configured such that it comprises properties: a(i), b(vii), and c(i).

[0943] In an embodiment, one or both of the gRNAs is configured such that it comprises properties: a(i), b(vii), and c(ii).

[0944] In an embodiment, one or both of the gRNAs is configured such that it comprises properties: a(i), b(vii), c, and d.

[0945] In an embodiment, one or both of the gRNAs is configured such that it comprises properties: a(i), b(vii), c, and e.

[0946] In an embodiment, one or both of the gRNAs is configured such that it comprises properties: a(i), b(vii), c, d, and e.

[0947] In an embodiment, one or both of the gRNAs is configured such that it comprises properties: a(i), b(viii), and c(i).

[0948] In an embodiment, one or both of the gRNAs is configured such that it comprises properties: a(i), b(viii), and c(ii).

[0949] In an embodiment, one or both of the gRNAs is configured such that it comprises properties: a(i), b(viii), c, and d.

[0950] In an embodiment, one or both of the gRNAs is configured such that it comprises properties: a(i), b(viii), c, and e.

[0951] In an embodiment, one or both of the gRNAs is configured such that it comprises properties: a(i), b(viii), c, d, and e.

[0952] In an embodiment, one or both of the gRNAs is configured such that it comprises properties: a(i), b(ix), and c(i).

[0953] In an embodiment, one or both of the gRNAs is configured such that it comprises properties: a(i), b(ix), and c(ii).

[0954] In an embodiment, one or both of the gRNAs is configured such that it comprises properties: a(i), b(ix), c, and d.

[0955] In an embodiment, one or both of the gRNAs is configured such that it comprises properties: a(i), b(ix), c, and e.

[0956] In an embodiment, one or both of the gRNAs is configured such that it comprises properties: a(i), b(ix), c, d, and e.

[0957] In an embodiment, one or both of the gRNAs is configured such that it comprises properties: a(i), b(x), and c(i).

[0958] In an embodiment, one or both of the gRNAs is configured such that it comprises properties: a(i), b(x), and c(ii).

[0959] In an embodiment, one or both of the gRNAs is configured such that it comprises properties: a(i), b(x), c, and d.

[0960] In an embodiment, one or both of the gRNAs is configured such that it comprises properties: a(i), b(x), c, and e.

[0961] In an embodiment, one or both of the gRNAs is configured such that it comprises properties: a(i), b(x), c, d, and e.

[0962] In an embodiment, one or both of the gRNAs is configured such that it comprises properties: a(i), b(xi), and c(i).

[0963] In an embodiment, one or both of the gRNAs is configured such that it comprises properties: a(i), b(xi), and c(ii).

[0964] In an embodiment, one or both of the gRNAs is configured such that it comprises properties: a(i), b(xi), c, and d.

[0965] In an embodiment, one or both of the gRNAs is configured such that it comprises properties: a(i), b(xi), c, and e.

[0966] In an embodiment, one or both of the gRNAs is configured such that it comprises properties: a(i), b(xi), c, d, and e.

[0967] In an embodiment, the gRNAs are used with a Cas9 nickase molecule having HNH activity, e.g., a Cas9 molecule having the RuvC activity inactivated, e.g., a Cas9 molecule having a mutation at D10, e.g., the D10A mutation.

[0968] In an embodiment, the gRNAs are used with a Cas9 nickase molecule having RuvC activity, e.g., a Cas9 molecule having the HNH activity inactivated, e.g., a Cas9 molecule having a mutation at H840, e.g., a H840A. In an embodiment, the gRNAs are used with a Cas9 nickase molecule having RuvC activity, e.g., a Cas9 molecule having the HNH activity inactivated, e.g., a Cas9 molecule having a mutation at N863, e.g., N863A.

[0969] (1) Functional Analysis of Agents for Gene Editing

[0970] Any of the Cas9 molecules, gRNA molecules, Cas9 molecule/gRNA molecule complexes, can be evaluated by art-known methods or as described herein. For example, exemplary methods for evaluating the endonuclease activity of Cas9 molecule are described, e.g., in Jinek et al., SCIENCE 2012, 337(6096):816-821.

[0971] (a) Binding and Cleavage Assay: Testing the Endonuclease Activity of Cas9 Molecule

[0972] The ability of a Cas9 molecule/gRNA molecule complex to bind to and cleave a target nucleic acid can be evaluated in a plasmid cleavage assay. In this assay, synthetic or in vitro-transcribed gRNA molecule is pre-annealed prior to the reaction by heating to 95° C. and slowly cooling down to room temperature. Native or restriction digest-linearized plasmid DNA (300 ng (˜8 nM)) is incubated for 60 min at 37° C. with purified Cas9 protein molecule (50-500 nM) and gRNA (50-500 nM, 1:1) in a Cas9 plasmid cleavage buffer (20 mM HEPES pH 7.5, 150 mM KCl, 0.5 mM DTT, 0.1 mM EDTA) with or without 10 mM MgCl₂. The reactions are stopped with 5×DNA loading buffer (30% glycerol, 1.2% SDS, 250 mM EDTA), resolved by a 0.8 or 1% agarose gel electrophoresis and visualized by ethidium bromide staining. The resulting cleavage products indicate whether the Cas9 molecule cleaves both DNA strands, or only one of the two strands. For example, linear DNA products indicate the cleavage of both DNA strands. Nicked open circular products indicate that only one of the two strands is cleaved.

[0973] Alternatively, the ability of a Cas9 molecule/gRNA molecule complex to bind to and cleave a target nucleic acid can be evaluated in an oligonucleotide DNA cleavage assay. In this assay, DNA oligonucleotides (10 pmol) are radiolabeled by incubating with 5 units T4 polynucleotide kinase and ˜3-6 pmol (˜20-40 mCi) [γ-32P]-ATP in 1× T4 polynucleotide kinase reaction buffer at 37° C. for 30 min, in a 50 μL reaction. After heat inactivation (65° C. for 20 min), reactions are purified through a column to remove unincorporated label. Duplex substrates (100 nM) are generated by annealing labeled oligonucleotides with equimolar amounts of unlabeled complementary oligonucleotide at 95° C. for 3 min, followed by slow cooling to room temperature. For cleavage assays, gRNA molecules are annealed by heating to 95° C. for 30 s, followed by slow cooling to room temperature. Cas9 (500 nM final concentration) is pre-incubated with the annealed gRNA molecules (500 nM) in cleavage assay buffer (20 mM HEPES pH 7.5, 100 mM KCl, 5 mM MgCl2, 1 mM DTT, 5% glycerol) in a total volume of 9 μl. Reactions are initiated by the addition of 1 μl target DNA (10 nM) and incubated for 1 h at 37° C. Reactions are quenched by the addition of 20 μl of loading dye (5 mM EDTA, 0.025% SDS, 5% glycerol in formamide) and heated to 95° C. for 5 min. Cleavage products are resolved on 12% denaturing polyacrylamide gels containing 7 M urea and visualized by phosphorimaging. The resulting cleavage products indicate that whether the complementary strand, the non-complementary strand, or both, are cleaved.

[0974] One or both of these assays can be used to evaluate the suitability of any of the gRNA molecule or Cas9 molecule provided.

[0975] (b) Binding Assay: Testing the Binding of Cas9 Molecule to Target DNA

[0976] Exemplary methods for evaluating the binding of Cas9 molecule to target DNA are described, e.g., in Jinek et al., SCIENCE 2012; 337(6096):816-821.

[0977] For example, in an electrophoretic mobility shift assay, target DNA duplexes are formed by mixing of each strand (10 nmol) in deionized water, heating to 95° C. for 3 min and slow cooling to room temperature. All DNAs are purified on 8% native gels containing 1× TBE. DNA bands are visualized by UV shadowing, excised, and eluted by soaking gel pieces in DEPC-treated H₂O. Eluted DNA is ethanol precipitated and dissolved in DEPC-treated H₂O. DNA samples are 5′ end labeled with [γ-32P]-ATP using T4 polynucleotide kinase for 30 min at 37° C. Polynucleotide kinase is heat denatured at 65° C. for 20 min, and unincorporated radiolabel is removed using a column. Binding assays are performed in buffer containing 20 mM HEPES pH 7.5, 100 mM KCl, 5 mM MgCl₂, 1 mM DTT and 10% glycerol in a total volume of 10 μl. Cas9 protein molecule is programmed with equimolar amounts of pre-annealed gRNA molecule and titrated from 100 pM to 1 μM. Radiolabeled DNA is added to a final concentration of 20 μM. Samples are incubated for 1 h at 37° C. and resolved at 4° C. on an 8% native polyacrylamide gel containing 1×TBE and 5 mM MgCl₂. Gels are dried and DNA visualized by phosphorimaging.

[0978] (c) Techniques for Measuring Thermostability of Cas9/gRNA Complexes

[0979] The thermostability of Cas9-gRNA ribonucleoprotein (RNP) complexes can be detected by differential scanning fluorimetry (DSF) and other techniques. The thermostability of a protein can increase under favorable conditions such as the addition of a binding RNA molecule, e.g., a gRNA. Thus, information regarding the thermostability of a Cas9/gRNA complex is useful for determining whether the complex is stable.

[0980] (d) Differential Scanning Flourimetry (DSF)

[0981] The thermostability of Cas9-gRNA ribonucleoprotein (RNP) complexes can be measured via DSF. RNP complexes, as described below, include a sequence of ribonucleotides, such as an RNA or a gRNA, and a protein, such as a Cas9 protein or variant thereof. This technique measures the thermostability of a protein, which can increase under favorable conditions such as the addition of a binding RNA molecule, e.g., a gRNA.

[0982] The assay can be applied in a number of ways. Exemplary protocols include, but are not limited to, a protocol to determine the desired solution conditions for RNP formation (assay 1, see below), a protocol to test the desired stoichiometric ratio of gRNA:Cas9 protein (assay 2, see below), a protocol to screen for effective gRNA molecules for Cas9 molecules, e.g., wild-type or mutant Cas9 molecules (assay 3, see below), and a protocol to examine RNP formation in the presence of target DNA (assay 4). In some embodiments, the assay is performed using two different protocols, one to test the best stoichiometric ratio of gRNA:Cas9 protein and another to determine the best solution conditions for RNP formation.

[0983] To determine the best solution to form RNP complexes, a 2 uM solution of Cas9 in water+10× SYPRO Orange® (Life Technologies cat#S-6650) and dispensed into a 384 well plate. An equimolar amount of gRNA diluted in solutions with varied pH and salt is then added. After incubating at room temperature for 10′ and brief centrifugation to remove any bubbles, a Bio-Rad CFX384™ Real-Time System C1000 Touch™ Thermal Cycler with the Bio-Rad CFX Manager software is used to run a gradient from 20° C. to 90° C. with a 1° increase in temperature every 10 seconds.

[0984] The second assay consists of mixing various concentrations of gRNA with 2 uM Cas9 in optimal buffer from assay 1 above and incubating at RT for 10′ in a 384 well plate. An equal volume of optimal buffer+10× SYPRO Orange® (Life Technologies cat#S-6650) is added and the plate sealed with Microseal® B adhesive (MSB-1001). Following brief centrifugation to remove any bubbles, a Bio-Rad CFX384™ Real-Time System C1000 Touch™ Thermal Cycler with the Bio-Rad CFX Manager software is used to run a gradient from 20° C. to 90° C. with a 1° increase in temperature every 10 seconds.

[0985] In the third assay, a Cas9 molecule (e.g., a Cas9 protein, e.g., a Cas9 variant protein) of interest is purified. A library of variant gRNA molecules is synthesized and resuspended to a concentration of 20 μM. The Cas9 molecule is incubated with the gRNA molecule at a final concentration of 1 μM each in a predetermined buffer in the presence of 5× SYPRO Orange® (Life Technologies cat#S-6650). After incubating at room temperature for 10 minutes and centrifugation at 2000 rpm for 2 minutes to remove any bubbles, a Bio-Rad CFX384™ Real-Time System C1000 Touch™ Thermal Cycler with the Bio-Rad CFX Manager software is used to run a gradient from 20° C. to 90° C. with an increase of 1° C. in temperature every 10 seconds.

[0986] In the fourth assay, a DSF experiment is performed with the following samples: Cas9 protein alone, Cas9 protein with gRNA, Cas9 protein with gRNA and target DNA, and Cas9 protein with target DNA. The order of mixing components is: reaction solution, Cas9 protein, gRNA, DNA, and SYPRO Orange. The reaction solution contains 10 mM HEPES pH 7.5, 100 mM NaCl, in the absence or presence of MgCl2. Following centrifugation at 2000 rpm for 2 minutes to remove any bubbles, a Bio-Rad CFX384™ Real-Time System C1000 Touch™ Thermal Cycler with the Bio-Rad CFX Manager software is used to run a gradient from 20° C. to 90° C. with a 1° increase in temperature every 10 seconds.

[0987] 5. Target Cells

[0988] Cas9 molecules and gRNA molecules, e.g., a Cas9 molecule/gRNA molecule complex, can be used to manipulate a cell, e.g., to edit a target nucleic acid, in a wide variety of cells.

[0989] In an embodiment, a cell is manipulated by editing (e.g., inducing a mutation in) one or more target genes, e.g., as described herein. In some embodiments, the expression of one or more target genes (e.g., FAS, BID, CTLA4, PDCD1, CBLB, PTPN6, TRAC or TRBC gene) is modulated. In another embodiment, a cell is manipulated ex vivo by editing (e.g., inducing a mutation in) one or more target genes and/or modulating the expression of one or more target genes, e.g., FAS, BID, CTLA4, PDCD1, CBLB, PTPN6, TRAC or TRBC gene, and administered to a subject. Sources of target cells for ex vivo manipulation may include, e.g., the subject's blood, the subject's cord blood, or the subject's bone marrow. Sources of target cells for ex vivo manipulation may also include, e.g., heterologous donor blood, cord blood, or bone marrow.

[0990] The Cas9 and gRNA molecules described herein can be delivered to a target cell. In an embodiment, the target cell is a T cell, e.g., a CD8+ T cell (e.g., a CD8+ naïve T cell, central memory T cell, or effector memory T cell), a CD4+ T cell, a natural killer T cell (NKT cells), a regulatory T cell (Treg), a stem cell memory T cell, a lymphoid progenitor cell a hematopoietic stem cell, a natural killer cell (NK cell) or a dendritic cell. In an embodiment, the target cell is an induced pluripotent stem (iPS) cell or a cell derived from an iPS cell, e.g., an iPS cell generated from a subject, manipulated to alter (e.g., induce a mutation in) or manipulate the expression of one or more target genes, e.g., FAS, BID, CTLA4, PDCD1, CBLB, PTPN6, TRAC or TRBC gene, and differentiated into, e.g., a T cell, e.g., a CD8+ T cell (e.g., a CD8+naïve T cell, central memory T cell, or effector memory T cell), a CD4+ T cell, a stem cell memory T cell, a lymphoid progenitor cell or a hematopoietic stem cell.

[0991] In an embodiment, the target cell has been altered to contain specific T cell receptor (TCR) genes (e.g., a TRAC and TRBC gene). In another embodiment, the TCR has binding specificity for a tumor associated antigen, e.g., carcinoembryonic antigen (CEA), GP100, melanoma antigen recognized by T cells 1 (MART1), melanoma antigen A3 (MAGEA3), NYESO1 or p53.

[0992] In an embodiment, the target cell has been altered to contain a specific chimeric antigen receptor (CAR). In an embodiment, the CAR has binding specificity for a tumor associated antigen, e.g., CD19, CD20, carbonic anhydrase IX (CAIX), CD171, CEA, ERBB2, GD2, alpha-folate receptor, Lewis Y antigen, prostate specific membrane antigen (PSMA) or tumor associated glycoprotein 72 (TAG72).

[0993] In another embodiment, the target cell has been altered to bind one or more of the following tumor antigens, e.g., by a TCR or a CAR. Tumor antigens may include, but are not limited to, AD034, AKT1, BRAP, CAGE, CDX2, CLP, CT-7, CT8/HOM-TES-85, cTAGE-1, Fibulin-1, HAGE, HCA587/MAGE-C2, hCAP-G, HCE661, HER2/neu, HLA-Cw, HOM-HD-21/Galectin9, HOM-MEEL-40/SSX2, HOM-RCC-3.1.3/CAXII, HOXA7, HOXB6, Hu, HUB1, KM-HN-3, KM-KN-1, KOC1, KOC2, KOC3, KOC3, LAGE-1, MAGE-1, MAGE-4a, MPP11, MSLN, NNP-1, NY-BR-1, NY-BR-62, NY-BR-85, NY-CO-37, NY-CO-38, NY-ESO-1, NY-ESO-5, NY-LU-12, NY-REN-10, NY-REN-19/LKB/STK11, NY-REN-21, NY-REN-26/BCR, NY-REN-3/NY-CO-38, NY-REN-33/SNC6, NY-REN-43, NY-REN-65, NY-REN-9, NY-SAR-35, OGFr, PLU-1, Rab38, RBPJkappa, RHAMM, SCP1, SCP-1, SSX3, SSX4, SSX5, TOP2A, TOP2B, or Tyrosinase.

[0994] a) Methods of Ex Vivo Delivery of Components to Target Cells

[0995] The components, e.g., a Cas9 molecule and gRNA molecule can be introduced into target cells in a variety of forms using a variety of delivery methods and formulations, see, e.g., Tables 6 and 7. When a Cas9 or gRNA component is encoded as DNA for delivery, the DNA may typically but not necessarily include a control region, e.g., comprising a promoter, to effect expression. Useful promoters for Cas9 molecule sequences include, e.g., CMV, EF-1a, EFS, MSCV, PGK, or CAG promoters. Useful promoters for gRNAs include, e.g., H1, EF-1a, tRNA or U6 promoters. Promoters with similar or dissimilar strengths can be selected to tune the expression of components. Sequences encoding a Cas9 molecule may comprise a nuclear localization signal (NLS), e.g., an SV40 NLS. In an embodiment a promoter for a Cas9 molecule or a gRNA molecule may be, independently, inducible, tissue specific, or cell specific. In some embodiments, an agent capable of inducing a genetic disruption is introduced RNP complexes. RNP complexes include a sequence of ribonucleotides, such as an RNA or a gRNA molecule, and a protein, such as a Cas9 protein or variant thereof. In some embodiments, the Cas9 protein is delivered as a ribonucleoprotein (RNP) complex that comprises a Cas9 protein provided herein and a gRNA molecule provided herein, e.g., a gRNA targeted for PDCD1. In some embodiments, the RNP that includes one or more gRNA molecules targeted for PDCD1, such as any as described, and a Cas9 enzyme or variant thereof, is directly introduced into the cell via physical delivery (e.g., electroporation, particle gun, Calcium Phosphate transfection, cell compression or squeezing), liposomes or nanoparticles. In particular embodiments, the RNP includes one or more gRNA molecules targeted for PDCD1 and a Cas9 enzyme or variant thereof is introduced via electroporation.

[0996] Table 6 provides examples of the form in which the components can be delivered to a target cell.

TABLE 6

| Elements | | |
|---|---|---|
| Cas9 | gRNA | |
| Molecule(s) | molecule(s) | Comments |
| DNA | DNA | In this embodiment, a Cas9 molecule, typically an eaCas9 |
| | | molecule, and a gRNA are transcribed from DNA. In this |
| | | embodiment, they are encoded on separate molecules. |
| DNA | | In this embodiment, a Cas9 molecule, typically an eaCas9 |
| | | molecule, and a gRNA are transcribed from DNA, here from a |
| | | single molecule. |
| DNA | RNA | In this embodiment, a Cas9 molecule, typically an eaCas9 |
| | | molecule, is transcribed from DNA, and a gRNA is provided as in |
| | | vitro transcribed or synthesized RNA |
| mRNA | RNA | In this embodiment, a Cas9 molecule, typically an eaCas9 |
| | | molecule, is translated from in vitro transcribed mRNA, and a |
| | | gRNA is provided as in vitro transcribed or synthesized RNA. |
| mRNA | DNA | In this embodiment, a Cas9 molecule, typically an eaCas9 |
| | | molecule, is translated from in vitro transcribed mRNA, and a |
| | | gRNA is transcribed from DNA. |
| Protein | DNA | In this embodiment, a Cas9 molecule, typically an eaCas9 |
| | | molecule, is provided as a protein, and a gRNA is transcribed |
| | | from DNA. |
| Protein | RNA | In this embodiment, an eaCas9 molecule is provided as a protein, |
| | | and a gRNA is provided as transcribed or synthesized RNA. |

[0997] Table 7 summarizes various delivery methods for the components of a Cas system, e.g., the Cas9 molecule component and the gRNA molecule component, as described herein.

TABLE 7

| | | Delivery | | | |
|---|---|---|---|---|---|
| | | into Non- | | | Type of |
| | | Dividing | Duration of | Genome | Molecule |
| Delivery Vector/Mode | | Cells | Expression | Integration | Delivered |
| Physical (eg, electroporation, | | YES | Transient | NO | Nucleic Acids |
| particle gun, Calcium Phosphate | | | | | and Proteins |
| transfection, cell compression or | | | | | |
| squeezing) | | | | | |
| Viral | Retrovirus | NO | Stable | YES | RNA |
| | Lentivirus | YES | Stable | YES/NO with | RNA |
| | | | | modifications | |
| | Adenovirus | YES | Transient | NO | DNA |
| | Adeno- | YES | Stable | NO | DNA |
| | Associated Virus | | | | |
| | (AAV) | | | | |
| | Vaccinia Virus | YES | Very | NO | DNA |
| | | | Transient | | |
| | Herpes Simplex | YES | Stable | NO | DNA |
| | Virus | | | | |
| Non-Viral | Cationic | YES | Transient | Depends on | Nucleic Acids |
| | Liposomes | | | what is | and Proteins |
| | | | | delivered | |
| | Polymeric | YES | Transient | Depends on | Nucleic Acids |
| | Nanoparticles | | | what is | and Proteins |
| | | | | delivered | |
| Biological | Attenuated | YES | Transient | NO | Nucleic Acids |
| Non-Viral | Bacteria | | | | |
| Delivery | Engineered | YES | Transient | NO | Nucleic Acids |
| Vehicles | Bacteriophages | | | | |
| | Mammalian | YES | Transient | NO | Nucleic Acids |
| | Virus-like | | | | |
| | Particles | | | | |
| | Biological | YES | Transient | NO | Nucleic Acids |
| | liposomes: | | | | |
| | Erythrocyte | | | | |
| | Ghosts and | | | | |
| | Exosomes | | | | |

[0998] (1) DNA-Based Delivery of a Cas9 Molecule and/or a gRNA Molecule

[0999] DNA encoding Cas9 molecules (e.g., eaCas9 molecules) and/or gRNA molecules, can be delivered into cells by art-known methods or as described herein. For example, Cas9-encoding and/or gRNA-encoding DNA can be delivered, e.g., by vectors (e.g., viral or non-viral vectors), non-vector based methods (e.g., using naked DNA or DNA complexes), or a combination thereof.

[1000] In some embodiments, the Cas9- and/or gRNA-encoding DNA is delivered by a vector (e.g., viral vector/virus or plasmid).

[1001] A vector may comprise a sequence that encodes a Cas9 molecule and/or a gRNA molecule. A vector may also comprise a sequence encoding a signal peptide (e.g., for nuclear localization, nucleolar localization, mitochondrial localization), fused, e.g., to a Cas9 molecule sequence. For example, a vector may comprise a nuclear localization sequence (e.g., from SV40) fused to the sequence encoding the Cas9 molecule.

[1002] One or more regulatory/control elements, e.g., a promoter, an enhancer, an intron, a polyadenylation signal, a Kozak consensus sequence, internal ribosome entry sites (IRES), a 2A sequence, and splice acceptor or donor can be included in the vectors. In an embodiment, the promoter is recognized by RNA polymerase II (e.g., a CMV promoter). In another embodiment, the promoter is recognized by RNA polymerase III (e.g., a U6 promoter). In another embodiment, the promoter is a regulated promoter (e.g., inducible promoter). In another embodiment, the promoter is a constitutive promoter. In another embodiment, the promoter is a tissue specific promoter. In another embodiment, the promoter is a viral promoter. In another embodiment, the promoter is a non-viral promoter.

[1003] In an embodiment, the vector or delivery vehicle is a viral vector (e.g., for generation of recombinant viruses). In an embodiment, the virus is a DNA virus (e.g., dsDNA or ssDNA virus). In an embodiment, the virus is an RNA virus (e.g., an ssRNA virus). Exemplary viral vectors/viruses include, e.g., retroviruses, lentiviruses, adenovirus, adeno-associated virus (AAV), vaccinia viruses, poxviruses, and herpes simplex viruses.

[1004] In an embodiment, the virus infects dividing cells. In another embodiment, the virus infects non-dividing cells. In another embodiment, the virus infects both dividing and non-dividing cells. In another embodiment, the virus can integrate into the host genome. In another embodiment, the virus is engineered to have reduced immunity, e.g., in human. In another embodiment, the virus is replication-competent. In another embodiment, the virus is replication-defective, e.g., having one or more coding regions for the genes necessary for additional rounds of virion replication and/or packaging replaced with other genes or deleted. In another embodiment, the virus causes transient expression of the Cas9 molecule and/or the gRNA molecule. In another embodiment, the virus causes long-lasting, e.g., at least 1 week, 2 weeks, 1 month, 2 months, 3 months, 6 months, 9 months, 1 year, 2 years, or permanent expression, of the Cas9 molecule and/or the gRNA molecule. The packaging capacity of the viruses may vary, e.g., from at least about 4 kb to at least about 30 kb, e.g., at least about 5 kb, 10 kb, 15 kb, 20 kb, 25 kb, 30 kb, 35 kb, 40 kb, 45 kb, or 50 kb.

[1005] In an embodiment, the Cas9- and/or gRNA-encoding DNA is delivered by a recombinant retrovirus. In another embodiment, the retrovirus (e.g., Moloney murine leukemia virus) comprises a reverse transcriptase, e.g., that allows integration into the host genome. In an embodiment, the retrovirus is replication-competent. In another embodiment, the retrovirus is replication-defective, e.g., having one of more coding regions for the genes necessary for additional rounds of virion replication and packaging replaced with other genes, or deleted.

[1006] In an embodiment, the Cas9- and/or gRNA-encoding DNA is delivered by a recombinant lentivirus. For example, the lentivirus is replication-defective, e.g., does not comprise one or more genes required for viral replication.

[1007] In an embodiment, the Cas9- and/or gRNA-encoding DNA is delivered by a recombinant adenovirus. In another embodiment, the adenovirus is engineered to have reduced immunity in humans.

[1008] In an embodiment, the Cas9- and/or gRNA-encoding DNA is delivered by a recombinant AAV. In an embodiment, the AAV can incorporate its genome into that of a host cell, e.g., a target cell as described herein. In another embodiment, the AAV is a self-complementary adeno-associated virus (scAAV), e.g., a scAAV that packages both strands which anneal together to form double stranded DNA. AAV serotypes that may be used in the disclosed methods, include AAV1, AAV2, modified AAV2 (e.g., modifications at Y444F, Y500F, Y730F and/or S662V), AAV3, modified AAV3 (e.g., modifications at Y705F, Y731F and/or T492V), AAV4, AAV5, AAV6, modified AAV6 (e.g., modifications at S663V and/or T492V), AAV8, AAV 8.2, AAV9, AAV rh 10, and pseudotyped AAV, such as AAV2/8, AAV2/5 and AAV2/6 can also be used in the disclosed methods.

[1009] In an embodiment, the Cas9- and/or gRNA-encoding DNA is delivered by a hybrid virus, e.g., a hybrid of one or more of the viruses described herein.

[1010] A packaging cell is used to form a virus particle that is capable of infecting a target cell. Such a cell includes a 293 cell, which can package adenovirus, and a w2 cell or a PA317 cell, which can package retrovirus. A viral vector used in gene therapy is usually generated by a producer cell line that packages a nucleic acid vector into a viral particle. The vector typically contains the minimal viral sequences required for packaging and subsequent integration into a host or target cell (if applicable), with other viral sequences being replaced by an expression cassette encoding the protein to be expressed, eg. Cas9. For example, an AAV vector used in gene therapy typically only possesses inverted terminal repeat (ITR) sequences from the AAV genome which are required for packaging and gene expression in the host or target cell. The missing viral functions are supplied in trans by the packaging cell line. Henceforth, the viral DNA is packaged in a cell line, which contains a helper plasmid encoding the other AAV genes, namely rep and cap, but lacking ITR sequences. The cell line is also infected with adenovirus as a helper. The helper virus promotes replication of the AAV vector and expression of AAV genes from the helper plasmid. The helper plasmid is not packaged in significant amounts due to a lack of ITR sequences. Contamination with adenovirus can be reduced by, e.g., heat treatment to which adenovirus is more sensitive than AAV.

[1011] In an embodiment, the viral vector has the ability of cell type recognition. For example, the viral vector can be pseudotyped with a different/alternative viral envelope glycoprotein; engineered with a cell type-specific receptor (e.g., genetic modification of the viral envelope glycoproteins to incorporate targeting ligands such as a peptide ligand, a single chain antibody, a growth factor); and/or engineered to have a molecular bridge with dual specificities with one end recognizing a viral glycoprotein and the other end recognizing a moiety of the target cell surface (e.g., ligand-receptor, monoclonal antibody, avidin-biotin and chemical conjugation).

[1012] In an embodiment, the viral vector achieves cell type specific expression. For example, a tissue-specific promoter can be constructed to restrict expression of the transgene (Cas 9 and gRNA) in only a specific target cell. The specificity of the vector can also be mediated by microRNA-dependent control of transgene expression. In an embodiment, the viral vector has increased efficiency of fusion of the viral vector and a target cell membrane. For example, a fusion protein such as fusion-competent hemagglutinin (HA) can be incorporated to increase viral uptake into cells. In an embodiment, the viral vector has the ability of nuclear localization. For example, a virus that requires the breakdown of the nuclear membrane (during cell division) and therefore will not infect a non-diving cell can be altered to incorporate a nuclear localization peptide in the matrix protein of the virus thereby enabling the transduction of non-proliferating cells.

[1013] In an embodiment, the Cas9- and/or gRNA-encoding DNA is delivered by a non-vector based method (e.g., using naked DNA or DNA complexes). For example, the DNA can be delivered, e.g., by organically modified silica or silicate (Ormosil), electroporation, transient cell compression or squeezing (eg, as described in Lee, et al [2012] Nano Lett 12: 6322-27), gene gun, sonoporation, magnetofection, lipid-mediated transfection, dendrimers, inorganic nanoparticles, calcium phosphates, or a combination thereof.

[1014] In an embodiment, delivery via electroporation comprises mixing the cells with the Cas9- and/or gRNA-encoding DNA in a cartridge, chamber or cuvette and applying one or more electrical impulses of defined duration and amplitude. In an embodiment, delivery via electroporation is performed using a system in which cells are mixed with the Cas9- and/or gRNA-encoding DNA in a vessel connected to a device (eg, a pump) which feeds the mixture into a cartridge, chamber or cuvette wherein one or more electrical impulses of defined duration and amplitude are applied, after which the cells are delivered to a second vessel.

[1015] In an embodiment, the Cas9- and/or gRNA-encoding DNA is delivered by a combination of a vector and a non-vector based method. For example, a virosome comprises a liposome combined with an inactivated virus (e.g., HIV or influenza virus), which can result in more efficient gene transfer than either a viral or a liposomal method alone.

[1016] In an embodiment, the delivery vehicle is a non-viral vector. In an embodiment, the non-viral vector is an inorganic nanoparticle. Exemplary inorganic nanoparticles include, e.g., magnetic nanoparticles (e.g., Fe₃MnO₂) and silica. The outer surface of the nanoparticle can be conjugated with a positively charged polymer (e.g., polyethylenimine, polylysine, polyserine) which allows for attachment (e.g., conjugation or entrapment) of payload. In an embodiment, the non-viral vector is an organic nanoparticle. Exemplary organic nanoparticles include, e.g., SNALP liposomes that contain cationic lipids together with neutral helper lipids which are coated with polyethylene glycol (PEG), and protamine-nucleic acid complexes coated with lipid.

[1017] Exemplary lipids for gene transfer are shown below in Table 8.

TABLE 8
Lipids Used for Gene Transfer

| Lipid | Abbreviation | Feature |
|---|---|---|
| 1,2-Dioleoyl-sn-glycero-3-phosphatidylcholine | DOPC | Helper |
| 1,2-Dioleoyl-sn-glycero-3-phosphatidylethanolamine | DOPE | Helper |
| Cholesterol | | Helper |
| N-[1-(2,3-Dioleyloxy)prophyl]N,N,N-trimethylammonium chloride | DOTMA | Cationic |
| 1,2-Dioleoyloxy-3-trimethylammonium-propane | DOTAP | Cationic |
| Dioctadecylamidoglycylspermine | DOGS | Cationic |
| N-(3-Aminopropyl)-N,N-dimethyl-2,3-bis(dodecyloxy)-1- | GAP-DLRIE | Cationic |
| propanaminium bromide | | |
| Cetyltrimethylammonium bromide | CTAB | Cationic |
| 6-Lauroxyhexyl ornithinate | LHON | Cationic |
| 1-(2,3-Dioleoyloxypropyl)-2,4,6-trimethylpyridinium | 2Oc | Cationic |
| 2,3-Dioleyloxy-N-[2(sperminecarboxamido-ethyl]-N,N-dimethyl-1- | DOSPA | Cationic |
| propanaminium trifluoroacetate | | |
| 1,2-Dioleyl-3-trimethylammonium-propane | DOPA | Cationic |
| N-(2-Hydroxyethyl)-N,N-dimethyl-2,3-bis(tetradecyloxy)-1- | MDRIE | Cationic |
| propanaminium bromide | | |
| Dimyristooxypropyl dimethyl hydroxyethyl ammonium bromide | DMRI | Cationic |
| 3β-[N-(N′,N′-Dimethylaminoethane)-carbamoyl]cholesterol | DC-Chol | Cationic |
| Bis-guanidium-tren-cholesterol | BGTC | Cationic |
| 1,3-Diodeoxy-2-(6-carboxy-spermyl)-propylamide | DOSPER | Cationic |
| Dimethyloctadecylammonium bromide | DDAB | Cationic |
| Dioctadecylamidoglicylspermidin | DSL | Cationic |
| rac-[(2,3-Dioctadecyloxypropyl)(2-hydroxyethyl)]-dimethylammonium | CLIP-1 | Cationic |
| chloride | | |
| rac-[2(2,3-Dihexadecyloxypropyl- | CLIP-6 | Cationic |
| oxymethyloxy)ethyl]trimethylammonium bromide | | |
| Ethyldimyristoylphosphatidylcholine | EDMPC | Cationic |
| 1,2-Distearyloxy-N,N-dimethyl-3-aminopropane | DSDMA | Cationic |
| 1,2-Dimyristoyl-trimethylammonium propane | DMTAP | Cationic |
| O,O′-Dimyristyl-N-lysyl aspartate | DMKE | Cationic |
| 1,2-Distearoyl-sn-glycero-3-ethylphosphocholine | DSEPC | Cationic |
| N-Palmitoyl D-erythro-sphingosyl carbamoyl-spermine | CCS | Cationic |
| N-t-Butyl-N0-tetradecyl-3-tetradecylaminopropionamidine | diC14-amidine | Cationic |
| Octadecenolyoxy[ethyl-2-heptadecenyl-3 hydroxyethyl] imidazolinium | DOTIM | Cationic |
| chloride | | |
| N1-Cholesteryloxycarbonyl-3,7-diazanonane-1,9-diamine | CDAN | Cationic |
| 2-(3-[Bis(3-amino-propyl)-amino]propylamino)-N- | RPR209120 | Cationic |
| ditetradecylcarbamoylme-ethyl-acetamide | | |
| 1,2-dilinoleyloxy-3-dimethylaminopropane | DLinDMA | Cationic |
| 2,2-dilinoleyl-4-dimethylaminoethyl-[1,3]-dioxolane | DLin-KC2-DMA | Cationic |
| dilinoleyl-methyl-4-dimethylaminobutyrate | DLin-MC3-DMA | Cationic |

[1018] Exemplary polymers for gene transfer are shown below in Table 9.

TABLE 9
Polymers Used for Gene Transfer

| Polymer | Abbreviation |
|---|---|
| Poly(ethylene)glycol | PEG |
| Polyethylenimine | PEI |
| Dithiobis(succinimidylpropionate) | DSP |
| Dimethyl-3,3′-dithiobispropionimidate | DTBP |
| Poly(ethylene imine) biscarbamate | PEIC |
| Poly(L-lysine) | PLL |
| Histidine modified PLL | |
| Poly(N-vinylpyrrolidone) | PVP |
| Poly(propylenimine) | PPI |
| Poly(amidoamine) | PAMAM |
| Poly(amido ethylenimine) | SS-PAEI |
| Triethylenetetramine | TETA |
| Poly(β-aminoester) | |
| Poly(4-hydroxy-L-proline ester) | PHP |
| Poly(allylamine) | |
| Poly(α-[4-aminobutyl]-L-glycolic acid) | PAGA |
| Poly(D,L-lactic-co-glycolic acid) | PLGA |
| Poly(N-ethyl-4-vinylpyridinium bromide) | |
| Poly(phosphazene)s | PPZ |
| Poly(phosphoester)s | PPE |
| Poly(phosphoramidate)s | PPA |
| Poly(N-2-hydroxypropylmethacrylamide) | pHPMA |
| Poly (2-(dimethylamino)ethyl methacrylate) | pDMAEMA |
| Poly(2-aminoethyl propylene phosphate) | PPE-EA |
| Chitosan | |
| Galactosylated chitosan | |
| N-Dodacylated chitosan | |
| Histone | |
| Collagen | |
| Dextran-spermine | D-SPM |

[1019] In an embodiment, the vehicle has targeting modifications to increase target cell update of nanoparticles and liposomes, e.g., cell specific antigens, monoclonal antibodies, single chain antibodies, aptamers, polymers, sugars, and cell penetrating peptides. In an embodiment, the vehicle uses fusogenic and endosome-destabilizing peptides/polymers. In an embodiment, the vehicle undergoes acid-triggered conformational changes (e.g., to accelerate endosomal escape of the cargo). In an embodiment, a stimulus-cleavable polymer is used, e.g., for release in a cellular compartment. For example, disulfide-based cationic polymers that are cleaved in the reducing cellular environment can be used.

[1020] In an embodiment, the delivery vehicle is a biological non-viral delivery vehicle. In an embodiment, the vehicle is an attenuated bacterium (e.g., naturally or artificially engineered to be invasive but attenuated to prevent pathogenesis and expressing the transgene (e.g., Listeria monocytogenes, certain Salmonella strains, Bifidobacterium longum, and modified Escherichia coli), bacteria having nutritional and tissue-specific tropism to target specific cells, bacteria having modified surface proteins to alter target cell specificity). In an embodiment, the vehicle is a genetically modified bacteriophage (e.g., engineered phages having large packaging capacity, less immunogenicity, containing mammalian plasmid maintenance sequences and having incorporated targeting ligands). In an embodiment, the vehicle is a mammalian virus-like particle. For example, modified viral particles can be generated (e.g., by purification of the “empty” particles followed by ex vivo assembly of the virus with the desired cargo). The vehicle can also be engineered to incorporate targeting ligands to alter target tissue specificity. In an embodiment, the vehicle is a biological liposome. For example, the biological liposome is a phospholipid-based particle derived from human cells (e.g., erythrocyte ghosts, which are red blood cells broken down into spherical structures derived from the subject (e.g., tissue targeting can be achieved by attachment of various tissue or cell-specific ligands), or secretory exosomes—subject-derived membrane-bound nanovescicles (30-100 nm) of endocytic origin (e.g., can be produced from various cell types and can therefore be taken up by cells without the need for targeting ligands).

[1021] In an embodiment, one or more nucleic acid molecules (e.g., DNA molecules) other than the components of a Cas system, e.g., the Cas9 molecule component and/or the gRNA molecule component described herein, are delivered. In an embodiment, the nucleic acid molecule is delivered at the same time as one or more of the components of the Cas system. In an embodiment, the nucleic acid molecule is delivered before or after (e.g., less than about 30 minutes, 1 hour, 2 hours, 3 hours, 6 hours, 9 hours, 12 hours, 1 day, 2 days, 3 days, 1 week, 2 weeks, or 4 weeks) one or more of the components of the Cas system are delivered. In an embodiment, the nucleic acid molecule is delivered by a different means from one or more of the components of the Cas system, e.g., the Cas9 molecule component and/or the gRNA molecule component. The nucleic acid molecule can be delivered by any of the delivery methods described herein. For example, the nucleic acid molecule can be delivered by a viral vector, e.g., a retrovirus or a lentivirus, and the Cas9 molecule component and/or the gRNA molecule component can be delivered by electroporation. In an embodiment, the nucleic acid molecule encodes a TRAC gene, a TRBC gene or a CAR gene.

[1022] (2) Delivery of RNA Encoding a Cas9 Molecule

[1023] RNA encoding Cas9 molecules (e.g., eaCas9 molecules, eiCas9 molecules or eiCas9 fusion proteins) and/or gRNA molecules, can be delivered into cells, e.g., target cells described herein, by art-known methods or as described herein. For example, Cas9-encoding and/or gRNA-encoding RNA can be delivered, e.g., by microinjection, electroporation, transient cell compression or squeezing (eg, as described in Lee, et al [2012] Nano Lett 12: 6322-27), lipid-mediated transfection, peptide-mediated delivery, or a combination thereof.

[1024] In an embodiment, delivery via electroporation comprises mixing the cells with the RNA encoding Cas9 molecules (e.g., eaCas9 molecules, eiCas9 molecules or eiCas9 fusion protiens) and/or gRNA molecules in a cartridge, chamber or cuvette and applying one or more electrical impulses of defined duration and amplitude. In an embodiment, delivery via electroporation is performed using a system in which cells are mixed with the RNA encoding Cas9 molecules (e.g., eaCas9 molecules, eiCas9 molecules or eiCas9 fusion protiens) and/or gRNA molecules in a vessel connected to a device (eg, a pump) which feeds the mixture into a cartridge, chamber or cuvette wherein one or more electrical impulses of defined duration and amplitude are applied, after which the cells are delivered to a second vessel.

[1025] (3) Delivery of Cas9 Protein and Ribonucleoprotein (RNP)

[1026] Cas9 molecules (e.g., eaCas9 molecules, eiCas9 molecules or eiCas9 fusion proteins) can be delivered into cells by art-known methods or as described herein. For example, Cas9 protein molecules can be delivered, e.g., by microinjection, electroporation, transient cell compression or squeezing (eg, as described in Lee, et al [2012] Nano Lett 12: 6322-27), lipid-mediated transfection, peptide-mediated delivery, or a combination thereof. Delivery can be accompanied by DNA encoding a gRNA or by a gRNA. In some embodiments, the Cas9 protein is delivered as a ribonucleoprotein (RNP) complex that comprises a Cas9 protein provided herein and a gRNA molecule provided herein, e.g., a gRNA targeted for PDCD1. In some embodiments, a RNP complex includes a sequence of ribonucleotides, such as an RNA or a gRNA molecule, and a protein, such as a Cas9 protein or variant thereof. In some embodiments, the RNP that includes one or more gRNA molecules targeted for PDCD1 such as any as described and a Cas9 enzyme or variant thereof, is directly introduced into the cell via physical delivery (e.g., electroporation, particle gun, Calcium Phosphate transfection, cell compression or squeezing), liposomes or nanoparticles. In particular embodiments, the RNP includes one or more gRNA molecules targeted for PDCD1, such as any as described, and a Cas9 enzyme or variant thereof is introduced via electroporation.

[1027] In an embodiment, delivery via electroporation comprises mixing the cells with the Cas9 molecules (e.g., eaCas9 molecules, eiCas9 molecules or eiCas9 fusion proteins) with or without gRNA molecules in a cartridge, chamber or cuvette and applying one or more electrical impulses of defined duration and amplitude. In an embodiment, delivery via electroporation is performed using a system in which cells are mixed with the Cas9 molecules (e.g., eaCas9 molecules, eiCas9 molecules or eiCas9 fusion protiens) with or without gRNA molecules in a vessel connected to a device (e.g., a pump) which feeds the mixture into a cartridge, chamber or cuvette wherein one or more electrical impulses of defined duration and amplitude are applied, after which the cells are delivered to a second vessel.

[1028] 6. Modified Nucleosides, Nucleotides, and Nucleic Acids

[1029] Modified nucleosides and modified nucleotides can be present in nucleic acids, e.g., particularly gRNA, but also other forms of RNA, e.g., mRNA, RNAi, or siRNA. As described herein, “nucleoside” is defined as a compound containing a five-carbon sugar molecule (a pentose or ribose) or derivative thereof, and an organic base, purine or pyrimidine, or a derivative thereof. As described herein, “nucleotide” is defined as a nucleoside further comprising a phosphate group.

[1030] Modified nucleosides and nucleotides can include one or more of:
[1031] (i) alteration, e.g., replacement, of one or both of the non-linking phosphate oxygens and/or of one or more of the linking phosphate oxygens in the phosphodiester backbone linkage;
[1032] (ii) alteration, e.g., replacement, of a constituent of the ribose sugar, e.g., of the 2′ hydroxyl on the ribose sugar;
[1033] (iii) wholesale replacement of the phosphate moiety with “dephospho” linkers;
[1034] (iv) modification or replacement of a naturally occurring nucleobase;
[1035] (v) replacement or modification of the ribose-phosphate backbone;
[1036] (vi) modification of the 3′ end or 5′ end of the oligonucleotide, e.g., removal, modification or replacement of a terminal phosphate group or conjugation of a moiety; and
[1037] (vii) modification of the sugar.

[1038] The modifications listed above can be combined to provide modified nucleosides and nucleotides that can have two, three, four, or more modifications. For example, a modified nucleoside or nucleotide can have a modified sugar and a modified nucleobase. In an embodiment, every base of a gRNA is modified, e.g., all bases have a modified phosphate group, e.g., all are phosphorothioate groups. In an embodiment, all, or substantially all, of the phosphate groups of a unimolecular or modular gRNA molecule are replaced with phosphorothioate groups.

[1039] In an embodiment, modified nucleotides, e.g., nucleotides having modifications as described herein, can be incorporated into a nucleic acid, e.g., a “modified nucleic acid.” In some embodiments, the modified nucleic acids comprise one, two, three or more modified nucleotides. In some embodiments, at least 5% (e.g., at least about 5%, at least about 10%, at least about 15%, at least about 20%, at least about 25%, at least about 30%, at least about 35%, at least about 40%, at least about 45%, at least about 50%, at least about 55%, at least about 60%, at least about 65%, at least about 70%, at least about 75%, at least about 80%, at least about 85%, at least about 90%, at least about 95%, or about 100%) of the positions in a modified nucleic acid are a modified nucleotides.

[1040] Unmodified nucleic acids can be prone to degradation by, e.g., cellular nucleases. For example, nucleases can hydrolyze nucleic acid phosphodiester bonds. Accordingly, in one aspect the modified nucleic acids described herein can contain one or more modified nucleosides or nucleotides, e.g., to introduce stability toward nucleases.

[1041] a) Phosphate Backbone Modifications

[1042] (1) The Phosphate Group

[1043] In some embodiments, the phosphate group of a modified nucleotide can be modified by replacing one or more of the oxygens with a different substituent. Further, the modified nucleotide, e.g., modified nucleotide present in a modified nucleic acid, can include the wholesale replacement of an unmodified phosphate moiety with a modified phosphate as described herein. In some embodiments, the modification of the phosphate backbone can include alterations that result in either an uncharged linker or a charged linker with unsymmetrical charge distribution.

[1044] Examples of modified phosphate groups include, phosphorothioate, phosphoroselenates, borano phosphates, borano phosphate esters, hydrogen phosphonates, phosphoroamidates, alkyl or aryl phosphonates and phosphotriesters. In some embodiments, one of the non-bridging phosphate oxygen atoms in the phosphate backbone moiety can be replaced by any of the following groups: sulfur (S), selenium (Se), BR3 (wherein R can be, e.g., hydrogen, alkyl, or aryl), C (e.g., an alkyl group, an aryl group, and the like), H, NR2 (wherein R can be, e.g., hydrogen, alkyl, or aryl), or OR (wherein R can be, e.g., alkyl or aryl). The phosphorous atom in an unmodified phosphate group is achiral. However, replacement of one of the non-bridging oxygens with one of the above atoms or groups of atoms can render the phosphorous atom chiral; that is to say that a phosphorous atom in a phosphate group modified in this way is a stereogenic center. The stereogenic phosphorous atom can possess either the “R” configuration (herein Rp) or the “S” configuration (herein Sp).

[1045] Phosphorodithioates have both non-bridging oxygens replaced by sulfur. The phosphorus center in the phosphorodithioates is achiral which precludes the formation of oligoribonucleotide diastereomers. In some embodiments, modifications to one or both non-bridging oxygens can also include the replacement of the non-bridging oxygens with a group independently selected from S, Se, B, C, H, N, and OR (R can be, e.g., alkyl or aryl).

[1046] The phosphate linker can also be modified by replacement of a bridging oxygen, (i.e., the oxygen that links the phosphate to the nucleoside), with nitrogen (bridged phosphoroamidates), sulfur (bridged phosphorothioates) and carbon (bridged methylenephosphonates). The replacement can occur at either linking oxygen or at both of the linking oxygens.

[1047] (2) Replacement of the Phosphate Group

[1048] The phosphate group can be replaced by non-phosphorus containing connectors. In some embodiments, the charge phosphate group can be replaced by a neutral moiety.

[1049] Examples of moieties which can replace the phosphate group can include, without limitation, e.g., methyl phosphonate, hydroxylamino, siloxane, carbonate, carboxymethyl, carbamate, amide, thioether, ethylene oxide linker, sulfonate, sulfonamide, thioformacetal, formacetal, oxime, methyleneimino, methylenemethylimino, methylenehydrazo, methylenedimethylhydrazo and methyleneoxymethylimino.

[1050] (3) Replacement of the Ribophosphate Backbone

[1051] Scaffolds that can mimic nucleic acids can also be constructed wherein the phosphate linker and ribose sugar are replaced by nuclease resistant nucleoside or nucleotide surrogates. In some embodiments, the nucleobases can be tethered by a surrogate backbone. Examples can include, without limitation, the morpholino, cyclobutyl, pyrrolidine and peptide nucleic acid (PNA) nucleoside surrogates.

[1052] b) Sugar Modifications

[1053] The modified nucleosides and modified nucleotides can include one or more modifications to the sugar group. For example, the 2′ hydroxyl group (OH) can be modified or replaced with a number of different “oxy” or “deoxy” substituents. In some embodiments, modifications to the 2′ hydroxyl group can enhance the stability of the nucleic acid since the hydroxyl can no longer be deprotonated to form a 2′-alkoxide ion. The 2′-alkoxide can catalyze degradation by intramolecular nucleophilic attack on the linker phosphorus atom.

[1054] Examples of “oxy”-2′ hydroxyl group modifications can include alkoxy or aryloxy (OR, wherein “R” can be, e.g., alkyl, cycloalkyl, aryl, aralkyl, heteroaryl or a sugar); polyethyleneglycols (PEG), O(CH2CH2O)nCH2CH2OR wherein R can be, e.g., H or optionally substituted alkyl, and n can be an integer from 0 to 20 (e.g., from 0 to 4, from 0 to 8, from 0 to 10, from 0 to 16, from 1 to 4, from 1 to 8, from 1 to 10, from 1 to 16, from 1 to 20, from 2 to 4, from 2 to 8, from 2 to 10, from 2 to 16, from 2 to 20, from 4 to 8, from 4 to 10, from 4 to 16, and from 4 to 20). In some embodiments, the “oxy”-2′ hydroxyl group modification can include “locked” nucleic acids (LNA) in which the 2′ hydroxyl can be connected, e.g., by a C1-6 alkylene or C1-6 heteroalkylene bridge, to the 4′ carbon of the same ribose sugar, where exemplary bridges can include methylene, propylene, ether, or amino bridges; O-amino (wherein amino can be, e.g., NH2; alkylamino, dialkylamino, heterocyclyl, arylamino, diarylamino, heteroarylamino, or diheteroarylamino, ethylenediamine, or polyamino) and aminoalkoxy, O(CH2)n-amino, (wherein amino can be, e.g., NH2; alkylamino, dialkylamino, heterocyclyl, arylamino, diarylamino, heteroarylamino, or diheteroarylamino, ethylenediamine, or polyamino). In some embodiments, the “oxy”-2′ hydroxyl group modification can include the methoxyethyl group (MOE), (OCH2CH2OCH3, e.g., a PEG derivative).

[1055] “Deoxy” modifications can include hydrogen (i.e. deoxyribose sugars, e.g., at the overhang portions of partially ds RNA); halo (e.g., bromo, chloro, fluoro, or iodo); amino (wherein amino can be, e.g., NH2; alkylamino, dialkylamino, heterocyclyl, arylamino, diarylamino, heteroarylamino, diheteroarylamino, or amino acid); NH(CH2CH2NH)nCH2CH2-amino (wherein amino can be, e.g., as described herein), —NHC(O)R (wherein R can be, e.g., alkyl, cycloalkyl, aryl, aralkyl, heteroaryl or sugar), cyano; mercapto; alkyl-thio-alkyl; thioalkoxy; and alkyl, cycloalkyl, aryl, alkenyl and alkynyl, which may be optionally substituted with e.g., an amino as described herein.

[1056] The sugar group can also contain one or more carbons that possess the opposite stereochemical configuration than that of the corresponding carbon in ribose. Thus, a modified nucleic acid can include nucleotides containing e.g., arabinose, as the sugar. The nucleotide “monomer” can have an alpha linkage at the 1′ position on the sugar, e.g., alpha-nucleosides. The modified nucleic acids can also include “abasic” sugars, which lack a nucleobase at C-1′. These abasic sugars can also be further modified at one or more of the constituent sugar atoms. The modified nucleic acids can also include one or more sugars that are in the L form, e.g. L-nucleosides.

[1057] Generally, RNA includes the sugar group ribose, which is a 5-membered ring having an oxygen. Exemplary modified nucleosides and modified nucleotides can include, without limitation, replacement of the oxygen in ribose (e.g., with sulfur (S), selenium (Se), or alkylene, such as, e.g., methylene or ethylene); addition of a double bond (e.g., to replace ribose with cyclopentenyl or cyclohexenyl); ring contraction of ribose (e.g., to form a 4-membered ring of cyclobutane or oxetane); ring expansion of ribose (e.g., to form a 6- or 7-membered ring having an additional carbon or heteroatom, such as for example, anhydrohexitol, altritol, mannitol, cyclohexanyl, cyclohexenyl, and morpholino that also has a phosphoramidate backbone). In some embodiments, the modified nucleotides can include multicyclic forms (e.g., tricyclo; and “unlocked” forms, such as glycol nucleic acid (GNA) (e.g., R-GNA or S-GNA, where ribose is replaced by glycol units attached to phosphodiester bonds), threose nucleic acid (TNA, where ribose is replaced with α-L-threofuranosyl-(3′→2′)).

[1058] c) Modifications on the Nucleobase

[1059] The modified nucleosides and modified nucleotides described herein, which can be incorporated into a modified nucleic acid, can include a modified nucleobase. Examples of nucleobases include, but are not limited to, adenine (A), guanine (G), cytosine (C), and uracil (U). These nucleobases can be modified or wholly replaced to provide modified nucleosides and modified nucleotides that can be incorporated into modified nucleic acids. The nucleobase of the nucleotide can be independently selected from a purine, a pyrimidine, a purine or pyrimidine analog. In some embodiments, the nucleobase can include, for example, naturally-occurring and synthetic derivatives of a base.

[1060] (1) Uracil

[1061] In some embodiments, the modified nucleobase is a modified uracil. Exemplary nucleobases and nucleosides having a modified uracil include without limitation pseudouridine (ψ), pyridin-4-one ribonucleoside, 5-aza-uridine, 6-aza-uridine, 2-thio-5-aza-uridine, 2-thio-uridine (s2U), 4-thio-uridine (s4U), 4-thio-pseudouridine, 2-thio-pseudouridine, 5-hydroxy-uridine (ho5U), 5-aminoallyl-uridine, 5-halo-uridine (e.g., 5-iodo-uridine or 5-bromo-uridine), 3-methyl-uridine (m3U), 5-methoxy-uridine (mo5U), uridine 5-oxyacetic acid (cmo5U), uridine 5-oxyacetic acid methyl ester (mcmo5U), 5-carboxymethyl-uridine (cm5U), 1-carboxymethyl-pseudouridine, 5-carboxyhydroxymethyl-uridine (chm5U), 5-carboxyhydroxymethyl-uridine methyl ester (mchm5U), 5-methoxycarbonylmethyl-uridine (mcm5U), 5-methoxycarbonylmethyl-2-thio-uridine (mcm5s2U), 5-aminomethyl-2-thio-uridine (nm5s2U), 5-methylaminomethyl-uridine (mnm5U), 5-methylaminomethyl-2-thio-uridine (mnm5s2U), 5-methylaminomethyl-2-seleno-uridine (mnm5se2U), 5-carbamoylmethyl-uridine (ncm5U), 5-carboxymethylaminomethyl-uridine (cmnm5U), 5-carboxymethylaminomethyl-2-thio-uridine (cmnm 5s2U), 5-propynyl-uridine, 1-propynyl-pseudouridine, 5-taurinomethyl-uridine (τcm5U), 1-taurinomethyl-pseudouridine, 5-taurinomethyl-2-thio-uridine (τm5s2U), 1-taurinomethyl-4-thio-pseudouridine, 5-methyl-uridine (m5U, i.e., having the nucleobase deoxythymine), 1-methyl-pseudouridine (m1ψ), 5-methyl-2-thio-uridine (m5s2U), 1-methyl-4-thio-pseudouridine (m1s4ψ), 4-thio-1-methyl-pseudouridine, 3-methyl-pseudouridine (m3ψ), 2-thio-1-methyl-pseudouridine, 1-methyl-1-deaza-pseudouridine, 2-thio-1-methyl-1-deaza-pseudouridine, dihydrouridine (D), dihydropseudouridine, 5,6-dihydrouridine, 5-methyl-dihydrouridine (m5D), 2-thio-dihydrouridine, 2-thio-dihydropseudouridine, 2-methoxy-uridine, 2-methoxy-4-thio-uridine, 4-methoxy-pseudouridine, 4-methoxy-2-thio-pseudouridine, N1-methyl-pseudouridine, 3-(3-amino-3-carboxypropyl)uridine (acp3U), 1-methyl-3-(3-amino-3-carboxypropyl)pseudouridine (acp3ψ), 5-(isopentenylaminomethyl)uridine (inm5U), 5-(isopentenylaminomethyl)-2-thio-uridine (inm5s2U), α-thio-uridine, 2′-O-methyl-uridine (Um), 5,2′-O-dimethyl-uridine (m5Um), 2′-O-methyl-pseudouridine (ψm), 2-thio-2′-O-methyl-uridine (s2Um), 5-methoxycarbonylmethyl-2′-O-methyl-uridine (mcm 5Um), 5-carbamoylmethyl-2′-O-methyl-uridine (ncm 5Um), 5-carboxymethylaminomethyl-2′-O-methyl-uridine (cmnm 5Um), 3,2′-O-dimethyl-uridine (m3Um), 5-(isopentenylaminomethyl)-2′-O-methyl-uridine (inm 5Um), 1-thio-uridine, deoxythymidine, 2′-F-ara-uridine, 2′-F-uridine, 2′-OH-ara-uridine, 5-(2-carbomethoxyvinyl) uridine, 5-[3-(1-E-propenylamino)uridine, pyrazolo[3,4-d]pyrimidines, xanthine, and hypoxanthine.

[1062] (2) Cytosine

[1063] In some embodiments, the modified nucleobase is a modified cytosine. Exemplary nucleobases and nucleosides having a modified cytosine include without limitation 5-aza-cytidine, 6-aza-cytidine, pseudoisocytidine, 3-methyl-cytidine (m3C), N4-acetyl-cytidine (act), 5-formyl-cytidine (f5C), N4-methyl-cytidine (m4C), 5-methyl-cytidine (m5C), 5-halo-cytidine (e.g., 5-iodo-cytidine), 5-hydroxymethyl-cytidine (hm5C), 1-methyl-pseudoisocytidine, pyrrolo-cytidine, pyrrolo-pseudoisocytidine, 2-thio-cytidine (s2C), 2-thio-5-methyl-cytidine, 4-thio-pseudoisocytidine, 4-thio-1-methyl-pseudoisocytidine, 4-thio-1-methyl-1-deaza-pseudoisocytidine, 1-methyl-1-deaza-pseudoisocytidine, zebularine, 5-aza-zebularine, 5-methyl-zebularine, 5-aza-2-thio-zebularine, 2-thio-zebularine, 2-methoxy-cytidine, 2-methoxy-5-methyl-cytidine, 4-methoxy-pseudoisocytidine, 4-methoxy-1-methyl-pseudoisocytidine, lysidine (k2C), α-thio-cytidine, 2′-O-methyl-cytidine (Cm), 5,2′-O-dimethyl-cytidine (m5Cm), N4-acetyl-2′-O-methyl-cytidine (ac4Cm), N4,2′-O-dimethyl-cytidine (m4Cm), 5-formyl-2′-O-methyl-cytidine (f 5Cm), N4,N4,2′-O-trimethyl-cytidine (m42Cm), 1-thio-cytidine, 2′-F-ara-cytidine, 2′-F-cytidine, and 2′-OH-ara-cytidine.

[1064] (3) Adenine

[1065] In some embodiments, the modified nucleobase is a modified adenine. Exemplary nucleobases and nucleosides having a modified adenine include without limitation 2-amino-purine, 2,6-diaminopurine, 2-amino-6-halo-purine (e.g., 2-amino-6-chloro-purine), 6-halo-purine (e.g., 6-chloro-purine), 2-amino-6-methyl-purine, 8-azido-adenosine, 7-deaza-adenosine, 7-deaza-8-aza-adenosine, 7-deaza-2-amino-purine, 7-deaza-8-aza-2-amino-purine, 7-deaza-2,6-diaminopurine, 7-deaza-8-aza-2,6-diaminopurine, 1-methyl-adenosine (m1A), 2-methyl-adenosine (m2A), N6-methyl-adenosine (m6A), 2-methylthio-N6-methyl-adenosine (ms2m6A), N6-isopentenyl-adenosine (i6A), 2-methylthio-N6-isopentenyl-adenosine (ms2i6A), N6-(cis-hydroxyisopentenyl)adenosine (io6A), 2-methylthio-N6-(cis-hydroxyisopentenyl)adenosine (ms2io6A), N6-glycinylcarbamoyl-adenosine (g6A), N6-threonylcarbamoyl-adenosine (t6A), N6-methyl-N6-threonylcarbamoyl-adenosine (m6t6A), 2-methylthio-N6-threonylcarbamoyl-adenosine (ms2g6A), N6,N6-dimethyl-adenosine (m62A), N6-hydroxynorvalylcarbamoyl-adenosine (hn6A), 2-methylthio-N6-hydroxynorvalylcarbamoyl-adenosine (ms2hn6A), N6-acetyl-adenosine (ac6A), 7-methyl-adenosine, 2-methylthio-adenosine, 2-methoxy-adenosine, α-thio-adenosine, 2′-O-methyl-adenosine (Am), N6,2′-O-dimethyl-adenosine (m6Am), N6-Methyl-2′-deoxyadenosine, N6,N6,2′-O-trimethyl-adenosine (m62Am), 1,2′-O-dimethyl-adenosine (m1Am), 2′-O-ribosyladenosine (phosphate) (Ar(p)), 2-amino-N6-methyl-purine, 1-thio-adenosine, 8-azido-adenosine, 2′-F-ara-adeno sine, 2′-F-adenosine, 2′-OH-ara-adenosine, and N6-(19-amino-pentaoxanonadecyl)-adenosine.

[1066] (4) Guanine

[1067] In some embodiments, the modified nucleobase is a modified guanine. Exemplary nucleobases and nucleosides having a modified guanine include without limitation inosine (I), 1-methyl-inosine (m1I), wyo sine (imG), methylwyosine (mimG), 4-demethyl-wyosine (imG-14), isowyosine (imG2), wybutosine (yW), peroxywybutosine (o2yW), hydroxywybutosine (OHyW), undermodified hydroxywybutosine (OHyW*), 7-deaza-guanosine, queuosine (Q), epoxyqueuosine (oQ), galactosyl-queuosine (galQ), mannosyl-queuosine (manQ), 7-cyano-7-deaza-guanosine (preQ0), 7-aminomethyl-7-deaza-guanosine (preQ1), archaeosine (G+), 7-deaza-8-aza-guanosine, 6-thio-guanosine, 6-thio-7-deaza-guanosine, 6-thio-7-deaza-8-aza-guanosine, 7-methyl-guanosine (m7G), 6-thio-7-methyl-guanosine, 7-methyl-inosine, 6-methoxy-guanosine, 1-methyl-guanosine (m′G), N2-methyl-guanosine (m2G), N2,N2-dimethyl-guanosine (m2 2G), N2,7-dimethyl-guanosine (m2,7G), N2, N2,7-dimethyl-guanosine (m2,2,7G), 8-oxo-guanosine, 7-methyl-8-oxo-guanosine, 1-methyl-6-thio-guanosine, N2-methyl-6-thio-guanosine, N2,N2-dimethyl-6-thio-guanosine, α-thio-guanosine, 2′-O-methyl-guanosine (Gm), N2-methyl-2′-O-methyl-guanosine (m2Gm), N2,N2-dimethyl-2′-O-methyl-guanosine (m2 2Gm), 1-methyl-2′-O-methyl-guanosine (m′Gm), N2,7-dimethyl-2′-O-methyl-guanosine (m2,7Gm), 2′-O-methyl-inosine (Im), 1,2′-O-dimethyl-inosine (m′Im), O6-phenyl-2′-deoxyinosine, 2′-O-ribosylguanosine (phosphate) (Gr(p)), 1-thio-guanosine, O6-methyl-guanosine, O6-Methyl-2′-deoxyguanosine, 2′-F-ara-guanosine, and 2′-F-guanosine.

[1068] d) Exemplary Modified gRNAs

[1069] In some embodiments, the modified nucleic acids can be modified gRNAs. It is to be understood that any of the gRNAs described herein can be modified in accordance with this section. As discussed herein, transiently expressed or delivered nucleic acids can be prone to degradation by, e.g., cellular nucleases. Accordingly, in one aspect the modified gRNAs described herein can contain one or more modified nucleosides or nucleotides which introduce stability toward nucleases. While not wishing to be bound by theory it is believed that these and other modified gRNAs described herein exhibit enhanced stability with certain cell types (e.g., circulating cells such as T cells) and that this might be responsible for the observed improvements.

[1070] For example, as discussed herein, we have seen improvements in ex vivo editing of genes in certain cell types (e.g., T cells) when the 5′ end of a gRNA is modified by the inclusion of a eukaryotic mRNA cap structure or cap analog. The present invention encompasses the realization that the improvements observed with a 5′ capped gRNA can be extended to gRNAs that have been modified in other ways to achieve the same type of structural or functional result (e.g., by the inclusion of modified nucleosides or nucleotides, or when an in vitro transcribed gRNA is modified by treatment with a phosphatase such as calf intestinal alkaline phosphatase to remove the 5′ triphosphate group). While not wishing to be bound by theory, in some embodiments, the modified gRNAs described herein may contain one or more modifications (e.g., modified nucleosides or nucleotides) which introduce stability toward nucleases (e.g., by the inclusion of modified nucleosides or nucleotides and/or a 3′ polyA tail).

[1071] Thus, in one aspect, methods and compositions discussed herein provide methods and compositions for gene editing of certain cells (e.g., ex vivo gene editing) by using gRNAs which have been modified at or near their 5′ end (e.g., within 1-10, 1-5, or 1-2 nucleotides of their 5′ end).

[1072] In some embodiments, the 5′ end of the gRNA molecule lacks a 5′ triphosphate group. In some embodiments, the 5′ end of the targeting domain lacks a 5′ triphosphate group. In some embodiments, the 5′ end of the gRNA molecule includes a 5′ cap. In some embodiments, the 5′ end of the targeting domain includes a 5′ cap. In some embodiments, the gRNA molecule lacks a 5′ triphosphate group. In some embodiments, the gRNA molecule comprises a targeting domain and the 5′ end of the targeting domain lacks a 5′ triphosphate group. In some embodiments, gRNA molecule includes a 5′ cap. In some embodiments, the gRNA molecule comprises a targeting domain and the 5′ end of the targeting domain includes a 5′ cap.

[1073] In an embodiment, the 5′ end of a gRNA is modified by the inclusion of a eukaryotic mRNA cap structure or cap analog (e.g., without limitation a G(5′)ppp(5′)G cap analog, a m7G(5′)ppp(5′)G cap analog, or a 3′-O-Me-m7G(5′)ppp(5′)G anti reverse cap analog (ARCA)). In certain embodiments the 5′ cap comprises a modified guanine nucleotide that is linked to the remainder of the gRNA molecule via a 5′-5′ triphosphate linkage. In some embodiments, the 5′ cap comprises two optionally modified guanine nucleotides that are linked via a 5′-5′ triphosphate linkage. In some embodiments, the 5′ end of the gRNA molecule has the chemical formula:

[chemical structure]

wherein:
[1074] each of B¹ and B^{1′} is independently

[chemical structure]

[1075] each R¹ is independently C₁₋₄ alkyl, optionally substituted by a phenyl or a 6-membered heteroaryl;
[1076] each of R², R^{2′}, and R^{3′} is independently H, F, OH, or O—C₁₋₄ alkyl;
[1077] each of X, Y, and Z is independently O or S; and
[1078] each of X′ and Y′ is independently O or CH₂.

[1079] In an embodiment, each R¹ is independently —CH₃, —CH₂CH₃, or —CH₂C₆H₅.

[1080] In an embodiment, R¹ is —CH₃.

[1081] In an embodiment, B^{1′} is

[chemical structure]

[1082] In an embodiment, each of R², R^{2′}, and R^{3′} is independently H, OH, or O—CH₃.

[1083] In an embodiment, each of X, Y, and Z is O.

[1084] In an embodiment, X′ and Y′ are O.

[1085] In an embodiment, the 5′ end of the gRNA molecule has the chemical formula:

[chemical structure]

[1086] In an embodiment, the 5′ end of the gRNA molecule has the chemical formula:

[chemical structure]

[1087] In an embodiment, the 5′ end of the gRNA molecule has the chemical formula:

[chemical structure]

[1088] In an embodiment, the 5′ end of the gRNA molecule has the chemical formula:

[chemical structure]

[1089] In an embodiment, X is S, and Y and Z are O.

[1090] In an embodiment, Y is S, and X and Z are O.

[1091] In an embodiment, Z is S, and X and Y are O.

[1092] In an embodiment, the phosphorothioate is the Sp diastereomer.

[1093] In an embodiment, X′ is CH₂, and Y′ is O.

[1094] In an embodiment, X′ is O, and Y′ is CH₂.

[1095] In an embodiment, the 5′ cap comprises two optionally modified guanine nucleotides that are linked via an optionally modified 5′-5′ tetraphosphate linkage.

[1096] In an embodiment, the 5′ end of the gRNA molecule has the chemical formula:

[chemical structure]

wherein:
[1097] each of B¹ and B^{1′} is independently

[chemical structure]

[1098] each R¹ is independently C₁₋₄ alkyl, optionally substituted by a phenyl or a 6-membered heteroaryl;
[1099] each of R², R^{2′}, and R^{3′} is independently H, F, OH, or O—C₁₋₄ alkyl;
[1100] each of W, X, Y, and Z is independently O or S; and
[1101] each of X′, Y′, and Z′ is independently O or CH₂.

[1102] In an embodiment, each R¹ is independently —CH₃, —CH₂CH₃, or —CH₂C₆H₅.

[1103] In an embodiment, R¹ is —CH₃.

[1104] In an embodiment, B^{1′} is

[chemical structure]

[1105] In an embodiment, each of R², R^{2′}, and R^{3′} is independently H, OH, or O—CH₃.

[1106] In an embodiment, each of W, X, Y, and Z is O.

[1107] In an embodiment, each of X′, Y′, and Z′ are O.

[1108] In an embodiment, X′ is CH₂, and Y′ and Z′ are O.

[1109] In an embodiment, Y′ is CH₂, and X′ and Z′ are O.

[1110] In an embodiment, Z′ is CH₂, and X′ and Y′ are O.

[1111] In an embodiment, the 5′ cap comprises two optionally modified guanine nucleotides that are linked via an optionally modified 5′-5′ pentaphosphate linkage.

[1112] In an embodiment, the 5′ end of the gRNA molecule has the chemical formula:

[chemical structure]

[1113] wherein:

each of B1 and B1′ is independently

[chemical structure]

[1114] each R¹ is independently C₁₋₄ alkyl, optionally substituted by a phenyl or a 6-membered heteroaryl;
[1115] each of R², R^{2′}, and R^{3′} is independently H, F, OH, or O—C₁₋₄ alkyl;
[1116] each of V, W, X, Y, and Z is independently O or S; and
[1117] each of W′, X′, Y′, and Z′ is independently O or CH₂.

[1118] In an embodiment, each R¹ is independently —CH₃, —CH₂CH₃, or —CH₂C₆H₅.

[1119] In an embodiment, R¹ is —CH₃.

[1120] In an embodiment, B^{1′} is

[chemical structure]

[1121] In an embodiment, each of R², R^{2′}, and R^{3′} is independently H, OH, or O—CH₃.

[1122] In an embodiment, each of V, W, X, Y, and Z is O.

[1123] In an embodiment, each of W′, X′, Y′, and Z′ is O.

[1124] It is to be understood that as used herein, the term “5′ cap” encompasses traditional mRNA 5′ cap structures but also analogs of these. For example, in addition to the 5′ cap structures that are encompassed by the chemical structures shown above, one may use, e.g., tetraphosphate analogs having a methylene-bis(phosphonate) moiety (e.g., see Rydzik, A M et al., (2009) Org Biomol Chem 7(22):4763-76), analogs having a sulfur substitution for a non-bridging oxygen (e.g., see Grudzien-Nogalska, E. et al, (2007) RNA 13(10): 1745-1755), N7-benzylated dinucleoside tetraphosphate analogs (e.g., see Grudzien, E. et al., (2004) RNA 10(9): 1479-1487), or anti-reverse cap analogs (e.g., see U.S. Pat. No. 7,074,596 and Jemielity, J. et al., (2003) RNA 9(9): 1108-1122 and Stepinski, J. et al., (2001) RNA 7(10):1486-1495). The present application also encompasses the use of cap analogs with halogen groups instead of OH or OMe (e.g., see U.S. Pat. No. 8,304,529); cap analogs with at least one phosphorothioate (PS) linkage (e.g., see U.S. Pat. No. 8,153,773 and Kowalska, J. et al., (2008) RNA 14(6): 1119-1131); and cap analogs with at least one boranophosphate or phosphoroselenoate linkage (e.g., see U.S. Pat. No. 8,519,110); and alkynyl-derivatized 5′ cap analogs (e.g., see U.S. Pat. No. 8,969,545).

[1125] In general, the 5′ cap can be included during either chemical synthesis or in vitro transcription of the gRNA. In an embodiment, a 5′ cap is not used and the gRNA (e.g., an in vitro transcribed gRNA) is instead modified by treatment with a phosphatase (e.g., calf intestinal alkaline phosphatase) to remove the 5′ triphosphate group.

[1126] Methods and compositions discussed herein also provide methods and compositions for gene editing by using gRNAs which comprise a 3′ polyA tail. Such gRNAs may, for example, be prepared by adding a polyA tail to a gRNA molecule precursor using a polyadenosine polymerase following in vitro transcription of the gRNA molecule precursor. For example, in one embodiment, a polyA tail may be added enzymatically using a polymerase such as E. coli polyA polymerase (E-PAP). gRNAs including a polyA tail may also be prepared by in vitro transcription from a DNA template. In one embodiment, a polyA tail of defined length is encoded on a DNA template and transcribed with the gRNA via an RNA polymerase (such as T7 RNA polymerase). gRNAs with a polyA tail may also be prepared by ligating a polyA oligonucleotide to a gRNA molecule precursor following in vitro transcription using an RNA ligase or a DNA ligase with or without a splinted DNA oligonucleotide complementary to the gRNA molecule precursor and the polyA oligonucleotide. For example, in one embodiment, a polyA tail of defined length is synthesized as a synthetic oligonucleotide and ligated on the 3′ end of the gRNA with either an RNA ligase or a DNA ligase with or without a splinted DNA oligonucleotide complementary to the guide RNA and the polyA oligonucleotide. gRNAs including the polyA tail may also be prepared synthetically, in one or several pieces that are ligated together by either an RNA ligase or a DNA ligase with or without one or more splinted DNA oligonucleotides.

[1127] In some embodiments, the polyA tail is comprised of fewer than 50 adenine nucleotides, for example, fewer than 45 adenine nucleotides, fewer than 40 adenine nucleotides, fewer than 35 adenine nucleotides, fewer than 30 adenine nucleotides, fewer than 25 adenine nucleotides or fewer than 20 adenine nucleotides. In some embodiments the polyA tail is comprised of between 5 and 50 adenine nucleotides, for example between 5 and 40 adenine nucleotides, between 5 and 30 adenine nucleotides, between 10 and 50 adenine nucleotides, or between 15 and 25 adenine nucleotides. In some embodiments, the polyA tail is comprised of about 20 adenine nucleotides.

[1128] Methods and compositions discussed herein also provide methods and compositions for gene editing (e.g., ex vivo gene editing) by using gRNAs which include one or more modified nucleosides or nucleotides that are described herein.

[1129] While some of the exemplary modifications discussed in this section may be included at any position within the gRNA sequence, in some embodiments, a gRNA comprises a modification at or near its 5′ end (e.g., within 1-10, 1-5, or 1-2 nucleotides of its 5′ end). In some embodiments, a gRNA comprises a modification at or near its 3′ end (e.g., within 1-10, 1-5, or 1-2 nucleotides of its 3′ end). In some embodiments, a gRNA comprises both a modification at or near its 5′ end and a modification at or near its 3′ end. For example, in some embodiments, a gRNA molecule (e.g., an in vitro transcribed gRNA) comprises a targeting domain which is complementary with a target domain from a gene expressed in a eukaryotic cell, wherein the gRNA molecule is modified at its 5′ end and comprises a 3′ polyA tail. The gRNA molecule may, for example, lack a 5′ triphosphate group (e.g., the 5′ end of the targeting domain lacks a 5′ triphosphate group). In an embodiment, a gRNA (e.g., an in vitro transcribed gRNA) is modified by treatment with a phosphatase (e.g., calf intestinal alkaline phosphatase) to remove the 5′ triphosphate group and comprises a 3′ polyA tail as described herein. The gRNA molecule may alternatively include a 5′ cap (e.g., the 5′ end of the targeting domain includes a 5′ cap). In an embodiment, a gRNA (e.g., an in vitro transcribed gRNA) contains both a 5′ cap structure or cap analog and a 3′ polyA tail as described herein. In some embodiments, the 5′ cap comprises a modified guanine nucleotide that is linked to the remainder of the gRNA molecule via a 5′-5′ triphosphate linkage. In some embodiments, the 5′ cap comprises two optionally modified guanine nucleotides that are linked via an optionally modified 5′-5′ triphosphate linkage (e.g., as described above). In some embodiments the polyA tail is comprised of between 5 and 50 adenine nucleotides, for example between 5 and 40 adenine nucleotides, between 5 and 30 adenine nucleotides, between 10 and 50 adenine nucleotides, between 15 and 25 adenine nucleotides, fewer than 30 adenine nucleotides, fewer than 25 adenine nucleotides or about 20 adenine nucleotides.

[1130] In yet other embodiments, the present invention provides a gRNA molecule comprising a targeting domain which is complementary with a target domain from a gene expressed in a eukaryotic cell, wherein the gRNA molecule comprises a 3′ polyA tail which is comprised of fewer than 30 adenine nucleotides (e.g., fewer than 25 adenine nucleotides, between 15 and 25 adenine nucleotides, or about 20 adenine nucleotides). In some embodiments, these gRNA molecules are further modified at their 5′ end (e.g., the gRNA molecule is modified by treatment with a phosphatase to remove the 5′ triphosphate group or modified to include a 5′ cap as described herein).

[1131] In some embodiments, gRNAs can be modified at a 3′ terminal U ribose. In some embodiments, the 5′ end and a 3′ terminal U ribose of the gRNA are modified (e.g., the gRNA is modified by treatment with a phosphatase to remove the 5′ triphosphate group or modified to include a 5′ cap as described herein). For example, the two terminal hydroxyl groups of the U ribose can be oxidized to aldehyde groups and a concomitant opening of the ribose ring to afford a modified nucleoside as shown below:

[chemical structure]

wherein “U” can be an unmodified or modified uridine.

[1132] In another embodiment, the 3′ terminal U can be modified with a 2′3′ cyclic phosphate as shown below:

[chemical structure]

wherein “U” can be an unmodified or modified uridine.

[1133] In some embodiments, the gRNA molecules may contain 3′ nucleotides which can be stabilized against degradation, e.g., by incorporating one or more of the modified nucleotides described herein. In this embodiment, e.g., uridines can be replaced with modified uridines, e.g., 5-(2-amino)propyl uridine, and 5-bromo uridine, or with any of the modified uridines described herein; adenosines and guanosines can be replaced with modified adenosines and guanosines, e.g., with modifications at the 8-position, e.g., 8-bromo guanosine, or with any of the modified adenosines or guanosines described herein.

[1134] In some embodiments, a gRNA comprises both a modification at or near its 5′ end and a modification at or near its 3′ end. In an embodiment, in vitro transcribed gRNA contains both a 5′ cap structure or cap analog and a 3′ polyA tail. In an embodiment, an in vitro transcribed gRNA is modified by treatment with a phosphatase (e.g., calf intestinal alkaline phosphatase) to remove the 5′ triphosphate group and comprises a 3′ polyA tail.

[1135] While the foregoing has focused on terminal modifications, it is to be understood that methods and compositions discussed herein may use gRNAs that include one or more modified nucleosides or nucleotides at one or more non-terminal positions and/or one or more terminal positions within the gRNA sequence.

[1136] In some embodiments, sugar-modified ribonucleotides can be incorporated into the gRNA, e.g., wherein the 2′ OH-group is replaced by a group selected from H, —OR, —R (wherein R can be, e.g., alkyl, cycloalkyl, aryl, aralkyl, heteroaryl or sugar), halo, —SH, —SR (wherein R can be, e.g., alkyl, cycloalkyl, aryl, aralkyl, heteroaryl or sugar), amino (wherein amino can be, e.g., NH₂; alkylamino, dialkylamino, heterocyclyl, arylamino, diarylamino, heteroarylamino, diheteroarylamino, or amino acid); or cyano (—CN). In some embodiments, the phosphate backbone can be modified as described herein, e.g., with a phosphothioate group. In some embodiments, one or more of the nucleotides of the gRNA can each independently be a modified or unmodified nucleotide including, but not limited to 2′-sugar modified, such as, 2′-O-methyl, 2′-O-methoxyethyl, or 2′-Fluoro modified including, e.g., 2′-F or 2′-O-methyl, adenosine (A), 2′-F or 2′-O-methyl, cytidine (C), 2′-F or 2′-O-methyl, uridine (U), 2′-F or 2′-O-methyl, thymidine (T), 2′-F or 2′-O-methyl, guano sine (G), 2′-O-methoxyethyl-5-methyluridine (Teo), 2′-O-methoxyethyladenosine (Aeo), 2′-O-methoxyethyl-5-methylcytidine (m5Ceo), and any combinations thereof.

[1137] In some embodiments, a gRNA can include “locked” nucleic acids (LNA) in which the 2′ OH-group can be connected, e.g., by a C1-6 alkylene or C1-6 heteroalkylene bridge, to the 4′ carbon of the same ribose sugar, where exemplary bridges can include methylene, propylene, ether, or amino bridges; O-amino (wherein amino can be, e.g., NH₂; alkylamino, dialkylamino, heterocyclyl, arylamino, diarylamino, heteroarylamino, or diheteroarylamino, ethylenediamine, or polyamino) and aminoalkoxy or O(CH₂)ₙ-amino (wherein amino can be, e.g., NH₂; alkylamino, dialkylamino, heterocyclyl, arylamino, diarylamino, heteroarylamino, or diheteroarylamino, ethylenediamine, or polyamino).

[1138] In some embodiments, a gRNA can include a modified nucleotide which is multicyclic (e.g., tricyclo; and “unlocked” forms, such as glycol nucleic acid (GNA) (e.g., R-GNA or S-GNA, where ribose is replaced by glycol units attached to phosphodiester bonds), or threose nucleic acid (TNA, where ribose is replaced with α-L-threofuranosyl-(3′→2′)).

[1139] Generally, gRNA molecules include the sugar group ribose, which is a 5-membered ring having an oxygen. Exemplary modified gRNAs can include, without limitation, replacement of the oxygen in ribose (e.g., with sulfur (S), selenium (Se), or alkylene, such as, e.g., methylene or ethylene); addition of a double bond (e.g., to replace ribose with cyclopentenyl or cyclohexenyl); ring contraction of ribose (e.g., to form a 4-membered ring of cyclobutane or oxetane); ring expansion of ribose (e.g., to form a 6- or 7-membered ring having an additional carbon or heteroatom, such as for example, anhydrohexitol, altritol, mannitol, cyclohexanyl, cyclohexenyl, and morpholino that also has a phosphoramidate backbone). Although the majority of sugar analog alterations are localized to the 2′ position, other sites are amenable to modification, including the 4′ position. In an embodiment, a gRNA comprises a 4′-S, 4′-Se or a 4′-C-aminomethyl-2′-O-Me modification.

[1140] In some embodiments, deaza nucleotides, e.g., 7-deaza-adenosine, can be incorporated into the gRNA. In some embodiments, 0- and N-alkylated nucleotides, e.g., N6-methyl adenosine, can be incorporated into the gRNA. In some embodiments, one or more or all of the nucleotides in a gRNA molecule are deoxynucleotides.

[1141] e) miRNA Binding Sites

[1142] microRNAs (or miRNAs) are naturally occurring cellular 19-25 nucleotide long noncoding RNAs. They bind to nucleic acid molecules having an appropriate miRNA binding site, e.g., in the 3′ UTR of an mRNA, and down-regulate gene expression. While not wishing to be bound by theory it is believed that the down regulation is either by reducing nucleic acid molecule stability or by inhibiting translation. An RNA species disclosed herein, e.g., an mRNA encoding Cas9 can comprise an miRNA binding site, e.g., in its 3′UTR. The miRNA binding site can be selected to promote down regulation of expression is a selected cell type. By way of example, the incorporation of a binding site for miR-122, a microRNA abundant in liver, can inhibit the expression of the gene of interest in the liver.

[1143] D. Governing gRNA Molecules and the Use Thereof to Limit the Activity of a Cas9 System

[1144] Methods and compositions that use, or include, a nucleic acid, e.g., DNA, that encodes a Cas9 molecule or a gRNA molecule, can, in addition, use or include a “governing gRNA molecule.” The governing gRNA can limit the activity of the other CRISPR/Cas components introduced into a cell or subject. In an embodiment, a gRNA molecule comprises a targeting domain that is complementary to a target domain on a nucleic acid that comprises a sequence that encodes a component of the CRISPR/Cas system that is introduced into a cell or subject. In an embodiment, a governing gRNA molecule comprises a targeting domain that is complementary with a target sequence on: (a) a nucleic acid that encodes a Cas9 molecule; (b) a nucleic acid that encodes a gRNA which comprises a targeting domain that targets the FAS, BID, CTLA4, PDCD1, CBLB, PTPN6, TRAC or TRBC gene (a target gene gRNA); or on more than one nucleic acid that encodes a CRISPR/Cas component, e.g., both (a) and (b). The governing gRNA molecule can complex with the Cas9 molecule to inactivate a component of the system. In an embodiment, a Cas9 molecule/governing gRNA molecule complex inactivates a nucleic acid that comprises the sequence encoding the Cas9 molecule. In an embodiment, a Cas9 molecule/governing gRNA molecule complex inactivates the nucleic acid that comprises the sequence encoding a target gene gRNA molecule. In an embodiment, a Cas9 molecule/governing gRNA molecule complex places temporal, level of expression, or other limits, on activity of the Cas9 molecule/target gene gRNA molecule complex. In an embodiment, a Cas9 molecule/governing gRNA molecule complex reduces off-target or other unwanted activity. In an embodiment, a governing gRNA molecule targets the coding sequence, or a control region, e.g., a promoter, for the CRISPR/Cas system component to be negatively regulated. For example, a governing gRNA can target the coding sequence for a Cas9 molecule, or a control region, e.g., a promoter, that regulates the expression of the Cas9 molecule coding sequence, or a sequence disposed between the two. In an embodiment, a governing gRNA molecule targets the coding sequence, or a control region, e.g., a promoter, for a target gene gRNA. In an embodiment, a governing gRNA, e.g., a Cas9-targeting or target gene gRNA-targeting, governing gRNA molecule, or a nucleic acid that encodes it, is introduced separately, e.g., later, than is the Cas9 molecule or a nucleic acid that encodes it. For example, a first vector, e.g., a viral vector, e.g., an AAV vector, can introduce nucleic acid encoding a Cas9 molecule and one or more target gene gRNA molecules, and a second vector, e.g., a viral vector, e.g., an AAV vector, can introduce nucleic acid encoding a governing gRNA molecule, e.g., a Cas9-targeting or target gene gRNA targeting, gRNA molecule. In an embodiment, the second vector can be introduced after the first. In other embodiments, a governing gRNA molecule, e.g., a Cas9-targeting or target gene gRNA targeting, governing gRNA molecule, or a nucleic acid that encodes it, can be introduced together, e.g., at the same time or in the same vector, with the Cas9 molecule or a nucleic acid that encodes it, but, e.g., under transcriptional control elements, e.g., a promoter or an enhancer, that are activated at a later time, e.g., such that after a period of time the transcription of Cas9 is reduced. In an embodiment, the transcriptional control element is activated intrinsically. In an embodiment, the transcriptional element is activated via the introduction of an external trigger.

[1145] Typically a nucleic acid sequence encoding a governing gRNA molecule, e.g., a Cas9-targeting gRNA molecule, is under the control of a different control region, e.g., promoter, than is the component it negatively modulates, e.g., a nucleic acid encoding a Cas9 molecule. In an embodiment, “different control region” refers to simply not being under the control of one control region, e.g., promoter, that is functionally coupled to both controlled sequences. In an embodiment, different refers to “different control region” in kind or type of control region. For example, the sequence encoding a governing gRNA molecule, e.g., a Cas9-targeting gRNA molecule, is under the control of a control region, e.g., a promoter, that has a lower level of expression, or is expressed later than the sequence which encodes is the component it negatively modulates, e.g., a nucleic acid encoding a Cas9 molecule.

[1146] By way of example, a sequence that encodes a governing gRNA molecule, e.g., a Cas9-targeting governing gRNA molecule, can be under the control of a control region (e.g., a promoter) described herein, e.g., human U6 small nuclear promoter, or human H1 promoter. In an embodiment, a sequence that encodes the component it negatively regulates, e.g., a nucleic acid encoding a Cas9 molecule, can be under the control of a control region (e.g., a promoter) described herein, e.g., CMV, EF-1a, MSCV, PGK, CAG control promoters.

### III. COMPOSITIONS AND FORMULATIONS

[1147] Also provided are populations of such cells, compositions containing such cells and/or enriched for such cells, such as in which cells expressing the recombinant receptor make up at least 50%, 60%, 70%, 80%, 90%, 91%, 92%, 93%, 94%, 95%, 96%, 97%, 98%, 99%, or more of the total cells in the composition or cells of a certain type such as T cells or CD8+ or CD4+ cells. Among the compositions are pharmaceutical compositions and formulations for administration, such as for adoptive cell therapy. Also provided are therapeutic methods for administering the cells and compositions to subjects, e.g., patients.

[1148] Also provided are compositions including the cells for administration, including pharmaceutical compositions and formulations, such as unit dose form compositions including the number of cells for administration in a given dose or fraction thereof. The pharmaceutical compositions and formulations generally include one or more optional pharmaceutically acceptable carrier or excipient. In some embodiments, the composition includes at least one additional therapeutic agent.

[1149] The term “pharmaceutical formulation” refers to a preparation which is in such form as to permit the biological activity of an active ingredient contained therein to be effective, and which contains no additional components which are unacceptably toxic to a subject to which the formulation would be administered.

[1150] A “pharmaceutically acceptable carrier” refers to an ingredient in a pharmaceutical formulation, other than an active ingredient, which is nontoxic to a subject. A pharmaceutically acceptable carrier includes, but is not limited to, a buffer, excipient, stabilizer, or preservative.

[1151] In some aspects, the choice of carrier is determined in part by the particular cell and/or by the method of administration. Accordingly, there are a variety of suitable formulations. For example, the pharmaceutical composition can contain preservatives. Suitable preservatives may include, for example, methylparaben, propylparaben, sodium benzoate, and benzalkonium chloride. In some aspects, a mixture of two or more preservatives is used. The preservative or mixtures thereof are typically present in an amount of about 0.0001% to about 2% by weight of the total composition. Carriers are described, e.g., by Remington's Pharmaceutical Sciences 16th edition, Osol, A. Ed. (1980). Pharmaceutically acceptable carriers are generally nontoxic to recipients at the dosages and concentrations employed, and include, but are not limited to: buffers such as phosphate, citrate, and other organic acids; antioxidants including ascorbic acid and methionine; preservatives (such as octadecyldimethylbenzyl ammonium chloride; hexamethonium chloride; benzalkonium chloride; benzethonium chloride; phenol, butyl or benzyl alcohol; alkyl parabens such as methyl or propyl paraben; catechol; resorcinol; cyclohexanol; 3-pentanol; and m-cresol); low molecular weight (less than about 10 residues) polypeptides; proteins, such as serum albumin, gelatin, or immunoglobulins; hydrophilic polymers such as polyvinylpyrrolidone; amino acids such as glycine, glutamine, asparagine, histidine, arginine, or lysine; monosaccharides, disaccharides, and other carbohydrates including glucose, mannose, or dextrins; chelating agents such as EDTA; sugars such as sucrose, mannitol, trehalose or sorbitol; salt-forming counter-ions such as sodium; metal complexes (e.g. Zn-protein complexes); and/or non-ionic surfactants such as polyethylene glycol (PEG).

[1152] Buffering agents in some aspects are included in the compositions. Suitable buffering agents include, for example, citric acid, sodium citrate, phosphoric acid, potassium phosphate, and various other acids and salts. In some aspects, a mixture of two or more buffering agents is used. The buffering agent or mixtures thereof are typically present in an amount of about 0.001% to about 4% by weight of the total composition. Methods for preparing administrable pharmaceutical compositions are known. Exemplary methods are described in more detail in, for example, Remington: The Science and Practice of Pharmacy, Lippincott Williams & Wilkins; 21st ed. (May 1, 2005).

[1153] The formulations can include aqueous solutions. The formulation or composition may also contain more than one active ingredient useful for the particular indication, disease, or condition being treated with the cells, preferably those with activities complementary to the cells, where the respective activities do not adversely affect one another. Such active ingredients are suitably present in combination in amounts that are effective for the purpose intended. Thus, in some embodiments, the pharmaceutical composition further includes other pharmaceutically active agents or drugs, such as chemotherapeutic agents, e.g., asparaginase, busulfan, carboplatin, cisplatin, daunorubicin, doxorubicin, fluorouracil, gemcitabine, hydroxyurea, methotrexate, paclitaxel, rituximab, vinblastine, and/or vincristine.

[1154] The pharmaceutical composition in some embodiments contains the cells in amounts effective to treat or prevent the disease or condition, such as a therapeutically effective or prophylactically effective amount. Therapeutic or prophylactic efficacy in some embodiments is monitored by periodic assessment of treated subjects. The desired dosage can be delivered by a single bolus administration of the cells, by multiple bolus administrations of the cells, or by continuous infusion administration of the cells.

[1155] The cells and compositions may be administered using standard administration techniques, formulations, and/or devices. Administration of the cells can be autologous or heterologous. For example, immunoresponsive cells or progenitors can be obtained from one subject, and administered to the same subject or a different, compatible subject. Peripheral blood derived immunoresponsive cells or their progeny (e.g., in vivo, ex vivo or in vitro derived) can be administered via localized injection, including catheter administration, systemic injection, localized injection, intravenous injection, or parenteral administration. When administering a therapeutic composition (e.g., a pharmaceutical composition containing a genetically modified immunoresponsive cell), it will generally be formulated in a unit dosage injectable form (solution, suspension, emulsion).

[1156] Formulations include those for oral, intravenous, intraperitoneal, subcutaneous, pulmonary, transdermal, intramuscular, intranasal, buccal, sublingual, or suppository administration. In some embodiments, the cell populations are administered parenterally. The term “parenteral,” as used herein, includes intravenous, intramuscular, subcutaneous, rectal, vaginal, and intraperitoneal administration. In some embodiments, the cells are administered to the subject using peripheral systemic delivery by intravenous, intraperitoneal, or subcutaneous injection.

[1157] Compositions in some embodiments are provided as sterile liquid preparations, e.g., isotonic aqueous solutions, suspensions, emulsions, dispersions, or viscous compositions, which may in some aspects be buffered to a selected pH. Liquid preparations are normally easier to prepare than gels, other viscous compositions, and solid compositions. Additionally, liquid compositions are somewhat more convenient to administer, especially by injection. Viscous compositions, on the other hand, can be formulated within the appropriate viscosity range to provide longer contact periods with specific tissues. Liquid or viscous compositions can comprise carriers, which can be a solvent or dispersing medium containing, for example, water, saline, phosphate buffered saline, polyoi (for example, glycerol, propylene glycol, liquid polyethylene glycol) and suitable mixtures thereof.

[1158] Sterile injectable solutions can be prepared by incorporating the cells in a solvent, such as in admixture with a suitable carrier, diluent, or excipient such as sterile water, physiological saline, glucose, dextrose, or the like. The compositions can contain auxiliary substances such as wetting, dispersing, or emulsifying agents (e.g., methylcellulose), pH buffering agents, gelling or viscosity enhancing additives, preservatives, flavoring agents, and/or colors, depending upon the route of administration and the preparation desired. Standard texts may in some aspects be consulted to prepare suitable preparations.

[1159] Various additives which enhance the stability and sterility of the compositions, including antimicrobial preservatives, antioxidants, chelating agents, and buffers, can be added. Prevention of the action of microorganisms can be ensured by various antibacterial and antifungal agents, for example, parabens, chlorobutanol, phenol, and sorbic acid. Prolonged absorption of the injectable pharmaceutical form can be brought about by the use of agents delaying absorption, for example, aluminum monostearate and gelatin.

[1160] The formulations to be used for in vivo administration are generally sterile. Sterility may be readily accomplished, e.g., by filtration through sterile filtration membranes.

### IV. METHODS OF ADMINISTRATION AND USES IN ADOPTIVE CELL THERAPY

[1161] Provided are methods of administering the cells, populations, and compositions, and uses of such cells, populations, and compositions to treat or prevent diseases, conditions, and disorders, including cancers. In some embodiments, the cells, populations, and compositions are administered to a subject or patient having the particular disease or condition to be treated, e.g., via adoptive cell therapy, such as adoptive T cell therapy. In some embodiments, cells and compositions prepared by the provided methods, such as engineered compositions and end-of-production compositions following incubation and/or other processing steps, are administered to a subject, such as a subject having or at risk for the disease or condition. In some aspects, the methods thereby treat, e.g., ameliorate one or more symptom of, the disease or condition, such as by lessening tumor burden in a cancer expressing an antigen recognized by an engineered T cell.

[1162] Methods for administration of cells for adoptive cell therapy are known and may be used in connection with the provided methods and compositions. For example, adoptive T cell therapy methods are described, e.g., in US Patent Application Publication No. 2003/0170238 to Gruenberg et al; U.S. Pat. No. 4,690,915 to Rosenberg; Rosenberg (2011) Nat Rev Clin Oncol. 8(10):577-85). See, e.g., Themeli et al. (2013) Nat Biotechnol. 31(10): 928-933; Tsukahara et al. (2013) Biochem Biophys Res Commun 438(1): 84-9; Davila et al. (2013) PLoS ONE 8(4): e61338.

[1163] As used herein, a “subject” is a mammal, such as a human or other animal, and typically is human. In some embodiments, the subject, e.g., patient, to whom the cells, cell populations, or compositions are administered is a mammal, typically a primate, such as a human. In some embodiments, the primate is a monkey or an ape. The subject can be male or female and can be any suitable age, including infant, juvenile, adolescent, adult, and geriatric subjects. In some embodiments, the subject is a non-primate mammal, such as a rodent.

[1164] As used herein, “treatment” (and grammatical variations thereof such as “treat” or “treating”) refers to complete or partial amelioration or reduction of a disease or condition or disorder, or a symptom, adverse effect or outcome, or phenotype associated therewith. Desirable effects of treatment include, but are not limited to, preventing occurrence or recurrence of disease, alleviation of symptoms, diminishment of any direct or indirect pathological consequences of the disease, preventing metastasis, decreasing the rate of disease progression, amelioration or palliation of the disease state, and remission or improved prognosis. The terms do not imply complete curing of a disease or complete elimination of any symptom or effect(s) on all symptoms or outcomes.

[1165] As used herein, “delaying development of a disease” means to defer, hinder, slow, retard, stabilize, suppress and/or postpone development of the disease (such as cancer). This delay can be of varying lengths of time, depending on the history of the disease and/or individual being treated. As is evident to one skilled in the art, a sufficient or significant delay can, in effect, encompass prevention, in that the individual does not develop the disease. For example, a late stage cancer, such as development of metastasis, may be delayed.

[1166] “Preventing,” as used herein, includes providing prophylaxis with respect to the occurrence or recurrence of a disease in a subject that may be predisposed to the disease but has not yet been diagnosed with the disease. In some embodiments, the provided cells and compositions are used to delay development of a disease or to slow the progression of a disease.

[1167] As used herein, to “suppress” a function or activity is to reduce the function or activity when compared to otherwise same conditions except for a condition or parameter of interest, or alternatively, as compared to another condition. For example, cells that suppress tumor growth reduce the rate of growth of the tumor compared to the rate of growth of the tumor in the absence of the cells.

[1168] An “effective amount” of an agent, e.g., a pharmaceutical formulation, cells, or composition, in the context of administration, refers to an amount effective, at dosages/amounts and for periods of time necessary, to achieve a desired result, such as a therapeutic or prophylactic result.

[1169] A “therapeutically effective amount” of an agent, e.g., a pharmaceutical formulation or cells, refers to an amount effective, at dosages and for periods of time necessary, to achieve a desired therapeutic result, such as for treatment of a disease, condition, or disorder, and/or pharmacokinetic or pharmacodynamic effect of the treatment. The therapeutically effective amount may vary according to factors such as the disease state, age, sex, and weight of the subject, and the populations of cells administered. In some embodiments, the provided methods involve administering the cells and/or compositions at effective amounts, e.g., therapeutically effective amounts.

[1170] A “prophylactically effective amount” refers to an amount effective, at dosages and for periods of time necessary, to achieve the desired prophylactic result. Typically but not necessarily, since a prophylactic dose is used in subjects prior to or at an earlier stage of disease, the prophylactically effective amount will be less than the therapeutically effective amount. In the context of lower tumor burden, the prophylactically effective amount in some aspects will be higher than the therapeutically effective amount.

[1171] In some embodiments, the subject has persistent or relapsed disease, e.g., following treatment with another therapeutic intervention, including chemotherapy, radiation, and/or hematopoietic stem cell transplantation (HSCT), e.g., allogenic HSCT. In some embodiments, the administration effectively treats the subject despite the subject having become resistant to another therapy.

[1172] Methods for administration of cells for adoptive cell therapy are known and may be used in connection with the provided methods and compositions. For example, adoptive T cell therapy methods are described, e.g., in US Patent Application Publication No. 2003/0170238 to Gruenberg et al; U.S. Pat. No. 4,690,915 to Rosenberg; Rosenberg (2011) Nat Rev Clin Oncol. 8(10):577-85). See, e.g., Themeli et al. (2013) Nat Biotechnol. 31(10): 928-933; Tsukahara et al. (2013) Biochem Biophys Res Commun 438(1): 84-9; Davila et al. (2013) PLoS ONE 8(4): e61338.

[1173] In some embodiments, the cell therapy, e.g., adoptive T cell therapy, is carried out by autologous transfer, in which the cells are isolated and/or otherwise prepared from the subject who is to receive the cell therapy, or from a sample derived from such a subject. Thus, in some aspects, the cells are derived from a subject, e.g., patient, in need of a treatment and the cells, following isolation and processing are administered to the same subject.

[1174] In some embodiments, the cell therapy, e.g., adoptive T cell therapy, is carried out by allogeneic transfer, in which the cells are isolated and/or otherwise prepared from a subject other than a subject who is to receive or who ultimately receives the cell therapy, e.g., a first subject.

[1175] In such embodiments, the cells then are administered to a different subject, e.g., a second subject, of the same species. In some embodiments, the first and second subjects are genetically identical. In some embodiments, the first and second subjects are genetically similar. In some embodiments, the second subject expresses the same HLA class or supertype as the first subject.

[1176] In some embodiments, the subject has been treated with a therapeutic agent targeting the disease or condition, e.g. the tumor, prior to administration of the cells or composition containing the cells. In some aspects, the subject is refractory or non-responsive to the other therapeutic agent. In some embodiments, the subject has persistent or relapsed disease, e.g., following treatment with another therapeutic intervention, including chemotherapy, radiation, and/or hematopoietic stem cell transplantation (HSCT), e.g., allogenic HSCT. In some embodiments, the administration effectively treats the subject despite the subject having become resistant to another therapy.

[1177] In some embodiments, the subject is responsive to the other therapeutic agent, and treatment with the therapeutic agent reduces disease burden. In some aspects, the subject is initially responsive to the therapeutic agent, but exhibits a relapse of the disease or condition over time. In some embodiments, the subject has not relapsed. In some such embodiments, the subject is determined to be at risk for relapse, such as at a high risk of relapse, and thus the cells are administered prophylactically, e.g., to reduce the likelihood of or prevent relapse.

[1178] In some aspects, the subject has not received prior treatment with another therapeutic agent.

[1179] Among the diseases, conditions, and disorders for treatment with the provided compositions, cells, methods and uses are tumors, including solid tumors, hematologic malignancies, and melanomas, and infectious diseases, such as infection with a virus or other pathogen, e.g., HIV, HCV, HBV, CMV, and parasitic disease. In some embodiments, the disease or condition is a tumor, cancer, malignancy, neoplasm, or other proliferative disease or disorder. Such diseases include but are not limited to leukemia, lymphoma, e.g., chronic lymphocytic leukemia (CLL), acute-lymphoblastic leukemia (ALL), non-Hodgkin's lymphoma, acute myeloid leukemia, multiple myeloma, refractory follicular lymphoma, mantle cell lymphoma, indolent B cell lymphoma, B cell malignancies, cancers of the colon, lung, liver, breast, prostate, ovarian, skin, melanoma, bone, and brain cancer, ovarian cancer, epithelial cancers, renal cell carcinoma, pancreatic adenocarcinoma, Hodgkin lymphoma, cervical carcinoma, colorectal cancer, glioblastoma, neuroblastoma, Ewing sarcoma, medulloblastoma, osteosarcoma, synovial sarcoma, and/or mesothelioma.

[1180] In some embodiments, the disease or condition is an infectious disease or condition, such as, but not limited to, viral, retroviral, bacterial, and protozoal infections, immunodeficiency, Cytomegalovirus (CMV), Epstein-Barr virus (EBV), adenovirus, BK polyomavirus. In some embodiments, the disease or condition is an autoimmune or inflammatory disease or condition, such as arthritis, e.g., rheumatoid arthritis (RA), Type I diabetes, systemic lupus erythematosus (SLE), inflammatory bowel disease, psoriasis, scleroderma, autoimmune thyroid disease, Grave's disease, Crohn's disease multiple sclerosis, asthma, and/or a disease or condition associated with transplant.

[1181] In some embodiments, antigen associated with the disease, disorder or condition is selected from ROR1, B cell maturation antigen (BCMA), carbonic anhydrase 9 (CAIX), tEGFR, Her2/neu (receptor tyrosine kinase erbB2), L1-CAM, CD19, CD20, CD22, mesothelin, CEA, and hepatitis B surface antigen, anti-folate receptor, CD23, CD24, CD30, CD33, CD38, CD44, EGFR, epithelial glycoprotein 2 (EPG-2), epithelial glycoprotein 40 (EPG-40), EPHa2, erb-B2, erb-B3, erb-B4, erbB dimers, EGFR vIII, folate binding protein (FBP), FCRL5, FCRH5, fetal acetylcholine receptor, GD2, GD3, HMW-MAA, IL-22R-alpha, IL-13R-alpha2, kinase insert domain receptor (kdr), kappa light chain, Lewis Y, L1-cell adhesion molecule, (L1-CAM), Melanoma-associated antigen (MAGE)-A1, MAGE-A3, MAGE-A6, Preferentially expressed antigen of melanoma (PRAME), survivin, TAG72, B7-H6, IL-13 receptor alpha 2 (IL-13Ra2), CA9, GD3, HMW-MAA, CD171, G250/CAIX, HLA-AI MAGE A1, HLA-A2 NY-ESO-1, PSCA, folate receptor-a, CD44v6, CD44v7/8, avb6 integrin, 8H9, NCAM, VEGF receptors, 5T4, Foetal AchR, NKG2D ligands, CD44v6, dual antigen, a cancer-testes antigen, mesothelin, murine CMV, mucin 1 (MUC1), MUC16, PSCA, NKG2D, NY-ESO-1, MART-1, gp100, oncofetal antigen, ROR1, TAG72, VEGF-R2, carcinoembryonic antigen (CEA), Her2/neu, estrogen receptor, progesterone receptor, ephrinB2, CD123, c-Met, GD-2, O-acetylated GD2 (OGD2), CE7, Wilms Tumor 1 (WT-1), a cyclin, cyclin A2, CCL-1, CD138, a pathogen-specific antigen.

[1182] In some embodiments, the antigen associated with the disease or disorder is selected from the group consisting of orphan tyrosine kinase receptor ROR1, tEGFR, Her2, L1-CAM, CD19, CD20, CD22, mesothelin, CEA, and hepatitis B surface antigen, anti-folate receptor, CD23, CD24, CD30, CD33, CD38, CD44, EGFR, EGP-2, EGP-4, OEPHa2, ErbB2, 3, or 4, FBP, fetal acethycholine e receptor, GD2, GD3, HMW-MAA, IL-22R-alpha, IL-13R-alpha2, kdr, kappa light chain, Lewis Y, L1-cell adhesion molecule, MAGE-A1, mesothelin, MUC1, MUC16, PSCA, NKG2D Ligands, NY-ESO-1, MART-1, gp100, oncofetal antigen, ROR1, TAG72, VEGF-R2, carcinoembryonic antigen (CEA), prostate specific antigen, PSMA, Her2/neu, estrogen receptor, progesterone receptor, ephrinB2, CD123, CS-1, c-Met, GD-2, and MAGE A3 and/or biotinylated molecules, and/or molecules expressed by HIV, HCV, HBV or other pathogens.

[1183] In some embodiments, the cells are administered at a desired dosage, which in some aspects includes a desired dose or number of cells or cell type(s) and/or a desired ratio of cell types. Thus, the dosage of cells in some embodiments is based on a total number of cells (or number per kg body weight) and a desired ratio of the individual populations or sub-types, such as the CD4+ to CD8+ ratio. In some embodiments, the dosage of cells is based on a desired total number (or number per kg of body weight) of cells in the individual populations or of individual cell types. In some embodiments, the dosage is based on a combination of such features, such as a desired number of total cells, desired ratio, and desired total number of cells in the individual populations.

[1184] In some embodiments, the populations or sub-types of cells, such as CD8⁺ and CD4⁺ T cells, are administered at or within a tolerated difference of a desired dose of total cells, such as a desired dose of T cells. In some aspects, the desired dose is a desired number of cells or a desired number of cells per unit of body weight of the subject to whom the cells are administered, e.g., cells/kg. In some aspects, the desired dose is at or above a minimum number of cells or minimum number of cells per unit of body weight. In some aspects, among the total cells, administered at the desired dose, the individual populations or sub-types are present at or near a desired output ratio (such as CD4⁺ to CD8⁺ ratio), e.g., within a certain tolerated difference or error of such a ratio.

[1185] In some embodiments, the cells are administered at or within a tolerated difference of a desired dose of one or more of the individual populations or sub-types of cells, such as a desired dose of CD4+ cells and/or a desired dose of CD8+ cells. In some aspects, the desired dose is a desired number of cells of the sub-type or population, or a desired number of such cells per unit of body weight of the subject to whom the cells are administered, e.g., cells/kg. In some aspects, the desired dose is at or above a minimum number of cells of the population or sub-type, or minimum number of cells of the population or sub-type per unit of body weight.

[1186] Thus, in some embodiments, the dosage is based on a desired fixed dose of total cells and a desired ratio, and/or based on a desired fixed dose of one or more, e.g., each, of the individual sub-types or sub-populations. Thus, in some embodiments, the dosage is based on a desired fixed or minimum dose of T cells and a desired ratio of CD4⁺ to CD8⁺ cells, and/or is based on a desired fixed or minimum dose of CD4⁺ and/or CD8⁺ cells.

[1187] In certain embodiments, the cells, or individual populations of sub-types of cells, are administered to the subject at a range of about one million to about 100 billion cells, such as, e.g., 1 million to about 50 billion cells (e.g., about 5 million cells, about 25 million cells, about 500 million cells, about 1 billion cells, about 5 billion cells, about 20 billion cells, about 30 billion cells, about 40 billion cells, or a range defined by any two of the foregoing values), such as about 10 million to about 100 billion cells (e.g., about 20 million cells, about 30 million cells, about 40 million cells, about 60 million cells, about 70 million cells, about 80 million cells, about 90 million cells, about 10 billion cells, about 25 billion cells, about 50 billion cells, about 75 billion cells, about 90 billion cells, or a range defined by any two of the foregoing values), and in some cases about 100 million cells to about 50 billion cells (e.g., about 120 million cells, about 250 million cells, about 350 million cells, about 450 million cells, about 650 million cells, about 800 million cells, about 900 million cells, about 3 billion cells, about 30 billion cells, about 45 billion cells) or any value in between these ranges.

[1188] In some embodiments, the dose of total cells and/or dose of individual sub-populations of cells is within a range of between at or about 10⁴ and at or about 10⁹ cells/kilograms (kg) body weight, such as between 10⁵ and 10⁶ cells/kg body weight, for example, at or about 1×10⁵ cells/kg, 1.5×10⁵ cells/kg, 2×10⁵ cells/kg, or 1×10⁶ cells/kg body weight. For example, in some embodiments, the cells are administered at, or within a certain range of error of, between at or about 10⁴ and at or about 10⁹ T cells/kilograms (kg) body weight, such as between 10⁵ and 10⁶ T cells/kg body weight, for example, at or about 1×10⁵ T cells/kg, 1.5×10⁵ T cells/kg, 2×10⁵ T cells/kg, or 1×10⁶ T cells/kg body weight.

[1189] In some embodiments, the cells are administered at or within a certain range of error of between at or about 10⁴ and at or about 10⁹ CD4⁺ and/or CD8⁺ cells/kilograms (kg) body weight, such as between 10⁵ and 10⁶ CD4⁺ and/or CD8⁺ cells/kg body weight, for example, at or about 1×10⁵ CD4⁺ and/or CD8⁺ cells/kg, 1.5×10⁵ CD4⁺ and/or CD8⁺ cells/kg, 2×10⁵ CD4⁺ and/or CD8⁺ cells/kg, or 1×10⁶ CD4⁺ and/or CD8⁺ cells/kg body weight.

[1190] In some embodiments, the cells are administered at or within a certain range of error of, greater than, and/or at least about 1×10⁶, about 2.5×10⁶, about 5×10⁶, about 7.5×10⁶, or about 9×10⁶ CD4⁺ cells, and/or at least about 1×10⁶, about 2.5×10⁶, about 5×10⁶, about 7.5×10⁶, or about 9×10⁶ CD8+ cells, and/or at least about 1×10⁶, about 2.5×10⁶, about 5×10⁶, about 7.5×10⁶, or about 9×10⁶ T cells. In some embodiments, the cells are administered at or within a certain range of error of between about 10⁸ and 10¹² or between about 10¹⁰ and 10¹¹ T cells, between about 10⁸ and 10¹² or between about 10¹⁰ and 10¹¹ CD4⁺ cells, and/or between about 10⁸ and 10¹² or between about 10¹⁰ and 10¹¹ CD8⁺ cells.

[1191] In some embodiments, the cells are administered at or within a tolerated range of a desired output ratio of multiple cell populations or sub-types, such as CD4+ and CD8+ cells or sub-types. In some aspects, the desired ratio can be a specific ratio or can be a range of ratios. for example, in some embodiments, the desired ratio (e.g., ratio of CD4⁺ to CD8⁺ cells) is between at or about 5:1 and at or about 5:1 (or greater than about 1:5 and less than about 5:1), or between at or about 1:3 and at or about 3:1 (or greater than about 1:3 and less than about 3:1), such as between at or about 2:1 and at or about 1:5 (or greater than about 1:5 and less than about 2:1, such as at or about 5:1, 4.5:1, 4:1, 3.5:1, 3:1, 2.5:1, 2:1, 1.9:1, 1.8:1, 1.7:1, 1.6:1, 1.5:1, 1.4:1, 1.3:1, 1.2:1, 1.1:1, 1:1, 1:1.1, 1:1.2, 1:1.3, 1:1.4, 1:1.5, 1:1.6, 1:1.7, 1:1.8, 1:1.9:1:2, 1:2.5, 1:3, 1:3.5, 1:4, 1:4.5, or 1:5. In some aspects, the tolerated difference is within about 1%, about 2%, about 3%, about 4% about 5%, about 10%, about 15%, about 20%, about 25%, about 30%, about 35%, about 40%, about 45%, about 50% of the desired ratio, including any value in between these ranges.

[1192] For the prevention or treatment of disease, the appropriate dosage may depend on the type of disease to be treated, the type of cells or recombinant receptors, the severity and course of the disease, whether the cells are administered for preventive or therapeutic purposes, previous therapy, the subject's clinical history and response to the cells, and the discretion of the attending physician. The compositions and cells are in some embodiments suitably administered to the subject at one time or over a series of treatments.

[1193] The cells can be administered by any suitable means, for example, by bolus infusion, by injection, e.g., intravenous or subcutaneous injections, intraocular injection, periocular injection, subretinal injection, intravitreal injection, trans-septal injection, subscleral injection, intrachoroidal injection, intracameral injection, subconjectval injection, subconjuntival injection, sub-Tenon's injection, retrobulbar injection, peribulbar injection, or posterior juxtascleral delivery. In some embodiments, they are administered by parenteral, intrapulmonary, and intranasal, and, if desired for local treatment, intralesional administration. Parenteral infusions include intramuscular, intravenous, intraarterial, intraperitoneal, or subcutaneous administration. In some embodiments, a given dose is administered by a single bolus administration of the cells. In some embodiments, it is administered by multiple bolus administrations of the cells, for example, over a period of no more than 3 days, or by continuous infusion administration of the cells.

[1194] In some embodiments, the cells are administered as part of a combination treatment, such as simultaneously with or sequentially with, in any order, another therapeutic intervention, such as an antibody or engineered cell or receptor or agent, such as a cytotoxic or therapeutic agent. The cells in some embodiments are co-administered with one or more additional therapeutic agents or in connection with another therapeutic intervention, either simultaneously or sequentially in any order. In some contexts, the cells are co-administered with another therapy sufficiently close in time such that the cell populations enhance the effect of one or more additional therapeutic agents, or vice versa. In some embodiments, the cells are administered prior to the one or more additional therapeutic agents. In some embodiments, the cells are administered after the one or more additional therapeutic agents. In some embodiments, the one or more additional agents includes a cytokine, such as IL-2, for example, to enhance persistence. In some embodiments, the methods comprise administration of a chemotherapeutic agent.

[1195] Following administration of the cells, the biological activity of the engineered cell populations in some embodiments is measured, e.g., by any of a number of known methods. Parameters to assess include specific binding of an engineered or natural T cell or other immune cell to antigen, in vivo, e.g., by imaging, or ex vivo, e.g., by ELISA or flow cytometry. In certain embodiments, the ability of the engineered cells to destroy target cells can be measured using any suitable method known in the art, such as cytotoxicity assays described in, for example, Kochenderfer et al., J. Immunotherapy, 32(7): 689-702 (2009), and Herman et al. J. Immunological Methods, 285(1): 25-40 (2004). In certain embodiments, the biological activity of the cells is measured by assaying expression and/or secretion of one or more cytokines, such as CD 107a, IFNγ, IL-2, and TNF. In some aspects the biological activity is measured by assessing clinical outcome, such as reduction in tumor burden or load.

[1196] In certain embodiments, the engineered cells are further modified in any number of ways, such that their therapeutic or prophylactic efficacy is increased. For example, the engineered CAR or TCR expressed by the population can be conjugated either directly or indirectly through a linker to a targeting moiety. The practice of conjugating compounds, e.g., the CAR or TCR, to targeting moieties is known in the art. See, for instance, Wadwa et al., J. Drug Targeting 3: 111 (1995), and U.S. Pat. No. 5,087,616.

### V. DEFINITIONS

[1197] The term “about” as used herein refers to the usual error range for the respective value readily known to the skilled person in this technical field. Reference to “about” a value or parameter herein includes (and describes) embodiments that are directed to that value or parameter per se.

[1198] As used herein, the singular forms “a,” “an,” and “the” include plural referents unless the context clearly dictates otherwise. For example, “a” or “an” means “at least one” or “one or more.”

[1199] Throughout this disclosure, various aspects of the claimed subject matter are presented in a range format. It should be understood that the description in range format is merely for convenience and brevity and should not be construed as an inflexible limitation on the scope of the claimed subject matter. Accordingly, the description of a range should be considered to have specifically disclosed all the possible sub-ranges as well as individual numerical values within that range. For example, where a range of values is provided, it is understood that each intervening value, between the upper and lower limit of that range and any other stated or intervening value in that stated range is encompassed within the claimed subject matter. The upper and lower limits of these smaller ranges may independently be included in the smaller ranges, and are also encompassed within the claimed subject matter, subject to any specifically excluded limit in the stated range. Where the stated range includes one or both of the limits, ranges excluding either or both of those included limits are also included in the claimed subject matter. This applies regardless of the breadth of the range.

[1200] “Domain”, as used herein, is used to describe segments of a protein or nucleic acid. Unless otherwise indicated, a domain is not required to have any specific functional property.

[1201] As used herein, “percent (%) amino acid sequence identity” and “percent identity” when used with respect to an amino acid sequence (reference polypeptide sequence) is defined as the percentage of amino acid residues in a candidate sequence (e.g., a streptavidin mutein) that are identical with the amino acid residues in the reference polypeptide sequence, after aligning the sequences and introducing gaps, if necessary, to achieve the maximum percent sequence identity, and not considering any conservative substitutions as part of the sequence identity. Alignment for purposes of determining percent amino acid sequence identity can be achieved in various ways that are within the skill in the art, for instance, using publicly available computer software such as BLAST, BLAST-2, ALIGN or Megalign (DNASTAR) software. Those skilled in the art can determine appropriate parameters for aligning sequences, including any algorithms needed to achieve maximal alignment over the full length of the sequences being compared.

[1202] Calculations of homology or sequence identity between two sequences (the terms are used interchangeably herein) are performed as follows. The sequences are aligned for optimal comparison purposes (e.g., gaps can be introduced in one or both of a first and a second amino acid or nucleic acid sequence for optimal alignment and non-homologous sequences can be disregarded for comparison purposes). The optimal alignment is determined as the best score using the GAP program in the GCG software package with a Blossum 62 scoring matrix with a gap penalty of 12, a gap extend penalty of 4, and a frame shift gap penalty of 5. The amino acid residues or nucleotides at corresponding amino acid positions or nucleotide positions are then compared. When a position in the first sequence is occupied by the same amino acid residue or nucleotide as the corresponding position in the second sequence, then the molecules are identical at that position. The percent identity between the two sequences is a function of the number of identical positions shared by the sequences.

[1203] An amino acid substitution may include replacement of one amino acid in a polypeptide with another amino acid. Amino acids generally can be grouped according to the following common side-chain properties:
[1204] (1) hydrophobic: Norleucine, Met, Ala, Val, Leu, Ile;
[1205] (2) neutral hydrophilic: Cys, Ser, Thr, Asn, Gln;
[1206] (3) acidic: Asp, Glu;
[1207] (4) basic: His, Lys, Arg;
[1208] (5) residues that influence chain orientation: Gly, Pro;
[1209] (6) aromatic: Trp, Tyr, Phe.

[1210] Non-conservative amino acid substitutions will involve exchanging a member of one of these classes for another class.

[1211] “Modulator”, as used herein, refers to an entity, e.g., a drug, which can alter the activity (e.g., enzymatic activity, transcriptional activity, or translational activity), amount, distribution, or structure of a subject molecule or genetic sequence. In an embodiment, modulation comprises cleavage, e.g., breaking of a covalent or non-covalent bond, or the forming of a covalent or non-covalent bond, e.g., the attachment of a moiety, to the subject molecule. In an embodiment, a modulator alters the, three dimensional, secondary, tertiary, or quaternary structure, of a subject molecule. A modulator can increase, decrease, initiate, or eliminate a subject activity.

[1212] “Large molecule”, as used herein, refers to a molecule having a molecular weight of at least 2, 3, 5, 10, 20, 30, 40, 50, 60, 70, 80, 90, or 100 kD. Large molecules include proteins, polypeptides, nucleic acids, biologics, and carbohydrates.

[1213] “Polypeptide”, as used herein, refers to a polymer of amino acids having less than 100 amino acid residues. In an embodiment, it has less than 50, 20, or 10 amino acid residues.

[1214] “Non-homologous end joining” or “NHEJ”, as used herein, refers to ligation mediated repair and/or non-template mediated repair including, e.g., canonical NHEJ (cNHEJ), alternative NHEJ (altNHEJ), microhomology-mediated end joining (MMEJ), single-strand annealing (SSA), and synthesis-dependent microhomology-mediated end joining (SD-MMEJ).

[1215] “Reference molecule”, e.g., a reference Cas9 molecule or reference gRNA, as used herein, refers to a molecule to which a subject molecule, e.g., a subject Cas9 molecule of subject gRNA molecule, e.g., a modified or candidate Cas9 molecule is compared. For example, a Cas9 molecule can be characterized as having no more than 10% of the nuclease activity of a reference Cas9 molecule. Examples of reference Cas9 molecules include naturally occurring unmodified Cas9 molecules, e.g., a naturally occurring Cas9 molecule such as a Cas9 molecule of S. pyogenes, S. aureus, or S. thermophilus. In an embodiment, the reference Cas9 molecule is the naturally occurring Cas9 molecule having the closest sequence identity or homology with the Cas9 molecule to which it is being compared. In an embodiment, the reference Cas9 molecule is a sequence, e.g., a naturally occurring or known sequence, which is the parental form on which a change, e.g., a mutation has been made.

[1216] “Replacement”, or “replaced”, as used herein with reference to a modification of a molecule does not require a process limitation but merely indicates that the replacement entity is present.

[1217] “Small molecule”, as used herein, refers to a compound having a molecular weight less than about 2 kD, e.g., less than about 2 kD, less than about 1.5 kD, less than about 1 kD, or less than about 0.75 kD.

[1218] As used herein, a subject includes any living organism, such as humans and other mammals. Mammals include, but are not limited to, humans, and non-human animals, including farm animals, sport animals, rodents and pets. The term includes, but is not limited to, mammals (e.g., humans, other primates, pigs, rodents (e.g., mice and rats or hamsters), rabbits, guinea pigs, cows, horses, cats, dogs, sheep, and goats). In an embodiment, the subject is a human. In other embodiments, the subject is poultry.

[1219] As used herein, a composition refers to any mixture of two or more products, substances, or compounds, including cells. It may be a solution, a suspension, liquid, powder, a paste, aqueous, non-aqueous or any combination thereof.

[1220] As used herein, “enriching” when referring to one or more particular cell type or cell population, refers to increasing the number or percentage of the cell type or population, e.g., compared to the total number of cells in or volume of the composition, or relative to other cell types, such as by positive selection based on markers expressed by the population or cell, or by negative selection based on a marker not present on the cell population or cell to be depleted. The term does not require complete removal of other cells, cell type, or populations from the composition and does not require that the cells so enriched be present at or even near 100% in the enriched composition.

[1221] As used herein, a statement that a cell or population of cells is “positive” for a particular marker refers to the detectable presence on or in the cell of a particular marker, typically a surface marker. When referring to a surface marker, the term refers to the presence of surface expression as detected by flow cytometry, for example, by staining with an antibody that specifically binds to the marker and detecting said antibody, wherein the staining is detectable by flow cytometry at a level substantially above the staining detected carrying out the same procedure with an isotype-matched control or fluorescence minus one (FMO) gating control under otherwise identical conditions and/or at a level substantially similar to that for cell known to be positive for the marker, and/or at a level substantially higher than that for a cell known to be negative for the marker.

[1222] As used herein, a statement that a cell or population of cells is “negative” for a particular marker refers to the absence of substantial detectable presence on or in the cell of a particular marker, typically a surface marker. When referring to a surface marker, the term refers to the absence of surface expression as detected by flow cytometry, for example, by staining with an antibody that specifically binds to the marker and detecting said antibody, wherein the staining is not detected by flow cytometry at a level substantially above the staining detected carrying out the same procedure with an isotype-matched control or fluorescence minus one (FMO) gating control under otherwise identical conditions, and/or at a level substantially lower than that for cell known to be positive for the marker, and/or at a level substantially similar as compared to that for a cell known to be negative for the marker.

[1223] The term “vector,” as used herein, refers to a nucleic acid molecule capable of propagating another nucleic acid to which it is linked. The term includes the vector as a self-replicating nucleic acid structure as well as the vector incorporated into the genome of a host cell into which it has been introduced. Certain vectors are capable of directing the expression of nucleic acids to which they are operatively linked. Such vectors are referred to herein as “expression vectors.”

[1224] “X” as used herein in the context of an amino acid sequence, refers to any amino acid (e.g., any of the twenty natural amino acids) unless otherwise specified.

[1225] Unless defined otherwise, all terms of art, notations and other technical and scientific terms or terminology used herein are intended to have the same meaning as is commonly understood by one of ordinary skill in the art to which the claimed subject matter pertains. In some cases, terms with commonly understood meanings are defined herein for clarity and/or for ready reference, and the inclusion of such definitions herein should not necessarily be construed to represent a substantial difference over what is generally understood in the art.

[1226] All publications, including patent documents, scientific articles and databases, referred to in this application are incorporated by reference in their entirety for all purposes to the same extent as if each individual publication were individually incorporated by reference. If a definition set forth herein is contrary to or otherwise inconsistent with a definition set forth in the patents, applications, published applications and other publications that are herein incorporated by reference, the definition set forth herein prevails over the definition that is incorporated herein by reference.

[1227] The section headings used herein are for organizational purposes only and are not to be construed as limiting the subject matter described.

### VI. EXEMPLARY EMBODIMENTS

[1228] Among the provided embodiments are:

[1229] 1. A composition, comprising (a) an engineered immune cell comprising a recombinant receptor that specifically binds to an antigen; and (b) an agent capable of inducing a genetic disruption of a PDCD1 gene encoding a PD-1 polypeptide, wherein said agent is capable of inducing said genetic disruption in, and/or preventing or reducing PD-1 expression in, at least 70%, at least 75%, at least 80%, or at least or greater than 90% of the cells in the composition and/or at least 70%, at least 75%, at least 80%, or at least or greater than 90% of the cells in the composition that express the recombinant receptor.

[1230] 2. A composition, comprising (a) an engineered immune cell comprising a nucleic acid encoding a recombinant receptor that specifically binds to an antigen; and (b) an agent capable of inducing a genetic disruption of a PDCD1 gene encoding a PD-1 polypeptide, wherein said agent is capable of inducing said genetic disruption in, and/or preventing or reducing PD-1 expression in, at least 70%, at least 75%, at least 80%, or at least or greater than 90% of the cells in the composition and/or at least 70%, at least 75%, at least 80%, or at least or greater than 90%, of the cells in the composition that express the recombinant receptor.

[1231] 3. The composition of embodiment 1 or embodiment 2, wherein the engineered immune cell expresses the recombinant receptor on its surface.

[1232] 4. A composition, comprising a cell population containing an engineered immune cell that comprises (a) a recombinant receptor that specifically binds to an antigen; and (b) a genetic disruption of a PDCD1 gene encoding a PD-1 polypeptide, said genetic disruption preventing or reducing the expression of said PD-1 polypeptide, wherein:
[1233] at least about 70%, at least about 75%, or at least about 80% or at least or greater than about 90% of the cells in the composition contain the genetic disruption; do not express the endogenous PD-1 polypeptide; do not contain a contiguous PDCD1 gene, do not contain a PDCD1 gene, and/or do not contain a functional PDCD1 gene; and/or do not express a PD-1 polypeptide; and/or
[1234] at least about 70%, at least about 75%, or at least about 80% or at least or greater than about 90% of the cells in the composition that express the recombinant receptor contain the genetic disruption, do not express the endogenous PD-1 polypeptide, and/or do not express a PD-1 polypeptide.

[1235] 5. A composition, comprising a cell population containing an engineered immune cell that comprises (a) a recombinant receptor that specifically binds to an antigen, wherein the engineered immune cell is capable of inducing cytotoxicity, proliferating and/or secreting a cytokine upon binding of the recombinant receptor to said antigen; and (b) a genetic disruption of a PDCD1 gene encoding a PD-1 polypeptide, said genetic disruption capable of preventing or reducing the expression of said PD-1 polypeptide, optionally wherein said prevention or reduction is in at least at or about or greater than at or about 70%, 75%, 80%, 85%, or 90% of the cells in the composition and/or of the cells in the composition that express the recombinant receptor.

[1236] 6. A composition comprising a cell population containing a population of engineered immune cells, each comprising (a) a recombinant receptor that specifically binds to an antigen; and (b) a genetic disruption of a PDCD1 gene encoding a PD-1 polypeptide, wherein said genetic disruption is capable of preventing or reducing the expression of said PD-1 polypeptide, wherein:
[1237] the engineered immune cells, on average, exhibit expression and/or surface expression of the receptor at a level that is the same, about the same or substantially the same, as compared to the average expression and/or surface expression level, respectively, of said recombinant receptor in other cells in the composition that comprise the recombinant receptor and do not comprise the genetic disruption, or
[1238] the engineered immune cells do not express the PD-1 polypeptide and on average, exhibit expression and/or surface expression of the receptor at a level is the same, about the same, or substantially the same as compared to the average expression and/or surface level, respectively, in cells of the composition that comprise the recombinant receptor and that express the PD-1 polypeptide.

[1239] 7. The composition of any of embodiments 1-4 and 6, wherein the recombinant receptor is capable, upon incubation with the antigen, a cell expressing the antigen, and/or an antigen-receptor activating substance, of specifically binding to the antigen, of activating or stimulating the engineered T cell, of inducing cytotoxicity, or of inducing proliferation, survival, and/or cytokine secretion by the immune cell, optionally as measured in an in vitro assay, optionally in an in vitro assay, which optionally comprises incubation for 12, 24, 36, 48, or 60 hours, optionally in the presence of one or more cytokines.

[1240] 8. The composition of any of embodiments 1-4, 6 and 7, wherein the engineered immune cell is capable, upon incubation with the antigen, a cell expressing the antigen, and/or an antigen-receptor activating substance, of specifically binding to the antigen, of inducing cytotoxicity, proliferating, surviving, and/or secreting a cytokine, optionally as measured in an in vitro assay, which optionally comprises incubation for 12, 24, 36, 48, or 60 hours, optionally in the presence of one or more cytokines and optionally does or does not comprise exposing the immune cell to a PD-L1-expressing cell.

[1241] 9. The composition of embodiment 7 or embodiment 8, wherein:
[1242] the level or degree or extent or duration of the binding, cytotoxicity, proliferation, survival, or cytokine secretion is the same, about the same or substantially the same as compared to that detected or observed for an immune cell comprising the recombinant receptor but not comprising the genetic disruption of a PDCD1 gene, when assessed under the same conditions.

[1243] 10. The composition of any of embodiments 6 and 8-9, wherein the binding, cytotoxicity, proliferation, survival, and/or cytokine secretion is as measured, optionally in an in vitro assay, following withdrawal and re-exposure to the antigen, antigen-expressing cell, and/or substance.

[1244] 11. The composition of any of embodiments 1-10, wherein the immune cell is a primary cell from a subject.

[1245] 12. The composition of any of embodiments 1-11, wherein the immune cell is a human cell.

[1246] 13. The composition of any of embodiments 1-12, wherein the immune cell is a white blood cell.

[1247] 14. The composition of any of embodiments 1-13, wherein the immune cell is an NK cell or a T cell.

[1248] 15. The composition of embodiment 14, wherein the immune cell comprises a plurality of T cells comprising unfractionated T cells, comprises isolated CD8+ cells or is enriched for CD8+ T cells, or comprises isolated CD4+ T cells or is enriched for CD4+ cells, and/or is enriched for a subset thereof selected from the group consisting of naïve cells, effector memory cells, central memory cells, stem central memory cells, effector memory cells, and long-lived effector memory cells.

[1249] 16. The composition of embodiment 14 or embodiment 15, wherein the percentage, of T cells, or T cells expressing the receptor, and comprising the genetic disruption in the composition, that exhibit a non-activated, long-lived memory, or central memory phenotype, is the same or substantially the same as a population of cells the same or substantially the same as the composition but not containing the genetic disruption or but expressing the PD-1 polypeptide.

[1250] 17. The composition of any of embodiments 1-16, wherein the percentage of T cells in the composition exhibiting a non-activated, long-lived memory, or central memory phenotype is the same, about the same or substantially the same as compared to the percentage of T cells exhibiting the phenotype in a composition comprising T cells, comprising the recombinant receptor but not comprising the genetic disruption of a PDCD1 gene encoding a PD-1 polypeptide when assessed under the same conditions, which optionally is compared in the absence or presence of contacting or exposing the immune cell to PD-L1.

[1251] 18. The composition of embodiment 16 or embodiment 17, wherein the phenotype is as assessed following incubation of the composition at or about 37° C.±2° C. for at least 12 hours, 24 hours, 48 hours, 96 hours, 6 days, 12 days, 24 days, 36 days, 48 days or 60 days.

[1252] 19. The composition of embodiment 18, wherein the incubation is in vitro.

[1253] 20. The composition of embodiment 18 or embodiment 19, wherein at least a portion of the incubation is performed in the presence of a stimulating agent, which at least a portion is optionally for up to 1 hour, 6 hours, 24 hours, or 48 hours of the incubation.

[1254] 21. The composition of embodiment 20, wherein the stimulating agent is an agent capable of inducing proliferation of T cells, CD4+ T cells and/or CD8+ T cells.

[1255] 22. The composition of embodiment 20 or embodiment 21, wherein the stimulating agent is or comprises an antibody specific for CD3 an antibody specific for CD28 and/or a cytokine.

[1256] 23. The composition of any of embodiments 16-22, wherein the T cell comprising the recombinant receptor comprises one or more phenotypic markers selected from CCR7+, 4-1BB+(CD137+), TIM3+, CD27+, CD62L+, CD127+, CD45RA+, CD45RO−, t-bet^{low}, IL-7Ra+, CD95+, IL-2Rβ+, CXCR3+ or LFA-1+.

[1257] 24. The composition of any of embodiments 1-23, wherein the recombinant receptor is a functional non-TCR antigen receptor or a transgenic TCR.

[1258] 25. The composition of any of embodiments 1-23, wherein the recombinant receptor is a chimeric antigen receptor (CAR).

[1259] 26. The composition of embodiment 25, wherein the CAR comprises an antigen-binding domain that is an antibody or an antibody fragment.

[1260] 27. The composition of embodiment 26, wherein the antibody fragment is a single chain fragment.

[1261] 28. The composition of embodiment 26 or embodiment 27, wherein the antibody fragment comprises antibody variable regions joined by a flexible immunoglobulin linker.

[1262] 29. The composition of any of embodiments 26-28, wherein the fragment comprises an scFv.

[1263] 30. The composition of any of embodiments 1-29, wherein the antigen is associated with a disease or disorder.

[1264] 31. The composition of embodiment 30, wherein the disease or disorder is an infectious disease or condition, an autoimmune disease, an inflammatory disease or a tumor or a cancer.

[1265] 32. The composition of any of embodiments 1-31, wherein the recombinant receptor specifically binds to a tumor antigen.

[1266] 33. The composition of any of embodiments 1-32, wherein the antigen is selected from ROR1, Her2, L1-CAM, CD19, CD20, CD22, mesothelin, CEA, hepatitis B surface antigen, anti-folate receptor, CD23, CD24, CD30, CD33, CD38, CD44, EGFR, EGP-2, EGP-4, EPHa2, ErbB2, ErbB3, ErbB4, FBP, fetal acethycholine receptor, GD2, GD3, HMW-MAA, IL-22R-alpha, IL-13R-alpha2, kdr, kappa light chain, Lewis Y, L1-cell adhesion molecule (CD171), MAGE-A1, mesothelin, MUC1, MUC16, PSCA, NKG2D Ligands, NY-ESO-1, MART-1, gp100, oncofetal antigen, TAG72, VEGF-R2, carcinoembryonic antigen (CEA), prostate specific antigen, PSMA, estrogen receptor, progesterone receptor, ephrinB2, CD123, CS-1, c-Met, GD-2, MAGE A3, CE7, Wilms Tumor 1 (WT-1), cyclin A1 (CCNA1), BCMA and interleukin 12.

[1267] 34. The composition of any of embodiments 1-33, wherein the recombinant receptor comprises an intracellular signaling domain comprising an ITAM.

[1268] 35. The composition of embodiment 34, wherein the intracellular signaling domain comprises an intracellular domain of a CD3-zeta (CD3) chain.

[1269] 36. The composition of embodiment 34 or embodiment 35, wherein the recombinant receptor further comprises a costimulatory signaling region.

[1270] 37. The composition of embodiment 36, wherein the costimulatory signaling region comprises a signaling domain of CD28 or 4-1BB.

[1271] 38. The composition of any of embodiments 1-3 and 7-37, wherein the agent comprises at least one of (a) a least one gRNA having a targeting domain that is complementary with a target domain of a PDCD1 gene or (b) at least one nucleic acid encoding the at least one gRNA.

[1272] 39. The composition of any of embodiments 1-3 and 7-38, wherein the agent comprises at least one complex of a Cas9 molecule and a gRNA having a targeting domain that is complementary with a target domain of a PDCD1 gene.

[1273] 40. The composition of embodiment 38 or embodiment 39, wherein the guide RNA further comprises a first complementarity domain, a second complementarity domain that is complementary to the first complementarity domain, a proximal domain and optionally a tail domain.

[1274] 41. The composition of embodiment 40, wherein the first complementarity domain and second complementarity domain are joined by a linking domain.

[1275] 42. The composition of any of embodiments 41, wherein the guide RNA comprises a 3′ poly-A tail and a 5′ Anti-Reverse Cap Analog (ARCA) cap.

[1276] 43. The composition any of embodiments 39-42, wherein the Cas9 molecule is an enzymatically active Cas9.

[1277] 44. The composition of any of embodiments 38-43, wherein the at least one gRNA includes a targeting domain comprising a sequence selected from the group consisting of GUCUGGGCGGUGCUACAACU (SEQ ID NO:508), GCCCUGGCCAGUCGUCU (SEQ ID NO: 514), CGUCUGGGCGGUGCUACAAC (SEQ ID NO:1533), UGUAGCACCGCCCAGACGAC (SEQ ID NO:579), CGACUGGCCAGGGCGCCUGU (SEQ ID NO:582) and CACCUACCUAAGAACCAUCC (SEQ ID NO:723).

[1278] 45. The composition of any of embodiments 38-44, wherein the at least one gRNA includes a targeting domain comprising the sequence CGACUGGCCAGGGCGCCUGU (SEQ ID NO:582).

[1279] 46. The composition of any of embodiments 38-45, wherein the Cas9 molecule is a nickase and two Cas9 molecule/gRNA molecule complexes are guided by two different gRNA molecules to cleave the target domain with two single stranded breaks on opposing strands of the target domain.

[1280] 47. The composition of any of embodiments 39-46, wherein the Cas9 molecule is an S. aureus Cas9 molecule.

[1281] 48. The composition of any of embodiments 39-46, wherein the Cas9 molecule is an S. pyogenes Cas9.

[1282] 49. The composition of any of embodiments 39-48, wherein the Cas9 molecule lacks an active RuvC domain or an active HNH domain.

[1283] 50. The composition of any of embodiments 39-46, 48 and 49, wherein the Cas9 molecule is an S. pyogenes Cas9 molecule comprising a D10A mutation.

[1284] 51. The composition of any of embodiments 46-50, wherein the two gRNA molecules comprise targeting domains that are selected from the following pairs of targeting domains:

(SEQ ID NO: 582)

CGACUGGCCAGGGCGCCUGU
and

(SEQ ID NO: 508)

GUCUGGGCGGUGCUACAACU;

(SEQ ID NO: 582)

CGACUGGCCAGGGCGCCUGU
and

(SEQ ID NO: 510)

GGGCGGUGCUACAACUGGGC;

(SEQ ID NO: 582)

CGACUGGCCAGGGCGCCUGU
and

(SEQ ID NO: 511)

GGCCAGGAUGGUUCUUAGGU;

(SEQ ID NO: 582)

CGACUGGCCAGGGCGCCUGU
and

(SEQ ID NO: 512)

GGAUGGUUCUUAGGUAGGUG;

(SEQ ID NO: 582)

CGACUGGCCAGGGCGCCUGU
and

(SEQ ID NO: 576)

CGUCUGGGCGGUGCUACAAC;

(SEQ ID NO: 582)

CGACUGGCCAGGGCGCCUGU
and

(SEQ ID NO: 766)

CUACAACUGGGCUGGCGGCC;

(SEQ ID NO: 579)

UGUAGCACCGCCCAGACGAC
and

(SEQ ID NO: 511)

GGCCAGGAUGGUUCUUAGGU;

(SEQ ID NO: 579)

UGUAGCACCGCCCAGACGAC
and

(SEQ ID NO: 512)

GGAUGGUUCUUAGGUAGGUG;
or

(SEQ ID NO: 581)

ACCGCCCAGACGACUGGCCA
and

(SEQ ID NO: 511)

GGCCAGGAUGGUUCUUAGGU.

[1285] 52. The composition of any of embodiments 39-46 and 48-51, wherein the Cas9 molecule is an S. pyogenes Cas9 molecule comprising an N863A mutation.

[1286] 53. The composition of embodiment 52, wherein the two gRNA molecules comprise targeting domains that are selected from the following pairs of targeting domains:

(SEQ ID NO: 582)

CGACUGGCCAGGGCGCCUGU
and

(SEQ ID NO: 508)

GUCUGGGCGGUGCUACAACU;

(SEQ ID NO: 582)

CGACUGGCCAGGGCGCCUGU
and

(SEQ ID NO: 510)

GGGCGGUGCUACAACUGGGC;
or

(SEQ ID NO: 582)

CGACUGGCCAGGGCGCCUGU
and

(SEQ ID NO: 511)

GGCCAGGAUGGUUCUUAGGU.

[1287] 54. The composition of any of embodiments 1-53, wherein the genetic disruption comprises creation of a double strand break which is repaired by non-homologous end joining (NHEJ) to effect insertions and deletions (indels) in the PDCD1 gene.

[1288] 55. The composition of any of embodiments 1-54, wherein:
[1289] at least about 70%, at least about 75%, or at least about 80% of the cells in the composition contain the genetic disruption; do not express the endogenous PD-1 polypeptide; do not contain a contiguous PDCD1 gene, a PDCD1 gene, and/or a functional PDCD1 gene; and/or do not express a PD-1 polypeptide; and/or
[1290] at least about 70%, at least about 75%, or at least about 80% of the cells in the composition that express the recombinant receptor contain the genetic disruption, do not express the endogenous PD-1 polypeptide, or do not express a PD-1 polypeptide

[1291] 56. The composition of embodiment 4 or embodiment 55, wherein:
[1292] greater than 80%, 81%, 82%, 83%, 84%, 85%, 86%, 87%, 88%, 89%, 90%, 91%, 92%, 93%, 94%, or 95% of the cells in the composition contain the genetic disruption; do not express the endogenous PD-1 polypeptide; do not contain a contiguous PDCD1 gene, a PDCD1 gene, and/or a functional PDCD1 gene; and/or do not express a PD-1 polypeptide; and/or
[1293] greater than 80%, 81%, 82%, 83%, 84%, 85%, 86%, 87%, 88%, 89%, 90%, 91%, 92%, 93%, 94%, or 95% of the cells in the composition that express the recombinant receptor contain the genetic disruption, do not express the endogenous PD-1 polypeptide, or do not express a PD-1 polypeptide.

[1294] 57. The composition of any of embodiments 1-56, wherein:
[1295] at least at or about 90% of the cells in the composition, or cells in the composition that express the recombinant receptor, optionally as assessed by flow cytometry, contain the genetic disruption; do not express the endogenous PD-1 polypeptide; do not contain a contiguous PDCD1 gene, a PDCD1 gene, and/or a functional PDCD1 gene; and/or do not express a PD-1 polypeptide.

[1296] 58. The composition of any of embodiments 1-57, wherein both alleles of the gene in the genome are disrupted.

[1297] 59. The composition of any of embodiments 1-58, wherein cells in the composition and/or the cells in the composition that express the recombinant receptor are not enriched or selected for cells that contain the genetic disruption; do not express the endogenous PD-1 polypeptide; do not contain a contiguous PDCD1 gene, a PDCD1 gene, and/or a functional PDCD1 gene; and/or do not express a PD-1 polypeptide.

[1298] 60. The composition of any of embodiments 1-59, wherein no more than 2, no more than 5 or no more than 10 other genes in each cell in the composition, or each cell in the composition that expresses the recombinant receptor, on average, are disrupted or are disrupted by the agent.

[1299] 61. The composition of any of embodiments 1-60, wherein no other genes in each cell in the composition or each cell in the composition that expresses the recombinant receptor are disrupted in the cell or are disrupted by the agent.

[1300] 62. The composition of any of embodiments 1-61, further comprising a pharmaceutically acceptable buffer.

[1301] 63. The composition of any of embodiments 1-62, wherein, at a point in time following administration of the composition to a subject, optionally having the disease or condition;
[1302] cells expressing the recombinant receptor and not expressing PD-1 are detectable in the blood of the subject or blood-derived sample from the subject or in a tissue or biological sample of the subject;
[1303] cells containing the genetic disruption are detectable in the blood of the subject or a blood-derived sample from the subject or in a tissue or biological sample of the subject;
[1304] cells containing the genetic disruption and expressing the recombinant receptor are detectable in the blood of the subject or a blood-derived sample from the subject or in a tissue or biological sample of the subject.

[1305] 64. The composition of embodiment 63, wherein the time-point is at or about 7, 8, 9, 10, 11, 12, 13, or 14 days or 2, 3, 4, 5, 6, 7, 8, 9, 10, 11, or 12 weeks following administration.

[1306] 65. The composition of embodiment 63 or 64, wherein said cells detectable in the blood or sample are present at a concentration of at or about or at least at or about 1, 2, 3, 4, 5, 6, 7, 8, 9, 10, or 100 cells/microliter of blood and/or represent at least 10, 20, 25, 30, 35, 40, 45, or 50% or more of T cells in the blood.

[1307] 66. The composition of any of embodiments 1-65, wherein, following administration of the composition to a subject:
[1308] cells in the composition comprising the genetic disruption expand and/or persist in the subject at a rate, and/or for a time that, is at least as great as, optionally greater than, the expansion and/or persistence of T cells in the composition without the genetic disruption and/or as the expansion and/or persistence of T cells of a reference composition in which T cells express the recombinant receptor but do not comprising the deletion; and/or
[1309] cells in the composition comprising the genetic disruption and comprising the recombinant receptor expand and/or persist in the subject at a rate, and/or for a time that, is at least as great as, optionally greater than, the expansion and/or persistence of T cells in the composition without the genetic disruption and/or as the expansion and/or persistence of T cells of a reference composition in which T cells express the recombinant receptor but do not comprising the deletion.

[1310] 67. The composition of embodiment 66, wherein the rate or time is at least at or about 1.5-fold or 2-fold or 3-fold greater.

[1311] 68. A method of producing a genetically engineered immune cell, comprising:
[1312] (a) introducing into an immune cell a nucleic acid molecule encoding a recombinant receptor that specifically binds to an antigen; and
[1313] (b) introducing into the immune cell an agent capable of inducing a genetic disruption of a PDCD1 gene encoding a PD-1 polypeptide comprising one of (i) at least one gRNA having a targeting domain that is complementary with a target domain of the PDCD1 gene or (ii) at least one nucleic acid encoding the at least one gRNA.

[1314] 69. A method of producing a genetically engineered immune cell, comprising introducing into an immune cell expressing a recombinant receptor that specifically binds to an antigen an agent capable of inducing a genetic disruption of a PDCD1 gene encoding a PD-1 polypeptide comprising one of (i) at least one gRNA having a targeting domain that is complementary with a target domain of the PDCD1 gene or (ii) at least one nucleic acid encoding the at least one gRNA.

[1315] 70. The method of embodiment 68 or embodiment 69, wherein the agent comprises at least one complex of a Cas9 molecule and a gRNA having a targeting domain that is complementary with a target domain of a PDCD1 gene.

[1316] 71. The method of any of embodiments 68-70, wherein the guide RNA further comprises a first complementarity domain, a second complementarity domain that is complementary to the first complementarity domain, a proximal domain and optionally a tail domain.

[1317] 72. The method of embodiment 71, wherein the first complementarity domain and second complementarity domain are joined by a linking domain.

[1318] 73. The method of any of embodiments 68-72, wherein the guide RNA comprises a 3′ poly-A tail and a 5′ Anti-Reverse Cap Analog (ARCA) cap.

[1319] 74. The method of any of embodiments 68-73, wherein introduction comprises contacting the cells with the agent or a portion thereof, in vitro.

[1320] 75. The method of any of embodiments 68-74, wherein introduction of the agent comprises electroporation.

[1321] 76. The method of embodiment 74 or embodiment 75, wherein the introduction further comprises incubating the cells, in vitro prior to, during or subsequent to the contacting of the cells with the agent or prior to, during or subsequent to the electroporation.

[1322] 77. The method of any of embodiments 68-76, wherein the introduction in (a) comprises transduction and the introduction further comprises incubating the cells, in vitro, prior to, during or subsequent to the transduction.

[1323] 78. The method of embodiment 76 or embodiment 77, wherein at least a portion of the incubation is in the presence of (i) a cytokine selected from the group consisting of IL-2, IL-7, and IL-15, and/or (ii) a stimulating or activating agent or agents, optionally comprising anti-CD3 and/or anti-CD28 antibodies.

[1324] 79. The method of embodiment 77 or embodiment 78, wherein the introduction in (a) comprises: prior to transduction, incubating the cells with IL-2 at a concentration of 20 U/mL to 200 U/mL, optionally about 100 U/mL; IL-7 at a concentration of 1 ng/mL to 50 ng/mL, optionally about 10 ng/mL and/or IL-15 at a concentration of 0.5 ng/mL to 20 ng/mL, optionally about 5 ng/mL; and subsequent to transduction, incubating the cells with IL-2 at a concentration of 10 U/mL to 200 U/mL, optionally about 50 U/mL; IL-7 at a concentration of 0.5 ng/mL to 20 ng/mL, optionally about 5 ng/mL and/or IL-15 at a concentration of 0.1 ng/mL to 10 ng/mL, optionally about 0.5 ng/mL.

[1325] 80. The method of any of embodiments 76-79, wherein the incubation independently is carried out for up to or approximately 24, 36, 48 hours, 3, 4, 5, 6, 7, 8, 9, 10, 11, 12, 13, 14, 15, 16, 17, 18, 19, 20 or 21 days.

[1326] 81. The method of any of embodiments 76-80, wherein the incubation is independently carried out for 24-48 hours or 36-48 hours.

[1327] 82. The method of any of embodiments 74-81, wherein the cells are contacted with the agent at a ratio of approximately 1 microgram per 100,000, 200,000, 300,000, 400,000, or 500,000 cells.

[1328] 83. The method of any of embodiments 76-82, wherein:
[1329] the incubation is at a temperature of 30° C.±2° C. to 39° C.±2° C.; or
[1330] the incubation is at a temperature that is at least or about at least 30° C.±2° C., 32° C.±2° C., 34° C.±2° C. or 37° C.±2° C.

[1331] 84. The method of any of embodiments 76-83, wherein at least a portion of the incubation is at 30° C.±2° C. and at least a portion of the incubation is at 37° C.±2° C.

[1332] 85. The method of any of embodiments 68-84, wherein the method further comprises resting the cells between the introducing in (a) and the introducing in (b).

[1333] 86. The method of any of embodiments 70-85, wherein the Cas9 molecule is an enzymatically active Cas9.

[1334] 87. The method of any of embodiments 68-86, wherein the at least one gRNA includes a targeting domain comprising a sequence selected from the group consisting of GUCUGGGCGGUGCUACAACU (SEQ ID NO:508), GCCCUGGCCAGUCGUCU (SEQ ID NO: 514), CGUCUGGGCGGUGCUACAAC (SEQ ID NO:1533), UGUAGCACCGCCCAGACGAC (SEQ ID NO:579), CGACUGGCCAGGGCGCCUGU (SEQ ID NO:582) and CACCUACCUAAGAACCAUCC (SEQ ID NO:723).

[1335] 88. The method of any of embodiments 68-87, wherein the at least one gRNA includes a targeting domain comprising the sequence CGACUGGCCAGGGCGCCUGU (SEQ ID NO:582).

[1336] 89. The method of any of embodiments 68-79, wherein the Cas9 molecule is a nickase and two Cas9 molecule/gRNA molecule complexes are guided by two different gRNA molecules to cleave the target domain with two single stranded breaks on opposing strands of the target domain.

[1337] 90. The method of any of embodiments 70-89, wherein the Cas9 molecule is an S. aureus Cas9 molecule.

[1338] 91. The method of any of embodiments 70-90, wherein the Cas9 molecule is an S. pyogenes Cas9.

[1339] 92. The method of any of embodiments 70-91, wherein the Cas9 molecule lacks an active RuvC domain or an active HNH domain.

[1340] 93. The method of any of embodiments 70-89, 91 and 92, wherein the Cas9 molecule is an S. pyogenes Cas9 molecule comprising a D10A mutation.

[1341] 94. The method of any of embodiments 89-93, wherein the two gRNA molecules comprise targeting domains that are selected from the following pairs of targeting domains:

(SEQ ID NO: 582)

CGACUGGCCAGGGCGCCUGU
and

(SEQ ID NO: 508)

GUCUGGGCGGUGCUACAACU;

(SEQ ID NO: 582)

CGACUGGCCAGGGCGCCUGU
and

(SEQ ID NO: 510)

GGGCGGUGCUACAACUGGGC;

(SEQ ID NO: 582)

CGACUGGCCAGGGCGCCUGU
and

(SEQ ID NO: 511)

GGCCAGGAUGGUUCUUAGGU;

(SEQ ID NO: 582)

CGACUGGCCAGGGCGCCUGU
and

(SEQ ID NO: 512)

GGAUGGUUCUUAGGUAGGUG;

(SEQ ID NO: 582)

CGACUGGCCAGGGCGCCUGU
and

(SEQ ID NO: 576)

CGUCUGGGCGGUGCUACAAC;

(SEQ ID NO: 582)

CGACUGGCCAGGGCGCCUGU
and

(SEQ ID NO: 766)

CUACAACUGGGCUGGCGGCC;

(SEQ ID NO: 579)

UGUAGCACCGCCCAGACGAC
and

(SEQ ID NO: 511)

GGCCAGGAUGGUUCUUAGGU;

(SEQ ID NO: 579)

UGUAGCACCGCCCAGACGAC
and

(SEQ ID NO: 512)

GGAUGGUUCUUAGGUAGGUG;
or

(SEQ ID NO: 581)

ACCGCCCAGACGACUGGCCA
and

(SEQ ID NO: 511)

GGCCAGGAUGGUUCUUAGGU.

[1342] 95. The method of any of embodiments 70-89 and 91-94, wherein the Cas9 molecule is an S. pyogenes Cas9 molecule comprising an N863A mutation.

[1343] 96. The method of embodiment 94, wherein the two gRNA molecules comprise targeting domains that are selected from the following pairs of targeting domains:

(SEQ ID NO: 582)

CGACUGGCCAGGGCGCCUGU
and

(SEQ ID NO: 508)

GUCUGGGCGGUGCUACAACU;

(SEQ ID NO: 582)

CGACUGGCCAGGGCGCCUGU
and

(SEQ ID NO: 510)

GGGCGGUGCUACAACUGGGC;
or

(SEQ ID NO: 582)

CGACUGGCCAGGGCGCCUGU
and

(SEQ ID NO: 511)

GGCCAGGAUGGUUCUUAGGU.

[1344] 97. The method of any of embodiments 68-96, wherein the genetic disruption comprises creation of a double strand break which is repaired by non-homologous end joining (NHEJ) to effect insertions and deletions (indels) in the PDCD1 gene.

[1345] 98. The method of any of embodiments 68-97, wherein the recombinant receptor is a functional non-TCR antigen receptor or a transgenic TCR.

[1346] 99. The method of any of embodiments 68-98, wherein the recombinant receptor is a chimeric antigen receptor (CAR).

[1347] 100. The method of embodiment 99, wherein the CAR comprises an antigen-binding domain that is an antibody or an antibody fragment.

[1348] 101. The method of embodiment 100, wherein the antibody fragment is a single chain fragment.

[1349] 102. The method of embodiment 100 or embodiment 101, wherein the antibody fragment comprises antibody variable regions joined by a flexible immunoglobulin linker.

[1350] 103. The method of any of embodiments 100-102, wherein the fragment comprises an scFv.

[1351] 104. The method of any of embodiments 100-103, wherein the antigen is associated with a disease or disorder.

[1352] 105. The method of embodiment 104, wherein the disease or disorder is an infectious disease or condition, an autoimmune disease, an inflammatory disease or a tumor or a cancer.

[1353] 106. The method of any of embodiments 68-105, wherein the recombinant receptor specifically binds to a tumor antigen.

[1354] 107. The method of any of embodiments 68-106, wherein the antigen is selected from ROR1, Her2, L1-CAM, CD19, CD20, CD22, mesothelin, CEA, hepatitis B surface antigen, anti-folate receptor, CD23, CD24, CD30, CD33, CD38, CD44, EGFR, EGP-2, EGP-4, EPHa2, ErbB2, ErbB3, ErbB4, FBP, fetal acethycholine e receptor, GD2, GD3, HMW-MAA, IL-22R-alpha, IL-13R-alpha2, kdr, kappa light chain, Lewis Y, L1-cell adhesion molecule (CD171), MAGE-A1, mesothelin, MUC1, MUC16, PSCA, NKG2D Ligands, NY-ESO-1, MART-1, gp100, oncofetal antigen, TAG72, VEGF-R2, carcinoembryonic antigen (CEA), prostate specific antigen, PSMA, estrogen receptor, progesterone receptor, ephrinB2, CD123, CS-1, c-Met, GD-2, MAGE A3, CE7, Wilms Tumor 1 (WT-1), cyclin A1 (CCNA1), BCMA and interleukin 12.

[1355] 108. The method of any of embodiments 68-107, wherein the recombinant receptor comprises an intracellular signaling domain comprising an ITAM.

[1356] 109. The method of embodiment 108, wherein the intracellular signaling domain comprises an intracellular domain of a CD3-zeta (CD3) chain.

[1357] 110. The method of embodiment 108 or embodiment 109, wherein the recombinant receptor further comprises a costimulatory signaling region.

[1358] 111. The method of embodiment 110, wherein the costimulatory signaling region comprises a signaling domain of CD28 or 4-1BB.

[1359] 112. The method of any of embodiments 68-111, wherein the nucleic acid encoding the recombinant receptor is a viral vector.

[1360] 113. The method of embodiment 112, wherein the viral vector is a retroviral vector. 114. The method of embodiment 112 or embodiment 113, wherein the viral vector is a lentiviral vector or a gammaretroviral vector.

[1361] 115. The method of any of embodiments 68-114, wherein introduction of the nucleic acid encoding the recombinant vector is by transduction, which optionally is retroviral transduction.

[1362] 116. The method of any of embodiments 68-115, wherein the immune cell is a primary cell from a subject.

[1363] 117. The method of any of embodiments 68-116, wherein the immune cell is a human cell.

[1364] 118. The method of any of embodiments 68-117, wherein the immune cell is a white blood cell.

[1365] 119. The method of any of embodiments 68-118, wherein the immune cell is an NK cell or T cell.

[1366] 120. The method of embodiment 119, wherein the immune cell is a T cell that is an unfractionated T cell, isolated CD8+ T cell, or isolated CD4+ T cell.

[1367] 121. The method of any of embodiments 68-120, that is performed on a plurality of immune cells.

[1368] 122. The method of any of embodiments 68-121, wherein subsequent to introducing the agent and introducing the recombinant receptor, cells are not enriched or selected for (a) cells containing the genetic disruption or not expressing the endogenous PD-1 polypeptide, (b) cells expressing the recombinant receptor or both (a) and (b).

[1369] 123. The method of any of embodiments 68-122, further comprising enriching or selecting for (a) cells containing the genetic disruption or not expressing the endogenous PD-1 polypeptide, (b) cells expressing the recombinant receptor or for both (a) and (b).

[1370] 124. The method of any of embodiments 68-123, further comprising incubating the cells at or at about 37° C.±2° C.

[1371] 125. The method of embodiment 124, wherein the incubation is carried out for a time between at or about 1 hour and at or about 96 hours, between at or about 4 hours and at or about 72 hours, between at or about 8 hours and at or about 48 hours, between at or about 12 hours and at or about 36 hours, between at or about 6 hours and at or about 24 hours, between at or about 36 hours and at or about 96 hours, inclusive.

[1372] 126. The method of embodiment 125, wherein the incubation or a portion of the incubation is performed in the presence of a stimulating agent.

[1373] 127. The method of embodiment 126, wherein the stimulating agent is an agent capable of inducing proliferation of T cells, CD4+ T cells and/or CD8+ T cells.

[1374] 128. The method of embodiment 126 or embodiment 127, wherein the stimulating agent is or comprises an antibody specific for CD3 an antibody specific for CD28 and/or a cytokine.

[1375] 129. The method of any of embodiments 68-128, further comprising formulating cells produced by the method in a pharmaceutically acceptable buffer.

[1376] 130. The method of any of embodiments 68-129, wherein the method produces a population of cells in which:
[1377] at least about 70%, at least about 75%, or at least about 80% of the cells both 1) contain the genetic disruption; do not express the endogenous PD-1 polypeptide; do not contain a contiguous PDCD1 gene, a PDCD1 gene, and/or a functional PDCD1 gene; and/or do not express a PD-1 polypeptide; and 2) express the recombinant receptor; or
[1378] at least about 70%, at least about 75%, or at least about 80% of the cells that express the recombinant receptor contain the genetic disruption, do not express the endogenous PD-1 polypeptide, or do not express a PD-1 polypeptide.

[1379] 131. The method of any of embodiments 68-130, wherein the method produces a population of cells in which:
[1380] greater than 80%, 81%, 82%, 83%, 84%, 85%, 86%, 87%, 88%, 89%, 90%, 91%, 92%, 93%, 94%, or 95% of the cells both 1) contain the genetic disruption; do not express the endogenous PD-1 polypeptide; do not contain a contiguous PDCD1 gene, a PDCD1 gene, and/or a functional PDCD1 gene; and/or do not express a PD-1 polypeptide and 2) express the recombinant receptor; and/or
[1381] greater than 80%, 81%, 82%, 83%, 84%, 85%, 86%, 87%, 88%, 89%, 90%, 91%, 92%, 93%, 94%, or 95% of the cells that express the recombinant receptor contain the genetic disruption, do not express the endogenous PD-1 polypeptide, or do not express a PD-1 polypeptide.

[1382] 132. The method of any of embodiments 68-131, wherein both alleles of the gene in the genome are disrupted.

[1383] 133. A genetically engineered immune cell produced by the method of any of embodiments 68-132.

[1384] 134. A plurality of genetically engineered immune cells produced by the method of any of embodiments 68-132.

[1385] 135. The plurality of genetically engineered immune cells of embodiment 134, wherein:
[1386] at least about 70%, at least about 75%, or at least about 80% of the cells both 1) contain the genetic disruption; do not express the endogenous PD-1 polypeptide; do not contain a contiguous PDCD1 gene, a PDCD1 gene, and/or a functional PDCD1 gene; and/or do not express a PD-1 polypeptide; and 2) express the recombinant receptor; or
[1387] at least about 70%, at least about 75%, or at least about 80% of the cells that express the recombinant receptor contain the genetic disruption, do not express the endogenous PD-1 polypeptide, or do not express a PD-1 polypeptide.

[1388] 136. The plurality of genetically engineered immune cells of embodiment 134 or embodiment 135, wherein:
[1389] greater than 80%, 81%, 82%, 83%, 84%, 85%, 86%, 87%, 88%, 89%, 90%, 91%, 92%, 93%, 94%, or 95% of the cells both 1) contain the genetic disruption; do not express the endogenous PD-1 polypeptide; do not contain a contiguous PDCD1 gene, a PDCD1 gene, and/or a functional PDCD1 gene; and/or do not express a PD-1 polypeptide and 2) express the recombinant receptor; and/or
[1390] greater than 80%, 81%, 82%, 83%, 84%, 85%, 86%, 87%, 88%, 89%, 90%, 91%, 92%, 93%, 94%, or 95% of the cells that express the recombinant receptor contain the genetic disruption, do not express the endogenous PD-1 polypeptide, or do not express a PD-1 polypeptide.

[1391] 137. A composition comprising the genetically engineered immune cell of embodiment 133 or the plurality of genetically engineered immune cells of any of embodiments 134-136, and optionally a pharmaceutically acceptable buffer.

[1392] 138. A method of treatment, comprising administering the composition of any of embodiments 1-67 and 137 to a subject having a disease or condition.

[1393] 139. The method of embodiment 138, wherein the recombinant receptor specifically binds to an antigen associated with the disease or condition.

[1394] 140. The method of embodiment 138 or embodiment 139, wherein the disease or condition is a cancer, a tumor, an autoimmune disease or disorder, or an infectious disease.

[1395] 141. The method of embodiment 140, wherein the cancer or tumor is leukemia, lymphoma, chronic lymphocytic leukemia (CLL), acute-lymphoblastic leukemia (ALL), non-Hodgkin's lymphoma, acute myeloid leukemia, multiple myeloma, refractory follicular lymphoma, mantle cell lymphoma, indolent B cell lymphoma, B cell malignancies, colon cancer, lung cancer, liver cancer, breast cancer, prostate cancer, ovarian cancer, skin cancer, melanoma cancer, bone cancer, and brain cancer, ovarian cancer, epithelial cancers, renal cell carcinoma, pancreatic adenocarcinoma, Hodgkin lymphoma, cervical carcinoma, colorectal cancer, glioblastoma, neuroblastoma, Ewing sarcoma, medulloblastoma, osteosarcoma, synovial sarcoma, and/or mesothelioma.

[1396] 142. The method of any of embodiments 139-141, wherein the antigen is selected from the group consisting of orphan tyrosine kinase receptor ROR1, tEGFR, Her2, L1-CAM, CD19, CD20, CD22, mesothelin, CEA, hepatitis B surface antigen, anti-folate receptor, CD23, CD24, CD30, CD33, CD38, CD44, EGFR, EGP-2, EGP-4, EPHa2, ErbB2, 3, or 4, FBP, fetal acethycholine e receptor, GD2, GD3, HMW-MAA, IL-22R-alpha, IL-13R-alpha2, kdr, kappa light chain, Lewis Y, L1-cell adhesion molecule, MAGE-A1, mesothelin, MUC1, MUC16, PSCA, NKG2D Ligands, NY-ESO-1, MART-1, gp100, oncofetal antigen, ROR1, TAG72, VEGF-R2, carcinoembryonic antigen (CEA), prostate specific antigen, PSMA, Her2/neu, estrogen receptor, progesterone receptor, ephrinB2, CD123, CS-1, c-Met, GD-2, MAGE A3, CE7, Wilms Tumor 1 (WT-1), cyclin A1 (CCNA1), BCMA and interleukin 12.

[1397] 143. The method of any of embodiments 139-142, wherein the antigen is CD19 or BCMA.

[1398] 144. The method of any of embodiments 138-143, wherein the engineered cell administered to the subject has reduced and/or eliminated expression of PD-1 1 day, 2 days, 3 days, 4 days, 5 days, 6 days, 7 days, 10 days, 14 days, one month, two months, or more after administration.

[1399] 145. The method of any of embodiments 138-144, wherein the engineered cell administered to the subject persists in the subject for at least 1 day, 2 days, 3 days, 4 days, 5 days, 6 days, 7 days, 10 days, 14 days, one month, two months, or more after administration.

[1400] 146 The method of embodiment any of embodiments 138-145, wherein, at a point in time following administration of the composition:
[1401] cells expressing the recombinant receptor and not expressing PD-1 are detectable in the blood of the subject or blood-derived sample from the subject or in a tissue or biological sample of the subject;
[1402] cells containing the genetic disruption are detectable in the blood of the subject or a blood-derived sample from the subject or in a tissue or biological sample of the subject;
[1403] cells containing the genetic disruption and expressing the recombinant receptor are detectable in the blood of the subject or a blood-derived sample from the subject or in a tissue or biological sample of the subject.

[1404] 147. The method of any of embodiments 138-146, wherein the time-point is at or about 7, 8, 9, 10, 11, 12, 13, or 14 days or 2, 3, 4, 5, 6, 7, 8, 9, 10, 11, or 12 weeks following administration.

[1405] 148. The method of embodiment 138-147, wherein said cells detectable in the blood or sample are present at a concentration of at or about or at least at or about 1, 2, 3, 4, 5, 6, 7, 8, 9, 10, or 100 cells/microliter of blood and/or represent at least 10, 20, 25, 30, 35, 40, 45, or 50% or more of T cells in the blood.

[1406] 149. The method of any of embodiments 138-148, wherein, following administration:
[1407] cells in the composition comprising the genetic disruption expand and/or persist in the subject at a rate, and/or for a time that, is at least as great as, optionally greater than, the expansion and/or persistence of T cells in the composition without the genetic disruption and/or as the expansion and/or persistence of T cells of a reference composition in which T cells express the recombinant receptor but do not comprising the deletion; and/or
[1408] cells in the composition comprising the genetic disruption and comprising the recombinant receptor expand and/or persist in the subject at a rate, and/or for a time that, is at least as great as, optionally greater than, the expansion and/or persistence of T cells in the composition without the genetic disruption and/or as the expansion and/or persistence of T cells of a reference composition in which T cells express the recombinant receptor but do not comprising the deletion.

[1409] 150. The method of embodiment 149, wherein the rate or time is at least at or about 1.5-fold or 2-fold or 3-fold greater.

[1410] 151. The method of any of embodiments 140-150, wherein the tumor is a solid tumor.

[1411] 152. The method of any of embodiments 140-151, wherein the tumor is not a B cell-derived tumor, is not a leukemia and/or is not a lymphoma.

[1412] 153. The method of any of embodiments 140-152, wherein the tumor or cells thereof express or have been observed to express a ligand for PD-1.

[1413] 154. A pharmaceutical composition comprising an engineered immune cell that comprises (a) a recombinant receptor that specifically binds to an antigen; and (b) a genetic disruption of a PDCD1 gene encoding a PD-1 polypeptide, said genetic disruption preventing or reducing the expression of said PD-1 polypeptide, wherein the engineered cell has a phenotype of reduced and/or eliminated expression of PD-1 prior to administration to a subject and wherein the cells maintain the phenotype for 1 day, 2 days, 3 days, 4 days, 5 days, 6 days, 7 days, 10 days, 14 days, one month, two months, or more after administration to the subject.

[1414] 155. A composition of any of embodiments 1-67, 137 and 154 for use in treating a disease or condition in a subject.

[1415] 156. The composition for use of embodiment 155, wherein the recombinant receptor specifically binds to an antigen associated with the disease or condition.

[1416] 157. The composition for use of embodiment 155 or embodiment 156, wherein the disease or condition is a cancer, a tumor, an autoimmune disease or disorder, or an infectious disease.

[1417] 158. The composition for use of any of embodiments 155-157, wherein the disease or condition is a cancer or tumor, which is a leukemia, lymphoma, chronic lymphocytic leukemia (CLL), acute-lymphoblastic leukemia (ALL), non-Hodgkin's lymphoma, acute myeloid leukemia, multiple myeloma, refractory follicular lymphoma, mantle cell lymphoma, indolent B cell lymphoma, B cell malignancies, colon cancer, lung cancer, liver cancer, breast cancer, prostate cancer, ovarian cancer, skin cancer, melanoma cancer, bone cancer, and brain cancer, ovarian cancer, epithelial cancers, renal cell carcinoma, pancreatic adenocarcinoma, Hodgkin lymphoma, cervical carcinoma, colorectal cancer, glioblastoma, neuroblastoma, Ewing sarcoma, medulloblastoma, osteosarcoma, synovial sarcoma, and/or mesothelioma.

[1418] 159. The composition for use of any of embodiments 155-158, wherein the antigen is selected from the group consisting of orphan tyrosine kinase receptor ROR1, tEGFR, Her2, L1-CAM, CD19, CD20, CD22, mesothelin, CEA, hepatitis B surface antigen, anti-folate receptor, CD23, CD24, CD30, CD33, CD38, CD44, EGFR, EGP-2, EGP-4, EPHa2, ErbB2, 3, or 4, FBP, fetal acethycholine e receptor, GD2, GD3, HMW-MAA, IL-22R-alpha, IL-13R-alpha2, kdr, kappa light chain, Lewis Y, L1-cell adhesion molecule, MAGE-A1, mesothelin, MUC1, MUC16, PSCA, NKG2D Ligands, NY-ESO-1, MART-1, gp100, oncofetal antigen, ROR1, TAG72, VEGF-R2, carcinoembryonic antigen (CEA), prostate specific antigen, PSMA, Her2/neu, estrogen receptor, progesterone receptor, ephrinB2, CD123, CS-1, c-Met, GD-2, MAGE A3, CE7, Wilms Tumor 1 (WT-1), cyclin A1 (CCNA1), BCMA and interleukin 12.

[1419] 160. The composition for use of any of embodiments 155-159, wherein the antigen is CD19 or BCMA.

[1420] 161. The composition for use of any of embodiments 155-160, wherein, following administration of the composition to subject, one or more cells containing the genetic disruption, and optionally containing the recombinant receptor, persists in, and/or is detectable in a tissue or biological sample of, the subject at a time that is at least at or about 1 day, 2 days, 3 days, 4 days, 5 days, 6 days, 7 days, 10 days, 14 days, one month, two months, or more after administration; and/or at least 50, 60, 70, 80, 85, or 90% of the T cells, or T cells expressing the recombinant receptor, that are detectable in a biological sample or tissue from the subject at a time that is at least at or about 1 day, 2 days, 3 days, 4 days, 5 days, 6 days, 7 days, 10 days, 14 days, one month, two months, or more after administration contain the genetic disruption.

[1421] 162. A method of altering a T cell comprising contacting the T cell with one or more Cas9 molecule/gRNA molecule complexes, wherein the gRNA molecule(s) in the one or more Cas9 molecule/gRNA molecule complexes comprise a targeting domain which is complementary with a target domain from the PDCD1 gene.

[1422] 163. A method of altering a T cell comprising contacting the T cell with at least two Cas9 molecule/gRNA molecule complexes, each complex comprising a gRNA molecule comprising a targeting domain which is complementary with a target domain from the PDCD1 gene.

[1423] 164. The method of embodiment 162 or embodiment 163, wherein the T cell is from a subject suffering from cancer.

[1424] 165. The method of embodiment 164, wherein the cancer is selected from the group consisting of: lymphoma, chronic lymphocytic leukemia (CLL), B cell acute lymphocytic leukemia (B-ALL), acute lymphoblastic leukemia, acute myeloid leukemia, non-Hodgkin's lymphoma (NHL), diffuse large cell lymphoma (DLCL), multiple myeloma, renal cell carcinoma (RCC), neuroblastoma, colorectal cancer, breast cancer, ovarian cancer, melanoma, sarcoma, prostate cancer, lung cancer, esophageal cancer, hepatocellular carcinoma, pancreatic cancer, astrocytoma, mesothelioma, head and neck cancer, and medulloblastoma.

[1425] 166. The method of any of embodiments 162-165, wherein the T cell is from a subject having cancer or which could otherwise benefit from a mutation at a T cell target position of the PDCD1 gene.

[1426] 167. The method of any of embodiments 162-166, wherein the contacting is performed ex vivo.

[1427] 168. The method of any of embodiments 162-167, wherein the T cell comprises a recombinant receptor.

[1428] 169. The method of any of embodiments 162-168, further comprising contacting the T cell with a nucleic acid encoding a recombinant receptor under conditions to introduce the nucleic acid into the cell.

[1429] 170. The method of embodiment 168 or embodiment 169, wherein the recombinant receptor is a functional non-TCR antigen receptor or a transgenic TCR.

[1430] 171. The method of any of embodiments 168-170, wherein the recombinant receptor is a chimeric antigen receptor (CAR).

[1431] 172. The method of embodiment 171, wherein the CAR comprises an antigen-binding domain that is an antibody or an antibody fragment.

[1432] 173. The method of embodiment 172, wherein the antibody fragment is a single chain fragment.

[1433] 174. The method of embodiment 172 or embodiment 173, wherein the antibody fragment comprises antibody variable regions joined by a flexible immunoglobulin linker.

[1434] 175. The method of any of embodiments 172-174, wherein the fragment comprises an scFv.

[1435] 176. The method of any of embodiments 172-175, wherein the antigen is associated with a disease or disorder.

[1436] 177. The method of embodiment 176, wherein the disease or disorder is an infectious disease or condition, an autoimmune disease, an inflammatory disease or a tumor or a cancer.

[1437] 178. The method of any of embodiments 168-177, wherein the recombinant receptor specifically binds to a tumor antigen.

[1438] 179. The method of any of embodiments 171-178, wherein the antigen is selected from ROR1, Her2, L1-CAM, CD19, CD20, CD22, mesothelin, CEA, hepatitis B surface antigen, anti-folate receptor, CD23, CD24, CD30, CD33, CD38, CD44, EGFR, EGP-2, EGP-4, EPHa2, ErbB2, ErbB3, ErbB4, FBP, fetal acethycholine e receptor, GD2, GD3, HMW-MAA, IL-22R-alpha, IL-13R-alpha2, kdr, kappa light chain, Lewis Y, L1-cell adhesion molecule (CD171), MAGE-A1, mesothelin, MUC1, MUC16, PSCA, NKG2D Ligands, NY-ESO-1, MART-1, gp100, oncofetal antigen, TAG72, VEGF-R2, carcinoembryonic antigen (CEA), prostate specific antigen, PSMA, estrogen receptor, progesterone receptor, ephrinB2, CD123, CS-1, c-Met, GD-2, MAGE A3, CE7, Wilms Tumor 1 (WT-1), cyclin A1 (CCNA1), BCMA and interleukin 12.

[1439] 180. The method of any of embodiments 168-179, wherein the recombinant receptor comprises an intracellular signaling domain comprising an ITAM.

[1440] 181. The method of embodiment 180, wherein the intracellular signaling domain comprises an intracellular domain of a CD3-zeta (CD3) chain.

[1441] 182. The method of embodiment 180 or embodiment 181, wherein the recombinant receptor further comprises a costimulatory signaling region.

[1442] 183. The method of embodiment 182, wherein the costimulatory signaling region comprises a signaling domain of CD28 or 4-1BB.

[1443] 184. The method of any of embodiments 164-183, wherein the altered T cell is returned to the subject's body after the step of contacting.

[1444] 185. The method of any of embodiments 162-184, wherein the T cell is from a subject suffering from cancer, the contacting is performed ex vivo and the altered T cell is returned to the subject's body after the step of contacting.

[1445] 186. The method of any of embodiments 162-185, wherein the one or more Cas9 molecule/gRNA molecule complexes are formed prior to the contacting.

[1446] 187. The method of any of embodiments 163-186, wherein the at least two Cas9 molecule/gRNA molecule complexes are formed prior to the contacting.

[1447] 188. The method of any of embodiments 162-187, wherein the gRNA molecule(s) comprise a targeting domain that is the same as, or differs by no more than 3 nucleotides from, a targeting domain from any of SEQ ID NOS: 481-555, 563-1516, 1517-3748, 14657-16670, and 16671-21037

[1448] 189. The method of embodiment 188, wherein the gRNA molecule(s) comprise a targeting domain that is selected from SEQ ID NOS: 563-1516.

[1449] 190. The method of embodiment 188, wherein the gRNA molecule(s) comprise a targeting domain that is selected from SEQ ID NOS: 1517-3748.

[1450] 191. The method of embodiment 188, wherein the gRNA molecule(s) comprise a targeting domain that is selected from SEQ ID NOS: 14657-16670.

[1451] 192. The method of embodiment 188, wherein the gRNA molecule(s) comprise a targeting domain that is selected from SEQ ID NOS: 16671-21037.

[1452] 193. The method of embodiment 188, wherein the gRNA molecule(s) comprise a targeting domain that is selected from SEQ ID NOS: 481-500 and 508-547.

[1453] 194. The method of embodiment 188, wherein the gRNA molecule(s) comprise a targeting domain that is selected from SEQ ID NOS: 501-507 and 548-555.

[1454] 195. The method of embodiment 188, wherein the gRNA molecule(s) comprise a targeting domain that is selected from SEQ ID NOS: 508, 514, 576, 579, 582, and 723.

[1455] 196. The method of embodiment 188, wherein the gRNA molecule(s) comprise a targeting domain that is selected from SEQ ID NOS: 508, 510, 511, 512, 514, 576, 579, 581, 582, 766, and 723.

[1456] 197. The method of any of embodiments 162-196, wherein the gRNA molecule(s) are modified at their 5′ end or comprise a 3′ polyA tail.

[1457] 198. The method of any of embodiments 162-196, wherein the gRNA molecule(s) are modified at their 5′ end and comprise a 3′ polyA tail.

[1458] 199. The method of embodiment 197 or embodiment 198, wherein the gRNA molecule(s) lack a 5′ triphosphate group.

[1459] 200. The method of embodiment 197 or embodiment 198, wherein the gRNA molecule(s) include a 5′ cap.

[1460] 201. The method of embodiment 200, wherein the 5′ cap comprises a modified guanine nucleotide that is linked to the remainder of the gRNA molecule via a 5′-5′ triphosphate linkage.

[1461] 202. The method of embodiment 200, wherein the 5′ cap comprises two optionally modified guanine nucleotides that are linked via an optionally modified 5′-5′ triphosphate linkage.

[1462] 203. The method of any of embodiments 197-202, wherein the 3′ polyA tail is comprised of about 10 to about 30 adenine nucleotides.

[1463] 204. The method of any of embodiments 197-202, wherein the 3′ polyA tail is comprised of about 20 adenine nucleotides.

[1464] 205. The method of embodiment 203 or embodiment 204, wherein the gRNA molecule(s) including the 3′ polyA tail were prepared by in vitro transcription from a DNA template.

[1465] 206. The method of embodiment 205, wherein the 5′ nucleotide of the targeting domain is a guanine nucleotide, the DNA template comprises a T7 promoter sequence located immediately upstream of the sequence that corresponds to the targeting domain, and the 3′ nucleotide of the T7 promoter sequence is not a guanine nucleotide.

[1466] 207. The method of embodiment 205, wherein the 5′ nucleotide of the targeting domain is not a guanine nucleotide, the DNA template comprises a T7 promoter sequence located immediately upstream of the sequence that corresponds to the targeting domain, and the 3′ nucleotide of the T7 promoter sequence is a guanine nucleotide which is downstream of a nucleotide other than a guanine nucleotide.

[1467] 208. The method of any of embodiments 162-207, wherein the one or more Cas9 molecule/gRNA molecule complexes are delivered into the T cell via electroporation.

[1468] 209. The method of any of embodiments 163-208, wherein the at least two Cas9 molecule/gRNA molecule complexes are delivered into the T cell via electroporation.

[1469] 210. The method of any of embodiments 162-209, wherein the gRNA molecule(s) comprise a targeting domain which is complementary with a target domain from the PDCD1 gene and wherein the gRNA molecule(s) guide the Cas9 molecule to cleave the target domain with an efficiency of cleavage of at least 40%.

[1470] 211. The method of embodiment 210, wherein the efficiency of cleavage is determined using a labeled anti-PDCD1 antibody and a flow cytometry assay.

[1471] 212. The method of any of embodiments 162-211, wherein the Cas9 molecule is guided by a single gRNA molecule and cleaves the target domain with a single double stranded break.

[1472] 213. The method of embodiment 212, wherein the Cas9 molecule is a S. pyogenes Cas9 molecule.

[1473] 214. The method of any of embodiments 162-213, wherein the targeting domain is selected from:

(SEQ ID NO: 508)

GUCUGGGCGGUGCUACAACU;

(SEQ ID NO: 514)

GCCCUGGCCAGUCGUCU;

(SEQ ID NO: 576)

CGUCUGGGCGGUGCUACAAC;

(SEQ ID NO: 579)

UGUAGCACCGCCCAGACGAC;

(SEQ ID NO: 582)

CGACUGGCCAGGGCGCCUGU;
or

(SEQ ID NO: 723)

CACCUACCUAAGAACCAUCC.

[1474] 215. The method of any of embodiments 162-211, wherein the Cas9 molecule is a nickase and two Cas9 molecule/gRNA molecule complexes are guided by two different gRNA molecules to cleave the target domain with two single stranded breaks on opposing strands of the target domain.

[1475] 216. The method of embodiment 215, wherein the Cas9 molecule is a S. pyogenes Cas9 molecule.

[1476] 217. The method of any of embodiments 162-216, wherein the S. pyogenes Cas9 molecule has a D10A mutation.

[1477] 218. The method of any of embodiments 162-217, wherein the two gRNA molecules comprise targeting domains that are selected from the following pairs of targeting domains:

(SEQ ID NO: 582)

CGACUGGCCAGGGCGCCUGU
and

(SEQ ID NO: 508)

GUCUGGGCGGUGCUACAACU;

(SEQ ID NO: 582)

CGACUGGCCAGGGCGCCUGU
and

(SEQ ID NO: 510)

GGGCGGUGCUACAACUGGGC;

(SEQ ID NO: 582)

CGACUGGCCAGGGCGCCUGU
and

(SEQ ID NO: 511)

GGCCAGGAUGGUUCUUAGGU;

(SEQ ID NO: 582)

CGACUGGCCAGGGCGCCUGU
and

(SEQ ID NO: 512)

GGAUGGUUCUUAGGUAGGUG;

(SEQ ID NO: 582)

CGACUGGCCAGGGCGCCUGU
and

(SEQ ID NO: 576)

CGUCUGGGCGGUGCUACAAC;

(SEQ ID NO: 582)

CGACUGGCCAGGGCGCCUGU
and

(SEQ ID NO: 766)

CUACAACUGGGCUGGCGGCC;

(SEQ ID NO: 579)

UGUAGCACCGCCCAGACGAC
and

(SEQ ID NO: 511)

GGCCAGGAUGGUUCUUAGGU;

(SEQ ID NO: 579)

UGUAGCACCGCCCAGACGAC
and

(SEQ ID NO: 512)

GGAUGGUUCUUAGGUAGGUG;
or

(SEQ ID NO: 581)

ACCGCCCAGACGACUGGCCA
and

(SEQ ID NO: 511)

GGCCAGGAUGGUUCUUAGGU.

[1478] 219. The method of any of embodiments 162-218, wherein the S. pyogenes Cas9 molecule has a N863A mutation.

[1479] 220. The method of embodiment 219, wherein the two gRNA molecules comprise targeting domains that are selected from the following pairs of targeting domains:

(SEQ ID NO: 582)

CGACUGGCCAGGGCGCCUGU
and

(SEQ ID NO: 508)

GUCUGGGCGGUGCUACAACU;

(SEQ ID NO: 582)

CGACUGGCCAGGGCGCCUGU
and

(SEQ ID NO: 510)

GGGCGGUGCUACAACUGGGC;
or

(SEQ ID NO: 582)

CGACUGGCCAGGGCGCCUGU
and

(SEQ ID NO: 511)

GGCCAGGAUGGUUCUUAGGU.

[1480] 221. The method of any of embodiments 162-220, wherein the gRNA molecule(s) are modular gRNA molecule(s).

[1481] 222. The method of any of embodiments 162-220, wherein the gRNA molecule(s) are chimeric gRNA molecule(s).

[1482] 223. The method of embodiment 222, wherein the gRNA molecule(s) comprise from 5′ to 3′: a targeting domain; a first complementarity domain; a linking domain; a second complementarity domain; a proximal domain; and a tail domain.

[1483] 224. The method of embodiment 222 or embodiment 223, wherein the gRNA molecule(s) comprise a linking domain of no more than 25 nucleotides in length and a proximal and tail domain, that taken together, are at least 20 nucleotides in length.

[1484] 225. The method of any one of embodiments 210-224, wherein the method is characterized by an efficiency of cleavage of at least 60%.

[1485] 226. The method of any one of embodiments 210-224, wherein the method is characterized by an efficiency of cleavage of at least 80%.

[1486] 227. The method of any one of embodiments 210-224, wherein the method is characterized by an efficiency of cleavage of at least 90%.

[1487] 228. The method of any one of embodiments 210-227, wherein the gRNA molecule is characterized by fewer than 5 off-targets.

[1488] 229. The method of any one of embodiments 210-228, wherein the gRNA molecule is characterized by fewer than 2 exonic off-targets.

[1489] 230. The method of embodiment 228 or embodiment 229, wherein off-targets are identified by GUIDE-seq.

[1490] 231. The method of embodiment 228 or embodiment 229, wherein off-targets are identified by Amp-seq.

[1491] 232. A Cas9 molecule/gRNA molecule complex, wherein the gRNA molecule comprises a targeting domain which is complementary with a target domain from the PDCD1 gene, and the gRNA molecule is modified at its 5′ end and/or comprises a 3′ polyA tail.

[1492] 233. The Cas9 molecule/gRNA molecule complex of embodiment 232, wherein the gRNA molecule comprises a targeting domain that is the same as, or differs by no more than 3 nucleotides from, a targeting domain from any of SEQ ID NOS: 481-555, 563-1516, 1517-3748, 14657-16670, and 16671-21037 234. The Cas9 molecule/gRNA molecule complex of embodiment 232, wherein the gRNA molecule comprises a targeting domain that is selected from SEQ ID NOS: 563-1516.

[1493] 235. The Cas9 molecule/gRNA molecule complex of embodiment 232, wherein the gRNA molecule comprises a targeting domain that is selected from SEQ ID NOS: 1517-3748.

[1494] 236. The Cas9 molecule/gRNA molecule complex of embodiment 232, wherein the gRNA molecule comprises a targeting domain that is selected from SEQ ID NOS: 14657-16670.

[1495] 237. The Cas9 molecule/gRNA molecule complex of embodiment 232, wherein the gRNA molecule comprises a targeting domain that is selected from SEQ ID NOS: 16671-21037.

[1496] 238. The Cas9 molecule/gRNA molecule complex of embodiment 232, wherein the gRNA molecule comprises a targeting domain that is selected from SEQ ID NOS: 481-500 and 508-547.

[1497] 239. The Cas9 molecule/gRNA molecule complex of embodiment 232, wherein the gRNA molecule comprises a targeting domain that is selected from SEQ ID NOS: 501-507 and 548-555.

[1498] 240. The Cas9 molecule/gRNA molecule complex of embodiment 232, wherein the gRNA molecule comprises a targeting domain that is selected from SEQ ID NOS: 508, 514, 576, 579, 582, and 723.

[1499] 241. The Cas9 molecule/gRNA molecule complex of embodiment 232, wherein the gRNA molecule comprises a targeting domain that is selected from SEQ ID NOS: 508, 510, 511, 512, 514, 576, 579, 581, 582, 766, and 723.

[1500] 242. The Cas9 molecule/gRNA molecule complex of any of embodiments 232-241, wherein the gRNA molecule is modified at its 5′ end.

[1501] 243. The Cas9 molecule/gRNA molecule complex of embodiment 242, wherein the gRNA molecule lacks a 5′ triphosphate group.

[1502] 244. The Cas9 molecule/gRNA molecule complex of embodiment 242, wherein the gRNA molecule includes a 5′ cap.

[1503] 245. The Cas9 molecule/gRNA molecule complex of embodiment 244, wherein the 5′ cap comprises a modified guanine nucleotide that is linked to the remainder of the gRNA molecule via a 5′-5′ triphosphate linkage.

[1504] 246. The Cas9 molecule/gRNA molecule complex of embodiment 244, wherein the 5′ cap comprises two optionally modified guanine nucleotides that are linked via an optionally modified 5′-5′ triphosphate linkage.

[1505] 247. The Cas9 molecule/gRNA molecule complex of any of embodiments 232-246, wherein the 3′ polyA tail is comprised of about 10 to about 30 adenine nucleotides.

[1506] 248. The Cas9 molecule/gRNA molecule complex of any of embodiments 232-246, wherein the 3′ polyA tail is comprised of about 20 adenine nucleotides.

[1507] 249. The Cas9 molecule/gRNA molecule complex of embodiment 247 or embodiment 248, wherein the gRNA molecule including the 3′ polyA tail was prepared by in vitro transcription from a DNA template.

[1508] 250. The Cas9 molecule/gRNA molecule complex of embodiment 249, wherein the 5′ nucleotide of the targeting domain is a guanine nucleotide, the DNA template comprises a T7 promoter sequence located immediately upstream of the sequence that corresponds to the targeting domain, and the 3′ nucleotide of the T7 promoter sequence is not a guanine nucleotide.

[1509] 251. The Cas9 molecule/gRNA molecule complex of embodiment 249, wherein the 5′ nucleotide of the targeting domain is not a guanine nucleotide, the DNA template comprises a T7 promoter sequence located immediately upstream of the sequence that corresponds to the targeting domain, and the 3′ nucleotide of the T7 promoter sequence is a guanine nucleotide which is downstream of a nucleotide other than a guanine nucleotide.

[1510] 252. The Cas9 molecule/gRNA molecule complex of any of embodiments 232-251, wherein the Cas9 molecule cleaves a target domain with a double stranded break.

[1511] 253. The Cas9 molecule/gRNA molecule complex of embodiment 252, wherein the Cas9 molecule is a S. pyogenes Cas9 molecule.

[1512] 254. The Cas9 molecule/gRNA molecule complex of any of embodiments 232-253, wherein the targeting domain is selected from the following group of targeting domains:

(SEQ ID NO: 508)

GUCUGGGCGGUGCUACAACU;

(SEQ ID NO: 514)

GCCCUGGCCAGUCGUCU;

(SEQ ID NO: 576)

CGUCUGGGCGGUGCUACAAC;

(SEQ ID NO: 579)

UGUAGCACCGCCCAGACGAC;

(SEQ ID NO: 582)

CGACUGGCCAGGGCGCCUGU;
or

(SEQ ID NO: 723)

CACCUACCUAAGAACCAUCC.

[1513] 255. The Cas9 molecule/gRNA molecule complex of any of embodiments 232-251, wherein the Cas9 molecule cleaves a target domain with a single stranded break.

[1514] 256. The Cas9 molecule/gRNA molecule complex of embodiment 255, wherein the Cas9 molecule is a S. pyogenes Cas9 molecule.

[1515] 257. The Cas9 molecule/gRNA molecule complex of any of embodiments 232-embodiment 256, wherein the S. pyogenes Cas9 molecule has a D10A mutation.

[1516] 258. The Cas9 molecule/gRNA molecule complex of any of embodiments 232-embodiment 257, wherein the targeting domain is selected from the following group of targeting domains:

(SEQ ID NO: 582)

CGACUGGCCAGGGCGCCUGU
and

(SEQ ID NO: 508)

GUCUGGGCGGUGCUACAACU;

(SEQ ID NO: 582)

CGACUGGCCAGGGCGCCUGU
and

(SEQ ID NO: 510)

GGGCGGUGCUACAACUGGGC;

(SEQ ID NO: 582)

CGACUGGCCAGGGCGCCUGU
and

(SEQ ID NO: 511)

GGCCAGGAUGGUUCUUAGGU;

(SEQ ID NO: 582)

CGACUGGCCAGGGCGCCUGU
and

(SEQ ID NO: 512)

GGAUGGUUCUUAGGUAGGUG;

(SEQ ID NO: 582)

CGACUGGCCAGGGCGCCUGU
and

(SEQ ID NO: 576)

CGUCUGGGCGGUGCUACAAC;

(SEQ ID NO: 582)

CGACUGGCCAGGGCGCCUGU
and

(SEQ ID NO: 766)

CUACAACUGGGCUGGCGGCC;

(SEQ ID NO: 579)

UGUAGCACCGCCCAGACGAC
and

(SEQ ID NO: 511)

GGCCAGGAUGGUUCUUAGGU;

(SEQ ID NO: 579)

UGUAGCACCGCCCAGACGAC
and

(SEQ ID NO: 512)

GGAUGGUUCUUAGGUAGGUG;
or

(SEQ ID NO: 581)

ACCGCCCAGACGACUGGCCA
and

(SEQ ID NO: 511)

GGCCAGGAUGGUUCUUAGGU.

[1517] 259. The Cas9 molecule/gRNA molecule complex of any of embodiment 232-256, wherein the S. pyogenes Cas9 molecule has a N863A mutation.

[1518] 260. The Cas9 molecule/gRNA molecule complex of embodiment 259, wherein the targeting domain is selected from the following group of targeting domains:

(SEQ ID NO: 582)

CGACUGGCCAGGGCGCCUGU
and

(SEQ ID NO: 508)

GUCUGGGCGGUGCUACAACU;

(SEQ ID NO: 582)

CGACUGGCCAGGGCGCCUGU
and

(SEQ ID NO: 510)

GGGCGGUGCUACAACUGGGC;
or

(SEQ ID NO: 582)

CGACUGGCCAGGGCGCCUGU
and

(SEQ ID NO: 511)

GGCCAGGAUGGUUCUUAGGU.

[1519] 261. The Cas9 molecule/gRNA molecule complex of any of embodiments 232-260, wherein the gRNA molecule is a modular gRNA molecule.

[1520] 262. The Cas9 molecule/gRNA molecule complex of any of embodiments 232-261, wherein the gRNA molecule is a chimeric gRNA molecule.

[1521] 263. The Cas9 molecule/gRNA molecule complex of embodiment 262, wherein the gRNA molecule comprises from 5′ to 3′: a targeting domain; a first complementarity domain; a linking domain; a second complementarity domain; a proximal domain; and a tail domain.

[1522] 264. The Cas9 molecule/gRNA molecule complex of embodiment 262 or embodiment 263, wherein the gRNA molecule comprises a linking domain of no more than 25 nucleotides in length and a proximal and tail domain, that taken together, are at least 20 nucleotides in length.

[1523] 265. A composition comprising at least two Cas9 molecule/gRNA complexes, each complex comprising a gRNA molecule comprising a targeting domain that is complementary to a target domain from a PDCD1 gene.

[1524] 266. The composition of embodiment 265, wherein the gRNA molecule comprises a targeting domain that is the same as, or differs by no more than 3 nucleotides from, a targeting domain from any of SEQ ID NOS: 481-555, 563-1516, 1517-3748, 14657-16670, and 16671-21037

[1525] 267. The composition of embodiment 265, wherein the gRNA molecule comprises a targeting domain that is selected from SEQ ID NOS: 563-1516.

[1526] 268. The composition of embodiment 265, wherein the gRNA molecule comprises a targeting domain that is selected from SEQ ID NOS: 1517-3748.

[1527] 269. The composition of embodiment 265, wherein the gRNA molecule comprises a targeting domain that is selected from SEQ ID NOS: 14657-16670.

[1528] 270. The composition of embodiment 265, wherein the gRNA molecule comprises a targeting domain that is selected from SEQ ID NOS: 16671-21037.

[1529] 271. The composition of embodiment 265, wherein the gRNA molecule comprises a targeting domain that is selected from SEQ ID NOS: 481-500 and 508-547.

[1530] 272. The composition of embodiment 265, wherein the gRNA molecule comprises a targeting domain that is selected from SEQ ID NOS: 501-507 and 548-555.

[1531] 273. The composition of embodiment 265, wherein the gRNA molecule comprises a targeting domain that is selected from SEQ ID NOS: 508, 514, 576, 579, 582, and 723.

[1532] 274. The composition of embodiment 265, wherein the gRNA molecule comprises a targeting domain that is selected from SEQ ID NOS: 508, 510, 511, 512, 514, 576, 579, 581, 582, 766, and 723.

[1533] 275. The composition of any of embodiments 265-741, wherein the gRNA molecule is modified at its 5′ end.

[1534] 276. The composition of embodiment 275, wherein the gRNA molecule lacks a 5′ triphosphate group.

[1535] 277. The composition of embodiment 275, wherein the gRNA molecule includes a 5′ cap.

[1536] 278. The composition of embodiment 277, wherein the 5′ cap comprises a modified guanine nucleotide that is linked to the remainder of the gRNA molecule via a 5′-5′ triphosphate linkage.

[1537] 279. The composition of embodiment 277, wherein the 5′ cap comprises two optionally modified guanine nucleotides that are linked via an optionally modified 5′-5′ triphosphate linkage.

[1538] 280. The composition of any of embodiments 265-279, wherein the 3′ polyA tail is comprised of about 10 to about 30 adenine nucleotides.

[1539] 281. The composition of any of embodiments 265-279, wherein the 3′ polyA tail is comprised of about 20 adenine nucleotides.

[1540] 282. The composition of embodiment 280 or embodiment 281, wherein the gRNA molecule including the 3′ polyA tail was prepared by in vitro transcription from a DNA template.

[1541] 283. The composition of embodiment 282, wherein the 5′ nucleotide of the targeting domain is a guanine nucleotide, the DNA template comprises a T7 promoter sequence located immediately upstream of the sequence that corresponds to the targeting domain, and the 3′ nucleotide of the T7 promoter sequence is not a guanine nucleotide.

[1542] 284. The composition of embodiment 282, wherein the 5′ nucleotide of the targeting domain is not a guanine nucleotide, the DNA template comprises a T7 promoter sequence located immediately upstream of the sequence that corresponds to the targeting domain, and the 3′ nucleotide of the T7 promoter sequence is a guanine nucleotide which is downstream of a nucleotide other than a guanine nucleotide.

[1543] 285. The composition of any of embodiments 265-284, wherein the Cas9 molecule cleaves a target domain with a double stranded break.

[1544] 286. The composition of embodiment 285, wherein the Cas9 molecule is a S. pyogenes Cas9 molecule.

[1545] 287. The composition of any of embodiments 265-286, wherein the targeting domain is selected from the following group of targeting domains:

(SEQ ID NO: 508)

GUCUGGGCGGUGCUACAACU;

(SEQ ID NO: 514)

GCCCUGGCCAGUCGUCU;

(SEQ ID NO: 576)

CGUCUGGGCGGUGCUACAAC;

(SEQ ID NO: 579)

UGUAGCACCGCCCAGACGAC;

(SEQ ID NO: 582)

CGACUGGCCAGGGCGCCUGU;
or

(SEQ ID NO: 723)

CACCUACCUAAGAACCAUCC.

[1546] 288. The composition of any of embodiments 265-287, wherein the Cas9 molecule cleaves a target domain with a single stranded break.

[1547] 289. The composition of embodiment 288, wherein the Cas9 molecule is a S. pyogenes Cas9 molecule.

[1548] 290. The composition of any of embodiments 265-289, wherein the S. pyogenes Cas9 molecule has a D10A mutation.

[1549] 291. The composition of any of embodiments 265-290, wherein the targeting domain is selected from the following group of targeting domains:

(SEQ ID NO: 582)

CGACUGGCCAGGGCGCCUGU
and

(SEQ ID NO: 508)

GUCUGGGCGGUGCUACAACU;

(SEQ ID NO: 582)

CGACUGGCCAGGGCGCCUGU
and

(SEQ ID NO: 510)

GGGCGGUGCUACAACUGGGC;

(SEQ ID NO: 582)

CGACUGGCCAGGGCGCCUGU
and

(SEQ ID NO: 511)

GGCCAGGAUGGUUCUUAGGU;

(SEQ ID NO: 582)

CGACUGGCCAGGGCGCCUGU
and

(SEQ ID NO: 512)

GGAUGGUUCUUAGGUAGGUG;

(SEQ ID NO: 582)

CGACUGGCCAGGGCGCCUGU
and

(SEQ ID NO: 576)

CGUCUGGGCGGUGCUACAAC;

(SEQ ID NO: 582)

CGACUGGCCAGGGCGCCUGU
and

(SEQ ID NO: 766)

CUACAACUGGGCUGGCGGCC;

(SEQ ID NO: 579)

UGUAGCACCGCCCAGACGAC
and

(SEQ ID NO: 511)

GGCCAGGAUGGUUCUUAGGU;

(SEQ ID NO: 579)

UGUAGCACCGCCCAGACGAC
and

(SEQ ID NO: 512)

GGAUGGUUCUUAGGUAGGUG;
or

(SEQ ID NO: 581)

ACCGCCCAGACGACUGGCCA
and

(SEQ ID NO: 511)

GGCCAGGAUGGUUCUUAGGU.

[1550] 292. The composition of any of embodiment 265-291, wherein the S. pyogenes Cas9 molecule has a N863A mutation.

[1551] 293. The composition of embodiment 292, wherein the targeting domain is selected from the following group of targeting domains:

(SEQ ID NO: 582)

CGACUGGCCAGGGCGCCUGU
and

(SEQ ID NO: 508)

GUCUGGGCGGUGCUACAACU;

(SEQ ID NO: 582)

CGACUGGCCAGGGCGCCUGU
and

(SEQ ID NO: 510)

GGGCGGUGCUACAACUGGGC;
or

(SEQ ID NO: 582)

CGACUGGCCAGGGCGCCUGU
and

(SEQ ID NO: 511)

GGCCAGGAUGGUUCUUAGGU.

[1552] 294. The composition of any of embodiments 265-293, wherein the gRNA molecule is a modular gRNA molecule.

[1553] 295. The composition of any of embodiments 265-294, wherein the gRNA molecule is a chimeric gRNA molecule.

[1554] 296. The composition of embodiment 295, wherein the gRNA molecule comprises from 5′ to 3′: a targeting domain; a first complementarity domain; a linking domain; a second complementarity domain; a proximal domain; and a tail domain.

[1555] 297. The composition of embodiment 295 or embodiment 296, wherein the gRNA molecule comprises a linking domain of no more than 25 nucleotides in length and a proximal and tail domain, that taken together, are at least 20 nucleotides in length.

[1556] 298. A gRNA molecule that comprises a targeting domain which is complementary with a target domain from the PDCD1 gene, wherein the gRNA molecule is modified at its 5′ end and/or comprises a 3′ polyA tail.

[1557] 299. The gRNA molecule of embodiment 298, wherein the gRNA molecule comprises a targeting domain that is the same as, or differs by no more than 3 nucleotides from, a targeting domain from any of SEQ ID NOS: 481-555, 563-1516, 1517-3748, 14657-16670, and 16671-21037

[1558] 300. The gRNA molecule of embodiment 298, wherein the gRNA molecule comprises a targeting domain that is selected from SEQ ID NOS: 563-1516.

[1559] 301. The gRNA molecule of embodiment 298, wherein the gRNA molecule comprises a targeting domain that is selected from SEQ ID NOS: 1517-3748.

[1560] 302. The gRNA molecule of embodiment 298, wherein the gRNA molecule comprises a targeting domain that is selected from SEQ ID NOS: 14657-16670.

[1561] 303. The gRNA molecule of embodiment 298, wherein the gRNA molecule comprises a targeting domain that is selected from SEQ ID NOS: 16671-21037.

[1562] 304. The gRNA molecule of embodiment 298, wherein the gRNA molecule comprises a targeting domain that is selected from SEQ ID NOS: 481-500 and 508-547.

[1563] 305. The gRNA molecule of embodiment 298, wherein the gRNA molecule comprises a targeting domain that is selected from SEQ ID NOS: 501-507 and 548-555.

[1564] 306. The gRNA molecule of embodiment 298, wherein the gRNA molecule comprises a targeting domain that is selected from SEQ ID NOS: 508, 514, 576, 579, 582, and 723.

[1565] 307. The gRNA molecule of embodiment 298, wherein the gRNA molecule comprises a targeting domain that is selected from SEQ ID NOS: 508, 510, 511, 512, 514, 576, 579, 581, 582, 766, and 723.

[1566] 308. The gRNA molecule of any of embodiments embodiment 298-94, wherein the gRNA molecule is modified at its 5′ end.

[1567] 309. The gRNA molecule of embodiment 308, wherein the gRNA molecule lacks a 5′ triphosphate group.

[1568] 310. The gRNA molecule of embodiment 308, wherein the gRNA molecule includes a 5′ cap.

[1569] 311. The gRNA molecule of embodiment 310, wherein the 5′ cap comprises a modified guanine nucleotide that is linked to the remainder of the gRNA molecule via a 5′-5′ triphosphate linkage.

[1570] 312. The gRNA molecule of embodiment 310, wherein the 5′ cap comprises two optionally modified guanine nucleotides that are linked via an optionally modified 5′-5′ triphosphate linkage.

[1571] 313. The gRNA molecule of any of embodiments 298-312, wherein the gRNA molecule comprises a 3′ polyA tail which is comprised of about 10 to about 30 adenine nucleotides.

[1572] 314. The gRNA molecule of any of embodiments 298-312, wherein the gRNA molecule comprises a 3′ polyA tail which is comprised of about 20 adenine nucleotides.

[1573] 315. The gRNA molecule of embodiment 313 or 314, wherein the gRNA molecule including the 3′ polyA tail was prepared by in vitro transcription from a DNA template.

[1574] 316. The gRNA molecule of embodiment 315, wherein the 5′ nucleotide of the targeting domain is a guanine nucleotide, the DNA template comprises a T7 promoter sequence located immediately upstream of the sequence that corresponds to the targeting domain, and the 3′ nucleotide of the T7 promoter sequence is not a guanine nucleotide.

[1575] 316. The gRNA molecule of embodiment 315, wherein the 5′ nucleotide of the targeting domain is not a guanine nucleotide, the DNA template comprises a T7 promoter sequence located immediately upstream of the sequence that corresponds to the targeting domain, and the 3′ nucleotide of the T7 promoter sequence is a guanine nucleotide which is downstream of a nucleotide other than a guanine nucleotide.

[1576] 317. The gRNA molecule of any of embodiments 298-316, wherein the gRNA molecule is a S. pyogenes gRNA molecule.

[1577] 318. The gRNA molecule of any of embodiments 298-317, wherein the targeting domain is selected from the following group of targeting domains:

(SEQ ID NO: 508)

GUCUGGGCGGUGCUACAACU;

(SEQ ID NO: 514)

GCCCUGGCCAGUCGUCU;

(SEQ ID NO: 576)

CGUCUGGGCGGUGCUACAAC;

(SEQ ID NO: 579)

UGUAGCACCGCCCAGACGAC;

(SEQ ID NO: 582)

CGACUGGCCAGGGCGCCUGU;
or

(SEQ ID NO: 723)

CACCUACCUAAGAACCAUCC.

[1578] 319. The gRNA molecule of embodiment 318, wherein the targeting domain is selected from the following group of targeting domains:

(SEQ ID NO: 514)

GCCCUGGCCAGUCGUCU;

(SEQ ID NO: 723)

CACCUACCUAAGAACCAUCC.

[1579] 320. The gRNA molecule of embodiment 318, wherein the targeting domain is selected from the following group of targeting domains:

(SEQ ID NO: 510)

GGGCGGUGCUACAACUGGGC;

(SEQ ID NO: 511)

GGCCAGGAUGGUUCUUAGGU;

(SEQ ID NO: 512)

GGAUGGUUCUUAGGUAGGUG;

(SEQ ID NO: 581)

ACCGCCCAGACGACUGGCCA
and

(SEQ ID NO: 766)

CUACAACUGGGCUGGCGGCC;

[1580] 321. The gRNA molecule of embodiment 318, wherein the targeting domain is selected from the following group of targeting domains:

(SEQ ID NO: 511)

GGCCAGGAUGGUUCUUAGGU;

(SEQ ID NO: 512)

GGAUGGUUCUUAGGUAGGUG;

(SEQ ID NO: 766)

CUACAACUGGGCUGGCGGCC;

[1581] 322. The gRNA molecule of any of embodiments 298-321, wherein the gRNA molecule is a modular gRNA molecule.

[1582] 323. The gRNA molecule of any of embodiments 298-322, wherein the gRNA molecule is a chimeric gRNA molecule.

[1583] 324. The gRNA molecule of embodiment 323, wherein the gRNA molecule comprises from 5′ to 3′: a targeting domain; a first complementarity domain; a linking domain; a second complementarity domain; a proximal domain; and a tail domain.

[1584] 325. The gRNA molecule of embodiment 323 or embodiment 324, wherein the gRNA molecule comprises a linking domain of no more than 25 nucleotides in length and a proximal and tail domain, that taken together, are at least 20 nucleotides in length.

[1585] 326. A method of making a cell for implantation, comprising contacting the cell with one or more Cas9 molecule/gRNA molecule complexes, wherein the gRNA molecule(s) in the one or more Cas9 molecule/gRNA molecule complexes comprise a targeting domain which is complementary with a target domain from the PDCD1 gene.

[1586] 327. The method of embodiment 326, wherein the gRNA molecule(s) comprise a targeting domain which is complementary with a target domain from the PDCD1 gene and wherein the gRNA molecule(s) guide the Cas9 molecule to cleave the target domain with an efficiency of cleavage of at least 40%.

[1587] 328. The method of embodiment 327, wherein the efficiency of cleavage is determined using a labeled anti-PDCD1 antibody and a flow cytometry assay

[1588] 329. The method of any of embodiments 326-328, wherein the gRNA molecule(s) are modified at their 5′ end or comprise a 3′ polyA tail.

[1589] 330. The method of any of embodiments 326-328, wherein the gRNA molecule(s) are modified at their 5′ end and comprise a 3′ polyA tail.

[1590] 331. The method of embodiment 329 or embodiment 330, wherein the gRNA molecule(s) lack a 5′ triphosphate group.

[1591] 332. The method of embodiment 329 or embodiment 330, wherein the gRNA molecule(s) include a 5′ cap.

[1592] 333. The method of embodiment 332, wherein the 5′ cap comprises a modified guanine nucleotide that is linked to the remainder of the gRNA molecule via a 5′-5′ triphosphate linkage.

[1593] 334. The method of embodiment 332, wherein the 5′ cap comprises two optionally modified guanine nucleotides that are linked via an optionally modified 5′-5′ triphosphate linkage.

[1594] 335. The method of any of embodiments 329-334, wherein the 3′ polyA tail is comprised of about 10 to about 30 adenine nucleotides.

[1595] 336. The method of any of embodiments 329-334, wherein the 3′ polyA tail is comprised of about 20 adenine nucleotides.

[1596] 337. The method of embodiment 335 or embodiment 336, wherein the gRNA molecule(s) including the 3′ polyA tail were prepared by in vitro transcription from a DNA template.

[1597] 338. The method of embodiment 337, wherein the 5′ nucleotide of the targeting domain is a guanine nucleotide, the DNA template comprises a T7 promoter sequence located immediately upstream of the sequence that corresponds to the targeting domain, and the 3′ nucleotide of the T7 promoter sequence is not a guanine nucleotide.

[1598] 339. The method of embodiment 337, wherein the 5′ nucleotide of the targeting domain is not a guanine nucleotide, the DNA template comprises a T7 promoter sequence located immediately upstream of the sequence that corresponds to the targeting domain, and the 3′ nucleotide of the T7 promoter sequence is a guanine nucleotide which is downstream of a nucleotide other than a guanine nucleotide.

[1599] 340. The method of any of embodiments 326-339, wherein the one or more Cas9 molecule/gRNA molecule complexes are delivered into the cell via electroporation.

[1600] 341. The method of any of embodiments 326-340, wherein the Cas9 molecule is guided by a single gRNA molecule and cleaves the target domain with a single double stranded break.

[1601] 342. The method of embodiment 341, wherein the Cas9 molecule is a S. pyogenes Cas9 molecule.

[1602] 343. The method of any of embodiments 326-342, wherein the single gRNA molecule comprises a targeting domain selected from the following targeting domains:

(SEQ ID NO: 508)

GUCUGGGCGGUGCUACAACU;

(SEQ ID NO: 514)

GCCCUGGCCAGUCGUCU;

(SEQ ID NO: 576)

CGUCUGGGCGGUGCUACAAC;

(SEQ ID NO: 579)

UGUAGCACCGCCCAGACGAC;

(SEQ ID NO: 582)

CGACUGGCCAGGGCGCCUGU;
or

(SEQ ID NO: 723)

CACCUACCUAAGAACCAUCC.

[1603] 344. The method of any of embodiments 326-343, wherein the Cas9 molecule is a nickase and two Cas9 molecule/gRNA molecule complexes are guided by two different gRNA molecules to cleave the target domain with two single stranded breaks on opposing strands of the target domain.

[1604] 345. The method of any of embodiments 326-344, wherein the Cas9 molecule is a S. pyogenes Cas9 molecule having a D10A mutation.

[1605] 346. The method of any of embodiments 326-345, wherein the two gRNA molecules comprise targeting domains that are selected from the following pairs of targeting domains:

(SEQ ID NO: 582)

CGACUGGCCAGGGCGCCUGU
and

(SEQ ID NO: 508)

GUCUGGGCGGUGCUACAACU;

(SEQ ID NO: 582)

CGACUGGCCAGGGCGCCUGU
and

(SEQ ID NO: 510)

GGGCGGUGCUACAACUGGGC;

(SEQ ID NO: 582)

CGACUGGCCAGGGCGCCUGU
and

(SEQ ID NO: 511)

GGCCAGGAUGGUUCUUAGGU;

(SEQ ID NO: 582)

CGACUGGCCAGGGCGCCUGU
and

(SEQ ID NO: 512)

GGAUGGUUCUUAGGUAGGUG;

(SEQ ID NO: 582)

CGACUGGCCAGGGCGCCUGU
and

(SEQ ID NO: 576)

CGUCUGGGCGGUGCUACAAC;

(SEQ ID NO: 582)

CGACUGGCCAGGGCGCCUGU
and

(SEQ ID NO: 766)

CUACAACUGGGCUGGCGGCC;

(SEQ ID NO: 579)

UGUAGCACCGCCCAGACGAC
and

(SEQ ID NO: 511)

GGCCAGGAUGGUUCUUAGGU;

(SEQ ID NO: 579)

UGUAGCACCGCCCAGACGAC
and

(SEQ ID NO: 512)

GGAUGGUUCUUAGGUAGGUG;
or

(SEQ ID NO: 581)

ACCGCCCAGACGACUGGCCA
and

(SEQ ID NO: 511)

GGCCAGGAUGGUUCUUAGGU.

[1606] 347. The method of any of embodiments 326-346, wherein the S. pyogenes Cas9 molecule has a N863A mutation.

[1607] 348. The method of embodiment 347, wherein the two gRNA molecules comprise targeting domains that are selected from the following pairs of targeting domains:

(SEQ ID NO: 582)

CGACUGGCCAGGGCGCCUGU
and

(SEQ ID NO: 508)

GUCUGGGCGGUGCUACAACU;

(SEQ ID NO: 582)

CGACUGGCCAGGGCGCCUGU
and

(SEQ ID NO: 510)

GGGCGGUGCUACAACUGGGC;
or

(SEQ ID NO: 582)

CGACUGGCCAGGGCGCCUGU
and

(SEQ ID NO: 511)

GGCCAGGAUGGUUCUUAGGU.

[1608] 349. The method of any of embodiments 326-348, wherein the gRNA molecule(s) are modular gRNA molecule(s).

[1609] 350. The method of any of embodiments 326-349, wherein the gRNA molecule(s) are chimeric gRNA molecule(s).

[1610] 351. The method of embodiment 350, wherein the gRNA molecule(s) comprise from 5′ to 3′: a targeting domain; a first complementarity domain; a linking domain; a second complementarity domain; a proximal domain; and a tail domain.

[1611] 352. The method of embodiment 350 or embodiment 351, wherein the gRNA molecule(s) comprise a linking domain of no more than 25 nucleotides in length and a proximal and tail domain, that taken together, are at least 20 nucleotides in length.

[1612] 353. The method of any of embodiments 326-352, wherein the gRNA molecule(s) guide the Cas9 molecule to cleave the target domain with an efficiency of cleavage of at least 60%.

[1613] 354. The method of any of embodiments 326-352, wherein the gRNA molecule(s) guide the Cas9 molecule to cleave the target domain with an efficiency of cleavage of at least 80%.

[1614] 355. The method of any of embodiments 326-352, wherein the gRNA molecule(s) guide the Cas9 molecule to cleave the target domain with an efficiency of cleavage of at least 90%.

[1615] 356. The method of any of embodiments 326-355, wherein the one or more Cas9 molecule/gRNA molecule complexes produce fewer than 5 off-targets.

[1616] 357. The method of any of embodiments 326-356, wherein the one or more Cas9 molecule/gRNA molecule complexes produce fewer than 2 exonic off-targets.

[1617] 358. The method of embodiment 356 or embodiment 357, wherein off-targets are identified by GUIDE-seq.

[1618] 359. The method of embodiment 356 or embodiment 357, wherein off-targets are identified by Amp-seq.

[1619] 360. The method of any of embodiments 326-359, wherein the contacting is performed ex vivo.

[1620] 361. The method of any of embodiments 326-360, wherein the cell is an immune cell.

[1621] 362. The method of embodiment 361, wherein the cell is a lymphocyte or antigen presenting cell.

[1622] 363. The method of embodiment 362, wherein the cell is a T cell, B cell or antigen presenting cell.

[1623] 364. The method of any of embodiments 326-363, wherein the cell is a T cell.

[1624] 365. The method of any of embodiments 326-364, wherein the cell comprises a recombinant receptor.

[1625] 366. The method of any of embodiments 326-365, further comprising contacting the cell with a nucleic acid encoding a recombinant receptor under conditions to introduce the nucleic acid into the cell.

[1626] 367. The method of embodiment 365 or embodiment 366, wherein the recombinant receptor is a functional non-TCR antigen receptor or a transgenic TCR.

[1627] 368. The method of any of embodiments 365-367, wherein the recombinant receptor is a chimeric antigen receptor (CAR).

[1628] 369. The method of embodiment 368, wherein the CAR comprises an antigen-binding domain that is an antibody or an antibody fragment.

[1629] 370. The method of embodiment 369, wherein the antibody fragment is a single chain fragment.

[1630] 371. The method of embodiment 369 or embodiment 370, wherein the antibody fragment comprises antibody variable regions joined by a flexible immunoglobulin linker.

[1631] 372. The method of any of embodiments 369-371, wherein the fragment comprises an scFv.

[1632] 373. The method of any of embodiments 369-372, wherein the antigen is associated with a disease or disorder.

[1633] 374. The method of embodiment 373, wherein the disease or disorder is an infectious disease or condition, an autoimmune disease, an inflammatory disease or a tumor or a cancer.

[1634] 375. The method of any of embodiments 365-374, wherein the recombinant receptor specifically binds to a tumor antigen.

[1635] 376. The method of any of embodiments 369-375, wherein the antigen is selected from ROR1, Her2, L1-CAM, CD19, CD20, CD22, mesothelin, CEA, hepatitis B surface antigen, anti-folate receptor, CD23, CD24, CD30, CD33, CD38, CD44, EGFR, EGP-2, EGP-4, EPHa2, ErbB2, ErbB3, ErbB4, FBP, fetal acethycholine e receptor, GD2, GD3, HMW-MAA, IL-22R-alpha, IL-13R-alpha2, kdr, kappa light chain, Lewis Y, L1-cell adhesion molecule (CD171), MAGE-A1, mesothelin, MUC1, MUC16, PSCA, NKG2D Ligands, NY-ESO-1, MART-1, gp100, oncofetal antigen, TAG72, VEGF-R2, carcinoembryonic antigen (CEA), prostate specific antigen, PSMA, estrogen receptor, progesterone receptor, ephrinB2, CD123, CS-1, c-Met, GD-2, MAGE A3, CE7, Wilms Tumor 1 (WT-1), cyclin A1 (CCNA1), BCMA and interleukin 12.

[1636] 377. The method of any of embodiments 365-376, wherein the recombinant receptor comprises an intracellular signaling domain comprising an ITAM.

[1637] 378. The method of embodiment 377, wherein the intracellular signaling domain comprises an intracellular domain of a CD3-zeta (CD3) chain.

[1638] 379. The method of embodiment 377 or 378, wherein the recombinant receptor further comprises a costimulatory signaling region.

[1639] 380. The method of embodiment 379, wherein the costimulatory signaling region comprises a signaling domain of CD28 or 4-1BB.

[1640] 381. A T cell made by the method of any of embodiments 162-231 and 326-380.

[1641] 382. A T cell comprising the Cas9 molecule/gRNA molecule complex of any of embodiments 232-264.

[1642] 383. A T cell comprising the composition of any of embodiments 265-297.

[1643] 384. A method of treating a subject, comprising administering to the subject the T cell of any of embodiments 381-383.

[1644] 385. The Cas9 molecule/gRNA molecule complex of any of embodiments 232-264, the composition of any of embodiments 265-297, or the T cell of any of embodiments 381-383, for use in therapy.

[1645] 386. Use of the Cas9 molecule/gRNA molecule complex of any of embodiments 232-264 or the composition of any of embodiments 265-297 in the manufacture of a medicament for treating cancer.

### VII. EXAMPLES

[1646] The following examples are included for illustrative purposes only and are not intended to limit the scope of the invention.

### Example 1: Screening of gRNAs for PDCD1 in Primary T Cells

[1647] In order to evaluate certain gRNAs for targeting PDCD1 (the gene encoding programmed death-1, PD-1), ribonucleoprotein complexes of gRNA and Cas9 (RNP) comprising different labeled gRNAs targeting the PDCD1 locus were generated and delivered to activated primary T cells by electroporation. S. pyogenes Cas9 protein purified essentially as described in published PCT application NO. WO2015161276 was complexed with the respective in vitro transcribed gRNA (prepared essentially as described in published PCT application NO. WO2015161276) for at least 15 min at a 1:1, 1:1.25 or 1:5 Cas9:gRNA ratio depending on the gRNA.

[1648] After verification that the protein was fully complexed with gRNA using differential scanning fluorimetry (DSF), the RNP was administered to activated CD4+ T cells from a healthy human donor using electroporation. RNP was added to 500,000 cells using electroporation in a 96-well format at a dose of 1 μg of RNP/100,000 cells. The cells were cultured post electroporation in T cell media containing IL-2, IL-7 and IL-15.

[1649] In order to assess the efficiency of PDCD1 knockout, the T cells were reactivated using anit-CD3/anti-CD28 beads for 48 hours while cultured in T cell media. At day 7 post electroporation, cells were analyzed by flow cytometry using a PE-conjugated anti-PD1 antibody as described in Example 2. The percentage of PD-1 negative cells is shown in FIG. 23. Table 1000 provides the sequence of the targeting domain for the gRNAs from the six exemplary RNPs with greater than 45% PDCD1 knockout efficiency that were identified in this manner.

TABLE 1000

| | | | Cas9 | SEQ |
|---|---|---|---|---|
| ID | gRNA Name | Targeting Domain | species | ID NO: |
| 49 | PDCD1-108 | GUCUGGGCGGUGCUACA | S. pyogenes | 508 |
| | | ACU | | |
| 55 | PDCD1-232 | GCCCUGGCCAGUCGUCU | S. pyogenes | 514 |
| 97 | PDCD1-107 | CGUCUGGGCGGUGCUAC | S. pyogenes | 1533 |
| | | AAC | | |
| 98 | PDCD1-122 | UGUAGCACCGCCCAGAC | S. pyogenes | 579 |
| | | GAC | | |
| 102 | PDCD1-126 | CGACUGGCCAGGGCGCC | S. pyogenes | 582 |
| | | UGU | | |
| 104 | PDCD1-121 | CACCUACCUAAGAACCA | S. pyogenes | 723 |
| | | UCC | | |

[1650] The specificity of each the 6 gRNAs identified above was assessed in primary T cells by GUIDE-seq (see Nature Biotechnology 33:187-197, 2015, which is incorporated herein by reference in its entirety). The results of four independent gDNA samples derived from 2 separate experiments is summarized in Table 2000. An off target was called if bidirectional reads were present in at least one of the 4 samples or unidirectional reads were present in at least 2 of the 4 samples. To confirm the GUIDE-seq results, Amp-seq was performed on 6 independent gDNAs from T cells treated with S. Pyogenes RNP prepared using a gRNA with the targeting domain GUCUGGGCGGUGCUACAACU (SEQ ID NO:508). Amp-seq results were similar to the GUIDE-seq results, and confirmed both (a) the off targets identified and (b) the rank ordering of the guides generated by GUIDE-seq.

TABLE 2000

| Guide ID | 49 | 55 | 97 | 98 | 102 | 104 |
|---|---|---|---|---|---|---|
| SEQ ID NO | 508 | 514 | 1533 | 579 | 582 | 723 |
| # Off Targets | 4 | 2 | 0 | 1 | 5 | 3 |
| # Exonic | 1 | 0 | 0 | 0 | 1 | 0 |
| # Intronic | 0 | 1 | 0 | 0 | 2 | 2 |
| Experimental | 10.5 | 7.9 | 12 | 9.5 | 9.9 | 8 |
| Reads (M) | | | | | | |

### Example 2: Assessment of PDCD1 Knockout Efficiency Across Multiple Donors

[1651] In order to assess cutting efficiency across multiple donors, RNP targeting PDCD1 prepared using gRNA with the targeting domain CGACUGGCCAGGGCGCCUGU (SEQ ID NO:582) was electroporated into activated primary CD4+ T cells from multiple donors. As a control, RNP prepared using control RNP prepared using gRNA with an AAVS1 targeting domain (SEQ ID NO:387) also was electroporated into activated primary CD4+ T cells. PD-1 expression was then assessed by flow cytometry (FACS) using a PE-conjugated anti-PD-1 antibody.

[1652] Primary CD4+ T cells that were previously isolated from healthy donors were thawed and activated using anti-CD3/anti-CD28 beads while cultured in T cell media containing IL-2, IL-7 and IL-15. After 48 hours of activation, beads were removed from the cells and cultivated for an additional 24 hours prior to electroporation with RNP at a dose of 1 μg/100,000 cells. After several days of cultivation (between 3 to 4 days), the cells were re-stimulated with either anti-CD3/anti-CD28 beads or PMA/Ionomycin (PMA/IO). In the case of anti-CD3/anti-CD28 activation, the cells were incubated with the beads for 48 hours and assessed for PD-1 expression by FACS 24 hours later. In the case of PMA/IO activation, the cells were cultured in the presence of PMA/IO for 24 hours followed by assessment of PD-1 expression by FACS. PD-1 expression was assessed using a PE-conjugated anti-PD-1 antibody (available from BioLegend, CA) in accordance with the “Cell Surface Immunofluorescence Staining Protocol” which is available on the BioLegend website: www.biolegend.com/media_assets/support_protocol/BioLegend_Surface_Staining_Flow_Protocol_091012.pdf and which is incorporated herein by reference in its entirety. Gating parameters for T-cell sorting were set based on fluorescent signals in one or more channels and forward and side scatter as described in the literature, e.g., see D. Davies, Cell Sorting by Flow Cytometry, pp. 257-276 in Flow Cytometry: Principles and Applications, Edited by: M. G. Macey, 2007 (Humana Press Inc., Totowa, N.J.) which is incorporated herein by reference in its entirety. Regardless of activation conditions, the expression of PD-1 was assessed in the AAVS1 edited or untreated control population.

[1653] In FIG. 24A, the percentage of cells with PDCD1 knockout is plotted with the error bars depicting the standard deviation over the multiple donors. An example of a PD-1 expression as detected by FACS (flow cytometry) in the aforementioned experiments is shown in FIG. 24B. Upregulation of PD-1 was observed in the AAVS1 edited or untreated control population. In cells treated with RNP targeting PDCD1, compositions were observed to contain approximately 90% PD-1 negative T cells, with >90% PD-1 negative cells observed in cells generated from some donors.

### Example 3: PDCD1 Knockout Does Not Alter the Composition of the T Cell Culture

[1654] In order to assess whether deletion of PDCD1 resulted in changes to the composition of CD8+ T cell culture, RNP targeting PDCD1 prepared using gRNA with the targeting domain CGACUGGCCAGGGCGCCUGU (SEQ ID NO:582) was delivered to a co-culture of CD4+/CD8+ T cells. CD8+ T cells treated with RNP prepared using gRNA with an AAVS1 targeting domain (SEQ ID NO:387) were used as a control.

[1655] Isolated CD4+ and CD8+ T cells were activated with anti-CD3/anti-CD28 beads and cultured in T cell media containing IL-2, IL-7 and IL-15. 48 hours after activation, the activation beads were removed and cells were cultured overnight. The next day the cells were electroporated with the PDCD1- or AAVS1-targeting RNP and cultured in T cell media containing IL-2, IL-7 and IL-15.

[1656] A subset of the cells were split off at day 4 to assess the level of PD-1 expression by flow cytometry after reactivation with anti-CD3/anti-CD28 beads. The remainder of the cells (non-activated cells) were frozen down in T cell freezing media. To determine whether the composition of the cells was altered by the deletion of PDCD1, the AAVS1 guide- and PDCD1 guide-treated cells were thawed into T cell media containing IL-2, IL-7 and IL-15. The cells were then stained with antibodies against CD8, CD62L, and CD45RA in order to assess sub-populations within the CD8+ cell population (including, for example, naïve, central memory, effector memory and terminally differentiated effector memory). The CD62L and CD45RA surface expression levels detected on live (based on forward/side scatter) CD8+ cells is shown in FIG. 25. The subpopulations based on the expression of these two markers are marked in the quadrants of the contour plots with the percentages of cells in each quadrant labeled. The plot shows that there were no major changes observed in the populations in the cells treated with PDCD1-targeting RNP as compared to cells treated with the control AAVS1-targeting RNP.

### Example 4: Genetic Disruption of PDCD1 in Cells Genetically Engineered to Express a Chimeric Antigen Receptor (CAR)

[1657] Primary human CD4+ and CD8+ T cells were isolated by immunoaffinity-based selection from human PBMC samples obtained from healthy donors. The resulting cells were stimulated by culturing with an anti-CD3/anti-CD28 reagent in media containing human serum, IL-2 (100 U/mL), IL-7 (10 ng/mL) and IL-15 (5 ng/mL) at 37° C. prior to engineering with a chimeric antigen receptor (CAR) by lentiviral transduction for 24-48 hours. The cells were transduced using a lentiviral vector containing a nucleic acid molecule encoding an exemplary anti-CD19 CAR and a nucleic acid encoding a truncated EGFR (EGFRt), for use as a surrogate marker for transduction, separated by a sequence encoding a T2A ribosome switch. The CAR included an anti-CD19 scFv, an Ig-derived spacer, a human CD28-derived transmembrane domain, a human 4-1BB-derived intracellular signaling domain and a human CD3 zeta-derived signaling domain. A mock transduction was used as a negative control.

[1658] Following transduction, the cells were cultured for 36-48 hours in media containing human serum and IL-2 (50 U/mL), IL-7 (5 ng/mL) and IL-15 (0.5 ng/mL). The cells then were electroporated with RNP prepared using the PDCD1-targeted gRNA with the targeting domain CGACUGGCCAGGGCGCCUGU (SEQ ID NO:582) (or the AAVS1 control gRNA with the targeting domain GUCCCCUCCACCCCACAGUG (SEQ ID NO:387) and S. pyogenes Cas9. The cells then were cultured in the same media containing IL-2, IL-7 and IL-15 at the same concentrations, overnight at 30° C., and then at 37° C. through day 12-15 post-electroporation.

[1659] A. CAR and PD-1 Expression

[1660] Cell surface expression of PD-1 and CAR expression (as indicated via the surrogate marker) was assessed on day 12 after electroportation, following a 24 hour re-stimulation with beads conjugated with anti-CD3/anti-CD28 antibodies. Cells were stained with anti-EGFR antibody or an anti-PD1 antibody to verify CAR expression (as indicated by surface expression of the surrogate marker, EGFRt) and PD-1 expression on the surface by flow cytometry. The results are shown in FIG. 26.

[1661] As shown in FIG. 18, greater than 90% of the CD8+ T cells and greater than 90% of the CD4+ T cells subjected to electroporation with the PDCD1-targeting RNP under these conditions were observed to be negative for surface expression of PD-1, including in the CAR-expressing populations (as indicated by the EGFRt marker). This result was consistent with the efficient deletion of PDCD1 at both alleles, in both CAR-transduced and non-CAR-expressing CD8+ and CD4+ cells. Surface expression of the surrogate marker also was observed in both control and PD-1-negative cells, indicating that PD-1 knockout did not prevent surface expression of the recombinant surrogate marker protein.

[1662] B. Phenotypic Assessment of CAR+ PD-1 KO Cells

[1663] Phenotypic characteristics of the modified engineered CD4+ and CD8+ T cells also were assessed by flow cytometry assessing surface expression of various markers, including those indicative of phenotype, differentiation state and/or activation state. Cells were stained with antibodies specific for CCR7, 41BB, TIM3, CD27, CD45RA, CD45RO, Lag3, CD62L, CD25 and CD69 in addition to those for recognizing PD-1 and the EGFRt marker (surrogate for CAR expression) as described above. The mean fluorescence intensity detected for each marker in each subpopulation (CAR+/PD1+; CAR+/PD1-; CAR-/PD1+; and CAR-/PD1-) of each T cell sbutype CD4+ and CD8+ was determined.

[1664] The results, set forth in FIG. 27A (CD4+) and FIG. 27B (CD8+), indicated that under the conditions tested, expression levels of the various markers were similar among PD-1-negative CAR-expressing cells (CAR+/PD1−) and the PD-1-positive CAR-expressing cells (CAR+/PD1+).

[1665] C. PDCD1 Deletion in CAR-T Cells

[1666] The disruption of the PDCD1 locus by nuclease-induced non-homologous end-joining (NHEJ) can result in the presence of insertion and/or deletion (indel) mutations in the DNA sequence at the site of the NHEJ repair. T cells engineered and subject to deletion as described above were analyzed for the presence of indels at day 20 postprimary expansion and 10 days after a secondary expansion using MiSeq sequencer (Illumina). The number of indels at the PDCD1 locus and their relative positions compared to the PDCD1 cut site introduced by the PDCD1 targeted gRNA were determined.

[1667] As shown in FIG. 28A, more than 90% of the CAR+ T cells and the mock-transduced T cells that had been electroporated with the PDCD1-targeted Cas9/gRNA RNP contained indels at the PDCD1 locus after primary and after secondary expansion. By comparison, PDCD1 indels were not detected in cells electroporated with the control gAASV1-targeted Cas9/gRNA RNP. As shown in FIG. 28B, the insertions and deletions occurred on or near (i.e., within 50 base pairs upstream or downstream) the cut site directed by the PDCD1 targeted gRNA. The results demonstrated that the PDCD1 targeted gRNA under these conditions effected genetic disruption of PDCD1 in more than 90% of the CAR-expressing T cells, and the disruption was stable through multiple expansions.

### Example 5: Functional Activity of PDCD1-Deleted, CAR-Expressing T Cells

[1668] Genetically engineered human T cells (either CD8+ or CD4+) expressing an exemplary anti-CD19 CAR and knocked out for expression of the PD-1 gene, produced as described in Example 4, were assessed for various functional responses.

[1669] A. Cytolytic Activity

[1670] Transduction (and mock transduction) and PDCD1 (or control) deletion was carried out as described in Example 4 above. The cells then were assessed for cytolytic activity against K562 target cells expressing the CD19 antigen (K562-CD19) or non-specific CD19-negative K562 control cells expressing a control antigen (ROR1) (K562-ROR). The T cells were incubated with the target cells (K562-CD19 or K562-ROR1) at a 4:1 effector:target ratio in the presence of NucRed dye. Lysis of target cells was measured over 70 hours using the Incucyte quantitative cell analysis system (Essen BioScience) by assessing the staining intensity of cells for the NucRed dye. Cells in which lysis occurred exhibited reduced staining intensity for the dye.

[1671] The results showed that CAR-expressing T cells (e.g. CAR+/PD1+, CAR+/PD1− and CAR+/AAVS1−) were able to kill CD19-expressing target cells in a target antigen specific manner to a similar degree. No cell lysis was observed by any of these cells following incubation with target cells expressing the non-specific antigen. The results demonstrated that deletion of PDCD1 did not, under these conditions, affect the CAR-mediated cytotoxic activity of the anti-CD19 CAR-expressing T cells.

[1672] B. T Cell Expansion

[1673] Proliferation of the T cells following incubation with CD19-expressing target cells was assessed by flow cytometry. CD8+ or CD4+ CAR-expressing T cells (or mock control) subject to deletion using RNPs with a guide targeting PDCD1 (or the AAVS1 control) generated as described above were labeled with CellTrace™ violet (ThermoFisher) cell proliferation assay dye. Cells were washed and incubated for 96 hours in triplicate with the same target cells (K562-CD19 or K562-ROR) at a 1:1 effector:target ratio. Division of live T cells was indicated by CellTrace™ violet dye dilution, as assessed by flow cytometry.

[1674] As shown in FIG. 29, CD4+ and CD8+ T cells expressing anti-CD19 CAR (with or without PDCD1 deletion) proliferated after co-culture with K562-CD19 in an antigen-specific manner, to a similar degree. Thus, the results demonstrated that, under these conditions, CAR+ T cells could proliferate in a CAR antigen-specific manner following deletion of PDCD1.

[1675] C. Cytokine Release

[1676] Cytokine release also was assessed following incubation of the various cells with antigen-expressing and control target cells. CAR-expressing T cells (and mock controls) subjected to PDCD1-targeted or AAVS1-targeted deletion or not-transfected (UT), generated as described above, were co-cultured in triplicate with target cells (K562-CD19 or K562-ROR) a 4:1 effector:target ratio. The co-cultured cells were incubated for about 24 hours, and then supernatants were collected for measurement of IFN-γ, TNF-α, or IL-2 using a multiplex cytokine immunoassay (Meso Scale Discovery).

[1677] The results are set forth in FIG. 30A (IFN-γ), FIG. 30B (TNF-α) and FIG. 30C (IL-2). The results showed that, under these conditions, the PDCD1-deleted and control CAR-expressing T cells secreted similar levels cytokines in an antigen-specific manner, following incubation with CD19-expressing target cells.

### Example 6: Cloning and Initial Screening of gRNAs

[1678] The suitability of candidate gRNAs can be evaluated as described in this example. Although described for a chimeric gRNA, the approach can also be used to evaluate modular gRNAs.

[1679] Cloning gRNAs into Vectors

[1680] For each gRNA, a pair of overlapping oligonucleotides is designed and obtained. Oligonucleotides are annealed and ligated into a digested vector backbone containing an upstream U6 promoter and the remaining sequence of a long chimeric gRNA. Plasmid is sequence-verified and prepped to generate sufficient amounts of transfection-quality DNA. Alternate promoters may be used to drive in vivo transcription (e.g., H1 promoter) or for in vitro transcription (e.g., a T7 promoter).

[1681] Cloning gRNAs in Linear dsDNA Molecule (STITCHR)

[1682] For each gRNA, a single oligonucleotide is designed and obtained. The U6 promoter and the gRNA scaffold (e.g. including everything except the targeting domain, e.g., including sequences derived from the crRNA and tracrRNA, e.g., including a first complementarity domain; a linking domain; a second complementarity domain; a proximal domain; and a tail domain) are separately PCR amplified and purified as dsDNA molecules. The gRNA-specific oligonucleotide is used in a PCR reaction to stitch together the U6 and the gRNA scaffold, linked by the targeting domain specified in the oligonucleotide. Resulting dsDNA molecule (STITCHR product) is purified for transfection. Alternate promoters may be used to drive in vivo transcription (e.g., H1 promoter) or for in vitro transcription (e.g., T7 promoter). Any gRNA scaffold may be used to create gRNAs compatible with Cas9s from any bacterial species

[1683] Initial gRNA Screen

[1684] Each gRNA to be tested is transfected, along with a plasmid expressing Cas9 and a small amount of a GFP-expressing plasmid into human cells. In preliminary experiments, these cells can be immortalized human cell lines such as 293T, K562 or U2OS. Alternatively, primary human cells may be used. In this case, cells may be relevant to the eventual therapeutic cell target (for example, an erythroid cell). The use of primary cells similar to the potential therapeutic target cell population may provide important information on gene targeting rates in the context of endogenous chromatin and gene expression.

[1685] Transfection may be performed using lipid transfection (such as Lipofectamine or Fugene) or by electroporation (such as Lonza Nucleofection). Following transfection, GFP expression can be determined either by fluorescence microscopy or by flow cytometry to confirm consistent and high levels of transfection. These preliminary transfections can comprise different gRNAs and different targeting approaches (17-mers, 20-mers, nuclease, dual-nickase, etc.) to determine which gRNAs/combinations of gRNAs give the greatest activity.

[1686] Efficiency of cleavage with each gRNA may be assessed by measuring NHEJ-induced indel formation at the target locus by a T7E1-type assay or by sequencing. Alternatively, other mismatch-sensitive enzymes, such as Cell/Surveyor nuclease, may also be used.

[1687] For the T7E1 assay, PCR amplicons are approximately 500-700 bp with the intended cut site placed asymmetrically in the amplicon. Following amplification, purification and size-verification of PCR products, DNA is denatured and re-hybridized by heating to 95° C. and then slowly cooling. Hybridized PCR products are then digested with T7 Endonuclease I (or other mismatch-sensitive enzyme) which recognizes and cleaves non-perfectly matched DNA. If indels are present in the original template DNA, when the amplicons are denatured and re-annealed, this results in the hybridization of DNA strands harboring different indels and therefore lead to double-stranded DNA that is not perfectly matched. Digestion products may be visualized by gel electrophoresis or by capillary electrophoresis. The fraction of DNA that is cleaved (density of cleavage products divided by the density of cleaved and uncleaved) may be used to estimate a percent NHEJ using the following equation: % NHEJ=(1-(1-fraction cleaved)^{1/2}). The T7E1 assay is sensitive down to about 2-5% NHEJ.

[1688] Sequencing may be used instead of, or in addition to, the T7E1 assay. For Sanger sequencing, purified PCR amplicons are cloned into a plasmid backbone, transformed, miniprepped and sequenced with a single primer. Sanger sequencing may be used for determining the exact nature of indels after determining the NHEJ rate by T7E1.

[1689] Sequencing may also be performed using next generation sequencing techniques. When using next generation sequencing, amplicons may be 300-500 bp with the intended cut site placed asymmetrically. Following PCR, next generation sequencing adapters and barcodes (for example Illumina multiplex adapters and indexes) may be added to the ends of the amplicon, e.g., for use in high throughput sequencing (for example on an Illumina MiSeq). This method allows for detection of very low NHEJ rates.

### Example 7: Assessment of Gene Targeting by NHEJ

[1690] The gRNAs that induce the greatest levels of NHEJ in initial tests can be selected for further evaluation of gene targeting efficiency. In this case, cells are derived from disease subjects and, therefore, harbor the relevant mutation.

[1691] Following transfection (usually 2-3 days post-transfection) genomic DNA may be isolated from a bulk population of transfected cells and PCR may be used to amplify the target region. Following PCR, gene targeting efficiency to generate the desired mutations (either knockout of a target gene or removal of a target sequence motif) may be determined by sequencing. For Sanger sequencing, PCR amplicons may be 500-700 bp long. For next generation sequencing, PCR amplicons may be 300-500 bp long. If the goal is to knockout gene function, sequencing may be used to assess what percent of alleles have undergone NHEJ-induced indels that result in a frameshift or large deletion or insertion that would be expected to destroy gene function. If the goal is to remove a specific sequence motif, sequencing may be used to assess what percent of alleles have undergone NHEJ-induced deletions that span this sequence.

### Example 8: Screening of gRNAs in 293 Cells

[1692] Screening of gRNAs for T Cell Receptor Beta (TRBC)

[1693] In order to identify gRNAs with the highest on target NHEJ efficiency, 42 S. pyogenes and 27 S. aureus gRNAs were selected (Table 3000). A DNA template comprised of a U6 promoter, the gRNA target region and appropriate TRACR sequence (S. pyogenes or S. aureus) was generated by a PCR STITCHR reaction. This DNA template was subsequently transfected into 293 cells using Lipofectamine 3000 along with a DNA plasmid encoding the appropriate Cas9 (S. pyogenes or S. aureus) downstream of a CMV promoter. Genomic DNA was isolated from the cells 48-72 hours post transfection. To determine the rate of modification at the T cell receptor beta gene (TRBC), the target region was amplified using a locus PCR with the primers listed in Table 4000. After PCR amplification, a T7E1 assay was performed on the PCR product. Briefly, this assay involves melting the PCR product followed by a re-annealing step. If gene modification has occurred, there will exist double stranded products that are not perfect matches due to some frequency of insertions or deletions. These double stranded products are sensitive to cleavage by a T7 endonuclease 1 enzyme at the site of mismatch. It is possible, therefore, to determine the efficiency of cutting by the Cas9/gRNA complex by analyzing the amount of T7E1 cleavage. The formula that is used to provide a measure of % NHEJ from the T7E1 cutting is the following: (100*(1−((1−(fraction cleaved))̂0.5))). The results of this analysis are shown in FIG. 11 and FIG. 12.

TABLE 3000

| | | | SEQ |
|---|---|---|---|
| | | | ID |
| gRNA Name | Targeting Domain | Cas9 species | NO: |
| TRBC-40 | CACCCAGAUCGUCAGCGCCG | S. pyogenes | 387 |
| TRBC-52 | CAAACACAGCGACCUCGGGU | S. pyogenes | 388 |
| TRBC-25 | UGACGAGUGGACCCAGGAUA | S. pyogenes | 389 |
| TRBC-35 | GGCUCUCGGAGAAUGACGAG | S. pyogenes | 390 |
| TRBC-50 | GGCCUCGGCGCUGACGAUCU | S. pyogenes | 391 |
| TRBC-39 | GAAAAACGUGUUCCCACCCG | S. pyogenes | 392 |
| TRBC-49 | AUGACGAGUGGACCCAGGAU | S. pyogenes | 393 |
| TRBC-51 | AGUCCAGUUCUACGGGCUCU | S. pyogenes | 394 |
| TRBC-26 | CGCUGUCAAGUCCAGUUCUA | S. pyogenes | 395 |
| TRBC-47 | AUCGUCAGCGCCGAGGCCUG | S. pyogenes | 396 |
| TRBC-45 | UCAAACACAGCGACCUCGGG | S. pyogenes | 397 |
| TRBC-34 | CGUAGAACUGGACUUGACAG | S. pyogenes | 398 |
| TRBC-227 | AGGCCUCGGCGCUGACGAUC | S. pyogenes | 399 |
| TRBC-41 | UGACAGCGGAAGUGGUUGCG | S. pyogenes | 400 |
| TRBC-30 | UUGACAGCGGAAGUGGUUGC | S. pyogenes | 401 |
| TRBC-206 | UCUCCGAGAGCCCGUAGAAC | S. pyogenes | 402 |
| TRBC-32 | CGGGUGGGAACACGUUUUUC | S. pyogenes | 403 |
| TRBC-276 | GACAGGUUUGGCCCUAUCCU | S. pyogenes | 404 |
| TRBC-274 | GAUCGUCAGCGCCGAGGCCU | S. pyogenes | 405 |
| TRBC-230 | GGCUCAAACACAGCGACCUC | S. pyogenes | 406 |
| TRBC-235 | UGAGGGUCUCGGCCACCUUC | S. pyogenes | 407 |
| TRBC-38 | AGGCUUCUACCCCGACCACG | S. pyogenes | 408 |
| TRBC-223 | CCGACCACGUGGAGCUGAGC | S. pyogenes | 409 |
| TRBC-221 | UGACAGGUUUGGCCCUAUCC | S. pyogenes | 410 |
| TRBC-48 | CUUGACAGCGGAAGUGGUUG | S. pyogenes | 411 |
| TRBC-216 | AGAUCGUCAGCGCCGAGGCC | S. pyogenes | 412 |
| TRBC-210 | GCGCUGACGAUCUGGGUGAC | S. pyogenes | 413 |
| TRBC-268 | UGAGGGCGGGCUGCUCCUUG | S. pyogenes | 414 |
| TRBC-193 | GUUGCGGGGGUUCUGCCAGA | S. pyogenes | 415 |
| TRBC-246 | AGCUCAGCUCCACGUGGUCG | S. pyogenes | 416 |
| TRBC-228 | GCGGCUGCUCAGGCAGUAUC | S. pyogenes | 417 |
| TRBC-43 | GCGGGGGUUCUGCCAGAAGG | S. pyogenes | 418 |
| TRBC-272 | UGGCUCAAACACAGCGACCU | S. pyogenes | 419 |
| TRBC-33 | ACUGGACUUGACAGCGGAAG | S. pyogenes | 420 |
| TRBC-44 | GACAGCGGAAGUGGUUGCGG | S. pyogenes | 421 |
| TRBC-211 | GCUGUCAAGUCCAGUUCUAC | S. pyogenes | 422 |
| TRBC-253 | GUAUCUGGAGUCAUUGAGGG | S. pyogenes | 423 |
| TRBC-18 | CUCGGCGCUGACGAUCU | S. pyogenes | 424 |
| TRBC-6 | CCUCGGCGCUGACGAUC | S. pyogenes | 425 |
| TRBC-85 | CCGAGAGCCCGUAGAAC | S. pyogenes | 426 |
| TRBC-129 | CCAGAUCGUCAGCGCCG | S. pyogenes | 427 |
| TRBC-93 | GAAUGACGAGUGGACCC | S. pyogenes | 428 |
| TRBC-415 | GGGUGACAGGUUUGGCCCUAUC | S. aureus | 429 |
| TRBC-414 | GGUGACAGGUUUGGCCCUAUC | S. aureus | 430 |
| TRBC-310 | GUGACAGGUUUGGCCCUAUC | S. aureus | 431 |
| TRBC-308 | GACAGGUUUGGCCCUAUC | S. aureus | 432 |
| TRBC-401 | GAUACUGCCUGAGCAGCCGCCU | S. aureus | 433 |
| TRBC-468 | GACCACGUGGAGCUGAGCUGGUGG | S. aureus | 434 |
| TRBC-462 | GUGGAGCUGAGCUGGUGG | S. aureus | 435 |
| TRBC-424 | GGGCGGGCUGCUCCUUGAGGGGCU | S. aureus | 436 |
| TRBC-423 | GGCGGGCUGCUCCUUGAGGGGCU | S. aureus | 437 |
| TRBC-422 | GCGGGCUGCUCCUUGAGGGGCU | S. aureus | 438 |
| TRBC-420 | GGGCUGCUCCUUGAGGGGCU | S. aureus | 439 |
| TRBC-419 | GGCUGCUCCUUGAGGGGCU | S. aureus | 440 |
| TRBC-418 | GCUGCUCCUUGAGGGGCU | S. aureus | 441 |
| TRBC-445 | GGUGAAUGGGAAGGAGGUGCACAG | S. aureus | 442 |
| TRBC-444 | GUGAAUGGGAAGGAGGUGCACAG | S. aureus | 443 |
| TRBC-442 | GAAUGGGAAGGAGGUGCACAG | S. aureus | 444 |

TABLE 4000

| | | | SEQ |
|---|---|---|---|
| Primer | | | ID |
| name | Sequence | Exon | NO: |
| GWED133 | ACATCACCTGGAATGTTAGGCA | TRBC2 5′ primer | 445 |
| GWED134 | GTGAACCTTGATCATCCCACCT | TRBC2 3′ Primer | 446 |
| GWED137 | CCCCAAAACAATGAGGGCCT | TRBC1 5′ primer | 447 |
| GWED138 | AGCACCTCCTTTCTTCTGCC | TRBC1 3′ primer | 448 |

[1694] Screening of gRNAs for T Cell Receptor Alpha (TRAC)

[1695] In order to identify gRNAs with the highest on target NHEJ efficiency, 18 S. pyogenes and 13 S. aureus gRNAs were selected (Table 5000). A DNA template comprised of a U6 promoter, the gRNA target region and appropriate TRACR sequence (S. pyogenes or S. aureus) was generated by a PCR STITCHR reaction. This DNA template was subsequently transfected into 293 cells using Lipofectamine 3000 along with a DNA plasmid encoding the appropriate Cas9 (S. pyogenes or S. aureus) downstream of a CMV promoter. Genomic DNA was isolated from the cells 48-72 hours post transfection. To determine the rate of modification at the T cell receptor alpha gene (TRAC), the target region was amplified using a locus PCR with the primers listed in Table 6000. After PCR amplification, a T7E1 assay was performed on the PCR product. Briefly, this assay involves melting the PCR product followed by a re-annealing step. If gene modification has occurred, there will exist double stranded products that are not perfect matches due to some frequency of insertions or deletions. These double stranded products are sensitive to cleavage by a T7 endonuclease 1 enzyme at the site of mismatch. It is possible, therefore, to determine the efficiency of cutting by the Cas9/gRNA complex by analyzing the amount of T7E1 cleavage. The formula that is used to provide a measure of % NHEJ from the T7E1 cutting is the following: (100*(1−((1−(fraction cleaved))̂0.5))). The results of this analysis are shown in FIG. 13 and FIG. 14.

TABLE 5000

| gRNA | | Cas9 | SEQ |
|---|---|---|---|
| Name | Targeting Domain | species | ID NO: |
| TRAC-10 | UCUCUCAGCUGGUACACGGC | S. pyogenes | 449 |
| TRAC-110 | UGGAUUUAGAGUCUCUCAGC | S. pyogenes | 450 |
| TRAC-116 | ACACGGCAGGGUCAGGGUUC | S. pyogenes | 451 |
| TRAC-16 | GAGAAUCAAAAUCGGUGAAU | S. pyogenes | 452 |
| TRAC-4 | GCUGGUACACGGCAGGGUCA | S. pyogenes | 453 |
| TRAC-49 | CUCAGCUGGUACACGGC | S. pyogenes | 454 |
| TRAC-2 | UGGUACACGGCAGGGUC | S. pyogenes | 455 |
| TRAC-30 | GCUAGACAUGAGGUCUA | S. pyogenes | 456 |
| TRAC-43 | GUCAGAUUUGUUGCUCC | S. pyogenes | 457 |
| TRAC-23 | UCAGCUGGUACACGGCA | S. pyogenes | 458 |
| TRAC-34 | GCAGACAGACUUGUCAC | S. pyogenes | 459 |
| TRAC-25 | GGUACACGGCAGGGUCA | S. pyogenes | 460 |
| TRAC-128 | CUUCAAGAGCAACAGUGCUG | S. pyogenes | 461 |
| TRAC-105 | AGAGCAACAGUGCUGUGGCC | S. pyogenes | 462 |
| TRAC-106 | AAAGUCAGAUUUGUUGCUCC | S. pyogenes | 463 |
| TRAC-123 | ACAAAACUGUGCUAGACAUG | S. pyogenes | 464 |
| TRAC-64 | AAACUGUGCUAGACAUG | S. pyogenes | 465 |
| TRAC-97 | UGUGCUAGACAUGAGGUCUA | S. pyogenes | 466 |
| TRAC-148 | GGCUGGGGAAGAAGGUGUCUUC | S. aureus | 467 |
| TRAC-147 | GCUGGGGAAGAAGGUGUCUUC | S. aureus | 468 |
| TRAC-234 | GGGGAAGAAGGUGUCUUC | S. aureus | 469 |
| TRAC-167 | GUUUUGUCUGUGAUAUACACAU | S. aureus | 470 |
| TRAC-177 | GGCAGACAGACUUGUCACUGGAUU | S. aureus | 471 |
| TRAC-176 | GCAGACAGACUUGUCACUGGAUU | S. aureus | 472 |
| TRAC-257 | GACAGACUUGUCACUGGAUU | S. aureus | 473 |
| TRAC-233 | GUGAAUAGGCAGACAGACUUGUCA | S. aureus | 474 |
| TRAC-231 | GAAUAGGCAGACAGACUUGUCA | S. aureus | 475 |
| TRAC-163 | GAGUCUCUCAGCUGGUACACGG | S. aureus | 476 |
| TRAC-241 | GUCUCUCAGCUGGUACACGG | S. aureus | 477 |
| TRAC-179 | GGUACACGGCAGGGUCAGGGUU | S. aureus | 478 |
| TRAC-178 | GUACACGGCAGGGUCAGGGUU | S. aureus | 49451 |

TABLE 6000

| | | | SEQ |
|---|---|---|---|
| | | | ID |
| Primer name | Sequence | Exon | NO: |
| GWED141 | GTTTGCTTTGCTGGGCCTTT | TRAC 5′ primer | 479 |
| GWED142 | CCTCTCCTGCCACCTTCTCT | TRAC 3′ primer | 480 |

[1696] Screening of gRNAs for PDCD1 Gene

[1697] In order to identify gRNAs with the highest on target NHEJ efficiency, 48 S. pyogenes and 27 S. aureus gRNAs were selected (see Tables 7000A and 7000B). A DNA template comprised of a U6 promoter, the gRNA target region and appropriate TRACR sequence (S. pyogenes or S. aureus) was generated by a PCR STITCHR reaction. This DNA template was subsequently transfected into 293 cells using Lipofectamine 3000 along with a DNA plasmid encoding the appropriate Cas9 (S. pyogenes or S. aureus) downstream of a CMV promoter. Genomic DNA was isolated from the cells 48-72 hours post transfection. To determine the rate of modification at the PD-1 gene (PDCD1), the target region was amplified using a locus PCR with the primers listed in Table 7000C. After PCR amplification, a T7E1 assay was performed on the PCR product. Briefly, this assay involves melting the PCR product followed by a re-annealing step. If gene modification has occurred, there will exist double stranded products that are not perfect matches due to some frequency of insertions or deletions. These double stranded products are sensitive to cleavage by a T7 endonuclease 1 enzyme at the site of mismatch. It is possible, therefore, to determine the efficiency of cutting by the Cas9/gRNA complex by analyzing the amount of T7E1 cleavage. The formula that is used to provide a measure of % NHEJ from the T7E1 cutting is the following: (100*(1−((1−(fraction cleaved))̂0.5))). The results of this analysis for the gRNAs shown in Table 7000A are shown in FIG. 15 and FIG. 16. Similar experiments can be performed with other gRNAs described herein, including those shown in Table 7000B.

TABLE 7000A

| | | | SEQ |
|---|---|---|---|
| | | Cas9 | ID |
| gRNA Name | Targeting Domain | species | NO: |
| PDCD1-3202 | GGUGCUACAACUGGGCUGGCGGC | S. aureus | 481 |
| PDCD1-3201 | GUGCUACAACUGGGCUGGCGGC | S. aureus | 482 |
| PDCD1-531 | GCUACAACUGGGCUGGCGGC | S. aureus | 483 |
| PDCD1-3190 | GACGACUGGCCAGGGCGCCUG | S. aureus | 484 |
| PDCD1-3188 | GACUGGCCAGGGCGCCUG | S. aureus | 485 |
| PDCD1-3216 | GCAUGCCUGGAGCAGCCCCAC | S. aureus | 486 |
| PDCD1-3195 | GGGGGGUUCCAGGGCCUGUCUG | S. aureus | 487 |
| PDCD1-3194 | GGGGGUUCCAGGGCCUGUCUG | S. aureus | 488 |
| PDCD1-94 | GGGGUUCCAGGGCCUGUCUG | S. aureus | 489 |
| PDCD1-557 | GAGAGCCUGCGGGCAGAGCU | S. aureus | 490 |
| PDCD1-3234 | GAGCCUGCGGGCAGAGCU | S. aureus | 491 |
| PDCD1-3196 | GGGGGGGUUCCAGGGCCUGUCUG | S. aureus | 492 |
| PDCD1-3222 | GCAGGGCUGGGGAGAAGGUGG | S. aureus | 493 |
| PDCD1-3220 | GGGCUGGGGAGAAGGUGG | S. aureus | 494 |
| PDCD1-3224 | GAGCAGGGCUGGGGAGAAGGUGG | S. aureus | 495 |
| PDCD1-3773 | GGCCGCCCACGACACCAACCAC | S. aureus | 496 |
| PDCD1-3772 | GCCGCCCACGACACCAACCAC | S. aureus | 497 |
| PDCD1-3770 | GCCCACGACACCAACCAC | S. aureus | 498 |
| PDCD1-3785 | GGUUUGGAACUGGCCGGCUGGC | S. aureus | 499 |
| PDCD1-3784 | GUUUGGAACUGGCCGGCUGGC | S. aureus | 500 |
| PDCD1-108 | GUCUGGGCGGUGCUACAACU | S. pyogenes | 508 |
| PDCD1-105 | GGCGCCCUGGCCAGUCGUCU | S. pyogenes | 509 |
| PDCD1-109 | GGGCGGUGCUACAACUGGGC | S. pyogenes | 510 |
| PDCD1-114 | GGCCAGGAUGGUUCUUAGGU | S. pyogenes | 511 |
| PDCD1-117 | GGAUGGUUCUUAGGUAGGUG | S. pyogenes | 512 |
| PDCD1-2694 | GAAGGCGGCACUCUGGU | S. pyogenes | 513 |
| PDCD1-232 | GCCCUGGCCAGUCGUCU | S. pyogenes | 514 |
| PDCD1-251 | GCCCAGACGACUGGCCA | S. pyogenes | 515 |
| PDCD1-242 | GAUGGUUCUUAGGUAGG | S. pyogenes | 516 |
| PDCD1-2540 | GGCGGAGGUGAGCGGAA | S. pyogenes | 517 |
| PDCD1-2541 | GGAAGGGAAACUGUCCC | S. pyogenes | 518 |
| PDCD1-16 | GCGUGACUUCCACAUGAGCG | S. pyogenes | 519 |
| PDCD1-4 | GCCCUGCUCGUGGUGACCGA | S. pyogenes | 520 |
| PDCD1-52 | GGUGCCGCUGUCAUUGCGCC | S. pyogenes | 521 |
| PDCD1-42 | GCUCUCUUUGAUCUGCGCCU | S. pyogenes | 522 |
| PDCD1-77 | GAAGGUGGCGUUGUCCCCUU | S. pyogenes | 523 |
| PDCD1-15 | GUGUCACACAACUGCCCAAC | S. pyogenes | 524 |
| PDCD1-71 | GCUUGUCCGUCUGGUUGCUG | S. pyogenes | 525 |
| PDCD1-47 | GAUCUGCGCCUUGGGGGCCA | S. pyogenes | 526 |
| PDCD1-53 | GGGCCCUGACCACGCUCAUG | S. pyogenes | 527 |
| PDCD1-57 | GCAGUUGUGUGACACGGAAG | S. pyogenes | 528 |
| PDCD1-21 | GACAGCGGCACCUACCUCUG | S. pyogenes | 529 |
| PDCD1-181 | GUGGAAGUCACGCCCGU | S. pyogenes | 530 |
| PDCD1-133 | GCUCGUGGUGACCGAAG | S. pyogenes | 531 |
| PDCD1-147 | GCCCGGCGCAAUGACAG | S. pyogenes | 532 |
| PDCD1-179 | GCCGCUGUCAUUGCGCC | S. pyogenes | 533 |
| PDCD1-149 | GCGGCACCUACCUCUGU | S. pyogenes | 534 |
| PDCD1-204 | GGUGGCGUUGUCCCCUU | S. pyogenes | 535 |
| PDCD1-200 | GAAGCUCUCCGAUGUGU | S. pyogenes | 536 |
| PDCD1-184 | GUUGUGUGACACGGAAG | S. pyogenes | 537 |
| PDCD1-192 | GCUGGCUGCGGUCCUCG | S. pyogenes | 538 |
| PDCD1-193 | GCUGCGGUCCUCGGGGA | S. pyogenes | 539 |
| PDCD1-385 | GACGUUACCUCGUGCGGCCC | S. pyogenes | 540 |
| PDCD1-266 | GGUGUCGUGGGCGGCCUGCU | S. pyogenes | 541 |
| PDCD1-379 | GCCCACGACACCAACCACCA | S. pyogenes | 542 |
| PDCD1-268 | GCAGCCUGGUGCUGCUAGUC | S. pyogenes | 543 |
| PDCD1-270 | GGUGCUGCUAGUCUGGGUCC | S. pyogenes | 544 |
| PDCD1-382 | GGACCCAGACUAGCAGCACC | S. pyogenes | 545 |
| PDCD1-362 | GGCACUUCUGCCCUUCUCUC | S. pyogenes | 546 |
| PDCD1-267 | GGGCGGCCUGCUGGGCAGCC | S. pyogenes | 547 |

TABLE 7000B

| | | | SEQ |
|---|---|---|---|
| | | Cas9 | ID |
| gRNA Name | Targeting Domain | species | NO: |
| PDCD1-3856 | GGGCAGCCUGGUGCUGCUAGU | S. aureus | 501 |
| PDCD1-720 | GGCAGCCUGGUGCUGCUAGU | S. aureus | 502 |
| PDCD1-3855 | GCAGCCUGGUGCUGCUAGU | S. aureus | 503 |
| PDCD1-369 | GGCUGGCCUGGGUGAGGGGC | S. aureus | 504 |
| PDCD1-3786 | GGGUUUGGAACUGGCCGGCUGGC | S. aureus | 505 |
| PDCD1-3859 | GCUGGGCAGCCUGGUGCUGCUAGU | S. aureus | 506 |
| PDCD1-3781 | GGCCGGCUGGCCUGGGUGAGGGGC | S. aureus | 507 |
| PDCD1-381 | GCAGCACCAGGCUGCCCAGC | S. pyogenes | 548 |
| PDCD1-368 | GCUGGCCUGGGUGAGGGGCU | S. pyogenes | 549 |
| PDCD1-472 | GUUACCUCGUGCGGCCC | S. pyogenes | 550 |
| PDCD1-316 | GUCGUGGGCGGCCUGCU | S. pyogenes | 551 |
| PDCD1-462 | GUUUGGAACUGGCCGGC | S. pyogenes | 552 |
| PDCD1-322 | GGCCGUCAUCUGCUCCC | S. pyogenes | 553 |
| PDCD1-320 | GCUGCUAGUCUGGGUCC | S. pyogenes | 554 |
| PDCD1-318 | GCCUGGUGCUGCUAGUC | S. pyogenes | 555 |

TABLE 7000C

| | | | SEQ |
|---|---|---|---|
| | | | ID |
| Primer name | Sequence | Exon | NO: |
| GWED259 | CACTGCCTCTGTCACTCTCG | PD1_exon_1_5′ | 556 |
| GWED260 | AGGGACTGAGAGTGAAAGGT | PD1_exon_1_3′ | 557 |
| JFPR04 | CAGGATGCCCAAGGGTCAG | PD1_exon_2_5′ | 558 |
| JFPR004R | GGAGCTCCTGATCCTGTGC | PD1_exon_2_3′ | 559 |
| GWED257 | AATGGTGACCGGCATCTCTG | PD1_exon_3_5′ | 560 |
| JFPR005 | CTGCACAGGATCAGGAGCTC | PD1_exon_3_5′ | 561 |
| JFPR005R | AGAATGTGAGTCCTGCAGGC | PD1_exon_3_3′ | 562 |

### Example 9: Enzymatic Synthesis and Delivery of gRNAs to Primary T Cells

[1698] Delivery of Cas9 mRNA and gRNA as RNA Molecules to T Cells

[1699] To demonstrate Cas9-mediated cutting in primary CD4+ T cells, S. pyogenes Cas9 and a gRNA designed against the TCR beta chain (TRBC-210 (GCGCUGACGAUCUGGGUGAC) (SEQ ID NO:413)) or the TCR alpha chain (TRAC-4 (GCUGGUACACGGCAGGGUCA) (SEQ ID NO:453)) were delivered as RNA molecules to T cells via electroporation. In this embodiment, both the Cas9 and gRNA were in vitro transcribed using a T7 polymerase. A 5′ ARCA cap was added to both RNA species simultaneous to transcription while a polyA tail was added after transcription to the 3′ end of the RNA species by an E. coli polyA polymerase. To generate CD4+ T cells modified at the TRBC1 and TRBC2 loci, 10 ug of Cas9 mRNA and 10 ug of TRBC-210 (GCGCUGACGAUCUGGGUGAC) (SEQ ID NO:413) gRNA were introduced to the cells by electroporation. In the same experiment, we also targeted the TRAC gene by introducing 10 ug of Cas9 mRNA with 10 ug of TRAC-4 (GCUGGUACACGGCAGGGUCA) (SEQ ID NO:453) gRNA. A gRNA targeting the AAVS1 (GUCCCCUCCACCCCACAGUG) (SEQ ID NO:51201) genomic site was used as an experimental control. Prior to electroporation, the T cells were cultured in RPMI 1640 supplemented with 10% FBS and recombinant IL-2. The cells were activated using CD3/CD28 beads and expanded for at least 3 days. Subsequent to introduction of the mRNA to the activated T cells, CD3 expression on the cells was monitored at 24, 48 and 72 hours post electroporation by flow cytometry using a fluorescein (APC) conjugated antibody specific for CD3. At 72 hours, a population of CD3 negative cells was observed (FIG. 17A and FIG. 17B). To confirm that the generation of CD3 negative cells was a result of genome editing at the TRBC loci, genomic DNA was harvested and a T7E1 assay was performed. Indeed, the data confirm the presence of DNA modifications at the TRBC2 locus and TRAC locus (FIG. 17C).

[1700] Delivery of Cas9/gRNA RNP to T Cells

[1701] To demonstrate Cas9-mediated cutting in Jurkat T cells, S. aureus Cas9 and a gRNA designed against the TCR alpha chain (TRAC-233 (GUGAAUAGGCAGACAGACUUGUCA) (SEQ ID NO:474)) were delivered as a ribonucleic acid protein complex (RNP) by electroporation. In this embodiment, the Cas9 was expressed in E. coli and purified. Specifically, the HJ29 plasmid encoding Cas9 was transformed into Rosetta™ 2 (DE3) chemically competent cells (EMD Millipore #71400-4) and plated onto LB plates with appropriate antibiotics for selection and incubated at 37° C. overnight. A 10 mL starter culture of Brain Heart Infusion Broth (Teknova #B9993) with appropriate antibiotics was inoculated with 4 colonies and grown at 37° C. with shaking at 220 rpms. After growing overnight, the starter culture was added to 1 L of Terrific Broth Complete (Teknova #T7060) with appropriate antibiotics plus supplements and grown at 37° C. with shaking at 220 rpms. The temperature was gradually reduced to 18° C. and expression of the gene was induced by addition of IPTG to 0.5 mM when the OD600 was greater than 2.0. The induction was allowed to continue overnight followed by harvesting the cells by centrifugation and resuspension in TG300 (50 mM Tris pH8.0, 300 mM NaCl, 20% glycerol, 1 mM TCEP, protease inhibitor tablets (Thermo Scientific #88266)) and stored at −80° C.

[1702] The cells were lysed by thawing the frozen suspension, followed by two passes through a LM10 Microfluidizer® set to 18000 psi. The extract was clarified via centrifugation and the soluble extract was captured via batch incubation with Ni-NTA Agarose resin (Qiagen #30230) at 4° C. The slurry was poured into a gravity flow column, washed with TG300+30 mM Imidazole and then eluted the protein of interest with TG300+300 mM Imidazole. The Ni eluent was diluted with an equal volume of HG100 (50 mM Hepes pH7.5, 100 mM NaCl, 10% glycerol, 0.5 mM TCEP) and loaded onto a HiTrap SP HP column (GE Healthcare Life Sciences #17-1152-01) and eluted with a 30 column volume gradient from HG100 to HG1000 (50 mM Hepes pH7.5, 1000 mM NaCl, 10% glycerol, 0.5 mM TCEP). Appropriate fractions were pooled after assaying with an SDS-PAGE gel and concentrated for loading onto a SRT10 SEC300 column (Sepax #225300-21230) equilibrated in HG150 (10 mM Hepes pH7.5, 150 mM NaCl, 20% glycerol, 1 mM TCEP). Fractions were assayed by SDS-PAGE and appropriately pooled, concentrated to at least 5 mg/ml.

[1703] The gRNA was generated by in vitro transcription using a T7 polymerase. A 5′ ARCA cap was added to the RNA simultaneous to transcription while a polyA tail was added after transcription to the 3′ end of the RNA species by an E. coli polyA polymerase. Prior to introduction into the cells, the purified Cas9 and gRNA were mixed and allowed to form complexes for 10 minutes. The RNP solution was subsequently introduced into Jurkat T cells by electroporation. Prior to and after electroporation, the cells were cultured in RPMI1640 media supplemented with 10% FBS. CD3 expression on the cells was monitored at 24, 48 and 72 hours post electroporation by flow cytometry using a fluorescein conjugated antibody specific for CD3. At 48 and 72 hours, a population of CD3 negative cells was observed (FIG. 18A and FIG. 18B). To confirm that the generation of CD3 negative cells was a result of genome editing at the TRAC locus, genomic DNA was harvested and a T7E1 assay was performed. Indeed, the data confirm the presence of DNA modifications at the TRAC locus (FIG. 18C).

### Example 10: Assessing Effect of gRNA Modifications on T Cell Viability

[1704] In order to assess how gRNA modifications affect T cell viability, S. pyogenes Cas9 mRNA was delivered to Jurkat T cells in combination with an AAVS1 gRNA (GUCCCCUCCACCCCACAGUG) (SEQ ID NO:387) with or without modification. Specifically, 4 different combinations of modification were analyzed, (1) gRNA with a 5′ Anti-Reverse Cap Analog (ARCA) cap (see FIG. 19) and polyA tail, (2) gRNA with a 5′ ARCA cap only, (3) gRNA with a polyA tail only, (4) gRNA without any modification. In order to generate all of four of the aforemention versions of modified gRNAs, a DNA template comprising a T7 promoter, AAVS1 gRNA target sequence (GUCCCCUCCACCCCACAGUG) (SEQ ID NO:387), and S. pyogenes TRACR sequence. For all gRNAs, T7 polymerase was used to generate the gRNA in the presence of 7.5 mM UTP, 7.5 mM GTP, 7.5 mM CTP and 7.5 mM ATP. In order to modify the gRNAs with a 5′ ARCA cap, 6.0 mM of ARCA analog was added to the NTP pool. Consequently, only 1.5 mM of GTP was added while the rest of the NTP pool remained at the same concentration: 7.5 mM UTP, 7.5 mM CTP and 7.5 mM ATP. In order to add a polyA tail to the gRNAs a recombinant polyA polymerase that was purified from E. coli was used to add a series of As to the end of the transcribed gRNA after the in vitro polymerase reaction was terminated. Termination was achieved by eliminating the DNA template with DNase I. The polyA tail reaction was performed for approximately 40 minutes. Regardless of the gRNA modification, all gRNA preparations were purified by phenol:choroform extraction followed by isopropanol precipitation. Once the gRNAs were generated, Jurkat T cells were electroporated with S. pyogenes Cas9 mRNA (modified with a 5′ ARCA cap and polyA tail) and one of the 4 different modified AAVS1-specific gRNAs. Following electroporation cell viability was determined by performing an Annexin-V and propidium iodide double stain. The fraction of live cells, which do not stain for Annexin-V and PI was determined by flow cytometry. The results are quantified in FIG. 20. Based on the fraction of live cells, it is concluded that gRNAs that have been modified with both a 5′ ARCA cap and polyA tail are the least toxic to Jurkat T cells when introduced by electroporation.

### Example 11: Delivery of Cas9/gRNA RNP to Naïve T Cells

[1705] To demonstrate Cas9-mediated cutting in naïve T cells, S. aureus Cas9 and a gRNA designed against the TCR alpha chain with targeting domain GUGAAUAGGCAGACAGACUUGUCA (SEQ ID NO:474) were delivered as a ribonucleic acid protein complex (RNP) by electroporation. In this embodiment, the Cas9 was expressed in E. coli and purified. Specifically, the HJ29 plasmid encoding Cas9 was transformed into Rosetta™ 2 (DE3) chemically competent cells (EMD Millipore #71400-4) and plated onto LB plates with appropriate antibiotics for selection and incubated at 37° C. overnight. A 10 mL starter culture of Brain Heart Infusion Broth (Teknova #B9993) with appropriate antibiotics was inoculated with 4 colonies and grown at 37° C. with shaking at 220 rpms. After growing overnight, the starter culture was added to 1 L of Terrific Broth Complete (Teknova #T7060) with appropriate antibiotics plus supplements and grown at 37° C. with shaking at 220 rpms. The temperature was gradually reduced to 18° C. and expression of the gene was induced by addition of IPTG to 0.5 mM when the OD600 was greater than 2.0. The induction was allowed to continue overnight followed by harvesting the cells by centrifugation and resuspension in TG300 (50 mM Tris pH8.0, 300 mM NaCl, 20% glycerol, 1 mM TCEP, protease inhibitor tablets (Thermo Scientific #88266)) and stored at −80° C.

[1706] The cells were lysed by thawing the frozen suspension, followed by two passes through a LM10 Microfluidizer® set to 18000 psi. The extract was clarified via centrifugation and the soluble extract was captured via batch incubation with Ni-NTA Agarose resin (Qiagen #30230) at 4° C. The slurry was poured into a gravity flow column, washed with TG300+30 mM Imidazole and then eluted the protein of interest with TG300+300 mM Imidazole. The Ni eluent was diluted with an equal volume of HG100 (50 mM Hepes pH7.5, 100 mM NaCl, 10% glycerol, 0.5 mM TCEP) and loaded onto a HiTrap SP HP column (GE Healthcare Life Sciences #17-1152-01) and eluted with a 30 column volume gradient from HG100 to HG1000 (50 mM Hepes pH7.5, 1000 mM NaCl, 10% glycerol, 0.5 mM TCEP). Appropriate fractions were pooled after assaying with an SDS-PAGE gel and concentrated for loading onto a SRT10 SEC300 column (Sepax #225300-21230) equilibrated in HG150 (10 mM Hepes pH7.5, 150 mM NaCl, 20% glycerol, 1 mM TCEP). Fractions were assayed by SDS-PAGE and appropriately pooled, concentrated to at least 5 mg/ml.

[1707] The gRNA with targeting domain GUGAAUAGGCAGACAGACUUGUCA (SEQ ID NO:474) was generated by in vitro transcription using a T7 polymerase. A 5′ ARCA cap was added to the RNA simultaneous to transcription while a polyA tail was added after transcription to the 3′ end of the RNA species by an E. coli polyA polymerase. In this embodiment, the T cells were isolated from fresh cord blood by a Ficoll gradient followed by positive selection using CD3 magnetic beads. The cells were subsequently cultured in RPMI1640 media supplemented with 10% FBS, IL-7 (5 ng/ml) and IL-15 (5 ng/ml). 24 hours after isolation, the cells were electroporated with a RNP solution that was generated by incubating the purified Cas9 and gRNA for 10 minutes at room temperature. CD3 expression on the cells was monitored at 96 hours post electroporation by flow cytometry using an APC-conjugated antibody specific for CD3. A population of CD3 negative cells was observed in cells that in which a functional RNP complex was provided versus a negative control that received the gRNA and a non-functional Cas9 (FIG. 21A and FIG. 21B). To confirm that the generation of CD3 negative cells was a result of genome editing at the TRAC locus, genomic DNA was harvested and a T7E1 assay was performed. Indeed, the data confirm the presence of DNA modifications at the TRAC locus (FIG. 21C).

### Example 12: Targeting of the PDCD1 Locus by Delivery of Cas9 mRNA and gRNA as RNA Molecules or as Cas9/gRNA RNP to Jurkat T Cells

[1708] Delivery of Cas9 mRNA and gRNA as RNA Molecules to Jurkat T Cells

[1709] To demonstrate Cas9-mediated cutting at the PDCD1 locus in Jurkat T cells, S. pyogenes Cas9 and a gRNA with a targeting domain GUCUGGGCGGUGCUACAACU (SEQ ID NO:508) designed against the PDCD1 locus were delivered as RNA molecules to T cells via electroporation. In this embodiment, both the Cas9 and gRNA were in vitro transcribed using a T7 polymerase. A 5′ ARCA cap was added to both RNA species simultaneous to transcription while a polyA tail was added after transcription to the 3′ end of the RNA species by an E. coli polyA polymerase. To generate Jurkat T cells modified at the PDCD1 locus, 10 ug of Cas9 mRNA and 10 ug of gRNA with a targeting domain GUCUGGGCGGUGCUACAACU (SEQ ID NO:508) were introduced to the cells by electroporation. Prior to electroporation, the T cells were cultured in RPMI 1640 supplemented with 10% FBS. At 24, 48 and 72 hours, genomic DNA was isolated and a T7E1 assay was performed at the PDCD1 locus. Indeed, the data confirm the presence of DNA modifications at the PDCD1 locus (FIG. 22).

[1710] Delivery of Cas9/gRNA RNP to Jurkat T Cells

[1711] To demonstrate Cas9-mediated cutting at the PDCD1 locus in Jurkat T cells, S. pyogenes Cas9 and a gRNA designed against the PDCD1 locus with the targeting domain GUCUGGGCGGUGCUACAACU (SEQ ID NO:508) were delivered as a ribonucleic acid protein complex (RNP) by electroporation. In this embodiment, the Cas9 was expressed in E. coli and purified. Specifically, the HJ29 plasmid encoding Cas9 was transformed into Rosetta™ 2 (DE3) chemically competent cells (EMD Millipore #71400-4) and plated onto LB plates with appropriate antibiotics for selection and incubated at 37° C. overnight. A 10 mL starter culture of Brain Heart Infusion Broth (Teknova #B9993) with appropriate antibiotics was inoculated with 4 colonies and grown at 37° C. with shaking at 220 rpms. After growing overnight, the starter culture was added to 1 L of Terrific Broth Complete (Teknova #T7060) with appropriate antibiotics plus supplements and grown at 37° C. with shaking at 220 rpms. The temperature was gradually reduced to 18° C. and expression of the gene was induced by addition of IPTG to 0.5 mM when the OD600 was greater than 2.0. The induction was allowed to continue overnight followed by harvesting the cells by centrifugation and resuspension in TG300 (50 mM Tris pH8.0, 300 mM NaCl, 20% glycerol, 1 mM TCEP, protease inhibitor tablets (Thermo Scientific #88266)) and stored at −80° C.

[1712] The cells were lysed by thawing the frozen suspension, followed by two passes through a LM10 Microfluidizer® set to 18000 psi. The extract was clarified via centrifugation and the soluble extract was captured via batch incubation with Ni-NTA Agarose resin (Qiagen #30230) at 4° C. The slurry was poured into a gravity flow column, washed with TG300+30 mM Imidazole and then eluted the protein of interest with TG300+300 mM Imidazole. The Ni eluent was diluted with an equal volume of HG100 (50 mM Hepes pH7.5, 100 mM NaCl, 10% glycerol, 0.5 mM TCEP) and loaded onto a HiTrap SP HP column (GE Healthcare Life Sciences #17-1152-01) and eluted with a 30 column volume gradient from HG100 to HG1000 (50 mM Hepes pH7.5, 1000 mM NaCl, 10% glycerol, 0.5 mM TCEP). Appropriate fractions were pooled after assaying with an SDS-PAGE gel and concentrated for loading onto a SRT10 SEC300 column (Sepax #225300-21230) equilibrated in HG150 (10 mM Hepes pH7.5, 150 mM NaCl, 20% glycerol, 1 mM TCEP). Fractions were assayed by SDS-PAGE and appropriately pooled, concentrated to at least 5 mg/ml.

[1713] The gRNA with the targeting domain GUCUGGGCGGUGCUACAACU (SEQ ID NO:508) was generated by in vitro transcription using a T7 polymerase. A 5′ ARCA cap was added to the RNA simultaneous to transcription while a polyA tail was added after transcription to the 3′ end of the RNA species by an E. coli polyA polymerase. Prior to introduction into the cells, the purified Cas9 and gRNA were mixed and allowed to form complexes for 10 minutes. The RNP solution was subsequently introduced into Jurkat T cells by electroporation. Prior to and after electroporation, the cells were cultured in RPMI1640 media supplemented with 10% FBS. At 24, 48 and 72 hours, genomic DNA was isolated and a T7E1 assay was performed at the PDCD1 locus. Indeed, the data confirm the presence of DNA modifications at the PDCD1 locus (FIG. 22).

### Example 13: Purification of S. pyogenes Cas9 Protein

[1714] Cas9 was expressed in E. coli and purified. Specifically, the HJ29 plasmid encoding Cas9 was transformed into Rosetta™ 2 (DE3) chemically competent cells (EMD Millipore #71400-4) and plated onto LB plates with appropriate antibiotics for selection and incubated at 37° C. overnight. A 10 mL starter culture of Brain Heart Infusion Broth (Teknova #B9993) with appropriate antibiotics was inoculated with 4 colonies and grown at 37° C. with shaking at 220 rpms. After growing overnight, the starter culture was added to 1 L of Terrific Broth Complete (Teknova #T7060) with appropriate antibiotics plus supplements and grown at 37° C. with shaking at 220 rpms. The temperature was gradually reduced to 18° C. and expression of the gene was induced by addition of IPTG to 0.5 mM when the OD600 was greater than 2.0. The induction was allowed to continue overnight followed by harvesting the cells by centrifugation and resuspension in TG300 (50 mM Tris pH8.0, 300 mM NaCl, 20% glycerol, 1 mM TCEP, protease inhibitor tablets (Thermo Scientific #88266)) and stored at −80° C.

[1715] The cells were lysed by thawing the frozen suspension, followed by two passes through a LM10 Microfluidizer® set to 18000 psi. The extract was clarified via centrifugation and the soluble extract was captured via batch incubation with Ni-NTA Agarose resin (Qiagen #30230) at 4° C. The slurry was poured into a gravity flow column, washed with TG300+30 mM Imidazole and then eluted the protein of interest with TG300+300 mM Imidazole. The Ni eluent was diluted with an equal volume of HG100 (50 mM Hepes pH7.5, 100 mM NaCl, 10% glycerol, 0.5 mM TCEP) and loaded onto a HiTrap SP HP column (GE Healthcare Life Sciences #17-1152-01) and eluted with a 30 column volume gradient from HG100 to HG1000 (50 mM Hepes pH7.5, 1000 mM NaCl, 10% glycerol, 0.5 mM TCEP). Appropriate fractions were pooled after assaying with an SDS-PAGE gel and concentrated for loading onto a SRT10 SEC300 column (Sepax #225300-21230) equilibrated in HG150 (10 mM Hepes pH7.5, 150 mM NaCl, 20% glycerol, 1 mM TCEP). Fractions were assayed by SDS-PAGE and appropriately pooled, concentrated to at least 5 mg/ml. Aliquots were stored at −80° C.

### Example 14: In Vitro Transcription of gRNA

[1716] A DNA template encoding a modified T7 promoter, gRNA target sequence, and chimeric S. pyogenes gRNA scaffold was assembled by PCR. The 5′ sense primer used for PCR consisted of the modified T7 promoter, gRNA targeting sequence (which was modified for each gRNA based on the desired target site), and sequence from the 5′ end of the S. pyogenes gRNA tracr sequence (GTTTTAGAGCTAGAAATA (SEQ ID NO:51205)). The 3′ anti-sense primer (AAAAGCACCGACTCGGTGCCACTTTTTCAAGTTGATA (SEQ ID NO:51206)) was the reverse complement to the 3′ end of the S. pyogenes gRNA tracr sequence. The DNA template for the PCR reactions was a plasmid containing the S. pyogenes gRNA tracr sequence. The amplified PCR product which was used as a DNA template for in vitro transcription of a target specific gRNA therefore encoded the following: modified T7 promoter-gRNA target sequence-S. pyogenes chimeric gRNA scaffold (i.e., modified T7 promoter followed by gRNA).

[1717] Given that the T7 RNA polymerase requires a G to initiate transcription, the T7 promoter typically has two Gs at its 3′ end to ensure transcription of the entire RNA sequence downstream of the promoter. The consequence, however, is that the transcript that is produced may contain at least one if not both of the Gs from the promoter sequence, which may alter the gRNA specificity or the interaction between the gRNA and the Cas9 protein. To address this concern in cases where the gRNA target sequence starts with a G, the two GGs were removed from the following T7 promoter sequence TAATACGACTCACTATAGG (SEQ ID NO:51202) in the gRNA PCR template by using a 5′ sense primer that included the following modified T7 promoter sequence: TAATACGACTCACTATA (SEQ ID NO:51203). For gRNA target sequences that don't start with a G, the T7 promoter sequence encoded in the gRNA PCR template was modified such that only one of the Gs at the 3′ end of the T7 promoter was removed by using a 5′ sense primer that included the following modified T7 promoter sequence: TAATACGACTCACTATAG (SEQ ID NO:51204). gRNAs were generated by in vitro transcription of the DNA templates with the Message Machine™ T7 Ultra Transcription Kit (Ambion). In Example 10, an ARCA cap was added to the 5′ end of the gRNA in the in vitro transcriptions process followed by treatment with E-PAP which adds a poly A tail to the end of the gRNA sequence thus, all gRNAs used in Example 10 were modified at the 5′ end with ARCA cap and at the 3′ end with a polyA tail. For all experiments described in Examples 11-13, gRNAs were in vitro transcribed from a gRNA PCR template that encodes a modified T7 promoter, gRNA, and a polyA tail (20A) 3′ to the gRNA. An ARCA cap was added to the 5′ end of the gRNA in the in vitro transcriptions process, thus, all gRNAs in Examples 11-13 were modified at the 5′ end with ARCA cap and at the 3′ end with a polyA tail).

[1718] Modified T7 promoter sequences are not limited to the sequences described herein. For example, T7 promoter sequences (and modifications thereof) can be at least any of the sequences referred to in “Promoters/Catalog/T7” of the Registry of Standard Biological Parts (located at the following http://address: parts.igem.org/Promoters/Catalog/T7). It is to be understood that the present disclosure encompasses methods where a gRNA of the invention is prepared by in vitro transcription from a DNA template that includes a modified T7 promoter as described herein where one or more of the 3′ terminal Gs have been removed (e.g., where the sequence TAATACGACTCACTATAG (SEQ ID NO:51204) is located immediately upstream of a target sequence that lacks a G at it's 5′ end or the sequence TAATACGACTCACTATA (SEQ ID NO:51203) is located immediately upstream of a target sequence that has a G at it's 5′ end). Other variations on these modified T7 promoters will be recognized by those skilled in the art based on other T7 promoter sequences including at least any of the sequences referred to in “Promoters/Catalog/T7” of the Registry of Standard Biological Parts (located at the following http://address: parts.igem.org/Promoters/Catalog/T7 and incorporated herein by reference in its entirety).

### Example 15: Identification of PDCD1 Targeting gRNA Pairs

[1719] In order to assess whether S. pyogenes nickases could be used to generate a high percentage of PDCD1 negative T cells, both the D10A and N863A nickases were purified from E. coli in accordance with the method of Example 8. Using a software tool, PDCD1 gRNAs were identified and mapped to the locus of PDCD1. gRNA pairs were chosen for further assessment based on two major criteria: 1) the PAM sequence of the two gRNAs are outward facing; and 2) the distance between the predicted cut sites (4 bp away from the PAM) is greater than 30 bp and less than 90 bp. The chosen gRNAs were generated using a T7-based in vitro transcription reaction as described in Example 9. Each gRNA was complexed with either the D10A nickase or the N863A nickase. After verification that the complexing was complete using DSF (see methods in Section IV herein), the two appropriate RNPs corresponding to the listed pairs were combined at a 1:1 ratio and electroporated into the cells at a dose of 1 ug total RNP/100,000 cells. The RNP was electroporated into 250,000 activated CD4 T cells in a 96-well format (in duplicate) and subsequently cultured in T cell media containing IL-2, IL-7 and IL-15. After 3 days of culture, the cells were activated with PMA/IO for 24 hours and PDCD1 expression was assessed by flow cytometry using a PE-conjugated anti-human-PDCD1 antibody. The percentage of PDCD1 negative cells is plotted in FIG. 31. Delivery of several D10A nickase pairs resulted in >90% PDCD1 negative cells while the same gRNAs pairs when complexed with the N863A nickase gave rise to lower but detectable levels of PDCD1 knockout. A single nickase RNP resulted in negligible loss of PDCD1 expression while a single gRNA complexed with wild-type S. pyogenes resulted in high levels of knockout as expected. Tables 8000A and 8000B provide details for the targeting domains that were used for each of the gRNA pairs.

TABLE 8000A

| | ID | | Distance | |
|---|---|---|---|---|
| | Left | Right | between nicks | |
| Pair | gRNA | gRNA | (bp) | Nickase |
| 1 | 102 | 49 | 31 | D10A |
| 2 | 102 | 51 | 36 | D10A |
| 3 | 102 | 52 | 59 | D10A |
| 4 | 102 | 53 | 65 | D10A |
| 5 | 102 | 97 | 30 | D10A |
| 6 | 102 | 103 | 43 | D10A |
| 7 | 98 | 52 | 44 | D10A |
| 8 | 98 | 53 | 49 | D10A |
| 9 | 98 | 103 | 28 | D10A |
| 10 | 99 | 52 | 49 | D10A |
| 11 | 99 | 53 | 54 | D10A |
| 12 | 99 | 103 | 33 | D10A |
| 13 | 102 | 49 | 31 | N863A |
| 14 | 102 | 51 | 36 | N863A |
| 15 | 102 | 52 | 59 | N863A |
| 16 | 102 | 53 | 65 | N863A |
| 17 | 102 | 97 | 30 | N863A |
| 18 | 102 | 103 | 43 | N863A |
| 19 | 98 | 52 | 44 | N863A |
| 20 | 98 | 53 | 49 | N863A |
| 21 | 98 | 103 | 28 | N863A |
| 22 | 99 | 52 | 49 | N863A |
| 23 | 99 | 53 | 54 | N863A |
| 24 | 99 | 103 | 33 | N863A |

TABLE 8000B

| | | | | SEQ |
|---|---|---|---|---|
| | | | Cas9 | ID |
| ID | gRNA Name | Targeting Domain | species | NO: |
| 49 | PDCD1-108 | GUCUGGGCGGUGCUACAACU | S. pyogenes | 508 |
| 51 | PDCD1-109 | GGGCGGUGCUACAACUGGGC | S. pyogenes | 510 |
| 52 | PDCD1-114 | GGCCAGGAUGGUUCUUAGGU | S. pyogenes | 511 |
| 53 | PDCD1-117 | GGAUGGUUCUUAGGUAGGUG | S. pyogenes | 512 |
| 55 | PDCD1-232 | GCCCUGGCCAGUCGUCU | S. pyogenes | 514 |
| 97 | PDCD1-107 | CGUCUGGGCGGUGCUACAAC | S. pyogenes | 576 |
| 98 | PDCD1-122 | UGUAGCACCGCCCAGACGAC | S. pyogenes | 579 |
| 99 | PDCD1-124 | ACCGCCCAGACGACUGGCCA | S. pyogenes | 581 |
| 102 | PDCD1-126 | CGACUGGCCAGGGCGCCUGU | S. pyogenes | 582 |
| 103 | PDCD1-111 | CUACAACUGGGCUGGCGGCC | S. pyogenes | 766 |
| 104 | PDCD1-121 | CACCUACCUAAGAACCAUCC | S. pyogenes | 723 |

### Example 16: Assessment of In Vivo Activity of PDCD1-Deleted, CAR-Expressing T Cells in Nalm-6 Disseminated Tumor Model

[1720] A disseminated tumor xenograft mouse model was generated by injecting NOD/Scid/gc−/− (NSG) mice with Nalm-6 tumor line cells overexpressing PD-L1. Specifically, on day zero (0), mice were injected intravenously (i.v.) with 5×10⁵ cells of a Nalm6 human B cell precursor leukemia cell line overexpressing PD-L1 and transfected with green fluorescence protein and firefly luciferase (Nalm6-PD-L1-ffluc-GFP). Tumor engraftment was allowed to occur for 4 days and verified using bioluminescence imaging. On day 4, mice in each of eight (eight) study groups received no treatment or a single intravenous (i.v.) injection of engineered cells (generated essentially as described in Example 4), at one of various doses/types, as follows: (1) no cells administered (tumor alone), (2) 1×10⁶AAVS1-deleted T cells transduced with a mock control vector; (3) 5×10⁵ AAVS1-deleted cells expressing an anti-CD19 CAR+ T cells; (4) 1×10⁶ AAVS1-deleted anti-CD19 CAR+ T cells; (5) 1×10⁶PDCD1-deleted T cells transduced with a mock control vector; (6) 5×10⁵ PDCD1-deleted anti-CD19 CAR+ T cells; (7) 1×10⁶PDCD1-deleted anti-CD19 CAR+ T cells; and (8) 1×10⁶ anti-CD19 CAR+ T cells that had been subjected to a mock electroporation control.

[1721] A. Anti-Tumor Activity

[1722] Following treatment, tumor growth over time was monitored by bioluminescence imaging and the average radiance (p/s/cm²/sr) was measured approximately every 5-7 days through day 28. For bioluminescence imaging, mice received intraperitoneal (i.p.) injections of luciferin substrate (CaliperLife Sciences, Hopkinton, Mass.) resuspended in PBS (15 μg/g body weight). As shown in FIG. 32, tumors in control mice (tumor alone and those treated with mock control-transduced AAVS1-deleted T cells or mock control-transduced PDCD1-deleted T cells) continued to grow over the course of the study. By comparison, mice having been administered engineered T cells expressing anti-CD19 CARs, including the PDCD1-deleted anti-CD19 CAR+ T cells, at various doses, exhibited a reduction in the amount of average radiance at all post-treatment time points tested. The results indicated that the PDCD1 deleted CAR+ T cells were able to suppress tumor growth in a mouse cancer model and that PDCD1 deletion did not impair the in vivo anti-tumor function of the CAR+ T cells.

[1723] B. Expansion and Persistence of PDCD1 Knockout Cells In Vivo

[1724] Bone marrow samples were obtained from mice of a first satellite group and control groups) were analyzed to assess in vivo expansion and persistence of the administered PDCD1-deleted cells. Absolute CD4+ and CD8+ T cell counts (FIGS. 33A and 33B), and absolute PD1+ T cell counts (FIGS. 34A, 34B, and 34C), were determined by flow cytometry.

[1725] Results for numbers of circulating CD4+ or CD8+ cells in the bone marrow at day 9 are shown in FIGS. 33A and 33B, respectively. The results indicated that PDCD1-deleted CAR+ T cells expanded and persisted in the mouse model following administration, at similar rates as compared to CAR+ control (AAVS1-deleted and mock electroporated) cells. Counts of PD1+ T cells (CD3+, CD4+ and CD8+) observed in the bone marrow at day 9 are shown in FIGS. 34A, 34B and 34C, respectively. The results were consistent with a conclusion that PDCD1 deletion of PDCD1 was maintained in CAR+ cells after administration to animals with tumors expressing the CAR-targeted antigen and in vivo expansion, and that PD-1-knockout CAR+ T cells persisted in vivo following administration.

### Example 17: Assessment of In Vivo Activity of PDCD1-Deleted, CAR-Expressing T Cells in A549 Subcutaneous Tumor Model

[1726] A subcutaneous tumor xenograft mouse model was generated by injecting NOD/Scid/gc−/− (NSG) mice with A549 lung adenocarcinoma cells engineered to express high levels of human CD19. In this study, the overexpression of human CD19 in these cells in the xenograft model permitted assessment of CD19-specific PDCD1 CAR+ T cells in the context of a solid tumor. Additionally, based on separate observations that A549 lung adenocarcinoma cells can upregulate PD-L1 in response to interferon gamma stimulation, the model permitted evaluation of CD19-specific PDCD1 CAR+ T cells in a tumor environment that may express PD-L1 in response to IFN-gamma. On day zero (0), A549-huCD19^{hi} cells were subcutaneously implanted into immune-deficient NSG mice.

[1727] In vitro studies demonstrate that upon interaction with the CD19 target antigen, the T cell negative regulatory molecule, PD-1 is upregulated on CAR T cells, including anti-CD19 CAR-expressing cells. Interaction of PD-1 on CART cells with PD-L1 on CD19-expressing tumor cells could limit the activity of the CAR T cells. After tumor engraftment, the mice in three (3) different treatment groups received a single intravenous (i.v.) injection of various 4×10⁶ anti-CD19 CAR-expressing T cell populations generated as described in Example 4: (1) AAVS1-deletedanti-CD19 CAR+ T cells; (2) PDCD1-deleted anti-CD19 CAR+ T cells; and (3) anti-CD19 CAR+ cells not subjected to deletion or electroporation. Mice not injected with any engineered T cells (tumor alone) were assessed as negative controls. Tumor volume was measured on days 11, 14, 19, 23 and 26 post CAR-T cell administration. The results are shown in FIG. 35. As shown, administration of each of the CAR+ cell compositions was observed to reduce tumor growth in this CD19-overexpressing lung adenocarcinoma model as compared to that observed in untreated controls.

[1728] The present invention is not intended to be limited in scope to the particular disclosed embodiments, which are provided, for example, to illustrate various aspects of the invention. Various modifications to the compositions and methods described will become apparent from the description and teachings herein. Such variations may be practiced without departing from the true scope and spirit of the disclosure and are intended to fall within the scope of the present disclosure.

What is claimed:

1. A composition, comprising (a) an engineered immune cell comprising a recombinant receptor that specifically binds to an antigen; and (b) an agent capable of inducing a genetic disruption of a PDCD1 gene encoding a PD-1 polypeptide, wherein said agent is capable of inducing said genetic disruption in, and/or preventing or reducing PD-1 expression in, at least 70%, at least 75%, at least 80%, or at least or greater than 90% of the cells in the composition and/or at least 70%, at least 75%, at least 80%, or at least or greater than 90% of the cells in the composition that express the recombinant receptor.

2. A composition, comprising (a) an engineered immune cell comprising a nucleic acid encoding a recombinant receptor that specifically binds to an antigen; and (b) an agent capable of inducing a genetic disruption of a PDCD1 gene encoding a PD-1 polypeptide, wherein said agent is capable of inducing said genetic disruption in, and/or preventing or reducing PD-1 expression in, at least 70%, at least 75%, at least 80%, or at least or greater than 90% of the cells in the composition and/or at least 70%, at least 75%, at least 80%, or at least or greater than 90%, of the cells in the composition that express the recombinant receptor.

3. The composition of claim 1 or claim 2, wherein the engineered immune cell expresses the recombinant receptor on its surface.

4. A composition, comprising a cell population containing an engineered immune cell that comprises (a) a recombinant receptor that specifically binds to an antigen; and (b) a genetic disruption of a PDCD1 gene encoding a PD-1 polypeptide, said genetic disruption preventing or reducing the expression of said PD-1 polypeptide, wherein:
at least about 70%, at least about 75%, or at least about 80% or at least or greater than about 90% of the cells in the composition contain the genetic disruption; do not express the endogenous PD-1 polypeptide; do not contain a contiguous PDCD1 gene, do not contain a PDCD1 gene, and/or do not contain a functional PDCD1 gene; and/or do not express a PD-1 polypeptide; and/or
at least about 70%, at least about 75%, or at least about 80% or at least or greater than about 90% of the cells in the composition that express the recombinant receptor contain the genetic disruption, do not express the endogenous PD-1 polypeptide, and/or do not express a PD-1 polypeptide.

5. A composition, comprising a cell population containing an engineered immune cell that comprises (a) a recombinant receptor that specifically binds to an antigen, wherein the engineered immune cell is capable of inducing cytotoxicity, proliferating and/or secreting a cytokine upon binding of the recombinant receptor to said antigen; and (b) a genetic disruption of a PDCD1 gene encoding a PD-1 polypeptide, said genetic disruption capable of preventing or reducing the expression of said PD-1 polypeptide, optionally wherein said prevention or reduction is in at least at or about or greater than at or about 70%, 75%, 80%, 85%, or 90% of the cells in the composition and/or of the cells in the composition that express the recombinant receptor.

6. A composition comprising a cell population containing a population of engineered immune cells, each comprising (a) a recombinant receptor that specifically binds to an antigen; and (b) a genetic disruption of a PDCD1 gene encoding a PD-1 polypeptide, wherein said genetic disruption is capable of preventing or reducing the expression of said PD-1 polypeptide, wherein:
the engineered immune cells, on average, exhibit expression and/or surface expression of the receptor at a level that is the same, about the same or substantially the same, as compared to the average expression and/or surface expression level, respectively, of said recombinant receptor in other cells in the composition that comprise the recombinant receptor and do not comprise the genetic disruption, or
the engineered immune cells do not express the PD-1 polypeptide and on average, exhibit expression and/or surface expression of the receptor at a level is the same, about the same, or substantially the same as compared to the average expression and/or surface level, respectively, in cells of the composition that comprise the recombinant receptor and that express the PD-1 polypeptide.

7. The composition of any of claims 1-4 and 6, wherein the recombinant receptor is capable, upon incubation with the antigen, a cell expressing the antigen, and/or an antigen-receptor activating substance, of specifically binding to the antigen, of activating or stimulating the engineered T cell, of inducing cytotoxicity, or of inducing proliferation, survival, and/or cytokine secretion by the immune cell, optionally as measured in an in vitro assay, optionally in an in vitro assay, which optionally comprises incubation for 12, 24, 36, 48, or 60 hours, optionally in the presence of one or more cytokines.

8. The composition of any of claims 1-4, 6 and 7, wherein the engineered immune cell is capable, upon incubation with the antigen, a cell expressing the antigen, and/or an antigen-receptor activating substance, of specifically binding to the antigen, of inducing cytotoxicity, proliferating, surviving, and/or secreting a cytokine, optionally as measured in an in vitro assay, which optionally comprises incubation for 12, 24, 36, 48, or 60 hours, optionally in the presence of one or more cytokines and optionally does or does not comprise exposing the immune cell to a PD-L1-expressing cell.

9. The composition of claim 7 or claim 8, wherein:
the level or degree or extent or duration of the binding, cytotoxicity, proliferation, survival, or cytokine secretion is the same, about the same or substantially the same as compared to that detected or observed for an immune cell comprising the recombinant receptor but not comprising the genetic disruption of a PDCD1 gene, when assessed under the same conditions.

10. The composition of any of claims 6 and 8-9, wherein the binding, cytotoxicity, proliferation, survival, and/or cytokine secretion is as measured, optionally in an in vitro assay, following withdrawal and re-exposure to the antigen, antigen-expressing cell, and/or substance.

11. The composition of any of claims 1-10, wherein the immune cell is a primary cell from a subject.

12. The composition of any of claims 1-11, wherein the immune cell is a human cell.

13. The composition of any of claims 1-12, wherein the immune cell is a white blood cell.

14. The composition of any of claims 1-13, wherein the immune cell is an NK cell or a T cell.

15. The composition of claim 14, wherein the immune cell comprises a plurality of T cells comprising unfractionated T cells, comprises isolated CD8+ cells or is enriched for CD8+ T cells, or comprises isolated CD4+ T cells or is enriched for CD4+ cells, and/or is enriched for a subset thereof selected from the group consisting of naïve cells, effector memory cells, central memory cells, stem central memory cells, effector memory cells, and long-lived effector memory cells.

16. The composition of claim 14 or claim 15, wherein the percentage, of T cells, or T cells expressing the receptor, and comprising the genetic disruption in the composition, that exhibit a non-activated, long-lived memory, or central memory phenotype, is the same or substantially the same as a population of cells the same or substantially the same as the composition but not containing the genetic disruption or but expressing the PD-1 polypeptide.

17. The composition of any of claims 1-16, wherein the percentage of T cells in the composition exhibiting a non-activated, long-lived memory, or central memory phenotype is the same, about the same or substantially the same as compared to the percentage of T cells exhibiting the phenotype in a composition comprising T cells, comprising the recombinant receptor but not comprising the genetic disruption of a PDCD1 gene encoding a PD-1 polypeptide when assessed under the same conditions, which optionally is compared in the absence or presence of contacting or exposing the immune cell to PD-L1.

18. The composition of claim 16 or claim 17, wherein the phenotype is as assessed following incubation of the composition at or about 37° C.±2° C. for at least 12 hours, 24 hours, 48 hours, 96 hours, 6 days, 12 days, 24 days, 36 days, 48 days or 60 days.

19. The composition of claim 18, wherein the incubation is in vitro.

20. The composition of claim 18 or claim 19, wherein at least a portion of the incubation is performed in the presence of a stimulating agent, which at least a portion is optionally for up to 1 hour, 6 hours, 24 hours, or 48 hours of the incubation.

21. The composition of claim 20, wherein the stimulating agent is an agent capable of inducing proliferation of T cells, CD4+ T cells and/or CD8+ T cells.

22. The composition of claim 20 or claim 21, wherein the stimulating agent is or comprises an antibody specific for CD3 an antibody specific for CD28 and/or a cytokine.

23. The composition of any of claims 16-22, wherein the T cell comprising the recombinant receptor comprises one or more phenotypic markers selected from CCR7+, 4-1BB+(CD137+), TIM3+, CD27+, CD62L+, CD127+, CD45RA+, CD45RO−, t-bet^{low}, IL-7Ra+, CD95+, IL-2Rβ+, CXCR3+ or LFA-1+.

24. The composition of any of claims 1-23, wherein the recombinant receptor is a functional non-TCR antigen receptor or a transgenic TCR.

25. The composition of any of claims 1-23, wherein the recombinant receptor is a chimeric antigen receptor (CAR).

26. The composition of claim 25, wherein the CAR comprises an antigen-binding domain that is an antibody or an antibody fragment.

27. The composition of claim 26, wherein the antibody fragment is a single chain fragment.

28. The composition of claim 26 or claim 27, wherein the antibody fragment comprises antibody variable regions joined by a flexible immunoglobulin linker.

29. The composition of any of claims 26-28, wherein the fragment comprises an scFv.

30. The composition of any of claims 1-29, wherein the antigen is associated with a disease or disorder.

31. The composition of claim 30, wherein the disease or disorder is an infectious disease or condition, an autoimmune disease, an inflammatory disease or a tumor or a cancer.

32. The composition of any of claims 1-31, wherein the recombinant receptor specifically binds to a tumor antigen.

33. The composition of any of claims 1-32, wherein the antigen is selected from ROR1, Her2, L1-CAM, CD19, CD20, CD22, mesothelin, CEA, hepatitis B surface antigen, anti-folate receptor, CD23, CD24, CD30, CD33, CD38, CD44, EGFR, EGP-2, EGP-4, EPHa2, ErbB2, ErbB3, ErbB4, FBP, fetal acethycholine receptor, GD2, GD3, HMW-MAA, IL-22R-alpha, IL-13R-alpha2, kdr, kappa light chain, Lewis Y, L1-cell adhesion molecule (CD171), MAGE-A1, mesothelin, MUC1, MUC16, PSCA, NKG2D Ligands, NY-ESO-1, MART-1, gp100, oncofetal antigen, TAG72, VEGF-R2, carcinoembryonic antigen (CEA), prostate specific antigen, PSMA, estrogen receptor, progesterone receptor, ephrinB2, CD123, CS-1, c-Met, GD-2, MAGE A3, CE7, Wilms Tumor 1 (WT-1), cyclin A1 (CCNA1), BCMA and interleukin 12.

34. The composition of any of claims 1-33, wherein the recombinant receptor comprises an intracellular signaling domain comprising an ITAM.

35. The composition of claim 34, wherein the intracellular signaling domain comprises an intracellular domain of a CD3-zeta (CD3) chain.

36. The composition of claim 34 or claim 35, wherein the recombinant receptor further comprises a costimulatory signaling region.

37. The composition of claim 36, wherein the costimulatory signaling region comprises a signaling domain of CD28 or 4-1BB.

38. The composition of any of claims 1-3 and 7-37, wherein the agent comprises at least one of (a) a least one gRNA having a targeting domain that is complementary with a target domain of a PDCD1 gene or (b) at least one nucleic acid encoding the at least one gRNA.

39. The composition of any of claims 1-3 and 7-38, wherein the agent comprises at least one complex of a Cas9 molecule and a gRNA having a targeting domain that is complementary with a target domain of a PDCD1 gene.

40. The composition of claim 38 or claim 39, wherein the guide RNA further comprises a first complementarity domain, a second complementarity domain that is complementary to the first complementarity domain, a proximal domain and optionally a tail domain.

41. The composition of claim 40, wherein the first complementarity domain and second complementarity domain are joined by a linking domain.

42. The composition of any of claim 41, wherein the guide RNA comprises a 3′ poly-A tail and a 5′ Anti-Reverse Cap Analog (ARCA) cap.

43. The composition any of claims 39-42, wherein the Cas9 molecule is an enzymatically active Cas9.

44. The composition of any of claims 38-43, wherein the at least one gRNA includes a targeting domain comprising a sequence selected from the group consisting of GUCUGGGCGGUGCUACAACU (SEQ ID NO:508), GCCCUGGCCAGUCGUCU (SEQ ID NO: 514), CGUCUGGGCGGUGCUACAAC (SEQ ID NO:1533), UGUAGCACCGCCCAGACGAC (SEQ ID NO:579), CGACUGGCCAGGGCGCCUGU (SEQ ID NO:582) and CACCUACCUAAGAACCAUCC (SEQ ID NO:723).

45. The composition of any of claims 38-44, wherein the at least one gRNA includes a targeting domain comprising the sequence CGACUGGCCAGGGCGCCUGU (SEQ ID NO:582).

46. The composition of any of claims 38-45, wherein the Cas9 molecule is a nickase and two Cas9 molecule/gRNA molecule complexes are guided by two different gRNA molecules to cleave the target domain with two single stranded breaks on opposing strands of the target domain.

47. The composition of any of claims 39-46, wherein the Cas9 molecule is an S. aureus Cas9 molecule.

48. The composition of any of claims 39-46, wherein the Cas9 molecule is an S. pyogenes Cas9.

49. The composition of any of claims 39-48, wherein the Cas9 molecule lacks an active RuvC domain or an active HNH domain.

50. The composition of any of claims 39-46, 48 and 49, wherein the Cas9 molecule is an S. pyogenes Cas9 molecule comprising a D10A mutation.

51. The composition of any of claims 46-50, wherein the two gRNA molecules comprise targeting domains that are selected from the following pairs of targeting domains:
(SEQ ID NO: 582)
CGACUGGCCAGGGCGCCUGU
and
(SEQ ID NO: 508)
GUCUGGGCGGUGCUACAACU;
(SEQ ID NO: 582)
CGACUGGCCAGGGCGCCUGU
and
(SEQ ID NO: 510)
GGGCGGUGCUACAACUGGGC;
(SEQ ID NO: 582)
CGACUGGCCAGGGCGCCUGU
and
(SEQ ID NO: 511)
GGCCAGGAUGGUUCUUAGGU;
(SEQ ID NO: 582)
CGACUGGCCAGGGCGCCUGU
and
(SEQ ID NO: 512)
GGAUGGUUCUUAGGUAGGUG;
(SEQ ID NO: 582)
CGACUGGCCAGGGCGCCUGU
and
(SEQ ID NO: 576)
CGUCUGGGCGGUGCUACAAC;
(SEQ ID NO: 582)
CGACUGGCCAGGGCGCCUGU
and
(SEQ ID NO: 766)
CUACAACUGGGCUGGCGGCC;
(SEQ ID NO: 579)
UGUAGCACCGCCCAGACGAC
and
(SEQ ID NO: 511)
GGCCAGGAUGGUUCUUAGGU;
(SEQ ID NO: 579)
UGUAGCACCGCCCAGACGAC
and
(SEQ ID NO: 512)
GGAUGGUUCUUAGGUAGGUG;
or
(SEQ ID NO: 581)
ACCGCCCAGACGACUGGCCA
and
(SEQ ID NO: 511)
GGCCAGGAUGGUUCUUAGGU.

52. The composition of any of claims 39-46 and 48-51, wherein the Cas9 molecule is an S. pyogenes Cas9 molecule comprising an N863A mutation.

53. The composition of claim 52, wherein the two gRNA molecules comprise targeting domains that are selected from the following pairs of targeting domains:
(SEQ ID NO: 582)
CGACUGGCCAGGGCGCCUGU
and
(SEQ ID NO: 508)
GUCUGGGCGGUGCUACAACU;
(SEQ ID NO: 582)
CGACUGGCCAGGGCGCCUGU
and
(SEQ ID NO: 510)
GGGCGGUGCUACAACUGGGC;
or
(SEQ ID NO: 582)
CGACUGGCCAGGGCGCCUGU
and
(SEQ ID NO: 511)
GGCCAGGAUGGUUCUUAGGU.

54. The composition of any of claims 1-53, wherein the genetic disruption comprises creation of a double strand break which is repaired by non-homologous end joining (NHEJ) to effect insertions and deletions (indels) in the PDCD1 gene.

55. The composition of any of claims 1-54, wherein:
at least about 70%, at least about 75%, or at least about 80% of the cells in the composition contain the genetic disruption; do not express the endogenous PD-1 polypeptide; do not contain a contiguous PDCD1 gene, a PDCD1 gene, and/or a functional PDCD1 gene; and/or do not express a PD-1 polypeptide; and/or
at least about 70%, at least about 75%, or at least about 80% of the cells in the composition that express the recombinant receptor contain the genetic disruption, do not express the endogenous PD-1 polypeptide, or do not express a PD-1 polypeptide

56. The composition of claim 4 or claim 55, wherein:
greater than 80%, 81%, 82%, 83%, 84%, 85%, 86%, 87%, 88%, 89%, 90%, 91%, 92%, 93%, 94%, or 95% of the cells in the composition contain the genetic disruption; do not express the endogenous PD-1 polypeptide; do not contain a contiguous PDCD1 gene, a PDCD1 gene, and/or a functional PDCD1 gene; and/or do not express a PD-1 polypeptide; and/or
greater than 80%, 81%, 82%, 83%, 84%, 85%, 86%, 87%, 88%, 89%, 90%, 91%, 92%, 93%, 94%, or 95% of the cells in the composition that express the recombinant receptor contain the genetic disruption, do not express the endogenous PD-1 polypeptide, or do not express a PD-1 polypeptide.

57. The composition of any of claims 1-56, wherein:
at least at or about 90% of the cells in the composition, or cells in the composition that express the recombinant receptor, optionally as assessed by flow cytometry, contain the genetic disruption; do not express the endogenous PD-1 polypeptide; do not contain a contiguous PDCD1 gene, a PDCD1 gene, and/or a functional PDCD1 gene; and/or do not express a PD-1 polypeptide.

58. The composition of any of claims 1-57, wherein both alleles of the gene in the genome are disrupted.

59. The composition of any of claims 1-58, wherein cells in the composition and/or the cells in the composition that express the recombinant receptor are not enriched or selected for cells that contain the genetic disruption; do not express the endogenous PD-1 polypeptide; do not contain a contiguous PDCD1 gene, a PDCD1 gene, and/or a functional PDCD1 gene; and/or do not express a PD-1 polypeptide.

60. The composition of any of claims 1-59, wherein no more than 2, no more than 5 or no more than 10 other genes in each cell in the composition, or each cell in the composition that expresses the recombinant receptor, on average, are disrupted or are disrupted by the agent.

61. The composition of any of claims 1-60, wherein no other genes in each cell in the composition or each cell in the composition that expresses the recombinant receptor are disrupted in the cell or are disrupted by the agent.

62. The composition of any of claims 1-61, further comprising a pharmaceutically acceptable buffer.

63. The composition of any of claims 1-62, wherein, at a point in time following administration of the composition to a subject, optionally having the disease or condition;
cells expressing the recombinant receptor and not expressing PD-1 are detectable in the blood of the subject or blood-derived sample from the subject or in a tissue or biological sample of the subject;
cells containing the genetic disruption are detectable in the blood of the subject or a blood-derived sample from the subject or in a tissue or biological sample of the subject;
cells containing the genetic disruption and expressing the recombinant receptor are detectable in the blood of the subject or a blood-derived sample from the subject or in a tissue or biological sample of the subject.

64. The composition of claim 63, wherein the time-point is at or about 7, 8, 9, 10, 11, 12, 13, or 14 days or 2, 3, 4, 5, 6, 7, 8, 9, 10, 11, or 12 weeks following administration.

65. The composition of claim 63 or 64, wherein said cells detectable in the blood or sample are present at a concentration of at or about or at least at or about 1, 2, 3, 4, 5, 6, 7, 8, 9, 10, or 100 cells/microliter of blood and/or represent at least 10, 20, 25, 30, 35, 40, 45, or 50% or more of T cells in the blood.

66. The composition of any of claims 1-65, wherein, following administration of the composition to a subject:
cells in the composition comprising the genetic disruption expand and/or persist in the subject at a rate, and/or for a time that, is at least as great as, optionally greater than, the expansion and/or persistence of T cells in the composition without the genetic disruption and/or as the expansion and/or persistence of T cells of a reference composition in which T cells express the recombinant receptor but do not comprising the deletion; and/or
cells in the composition comprising the genetic disruption and comprising the recombinant receptor expand and/or persist in the subject at a rate, and/or for a time that, is at least as great as, optionally greater than, the expansion and/or persistence of T cells in the composition without the genetic disruption and/or as the expansion and/or persistence of T cells of a reference composition in which T cells express the recombinant receptor but do not comprising the deletion.

67. The composition of claim 66, wherein the rate or time is at least at or about 1.5-fold or 2-fold or 3-fold greater.

68. A method of producing a genetically engineered immune cell, comprising:
(a) introducing into an immune cell a nucleic acid molecule encoding a recombinant receptor that specifically binds to an antigen; and
(b) introducing into the immune cell an agent capable of inducing a genetic disruption of a PDCD1 gene encoding a PD-1 polypeptide comprising one of (i) at least one gRNA having a targeting domain that is complementary with a target domain of the PDCD1 gene or (ii) at least one nucleic acid encoding the at least one gRNA.

69. A method of producing a genetically engineered immune cell, comprising introducing into an immune cell expressing a recombinant receptor that specifically binds to an antigen an agent capable of inducing a genetic disruption of a PDCD1 gene encoding a PD-1 polypeptide comprising one of (i) at least one gRNA having a targeting domain that is complementary with a target domain of the PDCD1 gene or (ii) at least one nucleic acid encoding the at least one gRNA.

70. The method of claim 68 or claim 69, wherein the agent comprises at least one complex of a Cas9 molecule and a gRNA having a targeting domain that is complementary with a target domain of a PDCD1 gene.

71. The method of any of claims 68-70, wherein the guide RNA further comprises a first complementarity domain, a second complementarity domain that is complementary to the first complementarity domain, a proximal domain and optionally a tail domain.

72. The method of claim 71, wherein the first complementarity domain and second complementarity domain are joined by a linking domain.

73. The method of any of claims 68-72, wherein the guide RNA comprises a 3′ poly-A tail and a 5′ Anti-Reverse Cap Analog (ARCA) cap.

74. The method of any of claims 68-73, wherein introduction comprises contacting the cells with the agent or a portion thereof, in vitro.

75. The method of any of claims 68-74, wherein introduction of the agent comprises electroporation.

76. The method of claim 74 or claim 75, wherein the introduction further comprises incubating the cells, in vitro prior to, during or subsequent to the contacting of the cells with the agent or prior to, during or subsequent to the electroporation.

77. The method of any of claims 68-76, wherein the introduction in (a) comprises transduction and the introduction further comprises incubating the cells, in vitro, prior to, during or subsequent to the transduction.

78. The method of claim 76 or claim 77, wherein at least a portion of the incubation is in the presence of (i) a cytokine selected from the group consisting of IL-2, IL-7, and IL-15, and/or (ii) a stimulating or activating agent or agents, optionally comprising anti-CD3 and/or anti-CD28 antibodies.

79. The method of claim 77 or claim 78, wherein the introduction in (a) comprises:
prior to transduction, incubating the cells with IL-2 at a concentration of 20 U/mL to 200 U/mL, optionally about 100 U/mL; IL-7 at a concentration of 1 ng/mL to 50 ng/mL, optionally about 10 ng/mL and/or IL-15 at a concentration of 0.5 ng/mL to 20 ng/mL, optionally about 5 ng/mL; and
subsequent to transduction, incubating the cells with IL-2 at a concentration of 10 U/mL to 200 U/mL, optionally about 50 U/mL; IL-7 at a concentration of 0.5 ng/mL to 20 ng/mL, optionally about 5 ng/mL and/or IL-15 at a concentration of 0.1 ng/mL to 10 ng/mL, optionally about 0.5 ng/mL.

80. The method of any of claims 76-79, wherein the incubation independently is carried out for up to or approximately 24, 36, 48 hours, 3, 4, 5, 6, 7, 8, 9, 10, 11, 12, 13, 14, 15, 16, 17, 18, 19, 20 or 21 days.

81. The method of any of claims 76-80, wherein the incubation is independently carried out for 24-48 hours or 36-48 hours.

82. The method of any of claims 74-81, wherein the cells are contacted with the agent at a ratio of approximately 1 microgram per 100,000, 200,000, 300,000, 400,000, or 500,000 cells.

83. The method of any of claims 76-82, wherein:
the incubation is at a temperature of 30° C.±2° C. to 39° C.±2° C.; or
the incubation is at a temperature that is at least or about at least 30° C.±2° C., 32° C.±2° C., 34° C.±2° C. or 37° C.±2° C.

84. The method of any of claims 76-83, wherein at least a portion of the incubation is at 30° C.±2° C. and at least a portion of the incubation is at 37° C.±2° C.

85. The method of any of claims 68-84, wherein the method further comprises resting the cells between the introducing in (a) and the introducing in (b).

86. The method of any of claims 70-85, wherein the Cas9 molecule is an enzymatically active Cas9.

87. The method of any of claims 68-86, wherein the at least one gRNA includes a targeting domain comprising a sequence selected from the group consisting of GUCUGGGCGGUGCUACAACU (SEQ ID NO:508), GCCCUGGCCAGUCGUCU (SEQ ID NO: 514), CGUCUGGGCGGUGCUACAAC (SEQ ID NO:1533), UGUAGCACCGCCCAGACGAC (SEQ ID NO:579), CGACUGGCCAGGGCGCCUGU (SEQ ID NO:582) and CACCUACCUAAGAACCAUCC (SEQ ID NO:723).

88. The method of any of claims 68-87, wherein the at least one gRNA includes a targeting domain comprising the sequence CGACUGGCCAGGGCGCCUGU (SEQ ID NO:582).

89. The method of any of claims 68-79, wherein the Cas9 molecule is a nickase and two Cas9 molecule/gRNA molecule complexes are guided by two different gRNA molecules to cleave the target domain with two single stranded breaks on opposing strands of the target domain.

90. The method of any of claims 70-89, wherein the Cas9 molecule is an S. aureus Cas9 molecule.

91. The method of any of claims 70-90, wherein the Cas9 molecule is an S. pyogenes Cas9.

92. The method of any of claims 70-91, wherein the Cas9 molecule lacks an active RuvC domain or an active HNH domain.

93. The method of any of claims 70-89, 91 and 92, wherein the Cas9 molecule is an S. pyogenes Cas9 molecule comprising a D10A mutation.

94. The method of any of claims 89-93, wherein the two gRNA molecules comprise targeting domains that are selected from the following pairs of targeting domains:
(SEQ ID NO: 582)
CGACUGGCCAGGGCGCCUGU
and
(SEQ ID NO: 508)
GUCUGGGCGGUGCUACAACU;
(SEQ ID NO: 582)
CGACUGGCCAGGGCGCCUGU
and
(SEQ ID NO: 510)
GGGCGGUGCUACAACUGGGC;
(SEQ ID NO: 582)
CGACUGGCCAGGGCGCCUGU
and
(SEQ ID NO: 511)
GGCCAGGAUGGUUCUUAGGU;
(SEQ ID NO: 582)
CGACUGGCCAGGGCGCCUGU
and
(SEQ ID NO: 512)
GGAUGGUUCUUAGGUAGGUG;
(SEQ ID NO: 582)
CGACUGGCCAGGGCGCCUGU
and
(SEQ ID NO: 576)
CGUCUGGGCGGUGCUACAAC;
(SEQ ID NO: 582)
CGACUGGCCAGGGCGCCUGU
and
(SEQ ID NO: 766)
CUACAACUGGGCUGGCGGCC;
(SEQ ID NO: 579)
UGUAGCACCGCCCAGACGAC
and
(SEQ ID NO: 511)
GGCCAGGAUGGUUCUUAGGU;
(SEQ ID NO: 579)
UGUAGCACCGCCCAGACGAC
and
(SEQ ID NO: 512)
GGAUGGUUCUUAGGUAGGUG;
or
(SEQ ID NO: 581)
ACCGCCCAGACGACUGGCCA
and
(SEQ ID NO: 511)
GGCCAGGAUGGUUCUUAGGU.

95. The method of any of claims 70-89 and 91-94, wherein the Cas9 molecule is an S. pyogenes Cas9 molecule comprising an N863A mutation.

96. The method of claim 94, wherein the two gRNA molecules comprise targeting domains that are selected from the following pairs of targeting domains:
(SEQ ID NO: 582)
CGACUGGCCAGGGCGCCUGU
and
(SEQ ID NO: 508)
GUCUGGGCGGUGCUACAACU;
(SEQ ID NO: 582)
CGACUGGCCAGGGCGCCUGU
and
(SEQ ID NO: 510)
GGGCGGUGCUACAACUGGGC;
or
(SEQ ID NO: 582)
CGACUGGCCAGGGCGCCUGU
and
(SEQ ID NO: 511)
GGCCAGGAUGGUUCUUAGGU.

97. The method of any of claims 68-96, wherein the genetic disruption comprises creation of a double strand break which is repaired by non-homologous end joining (NHEJ) to effect insertions and deletions (indels) in the PDCD1 gene.

98. The method of any of claims 68-97, wherein the recombinant receptor is a functional non-TCR antigen receptor or a transgenic TCR.

99. The method of any of claims 68-98, wherein the recombinant receptor is a chimeric antigen receptor (CAR).

100. The method of claim 99, wherein the CAR comprises an antigen-binding domain that is an antibody or an antibody fragment.

101. The method of claim 100, wherein the antibody fragment is a single chain fragment.

102. The method of claim 100 or claim 101, wherein the antibody fragment comprises antibody variable regions joined by a flexible immunoglobulin linker.

103. The method of any of claims 100-102, wherein the fragment comprises an scFv.

104. The method of any of claims 100-103, wherein the antigen is associated with a disease or disorder.

105. The method of claim 104, wherein the disease or disorder is an infectious disease or condition, an autoimmune disease, an inflammatory disease or a tumor or a cancer.

106. The method of any of claims 68-105, wherein the recombinant receptor specifically binds to a tumor antigen.

107. The method of any of claims 68-106, wherein the antigen is selected from ROR1, Her2, L1-CAM, CD19, CD20, CD22, mesothelin, CEA, hepatitis B surface antigen, anti-folate receptor, CD23, CD24, CD30, CD33, CD38, CD44, EGFR, EGP-2, EGP-4, EPHa2, ErbB2, ErbB3, ErbB4, FBP, fetal acethycholine e receptor, GD2, GD3, HMW-MAA, IL-22R-alpha, IL-13R-alpha2, kdr, kappa light chain, Lewis Y, L1-cell adhesion molecule (CD171), MAGE-A1, mesothelin, MUC1, MUC16, PSCA, NKG2D Ligands, NY-ESO-1, MART-1, gp100, oncofetal antigen, TAG72, VEGF-R2, carcinoembryonic antigen (CEA), prostate specific antigen, PSMA, estrogen receptor, progesterone receptor, ephrinB2, CD123, CS-1, c-Met, GD-2, MAGE A3, CE7, Wilms Tumor 1 (WT-1), cyclin A1 (CCNA1), BCMA and interleukin 12.

108. The method of any of claims 68-107, wherein the recombinant receptor comprises an intracellular signaling domain comprising an ITAM.

109. The method of claim 108, wherein the intracellular signaling domain comprises an intracellular domain of a CD3-zeta (CD3) chain.

110. The method of claim 108 or claim 109, wherein the recombinant receptor further comprises a costimulatory signaling region.

111. The method of claim 110, wherein the costimulatory signaling region comprises a signaling domain of CD28 or 4-1BB.

112. The method of any of claims 68-111, wherein the nucleic acid encoding the recombinant receptor is a viral vector.

113. The method of claim 112, wherein the viral vector is a retroviral vector.

114. The method of claim 112 or claim 113, wherein the viral vector is a lentiviral vector or a gammaretroviral vector.

115. The method of any of claims 68-114, wherein introduction of the nucleic acid encoding the recombinant vector is by transduction, which optionally is retroviral transduction.

116. The method of any of claims 68-115, wherein the immune cell is a primary cell from a subject.

117. The method of any of claims 68-116, wherein the immune cell is a human cell.

118. The method of any of claims 68-117, wherein the immune cell is a white blood cell.

119. The method of any of claims 68-118, wherein the immune cell is an NK cell or T cell.

120. The method of claim 119, wherein the immune cell is a T cell that is an unfractionated T cell, isolated CD8+ T cell, or isolated CD4+ T cell.

121. The method of any of claims 68-120, that is performed on a plurality of immune cells.

122. The method of any of claims 68-121, wherein subsequent to introducing the agent and introducing the recombinant receptor, cells are not enriched or selected for (a) cells containing the genetic disruption or not expressing the endogenous PD-1 polypeptide, (b) cells expressing the recombinant receptor or both (a) and (b).

123. The method of any of claims 68-122, further comprising enriching or selecting for (a) cells containing the genetic disruption or not expressing the endogenous PD-1 polypeptide, (b) cells expressing the recombinant receptor or for both (a) and (b).

124. The method of any of claims 68-123, further comprising incubating the cells at or at about 37° C.±2° C.

125. The method of claim 124, wherein the incubation is carried out for a time between at or about 1 hour and at or about 96 hours, between at or about 4 hours and at or about 72 hours, between at or about 8 hours and at or about 48 hours, between at or about 12 hours and at or about 36 hours, between at or about 6 hours and at or about 24 hours, between at or about 36 hours and at or about 96 hours, inclusive.

126. The method of claim 125, wherein the incubation or a portion of the incubation is performed in the presence of a stimulating agent.

127. The method of claim 126, wherein the stimulating agent is an agent capable of inducing proliferation of T cells, CD4+ T cells and/or CD8+ T cells.

128. The method of claim 126 or claim 127, wherein the stimulating agent is or comprises an antibody specific for CD3 an antibody specific for CD28 and/or a cytokine.

129. The method of any of claims 68-128, further comprising formulating cells produced by the method in a pharmaceutically acceptable buffer.

130. The method of any of claims 68-129, wherein the method produces a population of cells in which:
at least about 70%, at least about 75%, or at least about 80% of the cells both 1) contain the genetic disruption; do not express the endogenous PD-1 polypeptide; do not contain a contiguous PDCD1 gene, a PDCD1 gene, and/or a functional PDCD1 gene; and/or do not express a PD-1 polypeptide; and 2) express the recombinant receptor; or
at least about 70%, at least about 75%, or at least about 80% of the cells that express the recombinant receptor contain the genetic disruption, do not express the endogenous PD-1 polypeptide, or do not express a PD-1 polypeptide.

131. The method of any of claims 68-130, wherein the method produces a population of cells in which:
greater than 80%, 81%, 82%, 83%, 84%, 85%, 86%, 87%, 88%, 89%, 90%, 91%, 92%, 93%, 94%, or 95% of the cells both 1) contain the genetic disruption; do not express the endogenous PD-1 polypeptide; do not contain a contiguous PDCD1 gene, a PDCD1 gene, and/or a functional PDCD1 gene; and/or do not express a PD-1 polypeptide and 2) express the recombinant receptor; and/or
greater than 80%, 81%, 82%, 83%, 84%, 85%, 86%, 87%, 88%, 89%, 90%, 91%, 92%, 93%, 94%, or 95% of the cells that express the recombinant receptor contain the genetic disruption, do not express the endogenous PD-1 polypeptide, or do not express a PD-1 polypeptide.

132. The method of any of claims 68-131, wherein both alleles of the gene in the genome are disrupted.

133. A genetically engineered immune cell produced by the method of any of claims 68-132.

134. A plurality of genetically engineered immune cells produced by the method of any of claims 68-132.

135. The plurality of genetically engineered immune cells of claim 134, wherein:
at least about 70%, at least about 75%, or at least about 80% of the cells both 1) contain the genetic disruption; do not express the endogenous PD-1 polypeptide; do not contain a contiguous PDCD1 gene, a PDCD1 gene, and/or a functional PDCD1 gene; and/or do not express a PD-1 polypeptide; and 2) express the recombinant receptor; or
at least about 70%, at least about 75%, or at least about 80% of the cells that express the recombinant receptor contain the genetic disruption, do not express the endogenous PD-1 polypeptide, or do not express a PD-1 polypeptide.

136. The plurality of genetically engineered immune cells of claim 134 or claim 135, wherein:
greater than 80%, 81%, 82%, 83%, 84%, 85%, 86%, 87%, 88%, 89%, 90%, 91%, 92%, 93%, 94%, or 95% of the cells both 1) contain the genetic disruption; do not express the endogenous PD-1 polypeptide; do not contain a contiguous PDCD1 gene, a PDCD1 gene, and/or a functional PDCD1 gene; and/or do not express a PD-1 polypeptide and 2) express the recombinant receptor; and/or
greater than 80%, 81%, 82%, 83%, 84%, 85%, 86%, 87%, 88%, 89%, 90%, 91%, 92%, 93%, 94%, or 95% of the cells that express the recombinant receptor contain the genetic disruption, do not express the endogenous PD-1 polypeptide, or do not express a PD-1 polypeptide.

137. A composition comprising the genetically engineered immune cell of claim 133 or the plurality of genetically engineered immune cells of any of claims 134-136, and optionally a pharmaceutically acceptable buffer.

138. A method of treatment, comprising administering the composition of any of claims 1-67 and 137 to a subject having a disease or condition.

139. The method of claim 138, wherein the recombinant receptor specifically binds to an antigen associated with the disease or condition.

140. The method of claim 138 or claim 139, wherein the disease or condition is a cancer, a tumor, an autoimmune disease or disorder, or an infectious disease.

141. The method of claim 140, wherein the cancer or tumor is leukemia, lymphoma, chronic lymphocytic leukemia (CLL), acute-lymphoblastic leukemia (ALL), non-Hodgkin's lymphoma, acute myeloid leukemia, multiple myeloma, refractory follicular lymphoma, mantle cell lymphoma, indolent B cell lymphoma, B cell malignancies, colon cancer, lung cancer, liver cancer, breast cancer, prostate cancer, ovarian cancer, skin cancer, melanoma cancer, bone cancer, and brain cancer, ovarian cancer, epithelial cancers, renal cell carcinoma, pancreatic adenocarcinoma, Hodgkin lymphoma, cervical carcinoma, colorectal cancer, glioblastoma, neuroblastoma, Ewing sarcoma, medulloblastoma, osteosarcoma, synovial sarcoma, and/or mesothelioma.

142. The method of any of claims 139-141, wherein the antigen is selected from the group consisting of orphan tyrosine kinase receptor ROR1, tEGFR, Her2, L1-CAM, CD19, CD20, CD22, mesothelin, CEA, hepatitis B surface antigen, anti-folate receptor, CD23, CD24, CD30, CD33, CD38, CD44, EGFR, EGP-2, EGP-4, EPHa2, ErbB2, 3, or 4, FBP, fetal acethycholine e receptor, GD2, GD3, HMW-MAA, IL-22R-alpha, IL-13R-alpha2, kdr, kappa light chain, Lewis Y, L1-cell adhesion molecule, MAGE-A1, mesothelin, MUC1, MUC16, PSCA, NKG2D Ligands, NY-ESO-1, MART-1, gp100, oncofetal antigen, ROR1, TAG72, VEGF-R2, carcinoembryonic antigen (CEA), prostate specific antigen, PSMA, Her2/neu, estrogen receptor, progesterone receptor, ephrinB2, CD123, CS-1, c-Met, GD-2, MAGE A3, CE7, Wilms Tumor 1 (WT-1), cyclin A1 (CCNA1), BCMA and interleukin 12.

143. The method of any of claims 139-142, wherein the antigen is CD19 or BCMA.

144. The method of any of claims 138-143, wherein the engineered cell administered to the subject has reduced and/or eliminated expression of PD-1 1 day, 2 days, 3 days, 4 days, 5 days, 6 days, 7 days, 10 days, 14 days, one month, two months, or more after administration.

145. The method of any of claims 138-144, wherein the engineered cell administered to the subject persists in the subject for at least 1 day, 2 days, 3 days, 4 days, 5 days, 6 days, 7 days, 10 days, 14 days, one month, two months, or more after administration.

146. The method of claim any of claims 138-145, wherein, at a point in time following administration of the composition:
cells expressing the recombinant receptor and not expressing PD-1 are detectable in the blood of the subject or blood-derived sample from the subject or in a tissue or biological sample of the subject;
cells containing the genetic disruption are detectable in the blood of the subject or a blood-derived sample from the subject or in a tissue or biological sample of the subject;
cells containing the genetic disruption and expressing the recombinant receptor are detectable in the blood of the subject or a blood-derived sample from the subject or in a tissue or biological sample of the subject.

147. The method of any of claims 138-146, wherein the time-point is at or about 7, 8, 9, 10, 11, 12, 13, or 14 days or 2, 3, 4, 5, 6, 7, 8, 9, 10, 11, or 12 weeks following administration.

148. The method of claim 138-147, wherein said cells detectable in the blood or sample are present at a concentration of at or about or at least at or about 1, 2, 3, 4, 5, 6, 7, 8, 9, 10, or 100 cells/microliter of blood and/or represent at least 10, 20, 25, 30, 35, 40, 45, or 50% or more of T cells in the blood.

149. The method of any of claims 138-148, wherein, following administration:
cells in the composition comprising the genetic disruption expand and/or persist in the subject at a rate, and/or for a time that, is at least as great as, optionally greater than, the expansion and/or persistence of T cells in the composition without the genetic disruption and/or as the expansion and/or persistence of T cells of a reference composition in which T cells express the recombinant receptor but do not comprising the deletion; and/or
cells in the composition comprising the genetic disruption and comprising the recombinant receptor expand and/or persist in the subject at a rate, and/or for a time that, is at least as great as, optionally greater than, the expansion and/or persistence of T cells in the composition without the genetic disruption and/or as the expansion and/or persistence of T cells of a reference composition in which T cells express the recombinant receptor but do not comprising the deletion.

150. The method of claim 149, wherein the rate or time is at least at or about 1.5-fold or 2-fold or 3-fold greater.

151. The method of any of claims 140-150, wherein the tumor is a solid tumor.

152. The method of any of claims 140-151, wherein the tumor is not a B cell-derived tumor, is not a leukemia and/or is not a lymphoma.

153. The method of any of claims 140-152, wherein the tumor or cells thereof express or have been observed to express a ligand for PD-1.

154. A pharmaceutical composition comprising an engineered immune cell that comprises (a) a recombinant receptor that specifically binds to an antigen; and (b) a genetic disruption of a PDCD1 gene encoding a PD-1 polypeptide, said genetic disruption preventing or reducing the expression of said PD-1 polypeptide, wherein the engineered cell has a phenotype of reduced and/or eliminated expression of PD-1 prior to administration to a subject and wherein the cells maintain the phenotype for 1 day, 2 days, 3 days, 4 days, 5 days, 6 days, 7 days, 10 days, 14 days, one month, two months, or more after administration to the subject.

155. A composition of any of claims 1-67, 137 and 154 for use in treating a disease or condition in a subject.

156. The composition for use of claim 155, wherein the recombinant receptor specifically binds to an antigen associated with the disease or condition.

157. The composition for use of claim 155 or claim 156, wherein the disease or condition is a cancer, a tumor, an autoimmune disease or disorder, or an infectious disease.

158. The composition for use of any of claims 155-157, wherein the disease or condition is a cancer or tumor, which is a leukemia, lymphoma, chronic lymphocytic leukemia (CLL), acute-lymphoblastic leukemia (ALL), non-Hodgkin's lymphoma, acute myeloid leukemia, multiple myeloma, refractory follicular lymphoma, mantle cell lymphoma, indolent B cell lymphoma, B cell malignancies, colon cancer, lung cancer, liver cancer, breast cancer, prostate cancer, ovarian cancer, skin cancer, melanoma cancer, bone cancer, and brain cancer, ovarian cancer, epithelial cancers, renal cell carcinoma, pancreatic adenocarcinoma, Hodgkin lymphoma, cervical carcinoma, colorectal cancer, glioblastoma, neuroblastoma, Ewing sarcoma, medulloblastoma, osteosarcoma, synovial sarcoma, and/or mesothelioma.

159. The composition for use of any of claims 155-158, wherein the antigen is selected from the group consisting of orphan tyrosine kinase receptor ROR1, tEGFR, Her2, Ll-CAM, CD19, CD20, CD22, mesothelin, CEA, hepatitis B surface antigen, anti-folate receptor, CD23, CD24, CD30, CD33, CD38, CD44, EGFR, EGP-2, EGP-4, EPHa2, ErbB2, 3, or 4, FBP, fetal acethycholine e receptor, GD2, GD3, HMW-MAA, IL-22R-alpha, IL-13R-alpha2, kdr, kappa light chain, Lewis Y, L1-cell adhesion molecule, MAGE-A1, mesothelin, MUC1, MUC16, PSCA, NKG2D Ligands, NY-ESO-1, MART-1, gp100, oncofetal antigen, ROR1, TAG72, VEGF-R2, carcinoembryonic antigen (CEA), prostate specific antigen, PSMA, Her2/neu, estrogen receptor, progesterone receptor, ephrinB2, CD123, CS-1, c-Met, GD-2, MAGE A3, CE7, Wilms Tumor 1 (WT-1), cyclin A1 (CCNA1), BCMA and interleukin 12.

160. The composition for use of any of claims 155-159, wherein the antigen is CD19 or BCMA.

161. The composition for use of any of claims 155-160, wherein, following administration of the composition to subject,
one or more cells containing the genetic disruption, and optionally containing the recombinant receptor, persists in, and/or is detectable in a tissue or biological sample of, the subject at a time that is at least at or about 1 day, 2 days, 3 days, 4 days, 5 days, 6 days, 7 days, 10 days, 14 days, one month, two months, or more after administration; and/or
at least 50, 60, 70, 80, 85, or 90% of the T cells, or T cells expressing the recombinant receptor, that are detectable in a biological sample or tissue from the subject at a time that is at least at or about 1 day, 2 days, 3 days, 4 days, 5 days, 6 days, 7 days, 10 days, 14 days, one month, two months, or more after administration contain the genetic disruption.

162. A method of altering a T cell comprising contacting the T cell with one or more Cas9 molecule/gRNA molecule complexes, wherein the gRNA molecule(s) in the one or more Cas9 molecule/gRNA molecule complexes comprise a targeting domain which is complementary with a target domain from the PDCD1 gene.

163. A method of altering a T cell comprising contacting the T cell with two Cas9 molecule/gRNA molecule complexes, each complex comprising a gRNA molecule comprising a targeting domain which is complementary with a target domain from the PDCD1 gene.

164. The method of claim 162 or claim 163, wherein the T cell is from a subject suffering from cancer.

165. The method of claim 164, wherein the cancer is selected from the group consisting of: lymphoma, chronic lymphocytic leukemia (CLL), B cell acute lymphocytic leukemia (B-ALL), acute lymphoblastic leukemia, acute myeloid leukemia, non-Hodgkin's lymphoma (NHL), diffuse large cell lymphoma (DLCL), multiple myeloma, renal cell carcinoma (RCC), neuroblastoma, colorectal cancer, breast cancer, ovarian cancer, melanoma, sarcoma, prostate cancer, lung cancer, esophageal cancer, hepatocellular carcinoma, pancreatic cancer, astrocytoma, mesothelioma, head and neck cancer, and medulloblastoma.

166. The method of any of claims 162-165, wherein the T cell is from a subject having cancer or which could otherwise benefit from a mutation at a T cell target position of the PDCD1 gene.

167. The method of any of claims 162-166, wherein the contacting is performed ex vivo.

168. The method of any of claims 162-167, wherein the T cell comprises a recombinant receptor.

169. The method of any of claims 162-168, further comprising contacting the T cell with a nucleic acid encoding a recombinant receptor under conditions to introduce the nucleic acid into the cell.

170. The method of claim 168 or claim 169, wherein the recombinant receptor is a functional non-TCR antigen receptor or a transgenic TCR.

171. The method of any of claims 168-170, wherein the recombinant receptor is a chimeric antigen receptor (CAR).

172. The method of claim 171, wherein the CAR comprises an antigen-binding domain that is an antibody or an antibody fragment.

173. The method of claim 172, wherein the antibody fragment is a single chain fragment.

174. The method of claim 172 or claim 173, wherein the antibody fragment comprises antibody variable regions joined by a flexible immunoglobulin linker.

175. The method of any of claims 172-174, wherein the fragment comprises an scFv.

176. The method of any of claims 172-175, wherein the antigen is associated with a disease or disorder.

177. The method of claim 176, wherein the disease or disorder is an infectious disease or condition, an autoimmune disease, an inflammatory disease or a tumor or a cancer.

178. The method of any of claims 168-177, wherein the recombinant receptor specifically binds to a tumor antigen.

179. The method of any of claims 171-178, wherein the antigen is selected from ROR1, Her2, L1-CAM, CD19, CD20, CD22, mesothelin, CEA, hepatitis B surface antigen, anti-folate receptor, CD23, CD24, CD30, CD33, CD38, CD44, EGFR, EGP-2, EGP-4, EPHa2, ErbB2, ErbB3, ErbB4, FBP, fetal acethycholine e receptor, GD2, GD3, HMW-MAA, IL-22R-alpha, IL-13R-alpha2, kdr, kappa light chain, Lewis Y, L1-cell adhesion molecule (CD171), MAGE-A1, mesothelin, MUC1, MUC16, PSCA, NKG2D Ligands, NY-ESO-1, MART-1, gp100, oncofetal antigen, TAG72, VEGF-R2, carcinoembryonic antigen (CEA), prostate specific antigen, PSMA, estrogen receptor, progesterone receptor, ephrinB2, CD123, CS-1, c-Met, GD-2, MAGE A3, CE7, Wilms Tumor 1 (WT-1), cyclin A1 (CCNA1), BCMA and interleukin 12.

180. The method of any of claims 168-179, wherein the recombinant receptor comprises an intracellular signaling domain comprising an ITAM.

181. The method of claim 180, wherein the intracellular signaling domain comprises an intracellular domain of a CD3-zeta (CD3) chain.

182. The method of claim 180 or claim 181, wherein the recombinant receptor further comprises a costimulatory signaling region.

183. The method of claim 182, wherein the costimulatory signaling region comprises a signaling domain of CD28 or 4-1BB.

184. The method of any of claims 164-183, wherein the altered T cell is returned to the subject's body after the step of contacting.

185. The method of any of claims 162-184, wherein the T cell is from a subject suffering from cancer, the contacting is performed ex vivo and the altered T cell is returned to the subject's body after the step of contacting.

186. The method of any of claims 162-185, wherein the one or more Cas9 molecule/gRNA molecule complexes are formed prior to the contacting.

187. The method of any of claims 163-186, wherein the two Cas9 molecule/gRNA molecule complexes are formed prior to the contacting.

188. The method of any of claims 162-187, wherein the gRNA molecule(s) comprise a targeting domain that is the same as, or differs by no more than 3 nucleotides from, a targeting domain from any of SEQ ID NOS: 481-555, 563-1516, 1517-3748, 14657-16670, and 16671-21037

189. The method of claim 188, wherein the gRNA molecule(s) comprise a targeting domain that is selected from SEQ ID NOS: 563-1516.

190. The method of claim 188, wherein the gRNA molecule(s) comprise a targeting domain that is selected from SEQ ID NOS: 1517-3748.

191. The method of claim 188, wherein the gRNA molecule(s) comprise a targeting domain that is selected from SEQ ID NOS: 14657-16670.

192. The method of claim 188, wherein the gRNA molecule(s) comprise a targeting domain that is selected from SEQ ID NOS: 16671-21037.

193. The method of claim 188, wherein the gRNA molecule(s) comprise a targeting domain that is selected from SEQ ID NOS: 481-500 and 508-547.

194. The method of claim 188, wherein the gRNA molecule(s) comprise a targeting domain that is selected from SEQ ID NOS: 501-507 and 548-555.

195. The method of claim 188, wherein the gRNA molecule(s) comprise a targeting domain that is selected from SEQ ID NOS: 508, 514, 576, 579, 582, and 723.

196. The method of claim 188, wherein the gRNA molecule(s) comprise a targeting domain that is selected from SEQ ID NOS: 508, 510, 511, 512, 514, 576, 579, 581, 582, 766, and 723.

197. The method of any of claims 162-196, wherein the gRNA molecule(s) are modified at their 5′ end or comprise a 3′ polyA tail.

198. The method of any of claims 162-196, wherein the gRNA molecule(s) are modified at their 5′ end and comprise a 3′ polyA tail.

199. The method of claim 197 or claim 198, wherein the gRNA molecule(s) lack a 5′ triphosphate group.

200. The method of claim 197 or claim 198, wherein the gRNA molecule(s) include a 5′ cap.

201. The method of claim 200, wherein the 5′ cap comprises a modified guanine nucleotide that is linked to the remainder of the gRNA molecule via a 5′-5′ triphosphate linkage.

202. The method of claim 200, wherein the 5′ cap comprises two optionally modified guanine nucleotides that are linked via an optionally modified 5′-5′ triphosphate linkage.

203. The method of any of claims 197-202, wherein the 3′ polyA tail is comprised of about 10 to about 30 adenine nucleotides.

204. The method of any of claims 197-202, wherein the 3′ polyA tail is comprised of about 20 adenine nucleotides.

205. The method of claim 203 or claim 204, wherein the gRNA molecule(s) including the 3′ polyA tail were prepared by in vitro transcription from a DNA template.

206. The method of claim 205, wherein the 5′ nucleotide of the targeting domain is a guanine nucleotide, the DNA template comprises a T7 promoter sequence located immediately upstream of the sequence that corresponds to the targeting domain, and the 3′ nucleotide of the T7 promoter sequence is not a guanine nucleotide.

207. The method of claim 205, wherein the 5′ nucleotide of the targeting domain is not a guanine nucleotide, the DNA template comprises a T7 promoter sequence located immediately upstream of the sequence that corresponds to the targeting domain, and the 3′ nucleotide of the T7 promoter sequence is a guanine nucleotide which is downstream of a nucleotide other than a guanine nucleotide.

208. The method of any of claims 162-207, wherein the one or more Cas9 molecule/gRNA molecule complexes are delivered into the T cell via electroporation.

209. The method of any of claims 163-208, wherein the at least two Cas9 molecule/gRNA molecule complexes are delivered into the T cell via electroporation.

210. The method of any of claims 162-209, wherein the gRNA molecule(s) comprise a targeting domain which is complementary with a target domain from the PDCD1 gene and wherein the gRNA molecule(s) guide the Cas9 molecule to cleave the target domain with an efficiency of cleavage of at least 40%.

211. The method of claim 210, wherein the efficiency of cleavage is determined using a labeled anti-PDCD1 antibody and a flow cytometry assay.

212. The method of any of claims 162-211, wherein the Cas9 molecule is guided by a single gRNA molecule and cleaves the target domain with a single double stranded break.

213. The method of claim 212, wherein the Cas9 molecule is a S. pyogenes Cas9 molecule.

214. The method of any of claims 162-213, wherein the targeting domain is selected from:
(SEQ ID NO: 508)
GUCUGGGCGGUGCUACAACU;
(SEQ ID NO: 514)
GCCCUGGCCAGUCGUCU;
(SEQ ID NO: 576)
CGUCUGGGCGGUGCUACAAC;
(SEQ ID NO: 579)
UGUAGCACCGCCCAGACGAC;
(SEQ ID NO: 582)
CGACUGGCCAGGGCGCCUGU;
or
(SEQ ID NO: 723)
CACCUACCUAAGAACCAUCC.

215. The method of any of claims 162-211, wherein the Cas9 molecule is a nickase and two Cas9 molecule/gRNA molecule complexes are guided by two different gRNA molecules to cleave the target domain with two single stranded breaks on opposing strands of the target domain.

216. The method of claim 215, wherein the Cas9 molecule is a S. pyogenes Cas9 molecule.

217. The method of any of claims 162-216, wherein the S. pyogenes Cas9 molecule has a D10A mutation.

218. The method of any of claims 162-217, wherein the two gRNA molecules comprise targeting domains that are selected from the following pairs of targeting domains:
(SEQ ID NO: 582)
CGACUGGCCAGGGCGCCUGU
and
(SEQ ID NO: 508)
GUCUGGGCGGUGCUACAACU;
(SEQ ID NO: 582)
CGACUGGCCAGGGCGCCUGU
and
(SEQ ID NO: 510)
GGGCGGUGCUACAACUGGGC;
(SEQ ID NO: 582)
CGACUGGCCAGGGCGCCUGU
and
(SEQ ID NO: 511)
GGCCAGGAUGGUUCUUAGGU;
(SEQ ID NO: 582)
CGACUGGCCAGGGCGCCUGU
and
(SEQ ID NO: 512)
GGAUGGUUCUUAGGUAGGUG;
(SEQ ID NO: 582)
CGACUGGCCAGGGCGCCUGU
and
(SEQ ID NO: 576)
CGUCUGGGCGGUGCUACAAC;
(SEQ ID NO: 582)
CGACUGGCCAGGGCGCCUGU
and
(SEQ ID NO: 766)
CUACAACUGGGCUGGCGGCC;
(SEQ ID NO: 579)
UGUAGCACCGCCCAGACGAC
and
(SEQ ID NO: 511)
GGCCAGGAUGGUUCUUAGGU;
(SEQ ID NO: 579)
UGUAGCACCGCCCAGACGAC
and
(SEQ ID NO: 512)
GGAUGGUUCUUAGGUAGGUG;
or
(SEQ ID NO: 581)
ACCGCCCAGACGACUGGCCA
and
(SEQ ID NO: 511)
GGCCAGGAUGGUUCUUAGGU.

219. The method of any of claims 162-218, wherein the S. pyogenes Cas9 molecule has a N863A mutation.

220. The method of claim 219, wherein the two gRNA molecules comprise targeting domains that are selected from the following pairs of targeting domains:
(SEQ ID NO: 582)
CGACUGGCCAGGGCGCCUGU
and
(SEQ ID NO: 508)
GUCUGGGCGGUGCUACAACU;
(SEQ ID NO: 582)
CGACUGGCCAGGGCGCCUGU
and
(SEQ ID NO: 510)
GGGCGGUGCUACAACUGGGC;
or
(SEQ ID NO: 582)
CGACUGGCCAGGGCGCCUGU
and
(SEQ ID NO: 511)
GGCCAGGAUGGUUCUUAGGU.

221. The method of any of claims 162-220, wherein the gRNA molecule(s) are modular gRNA molecule(s).

222. The method of any of claims 162-220, wherein the gRNA molecule(s) are chimeric gRNA molecule(s).

223. The method of claim 222, wherein the gRNA molecule(s) comprise from 5′ to 3′:
a targeting domain; a first complementarity domain; a linking domain; a second complementarity domain; a proximal domain; and a tail domain.

224. The method of claim 222 or claim 223, wherein the gRNA molecule(s) comprise a linking domain of no more than 25 nucleotides in length and a proximal and tail domain, that taken together, are at least 20 nucleotides in length.

225. The method of any one of claims 210-224, wherein the method is characterized by an efficiency of cleavage of at least 60%.

226. The method of any one of claims 210-224, wherein the method is characterized by an efficiency of cleavage of at least 80%.

227. The method of any one of claims 210-224, wherein the method is characterized by an efficiency of cleavage of at least 90%.

228. The method of any one of claims 210-227, wherein the gRNA molecule is characterized by fewer than 5 off-targets.

229. The method of any one of claims 210-228, wherein the gRNA molecule is characterized by fewer than 2 exonic off-targets.

230. The method of claim 228 or claim 229, wherein off-targets are identified by GUIDE-seq.

231. The method of claim 228 or claim 229, wherein off-targets are identified by Amp-seq.

232. A Cas9 molecule/gRNA molecule complex, wherein the gRNA molecule comprises a targeting domain which is complementary with a target domain from the PDCD1 gene, and the gRNA molecule is modified at its 5′ end and/or comprises a 3′ polyA tail.

233. The Cas9 molecule/gRNA molecule complex of claim 232, wherein the gRNA molecule comprises a targeting domain that is the same as, or differs by no more than 3 nucleotides from, a targeting domain from any of SEQ ID NOS: 481-555, 563-1516, 1517-3748, 14657-16670, and 16671-21037

234. The Cas9 molecule/gRNA molecule complex of claim 232, wherein the gRNA molecule comprises a targeting domain that is selected from SEQ ID NOS: 563-1516.

235. The Cas9 molecule/gRNA molecule complex of claim 232, wherein the gRNA molecule comprises a targeting domain that is selected from SEQ ID NOS: 1517-3748.

236. The Cas9 molecule/gRNA molecule complex of claim 232, wherein the gRNA molecule comprises a targeting domain that is selected from SEQ ID NOS: 14657-16670.

237. The Cas9 molecule/gRNA molecule complex of claim 232, wherein the gRNA molecule comprises a targeting domain that is selected from SEQ ID NOS: 16671-21037.

238. The Cas9 molecule/gRNA molecule complex of claim 232, wherein the gRNA molecule comprises a targeting domain that is selected from SEQ ID NOS: 481-500 and 508-547.

239. The Cas9 molecule/gRNA molecule complex of claim 232, wherein the gRNA molecule comprises a targeting domain that is selected from SEQ ID NOS: 501-507 and 548-555.

240. The Cas9 molecule/gRNA molecule complex of claim 232, wherein the gRNA molecule comprises a targeting domain that is selected from SEQ ID NOS: 508, 514, 576, 579, 582, and 723.

241. The Cas9 molecule/gRNA molecule complex of claim 232, wherein the gRNA molecule comprises a targeting domain that is selected from SEQ ID NOS: 508, 510, 511, 512, 514, 576, 579, 581, 582, 766, and 723.

242. The Cas9 molecule/gRNA molecule complex of any of claims 232-241, wherein the gRNA molecule is modified at its 5′ end.

243. The Cas9 molecule/gRNA molecule complex of claim 242, wherein the gRNA molecule lacks a 5′ triphosphate group.

244. The Cas9 molecule/gRNA molecule complex of claim 242, wherein the gRNA molecule includes a 5′ cap.

245. The Cas9 molecule/gRNA molecule complex of claim 244, wherein the 5′ cap comprises a modified guanine nucleotide that is linked to the remainder of the gRNA molecule via a 5′-5′ triphosphate linkage.

246. The Cas9 molecule/gRNA molecule complex of claim 244, wherein the 5′ cap comprises two optionally modified guanine nucleotides that are linked via an optionally modified 5′-5′ triphosphate linkage.

247. The Cas9 molecule/gRNA molecule complex of any of claims 232-246, wherein the 3′ polyA tail is comprised of about 10 to about 30 adenine nucleotides.

248. The Cas9 molecule/gRNA molecule complex of any of claims 232-246, wherein the 3′ polyA tail is comprised of about 20 adenine nucleotides.

249. The Cas9 molecule/gRNA molecule complex of claim 247 or claim 248, wherein the gRNA molecule including the 3′ polyA tail was prepared by in vitro transcription from a DNA template.

250. The Cas9 molecule/gRNA molecule complex of claim 249, wherein the 5′ nucleotide of the targeting domain is a guanine nucleotide, the DNA template comprises a T7 promoter sequence located immediately upstream of the sequence that corresponds to the targeting domain, and the 3′ nucleotide of the T7 promoter sequence is not a guanine nucleotide.

251. The Cas9 molecule/gRNA molecule complex of claim 249, wherein the 5′ nucleotide of the targeting domain is not a guanine nucleotide, the DNA template comprises a T7 promoter sequence located immediately upstream of the sequence that corresponds to the targeting domain, and the 3′ nucleotide of the T7 promoter sequence is a guanine nucleotide which is downstream of a nucleotide other than a guanine nucleotide.

252. The Cas9 molecule/gRNA molecule complex of any of claims 232-251, wherein the Cas9 molecule cleaves a target domain with a double stranded break.

253. The Cas9 molecule/gRNA molecule complex of claim 252, wherein the Cas9 molecule is a S. pyogenes Cas9 molecule.

254. The Cas9 molecule/gRNA molecule complex of any of claims 232-253, wherein the targeting domain is selected from the following group of targeting domains:
(SEQ ID NO: 508)
GUCUGGGCGGUGCUACAACU;
(SEQ ID NO: 514)
GCCCUGGCCAGUCGUCU;
(SEQ ID NO: 576)
CGUCUGGGCGGUGCUACAAC;
(SEQ ID NO: 579)
UGUAGCACCGCCCAGACGAC;
(SEQ ID NO: 582)
CGACUGGCCAGGGCGCCUGU;
or
(SEQ ID NO: 723)
CACCUACCUAAGAACCAUCC.

255. The Cas9 molecule/gRNA molecule complex of any of claims 232-251, wherein the Cas9 molecule cleaves a target domain with a single stranded break.

256. The Cas9 molecule/gRNA molecule complex of claim 255, wherein the Cas9 molecule is a S. pyogenes Cas9 molecule.

257. The Cas9 molecule/gRNA molecule complex of any of claim 232-claim 256, wherein the S. pyogenes Cas9 molecule has a D10A mutation.

258. The Cas9 molecule/gRNA molecule complex of any of claim 232-claim 257, wherein the targeting domain is selected from the following group of targeting domains:
(SEQ ID NO: 582)
CGACUGGCCAGGGCGCCUGU
and
(SEQ ID NO: 508)
GUCUGGGCGGUGCUACAACU;
(SEQ ID NO: 582)
CGACUGGCCAGGGCGCCUGU
and
(SEQ ID NO: 510)
GGGCGGUGCUACAACUGGGC;
(SEQ ID NO: 582)
CGACUGGCCAGGGCGCCUGU
and
(SEQ ID NO: 511)
GGCCAGGAUGGUUCUUAGGU;
(SEQ ID NO: 582)
CGACUGGCCAGGGCGCCUGU
and
(SEQ ID NO: 512)
GGAUGGUUCUUAGGUAGGUG;
(SEQ ID NO: 582)
CGACUGGCCAGGGCGCCUGU
and
(SEQ ID NO: 576)
CGUCUGGGCGGUGCUACAAC;
(SEQ ID NO: 582)
CGACUGGCCAGGGCGCCUGU
and
(SEQ ID NO: 766)
CUACAACUGGGCUGGCGGCC;
(SEQ ID NO: 579)
UGUAGCACCGCCCAGACGAC
and
(SEQ ID NO: 511)
GGCCAGGAUGGUUCUUAGGU;
(SEQ ID NO: 579)
UGUAGCACCGCCCAGACGAC
and
(SEQ ID NO: 512)
GGAUGGUUCUUAGGUAGGUG;
or
(SEQ ID NO: 581)
ACCGCCCAGACGACUGGCCA
and
(SEQ ID NO: 511)
GGCCAGGAUGGUUCUUAGGU.

259. The Cas9 molecule/gRNA molecule complex of any of claim 232-256, wherein the S. pyogenes Cas9 molecule has a N863A mutation.

260. The Cas9 molecule/gRNA molecule complex of claim 259, wherein the targeting domain is selected from the following group of targeting domains:
(SEQ ID NO: 582)
CGACUGGCCAGGGCGCCUGU
and
(SEQ ID NO: 508)
GUCUGGGCGGUGCUACAACU;
(SEQ ID NO: 582)
CGACUGGCCAGGGCGCCUGU
and
(SEQ ID NO: 510)
GGGCGGUGCUACAACUGGGC;
or
(SEQ ID NO: 582)
CGACUGGCCAGGGCGCCUGU
and
(SEQ ID NO: 511)
GGCCAGGAUGGUUCUUAGGU.

261. The Cas9 molecule/gRNA molecule complex of any of claims 232-260, wherein the gRNA molecule is a modular gRNA molecule.

262. The Cas9 molecule/gRNA molecule complex of any of claims 232-261, wherein the gRNA molecule is a chimeric gRNA molecule.

263. The Cas9 molecule/gRNA molecule complex of claim 262, wherein the gRNA molecule comprises from 5′ to 3′: a targeting domain; a first complementarity domain; a linking domain; a second complementarity domain; a proximal domain; and a tail domain.

264. The Cas9 molecule/gRNA molecule complex of claim 262 or claim 263, wherein the gRNA molecule comprises a linking domain of no more than 25 nucleotides in length and a proximal and tail domain, that taken together, are at least 20 nucleotides in length.

265. A composition comprising at least two Cas9 molecule/gRNA complexes, each complex comprising a gRNA molecule comprising a targeting domain that is complementary to a target domain from a PDCD1 gene.

266. The composition of claim 265, wherein the gRNA molecule comprises a targeting domain that is the same as, or differs by no more than 3 nucleotides from, a targeting domain from any of SEQ ID NOS: 481-555, 563-1516, 1517-3748, 14657-16670, and 16671-21037

267. The composition of claim 265, wherein the gRNA molecule comprises a targeting domain that is selected from SEQ ID NOS: 563-1516.

268. The composition of claim 265, wherein the gRNA molecule comprises a targeting domain that is selected from SEQ ID NOS: 1517-3748.

269. The composition of claim 265, wherein the gRNA molecule comprises a targeting domain that is selected from SEQ ID NOS: 14657-16670.

270. The composition of claim 265, wherein the gRNA molecule comprises a targeting domain that is selected from SEQ ID NOS: 16671-21037.

271. The composition of claim 265, wherein the gRNA molecule comprises a targeting domain that is selected from SEQ ID NOS: 481-500 and 508-547.

272. The composition of claim 265, wherein the gRNA molecule comprises a targeting domain that is selected from SEQ ID NOS: 501-507 and 548-555.

273. The composition of claim 265, wherein the gRNA molecule comprises a targeting domain that is selected from SEQ ID NOS: 508, 514, 576, 579, 582, and 723.

274. The composition of claim 265, wherein the gRNA molecule comprises a targeting domain that is selected from SEQ ID NOS: 508, 510, 511, 512, 514, 576, 579, 581, 582, 766, and 723.

275. The composition of any of claims 265-741, wherein the gRNA molecule is modified at its 5′ end.

276. The composition of claim 275, wherein the gRNA molecule lacks a 5′ triphosphate group.

277. The composition of claim 275, wherein the gRNA molecule includes a 5′ cap.

278. The composition of claim 277, wherein the 5′ cap comprises a modified guanine nucleotide that is linked to the remainder of the gRNA molecule via a 5′-5′ triphosphate linkage.

279. The composition of claim 277, wherein the 5′ cap comprises two optionally modified guanine nucleotides that are linked via an optionally modified 5′-5′ triphosphate linkage.

280. The composition of any of claims 265-279, wherein the 3′ polyA tail is comprised of about 10 to about 30 adenine nucleotides.

281. The composition of any of claims 265-279, wherein the 3′ polyA tail is comprised of about 20 adenine nucleotides.

282. The composition of claim 280 or claim 281, wherein the gRNA molecule including the 3′ polyA tail was prepared by in vitro transcription from a DNA template.

283. The composition of claim 282, wherein the 5′ nucleotide of the targeting domain is a guanine nucleotide, the DNA template comprises a T7 promoter sequence located immediately upstream of the sequence that corresponds to the targeting domain, and the 3′ nucleotide of the T7 promoter sequence is not a guanine nucleotide.

284. The composition of claim 282, wherein the 5′ nucleotide of the targeting domain is not a guanine nucleotide, the DNA template comprises a T7 promoter sequence located immediately upstream of the sequence that corresponds to the targeting domain, and the 3′ nucleotide of the T7 promoter sequence is a guanine nucleotide which is downstream of a nucleotide other than a guanine nucleotide.

285. The composition of any of claims 265-284, wherein the Cas9 molecule cleaves a target domain with a double stranded break.

286. The composition of claim 285, wherein the Cas9 molecule is a S. pyogenes Cas9 molecule.

287. The composition of any of claims 265-286, wherein the targeting domain is selected from the following group of targeting domains:
(SEQ ID NO: 508)
GUCUGGGCGGUGCUACAACU;
(SEQ ID NO: 514)
GCCCUGGCCAGUCGUCU;
(SEQ ID NO: 576)
CGUCUGGGCGGUGCUACAAC;
(SEQ ID NO: 579)
UGUAGCACCGCCCAGACGAC;
(SEQ ID NO: 582)
CGACUGGCCAGGGCGCCUGU;
or
(SEQ ID NO: 723)
CACCUACCUAAGAACCAUCC.

288. The composition of any of claims 265-287, wherein the Cas9 molecule cleaves a target domain with a single stranded break.

289. The composition of claim 288, wherein the Cas9 molecule is a S. pyogenes Cas9 molecule.

290. The composition of any of claims 265-289, wherein the S. pyogenes Cas9 molecule has a D10A mutation.

291. The composition of any of claims 265-290, wherein the targeting domain is selected from the following group of targeting domains:
(SEQ ID NO: 582)
CGACUGGCCAGGGCGCCUGU
and
(SEQ ID NO: 508)
GUCUGGGCGGUGCUACAACU;
(SEQ ID NO: 582)
CGACUGGCCAGGGCGCCUGU
and
(SEQ ID NO: 510)
GGGCGGUGCUACAACUGGGC;
(SEQ ID NO: 582)
CGACUGGCCAGGGCGCCUGU
and
(SEQ ID NO: 511)
GGCCAGGAUGGUUCUUAGGU;
(SEQ ID NO: 582)
CGACUGGCCAGGGCGCCUGU
and
(SEQ ID NO: 512)
GGAUGGUUCUUAGGUAGGUG;
(SEQ ID NO: 582)
CGACUGGCCAGGGCGCCUGU
and
(SEQ ID NO: 576)
CGUCUGGGCGGUGCUACAAC;
(SEQ ID NO: 582)
CGACUGGCCAGGGCGCCUGU
and
(SEQ ID NO: 766)
CUACAACUGGGCUGGCGGCC;
(SEQ ID NO: 579)
UGUAGCACCGCCCAGACGAC
and
(SEQ ID NO: 511)
GGCCAGGAUGGUUCUUAGGU;
(SEQ ID NO: 579)
UGUAGCACCGCCCAGACGAC
and
(SEQ ID NO: 512)
GGAUGGUUCUUAGGUAGGUG;
or
(SEQ ID NO: 581)
ACCGCCCAGACGACUGGCCA
and
(SEQ ID NO: 511)
GGCCAGGAUGGUUCUUAGGU.

292. The composition of any of claim 265-291, wherein the S. pyogenes Cas9 molecule has a N863A mutation.

293. The composition of claim 292, wherein the targeting domain is selected from the following group of targeting domains:
(SEQ ID NO: 582)
CGACUGGCCAGGGCGCCUGU
and
(SEQ ID NO: 508)
GUCUGGGCGGUGCUACAACU;
(SEQ ID NO: 582)
CGACUGGCCAGGGCGCCUGU
and
(SEQ ID NO: 510)
GGGCGGUGCUACAACUGGGC;
or
(SEQ ID NO: 582)
CGACUGGCCAGGGCGCCUGU
and
(SEQ ID NO: 511)
GGCCAGGAUGGUUCUUAGGU.

294. The composition of any of claims 265-293, wherein the gRNA molecule is a modular gRNA molecule.

295. The composition of any of claims 265-294, wherein the gRNA molecule is a chimeric gRNA molecule.

296. The composition of claim 295, wherein the gRNA molecule comprises from 5′ to 3′: a targeting domain; a first complementarity domain; a linking domain; a second complementarity domain; a proximal domain; and a tail domain.

297. The composition of claim 295 or claim 296, wherein the gRNA molecule comprises a linking domain of no more than 25 nucleotides in length and a proximal and tail domain, that taken together, are at least 20 nucleotides in length.

298. A gRNA molecule that comprises a targeting domain which is complementary with a target domain from the PDCD1 gene, wherein the gRNA molecule is modified at its 5′ end and/or comprises a 3′ polyA tail.

299. The gRNA molecule of claim 298, wherein the gRNA molecule comprises a targeting domain that is the same as, or differs by no more than 3 nucleotides from, a targeting domain from any of SEQ ID NOS: 481-555, 563-1516, 1517-3748, 14657-16670, and 16671-21037

300. The gRNA molecule of claim 298, wherein the gRNA molecule comprises a targeting domain that is selected from SEQ ID NOS: 563-1516.

301. The gRNA molecule of claim 298, wherein the gRNA molecule comprises a targeting domain that is selected from SEQ ID NOS: 1517-3748.

302. The gRNA molecule of claim 298, wherein the gRNA molecule comprises a targeting domain that is selected from SEQ ID NOS: 14657-16670.

303. The gRNA molecule of claim 298, wherein the gRNA molecule comprises a targeting domain that is selected from SEQ ID NOS: 16671-21037.

304. The gRNA molecule of claim 298, wherein the gRNA molecule comprises a targeting domain that is selected from SEQ ID NOS: 481-500 and 508-547.

305. The gRNA molecule of claim 298, wherein the gRNA molecule comprises a targeting domain that is selected from SEQ ID NOS: 501-507 and 548-555.

306. The gRNA molecule of claim 298, wherein the gRNA molecule comprises a targeting domain that is selected from SEQ ID NOS: 508, 514, 576, 579, 582, and 723.

307. The gRNA molecule of claim 298, wherein the gRNA molecule comprises a targeting domain that is selected from SEQ ID NOS: 508, 510, 511, 512, 514, 576, 579, 581, 582, 766, and 723.

308. The gRNA molecule of any of claims claim 298-94, wherein the gRNA molecule is modified at its 5′ end.

309. The gRNA molecule of claim 308, wherein the gRNA molecule lacks a 5′ triphosphate group.

310. The gRNA molecule of claim 308, wherein the gRNA molecule includes a 5′ cap.

311. The gRNA molecule of claim 310, wherein the 5′ cap comprises a modified guanine nucleotide that is linked to the remainder of the gRNA molecule via a 5′-5′ triphosphate linkage.

312. The gRNA molecule of claim 310, wherein the 5′ cap comprises two optionally modified guanine nucleotides that are linked via an optionally modified 5′-5′ triphosphate linkage.

313. The gRNA molecule of any of claims 298-312, wherein the gRNA molecule comprises a 3′ polyA tail which is comprised of about 10 to about 30 adenine nucleotides.

314. The gRNA molecule of any of claims 298-312, wherein the gRNA molecule comprises a 3′ polyA tail which is comprised of about 20 adenine nucleotides.

315. The gRNA molecule of claim 313 or 314, wherein the gRNA molecule including the 3′ polyA tail was prepared by in vitro transcription from a DNA template.

316. The gRNA molecule of claim 315, wherein the 5′ nucleotide of the targeting domain is a guanine nucleotide, the DNA template comprises a T7 promoter sequence located immediately upstream of the sequence that corresponds to the targeting domain, and the 3′ nucleotide of the T7 promoter sequence is not a guanine nucleotide.

316. The gRNA molecule of claim 315, wherein the 5′ nucleotide of the targeting domain is not a guanine nucleotide, the DNA template comprises a T7 promoter sequence located immediately upstream of the sequence that corresponds to the targeting domain, and the 3′ nucleotide of the T7 promoter sequence is a guanine nucleotide which is downstream of a nucleotide other than a guanine nucleotide.

317. The gRNA molecule of any of claims 298-316, wherein the gRNA molecule is a S. pyogenes gRNA molecule.

318. The gRNA molecule of any of claims 298-317, wherein the targeting domain is selected from the following group of targeting domains:
(SEQ ID NO: 508)
GUCUGGGCGGUGCUACAACU;
(SEQ ID NO: 514)
GCCCUGGCCAGUCGUCU;
(SEQ ID NO: 576)
CGUCUGGGCGGUGCUACAAC;
(SEQ ID NO: 579)
UGUAGCACCGCCCAGACGAC;
(SEQ ID NO: 582)
CGACUGGCCAGGGCGCCUGU;
or
(SEQ ID NO: 723)
CACCUACCUAAGAACCAUCC.

319. The gRNA molecule of claim 318, wherein the targeting domain is selected from the following group of targeting domains:
(SEQ ID NO: 514)
GCCCUGGCCAGUCGUCU;
(SEQ ID NO: 723)
CACCUACCUAAGAACCAUCC.

320. The gRNA molecule of claim 318, wherein the targeting domain is selected from the following group of targeting domains:
(SEQ ID NO: 510)
GGGCGGUGCUACAACUGGGC;
(SEQ ID NO: 511)
GGCCAGGAUGGUUCUUAGGU;
(SEQ ID NO: 512)
GGAUGGUUCUUAGGUAGGUG;
(SEQ ID NO: 581)
ACCGCCCAGACGACUGGCCA
and
(SEQ ID NO: 766)
CUACAACUGGGCUGGCGGCC;

321. The gRNA molecule of claim 318, wherein the targeting domain is selected from the following group of targeting domains:
(SEQ ID NO: 511)
GGCCAGGAUGGUUCUUAGGU;
(SEQ ID NO: 512)
GGAUGGUUCUUAGGUAGGUG;
(SEQ ID NO: 766)
CUACAACUGGGCUGGCGGCC;

322. The gRNA molecule of any of claims 298-321, wherein the gRNA molecule is a modular gRNA molecule.

323. The gRNA molecule of any of claims 298-322, wherein the gRNA molecule is a chimeric gRNA molecule.

324. The gRNA molecule of claim 323, wherein the gRNA molecule comprises from 5′ to 3′: a targeting domain; a first complementarity domain; a linking domain; a second complementarity domain; a proximal domain; and a tail domain.

325. The gRNA molecule of claim 323 or claim 324, wherein the gRNA molecule comprises a linking domain of no more than 25 nucleotides in length and a proximal and tail domain, that taken together, are at least 20 nucleotides in length.

326. A method of making a cell for implantation, comprising contacting the cell with one or more Cas9 molecule/gRNA molecule complexes, wherein the gRNA molecule(s) in the one or more Cas9 molecule/gRNA molecule complexes comprise a targeting domain which is complementary with a target domain from the PDCD1 gene.

327. The method of claim 326, wherein the gRNA molecule(s) comprise a targeting domain which is complementary with a target domain from the PDCD1 gene and wherein the gRNA molecule(s) guide the Cas9 molecule to cleave the target domain with an efficiency of cleavage of at least 40%.

328. The method of claim 327, wherein the efficiency of cleavage is determined using a labeled anti-PDCD1 antibody and a flow cytometry assay

329. The method of any of claims 326-328, wherein the gRNA molecule(s) are modified at their 5′ end or comprise a 3′ polyA tail.

330. The method of any of claims 326-328, wherein the gRNA molecule(s) are modified at their 5′ end and comprise a 3′ polyA tail.

331. The method of claim 329 or claim 330, wherein the gRNA molecule(s) lack a 5′ triphosphate group.

332. The method of claim 329 or claim 330, wherein the gRNA molecule(s) include a 5′ cap.

333. The method of claim 332, wherein the 5′ cap comprises a modified guanine nucleotide that is linked to the remainder of the gRNA molecule via a 5′-5′ triphosphate linkage.

334. The method of claim 332, wherein the 5′ cap comprises two optionally modified guanine nucleotides that are linked via an optionally modified 5′-5′ triphosphate linkage.

335. The method of any of claims 329-334, wherein the 3′ polyA tail is comprised of about 10 to about 30 adenine nucleotides.

336. The method of any of claims 329-334, wherein the 3′ polyA tail is comprised of about 20 adenine nucleotides.

337. The method of claim 335 or claim 336, wherein the gRNA molecule(s) including the 3′ polyA tail were prepared by in vitro transcription from a DNA template.

338. The method of claim 337, wherein the 5′ nucleotide of the targeting domain is a guanine nucleotide, the DNA template comprises a T7 promoter sequence located immediately upstream of the sequence that corresponds to the targeting domain, and the 3′ nucleotide of the T7 promoter sequence is not a guanine nucleotide.

339. The method of claim 337, wherein the 5′ nucleotide of the targeting domain is not a guanine nucleotide, the DNA template comprises a T7 promoter sequence located immediately upstream of the sequence that corresponds to the targeting domain, and the 3′ nucleotide of the T7 promoter sequence is a guanine nucleotide which is downstream of a nucleotide other than a guanine nucleotide.

340. The method of any of claims 326-339, wherein the one or more Cas9 molecule/gRNA molecule complexes are delivered into the cell via electroporation.

341. The method of any of claims 326-340, wherein the Cas9 molecule is guided by a single gRNA molecule and cleaves the target domain with a single double stranded break.

342. The method of claim 341, wherein the Cas9 molecule is a S. pyogenes Cas9 molecule.

343. The method of any of claims 326-342, wherein the single gRNA molecule comprises a targeting domain selected from the following targeting domains:
(SEQ ID NO: 508)
GUCUGGGCGGUGCUACAACU;
(SEQ ID NO: 514)
GCCCUGGCCAGUCGUCU;
(SEQ ID NO: 576)
CGUCUGGGCGGUGCUACAAC;
(SEQ ID NO: 579)
UGUAGCACCGCCCAGACGAC;
(SEQ ID NO: 582)
CGACUGGCCAGGGCGCCUGU;
or
(SEQ ID NO: 723)
CACCUACCUAAGAACCAUCC.

344. The method of any of claims 326-343, wherein the Cas9 molecule is a nickase and two Cas9 molecule/gRNA molecule complexes are guided by two different gRNA molecules to cleave the target domain with two single stranded breaks on opposing strands of the target domain.

345. The method of any of claims 326-344, wherein the Cas9 molecule is a S. pyogenes Cas9 molecule having a D10A mutation.

346. The method of any of claims 326-345, wherein the two gRNA molecules comprise targeting domains that are selected from the following pairs of targeting domains:
(SEQ ID NO: 582)
CGACUGGCCAGGGCGCCUGU
and
(SEQ ID NO: 508)
GUCUGGGCGGUGCUACAACU;
(SEQ ID NO: 582)
CGACUGGCCAGGGCGCCUGU
and
(SEQ ID NO: 510)
GGGCGGUGCUACAACUGGGC;
(SEQ ID NO: 582)
CGACUGGCCAGGGCGCCUGU
and
(SEQ ID NO: 511)
GGCCAGGAUGGUUCUUAGGU;
(SEQ ID NO: 582)
CGACUGGCCAGGGCGCCUGU
and
(SEQ ID NO: 512)
GGAUGGUUCUUAGGUAGGUG;
(SEQ ID NO: 582)
CGACUGGCCAGGGCGCCUGU
and
(SEQ ID NO: 576)
CGUCUGGGCGGUGCUACAAC;
(SEQ ID NO: 582)
CGACUGGCCAGGGCGCCUGU
and
(SEQ ID NO: 766)
CUACAACUGGGCUGGCGGCC;
(SEQ ID NO: 579)
UGUAGCACCGCCCAGACGAC
and
(SEQ ID NO: 511)
GGCCAGGAUGGUUCUUAGGU;
(SEQ ID NO: 579)
UGUAGCACCGCCCAGACGAC
and
(SEQ ID NO: 512)
GGAUGGUUCUUAGGUAGGUG;
or
(SEQ ID NO: 581)
ACCGCCCAGACGACUGGCCA
and
(SEQ ID NO: 511)
GGCCAGGAUGGUUCUUAGGU.

347. The method of any of claims 326-346, wherein the S. pyogenes Cas9 molecule has a N863A mutation.

348. The method of claim 347, wherein the two gRNA molecules comprise targeting domains that are selected from the following pairs of targeting domains:
(SEQ ID NO: 582)
CGACUGGCCAGGGCGCCUGU
and
(SEQ ID NO: 508)
GUCUGGGCGGUGCUACAACU;
(SEQ ID NO: 582)
CGACUGGCCAGGGCGCCUGU
and
(SEQ ID NO: 510)
GGGCGGUGCUACAACUGGGC;
or
(SEQ ID NO: 582)
CGACUGGCCAGGGCGCCUGU
and
(SEQ ID NO: 511)
GGCCAGGAUGGUUCUUAGGU.

349. The method of any of claims 326-348, wherein the gRNA molecule(s) are modular gRNA molecule(s).

350. The method of any of claims 326-349, wherein the gRNA molecule(s) are chimeric gRNA molecule(s).

351. The method of claim 350, wherein the gRNA molecule(s) comprise from 5′ to 3′: a targeting domain; a first complementarity domain; a linking domain; a second complementarity domain; a proximal domain; and a tail domain.

352. The method of claim 350 or claim 351, wherein the gRNA molecule(s) comprise a linking domain of no more than 25 nucleotides in length and a proximal and tail domain, that taken together, are at least 20 nucleotides in length.

353. The method of any of claims 326-352, wherein the gRNA molecule(s) guide the Cas9 molecule to cleave the target domain with an efficiency of cleavage of at least 60%.

354. The method of any of claims 326-352, wherein the gRNA molecule(s) guide the Cas9 molecule to cleave the target domain with an efficiency of cleavage of at least 80%.

355. The method of any of claims 326-352, wherein the gRNA molecule(s) guide the Cas9 molecule to cleave the target domain with an efficiency of cleavage of at least 90%.

356. The method of any of claims 326-355, wherein the one or more Cas9 molecule/gRNA molecule complexes produce fewer than 5 off-targets.

357. The method of any of claims 326-356, wherein the one or more Cas9 molecule/gRNA molecule complexes produce fewer than 2 exonic off-targets.

358. The method of claim 356 or claim 357, wherein off-targets are identified by GUIDE-seq.

359. The method of claim 356 or claim 357, wherein off-targets are identified by Amp-seq.

360. The method of any of claims 326-359, wherein the contacting is performed ex vivo.

361. The method of any of claims 326-360, wherein the cell is an immune cell.

362. The method of claim 361, wherein the cell is a lymphocyte or antigen presenting cell.

363. The method of claim 362, wherein the cell is a T cell, B cell or antigen presenting cell.

364. The method of any of claims 326-363, wherein the cell is a T cell.

365. The method of any of claims 326-364, wherein the cell comprises a recombinant receptor.

366. The method of any of claims 326-365, further comprising contacting the cell with a nucleic acid encoding a recombinant receptor under conditions to introduce the nucleic acid into the cell.

367. The method of claim 365 or claim 366, wherein the recombinant receptor is a functional non-TCR antigen receptor or a transgenic TCR.

368. The method of any of claims 365-367, wherein the recombinant receptor is a chimeric antigen receptor (CAR).

369. The method of claim 368, wherein the CAR comprises an antigen-binding domain that is an antibody or an antibody fragment.

370. The method of claim 369, wherein the antibody fragment is a single chain fragment.

371. The method of claim 369 or claim 370, wherein the antibody fragment comprises antibody variable regions joined by a flexible immunoglobulin linker.

372. The method of any of claims 369-371, wherein the fragment comprises an scFv.

373. The method of any of claims 369-372, wherein the antigen is associated with a disease or disorder.

374. The method of claim 373, wherein the disease or disorder is an infectious disease or condition, an autoimmune disease, an inflammatory disease or a tumor or a cancer.

375. The method of any of claims 365-374, wherein the recombinant receptor specifically binds to a tumor antigen.

376. The method of any of claims 369-375, wherein the antigen is selected from ROR1, Her2, L1-CAM, CD19, CD20, CD22, mesothelin, CEA, hepatitis B surface antigen, anti-folate receptor, CD23, CD24, CD30, CD33, CD38, CD44, EGFR, EGP-2, EGP-4, EPHa2, ErbB2, ErbB3, ErbB4, FBP, fetal acethycholine e receptor, GD2, GD3, HMW-MAA, IL-22R-alpha, IL-13R-alpha2, kdr, kappa light chain, Lewis Y, L1-cell adhesion molecule (CD171), MAGE-A1, mesothelin, MUC1, MUC16, PSCA, NKG2D Ligands, NY-ESO-1, MART-1, gp100, oncofetal antigen, TAG72, VEGF-R2, carcinoembryonic antigen (CEA), prostate specific antigen, PSMA, estrogen receptor, progesterone receptor, ephrinB2, CD123, CS-1, c-Met, GD-2, MAGE A3, CE7, Wilms Tumor 1 (WT-1), cyclin A1 (CCNA1), BCMA andinterleukin 12.

377. The method of any of claims 365-376, wherein the recombinant receptor comprises an intracellular signaling domain comprising an ITAM.

378. The method of claim 377, wherein the intracellular signaling domain comprises an intracellular domain of a CD3-zeta (CD3) chain.

379. The method of claim 377 or 378, wherein the recombinant receptor further comprises a costimulatory signaling region.

380. The method of claim 379, wherein the costimulatory signaling region comprises a signaling domain of CD28 or 4-1BB.

381. A T cell made by the method of any of claims 162-231 and 326-380.

382. A T cell comprising the Cas9 molecule/gRNA molecule complex of any of claims 232-264.

383. A T cell comprising the composition of any of claims 265-297.

384. A method of treating a subject, comprising administering to the subject the T cell of any of claims 381-383.

385. The Cas9 molecule/gRNA molecule complex of any of claims 232-264, the composition of any of claims 265-297, or the T cell of any of claims 381-383, for use in therapy.

386. Use of the Cas9 molecule/gRNA molecule complex of any of claims 232-264 or the composition of any of claims 265-297 in the manufacture of a medicament for treating cancer.

The application's sequence listing, which the Patent Office published only in electronic form, follows.

SEQUENCE LISTING (51229 sequences)

SEQ ID NO: 1 - protein, 1344 aa, Streptococcus mutans
KKPYSIGLDIGTNSVGWAVVTDDYKVPAKKMKVLGNTDKSHIEKNLLGALLFDSGNTAEDRRLKRTARRRYTRRRNRILYLQEIFSEEMGKVDDSFFHRLEDSFLVTEDKRGERHPIFGNLEEEVKYHENFPTIYHLRQYLADNPEKVDLRLVYLALAHIIKFRGHFLIEGKFDTRNNDVQRLFQEFLAVYDNTFENSSLQEQNVQVEEILTDKISKSAKKDRVLKLFPNEKSNGRFAEFLKLIVGNQADFKKHFELEEKAPLQFSKDTYEEELEVLLAQIGDNYAELFLSAKKLYDSILLSGILTVTDVGTKAPLSASMIQRYNEHQMDLAQLKQFIRQKLSDKYNEVFSDVSKDGYAGYIDGKTNQEAFYKYLKGLLNKIEGSGYFLDKIEREDFLRKQRTFDNGSIPHQIHLQEMRAIIRRQAEFYPFLADNQDRIEKLLTFRIPYYVGPLARGKSDFAWLSRKSADKITPWNFDEIVDKESSAEAFINRMTNYDLYLPNQKVLPKHSLLYEKFTVYNELTKVKYKTEQGKTAFFDANMKQEIFDGVFKVYRKVTKDKLMDFLEKEFDEFRIVDLTGLDKENKVFNASYGTYHDLCKILDKDFLDNSKNEKILEDIVLTLTLFEDREMIRKRLENYSDLLTKEQVKKLERRHYTGWGRLSAELIHGIRNKESRKTILDYLIDDGNSNRNFMQLINDDALSFKEEIAKAQVIGETDNLNQVVSDIAGSPAIKKGILQSLKIVDELVKIMGHQPENIVVEMARENQFTNQGRRNSQQRLKGLTDSIKEFGSQILKEHPVENSQLQNDRLFLYYLQNGRDMYTGEELDIDYLSQYDIDHIIPQAFIKDNSIDNRVLTSSKENRGKSDDVPSKDVVRKMKSYWSKLLSAKLITQRKFDNLTKAERGGLTDDDKAGFIKRQLVETRQITKHVARILDERFNTETDENNKKIRQVKIVTLKSNLVSNFRKEFELYKVREINDYHHAHDAYLNAVIGKALLGVYPQLEPEFVYGDYPHFHGHKENKATAKKFFYSNIMNFFKKDDVRTDKNGEIIWKKDEHISNIKKVLSYPQVNIVKKVEEQTGGFSKESILPKGNSDKLIPRKTKKFYWDTKKYGGFDSPIVAYSILVIADIEKGKSKKLKTVKALVGVTIMEKMTFERDPVAFLERKGYRNVQEENIIKLPKYSLFKLENGRKRLLASARELQKGNEIVLPNHLGTLLYHAKNIHKVDEPKHLDYVDKHKDEFKELLDVVSNFSKKYTLAEGNLEKIKELYAQNNGEDLKELASSFINLLTFTAIGAPATFKFFDKNIDRKRYTSTTEILNATLIHQSITGLYETRIDLNKLGGD

SEQ ID NO: 2 - protein, 1367 aa, Streptococcus pyogenes
DKKYSIGLDIGTNSVGWAVITDEYKVPSKKFKVLGNTDRHSIKKNLIGALLFDSGETAEATRLKRTARRRYTRRKNRICYLQEIFSNEMAKVDDSFFHRLEESFLVEEDKKHERHPIFGNIVDEVAYHEKYPTIYHLRKKLVDSTDKADLRLIYLALAHMIKFRGHFLIEGDLNPDNSDVDKLFIQLVQTYNQLFEENPINASGVDAKAILSARLSKSRRLENLIAQLPGEKKNGLFGNLIALSLGLTPNFKSNFDLAEDAKLQLSKDTYDDDLDNLLAQIGDQYADLFLAAKNLSDAILLSDILRVNTEITKAPLSASMIKRYDEHHQDLTLLKALVRQQLPEKYKEIFFDQSKNGYAGYIDGGASQEEFYKFIKPILEKMDGTEELLVKLNREDLLRKQRTFDNGSIPHQIHLGELHAILRRQEDFYPFLKDNREKIEKILTFRIPYYVGPLARGNSRFAWMTRKSEETITPWNFEEVVDKGASAQSFIERMTNFDKNLPNEKVLPKHSLLYEYFTVYNELTKVKYVTEGMRKPAFLSGEQKKAIVDLLFKTNRKVTVKQLKEDYFKKIECFDSVEISGVEDRFNASLGTYHDLLKIIKDKDFLDNEENEDILEDIVLTLTLFEDREMIEERLKTYAHLFDDKVMKQLKRRRYTGWGRLSRKLINGIRDKQSGKTILDFLKSDGFANRNFMQLIHDDSLTFKEDIQKAQVSGQGDSLHEHIANLAGSPAIKKGILQTVKVVDELVKVMGRHKPENIVIEMARENQTTQKGQKNSRERMKRIEEGIKELGSQILKEHPVENTQLQNEKLYLYYLQNGRDMYVDQELDINRLSDYDVDHIVPQSFLKDDSIDNKVLTRSDKNRGKSDNVPSEEVVKKMKNYWRQLLNAKLITQRKFDNLTKAERGGLSELDKAGFIKRQLVETRQITKHVAQILDSRMNTKYDENDKLIREVKVITLKSKLVSDFRKDFQFYKVREINNYHHAHDAYLNAVVGTALIKKYPKLESEFVYGDYKVYDVRKMIAKSEQEIGKATAKYFFYSNIMNFFKTEITLANGEIRKRPLIETNGETGEIVWDKGRDFATVRKVLSMPQVNIVKKTEVQTGGFSKESILPKRNSDKLIARKKDWDPKKYGGFDSPTVAYSVLVVAKVEKGKSKKLKSVKELLGITIMERSSFEKNPIDFLEAKGYKEVKKDLIIKLPKYSLFELENGRKRMLASAGELQKGNELALPSKYVNFLYLASHYEKLKGSPEDNEQKQLFVEQHKHYLDEIIEQISEFSKRVILADANLDKVLSAYNKHRDKPIREQAENIIHLFTLTNLGAPAAFKYFDTTIDRKRYTSTKEVLDATLIHQSITGLYETRIDLSQLGGD

SEQ ID NO: 3 - protein, 1387 aa, Streptococcus thermophilus
TKPYSIGLDIGTNSVGWAVTTDNYKVPSKKMKVLGNTSKKYIKKNLLGVLLFDSGITAEGRRLKRTARRRYTRRRNRILYLQEIFSTEMATLDDAFFQRLDDSFLVPDDKRDSKYPIFGNLVEEKAYHDEFPTIYHLRKYLADSTKKADLRLVYLALAHMIKYRGHFLIEGEFNSKNNDIQKNFQDFLDTYNAIFESDLSLENSKQLEEIVKDKISKLEKKDRILKLFPGEKNSGIFSEFLKLIVGNQADFRKCFNLDEKASLHFSKESYDEDLETLLGYIGDDYSDVFLKAKKLYDAILLSGFLTVTDNETEAPLSSAMIKRYNEHKEDLALLKEYIRNISLKTYNEVFKDDTKNGYAGYIDGKTNQEDFYVYLKKLLAEFEGADYFLEKIDREDFLRKQRTFDNGSIPYQIHLQEMRAILDKQAKFYPFLAKNKERIEKILTFRIPYYVGPLARGNSDFAWSIRKRNEKITPWNFEDVIDKESSAEAFINRMTSFDLYLPEEKVLPKHSLLYETFNVYNELTKVRFIAESMRDYQFLDSKQKKDIVRLYFKDKRKVTDKDIIEYLHAIYGYDGIELKGIEKQFNSSLSTYHDLLNIINDKEFLDDSSNEAIIEEIIHTLTIFEDREMIKQRLSKFENIFDKSVLKKLSRRHYTGWGKLSAKLINGIRDEKSGNTILDYLIDDGISNRNFMQLIHDDALSFKKKIQKAQIIGDEDKGNIKEVVKSLPGSPAIKKGILQSIKIVDELVKVMGGRKPESIVVEMARENQYTNQGKSNSQQRLKRLEKSLKELGSKILKENIPAKLSKIDNNALQNDRLYLYYLQNGKDMYTGDDLDIDRLSNYDIDHIIPQAFLKDNSIDNKVLVSSASNRGKSDDVPSLEVVKKRKTFWYQLLKSKLISQRKFDNLTKAERGGLSPEDKAGFIQRQLVETRQITKHVARLLDEKFNNKKDENNRAVRTVKIITLKSTLVSQFRKDFELYKVREINDFHHAHDAYLNAVVASALLKKYPKLEPEFVYGDYPKYNSFRERKSATEKVYFYSNIMNIFKKSISLADGRVIERPLIEVNEETGESVWNKESDLATVRRVLSYPQVNVVKKVEEQNHGLDRGKPKGLFNANLSSKPKPNSNENLVGAKEYLDPKKYGGYAGISNSFTVLVKGTIEKGAKKKITNVLEFQGISILDRINYRKDKLNFLLEKGYKDIELIIELPKYSLFELSDGSRRMLASILSTNNKRGEIHKGNQIFLSQKFVKLLYHAKRISNTINENHRKYVENHKKEFEELFYYILEFNENYVGAKKNGKLLNSAFQSWQNHSIDELCSSFIGPTGSERKGLFELTSRGSAADFEFLGVKIPRYRDYTPSSLLKDATLIHQSVTGLYETRIDLAKLGEG

SEQ ID NO: 4 - protein, 1333 aa, Listeria innocua
KKPYTIGLDIGTNSVGWAVLTDQYDLVKRKMKIAGDSEKKQIKKNFWGVRLFDEGQTAADRRMARTARRRIERRRNRISYLQGIFAEEMSKTDANFFCRLSDSFYVDNEKRNSRHPFFATIEEEVEYHKNYPTIYHLREELVNSSEKADLRLVYLALAHIIKYRGNFLIEGALDTQNTSVDGIYKQFIQTYNQVFASGIEDGSLKKLEDNKDVAKILVEKVTRKEKLERILKLYPGEKSAGMFAQFISLIVGSKGNFQKPFDLIEKSDIECAKDSYEEDLESLLALIGDEYAELFVAAKNAYSAVVLSSIITVAETETNAKLSASMIERFDTHEEDLGELKAFIKLHLPKHYEEIFSNTEKHGYAGYIDGKTKQADFYKYMKMTLENIEGADYFIAKIEKENFLRKQRTFDNGAIPHQLHLEELEAILHQQAKYYPFLKENYDKIKSLVTFRIPYFVGPLANGQSEFAWLTRKADGEIRPWNIEEKVDFGKSAVDFIEKMTNKDTYLPKENVLPKHSLCYQKYLVYNELTKVRYINDQGKTSYFSGQEKEQIFNDLFKQKRKVKKKDLELFLRNMSHVESPTIEGLEDSFNSSYSTYHDLLKVGIKQEILDNPVNTEMLENIVKILTVFEDKRMIKEQLQQFSDVLDGVVLKKLERRHYTGWGRLSAKLLMGIRDKQSHLTILDYLMNDDGLNRNLMQLINDSNLSFKSIIEKEQVTTADKDIQSIVADLAGSPAIKKGILQSLKIVDELVSVMGYPPQTIVVEMARENQTTGKGKNNSRPRYKSLEKAIKEFGSQILKEHPTDNQELRNNRLYLYYLQNGKDMYTGQDLDIHNLSNYDIDHIVPQSFITDNSIDNLVLTSSAGNREKGDDVPPLEIVRKRKVFWEKLYQGNLMSKRKFDYLTKAERGGLTEADKARFIHRQLVETRQITKNVANILHQRFNYEKDDHGNTMKQVRIVTLKSALVSQFRKQFQLYKVRDVNDYHHAHDAYLNGVVANTLLKVYPQLEPEFVYGDYHQFDWFKANKATAKKQFYTNIMLFFAQKDRIIDENGEILWDKKYLDTVKKVMSYRQMNIVKKTEIQKGEFSKATIKPKGNSSKLIPRKTNWDPMKYGGLDSPNMAYAVVIEYAKGKNKLVFEKKIIRVTIMERKAFEKDEKAFLEEQGYRQPKVLAKLPKYTLYECEEGRRRMLASANEAQKGNQQVLPNHLVTLLHHAANCEVSDGKSLDYIESNREMFAELLAHVSEFAKRYTLAEANLNKINQLFEQNKEGDIKAIAQSFVDLMAFNAMGAPASFKFFETTIERKRYNNLKELLNSTIIYQSITGLYESRKRLDD

SEQ ID NO: 5 - RNA, 96 nt, Artificial Sequence
  Synthetic oligonucleotide
  modified_base (1)..(20): a, c, u, g, unknown or other
  misc_feature (1)..(20): n is a, c, g, or u
nnnnnnnnnnnnnnnnnnnnguuuuagagcuagaaauagcaaguuaaaauaaggcuaguccguuaucaacuugaaaaaguggcaccgagucggugc

SEQ ID NO: 6 - protein, 1082 aa, Neisseria meningitidis
MAAFKPNSINYILGLDIGIASVGWAMVEIDEEENPIRLIDLGVRVFERAEVPKTGDSLAMARRLARSVRRLTRRRAHRLLRTRRLLKREGVLQAANFDENGLIKSLPNTPWQLRAAALDRKLTPLEWSAVLLHLIKHRGYLSQRKNEGETADKELGALLKGVAGNAHALQTGDFRTPAELALNKFEKESGHIRNQRSDYSHTFSRKDLQAELILLFEKQKEFGNPHVSGGLKEGIETLLMTQRPALSGDAVQKMLGHCTFEPAEPKAAKNTYTAERFIWLTKLNNLRILEQGSERPLTDTERATLMDEPYRKSKLTYAQARKLLGLEDTAFFKGLRYGKDNAEASTLMEMKAYHAISRALEKEGLKDKKSPLNLSPELQDEIGTAFSLFKTDEDITGRLKDRIQPEILEALLKHISFDKFVQISLKALRRIVPLMEQGKRYDEACAEIYGDHYGKKNTEEKIYLPPIPADEIRNPVVLRALSQARKVINGVVRRYGSPARIHIETAREVGKSFKDRKEIEKRQEENRKDREKAAAKFREYFPNFVGEPKSKDILKLRLYEQQHGKCLYSGKEINLGRLNEKGYVEIDHALPFSRTWDDSFNNKVLVLGSENQNKGNQTPYEYFNGKDNSREWQEFKARVETSRFPRSKKQRILLQKFDEDGFKERNLNDTRYVNRFLCQFVADRMRLTGKGKKRVFASNGQITNLLRGFWGLRKVRAENDRHHALDAVVVACSTVAMQQKITRFVRYKEMNAFDGKTIDKETGEVLHQKTHFPQPWEFFAQEVMIRVFGKPDGKPEFEEADTLEKLRTLLAEKLSSRPEAVHEYVTPLFVSRAPNRKMSGQGHMETVKSAKRLDEGVSVLRVPLTQLKLKDLEKMVNREREPKLYEALKARLEAHKDDPAKAFAEPFYKYDKAGNRTQQVKAVRVEQVQKTGVWVRNHNGIADNATMVRVDVFEKGDKYYLVPIYSWQVAKGILPDRAVVQGKDEEDWQLIDDSFNFKFSLHPNDLVEVITKKARMFGYFASCHRGTGNINIRIHDLDHKIGKNGILEGIGVKTALSFQKYQIDELGKEIRPCRLKKRPPVR

SEQ ID NO: 7 - protein, 1368 aa, Streptococcus pyogenes [sequence omitted]

SEQ ID NO: 8 - protein, 12 aa, Artificial Sequence
  Synthetic peptide
  VARIANT (2)..(2): Xaa is Ile or "Val" or "Met" or "Leu" or "Thr"
  VARIANT (4)..(4): Xaa is Thr or "Ile" or "Val" or "Ser" or "Asn" or "Tyr" or "Glu" or "Leu"
  VARIANT (5)..(5): Xaa is Asn or "Ser" or "Gly" or "Ala" or "Asp" or "Thr" or "Arg" or "Met" or "Phe"
  VARIANT (6)..(6): Xaa is Ser or "Tyr" or "Asn" or "Phe"
  VARIANT (7)..(7): Xaa is Val or "Ile" or "Leu" or "Cys" or "Thr" or "Phe"
  VARIANT (9)..(9): Xaa is Trp or "Phe" or "Val" or "Tyr" or "Ser" or "Leu"
  VARIANT (10)..(10): Xaa is Ala or "Ser" or "Cys" or "Val" or "Gly"
  VARIANT (11)..(11): Xaa is Val or "Ile" or "Leu" or "Ala" or "Met" or "His"
  VARIANT (12)..(12): Xaa is any amino acid or absent
DXGXXXXGXXXX

SEQ ID NO: 9 - protein, 12 aa, Artificial Sequence
  Synthetic peptide
  VARIANT (2)..(2): Xaa is Ile or "Val" or "Met" or "Leu" or "Thr"
  VARIANT (4)..(4): Xaa is Thr or "Ile" or "Val" or "Ser" or "Asn" or "Tyr" or "Glu" or "Leu"
  VARIANT (5)..(5): Xaa is Asn or "Ser" or "Gly" or "Ala" or "Asp" or "Thr" or "Arg" or "Met" or "Phe"
  VARIANT (7)..(7): Xaa is Val or "Ile" or "Leu" or "Cys" or "Thr" or "Phe"
  VARIANT (9)..(9): Xaa is Trp or "Phe" or "Val" or "Tyr" or "Ser" or "Leu"
  VARIANT (10)..(10): Xaa is Ala or "Ser" or "Cys" or "Val" or "Gly"
  VARIANT (11)..(11): Xaa is Val or "Ile" or "Leu" or "Ala" or "Met" or "His"
  VARIANT (12)..(12): Xaa is any amino acid or absent
DXGXXSXGXXXX

SEQ ID NO: 10 - protein, 12 aa, Artificial Sequence
  Synthetic peptide
  VARIANT (4)..(4): Xaa is Thr or "Ile" or "Val" or "Ser" or "Asn" or "Tyr" or "Glu" or "Leu"
  VARIANT (5)..(5): Xaa is Asn or "Ser" or "Gly" or "Ala" or "Asp" or "Thr" or "Arg" or "Met" or "Phe"
  VARIANT (11)..(11): Xaa is Val or "Ile" or "Leu" or "Ala" or "Met" or "His"
  VARIANT (12)..(12): Xaa is any amino acid or absent
DIGXXSVGWAXX

SEQ ID NO: 11 - protein, 12 aa, Artificial Sequence
  Synthetic peptide
  VARIANT (12)..(12): Any non-polar alkyl amino acid or a hydroxyl amino acid
DIGTNSVGWAVX

SEQ ID NO: 12 - protein, 8 aa, Artificial Sequence
  Synthetic peptide
  VARIANT (2)..(2): Xaa is Val or "His
  VARIANT (3)..(3): Xaa is Ile or "Leu" or "Val"
  VARIANT (5)..(5): Xaa is Met or "Thr"
IXXEXARE

SEQ ID NO: 13 - protein, 8 aa, Artificial Sequence
  Synthetic peptide
  VARIANT (3)..(3): Xaa is Ile or "Leu" or "Val"
IVXEMARE

SEQ ID NO: 14 - protein, 8 aa, Artificial Sequence
  Synthetic peptide
  VARIANT (4)..(4): Xaa is His or "Leu"
  VARIANT (7)..(7): Xaa is Arg or "Val"
  VARIANT (8)..(8): Xaa is Glu or "Val"
HHAXDAXX

SEQ ID NO: 15 - protein, 8 aa, Artificial Sequence
  Synthetic peptide
HHAHDAYL

SEQ ID NO: 16 - protein, 30 aa, Artificial Sequence
  Synthetic polypeptide
  VARIANT (2)..(2): Xaa is Lys or "Pro"
  VARIANT (4)..(4): Xaa is Val or "Leu" or "Ile" or "Phe"
  VARIANT (5)..(5): Xaa is Gly or "Ala" or "Ser"
  VARIANT (6)..(6): Xaa is Leu or "Ile" or "Val" or "Phe"
  VARIANT (7)..(26): Any amino acid and this region may encompass 5-20 residues wherein some positions may be absent
  VARIANT (29)..(29): Xaa is Asp or "Glu" or "Asn" or "Gln"
KXYXXXXXXXXXXXXXXXXXXXXXXXTDXY

SEQ ID NO: 17 - protein, 27 aa, Artificial Sequence
  Synthetic peptide
  VARIANT (1)..(1): Xaa is Asp or "Glu" or "Gln" or "Asn"
  VARIANT (2)..(2): Xaa is Leu or "Ile" or "Arg" or "Gln" or "Val" or "Met" or "Lys"
  VARIANT (3)..(3): Xaa is Asp or "Glu"
  VARIANT (5)..(5): Xaa is Ile or "Val" or "Thr" or "Ala" or "Leu"
  VARIANT (6)..(6): Xaa is Val or "Tyr" or "Ile" or "Leu" or "Phe" or "Trp"
  VARIANT (8)..(8): Xaa is Gln or "His" or "Arg" or "Lys" or "Tyr" or "Ile" or "Leu" or "Phe" or "Trp"
  VARIANT (9)..(9): Xaa is Ser or "Ala" or "Asp" or "Thr" or "Lys"
  VARIANT (10)..(10): Xaa is Phe or "Leu" or "Val" or "Lys" or "Tyr" or "Met" or "Ile" or "Arg" or "Ala" or "Glu" or "Asp" or "Gln"
  VARIANT (11)..(11): Xaa is Leu or "Arg" or "Thr" or "Ile" or "Val" or "Ser" or "Cys" or "Tyr" or "Lys" or "Phe" or "Gly"
  VARIANT (12)..(12): Xaa is Lys or "Gln" or "Tyr" or "Thr" or "Phe" or "Leu" or "Trp" or "Met" or "Ala" or "Glu" or "Gly" or "Ser"
  VARIANT (13)..(13): Xaa is Asp or "Ser" or "Asn" or "Arg" or "Leu" or "Thr"
  VARIANT (14)..(14): Xaa is Asp or "Asn" or "Ser"
  VARIANT (15)..(15): Xaa is Ser or "Ala" or "Thr" or "Gly" or "Arg"
  VARIANT (16)..(16): Xaa is Ile or "Leu" or "Phe" or "Ser" or "Arg" or "Tyr" or "Gln" or "Trp" or "Asp" or "Lys" or "His"
  VARIANT (17)..(17): Xaa is Asp or "Ser" or "Ile" or "Asn" or "Glu" or "Ala" or "His" or "Phe" or "Leu" or "Gln" or "Met" or "Gly" or "Tyr" or "Val"
  VARIANT (19)..(19): Xaa is Lys or "Leu" or "Arg" or "Met" or "Thr" or "Phe"
  VARIANT (20)..(20): Xaa is Val or "Leu" or "Ile" or "Ala" or "Thr"
  VARIANT (21)..(21): Xaa is Leu or "Ile" or "Val" or "Ala"
  VARIANT (22)..(22): Xaa is Thr or "Val" or "Cys" or "Glu" or "Ser" or "Ala"
  VARIANT (23)..(23): Xaa is Arg or "Phe" or "Thr" or "Trp" or "Glu" or "Leu" or "Asn" or "Cys" or "Lys" or "Val" or "Ser" or "Gln" or "Ile" or "Tyr" or "His" or "Ala"
  VARIANT (24)..(24): Xaa is Ser or "Pro" or "Arg" or "Lys" or "Asn" or "Ala" or "His" or "Gln" or "Gly" or "Leu"
  VARIANT (25)..(25): Xaa is Asp or "Gly" or "Thr" or "Asn" or "Ser" or "Lys" or "Ala" or "Ile" or "Glu" or "Leu" or "Gln" or " Arg" or "Tyr"
  VARIANT (26)..(26): Xaa is Lys or "Val" or "Ala" or "Glu" or "Tyr" or "Ile" or "Cys" or "Leu" or "Ser" or "Thr" or "Gly" or "Lys" or "Met" or "Asp" or "Phe"
XXXHXXPXXXXXXXXXXNXXXXXXXXN

SEQ ID NO: 18 - protein, 27 aa, Artificial Sequence
  Synthetic peptide
  VARIANT (1)..(1): Xaa is Asp or"Glu
  VARIANT (2)..(2): Xaa is Leu or "Ile" or "Arg" or "Gln" or "Val" or "Met" or "Lys"
  VARIANT (3)..(3): Xaa is Asp or "Glu
  VARIANT (5)..(5): Xaa is Ile or "Val" or "Thr" or "Ala" or "Leu"
  VARIANT (6)..(6): Xaa is Val or "Tyr" or "Ile" or "Leu" or "Phe" or "Trp"
  VARIANT (8)..(8): Xaa is Gln or "His" or "Arg" or "Lys" or "Tyr" or "Ile" or "Leu" or "Phe" or "Trp"
  VARIANT (10)..(10): Xaa is Phe or "Leu" or "Val" or "Lys" or "Tyr" or "Met" or "Ile" or "Arg" or "Ala" or "Glu" or "Asp" or "Gln"
  VARIANT (11)..(11): Xaa is Leu or "Arg" or "Thr" or "Ile" or "Val" or "Ser" or "Cys" or "Tyr" or "Lys" or "Phe" or "Gly"
  VARIANT (12)..(12): Xaa is Lys or "Gln" or "Tyr" or "Thr" or "Phe" or "Leu" or "Trp" or "Met" or "Ala" or "Glu" or "Gly" or "Ser"
  VARIANT (16)..(16): Xaa is Ile or "Leu" or "Phe" or "Ser" or "Arg" or "Tyr" or "Gln" or "Trp" or "Asp" or "Lys" or "His"
  VARIANT (17)..(17): Xaa is Asp or "Ser" or "Ile" or "Asn" or "Glu" or "Ala" or "His" or "Phe" or "Leu" or "Gln" or "Met" or "Gly" or Tyr" or "Val"
  VARIANT (22)..(22): Xaa is Thr or "Val" or "Cys" or "Glu" or "Ser" or "Ala"
  VARIANT (23)..(23): Xaa is Arg or "Phe" or "Thr" or "Trp" or "Glu" or "Leu" or "Asn" or "Cys" or "Lys" or "Val" or "Ser" or "Gln" or "Ile" or "Tyr" or "His" or "Ala"
  VARIANT (24)..(24): Xaa is Ser or "Pro" or "Arg" or "Lys" or "Asn" or "Ala" or "His" or "Gln" or "Gly" or "Leu"
  VARIANT (25)..(25): Xaa is Asp or "Gly" or "Thr" or "Asn" or "Ser" or "Lys" or "Ala" or "Ile" or "Glu" or "Leu" or "Gln" or "Arg" or "Tyr"
  VARIANT (26)..(26): Xaa is Lys or "Val" or "Ala" or "Glu" or "Tyr" or "Ile" or "Cys" or "Leu" or "Ser" or "Thr" or "Gly" or "Lys" "Met" or "Asp" or "Phe"
XXXHXXPXSXXXDDSXXNKVLXXXXXN

SEQ ID NO: 19 - protein, 27 aa, Artificial Sequence
  Synthetic peptide
  VARIANT (1)..(1): Xaa is Asp or "Glu"
  VARIANT (3)..(3): Xaa is Asp or "Glu"
  VARIANT (8)..(8): Xaa is Gln or "His" or "Arg" or "Lys" or "Tyr" or "Ile" or "Leu" or "Trp"
  VARIANT (10)..(10): Xaa is Phe or "Leu" or "Val" or "Lys" or "Tyr" or "Met" or "Ile" or "Arg" or "Ala" or "Glu" or "Asp" or "Gln"
  VARIANT (11)..(11): Xaa is Leu or "Arg" or "Thr" or "Ile" or "Val" or "Ser" or "Cys" or "Tyr" or "Lys" or "Phe" or "Gly"
  VARIANT (12)..(12): Xaa is Lys or "Gln" or "Tyr" or "Thr" or "Phe" or "Leu" or "Trp" or "Met" or "Ala" or "Glu" or "Gly" or "Ser"
  VARIANT (16)..(16): Xaa is Ile or "Leu" or "Phe" or "Ser" or "Arg" or "Tyr" or "Gln" or "Trp" or "Asp" or "Lys" or "His"
  VARIANT (17)..(17): Xaa is Asp or "Ser" or "Ile" or "Asn" or "Glu" or "Ala" or "His" or "Phe" or "Leu" or "Gln" or "Met" or "Gly" or "Tyr" or "Val"
  VARIANT (23)..(23): Xaa is Arg or "Phe" or "Thr" or "Trp" or "Glu" or "Leu" or "Asn" or "Cys" or "Lys" or "Val" or "Ser" or "Gln" or "Ile" or "Tyr" or "His" or "Ala"
  VARIANT (24)..(24): Xaa is Ser or "Pro" or "Arg" or "Lys" or "Asn" or "Ala" or "His" or "Gln" or "Gly" or "Leu"
  VARIANT (25)..(25): Xaa is Asp or "Gly" or "Thr" or "Asn" or "Ser" or "Lys" or "Ala" or "Ile" or "Glu" or "Leu" or "Gln" or "Arg" or "Tyr"
  VARIANT (26)..(26): Xaa is Lys or "Val" or "Ala" or "Glu" or "Tyr" or "Ile" or "Cys" or "Leu" or "Ser" or "Thr" or "Gly" or "Lys" or "Met" or "Asp" or "Phe"
XVXHIVPXSXXXDDSXXNKVLTXXXXN

SEQ ID NO: 20 - protein, 27 aa, Artificial Sequence
  Synthetic peptide
  VARIANT (2)..(2): Xaa is Ile or "Val"
  VARIANT (6)..(6): Xaa is Ile or "Val"
  VARIANT (9)..(9): Xaa is Ala or "Ser"
  VARIANT (11)..(11): Xaa is Ile or "Leu"
  VARIANT (12)..(12): Xaa is Lys or "Thr"
  VARIANT (14)..(14): Xaa is Asp or "Asn"
  VARIANT (19)..(19): Xaa is Arg or "Lys" or "Leu"
  VARIANT (22)..(22): Xaa is Thr or "Val"
  VARIANT (23)..(23): Xaa is Ser or "Arg"
  VARIANT (25)..(25): Xaa is Lys or "Asp" or "Ala"
  VARIANT (26)..(26): Xaa is Glu or "Lys" or "Gly" or "Asn"
DXDHIXPQXFXXDXSIDNXVLXXSXXN

SEQ ID NO: 21 - protein, 73 aa, Artificial Sequence
  Synthetic polypeptide
  VARIANT (8)..(8): Xaa is Lys or "Arg"
  VARIANT (12)..(12): Xaa is Val or "Thr"
  VARIANT (13)..(13): Xaa is Gly or "Asp"
  VARIANT (14)..(14): Xaa is Glu or "Gln" or "Asp"
  VARIANT (15)..(15): Xaa is Glu or "Asp"
  VARIANT (19)..(19): Xaa is Asp or "Asn" or "His"
  VARIANT (20)..(20): Xaa is Tyr or "Arg" or "Asn"
  VARIANT (23)..(23): Xaa is Gln or "Asp" or "Asn"
  VARIANT (25)..(64): Any amino acid and this region may encompass 15-40 residues wherein some positions may be absent
  VARIANT (67)..(67): Xaa is Gly or "Glu"
  VARIANT (69)..(69): Xaa is Ser or "Gly"
  VARIANT (71)..(71): Xaa is Asp or "Asn"
LYYLQNGXDMYXXXXLDIXXLSXYXXXXXXXXXXXXXXXXXXXXXXXXXXXXXXXXXXXXXXXXNRXKXDXVP

SEQ ID NO: 22 - DNA, 4107 bp, Artificial Sequence
  Synthetic polynucleotide
atggataaaaagtacagcatcgggctggacatcggtacaaactcagtggggtgggccgtgattacggacgagtacaaggtaccctccaaaaaatttaaagtgctgggtaacacggacagacactctataaagaaaaatcttattggagccttgctgttcgactcaggcgagacagccgaagccacaaggttgaagcggaccgccaggaggcggtataccaggagaaagaaccgcatatgctacctgcaagaaatcttcagtaacgagatggcaaaggttgacgatagctttttccatcgcctggaagaatcctttcttgttgaggaagacaagaagcacgaacggcaccccatctttggcaatattgtcgacgaagtggcatatcacgaaaagtacccgactatctaccacctcaggaagaagctggtggactctaccgataaggcggacctcagacttatttatttggcactcgcccacatgattaaatttagaggacatttcttgatcgagggcgacctgaacccggacaacagtgacgtcgataagctgttcatccaacttgtgcagacctacaatcaactgttcgaagaaaaccctataaatgcttcaggagtcgacgctaaagcaatcctgtccgcgcgcctctcaaaatctagaagacttgagaatctgattgctcagttgcccggggaaaagaaaaatggattgtttggcaacctgatcgccctcagtctcggactgaccccaaatttcaaaagtaacttcgacctggccgaagacgctaagctccagctgtccaaggacacatacgatgacgacctcgacaatctgctggcccagattggggatcagtacgccgatctctttttggcagcaaagaacctgtccgacgccatcctgttgagcgatatcttgagagtgaacaccgaaattactaaagcaccccttagcgcatctatgatcaagcggtacgacgagcatcatcaggatctgaccctgctgaaggctcttgtgaggcaacagctccccgaaaaatacaaggaaatcttctttgaccagagcaaaaacggctacgctggctatatagatggtggggccagtcaggaggaattctataaattcatcaagcccattctcgagaaaatggacggcacagaggagttgctggtcaaacttaacagggaggacctgctgcggaagcagcggacctttgacaacgggtctatcccccaccagattcatctgggcgaactgcacgcaatcctgaggaggcaggaggatttttatccttttcttaaagataaccgcgagaaaatagaaaagattcttacattcaggatcccgtactacgtgggacctctcgcccggggcaattcacggtttgcctggatgacaaggaagtcagaggagactattacaccttggaacttcgaagaagtggtggacaagggtgcatctgcccagtctttcatcgagcggatgacaaattttgacaagaacctccctaatgagaaggtgctgcccaaacattctctgctctacgagtactttaccgtctacaatgaactgactaaagtcaagtacgtcaccgagggaatgaggaagccggcattccttagtggagaacagaagaaggcgattgtagacctgttgttcaagaccaacaggaaggtgactgtgaagcaacttaaagaagactactttaagaagatcgaatgttttgacagtgtggaaatttcaggggttgaagaccgcttcaatgcgtcattggggacttaccatgatcttctcaagatcataaaggacaaagacttcctggacaacgaagaaaatgaggatattctcgaagacatcgtcctcaccctgaccctgttcgaagacagggaaatgatagaagagcgcttgaaaacctatgcccacctcttcgacgataaagttatgaagcagctgaagcgcaggagatacacaggatggggaagattgtcaaggaagctgatcaatggaattagggataaacagagtggcaagaccatactggatttcctcaaatctgatggcttcgccaataggaacttcatgcaactgattcacgatgactctcttaccttcaaggaggacattcaaaaggctcaggtgagcgggcagggagactcccttcatgaacacatcgcgaatttggcaggttcccccgctattaaaaagggcatccttcaaactgtcaaggtggtggatgaattggtcaaggtaatgggcagacataagccagaaaatattgtgatcgagatggcccgcgaaaaccagaccacacagaagggccagaaaaatagtagagagcggatgaagaggatcgaggagggcatcaaagagctgggatctcagattctcaaagaacaccccgtagaaaacacacagctgcagaacgaaaaattgtacttgtactatctgcagaacggcagagacatgtacgtcgaccaagaacttgatattaatagactgtccgactatgacgtagaccatatcgtgccccagtccttcctgaaggacgactccattgataacaaagtcttgacaagaagcgacaagaacaggggtaaaagtgataatgtgcctagcgaggaggtggtgaaaaaaatgaagaactactggcgacagctgcttaatgcaaagctcattacacaacggaagttcgataatctgacgaaagcagagagaggtggcttgtctgagttggacaaggcagggtttattaagcggcagctggtggaaactaggcagatcacaaagcacgtggcgcagattttggacagccggatgaacacaaaatacgacgaaaatgataaactgatacgagaggtcaaagttatcacgctgaaaagcaagctggtgtccgattttcggaaagacttccagttctacaaagttcgcgagattaataactaccatcatgctcacgatgcgtacctgaacgctgttgtcgggaccgccttgataaagaagtacccaaagctggaatccgagttcgtatacggggattacaaagtgtacgatgtgaggaaaatgatagccaagtccgagcaggagattggaaaggccacagctaagtacttcttttattctaacatcatgaatttttttaagacggaaattaccctggccaacggagagatcagaaagcggccccttatagagacaaatggtgaaacaggtgaaatcgtctgggataagggcagggatttcgctactgtgaggaaggtgctgagtatgccacaggtaaatatcgtgaaaaaaaccgaagtacagaccggaggattttccaaggaaagcattttgcctaaaagaaactcagacaagctcatcgcccgcaagaaagattgggaccctaagaaatacgggggatttgactcacccaccgtagcctattctgtgctggtggtagctaaggtggaaaaaggaaagtctaagaagctgaagtccgtgaaggaactcttgggaatcactatcatggaaagatcatcctttgaaaagaaccctatcgatttcctggaggctaagggttacaaggaggtcaagaaagacctcatcattaaactgccaaaatactctctcttcgagctggaaaatggcaggaagagaatgttggccagcgccggagagctgcaaaagggaaacgagcttgctctgccctccaaatatgttaattttctctatctcgcttcccactatgaaaagctgaaagggtctcccgaagataacgagcagaagcagctgttcgtcgaacagcacaagcactatctggatgaaataatcgaacaaataagcgagttcagcaaaagggttatcctggcggatgctaatttggacaaagtactgtctgcttataacaagcaccgggataagcctattagggaacaagccgagaatataattcacctctttacactcacgaatctcggagcccccgccgccttcaaatactttgatacgactatcgaccggaaacggtataccagtaccaaagaggtcctcgatgccaccctcatccaccagtcaattactggcctgtacgaaacacggatcgacctctctcaactgggcggcgactag

SEQ ID NO: 23 - protein, 1368 aa, Streptococcus pyogenes [sequence omitted]

SEQ ID NO: 24 - DNA, 3249 bp, Artificial Sequence
  Synthetic polynucleotide
atggccgccttcaagcccaaccccatcaactacatcctgggcctggacatcggcatcgccagcgtgggctgggccatggtggagatcgacgaggacgagaaccccatctgcctgatcgacctgggtgtgcgcgtgttcgagcgcgctgaggtgcccaagactggtgacagtctggctatggctcgccggcttgctcgctctgttcggcgccttactcgccggcgcgctcaccgccttctgcgcgctcgccgcctgctgaagcgcgagggtgtgctgcaggctgccgacttcgacgagaacggcctgatcaagagcctgcccaacactccttggcagctgcgcgctgccgctctggaccgcaagctgactcctctggagtggagcgccgtgctgctgcacctgatcaagcaccgcggctacctgagccagcgcaagaacgagggcgagaccgccgacaaggagctgggtgctctgctgaagggcgtggccgacaacgcccacgccctgcagactggtgacttccgcactcctgctgagctggccctgaacaagttcgagaaggagagcggccacatccgcaaccagcgcggcgactacagccacaccttcagccgcaaggacctgcaggccgagctgatcctgctgttcgagaagcagaaggagttcggcaacccccacgtgagcggcggcctgaaggagggcatcgagaccctgctgatgacccagcgccccgccctgagcggcgacgccgtgcagaagatgctgggccactgcaccttcgagccagccgagcccaaggccgccaagaacacctacaccgccgagcgcttcatctggctgaccaagctgaacaacctgcgcatcctggagcagggcagcgagcgccccctgaccgacaccgagcgcgccaccctgatggacgagccctaccgcaagagcaagctgacctacgcccaggcccgcaagctgctgggtctggaggacaccgccttcttcaagggcctgcgctacggcaaggacaacgccgaggccagcaccctgatggagatgaaggcctaccacgccatcagccgcgccctggagaaggagggcctgaaggacaagaagagtcctctgaacctgagccccgagctgcaggacgagatcggcaccgccttcagcctgttcaagaccgacgaggacatcaccggccgcctgaaggaccgcatccagcccgagatcctggaggccctgctgaagcacatcagcttcgacaagttcgtgcagatcagcctgaaggccctgcgccgcatcgtgcccctgatggagcagggcaagcgctacgacgaggcctgcgccgagatctacggcgaccactacggcaagaagaacaccgaggagaagatctacctgcctcctatccccgccgacgagatccgcaaccccgtggtgctgcgcgccctgagccaggcccgcaaggtgatcaacggcgtggtgcgccgctacggcagccccgcccgcatccacatcgagaccgcccgcgaggtgggcaagagcttcaaggaccgcaaggagatcgagaagcgccaggaggagaaccgcaaggaccgcgagaaggccgccgccaagttccgcgagtacttccccaacttcgtgggcgagcccaagagcaaggacatcctgaagctgcgcctgtacgagcagcagcacggcaagtgcctgtacagcggcaaggagatcaacctgggccgcctgaacgagaagggctacgtggagatcgaccacgccctgcccttcagccgcacctgggacgacagcttcaacaacaaggtgctggtgctgggcagcgagaaccagaacaagggcaaccagaccccctacgagtacttcaacggcaaggacaacagccgcgagtggcaggagttcaaggcccgcgtggagaccagccgcttcccccgcagcaagaagcagcgcatcctgctgcagaagttcgacgaggacggcttcaaggagcgcaacctgaacgacacccgctacgtgaaccgcttcctgtgccagttcgtggccgaccgcatgcgcctgaccggcaagggcaagaagcgcgtgttcgccagcaacggccagatcaccaacctgctgcgcggcttctggggcctgcgcaaggtgcgcgccgagaacgaccgccaccacgccctggacgccgtggtggtggcctgcagcaccgtggccatgcagcagaagatcacccgcttcgtgcgctacaaggagatgaacgccttcgacggtaaaaccatcgacaaggagaccggcgaggtgctgcaccagaagacccacttcccccagccctgggagttcttcgcccaggaggtgatgatccgcgtgttcggcaagcccgacggcaagcccgagttcgaggaggccgacacccccgagaagctgcgcaccctgctggccgagaagctgagcagccgccctgaggccgtgcacgagtacgtgactcctctgttcgtgagccgcgcccccaaccgcaagatgagcggtcagggtcacatggagaccgtgaagagcgccaagcgcctggacgagggcgtgagcgtgctgcgcgtgcccctgacccagctgaagctgaaggacctggagaagatggtgaaccgcgagcgcgagcccaagctgtacgaggccctgaaggcccgcctggaggcccacaaggacgaccccgccaaggccttcgccgagcccttctacaagtacgacaaggccggcaaccgcacccagcaggtgaaggccgtgcgcgtggagcaggtgcagaagaccggcgtgtgggtgcgcaaccacaacggcatcgccgacaacgccaccatggtgcgcgtggacgtgttcgagaagggcgacaagtactacctggtgcccatctacagctggcaggtggccaagggcatcctgcccgaccgcgccgtggtgcagggcaaggacgaggaggactggcagctgatcgacgacagcttcaacttcaagttcagcctgcaccccaacgacctggtggaggtgatcaccaagaaggcccgcatgttcggctacttcgccagctgccaccgcggcaccggcaacatcaacatccgcatccacgacctggaccacaagatcggcaagaacggcatcctggagggcatcggcgtgaagaccgccctgagcttccagaagtaccagatcgacgagctgggcaaggagatccgcccctgccgcctgaagaagcgccctcctgtgcgctaa

SEQ ID NO: 25 - protein, 1082 aa, Neisseria meningitidis
MAAFKPNPINYILGLDIGIASVGWAMVEIDEDENPICLIDLGVRVFERAEVPKTGDSLAMARRLARSVRRLTRRRAHRLLRARRLLKREGVLQAADFDENGLIKSLPNTPWQLRAAALDRKLTPLEWSAVLLHLIKHRGYLSQRKNEGETADKELGALLKGVADNAHALQTGDFRTPAELALNKFEKESGHIRNQRGDYSHTFSRKDLQAELILLFEKQKEFGNPHVSGGLKEGIETLLMTQRPALSGDAVQKMLGHCTFEPAEPKAAKNTYTAERFIWLTKLNNLRILEQGSERPLTDTERATLMDEPYRKSKLTYAQARKLLGLEDTAFFKGLRYGKDNAEASTLMEMKAYHAISRALEKEGLKDKKSPLNLSPELQDEIGTAFSLFKTDEDITGRLKDRIQPEILEALLKHISFDKFVQISLKALRRIVPLMEQGKRYDEACAEIYGDHYGKKNTEEKIYLPPIPADEIRNPVVLRALSQARKVINGVVRRYGSPARIHIETAREVGKSFKDRKEIEKRQEENRKDREKAAAKFREYFPNFVGEPKSKDILKLRLYEQQHGKCLYSGKEINLGRLNEKGYVEIDHALPFSRTWDDSFNNKVLVLGSENQNKGNQTPYEYFNGKDNSREWQEFKARVETSRFPRSKKQRILLQKFDEDGFKERNLNDTRYVNRFLCQFVADRMRLTGKGKKRVFASNGQITNLLRGFWGLRKVRAENDRHHALDAVVVACSTVAMQQKITRFVRYKEMNAFDGKTIDKETGEVLHQKTHFPQPWEFFAQEVMIRVFGKPDGKPEFEEADTPEKLRTLLAEKLSSRPEAVHEYVTPLFVSRAPNRKMSGQGHMETVKSAKRLDEGVSVLRVPLTQLKLKDLEKMVNREREPKLYEALKARLEAHKDDPAKAFAEPFYKYDKAGNRTQQVKAVRVEQVQKTGVWVRNHNGIADNATMVRVDVFEKGDKYYLVPIYSWQVAKGILPDRAVVQGKDEEDWQLIDDSFNFKFSLHPNDLVEVITKKARMFGYFASCHRGTGNINIRIHDLDHKIGKNGILEGIGVKTALSFQKYQIDELGKEIRPCRLKKRPPVR

SEQ ID NO: 26 - protein, 1053 aa, Staphylococcus aureus
MKRNYILGLDIGITSVGYGIIDYETRDVIDAGVRLFKEANVENNEGRRSKRGARRLKRRRRHRIQRVKKLLFDYNLLTDHSELSGINPYEARVKGLSQKLSEEEFSAALLHLAKRRGVHNVNEVEEDTGNELSTKEQISRNSKALEEKYVAELQLERLKKDGEVRGSINRFKTSDYVKEAKQLLKVQKAYHQLDQSFIDTYIDLLETRRTYYEGPGEGSPFGWKDIKEWYEMLMGHCTYFPEELRSVKYAYNADLYNALNDLNNLVITRDENEKLEYYEKFQIIENVFKQKKKPTLKQIAKEILVNEEDIKGYRVTSTGKPEFTNLKVYHDIKDITARKEIIENAELLDQIAKILTIYQSSEDIQEELTNLNSELTQEEIEQISNLKGYTGTHNLSLKAINLILDELWHTNDNQIAIFNRLKLVPKKVDLSQQKEIPTTLVDDFILSPVVKRSFIQSIKVINAIIKKYGLPNDIIIELAREKNSKDAQKMINEMQKRNRQTNERIEEIIRTTGKENAKYLIEKIKLHDMQEGKCLYSLEAIPLEDLLNNPFNYEVDHIIPRSVSFDNSFNNKVLVKQEENSKKGNRTPFQYLSSSDSKISYETFKKHILNLAKGKGRISKTKKEYLLEERDINRFSVQKDFINRNLVDTRYATRGLMNLLRSYFRVNNLDVKVKSINGGFTSFLRRKWKFKKERNKGYKHHAEDALIIANADFIFKEWKKLDKAKKVMENQMFEEKQAESMPEIETEQEYKEIFITPHQIKHIKDFKDYKYSHRVDKKPNRELINDTLYSTRKDDKGNTLIVNNLNGLYDKDNDKLKKLINKSPEKLLMYHHDPQTYQKLKLIMEQYGDEKNPLYKYYEETGNYLTKYSKKDNGPVIKKIKYYGNKLNAHLDITDDYPNSRNKVVKLSLKPYRFDVYLDNGVYKFVTVKNLDVIKKENYYEVNSKCYEEAKKLKKISNQAEFIASFYNNDLIKINGELYRVIGVNNDLLNRIEVNMIDITYREYLENMNDKRPPRIIKTIASKTQSIKKYSTDILGNLYEVKSKKHPQIIKKG

SEQ ID NO: 27 - RNA, 104 nt, Artificial Sequence
  Synthetic polynucleotide
  modified_base (1)..(20): a, c, u, g, unknown or other
  misc_feature (1)..(20): n is a, c, g, or u
nnnnnnnnnnnnnnnnnnnnguuuuagagcuaugcugaaaagcauagcaaguuaaaauaaggcuaguccguuaucaacuugaaaaaguggcaccgagucggugc

SEQ ID NO: 28 - RNA, 106 nt, Artificial Sequence
  Synthetic polynucleotide
  modified_base (1)..(20): a, c, u, g, unknown or other
  misc_feature (1)..(20): n is a, c, g, or u
nnnnnnnnnnnnnnnnnnnnguuuuagagcuaugcuggaaacagcauagcaaguuaaaauaaggcuaguccguuaucaacuugaaaaaguggcaccgagucggugc

SEQ ID NO: 29 - RNA, 116 nt, Artificial Sequence
  Synthetic polynucleotide
  modified_base (1)..(20): a, c, u, g, unknown or other
  misc_feature (1)..(20): n is a, c, g, or u
nnnnnnnnnnnnnnnnnnnnguuuuagagcuaugcuguuuuggaaacaaaacagcauagcaaguuaaaauaaggcuaguccguuaucaacuugaaaaaguggcaccgagucggugc

SEQ ID NO: 30 - RNA, 96 nt, Artificial Sequence
  Synthetic oligonucleotide
  modified_base (1)..(20): a, c, u, g, unknown or other
  misc_feature (1)..(20): n is a, c, g, or u
nnnnnnnnnnnnnnnnnnnnguauuagagcuagaaauagcaaguuaauauaaggcuaguccguuaucaacuugaaaaaguggcaccgagucggugc

SEQ ID NO: 31 - RNA, 96 nt, Artificial Sequence
  Synthetic oligonucleotide
  modified_base (1)..(20): a, c, u, g, unknown or other
  misc_feature (1)..(20): n is a, c, g, or u
nnnnnnnnnnnnnnnnnnnnguuuaagagcuagaaauagcaaguuuaaauaaggcuaguccguuaucaacuugaaaaaguggcaccgagucggugc

SEQ ID NO: 32 - RNA, 116 nt, Artificial Sequence
  Synthetic polynucleotide
  modified_base (1)..(20): a, c, u, g, unknown or other
  misc_feature (1)..(20): n is a, c, g, or u
nnnnnnnnnnnnnnnnnnnnguauuagagcuaugcuguauuggaaacaauacagcauagcaaguuaauauaaggcuaguccguuaucaacuugaaaaaguggcaccgagucggugc

SEQ ID NO: 33 - RNA, 47 nt, Artificial Sequence
  Synthetic oligonucleotide
aaggcuaguccguuaucaacuugaaaaaguggcaccgagucggugcu

SEQ ID NO: 34 - RNA, 49 nt, Artificial Sequence
  Synthetic oligonucleotide
aaggcuaguccguuaucaacuugaaaaaguggcaccgagucgguggugc

SEQ ID NO: 35 - RNA, 51 nt, Artificial Sequence
  Synthetic oligonucleotide
aaggcuaguccguuaucaacuugaaaaaguggcaccgagucggugcggauc

SEQ ID NO: 36 - RNA, 31 nt, Artificial Sequence
  Synthetic oligonucleotide
aaggcuaguccguuaucaacuugaaaaagug

SEQ ID NO: 37 - RNA, 18 nt, Artificial Sequence
  Synthetic oligonucleotide
aaggcuaguccguuauca

SEQ ID NO: 38 - RNA, 12 nt, Artificial Sequence
  Synthetic oligonucleotide
aaggcuaguccg

SEQ ID NO: 39 - DNA, 3159 bp, Artificial Sequence
  Synthetic polynucleotide
atgaaaaggaactacattctggggctggacatcgggattacaagcgtggggtatgggattattgactatgaaacaagggacgtgatcgacgcaggcgtcagactgttcaaggaggccaacgtggaaaacaatgagggacggagaagcaagaggggagccaggcgcctgaaacgacggagaaggcacagaatccagagggtgaagaaactgctgttcgattacaacctgctgaccgaccattctgagctgagtggaattaatccttatgaagccagggtgaaaggcctgagtcagaagctgtcagaggaagagttttccgcagctctgctgcacctggctaagcgccgaggagtgcataacgtcaatgaggtggaagaggacaccggcaacgagctgtctacaaaggaacagatctcacgcaatagcaaagctctggaagagaagtatgtcgcagagctgcagctggaacggctgaagaaagatggcgaggtgagagggtcaattaataggttcaagacaagcgactacgtcaaagaagccaagcagctgctgaaagtgcagaaggcttaccaccagctggatcagagcttcatcgatacttatatcgacctgctggagactcggagaacctactatgagggaccaggagaagggagccccttcggatggaaagacatcaaggaatggtacgagatgctgatgggacattgcacctattttccagaagagctgagaagcgtcaagtacgcttataacgcagatctgtacaacgccctgaatgacctgaacaacctggtcatcaccagggatgaaaacgagaaactggaatactatgagaagttccagatcatcgaaaacgtgtttaagcagaagaaaaagcctacactgaaacagattgctaaggagatcctggtcaacgaagaggacatcaagggctaccgggtgacaagcactggaaaaccagagttcaccaatctgaaagtgtatcacgatattaaggacatcacagcacggaaagaaatcattgagaacgccgaactgctggatcagattgctaagatcctgactatctaccagagctccgaggacatccaggaagagctgactaacctgaacagcgagctgacccaggaagagatcgaacagattagtaatctgaaggggtacaccggaacacacaacctgtccctgaaagctatcaatctgattctggatgagctgtggcatacaaacgacaatcagattgcaatctttaaccggctgaagctggtcccaaaaaaggtggacctgagtcagcagaaagagatcccaaccacactggtggacgatttcattctgtcacccgtggtcaagcggagcttcatccagagcatcaaagtgatcaacgccatcatcaagaagtacggcctgcccaatgatatcattatcgagctggctagggagaagaacagcaaggacgcacagaagatgatcaatgagatgcagaaacgaaaccggcagaccaatgaacgcattgaagagattatccgaactaccgggaaagagaacgcaaagtacctgattgaaaaaatcaagctgcacgatatgcaggagggaaagtgtctgtattctctggaggccatccccctggaggacctgctgaacaatccattcaactacgaggtcgatcatattatccccagaagcgtgtccttcgacaattcctttaacaacaaggtgctggtcaagcaggaagagaactctaaaaagggcaataggactcctttccagtacctgtctagttcagattccaagatctcttacgaaacctttaaaaagcacattctgaatctggccaaaggaaagggccgcatcagcaagaccaaaaaggagtacctgctggaagagcgggacatcaacagattctccgtccagaaggattttattaaccggaatctggtggacacaagatacgctactcgcggcctgatgaatctgctgcgatcctatttccgggtgaacaatctggatgtgaaagtcaagtccatcaacggcgggttcacatcttttctgaggcgcaaatggaagtttaaaaaggagcgcaacaaagggtacaagcaccatgccgaagatgctctgattatcgcaaatgccgacttcatctttaaggagtggaaaaagctggacaaagccaagaaagtgatggagaaccagatgttcgaagagaagcaggccgaatctatgcccgaaatcgagacagaacaggagtacaaggagattttcatcactcctcaccagatcaagcatatcaaggatttcaaggactacaagtactctcaccgggtggataaaaagcccaacagagagctgatcaatgacaccctgtatagtacaagaaaagacgataaggggaataccctgattgtgaacaatctgaacggactgtacgacaaagataatgacaagctgaaaaagctgatcaacaaaagtcccgagaagctgctgatgtaccaccatgatcctcagacatatcagaaactgaagctgattatggagcagtacggcgacgagaagaacccactgtataagtactatgaagagactgggaactacctgaccaagtatagcaaaaaggataatggccccgtgatcaagaagatcaagtactatgggaacaagctgaatgcccatctggacatcacagacgattaccctaacagtcgcaacaaggtggtcaagctgtcactgaagccatacagattcgatgtctatctggacaacggcgtgtataaatttgtgactgtcaagaatctggatgtcatcaaaaaggagaactactatgaagtgaatagcaagtgctacgaagaggctaaaaagctgaaaaagattagcaaccaggcagagttcatcgcctccttttacaacaacgacctgattaagatcaatggcgaactgtatagggtcatcggggtgaacaatgatctgctgaaccgcattgaagtgaatatgattgacatcacttaccgagagtatctggaaaacatgaatgataagcgcccccctcgaattatcaaaacaattgcctctaagactcagagtatcaaaaagtactcaaccgacattctgggaaacctgtatgaggtgaagagcaaaaagcaccctcagattatcaaaaagggc

SEQ ID NO: 40 - DNA, 20 bp, Artificial Sequence
  Synthetic oligonucleotide
gttagatgtcaccaattgta

SEQ ID NO: 41 - DNA, 43 bp, Artificial Sequence
  Synthetic oligonucleotide
acttttatgggttagatgtcaccaattgtaaggcctgtgactg

SEQ ID NO: 42 - RNA, 42 nt, Streptococcus pyogenes
  modified_base (1)..(20): a, c, u, g, unknown or other
  misc_feature (1)..(20): n is a, c, g, or u
nnnnnnnnnnnnnnnnnnnnguuuuagagcuaugcuguuuug

SEQ ID NO: 43 - RNA, 85 nt, Streptococcus pyogenes
ggaaccauucaaaacagcauagcaaguuaaaauaaggcuaguccguuaucaacuugaaaaaguggcaccgagucggugcuuuuuu

SEQ ID NO: 44 - RNA, 62 nt, Streptococcus pyogenes
  modified_base (1)..(20): a, c, u, g, unknown or other
  misc_feature (1)..(20): n is a, c, g, or u
nnnnnnnnnnnnnnnnnnnnguuuuagagcuagaaauagcaaguuaaaauaaggcuaguccg

SEQ ID NO: 45 - RNA, 102 nt, Streptococcus pyogenes
  modified_base (1)..(20): a, c, u, g, unknown or other
  misc_feature (1)..(20): n is a, c, g, or u
nnnnnnnnnnnnnnnnnnnnguuuuagagcuagaaauagcaaguuaaaauaaggcuaguccguuaucaacuugaaaaaguggcaccgagucggugcuuuuuu

SEQ ID NO: 46 - RNA, 75 nt, Streptococcus pyogenes
  modified_base (1)..(20): a, c, u, g, unknown or other
  misc_feature (1)..(20): n is a, c, g, or u
nnnnnnnnnnnnnnnnnnnnguuuuagagcuaugcugaaaagcauagcaaguuaaaauaaggcuaguccguuauc

SEQ ID NO: 47 - RNA, 87 nt, Streptococcus pyogenes
  modified_base (1)..(20): a, c, u, g, unknown or other
  misc_feature (1)..(20): n is a, c, g, or u
nnnnnnnnnnnnnnnnnnnnguuuuagagcuaugcuguuuuggaaacaaaacagcauagcaaguuaaaauaaggcuaguccguuauc

SEQ ID NO: 48 - RNA, 42 nt, Streptococcus thermophilus
  modified_base (1)..(20): a, c, u, g, unknown or other
  misc_feature (1)..(20): n is a, c, g, or u
nnnnnnnnnnnnnnnnnnnnguuuuagagcuguguuguuucg

SEQ ID NO: 49 - RNA, 78 nt, Streptococcus thermophilus
gggcgaaacaacacagcgaguuaaaauaaggcuuaguccguacucaacuugaaaagguggcaccgauucgguguuuuu

SEQ ID NO: 50 - RNA, 42 nt, Streptococcus pyogenes; identical to SEQ ID NO: 42
  modified_base (1)..(20): a, c, u, g, unknown or other
  misc_feature (1)..(20): n is a, c, g, or u

SEQ ID NO: 51 - RNA, 42 nt, Streptococcus thermophilus; identical to SEQ ID NO: 48
  modified_base (1)..(20): a, c, u, g, unknown or other
  misc_feature (1)..(20): n is a, c, g, or u

SEQ ID NO: 52 - RNA, 85 nt, Streptococcus pyogenes
gaaccauucaaaacagcauagcaaguuaaaauaaggcuaguccguuaucaacuugaaaaaguggcaccgagucggugcuuuuuuu

SEQ ID NO: 53 - RNA, 78 nt, Streptococcus thermophilus; identical to SEQ ID NO: 49

SEQ ID NO: 54 - protein, 12 aa, Artificial Sequence
  Synthetic peptide
DIGTNSVGWAVT

SEQ ID NO: 55 - protein, 12 aa, Artificial Sequence
  Synthetic peptide
DIGTNSVGWAVT

SEQ ID NO: 56 - protein, 12 aa, Artificial Sequence
  Synthetic peptide
DVGTNSVGWAVT

SEQ ID NO: 57 - protein, 12 aa, Artificial Sequence
  Synthetic peptide
DVGTNSVGWAVT

SEQ ID NO: 58 - protein, 12 aa, Artificial Sequence
  Synthetic peptide
DMGTNSVGWAVT

SEQ ID NO: 59 - protein, 12 aa, Artificial Sequence
  Synthetic peptide
DVGTSSVGWAVT

SEQ ID NO: 60 - protein, 12 aa, Artificial Sequence
  Synthetic peptide
DIGTASVGWAVT

SEQ ID NO: 61 - protein, 12 aa, Artificial Sequence
  Synthetic peptide
DVGTGSVGWAVT

SEQ ID NO: 62 - protein, 12 aa, Artificial Sequence
  Synthetic peptide
DIGTNSVGWAVV

SEQ ID NO: 63 - protein, 12 aa, Artificial Sequence
  Synthetic peptide
DIGTNSVGWAVI

SEQ ID NO: 64 - protein, 12 aa, Artificial Sequence
  Synthetic peptide
DIGTNSVGWAVL

SEQ ID NO: 65 - protein, 12 aa, Artificial Sequence
  Synthetic peptide
DLGTNSIGWAVV

SEQ ID NO: 66 - protein, 11 aa, Artificial Sequence
  Synthetic peptide
DLGTNSIGWAI

SEQ ID NO: 67 - protein, 12 aa, Artificial Sequence
  Synthetic peptide
DLGTNSIGWALV

SEQ ID NO: 68 - protein, 12 aa, Artificial Sequence
  Synthetic peptide
DIGTNSVGWCVT

SEQ ID NO: 69 - protein, 12 aa, Artificial Sequence
  Synthetic peptide
DIGTNSVGYAVT

SEQ ID NO: 70 - protein, 12 aa, Artificial Sequence
  Synthetic peptide
DMGTGSLGWAVT

SEQ ID NO: 71 - protein, 12 aa, Artificial Sequence
  Synthetic peptide
DIGTSSVGWAAI

SEQ ID NO: 72 - protein, 12 aa, Artificial Sequence
  Synthetic peptide
DLGTGSVGWAVV

SEQ ID NO: 73 - protein, 12 aa, Artificial Sequence
  Synthetic peptide
DLGVGSVGWAIV

SEQ ID NO: 74 - protein, 12 aa, Artificial Sequence
  Synthetic peptide
DLGIASIGWAII

SEQ ID NO: 75 - protein, 12 aa, Artificial Sequence
  Synthetic peptide
DLGIASVGWAIV

SEQ ID NO: 76 - protein, 12 aa, Artificial Sequence
  Synthetic peptide
DLGVASVGWSIV

SEQ ID NO: 77 - protein, 12 aa, Artificial Sequence
  Synthetic peptide
DIGIASVGWAIL

SEQ ID NO: 78 - protein, 12 aa, Artificial Sequence
  Synthetic peptide
DLGISSVGWSVI

SEQ ID NO: 79 - protein, 12 aa, Artificial Sequence
  Synthetic peptide
DIGIASVGWSVI

SEQ ID NO: 80 - protein, 12 aa, Artificial Sequence
  Synthetic peptide
DVGIGSIGWAVI

SEQ ID NO: 81 - protein, 12 aa, Artificial Sequence
  Synthetic peptide
DLGVGSIGFAIV

SEQ ID NO: 82 - protein, 12 aa, Artificial Sequence
  Synthetic peptide
DIGYASIGWAVI

SEQ ID NO: 83 - protein, 12 aa, Artificial Sequence
  Synthetic peptide
DTGTNSLGWAIV

SEQ ID NO: 84 - protein, 12 aa, Artificial Sequence
  Synthetic peptide
DLGTNSIGWCLL

SEQ ID NO: 85 - protein, 12 aa, Artificial Sequence
  Synthetic peptide
DIGTDSLGWAVF

SEQ ID NO: 86 - protein, 12 aa, Artificial Sequence
  Synthetic peptide
DIGSNSIGFAVV

SEQ ID NO: 87 - protein, 12 aa, Artificial Sequence
  Synthetic peptide
DLGVGSIGVAVA

SEQ ID NO: 88 - protein, 12 aa, Artificial Sequence
  Synthetic peptide
DLGIASCGWGVV

SEQ ID NO: 89 - protein, 12 aa, Artificial Sequence
  Synthetic peptide
DLGIASVGWCLT

SEQ ID NO: 90 - protein, 12 aa, Artificial Sequence
  Synthetic peptide
DIGIGSVGVGIL

SEQ ID NO: 91 - protein, 12 aa, Artificial Sequence
  Synthetic peptide
DIGITSVGYGLI

SEQ ID NO: 92 - protein, 12 aa, Artificial Sequence
  Synthetic peptide
DIGITSVGFGII

SEQ ID NO: 93 - protein, 12 aa, Artificial Sequence
  Synthetic peptide
DVGITSTGYAVL

SEQ ID NO: 94 - protein, 12 aa, Artificial Sequence
  Synthetic peptide
DLGITSFGYAIL

SEQ ID NO: 95 - protein, 12 aa, Artificial Sequence
  Synthetic peptide
DIGNASVGWSAF

SEQ ID NO: 96 - protein, 12 aa, Artificial Sequence
  Synthetic peptide
DVGTNSCGWVAM

SEQ ID NO: 97 - protein, 12 aa, Artificial Sequence
  Synthetic peptide
DVGERSIGLAAV

SEQ ID NO: 98 - protein, 12 aa, Artificial Sequence
  Synthetic peptide
DVGLNSVGLAAV

SEQ ID NO: 99 - protein, 12 aa, Artificial Sequence
  Synthetic peptide
DVGLMSVGLAAI

SEQ ID NO: 100 - protein, 12 aa, Artificial Sequence
  Synthetic peptide
DVGTFSVGLAAI

SEQ ID NO: 101 - protein, 12 aa, Artificial Sequence
  Synthetic peptide
DIGTGSVGYACM

SEQ ID NO: 102 - protein, 12 aa, Artificial Sequence
  Synthetic peptide
DLGTTSIGFAHI

SEQ ID NO: 103 - protein, 12 aa, Artificial Sequence
  Synthetic peptide
DLGTNSIGSSVR

SEQ ID NO: 104 - protein, 12 aa, Artificial Sequence
  Synthetic peptide
DIGTNSVGWAVT

SEQ ID NO: 105 - protein, 12 aa, Artificial Sequence
  Synthetic peptide
DIGTNSVGWAVT

SEQ ID NO: 106 - protein, 12 aa, Artificial Sequence
  Synthetic peptide
DVGTNSVGWAVT

SEQ ID NO: 107 - protein, 12 aa, Artificial Sequence
  Synthetic peptide
DVGTNSVGWAVT

SEQ ID NO: 108 - protein, 12 aa, Artificial Sequence
  Synthetic peptide
DMGTNSVGWAVT

SEQ ID NO: 109 - protein, 12 aa, Artificial Sequence
  Synthetic peptide
DVGTSSVGWAVT

SEQ ID NO: 110 - protein, 12 aa, Artificial Sequence
  Synthetic peptide
DIGTASVGWAVT

SEQ ID NO: 111 - protein, 12 aa, Artificial Sequence
  Synthetic peptide
DVGTGSVGWAVT

SEQ ID NO: 112 - protein, 12 aa, Artificial Sequence
  Synthetic peptide
DIGTNSVGWAVV

SEQ ID NO: 113 - protein, 12 aa, Artificial Sequence
  Synthetic peptide
DIGTNSVGWAVI

SEQ ID NO: 114 - protein, 12 aa, Artificial Sequence
  Synthetic peptide
DIGTNSIGWAVI

SEQ ID NO: 115 - protein, 12 aa, Artificial Sequence
  Synthetic peptide
DIGTNSVGWAVL

SEQ ID NO: 116 - protein, 12 aa, Artificial Sequence
  Synthetic peptide
DLGTNSIGWAVV

SEQ ID NO: 117 - protein, 11 aa, Artificial Sequence
  Synthetic peptide
DLGTNSIGWAI

SEQ ID NO: 118 - protein, 12 aa, Artificial Sequence
  Synthetic peptide
DLGTNSIGWALV

SEQ ID NO: 119 - protein, 12 aa, Artificial Sequence
  Synthetic peptide
DIGTNSVGWCVT

SEQ ID NO: 120 - protein, 12 aa, Artificial Sequence
  Synthetic peptide
DIGTNSVGYAVT

SEQ ID NO: 121 - protein, 12 aa, Artificial Sequence
  Synthetic peptide
DMGTGSLGWAVT

SEQ ID NO: 122 - protein, 12 aa, Artificial Sequence
  Synthetic peptide
DIGTSSVGWAAI

SEQ ID NO: 123 - protein, 12 aa, Artificial Sequence
  Synthetic peptide
DLGTGSVGWAVV

SEQ ID NO: 124 - protein, 12 aa, Artificial Sequence
  Synthetic peptide
DLGVGSVGWAIV

SEQ ID NO: 125 - protein, 12 aa, Artificial Sequence
  Synthetic peptide
DLGIASIGWAII

SEQ ID NO: 126 - protein, 12 aa, Artificial Sequence
  Synthetic peptide
DLGIASVGWAIV

SEQ ID NO: 127 - protein, 12 aa, Artificial Sequence
  Synthetic peptide
DLGIASVGWAVV

SEQ ID NO: 128 - protein, 12 aa, Artificial Sequence
  Synthetic peptide
DLGVASVGWSIV

SEQ ID NO: 129 - protein, 12 aa, Artificial Sequence
  Synthetic peptide
DIGIASVGWAIL

SEQ ID NO: 130 - protein, 12 aa, Artificial Sequence
  Synthetic peptide
DIGIASVGWAVL

SEQ ID NO: 131 - protein, 12 aa, Artificial Sequence
  Synthetic peptide
DIGIASIGWAVI

SEQ ID NO: 132 - protein, 12 aa, Artificial Sequence
  Synthetic peptide
DIGIASVGWAII

SEQ ID NO: 133 - protein, 12 aa, Artificial Sequence
  Synthetic peptide
DVGIASVGWAVI

SEQ ID NO: 134 - protein, 11 aa, Artificial Sequence
  Synthetic peptide
DIGIASVGWAL

SEQ ID NO: 135 - protein, 12 aa, Artificial Sequence
  Synthetic peptide
DIGIASVGWAMV

SEQ ID NO: 136 - protein, 12 aa, Artificial Sequence
  Synthetic peptide
DIGIASVGWSVI

SEQ ID NO: 137 - protein, 12 aa, Artificial Sequence
  Synthetic peptide
DLGISSVGWSVI

SEQ ID NO: 138 - protein, 12 aa, Artificial Sequence
  Synthetic peptide
DIGITSVGWAVI

SEQ ID NO: 139 - protein, 12 aa, Artificial Sequence
  Synthetic peptide
DVGIGSIGWAVI

SEQ ID NO: 140 - protein, 12 aa, Artificial Sequence
  Synthetic peptide
DLGISSLGWAIV

SEQ ID NO: 141 - protein, 12 aa, Artificial Sequence
  Synthetic peptide
DLGVGSIGFAIV

SEQ ID NO: 142 - protein, 12 aa, Artificial Sequence
  Synthetic peptide
DIGYASIGWAVI

SEQ ID NO: 143 - protein, 12 aa, Artificial Sequence
  Synthetic peptide
DLGTNSIGWCLL

SEQ ID NO: 144 - protein, 12 aa, Artificial Sequence
  Synthetic peptide
DLGTNSIGWGLL

SEQ ID NO: 145 - protein, 12 aa, Artificial Sequence
  Synthetic peptide
DTGTNSLGWAIV

SEQ ID NO: 146 - protein, 12 aa, Artificial Sequence
  Synthetic peptide
DIGTDSLGWAVF

SEQ ID NO: 147 - protein, 12 aa, Artificial Sequence
  Synthetic peptide
DLGSTSLGWAIF

SEQ ID NO: 148 - protein, 12 aa, Artificial Sequence
  Synthetic peptide
DIGISSIGWAFS

SEQ ID NO: 149 - protein, 12 aa, Artificial Sequence
  Synthetic peptide
DLGIASVGWCLT

SEQ ID NO: 150 - protein, 12 aa, Artificial Sequence
  Synthetic peptide
DLGIASCGWGVV

SEQ ID NO: 151 - protein, 12 aa, Artificial Sequence
  Synthetic peptide
DIGSNSIGFAVV

SEQ ID NO: 152 - protein, 12 aa, Artificial Sequence
  Synthetic peptide
DIGTTSIGFSVI

SEQ ID NO: 153 - protein, 12 aa, Artificial Sequence
  Synthetic peptide
DIGITSVGYGLI

SEQ ID NO: 154 - protein, 12 aa, Artificial Sequence
  Synthetic peptide
DIGITSVGFGII

SEQ ID NO: 155 - protein, 12 aa, Artificial Sequence
  Synthetic peptide
DLGTTSIGFAHI

SEQ ID NO: 156 - protein, 12 aa, Artificial Sequence
  Synthetic peptide
DIGIGSVGVGIL

SEQ ID NO: 157 - protein, 12 aa, Artificial Sequence
  Synthetic peptide
DLGVGSIGVAVA

SEQ ID NO: 158 - protein, 12 aa, Artificial Sequence
  Synthetic peptide
DVGITSTGYAVL

SEQ ID NO: 159 - protein, 12 aa, Artificial Sequence
  Synthetic peptide
DLGITSFGYAIL

SEQ ID NO: 160 - protein, 12 aa, Artificial Sequence
  Synthetic peptide
DIGTSSIGWWLY

SEQ ID NO: 161 - protein, 12 aa, Artificial Sequence
  Synthetic peptide
DLGSNSLGWFVT

SEQ ID NO: 162 - protein, 12 aa, Artificial Sequence
  Synthetic peptide
DLGANSLGWFVV

SEQ ID NO: 163 - protein, 12 aa, Artificial Sequence
  Synthetic peptide
DIGNASVGWSAF

SEQ ID NO: 164 - protein, 12 aa, Artificial Sequence
  Synthetic peptide
DVGTNSCGWVAM

SEQ ID NO: 165 - protein, 12 aa, Artificial Sequence
  Synthetic peptide
DVGERSIGLAAV

SEQ ID NO: 166 - protein, 12 aa, Artificial Sequence
  Synthetic peptide
DVGLNSVGLAAV

SEQ ID NO: 167 - protein, 12 aa, Artificial Sequence
  Synthetic peptide
DVGLMSVGLAAI

SEQ ID NO: 168 - protein, 12 aa, Artificial Sequence
  Synthetic peptide
DVGTFSVGLAAI

SEQ ID NO: 169 - protein, 12 aa, Artificial Sequence
  Synthetic peptide
DIGTGSVGYACM

SEQ ID NO: 170 - protein, 12 aa, Artificial Sequence
  Synthetic peptide
DLGTNSIGSSVR

SEQ ID NO: 171 - protein, 15 aa, Artificial Sequence
  Synthetic peptide
DIGLRIGITSCGWSI

SEQ ID NO: 172 - protein, 12 aa, Artificial Sequence
  Synthetic peptide
DMGAKYTGVFYA

SEQ ID NO: 173 - protein, 12 aa, Artificial Sequence
  Synthetic peptide
DLGGKNTGFFSF

SEQ ID NO: 174 - protein, 12 aa, Artificial Sequence
  Synthetic peptide
DLGVKNTGVFSA

SEQ ID NO: 175 - protein, 12 aa, Artificial Sequence
  Synthetic peptide
DLGAKFTGVALY

SEQ ID NO: 176 - protein, 12 aa, Artificial Sequence
  Synthetic peptide
DLGGKFTGVCLS

SEQ ID NO: 177 - protein, 12 aa, Artificial Sequence
  Synthetic peptide
DLGGTYTGTFIT

SEQ ID NO: 178 - protein, 28 aa, Artificial Sequence
  Synthetic peptide
YDIDHIYPRSLTKDDSFDNLVLCERTAN

SEQ ID NO: 179 - protein, 28 aa, Artificial Sequence
  Synthetic peptide
DIDHIYPRSKVIKDDSFDNLVLVLKNEN

SEQ ID NO: 180 - protein, 27 aa, Artificial Sequence
  Synthetic peptide
DRDHIYPQSKIKDDSIDNLVLVNKTYN

SEQ ID NO: 181 - protein, 27 aa, Artificial Sequence
  Synthetic peptide
DIDHIYPRSKIKDDSITNRVLVEKDIN

SEQ ID NO: 182 - protein, 27 aa, Artificial Sequence
  Synthetic peptide
DIDHIYPQSKIKDDSISNRVLVCSSCN

SEQ ID NO: 183 - protein, 27 aa, Artificial Sequence
  Synthetic peptide
DIDHIYPQSKTMDDSLNNRVLVKKNYN

SEQ ID NO: 184 - protein, 27 aa, Artificial Sequence
  Synthetic peptide
DQDHIYPKSKIYDDSLENRVLVKKNLN

SEQ ID NO: 185 - protein, 27 aa, Artificial Sequence
  Synthetic peptide
QIDHIVPQSLVKDDSFDNRVLVVPSEN

SEQ ID NO: 186 - protein, 27 aa, Artificial Sequence
  Synthetic peptide
DIDHIIPQAFIKDNSIDNRVLTSSKEN

SEQ ID NO: 187 - protein, 27 aa, Artificial Sequence
  Synthetic peptide
DIDHIIPQAFLKDNSIDNKVLVSSASN

SEQ ID NO: 188 - protein, 27 aa, Artificial Sequence
  Synthetic peptide
DIDHIIPQAYTKDNSLDNRVLVSNITN

SEQ ID NO: 189 - protein, 27 aa, Artificial Sequence
  Synthetic peptide
DIDHIVPQSFITDNSIDNLVLTSSAGN

SEQ ID NO: 190 - protein, 27 aa, Artificial Sequence
  Synthetic peptide
DVDHIVPQSFLKDDSIDNKVLTRSDKN

SEQ ID NO: 191 - protein, 27 aa, Artificial Sequence
  Synthetic peptide
NIDHIYPQSMVKDDSLDNKVLVQSEIN

SEQ ID NO: 192 - protein, 27 aa, Artificial Sequence
  Synthetic peptide
DIDHILPQSLIKDDSLDNRVLVNATIN

SEQ ID NO: 193 - protein, 27 aa, Artificial Sequence
  Synthetic peptide
DIDHILPQSFIKDDSLENRVLVKKAVN

SEQ ID NO: 194 - protein, 27 aa, Artificial Sequence
  Synthetic peptide
EVDHIFPRSFIKDDSIDNKVLVIKKMN

SEQ ID NO: 195 - protein, 27 aa, Artificial Sequence
  Synthetic peptide
EVDHIIPRSYIKDDSFENKVLVYREEN

SEQ ID NO: 196 - protein, 27 aa, Artificial Sequence
  Synthetic peptide
DIDHIIPQAVTQNDSIDNRVLVARAEN

SEQ ID NO: 197 - protein, 27 aa, Artificial Sequence
  Synthetic peptide
EIDHIIPYSISFDDSSSNKLLVLAESN

SEQ ID NO: 198 - protein, 27 aa, Artificial Sequence
  Synthetic peptide
EIDHIIPYSLCFDDSSANKVLVHKQSN

SEQ ID NO: 199 - protein, 27 aa, Artificial Sequence
  Synthetic peptide
DIDHIIPYSRSMDDSYSNKVLVLSGEN

SEQ ID NO: 200 - protein, 27 aa, Artificial Sequence
  Synthetic peptide
DIDHIIPYSKSMDDSFNNKVLCLAEEN

SEQ ID NO: 201 - protein, 27 aa, Artificial Sequence
  Synthetic peptide
EIDHIYPYSRSFDDSYMNKVLVFTKQN

SEQ ID NO: 202 - protein, 27 aa, Artificial Sequence
  Synthetic peptide
QIDHIYPYSRSMDDSYMNKVLVLTDEN

SEQ ID NO: 203 - protein, 27 aa, Artificial Sequence
  Synthetic peptide
EIDHIIPFSRSFDDSLSNKILVLGSEN

SEQ ID NO: 204 - protein, 27 aa, Artificial Sequence
  Synthetic peptide
EIDHALPFSRTWDDSFNNKVLVLGSEN

SEQ ID NO: 205 - protein, 27 aa, Artificial Sequence
  Synthetic peptide
EIDHALPFSRTWDDSFNNKVLVLASEN

SEQ ID NO: 206 - protein, 27 aa, Artificial Sequence
  Synthetic peptide
EIDHIIPISISLDDSINNKVLVLSKAN

SEQ ID NO: 207 - protein, 27 aa, Artificial Sequence
  Synthetic peptide
EVDHIIPISISLDDSITNKVLVTHREN

SEQ ID NO: 208 - protein, 27 aa, Artificial Sequence
  Synthetic peptide
QVDHALPYSRSYDDSKNNKVLVLTHEN

SEQ ID NO: 209 - protein, 27 aa, Artificial Sequence
  Synthetic peptide
EVDHILPLSITFDDSLANKVLVYATAN

SEQ ID NO: 210 - protein, 27 aa, Artificial Sequence
  Synthetic peptide
EIDHIIPRSISFDDARSNKVLVYRSEN

SEQ ID NO: 211 - protein, 27 aa, Artificial Sequence
  Synthetic peptide
EVDHIIPRSVSFDNSYHNKVLVKQSEN

SEQ ID NO: 212 - protein, 27 aa, Artificial Sequence
  Synthetic peptide
DIDHILPYSITFDDSFRNKVLVTSQEN

SEQ ID NO: 213 - protein, 27 aa, Artificial Sequence
  Synthetic peptide
EIDHILPRSRSADDSFANKVLCLARAN

SEQ ID NO: 214 - protein, 27 aa, Artificial Sequence
  Synthetic peptide
EIEHLLPFSLTLDDSMANKTVCFRQAN

SEQ ID NO: 215 - protein, 27 aa, Artificial Sequence
  Synthetic peptide
DIDHILPFSVSLDDSAANKVVCLREAN

SEQ ID NO: 216 - protein, 27 aa, Artificial Sequence
  Synthetic peptide
DIDHLIPFSISWDDSAANKVVCMRYAN

SEQ ID NO: 217 - protein, 27 aa, Artificial Sequence
  Synthetic peptide
DIDHILPVAMTLDDSPANKIICMRYAN

SEQ ID NO: 218 - protein, 27 aa, Artificial Sequence
  Synthetic peptide
DVDHILPYSRTLDDSFPNRTLCLREAN

SEQ ID NO: 219 - protein, 27 aa, Artificial Sequence
  Synthetic peptide
EIEHILPFSRTLDDSLNNRTVAMRRAN

SEQ ID NO: 220 - protein, 27 aa, Artificial Sequence
  Synthetic peptide
EVDHIIPYSISWDDSYTNKVLTSAKCN

SEQ ID NO: 221 - protein, 27 aa, Artificial Sequence
  Synthetic peptide
QVDHILPWSRFGDDSYLNKTLCTARSN

SEQ ID NO: 222 - protein, 27 aa, Artificial Sequence
  Synthetic peptide
QVDHILPFSKTLDDSFANKVLAQHDAN

SEQ ID NO: 223 - protein, 27 aa, Artificial Sequence
  Synthetic peptide
QIDHAFPLSRSLDDSQSNKVLCLTSSN

SEQ ID NO: 224 - protein, 27 aa, Artificial Sequence
  Synthetic peptide
DIDHIVPRSISFDDSFSNLVIVNKLDN

SEQ ID NO: 225 - protein, 27 aa, Artificial Sequence
  Synthetic peptide
EIEHIIPYSMSYDNSQANKILTEKAEN

SEQ ID NO: 226 - protein, 27 aa, Artificial Sequence
  Synthetic peptide
EIDHVIPYSKSADDSWFNKLLVKKSTN

SEQ ID NO: 227 - protein, 27 aa, Artificial Sequence
  Synthetic peptide
EMDHILPYSRSLDNGWHNRVLVHGKDN

SEQ ID NO: 228 - protein, 27 aa, Artificial Sequence
  Synthetic peptide
EVDHIVPYSLILDNTINNKALVYAEEN

SEQ ID NO: 229 - protein, 27 aa, Artificial Sequence
  Synthetic peptide
EIEHVIPQSLYFDDSFSNKVICEAEVN

SEQ ID NO: 230 - protein, 27 aa, Artificial Sequence
  Synthetic peptide
DIEHIIPQARLFDDSFSNKTLEARSVN

SEQ ID NO: 231 - protein, 27 aa, Artificial Sequence
  Synthetic peptide
EIEHIVPKARVFDDSFSNKTLTFHRIN

SEQ ID NO: 232 - protein, 28 aa, Artificial Sequence
  Synthetic peptide
DKDHIIPQSMKKDDSIINNLVLVNKNAN

SEQ ID NO: 233 - protein, 27 aa, Artificial Sequence
  Synthetic peptide
EVEHIWPRSRSFDNSPRNKTLCRKDVN

SEQ ID NO: 234 - protein, 27 aa, Artificial Sequence
  Synthetic peptide
IVNHIIPYNRSFDDTYHNRVLTLTETK

SEQ ID NO: 235 - protein, 27 aa, Artificial Sequence
  Synthetic peptide
DMEHTIPKSISFDNSDQNLTLCESYYN

SEQ ID NO: 236 - protein, 27 aa, Artificial Sequence
  Synthetic peptide
DIEHTIPRSAGGDSTKMNLTLCSSRFN

SEQ ID NO: 237 - protein, 27 aa, Artificial Sequence
  Synthetic peptide
DIEHTIPRSISQDNSQMNKTLCSLKFN

SEQ ID NO: 238 - protein, 27 aa, Artificial Sequence
  Synthetic peptide
DIDHVIPLARGGRDSLDNMVLCQSDAN

SEQ ID NO: 239 - protein, 27 aa, Artificial Sequence
  Synthetic peptide
DIEHLFPIAESEDNGRNNLVISHSACN

SEQ ID NO: 240 - protein, 27 aa, Artificial Sequence
  Synthetic peptide
DVDHIFPRDDTADNSYGNKVVAHRQCN

SEQ ID NO: 241 - protein, 27 aa, Artificial Sequence
  Synthetic peptide
DIEHIVPQSLGGLSTDYNTIVTLKSVN

SEQ ID NO: 242 - protein, 27 aa, Artificial Sequence
  Synthetic peptide
ELDHIVPRTDGGSNRHENLAITCGACN

SEQ ID NO: 243 - protein, 28 aa, Artificial Sequence
  Synthetic peptide
EMDHIVPRKGVGSTNTRTNFAAVCAECN

SEQ ID NO: 244 - protein, 28 aa, Artificial Sequence
  Synthetic peptide
EMDHIVPRKGVGSTNTRVNLAAACAACN

SEQ ID NO: 245 - protein, 28 aa, Artificial Sequence
  Synthetic peptide
EMDHIVPRAGQGSTNTRENLVAVCHRCN

SEQ ID NO: 246 - protein, 33 aa, Artificial Sequence
  Synthetic polypeptide
EIDHILPRSLIKDARGIVFNAEPNLIYASSRGN

SEQ ID NO: 247 - protein, 33 aa, Artificial Sequence
  Synthetic polypeptide
EIDHIIPRSLTGRTKKTVFNSEANLIYCSSKGN

SEQ ID NO: 248 - protein, 33 aa, Artificial Sequence
  Synthetic polypeptide
EIDHIIPRSLTLKKSESIYNSEVNLIFVSAQGN

SEQ ID NO: 249 - protein, 33 aa, Artificial Sequence
  Synthetic polypeptide
EIDHIYPRSLSKKHFGVIFNSEVNLIYCSSQGN

SEQ ID NO: 250 - protein, 33 aa, Artificial Sequence
  Synthetic polypeptide
EIDHILPRSHTLKIYGTVFNPEGNLIYVHQKCN

SEQ ID NO: 251 - protein, 30 aa, Artificial Sequence
  Synthetic polypeptide
ELDHIIPRSHKKYGTLNDEANLICVTRGDN

SEQ ID NO: 252 - protein, 27 aa, Artificial Sequence
  Synthetic peptide
ELEHIVPHSFRQSNALSSLVLTWPGVN

SEQ ID NO: 253 - protein, 28 aa, Artificial Sequence
  Synthetic peptide
YDIDHIYPRSLTKDDSFDNLVLCERTAN

SEQ ID NO: 254 - protein, 28 aa, Artificial Sequence
  Synthetic peptide
DIDHIYPRSKVIKDDSFDNLVLVLKNEN

SEQ ID NO: 255 - protein, 27 aa, Artificial Sequence
  Synthetic peptide
DRDHIYPQSKIKDDSIDNLVLVNKTYN

SEQ ID NO: 256 - protein, 27 aa, Artificial Sequence
  Synthetic peptide
DIDHIYPRSKIKDDSITNRVLVEKDIN

SEQ ID NO: 257 - protein, 27 aa, Artificial Sequence
  Synthetic peptide
DIDHIYPQSKIKDDSISNRVLVCSSCN

SEQ ID NO: 258 - protein, 27 aa, Artificial Sequence
  Synthetic peptide
DIDHIYPQSKTMDDSLNNRVLVKKNYN

SEQ ID NO: 259 - protein, 27 aa, Artificial Sequence
  Synthetic peptide
DQDHIYPKSKIYDDSLENRVLVKKNLN

SEQ ID NO: 260 - protein, 27 aa, Artificial Sequence
  Synthetic peptide
QIDHIVPQSLVKDDSFDNRVLVVPSEN

SEQ ID NO: 261 - protein, 27 aa, Artificial Sequence
  Synthetic peptide
DIDHIIPQAFIKDNSIDNRVLTSSKEN

SEQ ID NO: 262 - protein, 27 aa, Artificial Sequence
  Synthetic peptide
DIDHIIPQAFLKDNSIDNKVLVSSASN

SEQ ID NO: 263 - protein, 27 aa, Artificial Sequence
  Synthetic peptide
DIDHIIPQAYTKDNSLDNRVLVSNITN

SEQ ID NO: 264 - protein, 27 aa, Artificial Sequence
  Synthetic peptide
DIDHIVPQSFITDNSIDNLVLTSSAGN

SEQ ID NO: 265 - protein, 27 aa, Artificial Sequence
  Synthetic peptide
DVDHIVPQSFLKDDSIDNKVLTRSDKN

SEQ ID NO: 266 - protein, 27 aa, Artificial Sequence
  Synthetic peptide
NIDHIYPQSMVKDDSLDNKVLVQSEIN

SEQ ID NO: 267 - protein, 27 aa, Artificial Sequence
  Synthetic peptide
DIDHILPQSLIKDDSLDNRVLVNATIN

SEQ ID NO: 268 - protein, 27 aa, Artificial Sequence
  Synthetic peptide
DIDHILPQSFIKDDSLENRVLVKKAVN

SEQ ID NO: 269 - protein, 27 aa, Artificial Sequence
  Synthetic peptide
EVDHIFPRSFIKDDSIDNKVLVIKKMN

SEQ ID NO: 270 - protein, 27 aa, Artificial Sequence
  Synthetic peptide
EVDHIIPRSYIKDDSFENKVLVYREEN

SEQ ID NO: 271 - protein, 27 aa, Artificial Sequence
  Synthetic peptide
DIDHIIPQAVTQNDSIDNRVLVARAEN

SEQ ID NO: 272 - protein, 27 aa, Artificial Sequence
  Synthetic peptide
DIDHIVPRSISFDDSFSNLVIVNKLDN

SEQ ID NO: 273 - protein, 27 aa, Artificial Sequence
  Synthetic peptide
EIDHIIPYSISFDDSSSNKLLVLAESN

SEQ ID NO: 274 - protein, 27 aa, Artificial Sequence
  Synthetic peptide
EIDHIIPYSLCFDDSSANKVLVHKQSN

SEQ ID NO: 275 - protein, 27 aa, Artificial Sequence
  Synthetic peptide
EIDHIIPISISLDDSINNKVLVLSKAN

SEQ ID NO: 276 - protein, 27 aa, Artificial Sequence
  Synthetic peptide
EVDHIIPISISLDDSITNKVLVTHREN

SEQ ID NO: 277 - protein, 27 aa, Artificial Sequence
  Synthetic peptide
EVDHILPLSITFDDSLANKVLVYATAN

SEQ ID NO: 278 - protein, 27 aa, Artificial Sequence
  Synthetic peptide
EIDHIIPRSISFDDARSNKVLVYRSEN

SEQ ID NO: 279 - protein, 27 aa, Artificial Sequence
  Synthetic peptide
EVDHIIPRSVSFDNSYHNKVLVKQSEN

SEQ ID NO: 280 - protein, 27 aa, Artificial Sequence
  Synthetic peptide
EVDHIIPYSISWDDSYTNKVLTSAKCN

SEQ ID NO: 281 - protein, 27 aa, Artificial Sequence
  Synthetic peptide
DIDHIIPYSRSMDDSYSNKVLVLSGEN

SEQ ID NO: 282 - protein, 27 aa, Artificial Sequence
  Synthetic peptide
EIEHIIPYSMSYDNSQANKILTEKAEN

SEQ ID NO: 283 - protein, 27 aa, Artificial Sequence
  Synthetic peptide
EVDHIVPYSLILDNTINNKALVYAEEN

SEQ ID NO: 284 - protein, 27 aa, Artificial Sequence
  Synthetic peptide
EIDHVIPYSKSADDSWFNKLLVKKSTN

SEQ ID NO: 285 - protein, 27 aa, Artificial Sequence
  Synthetic peptide
EMDHILPYSRSLDNGWHNRVLVHGKDN

SEQ ID NO: 286 - protein, 27 aa, Artificial Sequence
  Synthetic peptide
EIEHVIPQSLYFDDSFSNKVICEAEVN

SEQ ID NO: 287 - protein, 27 aa, Artificial Sequence
  Synthetic peptide
DIEHIIPQARLFDDSFSNKTLEARSVN

SEQ ID NO: 288 - protein, 27 aa, Artificial Sequence
  Synthetic peptide
EIEHIVPKARVFDDSFSNKTLTFHRIN

SEQ ID NO: 289 - protein, 28 aa, Artificial Sequence
  Synthetic peptide
DKDHIIPQSMKKDDSIINNLVLVNKNAN

SEQ ID NO: 290 - protein, 27 aa, Artificial Sequence
  Synthetic peptide
QVDHILPWSRFGDDSYLNKTLCTARSN

SEQ ID NO: 291 - protein, 27 aa, Artificial Sequence
  Synthetic peptide
DIDHVIPLARGGRDSLDNMVLCQSDAN

SEQ ID NO: 292 - protein, 27 aa, Artificial Sequence
  Synthetic peptide
DMEHTIPKSISFDNSDQNLTLCESYYN

SEQ ID NO: 293 - protein, 27 aa, Artificial Sequence
  Synthetic peptide
DIEHTIPRSAGGDSTKMNLTLCSSRFN

SEQ ID NO: 294 - protein, 27 aa, Artificial Sequence
  Synthetic peptide
DIEHTIPRSISQDNSQMNKTLCSLKFN

SEQ ID NO: 295 - protein, 27 aa, Artificial Sequence
  Synthetic peptide
DIEHLFPIAESEDNGRNNLVISHSACN

SEQ ID NO: 296 - protein, 27 aa, Artificial Sequence
  Synthetic peptide
DVDHIFPRDDTADNSYGNKVVAHRQCN

SEQ ID NO: 297 - protein, 27 aa, Artificial Sequence
  Synthetic peptide
DIEHIVPQSLGGLSTDYNTIVTLKSVN

SEQ ID NO: 298 - protein, 27 aa, Artificial Sequence
  Synthetic peptide
ELDHIVPRTDGGSNRHENLAITCGACN

SEQ ID NO: 299 - protein, 28 aa, Artificial Sequence
  Synthetic peptide
EMDHIVPRKGVGSTNTRTNFAAVCAECN

SEQ ID NO: 300 - protein, 28 aa, Artificial Sequence
  Synthetic peptide
EMDHIVPRKGVGSTNTRVNLAAACAACN

SEQ ID NO: 301 - protein, 28 aa, Artificial Sequence
  Synthetic peptide
EMDHIVPRAGQGSTNTRENLVAVCHRCN

SEQ ID NO: 302 - protein, 27 aa, Artificial Sequence
  Synthetic peptide
ELEHIVPHSFRQSNALSSLVLTWPGVN

SEQ ID NO: 303 - DNA, 3333 bp, Artificial Sequence
  Synthetic polynucleotide
atggtgcctaagaagaagagaaaggtggctgccttcaaacctaattcaatcaactacatcctcggcctcgatatcggcatcgcatccgtcggctgggcgatggtagaaattgacgaagaagaaaaccccatccgcctgattgatttgggcgtgcgcgtatttgagcgtgccgaagtaccgaaaacaggcgactcccttgccatggcaaggcgtttggcgcgcagtgttcgccgcctgacccgccgtcgcgcccaccgcctgcttcggacccgccgcctattgaaacgcgaaggcgtattacaagccgccaattttgacgaaaacggcttgattaaatccttaccgaatacaccatggcaacttcgcgcagccgcattagaccgcaaactgacgcctttagagtggtcggcagtcttgttgcatttaatcaaacatcgcggctatttatcgcaacggaaaaacgagggcgaaactgccgataaggagcttggcgctttgcttaaaggcgtagccggcaatgcccatgccttacagacaggcgatttccgcacaccggccgaattggctttaaataaatttgagaaagaaagcggccatatccgcaatcagcgcagcgattattcgcatacgttcagccgcaaagatttacaggcggagctgattttgctgtttgaaaaacaaaaagaatttggcaatccgcatgtttcaggcggccttaaagaaggtattgaaaccctactgatgacgcaacgccctgccctgtccggcgatgccgttcaaaaaatgttggggcattgcaccttcgaaccggcagagccgaaagccgctaaaaacacctacacagccgaacgtttcatctggctgaccaagctgaacaacctgcgtattttagagcaaggcagcgagcggccattgaccgataccgaacgcgccacgcttatggacgagccatacagaaaatccaaactgacttacgcacaagcccgtaagctgctgggtttagaagataccgcctttttcaaaggcttgcgctatggtaaagacaatgccgaagcctcaacattgatggaaatgaaggcctaccatgccatcagccgtgcactggaaaaagaaggattgaaagacaaaaaatccccattaaacctttctcccgaattacaagacgaaatcggcacggcattctccctgttcaaaaccgatgaagacattacaggccgtctgaaagaccgtatacagcccgaaatcttagaagcgctgttgaaacacatcagcttcgataagttcgtccaaatttccttgaaagcattgcgccgaattgtgcctctaatggaacaaggcaaacgttacgatgaagcctgcgccgaaatctacggagaccattacggcaagaagaatacggaagaaaagatttatctgccgccgattcccgccgacgaaatccgcaaccccgtcgtcttgcgcgccttatctcaagcacgtaaggtcattaacggcgtggtacgccgttacggctccccagctcgtatccatattgaaactgcaagggaagtaggtaaatcgtttaaagaccgcaaagaaattgagaaacgccaagaagaaaaccgcaaagaccgggaaaaagccgccgccaaattccgagagtatttccccaattttgtcggagaacccaaatccaaagatattctgaaactgcgcctgtacgagcaacaacacggcaaatgcctgtattcgggcaaagaaatcaacttaggccgtctgaacgaaaaaggctatgtcgaaatcgaccatgccctgccgttctcgcgcacatgggacgacagtttcaacaataaagtactggtattgggcagcgaaaaccaaaacaaaggcaatcaaaccccttacgaatacttcaacggcaaagacaacagccgcgaatggcaggaatttaaagcgcgtgtcgaaaccagccgtttcccgcgcagtaaaaaacaacggattctgctgcaaaaattcgatgaagacggctttaaagaacgcaatctgaacgacacgcgctacgtcaaccgtttcctgtgtcaatttgttgccgaccgtatgcggctgacaggtaaaggcaagaaacgtgtctttgcatccaacggacaaattaccaatctgttgcgcggcttttggggattgcgcaaagtgcgtgcggaaaacgaccgccatcacgccttggacgccgtcgtcgttgcctgctcgaccgttgccatgcagcagaaaattacccgttttgtacgctataaagagatgaacgcgtttgacggtaaaaccatagacaaagaaacaggagaagtgctgcatcaaaaaacacacttcccacaaccttgggaatttttcgcacaagaagtcatgattcgcgtcttcggcaaaccggacggcaaacccgaattcgaagaagccgataccctagaaaaactgcgcacgttgcttgccgaaaaattatcatctcgccccgaagccgtacacgaatacgttacgccactgtttgtttcacgcgcgcccaatcggaagatgagcgggcaagggcatatggagaccgtcaaatccgccaaacgactggacgaaggcgtcagcgtgttgcgcgtaccgctgacacagttaaaactgaaagacttggaaaaaatggtcaatcgggagcgcgaacctaagctatacgaagcactgaaagcacggctggaagcacataaagacgatcctgccaaagcctttgccgagccgttttacaaatacgataaagcaggcaaccgcacccaacaggtaaaagccgtacgcgtagagcaagtacagaaaaccggcgtatgggtgcgcaaccataacggtattgccgacaacgcaaccatggtgcgcgtagatgtgtttgagaaaggcgacaagtattatctggtaccgatttacagttggcaggtagcgaaagggattttgccggatagggctgttgtacaaggaaaagatgaagaagattggcaacttattgatgatagtttcaactttaaattctcattacaccctaatgatttagtcgaggttataacaaaaaaagctagaatgtttggttactttgccagctgccatcgaggcacaggtaatatcaatatacgcattcatgatcttgatcataaaattggcaaaaatggaatactggaaggtatcggcgtcaaaaccgccctttcattccaaaaataccaaattgacgaactgggcaaagaaatcagaccatgccgtctgaaaaaacgcccgcctgtccgttacccatacgatgttccagattacgctgcagctccagcagcgaagaaaaagaagctggattaa

SEQ ID NO: 304 - protein, 1053 aa, Staphylococcus aureus; identical to SEQ ID NO: 26

SEQ ID NO: 305 - protein, 1368 aa, Streptococcus pyogenes [sequence omitted]

SEQ ID NO: 306 - protein, 984 aa, Campylobacter jejuni
MARILAFDIGISSIGWAFSENDELKDCGVRIFTKVENPKTGESLALPRRLARSARKRLARRKARLNHLKHLIANEFKLNYEDYQSFDESLAKAYKGSLISPYELRFRALNELLSKQDFARVILHIAKRRGYDDIKNSDDKEKGAILKAIKQNEEKLANYQSVGEYLYKEYFQKFKENSKEFTNVRNKKESYERCIAQSFLKDELKLIFKKQREFGFSFSKKFEEEVLSVAFYKRALKDFSHLVGNCSFFTDEKRAPKNSPLAFMFVALTRIINLLNNLKNTEGILYTKDDLNALLNEVLKNGTLTYKQTKKLLGLSDDYEFKGEKGTYFIEFKKYKEFIKALGEHNLSQDDLNEIAKDITLIKDEIKLKKALAKYDLNQNQIDSLSKLEFKDHLNISFKALKLVTPLMLEGKKYDEACNELNLKVAINEDKKDFLPAFNETYYKDEVTNPVVLRAIKEYRKVLNALLKKYGKVHKINIELAREVGKNHSQRAKIEKEQNENYKAKKDAELECEKLGLKINSKNILKLRLFKEQKEFCAYSGEKIKISDLQDEKMLEIDHIYPYSRSFDDSYMNKVLVFTKQNQEKLNQTPFEAFGNDSAKWQKIEVLAKNLPTKKQKRILDKNYKDKEQKNFKDRNLNDTRYIARLVLNYTKDYLDFLPLSDDENTKLNDTQKGSKVHVEAKSGMLTSALRHTWGFSAKDRNNHLHHAIDAVIIAYANNSIVKAFSDFKKEQESNSAELYAKKISELDYKNKRKFFEPFSGFRQKVLDKIDEIFVSKPERKKPSGALHEETFRKEEEFYQSYGGKEGVLKALELGKIRKVNGKIVKNGDMFRVDIFKHKKTNKFYAVPIYTMDFALKVLPNKAVARSKKGEIKDWILMDENYEFCFSLYKDSLILIQTKDMQEPEFVYYNAFTSSTVSLIVSKHDNKFETLSKNQKILFKNANEKEVIAKSIGIQNLKVFEKYIVSALGEVTKAEFRQREDFKK

SEQ ID NO: 307 - protein, 1436 aa, Bacteroides fragilis
MKRILGLDLGTNSIGWALVNEAENKDERSSIVKLGVRVNPLTVDELTNFEKGKSITTNADRTLKRGMRRNLQRYKLRRETLTEVLKEHKLITEDTILSENGNRTTFETYRLRAKAVTEEISLEEFARVLLMINKKRGYKSSRKAKGVEEGTLIDGMDIARELYNNNLTPGELCLQLLDAGKKFLPDFYRSDLQNELDRIWEKQKEYYPEILTDVLKEELRGKKRDAVWAICAKYFVWKENYTEWNKEKGKTEQQEREHKLEGIYSKRKRDEAKRENLQWRVNGLKEKLSLEQLVIVFQEMNTQINNSSGYLGAISDRSKELYFNKQTVGQYQMEMLDKNPNASLRNMVFYRQDYLDEFNMLWEKQAVYHKELTEELKKEIRDIIIFYQRRLKSQKGLIGFCEFESRQIEVDIDGKKKIKTVGNRVISRSSPLFQEFKIWQILNNIEVTVVGKKRKRRKLKENYSALFEELNDAEQLELNGSRRLCQEEKELLAQELFIRDKMTKSEVLKLLFDNPQELDLNFKTIDGNKTGYALFQAYSKMIEMSGHEPVDFKKPVEKVVEYIKAVFDLLNWNTDILGFNSNEELDNQPYYKLWHLLYSFEGDNTPTGNGRLIQKMTELYGFEKEYATILANVSFQDDYGSLSAKAIHKILPHLKEGNRYDVACVYAGYRHSESSLTREEIANKVLKDRLMLLPKNSLHNPVVEKILNQMVNVINVIIDIYGKPDEIRVELARELKKNAKEREELTKSIAQTTKAHEEYKTLLQTEFGLTNVSRTDILRYKLYKELESCGYKTLYSNTYISREKLFSKEFDIEHIIPQARLFDDSFSNKTLEARSVNIEKGNKTAYDFVKEKFGESGADNSLEHYLNNIEDLFKSGKISKTKYNKLKMAEQDIPDGFIERDLRNTQYIAKKALSMLNEISHRVVATSGSVTDKLREDWQLIDVMKELNWEKYKALGLVEYFEDRDGRQIGRIKDWTKRNDHRHHAMDALTVAFTKDVFIQYFNNKNASLDPNANEHAIKNKYFQNGRAIAPMPLREFRAEAKKHLENTLISIKAKNKVITGNINKTRKKGGVNKNMQQTPRGQLHLETIYGSGKQYLTKEEKVNASFDMRKIGTVSKSAYRDALLKRLYENDNDPKKAFAGKNSLDKQPIWLDKEQMRKVPEKVKIVTLEAIYTIRKEISPDLKVDKVIDVGVRKILIDRLNEYGNDAKKAFSNLDKNPIWLNKEKGISIKRVTISGISNAQSLHVKKDKDGKPILDENGRNIPVDFVNTGNNHHVAVYYRPVIDKRGQLVVDEAGNPKYELEEVVVSFFEAVTRANLGLPIIDKDYKTTEGWQFLFSMKQNEYFVFPNEKTGFNPKEIDLLDVENYGLISPNLFRVQKFSLKNYVFRHHLETTIKDTSSILRGITWIDFRSSKGLDTIVKVRVNHIGQIVSVGEY

SEQ ID NO: 308 - protein, 1420 aa, Bifidobacterium bifidum
MSRKNYVDDYAISLDIGNASVGWSAFTPNYRLVRAKGHELIGVRLFDPADTAESRRMARTTRRRYSRRRWRLRLLDALFDQALSEIDPSFLARRKYSWVHPDDENNADCWYGSVLFDSNEQDKRFYEKYPTIYHLRKALMEDDSQHDIREIYLAIHHMVKYRGNFLVEGTLESSNAFKEDELLKLLGRITRYEMSEGEQNSDIEQDDENKLVAPANGQLADALCATRGSRSMRVDNALEALSAVNDLSREQRAIVKAIFAGLEGNKLDLAKIFVSKEFSSENKKILGIYFNKSDYEEKCVQIVDSGLLDDEEREFLDRMQGQYNAIALKQLLGRSTSVSDSKCASYDAHRANWNLIKLQLRTKENEKDINENYGILVGWKIDSGQRKSVRGESAYENMRKKANVFFKKMIETSDLSETDKNRLIHDIEEDKLFPIQRDSDNGVIPHQLHQNELKQIIKKQGKYYPFLLDAFEKDGKQINKIEGLLTFRVPYFVGPLVVPEDLQKSDNSENHWMVRKKKGEITPWNFDEMVDKDASGRKFIERLVGTDSYLLGEPTLPKNSLLYQEYEVLNELNNVRLSVRTGNHWNDKRRMRLGREEKTLLCQRLFMKGQTVTKRTAENLLRKEYGRTYELSGLSDESKFTSSLSTYGKMCRIFGEKYVNEHRDLMEKIVELQTVFEDKETLLHQLRQLEGISEADCALLVNTHYTGWGRLSRKLLTTKAGECKISDDFAPRKHSIIEIMRAEDRNLMEIITDKQLGFSDWIEQENLGAENGSSLMEVVDDLRVSPKVKRGIIQSIRLIDDISKAVGKRPSRIFLELADDIQPSGRTISRKSRLQDLYRNANLGKEFKGIADELNACSDKDLQDDRLFLYYTQLGKDMYTGEELDLDRLSSAYDIDHIIPQAVTQNDSIDNRVLVARAENARKTDSFTYMPQIADRMRNFWQILLDNGLISRVKFERLTRQNEFSEREKERFVQRSLVETRQIMKNVATLMRQRYGNSAAVIGLNAELTKEMHRYLGFSHKNRDINDYHHAQDALCVGIAGQFAANRGFFADGEVSDGAQNSYNQYLRDYLRGYREKLSAEDRKQGRAFGFIVGSMRSQDEQKRVNPRTGEVVWSEEDKDYLRKVMNYRKMLVTQKVGDDFGALYDETRYAATDPKGIKGIPFDGAKQDTSLYGGFSSAKPAYAVLIESKGKTRLVNVTMQEYSLLGDRPSDDELRKVLAKKKSEYAKANILLRHVPKMQLIRYGGGLMVIKSAGELNNAQQLWLPYEEYCYFDDLSQGKGSLEKDDLKKLLDSILGSVQCLYPWHRFTEEELADLHVAFDKLPEDEKKNVITGIVSALHADAKTANLSIVGMTGSWRRMNNKSGYTFSDEDEFIFQSPSGLFEKRVTVGELKRKAKKEVNSKYRTNEKRLPTLSGASQP

SEQ ID NO: 309 - protein, 1397 aa, Veillonella atypica
METQTSNQLITSHLKDYPKQDYFVGLDIGTNSVGWAVTNTSYELLKFHSHKMWGSRLFEEGESAVTRRGFRSMRRRLERRKLRLKLLEELFADAMAQVDSTFFIRLHESKYHYEDKTTGHSSKHILFIDEDYTDQDYFTEYPTIYHLRKDLMENGTDDIRKLFLAVHHILKYRGNFLYEGATFNSNAFTFEDVLKQALVNITFNCFDTNSAISSISNILMESGKTKSDKAKAIERLVDTYTVFDEVNTPDKPQKEQVKEDKKTLKAFANLVLGLSANLIDLFGSVEDIDDDLKKLQIVGDTYDEKRDELAKVWGDEIHIIDDCKSVYDAIILMSIKEPGLTISQSKVKAFDKHKEDLVILKSLLKLDRNVYNEMFKSDKKGLHNYVHYIKQGRTEETSCSREDFYKYTKKIVEGLADSKDKEYILNEIELQTLLPLQRIKDNGVIPYQLHLEELKVILDKCGPKFPFLHTVSDGFSVTEKLIKMLEFRIPYYVGPLNTHHNIDNGGFSWAVRKQAGRVTPWNFEEKIDREKSAAAFIKNLTNKCTYLFGEDVLPKSSLLYSEFMLLNELNNVRIDGKALAQGVKQHLIDSIFKQDHKKMTKNRIELFLKDNNYITKKHKPEITGLDGEIKNDLTSYRDMVRILGNNFDVSMAEDIITDITIFGESKKMLRQTLRNKFGSQLNDETIKKLSKLRYRDWGRLSKKLLKGIDGCDKAGNGAPKTIIELMRNDSYNLMEILGDKFSFMECIEEENAKLAQGQVVNPHDIIDELALSPAVKRAVWQALRIVDEVAHIKKALPSRIFVEVARTNKSEKKKKDSRQKRLSDLYSAIKKDDVLQSGLQDKEFGALKSGLANYDDAALRSKKLYLYYTQMGRCAYTGNIIDLNQLNTDNYDIDHIYPRSLTKDDSFDNLVLCERTANAKKSDIYPIDNRIQTKQKPFWAFLKHQGLISERKYERLTRIAPLTADDLSGFIARQLVETNQSVKATTTLLRRLYPDIDVVFVKAENVSDFRHNNNFIKVRSLNHHHHAKDAYLNIVVGNVYHEKFTRNFRLFFKKNGANRTYNLAKMFNYDVICTNAQDGKAWDVKTSMNTVKKMMASNDVRVTRRLLEQSGALADATIYKASVAAKAKDGAYIGMKTKYSVFADVTKYGGMTKIKNAYSIIVQYTGKKGEEIKEIVPLPIYLINRNATDIELIDYVKSVIPKAKDISIKYRKLCINQLVKVNGFYYYLGGKTNDKIYIDNAIELVVPHDIATYIKLLDKYDLLRKENKTLKASSITTSIYNINTSTVVSLNKVGIDVFDYFMSKLRTPLYMKMKGNKVDELSSTGRSKFIKMTLEEQSIYLLEVLNLLTNSKTTFDVKPLGITGSRSTIGVKIHNLDEFKIINESITGLYSNEVTIV

SEQ ID NO: 310 - protein, 1363 aa, Lactobacillus rhamnosus
MTKLNQPYGIGLDIGSNSIGFAVVDANSHLLRLKGETAIGARLFREGQSAADRRGSRTTRRRLSRTRWRLSFLRDFFAPHITKIDPDFFLRQKYSEISPKDKDRFKYEKRLFNDRTDAEFYEDYPSMYHLRLHLMTHTHKADPREIFLAIHHILKSRGHFLTPGAAKDFNTDKVDLEDIFPALTEAYAQVYPDLELTFDLAKADDFKAKLLDEQATPSDTQKALVNLLLSSDGEKEIVKKRKQVLTEFAKAITGLKTKFNLALGTEVDEADASNWQFSMGQLDDKWSNIETSMTDQGTEIFEQIQELYRARLLNGIVPAGMSLSQAKVADYGQHKEDLELFKTYLKKLNDHELAKTIRGLYDRYINGDDAKPFLREDFVKALTKEVTAHPNEVSEQLLNRMGQANFMLKQRTKANGAIPIQLQQRELDQIIANQSKYYDWLAAPNPVEAHRWKMPYQLDELLNFHIPYYVGPLITPKQQAESGENVFAWMVRKDPSGNITPYNFDEKVDREASANTFIQRMKTTDTYLIGEDVLPKQSLLYQKYEVLNELNNVRINNECLGTDQKQRLIREVFERHSSVTIKQVADNLVAHGDFARRPEIRGLADEKRFLSSLSTYHQLKEILHEAIDDPTKLLDIENIITWSTVFEDHTIFETKLAEIEWLDPKKINELSGIRYRGWGQFSRKLLDGLKLGNGHTVIQELMLSNHNLMQILADETLKETMTELNQDKLKTDDIEDVINDAYTSPSNKKALRQVLRVVEDIKHAANGQDPSWLFIETADGTGTAGKRTQSRQKQIQTVYANAAQELIDSAVRGELEDKIADKASFTDRLVLYFMQGGRDIYTGAPLNIDQLSHYDIDHILPQSLIKDDSLDNRVLVNATINREKNNVFASTLFAGKMKATWRKWHEAGLISGRKLRNLMLRPDEIDKFAKGFVARQLVETRQIIKLTEQIAAAQYPNTKIIAVKAGLSHQLREELDFPKNRDVNHYHHAFDAFLAARIGTYLLKRYPKLAPFFTYGEFAKVDVKKFREFNFIGALTHAKKNIIAKDTGEIVWDKERDIRELDRIYNFKRMLITHEVYFETADLFKQTIYAAKDSKERGGSKQLIPKKQGYPTQVYGGYTQESGSYNALVRVAEADTTAYQVIKISAQNASKIASANLKSREKGKQLLNEIVVKQLAKRRKNWKPSANSFKIVIPRFGMGTLFQNAKYGLFMVNSDTYYRNYQELWLSRENQKLLKKLFSIKYEKTQMNHDALQVYKAIIDQVEKFFKLYDINQFRAKLSDAIERFEKLPINTDGNKIGKTETLRQILIGLQANGTRSNVKNLGIKTDLGLLQVGSGIKLDKDTQIVYQSPSGLFKRRIPLADL

SEQ ID NO: 311 - protein, 1365 aa, Filifactor alocis
MTKEYYLGLDVGTNSVGWAVTDSQYNLCKFKKKDMWGIRLFESANTAKDRRLQRGNRRRLERKKQRIDLLQEIFSPEICKIDPTFFIRLNESRLHLEDKSNDFKYPLFIEKDYSDIEYYKEFPTIFHLRKHLIESEEKQDIRLIYLALHNIIKTRGHFLIDGDLQSAKQLRPILDTFLLSLQEEQNLSVSLSENQKDEYEEILKNRSIAKSEKVKKLKNLFEISDELEKEEKKAQSAVIENFCKFIVGNKGDVCKFLRVSKEELEIDSFSFSEGKYEDDIVKNLEEKVPEKVYLFEQMKAMYDWNILVDILETEEYISFAKVKQYEKHKTNLRLLRDIILKYCTKDEYNRMFNDEKEAGSYTAYVGKLKKNNKKYWIEKKRNPEEFYKSLGKLLDKIEPLKEDLEVLTMMIEECKNHTLLPIQKNKDNGVIPHQVHEVELKKILENAKKYYSFLTETDKDGYSVVQKIESIFRFRIPYYVGPLSTRHQEKGSNVWMVRKPGREDRIYPWNMEEIIDFEKSNENFITRMTNKCTYLIGEDVLPKHSLLYSKYMVLNELNNVKVRGKKLPTSLKQKVFEDLFENKSKVTGKNLLEYLQIQDKDIQIDDLSGFDKDFKTSLKSYLDFKKQIFGEEIEKESIQNMIEDIIKWITIYGNDKEMLKRVIRANYSNQLTEEQMKKITGFQYSGWGNFSKMFLKGISGSDVSTGETFDIITAMWETDNNLMQILSKKFTFMDNVEDFNSGKVGKIDKITYDSTVKEMFLSPENKRAVWQTIQVAEEIKKVMGCEPKKIFIEMARGGEKVKKRTKSRKAQLLELYAACEEDCRELIKEIEDRDERDFNSMKLFLYYTQFGKCMYSGDDIDINELIRGNSKWDRDHIYPQSKIKDDSIDNLVLVNKTYNAKKSNELLSEDIQKKMHSFWLSLLNKKLITKSKYDRLTRKGDFTDEELSGFIARQLVETRQSTKAIADIFKQIYSSEVVYVKSSLVSDFRKKPLNYLKSRRVNDYHHAKDAYLNIVVGNVYNKKFTSNPIQWMKKNRDTNYSLNKVFEHDVVINGEVIWEKCTYHEDTNTYDGGTLDRIRKIVERDNILYTEYAYCEKGELFNATIQNKNGNSTVSLKKGLDVKKYGGYFSANTSYFSLIEFEDKKGDRARHIIGVPIYIANMLEHSPSAFLEYCEQKGYQNVRILVEKIKKNSLLIINGYPLRIRGENEVDTSFKRAIQLKLDQKNYELVRNIEKFLEKYVEKKGNYPIDENRDHITHEKMNQLYEVLLSKMKKFNKKGMADPSDRIEKSKPKFIKLEDLIDKINVINKMLNLLRCDNDTKADLSLIELPKNAGSFVVKKNTIGKSKIILVNQSVTGLYENRREL

SEQ ID NO: 312 - protein, 1389 aa, Oenococcus kitaharae
MARDYSVGLDIGTSSVGWAAIDNKYHLIRAKSKNLIGVRLFDSAVTAEKRRGYRTTRRRLSRRHWRLRLLNDIFAGPLTDFGDENFLARLKYSWVHPQDQSNQAHFAAGLLFDSKEQDKDFYRKYPTIYHLRLALMNDDQKHDLREVYLAIHHLVKYRGHFLIEGDVKADSAFDVHTFADAIQRYAESNNSDENLLGKIDEKKLSAALTDKHGSKSQRAETAETAFDILDLQSKKQIQAILKSVVGNQANLMAIFGLDSSAISKDEQKNYKFSFDDADIDEKIADSEALLSDTEFEFLCDLKAAFDGLTLKMLLGDDKTVSAAMVRRFNEHQKDWEYIKSHIRNAKNAGNGLYEKSKKFDGINAAYLALQSDNEDDRKKAKKIFQDEISSADIPDDVKADFLKKIDDDQFLPIQRTKNNGTIPHQLHRNELEQIIEKQGIYYPFLKDTYQENSHELNKITALINFRVPYYVGPLVEEEQKIADDGKNIPDPTNHWMVRKSNDTITPWNLSQVVDLDKSGRRFIERLTGTDTYLIGEPTLPKNSLLYQKFDVLQELNNIRVSGRRLDIRAKQDAFEHLFKVQKTVSATNLKDFLVQAGYISEDTQIEGLADVNGKNFNNALTTYNYLVSVLGREFVENPSNEELLEEITELQTVFEDKKVLRRQLDQLDGLSDHNREKLSRKHYTGWGRISKKLLTTKIVQNADKIDNQTFDVPRMNQSIIDTLYNTKMNLMEIINNAEDDFGVRAWIDKQNTTDGDEQDVYSLIDELAGPKEIKRGIVQSFRILDDITKAVGYAPKRVYLEFARKTQESHLTNSRKNQLSTLLKNAGLSELVTQVSQYDAAALQNDRLYLYFLQQGKDMYSGEKLNLDNLSNYDIDHIIPQAYTKDNSLDNRVLVSNITNRRKSDSSNYLPALIDKMRPFWSVLSKQGLLSKHKFANLTRTRDFDDMEKERFIARSLVETRQIIKNVASLIDSHFGGETKAVAIRSSLTADMRRYVDIPKNRDINDYHHAFDALLFSTVGQYTENSGLMKKGQLSDSAGNQYNRYIKEWIHAARLNAQSQRVNPFGFVVGSMRNAAPGKLNPETGEITPEENADWSIADLDYLHKVMNFRKITVTRRLKDQKGQLYDESRYPSVLHDAKSKASINFDKHKPVDLYGGFSSAKPAYAALIKFKNKFRLVNVLRQWTYSDKNSEDYILEQIRGKYPKAEMVLSHIPYGQLVKKDGALVTISSATELHNFEQLWLPLADYKLINTLLKTKEDNLVDILHNRLDLPEMTIESAFYKAFDSILSFAFNRYALHQNALVKLQAHRDDFNALNYEDKQQTLERILDALHASPASSDLKKINLSSGFGRLFSPSHFTLADTDEFIFQSVTGLFSTQKTVAQLYQETK

SEQ ID NO: 313 - protein, 1323 aa, Fructobacillus fructosus
MVYDVGLDIGTGSVGWVALDENGKLARAKGKNLVGVRLFDTAQTAADRRGFRTTRRRLSRRKWRLRLLDELFSAEINEIDSSFFQRLKYSYVHPKDEENKAHYYGGYLFPTEEETKKFHRSYPTIYHLRQELMAQPNKRFDIREIYLAIHHLVKYRGHFLSSQEKITIGSTYNPEDLANAIEVYADEKGLSWELNNPEQLTEIISGEAGYGLNKSMKADEALKLFEFDNNQDKVAIKTLLAGLTGNQIDFAKLFGKDISDKDEAKLWKLKLDDEALEEKSQTILSQLTDEEIELFHAVVQAYDGFVLIGLLNGADSVSAAMVQLYDQHREDRKLLKSLAQKAGLKHKRFSEIYEQLALATDEATIKNGISTARELVEESNLSKEVKEDTLRRLDENEFLPKQRTKANSVIPHQLHLAELQKILQNQGQYYPFLLDTFEKEDGQDNKIEELLRFRIPYYVGPLVTKKDVEHAGGDADNHWVERNEGFEKSRVTPWNFDKVFNRDKAARDFIERLTGNDTYLIGEKTLPQNSLRYQLFTVLNELNNVRVNGKKFDSKTKADLINDLFKARKTVSLSALKDYLKAQGKGDVTITGLADESKFNSSLSSYNDLKKTFDAEYLENEDNQETLEKIIEIQTVFEDSKIASRELSKLPLDDDQVKKLSQTHYTGWGRLSEKLLDSKIIDERGQKVSILDKLKSTSQNFMSIINNDKYGVQAWITEQNTGSSKLTFDEKVNELTTSPANKRGIKQSFAVLNDIKKAMKEEPRRVYLEFAREDQTSVRSVPRYNQLKEKYQSKSLSEEAKVLKKTLDGNKNKMSDDRYFLYFQQQGKDMYTGRPINFERLSQDYDIDHIIPQAFTKDDSLDNRVLVSRPENARKSDSFAYTDEVQKQDGSLWTSLLKSGFINRKKYERLTKAGKYLDGQKTGFIARQLVETRQIIKNVASLIEGEYENSKAVAIRSEITADMRLLVGIKKHREINSFHHAFDALLITAAGQYMQNRYPDRDSTNVYNEFDRYTNDYLKNLRQLSSRDEVRRLKSFGFVVGTMRKGNEDWSEENTSYLRKVMMFKNILTTKKTEKDRGPLNKETIFSPKSGKKLIPLNSKRSDTALYGGYSNVYSAYMTLVRANGKNLLIKIPISIANQIEVGNLKINDYIVNNPAIKKFEKILISKLPLGQLVNEDGNLIYLASNEYRHNAKQLWLSTTDADKIASISENSSDEELLEAYDILTSENVKNRFPFFKKDIDKLSQVRDEFLDSDKRIAVIQTILRGLQIDAAYQAPVKIISKKVSDWHKLQQSGGIKLSDNSEMIYQSATGIFETRVKISDLL

SEQ ID NO: 314 - protein, 1329 aa, Catenibacterium mitsuokai
IVDYCIGLDLGTGSVGWAVVDMNHRLMKRNGKHLWGSRLFSNAETAANRRASRSIRRRYNKRRERIRLLRAILQDMVLEKDPTFFIRLEHTSFLDEEDKAKYLGTDYKDNYNLFIDEDFNDYTYYHKYPTIYHLRKALCESTEKADPRLIYLALHHIVKYRGNFLYEGQKFNMDASNIEDKLSDIFTQFTSFNNIPYEDDEKKNLEILEILKKPLSKKAKVDEVMTLIAPEKDYKSAFKELVTGIAGNKMNVTKMILCEPIKQGDSEIKLKFSDSNYDDQFSEVEKDLGEYVEFVDALHNVYSWVELQTIMGATHTDNASISEAMVSRYNKHHDDLKLLKDCIKNNVPNKYFDMFRNDSEKSKGYYNYINRPSKAPVDEFYKYVKKCIEKVDTPEAKQILNDIELENFLLKQNSRTNGSVPYQMQLDEMIKIIDNQAEYYPILKEKREQLLSILTFRIPYYFGPLNETSEHAWIKRLEGKENQRILPWNYQDIVDVDATAEGFIKRMRSYCTYFPDEEVLPKNSLIVSKYEVYNELNKIRVDDKLLEVDVKNDIYNELFMKNKTVTEKKLKNWLVNNQCCSKDAEIKGFQKENQFSTSLTPWIDFTNIFGKIDQSNFDLIENIIYDLTVFEDKKIMKRRLKKKYALPDDKVKQILKLKYKDWSRLSKKLLDGIVADNRFGSSVTVLDVLEMSRLNLMEIINDKDLGYAQMIEEATSCPEDGKFTYEEVERLAGSPALKRGIWQSLQIVEEITKVMKCRPKYIYIEFERSEEAKERTESKIKKLENVYKDLDEQTKKEYKSVLEELKGFDNTKKISSDSLFLYFTQLGKCMYSGKKLDIDSLDKYQIDHIVPQSLVKDDSFDNRVLVVPSENQRKLDDLVVPFDIRDKMYRFWKLLFDHELISPKKFYSLIKTEYTERDEERFINRQLVETRQITKNVTQIIEDHYSTTKVAAIRANLSHEFRVKNHIYKNRDINDYHHAHDAYIVALIGGFMRDRYPNMHDSKAVYSEYMKMFRKNKNDQKRWKDGFVINSMNYPYEVDGKLIWNPDLINEIKKCFYYKDCYCTTKLDQKSGQLFNLTVLSNDAHADKGVTKAVVPVNKNRSDVHKYGGFSGLQYTIVAIEGQKKKGKKTELVKKISGVPLHLKAASINEKINYIEEKEGLSDVRIIKDNIPVNQMIEMDGGEYLLTSPTEYVNARQLVLNEKQCALIADIYNAIYKQDYDNLDDILMIQLYIELTNKMKVLYPAYRGIAEKFESMNENYVVISKEEKANIIKQMLIVMHRGPQNGNIVYDDFKISDRIGRLKTKNHNLNNIVFISQSPTGIYTKKYKL

SEQ ID NO: 315 - protein, 1348 aa, Finegoldia magna
MKSEKKYYIGLDVGTNSVGWAVTDEFYNILRAKGKDLWGVRLFEKADTAANTRIFRSGRRRNDRKGMRLQILREIFEDEIKKVDKDFYDRLDESKFWAEDKKVSGKYSLFNDKNFSDKQYFEKFPTIFHLRKYLMEEHGKVDIRYYFLAINQMMKRRGHFLIDGQISHVTDDKPLKEQLILLINDLLKIELEEELMDSIFEILADVNEKRTDKKNNLKELIKGQDFNKQEGNILNSIFESIVTGKAKIKNIISDEDILEKIKEDNKEDFVLTGDSYEENLQYFEEVLQENITLFNTLKSTYDFLILQSILKGKSTLSDAQVERYDEHKKDLEILKKVIKKYDEDGKLFKQVFKEDNGNGYVSYIGYYLNKNKKITAKKKISNIEFTKYVKGILEKQCDCEDEDVKYLLGKIEQENFLLKQISSINSVIPHQIHLFELDKILENLAKNYPSFNNKKEEFTKIEKIRKTFTFRIPYYVGPLNDYHKNNGGNAWIFRNKGEKIRPWNFEKIVDLHKSEEEFIKRMLNQCTYLPEETVLPKSSILYSEYMVLNELNNLRINGKPLDTDVKLKLIEELFKKKTKVTLKSIRDYMVRNNFADKEDFDNSEKNLEIASNMKSYIDFNNILEDKFDVEMVEDLIEKITIHTGNKKLLKKYIEETYPDLSSSQIQKIINLKYKDWGRLSRKLLDGIKGTKKETEKTDTVINFLRNSSDNLMQIIGSQNYSFNEYIDKLRKKYIPQEISYEVVENLYVSPSVKKMIWQVIRVTEEITKVMGYDPDKIFIEMAKSEEEKKTTISRKNKLLDLYKAIKKDERDSQYEKLLTGLNKLDDSDLRSRKLYLYYTQMGRDMYTGEKIDLDKLFDSTHYDKDHIIPQSMKKDDSIINNLVLVNKNANQTTKGNIYPVPSSIRNNPKIYNYWKYLMEKEFISKEKYNRLIRNTPLTNEELGGFINRQLVETRQSTKAIKELFEKFYQKSKIIPVKASLASDLRKDMNTLKSREVNDLHHAHDAFLNIVAGDVWNREFTSNPINYVKENREGDKVKYSLSKDFTRPRKSKGKVIWTPEKGRKLIVDTLNKPSVLISNESHVKKGELFNATIAGKKDYKKGKIYLPLKKDDRLQDVSKYGGYKAINGAFFFLVEHTKSKKRIRSIELFPLHLLSKFYEDKNTVLDYAINVLQLQDPKIIIDKINYRTEIIIDNFSYLISTKSNDGSITVKPNEQMYWRVDEISNLKKIENKYKKDAILTEEDRKIMESYIDKIYQQFKAGKYKNRRTTDTIIEKYEIIDLDTLDNKQLYQLLVAFISLSYKTSNNAVDFTVIGLGTECGKPRITNLPDNTYLVYKSITGIYEKRIRIK

SEQ ID NO: 316 - protein, 1384 aa, Coriobacterium glomerans
MKLRGIEDDYSIGLDMGTSSVGWAVTDERGTLAHFKRKPTWGSRLFREAQTAAVARMPRGQRRRYVRRRWRLDLLQKLFEQQMEQADPDFFIRLRQSRLLRDDRAEEHADYRWPLFNDCKFTERDYYQRFPTIYHVRSWLMETDEQADIRLIYLALHNIVKHRGNFLREGQSLSAKSARPDEALNHLRETLRVWSSERGFECSIADNGSILAMLTHPDLSPSDRRKKIAPLFDVKSDDAAADKKLGIALAGAVIGLKTEFKNIFGDFPCEDSSIYLSNDEAVDAVRSACPDDCAELFDRLCEVYSAYVLQGLLSYAPGQTISANMVEKYRRYGEDLALLKKLVKIYAPDQYRMFFSGATYPGTGIYDAAQARGYTKYNLGPKKSEYKPSESMQYDDFRKAVEKLFAKTDARADERYRMMMDRFDKQQFLRRLKTSDNGSIYHQLHLEELKAIVENQGRFYPFLKRDADKLVSLVSFRIPYYVGPLSTRNARTDQHGENRFAWSERKPGMQDEPIFPWNWESIIDRSKSAEKFILRMTGMCTYLQQEPVLPKSSLLYEEFCVLNELNGAHWSIDGDDEHRFDAADREGIIEELFRRKRTVSYGDVAGWMERERNQIGAHVCGGQGEKGFESKLGSYIFFCKDVFKVERLEQSDYPMIERIILWNTLFEDRKILSQRLKEEYGSRLSAEQIKTICKKRFTGWGRLSEKFLTGITVQVDEDSVSIMDVLREGCPVSGKRGRAMVMMEILRDEELGFQKKVDDFNRAFFAENAQALGVNELPGSPAVRRSLNQSIRIVDEIASIAGKAPANIFIEVTRDEDPKKKGRRTKRRYNDLKDALEAFKKEDPELWRELCETAPNDMDERLSLYFMQRGKCLYSGRAIDIHQLSNAGIYEVDHIIPRTYVKDDSLENKALVYREENQRKTDMLLIDPEIRRRMSGYWRMLHEAKLIGDKKFRNLLRSRIDDKALKGFIARQLVETGQMVKLVRSLLEARYPETNIISVKASISHDLRTAAELVKCREANDFHHAHDAFLACRVGLFIQKRHPCVYENPIGLSQVVRNYVRQQADIFKRCRTIPGSSGFIVNSFMTSGFDKETGEIFKDDWDAEAEVEGIRRSLNFRQCFISRMPFEDHGVFWDATIYSPRAKKTAALPLKQGLNPSRYGSFSREQFAYFFIYKARNPRKEQTLFEFAQVPVRLSAQIRQDENALERYARELAKDQGLEFIRIERSKILKNQLIEIDGDRLCITGKEEVRNACELAFAQDEMRVIRMLVSEKPVSRECVISLFNRILLHGDQASRRLSKQLKLALLSEAFSEASDNVQRNVVLGLIAIFNGSTNMVNLSDIGGSKFAGNVRIKYKKELASPKVNVHLIDQSVTGMFERRTKIGL

SEQ ID NO: 317 - protein, 1391 aa, Eubacterium yurii
MENKQYYIGLDVGTNSVGWAVTDTSYNLLRAKGKDMWGARLFEKANTAAERRTKRTSRRRSEREKARKAMLKELFADEINRVDPSFFIRLEESKFFLDDRSENNRQRYTLFNDATFTDKDYYEKYKTIFHLRSALINSDEKFDVRLVFLAILNLFSHRGHFLNASLKGDGDIQGMDVFYNDLVESCEYFEIELPRITNIDNFEKILSQKGKSRTKILEELSEELSISKKDKSKYNLIKLISGLEASVVELYNIEDIQDENKKIKIGFRESDYEESSLKVKEIIGDEYFDLVERAKSVHDMGLLSNIIGNSKYLCEARVEAYENHHKDLLKIKELLKKYDKKAYNDMFRKMTDKNYSAYVGSVNSNIAKERRSVDKRKIEDLYKYIEDTALKNIPDDNKDKIEILEKIKLGEFLKKQLTASNGVIPNQLQSRELRAILKKAENYLPFLKEKGEKNLTVSEMIIQLFEFQIPYYVGPLDKNPKKDNKANSWAKIKQGGRILPWNFEDKVDVKGSRKEFIEKMVRKCTYISDEHTLPKQSLLYEKFMVLNEINNIKIDGEKISVEAKQKIYNDLFVKGKKVSQKDIKKELISLNIMDKDSVLSGTDTVCNAYLSSIGKFTGVFKEEINKQSIVDMIEDIIFLKTVYGDEKRFVKEEIVEKYGDEIDKDKIKRILGFKFSNWGNLSKSFLELEGADVGTGEVRSIIQSLWETNFNLMELLSSRFTYMDELEKRVKKLEKPLSEWTIEDLDDMYLSSPVKRMIWQSMKIVDEIQTVIGYAPKRIFVEMTRSEGEKVRTKSRKDRLKELYNGIKEDSKQWVKELDSKDESYFRSKKMYLYYLQKGRCMYSGEVIELDKLMDDNLYDIDHIYPRSFVKDDSLDNLVLVKKEINNRKQNDPITPQIQASCQGFWKILHDQGFMSNEKYSRLTRKTQEFSDEEKLSFINRQIVETGQATKCMAQILQKSMGEDVDVVFSKARLVSEFRHKFELFKSRLINDFHHANDAYLNIVVGNSYFVKFTRNPANFIKDARKNPDNPVYKYHMDRFFERDVKSKSEVAWIGQSEGNSGTIVIVKKTMAKNSPLITKKVEEGHGSITKETIVGVKEIKFGRNKVEKADKTPKKPNLQAYRPIKTSDERLCNILRYGGRTSISISGYCLVEYVKKRKTIRSLEAIPVYLGRKDSLSEEKLLNYFRYNLNDGGKDSVSDIRLCLPFISTNSLVKIDGYLYYLGGKNDDRIQLYNAYQLKMKKEEVEYIRKIEKAVSMSKFDEIDREKNPVLTEEKNIELYNKIQDKFENTVFSKRMSLVKYNKKDLSFGDFLKNKKSKFEEIDLEKQCKVLYNIIFNLSNLKEVDLSDIGGSKSTGKCRCKKNITNYKEFKLIQQSITGLYSCEKDLMTI

SEQ ID NO: 318 - protein, 1364 aa, Peptoniphilus duerdenii
MKNLKEYYIGLDIGTASVGWAVTDESYNIPKFNGKKMWGVRLFDDAKTAEERRTQRGSRRRLNRRKERINLLQDLFATEISKVDPNFFLRLDNSDLYREDKDEKLKSKYTLFNDKDFKDRDYHKKYPTIHHLIMDLIEDEGKKDIRLLYLACHYLLKNRGHFIFEGQKFDTKNSFDKSINDLKIHLRDEYNIDLEFNNEDLIEIITDTTLNKTNKKKELKNIVGDTKFLKAISAIMIGSSQKLVDLFEDGEFEETTVKSVDFSTTAFDDKYSEYEEALGDTISLLNILKSIYDSSILENLLKDADKSKDGNKYISKAFVKKFNKHGKDLKTLKRIIKKYLPSEYANIFRNKSINDNYVAYTKSNITSNKRTKASKFTKQEDFYKFIKKHLDTIKETKLNSSENEDLKLIDEMLTDIEFKTFIPKLKSSDNGVIPYQLKLMELKKILDNQSKYYDFLNESDEYGTVKDKVESIMEFRIPYYVGPLNPDSKYAWIKRENTKITPWNFKDIVDLDSSREEFIDRLIGRCTYLKEEKVLPKASLIYNEFMVLNELNNLKLNEFLITEEMKKAIFEELFKTKKKVTLKAVSNLLKKEFNLTGDILLSGTDGDFKQGLNSYIDFKNIIGDKVDRDDYRIKIEEIIKLIVLYEDDKTYLKKKIKSAYKNDFTDDEIKKIAALNYKDWGRLSKRFLTGIEGVDKTTGEKGSIIYFMREYNLNLMELMSGHYTFTEEVEKLNPVENRELCYEMVDELYLSPSVKRMLWQSLRVVDEIKRIIGKDPKKIFIEMARAKEAKNSRKESRKNKLLEFYKFGKKAFINEIGEERYNYLLNEINSEEESKFRWDNLYLYYTQLGRCMYSLEPIDLADLKSNNIYDQDHIYPKSKIYDDSLENRVLVKKNLNHEKGNQYPIPEKVLNKNAYGFWKILFDKGLIGQKKYTRLTRRTPFEERELAEFIERQIVETRQATKETANLLKNICQDSEIVYSKAENASRFRQEFDIIKCRTVNDLHHMHDAYLNIVVGNVYNTKFTKNPLNFIKDKDNVRSYNLENMFKYDVVRGSYTAWIADDSEGNVKAATIKKVKRELEGKNYRFTRMSYIGTGGLYDQNLMRKGKGQIPQKENTNKSNIEKYGGYNKASSAYFALIESDGKAGRERTLETIPIMVYNQEKYGNTEAVDKYLKDNLELQDPKILKDKIKINSLIKLDGFLYNIKGKTGDSLSIAGSVQLIVNKEEQKLIKKMDKFLVKKKDNKDIKVTSFDNIKEEELIKLYKTLSDKLNNGIYSNKRNNQAKNISEALDKFKEISIEEKIDVLNQIILLFQSYNNGCNLKSIGLSAKTGVVFIPKKLNYKECKLINQSITGLFENEVDLLNL

SEQ ID NO: 319 - protein, 1358 aa, Acidaminococcus sp.
MGKMYYLGLDIGTNSVGYAVTDPSYHLLKFKGEPMWGAHVFAAGNQSAERRSFRTSRRRLDRRQQRVKLVQEIFAPVISPIDPRFFIRLHESALWRDDVAETDKHIFFNDPTYTDKEYYSDYPTIHHLIVDLMESSEKHDPRLVYLAVAWLVAHRGHFLNEVDKDNIGDVLSFDAFYPEFLAFLSDNGVSPWVCESKALQATLLSRNSVNDKYKALKSLIFGSQKPEDNFDANISEDGLIQLLAGKKVKVNKLFPQESNDASFTLNDKEDAIEEILGTLTPDECEWIAHIRRLFDWAIMKHALKDGRTISESKVKLYEQHHHDLTQLKYFVKTYLAKEYDDIFRNVDSETTKNYVAYSYHVKEVKGTLPKNKATQEEFCKYVLGKVKNIECSEADKVDFDEMIQRLTDNSFMPKQVSGENRVIPYQLYYYELKTILNKAASYLPFLTQCGKDAISNQDKLLSIMTFRIPYFVGPLRKDNSEHAWLERKAGKIYPWNFNDKVDLDKSEEAFIRRMTNTCTYYPGEDVLPLDSLIYEKFMILNEINNIRIDGYPISVDVKQQVFGLFEKKRRVTVKDIQNLLLSLGALDKHGKLTGIDTTIHSNYNTYHHFKSLMERGVLTRDDVERIVERMTYSDDTKRVRLWLNNNYGTLTADDVKHISRLRKHDFGRLSKMFLTGLKGVHKETGERASILDFMWNTNDNLMQLLSECYTFSDEITKLQEAYYAKAQLSLNDFLDSMYISNAVKRPIYRTLAVVNDIRKACGTAPKRIFIEMARDGESKKKRSVTRREQIKNLYRSIRKDFQQEVDFLEKILENKSDGQLQSDALYLYFAQLGRDMYTGDPIKLEHIKDQSFYNIDHIYPQSMVKDDSLDNKVLVQSEINGEKSSRYPLDAAIRNKMKPLWDAYYNHGLISLKKYQRLTRSTPFTDDEKWDFINRQLVETRQSTKALAILLKRKFPDTEIVYSKAGLSSDFRHEFGLVKSRNINDLHHAKDAFLAIVTGNVYHERFNRRWFMVNQPYSVKTKTLFTHSIKNGNFVAWNGEEDLGRIVKMLKQNKNTIHFTRFSFDRKEGLFDIQPLKASTGLVPRKAGLDVVKYGGYDKSTAAYYLLVRFTLEDKKTQHKLMMIPVEGLYKARIDHDKEFLTDYAQTTISEILQKDKQKVINIMFPMGTRHIKLNSMISIDGFYLSIGGKSSKGKSVLCHAMVPLIVPHKIECYIKAMESFARKFKENNKLRIVEKFDKITVEDNLNLYELFLQKLQHNPYNKFFSTQFDVLTNGRSTFTKLSPEEQVQTLLNILSIFKTCRSSGCDLKSINGSAQAARIMISADLTGLSKKYSDIRLVEQSASGLFVSKSQNLLEYL

SEQ ID NO: 320 - protein, 1356 aa, Lactobacillus farciminis
MTKKEQPYNIGLDIGTSSVGWAVTNDNYDLLNIKKKNLWGVRLFEEAQTAKETRLNRSTRRRYRRRKNRINWLNEIFSEELAKTDPSFLIRLQNSWVSKKDPDRKRDKYNLFIDGPYTDKEYYREFPTIFHLRKELILNKDKADIRLIYLALHNILKYRGNFTYEHQKFNISNLNNNLSKELIELNQQLIKYDISFPDDCDWNHISDILIGRGNATQKSSNILKDFTLDKETKKLLKEVINLILGNVAHLNTIFKTSLTKDEEKLNFSGKDIESKLDDLDSILDDDQFTVLDAANRIYSTITLNEILNGESYFSMAKVNQYENHAIDLCKLRDMWHTTKNEEAVEQSRQAYDDYINKPKYGTKELYTSLKKFLKVALPTNLAKEAEEKISKGTYLVKPRNSENGVVPYQLNKIEMEKIIDNQSQYYPFLKENKEKLLSILSFRIPYYVGPLQSAEKNPFAWMERKSNGHARPWNFDEIVDREKSSNKFIRRMTVTDSYLVGEPVLPKNSLIYQRYEVLNELNNIRITENLKTNPIGSRLTVETKQRIYNELFKKYKKVTVKKLTKWLIAQGYYKNPILIGLSQKDEFNSTLTTYLDMKKIFGSSFMEDNKNYDQIEELIEWLTIFEDKQILNEKLHSSKYSYTPDQIKKISNMRYKGWGRLSKKILMDITTETNTPQLLQLSNYSILDLMWATNNNFISIMSNDKYDFKNYIENHNLNKNEDQNISDLVNDIHVSPALKRGITQSIKIVQEIVKFMGHAPKHIFIEVTRETKKSEITTSREKRIKRLQSKLLNKANDFKPQLREYLVPNKKIQEELKKHKNDLSSERIMLYFLQNGKSLYSEESLNINKLSDYQVDHILPRTYIPDDSLENKALVLAKENQRKADDLLLNSNVIDRNLERWTYMLNNNMIGLKKFKNLTRRVITDKDKLGFIHRQLVQTSQMVKGVANILDNMYKNQGTTCIQARANLSTAFRKALSGQDDTYHFKHPELVKNRNVNDFHHAQDAYLASFLGTYRLRRFPTNEMLLMNGEYNKFYGQVKELYSKKKKLPDSRKNGFIISPLVNGTTQYDRNTGEIIWNVGFRDKILKIFNYHQCNVTRKTEIKTGQFYDQTIYSPKNPKYKKLIAQKKDMDPNIYGGFSGDNKSSITIVKIDNNKIKPVAIPIRLINDLKDKKTLQNWLEENVKHKKSIQIIKNNVPIGQIIYSKKVGLLSLNSDREVANRQQLILPPEHSALLRLLQIPDEDLDQILAFYDKNILVEILQELITKMKKFYPFYKGEREFLIANIENFNQATTSEKVNSLEELITLLHANSTSAHLIFNNIEKKAFGRKTHGLTLNNTDFIYQSVTGLYETRIHIE

SEQ ID NO: 321 - protein, 1421 aa, Streptococcus sanguinis
MTKFNKNYSIGLDIGVSSVGYAVVTEDYRVPAFKFKVLGNTEKEKIKKNLIGSTTFVSAQPAKGTRVFRVNRRRIDRRNHRITYLRDIFQKEIEKVDKNFYRRLDESFRVLGDKSEDLQIKQPFFGDKELETAYHKKYPTIYHLRKHLADADKNSPVADIREVYMAISHILKYRGHFLTLDKINPNNINMQNSWIDFIESCQEVFDLEISDESKNIADIFKSSENRQEKVKKILPYFQQELLKKDKSIFKQLLQLLFGLKTKFKDCFELEEEPDLNFSKENYDENLENFLGSLEEDFSDVFAKLKVLRDTILLSGMLTYTGATHARFSATMVERYEEHRKDLQRFKFFIKQNLSEQDYLDIFGRKTQNGFDVDKETKGYVGYITNKMVLTNPQKQKTIQQNFYDYISGKITGIEGAEYFLNKISDGTFLRKLRTSDNGAIPNQIHAYELEKIIERQGKDYPFLLENKDKLLSILTFKIPYYVGPLAKGSNSRFAWIKRATSSDILDDNDEDTRNGKIRPWNYQKLINMDETRDAFITNLIGNDIILLNEKVLPKRSLIYEEVMLQNELTRVKYKDKYGKAHFFDSELRQNIINGLFKNNSKRVNAKSLIKYLSDNHKDLNAIEIVSGVEKGKSFNSTLKTYNDLKTIFSEELLDSEIYQKELEEIIKVITVFDDKKSIKNYLTKFFGHLEILDEEKINQLSKLRYSGWGRYSAKLLLDIRDEDTGFNLLQFLRNDEENRNLTKLISDNTLSFEPKIKDIQSKSTIEDDIFDEIKKLAGSPAIKRGILNSIKIVDELVQIIGYPPHNIVIEMARENMTTEEGQKKAKTRKTKLESALKNIENSLLENGKVPHSDEQLQSEKLYLYYLQNGKDMYTLDKTGSPAPLYLDQLDQYEVDHIIPYSFLPIDSIDNKVLTHRENNQQKLNNIPDKETVANMKPFWEKLYNAKLISQTKYQRLTTSERTPDGVLTESMKAGFIERQLVETRQIIKHVARILDNRFSDTKIITLKSQLITNFRNTFHIAKIRELNDYHHAHDAYLAVVVGQTLLKVYPKLAPELIYGHHAHFNRHEENKATLRKHLYSNIMRFFNNPDSKVSKDIWDCNRDLPIIKDVIYNSQINFVKRTMIKKGAFYNQNPVGKFNKQLAANNRYPLKTKALCLDTSIYGGYGPMNSALSIIIIAERFNEKKGKIETVKEFHDIFIIDYEKFNNNPFQFLNDTSENGFLKKNNINRVLGFYRIPKYSLMQKIDGTRMLFESKSNLHKATQFKLTKTQNELFFHMKRLLTKSNLMDLKSKSAIKESQNFILKHKEEFDNISNQLSAFSQKMLGNTTSLKNLIKGYNERKIKEIDIRDETIKYFYDNFIKMFSFVKSGAPKDINDFFDNKCTVARMRPKPDKKLLNATLIHQSITGLYETRIDLSKLGED

SEQ ID NO: 322 - protein, 1338 aa, Coprococcus catus
MKQEYFLGLDMGTGSLGWAVTDSTYQVMRKHGKALWGTRLFESASTAEERRMFRTARRRLDRRNWRIQVLQEIFSEEISKVDPGFFLRMKESKYYPEDKRDAEGNCPELPYALFVDDNYTDKNYHKDYPTIYHLRKMLMETTEIPDIRLVYLVLHHMMKHRGHFLLSGDISQIKEFKSTFEQLIQNIQDEELEWHISLDDAAIQFVEHVLKDRNLTRSTKKSRLIKQLNAKSACEKAILNLLSGGTVKLSDIFNNKELDESERPKVSFADSGYDDYIGIVEAELAEQYYIIASAKAVYDWSVLVEILGNSVSISEAKIKVYQKHQADLKTLKKIVRQYMTKEDYKRVFVDTEEKLNNYSAYIGMTKKNGKKVDLKSKQCTQADFYDFLKKNVIKVIDHKEITQEIESEIEKENFLPKQVTKDNGVIPYQVHDYELKKILDNLGTRMPFIKENAEKIQQLFEFRIPYYVGPLNRVDDGKDGKFTWSVRKSDARIYPWNFTEVIDVEASAEKFIRRMTNKCTYLVGEDVLPKDSLVYSKFMVLNELNNLRLNGEKISVELKQRIYEELFCKYRKVTRKKLERYLVIEGIAKKGVEITGIDGDFKASLTAYHDFKERLTDVQLSQRAKEAIVLNVVLFGDDKKLLKQRLSKMYPNLTTGQLKGICSLSYQGWGRLSKTFLEEITVPAPGTGEVWNIMTALWQTNDNLMQLLSRNYGFTNEVEEFNTLKKETDLSYKTVDELYVSPAVKRQIWQTLKVVKEIQKVMGNAPKRVFVEMAREKQEGKRSDSRKKQLVELYRACKNEERDWITELNAQSDQQLRSDKLFLYYIQKGRCMYSGETIQLDELWDNTKYDIDHIYPQSKTMDDSLNNRVLVKKNYNAIKSDTYPLSLDIQKKMMSFWKMLQQQGFITKEKYVRLVRSDELSADELAGFIERQIVETRQSTKAVATILKEALPDTEIVYVKAGNVSNFRQTYELLKVREMNDLHHAKDAYLNIVVGNAYFVKFTKNAAWFIRNNPGRSYNLKRMFEFDIERSGEIAWKAGNKGSIVTVKKVMQKNNILVTRKAYEVKGGLFDQQIMKKGKGQVPIKGNDERLADIEKYGGYNKAAGTYFMLVKSLDKKGKEIRTIEFVPLYLKNQIEINHESAIQYLAQERGLNSPEILLSKIKIDTLFKVDGFKMWLSGRTGNQLIFKGANQLILSHQEAAILKGVVKYVNRKNENKDAKLSERDGMTEEKLLQLYDTFLDKLSNTVYSIRLSAQIKTLTEKRAKFIGLSNEDQCIVLNEILHMFQCQSGSANLKLIGGPGSAGILVMNNNITACKQISVINQSPTGIYEKEIDLIKL

SEQ ID NO: 323 - protein, 1345 aa, Streptococcus mutans
MKKPYSIGLDIGTNSVGWAVVTDDYKVPAKKMKVLGNTDKSHIEKNLLGALLFDSGNTAEDRRLKRTARRRYTRRRNRILYLQEIFSEEMGKVDDSFFHRLEDSFLVTEDKRGERHPIFGNLEEEVKYHENFPTIYHLRQYLADNPEKVDLRLVYLALAHIIKFRGHFLIEGKFDTRNNDVQRLFQEFLAVYDNTFENSSLQEQNVQVEEILTDKISKSAKKDRVLKLFPNEKSNGRFAEFLKLIVGNQADFKKHFELEEKAPLQFSKDTYEEELEVLLAQIGDNYAELFLSAKKLYDSILLSGILTVTDVGTKAPLSASMIQRYNEHQMDLAQLKQFIRQKLSDKYNEVFSDVSKDGYAGYIDGKTNQEAFYKYLKGLLNKIEGSGYFLDKIEREDFLRKQRTFDNGSIPHQIHLQEMRAIIRRQAEFYPFLADNQDRIEKLLTFRIPYYVGPLARGKSDFAWLSRKSADKITPWNFDEIVDKESSAEAFINRMTNYDLYLPNQKVLPKHSLLYEKFTVYNELTKVKYKTEQGKTAFFDANMKQEIFDGVFKVYRKVTKDKLMDFLEKEFDEFRIVDLTGLDKENKVFNASYGTYHDLCKILDKDFLDNSKNEKILEDIVLTLTLFEDREMIRKRLENYSDLLTKEQVKKLERRHYTGWGRLSAELIHGIRNKESRKTILDYLIDDGNSNRNFMQLINDDALSFKEEIAKAQVIGETDNLNQVVSDIAGSPAIKKGILQSLKIVDELVKIMGHQPENIVVEMARENQFTNQGRRNSQQRLKGLTDSIKEFGSQILKEHPVENSQLQNDRLFLYYLQNGRDMYTGEELDIDYLSQYDIDHIIPQAFIKDNSIDNRVLTSSKENRGKSDDVPSKDVVRKMKSYWSKLLSAKLITQRKFDNLTKAERGGLTDDDKAGFIKRQLVETRQITKHVARILDERFNTETDENNKKIRQVKIVTLKSNLVSNFRKEFELYKVREINDYHHAHDAYLNAVIGKALLGVYPQLEPEFVYGDYPHFHGHKENKATAKKFFYSNIMNFFKKDDVRTDKNGEIIWKKDEHISNIKKVLSYPQVNIVKKVEEQTGGFSKESILPKGNSDKLIPRKTKKFYWDTKKYGGFDSPIVAYSILVIADIEKGKSKKLKTVKALVGVTIMEKMTFERDPVAFLERKGYRNVQEENIIKLPKYSLFKLENGRKRLLASARELQKGNEIVLPNHLGTLLYHAKNIHKVDEPKHLDYVDKHKDEFKELLDVVSNFSKKYTLAEGNLEKIKELYAQNNGEDLKELASSFINLLTFTAIGAPATFKFFDKNIDRKRYTSTTEILNATLIHQSITGLYETRIDLNKLGGD

SEQ ID NO: 324 - protein, 1368 aa, Streptococcus pyogenes [sequence omitted]

SEQ ID NO: 325 - protein, 1388 aa, Streptococcus thermophilus
MTKPYSIGLDIGTNSVGWAVTTDNYKVPSKKMKVLGNTSKKYIKKNLLGVLLFDSGITAEGRRLKRTARRRYTRRRNRILYLQEIFSTEMATLDDAFFQRLDDSFLVPDDKRDSKYPIFGNLVEEKAYHDEFPTIYHLRKYLADSTKKADLRLVYLALAHMIKYRGHFLIEGEFNSKNNDIQKNFQDFLDTYNAIFESDLSLENSKQLEEIVKDKISKLEKKDRILKLFPGEKNSGIFSEFLKLIVGNQADFRKCFNLDEKASLHFSKESYDEDLETLLGYIGDDYSDVFLKAKKLYDAILLSGFLTVTDNETEAPLSSAMIKRYNEHKEDLALLKEYIRNISLKTYNEVFKDDTKNGYAGYIDGKTNQEDFYVYLKKLLAEFEGADYFLEKIDREDFLRKQRTFDNGSIPYQIHLQEMRAILDKQAKFYPFLAKNKERIEKILTFRIPYYVGPLARGNSDFAWSIRKRNEKITPWNFEDVIDKESSAEAFINRMTSFDLYLPEEKVLPKHSLLYETFNVYNELTKVRFIAESMRDYQFLDSKQKKDIVRLYFKDKRKVTDKDIIEYLHAIYGYDGIELKGIEKQFNSSLSTYHDLLNIINDKEFLDDSSNEAIIEEIIHTLTIFEDREMIKQRLSKFENIFDKSVLKKLSRRHYTGWGKLSAKLINGIRDEKSGNTILDYLIDDGISNRNFMQLIHDDALSFKKKIQKAQIIGDEDKGNIKEVVKSLPGSPAIKKGILQSIKIVDELVKVMGGRKPESIVVEMARENQYTNQGKSNSQQRLKRLEKSLKELGSKILKENIPAKLSKIDNNALQNDRLYLYYLQNGKDMYTGDDLDIDRLSNYDIDHIIPQAFLKDNSIDNKVLVSSASNRGKSDDVPSLEVVKKRKTFWYQLLKSKLISQRKFDNLTKAERGGLSPEDKAGFIQRQLVETRQITKHVARLLDEKFNNKKDENNRAVRTVKIITLKSTLVSQFRKDFELYKVREINDFHHAHDAYLNAVVASALLKKYPKLEPEFVYGDYPKYNSFRERKSATEKVYFYSNIMNIFKKSISLADGRVIERPLIEVNEETGESVWNKESDLATVRRVLSYPQVNVVKKVEEQNHGLDRGKPKGLFNANLSSKPKPNSNENLVGAKEYLDPKKYGGYAGISNSFTVLVKGTIEKGAKKKITNVLEFQGISILDRINYRKDKLNFLLEKGYKDIELIIELPKYSLFELSDGSRRMLASILSTNNKRGEIHKGNQIFLSQKFVKLLYHAKRISNTINENHRKYVENHKKEFEELFYYILEFNENYVGAKKNGKLLNSAFQSWQNHSIDELCSSFIGPTGSERKGLFELTSRGSAADFEFLGVKIPRYRDYTPSSLLKDATLIHQSVTGLYETRIDLAKLGEG

SEQ ID NO: 326 - protein, 1374 aa, Fusobacterium nucleatum
MKKQKFSDYYLGFDIGTNSVGWCVTDLDYNVLRFNKKDMWGSRLFDEAKTAAERRVQRNSRRRLKRRKWRLNLLEEIFSDEIMKIDSNFFRRLKESSLWLEDKNSKEKFTLFNDDNYKDYDFYKQYPTIFHLRDELIKNPEKKDIRLIYLALHSIFKSRGHFLFEGQNLKEIKNFETLYNNLISFLEDNGINKSIDKDNIEKLEKIICDSGKGLKDKEKEFKGIFNSDKQLVAIFKLSVGSSVSLNDLFDTDEYKKEEVEKEKISFREQIYEDDKPIYYSILGEKIELLDIAKSFYDFMVLNNILSDSNYISEAKVKLYEEHKKDLKNLKYIIRKYNKENYDKLFKDKNENNYPAYIGLNKEKDKKEVVEKSRLKIDDLIKVIKGYLPKPERIEEKDKTIFNEILNKIELKTILPKQRISDNGTLPYQIHEVELEKILENQSKYYDFLNYEENGVSTKDKLLKTFKFRIPYYVGPLNSYHKDKGGNSWIVRKEEGKILPWNFEQKVDIEKSAEEFIKRMTNKCTYLNGEDVIPKDSFLYSEYIILNELNKVQVNDEFLNEENKRKIIDELFKENKKVSEKKFKEYLLVNQIANRTVELKGIKDSFNSNYVSYIKFKDIFGEKLNLDIYKEISEKSILWKCLYGDDKKIFEKKIKNEYGDILNKDEIKKINSFKFNTWGRLSEKLLTGIEFINLETGECYSSVMEALRRTNYNLMELLSSKFTLQESIDNENKEMNEVSYRDLIEESYVSPSLKRAILQTLKIYEEIKKITGRVPKKVFIEMARGGDESMKNKKIPARQEQLKKLYDSCGNDIANFSIDIKEMKNSLSSYDNNSLRQKKLYLYYLQFGKCMYTGREIDLDRLLQNNDTYDIDHIYPRSKVIKDDSFDNLVLVLKNENAEKSNEYPVKKEIQEKMKSFWRFLKEKNFISDEKYKRLTGKDDFELRGFMARQLVNVRQTTKEVGKILQQIEPEIKIVYSKAEIASSFREMFDFIKVRELNDTHHAKDAYLNIVAGNVYNTKFTEKPYRYLQEIKENYDVKKIYNYDIKNAWDKENSLEIVKKNMEKNTVNITRFIKEEKGELFNLNPIKKGETSNEIISIKPKLYDGKDNKLNEKYGYYTSLKAAYFIYVEHEKKNKKVKTFERITRIDSTLIKNEKNLIKYLVSQKKLLNPKIIKKIYKEQTLIIDSYPYTFTGVDSNKKVELKNKKQLYLEKKYEQILKNALKFVEDNQGETEENYKFIYLKKRNNNEKNETIDAVKERYNIEFNEMYDKFLEKLSSKDYKNYINNKLYTNFLNSKEKFKKLKLWEKSLILREFLKIFNKNTYGKYEIKDSQTKEKLFSFPEDTGRIRLGQSSLGNNKELLEESVTGLFVKKIKL

SEQ ID NO: 327 - protein, 1333 aa, Planococcus antarcticus
MKNYTIGLDIGVASVGWVCIDENYKILNYNNRHAFGVHEFESAESAAGRRLKRGMRRRYNRRKKRLQLLQSLFDSYITDSGFFSKTDSQHFWKNNNEFENRSLTEVLSSLRISSRKYPTIYHLRSDLIESNKKMDLRLVYLALHNLVKYRGHFLQEGNWSEAASAEGMDDQLLELVTRYAELENLSPLDLSESQWKAAETLLLNRNLTKTDQSKELTAMFGKEYEPFCKLVAGLGVSLHQLFPSSEQALAYKETKTKVQLSNENVEEVMELLLEEESALLEAVQPFYQQVVLYELLKGETYVAKAKVSAFKQYQKDMASLKNLLDKTFGEKVYRSYFISDKNSQREYQKSHKVEVLCKLDQFNKEAKFAETFYKDLKKLLEDKSKTSIGTTEKDEMLRIIKAIDSNQFLQKQKGIQNAAIPHQNSLYEAEKILRNQQAHYPFITTEWIEKVKQILAFRIPYYIGPLVKDTTQSPFSWVERKGDAPITPWNFDEQIDKAASAEAFISRMRKTCTYLKGQEVLPKSSLTYERFEVLNELNGIQLRTTGAESDFRHRLSYEMKCWIIDNVFKQYKTVSTKRLLQELKKSPYADELYDEHTGEIKEVFGTQKENAFATSLSGYISMKSILGAVVDDNPAMTEELIYWIAVFEDREILHLKIQEKYPSITDVQRQKLALVKLPGWGRFSRLLIDGLPLDEQGQSVLDHMEQYSSVFMEVLKNKGFGLEKKIQKMNQHQVDGTKKIRYEDIEELAGSPALKRGIWRSVKIVEELVSIFGEPANIVLEVAREDGEKKRTKSRKDQWEELTKTTLKNDPDLKSFIGEIKSQGDQRFNEQRFWLYVTQQGKCLYTGKALDIQNLSMYEVDHILPQNFVKDDSLDNLALVMPEANQRKNQVGQNKMPLEIIEANQQYAMRTLWERLHELKLISSGKLGRLKKPSFDEVDKDKFIARQLVETRQIIKHVRDLLDERFSKSDIHLVKAGIVSKFRRFSEIPKIRDYNNKHHAMDALFAAALIQSILGKYGKNFLAFDLSKKDRQKQWRSVKGSNKEFFLFKNFGNLRLQSPVTGEEVSGVEYMKHVYFELPWQTTKMTQTGDGMFYKESIFSPKVKQAKYVSPKTEKFVHDEVKNHSICLVEFTFMKKEKEVQETKFIDLKVIEHHQFLKEPESQLAKFLAEKETNSPIIHARIIRTIPKYQKIWIEHFPYYFISTRELHNARQFEISYELMEKVKQLSERSSVEELKIVFGLLIDQMNDNYPIYTKSSIQDRVQKFVDTQLYDFKSFEIGFEELKKAVAANAQRSDTFGSRISKKPKPEEVAIGYESITGLKYRKPRSVVGTKR

SEQ ID NO: 328 - protein, 1395 aa, Treponema denticola
MKKEIKDYFLGLDVGTGSVGWAVTDTDYKLLKANRKDLWGMRCFETAETAEVRRLHRGARRRIERRKKRIKLLQELFSQEIAKTDEGFFQRMKESPFYAEDKTILQENTLFNDKDFADKTYHKAYPTINHLIKAWIENKVKPDPRLLYLACHNIIKKRGHFLFEGDFDSENQFDTSIQALFEYLREDMEVDIDADSQKVKEILKDSSLKNSEKQSRLNKILGLKPSDKQKKAITNLISGNKINFADLYDNPDLKDAEKNSISFSKDDFDALSDDLASILGDSFELLLKAKAVYNCSVLSKVIGDEQYLSFAKVKIYEKHKTDLTKLKNVIKKHFPKDYKKVFGYNKNEKNNNNYSGYVGVCKTKSKKLIINNSVNQEDFYKFLKTILSAKSEIKEVNDILTEIETGTFLPKQISKSNAEIPYQLRKMELEKILSNAEKHFSFLKQKDEKGLSHSEKIIMLLTFKIPYYIGPINDNHKKFFPDRCWVVKKEKSPSGKTTPWNFFDHIDKEKTAEAFITSRTNFCTYLVGESVLPKSSLLYSEYTVLNEINNLQIIIDGKNICDIKLKQKIYEDLFKKYKKITQKQISTFIKHEGICNKTDEVIILGIDKECTSSLKSYIELKNIFGKQVDEISTKNMLEEIIRWATIYDEGEGKTILKTKIKAEYGKYCSDEQIKKILNLKFSGWGRLSRKFLETVTSEMPGFSEPVNIITAMRETQNNLMELLSSEFTFTENIKKINSGFEDAEKQFSYDGLVKPLFLSPSVKKMLWQTLKLVKEISHITQAPPKKIFIEMAKGAELEPARTKTRLKILQDLYNNCKNDADAFSSEIKDLSGKIENEDNLRLRSDKLYLYYTQLGKCMYCGKPIEIGHVFDTSNYDIDHIYPQSKIKDDSISNRVLVCSSCNKNKEDKYPLKSEIQSKQRGFWNFLQRNNFISLEKLNRLTRATPISDDETAKFIARQLVETRQATKVAAKVLEKMFPETKIVYSKAETVSMFRNKFDIVKCREINDFHHAHDAYLNIVVGNVYNTKFTNNPWNFIKEKRDNPKIADTYNYYKVFDYDVKRNNITAWEKGKTIITVKDMLKRNTPIYTRQAACKKGELFNQTIMKKGLGQHPLKKEGPFSNISKYGGYNKVSAAYYTLIEYEEKGNKIRSLETIPLYLVKDIQKDQDVLKSYLTDLLGKKEFKILVPKIKINSLLKINGFPCHITGKTNDSFLLRPAVQFCCSNNEVLYFKKIIRFSEIRSQREKIGKTISPYEDLSFRSYIKENLWKKTKNDEIGEKEFYDLLQKKNLEIYDMLLTKHKDTIYKKRPNSATIDILVKGKEKFKSLIIENQFEVILEILKLFSATRNVSDLQHIGGSKYSGVAKIGNKISSLDNCILIYQSITGIFEKRIDLLKV

SEQ ID NO: 329 - protein, 1327 aa, Solobacterium moorei
MEGQMKNNGNNLQQGNYYLGLDVGTSSVGWAVTDTDYNVLKFRGKSMWGARLFDEASTAEERRTHRGNRRRLARRKYRLLLLEQLFEKEIRKIDDNFFVRLHESNLWADDKSKPSKFLLFNDTNFTDKDYLKKYPTIYHLRSDLIHNSTEHDIRLVFLALHHLIKYRGHFIYDNSANGDVKTLDEAVSDFEEYLNENDIEFNIENKKEFINVLSDKHLTKKEKKISLKKLYGDITDSENINISVLIEMLSGSSISLSNLFKDIEFDGKQNLSLDSDIEETLNDVVDILGDNIDLLIHAKEVYDIAVLTSSLGKHKYLCDAKVELFEKNKKDLMILKKYIKKNHPEDYKKIFSSPTEKKNYAAYSQTNSKNVCSQEEFCLFIKPYIRDMVKSENEDEVRIAKEVEDKSFLTKLKGTNNSVVPYQIHERELNQILKNIVAYLPFMNDEQEDISVVDKIKLIFKFKIPYYVGPLNTKSTRSWVYRSDEKIYPWNFSNVIDLDKTAHEFMNRLIGRCTYTNDPVLPMDSLLYSKYNVLNEINPIKVNGKAIPVEVKQAIYTDLFENSKKKVTRKSIYIYLLKNGYIEKEDIVSGIDIEIKSKLKSHHDFTQIVQENKCTPEEIERIIKGILVYSDDKSMLRRWLKNNIKGLSENDVKYLAKLNYKEWGRLSKTLLTDIYTINPEDGEACSILDIMWNTNATLMEILSNEKYQFKQNIENYKAENYDEKQNLHEELDDMYISPAARRSIWQALRIVDEIVDIKKSAPKKIFIEMAREKKSAMKKKRTESRKDTLLELYKSCKSQADGFYDEELFEKLSNESNSRLRRDQLYLYYTQMGRSMYTGKRIDFDKLINDKNTYDIDHIYPRSKIKDDSITNRVLVEKDINGEKTDIYPISEDIRQKMQPFWKILKEKGLINEEKYKRLTRNYELTDEELSSFVARQLVETQQSTKALATLLKKEYPSAKIVYSKAGNVSEFRNRKDKELPKFREINDLHHAKDAYLNIVVGNVYDTKFTEKFFNNIRNENYSLKRVFDFSVPGAWDAKGSTFNTIKKYMAKNNPIIAFAPYEVKGELFDQQIVPKGKGQFPIKQGKDIEKYGGYNKLSSAFLFAVEYKGKKARERSLETVYIKDVELYLQDPIKYCESVLGLKEPQIIKPKILMGSLFSINNKKLVVTGRSGKQYVCHHIYQLSINDEDSQYLKNIAKYLQEEPDGNIERQNILNITSVNNIKLFDVLCTKFNSNTYEIILNSLKNDVNEGREKFSELDILEQCNILLQLLKAFKCNRESSNLEKLNNKKQAGVIVIPHLFTKCSVFKVIHQSITGLFEKEMDLLK

SEQ ID NO: 330 - protein, 1334 aa, Staphylococcus pseudintermedius
MGRKPYILSLDIGTGSVGYACMDKGFNVLKYHDKDALGVYLFDGALTAQERRQFRTSRRRKNRRIKRLGLLQELLAPLVQNPNFYQFQRQFAWKNDNMDFKNKSLSEVLSFLGYESKKYPTIYHLQEALLLKDEKFDPELIYMALYHLVKYRGHFLFDHLKIENLTNNDNMHDFVELIETYENLNNIKLNLDYEKTKVIYEILKDNEMTKNDRAKRVKNMEKKLEQFSIMLLGLKFNEGKLFNHADNAEELKGANQSHTFADNYEENLTPFLTVEQSEFIERANKIYLSLTLQDILKGKKSMAMSKVAAYDKFRNELKQVKDIVYKADSTRTQFKKIFVSSKKSLKQYDATPNDQTFSSLCLFDQYLIRPKKQYSLLIKELKKIIPQDSELYFEAENDTLLKVLNTTDNASIPMQINLYEAETILRNQQKYHAEITDEMIEKVLSLIQFRIPYYVGPLVNDHTASKFGWMERKSNESIKPWNFDEVVDRSKSATQFIRRMTNKCSYLINEDVLPKNSLLYQEMEVLNELNATQIRLQTDPKNRKYRMMPQIKLFAVEHIFKKYKTVSHSKFLEIMLNSNHRENFMNHGEKLSIFGTQDDKKFASKLSSYQDMTKIFGDIEGKRAQIEEIIQWITIFEDKKILVQKLKECYPELTSKQINQLKKLNYSGWGRLSEKLLTHAYQGHSIIELLRHSDENFMEILTNDVYGFQNFIKEENQVQSNKIQHQDIANLTTSPALKKGIWSTIKLVRELTSIFGEPEKIIMEFATEDQQKGKKQKSRKQLWDDNIKKNKLKSVDEYKYIIDVANKLNNEQLQQEKLWLYLSQNGKCMYSGQSIDLDALLSPNATKHYEVDHIFPRSFIKDDSIDNKVLVIKKMNQTKGDQVPLQFIQQPYERIAYWKSLNKAGLISDSKLHKLMKPEFTAMDKEGFIQRQLVETRQISVHVRDFLKEEYPNTKVIPMKAKMVSEFRKKFDIPKIRQMNDAHHAIDAYLNGVVYHGAQLAYPNVDLFDFNFKWEKVREKWKALGEFNTKQKSRELFFFKKLEKMEVSQGERLISKIKLDMNHFKINYSRKLANIPQQFYNQTAVSPKTAELKYESNKSNEVVYKGLTPYQTYVVAIKSVNKKGKEKMEYQMIDHYVFDFYKFQNGNEKELALYLAQRENKDEVLDAQIVYSLNKGDLLYINNHPCYFVSRKEVINAKQFELTVEQQLSLYNVMNNKETNVEKLLIEYDFIAEKVINEYHHYLNSKLKEKRVRTFFSESNQTHEDFIKALDELFKVVTASATRSDKIGSRKNSMTHRAFLGKGKDVKIAYTSISGLKTTKPKSLFKLAESRNEL

SEQ ID NO: 331 - protein, 1472 aa, Flavobacterium branchiophilum
MAKILGLDLGTNSIGWAVVERENIDFSLIDKGVRIFSEGVKSEKGIESSRAAERTGYRSARKIKYRRKLRKYETLKVLSLNRMCPLSIEEVEEWKKSGFKDYPLNPEFLKWLSTDEESNVNPYFFRDRASKHKVSLFELGRAFYHIAQRRGFLSNRLDQSAEGILEEHCPKIEAIVEDLISIDEISTNITDYFFETGILDSNEKNGYAKDLDEGDKKLVSLYKSLLAILKKNESDFENCKSEIIERLNKKDVLGKVKGKIKDISQAMLDGNYKTLGQYFYSLYSKEKIRNQYTSREEHYLSEFITICKVQGIDQINEEEKINEKKFDGLAKDLYKAIFFQRPLKSQKGLIGKCSFEKSKSRCAISHPDFEEYRMWTYLNTIKIGTQSDKKLRFLTQDEKLKLVPKFYRKNDFNFDVLAKELIEKGSSFGFYKSSKKNDFFYWFNYKPTDTVAACQVAASLKNAIGEDWKTKSFKYQTINSNKEQVSRTVDYKDLWHLLTVATSDVYLYEFAIDKLGLDEKNAKAFSKTKLKKDFASLSLSAINKILPYLKEGLLYSHAVFVANIENIVDENIWKDEKQRDYIKTQISEIIENYTLEKSRFEIINGLLKEYKSENEDGKRVYYSKEAEQSFENDLKKKLVLFYKSNEIENKEQQETIFNELLPIFIQQLKDYEFIKIQRLDQKVLIFLKGKNETGQIFCTEEKGTAEEKEKKIKNRLKKLYHPSDIEKFKKKIIKDEFGNEKIVLGSPLTPSIKNPMAMRALHQLRKVLNALILEGQIDEKTIIHIEMARELNDANKRKGIQDYQNDNKKFREDAIKEIKKLYFEDCKKEVEPTEDDILRYQLWMEQNRSEIYEEGKNISICDIIGSNPAYDIEHTIPRSRSQDNSQMNKTLCSQRFNREVKKQSMPIELNNHLEILPRIAHWKEEADNLTREIEIISRSIKAAATKEIKDKKIRRRHYLTLKRDYLQGKYDRFIWEEPKVGFKNSQIPDTGIITKYAQAYLKSYFKKVESVKGGMVAEFRKIWGIQESFIDENGMKHYKVKDRSKHTHHTIDAITIACMTKEKYDVLAHAWTLEDQQNKKEARSIIEASKPWKTFKEDLLKIEEEILVSHYTPDNVKKQAKKIVRVRGKKQFVAEVERDVNGKAVPKKAASGKTIYKLDGEGKKLPRLQQGDTIRGSLHQDSIYGAIKNPLNTDEIKYVIRKDLESIKGSDVESIVDEVVKEKIKEAIANKVLLLSSNAQQKNKLVGTVWMNEEKRIAINKVRIYANSVKNPLHIKEHSLLSKSKHVHKQKVYGQNDENYAMAIYELDGKRDFELINIFNLAKLIKQGQGFYPLHKKKEIKGKIVFVPIEKRNKRDVVLKRGQQVVFYDKEVENPKDISEIVDFKGRIYIIEGLSIQRIVRPSGKVDEYGVIMLRYFKEARKADDIKQDNFKPDGVFKLGENKPTRKMNHQFTAFVEGIDFKVLPSGKFEKI

SEQ ID NO: 332 - protein, 1688 aa, Ignavibacterium album
MEFKKVLGLDIGTNSIGCALLSLPKSIQDYGKGGRLEWLTSRVIPLDADYMKAFIDGKNGLPQVITPAGKRRQKRGSRRLKHRYKLRRSRLIRVFKTLNWLPEDFPLDNPKRIKETISTEGKFSFRISDYVPISDESYREFYREFGYPENEIEQVIEEINFRRKTKGKNKNPMIKLLPEDWVVYYLRKKALIKPTTKEELIRIIYLFNQRRGFKSSRKDLTETAILDYDEFAKRLAEKEKYSAENYETKFVSITKVKEVVELKTDGRKGKKRFKVILEDSRIEPYEIERKEKPDWEGKEYTFLVTQKLEKGKFKQNKPDLPKEEDWALCTTALDNRMGSKHPGEFFFDELLKAFKEKRGYKIRQYPVNRWRYKKELEFIWTKQCQLNPELNNLNINKEILRKLATVLYPSQSKFFGPKIKEFENSDVLHIISEDIIYYQRDLKSQKSLISECRYEKRKGIDGEIYGLKCIPKSSPLYQEFRIWQDIHNIKVIRKESEVNGKKKINIDETQLYINENIKEKLFELFNSKDSLSEKDILELISLNIINSGIKISKKEEETTHRINLFANRKELKGNETKSRYRKVFKKLGFDGEYILNHPSKLNRLWHSDYSNDYADKEKTEKSILSSLGWKNRNGKWEKSKNYDVFNLPLEVAKAIANLPPLKKEYGSYSALAIRKMLVVMRDGKYWQHPDQIAKDQENTSLMLFDKNLIQLTNNQRKVLNKYLLTLAEVQKRSTLIKQKLNEIEHNPYKLELVSDQDLEKQVLKSFLEKKNESDYLKGLKTYQAGYLIYGKHSEKDVPIVNSPDELGEYIRKKLPNNSLRNPIVEQVIRETIFIVRDVWKSFGIIDEIHIELGRELKNNSEERKKTSESQEKNFQEKERARKLLKELLNSSNFEHYDENGNKIFSSFTVNPNPDSPLDIEKFRIWKNQSGLTDEELNKKLKDEKIPTEIEVKKYILWLTQKCRSPYTGKIIPLSKLFDSNVYEIEHIIPRSKMKNDSTNNLVICELGVNKAKGDRLAANFISESNGKCKFGEVEYTLLKYGDYLQYCKDTFKYQKAKYKNLLATEPPEDFIERQINDTRYIGRKLAELLTPVVKDSKNIIFTIGSITSELKITWGLNGVWKDILRPRFKRLESIINKKLIFQDEDDPNKYHFDLSINPQLDKEGLKRLDHRHHALDATIIAATTREHVRYLNSLNAADNDEEKREYFLSLCNHKIRDFKLPWENFTSEVKSKLLSCVVSYKESKPILSDPFNKYLKWEYKNGKWQKVFAIQIKNDRWKAVRRSMFKEPIGTVWIKKIKEVSLKEAIKIQAIWEEVKNDPVRKKKEKYIYDDYAQKVIAKIVQELGLSSSMRKQDDEKLNKFINEAKVSAGVNKNLNTTNKTIYNLEGRFYEKIKVAEYVLYKAKRMPLNKKEYIEKLSLQKMFNDLPNFILEKSILDNYPEILKELESDNKYIIEPHKKNNPVNRLLLEHILEYHNNPKEAFSTEGLEKLNKKAINKIGKPIKYITRLDGDINEEEIFRGAVFETDKGSNVYFVMYENNQTKDREFLKPNPSISVLKAIEHKNKIDFFAPNRLGFSRIILSPGDLVYVPTNDQYVLIKDNSSNETIINWDDNEFISNRIYQVKKFTGNSCYFLKNDIASLILSYSASNGVGEFGSQNISEYSVDDPPIRIKDVCIKIRVDRLGNVRPL

SEQ ID NO: 333 - protein, 1415 aa, Bergeyella zoohelcum
MKHILGLDLGTNSIGWALIERNIEEKYGKIIGMGSRIVPMGAELSKFEQGQAQTKNADRRTNRGARRLNKRYKQRRNKLIYILQKLDMLPSQIKLKEDFSDPNKIDKITILPISKKQEQLTAFDLVSLRVKALTEKVGLEDLGKIIYKYNQLRGYAGGSLEPEKEDIFDEEQSKDKKNKSFIAFSKIVFLGEPQEEIFKNKKLNRRAIIVETEEGNFEGSTFLENIKVGDSLELLINISASKSGDTITIKLPNKTNWRKKMENIENQLKEKSKEMGREFYISEFLLELLKENRWAKIRNNTILRARYESEFEAIWNEQVKHYPFLENLDKKTLIEIVSFIFPGEKESQKKYRELGLEKGLKYIIKNQVVFYQRELKDQSHLISDCRYEPNEKAIAKSHPVFQEYKVWEQINKLIVNTKIEAGTNRKGEKKYKYIDRPIPTALKEWIFEELQNKKEITFSAIFKKLKAEFDLREGIDFLNGMSPKDKLKGNETKLQLQKSLGELWDVLGLDSINRQIELWNILYNEKGNEYDLTSDRTSKVLEFINKYGNNIVDDNAEETAIRISKIKFARAYSSLSLKAVERILPLVRAGKYFNNDFSQQLQSKILKLLNENVEDPFAKAAQTYLDNNQSVLSEGGVGNSIATILVYDKHTAKEYSHDELYKSYKEINLLKQGDLRNPLVEQIINEALVLIRDIWKNYGIKPNEIRVELARDLKNSAKERATIHKRNKDNQTINNKIKETLVKNKKELSLANIEKVKLWEAQRHLSPYTGQPIPLSDLFDKEKYDVDHIIPISRYFDDSFTNKVISEKSVNQEKANRTAMEYFEVGSLKYSIFTKEQFIAHVNEYFSGVKRKNLLATSIPEDPVQRQIKDTQYIAIRVKEELNKIVGNENVKTTTGSITDYLRNHWGLTDKFKLLLKERYEALLESEKFLEAEYDNYKKDFDSRKKEYEEKEVLFEEQELTREEFIKEYKENYIRYKKNKLIIKGWSKRIDHRHHAIDALIVACTEPAHIKRLNDLNKVLQDWLVEHKSEFMPNFEGSNSELLEEILSLPENERTEIFTQIEKFRAIEMPWKGFPEQVEQKLKEIIISHKPKDKLLLQYNKAGDRQIKLRGQLHEGTLYGISQGKEAYRIPLTKFGGSKFATEKNIQKIVSPFLSGFIANHLKEYNNKKEEAFSAEGIMDLNNKLAQYRNEKGELKPHTPISTVKIYYKDPSKNKKKKDEEDLSLQKLDREKAFNEKLYVKTGDNYLFAVLEGEIKTKKTSQIKRLYDIISFFDATNFLKEEFRNAPDKKTFDKDLLFRQYFEERNKAKLLFTLKQGDFVYLPNENEEVILDKESPLYNQYWGDLKERGKNIYVVQKFSKKQIYFIKHTIADIIKKDVEFGSQNCYETVEGRSIKENCFKLEIDRLGNIVKVIKR

SEQ ID NO: 334 - protein, 1166 aa, Nitrobacter hamburgensis
MHVEIDFPHFSRGDSHLAMNKNEILRGSSVLYRLGLDLGSNSLGWFVTHLEKRGDRHEPVALGPGGVRIFPDGRDPQSGTSNAVDRRMARGARKRRDRFVERRKELIAALIKYNLLPDDARERRALEVLDPYALRKTALTDTLPAHHVGRALFHLNQRRGFQSNRKTDSKQSEDGAIKQAASRLATDKGNETLGVFFADMHLRKSYEDRQTAIRAELVRLGKDHLTGNARKKIWAKVRKRLFGDEVLPRADAPHGVRARATITGTKASYDYYPTRDMLRDEFNAIWAGQSAHHATITDEARTEIEHIIFYQRPLKPAIVGKCTLDPATRPFKEDPEGYRAPWSHPLAQRFRILSEARNLEIRDTGKGSRRLTKEQSDLVVAALLANREVKFDKLRTLLKLPAEARFNLESDRRAALDGDQTAARLSDKKGFNKAWRGFPPERQIAIVARLEETEDENELIAWLEKECALDGAAAARVANTTLPDGHCRLGLRAIKKIVPIMQDGLDEDGVAGAGYHIAAKRAGYDHAKLPTGEQLGRLPYYGQWLQDAVVGSGDARDQKEKQYGQFPNPTVHIGLGQLRRVVNDLIDKYGPPTEISIEFTRALKLSEQQKAERQREQRRNQDKNKARAEELAKFGRPANPRNLLKMRLWEELAHDPLDRKCVYTGEQISIERLLSDEVDIDHILPVAMTLDDSPANKIICMRYANRHKRKQTPSEAFGSSPTLQGHRYNWDDIAARATGLPRNKRWRFDANAREEFDKRGGFLARQLNETGWLARLAKQYLGAVTDPNQIWVVPGRLTSMLRGKWGLNGLLPSDNYAGVQDKAEEFLASTDDMEFSGVKNRADHRHHAIDGLVTALTDRSLLWKMANAYDEEHEKFVIEPPWPTMRDDLKAALEKMVVSHKPDHGIEGKLHEDSAYGFVKPLDATGLKEEEAGNLVYRKAIESLNENEVDRIRDIQLRTIVRDHVNVEKTKGVALADALRQLQAPSDDYPQFKHGLRHVRILKKEKGDYLVPIANRASGVAYKAYSAGENFCVEVFETAGGKWDGEAVRRFDANKKNAGPKIAHAPQWRDANEGAKLVMRIHKGDLIRLDHEGRARIMVVHRLDAAAGRFKLADHNETGNLDKRHATNNDIDPFRWLMASYNTLKKLAAVPVRVDELGRVWRVMPN

SEQ ID NO: 335 - protein, 1498 aa, Odoribacter laneus
METTLGIDLGTNSIGLALVDQEEHQILYSGVRIFPEGINKDTIGLGEKEESRNATRRAKRQMRRQYFRKKLRKAKLLELLIAYDMCPLKPEDVRRWKNWDKQQKSTVRQFPDTPAFREWLKQNPYELRKQAVTEDVTRPELGRILYQMIQRRGFLSSRKGKEEGKIFTGKDRMVGIDETRKNLQKQTLGAYLYDIAPKNGEKYRFRTERVRARYTLRDMYIREFEIIWQRQAGHLGLAHEQATRKKNIFLEGSATNVRNSKLITHLQAKYGRGHVLIEDTRITVTFQLPLKEVLGGKIEIEEEQLKFKSNESVLFWQRPLRSQKSLLSKCVFEGRNFYDPVHQKWIIAGPTPAPLSHPEFEEFRAYQFINNIIYGKNEHLTAIQREAVFELMCTESKDFNFEKIPKHLKLFEKFNFDDTTKVPACTTISQLRKLFPHPVWEEKREEIWHCFYFYDDNTLLFEKLQKDYALQTNDLEKIKKIRLSESYGNVSLKAIRRINPYLKKGYAYSTAVLLGGIRNSFGKRFEYFKEYEPEIEKAVCRILKEKNAEGEVIRKIKDYLVHNRFGFAKNDRAFQKLYHHSQAITTQAQKERLPETGNLRNPIVQQGLNELRRTVNKLLATCREKYGPSFKFDHIHVEMGRELRSSKTEREKQSRQIRENEKKNEAAKVKLAEYGLKAYRDNIQKYLLYKEIEEKGGTVCCPYTGKTLNISHTLGSDNSVQIEHIIPYSISLDDSLANKTLCDATFNREKGELTPYDFYQKDPSPEKWGASSWEEIEDRAFRLLPYAKAQRFIRRKPQESNEFISRQLNDTRYISKKAVEYLSAICSDVKAFPGQLTAELRHLWGLNNILQSAPDITFPLPVSATENHREYYVITNEQNEVIRLFPKQGETPRTEKGELLLTGEVERKVFRCKGMQEFQTDVSDGKYWRRIKLSSSVTWSPLFAPKPISADGQIVLKGRIEKGVFVCNQLKQKLKTGLPDGSYWISLPVISQTFKEGESVNNSKLTSQQVQLFGRVREGIFRCHNYQCPASGADGNFWCTLDTDTAQPAFTPIKNAPPGVGGGQIILTGDVDDKGIFHADDDLHYELPASLPKGKYYGIFTVESCDPTLIPIELSAPKTSKGENLIEGNIWVDEHTGEVRFDPKKNREDQRHHAIDAIVIALSSQSLFQRLSTYNARRENKKRGLDSTEHFPSPWPGFAQDVRQSVVPLLVSYKQNPKTLCKISKTLYKDGKKIHSCGNAVRGQLHKETVYGQRTAPGATEKSYHIRKDIRELKTSKHIGKVVDITIRQMLLKHLQENYHIDITQEFNIPSNAFFKEGVYRIFLPNKHGEPVPIKKIRMKEELGNAERLKDNINQYVNPRNNHHVMIYQDADGNLKEEIVSFWSVIERQNQGQPIYQLPREGRNIVSILQINDTFLIGLKEEEPEVYRNDLSTLSKHLYRVQKLSGMYYTFRHHLASTLNNEREEFRIQSLEAWKRANPVKVQIDEIGRITFLNGPLC

SEQ ID NO: 336 - protein, 1372 aa, Legionella pneumophila
MESSQILSPIGIDLGGKFTGVCLSHLEAFAELPNHANTKYSVILIDHNNFQLSQAQRRATRHRVRNKKRNQFVKRVALQLFQHILSRDLNAKEETALCHYLNNRGYTYVDTDLDEYIKDETTINLLKELLPSESEHNFIDWFLQKMQSSEFRKILVSKVEEKKDDKELKNAVKNIKNFITGFEKNSVEGHRHRKVYFENIKSDITKDNQLDSIKKKIPSVCLSNLLGHLSNLQWKNLHRYLAKNPKQFDEQTFGNEFLRMLKNFRHLKGSQESLAVRNLIQQLEQSQDYISILEKTPPEITIPPYEARTNTGMEKDQSLLLNPEKLNNLYPNWRNLIPGIIDAHPFLEKDLEHTKLRDRKRIISPSKQDEKRDSYILQRYLDLNKKIDKFKIKKQLSFLGQGKQLPANLIETQKEMETHFNSSLVSVLIQIASAYNKEREDAAQGIWFDNAFSLCELSNINPPRKQKILPLLVGAILSEDFINNKDKWAKFKIFWNTHKIGRTSLKSKCKEIEEARKNSGNAFKIDYEEALNHPEHSNNKALIKIIQTIPDIIQAIQSHLGHNDSQALIYHNPFSLSQLYTILETKRDGFHKNCVAVTCENYWRSQKTEIDPEISYASRLPADSVRPFDGVLARMMQRLAYEIAMAKWEQIKHIPDNSSLLIPIYLEQNRFEFEESFKKIKGSSSDKTLEQAIEKQNIQWEEKFQRIINASMNICPYKGASIGGQGEIDHIYPRSLSKKHFGVIFNSEVNLIYCSSQGNREKKEEHYLLEHLSPLYLKHQFGTDNVSDIKNFISQNVANIKKYISFHLLTPEQQKAARHALFLDYDDEAFKTITKFLMSQQKARVNGTQKFLGKQIMEFLSTLADSKQLQLEFSIKQITAEEVHDHRELLSKQEPKLVKSRQQSFPSHAIDATLTMSIGLKEFPQFSQELDNSWFINHLMPDEVHLNPVRSKEKYNKPNISSTPLFKDSLYAERFIPVWVKGETFAIGFSEKDLFEIKPSNKEKLFTLLKTYSTKNPGESLQELQAKSKAKWLYFPINKTLALEFLHHYFHKEIVTPDDTTVCHFINSLRYYTKKESITVKILKEPMPVLSVKFESSKKNVLGSFKHTIALPATKDWERLFNHPNFLALKANPAPNPKEFNEFIRKYFLSDNNPNSDIPNNGHNIKPQKHKAVRKVFSLPVIPGNAGTMMRIRRKDNKGQPLYQLQTIDDTPSMGIQINEDRLVKQEVLMDAYKTRNLSTIDGINNSEGQAYATFDNWLTLPVSTFKPEIIKLEMKPHSKTRRYIRITQSLADFIKTIDEALMIKPSDSIDDPLNMPNEIVCKNKLFGNELKPRDGKMKIVSTGKIVTYEFESDSTPQWIQTLYVTQLKKQP

SEQ ID NO: 337 - protein, 1517 aa, Bacteroides sp.
MKKIVGLDLGTNSIGWALINAYINKEHLYGIEACGSRIIPMDAAILGNFDKGNSISQTADRTSYRGIRRLRERHLLRRERLHRILDLLGFLPKHYSDSLNRYGKFLNDIECKLPWVKDETGSYKFIFQESFKEMLANFTEHHPILIANNKKVPYDWTIYYLRKKALTQKISKEELAWILLNFNQKRGYYQLRGEEEETPNKLVEYYSLKVEKVEDSGERKGKDTWYNVHLENGMIYRRTSNIPLDWEGKTKEFIVTTDLEADGSPKKDKEGNIKRSFRAPKDDDWTLIKKKTEADIDKIKMTVGAYIYDTLLQKPDQKIRGKLVRTIERKYYKNELYQILKTQSEFHEELRDKQLYIACLNELYPNNEPRRNSISTRDFCHLFIEDIIFYQRPLKSKKSLIDNCPYEENRYIDKESGEIKHASIKCIAKSHPLYQEFRLWQFIVNLRIYRKETDVDVTQELLPTEADYVTLFEWLNEKKEIDQKAFFKYPPFGFKKTTSNYRWNYVEDKPYPCNETHAQIIARLGKAHIPKAFLSKEKEETLWHILYSIEDKQEIEKALHSFANKNNLSEEFIEQFKNFPPFKKEYGSYSAKAIKKLLPLMRMGKYWSIENIDNGTRIRINKIIDGEYDENIRERVRQKAINLTDITHFRALPLWLACYLVYDRHSEVKDIVKWKTPKDIDLYLKSFKQHSLRNPIVEQVITETLRTVRDIWQQVGHIDEIHIELGREMKNPADKRARMSQQMIKNENTNLRIKALLTEFLNPEFGIENVRPYSPSQQDLLRIYEEGVLNSILELPEDIGIILGKFNQTDTLKRPTRSEILRYKLWLEQKYRSPYTGEMIPLSKLFTPAYEIEHIIPQSRYFDDSLSNKVICESEINKLKDRSLGYEFIKNHHGEKVELAFDKPVEVLSVEAYEKLVHESYSHNRSKMKKLLMEDIPDQFIERQLNDSRYISKVVKSLLSNIVREENEQEAISKNVIPCTGGITDRLKKDWGINDVWNKIVLPRFIRLNELTESTRFTSINTNNTMIPSMPLELQKGFNKKRIDHRHHAMDAIIIACANRNIVNYLNNVSASKNTKITRRDLQTLLCHKDKTDNNGNYKWVIDKPWETFTQDTLTALQKITVSFKQNLRVINKTTNHYQHYENGKKIVSNQSKGDSWAIRKSMHKETVHGEVNLRMIKTVSFNEALKKPQAIVEMDLKKKILAMLELGYDTKRIKNYFEENKDTWQDINPSKIKVYYFTKETKDRYFAVRKPIDTSFDKKKIKESITDTGIQQIMLRHLETKDNDPTLAFSPDGIDEMNRNILILNKGKKHQPIYKVRVYEKAEKFTVGQKGNKRTKFVEAAKGTNLFFAIYETEEIDKDTKKVIRKRSYSTIPLNVVIERQKQGLSSAPEDENGNLPKYILSPNDLVYVPTQEEINKGEVVMPIDRDRIYKMVDSSGITANFIPASTANLIFALPKATAEIYCNGENCIQNEYGIGSPQSKNQKAITGEMVKEICFPIKVDRLGNIIQVGSCILTN

SEQ ID NO: 338 - protein, 1101 aa, Akkermansia muciniphila
MSRSLTFSFDIGYASIGWAVIASASHDDADPSVCGCGTVLFPKDDCQAFKRREYRRLRRNIRSRRVRIERIGRLLVQAQIITPEMKETSGHPAPFYLASEALKGHRTLAPIELWHVLRWYAHNRGYDNNASWSNSLSEDGGNGEDTERVKHAQDLMDKHGTATMAETICRELKLEEGKADAPMEVSTPAYKNLNTAFPRLIVEKEVRRILELSAPLIPGLTAEIIELIAQHHPLTTEQRGVLLQHGIKLARRYRGSLLFGQLIPRFDNRIISRCPVTWAQVYEAELKKGNSEQSARERAEKLSKVPTANCPEFYEYRMARILCNIRADGEPLSAEIRRELMNQARQEGKLTKASLEKAISSRLGKETETNVSNYFTLHPDSEEALYLNPAVEVLQRSGIGQILSPSVYRIAANRLRRGKSVTPNYLLNLLKSRGESGEALEKKIEKESKKKEADYADTPLKPKYATGRAPYARTVLKKVVEEILDGEDPTRPARGEAHPDGELKAHDGCLYCLLDTDSSVNQHQKERRLDTMTNNHLVRHRMLILDRLLKDLIQDFADGQKDRISRVCVEVGKELTTFSAMDSKKIQRELTLRQKSHTDAVNRLKRKLPGKALSANLIRKCRIAMDMNWTCPFTGATYGDHELENLELEHIVPHSFRQSNALSSLVLTWPGVNRMKGQRTGYDFVEQEQENPVPDKPNLHICSLNNYRELVEKLDDKKGHEDDRRRKKKRKALLMVRGLSHKHQSQNHEAMKEIGMTEGMMTQSSHLMKLACKSIKTSLPDAHIDMIPGAVTAEVRKAWDVFGVFKELCPEAADPDSGKILKENLRSLTHLHHALDACVLGLIPYIIPAHHNGLLRRVLAMRRIPEKLIPQVRPVANQRHYVLNDDGRMMLRDLSASLKENIREQLMEQRVIQHVPADMGGALLKETMQRVLSVDGSGEDAMVSLSKKKDGKKEKNQVKASKLVGVFPEGPSKLKALKAAIEIDGNYGVALDPKPVVIRHIKVFKRIMALKEQNGGKPVRILKKGMLIHLTSSKDPKHAGVWRIESIQDSKGGVKLDLQRAHCAVPKNKTHECNWREVDLISLLKKYQMKRYPTSYTGTPR

SEQ ID NO: 339 - protein, 1424 aa, Prevotella sp.
MTQKVLGLDLGTNSIGSAVRNLDLSDDLQWQLEFFSSDIFRSSVNKESNGREYSLAAQRSAHRRSRGLNEVRRRRLWATLNLLIKHGFCPMSSESLMRWCTYDKRKGLFREYPIDDKDFNAWILLDFNGDGRPDYSSPYQLRRELVTRQFDFEQPIERYKLGRALYHIAQHRGFKSSKGETLSQQETNSKPSSTDEIPDVAGAMKASEEKLSKGLSTYMKEHNLLTVGAAFAQLEDEGVRVRNNNDYRAIRSQFQHEIETIFKFQQGLSVESELYERLISEKKNVGTIFYKRPLRSQRGNVGKCTLERSKPRCAIGHPLFEKFRAWTLINNIKVRMSVDTLDEQLPMKLRLDLYNECFLAFVRTEFKFEDIRKYLEKRLGIHFSYNDKTINYKDSTSVAGCPITARFRKMLGEEWESFRVEGQKERQAHSKNNISFHRVSYSIEDIWHFCYDAEEPEAVLAFAQETLRLERKKAEELVRIWSAMPQGYAMLSQKAIRNINKILMLGLKYSDAVILAKVPELVDVSDEELLSIAKDYYLVEAQVNYDKRINSIVNGLIAKYKSVSEEYRFADHNYEYLLDESDEKDIIRQIENSLGARRWSLMDANEQTDILQKVRDRYQDFFRSHERKFVESPKLGESFENYLTKKFPMVEREQWKKLYHPSQITIYRPVSVGKDRSVLRLGNPDIGAIKNPTVLRVLNTLRRRVNQLLDDGVISPDETRVVVETARELNDANRKWALDTYNRIRHDENEKIKKILEEFYPKRDGISTDDIDKARYVIDQREVDYFTGSKTYNKDIKKYKFWLEQGGQCMYTGRTINLSNLFDPNAFDIEHTIPESLSFDSSDMNLTLCDAHYNRFIKKNHIPTDMPNYDKAITIDGKEYPAITSQLQRWVERVERLNRNVEYWKGQARRAQNKDRKDQCMREMHLWKMELEYWKKKLERFTVTEVTDGFKNSQLVDTRVITRHAVLYLKSIFPHVDVQRGDVTAKFRKILGIQSVDEKKDRSLHSHHAIDATTLTIIPVSAKRDRMLELFAKIEEINKMLSFSGSEDRTGLIQELEGLKNKLQMEVKVCRIGHNVSEIGTFINDNIIVNHHIKNQALTPVRRRLRKKGYIVGGVDNPRWQTGDALRGEIHKASYYGAITQFAKDDEGKVLMKEGRPQVNPTIKFVIRRELKYKKSAADSGFASWDDLGKAIVDKELFALMKGQFPAETSFKDACEQGIYMIKKGKNGMPDIKLHHIRHVRCEAPQSGLKIKEQTYKSEKEYKRYFYAAVGDLYAMCCYTNGKIREFRIYSLYDVSCHRKSDIEDIPEFITDKKGNRLMLDYKLRTGDMILLYKDNPAELYDLDNVNLSRRLYKINRFESQSNLVLMTHHLSTSKERGRSLGKTVDYQNLPESIRSSVKSLNFLIMGENRDFVIKNGKIIFNHR

SEQ ID NO: 340 - protein, 1409 aa, Wolinella succinogenes
MLVSPISVDLGGKNTGFFSFTDSLDNSQSGTVIYDESFVLSQVGRRSKRHSKRNNLRNKLVKRLFLLILQEHHGLSIDVLPDEIRGLFNKRGYTYAGFELDEKKKDALESDTLKEFLSEKLQSIDRDSDVEDFLNQIASNAESFKDYKKGFEAVFASATHSPNKKLELKDELKSEYGENAKELLAGLRVTKEILDEFDKQENQGNLPRAKYFEELGEYIATNEKVKSFFDSNSLKLTDMTKLIGNISNYQLKELRRYFNDKEMEKGDIWIPNKLHKITERFVRSWHPKNDADRQRRAELMKDLKSKEIMELLTTTEPVMTIPPYDDMNNRGAVKCQTLRLNEEYLDKHLPNWRDIAKRLNHGKFNDDLADSTVKGYSEDSTLLHRLLDTSKEIDIYELRGKKPNELLVKTLGQSDANRLYGFAQNYYELIRQKVRAGIWVPVKNKDDSLNLEDNSNMLKRCNHNPPHKKNQIHNLVAGILGVKLDEAKFAEFEKELWSAKVGNKKLSAYCKNIEELRKTHGNTFKIDIEELRKKDPAELSKEEKAKLRLTDDVILNEWSQKIANFFDIDDKHRQRFNNLFSMAQLHTVIDTPRSGFSSTCKRCTAENRFRSETAFYNDETGEFHKKATATCQRLPADTQRPFSGKIERYIDKLGYELAKIKAKELEGMEAKEIKVPIILEQNAFEYEESLRKSKTGSNDRVINSKKDRDGKKLAKAKENAEDRLKDKDKRIKAFSSGICPYCGDTIGDDGEIDHILPRSHTLKIYGTVFNPEGNLIYVHQKCNQAKADSIYKLSDIKAGVSAQWIEEQVANIKGYKTFSVLSAEQQKAFRYALFLQNDNEAYKKVVDWLRTDQSARVNGTQKYLAKKIQEKLTKMLPNKHLSFEFILADATEVSELRRQYARQNPLLAKAEKQAPSSHAIDAVMAFVARYQKVFKDGTPPNADEVAKLAMLDSWNPASNEPLTKGLSTNQKIEKMIKSGDYGQKNMREVFGKSIFGENAIGERYKPIVVQEGGYYIGYPATVKKGYELKNCKVVTSKNDIAKLEKIIKNQDLISLKENQYIKIFSINKQTISELSNRYFNMNYKNLVERDKEIVGLLEFIVENCRYYTKKVDVKFAPKYIHETKYPFYDDWRRFDEAWRYLQENQNKTSSKDRFVIDKSSLNEYYQPDKNEYKLDVDTQPIWDDFCRWYFLDRYKTANDKKSIRIKARKTFSLLAESGVQGKVFRAKRKIPTGYAYQALPMDNNVIAGDYANILLEANSKTLSLVPKSGISIEKQLDKKLDVIKKTDVRGLAIDNNSFFNADFDTHGIRLIVENTSVKVGNFPISAIDKSAKRMIFRALFEKEKGKRKKKTTISFKESGPVQDYLKVFLKKIVKIQLRTDGSISNIVVRKNAADFTLSFRSEHIQKLLK

SEQ ID NO: 341 - protein, 1146 aa, Alicyclobacillus hesperidum
MAYRLGLDIGITSVGWAVVALEKDESGLKPVRIQDLGVRIFDKAEDSKTGASLALPRREARSARRRTRRRRHRLWRVKRLLEQHGILSMEQIEALYAQRTSSPDVYALRVAGLDRCLIAEEIARVLIHIAHRRGFQSNRKSEIKDSDAGKLLKAVQENENLMQSKGYRTVAEMLVSEATKTDAEGKLVHGKKHGYVSNVRNKAGEYRHTVSRQAIVDEVRKIFAAQRALGNDVMSEELEDSYLKILCSQRNFDDGPGGDSPYGHGSVSPDGVRQSIYERMVGSCTFETGEKRAPRSSYSFERFQLLTKVVNLRIYRQQEDGGRYPCELTQTERARVIDCAYEQTKITYGKLRKLLDMKDTESFAGLTYGLNRSRNKTEDTVFVEMKFYHEVRKALQRAGVFIQDLSIETLDQIGWILSVWKSDDNRRKKLSTLGLSDNVIEELLPLNGSKFGHLSLKAIRKILPFLEDGYSYDVACELAGYQFQGKTEYVKQRLLPPLGEGEVTNPVVRRALSQAIKVVNAVIRKHGSPESIHIELARELSKNLDERRKIEKAQKENQKNNEQIKDEIREILGSAHVTGRDIVKYKLFKQQQEFCMYSGEKLDVTRLFEPGYAEVDHIIPYGISFDDSYDNKVLVKTEQNRQKGNRTPLEYLRDKPEQKAKFIALVESIPLSQKKKNHLLMDKRAIDLEQEGFRERNLSDTRYITRALMNHIQAWLLFDETASTRSKRVVCVNGAVTAYMRARWGLTKDRDAGDKHHAADAVVVACIGDSLIQRVTKYDKFKRNALADRNRYVQQVSKSEGITQYVDKETGEVFTWESFDERKFLPNEPLEPWPFFRDELLARLSDDPSKNIRAIGLLTYSETEQIDPIFVSRMPTRKVTGAAHKETIRSPRIVKVDDNKGTEIQVVVSKVALTELKLTKDGEIKDYFRPEDDPRLYNTLRERLVQFGGDAKAAFKEPVYKISKDGSVRTPVRKVKIQEKLTLGVPVHGGRGIAENGGMVRIDVFAKGGKYYFVPIYVADVLKRELPNRLATAHKPYSEWRVVDDSYQFKFSLYPNDAVMIKPSREVDITYKDRKEPVGCRIMYFVSANIASASISLRTHDNSGELEGLGIQGLEVFEKYVVGPLGDTHPVYKERRMPFRVERKMN

SEQ ID NO: 342 - protein, 1442 aa, Caenispirillum salinarum
MPVLSPLSPNAAQGRRRWSLALDIGEGSIGWAVAEVDAEGRVLQLTGTGVTLFPSAWSNENGTYVAHGAADRAVRGQQQRHDSRRRRLAGLARLCAPVLERSPEDLKDLTRTPPKADPRAIFFLRADAARRPLDGPELFRVLHHMAAHRGIRLAELQEVDPPPESDADDAAPAATEDEDGTRRAAADERAFRRLMAEHMHRHGTQPTCGEIMAGRLRETPAGAQPVTRARDGLRVGGGVAVPTRALIEQEFDAIRAIQAPRHPDLPWDSLRRLVLDQAPIAVPPATPCLFLEELRRRGETFQGRTITREAIDRGLTVDPLIQALRIRETVGNLRLHERITEPDGRQRYVPRAMPELGLSHGELTAPERDTLVRALMHDPDGLAAKDGRIPYTRLRKLIGYDNSPVCFAQERDTSGGGITVNPTDPLMARWIDGWVDLPLKARSLYVRDVVARGADSAALARLLAEGAHGVPPVAAAAVPAATAAILESDIMQPGRYSVCPWAAEAILDAWANAPTEGFYDVTRGLFGFAPGEIVLEDLRRARGALLAHLPRTMAAARTPNRAAQQRGPLPAYESVIPSQLITSLRRAHKGRAADWSAADPEERNPFLRTWTGNAATDHILNQVRKTANEVITKYGNRRGWDPLPSRITVELAREAKHGVIRRNEIAKENRENEGRRKKESAALDTFCQDNTVSWQAGGLPKERAALRLRLAQRQEFFCPYCAERPKLRATDLFSPAETEIDHVIERRMGGDGPDNLVLAHKDCNNAKGKKTPHEHAGDLLDSPALAALWQGWRKENADRLKGKGHKARTPREDKDFMDRVGWRFEEDARAKAEENQERRGRRMLHDTARATRLARLYLAAAVMPEDPAEIGAPPVETPPSPEDPTGYTAIYRTISRVQPVNGSVTHMLRQRLLQRDKNRDYQTHHAEDACLLLLAGPAVVQAFNTEAAQHGADAPDDRPVDLMPTSDAYHQQRRARALGRVPLATVDAALADIVMPESDRQDPETGRVHWRLTRAGRGLKRRIDDLTRNCVILSRPRRPSETGTPGALHNATHYGRREITVDGRTDTVVTQRMNARDLVALLDNAKIVPAARLDAAAPGDTILKEICTEIADRHDRVVDPEGTHARRWISARLAALVPAHAEAVARDIAELADLDALADADRTPEQEARRSALRQSPYLGRAISAKKADGRARAREQEILTRALLDPHWGPRGLRHLIMREARAPSLVRIRANKTDAFGRPVPDAAVWVKTDGNAVSQLWRLTSVVTDDGRRIPLPKPIEKRIEISNLEYARLNGLDEGAGVTGNNAPPRPLRQDIDRLTPLWRDHGTAPGGYLGTAVGELEDKARSALRGKAMRQTLTDAGITAEAGWRLDSEGAVCDLEVAKGDTVKKDGKTYKVGVITQGIFGMPVDAAGSAPRTPEDCEKFEEQYGIKPWKAKGIPLA

SEQ ID NO: 343 - protein, 1114 aa, Eubacterium rectale
MNYTEKEKLFMKYILALDIGIASVGWAILDKESETVIEAGSNIFPEASAADNQLRRDMRGAKRNNRRLKTRINDFIKLWENNNLSIPQFKSTEIVGLKVRAITEEITLDELYLILYSYLKHRGISYLEDALDDTVSGSSAYANGLKLNAKELETHYPCEIQQERLNTIGKYRGQSQIINENGEVLDLSNVFTIGAYRKEIQRVFEIQKKYHPELTDEFCDGYMLIFNRKRKYYEGPGNEKSRTDYGRFTTKLDANGNYITEDNIFEKLIGKCSVYPDELRAAAASYTAQEYNVLNDLNNLTINGRKLEENEKHEIVERIKSSNTINMRKIISDCMGENIDDFAGARIDKSGKEIFHKFEVYNKMRKALLEIGIDISNYSREELDEIGYIMTINTDKEAMMEAFQKSWIDLSDDVKQCLINMRKTNGALFNKWQSFSLKIMNELIPEMYAQPKEQMTLLTEMGVTKGTQEEFAGLKYIPVDVVSEDIFNPVVRRSVRISFKILNAVLKKYKALDTIVIEMPRDRNSEEQKKRINDSQKLNEKEMEYIEKKLAVTYGIKLSPSDFSSQKQLSLKLKLWNEQDGICLYSGKTIDPNDIINNPQLFEIDHIIPRSISFDDARSNKVLVYRSENQKKGNQTPYYYLTHSHSEWSFEQYKATVMNLSKKKEYAISRKKIQNLLYSEDITKMDVLKGFINRNINDTSYASRLVLNTIQNFFMANEADTKVKVIKGSYTHQMRCNLKLDKNRDESYSHHAVDAMLIGYSELGYEAYHKLQGEFIDFETGEILRKDMWDENMSDEVYADYLYGKKWANIRNEVVKAEKNVKYWHYVMRKSNRGLCNQTIRGTREYDGKQYKINKLDIRTKEGIKVFAKLAFSKKDSDRERLLVYLNDRRTFDDLCKIYEDYSDAANPFVQYEKETGDIIRKYSKKHNGPRIDKLKYKDGEVGACIDISHKYGFEKGSKKVILESLVPYRMDVYYKEENHSYYLVGVKQSDIKFEKGRNVIDEEAYARILVNEKMIQPGQSRADLENLGFKFKLSFYKNDIIEYEKDGKIYTERLVSRTMPKQRNYIETKPIDKAKFEKQNLVGLGKTKFIKKYRYDILGNKYSCSEEKFTSFC

SEQ ID NO: 344 - protein, 1314 aa, Mycoplasma synoviae
MLRLYCANNLVLNNVQNLWKYLLLLIFDKKIIFLFKIKVILIRRYMENNNKEKIVIGFDLGVASVGWSIVNAETKEVIDLGVRLFSEPEKADYRRAKRTTRRLLRRKKFKREKFHKLILKNAEIFGLQSRNEILNVYKDQSSKYRNILKLKINALKEEIKPSELVWILRDYLQNRGYFYKNEKLTDEFVSNSFPSKKLHEHYEKYGFFRGSVKLDNKLDNKKDKAKEKDEEEESDAKKESEELIFSNKQWINEIVKVFENQSYLTESFKEEYLKLFNYVRPFNKGPGSKNSRTAYGVFSTDIDPETNKFKDYSNIWDKTIGKCSLFEEEIRAPKNLPSALIFNLQNEICTIKNEFTEFKNWWLNAEQKSEILKFVFTELFNWKDKKYSDKKFNKNLQDKIKKYLLNFALENFNLNEEILKNRDLENDTVLGLKGVKYYEKSNATADAALEFSSLKPLYVFIKFLKEKKLDLNYLLGLENTEILYFLDSIYLAISYSSDLKERNEWFKKLLKELYPKIKNNNLEIIENVEDIFEITDQEKFESFSKTHSLSREAFNHIIPLLLSNNEGKNYESLKHSNEELKKRTEKAELKAQQNQKYLKDNFLKEALVPLSVKTSVLQAIKIFNQIIKNFGKKYEISQVVIEMARELTKPNLEKLLNNATNSNIKILKEKLDQTEKFDDFTKKKFIDKIENSVVFRNKLFLWFEQDRKDPYTQLDIKINEIEDETEIDHVIPYSKSADDSWFNKLLVKKSTNQLKKNKTVWEYYQNESDPEAKWNKFVAWAKRIYLVQKSDKESKDNSEKNSIFKNKKPNLKFKNITKKLFDPYKDLGFLARNLNDTRYATKVFRDQLNNYSKHHSKDDENKLFKVVCMNGSITSFLRKSMWRKNEEQVYRFNFWKKDRDQFFHHAVDASIIAIFSLLTKTLYNKLRVYESYDVQRREDGVYLINKETGEVKKADKDYWKDQHNFLKIRENAIEIKNVLNNVDFQNQVRYSRKANTKLNTQLFNETLYGVKEFENNFYKLEKVNLFSRKDLRKFILEDLNEESEKNKKNENGSRKRILTEKYIVDEILQILENEEFKDSKSDINALNKYMDSLPSKFSEFFSQDFINKCKKENSLILTFDAIKHNDPKKVIKIKNLKFFREDATLKNKQAVHKDSKNQIKSFYESYKCVGFIWLKNKNDLEESIFVPINSRVIHFGDKDKDIFDFDSYNKEKLLNEINLKRPENKKFNSINEIEFVKFVKPGALLLNFENQQIYYISTLESSSLRAKIKLLNKMDKGKAVSMKKITNPDEYKIIEHVNPLGINLNWTKKLENNN

SEQ ID NO: 345 - protein, 1197 aa, Porphyromonas sp.
MLMSKHVLGLDLGVGSIGWCLIALDAQGDPAEILGMGSRVVPLNNATKAIEAFNAGAAFTASQERTARRTMRRGFARYQLRRYRLRRELEKVGMLPDAALIQLPLLELWELRERAATAGRRLTLPELGRVLCHINQKRGYRHVKSDAAAIVGDEGEKKKDSNSAYLAGIRANDEKLQAEHKTVGQYFAEQLRQNQSESPTGGISYRIKDQIFSRQCYIDEYDQIMAVQRVHYPDILTDEFIRMLRDEVIFMQRPLKSCKHLVSLCEFEKQERVMRVQQDDGKGGWQLVERRVKFGPKVAPKSSPLFQLCCIYEAVNNIRLTRPNGSPCDITPEERAKIVAHLQSSASLSFAALKKLLKEKALIADQLTSKSGLKGNSTRVALASALQPYPQYHHLLDMELETRMMTVQLTDEETGEVTEREVAVVTDSYVRKPLYRLWHILYSIEEREAMRRALITQLGMKEEDLDGGLLDQLYRLDFVKPGYGNKSAKFICKLLPQLQQGLGYSEACAAVGYRHSNSPTSEEITERTLLEKIPLLQRNELRQPLVEKILNQMINLVNALKAEYGIDEVRVELARELKMSREERERMARNNKDREERNKGVAAKIRECGLYPTKPRIQKYMLWKEAGRQCLYCGRSIEEEQCLREGGMEVEHIIPKSVLYDDSYGNKTCACRRCNKEKGNRTALEYIRAKGREAEYMKRINDLLKEKKISYSKHQRLRWLKEDIPSDFLERQLRLTQYISRQAMAILQQGIRRVSASEGGVTARLRSLWGYGKILHTLNLDRYDSMGETERVSREGEATEELHITNWSKRMDHRHHAIDALVVACTRQSYIQRLNRLSSEFGREDKKKEDQEAQEQQATETGRLSNLERWLTQRPHFSVRTVSDKVAEILISYRPGQRVVTRGRNIYRKKMADGREVSCVQRGVLVPRGELMEASFYGKILSQGRVRIVKRYPLHDLKGEVVDPHLRELITTYNQELKSREKGAPIPPLCLDKDKKQEVRSVRCYAKTLSLDKAIPMCFDEKGEPTAFVKSASNHHLALYRTPKGKLVESIVTFWDAVDRARYGIPLVITHPREVMEQVLQRGDIPEQVLSLLPPSDWVFVDSLQQDEMVVIGLSDEELQRALEAQNYRKISEHLYRVQKMSSSYYVFRYHLETSVADDKNTSGRIPKFHRVQSLKAYEERNIRKVRVDLLGRISLL

SEQ ID NO: 346 - protein, 1121 aa, Streptococcus thermophilus
MSDLVLGLDIGIGSVGVGILNKVTGEIIHKNSRIFPAAQAENNLVRRTNRQGRRLARRKKHRRVRLNRLFEESGLITDFTKISINLNPYQLRVKGLTDELSNEELFIALKNMVKHRGISYLDDASDDGNSSVGDYAQIVKENSKQLETKTPGQIQLERYQTYGQLRGDFTVEKDGKKHRLINVFPTSAYRSEALRILQTQQEFNPQITDEFINRYLEILTGKRKYYHGPGNEKSRTDYGRYRTSGETLDNIFGILIGKCTFYPDEFRAAKASYTAQEFNLLNDLNNLTVPTETKKLSKEQKNQIINYVKNEKAMGPAKLFKYIAKLLSCDVADIKGYRIDKSGKAEIHTFEAYRKMKTLETLDIEQMDRETLDKLAYVLTLNTEREGIQEALEHEFADGSFSQKQVDELVQFRKANSSIFGKGWHNFSVKLMMELIPELYETSEEQMTILTRLGKQKTTSSSNKTKYIDEKLLTEEIYNPVVAKSVRQAIKIVNAAIKEYGDFDNIVIEMARETNEDDEKKAIQKIQKANKDEKDAAMLKAANQYNGKAELPHSVFHGHKQLATKIRLWHQQGERCLYTGKTISIHDLINNSNQFEVDHILPLSITFDDSLANKVLVYATANQEKGQRTPYQALDSMDDAWSFRELKAFVRESKTLSNKKKEYLLTEEDISKFDVRKKFIERNLVDTRYASRVVLNALQEHFRAHKIDTKVSVVRGQFTSQLRRHWGIEKTRDTYHHHAVDALIIAASSQLNLWKKQKNTLVSYSEDQLLDIETGELISDDEYKESVFKAPYQHFVDTLKSKEFEDSILFSYQVDSKFNRKISDATIYATRQAKVGKDKADETYVLGKIKDIYTQDGYDAFMKIYKKDKSKFLMYRHDPQTFEKVIEPILENYPNKQINEKGKEVPCNPFLKYKEEHGYIRKYSKKGNGPEIKSLKYYDSKLGNHIDITPKDSNNKVVLQSVSPWRADVYFNKTTGKYEILGLKYADLQFEKGTGTYKISQEKYNDIKKKEGVDSDSEFKFTLYKNDLLLVKDTETKEQQLFRFLSRTMPKQKHYVELKPYDKQKFEGGEALIKVLGNVANSGQCKKGLGKSNISIYKVRTDVLGNQHIIKNEGDKPKLDF

SEQ ID NO: 347 - protein, 1152 aa, Roseburia inulinivorans
MNAEHGKEGLLIMEENFQYRIGLDIGITSVGWAVLQNNSQDEPVRITDLGVRIFDVAENPKNGDALAAPRRDARTTRRRLRRRRHRLERIKFLLQENGLIEMDSFMERYYKGNLPDVYQLRYEGLDRKLKDEELAQVLIHIAKHRGFRSTRKAETKEKEGGAVLKATTENQKIMQEKGYRTVGEMLYLDEAFHTECLWNEKGYVLTPRNRPDDYKHTILRSMLVEEVHAIFAAQRAHGNQKATEGLEEAYVEIMTSQRSFDMGPGLQPDGKPSPYAMEGFGDRVGKCTFEKDEYRAPKATYTAELFVALQKINHTKLIDEFGTGRFFSEEERKTIIGLLLSSKELKYGTIRKKLNIDPSLKFNSLNYSAKKEGETEEERVLDTEKAKFASMFWTYEYSKCLKDRTEEMPVGEKADLFDRIGEILTAYKNDDSRSSRLKELGLSGEEIDGLLDLSPAKYQRVSLKAMRKMQPYLEDGLIYDKACEAAGYDFRALNDGNKKHLLKGEEINAIVNDITNPVVKRSVSQTIKVINAIIQKYGSPQAVNIELAREMSKNFQDRTNLEKEMKKRQQENERAKQQIIELGKQNPTGQDILKYRLWNDQGGYCLYSGKKIPLEELFDGGYDIDHILPYSITFDDSYRNKVLVTAQENRQKGNRTPYEYFGADEKRWEDYEASVRLLVRDYKKQQKLLKKNFTEEERKEFKERNLNDTKYITRVVYNMIRQNLELEPFNHPEKKKQVWAVNGAVTSYLRKRWGLMQKDRSTDRHHAMDAVVIACCTDGMIHKISRYMQGRELAYSRNFKFPDEETGEILNRDNFTREQWDEKFGVKVPLPWNSFRDELDIRLLNEDPKNFLLTHADVQRELDYPGWMYGEEESPIEEGRYINYIRPLFVSRMPNHKVTGSAHDATIRSARDYETRGVVITKVPLTDLKLNKDNEIEGYYDKDSDRLLYQALVRQLLLHGNDGKKAFAEDFHKPKADGTEGPVVRKVKIEKKQTSGVMVRGGTGIAANGEMVRIDVFRENGKYYFVPVYTADVVRKVLPNRAATHTKPYSEWRVMDDANFVFSLYSRDLIHVKSKKDIKTNLVNGGLLLQKEIFAYYTGADIATASIAGFANDSNFKFRGLGIQSLEIFEKCQVDILGNISVVRHENRQEFH

SEQ ID NO: 348 - protein, 1082 aa, Methylosinus trichosporium
MRVLGLDAGIASLGWALIEIEESNRGELSQGTIIGAGTWMFDAPEEKTQAGAKLKSEQRRTFRGQRRVVRRRRQRMNEVRRILHSHGLLPSSDRDALKQPGLDPWRIRAEALDRLLGPVELAVALGHIARHRGFKSNSKGAKTNDPADDTSKMKRAVNETREKLARFGSAAKMLVEDESFVLRQTPTKNGASEIVRRFRNREGDYSRSLLRDDLAAEMRALFTAQARFQSAIATADLQTAFTKAAFFQRPLQDSEKLVGPCPFEVDEKRAPKRGYSFELFRFLSRLNHVTLRDGKQERTLTRDELALAAADFGAAAKVSFTALRKKLKLPETTVFVGVKADEESKLDVVARSGKAAEGTARLRSVIVDALGELAWGALLCSPEKLDKIAEVISFRSDIGRISEGLAQAGCNAPLVDALTAAASDGRFDPFTGAGHISSKAARNILSGLRQGMTYDKACCAADYDHTASRERGAFDVGGHGREALKRILQEERISRELVGSPTARKALIESIKQVKAIVERYGVPDRIHVELARDVGKSIEEREEITRGIEKRNRQKDKLRGLFEKEVGRPPQDGARGKEELLRFELWSEQMGRCLYTDDYISPSQLVATDDAVQVDHILPWSRFADDSYANKTLCMAKANQDKKGRTPYEWFKAEKTDTEWDAFIVRVEALADMKGFKKRNYKLRNAEEAAAKFRNRNLNDTRWACRLLAEALKQLYPKGEKDKDGKERRRVFSRPGALTDRLRRAWGLQWMKKSTKGDRIPDDRHHALDAIVIAATTESLLQRATREVQEIEDKGLHYDLVKNVTPPWPGFREQAVEAVEKVFVARAERRRARGKAHDATIRHIAVREGEQRVYERRKVAELKLADLDRVKDAERNARLIEKLRNWIEAGSPKDDPPLSPKGDPIFKVRLVTKSKVNIALDTGNPKRPGTVDRGEMARVDVFRKASKKGKYEYYLVPIYPHDIATMKTPPIRAVQAYKPEDEWPEMDSSYEFCWSLVPMTYLQVISSKGEIFEGYYRGMNRSVGAIQLSAHSNSSDVVQGIGARTLTEFKKFNVDRFGRKHEVERELRTWRGETWRGKAYI

SEQ ID NO: 349 - protein, 1156 aa, Ruminococcus albus
MGNYYLGLDVGIGSIGWAVINIEKKRIEDFNVRIFKSGEIQEKNRNSRASQQCRRSRGLRRLYRRKSHRKLRLKNYLSIIGLTTSEKIDYYYETADNNVIQLRNKGLSEKLTPEEIAACLIHICNNRGYKDFYEVNVEDIEDPDERNEYKEEHDSIVLISNLMNEGGYCTPAEMICNCREFDEPNSVYRKFHNSAASKNHYLITRHMLVKEVDLILENQSKYYGILDDKTIAKIKDIIFAQRDFEIGPGKNERFRRFTGYLDSIGKCQFFKDQERGSRFTVIADIYAFVNVLSQYTYTNNRGESVFDTSFANDLINSALKNGSMDKRELKAIAKSYHIDISDKNSDTSLTKCFKYIKVVKPLFEKYGYDWDKLIENYTDTDNNVLNRIGIVLSQAQTPKRRREKLKALNIGLDDGLINELTKLKLSGTANVSYKYMQGSIEAFCEGDLYGKYQAKFNKEIPDIDENAKPQKLPPFKNEDDCEFFKNPVVFRSINETRKLINAIIDKYGYPAAVNIETADELNKTFEDRAIDTKRNNDNQKENDRIVKEIIECIKCDEVHARHLIEKYKLWEAQEGKCLYSGETITKEDMLRDKDKLFEVDHIVPYSLILDNTINNKALVYAEENQKKGQRTPLMYMNEAQAADYRVRVNTMFKSKKCSKKKYQYLMLPDLNDQELLGGWRSRNLNDTRYICKYLVNYLRKNLRFDRSYESSDEDDLKIRDHYRVFPVKSRFTSMFRRWWLNEKTWGRYDKAELKKLTYLDHAADAIIIANCRPEYVVLAGEKLKLNKMYHQAGKRITPEYEQSKKACIDNLYKLFRMDRRTAEKLLSGHGRLTPIIPNLSEEVDKRLWDKNIYEQFWKDDKDKKSCEELYRENVASLYKGDPKFASSLSMPVISLKPDHKYRGTITGEEAIRVKEIDGKLIKLKRKSISEITAESINSIYTDDKILIDSLKTIFEQADYKDVGDYLKKTNQHFFTTSSGKRVNKVTVIEKVPSRWLRKEIDDNNFSLLNDSSYYCIELYKDSKGDNNLQGIAMSDIVHDRKTKKLYLKPDFNYPDDYYTHVMYIFPGDYLRIKSTSKKSGEQLKFEGYFISVKNVNENSFRFISDNKPCAKDKRVSITKKDIVIKLAVDLMGKVQGENNGKGISCGEPLSLLKEKN

SEQ ID NO: 350 - protein, 1187 aa, Bifidobacterium longum
MLSRQLLGASHLARPVSYSYNVQDNDVHCSYGERCFMRGKRYRIGIDVGLNSVGLAAVEVSDENSPVRLLNAQSVIHDGGVDPQKNKEAITRKNMSGVARRTRRMRRRKRERLHKLDMLLGKFGYPVIEPESLDKPFEEWHVRAELATRYIEDDELRRESISIALRHMARHRGWRNPYRQVDSLISDNPYSKQYGELKEKAKAYNDDATAAEEESTPAQLVVAMLDAGYAEAPRLRWRTGSKKPDAEGYLPVRLMQEDNANELKQIFRVQRVPADEWKPLFRSVFYAVSPKGSAEQRVGQDPLAPEQARALKASLAFQEYRIANVITNLRIKDASAELRKLTVDEKQSIYDQLVSPSSEDITWSDLCDFLGFKRSQLKGVGSLTEDGEERISSRPPRLTSVQRIYESDNKIRKPLVAWWKSASDNEHEAMIRLLSNTVDIDKVREDVAYASAIEFIDGLDDDALTKLDSVDLPSGRAAYSVETLQKLTRQMLTTDDDLHEARKTLFNVTDSWRPPADPIGEPLGNPSVDRVLKNVNRYLMNCQQRWGNPVSVNIEHVRSSFSSVAFARKDKREYEKNNEKRSIFRSSLSEQLRADEQMEKVRESDLRRLEAIQRQNGQCLYCGRTITFRTCEMDHIVPRKGVGSTNTRTNFAAVCAECNRMKSNTPFAIWARSEDAQTRGVSLAEAKKRVTMFTFNPKSYAPREVKAFKQAVIARLQQTEDDAAIDNRSIESVAWMADELHRRIDWYFNAKQYVNSASIDDAEAETMKTTVSVFQGRVTASARRAAGIEGKIHFIGQQSKTRLDRRHHAVDASVIAMMNTAAAQTLMERESLRESQRLIGLMPGERSWKEYPYEGTSRYESFHLWLDNMDVLLELLNDALDNDRIAVMQSQRYVLGNSIAHDATIHPLEKVPLGSAMSADLIRRASTPALWCALTRLPDYDEKEGLPEDSHREIRVHDTRYSADDEMGFFASQAAQIAVQEGSADIGSAIHHARVYRCWKTNAKGVRKYFYGMIRVFQTDLLRACHDDLFTVPLPPQSISMRYGEPRVVQALQSGNAQYLGSLVVGDEIEMDFSSLDVDGQIGEYLQFFSQFSGGNLAWKHWVVDGFFNQTQLRIRPRYLAAEGLAKAFSDDVVPDGVQKIVTKQGWLPPVNTASKTAVRIVRRNAFGEPRLSSAHHMPCSWQWRHE

SEQ ID NO: 351 - protein, 1150 aa, Enterococcus faecalis
MYSIGLDLGISSVGWSVIDERTGNVIDLGVRLFSAKNSEKNLERRTNRGGRRLIRRKTNRLKDAKKILAAVGFYEDKSLKNSCPYQLRVKGLTEPLSRGEIYKVTLHILKKRGISYLDEVDTEAAKESQDYKEQVRKNAQLLTKYTPGQIQLQRLKENNRVKTGINAQGNYQLNVFKVSAYANELATILKTQQAFYPNELTDDWIALFVQPGIAEEAGLIYRKRPYYHGPGNEANNSPYGRWSDFQKTGEPATNIFDKLIGKDFQGELRASGLSLSAQQYNLLNDLTNLKIDGEVPLSSEQKEYILTELMTKEFTRFGVNDVVKLLGVKKERLSGWRLDKKGKPEIHTLKGYRNWRKIFAEAGIDLATLPTETIDCLAKVLTLNTEREGIENTLAFELPELSESVKLLVLDRYKELSQSISTQSWHRFSLKTLHLLIPELMNATSEQNTLLEQFQLKSDVRKRYSEYKKLPTKDVLAEIYNPTVNKTVSQAFKVIDALLVKYGKEQIRYITIEMPRDDNEEDEKKRIKELHAKNSQRKNDSQSYFMQKSGWSQEKFQTTIQKNRRFLAKLLYYYEQDGICAYTGLPISPELLVSDSTEIDHIIPISISLDDSINNKVLVLSKANQVKGQQTPYDAWMDGSFKKINGKFSNWDDYQKWVESRHFSHKKENNLLETRNIFDSEQVEKFLARNLNDTRYASRLVLNTLQSFFTNQETKVRVVNGSFTHTLRKKWGADLDKTRETHHHHAVDATLCAVTSFVKVSRYHYAVKEETGEKVMREIDFETGEIVNEMSYWEFKKSKKYERKTYQVKWPNFREQLKPVNLHPRIKFSHQVDRKANRKLSDATIYSVREKTEVKTLKSGKQKITTDEYTIGKIKDIYTLDGWEAFKKKQDKLLMKDLDEKTYERLLSIAETTPDFQEVEEKNGKVKRVKRSPFAVYCEENDIPAIQKYAKKNNGPLIRSLKYYDGKLNKHINITKDSQGRPVEKTKNGRKVTLQSLKPYRYDIYQDLETKAYYTVQLYYSDLRFVEGKYGITEKEYMKKVAEQTKGQVVRFCFSLQKNDGLEIEWKDSQRYDVRFYNFQSANSINFKGLEQEMMPAENQFKQKPYNNGAINLNIAKYGKEGKKLRKFNTDILGKKHYLFYEKEPKNIIK

SEQ ID NO: 352 - protein, 1236 aa, Mycoplasma mobile
MYFYKNKENKLNKKVVLGLDLGIASVGWCLTDISQKEDNKFPIILHGVRLFETVDDSDDKLLNETRRKKRGQRRRNRRLFTRKRDFIKYLIDNNIIELEFDKNPKILVRNFIEKYINPFSKNLELKYKSVTNLPIGFHNLRKAAINEKYKLDKSELIVLLYFYLSLRGAFFDNPEDTKSKEMNKNEIEIFDKNESIKNAEFPIDKIIEFYKISGKIRSTINLKFGHQDYLKEIKQVFEKQNIDFMNYEKFAMEEKSFFSRIRNYSEGPGNEKSFSKYGLYANENGNPELIINEKGQKIYTKIFKTLWESKIGKCSYDKKLYRAPKNSFSAKVFDITNKLTDWKHKNEYISERLKRKILLSRFLNKDSKSAVEKILKEENIKFENLSEIAYNKDDNKINLPIINAYHSLTTIFKKHLINFENYLISNENDLSKLMSFYKQQSEKLFVPNEKGSYEINQNNNVLHIFDAISNILNKFSTIQDRIRILEGYFEFSNLKKDVKSSEIYSEIAKLREFSGTSSLSFGAYYKFIPNLISEGSKNYSTISYEEKALQNQKNNFSHSNLFEKTWVEDLIASPTVKRSLRQTMNLLKEIFKYSEKNNLEIEKIVVEVTRSSNNKHERKKIEGINKYRKEKYEELKKVYDLPNENTTLLKKLWLLRQQQGYDAYSLRKIEANDVINKPWNYDIDHIVPRSISFDDSFSNLVIVNKLDNAKKSNDLSAKQFIEKIYGIEKLKEAKENWGNWYLRNANGKAFNDKGKFIKLYTIDNLDEFDNSDFINRNLSDTSYITNALVNHLTFSNSKYKYSVVSVNGKQTSNLRNQIAFVGIKNNKETEREWKRPEGFKSINSNDFLIREEGKNDVKDDVLIKDRSFNGHHAEDAYFITIISQYFRSFKRIERLNVNYRKETRELDDLEKNNIKFKEKASFDNFLLINALDELNEKLNQMRFSRMVITKKNTQLFNETLYSGKYDKGKNTIKKVEKLNLLDNRTDKIKKIEEFFDEDKLKENELTKLHIFNHDKNLYETLKIIWNEVKIEIKNKNLNEKNYFKYFVNKKLQEGKISFNEWVPILDNDFKIIRKIRYIKFSSEEKETDEIIFSQSNFLKIDQRQNFSFHNTLYWVQIWVYKNQKDQYCFISIDARNSKFEKDEIKINYEKLKTQKEKLQIINEEPILKINKGDLFENEEKELFYIVGRDEKPQKLEIKYILGKKIKDQKQIQKPVKKYFPNWKKVNLTYMGEIFKK

SEQ ID NO: 353 - protein, 1105 aa, Actinomyces coleocanis
MDNKNYRIGIDVGLNSIGFCAVEVDQHDTPLGFLNLSVYRHDAGIDPNGKKTNTTRLAMSGVARRTRRLFRKRKRRLAALDRFIEAQGWTLPDHADYKDPYTPWLVRAELAQTPIRDENDLHEKLAIAVRHIARHRGWRSPWVPVRSLHVEQPPSDQYLALKERVEAKTLLQMPEGATPAEMVVALDLSVDVNLRPKNREKTDTRPENKKPGFLGGKLMQSDNANELRKIAKIQGLDDALLRELIELVFAADSPKGASGELVGYDVLPGQHGKRRAEKAHPAFQRYRIASIVSNLRIRHLGSGADERLDVETQKRVFEYLLNAKPTADITWSDVAEEIGVERNLLMGTATQTADGERASAKPPVDVTNVAFATCKIKPLKEWWLNADYEARCVMVSALSHAEKLTEGTAAEVEVAEFLQNLSDEDNEKLDSFSLPIGRAAYSVDSLERLTKRMIENGEDLFEARVNEFGVSEDWRPPAEPIGARVGNPAVDRVLKAVNRYLMAAEAEWGAPLSVNIEHVREGFISKRQAVEIDRENQKRYQRNQAVRSQIADHINATSGVRGSDVTRYLAIQRQNGECLYCGTAITFVNSEMDHIVPRAGLGSTNTRDNLVATCERCNKSKSNKPFAVWAAECGIPGVSVAEALKRVDFWIADGFASSKEHRELQKGVKDRLKRKVSDPEIDNRSMESVAWMARELAHRVQYYFDEKHTGTKVRVFRGSLTSAARKASGFESRVNFIGGNGKTRLDRRHHAMDAATVAMLRNSVAKTLVLRGNIRASERAIGAAETWKSFRGENVADRQIFESWSENMRVLVEKFNLALYNDEVSIFSSLRLQLGNGKAHDDTITKLQMHKVGDAWSLTEIDRASTPALWCALTRQPDFTWKDGLPANEDRTIIVNGTHYGPLDKVGIFGKAAASLLVRGGSVDIGSAIHHARIYRIAGKKPTYGMVRVFAPDLLRYRNEDLFNVELPPQSVSMRYAEPKVREAIREGKAEYLGWLVVGDELLLDLSSETSGQIAELQQDFPGTTHWTVAGFFSPSRLRLRPVYLAQEGLGEDVSEGSKSIIAGQGWRPAVNKVFGSAMPEVIRRDGLGRKRRFSYSGLPVSWQG

SEQ ID NO: 354 - protein, 1079 aa, Dinoroseobacter shibae
MRLGLDIGTSSIGWWLYETDGAGSDARITGVVDGGVRIFSDGRDPKSGASLAVDRRAARAMRRRRDRYLRRRATLMKVLAETGLMPADPAEAKALEALDPFALRAAGLDEPLPLPHLGRALFHLNQRRGFKSNRKTDRGDNESGKIKDATARLDMEMMANGARTYGEFLHKRRQKATDPRHVPSVRTRLSIANRGGPDGKEEAGYDFYPDRRHLEEEFHKLWAAQGAHHPELTETLRDLLFEKIFFQRPLKEPEVGLCLFSGHHGVPPKDPRLPKAHPLTQRRVLYETVNQLRVTADGREARPLTREERDQVIHALDNKKPTKSLSSMVLKLPALAKVLKLRDGERFTLETGVRDAIACDPLRASPAHPDRFGPRWSILDADAQWEVISRIRRVQSDAEHAALVDWLTEAHGLDRAHAEATAHAPLPDGYGRLGLTATTRILYQLTADVVTYADAVKACGWHHSDGRTGECFDRLPYYGEVLERHVIPGSYHPDDDDITRFGRITNPTVHIGLNQLRRLVNRIIETHGKPHQIVVELARDLKKSEEQKRADIKRIRDTTEAAKKRSEKLEELEIEDNGRNRMLLRLWEDLNPDDAMRRFCPYTGTRISAAMIFDGSCDVDHILPYSRTLDDSFPNRTLCLREANRQKRNQTPWQAWGDTPHWHAIAANLKNLPENKRWRFAPDAMTRFEGENGFLDRALKDTQYLARISRSYLDTLFTKGGHVWVVPGRFTEMLRRHWGLNSLLSDAGRGAVKAKNRTDHRHHAIDAAVIAATDPGLLNRISRAAGQGEAAGQSAELIARDTPPPWEGFRDDLRVRLDRIIVSHRADHGRIDHAARKQGRDSTAGQLHQETAYSIVDDIHVASRTDLLSLKPAQLLDEPGRSGQVRDPQLRKALRVATGGKTGKDFENALRYFASKPGPYQAIRRVRIIKPLQAQARVPVPAQDPIKAYQGGSNHLFEIWRLPDGEIEAQVITSFEAHTLEGEKRPHPAAKRLLRVHKGDMVALERDGRRVVGHVQKMDIANGLFIVPHNEANADTRNNDKSDPFKWIQIGARPAIASGIRRVSVDEIGRLRDGGTRPI

SEQ ID NO: 355 - protein, 1181 aa, Actinomyces sp.
MLHCIAVIRVPPSEEPGFFETHADSCALCHHGCMTYAANDKAIRYRVGIDVGLRSIGFCAVEVDDEDHPIRILNSVVHVHDAGTGGPGETESLRKRSGVAARARRRGRAEKQRLKKLDVLLEELGWGVSSNELLDSHAPWHIRKRLVSEYIEDETERRQCLSVAMAHIARHRGWRNSFSKVDTLLLEQAPSDRMQGLKERVEDRTGLQFSEEVTQGELVATLLEHDGDVTIRGFVRKGGKATKVHGVLEGKYMQSDLVAELRQICRTQRVSETTFEKLVLSIFHSKEPAPSAARQRERVGLDELQLALDPAAKQPRAERAHPAFQKFKVVATLANMRIREQSAGERSLTSEELNRVARYLLNHTESESPTWDDVARKLEVPRHRLRGSSRASLETGGGLTYPPVDDTTVRVMSAEVDWLADWWDCANDESRGHMIDAISNGCGSEPDDVEDEEVNELISSATAEDMLKLELLAKKLPSGRVAYSLKTLREVTAAILETGDDLSQAITRLYGVDPGWVPTPAPIEAPVGNPSVDRVLKQVARWLKFASKRWGVPQTVNIEHTREGLKSASLLEEERERWERFEARREIRQKEMYKRLGISGPFRRSDQVRYEILDLQDCACLYCGNEINFQTFEVDHIIPRVDASSDSRRTNLAAVCHSCNSAKGGLAFGQWVKRGDCPSGVSLENAIKRVRSWSKDRLGLTEKAMGKRKSEVISRLKTEMPYEEFDGRSMESVAWMAIELKKRIEGYFNSDRPEGCAAVQVNAYSGRLTACARRAAHVDKRVRLIRLKGDDGHHKNRFDRRNHAMDALVIALMTPAIARTIAVREDRREAQQLTRAFESWKNFLGSEERMQDRWESWIGDVEYACDRLNELIDADKIPVTENLRLRNSGKLHADQPESLKKARRGSKRPRPQRYVLGDALPADVINRVTDPGLWTALVRAPGFDSQLGLPADLNRGLKLRGKRISADFPIDYFPTDSPALAVQGGYVGLEFHHARLYRIIGPKEKVKYALLRVCAIDLCGIDCDDLFEVELKPSSISMRTADAKLKEAMGNGSAKQIGWLVLGDEIQIDPTKFPKQSIGKFLKECGPVSSWRVSALDTPSKITLKPRLLSNEPLLKTSRVGGHESDLVVAECVEKIMKKTGWVVEINALCQSGLIRVIRRNALGEVRTSPKSGLPISLNLR

SEQ ID NO: 356 - protein, 1113 aa, Alcanivorax sp.
MRYRVGLDLGTASVGAAVFSMDEQGNPMELIWHYERLFSEPLVPDMGQLKPKKAARRLARQQRRQIDRRASRLRRIAIVSRRLGIAPGRNDSGVHGNDVPTLRAMAVNERIELGQLRAVLLRMGKKRGYGGTFKAVRKVGEAGEVASGASRLEEEMVALASVQNKDSVTVGEYLAARVEHGLPSKLKVAANNEYYAPEYALFRQYLGLPAIKGRPDCLPNMYALRHQIEHEFERIWATQSQFHDVMKDHGVKEEIRNAIFFQRPLKSPADKVGRCSLQTNLPRAPRAQIAAQNFRIEKQMADLRWGMGRRAEMLNDHQKAVIRELLNQQKELSFRKIYKELERAGCPGPEGKGLNMDRAALGGRDDLSGNTTLAAWRKLGLEDRWQELDEVTQIQVINFLADLGSPEQLDTDDWSCRFMGKNGRPRNFSDEFVAFMNELRMTDGFDRLSKMGFEGGRSSYSIKALKALTEWMIAPHWRETPETHRVDEEAAIRECYPESLATPAQGGRQSKLEPPPLTGNEVVDVALRQVRHTINMMIDDLGSVPAQIVVEMAREMKGGVTRRNDIEKQNKRFASERKKAAQSIEENGKTPTPARILRYQLWIEQGHQCPYCESNISLEQALSGAYTNFEHILPRTLTQIGRKRSELVLAHRECNDEKGNRTPYQAFGHDDRRWRIVEQRANALPKKSSRKTRLLLLKDFEGEALTDESIDEFADRQLHESSWLAKVTTQWLSSLGSDVYVSRGSLTAELRRRWGLDTVIPQVRFESGMPVVDEEGAEITPEEFEKFRLQWEGHRVTREMRTDRRPDKRIDHRHHLVDAIVTALTSRSLYQQYAKAWKVADEKQRHGRVDVKVELPMPILTIRDIALEAVRSVRISHKPDRYPDGRFFEATAYGIAQRLDERSGEKVDWLVSRKSLTDLAPEKKSIDVDKVRANISRIVGEAIRLHISNIFEKRVSKGMTPQQALREPIEFQGNILRKVRCFYSKADDCVRIEHSSRRGHHYKMLLNDGFAYMEVPCKEGILYGVPNLVRPSEAVGIKRAPESGDFIRFYKGDTVKNIKTGRVYTIKQILGDGGGKLILTPVTETKPADLLSAKWGRLKVGGRNIHLLRLCAE

SEQ ID NO: 357 - protein, 1052 aa, Aminomonas paucivorans
MIGEHVRGGCLFDDHWTPNWGAFRLPNTVRTFTKAENPKDGSSLAEPRRQARGLRRRLRRKTQRLEDLRRLLAKEGVLSLSDLETLFRETPAKDPYQLRAEGLDRPLSFPEWVRVLYHITKHRGFQSNRRNPVEDGQERSRQEEEGKLLSGVGENERLLREGGYRTAGEMLARDPKFQDHRRNRAGDYSHTLSRSLLLEEARRLFQSQRTLGNPHASSNLEEAFLHLVAFQNPFASGEDIRNKAGHCSLEPDQIRAPRRSASAETFMLLQKTGNLRLIHRRTGEERPLTDKEREQIHLLAWKQEKVTHKTLRRHLEIPEEWLFTGLPYHRSGDKAEEKLFVHLAGIHEIRKALDKGPDPAVWDTLRSRRDLLDSIADTLTFYKNEDEILPRLESLGLSPENARALAPLSFSGTAHLSLSALGKLLPHLEEGKSYTQARADAGYAAPPPDRHPKLPPLEEADWRNPVVFRALTQTRKVVNALVRRYGPPWCIHLETARELSQPAKVRRRIETEQQANEKKKQQAEREFLDIVGTAPGPGDLLKMRLWREQGGFCPYCEEYLNPTRLAEPGYAEMDHILPYSRSLDNGWHNRVLVHGKDNRDKGNRTPFEAFGGDTARWDRLVAWVQASHLSAPKKRNLLREDFGEEAERELKDRNLTDTRFITKTAATLLRDRLTFHPEAPKDPVMTLNGRLTAFLRKQWGLHKNRKNGDLHHALDAAVLAVASRSFVYRLSSHNAAWGELPRGREAENGFSLPYPAFRSEVLARLCPTREEILLRLDQGGVGYDEAFRNGLRPVFVSRAPSRRLRGKAHMETLRSPKWKDHPEGPRTASRIPLKDLNLEKLERMVGKDRDRKLYEALRERLAAFGGNGKKAFVAPFRKPCRSGEGPLVRSLRIFDSGYSGVELRDGGEVYAVADHESMVRVDVYAKKNRFYLVPVYVADVARGIVKNRAIVAHKSEEEWDLVDGSFDFRFSLFPGDLVEIEKKDGAYLGYYKSCHRGDGRLLLDRHDRMPRESDCGTFYVSTRKDVLSMSKYQVDPLGEIRLVGSEKPPFVL

SEQ ID NO: 358 - protein, 1233 aa, Mycoplasma canis
MEKKRKVTLGFDLGIASVGWAIVDSETNQVYKLGSRLFDAPDTNLERRTQRGTRRLLRRRKYRNQKFYNLVKRTEVFGLSSREAIENRFRELSIKYPNIIELKTKALSQEVCPDEIAWILHDYLKNRGYFYDEKETKEDFDQQTVESMPSYKLNEFYKKYGYFKGALSQPTESEMKDNKDLKEAFFFDFSNKEWLKEINYFFNVQKNILSETFIEEFKKIFSFTRDISKGPGSDNMPSPYGIFGEFGDNGQGGRYEHIWDKNIGKCSIFTNEQRAPKYLPSALIFNFLNELANIRLYSTDKKNIQPLWKLSSVDKLNILLNLFNLPISEKKKKLTSTNINDIVKKESIKSIMISVEDIDMIKDEWAGKEPNVYGVGLSGLNIEESAKENKFKFQDLKILNVLINLLDNVGIKFEFKDRNDIIKNLELLDNLYLFLIYQKESNNKDSSIDLFIAKNESLNIENLKLKLKEFLLGAGNEFENHNSKTHSLSKKAIDEILPKLLDNNEGWNLEAIKNYDEEIKSQIEDNSSLMAKQDKKYLNDNFLKDAILPPNVKVTFQQAILIFNKIIQKFSKDFEIDKVVIELAREMTQDQENDALKGIAKAQKSKKSLVEERLEANNIDKSVFNDKYEKLIYKIFLWISQDFKDPYTGAQISVNEIVNNKVEIDHIIPYSLCFDDSSANKVLVHKQSNQEKSNSLPYEYIKQGHSGWNWDEFTKYVKRVFVNNVDSILSKKERLKKSENLLTASYDGYDKLGFLARNLNDTRYATILFRDQLNNYAEHHLIDNKKMFKVIAMNGAVTSFIRKNMSYDNKLRLKDRSDFSHHAYDAAIIALFSNKTKTLYNLIDPSLNGIISKRSEGYWVIEDRYTGEIKELKKEDWTSIKNNVQARKIAKEIEEYLIDLDDEVFFSRKTKRKTNRQLYNETIYGIATKTDEDGITNYYKKEKFSILDDKDIYLRLLREREKFVINQSNPEVIDQIIEIIESYGKENNIPSRDEAINIKYTKNKINYNLYLKQYMRSLTKSLDQFSEEFINQMIANKTFVLYNPTKNTTRKIKFLRLVNDVKINDIRKNQVINKFNGKNNEPKAFYENINSLGAIVFKNSANNFKTLSINTQIAIFGDKNWDIEDFKTYNMEKIEKYKEIYGIDKTYNFHSFIFPGTILLDKQNKEFYYISSIQTVRDIIEIKFLNKIEFKDENKNQDTSKTPKRLMFGIKSIMNNYEQVDISPFGINKKIFE

SEQ ID NO: 359 - protein, 1119 aa, Lactobacillus coryniformis
MGYRIGLDVGITSTGYAVLKTDKNGLPYKILTLDSVIYPRAENPQTGASLAEPRRIKRGLRRRTRRTKFRKQRTQQLFIHSGLLSKPEIEQILATPQAKYSVYELRVAGLDRRLTNSELFRVLYFFIGHRGFKSNRKAELNPENEADKKQMGQLLNSIEEIRKAIAEKGYRTVGELYLKDPKYNDHKRNKGYIDGYLSTPNRQMLVDEIKQILDKQRELGNEKLTDEFYATYLLGDENRAGIFQAQRDFDEGPGAGPYAGDQIKKMVGKDIFEPTEDRAAKATYTFQYFNLLQKMTSLNYQNTTGDTWHTLNGLDRQAIIDAVFAKAEKPTKTYKPTDFGELRKLLKLPDDARFNLVNYGSLQTQKEIETVEKKTRFVDFKAYHDLVKVLPEEMWQSRQLLDHIGTALTLYSSDKRRRRYFAEELNLPAELIEKLLPLNFSKFGHLSIKSMQNIIPYLEMGQVYSEATTNTGYDFRKKQISKDTIREEITNPVVRRAVTKTIKIVEQIIRRYGKPDGINIELARELGRNFKERGDIQKRQDKNRQTNDKIAAELTELGIPVNGQNIIRYKLHKEQNGVDPYTGDQIPFERAFSEGYEVDHIIPYSISWDDSYTNKVLTSAKCNREKGNRIPMVYLANNEQRLNALTNIADNIIRNSRKRQKLLKQKLSDEELKDWKQRNINDTRFITRVLYNYFRQAIEFNPELEKKQRVLPLNGEVTSKIRSRWGFLKVREDGDLHHAIDATVIAAITPKFIQQVTKYSQHQEVKNNQALWHDAEIKDAEYAAEAQRMDADLFNKIFNGFPLPWPEFLDELLARISDNPVEMMKSRSWNTYTPIEIAKLKPVFVVRLANHKISGPAHLDTIRSAKLFDEKGIVLSRVSITKLKINKKGQVATGDGIYDPENSNNGDKVVYSAIRQALEAHNGSGELAFPDGYLEYVDHGTKKLVRKVRVAKKVSLPVRLKNKAAADNGSMVRIDVFNTGKKFVFVPIYIKDTVEQVLPNKAIARGKSLWYQITESDQFCFSLYPGDMVHIESKTGIKPKYSNKENNTSVVPIKNFYGYFDGADIATASILVRAHDSSYTARSIGIAGLLKFEKYQVDYFGRYHKVHEKKRQLFVKRDE

SEQ ID NO: 360 - protein, 1195 aa, Elusimicrobium minutum
MQKNINTKQNHIYIKQAQKIKEKLGDKPYRIGLDLGVGSIGFAIVSMEENDGNVLLPKEIIMVGSRIFKASAGAADRKLSRGQRNNHRHTRERMRYLWKVLAEQKLALPVPADLDRKENSSEGETSAKRFLGDVLQKDIYELRVKSLDERLSLQELGYVLYHIAGHRGSSAIRTFENDSEEAQKENTENKKIAGNIKRLMAKKNYRTYGEYLYKEFFENKEKHKREKISNAANNHKFSPTRDLVIKEAEAILKKQAGKDGFHKELTEEYIEKLTKAIGYESEKLIPESGFCPYLKDEKRLPASHKLNEERRLWETLNNARYSDPIVDIVTGEITGYYEKQFTKEQKQKLFDYLLTGSELTPAQTKKLLGLKNTNFEDIILQGRDKKAQKIKGYKLIKLESMPFWARLSEAQQDSFLYDWNSCPDEKLLTEKLSNEYHLTEEEIDNAFNEIVLSSSYAPLGKSAMLIILEKIKNDLSYTEAVEEALKEGKLTKEKQAIKDRLPYYGAVLQESTQKIIAKGFSPQFKDKGYKTPHTNKYELEYGRIANPVVHQTLNELRKLVNEIIDILGKKPCEIGLETARELKKSAEDRSKLSREQNDNESNRNRIYEIYIRPQQQVIITRRENPRNYILKFELLEEQKSQCPFCGGQISPNDIINNQADIEHLFPIAESEDNGRNNLVISHSACNADKAKRSPWAAFASAAKDSKYDYNRILSNVKENIPHKAWRFNQGAFEKFIENKPMAARFKTDNSYISKVAHKYLACLFEKPNIICVKGSLTAQLRMAWGLQGLMIPFAKQLITEKESESFNKDVNSNKKIRLDNRHHALDAIVIAYASRGYGNLLNKMAGKDYKINYSERNWLSKILLPPNNIVWENIDADLESFESSVKTALKNAFISVKHDHSDNGELVKGTMYKIFYSERGYTLTTYKKLSALKLTDPQKKKTPKDFLETALLKFKGRESEMKNEKIKSAIENNKRLFDVIQDNLEKAKKLLEEENEKSKAEGKKEKNINDASIYQKAISLSGDKYVQLSKKEPGKFFAISKPTPTTTGYGYDTGDSLCVDLYYDNKGKLCGEIIRKIDAQQKNPLKYKEQGFTLFERIYGGDILEVDFDIHSDKNSFRNNTGSAPENRVFIKVGTFTEITNNNIQIWFGNIIKSTGGQDDSFTINSMQQYNPRKLILSSCGFIKYRSPILKNKEG

SEQ ID NO: 361 - protein, 1082 aa, Neisseria meningitidis; identical to SEQ ID NO: 25

SEQ ID NO: 362 - protein, 1056 aa, Pasteurella multocida
MQTTNLSYILGLDLGIASVGWAVVEINENEDPIGLIDVGVRIFERAEVPKTGESLALSRRLARSTRRLIRRRAHRLLLAKRFLKREGILSTIDLEKGLPNQAWELRVAGLERRLSAIEWGAVLLHLIKHRGYLSKRKNESQTNNKELGALLSGVAQNHQLLQSDDYRTPAELALKKFAKEEGHIRNQRGAYTHTFNRLDLLAELNLLFAQQHQFGNPHCKEHIQQYMTELLMWQKPALSGEAILKMLGKCTHEKNEFKAAKHTYSAERFVWLTKLNNLRILEDGAERALNEEERQLLINHPYEKSKLTYAQVRKLLGLSEQAIFKHLRYSKENAESATFMELKAWHAIRKALENQGLKDTWQDLAKKPDLLDEIGTAFSLYKTDEDIQQYLTNKVPNSVINALLVSLNFDKFIELSLKSLRKILPLMEQGKRYDQACREIYGHHYGEANQKTSQLLPAIPAQEIRNPVVLRTLSQARKVINAIIRQYGSPARVHIETGRELGKSFKERREIQKQQEDNRTKRESAVQKFKELFSDFSSEPKSKDILKFRLYEQQHGKCLYSGKEINIHRLNEKGYVEIDHALPFSRTWDDSFNNKVLVLASENQNKGNQTPYEWLQGKINSERWKNFVALVLGSQCSAAKKQRLLTQVIDDNKFIDRNLNDTRYIARFLSNYIQENLLLVGKNKKNVFTPNGQITALLRSRWGLIKARENNNRHHALDAIVVACATPSMQQKITRFIRFKEVHPYKIENRYEMVDQESGEIISPHFPEPWAYFRQEVNIRVFDNHPDTVLKEMLPDRPQANHQFVQPLFVSRAPTRKMSGQGHMETIKSAKRLAEGISVLRIPLTQLKPNLLENMVNKEREPALYAGLKARLAEFNQDPAKAFATPFYKQGGQQVKAIRVEQVQKSGVLVRENNGVADNASIVRTDVFIKNNKFFLVPIYTWQVAKGILPNKAIVAHKNEDEWEEMDEGAKFKFSLFPNDLVELKTKKEYFFGYYIGLDRATGNISLKEHDGEISKGKDGVYRVGVKLALSFEKYQVDELGKNRQICRPQQRQPVR

SEQ ID NO: 363 - protein, 1059 aa, Rhodovulum sp.
MGIRFAFDLGTNSIGWAVWRTGPGVFGEDTAASLDGSGVLIFKDGRNPKDGQSLATMRRVPRQSRKRRDRFVLRRRDLLAALRKAGLFPVDVEEGRRLAATDPYHLRAKALDESLTPHEMGRVIFHLNQRRGFRSNRKADRQDREKGKIAEGSKRLAETLAATNCRTLGEFLWSRHRGTPRTRSPTRIRMEGEGAKALYAFYPTREMVRAEFERLWTAQSRFAPDLLTPERHEEIAGILFRQRDLAPPKIGCCTFEPSERRLPRALPSVEARGIYERLAHLRITTGPVSDRGLTRPERDVLASALLAGKSLTFKAVRKTLKILPHALVNFEEAGEKGLDGALTAKLLSKPDHYGAAWHGLSFAEKDTFVGKLLDEADEERLIRRLVTENRLSEDAARRCASIPLADGYGRLGRTANTEILAALVEETDETGTVVTYAEAVRRAGERTGRNWHHSDERDGVILDRLPYYGEILQRHVVPGSGEPEEKNEAARWGRLANPTVHIGLNQLRKVVNRLIAAHGRPDQIVVELARELKLNREQKERLDRENRKNREENERRTAILAEHGQRDTAENKIRLRLFEEQARANAGIALCPYTGRAIGIAELFTSEVEIDHILPVSLTLDDSLANRVLCRREANREKRRQTPFQAFGATPAWNDIVARAAKLPPNKRWRFDPAALERFEREGGFLGRQLNETKYLSRLAKIYLGKICDPDRVYVTPGTLTGLLRARWGLNSILSDSNFKNRSDHRHHAVDAVVIGVLTRGMIQRIAHDAARAEDQDLDRVFRDVPVPFEDFRDHVRERVSTITVAVKPEHGKGGALHEDTSYGLVPDTDPNAALGNLVVRKPIRSLTAGEVDRVRDRALRARLGALAAPFRDESGRVRDAKGLAQALEAFGAENGIRRVRILKPDASVVTIADRRTGVPYRAVAPGENHHVDIVQMRDGSWRGFAASVFEVNRPGWRPEWEVKKLGGKLVMRLHKGDMVELSDKDGQRRVKVVQQIEISANRVRLSPHNDGGKLQDRHADADDPFRWDLATIPLLKDRGCVAVRVDPIGVVTLRRSNV

SEQ ID NO: 364 - protein, 1096 aa, Eubacterium dolichum
MMEVFMGRLVLGLDIGITSVGFGIIDLDESEIVDYGVRLFKEGTAAENETRRTKRGGRRLKRRRVTRREDMLHLLKQAGIISTSFHPLNNPYDVRVKGLNERLNGEELATALLHLCKHRGSSVETIEDDEAKAKEAGETKKVLSMNDQLLKSGKYVCEIQKERLRTNGHIRGHENNFKTRAYVDEAFQILSHQDLSNELKSAIITIISRKRMYYDGPGGPLSPTPYGRYTYFGQKEPIDLIEKMRGKCSLFPNEPRAPKLAYSAELFNLLNDLNNLSIEGEKLTSEQKAMILKIVHEKGKITPKQLAKEVGVSLEQIRGFRIDTKGSPLLSELTGYKMIREVLEKSNDEHLEDHVFYDEIAEILTKTKDIEGRKKQISELSSDLNEESVHQLAGLTKFTAYHSLSFKALRLINEEMLKTELNQMQSITLFGLKQNNELSVKGMKNIQADDTAILSPVAKRAQRETFKVVNRLREIYGEFDSIVVEMAREKNSEEQRKAIRERQKFFEMRNKQVADIIGDDRKINAKLREKLVLYQEQDGKTAYSLEPIDLKLLIDDPNAYEVDHIIPISISLDDSITNKVLVTHRENQEKGNLTPISAFVKGRFTKGSLAQYKAYCLKLKEKNIKTNKGYRKKVEQYLLNENDIYKYDIQKEFINRNLVDTSYASRVVLNTLTTYFKQNEIPTKVFTVKGSLTNAFRRKINLKKDRDEDYGHHAIDALIIASMPKMRLLSTIFSRYKIEDIYDESTGEVFSSGDDSMYYDDRYFAFIASLKAIKVRKFSHKIDTKPNRSVADETIYSTRVIDGKEKVVKKYKDIYDPKFTALAEDILNNAYQEKYLMALHDPQTFDQIVKVVNYYFEEMSKSEKYFTKDKKGRIKISGMNPLSLYRDEHGMLKKYSKKGDGPAITQMKYFDGVLGNHIDISAHYQVRDKKVVLQQISPYRTDFYYSKENGYKFVTIRYKDVRWSEKKKKYVIDQQDYAMKKAEKKIDDTYEFQFSMHRDELIGITKAEGEALIYPDETWHNFNFFFHAGETPEILKFTATNNDKSNKIEVKPIHCYCKMRLMPTISKKIVRIDKYATDVVGNLYKVKKNTLKFEFD

SEQ ID NO: 365 - protein, 1132 aa, Nitratifractor salsuginis
MKKILGVDLGITSFGYAILQETGKDLYRCLDNSVVMRNNPYDEKSGESSQSIRSTQKSMRRLIEKRKKRIRCVAQTMERYGILDYSETMKINDPKNNPIKNRWQLRAVDAWKRPLSPQELFAIFAHMAKHRGYKSIATEDLIYELELELGLNDPEKESEKKADERRQVYNALRHLEELRKKYGGETIAQTIHRAVEAGDLRSYRNHDDYEKMIRREDIEEEIEKVLLRQAELGALGLPEEQVSELIDELKACITDQEMPTIDESLFGKCTFYKDELAAPAYSYLYDLYRLYKKLADLNIDGYEVTQEDREKVIEWVEKKIAQGKNLKKITHKDLRKILGLAPEQKIFGVEDERIVKGKKEPRTFVPFFFLADIAKFKELFASIQKHPDALQIFRELAEILQRSKTPQEALDRLRALMAGKGIDTDDRELLELFKNKRSGTRELSHRYILEALPLFLEGYDEKEVQRILGFDDREDYSRYPKSLRHLHLREGNLFEKEENPINNHAVKSLASWALGLIADLSWRYGPFDEIILETTRDALPEKIRKEIDKAMREREKALDKIIGKYKKEFPSIDKRLARKIQLWERQKGLDLYSGKVINLSQLLDGSADIEHIVPQSLGGLSTDYNTIVTLKSVNAAKGNRLPGDWLAGNPDYRERIGMLSEKGLIDWKKRKNLLAQSLDEIYTENTHSKGIRATSYLEALVAQVLKRYYPFPDPELRKNGIGVRMIPGKVTSKTRSLLGIKSKSRETNFHHAEDALILSTLTRGWQNRLHRMLRDNYGKSEAELKELWKKYMPHIEGLTLADYIDEAFRRFMSKGEESLFYRDMFDTIRSISYWVDKKPLSASSHKETVYSSRHEVPTLRKNILEAFDSLNVIKDRHKLTTEEFMKRYDKEIRQKLWLHRIGNTNDESYRAVEERATQIAQILTRYQLMDAQNDKEIDEKFQQALKELITSPIEVTGKLLRKMRFVYDKLNAMQIDRGLVETDKNMLGIHISKGPNEKLIFRRMDVNNAHELQKERSGILCYLNEMLFIFNKKGLIHYGCLRSYLEKGQGSKYIALFNPRFPANPKAQPSKFTSDSKIKQVGIGSATGIIKAHLDLDGHVRSYEVFGTLPEGSIEWFKEESGYGRVEDDPHH

SEQ ID NO: 366 - protein, 1173 aa, Rhodospirillum rubrum
MRPIEPWILGLDIGTDSLGWAVFSCEEKGPPTAKELLGGGVRLFDSGRDAKDHTSRQAERGAFRRARRQTRTWPWRRDRLIALFQAAGLTPPAAETRQIALALRREAVSRPLAPDALWAALLHLAHHRGFRSNRIDKRERAAAKALAKAKPAKATAKATAPAKEADDEAGFWEGAEAALRQRMAASGAPTVGALLADDLDRGQPVRMRYNQSDRDGVVAPTRALIAEELAEIVARQSSAYPGLDWPAVTRLVLDQRPLRSKGAGPCAFLPGEDRALRALPTVQDFIIRQTLANLRLPSTSADEPRPLTDEEHAKALALLSTARFVEWPALRRALGLKRGVKFTAETERNGAKQAARGTAGNLTEAILAPLIPGWSGWDLDRKDRVFSDLWAARQDRSALLALIGDPRGPTRVTEDETAEAVADAIQIVLPTGRASLSAKAARAIAQAMAPGIGYDEAVTLALGLHHSHRPRQERLARLPYYAAALPDVGLDGDPVGPPPAEDDGAAAEAYYGRIGNISVHIALNETRKIVNALLHRHGPILRLVMVETTRELKAGADERKRMIAEQAERERENAEIDVELRKSDRWMANARERRQRVRLARRQNNLCPYTSTPIGHADLLGDAYDIDHVIPLARGGRDSLDNMVLCQSDANKTKGDKTPWEAFHDKPGWIAQRDDFLARLDPQTAKALAWRFADDAGERVARKSAEDEDQGFLPRQLTDTGYIARVALRYLSLVTNEPNAVVATNGRLTGLLRLAWDITPGPAPRDLLPTPRDALRDDTAARRFLDGLTPPPLAKAVEGAVQARLAALGRSRVADAGLADALGLTLASLGGGGKNRADHRHHFIDAAMIAVTTRGLINQINQASGAGRILDLRKWPRTNFEPPYPTFRAEVMKQWDHIHPSIRPAHRDGGSLHAATVFGVRNRPDARVLVQRKPVEKLFLDANAKPLPADKIAEIIDGFASPRMAKRFKALLARYQAAHPEVPPALAALAVARDPAFGPRGMTANTVIAGRSDGDGEDAGLITPFRANPKAAVRTMGNAVYEVWEIQVKGRPRWTHRVLTRFDRTQPAPPPPPENARLVMRLRRGDLVYWPLESGDRLFLVKKMAVDGRLALWPARLATGKATALYAQLSCPNINLNGDQGYCVQSAEGIRKEKIRTTSCTALGRLRLSKKAT

SEQ ID NO: 367 - protein, 1021 aa, Clostridium cellulolyticum
MKYTLGLDVGIASVGWAVIDKDNNKIIDLGVRCFDKAEESKTGESLATARRIARGMRRRISRRSQRLRLVKKLFVQYEIIKDSSEFNRIFDTSRDGWKDPWELRYNALSRILKPYELVQVLTHITKRRGFKSNRKEDLSTTKEGVVITSIKNNSEMLRTKNYRTIGEMIFMETPENSNKRNKVDEYIHTIAREDLLNEIKYIFSIQRKLGSPFVTEKLEHDFLNIWEFQRPFASGDSILSKVGKCTLLKEELRAPTSCYTSEYFGLLQSINNLVLVEDNNTLTLNNDQRAKIIEYAHFKNEIKYSEIRKLLDIEPEILFKAHNLTHKNPSGNNESKKFYEMKSYHKLKSTLPTDIWGKLHSNKESLDNLFYCLTVYKNDNEIKDYLQANNLDYLIEYIAKLPTFNKFKHLSLVAMKRIIPFMEKGYKYSDACNMAELDFTGSSKLEKCNKLTVEPIIENVTNPVVIRALTQARKVINAIIQKYGLPYMVNIELAREAGMTRQDRDNLKKEHENNRKAREKISDLIRQNGRVASGLDILKWRLWEDQGGRCAYSGKPIPVCDLLNDSLTQIDHIYPYSRSMDDSYMNKVLVLTDENQNKRSYTPYEVWGSTEKWEDFEARIYSMHLPQSKEKRLLNRNFITKDLDSFISRNLNDTRYISRFLKNYIESYLQFSNDSPKSCVVCVNGQCTAQLRSRWGLNKNREESDLHHALDAAVIACADRKIIKEITNYYNERENHNYKVKYPLPWHSFRQDLMETLAGVFISRAPRRKITGPAHDETIRSPKHFNKGLTSVKIPLTTVTLEKLETMVKNTKGGISDKAVYNVLKNRLIEHNNKPLKAFAEKIYKPLKNGTNGAIIRSIRVETPSYTGVFRNEGKGISDNSLMVRVDVFKKKDKYYLVPIYVAHMIKKELPSKAIVPLKPESQWELIDSTHEFLFSLYQNDYLVIKTKKGITEGYYRSCHRGTGSLSLMPHFANNKNVKIDIGVRTAISIEKYNVDILGNKSIVKGEPRRGMEKYNSFKSN

SEQ ID NO: 368 - protein, 1024 aa, Helicobacter mustelae
MIRTLGIDIGIASIGWAVIEGEYTDKGLENKEIVASGVRVFTKAENPKNKESLALPRTLARSARRRNARKKGRIQQVKHYLSKALGLDLECFVQGEKLATLFQTSKDFLSPWELRERALYRVLDKEELARVILHIAKRRGYDDITYGVEDNDSGKIKKAIAENSKRIKEEQCKTIGEMMYKLYFQKSLNVRNKKESYNRCVGRSELREELKTIFQIQQELKSPWVNEELIYKLLGNPDAQSKQEREGLIFYQRPLKGFGDKIGKCSHIKKGENSPYRACKHAPSAEEFVALTKSINFLKNLTNRHGLCFSQEDMCVYLGKILQEAQKNEKGLTYSKLKLLLDLPSDFEFLGLDYSGKNPEKAVFLSLPSTFKLNKITQDRKTQDKIANILGANKDWEAILKELESLQLSKEQIQTIKDAKLNFSKHINLSLEALYHLLPLMREGKRYDEGVEILQERGIFSKPQPKNRQLLPPLSELAKEESYFDIPNPVLRRALSEFRKVVNALLEKYGGFHYFHIELTRDVCKAKSARMQLEKINKKNKSENDAASQLLEVLGLPNTYNNRLKCKLWKQQEEYCLYSGEKITIDHLKDQRALQIDHAFPLSRSLDDSQSNKVLCLTSSNQEKSNKTPYEWLGSDEKKWDMYVGRVYSSNFSPSKKRKLTQKNFKERNEEDFLARNLVDTGYIGRVTKEYIKHSLSFLPLPDGKKEHIRIISGSMTSTMRSFWGVQEKNRDHHLHHAQDAIIIACIEPSMIQKYTTYLKDKETHRLKSHQKAQILREGDHKLSLRWPMSNFKDKIQESIQNIIPSHHVSHKVTGELHQETVRTKEFYYQAFGGEEGVKKALKFGKIREINQGIVDNGAMVRVDIFKSKDKGKFYAVPIYTYDFAIGKLPNKAIVQGKKNGIIKDWLEMDENYEFCFSLFKNDCIKIQTKEMQEAVLAIYKSTNSAKATIELEHLSKYALKNEDEEKMFTDTDKEKNKTMTRESCGIQGLKVFQKVKLSVLGEVLEHKPRNRQNIALKTTPKHV

SEQ ID NO: 369 - protein, 1092 aa, Ilyobacter polytropus
MKYSIGLDIGIASVGWSVINKDKERIEDMGVRIFQKAENPKDGSSLASSRREKRGSRRRNRRKKHRLDRIKNILCESGLVKKNEIEKIYKNAYLKSPWELRAKSLEAKISNKEIAQILLHIAKRRGFKSFRKTDRNADDTGKLLSGIQENKKIMEEKGYLTIGDMVAKDPKFNTHVRNKAGSYLFSFSRKLLEDEVRKIQAKQKELGNTHFTDDVLEKYIEVFNSQRNFDEGPSKPSPYYSEIGQIAKMIGNCTFESSEKRTAKNTWSGERFVFLQKLNNFRIVGLSGKRPLTEEERDIVEKEVYLKKEVRYEKLRKILYLKEEERFGDLNYSKDEKQDKKTEKTKFISLIGNYTIKKLNLSEKLKSEIEEDKSKLDKIIEILTFNKSDKTIESNLKKLELSREDIEILLSEEFSGTLNLSLKAIKKILPYLEKGLSYNEACEKADYDYKNNGIKFKRGELLPVVDKDLIANPVVLRAISQTRKVVNAIIRKYGTPHTIHVEVARDLAKSYDDRQTIIKENKKRELENEKTKKFISEEFGIKNVKGKLLLKYRLYQEQEGRCAYSRKELSLSEVILDESMTDIDHIIPYSRSMDDSYSNKVLVLSGENRKKSNLLPKEYFDRQGRDWDTFVLNVKAMKIHPRKKSNLLKEKFTREDNKDWKSRALNDTRYISRFVANYLENALEYRDDSPKKRVFMIPGQLTAQLRARWRLNKVRENGDLHHALDAAVVAVTDQKAINNISNISRYKELKNCKDVIPSIEYHADEETGEVYFEEVKDTRFPMPWSGFDLELQKRLESENPREEFYNLLSDKRYLGWFNYEEGFIEKLRPVFVSRMPNRGVKGQAHQETIRSSKKISNQIAVSKKPLNSIKLKDLEKMQGRDTDRKLYEALKNRLEEYDDKPEKAFAEPFYKPTNSGKRGPLVRGIKVEEKQNVGVYVNGGQASNGSMVRIDVFRKNGKFYTVPIYVHQTLLKELPNRAINGKPYKDWDLIDGSFEFLYSFYPNDLIEIEFGKSKSIKNDNKLTKTEIPEVNLSEVLGYYRGMDTSTGAATIDTQDGKIQMRIGIKTVKNIKKYQVDVLGNVYKVKREKRQTF

SEQ ID NO: 370 - protein, 1179 aa, Sphaerochaeta globus
MSKKVSRRYEEQAQEICQRLGSRPYSIGLDLGVGSIGVAVAAYDPIKKQPSDLVFVSSRIFIPSTGAAERRQKRGQRNSLRHRANRLKFLWKLLAERNLMLSYSEQDVPDPARLRFEDAVVRANPYELRLKGLNEQLTLSELGYALYHIANHRGSSSVRTFLDEEKSSDDKKLEEQQAMTEQLAKEKGISTFIEVLTAFNTNGLIGYRNSESVKSKGVPVPTRDIISNEIDVLLQTQKQFYQEILSDEYCDRIVSAILFENEKIVPEAGCCPYFPDEKKLPRCHFLNEERRLWEAINNARIKMPMQEGAAKRYQSASFSDEQRHILFHIARSGTDITPKLVQKEFPALKTSIIVLQGKEKAIQKIAGFRFRRLEEKSFWKRLSEEQKDDFFSAWTNTPDDKRLSKYLMKHLLLTENEVVDALKTVSLIGDYGPIGKTATQLLMKHLEDGLTYTEALERGMETGEFQELSVWEQQSLLPYYGQILTGSTQALMGKYWHSAFKEKRDSEGFFKPNTNSDEEKYGRIANPVVHQTLNELRKLMNELITILGAKPQEITVELARELKVGAEKREDIIKQQTKQEKEAVLAYSKYCEPNNLDKRYIERFRLLEDQAFVCPYCLEHISVADIAAGRADVDHIFPRDDTADNSYGNKVVAHRQCNDIKGKRTPYAAFSNTSAWGPIMHYLDETPGMWRKRRKFETNEEEYAKYLQSKGFVSRFESDNSYIAKAAKEYLRCLFNPNNVTAVGSLKGMETSILRKAWNLQGIDDLLGSRHWSKDADTSPTMRKNRDDNRHHGLDAIVALYCSRSLVQMINTMSEQGKRAVEIEAMIPIPGYASEPNLSFEAQRELFRKKILEFMDLHAFVSMKTDNDANGALLKDTVYSILGADTQGEDLVFVVKKKIKDIGVKIGDYEEVASAIRGRITDKQPKWYPMEMKDKIEQLQSKNEAALQKYKESLVQAAAVLEESNRKLIESGKKPIQLSEKTISKKALELVGGYYYLISNNKRTKTFVVKEPSNEVKGFAFDTGSNLCLDFYHDAQGKLCGEIIRKIQAMNPSYKPAYMKQGYSLYVRLYQGDVCELRASDLTEAESNLAKTTHVRLPNAKPGRTFVIIITFTEMGSGYQIYFSNLAKSKKGQDTSFTLTTIKNYDVRKVQLSSAGLVRYVSPLLVDKIEKDEVALCGE

SEQ ID NO: 371 - protein, 1054 aa, Staphylococcus lugdunensis
MNQKFILGLDIGITSVGYGLIDYETKNIIDAGVRLFPEANVENNEGRRSKRGSRRLKRRRIHRLERVKKLLEDYNLLDQSQIPQSTNPYAIRVKGLSEALSKDELVIALLHIAKRRGIHKIDVIDSNDDVGNELSTKEQLNKNSKLLKDKFVCQIQLERMNEGQVRGEKNRFKTADIIKEIIQLLNVQKNFHQLDENFINKYIELVEMRREYFEGPGKGSPYGWEGDPKAWYETLMGHCTYFPDELRSVKYAYSADLFNALNDLNNLVIQRDGLSKLEYHEKYHIIENVFKQKKKPTLKQIANEINVNPEDIKGYRITKSGKPQFTEFKLYHDLKSVLFDQSILENEDVLDQIAEILTIYQDKDSIKSKLTELDILLNEEDKENIAQLTGYTGTHRLSLKCIRLVLEEQWYSSRNQMEIFTHLNIKPKKINLTAANKIPKAMIDEFILSPVVKRTFGQAINLINKIIEKYGVPEDIIIELARENNSKDKQKFINEMQKKNENTRKRINEIIGKYGNQNAKRLVEKIRLHDEQEGKCLYSLESIPLEDLLNNPNHYEVDHIIPRSVSFDNSYHNKVLVKQSENSKKSNLTPYQYFNSGKSKLSYNQFKQHILNLSKSQDRISKKKKEYLLEERDINKFEVQKEFINRNLVDTRYATRELTNYLKAYFSANNMNVKVKTINGSFTDYLRKVWKFKKERNHGYKHHAEDALIIANADFLFKENKKLKAVNSVLEKPEIESKQLDIQVDSEDNYSEMFIIPKQVQDIKDFRNFKYSHRVDKKPNRQLINDTLYSTRKKDNSTYIVQTIKDIYAKDNTTLKKQFDKSPEKFLMYQHDPRTFEKLEVIMKQYANEKNPLAKYHEETGEYLTKYSKKNNGPIVKSLKYIGNKLGSHLDVTHQFKSSTKKLVKLSIKPYRFDVYLTDKGYKFITISYLDVLKKDNYYYIPEQKYDKLKLGKAIDKNAKFIASFYKNDLIKLDGEIYKIIGVNSDTRNMIELDLPDIRYKEYCELNNIKGEPRIKKTIGKKVNSIEKLTTDVLGNVFTNTQYTKPQLLFKRGN

SEQ ID NO: 372 - protein, 1061 aa, Treponema sp.
MIMKLEKWRLGLDLGTNSIGWSVFSLDKDNSVQDLIDMGVRIFSDGRDPKTKEPLAVARRTARSQRKLIYRRKLRRKQVFKFLQEQGLFPKTKEECMTLKSLNPYELRIKALDEKLEPYELGRALFNLAVRRGFKSNRKDGSREEVSEKKSPDEIKTQADMQTHLEKAIKENGCRTITEFLYKNQGENGGIRFAPGRMTYYPTRKMYEEEFNLIRSKQEKYYPQVDWDDIYKAIFYQRPLKPQQRGYCIYENDKERTFKAMPCSQKLRILQDIGNLAYYEGGSKKRVELNDNQDKVLYELLNSKDKVTFDQMRKALCLADSNSFNLEENRDFLIGNPTAVKMRSKNRFGKLWDEIPLEEQDLIIETIITADEDDAVYEVIKKYDLTQEQRDFIVKNTILQSGTSMLCKEVSEKLVKRLEEIADLKYHEAVESLGYKFADQTVEKYDLLPYYGKVLPGSTMEIDLSAPETNPEKHYGKISNPTVHVALNQTRVVVNALIKEYGKPSQIAIELSRDLKNNVEKKAEIARKQNQRAKENIAINDTISALYHTAFPGKSFYPNRNDRMKYRLWSELGLGNKCIYCGKGISGAELFTKEIEIEHILPFSRTLLDAESNLTVAHSSCNAFKAERSPFEAFGTNPSGYSWQEIIQRANQLKNTSKKNKFSPNAMDSFEKDSSFIARQLSDNQYIAKAALRYLKCLVENPSDVWTTNGSMTKLLRDKWEMDSILCRKFTEKEVALLGLKPEQIGNYKKNRFDHRHHAIDAVVIGLTDRSMVQKLATKNSHKGNRIEIPEFPILRSDLIEKVKNIVVSFKPDHGAEGKLSKETLLGKIKLHGKETFVCRENIVSLSEKNLDDIVDEIKSKVKDYVAKHKGQKIEAVLSDFSKENGIKKVRCVNRVQTPIEITSGKISRYLSPEDYFAAVIWEIPGEKKTFKAQYIRRNEVEKNSKGLNVVKPAVLENGKPHPAAKQVCLLHKDDYLEFSDKGKMYFCRIAGYAATNNKLDIRPVYAVSYCADWINSTNETMLTGYWKPTPTQNWVSVNVLFDKQKARLVTVSPIGRVFRK

SEQ ID NO: 373 - protein, 1011 aa, Unknown
  Uncultured delta polypeptide
MSSKAIDSLEQLDLFKPQEYTLGLDLGIKSIGWAILSGERIANAGVYLFETAEELNSTGNKLISKAAERGRKRRIRRMLDRKARRGRHIRYLLEREGLPTDELEEVVVHQSNRTLWDVRAEAVERKLTKQELAAVLFHLVRHRGYFPNTKKLPPDDESDSADEEQGKINRATSRLREELKASDCKTIGQFLAQNRDRQRNREGDYSNLMARKLVFEEALQILAFQRKQGHELSKDFEKTYLDVLMGQRSGRSPKLGNCSLIPSELRAPSSAPSTEWFKFLQNLGNLQISNAYREEWSIDAPRRAQIIDACSQRSTSSYWQIRRDFQIPDEYRFNLVNYERRDPDVDLQEYLQQQERKTLANFRNWKQLEKIIGTGHPIQTLDEAARLITLIKDDEKLSDQLADLLPEASDKAITQLCELDFTTAAKISLEAMYRILPHMNQGMGFFDACQQESLPEIGVPPAGDRVPPFDEMYNPVVNRVLSQSRKLINAVIDEYGMPAKIRVELARDLGKGRELRERIKLDQLDKSKQNDQRAEDFRAEFQQAPRGDQSLRYRLWKEQNCTCPYSGRMIPVNSVLSEDTQIDHILPISQSFDNSLSNKVLCFTEENAQKSNRTPFEYLDAADFQRLEAISGNWPEAKRNKLLHKSFGKVAEEWKSRALNDTRYLTSALADHLRHHLPDSKIQTVNGRITGYLRKQWGLEKDRDKHTHHAVDAIVVACTTPAIVQQVTLYHQDIRRYKKLGEKRPTPWPETFRQDVLDVEEEIFITRQPKKVSGGIQTKDTLRKHRSKPDRQRVALTKVKLADLERLVEKDASNRNLYEHLKQCLEESGDQPTKAFKAPFYMPSGPEAKQRPILSKVTLLREKPEPPKQLTELSGGRRYDSMAQGRLDIYRYKPGGKRKDEYRVVLQRMIDLMRGEENVHVFQKGVPYDQGPEIEQNYTFLFSLYFDDLVEFQRSADSEVIRGYYRTFNIANGQLKISTYLEGRQDFDFFGANRLAHFAKVQVNLLGKVIK

SEQ ID NO: 374 - protein, 1029 aa, Alicycliphilus denitrificans
MRSLRYRLALDLGSTSLGWALFRLDACNRPTAVIKAGVRIFSDGRNPKDGSSLAVTRRAARAMRRRRDRLLKRKTRMQAKLVEHGFFPADAGKRKALEQLNPYALRAKGLQEALLPGEFARALFHINQRRGFKSNRKTDKKDNDSGVLKKAIGQLRQQMAEQGSRTVGEYLWTRLQQGQGVRARYREKPYTTEEGKKRIDKSYDLYIDRAMIEQEFDALWAAQAAFNPTLFHEAARADLKDTLLHQRPLRPVKPGRCTLLPEEERAPLALPSTQRFRIHQEVNHLRLLDENLREVALTLAQRDAVVTALETKAKLSFEQIRKLLKLSGSVQFNLEDAKRTELKGNATSAALARKELFGAAWSGFDEALQDEIVWQLVTEEGEGALIAWLQTHTGVDEARAQAIVDVSLPEGYGNLSRKALARIVPALRAAVITYDKAVQAAGFDHHSQLGFEYDASEVEDLVHPETGEIRSVFKQLPYYGKALQRHVAFGSGKPEDPDEKRYGKIANPTVHIGLNQVRMVVNALIRRYGRPTEVVIELARDLKQSREQKVEAQRRQADNQRRNARIRRSIAEVLGIGEERVRGSDIQKWICWEELSFDAADRRCPYSGVQISAAMLLSDEVEVEHILPFSKTLDDSLNNRTVAMRQANRIKRNRTPWDARAEFEAQGWSYEDILQRAERMPLRKRYRFAPDGYERWLGDDKDFLARALNDTRYLSRVAAEYLRLVCPGTRVIPGQLTALLRGKFGLNDVLGLDGEKNRNDHRHHAVDACVIGVTDQGLMQRFATASAQARGDGLTRLVDGMPMPWPTYRDHVERAVRHIWVSHRPDHGFEGAMMEETSYGIRKDGSIKQRRKADGSAGREISNLIRIHEATQPLRHGVSADGQPLAYKGYVGGSNYCIEITVNDKGKWEGEVISTFRAYGVVRAGGMGRLRNPHEGQNGRKLIMRLVIGDSVRLEVDGAERTMRIVKISGSNGQIFMAPIHEANVDARNTDKQDAFTYTSKYAGSLQKAKTRRVTISPIGEVRDPGFKG

SEQ ID NO: 375 - protein, 1168 aa, Azospirillum sp.
MARPAFRAPRREHVNGWTPDPHRISKPFFILVSWHLLSRVVIDSSSGCFPGTSRDHTDKFAEWECAVQPYRLSFDLGTNSIGWGLLNLDRQGKPREIRALGSRIFSDGRDPQDKASLAVARRLARQMRRRRDRYLTRRTRLMGALVRFGLMPADPAARKRLEVAVDPYLARERATRERLEPFEIGRALFHLNQRRGYKPVRTATKPDEEAGKVKEAVERLEAAIAAAGAPTLGAWFAWRKTRGETLRARLAGKGKEAAYPFYPARRMLEAEFDTLWAEQARHHPDLLTAEAREILRHRIFHQRPLKPPPVGRCTLYPDDGRAPRALPSAQRLRLFQELASLRVIHLDLSERPLTPAERDRIVAFVQGRPPKAGRKPGKVQKSVPFEKLRGLLELPPGTGFSLESDKRPELLGDETGARIAPAFGPGWTALPLEEQDALVELLLTEAEPERAIAALTARWALDEATAAKLAGATLPDFHGRYGRRAVAELLPVLERETRGDPDGRVRPIRLDEAVKLLRGGKDHSDFSREGALLDALPYYGAVLERHVAFGTGNPADPEEKRVGRVANPTVHIALNQLRHLVNAILARHGRPEEIVIELARDLKRSAEDRRREDKRQADNQKRNEERKRLILSLGERPTPRNLLKLRLWEEQGPVENRRCPYSGETISMRMLLSEQVDIDHILPFSVSLDDSAANKVVCLREANRIKRNRSPWEAFGHDSERWAGILARAEALPKNKRWRFAPDALEKLEGEGGLRARHLNDTRHLSRLAVEYLRCVCPKVRVSPGRLTALLRRRWGIDAILAEADGPPPEVPAETLDPSPAEKNRADHRHHALDAVVIGCIDRSMVQRVQLAAASAEREAAAREDNIRRVLEGFKEEPWDGFRAELERRARTIVVSHRPEHGIGGALHKETAYGPVDPPEEGFNLVVRKPIDGLSKDEINSVRDPRLRRALIDRLAIRRRDANDPATALAKAAEDLAAQPASRGIRRVRVLKKESNPIRVEHGGNPSGPRSGGPFHKLLLAGEVHHVDVALRADGRRWVGHWVTLFEAHGGRGADGAAAPPRLGDGERFLMRLHKGDCLKLEHKGRVRVMQVVKLEPSSNSVVVVEPHQVKTDRSKHVKISCDQLRARGARRVTVDPLGRVRVHAPGARVGIGGDAGRTAMEPAEDIS

SEQ ID NO: 376 - protein, 1064 aa, Bradyrhizobium sp.
MKRTSLRAYRLGVDLGANSLGWFVVWLDDHGQPEGLGPGGVRIFPDGRNPQSKQSNAAGRRLARSARRRRDRYLQRRGKLMGLLVKHGLMPADEPARKRLECLDPYGLRAKALDEVLPLHHVGRALFHLNQRRGLFANRAIEQGDKDASAIKAAAGRLQTSMQACGARTLGEFLNRRHQLRATVRARSPVGGDVQARYEFYPTRAMVDAEFEAIWAAQAPHHPTMTAEAHDTIREAIFSQRAMKRPSIGKCSLDPATSQDDVDGFRCAWSHPLAQRFRIWQDVRNLAVVETGPTSSRLGKEDQDKVARALLQTDQLSFDEIRGLLGLPSDARFNLESDRRDHLKGDATGAILSARRHFGPAWHDRSLDRQIDIVALLESALDEAAIIASLGTTHSLDEAAAQRALSALLPDGYCRLGLRAIKRVLPLMEAGRTYAEAASAAGYDHALLPGGKLSPTGYLPYYGQWLQNDVVGSDDERDTNERRWGRLPNPTVHIGIGQLRRVVNELIRWHGPPAEITVELTRDLKLSPRRLAELEREQAENQRKNDKRTSLLRKLGLPASTHNLLKLRLWDEQGDVASECPYTGEAIGLERLVSDDVDIDHLIPFSISWDDSAANKVVCMRYANREKGNRTPFEAFGHRQGRPYDWADIAERAARLPRGKRWRFGPGARAQFEELGDFQARLLNETSWLARVAKQYLAAVTHPHRIHVLPGRLTALLRATWELNDLLPGSDDRAAKSRKDHRHHAIDALVAALTDQALLRRMANAHDDTRRKIEVLLPWPTFRIDLETRLKAMLVSHKPDHGLQARLHEDTAYGTVEHPETEDGANLVYRKTFVDISEKEIDRIRDRRLRDLVRAHVAGERQQGKTLKAAVLSFAQRRDIAGHPNGIRHVRLTKSIKPDYLVPIRDKAGRIYKSYNAGENAFVDILQAESGRWIARATTVFQANQANESHDAPAAQPIMRVFKGDMLRIDHAGAEKFVKIVRLSPSNNLLYLVEHHQAGVFQTRHDDPEDSFRWLFASFDKLREWNAELVRIDTLGQPWRRKRGLETGSEDATRIGWTRPKKWP

SEQ ID NO: 377 - protein, 1037 aa, Parvibaculum lavamentivorans
MERIFGFDIGTTSIGFSVIDYSSTQSAGNIQRLGVRIFPEARDPDGTPLNQQRRQKRMMRRQLRRRRIRRKALNETLHEAGFLPAYGSADWPVVMADEPYELRRRGLEEGLSAYEFGRAIYHLAQHRHFKGRELEESDTPDPDVDDEKEAANERAATLKALKNEQTTLGAWLARRPPSDRKRGIHAHRNVVAEEFERLWEVQSKFHPALKSEEMRARISDTIFAQRPVFWRKNTLGECRFMPGEPLCPKGSWLSQQRRMLEKLNNLAIAGGNARPLDAEERDAILSKLQQQASMSWPGVRSALKALYKQRGEPGAEKSLKFNLELGGESKLLGNALEAKLADMFGPDWPAHPRKQEIRHAVHERLWAADYGETPDKKRVIILSEKDRKAHREAAANSFVADFGITGEQAAQLQALKLPTGWEPYSIPALNLFLAELEKGERFGALVNGPDWEGWRRTNFPHRNQPTGEILDKLPSPASKEERERISQLRNPTVVRTQNELRKVVNNLIGLYGKPDRIRIEVGRDVGKSKREREEIQSGIRRNEKQRKKATEDLIKNGIANPSRDDVEKWILWKEGQERCPYTGDQIGFNALFREGRYEVEHIWPRSRSFDNSPRNKTLCRKDVNIEKGNRMPFEAFGHDEDRWSAIQIRLQGMVSAKGGTGMSPGKVKRFLAKTMPEDFAARQLNDTRYAAKQILAQLKRLWPDMGPEAPVKVEAVTGQVTAQLRKLWTLNNILADDGEKTRADHRHHAIDALTVACTHPGMTNKLSRYWQLRDDPRAEKPALTPPWDTIRADAEKAVSEIVVSHRVRKKVSGPLHKETTYGDTGTDIKTKSGTYRQFVTRKKIESLSKGELDEIRDPRIKEIVAAHVAGRGGDPKKAFPPYPCVSPGGPEIRKVRLTSKQQLNLMAQTGNGYADLGSNHHIAIYRLPDGKADFEIVSLFDASRRLAQRNPIVQRTRADGASFVMSLAAGEAIMIPEGSKKGIWIVQGVWASGQVVLERDTDADHSTTTRPMPNPILKDDAKKVSIDPIGRVRPSND

SEQ ID NO: 378 - protein, 1218 aa, Prevotella timonensis
MNKRILGLDTGTNSLGWAVVDWDEHAQSYELIKYGDVIFQEGVKIEKGIESSKAAERSGYKAIRKQYFRRRLRKIQVLKVLVKYHLCPYLSDDDLRQWHLQKQYPKSDELMLWQRTSDEEGKNPYYDRHRCLHEKLDLTVEADRYTLGRALYHLTQRRGFLSNRLDTSADNKEDGVVKSGISQLSTEMEEAGCEYLGDYFYKLYDAQGNKVRIRQRYTDRNKHYQHEFDAICEKQELSSELIEDLQRAIFFQLPLKSQRHGVGRCTFERGKPRCADSHPDYEEFRMLCFVNNIQVKGPHDLELRPLTYEEREKIEPLFFRKSKPNFDFEDIAKALAGKKNYAWIHDKEERAYKFNYRMTQGVPGCPTIAQLKSIFGDDWKTGIAETYTLIQKKNGSKSLQEMVDDVWNVLYSFSSVEKLKEFAHHKLQLDEESAEKFAKIKLSHSFAALSLKAIRKFLPFLRKGMYYTHASFFANIPTIVGKEIWNKEQNRKYIMENVGELVFNYQPKHREVQGTIEMLIKDFLANNFELPAGATDKLYHPSMIETYPNAQRNEFGILQLGSPRTNAIRNPMAMRSLHILRRVVNQLLKESIIDENTEVHVEYARELNDANKRRAIADRQKEQDKQHKKYGDEIRKLYKEETGKDIEPTQTDVLKFQLWEEQNHHCLYTGEQIGITDFIGSNPKFDIEHTIPQSVGGDSTQMNLTLCDNRFNREVKKAKLPTELANHEEILTRIEPWKNKYEQLVKERDKQRTFAGMDKAVKDIRIQKRHKLQMEIDYWRGKYERFTMTEVPEGFSRRQGTGIGLISRYAGLYLKSLFHQADSRNKSNVYVVKGVATAEFRKMWGLQSEYEKKCRDNHSHHCMDAITIACIGKREYDLMAEYYRMEETFKQGRGSKPKFSKPWATFTEDVLNIYKNLLVVHDTPNNMPKHTKKYVQTSIGKVLAQGDTARGSLHLDTYYGAIERDGEIRYVVRRPLSSFTKPEELENIVDETVKRTIKEAIADKNFKQAIAEPIYMNEEKGILIKKVRCFAKSVKQPINIRQHRDLSKKEYKQQYHVMNENNYLLAIYEGLVKNKVVREFEIVSYIEAAKYYKRSQDRNIFSSIVPTHSTKYGLPLKTKLLMGQLVLMFEENPDEIQVDNTKDLVKRLYKVVGIEKDGRIKFKYHQEARKEGLPIFSTPYKNNDDYAPIFRQSINNINILVDGIDFTIDILGKVTLKE

SEQ ID NO: 379 - protein, 1088 aa, Bacillus smithii
MNYKMGLDIGIASVGWAVINLDLKRIEDLGVRIFDKAEHPQNGESLALPRRIARSARRRLRRRKHRLERIRRLLVSENVLTKEEMNLLFKQKKQIDVWQLRVDALERKLNNDELARVLLHLAKRRGFKSNRKSERNSKESSEFLKNIEENQSILAQYRSVGEMIVKDSKFAYHKRNKLDSYSNMIARDDLEREIKLIFEKQREFNNPVCTERLEEKYLNIWSSQRPFASKEDIEKKVGFCTFEPKEKRAPKATYTFQSFIVWEHINKLRLVSPDETRALTEIERNLLYKQAFSKNKMTYYDIRKLLNLSDDIHFKGLLYDPKSSLKQIENIRFLELDSYHKIRKCIENVYGKDGIRMFNETDIDTFGYALTIFKDDEDIVAYLQNEYITKNGKRVSNLANKVYDKSLIDELLNLSFSKFAHLSMKAIRNILPYMEQGEIYSKACELAGYNFTGPKKKEKALLLPVIPNIANPVVMRALTQSRKVVNAIIKKYGSPVSIHIELARDLSHSFDERKKIQKDQTENRKKNETAIKQLIEYELTKNPTGLDIVKFKLWSEQQGRCMYSLKPIELERLLEPGYVEVDHILPYSRSLDDSYANKVLVLTKENREKGNHTPVEYLGLGSERWKKFEKFVLANKQFSKKKKQNLLRLRYEETEEKEFKERNLNDTRYISKFFANFIKEHLKFADGDGGQKVYTINGKITAHLRSRWDFNKNREESDLHHAVDAVIVACATQGMIKKITEFYKAREQNKESAKKKEPIFPQPWPHFADELKARLSKFPQESIEAFALGNYDRKKLESLRPVFVSRMPKRSVTGAAHQETLRRCVGIDEQSGKIQTAVKTKLSDIKLDKDGHFPMYQKESDPRTYEAIRQRLLEHNNDPKKAFQEPLYKPKKNGEPGPVIRTVKIIDTKNKVVHLDGSKTVAYNSNIVRTDVFEKDGKYYCVPVYTMDIMKGTLPNKAIEANKPYSEWKEMTEEYTFQFSLFPNDLVRIVLPREKTIKTSTNEEIIIKDIFAYYKTIDSATGGLELISHDRNFSLRGVGSKTLKRFEKYQVDVLGNIHKVKGEKRVGLAAPTNQKKGKTVDSLQSVSD

SEQ ID NO: 380 - protein, 1035 aa, Puniceispirillum marinum
MRRLGLDLGTNSIGWCLLDLGDDGEPVSIFRTGARIFSDGRDPKSLGSLKATRREARLTRRRRDRFIQRQKNLINALVKYGLMPADEIQRQALAYKDPYPIRKKALDEAIDPYEMGRAIFHINQRRGFKSNRKSADNEAGVVKQSIADLEMKLGEAGARTIGEFLADRQATNDTVRARRLSGTNALYEFYPDRYMLEQEFDTLWAKQAAFNPSLYIEAARERLKEIVFFQRKLKPQEVGRCIFLSDEDRISKALPSFQRFRIYQELSNLAWIDHDGVAHRITASLALRDHLFDELEHKKKLTFKAMRAILRKQGVVDYPVGFNLESDNRDHLIGNLTSCIMRDAKKMIGSAWDRLDEEEQDSFILMLQDDQKGDDEVRSILTQQYGLSDDVAEDCLDVRLPDGHGSLSKKAIDRILPVLRDQGLIYYDAVKEAGLGEANLYDPYAALSDKLDYYGKALAGHVMGASGKFEDSDEKRYGTISNPTVHIALNQVRAVVNELIRLHGKPDEVVIEIGRDLPMGADGKRELERFQKEGRAKNERARDELKKLGHIDSRESRQKFQLWEQLAKEPVDRCCPFTGKMMSISDLFSDKVEIEHLLPFSLTLDDSMANKTVCFRQANRDKGNRAPFDAFGNSPAGYDWQEILGRSQNLPYAKRWRFLPDAMKRFEADGGFLERQLNDTRYISRYTTEYISTIIPKNKIWVVTGRLTSLLRGFWGLNSILRGHNTDDGTPAKKSRDDHRHHAIDAIVVGMTSRGLLQKVSKAARRSEDLDLTRLFEGRIDPWDGFRDEVKKHIDAIIVSHRPRKKSQGALHNDTAYGIVEHAENGASTVVHRVPITSLGKQSDIEKVRDPLIKSALLNETAGLSGKSFENAVQKWCADNSIKSLRIVETVSIIPITDKEGVAYKGYKGDGNAYMDIYQDPTSSKWKGEIVSRFDANQKGFIPSWQSQFPTARLIMRLRINDLLKLQDGEIEEIYRVQRLSGSKILMAPHTEANVDARDRDKNDTFKLTSKSPGKLQSASARKVHISPTGLIREG

SEQ ID NO: 381 - protein, 1153 aa, Barnesiella intestinihominis
MKNILGLDLGLSSIGWSVIRENSEEQELVAMGSRVVSLTAAELSSFTQGNGVSINSQRTQKRTQRKGYDRYQLRRTLLRNKLDTLGMLPDDSLSYLPKLQLWGLRAKAVTQRIELNELGRVLLHLNQKRGYKSIKSDFSGDKKITDYVKTVKTRYDELKEMRLTIGELFFRRLTENAFFRCKEQVYPRQAYVEEFDCIMNCQRKFYPDILTDETIRCIRDEIIYYQRPLKSCKYLVSRCEFEKRFYLNAAGKKTEAGPKVSPRTSPLFQVCRLWESINNIVVKDRRNEIVFISAEQRAALFDFLNTHEKLKGSDLLKLLGLSKTYGYRLGEQFKTGIQGNKTRVEIERALGNYPDKKRLLQFNLQEESSSMVNTETGEIIPMISLSFEQEPLYRLWHVLYSIDDREQLQSVLRQKFGIDDDEVLERLSAIDLVKAGFGNKSSKAIRRILPFLQLGMNYAEACEAAGYNHSNNYTKAENEARALLDRLPAIKKNELRQPVVEKILNQMVNVVNALMEKYGRFDEIRVELARELKQSKEERSNTYKSINKNQRENEQIAKRIVEYGVPTRSRIQKYKMWEESKHCCIYCGQPVDVGDFLRGFDVEVEHIIPKSLYFDDSFANKVCSCRSCNKEKNNRTAYDYMKSKGEKALSDYVERVNTMYTNNQISKTKWQNLLTPVDKISIDFIDRQLRESQYIARKAKEILTSICYNVTATSGSVTSFLRHVWGWDTVLHDLNFDRYKKVGLTEVIEVNHRGSVIRREQIKDWSKRFDHRHHAIDALTIACTKQAYIQRLNNLRAEEGPDFNKMSLERYIQSQPHFSVAQVREAVDRILVSFRAGKRAVTPGKRYIRKNRKRISVQSVLIPRGALSEESVYGVIHVWEKDEQGHVIQKQRAVMKYPITSINREMLDKEKVVDKRIHRILSGRLAQYNDNPKEAFAKPVYIDKECRIPIRTVRCFAKPAINTLVPLKKDDKGNPVAWVNPGNNHHVAIYRDEDGKYKERTVTFWEAVDRCRVGIPAIVTQPDTIWDNILQRNDISENVLESLPDVKWQFVLSLQQNEMFILGMNEEDYRYAMDQQDYALLNKYLYRVQKLSKSDYSFRYHTETSVEDKYDGKPNLKLSMQMGKLKRVSIKSLLGLNPHKVHISVLGEIKEIS

SEQ ID NO: 382 - protein, 1062 aa, Ralstonia syzygii
MAEKQHRWGLDIGTNSIGWAVIALIEGRPAGLVATGSRIFSDGRNPKDGSSLAVERRGPRQMRRRRDRYLRRRDRFMQALINVGLMPGDAAARKALVTENPYVLRQRGLDQALTLPEFGRALFHLNQRRGFQSNRKTDRATAKESGKVKNAIAAFRAGMGNARTVGEALARRLEDGRPVRARMVGQGKDEHYELYIAREWIAQEFDALWASQQRFHAEVLADAARDRLRAILLFQRKLLPVPVGKCFLEPNQPRVAAALPSAQRFRLMQELNHLRVMTLADKRERPLSFQERNDLLAQLVARPKCGFDMLRKIVFGANKEAYRFTIESERRKELKGCDTAAKLAKVNALGTRWQALSLDEQDRLVCLLLDGENDAVLADALREHYGLTDAQIDTLLGLSFEDGHMRLGRSALLRVLDALESGRDEQGLPLSYDKAVVAAGYPAHTADLENGERDALPYYGELLWRYTQDAPTAKNDAERKFGKIANPTVHIGLNQLRKLVNALIQRYGKPAQIVVELARNLKAGLEEKERIKKQQTANLERNERIRQKLQDAGVPDNRENRLRMRLFEELGQGNGLGTPCIYSGRQISLQRLFSNDVQVDHILPFSKTLDDSFANKVLAQHDANRYKGNRGPFEAFGANRDGYAWDDIRARAAVLPRNKRNRFAETAMQDWLHNETDFLARQLTDTAYLSRVARQYLTAICSKDDVYVSPGRLTAMLRAKWGLNRVLDGVMEEQGRPAVKNRDDHRHHAIDAVVIGATDRAMLQQVATLAARAREQDAERLIGDMPTPWPNFLEDVRAAVARCVVSHKPDHGPEGGLHNDTAYGIVAGPFEDGRYRVRHRVSLFDLKPGDLSNVRCDAPLQAELEPIFEQDDARAREVALTALAERYRQRKVWLEELMSVLPIRPRGEDGKTLPDSAPYKAYKGDSNYCYELFINERGRWDGELISTFRANQAAYRRFRNDPARFRRYTAGGRPLLMRLCINDYIAVGTAAERTIFRVVKMSENKITLAEHFEGGTLKQRDADKDDPFKYLTKSPGALRDLGARRIFVDLIGRVLDPGIKGD

SEQ ID NO: 383 - protein, 1059 aa, Wolinella succinogenes
MIERILGVDLGISSLGWAIVEYDKDDEAANRIIDCGVRLFTAAETPKKKESPNKARREARGIRRVLNRRRVRMNMIKKLFLRAGLIQDVDLDGEGGMFYSKANRADVWELRHDGLYRLLKGDELARVLIHIAKHRGYKFIGDDEADEESGKVKKAGVVLRQNFEAAGCRTVGEWLWRERGANGKKRNKHGDYEISIHRDLLVEEVEAIFVAQQEMRSTIATDALKAAYREIAFFVRPMQRIEKMVGHCTYFPEERRAPKSAPTAEKFIAISKFFSTVIIDNEGWEQKIIERKTLEELLDFAVSREKVEFRHLRKFLDLSDNEIFKGLHYKGKPKTAKKREATLFDPNEPTELEFDKVEAEKKAWISLRGAAKLREALGNEFYGRFVALGKHADEATKILTYYKDEGQKRRELTKLPLEAEMVERLVKIGFSDFLKLSLKAIRDILPAMESGARYDEAVLMLGVPHKEKSAILPPLNKTDIDILNPTVIRAFAQFRKVANALVRKYGAFDRVHFELAREINTKGEIEDIKESQRKNEKERKEAADWIAETSFQVPLTRKNILKKRLYIQQDGRCAYTGDVIELERLFDEGYCEIDHILPRSRSADDSFANKVLCLARANQQKTDRTPYEWFGHDAARWNAFETRTSAPSNRVRTGKGKIDRLLKKNFDENSEMAFKDRNLNDTRYMARAIKTYCEQYWVFKNSHTKAPVQVRSGKLTSVLRYQWGLESKDRESHTHHAVDAIIIAFSTQGMVQKLSEYYRFKETHREKERPKLAVPLANFRDAVEEATRIENTETVKEGVEVKRLLISRPPRARVTGQAHEQTAKPYPRIKQVKNKKKWRLAPIDEEKFESFKADRVASANQKNFYETSTIPRVDVYHKKGKFHLVPIYLHEMVLNELPNLSLGTNPEAMDENFFKFSIFKDDLISIQTQGTPKKPAKIIMGYFKNMHGANMVLSSINNSPCEGFTCTPVSMDKKHKDKCKLCPEENRIAGRCLQGFLDYWSQEGLRPPRKEFECDQGVKFALDVKKYQIDPLGYYYEVKQEKRLGTIPQMRSAKKLVKK

SEQ ID NO: 384 - protein, 1269 aa, Mycoplasma gallisepticum
MNNSIKSKPEVTIGLDLGVGSVGWAIVDNETNIIHHLGSRLFSQAKTAEDRRSFRGVRRLIRRRKYKLKRFVNLIWKYNSYFGFKNKEDILNNYQEQQKLHNTVLNLKSEALNAKIDPKALSWILHDYLKNRGHFYEDNRDFNVYPTKELAKYFDKYGYYKGIIDSKEDNDNKLEEELTKYKFSNKHWLEEVKKVLSNQTGLPEKFKEEYESLFSYVRNYSEGPGSINSVSPYGIYHLDEKEGKVVQKYNNIWDKTIGKCNIFPDEYRAPKNSPIAMIFNEINELSTIRSYSIYLTGWFINQEFKKAYLNKLLDLLIKTNGEKPIDARQFKKLREETIAESIGKETLKDVENEEKLEKEDHKWKLKGLKLNTNGKIQYNDLSSLAKFVHKLKQHLKLDFLLEDQYATLDKINFLQSLFVYLGKHLRYSNRVDSANLKEFSDSNKLFERILQKQKDGLFKLFEQTDKDDEKILAQTHSLSTKAMLLAITRMTNLDNDEDNQKNNDKGWNFEAIKNFDQKFIDITKKNNNLSLKQNKRYLDDRFINDAILSPGVKRILREATKVFNAILKQFSEEYDVTKVVIELARELSEEKELENTKNYKKLIKKNGDKISEGLKALGISEDEIKDILKSPTKSYKFLLWLQQDHIDPYSLKEIAFDDIFTKTEKFEIDHIIPYSISFDDSSSNKLLVLAESNQAKSNQTPYEFISSGNAGIKWEDYEAYCRKFKDGDSSLLDSTQRSKKFAKMMKTDTSSKYDIGFLARNLNDTRYATIVFRDALEDYANNHLVEDKPMFKVVCINGSVTSFLRKNFDDSSYAKKDRDKNIHHAVDASIISIFSNETKTLFNQLTQFADYKLFKNTDGSWKKIDPKTGVVTEVTDENWKQIRVRNQVSEIAKVIEKYIQDSNIERKARYSRKIENKTNISLFNDTVYSAKKVGYEDQIKRKNLKTLDIHESAKENKNSKVKRQFVYRKLVNVSLLNNDKLADLFAEKEDILMYRANPWVINLAEQIFNEYTENKKIKSQNVFEKYMLDLTKEFPEKFSEFLVKSMLRNKTAIIYDDKKNIVHRIKRLKMLSSELKENKLSNVIIRSKNQSGTKLSYQDTINSLALMIMRSIDPTAKKQYIRVPLNTLNLHLGDHDFDLHNMDAYLKKPKFVKYLKANEIGDEYKPWRVLTSGTLLIHKKDKKLMYISSFQNLNDVIEIKNLIETEYKENDDSDSKKKKKANRFLMTLSTILNDYILLDAKDNFDILGLSKNRIDEILNSKLGLDKIVK

SEQ ID NO: 385 - protein, 1138 aa, Acidothermus cellulolyticus
MGGSEVGTVPVTWRLGVDVGERSIGLAAVSYEEDKPKEILAAVSWIHDGGVGDERSGASRLALRGMARRARRLRRFRRARLRDLDMLLSELGWTPLPDKNVSPVDAWLARKRLAEEYVVDETERRRLLGYAVSHMARHRGWRNPWTTIKDLKNLPQPSDSWERTRESLEARYSVSLEPGTVGQWAGYLLQRAPGIRLNPTQQSAGRRAELSNATAFETRLRQEDVLWELRCIADVQGLPEDVVSNVIDAVFCQKRPSVPAERIGRDPLDPSQLRASRACLEFQEYRIVAAVANLRIRDGSGSRPLSLEERNAVIEALLAQTERSLTWSDIALEILKLPNESDLTSVPEEDGPSSLAYSQFAPFDETSARIAEFIAKNRRKIPTFAQWWQEQDRTSRSDLVAALADNSIAGEEEQELLVHLPDAELEALEGLALPSGRVAYSRLTLSGLTRVMRDDGVDVHNARKTCFGVDDNWRPPLPALHEATGHPVVDRNLAILRKFLSSATMRWGPPQSIVVELARGASESRERQAEEEAARRAHRKANDRIRAELRASGLSDPSPADLVRARLLELYDCHCMYCGAPISWENSELDHIVPRTDGGSNRHENLAITCGACNKEKGRRPFASWAETSNRVQLRDVIDRVQKLKYSGNMYWTRDEFSRYKKSVVARLKRRTSDPEVIQSIESTGYAAVALRDRLLSYGEKNGVAQVAVFRGGVTAEARRWLDISIERLFSRVAIFAQSTSTKRLDRRHHAVDAVVLTTLTPGVAKTLADARSRRVSAEFWRRPSDVNRHSTEEPQSPAYRQWKESCSGLGDLLISTAARDSIAVAAPLRLRPTGALHEETLRAFSEHTVGAAWKGAELRRIVEPEVYAAFLALTDPGGRFLKVSPSEDVLPADENRHIVLSDRVLGPRDRVKLFPDDRGSIRVRGGAAYIASFHHARVFRWGSSHSPSFALLRVSLADLAVAGLLRDGVDVFTAELPPWTPAWRYASIALVKAVESGDAKQVGWLVPGDELDFGPEGVTTAAGDLSMFLKYFPERHWVVTGFEDDKRINLKPAFLSAEQAEVLRTERSDRPDTLTEAGEILAQFFPRCWRATVAKVLCHPGLTVIRRTALGQPRWRRGHLPYSWRPWSADPWSGGTP

SEQ ID NO: 386 - protein, 1265 aa, Mycoplasma ovipneumoniae
MHNKKNITIGFDLGIASIGWAIIDSTTSKILDWGTRTFEERKTANERRAFRSTRRNIRRKAYRNQRFINLILKYKDLFELKNISDIQRANKKDTENYEKIISFFTEIYKKCAAKHSNILEVKVKALDSKIEKLDLIWILHDYLENRGFFYDLEEENVADKYEGIEHPSILLYDFFKKNGFFKSNSSIPKDLGGYSFSNLQWVNEIKKLFEVQEINPEFSEKFLNLFTSVRDYAKGPGSEHSASEYGIFQKDEKGKVFKKYDNIWDKTIGKCSFFVEENRSPVNYPSYEIFNLLNQLINLSTDLKTTNKKIWQLSSNDRNELLDELLKVKEKAKIISISLKKNEIKKIILKDFGFEKSDIDDQDTIEGRKIIKEEPTTKLEVTKHLLATIYSHSSDSNWININNILEFLPYLDAICIILDREKSRGQDEVLKKLTEKNIFEVLKIDREKQLDFVKSIFSNTKFNFKKIGNFSLKAIREFLPKMFEQNKNSEYLKWKDEEIRRKWEEQKSKLGKTDKKTKYLNPRIFQDEIISPGTKNTFEQAVLVLNQIIKKYSKENIIDAIIIESPREKNDKKTIEEIKKRNKKGKGKTLEKLFQILNLENKGYKLSDLETKPAKLLDRLRFYHQQDGIDLYTLDKINIDQLINGSQKYEIEHIIPYSMSYDNSQANKILTEKAENLKKGKLIASEYIKRNGDEFYNKYYEKAKELFINKYKKNKKLDSYVDLDEDSAKNRFRFLTLQDYDEFQVEFLARNLNDTRYSTKLFYHALVEHFENNEFFTYIDENSSKHKVKISTIKGHVTKYFRAKPVQKNNGPNENLNNNKPEKIEKNRENNEHHAVDAAIVAIIGNKNPQIANLLTLADNKTDKKFLLHDENYKENIETGELVKIPKFEVDKLAKVEDLKKIIQEKYEEAKKHTAIKFSRKTRTILNGGLSDETLYGFKYDEKEDKYFKIIKKKLVTSKNEELKKYFENPFGKKADGKSEYTVLMAQSHLSEFNKLKEIFEKYNGFSNKTGNAFVEYMNDLALKEPTLKAEIESAKSVEKLLYYNFKPSDQFTYHDNINNKSFKRFYKNIRIIEYKSIPIKFKILSKHDGGKSFKDTLFSLYSLVYKVYENGKESYKSIPVTSQMRNFGIDEFDFLDENLYNKEKLDIYKSDFAKPIPVNCKPVFVLKKGSILKKKSLDIDDFKETKETEEGNYYFISTISKRFNRDTAYGLKPLKLSVVKPVAEPSTNPIFKEYIPIHLDELGNEYPVKIKEHTDDEKLMCTIK

SEQ ID NO: 387 - RNA, 20 nt, Artificial Sequence
  Synthetic oligonucleotide: TRBC-40
cacccagaucgucagcgccg

SEQ ID NO: 388 - RNA, 20 nt, Artificial Sequence
  Synthetic oligonucleotide: TRBC-52
caaacacagcgaccucgggu

SEQ ID NO: 389 - RNA, 20 nt, Artificial Sequence
  Synthetic oligonucleotide: TRBC-25
ugacgaguggacccaggaua

SEQ ID NO: 390 - RNA, 20 nt, Artificial Sequence
  Synthetic oligonucleotide: TRBC-35
ggcucucggagaaugacgag

SEQ ID NO: 391 - RNA, 20 nt, Artificial Sequence
  Synthetic oligonucleotide: TRBC-50
ggccucggcgcugacgaucu

SEQ ID NO: 392 - RNA, 20 nt, Artificial Sequence
  Synthetic oligonucleotide: TRBC-39
gaaaaacguguucccacccg

SEQ ID NO: 393 - RNA, 20 nt, Artificial Sequence
  Synthetic oligonucleotide: TRBC-49
augacgaguggacccaggau

SEQ ID NO: 394 - RNA, 20 nt, Artificial Sequence
  Synthetic oligonucleotide: TRBC-51
aguccaguucuacgggcucu

SEQ ID NO: 395 - RNA, 20 nt, Artificial Sequence
  Synthetic oligonucleotide: TRBC-26
cgcugucaaguccaguucua

SEQ ID NO: 396 - RNA, 20 nt, Artificial Sequence
  Synthetic oligonucleotide: TRBC-47
aucgucagcgccgaggccug

SEQ ID NO: 397 - RNA, 20 nt, Artificial Sequence
  Synthetic oligonucleotide: TRBC-45
ucaaacacagcgaccucggg

SEQ ID NO: 398 - RNA, 20 nt, Artificial Sequence
  Synthetic oligonucleotide: TRBC-34
cguagaacuggacuugacag

SEQ ID NO: 399 - RNA, 20 nt, Artificial Sequence
  Synthetic oligonucleotide: TRBC-227
aggccucggcgcugacgauc

SEQ ID NO: 400 - RNA, 20 nt, Artificial Sequence
  Synthetic oligonucleotide: TRBC-41
ugacagcggaagugguugcg

SEQ ID NO: 401 - RNA, 20 nt, Artificial Sequence
  Synthetic oligonucleotide: TRBC-30
uugacagcggaagugguugc

SEQ ID NO: 402 - RNA, 20 nt, Artificial Sequence
  Synthetic oligonucleotide: TRBC-206
ucuccgagagcccguagaac

SEQ ID NO: 403 - RNA, 20 nt, Artificial Sequence
  Synthetic oligonucleotide: TRBC-32
cgggugggaacacguuuuuc

SEQ ID NO: 404 - RNA, 20 nt, Artificial Sequence
  Synthetic oligonucleotide: TRBC-276
gacagguuuggcccuauccu

SEQ ID NO: 405 - RNA, 20 nt, Artificial Sequence
  Synthetic oligonucleotide: TRBC-274
gaucgucagcgccgaggccu

SEQ ID NO: 406 - RNA, 20 nt, Artificial Sequence
  Synthetic oligonucleotide: TRBC-230
ggcucaaacacagcgaccuc

SEQ ID NO: 407 - RNA, 20 nt, Artificial Sequence
  Synthetic oligonucleotide: TRBC-235
ugagggucucggccaccuuc

SEQ ID NO: 408 - RNA, 20 nt, Artificial Sequence
  Synthetic oligonucleotide: TRBC-38
aggcuucuaccccgaccacg

SEQ ID NO: 409 - RNA, 20 nt, Artificial Sequence
  Synthetic oligonucleotide: TRBC-223
ccgaccacguggagcugagc

SEQ ID NO: 410 - RNA, 20 nt, Artificial Sequence
  Synthetic oligonucleotide: TRBC-221
ugacagguuuggcccuaucc

SEQ ID NO: 411 - RNA, 20 nt, Artificial Sequence
  Synthetic oligonucleotide: TRBC-48
cuugacagcggaagugguug

SEQ ID NO: 412 - RNA, 20 nt, Artificial Sequence
  Synthetic oligonucleotide: TRBC-216
agaucgucagcgccgaggcc

SEQ ID NO: 413 - RNA, 20 nt, Artificial Sequence
  Synthetic oligonucleotide: TRBC-210
gcgcugacgaucugggugac

SEQ ID NO: 414 - RNA, 20 nt, Artificial Sequence
  Synthetic oligonucleotide: TRBC-268
ugagggcgggcugcuccuug

SEQ ID NO: 415 - RNA, 20 nt, Artificial Sequence
  Synthetic oligonucleotide: TRBC-193
guugcggggguucugccaga

SEQ ID NO: 416 - RNA, 20 nt, Artificial Sequence
  Synthetic oligonucleotide: TRBC-246
agcucagcuccacguggucg

SEQ ID NO: 417 - RNA, 20 nt, Artificial Sequence
  Synthetic oligonucleotide: TRBC-228
gcggcugcucaggcaguauc

SEQ ID NO: 418 - RNA, 20 nt, Artificial Sequence
  Synthetic oligonucleotide: TRBC-43
gcggggguucugccagaagg

SEQ ID NO: 419 - RNA, 20 nt, Artificial Sequence
  Synthetic oligonucleotide: TRBC-272
uggcucaaacacagcgaccu

SEQ ID NO: 420 - RNA, 20 nt, Artificial Sequence
  Synthetic oligonucleotide: TRBC-33
acuggacuugacagcggaag

SEQ ID NO: 421 - RNA, 20 nt, Artificial Sequence
  Synthetic oligonucleotide: TRBC-44
gacagcggaagugguugcgg

SEQ ID NO: 422 - RNA, 20 nt, Artificial Sequence
  Synthetic oligonucleotide: TRBC-211
gcugucaaguccaguucuac

SEQ ID NO: 423 - RNA, 20 nt, Artificial Sequence
  Synthetic oligonucleotide: TRBC-253
guaucuggagucauugaggg

SEQ ID NO: 424 - RNA, 17 nt, Artificial Sequence
  Synthetic oligonucleotide: TRBC-18
cucggcgcugacgaucu

SEQ ID NO: 425 - RNA, 17 nt, Artificial Sequence
  Synthetic oligonucleotide: TRBC-6
ccucggcgcugacgauc

SEQ ID NO: 426 - RNA, 17 nt, Artificial Sequence
  Synthetic oligonucleotide: TRBC-85
ccgagagcccguagaac

SEQ ID NO: 427 - RNA, 17 nt, Artificial Sequence
  Synthetic oligonucleotide: TRBC-129
ccagaucgucagcgccg

SEQ ID NO: 428 - RNA, 17 nt, Artificial Sequence
  Synthetic oligonucleotide: TRBC-93
gaaugacgaguggaccc

SEQ ID NO: 429 - RNA, 22 nt, Artificial Sequence
  Synthetic oligonucleotide: TRBC-415
gggugacagguuuggcccuauc

SEQ ID NO: 430 - RNA, 21 nt, Artificial Sequence
  Synthetic oligonucleotide: TRBC-414
ggugacagguuuggcccuauc

SEQ ID NO: 431 - RNA, 20 nt, Artificial Sequence
  Synthetic oligonucleotide: TRBC-310
gugacagguuuggcccuauc

SEQ ID NO: 432 - RNA, 18 nt, Artificial Sequence
  Synthetic oligonucleotide: TRBC-308
gacagguuuggcccuauc

SEQ ID NO: 433 - RNA, 22 nt, Artificial Sequence
  Synthetic oligonucleotide: TRBC-401
gauacugccugagcagccgccu

SEQ ID NO: 434 - RNA, 24 nt, Artificial Sequence
  Synthetic oligonucleotide: TRBC-468
gaccacguggagcugagcuggugg

SEQ ID NO: 435 - RNA, 18 nt, Artificial Sequence
  Synthetic oligonucleotide: TRBC-462
guggagcugagcuggugg

SEQ ID NO: 436 - RNA, 24 nt, Artificial Sequence
  Synthetic oligonucleotide: TRBC-424
gggcgggcugcuccuugaggggcu

SEQ ID NO: 437 - RNA, 23 nt, Artificial Sequence
  Synthetic oligonucleotide: TRBC-423
ggcgggcugcuccuugaggggcu

SEQ ID NO: 438 - RNA, 22 nt, Artificial Sequence
  Synthetic oligonucleotide: TRBC-422
gcgggcugcuccuugaggggcu

SEQ ID NO: 439 - RNA, 20 nt, Artificial Sequence
  Synthetic oligonucleotide: TRBC-420
gggcugcuccuugaggggcu

SEQ ID NO: 440 - RNA, 19 nt, Artificial Sequence
  Synthetic oligonucleotide: TRBC-419
ggcugcuccuugaggggcu

SEQ ID NO: 441 - RNA, 18 nt, Artificial Sequence
  Synthetic oligonucleotide: TRBC-418
gcugcuccuugaggggcu

SEQ ID NO: 442 - RNA, 24 nt, Artificial Sequence
  Synthetic oligonucleotide: TRBC-445
ggugaaugggaaggaggugcacag

SEQ ID NO: 443 - RNA, 23 nt, Artificial Sequence
  Synthetic oligonucleotide: TRBC-444
gugaaugggaaggaggugcacag

SEQ ID NO: 444 - RNA, 21 nt, Artificial Sequence
  Synthetic oligonucleotide: TRBC-442
gaaugggaaggaggugcacag

SEQ ID NO: 445 - DNA, 22 bp, Artificial Sequence
  Synthetic oligonucleotide: GWED133
acatcacctggaatgttaggca

SEQ ID NO: 446 - DNA, 22 bp, Artificial Sequence
  Synthetic oligonucleotide: GWED134
gtgaaccttgatcatcccacct

SEQ ID NO: 447 - DNA, 20 bp, Artificial Sequence
  Synthetic oligonucleotide: GWED137
ccccaaaacaatgagggcct

SEQ ID NO: 448 - DNA, 20 bp, Artificial Sequence
  Synthetic oligonucleotide: GWED138
agcacctcctttcttctgcc

SEQ ID NO: 449 - RNA, 20 nt, Artificial Sequence
  Synthetic oligonucleotide: TRAC-10
ucucucagcugguacacggc

SEQ ID NO: 450 - RNA, 20 nt, Artificial Sequence
  Synthetic oligonucleotide: TRAC-110
uggauuuagagucucucagc

SEQ ID NO: 451 - RNA, 20 nt, Artificial Sequence
  Synthetic oligonucleotide: TRAC-116
acacggcagggucaggguuc

SEQ ID NO: 452 - RNA, 20 nt, Artificial Sequence
  Synthetic oligonucleotide: TRAC-16
gagaaucaaaaucggugaau

SEQ ID NO: 453 - RNA, 20 nt, Artificial Sequence
  Synthetic oligonucleotide: TRAC-4
gcugguacacggcaggguca

SEQ ID NO: 454 - RNA, 17 nt, Artificial Sequence
  Synthetic oligonucleotide: TRAC-49
cucagcugguacacggc

SEQ ID NO: 455 - RNA, 17 nt, Artificial Sequence
  Synthetic oligonucleotide: TRAC-2
ugguacacggcaggguc

SEQ ID NO: 456 - RNA, 17 nt, Artificial Sequence
  Synthetic oligonucleotide: TRAC-30
gcuagacaugaggucua

SEQ ID NO: 457 - RNA, 17 nt, Artificial Sequence
  Synthetic oligonucleotide: TRAC-43
gucagauuuguugcucc

SEQ ID NO: 458 - RNA, 17 nt, Artificial Sequence
  Synthetic oligonucleotide: TRAC-23
ucagcugguacacggca

SEQ ID NO: 459 - RNA, 17 nt, Artificial Sequence
  Synthetic oligonucleotide: TRAC-34
gcagacagacuugucac

SEQ ID NO: 460 - RNA, 17 nt, Artificial Sequence
  Synthetic oligonucleotide: TRAC-25
gguacacggcaggguca

SEQ ID NO: 461 - RNA, 20 nt, Artificial Sequence
  Synthetic oligonucleotide: TRAC-128
cuucaagagcaacagugcug

SEQ ID NO: 462 - RNA, 20 nt, Artificial Sequence
  Synthetic oligonucleotide: TRAC-105
agagcaacagugcuguggcc

SEQ ID NO: 463 - RNA, 20 nt, Artificial Sequence
  Synthetic oligonucleotide: TRAC-106
aaagucagauuuguugcucc

SEQ ID NO: 464 - RNA, 20 nt, Artificial Sequence
  Synthetic oligonucleotide: TRAC-123
acaaaacugugcuagacaug

SEQ ID NO: 465 - RNA, 17 nt, Artificial Sequence
  Synthetic oligonucleotide: TRAC-64
aaacugugcuagacaug

SEQ ID NO: 466 - RNA, 20 nt, Artificial Sequence
  Synthetic oligonucleotide: TRAC-97
ugugcuagacaugaggucua

SEQ ID NO: 467 - RNA, 22 nt, Artificial Sequence
  Synthetic oligonucleotide: TRAC-148
ggcuggggaagaaggugucuuc

SEQ ID NO: 468 - RNA, 21 nt, Artificial Sequence
  Synthetic oligonucleotide: TRAC-147
gcuggggaagaaggugucuuc

SEQ ID NO: 469 - RNA, 18 nt, Artificial Sequence
  Synthetic oligonucleotide: TRAC-234
ggggaagaaggugucuuc

SEQ ID NO: 470 - RNA, 22 nt, Artificial Sequence
  Synthetic oligonucleotide: TRAC-167
guuuugucugugauauacacau

SEQ ID NO: 471 - RNA, 24 nt, Artificial Sequence
  Synthetic oligonucleotide: TRAC-177
ggcagacagacuugucacuggauu

SEQ ID NO: 472 - RNA, 23 nt, Artificial Sequence
  Synthetic oligonucleotide: TRAC-176
gcagacagacuugucacuggauu

SEQ ID NO: 473 - RNA, 20 nt, Artificial Sequence
  Synthetic oligonucleotide: TRAC-257
gacagacuugucacuggauu

SEQ ID NO: 474 - RNA, 24 nt, Artificial Sequence
  Synthetic oligonucleotide: TRAC-233
gugaauaggcagacagacuuguca

SEQ ID NO: 475 - RNA, 22 nt, Artificial Sequence
  Synthetic oligonucleotide: TRAC-231
gaauaggcagacagacuuguca

SEQ ID NO: 476 - RNA, 22 nt, Artificial Sequence
  Synthetic oligonucleotide: TRAC-163
gagucucucagcugguacacgg

SEQ ID NO: 477 - RNA, 20 nt, Artificial Sequence
  Synthetic oligonucleotide: TRAC-241
gucucucagcugguacacgg

SEQ ID NO: 478 - RNA, 22 nt, Artificial Sequence
  Synthetic oligonucleotide: TRAC-179
gguacacggcagggucaggguu

SEQ ID NO: 479 - DNA, 20 bp, Artificial Sequence
  Synthetic oligonucleotide: GWED141
gtttgctttgctgggccttt

SEQ ID NO: 480 - DNA, 20 bp, Artificial Sequence
  Synthetic oligonucleotide: GWED142
cctctcctgccaccttctct

SEQ ID NO: 481 - RNA, 23 nt, Artificial Sequence
  Synthetic oligonucleotide: PDCD1-3202
ggugcuacaacugggcuggcggc

SEQ ID NO: 482 - RNA, 22 nt, Artificial Sequence
  Synthetic oligonucleotide: PDCD1-3201
gugcuacaacugggcuggcggc

SEQ ID NO: 483 - RNA, 20 nt, Artificial Sequence
  Synthetic oligonucleotide: PDCD1-531
gcuacaacugggcuggcggc

SEQ ID NO: 484 - RNA, 21 nt, Artificial Sequence
  Synthetic oligonucleotide: PDCD1-3190
gacgacuggccagggcgccug

SEQ ID NO: 485 - RNA, 18 nt, Artificial Sequence
  Synthetic oligonucleotide: PDCD1-3188
gacuggccagggcgccug

SEQ ID NO: 486 - RNA, 21 nt, Artificial Sequence
  Synthetic oligonucleotide: PDCD1-3216
gcaugccuggagcagccccac

SEQ ID NO: 487 - RNA, 22 nt, Artificial Sequence
  Synthetic oligonucleotide: PDCD1-3195
gggggguuccagggccugucug

SEQ ID NO: 488 - RNA, 21 nt, Artificial Sequence
  Synthetic oligonucleotide: PDCD1-3194
ggggguuccagggccugucug

SEQ ID NO: 489 - RNA, 20 nt, Artificial Sequence
  Synthetic oligonucleotide: PDCD1-94
gggguuccagggccugucug

SEQ ID NO: 490 - RNA, 20 nt, Artificial Sequence
  Synthetic oligonucleotide: PDCD1-557
gagagccugcgggcagagcu

SEQ ID NO: 491 - RNA, 18 nt, Artificial Sequence
  Synthetic oligonucleotide: PDCD1-3234
gagccugcgggcagagcu

SEQ ID NO: 492 - RNA, 23 nt, Artificial Sequence
  Synthetic oligonucleotide: PDCD1-3196
ggggggguuccagggccugucug

SEQ ID NO: 493 - RNA, 21 nt, Artificial Sequence
  Synthetic oligonucleotide: PDCD1-3222
gcagggcuggggagaaggugg

SEQ ID NO: 494 - RNA, 18 nt, Artificial Sequence
  Synthetic oligonucleotide: PDCD1-3220
gggcuggggagaaggugg

SEQ ID NO: 495 - RNA, 23 nt, Artificial Sequence
  Synthetic oligonucleotide: PDCD1-3224
gagcagggcuggggagaaggugg

SEQ ID NO: 496 - RNA, 22 nt, Artificial Sequence
  Synthetic oligonucleotide: PDCD1-3773
ggccgcccacgacaccaaccac

SEQ ID NO: 497 - RNA, 21 nt, Artificial Sequence
  Synthetic oligonucleotide: PDCD1-3772
gccgcccacgacaccaaccac

SEQ ID NO: 498 - RNA, 18 nt, Artificial Sequence
  Synthetic oligonucleotide: PDCD1-3770
gcccacgacaccaaccac

SEQ ID NO: 499 - RNA, 22 nt, Artificial Sequence
  Synthetic oligonucleotide: PDCD1-3785
gguuuggaacuggccggcuggc

SEQ ID NO: 500 - RNA, 21 nt, Artificial Sequence
  Synthetic oligonucleotide: PDCD1-3784
guuuggaacuggccggcuggc

SEQ ID NO: 501 - RNA, 21 nt, Artificial Sequence
  Synthetic oligonucleotide: PDCD1-3856
gggcagccuggugcugcuagu

SEQ ID NO: 502 - RNA, 20 nt, Artificial Sequence
  Synthetic oligonucleotide: PDCD1-720
ggcagccuggugcugcuagu

SEQ ID NO: 503 - RNA, 19 nt, Artificial Sequence
  Synthetic oligonucleotide: PDCD1-3855
gcagccuggugcugcuagu

SEQ ID NO: 504 - RNA, 20 nt, Artificial Sequence
  Synthetic oligonucleotide: PDCD1-369
ggcuggccugggugaggggc

SEQ ID NO: 505 - RNA, 23 nt, Artificial Sequence
  Synthetic oligonucleotide: PDCD1-3786
ggguuuggaacuggccggcuggc

SEQ ID NO: 506 - RNA, 24 nt, Artificial Sequence
  Synthetic oligonucleotide: PDCD1-3859
gcugggcagccuggugcugcuagu

SEQ ID NO: 507 - RNA, 24 nt, Artificial Sequence
  Synthetic oligonucleotide: PDCD1-3781
ggccggcuggccugggugaggggc

SEQ ID NO: 508 - RNA, 20 nt, Artificial Sequence
  Synthetic oligonucleotide: PDCD1-108
gucugggcggugcuacaacu

SEQ ID NO: 509 - RNA, 20 nt, Artificial Sequence
  Synthetic oligonucleotide: PDCD1-105
ggcgcccuggccagucgucu

SEQ ID NO: 510 - RNA, 20 nt, Artificial Sequence
  Synthetic oligonucleotide: PDCD1-109
gggcggugcuacaacugggc

SEQ ID NO: 511 - RNA, 20 nt, Artificial Sequence
  Synthetic oligonucleotide: PDCD1-114
ggccaggaugguucuuaggu

SEQ ID NO: 512 - RNA, 20 nt, Artificial Sequence
  Synthetic oligonucleotide: PDCD1-117
ggaugguucuuagguaggug

SEQ ID NO: 513 - RNA, 17 nt, Artificial Sequence
  Synthetic oligonucleotide: PDCD1-2694
gaaggcggcacucuggu

SEQ ID NO: 514 - RNA, 17 nt, Artificial Sequence
  Synthetic oligonucleotide: PDCD1-232
gcccuggccagucgucu

SEQ ID NO: 515 - RNA, 17 nt, Artificial Sequence
  Synthetic oligonucleotide: PDCD1-251
gcccagacgacuggcca

SEQ ID NO: 516 - RNA, 17 nt, Artificial Sequence
  Synthetic oligonucleotide: PDCD1-242
gaugguucuuagguagg

SEQ ID NO: 517 - RNA, 17 nt, Artificial Sequence
  Synthetic oligonucleotide: PDCD1-2540
ggcggaggugagcggaa

SEQ ID NO: 518 - RNA, 17 nt, Artificial Sequence
  Synthetic oligonucleotide: PDCD1-2541
ggaagggaaacuguccc

SEQ ID NO: 519 - RNA, 20 nt, Artificial Sequence
  Synthetic oligonucleotide: PDCD1-16
gcgugacuuccacaugagcg

SEQ ID NO: 520 - RNA, 20 nt, Artificial Sequence
  Synthetic oligonucleotide: PDCD1-4
gcccugcucguggugaccga

SEQ ID NO: 521 - RNA, 20 nt, Artificial Sequence
  Synthetic oligonucleotide: PDCD1-52
ggugccgcugucauugcgcc

SEQ ID NO: 522 - RNA, 20 nt, Artificial Sequence
  Synthetic oligonucleotide: PDCD1-42
gcucucuuugaucugcgccu

SEQ ID NO: 523 - RNA, 20 nt, Artificial Sequence
  Synthetic oligonucleotide: PDCD1-77
gaagguggcguuguccccuu

SEQ ID NO: 524 - RNA, 20 nt, Artificial Sequence
  Synthetic oligonucleotide: PDCD1-15
gugucacacaacugcccaac

SEQ ID NO: 525 - RNA, 20 nt, Artificial Sequence
  Synthetic oligonucleotide: PDCD1-71
gcuuguccgucugguugcug

SEQ ID NO: 526 - RNA, 20 nt, Artificial Sequence
  Synthetic oligonucleotide: PDCD1-47
gaucugcgccuugggggcca

SEQ ID NO: 527 - RNA, 20 nt, Artificial Sequence
  Synthetic oligonucleotide: PDCD1-53
gggcccugaccacgcucaug

SEQ ID NO: 528 - RNA, 20 nt, Artificial Sequence
  Synthetic oligonucleotide: PDCD1-57
gcaguugugugacacggaag

SEQ ID NO: 529 - RNA, 20 nt, Artificial Sequence
  Synthetic oligonucleotide: PDCD1-21
gacagcggcaccuaccucug

SEQ ID NO: 530 - RNA, 17 nt, Artificial Sequence
  Synthetic oligonucleotide: PDCD1-181
guggaagucacgcccgu

SEQ ID NO: 531 - RNA, 17 nt, Artificial Sequence
  Synthetic oligonucleotide: PDCD1-133
gcucguggugaccgaag

SEQ ID NO: 532 - RNA, 17 nt, Artificial Sequence
  Synthetic oligonucleotide: PDCD1-147
gcccggcgcaaugacag

SEQ ID NO: 533 - RNA, 17 nt, Artificial Sequence
  Synthetic oligonucleotide: PDCD1-179
gccgcugucauugcgcc

SEQ ID NO: 534 - RNA, 17 nt, Artificial Sequence
  Synthetic oligonucleotide: PDCD1-149
gcggcaccuaccucugu

SEQ ID NO: 535 - RNA, 17 nt, Artificial Sequence
  Synthetic oligonucleotide: PDCD1-204
gguggcguuguccccuu

SEQ ID NO: 536 - RNA, 17 nt, Artificial Sequence
  Synthetic oligonucleotide: PDCD1-200
gaagcucuccgaugugu

SEQ ID NO: 537 - RNA, 17 nt, Artificial Sequence
  Synthetic oligonucleotide: PDCD1-184
guugugugacacggaag

SEQ ID NO: 538 - RNA, 17 nt, Artificial Sequence
  Synthetic oligonucleotide: PDCD1-192
gcuggcugcgguccucg

SEQ ID NO: 539 - RNA, 17 nt, Artificial Sequence
  Synthetic oligonucleotide: PDCD1-193
gcugcgguccucgggga

SEQ ID NO: 540 - RNA, 20 nt, Artificial Sequence
  Synthetic oligonucleotide: PDCD1-385
gacguuaccucgugcggccc

SEQ ID NO: 541 - RNA, 20 nt, Artificial Sequence
  Synthetic oligonucleotide: PDCD1-266
ggugucgugggcggccugcu

SEQ ID NO: 542 - RNA, 20 nt, Artificial Sequence
  Synthetic oligonucleotide: PDCD1-379
gcccacgacaccaaccacca

SEQ ID NO: 543 - RNA, 20 nt, Artificial Sequence
  Synthetic oligonucleotide: PDCD1-268
gcagccuggugcugcuaguc

SEQ ID NO: 544 - RNA, 20 nt, Artificial Sequence
  Synthetic oligonucleotide: PDCD1-270
ggugcugcuagucugggucc

SEQ ID NO: 545 - RNA, 20 nt, Artificial Sequence
  Synthetic oligonucleotide: PDCD1-382
ggacccagacuagcagcacc

SEQ ID NO: 546 - RNA, 20 nt, Artificial Sequence
  Synthetic oligonucleotide: PDCD1-362
ggcacuucugcccuucucuc

SEQ ID NO: 547 - RNA, 20 nt, Artificial Sequence
  Synthetic oligonucleotide: PDCD1-267
gggcggccugcugggcagcc

SEQ ID NO: 548 - RNA, 20 nt, Artificial Sequence
  Synthetic oligonucleotide: PDCD1-381
gcagcaccaggcugcccagc

SEQ ID NO: 549 - RNA, 20 nt, Artificial Sequence
  Synthetic oligonucleotide: PDCD1-368
gcuggccugggugaggggcu

SEQ ID NO: 550 - RNA, 17 nt, Artificial Sequence
  Synthetic oligonucleotide: PDCD1-472
guuaccucgugcggccc

SEQ ID NO: 551 - RNA, 17 nt, Artificial Sequence
  Synthetic oligonucleotide: PDCD1-316
gucgugggcggccugcu

SEQ ID NO: 552 - RNA, 17 nt, Artificial Sequence
  Synthetic oligonucleotide: PDCD1-462
guuuggaacuggccggc

SEQ ID NO: 553 - RNA, 17 nt, Artificial Sequence
  Synthetic oligonucleotide: PDCD1-322
ggccgucaucugcuccc

SEQ ID NO: 554 - RNA, 17 nt, Artificial Sequence
  Synthetic oligonucleotide: PDCD1-320
gcugcuagucugggucc

SEQ ID NO: 555 - RNA, 17 nt, Artificial Sequence
  Synthetic oligonucleotide: PDCD1-318
gccuggugcugcuaguc

SEQ ID NO: 556 - DNA, 20 bp, Artificial Sequence
  Synthetic oligonucleotide: GWED259
cactgcctctgtcactctcg

SEQ ID NO: 557 - DNA, 20 bp, Artificial Sequence
  Synthetic oligonucleotide: GWED260
agggactgagagtgaaaggt

SEQ ID NO: 558 - DNA, 19 bp, Artificial Sequence
  Synthetic oligonucleotide: JFPR004
caggatgcccaagggtcag

SEQ ID NO: 559 - DNA, 19 bp, Artificial Sequence
  Synthetic oligonucleotide: JFPR004R
ggagctcctgatcctgtgc

SEQ ID NO: 560 - DNA, 20 bp, Artificial Sequence
  Synthetic oligonucleotide: GWED257
aatggtgaccggcatctctg

SEQ ID NO: 561 - DNA, 20 bp, Artificial Sequence
  Synthetic oligonucleotide: JFPR005
ctgcacaggatcaggagctc

SEQ ID NO: 562 - DNA, 20 bp, Artificial Sequence
  Synthetic oligonucleotide: JFPR005R
agaatgtgagtcctgcaggc

SEQ ID NO: 563 - RNA, 20 nt, Artificial Sequence
  Synthetic oligonucleotide: PDCD1-108
gucugggcggugcuacaacu

SEQ ID NO: 564 - RNA, 17 nt, Artificial Sequence
  Synthetic oligonucleotide: PDCD1-251
gcccagacgacuggcca

SEQ ID NO: 565 - RNA, 17 nt, Artificial Sequence
  Synthetic oligonucleotide: PDCD1-133
gcucguggugaccgaag

SEQ ID NO: 566 - RNA, 20 nt, Artificial Sequence
  Synthetic oligonucleotide: PDCD1-15
gugucacacaacugcccaac

SEQ ID NO: 567 - RNA, 20 nt, Artificial Sequence
  Synthetic oligonucleotide: PDCD1-16
gcgugacuuccacaugagcg

SEQ ID NO: 568 - RNA, 17 nt, Artificial Sequence
  Synthetic oligonucleotide: PDCD1-147
gcccggcgcaaugacag

SEQ ID NO: 569 - RNA, 20 nt, Artificial Sequence
  Synthetic oligonucleotide: PDCD1-33
ggugacaggugcggccucgg

SEQ ID NO: 570 - RNA, 17 nt, Artificial Sequence
  Synthetic oligonucleotide: PDCD1-160
gacaggugcggccucgg

SEQ ID NO: 571 - RNA, 17 nt, Artificial Sequence
  Synthetic oligonucleotide: PDCD1-181
guggaagucacgcccgu

SEQ ID NO: 572 - RNA, 17 nt, Artificial Sequence
  Synthetic oligonucleotide: PDCD1-200
gaagcucuccgaugugu

SEQ ID NO: 573 - RNA, 17 nt, Artificial Sequence
  Synthetic oligonucleotide: PDCD1-207
gucaccacgagcagggc

SEQ ID NO: 574 - RNA, 20 nt, Artificial Sequence
  Synthetic oligonucleotide: PDCD1-104
aggcgcccuggccagucguc

SEQ ID NO: 575 - RNA, 17 nt, Artificial Sequence
  Synthetic oligonucleotide: PDCD1-231
cgcccuggccagucguc

SEQ ID NO: 576 - RNA, 20 nt, Artificial Sequence
  Synthetic oligonucleotide: PDCD1-107
cgucugggcggugcuacaac

SEQ ID NO: 577 - RNA, 17 nt, Artificial Sequence
  Synthetic oligonucleotide: PDCD1-234
cugggcggugcuacaac

SEQ ID NO: 578 - RNA, 17 nt, Artificial Sequence
  Synthetic oligonucleotide: PDCD1-235
ugggcggugcuacaacu

SEQ ID NO: 579 - RNA, 20 nt, Artificial Sequence
  Synthetic oligonucleotide: PDCD1-122
uguagcaccgcccagacgac

SEQ ID NO: 580 - RNA, 20 nt, Artificial Sequence
  Synthetic oligonucleotide: PDCD1-123
caccgcccagacgacuggcc

SEQ ID NO: 581 - RNA, 20 nt, Artificial Sequence
  Synthetic oligonucleotide: PDCD1-124
accgcccagacgacuggcca

SEQ ID NO: 582 - RNA, 20 nt, Artificial Sequence
  Synthetic oligonucleotide: PDCD1-126
cgacuggccagggcgccugu

SEQ ID NO: 583 - RNA, 17 nt, Artificial Sequence
  Synthetic oligonucleotide: PDCD1-249
agcaccgcccagacgac

SEQ ID NO: 584 - RNA, 17 nt, Artificial Sequence
  Synthetic oligonucleotide: PDCD1-250
cgcccagacgacuggcc

SEQ ID NO: 585 - RNA, 20 nt, Artificial Sequence
  Synthetic oligonucleotide: PDCD1-5
cccugcucguggugaccgaa

SEQ ID NO: 586 - RNA, 20 nt, Artificial Sequence
  Synthetic oligonucleotide: PDCD1-6
ccugcucguggugaccgaag

SEQ ID NO: 587 - RNA, 20 nt, Artificial Sequence
  Synthetic oligonucleotide: PDCD1-7
cugcagcuucuccaacacau

SEQ ID NO: 588 - RNA, 17 nt, Artificial Sequence
  Synthetic oligonucleotide: PDCD1-132
ugcucguggugaccgaa

SEQ ID NO: 589 - RNA, 17 nt, Artificial Sequence
  Synthetic oligonucleotide: PDCD1-134
cagcuucuccaacacau

SEQ ID NO: 590 - RNA, 20 nt, Artificial Sequence
  Synthetic oligonucleotide: PDCD1-17
acuuccacaugagcgugguc

SEQ ID NO: 591 - RNA, 17 nt, Artificial Sequence
  Synthetic oligonucleotide: PDCD1-142
ucacacaacugcccaac

SEQ ID NO: 592 - RNA, 17 nt, Artificial Sequence
  Synthetic oligonucleotide: PDCD1-143
ugacuuccacaugagcg

SEQ ID NO: 593 - RNA, 17 nt, Artificial Sequence
  Synthetic oligonucleotide: PDCD1-144
uccacaugagcgugguc

SEQ ID NO: 594 - RNA, 20 nt, Artificial Sequence
  Synthetic oligonucleotide: PDCD1-20
agggcccggcgcaaugacag

SEQ ID NO: 595 - RNA, 20 nt, Artificial Sequence
  Synthetic oligonucleotide: PDCD1-51
aggugccgcugucauugcgc

SEQ ID NO: 596 - RNA, 17 nt, Artificial Sequence
  Synthetic oligonucleotide: PDCD1-178
ugccgcugucauugcgc

SEQ ID NO: 597 - RNA, 20 nt, Artificial Sequence
  Synthetic oligonucleotide: PDCD1-54
cauguggaagucacgcccgu

SEQ ID NO: 598 - RNA, 20 nt, Artificial Sequence
  Synthetic oligonucleotide: PDCD1-55
auguggaagucacgcccguu

SEQ ID NO: 599 - RNA, 17 nt, Artificial Sequence
  Synthetic oligonucleotide: PDCD1-182
uggaagucacgcccguu

SEQ ID NO: 600 - RNA, 20 nt, Artificial Sequence
  Synthetic oligonucleotide: PDCD1-58
ugacacggaagcggcagucc

SEQ ID NO: 601 - RNA, 17 nt, Artificial Sequence
  Synthetic oligonucleotide: PDCD1-185
cacggaagcggcagucc

SEQ ID NO: 602 - RNA, 20 nt, Artificial Sequence
  Synthetic oligonucleotide: PDCD1-73
cacgaagcucuccgaugugu

SEQ ID NO: 603 - RNA, 20 nt, Artificial Sequence
  Synthetic oligonucleotide: PDCD1-78
ccccuucggucaccacgagc

SEQ ID NO: 604 - RNA, 20 nt, Artificial Sequence
  Synthetic oligonucleotide: PDCD1-79
cccuucggucaccacgagca

SEQ ID NO: 605 - RNA, 20 nt, Artificial Sequence
  Synthetic oligonucleotide: PDCD1-80
ucggucaccacgagcagggc

SEQ ID NO: 606 - RNA, 17 nt, Artificial Sequence
  Synthetic oligonucleotide: PDCD1-205
cuucggucaccacgagc

SEQ ID NO: 607 - RNA, 17 nt, Artificial Sequence
  Synthetic oligonucleotide: PDCD1-206
uucggucaccacgagca

SEQ ID NO: 608 - RNA, 17 nt, Artificial Sequence
  Synthetic oligonucleotide: PDCD1-186
gaagcggcaguccuggc

SEQ ID NO: 609 - RNA, 17 nt, Artificial Sequence
  Synthetic oligonucleotide: PDCD1-203
gaagcugcaggugaagg

SEQ ID NO: 610 - RNA, 20 nt, Artificial Sequence
  Synthetic oligonucleotide: PDCD1-77
gaagguggcguuguccccuu

SEQ ID NO: 611 - RNA, 17 nt, Artificial Sequence
  Synthetic oligonucleotide: PDCD1-217
gaagguggggggguucc

SEQ ID NO: 612 - RNA, 20 nt, Artificial Sequence
  Synthetic oligonucleotide: PDCD1-21
gacagcggcaccuaccucug

SEQ ID NO: 613 - RNA, 20 nt, Artificial Sequence
  Synthetic oligonucleotide: PDCD1-91
gagaagguggggggguucca

SEQ ID NO: 614 - RNA, 20 nt, Artificial Sequence
  Synthetic oligonucleotide: PDCD1-98
gagauggagagaggugagga

SEQ ID NO: 615 - RNA, 17 nt, Artificial Sequence
  Synthetic oligonucleotide: PDCD1-210
gagcagggcuggggaga

SEQ ID NO: 616 - RNA, 20 nt, Artificial Sequence
  Synthetic oligonucleotide: PDCD1-84
gagcagggcuggggagaagg

SEQ ID NO: 617 - RNA, 17 nt, Artificial Sequence
  Synthetic oligonucleotide: PDCD1-136
gagccccagcaaccaga

SEQ ID NO: 618 - RNA, 20 nt, Artificial Sequence
  Synthetic oligonucleotide: PDCD1-29
gagccugcgggcagagcuca

SEQ ID NO: 619 - RNA, 17 nt, Artificial Sequence
  Synthetic oligonucleotide: PDCD1-139
gaggaccgcagccagcc

SEQ ID NO: 620 - RNA, 17 nt, Artificial Sequence
  Synthetic oligonucleotide: PDCD1-154
gaucaaagagagccugc

SEQ ID NO: 621 - RNA, 20 nt, Artificial Sequence
  Synthetic oligonucleotide: PDCD1-47
gaucugcgccuugggggcca

SEQ ID NO: 622 - RNA, 20 nt, Artificial Sequence
  Synthetic oligonucleotide: PDCD1-100
gauggagagaggugaggaag

SEQ ID NO: 623 - RNA, 17 nt, Artificial Sequence
  Synthetic oligonucleotide: PDCD1-177
gauggccccacagaggu

SEQ ID NO: 624 - RNA, 17 nt, Artificial Sequence
  Synthetic oligonucleotide: PDCD1-242
gaugguucuuagguagg

SEQ ID NO: 625 - RNA, 17 nt, Artificial Sequence
  Synthetic oligonucleotide: PDCD1-157
gcagagcucagggugac

SEQ ID NO: 626 - RNA, 20 nt, Artificial Sequence
  Synthetic oligonucleotide: PDCD1-27
gcagaucaaagagagccugc

SEQ ID NO: 627 - RNA, 20 nt, Artificial Sequence
  Synthetic oligonucleotide: PDCD1-86
gcagggcuggggagaaggug

SEQ ID NO: 628 - RNA, 20 nt, Artificial Sequence
  Synthetic oligonucleotide: PDCD1-57
gcaguugugugacacggaag

SEQ ID NO: 629 - RNA, 20 nt, Artificial Sequence
  Synthetic oligonucleotide: PDCD1-4
gcccugcucguggugaccga

SEQ ID NO: 630 - RNA, 17 nt, Artificial Sequence
  Synthetic oligonucleotide: PDCD1-232
gcccuggccagucgucu

SEQ ID NO: 631 - RNA, 20 nt, Artificial Sequence
  Synthetic oligonucleotide: PDCD1-106
gcccuggccagucgucuggg

SEQ ID NO: 632 - RNA, 17 nt, Artificial Sequence
  Synthetic oligonucleotide: PDCD1-179
gccgcugucauugcgcc

SEQ ID NO: 633 - RNA, 20 nt, Artificial Sequence
  Synthetic oligonucleotide: PDCD1-63
gccgggcuggcugcgguccu

SEQ ID NO: 634 - RNA, 20 nt, Artificial Sequence
  Synthetic oligonucleotide: PDCD1-38
gccucggaggccccggggca

SEQ ID NO: 635 - RNA, 17 nt, Artificial Sequence
  Synthetic oligonucleotide: PDCD1-155
gccugcgggcagagcuc

SEQ ID NO: 636 - RNA, 20 nt, Artificial Sequence
  Synthetic oligonucleotide: PDCD1-127
gccugugggaucugcaugcc

SEQ ID NO: 637 - RNA, 17 nt, Artificial Sequence
  Synthetic oligonucleotide: PDCD1-149
gcggcaccuaccucugu

SEQ ID NO: 638 - RNA, 17 nt, Artificial Sequence
  Synthetic oligonucleotide: PDCD1-162
gcggccucggaggcccc

SEQ ID NO: 639 - RNA, 17 nt, Artificial Sequence
  Synthetic oligonucleotide: PDCD1-194
gcgguccucggggaagg

SEQ ID NO: 640 - RNA, 17 nt, Artificial Sequence
  Synthetic oligonucleotide: PDCD1-158
gcucagggugacaggug

SEQ ID NO: 641 - RNA, 20 nt, Artificial Sequence
  Synthetic oligonucleotide: PDCD1-42
gcucucuuugaucugcgccu

SEQ ID NO: 642 - RNA, 17 nt, Artificial Sequence
  Synthetic oligonucleotide: PDCD1-193
gcugcgguccucgggga

SEQ ID NO: 643 - RNA, 20 nt, Artificial Sequence
  Synthetic oligonucleotide: PDCD1-67
gcugcgguccucggggaagg

SEQ ID NO: 644 - RNA, 17 nt, Artificial Sequence
  Synthetic oligonucleotide: PDCD1-138
gcuggccgccuuccccg

SEQ ID NO: 645 - RNA, 17 nt, Artificial Sequence
  Synthetic oligonucleotide: PDCD1-192
gcuggcugcgguccucg

SEQ ID NO: 646 - RNA, 17 nt, Artificial Sequence
  Synthetic oligonucleotide: PDCD1-215
gcuggggagaagguggg

SEQ ID NO: 647 - RNA, 20 nt, Artificial Sequence
  Synthetic oligonucleotide: PDCD1-71
gcuuguccgucugguugcug

SEQ ID NO: 648 - RNA, 20 nt, Artificial Sequence
  Synthetic oligonucleotide: PDCD1-13
ggaccgcagccagcccggcc

SEQ ID NO: 649 - RNA, 17 nt, Artificial Sequence
  Synthetic oligonucleotide: PDCD1-202
ggagaagcugcagguga

SEQ ID NO: 650 - RNA, 20 nt, Artificial Sequence
  Synthetic oligonucleotide: PDCD1-76
ggagaagcugcaggugaagg

SEQ ID NO: 651 - RNA, 20 nt, Artificial Sequence
  Synthetic oligonucleotide: PDCD1-90
ggagaagguggggggguucc

SEQ ID NO: 652 - RNA, 17 nt, Artificial Sequence
  Synthetic oligonucleotide: PDCD1-227
ggagagaggugaggaag

SEQ ID NO: 653 - RNA, 20 nt, Artificial Sequence
  Synthetic oligonucleotide: PDCD1-50
ggagauggccccacagaggu

SEQ ID NO: 654 - RNA, 20 nt, Artificial Sequence
  Synthetic oligonucleotide: PDCD1-96
ggagucugagagauggagag

SEQ ID NO: 655 - RNA, 20 nt, Artificial Sequence
  Synthetic oligonucleotide: PDCD1-117
ggaugguucuuagguaggug

SEQ ID NO: 656 - RNA, 17 nt, Artificial Sequence
  Synthetic oligonucleotide: PDCD1-188
ggcaguccuggccgggc

SEQ ID NO: 657 - RNA, 20 nt, Artificial Sequence
  Synthetic oligonucleotide: PDCD1-114
ggccaggaugguucuuaggu

SEQ ID NO: 658 - RNA, 20 nt, Artificial Sequence
  Synthetic oligonucleotide: PDCD1-25
ggccaucucccuggccccca

SEQ ID NO: 659 - RNA, 20 nt, Artificial Sequence
  Synthetic oligonucleotide: PDCD1-37
ggccucggaggccccggggc

SEQ ID NO: 660 - RNA, 20 nt, Artificial Sequence
  Synthetic oligonucleotide: PDCD1-105
ggcgcccuggccagucgucu

SEQ ID NO: 661 - RNA, 17 nt, Artificial Sequence
  Synthetic oligonucleotide: PDCD1-191
ggcuggcugcgguccuc

SEQ ID NO: 662 - RNA, 17 nt, Artificial Sequence
  Synthetic oligonucleotide: PDCD1-214
ggcuggggagaaggugg

SEQ ID NO: 663 - RNA, 17 nt, Artificial Sequence
  Synthetic oligonucleotide: PDCD1-176
gggagauggccccacag

SEQ ID NO: 664 - RNA, 20 nt, Artificial Sequence
  Synthetic oligonucleotide: PDCD1-53
gggcccugaccacgcucaug

SEQ ID NO: 665 - RNA, 20 nt, Artificial Sequence
  Synthetic oligonucleotide: PDCD1-109
gggcggugcuacaacugggc

SEQ ID NO: 666 - RNA, 17 nt, Artificial Sequence
  Synthetic oligonucleotide: PDCD1-190
gggcuggcugcgguccu

SEQ ID NO: 667 - RNA, 17 nt, Artificial Sequence
  Synthetic oligonucleotide: PDCD1-213
gggcuggggagaaggug

SEQ ID NO: 668 - RNA, 20 nt, Artificial Sequence
  Synthetic oligonucleotide: PDCD1-89
gggcuggggagaaggugggg

SEQ ID NO: 669 - RNA, 20 nt, Artificial Sequence
  Synthetic oligonucleotide: PDCD1-92
gggggguuccagggccuguc

SEQ ID NO: 670 - RNA, 20 nt, Artificial Sequence
  Synthetic oligonucleotide: PDCD1-93
ggggguuccagggccugucu

SEQ ID NO: 671 - RNA, 20 nt, Artificial Sequence
  Synthetic oligonucleotide: PDCD1-94
gggguuccagggccugucug

SEQ ID NO: 672 - RNA, 17 nt, Artificial Sequence
  Synthetic oligonucleotide: PDCD1-219
ggguuccagggccuguc

SEQ ID NO: 673 - RNA, 20 nt, Artificial Sequence
  Synthetic oligonucleotide: PDCD1-120
gguagguggggucggcgguc

SEQ ID NO: 674 - RNA, 20 nt, Artificial Sequence
  Synthetic oligonucleotide: PDCD1-82
ggucaccacgagcagggcug

SEQ ID NO: 675 - RNA, 17 nt, Artificial Sequence
  Synthetic oligonucleotide: PDCD1-159
ggugacaggugcggccu

SEQ ID NO: 676 - RNA, 20 nt, Artificial Sequence
  Synthetic oligonucleotide: PDCD1-52
ggugccgcugucauugcgcc

SEQ ID NO: 677 - RNA, 20 nt, Artificial Sequence
  Synthetic oligonucleotide: PDCD1-35
ggugcggccucggaggcccc

SEQ ID NO: 678 - RNA, 17 nt, Artificial Sequence
  Synthetic oligonucleotide: PDCD1-204
gguggcguuguccccuu

SEQ ID NO: 679 - RNA, 17 nt, Artificial Sequence
  Synthetic oligonucleotide: PDCD1-220
gguuccagggccugucu

SEQ ID NO: 680 - RNA, 20 nt, Artificial Sequence
  Synthetic oligonucleotide: PDCD1-118
gguucuuagguagguggggu

SEQ ID NO: 681 - RNA, 17 nt, Artificial Sequence
  Synthetic oligonucleotide: PDCD1-199
gguugcuggggcucaug

SEQ ID NO: 682 - RNA, 17 nt, Artificial Sequence
  Synthetic oligonucleotide: PDCD1-141
gucacacaacugcccaa

SEQ ID NO: 683 - RNA, 17 nt, Artificial Sequence
  Synthetic oligonucleotide: PDCD1-223
gucugagagauggagag

SEQ ID NO: 684 - RNA, 20 nt, Artificial Sequence
  Synthetic oligonucleotide: PDCD1-36
gugcggccucggaggccccg

SEQ ID NO: 685 - RNA, 17 nt, Artificial Sequence
  Synthetic oligonucleotide: PDCD1-221
guuccagggccugucug

SEQ ID NO: 686 - RNA, 20 nt, Artificial Sequence
  Synthetic oligonucleotide: PDCD1-75
guuggagaagcugcagguga

SEQ ID NO: 687 - RNA, 17 nt, Artificial Sequence
  Synthetic oligonucleotide: PDCD1-184
guugugugacacggaag

SEQ ID NO: 688 - RNA, 20 nt, Artificial Sequence
  Synthetic oligonucleotide: PDCD1-112
aacugggcuggcggccagga

SEQ ID NO: 689 - RNA, 17 nt, Artificial Sequence
  Synthetic oligonucleotide: PDCD1-187
aagcggcaguccuggcc

SEQ ID NO: 690 - RNA, 17 nt, Artificial Sequence
  Synthetic oligonucleotide: PDCD1-218
aagguggggggguucca

SEQ ID NO: 691 - RNA, 20 nt, Artificial Sequence
  Synthetic oligonucleotide: PDCD1-22
acagcggcaccuaccucugu

SEQ ID NO: 692 - RNA, 20 nt, Artificial Sequence
  Synthetic oligonucleotide: PDCD1-19
acaugagcguggucagggcc

SEQ ID NO: 693 - RNA, 20 nt, Artificial Sequence
  Synthetic oligonucleotide: PDCD1-125
acgacuggccagggcgccug

SEQ ID NO: 694 - RNA, 20 nt, Artificial Sequence
  Synthetic oligonucleotide: PDCD1-59
acggaagcggcaguccuggc

SEQ ID NO: 695 - RNA, 17 nt, Artificial Sequence
  Synthetic oligonucleotide: PDCD1-129
acuccccagacaggccc

SEQ ID NO: 696 - RNA, 17 nt, Artificial Sequence
  Synthetic oligonucleotide: PDCD1-252
acuggccagggcgccug

SEQ ID NO: 697 - RNA, 17 nt, Artificial Sequence
  Synthetic oligonucleotide: PDCD1-224
agagauggagagaggug

SEQ ID NO: 698 - RNA, 20 nt, Artificial Sequence
  Synthetic oligonucleotide: PDCD1-28
agagccugcgggcagagcuc

SEQ ID NO: 699 - RNA, 20 nt, Artificial Sequence
  Synthetic oligonucleotide: PDCD1-31
agagcucagggugacaggug

SEQ ID NO: 700 - RNA, 17 nt, Artificial Sequence
  Synthetic oligonucleotide: PDCD1-135
agagcuucgugcuaaac

SEQ ID NO: 701 - RNA, 17 nt, Artificial Sequence
  Synthetic oligonucleotide: PDCD1-153
agaucaaagagagccug

SEQ ID NO: 702 - RNA, 17 nt, Artificial Sequence
  Synthetic oligonucleotide: PDCD1-230
agaucccacaggcgccc

SEQ ID NO: 703 - RNA, 20 nt, Artificial Sequence
  Synthetic oligonucleotide: PDCD1-99
agauggagagaggugaggaa

SEQ ID NO: 704 - RNA, 20 nt, Artificial Sequence
  Synthetic oligonucleotide: PDCD1-85
agcagggcuggggagaaggu

SEQ ID NO: 705 - RNA, 17 nt, Artificial Sequence
  Synthetic oligonucleotide: PDCD1-148
agcggcaccuaccucug

SEQ ID NO: 706 - RNA, 20 nt, Artificial Sequence
  Synthetic oligonucleotide: PDCD1-61
agcggcaguccuggccgggc

SEQ ID NO: 707 - RNA, 20 nt, Artificial Sequence
  Synthetic oligonucleotide: PDCD1-70
agcuuguccgucugguugcu

SEQ ID NO: 708 - RNA, 20 nt, Artificial Sequence
  Synthetic oligonucleotide: PDCD1-116
aggaugguucuuagguaggu

SEQ ID NO: 709 - RNA, 17 nt, Artificial Sequence
  Synthetic oligonucleotide: PDCD1-229
aggcaugcagaucccac

SEQ ID NO: 710 - RNA, 20 nt, Artificial Sequence
  Synthetic oligonucleotide: PDCD1-68
aggcggccagcuuguccguc

SEQ ID NO: 711 - RNA, 17 nt, Artificial Sequence
  Synthetic oligonucleotide: PDCD1-212
agggcuggggagaaggu

SEQ ID NO: 712 - RNA, 20 nt, Artificial Sequence
  Synthetic oligonucleotide: PDCD1-88
agggcuggggagaagguggg

SEQ ID NO: 713 - RNA, 20 nt, Artificial Sequence
  Synthetic oligonucleotide: PDCD1-34
aggugcggccucggaggccc

SEQ ID NO: 714 - RNA, 17 nt, Artificial Sequence
  Synthetic oligonucleotide: PDCD1-247
agguggggucggcgguc

SEQ ID NO: 715 - RNA, 20 nt, Artificial Sequence
  Synthetic oligonucleotide: PDCD1-62
aguccuggccgggcuggcug

SEQ ID NO: 716 - RNA, 20 nt, Artificial Sequence
  Synthetic oligonucleotide: PDCD1-1
aucucucagacuccccagac

SEQ ID NO: 717 - RNA, 17 nt, Artificial Sequence
  Synthetic oligonucleotide: PDCD1-225
auggagagaggugagga

SEQ ID NO: 718 - RNA, 17 nt, Artificial Sequence
  Synthetic oligonucleotide: PDCD1-243
augguucuuagguaggu

SEQ ID NO: 719 - RNA, 17 nt, Artificial Sequence
  Synthetic oligonucleotide: PDCD1-137
caaccagacggacaagc

SEQ ID NO: 720 - RNA, 17 nt, Artificial Sequence
  Synthetic oligonucleotide: PDCD1-238
caacugggcuggcggcc

SEQ ID NO: 721 - RNA, 20 nt, Artificial Sequence
  Synthetic oligonucleotide: PDCD1-11
caagcuggccgccuuccccg

SEQ ID NO: 722 - RNA, 17 nt, Artificial Sequence
  Synthetic oligonucleotide: PDCD1-209
caccacgagcagggcug

SEQ ID NO: 723 - RNA, 20 nt, Artificial Sequence
  Synthetic oligonucleotide: PDCD1-121
caccuaccuaagaaccaucc

SEQ ID NO: 724 - RNA, 20 nt, Artificial Sequence
  Synthetic oligonucleotide: PDCD1-83
cacgagcagggcuggggaga

SEQ ID NO: 725 - RNA, 20 nt, Artificial Sequence
  Synthetic oligonucleotide: PDCD1-101
cacucugguggggcugcucc

SEQ ID NO: 726 - RNA, 20 nt, Artificial Sequence
  Synthetic oligonucleotide: PDCD1-2
cagacuccccagacaggccc

SEQ ID NO: 727 - RNA, 20 nt, Artificial Sequence
  Synthetic oligonucleotide: PDCD1-10
cagcaaccagacggacaagc

SEQ ID NO: 728 - RNA, 20 nt, Artificial Sequence
  Synthetic oligonucleotide: PDCD1-23
cagcggcaccuaccucugug

SEQ ID NO: 729 - RNA, 20 nt, Artificial Sequence
  Synthetic oligonucleotide: PDCD1-69
cagcuuguccgucugguugc

SEQ ID NO: 730 - RNA, 17 nt, Artificial Sequence
  Synthetic oligonucleotide: PDCD1-241
caggaugguucuuaggu

SEQ ID NO: 731 - RNA, 20 nt, Artificial Sequence
  Synthetic oligonucleotide: PDCD1-115
caggaugguucuuagguagg

SEQ ID NO: 732 - RNA, 17 nt, Artificial Sequence
  Synthetic oligonucleotide: PDCD1-211
cagggcuggggagaagg

SEQ ID NO: 733 - RNA, 20 nt, Artificial Sequence
  Synthetic oligonucleotide: PDCD1-87
cagggcuggggagaaggugg

SEQ ID NO: 734 - RNA, 20 nt, Artificial Sequence
  Synthetic oligonucleotide: PDCD1-32
cagggugacaggugcggccu

SEQ ID NO: 735 - RNA, 17 nt, Artificial Sequence
  Synthetic oligonucleotide: PDCD1-152
caucucccuggccccca

SEQ ID NO: 736 - RNA, 20 nt, Artificial Sequence
  Synthetic oligonucleotide: PDCD1-9
caugagccccagcaaccaga

SEQ ID NO: 737 - RNA, 17 nt, Artificial Sequence
  Synthetic oligonucleotide: PDCD1-145
ccacaugagcgugguca

SEQ ID NO: 738 - RNA, 20 nt, Artificial Sequence
  Synthetic oligonucleotide: PDCD1-49
ccagggagauggccccacag

SEQ ID NO: 739 - RNA, 20 nt, Artificial Sequence
  Synthetic oligonucleotide: PDCD1-40
ccccugccccggggccuccg

SEQ ID NO: 740 - RNA, 20 nt, Artificial Sequence
  Synthetic oligonucleotide: PDCD1-12
cccgaggaccgcagccagcc

SEQ ID NO: 741 - RNA, 17 nt, Artificial Sequence
  Synthetic oligonucleotide: PDCD1-180
cccugaccacgcucaug

SEQ ID NO: 742 - RNA, 17 nt, Artificial Sequence
  Synthetic oligonucleotide: PDCD1-168
cccugagcucugcccgc

SEQ ID NO: 743 - RNA, 17 nt, Artificial Sequence
  Synthetic oligonucleotide: PDCD1-140
ccgcagccagcccggcc

SEQ ID NO: 744 - RNA, 20 nt, Artificial Sequence
  Synthetic oligonucleotide: PDCD1-64
ccgggcuggcugcgguccuc

SEQ ID NO: 745 - RNA, 20 nt, Artificial Sequence
  Synthetic oligonucleotide: PDCD1-39
ccucggaggccccggggcag

SEQ ID NO: 746 - RNA, 20 nt, Artificial Sequence
  Synthetic oligonucleotide: PDCD1-24
ccucuguggggccaucuccc

SEQ ID NO: 747 - RNA, 17 nt, Artificial Sequence
  Synthetic oligonucleotide: PDCD1-156
ccugcgggcagagcuca

SEQ ID NO: 748 - RNA, 17 nt, Artificial Sequence
  Synthetic oligonucleotide: PDCD1-189
ccuggccgggcuggcug

SEQ ID NO: 749 - RNA, 20 nt, Artificial Sequence
  Synthetic oligonucleotide: PDCD1-74
cgauguguuggagaagcugc

SEQ ID NO: 750 - RNA, 20 nt, Artificial Sequence
  Synthetic oligonucleotide: PDCD1-26
cgcagaucaaagagagccug

SEQ ID NO: 751 - RNA, 20 nt, Artificial Sequence
  Synthetic oligonucleotide: PDCD1-48
cgccuugggggccagggaga

SEQ ID NO: 752 - RNA, 20 nt, Artificial Sequence
  Synthetic oligonucleotide: PDCD1-60
cggaagcggcaguccuggcc

SEQ ID NO: 753 - RNA, 20 nt, Artificial Sequence
  Synthetic oligonucleotide: PDCD1-8
cggagagcuucgugcuaaac

SEQ ID NO: 754 - RNA, 17 nt, Artificial Sequence
  Synthetic oligonucleotide: PDCD1-166
cggaggccccggggcag

SEQ ID NO: 755 - RNA, 17 nt, Artificial Sequence
  Synthetic oligonucleotide: PDCD1-150
cggcaccuaccucugug

SEQ ID NO: 756 - RNA, 17 nt, Artificial Sequence
  Synthetic oligonucleotide: PDCD1-195
cggccagcuuguccguc

SEQ ID NO: 757 - RNA, 17 nt, Artificial Sequence
  Synthetic oligonucleotide: PDCD1-240
cggccaggaugguucuu

SEQ ID NO: 758 - RNA, 17 nt, Artificial Sequence
  Synthetic oligonucleotide: PDCD1-163
cggccucggaggccccg

SEQ ID NO: 759 - RNA, 20 nt, Artificial Sequence
  Synthetic oligonucleotide: PDCD1-30
cgggcagagcucagggugac

SEQ ID NO: 760 - RNA, 20 nt, Artificial Sequence
  Synthetic oligonucleotide: PDCD1-65
cgggcuggcugcgguccucg

SEQ ID NO: 761 - RNA, 20 nt, Artificial Sequence
  Synthetic oligonucleotide: PDCD1-81
cggucaccacgagcagggcu

SEQ ID NO: 762 - RNA, 17 nt, Artificial Sequence
  Synthetic oligonucleotide: PDCD1-236
cggugcuacaacugggc

SEQ ID NO: 763 - RNA, 20 nt, Artificial Sequence
  Synthetic oligonucleotide: PDCD1-110
cggugcuacaacugggcugg

SEQ ID NO: 764 - RNA, 20 nt, Artificial Sequence
  Synthetic oligonucleotide: PDCD1-14
cgugucacacaacugcccaa

SEQ ID NO: 765 - RNA, 20 nt, Artificial Sequence
  Synthetic oligonucleotide: PDCD1-56
cguugggcaguugugugaca

SEQ ID NO: 766 - RNA, 20 nt, Artificial Sequence
  Synthetic oligonucleotide: PDCD1-111
cuacaacugggcuggcggcc

SEQ ID NO: 767 - RNA, 17 nt, Artificial Sequence
  Synthetic oligonucleotide: PDCD1-248
cuaccuaagaaccaucc

SEQ ID NO: 768 - RNA, 17 nt, Artificial Sequence
  Synthetic oligonucleotide: PDCD1-130
cuccccagcccugcucg

SEQ ID NO: 769 - RNA, 17 nt, Artificial Sequence
  Synthetic oligonucleotide: PDCD1-164
cucggaggccccggggc

SEQ ID NO: 770 - RNA, 20 nt, Artificial Sequence
  Synthetic oligonucleotide: PDCD1-43
cucucuuugaucugcgccuu

SEQ ID NO: 771 - RNA, 17 nt, Artificial Sequence
  Synthetic oligonucleotide: PDCD1-169
cucuuugaucugcgccu

SEQ ID NO: 772 - RNA, 20 nt, Artificial Sequence
  Synthetic oligonucleotide: PDCD1-45
cucuuugaucugcgccuugg

SEQ ID NO: 773 - RNA, 20 nt, Artificial Sequence
  Synthetic oligonucleotide: PDCD1-97
cugagagauggagagaggug

SEQ ID NO: 774 - RNA, 17 nt, Artificial Sequence
  Synthetic oligonucleotide: PDCD1-167
cugccccggggccuccg

SEQ ID NO: 775 - RNA, 17 nt, Artificial Sequence
  Synthetic oligonucleotide: PDCD1-174
cugcgccuugggggcca

SEQ ID NO: 776 - RNA, 17 nt, Artificial Sequence
  Synthetic oligonucleotide: PDCD1-131
cugcucguggugaccga

SEQ ID NO: 777 - RNA, 17 nt, Artificial Sequence
  Synthetic oligonucleotide: PDCD1-253
cuggccagggcgccugu

SEQ ID NO: 778 - RNA, 17 nt, Artificial Sequence
  Synthetic oligonucleotide: PDCD1-233
cuggccagucgucuggg

SEQ ID NO: 779 - RNA, 20 nt, Artificial Sequence
  Synthetic oligonucleotide: PDCD1-66
cuggcugcgguccucgggga

SEQ ID NO: 780 - RNA, 17 nt, Artificial Sequence
  Synthetic oligonucleotide: PDCD1-216
cuggggagaaggugggg

SEQ ID NO: 781 - RNA, 17 nt, Artificial Sequence
  Synthetic oligonucleotide: PDCD1-222
cuggggagucugagaga

SEQ ID NO: 782 - RNA, 17 nt, Artificial Sequence
  Synthetic oligonucleotide: PDCD1-151
cuguggggccaucuccc

SEQ ID NO: 783 - RNA, 20 nt, Artificial Sequence
  Synthetic oligonucleotide: PDCD1-18
cuuccacaugagcgugguca

SEQ ID NO: 784 - RNA, 20 nt, Artificial Sequence
  Synthetic oligonucleotide: PDCD1-3
cuucuccccagcccugcucg

SEQ ID NO: 785 - RNA, 17 nt, Artificial Sequence
  Synthetic oligonucleotide: PDCD1-175
cuugggggccagggaga

SEQ ID NO: 786 - RNA, 17 nt, Artificial Sequence
  Synthetic oligonucleotide: PDCD1-196
cuuguccgucugguugc

SEQ ID NO: 787 - RNA, 17 nt, Artificial Sequence
  Synthetic oligonucleotide: PDCD1-171
cuuugaucugcgccuug

SEQ ID NO: 788 - RNA, 17 nt, Artificial Sequence
  Synthetic oligonucleotide: PDCD1-246
uagguagguggggucgg

SEQ ID NO: 789 - RNA, 17 nt, Artificial Sequence
  Synthetic oligonucleotide: PDCD1-208
ucaccacgagcagggcu

SEQ ID NO: 790 - RNA, 20 nt, Artificial Sequence
  Synthetic oligonucleotide: PDCD1-41
ucacccugagcucugcccgc

SEQ ID NO: 791 - RNA, 20 nt, Artificial Sequence
  Synthetic oligonucleotide: PDCD1-102
uccaggcaugcagaucccac

SEQ ID NO: 792 - RNA, 17 nt, Artificial Sequence
  Synthetic oligonucleotide: PDCD1-165
ucggaggccccggggca

SEQ ID NO: 793 - RNA, 17 nt, Artificial Sequence
  Synthetic oligonucleotide: PDCD1-128
ucucagacuccccagac

SEQ ID NO: 794 - RNA, 20 nt, Artificial Sequence
  Synthetic oligonucleotide: PDCD1-44
ucucuuugaucugcgccuug

SEQ ID NO: 795 - RNA, 17 nt, Artificial Sequence
  Synthetic oligonucleotide: PDCD1-173
ucugcgccuugggggcc

SEQ ID NO: 796 - RNA, 17 nt, Artificial Sequence
  Synthetic oligonucleotide: PDCD1-228
ucugguggggcugcucc

SEQ ID NO: 797 - RNA, 20 nt, Artificial Sequence
  Synthetic oligonucleotide: PDCD1-72
ucugguugcuggggcucaug

SEQ ID NO: 798 - RNA, 17 nt, Artificial Sequence
  Synthetic oligonucleotide: PDCD1-245
ucuuagguagguggggu

SEQ ID NO: 799 - RNA, 20 nt, Artificial Sequence
  Synthetic oligonucleotide: PDCD1-119
ucuuagguagguggggucgg

SEQ ID NO: 800 - RNA, 17 nt, Artificial Sequence
  Synthetic oligonucleotide: PDCD1-170
ucuuugaucugcgccuu

SEQ ID NO: 801 - RNA, 17 nt, Artificial Sequence
  Synthetic oligonucleotide: PDCD1-146
ugagcguggucagggcc

SEQ ID NO: 802 - RNA, 20 nt, Artificial Sequence
  Synthetic oligonucleotide: PDCD1-46
ugaucugcgccuugggggcc

SEQ ID NO: 803 - RNA, 20 nt, Artificial Sequence
  Synthetic oligonucleotide: PDCD1-103
ugcagaucccacaggcgccc

SEQ ID NO: 804 - RNA, 17 nt, Artificial Sequence
  Synthetic oligonucleotide: PDCD1-161
ugcggccucggaggccc

SEQ ID NO: 805 - RNA, 17 nt, Artificial Sequence
  Synthetic oligonucleotide: PDCD1-237
ugcuacaacugggcugg

SEQ ID NO: 806 - RNA, 17 nt, Artificial Sequence
  Synthetic oligonucleotide: PDCD1-226
uggagagaggugaggaa

SEQ ID NO: 807 - RNA, 20 nt, Artificial Sequence
  Synthetic oligonucleotide: PDCD1-113
uggcggccaggaugguucuu

SEQ ID NO: 808 - RNA, 17 nt, Artificial Sequence
  Synthetic oligonucleotide: PDCD1-183
ugggcaguugugugaca

SEQ ID NO: 809 - RNA, 17 nt, Artificial Sequence
  Synthetic oligonucleotide: PDCD1-239
ugggcuggcggccagga

SEQ ID NO: 810 - RNA, 17 nt, Artificial Sequence
  Synthetic oligonucleotide: PDCD1-244
ugguucuuagguaggug

SEQ ID NO: 811 - RNA, 17 nt, Artificial Sequence
  Synthetic oligonucleotide: PDCD1-198
uguccgucugguugcug

SEQ ID NO: 812 - RNA, 20 nt, Artificial Sequence
  Synthetic oligonucleotide: PDCD1-95
ugucuggggagucugagaga

SEQ ID NO: 813 - RNA, 17 nt, Artificial Sequence
  Synthetic oligonucleotide: PDCD1-254
ugugggaucugcaugcc

SEQ ID NO: 814 - RNA, 17 nt, Artificial Sequence
  Synthetic oligonucleotide: PDCD1-201
uguguuggagaagcugc

SEQ ID NO: 815 - RNA, 17 nt, Artificial Sequence
  Synthetic oligonucleotide: PDCD1-197
uuguccgucugguugcu

SEQ ID NO: 816 - RNA, 17 nt, Artificial Sequence
  Synthetic oligonucleotide: PDCD1-172
uuugaucugcgccuugg

SEQ ID NO: 817 - RNA, 20 nt, Artificial Sequence
  Synthetic oligonucleotide: PDCD1-255
uuugugcccuuccagagaga

SEQ ID NO: 818 - RNA, 20 nt, Artificial Sequence
  Synthetic oligonucleotide: PDCD1-256
uugugcccuuccagagagaa

SEQ ID NO: 819 - RNA, 20 nt, Artificial Sequence
  Synthetic oligonucleotide: PDCD1-257
cccaccccagccccucaccc

SEQ ID NO: 820 - RNA, 20 nt, Artificial Sequence
  Synthetic oligonucleotide: PDCD1-258
agccccucacccaggccagc

SEQ ID NO: 821 - RNA, 20 nt, Artificial Sequence
  Synthetic oligonucleotide: PDCD1-259
agccggccaguuccaaaccc

SEQ ID NO: 822 - RNA, 20 nt, Artificial Sequence
  Synthetic oligonucleotide: PDCD1-260
cggccaguuccaaacccugg

SEQ ID NO: 823 - RNA, 20 nt, Artificial Sequence
  Synthetic oligonucleotide: PDCD1-261
caguuccaaacccugguggu

SEQ ID NO: 824 - RNA, 20 nt, Artificial Sequence
  Synthetic oligonucleotide: PDCD1-262
aacccuggugguuggugucg

SEQ ID NO: 825 - RNA, 20 nt, Artificial Sequence
  Synthetic oligonucleotide: PDCD1-263
acccuggugguuggugucgu

SEQ ID NO: 826 - RNA, 20 nt, Artificial Sequence
  Synthetic oligonucleotide: PDCD1-264
cuggugguuggugucguggg

SEQ ID NO: 827 - RNA, 20 nt, Artificial Sequence
  Synthetic oligonucleotide: PDCD1-265
uggugucgugggcggccugc

SEQ ID NO: 828 - RNA, 20 nt, Artificial Sequence
  Synthetic oligonucleotide: PDCD1-266
ggugucgugggcggccugcu

SEQ ID NO: 829 - RNA, 20 nt, Artificial Sequence
  Synthetic oligonucleotide: PDCD1-267
gggcggccugcugggcagcc

SEQ ID NO: 830 - RNA, 20 nt, Artificial Sequence
  Synthetic oligonucleotide: PDCD1-268
gcagccuggugcugcuaguc

SEQ ID NO: 831 - RNA, 20 nt, Artificial Sequence
  Synthetic oligonucleotide: PDCD1-269
cagccuggugcugcuagucu

SEQ ID NO: 832 - RNA, 20 nt, Artificial Sequence
  Synthetic oligonucleotide: PDCD1-270
ggugcugcuagucugggucc

SEQ ID NO: 833 - RNA, 20 nt, Artificial Sequence
  Synthetic oligonucleotide: PDCD1-271
uccuggccgucaucugcucc

SEQ ID NO: 834 - RNA, 20 nt, Artificial Sequence
  Synthetic oligonucleotide: PDCD1-272
ccuggccgucaucugcuccc

SEQ ID NO: 835 - RNA, 20 nt, Artificial Sequence
  Synthetic oligonucleotide: PDCD1-273
aucugcucccgggccgcacg

SEQ ID NO: 836 - RNA, 20 nt, Artificial Sequence
  Synthetic oligonucleotide: PDCD1-274
guaacgucaucccagccccu

SEQ ID NO: 837 - RNA, 20 nt, Artificial Sequence
  Synthetic oligonucleotide: PDCD1-275
ccccaaguguguuucucugc

SEQ ID NO: 838 - RNA, 20 nt, Artificial Sequence
  Synthetic oligonucleotide: PDCD1-276
cccaaguguguuucucugca

SEQ ID NO: 839 - RNA, 20 nt, Artificial Sequence
  Synthetic oligonucleotide: PDCD1-277
uguuucucugcagggacaau

SEQ ID NO: 840 - RNA, 20 nt, Artificial Sequence
  Synthetic oligonucleotide: PDCD1-278
cugcagggacaauaggagcc

SEQ ID NO: 841 - RNA, 20 nt, Artificial Sequence
  Synthetic oligonucleotide: PDCD1-279
acaauaggagccaggcgcac

SEQ ID NO: 842 - RNA, 20 nt, Artificial Sequence
  Synthetic oligonucleotide: PDCD1-280
caggcgcaccggccagcccc

SEQ ID NO: 843 - RNA, 20 nt, Artificial Sequence
  Synthetic oligonucleotide: PDCD1-281
ucucccuuucuccucaaaga

SEQ ID NO: 844 - RNA, 20 nt, Artificial Sequence
  Synthetic oligonucleotide: PDCD1-282
cccuuucuccucaaagaagg

SEQ ID NO: 845 - RNA, 20 nt, Artificial Sequence
  Synthetic oligonucleotide: PDCD1-283
agccgugccuguguucucug

SEQ ID NO: 846 - RNA, 20 nt, Artificial Sequence
  Synthetic oligonucleotide: PDCD1-284
ccuguguucucuguggacua

SEQ ID NO: 847 - RNA, 20 nt, Artificial Sequence
  Synthetic oligonucleotide: PDCD1-285
cuguguucucuguggacuau

SEQ ID NO: 848 - RNA, 20 nt, Artificial Sequence
  Synthetic oligonucleotide: PDCD1-286
uguguucucuguggacuaug

SEQ ID NO: 849 - RNA, 20 nt, Artificial Sequence
  Synthetic oligonucleotide: PDCD1-287
cucuguggacuauggggagc

SEQ ID NO: 850 - RNA, 20 nt, Artificial Sequence
  Synthetic oligonucleotide: PDCD1-288
auggggagcuggauuuccag

SEQ ID NO: 851 - RNA, 20 nt, Artificial Sequence
  Synthetic oligonucleotide: PDCD1-289
ccaguggcgagagaagaccc

SEQ ID NO: 852 - RNA, 20 nt, Artificial Sequence
  Synthetic oligonucleotide: PDCD1-290
gcccugugucccugagcaga

SEQ ID NO: 853 - RNA, 20 nt, Artificial Sequence
  Synthetic oligonucleotide: PDCD1-291
gccaccauugucuuuccuag

SEQ ID NO: 854 - RNA, 20 nt, Artificial Sequence
  Synthetic oligonucleotide: PDCD1-292
cauugucuuuccuagcggaa

SEQ ID NO: 855 - RNA, 20 nt, Artificial Sequence
  Synthetic oligonucleotide: PDCD1-293
auugucuuuccuagcggaau

SEQ ID NO: 856 - RNA, 20 nt, Artificial Sequence
  Synthetic oligonucleotide: PDCD1-294
gcaccucaucccccgcccgc

SEQ ID NO: 857 - RNA, 20 nt, Artificial Sequence
  Synthetic oligonucleotide: PDCD1-295
caccucaucccccgcccgca

SEQ ID NO: 858 - RNA, 20 nt, Artificial Sequence
  Synthetic oligonucleotide: PDCD1-296
accucaucccccgcccgcag

SEQ ID NO: 859 - RNA, 20 nt, Artificial Sequence
  Synthetic oligonucleotide: PDCD1-297
gcccgcaggggcucagcuga

SEQ ID NO: 860 - RNA, 20 nt, Artificial Sequence
  Synthetic oligonucleotide: PDCD1-298
ggggcucagcugacggcccu

SEQ ID NO: 861 - RNA, 20 nt, Artificial Sequence
  Synthetic oligonucleotide: PDCD1-299
cucggagugcccagccacug

SEQ ID NO: 862 - RNA, 20 nt, Artificial Sequence
  Synthetic oligonucleotide: PDCD1-300
ugcccagccacugaggccug

SEQ ID NO: 863 - RNA, 20 nt, Artificial Sequence
  Synthetic oligonucleotide: PDCD1-301
cagccacugaggccugagga

SEQ ID NO: 864 - RNA, 20 nt, Artificial Sequence
  Synthetic oligonucleotide: PDCD1-302
cugaggauggacacugcucu

SEQ ID NO: 865 - RNA, 20 nt, Artificial Sequence
  Synthetic oligonucleotide: PDCD1-303
cugcucuuggccccucugac

SEQ ID NO: 866 - RNA, 20 nt, Artificial Sequence
  Synthetic oligonucleotide: PDCD1-304
gccccucugaccggcuuccu

SEQ ID NO: 867 - RNA, 17 nt, Artificial Sequence
  Synthetic oligonucleotide: PDCD1-305
gugcccuuccagagaga

SEQ ID NO: 868 - RNA, 17 nt, Artificial Sequence
  Synthetic oligonucleotide: PDCD1-306
ugcccuuccagagagaa

SEQ ID NO: 869 - RNA, 17 nt, Artificial Sequence
  Synthetic oligonucleotide: PDCD1-307
accccagccccucaccc

SEQ ID NO: 870 - RNA, 17 nt, Artificial Sequence
  Synthetic oligonucleotide: PDCD1-308
cccucacccaggccagc

SEQ ID NO: 871 - RNA, 17 nt, Artificial Sequence
  Synthetic oligonucleotide: PDCD1-309
cggccaguuccaaaccc

SEQ ID NO: 872 - RNA, 17 nt, Artificial Sequence
  Synthetic oligonucleotide: PDCD1-310
ccaguuccaaacccugg

SEQ ID NO: 873 - RNA, 17 nt, Artificial Sequence
  Synthetic oligonucleotide: PDCD1-311
uuccaaacccugguggu

SEQ ID NO: 874 - RNA, 17 nt, Artificial Sequence
  Synthetic oligonucleotide: PDCD1-312
ccuggugguuggugucg

SEQ ID NO: 875 - RNA, 17 nt, Artificial Sequence
  Synthetic oligonucleotide: PDCD1-313
cuggugguuggugucgu

SEQ ID NO: 876 - RNA, 17 nt, Artificial Sequence
  Synthetic oligonucleotide: PDCD1-314
gugguuggugucguggg

SEQ ID NO: 877 - RNA, 17 nt, Artificial Sequence
  Synthetic oligonucleotide: PDCD1-315
ugucgugggcggccugc

SEQ ID NO: 878 - RNA, 17 nt, Artificial Sequence
  Synthetic oligonucleotide: PDCD1-316
gucgugggcggccugcu

SEQ ID NO: 879 - RNA, 17 nt, Artificial Sequence
  Synthetic oligonucleotide: PDCD1-317
cggccugcugggcagcc

SEQ ID NO: 880 - RNA, 17 nt, Artificial Sequence
  Synthetic oligonucleotide: PDCD1-318
gccuggugcugcuaguc

SEQ ID NO: 881 - RNA, 17 nt, Artificial Sequence
  Synthetic oligonucleotide: PDCD1-319
ccuggugcugcuagucu

SEQ ID NO: 882 - RNA, 17 nt, Artificial Sequence
  Synthetic oligonucleotide: PDCD1-320
gcugcuagucugggucc

SEQ ID NO: 883 - RNA, 17 nt, Artificial Sequence
  Synthetic oligonucleotide: PDCD1-321
uggccgucaucugcucc

SEQ ID NO: 884 - RNA, 17 nt, Artificial Sequence
  Synthetic oligonucleotide: PDCD1-322
ggccgucaucugcuccc

SEQ ID NO: 885 - RNA, 17 nt, Artificial Sequence
  Synthetic oligonucleotide: PDCD1-323
ugcucccgggccgcacg

SEQ ID NO: 886 - RNA, 17 nt, Artificial Sequence
  Synthetic oligonucleotide: PDCD1-324
acgucaucccagccccu

SEQ ID NO: 887 - RNA, 17 nt, Artificial Sequence
  Synthetic oligonucleotide: PDCD1-325
caaguguguuucucugc

SEQ ID NO: 888 - RNA, 17 nt, Artificial Sequence
  Synthetic oligonucleotide: PDCD1-326
aaguguguuucucugca

SEQ ID NO: 889 - RNA, 17 nt, Artificial Sequence
  Synthetic oligonucleotide: PDCD1-327
uucucugcagggacaau

SEQ ID NO: 890 - RNA, 17 nt, Artificial Sequence
  Synthetic oligonucleotide: PDCD1-328
cagggacaauaggagcc

SEQ ID NO: 891 - RNA, 17 nt, Artificial Sequence
  Synthetic oligonucleotide: PDCD1-329
auaggagccaggcgcac

SEQ ID NO: 892 - RNA, 17 nt, Artificial Sequence
  Synthetic oligonucleotide: PDCD1-330
gcgcaccggccagcccc

SEQ ID NO: 893 - RNA, 17 nt, Artificial Sequence
  Synthetic oligonucleotide: PDCD1-331
cccuuucuccucaaaga

SEQ ID NO: 894 - RNA, 17 nt, Artificial Sequence
  Synthetic oligonucleotide: PDCD1-332
uuucuccucaaagaagg

SEQ ID NO: 895 - RNA, 17 nt, Artificial Sequence
  Synthetic oligonucleotide: PDCD1-333
cgugccuguguucucug

SEQ ID NO: 896 - RNA, 17 nt, Artificial Sequence
  Synthetic oligonucleotide: PDCD1-334
guguucucuguggacua

SEQ ID NO: 897 - RNA, 17 nt, Artificial Sequence
  Synthetic oligonucleotide: PDCD1-335
uguucucuguggacuau

SEQ ID NO: 898 - RNA, 17 nt, Artificial Sequence
  Synthetic oligonucleotide: PDCD1-336
guucucuguggacuaug

SEQ ID NO: 899 - RNA, 17 nt, Artificial Sequence
  Synthetic oligonucleotide: PDCD1-337
uguggacuauggggagc

SEQ ID NO: 900 - RNA, 17 nt, Artificial Sequence
  Synthetic oligonucleotide: PDCD1-338
gggagcuggauuuccag

SEQ ID NO: 901 - RNA, 17 nt, Artificial Sequence
  Synthetic oligonucleotide: PDCD1-339
guggcgagagaagaccc

SEQ ID NO: 902 - RNA, 17 nt, Artificial Sequence
  Synthetic oligonucleotide: PDCD1-340
cugugucccugagcaga

SEQ ID NO: 903 - RNA, 17 nt, Artificial Sequence
  Synthetic oligonucleotide: PDCD1-341
accauugucuuuccuag

SEQ ID NO: 904 - RNA, 17 nt, Artificial Sequence
  Synthetic oligonucleotide: PDCD1-342
ugucuuuccuagcggaa

SEQ ID NO: 905 - RNA, 17 nt, Artificial Sequence
  Synthetic oligonucleotide: PDCD1-343
gucuuuccuagcggaau

SEQ ID NO: 906 - RNA, 17 nt, Artificial Sequence
  Synthetic oligonucleotide: PDCD1-344
ccucaucccccgcccgc

SEQ ID NO: 907 - RNA, 17 nt, Artificial Sequence
  Synthetic oligonucleotide: PDCD1-345
cucaucccccgcccgca

SEQ ID NO: 908 - RNA, 17 nt, Artificial Sequence
  Synthetic oligonucleotide: PDCD1-346
ucaucccccgcccgcag

SEQ ID NO: 909 - RNA, 17 nt, Artificial Sequence
  Synthetic oligonucleotide: PDCD1-347
cgcaggggcucagcuga

SEQ ID NO: 910 - RNA, 17 nt, Artificial Sequence
  Synthetic oligonucleotide: PDCD1-348
gcucagcugacggcccu

SEQ ID NO: 911 - RNA, 17 nt, Artificial Sequence
  Synthetic oligonucleotide: PDCD1-349
ggagugcccagccacug

SEQ ID NO: 912 - RNA, 17 nt, Artificial Sequence
  Synthetic oligonucleotide: PDCD1-350
ccagccacugaggccug

SEQ ID NO: 913 - RNA, 17 nt, Artificial Sequence
  Synthetic oligonucleotide: PDCD1-351
ccacugaggccugagga

SEQ ID NO: 914 - RNA, 17 nt, Artificial Sequence
  Synthetic oligonucleotide: PDCD1-352
aggauggacacugcucu

SEQ ID NO: 915 - RNA, 17 nt, Artificial Sequence
  Synthetic oligonucleotide: PDCD1-353
cucuuggccccucugac

SEQ ID NO: 916 - RNA, 17 nt, Artificial Sequence
  Synthetic oligonucleotide: PDCD1-354
ccucugaccggcuuccu

SEQ ID NO: 917 - RNA, 20 nt, Artificial Sequence
  Synthetic oligonucleotide: PDCD1-355
gggcacaaaggucagggguu

SEQ ID NO: 918 - RNA, 20 nt, Artificial Sequence
  Synthetic oligonucleotide: PDCD1-356
uggaagggcacaaaggucag

SEQ ID NO: 919 - RNA, 20 nt, Artificial Sequence
  Synthetic oligonucleotide: PDCD1-357
cuggaagggcacaaagguca

SEQ ID NO: 920 - RNA, 20 nt, Artificial Sequence
  Synthetic oligonucleotide: PDCD1-358
ucuggaagggcacaaagguc

SEQ ID NO: 921 - RNA, 20 nt, Artificial Sequence
  Synthetic oligonucleotide: PDCD1-359
uucucucuggaagggcacaa

SEQ ID NO: 922 - RNA, 20 nt, Artificial Sequence
  Synthetic oligonucleotide: PDCD1-360
uucugcccuucucucuggaa

SEQ ID NO: 923 - RNA, 20 nt, Artificial Sequence
  Synthetic oligonucleotide: PDCD1-361
cuucugcccuucucucugga

SEQ ID NO: 924 - RNA, 20 nt, Artificial Sequence
  Synthetic oligonucleotide: PDCD1-362
ggcacuucugcccuucucuc

SEQ ID NO: 925 - RNA, 20 nt, Artificial Sequence
  Synthetic oligonucleotide: PDCD1-363
gaggggcuggggugggcugu

SEQ ID NO: 926 - RNA, 20 nt, Artificial Sequence
  Synthetic oligonucleotide: PDCD1-364
ugaggggcuggggugggcug

SEQ ID NO: 927 - RNA, 20 nt, Artificial Sequence
  Synthetic oligonucleotide: PDCD1-365
ccugggugaggggcuggggu

SEQ ID NO: 928 - RNA, 20 nt, Artificial Sequence
  Synthetic oligonucleotide: PDCD1-366
gccugggugaggggcugggg

SEQ ID NO: 929 - RNA, 20 nt, Artificial Sequence
  Synthetic oligonucleotide: PDCD1-367
cuggccugggugaggggcug

SEQ ID NO: 930 - RNA, 20 nt, Artificial Sequence
  Synthetic oligonucleotide: PDCD1-368
gcuggccugggugaggggcu

SEQ ID NO: 931 - RNA, 20 nt, Artificial Sequence
  Synthetic oligonucleotide: PDCD1-369
ggcuggccugggugaggggc

SEQ ID NO: 932 - RNA, 20 nt, Artificial Sequence
  Synthetic oligonucleotide: PDCD1-370
ggccggcuggccugggugag

SEQ ID NO: 933 - RNA, 20 nt, Artificial Sequence
  Synthetic oligonucleotide: PDCD1-371
uggccggcuggccuggguga

SEQ ID NO: 934 - RNA, 20 nt, Artificial Sequence
  Synthetic oligonucleotide: PDCD1-372
cuggccggcuggccugggug

SEQ ID NO: 935 - RNA, 20 nt, Artificial Sequence
  Synthetic oligonucleotide: PDCD1-373
uggaacuggccggcuggccu

SEQ ID NO: 936 - RNA, 20 nt, Artificial Sequence
  Synthetic oligonucleotide: PDCD1-374
uuggaacuggccggcuggcc

SEQ ID NO: 937 - RNA, 20 nt, Artificial Sequence
  Synthetic oligonucleotide: PDCD1-375
aggguuuggaacuggccggc

SEQ ID NO: 938 - RNA, 20 nt, Artificial Sequence
  Synthetic oligonucleotide: PDCD1-376
caccaggguuuggaacuggc

SEQ ID NO: 939 - RNA, 20 nt, Artificial Sequence
  Synthetic oligonucleotide: PDCD1-377
caaccaccaggguuuggaac

SEQ ID NO: 940 - RNA, 20 nt, Artificial Sequence
  Synthetic oligonucleotide: PDCD1-378
cgacaccaaccaccaggguu

SEQ ID NO: 941 - RNA, 20 nt, Artificial Sequence
  Synthetic oligonucleotide: PDCD1-379
gcccacgacaccaaccacca

SEQ ID NO: 942 - RNA, 20 nt, Artificial Sequence
  Synthetic oligonucleotide: PDCD1-380
cgcccacgacaccaaccacc

SEQ ID NO: 943 - RNA, 20 nt, Artificial Sequence
  Synthetic oligonucleotide: PDCD1-381
gcagcaccaggcugcccagc

SEQ ID NO: 944 - RNA, 20 nt, Artificial Sequence
  Synthetic oligonucleotide: PDCD1-382
ggacccagacuagcagcacc

SEQ ID NO: 945 - RNA, 20 nt, Artificial Sequence
  Synthetic oligonucleotide: PDCD1-383
cccgggagcagaugacggcc

SEQ ID NO: 946 - RNA, 20 nt, Artificial Sequence
  Synthetic oligonucleotide: PDCD1-384
ugcggcccgggagcagauga

SEQ ID NO: 947 - RNA, 20 nt, Artificial Sequence
  Synthetic oligonucleotide: PDCD1-385
gacguuaccucgugcggccc

SEQ ID NO: 948 - RNA, 20 nt, Artificial Sequence
  Synthetic oligonucleotide: PDCD1-386
ugacguuaccucgugcggcc

SEQ ID NO: 949 - RNA, 20 nt, Artificial Sequence
  Synthetic oligonucleotide: PDCD1-387
ugggaugacguuaccucgug

SEQ ID NO: 950 - RNA, 20 nt, Artificial Sequence
  Synthetic oligonucleotide: PDCD1-388
gaaacacacuuggggucacc

SEQ ID NO: 951 - RNA, 20 nt, Artificial Sequence
  Synthetic oligonucleotide: PDCD1-389
ccugcagagaaacacacuug

SEQ ID NO: 952 - RNA, 20 nt, Artificial Sequence
  Synthetic oligonucleotide: PDCD1-390
cccugcagagaaacacacuu

SEQ ID NO: 953 - RNA, 20 nt, Artificial Sequence
  Synthetic oligonucleotide: PDCD1-391
ucccugcagagaaacacacu

SEQ ID NO: 954 - RNA, 20 nt, Artificial Sequence
  Synthetic oligonucleotide: PDCD1-392
caggggcuggccggugcgcc

SEQ ID NO: 955 - RNA, 20 nt, Artificial Sequence
  Synthetic oligonucleotide: PDCD1-393
gagacucaccaggggcuggc

SEQ ID NO: 956 - RNA, 20 nt, Artificial Sequence
  Synthetic oligonucleotide: PDCD1-394
gagugagacucaccaggggc

SEQ ID NO: 957 - RNA, 20 nt, Artificial Sequence
  Synthetic oligonucleotide: PDCD1-395
aaaagagugagacucaccag

SEQ ID NO: 958 - RNA, 20 nt, Artificial Sequence
  Synthetic oligonucleotide: PDCD1-396
gaaaagagugagacucacca

SEQ ID NO: 959 - RNA, 20 nt, Artificial Sequence
  Synthetic oligonucleotide: PDCD1-397
ggaaaagagugagacucacc

SEQ ID NO: 960 - RNA, 20 nt, Artificial Sequence
  Synthetic oligonucleotide: PDCD1-398
ucuuugaggagaaagggaga

SEQ ID NO: 961 - RNA, 20 nt, Artificial Sequence
  Synthetic oligonucleotide: PDCD1-399
uucuuugaggagaaagggag

SEQ ID NO: 962 - RNA, 20 nt, Artificial Sequence
  Synthetic oligonucleotide: PDCD1-400
ccuccuucuuugaggagaaa

SEQ ID NO: 963 - RNA, 20 nt, Artificial Sequence
  Synthetic oligonucleotide: PDCD1-401
uccuccuucuuugaggagaa

SEQ ID NO: 964 - RNA, 20 nt, Artificial Sequence
  Synthetic oligonucleotide: PDCD1-402
ugagggguccuccuucuuug

SEQ ID NO: 965 - RNA, 20 nt, Artificial Sequence
  Synthetic oligonucleotide: PDCD1-403
agaacacaggcacggcugag

SEQ ID NO: 966 - RNA, 20 nt, Artificial Sequence
  Synthetic oligonucleotide: PDCD1-404
gagaacacaggcacggcuga

SEQ ID NO: 967 - RNA, 20 nt, Artificial Sequence
  Synthetic oligonucleotide: PDCD1-405
agagaacacaggcacggcug

SEQ ID NO: 968 - RNA, 20 nt, Artificial Sequence
  Synthetic oligonucleotide: PDCD1-406
guccacagagaacacaggca

SEQ ID NO: 969 - RNA, 20 nt, Artificial Sequence
  Synthetic oligonucleotide: PDCD1-407
ccauaguccacagagaacac

SEQ ID NO: 970 - RNA, 20 nt, Artificial Sequence
  Synthetic oligonucleotide: PDCD1-408
ccggggucuucucucgccac

SEQ ID NO: 971 - RNA, 20 nt, Artificial Sequence
  Synthetic oligonucleotide: PDCD1-409
acagggcacggggggcuccg

SEQ ID NO: 972 - RNA, 20 nt, Artificial Sequence
  Synthetic oligonucleotide: PDCD1-410
cacagggcacggggggcucc

SEQ ID NO: 973 - RNA, 20 nt, Artificial Sequence
  Synthetic oligonucleotide: PDCD1-411
acacagggcacggggggcuc

SEQ ID NO: 974 - RNA, 20 nt, Artificial Sequence
  Synthetic oligonucleotide: PDCD1-412
ucagggacacagggcacggg

SEQ ID NO: 975 - RNA, 20 nt, Artificial Sequence
  Synthetic oligonucleotide: PDCD1-413
cucagggacacagggcacgg

SEQ ID NO: 976 - RNA, 20 nt, Artificial Sequence
  Synthetic oligonucleotide: PDCD1-414
gcucagggacacagggcacg

SEQ ID NO: 977 - RNA, 20 nt, Artificial Sequence
  Synthetic oligonucleotide: PDCD1-415
ugcucagggacacagggcac

SEQ ID NO: 978 - RNA, 20 nt, Artificial Sequence
  Synthetic oligonucleotide: PDCD1-416
cugcucagggacacagggca

SEQ ID NO: 979 - RNA, 20 nt, Artificial Sequence
  Synthetic oligonucleotide: PDCD1-417
uccgucugcucagggacaca

SEQ ID NO: 980 - RNA, 20 nt, Artificial Sequence
  Synthetic oligonucleotide: PDCD1-418
cuccgucugcucagggacac

SEQ ID NO: 981 - RNA, 20 nt, Artificial Sequence
  Synthetic oligonucleotide: PDCD1-419
uggcauacuccgucugcuca

SEQ ID NO: 982 - RNA, 20 nt, Artificial Sequence
  Synthetic oligonucleotide: PDCD1-420
guggcauacuccgucugcuc

SEQ ID NO: 983 - RNA, 20 nt, Artificial Sequence
  Synthetic oligonucleotide: PDCD1-421
uccgcuaggaaagacaaugg

SEQ ID NO: 984 - RNA, 20 nt, Artificial Sequence
  Synthetic oligonucleotide: PDCD1-422
cauuccgcuaggaaagacaa

SEQ ID NO: 985 - RNA, 20 nt, Artificial Sequence
  Synthetic oligonucleotide: PDCD1-423
gaugaggugcccauuccgcu

SEQ ID NO: 986 - RNA, 20 nt, Artificial Sequence
  Synthetic oligonucleotide: PDCD1-424
gccccugcgggcgggggaug

SEQ ID NO: 987 - RNA, 20 nt, Artificial Sequence
  Synthetic oligonucleotide: PDCD1-425
agcugagccccugcgggcgg

SEQ ID NO: 988 - RNA, 20 nt, Artificial Sequence
  Synthetic oligonucleotide: PDCD1-426
cagcugagccccugcgggcg

SEQ ID NO: 989 - RNA, 20 nt, Artificial Sequence
  Synthetic oligonucleotide: PDCD1-427
ucagcugagccccugcgggc

SEQ ID NO: 990 - RNA, 20 nt, Artificial Sequence
  Synthetic oligonucleotide: PDCD1-428
gucagcugagccccugcggg

SEQ ID NO: 991 - RNA, 20 nt, Artificial Sequence
  Synthetic oligonucleotide: PDCD1-429
gccgucagcugagccccugc

SEQ ID NO: 992 - RNA, 20 nt, Artificial Sequence
  Synthetic oligonucleotide: PDCD1-430
ggccgucagcugagccccug

SEQ ID NO: 993 - RNA, 20 nt, Artificial Sequence
  Synthetic oligonucleotide: PDCD1-431
ucaguggcugggcacuccga

SEQ ID NO: 994 - RNA, 20 nt, Artificial Sequence
  Synthetic oligonucleotide: PDCD1-432
cucaguggcugggcacuccg

SEQ ID NO: 995 - RNA, 20 nt, Artificial Sequence
  Synthetic oligonucleotide: PDCD1-433
auccucaggccucaguggcu

SEQ ID NO: 996 - RNA, 20 nt, Artificial Sequence
  Synthetic oligonucleotide: PDCD1-434
cauccucaggccucaguggc

SEQ ID NO: 997 - RNA, 20 nt, Artificial Sequence
  Synthetic oligonucleotide: PDCD1-435
uguccauccucaggccucag

SEQ ID NO: 998 - RNA, 20 nt, Artificial Sequence
  Synthetic oligonucleotide: PDCD1-436
caagagcaguguccauccuc

SEQ ID NO: 999 - RNA, 20 nt, Artificial Sequence
  Synthetic oligonucleotide: PDCD1-437
gccaaggaagccggucagag

SEQ ID NO: 1000 - RNA, 20 nt, Artificial Sequence
  Synthetic oligonucleotide: PDCD1-438
ggccaaggaagccggucaga

SEQ ID NO: 1001 - RNA, 20 nt, Artificial Sequence
  Synthetic oligonucleotide: PDCD1-439
uggccaaggaagccggucag

SEQ ID NO: 1002 - RNA, 20 nt, Artificial Sequence
  Synthetic oligonucleotide: PDCD1-440
acacugguggccaaggaagc

SEQ ID NO: 1003 - RNA, 20 nt, Artificial Sequence
  Synthetic oligonucleotide: PDCD1-441
cugcagaacacugguggcca

SEQ ID NO: 1004 - RNA, 17 nt, Artificial Sequence
  Synthetic oligonucleotide: PDCD1-442
cacaaaggucagggguu

SEQ ID NO: 1005 - RNA, 17 nt, Artificial Sequence
  Synthetic oligonucleotide: PDCD1-443
aagggcacaaaggucag

SEQ ID NO: 1006 - RNA, 17 nt, Artificial Sequence
  Synthetic oligonucleotide: PDCD1-444
gaagggcacaaagguca

SEQ ID NO: 1007 - RNA, 17 nt, Artificial Sequence
  Synthetic oligonucleotide: PDCD1-445
ggaagggcacaaagguc

SEQ ID NO: 1008 - RNA, 17 nt, Artificial Sequence
  Synthetic oligonucleotide: PDCD1-446
ucucuggaagggcacaa

SEQ ID NO: 1009 - RNA, 17 nt, Artificial Sequence
  Synthetic oligonucleotide: PDCD1-447
ugcccuucucucuggaa

SEQ ID NO: 1010 - RNA, 17 nt, Artificial Sequence
  Synthetic oligonucleotide: PDCD1-448
cugcccuucucucugga

SEQ ID NO: 1011 - RNA, 17 nt, Artificial Sequence
  Synthetic oligonucleotide: PDCD1-449
acuucugcccuucucuc

SEQ ID NO: 1012 - RNA, 17 nt, Artificial Sequence
  Synthetic oligonucleotide: PDCD1-450
gggcuggggugggcugu

SEQ ID NO: 1013 - RNA, 17 nt, Artificial Sequence
  Synthetic oligonucleotide: PDCD1-451
ggggcuggggugggcug

SEQ ID NO: 1014 - RNA, 17 nt, Artificial Sequence
  Synthetic oligonucleotide: PDCD1-452
gggugaggggcuggggu

SEQ ID NO: 1015 - RNA, 17 nt, Artificial Sequence
  Synthetic oligonucleotide: PDCD1-453
ugggugaggggcugggg

SEQ ID NO: 1016 - RNA, 17 nt, Artificial Sequence
  Synthetic oligonucleotide: PDCD1-454
gccugggugaggggcug

SEQ ID NO: 1017 - RNA, 17 nt, Artificial Sequence
  Synthetic oligonucleotide: PDCD1-455
ggccugggugaggggcu

SEQ ID NO: 1018 - RNA, 17 nt, Artificial Sequence
  Synthetic oligonucleotide: PDCD1-456
uggccugggugaggggc

SEQ ID NO: 1019 - RNA, 17 nt, Artificial Sequence
  Synthetic oligonucleotide: PDCD1-457
cggcuggccugggugag

SEQ ID NO: 1020 - RNA, 17 nt, Artificial Sequence
  Synthetic oligonucleotide: PDCD1-458
ccggcuggccuggguga

SEQ ID NO: 1021 - RNA, 17 nt, Artificial Sequence
  Synthetic oligonucleotide: PDCD1-459
gccggcuggccugggug

SEQ ID NO: 1022 - RNA, 17 nt, Artificial Sequence
  Synthetic oligonucleotide: PDCD1-460
aacuggccggcuggccu

SEQ ID NO: 1023 - RNA, 17 nt, Artificial Sequence
  Synthetic oligonucleotide: PDCD1-461
gaacuggccggcuggcc

SEQ ID NO: 1024 - RNA, 17 nt, Artificial Sequence
  Synthetic oligonucleotide: PDCD1-462
guuuggaacuggccggc

SEQ ID NO: 1025 - RNA, 17 nt, Artificial Sequence
  Synthetic oligonucleotide: PDCD1-463
caggguuuggaacuggc

SEQ ID NO: 1026 - RNA, 17 nt, Artificial Sequence
  Synthetic oligonucleotide: PDCD1-464
ccaccaggguuuggaac

SEQ ID NO: 1027 - RNA, 17 nt, Artificial Sequence
  Synthetic oligonucleotide: PDCD1-465
caccaaccaccaggguu

SEQ ID NO: 1028 - RNA, 17 nt, Artificial Sequence
  Synthetic oligonucleotide: PDCD1-466
cacgacaccaaccacca

SEQ ID NO: 1029 - RNA, 17 nt, Artificial Sequence
  Synthetic oligonucleotide: PDCD1-467
ccacgacaccaaccacc

SEQ ID NO: 1030 - RNA, 17 nt, Artificial Sequence
  Synthetic oligonucleotide: PDCD1-468
gcaccaggcugcccagc

SEQ ID NO: 1031 - RNA, 17 nt, Artificial Sequence
  Synthetic oligonucleotide: PDCD1-469
cccagacuagcagcacc

SEQ ID NO: 1032 - RNA, 17 nt, Artificial Sequence
  Synthetic oligonucleotide: PDCD1-470
gggagcagaugacggcc

SEQ ID NO: 1033 - RNA, 17 nt, Artificial Sequence
  Synthetic oligonucleotide: PDCD1-471
ggcccgggagcagauga

SEQ ID NO: 1034 - RNA, 17 nt, Artificial Sequence
  Synthetic oligonucleotide: PDCD1-472
guuaccucgugcggccc

SEQ ID NO: 1035 - RNA, 17 nt, Artificial Sequence
  Synthetic oligonucleotide: PDCD1-473
cguuaccucgugcggcc

SEQ ID NO: 1036 - RNA, 17 nt, Artificial Sequence
  Synthetic oligonucleotide: PDCD1-474
gaugacguuaccucgug

SEQ ID NO: 1037 - RNA, 17 nt, Artificial Sequence
  Synthetic oligonucleotide: PDCD1-475
acacacuuggggucacc

SEQ ID NO: 1038 - RNA, 17 nt, Artificial Sequence
  Synthetic oligonucleotide: PDCD1-476
gcagagaaacacacuug

SEQ ID NO: 1039 - RNA, 17 nt, Artificial Sequence
  Synthetic oligonucleotide: PDCD1-477
ugcagagaaacacacuu

SEQ ID NO: 1040 - RNA, 17 nt, Artificial Sequence
  Synthetic oligonucleotide: PDCD1-478
cugcagagaaacacacu

SEQ ID NO: 1041 - RNA, 17 nt, Artificial Sequence
  Synthetic oligonucleotide: PDCD1-479
gggcuggccggugcgcc

SEQ ID NO: 1042 - RNA, 17 nt, Artificial Sequence
  Synthetic oligonucleotide: PDCD1-480
acucaccaggggcuggc

SEQ ID NO: 1043 - RNA, 17 nt, Artificial Sequence
  Synthetic oligonucleotide: PDCD1-481
ugagacucaccaggggc

SEQ ID NO: 1044 - RNA, 17 nt, Artificial Sequence
  Synthetic oligonucleotide: PDCD1-482
agagugagacucaccag

SEQ ID NO: 1045 - RNA, 17 nt, Artificial Sequence
  Synthetic oligonucleotide: PDCD1-483
aagagugagacucacca

SEQ ID NO: 1046 - RNA, 17 nt, Artificial Sequence
  Synthetic oligonucleotide: PDCD1-484
aaagagugagacucacc

SEQ ID NO: 1047 - RNA, 17 nt, Artificial Sequence
  Synthetic oligonucleotide: PDCD1-485
uugaggagaaagggaga

SEQ ID NO: 1048 - RNA, 17 nt, Artificial Sequence
  Synthetic oligonucleotide: PDCD1-486
uuugaggagaaagggag

SEQ ID NO: 1049 - RNA, 17 nt, Artificial Sequence
  Synthetic oligonucleotide: PDCD1-487
ccuucuuugaggagaaa

SEQ ID NO: 1050 - RNA, 17 nt, Artificial Sequence
  Synthetic oligonucleotide: PDCD1-488
uccuucuuugaggagaa

SEQ ID NO: 1051 - RNA, 17 nt, Artificial Sequence
  Synthetic oligonucleotide: PDCD1-489
gggguccuccuucuuug

SEQ ID NO: 1052 - RNA, 17 nt, Artificial Sequence
  Synthetic oligonucleotide: PDCD1-490
acacaggcacggcugag

SEQ ID NO: 1053 - RNA, 17 nt, Artificial Sequence
  Synthetic oligonucleotide: PDCD1-491
aacacaggcacggcuga

SEQ ID NO: 1054 - RNA, 17 nt, Artificial Sequence
  Synthetic oligonucleotide: PDCD1-492
gaacacaggcacggcug

SEQ ID NO: 1055 - RNA, 17 nt, Artificial Sequence
  Synthetic oligonucleotide: PDCD1-493
cacagagaacacaggca

SEQ ID NO: 1056 - RNA, 17 nt, Artificial Sequence
  Synthetic oligonucleotide: PDCD1-494
uaguccacagagaacac

SEQ ID NO: 1057 - RNA, 17 nt, Artificial Sequence
  Synthetic oligonucleotide: PDCD1-495
gggucuucucucgccac

SEQ ID NO: 1058 - RNA, 17 nt, Artificial Sequence
  Synthetic oligonucleotide: PDCD1-496
gggcacggggggcuccg

SEQ ID NO: 1059 - RNA, 17 nt, Artificial Sequence
  Synthetic oligonucleotide: PDCD1-497
agggcacggggggcucc

SEQ ID NO: 1060 - RNA, 17 nt, Artificial Sequence
  Synthetic oligonucleotide: PDCD1-498
cagggcacggggggcuc

SEQ ID NO: 1061 - RNA, 17 nt, Artificial Sequence
  Synthetic oligonucleotide: PDCD1-499
gggacacagggcacggg

SEQ ID NO: 1062 - RNA, 17 nt, Artificial Sequence
  Synthetic oligonucleotide: PDCD1-500
agggacacagggcacgg

SEQ ID NO: 1063 - RNA, 17 nt, Artificial Sequence
  Synthetic oligonucleotide: PDCD1-501
cagggacacagggcacg

SEQ ID NO: 1064 - RNA, 17 nt, Artificial Sequence
  Synthetic oligonucleotide: PDCD1-502
ucagggacacagggcac

SEQ ID NO: 1065 - RNA, 17 nt, Artificial Sequence
  Synthetic oligonucleotide: PDCD1-503
cucagggacacagggca

SEQ ID NO: 1066 - RNA, 17 nt, Artificial Sequence
  Synthetic oligonucleotide: PDCD1-504
gucugcucagggacaca

SEQ ID NO: 1067 - RNA, 17 nt, Artificial Sequence
  Synthetic oligonucleotide: PDCD1-505
cgucugcucagggacac

SEQ ID NO: 1068 - RNA, 17 nt, Artificial Sequence
  Synthetic oligonucleotide: PDCD1-506
cauacuccgucugcuca

SEQ ID NO: 1069 - RNA, 17 nt, Artificial Sequence
  Synthetic oligonucleotide: PDCD1-507
gcauacuccgucugcuc

SEQ ID NO: 1070 - RNA, 17 nt, Artificial Sequence
  Synthetic oligonucleotide: PDCD1-508
gcuaggaaagacaaugg

SEQ ID NO: 1071 - RNA, 17 nt, Artificial Sequence
  Synthetic oligonucleotide: PDCD1-509
uccgcuaggaaagacaa

SEQ ID NO: 1072 - RNA, 17 nt, Artificial Sequence
  Synthetic oligonucleotide: PDCD1-510
gaggugcccauuccgcu

SEQ ID NO: 1073 - RNA, 17 nt, Artificial Sequence
  Synthetic oligonucleotide: PDCD1-511
ccugcgggcgggggaug

SEQ ID NO: 1074 - RNA, 17 nt, Artificial Sequence
  Synthetic oligonucleotide: PDCD1-512
ugagccccugcgggcgg

SEQ ID NO: 1075 - RNA, 17 nt, Artificial Sequence
  Synthetic oligonucleotide: PDCD1-513
cugagccccugcgggcg

SEQ ID NO: 1076 - RNA, 17 nt, Artificial Sequence
  Synthetic oligonucleotide: PDCD1-514
gcugagccccugcgggc

SEQ ID NO: 1077 - RNA, 17 nt, Artificial Sequence
  Synthetic oligonucleotide: PDCD1-515
agcugagccccugcggg

SEQ ID NO: 1078 - RNA, 17 nt, Artificial Sequence
  Synthetic oligonucleotide: PDCD1-516
gucagcugagccccugc

SEQ ID NO: 1079 - RNA, 17 nt, Artificial Sequence
  Synthetic oligonucleotide: PDCD1-517
cgucagcugagccccug

SEQ ID NO: 1080 - RNA, 17 nt, Artificial Sequence
  Synthetic oligonucleotide: PDCD1-518
guggcugggcacuccga

SEQ ID NO: 1081 - RNA, 17 nt, Artificial Sequence
  Synthetic oligonucleotide: PDCD1-519
aguggcugggcacuccg

SEQ ID NO: 1082 - RNA, 17 nt, Artificial Sequence
  Synthetic oligonucleotide: PDCD1-520
cucaggccucaguggcu

SEQ ID NO: 1083 - RNA, 17 nt, Artificial Sequence
  Synthetic oligonucleotide: PDCD1-521
ccucaggccucaguggc

SEQ ID NO: 1084 - RNA, 17 nt, Artificial Sequence
  Synthetic oligonucleotide: PDCD1-522
ccauccucaggccucag

SEQ ID NO: 1085 - RNA, 17 nt, Artificial Sequence
  Synthetic oligonucleotide: PDCD1-523
gagcaguguccauccuc

SEQ ID NO: 1086 - RNA, 17 nt, Artificial Sequence
  Synthetic oligonucleotide: PDCD1-524
aaggaagccggucagag

SEQ ID NO: 1087 - RNA, 17 nt, Artificial Sequence
  Synthetic oligonucleotide: PDCD1-525
caaggaagccggucaga

SEQ ID NO: 1088 - RNA, 17 nt, Artificial Sequence
  Synthetic oligonucleotide: PDCD1-526
ccaaggaagccggucag

SEQ ID NO: 1089 - RNA, 17 nt, Artificial Sequence
  Synthetic oligonucleotide: PDCD1-527
cugguggccaaggaagc

SEQ ID NO: 1090 - RNA, 17 nt, Artificial Sequence
  Synthetic oligonucleotide: PDCD1-528
cagaacacugguggcca

SEQ ID NO: 1091 - RNA, 20 nt, Artificial Sequence
  Synthetic oligonucleotide: PDCD1-529
caggcgcccuggccagucgu

SEQ ID NO: 1092 - RNA, 20 nt, Artificial Sequence
  Synthetic oligonucleotide: PDCD1-530
ucgucugggcggugcuacaa

SEQ ID NO: 1093 - RNA, 20 nt, Artificial Sequence
  Synthetic oligonucleotide: PDCD1-531
gcuacaacugggcuggcggc

SEQ ID NO: 1094 - RNA, 20 nt, Artificial Sequence
  Synthetic oligonucleotide: PDCD1-532
ccaggaugguucuuagguag

SEQ ID NO: 1095 - RNA, 20 nt, Artificial Sequence
  Synthetic oligonucleotide: PDCD1-115
caggaugguucuuagguagg

SEQ ID NO: 1096 - RNA, 20 nt, Artificial Sequence
  Synthetic oligonucleotide: PDCD1-534
ucagacuccccagacaggcc

SEQ ID NO: 1097 - RNA, 20 nt, Artificial Sequence
  Synthetic oligonucleotide: PDCD1-2
cagacuccccagacaggccc

SEQ ID NO: 1098 - RNA, 20 nt, Artificial Sequence
  Synthetic oligonucleotide: PDCD1-536
cccagcccugcucgugguga

SEQ ID NO: 1099 - RNA, 20 nt, Artificial Sequence
  Synthetic oligonucleotide: PDCD1-537
agcccugcucguggugaccg

SEQ ID NO: 1100 - RNA, 20 nt, Artificial Sequence
  Synthetic oligonucleotide: PDCD1-4
gcccugcucguggugaccga

SEQ ID NO: 1101 - RNA, 20 nt, Artificial Sequence
  Synthetic oligonucleotide: PDCD1-5
cccugcucguggugaccgaa

SEQ ID NO: 1102 - RNA, 20 nt, Artificial Sequence
  Synthetic oligonucleotide: PDCD1-540
ccugcagcuucuccaacaca

SEQ ID NO: 1103 - RNA, 20 nt, Artificial Sequence
  Synthetic oligonucleotide: PDCD1-7
cugcagcuucuccaacacau

SEQ ID NO: 1104 - RNA, 20 nt, Artificial Sequence
  Synthetic oligonucleotide: PDCD1-542
gcagcuucuccaacacaucg

SEQ ID NO: 1105 - RNA, 20 nt, Artificial Sequence
  Synthetic oligonucleotide: PDCD1-543
ucgugcuaaacugguaccgc

SEQ ID NO: 1106 - RNA, 20 nt, Artificial Sequence
  Synthetic oligonucleotide: PDCD1-544
gcaugagccccagcaaccag

SEQ ID NO: 1107 - RNA, 20 nt, Artificial Sequence
  Synthetic oligonucleotide: PDCD1-545
ggacaagcuggccgccuucc

SEQ ID NO: 1108 - RNA, 20 nt, Artificial Sequence
  Synthetic oligonucleotide: PDCD1-546
acaagcuggccgccuucccc

SEQ ID NO: 1109 - RNA, 20 nt, Artificial Sequence
  Synthetic oligonucleotide: PDCD1-547
aggaccgcagccagcccggc

SEQ ID NO: 1110 - RNA, 20 nt, Artificial Sequence
  Synthetic oligonucleotide: PDCD1-548
ccgugucacacaacugccca

SEQ ID NO: 1111 - RNA, 20 nt, Artificial Sequence
  Synthetic oligonucleotide: PDCD1-549
ccaacgggcgugacuuccac

SEQ ID NO: 1112 - RNA, 20 nt, Artificial Sequence
  Synthetic oligonucleotide: PDCD1-550
gacuuccacaugagcguggu

SEQ ID NO: 1113 - RNA, 20 nt, Artificial Sequence
  Synthetic oligonucleotide: PDCD1-551
ugacagcggcaccuaccucu

SEQ ID NO: 1114 - RNA, 20 nt, Artificial Sequence
  Synthetic oligonucleotide: PDCD1-21
gacagcggcaccuaccucug

SEQ ID NO: 1115 - RNA, 20 nt, Artificial Sequence
  Synthetic oligonucleotide: PDCD1-553
ggcccccaaggcgcagauca

SEQ ID NO: 1116 - RNA, 20 nt, Artificial Sequence
  Synthetic oligonucleotide: PDCD1-554
cccccaaggcgcagaucaaa

SEQ ID NO: 1117 - RNA, 20 nt, Artificial Sequence
  Synthetic oligonucleotide: PDCD1-555
gcgcagaucaaagagagccu

SEQ ID NO: 1118 - RNA, 20 nt, Artificial Sequence
  Synthetic oligonucleotide: PDCD1-556
gaucaaagagagccugcggg

SEQ ID NO: 1119 - RNA, 20 nt, Artificial Sequence
  Synthetic oligonucleotide: PDCD1-557
gagagccugcgggcagagcu

SEQ ID NO: 1120 - RNA, 17 nt, Artificial Sequence
  Synthetic oligonucleotide: PDCD1-558
gcgcccuggccagucgu

SEQ ID NO: 1121 - RNA, 17 nt, Artificial Sequence
  Synthetic oligonucleotide: PDCD1-559
ucugggcggugcuacaa

SEQ ID NO: 1122 - RNA, 17 nt, Artificial Sequence
  Synthetic oligonucleotide: PDCD1-560
acaacugggcuggcggc

SEQ ID NO: 1123 - RNA, 17 nt, Artificial Sequence
  Synthetic oligonucleotide: PDCD1-561
ggaugguucuuagguag

SEQ ID NO: 1124 - RNA, 17 nt, Artificial Sequence
  Synthetic oligonucleotide: PDCD1-242
gaugguucuuagguagg

SEQ ID NO: 1125 - RNA, 17 nt, Artificial Sequence
  Synthetic oligonucleotide: PDCD1-563
gacuccccagacaggcc

SEQ ID NO: 1126 - RNA, 17 nt, Artificial Sequence
  Synthetic oligonucleotide: PDCD1-129
acuccccagacaggccc

SEQ ID NO: 1127 - RNA, 17 nt, Artificial Sequence
  Synthetic oligonucleotide: PDCD1-565
agcccugcucgugguga

SEQ ID NO: 1128 - RNA, 17 nt, Artificial Sequence
  Synthetic oligonucleotide: PDCD1-566
ccugcucguggugaccg

SEQ ID NO: 1129 - RNA, 17 nt, Artificial Sequence
  Synthetic oligonucleotide: PDCD1-131
cugcucguggugaccga

SEQ ID NO: 1130 - RNA, 17 nt, Artificial Sequence
  Synthetic oligonucleotide: PDCD1-132
ugcucguggugaccgaa

SEQ ID NO: 1131 - RNA, 17 nt, Artificial Sequence
  Synthetic oligonucleotide: PDCD1-569
gcagcuucuccaacaca

SEQ ID NO: 1132 - RNA, 17 nt, Artificial Sequence
  Synthetic oligonucleotide: PDCD1-134
cagcuucuccaacacau

SEQ ID NO: 1133 - RNA, 17 nt, Artificial Sequence
  Synthetic oligonucleotide: PDCD1-571
gcuucuccaacacaucg

SEQ ID NO: 1134 - RNA, 17 nt, Artificial Sequence
  Synthetic oligonucleotide: PDCD1-572
ugcuaaacugguaccgc

SEQ ID NO: 1135 - RNA, 17 nt, Artificial Sequence
  Synthetic oligonucleotide: PDCD1-573
ugagccccagcaaccag

SEQ ID NO: 1136 - RNA, 17 nt, Artificial Sequence
  Synthetic oligonucleotide: PDCD1-574
caagcuggccgccuucc

SEQ ID NO: 1137 - RNA, 17 nt, Artificial Sequence
  Synthetic oligonucleotide: PDCD1-575
agcuggccgccuucccc

SEQ ID NO: 1138 - RNA, 17 nt, Artificial Sequence
  Synthetic oligonucleotide: PDCD1-576
accgcagccagcccggc

SEQ ID NO: 1139 - RNA, 17 nt, Artificial Sequence
  Synthetic oligonucleotide: PDCD1-577
ugucacacaacugccca

SEQ ID NO: 1140 - RNA, 17 nt, Artificial Sequence
  Synthetic oligonucleotide: PDCD1-578
acgggcgugacuuccac

SEQ ID NO: 1141 - RNA, 17 nt, Artificial Sequence
  Synthetic oligonucleotide: PDCD1-579
uuccacaugagcguggu

SEQ ID NO: 1142 - RNA, 17 nt, Artificial Sequence
  Synthetic oligonucleotide: PDCD1-580
cagcggcaccuaccucu

SEQ ID NO: 1143 - RNA, 17 nt, Artificial Sequence
  Synthetic oligonucleotide: PDCD1-148
agcggcaccuaccucug

SEQ ID NO: 1144 - RNA, 17 nt, Artificial Sequence
  Synthetic oligonucleotide: PDCD1-582
ccccaaggcgcagauca

SEQ ID NO: 1145 - RNA, 17 nt, Artificial Sequence
  Synthetic oligonucleotide: PDCD1-583
ccaaggcgcagaucaaa

SEQ ID NO: 1146 - RNA, 17 nt, Artificial Sequence
  Synthetic oligonucleotide: PDCD1-584
cagaucaaagagagccu

SEQ ID NO: 1147 - RNA, 17 nt, Artificial Sequence
  Synthetic oligonucleotide: PDCD1-585
caaagagagccugcggg

SEQ ID NO: 1148 - RNA, 17 nt, Artificial Sequence
  Synthetic oligonucleotide: PDCD1-586
agccugcgggcagagcu

SEQ ID NO: 1149 - RNA, 20 nt, Artificial Sequence
  Synthetic oligonucleotide: PDCD1-587
caugccuggagcagccccac

SEQ ID NO: 1150 - RNA, 20 nt, Artificial Sequence
  Synthetic oligonucleotide: PDCD1-127
gccugugggaucugcaugcc

SEQ ID NO: 1151 - RNA, 20 nt, Artificial Sequence
  Synthetic oligonucleotide: PDCD1-589
cgccugugggaucugcaugc

SEQ ID NO: 1152 - RNA, 20 nt, Artificial Sequence
  Synthetic oligonucleotide: PDCD1-125
acgacuggccagggcgccug

SEQ ID NO: 1153 - RNA, 20 nt, Artificial Sequence
  Synthetic oligonucleotide: PDCD1-591
gacgacuggccagggcgccu

SEQ ID NO: 1154 - RNA, 20 nt, Artificial Sequence
  Synthetic oligonucleotide: PDCD1-592
gcaccgcccagacgacuggc

SEQ ID NO: 1155 - RNA, 20 nt, Artificial Sequence
  Synthetic oligonucleotide: PDCD1-593
accgccgaccccaccuaccu

SEQ ID NO: 1156 - RNA, 20 nt, Artificial Sequence
  Synthetic oligonucleotide: PDCD1-98
gagauggagagaggugagga

SEQ ID NO: 1157 - RNA, 20 nt, Artificial Sequence
  Synthetic oligonucleotide: PDCD1-595
agagauggagagaggugagg

SEQ ID NO: 1158 - RNA, 20 nt, Artificial Sequence
  Synthetic oligonucleotide: PDCD1-97
cugagagauggagagaggug

SEQ ID NO: 1159 - RNA, 20 nt, Artificial Sequence
  Synthetic oligonucleotide: PDCD1-597
ucugagagauggagagaggu

SEQ ID NO: 1160 - RNA, 20 nt, Artificial Sequence
  Synthetic oligonucleotide: PDCD1-598
agucugagagauggagagag

SEQ ID NO: 1161 - RNA, 20 nt, Artificial Sequence
  Synthetic oligonucleotide: PDCD1-599
uggggagucugagagaugga

SEQ ID NO: 1162 - RNA, 20 nt, Artificial Sequence
  Synthetic oligonucleotide: PDCD1-600
ucuggggagucugagagaug

SEQ ID NO: 1163 - RNA, 20 nt, Artificial Sequence
  Synthetic oligonucleotide: PDCD1-95
ugucuggggagucugagaga

SEQ ID NO: 1164 - RNA, 20 nt, Artificial Sequence
  Synthetic oligonucleotide: PDCD1-602
cugucuggggagucugagag

SEQ ID NO: 1165 - RNA, 20 nt, Artificial Sequence
  Synthetic oligonucleotide: PDCD1-603
agggccugucuggggagucu

SEQ ID NO: 1166 - RNA, 20 nt, Artificial Sequence
  Synthetic oligonucleotide: PDCD1-604
ccagggccugucuggggagu

SEQ ID NO: 1167 - RNA, 20 nt, Artificial Sequence
  Synthetic oligonucleotide: PDCD1-94
gggguuccagggccugucug

SEQ ID NO: 1168 - RNA, 20 nt, Artificial Sequence
  Synthetic oligonucleotide: PDCD1-93
ggggguuccagggccugucu

SEQ ID NO: 1169 - RNA, 20 nt, Artificial Sequence
  Synthetic oligonucleotide: PDCD1-92
gggggguuccagggccuguc

SEQ ID NO: 1170 - RNA, 20 nt, Artificial Sequence
  Synthetic oligonucleotide: PDCD1-608
ggggggguuccagggccugu

SEQ ID NO: 1171 - RNA, 20 nt, Artificial Sequence
  Synthetic oligonucleotide: PDCD1-609
gggagaagguggggggguuc

SEQ ID NO: 1172 - RNA, 20 nt, Artificial Sequence
  Synthetic oligonucleotide: PDCD1-87
cagggcuggggagaaggugg

SEQ ID NO: 1173 - RNA, 20 nt, Artificial Sequence
  Synthetic oligonucleotide: PDCD1-86
gcagggcuggggagaaggug

SEQ ID NO: 1174 - RNA, 20 nt, Artificial Sequence
  Synthetic oligonucleotide: PDCD1-85
agcagggcuggggagaaggu

SEQ ID NO: 1175 - RNA, 20 nt, Artificial Sequence
  Synthetic oligonucleotide: PDCD1-84
gagcagggcuggggagaagg

SEQ ID NO: 1176 - RNA, 20 nt, Artificial Sequence
  Synthetic oligonucleotide: PDCD1-614
cgagcagggcuggggagaag

SEQ ID NO: 1177 - RNA, 20 nt, Artificial Sequence
  Synthetic oligonucleotide: PDCD1-615
ucaccacgagcagggcuggg

SEQ ID NO: 1178 - RNA, 20 nt, Artificial Sequence
  Synthetic oligonucleotide: PDCD1-82
ggucaccacgagcagggcug

SEQ ID NO: 1179 - RNA, 20 nt, Artificial Sequence
  Synthetic oligonucleotide: PDCD1-81
cggucaccacgagcagggcu

SEQ ID NO: 1180 - RNA, 20 nt, Artificial Sequence
  Synthetic oligonucleotide: PDCD1-80
ucggucaccacgagcagggc

SEQ ID NO: 1181 - RNA, 20 nt, Artificial Sequence
  Synthetic oligonucleotide: PDCD1-619
uucggucaccacgagcaggg

SEQ ID NO: 1182 - RNA, 20 nt, Artificial Sequence
  Synthetic oligonucleotide: PDCD1-620
uccccuucggucaccacgag

SEQ ID NO: 1183 - RNA, 20 nt, Artificial Sequence
  Synthetic oligonucleotide: PDCD1-621
cguuguccccuucggucacc

SEQ ID NO: 1184 - RNA, 20 nt, Artificial Sequence
  Synthetic oligonucleotide: PDCD1-622
auguguuggagaagcugcag

SEQ ID NO: 1185 - RNA, 20 nt, Artificial Sequence
  Synthetic oligonucleotide: PDCD1-623
cgaagcucuccgauguguug

SEQ ID NO: 1186 - RNA, 20 nt, Artificial Sequence
  Synthetic oligonucleotide: PDCD1-73
cacgaagcucuccgaugugu

SEQ ID NO: 1187 - RNA, 20 nt, Artificial Sequence
  Synthetic oligonucleotide: PDCD1-625
gcacgaagcucuccgaugug

SEQ ID NO: 1188 - RNA, 20 nt, Artificial Sequence
  Synthetic oligonucleotide: PDCD1-626
ucaugcgguaccaguuuagc

SEQ ID NO: 1189 - RNA, 20 nt, Artificial Sequence
  Synthetic oligonucleotide: PDCD1-69
cagcuuguccgucugguugc

SEQ ID NO: 1190 - RNA, 20 nt, Artificial Sequence
  Synthetic oligonucleotide: PDCD1-628
ccagcuuguccgucugguug

SEQ ID NO: 1191 - RNA, 20 nt, Artificial Sequence
  Synthetic oligonucleotide: PDCD1-65
cgggcuggcugcgguccucg

SEQ ID NO: 1192 - RNA, 20 nt, Artificial Sequence
  Synthetic oligonucleotide: PDCD1-64
ccgggcuggcugcgguccuc

SEQ ID NO: 1193 - RNA, 20 nt, Artificial Sequence
  Synthetic oligonucleotide: PDCD1-63
gccgggcuggcugcgguccu

SEQ ID NO: 1194 - RNA, 20 nt, Artificial Sequence
  Synthetic oligonucleotide: PDCD1-632
ggccgggcuggcugcggucc

SEQ ID NO: 1195 - RNA, 20 nt, Artificial Sequence
  Synthetic oligonucleotide: PDCD1-633
cacggaagcggcaguccugg

SEQ ID NO: 1196 - RNA, 20 nt, Artificial Sequence
  Synthetic oligonucleotide: PDCD1-56
cguugggcaguugugugaca

SEQ ID NO: 1197 - RNA, 20 nt, Artificial Sequence
  Synthetic oligonucleotide: PDCD1-635
ccguugggcaguugugugac

SEQ ID NO: 1198 - RNA, 20 nt, Artificial Sequence
  Synthetic oligonucleotide: PDCD1-636
ucauguggaagucacgcccg

SEQ ID NO: 1199 - RNA, 20 nt, Artificial Sequence
  Synthetic oligonucleotide: PDCD1-53
gggcccugaccacgcucaug

SEQ ID NO: 1200 - RNA, 20 nt, Artificial Sequence
  Synthetic oligonucleotide: PDCD1-638
cgggcccugaccacgcucau

SEQ ID NO: 1201 - RNA, 20 nt, Artificial Sequence
  Synthetic oligonucleotide: PDCD1-639
uaggugccgcugucauugcg

SEQ ID NO: 1202 - RNA, 20 nt, Artificial Sequence
  Synthetic oligonucleotide: PDCD1-640
gggccagggagauggcccca

SEQ ID NO: 1203 - RNA, 20 nt, Artificial Sequence
  Synthetic oligonucleotide: PDCD1-47
gaucugcgccuugggggcca

SEQ ID NO: 1204 - RNA, 20 nt, Artificial Sequence
  Synthetic oligonucleotide: PDCD1-46
ugaucugcgccuugggggcc

SEQ ID NO: 1205 - RNA, 20 nt, Artificial Sequence
  Synthetic oligonucleotide: PDCD1-643
uugaucugcgccuugggggc

SEQ ID NO: 1206 - RNA, 20 nt, Artificial Sequence
  Synthetic oligonucleotide: PDCD1-43
cucucuuugaucugcgccuu

SEQ ID NO: 1207 - RNA, 20 nt, Artificial Sequence
  Synthetic oligonucleotide: PDCD1-42
gcucucuuugaucugcgccu

SEQ ID NO: 1208 - RNA, 20 nt, Artificial Sequence
  Synthetic oligonucleotide: PDCD1-646
ggcucucuuugaucugcgcc

SEQ ID NO: 1209 - RNA, 17 nt, Artificial Sequence
  Synthetic oligonucleotide: PDCD1-647
gccuggagcagccccac

SEQ ID NO: 1210 - RNA, 17 nt, Artificial Sequence
  Synthetic oligonucleotide: PDCD1-254
ugugggaucugcaugcc

SEQ ID NO: 1211 - RNA, 17 nt, Artificial Sequence
  Synthetic oligonucleotide: PDCD1-649
cugugggaucugcaugc

SEQ ID NO: 1212 - RNA, 17 nt, Artificial Sequence
  Synthetic oligonucleotide: PDCD1-252
acuggccagggcgccug

SEQ ID NO: 1213 - RNA, 17 nt, Artificial Sequence
  Synthetic oligonucleotide: PDCD1-651
gacuggccagggcgccu

SEQ ID NO: 1214 - RNA, 17 nt, Artificial Sequence
  Synthetic oligonucleotide: PDCD1-652
ccgcccagacgacuggc

SEQ ID NO: 1215 - RNA, 17 nt, Artificial Sequence
  Synthetic oligonucleotide: PDCD1-653
gccgaccccaccuaccu

SEQ ID NO: 1216 - RNA, 17 nt, Artificial Sequence
  Synthetic oligonucleotide: PDCD1-225
auggagagaggugagga

SEQ ID NO: 1217 - RNA, 17 nt, Artificial Sequence
  Synthetic oligonucleotide: PDCD1-655
gauggagagaggugagg

SEQ ID NO: 1218 - RNA, 17 nt, Artificial Sequence
  Synthetic oligonucleotide: PDCD1-224
agagauggagagaggug

SEQ ID NO: 1219 - RNA, 17 nt, Artificial Sequence
  Synthetic oligonucleotide: PDCD1-657
gagagauggagagaggu

SEQ ID NO: 1220 - RNA, 17 nt, Artificial Sequence
  Synthetic oligonucleotide: PDCD1-658
cugagagauggagagag

SEQ ID NO: 1221 - RNA, 17 nt, Artificial Sequence
  Synthetic oligonucleotide: PDCD1-659
ggagucugagagaugga

SEQ ID NO: 1222 - RNA, 17 nt, Artificial Sequence
  Synthetic oligonucleotide: PDCD1-660
ggggagucugagagaug

SEQ ID NO: 1223 - RNA, 17 nt, Artificial Sequence
  Synthetic oligonucleotide: PDCD1-222
cuggggagucugagaga

SEQ ID NO: 1224 - RNA, 17 nt, Artificial Sequence
  Synthetic oligonucleotide: PDCD1-662
ucuggggagucugagag

SEQ ID NO: 1225 - RNA, 17 nt, Artificial Sequence
  Synthetic oligonucleotide: PDCD1-663
gccugucuggggagucu

SEQ ID NO: 1226 - RNA, 17 nt, Artificial Sequence
  Synthetic oligonucleotide: PDCD1-664
gggccugucuggggagu

SEQ ID NO: 1227 - RNA, 17 nt, Artificial Sequence
  Synthetic oligonucleotide: PDCD1-221
guuccagggccugucug

SEQ ID NO: 1228 - RNA, 17 nt, Artificial Sequence
  Synthetic oligonucleotide: PDCD1-220
gguuccagggccugucu

SEQ ID NO: 1229 - RNA, 17 nt, Artificial Sequence
  Synthetic oligonucleotide: PDCD1-219
ggguuccagggccuguc

SEQ ID NO: 1230 - RNA, 17 nt, Artificial Sequence
  Synthetic oligonucleotide: PDCD1-668
gggguuccagggccugu

SEQ ID NO: 1231 - RNA, 17 nt, Artificial Sequence
  Synthetic oligonucleotide: PDCD1-669
agaagguggggggguuc

SEQ ID NO: 1232 - RNA, 17 nt, Artificial Sequence
  Synthetic oligonucleotide: PDCD1-214
ggcuggggagaaggugg

SEQ ID NO: 1233 - RNA, 17 nt, Artificial Sequence
  Synthetic oligonucleotide: PDCD1-213
gggcuggggagaaggug

SEQ ID NO: 1234 - RNA, 17 nt, Artificial Sequence
  Synthetic oligonucleotide: PDCD1-212
agggcuggggagaaggu

SEQ ID NO: 1235 - RNA, 17 nt, Artificial Sequence
  Synthetic oligonucleotide: PDCD1-211
cagggcuggggagaagg

SEQ ID NO: 1236 - RNA, 17 nt, Artificial Sequence
  Synthetic oligonucleotide: PDCD1-674
gcagggcuggggagaag

SEQ ID NO: 1237 - RNA, 17 nt, Artificial Sequence
  Synthetic oligonucleotide: PDCD1-675
ccacgagcagggcuggg

SEQ ID NO: 1238 - RNA, 17 nt, Artificial Sequence
  Synthetic oligonucleotide: PDCD1-209
caccacgagcagggcug

SEQ ID NO: 1239 - RNA, 17 nt, Artificial Sequence
  Synthetic oligonucleotide: PDCD1-208
ucaccacgagcagggcu

SEQ ID NO: 1240 - RNA, 17 nt, Artificial Sequence
  Synthetic oligonucleotide: PDCD1-207
gucaccacgagcagggc

SEQ ID NO: 1241 - RNA, 17 nt, Artificial Sequence
  Synthetic oligonucleotide: PDCD1-679
ggucaccacgagcaggg

SEQ ID NO: 1242 - RNA, 17 nt, Artificial Sequence
  Synthetic oligonucleotide: PDCD1-680
ccuucggucaccacgag

SEQ ID NO: 1243 - RNA, 17 nt, Artificial Sequence
  Synthetic oligonucleotide: PDCD1-681
uguccccuucggucacc

SEQ ID NO: 1244 - RNA, 17 nt, Artificial Sequence
  Synthetic oligonucleotide: PDCD1-682
uguuggagaagcugcag

SEQ ID NO: 1245 - RNA, 17 nt, Artificial Sequence
  Synthetic oligonucleotide: PDCD1-683
agcucuccgauguguug

SEQ ID NO: 1246 - RNA, 17 nt, Artificial Sequence
  Synthetic oligonucleotide: PDCD1-200
gaagcucuccgaugugu

SEQ ID NO: 1247 - RNA, 17 nt, Artificial Sequence
  Synthetic oligonucleotide: PDCD1-685
cgaagcucuccgaugug

SEQ ID NO: 1248 - RNA, 17 nt, Artificial Sequence
  Synthetic oligonucleotide: PDCD1-686
ugcgguaccaguuuagc

SEQ ID NO: 1249 - RNA, 17 nt, Artificial Sequence
  Synthetic oligonucleotide: PDCD1-196
cuuguccgucugguugc

SEQ ID NO: 1250 - RNA, 17 nt, Artificial Sequence
  Synthetic oligonucleotide: PDCD1-688
gcuuguccgucugguug

SEQ ID NO: 1251 - RNA, 17 nt, Artificial Sequence
  Synthetic oligonucleotide: PDCD1-192
gcuggcugcgguccucg

SEQ ID NO: 1252 - RNA, 17 nt, Artificial Sequence
  Synthetic oligonucleotide: PDCD1-191
ggcuggcugcgguccuc

SEQ ID NO: 1253 - RNA, 17 nt, Artificial Sequence
  Synthetic oligonucleotide: PDCD1-190
gggcuggcugcgguccu

SEQ ID NO: 1254 - RNA, 17 nt, Artificial Sequence
  Synthetic oligonucleotide: PDCD1-692
cgggcuggcugcggucc

SEQ ID NO: 1255 - RNA, 17 nt, Artificial Sequence
  Synthetic oligonucleotide: PDCD1-693
ggaagcggcaguccugg

SEQ ID NO: 1256 - RNA, 17 nt, Artificial Sequence
  Synthetic oligonucleotide: PDCD1-183
ugggcaguugugugaca

SEQ ID NO: 1257 - RNA, 17 nt, Artificial Sequence
  Synthetic oligonucleotide: PDCD1-695
uugggcaguugugugac

SEQ ID NO: 1258 - RNA, 17 nt, Artificial Sequence
  Synthetic oligonucleotide: PDCD1-696
uguggaagucacgcccg

SEQ ID NO: 1259 - RNA, 17 nt, Artificial Sequence
  Synthetic oligonucleotide: PDCD1-180
cccugaccacgcucaug

SEQ ID NO: 1260 - RNA, 17 nt, Artificial Sequence
  Synthetic oligonucleotide: PDCD1-698
gcccugaccacgcucau

SEQ ID NO: 1261 - RNA, 17 nt, Artificial Sequence
  Synthetic oligonucleotide: PDCD1-699
gugccgcugucauugcg

SEQ ID NO: 1262 - RNA, 17 nt, Artificial Sequence
  Synthetic oligonucleotide: PDCD1-700
ccagggagauggcccca

SEQ ID NO: 1263 - RNA, 17 nt, Artificial Sequence
  Synthetic oligonucleotide: PDCD1-174
cugcgccuugggggcca

SEQ ID NO: 1264 - RNA, 17 nt, Artificial Sequence
  Synthetic oligonucleotide: PDCD1-173
ucugcgccuugggggcc

SEQ ID NO: 1265 - RNA, 17 nt, Artificial Sequence
  Synthetic oligonucleotide: PDCD1-703
aucugcgccuugggggc

SEQ ID NO: 1266 - RNA, 17 nt, Artificial Sequence
  Synthetic oligonucleotide: PDCD1-170
ucuuugaucugcgccuu

SEQ ID NO: 1267 - RNA, 17 nt, Artificial Sequence
  Synthetic oligonucleotide: PDCD1-169
cucuuugaucugcgccu

SEQ ID NO: 1268 - RNA, 17 nt, Artificial Sequence
  Synthetic oligonucleotide: PDCD1-706
ucucuuugaucugcgcc

SEQ ID NO: 1269 - RNA, 20 nt, Artificial Sequence
  Synthetic oligonucleotide: PDCD1-707
ucagggugacaggugcggcc

SEQ ID NO: 1270 - RNA, 20 nt, Artificial Sequence
  Synthetic oligonucleotide: PDCD1-32
cagggugacaggugcggccu

SEQ ID NO: 1271 - RNA, 20 nt, Artificial Sequence
  Synthetic oligonucleotide: PDCD1-709
caggugcggccucggaggcc

SEQ ID NO: 1272 - RNA, 20 nt, Artificial Sequence
  Synthetic oligonucleotide: PDCD1-34
aggugcggccucggaggccc

SEQ ID NO: 1273 - RNA, 20 nt, Artificial Sequence
  Synthetic oligonucleotide: PDCD1-711
cggccucggaggccccgggg

SEQ ID NO: 1274 - RNA, 20 nt, Artificial Sequence
  Synthetic oligonucleotide: PDCD1-37
ggccucggaggccccggggc

SEQ ID NO: 1275 - RNA, 20 nt, Artificial Sequence
  Synthetic oligonucleotide: PDCD1-713
cccugaccuuugugcccuuc

SEQ ID NO: 1276 - RNA, 20 nt, Artificial Sequence
  Synthetic oligonucleotide: PDCD1-714
cugaccuuugugcccuucca

SEQ ID NO: 1277 - RNA, 20 nt, Artificial Sequence
  Synthetic oligonucleotide: PDCD1-715
gaccuuugugcccuuccaga

SEQ ID NO: 1278 - RNA, 20 nt, Artificial Sequence
  Synthetic oligonucleotide: PDCD1-716
cuuugugcccuuccagagag

SEQ ID NO: 1279 - RNA, 20 nt, Artificial Sequence
  Synthetic oligonucleotide: PDCD1-717
ugcccuuccagagagaaggg

SEQ ID NO: 1280 - RNA, 20 nt, Artificial Sequence
  Synthetic oligonucleotide: PDCD1-718
aaacccuggugguugguguc

SEQ ID NO: 1281 - RNA, 20 nt, Artificial Sequence
  Synthetic oligonucleotide: PDCD1-719
uuggugucgugggcggccug

SEQ ID NO: 1282 - RNA, 20 nt, Artificial Sequence
  Synthetic oligonucleotide: PDCD1-720
ggcagccuggugcugcuagu

SEQ ID NO: 1283 - RNA, 20 nt, Artificial Sequence
  Synthetic oligonucleotide: PDCD1-721
guccuggccgucaucugcuc

SEQ ID NO: 1284 - RNA, 20 nt, Artificial Sequence
  Synthetic oligonucleotide: PDCD1-722
gucaucugcucccgggccgc

SEQ ID NO: 1285 - RNA, 20 nt, Artificial Sequence
  Synthetic oligonucleotide: PDCD1-723
accccaaguguguuucucug

SEQ ID NO: 1286 - RNA, 20 nt, Artificial Sequence
  Synthetic oligonucleotide: PDCD1-275
ccccaaguguguuucucugc

SEQ ID NO: 1287 - RNA, 20 nt, Artificial Sequence
  Synthetic oligonucleotide: PDCD1-725
guguuucucugcagggacaa

SEQ ID NO: 1288 - RNA, 20 nt, Artificial Sequence
  Synthetic oligonucleotide: PDCD1-277
uguuucucugcagggacaau

SEQ ID NO: 1289 - RNA, 20 nt, Artificial Sequence
  Synthetic oligonucleotide: PDCD1-727
ggcgcaccggccagccccug

SEQ ID NO: 1290 - RNA, 20 nt, Artificial Sequence
  Synthetic oligonucleotide: PDCD1-728
ucccucucccuuucuccuca

SEQ ID NO: 1291 - RNA, 20 nt, Artificial Sequence
  Synthetic oligonucleotide: PDCD1-729
cucucccuuucuccucaaag

SEQ ID NO: 1292 - RNA, 20 nt, Artificial Sequence
  Synthetic oligonucleotide: PDCD1-281
ucucccuuucuccucaaaga

SEQ ID NO: 1293 - RNA, 20 nt, Artificial Sequence
  Synthetic oligonucleotide: PDCD1-731
ucccuuucuccucaaagaag

SEQ ID NO: 1294 - RNA, 20 nt, Artificial Sequence
  Synthetic oligonucleotide: PDCD1-732
cagccgugccuguguucucu

SEQ ID NO: 1295 - RNA, 20 nt, Artificial Sequence
  Synthetic oligonucleotide: PDCD1-733
gccuguguucucuguggacu

SEQ ID NO: 1296 - RNA, 20 nt, Artificial Sequence
  Synthetic oligonucleotide: PDCD1-284
ccuguguucucuguggacua

SEQ ID NO: 1297 - RNA, 20 nt, Artificial Sequence
  Synthetic oligonucleotide: PDCD1-285
cuguguucucuguggacuau

SEQ ID NO: 1298 - RNA, 20 nt, Artificial Sequence
  Synthetic oligonucleotide: PDCD1-286
uguguucucuguggacuaug

SEQ ID NO: 1299 - RNA, 20 nt, Artificial Sequence
  Synthetic oligonucleotide: PDCD1-737
ucucuguggacuauggggag

SEQ ID NO: 1300 - RNA, 20 nt, Artificial Sequence
  Synthetic oligonucleotide: PDCD1-738
ggggagcuggauuuccagug

SEQ ID NO: 1301 - RNA, 20 nt, Artificial Sequence
  Synthetic oligonucleotide: PDCD1-739
ggagcuggauuuccaguggc

SEQ ID NO: 1302 - RNA, 20 nt, Artificial Sequence
  Synthetic oligonucleotide: PDCD1-740
agcuggauuuccaguggcga

SEQ ID NO: 1303 - RNA, 20 nt, Artificial Sequence
  Synthetic oligonucleotide: PDCD1-741
uccaguggcgagagaagacc

SEQ ID NO: 1304 - RNA, 20 nt, Artificial Sequence
  Synthetic oligonucleotide: PDCD1-289
ccaguggcgagagaagaccc

SEQ ID NO: 1305 - RNA, 20 nt, Artificial Sequence
  Synthetic oligonucleotide: PDCD1-743
gccccccgugcccugugucc

SEQ ID NO: 1306 - RNA, 20 nt, Artificial Sequence
  Synthetic oligonucleotide: PDCD1-744
ugcccugugucccugagcag

SEQ ID NO: 1307 - RNA, 20 nt, Artificial Sequence
  Synthetic oligonucleotide: PDCD1-290
gcccugugucccugagcaga

SEQ ID NO: 1308 - RNA, 20 nt, Artificial Sequence
  Synthetic oligonucleotide: PDCD1-746
ugccaccauugucuuuccua

SEQ ID NO: 1309 - RNA, 20 nt, Artificial Sequence
  Synthetic oligonucleotide: PDCD1-291
gccaccauugucuuuccuag

SEQ ID NO: 1310 - RNA, 20 nt, Artificial Sequence
  Synthetic oligonucleotide: PDCD1-748
ccauugucuuuccuagcgga

SEQ ID NO: 1311 - RNA, 20 nt, Artificial Sequence
  Synthetic oligonucleotide: PDCD1-749
ggcaccucaucccccgcccg

SEQ ID NO: 1312 - RNA, 20 nt, Artificial Sequence
  Synthetic oligonucleotide: PDCD1-294
gcaccucaucccccgcccgc

SEQ ID NO: 1313 - RNA, 20 nt, Artificial Sequence
  Synthetic oligonucleotide: PDCD1-751
aggggcucagcugacggccc

SEQ ID NO: 1314 - RNA, 20 nt, Artificial Sequence
  Synthetic oligonucleotide: PDCD1-298
ggggcucagcugacggcccu

SEQ ID NO: 1315 - RNA, 20 nt, Artificial Sequence
  Synthetic oligonucleotide: PDCD1-753
gcccucggagugcccagcca

SEQ ID NO: 1316 - RNA, 20 nt, Artificial Sequence
  Synthetic oligonucleotide: PDCD1-754
gagugcccagccacugaggc

SEQ ID NO: 1317 - RNA, 20 nt, Artificial Sequence
  Synthetic oligonucleotide: PDCD1-755
gugcccagccacugaggccu

SEQ ID NO: 1318 - RNA, 20 nt, Artificial Sequence
  Synthetic oligonucleotide: PDCD1-756
ccagccacugaggccugagg

SEQ ID NO: 1319 - RNA, 17 nt, Artificial Sequence
  Synthetic oligonucleotide: PDCD1-757
gggugacaggugcggcc

SEQ ID NO: 1320 - RNA, 17 nt, Artificial Sequence
  Synthetic oligonucleotide: PDCD1-159
ggugacaggugcggccu

SEQ ID NO: 1321 - RNA, 17 nt, Artificial Sequence
  Synthetic oligonucleotide: PDCD1-759
gugcggccucggaggcc

SEQ ID NO: 1322 - RNA, 17 nt, Artificial Sequence
  Synthetic oligonucleotide: PDCD1-161
ugcggccucggaggccc

SEQ ID NO: 1323 - RNA, 17 nt, Artificial Sequence
  Synthetic oligonucleotide: PDCD1-761
ccucggaggccccgggg

SEQ ID NO: 1324 - RNA, 17 nt, Artificial Sequence
  Synthetic oligonucleotide: PDCD1-164
cucggaggccccggggc

SEQ ID NO: 1325 - RNA, 17 nt, Artificial Sequence
  Synthetic oligonucleotide: PDCD1-763
ugaccuuugugcccuuc

SEQ ID NO: 1326 - RNA, 17 nt, Artificial Sequence
  Synthetic oligonucleotide: PDCD1-764
accuuugugcccuucca

SEQ ID NO: 1327 - RNA, 17 nt, Artificial Sequence
  Synthetic oligonucleotide: PDCD1-765
cuuugugcccuuccaga

SEQ ID NO: 1328 - RNA, 17 nt, Artificial Sequence
  Synthetic oligonucleotide: PDCD1-766
ugugcccuuccagagag

SEQ ID NO: 1329 - RNA, 17 nt, Artificial Sequence
  Synthetic oligonucleotide: PDCD1-767
ccuuccagagagaaggg

SEQ ID NO: 1330 - RNA, 17 nt, Artificial Sequence
  Synthetic oligonucleotide: PDCD1-768
cccuggugguugguguc

SEQ ID NO: 1331 - RNA, 17 nt, Artificial Sequence
  Synthetic oligonucleotide: PDCD1-769
gugucgugggcggccug

SEQ ID NO: 1332 - RNA, 17 nt, Artificial Sequence
  Synthetic oligonucleotide: PDCD1-770
agccuggugcugcuagu

SEQ ID NO: 1333 - RNA, 17 nt, Artificial Sequence
  Synthetic oligonucleotide: PDCD1-771
cuggccgucaucugcuc

SEQ ID NO: 1334 - RNA, 17 nt, Artificial Sequence
  Synthetic oligonucleotide: PDCD1-772
aucugcucccgggccgc

SEQ ID NO: 1335 - RNA, 17 nt, Artificial Sequence
  Synthetic oligonucleotide: PDCD1-773
ccaaguguguuucucug

SEQ ID NO: 1336 - RNA, 17 nt, Artificial Sequence
  Synthetic oligonucleotide: PDCD1-325
caaguguguuucucugc

SEQ ID NO: 1337 - RNA, 17 nt, Artificial Sequence
  Synthetic oligonucleotide: PDCD1-775
uuucucugcagggacaa

SEQ ID NO: 1338 - RNA, 17 nt, Artificial Sequence
  Synthetic oligonucleotide: PDCD1-327
uucucugcagggacaau

SEQ ID NO: 1339 - RNA, 17 nt, Artificial Sequence
  Synthetic oligonucleotide: PDCD1-777
gcaccggccagccccug

SEQ ID NO: 1340 - RNA, 17 nt, Artificial Sequence
  Synthetic oligonucleotide: PDCD1-778
cucucccuuucuccuca

SEQ ID NO: 1341 - RNA, 17 nt, Artificial Sequence
  Synthetic oligonucleotide: PDCD1-779
ucccuuucuccucaaag

SEQ ID NO: 1342 - RNA, 17 nt, Artificial Sequence
  Synthetic oligonucleotide: PDCD1-331
cccuuucuccucaaaga

SEQ ID NO: 1343 - RNA, 17 nt, Artificial Sequence
  Synthetic oligonucleotide: PDCD1-781
cuuucuccucaaagaag

SEQ ID NO: 1344 - RNA, 17 nt, Artificial Sequence
  Synthetic oligonucleotide: PDCD1-782
ccgugccuguguucucu

SEQ ID NO: 1345 - RNA, 17 nt, Artificial Sequence
  Synthetic oligonucleotide: PDCD1-783
uguguucucuguggacu

SEQ ID NO: 1346 - RNA, 17 nt, Artificial Sequence
  Synthetic oligonucleotide: PDCD1-334
guguucucuguggacua

SEQ ID NO: 1347 - RNA, 17 nt, Artificial Sequence
  Synthetic oligonucleotide: PDCD1-335
uguucucuguggacuau

SEQ ID NO: 1348 - RNA, 17 nt, Artificial Sequence
  Synthetic oligonucleotide: PDCD1-336
guucucuguggacuaug

SEQ ID NO: 1349 - RNA, 17 nt, Artificial Sequence
  Synthetic oligonucleotide: PDCD1-787
cuguggacuauggggag

SEQ ID NO: 1350 - RNA, 17 nt, Artificial Sequence
  Synthetic oligonucleotide: PDCD1-788
gagcuggauuuccagug

SEQ ID NO: 1351 - RNA, 17 nt, Artificial Sequence
  Synthetic oligonucleotide: PDCD1-789
gcuggauuuccaguggc

SEQ ID NO: 1352 - RNA, 17 nt, Artificial Sequence
  Synthetic oligonucleotide: PDCD1-790
uggauuuccaguggcga

SEQ ID NO: 1353 - RNA, 17 nt, Artificial Sequence
  Synthetic oligonucleotide: PDCD1-791
aguggcgagagaagacc

SEQ ID NO: 1354 - RNA, 17 nt, Artificial Sequence
  Synthetic oligonucleotide: PDCD1-339
guggcgagagaagaccc

SEQ ID NO: 1355 - RNA, 17 nt, Artificial Sequence
  Synthetic oligonucleotide: PDCD1-793
ccccgugcccugugucc

SEQ ID NO: 1356 - RNA, 17 nt, Artificial Sequence
  Synthetic oligonucleotide: PDCD1-794
ccugugucccugagcag

SEQ ID NO: 1357 - RNA, 17 nt, Artificial Sequence
  Synthetic oligonucleotide: PDCD1-340
cugugucccugagcaga

SEQ ID NO: 1358 - RNA, 17 nt, Artificial Sequence
  Synthetic oligonucleotide: PDCD1-796
caccauugucuuuccua

SEQ ID NO: 1359 - RNA, 17 nt, Artificial Sequence
  Synthetic oligonucleotide: PDCD1-341
accauugucuuuccuag

SEQ ID NO: 1360 - RNA, 17 nt, Artificial Sequence
  Synthetic oligonucleotide: PDCD1-798
uugucuuuccuagcgga

SEQ ID NO: 1361 - RNA, 17 nt, Artificial Sequence
  Synthetic oligonucleotide: PDCD1-799
accucaucccccgcccg

SEQ ID NO: 1362 - RNA, 17 nt, Artificial Sequence
  Synthetic oligonucleotide: PDCD1-344
ccucaucccccgcccgc

SEQ ID NO: 1363 - RNA, 17 nt, Artificial Sequence
  Synthetic oligonucleotide: PDCD1-801
ggcucagcugacggccc

SEQ ID NO: 1364 - RNA, 17 nt, Artificial Sequence
  Synthetic oligonucleotide: PDCD1-348
gcucagcugacggcccu

SEQ ID NO: 1365 - RNA, 17 nt, Artificial Sequence
  Synthetic oligonucleotide: PDCD1-803
cucggagugcccagcca

SEQ ID NO: 1366 - RNA, 17 nt, Artificial Sequence
  Synthetic oligonucleotide: PDCD1-804
ugcccagccacugaggc

SEQ ID NO: 1367 - RNA, 17 nt, Artificial Sequence
  Synthetic oligonucleotide: PDCD1-805
cccagccacugaggccu

SEQ ID NO: 1368 - RNA, 17 nt, Artificial Sequence
  Synthetic oligonucleotide: PDCD1-806
gccacugaggccugagg

SEQ ID NO: 1369 - RNA, 20 nt, Artificial Sequence
  Synthetic oligonucleotide: PDCD1-807
ccgaggccgcaccugucacc

SEQ ID NO: 1370 - RNA, 20 nt, Artificial Sequence
  Synthetic oligonucleotide: PDCD1-808
agggcacaaaggucaggggu

SEQ ID NO: 1371 - RNA, 20 nt, Artificial Sequence
  Synthetic oligonucleotide: PDCD1-358
ucuggaagggcacaaagguc

SEQ ID NO: 1372 - RNA, 20 nt, Artificial Sequence
  Synthetic oligonucleotide: PDCD1-810
cucuggaagggcacaaaggu

SEQ ID NO: 1373 - RNA, 20 nt, Artificial Sequence
  Synthetic oligonucleotide: PDCD1-811
acuucugcccuucucucugg

SEQ ID NO: 1374 - RNA, 20 nt, Artificial Sequence
  Synthetic oligonucleotide: PDCD1-362
ggcacuucugcccuucucuc

SEQ ID NO: 1375 - RNA, 20 nt, Artificial Sequence
  Synthetic oligonucleotide: PDCD1-813
gggcacuucugcccuucucu

SEQ ID NO: 1376 - RNA, 20 nt, Artificial Sequence
  Synthetic oligonucleotide: PDCD1-814
gugaggggcuggggugggcu

SEQ ID NO: 1377 - RNA, 20 nt, Artificial Sequence
  Synthetic oligonucleotide: PDCD1-815
ggccugggugaggggcuggg

SEQ ID NO: 1378 - RNA, 20 nt, Artificial Sequence
  Synthetic oligonucleotide: PDCD1-369
ggcuggccugggugaggggc

SEQ ID NO: 1379 - RNA, 20 nt, Artificial Sequence
  Synthetic oligonucleotide: PDCD1-817
cggcuggccugggugagggg

SEQ ID NO: 1380 - RNA, 20 nt, Artificial Sequence
  Synthetic oligonucleotide: PDCD1-372
cuggccggcuggccugggug

SEQ ID NO: 1381 - RNA, 20 nt, Artificial Sequence
  Synthetic oligonucleotide: PDCD1-819
acuggccggcuggccugggu

SEQ ID NO: 1382 - RNA, 20 nt, Artificial Sequence
  Synthetic oligonucleotide: PDCD1-820
gaacuggccggcuggccugg

SEQ ID NO: 1383 - RNA, 20 nt, Artificial Sequence
  Synthetic oligonucleotide: PDCD1-821
uuuggaacuggccggcuggc

SEQ ID NO: 1384 - RNA, 20 nt, Artificial Sequence
  Synthetic oligonucleotide: PDCD1-378
cgacaccaaccaccaggguu

SEQ ID NO: 1385 - RNA, 20 nt, Artificial Sequence
  Synthetic oligonucleotide: PDCD1-823
acgacaccaaccaccagggu

SEQ ID NO: 1386 - RNA, 20 nt, Artificial Sequence
  Synthetic oligonucleotide: PDCD1-824
ccgcccacgacaccaaccac

SEQ ID NO: 1387 - RNA, 20 nt, Artificial Sequence
  Synthetic oligonucleotide: PDCD1-825
gcccgggagcagaugacggc

SEQ ID NO: 1388 - RNA, 20 nt, Artificial Sequence
  Synthetic oligonucleotide: PDCD1-385
gacguuaccucgugcggccc

SEQ ID NO: 1389 - RNA, 20 nt, Artificial Sequence
  Synthetic oligonucleotide: PDCD1-386
ugacguuaccucgugcggcc

SEQ ID NO: 1390 - RNA, 20 nt, Artificial Sequence
  Synthetic oligonucleotide: PDCD1-828
augacguuaccucgugcggc

SEQ ID NO: 1391 - RNA, 20 nt, Artificial Sequence
  Synthetic oligonucleotide: PDCD1-391
ucccugcagagaaacacacu

SEQ ID NO: 1392 - RNA, 20 nt, Artificial Sequence
  Synthetic oligonucleotide: PDCD1-830
gucccugcagagaaacacac

SEQ ID NO: 1393 - RNA, 20 nt, Artificial Sequence
  Synthetic oligonucleotide: PDCD1-831
uggcuccuauugucccugca

SEQ ID NO: 1394 - RNA, 20 nt, Artificial Sequence
  Synthetic oligonucleotide: PDCD1-832
ccuggcuccuauugucccug

SEQ ID NO: 1395 - RNA, 20 nt, Artificial Sequence
  Synthetic oligonucleotide: PDCD1-397
ggaaaagagugagacucacc

SEQ ID NO: 1396 - RNA, 20 nt, Artificial Sequence
  Synthetic oligonucleotide: PDCD1-834
aggaaaagagugagacucac

SEQ ID NO: 1397 - RNA, 20 nt, Artificial Sequence
  Synthetic oligonucleotide: PDCD1-398
ucuuugaggagaaagggaga

SEQ ID NO: 1398 - RNA, 20 nt, Artificial Sequence
  Synthetic oligonucleotide: PDCD1-399
uucuuugaggagaaagggag

SEQ ID NO: 1399 - RNA, 20 nt, Artificial Sequence
  Synthetic oligonucleotide: PDCD1-837
cuucuuugaggagaaaggga

SEQ ID NO: 1400 - RNA, 20 nt, Artificial Sequence
  Synthetic oligonucleotide: PDCD1-838
uccuucuuugaggagaaagg

SEQ ID NO: 1401 - RNA, 20 nt, Artificial Sequence
  Synthetic oligonucleotide: PDCD1-400
ccuccuucuuugaggagaaa

SEQ ID NO: 1402 - RNA, 20 nt, Artificial Sequence
  Synthetic oligonucleotide: PDCD1-401
uccuccuucuuugaggagaa

SEQ ID NO: 1403 - RNA, 20 nt, Artificial Sequence
  Synthetic oligonucleotide: PDCD1-841
guccuccuucuuugaggaga

SEQ ID NO: 1404 - RNA, 20 nt, Artificial Sequence
  Synthetic oligonucleotide: PDCD1-842
agggguccuccuucuuugag

SEQ ID NO: 1405 - RNA, 20 nt, Artificial Sequence
  Synthetic oligonucleotide: PDCD1-402
ugagggguccuccuucuuug

SEQ ID NO: 1406 - RNA, 20 nt, Artificial Sequence
  Synthetic oligonucleotide: PDCD1-844
cugagggguccuccuucuuu

SEQ ID NO: 1407 - RNA, 20 nt, Artificial Sequence
  Synthetic oligonucleotide: PDCD1-845
ggcugagggguccuccuucu

SEQ ID NO: 1408 - RNA, 20 nt, Artificial Sequence
  Synthetic oligonucleotide: PDCD1-405
agagaacacaggcacggcug

SEQ ID NO: 1409 - RNA, 20 nt, Artificial Sequence
  Synthetic oligonucleotide: PDCD1-847
cagagaacacaggcacggcu

SEQ ID NO: 1410 - RNA, 20 nt, Artificial Sequence
  Synthetic oligonucleotide: PDCD1-848
cacagagaacacaggcacgg

SEQ ID NO: 1411 - RNA, 20 nt, Artificial Sequence
  Synthetic oligonucleotide: PDCD1-849
ccagcuccccauaguccaca

SEQ ID NO: 1412 - RNA, 20 nt, Artificial Sequence
  Synthetic oligonucleotide: PDCD1-850
auccagcuccccauagucca

SEQ ID NO: 1413 - RNA, 20 nt, Artificial Sequence
  Synthetic oligonucleotide: PDCD1-408
ccggggucuucucucgccac

SEQ ID NO: 1414 - RNA, 20 nt, Artificial Sequence
  Synthetic oligonucleotide: PDCD1-852
uccggggucuucucucgcca

SEQ ID NO: 1415 - RNA, 20 nt, Artificial Sequence
  Synthetic oligonucleotide: PDCD1-411
acacagggcacggggggcuc

SEQ ID NO: 1416 - RNA, 20 nt, Artificial Sequence
  Synthetic oligonucleotide: PDCD1-854
gacacagggcacggggggcu

SEQ ID NO: 1417 - RNA, 20 nt, Artificial Sequence
  Synthetic oligonucleotide: PDCD1-414
gcucagggacacagggcacg

SEQ ID NO: 1418 - RNA, 20 nt, Artificial Sequence
  Synthetic oligonucleotide: PDCD1-415
ugcucagggacacagggcac

SEQ ID NO: 1419 - RNA, 20 nt, Artificial Sequence
  Synthetic oligonucleotide: PDCD1-416
cugcucagggacacagggca

SEQ ID NO: 1420 - RNA, 20 nt, Artificial Sequence
  Synthetic oligonucleotide: PDCD1-858
ucugcucagggacacagggc

SEQ ID NO: 1421 - RNA, 20 nt, Artificial Sequence
  Synthetic oligonucleotide: PDCD1-859
acuccgucugcucagggaca

SEQ ID NO: 1422 - RNA, 20 nt, Artificial Sequence
  Synthetic oligonucleotide: PDCD1-420
guggcauacuccgucugcuc

SEQ ID NO: 1423 - RNA, 20 nt, Artificial Sequence
  Synthetic oligonucleotide: PDCD1-861
gguggcauacuccgucugcu

SEQ ID NO: 1424 - RNA, 20 nt, Artificial Sequence
  Synthetic oligonucleotide: PDCD1-423
gaugaggugcccauuccgcu

SEQ ID NO: 1425 - RNA, 20 nt, Artificial Sequence
  Synthetic oligonucleotide: PDCD1-863
ggaugaggugcccauuccgc

SEQ ID NO: 1426 - RNA, 20 nt, Artificial Sequence
  Synthetic oligonucleotide: PDCD1-864
ugagccccugcgggcggggg

SEQ ID NO: 1427 - RNA, 20 nt, Artificial Sequence
  Synthetic oligonucleotide: PDCD1-426
cagcugagccccugcgggcg

SEQ ID NO: 1428 - RNA, 20 nt, Artificial Sequence
  Synthetic oligonucleotide: PDCD1-427
ucagcugagccccugcgggc

SEQ ID NO: 1429 - RNA, 20 nt, Artificial Sequence
  Synthetic oligonucleotide: PDCD1-428
gucagcugagccccugcggg

SEQ ID NO: 1430 - RNA, 20 nt, Artificial Sequence
  Synthetic oligonucleotide: PDCD1-868
cgucagcugagccccugcgg

SEQ ID NO: 1431 - RNA, 20 nt, Artificial Sequence
  Synthetic oligonucleotide: PDCD1-869
gggccgucagcugagccccu

SEQ ID NO: 1432 - RNA, 20 nt, Artificial Sequence
  Synthetic oligonucleotide: PDCD1-870
ggcacuccgagggccgucag

SEQ ID NO: 1433 - RNA, 20 nt, Artificial Sequence
  Synthetic oligonucleotide: PDCD1-871
ccucaguggcugggcacucc

SEQ ID NO: 1434 - RNA, 20 nt, Artificial Sequence
  Synthetic oligonucleotide: PDCD1-872
ggccucaguggcugggcacu

SEQ ID NO: 1435 - RNA, 20 nt, Artificial Sequence
  Synthetic oligonucleotide: PDCD1-873
ccauccucaggccucagugg

SEQ ID NO: 1436 - RNA, 20 nt, Artificial Sequence
  Synthetic oligonucleotide: PDCD1-874
ggaagccggucagaggggcc

SEQ ID NO: 1437 - RNA, 20 nt, Artificial Sequence
  Synthetic oligonucleotide: PDCD1-439
uggccaaggaagccggucag

SEQ ID NO: 1438 - RNA, 20 nt, Artificial Sequence
  Synthetic oligonucleotide: PDCD1-876
guggccaaggaagccgguca

SEQ ID NO: 1439 - RNA, 20 nt, Artificial Sequence
  Synthetic oligonucleotide: PDCD1-877
ugguggccaaggaagccggu

SEQ ID NO: 1440 - RNA, 20 nt, Artificial Sequence
  Synthetic oligonucleotide: PDCD1-441
cugcagaacacugguggcca

SEQ ID NO: 1441 - RNA, 20 nt, Artificial Sequence
  Synthetic oligonucleotide: PDCD1-441
cugcagaacacugguggcca

SEQ ID NO: 1442 - RNA, 17 nt, Artificial Sequence
  Synthetic oligonucleotide: PDCD1-880
aggccgcaccugucacc

SEQ ID NO: 1443 - RNA, 17 nt, Artificial Sequence
  Synthetic oligonucleotide: PDCD1-881
gcacaaaggucaggggu

SEQ ID NO: 1444 - RNA, 17 nt, Artificial Sequence
  Synthetic oligonucleotide: PDCD1-445
ggaagggcacaaagguc

SEQ ID NO: 1445 - RNA, 17 nt, Artificial Sequence
  Synthetic oligonucleotide: PDCD1-883
uggaagggcacaaaggu

SEQ ID NO: 1446 - RNA, 17 nt, Artificial Sequence
  Synthetic oligonucleotide: PDCD1-884
ucugcccuucucucugg

SEQ ID NO: 1447 - RNA, 17 nt, Artificial Sequence
  Synthetic oligonucleotide: PDCD1-449
acuucugcccuucucuc

SEQ ID NO: 1448 - RNA, 17 nt, Artificial Sequence
  Synthetic oligonucleotide: PDCD1-886
cacuucugcccuucucu

SEQ ID NO: 1449 - RNA, 17 nt, Artificial Sequence
  Synthetic oligonucleotide: PDCD1-887
aggggcuggggugggcu

SEQ ID NO: 1450 - RNA, 17 nt, Artificial Sequence
  Synthetic oligonucleotide: PDCD1-888
cugggugaggggcuggg

SEQ ID NO: 1451 - RNA, 17 nt, Artificial Sequence
  Synthetic oligonucleotide: PDCD1-456
uggccugggugaggggc

SEQ ID NO: 1452 - RNA, 17 nt, Artificial Sequence
  Synthetic oligonucleotide: PDCD1-890
cuggccugggugagggg

SEQ ID NO: 1453 - RNA, 17 nt, Artificial Sequence
  Synthetic oligonucleotide: PDCD1-459
gccggcuggccugggug

SEQ ID NO: 1454 - RNA, 17 nt, Artificial Sequence
  Synthetic oligonucleotide: PDCD1-892
ggccggcuggccugggu

SEQ ID NO: 1455 - RNA, 17 nt, Artificial Sequence
  Synthetic oligonucleotide: PDCD1-893
cuggccggcuggccugg

SEQ ID NO: 1456 - RNA, 17 nt, Artificial Sequence
  Synthetic oligonucleotide: PDCD1-894
ggaacuggccggcuggc

SEQ ID NO: 1457 - RNA, 17 nt, Artificial Sequence
  Synthetic oligonucleotide: PDCD1-465
caccaaccaccaggguu

SEQ ID NO: 1458 - RNA, 17 nt, Artificial Sequence
  Synthetic oligonucleotide: PDCD1-896
acaccaaccaccagggu

SEQ ID NO: 1459 - RNA, 17 nt, Artificial Sequence
  Synthetic oligonucleotide: PDCD1-897
cccacgacaccaaccac

SEQ ID NO: 1460 - RNA, 17 nt, Artificial Sequence
  Synthetic oligonucleotide: PDCD1-898
cgggagcagaugacggc

SEQ ID NO: 1461 - RNA, 17 nt, Artificial Sequence
  Synthetic oligonucleotide: PDCD1-472
guuaccucgugcggccc

SEQ ID NO: 1462 - RNA, 17 nt, Artificial Sequence
  Synthetic oligonucleotide: PDCD1-473
cguuaccucgugcggcc

SEQ ID NO: 1463 - RNA, 17 nt, Artificial Sequence
  Synthetic oligonucleotide: PDCD1-901
acguuaccucgugcggc

SEQ ID NO: 1464 - RNA, 17 nt, Artificial Sequence
  Synthetic oligonucleotide: PDCD1-478
cugcagagaaacacacu

SEQ ID NO: 1465 - RNA, 17 nt, Artificial Sequence
  Synthetic oligonucleotide: PDCD1-903
ccugcagagaaacacac

SEQ ID NO: 1466 - RNA, 17 nt, Artificial Sequence
  Synthetic oligonucleotide: PDCD1-904
cuccuauugucccugca

SEQ ID NO: 1467 - RNA, 17 nt, Artificial Sequence
  Synthetic oligonucleotide: PDCD1-905
ggcuccuauugucccug

SEQ ID NO: 1468 - RNA, 17 nt, Artificial Sequence
  Synthetic oligonucleotide: PDCD1-484
aaagagugagacucacc

SEQ ID NO: 1469 - RNA, 17 nt, Artificial Sequence
  Synthetic oligonucleotide: PDCD1-907
aaaagagugagacucac

SEQ ID NO: 1470 - RNA, 17 nt, Artificial Sequence
  Synthetic oligonucleotide: PDCD1-485
uugaggagaaagggaga

SEQ ID NO: 1471 - RNA, 17 nt, Artificial Sequence
  Synthetic oligonucleotide: PDCD1-486
uuugaggagaaagggag

SEQ ID NO: 1472 - RNA, 17 nt, Artificial Sequence
  Synthetic oligonucleotide: PDCD1-910
cuuugaggagaaaggga

SEQ ID NO: 1473 - RNA, 17 nt, Artificial Sequence
  Synthetic oligonucleotide: PDCD1-911
uucuuugaggagaaagg

SEQ ID NO: 1474 - RNA, 17 nt, Artificial Sequence
  Synthetic oligonucleotide: PDCD1-487
ccuucuuugaggagaaa

SEQ ID NO: 1475 - RNA, 17 nt, Artificial Sequence
  Synthetic oligonucleotide: PDCD1-488
uccuucuuugaggagaa

SEQ ID NO: 1476 - RNA, 17 nt, Artificial Sequence
  Synthetic oligonucleotide: PDCD1-914
cuccuucuuugaggaga

SEQ ID NO: 1477 - RNA, 17 nt, Artificial Sequence
  Synthetic oligonucleotide: PDCD1-915
gguccuccuucuuugag

SEQ ID NO: 1478 - RNA, 17 nt, Artificial Sequence
  Synthetic oligonucleotide: PDCD1-489
gggguccuccuucuuug

SEQ ID NO: 1479 - RNA, 17 nt, Artificial Sequence
  Synthetic oligonucleotide: PDCD1-917
agggguccuccuucuuu

SEQ ID NO: 1480 - RNA, 17 nt, Artificial Sequence
  Synthetic oligonucleotide: PDCD1-918
ugagggguccuccuucu

SEQ ID NO: 1481 - RNA, 17 nt, Artificial Sequence
  Synthetic oligonucleotide: PDCD1-492
gaacacaggcacggcug

SEQ ID NO: 1482 - RNA, 17 nt, Artificial Sequence
  Synthetic oligonucleotide: PDCD1-920
agaacacaggcacggcu

SEQ ID NO: 1483 - RNA, 17 nt, Artificial Sequence
  Synthetic oligonucleotide: PDCD1-921
agagaacacaggcacgg

SEQ ID NO: 1484 - RNA, 17 nt, Artificial Sequence
  Synthetic oligonucleotide: PDCD1-922
gcuccccauaguccaca

SEQ ID NO: 1485 - RNA, 17 nt, Artificial Sequence
  Synthetic oligonucleotide: PDCD1-923
cagcuccccauagucca

SEQ ID NO: 1486 - RNA, 17 nt, Artificial Sequence
  Synthetic oligonucleotide: PDCD1-495
gggucuucucucgccac

SEQ ID NO: 1487 - RNA, 17 nt, Artificial Sequence
  Synthetic oligonucleotide: PDCD1-925
ggggucuucucucgcca

SEQ ID NO: 1488 - RNA, 17 nt, Artificial Sequence
  Synthetic oligonucleotide: PDCD1-498
cagggcacggggggcuc

SEQ ID NO: 1489 - RNA, 17 nt, Artificial Sequence
  Synthetic oligonucleotide: PDCD1-927
acagggcacggggggcu

SEQ ID NO: 1490 - RNA, 17 nt, Artificial Sequence
  Synthetic oligonucleotide: PDCD1-501
cagggacacagggcacg

SEQ ID NO: 1491 - RNA, 17 nt, Artificial Sequence
  Synthetic oligonucleotide: PDCD1-502
ucagggacacagggcac

SEQ ID NO: 1492 - RNA, 17 nt, Artificial Sequence
  Synthetic oligonucleotide: PDCD1-503
cucagggacacagggca

SEQ ID NO: 1493 - RNA, 17 nt, Artificial Sequence
  Synthetic oligonucleotide: PDCD1-931
gcucagggacacagggc

SEQ ID NO: 1494 - RNA, 17 nt, Artificial Sequence
  Synthetic oligonucleotide: PDCD1-932
ccgucugcucagggaca

SEQ ID NO: 1495 - RNA, 17 nt, Artificial Sequence
  Synthetic oligonucleotide: PDCD1-507
gcauacuccgucugcuc

SEQ ID NO: 1496 - RNA, 17 nt, Artificial Sequence
  Synthetic oligonucleotide: PDCD1-934
ggcauacuccgucugcu

SEQ ID NO: 1497 - RNA, 17 nt, Artificial Sequence
  Synthetic oligonucleotide: PDCD1-510
gaggugcccauuccgcu

SEQ ID NO: 1498 - RNA, 17 nt, Artificial Sequence
  Synthetic oligonucleotide: PDCD1-936
ugaggugcccauuccgc

SEQ ID NO: 1499 - RNA, 17 nt, Artificial Sequence
  Synthetic oligonucleotide: PDCD1-937
gccccugcgggcggggg

SEQ ID NO: 1500 - RNA, 17 nt, Artificial Sequence
  Synthetic oligonucleotide: PDCD1-513
cugagccccugcgggcg

SEQ ID NO: 1501 - RNA, 17 nt, Artificial Sequence
  Synthetic oligonucleotide: PDCD1-514
gcugagccccugcgggc

SEQ ID NO: 1502 - RNA, 17 nt, Artificial Sequence
  Synthetic oligonucleotide: PDCD1-515
agcugagccccugcggg

SEQ ID NO: 1503 - RNA, 17 nt, Artificial Sequence
  Synthetic oligonucleotide: PDCD1-941
cagcugagccccugcgg

SEQ ID NO: 1504 - RNA, 17 nt, Artificial Sequence
  Synthetic oligonucleotide: PDCD1-942
ccgucagcugagccccu

SEQ ID NO: 1505 - RNA, 17 nt, Artificial Sequence
  Synthetic oligonucleotide: PDCD1-943
acuccgagggccgucag

SEQ ID NO: 1506 - RNA, 17 nt, Artificial Sequence
  Synthetic oligonucleotide: PDCD1-944
caguggcugggcacucc

SEQ ID NO: 1507 - RNA, 17 nt, Artificial Sequence
  Synthetic oligonucleotide: PDCD1-945
cucaguggcugggcacu

SEQ ID NO: 1508 - RNA, 17 nt, Artificial Sequence
  Synthetic oligonucleotide: PDCD1-946
uccucaggccucagugg

SEQ ID NO: 1509 - RNA, 17 nt, Artificial Sequence
  Synthetic oligonucleotide: PDCD1-947
agccggucagaggggcc

SEQ ID NO: 1510 - RNA, 17 nt, Artificial Sequence
  Synthetic oligonucleotide: PDCD1-526
ccaaggaagccggucag

SEQ ID NO: 1511 - RNA, 17 nt, Artificial Sequence
  Synthetic oligonucleotide: PDCD1-949
gccaaggaagccgguca

SEQ ID NO: 1512 - RNA, 17 nt, Artificial Sequence
  Synthetic oligonucleotide: PDCD1-950
uggccaaggaagccggu

SEQ ID NO: 1513 - RNA, 17 nt, Artificial Sequence
  Synthetic oligonucleotide: PDCD1-528
cagaacacugguggcca

SEQ ID NO: 1514 - RNA, 17 nt, Artificial Sequence
  Synthetic oligonucleotide: PDCD1-952
gcagaacacugguggcc

SEQ ID NO: 1515 - RNA, 20 nt, Artificial Sequence
  Synthetic oligonucleotide: PDCD1-953
uucucuguggacuaugggga

SEQ ID NO: 1516 - RNA, 17 nt, Artificial Sequence
  Synthetic oligonucleotide: PDCD1-954
ucuguggacuaugggga

SEQ ID NO: 1517 - RNA, 20 nt, Artificial Sequence
  Synthetic oligonucleotide: PDCD1-2092
gccccaaggaccggcugaga

SEQ ID NO: 1518 - RNA, 20 nt, Artificial Sequence
  Synthetic oligonucleotide: PDCD1-108
gucugggcggugcuacaacu

SEQ ID NO: 1519 - RNA, 20 nt, Artificial Sequence
  Synthetic oligonucleotide: PDCD1-109
gggcggugcuacaacugggc

SEQ ID NO: 1520 - RNA, 20 nt, Artificial Sequence
  Synthetic oligonucleotide: PDCD1-2219
gcguguuucuguagaaugac

SEQ ID NO: 1521 - RNA, 17 nt, Artificial Sequence
  Synthetic oligonucleotide: PDCD1-251
gcccagacgacuggcca

SEQ ID NO: 1522 - RNA, 17 nt, Artificial Sequence
  Synthetic oligonucleotide: PDCD1-2513
gggcagcucgaacuccu

SEQ ID NO: 1523 - RNA, 17 nt, Artificial Sequence
  Synthetic oligonucleotide: PDCD1-2653
gggcgggauauggaaag

SEQ ID NO: 1524 - RNA, 20 nt, Artificial Sequence
  Synthetic oligonucleotide: PDCD1-2086
acuccccacggccaagguuu

SEQ ID NO: 1525 - RNA, 20 nt, Artificial Sequence
  Synthetic oligonucleotide: PDCD1-2087
cuccccacggccaagguuug

SEQ ID NO: 1526 - RNA, 20 nt, Artificial Sequence
  Synthetic oligonucleotide: PDCD1-2093
ccccaaggaccggcugagag

SEQ ID NO: 1527 - RNA, 20 nt, Artificial Sequence
  Synthetic oligonucleotide: PDCD1-121
caccuaccuaagaaccaucc

SEQ ID NO: 1528 - RNA, 20 nt, Artificial Sequence
  Synthetic oligonucleotide: PDCD1-122
uguagcaccgcccagacgac

SEQ ID NO: 1529 - RNA, 20 nt, Artificial Sequence
  Synthetic oligonucleotide: PDCD1-123
caccgcccagacgacuggcc

SEQ ID NO: 1530 - RNA, 20 nt, Artificial Sequence
  Synthetic oligonucleotide: PDCD1-124
accgcccagacgacuggcca

SEQ ID NO: 1531 - RNA, 20 nt, Artificial Sequence
  Synthetic oligonucleotide: PDCD1-126
cgacuggccagggcgccugu

SEQ ID NO: 1532 - RNA, 20 nt, Artificial Sequence
  Synthetic oligonucleotide: PDCD1-104
aggcgcccuggccagucguc

SEQ ID NO: 1533 - RNA, 20 nt, Artificial Sequence
  Synthetic oligonucleotide: PDCD1-107
cgucugggcggugcuacaac

SEQ ID NO: 1534 - RNA, 20 nt, Artificial Sequence
  Synthetic oligonucleotide: PDCD1-111
cuacaacugggcuggcggcc

SEQ ID NO: 1535 - RNA, 20 nt, Artificial Sequence
  Synthetic oligonucleotide: PDCD1-113
uggcggccaggaugguucuu

SEQ ID NO: 1536 - RNA, 20 nt, Artificial Sequence
  Synthetic oligonucleotide: PDCD1-2206
uuugggcagcucgaacuccu

SEQ ID NO: 1537 - RNA, 20 nt, Artificial Sequence
  Synthetic oligonucleotide: PDCD1-2207
cgaacuccuggguuccucuc

SEQ ID NO: 1538 - RNA, 20 nt, Artificial Sequence
  Synthetic oligonucleotide: PDCD1-2220
uuucuguagaaugacggguc

SEQ ID NO: 1539 - RNA, 20 nt, Artificial Sequence
  Synthetic oligonucleotide: PDCD1-2221
uguagaaugacgggucaggc

SEQ ID NO: 1540 - RNA, 20 nt, Artificial Sequence
  Synthetic oligonucleotide: PDCD1-2223
agaaccccaaaccuuggccg

SEQ ID NO: 1541 - RNA, 20 nt, Artificial Sequence
  Synthetic oligonucleotide: PDCD1-2346
cucgggcgggauauggaaag

SEQ ID NO: 1542 - RNA, 20 nt, Artificial Sequence
  Synthetic oligonucleotide: PDCD1-2361
acccccacgggguagggcgu

SEQ ID NO: 1543 - RNA, 20 nt, Artificial Sequence
  Synthetic oligonucleotide: PDCD1-2366
cucugucacucucgcccacg

SEQ ID NO: 1544 - RNA, 20 nt, Artificial Sequence
  Synthetic oligonucleotide: PDCD1-2367
cacucucgcccacguggaug

SEQ ID NO: 1545 - RNA, 17 nt, Artificial Sequence
  Synthetic oligonucleotide: PDCD1-2393
ccccacggccaagguuu

SEQ ID NO: 1546 - RNA, 17 nt, Artificial Sequence
  Synthetic oligonucleotide: PDCD1-2394
cccacggccaagguuug

SEQ ID NO: 1547 - RNA, 17 nt, Artificial Sequence
  Synthetic oligonucleotide: PDCD1-2399
ccaaggaccggcugaga

SEQ ID NO: 1548 - RNA, 17 nt, Artificial Sequence
  Synthetic oligonucleotide: PDCD1-2400
caaggaccggcugagag

SEQ ID NO: 1549 - RNA, 17 nt, Artificial Sequence
  Synthetic oligonucleotide: PDCD1-248
cuaccuaagaaccaucc

SEQ ID NO: 1550 - RNA, 17 nt, Artificial Sequence
  Synthetic oligonucleotide: PDCD1-249
agcaccgcccagacgac

SEQ ID NO: 1551 - RNA, 17 nt, Artificial Sequence
  Synthetic oligonucleotide: PDCD1-250
cgcccagacgacuggcc

SEQ ID NO: 1552 - RNA, 17 nt, Artificial Sequence
  Synthetic oligonucleotide: PDCD1-253
cuggccagggcgccugu

SEQ ID NO: 1553 - RNA, 17 nt, Artificial Sequence
  Synthetic oligonucleotide: PDCD1-231
cgcccuggccagucguc

SEQ ID NO: 1554 - RNA, 17 nt, Artificial Sequence
  Synthetic oligonucleotide: PDCD1-234
cugggcggugcuacaac

SEQ ID NO: 1555 - RNA, 17 nt, Artificial Sequence
  Synthetic oligonucleotide: PDCD1-235
ugggcggugcuacaacu

SEQ ID NO: 1556 - RNA, 17 nt, Artificial Sequence
  Synthetic oligonucleotide: PDCD1-236
cggugcuacaacugggc

SEQ ID NO: 1557 - RNA, 17 nt, Artificial Sequence
  Synthetic oligonucleotide: PDCD1-238
caacugggcuggcggcc

SEQ ID NO: 1558 - RNA, 17 nt, Artificial Sequence
  Synthetic oligonucleotide: PDCD1-240
cggccaggaugguucuu

SEQ ID NO: 1559 - RNA, 17 nt, Artificial Sequence
  Synthetic oligonucleotide: PDCD1-2514
acuccuggguuccucuc

SEQ ID NO: 1560 - RNA, 17 nt, Artificial Sequence
  Synthetic oligonucleotide: PDCD1-2526
uguuucuguagaaugac

SEQ ID NO: 1561 - RNA, 17 nt, Artificial Sequence
  Synthetic oligonucleotide: PDCD1-2527
cuguagaaugacggguc

SEQ ID NO: 1562 - RNA, 17 nt, Artificial Sequence
  Synthetic oligonucleotide: PDCD1-2528
agaaugacgggucaggc

SEQ ID NO: 1563 - RNA, 17 nt, Artificial Sequence
  Synthetic oligonucleotide: PDCD1-2530
accccaaaccuuggccg

SEQ ID NO: 1564 - RNA, 17 nt, Artificial Sequence
  Synthetic oligonucleotide: PDCD1-2668
cccacgggguagggcgu

SEQ ID NO: 1565 - RNA, 17 nt, Artificial Sequence
  Synthetic oligonucleotide: PDCD1-2673
ugucacucucgcccacg

SEQ ID NO: 1566 - RNA, 17 nt, Artificial Sequence
  Synthetic oligonucleotide: PDCD1-2674
ucucgcccacguggaug

SEQ ID NO: 1567 - RNA, 20 nt, Artificial Sequence
  Synthetic oligonucleotide: PDCD1-2083
gccgccacgcagacucccca

SEQ ID NO: 1568 - RNA, 20 nt, Artificial Sequence
  Synthetic oligonucleotide: PDCD1-2085
gacuccccacggccaagguu

SEQ ID NO: 1569 - RNA, 20 nt, Artificial Sequence
  Synthetic oligonucleotide: PDCD1-2094
gaccggcugagaggggacag

SEQ ID NO: 1570 - RNA, 20 nt, Artificial Sequence
  Synthetic oligonucleotide: PDCD1-2095
gacagagguccugccugccc

SEQ ID NO: 1571 - RNA, 20 nt, Artificial Sequence
  Synthetic oligonucleotide: PDCD1-2098
gccugcccaggagcaaagag

SEQ ID NO: 1572 - RNA, 20 nt, Artificial Sequence
  Synthetic oligonucleotide: PDCD1-2101
gcaaagaggggacuugggcc

SEQ ID NO: 1573 - RNA, 20 nt, Artificial Sequence
  Synthetic oligonucleotide: PDCD1-2104
gaggggacuugggccagggg

SEQ ID NO: 1574 - RNA, 20 nt, Artificial Sequence
  Synthetic oligonucleotide: PDCD1-2108
ggaggaguuggggcccagag

SEQ ID NO: 1575 - RNA, 20 nt, Artificial Sequence
  Synthetic oligonucleotide: PDCD1-2111
gcccaaagccacacagcuca

SEQ ID NO: 1576 - RNA, 20 nt, Artificial Sequence
  Synthetic oligonucleotide: PDCD1-2114
gccacacagcucaggguaag

SEQ ID NO: 1577 - RNA, 20 nt, Artificial Sequence
  Synthetic oligonucleotide: PDCD1-2120
gcagagcugggggccaaggc

SEQ ID NO: 1578 - RNA, 20 nt, Artificial Sequence
  Synthetic oligonucleotide: PDCD1-2136
gaccugccagggacugaggg

SEQ ID NO: 1579 - RNA, 20 nt, Artificial Sequence
  Synthetic oligonucleotide: PDCD1-2138
ggaaggucccuccagacccc

SEQ ID NO: 1580 - RNA, 20 nt, Artificial Sequence
  Synthetic oligonucleotide: PDCD1-105
ggcgcccuggccagucgucu

SEQ ID NO: 1581 - RNA, 20 nt, Artificial Sequence
  Synthetic oligonucleotide: PDCD1-106
gcccuggccagucgucuggg

SEQ ID NO: 1582 - RNA, 20 nt, Artificial Sequence
  Synthetic oligonucleotide: PDCD1-114
ggccaggaugguucuuaggu

SEQ ID NO: 1583 - RNA, 20 nt, Artificial Sequence
  Synthetic oligonucleotide: PDCD1-117
ggaugguucuuagguaggug

SEQ ID NO: 1584 - RNA, 20 nt, Artificial Sequence
  Synthetic oligonucleotide: PDCD1-118
gguucuuagguagguggggu

SEQ ID NO: 1585 - RNA, 20 nt, Artificial Sequence
  Synthetic oligonucleotide: PDCD1-120
gguagguggggucggcgguc

SEQ ID NO: 1586 - RNA, 20 nt, Artificial Sequence
  Synthetic oligonucleotide: PDCD1-2165
ggucaggugucccagagcca

SEQ ID NO: 1587 - RNA, 20 nt, Artificial Sequence
  Synthetic oligonucleotide: PDCD1-2166
gucaggugucccagagccag

SEQ ID NO: 1588 - RNA, 20 nt, Artificial Sequence
  Synthetic oligonucleotide: PDCD1-2167
gugucccagagccagggguc

SEQ ID NO: 1589 - RNA, 20 nt, Artificial Sequence
  Synthetic oligonucleotide: PDCD1-2170
gaccuuccacccucaguccc

SEQ ID NO: 1590 - RNA, 20 nt, Artificial Sequence
  Synthetic oligonucleotide: PDCD1-2180
ggggggugcugaggcgggcc

SEQ ID NO: 1591 - RNA, 20 nt, Artificial Sequence
  Synthetic oligonucleotide: PDCD1-2182
gggccuggcccuggcagccc

SEQ ID NO: 1592 - RNA, 20 nt, Artificial Sequence
  Synthetic oligonucleotide: PDCD1-2183
ggccuggcccuggcagccca

SEQ ID NO: 1593 - RNA, 20 nt, Artificial Sequence
  Synthetic oligonucleotide: PDCD1-2184
gccuggcccuggcagcccag

SEQ ID NO: 1594 - RNA, 20 nt, Artificial Sequence
  Synthetic oligonucleotide: PDCD1-2187
gcccaggggucccggagcga

SEQ ID NO: 1595 - RNA, 20 nt, Artificial Sequence
  Synthetic oligonucleotide: PDCD1-2189
gggucccggagcgagggguc

SEQ ID NO: 1596 - RNA, 20 nt, Artificial Sequence
  Synthetic oligonucleotide: PDCD1-2192
gaccuuucacucucaguccc

SEQ ID NO: 1597 - RNA, 20 nt, Artificial Sequence
  Synthetic oligonucleotide: PDCD1-2202
gccccuuacccugagcugug

SEQ ID NO: 1598 - RNA, 20 nt, Artificial Sequence
  Synthetic oligonucleotide: PDCD1-2208
gaacuccuggguuccucucu

SEQ ID NO: 1599 - RNA, 20 nt, Artificial Sequence
  Synthetic oligonucleotide: PDCD1-2214
gaccucuguccccucucagc

SEQ ID NO: 1600 - RNA, 20 nt, Artificial Sequence
  Synthetic oligonucleotide: PDCD1-2215
guccccucucagccgguccu

SEQ ID NO: 1601 - RNA, 20 nt, Artificial Sequence
  Synthetic oligonucleotide: PDCD1-2224
gaaccccaaaccuuggccgu

SEQ ID NO: 1602 - RNA, 20 nt, Artificial Sequence
  Synthetic oligonucleotide: PDCD1-2227
gccguggggagucugcgugg

SEQ ID NO: 1603 - RNA, 20 nt, Artificial Sequence
  Synthetic oligonucleotide: PDCD1-2243
gagagugacagaggcagugc

SEQ ID NO: 1604 - RNA, 20 nt, Artificial Sequence
  Synthetic oligonucleotide: PDCD1-2245
gagugacagaggcagugcug

SEQ ID NO: 1605 - RNA, 20 nt, Artificial Sequence
  Synthetic oligonucleotide: PDCD1-2247
gacagaggcagugcuggggg

SEQ ID NO: 1606 - RNA, 20 nt, Artificial Sequence
  Synthetic oligonucleotide: PDCD1-2249
gaggcagugcugggggagga

SEQ ID NO: 1607 - RNA, 20 nt, Artificial Sequence
  Synthetic oligonucleotide: PDCD1-2251
gugcugggggaggaggggug

SEQ ID NO: 1608 - RNA, 20 nt, Artificial Sequence
  Synthetic oligonucleotide: PDCD1-2254
gggggaggaggggugaggag

SEQ ID NO: 1609 - RNA, 20 nt, Artificial Sequence
  Synthetic oligonucleotide: PDCD1-2255
ggggaggaggggugaggagg

SEQ ID NO: 1610 - RNA, 20 nt, Artificial Sequence
  Synthetic oligonucleotide: PDCD1-2257
gggugaggaggggguaggac

SEQ ID NO: 1611 - RNA, 20 nt, Artificial Sequence
  Synthetic oligonucleotide: PDCD1-2258
ggugaggaggggguaggacu

SEQ ID NO: 1612 - RNA, 20 nt, Artificial Sequence
  Synthetic oligonucleotide: PDCD1-2259
gugaggaggggguaggacug

SEQ ID NO: 1613 - RNA, 20 nt, Artificial Sequence
  Synthetic oligonucleotide: PDCD1-2260
gaggggguaggacuggggag

SEQ ID NO: 1614 - RNA, 20 nt, Artificial Sequence
  Synthetic oligonucleotide: PDCD1-2262
ggguaggacuggggagaggg

SEQ ID NO: 1615 - RNA, 20 nt, Artificial Sequence
  Synthetic oligonucleotide: PDCD1-2263
gguaggacuggggagagggu

SEQ ID NO: 1616 - RNA, 20 nt, Artificial Sequence
  Synthetic oligonucleotide: PDCD1-2264
guaggacuggggagagggug

SEQ ID NO: 1617 - RNA, 20 nt, Artificial Sequence
  Synthetic oligonucleotide: PDCD1-2266
gacuggggagaggguggggg

SEQ ID NO: 1618 - RNA, 20 nt, Artificial Sequence
  Synthetic oligonucleotide: PDCD1-2269
gggagagagagacagagaca

SEQ ID NO: 1619 - RNA, 20 nt, Artificial Sequence
  Synthetic oligonucleotide: PDCD1-2272
gacagggagacagaggagau

SEQ ID NO: 1620 - RNA, 20 nt, Artificial Sequence
  Synthetic oligonucleotide: PDCD1-2274
gggagacagaggagaugggg

SEQ ID NO: 1621 - RNA, 20 nt, Artificial Sequence
  Synthetic oligonucleotide: PDCD1-2279
ggcccccacgcccuaccccg

SEQ ID NO: 1622 - RNA, 20 nt, Artificial Sequence
  Synthetic oligonucleotide: PDCD1-2280
gcccccacgcccuaccccgu

SEQ ID NO: 1623 - RNA, 20 nt, Artificial Sequence
  Synthetic oligonucleotide: PDCD1-2284
gugggggucuccccagcuca

SEQ ID NO: 1624 - RNA, 20 nt, Artificial Sequence
  Synthetic oligonucleotide: PDCD1-2287
gcugccccuccugaggcugc

SEQ ID NO: 1625 - RNA, 20 nt, Artificial Sequence
  Synthetic oligonucleotide: PDCD1-2300
gggggccgggccucccugcc

SEQ ID NO: 1626 - RNA, 20 nt, Artificial Sequence
  Synthetic oligonucleotide: PDCD1-2301
ggggccgggccucccugccu

SEQ ID NO: 1627 - RNA, 20 nt, Artificial Sequence
  Synthetic oligonucleotide: PDCD1-2302
gggccgggccucccugccug

SEQ ID NO: 1628 - RNA, 20 nt, Artificial Sequence
  Synthetic oligonucleotide: PDCD1-2304
gccucccugccuggggaagg

SEQ ID NO: 1629 - RNA, 20 nt, Artificial Sequence
  Synthetic oligonucleotide: PDCD1-2307
ggaagguggguggcccccuc

SEQ ID NO: 1630 - RNA, 20 nt, Artificial Sequence
  Synthetic oligonucleotide: PDCD1-2308
gaagguggguggcccccucu

SEQ ID NO: 1631 - RNA, 20 nt, Artificial Sequence
  Synthetic oligonucleotide: PDCD1-2309
ggguggcccccucugggcuc

SEQ ID NO: 1632 - RNA, 20 nt, Artificial Sequence
  Synthetic oligonucleotide: PDCD1-2312
gcccaggaaccugagcccag

SEQ ID NO: 1633 - RNA, 20 nt, Artificial Sequence
  Synthetic oligonucleotide: PDCD1-2316
gggggccacccaccuucccc

SEQ ID NO: 1634 - RNA, 20 nt, Artificial Sequence
  Synthetic oligonucleotide: PDCD1-2317
gccacccaccuuccccaggc

SEQ ID NO: 1635 - RNA, 20 nt, Artificial Sequence
  Synthetic oligonucleotide: PDCD1-2321
ggcagggaggcccggccccc

SEQ ID NO: 1636 - RNA, 20 nt, Artificial Sequence
  Synthetic oligonucleotide: PDCD1-2322
gcagggaggcccggccccca

SEQ ID NO: 1637 - RNA, 20 nt, Artificial Sequence
  Synthetic oligonucleotide: PDCD1-2324
ggcccggcccccagggagau

SEQ ID NO: 1638 - RNA, 20 nt, Artificial Sequence
  Synthetic oligonucleotide: PDCD1-2325
gcccggcccccagggagaug

SEQ ID NO: 1639 - RNA, 20 nt, Artificial Sequence
  Synthetic oligonucleotide: PDCD1-2333
ggagaugggggggauggggg

SEQ ID NO: 1640 - RNA, 20 nt, Artificial Sequence
  Synthetic oligonucleotide: PDCD1-2334
gggggggaugggggaggaga

SEQ ID NO: 1641 - RNA, 20 nt, Artificial Sequence
  Synthetic oligonucleotide: PDCD1-2335
ggggggaugggggaggagaa

SEQ ID NO: 1642 - RNA, 20 nt, Artificial Sequence
  Synthetic oligonucleotide: PDCD1-2336
gagaagggccugcccccacc

SEQ ID NO: 1643 - RNA, 20 nt, Artificial Sequence
  Synthetic oligonucleotide: PDCD1-2345
ggggcagcucgggcgggaua

SEQ ID NO: 1644 - RNA, 20 nt, Artificial Sequence
  Synthetic oligonucleotide: PDCD1-2350
gcagagacacagaggaggaa

SEQ ID NO: 1645 - RNA, 20 nt, Artificial Sequence
  Synthetic oligonucleotide: PDCD1-2353
ggaggaaggggcccugagcu

SEQ ID NO: 1646 - RNA, 20 nt, Artificial Sequence
  Synthetic oligonucleotide: PDCD1-2354
gaggaaggggcccugagcug

SEQ ID NO: 1647 - RNA, 20 nt, Artificial Sequence
  Synthetic oligonucleotide: PDCD1-2357
gagcuggggagacccccacg

SEQ ID NO: 1648 - RNA, 20 nt, Artificial Sequence
  Synthetic oligonucleotide: PDCD1-2359
ggggagacccccacggggua

SEQ ID NO: 1649 - RNA, 20 nt, Artificial Sequence
  Synthetic oligonucleotide: PDCD1-2360
gacccccacgggguagggcg

SEQ ID NO: 1650 - RNA, 20 nt, Artificial Sequence
  Synthetic oligonucleotide: PDCD1-2364
gggguagggcgugggggcca

SEQ ID NO: 1651 - RNA, 20 nt, Artificial Sequence
  Synthetic oligonucleotide: PDCD1-2365
ggguagggcgugggggccac

SEQ ID NO: 1652 - RNA, 20 nt, Artificial Sequence
  Synthetic oligonucleotide: PDCD1-2373
ggauguggaggaagaggggg

SEQ ID NO: 1653 - RNA, 20 nt, Artificial Sequence
  Synthetic oligonucleotide: PDCD1-2374
gauguggaggaagagggggc

SEQ ID NO: 1654 - RNA, 20 nt, Artificial Sequence
  Synthetic oligonucleotide: PDCD1-2376
ggaagagggggcgggagcaa

SEQ ID NO: 1655 - RNA, 20 nt, Artificial Sequence
  Synthetic oligonucleotide: PDCD1-2377
gaagagggggcgggagcaag

SEQ ID NO: 1656 - RNA, 20 nt, Artificial Sequence
  Synthetic oligonucleotide: PDCD1-2378
gagggggcgggagcaagggg

SEQ ID NO: 1657 - RNA, 20 nt, Artificial Sequence
  Synthetic oligonucleotide: PDCD1-2382
gcucaccuccgccugagcag

SEQ ID NO: 1658 - RNA, 20 nt, Artificial Sequence
  Synthetic oligonucleotide: PDCD1-2387
ggagaaggcggcacucuggu

SEQ ID NO: 1659 - RNA, 20 nt, Artificial Sequence
  Synthetic oligonucleotide: PDCD1-2388
gagaaggcggcacucuggug

SEQ ID NO: 1660 - RNA, 17 nt, Artificial Sequence
  Synthetic oligonucleotide: PDCD1-2390
gccacgcagacucccca

SEQ ID NO: 1661 - RNA, 17 nt, Artificial Sequence
  Synthetic oligonucleotide: PDCD1-2395
gccaagguuugggguuc

SEQ ID NO: 1662 - RNA, 17 nt, Artificial Sequence
  Synthetic oligonucleotide: PDCD1-2406
ggagcaaagaggggacu

SEQ ID NO: 1663 - RNA, 17 nt, Artificial Sequence
  Synthetic oligonucleotide: PDCD1-2407
gagcaaagaggggacuu

SEQ ID NO: 1664 - RNA, 17 nt, Artificial Sequence
  Synthetic oligonucleotide: PDCD1-2410
gaggggacuugggccag

SEQ ID NO: 1665 - RNA, 17 nt, Artificial Sequence
  Synthetic oligonucleotide: PDCD1-2411
gggacuugggccagggg

SEQ ID NO: 1666 - RNA, 17 nt, Artificial Sequence
  Synthetic oligonucleotide: PDCD1-2413
gggccaggggaggaguu

SEQ ID NO: 1667 - RNA, 17 nt, Artificial Sequence
  Synthetic oligonucleotide: PDCD1-2414
ggccaggggaggaguug

SEQ ID NO: 1668 - RNA, 17 nt, Artificial Sequence
  Synthetic oligonucleotide: PDCD1-2415
ggaguuggggcccagag

SEQ ID NO: 1669 - RNA, 17 nt, Artificial Sequence
  Synthetic oligonucleotide: PDCD1-2416
ggcccagagaggaaccc

SEQ ID NO: 1670 - RNA, 17 nt, Artificial Sequence
  Synthetic oligonucleotide: PDCD1-2423
ggguaaggggcagagcu

SEQ ID NO: 1671 - RNA, 17 nt, Artificial Sequence
  Synthetic oligonucleotide: PDCD1-2424
gguaaggggcagagcug

SEQ ID NO: 1672 - RNA, 17 nt, Artificial Sequence
  Synthetic oligonucleotide: PDCD1-2425
guaaggggcagagcugg

SEQ ID NO: 1673 - RNA, 17 nt, Artificial Sequence
  Synthetic oligonucleotide: PDCD1-2426
ggcagagcugggggcca

SEQ ID NO: 1674 - RNA, 17 nt, Artificial Sequence
  Synthetic oligonucleotide: PDCD1-2427
gagcugggggccaaggc

SEQ ID NO: 1675 - RNA, 17 nt, Artificial Sequence
  Synthetic oligonucleotide: PDCD1-2429
gcaccccccgaccugcc

SEQ ID NO: 1676 - RNA, 17 nt, Artificial Sequence
  Synthetic oligonucleotide: PDCD1-2436
gggaccccugggcugcc

SEQ ID NO: 1677 - RNA, 17 nt, Artificial Sequence
  Synthetic oligonucleotide: PDCD1-2437
ggaccccugggcugcca

SEQ ID NO: 1678 - RNA, 17 nt, Artificial Sequence
  Synthetic oligonucleotide: PDCD1-2429
gcaccccccgaccugcc

SEQ ID NO: 1679 - RNA, 17 nt, Artificial Sequence
  Synthetic oligonucleotide: PDCD1-2442
gaccugccagggacuga

SEQ ID NO: 1680 - RNA, 17 nt, Artificial Sequence
  Synthetic oligonucleotide: PDCD1-232
gcccuggccagucgucu

SEQ ID NO: 1681 - RNA, 17 nt, Artificial Sequence
  Synthetic oligonucleotide: PDCD1-242
gaugguucuuagguagg

SEQ ID NO: 1682 - RNA, 17 nt, Artificial Sequence
  Synthetic oligonucleotide: PDCD1-2483
gucccuggcaggucggg

SEQ ID NO: 1683 - RNA, 17 nt, Artificial Sequence
  Synthetic oligonucleotide: PDCD1-2485
gucggggggugcugagg

SEQ ID NO: 1684 - RNA, 17 nt, Artificial Sequence
  Synthetic oligonucleotide: PDCD1-2487
gggugcugaggcgggcc

SEQ ID NO: 1685 - RNA, 17 nt, Artificial Sequence
  Synthetic oligonucleotide: PDCD1-2498
ggagcgaggggucugga

SEQ ID NO: 1686 - RNA, 17 nt, Artificial Sequence
  Synthetic oligonucleotide: PDCD1-2483
gucccuggcaggucggg

SEQ ID NO: 1687 - RNA, 17 nt, Artificial Sequence
  Synthetic oligonucleotide: PDCD1-2516
ggccccaacuccucccc

SEQ ID NO: 1688 - RNA, 17 nt, Artificial Sequence
  Synthetic oligonucleotide: PDCD1-2518
guccccucuuugcuccu

SEQ ID NO: 1689 - RNA, 17 nt, Artificial Sequence
  Synthetic oligonucleotide: PDCD1-2525
guguuucuguagaauga

SEQ ID NO: 1690 - RNA, 17 nt, Artificial Sequence
  Synthetic oligonucleotide: PDCD1-2529
gccagaaccccaaaccu

SEQ ID NO: 1691 - RNA, 17 nt, Artificial Sequence
  Synthetic oligonucleotide: PDCD1-2533
gccguggggagucugcg

SEQ ID NO: 1692 - RNA, 17 nt, Artificial Sequence
  Synthetic oligonucleotide: PDCD1-2534
guggggagucugcgugg

SEQ ID NO: 1693 - RNA, 17 nt, Artificial Sequence
  Synthetic oligonucleotide: PDCD1-2538
gcucaggcggaggugag

SEQ ID NO: 1694 - RNA, 17 nt, Artificial Sequence
  Synthetic oligonucleotide: PDCD1-2540
ggcggaggugagcggaa

SEQ ID NO: 1695 - RNA, 17 nt, Artificial Sequence
  Synthetic oligonucleotide: PDCD1-2541
ggaagggaaacuguccc

SEQ ID NO: 1696 - RNA, 17 nt, Artificial Sequence
  Synthetic oligonucleotide: PDCD1-2542
ggaaacugucccagguc

SEQ ID NO: 1697 - RNA, 17 nt, Artificial Sequence
  Synthetic oligonucleotide: PDCD1-2543
gucccaggucagguuga

SEQ ID NO: 1698 - RNA, 17 nt, Artificial Sequence
  Synthetic oligonucleotide: PDCD1-2549
gugggcgagagugacag

SEQ ID NO: 1699 - RNA, 17 nt, Artificial Sequence
  Synthetic oligonucleotide: PDCD1-2551
gugacagaggcagugcu

SEQ ID NO: 1700 - RNA, 17 nt, Artificial Sequence
  Synthetic oligonucleotide: PDCD1-2553
gacagaggcagugcugg

SEQ ID NO: 1701 - RNA, 17 nt, Artificial Sequence
  Synthetic oligonucleotide: PDCD1-2555
ggcagugcugggggagg

SEQ ID NO: 1702 - RNA, 17 nt, Artificial Sequence
  Synthetic oligonucleotide: PDCD1-2556
gcagugcugggggagga

SEQ ID NO: 1703 - RNA, 17 nt, Artificial Sequence
  Synthetic oligonucleotide: PDCD1-2559
ggggaggaggggugagg

SEQ ID NO: 1704 - RNA, 17 nt, Artificial Sequence
  Synthetic oligonucleotide: PDCD1-2560
gggaggaggggugagga

SEQ ID NO: 1705 - RNA, 17 nt, Artificial Sequence
  Synthetic oligonucleotide: PDCD1-2561
ggaggaggggugaggag

SEQ ID NO: 1706 - RNA, 17 nt, Artificial Sequence
  Synthetic oligonucleotide: PDCD1-2562
gaggaggggugaggagg

SEQ ID NO: 1707 - RNA, 17 nt, Artificial Sequence
  Synthetic oligonucleotide: PDCD1-2565
gaggaggggguaggacu

SEQ ID NO: 1708 - RNA, 17 nt, Artificial Sequence
  Synthetic oligonucleotide: PDCD1-2567
gggguaggacuggggag

SEQ ID NO: 1709 - RNA, 17 nt, Artificial Sequence
  Synthetic oligonucleotide: PDCD1-2568
ggguaggacuggggaga

SEQ ID NO: 1710 - RNA, 17 nt, Artificial Sequence
  Synthetic oligonucleotide: PDCD1-2571
ggacuggggagagggug

SEQ ID NO: 1711 - RNA, 17 nt, Artificial Sequence
  Synthetic oligonucleotide: PDCD1-2572
gacuggggagagggugg

SEQ ID NO: 1712 - RNA, 17 nt, Artificial Sequence
  Synthetic oligonucleotide: PDCD1-2574
ggggagaggguggggga

SEQ ID NO: 1713 - RNA, 17 nt, Artificial Sequence
  Synthetic oligonucleotide: PDCD1-2575
gagagagagacagagac

SEQ ID NO: 1714 - RNA, 17 nt, Artificial Sequence
  Synthetic oligonucleotide: PDCD1-2580
gggagacagaggagaug

SEQ ID NO: 1715 - RNA, 17 nt, Artificial Sequence
  Synthetic oligonucleotide: PDCD1-2584
ggagauggggaggaggu

SEQ ID NO: 1716 - RNA, 17 nt, Artificial Sequence
  Synthetic oligonucleotide: PDCD1-2585
gggaggaggugggcccg

SEQ ID NO: 1717 - RNA, 17 nt, Artificial Sequence
  Synthetic oligonucleotide: PDCD1-2590
gggggucuccccagcuc

SEQ ID NO: 1718 - RNA, 17 nt, Artificial Sequence
  Synthetic oligonucleotide: PDCD1-2591
ggggucuccccagcuca

SEQ ID NO: 1719 - RNA, 17 nt, Artificial Sequence
  Synthetic oligonucleotide: PDCD1-2592
gucucugcucacugcug

SEQ ID NO: 1720 - RNA, 17 nt, Artificial Sequence
  Synthetic oligonucleotide: PDCD1-2594
gccccuccugaggcugc

SEQ ID NO: 1721 - RNA, 17 nt, Artificial Sequence
  Synthetic oligonucleotide: PDCD1-2600
ggcugccgggugggggc

SEQ ID NO: 1722 - RNA, 17 nt, Artificial Sequence
  Synthetic oligonucleotide: PDCD1-2607
ggccgggccucccugcc

SEQ ID NO: 1723 - RNA, 17 nt, Artificial Sequence
  Synthetic oligonucleotide: PDCD1-2608
gccgggccucccugccu

SEQ ID NO: 1724 - RNA, 17 nt, Artificial Sequence
  Synthetic oligonucleotide: PDCD1-2610
gccucccugccugggga

SEQ ID NO: 1725 - RNA, 17 nt, Artificial Sequence
  Synthetic oligonucleotide: PDCD1-2615
gguggguggcccccucu

SEQ ID NO: 1726 - RNA, 17 nt, Artificial Sequence
  Synthetic oligonucleotide: PDCD1-2621
ggaaccugagcccagag

SEQ ID NO: 1727 - RNA, 17 nt, Artificial Sequence
  Synthetic oligonucleotide: PDCD1-2622
gaaccugagcccagagg

SEQ ID NO: 1728 - RNA, 17 nt, Artificial Sequence
  Synthetic oligonucleotide: PDCD1-2623
ggccacccaccuucccc

SEQ ID NO: 1729 - RNA, 17 nt, Artificial Sequence
  Synthetic oligonucleotide: PDCD1-2629
gggaggcccggccccca

SEQ ID NO: 1730 - RNA, 17 nt, Artificial Sequence
  Synthetic oligonucleotide: PDCD1-2633
ggcccccagggagaugg

SEQ ID NO: 1731 - RNA, 17 nt, Artificial Sequence
  Synthetic oligonucleotide: PDCD1-2634
gcccccagggagauggg

SEQ ID NO: 1732 - RNA, 17 nt, Artificial Sequence
  Synthetic oligonucleotide: PDCD1-2638
gggagaugggggggaug

SEQ ID NO: 1733 - RNA, 17 nt, Artificial Sequence
  Synthetic oligonucleotide: PDCD1-2639
ggagaugggggggaugg

SEQ ID NO: 1734 - RNA, 17 nt, Artificial Sequence
  Synthetic oligonucleotide: PDCD1-2640
gaugggggggauggggg

SEQ ID NO: 1735 - RNA, 17 nt, Artificial Sequence
  Synthetic oligonucleotide: PDCD1-2641
ggggaugggggaggaga

SEQ ID NO: 1736 - RNA, 17 nt, Artificial Sequence
  Synthetic oligonucleotide: PDCD1-2642
gggaugggggaggagaa

SEQ ID NO: 1737 - RNA, 17 nt, Artificial Sequence
  Synthetic oligonucleotide: PDCD1-2651
ggaggggcagcucgggc

SEQ ID NO: 1738 - RNA, 17 nt, Artificial Sequence
  Synthetic oligonucleotide: PDCD1-2652
gcagcucgggcgggaua

SEQ ID NO: 1739 - RNA, 17 nt, Artificial Sequence
  Synthetic oligonucleotide: PDCD1-2655
gagcagagacacagagg

SEQ ID NO: 1740 - RNA, 17 nt, Artificial Sequence
  Synthetic oligonucleotide: PDCD1-2657
gagacacagaggaggaa

SEQ ID NO: 1741 - RNA, 17 nt, Artificial Sequence
  Synthetic oligonucleotide: PDCD1-2660
ggaaggggcccugagcu

SEQ ID NO: 1742 - RNA, 17 nt, Artificial Sequence
  Synthetic oligonucleotide: PDCD1-2661
gaaggggcccugagcug

SEQ ID NO: 1743 - RNA, 17 nt, Artificial Sequence
  Synthetic oligonucleotide: PDCD1-2663
gcuggggagacccccac

SEQ ID NO: 1744 - RNA, 17 nt, Artificial Sequence
  Synthetic oligonucleotide: PDCD1-2665
ggagacccccacggggu

SEQ ID NO: 1745 - RNA, 17 nt, Artificial Sequence
  Synthetic oligonucleotide: PDCD1-2666
gagacccccacggggua

SEQ ID NO: 1746 - RNA, 17 nt, Artificial Sequence
  Synthetic oligonucleotide: PDCD1-2671
guagggcgugggggcca

SEQ ID NO: 1747 - RNA, 17 nt, Artificial Sequence
  Synthetic oligonucleotide: PDCD1-2677
guggauguggaggaaga

SEQ ID NO: 1748 - RNA, 17 nt, Artificial Sequence
  Synthetic oligonucleotide: PDCD1-2679
ggauguggaggaagagg

SEQ ID NO: 1749 - RNA, 17 nt, Artificial Sequence
  Synthetic oligonucleotide: PDCD1-2681
guggaggaagagggggc

SEQ ID NO: 1750 - RNA, 17 nt, Artificial Sequence
  Synthetic oligonucleotide: PDCD1-2684
gagggggcgggagcaag

SEQ ID NO: 1751 - RNA, 17 nt, Artificial Sequence
  Synthetic oligonucleotide: PDCD1-2685
ggggcgggagcaagggg

SEQ ID NO: 1752 - RNA, 17 nt, Artificial Sequence
  Synthetic oligonucleotide: PDCD1-2686
gggcgggagcaaggggc

SEQ ID NO: 1753 - RNA, 17 nt, Artificial Sequence
  Synthetic oligonucleotide: PDCD1-2694
gaaggcggcacucuggu

SEQ ID NO: 1754 - RNA, 20 nt, Artificial Sequence
  Synthetic oligonucleotide: PDCD1-2084
acgcagacuccccacggcca

SEQ ID NO: 1755 - RNA, 20 nt, Artificial Sequence
  Synthetic oligonucleotide: PDCD1-2088
acggccaagguuugggguuc

SEQ ID NO: 1756 - RNA, 20 nt, Artificial Sequence
  Synthetic oligonucleotide: PDCD1-2089
uacagaaacacgcagcccca

SEQ ID NO: 1757 - RNA, 20 nt, Artificial Sequence
  Synthetic oligonucleotide: PDCD1-2090
aaacacgcagccccaaggac

SEQ ID NO: 1758 - RNA, 20 nt, Artificial Sequence
  Synthetic oligonucleotide: PDCD1-2091
agccccaaggaccggcugag

SEQ ID NO: 1759 - RNA, 20 nt, Artificial Sequence
  Synthetic oligonucleotide: PDCD1-2096
cugccugcccaggagcaaag

SEQ ID NO: 1760 - RNA, 20 nt, Artificial Sequence
  Synthetic oligonucleotide: PDCD1-2097
ugccugcccaggagcaaaga

SEQ ID NO: 1761 - RNA, 20 nt, Artificial Sequence
  Synthetic oligonucleotide: PDCD1-2099
ccaggagcaaagaggggacu

SEQ ID NO: 1762 - RNA, 20 nt, Artificial Sequence
  Synthetic oligonucleotide: PDCD1-2100
caggagcaaagaggggacuu

SEQ ID NO: 1763 - RNA, 20 nt, Artificial Sequence
  Synthetic oligonucleotide: PDCD1-2102
caaagaggggacuugggcca

SEQ ID NO: 1764 - RNA, 20 nt, Artificial Sequence
  Synthetic oligonucleotide: PDCD1-2103
aaagaggggacuugggccag

SEQ ID NO: 1765 - RNA, 20 nt, Artificial Sequence
  Synthetic oligonucleotide: PDCD1-2105
acuugggccaggggaggagu

SEQ ID NO: 1766 - RNA, 20 nt, Artificial Sequence
  Synthetic oligonucleotide: PDCD1-2106
cuugggccaggggaggaguu

SEQ ID NO: 1767 - RNA, 20 nt, Artificial Sequence
  Synthetic oligonucleotide: PDCD1-2107
uugggccaggggaggaguug

SEQ ID NO: 1768 - RNA, 20 nt, Artificial Sequence
  Synthetic oligonucleotide: PDCD1-2109
uggggcccagagaggaaccc

SEQ ID NO: 1769 - RNA, 20 nt, Artificial Sequence
  Synthetic oligonucleotide: PDCD1-2110
ugcccaaagccacacagcuc

SEQ ID NO: 1770 - RNA, 20 nt, Artificial Sequence
  Synthetic oligonucleotide: PDCD1-2112
aagccacacagcucagggua

SEQ ID NO: 1771 - RNA, 20 nt, Artificial Sequence
  Synthetic oligonucleotide: PDCD1-2113
agccacacagcucaggguaa

SEQ ID NO: 1772 - RNA, 20 nt, Artificial Sequence
  Synthetic oligonucleotide: PDCD1-2115
cucaggguaaggggcagagc

SEQ ID NO: 1773 - RNA, 20 nt, Artificial Sequence
  Synthetic oligonucleotide: PDCD1-2116
ucaggguaaggggcagagcu

SEQ ID NO: 1774 - RNA, 20 nt, Artificial Sequence
  Synthetic oligonucleotide: PDCD1-2117
caggguaaggggcagagcug

SEQ ID NO: 1775 - RNA, 20 nt, Artificial Sequence
  Synthetic oligonucleotide: PDCD1-2118
aggguaaggggcagagcugg

SEQ ID NO: 1776 - RNA, 20 nt, Artificial Sequence
  Synthetic oligonucleotide: PDCD1-2119
aggggcagagcugggggcca

SEQ ID NO: 1777 - RNA, 20 nt, Artificial Sequence
  Synthetic oligonucleotide: PDCD1-2121
cagagcugggggccaaggcu

SEQ ID NO: 1778 - RNA, 20 nt, Artificial Sequence
  Synthetic oligonucleotide: PDCD1-2122
acagcaccccccgaccugcc

SEQ ID NO: 1779 - RNA, 20 nt, Artificial Sequence
  Synthetic oligonucleotide: PDCD1-2123
cagcaccccccgaccugcca

SEQ ID NO: 1780 - RNA, 20 nt, Artificial Sequence
  Synthetic oligonucleotide: PDCD1-2124
ugccagggacugagagugaa

SEQ ID NO: 1781 - RNA, 20 nt, Artificial Sequence
  Synthetic oligonucleotide: PDCD1-2125
ucccuccagaccccucgcuc

SEQ ID NO: 1782 - RNA, 20 nt, Artificial Sequence
  Synthetic oligonucleotide: PDCD1-2126
cccuccagaccccucgcucc

SEQ ID NO: 1783 - RNA, 20 nt, Artificial Sequence
  Synthetic oligonucleotide: PDCD1-2127
accccucgcuccgggacccc

SEQ ID NO: 1784 - RNA, 20 nt, Artificial Sequence
  Synthetic oligonucleotide: PDCD1-2128
ccccucgcuccgggaccccu

SEQ ID NO: 1785 - RNA, 20 nt, Artificial Sequence
  Synthetic oligonucleotide: PDCD1-2129
uccgggaccccugggcugcc

SEQ ID NO: 1786 - RNA, 20 nt, Artificial Sequence
  Synthetic oligonucleotide: PDCD1-2130
ccgggaccccugggcugcca

SEQ ID NO: 1787 - RNA, 20 nt, Artificial Sequence
  Synthetic oligonucleotide: PDCD1-2131
accccugggcugccagggcc

SEQ ID NO: 1788 - RNA, 20 nt, Artificial Sequence
  Synthetic oligonucleotide: PDCD1-2132
ucagcaccccccgaccugcc

SEQ ID NO: 1789 - RNA, 20 nt, Artificial Sequence
  Synthetic oligonucleotide: PDCD1-2123
cagcaccccccgaccugcca

SEQ ID NO: 1790 - RNA, 20 nt, Artificial Sequence
  Synthetic oligonucleotide: PDCD1-2134
ccccgaccugccagggacug

SEQ ID NO: 1791 - RNA, 20 nt, Artificial Sequence
  Synthetic oligonucleotide: PDCD1-2135
cccgaccugccagggacuga

SEQ ID NO: 1792 - RNA, 20 nt, Artificial Sequence
  Synthetic oligonucleotide: PDCD1-2137
ugccagggacugagggugga

SEQ ID NO: 1793 - RNA, 20 nt, Artificial Sequence
  Synthetic oligonucleotide: PDCD1-2139
ucccuccagaccccuggcuc

SEQ ID NO: 1794 - RNA, 20 nt, Artificial Sequence
  Synthetic oligonucleotide: PDCD1-2140
cccuccagaccccuggcucu

SEQ ID NO: 1795 - RNA, 20 nt, Artificial Sequence
  Synthetic oligonucleotide: PDCD1-125
acgacuggccagggcgccug

SEQ ID NO: 1796 - RNA, 20 nt, Artificial Sequence
  Synthetic oligonucleotide: PDCD1-110
cggugcuacaacugggcugg

SEQ ID NO: 1797 - RNA, 20 nt, Artificial Sequence
  Synthetic oligonucleotide: PDCD1-112
aacugggcuggcggccagga

SEQ ID NO: 1798 - RNA, 20 nt, Artificial Sequence
  Synthetic oligonucleotide: PDCD1-115
caggaugguucuuagguagg

SEQ ID NO: 1799 - RNA, 20 nt, Artificial Sequence
  Synthetic oligonucleotide: PDCD1-116
aggaugguucuuagguaggu

SEQ ID NO: 1800 - RNA, 20 nt, Artificial Sequence
  Synthetic oligonucleotide: PDCD1-119
ucuuagguagguggggucgg

SEQ ID NO: 1801 - RNA, 20 nt, Artificial Sequence
  Synthetic oligonucleotide: PDCD1-2164
cggucaggugucccagagcc

SEQ ID NO: 1802 - RNA, 20 nt, Artificial Sequence
  Synthetic oligonucleotide: PDCD1-2168
ucccagagccaggggucugg

SEQ ID NO: 1803 - RNA, 20 nt, Artificial Sequence
  Synthetic oligonucleotide: PDCD1-2169
cccagagccaggggucugga

SEQ ID NO: 1804 - RNA, 20 nt, Artificial Sequence
  Synthetic oligonucleotide: PDCD1-2171
uuccacccucagucccuggc

SEQ ID NO: 1805 - RNA, 20 nt, Artificial Sequence
  Synthetic oligonucleotide: PDCD1-2172
acccucagucccuggcaggu

SEQ ID NO: 1806 - RNA, 20 nt, Artificial Sequence
  Synthetic oligonucleotide: PDCD1-2173
cccucagucccuggcagguc

SEQ ID NO: 1807 - RNA, 20 nt, Artificial Sequence
  Synthetic oligonucleotide: PDCD1-2174
ccucagucccuggcaggucg

SEQ ID NO: 1808 - RNA, 20 nt, Artificial Sequence
  Synthetic oligonucleotide: PDCD1-2175
cucagucccuggcaggucgg

SEQ ID NO: 1809 - RNA, 20 nt, Artificial Sequence
  Synthetic oligonucleotide: PDCD1-2176
ucagucccuggcaggucggg

SEQ ID NO: 1810 - RNA, 20 nt, Artificial Sequence
  Synthetic oligonucleotide: PDCD1-2177
uggcaggucggggggugcug

SEQ ID NO: 1811 - RNA, 20 nt, Artificial Sequence
  Synthetic oligonucleotide: PDCD1-2178
caggucggggggugcugagg

SEQ ID NO: 1812 - RNA, 20 nt, Artificial Sequence
  Synthetic oligonucleotide: PDCD1-2179
aggucggggggugcugaggc

SEQ ID NO: 1813 - RNA, 20 nt, Artificial Sequence
  Synthetic oligonucleotide: PDCD1-2181
ugcugaggcgggccuggccc

SEQ ID NO: 1814 - RNA, 20 nt, Artificial Sequence
  Synthetic oligonucleotide: PDCD1-2185
cccuggcagcccaggggucc

SEQ ID NO: 1815 - RNA, 20 nt, Artificial Sequence
  Synthetic oligonucleotide: PDCD1-2186
agcccaggggucccggagcg

SEQ ID NO: 1816 - RNA, 20 nt, Artificial Sequence
  Synthetic oligonucleotide: PDCD1-2188
cccaggggucccggagcgag

SEQ ID NO: 1817 - RNA, 20 nt, Artificial Sequence
  Synthetic oligonucleotide: PDCD1-2190
ucccggagcgaggggucugg

SEQ ID NO: 1818 - RNA, 20 nt, Artificial Sequence
  Synthetic oligonucleotide: PDCD1-2191
cccggagcgaggggucugga

SEQ ID NO: 1819 - RNA, 20 nt, Artificial Sequence
  Synthetic oligonucleotide: PDCD1-2193
uuucacucucagucccuggc

SEQ ID NO: 1820 - RNA, 20 nt, Artificial Sequence
  Synthetic oligonucleotide: PDCD1-2194
acucucagucccuggcaggu

SEQ ID NO: 1821 - RNA, 20 nt, Artificial Sequence
  Synthetic oligonucleotide: PDCD1-2195
cucucagucccuggcagguc

SEQ ID NO: 1822 - RNA, 20 nt, Artificial Sequence
  Synthetic oligonucleotide: PDCD1-2196
ucucagucccuggcaggucg

SEQ ID NO: 1823 - RNA, 20 nt, Artificial Sequence
  Synthetic oligonucleotide: PDCD1-2175
cucagucccuggcaggucgg

SEQ ID NO: 1824 - RNA, 20 nt, Artificial Sequence
  Synthetic oligonucleotide: PDCD1-2176
ucagucccuggcaggucggg

SEQ ID NO: 1825 - RNA, 20 nt, Artificial Sequence
  Synthetic oligonucleotide: PDCD1-2177
uggcaggucggggggugcug

SEQ ID NO: 1826 - RNA, 20 nt, Artificial Sequence
  Synthetic oligonucleotide: PDCD1-2200
aggucggggggugcuguggc

SEQ ID NO: 1827 - RNA, 20 nt, Artificial Sequence
  Synthetic oligonucleotide: PDCD1-2201
ugcuguggcaggcccagccu

SEQ ID NO: 1828 - RNA, 20 nt, Artificial Sequence
  Synthetic oligonucleotide: PDCD1-2203
uacccugagcuguguggcuu

SEQ ID NO: 1829 - RNA, 20 nt, Artificial Sequence
  Synthetic oligonucleotide: PDCD1-2204
acccugagcuguguggcuuu

SEQ ID NO: 1830 - RNA, 20 nt, Artificial Sequence
  Synthetic oligonucleotide: PDCD1-2205
cuuugggcagcucgaacucc

SEQ ID NO: 1831 - RNA, 20 nt, Artificial Sequence
  Synthetic oligonucleotide: PDCD1-2209
cugggccccaacuccucccc

SEQ ID NO: 1832 - RNA, 20 nt, Artificial Sequence
  Synthetic oligonucleotide: PDCD1-2210
ccaaguccccucuuugcucc

SEQ ID NO: 1833 - RNA, 20 nt, Artificial Sequence
  Synthetic oligonucleotide: PDCD1-2211
caaguccccucuuugcuccu

SEQ ID NO: 1834 - RNA, 20 nt, Artificial Sequence
  Synthetic oligonucleotide: PDCD1-2212
uccccucuuugcuccugggc

SEQ ID NO: 1835 - RNA, 20 nt, Artificial Sequence
  Synthetic oligonucleotide: PDCD1-2213
cucuuugcuccugggcaggc

SEQ ID NO: 1836 - RNA, 20 nt, Artificial Sequence
  Synthetic oligonucleotide: PDCD1-2216
uccccucucagccgguccuu

SEQ ID NO: 1837 - RNA, 20 nt, Artificial Sequence
  Synthetic oligonucleotide: PDCD1-2217
ccccucucagccgguccuug

SEQ ID NO: 1838 - RNA, 20 nt, Artificial Sequence
  Synthetic oligonucleotide: PDCD1-2218
ugcguguuucuguagaauga

SEQ ID NO: 1839 - RNA, 20 nt, Artificial Sequence
  Synthetic oligonucleotide: PDCD1-2222
cuggccagaaccccaaaccu

SEQ ID NO: 1840 - RNA, 20 nt, Artificial Sequence
  Synthetic oligonucleotide: PDCD1-2225
aaccccaaaccuuggccgug

SEQ ID NO: 1841 - RNA, 20 nt, Artificial Sequence
  Synthetic oligonucleotide: PDCD1-2226
uuggccguggggagucugcg

SEQ ID NO: 1842 - RNA, 20 nt, Artificial Sequence
  Synthetic oligonucleotide: PDCD1-2228
ugccgccuucuccacugcuc

SEQ ID NO: 1843 - RNA, 20 nt, Artificial Sequence
  Synthetic oligonucleotide: PDCD1-2229
cgccuucuccacugcucagg

SEQ ID NO: 1844 - RNA, 20 nt, Artificial Sequence
  Synthetic oligonucleotide: PDCD1-2230
cuucuccacugcucaggcgg

SEQ ID NO: 1845 - RNA, 20 nt, Artificial Sequence
  Synthetic oligonucleotide: PDCD1-2231
acugcucaggcggaggugag

SEQ ID NO: 1846 - RNA, 20 nt, Artificial Sequence
  Synthetic oligonucleotide: PDCD1-2232
cucaggcggaggugagcgga

SEQ ID NO: 1847 - RNA, 20 nt, Artificial Sequence
  Synthetic oligonucleotide: PDCD1-2233
ucaggcggaggugagcggaa

SEQ ID NO: 1848 - RNA, 20 nt, Artificial Sequence
  Synthetic oligonucleotide: PDCD1-2234
agcggaagggaaacuguccc

SEQ ID NO: 1849 - RNA, 20 nt, Artificial Sequence
  Synthetic oligonucleotide: PDCD1-2235
aagggaaacugucccagguc

SEQ ID NO: 1850 - RNA, 20 nt, Artificial Sequence
  Synthetic oligonucleotide: PDCD1-2236
acugucccaggucagguuga

SEQ ID NO: 1851 - RNA, 20 nt, Artificial Sequence
  Synthetic oligonucleotide: PDCD1-2237
cugucccaggucagguugaa

SEQ ID NO: 1852 - RNA, 20 nt, Artificial Sequence
  Synthetic oligonucleotide: PDCD1-2238
ucccaggucagguugaaggg

SEQ ID NO: 1853 - RNA, 20 nt, Artificial Sequence
  Synthetic oligonucleotide: PDCD1-2239
cccaggucagguugaaggga

SEQ ID NO: 1854 - RNA, 20 nt, Artificial Sequence
  Synthetic oligonucleotide: PDCD1-2240
ccucuuccuccacauccacg

SEQ ID NO: 1855 - RNA, 20 nt, Artificial Sequence
  Synthetic oligonucleotide: PDCD1-2241
cucuuccuccacauccacgu

SEQ ID NO: 1856 - RNA, 20 nt, Artificial Sequence
  Synthetic oligonucleotide: PDCD1-2242
cacgugggcgagagugacag

SEQ ID NO: 1857 - RNA, 20 nt, Artificial Sequence
  Synthetic oligonucleotide: PDCD1-2244
agagugacagaggcagugcu

SEQ ID NO: 1858 - RNA, 20 nt, Artificial Sequence
  Synthetic oligonucleotide: PDCD1-2246
agugacagaggcagugcugg

SEQ ID NO: 1859 - RNA, 20 nt, Artificial Sequence
  Synthetic oligonucleotide: PDCD1-2248
agaggcagugcugggggagg

SEQ ID NO: 1860 - RNA, 20 nt, Artificial Sequence
  Synthetic oligonucleotide: PDCD1-2250
aggcagugcugggggaggag

SEQ ID NO: 1861 - RNA, 20 nt, Artificial Sequence
  Synthetic oligonucleotide: PDCD1-2252
cugggggaggaggggugagg

SEQ ID NO: 1862 - RNA, 20 nt, Artificial Sequence
  Synthetic oligonucleotide: PDCD1-2253
ugggggaggaggggugagga

SEQ ID NO: 1863 - RNA, 20 nt, Artificial Sequence
  Synthetic oligonucleotide: PDCD1-2256
aggaggggugaggagggggu

SEQ ID NO: 1864 - RNA, 20 nt, Artificial Sequence
  Synthetic oligonucleotide: PDCD1-2261
aggggguaggacuggggaga

SEQ ID NO: 1865 - RNA, 20 nt, Artificial Sequence
  Synthetic oligonucleotide: PDCD1-2265
uaggacuggggagagggugg

SEQ ID NO: 1866 - RNA, 20 nt, Artificial Sequence
  Synthetic oligonucleotide: PDCD1-2267
acuggggagaggguggggga

SEQ ID NO: 1867 - RNA, 20 nt, Artificial Sequence
  Synthetic oligonucleotide: PDCD1-2268
agggagagagagacagagac

SEQ ID NO: 1868 - RNA, 20 nt, Artificial Sequence
  Synthetic oligonucleotide: PDCD1-2270
agacagagacagggagacag

SEQ ID NO: 1869 - RNA, 20 nt, Artificial Sequence
  Synthetic oligonucleotide: PDCD1-2271
agacagggagacagaggaga

SEQ ID NO: 1870 - RNA, 20 nt, Artificial Sequence
  Synthetic oligonucleotide: PDCD1-2273
acagggagacagaggagaug

SEQ ID NO: 1871 - RNA, 20 nt, Artificial Sequence
  Synthetic oligonucleotide: PDCD1-2275
agacagaggagauggggagg

SEQ ID NO: 1872 - RNA, 20 nt, Artificial Sequence
  Synthetic oligonucleotide: PDCD1-2276
cagaggagauggggaggagg

SEQ ID NO: 1873 - RNA, 20 nt, Artificial Sequence
  Synthetic oligonucleotide: PDCD1-2277
agaggagauggggaggaggu

SEQ ID NO: 1874 - RNA, 20 nt, Artificial Sequence
  Synthetic oligonucleotide: PDCD1-2278
auggggaggaggugggcccg

SEQ ID NO: 1875 - RNA, 20 nt, Artificial Sequence
  Synthetic oligonucleotide: PDCD1-2281
cccccacgcccuaccccgug

SEQ ID NO: 1876 - RNA, 20 nt, Artificial Sequence
  Synthetic oligonucleotide: PDCD1-2282
ccccacgcccuaccccgugg

SEQ ID NO: 1877 - RNA, 20 nt, Artificial Sequence
  Synthetic oligonucleotide: PDCD1-2283
cgugggggucuccccagcuc

SEQ ID NO: 1878 - RNA, 20 nt, Artificial Sequence
  Synthetic oligonucleotide: PDCD1-2285
ugugucucugcucacugcug

SEQ ID NO: 1879 - RNA, 20 nt, Artificial Sequence
  Synthetic oligonucleotide: PDCD1-2286
cgcccgagcugccccuccug

SEQ ID NO: 1880 - RNA, 20 nt, Artificial Sequence
  Synthetic oligonucleotide: PDCD1-2288
cugccccuccugaggcugcc

SEQ ID NO: 1881 - RNA, 20 nt, Artificial Sequence
  Synthetic oligonucleotide: PDCD1-2289
ccccuccugaggcugccggg

SEQ ID NO: 1882 - RNA, 20 nt, Artificial Sequence
  Synthetic oligonucleotide: PDCD1-2290
cccuccugaggcugccgggu

SEQ ID NO: 1883 - RNA, 20 nt, Artificial Sequence
  Synthetic oligonucleotide: PDCD1-2291
ccuccugaggcugccgggug

SEQ ID NO: 1884 - RNA, 20 nt, Artificial Sequence
  Synthetic oligonucleotide: PDCD1-2292
cuccugaggcugccgggugg

SEQ ID NO: 1885 - RNA, 20 nt, Artificial Sequence
  Synthetic oligonucleotide: PDCD1-2293
ugaggcugccgggugggggc

SEQ ID NO: 1886 - RNA, 20 nt, Artificial Sequence
  Synthetic oligonucleotide: PDCD1-2294
ccccaucccccccaucuccc

SEQ ID NO: 1887 - RNA, 20 nt, Artificial Sequence
  Synthetic oligonucleotide: PDCD1-2295
cccaucccccccaucucccu

SEQ ID NO: 1888 - RNA, 20 nt, Artificial Sequence
  Synthetic oligonucleotide: PDCD1-2296
ccaucccccccaucucccug

SEQ ID NO: 1889 - RNA, 20 nt, Artificial Sequence
  Synthetic oligonucleotide: PDCD1-2297
caucccccccaucucccugg

SEQ ID NO: 1890 - RNA, 20 nt, Artificial Sequence
  Synthetic oligonucleotide: PDCD1-2298
ccccccaucucccugggggc

SEQ ID NO: 1891 - RNA, 20 nt, Artificial Sequence
  Synthetic oligonucleotide: PDCD1-2299
cccccaucucccugggggcc

SEQ ID NO: 1892 - RNA, 20 nt, Artificial Sequence
  Synthetic oligonucleotide: PDCD1-2303
cgggccucccugccugggga

SEQ ID NO: 1893 - RNA, 20 nt, Artificial Sequence
  Synthetic oligonucleotide: PDCD1-2305
ccucccugccuggggaaggu

SEQ ID NO: 1894 - RNA, 20 nt, Artificial Sequence
  Synthetic oligonucleotide: PDCD1-2306
cccugccuggggaagguggg

SEQ ID NO: 1895 - RNA, 20 nt, Artificial Sequence
  Synthetic oligonucleotide: PDCD1-2310
ccccucugggcucagguucc

SEQ ID NO: 1896 - RNA, 20 nt, Artificial Sequence
  Synthetic oligonucleotide: PDCD1-2311
cccucugggcucagguuccu

SEQ ID NO: 1897 - RNA, 20 nt, Artificial Sequence
  Synthetic oligonucleotide: PDCD1-2313
cccaggaaccugagcccaga

SEQ ID NO: 1898 - RNA, 20 nt, Artificial Sequence
  Synthetic oligonucleotide: PDCD1-2314
ccaggaaccugagcccagag

SEQ ID NO: 1899 - RNA, 20 nt, Artificial Sequence
  Synthetic oligonucleotide: PDCD1-2315
caggaaccugagcccagagg

SEQ ID NO: 1900 - RNA, 20 nt, Artificial Sequence
  Synthetic oligonucleotide: PDCD1-2318
ccacccaccuuccccaggca

SEQ ID NO: 1901 - RNA, 20 nt, Artificial Sequence
  Synthetic oligonucleotide: PDCD1-2319
cccaccuuccccaggcaggg

SEQ ID NO: 1902 - RNA, 20 nt, Artificial Sequence
  Synthetic oligonucleotide: PDCD1-2320
cuuccccaggcagggaggcc

SEQ ID NO: 1903 - RNA, 20 nt, Artificial Sequence
  Synthetic oligonucleotide: PDCD1-2323
aggcccggcccccagggaga

SEQ ID NO: 1904 - RNA, 20 nt, Artificial Sequence
  Synthetic oligonucleotide: PDCD1-2326
cccggcccccagggagaugg

SEQ ID NO: 1905 - RNA, 20 nt, Artificial Sequence
  Synthetic oligonucleotide: PDCD1-2327
ccggcccccagggagauggg

SEQ ID NO: 1906 - RNA, 20 nt, Artificial Sequence
  Synthetic oligonucleotide: PDCD1-2328
cggcccccagggagaugggg

SEQ ID NO: 1907 - RNA, 20 nt, Artificial Sequence
  Synthetic oligonucleotide: PDCD1-2329
ccccagggagauggggggga

SEQ ID NO: 1908 - RNA, 20 nt, Artificial Sequence
  Synthetic oligonucleotide: PDCD1-2330
cccagggagaugggggggau

SEQ ID NO: 1909 - RNA, 20 nt, Artificial Sequence
  Synthetic oligonucleotide: PDCD1-2331
ccagggagaugggggggaug

SEQ ID NO: 1910 - RNA, 20 nt, Artificial Sequence
  Synthetic oligonucleotide: PDCD1-2332
cagggagaugggggggaugg

SEQ ID NO: 1911 - RNA, 20 nt, Artificial Sequence
  Synthetic oligonucleotide: PDCD1-2337
ugcccccacccggcagccuc

SEQ ID NO: 1912 - RNA, 20 nt, Artificial Sequence
  Synthetic oligonucleotide: PDCD1-2338
ccccacccggcagccucagg

SEQ ID NO: 1913 - RNA, 20 nt, Artificial Sequence
  Synthetic oligonucleotide: PDCD1-2339
cccacccggcagccucagga

SEQ ID NO: 1914 - RNA, 20 nt, Artificial Sequence
  Synthetic oligonucleotide: PDCD1-2340
ccacccggcagccucaggag

SEQ ID NO: 1915 - RNA, 20 nt, Artificial Sequence
  Synthetic oligonucleotide: PDCD1-2341
cagccucaggaggggcagcu

SEQ ID NO: 1916 - RNA, 20 nt, Artificial Sequence
  Synthetic oligonucleotide: PDCD1-2342
agccucaggaggggcagcuc

SEQ ID NO: 1917 - RNA, 20 nt, Artificial Sequence
  Synthetic oligonucleotide: PDCD1-2343
cucaggaggggcagcucggg

SEQ ID NO: 1918 - RNA, 20 nt, Artificial Sequence
  Synthetic oligonucleotide: PDCD1-2344
ucaggaggggcagcucgggc

SEQ ID NO: 1919 - RNA, 20 nt, Artificial Sequence
  Synthetic oligonucleotide: PDCD1-2347
agcagugagcagagacacag

SEQ ID NO: 1920 - RNA, 20 nt, Artificial Sequence
  Synthetic oligonucleotide: PDCD1-2348
agugagcagagacacagagg

SEQ ID NO: 1921 - RNA, 20 nt, Artificial Sequence
  Synthetic oligonucleotide: PDCD1-2349
agcagagacacagaggagga

SEQ ID NO: 1922 - RNA, 20 nt, Artificial Sequence
  Synthetic oligonucleotide: PDCD1-2351
cagagacacagaggaggaag

SEQ ID NO: 1923 - RNA, 20 nt, Artificial Sequence
  Synthetic oligonucleotide: PDCD1-2352
aggaggaaggggcccugagc

SEQ ID NO: 1924 - RNA, 20 nt, Artificial Sequence
  Synthetic oligonucleotide: PDCD1-2355
cugagcuggggagaccccca

SEQ ID NO: 1925 - RNA, 20 nt, Artificial Sequence
  Synthetic oligonucleotide: PDCD1-2356
ugagcuggggagacccccac

SEQ ID NO: 1926 - RNA, 20 nt, Artificial Sequence
  Synthetic oligonucleotide: PDCD1-2358
uggggagacccccacggggu

SEQ ID NO: 1927 - RNA, 20 nt, Artificial Sequence
  Synthetic oligonucleotide: PDCD1-2362
cccccacgggguagggcgug

SEQ ID NO: 1928 - RNA, 20 nt, Artificial Sequence
  Synthetic oligonucleotide: PDCD1-2363
ccccacgggguagggcgugg

SEQ ID NO: 1929 - RNA, 20 nt, Artificial Sequence
  Synthetic oligonucleotide: PDCD1-2368
ucucgcccacguggaugugg

SEQ ID NO: 1930 - RNA, 20 nt, Artificial Sequence
  Synthetic oligonucleotide: PDCD1-2369
ccacguggauguggaggaag

SEQ ID NO: 1931 - RNA, 20 nt, Artificial Sequence
  Synthetic oligonucleotide: PDCD1-2370
cacguggauguggaggaaga

SEQ ID NO: 1932 - RNA, 20 nt, Artificial Sequence
  Synthetic oligonucleotide: PDCD1-2371
acguggauguggaggaagag

SEQ ID NO: 1933 - RNA, 20 nt, Artificial Sequence
  Synthetic oligonucleotide: PDCD1-2372
cguggauguggaggaagagg

SEQ ID NO: 1934 - RNA, 20 nt, Artificial Sequence
  Synthetic oligonucleotide: PDCD1-2375
aggaagagggggcgggagca

SEQ ID NO: 1935 - RNA, 20 nt, Artificial Sequence
  Synthetic oligonucleotide: PDCD1-2379
agggggcgggagcaaggggc

SEQ ID NO: 1936 - RNA, 20 nt, Artificial Sequence
  Synthetic oligonucleotide: PDCD1-2380
acccucccuucaaccugacc

SEQ ID NO: 1937 - RNA, 20 nt, Artificial Sequence
  Synthetic oligonucleotide: PDCD1-2381
cccucccuucaaccugaccu

SEQ ID NO: 1938 - RNA, 20 nt, Artificial Sequence
  Synthetic oligonucleotide: PDCD1-2383
cuccgccugagcaguggaga

SEQ ID NO: 1939 - RNA, 20 nt, Artificial Sequence
  Synthetic oligonucleotide: PDCD1-2384
cgccugagcaguggagaagg

SEQ ID NO: 1940 - RNA, 20 nt, Artificial Sequence
  Synthetic oligonucleotide: PDCD1-2385
caguggagaaggcggcacuc

SEQ ID NO: 1941 - RNA, 20 nt, Artificial Sequence
  Synthetic oligonucleotide: PDCD1-2386
uggagaaggcggcacucugg

SEQ ID NO: 1942 - RNA, 20 nt, Artificial Sequence
  Synthetic oligonucleotide: PDCD1-101
cacucugguggggcugcucc

SEQ ID NO: 1943 - RNA, 17 nt, Artificial Sequence
  Synthetic oligonucleotide: PDCD1-2391
cagacuccccacggcca

SEQ ID NO: 1944 - RNA, 17 nt, Artificial Sequence
  Synthetic oligonucleotide: PDCD1-2392
uccccacggccaagguu

SEQ ID NO: 1945 - RNA, 17 nt, Artificial Sequence
  Synthetic oligonucleotide: PDCD1-2396
agaaacacgcagcccca

SEQ ID NO: 1946 - RNA, 17 nt, Artificial Sequence
  Synthetic oligonucleotide: PDCD1-2397
cacgcagccccaaggac

SEQ ID NO: 1947 - RNA, 17 nt, Artificial Sequence
  Synthetic oligonucleotide: PDCD1-2398
cccaaggaccggcugag

SEQ ID NO: 1948 - RNA, 17 nt, Artificial Sequence
  Synthetic oligonucleotide: PDCD1-2401
cggcugagaggggacag

SEQ ID NO: 1949 - RNA, 17 nt, Artificial Sequence
  Synthetic oligonucleotide: PDCD1-2402
agagguccugccugccc

SEQ ID NO: 1950 - RNA, 17 nt, Artificial Sequence
  Synthetic oligonucleotide: PDCD1-2403
ccugcccaggagcaaag

SEQ ID NO: 1951 - RNA, 17 nt, Artificial Sequence
  Synthetic oligonucleotide: PDCD1-2404
cugcccaggagcaaaga

SEQ ID NO: 1952 - RNA, 17 nt, Artificial Sequence
  Synthetic oligonucleotide: PDCD1-2405
ugcccaggagcaaagag

SEQ ID NO: 1953 - RNA, 17 nt, Artificial Sequence
  Synthetic oligonucleotide: PDCD1-2408
aagaggggacuugggcc

SEQ ID NO: 1954 - RNA, 17 nt, Artificial Sequence
  Synthetic oligonucleotide: PDCD1-2409
agaggggacuugggcca

SEQ ID NO: 1955 - RNA, 17 nt, Artificial Sequence
  Synthetic oligonucleotide: PDCD1-2412
ugggccaggggaggagu

SEQ ID NO: 1956 - RNA, 17 nt, Artificial Sequence
  Synthetic oligonucleotide: PDCD1-2417
ccaaagccacacagcuc

SEQ ID NO: 1957 - RNA, 17 nt, Artificial Sequence
  Synthetic oligonucleotide: PDCD1-2418
caaagccacacagcuca

SEQ ID NO: 1958 - RNA, 17 nt, Artificial Sequence
  Synthetic oligonucleotide: PDCD1-2419
ccacacagcucagggua

SEQ ID NO: 1959 - RNA, 17 nt, Artificial Sequence
  Synthetic oligonucleotide: PDCD1-2420
cacacagcucaggguaa

SEQ ID NO: 1960 - RNA, 17 nt, Artificial Sequence
  Synthetic oligonucleotide: PDCD1-2421
acacagcucaggguaag

SEQ ID NO: 1961 - RNA, 17 nt, Artificial Sequence
  Synthetic oligonucleotide: PDCD1-2422
aggguaaggggcagagc

SEQ ID NO: 1962 - RNA, 17 nt, Artificial Sequence
  Synthetic oligonucleotide: PDCD1-2428
agcugggggccaaggcu

SEQ ID NO: 1963 - RNA, 17 nt, Artificial Sequence
  Synthetic oligonucleotide: PDCD1-2430
caccccccgaccugcca

SEQ ID NO: 1964 - RNA, 17 nt, Artificial Sequence
  Synthetic oligonucleotide: PDCD1-2431
cagggacugagagugaa

SEQ ID NO: 1965 - RNA, 17 nt, Artificial Sequence
  Synthetic oligonucleotide: PDCD1-2432
cuccagaccccucgcuc

SEQ ID NO: 1966 - RNA, 17 nt, Artificial Sequence
  Synthetic oligonucleotide: PDCD1-2433
uccagaccccucgcucc

SEQ ID NO: 1967 - RNA, 17 nt, Artificial Sequence
  Synthetic oligonucleotide: PDCD1-2434
ccucgcuccgggacccc

SEQ ID NO: 1968 - RNA, 17 nt, Artificial Sequence
  Synthetic oligonucleotide: PDCD1-2435
cucgcuccgggaccccu

SEQ ID NO: 1969 - RNA, 17 nt, Artificial Sequence
  Synthetic oligonucleotide: PDCD1-2438
ccugggcugccagggcc

SEQ ID NO: 1970 - RNA, 17 nt, Artificial Sequence
  Synthetic oligonucleotide: PDCD1-2430
caccccccgaccugcca

SEQ ID NO: 1971 - RNA, 17 nt, Artificial Sequence
  Synthetic oligonucleotide: PDCD1-2441
cgaccugccagggacug

SEQ ID NO: 1972 - RNA, 17 nt, Artificial Sequence
  Synthetic oligonucleotide: PDCD1-2443
cugccagggacugaggg

SEQ ID NO: 1973 - RNA, 17 nt, Artificial Sequence
  Synthetic oligonucleotide: PDCD1-2444
cagggacugagggugga

SEQ ID NO: 1974 - RNA, 17 nt, Artificial Sequence
  Synthetic oligonucleotide: PDCD1-2445
aggucccuccagacccc

SEQ ID NO: 1975 - RNA, 17 nt, Artificial Sequence
  Synthetic oligonucleotide: PDCD1-2446
cuccagaccccuggcuc

SEQ ID NO: 1976 - RNA, 17 nt, Artificial Sequence
  Synthetic oligonucleotide: PDCD1-2447
uccagaccccuggcucu

SEQ ID NO: 1977 - RNA, 17 nt, Artificial Sequence
  Synthetic oligonucleotide: PDCD1-252
acuggccagggcgccug

SEQ ID NO: 1978 - RNA, 17 nt, Artificial Sequence
  Synthetic oligonucleotide: PDCD1-233
cuggccagucgucuggg

SEQ ID NO: 1979 - RNA, 17 nt, Artificial Sequence
  Synthetic oligonucleotide: PDCD1-237
ugcuacaacugggcugg

SEQ ID NO: 1980 - RNA, 17 nt, Artificial Sequence
  Synthetic oligonucleotide: PDCD1-239
ugggcuggcggccagga

SEQ ID NO: 1981 - RNA, 17 nt, Artificial Sequence
  Synthetic oligonucleotide: PDCD1-241
caggaugguucuuaggu

SEQ ID NO: 1982 - RNA, 17 nt, Artificial Sequence
  Synthetic oligonucleotide: PDCD1-243
augguucuuagguaggu

SEQ ID NO: 1983 - RNA, 17 nt, Artificial Sequence
  Synthetic oligonucleotide: PDCD1-244
ugguucuuagguaggug

SEQ ID NO: 1984 - RNA, 17 nt, Artificial Sequence
  Synthetic oligonucleotide: PDCD1-245
ucuuagguagguggggu

SEQ ID NO: 1985 - RNA, 17 nt, Artificial Sequence
  Synthetic oligonucleotide: PDCD1-246
uagguagguggggucgg

SEQ ID NO: 1986 - RNA, 17 nt, Artificial Sequence
  Synthetic oligonucleotide: PDCD1-247
agguggggucggcgguc

SEQ ID NO: 1987 - RNA, 17 nt, Artificial Sequence
  Synthetic oligonucleotide: PDCD1-2471
ucaggugucccagagcc

SEQ ID NO: 1988 - RNA, 17 nt, Artificial Sequence
  Synthetic oligonucleotide: PDCD1-2472
caggugucccagagcca

SEQ ID NO: 1989 - RNA, 17 nt, Artificial Sequence
  Synthetic oligonucleotide: PDCD1-2473
aggugucccagagccag

SEQ ID NO: 1990 - RNA, 17 nt, Artificial Sequence
  Synthetic oligonucleotide: PDCD1-2474
ucccagagccagggguc

SEQ ID NO: 1991 - RNA, 17 nt, Artificial Sequence
  Synthetic oligonucleotide: PDCD1-2475
cagagccaggggucugg

SEQ ID NO: 1992 - RNA, 17 nt, Artificial Sequence
  Synthetic oligonucleotide: PDCD1-2476
agagccaggggucugga

SEQ ID NO: 1993 - RNA, 17 nt, Artificial Sequence
  Synthetic oligonucleotide: PDCD1-2477
cuuccacccucaguccc

SEQ ID NO: 1994 - RNA, 17 nt, Artificial Sequence
  Synthetic oligonucleotide: PDCD1-2478
cacccucagucccuggc

SEQ ID NO: 1995 - RNA, 17 nt, Artificial Sequence
  Synthetic oligonucleotide: PDCD1-2479
cucagucccuggcaggu

SEQ ID NO: 1996 - RNA, 17 nt, Artificial Sequence
  Synthetic oligonucleotide: PDCD1-2480
ucagucccuggcagguc

SEQ ID NO: 1997 - RNA, 17 nt, Artificial Sequence
  Synthetic oligonucleotide: PDCD1-2481
cagucccuggcaggucg

SEQ ID NO: 1998 - RNA, 17 nt, Artificial Sequence
  Synthetic oligonucleotide: PDCD1-2482
agucccuggcaggucgg

SEQ ID NO: 1999 - RNA, 17 nt, Artificial Sequence
  Synthetic oligonucleotide: PDCD1-2484
caggucggggggugcug

SEQ ID NO: 2000 - RNA, 17 nt, Artificial Sequence
  Synthetic oligonucleotide: PDCD1-2486
ucggggggugcugaggc

SEQ ID NO: 2001 - RNA, 17 nt, Artificial Sequence
  Synthetic oligonucleotide: PDCD1-2488
ugaggcgggccuggccc

SEQ ID NO: 2002 - RNA, 17 nt, Artificial Sequence
  Synthetic oligonucleotide: PDCD1-2489
ccuggcccuggcagccc

SEQ ID NO: 2003 - RNA, 17 nt, Artificial Sequence
  Synthetic oligonucleotide: PDCD1-2490
cuggcccuggcagccca

SEQ ID NO: 2004 - RNA, 17 nt, Artificial Sequence
  Synthetic oligonucleotide: PDCD1-2491
uggcccuggcagcccag

SEQ ID NO: 2005 - RNA, 17 nt, Artificial Sequence
  Synthetic oligonucleotide: PDCD1-2492
uggcagcccaggggucc

SEQ ID NO: 2006 - RNA, 17 nt, Artificial Sequence
  Synthetic oligonucleotide: PDCD1-2493
ccaggggucccggagcg

SEQ ID NO: 2007 - RNA, 17 nt, Artificial Sequence
  Synthetic oligonucleotide: PDCD1-2494
caggggucccggagcga

SEQ ID NO: 2008 - RNA, 17 nt, Artificial Sequence
  Synthetic oligonucleotide: PDCD1-2495
aggggucccggagcgag

SEQ ID NO: 2009 - RNA, 17 nt, Artificial Sequence
  Synthetic oligonucleotide: PDCD1-2496
ucccggagcgagggguc

SEQ ID NO: 2010 - RNA, 17 nt, Artificial Sequence
  Synthetic oligonucleotide: PDCD1-2497
cggagcgaggggucugg

SEQ ID NO: 2011 - RNA, 17 nt, Artificial Sequence
  Synthetic oligonucleotide: PDCD1-2499
cuuucacucucaguccc

SEQ ID NO: 2012 - RNA, 17 nt, Artificial Sequence
  Synthetic oligonucleotide: PDCD1-2500
cacucucagucccuggc

SEQ ID NO: 2013 - RNA, 17 nt, Artificial Sequence
  Synthetic oligonucleotide: PDCD1-2479
cucagucccuggcaggu

SEQ ID NO: 2014 - RNA, 17 nt, Artificial Sequence
  Synthetic oligonucleotide: PDCD1-2480
ucagucccuggcagguc

SEQ ID NO: 2015 - RNA, 17 nt, Artificial Sequence
  Synthetic oligonucleotide: PDCD1-2481
cagucccuggcaggucg

SEQ ID NO: 2016 - RNA, 17 nt, Artificial Sequence
  Synthetic oligonucleotide: PDCD1-2482
agucccuggcaggucgg

SEQ ID NO: 2017 - RNA, 17 nt, Artificial Sequence
  Synthetic oligonucleotide: PDCD1-2484
caggucggggggugcug

SEQ ID NO: 2018 - RNA, 17 nt, Artificial Sequence
  Synthetic oligonucleotide: PDCD1-2507
ucggggggugcuguggc

SEQ ID NO: 2019 - RNA, 17 nt, Artificial Sequence
  Synthetic oligonucleotide: PDCD1-2508
uguggcaggcccagccu

SEQ ID NO: 2020 - RNA, 17 nt, Artificial Sequence
  Synthetic oligonucleotide: PDCD1-2509
ccuuacccugagcugug

SEQ ID NO: 2021 - RNA, 17 nt, Artificial Sequence
  Synthetic oligonucleotide: PDCD1-2510
ccugagcuguguggcuu

SEQ ID NO: 2022 - RNA, 17 nt, Artificial Sequence
  Synthetic oligonucleotide: PDCD1-2511
cugagcuguguggcuuu

SEQ ID NO: 2023 - RNA, 17 nt, Artificial Sequence
  Synthetic oligonucleotide: PDCD1-2512
ugggcagcucgaacucc

SEQ ID NO: 2024 - RNA, 17 nt, Artificial Sequence
  Synthetic oligonucleotide: PDCD1-2515
cuccuggguuccucucu

SEQ ID NO: 2025 - RNA, 17 nt, Artificial Sequence
  Synthetic oligonucleotide: PDCD1-2517
aguccccucuuugcucc

SEQ ID NO: 2026 - RNA, 17 nt, Artificial Sequence
  Synthetic oligonucleotide: PDCD1-2519
ccucuuugcuccugggc

SEQ ID NO: 2027 - RNA, 17 nt, Artificial Sequence
  Synthetic oligonucleotide: PDCD1-2520
uuugcuccugggcaggc

SEQ ID NO: 2028 - RNA, 17 nt, Artificial Sequence
  Synthetic oligonucleotide: PDCD1-2521
cucuguccccucucagc

SEQ ID NO: 2029 - RNA, 17 nt, Artificial Sequence
  Synthetic oligonucleotide: PDCD1-2522
cccucucagccgguccu

SEQ ID NO: 2030 - RNA, 17 nt, Artificial Sequence
  Synthetic oligonucleotide: PDCD1-2523
ccucucagccgguccuu

SEQ ID NO: 2031 - RNA, 17 nt, Artificial Sequence
  Synthetic oligonucleotide: PDCD1-2524
cucucagccgguccuug

SEQ ID NO: 2032 - RNA, 17 nt, Artificial Sequence
  Synthetic oligonucleotide: PDCD1-2531
ccccaaaccuuggccgu

SEQ ID NO: 2033 - RNA, 17 nt, Artificial Sequence
  Synthetic oligonucleotide: PDCD1-2532
cccaaaccuuggccgug

SEQ ID NO: 2034 - RNA, 17 nt, Artificial Sequence
  Synthetic oligonucleotide: PDCD1-2535
cgccuucuccacugcuc

SEQ ID NO: 2035 - RNA, 17 nt, Artificial Sequence
  Synthetic oligonucleotide: PDCD1-2536
cuucuccacugcucagg

SEQ ID NO: 2036 - RNA, 17 nt, Artificial Sequence
  Synthetic oligonucleotide: PDCD1-2537
cuccacugcucaggcgg

SEQ ID NO: 2037 - RNA, 17 nt, Artificial Sequence
  Synthetic oligonucleotide: PDCD1-2539
aggcggaggugagcgga

SEQ ID NO: 2038 - RNA, 17 nt, Artificial Sequence
  Synthetic oligonucleotide: PDCD1-2544
ucccaggucagguugaa

SEQ ID NO: 2039 - RNA, 17 nt, Artificial Sequence
  Synthetic oligonucleotide: PDCD1-2545
caggucagguugaaggg

SEQ ID NO: 2040 - RNA, 17 nt, Artificial Sequence
  Synthetic oligonucleotide: PDCD1-2546
aggucagguugaaggga

SEQ ID NO: 2041 - RNA, 17 nt, Artificial Sequence
  Synthetic oligonucleotide: PDCD1-2547
cuuccuccacauccacg

SEQ ID NO: 2042 - RNA, 17 nt, Artificial Sequence
  Synthetic oligonucleotide: PDCD1-2548
uuccuccacauccacgu

SEQ ID NO: 2043 - RNA, 17 nt, Artificial Sequence
  Synthetic oligonucleotide: PDCD1-2550
agugacagaggcagugc

SEQ ID NO: 2044 - RNA, 17 nt, Artificial Sequence
  Synthetic oligonucleotide: PDCD1-2552
ugacagaggcagugcug

SEQ ID NO: 2045 - RNA, 17 nt, Artificial Sequence
  Synthetic oligonucleotide: PDCD1-2554
agaggcagugcuggggg

SEQ ID NO: 2046 - RNA, 17 nt, Artificial Sequence
  Synthetic oligonucleotide: PDCD1-2557
cagugcugggggaggag

SEQ ID NO: 2047 - RNA, 17 nt, Artificial Sequence
  Synthetic oligonucleotide: PDCD1-2558
cugggggaggaggggug

SEQ ID NO: 2048 - RNA, 17 nt, Artificial Sequence
  Synthetic oligonucleotide: PDCD1-2563
aggggugaggagggggu

SEQ ID NO: 2049 - RNA, 17 nt, Artificial Sequence
  Synthetic oligonucleotide: PDCD1-2564
ugaggaggggguaggac

SEQ ID NO: 2050 - RNA, 17 nt, Artificial Sequence
  Synthetic oligonucleotide: PDCD1-2566
aggaggggguaggacug

SEQ ID NO: 2051 - RNA, 17 nt, Artificial Sequence
  Synthetic oligonucleotide: PDCD1-2569
uaggacuggggagaggg

SEQ ID NO: 2052 - RNA, 17 nt, Artificial Sequence
  Synthetic oligonucleotide: PDCD1-2570
aggacuggggagagggu

SEQ ID NO: 2053 - RNA, 17 nt, Artificial Sequence
  Synthetic oligonucleotide: PDCD1-2573
uggggagaggguggggg

SEQ ID NO: 2054 - RNA, 17 nt, Artificial Sequence
  Synthetic oligonucleotide: PDCD1-2576
agagagagacagagaca

SEQ ID NO: 2055 - RNA, 17 nt, Artificial Sequence
  Synthetic oligonucleotide: PDCD1-2577
cagagacagggagacag

SEQ ID NO: 2056 - RNA, 17 nt, Artificial Sequence
  Synthetic oligonucleotide: PDCD1-2578
cagggagacagaggaga

SEQ ID NO: 2057 - RNA, 17 nt, Artificial Sequence
  Synthetic oligonucleotide: PDCD1-2579
agggagacagaggagau

SEQ ID NO: 2058 - RNA, 17 nt, Artificial Sequence
  Synthetic oligonucleotide: PDCD1-2581
agacagaggagaugggg

SEQ ID NO: 2059 - RNA, 17 nt, Artificial Sequence
  Synthetic oligonucleotide: PDCD1-2582
cagaggagauggggagg

SEQ ID NO: 2060 - RNA, 17 nt, Artificial Sequence
  Synthetic oligonucleotide: PDCD1-2583
aggagauggggaggagg

SEQ ID NO: 2061 - RNA, 17 nt, Artificial Sequence
  Synthetic oligonucleotide: PDCD1-2586
ccccacgcccuaccccg

SEQ ID NO: 2062 - RNA, 17 nt, Artificial Sequence
  Synthetic oligonucleotide: PDCD1-2587
cccacgcccuaccccgu

SEQ ID NO: 2063 - RNA, 17 nt, Artificial Sequence
  Synthetic oligonucleotide: PDCD1-2588
ccacgcccuaccccgug

SEQ ID NO: 2064 - RNA, 17 nt, Artificial Sequence
  Synthetic oligonucleotide: PDCD1-2589
cacgcccuaccccgugg

SEQ ID NO: 2065 - RNA, 17 nt, Artificial Sequence
  Synthetic oligonucleotide: PDCD1-2593
ccgagcugccccuccug

SEQ ID NO: 2066 - RNA, 17 nt, Artificial Sequence
  Synthetic oligonucleotide: PDCD1-2595
ccccuccugaggcugcc

SEQ ID NO: 2067 - RNA, 17 nt, Artificial Sequence
  Synthetic oligonucleotide: PDCD1-2596
cuccugaggcugccggg

SEQ ID NO: 2068 - RNA, 17 nt, Artificial Sequence
  Synthetic oligonucleotide: PDCD1-2597
uccugaggcugccgggu

SEQ ID NO: 2069 - RNA, 17 nt, Artificial Sequence
  Synthetic oligonucleotide: PDCD1-2598
ccugaggcugccgggug

SEQ ID NO: 2070 - RNA, 17 nt, Artificial Sequence
  Synthetic oligonucleotide: PDCD1-2599
cugaggcugccgggugg

SEQ ID NO: 2071 - RNA, 17 nt, Artificial Sequence
  Synthetic oligonucleotide: PDCD1-2601
caucccccccaucuccc

SEQ ID NO: 2072 - RNA, 17 nt, Artificial Sequence
  Synthetic oligonucleotide: PDCD1-2602
aucccccccaucucccu

SEQ ID NO: 2073 - RNA, 17 nt, Artificial Sequence
  Synthetic oligonucleotide: PDCD1-2603
ucccccccaucucccug

SEQ ID NO: 2074 - RNA, 17 nt, Artificial Sequence
  Synthetic oligonucleotide: PDCD1-2604
cccccccaucucccugg

SEQ ID NO: 2075 - RNA, 17 nt, Artificial Sequence
  Synthetic oligonucleotide: PDCD1-2605
cccaucucccugggggc

SEQ ID NO: 2076 - RNA, 17 nt, Artificial Sequence
  Synthetic oligonucleotide: PDCD1-2606
ccaucucccugggggcc

SEQ ID NO: 2077 - RNA, 17 nt, Artificial Sequence
  Synthetic oligonucleotide: PDCD1-2609
ccgggccucccugccug

SEQ ID NO: 2078 - RNA, 17 nt, Artificial Sequence
  Synthetic oligonucleotide: PDCD1-2611
ucccugccuggggaagg

SEQ ID NO: 2079 - RNA, 17 nt, Artificial Sequence
  Synthetic oligonucleotide: PDCD1-2612
cccugccuggggaaggu

SEQ ID NO: 2080 - RNA, 17 nt, Artificial Sequence
  Synthetic oligonucleotide: PDCD1-2613
ugccuggggaagguggg

SEQ ID NO: 2081 - RNA, 17 nt, Artificial Sequence
  Synthetic oligonucleotide: PDCD1-2614
agguggguggcccccuc

SEQ ID NO: 2082 - RNA, 17 nt, Artificial Sequence
  Synthetic oligonucleotide: PDCD1-2616
uggcccccucugggcuc

SEQ ID NO: 2083 - RNA, 17 nt, Artificial Sequence
  Synthetic oligonucleotide: PDCD1-2617
cucugggcucagguucc

SEQ ID NO: 2084 - RNA, 17 nt, Artificial Sequence
  Synthetic oligonucleotide: PDCD1-2618
ucugggcucagguuccu

SEQ ID NO: 2085 - RNA, 17 nt, Artificial Sequence
  Synthetic oligonucleotide: PDCD1-2619
caggaaccugagcccag

SEQ ID NO: 2086 - RNA, 17 nt, Artificial Sequence
  Synthetic oligonucleotide: PDCD1-2620
aggaaccugagcccaga

SEQ ID NO: 2087 - RNA, 17 nt, Artificial Sequence
  Synthetic oligonucleotide: PDCD1-2624
acccaccuuccccaggc

SEQ ID NO: 2088 - RNA, 17 nt, Artificial Sequence
  Synthetic oligonucleotide: PDCD1-2625
cccaccuuccccaggca

SEQ ID NO: 2089 - RNA, 17 nt, Artificial Sequence
  Synthetic oligonucleotide: PDCD1-2626
accuuccccaggcaggg

SEQ ID NO: 2090 - RNA, 17 nt, Artificial Sequence
  Synthetic oligonucleotide: PDCD1-2627
ccccaggcagggaggcc

SEQ ID NO: 2091 - RNA, 17 nt, Artificial Sequence
  Synthetic oligonucleotide: PDCD1-2628
agggaggcccggccccc

SEQ ID NO: 2092 - RNA, 17 nt, Artificial Sequence
  Synthetic oligonucleotide: PDCD1-2630
cccggcccccagggaga

SEQ ID NO: 2093 - RNA, 17 nt, Artificial Sequence
  Synthetic oligonucleotide: PDCD1-2631
ccggcccccagggagau

SEQ ID NO: 2094 - RNA, 17 nt, Artificial Sequence
  Synthetic oligonucleotide: PDCD1-2632
cggcccccagggagaug

SEQ ID NO: 2095 - RNA, 17 nt, Artificial Sequence
  Synthetic oligonucleotide: PDCD1-2635
cccccagggagaugggg

SEQ ID NO: 2096 - RNA, 17 nt, Artificial Sequence
  Synthetic oligonucleotide: PDCD1-2636
cagggagauggggggga

SEQ ID NO: 2097 - RNA, 17 nt, Artificial Sequence
  Synthetic oligonucleotide: PDCD1-2637
agggagaugggggggau

SEQ ID NO: 2098 - RNA, 17 nt, Artificial Sequence
  Synthetic oligonucleotide: PDCD1-2643
aagggccugcccccacc

SEQ ID NO: 2099 - RNA, 17 nt, Artificial Sequence
  Synthetic oligonucleotide: PDCD1-2644
ccccacccggcagccuc

SEQ ID NO: 2100 - RNA, 17 nt, Artificial Sequence
  Synthetic oligonucleotide: PDCD1-2645
cacccggcagccucagg

SEQ ID NO: 2101 - RNA, 17 nt, Artificial Sequence
  Synthetic oligonucleotide: PDCD1-2646
acccggcagccucagga

SEQ ID NO: 2102 - RNA, 17 nt, Artificial Sequence
  Synthetic oligonucleotide: PDCD1-2647
cccggcagccucaggag

SEQ ID NO: 2103 - RNA, 17 nt, Artificial Sequence
  Synthetic oligonucleotide: PDCD1-2648
ccucaggaggggcagcu

SEQ ID NO: 2104 - RNA, 17 nt, Artificial Sequence
  Synthetic oligonucleotide: PDCD1-2649
cucaggaggggcagcuc

SEQ ID NO: 2105 - RNA, 17 nt, Artificial Sequence
  Synthetic oligonucleotide: PDCD1-2650
aggaggggcagcucggg

SEQ ID NO: 2106 - RNA, 17 nt, Artificial Sequence
  Synthetic oligonucleotide: PDCD1-2654
agugagcagagacacag

SEQ ID NO: 2107 - RNA, 17 nt, Artificial Sequence
  Synthetic oligonucleotide: PDCD1-2656
agagacacagaggagga

SEQ ID NO: 2108 - RNA, 17 nt, Artificial Sequence
  Synthetic oligonucleotide: PDCD1-2658
agacacagaggaggaag

SEQ ID NO: 2109 - RNA, 17 nt, Artificial Sequence
  Synthetic oligonucleotide: PDCD1-2659
aggaaggggcccugagc

SEQ ID NO: 2110 - RNA, 17 nt, Artificial Sequence
  Synthetic oligonucleotide: PDCD1-2662
agcuggggagaccccca

SEQ ID NO: 2111 - RNA, 17 nt, Artificial Sequence
  Synthetic oligonucleotide: PDCD1-2664
cuggggagacccccacg

SEQ ID NO: 2112 - RNA, 17 nt, Artificial Sequence
  Synthetic oligonucleotide: PDCD1-2667
ccccacgggguagggcg

SEQ ID NO: 2113 - RNA, 17 nt, Artificial Sequence
  Synthetic oligonucleotide: PDCD1-2669
ccacgggguagggcgug

SEQ ID NO: 2114 - RNA, 17 nt, Artificial Sequence
  Synthetic oligonucleotide: PDCD1-2670
cacgggguagggcgugg

SEQ ID NO: 2115 - RNA, 17 nt, Artificial Sequence
  Synthetic oligonucleotide: PDCD1-2672
uagggcgugggggccac

SEQ ID NO: 2116 - RNA, 17 nt, Artificial Sequence
  Synthetic oligonucleotide: PDCD1-2675
cgcccacguggaugugg

SEQ ID NO: 2117 - RNA, 17 nt, Artificial Sequence
  Synthetic oligonucleotide: PDCD1-2676
cguggauguggaggaag

SEQ ID NO: 2118 - RNA, 17 nt, Artificial Sequence
  Synthetic oligonucleotide: PDCD1-2678
uggauguggaggaagag

SEQ ID NO: 2119 - RNA, 17 nt, Artificial Sequence
  Synthetic oligonucleotide: PDCD1-2680
uguggaggaagaggggg

SEQ ID NO: 2120 - RNA, 17 nt, Artificial Sequence
  Synthetic oligonucleotide: PDCD1-2682
aagagggggcgggagca

SEQ ID NO: 2121 - RNA, 17 nt, Artificial Sequence
  Synthetic oligonucleotide: PDCD1-2683
agagggggcgggagcaa

SEQ ID NO: 2122 - RNA, 17 nt, Artificial Sequence
  Synthetic oligonucleotide: PDCD1-2687
cucccuucaaccugacc

SEQ ID NO: 2123 - RNA, 17 nt, Artificial Sequence
  Synthetic oligonucleotide: PDCD1-2688
ucccuucaaccugaccu

SEQ ID NO: 2124 - RNA, 17 nt, Artificial Sequence
  Synthetic oligonucleotide: PDCD1-2689
caccuccgccugagcag

SEQ ID NO: 2125 - RNA, 17 nt, Artificial Sequence
  Synthetic oligonucleotide: PDCD1-2690
cgccugagcaguggaga

SEQ ID NO: 2126 - RNA, 17 nt, Artificial Sequence
  Synthetic oligonucleotide: PDCD1-2691
cugagcaguggagaagg

SEQ ID NO: 2127 - RNA, 17 nt, Artificial Sequence
  Synthetic oligonucleotide: PDCD1-2692
uggagaaggcggcacuc

SEQ ID NO: 2128 - RNA, 17 nt, Artificial Sequence
  Synthetic oligonucleotide: PDCD1-2693
agaaggcggcacucugg

SEQ ID NO: 2129 - RNA, 17 nt, Artificial Sequence
  Synthetic oligonucleotide: PDCD1-2695
aaggcggcacucuggug

SEQ ID NO: 2130 - RNA, 17 nt, Artificial Sequence
  Synthetic oligonucleotide: PDCD1-228
ucugguggggcugcucc

SEQ ID NO: 2131 - RNA, 20 nt, Artificial Sequence
  Synthetic oligonucleotide: PDCD1-2697
gucacaccccgguacccagc

SEQ ID NO: 2132 - RNA, 20 nt, Artificial Sequence
  Synthetic oligonucleotide: PDCD1-2698
ucacaccccgguacccagca

SEQ ID NO: 2133 - RNA, 20 nt, Artificial Sequence
  Synthetic oligonucleotide: PDCD1-2699
cgguacccagcagggcccag

SEQ ID NO: 2134 - RNA, 20 nt, Artificial Sequence
  Synthetic oligonucleotide: PDCD1-2700
gguacccagcagggcccaga

SEQ ID NO: 2135 - RNA, 20 nt, Artificial Sequence
  Synthetic oligonucleotide: PDCD1-2701
gggcccagagggacugucuu

SEQ ID NO: 2136 - RNA, 20 nt, Artificial Sequence
  Synthetic oligonucleotide: PDCD1-2702
cagagggacugucuuaggcu

SEQ ID NO: 2137 - RNA, 20 nt, Artificial Sequence
  Synthetic oligonucleotide: PDCD1-2703
ggacugucuuaggcuuggcc

SEQ ID NO: 2138 - RNA, 20 nt, Artificial Sequence
  Synthetic oligonucleotide: PDCD1-2704
gacugucuuaggcuuggccu

SEQ ID NO: 2139 - RNA, 20 nt, Artificial Sequence
  Synthetic oligonucleotide: PDCD1-2705
ugggugaaaccacccucccc

SEQ ID NO: 2140 - RNA, 20 nt, Artificial Sequence
  Synthetic oligonucleotide: PDCD1-2706
aaaccacccuccccaggccu

SEQ ID NO: 2141 - RNA, 20 nt, Artificial Sequence
  Synthetic oligonucleotide: PDCD1-2707
ccccaggccuuggcaucccc

SEQ ID NO: 2142 - RNA, 20 nt, Artificial Sequence
  Synthetic oligonucleotide: PDCD1-2708
gccuuggcauccccaggugc

SEQ ID NO: 2143 - RNA, 20 nt, Artificial Sequence
  Synthetic oligonucleotide: PDCD1-2709
uggcauccccaggugcaggc

SEQ ID NO: 2144 - RNA, 20 nt, Artificial Sequence
  Synthetic oligonucleotide: PDCD1-2710
auccccaggugcaggcuggc

SEQ ID NO: 2145 - RNA, 20 nt, Artificial Sequence
  Synthetic oligonucleotide: PDCD1-2711
uccccaggugcaggcuggcu

SEQ ID NO: 2146 - RNA, 20 nt, Artificial Sequence
  Synthetic oligonucleotide: PDCD1-2712
ugcaggcuggcugggcacag

SEQ ID NO: 2147 - RNA, 20 nt, Artificial Sequence
  Synthetic oligonucleotide: PDCD1-2713
gcaggcuggcugggcacaga

SEQ ID NO: 2148 - RNA, 20 nt, Artificial Sequence
  Synthetic oligonucleotide: PDCD1-2714
gcugggcacagagggccagc

SEQ ID NO: 2149 - RNA, 20 nt, Artificial Sequence
  Synthetic oligonucleotide: PDCD1-2715
cugggcacagagggccagcc

SEQ ID NO: 2150 - RNA, 20 nt, Artificial Sequence
  Synthetic oligonucleotide: PDCD1-2716
agagggccagccgggcacag

SEQ ID NO: 2151 - RNA, 20 nt, Artificial Sequence
  Synthetic oligonucleotide: PDCD1-2717
gagggccagccgggcacaga

SEQ ID NO: 2152 - RNA, 20 nt, Artificial Sequence
  Synthetic oligonucleotide: PDCD1-2718
cagccgggcacagagggucc

SEQ ID NO: 2153 - RNA, 20 nt, Artificial Sequence
  Synthetic oligonucleotide: PDCD1-2719
gggcacagaggguccaggag

SEQ ID NO: 2154 - RNA, 20 nt, Artificial Sequence
  Synthetic oligonucleotide: PDCD1-2720
ggcacagaggguccaggagc

SEQ ID NO: 2155 - RNA, 20 nt, Artificial Sequence
  Synthetic oligonucleotide: PDCD1-2721
gaggguccaggagcgggcug

SEQ ID NO: 2156 - RNA, 20 nt, Artificial Sequence
  Synthetic oligonucleotide: PDCD1-2722
uguggucacaguguacacag

SEQ ID NO: 2157 - RNA, 20 nt, Artificial Sequence
  Synthetic oligonucleotide: PDCD1-2723
guggucacaguguacacaga

SEQ ID NO: 2158 - RNA, 20 nt, Artificial Sequence
  Synthetic oligonucleotide: PDCD1-2724
acaguguacacagagggccc

SEQ ID NO: 2159 - RNA, 20 nt, Artificial Sequence
  Synthetic oligonucleotide: PDCD1-2725
caguguacacagagggccca

SEQ ID NO: 2160 - RNA, 20 nt, Artificial Sequence
  Synthetic oligonucleotide: PDCD1-2726
acacagagggcccaggguca

SEQ ID NO: 2161 - RNA, 20 nt, Artificial Sequence
  Synthetic oligonucleotide: PDCD1-2727
cacagagggcccagggucac

SEQ ID NO: 2162 - RNA, 20 nt, Artificial Sequence
  Synthetic oligonucleotide: PDCD1-2728
cccagggucacgggcagccc

SEQ ID NO: 2163 - RNA, 20 nt, Artificial Sequence
  Synthetic oligonucleotide: PDCD1-2729
gucacgggcagcccaggaag

SEQ ID NO: 2164 - RNA, 20 nt, Artificial Sequence
  Synthetic oligonucleotide: PDCD1-2730
ggcucccucucuccucgauc

SEQ ID NO: 2165 - RNA, 20 nt, Artificial Sequence
  Synthetic oligonucleotide: PDCD1-2731
gcucccucucuccucgaucc

SEQ ID NO: 2166 - RNA, 20 nt, Artificial Sequence
  Synthetic oligonucleotide: PDCD1-2732
cuccucgauccgggagagug

SEQ ID NO: 2167 - RNA, 20 nt, Artificial Sequence
  Synthetic oligonucleotide: PDCD1-2733
gauccgggagagugaggcca

SEQ ID NO: 2168 - RNA, 20 nt, Artificial Sequence
  Synthetic oligonucleotide: PDCD1-2734
ugaggccaaggccuccccca

SEQ ID NO: 2169 - RNA, 20 nt, Artificial Sequence
  Synthetic oligonucleotide: PDCD1-2735
gccaaggccucccccacgga

SEQ ID NO: 2170 - RNA, 20 nt, Artificial Sequence
  Synthetic oligonucleotide: PDCD1-2736
cccccacggauggucugaac

SEQ ID NO: 2171 - RNA, 20 nt, Artificial Sequence
  Synthetic oligonucleotide: PDCD1-2737
ccccacggauggucugaaca

SEQ ID NO: 2172 - RNA, 20 nt, Artificial Sequence
  Synthetic oligonucleotide: PDCD1-2738
cggauggucugaacagggcu

SEQ ID NO: 2173 - RNA, 20 nt, Artificial Sequence
  Synthetic oligonucleotide: PDCD1-2739
ggauggucugaacagggcuc

SEQ ID NO: 2174 - RNA, 20 nt, Artificial Sequence
  Synthetic oligonucleotide: PDCD1-2740
gauggucugaacagggcucg

SEQ ID NO: 2175 - RNA, 20 nt, Artificial Sequence
  Synthetic oligonucleotide: PDCD1-2741
acagggcucggggagagccc

SEQ ID NO: 2176 - RNA, 20 nt, Artificial Sequence
  Synthetic oligonucleotide: PDCD1-2742
ucggggagagcccuggaauc

SEQ ID NO: 2177 - RNA, 20 nt, Artificial Sequence
  Synthetic oligonucleotide: PDCD1-2743
cggggagagcccuggaaucu

SEQ ID NO: 2178 - RNA, 20 nt, Artificial Sequence
  Synthetic oligonucleotide: PDCD1-2744
uggaaucugggcagagaccc

SEQ ID NO: 2179 - RNA, 20 nt, Artificial Sequence
  Synthetic oligonucleotide: PDCD1-2745
aaucugggcagagacccagg

SEQ ID NO: 2180 - RNA, 20 nt, Artificial Sequence
  Synthetic oligonucleotide: PDCD1-2746
aucugggcagagacccaggc

SEQ ID NO: 2181 - RNA, 20 nt, Artificial Sequence
  Synthetic oligonucleotide: PDCD1-2747
ggcgggcacaauccccaccc

SEQ ID NO: 2182 - RNA, 20 nt, Artificial Sequence
  Synthetic oligonucleotide: PDCD1-2748
gggcacaauccccacccagg

SEQ ID NO: 2183 - RNA, 20 nt, Artificial Sequence
  Synthetic oligonucleotide: PDCD1-2749
ggcacaauccccacccagga

SEQ ID NO: 2184 - RNA, 20 nt, Artificial Sequence
  Synthetic oligonucleotide: PDCD1-2750
uccccacccaggagggaucc

SEQ ID NO: 2185 - RNA, 20 nt, Artificial Sequence
  Synthetic oligonucleotide: PDCD1-2751
agaacuguccucacucgaac

SEQ ID NO: 2186 - RNA, 20 nt, Artificial Sequence
  Synthetic oligonucleotide: PDCD1-2752
ucacucgaacagguacacuu

SEQ ID NO: 2187 - RNA, 20 nt, Artificial Sequence
  Synthetic oligonucleotide: PDCD1-2753
acuuugacgucguaaagcca

SEQ ID NO: 2188 - RNA, 20 nt, Artificial Sequence
  Synthetic oligonucleotide: PDCD1-2754
aagccaagguuagucccaca

SEQ ID NO: 2189 - RNA, 20 nt, Artificial Sequence
  Synthetic oligonucleotide: PDCD1-2755
agccaagguuagucccacau

SEQ ID NO: 2190 - RNA, 20 nt, Artificial Sequence
  Synthetic oligonucleotide: PDCD1-2756
gccaagguuagucccacaug

SEQ ID NO: 2191 - RNA, 20 nt, Artificial Sequence
  Synthetic oligonucleotide: PDCD1-2757
auggggcucaucccauccuu

SEQ ID NO: 2192 - RNA, 20 nt, Artificial Sequence
  Synthetic oligonucleotide: PDCD1-2758
uccuuaggaaaacucgagug

SEQ ID NO: 2193 - RNA, 20 nt, Artificial Sequence
  Synthetic oligonucleotide: PDCD1-2759
gaaaacucgagugaggacca

SEQ ID NO: 2194 - RNA, 20 nt, Artificial Sequence
  Synthetic oligonucleotide: PDCD1-2760
gagugaggaccaaggaugcc

SEQ ID NO: 2195 - RNA, 20 nt, Artificial Sequence
  Synthetic oligonucleotide: PDCD1-2761
agugaggaccaaggaugccu

SEQ ID NO: 2196 - RNA, 20 nt, Artificial Sequence
  Synthetic oligonucleotide: PDCD1-2762
ggaccaaggaugccugggca

SEQ ID NO: 2197 - RNA, 20 nt, Artificial Sequence
  Synthetic oligonucleotide: PDCD1-2763
caaccccacucccauucugu

SEQ ID NO: 2198 - RNA, 20 nt, Artificial Sequence
  Synthetic oligonucleotide: PDCD1-2764
ucccauucugucggagccuc

SEQ ID NO: 2199 - RNA, 20 nt, Artificial Sequence
  Synthetic oligonucleotide: PDCD1-2765
cccauucugucggagccucu

SEQ ID NO: 2200 - RNA, 20 nt, Artificial Sequence
  Synthetic oligonucleotide: PDCD1-2766
cggagccucugggagccucc

SEQ ID NO: 2201 - RNA, 20 nt, Artificial Sequence
  Synthetic oligonucleotide: PDCD1-2767
cccacagccucugccccugc

SEQ ID NO: 2202 - RNA, 20 nt, Artificial Sequence
  Synthetic oligonucleotide: PDCD1-2768
ccacagccucugccccugcu

SEQ ID NO: 2203 - RNA, 20 nt, Artificial Sequence
  Synthetic oligonucleotide: PDCD1-2769
cacagccucugccccugcug

SEQ ID NO: 2204 - RNA, 20 nt, Artificial Sequence
  Synthetic oligonucleotide: PDCD1-2770
acagccucugccccugcugg

SEQ ID NO: 2205 - RNA, 20 nt, Artificial Sequence
  Synthetic oligonucleotide: PDCD1-2771
ccucugccccugcugggggc

SEQ ID NO: 2206 - RNA, 20 nt, Artificial Sequence
  Synthetic oligonucleotide: PDCD1-2772
cccugcugggggcaggugcc

SEQ ID NO: 2207 - RNA, 20 nt, Artificial Sequence
  Synthetic oligonucleotide: PDCD1-2773
gugccuggccucugccuucc

SEQ ID NO: 2208 - RNA, 20 nt, Artificial Sequence
  Synthetic oligonucleotide: PDCD1-2774
cccggcccaucccccuucgc

SEQ ID NO: 2209 - RNA, 20 nt, Artificial Sequence
  Synthetic oligonucleotide: PDCD1-2775
ccggcccaucccccuucgcu

SEQ ID NO: 2210 - RNA, 20 nt, Artificial Sequence
  Synthetic oligonucleotide: PDCD1-2776
cggcccaucccccuucgcug

SEQ ID NO: 2211 - RNA, 20 nt, Artificial Sequence
  Synthetic oligonucleotide: PDCD1-2777
aucccccuucgcuggggcac

SEQ ID NO: 2212 - RNA, 20 nt, Artificial Sequence
  Synthetic oligonucleotide: PDCD1-2778
uacugaaugacaacugucca

SEQ ID NO: 2213 - RNA, 20 nt, Artificial Sequence
  Synthetic oligonucleotide: PDCD1-2779
gacaacuguccauggcuaau

SEQ ID NO: 2214 - RNA, 20 nt, Artificial Sequence
  Synthetic oligonucleotide: PDCD1-2780
cccucaaagcuuccaccuug

SEQ ID NO: 2215 - RNA, 20 nt, Artificial Sequence
  Synthetic oligonucleotide: PDCD1-2781
caaagcuuccaccuugugga

SEQ ID NO: 2216 - RNA, 20 nt, Artificial Sequence
  Synthetic oligonucleotide: PDCD1-2782
uuguggauggccucacacca

SEQ ID NO: 2217 - RNA, 20 nt, Artificial Sequence
  Synthetic oligonucleotide: PDCD1-2783
ugaugccugcaacagccuga

SEQ ID NO: 2218 - RNA, 20 nt, Artificial Sequence
  Synthetic oligonucleotide: PDCD1-2784
gaugccugcaacagccugac

SEQ ID NO: 2219 - RNA, 20 nt, Artificial Sequence
  Synthetic oligonucleotide: PDCD1-2785
augccugcaacagccugacg

SEQ ID NO: 2220 - RNA, 20 nt, Artificial Sequence
  Synthetic oligonucleotide: PDCD1-2786
ugccugcaacagccugacgg

SEQ ID NO: 2221 - RNA, 20 nt, Artificial Sequence
  Synthetic oligonucleotide: PDCD1-2787
gccugcaacagccugacggg

SEQ ID NO: 2222 - RNA, 20 nt, Artificial Sequence
  Synthetic oligonucleotide: PDCD1-2788
ccugcaacagccugacgggg

SEQ ID NO: 2223 - RNA, 20 nt, Artificial Sequence
  Synthetic oligonucleotide: PDCD1-2789
caacagccugacgggggggc

SEQ ID NO: 2224 - RNA, 20 nt, Artificial Sequence
  Synthetic oligonucleotide: PDCD1-2790
aacagccugacgggggggcu

SEQ ID NO: 2225 - RNA, 20 nt, Artificial Sequence
  Synthetic oligonucleotide: PDCD1-2791
acagccugacgggggggcug

SEQ ID NO: 2226 - RNA, 20 nt, Artificial Sequence
  Synthetic oligonucleotide: PDCD1-2792
gccugacgggggggcugggg

SEQ ID NO: 2227 - RNA, 20 nt, Artificial Sequence
  Synthetic oligonucleotide: PDCD1-2793
ugacgggggggcuggggcgg

SEQ ID NO: 2228 - RNA, 20 nt, Artificial Sequence
  Synthetic oligonucleotide: PDCD1-2794
gggggggcuggggcgguggc

SEQ ID NO: 2229 - RNA, 20 nt, Artificial Sequence
  Synthetic oligonucleotide: PDCD1-2795
ggggggcuggggcgguggca

SEQ ID NO: 2230 - RNA, 20 nt, Artificial Sequence
  Synthetic oligonucleotide: PDCD1-2796
gggggcuggggcgguggcag

SEQ ID NO: 2231 - RNA, 20 nt, Artificial Sequence
  Synthetic oligonucleotide: PDCD1-2797
gcuggggcgguggcaggggc

SEQ ID NO: 2232 - RNA, 20 nt, Artificial Sequence
  Synthetic oligonucleotide: PDCD1-2798
gguggcaggggcuggcugug

SEQ ID NO: 2233 - RNA, 20 nt, Artificial Sequence
  Synthetic oligonucleotide: PDCD1-2799
ccagccuugaccuucuuccc

SEQ ID NO: 2234 - RNA, 20 nt, Artificial Sequence
  Synthetic oligonucleotide: PDCD1-2800
cagccuugaccuucuucccc

SEQ ID NO: 2235 - RNA, 20 nt, Artificial Sequence
  Synthetic oligonucleotide: PDCD1-2801
agccuugaccuucuuccccg

SEQ ID NO: 2236 - RNA, 20 nt, Artificial Sequence
  Synthetic oligonucleotide: PDCD1-2802
cccuccagcccacucgugcc

SEQ ID NO: 2237 - RNA, 20 nt, Artificial Sequence
  Synthetic oligonucleotide: PDCD1-2803
ccuccagcccacucgugcca

SEQ ID NO: 2238 - RNA, 20 nt, Artificial Sequence
  Synthetic oligonucleotide: PDCD1-2804
ccagcccacucgugccaggg

SEQ ID NO: 2239 - RNA, 20 nt, Artificial Sequence
  Synthetic oligonucleotide: PDCD1-2805
cagcccacucgugccagggu

SEQ ID NO: 2240 - RNA, 20 nt, Artificial Sequence
  Synthetic oligonucleotide: PDCD1-2806
agcccacucgugccagggug

SEQ ID NO: 2241 - RNA, 20 nt, Artificial Sequence
  Synthetic oligonucleotide: PDCD1-2807
ccacucgugccagggugggg

SEQ ID NO: 2242 - RNA, 20 nt, Artificial Sequence
  Synthetic oligonucleotide: PDCD1-2808
gugccaggguggggugguuc

SEQ ID NO: 2243 - RNA, 20 nt, Artificial Sequence
  Synthetic oligonucleotide: PDCD1-2809
ugccaggguggggugguuca

SEQ ID NO: 2244 - RNA, 20 nt, Artificial Sequence
  Synthetic oligonucleotide: PDCD1-2810
gccaggguggggugguucag

SEQ ID NO: 2245 - RNA, 20 nt, Artificial Sequence
  Synthetic oligonucleotide: PDCD1-2811
ccaggguggggugguucagg

SEQ ID NO: 2246 - RNA, 20 nt, Artificial Sequence
  Synthetic oligonucleotide: PDCD1-2812
gguucaggggguccagugcc

SEQ ID NO: 2247 - RNA, 20 nt, Artificial Sequence
  Synthetic oligonucleotide: PDCD1-2813
guucaggggguccagugccu

SEQ ID NO: 2248 - RNA, 20 nt, Artificial Sequence
  Synthetic oligonucleotide: PDCD1-2814
ggggguccagugccugggcc

SEQ ID NO: 2249 - RNA, 20 nt, Artificial Sequence
  Synthetic oligonucleotide: PDCD1-2815
guccagugccugggccuggc

SEQ ID NO: 2250 - RNA, 20 nt, Artificial Sequence
  Synthetic oligonucleotide: PDCD1-2816
cagugccugggccuggcugg

SEQ ID NO: 2251 - RNA, 20 nt, Artificial Sequence
  Synthetic oligonucleotide: PDCD1-2817
ccugggccuggcuggcggcc

SEQ ID NO: 2252 - RNA, 20 nt, Artificial Sequence
  Synthetic oligonucleotide: PDCD1-2818
gcggcccggcguuugugaaa

SEQ ID NO: 2253 - RNA, 20 nt, Artificial Sequence
  Synthetic oligonucleotide: PDCD1-2819
gagcauuuuauuacagcgaa

SEQ ID NO: 2254 - RNA, 20 nt, Artificial Sequence
  Synthetic oligonucleotide: PDCD1-2820
uauuacagcgaauggaaaac

SEQ ID NO: 2255 - RNA, 17 nt, Artificial Sequence
  Synthetic oligonucleotide: PDCD1-2821
acaccccgguacccagc

SEQ ID NO: 2256 - RNA, 17 nt, Artificial Sequence
  Synthetic oligonucleotide: PDCD1-2822
caccccgguacccagca

SEQ ID NO: 2257 - RNA, 17 nt, Artificial Sequence
  Synthetic oligonucleotide: PDCD1-2823
uacccagcagggcccag

SEQ ID NO: 2258 - RNA, 17 nt, Artificial Sequence
  Synthetic oligonucleotide: PDCD1-2824
acccagcagggcccaga

SEQ ID NO: 2259 - RNA, 17 nt, Artificial Sequence
  Synthetic oligonucleotide: PDCD1-2825
cccagagggacugucuu

SEQ ID NO: 2260 - RNA, 17 nt, Artificial Sequence
  Synthetic oligonucleotide: PDCD1-2826
agggacugucuuaggcu

SEQ ID NO: 2261 - RNA, 17 nt, Artificial Sequence
  Synthetic oligonucleotide: PDCD1-2827
cugucuuaggcuuggcc

SEQ ID NO: 2262 - RNA, 17 nt, Artificial Sequence
  Synthetic oligonucleotide: PDCD1-2828
ugucuuaggcuuggccu

SEQ ID NO: 2263 - RNA, 17 nt, Artificial Sequence
  Synthetic oligonucleotide: PDCD1-2829
gugaaaccacccucccc

SEQ ID NO: 2264 - RNA, 17 nt, Artificial Sequence
  Synthetic oligonucleotide: PDCD1-2830
ccacccuccccaggccu

SEQ ID NO: 2265 - RNA, 17 nt, Artificial Sequence
  Synthetic oligonucleotide: PDCD1-2831
caggccuuggcaucccc

SEQ ID NO: 2266 - RNA, 17 nt, Artificial Sequence
  Synthetic oligonucleotide: PDCD1-2832
uuggcauccccaggugc

SEQ ID NO: 2267 - RNA, 17 nt, Artificial Sequence
  Synthetic oligonucleotide: PDCD1-2833
cauccccaggugcaggc

SEQ ID NO: 2268 - RNA, 17 nt, Artificial Sequence
  Synthetic oligonucleotide: PDCD1-2834
cccaggugcaggcuggc

SEQ ID NO: 2269 - RNA, 17 nt, Artificial Sequence
  Synthetic oligonucleotide: PDCD1-2835
ccaggugcaggcuggcu

SEQ ID NO: 2270 - RNA, 17 nt, Artificial Sequence
  Synthetic oligonucleotide: PDCD1-2836
aggcuggcugggcacag

SEQ ID NO: 2271 - RNA, 17 nt, Artificial Sequence
  Synthetic oligonucleotide: PDCD1-2837
ggcuggcugggcacaga

SEQ ID NO: 2272 - RNA, 17 nt, Artificial Sequence
  Synthetic oligonucleotide: PDCD1-2838
gggcacagagggccagc

SEQ ID NO: 2273 - RNA, 17 nt, Artificial Sequence
  Synthetic oligonucleotide: PDCD1-2839
ggcacagagggccagcc

SEQ ID NO: 2274 - RNA, 17 nt, Artificial Sequence
  Synthetic oligonucleotide: PDCD1-2840
gggccagccgggcacag

SEQ ID NO: 2275 - RNA, 17 nt, Artificial Sequence
  Synthetic oligonucleotide: PDCD1-2841
ggccagccgggcacaga

SEQ ID NO: 2276 - RNA, 17 nt, Artificial Sequence
  Synthetic oligonucleotide: PDCD1-2842
ccgggcacagagggucc

SEQ ID NO: 2277 - RNA, 17 nt, Artificial Sequence
  Synthetic oligonucleotide: PDCD1-2843
cacagaggguccaggag

SEQ ID NO: 2278 - RNA, 17 nt, Artificial Sequence
  Synthetic oligonucleotide: PDCD1-2844
acagaggguccaggagc

SEQ ID NO: 2279 - RNA, 17 nt, Artificial Sequence
  Synthetic oligonucleotide: PDCD1-2845
gguccaggagcgggcug

SEQ ID NO: 2280 - RNA, 17 nt, Artificial Sequence
  Synthetic oligonucleotide: PDCD1-2846
ggucacaguguacacag

SEQ ID NO: 2281 - RNA, 17 nt, Artificial Sequence
  Synthetic oligonucleotide: PDCD1-2847
gucacaguguacacaga

SEQ ID NO: 2282 - RNA, 17 nt, Artificial Sequence
  Synthetic oligonucleotide: PDCD1-2848
guguacacagagggccc

SEQ ID NO: 2283 - RNA, 17 nt, Artificial Sequence
  Synthetic oligonucleotide: PDCD1-2849
uguacacagagggccca

SEQ ID NO: 2284 - RNA, 17 nt, Artificial Sequence
  Synthetic oligonucleotide: PDCD1-2850
cagagggcccaggguca

SEQ ID NO: 2285 - RNA, 17 nt, Artificial Sequence
  Synthetic oligonucleotide: PDCD1-2851
agagggcccagggucac

SEQ ID NO: 2286 - RNA, 17 nt, Artificial Sequence
  Synthetic oligonucleotide: PDCD1-2852
agggucacgggcagccc

SEQ ID NO: 2287 - RNA, 17 nt, Artificial Sequence
  Synthetic oligonucleotide: PDCD1-2853
acgggcagcccaggaag

SEQ ID NO: 2288 - RNA, 17 nt, Artificial Sequence
  Synthetic oligonucleotide: PDCD1-2854
ucccucucuccucgauc

SEQ ID NO: 2289 - RNA, 17 nt, Artificial Sequence
  Synthetic oligonucleotide: PDCD1-2855
cccucucuccucgaucc

SEQ ID NO: 2290 - RNA, 17 nt, Artificial Sequence
  Synthetic oligonucleotide: PDCD1-2856
cucgauccgggagagug

SEQ ID NO: 2291 - RNA, 17 nt, Artificial Sequence
  Synthetic oligonucleotide: PDCD1-2857
ccgggagagugaggcca

SEQ ID NO: 2292 - RNA, 17 nt, Artificial Sequence
  Synthetic oligonucleotide: PDCD1-2858
ggccaaggccuccccca

SEQ ID NO: 2293 - RNA, 17 nt, Artificial Sequence
  Synthetic oligonucleotide: PDCD1-2859
aaggccucccccacgga

SEQ ID NO: 2294 - RNA, 17 nt, Artificial Sequence
  Synthetic oligonucleotide: PDCD1-2860
ccacggauggucugaac

SEQ ID NO: 2295 - RNA, 17 nt, Artificial Sequence
  Synthetic oligonucleotide: PDCD1-2861
cacggauggucugaaca

SEQ ID NO: 2296 - RNA, 17 nt, Artificial Sequence
  Synthetic oligonucleotide: PDCD1-2862
auggucugaacagggcu

SEQ ID NO: 2297 - RNA, 17 nt, Artificial Sequence
  Synthetic oligonucleotide: PDCD1-2863
uggucugaacagggcuc

SEQ ID NO: 2298 - RNA, 17 nt, Artificial Sequence
  Synthetic oligonucleotide: PDCD1-2864
ggucugaacagggcucg

SEQ ID NO: 2299 - RNA, 17 nt, Artificial Sequence
  Synthetic oligonucleotide: PDCD1-2865
gggcucggggagagccc

SEQ ID NO: 2300 - RNA, 17 nt, Artificial Sequence
  Synthetic oligonucleotide: PDCD1-2866
gggagagcccuggaauc

SEQ ID NO: 2301 - RNA, 17 nt, Artificial Sequence
  Synthetic oligonucleotide: PDCD1-2867
ggagagcccuggaaucu

SEQ ID NO: 2302 - RNA, 17 nt, Artificial Sequence
  Synthetic oligonucleotide: PDCD1-2868
aaucugggcagagaccc

SEQ ID NO: 2303 - RNA, 17 nt, Artificial Sequence
  Synthetic oligonucleotide: PDCD1-2869
cugggcagagacccagg

SEQ ID NO: 2304 - RNA, 17 nt, Artificial Sequence
  Synthetic oligonucleotide: PDCD1-2870
ugggcagagacccaggc

SEQ ID NO: 2305 - RNA, 17 nt, Artificial Sequence
  Synthetic oligonucleotide: PDCD1-2871
gggcacaauccccaccc

SEQ ID NO: 2306 - RNA, 17 nt, Artificial Sequence
  Synthetic oligonucleotide: PDCD1-2872
cacaauccccacccagg

SEQ ID NO: 2307 - RNA, 17 nt, Artificial Sequence
  Synthetic oligonucleotide: PDCD1-2873
acaauccccacccagga

SEQ ID NO: 2308 - RNA, 17 nt, Artificial Sequence
  Synthetic oligonucleotide: PDCD1-2874
ccacccaggagggaucc

SEQ ID NO: 2309 - RNA, 17 nt, Artificial Sequence
  Synthetic oligonucleotide: PDCD1-2875
acuguccucacucgaac

SEQ ID NO: 2310 - RNA, 17 nt, Artificial Sequence
  Synthetic oligonucleotide: PDCD1-2876
cucgaacagguacacuu

SEQ ID NO: 2311 - RNA, 17 nt, Artificial Sequence
  Synthetic oligonucleotide: PDCD1-2877
uugacgucguaaagcca

SEQ ID NO: 2312 - RNA, 17 nt, Artificial Sequence
  Synthetic oligonucleotide: PDCD1-2878
ccaagguuagucccaca

SEQ ID NO: 2313 - RNA, 17 nt, Artificial Sequence
  Synthetic oligonucleotide: PDCD1-2879
caagguuagucccacau

SEQ ID NO: 2314 - RNA, 17 nt, Artificial Sequence
  Synthetic oligonucleotide: PDCD1-2880
aagguuagucccacaug

SEQ ID NO: 2315 - RNA, 17 nt, Artificial Sequence
  Synthetic oligonucleotide: PDCD1-2881
gggcucaucccauccuu

SEQ ID NO: 2316 - RNA, 17 nt, Artificial Sequence
  Synthetic oligonucleotide: PDCD1-2882
uuaggaaaacucgagug

SEQ ID NO: 2317 - RNA, 17 nt, Artificial Sequence
  Synthetic oligonucleotide: PDCD1-2883
aacucgagugaggacca

SEQ ID NO: 2318 - RNA, 17 nt, Artificial Sequence
  Synthetic oligonucleotide: PDCD1-2884
ugaggaccaaggaugcc

SEQ ID NO: 2319 - RNA, 17 nt, Artificial Sequence
  Synthetic oligonucleotide: PDCD1-2885
gaggaccaaggaugccu

SEQ ID NO: 2320 - RNA, 17 nt, Artificial Sequence
  Synthetic oligonucleotide: PDCD1-2886
ccaaggaugccugggca

SEQ ID NO: 2321 - RNA, 17 nt, Artificial Sequence
  Synthetic oligonucleotide: PDCD1-2887
ccccacucccauucugu

SEQ ID NO: 2322 - RNA, 17 nt, Artificial Sequence
  Synthetic oligonucleotide: PDCD1-2888
cauucugucggagccuc

SEQ ID NO: 2323 - RNA, 17 nt, Artificial Sequence
  Synthetic oligonucleotide: PDCD1-2889
auucugucggagccucu

SEQ ID NO: 2324 - RNA, 17 nt, Artificial Sequence
  Synthetic oligonucleotide: PDCD1-2890
agccucugggagccucc

SEQ ID NO: 2325 - RNA, 17 nt, Artificial Sequence
  Synthetic oligonucleotide: PDCD1-2891
acagccucugccccugc

SEQ ID NO: 2326 - RNA, 17 nt, Artificial Sequence
  Synthetic oligonucleotide: PDCD1-2892
cagccucugccccugcu

SEQ ID NO: 2327 - RNA, 17 nt, Artificial Sequence
  Synthetic oligonucleotide: PDCD1-2893
agccucugccccugcug

SEQ ID NO: 2328 - RNA, 17 nt, Artificial Sequence
  Synthetic oligonucleotide: PDCD1-2894
gccucugccccugcugg

SEQ ID NO: 2329 - RNA, 17 nt, Artificial Sequence
  Synthetic oligonucleotide: PDCD1-2895
cugccccugcugggggc

SEQ ID NO: 2330 - RNA, 17 nt, Artificial Sequence
  Synthetic oligonucleotide: PDCD1-2896
ugcugggggcaggugcc

SEQ ID NO: 2331 - RNA, 17 nt, Artificial Sequence
  Synthetic oligonucleotide: PDCD1-2897
ccuggccucugccuucc

SEQ ID NO: 2332 - RNA, 17 nt, Artificial Sequence
  Synthetic oligonucleotide: PDCD1-2898
ggcccaucccccuucgc

SEQ ID NO: 2333 - RNA, 17 nt, Artificial Sequence
  Synthetic oligonucleotide: PDCD1-2899
gcccaucccccuucgcu

SEQ ID NO: 2334 - RNA, 17 nt, Artificial Sequence
  Synthetic oligonucleotide: PDCD1-2900
cccaucccccuucgcug

SEQ ID NO: 2335 - RNA, 17 nt, Artificial Sequence
  Synthetic oligonucleotide: PDCD1-2901
ccccuucgcuggggcac

SEQ ID NO: 2336 - RNA, 17 nt, Artificial Sequence
  Synthetic oligonucleotide: PDCD1-2902
ugaaugacaacugucca

SEQ ID NO: 2337 - RNA, 17 nt, Artificial Sequence
  Synthetic oligonucleotide: PDCD1-2903
aacuguccauggcuaau

SEQ ID NO: 2338 - RNA, 17 nt, Artificial Sequence
  Synthetic oligonucleotide: PDCD1-2904
ucaaagcuuccaccuug

SEQ ID NO: 2339 - RNA, 17 nt, Artificial Sequence
  Synthetic oligonucleotide: PDCD1-2905
agcuuccaccuugugga

SEQ ID NO: 2340 - RNA, 17 nt, Artificial Sequence
  Synthetic oligonucleotide: PDCD1-2906
uggauggccucacacca

SEQ ID NO: 2341 - RNA, 17 nt, Artificial Sequence
  Synthetic oligonucleotide: PDCD1-2907
ugccugcaacagccuga

SEQ ID NO: 2342 - RNA, 17 nt, Artificial Sequence
  Synthetic oligonucleotide: PDCD1-2908
gccugcaacagccugac

SEQ ID NO: 2343 - RNA, 17 nt, Artificial Sequence
  Synthetic oligonucleotide: PDCD1-2909
ccugcaacagccugacg

SEQ ID NO: 2344 - RNA, 17 nt, Artificial Sequence
  Synthetic oligonucleotide: PDCD1-2910
cugcaacagccugacgg

SEQ ID NO: 2345 - RNA, 17 nt, Artificial Sequence
  Synthetic oligonucleotide: PDCD1-2911
ugcaacagccugacggg

SEQ ID NO: 2346 - RNA, 17 nt, Artificial Sequence
  Synthetic oligonucleotide: PDCD1-2912
gcaacagccugacgggg

SEQ ID NO: 2347 - RNA, 17 nt, Artificial Sequence
  Synthetic oligonucleotide: PDCD1-2913
cagccugacgggggggc

SEQ ID NO: 2348 - RNA, 17 nt, Artificial Sequence
  Synthetic oligonucleotide: PDCD1-2914
agccugacgggggggcu

SEQ ID NO: 2349 - RNA, 17 nt, Artificial Sequence
  Synthetic oligonucleotide: PDCD1-2915
gccugacgggggggcug

SEQ ID NO: 2350 - RNA, 17 nt, Artificial Sequence
  Synthetic oligonucleotide: PDCD1-2916
ugacgggggggcugggg

SEQ ID NO: 2351 - RNA, 17 nt, Artificial Sequence
  Synthetic oligonucleotide: PDCD1-2917
cgggggggcuggggcgg

SEQ ID NO: 2352 - RNA, 17 nt, Artificial Sequence
  Synthetic oligonucleotide: PDCD1-2918
ggggcuggggcgguggc

SEQ ID NO: 2353 - RNA, 17 nt, Artificial Sequence
  Synthetic oligonucleotide: PDCD1-2919
gggcuggggcgguggca

SEQ ID NO: 2354 - RNA, 17 nt, Artificial Sequence
  Synthetic oligonucleotide: PDCD1-2920
ggcuggggcgguggcag

SEQ ID NO: 2355 - RNA, 17 nt, Artificial Sequence
  Synthetic oligonucleotide: PDCD1-2921
ggggcgguggcaggggc

SEQ ID NO: 2356 - RNA, 17 nt, Artificial Sequence
  Synthetic oligonucleotide: PDCD1-2922
ggcaggggcuggcugug

SEQ ID NO: 2357 - RNA, 17 nt, Artificial Sequence
  Synthetic oligonucleotide: PDCD1-2923
gccuugaccuucuuccc

SEQ ID NO: 2358 - RNA, 17 nt, Artificial Sequence
  Synthetic oligonucleotide: PDCD1-2924
ccuugaccuucuucccc

SEQ ID NO: 2359 - RNA, 17 nt, Artificial Sequence
  Synthetic oligonucleotide: PDCD1-2925
cuugaccuucuuccccg

SEQ ID NO: 2360 - RNA, 17 nt, Artificial Sequence
  Synthetic oligonucleotide: PDCD1-2926
uccagcccacucgugcc

SEQ ID NO: 2361 - RNA, 17 nt, Artificial Sequence
  Synthetic oligonucleotide: PDCD1-2927
ccagcccacucgugcca

SEQ ID NO: 2362 - RNA, 17 nt, Artificial Sequence
  Synthetic oligonucleotide: PDCD1-2928
gcccacucgugccaggg

SEQ ID NO: 2363 - RNA, 17 nt, Artificial Sequence
  Synthetic oligonucleotide: PDCD1-2929
cccacucgugccagggu

SEQ ID NO: 2364 - RNA, 17 nt, Artificial Sequence
  Synthetic oligonucleotide: PDCD1-2930
ccacucgugccagggug

SEQ ID NO: 2365 - RNA, 17 nt, Artificial Sequence
  Synthetic oligonucleotide: PDCD1-2931
cucgugccagggugggg

SEQ ID NO: 2366 - RNA, 17 nt, Artificial Sequence
  Synthetic oligonucleotide: PDCD1-2932
ccaggguggggugguuc

SEQ ID NO: 2367 - RNA, 17 nt, Artificial Sequence
  Synthetic oligonucleotide: PDCD1-2933
caggguggggugguuca

SEQ ID NO: 2368 - RNA, 17 nt, Artificial Sequence
  Synthetic oligonucleotide: PDCD1-2934
aggguggggugguucag

SEQ ID NO: 2369 - RNA, 17 nt, Artificial Sequence
  Synthetic oligonucleotide: PDCD1-2935
ggguggggugguucagg

SEQ ID NO: 2370 - RNA, 17 nt, Artificial Sequence
  Synthetic oligonucleotide: PDCD1-2936
ucaggggguccagugcc

SEQ ID NO: 2371 - RNA, 17 nt, Artificial Sequence
  Synthetic oligonucleotide: PDCD1-2937
caggggguccagugccu

SEQ ID NO: 2372 - RNA, 17 nt, Artificial Sequence
  Synthetic oligonucleotide: PDCD1-2938
gguccagugccugggcc

SEQ ID NO: 2373 - RNA, 17 nt, Artificial Sequence
  Synthetic oligonucleotide: PDCD1-2939
cagugccugggccuggc

SEQ ID NO: 2374 - RNA, 17 nt, Artificial Sequence
  Synthetic oligonucleotide: PDCD1-2940
ugccugggccuggcugg

SEQ ID NO: 2375 - RNA, 17 nt, Artificial Sequence
  Synthetic oligonucleotide: PDCD1-2941
gggccuggcuggcggcc

SEQ ID NO: 2376 - RNA, 17 nt, Artificial Sequence
  Synthetic oligonucleotide: PDCD1-2942
gcccggcguuugugaaa

SEQ ID NO: 2377 - RNA, 17 nt, Artificial Sequence
  Synthetic oligonucleotide: PDCD1-2943
cauuuuauuacagcgaa

SEQ ID NO: 2378 - RNA, 17 nt, Artificial Sequence
  Synthetic oligonucleotide: PDCD1-2944
uacagcgaauggaaaac

SEQ ID NO: 2379 - RNA, 20 nt, Artificial Sequence
  Synthetic oligonucleotide: PDCD1-2945
cugggcccugcuggguaccg

SEQ ID NO: 2380 - RNA, 20 nt, Artificial Sequence
  Synthetic oligonucleotide: PDCD1-2946
ucugggcccugcuggguacc

SEQ ID NO: 2381 - RNA, 20 nt, Artificial Sequence
  Synthetic oligonucleotide: PDCD1-2947
cucugggcccugcuggguac

SEQ ID NO: 2382 - RNA, 20 nt, Artificial Sequence
  Synthetic oligonucleotide: PDCD1-2948
cagucccucugggcccugcu

SEQ ID NO: 2383 - RNA, 20 nt, Artificial Sequence
  Synthetic oligonucleotide: PDCD1-2949
acagucccucugggcccugc

SEQ ID NO: 2384 - RNA, 20 nt, Artificial Sequence
  Synthetic oligonucleotide: PDCD1-2950
aagccuaagacagucccucu

SEQ ID NO: 2385 - RNA, 20 nt, Artificial Sequence
  Synthetic oligonucleotide: PDCD1-2951
caagccuaagacagucccuc

SEQ ID NO: 2386 - RNA, 20 nt, Artificial Sequence
  Synthetic oligonucleotide: PDCD1-2952
uggggagggugguuucaccc

SEQ ID NO: 2387 - RNA, 20 nt, Artificial Sequence
  Synthetic oligonucleotide: PDCD1-2953
augccaaggccuggggaggg

SEQ ID NO: 2388 - RNA, 20 nt, Artificial Sequence
  Synthetic oligonucleotide: PDCD1-2954
gggaugccaaggccugggga

SEQ ID NO: 2389 - RNA, 20 nt, Artificial Sequence
  Synthetic oligonucleotide: PDCD1-2955
ggggaugccaaggccugggg

SEQ ID NO: 2390 - RNA, 20 nt, Artificial Sequence
  Synthetic oligonucleotide: PDCD1-2956
ccuggggaugccaaggccug

SEQ ID NO: 2391 - RNA, 20 nt, Artificial Sequence
  Synthetic oligonucleotide: PDCD1-2957
accuggggaugccaaggccu

SEQ ID NO: 2392 - RNA, 20 nt, Artificial Sequence
  Synthetic oligonucleotide: PDCD1-2958
caccuggggaugccaaggcc

SEQ ID NO: 2393 - RNA, 20 nt, Artificial Sequence
  Synthetic oligonucleotide: PDCD1-2959
gccugcaccuggggaugcca

SEQ ID NO: 2394 - RNA, 20 nt, Artificial Sequence
  Synthetic oligonucleotide: PDCD1-2960
gcccagccagccugcaccug

SEQ ID NO: 2395 - RNA, 20 nt, Artificial Sequence
  Synthetic oligonucleotide: PDCD1-2961
ugcccagccagccugcaccu

SEQ ID NO: 2396 - RNA, 20 nt, Artificial Sequence
  Synthetic oligonucleotide: PDCD1-2962
gugcccagccagccugcacc

SEQ ID NO: 2397 - RNA, 20 nt, Artificial Sequence
  Synthetic oligonucleotide: PDCD1-2963
cuggacccucugugcccggc

SEQ ID NO: 2398 - RNA, 20 nt, Artificial Sequence
  Synthetic oligonucleotide: PDCD1-2964
gcuccuggacccucugugcc

SEQ ID NO: 2399 - RNA, 20 nt, Artificial Sequence
  Synthetic oligonucleotide: PDCD1-2965
cugugaccacagcccgcucc

SEQ ID NO: 2400 - RNA, 20 nt, Artificial Sequence
  Synthetic oligonucleotide: PDCD1-2966
ccugggcugcccgugacccu

SEQ ID NO: 2401 - RNA, 20 nt, Artificial Sequence
  Synthetic oligonucleotide: PDCD1-2967
uccugggcugcccgugaccc

SEQ ID NO: 2402 - RNA, 20 nt, Artificial Sequence
  Synthetic oligonucleotide: PDCD1-2968
gagagagggagccucuuccu

SEQ ID NO: 2403 - RNA, 20 nt, Artificial Sequence
  Synthetic oligonucleotide: PDCD1-2969
ggagagagggagccucuucc

SEQ ID NO: 2404 - RNA, 20 nt, Artificial Sequence
  Synthetic oligonucleotide: PDCD1-2970
ucucccggaucgaggagaga

SEQ ID NO: 2405 - RNA, 20 nt, Artificial Sequence
  Synthetic oligonucleotide: PDCD1-2971
cucucccggaucgaggagag

SEQ ID NO: 2406 - RNA, 20 nt, Artificial Sequence
  Synthetic oligonucleotide: PDCD1-2972
ggccucacucucccggaucg

SEQ ID NO: 2407 - RNA, 20 nt, Artificial Sequence
  Synthetic oligonucleotide: PDCD1-2973
aggccuuggccucacucucc

SEQ ID NO: 2408 - RNA, 20 nt, Artificial Sequence
  Synthetic oligonucleotide: PDCD1-2974
accauccgugggggaggccu

SEQ ID NO: 2409 - RNA, 20 nt, Artificial Sequence
  Synthetic oligonucleotide: PDCD1-2975
guucagaccauccguggggg

SEQ ID NO: 2410 - RNA, 20 nt, Artificial Sequence
  Synthetic oligonucleotide: PDCD1-2976
ccuguucagaccauccgugg

SEQ ID NO: 2411 - RNA, 20 nt, Artificial Sequence
  Synthetic oligonucleotide: PDCD1-2977
cccuguucagaccauccgug

SEQ ID NO: 2412 - RNA, 20 nt, Artificial Sequence
  Synthetic oligonucleotide: PDCD1-2978
gcccuguucagaccauccgu

SEQ ID NO: 2413 - RNA, 20 nt, Artificial Sequence
  Synthetic oligonucleotide: PDCD1-2979
agcccuguucagaccauccg

SEQ ID NO: 2414 - RNA, 20 nt, Artificial Sequence
  Synthetic oligonucleotide: PDCD1-2980
gggucucugcccagauucca

SEQ ID NO: 2415 - RNA, 20 nt, Artificial Sequence
  Synthetic oligonucleotide: PDCD1-2981
ugggucucugcccagauucc

SEQ ID NO: 2416 - RNA, 20 nt, Artificial Sequence
  Synthetic oligonucleotide: PDCD1-2982
gguggggauugugcccgccu

SEQ ID NO: 2417 - RNA, 20 nt, Artificial Sequence
  Synthetic oligonucleotide: PDCD1-2983
ggguggggauugugcccgcc

SEQ ID NO: 2418 - RNA, 20 nt, Artificial Sequence
  Synthetic oligonucleotide: PDCD1-2984
uccaggaucccuccugggug

SEQ ID NO: 2419 - RNA, 20 nt, Artificial Sequence
  Synthetic oligonucleotide: PDCD1-2985
cuccaggaucccuccugggu

SEQ ID NO: 2420 - RNA, 20 nt, Artificial Sequence
  Synthetic oligonucleotide: PDCD1-2986
ucuccaggaucccuccuggg

SEQ ID NO: 2421 - RNA, 20 nt, Artificial Sequence
  Synthetic oligonucleotide: PDCD1-2987
cugucuccaggaucccuccu

SEQ ID NO: 2422 - RNA, 20 nt, Artificial Sequence
  Synthetic oligonucleotide: PDCD1-2988
ucugucuccaggaucccucc

SEQ ID NO: 2423 - RNA, 20 nt, Artificial Sequence
  Synthetic oligonucleotide: PDCD1-2989
aggacaguucuucugucucc

SEQ ID NO: 2424 - RNA, 20 nt, Artificial Sequence
  Synthetic oligonucleotide: PDCD1-2990
aaaguguaccuguucgagug

SEQ ID NO: 2425 - RNA, 20 nt, Artificial Sequence
  Synthetic oligonucleotide: PDCD1-2991
acgucaaaguuuagaugagc

SEQ ID NO: 2426 - RNA, 20 nt, Artificial Sequence
  Synthetic oligonucleotide: PDCD1-2992
gccccaugugggacuaaccu

SEQ ID NO: 2427 - RNA, 20 nt, Artificial Sequence
  Synthetic oligonucleotide: PDCD1-2993
ggaugggaugagccccaugu

SEQ ID NO: 2428 - RNA, 20 nt, Artificial Sequence
  Synthetic oligonucleotide: PDCD1-2994
aggaugggaugagccccaug

SEQ ID NO: 2429 - RNA, 20 nt, Artificial Sequence
  Synthetic oligonucleotide: PDCD1-2995
acucgaguuuuccuaaggau

SEQ ID NO: 2430 - RNA, 20 nt, Artificial Sequence
  Synthetic oligonucleotide: PDCD1-2996
cacucgaguuuuccuaagga

SEQ ID NO: 2431 - RNA, 20 nt, Artificial Sequence
  Synthetic oligonucleotide: PDCD1-2997
uccucacucgaguuuuccua

SEQ ID NO: 2432 - RNA, 20 nt, Artificial Sequence
  Synthetic oligonucleotide: PDCD1-2998
cugccuugcccaggcauccu

SEQ ID NO: 2433 - RNA, 20 nt, Artificial Sequence
  Synthetic oligonucleotide: PDCD1-2999
gcuccgacagaaugggagug

SEQ ID NO: 2434 - RNA, 20 nt, Artificial Sequence
  Synthetic oligonucleotide: PDCD1-3000
ggcuccgacagaaugggagu

SEQ ID NO: 2435 - RNA, 20 nt, Artificial Sequence
  Synthetic oligonucleotide: PDCD1-3001
aggcuccgacagaaugggag

SEQ ID NO: 2436 - RNA, 20 nt, Artificial Sequence
  Synthetic oligonucleotide: PDCD1-3002
cccagaggcuccgacagaau

SEQ ID NO: 2437 - RNA, 20 nt, Artificial Sequence
  Synthetic oligonucleotide: PDCD1-3003
ucccagaggcuccgacagaa

SEQ ID NO: 2438 - RNA, 20 nt, Artificial Sequence
  Synthetic oligonucleotide: PDCD1-3004
ggcagccgggaggcucccag

SEQ ID NO: 2439 - RNA, 20 nt, Artificial Sequence
  Synthetic oligonucleotide: PDCD1-3005
agaggcugugggcagccggg

SEQ ID NO: 2440 - RNA, 20 nt, Artificial Sequence
  Synthetic oligonucleotide: PDCD1-3006
ggcagaggcugugggcagcc

SEQ ID NO: 2441 - RNA, 20 nt, Artificial Sequence
  Synthetic oligonucleotide: PDCD1-3007
gggcagaggcugugggcagc

SEQ ID NO: 2442 - RNA, 20 nt, Artificial Sequence
  Synthetic oligonucleotide: PDCD1-3008
ccagcaggggcagaggcugu

SEQ ID NO: 2443 - RNA, 20 nt, Artificial Sequence
  Synthetic oligonucleotide: PDCD1-3009
cccagcaggggcagaggcug

SEQ ID NO: 2444 - RNA, 20 nt, Artificial Sequence
  Synthetic oligonucleotide: PDCD1-3010
ccugcccccagcaggggcag

SEQ ID NO: 2445 - RNA, 20 nt, Artificial Sequence
  Synthetic oligonucleotide: PDCD1-3011
caggcaccugcccccagcag

SEQ ID NO: 2446 - RNA, 20 nt, Artificial Sequence
  Synthetic oligonucleotide: PDCD1-3012
ccaggcaccugcccccagca

SEQ ID NO: 2447 - RNA, 20 nt, Artificial Sequence
  Synthetic oligonucleotide: PDCD1-3013
gccaggcaccugcccccagc

SEQ ID NO: 2448 - RNA, 20 nt, Artificial Sequence
  Synthetic oligonucleotide: PDCD1-3014
gggccgggaaggcagaggcc

SEQ ID NO: 2449 - RNA, 20 nt, Artificial Sequence
  Synthetic oligonucleotide: PDCD1-3015
gggaugggccgggaaggcag

SEQ ID NO: 2450 - RNA, 20 nt, Artificial Sequence
  Synthetic oligonucleotide: PDCD1-3016
cgaagggggaugggccggga

SEQ ID NO: 2451 - RNA, 20 nt, Artificial Sequence
  Synthetic oligonucleotide: PDCD1-3017
ccagcgaagggggaugggcc

SEQ ID NO: 2452 - RNA, 20 nt, Artificial Sequence
  Synthetic oligonucleotide: PDCD1-3018
cccagcgaagggggaugggc

SEQ ID NO: 2453 - RNA, 20 nt, Artificial Sequence
  Synthetic oligonucleotide: PDCD1-3019
gugccccagcgaagggggau

SEQ ID NO: 2454 - RNA, 20 nt, Artificial Sequence
  Synthetic oligonucleotide: PDCD1-3020
ugugccccagcgaaggggga

SEQ ID NO: 2455 - RNA, 20 nt, Artificial Sequence
  Synthetic oligonucleotide: PDCD1-3021
caccugugccccagcgaagg

SEQ ID NO: 2456 - RNA, 20 nt, Artificial Sequence
  Synthetic oligonucleotide: PDCD1-3022
ucaccugugccccagcgaag

SEQ ID NO: 2457 - RNA, 20 nt, Artificial Sequence
  Synthetic oligonucleotide: PDCD1-3023
gucaccugugccccagcgaa

SEQ ID NO: 2458 - RNA, 20 nt, Artificial Sequence
  Synthetic oligonucleotide: PDCD1-3024
ggucaccugugccccagcga

SEQ ID NO: 2459 - RNA, 20 nt, Artificial Sequence
  Synthetic oligonucleotide: PDCD1-3025
uggacaguugucauucagua

SEQ ID NO: 2460 - RNA, 20 nt, Artificial Sequence
  Synthetic oligonucleotide: PDCD1-3026
auggacaguugucauucagu

SEQ ID NO: 2461 - RNA, 20 nt, Artificial Sequence
  Synthetic oligonucleotide: PDCD1-3027
gagggggagccgauuagcca

SEQ ID NO: 2462 - RNA, 20 nt, Artificial Sequence
  Synthetic oligonucleotide: PDCD1-3028
acaagguggaagcuuugagg

SEQ ID NO: 2463 - RNA, 20 nt, Artificial Sequence
  Synthetic oligonucleotide: PDCD1-3029
cacaagguggaagcuuugag

SEQ ID NO: 2464 - RNA, 20 nt, Artificial Sequence
  Synthetic oligonucleotide: PDCD1-3030
ccacaagguggaagcuuuga

SEQ ID NO: 2465 - RNA, 20 nt, Artificial Sequence
  Synthetic oligonucleotide: PDCD1-3031
uccacaagguggaagcuuug

SEQ ID NO: 2466 - RNA, 20 nt, Artificial Sequence
  Synthetic oligonucleotide: PDCD1-3032
gugugaggccauccacaagg

SEQ ID NO: 2467 - RNA, 20 nt, Artificial Sequence
  Synthetic oligonucleotide: PDCD1-3033
auggugugaggccauccaca

SEQ ID NO: 2468 - RNA, 20 nt, Artificial Sequence
  Synthetic oligonucleotide: PDCD1-3034
ggaacuguggccauggugug

SEQ ID NO: 2469 - RNA, 20 nt, Artificial Sequence
  Synthetic oligonucleotide: PDCD1-3035
aagaucuggaacuguggcca

SEQ ID NO: 2470 - RNA, 20 nt, Artificial Sequence
  Synthetic oligonucleotide: PDCD1-3036
gguggaaagaucuggaacug

SEQ ID NO: 2471 - RNA, 20 nt, Artificial Sequence
  Synthetic oligonucleotide: PDCD1-3037
caucacacgguggaaagauc

SEQ ID NO: 2472 - RNA, 20 nt, Artificial Sequence
  Synthetic oligonucleotide: PDCD1-3038
cuguugcaggcaucacacgg

SEQ ID NO: 2473 - RNA, 20 nt, Artificial Sequence
  Synthetic oligonucleotide: PDCD1-3039
aggcuguugcaggcaucaca

SEQ ID NO: 2474 - RNA, 20 nt, Artificial Sequence
  Synthetic oligonucleotide: PDCD1-3040
cccccccgucaggcuguugc

SEQ ID NO: 2475 - RNA, 20 nt, Artificial Sequence
  Synthetic oligonucleotide: PDCD1-3041
accgccccagcccccccguc

SEQ ID NO: 2476 - RNA, 20 nt, Artificial Sequence
  Synthetic oligonucleotide: PDCD1-3042
aaggucaaggcuggaagggg

SEQ ID NO: 2477 - RNA, 20 nt, Artificial Sequence
  Synthetic oligonucleotide: PDCD1-3043
aagaaggucaaggcuggaag

SEQ ID NO: 2478 - RNA, 20 nt, Artificial Sequence
  Synthetic oligonucleotide: PDCD1-3044
gaagaaggucaaggcuggaa

SEQ ID NO: 2479 - RNA, 20 nt, Artificial Sequence
  Synthetic oligonucleotide: PDCD1-3045
ggaagaaggucaaggcugga

SEQ ID NO: 2480 - RNA, 20 nt, Artificial Sequence
  Synthetic oligonucleotide: PDCD1-3046
ccggggaagaaggucaaggc

SEQ ID NO: 2481 - RNA, 20 nt, Artificial Sequence
  Synthetic oligonucleotide: PDCD1-3047
ggccccggggaagaagguca

SEQ ID NO: 2482 - RNA, 20 nt, Artificial Sequence
  Synthetic oligonucleotide: PDCD1-3048
gggcagggccccggggaaga

SEQ ID NO: 2483 - RNA, 20 nt, Artificial Sequence
  Synthetic oligonucleotide: PDCD1-3049
ggcuggagggcagggccccg

SEQ ID NO: 2484 - RNA, 20 nt, Artificial Sequence
  Synthetic oligonucleotide: PDCD1-3050
gggcuggagggcagggcccc

SEQ ID NO: 2485 - RNA, 20 nt, Artificial Sequence
  Synthetic oligonucleotide: PDCD1-3051
ugggcuggagggcagggccc

SEQ ID NO: 2486 - RNA, 20 nt, Artificial Sequence
  Synthetic oligonucleotide: PDCD1-3052
cacgagugggcuggagggca

SEQ ID NO: 2487 - RNA, 20 nt, Artificial Sequence
  Synthetic oligonucleotide: PDCD1-3053
gcacgagugggcuggagggc

SEQ ID NO: 2488 - RNA, 20 nt, Artificial Sequence
  Synthetic oligonucleotide: PDCD1-3054
ccuggcacgagugggcugga

SEQ ID NO: 2489 - RNA, 20 nt, Artificial Sequence
  Synthetic oligonucleotide: PDCD1-3055
cccuggcacgagugggcugg

SEQ ID NO: 2490 - RNA, 20 nt, Artificial Sequence
  Synthetic oligonucleotide: PDCD1-3056
ccacccuggcacgagugggc

SEQ ID NO: 2491 - RNA, 20 nt, Artificial Sequence
  Synthetic oligonucleotide: PDCD1-3057
caccccacccuggcacgagu

SEQ ID NO: 2492 - RNA, 20 nt, Artificial Sequence
  Synthetic oligonucleotide: PDCD1-3058
ccaccccacccuggcacgag

SEQ ID NO: 2493 - RNA, 20 nt, Artificial Sequence
  Synthetic oligonucleotide: PDCD1-3059
cccccugaaccaccccaccc

SEQ ID NO: 2494 - RNA, 20 nt, Artificial Sequence
  Synthetic oligonucleotide: PDCD1-3060
cgccagccaggcccaggcac

SEQ ID NO: 2495 - RNA, 20 nt, Artificial Sequence
  Synthetic oligonucleotide: PDCD1-3061
ccgggccgccagccaggccc

SEQ ID NO: 2496 - RNA, 20 nt, Artificial Sequence
  Synthetic oligonucleotide: PDCD1-3062
caaacgccgggccgccagcc

SEQ ID NO: 2497 - RNA, 20 nt, Artificial Sequence
  Synthetic oligonucleotide: PDCD1-3063
caagccauuucacaaacgcc

SEQ ID NO: 2498 - RNA, 20 nt, Artificial Sequence
  Synthetic oligonucleotide: PDCD1-3064
gcaagccauuucacaaacgc

SEQ ID NO: 2499 - RNA, 20 nt, Artificial Sequence
  Synthetic oligonucleotide: PDCD1-3065
aaugcucagcacagaauaca

SEQ ID NO: 2500 - RNA, 17 nt, Artificial Sequence
  Synthetic oligonucleotide: PDCD1-3066
ggcccugcuggguaccg

SEQ ID NO: 2501 - RNA, 17 nt, Artificial Sequence
  Synthetic oligonucleotide: PDCD1-3067
gggcccugcuggguacc

SEQ ID NO: 2502 - RNA, 17 nt, Artificial Sequence
  Synthetic oligonucleotide: PDCD1-3068
ugggcccugcuggguac

SEQ ID NO: 2503 - RNA, 17 nt, Artificial Sequence
  Synthetic oligonucleotide: PDCD1-3069
ucccucugggcccugcu

SEQ ID NO: 2504 - RNA, 17 nt, Artificial Sequence
  Synthetic oligonucleotide: PDCD1-3070
gucccucugggcccugc

SEQ ID NO: 2505 - RNA, 17 nt, Artificial Sequence
  Synthetic oligonucleotide: PDCD1-3071
ccuaagacagucccucu

SEQ ID NO: 2506 - RNA, 17 nt, Artificial Sequence
  Synthetic oligonucleotide: PDCD1-3072
gccuaagacagucccuc

SEQ ID NO: 2507 - RNA, 17 nt, Artificial Sequence
  Synthetic oligonucleotide: PDCD1-3073
ggagggugguuucaccc

SEQ ID NO: 2508 - RNA, 17 nt, Artificial Sequence
  Synthetic oligonucleotide: PDCD1-3074
ccaaggccuggggaggg

SEQ ID NO: 2509 - RNA, 17 nt, Artificial Sequence
  Synthetic oligonucleotide: PDCD1-3075
augccaaggccugggga

SEQ ID NO: 2510 - RNA, 17 nt, Artificial Sequence
  Synthetic oligonucleotide: PDCD1-3076
gaugccaaggccugggg

SEQ ID NO: 2511 - RNA, 17 nt, Artificial Sequence
  Synthetic oligonucleotide: PDCD1-3077
ggggaugccaaggccug

SEQ ID NO: 2512 - RNA, 17 nt, Artificial Sequence
  Synthetic oligonucleotide: PDCD1-3078
uggggaugccaaggccu

SEQ ID NO: 2513 - RNA, 17 nt, Artificial Sequence
  Synthetic oligonucleotide: PDCD1-3079
cuggggaugccaaggcc

SEQ ID NO: 2514 - RNA, 17 nt, Artificial Sequence
  Synthetic oligonucleotide: PDCD1-3080
ugcaccuggggaugcca

SEQ ID NO: 2515 - RNA, 17 nt, Artificial Sequence
  Synthetic oligonucleotide: PDCD1-3081
cagccagccugcaccug

SEQ ID NO: 2516 - RNA, 17 nt, Artificial Sequence
  Synthetic oligonucleotide: PDCD1-3082
ccagccagccugcaccu

SEQ ID NO: 2517 - RNA, 17 nt, Artificial Sequence
  Synthetic oligonucleotide: PDCD1-3083
cccagccagccugcacc

SEQ ID NO: 2518 - RNA, 17 nt, Artificial Sequence
  Synthetic oligonucleotide: PDCD1-3084
gacccucugugcccggc

SEQ ID NO: 2519 - RNA, 17 nt, Artificial Sequence
  Synthetic oligonucleotide: PDCD1-3085
ccuggacccucugugcc

SEQ ID NO: 2520 - RNA, 17 nt, Artificial Sequence
  Synthetic oligonucleotide: PDCD1-3086
ugaccacagcccgcucc

SEQ ID NO: 2521 - RNA, 17 nt, Artificial Sequence
  Synthetic oligonucleotide: PDCD1-3087
gggcugcccgugacccu

SEQ ID NO: 2522 - RNA, 17 nt, Artificial Sequence
  Synthetic oligonucleotide: PDCD1-3088
ugggcugcccgugaccc

SEQ ID NO: 2523 - RNA, 17 nt, Artificial Sequence
  Synthetic oligonucleotide: PDCD1-3089
agagggagccucuuccu

SEQ ID NO: 2524 - RNA, 17 nt, Artificial Sequence
  Synthetic oligonucleotide: PDCD1-3090
gagagggagccucuucc

SEQ ID NO: 2525 - RNA, 17 nt, Artificial Sequence
  Synthetic oligonucleotide: PDCD1-3091
cccggaucgaggagaga

SEQ ID NO: 2526 - RNA, 17 nt, Artificial Sequence
  Synthetic oligonucleotide: PDCD1-3092
ucccggaucgaggagag

SEQ ID NO: 2527 - RNA, 17 nt, Artificial Sequence
  Synthetic oligonucleotide: PDCD1-3093
cucacucucccggaucg

SEQ ID NO: 2528 - RNA, 17 nt, Artificial Sequence
  Synthetic oligonucleotide: PDCD1-3094
ccuuggccucacucucc

SEQ ID NO: 2529 - RNA, 17 nt, Artificial Sequence
  Synthetic oligonucleotide: PDCD1-3095
auccgugggggaggccu

SEQ ID NO: 2530 - RNA, 17 nt, Artificial Sequence
  Synthetic oligonucleotide: PDCD1-3096
cagaccauccguggggg

SEQ ID NO: 2531 - RNA, 17 nt, Artificial Sequence
  Synthetic oligonucleotide: PDCD1-3097
guucagaccauccgugg

SEQ ID NO: 2532 - RNA, 17 nt, Artificial Sequence
  Synthetic oligonucleotide: PDCD1-3098
uguucagaccauccgug

SEQ ID NO: 2533 - RNA, 17 nt, Artificial Sequence
  Synthetic oligonucleotide: PDCD1-3099
cuguucagaccauccgu

SEQ ID NO: 2534 - RNA, 17 nt, Artificial Sequence
  Synthetic oligonucleotide: PDCD1-3100
ccuguucagaccauccg

SEQ ID NO: 2535 - RNA, 17 nt, Artificial Sequence
  Synthetic oligonucleotide: PDCD1-3101
ucucugcccagauucca

SEQ ID NO: 2536 - RNA, 17 nt, Artificial Sequence
  Synthetic oligonucleotide: PDCD1-3102
gucucugcccagauucc

SEQ ID NO: 2537 - RNA, 17 nt, Artificial Sequence
  Synthetic oligonucleotide: PDCD1-3103
ggggauugugcccgccu

SEQ ID NO: 2538 - RNA, 17 nt, Artificial Sequence
  Synthetic oligonucleotide: PDCD1-3104
uggggauugugcccgcc

SEQ ID NO: 2539 - RNA, 17 nt, Artificial Sequence
  Synthetic oligonucleotide: PDCD1-3105
aggaucccuccugggug

SEQ ID NO: 2540 - RNA, 17 nt, Artificial Sequence
  Synthetic oligonucleotide: PDCD1-3106
caggaucccuccugggu

SEQ ID NO: 2541 - RNA, 17 nt, Artificial Sequence
  Synthetic oligonucleotide: PDCD1-3107
ccaggaucccuccuggg

SEQ ID NO: 2542 - RNA, 17 nt, Artificial Sequence
  Synthetic oligonucleotide: PDCD1-3108
ucuccaggaucccuccu

SEQ ID NO: 2543 - RNA, 17 nt, Artificial Sequence
  Synthetic oligonucleotide: PDCD1-3109
gucuccaggaucccucc

SEQ ID NO: 2544 - RNA, 17 nt, Artificial Sequence
  Synthetic oligonucleotide: PDCD1-3110
acaguucuucugucucc

SEQ ID NO: 2545 - RNA, 17 nt, Artificial Sequence
  Synthetic oligonucleotide: PDCD1-3111
guguaccuguucgagug

SEQ ID NO: 2546 - RNA, 17 nt, Artificial Sequence
  Synthetic oligonucleotide: PDCD1-3112
ucaaaguuuagaugagc

SEQ ID NO: 2547 - RNA, 17 nt, Artificial Sequence
  Synthetic oligonucleotide: PDCD1-3113
ccaugugggacuaaccu

SEQ ID NO: 2548 - RNA, 17 nt, Artificial Sequence
  Synthetic oligonucleotide: PDCD1-3114
ugggaugagccccaugu

SEQ ID NO: 2549 - RNA, 17 nt, Artificial Sequence
  Synthetic oligonucleotide: PDCD1-3115
augggaugagccccaug

SEQ ID NO: 2550 - RNA, 17 nt, Artificial Sequence
  Synthetic oligonucleotide: PDCD1-3116
cgaguuuuccuaaggau

SEQ ID NO: 2551 - RNA, 17 nt, Artificial Sequence
  Synthetic oligonucleotide: PDCD1-3117
ucgaguuuuccuaagga

SEQ ID NO: 2552 - RNA, 17 nt, Artificial Sequence
  Synthetic oligonucleotide: PDCD1-3118
ucacucgaguuuuccua

SEQ ID NO: 2553 - RNA, 17 nt, Artificial Sequence
  Synthetic oligonucleotide: PDCD1-3119
ccuugcccaggcauccu

SEQ ID NO: 2554 - RNA, 17 nt, Artificial Sequence
  Synthetic oligonucleotide: PDCD1-3120
ccgacagaaugggagug

SEQ ID NO: 2555 - RNA, 17 nt, Artificial Sequence
  Synthetic oligonucleotide: PDCD1-3121
uccgacagaaugggagu

SEQ ID NO: 2556 - RNA, 17 nt, Artificial Sequence
  Synthetic oligonucleotide: PDCD1-3122
cuccgacagaaugggag

SEQ ID NO: 2557 - RNA, 17 nt, Artificial Sequence
  Synthetic oligonucleotide: PDCD1-3123
agaggcuccgacagaau

SEQ ID NO: 2558 - RNA, 17 nt, Artificial Sequence
  Synthetic oligonucleotide: PDCD1-3124
cagaggcuccgacagaa

SEQ ID NO: 2559 - RNA, 17 nt, Artificial Sequence
  Synthetic oligonucleotide: PDCD1-3125
agccgggaggcucccag

SEQ ID NO: 2560 - RNA, 17 nt, Artificial Sequence
  Synthetic oligonucleotide: PDCD1-3126
ggcugugggcagccggg

SEQ ID NO: 2561 - RNA, 17 nt, Artificial Sequence
  Synthetic oligonucleotide: PDCD1-3127
agaggcugugggcagcc

SEQ ID NO: 2562 - RNA, 17 nt, Artificial Sequence
  Synthetic oligonucleotide: PDCD1-3128
cagaggcugugggcagc

SEQ ID NO: 2563 - RNA, 17 nt, Artificial Sequence
  Synthetic oligonucleotide: PDCD1-3129
gcaggggcagaggcugu

SEQ ID NO: 2564 - RNA, 17 nt, Artificial Sequence
  Synthetic oligonucleotide: PDCD1-3130
agcaggggcagaggcug

SEQ ID NO: 2565 - RNA, 17 nt, Artificial Sequence
  Synthetic oligonucleotide: PDCD1-3131
gcccccagcaggggcag

SEQ ID NO: 2566 - RNA, 17 nt, Artificial Sequence
  Synthetic oligonucleotide: PDCD1-3132
gcaccugcccccagcag

SEQ ID NO: 2567 - RNA, 17 nt, Artificial Sequence
  Synthetic oligonucleotide: PDCD1-3133
ggcaccugcccccagca

SEQ ID NO: 2568 - RNA, 17 nt, Artificial Sequence
  Synthetic oligonucleotide: PDCD1-3134
aggcaccugcccccagc

SEQ ID NO: 2569 - RNA, 17 nt, Artificial Sequence
  Synthetic oligonucleotide: PDCD1-3135
ccgggaaggcagaggcc

SEQ ID NO: 2570 - RNA, 17 nt, Artificial Sequence
  Synthetic oligonucleotide: PDCD1-3136
augggccgggaaggcag

SEQ ID NO: 2571 - RNA, 17 nt, Artificial Sequence
  Synthetic oligonucleotide: PDCD1-3137
agggggaugggccggga

SEQ ID NO: 2572 - RNA, 17 nt, Artificial Sequence
  Synthetic oligonucleotide: PDCD1-3138
gcgaagggggaugggcc

SEQ ID NO: 2573 - RNA, 17 nt, Artificial Sequence
  Synthetic oligonucleotide: PDCD1-3139
agcgaagggggaugggc

SEQ ID NO: 2574 - RNA, 17 nt, Artificial Sequence
  Synthetic oligonucleotide: PDCD1-3140
ccccagcgaagggggau

SEQ ID NO: 2575 - RNA, 17 nt, Artificial Sequence
  Synthetic oligonucleotide: PDCD1-3141
gccccagcgaaggggga

SEQ ID NO: 2576 - RNA, 17 nt, Artificial Sequence
  Synthetic oligonucleotide: PDCD1-3142
cugugccccagcgaagg

SEQ ID NO: 2577 - RNA, 17 nt, Artificial Sequence
  Synthetic oligonucleotide: PDCD1-3143
ccugugccccagcgaag

SEQ ID NO: 2578 - RNA, 17 nt, Artificial Sequence
  Synthetic oligonucleotide: PDCD1-3144
accugugccccagcgaa

SEQ ID NO: 2579 - RNA, 17 nt, Artificial Sequence
  Synthetic oligonucleotide: PDCD1-3145
caccugugccccagcga

SEQ ID NO: 2580 - RNA, 17 nt, Artificial Sequence
  Synthetic oligonucleotide: PDCD1-3146
acaguugucauucagua

SEQ ID NO: 2581 - RNA, 17 nt, Artificial Sequence
  Synthetic oligonucleotide: PDCD1-3147
gacaguugucauucagu

SEQ ID NO: 2582 - RNA, 17 nt, Artificial Sequence
  Synthetic oligonucleotide: PDCD1-3148
ggggagccgauuagcca

SEQ ID NO: 2583 - RNA, 17 nt, Artificial Sequence
  Synthetic oligonucleotide: PDCD1-3149
agguggaagcuuugagg

SEQ ID NO: 2584 - RNA, 17 nt, Artificial Sequence
  Synthetic oligonucleotide: PDCD1-3150
aagguggaagcuuugag

SEQ ID NO: 2585 - RNA, 17 nt, Artificial Sequence
  Synthetic oligonucleotide: PDCD1-3151
caagguggaagcuuuga

SEQ ID NO: 2586 - RNA, 17 nt, Artificial Sequence
  Synthetic oligonucleotide: PDCD1-3152
acaagguggaagcuuug

SEQ ID NO: 2587 - RNA, 17 nt, Artificial Sequence
  Synthetic oligonucleotide: PDCD1-3153
ugaggccauccacaagg

SEQ ID NO: 2588 - RNA, 17 nt, Artificial Sequence
  Synthetic oligonucleotide: PDCD1-3154
gugugaggccauccaca

SEQ ID NO: 2589 - RNA, 17 nt, Artificial Sequence
  Synthetic oligonucleotide: PDCD1-3155
acuguggccauggugug

SEQ ID NO: 2590 - RNA, 17 nt, Artificial Sequence
  Synthetic oligonucleotide: PDCD1-3156
aucuggaacuguggcca

SEQ ID NO: 2591 - RNA, 17 nt, Artificial Sequence
  Synthetic oligonucleotide: PDCD1-3157
ggaaagaucuggaacug

SEQ ID NO: 2592 - RNA, 17 nt, Artificial Sequence
  Synthetic oligonucleotide: PDCD1-3158
cacacgguggaaagauc

SEQ ID NO: 2593 - RNA, 17 nt, Artificial Sequence
  Synthetic oligonucleotide: PDCD1-3159
uugcaggcaucacacgg

SEQ ID NO: 2594 - RNA, 17 nt, Artificial Sequence
  Synthetic oligonucleotide: PDCD1-3160
cuguugcaggcaucaca

SEQ ID NO: 2595 - RNA, 17 nt, Artificial Sequence
  Synthetic oligonucleotide: PDCD1-3161
ccccgucaggcuguugc

SEQ ID NO: 2596 - RNA, 17 nt, Artificial Sequence
  Synthetic oligonucleotide: PDCD1-3162
gccccagcccccccguc

SEQ ID NO: 2597 - RNA, 17 nt, Artificial Sequence
  Synthetic oligonucleotide: PDCD1-3163
gucaaggcuggaagggg

SEQ ID NO: 2598 - RNA, 17 nt, Artificial Sequence
  Synthetic oligonucleotide: PDCD1-3164
aaggucaaggcuggaag

SEQ ID NO: 2599 - RNA, 17 nt, Artificial Sequence
  Synthetic oligonucleotide: PDCD1-3165
gaaggucaaggcuggaa

SEQ ID NO: 2600 - RNA, 17 nt, Artificial Sequence
  Synthetic oligonucleotide: PDCD1-3166
agaaggucaaggcugga

SEQ ID NO: 2601 - RNA, 17 nt, Artificial Sequence
  Synthetic oligonucleotide: PDCD1-3167
gggaagaaggucaaggc

SEQ ID NO: 2602 - RNA, 17 nt, Artificial Sequence
  Synthetic oligonucleotide: PDCD1-3168
cccggggaagaagguca

SEQ ID NO: 2603 - RNA, 17 nt, Artificial Sequence
  Synthetic oligonucleotide: PDCD1-3169
cagggccccggggaaga

SEQ ID NO: 2604 - RNA, 17 nt, Artificial Sequence
  Synthetic oligonucleotide: PDCD1-3170
uggagggcagggccccg

SEQ ID NO: 2605 - RNA, 17 nt, Artificial Sequence
  Synthetic oligonucleotide: PDCD1-3171
cuggagggcagggcccc

SEQ ID NO: 2606 - RNA, 17 nt, Artificial Sequence
  Synthetic oligonucleotide: PDCD1-3172
gcuggagggcagggccc

SEQ ID NO: 2607 - RNA, 17 nt, Artificial Sequence
  Synthetic oligonucleotide: PDCD1-3173
gagugggcuggagggca

SEQ ID NO: 2608 - RNA, 17 nt, Artificial Sequence
  Synthetic oligonucleotide: PDCD1-3174
cgagugggcuggagggc

SEQ ID NO: 2609 - RNA, 17 nt, Artificial Sequence
  Synthetic oligonucleotide: PDCD1-3175
ggcacgagugggcugga

SEQ ID NO: 2610 - RNA, 17 nt, Artificial Sequence
  Synthetic oligonucleotide: PDCD1-3176
uggcacgagugggcugg

SEQ ID NO: 2611 - RNA, 17 nt, Artificial Sequence
  Synthetic oligonucleotide: PDCD1-3177
cccuggcacgagugggc

SEQ ID NO: 2612 - RNA, 17 nt, Artificial Sequence
  Synthetic oligonucleotide: PDCD1-3178
cccacccuggcacgagu

SEQ ID NO: 2613 - RNA, 17 nt, Artificial Sequence
  Synthetic oligonucleotide: PDCD1-3179
ccccacccuggcacgag

SEQ ID NO: 2614 - RNA, 17 nt, Artificial Sequence
  Synthetic oligonucleotide: PDCD1-3180
ccugaaccaccccaccc

SEQ ID NO: 2615 - RNA, 17 nt, Artificial Sequence
  Synthetic oligonucleotide: PDCD1-3181
cagccaggcccaggcac

SEQ ID NO: 2616 - RNA, 17 nt, Artificial Sequence
  Synthetic oligonucleotide: PDCD1-3182
ggccgccagccaggccc

SEQ ID NO: 2617 - RNA, 17 nt, Artificial Sequence
  Synthetic oligonucleotide: PDCD1-3183
acgccgggccgccagcc

SEQ ID NO: 2618 - RNA, 17 nt, Artificial Sequence
  Synthetic oligonucleotide: PDCD1-3184
gccauuucacaaacgcc

SEQ ID NO: 2619 - RNA, 17 nt, Artificial Sequence
  Synthetic oligonucleotide: PDCD1-3185
agccauuucacaaacgc

SEQ ID NO: 2620 - RNA, 17 nt, Artificial Sequence
  Synthetic oligonucleotide: PDCD1-3186
gcucagcacagaauaca

SEQ ID NO: 2621 - RNA, 20 nt, Artificial Sequence
  Synthetic oligonucleotide: PDCD1-955
agacuccccacggccaaggu

SEQ ID NO: 2622 - RNA, 20 nt, Artificial Sequence
  Synthetic oligonucleotide: PDCD1-2085
gacuccccacggccaagguu

SEQ ID NO: 2623 - RNA, 20 nt, Artificial Sequence
  Synthetic oligonucleotide: PDCD1-957
cagccugacccgucauucua

SEQ ID NO: 2624 - RNA, 20 nt, Artificial Sequence
  Synthetic oligonucleotide: PDCD1-958
cuacagaaacacgcagcccc

SEQ ID NO: 2625 - RNA, 20 nt, Artificial Sequence
  Synthetic oligonucleotide: PDCD1-959
cacgcagccccaaggaccgg

SEQ ID NO: 2626 - RNA, 20 nt, Artificial Sequence
  Synthetic oligonucleotide: PDCD1-960
cgcagccccaaggaccggcu

SEQ ID NO: 2627 - RNA, 20 nt, Artificial Sequence
  Synthetic oligonucleotide: PDCD1-961
cagccccaaggaccggcuga

SEQ ID NO: 2628 - RNA, 20 nt, Artificial Sequence
  Synthetic oligonucleotide: PDCD1-2091
agccccaaggaccggcugag

SEQ ID NO: 2629 - RNA, 20 nt, Artificial Sequence
  Synthetic oligonucleotide: PDCD1-2092
gccccaaggaccggcugaga

SEQ ID NO: 2630 - RNA, 20 nt, Artificial Sequence
  Synthetic oligonucleotide: PDCD1-964
aaggaccggcugagagggga

SEQ ID NO: 2631 - RNA, 20 nt, Artificial Sequence
  Synthetic oligonucleotide: PDCD1-965
ggacagagguccugccugcc

SEQ ID NO: 2632 - RNA, 20 nt, Artificial Sequence
  Synthetic oligonucleotide: PDCD1-2095
gacagagguccugccugccc

SEQ ID NO: 2633 - RNA, 20 nt, Artificial Sequence
  Synthetic oligonucleotide: PDCD1-967
guccugccugcccaggagca

SEQ ID NO: 2634 - RNA, 20 nt, Artificial Sequence
  Synthetic oligonucleotide: PDCD1-968
ccugccugcccaggagcaaa

SEQ ID NO: 2635 - RNA, 20 nt, Artificial Sequence
  Synthetic oligonucleotide: PDCD1-2096
cugccugcccaggagcaaag

SEQ ID NO: 2636 - RNA, 20 nt, Artificial Sequence
  Synthetic oligonucleotide: PDCD1-2097
ugccugcccaggagcaaaga

SEQ ID NO: 2637 - RNA, 20 nt, Artificial Sequence
  Synthetic oligonucleotide: PDCD1-971
cccaggagcaaagaggggac

SEQ ID NO: 2638 - RNA, 20 nt, Artificial Sequence
  Synthetic oligonucleotide: PDCD1-972
agcaaagaggggacuugggc

SEQ ID NO: 2639 - RNA, 20 nt, Artificial Sequence
  Synthetic oligonucleotide: PDCD1-2101
gcaaagaggggacuugggcc

SEQ ID NO: 2640 - RNA, 20 nt, Artificial Sequence
  Synthetic oligonucleotide: PDCD1-2102
caaagaggggacuugggcca

SEQ ID NO: 2641 - RNA, 20 nt, Artificial Sequence
  Synthetic oligonucleotide: PDCD1-2103
aaagaggggacuugggccag

SEQ ID NO: 2642 - RNA, 20 nt, Artificial Sequence
  Synthetic oligonucleotide: PDCD1-976
agaggggacuugggccaggg

SEQ ID NO: 2643 - RNA, 20 nt, Artificial Sequence
  Synthetic oligonucleotide: PDCD1-2104
gaggggacuugggccagggg

SEQ ID NO: 2644 - RNA, 20 nt, Artificial Sequence
  Synthetic oligonucleotide: PDCD1-978
gacuugggccaggggaggag

SEQ ID NO: 2645 - RNA, 20 nt, Artificial Sequence
  Synthetic oligonucleotide: PDCD1-2105
acuugggccaggggaggagu

SEQ ID NO: 2646 - RNA, 20 nt, Artificial Sequence
  Synthetic oligonucleotide: PDCD1-980
ccaggggaggaguuggggcc

SEQ ID NO: 2647 - RNA, 20 nt, Artificial Sequence
  Synthetic oligonucleotide: PDCD1-981
aggggaggaguuggggccca

SEQ ID NO: 2648 - RNA, 20 nt, Artificial Sequence
  Synthetic oligonucleotide: PDCD1-982
gggaggaguuggggcccaga

SEQ ID NO: 2649 - RNA, 20 nt, Artificial Sequence
  Synthetic oligonucleotide: PDCD1-2108
ggaggaguuggggcccagag

SEQ ID NO: 2650 - RNA, 20 nt, Artificial Sequence
  Synthetic oligonucleotide: PDCD1-984
uuggggcccagagaggaacc

SEQ ID NO: 2651 - RNA, 20 nt, Artificial Sequence
  Synthetic oligonucleotide: PDCD1-2109
uggggcccagagaggaaccc

SEQ ID NO: 2652 - RNA, 20 nt, Artificial Sequence
  Synthetic oligonucleotide: PDCD1-986
ccagagaggaacccaggagu

SEQ ID NO: 2653 - RNA, 20 nt, Artificial Sequence
  Synthetic oligonucleotide: PDCD1-987
cugcccaaagccacacagcu

SEQ ID NO: 2654 - RNA, 20 nt, Artificial Sequence
  Synthetic oligonucleotide: PDCD1-988
aaagccacacagcucagggu

SEQ ID NO: 2655 - RNA, 20 nt, Artificial Sequence
  Synthetic oligonucleotide: PDCD1-2112
aagccacacagcucagggua

SEQ ID NO: 2656 - RNA, 20 nt, Artificial Sequence
  Synthetic oligonucleotide: PDCD1-990
acacagcucaggguaagggg

SEQ ID NO: 2657 - RNA, 20 nt, Artificial Sequence
  Synthetic oligonucleotide: PDCD1-991
gcucaggguaaggggcagag

SEQ ID NO: 2658 - RNA, 20 nt, Artificial Sequence
  Synthetic oligonucleotide: PDCD1-2115
cucaggguaaggggcagagc

SEQ ID NO: 2659 - RNA, 20 nt, Artificial Sequence
  Synthetic oligonucleotide: PDCD1-2116
ucaggguaaggggcagagcu

SEQ ID NO: 2660 - RNA, 20 nt, Artificial Sequence
  Synthetic oligonucleotide: PDCD1-994
ggcagagcugggggccaagg

SEQ ID NO: 2661 - RNA, 20 nt, Artificial Sequence
  Synthetic oligonucleotide: PDCD1-995
cacagcaccccccgaccugc

SEQ ID NO: 2662 - RNA, 20 nt, Artificial Sequence
  Synthetic oligonucleotide: PDCD1-2122
acagcaccccccgaccugcc

SEQ ID NO: 2663 - RNA, 20 nt, Artificial Sequence
  Synthetic oligonucleotide: PDCD1-997
accccccgaccugccaggga

SEQ ID NO: 2664 - RNA, 20 nt, Artificial Sequence
  Synthetic oligonucleotide: PDCD1-998
cccccgaccugccagggacu

SEQ ID NO: 2665 - RNA, 20 nt, Artificial Sequence
  Synthetic oligonucleotide: PDCD1-999
cgaccugccagggacugaga

SEQ ID NO: 2666 - RNA, 20 nt, Artificial Sequence
  Synthetic oligonucleotide: PDCD1-1000
gucccuccagaccccucgcu

SEQ ID NO: 2667 - RNA, 20 nt, Artificial Sequence
  Synthetic oligonucleotide: PDCD1-2125
ucccuccagaccccucgcuc

SEQ ID NO: 2668 - RNA, 20 nt, Artificial Sequence
  Synthetic oligonucleotide: PDCD1-1002
gaccccucgcuccgggaccc

SEQ ID NO: 2669 - RNA, 20 nt, Artificial Sequence
  Synthetic oligonucleotide: PDCD1-1003
cuccgggaccccugggcugc

SEQ ID NO: 2670 - RNA, 20 nt, Artificial Sequence
  Synthetic oligonucleotide: PDCD1-1004
cucagcaccccccgaccugc

SEQ ID NO: 2671 - RNA, 20 nt, Artificial Sequence
  Synthetic oligonucleotide: PDCD1-2132
ucagcaccccccgaccugcc

SEQ ID NO: 2672 - RNA, 20 nt, Artificial Sequence
  Synthetic oligonucleotide: PDCD1-997
accccccgaccugccaggga

SEQ ID NO: 2673 - RNA, 20 nt, Artificial Sequence
  Synthetic oligonucleotide: PDCD1-998
cccccgaccugccagggacu

SEQ ID NO: 2674 - RNA, 20 nt, Artificial Sequence
  Synthetic oligonucleotide: PDCD1-1008
cgaccugccagggacugagg

SEQ ID NO: 2675 - RNA, 20 nt, Artificial Sequence
  Synthetic oligonucleotide: PDCD1-2136
gaccugccagggacugaggg

SEQ ID NO: 2676 - RNA, 20 nt, Artificial Sequence
  Synthetic oligonucleotide: PDCD1-1010
gucccuccagaccccuggcu

SEQ ID NO: 2677 - RNA, 20 nt, Artificial Sequence
  Synthetic oligonucleotide: PDCD1-2139
ucccuccagaccccuggcuc

SEQ ID NO: 2678 - RNA, 20 nt, Artificial Sequence
  Synthetic oligonucleotide: PDCD1-593
accgccgaccccaccuaccu

SEQ ID NO: 2679 - RNA, 20 nt, Artificial Sequence
  Synthetic oligonucleotide: PDCD1-592
gcaccgcccagacgacuggc

SEQ ID NO: 2680 - RNA, 20 nt, Artificial Sequence
  Synthetic oligonucleotide: PDCD1-591
gacgacuggccagggcgccu

SEQ ID NO: 2681 - RNA, 20 nt, Artificial Sequence
  Synthetic oligonucleotide: PDCD1-125
acgacuggccagggcgccug

SEQ ID NO: 2682 - RNA, 20 nt, Artificial Sequence
  Synthetic oligonucleotide: PDCD1-589
cgccugugggaucugcaugc

SEQ ID NO: 2683 - RNA, 20 nt, Artificial Sequence
  Synthetic oligonucleotide: PDCD1-127
gccugugggaucugcaugcc

SEQ ID NO: 2684 - RNA, 20 nt, Artificial Sequence
  Synthetic oligonucleotide: PDCD1-587
caugccuggagcagccccac

SEQ ID NO: 2685 - RNA, 20 nt, Artificial Sequence
  Synthetic oligonucleotide: PDCD1-1019
ccgccuucuccacugcucag

SEQ ID NO: 2686 - RNA, 20 nt, Artificial Sequence
  Synthetic oligonucleotide: PDCD1-2229
cgccuucuccacugcucagg

SEQ ID NO: 2687 - RNA, 20 nt, Artificial Sequence
  Synthetic oligonucleotide: PDCD1-1021
ucuccacugcucaggcggag

SEQ ID NO: 2688 - RNA, 20 nt, Artificial Sequence
  Synthetic oligonucleotide: PDCD1-1022
cacugcucaggcggagguga

SEQ ID NO: 2689 - RNA, 20 nt, Artificial Sequence
  Synthetic oligonucleotide: PDCD1-2231
acugcucaggcggaggugag

SEQ ID NO: 2690 - RNA, 20 nt, Artificial Sequence
  Synthetic oligonucleotide: PDCD1-1024
gcucaggcggaggugagcgg

SEQ ID NO: 2691 - RNA, 20 nt, Artificial Sequence
  Synthetic oligonucleotide: PDCD1-2232
cucaggcggaggugagcgga

SEQ ID NO: 2692 - RNA, 20 nt, Artificial Sequence
  Synthetic oligonucleotide: PDCD1-2233
ucaggcggaggugagcggaa

SEQ ID NO: 2693 - RNA, 20 nt, Artificial Sequence
  Synthetic oligonucleotide: PDCD1-1027
ggaaacugucccaggucagg

SEQ ID NO: 2694 - RNA, 20 nt, Artificial Sequence
  Synthetic oligonucleotide: PDCD1-1028
aacugucccaggucagguug

SEQ ID NO: 2695 - RNA, 20 nt, Artificial Sequence
  Synthetic oligonucleotide: PDCD1-2236
acugucccaggucagguuga

SEQ ID NO: 2696 - RNA, 20 nt, Artificial Sequence
  Synthetic oligonucleotide: PDCD1-2237
cugucccaggucagguugaa

SEQ ID NO: 2697 - RNA, 20 nt, Artificial Sequence
  Synthetic oligonucleotide: PDCD1-1031
gucccaggucagguugaagg

SEQ ID NO: 2698 - RNA, 20 nt, Artificial Sequence
  Synthetic oligonucleotide: PDCD1-1032
cccucuuccuccacauccac

SEQ ID NO: 2699 - RNA, 20 nt, Artificial Sequence
  Synthetic oligonucleotide: PDCD1-1033
cuuccuccacauccacgugg

SEQ ID NO: 2700 - RNA, 20 nt, Artificial Sequence
  Synthetic oligonucleotide: PDCD1-1034
uccuccacauccacgugggc

SEQ ID NO: 2701 - RNA, 20 nt, Artificial Sequence
  Synthetic oligonucleotide: PDCD1-1035
auccacgugggcgagaguga

SEQ ID NO: 2702 - RNA, 20 nt, Artificial Sequence
  Synthetic oligonucleotide: PDCD1-1036
cgagagugacagaggcagug

SEQ ID NO: 2703 - RNA, 20 nt, Artificial Sequence
  Synthetic oligonucleotide: PDCD1-2243
gagagugacagaggcagugc

SEQ ID NO: 2704 - RNA, 20 nt, Artificial Sequence
  Synthetic oligonucleotide: PDCD1-2244
agagugacagaggcagugcu

SEQ ID NO: 2705 - RNA, 20 nt, Artificial Sequence
  Synthetic oligonucleotide: PDCD1-2245
gagugacagaggcagugcug

SEQ ID NO: 2706 - RNA, 20 nt, Artificial Sequence
  Synthetic oligonucleotide: PDCD1-2246
agugacagaggcagugcugg

SEQ ID NO: 2707 - RNA, 20 nt, Artificial Sequence
  Synthetic oligonucleotide: PDCD1-1041
ugacagaggcagugcugggg

SEQ ID NO: 2708 - RNA, 20 nt, Artificial Sequence
  Synthetic oligonucleotide: PDCD1-2247
gacagaggcagugcuggggg

SEQ ID NO: 2709 - RNA, 20 nt, Artificial Sequence
  Synthetic oligonucleotide: PDCD1-1043
cagaggcagugcugggggag

SEQ ID NO: 2710 - RNA, 20 nt, Artificial Sequence
  Synthetic oligonucleotide: PDCD1-2248
agaggcagugcugggggagg

SEQ ID NO: 2711 - RNA, 20 nt, Artificial Sequence
  Synthetic oligonucleotide: PDCD1-1045
gcagugcugggggaggaggg

SEQ ID NO: 2712 - RNA, 20 nt, Artificial Sequence
  Synthetic oligonucleotide: PDCD1-1046
agugcugggggaggaggggu

SEQ ID NO: 2713 - RNA, 20 nt, Artificial Sequence
  Synthetic oligonucleotide: PDCD1-2251
gugcugggggaggaggggug

SEQ ID NO: 2714 - RNA, 20 nt, Artificial Sequence
  Synthetic oligonucleotide: PDCD1-1048
gcugggggaggaggggugag

SEQ ID NO: 2715 - RNA, 20 nt, Artificial Sequence
  Synthetic oligonucleotide: PDCD1-2252
cugggggaggaggggugagg

SEQ ID NO: 2716 - RNA, 20 nt, Artificial Sequence
  Synthetic oligonucleotide: PDCD1-2253
ugggggaggaggggugagga

SEQ ID NO: 2717 - RNA, 20 nt, Artificial Sequence
  Synthetic oligonucleotide: PDCD1-1051
gaggaggggugaggaggggg

SEQ ID NO: 2718 - RNA, 20 nt, Artificial Sequence
  Synthetic oligonucleotide: PDCD1-1052
ggggugaggaggggguagga

SEQ ID NO: 2719 - RNA, 20 nt, Artificial Sequence
  Synthetic oligonucleotide: PDCD1-2257
gggugaggaggggguaggac

SEQ ID NO: 2720 - RNA, 20 nt, Artificial Sequence
  Synthetic oligonucleotide: PDCD1-2258
ggugaggaggggguaggacu

SEQ ID NO: 2721 - RNA, 20 nt, Artificial Sequence
  Synthetic oligonucleotide: PDCD1-2259
gugaggaggggguaggacug

SEQ ID NO: 2722 - RNA, 20 nt, Artificial Sequence
  Synthetic oligonucleotide: PDCD1-1056
gaggaggggguaggacuggg

SEQ ID NO: 2723 - RNA, 20 nt, Artificial Sequence
  Synthetic oligonucleotide: PDCD1-1057
ggaggggguaggacugggga

SEQ ID NO: 2724 - RNA, 20 nt, Artificial Sequence
  Synthetic oligonucleotide: PDCD1-1058
gggguaggacuggggagagg

SEQ ID NO: 2725 - RNA, 20 nt, Artificial Sequence
  Synthetic oligonucleotide: PDCD1-2262
ggguaggacuggggagaggg

SEQ ID NO: 2726 - RNA, 20 nt, Artificial Sequence
  Synthetic oligonucleotide: PDCD1-2263
gguaggacuggggagagggu

SEQ ID NO: 2727 - RNA, 20 nt, Artificial Sequence
  Synthetic oligonucleotide: PDCD1-2264
guaggacuggggagagggug

SEQ ID NO: 2728 - RNA, 20 nt, Artificial Sequence
  Synthetic oligonucleotide: PDCD1-2265
uaggacuggggagagggugg

SEQ ID NO: 2729 - RNA, 20 nt, Artificial Sequence
  Synthetic oligonucleotide: PDCD1-1063
ggacuggggagagggugggg

SEQ ID NO: 2730 - RNA, 20 nt, Artificial Sequence
  Synthetic oligonucleotide: PDCD1-2266
gacuggggagaggguggggg

SEQ ID NO: 2731 - RNA, 20 nt, Artificial Sequence
  Synthetic oligonucleotide: PDCD1-2267
acuggggagaggguggggga

SEQ ID NO: 2732 - RNA, 20 nt, Artificial Sequence
  Synthetic oligonucleotide: PDCD1-1066
uggggagagggugggggagg

SEQ ID NO: 2733 - RNA, 20 nt, Artificial Sequence
  Synthetic oligonucleotide: PDCD1-1067
gggagagggugggggaggga

SEQ ID NO: 2734 - RNA, 20 nt, Artificial Sequence
  Synthetic oligonucleotide: PDCD1-1068
gagagggugggggagggaga

SEQ ID NO: 2735 - RNA, 20 nt, Artificial Sequence
  Synthetic oligonucleotide: PDCD1-1069
gugggggagggagagagaga

SEQ ID NO: 2736 - RNA, 20 nt, Artificial Sequence
  Synthetic oligonucleotide: PDCD1-1070
gagggagagagagacagaga

SEQ ID NO: 2737 - RNA, 20 nt, Artificial Sequence
  Synthetic oligonucleotide: PDCD1-2268
agggagagagagacagagac

SEQ ID NO: 2738 - RNA, 20 nt, Artificial Sequence
  Synthetic oligonucleotide: PDCD1-2269
gggagagagagacagagaca

SEQ ID NO: 2739 - RNA, 20 nt, Artificial Sequence
  Synthetic oligonucleotide: PDCD1-1073
gagagacagagacagggaga

SEQ ID NO: 2740 - RNA, 20 nt, Artificial Sequence
  Synthetic oligonucleotide: PDCD1-1074
gagacagagacagggagaca

SEQ ID NO: 2741 - RNA, 20 nt, Artificial Sequence
  Synthetic oligonucleotide: PDCD1-2270
agacagagacagggagacag

SEQ ID NO: 2742 - RNA, 20 nt, Artificial Sequence
  Synthetic oligonucleotide: PDCD1-1076
gagacagggagacagaggag

SEQ ID NO: 2743 - RNA, 20 nt, Artificial Sequence
  Synthetic oligonucleotide: PDCD1-2271
agacagggagacagaggaga

SEQ ID NO: 2744 - RNA, 20 nt, Artificial Sequence
  Synthetic oligonucleotide: PDCD1-2272
gacagggagacagaggagau

SEQ ID NO: 2745 - RNA, 20 nt, Artificial Sequence
  Synthetic oligonucleotide: PDCD1-2273
acagggagacagaggagaug

SEQ ID NO: 2746 - RNA, 20 nt, Artificial Sequence
  Synthetic oligonucleotide: PDCD1-1080
agggagacagaggagauggg

SEQ ID NO: 2747 - RNA, 20 nt, Artificial Sequence
  Synthetic oligonucleotide: PDCD1-2274
gggagacagaggagaugggg

SEQ ID NO: 2748 - RNA, 20 nt, Artificial Sequence
  Synthetic oligonucleotide: PDCD1-1082
acagaggagauggggaggag

SEQ ID NO: 2749 - RNA, 20 nt, Artificial Sequence
  Synthetic oligonucleotide: PDCD1-1083
uggcccccacgcccuacccc

SEQ ID NO: 2750 - RNA, 20 nt, Artificial Sequence
  Synthetic oligonucleotide: PDCD1-2279
ggcccccacgcccuaccccg

SEQ ID NO: 2751 - RNA, 20 nt, Artificial Sequence
  Synthetic oligonucleotide: PDCD1-2280
gcccccacgcccuaccccgu

SEQ ID NO: 2752 - RNA, 20 nt, Artificial Sequence
  Synthetic oligonucleotide: PDCD1-1086
ccgugggggucuccccagcu

SEQ ID NO: 2753 - RNA, 20 nt, Artificial Sequence
  Synthetic oligonucleotide: PDCD1-1087
ggccucuuuccauaucccgc

SEQ ID NO: 2754 - RNA, 20 nt, Artificial Sequence
  Synthetic oligonucleotide: PDCD1-1088
ucccgcccgagcugccccuc

SEQ ID NO: 2755 - RNA, 20 nt, Artificial Sequence
  Synthetic oligonucleotide: PDCD1-1089
agcugccccuccugaggcug

SEQ ID NO: 2756 - RNA, 20 nt, Artificial Sequence
  Synthetic oligonucleotide: PDCD1-1090
gccccuccugaggcugccgg

SEQ ID NO: 2757 - RNA, 20 nt, Artificial Sequence
  Synthetic oligonucleotide: PDCD1-2289
ccccuccugaggcugccggg

SEQ ID NO: 2758 - RNA, 20 nt, Artificial Sequence
  Synthetic oligonucleotide: PDCD1-2290
cccuccugaggcugccgggu

SEQ ID NO: 2759 - RNA, 20 nt, Artificial Sequence
  Synthetic oligonucleotide: PDCD1-1093
cccccaucccccccaucucc

SEQ ID NO: 2760 - RNA, 20 nt, Artificial Sequence
  Synthetic oligonucleotide: PDCD1-2294
ccccaucccccccaucuccc

SEQ ID NO: 2761 - RNA, 20 nt, Artificial Sequence
  Synthetic oligonucleotide: PDCD1-2295
cccaucccccccaucucccu

SEQ ID NO: 2762 - RNA, 20 nt, Artificial Sequence
  Synthetic oligonucleotide: PDCD1-1096
cccccccaucucccuggggg

SEQ ID NO: 2763 - RNA, 20 nt, Artificial Sequence
  Synthetic oligonucleotide: PDCD1-1097
ugggggccgggccucccugc

SEQ ID NO: 2764 - RNA, 20 nt, Artificial Sequence
  Synthetic oligonucleotide: PDCD1-2300
gggggccgggccucccugcc

SEQ ID NO: 2765 - RNA, 20 nt, Artificial Sequence
  Synthetic oligonucleotide: PDCD1-2301
ggggccgggccucccugccu

SEQ ID NO: 2766 - RNA, 20 nt, Artificial Sequence
  Synthetic oligonucleotide: PDCD1-2302
gggccgggccucccugccug

SEQ ID NO: 2767 - RNA, 20 nt, Artificial Sequence
  Synthetic oligonucleotide: PDCD1-1101
ggccucccugccuggggaag

SEQ ID NO: 2768 - RNA, 20 nt, Artificial Sequence
  Synthetic oligonucleotide: PDCD1-1102
gggaagguggguggcccccu

SEQ ID NO: 2769 - RNA, 20 nt, Artificial Sequence
  Synthetic oligonucleotide: PDCD1-1103
cccccucugggcucagguuc

SEQ ID NO: 2770 - RNA, 17 nt, Artificial Sequence
  Synthetic oligonucleotide: PDCD1-1104
cuccccacggccaaggu

SEQ ID NO: 2771 - RNA, 17 nt, Artificial Sequence
  Synthetic oligonucleotide: PDCD1-2392
uccccacggccaagguu

SEQ ID NO: 2772 - RNA, 17 nt, Artificial Sequence
  Synthetic oligonucleotide: PDCD1-1106
ccugacccgucauucua

SEQ ID NO: 2773 - RNA, 17 nt, Artificial Sequence
  Synthetic oligonucleotide: PDCD1-1107
cagaaacacgcagcccc

SEQ ID NO: 2774 - RNA, 17 nt, Artificial Sequence
  Synthetic oligonucleotide: PDCD1-1108
gcagccccaaggaccgg

SEQ ID NO: 2775 - RNA, 17 nt, Artificial Sequence
  Synthetic oligonucleotide: PDCD1-1109
agccccaaggaccggcu

SEQ ID NO: 2776 - RNA, 17 nt, Artificial Sequence
  Synthetic oligonucleotide: PDCD1-1110
ccccaaggaccggcuga

SEQ ID NO: 2777 - RNA, 17 nt, Artificial Sequence
  Synthetic oligonucleotide: PDCD1-2398
cccaaggaccggcugag

SEQ ID NO: 2778 - RNA, 17 nt, Artificial Sequence
  Synthetic oligonucleotide: PDCD1-2399
ccaaggaccggcugaga

SEQ ID NO: 2779 - RNA, 17 nt, Artificial Sequence
  Synthetic oligonucleotide: PDCD1-1113
gaccggcugagagggga

SEQ ID NO: 2780 - RNA, 17 nt, Artificial Sequence
  Synthetic oligonucleotide: PDCD1-1114
cagagguccugccugcc

SEQ ID NO: 2781 - RNA, 17 nt, Artificial Sequence
  Synthetic oligonucleotide: PDCD1-2402
agagguccugccugccc

SEQ ID NO: 2782 - RNA, 17 nt, Artificial Sequence
  Synthetic oligonucleotide: PDCD1-1116
cugccugcccaggagca

SEQ ID NO: 2783 - RNA, 17 nt, Artificial Sequence
  Synthetic oligonucleotide: PDCD1-1117
gccugcccaggagcaaa

SEQ ID NO: 2784 - RNA, 17 nt, Artificial Sequence
  Synthetic oligonucleotide: PDCD1-2403
ccugcccaggagcaaag

SEQ ID NO: 2785 - RNA, 17 nt, Artificial Sequence
  Synthetic oligonucleotide: PDCD1-2404
cugcccaggagcaaaga

SEQ ID NO: 2786 - RNA, 17 nt, Artificial Sequence
  Synthetic oligonucleotide: PDCD1-1120
aggagcaaagaggggac

SEQ ID NO: 2787 - RNA, 17 nt, Artificial Sequence
  Synthetic oligonucleotide: PDCD1-1121
aaagaggggacuugggc

SEQ ID NO: 2788 - RNA, 17 nt, Artificial Sequence
  Synthetic oligonucleotide: PDCD1-2408
aagaggggacuugggcc

SEQ ID NO: 2789 - RNA, 17 nt, Artificial Sequence
  Synthetic oligonucleotide: PDCD1-2409
agaggggacuugggcca

SEQ ID NO: 2790 - RNA, 17 nt, Artificial Sequence
  Synthetic oligonucleotide: PDCD1-2410
gaggggacuugggccag

SEQ ID NO: 2791 - RNA, 17 nt, Artificial Sequence
  Synthetic oligonucleotide: PDCD1-1125
ggggacuugggccaggg

SEQ ID NO: 2792 - RNA, 17 nt, Artificial Sequence
  Synthetic oligonucleotide: PDCD1-2411
gggacuugggccagggg

SEQ ID NO: 2793 - RNA, 17 nt, Artificial Sequence
  Synthetic oligonucleotide: PDCD1-1127
uugggccaggggaggag

SEQ ID NO: 2794 - RNA, 17 nt, Artificial Sequence
  Synthetic oligonucleotide: PDCD1-2412
ugggccaggggaggagu

SEQ ID NO: 2795 - RNA, 17 nt, Artificial Sequence
  Synthetic oligonucleotide: PDCD1-1129
ggggaggaguuggggcc

SEQ ID NO: 2796 - RNA, 17 nt, Artificial Sequence
  Synthetic oligonucleotide: PDCD1-1130
ggaggaguuggggccca

SEQ ID NO: 2797 - RNA, 17 nt, Artificial Sequence
  Synthetic oligonucleotide: PDCD1-1131
aggaguuggggcccaga

SEQ ID NO: 2798 - RNA, 17 nt, Artificial Sequence
  Synthetic oligonucleotide: PDCD1-2415
ggaguuggggcccagag

SEQ ID NO: 2799 - RNA, 17 nt, Artificial Sequence
  Synthetic oligonucleotide: PDCD1-1133
gggcccagagaggaacc

SEQ ID NO: 2800 - RNA, 17 nt, Artificial Sequence
  Synthetic oligonucleotide: PDCD1-2416
ggcccagagaggaaccc

SEQ ID NO: 2801 - RNA, 17 nt, Artificial Sequence
  Synthetic oligonucleotide: PDCD1-1135
gagaggaacccaggagu

SEQ ID NO: 2802 - RNA, 17 nt, Artificial Sequence
  Synthetic oligonucleotide: PDCD1-1136
cccaaagccacacagcu

SEQ ID NO: 2803 - RNA, 17 nt, Artificial Sequence
  Synthetic oligonucleotide: PDCD1-1137
gccacacagcucagggu

SEQ ID NO: 2804 - RNA, 17 nt, Artificial Sequence
  Synthetic oligonucleotide: PDCD1-2419
ccacacagcucagggua

SEQ ID NO: 2805 - RNA, 17 nt, Artificial Sequence
  Synthetic oligonucleotide: PDCD1-1139
cagcucaggguaagggg

SEQ ID NO: 2806 - RNA, 17 nt, Artificial Sequence
  Synthetic oligonucleotide: PDCD1-1140
caggguaaggggcagag

SEQ ID NO: 2807 - RNA, 17 nt, Artificial Sequence
  Synthetic oligonucleotide: PDCD1-2422
aggguaaggggcagagc

SEQ ID NO: 2808 - RNA, 17 nt, Artificial Sequence
  Synthetic oligonucleotide: PDCD1-2423
ggguaaggggcagagcu

SEQ ID NO: 2809 - RNA, 17 nt, Artificial Sequence
  Synthetic oligonucleotide: PDCD1-1143
agagcugggggccaagg

SEQ ID NO: 2810 - RNA, 17 nt, Artificial Sequence
  Synthetic oligonucleotide: PDCD1-1144
agcaccccccgaccugc

SEQ ID NO: 2811 - RNA, 17 nt, Artificial Sequence
  Synthetic oligonucleotide: PDCD1-2429
gcaccccccgaccugcc

SEQ ID NO: 2812 - RNA, 17 nt, Artificial Sequence
  Synthetic oligonucleotide: PDCD1-1146
ccccgaccugccaggga

SEQ ID NO: 2813 - RNA, 17 nt, Artificial Sequence
  Synthetic oligonucleotide: PDCD1-1147
ccgaccugccagggacu

SEQ ID NO: 2814 - RNA, 17 nt, Artificial Sequence
  Synthetic oligonucleotide: PDCD1-1148
ccugccagggacugaga

SEQ ID NO: 2815 - RNA, 17 nt, Artificial Sequence
  Synthetic oligonucleotide: PDCD1-1149
ccuccagaccccucgcu

SEQ ID NO: 2816 - RNA, 17 nt, Artificial Sequence
  Synthetic oligonucleotide: PDCD1-2432
cuccagaccccucgcuc

SEQ ID NO: 2817 - RNA, 17 nt, Artificial Sequence
  Synthetic oligonucleotide: PDCD1-1151
cccucgcuccgggaccc

SEQ ID NO: 2818 - RNA, 17 nt, Artificial Sequence
  Synthetic oligonucleotide: PDCD1-1152
cgggaccccugggcugc

SEQ ID NO: 2819 - RNA, 17 nt, Artificial Sequence
  Synthetic oligonucleotide: PDCD1-1144
agcaccccccgaccugc

SEQ ID NO: 2820 - RNA, 17 nt, Artificial Sequence
  Synthetic oligonucleotide: PDCD1-2429
gcaccccccgaccugcc

SEQ ID NO: 2821 - RNA, 17 nt, Artificial Sequence
  Synthetic oligonucleotide: PDCD1-1146
ccccgaccugccaggga

SEQ ID NO: 2822 - RNA, 17 nt, Artificial Sequence
  Synthetic oligonucleotide: PDCD1-1147
ccgaccugccagggacu

SEQ ID NO: 2823 - RNA, 17 nt, Artificial Sequence
  Synthetic oligonucleotide: PDCD1-1157
ccugccagggacugagg

SEQ ID NO: 2824 - RNA, 17 nt, Artificial Sequence
  Synthetic oligonucleotide: PDCD1-2443
cugccagggacugaggg

SEQ ID NO: 2825 - RNA, 17 nt, Artificial Sequence
  Synthetic oligonucleotide: PDCD1-1159
ccuccagaccccuggcu

SEQ ID NO: 2826 - RNA, 17 nt, Artificial Sequence
  Synthetic oligonucleotide: PDCD1-2446
cuccagaccccuggcuc

SEQ ID NO: 2827 - RNA, 17 nt, Artificial Sequence
  Synthetic oligonucleotide: PDCD1-653
gccgaccccaccuaccu

SEQ ID NO: 2828 - RNA, 17 nt, Artificial Sequence
  Synthetic oligonucleotide: PDCD1-652
ccgcccagacgacuggc

SEQ ID NO: 2829 - RNA, 17 nt, Artificial Sequence
  Synthetic oligonucleotide: PDCD1-651
gacuggccagggcgccu

SEQ ID NO: 2830 - RNA, 17 nt, Artificial Sequence
  Synthetic oligonucleotide: PDCD1-252
acuggccagggcgccug

SEQ ID NO: 2831 - RNA, 17 nt, Artificial Sequence
  Synthetic oligonucleotide: PDCD1-649
cugugggaucugcaugc

SEQ ID NO: 2832 - RNA, 17 nt, Artificial Sequence
  Synthetic oligonucleotide: PDCD1-254
ugugggaucugcaugcc

SEQ ID NO: 2833 - RNA, 17 nt, Artificial Sequence
  Synthetic oligonucleotide: PDCD1-647
gccuggagcagccccac

SEQ ID NO: 2834 - RNA, 17 nt, Artificial Sequence
  Synthetic oligonucleotide: PDCD1-1168
ccuucuccacugcucag

SEQ ID NO: 2835 - RNA, 17 nt, Artificial Sequence
  Synthetic oligonucleotide: PDCD1-2536
cuucuccacugcucagg

SEQ ID NO: 2836 - RNA, 17 nt, Artificial Sequence
  Synthetic oligonucleotide: PDCD1-1170
ccacugcucaggcggag

SEQ ID NO: 2837 - RNA, 17 nt, Artificial Sequence
  Synthetic oligonucleotide: PDCD1-1171
ugcucaggcggagguga

SEQ ID NO: 2838 - RNA, 17 nt, Artificial Sequence
  Synthetic oligonucleotide: PDCD1-2538
gcucaggcggaggugag

SEQ ID NO: 2839 - RNA, 17 nt, Artificial Sequence
  Synthetic oligonucleotide: PDCD1-1173
caggcggaggugagcgg

SEQ ID NO: 2840 - RNA, 17 nt, Artificial Sequence
  Synthetic oligonucleotide: PDCD1-2539
aggcggaggugagcgga

SEQ ID NO: 2841 - RNA, 17 nt, Artificial Sequence
  Synthetic oligonucleotide: PDCD1-2540
ggcggaggugagcggaa

SEQ ID NO: 2842 - RNA, 17 nt, Artificial Sequence
  Synthetic oligonucleotide: PDCD1-1176
aacugucccaggucagg

SEQ ID NO: 2843 - RNA, 17 nt, Artificial Sequence
  Synthetic oligonucleotide: PDCD1-1177
ugucccaggucagguug

SEQ ID NO: 2844 - RNA, 17 nt, Artificial Sequence
  Synthetic oligonucleotide: PDCD1-2543
gucccaggucagguuga

SEQ ID NO: 2845 - RNA, 17 nt, Artificial Sequence
  Synthetic oligonucleotide: PDCD1-2544
ucccaggucagguugaa

SEQ ID NO: 2846 - RNA, 17 nt, Artificial Sequence
  Synthetic oligonucleotide: PDCD1-1180
ccaggucagguugaagg

SEQ ID NO: 2847 - RNA, 17 nt, Artificial Sequence
  Synthetic oligonucleotide: PDCD1-1181
ucuuccuccacauccac

SEQ ID NO: 2848 - RNA, 17 nt, Artificial Sequence
  Synthetic oligonucleotide: PDCD1-1182
ccuccacauccacgugg

SEQ ID NO: 2849 - RNA, 17 nt, Artificial Sequence
  Synthetic oligonucleotide: PDCD1-1183
uccacauccacgugggc

SEQ ID NO: 2850 - RNA, 17 nt, Artificial Sequence
  Synthetic oligonucleotide: PDCD1-1184
cacgugggcgagaguga

SEQ ID NO: 2851 - RNA, 17 nt, Artificial Sequence
  Synthetic oligonucleotide: PDCD1-1185
gagugacagaggcagug

SEQ ID NO: 2852 - RNA, 17 nt, Artificial Sequence
  Synthetic oligonucleotide: PDCD1-2550
agugacagaggcagugc

SEQ ID NO: 2853 - RNA, 17 nt, Artificial Sequence
  Synthetic oligonucleotide: PDCD1-2551
gugacagaggcagugcu

SEQ ID NO: 2854 - RNA, 17 nt, Artificial Sequence
  Synthetic oligonucleotide: PDCD1-2552
ugacagaggcagugcug

SEQ ID NO: 2855 - RNA, 17 nt, Artificial Sequence
  Synthetic oligonucleotide: PDCD1-2553
gacagaggcagugcugg

SEQ ID NO: 2856 - RNA, 17 nt, Artificial Sequence
  Synthetic oligonucleotide: PDCD1-1190
cagaggcagugcugggg

SEQ ID NO: 2857 - RNA, 17 nt, Artificial Sequence
  Synthetic oligonucleotide: PDCD1-2554
agaggcagugcuggggg

SEQ ID NO: 2858 - RNA, 17 nt, Artificial Sequence
  Synthetic oligonucleotide: PDCD1-1192
aggcagugcugggggag

SEQ ID NO: 2859 - RNA, 17 nt, Artificial Sequence
  Synthetic oligonucleotide: PDCD1-2555
ggcagugcugggggagg

SEQ ID NO: 2860 - RNA, 17 nt, Artificial Sequence
  Synthetic oligonucleotide: PDCD1-1194
gugcugggggaggaggg

SEQ ID NO: 2861 - RNA, 17 nt, Artificial Sequence
  Synthetic oligonucleotide: PDCD1-1195
gcugggggaggaggggu

SEQ ID NO: 2862 - RNA, 17 nt, Artificial Sequence
  Synthetic oligonucleotide: PDCD1-2558
cugggggaggaggggug

SEQ ID NO: 2863 - RNA, 17 nt, Artificial Sequence
  Synthetic oligonucleotide: PDCD1-1197
gggggaggaggggugag

SEQ ID NO: 2864 - RNA, 17 nt, Artificial Sequence
  Synthetic oligonucleotide: PDCD1-2559
ggggaggaggggugagg

SEQ ID NO: 2865 - RNA, 17 nt, Artificial Sequence
  Synthetic oligonucleotide: PDCD1-2560
gggaggaggggugagga

SEQ ID NO: 2866 - RNA, 17 nt, Artificial Sequence
  Synthetic oligonucleotide: PDCD1-1200
gaggggugaggaggggg

SEQ ID NO: 2867 - RNA, 17 nt, Artificial Sequence
  Synthetic oligonucleotide: PDCD1-1201
gugaggaggggguagga

SEQ ID NO: 2868 - RNA, 17 nt, Artificial Sequence
  Synthetic oligonucleotide: PDCD1-2564
ugaggaggggguaggac

SEQ ID NO: 2869 - RNA, 17 nt, Artificial Sequence
  Synthetic oligonucleotide: PDCD1-2565
gaggaggggguaggacu

SEQ ID NO: 2870 - RNA, 17 nt, Artificial Sequence
  Synthetic oligonucleotide: PDCD1-2566
aggaggggguaggacug

SEQ ID NO: 2871 - RNA, 17 nt, Artificial Sequence
  Synthetic oligonucleotide: PDCD1-1205
gaggggguaggacuggg

SEQ ID NO: 2872 - RNA, 17 nt, Artificial Sequence
  Synthetic oligonucleotide: PDCD1-1206
ggggguaggacugggga

SEQ ID NO: 2873 - RNA, 17 nt, Artificial Sequence
  Synthetic oligonucleotide: PDCD1-1207
guaggacuggggagagg

SEQ ID NO: 2874 - RNA, 17 nt, Artificial Sequence
  Synthetic oligonucleotide: PDCD1-2569
uaggacuggggagaggg

SEQ ID NO: 2875 - RNA, 17 nt, Artificial Sequence
  Synthetic oligonucleotide: PDCD1-2570
aggacuggggagagggu

SEQ ID NO: 2876 - RNA, 17 nt, Artificial Sequence
  Synthetic oligonucleotide: PDCD1-2571
ggacuggggagagggug

SEQ ID NO: 2877 - RNA, 17 nt, Artificial Sequence
  Synthetic oligonucleotide: PDCD1-2572
gacuggggagagggugg

SEQ ID NO: 2878 - RNA, 17 nt, Artificial Sequence
  Synthetic oligonucleotide: PDCD1-1212
cuggggagagggugggg

SEQ ID NO: 2879 - RNA, 17 nt, Artificial Sequence
  Synthetic oligonucleotide: PDCD1-2573
uggggagaggguggggg

SEQ ID NO: 2880 - RNA, 17 nt, Artificial Sequence
  Synthetic oligonucleotide: PDCD1-2574
ggggagaggguggggga

SEQ ID NO: 2881 - RNA, 17 nt, Artificial Sequence
  Synthetic oligonucleotide: PDCD1-1215
ggagagggugggggagg

SEQ ID NO: 2882 - RNA, 17 nt, Artificial Sequence
  Synthetic oligonucleotide: PDCD1-1216
agagggugggggaggga

SEQ ID NO: 2883 - RNA, 17 nt, Artificial Sequence
  Synthetic oligonucleotide: PDCD1-1217
agggugggggagggaga

SEQ ID NO: 2884 - RNA, 17 nt, Artificial Sequence
  Synthetic oligonucleotide: PDCD1-1218
ggggagggagagagaga

SEQ ID NO: 2885 - RNA, 17 nt, Artificial Sequence
  Synthetic oligonucleotide: PDCD1-1219
ggagagagagacagaga

SEQ ID NO: 2886 - RNA, 17 nt, Artificial Sequence
  Synthetic oligonucleotide: PDCD1-2575
gagagagagacagagac

SEQ ID NO: 2887 - RNA, 17 nt, Artificial Sequence
  Synthetic oligonucleotide: PDCD1-2576
agagagagacagagaca

SEQ ID NO: 2888 - RNA, 17 nt, Artificial Sequence
  Synthetic oligonucleotide: PDCD1-1222
agacagagacagggaga

SEQ ID NO: 2889 - RNA, 17 nt, Artificial Sequence
  Synthetic oligonucleotide: PDCD1-1223
acagagacagggagaca

SEQ ID NO: 2890 - RNA, 17 nt, Artificial Sequence
  Synthetic oligonucleotide: PDCD1-2577
cagagacagggagacag

SEQ ID NO: 2891 - RNA, 17 nt, Artificial Sequence
  Synthetic oligonucleotide: PDCD1-1225
acagggagacagaggag

SEQ ID NO: 2892 - RNA, 17 nt, Artificial Sequence
  Synthetic oligonucleotide: PDCD1-2578
cagggagacagaggaga

SEQ ID NO: 2893 - RNA, 17 nt, Artificial Sequence
  Synthetic oligonucleotide: PDCD1-2579
agggagacagaggagau

SEQ ID NO: 2894 - RNA, 17 nt, Artificial Sequence
  Synthetic oligonucleotide: PDCD1-2580
gggagacagaggagaug

SEQ ID NO: 2895 - RNA, 17 nt, Artificial Sequence
  Synthetic oligonucleotide: PDCD1-1229
gagacagaggagauggg

SEQ ID NO: 2896 - RNA, 17 nt, Artificial Sequence
  Synthetic oligonucleotide: PDCD1-2581
agacagaggagaugggg

SEQ ID NO: 2897 - RNA, 17 nt, Artificial Sequence
  Synthetic oligonucleotide: PDCD1-1231
gaggagauggggaggag

SEQ ID NO: 2898 - RNA, 17 nt, Artificial Sequence
  Synthetic oligonucleotide: PDCD1-1232
cccccacgcccuacccc

SEQ ID NO: 2899 - RNA, 17 nt, Artificial Sequence
  Synthetic oligonucleotide: PDCD1-2586
ccccacgcccuaccccg

SEQ ID NO: 2900 - RNA, 17 nt, Artificial Sequence
  Synthetic oligonucleotide: PDCD1-2587
cccacgcccuaccccgu

SEQ ID NO: 2901 - RNA, 17 nt, Artificial Sequence
  Synthetic oligonucleotide: PDCD1-1235
ugggggucuccccagcu

SEQ ID NO: 2902 - RNA, 17 nt, Artificial Sequence
  Synthetic oligonucleotide: PDCD1-1236
cucuuuccauaucccgc

SEQ ID NO: 2903 - RNA, 17 nt, Artificial Sequence
  Synthetic oligonucleotide: PDCD1-1237
cgcccgagcugccccuc

SEQ ID NO: 2904 - RNA, 17 nt, Artificial Sequence
  Synthetic oligonucleotide: PDCD1-1238
ugccccuccugaggcug

SEQ ID NO: 2905 - RNA, 17 nt, Artificial Sequence
  Synthetic oligonucleotide: PDCD1-1239
ccuccugaggcugccgg

SEQ ID NO: 2906 - RNA, 17 nt, Artificial Sequence
  Synthetic oligonucleotide: PDCD1-2596
cuccugaggcugccggg

SEQ ID NO: 2907 - RNA, 17 nt, Artificial Sequence
  Synthetic oligonucleotide: PDCD1-2597
uccugaggcugccgggu

SEQ ID NO: 2908 - RNA, 17 nt, Artificial Sequence
  Synthetic oligonucleotide: PDCD1-1242
ccaucccccccaucucc

SEQ ID NO: 2909 - RNA, 17 nt, Artificial Sequence
  Synthetic oligonucleotide: PDCD1-2601
caucccccccaucuccc

SEQ ID NO: 2910 - RNA, 17 nt, Artificial Sequence
  Synthetic oligonucleotide: PDCD1-2602
aucccccccaucucccu

SEQ ID NO: 2911 - RNA, 17 nt, Artificial Sequence
  Synthetic oligonucleotide: PDCD1-1245
ccccaucucccuggggg

SEQ ID NO: 2912 - RNA, 17 nt, Artificial Sequence
  Synthetic oligonucleotide: PDCD1-1246
gggccgggccucccugc

SEQ ID NO: 2913 - RNA, 17 nt, Artificial Sequence
  Synthetic oligonucleotide: PDCD1-2607
ggccgggccucccugcc

SEQ ID NO: 2914 - RNA, 17 nt, Artificial Sequence
  Synthetic oligonucleotide: PDCD1-2608
gccgggccucccugccu

SEQ ID NO: 2915 - RNA, 17 nt, Artificial Sequence
  Synthetic oligonucleotide: PDCD1-2609
ccgggccucccugccug

SEQ ID NO: 2916 - RNA, 17 nt, Artificial Sequence
  Synthetic oligonucleotide: PDCD1-1250
cucccugccuggggaag

SEQ ID NO: 2917 - RNA, 17 nt, Artificial Sequence
  Synthetic oligonucleotide: PDCD1-1251
aagguggguggcccccu

SEQ ID NO: 2918 - RNA, 17 nt, Artificial Sequence
  Synthetic oligonucleotide: PDCD1-1252
ccucugggcucagguuc

SEQ ID NO: 2919 - RNA, 20 nt, Artificial Sequence
  Synthetic oligonucleotide: PDCD1-807
ccgaggccgcaccugucacc

SEQ ID NO: 2920 - RNA, 20 nt, Artificial Sequence
  Synthetic oligonucleotide: PDCD1-808
agggcacaaaggucaggggu

SEQ ID NO: 2921 - RNA, 20 nt, Artificial Sequence
  Synthetic oligonucleotide: PDCD1-358
ucuggaagggcacaaagguc

SEQ ID NO: 2922 - RNA, 20 nt, Artificial Sequence
  Synthetic oligonucleotide: PDCD1-810
cucuggaagggcacaaaggu

SEQ ID NO: 2923 - RNA, 20 nt, Artificial Sequence
  Synthetic oligonucleotide: PDCD1-811
acuucugcccuucucucugg

SEQ ID NO: 2924 - RNA, 20 nt, Artificial Sequence
  Synthetic oligonucleotide: PDCD1-362
ggcacuucugcccuucucuc

SEQ ID NO: 2925 - RNA, 20 nt, Artificial Sequence
  Synthetic oligonucleotide: PDCD1-813
gggcacuucugcccuucucu

SEQ ID NO: 2926 - RNA, 20 nt, Artificial Sequence
  Synthetic oligonucleotide: PDCD1-814
gugaggggcuggggugggcu

SEQ ID NO: 2927 - RNA, 20 nt, Artificial Sequence
  Synthetic oligonucleotide: PDCD1-815
ggccugggugaggggcuggg

SEQ ID NO: 2928 - RNA, 20 nt, Artificial Sequence
  Synthetic oligonucleotide: PDCD1-369
ggcuggccugggugaggggc

SEQ ID NO: 2929 - RNA, 20 nt, Artificial Sequence
  Synthetic oligonucleotide: PDCD1-817
cggcuggccugggugagggg

SEQ ID NO: 2930 - RNA, 20 nt, Artificial Sequence
  Synthetic oligonucleotide: PDCD1-372
cuggccggcuggccugggug

SEQ ID NO: 2931 - RNA, 20 nt, Artificial Sequence
  Synthetic oligonucleotide: PDCD1-819
acuggccggcuggccugggu

SEQ ID NO: 2932 - RNA, 20 nt, Artificial Sequence
  Synthetic oligonucleotide: PDCD1-820
gaacuggccggcuggccugg

SEQ ID NO: 2933 - RNA, 20 nt, Artificial Sequence
  Synthetic oligonucleotide: PDCD1-821
uuuggaacuggccggcuggc

SEQ ID NO: 2934 - RNA, 20 nt, Artificial Sequence
  Synthetic oligonucleotide: PDCD1-378
cgacaccaaccaccaggguu

SEQ ID NO: 2935 - RNA, 20 nt, Artificial Sequence
  Synthetic oligonucleotide: PDCD1-823
acgacaccaaccaccagggu

SEQ ID NO: 2936 - RNA, 20 nt, Artificial Sequence
  Synthetic oligonucleotide: PDCD1-824
ccgcccacgacaccaaccac

SEQ ID NO: 2937 - RNA, 20 nt, Artificial Sequence
  Synthetic oligonucleotide: PDCD1-825
gcccgggagcagaugacggc

SEQ ID NO: 2938 - RNA, 20 nt, Artificial Sequence
  Synthetic oligonucleotide: PDCD1-385
gacguuaccucgugcggccc

SEQ ID NO: 2939 - RNA, 20 nt, Artificial Sequence
  Synthetic oligonucleotide: PDCD1-386
ugacguuaccucgugcggcc

SEQ ID NO: 2940 - RNA, 20 nt, Artificial Sequence
  Synthetic oligonucleotide: PDCD1-828
augacguuaccucgugcggc

SEQ ID NO: 2941 - RNA, 20 nt, Artificial Sequence
  Synthetic oligonucleotide: PDCD1-391
ucccugcagagaaacacacu

SEQ ID NO: 2942 - RNA, 20 nt, Artificial Sequence
  Synthetic oligonucleotide: PDCD1-830
gucccugcagagaaacacac

SEQ ID NO: 2943 - RNA, 20 nt, Artificial Sequence
  Synthetic oligonucleotide: PDCD1-831
uggcuccuauugucccugca

SEQ ID NO: 2944 - RNA, 20 nt, Artificial Sequence
  Synthetic oligonucleotide: PDCD1-832
ccuggcuccuauugucccug

SEQ ID NO: 2945 - RNA, 20 nt, Artificial Sequence
  Synthetic oligonucleotide: PDCD1-397
ggaaaagagugagacucacc

SEQ ID NO: 2946 - RNA, 20 nt, Artificial Sequence
  Synthetic oligonucleotide: PDCD1-834
aggaaaagagugagacucac

SEQ ID NO: 2947 - RNA, 20 nt, Artificial Sequence
  Synthetic oligonucleotide: PDCD1-398
ucuuugaggagaaagggaga

SEQ ID NO: 2948 - RNA, 20 nt, Artificial Sequence
  Synthetic oligonucleotide: PDCD1-399
uucuuugaggagaaagggag

SEQ ID NO: 2949 - RNA, 20 nt, Artificial Sequence
  Synthetic oligonucleotide: PDCD1-837
cuucuuugaggagaaaggga

SEQ ID NO: 2950 - RNA, 20 nt, Artificial Sequence
  Synthetic oligonucleotide: PDCD1-838
uccuucuuugaggagaaagg

SEQ ID NO: 2951 - RNA, 20 nt, Artificial Sequence
  Synthetic oligonucleotide: PDCD1-400
ccuccuucuuugaggagaaa

SEQ ID NO: 2952 - RNA, 20 nt, Artificial Sequence
  Synthetic oligonucleotide: PDCD1-401
uccuccuucuuugaggagaa

SEQ ID NO: 2953 - RNA, 20 nt, Artificial Sequence
  Synthetic oligonucleotide: PDCD1-841
guccuccuucuuugaggaga

SEQ ID NO: 2954 - RNA, 20 nt, Artificial Sequence
  Synthetic oligonucleotide: PDCD1-842
agggguccuccuucuuugag

SEQ ID NO: 2955 - RNA, 20 nt, Artificial Sequence
  Synthetic oligonucleotide: PDCD1-402
ugagggguccuccuucuuug

SEQ ID NO: 2956 - RNA, 20 nt, Artificial Sequence
  Synthetic oligonucleotide: PDCD1-844
cugagggguccuccuucuuu

SEQ ID NO: 2957 - RNA, 20 nt, Artificial Sequence
  Synthetic oligonucleotide: PDCD1-845
ggcugagggguccuccuucu

SEQ ID NO: 2958 - RNA, 20 nt, Artificial Sequence
  Synthetic oligonucleotide: PDCD1-405
agagaacacaggcacggcug

SEQ ID NO: 2959 - RNA, 20 nt, Artificial Sequence
  Synthetic oligonucleotide: PDCD1-847
cagagaacacaggcacggcu

SEQ ID NO: 2960 - RNA, 20 nt, Artificial Sequence
  Synthetic oligonucleotide: PDCD1-848
cacagagaacacaggcacgg

SEQ ID NO: 2961 - RNA, 20 nt, Artificial Sequence
  Synthetic oligonucleotide: PDCD1-849
ccagcuccccauaguccaca

SEQ ID NO: 2962 - RNA, 20 nt, Artificial Sequence
  Synthetic oligonucleotide: PDCD1-850
auccagcuccccauagucca

SEQ ID NO: 2963 - RNA, 20 nt, Artificial Sequence
  Synthetic oligonucleotide: PDCD1-408
ccggggucuucucucgccac

SEQ ID NO: 2964 - RNA, 20 nt, Artificial Sequence
  Synthetic oligonucleotide: PDCD1-852
uccggggucuucucucgcca

SEQ ID NO: 2965 - RNA, 20 nt, Artificial Sequence
  Synthetic oligonucleotide: PDCD1-411
acacagggcacggggggcuc

SEQ ID NO: 2966 - RNA, 20 nt, Artificial Sequence
  Synthetic oligonucleotide: PDCD1-854
gacacagggcacggggggcu

SEQ ID NO: 2967 - RNA, 20 nt, Artificial Sequence
  Synthetic oligonucleotide: PDCD1-414
gcucagggacacagggcacg

SEQ ID NO: 2968 - RNA, 20 nt, Artificial Sequence
  Synthetic oligonucleotide: PDCD1-415
ugcucagggacacagggcac

SEQ ID NO: 2969 - RNA, 20 nt, Artificial Sequence
  Synthetic oligonucleotide: PDCD1-416
cugcucagggacacagggca

SEQ ID NO: 2970 - RNA, 20 nt, Artificial Sequence
  Synthetic oligonucleotide: PDCD1-858
ucugcucagggacacagggc

SEQ ID NO: 2971 - RNA, 20 nt, Artificial Sequence
  Synthetic oligonucleotide: PDCD1-859
acuccgucugcucagggaca

SEQ ID NO: 2972 - RNA, 20 nt, Artificial Sequence
  Synthetic oligonucleotide: PDCD1-420
guggcauacuccgucugcuc

SEQ ID NO: 2973 - RNA, 20 nt, Artificial Sequence
  Synthetic oligonucleotide: PDCD1-861
gguggcauacuccgucugcu

SEQ ID NO: 2974 - RNA, 20 nt, Artificial Sequence
  Synthetic oligonucleotide: PDCD1-423
gaugaggugcccauuccgcu

SEQ ID NO: 2975 - RNA, 20 nt, Artificial Sequence
  Synthetic oligonucleotide: PDCD1-863
ggaugaggugcccauuccgc

SEQ ID NO: 2976 - RNA, 20 nt, Artificial Sequence
  Synthetic oligonucleotide: PDCD1-864
ugagccccugcgggcggggg

SEQ ID NO: 2977 - RNA, 20 nt, Artificial Sequence
  Synthetic oligonucleotide: PDCD1-426
cagcugagccccugcgggcg

SEQ ID NO: 2978 - RNA, 20 nt, Artificial Sequence
  Synthetic oligonucleotide: PDCD1-427
ucagcugagccccugcgggc

SEQ ID NO: 2979 - RNA, 20 nt, Artificial Sequence
  Synthetic oligonucleotide: PDCD1-428
gucagcugagccccugcggg

SEQ ID NO: 2980 - RNA, 20 nt, Artificial Sequence
  Synthetic oligonucleotide: PDCD1-868
cgucagcugagccccugcgg

SEQ ID NO: 2981 - RNA, 20 nt, Artificial Sequence
  Synthetic oligonucleotide: PDCD1-869
gggccgucagcugagccccu

SEQ ID NO: 2982 - RNA, 20 nt, Artificial Sequence
  Synthetic oligonucleotide: PDCD1-870
ggcacuccgagggccgucag

SEQ ID NO: 2983 - RNA, 20 nt, Artificial Sequence
  Synthetic oligonucleotide: PDCD1-871
ccucaguggcugggcacucc

SEQ ID NO: 2984 - RNA, 20 nt, Artificial Sequence
  Synthetic oligonucleotide: PDCD1-872
ggccucaguggcugggcacu

SEQ ID NO: 2985 - RNA, 20 nt, Artificial Sequence
  Synthetic oligonucleotide: PDCD1-873
ccauccucaggccucagugg

SEQ ID NO: 2986 - RNA, 20 nt, Artificial Sequence
  Synthetic oligonucleotide: PDCD1-874
ggaagccggucagaggggcc

SEQ ID NO: 2987 - RNA, 20 nt, Artificial Sequence
  Synthetic oligonucleotide: PDCD1-439
uggccaaggaagccggucag

SEQ ID NO: 2988 - RNA, 20 nt, Artificial Sequence
  Synthetic oligonucleotide: PDCD1-876
guggccaaggaagccgguca

SEQ ID NO: 2989 - RNA, 20 nt, Artificial Sequence
  Synthetic oligonucleotide: PDCD1-877
ugguggccaaggaagccggu

SEQ ID NO: 2990 - RNA, 20 nt, Artificial Sequence
  Synthetic oligonucleotide: PDCD1-441
cugcagaacacugguggcca

SEQ ID NO: 2991 - RNA, 20 nt, Artificial Sequence
  Synthetic oligonucleotide: PDCD1-441
cugcagaacacugguggcca

SEQ ID NO: 2992 - RNA, 17 nt, Artificial Sequence
  Synthetic oligonucleotide: PDCD1-880
aggccgcaccugucacc

SEQ ID NO: 2993 - RNA, 17 nt, Artificial Sequence
  Synthetic oligonucleotide: PDCD1-881
gcacaaaggucaggggu

SEQ ID NO: 2994 - RNA, 17 nt, Artificial Sequence
  Synthetic oligonucleotide: PDCD1-445
ggaagggcacaaagguc

SEQ ID NO: 2995 - RNA, 17 nt, Artificial Sequence
  Synthetic oligonucleotide: PDCD1-883
uggaagggcacaaaggu

SEQ ID NO: 2996 - RNA, 17 nt, Artificial Sequence
  Synthetic oligonucleotide: PDCD1-884
ucugcccuucucucugg

SEQ ID NO: 2997 - RNA, 17 nt, Artificial Sequence
  Synthetic oligonucleotide: PDCD1-449
acuucugcccuucucuc

SEQ ID NO: 2998 - RNA, 17 nt, Artificial Sequence
  Synthetic oligonucleotide: PDCD1-886
cacuucugcccuucucu

SEQ ID NO: 2999 - RNA, 17 nt, Artificial Sequence
  Synthetic oligonucleotide: PDCD1-887
aggggcuggggugggcu

SEQ ID NO: 3000 - RNA, 17 nt, Artificial Sequence
  Synthetic oligonucleotide: PDCD1-888
cugggugaggggcuggg

SEQ ID NO: 3001 - RNA, 17 nt, Artificial Sequence
  Synthetic oligonucleotide: PDCD1-456
uggccugggugaggggc

SEQ ID NO: 3002 - RNA, 17 nt, Artificial Sequence
  Synthetic oligonucleotide: PDCD1-890
cuggccugggugagggg

SEQ ID NO: 3003 - RNA, 17 nt, Artificial Sequence
  Synthetic oligonucleotide: PDCD1-459
gccggcuggccugggug

SEQ ID NO: 3004 - RNA, 17 nt, Artificial Sequence
  Synthetic oligonucleotide: PDCD1-892
ggccggcuggccugggu

SEQ ID NO: 3005 - RNA, 17 nt, Artificial Sequence
  Synthetic oligonucleotide: PDCD1-893
cuggccggcuggccugg

SEQ ID NO: 3006 - RNA, 17 nt, Artificial Sequence
  Synthetic oligonucleotide: PDCD1-894
ggaacuggccggcuggc

SEQ ID NO: 3007 - RNA, 17 nt, Artificial Sequence
  Synthetic oligonucleotide: PDCD1-465
caccaaccaccaggguu

SEQ ID NO: 3008 - RNA, 17 nt, Artificial Sequence
  Synthetic oligonucleotide: PDCD1-896
acaccaaccaccagggu

SEQ ID NO: 3009 - RNA, 17 nt, Artificial Sequence
  Synthetic oligonucleotide: PDCD1-897
cccacgacaccaaccac

SEQ ID NO: 3010 - RNA, 17 nt, Artificial Sequence
  Synthetic oligonucleotide: PDCD1-898
cgggagcagaugacggc

SEQ ID NO: 3011 - RNA, 17 nt, Artificial Sequence
  Synthetic oligonucleotide: PDCD1-472
guuaccucgugcggccc

SEQ ID NO: 3012 - RNA, 17 nt, Artificial Sequence
  Synthetic oligonucleotide: PDCD1-473
cguuaccucgugcggcc

SEQ ID NO: 3013 - RNA, 17 nt, Artificial Sequence
  Synthetic oligonucleotide: PDCD1-901
acguuaccucgugcggc

SEQ ID NO: 3014 - RNA, 17 nt, Artificial Sequence
  Synthetic oligonucleotide: PDCD1-478
cugcagagaaacacacu

SEQ ID NO: 3015 - RNA, 17 nt, Artificial Sequence
  Synthetic oligonucleotide: PDCD1-903
ccugcagagaaacacac

SEQ ID NO: 3016 - RNA, 17 nt, Artificial Sequence
  Synthetic oligonucleotide: PDCD1-904
cuccuauugucccugca

SEQ ID NO: 3017 - RNA, 17 nt, Artificial Sequence
  Synthetic oligonucleotide: PDCD1-905
ggcuccuauugucccug

SEQ ID NO: 3018 - RNA, 17 nt, Artificial Sequence
  Synthetic oligonucleotide: PDCD1-484
aaagagugagacucacc

SEQ ID NO: 3019 - RNA, 17 nt, Artificial Sequence
  Synthetic oligonucleotide: PDCD1-907
aaaagagugagacucac

SEQ ID NO: 3020 - RNA, 17 nt, Artificial Sequence
  Synthetic oligonucleotide: PDCD1-485
uugaggagaaagggaga

SEQ ID NO: 3021 - RNA, 17 nt, Artificial Sequence
  Synthetic oligonucleotide: PDCD1-486
uuugaggagaaagggag

SEQ ID NO: 3022 - RNA, 17 nt, Artificial Sequence
  Synthetic oligonucleotide: PDCD1-910
cuuugaggagaaaggga

SEQ ID NO: 3023 - RNA, 17 nt, Artificial Sequence
  Synthetic oligonucleotide: PDCD1-911
uucuuugaggagaaagg

SEQ ID NO: 3024 - RNA, 17 nt, Artificial Sequence
  Synthetic oligonucleotide: PDCD1-487
ccuucuuugaggagaaa

SEQ ID NO: 3025 - RNA, 17 nt, Artificial Sequence
  Synthetic oligonucleotide: PDCD1-488
uccuucuuugaggagaa

SEQ ID NO: 3026 - RNA, 17 nt, Artificial Sequence
  Synthetic oligonucleotide: PDCD1-914
cuccuucuuugaggaga

SEQ ID NO: 3027 - RNA, 17 nt, Artificial Sequence
  Synthetic oligonucleotide: PDCD1-915
gguccuccuucuuugag

SEQ ID NO: 3028 - RNA, 17 nt, Artificial Sequence
  Synthetic oligonucleotide: PDCD1-489
gggguccuccuucuuug

SEQ ID NO: 3029 - RNA, 17 nt, Artificial Sequence
  Synthetic oligonucleotide: PDCD1-917
agggguccuccuucuuu

SEQ ID NO: 3030 - RNA, 17 nt, Artificial Sequence
  Synthetic oligonucleotide: PDCD1-918
ugagggguccuccuucu

SEQ ID NO: 3031 - RNA, 17 nt, Artificial Sequence
  Synthetic oligonucleotide: PDCD1-492
gaacacaggcacggcug

SEQ ID NO: 3032 - RNA, 17 nt, Artificial Sequence
  Synthetic oligonucleotide: PDCD1-920
agaacacaggcacggcu

SEQ ID NO: 3033 - RNA, 17 nt, Artificial Sequence
  Synthetic oligonucleotide: PDCD1-921
agagaacacaggcacgg

SEQ ID NO: 3034 - RNA, 17 nt, Artificial Sequence
  Synthetic oligonucleotide: PDCD1-922
gcuccccauaguccaca

SEQ ID NO: 3035 - RNA, 17 nt, Artificial Sequence
  Synthetic oligonucleotide: PDCD1-923
cagcuccccauagucca

SEQ ID NO: 3036 - RNA, 17 nt, Artificial Sequence
  Synthetic oligonucleotide: PDCD1-495
gggucuucucucgccac

SEQ ID NO: 3037 - RNA, 17 nt, Artificial Sequence
  Synthetic oligonucleotide: PDCD1-925
ggggucuucucucgcca

SEQ ID NO: 3038 - RNA, 17 nt, Artificial Sequence
  Synthetic oligonucleotide: PDCD1-498
cagggcacggggggcuc

SEQ ID NO: 3039 - RNA, 17 nt, Artificial Sequence
  Synthetic oligonucleotide: PDCD1-927
acagggcacggggggcu

SEQ ID NO: 3040 - RNA, 17 nt, Artificial Sequence
  Synthetic oligonucleotide: PDCD1-501
cagggacacagggcacg

SEQ ID NO: 3041 - RNA, 17 nt, Artificial Sequence
  Synthetic oligonucleotide: PDCD1-502
ucagggacacagggcac

SEQ ID NO: 3042 - RNA, 17 nt, Artificial Sequence
  Synthetic oligonucleotide: PDCD1-503
cucagggacacagggca

SEQ ID NO: 3043 - RNA, 17 nt, Artificial Sequence
  Synthetic oligonucleotide: PDCD1-931
gcucagggacacagggc

SEQ ID NO: 3044 - RNA, 17 nt, Artificial Sequence
  Synthetic oligonucleotide: PDCD1-932
ccgucugcucagggaca

SEQ ID NO: 3045 - RNA, 17 nt, Artificial Sequence
  Synthetic oligonucleotide: PDCD1-507
gcauacuccgucugcuc

SEQ ID NO: 3046 - RNA, 17 nt, Artificial Sequence
  Synthetic oligonucleotide: PDCD1-934
ggcauacuccgucugcu

SEQ ID NO: 3047 - RNA, 17 nt, Artificial Sequence
  Synthetic oligonucleotide: PDCD1-510
gaggugcccauuccgcu

SEQ ID NO: 3048 - RNA, 17 nt, Artificial Sequence
  Synthetic oligonucleotide: PDCD1-936
ugaggugcccauuccgc

SEQ ID NO: 3049 - RNA, 17 nt, Artificial Sequence
  Synthetic oligonucleotide: PDCD1-937
gccccugcgggcggggg

SEQ ID NO: 3050 - RNA, 17 nt, Artificial Sequence
  Synthetic oligonucleotide: PDCD1-513
cugagccccugcgggcg

SEQ ID NO: 3051 - RNA, 17 nt, Artificial Sequence
  Synthetic oligonucleotide: PDCD1-514
gcugagccccugcgggc

SEQ ID NO: 3052 - RNA, 17 nt, Artificial Sequence
  Synthetic oligonucleotide: PDCD1-515
agcugagccccugcggg

SEQ ID NO: 3053 - RNA, 17 nt, Artificial Sequence
  Synthetic oligonucleotide: PDCD1-941
cagcugagccccugcgg

SEQ ID NO: 3054 - RNA, 17 nt, Artificial Sequence
  Synthetic oligonucleotide: PDCD1-942
ccgucagcugagccccu

SEQ ID NO: 3055 - RNA, 17 nt, Artificial Sequence
  Synthetic oligonucleotide: PDCD1-943
acuccgagggccgucag

SEQ ID NO: 3056 - RNA, 17 nt, Artificial Sequence
  Synthetic oligonucleotide: PDCD1-944
caguggcugggcacucc

SEQ ID NO: 3057 - RNA, 17 nt, Artificial Sequence
  Synthetic oligonucleotide: PDCD1-945
cucaguggcugggcacu

SEQ ID NO: 3058 - RNA, 17 nt, Artificial Sequence
  Synthetic oligonucleotide: PDCD1-946
uccucaggccucagugg

SEQ ID NO: 3059 - RNA, 17 nt, Artificial Sequence
  Synthetic oligonucleotide: PDCD1-947
agccggucagaggggcc

SEQ ID NO: 3060 - RNA, 17 nt, Artificial Sequence
  Synthetic oligonucleotide: PDCD1-526
ccaaggaagccggucag

SEQ ID NO: 3061 - RNA, 17 nt, Artificial Sequence
  Synthetic oligonucleotide: PDCD1-949
gccaaggaagccgguca

SEQ ID NO: 3062 - RNA, 17 nt, Artificial Sequence
  Synthetic oligonucleotide: PDCD1-950
uggccaaggaagccggu

SEQ ID NO: 3063 - RNA, 17 nt, Artificial Sequence
  Synthetic oligonucleotide: PDCD1-528
cagaacacugguggcca

SEQ ID NO: 3064 - RNA, 17 nt, Artificial Sequence
  Synthetic oligonucleotide: PDCD1-952
gcagaacacugguggcc

SEQ ID NO: 3065 - RNA, 20 nt, Artificial Sequence
  Synthetic oligonucleotide: PDCD1-2225
aaccccaaaccuuggccgug

SEQ ID NO: 3066 - RNA, 20 nt, Artificial Sequence
  Synthetic oligonucleotide: PDCD1-2224
gaaccccaaaccuuggccgu

SEQ ID NO: 3067 - RNA, 20 nt, Artificial Sequence
  Synthetic oligonucleotide: PDCD1-2223
agaaccccaaaccuuggccg

SEQ ID NO: 3068 - RNA, 20 nt, Artificial Sequence
  Synthetic oligonucleotide: PDCD1-1402
cagaaccccaaaccuuggcc

SEQ ID NO: 3069 - RNA, 20 nt, Artificial Sequence
  Synthetic oligonucleotide: PDCD1-1403
gaaugacgggucaggcuggc

SEQ ID NO: 3070 - RNA, 20 nt, Artificial Sequence
  Synthetic oligonucleotide: PDCD1-1404
cugcguguuucuguagaaug

SEQ ID NO: 3071 - RNA, 20 nt, Artificial Sequence
  Synthetic oligonucleotide: PDCD1-1405
cuuggggcugcguguuucug

SEQ ID NO: 3072 - RNA, 20 nt, Artificial Sequence
  Synthetic oligonucleotide: PDCD1-2215
guccccucucagccgguccu

SEQ ID NO: 3073 - RNA, 20 nt, Artificial Sequence
  Synthetic oligonucleotide: PDCD1-1407
uguccccucucagccggucc

SEQ ID NO: 3074 - RNA, 20 nt, Artificial Sequence
  Synthetic oligonucleotide: PDCD1-1408
ccucuuugcuccugggcagg

SEQ ID NO: 3075 - RNA, 20 nt, Artificial Sequence
  Synthetic oligonucleotide: PDCD1-1409
cccaaguccccucuuugcuc

SEQ ID NO: 3076 - RNA, 20 nt, Artificial Sequence
  Synthetic oligonucleotide: PDCD1-1410
ucgaacuccuggguuccucu

SEQ ID NO: 3077 - RNA, 20 nt, Artificial Sequence
  Synthetic oligonucleotide: PDCD1-1411
gcuuugggcagcucgaacuc

SEQ ID NO: 3078 - RNA, 20 nt, Artificial Sequence
  Synthetic oligonucleotide: PDCD1-1412
gcuguguggcuuugggcagc

SEQ ID NO: 3079 - RNA, 20 nt, Artificial Sequence
  Synthetic oligonucleotide: PDCD1-1413
uuacccugagcuguguggcu

SEQ ID NO: 3080 - RNA, 20 nt, Artificial Sequence
  Synthetic oligonucleotide: PDCD1-1414
ccccagcucugccccuuacc

SEQ ID NO: 3081 - RNA, 20 nt, Artificial Sequence
  Synthetic oligonucleotide: PDCD1-2196
ucucagucccuggcaggucg

SEQ ID NO: 3082 - RNA, 20 nt, Artificial Sequence
  Synthetic oligonucleotide: PDCD1-2195
cucucagucccuggcagguc

SEQ ID NO: 3083 - RNA, 20 nt, Artificial Sequence
  Synthetic oligonucleotide: PDCD1-2194
acucucagucccuggcaggu

SEQ ID NO: 3084 - RNA, 20 nt, Artificial Sequence
  Synthetic oligonucleotide: PDCD1-1418
cacucucagucccuggcagg

SEQ ID NO: 3085 - RNA, 20 nt, Artificial Sequence
  Synthetic oligonucleotide: PDCD1-2190
ucccggagcgaggggucugg

SEQ ID NO: 3086 - RNA, 20 nt, Artificial Sequence
  Synthetic oligonucleotide: PDCD1-1420
gucccggagcgaggggucug

SEQ ID NO: 3087 - RNA, 20 nt, Artificial Sequence
  Synthetic oligonucleotide: PDCD1-2189
gggucccggagcgagggguc

SEQ ID NO: 3088 - RNA, 20 nt, Artificial Sequence
  Synthetic oligonucleotide: PDCD1-1422
ggggucccggagcgaggggu

SEQ ID NO: 3089 - RNA, 20 nt, Artificial Sequence
  Synthetic oligonucleotide: PDCD1-2186
agcccaggggucccggagcg

SEQ ID NO: 3090 - RNA, 20 nt, Artificial Sequence
  Synthetic oligonucleotide: PDCD1-1424
cagcccaggggucccggagc

SEQ ID NO: 3091 - RNA, 20 nt, Artificial Sequence
  Synthetic oligonucleotide: PDCD1-1425
ggcagcccaggggucccgga

SEQ ID NO: 3092 - RNA, 20 nt, Artificial Sequence
  Synthetic oligonucleotide: PDCD1-2185
cccuggcagcccaggggucc

SEQ ID NO: 3093 - RNA, 20 nt, Artificial Sequence
  Synthetic oligonucleotide: PDCD1-1427
gcccuggcagcccagggguc

SEQ ID NO: 3094 - RNA, 20 nt, Artificial Sequence
  Synthetic oligonucleotide: PDCD1-2182
gggccuggcccuggcagccc

SEQ ID NO: 3095 - RNA, 20 nt, Artificial Sequence
  Synthetic oligonucleotide: PDCD1-1429
cgggccuggcccuggcagcc

SEQ ID NO: 3096 - RNA, 20 nt, Artificial Sequence
  Synthetic oligonucleotide: PDCD1-1430
gcaggucggggggugcugag

SEQ ID NO: 3097 - RNA, 20 nt, Artificial Sequence
  Synthetic oligonucleotide: PDCD1-1431
cccuggcaggucggggggug

SEQ ID NO: 3098 - RNA, 20 nt, Artificial Sequence
  Synthetic oligonucleotide: PDCD1-2174
ccucagucccuggcaggucg

SEQ ID NO: 3099 - RNA, 20 nt, Artificial Sequence
  Synthetic oligonucleotide: PDCD1-2173
cccucagucccuggcagguc

SEQ ID NO: 3100 - RNA, 20 nt, Artificial Sequence
  Synthetic oligonucleotide: PDCD1-2172
acccucagucccuggcaggu

SEQ ID NO: 3101 - RNA, 20 nt, Artificial Sequence
  Synthetic oligonucleotide: PDCD1-1435
cacccucagucccuggcagg

SEQ ID NO: 3102 - RNA, 20 nt, Artificial Sequence
  Synthetic oligonucleotide: PDCD1-2168
ucccagagccaggggucugg

SEQ ID NO: 3103 - RNA, 20 nt, Artificial Sequence
  Synthetic oligonucleotide: PDCD1-1437
gucccagagccaggggucug

SEQ ID NO: 3104 - RNA, 20 nt, Artificial Sequence
  Synthetic oligonucleotide: PDCD1-2167
gugucccagagccagggguc

SEQ ID NO: 3105 - RNA, 20 nt, Artificial Sequence
  Synthetic oligonucleotide: PDCD1-1439
ggugucccagagccaggggu

SEQ ID NO: 3106 - RNA, 20 nt, Artificial Sequence
  Synthetic oligonucleotide: PDCD1-2164
cggucaggugucccagagcc

SEQ ID NO: 3107 - RNA, 20 nt, Artificial Sequence
  Synthetic oligonucleotide: PDCD1-1441
gcggucaggugucccagagc

SEQ ID NO: 3108 - RNA, 20 nt, Artificial Sequence
  Synthetic oligonucleotide: PDCD1-1442
gggucggcggucaggugucc

SEQ ID NO: 3109 - RNA, 20 nt, Artificial Sequence
  Synthetic oligonucleotide: PDCD1-115
caggaugguucuuagguagg

SEQ ID NO: 3110 - RNA, 20 nt, Artificial Sequence
  Synthetic oligonucleotide: PDCD1-532
ccaggaugguucuuagguag

SEQ ID NO: 3111 - RNA, 20 nt, Artificial Sequence
  Synthetic oligonucleotide: PDCD1-531
gcuacaacugggcuggcggc

SEQ ID NO: 3112 - RNA, 20 nt, Artificial Sequence
  Synthetic oligonucleotide: PDCD1-530
ucgucugggcggugcuacaa

SEQ ID NO: 3113 - RNA, 20 nt, Artificial Sequence
  Synthetic oligonucleotide: PDCD1-529
caggcgcccuggccagucgu

SEQ ID NO: 3114 - RNA, 20 nt, Artificial Sequence
  Synthetic oligonucleotide: PDCD1-2386
uggagaaggcggcacucugg

SEQ ID NO: 3115 - RNA, 20 nt, Artificial Sequence
  Synthetic oligonucleotide: PDCD1-1449
guggagaaggcggcacucug

SEQ ID NO: 3116 - RNA, 20 nt, Artificial Sequence
  Synthetic oligonucleotide: PDCD1-1450
ucaccuccgccugagcagug

SEQ ID NO: 3117 - RNA, 20 nt, Artificial Sequence
  Synthetic oligonucleotide: PDCD1-2382
gcucaccuccgccugagcag

SEQ ID NO: 3118 - RNA, 20 nt, Artificial Sequence
  Synthetic oligonucleotide: PDCD1-1452
cgcucaccuccgccugagca

SEQ ID NO: 3119 - RNA, 20 nt, Artificial Sequence
  Synthetic oligonucleotide: PDCD1-1453
ucccuuccgcucaccuccgc

SEQ ID NO: 3120 - RNA, 20 nt, Artificial Sequence
  Synthetic oligonucleotide: PDCD1-2380
acccucccuucaaccugacc

SEQ ID NO: 3121 - RNA, 20 nt, Artificial Sequence
  Synthetic oligonucleotide: PDCD1-1455
cacccucccuucaaccugac

SEQ ID NO: 3122 - RNA, 20 nt, Artificial Sequence
  Synthetic oligonucleotide: PDCD1-1456
agagggggcgggagcaaggg

SEQ ID NO: 3123 - RNA, 20 nt, Artificial Sequence
  Synthetic oligonucleotide: PDCD1-2375
aggaagagggggcgggagca

SEQ ID NO: 3124 - RNA, 20 nt, Artificial Sequence
  Synthetic oligonucleotide: PDCD1-1458
gaggaagagggggcgggagc

SEQ ID NO: 3125 - RNA, 20 nt, Artificial Sequence
  Synthetic oligonucleotide: PDCD1-2374
gauguggaggaagagggggc

SEQ ID NO: 3126 - RNA, 20 nt, Artificial Sequence
  Synthetic oligonucleotide: PDCD1-2373
ggauguggaggaagaggggg

SEQ ID NO: 3127 - RNA, 20 nt, Artificial Sequence
  Synthetic oligonucleotide: PDCD1-1461
uggauguggaggaagagggg

SEQ ID NO: 3128 - RNA, 20 nt, Artificial Sequence
  Synthetic oligonucleotide: PDCD1-2370
cacguggauguggaggaaga

SEQ ID NO: 3129 - RNA, 20 nt, Artificial Sequence
  Synthetic oligonucleotide: PDCD1-2369
ccacguggauguggaggaag

SEQ ID NO: 3130 - RNA, 20 nt, Artificial Sequence
  Synthetic oligonucleotide: PDCD1-1464
cccacguggauguggaggaa

SEQ ID NO: 3131 - RNA, 20 nt, Artificial Sequence
  Synthetic oligonucleotide: PDCD1-1465
cgcccacguggauguggagg

SEQ ID NO: 3132 - RNA, 20 nt, Artificial Sequence
  Synthetic oligonucleotide: PDCD1-2368
ucucgcccacguggaugugg

SEQ ID NO: 3133 - RNA, 20 nt, Artificial Sequence
  Synthetic oligonucleotide: PDCD1-1467
cucucgcccacguggaugug

SEQ ID NO: 3134 - RNA, 20 nt, Artificial Sequence
  Synthetic oligonucleotide: PDCD1-2367
cacucucgcccacguggaug

SEQ ID NO: 3135 - RNA, 20 nt, Artificial Sequence
  Synthetic oligonucleotide: PDCD1-1469
ucacucucgcccacguggau

SEQ ID NO: 3136 - RNA, 20 nt, Artificial Sequence
  Synthetic oligonucleotide: PDCD1-1470
ccucugucacucucgcccac

SEQ ID NO: 3137 - RNA, 20 nt, Artificial Sequence
  Synthetic oligonucleotide: PDCD1-1471
cgggguagggcgugggggcc

SEQ ID NO: 3138 - RNA, 20 nt, Artificial Sequence
  Synthetic oligonucleotide: PDCD1-2361
acccccacgggguagggcgu

SEQ ID NO: 3139 - RNA, 20 nt, Artificial Sequence
  Synthetic oligonucleotide: PDCD1-2360
gacccccacgggguagggcg

SEQ ID NO: 3140 - RNA, 20 nt, Artificial Sequence
  Synthetic oligonucleotide: PDCD1-1474
agacccccacgggguagggc

SEQ ID NO: 3141 - RNA, 20 nt, Artificial Sequence
  Synthetic oligonucleotide: PDCD1-1475
cuggggagacccccacgggg

SEQ ID NO: 3142 - RNA, 20 nt, Artificial Sequence
  Synthetic oligonucleotide: PDCD1-2355
cugagcuggggagaccccca

SEQ ID NO: 3143 - RNA, 20 nt, Artificial Sequence
  Synthetic oligonucleotide: PDCD1-1477
ccugagcuggggagaccccc

SEQ ID NO: 3144 - RNA, 20 nt, Artificial Sequence
  Synthetic oligonucleotide: PDCD1-2354
gaggaaggggcccugagcug

SEQ ID NO: 3145 - RNA, 20 nt, Artificial Sequence
  Synthetic oligonucleotide: PDCD1-2353
ggaggaaggggcccugagcu

SEQ ID NO: 3146 - RNA, 20 nt, Artificial Sequence
  Synthetic oligonucleotide: PDCD1-2352
aggaggaaggggcccugagc

SEQ ID NO: 3147 - RNA, 20 nt, Artificial Sequence
  Synthetic oligonucleotide: PDCD1-1481
gaggaggaaggggcccugag

SEQ ID NO: 3148 - RNA, 20 nt, Artificial Sequence
  Synthetic oligonucleotide: PDCD1-1482
acacagaggaggaaggggcc

SEQ ID NO: 3149 - RNA, 20 nt, Artificial Sequence
  Synthetic oligonucleotide: PDCD1-2349
agcagagacacagaggagga

SEQ ID NO: 3150 - RNA, 20 nt, Artificial Sequence
  Synthetic oligonucleotide: PDCD1-1484
gagcagagacacagaggagg

SEQ ID NO: 3151 - RNA, 20 nt, Artificial Sequence
  Synthetic oligonucleotide: PDCD1-2348
agugagcagagacacagagg

SEQ ID NO: 3152 - RNA, 20 nt, Artificial Sequence
  Synthetic oligonucleotide: PDCD1-1486
cagugagcagagacacagag

SEQ ID NO: 3153 - RNA, 20 nt, Artificial Sequence
  Synthetic oligonucleotide: PDCD1-2347
agcagugagcagagacacag

SEQ ID NO: 3154 - RNA, 20 nt, Artificial Sequence
  Synthetic oligonucleotide: PDCD1-1488
cagcagugagcagagacaca

SEQ ID NO: 3155 - RNA, 20 nt, Artificial Sequence
  Synthetic oligonucleotide: PDCD1-1489
cacagcagugagcagagaca

SEQ ID NO: 3156 - RNA, 20 nt, Artificial Sequence
  Synthetic oligonucleotide: PDCD1-1490
aaagaggccacagcagugag

SEQ ID NO: 3157 - RNA, 20 nt, Artificial Sequence
  Synthetic oligonucleotide: PDCD1-1491
uauggaaagaggccacagca

SEQ ID NO: 3158 - RNA, 20 nt, Artificial Sequence
  Synthetic oligonucleotide: PDCD1-1492
cagcucgggcgggauaugga

SEQ ID NO: 3159 - RNA, 20 nt, Artificial Sequence
  Synthetic oligonucleotide: PDCD1-2345
ggggcagcucgggcgggaua

SEQ ID NO: 3160 - RNA, 20 nt, Artificial Sequence
  Synthetic oligonucleotide: PDCD1-1494
aggggcagcucgggcgggau

SEQ ID NO: 3161 - RNA, 20 nt, Artificial Sequence
  Synthetic oligonucleotide: PDCD1-2343
cucaggaggggcagcucggg

SEQ ID NO: 3162 - RNA, 20 nt, Artificial Sequence
  Synthetic oligonucleotide: PDCD1-1496
ccucaggaggggcagcucgg

SEQ ID NO: 3163 - RNA, 20 nt, Artificial Sequence
  Synthetic oligonucleotide: PDCD1-1497
gcagccucaggaggggcagc

SEQ ID NO: 3164 - RNA, 20 nt, Artificial Sequence
  Synthetic oligonucleotide: PDCD1-2338
ccccacccggcagccucagg

SEQ ID NO: 3165 - RNA, 20 nt, Artificial Sequence
  Synthetic oligonucleotide: PDCD1-1499
cccccacccggcagccucag

SEQ ID NO: 3166 - RNA, 20 nt, Artificial Sequence
  Synthetic oligonucleotide: PDCD1-2337
ugcccccacccggcagccuc

SEQ ID NO: 3167 - RNA, 20 nt, Artificial Sequence
  Synthetic oligonucleotide: PDCD1-1501
cugcccccacccggcagccu

SEQ ID NO: 3168 - RNA, 20 nt, Artificial Sequence
  Synthetic oligonucleotide: PDCD1-1502
ugggggggaugggggaggag

SEQ ID NO: 3169 - RNA, 20 nt, Artificial Sequence
  Synthetic oligonucleotide: PDCD1-1503
agaugggggggaugggggag

SEQ ID NO: 3170 - RNA, 20 nt, Artificial Sequence
  Synthetic oligonucleotide: PDCD1-2333
ggagaugggggggauggggg

SEQ ID NO: 3171 - RNA, 20 nt, Artificial Sequence
  Synthetic oligonucleotide: PDCD1-1505
gggagaugggggggaugggg

SEQ ID NO: 3172 - RNA, 20 nt, Artificial Sequence
  Synthetic oligonucleotide: PDCD1-2332
cagggagaugggggggaugg

SEQ ID NO: 3173 - RNA, 20 nt, Artificial Sequence
  Synthetic oligonucleotide: PDCD1-2331
ccagggagaugggggggaug

SEQ ID NO: 3174 - RNA, 20 nt, Artificial Sequence
  Synthetic oligonucleotide: PDCD1-2330
cccagggagaugggggggau

SEQ ID NO: 3175 - RNA, 20 nt, Artificial Sequence
  Synthetic oligonucleotide: PDCD1-2329
ccccagggagauggggggga

SEQ ID NO: 3176 - RNA, 20 nt, Artificial Sequence
  Synthetic oligonucleotide: PDCD1-1510
cccccagggagauggggggg

SEQ ID NO: 3177 - RNA, 20 nt, Artificial Sequence
  Synthetic oligonucleotide: PDCD1-2327
ccggcccccagggagauggg

SEQ ID NO: 3178 - RNA, 20 nt, Artificial Sequence
  Synthetic oligonucleotide: PDCD1-2326
cccggcccccagggagaugg

SEQ ID NO: 3179 - RNA, 20 nt, Artificial Sequence
  Synthetic oligonucleotide: PDCD1-2325
gcccggcccccagggagaug

SEQ ID NO: 3180 - RNA, 20 nt, Artificial Sequence
  Synthetic oligonucleotide: PDCD1-2324
ggcccggcccccagggagau

SEQ ID NO: 3181 - RNA, 20 nt, Artificial Sequence
  Synthetic oligonucleotide: PDCD1-2323
aggcccggcccccagggaga

SEQ ID NO: 3182 - RNA, 20 nt, Artificial Sequence
  Synthetic oligonucleotide: PDCD1-1516
gaggcccggcccccagggag

SEQ ID NO: 3183 - RNA, 20 nt, Artificial Sequence
  Synthetic oligonucleotide: PDCD1-2322
gcagggaggcccggccccca

SEQ ID NO: 3184 - RNA, 20 nt, Artificial Sequence
  Synthetic oligonucleotide: PDCD1-2321
ggcagggaggcccggccccc

SEQ ID NO: 3185 - RNA, 20 nt, Artificial Sequence
  Synthetic oligonucleotide: PDCD1-1519
aggcagggaggcccggcccc

SEQ ID NO: 3186 - RNA, 20 nt, Artificial Sequence
  Synthetic oligonucleotide: PDCD1-2318
ccacccaccuuccccaggca

SEQ ID NO: 3187 - RNA, 20 nt, Artificial Sequence
  Synthetic oligonucleotide: PDCD1-2317
gccacccaccuuccccaggc

SEQ ID NO: 3188 - RNA, 20 nt, Artificial Sequence
  Synthetic oligonucleotide: PDCD1-1522
ggccacccaccuuccccagg

SEQ ID NO: 3189 - RNA, 20 nt, Artificial Sequence
  Synthetic oligonucleotide: PDCD1-2313
cccaggaaccugagcccaga

SEQ ID NO: 3190 - RNA, 20 nt, Artificial Sequence
  Synthetic oligonucleotide: PDCD1-2312
gcccaggaaccugagcccag

SEQ ID NO: 3191 - RNA, 20 nt, Artificial Sequence
  Synthetic oligonucleotide: PDCD1-1525
agcccaggaaccugagccca

SEQ ID NO: 3192 - RNA, 20 nt, Artificial Sequence
  Synthetic oligonucleotide: PDCD1-1526
gcagcccaggaaccugagcc

SEQ ID NO: 3193 - RNA, 17 nt, Artificial Sequence
  Synthetic oligonucleotide: PDCD1-2532
cccaaaccuuggccgug

SEQ ID NO: 3194 - RNA, 17 nt, Artificial Sequence
  Synthetic oligonucleotide: PDCD1-2531
ccccaaaccuuggccgu

SEQ ID NO: 3195 - RNA, 17 nt, Artificial Sequence
  Synthetic oligonucleotide: PDCD1-2530
accccaaaccuuggccg

SEQ ID NO: 3196 - RNA, 17 nt, Artificial Sequence
  Synthetic oligonucleotide: PDCD1-1530
aaccccaaaccuuggcc

SEQ ID NO: 3197 - RNA, 17 nt, Artificial Sequence
  Synthetic oligonucleotide: PDCD1-1531
ugacgggucaggcuggc

SEQ ID NO: 3198 - RNA, 17 nt, Artificial Sequence
  Synthetic oligonucleotide: PDCD1-1532
cguguuucuguagaaug

SEQ ID NO: 3199 - RNA, 17 nt, Artificial Sequence
  Synthetic oligonucleotide: PDCD1-1533
ggggcugcguguuucug

SEQ ID NO: 3200 - RNA, 17 nt, Artificial Sequence
  Synthetic oligonucleotide: PDCD1-2522
cccucucagccgguccu

SEQ ID NO: 3201 - RNA, 17 nt, Artificial Sequence
  Synthetic oligonucleotide: PDCD1-1535
ccccucucagccggucc

SEQ ID NO: 3202 - RNA, 17 nt, Artificial Sequence
  Synthetic oligonucleotide: PDCD1-1536
cuuugcuccugggcagg

SEQ ID NO: 3203 - RNA, 17 nt, Artificial Sequence
  Synthetic oligonucleotide: PDCD1-1537
aaguccccucuuugcuc

SEQ ID NO: 3204 - RNA, 17 nt, Artificial Sequence
  Synthetic oligonucleotide: PDCD1-1538
aacuccuggguuccucu

SEQ ID NO: 3205 - RNA, 17 nt, Artificial Sequence
  Synthetic oligonucleotide: PDCD1-1539
uugggcagcucgaacuc

SEQ ID NO: 3206 - RNA, 17 nt, Artificial Sequence
  Synthetic oligonucleotide: PDCD1-1540
guguggcuuugggcagc

SEQ ID NO: 3207 - RNA, 17 nt, Artificial Sequence
  Synthetic oligonucleotide: PDCD1-1541
cccugagcuguguggcu

SEQ ID NO: 3208 - RNA, 17 nt, Artificial Sequence
  Synthetic oligonucleotide: PDCD1-1542
cagcucugccccuuacc

SEQ ID NO: 3209 - RNA, 17 nt, Artificial Sequence
  Synthetic oligonucleotide: PDCD1-2481
cagucccuggcaggucg

SEQ ID NO: 3210 - RNA, 17 nt, Artificial Sequence
  Synthetic oligonucleotide: PDCD1-2480
ucagucccuggcagguc

SEQ ID NO: 3211 - RNA, 17 nt, Artificial Sequence
  Synthetic oligonucleotide: PDCD1-2479
cucagucccuggcaggu

SEQ ID NO: 3212 - RNA, 17 nt, Artificial Sequence
  Synthetic oligonucleotide: PDCD1-1546
ucucagucccuggcagg

SEQ ID NO: 3213 - RNA, 17 nt, Artificial Sequence
  Synthetic oligonucleotide: PDCD1-2497
cggagcgaggggucugg

SEQ ID NO: 3214 - RNA, 17 nt, Artificial Sequence
  Synthetic oligonucleotide: PDCD1-1548
ccggagcgaggggucug

SEQ ID NO: 3215 - RNA, 17 nt, Artificial Sequence
  Synthetic oligonucleotide: PDCD1-2496
ucccggagcgagggguc

SEQ ID NO: 3216 - RNA, 17 nt, Artificial Sequence
  Synthetic oligonucleotide: PDCD1-1550
gucccggagcgaggggu

SEQ ID NO: 3217 - RNA, 17 nt, Artificial Sequence
  Synthetic oligonucleotide: PDCD1-2493
ccaggggucccggagcg

SEQ ID NO: 3218 - RNA, 17 nt, Artificial Sequence
  Synthetic oligonucleotide: PDCD1-1552
cccaggggucccggagc

SEQ ID NO: 3219 - RNA, 17 nt, Artificial Sequence
  Synthetic oligonucleotide: PDCD1-1553
agcccaggggucccgga

SEQ ID NO: 3220 - RNA, 17 nt, Artificial Sequence
  Synthetic oligonucleotide: PDCD1-2492
uggcagcccaggggucc

SEQ ID NO: 3221 - RNA, 17 nt, Artificial Sequence
  Synthetic oligonucleotide: PDCD1-1555
cuggcagcccagggguc

SEQ ID NO: 3222 - RNA, 17 nt, Artificial Sequence
  Synthetic oligonucleotide: PDCD1-2489
ccuggcccuggcagccc

SEQ ID NO: 3223 - RNA, 17 nt, Artificial Sequence
  Synthetic oligonucleotide: PDCD1-1557
gccuggcccuggcagcc

SEQ ID NO: 3224 - RNA, 17 nt, Artificial Sequence
  Synthetic oligonucleotide: PDCD1-1558
ggucggggggugcugag

SEQ ID NO: 3225 - RNA, 17 nt, Artificial Sequence
  Synthetic oligonucleotide: PDCD1-1559
uggcaggucggggggug

SEQ ID NO: 3226 - RNA, 17 nt, Artificial Sequence
  Synthetic oligonucleotide: PDCD1-2481
cagucccuggcaggucg

SEQ ID NO: 3227 - RNA, 17 nt, Artificial Sequence
  Synthetic oligonucleotide: PDCD1-2480
ucagucccuggcagguc

SEQ ID NO: 3228 - RNA, 17 nt, Artificial Sequence
  Synthetic oligonucleotide: PDCD1-2479
cucagucccuggcaggu

SEQ ID NO: 3229 - RNA, 17 nt, Artificial Sequence
  Synthetic oligonucleotide: PDCD1-1563
ccucagucccuggcagg

SEQ ID NO: 3230 - RNA, 17 nt, Artificial Sequence
  Synthetic oligonucleotide: PDCD1-2475
cagagccaggggucugg

SEQ ID NO: 3231 - RNA, 17 nt, Artificial Sequence
  Synthetic oligonucleotide: PDCD1-1565
ccagagccaggggucug

SEQ ID NO: 3232 - RNA, 17 nt, Artificial Sequence
  Synthetic oligonucleotide: PDCD1-2474
ucccagagccagggguc

SEQ ID NO: 3233 - RNA, 17 nt, Artificial Sequence
  Synthetic oligonucleotide: PDCD1-1567
gucccagagccaggggu

SEQ ID NO: 3234 - RNA, 17 nt, Artificial Sequence
  Synthetic oligonucleotide: PDCD1-2471
ucaggugucccagagcc

SEQ ID NO: 3235 - RNA, 17 nt, Artificial Sequence
  Synthetic oligonucleotide: PDCD1-1569
gucaggugucccagagc

SEQ ID NO: 3236 - RNA, 17 nt, Artificial Sequence
  Synthetic oligonucleotide: PDCD1-1570
ucggcggucaggugucc

SEQ ID NO: 3237 - RNA, 17 nt, Artificial Sequence
  Synthetic oligonucleotide: PDCD1-242
gaugguucuuagguagg

SEQ ID NO: 3238 - RNA, 17 nt, Artificial Sequence
  Synthetic oligonucleotide: PDCD1-561
ggaugguucuuagguag

SEQ ID NO: 3239 - RNA, 17 nt, Artificial Sequence
  Synthetic oligonucleotide: PDCD1-560
acaacugggcuggcggc

SEQ ID NO: 3240 - RNA, 17 nt, Artificial Sequence
  Synthetic oligonucleotide: PDCD1-559
ucugggcggugcuacaa

SEQ ID NO: 3241 - RNA, 17 nt, Artificial Sequence
  Synthetic oligonucleotide: PDCD1-558
gcgcccuggccagucgu

SEQ ID NO: 3242 - RNA, 17 nt, Artificial Sequence
  Synthetic oligonucleotide: PDCD1-2693
agaaggcggcacucugg

SEQ ID NO: 3243 - RNA, 17 nt, Artificial Sequence
  Synthetic oligonucleotide: PDCD1-1577
gagaaggcggcacucug

SEQ ID NO: 3244 - RNA, 17 nt, Artificial Sequence
  Synthetic oligonucleotide: PDCD1-1578
ccuccgccugagcagug

SEQ ID NO: 3245 - RNA, 17 nt, Artificial Sequence
  Synthetic oligonucleotide: PDCD1-2689
caccuccgccugagcag

SEQ ID NO: 3246 - RNA, 17 nt, Artificial Sequence
  Synthetic oligonucleotide: PDCD1-1580
ucaccuccgccugagca

SEQ ID NO: 3247 - RNA, 17 nt, Artificial Sequence
  Synthetic oligonucleotide: PDCD1-1581
cuuccgcucaccuccgc

SEQ ID NO: 3248 - RNA, 17 nt, Artificial Sequence
  Synthetic oligonucleotide: PDCD1-2687
cucccuucaaccugacc

SEQ ID NO: 3249 - RNA, 17 nt, Artificial Sequence
  Synthetic oligonucleotide: PDCD1-1583
ccucccuucaaccugac

SEQ ID NO: 3250 - RNA, 17 nt, Artificial Sequence
  Synthetic oligonucleotide: PDCD1-1584
gggggcgggagcaaggg

SEQ ID NO: 3251 - RNA, 17 nt, Artificial Sequence
  Synthetic oligonucleotide: PDCD1-2682
aagagggggcgggagca

SEQ ID NO: 3252 - RNA, 17 nt, Artificial Sequence
  Synthetic oligonucleotide: PDCD1-1586
gaagagggggcgggagc

SEQ ID NO: 3253 - RNA, 17 nt, Artificial Sequence
  Synthetic oligonucleotide: PDCD1-2681
guggaggaagagggggc

SEQ ID NO: 3254 - RNA, 17 nt, Artificial Sequence
  Synthetic oligonucleotide: PDCD1-2680
uguggaggaagaggggg

SEQ ID NO: 3255 - RNA, 17 nt, Artificial Sequence
  Synthetic oligonucleotide: PDCD1-1589
auguggaggaagagggg

SEQ ID NO: 3256 - RNA, 17 nt, Artificial Sequence
  Synthetic oligonucleotide: PDCD1-2677
guggauguggaggaaga

SEQ ID NO: 3257 - RNA, 17 nt, Artificial Sequence
  Synthetic oligonucleotide: PDCD1-2676
cguggauguggaggaag

SEQ ID NO: 3258 - RNA, 17 nt, Artificial Sequence
  Synthetic oligonucleotide: PDCD1-1592
acguggauguggaggaa

SEQ ID NO: 3259 - RNA, 17 nt, Artificial Sequence
  Synthetic oligonucleotide: PDCD1-1593
ccacguggauguggagg

SEQ ID NO: 3260 - RNA, 17 nt, Artificial Sequence
  Synthetic oligonucleotide: PDCD1-2675
cgcccacguggaugugg

SEQ ID NO: 3261 - RNA, 17 nt, Artificial Sequence
  Synthetic oligonucleotide: PDCD1-1595
ucgcccacguggaugug

SEQ ID NO: 3262 - RNA, 17 nt, Artificial Sequence
  Synthetic oligonucleotide: PDCD1-2674
ucucgcccacguggaug

SEQ ID NO: 3263 - RNA, 17 nt, Artificial Sequence
  Synthetic oligonucleotide: PDCD1-1597
cucucgcccacguggau

SEQ ID NO: 3264 - RNA, 17 nt, Artificial Sequence
  Synthetic oligonucleotide: PDCD1-1598
cugucacucucgcccac

SEQ ID NO: 3265 - RNA, 17 nt, Artificial Sequence
  Synthetic oligonucleotide: PDCD1-1599
gguagggcgugggggcc

SEQ ID NO: 3266 - RNA, 17 nt, Artificial Sequence
  Synthetic oligonucleotide: PDCD1-2668
cccacgggguagggcgu

SEQ ID NO: 3267 - RNA, 17 nt, Artificial Sequence
  Synthetic oligonucleotide: PDCD1-2667
ccccacgggguagggcg

SEQ ID NO: 3268 - RNA, 17 nt, Artificial Sequence
  Synthetic oligonucleotide: PDCD1-1602
cccccacgggguagggc

SEQ ID NO: 3269 - RNA, 17 nt, Artificial Sequence
  Synthetic oligonucleotide: PDCD1-1603
gggagacccccacgggg

SEQ ID NO: 3270 - RNA, 17 nt, Artificial Sequence
  Synthetic oligonucleotide: PDCD1-2662
agcuggggagaccccca

SEQ ID NO: 3271 - RNA, 17 nt, Artificial Sequence
  Synthetic oligonucleotide: PDCD1-1605
gagcuggggagaccccc

SEQ ID NO: 3272 - RNA, 17 nt, Artificial Sequence
  Synthetic oligonucleotide: PDCD1-2661
gaaggggcccugagcug

SEQ ID NO: 3273 - RNA, 17 nt, Artificial Sequence
  Synthetic oligonucleotide: PDCD1-2660
ggaaggggcccugagcu

SEQ ID NO: 3274 - RNA, 17 nt, Artificial Sequence
  Synthetic oligonucleotide: PDCD1-2659
aggaaggggcccugagc

SEQ ID NO: 3275 - RNA, 17 nt, Artificial Sequence
  Synthetic oligonucleotide: PDCD1-1609
gaggaaggggcccugag

SEQ ID NO: 3276 - RNA, 17 nt, Artificial Sequence
  Synthetic oligonucleotide: PDCD1-1610
cagaggaggaaggggcc

SEQ ID NO: 3277 - RNA, 17 nt, Artificial Sequence
  Synthetic oligonucleotide: PDCD1-2656
agagacacagaggagga

SEQ ID NO: 3278 - RNA, 17 nt, Artificial Sequence
  Synthetic oligonucleotide: PDCD1-1612
cagagacacagaggagg

SEQ ID NO: 3279 - RNA, 17 nt, Artificial Sequence
  Synthetic oligonucleotide: PDCD1-2655
gagcagagacacagagg

SEQ ID NO: 3280 - RNA, 17 nt, Artificial Sequence
  Synthetic oligonucleotide: PDCD1-1614
ugagcagagacacagag

SEQ ID NO: 3281 - RNA, 17 nt, Artificial Sequence
  Synthetic oligonucleotide: PDCD1-2654
agugagcagagacacag

SEQ ID NO: 3282 - RNA, 17 nt, Artificial Sequence
  Synthetic oligonucleotide: PDCD1-1616
cagugagcagagacaca

SEQ ID NO: 3283 - RNA, 17 nt, Artificial Sequence
  Synthetic oligonucleotide: PDCD1-1617
agcagugagcagagaca

SEQ ID NO: 3284 - RNA, 17 nt, Artificial Sequence
  Synthetic oligonucleotide: PDCD1-1618
gaggccacagcagugag

SEQ ID NO: 3285 - RNA, 17 nt, Artificial Sequence
  Synthetic oligonucleotide: PDCD1-1619
ggaaagaggccacagca

SEQ ID NO: 3286 - RNA, 17 nt, Artificial Sequence
  Synthetic oligonucleotide: PDCD1-1620
cucgggcgggauaugga

SEQ ID NO: 3287 - RNA, 17 nt, Artificial Sequence
  Synthetic oligonucleotide: PDCD1-2652
gcagcucgggcgggaua

SEQ ID NO: 3288 - RNA, 17 nt, Artificial Sequence
  Synthetic oligonucleotide: PDCD1-1622
ggcagcucgggcgggau

SEQ ID NO: 3289 - RNA, 17 nt, Artificial Sequence
  Synthetic oligonucleotide: PDCD1-2650
aggaggggcagcucggg

SEQ ID NO: 3290 - RNA, 17 nt, Artificial Sequence
  Synthetic oligonucleotide: PDCD1-1624
caggaggggcagcucgg

SEQ ID NO: 3291 - RNA, 17 nt, Artificial Sequence
  Synthetic oligonucleotide: PDCD1-1625
gccucaggaggggcagc

SEQ ID NO: 3292 - RNA, 17 nt, Artificial Sequence
  Synthetic oligonucleotide: PDCD1-2645
cacccggcagccucagg

SEQ ID NO: 3293 - RNA, 17 nt, Artificial Sequence
  Synthetic oligonucleotide: PDCD1-1627
ccacccggcagccucag

SEQ ID NO: 3294 - RNA, 17 nt, Artificial Sequence
  Synthetic oligonucleotide: PDCD1-2644
ccccacccggcagccuc

SEQ ID NO: 3295 - RNA, 17 nt, Artificial Sequence
  Synthetic oligonucleotide: PDCD1-1629
cccccacccggcagccu

SEQ ID NO: 3296 - RNA, 17 nt, Artificial Sequence
  Synthetic oligonucleotide: PDCD1-1630
gggggaugggggaggag

SEQ ID NO: 3297 - RNA, 17 nt, Artificial Sequence
  Synthetic oligonucleotide: PDCD1-1631
ugggggggaugggggag

SEQ ID NO: 3298 - RNA, 17 nt, Artificial Sequence
  Synthetic oligonucleotide: PDCD1-2640
gaugggggggauggggg

SEQ ID NO: 3299 - RNA, 17 nt, Artificial Sequence
  Synthetic oligonucleotide: PDCD1-1633
agaugggggggaugggg

SEQ ID NO: 3300 - RNA, 17 nt, Artificial Sequence
  Synthetic oligonucleotide: PDCD1-2639
ggagaugggggggaugg

SEQ ID NO: 3301 - RNA, 17 nt, Artificial Sequence
  Synthetic oligonucleotide: PDCD1-2638
gggagaugggggggaug

SEQ ID NO: 3302 - RNA, 17 nt, Artificial Sequence
  Synthetic oligonucleotide: PDCD1-2637
agggagaugggggggau

SEQ ID NO: 3303 - RNA, 17 nt, Artificial Sequence
  Synthetic oligonucleotide: PDCD1-2636
cagggagauggggggga

SEQ ID NO: 3304 - RNA, 17 nt, Artificial Sequence
  Synthetic oligonucleotide: PDCD1-1638
ccagggagauggggggg

SEQ ID NO: 3305 - RNA, 17 nt, Artificial Sequence
  Synthetic oligonucleotide: PDCD1-2634
gcccccagggagauggg

SEQ ID NO: 3306 - RNA, 17 nt, Artificial Sequence
  Synthetic oligonucleotide: PDCD1-2633
ggcccccagggagaugg

SEQ ID NO: 3307 - RNA, 17 nt, Artificial Sequence
  Synthetic oligonucleotide: PDCD1-2632
cggcccccagggagaug

SEQ ID NO: 3308 - RNA, 17 nt, Artificial Sequence
  Synthetic oligonucleotide: PDCD1-2631
ccggcccccagggagau

SEQ ID NO: 3309 - RNA, 17 nt, Artificial Sequence
  Synthetic oligonucleotide: PDCD1-2630
cccggcccccagggaga

SEQ ID NO: 3310 - RNA, 17 nt, Artificial Sequence
  Synthetic oligonucleotide: PDCD1-1644
gcccggcccccagggag

SEQ ID NO: 3311 - RNA, 17 nt, Artificial Sequence
  Synthetic oligonucleotide: PDCD1-2629
gggaggcccggccccca

SEQ ID NO: 3312 - RNA, 17 nt, Artificial Sequence
  Synthetic oligonucleotide: PDCD1-2628
agggaggcccggccccc

SEQ ID NO: 3313 - RNA, 17 nt, Artificial Sequence
  Synthetic oligonucleotide: PDCD1-1647
cagggaggcccggcccc

SEQ ID NO: 3314 - RNA, 17 nt, Artificial Sequence
  Synthetic oligonucleotide: PDCD1-2625
cccaccuuccccaggca

SEQ ID NO: 3315 - RNA, 17 nt, Artificial Sequence
  Synthetic oligonucleotide: PDCD1-2624
acccaccuuccccaggc

SEQ ID NO: 3316 - RNA, 17 nt, Artificial Sequence
  Synthetic oligonucleotide: PDCD1-1650
cacccaccuuccccagg

SEQ ID NO: 3317 - RNA, 17 nt, Artificial Sequence
  Synthetic oligonucleotide: PDCD1-2620
aggaaccugagcccaga

SEQ ID NO: 3318 - RNA, 17 nt, Artificial Sequence
  Synthetic oligonucleotide: PDCD1-2619
caggaaccugagcccag

SEQ ID NO: 3319 - RNA, 17 nt, Artificial Sequence
  Synthetic oligonucleotide: PDCD1-1653
ccaggaaccugagccca

SEQ ID NO: 3320 - RNA, 17 nt, Artificial Sequence
  Synthetic oligonucleotide: PDCD1-1654
gcccaggaaccugagcc

SEQ ID NO: 3321 - RNA, 20 nt, Artificial Sequence
  Synthetic oligonucleotide: PDCD1-1655
ccccgguacccagcagggcc

SEQ ID NO: 3322 - RNA, 20 nt, Artificial Sequence
  Synthetic oligonucleotide: PDCD1-1656
ccgguacccagcagggccca

SEQ ID NO: 3323 - RNA, 20 nt, Artificial Sequence
  Synthetic oligonucleotide: PDCD1-2699
cgguacccagcagggcccag

SEQ ID NO: 3324 - RNA, 20 nt, Artificial Sequence
  Synthetic oligonucleotide: PDCD1-1658
gggacugucuuaggcuuggc

SEQ ID NO: 3325 - RNA, 20 nt, Artificial Sequence
  Synthetic oligonucleotide: PDCD1-1659
cugucuuaggcuuggccugg

SEQ ID NO: 3326 - RNA, 20 nt, Artificial Sequence
  Synthetic oligonucleotide: PDCD1-1660
cauccccaggugcaggcugg

SEQ ID NO: 3327 - RNA, 20 nt, Artificial Sequence
  Synthetic oligonucleotide: PDCD1-1661
aggugcaggcuggcugggca

SEQ ID NO: 3328 - RNA, 20 nt, Artificial Sequence
  Synthetic oligonucleotide: PDCD1-1662
gugcaggcuggcugggcaca

SEQ ID NO: 3329 - RNA, 20 nt, Artificial Sequence
  Synthetic oligonucleotide: PDCD1-1663
ggcugggcacagagggccag

SEQ ID NO: 3330 - RNA, 20 nt, Artificial Sequence
  Synthetic oligonucleotide: PDCD1-1664
cacagagggccagccgggca

SEQ ID NO: 3331 - RNA, 20 nt, Artificial Sequence
  Synthetic oligonucleotide: PDCD1-1665
cagagggccagccgggcaca

SEQ ID NO: 3332 - RNA, 20 nt, Artificial Sequence
  Synthetic oligonucleotide: PDCD1-1666
ccagccgggcacagaggguc

SEQ ID NO: 3333 - RNA, 20 nt, Artificial Sequence
  Synthetic oligonucleotide: PDCD1-2718
cagccgggcacagagggucc

SEQ ID NO: 3334 - RNA, 20 nt, Artificial Sequence
  Synthetic oligonucleotide: PDCD1-1668
cgggcacagaggguccagga

SEQ ID NO: 3335 - RNA, 20 nt, Artificial Sequence
  Synthetic oligonucleotide: PDCD1-1669
ggcuguggucacaguguaca

SEQ ID NO: 3336 - RNA, 20 nt, Artificial Sequence
  Synthetic oligonucleotide: PDCD1-1670
cuguggucacaguguacaca

SEQ ID NO: 3337 - RNA, 20 nt, Artificial Sequence
  Synthetic oligonucleotide: PDCD1-1671
cacaguguacacagagggcc

SEQ ID NO: 3338 - RNA, 20 nt, Artificial Sequence
  Synthetic oligonucleotide: PDCD1-1672
uacacagagggcccaggguc

SEQ ID NO: 3339 - RNA, 20 nt, Artificial Sequence
  Synthetic oligonucleotide: PDCD1-1673
gcccagggucacgggcagcc

SEQ ID NO: 3340 - RNA, 20 nt, Artificial Sequence
  Synthetic oligonucleotide: PDCD1-2728
cccagggucacgggcagccc

SEQ ID NO: 3341 - RNA, 20 nt, Artificial Sequence
  Synthetic oligonucleotide: PDCD1-1675
agggucacgggcagcccagg

SEQ ID NO: 3342 - RNA, 20 nt, Artificial Sequence
  Synthetic oligonucleotide: PDCD1-1676
aggcucccucucuccucgau

SEQ ID NO: 3343 - RNA, 20 nt, Artificial Sequence
  Synthetic oligonucleotide: PDCD1-2730
ggcucccucucuccucgauc

SEQ ID NO: 3344 - RNA, 20 nt, Artificial Sequence
  Synthetic oligonucleotide: PDCD1-2731
gcucccucucuccucgaucc

SEQ ID NO: 3345 - RNA, 20 nt, Artificial Sequence
  Synthetic oligonucleotide: PDCD1-1679
ucccucucuccucgauccgg

SEQ ID NO: 3346 - RNA, 20 nt, Artificial Sequence
  Synthetic oligonucleotide: PDCD1-1680
ucucuccucgauccgggaga

SEQ ID NO: 3347 - RNA, 20 nt, Artificial Sequence
  Synthetic oligonucleotide: PDCD1-1681
gugaggccaaggccuccccc

SEQ ID NO: 3348 - RNA, 20 nt, Artificial Sequence
  Synthetic oligonucleotide: PDCD1-1682
aggccucccccacggauggu

SEQ ID NO: 3349 - RNA, 20 nt, Artificial Sequence
  Synthetic oligonucleotide: PDCD1-1683
ucccccacggauggucugaa

SEQ ID NO: 3350 - RNA, 20 nt, Artificial Sequence
  Synthetic oligonucleotide: PDCD1-1684
acggauggucugaacagggc

SEQ ID NO: 3351 - RNA, 20 nt, Artificial Sequence
  Synthetic oligonucleotide: PDCD1-2738
cggauggucugaacagggcu

SEQ ID NO: 3352 - RNA, 20 nt, Artificial Sequence
  Synthetic oligonucleotide: PDCD1-2739
ggauggucugaacagggcuc

SEQ ID NO: 3353 - RNA, 20 nt, Artificial Sequence
  Synthetic oligonucleotide: PDCD1-2740
gauggucugaacagggcucg

SEQ ID NO: 3354 - RNA, 20 nt, Artificial Sequence
  Synthetic oligonucleotide: PDCD1-1688
uggucugaacagggcucggg

SEQ ID NO: 3355 - RNA, 20 nt, Artificial Sequence
  Synthetic oligonucleotide: PDCD1-1689
aacagggcucggggagagcc

SEQ ID NO: 3356 - RNA, 20 nt, Artificial Sequence
  Synthetic oligonucleotide: PDCD1-2741
acagggcucggggagagccc

SEQ ID NO: 3357 - RNA, 20 nt, Artificial Sequence
  Synthetic oligonucleotide: PDCD1-1691
cucggggagagcccuggaau

SEQ ID NO: 3358 - RNA, 20 nt, Artificial Sequence
  Synthetic oligonucleotide: PDCD1-1692
ggagagcccuggaaucuggg

SEQ ID NO: 3359 - RNA, 20 nt, Artificial Sequence
  Synthetic oligonucleotide: PDCD1-1693
gaaucugggcagagacccag

SEQ ID NO: 3360 - RNA, 20 nt, Artificial Sequence
  Synthetic oligonucleotide: PDCD1-1694
aggcgggcacaauccccacc

SEQ ID NO: 3361 - RNA, 20 nt, Artificial Sequence
  Synthetic oligonucleotide: PDCD1-2747
ggcgggcacaauccccaccc

SEQ ID NO: 3362 - RNA, 20 nt, Artificial Sequence
  Synthetic oligonucleotide: PDCD1-1696
cgggcacaauccccacccag

SEQ ID NO: 3363 - RNA, 20 nt, Artificial Sequence
  Synthetic oligonucleotide: PDCD1-2748
gggcacaauccccacccagg

SEQ ID NO: 3364 - RNA, 20 nt, Artificial Sequence
  Synthetic oligonucleotide: PDCD1-1698
auccccacccaggagggauc

SEQ ID NO: 3365 - RNA, 20 nt, Artificial Sequence
  Synthetic oligonucleotide: PDCD1-2750
uccccacccaggagggaucc

SEQ ID NO: 3366 - RNA, 20 nt, Artificial Sequence
  Synthetic oligonucleotide: PDCD1-1700
cccaggagggauccuggaga

SEQ ID NO: 3367 - RNA, 20 nt, Artificial Sequence
  Synthetic oligonucleotide: PDCD1-1701
aggagggauccuggagacag

SEQ ID NO: 3368 - RNA, 20 nt, Artificial Sequence
  Synthetic oligonucleotide: PDCD1-1702
gacagaagaacuguccucac

SEQ ID NO: 3369 - RNA, 20 nt, Artificial Sequence
  Synthetic oligonucleotide: PDCD1-1703
cucacucgaacagguacacu

SEQ ID NO: 3370 - RNA, 20 nt, Artificial Sequence
  Synthetic oligonucleotide: PDCD1-1704
acagguacacuuuggauaua

SEQ ID NO: 3371 - RNA, 20 nt, Artificial Sequence
  Synthetic oligonucleotide: PDCD1-1705
agguacacuuuggauauaau

SEQ ID NO: 3372 - RNA, 20 nt, Artificial Sequence
  Synthetic oligonucleotide: PDCD1-1706
aaagccaagguuagucccac

SEQ ID NO: 3373 - RNA, 20 nt, Artificial Sequence
  Synthetic oligonucleotide: PDCD1-2754
aagccaagguuagucccaca

SEQ ID NO: 3374 - RNA, 20 nt, Artificial Sequence
  Synthetic oligonucleotide: PDCD1-1708
cauggggcucaucccauccu

SEQ ID NO: 3375 - RNA, 20 nt, Artificial Sequence
  Synthetic oligonucleotide: PDCD1-2757
auggggcucaucccauccuu

SEQ ID NO: 3376 - RNA, 20 nt, Artificial Sequence
  Synthetic oligonucleotide: PDCD1-1710
caucccauccuuaggaaaac

SEQ ID NO: 3377 - RNA, 20 nt, Artificial Sequence
  Synthetic oligonucleotide: PDCD1-1711
ccauccuuaggaaaacucga

SEQ ID NO: 3378 - RNA, 20 nt, Artificial Sequence
  Synthetic oligonucleotide: PDCD1-1712
auccuuaggaaaacucgagu

SEQ ID NO: 3379 - RNA, 20 nt, Artificial Sequence
  Synthetic oligonucleotide: PDCD1-1713
ggaaaacucgagugaggacc

SEQ ID NO: 3380 - RNA, 20 nt, Artificial Sequence
  Synthetic oligonucleotide: PDCD1-1714
cgagugaggaccaaggaugc

SEQ ID NO: 3381 - RNA, 20 nt, Artificial Sequence
  Synthetic oligonucleotide: PDCD1-1715
ucaaccccacucccauucug

SEQ ID NO: 3382 - RNA, 20 nt, Artificial Sequence
  Synthetic oligonucleotide: PDCD1-2763
caaccccacucccauucugu

SEQ ID NO: 3383 - RNA, 20 nt, Artificial Sequence
  Synthetic oligonucleotide: PDCD1-1717
cucccauucugucggagccu

SEQ ID NO: 3384 - RNA, 20 nt, Artificial Sequence
  Synthetic oligonucleotide: PDCD1-2764
ucccauucugucggagccuc

SEQ ID NO: 3385 - RNA, 20 nt, Artificial Sequence
  Synthetic oligonucleotide: PDCD1-2765
cccauucugucggagccucu

SEQ ID NO: 3386 - RNA, 20 nt, Artificial Sequence
  Synthetic oligonucleotide: PDCD1-1720
gcccacagccucugccccug

SEQ ID NO: 3387 - RNA, 20 nt, Artificial Sequence
  Synthetic oligonucleotide: PDCD1-2767
cccacagccucugccccugc

SEQ ID NO: 3388 - RNA, 20 nt, Artificial Sequence
  Synthetic oligonucleotide: PDCD1-2768
ccacagccucugccccugcu

SEQ ID NO: 3389 - RNA, 20 nt, Artificial Sequence
  Synthetic oligonucleotide: PDCD1-1723
ucccggcccaucccccuucg

SEQ ID NO: 3390 - RNA, 20 nt, Artificial Sequence
  Synthetic oligonucleotide: PDCD1-2774
cccggcccaucccccuucgc

SEQ ID NO: 3391 - RNA, 20 nt, Artificial Sequence
  Synthetic oligonucleotide: PDCD1-1725
cuggggcacaggugacccua

SEQ ID NO: 3392 - RNA, 20 nt, Artificial Sequence
  Synthetic oligonucleotide: PDCD1-1726
ccccucaaagcuuccaccuu

SEQ ID NO: 3393 - RNA, 20 nt, Artificial Sequence
  Synthetic oligonucleotide: PDCD1-1727
gugaugccugcaacagccug

SEQ ID NO: 3394 - RNA, 20 nt, Artificial Sequence
  Synthetic oligonucleotide: PDCD1-2783
ugaugccugcaacagccuga

SEQ ID NO: 3395 - RNA, 20 nt, Artificial Sequence
  Synthetic oligonucleotide: PDCD1-2784
gaugccugcaacagccugac

SEQ ID NO: 3396 - RNA, 20 nt, Artificial Sequence
  Synthetic oligonucleotide: PDCD1-2785
augccugcaacagccugacg

SEQ ID NO: 3397 - RNA, 20 nt, Artificial Sequence
  Synthetic oligonucleotide: PDCD1-2786
ugccugcaacagccugacgg

SEQ ID NO: 3398 - RNA, 20 nt, Artificial Sequence
  Synthetic oligonucleotide: PDCD1-1732
gcaacagccugacggggggg

SEQ ID NO: 3399 - RNA, 20 nt, Artificial Sequence
  Synthetic oligonucleotide: PDCD1-2789
caacagccugacgggggggc

SEQ ID NO: 3400 - RNA, 20 nt, Artificial Sequence
  Synthetic oligonucleotide: PDCD1-1734
cgggggggcuggggcggugg

SEQ ID NO: 3401 - RNA, 20 nt, Artificial Sequence
  Synthetic oligonucleotide: PDCD1-2794
gggggggcuggggcgguggc

SEQ ID NO: 3402 - RNA, 20 nt, Artificial Sequence
  Synthetic oligonucleotide: PDCD1-1736
ggcgguggcaggggcuggcu

SEQ ID NO: 3403 - RNA, 20 nt, Artificial Sequence
  Synthetic oligonucleotide: PDCD1-1737
uccagccuugaccuucuucc

SEQ ID NO: 3404 - RNA, 20 nt, Artificial Sequence
  Synthetic oligonucleotide: PDCD1-2799
ccagccuugaccuucuuccc

SEQ ID NO: 3405 - RNA, 20 nt, Artificial Sequence
  Synthetic oligonucleotide: PDCD1-1739
gcccuccagcccacucgugc

SEQ ID NO: 3406 - RNA, 20 nt, Artificial Sequence
  Synthetic oligonucleotide: PDCD1-1740
uccagcccacucgugccagg

SEQ ID NO: 3407 - RNA, 20 nt, Artificial Sequence
  Synthetic oligonucleotide: PDCD1-2804
ccagcccacucgugccaggg

SEQ ID NO: 3408 - RNA, 20 nt, Artificial Sequence
  Synthetic oligonucleotide: PDCD1-1742
cgugccaggguggggugguu

SEQ ID NO: 3409 - RNA, 20 nt, Artificial Sequence
  Synthetic oligonucleotide: PDCD1-2808
gugccaggguggggugguuc

SEQ ID NO: 3410 - RNA, 20 nt, Artificial Sequence
  Synthetic oligonucleotide: PDCD1-2809
ugccaggguggggugguuca

SEQ ID NO: 3411 - RNA, 20 nt, Artificial Sequence
  Synthetic oligonucleotide: PDCD1-1745
ugguucaggggguccagugc

SEQ ID NO: 3412 - RNA, 20 nt, Artificial Sequence
  Synthetic oligonucleotide: PDCD1-1746
uggcuggcggcccggcguuu

SEQ ID NO: 3413 - RNA, 20 nt, Artificial Sequence
  Synthetic oligonucleotide: PDCD1-1747
uuaucuccuuguauucugug

SEQ ID NO: 3414 - RNA, 20 nt, Artificial Sequence
  Synthetic oligonucleotide: PDCD1-1748
gugcugagcauuuuauuaca

SEQ ID NO: 3415 - RNA, 20 nt, Artificial Sequence
  Synthetic oligonucleotide: PDCD1-1749
ugagcauuuuauuacagcga

SEQ ID NO: 3416 - RNA, 20 nt, Artificial Sequence
  Synthetic oligonucleotide: PDCD1-2819
gagcauuuuauuacagcgaa

SEQ ID NO: 3417 - RNA, 20 nt, Artificial Sequence
  Synthetic oligonucleotide: PDCD1-1751
uuauuacagcgaauggaaaa

SEQ ID NO: 3418 - RNA, 20 nt, Artificial Sequence
  Synthetic oligonucleotide: PDCD1-2820
uauuacagcgaauggaaaac

SEQ ID NO: 3419 - RNA, 20 nt, Artificial Sequence
  Synthetic oligonucleotide: PDCD1-1753
uuacagcgaauggaaaacag

SEQ ID NO: 3420 - RNA, 20 nt, Artificial Sequence
  Synthetic oligonucleotide: PDCD1-1754
gcgaauggaaaacaggagaa

SEQ ID NO: 3421 - RNA, 17 nt, Artificial Sequence
  Synthetic oligonucleotide: PDCD1-1755
cgguacccagcagggcc

SEQ ID NO: 3422 - RNA, 17 nt, Artificial Sequence
  Synthetic oligonucleotide: PDCD1-1756
guacccagcagggccca

SEQ ID NO: 3423 - RNA, 17 nt, Artificial Sequence
  Synthetic oligonucleotide: PDCD1-2823
uacccagcagggcccag

SEQ ID NO: 3424 - RNA, 17 nt, Artificial Sequence
  Synthetic oligonucleotide: PDCD1-1758
acugucuuaggcuuggc

SEQ ID NO: 3425 - RNA, 17 nt, Artificial Sequence
  Synthetic oligonucleotide: PDCD1-1759
ucuuaggcuuggccugg

SEQ ID NO: 3426 - RNA, 17 nt, Artificial Sequence
  Synthetic oligonucleotide: PDCD1-1760
ccccaggugcaggcugg

SEQ ID NO: 3427 - RNA, 17 nt, Artificial Sequence
  Synthetic oligonucleotide: PDCD1-1761
ugcaggcuggcugggca

SEQ ID NO: 3428 - RNA, 17 nt, Artificial Sequence
  Synthetic oligonucleotide: PDCD1-1762
caggcuggcugggcaca

SEQ ID NO: 3429 - RNA, 17 nt, Artificial Sequence
  Synthetic oligonucleotide: PDCD1-1763
ugggcacagagggccag

SEQ ID NO: 3430 - RNA, 17 nt, Artificial Sequence
  Synthetic oligonucleotide: PDCD1-1764
agagggccagccgggca

SEQ ID NO: 3431 - RNA, 17 nt, Artificial Sequence
  Synthetic oligonucleotide: PDCD1-1765
agggccagccgggcaca

SEQ ID NO: 3432 - RNA, 17 nt, Artificial Sequence
  Synthetic oligonucleotide: PDCD1-1766
gccgggcacagaggguc

SEQ ID NO: 3433 - RNA, 17 nt, Artificial Sequence
  Synthetic oligonucleotide: PDCD1-2842
ccgggcacagagggucc

SEQ ID NO: 3434 - RNA, 17 nt, Artificial Sequence
  Synthetic oligonucleotide: PDCD1-1768
gcacagaggguccagga

SEQ ID NO: 3435 - RNA, 17 nt, Artificial Sequence
  Synthetic oligonucleotide: PDCD1-1769
uguggucacaguguaca

SEQ ID NO: 3436 - RNA, 17 nt, Artificial Sequence
  Synthetic oligonucleotide: PDCD1-1770
uggucacaguguacaca

SEQ ID NO: 3437 - RNA, 17 nt, Artificial Sequence
  Synthetic oligonucleotide: PDCD1-1771
aguguacacagagggcc

SEQ ID NO: 3438 - RNA, 17 nt, Artificial Sequence
  Synthetic oligonucleotide: PDCD1-1772
acagagggcccaggguc

SEQ ID NO: 3439 - RNA, 17 nt, Artificial Sequence
  Synthetic oligonucleotide: PDCD1-1773
cagggucacgggcagcc

SEQ ID NO: 3440 - RNA, 17 nt, Artificial Sequence
  Synthetic oligonucleotide: PDCD1-2852
agggucacgggcagccc

SEQ ID NO: 3441 - RNA, 17 nt, Artificial Sequence
  Synthetic oligonucleotide: PDCD1-1775
gucacgggcagcccagg

SEQ ID NO: 3442 - RNA, 17 nt, Artificial Sequence
  Synthetic oligonucleotide: PDCD1-1776
cucccucucuccucgau

SEQ ID NO: 3443 - RNA, 17 nt, Artificial Sequence
  Synthetic oligonucleotide: PDCD1-2854
ucccucucuccucgauc

SEQ ID NO: 3444 - RNA, 17 nt, Artificial Sequence
  Synthetic oligonucleotide: PDCD1-2855
cccucucuccucgaucc

SEQ ID NO: 3445 - RNA, 17 nt, Artificial Sequence
  Synthetic oligonucleotide: PDCD1-1779
cucucuccucgauccgg

SEQ ID NO: 3446 - RNA, 17 nt, Artificial Sequence
  Synthetic oligonucleotide: PDCD1-1780
cuccucgauccgggaga

SEQ ID NO: 3447 - RNA, 17 nt, Artificial Sequence
  Synthetic oligonucleotide: PDCD1-1781
aggccaaggccuccccc

SEQ ID NO: 3448 - RNA, 17 nt, Artificial Sequence
  Synthetic oligonucleotide: PDCD1-1782
ccucccccacggauggu

SEQ ID NO: 3449 - RNA, 17 nt, Artificial Sequence
  Synthetic oligonucleotide: PDCD1-1783
cccacggauggucugaa

SEQ ID NO: 3450 - RNA, 17 nt, Artificial Sequence
  Synthetic oligonucleotide: PDCD1-1784
gauggucugaacagggc

SEQ ID NO: 3451 - RNA, 17 nt, Artificial Sequence
  Synthetic oligonucleotide: PDCD1-2862
auggucugaacagggcu

SEQ ID NO: 3452 - RNA, 17 nt, Artificial Sequence
  Synthetic oligonucleotide: PDCD1-2863
uggucugaacagggcuc

SEQ ID NO: 3453 - RNA, 17 nt, Artificial Sequence
  Synthetic oligonucleotide: PDCD1-2864
ggucugaacagggcucg

SEQ ID NO: 3454 - RNA, 17 nt, Artificial Sequence
  Synthetic oligonucleotide: PDCD1-1788
ucugaacagggcucggg

SEQ ID NO: 3455 - RNA, 17 nt, Artificial Sequence
  Synthetic oligonucleotide: PDCD1-1789
agggcucggggagagcc

SEQ ID NO: 3456 - RNA, 17 nt, Artificial Sequence
  Synthetic oligonucleotide: PDCD1-2865
gggcucggggagagccc

SEQ ID NO: 3457 - RNA, 17 nt, Artificial Sequence
  Synthetic oligonucleotide: PDCD1-1791
ggggagagcccuggaau

SEQ ID NO: 3458 - RNA, 17 nt, Artificial Sequence
  Synthetic oligonucleotide: PDCD1-1792
gagcccuggaaucuggg

SEQ ID NO: 3459 - RNA, 17 nt, Artificial Sequence
  Synthetic oligonucleotide: PDCD1-1793
ucugggcagagacccag

SEQ ID NO: 3460 - RNA, 17 nt, Artificial Sequence
  Synthetic oligonucleotide: PDCD1-1794
cgggcacaauccccacc

SEQ ID NO: 3461 - RNA, 17 nt, Artificial Sequence
  Synthetic oligonucleotide: PDCD1-2871
gggcacaauccccaccc

SEQ ID NO: 3462 - RNA, 17 nt, Artificial Sequence
  Synthetic oligonucleotide: PDCD1-1796
gcacaauccccacccag

SEQ ID NO: 3463 - RNA, 17 nt, Artificial Sequence
  Synthetic oligonucleotide: PDCD1-2872
cacaauccccacccagg

SEQ ID NO: 3464 - RNA, 17 nt, Artificial Sequence
  Synthetic oligonucleotide: PDCD1-1798
cccacccaggagggauc

SEQ ID NO: 3465 - RNA, 17 nt, Artificial Sequence
  Synthetic oligonucleotide: PDCD1-2874
ccacccaggagggaucc

SEQ ID NO: 3466 - RNA, 17 nt, Artificial Sequence
  Synthetic oligonucleotide: PDCD1-1800
aggagggauccuggaga

SEQ ID NO: 3467 - RNA, 17 nt, Artificial Sequence
  Synthetic oligonucleotide: PDCD1-1801
agggauccuggagacag

SEQ ID NO: 3468 - RNA, 17 nt, Artificial Sequence
  Synthetic oligonucleotide: PDCD1-1802
agaagaacuguccucac

SEQ ID NO: 3469 - RNA, 17 nt, Artificial Sequence
  Synthetic oligonucleotide: PDCD1-1803
acucgaacagguacacu

SEQ ID NO: 3470 - RNA, 17 nt, Artificial Sequence
  Synthetic oligonucleotide: PDCD1-1804
gguacacuuuggauaua

SEQ ID NO: 3471 - RNA, 17 nt, Artificial Sequence
  Synthetic oligonucleotide: PDCD1-1805
uacacuuuggauauaau

SEQ ID NO: 3472 - RNA, 17 nt, Artificial Sequence
  Synthetic oligonucleotide: PDCD1-1806
gccaagguuagucccac

SEQ ID NO: 3473 - RNA, 17 nt, Artificial Sequence
  Synthetic oligonucleotide: PDCD1-2878
ccaagguuagucccaca

SEQ ID NO: 3474 - RNA, 17 nt, Artificial Sequence
  Synthetic oligonucleotide: PDCD1-1808
ggggcucaucccauccu

SEQ ID NO: 3475 - RNA, 17 nt, Artificial Sequence
  Synthetic oligonucleotide: PDCD1-2881
gggcucaucccauccuu

SEQ ID NO: 3476 - RNA, 17 nt, Artificial Sequence
  Synthetic oligonucleotide: PDCD1-1810
cccauccuuaggaaaac

SEQ ID NO: 3477 - RNA, 17 nt, Artificial Sequence
  Synthetic oligonucleotide: PDCD1-1811
uccuuaggaaaacucga

SEQ ID NO: 3478 - RNA, 17 nt, Artificial Sequence
  Synthetic oligonucleotide: PDCD1-1812
cuuaggaaaacucgagu

SEQ ID NO: 3479 - RNA, 17 nt, Artificial Sequence
  Synthetic oligonucleotide: PDCD1-1813
aaacucgagugaggacc

SEQ ID NO: 3480 - RNA, 17 nt, Artificial Sequence
  Synthetic oligonucleotide: PDCD1-1814
gugaggaccaaggaugc

SEQ ID NO: 3481 - RNA, 17 nt, Artificial Sequence
  Synthetic oligonucleotide: PDCD1-1815
accccacucccauucug

SEQ ID NO: 3482 - RNA, 17 nt, Artificial Sequence
  Synthetic oligonucleotide: PDCD1-2887
ccccacucccauucugu

SEQ ID NO: 3483 - RNA, 17 nt, Artificial Sequence
  Synthetic oligonucleotide: PDCD1-1817
ccauucugucggagccu

SEQ ID NO: 3484 - RNA, 17 nt, Artificial Sequence
  Synthetic oligonucleotide: PDCD1-2888
cauucugucggagccuc

SEQ ID NO: 3485 - RNA, 17 nt, Artificial Sequence
  Synthetic oligonucleotide: PDCD1-2889
auucugucggagccucu

SEQ ID NO: 3486 - RNA, 17 nt, Artificial Sequence
  Synthetic oligonucleotide: PDCD1-1820
cacagccucugccccug

SEQ ID NO: 3487 - RNA, 17 nt, Artificial Sequence
  Synthetic oligonucleotide: PDCD1-2891
acagccucugccccugc

SEQ ID NO: 3488 - RNA, 17 nt, Artificial Sequence
  Synthetic oligonucleotide: PDCD1-2892
cagccucugccccugcu

SEQ ID NO: 3489 - RNA, 17 nt, Artificial Sequence
  Synthetic oligonucleotide: PDCD1-1823
cggcccaucccccuucg

SEQ ID NO: 3490 - RNA, 17 nt, Artificial Sequence
  Synthetic oligonucleotide: PDCD1-2898
ggcccaucccccuucgc

SEQ ID NO: 3491 - RNA, 17 nt, Artificial Sequence
  Synthetic oligonucleotide: PDCD1-1825
gggcacaggugacccua

SEQ ID NO: 3492 - RNA, 17 nt, Artificial Sequence
  Synthetic oligonucleotide: PDCD1-1826
cucaaagcuuccaccuu

SEQ ID NO: 3493 - RNA, 17 nt, Artificial Sequence
  Synthetic oligonucleotide: PDCD1-1827
augccugcaacagccug

SEQ ID NO: 3494 - RNA, 17 nt, Artificial Sequence
  Synthetic oligonucleotide: PDCD1-2907
ugccugcaacagccuga

SEQ ID NO: 3495 - RNA, 17 nt, Artificial Sequence
  Synthetic oligonucleotide: PDCD1-2908
gccugcaacagccugac

SEQ ID NO: 3496 - RNA, 17 nt, Artificial Sequence
  Synthetic oligonucleotide: PDCD1-2909
ccugcaacagccugacg

SEQ ID NO: 3497 - RNA, 17 nt, Artificial Sequence
  Synthetic oligonucleotide: PDCD1-2910
cugcaacagccugacgg

SEQ ID NO: 3498 - RNA, 17 nt, Artificial Sequence
  Synthetic oligonucleotide: PDCD1-1832
acagccugacggggggg

SEQ ID NO: 3499 - RNA, 17 nt, Artificial Sequence
  Synthetic oligonucleotide: PDCD1-2913
cagccugacgggggggc

SEQ ID NO: 3500 - RNA, 17 nt, Artificial Sequence
  Synthetic oligonucleotide: PDCD1-1834
gggggcuggggcggugg

SEQ ID NO: 3501 - RNA, 17 nt, Artificial Sequence
  Synthetic oligonucleotide: PDCD1-2918
ggggcuggggcgguggc

SEQ ID NO: 3502 - RNA, 17 nt, Artificial Sequence
  Synthetic oligonucleotide: PDCD1-1836
gguggcaggggcuggcu

SEQ ID NO: 3503 - RNA, 17 nt, Artificial Sequence
  Synthetic oligonucleotide: PDCD1-1837
agccuugaccuucuucc

SEQ ID NO: 3504 - RNA, 17 nt, Artificial Sequence
  Synthetic oligonucleotide: PDCD1-2923
gccuugaccuucuuccc

SEQ ID NO: 3505 - RNA, 17 nt, Artificial Sequence
  Synthetic oligonucleotide: PDCD1-1839
cuccagcccacucgugc

SEQ ID NO: 3506 - RNA, 17 nt, Artificial Sequence
  Synthetic oligonucleotide: PDCD1-1840
agcccacucgugccagg

SEQ ID NO: 3507 - RNA, 17 nt, Artificial Sequence
  Synthetic oligonucleotide: PDCD1-2928
gcccacucgugccaggg

SEQ ID NO: 3508 - RNA, 17 nt, Artificial Sequence
  Synthetic oligonucleotide: PDCD1-1842
gccaggguggggugguu

SEQ ID NO: 3509 - RNA, 17 nt, Artificial Sequence
  Synthetic oligonucleotide: PDCD1-2932
ccaggguggggugguuc

SEQ ID NO: 3510 - RNA, 17 nt, Artificial Sequence
  Synthetic oligonucleotide: PDCD1-2933
caggguggggugguuca

SEQ ID NO: 3511 - RNA, 17 nt, Artificial Sequence
  Synthetic oligonucleotide: PDCD1-1845
uucaggggguccagugc

SEQ ID NO: 3512 - RNA, 17 nt, Artificial Sequence
  Synthetic oligonucleotide: PDCD1-1846
cuggcggcccggcguuu

SEQ ID NO: 3513 - RNA, 17 nt, Artificial Sequence
  Synthetic oligonucleotide: PDCD1-1847
ucuccuuguauucugug

SEQ ID NO: 3514 - RNA, 17 nt, Artificial Sequence
  Synthetic oligonucleotide: PDCD1-1848
cugagcauuuuauuaca

SEQ ID NO: 3515 - RNA, 17 nt, Artificial Sequence
  Synthetic oligonucleotide: PDCD1-1849
gcauuuuauuacagcga

SEQ ID NO: 3516 - RNA, 17 nt, Artificial Sequence
  Synthetic oligonucleotide: PDCD1-2943
cauuuuauuacagcgaa

SEQ ID NO: 3517 - RNA, 17 nt, Artificial Sequence
  Synthetic oligonucleotide: PDCD1-1851
uuacagcgaauggaaaa

SEQ ID NO: 3518 - RNA, 17 nt, Artificial Sequence
  Synthetic oligonucleotide: PDCD1-2944
uacagcgaauggaaaac

SEQ ID NO: 3519 - RNA, 17 nt, Artificial Sequence
  Synthetic oligonucleotide: PDCD1-1853
cagcgaauggaaaacag

SEQ ID NO: 3520 - RNA, 17 nt, Artificial Sequence
  Synthetic oligonucleotide: PDCD1-1854
aauggaaaacaggagaa

SEQ ID NO: 3521 - RNA, 20 nt, Artificial Sequence
  Synthetic oligonucleotide: PDCD1-2947
cucugggcccugcuggguac

SEQ ID NO: 3522 - RNA, 20 nt, Artificial Sequence
  Synthetic oligonucleotide: PDCD1-1856
ccucugggcccugcugggua

SEQ ID NO: 3523 - RNA, 20 nt, Artificial Sequence
  Synthetic oligonucleotide: PDCD1-1857
gacagucccucugggcccug

SEQ ID NO: 3524 - RNA, 20 nt, Artificial Sequence
  Synthetic oligonucleotide: PDCD1-1858
ccaagccuaagacagucccu

SEQ ID NO: 3525 - RNA, 20 nt, Artificial Sequence
  Synthetic oligonucleotide: PDCD1-1859
uggggaugccaaggccuggg

SEQ ID NO: 3526 - RNA, 20 nt, Artificial Sequence
  Synthetic oligonucleotide: PDCD1-2956
ccuggggaugccaaggccug

SEQ ID NO: 3527 - RNA, 20 nt, Artificial Sequence
  Synthetic oligonucleotide: PDCD1-2957
accuggggaugccaaggccu

SEQ ID NO: 3528 - RNA, 20 nt, Artificial Sequence
  Synthetic oligonucleotide: PDCD1-2958
caccuggggaugccaaggcc

SEQ ID NO: 3529 - RNA, 20 nt, Artificial Sequence
  Synthetic oligonucleotide: PDCD1-1863
gcaccuggggaugccaaggc

SEQ ID NO: 3530 - RNA, 20 nt, Artificial Sequence
  Synthetic oligonucleotide: PDCD1-2961
ugcccagccagccugcaccu

SEQ ID NO: 3531 - RNA, 20 nt, Artificial Sequence
  Synthetic oligonucleotide: PDCD1-2962
gugcccagccagccugcacc

SEQ ID NO: 3532 - RNA, 20 nt, Artificial Sequence
  Synthetic oligonucleotide: PDCD1-1866
ugugcccagccagccugcac

SEQ ID NO: 3533 - RNA, 20 nt, Artificial Sequence
  Synthetic oligonucleotide: PDCD1-1867
acugugaccacagcccgcuc

SEQ ID NO: 3534 - RNA, 20 nt, Artificial Sequence
  Synthetic oligonucleotide: PDCD1-1868
uuccugggcugcccgugacc

SEQ ID NO: 3535 - RNA, 20 nt, Artificial Sequence
  Synthetic oligonucleotide: PDCD1-1869
aggagagagggagccucuuc

SEQ ID NO: 3536 - RNA, 20 nt, Artificial Sequence
  Synthetic oligonucleotide: PDCD1-2970
ucucccggaucgaggagaga

SEQ ID NO: 3537 - RNA, 20 nt, Artificial Sequence
  Synthetic oligonucleotide: PDCD1-2971
cucucccggaucgaggagag

SEQ ID NO: 3538 - RNA, 20 nt, Artificial Sequence
  Synthetic oligonucleotide: PDCD1-1872
acucucccggaucgaggaga

SEQ ID NO: 3539 - RNA, 20 nt, Artificial Sequence
  Synthetic oligonucleotide: PDCD1-1873
ucacucucccggaucgagga

SEQ ID NO: 3540 - RNA, 20 nt, Artificial Sequence
  Synthetic oligonucleotide: PDCD1-1874
ccucacucucccggaucgag

SEQ ID NO: 3541 - RNA, 20 nt, Artificial Sequence
  Synthetic oligonucleotide: PDCD1-2972
ggccucacucucccggaucg

SEQ ID NO: 3542 - RNA, 20 nt, Artificial Sequence
  Synthetic oligonucleotide: PDCD1-1876
uggccucacucucccggauc

SEQ ID NO: 3543 - RNA, 20 nt, Artificial Sequence
  Synthetic oligonucleotide: PDCD1-1877
cuuggccucacucucccgga

SEQ ID NO: 3544 - RNA, 20 nt, Artificial Sequence
  Synthetic oligonucleotide: PDCD1-1878
gaggccuuggccucacucuc

SEQ ID NO: 3545 - RNA, 20 nt, Artificial Sequence
  Synthetic oligonucleotide: PDCD1-2976
ccuguucagaccauccgugg

SEQ ID NO: 3546 - RNA, 20 nt, Artificial Sequence
  Synthetic oligonucleotide: PDCD1-2977
cccuguucagaccauccgug

SEQ ID NO: 3547 - RNA, 20 nt, Artificial Sequence
  Synthetic oligonucleotide: PDCD1-2978
gcccuguucagaccauccgu

SEQ ID NO: 3548 - RNA, 20 nt, Artificial Sequence
  Synthetic oligonucleotide: PDCD1-2979
agcccuguucagaccauccg

SEQ ID NO: 3549 - RNA, 20 nt, Artificial Sequence
  Synthetic oligonucleotide: PDCD1-1883
gagcccuguucagaccaucc

SEQ ID NO: 3550 - RNA, 20 nt, Artificial Sequence
  Synthetic oligonucleotide: PDCD1-1884
cccagauuccagggcucucc

SEQ ID NO: 3551 - RNA, 20 nt, Artificial Sequence
  Synthetic oligonucleotide: PDCD1-1885
cugggucucugcccagauuc

SEQ ID NO: 3552 - RNA, 20 nt, Artificial Sequence
  Synthetic oligonucleotide: PDCD1-1886
uggguggggauugugcccgc

SEQ ID NO: 3553 - RNA, 20 nt, Artificial Sequence
  Synthetic oligonucleotide: PDCD1-2985
cuccaggaucccuccugggu

SEQ ID NO: 3554 - RNA, 20 nt, Artificial Sequence
  Synthetic oligonucleotide: PDCD1-2986
ucuccaggaucccuccuggg

SEQ ID NO: 3555 - RNA, 20 nt, Artificial Sequence
  Synthetic oligonucleotide: PDCD1-1889
gucuccaggaucccuccugg

SEQ ID NO: 3556 - RNA, 20 nt, Artificial Sequence
  Synthetic oligonucleotide: PDCD1-1890
uucugucuccaggaucccuc

SEQ ID NO: 3557 - RNA, 20 nt, Artificial Sequence
  Synthetic oligonucleotide: PDCD1-1891
gaggacaguucuucugucuc

SEQ ID NO: 3558 - RNA, 20 nt, Artificial Sequence
  Synthetic oligonucleotide: PDCD1-1892
caaaguguaccuguucgagu

SEQ ID NO: 3559 - RNA, 20 nt, Artificial Sequence
  Synthetic oligonucleotide: PDCD1-1893
uccaaaguguaccuguucga

SEQ ID NO: 3560 - RNA, 20 nt, Artificial Sequence
  Synthetic oligonucleotide: PDCD1-1894
uauauccaaaguguaccugu

SEQ ID NO: 3561 - RNA, 20 nt, Artificial Sequence
  Synthetic oligonucleotide: PDCD1-1895
uuuacgacgucaaaguuuag

SEQ ID NO: 3562 - RNA, 20 nt, Artificial Sequence
  Synthetic oligonucleotide: PDCD1-2994
aggaugggaugagccccaug

SEQ ID NO: 3563 - RNA, 20 nt, Artificial Sequence
  Synthetic oligonucleotide: PDCD1-1897
aaggaugggaugagccccau

SEQ ID NO: 3564 - RNA, 20 nt, Artificial Sequence
  Synthetic oligonucleotide: PDCD1-1898
cgaguuuuccuaaggauggg

SEQ ID NO: 3565 - RNA, 20 nt, Artificial Sequence
  Synthetic oligonucleotide: PDCD1-2996
cacucgaguuuuccuaagga

SEQ ID NO: 3566 - RNA, 20 nt, Artificial Sequence
  Synthetic oligonucleotide: PDCD1-1900
ucacucgaguuuuccuaagg

SEQ ID NO: 3567 - RNA, 20 nt, Artificial Sequence
  Synthetic oligonucleotide: PDCD1-1901
guccucacucgaguuuuccu

SEQ ID NO: 3568 - RNA, 20 nt, Artificial Sequence
  Synthetic oligonucleotide: PDCD1-1902
caggcauccuugguccucac

SEQ ID NO: 3569 - RNA, 20 nt, Artificial Sequence
  Synthetic oligonucleotide: PDCD1-1903
ccgacagaaugggagugggg

SEQ ID NO: 3570 - RNA, 20 nt, Artificial Sequence
  Synthetic oligonucleotide: PDCD1-3001
aggcuccgacagaaugggag

SEQ ID NO: 3571 - RNA, 20 nt, Artificial Sequence
  Synthetic oligonucleotide: PDCD1-1905
gaggcuccgacagaauggga

SEQ ID NO: 3572 - RNA, 20 nt, Artificial Sequence
  Synthetic oligonucleotide: PDCD1-3002
cccagaggcuccgacagaau

SEQ ID NO: 3573 - RNA, 20 nt, Artificial Sequence
  Synthetic oligonucleotide: PDCD1-3003
ucccagaggcuccgacagaa

SEQ ID NO: 3574 - RNA, 20 nt, Artificial Sequence
  Synthetic oligonucleotide: PDCD1-1908
cucccagaggcuccgacaga

SEQ ID NO: 3575 - RNA, 20 nt, Artificial Sequence
  Synthetic oligonucleotide: PDCD1-1909
gaggcucccagaggcuccga

SEQ ID NO: 3576 - RNA, 20 nt, Artificial Sequence
  Synthetic oligonucleotide: PDCD1-1910
gugggcagccgggaggcucc

SEQ ID NO: 3577 - RNA, 20 nt, Artificial Sequence
  Synthetic oligonucleotide: PDCD1-3006
ggcagaggcugugggcagcc

SEQ ID NO: 3578 - RNA, 20 nt, Artificial Sequence
  Synthetic oligonucleotide: PDCD1-3007
gggcagaggcugugggcagc

SEQ ID NO: 3579 - RNA, 20 nt, Artificial Sequence
  Synthetic oligonucleotide: PDCD1-1913
ggggcagaggcugugggcag

SEQ ID NO: 3580 - RNA, 20 nt, Artificial Sequence
  Synthetic oligonucleotide: PDCD1-1914
ccccagcaggggcagaggcu

SEQ ID NO: 3581 - RNA, 20 nt, Artificial Sequence
  Synthetic oligonucleotide: PDCD1-1915
gcaccugcccccagcagggg

SEQ ID NO: 3582 - RNA, 20 nt, Artificial Sequence
  Synthetic oligonucleotide: PDCD1-3013
gccaggcaccugcccccagc

SEQ ID NO: 3583 - RNA, 20 nt, Artificial Sequence
  Synthetic oligonucleotide: PDCD1-1917
ggccaggcaccugcccccag

SEQ ID NO: 3584 - RNA, 20 nt, Artificial Sequence
  Synthetic oligonucleotide: PDCD1-1918
agggggaugggccgggaagg

SEQ ID NO: 3585 - RNA, 20 nt, Artificial Sequence
  Synthetic oligonucleotide: PDCD1-3017
ccagcgaagggggaugggcc

SEQ ID NO: 3586 - RNA, 20 nt, Artificial Sequence
  Synthetic oligonucleotide: PDCD1-3018
cccagcgaagggggaugggc

SEQ ID NO: 3587 - RNA, 20 nt, Artificial Sequence
  Synthetic oligonucleotide: PDCD1-1921
ccccagcgaagggggauggg

SEQ ID NO: 3588 - RNA, 20 nt, Artificial Sequence
  Synthetic oligonucleotide: PDCD1-1922
cugugccccagcgaaggggg

SEQ ID NO: 3589 - RNA, 20 nt, Artificial Sequence
  Synthetic oligonucleotide: PDCD1-3022
ucaccugugccccagcgaag

SEQ ID NO: 3590 - RNA, 20 nt, Artificial Sequence
  Synthetic oligonucleotide: PDCD1-3023
gucaccugugccccagcgaa

SEQ ID NO: 3591 - RNA, 20 nt, Artificial Sequence
  Synthetic oligonucleotide: PDCD1-3024
ggucaccugugccccagcga

SEQ ID NO: 3592 - RNA, 20 nt, Artificial Sequence
  Synthetic oligonucleotide: PDCD1-1926
gggucaccugugccccagcg

SEQ ID NO: 3593 - RNA, 20 nt, Artificial Sequence
  Synthetic oligonucleotide: PDCD1-1927
guagggucaccugugcccca

SEQ ID NO: 3594 - RNA, 20 nt, Artificial Sequence
  Synthetic oligonucleotide: PDCD1-1928
cauggacaguugucauucag

SEQ ID NO: 3595 - RNA, 20 nt, Artificial Sequence
  Synthetic oligonucleotide: PDCD1-1929
ugagggggagccgauuagcc

SEQ ID NO: 3596 - RNA, 20 nt, Artificial Sequence
  Synthetic oligonucleotide: PDCD1-3028
acaagguggaagcuuugagg

SEQ ID NO: 3597 - RNA, 20 nt, Artificial Sequence
  Synthetic oligonucleotide: PDCD1-3029
cacaagguggaagcuuugag

SEQ ID NO: 3598 - RNA, 20 nt, Artificial Sequence
  Synthetic oligonucleotide: PDCD1-3030
ccacaagguggaagcuuuga

SEQ ID NO: 3599 - RNA, 20 nt, Artificial Sequence
  Synthetic oligonucleotide: PDCD1-3031
uccacaagguggaagcuuug

SEQ ID NO: 3600 - RNA, 20 nt, Artificial Sequence
  Synthetic oligonucleotide: PDCD1-1934
auccacaagguggaagcuuu

SEQ ID NO: 3601 - RNA, 20 nt, Artificial Sequence
  Synthetic oligonucleotide: PDCD1-1935
ccauccacaagguggaagcu

SEQ ID NO: 3602 - RNA, 20 nt, Artificial Sequence
  Synthetic oligonucleotide: PDCD1-3032
gugugaggccauccacaagg

SEQ ID NO: 3603 - RNA, 20 nt, Artificial Sequence
  Synthetic oligonucleotide: PDCD1-1937
ggugugaggccauccacaag

SEQ ID NO: 3604 - RNA, 20 nt, Artificial Sequence
  Synthetic oligonucleotide: PDCD1-1938
ucuggaacuguggccauggu

SEQ ID NO: 3605 - RNA, 20 nt, Artificial Sequence
  Synthetic oligonucleotide: PDCD1-3037
caucacacgguggaaagauc

SEQ ID NO: 3606 - RNA, 20 nt, Artificial Sequence
  Synthetic oligonucleotide: PDCD1-1940
gcaucacacgguggaaagau

SEQ ID NO: 3607 - RNA, 20 nt, Artificial Sequence
  Synthetic oligonucleotide: PDCD1-3038
cuguugcaggcaucacacgg

SEQ ID NO: 3608 - RNA, 20 nt, Artificial Sequence
  Synthetic oligonucleotide: PDCD1-1942
gcuguugcaggcaucacacg

SEQ ID NO: 3609 - RNA, 20 nt, Artificial Sequence
  Synthetic oligonucleotide: PDCD1-3043
aagaaggucaaggcuggaag

SEQ ID NO: 3610 - RNA, 20 nt, Artificial Sequence
  Synthetic oligonucleotide: PDCD1-3044
gaagaaggucaaggcuggaa

SEQ ID NO: 3611 - RNA, 20 nt, Artificial Sequence
  Synthetic oligonucleotide: PDCD1-3045
ggaagaaggucaaggcugga

SEQ ID NO: 3612 - RNA, 20 nt, Artificial Sequence
  Synthetic oligonucleotide: PDCD1-1946
gggaagaaggucaaggcugg

SEQ ID NO: 3613 - RNA, 20 nt, Artificial Sequence
  Synthetic oligonucleotide: PDCD1-3046
ccggggaagaaggucaaggc

SEQ ID NO: 3614 - RNA, 20 nt, Artificial Sequence
  Synthetic oligonucleotide: PDCD1-1948
cccggggaagaaggucaagg

SEQ ID NO: 3615 - RNA, 20 nt, Artificial Sequence
  Synthetic oligonucleotide: PDCD1-1949
uggagggcagggccccgggg

SEQ ID NO: 3616 - RNA, 20 nt, Artificial Sequence
  Synthetic oligonucleotide: PDCD1-3049
ggcuggagggcagggccccg

SEQ ID NO: 3617 - RNA, 20 nt, Artificial Sequence
  Synthetic oligonucleotide: PDCD1-3050
gggcuggagggcagggcccc

SEQ ID NO: 3618 - RNA, 20 nt, Artificial Sequence
  Synthetic oligonucleotide: PDCD1-3051
ugggcuggagggcagggccc

SEQ ID NO: 3619 - RNA, 20 nt, Artificial Sequence
  Synthetic oligonucleotide: PDCD1-1953
gugggcuggagggcagggcc

SEQ ID NO: 3620 - RNA, 20 nt, Artificial Sequence
  Synthetic oligonucleotide: PDCD1-1954
ggcacgagugggcuggaggg

SEQ ID NO: 3621 - RNA, 20 nt, Artificial Sequence
  Synthetic oligonucleotide: PDCD1-1955
acccuggcacgagugggcug

SEQ ID NO: 3622 - RNA, 20 nt, Artificial Sequence
  Synthetic oligonucleotide: PDCD1-3056
ccacccuggcacgagugggc

SEQ ID NO: 3623 - RNA, 20 nt, Artificial Sequence
  Synthetic oligonucleotide: PDCD1-1957
cccacccuggcacgaguggg

SEQ ID NO: 3624 - RNA, 20 nt, Artificial Sequence
  Synthetic oligonucleotide: PDCD1-1958
accaccccacccuggcacga

SEQ ID NO: 3625 - RNA, 20 nt, Artificial Sequence
  Synthetic oligonucleotide: PDCD1-1959
cugaaccaccccacccuggc

SEQ ID NO: 3626 - RNA, 20 nt, Artificial Sequence
  Synthetic oligonucleotide: PDCD1-1960
aggcccaggcacuggacccc

SEQ ID NO: 3627 - RNA, 20 nt, Artificial Sequence
  Synthetic oligonucleotide: PDCD1-1961
ccgccagccaggcccaggca

SEQ ID NO: 3628 - RNA, 20 nt, Artificial Sequence
  Synthetic oligonucleotide: PDCD1-1962
agcaagccauuucacaaacg

SEQ ID NO: 3629 - RNA, 20 nt, Artificial Sequence
  Synthetic oligonucleotide: PDCD1-3065
aaugcucagcacagaauaca

SEQ ID NO: 3630 - RNA, 20 nt, Artificial Sequence
  Synthetic oligonucleotide: PDCD1-1964
aaaugcucagcacagaauac

SEQ ID NO: 3631 - RNA, 20 nt, Artificial Sequence
  Synthetic oligonucleotide: PDCD1-1965
cuguaauaaaaugcucagca

SEQ ID NO: 3632 - RNA, 17 nt, Artificial Sequence
  Synthetic oligonucleotide: PDCD1-3068
ugggcccugcuggguac

SEQ ID NO: 3633 - RNA, 17 nt, Artificial Sequence
  Synthetic oligonucleotide: PDCD1-1967
cugggcccugcugggua

SEQ ID NO: 3634 - RNA, 17 nt, Artificial Sequence
  Synthetic oligonucleotide: PDCD1-1968
agucccucugggcccug

SEQ ID NO: 3635 - RNA, 17 nt, Artificial Sequence
  Synthetic oligonucleotide: PDCD1-1969
agccuaagacagucccu

SEQ ID NO: 3636 - RNA, 17 nt, Artificial Sequence
  Synthetic oligonucleotide: PDCD1-1970
ggaugccaaggccuggg

SEQ ID NO: 3637 - RNA, 17 nt, Artificial Sequence
  Synthetic oligonucleotide: PDCD1-3077
ggggaugccaaggccug

SEQ ID NO: 3638 - RNA, 17 nt, Artificial Sequence
  Synthetic oligonucleotide: PDCD1-3078
uggggaugccaaggccu

SEQ ID NO: 3639 - RNA, 17 nt, Artificial Sequence
  Synthetic oligonucleotide: PDCD1-3079
cuggggaugccaaggcc

SEQ ID NO: 3640 - RNA, 17 nt, Artificial Sequence
  Synthetic oligonucleotide: PDCD1-1974
ccuggggaugccaaggc

SEQ ID NO: 3641 - RNA, 17 nt, Artificial Sequence
  Synthetic oligonucleotide: PDCD1-3082
ccagccagccugcaccu

SEQ ID NO: 3642 - RNA, 17 nt, Artificial Sequence
  Synthetic oligonucleotide: PDCD1-3083
cccagccagccugcacc

SEQ ID NO: 3643 - RNA, 17 nt, Artificial Sequence
  Synthetic oligonucleotide: PDCD1-1977
gcccagccagccugcac

SEQ ID NO: 3644 - RNA, 17 nt, Artificial Sequence
  Synthetic oligonucleotide: PDCD1-1978
gugaccacagcccgcuc

SEQ ID NO: 3645 - RNA, 17 nt, Artificial Sequence
  Synthetic oligonucleotide: PDCD1-1979
cugggcugcccgugacc

SEQ ID NO: 3646 - RNA, 17 nt, Artificial Sequence
  Synthetic oligonucleotide: PDCD1-1980
agagagggagccucuuc

SEQ ID NO: 3647 - RNA, 17 nt, Artificial Sequence
  Synthetic oligonucleotide: PDCD1-3091
cccggaucgaggagaga

SEQ ID NO: 3648 - RNA, 17 nt, Artificial Sequence
  Synthetic oligonucleotide: PDCD1-3092
ucccggaucgaggagag

SEQ ID NO: 3649 - RNA, 17 nt, Artificial Sequence
  Synthetic oligonucleotide: PDCD1-1983
cucccggaucgaggaga

SEQ ID NO: 3650 - RNA, 17 nt, Artificial Sequence
  Synthetic oligonucleotide: PDCD1-1984
cucucccggaucgagga

SEQ ID NO: 3651 - RNA, 17 nt, Artificial Sequence
  Synthetic oligonucleotide: PDCD1-1985
cacucucccggaucgag

SEQ ID NO: 3652 - RNA, 17 nt, Artificial Sequence
  Synthetic oligonucleotide: PDCD1-3093
cucacucucccggaucg

SEQ ID NO: 3653 - RNA, 17 nt, Artificial Sequence
  Synthetic oligonucleotide: PDCD1-1987
ccucacucucccggauc

SEQ ID NO: 3654 - RNA, 17 nt, Artificial Sequence
  Synthetic oligonucleotide: PDCD1-1988
ggccucacucucccgga

SEQ ID NO: 3655 - RNA, 17 nt, Artificial Sequence
  Synthetic oligonucleotide: PDCD1-1989
gccuuggccucacucuc

SEQ ID NO: 3656 - RNA, 17 nt, Artificial Sequence
  Synthetic oligonucleotide: PDCD1-3097
guucagaccauccgugg

SEQ ID NO: 3657 - RNA, 17 nt, Artificial Sequence
  Synthetic oligonucleotide: PDCD1-3098
uguucagaccauccgug

SEQ ID NO: 3658 - RNA, 17 nt, Artificial Sequence
  Synthetic oligonucleotide: PDCD1-3099
cuguucagaccauccgu

SEQ ID NO: 3659 - RNA, 17 nt, Artificial Sequence
  Synthetic oligonucleotide: PDCD1-3100
ccuguucagaccauccg

SEQ ID NO: 3660 - RNA, 17 nt, Artificial Sequence
  Synthetic oligonucleotide: PDCD1-1994
cccuguucagaccaucc

SEQ ID NO: 3661 - RNA, 17 nt, Artificial Sequence
  Synthetic oligonucleotide: PDCD1-1995
agauuccagggcucucc

SEQ ID NO: 3662 - RNA, 17 nt, Artificial Sequence
  Synthetic oligonucleotide: PDCD1-1996
ggucucugcccagauuc

SEQ ID NO: 3663 - RNA, 17 nt, Artificial Sequence
  Synthetic oligonucleotide: PDCD1-1997
guggggauugugcccgc

SEQ ID NO: 3664 - RNA, 17 nt, Artificial Sequence
  Synthetic oligonucleotide: PDCD1-3106
caggaucccuccugggu

SEQ ID NO: 3665 - RNA, 17 nt, Artificial Sequence
  Synthetic oligonucleotide: PDCD1-3107
ccaggaucccuccuggg

SEQ ID NO: 3666 - RNA, 17 nt, Artificial Sequence
  Synthetic oligonucleotide: PDCD1-2000
uccaggaucccuccugg

SEQ ID NO: 3667 - RNA, 17 nt, Artificial Sequence
  Synthetic oligonucleotide: PDCD1-2001
ugucuccaggaucccuc

SEQ ID NO: 3668 - RNA, 17 nt, Artificial Sequence
  Synthetic oligonucleotide: PDCD1-2002
gacaguucuucugucuc

SEQ ID NO: 3669 - RNA, 17 nt, Artificial Sequence
  Synthetic oligonucleotide: PDCD1-2003
aguguaccuguucgagu

SEQ ID NO: 3670 - RNA, 17 nt, Artificial Sequence
  Synthetic oligonucleotide: PDCD1-2004
aaaguguaccuguucga

SEQ ID NO: 3671 - RNA, 17 nt, Artificial Sequence
  Synthetic oligonucleotide: PDCD1-2005
auccaaaguguaccugu

SEQ ID NO: 3672 - RNA, 17 nt, Artificial Sequence
  Synthetic oligonucleotide: PDCD1-2006
acgacgucaaaguuuag

SEQ ID NO: 3673 - RNA, 17 nt, Artificial Sequence
  Synthetic oligonucleotide: PDCD1-3115
augggaugagccccaug

SEQ ID NO: 3674 - RNA, 17 nt, Artificial Sequence
  Synthetic oligonucleotide: PDCD1-2008
gaugggaugagccccau

SEQ ID NO: 3675 - RNA, 17 nt, Artificial Sequence
  Synthetic oligonucleotide: PDCD1-2009
guuuuccuaaggauggg

SEQ ID NO: 3676 - RNA, 17 nt, Artificial Sequence
  Synthetic oligonucleotide: PDCD1-3117
ucgaguuuuccuaagga

SEQ ID NO: 3677 - RNA, 17 nt, Artificial Sequence
  Synthetic oligonucleotide: PDCD1-2011
cucgaguuuuccuaagg

SEQ ID NO: 3678 - RNA, 17 nt, Artificial Sequence
  Synthetic oligonucleotide: PDCD1-2012
cucacucgaguuuuccu

SEQ ID NO: 3679 - RNA, 17 nt, Artificial Sequence
  Synthetic oligonucleotide: PDCD1-2013
gcauccuugguccucac

SEQ ID NO: 3680 - RNA, 17 nt, Artificial Sequence
  Synthetic oligonucleotide: PDCD1-2014
acagaaugggagugggg

SEQ ID NO: 3681 - RNA, 17 nt, Artificial Sequence
  Synthetic oligonucleotide: PDCD1-3122
cuccgacagaaugggag

SEQ ID NO: 3682 - RNA, 17 nt, Artificial Sequence
  Synthetic oligonucleotide: PDCD1-2016
gcuccgacagaauggga

SEQ ID NO: 3683 - RNA, 17 nt, Artificial Sequence
  Synthetic oligonucleotide: PDCD1-3123
agaggcuccgacagaau

SEQ ID NO: 3684 - RNA, 17 nt, Artificial Sequence
  Synthetic oligonucleotide: PDCD1-3124
cagaggcuccgacagaa

SEQ ID NO: 3685 - RNA, 17 nt, Artificial Sequence
  Synthetic oligonucleotide: PDCD1-2019
ccagaggcuccgacaga

SEQ ID NO: 3686 - RNA, 17 nt, Artificial Sequence
  Synthetic oligonucleotide: PDCD1-2020
gcucccagaggcuccga

SEQ ID NO: 3687 - RNA, 17 nt, Artificial Sequence
  Synthetic oligonucleotide: PDCD1-2021
ggcagccgggaggcucc

SEQ ID NO: 3688 - RNA, 17 nt, Artificial Sequence
  Synthetic oligonucleotide: PDCD1-3127
agaggcugugggcagcc

SEQ ID NO: 3689 - RNA, 17 nt, Artificial Sequence
  Synthetic oligonucleotide: PDCD1-3128
cagaggcugugggcagc

SEQ ID NO: 3690 - RNA, 17 nt, Artificial Sequence
  Synthetic oligonucleotide: PDCD1-2024
gcagaggcugugggcag

SEQ ID NO: 3691 - RNA, 17 nt, Artificial Sequence
  Synthetic oligonucleotide: PDCD1-2025
cagcaggggcagaggcu

SEQ ID NO: 3692 - RNA, 17 nt, Artificial Sequence
  Synthetic oligonucleotide: PDCD1-2026
ccugcccccagcagggg

SEQ ID NO: 3693 - RNA, 17 nt, Artificial Sequence
  Synthetic oligonucleotide: PDCD1-3134
aggcaccugcccccagc

SEQ ID NO: 3694 - RNA, 17 nt, Artificial Sequence
  Synthetic oligonucleotide: PDCD1-2028
caggcaccugcccccag

SEQ ID NO: 3695 - RNA, 17 nt, Artificial Sequence
  Synthetic oligonucleotide: PDCD1-2029
gggaugggccgggaagg

SEQ ID NO: 3696 - RNA, 17 nt, Artificial Sequence
  Synthetic oligonucleotide: PDCD1-3138
gcgaagggggaugggcc

SEQ ID NO: 3697 - RNA, 17 nt, Artificial Sequence
  Synthetic oligonucleotide: PDCD1-3139
agcgaagggggaugggc

SEQ ID NO: 3698 - RNA, 17 nt, Artificial Sequence
  Synthetic oligonucleotide: PDCD1-2032
cagcgaagggggauggg

SEQ ID NO: 3699 - RNA, 17 nt, Artificial Sequence
  Synthetic oligonucleotide: PDCD1-2033
ugccccagcgaaggggg

SEQ ID NO: 3700 - RNA, 17 nt, Artificial Sequence
  Synthetic oligonucleotide: PDCD1-3143
ccugugccccagcgaag

SEQ ID NO: 3701 - RNA, 17 nt, Artificial Sequence
  Synthetic oligonucleotide: PDCD1-3144
accugugccccagcgaa

SEQ ID NO: 3702 - RNA, 17 nt, Artificial Sequence
  Synthetic oligonucleotide: PDCD1-3145
caccugugccccagcga

SEQ ID NO: 3703 - RNA, 17 nt, Artificial Sequence
  Synthetic oligonucleotide: PDCD1-2037
ucaccugugccccagcg

SEQ ID NO: 3704 - RNA, 17 nt, Artificial Sequence
  Synthetic oligonucleotide: PDCD1-2038
gggucaccugugcccca

SEQ ID NO: 3705 - RNA, 17 nt, Artificial Sequence
  Synthetic oligonucleotide: PDCD1-2039
ggacaguugucauucag

SEQ ID NO: 3706 - RNA, 17 nt, Artificial Sequence
  Synthetic oligonucleotide: PDCD1-2040
gggggagccgauuagcc

SEQ ID NO: 3707 - RNA, 17 nt, Artificial Sequence
  Synthetic oligonucleotide: PDCD1-3149
agguggaagcuuugagg

SEQ ID NO: 3708 - RNA, 17 nt, Artificial Sequence
  Synthetic oligonucleotide: PDCD1-3150
aagguggaagcuuugag

SEQ ID NO: 3709 - RNA, 17 nt, Artificial Sequence
  Synthetic oligonucleotide: PDCD1-3151
caagguggaagcuuuga

SEQ ID NO: 3710 - RNA, 17 nt, Artificial Sequence
  Synthetic oligonucleotide: PDCD1-3152
acaagguggaagcuuug

SEQ ID NO: 3711 - RNA, 17 nt, Artificial Sequence
  Synthetic oligonucleotide: PDCD1-2045
cacaagguggaagcuuu

SEQ ID NO: 3712 - RNA, 17 nt, Artificial Sequence
  Synthetic oligonucleotide: PDCD1-2046
uccacaagguggaagcu

SEQ ID NO: 3713 - RNA, 17 nt, Artificial Sequence
  Synthetic oligonucleotide: PDCD1-3153
ugaggccauccacaagg

SEQ ID NO: 3714 - RNA, 17 nt, Artificial Sequence
  Synthetic oligonucleotide: PDCD1-2048
gugaggccauccacaag

SEQ ID NO: 3715 - RNA, 17 nt, Artificial Sequence
  Synthetic oligonucleotide: PDCD1-2049
ggaacuguggccauggu

SEQ ID NO: 3716 - RNA, 17 nt, Artificial Sequence
  Synthetic oligonucleotide: PDCD1-3158
cacacgguggaaagauc

SEQ ID NO: 3717 - RNA, 17 nt, Artificial Sequence
  Synthetic oligonucleotide: PDCD1-2051
ucacacgguggaaagau

SEQ ID NO: 3718 - RNA, 17 nt, Artificial Sequence
  Synthetic oligonucleotide: PDCD1-3159
uugcaggcaucacacgg

SEQ ID NO: 3719 - RNA, 17 nt, Artificial Sequence
  Synthetic oligonucleotide: PDCD1-2053
guugcaggcaucacacg

SEQ ID NO: 3720 - RNA, 17 nt, Artificial Sequence
  Synthetic oligonucleotide: PDCD1-3164
aaggucaaggcuggaag

SEQ ID NO: 3721 - RNA, 17 nt, Artificial Sequence
  Synthetic oligonucleotide: PDCD1-3165
gaaggucaaggcuggaa

SEQ ID NO: 3722 - RNA, 17 nt, Artificial Sequence
  Synthetic oligonucleotide: PDCD1-3166
agaaggucaaggcugga

SEQ ID NO: 3723 - RNA, 17 nt, Artificial Sequence
  Synthetic oligonucleotide: PDCD1-2057
aagaaggucaaggcugg

SEQ ID NO: 3724 - RNA, 17 nt, Artificial Sequence
  Synthetic oligonucleotide: PDCD1-3167
gggaagaaggucaaggc

SEQ ID NO: 3725 - RNA, 17 nt, Artificial Sequence
  Synthetic oligonucleotide: PDCD1-2059
ggggaagaaggucaagg

SEQ ID NO: 3726 - RNA, 17 nt, Artificial Sequence
  Synthetic oligonucleotide: PDCD1-2060
agggcagggccccgggg

SEQ ID NO: 3727 - RNA, 17 nt, Artificial Sequence
  Synthetic oligonucleotide: PDCD1-3170
uggagggcagggccccg

SEQ ID NO: 3728 - RNA, 17 nt, Artificial Sequence
  Synthetic oligonucleotide: PDCD1-3171
cuggagggcagggcccc

SEQ ID NO: 3729 - RNA, 17 nt, Artificial Sequence
  Synthetic oligonucleotide: PDCD1-3172
gcuggagggcagggccc

SEQ ID NO: 3730 - RNA, 17 nt, Artificial Sequence
  Synthetic oligonucleotide: PDCD1-2064
ggcuggagggcagggcc

SEQ ID NO: 3731 - RNA, 17 nt, Artificial Sequence
  Synthetic oligonucleotide: PDCD1-2065
acgagugggcuggaggg

SEQ ID NO: 3732 - RNA, 17 nt, Artificial Sequence
  Synthetic oligonucleotide: PDCD1-2066
cuggcacgagugggcug

SEQ ID NO: 3733 - RNA, 17 nt, Artificial Sequence
  Synthetic oligonucleotide: PDCD1-3177
cccuggcacgagugggc

SEQ ID NO: 3734 - RNA, 17 nt, Artificial Sequence
  Synthetic oligonucleotide: PDCD1-2068
acccuggcacgaguggg

SEQ ID NO: 3735 - RNA, 17 nt, Artificial Sequence
  Synthetic oligonucleotide: PDCD1-2069
accccacccuggcacga

SEQ ID NO: 3736 - RNA, 17 nt, Artificial Sequence
  Synthetic oligonucleotide: PDCD1-2070
aaccaccccacccuggc

SEQ ID NO: 3737 - RNA, 17 nt, Artificial Sequence
  Synthetic oligonucleotide: PDCD1-2071
cccaggcacuggacccc

SEQ ID NO: 3738 - RNA, 17 nt, Artificial Sequence
  Synthetic oligonucleotide: PDCD1-2072
ccagccaggcccaggca

SEQ ID NO: 3739 - RNA, 17 nt, Artificial Sequence
  Synthetic oligonucleotide: PDCD1-2073
aagccauuucacaaacg

SEQ ID NO: 3740 - RNA, 17 nt, Artificial Sequence
  Synthetic oligonucleotide: PDCD1-3186
gcucagcacagaauaca

SEQ ID NO: 3741 - RNA, 17 nt, Artificial Sequence
  Synthetic oligonucleotide: PDCD1-2075
ugcucagcacagaauac

SEQ ID NO: 3742 - RNA, 17 nt, Artificial Sequence
  Synthetic oligonucleotide: PDCD1-2076
uaauaaaaugcucagca

SEQ ID NO: 3743 - RNA, 20 nt, Artificial Sequence
  Synthetic oligonucleotide: PDCD1-2077
ugugcccgccugggucucug

SEQ ID NO: 3744 - RNA, 20 nt, Artificial Sequence
  Synthetic oligonucleotide: PDCD1-2986
ucuccaggaucccuccuggg

SEQ ID NO: 3745 - RNA, 20 nt, Artificial Sequence
  Synthetic oligonucleotide: PDCD1-2079
agguggaagcuuugaggggg

SEQ ID NO: 3746 - RNA, 17 nt, Artificial Sequence
  Synthetic oligonucleotide: PDCD1-2080
gcccgccugggucucug

SEQ ID NO: 3747 - RNA, 17 nt, Artificial Sequence
  Synthetic oligonucleotide: PDCD1-3107
ccaggaucccuccuggg

SEQ ID NO: 3748 - RNA, 17 nt, Artificial Sequence
  Synthetic oligonucleotide: PDCD1-2082
uggaagcuuugaggggg

SEQ ID NO: 3749 - RNA, 20 nt, Artificial Sequence
  Synthetic oligonucleotide: Ptpn6-1
gguuucaccgagaccucagu

SEQ ID NO: 3750 - RNA, 20 nt, Artificial Sequence
  Synthetic oligonucleotide: Ptpn6-2
gggaucaggugacccauauu

SEQ ID NO: 3751 - RNA, 20 nt, Artificial Sequence
  Synthetic oligonucleotide: Ptpn6-3
guuugcgacucugacagagc

SEQ ID NO: 3752 - RNA, 20 nt, Artificial Sequence
  Synthetic oligonucleotide: Ptpn6-4
gaguacuacacucagcagca

SEQ ID NO: 3753 - RNA, 20 nt, Artificial Sequence
  Synthetic oligonucleotide: Ptpn6-5
gugggaucggagcaguucag

SEQ ID NO: 3754 - RNA, 20 nt, Artificial Sequence
  Synthetic oligonucleotide: Ptpn6-6
gucacccugguucuugcgac

SEQ ID NO: 3755 - RNA, 20 nt, Artificial Sequence
  Synthetic oligonucleotide: Ptpn6-7
ggacaccucggcccuugagc

SEQ ID NO: 3756 - RNA, 17 nt, Artificial Sequence
  Synthetic oligonucleotide: Ptpn6-8
gcccagucgcaagaacc

SEQ ID NO: 3757 - RNA, 17 nt, Artificial Sequence
  Synthetic oligonucleotide: Ptpn6-9
guccugcaggaccgcga

SEQ ID NO: 3758 - RNA, 17 nt, Artificial Sequence
  Synthetic oligonucleotide: Ptpn6-10
gaaagcacgaagucucc

SEQ ID NO: 3759 - RNA, 17 nt, Artificial Sequence
  Synthetic oligonucleotide: Ptpn6-11
ggaucggagcaguucag

SEQ ID NO: 3760 - RNA, 17 nt, Artificial Sequence
  Synthetic oligonucleotide: Ptpn6-12
gaucggagcaguucagc

SEQ ID NO: 3761 - RNA, 17 nt, Artificial Sequence
  Synthetic oligonucleotide: Ptpn6-13
ggaugauggugccgucg

SEQ ID NO: 3762 - RNA, 17 nt, Artificial Sequence
  Synthetic oligonucleotide: Ptpn6-14
guucuggauccgaauau

SEQ ID NO: 3763 - RNA, 20 nt, Artificial Sequence
  Synthetic oligonucleotide: Ptpn6-15
ugguuucaccgagaccucag

SEQ ID NO: 3764 - RNA, 20 nt, Artificial Sequence
  Synthetic oligonucleotide: Ptpn6-16
ucggcccagucgcaagaacc

SEQ ID NO: 3765 - RNA, 20 nt, Artificial Sequence
  Synthetic oligonucleotide: Ptpn6-17
cggcccagucgcaagaacca

SEQ ID NO: 3766 - RNA, 20 nt, Artificial Sequence
  Synthetic oligonucleotide: Ptpn6-18
uaccauggccacaugucugg

SEQ ID NO: 3767 - RNA, 20 nt, Artificial Sequence
  Synthetic oligonucleotide: Ptpn6-19
cucacgcacaagaaacgucc

SEQ ID NO: 3768 - RNA, 20 nt, Artificial Sequence
  Synthetic oligonucleotide: Ptpn6-20
ucacgcacaagaaacgucca

SEQ ID NO: 3769 - RNA, 20 nt, Artificial Sequence
  Synthetic oligonucleotide: Ptpn6-21
aaacguccagggcucgcccu

SEQ ID NO: 3770 - RNA, 20 nt, Artificial Sequence
  Synthetic oligonucleotide: Ptpn6-22
ugggaucggagcaguucagc

SEQ ID NO: 3771 - RNA, 20 nt, Artificial Sequence
  Synthetic oligonucleotide: Ptpn6-23
aguucagcggguacuugagg

SEQ ID NO: 3772 - RNA, 20 nt, Artificial Sequence
  Synthetic oligonucleotide: Ptpn6-24
cggguacuugagguggauga

SEQ ID NO: 3773 - RNA, 20 nt, Artificial Sequence
  Synthetic oligonucleotide: Ptpn6-25
uggugccgucgcgguccugc

SEQ ID NO: 3774 - RNA, 20 nt, Artificial Sequence
  Synthetic oligonucleotide: Ptpn6-26
cugaguucuggauccgaaua

SEQ ID NO: 3775 - RNA, 20 nt, Artificial Sequence
  Synthetic oligonucleotide: Ptpn6-27
ucacccugguucuugcgacu

SEQ ID NO: 3776 - RNA, 20 nt, Artificial Sequence
  Synthetic oligonucleotide: Ptpn6-28
ucuugcgacugggccgagcc

SEQ ID NO: 3777 - RNA, 17 nt, Artificial Sequence
  Synthetic oligonucleotide: Ptpn6-29
uuucaccgagaccucag

SEQ ID NO: 3778 - RNA, 17 nt, Artificial Sequence
  Synthetic oligonucleotide: Ptpn6-30
uucaccgagaccucagu

SEQ ID NO: 3779 - RNA, 17 nt, Artificial Sequence
  Synthetic oligonucleotide: Ptpn6-31
acccugcucaagggccg

SEQ ID NO: 3780 - RNA, 17 nt, Artificial Sequence
  Synthetic oligonucleotide: Ptpn6-32
uguccacgguagcuucc

SEQ ID NO: 3781 - RNA, 17 nt, Artificial Sequence
  Synthetic oligonucleotide: Ptpn6-33
acgguagcuuccuggcu

SEQ ID NO: 3782 - RNA, 17 nt, Artificial Sequence
  Synthetic oligonucleotide: Ptpn6-34
cccagucgcaagaacca

SEQ ID NO: 3783 - RNA, 17 nt, Artificial Sequence
  Synthetic oligonucleotide: Ptpn6-35
aucaggugacccauauu

SEQ ID NO: 3784 - RNA, 17 nt, Artificial Sequence
  Synthetic oligonucleotide: Ptpn6-36
auucggauccagaacuc

SEQ ID NO: 3785 - RNA, 17 nt, Artificial Sequence
  Synthetic oligonucleotide: Ptpn6-37
uucggauccagaacuca

SEQ ID NO: 3786 - RNA, 17 nt, Artificial Sequence
  Synthetic oligonucleotide: Ptpn6-38
ucggauccagaacucag

SEQ ID NO: 3787 - RNA, 17 nt, Artificial Sequence
  Synthetic oligonucleotide: Ptpn6-39
uucuaugaccuguaugg

SEQ ID NO: 3788 - RNA, 17 nt, Artificial Sequence
  Synthetic oligonucleotide: Ptpn6-40
ucuaugaccuguaugga

SEQ ID NO: 3789 - RNA, 17 nt, Artificial Sequence
  Synthetic oligonucleotide: Ptpn6-41
cuaugaccuguauggag

SEQ ID NO: 3790 - RNA, 17 nt, Artificial Sequence
  Synthetic oligonucleotide: Ptpn6-42
ugcgacucugacagagc

SEQ ID NO: 3791 - RNA, 17 nt, Artificial Sequence
  Synthetic oligonucleotide: Ptpn6-43
ccacaugucuggcgggc

SEQ ID NO: 3792 - RNA, 17 nt, Artificial Sequence
  Synthetic oligonucleotide: Ptpn6-44
acgcacaagaaacgucc

SEQ ID NO: 3793 - RNA, 17 nt, Artificial Sequence
  Synthetic oligonucleotide: Ptpn6-45
cgcacaagaaacgucca

SEQ ID NO: 3794 - RNA, 17 nt, Artificial Sequence
  Synthetic oligonucleotide: Ptpn6-46
cguccagggcucgcccu

SEQ ID NO: 3795 - RNA, 17 nt, Artificial Sequence
  Synthetic oligonucleotide: Ptpn6-47
ccugcccgccagacaug

SEQ ID NO: 3796 - RNA, 17 nt, Artificial Sequence
  Synthetic oligonucleotide: Ptpn6-48
cgccagacauguggcca

SEQ ID NO: 3797 - RNA, 17 nt, Artificial Sequence
  Synthetic oligonucleotide: Ptpn6-49
aguucagcggguacuug

SEQ ID NO: 3798 - RNA, 17 nt, Artificial Sequence
  Synthetic oligonucleotide: Ptpn6-50
ucagcggguacuugagg

SEQ ID NO: 3799 - RNA, 17 nt, Artificial Sequence
  Synthetic oligonucleotide: Ptpn6-51
ugccgucgcgguccugc

SEQ ID NO: 3800 - RNA, 17 nt, Artificial Sequence
  Synthetic oligonucleotide: Ptpn6-52
aguucuggauccgaaua

SEQ ID NO: 3801 - RNA, 17 nt, Artificial Sequence
  Synthetic oligonucleotide: Ptpn6-53
acccugguucuugcgac

SEQ ID NO: 3802 - RNA, 17 nt, Artificial Sequence
  Synthetic oligonucleotide: Ptpn6-54
cccugguucuugcgacu

SEQ ID NO: 3803 - RNA, 17 nt, Artificial Sequence
  Synthetic oligonucleotide: Ptpn6-55
ugcgacugggccgagcc

SEQ ID NO: 3804 - RNA, 17 nt, Artificial Sequence
  Synthetic oligonucleotide: Ptpn6-56
agcuaccguggacaccu

SEQ ID NO: 3805 - RNA, 17 nt, Artificial Sequence
  Synthetic oligonucleotide: Ptpn6-57
caccucggcccuugagc

SEQ ID NO: 3806 - RNA, 17 nt, Artificial Sequence
  Synthetic oligonucleotide: Ptpn6-58
accucggcccuugagca

SEQ ID NO: 3807 - RNA, 20 nt, Artificial Sequence
  Synthetic oligonucleotide: Ptpn6-59
ggggauuucuaugaccugua

SEQ ID NO: 3808 - RNA, 20 nt, Artificial Sequence
  Synthetic oligonucleotide: Ptpn6-60
ggaugcagagacccugcuca

SEQ ID NO: 3809 - RNA, 20 nt, Artificial Sequence
  Synthetic oligonucleotide: Ptpn6-61
gaugcagagacccugcucaa

SEQ ID NO: 3810 - RNA, 20 nt, Artificial Sequence
  Synthetic oligonucleotide: Ptpn6-62
gagacccugcucaagggccg

SEQ ID NO: 3811 - RNA, 20 nt, Artificial Sequence
  Synthetic oligonucleotide: Ptpn6-63
gauuucuaugaccuguaugg

SEQ ID NO: 3812 - RNA, 20 nt, Artificial Sequence
  Synthetic oligonucleotide: Ptpn6-64
ggaguacuacacucagcagc

SEQ ID NO: 3813 - RNA, 20 nt, Artificial Sequence
  Synthetic oligonucleotide: Ptpn6-65
gguguccugcaggaccgcga

SEQ ID NO: 3814 - RNA, 20 nt, Artificial Sequence
  Synthetic oligonucleotide: Ptpn6-66
gcaggcagagacgcugcugc

SEQ ID NO: 3815 - RNA, 20 nt, Artificial Sequence
  Synthetic oligonucleotide: Ptpn6-67
gagacgcugcugcaggccaa

SEQ ID NO: 3816 - RNA, 20 nt, Artificial Sequence
  Synthetic oligonucleotide: Ptpn6-68
gaccagcccaaggcuggccc

SEQ ID NO: 3817 - RNA, 20 nt, Artificial Sequence
  Synthetic oligonucleotide: Ptpn6-69
gugacccugagcggggagcc

SEQ ID NO: 3818 - RNA, 20 nt, Artificial Sequence
  Synthetic oligonucleotide: Ptpn6-70
ggggagccugggccagccuu

SEQ ID NO: 3819 - RNA, 20 nt, Artificial Sequence
  Synthetic oligonucleotide: Ptpn6-71
gcccgccagacauguggcca

SEQ ID NO: 3820 - RNA, 20 nt, Artificial Sequence
  Synthetic oligonucleotide: Ptpn6-72
gguggaugauggugccgucg

SEQ ID NO: 3821 - RNA, 20 nt, Artificial Sequence
  Synthetic oligonucleotide: Ptpn6-73
gccgagccaggaagcuaccg

SEQ ID NO: 3822 - RNA, 20 nt, Artificial Sequence
  Synthetic oligonucleotide: Ptpn6-74
ggaagcuaccguggacaccu

SEQ ID NO: 3823 - RNA, 20 nt, Artificial Sequence
  Synthetic oligonucleotide: Ptpn6-75
gacaccucggcccuugagca

SEQ ID NO: 3824 - RNA, 17 nt, Artificial Sequence
  Synthetic oligonucleotide: Ptpn6-76
gcagagacccugcucaa

SEQ ID NO: 3825 - RNA, 17 nt, Artificial Sequence
  Synthetic oligonucleotide: Ptpn6-77
gauuucuaugaccugua

SEQ ID NO: 3826 - RNA, 17 nt, Artificial Sequence
  Synthetic oligonucleotide: Ptpn6-78
gacucugacagagcugg

SEQ ID NO: 3827 - RNA, 17 nt, Artificial Sequence
  Synthetic oligonucleotide: Ptpn6-79
guacuacacucagcagc

SEQ ID NO: 3828 - RNA, 17 nt, Artificial Sequence
  Synthetic oligonucleotide: Ptpn6-80
gcagcaggguguccugc

SEQ ID NO: 3829 - RNA, 17 nt, Artificial Sequence
  Synthetic oligonucleotide: Ptpn6-81
ggcagagacgcugcugc

SEQ ID NO: 3830 - RNA, 17 nt, Artificial Sequence
  Synthetic oligonucleotide: Ptpn6-82
gacgcugcugcaggcca

SEQ ID NO: 3831 - RNA, 17 nt, Artificial Sequence
  Synthetic oligonucleotide: Ptpn6-83
gagagccucagccagcc

SEQ ID NO: 3832 - RNA, 17 nt, Artificial Sequence
  Synthetic oligonucleotide: Ptpn6-84
gcucagugaccagccca

SEQ ID NO: 3833 - RNA, 17 nt, Artificial Sequence
  Synthetic oligonucleotide: Ptpn6-85
gcccaggcuccccgcuc

SEQ ID NO: 3834 - RNA, 17 nt, Artificial Sequence
  Synthetic oligonucleotide: Ptpn6-86
ggagccugggccagccu

SEQ ID NO: 3835 - RNA, 17 nt, Artificial Sequence
  Synthetic oligonucleotide: Ptpn6-87
gagccugggccagccuu

SEQ ID NO: 3836 - RNA, 17 nt, Artificial Sequence
  Synthetic oligonucleotide: Ptpn6-88
gcacgaagucuccaggc

SEQ ID NO: 3837 - RNA, 17 nt, Artificial Sequence
  Synthetic oligonucleotide: Ptpn6-89
guacuugagguggauga

SEQ ID NO: 3838 - RNA, 17 nt, Artificial Sequence
  Synthetic oligonucleotide: Ptpn6-90
gagccaggaagcuaccg

SEQ ID NO: 3839 - RNA, 20 nt, Artificial Sequence
  Synthetic oligonucleotide: Ptpn6-91
ucaccgagaccucagugggc

SEQ ID NO: 3840 - RNA, 20 nt, Artificial Sequence
  Synthetic oligonucleotide: Ptpn6-92
cucaagggccgaggugucca

SEQ ID NO: 3841 - RNA, 20 nt, Artificial Sequence
  Synthetic oligonucleotide: Ptpn6-93
agguguccacgguagcuucc

SEQ ID NO: 3842 - RNA, 20 nt, Artificial Sequence
  Synthetic oligonucleotide: Ptpn6-94
uccacgguagcuuccuggcu

SEQ ID NO: 3843 - RNA, 20 nt, Artificial Sequence
  Synthetic oligonucleotide: Ptpn6-95
cauauucggauccagaacuc

SEQ ID NO: 3844 - RNA, 20 nt, Artificial Sequence
  Synthetic oligonucleotide: Ptpn6-96
auauucggauccagaacuca

SEQ ID NO: 3845 - RNA, 20 nt, Artificial Sequence
  Synthetic oligonucleotide: Ptpn6-97
uauucggauccagaacucag

SEQ ID NO: 3846 - RNA, 20 nt, Artificial Sequence
  Synthetic oligonucleotide: Ptpn6-98
auuucuaugaccuguaugga

SEQ ID NO: 3847 - RNA, 20 nt, Artificial Sequence
  Synthetic oligonucleotide: Ptpn6-99
uuucuaugaccuguauggag

SEQ ID NO: 3848 - RNA, 20 nt, Artificial Sequence
  Synthetic oligonucleotide: Ptpn6-100
ugcgacucugacagagcugg

SEQ ID NO: 3849 - RNA, 20 nt, Artificial Sequence
  Synthetic oligonucleotide: Ptpn6-101
ucagcagcaggguguccugc

SEQ ID NO: 3850 - RNA, 20 nt, Artificial Sequence
  Synthetic oligonucleotide: Ptpn6-102
ugguaccauggccacauguc

SEQ ID NO: 3851 - RNA, 20 nt, Artificial Sequence
  Synthetic oligonucleotide: Ptpn6-103
accauggccacaugucuggc

SEQ ID NO: 3852 - RNA, 20 nt, Artificial Sequence
  Synthetic oligonucleotide: Ptpn6-104
uggccacaugucuggcgggc

SEQ ID NO: 3853 - RNA, 20 nt, Artificial Sequence
  Synthetic oligonucleotide: Ptpn6-105
agagacgcugcugcaggcca

SEQ ID NO: 3854 - RNA, 20 nt, Artificial Sequence
  Synthetic oligonucleotide: Ptpn6-106
ugcaggccaagggcgagccc

SEQ ID NO: 3855 - RNA, 20 nt, Artificial Sequence
  Synthetic oligonucleotide: Ptpn6-107
cgugagagccucagccagcc

SEQ ID NO: 3856 - RNA, 20 nt, Artificial Sequence
  Synthetic oligonucleotide: Ptpn6-108
ugugcucagugaccagccca

SEQ ID NO: 3857 - RNA, 20 nt, Artificial Sequence
  Synthetic oligonucleotide: Ptpn6-109
cucagugaccagcccaaggc

SEQ ID NO: 3858 - RNA, 20 nt, Artificial Sequence
  Synthetic oligonucleotide: Ptpn6-110
cuggcccaggcuccccgcuc

SEQ ID NO: 3859 - RNA, 20 nt, Artificial Sequence
  Synthetic oligonucleotide: Ptpn6-111
uggcccaggcuccccgcuca

SEQ ID NO: 3860 - RNA, 20 nt, Artificial Sequence
  Synthetic oligonucleotide: Ptpn6-112
ugacccugagcggggagccu

SEQ ID NO: 3861 - RNA, 20 nt, Artificial Sequence
  Synthetic oligonucleotide: Ptpn6-113
cggggagccugggccagccu

SEQ ID NO: 3862 - RNA, 20 nt, Artificial Sequence
  Synthetic oligonucleotide: Ptpn6-114
agccugggccagccuugggc

SEQ ID NO: 3863 - RNA, 20 nt, Artificial Sequence
  Synthetic oligonucleotide: Ptpn6-115
acagaaagcacgaagucucc

SEQ ID NO: 3864 - RNA, 20 nt, Artificial Sequence
  Synthetic oligonucleotide: Ptpn6-116
aaagcacgaagucuccaggc

SEQ ID NO: 3865 - RNA, 20 nt, Artificial Sequence
  Synthetic oligonucleotide: Ptpn6-117
cgaagucuccaggcuggcug

SEQ ID NO: 3866 - RNA, 20 nt, Artificial Sequence
  Synthetic oligonucleotide: Ptpn6-118
cugccugcccgccagacaug

SEQ ID NO: 3867 - RNA, 20 nt, Artificial Sequence
  Synthetic oligonucleotide: Ptpn6-119
agcaguucagcggguacuug

SEQ ID NO: 3868 - RNA, 20 nt, Artificial Sequence
  Synthetic oligonucleotide: Ptpn6-120
caaacuucuccccuccauac

SEQ ID NO: 3869 - RNA, 20 nt, Artificial Sequence
  Synthetic oligonucleotide: Ptpn6-121
cauagaaauccccugaguuc

SEQ ID NO: 3870 - RNA, 20 nt, Artificial Sequence
  Synthetic oligonucleotide: Ptpn6-122
ugaguucuggauccgaauau

SEQ ID NO: 3871 - RNA, 20 nt, Artificial Sequence
  Synthetic oligonucleotide: Ptpn6-123
cggagagcgagaagucaccc

SEQ ID NO: 3872 - RNA, 20 nt, Artificial Sequence
  Synthetic oligonucleotide: Ptpn6-124
ucucugcauccagcccacug

SEQ ID NO: 3873 - RNA, 20 nt, Artificial Sequence
  Synthetic oligonucleotide: Ptpn6-125
cauccagcccacugaggucu

SEQ ID NO: 3874 - RNA, 17 nt, Artificial Sequence
  Synthetic oligonucleotide: Ptpn6-126
ccgagaccucagugggc

SEQ ID NO: 3875 - RNA, 17 nt, Artificial Sequence
  Synthetic oligonucleotide: Ptpn6-127
ugcagagacccugcuca

SEQ ID NO: 3876 - RNA, 17 nt, Artificial Sequence
  Synthetic oligonucleotide: Ptpn6-128
aagggccgaggugucca

SEQ ID NO: 3877 - RNA, 17 nt, Artificial Sequence
  Synthetic oligonucleotide: Ptpn6-129
uacuacacucagcagca

SEQ ID NO: 3878 - RNA, 17 nt, Artificial Sequence
  Synthetic oligonucleotide: Ptpn6-130
uaccauggccacauguc

SEQ ID NO: 3879 - RNA, 17 nt, Artificial Sequence
  Synthetic oligonucleotide: Ptpn6-131
cauggccacaugucugg

SEQ ID NO: 3880 - RNA, 17 nt, Artificial Sequence
  Synthetic oligonucleotide: Ptpn6-132
auggccacaugucuggc

SEQ ID NO: 3881 - RNA, 17 nt, Artificial Sequence
  Synthetic oligonucleotide: Ptpn6-133
acgcugcugcaggccaa

SEQ ID NO: 3882 - RNA, 17 nt, Artificial Sequence
  Synthetic oligonucleotide: Ptpn6-134
aggccaagggcgagccc

SEQ ID NO: 3883 - RNA, 17 nt, Artificial Sequence
  Synthetic oligonucleotide: Ptpn6-135
agugaccagcccaaggc

SEQ ID NO: 3884 - RNA, 17 nt, Artificial Sequence
  Synthetic oligonucleotide: Ptpn6-136
cagcccaaggcuggccc

SEQ ID NO: 3885 - RNA, 17 nt, Artificial Sequence
  Synthetic oligonucleotide: Ptpn6-137
cccaggcuccccgcuca

SEQ ID NO: 3886 - RNA, 17 nt, Artificial Sequence
  Synthetic oligonucleotide: Ptpn6-138
acccugagcggggagcc

SEQ ID NO: 3887 - RNA, 17 nt, Artificial Sequence
  Synthetic oligonucleotide: Ptpn6-139
cccugagcggggagccu

SEQ ID NO: 3888 - RNA, 17 nt, Artificial Sequence
  Synthetic oligonucleotide: Ptpn6-140
cugggccagccuugggc

SEQ ID NO: 3889 - RNA, 17 nt, Artificial Sequence
  Synthetic oligonucleotide: Ptpn6-141
agucuccaggcuggcug

SEQ ID NO: 3890 - RNA, 17 nt, Artificial Sequence
  Synthetic oligonucleotide: Ptpn6-142
acuucuccccuccauac

SEQ ID NO: 3891 - RNA, 17 nt, Artificial Sequence
  Synthetic oligonucleotide: Ptpn6-143
agaaauccccugaguuc

SEQ ID NO: 3892 - RNA, 17 nt, Artificial Sequence
  Synthetic oligonucleotide: Ptpn6-144
agagcgagaagucaccc

SEQ ID NO: 3893 - RNA, 17 nt, Artificial Sequence
  Synthetic oligonucleotide: Ptpn6-145
cugcauccagcccacug

SEQ ID NO: 3894 - RNA, 17 nt, Artificial Sequence
  Synthetic oligonucleotide: Ptpn6-146
ccagcccacugaggucu

SEQ ID NO: 3895 - RNA, 20 nt, Artificial Sequence
  Synthetic oligonucleotide: Ptpn6-147
gguggacgcuacacaguggg

SEQ ID NO: 3896 - RNA, 20 nt, Artificial Sequence
  Synthetic oligonucleotide: Ptpn6-148
acgcuacacagugggugguu

SEQ ID NO: 3897 - RNA, 20 nt, Artificial Sequence
  Synthetic oligonucleotide: Ptpn6-149
ggagaccuucgacagccuca

SEQ ID NO: 3898 - RNA, 20 nt, Artificial Sequence
  Synthetic oligonucleotide: Ptpn6-150
cuucgacagccucacggacc

SEQ ID NO: 3899 - RNA, 20 nt, Artificial Sequence
  Synthetic oligonucleotide: Ptpn6-151
cgacagccucacggaccugg

SEQ ID NO: 3900 - RNA, 20 nt, Artificial Sequence
  Synthetic oligonucleotide: Ptpn6-152
gguggagcauuucaagaaga

SEQ ID NO: 3901 - RNA, 20 nt, Artificial Sequence
  Synthetic oligonucleotide: Ptpn6-153
guggagcauuucaagaagac

SEQ ID NO: 3902 - RNA, 20 nt, Artificial Sequence
  Synthetic oligonucleotide: Ptpn6-154
uggagcauuucaagaagacg

SEQ ID NO: 3903 - RNA, 20 nt, Artificial Sequence
  Synthetic oligonucleotide: Ptpn6-155
uuucaagaagacggggauug

SEQ ID NO: 3904 - RNA, 20 nt, Artificial Sequence
  Synthetic oligonucleotide: Ptpn6-156
caagaagacggggauugagg

SEQ ID NO: 3905 - RNA, 20 nt, Artificial Sequence
  Synthetic oligonucleotide: Ptpn6-157
acggggauugaggaggccuc

SEQ ID NO: 3906 - RNA, 20 nt, Artificial Sequence
  Synthetic oligonucleotide: Ptpn6-158
caggcgccuuugucuaccug

SEQ ID NO: 3907 - RNA, 20 nt, Artificial Sequence
  Synthetic oligonucleotide: Ptpn6-159
cuaugccacgagggugaaug

SEQ ID NO: 3908 - RNA, 20 nt, Artificial Sequence
  Synthetic oligonucleotide: Ptpn6-160
ugacauugagaaccgagugu

SEQ ID NO: 3909 - RNA, 20 nt, Artificial Sequence
  Synthetic oligonucleotide: Ptpn6-161
guuggaacugaacaagaagc

SEQ ID NO: 3910 - RNA, 20 nt, Artificial Sequence
  Synthetic oligonucleotide: Ptpn6-162
gaacaagaagcaggaguccg

SEQ ID NO: 3911 - RNA, 20 nt, Artificial Sequence
  Synthetic oligonucleotide: Ptpn6-163
ggaguccgaggauacagcca

SEQ ID NO: 3912 - RNA, 20 nt, Artificial Sequence
  Synthetic oligonucleotide: Ptpn6-164
uccgaggauacagccaaggc

SEQ ID NO: 3913 - RNA, 20 nt, Artificial Sequence
  Synthetic oligonucleotide: Ptpn6-165
auacagccaaggcuggcuuc

SEQ ID NO: 3914 - RNA, 20 nt, Artificial Sequence
  Synthetic oligonucleotide: Ptpn6-166
uacagccaaggcuggcuucu

SEQ ID NO: 3915 - RNA, 20 nt, Artificial Sequence
  Synthetic oligonucleotide: Ptpn6-167
agccaaggcuggcuucuggg

SEQ ID NO: 3916 - RNA, 20 nt, Artificial Sequence
  Synthetic oligonucleotide: Ptpn6-168
gaagaacuugcaccagcguc

SEQ ID NO: 3917 - RNA, 20 nt, Artificial Sequence
  Synthetic oligonucleotide: Ptpn6-169
aacuugcaccagcgucugga

SEQ ID NO: 3918 - RNA, 20 nt, Artificial Sequence
  Synthetic oligonucleotide: Ptpn6-170
acuugcaccagcgucuggaa

SEQ ID NO: 3919 - RNA, 20 nt, Artificial Sequence
  Synthetic oligonucleotide: Ptpn6-171
accagcgucuggaagggcag

SEQ ID NO: 3920 - RNA, 20 nt, Artificial Sequence
  Synthetic oligonucleotide: Ptpn6-172
agggcagcggccagagaaca

SEQ ID NO: 3921 - RNA, 20 nt, Artificial Sequence
  Synthetic oligonucleotide: Ptpn6-173
gggcagcggccagagaacaa

SEQ ID NO: 3922 - RNA, 20 nt, Artificial Sequence
  Synthetic oligonucleotide: Ptpn6-174
ccacagccgagugauccugc

SEQ ID NO: 3923 - RNA, 20 nt, Artificial Sequence
  Synthetic oligonucleotide: Ptpn6-175
cacagccgagugauccugca

SEQ ID NO: 3924 - RNA, 20 nt, Artificial Sequence
  Synthetic oligonucleotide: Ptpn6-176
gccgagugauccugcaggga

SEQ ID NO: 3925 - RNA, 20 nt, Artificial Sequence
  Synthetic oligonucleotide: Ptpn6-177
ccgagugauccugcagggac

SEQ ID NO: 3926 - RNA, 20 nt, Artificial Sequence
  Synthetic oligonucleotide: Ptpn6-178
ggacgggacaguaacauccc

SEQ ID NO: 3927 - RNA, 20 nt, Artificial Sequence
  Synthetic oligonucleotide: Ptpn6-179
gacgggacaguaacaucccc

SEQ ID NO: 3928 - RNA, 20 nt, Artificial Sequence
  Synthetic oligonucleotide: Ptpn6-180
uaagaccuacaucgccagcc

SEQ ID NO: 3929 - RNA, 20 nt, Artificial Sequence
  Synthetic oligonucleotide: Ptpn6-181
aagaccuacaucgccagcca

SEQ ID NO: 3930 - RNA, 20 nt, Artificial Sequence
  Synthetic oligonucleotide: Ptpn6-182
caucgccagccaggguuguc

SEQ ID NO: 3931 - RNA, 20 nt, Artificial Sequence
  Synthetic oligonucleotide: Ptpn6-183
cgccagccaggguugucugg

SEQ ID NO: 3932 - RNA, 20 nt, Artificial Sequence
  Synthetic oligonucleotide: Ptpn6-184
ccaggguugucuggaggcca

SEQ ID NO: 3933 - RNA, 20 nt, Artificial Sequence
  Synthetic oligonucleotide: Ptpn6-185
aggccacggucaaugacuuc

SEQ ID NO: 3934 - RNA, 20 nt, Artificial Sequence
  Synthetic oligonucleotide: Ptpn6-186
ggucaaugacuucuggcaga

SEQ ID NO: 3935 - RNA, 20 nt, Artificial Sequence
  Synthetic oligonucleotide: Ptpn6-187
augacuucuggcagauggcg

SEQ ID NO: 3936 - RNA, 20 nt, Artificial Sequence
  Synthetic oligonucleotide: Ptpn6-188
cuucuggcagauggcguggc

SEQ ID NO: 3937 - RNA, 20 nt, Artificial Sequence
  Synthetic oligonucleotide: Ptpn6-189
caucgucaugaccacccgag

SEQ ID NO: 3938 - RNA, 20 nt, Artificial Sequence
  Synthetic oligonucleotide: Ptpn6-190
cgucaugaccacccgagagg

SEQ ID NO: 3939 - RNA, 20 nt, Artificial Sequence
  Synthetic oligonucleotide: Ptpn6-191
accacccgagagguggagaa

SEQ ID NO: 3940 - RNA, 20 nt, Artificial Sequence
  Synthetic oligonucleotide: Ptpn6-192
cccgagagguggagaaaggc

SEQ ID NO: 3941 - RNA, 20 nt, Artificial Sequence
  Synthetic oligonucleotide: Ptpn6-193
augcgucccauacuggcccg

SEQ ID NO: 3942 - RNA, 20 nt, Artificial Sequence
  Synthetic oligonucleotide: Ptpn6-194
cgucccauacuggcccgagg

SEQ ID NO: 3943 - RNA, 20 nt, Artificial Sequence
  Synthetic oligonucleotide: Ptpn6-195
gucccauacuggcccgaggu

SEQ ID NO: 3944 - RNA, 20 nt, Artificial Sequence
  Synthetic oligonucleotide: Ptpn6-196
gugggcaugcagcgugcuua

SEQ ID NO: 3945 - RNA, 20 nt, Artificial Sequence
  Synthetic oligonucleotide: Ptpn6-197
ugggcaugcagcgugcuuau

SEQ ID NO: 3946 - RNA, 20 nt, Artificial Sequence
  Synthetic oligonucleotide: Ptpn6-198
cccuacucugugaccaacug

SEQ ID NO: 3947 - RNA, 20 nt, Artificial Sequence
  Synthetic oligonucleotide: Ptpn6-199
ccuacucugugaccaacugc

SEQ ID NO: 3948 - RNA, 20 nt, Artificial Sequence
  Synthetic oligonucleotide: Ptpn6-200
cuacucugugaccaacugcg

SEQ ID NO: 3949 - RNA, 20 nt, Artificial Sequence
  Synthetic oligonucleotide: Ptpn6-201
auacaaacuccguaccuuac

SEQ ID NO: 3950 - RNA, 20 nt, Artificial Sequence
  Synthetic oligonucleotide: Ptpn6-202
uaccuuacaggucuccccgc

SEQ ID NO: 3951 - RNA, 20 nt, Artificial Sequence
  Synthetic oligonucleotide: Ptpn6-203
gagaccugauucgggagauc

SEQ ID NO: 3952 - RNA, 20 nt, Artificial Sequence
  Synthetic oligonucleotide: Ptpn6-204
ggcauuaccaguaccugagc

SEQ ID NO: 3953 - RNA, 20 nt, Artificial Sequence
  Synthetic oligonucleotide: Ptpn6-205
uaccugagcuggcccgacca

SEQ ID NO: 3954 - RNA, 20 nt, Artificial Sequence
  Synthetic oligonucleotide: Ptpn6-206
accugagcuggcccgaccau

SEQ ID NO: 3955 - RNA, 20 nt, Artificial Sequence
  Synthetic oligonucleotide: Ptpn6-207
ccugagcuggcccgaccaug

SEQ ID NO: 3956 - RNA, 20 nt, Artificial Sequence
  Synthetic oligonucleotide: Ptpn6-208
caugggguccccagugagcc

SEQ ID NO: 3957 - RNA, 20 nt, Artificial Sequence
  Synthetic oligonucleotide: Ptpn6-209
augggguccccagugagccu

SEQ ID NO: 3958 - RNA, 20 nt, Artificial Sequence
  Synthetic oligonucleotide: Ptpn6-210
ugggguccccagugagccug

SEQ ID NO: 3959 - RNA, 20 nt, Artificial Sequence
  Synthetic oligonucleotide: Ptpn6-211
gggguccccagugagccugg

SEQ ID NO: 3960 - RNA, 20 nt, Artificial Sequence
  Synthetic oligonucleotide: Ptpn6-212
uggggguguccucagcuucc

SEQ ID NO: 3961 - RNA, 20 nt, Artificial Sequence
  Synthetic oligonucleotide: Ptpn6-213
uccuggaccagaucaaccag

SEQ ID NO: 3962 - RNA, 20 nt, Artificial Sequence
  Synthetic oligonucleotide: Ptpn6-214
ggaccagaucaaccagcggc

SEQ ID NO: 3963 - RNA, 20 nt, Artificial Sequence
  Synthetic oligonucleotide: Ptpn6-215
caggaaagucugccucacgc

SEQ ID NO: 3964 - RNA, 20 nt, Artificial Sequence
  Synthetic oligonucleotide: Ptpn6-216
aggaaagucugccucacgca

SEQ ID NO: 3965 - RNA, 20 nt, Artificial Sequence
  Synthetic oligonucleotide: Ptpn6-217
cauugucaucgacaugcuca

SEQ ID NO: 3966 - RNA, 20 nt, Artificial Sequence
  Synthetic oligonucleotide: Ptpn6-218
cauggagaacaucuccacca

SEQ ID NO: 3967 - RNA, 20 nt, Artificial Sequence
  Synthetic oligonucleotide: Ptpn6-219
cauccagaagaccauccaga

SEQ ID NO: 3968 - RNA, 20 nt, Artificial Sequence
  Synthetic oligonucleotide: Ptpn6-220
agaagaccauccagauggug

SEQ ID NO: 3969 - RNA, 20 nt, Artificial Sequence
  Synthetic oligonucleotide: Ptpn6-221
gaagaccauccagauggugc

SEQ ID NO: 3970 - RNA, 20 nt, Artificial Sequence
  Synthetic oligonucleotide: Ptpn6-222
gauggugcgggcgcagcgcu

SEQ ID NO: 3971 - RNA, 20 nt, Artificial Sequence
  Synthetic oligonucleotide: Ptpn6-223
auggugcgggcgcagcgcuc

SEQ ID NO: 3972 - RNA, 20 nt, Artificial Sequence
  Synthetic oligonucleotide: Ptpn6-224
gcgggcgcagcgcucgggca

SEQ ID NO: 3973 - RNA, 20 nt, Artificial Sequence
  Synthetic oligonucleotide: Ptpn6-225
gcgcucgggcauggugcaga

SEQ ID NO: 3974 - RNA, 20 nt, Artificial Sequence
  Synthetic oligonucleotide: Ptpn6-226
cucgggcauggugcagacgg

SEQ ID NO: 3975 - RNA, 20 nt, Artificial Sequence
  Synthetic oligonucleotide: Ptpn6-227
gcaguacaaguucaucuacg

SEQ ID NO: 3976 - RNA, 20 nt, Artificial Sequence
  Synthetic oligonucleotide: Ptpn6-228
ugaaaccacuaagaagaagc

SEQ ID NO: 3977 - RNA, 20 nt, Artificial Sequence
  Synthetic oligonucleotide: Ptpn6-229
aaccacuaagaagaagcugg

SEQ ID NO: 3978 - RNA, 20 nt, Artificial Sequence
  Synthetic oligonucleotide: Ptpn6-230
aagggccaggagucggagua

SEQ ID NO: 3979 - RNA, 20 nt, Artificial Sequence
  Synthetic oligonucleotide: Ptpn6-231
agggccaggagucggaguac

SEQ ID NO: 3980 - RNA, 20 nt, Artificial Sequence
  Synthetic oligonucleotide: Ptpn6-232
caugaagaaugcccaugcca

SEQ ID NO: 3981 - RNA, 20 nt, Artificial Sequence
  Synthetic oligonucleotide: Ptpn6-233
accugcacacuaagaacaag

SEQ ID NO: 3982 - RNA, 20 nt, Artificial Sequence
  Synthetic oligonucleotide: Ptpn6-234
ccugcacacuaagaacaaga

SEQ ID NO: 3983 - RNA, 20 nt, Artificial Sequence
  Synthetic oligonucleotide: Ptpn6-235
gcacacuaagaacaagaggg

SEQ ID NO: 3984 - RNA, 20 nt, Artificial Sequence
  Synthetic oligonucleotide: Ptpn6-236
aggagaaagugaagaagcag

SEQ ID NO: 3985 - RNA, 20 nt, Artificial Sequence
  Synthetic oligonucleotide: Ptpn6-237
gaagcagcggucagcagaca

SEQ ID NO: 3986 - RNA, 20 nt, Artificial Sequence
  Synthetic oligonucleotide: Ptpn6-238
agcagacaaggagaagagca

SEQ ID NO: 3987 - RNA, 20 nt, Artificial Sequence
  Synthetic oligonucleotide: Ptpn6-239
gcagacaaggagaagagcaa

SEQ ID NO: 3988 - RNA, 20 nt, Artificial Sequence
  Synthetic oligonucleotide: Ptpn6-240
agagcaaggguucccucaag

SEQ ID NO: 3989 - RNA, 17 nt, Artificial Sequence
  Synthetic oligonucleotide: Ptpn6-241
gguggacgcuacacagu

SEQ ID NO: 3990 - RNA, 17 nt, Artificial Sequence
  Synthetic oligonucleotide: Ptpn6-242
ggacgcuacacaguggg

SEQ ID NO: 3991 - RNA, 17 nt, Artificial Sequence
  Synthetic oligonucleotide: Ptpn6-243
cuacacagugggugguu

SEQ ID NO: 3992 - RNA, 17 nt, Artificial Sequence
  Synthetic oligonucleotide: Ptpn6-244
gaccuucgacagccuca

SEQ ID NO: 3993 - RNA, 17 nt, Artificial Sequence
  Synthetic oligonucleotide: Ptpn6-245
cgacagccucacggacc

SEQ ID NO: 3994 - RNA, 17 nt, Artificial Sequence
  Synthetic oligonucleotide: Ptpn6-246
cagccucacggaccugg

SEQ ID NO: 3995 - RNA, 17 nt, Artificial Sequence
  Synthetic oligonucleotide: Ptpn6-247
ggagcauuucaagaaga

SEQ ID NO: 3996 - RNA, 17 nt, Artificial Sequence
  Synthetic oligonucleotide: Ptpn6-248
gagcauuucaagaagac

SEQ ID NO: 3997 - RNA, 17 nt, Artificial Sequence
  Synthetic oligonucleotide: Ptpn6-249
agcauuucaagaagacg

SEQ ID NO: 3998 - RNA, 17 nt, Artificial Sequence
  Synthetic oligonucleotide: Ptpn6-250
caagaagacggggauug

SEQ ID NO: 3999 - RNA, 17 nt, Artificial Sequence
  Synthetic oligonucleotide: Ptpn6-251
gaagacggggauugagg

SEQ ID NO: 4000 - RNA, 17 nt, Artificial Sequence
  Synthetic oligonucleotide: Ptpn6-252
gggauugaggaggccuc

SEQ ID NO: 4001 - RNA, 17 nt, Artificial Sequence
  Synthetic oligonucleotide: Ptpn6-253
gcgccuuugucuaccug

SEQ ID NO: 4002 - RNA, 17 nt, Artificial Sequence
  Synthetic oligonucleotide: Ptpn6-254
ugccacgagggugaaug

SEQ ID NO: 4003 - RNA, 17 nt, Artificial Sequence
  Synthetic oligonucleotide: Ptpn6-255
cauugagaaccgagugu

SEQ ID NO: 4004 - RNA, 17 nt, Artificial Sequence
  Synthetic oligonucleotide: Ptpn6-256
ggaacugaacaagaagc

SEQ ID NO: 4005 - RNA, 17 nt, Artificial Sequence
  Synthetic oligonucleotide: Ptpn6-257
caagaagcaggaguccg

SEQ ID NO: 4006 - RNA, 17 nt, Artificial Sequence
  Synthetic oligonucleotide: Ptpn6-258
guccgaggauacagcca

SEQ ID NO: 4007 - RNA, 17 nt, Artificial Sequence
  Synthetic oligonucleotide: Ptpn6-259
gaggauacagccaaggc

SEQ ID NO: 4008 - RNA, 17 nt, Artificial Sequence
  Synthetic oligonucleotide: Ptpn6-260
cagccaaggcuggcuuc

SEQ ID NO: 4009 - RNA, 17 nt, Artificial Sequence
  Synthetic oligonucleotide: Ptpn6-261
agccaaggcuggcuucu

SEQ ID NO: 4010 - RNA, 17 nt, Artificial Sequence
  Synthetic oligonucleotide: Ptpn6-262
caaggcuggcuucuggg

SEQ ID NO: 4011 - RNA, 17 nt, Artificial Sequence
  Synthetic oligonucleotide: Ptpn6-263
gaacuugcaccagcguc

SEQ ID NO: 4012 - RNA, 17 nt, Artificial Sequence
  Synthetic oligonucleotide: Ptpn6-264
uugcaccagcgucugga

SEQ ID NO: 4013 - RNA, 17 nt, Artificial Sequence
  Synthetic oligonucleotide: Ptpn6-265
ugcaccagcgucuggaa

SEQ ID NO: 4014 - RNA, 17 nt, Artificial Sequence
  Synthetic oligonucleotide: Ptpn6-266
agcgucuggaagggcag

SEQ ID NO: 4015 - RNA, 17 nt, Artificial Sequence
  Synthetic oligonucleotide: Ptpn6-267
gcagcggccagagaaca

SEQ ID NO: 4016 - RNA, 17 nt, Artificial Sequence
  Synthetic oligonucleotide: Ptpn6-268
cagcggccagagaacaa

SEQ ID NO: 4017 - RNA, 17 nt, Artificial Sequence
  Synthetic oligonucleotide: Ptpn6-269
cagccgagugauccugc

SEQ ID NO: 4018 - RNA, 17 nt, Artificial Sequence
  Synthetic oligonucleotide: Ptpn6-270
agccgagugauccugca

SEQ ID NO: 4019 - RNA, 17 nt, Artificial Sequence
  Synthetic oligonucleotide: Ptpn6-271
gagugauccugcaggga

SEQ ID NO: 4020 - RNA, 17 nt, Artificial Sequence
  Synthetic oligonucleotide: Ptpn6-272
agugauccugcagggac

SEQ ID NO: 4021 - RNA, 17 nt, Artificial Sequence
  Synthetic oligonucleotide: Ptpn6-273
cgggacaguaacauccc

SEQ ID NO: 4022 - RNA, 17 nt, Artificial Sequence
  Synthetic oligonucleotide: Ptpn6-274
gggacaguaacaucccc

SEQ ID NO: 4023 - RNA, 17 nt, Artificial Sequence
  Synthetic oligonucleotide: Ptpn6-275
gaccuacaucgccagcc

SEQ ID NO: 4024 - RNA, 17 nt, Artificial Sequence
  Synthetic oligonucleotide: Ptpn6-276
accuacaucgccagcca

SEQ ID NO: 4025 - RNA, 17 nt, Artificial Sequence
  Synthetic oligonucleotide: Ptpn6-277
cgccagccaggguuguc

SEQ ID NO: 4026 - RNA, 17 nt, Artificial Sequence
  Synthetic oligonucleotide: Ptpn6-278
cagccaggguugucugg

SEQ ID NO: 4027 - RNA, 17 nt, Artificial Sequence
  Synthetic oligonucleotide: Ptpn6-279
ggguugucuggaggcca

SEQ ID NO: 4028 - RNA, 17 nt, Artificial Sequence
  Synthetic oligonucleotide: Ptpn6-280
ccacggucaaugacuuc

SEQ ID NO: 4029 - RNA, 17 nt, Artificial Sequence
  Synthetic oligonucleotide: Ptpn6-281
caaugacuucuggcaga

SEQ ID NO: 4030 - RNA, 17 nt, Artificial Sequence
  Synthetic oligonucleotide: Ptpn6-282
acuucuggcagauggcg

SEQ ID NO: 4031 - RNA, 17 nt, Artificial Sequence
  Synthetic oligonucleotide: Ptpn6-283
cuggcagauggcguggc

SEQ ID NO: 4032 - RNA, 17 nt, Artificial Sequence
  Synthetic oligonucleotide: Ptpn6-284
cgucaugaccacccgag

SEQ ID NO: 4033 - RNA, 17 nt, Artificial Sequence
  Synthetic oligonucleotide: Ptpn6-285
caugaccacccgagagg

SEQ ID NO: 4034 - RNA, 17 nt, Artificial Sequence
  Synthetic oligonucleotide: Ptpn6-286
acccgagagguggagaa

SEQ ID NO: 4035 - RNA, 17 nt, Artificial Sequence
  Synthetic oligonucleotide: Ptpn6-287
gagagguggagaaaggc

SEQ ID NO: 4036 - RNA, 17 nt, Artificial Sequence
  Synthetic oligonucleotide: Ptpn6-288
acaaaugcgucccauac

SEQ ID NO: 4037 - RNA, 17 nt, Artificial Sequence
  Synthetic oligonucleotide: Ptpn6-289
cgucccauacuggcccg

SEQ ID NO: 4038 - RNA, 17 nt, Artificial Sequence
  Synthetic oligonucleotide: Ptpn6-290
cccauacuggcccgagg

SEQ ID NO: 4039 - RNA, 17 nt, Artificial Sequence
  Synthetic oligonucleotide: Ptpn6-291
ccauacuggcccgaggu

SEQ ID NO: 4040 - RNA, 17 nt, Artificial Sequence
  Synthetic oligonucleotide: Ptpn6-292
ggcaugcagcgugcuua

SEQ ID NO: 4041 - RNA, 17 nt, Artificial Sequence
  Synthetic oligonucleotide: Ptpn6-293
gcaugcagcgugcuuau

SEQ ID NO: 4042 - RNA, 17 nt, Artificial Sequence
  Synthetic oligonucleotide: Ptpn6-294
uacucugugaccaacug

SEQ ID NO: 4043 - RNA, 17 nt, Artificial Sequence
  Synthetic oligonucleotide: Ptpn6-295
acucugugaccaacugc

SEQ ID NO: 4044 - RNA, 17 nt, Artificial Sequence
  Synthetic oligonucleotide: Ptpn6-296
cucugugaccaacugcg

SEQ ID NO: 4045 - RNA, 17 nt, Artificial Sequence
  Synthetic oligonucleotide: Ptpn6-297
caaacuccguaccuuac

SEQ ID NO: 4046 - RNA, 17 nt, Artificial Sequence
  Synthetic oligonucleotide: Ptpn6-298
cuuacaggucuccccgc

SEQ ID NO: 4047 - RNA, 17 nt, Artificial Sequence
  Synthetic oligonucleotide: Ptpn6-299
accugauucgggagauc

SEQ ID NO: 4048 - RNA, 17 nt, Artificial Sequence
  Synthetic oligonucleotide: Ptpn6-300
auuaccaguaccugagc

SEQ ID NO: 4049 - RNA, 17 nt, Artificial Sequence
  Synthetic oligonucleotide: Ptpn6-301
cugagcuggcccgacca

SEQ ID NO: 4050 - RNA, 17 nt, Artificial Sequence
  Synthetic oligonucleotide: Ptpn6-302
ugagcuggcccgaccau

SEQ ID NO: 4051 - RNA, 17 nt, Artificial Sequence
  Synthetic oligonucleotide: Ptpn6-303
gagcuggcccgaccaug

SEQ ID NO: 4052 - RNA, 17 nt, Artificial Sequence
  Synthetic oligonucleotide: Ptpn6-304
gggguccccagugagcc

SEQ ID NO: 4053 - RNA, 17 nt, Artificial Sequence
  Synthetic oligonucleotide: Ptpn6-305
ggguccccagugagccu

SEQ ID NO: 4054 - RNA, 17 nt, Artificial Sequence
  Synthetic oligonucleotide: Ptpn6-306
gguccccagugagccug

SEQ ID NO: 4055 - RNA, 17 nt, Artificial Sequence
  Synthetic oligonucleotide: Ptpn6-307
guccccagugagccugg

SEQ ID NO: 4056 - RNA, 17 nt, Artificial Sequence
  Synthetic oligonucleotide: Ptpn6-308
ggguguccucagcuucc

SEQ ID NO: 4057 - RNA, 17 nt, Artificial Sequence
  Synthetic oligonucleotide: Ptpn6-309
uggaccagaucaaccag

SEQ ID NO: 4058 - RNA, 17 nt, Artificial Sequence
  Synthetic oligonucleotide: Ptpn6-310
ccagaucaaccagcggc

SEQ ID NO: 4059 - RNA, 17 nt, Artificial Sequence
  Synthetic oligonucleotide: Ptpn6-311
gaaagucugccucacgc

SEQ ID NO: 4060 - RNA, 17 nt, Artificial Sequence
  Synthetic oligonucleotide: Ptpn6-312
aaagucugccucacgca

SEQ ID NO: 4061 - RNA, 17 nt, Artificial Sequence
  Synthetic oligonucleotide: Ptpn6-313
gccggcaucggccgcac

SEQ ID NO: 4062 - RNA, 17 nt, Artificial Sequence
  Synthetic oligonucleotide: Ptpn6-314
ugucaucgacaugcuca

SEQ ID NO: 4063 - RNA, 17 nt, Artificial Sequence
  Synthetic oligonucleotide: Ptpn6-315
ggagaacaucuccacca

SEQ ID NO: 4064 - RNA, 17 nt, Artificial Sequence
  Synthetic oligonucleotide: Ptpn6-316
ccagaagaccauccaga

SEQ ID NO: 4065 - RNA, 17 nt, Artificial Sequence
  Synthetic oligonucleotide: Ptpn6-317
agaccauccagauggug

SEQ ID NO: 4066 - RNA, 17 nt, Artificial Sequence
  Synthetic oligonucleotide: Ptpn6-318
gaccauccagauggugc

SEQ ID NO: 4067 - RNA, 17 nt, Artificial Sequence
  Synthetic oligonucleotide: Ptpn6-319
ggugcgggcgcagcgcu

SEQ ID NO: 4068 - RNA, 17 nt, Artificial Sequence
  Synthetic oligonucleotide: Ptpn6-320
gugcgggcgcagcgcuc

SEQ ID NO: 4069 - RNA, 17 nt, Artificial Sequence
  Synthetic oligonucleotide: Ptpn6-321
ggcgcagcgcucgggca

SEQ ID NO: 4070 - RNA, 17 nt, Artificial Sequence
  Synthetic oligonucleotide: Ptpn6-322
cucgggcauggugcaga

SEQ ID NO: 4071 - RNA, 17 nt, Artificial Sequence
  Synthetic oligonucleotide: Ptpn6-323
gggcauggugcagacgg

SEQ ID NO: 4072 - RNA, 17 nt, Artificial Sequence
  Synthetic oligonucleotide: Ptpn6-324
guacaaguucaucuacg

SEQ ID NO: 4073 - RNA, 17 nt, Artificial Sequence
  Synthetic oligonucleotide: Ptpn6-325
aaccacuaagaagaagc

SEQ ID NO: 4074 - RNA, 17 nt, Artificial Sequence
  Synthetic oligonucleotide: Ptpn6-326
cacuaagaagaagcugg

SEQ ID NO: 4075 - RNA, 17 nt, Artificial Sequence
  Synthetic oligonucleotide: Ptpn6-327
gcagaagggccaggagu

SEQ ID NO: 4076 - RNA, 17 nt, Artificial Sequence
  Synthetic oligonucleotide: Ptpn6-328
ggccaggagucggagua

SEQ ID NO: 4077 - RNA, 17 nt, Artificial Sequence
  Synthetic oligonucleotide: Ptpn6-329
gccaggagucggaguac

SEQ ID NO: 4078 - RNA, 17 nt, Artificial Sequence
  Synthetic oligonucleotide: Ptpn6-330
gaagaaugcccaugcca

SEQ ID NO: 4079 - RNA, 17 nt, Artificial Sequence
  Synthetic oligonucleotide: Ptpn6-331
ugcacacuaagaacaag

SEQ ID NO: 4080 - RNA, 17 nt, Artificial Sequence
  Synthetic oligonucleotide: Ptpn6-332
gcacacuaagaacaaga

SEQ ID NO: 4081 - RNA, 17 nt, Artificial Sequence
  Synthetic oligonucleotide: Ptpn6-333
cacuaagaacaagaggg

SEQ ID NO: 4082 - RNA, 17 nt, Artificial Sequence
  Synthetic oligonucleotide: Ptpn6-334
agaaagugaagaagcag

SEQ ID NO: 4083 - RNA, 17 nt, Artificial Sequence
  Synthetic oligonucleotide: Ptpn6-335
gcagcggucagcagaca

SEQ ID NO: 4084 - RNA, 17 nt, Artificial Sequence
  Synthetic oligonucleotide: Ptpn6-336
agacaaggagaagagca

SEQ ID NO: 4085 - RNA, 17 nt, Artificial Sequence
  Synthetic oligonucleotide: Ptpn6-337
gacaaggagaagagcaa

SEQ ID NO: 4086 - RNA, 17 nt, Artificial Sequence
  Synthetic oligonucleotide: Ptpn6-338
gcaaggguucccucaag

SEQ ID NO: 4087 - RNA, 20 nt, Artificial Sequence
  Synthetic oligonucleotide: Ptpn6-339
cccucuuguucuuagugugc

SEQ ID NO: 4088 - RNA, 20 nt, Artificial Sequence
  Synthetic oligonucleotide: Ptpn6-340
ggacgaggugcgggaggccu

SEQ ID NO: 4089 - RNA, 20 nt, Artificial Sequence
  Synthetic oligonucleotide: Ptpn6-341
aggugcgggaggccuuggca

SEQ ID NO: 4090 - RNA, 20 nt, Artificial Sequence
  Synthetic oligonucleotide: Ptpn6-342
ggugcgggaggccuuggcau

SEQ ID NO: 4091 - RNA, 20 nt, Artificial Sequence
  Synthetic oligonucleotide: Ptpn6-343
cuuggcaugggcauucuuca

SEQ ID NO: 4092 - RNA, 20 nt, Artificial Sequence
  Synthetic oligonucleotide: Ptpn6-344
gcaugggcauucuucauggc

SEQ ID NO: 4093 - RNA, 20 nt, Artificial Sequence
  Synthetic oligonucleotide: Ptpn6-345
caugggcauucuucauggcu

SEQ ID NO: 4094 - RNA, 20 nt, Artificial Sequence
  Synthetic oligonucleotide: Ptpn6-346
augggcauucuucauggcug

SEQ ID NO: 4095 - RNA, 20 nt, Artificial Sequence
  Synthetic oligonucleotide: Ptpn6-347
ugggcauucuucauggcugg

SEQ ID NO: 4096 - RNA, 20 nt, Artificial Sequence
  Synthetic oligonucleotide: Ptpn6-348
auucuucauggcugggggau

SEQ ID NO: 4097 - RNA, 20 nt, Artificial Sequence
  Synthetic oligonucleotide: Ptpn6-349
uguucccguacuccgacucc

SEQ ID NO: 4098 - RNA, 20 nt, Artificial Sequence
  Synthetic oligonucleotide: Ptpn6-350
gaccuccagcuucuucuuag

SEQ ID NO: 4099 - RNA, 20 nt, Artificial Sequence
  Synthetic oligonucleotide: Ptpn6-351
ucuuagugguuucaaugaac

SEQ ID NO: 4100 - RNA, 20 nt, Artificial Sequence
  Synthetic oligonucleotide: Ptpn6-352
cuuagugguuucaaugaacu

SEQ ID NO: 4101 - RNA, 20 nt, Artificial Sequence
  Synthetic oligonucleotide: Ptpn6-353
gguuucaaugaacugggcga

SEQ ID NO: 4102 - RNA, 20 nt, Artificial Sequence
  Synthetic oligonucleotide: Ptpn6-354
agcgcugcgcccgcaccauc

SEQ ID NO: 4103 - RNA, 20 nt, Artificial Sequence
  Synthetic oligonucleotide: Ptpn6-355
cugcgcccgcaccaucugga

SEQ ID NO: 4104 - RNA, 20 nt, Artificial Sequence
  Synthetic oligonucleotide: Ptpn6-356
gcaccaucuggauggucuuc

SEQ ID NO: 4105 - RNA, 20 nt, Artificial Sequence
  Synthetic oligonucleotide: Ptpn6-357
ggaugucaaugucacagucc

SEQ ID NO: 4106 - RNA, 20 nt, Artificial Sequence
  Synthetic oligonucleotide: Ptpn6-358
gagcaugucgaugacaauga

SEQ ID NO: 4107 - RNA, 20 nt, Artificial Sequence
  Synthetic oligonucleotide: Ptpn6-359
ugacaaugauggugccugug

SEQ ID NO: 4108 - RNA, 20 nt, Artificial Sequence
  Synthetic oligonucleotide: Ptpn6-360
ggugccugugcggccgaugc

SEQ ID NO: 4109 - RNA, 20 nt, Artificial Sequence
  Synthetic oligonucleotide: Ptpn6-361
acgaugaugggcccugcgug

SEQ ID NO: 4110 - RNA, 20 nt, Artificial Sequence
  Synthetic oligonucleotide: Ptpn6-362
gaggcagacuuuccugccgc

SEQ ID NO: 4111 - RNA, 20 nt, Artificial Sequence
  Synthetic oligonucleotide: Ptpn6-363
uuuccugccgcugguugauc

SEQ ID NO: 4112 - RNA, 20 nt, Artificial Sequence
  Synthetic oligonucleotide: Ptpn6-364
gccgcugguugaucuggucc

SEQ ID NO: 4113 - RNA, 20 nt, Artificial Sequence
  Synthetic oligonucleotide: Ptpn6-365
ugaucugguccaggaagcug

SEQ ID NO: 4114 - RNA, 20 nt, Artificial Sequence
  Synthetic oligonucleotide: Ptpn6-366
aggaagcugaggacaccccc

SEQ ID NO: 4115 - RNA, 20 nt, Artificial Sequence
  Synthetic oligonucleotide: Ptpn6-367
gaggacacccccaggcucac

SEQ ID NO: 4116 - RNA, 20 nt, Artificial Sequence
  Synthetic oligonucleotide: Ptpn6-368
aggacacccccaggcucacu

SEQ ID NO: 4117 - RNA, 20 nt, Artificial Sequence
  Synthetic oligonucleotide: Ptpn6-369
ggacacccccaggcucacug

SEQ ID NO: 4118 - RNA, 20 nt, Artificial Sequence
  Synthetic oligonucleotide: Ptpn6-370
caggcucacuggggacccca

SEQ ID NO: 4119 - RNA, 20 nt, Artificial Sequence
  Synthetic oligonucleotide: Ptpn6-371
cucacuggggaccccauggu

SEQ ID NO: 4120 - RNA, 20 nt, Artificial Sequence
  Synthetic oligonucleotide: Ptpn6-372
ucacuggggaccccaugguc

SEQ ID NO: 4121 - RNA, 20 nt, Artificial Sequence
  Synthetic oligonucleotide: Ptpn6-373
ccccauggucgggccagcuc

SEQ ID NO: 4122 - RNA, 20 nt, Artificial Sequence
  Synthetic oligonucleotide: Ptpn6-374
ggucgggccagcucagguac

SEQ ID NO: 4123 - RNA, 20 nt, Artificial Sequence
  Synthetic oligonucleotide: Ptpn6-375
aaugccagaucucccgaauc

SEQ ID NO: 4124 - RNA, 20 nt, Artificial Sequence
  Synthetic oligonucleotide: Ptpn6-376
guccagcggggagaccugua

SEQ ID NO: 4125 - RNA, 20 nt, Artificial Sequence
  Synthetic oligonucleotide: Ptpn6-377
gcggggagaccuguaaggua

SEQ ID NO: 4126 - RNA, 20 nt, Artificial Sequence
  Synthetic oligonucleotide: Ptpn6-378
uaagguacggaguuuguauu

SEQ ID NO: 4127 - RNA, 20 nt, Artificial Sequence
  Synthetic oligonucleotide: Ptpn6-379
ugugucaugcuccccgcagu

SEQ ID NO: 4128 - RNA, 20 nt, Artificial Sequence
  Synthetic oligonucleotide: Ptpn6-380
cccgcaguuggucacagagu

SEQ ID NO: 4129 - RNA, 20 nt, Artificial Sequence
  Synthetic oligonucleotide: Ptpn6-381
ccgcaguuggucacagagua

SEQ ID NO: 4130 - RNA, 20 nt, Artificial Sequence
  Synthetic oligonucleotide: Ptpn6-382
agcacgcugcaugcccaccu

SEQ ID NO: 4131 - RNA, 20 nt, Artificial Sequence
  Synthetic oligonucleotide: Ptpn6-383
gcacgcugcaugcccaccuc

SEQ ID NO: 4132 - RNA, 20 nt, Artificial Sequence
  Synthetic oligonucleotide: Ptpn6-384
augcccaccucgggccagua

SEQ ID NO: 4133 - RNA, 20 nt, Artificial Sequence
  Synthetic oligonucleotide: Ptpn6-385
ugcccaccucgggccaguau

SEQ ID NO: 4134 - RNA, 20 nt, Artificial Sequence
  Synthetic oligonucleotide: Ptpn6-386
ccggccuuucuccaccucuc

SEQ ID NO: 4135 - RNA, 20 nt, Artificial Sequence
  Synthetic oligonucleotide: Ptpn6-387
gccuuucuccaccucucggg

SEQ ID NO: 4136 - RNA, 20 nt, Artificial Sequence
  Synthetic oligonucleotide: Ptpn6-388
ggguggucaugacgaugaca

SEQ ID NO: 4137 - RNA, 20 nt, Artificial Sequence
  Synthetic oligonucleotide: Ptpn6-389
cugccagaagucauugaccg

SEQ ID NO: 4138 - RNA, 20 nt, Artificial Sequence
  Synthetic oligonucleotide: Ptpn6-390
ccguggccuccagacaaccc

SEQ ID NO: 4139 - RNA, 20 nt, Artificial Sequence
  Synthetic oligonucleotide: Ptpn6-391
ggccuccagacaacccuggc

SEQ ID NO: 4140 - RNA, 20 nt, Artificial Sequence
  Synthetic oligonucleotide: Ptpn6-392
acaacccuggcuggcgaugu

SEQ ID NO: 4141 - RNA, 20 nt, Artificial Sequence
  Synthetic oligonucleotide: Ptpn6-393
uaggucuuagcguucucauc

SEQ ID NO: 4142 - RNA, 20 nt, Artificial Sequence
  Synthetic oligonucleotide: Ptpn6-394
aggucuuagcguucucauca

SEQ ID NO: 4143 - RNA, 20 nt, Artificial Sequence
  Synthetic oligonucleotide: Ptpn6-395
ucucaucagggccuagcagc

SEQ ID NO: 4144 - RNA, 20 nt, Artificial Sequence
  Synthetic oligonucleotide: Ptpn6-396
guaguuggcauugauguagu

SEQ ID NO: 4145 - RNA, 20 nt, Artificial Sequence
  Synthetic oligonucleotide: Ptpn6-397
ggcauugauguagucggacc

SEQ ID NO: 4146 - RNA, 20 nt, Artificial Sequence
  Synthetic oligonucleotide: Ptpn6-398
gcauugauguagucggaccc

SEQ ID NO: 4147 - RNA, 20 nt, Artificial Sequence
  Synthetic oligonucleotide: Ptpn6-399
cauugauguagucggacccg

SEQ ID NO: 4148 - RNA, 20 nt, Artificial Sequence
  Synthetic oligonucleotide: Ptpn6-400
uguuacugucccgucccugc

SEQ ID NO: 4149 - RNA, 20 nt, Artificial Sequence
  Synthetic oligonucleotide: Ptpn6-401
cccgucccugcaggaucacu

SEQ ID NO: 4150 - RNA, 20 nt, Artificial Sequence
  Synthetic oligonucleotide: Ptpn6-402
ccugcaggaucacucggcug

SEQ ID NO: 4151 - RNA, 20 nt, Artificial Sequence
  Synthetic oligonucleotide: Ptpn6-403
aggggagaauguucuuguag

SEQ ID NO: 4152 - RNA, 20 nt, Artificial Sequence
  Synthetic oligonucleotide: Ptpn6-404
cgguucuugcccuuguucuc

SEQ ID NO: 4153 - RNA, 20 nt, Artificial Sequence
  Synthetic oligonucleotide: Ptpn6-405
gccgcugcccuuccagacgc

SEQ ID NO: 4154 - RNA, 20 nt, Artificial Sequence
  Synthetic oligonucleotide: Ptpn6-406
cuccucccagaagccagccu

SEQ ID NO: 4155 - RNA, 20 nt, Artificial Sequence
  Synthetic oligonucleotide: Ptpn6-407
gccagccuuggcuguauccu

SEQ ID NO: 4156 - RNA, 20 nt, Artificial Sequence
  Synthetic oligonucleotide: Ptpn6-408
ucuuguucaguuccaacacu

SEQ ID NO: 4157 - RNA, 20 nt, Artificial Sequence
  Synthetic oligonucleotide: Ptpn6-409
gucagccgcauucacccucg

SEQ ID NO: 4158 - RNA, 20 nt, Artificial Sequence
  Synthetic oligonucleotide: Ptpn6-410
uucacccucguggcauagua

SEQ ID NO: 4159 - RNA, 20 nt, Artificial Sequence
  Synthetic oligonucleotide: Ptpn6-411
cagguagacaaaggcgccug

SEQ ID NO: 4160 - RNA, 20 nt, Artificial Sequence
  Synthetic oligonucleotide: Ptpn6-412
ucuucuugaaaugcuccacc

SEQ ID NO: 4161 - RNA, 20 nt, Artificial Sequence
  Synthetic oligonucleotide: Ptpn6-413
aaugcuccaccagguccgug

SEQ ID NO: 4162 - RNA, 20 nt, Artificial Sequence
  Synthetic oligonucleotide: Ptpn6-414
cagguccgugaggcugucga

SEQ ID NO: 4163 - RNA, 20 nt, Artificial Sequence
  Synthetic oligonucleotide: Ptpn6-415
  misc_feature (1)..(1): n is a, c, g, or u
ncucgcacaugaccuugaug

SEQ ID NO: 4164 - RNA, 20 nt, Artificial Sequence
  Synthetic oligonucleotide: Ptpn6-416
cucgcacaugaccuugaugu

SEQ ID NO: 4165 - RNA, 20 nt, Artificial Sequence
  Synthetic oligonucleotide: Ptpn6-417
ucgcacaugaccuugaugug

SEQ ID NO: 4166 - RNA, 20 nt, Artificial Sequence
  Synthetic oligonucleotide: Ptpn6-418
cgcacaugaccuugaugugg

SEQ ID NO: 4167 - RNA, 17 nt, Artificial Sequence
  Synthetic oligonucleotide: Ptpn6-419
ucuuguucuuagugugc

SEQ ID NO: 4168 - RNA, 17 nt, Artificial Sequence
  Synthetic oligonucleotide: Ptpn6-420
cgaggugcgggaggccu

SEQ ID NO: 4169 - RNA, 17 nt, Artificial Sequence
  Synthetic oligonucleotide: Ptpn6-421
ugcgggaggccuuggca

SEQ ID NO: 4170 - RNA, 17 nt, Artificial Sequence
  Synthetic oligonucleotide: Ptpn6-422
gcgggaggccuuggcau

SEQ ID NO: 4171 - RNA, 17 nt, Artificial Sequence
  Synthetic oligonucleotide: Ptpn6-423
ggcaugggcauucuuca

SEQ ID NO: 4172 - RNA, 17 nt, Artificial Sequence
  Synthetic oligonucleotide: Ptpn6-424
ugggcauucuucauggc

SEQ ID NO: 4173 - RNA, 17 nt, Artificial Sequence
  Synthetic oligonucleotide: Ptpn6-425
gggcauucuucauggcu

SEQ ID NO: 4174 - RNA, 17 nt, Artificial Sequence
  Synthetic oligonucleotide: Ptpn6-426
ggcauucuucauggcug

SEQ ID NO: 4175 - RNA, 17 nt, Artificial Sequence
  Synthetic oligonucleotide: Ptpn6-427
gcauucuucauggcugg

SEQ ID NO: 4176 - RNA, 17 nt, Artificial Sequence
  Synthetic oligonucleotide: Ptpn6-428
cuucauggcugggggau

SEQ ID NO: 4177 - RNA, 17 nt, Artificial Sequence
  Synthetic oligonucleotide: Ptpn6-429
ucccguacuccgacucc

SEQ ID NO: 4178 - RNA, 17 nt, Artificial Sequence
  Synthetic oligonucleotide: Ptpn6-430
cuccagcuucuucuuag

SEQ ID NO: 4179 - RNA, 17 nt, Artificial Sequence
  Synthetic oligonucleotide: Ptpn6-431
uagugguuucaaugaac

SEQ ID NO: 4180 - RNA, 17 nt, Artificial Sequence
  Synthetic oligonucleotide: Ptpn6-432
agugguuucaaugaacu

SEQ ID NO: 4181 - RNA, 17 nt, Artificial Sequence
  Synthetic oligonucleotide: Ptpn6-433
uucaaugaacugggcga

SEQ ID NO: 4182 - RNA, 17 nt, Artificial Sequence
  Synthetic oligonucleotide: Ptpn6-434
gcugcgcccgcaccauc

SEQ ID NO: 4183 - RNA, 17 nt, Artificial Sequence
  Synthetic oligonucleotide: Ptpn6-435
cgcccgcaccaucugga

SEQ ID NO: 4184 - RNA, 17 nt, Artificial Sequence
  Synthetic oligonucleotide: Ptpn6-436
ccaucuggauggucuuc

SEQ ID NO: 4185 - RNA, 17 nt, Artificial Sequence
  Synthetic oligonucleotide: Ptpn6-437
ugucaaugucacagucc

SEQ ID NO: 4186 - RNA, 17 nt, Artificial Sequence
  Synthetic oligonucleotide: Ptpn6-438
caugucgaugacaauga

SEQ ID NO: 4187 - RNA, 17 nt, Artificial Sequence
  Synthetic oligonucleotide: Ptpn6-439
caaugauggugccugug

SEQ ID NO: 4188 - RNA, 17 nt, Artificial Sequence
  Synthetic oligonucleotide: Ptpn6-440
gccugugcggccgaugc

SEQ ID NO: 4189 - RNA, 17 nt, Artificial Sequence
  Synthetic oligonucleotide: Ptpn6-441
  misc_feature (1)..(1): n is a, c, g, or u
ncugcagugcacgauga

SEQ ID NO: 4190 - RNA, 17 nt, Artificial Sequence
  Synthetic oligonucleotide: Ptpn6-442
cugcagugcacgaugau

SEQ ID NO: 4191 - RNA, 17 nt, Artificial Sequence
  Synthetic oligonucleotide: Ptpn6-443
augaugggcccugcgug

SEQ ID NO: 4192 - RNA, 17 nt, Artificial Sequence
  Synthetic oligonucleotide: Ptpn6-444
gcagacuuuccugccgc

SEQ ID NO: 4193 - RNA, 17 nt, Artificial Sequence
  Synthetic oligonucleotide: Ptpn6-445
ccugccgcugguugauc

SEQ ID NO: 4194 - RNA, 17 nt, Artificial Sequence
  Synthetic oligonucleotide: Ptpn6-446
gcugguugaucuggucc

SEQ ID NO: 4195 - RNA, 17 nt, Artificial Sequence
  Synthetic oligonucleotide: Ptpn6-447
ucugguccaggaagcug

SEQ ID NO: 4196 - RNA, 17 nt, Artificial Sequence
  Synthetic oligonucleotide: Ptpn6-448
aagcugaggacaccccc

SEQ ID NO: 4197 - RNA, 17 nt, Artificial Sequence
  Synthetic oligonucleotide: Ptpn6-449
gacacccccaggcucac

SEQ ID NO: 4198 - RNA, 17 nt, Artificial Sequence
  Synthetic oligonucleotide: Ptpn6-450
acacccccaggcucacu

SEQ ID NO: 4199 - RNA, 17 nt, Artificial Sequence
  Synthetic oligonucleotide: Ptpn6-451
cacccccaggcucacug

SEQ ID NO: 4200 - RNA, 17 nt, Artificial Sequence
  Synthetic oligonucleotide: Ptpn6-452
gcucacuggggacccca

SEQ ID NO: 4201 - RNA, 17 nt, Artificial Sequence
  Synthetic oligonucleotide: Ptpn6-453
acuggggaccccauggu

SEQ ID NO: 4202 - RNA, 17 nt, Artificial Sequence
  Synthetic oligonucleotide: Ptpn6-454
cuggggaccccaugguc

SEQ ID NO: 4203 - RNA, 17 nt, Artificial Sequence
  Synthetic oligonucleotide: Ptpn6-455
cauggucgggccagcuc

SEQ ID NO: 4204 - RNA, 17 nt, Artificial Sequence
  Synthetic oligonucleotide: Ptpn6-456
cgggccagcucagguac

SEQ ID NO: 4205 - RNA, 17 nt, Artificial Sequence
  Synthetic oligonucleotide: Ptpn6-457
gccagaucucccgaauc

SEQ ID NO: 4206 - RNA, 17 nt, Artificial Sequence
  Synthetic oligonucleotide: Ptpn6-458
cagcggggagaccugua

SEQ ID NO: 4207 - RNA, 17 nt, Artificial Sequence
  Synthetic oligonucleotide: Ptpn6-459
gggagaccuguaaggua

SEQ ID NO: 4208 - RNA, 17 nt, Artificial Sequence
  Synthetic oligonucleotide: Ptpn6-460
gguacggaguuuguauu

SEQ ID NO: 4209 - RNA, 17 nt, Artificial Sequence
  Synthetic oligonucleotide: Ptpn6-461
gucaugcuccccgcagu

SEQ ID NO: 4210 - RNA, 17 nt, Artificial Sequence
  Synthetic oligonucleotide: Ptpn6-462
gcaguuggucacagagu

SEQ ID NO: 4211 - RNA, 17 nt, Artificial Sequence
  Synthetic oligonucleotide: Ptpn6-463
caguuggucacagagua

SEQ ID NO: 4212 - RNA, 17 nt, Artificial Sequence
  Synthetic oligonucleotide: Ptpn6-464
acgcugcaugcccaccu

SEQ ID NO: 4213 - RNA, 17 nt, Artificial Sequence
  Synthetic oligonucleotide: Ptpn6-465
cgcugcaugcccaccuc

SEQ ID NO: 4214 - RNA, 17 nt, Artificial Sequence
  Synthetic oligonucleotide: Ptpn6-466
cccaccucgggccagua

SEQ ID NO: 4215 - RNA, 17 nt, Artificial Sequence
  Synthetic oligonucleotide: Ptpn6-467
ccaccucgggccaguau

SEQ ID NO: 4216 - RNA, 17 nt, Artificial Sequence
  Synthetic oligonucleotide: Ptpn6-468
ggccuuucuccaccucu

SEQ ID NO: 4217 - RNA, 17 nt, Artificial Sequence
  Synthetic oligonucleotide: Ptpn6-469
gccuuucuccaccucuc

SEQ ID NO: 4218 - RNA, 17 nt, Artificial Sequence
  Synthetic oligonucleotide: Ptpn6-470
uuucuccaccucucggg

SEQ ID NO: 4219 - RNA, 17 nt, Artificial Sequence
  Synthetic oligonucleotide: Ptpn6-471
uggucaugacgaugaca

SEQ ID NO: 4220 - RNA, 17 nt, Artificial Sequence
  Synthetic oligonucleotide: Ptpn6-472
ccagaagucauugaccg

SEQ ID NO: 4221 - RNA, 17 nt, Artificial Sequence
  Synthetic oligonucleotide: Ptpn6-473
uggccuccagacaaccc

SEQ ID NO: 4222 - RNA, 17 nt, Artificial Sequence
  Synthetic oligonucleotide: Ptpn6-474
cuccagacaacccuggc

SEQ ID NO: 4223 - RNA, 17 nt, Artificial Sequence
  Synthetic oligonucleotide: Ptpn6-475
acccuggcuggcgaugu

SEQ ID NO: 4224 - RNA, 17 nt, Artificial Sequence
  Synthetic oligonucleotide: Ptpn6-476
gucuuagcguucucauc

SEQ ID NO: 4225 - RNA, 17 nt, Artificial Sequence
  Synthetic oligonucleotide: Ptpn6-477
ucuuagcguucucauca

SEQ ID NO: 4226 - RNA, 17 nt, Artificial Sequence
  Synthetic oligonucleotide: Ptpn6-478
caucagggccuagcagc

SEQ ID NO: 4227 - RNA, 17 nt, Artificial Sequence
  Synthetic oligonucleotide: Ptpn6-479
guuggcauugauguagu

SEQ ID NO: 4228 - RNA, 17 nt, Artificial Sequence
  Synthetic oligonucleotide: Ptpn6-480
auugauguagucggacc

SEQ ID NO: 4229 - RNA, 17 nt, Artificial Sequence
  Synthetic oligonucleotide: Ptpn6-481
uugauguagucggaccc

SEQ ID NO: 4230 - RNA, 17 nt, Artificial Sequence
  Synthetic oligonucleotide: Ptpn6-482
ugauguagucggacccg

SEQ ID NO: 4231 - RNA, 17 nt, Artificial Sequence
  Synthetic oligonucleotide: Ptpn6-483
uacugucccgucccugc

SEQ ID NO: 4232 - RNA, 17 nt, Artificial Sequence
  Synthetic oligonucleotide: Ptpn6-484
gucccugcaggaucacu

SEQ ID NO: 4233 - RNA, 17 nt, Artificial Sequence
  Synthetic oligonucleotide: Ptpn6-485
gcaggaucacucggcug

SEQ ID NO: 4234 - RNA, 17 nt, Artificial Sequence
  Synthetic oligonucleotide: Ptpn6-486
ggagaauguucuuguag

SEQ ID NO: 4235 - RNA, 17 nt, Artificial Sequence
  Synthetic oligonucleotide: Ptpn6-487
uucuugcccuuguucuc

SEQ ID NO: 4236 - RNA, 17 nt, Artificial Sequence
  Synthetic oligonucleotide: Ptpn6-488
gcugcccuuccagacgc

SEQ ID NO: 4237 - RNA, 17 nt, Artificial Sequence
  Synthetic oligonucleotide: Ptpn6-489
cucccagaagccagccu

SEQ ID NO: 4238 - RNA, 17 nt, Artificial Sequence
  Synthetic oligonucleotide: Ptpn6-490
agccuuggcuguauccu

SEQ ID NO: 4239 - RNA, 17 nt, Artificial Sequence
  Synthetic oligonucleotide: Ptpn6-491
uguucaguuccaacacu

SEQ ID NO: 4240 - RNA, 17 nt, Artificial Sequence
  Synthetic oligonucleotide: Ptpn6-492
agccgcauucacccucg

SEQ ID NO: 4241 - RNA, 17 nt, Artificial Sequence
  Synthetic oligonucleotide: Ptpn6-493
acccucguggcauagua

SEQ ID NO: 4242 - RNA, 17 nt, Artificial Sequence
  Synthetic oligonucleotide: Ptpn6-494
cugccgcagguagacaa

SEQ ID NO: 4243 - RNA, 17 nt, Artificial Sequence
  Synthetic oligonucleotide: Ptpn6-495
guagacaaaggcgccug

SEQ ID NO: 4244 - RNA, 17 nt, Artificial Sequence
  Synthetic oligonucleotide: Ptpn6-496
ucuugaaaugcuccacc

SEQ ID NO: 4245 - RNA, 17 nt, Artificial Sequence
  Synthetic oligonucleotide: Ptpn6-497
gcuccaccagguccgug

SEQ ID NO: 4246 - RNA, 17 nt, Artificial Sequence
  Synthetic oligonucleotide: Ptpn6-498
guccgugaggcugucga

SEQ ID NO: 4247 - RNA, 17 nt, Artificial Sequence
  Synthetic oligonucleotide: Ptpn6-499
cgcacaugaccuugaug

SEQ ID NO: 4248 - RNA, 17 nt, Artificial Sequence
  Synthetic oligonucleotide: Ptpn6-500
gcacaugaccuugaugu

SEQ ID NO: 4249 - RNA, 17 nt, Artificial Sequence
  Synthetic oligonucleotide: Ptpn6-501
cacaugaccuugaugug

SEQ ID NO: 4250 - RNA, 17 nt, Artificial Sequence
  Synthetic oligonucleotide: Ptpn6-502
acaugaccuugaugugg

SEQ ID NO: 4251 - RNA, 20 nt, Artificial Sequence
  Synthetic oligonucleotide: Ptpn6-503
ggggaucaggugacccauau

SEQ ID NO: 4252 - RNA, 20 nt, Artificial Sequence
  Synthetic oligonucleotide: Ptpn6-504
gugguuucaccgagaccuca

SEQ ID NO: 4253 - RNA, 20 nt, Artificial Sequence
  Synthetic oligonucleotide: Ptpn6-505
uucaccgagaccucaguggg

SEQ ID NO: 4254 - RNA, 20 nt, Artificial Sequence
  Synthetic oligonucleotide: Ptpn6-506
agaccucagugggcuggaug

SEQ ID NO: 4255 - RNA, 20 nt, Artificial Sequence
  Synthetic oligonucleotide: Ptpn6-507
uggaugcagagacccugcuc

SEQ ID NO: 4256 - RNA, 20 nt, Artificial Sequence
  Synthetic oligonucleotide: Ptpn6-508
gcagagacccugcucaaggg

SEQ ID NO: 4257 - RNA, 20 nt, Artificial Sequence
  Synthetic oligonucleotide: Ptpn6-509
uccuggcucggcccagucgc

SEQ ID NO: 4258 - RNA, 20 nt, Artificial Sequence
  Synthetic oligonucleotide: Ptpn6-510
cucggcccagucgcaagaac

SEQ ID NO: 4259 - RNA, 20 nt, Artificial Sequence
  Synthetic oligonucleotide: Ptpn6-511
aggugacccauauucggauc

SEQ ID NO: 4260 - RNA, 20 nt, Artificial Sequence
  Synthetic oligonucleotide: Ptpn6-512
ccauauucggauccagaacu

SEQ ID NO: 4261 - RNA, 20 nt, Artificial Sequence
  Synthetic oligonucleotide: Ptpn6-95
cauauucggauccagaacuc

SEQ ID NO: 4262 - RNA, 20 nt, Artificial Sequence
  Synthetic oligonucleotide: Ptpn6-96
auauucggauccagaacuca

SEQ ID NO: 4263 - RNA, 20 nt, Artificial Sequence
  Synthetic oligonucleotide: Ptpn6-515
aggggauuucuaugaccugu

SEQ ID NO: 4264 - RNA, 20 nt, Artificial Sequence
  Synthetic oligonucleotide: Ptpn6-59
ggggauuucuaugaccugua

SEQ ID NO: 4265 - RNA, 20 nt, Artificial Sequence
  Synthetic oligonucleotide: Ptpn6-517
ggauuucuaugaccuguaug

SEQ ID NO: 4266 - RNA, 20 nt, Artificial Sequence
  Synthetic oligonucleotide: Ptpn6-63
gauuucuaugaccuguaugg

SEQ ID NO: 4267 - RNA, 20 nt, Artificial Sequence
  Synthetic oligonucleotide: Ptpn6-98
auuucuaugaccuguaugga

SEQ ID NO: 4268 - RNA, 20 nt, Artificial Sequence
  Synthetic oligonucleotide: Ptpn6-99
uuucuaugaccuguauggag

SEQ ID NO: 4269 - RNA, 20 nt, Artificial Sequence
  Synthetic oligonucleotide: Ptpn6-521
ucuaugaccuguauggaggg

SEQ ID NO: 4270 - RNA, 20 nt, Artificial Sequence
  Synthetic oligonucleotide: Ptpn6-522
ggagaaguuugcgacucuga

SEQ ID NO: 4271 - RNA, 20 nt, Artificial Sequence
  Synthetic oligonucleotide: Ptpn6-523
uugcgacucugacagagcug

SEQ ID NO: 4272 - RNA, 20 nt, Artificial Sequence
  Synthetic oligonucleotide: Ptpn6-100
ugcgacucugacagagcugg

SEQ ID NO: 4273 - RNA, 20 nt, Artificial Sequence
  Synthetic oligonucleotide: Ptpn6-525
uggaguacuacacucagcag

SEQ ID NO: 4274 - RNA, 20 nt, Artificial Sequence
  Synthetic oligonucleotide: Ptpn6-526
cucagcagcaggguguccug

SEQ ID NO: 4275 - RNA, 20 nt, Artificial Sequence
  Synthetic oligonucleotide: Ptpn6-527
ucauccaccucaaguacccg

SEQ ID NO: 4276 - RNA, 20 nt, Artificial Sequence
  Synthetic oligonucleotide: Ptpn6-528
gaacugcuccgaucccacua

SEQ ID NO: 4277 - RNA, 20 nt, Artificial Sequence
  Synthetic oligonucleotide: Ptpn6-529
acugcuccgaucccacuagu

SEQ ID NO: 4278 - RNA, 20 nt, Artificial Sequence
  Synthetic oligonucleotide: Ptpn6-530
guaccauggccacaugucug

SEQ ID NO: 4279 - RNA, 20 nt, Artificial Sequence
  Synthetic oligonucleotide: Ptpn6-531
ccacaugucuggcgggcagg

SEQ ID NO: 4280 - RNA, 20 nt, Artificial Sequence
  Synthetic oligonucleotide: Ptpn6-532
cagagacgcugcugcaggcc

SEQ ID NO: 4281 - RNA, 20 nt, Artificial Sequence
  Synthetic oligonucleotide: Ptpn6-533
gacgcugcugcaggccaagg

SEQ ID NO: 4282 - RNA, 20 nt, Artificial Sequence
  Synthetic oligonucleotide: Ptpn6-534
cugcaggccaagggcgagcc

SEQ ID NO: 4283 - RNA, 20 nt, Artificial Sequence
  Synthetic oligonucleotide: Ptpn6-535
gcccuggacguuucuugugc

SEQ ID NO: 4284 - RNA, 20 nt, Artificial Sequence
  Synthetic oligonucleotide: Ptpn6-536
ccuggacguuucuugugcgu

SEQ ID NO: 4285 - RNA, 20 nt, Artificial Sequence
  Synthetic oligonucleotide: Ptpn6-537
gcgugagagccucagccagc

SEQ ID NO: 4286 - RNA, 20 nt, Artificial Sequence
  Synthetic oligonucleotide: Ptpn6-107
cgugagagccucagccagcc

SEQ ID NO: 4287 - RNA, 20 nt, Artificial Sequence
  Synthetic oligonucleotide: Ptpn6-539
gcuggcccaggcuccccgcu

SEQ ID NO: 4288 - RNA, 17 nt, Artificial Sequence
  Synthetic oligonucleotide: Ptpn6-540
gaucaggugacccauau

SEQ ID NO: 4289 - RNA, 17 nt, Artificial Sequence
  Synthetic oligonucleotide: Ptpn6-541
guuucaccgagaccuca

SEQ ID NO: 4290 - RNA, 17 nt, Artificial Sequence
  Synthetic oligonucleotide: Ptpn6-542
accgagaccucaguggg

SEQ ID NO: 4291 - RNA, 17 nt, Artificial Sequence
  Synthetic oligonucleotide: Ptpn6-543
ccucagugggcuggaug

SEQ ID NO: 4292 - RNA, 17 nt, Artificial Sequence
  Synthetic oligonucleotide: Ptpn6-544
augcagagacccugcuc

SEQ ID NO: 4293 - RNA, 17 nt, Artificial Sequence
  Synthetic oligonucleotide: Ptpn6-545
gagacccugcucaaggg

SEQ ID NO: 4294 - RNA, 17 nt, Artificial Sequence
  Synthetic oligonucleotide: Ptpn6-546
uggcucggcccagucgc

SEQ ID NO: 4295 - RNA, 17 nt, Artificial Sequence
  Synthetic oligonucleotide: Ptpn6-547
ggcccagucgcaagaac

SEQ ID NO: 4296 - RNA, 17 nt, Artificial Sequence
  Synthetic oligonucleotide: Ptpn6-548
ugacccauauucggauc

SEQ ID NO: 4297 - RNA, 17 nt, Artificial Sequence
  Synthetic oligonucleotide: Ptpn6-549
uauucggauccagaacu

SEQ ID NO: 4298 - RNA, 17 nt, Artificial Sequence
  Synthetic oligonucleotide: Ptpn6-36
auucggauccagaacuc

SEQ ID NO: 4299 - RNA, 17 nt, Artificial Sequence
  Synthetic oligonucleotide: Ptpn6-37
uucggauccagaacuca

SEQ ID NO: 4300 - RNA, 17 nt, Artificial Sequence
  Synthetic oligonucleotide: Ptpn6-552
ggauuucuaugaccugu

SEQ ID NO: 4301 - RNA, 17 nt, Artificial Sequence
  Synthetic oligonucleotide: Ptpn6-77
gauuucuaugaccugua

SEQ ID NO: 4302 - RNA, 17 nt, Artificial Sequence
  Synthetic oligonucleotide: Ptpn6-554
uuucuaugaccuguaug

SEQ ID NO: 4303 - RNA, 17 nt, Artificial Sequence
  Synthetic oligonucleotide: Ptpn6-39
uucuaugaccuguaugg

SEQ ID NO: 4304 - RNA, 17 nt, Artificial Sequence
  Synthetic oligonucleotide: Ptpn6-40
ucuaugaccuguaugga

SEQ ID NO: 4305 - RNA, 17 nt, Artificial Sequence
  Synthetic oligonucleotide: Ptpn6-41
cuaugaccuguauggag

SEQ ID NO: 4306 - RNA, 17 nt, Artificial Sequence
  Synthetic oligonucleotide: Ptpn6-558
augaccuguauggaggg

SEQ ID NO: 4307 - RNA, 17 nt, Artificial Sequence
  Synthetic oligonucleotide: Ptpn6-559
gaaguuugcgacucuga

SEQ ID NO: 4308 - RNA, 17 nt, Artificial Sequence
  Synthetic oligonucleotide: Ptpn6-560
cgacucugacagagcug

SEQ ID NO: 4309 - RNA, 17 nt, Artificial Sequence
  Synthetic oligonucleotide: Ptpn6-78
gacucugacagagcugg

SEQ ID NO: 4310 - RNA, 17 nt, Artificial Sequence
  Synthetic oligonucleotide: Ptpn6-562
aguacuacacucagcag

SEQ ID NO: 4311 - RNA, 17 nt, Artificial Sequence
  Synthetic oligonucleotide: Ptpn6-563
agcagcaggguguccug

SEQ ID NO: 4312 - RNA, 17 nt, Artificial Sequence
  Synthetic oligonucleotide: Ptpn6-564
uccaccucaaguacccg

SEQ ID NO: 4313 - RNA, 17 nt, Artificial Sequence
  Synthetic oligonucleotide: Ptpn6-565
cugcuccgaucccacua

SEQ ID NO: 4314 - RNA, 17 nt, Artificial Sequence
  Synthetic oligonucleotide: Ptpn6-566
gcuccgaucccacuagu

SEQ ID NO: 4315 - RNA, 17 nt, Artificial Sequence
  Synthetic oligonucleotide: Ptpn6-567
ccauggccacaugucug

SEQ ID NO: 4316 - RNA, 17 nt, Artificial Sequence
  Synthetic oligonucleotide: Ptpn6-568
caugucuggcgggcagg

SEQ ID NO: 4317 - RNA, 17 nt, Artificial Sequence
  Synthetic oligonucleotide: Ptpn6-569
agacgcugcugcaggcc

SEQ ID NO: 4318 - RNA, 17 nt, Artificial Sequence
  Synthetic oligonucleotide: Ptpn6-570
gcugcugcaggccaagg

SEQ ID NO: 4319 - RNA, 17 nt, Artificial Sequence
  Synthetic oligonucleotide: Ptpn6-571
caggccaagggcgagcc

SEQ ID NO: 4320 - RNA, 17 nt, Artificial Sequence
  Synthetic oligonucleotide: Ptpn6-572
cuggacguuucuugugc

SEQ ID NO: 4321 - RNA, 17 nt, Artificial Sequence
  Synthetic oligonucleotide: Ptpn6-573
ggacguuucuugugcgu

SEQ ID NO: 4322 - RNA, 17 nt, Artificial Sequence
  Synthetic oligonucleotide: Ptpn6-574
ugagagccucagccagc

SEQ ID NO: 4323 - RNA, 17 nt, Artificial Sequence
  Synthetic oligonucleotide: Ptpn6-83
gagagccucagccagcc

SEQ ID NO: 4324 - RNA, 17 nt, Artificial Sequence
  Synthetic oligonucleotide: Ptpn6-576
ggcccaggcuccccgcu

SEQ ID NO: 4325 - RNA, 20 nt, Artificial Sequence
  Synthetic oligonucleotide: Ptpn6-577
gcggggagccugggccagcc

SEQ ID NO: 4326 - RNA, 20 nt, Artificial Sequence
  Synthetic oligonucleotide: Ptpn6-578
ggccagccuugggcugguca

SEQ ID NO: 4327 - RNA, 20 nt, Artificial Sequence
  Synthetic oligonucleotide: Ptpn6-579
cuugggcuggucacugagca

SEQ ID NO: 4328 - RNA, 20 nt, Artificial Sequence
  Synthetic oligonucleotide: Ptpn6-580
ggucacugagcacagaaagc

SEQ ID NO: 4329 - RNA, 20 nt, Artificial Sequence
  Synthetic oligonucleotide: Ptpn6-581
gcacgaagucuccaggcugg

SEQ ID NO: 4330 - RNA, 20 nt, Artificial Sequence
  Synthetic oligonucleotide: Ptpn6-582
uggcugaggcucucacgcac

SEQ ID NO: 4331 - RNA, 20 nt, Artificial Sequence
  Synthetic oligonucleotide: Ptpn6-583
ucucacgcacaagaaacguc

SEQ ID NO: 4332 - RNA, 20 nt, Artificial Sequence
  Synthetic oligonucleotide: Ptpn6-584
agugggaucggagcaguuca

SEQ ID NO: 4333 - RNA, 20 nt, Artificial Sequence
  Synthetic oligonucleotide: Ptpn6-585
cggagcaguucagcggguac

SEQ ID NO: 4334 - RNA, 20 nt, Artificial Sequence
  Synthetic oligonucleotide: Ptpn6-586
caguucagcggguacuugag

SEQ ID NO: 4335 - RNA, 20 nt, Artificial Sequence
  Synthetic oligonucleotide: Ptpn6-587
auggugccgucgcgguccug

SEQ ID NO: 4336 - RNA, 20 nt, Artificial Sequence
  Synthetic oligonucleotide: Ptpn6-588
uccugcaggacacccugcug

SEQ ID NO: 4337 - RNA, 20 nt, Artificial Sequence
  Synthetic oligonucleotide: Ptpn6-589
uaguacuccaccagcucugu

SEQ ID NO: 4338 - RNA, 20 nt, Artificial Sequence
  Synthetic oligonucleotide: Ptpn6-590
ucuccccuccauacagguca

SEQ ID NO: 4339 - RNA, 20 nt, Artificial Sequence
  Synthetic oligonucleotide: Ptpn6-591
auacaggucauagaaauccc

SEQ ID NO: 4340 - RNA, 20 nt, Artificial Sequence
  Synthetic oligonucleotide: Ptpn6-592
ucauagaaauccccugaguu

SEQ ID NO: 4341 - RNA, 20 nt, Artificial Sequence
  Synthetic oligonucleotide: Ptpn6-593
aaauccccugaguucuggau

SEQ ID NO: 4342 - RNA, 20 nt, Artificial Sequence
  Synthetic oligonucleotide: Ptpn6-594
ccugaguucuggauccgaau

SEQ ID NO: 4343 - RNA, 20 nt, Artificial Sequence
  Synthetic oligonucleotide: Ptpn6-595
agucacccugguucuugcga

SEQ ID NO: 4344 - RNA, 20 nt, Artificial Sequence
  Synthetic oligonucleotide: Ptpn6-596
cccugguucuugcgacuggg

SEQ ID NO: 4345 - RNA, 20 nt, Artificial Sequence
  Synthetic oligonucleotide: Ptpn6-597
uucuugcgacugggccgagc

SEQ ID NO: 4346 - RNA, 20 nt, Artificial Sequence
  Synthetic oligonucleotide: Ptpn6-28
ucuugcgacugggccgagcc

SEQ ID NO: 4347 - RNA, 20 nt, Artificial Sequence
  Synthetic oligonucleotide: Ptpn6-599
ggccgagccaggaagcuacc

SEQ ID NO: 4348 - RNA, 20 nt, Artificial Sequence
  Synthetic oligonucleotide: Ptpn6-600
uaccguggacaccucggccc

SEQ ID NO: 4349 - RNA, 20 nt, Artificial Sequence
  Synthetic oligonucleotide: Ptpn6-601
uggacaccucggcccuugag

SEQ ID NO: 4350 - RNA, 20 nt, Artificial Sequence
  Synthetic oligonucleotide: Ptpn6-602
gggucucugcauccagccca

SEQ ID NO: 4351 - RNA, 20 nt, Artificial Sequence
  Synthetic oligonucleotide: Ptpn6-603
uccagcccacugaggucucg

SEQ ID NO: 4352 - RNA, 17 nt, Artificial Sequence
  Synthetic oligonucleotide: Ptpn6-604
gggagccugggccagcc

SEQ ID NO: 4353 - RNA, 17 nt, Artificial Sequence
  Synthetic oligonucleotide: Ptpn6-605
cagccuugggcugguca

SEQ ID NO: 4354 - RNA, 17 nt, Artificial Sequence
  Synthetic oligonucleotide: Ptpn6-606
gggcuggucacugagca

SEQ ID NO: 4355 - RNA, 17 nt, Artificial Sequence
  Synthetic oligonucleotide: Ptpn6-607
cacugagcacagaaagc

SEQ ID NO: 4356 - RNA, 17 nt, Artificial Sequence
  Synthetic oligonucleotide: Ptpn6-608
cgaagucuccaggcugg

SEQ ID NO: 4357 - RNA, 17 nt, Artificial Sequence
  Synthetic oligonucleotide: Ptpn6-609
cugaggcucucacgcac

SEQ ID NO: 4358 - RNA, 17 nt, Artificial Sequence
  Synthetic oligonucleotide: Ptpn6-610
cacgcacaagaaacguc

SEQ ID NO: 4359 - RNA, 17 nt, Artificial Sequence
  Synthetic oligonucleotide: Ptpn6-611
gggaucggagcaguuca

SEQ ID NO: 4360 - RNA, 17 nt, Artificial Sequence
  Synthetic oligonucleotide: Ptpn6-612
agcaguucagcggguac

SEQ ID NO: 4361 - RNA, 17 nt, Artificial Sequence
  Synthetic oligonucleotide: Ptpn6-613
uucagcggguacuugag

SEQ ID NO: 4362 - RNA, 17 nt, Artificial Sequence
  Synthetic oligonucleotide: Ptpn6-614
gugccgucgcgguccug

SEQ ID NO: 4363 - RNA, 17 nt, Artificial Sequence
  Synthetic oligonucleotide: Ptpn6-615
ugcaggacacccugcug

SEQ ID NO: 4364 - RNA, 17 nt, Artificial Sequence
  Synthetic oligonucleotide: Ptpn6-616
uacuccaccagcucugu

SEQ ID NO: 4365 - RNA, 17 nt, Artificial Sequence
  Synthetic oligonucleotide: Ptpn6-617
ccccuccauacagguca

SEQ ID NO: 4366 - RNA, 17 nt, Artificial Sequence
  Synthetic oligonucleotide: Ptpn6-618
caggucauagaaauccc

SEQ ID NO: 4367 - RNA, 17 nt, Artificial Sequence
  Synthetic oligonucleotide: Ptpn6-619
uagaaauccccugaguu

SEQ ID NO: 4368 - RNA, 17 nt, Artificial Sequence
  Synthetic oligonucleotide: Ptpn6-620
uccccugaguucuggau

SEQ ID NO: 4369 - RNA, 17 nt, Artificial Sequence
  Synthetic oligonucleotide: Ptpn6-621
gaguucuggauccgaau

SEQ ID NO: 4370 - RNA, 17 nt, Artificial Sequence
  Synthetic oligonucleotide: Ptpn6-622
cacccugguucuugcga

SEQ ID NO: 4371 - RNA, 17 nt, Artificial Sequence
  Synthetic oligonucleotide: Ptpn6-623
ugguucuugcgacuggg

SEQ ID NO: 4372 - RNA, 17 nt, Artificial Sequence
  Synthetic oligonucleotide: Ptpn6-624
uugcgacugggccgagc

SEQ ID NO: 4373 - RNA, 17 nt, Artificial Sequence
  Synthetic oligonucleotide: Ptpn6-55
ugcgacugggccgagcc

SEQ ID NO: 4374 - RNA, 17 nt, Artificial Sequence
  Synthetic oligonucleotide: Ptpn6-626
cgagccaggaagcuacc

SEQ ID NO: 4375 - RNA, 17 nt, Artificial Sequence
  Synthetic oligonucleotide: Ptpn6-627
cguggacaccucggccc

SEQ ID NO: 4376 - RNA, 17 nt, Artificial Sequence
  Synthetic oligonucleotide: Ptpn6-628
acaccucggcccuugag

SEQ ID NO: 4377 - RNA, 17 nt, Artificial Sequence
  Synthetic oligonucleotide: Ptpn6-629
ucucugcauccagccca

SEQ ID NO: 4378 - RNA, 17 nt, Artificial Sequence
  Synthetic oligonucleotide: Ptpn6-630
agcccacugaggucucg

SEQ ID NO: 4379 - RNA, 20 nt, Artificial Sequence
  Synthetic oligonucleotide: Ptpn6-631
uggagaccuucgacagccuc

SEQ ID NO: 4380 - RNA, 20 nt, Artificial Sequence
  Synthetic oligonucleotide: Ptpn6-632
auuucaagaagacggggauu

SEQ ID NO: 4381 - RNA, 20 nt, Artificial Sequence
  Synthetic oligonucleotide: Ptpn6-155
uuucaagaagacggggauug

SEQ ID NO: 4382 - RNA, 20 nt, Artificial Sequence
  Synthetic oligonucleotide: Ptpn6-634
gacgcuacacaguggguggu

SEQ ID NO: 4383 - RNA, 20 nt, Artificial Sequence
  Synthetic oligonucleotide: Ptpn6-148
acgcuacacagugggugguu

SEQ ID NO: 4384 - RNA, 20 nt, Artificial Sequence
  Synthetic oligonucleotide: Ptpn6-636
ucgacagccucacggaccug

SEQ ID NO: 4385 - RNA, 20 nt, Artificial Sequence
  Synthetic oligonucleotide: Ptpn6-151
cgacagccucacggaccugg

SEQ ID NO: 4386 - RNA, 20 nt, Artificial Sequence
  Synthetic oligonucleotide: Ptpn6-638
cggaccugguggagcauuuc

SEQ ID NO: 4387 - RNA, 20 nt, Artificial Sequence
  Synthetic oligonucleotide: Ptpn6-639
ugguggagcauuucaagaag

SEQ ID NO: 4388 - RNA, 20 nt, Artificial Sequence
  Synthetic oligonucleotide: Ptpn6-152
gguggagcauuucaagaaga

SEQ ID NO: 4389 - RNA, 20 nt, Artificial Sequence
  Synthetic oligonucleotide: Ptpn6-153
guggagcauuucaagaagac

SEQ ID NO: 4390 - RNA, 20 nt, Artificial Sequence
  Synthetic oligonucleotide: Ptpn6-642
gcauuucaagaagacgggga

SEQ ID NO: 4391 - RNA, 20 nt, Artificial Sequence
  Synthetic oligonucleotide: Ptpn6-643
gagggugaaugcggcugaca

SEQ ID NO: 4392 - RNA, 20 nt, Artificial Sequence
  Synthetic oligonucleotide: Ptpn6-644
gggugaaugcggcugacauu

SEQ ID NO: 4393 - RNA, 20 nt, Artificial Sequence
  Synthetic oligonucleotide: Ptpn6-645
aaugcggcugacauugagaa

SEQ ID NO: 4394 - RNA, 20 nt, Artificial Sequence
  Synthetic oligonucleotide: Ptpn6-646
cugacauugagaaccgagug

SEQ ID NO: 4395 - RNA, 20 nt, Artificial Sequence
  Synthetic oligonucleotide: Ptpn6-160
ugacauugagaaccgagugu

SEQ ID NO: 4396 - RNA, 20 nt, Artificial Sequence
  Synthetic oligonucleotide: Ptpn6-648
uugagaaccgaguguuggaa

SEQ ID NO: 4397 - RNA, 20 nt, Artificial Sequence
  Synthetic oligonucleotide: Ptpn6-649
accgaguguuggaacugaac

SEQ ID NO: 4398 - RNA, 20 nt, Artificial Sequence
  Synthetic oligonucleotide: Ptpn6-650
uguuggaacugaacaagaag

SEQ ID NO: 4399 - RNA, 20 nt, Artificial Sequence
  Synthetic oligonucleotide: Ptpn6-161
guuggaacugaacaagaagc

SEQ ID NO: 4400 - RNA, 20 nt, Artificial Sequence
  Synthetic oligonucleotide: Ptpn6-652
acugaacaagaagcaggagu

SEQ ID NO: 4401 - RNA, 20 nt, Artificial Sequence
  Synthetic oligonucleotide: Ptpn6-653
ugaacaagaagcaggagucc

SEQ ID NO: 4402 - RNA, 20 nt, Artificial Sequence
  Synthetic oligonucleotide: Ptpn6-654
gauacagccaaggcuggcuu

SEQ ID NO: 4403 - RNA, 20 nt, Artificial Sequence
  Synthetic oligonucleotide: Ptpn6-165
auacagccaaggcuggcuuc

SEQ ID NO: 4404 - RNA, 20 nt, Artificial Sequence
  Synthetic oligonucleotide: Ptpn6-166
uacagccaaggcuggcuucu

SEQ ID NO: 4405 - RNA, 20 nt, Artificial Sequence
  Synthetic oligonucleotide: Ptpn6-657
cagccaaggcuggcuucugg

SEQ ID NO: 4406 - RNA, 20 nt, Artificial Sequence
  Synthetic oligonucleotide: Ptpn6-167
agccaaggcuggcuucuggg

SEQ ID NO: 4407 - RNA, 20 nt, Artificial Sequence
  Synthetic oligonucleotide: Ptpn6-659
ggcuggcuucugggaggagu

SEQ ID NO: 4408 - RNA, 20 nt, Artificial Sequence
  Synthetic oligonucleotide: Ptpn6-660
guuugcagaagcaggaggug

SEQ ID NO: 4409 - RNA, 20 nt, Artificial Sequence
  Synthetic oligonucleotide: Ptpn6-661
ugaagaacuugcaccagcgu

SEQ ID NO: 4410 - RNA, 20 nt, Artificial Sequence
  Synthetic oligonucleotide: Ptpn6-168
gaagaacuugcaccagcguc

SEQ ID NO: 4411 - RNA, 20 nt, Artificial Sequence
  Synthetic oligonucleotide: Ptpn6-663
gaacuugcaccagcgucugg

SEQ ID NO: 4412 - RNA, 20 nt, Artificial Sequence
  Synthetic oligonucleotide: Ptpn6-664
gcgucuggaagggcagcggc

SEQ ID NO: 4413 - RNA, 20 nt, Artificial Sequence
  Synthetic oligonucleotide: Ptpn6-665
gucuggaagggcagcggcca

SEQ ID NO: 4414 - RNA, 20 nt, Artificial Sequence
  Synthetic oligonucleotide: Ptpn6-666
aagggcagcggccagagaac

SEQ ID NO: 4415 - RNA, 20 nt, Artificial Sequence
  Synthetic oligonucleotide: Ptpn6-667
agcggccagagaacaagggc

SEQ ID NO: 4416 - RNA, 20 nt, Artificial Sequence
  Synthetic oligonucleotide: Ptpn6-668
acaagggcaagaaccgcuac

SEQ ID NO: 4417 - RNA, 20 nt, Artificial Sequence
  Synthetic oligonucleotide: Ptpn6-669
accacagccgagugauccug

SEQ ID NO: 4418 - RNA, 20 nt, Artificial Sequence
  Synthetic oligonucleotide: Ptpn6-174
ccacagccgagugauccugc

SEQ ID NO: 4419 - RNA, 20 nt, Artificial Sequence
  Synthetic oligonucleotide: Ptpn6-671
agccgagugauccugcaggg

SEQ ID NO: 4420 - RNA, 20 nt, Artificial Sequence
  Synthetic oligonucleotide: Ptpn6-176
gccgagugauccugcaggga

SEQ ID NO: 4421 - RNA, 20 nt, Artificial Sequence
  Synthetic oligonucleotide: Ptpn6-673
gggacgggacaguaacaucc

SEQ ID NO: 4422 - RNA, 20 nt, Artificial Sequence
  Synthetic oligonucleotide: Ptpn6-674
accagcugcuaggcccugau

SEQ ID NO: 4423 - RNA, 20 nt, Artificial Sequence
  Synthetic oligonucleotide: Ptpn6-675
cuaagaccuacaucgccagc

SEQ ID NO: 4424 - RNA, 20 nt, Artificial Sequence
  Synthetic oligonucleotide: Ptpn6-676
acaucgccagccaggguugu

SEQ ID NO: 4425 - RNA, 20 nt, Artificial Sequence
  Synthetic oligonucleotide: Ptpn6-182
caucgccagccaggguuguc

SEQ ID NO: 4426 - RNA, 20 nt, Artificial Sequence
  Synthetic oligonucleotide: Ptpn6-678
acuucuggcagauggcgugg

SEQ ID NO: 4427 - RNA, 20 nt, Artificial Sequence
  Synthetic oligonucleotide: Ptpn6-188
cuucuggcagauggcguggc

SEQ ID NO: 4428 - RNA, 20 nt, Artificial Sequence
  Synthetic oligonucleotide: Ptpn6-680
ucuggcagauggcguggcag

SEQ ID NO: 4429 - RNA, 20 nt, Artificial Sequence
  Synthetic oligonucleotide: Ptpn6-681
cgugucaucgucaugaccac

SEQ ID NO: 4430 - RNA, 20 nt, Artificial Sequence
  Synthetic oligonucleotide: Ptpn6-682
ugucaucgucaugaccaccc

SEQ ID NO: 4431 - RNA, 20 nt, Artificial Sequence
  Synthetic oligonucleotide: Ptpn6-683
ucgucaugaccacccgagag

SEQ ID NO: 4432 - RNA, 20 nt, Artificial Sequence
  Synthetic oligonucleotide: Ptpn6-190
cgucaugaccacccgagagg

SEQ ID NO: 4433 - RNA, 20 nt, Artificial Sequence
  Synthetic oligonucleotide: Ptpn6-685
ucaugaccacccgagaggug

SEQ ID NO: 4434 - RNA, 20 nt, Artificial Sequence
  Synthetic oligonucleotide: Ptpn6-686
caaaugcgucccauacuggc

SEQ ID NO: 4435 - RNA, 20 nt, Artificial Sequence
  Synthetic oligonucleotide: Ptpn6-687
gcgucccauacuggcccgag

SEQ ID NO: 4436 - RNA, 20 nt, Artificial Sequence
  Synthetic oligonucleotide: Ptpn6-688
ggugggcaugcagcgugcuu

SEQ ID NO: 4437 - RNA, 20 nt, Artificial Sequence
  Synthetic oligonucleotide: Ptpn6-689
gcccuacucugugaccaacu

SEQ ID NO: 4438 - RNA, 20 nt, Artificial Sequence
  Synthetic oligonucleotide: Ptpn6-198
cccuacucugugaccaacug

SEQ ID NO: 4439 - RNA, 20 nt, Artificial Sequence
  Synthetic oligonucleotide: Ptpn6-199
ccuacucugugaccaacugc

SEQ ID NO: 4440 - RNA, 20 nt, Artificial Sequence
  Synthetic oligonucleotide: Ptpn6-200
cuacucugugaccaacugcg

SEQ ID NO: 4441 - RNA, 20 nt, Artificial Sequence
  Synthetic oligonucleotide: Ptpn6-693
cugcggggagcaugacacaa

SEQ ID NO: 4442 - RNA, 20 nt, Artificial Sequence
  Synthetic oligonucleotide: Ptpn6-694
guaccuuacaggucuccccg

SEQ ID NO: 4443 - RNA, 20 nt, Artificial Sequence
  Synthetic oligonucleotide: Ptpn6-695
agaucuggcauuaccaguac

SEQ ID NO: 4444 - RNA, 20 nt, Artificial Sequence
  Synthetic oligonucleotide: Ptpn6-696
guaccugagcuggcccgacc

SEQ ID NO: 4445 - RNA, 20 nt, Artificial Sequence
  Synthetic oligonucleotide: Ptpn6-205
uaccugagcuggcccgacca

SEQ ID NO: 4446 - RNA, 20 nt, Artificial Sequence
  Synthetic oligonucleotide: Ptpn6-698
gcccgaccauggggucccca

SEQ ID NO: 4447 - RNA, 20 nt, Artificial Sequence
  Synthetic oligonucleotide: Ptpn6-699
ccaugggguccccagugagc

SEQ ID NO: 4448 - RNA, 20 nt, Artificial Sequence
  Synthetic oligonucleotide: Ptpn6-208
caugggguccccagugagcc

SEQ ID NO: 4449 - RNA, 20 nt, Artificial Sequence
  Synthetic oligonucleotide: Ptpn6-209
augggguccccagugagccu

SEQ ID NO: 4450 - RNA, 20 nt, Artificial Sequence
  Synthetic oligonucleotide: Ptpn6-702
cuggggguguccucagcuuc

SEQ ID NO: 4451 - RNA, 20 nt, Artificial Sequence
  Synthetic oligonucleotide: Ptpn6-703
uggaccagaucaaccagcgg

SEQ ID NO: 4452 - RNA, 20 nt, Artificial Sequence
  Synthetic oligonucleotide: Ptpn6-214
ggaccagaucaaccagcggc

SEQ ID NO: 4453 - RNA, 20 nt, Artificial Sequence
  Synthetic oligonucleotide: Ptpn6-705
gcaggaaagucugccucacg

SEQ ID NO: 4454 - RNA, 20 nt, Artificial Sequence
  Synthetic oligonucleotide: Ptpn6-706
ucauugucaucgacaugcuc

SEQ ID NO: 4455 - RNA, 20 nt, Artificial Sequence
  Synthetic oligonucleotide: Ptpn6-217
cauugucaucgacaugcuca

SEQ ID NO: 4456 - RNA, 20 nt, Artificial Sequence
  Synthetic oligonucleotide: Ptpn6-708
uugucaucgacaugcucaug

SEQ ID NO: 4457 - RNA, 20 nt, Artificial Sequence
  Synthetic oligonucleotide: Ptpn6-709
uggacugugacauugacauc

SEQ ID NO: 4458 - RNA, 20 nt, Artificial Sequence
  Synthetic oligonucleotide: Ptpn6-710
cagaagaccauccagauggu

SEQ ID NO: 4459 - RNA, 20 nt, Artificial Sequence
  Synthetic oligonucleotide: Ptpn6-711
agauggugcgggcgcagcgc

SEQ ID NO: 4460 - RNA, 20 nt, Artificial Sequence
  Synthetic oligonucleotide: Ptpn6-712
agcgcucgggcauggugcag

SEQ ID NO: 4461 - RNA, 20 nt, Artificial Sequence
  Synthetic oligonucleotide: Ptpn6-225
gcgcucgggcauggugcaga

SEQ ID NO: 4462 - RNA, 20 nt, Artificial Sequence
  Synthetic oligonucleotide: Ptpn6-714
cguggccaucgcccaguuca

SEQ ID NO: 4463 - RNA, 20 nt, Artificial Sequence
  Synthetic oligonucleotide: Ptpn6-715
cccaguucauugaaaccacu

SEQ ID NO: 4464 - RNA, 20 nt, Artificial Sequence
  Synthetic oligonucleotide: Ptpn6-716
aguucauugaaaccacuaag

SEQ ID NO: 4465 - RNA, 20 nt, Artificial Sequence
  Synthetic oligonucleotide: Ptpn6-717
uugaaaccacuaagaagaag

SEQ ID NO: 4466 - RNA, 20 nt, Artificial Sequence
  Synthetic oligonucleotide: Ptpn6-228
ugaaaccacuaagaagaagc

SEQ ID NO: 4467 - RNA, 20 nt, Artificial Sequence
  Synthetic oligonucleotide: Ptpn6-719
gaagggccaggagucggagu

SEQ ID NO: 4468 - RNA, 20 nt, Artificial Sequence
  Synthetic oligonucleotide: Ptpn6-230
aagggccaggagucggagua

SEQ ID NO: 4469 - RNA, 20 nt, Artificial Sequence
  Synthetic oligonucleotide: Ptpn6-231
agggccaggagucggaguac

SEQ ID NO: 4470 - RNA, 20 nt, Artificial Sequence
  Synthetic oligonucleotide: Ptpn6-722
acaucaccuaucccccagcc

SEQ ID NO: 4471 - RNA, 20 nt, Artificial Sequence
  Synthetic oligonucleotide: Ptpn6-723
ucaccuaucccccagccaug

SEQ ID NO: 4472 - RNA, 20 nt, Artificial Sequence
  Synthetic oligonucleotide: Ptpn6-724
uguaugagaaccugcacacu

SEQ ID NO: 4473 - RNA, 20 nt, Artificial Sequence
  Synthetic oligonucleotide: Ptpn6-725
agaaccugcacacuaagaac

SEQ ID NO: 4474 - RNA, 20 nt, Artificial Sequence
  Synthetic oligonucleotide: Ptpn6-726
aaccugcacacuaagaacaa

SEQ ID NO: 4475 - RNA, 20 nt, Artificial Sequence
  Synthetic oligonucleotide: Ptpn6-233
accugcacacuaagaacaag

SEQ ID NO: 4476 - RNA, 20 nt, Artificial Sequence
  Synthetic oligonucleotide: Ptpn6-234
ccugcacacuaagaacaaga

SEQ ID NO: 4477 - RNA, 20 nt, Artificial Sequence
  Synthetic oligonucleotide: Ptpn6-729
ugcacacuaagaacaagagg

SEQ ID NO: 4478 - RNA, 20 nt, Artificial Sequence
  Synthetic oligonucleotide: Ptpn6-235
gcacacuaagaacaagaggg

SEQ ID NO: 4479 - RNA, 20 nt, Artificial Sequence
  Synthetic oligonucleotide: Ptpn6-731
acacuaagaacaagagggag

SEQ ID NO: 4480 - RNA, 20 nt, Artificial Sequence
  Synthetic oligonucleotide: Ptpn6-732
agaacaagagggaggagaaa

SEQ ID NO: 4481 - RNA, 20 nt, Artificial Sequence
  Synthetic oligonucleotide: Ptpn6-733
acaagagggaggagaaagug

SEQ ID NO: 4482 - RNA, 20 nt, Artificial Sequence
  Synthetic oligonucleotide: Ptpn6-734
agaagcagcggucagcagac

SEQ ID NO: 4483 - RNA, 20 nt, Artificial Sequence
  Synthetic oligonucleotide: Ptpn6-237
gaagcagcggucagcagaca

SEQ ID NO: 4484 - RNA, 20 nt, Artificial Sequence
  Synthetic oligonucleotide: Ptpn6-736
agcagcggucagcagacaag

SEQ ID NO: 4485 - RNA, 20 nt, Artificial Sequence
  Synthetic oligonucleotide: Ptpn6-737
agcggucagcagacaaggag

SEQ ID NO: 4486 - RNA, 20 nt, Artificial Sequence
  Synthetic oligonucleotide: Ptpn6-738
cagcagacaaggagaagagc

SEQ ID NO: 4487 - RNA, 20 nt, Artificial Sequence
  Synthetic oligonucleotide: Ptpn6-739
agaagagcaaggguucccuc

SEQ ID NO: 4488 - RNA, 20 nt, Artificial Sequence
  Synthetic oligonucleotide: Ptpn6-740
aagagcaaggguucccucaa

SEQ ID NO: 4489 - RNA, 20 nt, Artificial Sequence
  Synthetic oligonucleotide: Ptpn6-240
agagcaaggguucccucaag

SEQ ID NO: 4490 - RNA, 17 nt, Artificial Sequence
  Synthetic oligonucleotide: Ptpn6-742
agaccuucgacagccuc

SEQ ID NO: 4491 - RNA, 17 nt, Artificial Sequence
  Synthetic oligonucleotide: Ptpn6-743
ucaagaagacggggauu

SEQ ID NO: 4492 - RNA, 17 nt, Artificial Sequence
  Synthetic oligonucleotide: Ptpn6-250
caagaagacggggauug

SEQ ID NO: 4493 - RNA, 17 nt, Artificial Sequence
  Synthetic oligonucleotide: Ptpn6-745
gcuacacaguggguggu

SEQ ID NO: 4494 - RNA, 17 nt, Artificial Sequence
  Synthetic oligonucleotide: Ptpn6-243
cuacacagugggugguu

SEQ ID NO: 4495 - RNA, 17 nt, Artificial Sequence
  Synthetic oligonucleotide: Ptpn6-747
acagccucacggaccug

SEQ ID NO: 4496 - RNA, 17 nt, Artificial Sequence
  Synthetic oligonucleotide: Ptpn6-246
cagccucacggaccugg

SEQ ID NO: 4497 - RNA, 17 nt, Artificial Sequence
  Synthetic oligonucleotide: Ptpn6-749
accugguggagcauuuc

SEQ ID NO: 4498 - RNA, 17 nt, Artificial Sequence
  Synthetic oligonucleotide: Ptpn6-750
uggagcauuucaagaag

SEQ ID NO: 4499 - RNA, 17 nt, Artificial Sequence
  Synthetic oligonucleotide: Ptpn6-247
ggagcauuucaagaaga

SEQ ID NO: 4500 - RNA, 17 nt, Artificial Sequence
  Synthetic oligonucleotide: Ptpn6-248
gagcauuucaagaagac

SEQ ID NO: 4501 - RNA, 17 nt, Artificial Sequence
  Synthetic oligonucleotide: Ptpn6-753
uuucaagaagacgggga

SEQ ID NO: 4502 - RNA, 17 nt, Artificial Sequence
  Synthetic oligonucleotide: Ptpn6-754
cguacuaugccacgagg

SEQ ID NO: 4503 - RNA, 17 nt, Artificial Sequence
  Synthetic oligonucleotide: Ptpn6-755
ggugaaugcggcugaca

SEQ ID NO: 4504 - RNA, 17 nt, Artificial Sequence
  Synthetic oligonucleotide: Ptpn6-756
ugaaugcggcugacauu

SEQ ID NO: 4505 - RNA, 17 nt, Artificial Sequence
  Synthetic oligonucleotide: Ptpn6-757
gcggcugacauugagaa

SEQ ID NO: 4506 - RNA, 17 nt, Artificial Sequence
  Synthetic oligonucleotide: Ptpn6-758
acauugagaaccgagug

SEQ ID NO: 4507 - RNA, 17 nt, Artificial Sequence
  Synthetic oligonucleotide: Ptpn6-255
cauugagaaccgagugu

SEQ ID NO: 4508 - RNA, 17 nt, Artificial Sequence
  Synthetic oligonucleotide: Ptpn6-760
agaaccgaguguuggaa

SEQ ID NO: 4509 - RNA, 17 nt, Artificial Sequence
  Synthetic oligonucleotide: Ptpn6-761
gaguguuggaacugaac

SEQ ID NO: 4510 - RNA, 17 nt, Artificial Sequence
  Synthetic oligonucleotide: Ptpn6-762
uggaacugaacaagaag

SEQ ID NO: 4511 - RNA, 17 nt, Artificial Sequence
  Synthetic oligonucleotide: Ptpn6-256
ggaacugaacaagaagc

SEQ ID NO: 4512 - RNA, 17 nt, Artificial Sequence
  Synthetic oligonucleotide: Ptpn6-764
gaacaagaagcaggagu

SEQ ID NO: 4513 - RNA, 17 nt, Artificial Sequence
  Synthetic oligonucleotide: Ptpn6-765
acaagaagcaggagucc

SEQ ID NO: 4514 - RNA, 17 nt, Artificial Sequence
  Synthetic oligonucleotide: Ptpn6-766
acagccaaggcuggcuu

SEQ ID NO: 4515 - RNA, 17 nt, Artificial Sequence
  Synthetic oligonucleotide: Ptpn6-260
cagccaaggcuggcuuc

SEQ ID NO: 4516 - RNA, 17 nt, Artificial Sequence
  Synthetic oligonucleotide: Ptpn6-261
agccaaggcuggcuucu

SEQ ID NO: 4517 - RNA, 17 nt, Artificial Sequence
  Synthetic oligonucleotide: Ptpn6-769
ccaaggcuggcuucugg

SEQ ID NO: 4518 - RNA, 17 nt, Artificial Sequence
  Synthetic oligonucleotide: Ptpn6-262
caaggcuggcuucuggg

SEQ ID NO: 4519 - RNA, 17 nt, Artificial Sequence
  Synthetic oligonucleotide: Ptpn6-771
uggcuucugggaggagu

SEQ ID NO: 4520 - RNA, 17 nt, Artificial Sequence
  Synthetic oligonucleotide: Ptpn6-772
guuugcagaagcaggag

SEQ ID NO: 4521 - RNA, 17 nt, Artificial Sequence
  Synthetic oligonucleotide: Ptpn6-773
ugcagaagcaggaggug

SEQ ID NO: 4522 - RNA, 17 nt, Artificial Sequence
  Synthetic oligonucleotide: Ptpn6-774
agaacuugcaccagcgu

SEQ ID NO: 4523 - RNA, 17 nt, Artificial Sequence
  Synthetic oligonucleotide: Ptpn6-263
gaacuugcaccagcguc

SEQ ID NO: 4524 - RNA, 17 nt, Artificial Sequence
  Synthetic oligonucleotide: Ptpn6-776
cuugcaccagcgucugg

SEQ ID NO: 4525 - RNA, 17 nt, Artificial Sequence
  Synthetic oligonucleotide: Ptpn6-777
ucuggaagggcagcggc

SEQ ID NO: 4526 - RNA, 17 nt, Artificial Sequence
  Synthetic oligonucleotide: Ptpn6-778
uggaagggcagcggcca

SEQ ID NO: 4527 - RNA, 17 nt, Artificial Sequence
  Synthetic oligonucleotide: Ptpn6-779
ggcagcggccagagaac

SEQ ID NO: 4528 - RNA, 17 nt, Artificial Sequence
  Synthetic oligonucleotide: Ptpn6-780
ggccagagaacaagggc

SEQ ID NO: 4529 - RNA, 17 nt, Artificial Sequence
  Synthetic oligonucleotide: Ptpn6-781
agggcaagaaccgcuac

SEQ ID NO: 4530 - RNA, 17 nt, Artificial Sequence
  Synthetic oligonucleotide: Ptpn6-782
acagccgagugauccug

SEQ ID NO: 4531 - RNA, 17 nt, Artificial Sequence
  Synthetic oligonucleotide: Ptpn6-269
cagccgagugauccugc

SEQ ID NO: 4532 - RNA, 17 nt, Artificial Sequence
  Synthetic oligonucleotide: Ptpn6-784
cgagugauccugcaggg

SEQ ID NO: 4533 - RNA, 17 nt, Artificial Sequence
  Synthetic oligonucleotide: Ptpn6-271
gagugauccugcaggga

SEQ ID NO: 4534 - RNA, 17 nt, Artificial Sequence
  Synthetic oligonucleotide: Ptpn6-786
acgggacaguaacaucc

SEQ ID NO: 4535 - RNA, 17 nt, Artificial Sequence
  Synthetic oligonucleotide: Ptpn6-787
ccagcugcuaggcccug

SEQ ID NO: 4536 - RNA, 17 nt, Artificial Sequence
  Synthetic oligonucleotide: Ptpn6-788
agcugcuaggcccugau

SEQ ID NO: 4537 - RNA, 17 nt, Artificial Sequence
  Synthetic oligonucleotide: Ptpn6-789
agaccuacaucgccagc

SEQ ID NO: 4538 - RNA, 17 nt, Artificial Sequence
  Synthetic oligonucleotide: Ptpn6-790
ucgccagccaggguugu

SEQ ID NO: 4539 - RNA, 17 nt, Artificial Sequence
  Synthetic oligonucleotide: Ptpn6-277
cgccagccaggguuguc

SEQ ID NO: 4540 - RNA, 17 nt, Artificial Sequence
  Synthetic oligonucleotide: Ptpn6-792
ucuggcagauggcgugg

SEQ ID NO: 4541 - RNA, 17 nt, Artificial Sequence
  Synthetic oligonucleotide: Ptpn6-283
cuggcagauggcguggc

SEQ ID NO: 4542 - RNA, 17 nt, Artificial Sequence
  Synthetic oligonucleotide: Ptpn6-794
ggcagauggcguggcag

SEQ ID NO: 4543 - RNA, 17 nt, Artificial Sequence
  Synthetic oligonucleotide: Ptpn6-795
gucaucgucaugaccac

SEQ ID NO: 4544 - RNA, 17 nt, Artificial Sequence
  Synthetic oligonucleotide: Ptpn6-796
caucgucaugaccaccc

SEQ ID NO: 4545 - RNA, 17 nt, Artificial Sequence
  Synthetic oligonucleotide: Ptpn6-797
ucaugaccacccgagag

SEQ ID NO: 4546 - RNA, 17 nt, Artificial Sequence
  Synthetic oligonucleotide: Ptpn6-285
caugaccacccgagagg

SEQ ID NO: 4547 - RNA, 17 nt, Artificial Sequence
  Synthetic oligonucleotide: Ptpn6-799
ugaccacccgagaggug

SEQ ID NO: 4548 - RNA, 17 nt, Artificial Sequence
  Synthetic oligonucleotide: Ptpn6-800
augcgucccauacuggc

SEQ ID NO: 4549 - RNA, 17 nt, Artificial Sequence
  Synthetic oligonucleotide: Ptpn6-801
ucccauacuggcccgag

SEQ ID NO: 4550 - RNA, 17 nt, Artificial Sequence
  Synthetic oligonucleotide: Ptpn6-802
gggcaugcagcgugcuu

SEQ ID NO: 4551 - RNA, 17 nt, Artificial Sequence
  Synthetic oligonucleotide: Ptpn6-803
cuacucugugaccaacu

SEQ ID NO: 4552 - RNA, 17 nt, Artificial Sequence
  Synthetic oligonucleotide: Ptpn6-294
uacucugugaccaacug

SEQ ID NO: 4553 - RNA, 17 nt, Artificial Sequence
  Synthetic oligonucleotide: Ptpn6-295
acucugugaccaacugc

SEQ ID NO: 4554 - RNA, 17 nt, Artificial Sequence
  Synthetic oligonucleotide: Ptpn6-296
cucugugaccaacugcg

SEQ ID NO: 4555 - RNA, 17 nt, Artificial Sequence
  Synthetic oligonucleotide: Ptpn6-807
cggggagcaugacacaa

SEQ ID NO: 4556 - RNA, 17 nt, Artificial Sequence
  Synthetic oligonucleotide: Ptpn6-808
ccuuacaggucuccccg

SEQ ID NO: 4557 - RNA, 17 nt, Artificial Sequence
  Synthetic oligonucleotide: Ptpn6-809
ucuggcauuaccaguac

SEQ ID NO: 4558 - RNA, 17 nt, Artificial Sequence
  Synthetic oligonucleotide: Ptpn6-810
ccugagcuggcccgacc

SEQ ID NO: 4559 - RNA, 17 nt, Artificial Sequence
  Synthetic oligonucleotide: Ptpn6-301
cugagcuggcccgacca

SEQ ID NO: 4560 - RNA, 17 nt, Artificial Sequence
  Synthetic oligonucleotide: Ptpn6-812
cgaccauggggucccca

SEQ ID NO: 4561 - RNA, 17 nt, Artificial Sequence
  Synthetic oligonucleotide: Ptpn6-813
ugggguccccagugagc

SEQ ID NO: 4562 - RNA, 17 nt, Artificial Sequence
  Synthetic oligonucleotide: Ptpn6-304
gggguccccagugagcc

SEQ ID NO: 4563 - RNA, 17 nt, Artificial Sequence
  Synthetic oligonucleotide: Ptpn6-305
ggguccccagugagccu

SEQ ID NO: 4564 - RNA, 17 nt, Artificial Sequence
  Synthetic oligonucleotide: Ptpn6-816
gggguguccucagcuuc

SEQ ID NO: 4565 - RNA, 17 nt, Artificial Sequence
  Synthetic oligonucleotide: Ptpn6-817
accagaucaaccagcgg

SEQ ID NO: 4566 - RNA, 17 nt, Artificial Sequence
  Synthetic oligonucleotide: Ptpn6-310
ccagaucaaccagcggc

SEQ ID NO: 4567 - RNA, 17 nt, Artificial Sequence
  Synthetic oligonucleotide: Ptpn6-819
ggaaagucugccucacg

SEQ ID NO: 4568 - RNA, 17 nt, Artificial Sequence
  Synthetic oligonucleotide: Ptpn6-820
uugucaucgacaugcuc

SEQ ID NO: 4569 - RNA, 17 nt, Artificial Sequence
  Synthetic oligonucleotide: Ptpn6-314
ugucaucgacaugcuca

SEQ ID NO: 4570 - RNA, 17 nt, Artificial Sequence
  Synthetic oligonucleotide: Ptpn6-822
ucaucgacaugcucaug

SEQ ID NO: 4571 - RNA, 17 nt, Artificial Sequence
  Synthetic oligonucleotide: Ptpn6-823
acugugacauugacauc

SEQ ID NO: 4572 - RNA, 17 nt, Artificial Sequence
  Synthetic oligonucleotide: Ptpn6-824
aagaccauccagauggu

SEQ ID NO: 4573 - RNA, 17 nt, Artificial Sequence
  Synthetic oligonucleotide: Ptpn6-825
uggugcgggcgcagcgc

SEQ ID NO: 4574 - RNA, 17 nt, Artificial Sequence
  Synthetic oligonucleotide: Ptpn6-826
gcucgggcauggugcag

SEQ ID NO: 4575 - RNA, 17 nt, Artificial Sequence
  Synthetic oligonucleotide: Ptpn6-322
cucgggcauggugcaga

SEQ ID NO: 4576 - RNA, 17 nt, Artificial Sequence
  Synthetic oligonucleotide: Ptpn6-828
ggccaucgcccaguuca

SEQ ID NO: 4577 - RNA, 17 nt, Artificial Sequence
  Synthetic oligonucleotide: Ptpn6-829
aguucauugaaaccacu

SEQ ID NO: 4578 - RNA, 17 nt, Artificial Sequence
  Synthetic oligonucleotide: Ptpn6-830
ucauugaaaccacuaag

SEQ ID NO: 4579 - RNA, 17 nt, Artificial Sequence
  Synthetic oligonucleotide: Ptpn6-831
aaaccacuaagaagaag

SEQ ID NO: 4580 - RNA, 17 nt, Artificial Sequence
  Synthetic oligonucleotide: Ptpn6-325
aaccacuaagaagaagc

SEQ ID NO: 4581 - RNA, 17 nt, Artificial Sequence
  Synthetic oligonucleotide: Ptpn6-833
cgcagaagggccaggag

SEQ ID NO: 4582 - RNA, 17 nt, Artificial Sequence
  Synthetic oligonucleotide: Ptpn6-327
gcagaagggccaggagu

SEQ ID NO: 4583 - RNA, 17 nt, Artificial Sequence
  Synthetic oligonucleotide: Ptpn6-835
gggccaggagucggagu

SEQ ID NO: 4584 - RNA, 17 nt, Artificial Sequence
  Synthetic oligonucleotide: Ptpn6-328
ggccaggagucggagua

SEQ ID NO: 4585 - RNA, 17 nt, Artificial Sequence
  Synthetic oligonucleotide: Ptpn6-329
gccaggagucggaguac

SEQ ID NO: 4586 - RNA, 17 nt, Artificial Sequence
  Synthetic oligonucleotide: Ptpn6-838
ucaccuaucccccagcc

SEQ ID NO: 4587 - RNA, 17 nt, Artificial Sequence
  Synthetic oligonucleotide: Ptpn6-839
ccuaucccccagccaug

SEQ ID NO: 4588 - RNA, 17 nt, Artificial Sequence
  Synthetic oligonucleotide: Ptpn6-840
acacaaggaggaugugu

SEQ ID NO: 4589 - RNA, 17 nt, Artificial Sequence
  Synthetic oligonucleotide: Ptpn6-841
acaaggaggauguguau

SEQ ID NO: 4590 - RNA, 17 nt, Artificial Sequence
  Synthetic oligonucleotide: Ptpn6-842
augagaaccugcacacu

SEQ ID NO: 4591 - RNA, 17 nt, Artificial Sequence
  Synthetic oligonucleotide: Ptpn6-843
accugcacacuaagaac

SEQ ID NO: 4592 - RNA, 17 nt, Artificial Sequence
  Synthetic oligonucleotide: Ptpn6-844
cugcacacuaagaacaa

SEQ ID NO: 4593 - RNA, 17 nt, Artificial Sequence
  Synthetic oligonucleotide: Ptpn6-331
ugcacacuaagaacaag

SEQ ID NO: 4594 - RNA, 17 nt, Artificial Sequence
  Synthetic oligonucleotide: Ptpn6-332
gcacacuaagaacaaga

SEQ ID NO: 4595 - RNA, 17 nt, Artificial Sequence
  Synthetic oligonucleotide: Ptpn6-847
acacuaagaacaagagg

SEQ ID NO: 4596 - RNA, 17 nt, Artificial Sequence
  Synthetic oligonucleotide: Ptpn6-333
cacuaagaacaagaggg

SEQ ID NO: 4597 - RNA, 17 nt, Artificial Sequence
  Synthetic oligonucleotide: Ptpn6-849
cuaagaacaagagggag

SEQ ID NO: 4598 - RNA, 17 nt, Artificial Sequence
  Synthetic oligonucleotide: Ptpn6-850
acaagagggaggagaaa

SEQ ID NO: 4599 - RNA, 17 nt, Artificial Sequence
  Synthetic oligonucleotide: Ptpn6-851
agagggaggagaaagug

SEQ ID NO: 4600 - RNA, 17 nt, Artificial Sequence
  Synthetic oligonucleotide: Ptpn6-852
agcagcggucagcagac

SEQ ID NO: 4601 - RNA, 17 nt, Artificial Sequence
  Synthetic oligonucleotide: Ptpn6-335
gcagcggucagcagaca

SEQ ID NO: 4602 - RNA, 17 nt, Artificial Sequence
  Synthetic oligonucleotide: Ptpn6-854
agcggucagcagacaag

SEQ ID NO: 4603 - RNA, 17 nt, Artificial Sequence
  Synthetic oligonucleotide: Ptpn6-855
ggucagcagacaaggag

SEQ ID NO: 4604 - RNA, 17 nt, Artificial Sequence
  Synthetic oligonucleotide: Ptpn6-856
cagacaaggagaagagc

SEQ ID NO: 4605 - RNA, 17 nt, Artificial Sequence
  Synthetic oligonucleotide: Ptpn6-857
agagcaaggguucccuc

SEQ ID NO: 4606 - RNA, 17 nt, Artificial Sequence
  Synthetic oligonucleotide: Ptpn6-858
agcaaggguucccucaa

SEQ ID NO: 4607 - RNA, 17 nt, Artificial Sequence
  Synthetic oligonucleotide: Ptpn6-338
gcaaggguucccucaag

SEQ ID NO: 4608 - RNA, 20 nt, Artificial Sequence
  Synthetic oligonucleotide: Ptpn6-860
gaggugcgggaggccuuggc

SEQ ID NO: 4609 - RNA, 20 nt, Artificial Sequence
  Synthetic oligonucleotide: Ptpn6-861
ggcaugggcauucuucaugg

SEQ ID NO: 4610 - RNA, 20 nt, Artificial Sequence
  Synthetic oligonucleotide: Ptpn6-344
gcaugggcauucuucauggc

SEQ ID NO: 4611 - RNA, 20 nt, Artificial Sequence
  Synthetic oligonucleotide: Ptpn6-345
caugggcauucuucauggcu

SEQ ID NO: 4612 - RNA, 20 nt, Artificial Sequence
  Synthetic oligonucleotide: Ptpn6-346
augggcauucuucauggcug

SEQ ID NO: 4613 - RNA, 20 nt, Artificial Sequence
  Synthetic oligonucleotide: Ptpn6-865
gcuucuucuuagugguuuca

SEQ ID NO: 4614 - RNA, 20 nt, Artificial Sequence
  Synthetic oligonucleotide: Ptpn6-866
uucuuagugguuucaaugaa

SEQ ID NO: 4615 - RNA, 20 nt, Artificial Sequence
  Synthetic oligonucleotide: Ptpn6-867
acugggcgauggccacguag

SEQ ID NO: 4616 - RNA, 20 nt, Artificial Sequence
  Synthetic oligonucleotide: Ptpn6-868
cgccuccgucugcaccaugc

SEQ ID NO: 4617 - RNA, 20 nt, Artificial Sequence
  Synthetic oligonucleotide: Ptpn6-869
gagcgcugcgcccgcaccau

SEQ ID NO: 4618 - RNA, 20 nt, Artificial Sequence
  Synthetic oligonucleotide: Ptpn6-870
cgcaccaucuggauggucuu

SEQ ID NO: 4619 - RNA, 20 nt, Artificial Sequence
  Synthetic oligonucleotide: Ptpn6-871
ccuugguggagauguucucc

SEQ ID NO: 4620 - RNA, 20 nt, Artificial Sequence
  Synthetic oligonucleotide: Ptpn6-872
ugcacgaugaugggcccugc

SEQ ID NO: 4621 - RNA, 20 nt, Artificial Sequence
  Synthetic oligonucleotide: Ptpn6-873
ugccgcugguugaucugguc

SEQ ID NO: 4622 - RNA, 20 nt, Artificial Sequence
  Synthetic oligonucleotide: Ptpn6-364
gccgcugguugaucuggucc

SEQ ID NO: 4623 - RNA, 20 nt, Artificial Sequence
  Synthetic oligonucleotide: Ptpn6-875
gguugaucugguccaggaag

SEQ ID NO: 4624 - RNA, 20 nt, Artificial Sequence
  Synthetic oligonucleotide: Ptpn6-876
uugaucugguccaggaagcu

SEQ ID NO: 4625 - RNA, 20 nt, Artificial Sequence
  Synthetic oligonucleotide: Ptpn6-877
ugaggacacccccaggcuca

SEQ ID NO: 4626 - RNA, 20 nt, Artificial Sequence
  Synthetic oligonucleotide: Ptpn6-367
gaggacacccccaggcucac

SEQ ID NO: 4627 - RNA, 20 nt, Artificial Sequence
  Synthetic oligonucleotide: Ptpn6-368
aggacacccccaggcucacu

SEQ ID NO: 4628 - RNA, 20 nt, Artificial Sequence
  Synthetic oligonucleotide: Ptpn6-880
gcucacuggggaccccaugg

SEQ ID NO: 4629 - RNA, 20 nt, Artificial Sequence
  Synthetic oligonucleotide: Ptpn6-881
uacugguaaugccagaucuc

SEQ ID NO: 4630 - RNA, 20 nt, Artificial Sequence
  Synthetic oligonucleotide: Ptpn6-882
agcggggagaccuguaaggu

SEQ ID NO: 4631 - RNA, 20 nt, Artificial Sequence
  Synthetic oligonucleotide: Ptpn6-377
gcggggagaccuguaaggua

SEQ ID NO: 4632 - RNA, 20 nt, Artificial Sequence
  Synthetic oligonucleotide: Ptpn6-884
augcuccccgcaguugguca

SEQ ID NO: 4633 - RNA, 20 nt, Artificial Sequence
  Synthetic oligonucleotide: Ptpn6-885
ccccgcaguuggucacagag

SEQ ID NO: 4634 - RNA, 20 nt, Artificial Sequence
  Synthetic oligonucleotide: Ptpn6-886
aagcacgcugcaugcccacc

SEQ ID NO: 4635 - RNA, 20 nt, Artificial Sequence
  Synthetic oligonucleotide: Ptpn6-887
caugcccaccucgggccagu

SEQ ID NO: 4636 - RNA, 20 nt, Artificial Sequence
  Synthetic oligonucleotide: Ptpn6-384
augcccaccucgggccagua

SEQ ID NO: 4637 - RNA, 20 nt, Artificial Sequence
  Synthetic oligonucleotide: Ptpn6-889
  misc_feature (1)..(2): n is a, c, g, or u
nnccggccuuucuccaccuc

SEQ ID NO: 4638 - RNA, 20 nt, Artificial Sequence
  Synthetic oligonucleotide: Ptpn6-890
ucuccugccacgccaucugc

SEQ ID NO: 4639 - RNA, 20 nt, Artificial Sequence
  Synthetic oligonucleotide: Ptpn6-891
guaggucuuagcguucucau

SEQ ID NO: 4640 - RNA, 20 nt, Artificial Sequence
  Synthetic oligonucleotide: Ptpn6-892
uguaguuggcauugauguag

SEQ ID NO: 4641 - RNA, 20 nt, Artificial Sequence
  Synthetic oligonucleotide: Ptpn6-893
uggcauugauguagucggac

SEQ ID NO: 4642 - RNA, 20 nt, Artificial Sequence
  Synthetic oligonucleotide: Ptpn6-397
ggcauugauguagucggacc

SEQ ID NO: 4643 - RNA, 20 nt, Artificial Sequence
  Synthetic oligonucleotide: Ptpn6-398
gcauugauguagucggaccc

SEQ ID NO: 4644 - RNA, 20 nt, Artificial Sequence
  Synthetic oligonucleotide: Ptpn6-896
auguuacugucccgucccug

SEQ ID NO: 4645 - RNA, 20 nt, Artificial Sequence
  Synthetic oligonucleotide: Ptpn6-897
agccagccuuggcuguaucc

SEQ ID NO: 4646 - RNA, 20 nt, Artificial Sequence
  Synthetic oligonucleotide: Ptpn6-898
ccgcagguagacaaaggcgc

SEQ ID NO: 4647 - RNA, 20 nt, Artificial Sequence
  Synthetic oligonucleotide: Ptpn6-899
ccuccucaauccccgucuuc

SEQ ID NO: 4648 - RNA, 20 nt, Artificial Sequence
  Synthetic oligonucleotide: Ptpn6-900
ugaaaugcuccaccaggucc

SEQ ID NO: 4649 - RNA, 20 nt, Artificial Sequence
  Synthetic oligonucleotide: Ptpn6-901
ccaccagguccgugaggcug

SEQ ID NO: 4650 - RNA, 17 nt, Artificial Sequence
  Synthetic oligonucleotide: Ptpn6-902
gugcgggaggccuuggc

SEQ ID NO: 4651 - RNA, 17 nt, Artificial Sequence
  Synthetic oligonucleotide: Ptpn6-903
augggcauucuucaugg

SEQ ID NO: 4652 - RNA, 17 nt, Artificial Sequence
  Synthetic oligonucleotide: Ptpn6-424
ugggcauucuucauggc

SEQ ID NO: 4653 - RNA, 17 nt, Artificial Sequence
  Synthetic oligonucleotide: Ptpn6-425
gggcauucuucauggcu

SEQ ID NO: 4654 - RNA, 17 nt, Artificial Sequence
  Synthetic oligonucleotide: Ptpn6-426
ggcauucuucauggcug

SEQ ID NO: 4655 - RNA, 17 nt, Artificial Sequence
  Synthetic oligonucleotide: Ptpn6-907
ucuucuuagugguuuca

SEQ ID NO: 4656 - RNA, 17 nt, Artificial Sequence
  Synthetic oligonucleotide: Ptpn6-908
uuagugguuucaaugaa

SEQ ID NO: 4657 - RNA, 17 nt, Artificial Sequence
  Synthetic oligonucleotide: Ptpn6-909
gggcgauggccacguag

SEQ ID NO: 4658 - RNA, 17 nt, Artificial Sequence
  Synthetic oligonucleotide: Ptpn6-910
cuccgucugcaccaugc

SEQ ID NO: 4659 - RNA, 17 nt, Artificial Sequence
  Synthetic oligonucleotide: Ptpn6-911
cgcugcgcccgcaccau

SEQ ID NO: 4660 - RNA, 17 nt, Artificial Sequence
  Synthetic oligonucleotide: Ptpn6-912
accaucuggauggucuu

SEQ ID NO: 4661 - RNA, 17 nt, Artificial Sequence
  Synthetic oligonucleotide: Ptpn6-913
ugguggagauguucucc

SEQ ID NO: 4662 - RNA, 17 nt, Artificial Sequence
  Synthetic oligonucleotide: Ptpn6-914
  misc_feature (1)..(2): n is a, c, g, or u
nncugcagugcacgaug

SEQ ID NO: 4663 - RNA, 17 nt, Artificial Sequence
  Synthetic oligonucleotide: Ptpn6-915
acgaugaugggcccugc

SEQ ID NO: 4664 - RNA, 17 nt, Artificial Sequence
  Synthetic oligonucleotide: Ptpn6-916
cgcugguugaucugguc

SEQ ID NO: 4665 - RNA, 17 nt, Artificial Sequence
  Synthetic oligonucleotide: Ptpn6-446
gcugguugaucuggucc

SEQ ID NO: 4666 - RNA, 17 nt, Artificial Sequence
  Synthetic oligonucleotide: Ptpn6-918
ugaucugguccaggaag

SEQ ID NO: 4667 - RNA, 17 nt, Artificial Sequence
  Synthetic oligonucleotide: Ptpn6-919
aucugguccaggaagcu

SEQ ID NO: 4668 - RNA, 17 nt, Artificial Sequence
  Synthetic oligonucleotide: Ptpn6-920
ggacacccccaggcuca

SEQ ID NO: 4669 - RNA, 17 nt, Artificial Sequence
  Synthetic oligonucleotide: Ptpn6-449
gacacccccaggcucac

SEQ ID NO: 4670 - RNA, 17 nt, Artificial Sequence
  Synthetic oligonucleotide: Ptpn6-450
acacccccaggcucacu

SEQ ID NO: 4671 - RNA, 17 nt, Artificial Sequence
  Synthetic oligonucleotide: Ptpn6-923
cacuggggaccccaugg

SEQ ID NO: 4672 - RNA, 17 nt, Artificial Sequence
  Synthetic oligonucleotide: Ptpn6-924
ugguaaugccagaucuc

SEQ ID NO: 4673 - RNA, 17 nt, Artificial Sequence
  Synthetic oligonucleotide: Ptpn6-925
ggggagaccuguaaggu

SEQ ID NO: 4674 - RNA, 17 nt, Artificial Sequence
  Synthetic oligonucleotide: Ptpn6-459
gggagaccuguaaggua

SEQ ID NO: 4675 - RNA, 17 nt, Artificial Sequence
  Synthetic oligonucleotide: Ptpn6-927
cuccccgcaguugguca

SEQ ID NO: 4676 - RNA, 17 nt, Artificial Sequence
  Synthetic oligonucleotide: Ptpn6-928
cgcaguuggucacagag

SEQ ID NO: 4677 - RNA, 17 nt, Artificial Sequence
  Synthetic oligonucleotide: Ptpn6-929
cacgcugcaugcccacc

SEQ ID NO: 4678 - RNA, 17 nt, Artificial Sequence
  Synthetic oligonucleotide: Ptpn6-930
gcccaccucgggccagu

SEQ ID NO: 4679 - RNA, 17 nt, Artificial Sequence
  Synthetic oligonucleotide: Ptpn6-466
cccaccucgggccagua

SEQ ID NO: 4680 - RNA, 17 nt, Artificial Sequence
  Synthetic oligonucleotide: Ptpn6-932
cggccuuucuccaccuc

SEQ ID NO: 4681 - RNA, 17 nt, Artificial Sequence
  Synthetic oligonucleotide: Ptpn6-933
ccugccacgccaucugc

SEQ ID NO: 4682 - RNA, 17 nt, Artificial Sequence
  Synthetic oligonucleotide: Ptpn6-934
ggucuuagcguucucau

SEQ ID NO: 4683 - RNA, 17 nt, Artificial Sequence
  Synthetic oligonucleotide: Ptpn6-935
aguuggcauugauguag

SEQ ID NO: 4684 - RNA, 17 nt, Artificial Sequence
  Synthetic oligonucleotide: Ptpn6-936
cauugauguagucggac

SEQ ID NO: 4685 - RNA, 17 nt, Artificial Sequence
  Synthetic oligonucleotide: Ptpn6-480
auugauguagucggacc

SEQ ID NO: 4686 - RNA, 17 nt, Artificial Sequence
  Synthetic oligonucleotide: Ptpn6-481
uugauguagucggaccc

SEQ ID NO: 4687 - RNA, 17 nt, Artificial Sequence
  Synthetic oligonucleotide: Ptpn6-939
uuacugucccgucccug

SEQ ID NO: 4688 - RNA, 17 nt, Artificial Sequence
  Synthetic oligonucleotide: Ptpn6-940
cagccuuggcuguaucc

SEQ ID NO: 4689 - RNA, 17 nt, Artificial Sequence
  Synthetic oligonucleotide: Ptpn6-941
cagguagacaaaggcgc

SEQ ID NO: 4690 - RNA, 17 nt, Artificial Sequence
  Synthetic oligonucleotide: Ptpn6-942
ccucaauccccgucuuc

SEQ ID NO: 4691 - RNA, 17 nt, Artificial Sequence
  Synthetic oligonucleotide: Ptpn6-943
aaugcuccaccaggucc

SEQ ID NO: 4692 - RNA, 17 nt, Artificial Sequence
  Synthetic oligonucleotide: Ptpn6-944
ccagguccgugaggcug

SEQ ID NO: 4693 - RNA, 20 nt, Artificial Sequence
  Synthetic oligonucleotide: Ptpn6-95
cauauucggauccagaacuc

SEQ ID NO: 4694 - RNA, 17 nt, Artificial Sequence
  Synthetic oligonucleotide: Ptpn6-36
auucggauccagaacuc

SEQ ID NO: 4695 - RNA, 20 nt, Artificial Sequence
  Synthetic oligonucleotide: Ptpn6-947
gaguucuggauccgaauaug

SEQ ID NO: 4696 - RNA, 17 nt, Artificial Sequence
  Synthetic oligonucleotide: Ptpn6-621
gaguucuggauccgaau

SEQ ID NO: 4697 - RNA, 20 nt, Artificial Sequence
  Synthetic oligonucleotide: Ptpn6-152
gguggagcauuucaagaaga

SEQ ID NO: 4698 - RNA, 17 nt, Artificial Sequence
  Synthetic oligonucleotide: Ptpn6-247
ggagcauuucaagaaga

SEQ ID NO: 4699 - RNA, 20 nt, Artificial Sequence
  Synthetic oligonucleotide: Ptpn6-412
ucuucuugaaaugcuccacc

SEQ ID NO: 4700 - RNA, 17 nt, Artificial Sequence
  Synthetic oligonucleotide: Ptpn6-952
ucuucuugaaaugcucc

SEQ ID NO: 4701 - RNA, 20 nt, Artificial Sequence
  Synthetic oligonucleotide: Ptpn6-953
ggcccuuugguuuccgccua

SEQ ID NO: 4702 - RNA, 20 nt, Artificial Sequence
  Synthetic oligonucleotide: Ptpn6-954
ggguaagucccgggcaccau

SEQ ID NO: 4703 - RNA, 20 nt, Artificial Sequence
  Synthetic oligonucleotide: Ptpn6-955
gguaagucccgggcaccauc

SEQ ID NO: 4704 - RNA, 20 nt, Artificial Sequence
  Synthetic oligonucleotide: Ptpn6-956
gccugcuguacucccgcuuu

SEQ ID NO: 4705 - RNA, 20 nt, Artificial Sequence
  Synthetic oligonucleotide: Ptpn6-957
gggggaaaccucuccguagg

SEQ ID NO: 4706 - RNA, 20 nt, Artificial Sequence
  Synthetic oligonucleotide: Ptpn6-958
gguccucacaccuugcggga

SEQ ID NO: 4707 - RNA, 20 nt, Artificial Sequence
  Synthetic oligonucleotide: Ptpn6-959
ggcggaaaccaaagggccua

SEQ ID NO: 4708 - RNA, 20 nt, Artificial Sequence
  Synthetic oligonucleotide: Ptpn6-960
ggacgugggagggccuucgc

SEQ ID NO: 4709 - RNA, 20 nt, Artificial Sequence
  Synthetic oligonucleotide: Ptpn6-961
gcacucacguucacacacgu

SEQ ID NO: 4710 - RNA, 20 nt, Artificial Sequence
  Synthetic oligonucleotide: Ptpn6-962
guccucacaccuugcgggaa

SEQ ID NO: 4711 - RNA, 17 nt, Artificial Sequence
  Synthetic oligonucleotide: Ptpn6-963
gguuuccgccuacggag

SEQ ID NO: 4712 - RNA, 17 nt, Artificial Sequence
  Synthetic oligonucleotide: Ptpn6-964
gucccguggguaagucc

SEQ ID NO: 4713 - RNA, 17 nt, Artificial Sequence
  Synthetic oligonucleotide: Ptpn6-965
ggaaaccucuccguagg

SEQ ID NO: 4714 - RNA, 17 nt, Artificial Sequence
  Synthetic oligonucleotide: Ptpn6-966
gaccggaaacaggcgca

SEQ ID NO: 4715 - RNA, 17 nt, Artificial Sequence
  Synthetic oligonucleotide: Ptpn6-967
gggggaaaccucuccgu

SEQ ID NO: 4716 - RNA, 17 nt, Artificial Sequence
  Synthetic oligonucleotide: Ptpn6-968
ggaccggaaacaggcgc

SEQ ID NO: 4717 - RNA, 20 nt, Artificial Sequence
  Synthetic oligonucleotide: Ptpn6-969
uuugguuuccgccuacggag

SEQ ID NO: 4718 - RNA, 20 nt, Artificial Sequence
  Synthetic oligonucleotide: Ptpn6-970
uacucccgcuuuggggcugc

SEQ ID NO: 4719 - RNA, 20 nt, Artificial Sequence
  Synthetic oligonucleotide: Ptpn6-971
acagagagaugcugucccgu

SEQ ID NO: 4720 - RNA, 20 nt, Artificial Sequence
  Synthetic oligonucleotide: Ptpn6-972
ccgcaaggugugaggacccc

SEQ ID NO: 4721 - RNA, 20 nt, Artificial Sequence
  Synthetic oligonucleotide: Ptpn6-973
cugucccguggguaaguccc

SEQ ID NO: 4722 - RNA, 20 nt, Artificial Sequence
  Synthetic oligonucleotide: Ptpn6-974
cuggccgcugugggcggucu

SEQ ID NO: 4723 - RNA, 20 nt, Artificial Sequence
  Synthetic oligonucleotide: Ptpn6-975
ugcuuaggaccugucccccu

SEQ ID NO: 4724 - RNA, 20 nt, Artificial Sequence
  Synthetic oligonucleotide: Ptpn6-976
cugagcgguucuuccucacc

SEQ ID NO: 4725 - RNA, 20 nt, Artificial Sequence
  Synthetic oligonucleotide: Ptpn6-977
cagucagaggccacccgcga

SEQ ID NO: 4726 - RNA, 20 nt, Artificial Sequence
  Synthetic oligonucleotide: Ptpn6-978
ugacagagcggcgggguauu

SEQ ID NO: 4727 - RNA, 20 nt, Artificial Sequence
  Synthetic oligonucleotide: Ptpn6-979
ugggaccaaagucugauguu

SEQ ID NO: 4728 - RNA, 20 nt, Artificial Sequence
  Synthetic oligonucleotide: Ptpn6-980
agagcggcgggguauugggu

SEQ ID NO: 4729 - RNA, 20 nt, Artificial Sequence
  Synthetic oligonucleotide: Ptpn6-981
ucuccguaggcggaaaccaa

SEQ ID NO: 4730 - RNA, 20 nt, Artificial Sequence
  Synthetic oligonucleotide: Ptpn6-982
cuccguaggcggaaaccaaa

SEQ ID NO: 4731 - RNA, 20 nt, Artificial Sequence
  Synthetic oligonucleotide: Ptpn6-983
augggaccaaagucugaugu

SEQ ID NO: 4732 - RNA, 20 nt, Artificial Sequence
  Synthetic oligonucleotide: Ptpn6-984
aguucauagggaccggaaac

SEQ ID NO: 4733 - RNA, 20 nt, Artificial Sequence
  Synthetic oligonucleotide: Ptpn6-985
uagggaccggaaacaggcgc

SEQ ID NO: 4734 - RNA, 20 nt, Artificial Sequence
  Synthetic oligonucleotide: Ptpn6-986
acccuggacuaauagucucc

SEQ ID NO: 4735 - RNA, 20 nt, Artificial Sequence
  Synthetic oligonucleotide: Ptpn6-987
cgggacagcaucucucugua

SEQ ID NO: 4736 - RNA, 20 nt, Artificial Sequence
  Synthetic oligonucleotide: Ptpn6-988
uggcccgagaccgcccacag

SEQ ID NO: 4737 - RNA, 20 nt, Artificial Sequence
  Synthetic oligonucleotide: Ptpn6-989
agcggcgggguauuggguag

SEQ ID NO: 4738 - RNA, 20 nt, Artificial Sequence
  Synthetic oligonucleotide: Ptpn6-990
ccggggguccucacaccuug

SEQ ID NO: 4739 - RNA, 20 nt, Artificial Sequence
  Synthetic oligonucleotide: Ptpn6-991
aagccacggcagagggccgc

SEQ ID NO: 4740 - RNA, 20 nt, Artificial Sequence
  Synthetic oligonucleotide: Ptpn6-992
aaugggggaaaccucuccgu

SEQ ID NO: 4741 - RNA, 20 nt, Artificial Sequence
  Synthetic oligonucleotide: Ptpn6-993
ugagguguugugagcuaccc

SEQ ID NO: 4742 - RNA, 20 nt, Artificial Sequence
  Synthetic oligonucleotide: Ptpn6-994
agggaccggaaacaggcgca

SEQ ID NO: 4743 - RNA, 20 nt, Artificial Sequence
  Synthetic oligonucleotide: Ptpn6-995
uggugcccgggacuuaccca

SEQ ID NO: 4744 - RNA, 17 nt, Artificial Sequence
  Synthetic oligonucleotide: Ptpn6-996
ugcuguacucccgcuuu

SEQ ID NO: 4745 - RNA, 17 nt, Artificial Sequence
  Synthetic oligonucleotide: Ptpn6-997
ccuuugguuuccgccua

SEQ ID NO: 4746 - RNA, 17 nt, Artificial Sequence
  Synthetic oligonucleotide: Ptpn6-998
agcgguucuuccucacc

SEQ ID NO: 4747 - RNA, 17 nt, Artificial Sequence
  Synthetic oligonucleotide: Ptpn6-999
ccguaggcggaaaccaa

SEQ ID NO: 4748 - RNA, 17 nt, Artificial Sequence
  Synthetic oligonucleotide: Ptpn6-1000
cggcgggguauugggua

SEQ ID NO: 4749 - RNA, 17 nt, Artificial Sequence
  Synthetic oligonucleotide: Ptpn6-1001
cguaggcggaaaccaaa

SEQ ID NO: 4750 - RNA, 17 nt, Artificial Sequence
  Synthetic oligonucleotide: Ptpn6-1002
cucacguucacacacgu

SEQ ID NO: 4751 - RNA, 20 nt, Artificial Sequence
  Synthetic oligonucleotide: Ptpn6-1003
ggcuguuagggauuuuccuu

SEQ ID NO: 4752 - RNA, 20 nt, Artificial Sequence
  Synthetic oligonucleotide: Ptpn6-1004
gggauuuuccuuaggcccuu

SEQ ID NO: 4753 - RNA, 20 nt, Artificial Sequence
  Synthetic oligonucleotide: Ptpn6-1005
guaagucccgggcaccaucg

SEQ ID NO: 4754 - RNA, 20 nt, Artificial Sequence
  Synthetic oligonucleotide: Ptpn6-1006
guuugucccugcagugccau

SEQ ID NO: 4755 - RNA, 20 nt, Artificial Sequence
  Synthetic oligonucleotide: Ptpn6-1007
gcugucccguggguaagucc

SEQ ID NO: 4756 - RNA, 20 nt, Artificial Sequence
  Synthetic oligonucleotide: Ptpn6-1008
gcagggaagcuggccgcugu

SEQ ID NO: 4757 - RNA, 20 nt, Artificial Sequence
  Synthetic oligonucleotide: Ptpn6-1009
gcucugucagcuugagcucc

SEQ ID NO: 4758 - RNA, 20 nt, Artificial Sequence
  Synthetic oligonucleotide: Ptpn6-1010
gaaggcggcccuggaccagc

SEQ ID NO: 4759 - RNA, 20 nt, Artificial Sequence
  Synthetic oligonucleotide: Ptpn6-1011
ggccugcuguacucccgcuu

SEQ ID NO: 4760 - RNA, 20 nt, Artificial Sequence
  Synthetic oligonucleotide: Ptpn6-1012
gugccauuggccuggcaggc

SEQ ID NO: 4761 - RNA, 20 nt, Artificial Sequence
  Synthetic oligonucleotide: Ptpn6-1013
gguucuuccucaccuggcuu

SEQ ID NO: 4762 - RNA, 20 nt, Artificial Sequence
  Synthetic oligonucleotide: Ptpn6-1014
gcggcccuggaccagcaggc

SEQ ID NO: 4763 - RNA, 20 nt, Artificial Sequence
  Synthetic oligonucleotide: Ptpn6-1015
gggaagcuggccgcuguggg

SEQ ID NO: 4764 - RNA, 20 nt, Artificial Sequence
  Synthetic oligonucleotide: Ptpn6-1016
ggaaguggcugauuacugag

SEQ ID NO: 4765 - RNA, 20 nt, Artificial Sequence
  Synthetic oligonucleotide: Ptpn6-1017
gguggcuccuccucucccgg

SEQ ID NO: 4766 - RNA, 20 nt, Artificial Sequence
  Synthetic oligonucleotide: Ptpn6-1018
gcuccuccucucccggggga

SEQ ID NO: 4767 - RNA, 20 nt, Artificial Sequence
  Synthetic oligonucleotide: Ptpn6-1019
gcauuucuacuuccagccuc

SEQ ID NO: 4768 - RNA, 20 nt, Artificial Sequence
  Synthetic oligonucleotide: Ptpn6-1020
ggcggcccuggaccagcagg

SEQ ID NO: 4769 - RNA, 20 nt, Artificial Sequence
  Synthetic oligonucleotide: Ptpn6-1021
gcuccagguggagcuccagg

SEQ ID NO: 4770 - RNA, 20 nt, Artificial Sequence
  Synthetic oligonucleotide: Ptpn6-1022
guuaguuuuggagggaggga

SEQ ID NO: 4771 - RNA, 20 nt, Artificial Sequence
  Synthetic oligonucleotide: Ptpn6-1023
gcgggaaggggaaguucaua

SEQ ID NO: 4772 - RNA, 20 nt, Artificial Sequence
  Synthetic oligonucleotide: Ptpn6-1024
gcucaagcugacagagcggc

SEQ ID NO: 4773 - RNA, 20 nt, Artificial Sequence
  Synthetic oligonucleotide: Ptpn6-1025
ggugcccgggacuuacccac

SEQ ID NO: 4774 - RNA, 20 nt, Artificial Sequence
  Synthetic oligonucleotide: Ptpn6-1026
gggccgccuucccccgggag

SEQ ID NO: 4775 - RNA, 20 nt, Artificial Sequence
  Synthetic oligonucleotide: Ptpn6-1027
ggggacagguccuaagcagg

SEQ ID NO: 4776 - RNA, 20 nt, Artificial Sequence
  Synthetic oligonucleotide: Ptpn6-1028
gaacagauacacacuugucc

SEQ ID NO: 4777 - RNA, 20 nt, Artificial Sequence
  Synthetic oligonucleotide: Ptpn6-1029
gcugaggaagagcaaccaau

SEQ ID NO: 4778 - RNA, 20 nt, Artificial Sequence
  Synthetic oligonucleotide: Ptpn6-1030
gcggagaaguuggcuggacg

SEQ ID NO: 4779 - RNA, 20 nt, Artificial Sequence
  Synthetic oligonucleotide: Ptpn6-1031
guugggaagugcggagaagu

SEQ ID NO: 4780 - RNA, 20 nt, Artificial Sequence
  Synthetic oligonucleotide: Ptpn6-1032
ggaagugcggagaaguuggc

SEQ ID NO: 4781 - RNA, 20 nt, Artificial Sequence
  Synthetic oligonucleotide: Ptpn6-1033
gagguguugugagcuaccca

SEQ ID NO: 4782 - RNA, 20 nt, Artificial Sequence
  Synthetic oligonucleotide: Ptpn6-1034
gcagaggagcaugagugagc

SEQ ID NO: 4783 - RNA, 20 nt, Artificial Sequence
  Synthetic oligonucleotide: Ptpn6-1035
gccacggcagagggccgcag

SEQ ID NO: 4784 - RNA, 20 nt, Artificial Sequence
  Synthetic oligonucleotide: Ptpn6-1036
gaggagcaugagugagccgg

SEQ ID NO: 4785 - RNA, 20 nt, Artificial Sequence
  Synthetic oligonucleotide: Ptpn6-1037
gauccugccugccaggccaa

SEQ ID NO: 4786 - RNA, 20 nt, Artificial Sequence
  Synthetic oligonucleotide: Ptpn6-1038
gacuaauagucuccaggaaa

SEQ ID NO: 4787 - RNA, 20 nt, Artificial Sequence
  Synthetic oligonucleotide: Ptpn6-1039
ggcugaggaagagcaaccaa

SEQ ID NO: 4788 - RNA, 20 nt, Artificial Sequence
  Synthetic oligonucleotide: Ptpn6-1040
gccucugacugcuauguuug

SEQ ID NO: 4789 - RNA, 20 nt, Artificial Sequence
  Synthetic oligonucleotide: Ptpn6-1041
gagcggcgggguauugggua

SEQ ID NO: 4790 - RNA, 20 nt, Artificial Sequence
  Synthetic oligonucleotide: Ptpn6-1042
gguguugugagcuacccagg

SEQ ID NO: 4791 - RNA, 20 nt, Artificial Sequence
  Synthetic oligonucleotide: Ptpn6-1043
gacagcaucucucuguaggg

SEQ ID NO: 4792 - RNA, 20 nt, Artificial Sequence
  Synthetic oligonucleotide: Ptpn6-1044
gaaguuggcuggacguggga

SEQ ID NO: 4793 - RNA, 20 nt, Artificial Sequence
  Synthetic oligonucleotide: Ptpn6-1045
gcccaguuccucagagaagg

SEQ ID NO: 4794 - RNA, 20 nt, Artificial Sequence
  Synthetic oligonucleotide: Ptpn6-1046
gccaggccaauggcacugca

SEQ ID NO: 4795 - RNA, 20 nt, Artificial Sequence
  Synthetic oligonucleotide: Ptpn6-1047
gucuccaggaaaaggacagg

SEQ ID NO: 4796 - RNA, 20 nt, Artificial Sequence
  Synthetic oligonucleotide: Ptpn6-1048
ggcacugcagggacaaaccc

SEQ ID NO: 4797 - RNA, 20 nt, Artificial Sequence
  Synthetic oligonucleotide: Ptpn6-1049
gcuucccugcagccccaaag

SEQ ID NO: 4798 - RNA, 20 nt, Artificial Sequence
  Synthetic oligonucleotide: Ptpn6-1050
gcaggcccgccugcuggucc

SEQ ID NO: 4799 - RNA, 20 nt, Artificial Sequence
  Synthetic oligonucleotide: Ptpn6-1051
guccagggccgccuuccccc

SEQ ID NO: 4800 - RNA, 20 nt, Artificial Sequence
  Synthetic oligonucleotide: Ptpn6-1052
gguccagggccgccuucccc

SEQ ID NO: 4801 - RNA, 20 nt, Artificial Sequence
  Synthetic oligonucleotide: Ptpn6-1053
gagggggaagccacggcaga

SEQ ID NO: 4802 - RNA, 20 nt, Artificial Sequence
  Synthetic oligonucleotide: Ptpn6-1054
ggcuggaaguagaaaugcaa

SEQ ID NO: 4803 - RNA, 20 nt, Artificial Sequence
  Synthetic oligonucleotide: Ptpn6-1055
gagccaccuggagcuccacc

SEQ ID NO: 4804 - RNA, 20 nt, Artificial Sequence
  Synthetic oligonucleotide: Ptpn6-1056
gcagagggccgcagggggcg

SEQ ID NO: 4805 - RNA, 20 nt, Artificial Sequence
  Synthetic oligonucleotide: Ptpn6-1057
ggagggggaagccacggcag

SEQ ID NO: 4806 - RNA, 20 nt, Artificial Sequence
  Synthetic oligonucleotide: Ptpn6-1058
gaaugaaugaugcaggggaa

SEQ ID NO: 4807 - RNA, 20 nt, Artificial Sequence
  Synthetic oligonucleotide: Ptpn6-1059
ggaaaaggacagguggggcg

SEQ ID NO: 4808 - RNA, 20 nt, Artificial Sequence
  Synthetic oligonucleotide: Ptpn6-1060
ggcagagggccgcagggggc

SEQ ID NO: 4809 - RNA, 20 nt, Artificial Sequence
  Synthetic oligonucleotide: Ptpn6-1061
gugaaaggaaacaaagaaga

SEQ ID NO: 4810 - RNA, 20 nt, Artificial Sequence
  Synthetic oligonucleotide: Ptpn6-1062
gcaggggaaagggaagugaa

SEQ ID NO: 4811 - RNA, 17 nt, Artificial Sequence
  Synthetic oligonucleotide: Ptpn6-1063
gcuguacucccgcuuug

SEQ ID NO: 4812 - RNA, 17 nt, Artificial Sequence
  Synthetic oligonucleotide: Ptpn6-1064
gccgcugugggcggucu

SEQ ID NO: 4813 - RNA, 17 nt, Artificial Sequence
  Synthetic oligonucleotide: Ptpn6-1065
gagagaugcugucccgu

SEQ ID NO: 4814 - RNA, 17 nt, Artificial Sequence
  Synthetic oligonucleotide: Ptpn6-1066
ggagagguuucccccau

SEQ ID NO: 4815 - RNA, 17 nt, Artificial Sequence
  Synthetic oligonucleotide: Ptpn6-1067
gugcacagcugugccgc

SEQ ID NO: 4816 - RNA, 17 nt, Artificial Sequence
  Synthetic oligonucleotide: Ptpn6-1068
gggaagcuggccgcugu

SEQ ID NO: 4817 - RNA, 17 nt, Artificial Sequence
  Synthetic oligonucleotide: Ptpn6-1069
gaggaacugggcuguua

SEQ ID NO: 4818 - RNA, 17 nt, Artificial Sequence
  Synthetic oligonucleotide: Ptpn6-1070
ggguaccuccuucucug

SEQ ID NO: 4819 - RNA, 17 nt, Artificial Sequence
  Synthetic oligonucleotide: Ptpn6-1071
guugcucuuccucagcc

SEQ ID NO: 4820 - RNA, 17 nt, Artificial Sequence
  Synthetic oligonucleotide: Ptpn6-1072
ggcaggcaggaucgagg

SEQ ID NO: 4821 - RNA, 17 nt, Artificial Sequence
  Synthetic oligonucleotide: Ptpn6-1073
ggcggcccuggaccagc

SEQ ID NO: 4822 - RNA, 17 nt, Artificial Sequence
  Synthetic oligonucleotide: Ptpn6-1074
ggcuccuccucucccgg

SEQ ID NO: 4823 - RNA, 17 nt, Artificial Sequence
  Synthetic oligonucleotide: Ptpn6-1075
gguggcuccuccucucc

SEQ ID NO: 4824 - RNA, 17 nt, Artificial Sequence
  Synthetic oligonucleotide: Ptpn6-1076
gcccuggaccagcaggc

SEQ ID NO: 4825 - RNA, 17 nt, Artificial Sequence
  Synthetic oligonucleotide: Ptpn6-1077
gcuucugccuccugcuu

SEQ ID NO: 4826 - RNA, 17 nt, Artificial Sequence
  Synthetic oligonucleotide: Ptpn6-1078
gcuccagguggagcucc

SEQ ID NO: 4827 - RNA, 17 nt, Artificial Sequence
  Synthetic oligonucleotide: Ptpn6-1079
ggcccuggaccagcagg

SEQ ID NO: 4828 - RNA, 17 nt, Artificial Sequence
  Synthetic oligonucleotide: Ptpn6-1080
guggcuccuccucuccc

SEQ ID NO: 4829 - RNA, 17 nt, Artificial Sequence
  Synthetic oligonucleotide: Ptpn6-1081
gcggcgggguauugggu

SEQ ID NO: 4830 - RNA, 17 nt, Artificial Sequence
  Synthetic oligonucleotide: Ptpn6-1082
gauacacacuuguccag

SEQ ID NO: 4831 - RNA, 17 nt, Artificial Sequence
  Synthetic oligonucleotide: Ptpn6-1083
gguguugugagcuaccc

SEQ ID NO: 4832 - RNA, 17 nt, Artificial Sequence
  Synthetic oligonucleotide: Ptpn6-1084
ggcgggguauuggguag

SEQ ID NO: 4833 - RNA, 17 nt, Artificial Sequence
  Synthetic oligonucleotide: Ptpn6-1085
guguugugagcuaccca

SEQ ID NO: 4834 - RNA, 17 nt, Artificial Sequence
  Synthetic oligonucleotide: Ptpn6-1086
gcccgggacuuacccac

SEQ ID NO: 4835 - RNA, 17 nt, Artificial Sequence
  Synthetic oligonucleotide: Ptpn6-1087
ggaccccgauggugccc

SEQ ID NO: 4836 - RNA, 17 nt, Artificial Sequence
  Synthetic oligonucleotide: Ptpn6-1088
gggaccccgauggugcc

SEQ ID NO: 4837 - RNA, 17 nt, Artificial Sequence
  Synthetic oligonucleotide: Ptpn6-1089
gagcuacccagggggac

SEQ ID NO: 4838 - RNA, 17 nt, Artificial Sequence
  Synthetic oligonucleotide: Ptpn6-1090
gggagggccuucgcggg

SEQ ID NO: 4839 - RNA, 17 nt, Artificial Sequence
  Synthetic oligonucleotide: Ptpn6-1091
gacagguccuaagcagg

SEQ ID NO: 4840 - RNA, 17 nt, Artificial Sequence
  Synthetic oligonucleotide: Ptpn6-1092
ggagcaugagugagccg

SEQ ID NO: 4841 - RNA, 17 nt, Artificial Sequence
  Synthetic oligonucleotide: Ptpn6-1093
ggguccucacaccuugc

SEQ ID NO: 4842 - RNA, 17 nt, Artificial Sequence
  Synthetic oligonucleotide: Ptpn6-1094
ggaccaaagucugaugu

SEQ ID NO: 4843 - RNA, 17 nt, Artificial Sequence
  Synthetic oligonucleotide: Ptpn6-1095
gaccaaagucugauguu

SEQ ID NO: 4844 - RNA, 17 nt, Artificial Sequence
  Synthetic oligonucleotide: Ptpn6-1096
ggggacagguccuaagc

SEQ ID NO: 4845 - RNA, 17 nt, Artificial Sequence
  Synthetic oligonucleotide: Ptpn6-1097
gagcaugagugagccgg

SEQ ID NO: 4846 - RNA, 17 nt, Artificial Sequence
  Synthetic oligonucleotide: Ptpn6-1098
gggguccucacaccuug

SEQ ID NO: 4847 - RNA, 17 nt, Artificial Sequence
  Synthetic oligonucleotide: Ptpn6-1099
gggaaguucauagggac

SEQ ID NO: 4848 - RNA, 17 nt, Artificial Sequence
  Synthetic oligonucleotide: Ptpn6-1100
guugugagcuacccagg

SEQ ID NO: 4849 - RNA, 17 nt, Artificial Sequence
  Synthetic oligonucleotide: Ptpn6-1101
ggagacugggaccccga

SEQ ID NO: 4850 - RNA, 17 nt, Artificial Sequence
  Synthetic oligonucleotide: Ptpn6-1102
gcccgccugcuggucca

SEQ ID NO: 4851 - RNA, 17 nt, Artificial Sequence
  Synthetic oligonucleotide: Ptpn6-1103
ggaaaccaaagggccua

SEQ ID NO: 4852 - RNA, 17 nt, Artificial Sequence
  Synthetic oligonucleotide: Ptpn6-1104
ggaagagcaaccaaugg

SEQ ID NO: 4853 - RNA, 17 nt, Artificial Sequence
  Synthetic oligonucleotide: Ptpn6-1105
gcaucucucuguaggga

SEQ ID NO: 4854 - RNA, 17 nt, Artificial Sequence
  Synthetic oligonucleotide: Ptpn6-1106
ggguaggggaacagacc

SEQ ID NO: 4855 - RNA, 17 nt, Artificial Sequence
  Synthetic oligonucleotide: Ptpn6-1107
gaggaagagcaaccaau

SEQ ID NO: 4856 - RNA, 17 nt, Artificial Sequence
  Synthetic oligonucleotide: Ptpn6-1108
ggaaguaacccuggcug

SEQ ID NO: 4857 - RNA, 17 nt, Artificial Sequence
  Synthetic oligonucleotide: Ptpn6-1109
guuggcuggacguggga

SEQ ID NO: 4858 - RNA, 17 nt, Artificial Sequence
  Synthetic oligonucleotide: Ptpn6-1110
ggaaggggaaguucaua

SEQ ID NO: 4859 - RNA, 17 nt, Artificial Sequence
  Synthetic oligonucleotide: Ptpn6-1111
ggcccgccugcuggucc

SEQ ID NO: 4860 - RNA, 17 nt, Artificial Sequence
  Synthetic oligonucleotide: Ptpn6-1112
ggacagcaucucucugu

SEQ ID NO: 4861 - RNA, 17 nt, Artificial Sequence
  Synthetic oligonucleotide: Ptpn6-1113
gacagcaucucucugua

SEQ ID NO: 4862 - RNA, 17 nt, Artificial Sequence
  Synthetic oligonucleotide: Ptpn6-1114
gggggaagccacggcag

SEQ ID NO: 4863 - RNA, 17 nt, Artificial Sequence
  Synthetic oligonucleotide: Ptpn6-1115
gggaaggggaaguucau

SEQ ID NO: 4864 - RNA, 17 nt, Artificial Sequence
  Synthetic oligonucleotide: Ptpn6-1116
gaggagcaugagugagc

SEQ ID NO: 4865 - RNA, 17 nt, Artificial Sequence
  Synthetic oligonucleotide: Ptpn6-1117
gggaagugcggagaagu

SEQ ID NO: 4866 - RNA, 17 nt, Artificial Sequence
  Synthetic oligonucleotide: Ptpn6-1118
gucuccaggaaaaggac

SEQ ID NO: 4867 - RNA, 17 nt, Artificial Sequence
  Synthetic oligonucleotide: Ptpn6-1119
gggaaaauguuaaagag

SEQ ID NO: 4868 - RNA, 17 nt, Artificial Sequence
  Synthetic oligonucleotide: Ptpn6-1120
gcccaguuccucagaga

SEQ ID NO: 4869 - RNA, 17 nt, Artificial Sequence
  Synthetic oligonucleotide: Ptpn6-1121
guggcccaagccaggug

SEQ ID NO: 4870 - RNA, 17 nt, Artificial Sequence
  Synthetic oligonucleotide: Ptpn6-1122
ggaaaauguuaaagagg

SEQ ID NO: 4871 - RNA, 17 nt, Artificial Sequence
  Synthetic oligonucleotide: Ptpn6-1123
gaaugaugcaggggaaa

SEQ ID NO: 4872 - RNA, 17 nt, Artificial Sequence
  Synthetic oligonucleotide: Ptpn6-1124
gagaaguuggcuggacg

SEQ ID NO: 4873 - RNA, 17 nt, Artificial Sequence
  Synthetic oligonucleotide: Ptpn6-1125
guugaaugaaugaugca

SEQ ID NO: 4874 - RNA, 17 nt, Artificial Sequence
  Synthetic oligonucleotide: Ptpn6-1126
ggggaaaauguuaaaga

SEQ ID NO: 4875 - RNA, 17 nt, Artificial Sequence
  Synthetic oligonucleotide: Ptpn6-1127
gggcggggcugagccag

SEQ ID NO: 4876 - RNA, 17 nt, Artificial Sequence
  Synthetic oligonucleotide: Ptpn6-1128
gagggccgcagggggcg

SEQ ID NO: 4877 - RNA, 17 nt, Artificial Sequence
  Synthetic oligonucleotide: Ptpn6-1129
ggagaggaggagccacc

SEQ ID NO: 4878 - RNA, 17 nt, Artificial Sequence
  Synthetic oligonucleotide: Ptpn6-1130
ggcacagcugugcacag

SEQ ID NO: 4879 - RNA, 17 nt, Artificial Sequence
  Synthetic oligonucleotide: Ptpn6-1131
gaaaaggacaggugggg

SEQ ID NO: 4880 - RNA, 17 nt, Artificial Sequence
  Synthetic oligonucleotide: Ptpn6-1132
gacagguggggcggggc

SEQ ID NO: 4881 - RNA, 17 nt, Artificial Sequence
  Synthetic oligonucleotide: Ptpn6-1133
ggggaagccacggcaga

SEQ ID NO: 4882 - RNA, 17 nt, Artificial Sequence
  Synthetic oligonucleotide: Ptpn6-1134
gcacaguggcccaagcc

SEQ ID NO: 4883 - RNA, 17 nt, Artificial Sequence
  Synthetic oligonucleotide: Ptpn6-1135
ggggaaagggaagugaa

SEQ ID NO: 4884 - RNA, 20 nt, Artificial Sequence
  Synthetic oligonucleotide: Ptpn6-1136
uacggagagguuucccccau

SEQ ID NO: 4885 - RNA, 20 nt, Artificial Sequence
  Synthetic oligonucleotide: Ptpn6-1137
cgcugcccugcgccuguuuc

SEQ ID NO: 4886 - RNA, 20 nt, Artificial Sequence
  Synthetic oligonucleotide: Ptpn6-1138
uuccuggagacuauuagucc

SEQ ID NO: 4887 - RNA, 20 nt, Artificial Sequence
  Synthetic oligonucleotide: Ptpn6-1139
accucaaacauagcagucag

SEQ ID NO: 4888 - RNA, 20 nt, Artificial Sequence
  Synthetic oligonucleotide: Ptpn6-1140
acucccgcuuuggggcugca

SEQ ID NO: 4889 - RNA, 20 nt, Artificial Sequence
  Synthetic oligonucleotide: Ptpn6-1141
acugugcacagcugugccgc

SEQ ID NO: 4890 - RNA, 20 nt, Artificial Sequence
  Synthetic oligonucleotide: Ptpn6-1142
uccccuucccgcaaggugug

SEQ ID NO: 4891 - RNA, 20 nt, Artificial Sequence
  Synthetic oligonucleotide: Ptpn6-1143
ucccagucuccuguuaguuu

SEQ ID NO: 4892 - RNA, 20 nt, Artificial Sequence
  Synthetic oligonucleotide: Ptpn6-1144
uccuggagacuauuagucca

SEQ ID NO: 4893 - RNA, 20 nt, Artificial Sequence
  Synthetic oligonucleotide: Ptpn6-1145
cagucuccuguuaguuuugg

SEQ ID NO: 4894 - RNA, 20 nt, Artificial Sequence
  Synthetic oligonucleotide: Ptpn6-1146
uccuguuaguuuuggaggga

SEQ ID NO: 4895 - RNA, 20 nt, Artificial Sequence
  Synthetic oligonucleotide: Ptpn6-1147
cugcuuaggaccuguccccc

SEQ ID NO: 4896 - RNA, 20 nt, Artificial Sequence
  Synthetic oligonucleotide: Ptpn6-1148
uugguugcucuuccucagcc

SEQ ID NO: 4897 - RNA, 20 nt, Artificial Sequence
  Synthetic oligonucleotide: Ptpn6-1149
uggccgcugugggcggucuc

SEQ ID NO: 4898 - RNA, 20 nt, Artificial Sequence
  Synthetic oligonucleotide: Ptpn6-1150
uggccuggcaggcaggaucg

SEQ ID NO: 4899 - RNA, 20 nt, Artificial Sequence
  Synthetic oligonucleotide: Ptpn6-1151
uacagagagaugcugucccg

SEQ ID NO: 4900 - RNA, 20 nt, Artificial Sequence
  Synthetic oligonucleotide: Ptpn6-1152
ccuggcaggcaggaucgagg

SEQ ID NO: 4901 - RNA, 20 nt, Artificial Sequence
  Synthetic oligonucleotide: Ptpn6-1153
cacuucccaacaucagacuu

SEQ ID NO: 4902 - RNA, 20 nt, Artificial Sequence
  Synthetic oligonucleotide: Ptpn6-1154
ccucagccaggguuacuucc

SEQ ID NO: 4903 - RNA, 20 nt, Artificial Sequence
  Synthetic oligonucleotide: Ptpn6-1155
ccugcuguacucccgcuuug

SEQ ID NO: 4904 - RNA, 20 nt, Artificial Sequence
  Synthetic oligonucleotide: Ptpn6-1156
ucugaggaacugggcuguua

SEQ ID NO: 4905 - RNA, 20 nt, Artificial Sequence
  Synthetic oligonucleotide: Ptpn6-1157
cgguucuuccucaccuggcu

SEQ ID NO: 4906 - RNA, 20 nt, Artificial Sequence
  Synthetic oligonucleotide: Ptpn6-1158
agucuccuguuaguuuugga

SEQ ID NO: 4907 - RNA, 20 nt, Artificial Sequence
  Synthetic oligonucleotide: Ptpn6-1159
augaacuuccccuucccgca

SEQ ID NO: 4908 - RNA, 20 nt, Artificial Sequence
  Synthetic oligonucleotide: Ptpn6-1160
cccccugcggcccucugccg

SEQ ID NO: 4909 - RNA, 20 nt, Artificial Sequence
  Synthetic oligonucleotide: Ptpn6-1161
cuccuguuaguuuuggaggg

SEQ ID NO: 4910 - RNA, 20 nt, Artificial Sequence
  Synthetic oligonucleotide: Ptpn6-1162
ugguugcucuuccucagcca

SEQ ID NO: 4911 - RNA, 20 nt, Artificial Sequence
  Synthetic oligonucleotide: Ptpn6-1163
ugcagugccauuggccuggc

SEQ ID NO: 4912 - RNA, 20 nt, Artificial Sequence
  Synthetic oligonucleotide: Ptpn6-1164
ccuccucucccgggggaagg

SEQ ID NO: 4913 - RNA, 20 nt, Artificial Sequence
  Synthetic oligonucleotide: Ptpn6-1165
cucugaggaacugggcuguu

SEQ ID NO: 4914 - RNA, 20 nt, Artificial Sequence
  Synthetic oligonucleotide: Ptpn6-1166
ugcagggaagcuggccgcug

SEQ ID NO: 4915 - RNA, 20 nt, Artificial Sequence
  Synthetic oligonucleotide: Ptpn6-1167
cccucuuuaacauuuucccc

SEQ ID NO: 4916 - RNA, 20 nt, Artificial Sequence
  Synthetic oligonucleotide: Ptpn6-1168
uaccuccuucucugaggaac

SEQ ID NO: 4917 - RNA, 20 nt, Artificial Sequence
  Synthetic oligonucleotide: Ptpn6-1169
agguggcuccuccucucccg

SEQ ID NO: 4918 - RNA, 20 nt, Artificial Sequence
  Synthetic oligonucleotide: Ptpn6-1170
cgccccaccuguccuuuucc

SEQ ID NO: 4919 - RNA, 20 nt, Artificial Sequence
  Synthetic oligonucleotide: Ptpn6-1171
cucccgggggaaggcggccc

SEQ ID NO: 4920 - RNA, 20 nt, Artificial Sequence
  Synthetic oligonucleotide: Ptpn6-1172
accuccuucucugaggaacu

SEQ ID NO: 4921 - RNA, 20 nt, Artificial Sequence
  Synthetic oligonucleotide: Ptpn6-1173
cugucagcuugagcuccagg

SEQ ID NO: 4922 - RNA, 20 nt, Artificial Sequence
  Synthetic oligonucleotide: Ptpn6-1174
cauuucuacuuccagccucu

SEQ ID NO: 4923 - RNA, 20 nt, Artificial Sequence
  Synthetic oligonucleotide: Ptpn6-1175
ucccugcagugccauuggcc

SEQ ID NO: 4924 - RNA, 20 nt, Artificial Sequence
  Synthetic oligonucleotide: Ptpn6-1176
uggcucagccccgcccccug

SEQ ID NO: 4925 - RNA, 20 nt, Artificial Sequence
  Synthetic oligonucleotide: Ptpn6-1177
ugagcuccagguggagcucc

SEQ ID NO: 4926 - RNA, 20 nt, Artificial Sequence
  Synthetic oligonucleotide: Ptpn6-1178
uguuaguuuuggagggaggg

SEQ ID NO: 4927 - RNA, 20 nt, Artificial Sequence
  Synthetic oligonucleotide: Ptpn6-1179
aggcaggaucgaggaggaag

SEQ ID NO: 4928 - RNA, 20 nt, Artificial Sequence
  Synthetic oligonucleotide: Ptpn6-1180
cccugcaucauucauucaac

SEQ ID NO: 4929 - RNA, 20 nt, Artificial Sequence
  Synthetic oligonucleotide: Ptpn6-1181
cagguggcuccuccucuccc

SEQ ID NO: 4930 - RNA, 20 nt, Artificial Sequence
  Synthetic oligonucleotide: Ptpn6-1182
ccagguggcuccuccucucc

SEQ ID NO: 4931 - RNA, 20 nt, Artificial Sequence
  Synthetic oligonucleotide: Ptpn6-1183
cuuuggggcugcagggaagc

SEQ ID NO: 4932 - RNA, 20 nt, Artificial Sequence
  Synthetic oligonucleotide: Ptpn6-1184
ccugcuucugccuccugcuu

SEQ ID NO: 4933 - RNA, 20 nt, Artificial Sequence
  Synthetic oligonucleotide: Ptpn6-1185
cggggguccucacaccuugc

SEQ ID NO: 4934 - RNA, 20 nt, Artificial Sequence
  Synthetic oligonucleotide: Ptpn6-1186
uccucacaccuugcgggaag

SEQ ID NO: 4935 - RNA, 20 nt, Artificial Sequence
  Synthetic oligonucleotide: Ptpn6-1187
acugggaccccgauggugcc

SEQ ID NO: 4936 - RNA, 20 nt, Artificial Sequence
  Synthetic oligonucleotide: Ptpn6-1188
agcucaagcugacagagcgg

SEQ ID NO: 4937 - RNA, 20 nt, Artificial Sequence
  Synthetic oligonucleotide: Ptpn6-1189
uggacgugggagggccuucg

SEQ ID NO: 4938 - RNA, 20 nt, Artificial Sequence
  Synthetic oligonucleotide: Ptpn6-1190
acgggacagcaucucucugu

SEQ ID NO: 4939 - RNA, 20 nt, Artificial Sequence
  Synthetic oligonucleotide: Ptpn6-1191
ccccaaagcgggaguacagc

SEQ ID NO: 4940 - RNA, 20 nt, Artificial Sequence
  Synthetic oligonucleotide: Ptpn6-1192
auuggguaggggaacagacc

SEQ ID NO: 4941 - RNA, 20 nt, Artificial Sequence
  Synthetic oligonucleotide: Ptpn6-1193
aguacagcaggcccgccugc

SEQ ID NO: 4942 - RNA, 20 nt, Artificial Sequence
  Synthetic oligonucleotide: Ptpn6-1194
agguguugugagcuacccag

SEQ ID NO: 4943 - RNA, 20 nt, Artificial Sequence
  Synthetic oligonucleotide: Ptpn6-1195
cugacagagcggcgggguau

SEQ ID NO: 4944 - RNA, 20 nt, Artificial Sequence
  Synthetic oligonucleotide: Ptpn6-1196
cagggggacagguccuaagc

SEQ ID NO: 4945 - RNA, 20 nt, Artificial Sequence
  Synthetic oligonucleotide: Ptpn6-1197
cugggaccccgauggugccc

SEQ ID NO: 4946 - RNA, 20 nt, Artificial Sequence
  Synthetic oligonucleotide: Ptpn6-1198
ccacggcagagggccgcagg

SEQ ID NO: 4947 - RNA, 20 nt, Artificial Sequence
  Synthetic oligonucleotide: Ptpn6-1199
aaggggaaguucauagggac

SEQ ID NO: 4948 - RNA, 20 nt, Artificial Sequence
  Synthetic oligonucleotide: Ptpn6-1200
uccaaaacuaacaggagacu

SEQ ID NO: 4949 - RNA, 20 nt, Artificial Sequence
  Synthetic oligonucleotide: Ptpn6-1201
ccgccuucccccgggagagg

SEQ ID NO: 4950 - RNA, 20 nt, Artificial Sequence
  Synthetic oligonucleotide: Ptpn6-1202
aacagaccaggaaguaaccc

SEQ ID NO: 4951 - RNA, 20 nt, Artificial Sequence
  Synthetic oligonucleotide: Ptpn6-1203
agaggagcaugagugagccg

SEQ ID NO: 4952 - RNA, 20 nt, Artificial Sequence
  Synthetic oligonucleotide: Ptpn6-1204
acaggagacugggaccccga

SEQ ID NO: 4953 - RNA, 20 nt, Artificial Sequence
  Synthetic oligonucleotide: Ptpn6-1205
ccuccucgauccugccugcc

SEQ ID NO: 4954 - RNA, 20 nt, Artificial Sequence
  Synthetic oligonucleotide: Ptpn6-1206
ugugagcuacccagggggac

SEQ ID NO: 4955 - RNA, 20 nt, Artificial Sequence
  Synthetic oligonucleotide: Ptpn6-1207
acagauacacacuuguccag

SEQ ID NO: 4956 - RNA, 20 nt, Artificial Sequence
  Synthetic oligonucleotide: Ptpn6-1208
ucccucccuccaaaacuaac

SEQ ID NO: 4957 - RNA, 20 nt, Artificial Sequence
  Synthetic oligonucleotide: Ptpn6-1209
agaaguuggcuggacguggg

SEQ ID NO: 4958 - RNA, 20 nt, Artificial Sequence
  Synthetic oligonucleotide: Ptpn6-1210
aacagauacacacuugucca

SEQ ID NO: 4959 - RNA, 20 nt, Artificial Sequence
  Synthetic oligonucleotide: Ptpn6-1211
ugcgggaaggggaaguucau

SEQ ID NO: 4960 - RNA, 20 nt, Artificial Sequence
  Synthetic oligonucleotide: Ptpn6-1212
ucuccaggaaaaggacaggu

SEQ ID NO: 4961 - RNA, 20 nt, Artificial Sequence
  Synthetic oligonucleotide: Ptpn6-1213
aagucugauguugggaagug

SEQ ID NO: 4962 - RNA, 20 nt, Artificial Sequence
  Synthetic oligonucleotide: Ptpn6-1214
cggagaaguuggcuggacgu

SEQ ID NO: 4963 - RNA, 20 nt, Artificial Sequence
  Synthetic oligonucleotide: Ptpn6-1215
acagcaucucucuguaggga

SEQ ID NO: 4964 - RNA, 20 nt, Artificial Sequence
  Synthetic oligonucleotide: Ptpn6-1216
agccacggcagagggccgca

SEQ ID NO: 4965 - RNA, 20 nt, Artificial Sequence
  Synthetic oligonucleotide: Ptpn6-1217
ugccaggccaauggcacugc

SEQ ID NO: 4966 - RNA, 20 nt, Artificial Sequence
  Synthetic oligonucleotide: Ptpn6-1218
cucaagcugacagagcggcg

SEQ ID NO: 4967 - RNA, 20 nt, Artificial Sequence
  Synthetic oligonucleotide: Ptpn6-1219
cggaaacaggcgcagggcag

SEQ ID NO: 4968 - RNA, 20 nt, Artificial Sequence
  Synthetic oligonucleotide: Ptpn6-1220
uggagcucaagcugacagag

SEQ ID NO: 4969 - RNA, 20 nt, Artificial Sequence
  Synthetic oligonucleotide: Ptpn6-1221
ugaggaagagcaaccaaugg

SEQ ID NO: 4970 - RNA, 20 nt, Artificial Sequence
  Synthetic oligonucleotide: Ptpn6-1222
agcaucucucuguagggagg

SEQ ID NO: 4971 - RNA, 20 nt, Artificial Sequence
  Synthetic oligonucleotide: Ptpn6-1223
auagucuccaggaaaaggac

SEQ ID NO: 4972 - RNA, 20 nt, Artificial Sequence
  Synthetic oligonucleotide: Ptpn6-1224
aaauguuaaagagggggcag

SEQ ID NO: 4973 - RNA, 20 nt, Artificial Sequence
  Synthetic oligonucleotide: Ptpn6-1225
cuccaaaacuaacaggagac

SEQ ID NO: 4974 - RNA, 20 nt, Artificial Sequence
  Synthetic oligonucleotide: Ptpn6-1226
caggcccgccugcuggucca

SEQ ID NO: 4975 - RNA, 20 nt, Artificial Sequence
  Synthetic oligonucleotide: Ptpn6-1227
ccaggggaaaauguuaaaga

SEQ ID NO: 4976 - RNA, 20 nt, Artificial Sequence
  Synthetic oligonucleotide: Ptpn6-1228
cagcaucucucuguagggag

SEQ ID NO: 4977 - RNA, 20 nt, Artificial Sequence
  Synthetic oligonucleotide: Ptpn6-1229
cgugggagggccuucgcggg

SEQ ID NO: 4978 - RNA, 20 nt, Artificial Sequence
  Synthetic oligonucleotide: Ptpn6-1230
acagcccaguuccucagaga

SEQ ID NO: 4979 - RNA, 20 nt, Artificial Sequence
  Synthetic oligonucleotide: Ptpn6-1231
ccaggaaguaacccuggcug

SEQ ID NO: 4980 - RNA, 20 nt, Artificial Sequence
  Synthetic oligonucleotide: Ptpn6-1232
caggggaaaauguuaaagag

SEQ ID NO: 4981 - RNA, 20 nt, Artificial Sequence
  Synthetic oligonucleotide: Ptpn6-1233
aggggaaaauguuaaagagg

SEQ ID NO: 4982 - RNA, 20 nt, Artificial Sequence
  Synthetic oligonucleotide: Ptpn6-1234
cggcagagggccgcaggggg

SEQ ID NO: 4983 - RNA, 20 nt, Artificial Sequence
  Synthetic oligonucleotide: Ptpn6-1235
acaguggcccaagccaggug

SEQ ID NO: 4984 - RNA, 20 nt, Artificial Sequence
  Synthetic oligonucleotide: Ptpn6-1236
uccaggggaaaauguuaaag

SEQ ID NO: 4985 - RNA, 20 nt, Artificial Sequence
  Synthetic oligonucleotide: Ptpn6-1237
cagaggagcaugagugagcc

SEQ ID NO: 4986 - RNA, 20 nt, Artificial Sequence
  Synthetic oligonucleotide: Ptpn6-1238
ccgggagaggaggagccacc

SEQ ID NO: 4987 - RNA, 20 nt, Artificial Sequence
  Synthetic oligonucleotide: Ptpn6-1239
cugaggaagagcaaccaaug

SEQ ID NO: 4988 - RNA, 20 nt, Artificial Sequence
  Synthetic oligonucleotide: Ptpn6-1240
agcggcacagcugugcacag

SEQ ID NO: 4989 - RNA, 20 nt, Artificial Sequence
  Synthetic oligonucleotide: Ptpn6-1241
cuguugaaugaaugaugcag

SEQ ID NO: 4990 - RNA, 20 nt, Artificial Sequence
  Synthetic oligonucleotide: Ptpn6-1242
cuucccugcagccccaaagc

SEQ ID NO: 4991 - RNA, 20 nt, Artificial Sequence
  Synthetic oligonucleotide: Ptpn6-1243
cuccaggaaaaggacaggug

SEQ ID NO: 4992 - RNA, 20 nt, Artificial Sequence
  Synthetic oligonucleotide: Ptpn6-1244
aaugaaugaugcaggggaaa

SEQ ID NO: 4993 - RNA, 20 nt, Artificial Sequence
  Synthetic oligonucleotide: Ptpn6-1245
cuguagggagggggaagcca

SEQ ID NO: 4994 - RNA, 20 nt, Artificial Sequence
  Synthetic oligonucleotide: Ptpn6-1246
aaggacagguggggcggggc

SEQ ID NO: 4995 - RNA, 20 nt, Artificial Sequence
  Synthetic oligonucleotide: Ptpn6-1247
ugugcacaguggcccaagcc

SEQ ID NO: 4996 - RNA, 20 nt, Artificial Sequence
  Synthetic oligonucleotide: Ptpn6-1248
agaagcaggagcccagaggc

SEQ ID NO: 4997 - RNA, 20 nt, Artificial Sequence
  Synthetic oligonucleotide: Ptpn6-1249
accuguugaaugaaugaugc

SEQ ID NO: 4998 - RNA, 20 nt, Artificial Sequence
  Synthetic oligonucleotide: Ptpn6-1250
ccuguugaaugaaugaugca

SEQ ID NO: 4999 - RNA, 20 nt, Artificial Sequence
  Synthetic oligonucleotide: Ptpn6-1251
aggaaaaggacagguggggc

SEQ ID NO: 5000 - RNA, 20 nt, Artificial Sequence
  Synthetic oligonucleotide: Ptpn6-1252
caggaaaaggacaggugggg

SEQ ID NO: 5001 - RNA, 20 nt, Artificial Sequence
  Synthetic oligonucleotide: Ptpn6-1253
agggggcggggcugagccag

SEQ ID NO: 5002 - RNA, 20 nt, Artificial Sequence
  Synthetic oligonucleotide: Ptpn6-1254
ugaaaggaaacaaagaagau

SEQ ID NO: 5003 - RNA, 20 nt, Artificial Sequence
  Synthetic oligonucleotide: Ptpn6-1255
aggcagaagcaggagcccag

SEQ ID NO: 5004 - RNA, 20 nt, Artificial Sequence
  Synthetic oligonucleotide: Ptpn6-1256
ccuaagcaggaggcagaagc

SEQ ID NO: 5005 - RNA, 17 nt, Artificial Sequence
  Synthetic oligonucleotide: Ptpn6-1257
uuaggaccugucccccu

SEQ ID NO: 5006 - RNA, 17 nt, Artificial Sequence
  Synthetic oligonucleotide: Ptpn6-1258
ucccguggguaaguccc

SEQ ID NO: 5007 - RNA, 17 nt, Artificial Sequence
  Synthetic oligonucleotide: Ptpn6-1259
agucccgggcaccaucg

SEQ ID NO: 5008 - RNA, 17 nt, Artificial Sequence
  Synthetic oligonucleotide: Ptpn6-1260
uaagucccgggcaccau

SEQ ID NO: 5009 - RNA, 17 nt, Artificial Sequence
  Synthetic oligonucleotide: Ptpn6-1261
aagucccgggcaccauc

SEQ ID NO: 5010 - RNA, 17 nt, Artificial Sequence
  Synthetic oligonucleotide: Ptpn6-1262
ucagaggccacccgcga

SEQ ID NO: 5011 - RNA, 17 nt, Artificial Sequence
  Synthetic oligonucleotide: Ptpn6-1263
ccgcugugggcggucuc

SEQ ID NO: 5012 - RNA, 17 nt, Artificial Sequence
  Synthetic oligonucleotide: Ptpn6-1264
aacuuccccuucccgca

SEQ ID NO: 5013 - RNA, 17 nt, Artificial Sequence
  Synthetic oligonucleotide: Ptpn6-1265
ugcccugcgccuguuuc

SEQ ID NO: 5014 - RNA, 17 nt, Artificial Sequence
  Synthetic oligonucleotide: Ptpn6-1266
ccuucccgcaaggugug

SEQ ID NO: 5015 - RNA, 17 nt, Artificial Sequence
  Synthetic oligonucleotide: Ptpn6-1267
cccgcuuuggggcugca

SEQ ID NO: 5016 - RNA, 17 nt, Artificial Sequence
  Synthetic oligonucleotide: Ptpn6-1268
ccugcggcccucugccg

SEQ ID NO: 5017 - RNA, 17 nt, Artificial Sequence
  Synthetic oligonucleotide: Ptpn6-1269
ucaaacauagcagucag

SEQ ID NO: 5018 - RNA, 17 nt, Artificial Sequence
  Synthetic oligonucleotide: Ptpn6-1270
cuuaggaccuguccccc

SEQ ID NO: 5019 - RNA, 17 nt, Artificial Sequence
  Synthetic oligonucleotide: Ptpn6-1271
auuuuccuuaggcccuu

SEQ ID NO: 5020 - RNA, 17 nt, Artificial Sequence
  Synthetic oligonucleotide: Ptpn6-1272
cuggagacuauuagucc

SEQ ID NO: 5021 - RNA, 17 nt, Artificial Sequence
  Synthetic oligonucleotide: Ptpn6-1273
uucccaacaucagacuu

SEQ ID NO: 5022 - RNA, 17 nt, Artificial Sequence
  Synthetic oligonucleotide: Ptpn6-1274
aagcuggccgcuguggg

SEQ ID NO: 5023 - RNA, 17 nt, Artificial Sequence
  Synthetic oligonucleotide: Ptpn6-1275
uguuagggauuuuccuu

SEQ ID NO: 5024 - RNA, 17 nt, Artificial Sequence
  Synthetic oligonucleotide: Ptpn6-1276
aguggcugauuacugag

SEQ ID NO: 5025 - RNA, 17 nt, Artificial Sequence
  Synthetic oligonucleotide: Ptpn6-1277
agugccauuggccuggc

SEQ ID NO: 5026 - RNA, 17 nt, Artificial Sequence
  Synthetic oligonucleotide: Ptpn6-1278
cuguuaguuuuggaggg

SEQ ID NO: 5027 - RNA, 17 nt, Artificial Sequence
  Synthetic oligonucleotide: Ptpn6-1279
ucuccuguuaguuuugg

SEQ ID NO: 5028 - RNA, 17 nt, Artificial Sequence
  Synthetic oligonucleotide: Ptpn6-1280
ugucccugcagugccau

SEQ ID NO: 5029 - RNA, 17 nt, Artificial Sequence
  Synthetic oligonucleotide: Ptpn6-1281
agagagaugcugucccg

SEQ ID NO: 5030 - RNA, 17 nt, Artificial Sequence
  Synthetic oligonucleotide: Ptpn6-1282
cuccuguuaguuuugga

SEQ ID NO: 5031 - RNA, 17 nt, Artificial Sequence
  Synthetic oligonucleotide: Ptpn6-1283
cagccaggguuacuucc

SEQ ID NO: 5032 - RNA, 17 nt, Artificial Sequence
  Synthetic oligonucleotide: Ptpn6-1284
ccauuggccuggcaggc

SEQ ID NO: 5033 - RNA, 17 nt, Artificial Sequence
  Synthetic oligonucleotide: Ptpn6-1285
uggagacuauuagucca

SEQ ID NO: 5034 - RNA, 17 nt, Artificial Sequence
  Synthetic oligonucleotide: Ptpn6-1286
ugcaucauucauucaac

SEQ ID NO: 5035 - RNA, 17 nt, Artificial Sequence
  Synthetic oligonucleotide: Ptpn6-1287
cugcagugccauuggcc

SEQ ID NO: 5036 - RNA, 17 nt, Artificial Sequence
  Synthetic oligonucleotide: Ptpn6-1288
ccuggcaggcaggaucg

SEQ ID NO: 5037 - RNA, 17 nt, Artificial Sequence
  Synthetic oligonucleotide: Ptpn6-1289
ugaggaacugggcuguu

SEQ ID NO: 5038 - RNA, 17 nt, Artificial Sequence
  Synthetic oligonucleotide: Ptpn6-1290
ucagcuugagcuccagg

SEQ ID NO: 5039 - RNA, 17 nt, Artificial Sequence
  Synthetic oligonucleotide: Ptpn6-1291
caaggugugaggacccc

SEQ ID NO: 5040 - RNA, 17 nt, Artificial Sequence
  Synthetic oligonucleotide: Ptpn6-1292
ucuuuaacauuuucccc

SEQ ID NO: 5041 - RNA, 17 nt, Artificial Sequence
  Synthetic oligonucleotide: Ptpn6-1293
uggcuccuccucucccg

SEQ ID NO: 5042 - RNA, 17 nt, Artificial Sequence
  Synthetic oligonucleotide: Ptpn6-1294
caggaucgaggaggaag

SEQ ID NO: 5043 - RNA, 17 nt, Artificial Sequence
  Synthetic oligonucleotide: Ptpn6-1295
agggaagcuggccgcug

SEQ ID NO: 5044 - RNA, 17 nt, Artificial Sequence
  Synthetic oligonucleotide: Ptpn6-1296
ccuccucucccggggga

SEQ ID NO: 5045 - RNA, 17 nt, Artificial Sequence
  Synthetic oligonucleotide: Ptpn6-1297
ccucucccgggggaagg

SEQ ID NO: 5046 - RNA, 17 nt, Artificial Sequence
  Synthetic oligonucleotide: Ptpn6-1298
cccaccuguccuuuucc

SEQ ID NO: 5047 - RNA, 17 nt, Artificial Sequence
  Synthetic oligonucleotide: Ptpn6-1299
cuccuucucugaggaac

SEQ ID NO: 5048 - RNA, 17 nt, Artificial Sequence
  Synthetic oligonucleotide: Ptpn6-1300
uccuucucugaggaacu

SEQ ID NO: 5049 - RNA, 17 nt, Artificial Sequence
  Synthetic oligonucleotide: Ptpn6-1301
uucuuccucaccuggcu

SEQ ID NO: 5050 - RNA, 17 nt, Artificial Sequence
  Synthetic oligonucleotide: Ptpn6-1302
uugcucuuccucagcca

SEQ ID NO: 5051 - RNA, 17 nt, Artificial Sequence
  Synthetic oligonucleotide: Ptpn6-1303
ccgggggaaggcggccc

SEQ ID NO: 5052 - RNA, 17 nt, Artificial Sequence
  Synthetic oligonucleotide: Ptpn6-1304
cucagccccgcccccug

SEQ ID NO: 5053 - RNA, 17 nt, Artificial Sequence
  Synthetic oligonucleotide: Ptpn6-1305
ucuuccucaccuggcuu

SEQ ID NO: 5054 - RNA, 17 nt, Artificial Sequence
  Synthetic oligonucleotide: Ptpn6-1306
uucuacuuccagccucu

SEQ ID NO: 5055 - RNA, 17 nt, Artificial Sequence
  Synthetic oligonucleotide: Ptpn6-1307
uguuaguuuuggaggga

SEQ ID NO: 5056 - RNA, 17 nt, Artificial Sequence
  Synthetic oligonucleotide: Ptpn6-1308
uuucuacuuccagccuc

SEQ ID NO: 5057 - RNA, 17 nt, Artificial Sequence
  Synthetic oligonucleotide: Ptpn6-1309
cugucagcuugagcucc

SEQ ID NO: 5058 - RNA, 17 nt, Artificial Sequence
  Synthetic oligonucleotide: Ptpn6-1310
uaguuuuggagggaggg

SEQ ID NO: 5059 - RNA, 17 nt, Artificial Sequence
  Synthetic oligonucleotide: Ptpn6-1311
cagucuccuguuaguuu

SEQ ID NO: 5060 - RNA, 17 nt, Artificial Sequence
  Synthetic oligonucleotide: Ptpn6-1312
ucccgcuuuggggcugc

SEQ ID NO: 5061 - RNA, 17 nt, Artificial Sequence
  Synthetic oligonucleotide: Ptpn6-1313
ccagguggagcuccagg

SEQ ID NO: 5062 - RNA, 17 nt, Artificial Sequence
  Synthetic oligonucleotide: Ptpn6-1314
aguuuuggagggaggga

SEQ ID NO: 5063 - RNA, 17 nt, Artificial Sequence
  Synthetic oligonucleotide: Ptpn6-1315
uggggcugcagggaagc

SEQ ID NO: 5064 - RNA, 17 nt, Artificial Sequence
  Synthetic oligonucleotide: Ptpn6-1316
cugcuguacucccgcuu

SEQ ID NO: 5065 - RNA, 17 nt, Artificial Sequence
  Synthetic oligonucleotide: Ptpn6-1317
ucauagggaccggaaac

SEQ ID NO: 5066 - RNA, 17 nt, Artificial Sequence
  Synthetic oligonucleotide: Ptpn6-1318
acagagcggcgggguau

SEQ ID NO: 5067 - RNA, 17 nt, Artificial Sequence
  Synthetic oligonucleotide: Ptpn6-1319
ucaagcugacagagcgg

SEQ ID NO: 5068 - RNA, 17 nt, Artificial Sequence
  Synthetic oligonucleotide: Ptpn6-1320
cagagcggcgggguauu

SEQ ID NO: 5069 - RNA, 17 nt, Artificial Sequence
  Synthetic oligonucleotide: Ptpn6-1321
cuggacuaauagucucc

SEQ ID NO: 5070 - RNA, 17 nt, Artificial Sequence
  Synthetic oligonucleotide: Ptpn6-1322
ugcccgggacuuaccca

SEQ ID NO: 5071 - RNA, 17 nt, Artificial Sequence
  Synthetic oligonucleotide: Ptpn6-1323
cgugggagggccuucgc

SEQ ID NO: 5072 - RNA, 17 nt, Artificial Sequence
  Synthetic oligonucleotide: Ptpn6-1324
aagcugacagagcggcg

SEQ ID NO: 5073 - RNA, 17 nt, Artificial Sequence
  Synthetic oligonucleotide: Ptpn6-1325
cccgagaccgcccacag

SEQ ID NO: 5074 - RNA, 17 nt, Artificial Sequence
  Synthetic oligonucleotide: Ptpn6-1326
acgugggagggccuucg

SEQ ID NO: 5075 - RNA, 17 nt, Artificial Sequence
  Synthetic oligonucleotide: Ptpn6-1327
ucacaccuugcgggaag

SEQ ID NO: 5076 - RNA, 17 nt, Artificial Sequence
  Synthetic oligonucleotide: Ptpn6-1328
agaaguuggcuggacgu

SEQ ID NO: 5077 - RNA, 17 nt, Artificial Sequence
  Synthetic oligonucleotide: Ptpn6-1329
agugcggagaaguuggc

SEQ ID NO: 5078 - RNA, 17 nt, Artificial Sequence
  Synthetic oligonucleotide: Ptpn6-1330
caaagcgggaguacagc

SEQ ID NO: 5079 - RNA, 17 nt, Artificial Sequence
  Synthetic oligonucleotide: Ptpn6-1331
caagcugacagagcggc

SEQ ID NO: 5080 - RNA, 17 nt, Artificial Sequence
  Synthetic oligonucleotide: Ptpn6-1332
cagauacacacuugucc

SEQ ID NO: 5081 - RNA, 17 nt, Artificial Sequence
  Synthetic oligonucleotide: Ptpn6-1333
ccgccuucccccgggag

SEQ ID NO: 5082 - RNA, 17 nt, Artificial Sequence
  Synthetic oligonucleotide: Ptpn6-1334
ucugacugcuauguuug

SEQ ID NO: 5083 - RNA, 17 nt, Artificial Sequence
  Synthetic oligonucleotide: Ptpn6-1335
acggcagagggccgcag

SEQ ID NO: 5084 - RNA, 17 nt, Artificial Sequence
  Synthetic oligonucleotide: Ptpn6-1336
cucccuccaaaacuaac

SEQ ID NO: 5085 - RNA, 17 nt, Artificial Sequence
  Synthetic oligonucleotide: Ptpn6-1337
ccucacaccuugcggga

SEQ ID NO: 5086 - RNA, 17 nt, Artificial Sequence
  Synthetic oligonucleotide: Ptpn6-1338
ccacggcagagggccgc

SEQ ID NO: 5087 - RNA, 17 nt, Artificial Sequence
  Synthetic oligonucleotide: Ptpn6-1339
agauacacacuugucca

SEQ ID NO: 5088 - RNA, 17 nt, Artificial Sequence
  Synthetic oligonucleotide: Ptpn6-1340
aguuggcuggacguggg

SEQ ID NO: 5089 - RNA, 17 nt, Artificial Sequence
  Synthetic oligonucleotide: Ptpn6-1341
aggccaauggcacugca

SEQ ID NO: 5090 - RNA, 17 nt, Artificial Sequence
  Synthetic oligonucleotide: Ptpn6-1342
uaauagucuccaggaaa

SEQ ID NO: 5091 - RNA, 17 nt, Artificial Sequence
  Synthetic oligonucleotide: Ptpn6-1343
acugcagggacaaaccc

SEQ ID NO: 5092 - RNA, 17 nt, Artificial Sequence
  Synthetic oligonucleotide: Ptpn6-1344
uguuaaagagggggcag

SEQ ID NO: 5093 - RNA, 17 nt, Artificial Sequence
  Synthetic oligonucleotide: Ptpn6-1345
cucacaccuugcgggaa

SEQ ID NO: 5094 - RNA, 17 nt, Artificial Sequence
  Synthetic oligonucleotide: Ptpn6-1346
ccucgauccugccugcc

SEQ ID NO: 5095 - RNA, 17 nt, Artificial Sequence
  Synthetic oligonucleotide: Ptpn6-1347
agcaucucucuguaggg

SEQ ID NO: 5096 - RNA, 17 nt, Artificial Sequence
  Synthetic oligonucleotide: Ptpn6-1348
caggccaauggcacugc

SEQ ID NO: 5097 - RNA, 17 nt, Artificial Sequence
  Synthetic oligonucleotide: Ptpn6-1349
agcucaagcugacagag

SEQ ID NO: 5098 - RNA, 17 nt, Artificial Sequence
  Synthetic oligonucleotide: Ptpn6-1350
agaccaggaaguaaccc

SEQ ID NO: 5099 - RNA, 17 nt, Artificial Sequence
  Synthetic oligonucleotide: Ptpn6-1351
aucucucuguagggagg

SEQ ID NO: 5100 - RNA, 17 nt, Artificial Sequence
  Synthetic oligonucleotide: Ptpn6-1352
ccuucccccgggagagg

SEQ ID NO: 5101 - RNA, 17 nt, Artificial Sequence
  Synthetic oligonucleotide: Ptpn6-1353
cggcagagggccgcagg

SEQ ID NO: 5102 - RNA, 17 nt, Artificial Sequence
  Synthetic oligonucleotide: Ptpn6-1354
uguugugagcuacccag

SEQ ID NO: 5103 - RNA, 17 nt, Artificial Sequence
  Synthetic oligonucleotide: Ptpn6-1355
aggaagagcaaccaaug

SEQ ID NO: 5104 - RNA, 17 nt, Artificial Sequence
  Synthetic oligonucleotide: Ptpn6-1356
acagcaggcccgccugc

SEQ ID NO: 5105 - RNA, 17 nt, Artificial Sequence
  Synthetic oligonucleotide: Ptpn6-1357
caucucucuguagggag

SEQ ID NO: 5106 - RNA, 17 nt, Artificial Sequence
  Synthetic oligonucleotide: Ptpn6-1358
ugaggaagagcaaccaa

SEQ ID NO: 5107 - RNA, 17 nt, Artificial Sequence
  Synthetic oligonucleotide: Ptpn6-1359
caaaacuaacaggagac

SEQ ID NO: 5108 - RNA, 17 nt, Artificial Sequence
  Synthetic oligonucleotide: Ptpn6-1360
aaaacuaacaggagacu

SEQ ID NO: 5109 - RNA, 17 nt, Artificial Sequence
  Synthetic oligonucleotide: Ptpn6-1361
aaacaggcgcagggcag

SEQ ID NO: 5110 - RNA, 17 nt, Artificial Sequence
  Synthetic oligonucleotide: Ptpn6-1362
ugaaugaugcaggggaa

SEQ ID NO: 5111 - RNA, 17 nt, Artificial Sequence
  Synthetic oligonucleotide: Ptpn6-1363
cagagggccgcaggggg

SEQ ID NO: 5112 - RNA, 17 nt, Artificial Sequence
  Synthetic oligonucleotide: Ptpn6-1364
cagggccgccuuccccc

SEQ ID NO: 5113 - RNA, 17 nt, Artificial Sequence
  Synthetic oligonucleotide: Ptpn6-1365
caguuccucagagaagg

SEQ ID NO: 5114 - RNA, 17 nt, Artificial Sequence
  Synthetic oligonucleotide: Ptpn6-1366
ucugauguugggaagug

SEQ ID NO: 5115 - RNA, 17 nt, Artificial Sequence
  Synthetic oligonucleotide: Ptpn6-1367
ccugccugccaggccaa

SEQ ID NO: 5116 - RNA, 17 nt, Artificial Sequence
  Synthetic oligonucleotide: Ptpn6-1368
ccaggaaaaggacaggu

SEQ ID NO: 5117 - RNA, 17 nt, Artificial Sequence
  Synthetic oligonucleotide: Ptpn6-1369
ucccugcagccccaaag

SEQ ID NO: 5118 - RNA, 17 nt, Artificial Sequence
  Synthetic oligonucleotide: Ptpn6-1370
uugaaugaaugaugcag

SEQ ID NO: 5119 - RNA, 17 nt, Artificial Sequence
  Synthetic oligonucleotide: Ptpn6-1371
uccaggaaaaggacagg

SEQ ID NO: 5120 - RNA, 17 nt, Artificial Sequence
  Synthetic oligonucleotide: Ptpn6-1372
aggagcaugagugagcc

SEQ ID NO: 5121 - RNA, 17 nt, Artificial Sequence
  Synthetic oligonucleotide: Ptpn6-1373
aggggaaaauguuaaag

SEQ ID NO: 5122 - RNA, 17 nt, Artificial Sequence
  Synthetic oligonucleotide: Ptpn6-1374
uggaaguagaaaugcaa

SEQ ID NO: 5123 - RNA, 17 nt, Artificial Sequence
  Synthetic oligonucleotide: Ptpn6-1375
aaaggacagguggggcg

SEQ ID NO: 5124 - RNA, 17 nt, Artificial Sequence
  Synthetic oligonucleotide: Ptpn6-1376
cccugcagccccaaagc

SEQ ID NO: 5125 - RNA, 17 nt, Artificial Sequence
  Synthetic oligonucleotide: Ptpn6-1377
uagggagggggaagcca

SEQ ID NO: 5126 - RNA, 17 nt, Artificial Sequence
  Synthetic oligonucleotide: Ptpn6-1378
agagggccgcagggggc

SEQ ID NO: 5127 - RNA, 17 nt, Artificial Sequence
  Synthetic oligonucleotide: Ptpn6-1379
ccagggccgccuucccc

SEQ ID NO: 5128 - RNA, 17 nt, Artificial Sequence
  Synthetic oligonucleotide: Ptpn6-1380
aaaaggacagguggggc

SEQ ID NO: 5129 - RNA, 17 nt, Artificial Sequence
  Synthetic oligonucleotide: Ptpn6-1381
cagaagcaggagcccag

SEQ ID NO: 5130 - RNA, 17 nt, Artificial Sequence
  Synthetic oligonucleotide: Ptpn6-1382
caggaaaaggacaggug

SEQ ID NO: 5131 - RNA, 17 nt, Artificial Sequence
  Synthetic oligonucleotide: Ptpn6-1383
cacggcagagggccgca

SEQ ID NO: 5132 - RNA, 17 nt, Artificial Sequence
  Synthetic oligonucleotide: Ptpn6-1384
uguugaaugaaugaugc

SEQ ID NO: 5133 - RNA, 17 nt, Artificial Sequence
  Synthetic oligonucleotide: Ptpn6-1385
agcaggagcccagaggc

SEQ ID NO: 5134 - RNA, 17 nt, Artificial Sequence
  Synthetic oligonucleotide: Ptpn6-1386
ccaccuggagcuccacc

SEQ ID NO: 5135 - RNA, 17 nt, Artificial Sequence
  Synthetic oligonucleotide: Ptpn6-1387
aaggaaacaaagaagau

SEQ ID NO: 5136 - RNA, 17 nt, Artificial Sequence
  Synthetic oligonucleotide: Ptpn6-1388
aagcaggaggcagaagc

SEQ ID NO: 5137 - RNA, 17 nt, Artificial Sequence
  Synthetic oligonucleotide: Ptpn6-1389
aaaggaaacaaagaaga

SEQ ID NO: 5138 - RNA, 20 nt, Artificial Sequence
  Synthetic oligonucleotide: Ptpn6-1390
cugauucccucugccuuucc

SEQ ID NO: 5139 - RNA, 20 nt, Artificial Sequence
  Synthetic oligonucleotide: Ptpn6-1391
cccugaacagcuccucccua

SEQ ID NO: 5140 - RNA, 20 nt, Artificial Sequence
  Synthetic oligonucleotide: Ptpn6-1392
acagcuccucccuauggucc

SEQ ID NO: 5141 - RNA, 20 nt, Artificial Sequence
  Synthetic oligonucleotide: Ptpn6-1393
cuccucccuaugguccuggc

SEQ ID NO: 5142 - RNA, 20 nt, Artificial Sequence
  Synthetic oligonucleotide: Ptpn6-1394
uccucccuaugguccuggcu

SEQ ID NO: 5143 - RNA, 20 nt, Artificial Sequence
  Synthetic oligonucleotide: Ptpn6-1395
gcugggccuaacccugcccc

SEQ ID NO: 5144 - RNA, 20 nt, Artificial Sequence
  Synthetic oligonucleotide: Ptpn6-1396
cugggccuaacccugcccca

SEQ ID NO: 5145 - RNA, 20 nt, Artificial Sequence
  Synthetic oligonucleotide: Ptpn6-1397
ccagggccuaacccuaccug

SEQ ID NO: 5146 - RNA, 20 nt, Artificial Sequence
  Synthetic oligonucleotide: Ptpn6-1398
ugaggcuccuccccuucccc

SEQ ID NO: 5147 - RNA, 20 nt, Artificial Sequence
  Synthetic oligonucleotide: Ptpn6-1399
gaggcuccuccccuuccccc

SEQ ID NO: 5148 - RNA, 20 nt, Artificial Sequence
  Synthetic oligonucleotide: Ptpn6-1400
aggcuccuccccuucccccg

SEQ ID NO: 5149 - RNA, 20 nt, Artificial Sequence
  Synthetic oligonucleotide: Ptpn6-1401
uccuccccuucccccggggc

SEQ ID NO: 5150 - RNA, 20 nt, Artificial Sequence
  Synthetic oligonucleotide: Ptpn6-1402
uucccccggggcagguugag

SEQ ID NO: 5151 - RNA, 20 nt, Artificial Sequence
  Synthetic oligonucleotide: Ptpn6-1403
cccggggcagguugagaggc

SEQ ID NO: 5152 - RNA, 20 nt, Artificial Sequence
  Synthetic oligonucleotide: Ptpn6-1404
ggcagguugagaggcuggag

SEQ ID NO: 5153 - RNA, 20 nt, Artificial Sequence
  Synthetic oligonucleotide: Ptpn6-1405
gcagguugagaggcuggagu

SEQ ID NO: 5154 - RNA, 20 nt, Artificial Sequence
  Synthetic oligonucleotide: Ptpn6-1406
gagugggucccucagcgccc

SEQ ID NO: 5155 - RNA, 20 nt, Artificial Sequence
  Synthetic oligonucleotide: Ptpn6-1407
agugggucccucagcgcccu

SEQ ID NO: 5156 - RNA, 20 nt, Artificial Sequence
  Synthetic oligonucleotide: Ptpn6-1408
gggucccucagcgcccuggg

SEQ ID NO: 5157 - RNA, 20 nt, Artificial Sequence
  Synthetic oligonucleotide: Ptpn6-1409
ggucccucagcgcccugggu

SEQ ID NO: 5158 - RNA, 20 nt, Artificial Sequence
  Synthetic oligonucleotide: Ptpn6-1410
cccucagcgcccuggguggg

SEQ ID NO: 5159 - RNA, 20 nt, Artificial Sequence
  Synthetic oligonucleotide: Ptpn6-1411
ccucagcgcccugggugggu

SEQ ID NO: 5160 - RNA, 20 nt, Artificial Sequence
  Synthetic oligonucleotide: Ptpn6-1412
guuuaagaugcugguaauac

SEQ ID NO: 5161 - RNA, 20 nt, Artificial Sequence
  Synthetic oligonucleotide: Ptpn6-1413
uggagugaacaagacagaca

SEQ ID NO: 5162 - RNA, 20 nt, Artificial Sequence
  Synthetic oligonucleotide: Ptpn6-1414
agacauggucucugcucuca

SEQ ID NO: 5163 - RNA, 20 nt, Artificial Sequence
  Synthetic oligonucleotide: Ptpn6-1415
ucacggagcuuacauuccag

SEQ ID NO: 5164 - RNA, 20 nt, Artificial Sequence
  Synthetic oligonucleotide: Ptpn6-1416
cacggagcuuacauuccagu

SEQ ID NO: 5165 - RNA, 20 nt, Artificial Sequence
  Synthetic oligonucleotide: Ptpn6-1417
ggagcuuacauuccaguggg

SEQ ID NO: 5166 - RNA, 20 nt, Artificial Sequence
  Synthetic oligonucleotide: Ptpn6-1418
gaacaaauaacccaauaaau

SEQ ID NO: 5167 - RNA, 20 nt, Artificial Sequence
  Synthetic oligonucleotide: Ptpn6-1419
acgcagaaaauagacagccu

SEQ ID NO: 5168 - RNA, 20 nt, Artificial Sequence
  Synthetic oligonucleotide: Ptpn6-1420
agaaaauagacagccuuggc

SEQ ID NO: 5169 - RNA, 20 nt, Artificial Sequence
  Synthetic oligonucleotide: Ptpn6-1421
gaaaauagacagccuuggcc

SEQ ID NO: 5170 - RNA, 20 nt, Artificial Sequence
  Synthetic oligonucleotide: Ptpn6-1422
acagccuuggccggguguag

SEQ ID NO: 5171 - RNA, 20 nt, Artificial Sequence
  Synthetic oligonucleotide: Ptpn6-1423
caccugugaucccagcacug

SEQ ID NO: 5172 - RNA, 20 nt, Artificial Sequence
  Synthetic oligonucleotide: Ptpn6-1424
accugugaucccagcacugu

SEQ ID NO: 5173 - RNA, 20 nt, Artificial Sequence
  Synthetic oligonucleotide: Ptpn6-1425
ugugaucccagcacuguggg

SEQ ID NO: 5174 - RNA, 20 nt, Artificial Sequence
  Synthetic oligonucleotide: Ptpn6-1426
cccagcacugugggaggcug

SEQ ID NO: 5175 - RNA, 20 nt, Artificial Sequence
  Synthetic oligonucleotide: Ptpn6-1427
cugugggaggcugaggcgag

SEQ ID NO: 5176 - RNA, 20 nt, Artificial Sequence
  Synthetic oligonucleotide: Ptpn6-1428
cgagaggauugcuugagccc

SEQ ID NO: 5177 - RNA, 20 nt, Artificial Sequence
  Synthetic oligonucleotide: Ptpn6-1429
ccaggaguuugagaccagcc

SEQ ID NO: 5178 - RNA, 20 nt, Artificial Sequence
  Synthetic oligonucleotide: Ptpn6-1430
acaaaaaauaagaaauuagc

SEQ ID NO: 5179 - RNA, 20 nt, Artificial Sequence
  Synthetic oligonucleotide: Ptpn6-1431
caaaaaauaagaaauuagcu

SEQ ID NO: 5180 - RNA, 20 nt, Artificial Sequence
  Synthetic oligonucleotide: Ptpn6-1432
aauaagaaauuagcugggug

SEQ ID NO: 5181 - RNA, 20 nt, Artificial Sequence
  Synthetic oligonucleotide: Ptpn6-1433
aagaaauuagcugggugugg

SEQ ID NO: 5182 - RNA, 20 nt, Artificial Sequence
  Synthetic oligonucleotide: Ptpn6-1434
gugugguggcacacguccug

SEQ ID NO: 5183 - RNA, 20 nt, Artificial Sequence
  Synthetic oligonucleotide: Ptpn6-1435
acguccugugguuccagcua

SEQ ID NO: 5184 - RNA, 20 nt, Artificial Sequence
  Synthetic oligonucleotide: Ptpn6-1436
cugugguuccagcuauggag

SEQ ID NO: 5185 - RNA, 20 nt, Artificial Sequence
  Synthetic oligonucleotide: Ptpn6-1437
uuccagcuauggagaggcua

SEQ ID NO: 5186 - RNA, 20 nt, Artificial Sequence
  Synthetic oligonucleotide: Ptpn6-1438
uauggagaggcuaaggugag

SEQ ID NO: 5187 - RNA, 20 nt, Artificial Sequence
  Synthetic oligonucleotide: Ptpn6-1439
gugagaggcuugcuugagcc

SEQ ID NO: 5188 - RNA, 20 nt, Artificial Sequence
  Synthetic oligonucleotide: Ptpn6-1440
ugagaggcuugcuugagccu

SEQ ID NO: 5189 - RNA, 20 nt, Artificial Sequence
  Synthetic oligonucleotide: Ptpn6-1441
gaggcuugcuugagccuggg

SEQ ID NO: 5190 - RNA, 20 nt, Artificial Sequence
  Synthetic oligonucleotide: Ptpn6-1442
ugcuugagccugggagguca

SEQ ID NO: 5191 - RNA, 20 nt, Artificial Sequence
  Synthetic oligonucleotide: Ptpn6-1443
ugcaccacugcacaccagcc

SEQ ID NO: 5192 - RNA, 20 nt, Artificial Sequence
  Synthetic oligonucleotide: Ptpn6-1444
gcaccacugcacaccagccu

SEQ ID NO: 5193 - RNA, 20 nt, Artificial Sequence
  Synthetic oligonucleotide: Ptpn6-1445
uucauaugcuagcaagugac

SEQ ID NO: 5194 - RNA, 20 nt, Artificial Sequence
  Synthetic oligonucleotide: Ptpn6-1446
ucauaugcuagcaagugacu

SEQ ID NO: 5195 - RNA, 20 nt, Artificial Sequence
  Synthetic oligonucleotide: Ptpn6-1447
cauaugcuagcaagugacug

SEQ ID NO: 5196 - RNA, 20 nt, Artificial Sequence
  Synthetic oligonucleotide: Ptpn6-1448
auaugcuagcaagugacugg

SEQ ID NO: 5197 - RNA, 20 nt, Artificial Sequence
  Synthetic oligonucleotide: Ptpn6-1449
uaugcuagcaagugacuggg

SEQ ID NO: 5198 - RNA, 17 nt, Artificial Sequence
  Synthetic oligonucleotide: Ptpn6-1450
auucccucugccuuucc

SEQ ID NO: 5199 - RNA, 17 nt, Artificial Sequence
  Synthetic oligonucleotide: Ptpn6-1451
ugaacagcuccucccua

SEQ ID NO: 5200 - RNA, 17 nt, Artificial Sequence
  Synthetic oligonucleotide: Ptpn6-1452
gcuccucccuauggucc

SEQ ID NO: 5201 - RNA, 17 nt, Artificial Sequence
  Synthetic oligonucleotide: Ptpn6-1453
cucccuaugguccuggc

SEQ ID NO: 5202 - RNA, 17 nt, Artificial Sequence
  Synthetic oligonucleotide: Ptpn6-1454
ucccuaugguccuggcu

SEQ ID NO: 5203 - RNA, 17 nt, Artificial Sequence
  Synthetic oligonucleotide: Ptpn6-1455
gggccuaacccugcccc

SEQ ID NO: 5204 - RNA, 17 nt, Artificial Sequence
  Synthetic oligonucleotide: Ptpn6-1456
ggccuaacccugcccca

SEQ ID NO: 5205 - RNA, 17 nt, Artificial Sequence
  Synthetic oligonucleotide: Ptpn6-1457
gggccuaacccuaccug

SEQ ID NO: 5206 - RNA, 17 nt, Artificial Sequence
  Synthetic oligonucleotide: Ptpn6-1458
ggcuccuccccuucccc

SEQ ID NO: 5207 - RNA, 17 nt, Artificial Sequence
  Synthetic oligonucleotide: Ptpn6-1459
gcuccuccccuuccccc

SEQ ID NO: 5208 - RNA, 17 nt, Artificial Sequence
  Synthetic oligonucleotide: Ptpn6-1460
cuccuccccuucccccg

SEQ ID NO: 5209 - RNA, 17 nt, Artificial Sequence
  Synthetic oligonucleotide: Ptpn6-1461
uccccuucccccggggc

SEQ ID NO: 5210 - RNA, 17 nt, Artificial Sequence
  Synthetic oligonucleotide: Ptpn6-1462
ccccggggcagguugag

SEQ ID NO: 5211 - RNA, 17 nt, Artificial Sequence
  Synthetic oligonucleotide: Ptpn6-1463
ggggcagguugagaggc

SEQ ID NO: 5212 - RNA, 17 nt, Artificial Sequence
  Synthetic oligonucleotide: Ptpn6-1464
agguugagaggcuggag

SEQ ID NO: 5213 - RNA, 17 nt, Artificial Sequence
  Synthetic oligonucleotide: Ptpn6-1465
gguugagaggcuggagu

SEQ ID NO: 5214 - RNA, 17 nt, Artificial Sequence
  Synthetic oligonucleotide: Ptpn6-1466
ugggucccucagcgccc

SEQ ID NO: 5215 - RNA, 17 nt, Artificial Sequence
  Synthetic oligonucleotide: Ptpn6-1467
gggucccucagcgcccu

SEQ ID NO: 5216 - RNA, 17 nt, Artificial Sequence
  Synthetic oligonucleotide: Ptpn6-1468
ucccucagcgcccuggg

SEQ ID NO: 5217 - RNA, 17 nt, Artificial Sequence
  Synthetic oligonucleotide: Ptpn6-1469
cccucagcgcccugggu

SEQ ID NO: 5218 - RNA, 17 nt, Artificial Sequence
  Synthetic oligonucleotide: Ptpn6-1470
ucagcgcccuggguggg

SEQ ID NO: 5219 - RNA, 17 nt, Artificial Sequence
  Synthetic oligonucleotide: Ptpn6-1471
cagcgcccugggugggu

SEQ ID NO: 5220 - RNA, 17 nt, Artificial Sequence
  Synthetic oligonucleotide: Ptpn6-1472
uaagaugcugguaauac

SEQ ID NO: 5221 - RNA, 17 nt, Artificial Sequence
  Synthetic oligonucleotide: Ptpn6-1473
agugaacaagacagaca

SEQ ID NO: 5222 - RNA, 17 nt, Artificial Sequence
  Synthetic oligonucleotide: Ptpn6-1474
cauggucucugcucuca

SEQ ID NO: 5223 - RNA, 17 nt, Artificial Sequence
  Synthetic oligonucleotide: Ptpn6-1475
cggagcuuacauuccag

SEQ ID NO: 5224 - RNA, 17 nt, Artificial Sequence
  Synthetic oligonucleotide: Ptpn6-1476
ggagcuuacauuccagu

SEQ ID NO: 5225 - RNA, 17 nt, Artificial Sequence
  Synthetic oligonucleotide: Ptpn6-1477
gcuuacauuccaguggg

SEQ ID NO: 5226 - RNA, 17 nt, Artificial Sequence
  Synthetic oligonucleotide: Ptpn6-1478
caaauaacccaauaaau

SEQ ID NO: 5227 - RNA, 17 nt, Artificial Sequence
  Synthetic oligonucleotide: Ptpn6-1479
cagaaaauagacagccu

SEQ ID NO: 5228 - RNA, 17 nt, Artificial Sequence
  Synthetic oligonucleotide: Ptpn6-1480
aaauagacagccuuggc

SEQ ID NO: 5229 - RNA, 17 nt, Artificial Sequence
  Synthetic oligonucleotide: Ptpn6-1481
aauagacagccuuggcc

SEQ ID NO: 5230 - RNA, 17 nt, Artificial Sequence
  Synthetic oligonucleotide: Ptpn6-1482
gccuuggccggguguag

SEQ ID NO: 5231 - RNA, 17 nt, Artificial Sequence
  Synthetic oligonucleotide: Ptpn6-1483
cugugaucccagcacug

SEQ ID NO: 5232 - RNA, 17 nt, Artificial Sequence
  Synthetic oligonucleotide: Ptpn6-1484
ugugaucccagcacugu

SEQ ID NO: 5233 - RNA, 17 nt, Artificial Sequence
  Synthetic oligonucleotide: Ptpn6-1485
gaucccagcacuguggg

SEQ ID NO: 5234 - RNA, 17 nt, Artificial Sequence
  Synthetic oligonucleotide: Ptpn6-1486
agcacugugggaggcug

SEQ ID NO: 5235 - RNA, 17 nt, Artificial Sequence
  Synthetic oligonucleotide: Ptpn6-1487
ugggaggcugaggcgag

SEQ ID NO: 5236 - RNA, 17 nt, Artificial Sequence
  Synthetic oligonucleotide: Ptpn6-1488
gaggauugcuugagccc

SEQ ID NO: 5237 - RNA, 17 nt, Artificial Sequence
  Synthetic oligonucleotide: Ptpn6-1489
ggaguuugagaccagcc

SEQ ID NO: 5238 - RNA, 17 nt, Artificial Sequence
  Synthetic oligonucleotide: Ptpn6-1490
aaaaauaagaaauuagc

SEQ ID NO: 5239 - RNA, 17 nt, Artificial Sequence
  Synthetic oligonucleotide: Ptpn6-1491
aaaauaagaaauuagcu

SEQ ID NO: 5240 - RNA, 17 nt, Artificial Sequence
  Synthetic oligonucleotide: Ptpn6-1492
aagaaauuagcugggug

SEQ ID NO: 5241 - RNA, 17 nt, Artificial Sequence
  Synthetic oligonucleotide: Ptpn6-1493
aaauuagcugggugugg

SEQ ID NO: 5242 - RNA, 17 nt, Artificial Sequence
  Synthetic oligonucleotide: Ptpn6-1494
ugguggcacacguccug

SEQ ID NO: 5243 - RNA, 17 nt, Artificial Sequence
  Synthetic oligonucleotide: Ptpn6-1495
uccugugguuccagcua

SEQ ID NO: 5244 - RNA, 17 nt, Artificial Sequence
  Synthetic oligonucleotide: Ptpn6-1496
ugguuccagcuauggag

SEQ ID NO: 5245 - RNA, 17 nt, Artificial Sequence
  Synthetic oligonucleotide: Ptpn6-1497
cagcuauggagaggcua

SEQ ID NO: 5246 - RNA, 17 nt, Artificial Sequence
  Synthetic oligonucleotide: Ptpn6-1498
ggagaggcuaaggugag

SEQ ID NO: 5247 - RNA, 17 nt, Artificial Sequence
  Synthetic oligonucleotide: Ptpn6-1499
agaggcuugcuugagcc

SEQ ID NO: 5248 - RNA, 17 nt, Artificial Sequence
  Synthetic oligonucleotide: Ptpn6-1500
gaggcuugcuugagccu

SEQ ID NO: 5249 - RNA, 17 nt, Artificial Sequence
  Synthetic oligonucleotide: Ptpn6-1501
gcuugcuugagccuggg

SEQ ID NO: 5250 - RNA, 17 nt, Artificial Sequence
  Synthetic oligonucleotide: Ptpn6-1502
uugagccugggagguca

SEQ ID NO: 5251 - RNA, 17 nt, Artificial Sequence
  Synthetic oligonucleotide: Ptpn6-1503
accacugcacaccagcc

SEQ ID NO: 5252 - RNA, 17 nt, Artificial Sequence
  Synthetic oligonucleotide: Ptpn6-1504
ccacugcacaccagccu

SEQ ID NO: 5253 - RNA, 17 nt, Artificial Sequence
  Synthetic oligonucleotide: Ptpn6-1505
auaugcuagcaagugac

SEQ ID NO: 5254 - RNA, 17 nt, Artificial Sequence
  Synthetic oligonucleotide: Ptpn6-1506
uaugcuagcaagugacu

SEQ ID NO: 5255 - RNA, 17 nt, Artificial Sequence
  Synthetic oligonucleotide: Ptpn6-1507
augcuagcaagugacug

SEQ ID NO: 5256 - RNA, 17 nt, Artificial Sequence
  Synthetic oligonucleotide: Ptpn6-1508
ugcuagcaagugacugg

SEQ ID NO: 5257 - RNA, 17 nt, Artificial Sequence
  Synthetic oligonucleotide: Ptpn6-1509
gcuagcaagugacuggg

SEQ ID NO: 5258 - RNA, 20 nt, Artificial Sequence
  Synthetic oligonucleotide: Ptpn6-1510
cccacccacccagggcgcug

SEQ ID NO: 5259 - RNA, 20 nt, Artificial Sequence
  Synthetic oligonucleotide: Ptpn6-1511
ccacccacccagggcgcuga

SEQ ID NO: 5260 - RNA, 20 nt, Artificial Sequence
  Synthetic oligonucleotide: Ptpn6-1512
uccagccucucaaccugccc

SEQ ID NO: 5261 - RNA, 20 nt, Artificial Sequence
  Synthetic oligonucleotide: Ptpn6-1513
ccagccucucaaccugcccc

SEQ ID NO: 5262 - RNA, 20 nt, Artificial Sequence
  Synthetic oligonucleotide: Ptpn6-1514
cagccucucaaccugccccg

SEQ ID NO: 5263 - RNA, 20 nt, Artificial Sequence
  Synthetic oligonucleotide: Ptpn6-1515
agccucucaaccugccccgg

SEQ ID NO: 5264 - RNA, 20 nt, Artificial Sequence
  Synthetic oligonucleotide: Ptpn6-1516
ucucaaccugccccggggga

SEQ ID NO: 5265 - RNA, 20 nt, Artificial Sequence
  Synthetic oligonucleotide: Ptpn6-1517
cucaaccugccccgggggaa

SEQ ID NO: 5266 - RNA, 20 nt, Artificial Sequence
  Synthetic oligonucleotide: Ptpn6-1518
ucaaccugccccgggggaag

SEQ ID NO: 5267 - RNA, 20 nt, Artificial Sequence
  Synthetic oligonucleotide: Ptpn6-1519
accugccccgggggaagggg

SEQ ID NO: 5268 - RNA, 20 nt, Artificial Sequence
  Synthetic oligonucleotide: Ptpn6-1520
gggggaaggggaggagccuc

SEQ ID NO: 5269 - RNA, 20 nt, Artificial Sequence
  Synthetic oligonucleotide: Ptpn6-1521
gaaggggaggagccucaggu

SEQ ID NO: 5270 - RNA, 20 nt, Artificial Sequence
  Synthetic oligonucleotide: Ptpn6-1522
aaggggaggagccucaggua

SEQ ID NO: 5271 - RNA, 20 nt, Artificial Sequence
  Synthetic oligonucleotide: Ptpn6-1523
gaggagccucagguaggguu

SEQ ID NO: 5272 - RNA, 20 nt, Artificial Sequence
  Synthetic oligonucleotide: Ptpn6-1524
ccucagguaggguuaggccc

SEQ ID NO: 5273 - RNA, 20 nt, Artificial Sequence
  Synthetic oligonucleotide: Ptpn6-1525
cucagguaggguuaggcccu

SEQ ID NO: 5274 - RNA, 20 nt, Artificial Sequence
  Synthetic oligonucleotide: Ptpn6-1526
ucagguaggguuaggcccug

SEQ ID NO: 5275 - RNA, 20 nt, Artificial Sequence
  Synthetic oligonucleotide: Ptpn6-1527
guaggguuaggcccuggggc

SEQ ID NO: 5276 - RNA, 20 nt, Artificial Sequence
  Synthetic oligonucleotide: Ptpn6-1528
uaggguuaggcccuggggca

SEQ ID NO: 5277 - RNA, 20 nt, Artificial Sequence
  Synthetic oligonucleotide: Ptpn6-1529
uuaggcccuggggcaggguu

SEQ ID NO: 5278 - RNA, 20 nt, Artificial Sequence
  Synthetic oligonucleotide: Ptpn6-1530
gggcaggguuaggcccagcc

SEQ ID NO: 5279 - RNA, 20 nt, Artificial Sequence
  Synthetic oligonucleotide: Ptpn6-1531
uuaggcccagccaggaccau

SEQ ID NO: 5280 - RNA, 20 nt, Artificial Sequence
  Synthetic oligonucleotide: Ptpn6-1532
uaggcccagccaggaccaua

SEQ ID NO: 5281 - RNA, 20 nt, Artificial Sequence
  Synthetic oligonucleotide: Ptpn6-1533
gcccagccaggaccauaggg

SEQ ID NO: 5282 - RNA, 20 nt, Artificial Sequence
  Synthetic oligonucleotide: Ptpn6-1534
accauagggaggagcuguuc

SEQ ID NO: 5283 - RNA, 20 nt, Artificial Sequence
  Synthetic oligonucleotide: Ptpn6-1535
ccauagggaggagcuguuca

SEQ ID NO: 5284 - RNA, 20 nt, Artificial Sequence
  Synthetic oligonucleotide: Ptpn6-1536
cauagggaggagcuguucag

SEQ ID NO: 5285 - RNA, 20 nt, Artificial Sequence
  Synthetic oligonucleotide: Ptpn6-1537
auagggaggagcuguucagg

SEQ ID NO: 5286 - RNA, 20 nt, Artificial Sequence
  Synthetic oligonucleotide: Ptpn6-1538
ggaggagcuguucaggggga

SEQ ID NO: 5287 - RNA, 20 nt, Artificial Sequence
  Synthetic oligonucleotide: Ptpn6-1539
gaggagcuguucagggggau

SEQ ID NO: 5288 - RNA, 20 nt, Artificial Sequence
  Synthetic oligonucleotide: Ptpn6-1540
aggagcuguucagggggaug

SEQ ID NO: 5289 - RNA, 20 nt, Artificial Sequence
  Synthetic oligonucleotide: Ptpn6-1541
cuguucagggggauggggcc

SEQ ID NO: 5290 - RNA, 20 nt, Artificial Sequence
  Synthetic oligonucleotide: Ptpn6-1542
cagggggauggggccuggaa

SEQ ID NO: 5291 - RNA, 20 nt, Artificial Sequence
  Synthetic oligonucleotide: Ptpn6-1543
gauggggccuggaaaggcag

SEQ ID NO: 5292 - RNA, 20 nt, Artificial Sequence
  Synthetic oligonucleotide: Ptpn6-1544
auggggccuggaaaggcaga

SEQ ID NO: 5293 - RNA, 20 nt, Artificial Sequence
  Synthetic oligonucleotide: Ptpn6-1545
cuggaaaggcagagggaauc

SEQ ID NO: 5294 - RNA, 20 nt, Artificial Sequence
  Synthetic oligonucleotide: Ptpn6-1546
uggaaaggcagagggaauca

SEQ ID NO: 5295 - RNA, 20 nt, Artificial Sequence
  Synthetic oligonucleotide: Ptpn6-1547
aaggcagagggaaucaggga

SEQ ID NO: 5296 - RNA, 20 nt, Artificial Sequence
  Synthetic oligonucleotide: Ptpn6-1548
gggaaucagggaaggagaga

SEQ ID NO: 5297 - RNA, 20 nt, Artificial Sequence
  Synthetic oligonucleotide: Ptpn6-1549
ggaaucagggaaggagagau

SEQ ID NO: 5298 - RNA, 20 nt, Artificial Sequence
  Synthetic oligonucleotide: Ptpn6-1550
gaaucagggaaggagagaug

SEQ ID NO: 5299 - RNA, 20 nt, Artificial Sequence
  Synthetic oligonucleotide: Ptpn6-1551
aaucagggaaggagagaugg

SEQ ID NO: 5300 - RNA, 20 nt, Artificial Sequence
  Synthetic oligonucleotide: Ptpn6-1552
aaggagagauggggguuguc

SEQ ID NO: 5301 - RNA, 20 nt, Artificial Sequence
  Synthetic oligonucleotide: Ptpn6-1553
uccgcaagagacugacacca

SEQ ID NO: 5302 - RNA, 20 nt, Artificial Sequence
  Synthetic oligonucleotide: Ptpn6-1554
ccgcaagagacugacaccaa

SEQ ID NO: 5303 - RNA, 20 nt, Artificial Sequence
  Synthetic oligonucleotide: Ptpn6-1555
cgcaagagacugacaccaag

SEQ ID NO: 5304 - RNA, 20 nt, Artificial Sequence
  Synthetic oligonucleotide: Ptpn6-1556
gcaagagacugacaccaagg

SEQ ID NO: 5305 - RNA, 20 nt, Artificial Sequence
  Synthetic oligonucleotide: Ptpn6-1557
cacuugcuagcauaugaagc

SEQ ID NO: 5306 - RNA, 20 nt, Artificial Sequence
  Synthetic oligonucleotide: Ptpn6-1558
uuuuuuuuuuuuuugagaca

SEQ ID NO: 5307 - RNA, 20 nt, Artificial Sequence
  Synthetic oligonucleotide: Ptpn6-1559
aaggucucacucugucgccc

SEQ ID NO: 5308 - RNA, 20 nt, Artificial Sequence
  Synthetic oligonucleotide: Ptpn6-1560
ucucacucugucgcccaggc

SEQ ID NO: 5309 - RNA, 20 nt, Artificial Sequence
  Synthetic oligonucleotide: Ptpn6-1561
ucgcccaggcuggugugcag

SEQ ID NO: 5310 - RNA, 20 nt, Artificial Sequence
  Synthetic oligonucleotide: Ptpn6-1562
gacugcagccuugaccuccc

SEQ ID NO: 5311 - RNA, 20 nt, Artificial Sequence
  Synthetic oligonucleotide: Ptpn6-1563
caccuuagccucuccauagc

SEQ ID NO: 5312 - RNA, 20 nt, Artificial Sequence
  Synthetic oligonucleotide: Ptpn6-1564
cucuccauagcuggaaccac

SEQ ID NO: 5313 - RNA, 20 nt, Artificial Sequence
  Synthetic oligonucleotide: Ptpn6-1565
uucuuauuuuuuguagagac

SEQ ID NO: 5314 - RNA, 20 nt, Artificial Sequence
  Synthetic oligonucleotide: Ptpn6-1566
ucuuauuuuuuguagagaca

SEQ ID NO: 5315 - RNA, 20 nt, Artificial Sequence
  Synthetic oligonucleotide: Ptpn6-1567
gagacagggucucacuauau

SEQ ID NO: 5316 - RNA, 20 nt, Artificial Sequence
  Synthetic oligonucleotide: Ptpn6-1568
agggucucacuauauuggcc

SEQ ID NO: 5317 - RNA, 20 nt, Artificial Sequence
  Synthetic oligonucleotide: Ptpn6-1569
ucucacuauauuggccaggc

SEQ ID NO: 5318 - RNA, 20 nt, Artificial Sequence
  Synthetic oligonucleotide: Ptpn6-1570
ccaggcuggucucaaacucc

SEQ ID NO: 5319 - RNA, 20 nt, Artificial Sequence
  Synthetic oligonucleotide: Ptpn6-1571
caggcuggucucaaacuccu

SEQ ID NO: 5320 - RNA, 20 nt, Artificial Sequence
  Synthetic oligonucleotide: Ptpn6-1572
gccucagccucccacagugc

SEQ ID NO: 5321 - RNA, 20 nt, Artificial Sequence
  Synthetic oligonucleotide: Ptpn6-1573
ccucagccucccacagugcu

SEQ ID NO: 5322 - RNA, 20 nt, Artificial Sequence
  Synthetic oligonucleotide: Ptpn6-1574
ucccacagugcugggaucac

SEQ ID NO: 5323 - RNA, 20 nt, Artificial Sequence
  Synthetic oligonucleotide: Ptpn6-1575
caggugugaaccacuacacc

SEQ ID NO: 5324 - RNA, 20 nt, Artificial Sequence
  Synthetic oligonucleotide: Ptpn6-1576
ugaaccacuacacccggcca

SEQ ID NO: 5325 - RNA, 20 nt, Artificial Sequence
  Synthetic oligonucleotide: Ptpn6-1577
ucugcaaugauccaauuuau

SEQ ID NO: 5326 - RNA, 20 nt, Artificial Sequence
  Synthetic oligonucleotide: Ptpn6-1578
cugcaaugauccaauuuauu

SEQ ID NO: 5327 - RNA, 20 nt, Artificial Sequence
  Synthetic oligonucleotide: Ptpn6-1579
aauuuauuggguuauuuguu

SEQ ID NO: 5328 - RNA, 20 nt, Artificial Sequence
  Synthetic oligonucleotide: Ptpn6-1580
uucggucuguaaccucccac

SEQ ID NO: 5329 - RNA, 17 nt, Artificial Sequence
  Synthetic oligonucleotide: Ptpn6-1581
acccacccagggcgcug

SEQ ID NO: 5330 - RNA, 17 nt, Artificial Sequence
  Synthetic oligonucleotide: Ptpn6-1582
cccacccagggcgcuga

SEQ ID NO: 5331 - RNA, 17 nt, Artificial Sequence
  Synthetic oligonucleotide: Ptpn6-1583
agccucucaaccugccc

SEQ ID NO: 5332 - RNA, 17 nt, Artificial Sequence
  Synthetic oligonucleotide: Ptpn6-1584
gccucucaaccugcccc

SEQ ID NO: 5333 - RNA, 17 nt, Artificial Sequence
  Synthetic oligonucleotide: Ptpn6-1585
ccucucaaccugccccg

SEQ ID NO: 5334 - RNA, 17 nt, Artificial Sequence
  Synthetic oligonucleotide: Ptpn6-1586
cucucaaccugccccgg

SEQ ID NO: 5335 - RNA, 17 nt, Artificial Sequence
  Synthetic oligonucleotide: Ptpn6-1587
caaccugccccggggga

SEQ ID NO: 5336 - RNA, 17 nt, Artificial Sequence
  Synthetic oligonucleotide: Ptpn6-1588
aaccugccccgggggaa

SEQ ID NO: 5337 - RNA, 17 nt, Artificial Sequence
  Synthetic oligonucleotide: Ptpn6-1589
accugccccgggggaag

SEQ ID NO: 5338 - RNA, 17 nt, Artificial Sequence
  Synthetic oligonucleotide: Ptpn6-1590
ugccccgggggaagggg

SEQ ID NO: 5339 - RNA, 17 nt, Artificial Sequence
  Synthetic oligonucleotide: Ptpn6-1591
ggaaggggaggagccuc

SEQ ID NO: 5340 - RNA, 17 nt, Artificial Sequence
  Synthetic oligonucleotide: Ptpn6-1592
ggggaggagccucaggu

SEQ ID NO: 5341 - RNA, 17 nt, Artificial Sequence
  Synthetic oligonucleotide: Ptpn6-1593
gggaggagccucaggua

SEQ ID NO: 5342 - RNA, 17 nt, Artificial Sequence
  Synthetic oligonucleotide: Ptpn6-1594
gagccucagguaggguu

SEQ ID NO: 5343 - RNA, 17 nt, Artificial Sequence
  Synthetic oligonucleotide: Ptpn6-1595
cagguaggguuaggccc

SEQ ID NO: 5344 - RNA, 17 nt, Artificial Sequence
  Synthetic oligonucleotide: Ptpn6-1596
agguaggguuaggcccu

SEQ ID NO: 5345 - RNA, 17 nt, Artificial Sequence
  Synthetic oligonucleotide: Ptpn6-1597
gguaggguuaggcccug

SEQ ID NO: 5346 - RNA, 17 nt, Artificial Sequence
  Synthetic oligonucleotide: Ptpn6-1598
ggguuaggcccuggggc

SEQ ID NO: 5347 - RNA, 17 nt, Artificial Sequence
  Synthetic oligonucleotide: Ptpn6-1599
gguuaggcccuggggca

SEQ ID NO: 5348 - RNA, 17 nt, Artificial Sequence
  Synthetic oligonucleotide: Ptpn6-1600
ggcccuggggcaggguu

SEQ ID NO: 5349 - RNA, 17 nt, Artificial Sequence
  Synthetic oligonucleotide: Ptpn6-1601
caggguuaggcccagcc

SEQ ID NO: 5350 - RNA, 17 nt, Artificial Sequence
  Synthetic oligonucleotide: Ptpn6-1602
ggcccagccaggaccau

SEQ ID NO: 5351 - RNA, 17 nt, Artificial Sequence
  Synthetic oligonucleotide: Ptpn6-1603
gcccagccaggaccaua

SEQ ID NO: 5352 - RNA, 17 nt, Artificial Sequence
  Synthetic oligonucleotide: Ptpn6-1604
cagccaggaccauaggg

SEQ ID NO: 5353 - RNA, 17 nt, Artificial Sequence
  Synthetic oligonucleotide: Ptpn6-1605
auagggaggagcuguuc

SEQ ID NO: 5354 - RNA, 17 nt, Artificial Sequence
  Synthetic oligonucleotide: Ptpn6-1606
uagggaggagcuguuca

SEQ ID NO: 5355 - RNA, 17 nt, Artificial Sequence
  Synthetic oligonucleotide: Ptpn6-1607
agggaggagcuguucag

SEQ ID NO: 5356 - RNA, 17 nt, Artificial Sequence
  Synthetic oligonucleotide: Ptpn6-1608
gggaggagcuguucagg

SEQ ID NO: 5357 - RNA, 17 nt, Artificial Sequence
  Synthetic oligonucleotide: Ptpn6-1609
ggagcuguucaggggga

SEQ ID NO: 5358 - RNA, 17 nt, Artificial Sequence
  Synthetic oligonucleotide: Ptpn6-1610
gagcuguucagggggau

SEQ ID NO: 5359 - RNA, 17 nt, Artificial Sequence
  Synthetic oligonucleotide: Ptpn6-1611
agcuguucagggggaug

SEQ ID NO: 5360 - RNA, 17 nt, Artificial Sequence
  Synthetic oligonucleotide: Ptpn6-1612
uucagggggauggggcc

SEQ ID NO: 5361 - RNA, 17 nt, Artificial Sequence
  Synthetic oligonucleotide: Ptpn6-1613
ggggauggggccuggaa

SEQ ID NO: 5362 - RNA, 17 nt, Artificial Sequence
  Synthetic oligonucleotide: Ptpn6-1614
ggggccuggaaaggcag

SEQ ID NO: 5363 - RNA, 17 nt, Artificial Sequence
  Synthetic oligonucleotide: Ptpn6-1615
gggccuggaaaggcaga

SEQ ID NO: 5364 - RNA, 17 nt, Artificial Sequence
  Synthetic oligonucleotide: Ptpn6-1616
gaaaggcagagggaauc

SEQ ID NO: 5365 - RNA, 17 nt, Artificial Sequence
  Synthetic oligonucleotide: Ptpn6-1617
aaaggcagagggaauca

SEQ ID NO: 5366 - RNA, 17 nt, Artificial Sequence
  Synthetic oligonucleotide: Ptpn6-1618
gcagagggaaucaggga

SEQ ID NO: 5367 - RNA, 17 nt, Artificial Sequence
  Synthetic oligonucleotide: Ptpn6-1619
aaucagggaaggagaga

SEQ ID NO: 5368 - RNA, 17 nt, Artificial Sequence
  Synthetic oligonucleotide: Ptpn6-1620
aucagggaaggagagau

SEQ ID NO: 5369 - RNA, 17 nt, Artificial Sequence
  Synthetic oligonucleotide: Ptpn6-1621
ucagggaaggagagaug

SEQ ID NO: 5370 - RNA, 17 nt, Artificial Sequence
  Synthetic oligonucleotide: Ptpn6-1622
cagggaaggagagaugg

SEQ ID NO: 5371 - RNA, 17 nt, Artificial Sequence
  Synthetic oligonucleotide: Ptpn6-1623
gagagauggggguuguc

SEQ ID NO: 5372 - RNA, 17 nt, Artificial Sequence
  Synthetic oligonucleotide: Ptpn6-1624
gcaagagacugacacca

SEQ ID NO: 5373 - RNA, 17 nt, Artificial Sequence
  Synthetic oligonucleotide: Ptpn6-1625
caagagacugacaccaa

SEQ ID NO: 5374 - RNA, 17 nt, Artificial Sequence
  Synthetic oligonucleotide: Ptpn6-1626
aagagacugacaccaag

SEQ ID NO: 5375 - RNA, 17 nt, Artificial Sequence
  Synthetic oligonucleotide: Ptpn6-1627
agagacugacaccaagg

SEQ ID NO: 5376 - RNA, 17 nt, Artificial Sequence
  Synthetic oligonucleotide: Ptpn6-1628
uugcuagcauaugaagc

SEQ ID NO: 5377 - RNA, 17 nt, Artificial Sequence
  Synthetic oligonucleotide: Ptpn6-1629
uuuuuuuuuuugagaca

SEQ ID NO: 5378 - RNA, 17 nt, Artificial Sequence
  Synthetic oligonucleotide: Ptpn6-1630
gucucacucugucgccc

SEQ ID NO: 5379 - RNA, 17 nt, Artificial Sequence
  Synthetic oligonucleotide: Ptpn6-1631
cacucugucgcccaggc

SEQ ID NO: 5380 - RNA, 17 nt, Artificial Sequence
  Synthetic oligonucleotide: Ptpn6-1632
cccaggcuggugugcag

SEQ ID NO: 5381 - RNA, 17 nt, Artificial Sequence
  Synthetic oligonucleotide: Ptpn6-1633
ugcagccuugaccuccc

SEQ ID NO: 5382 - RNA, 17 nt, Artificial Sequence
  Synthetic oligonucleotide: Ptpn6-1634
cuuagccucuccauagc

SEQ ID NO: 5383 - RNA, 17 nt, Artificial Sequence
  Synthetic oligonucleotide: Ptpn6-1635
uccauagcuggaaccac

SEQ ID NO: 5384 - RNA, 17 nt, Artificial Sequence
  Synthetic oligonucleotide: Ptpn6-1636
uuauuuuuuguagagac

SEQ ID NO: 5385 - RNA, 17 nt, Artificial Sequence
  Synthetic oligonucleotide: Ptpn6-1637
uauuuuuuguagagaca

SEQ ID NO: 5386 - RNA, 17 nt, Artificial Sequence
  Synthetic oligonucleotide: Ptpn6-1638
acagggucucacuauau

SEQ ID NO: 5387 - RNA, 17 nt, Artificial Sequence
  Synthetic oligonucleotide: Ptpn6-1639
gucucacuauauuggcc

SEQ ID NO: 5388 - RNA, 17 nt, Artificial Sequence
  Synthetic oligonucleotide: Ptpn6-1640
cacuauauuggccaggc

SEQ ID NO: 5389 - RNA, 17 nt, Artificial Sequence
  Synthetic oligonucleotide: Ptpn6-1641
ggcuggucucaaacucc

SEQ ID NO: 5390 - RNA, 17 nt, Artificial Sequence
  Synthetic oligonucleotide: Ptpn6-1642
gcuggucucaaacuccu

SEQ ID NO: 5391 - RNA, 17 nt, Artificial Sequence
  Synthetic oligonucleotide: Ptpn6-1643
ucagccucccacagugc

SEQ ID NO: 5392 - RNA, 17 nt, Artificial Sequence
  Synthetic oligonucleotide: Ptpn6-1644
cagccucccacagugcu

SEQ ID NO: 5393 - RNA, 17 nt, Artificial Sequence
  Synthetic oligonucleotide: Ptpn6-1645
cacagugcugggaucac

SEQ ID NO: 5394 - RNA, 17 nt, Artificial Sequence
  Synthetic oligonucleotide: Ptpn6-1646
gugugaaccacuacacc

SEQ ID NO: 5395 - RNA, 17 nt, Artificial Sequence
  Synthetic oligonucleotide: Ptpn6-1647
accacuacacccggcca

SEQ ID NO: 5396 - RNA, 17 nt, Artificial Sequence
  Synthetic oligonucleotide: Ptpn6-1648
gcaaugauccaauuuau

SEQ ID NO: 5397 - RNA, 17 nt, Artificial Sequence
  Synthetic oligonucleotide: Ptpn6-1649
caaugauccaauuuauu

SEQ ID NO: 5398 - RNA, 17 nt, Artificial Sequence
  Synthetic oligonucleotide: Ptpn6-1650
uuauuggguuauuuguu

SEQ ID NO: 5399 - RNA, 17 nt, Artificial Sequence
  Synthetic oligonucleotide: Ptpn6-1651
ggucuguaaccucccac

SEQ ID NO: 5400 - RNA, 20 nt, Artificial Sequence
  Synthetic oligonucleotide: Ptpn6-1182
ccagguggcuccuccucucc

SEQ ID NO: 5401 - RNA, 20 nt, Artificial Sequence
  Synthetic oligonucleotide: Ptpn6-1169
agguggcuccuccucucccg

SEQ ID NO: 5402 - RNA, 20 nt, Artificial Sequence
  Synthetic oligonucleotide: Ptpn6-1017
gguggcuccuccucucccgg

SEQ ID NO: 5403 - RNA, 20 nt, Artificial Sequence
  Synthetic oligonucleotide: Ptpn6-1655
aggggguaccuccuucucug

SEQ ID NO: 5404 - RNA, 20 nt, Artificial Sequence
  Synthetic oligonucleotide: Ptpn6-1656
guaccuccuucucugaggaa

SEQ ID NO: 5405 - RNA, 20 nt, Artificial Sequence
  Synthetic oligonucleotide: Ptpn6-1657
ucucugaggaacugggcugu

SEQ ID NO: 5406 - RNA, 20 nt, Artificial Sequence
  Synthetic oligonucleotide: Ptpn6-1165
cucugaggaacugggcuguu

SEQ ID NO: 5407 - RNA, 20 nt, Artificial Sequence
  Synthetic oligonucleotide: Ptpn6-1659
aggcccuuugguuuccgccu

SEQ ID NO: 5408 - RNA, 20 nt, Artificial Sequence
  Synthetic oligonucleotide: Ptpn6-953
ggcccuuugguuuccgccua

SEQ ID NO: 5409 - RNA, 20 nt, Artificial Sequence
  Synthetic oligonucleotide: Ptpn6-1661
cccuuugguuuccgccuacg

SEQ ID NO: 5410 - RNA, 20 nt, Artificial Sequence
  Synthetic oligonucleotide: Ptpn6-1662
auugguugcucuuccucagc

SEQ ID NO: 5411 - RNA, 20 nt, Artificial Sequence
  Synthetic oligonucleotide: Ptpn6-1663
uaccccgccgcucugucagc

SEQ ID NO: 5412 - RNA, 20 nt, Artificial Sequence
  Synthetic oligonucleotide: Ptpn6-1664
ucugucagcuugagcuccag

SEQ ID NO: 5413 - RNA, 20 nt, Artificial Sequence
  Synthetic oligonucleotide: Ptpn6-1173
cugucagcuugagcuccagg

SEQ ID NO: 5414 - RNA, 20 nt, Artificial Sequence
  Synthetic oligonucleotide: Ptpn6-1666
uccagguggcuccuccucuc

SEQ ID NO: 5415 - RNA, 20 nt, Artificial Sequence
  Synthetic oligonucleotide: Ptpn6-1181
cagguggcuccuccucuccc

SEQ ID NO: 5416 - RNA, 20 nt, Artificial Sequence
  Synthetic oligonucleotide: Ptpn6-1668
ucucccgggggaaggcggcc

SEQ ID NO: 5417 - RNA, 20 nt, Artificial Sequence
  Synthetic oligonucleotide: Ptpn6-1669
aggcggcccuggaccagcag

SEQ ID NO: 5418 - RNA, 20 nt, Artificial Sequence
  Synthetic oligonucleotide: Ptpn6-1670
gggccugcuguacucccgcu

SEQ ID NO: 5419 - RNA, 20 nt, Artificial Sequence
  Synthetic oligonucleotide: Ptpn6-1011
ggccugcuguacucccgcuu

SEQ ID NO: 5420 - RNA, 20 nt, Artificial Sequence
  Synthetic oligonucleotide: Ptpn6-1672
guacucccgcuuuggggcug

SEQ ID NO: 5421 - RNA, 20 nt, Artificial Sequence
  Synthetic oligonucleotide: Ptpn6-970
uacucccgcuuuggggcugc

SEQ ID NO: 5422 - RNA, 20 nt, Artificial Sequence
  Synthetic oligonucleotide: Ptpn6-1140
acucccgcuuuggggcugca

SEQ ID NO: 5423 - RNA, 20 nt, Artificial Sequence
  Synthetic oligonucleotide: Ptpn6-1675
cugcagggaagcuggccgcu

SEQ ID NO: 5424 - RNA, 20 nt, Artificial Sequence
  Synthetic oligonucleotide: Ptpn6-1676
gcuggccgcugugggcgguc

SEQ ID NO: 5425 - RNA, 20 nt, Artificial Sequence
  Synthetic oligonucleotide: Ptpn6-1677
ccgccccaccuguccuuuuc

SEQ ID NO: 5426 - RNA, 20 nt, Artificial Sequence
  Synthetic oligonucleotide: Ptpn6-1170
cgccccaccuguccuuuucc

SEQ ID NO: 5427 - RNA, 20 nt, Artificial Sequence
  Synthetic oligonucleotide: Ptpn6-1679
uuuccuggagacuauuaguc

SEQ ID NO: 5428 - RNA, 20 nt, Artificial Sequence
  Synthetic oligonucleotide: Ptpn6-1680
agugccauuggccuggcagg

SEQ ID NO: 5429 - RNA, 20 nt, Artificial Sequence
  Synthetic oligonucleotide: Ptpn6-1681
cauuggccuggcaggcagga

SEQ ID NO: 5430 - RNA, 20 nt, Artificial Sequence
  Synthetic oligonucleotide: Ptpn6-1682
uuggccuggcaggcaggauc

SEQ ID NO: 5431 - RNA, 20 nt, Artificial Sequence
  Synthetic oligonucleotide: Ptpn6-1150
uggccuggcaggcaggaucg

SEQ ID NO: 5432 - RNA, 20 nt, Artificial Sequence
  Synthetic oligonucleotide: Ptpn6-1684
gccuggcaggcaggaucgag

SEQ ID NO: 5433 - RNA, 20 nt, Artificial Sequence
  Synthetic oligonucleotide: Ptpn6-1152
ccuggcaggcaggaucgagg

SEQ ID NO: 5434 - RNA, 20 nt, Artificial Sequence
  Synthetic oligonucleotide: Ptpn6-1686
gaggaggaaguggcugauua

SEQ ID NO: 5435 - RNA, 20 nt, Artificial Sequence
  Synthetic oligonucleotide: Ptpn6-1687
gcgguucuuccucaccuggc

SEQ ID NO: 5436 - RNA, 20 nt, Artificial Sequence
  Synthetic oligonucleotide: Ptpn6-1688
ccguggcuucccccucccua

SEQ ID NO: 5437 - RNA, 20 nt, Artificial Sequence
  Synthetic oligonucleotide: Ptpn6-1689
guggcuucccccucccuaca

SEQ ID NO: 5438 - RNA, 20 nt, Artificial Sequence
  Synthetic oligonucleotide: Ptpn6-1690
cuacagagagaugcuguccc

SEQ ID NO: 5439 - RNA, 20 nt, Artificial Sequence
  Synthetic oligonucleotide: Ptpn6-1691
ugcugucccguggguaaguc

SEQ ID NO: 5440 - RNA, 20 nt, Artificial Sequence
  Synthetic oligonucleotide: Ptpn6-1692
uggguaagucccgggcacca

SEQ ID NO: 5441 - RNA, 20 nt, Artificial Sequence
  Synthetic oligonucleotide: Ptpn6-954
ggguaagucccgggcaccau

SEQ ID NO: 5442 - RNA, 20 nt, Artificial Sequence
  Synthetic oligonucleotide: Ptpn6-1694
gucccagucuccuguuaguu

SEQ ID NO: 5443 - RNA, 20 nt, Artificial Sequence
  Synthetic oligonucleotide: Ptpn6-1143
ucccagucuccuguuaguuu

SEQ ID NO: 5444 - RNA, 20 nt, Artificial Sequence
  Synthetic oligonucleotide: Ptpn6-1696
ccagucuccuguuaguuuug

SEQ ID NO: 5445 - RNA, 20 nt, Artificial Sequence
  Synthetic oligonucleotide: Ptpn6-1145
cagucuccuguuaguuuugg

SEQ ID NO: 5446 - RNA, 20 nt, Artificial Sequence
  Synthetic oligonucleotide: Ptpn6-1158
agucuccuguuaguuuugga

SEQ ID NO: 5447 - RNA, 20 nt, Artificial Sequence
  Synthetic oligonucleotide: Ptpn6-1699
ucuccuguuaguuuuggagg

SEQ ID NO: 5448 - RNA, 20 nt, Artificial Sequence
  Synthetic oligonucleotide: Ptpn6-1161
cuccuguuaguuuuggaggg

SEQ ID NO: 5449 - RNA, 20 nt, Artificial Sequence
  Synthetic oligonucleotide: Ptpn6-1146
uccuguuaguuuuggaggga

SEQ ID NO: 5450 - RNA, 20 nt, Artificial Sequence
  Synthetic oligonucleotide: Ptpn6-1702
cuguuaguuuuggagggagg

SEQ ID NO: 5451 - RNA, 20 nt, Artificial Sequence
  Synthetic oligonucleotide: Ptpn6-1703
ugaugcucacuccgacgugu

SEQ ID NO: 5452 - RNA, 20 nt, Artificial Sequence
  Synthetic oligonucleotide: Ptpn6-1704
ucacuccgacgugugugaac

SEQ ID NO: 5453 - RNA, 20 nt, Artificial Sequence
  Synthetic oligonucleotide: Ptpn6-1705
ugcgccuguuuccggucccu

SEQ ID NO: 5454 - RNA, 20 nt, Artificial Sequence
  Synthetic oligonucleotide: Ptpn6-1706
acuuccccuucccgcaaggu

SEQ ID NO: 5455 - RNA, 20 nt, Artificial Sequence
  Synthetic oligonucleotide: Ptpn6-1707
uuccccuucccgcaaggugu

SEQ ID NO: 5456 - RNA, 20 nt, Artificial Sequence
  Synthetic oligonucleotide: Ptpn6-1708
ccccucuuuaacauuuuccc

SEQ ID NO: 5457 - RNA, 20 nt, Artificial Sequence
  Synthetic oligonucleotide: Ptpn6-1709
ugcauuucuacuuccagccu

SEQ ID NO: 5458 - RNA, 20 nt, Artificial Sequence
  Synthetic oligonucleotide: Ptpn6-1710
uccugcuucugccuccugcu

SEQ ID NO: 5459 - RNA, 20 nt, Artificial Sequence
  Synthetic oligonucleotide: Ptpn6-1711
ccugcuuaggaccugucccc

SEQ ID NO: 5460 - RNA, 20 nt, Artificial Sequence
  Synthetic oligonucleotide: Ptpn6-1712
aacaccucaaacauagcagu

SEQ ID NO: 5461 - RNA, 20 nt, Artificial Sequence
  Synthetic oligonucleotide: Ptpn6-1713
auagcagucagaggccaccc

SEQ ID NO: 5462 - RNA, 20 nt, Artificial Sequence
  Synthetic oligonucleotide: Ptpn6-1714
auucauucaacagguacgug

SEQ ID NO: 5463 - RNA, 17 nt, Artificial Sequence
  Synthetic oligonucleotide: Ptpn6-1075
gguggcuccuccucucc

SEQ ID NO: 5464 - RNA, 17 nt, Artificial Sequence
  Synthetic oligonucleotide: Ptpn6-1293
uggcuccuccucucccg

SEQ ID NO: 5465 - RNA, 17 nt, Artificial Sequence
  Synthetic oligonucleotide: Ptpn6-1074
ggcuccuccucucccgg

SEQ ID NO: 5466 - RNA, 17 nt, Artificial Sequence
  Synthetic oligonucleotide: Ptpn6-1070
ggguaccuccuucucug

SEQ ID NO: 5467 - RNA, 17 nt, Artificial Sequence
  Synthetic oligonucleotide: Ptpn6-1719
ccuccuucucugaggaa

SEQ ID NO: 5468 - RNA, 17 nt, Artificial Sequence
  Synthetic oligonucleotide: Ptpn6-1720
cugaggaacugggcugu

SEQ ID NO: 5469 - RNA, 17 nt, Artificial Sequence
  Synthetic oligonucleotide: Ptpn6-1289
ugaggaacugggcuguu

SEQ ID NO: 5470 - RNA, 17 nt, Artificial Sequence
  Synthetic oligonucleotide: Ptpn6-1722
cccuuugguuuccgccu

SEQ ID NO: 5471 - RNA, 17 nt, Artificial Sequence
  Synthetic oligonucleotide: Ptpn6-997
ccuuugguuuccgccua

SEQ ID NO: 5472 - RNA, 17 nt, Artificial Sequence
  Synthetic oligonucleotide: Ptpn6-1724
uuugguuuccgccuacg

SEQ ID NO: 5473 - RNA, 17 nt, Artificial Sequence
  Synthetic oligonucleotide: Ptpn6-1725
gguugcucuuccucagc

SEQ ID NO: 5474 - RNA, 17 nt, Artificial Sequence
  Synthetic oligonucleotide: Ptpn6-1726
cccgccgcucugucagc

SEQ ID NO: 5475 - RNA, 17 nt, Artificial Sequence
  Synthetic oligonucleotide: Ptpn6-1727
gucagcuugagcuccag

SEQ ID NO: 5476 - RNA, 17 nt, Artificial Sequence
  Synthetic oligonucleotide: Ptpn6-1290
ucagcuugagcuccagg

SEQ ID NO: 5477 - RNA, 17 nt, Artificial Sequence
  Synthetic oligonucleotide: Ptpn6-1729
agguggcuccuccucuc

SEQ ID NO: 5478 - RNA, 17 nt, Artificial Sequence
  Synthetic oligonucleotide: Ptpn6-1080
guggcuccuccucuccc

SEQ ID NO: 5479 - RNA, 17 nt, Artificial Sequence
  Synthetic oligonucleotide: Ptpn6-1731
cccgggggaaggcggcc

SEQ ID NO: 5480 - RNA, 17 nt, Artificial Sequence
  Synthetic oligonucleotide: Ptpn6-1732
cggcccuggaccagcag

SEQ ID NO: 5481 - RNA, 17 nt, Artificial Sequence
  Synthetic oligonucleotide: Ptpn6-1733
ccugcuguacucccgcu

SEQ ID NO: 5482 - RNA, 17 nt, Artificial Sequence
  Synthetic oligonucleotide: Ptpn6-1316
cugcuguacucccgcuu

SEQ ID NO: 5483 - RNA, 17 nt, Artificial Sequence
  Synthetic oligonucleotide: Ptpn6-1735
cucccgcuuuggggcug

SEQ ID NO: 5484 - RNA, 17 nt, Artificial Sequence
  Synthetic oligonucleotide: Ptpn6-1312
ucccgcuuuggggcugc

SEQ ID NO: 5485 - RNA, 17 nt, Artificial Sequence
  Synthetic oligonucleotide: Ptpn6-1267
cccgcuuuggggcugca

SEQ ID NO: 5486 - RNA, 17 nt, Artificial Sequence
  Synthetic oligonucleotide: Ptpn6-1738
cagggaagcuggccgcu

SEQ ID NO: 5487 - RNA, 17 nt, Artificial Sequence
  Synthetic oligonucleotide: Ptpn6-1739
ggccgcugugggcgguc

SEQ ID NO: 5488 - RNA, 17 nt, Artificial Sequence
  Synthetic oligonucleotide: Ptpn6-1740
ccccaccuguccuuuuc

SEQ ID NO: 5489 - RNA, 17 nt, Artificial Sequence
  Synthetic oligonucleotide: Ptpn6-1298
cccaccuguccuuuucc

SEQ ID NO: 5490 - RNA, 17 nt, Artificial Sequence
  Synthetic oligonucleotide: Ptpn6-1742
ccuggagacuauuaguc

SEQ ID NO: 5491 - RNA, 17 nt, Artificial Sequence
  Synthetic oligonucleotide: Ptpn6-1743
gccauuggccuggcagg

SEQ ID NO: 5492 - RNA, 17 nt, Artificial Sequence
  Synthetic oligonucleotide: Ptpn6-1744
uggccuggcaggcagga

SEQ ID NO: 5493 - RNA, 17 nt, Artificial Sequence
  Synthetic oligonucleotide: Ptpn6-1745
gccuggcaggcaggauc

SEQ ID NO: 5494 - RNA, 17 nt, Artificial Sequence
  Synthetic oligonucleotide: Ptpn6-1288
ccuggcaggcaggaucg

SEQ ID NO: 5495 - RNA, 17 nt, Artificial Sequence
  Synthetic oligonucleotide: Ptpn6-1747
uggcaggcaggaucgag

SEQ ID NO: 5496 - RNA, 17 nt, Artificial Sequence
  Synthetic oligonucleotide: Ptpn6-1072
ggcaggcaggaucgagg

SEQ ID NO: 5497 - RNA, 17 nt, Artificial Sequence
  Synthetic oligonucleotide: Ptpn6-1749
gaggaaguggcugauua

SEQ ID NO: 5498 - RNA, 17 nt, Artificial Sequence
  Synthetic oligonucleotide: Ptpn6-1750
guucuuccucaccuggc

SEQ ID NO: 5499 - RNA, 17 nt, Artificial Sequence
  Synthetic oligonucleotide: Ptpn6-1751
uggcuucccccucccua

SEQ ID NO: 5500 - RNA, 17 nt, Artificial Sequence
  Synthetic oligonucleotide: Ptpn6-1752
gcuucccccucccuaca

SEQ ID NO: 5501 - RNA, 17 nt, Artificial Sequence
  Synthetic oligonucleotide: Ptpn6-1753
cagagagaugcuguccc

SEQ ID NO: 5502 - RNA, 17 nt, Artificial Sequence
  Synthetic oligonucleotide: Ptpn6-1754
ugucccguggguaaguc

SEQ ID NO: 5503 - RNA, 17 nt, Artificial Sequence
  Synthetic oligonucleotide: Ptpn6-1755
guaagucccgggcacca

SEQ ID NO: 5504 - RNA, 17 nt, Artificial Sequence
  Synthetic oligonucleotide: Ptpn6-1260
uaagucccgggcaccau

SEQ ID NO: 5505 - RNA, 17 nt, Artificial Sequence
  Synthetic oligonucleotide: Ptpn6-1757
ccagucuccuguuaguu

SEQ ID NO: 5506 - RNA, 17 nt, Artificial Sequence
  Synthetic oligonucleotide: Ptpn6-1311
cagucuccuguuaguuu

SEQ ID NO: 5507 - RNA, 17 nt, Artificial Sequence
  Synthetic oligonucleotide: Ptpn6-1759
gucuccuguuaguuuug

SEQ ID NO: 5508 - RNA, 17 nt, Artificial Sequence
  Synthetic oligonucleotide: Ptpn6-1279
ucuccuguuaguuuugg

SEQ ID NO: 5509 - RNA, 17 nt, Artificial Sequence
  Synthetic oligonucleotide: Ptpn6-1282
cuccuguuaguuuugga

SEQ ID NO: 5510 - RNA, 17 nt, Artificial Sequence
  Synthetic oligonucleotide: Ptpn6-1762
ccuguuaguuuuggagg

SEQ ID NO: 5511 - RNA, 17 nt, Artificial Sequence
  Synthetic oligonucleotide: Ptpn6-1278
cuguuaguuuuggaggg

SEQ ID NO: 5512 - RNA, 17 nt, Artificial Sequence
  Synthetic oligonucleotide: Ptpn6-1307
uguuaguuuuggaggga

SEQ ID NO: 5513 - RNA, 17 nt, Artificial Sequence
  Synthetic oligonucleotide: Ptpn6-1765
uuaguuuuggagggagg

SEQ ID NO: 5514 - RNA, 17 nt, Artificial Sequence
  Synthetic oligonucleotide: Ptpn6-1766
ugcucacuccgacgugu

SEQ ID NO: 5515 - RNA, 17 nt, Artificial Sequence
  Synthetic oligonucleotide: Ptpn6-1767
cuccgacgugugugaac

SEQ ID NO: 5516 - RNA, 17 nt, Artificial Sequence
  Synthetic oligonucleotide: Ptpn6-1768
gccuguuuccggucccu

SEQ ID NO: 5517 - RNA, 17 nt, Artificial Sequence
  Synthetic oligonucleotide: Ptpn6-1769
uccccuucccgcaaggu

SEQ ID NO: 5518 - RNA, 17 nt, Artificial Sequence
  Synthetic oligonucleotide: Ptpn6-1770
cccuucccgcaaggugu

SEQ ID NO: 5519 - RNA, 17 nt, Artificial Sequence
  Synthetic oligonucleotide: Ptpn6-1771
cucuuuaacauuuuccc

SEQ ID NO: 5520 - RNA, 17 nt, Artificial Sequence
  Synthetic oligonucleotide: Ptpn6-1772
auuucuacuuccagccu

SEQ ID NO: 5521 - RNA, 17 nt, Artificial Sequence
  Synthetic oligonucleotide: Ptpn6-1773
ugcuucugccuccugcu

SEQ ID NO: 5522 - RNA, 17 nt, Artificial Sequence
  Synthetic oligonucleotide: Ptpn6-1774
gcuuaggaccugucccc

SEQ ID NO: 5523 - RNA, 17 nt, Artificial Sequence
  Synthetic oligonucleotide: Ptpn6-1775
accucaaacauagcagu

SEQ ID NO: 5524 - RNA, 17 nt, Artificial Sequence
  Synthetic oligonucleotide: Ptpn6-1776
gcagucagaggccaccc

SEQ ID NO: 5525 - RNA, 17 nt, Artificial Sequence
  Synthetic oligonucleotide: Ptpn6-1777
cauucaacagguacgug

SEQ ID NO: 5526 - RNA, 20 nt, Artificial Sequence
  Synthetic oligonucleotide: Ptpn6-1778
aaagucugauguugggaagu

SEQ ID NO: 5527 - RNA, 20 nt, Artificial Sequence
  Synthetic oligonucleotide: Ptpn6-1779
gagaaguuggcuggacgugg

SEQ ID NO: 5528 - RNA, 20 nt, Artificial Sequence
  Synthetic oligonucleotide: Ptpn6-1780
acugcuauguuugagguguu

SEQ ID NO: 5529 - RNA, 20 nt, Artificial Sequence
  Synthetic oligonucleotide: Ptpn6-1781
uaccuguugaaugaaugaug

SEQ ID NO: 5530 - RNA, 20 nt, Artificial Sequence
  Synthetic oligonucleotide: Ptpn6-1782
ccagggggacagguccuaag

SEQ ID NO: 5531 - RNA, 20 nt, Artificial Sequence
  Synthetic oligonucleotide: Ptpn6-1783
agaugcucaacacguaccug

SEQ ID NO: 5532 - RNA, 20 nt, Artificial Sequence
  Synthetic oligonucleotide: Ptpn6-1784
gcucaacacguaccuguuga

SEQ ID NO: 5533 - RNA, 20 nt, Artificial Sequence
  Synthetic oligonucleotide: Ptpn6-1249
accuguugaaugaaugaugc

SEQ ID NO: 5534 - RNA, 20 nt, Artificial Sequence
  Synthetic oligonucleotide: Ptpn6-1250
ccuguugaaugaaugaugca

SEQ ID NO: 5535 - RNA, 20 nt, Artificial Sequence
  Synthetic oligonucleotide: Ptpn6-1241
cuguugaaugaaugaugcag

SEQ ID NO: 5536 - RNA, 20 nt, Artificial Sequence
  Synthetic oligonucleotide: Ptpn6-1788
ugaaugaaugaugcagggga

SEQ ID NO: 5537 - RNA, 20 nt, Artificial Sequence
  Synthetic oligonucleotide: Ptpn6-1058
gaaugaaugaugcaggggaa

SEQ ID NO: 5538 - RNA, 20 nt, Artificial Sequence
  Synthetic oligonucleotide: Ptpn6-1244
aaugaaugaugcaggggaaa

SEQ ID NO: 5539 - RNA, 20 nt, Artificial Sequence
  Synthetic oligonucleotide: Ptpn6-1791
augaugcaggggaaagggaa

SEQ ID NO: 5540 - RNA, 20 nt, Artificial Sequence
  Synthetic oligonucleotide: Ptpn6-1792
ugcaggggaaagggaaguga

SEQ ID NO: 5541 - RNA, 20 nt, Artificial Sequence
  Synthetic oligonucleotide: Ptpn6-1062
gcaggggaaagggaagugaa

SEQ ID NO: 5542 - RNA, 20 nt, Artificial Sequence
  Synthetic oligonucleotide: Ptpn6-1794
aagggaagugaaaggaaaca

SEQ ID NO: 5543 - RNA, 20 nt, Artificial Sequence
  Synthetic oligonucleotide: Ptpn6-1795
agugaaaggaaacaaagaag

SEQ ID NO: 5544 - RNA, 20 nt, Artificial Sequence
  Synthetic oligonucleotide: Ptpn6-1061
gugaaaggaaacaaagaaga

SEQ ID NO: 5545 - RNA, 20 nt, Artificial Sequence
  Synthetic oligonucleotide: Ptpn6-1797
gaugggaccaaagucugaug

SEQ ID NO: 5546 - RNA, 20 nt, Artificial Sequence
  Synthetic oligonucleotide: Ptpn6-983
augggaccaaagucugaugu

SEQ ID NO: 5547 - RNA, 20 nt, Artificial Sequence
  Synthetic oligonucleotide: Ptpn6-979
ugggaccaaagucugauguu

SEQ ID NO: 5548 - RNA, 20 nt, Artificial Sequence
  Synthetic oligonucleotide: Ptpn6-1213
aagucugauguugggaagug

SEQ ID NO: 5549 - RNA, 20 nt, Artificial Sequence
  Synthetic oligonucleotide: Ptpn6-1801
gucugauguugggaagugcg

SEQ ID NO: 5550 - RNA, 20 nt, Artificial Sequence
  Synthetic oligonucleotide: Ptpn6-1802
gggaagugcggagaaguugg

SEQ ID NO: 5551 - RNA, 20 nt, Artificial Sequence
  Synthetic oligonucleotide: Ptpn6-1803
ugcggagaaguuggcuggac

SEQ ID NO: 5552 - RNA, 20 nt, Artificial Sequence
  Synthetic oligonucleotide: Ptpn6-1030
gcggagaaguuggcuggacg

SEQ ID NO: 5553 - RNA, 20 nt, Artificial Sequence
  Synthetic oligonucleotide: Ptpn6-1214
cggagaaguuggcuggacgu

SEQ ID NO: 5554 - RNA, 20 nt, Artificial Sequence
  Synthetic oligonucleotide: Ptpn6-1806
cuggacgugggagggccuuc

SEQ ID NO: 5555 - RNA, 20 nt, Artificial Sequence
  Synthetic oligonucleotide: Ptpn6-1807
guggccucugacugcuaugu

SEQ ID NO: 5556 - RNA, 20 nt, Artificial Sequence
  Synthetic oligonucleotide: Ptpn6-1808
uugagguguugugagcuacc

SEQ ID NO: 5557 - RNA, 20 nt, Artificial Sequence
  Synthetic oligonucleotide: Ptpn6-993
ugagguguugugagcuaccc

SEQ ID NO: 5558 - RNA, 20 nt, Artificial Sequence
  Synthetic oligonucleotide: Ptpn6-1033
gagguguugugagcuaccca

SEQ ID NO: 5559 - RNA, 20 nt, Artificial Sequence
  Synthetic oligonucleotide: Ptpn6-1194
agguguugugagcuacccag

SEQ ID NO: 5560 - RNA, 20 nt, Artificial Sequence
  Synthetic oligonucleotide: Ptpn6-1196
cagggggacagguccuaagc

SEQ ID NO: 5561 - RNA, 20 nt, Artificial Sequence
  Synthetic oligonucleotide: Ptpn6-1813
gacagguccuaagcaggagg

SEQ ID NO: 5562 - RNA, 20 nt, Artificial Sequence
  Synthetic oligonucleotide: Ptpn6-1814
uccuaagcaggaggcagaag

SEQ ID NO: 5563 - RNA, 20 nt, Artificial Sequence
  Synthetic oligonucleotide: Ptpn6-1256
ccuaagcaggaggcagaagc

SEQ ID NO: 5564 - RNA, 20 nt, Artificial Sequence
  Synthetic oligonucleotide: Ptpn6-1816
aggaggcagaagcaggagcc

SEQ ID NO: 5565 - RNA, 20 nt, Artificial Sequence
  Synthetic oligonucleotide: Ptpn6-1817
cagaagcaggagcccagagg

SEQ ID NO: 5566 - RNA, 20 nt, Artificial Sequence
  Synthetic oligonucleotide: Ptpn6-1248
agaagcaggagcccagaggc

SEQ ID NO: 5567 - RNA, 20 nt, Artificial Sequence
  Synthetic oligonucleotide: Ptpn6-1819
aggagcccagaggcuggaag

SEQ ID NO: 5568 - RNA, 20 nt, Artificial Sequence
  Synthetic oligonucleotide: Ptpn6-1820
aggcuggaaguagaaaugca

SEQ ID NO: 5569 - RNA, 20 nt, Artificial Sequence
  Synthetic oligonucleotide: Ptpn6-1054
ggcuggaaguagaaaugcaa

SEQ ID NO: 5570 - RNA, 20 nt, Artificial Sequence
  Synthetic oligonucleotide: Ptpn6-1822
cuggaaguagaaaugcaaug

SEQ ID NO: 5571 - RNA, 20 nt, Artificial Sequence
  Synthetic oligonucleotide: Ptpn6-1823
ggaaguagaaaugcaaugga

SEQ ID NO: 5572 - RNA, 20 nt, Artificial Sequence
  Synthetic oligonucleotide: Ptpn6-1824
agaacagauacacacuuguc

SEQ ID NO: 5573 - RNA, 20 nt, Artificial Sequence
  Synthetic oligonucleotide: Ptpn6-1028
gaacagauacacacuugucc

SEQ ID NO: 5574 - RNA, 20 nt, Artificial Sequence
  Synthetic oligonucleotide: Ptpn6-1210
aacagauacacacuugucca

SEQ ID NO: 5575 - RNA, 20 nt, Artificial Sequence
  Synthetic oligonucleotide: Ptpn6-1207
acagauacacacuuguccag

SEQ ID NO: 5576 - RNA, 20 nt, Artificial Sequence
  Synthetic oligonucleotide: Ptpn6-1828
uuguccaggggaaaauguua

SEQ ID NO: 5577 - RNA, 20 nt, Artificial Sequence
  Synthetic oligonucleotide: Ptpn6-1829
guccaggggaaaauguuaaa

SEQ ID NO: 5578 - RNA, 20 nt, Artificial Sequence
  Synthetic oligonucleotide: Ptpn6-1236
uccaggggaaaauguuaaag

SEQ ID NO: 5579 - RNA, 20 nt, Artificial Sequence
  Synthetic oligonucleotide: Ptpn6-1227
ccaggggaaaauguuaaaga

SEQ ID NO: 5580 - RNA, 20 nt, Artificial Sequence
  Synthetic oligonucleotide: Ptpn6-1832
ggaaaauguuaaagaggggg

SEQ ID NO: 5581 - RNA, 20 nt, Artificial Sequence
  Synthetic oligonucleotide: Ptpn6-1833
aaaauguuaaagagggggca

SEQ ID NO: 5582 - RNA, 20 nt, Artificial Sequence
  Synthetic oligonucleotide: Ptpn6-1224
aaauguuaaagagggggcag

SEQ ID NO: 5583 - RNA, 20 nt, Artificial Sequence
  Synthetic oligonucleotide: Ptpn6-1835
uaaagagggggcagaggagc

SEQ ID NO: 5584 - RNA, 20 nt, Artificial Sequence
  Synthetic oligonucleotide: Ptpn6-1836
gagggggcagaggagcauga

SEQ ID NO: 5585 - RNA, 20 nt, Artificial Sequence
  Synthetic oligonucleotide: Ptpn6-1837
ggcagaggagcaugagugag

SEQ ID NO: 5586 - RNA, 20 nt, Artificial Sequence
  Synthetic oligonucleotide: Ptpn6-1034
gcagaggagcaugagugagc

SEQ ID NO: 5587 - RNA, 20 nt, Artificial Sequence
  Synthetic oligonucleotide: Ptpn6-1237
cagaggagcaugagugagcc

SEQ ID NO: 5588 - RNA, 20 nt, Artificial Sequence
  Synthetic oligonucleotide: Ptpn6-1840
gccggggguccucacaccuu

SEQ ID NO: 5589 - RNA, 20 nt, Artificial Sequence
  Synthetic oligonucleotide: Ptpn6-990
ccggggguccucacaccuug

SEQ ID NO: 5590 - RNA, 20 nt, Artificial Sequence
  Synthetic oligonucleotide: Ptpn6-1185
cggggguccucacaccuugc

SEQ ID NO: 5591 - RNA, 20 nt, Artificial Sequence
  Synthetic oligonucleotide: Ptpn6-1843
ggguccucacaccuugcggg

SEQ ID NO: 5592 - RNA, 20 nt, Artificial Sequence
  Synthetic oligonucleotide: Ptpn6-958
gguccucacaccuugcggga

SEQ ID NO: 5593 - RNA, 20 nt, Artificial Sequence
  Synthetic oligonucleotide: Ptpn6-962
guccucacaccuugcgggaa

SEQ ID NO: 5594 - RNA, 20 nt, Artificial Sequence
  Synthetic oligonucleotide: Ptpn6-1186
uccucacaccuugcgggaag

SEQ ID NO: 5595 - RNA, 20 nt, Artificial Sequence
  Synthetic oligonucleotide: Ptpn6-1847
uugcgggaaggggaaguuca

SEQ ID NO: 5596 - RNA, 20 nt, Artificial Sequence
  Synthetic oligonucleotide: Ptpn6-1211
ugcgggaaggggaaguucau

SEQ ID NO: 5597 - RNA, 20 nt, Artificial Sequence
  Synthetic oligonucleotide: Ptpn6-1849
gaaggggaaguucauaggga

SEQ ID NO: 5598 - RNA, 20 nt, Artificial Sequence
  Synthetic oligonucleotide: Ptpn6-1199
aaggggaaguucauagggac

SEQ ID NO: 5599 - RNA, 20 nt, Artificial Sequence
  Synthetic oligonucleotide: Ptpn6-1851
auagggaccggaaacaggcg

SEQ ID NO: 5600 - RNA, 20 nt, Artificial Sequence
  Synthetic oligonucleotide: Ptpn6-1852
cgcacucacguucacacacg

SEQ ID NO: 5601 - RNA, 20 nt, Artificial Sequence
  Synthetic oligonucleotide: Ptpn6-961
gcacucacguucacacacgu

SEQ ID NO: 5602 - RNA, 20 nt, Artificial Sequence
  Synthetic oligonucleotide: Ptpn6-1854
ucacguucacacacgucgga

SEQ ID NO: 5603 - RNA, 20 nt, Artificial Sequence
  Synthetic oligonucleotide: Ptpn6-1855
cucccucccuccaaaacuaa

SEQ ID NO: 5604 - RNA, 20 nt, Artificial Sequence
  Synthetic oligonucleotide: Ptpn6-1208
ucccucccuccaaaacuaac

SEQ ID NO: 5605 - RNA, 20 nt, Artificial Sequence
  Synthetic oligonucleotide: Ptpn6-1857
ccuccaaaacuaacaggaga

SEQ ID NO: 5606 - RNA, 20 nt, Artificial Sequence
  Synthetic oligonucleotide: Ptpn6-1225
cuccaaaacuaacaggagac

SEQ ID NO: 5607 - RNA, 20 nt, Artificial Sequence
  Synthetic oligonucleotide: Ptpn6-1859
gacugggaccccgauggugc

SEQ ID NO: 5608 - RNA, 20 nt, Artificial Sequence
  Synthetic oligonucleotide: Ptpn6-1187
acugggaccccgauggugcc

SEQ ID NO: 5609 - RNA, 20 nt, Artificial Sequence
  Synthetic oligonucleotide: Ptpn6-1861
auggugcccgggacuuaccc

SEQ ID NO: 5610 - RNA, 20 nt, Artificial Sequence
  Synthetic oligonucleotide: Ptpn6-995
uggugcccgggacuuaccca

SEQ ID NO: 5611 - RNA, 20 nt, Artificial Sequence
  Synthetic oligonucleotide: Ptpn6-1863
cacgggacagcaucucucug

SEQ ID NO: 5612 - RNA, 20 nt, Artificial Sequence
  Synthetic oligonucleotide: Ptpn6-1190
acgggacagcaucucucugu

SEQ ID NO: 5613 - RNA, 20 nt, Artificial Sequence
  Synthetic oligonucleotide: Ptpn6-987
cgggacagcaucucucugua

SEQ ID NO: 5614 - RNA, 20 nt, Artificial Sequence
  Synthetic oligonucleotide: Ptpn6-1866
ggacagcaucucucuguagg

SEQ ID NO: 5615 - RNA, 20 nt, Artificial Sequence
  Synthetic oligonucleotide: Ptpn6-1043
gacagcaucucucuguaggg

SEQ ID NO: 5616 - RNA, 20 nt, Artificial Sequence
  Synthetic oligonucleotide: Ptpn6-1215
acagcaucucucuguaggga

SEQ ID NO: 5617 - RNA, 20 nt, Artificial Sequence
  Synthetic oligonucleotide: Ptpn6-1228
cagcaucucucuguagggag

SEQ ID NO: 5618 - RNA, 20 nt, Artificial Sequence
  Synthetic oligonucleotide: Ptpn6-1222
agcaucucucuguagggagg

SEQ ID NO: 5619 - RNA, 20 nt, Artificial Sequence
  Synthetic oligonucleotide: Ptpn6-1871
uagggagggggaagccacgg

SEQ ID NO: 5620 - RNA, 20 nt, Artificial Sequence
  Synthetic oligonucleotide: Ptpn6-1872
gggagggggaagccacggca

SEQ ID NO: 5621 - RNA, 20 nt, Artificial Sequence
  Synthetic oligonucleotide: Ptpn6-1873
gaagccacggcagagggccg

SEQ ID NO: 5622 - RNA, 20 nt, Artificial Sequence
  Synthetic oligonucleotide: Ptpn6-991
aagccacggcagagggccgc

SEQ ID NO: 5623 - RNA, 20 nt, Artificial Sequence
  Synthetic oligonucleotide: Ptpn6-1216
agccacggcagagggccgca

SEQ ID NO: 5624 - RNA, 20 nt, Artificial Sequence
  Synthetic oligonucleotide: Ptpn6-1876
acggcagagggccgcagggg

SEQ ID NO: 5625 - RNA, 20 nt, Artificial Sequence
  Synthetic oligonucleotide: Ptpn6-1234
cggcagagggccgcaggggg

SEQ ID NO: 5626 - RNA, 20 nt, Artificial Sequence
  Synthetic oligonucleotide: Ptpn6-1878
gagggccgcagggggcgggg

SEQ ID NO: 5627 - RNA, 20 nt, Artificial Sequence
  Synthetic oligonucleotide: Ptpn6-1879
ugcacaguggcccaagccag

SEQ ID NO: 5628 - RNA, 20 nt, Artificial Sequence
  Synthetic oligonucleotide: Ptpn6-1880
cacaguggcccaagccaggu

SEQ ID NO: 5629 - RNA, 20 nt, Artificial Sequence
  Synthetic oligonucleotide: Ptpn6-1235
acaguggcccaagccaggug

SEQ ID NO: 5630 - RNA, 20 nt, Artificial Sequence
  Synthetic oligonucleotide: Ptpn6-1882
guggcccaagccaggugagg

SEQ ID NO: 5631 - RNA, 20 nt, Artificial Sequence
  Synthetic oligonucleotide: Ptpn6-1883
cugccaggccaauggcacug

SEQ ID NO: 5632 - RNA, 20 nt, Artificial Sequence
  Synthetic oligonucleotide: Ptpn6-1217
ugccaggccaauggcacugc

SEQ ID NO: 5633 - RNA, 20 nt, Artificial Sequence
  Synthetic oligonucleotide: Ptpn6-1885
uggcacugcagggacaaacc

SEQ ID NO: 5634 - RNA, 20 nt, Artificial Sequence
  Synthetic oligonucleotide: Ptpn6-1886
aacccuggacuaauagucuc

SEQ ID NO: 5635 - RNA, 20 nt, Artificial Sequence
  Synthetic oligonucleotide: Ptpn6-986
acccuggacuaauagucucc

SEQ ID NO: 5636 - RNA, 20 nt, Artificial Sequence
  Synthetic oligonucleotide: Ptpn6-1888
ggacuaauagucuccaggaa

SEQ ID NO: 5637 - RNA, 20 nt, Artificial Sequence
  Synthetic oligonucleotide: Ptpn6-1889
agucuccaggaaaaggacag

SEQ ID NO: 5638 - RNA, 20 nt, Artificial Sequence
  Synthetic oligonucleotide: Ptpn6-1047
gucuccaggaaaaggacagg

SEQ ID NO: 5639 - RNA, 20 nt, Artificial Sequence
  Synthetic oligonucleotide: Ptpn6-1891
ccaggaaaaggacagguggg

SEQ ID NO: 5640 - RNA, 20 nt, Artificial Sequence
  Synthetic oligonucleotide: Ptpn6-1252
caggaaaaggacaggugggg

SEQ ID NO: 5641 - RNA, 20 nt, Artificial Sequence
  Synthetic oligonucleotide: Ptpn6-1893
acagguggggcggggcuggc

SEQ ID NO: 5642 - RNA, 20 nt, Artificial Sequence
  Synthetic oligonucleotide: Ptpn6-1894
agcuucccugcagccccaaa

SEQ ID NO: 5643 - RNA, 20 nt, Artificial Sequence
  Synthetic oligonucleotide: Ptpn6-1049
gcuucccugcagccccaaag

SEQ ID NO: 5644 - RNA, 20 nt, Artificial Sequence
  Synthetic oligonucleotide: Ptpn6-1242
cuucccugcagccccaaagc

SEQ ID NO: 5645 - RNA, 20 nt, Artificial Sequence
  Synthetic oligonucleotide: Ptpn6-1897
agcaggcccgccugcugguc

SEQ ID NO: 5646 - RNA, 20 nt, Artificial Sequence
  Synthetic oligonucleotide: Ptpn6-1898
ugguccagggccgccuuccc

SEQ ID NO: 5647 - RNA, 20 nt, Artificial Sequence
  Synthetic oligonucleotide: Ptpn6-1052
gguccagggccgccuucccc

SEQ ID NO: 5648 - RNA, 20 nt, Artificial Sequence
  Synthetic oligonucleotide: Ptpn6-1051
guccagggccgccuuccccc

SEQ ID NO: 5649 - RNA, 20 nt, Artificial Sequence
  Synthetic oligonucleotide: Ptpn6-1901
ccagggccgccuucccccgg

SEQ ID NO: 5650 - RNA, 20 nt, Artificial Sequence
  Synthetic oligonucleotide: Ptpn6-1902
agggccgccuucccccggga

SEQ ID NO: 5651 - RNA, 20 nt, Artificial Sequence
  Synthetic oligonucleotide: Ptpn6-1026
gggccgccuucccccgggag

SEQ ID NO: 5652 - RNA, 20 nt, Artificial Sequence
  Synthetic oligonucleotide: Ptpn6-1904
gccgccuucccccgggagag

SEQ ID NO: 5653 - RNA, 20 nt, Artificial Sequence
  Synthetic oligonucleotide: Ptpn6-1201
ccgccuucccccgggagagg

SEQ ID NO: 5654 - RNA, 20 nt, Artificial Sequence
  Synthetic oligonucleotide: Ptpn6-1906
cccgggagaggaggagccac

SEQ ID NO: 5655 - RNA, 20 nt, Artificial Sequence
  Synthetic oligonucleotide: Ptpn6-1238
ccgggagaggaggagccacc

SEQ ID NO: 5656 - RNA, 20 nt, Artificial Sequence
  Synthetic oligonucleotide: Ptpn6-1908
ggagccaccuggagcuccac

SEQ ID NO: 5657 - RNA, 20 nt, Artificial Sequence
  Synthetic oligonucleotide: Ptpn6-1055
gagccaccuggagcuccacc

SEQ ID NO: 5658 - RNA, 20 nt, Artificial Sequence
  Synthetic oligonucleotide: Ptpn6-1910
ccaccuggagcucaagcuga

SEQ ID NO: 5659 - RNA, 20 nt, Artificial Sequence
  Synthetic oligonucleotide: Ptpn6-1911
gagcucaagcugacagagcg

SEQ ID NO: 5660 - RNA, 20 nt, Artificial Sequence
  Synthetic oligonucleotide: Ptpn6-1188
agcucaagcugacagagcgg

SEQ ID NO: 5661 - RNA, 20 nt, Artificial Sequence
  Synthetic oligonucleotide: Ptpn6-1913
gcugacagagcggcggggua

SEQ ID NO: 5662 - RNA, 20 nt, Artificial Sequence
  Synthetic oligonucleotide: Ptpn6-1914
cagagcggcgggguauuggg

SEQ ID NO: 5663 - RNA, 20 nt, Artificial Sequence
  Synthetic oligonucleotide: Ptpn6-980
agagcggcgggguauugggu

SEQ ID NO: 5664 - RNA, 20 nt, Artificial Sequence
  Synthetic oligonucleotide: Ptpn6-1041
gagcggcgggguauugggua

SEQ ID NO: 5665 - RNA, 20 nt, Artificial Sequence
  Synthetic oligonucleotide: Ptpn6-989
agcggcgggguauuggguag

SEQ ID NO: 5666 - RNA, 20 nt, Artificial Sequence
  Synthetic oligonucleotide: Ptpn6-1918
uauuggguaggggaacagac

SEQ ID NO: 5667 - RNA, 20 nt, Artificial Sequence
  Synthetic oligonucleotide: Ptpn6-1192
auuggguaggggaacagacc

SEQ ID NO: 5668 - RNA, 20 nt, Artificial Sequence
  Synthetic oligonucleotide: Ptpn6-1920
agaccaggaaguaacccugg

SEQ ID NO: 5669 - RNA, 20 nt, Artificial Sequence
  Synthetic oligonucleotide: Ptpn6-1921
accaggaaguaacccuggcu

SEQ ID NO: 5670 - RNA, 20 nt, Artificial Sequence
  Synthetic oligonucleotide: Ptpn6-1231
ccaggaaguaacccuggcug

SEQ ID NO: 5671 - RNA, 20 nt, Artificial Sequence
  Synthetic oligonucleotide: Ptpn6-1923
ggaaguaacccuggcugagg

SEQ ID NO: 5672 - RNA, 20 nt, Artificial Sequence
  Synthetic oligonucleotide: Ptpn6-1924
uggcugaggaagagcaacca

SEQ ID NO: 5673 - RNA, 20 nt, Artificial Sequence
  Synthetic oligonucleotide: Ptpn6-1039
ggcugaggaagagcaaccaa

SEQ ID NO: 5674 - RNA, 20 nt, Artificial Sequence
  Synthetic oligonucleotide: Ptpn6-1029
gcugaggaagagcaaccaau

SEQ ID NO: 5675 - RNA, 20 nt, Artificial Sequence
  Synthetic oligonucleotide: Ptpn6-1239
cugaggaagagcaaccaaug

SEQ ID NO: 5676 - RNA, 20 nt, Artificial Sequence
  Synthetic oligonucleotide: Ptpn6-1221
ugaggaagagcaaccaaugg

SEQ ID NO: 5677 - RNA, 20 nt, Artificial Sequence
  Synthetic oligonucleotide: Ptpn6-1929
ugggggaaaccucuccguag

SEQ ID NO: 5678 - RNA, 20 nt, Artificial Sequence
  Synthetic oligonucleotide: Ptpn6-957
gggggaaaccucuccguagg

SEQ ID NO: 5679 - RNA, 20 nt, Artificial Sequence
  Synthetic oligonucleotide: Ptpn6-1931
cucuccguaggcggaaacca

SEQ ID NO: 5680 - RNA, 20 nt, Artificial Sequence
  Synthetic oligonucleotide: Ptpn6-1932
aggcggaaaccaaagggccu

SEQ ID NO: 5681 - RNA, 20 nt, Artificial Sequence
  Synthetic oligonucleotide: Ptpn6-959
ggcggaaaccaaagggccua

SEQ ID NO: 5682 - RNA, 20 nt, Artificial Sequence
  Synthetic oligonucleotide: Ptpn6-1934
ucccuaacagcccaguuccu

SEQ ID NO: 5683 - RNA, 20 nt, Artificial Sequence
  Synthetic oligonucleotide: Ptpn6-1935
ccuaacagcccaguuccuca

SEQ ID NO: 5684 - RNA, 20 nt, Artificial Sequence
  Synthetic oligonucleotide: Ptpn6-1936
aacagcccaguuccucagag

SEQ ID NO: 5685 - RNA, 20 nt, Artificial Sequence
  Synthetic oligonucleotide: Ptpn6-1230
acagcccaguuccucagaga

SEQ ID NO: 5686 - RNA, 17 nt, Artificial Sequence
  Synthetic oligonucleotide: Ptpn6-1938
gucugauguugggaagu

SEQ ID NO: 5687 - RNA, 17 nt, Artificial Sequence
  Synthetic oligonucleotide: Ptpn6-1939
aaguuggcuggacgugg

SEQ ID NO: 5688 - RNA, 17 nt, Artificial Sequence
  Synthetic oligonucleotide: Ptpn6-1940
gcuauguuugagguguu

SEQ ID NO: 5689 - RNA, 17 nt, Artificial Sequence
  Synthetic oligonucleotide: Ptpn6-1941
cuguugaaugaaugaug

SEQ ID NO: 5690 - RNA, 17 nt, Artificial Sequence
  Synthetic oligonucleotide: Ptpn6-1942
gggggacagguccuaag

SEQ ID NO: 5691 - RNA, 17 nt, Artificial Sequence
  Synthetic oligonucleotide: Ptpn6-1943
ugcucaacacguaccug

SEQ ID NO: 5692 - RNA, 17 nt, Artificial Sequence
  Synthetic oligonucleotide: Ptpn6-1944
caacacguaccuguuga

SEQ ID NO: 5693 - RNA, 17 nt, Artificial Sequence
  Synthetic oligonucleotide: Ptpn6-1384
uguugaaugaaugaugc

SEQ ID NO: 5694 - RNA, 17 nt, Artificial Sequence
  Synthetic oligonucleotide: Ptpn6-1125
guugaaugaaugaugca

SEQ ID NO: 5695 - RNA, 17 nt, Artificial Sequence
  Synthetic oligonucleotide: Ptpn6-1370
uugaaugaaugaugcag

SEQ ID NO: 5696 - RNA, 17 nt, Artificial Sequence
  Synthetic oligonucleotide: Ptpn6-1948
augaaugaugcagggga

SEQ ID NO: 5697 - RNA, 17 nt, Artificial Sequence
  Synthetic oligonucleotide: Ptpn6-1362
ugaaugaugcaggggaa

SEQ ID NO: 5698 - RNA, 17 nt, Artificial Sequence
  Synthetic oligonucleotide: Ptpn6-1123
gaaugaugcaggggaaa

SEQ ID NO: 5699 - RNA, 17 nt, Artificial Sequence
  Synthetic oligonucleotide: Ptpn6-1951
augcaggggaaagggaa

SEQ ID NO: 5700 - RNA, 17 nt, Artificial Sequence
  Synthetic oligonucleotide: Ptpn6-1952
aggggaaagggaaguga

SEQ ID NO: 5701 - RNA, 17 nt, Artificial Sequence
  Synthetic oligonucleotide: Ptpn6-1135
ggggaaagggaagugaa

SEQ ID NO: 5702 - RNA, 17 nt, Artificial Sequence
  Synthetic oligonucleotide: Ptpn6-1954
ggaagugaaaggaaaca

SEQ ID NO: 5703 - RNA, 17 nt, Artificial Sequence
  Synthetic oligonucleotide: Ptpn6-1955
gaaaggaaacaaagaag

SEQ ID NO: 5704 - RNA, 17 nt, Artificial Sequence
  Synthetic oligonucleotide: Ptpn6-1389
aaaggaaacaaagaaga

SEQ ID NO: 5705 - RNA, 17 nt, Artificial Sequence
  Synthetic oligonucleotide: Ptpn6-1957
gggaccaaagucugaug

SEQ ID NO: 5706 - RNA, 17 nt, Artificial Sequence
  Synthetic oligonucleotide: Ptpn6-1094
ggaccaaagucugaugu

SEQ ID NO: 5707 - RNA, 17 nt, Artificial Sequence
  Synthetic oligonucleotide: Ptpn6-1095
gaccaaagucugauguu

SEQ ID NO: 5708 - RNA, 17 nt, Artificial Sequence
  Synthetic oligonucleotide: Ptpn6-1366
ucugauguugggaagug

SEQ ID NO: 5709 - RNA, 17 nt, Artificial Sequence
  Synthetic oligonucleotide: Ptpn6-1961
ugauguugggaagugcg

SEQ ID NO: 5710 - RNA, 17 nt, Artificial Sequence
  Synthetic oligonucleotide: Ptpn6-1962
aagugcggagaaguugg

SEQ ID NO: 5711 - RNA, 17 nt, Artificial Sequence
  Synthetic oligonucleotide: Ptpn6-1963
ggagaaguuggcuggac

SEQ ID NO: 5712 - RNA, 17 nt, Artificial Sequence
  Synthetic oligonucleotide: Ptpn6-1124
gagaaguuggcuggacg

SEQ ID NO: 5713 - RNA, 17 nt, Artificial Sequence
  Synthetic oligonucleotide: Ptpn6-1328
agaaguuggcuggacgu

SEQ ID NO: 5714 - RNA, 17 nt, Artificial Sequence
  Synthetic oligonucleotide: Ptpn6-1966
gacgugggagggccuuc

SEQ ID NO: 5715 - RNA, 17 nt, Artificial Sequence
  Synthetic oligonucleotide: Ptpn6-1967
gccucugacugcuaugu

SEQ ID NO: 5716 - RNA, 17 nt, Artificial Sequence
  Synthetic oligonucleotide: Ptpn6-1968
agguguugugagcuacc

SEQ ID NO: 5717 - RNA, 17 nt, Artificial Sequence
  Synthetic oligonucleotide: Ptpn6-1083
gguguugugagcuaccc

SEQ ID NO: 5718 - RNA, 17 nt, Artificial Sequence
  Synthetic oligonucleotide: Ptpn6-1085
guguugugagcuaccca

SEQ ID NO: 5719 - RNA, 17 nt, Artificial Sequence
  Synthetic oligonucleotide: Ptpn6-1354
uguugugagcuacccag

SEQ ID NO: 5720 - RNA, 17 nt, Artificial Sequence
  Synthetic oligonucleotide: Ptpn6-1096
ggggacagguccuaagc

SEQ ID NO: 5721 - RNA, 17 nt, Artificial Sequence
  Synthetic oligonucleotide: Ptpn6-1973
agguccuaagcaggagg

SEQ ID NO: 5722 - RNA, 17 nt, Artificial Sequence
  Synthetic oligonucleotide: Ptpn6-1974
uaagcaggaggcagaag

SEQ ID NO: 5723 - RNA, 17 nt, Artificial Sequence
  Synthetic oligonucleotide: Ptpn6-1388
aagcaggaggcagaagc

SEQ ID NO: 5724 - RNA, 17 nt, Artificial Sequence
  Synthetic oligonucleotide: Ptpn6-1976
aggcagaagcaggagcc

SEQ ID NO: 5725 - RNA, 17 nt, Artificial Sequence
  Synthetic oligonucleotide: Ptpn6-1977
aagcaggagcccagagg

SEQ ID NO: 5726 - RNA, 17 nt, Artificial Sequence
  Synthetic oligonucleotide: Ptpn6-1385
agcaggagcccagaggc

SEQ ID NO: 5727 - RNA, 17 nt, Artificial Sequence
  Synthetic oligonucleotide: Ptpn6-1979
agcccagaggcuggaag

SEQ ID NO: 5728 - RNA, 17 nt, Artificial Sequence
  Synthetic oligonucleotide: Ptpn6-1980
cuggaaguagaaaugca

SEQ ID NO: 5729 - RNA, 17 nt, Artificial Sequence
  Synthetic oligonucleotide: Ptpn6-1374
uggaaguagaaaugcaa

SEQ ID NO: 5730 - RNA, 17 nt, Artificial Sequence
  Synthetic oligonucleotide: Ptpn6-1982
gaaguagaaaugcaaug

SEQ ID NO: 5731 - RNA, 17 nt, Artificial Sequence
  Synthetic oligonucleotide: Ptpn6-1983
aguagaaaugcaaugga

SEQ ID NO: 5732 - RNA, 17 nt, Artificial Sequence
  Synthetic oligonucleotide: Ptpn6-1984
acagauacacacuuguc

SEQ ID NO: 5733 - RNA, 17 nt, Artificial Sequence
  Synthetic oligonucleotide: Ptpn6-1332
cagauacacacuugucc

SEQ ID NO: 5734 - RNA, 17 nt, Artificial Sequence
  Synthetic oligonucleotide: Ptpn6-1339
agauacacacuugucca

SEQ ID NO: 5735 - RNA, 17 nt, Artificial Sequence
  Synthetic oligonucleotide: Ptpn6-1082
gauacacacuuguccag

SEQ ID NO: 5736 - RNA, 17 nt, Artificial Sequence
  Synthetic oligonucleotide: Ptpn6-1988
uccaggggaaaauguua

SEQ ID NO: 5737 - RNA, 17 nt, Artificial Sequence
  Synthetic oligonucleotide: Ptpn6-1989
caggggaaaauguuaaa

SEQ ID NO: 5738 - RNA, 17 nt, Artificial Sequence
  Synthetic oligonucleotide: Ptpn6-1373
aggggaaaauguuaaag

SEQ ID NO: 5739 - RNA, 17 nt, Artificial Sequence
  Synthetic oligonucleotide: Ptpn6-1126
ggggaaaauguuaaaga

SEQ ID NO: 5740 - RNA, 17 nt, Artificial Sequence
  Synthetic oligonucleotide: Ptpn6-1992
aaauguuaaagaggggg

SEQ ID NO: 5741 - RNA, 17 nt, Artificial Sequence
  Synthetic oligonucleotide: Ptpn6-1993
auguuaaagagggggca

SEQ ID NO: 5742 - RNA, 17 nt, Artificial Sequence
  Synthetic oligonucleotide: Ptpn6-1344
uguuaaagagggggcag

SEQ ID NO: 5743 - RNA, 17 nt, Artificial Sequence
  Synthetic oligonucleotide: Ptpn6-1995
agagggggcagaggagc

SEQ ID NO: 5744 - RNA, 17 nt, Artificial Sequence
  Synthetic oligonucleotide: Ptpn6-1996
ggggcagaggagcauga

SEQ ID NO: 5745 - RNA, 17 nt, Artificial Sequence
  Synthetic oligonucleotide: Ptpn6-1997
agaggagcaugagugag

SEQ ID NO: 5746 - RNA, 17 nt, Artificial Sequence
  Synthetic oligonucleotide: Ptpn6-1116
gaggagcaugagugagc

SEQ ID NO: 5747 - RNA, 17 nt, Artificial Sequence
  Synthetic oligonucleotide: Ptpn6-1372
aggagcaugagugagcc

SEQ ID NO: 5748 - RNA, 17 nt, Artificial Sequence
  Synthetic oligonucleotide: Ptpn6-2000
ggggguccucacaccuu

SEQ ID NO: 5749 - RNA, 17 nt, Artificial Sequence
  Synthetic oligonucleotide: Ptpn6-1098
gggguccucacaccuug

SEQ ID NO: 5750 - RNA, 17 nt, Artificial Sequence
  Synthetic oligonucleotide: Ptpn6-1093
ggguccucacaccuugc

SEQ ID NO: 5751 - RNA, 17 nt, Artificial Sequence
  Synthetic oligonucleotide: Ptpn6-2003
uccucacaccuugcggg

SEQ ID NO: 5752 - RNA, 17 nt, Artificial Sequence
  Synthetic oligonucleotide: Ptpn6-1337
ccucacaccuugcggga

SEQ ID NO: 5753 - RNA, 17 nt, Artificial Sequence
  Synthetic oligonucleotide: Ptpn6-1345
cucacaccuugcgggaa

SEQ ID NO: 5754 - RNA, 17 nt, Artificial Sequence
  Synthetic oligonucleotide: Ptpn6-1327
ucacaccuugcgggaag

SEQ ID NO: 5755 - RNA, 17 nt, Artificial Sequence
  Synthetic oligonucleotide: Ptpn6-2007
cgggaaggggaaguuca

SEQ ID NO: 5756 - RNA, 17 nt, Artificial Sequence
  Synthetic oligonucleotide: Ptpn6-1115
gggaaggggaaguucau

SEQ ID NO: 5757 - RNA, 17 nt, Artificial Sequence
  Synthetic oligonucleotide: Ptpn6-2009
ggggaaguucauaggga

SEQ ID NO: 5758 - RNA, 17 nt, Artificial Sequence
  Synthetic oligonucleotide: Ptpn6-1099
gggaaguucauagggac

SEQ ID NO: 5759 - RNA, 17 nt, Artificial Sequence
  Synthetic oligonucleotide: Ptpn6-2011
gggaccggaaacaggcg

SEQ ID NO: 5760 - RNA, 17 nt, Artificial Sequence
  Synthetic oligonucleotide: Ptpn6-2012
acucacguucacacacg

SEQ ID NO: 5761 - RNA, 17 nt, Artificial Sequence
  Synthetic oligonucleotide: Ptpn6-1002
cucacguucacacacgu

SEQ ID NO: 5762 - RNA, 17 nt, Artificial Sequence
  Synthetic oligonucleotide: Ptpn6-2014
cguucacacacgucgga

SEQ ID NO: 5763 - RNA, 17 nt, Artificial Sequence
  Synthetic oligonucleotide: Ptpn6-2015
ccucccuccaaaacuaa

SEQ ID NO: 5764 - RNA, 17 nt, Artificial Sequence
  Synthetic oligonucleotide: Ptpn6-1336
cucccuccaaaacuaac

SEQ ID NO: 5765 - RNA, 17 nt, Artificial Sequence
  Synthetic oligonucleotide: Ptpn6-2017
ccaaaacuaacaggaga

SEQ ID NO: 5766 - RNA, 17 nt, Artificial Sequence
  Synthetic oligonucleotide: Ptpn6-1359
caaaacuaacaggagac

SEQ ID NO: 5767 - RNA, 17 nt, Artificial Sequence
  Synthetic oligonucleotide: Ptpn6-2019
ugggaccccgauggugc

SEQ ID NO: 5768 - RNA, 17 nt, Artificial Sequence
  Synthetic oligonucleotide: Ptpn6-1088
gggaccccgauggugcc

SEQ ID NO: 5769 - RNA, 17 nt, Artificial Sequence
  Synthetic oligonucleotide: Ptpn6-2021
gugcccgggacuuaccc

SEQ ID NO: 5770 - RNA, 17 nt, Artificial Sequence
  Synthetic oligonucleotide: Ptpn6-1322
ugcccgggacuuaccca

SEQ ID NO: 5771 - RNA, 17 nt, Artificial Sequence
  Synthetic oligonucleotide: Ptpn6-2023
gggacagcaucucucug

SEQ ID NO: 5772 - RNA, 17 nt, Artificial Sequence
  Synthetic oligonucleotide: Ptpn6-1112
ggacagcaucucucugu

SEQ ID NO: 5773 - RNA, 17 nt, Artificial Sequence
  Synthetic oligonucleotide: Ptpn6-1113
gacagcaucucucugua

SEQ ID NO: 5774 - RNA, 17 nt, Artificial Sequence
  Synthetic oligonucleotide: Ptpn6-2026
cagcaucucucuguagg

SEQ ID NO: 5775 - RNA, 17 nt, Artificial Sequence
  Synthetic oligonucleotide: Ptpn6-1347
agcaucucucuguaggg

SEQ ID NO: 5776 - RNA, 17 nt, Artificial Sequence
  Synthetic oligonucleotide: Ptpn6-1105
gcaucucucuguaggga

SEQ ID NO: 5777 - RNA, 17 nt, Artificial Sequence
  Synthetic oligonucleotide: Ptpn6-1357
caucucucuguagggag

SEQ ID NO: 5778 - RNA, 17 nt, Artificial Sequence
  Synthetic oligonucleotide: Ptpn6-1351
aucucucuguagggagg

SEQ ID NO: 5779 - RNA, 17 nt, Artificial Sequence
  Synthetic oligonucleotide: Ptpn6-2031
ggagggggaagccacgg

SEQ ID NO: 5780 - RNA, 17 nt, Artificial Sequence
  Synthetic oligonucleotide: Ptpn6-2032
agggggaagccacggca

SEQ ID NO: 5781 - RNA, 17 nt, Artificial Sequence
  Synthetic oligonucleotide: Ptpn6-2033
gccacggcagagggccg

SEQ ID NO: 5782 - RNA, 17 nt, Artificial Sequence
  Synthetic oligonucleotide: Ptpn6-1338
ccacggcagagggccgc

SEQ ID NO: 5783 - RNA, 17 nt, Artificial Sequence
  Synthetic oligonucleotide: Ptpn6-1383
cacggcagagggccgca

SEQ ID NO: 5784 - RNA, 17 nt, Artificial Sequence
  Synthetic oligonucleotide: Ptpn6-2036
gcagagggccgcagggg

SEQ ID NO: 5785 - RNA, 17 nt, Artificial Sequence
  Synthetic oligonucleotide: Ptpn6-1363
cagagggccgcaggggg

SEQ ID NO: 5786 - RNA, 17 nt, Artificial Sequence
  Synthetic oligonucleotide: Ptpn6-2038
ggccgcagggggcgggg

SEQ ID NO: 5787 - RNA, 17 nt, Artificial Sequence
  Synthetic oligonucleotide: Ptpn6-2039
acaguggcccaagccag

SEQ ID NO: 5788 - RNA, 17 nt, Artificial Sequence
  Synthetic oligonucleotide: Ptpn6-2040
aguggcccaagccaggu

SEQ ID NO: 5789 - RNA, 17 nt, Artificial Sequence
  Synthetic oligonucleotide: Ptpn6-1121
guggcccaagccaggug

SEQ ID NO: 5790 - RNA, 17 nt, Artificial Sequence
  Synthetic oligonucleotide: Ptpn6-2042
gcccaagccaggugagg

SEQ ID NO: 5791 - RNA, 17 nt, Artificial Sequence
  Synthetic oligonucleotide: Ptpn6-2043
ccaggccaauggcacug

SEQ ID NO: 5792 - RNA, 17 nt, Artificial Sequence
  Synthetic oligonucleotide: Ptpn6-1348
caggccaauggcacugc

SEQ ID NO: 5793 - RNA, 17 nt, Artificial Sequence
  Synthetic oligonucleotide: Ptpn6-2045
cacugcagggacaaacc

SEQ ID NO: 5794 - RNA, 17 nt, Artificial Sequence
  Synthetic oligonucleotide: Ptpn6-2046
ccuggacuaauagucuc

SEQ ID NO: 5795 - RNA, 17 nt, Artificial Sequence
  Synthetic oligonucleotide: Ptpn6-1321
cuggacuaauagucucc

SEQ ID NO: 5796 - RNA, 17 nt, Artificial Sequence
  Synthetic oligonucleotide: Ptpn6-2048
cuaauagucuccaggaa

SEQ ID NO: 5797 - RNA, 17 nt, Artificial Sequence
  Synthetic oligonucleotide: Ptpn6-2049
cuccaggaaaaggacag

SEQ ID NO: 5798 - RNA, 17 nt, Artificial Sequence
  Synthetic oligonucleotide: Ptpn6-1371
uccaggaaaaggacagg

SEQ ID NO: 5799 - RNA, 17 nt, Artificial Sequence
  Synthetic oligonucleotide: Ptpn6-2051
ggaaaaggacagguggg

SEQ ID NO: 5800 - RNA, 17 nt, Artificial Sequence
  Synthetic oligonucleotide: Ptpn6-1131
gaaaaggacaggugggg

SEQ ID NO: 5801 - RNA, 17 nt, Artificial Sequence
  Synthetic oligonucleotide: Ptpn6-2053
gguggggcggggcuggc

SEQ ID NO: 5802 - RNA, 17 nt, Artificial Sequence
  Synthetic oligonucleotide: Ptpn6-2054
uucccugcagccccaaa

SEQ ID NO: 5803 - RNA, 17 nt, Artificial Sequence
  Synthetic oligonucleotide: Ptpn6-1369
ucccugcagccccaaag

SEQ ID NO: 5804 - RNA, 17 nt, Artificial Sequence
  Synthetic oligonucleotide: Ptpn6-1376
cccugcagccccaaagc

SEQ ID NO: 5805 - RNA, 17 nt, Artificial Sequence
  Synthetic oligonucleotide: Ptpn6-2057
aggcccgccugcugguc

SEQ ID NO: 5806 - RNA, 17 nt, Artificial Sequence
  Synthetic oligonucleotide: Ptpn6-2058
uccagggccgccuuccc

SEQ ID NO: 5807 - RNA, 17 nt, Artificial Sequence
  Synthetic oligonucleotide: Ptpn6-1379
ccagggccgccuucccc

SEQ ID NO: 5808 - RNA, 17 nt, Artificial Sequence
  Synthetic oligonucleotide: Ptpn6-1364
cagggccgccuuccccc

SEQ ID NO: 5809 - RNA, 17 nt, Artificial Sequence
  Synthetic oligonucleotide: Ptpn6-2061
gggccgccuucccccgg

SEQ ID NO: 5810 - RNA, 17 nt, Artificial Sequence
  Synthetic oligonucleotide: Ptpn6-2062
gccgccuucccccggga

SEQ ID NO: 5811 - RNA, 17 nt, Artificial Sequence
  Synthetic oligonucleotide: Ptpn6-1333
ccgccuucccccgggag

SEQ ID NO: 5812 - RNA, 17 nt, Artificial Sequence
  Synthetic oligonucleotide: Ptpn6-2064
gccuucccccgggagag

SEQ ID NO: 5813 - RNA, 17 nt, Artificial Sequence
  Synthetic oligonucleotide: Ptpn6-1352
ccuucccccgggagagg

SEQ ID NO: 5814 - RNA, 17 nt, Artificial Sequence
  Synthetic oligonucleotide: Ptpn6-2066
gggagaggaggagccac

SEQ ID NO: 5815 - RNA, 17 nt, Artificial Sequence
  Synthetic oligonucleotide: Ptpn6-1129
ggagaggaggagccacc

SEQ ID NO: 5816 - RNA, 17 nt, Artificial Sequence
  Synthetic oligonucleotide: Ptpn6-2068
gccaccuggagcuccac

SEQ ID NO: 5817 - RNA, 17 nt, Artificial Sequence
  Synthetic oligonucleotide: Ptpn6-1386
ccaccuggagcuccacc

SEQ ID NO: 5818 - RNA, 17 nt, Artificial Sequence
  Synthetic oligonucleotide: Ptpn6-2070
ccuggagcucaagcuga

SEQ ID NO: 5819 - RNA, 17 nt, Artificial Sequence
  Synthetic oligonucleotide: Ptpn6-2071
cucaagcugacagagcg

SEQ ID NO: 5820 - RNA, 17 nt, Artificial Sequence
  Synthetic oligonucleotide: Ptpn6-1319
ucaagcugacagagcgg

SEQ ID NO: 5821 - RNA, 17 nt, Artificial Sequence
  Synthetic oligonucleotide: Ptpn6-2073
gacagagcggcggggua

SEQ ID NO: 5822 - RNA, 17 nt, Artificial Sequence
  Synthetic oligonucleotide: Ptpn6-2074
agcggcgggguauuggg

SEQ ID NO: 5823 - RNA, 17 nt, Artificial Sequence
  Synthetic oligonucleotide: Ptpn6-1081
gcggcgggguauugggu

SEQ ID NO: 5824 - RNA, 17 nt, Artificial Sequence
  Synthetic oligonucleotide: Ptpn6-1000
cggcgggguauugggua

SEQ ID NO: 5825 - RNA, 17 nt, Artificial Sequence
  Synthetic oligonucleotide: Ptpn6-1084
ggcgggguauuggguag

SEQ ID NO: 5826 - RNA, 17 nt, Artificial Sequence
  Synthetic oligonucleotide: Ptpn6-2078
uggguaggggaacagac

SEQ ID NO: 5827 - RNA, 17 nt, Artificial Sequence
  Synthetic oligonucleotide: Ptpn6-1106
ggguaggggaacagacc

SEQ ID NO: 5828 - RNA, 17 nt, Artificial Sequence
  Synthetic oligonucleotide: Ptpn6-2080
ccaggaaguaacccugg

SEQ ID NO: 5829 - RNA, 17 nt, Artificial Sequence
  Synthetic oligonucleotide: Ptpn6-2081
aggaaguaacccuggcu

SEQ ID NO: 5830 - RNA, 17 nt, Artificial Sequence
  Synthetic oligonucleotide: Ptpn6-1108
ggaaguaacccuggcug

SEQ ID NO: 5831 - RNA, 17 nt, Artificial Sequence
  Synthetic oligonucleotide: Ptpn6-2083
aguaacccuggcugagg

SEQ ID NO: 5832 - RNA, 17 nt, Artificial Sequence
  Synthetic oligonucleotide: Ptpn6-2084
cugaggaagagcaacca

SEQ ID NO: 5833 - RNA, 17 nt, Artificial Sequence
  Synthetic oligonucleotide: Ptpn6-1358
ugaggaagagcaaccaa

SEQ ID NO: 5834 - RNA, 17 nt, Artificial Sequence
  Synthetic oligonucleotide: Ptpn6-1107
gaggaagagcaaccaau

SEQ ID NO: 5835 - RNA, 17 nt, Artificial Sequence
  Synthetic oligonucleotide: Ptpn6-1355
aggaagagcaaccaaug

SEQ ID NO: 5836 - RNA, 17 nt, Artificial Sequence
  Synthetic oligonucleotide: Ptpn6-1104
ggaagagcaaccaaugg

SEQ ID NO: 5837 - RNA, 17 nt, Artificial Sequence
  Synthetic oligonucleotide: Ptpn6-2089
gggaaaccucuccguag

SEQ ID NO: 5838 - RNA, 17 nt, Artificial Sequence
  Synthetic oligonucleotide: Ptpn6-965
ggaaaccucuccguagg

SEQ ID NO: 5839 - RNA, 17 nt, Artificial Sequence
  Synthetic oligonucleotide: Ptpn6-2091
uccguaggcggaaacca

SEQ ID NO: 5840 - RNA, 17 nt, Artificial Sequence
  Synthetic oligonucleotide: Ptpn6-2092
cggaaaccaaagggccu

SEQ ID NO: 5841 - RNA, 17 nt, Artificial Sequence
  Synthetic oligonucleotide: Ptpn6-1103
ggaaaccaaagggccua

SEQ ID NO: 5842 - RNA, 17 nt, Artificial Sequence
  Synthetic oligonucleotide: Ptpn6-2094
cuaacagcccaguuccu

SEQ ID NO: 5843 - RNA, 17 nt, Artificial Sequence
  Synthetic oligonucleotide: Ptpn6-2095
aacagcccaguuccuca

SEQ ID NO: 5844 - RNA, 17 nt, Artificial Sequence
  Synthetic oligonucleotide: Ptpn6-2096
agcccaguuccucagag

SEQ ID NO: 5845 - RNA, 17 nt, Artificial Sequence
  Synthetic oligonucleotide: Ptpn6-1120
gcccaguuccucagaga

SEQ ID NO: 5846 - RNA, 20 nt, Artificial Sequence
  Synthetic oligonucleotide: Ptpn6-1412
guuuaagaugcugguaauac

SEQ ID NO: 5847 - RNA, 20 nt, Artificial Sequence
  Synthetic oligonucleotide: Ptpn6-2099
aagaugcugguaauacugga

SEQ ID NO: 5848 - RNA, 20 nt, Artificial Sequence
  Synthetic oligonucleotide: Ptpn6-2100
cagacauggucucugcucuc

SEQ ID NO: 5849 - RNA, 20 nt, Artificial Sequence
  Synthetic oligonucleotide: Ptpn6-1414
agacauggucucugcucuca

SEQ ID NO: 5850 - RNA, 20 nt, Artificial Sequence
  Synthetic oligonucleotide: Ptpn6-2102
cucacggagcuuacauucca

SEQ ID NO: 5851 - RNA, 20 nt, Artificial Sequence
  Synthetic oligonucleotide: Ptpn6-1415
ucacggagcuuacauuccag

SEQ ID NO: 5852 - RNA, 20 nt, Artificial Sequence
  Synthetic oligonucleotide: Ptpn6-1416
cacggagcuuacauuccagu

SEQ ID NO: 5853 - RNA, 20 nt, Artificial Sequence
  Synthetic oligonucleotide: Ptpn6-2105
uuccagugggagguuacaga

SEQ ID NO: 5854 - RNA, 20 nt, Artificial Sequence
  Synthetic oligonucleotide: Ptpn6-2106
cgaacaaauaacccaauaaa

SEQ ID NO: 5855 - RNA, 20 nt, Artificial Sequence
  Synthetic oligonucleotide: Ptpn6-2107
auuggaucauugcagauucu

SEQ ID NO: 5856 - RNA, 20 nt, Artificial Sequence
  Synthetic oligonucleotide: Ptpn6-2108
agauucucagaaguauuacg

SEQ ID NO: 5857 - RNA, 20 nt, Artificial Sequence
  Synthetic oligonucleotide: Ptpn6-2109
cagaaaauagacagccuugg

SEQ ID NO: 5858 - RNA, 20 nt, Artificial Sequence
  Synthetic oligonucleotide: Ptpn6-2110
acaccugugaucccagcacu

SEQ ID NO: 5859 - RNA, 20 nt, Artificial Sequence
  Synthetic oligonucleotide: Ptpn6-1423
caccugugaucccagcacug

SEQ ID NO: 5860 - RNA, 20 nt, Artificial Sequence
  Synthetic oligonucleotide: Ptpn6-1424
accugugaucccagcacugu

SEQ ID NO: 5861 - RNA, 20 nt, Artificial Sequence
  Synthetic oligonucleotide: Ptpn6-2113
gaucccagcacugugggagg

SEQ ID NO: 5862 - RNA, 20 nt, Artificial Sequence
  Synthetic oligonucleotide: Ptpn6-2114
cagcacugugggaggcugag

SEQ ID NO: 5863 - RNA, 20 nt, Artificial Sequence
  Synthetic oligonucleotide: Ptpn6-2115
gcacugugggaggcugaggc

SEQ ID NO: 5864 - RNA, 20 nt, Artificial Sequence
  Synthetic oligonucleotide: Ptpn6-2116
acugugggaggcugaggcga

SEQ ID NO: 5865 - RNA, 20 nt, Artificial Sequence
  Synthetic oligonucleotide: Ptpn6-2117
ggcugaggcgagaggauugc

SEQ ID NO: 5866 - RNA, 20 nt, Artificial Sequence
  Synthetic oligonucleotide: Ptpn6-2118
gcgagaggauugcuugagcc

SEQ ID NO: 5867 - RNA, 20 nt, Artificial Sequence
  Synthetic oligonucleotide: Ptpn6-1428
cgagaggauugcuugagccc

SEQ ID NO: 5868 - RNA, 20 nt, Artificial Sequence
  Synthetic oligonucleotide: Ptpn6-2120
gauugcuugagcccaggagu

SEQ ID NO: 5869 - RNA, 20 nt, Artificial Sequence
  Synthetic oligonucleotide: Ptpn6-2121
agaccagccuggccaauaua

SEQ ID NO: 5870 - RNA, 20 nt, Artificial Sequence
  Synthetic oligonucleotide: Ptpn6-2122
acccugucucuacaaaaaau

SEQ ID NO: 5871 - RNA, 20 nt, Artificial Sequence
  Synthetic oligonucleotide: Ptpn6-2123
uacaaaaaauaagaaauuag

SEQ ID NO: 5872 - RNA, 20 nt, Artificial Sequence
  Synthetic oligonucleotide: Ptpn6-2124
cacguccugugguuccagcu

SEQ ID NO: 5873 - RNA, 20 nt, Artificial Sequence
  Synthetic oligonucleotide: Ptpn6-1435
acguccugugguuccagcua

SEQ ID NO: 5874 - RNA, 20 nt, Artificial Sequence
  Synthetic oligonucleotide: Ptpn6-2126
guccugugguuccagcuaug

SEQ ID NO: 5875 - RNA, 20 nt, Artificial Sequence
  Synthetic oligonucleotide: Ptpn6-2127
ccagcuauggagaggcuaag

SEQ ID NO: 5876 - RNA, 20 nt, Artificial Sequence
  Synthetic oligonucleotide: Ptpn6-2128
agcuauggagaggcuaaggu

SEQ ID NO: 5877 - RNA, 20 nt, Artificial Sequence
  Synthetic oligonucleotide: Ptpn6-2129
ggcuaaggugagaggcuugc

SEQ ID NO: 5878 - RNA, 20 nt, Artificial Sequence
  Synthetic oligonucleotide: Ptpn6-2130
ggugagaggcuugcuugagc

SEQ ID NO: 5879 - RNA, 20 nt, Artificial Sequence
  Synthetic oligonucleotide: Ptpn6-1439
gugagaggcuugcuugagcc

SEQ ID NO: 5880 - RNA, 20 nt, Artificial Sequence
  Synthetic oligonucleotide: Ptpn6-1440
ugagaggcuugcuugagccu

SEQ ID NO: 5881 - RNA, 20 nt, Artificial Sequence
  Synthetic oligonucleotide: Ptpn6-2133
uugcaccacugcacaccagc

SEQ ID NO: 5882 - RNA, 20 nt, Artificial Sequence
  Synthetic oligonucleotide: Ptpn6-2134
cugcacaccagccugggcga

SEQ ID NO: 5883 - RNA, 20 nt, Artificial Sequence
  Synthetic oligonucleotide: Ptpn6-2135
acaccagccugggcgacaga

SEQ ID NO: 5884 - RNA, 20 nt, Artificial Sequence
  Synthetic oligonucleotide: Ptpn6-2136
cucaaaaaaaaaaaaaaaaa

SEQ ID NO: 5885 - RNA, 20 nt, Artificial Sequence
  Synthetic oligonucleotide: Ptpn6-2137
aaaaaaaaaaaaaaaagaaa

SEQ ID NO: 5886 - RNA, 20 nt, Artificial Sequence
  Synthetic oligonucleotide: Ptpn6-2138
cuucauaugcuagcaaguga

SEQ ID NO: 5887 - RNA, 20 nt, Artificial Sequence
  Synthetic oligonucleotide: Ptpn6-1445
uucauaugcuagcaagugac

SEQ ID NO: 5888 - RNA, 20 nt, Artificial Sequence
  Synthetic oligonucleotide: Ptpn6-1446
ucauaugcuagcaagugacu

SEQ ID NO: 5889 - RNA, 20 nt, Artificial Sequence
  Synthetic oligonucleotide: Ptpn6-1447
cauaugcuagcaagugacug

SEQ ID NO: 5890 - RNA, 20 nt, Artificial Sequence
  Synthetic oligonucleotide: Ptpn6-1448
auaugcuagcaagugacugg

SEQ ID NO: 5891 - RNA, 20 nt, Artificial Sequence
  Synthetic oligonucleotide: Ptpn6-1449
uaugcuagcaagugacuggg

SEQ ID NO: 5892 - RNA, 17 nt, Artificial Sequence
  Synthetic oligonucleotide: Ptpn6-2144
uuaagaugcugguaaua

SEQ ID NO: 5893 - RNA, 17 nt, Artificial Sequence
  Synthetic oligonucleotide: Ptpn6-1472
uaagaugcugguaauac

SEQ ID NO: 5894 - RNA, 17 nt, Artificial Sequence
  Synthetic oligonucleotide: Ptpn6-2146
augcugguaauacugga

SEQ ID NO: 5895 - RNA, 17 nt, Artificial Sequence
  Synthetic oligonucleotide: Ptpn6-2147
acauggucucugcucuc

SEQ ID NO: 5896 - RNA, 17 nt, Artificial Sequence
  Synthetic oligonucleotide: Ptpn6-1474
cauggucucugcucuca

SEQ ID NO: 5897 - RNA, 17 nt, Artificial Sequence
  Synthetic oligonucleotide: Ptpn6-2149
acggagcuuacauucca

SEQ ID NO: 5898 - RNA, 17 nt, Artificial Sequence
  Synthetic oligonucleotide: Ptpn6-1475
cggagcuuacauuccag

SEQ ID NO: 5899 - RNA, 17 nt, Artificial Sequence
  Synthetic oligonucleotide: Ptpn6-1476
ggagcuuacauuccagu

SEQ ID NO: 5900 - RNA, 17 nt, Artificial Sequence
  Synthetic oligonucleotide: Ptpn6-2152
cagugggagguuacaga

SEQ ID NO: 5901 - RNA, 17 nt, Artificial Sequence
  Synthetic oligonucleotide: Ptpn6-2153
acaaauaacccaauaaa

SEQ ID NO: 5902 - RNA, 17 nt, Artificial Sequence
  Synthetic oligonucleotide: Ptpn6-2154
ggaucauugcagauucu

SEQ ID NO: 5903 - RNA, 17 nt, Artificial Sequence
  Synthetic oligonucleotide: Ptpn6-2155
uucucagaaguauuacg

SEQ ID NO: 5904 - RNA, 17 nt, Artificial Sequence
  Synthetic oligonucleotide: Ptpn6-2156
aaaauagacagccuugg

SEQ ID NO: 5905 - RNA, 17 nt, Artificial Sequence
  Synthetic oligonucleotide: Ptpn6-2157
ccugugaucccagcacu

SEQ ID NO: 5906 - RNA, 17 nt, Artificial Sequence
  Synthetic oligonucleotide: Ptpn6-1483
cugugaucccagcacug

SEQ ID NO: 5907 - RNA, 17 nt, Artificial Sequence
  Synthetic oligonucleotide: Ptpn6-1484
ugugaucccagcacugu

SEQ ID NO: 5908 - RNA, 17 nt, Artificial Sequence
  Synthetic oligonucleotide: Ptpn6-2160
cccagcacugugggagg

SEQ ID NO: 5909 - RNA, 17 nt, Artificial Sequence
  Synthetic oligonucleotide: Ptpn6-2161
cacugugggaggcugag

SEQ ID NO: 5910 - RNA, 17 nt, Artificial Sequence
  Synthetic oligonucleotide: Ptpn6-2162
cugugggaggcugaggc

SEQ ID NO: 5911 - RNA, 17 nt, Artificial Sequence
  Synthetic oligonucleotide: Ptpn6-2163
gugggaggcugaggcga

SEQ ID NO: 5912 - RNA, 17 nt, Artificial Sequence
  Synthetic oligonucleotide: Ptpn6-2164
ugaggcgagaggauugc

SEQ ID NO: 5913 - RNA, 17 nt, Artificial Sequence
  Synthetic oligonucleotide: Ptpn6-2165
agaggauugcuugagcc

SEQ ID NO: 5914 - RNA, 17 nt, Artificial Sequence
  Synthetic oligonucleotide: Ptpn6-1488
gaggauugcuugagccc

SEQ ID NO: 5915 - RNA, 17 nt, Artificial Sequence
  Synthetic oligonucleotide: Ptpn6-2167
ugcuugagcccaggagu

SEQ ID NO: 5916 - RNA, 17 nt, Artificial Sequence
  Synthetic oligonucleotide: Ptpn6-2168
ccagccuggccaauaua

SEQ ID NO: 5917 - RNA, 17 nt, Artificial Sequence
  Synthetic oligonucleotide: Ptpn6-2169
cugucucuacaaaaaau

SEQ ID NO: 5918 - RNA, 17 nt, Artificial Sequence
  Synthetic oligonucleotide: Ptpn6-2170
aaaaaauaagaaauuag

SEQ ID NO: 5919 - RNA, 17 nt, Artificial Sequence
  Synthetic oligonucleotide: Ptpn6-2171
guccugugguuccagcu

SEQ ID NO: 5920 - RNA, 17 nt, Artificial Sequence
  Synthetic oligonucleotide: Ptpn6-1495
uccugugguuccagcua

SEQ ID NO: 5921 - RNA, 17 nt, Artificial Sequence
  Synthetic oligonucleotide: Ptpn6-2173
cugugguuccagcuaug

SEQ ID NO: 5922 - RNA, 17 nt, Artificial Sequence
  Synthetic oligonucleotide: Ptpn6-2174
gcuauggagaggcuaag

SEQ ID NO: 5923 - RNA, 17 nt, Artificial Sequence
  Synthetic oligonucleotide: Ptpn6-2175
uauggagaggcuaaggu

SEQ ID NO: 5924 - RNA, 17 nt, Artificial Sequence
  Synthetic oligonucleotide: Ptpn6-2176
uaaggugagaggcuugc

SEQ ID NO: 5925 - RNA, 17 nt, Artificial Sequence
  Synthetic oligonucleotide: Ptpn6-2177
gagaggcuugcuugagc

SEQ ID NO: 5926 - RNA, 17 nt, Artificial Sequence
  Synthetic oligonucleotide: Ptpn6-1499
agaggcuugcuugagcc

SEQ ID NO: 5927 - RNA, 17 nt, Artificial Sequence
  Synthetic oligonucleotide: Ptpn6-1500
gaggcuugcuugagccu

SEQ ID NO: 5928 - RNA, 17 nt, Artificial Sequence
  Synthetic oligonucleotide: Ptpn6-2180
caccacugcacaccagc

SEQ ID NO: 5929 - RNA, 17 nt, Artificial Sequence
  Synthetic oligonucleotide: Ptpn6-2181
cacaccagccugggcga

SEQ ID NO: 5930 - RNA, 17 nt, Artificial Sequence
  Synthetic oligonucleotide: Ptpn6-2182
ccagccugggcgacaga

SEQ ID NO: 5931 - RNA, 17 nt, Artificial Sequence
  Synthetic oligonucleotide: Ptpn6-2183
aaaaaaaaaaaaaaaaa

SEQ ID NO: 5932 - RNA, 17 nt, Artificial Sequence
  Synthetic oligonucleotide: Ptpn6-2184
aaaaaaaaaaaaagaaa

SEQ ID NO: 5933 - RNA, 17 nt, Artificial Sequence
  Synthetic oligonucleotide: Ptpn6-2185
cauaugcuagcaaguga

SEQ ID NO: 5934 - RNA, 17 nt, Artificial Sequence
  Synthetic oligonucleotide: Ptpn6-1505
auaugcuagcaagugac

SEQ ID NO: 5935 - RNA, 17 nt, Artificial Sequence
  Synthetic oligonucleotide: Ptpn6-1506
uaugcuagcaagugacu

SEQ ID NO: 5936 - RNA, 17 nt, Artificial Sequence
  Synthetic oligonucleotide: Ptpn6-1507
augcuagcaagugacug

SEQ ID NO: 5937 - RNA, 17 nt, Artificial Sequence
  Synthetic oligonucleotide: Ptpn6-1508
ugcuagcaagugacugg

SEQ ID NO: 5938 - RNA, 17 nt, Artificial Sequence
  Synthetic oligonucleotide: Ptpn6-1509
gcuagcaagugacuggg

SEQ ID NO: 5939 - RNA, 20 nt, Artificial Sequence
  Synthetic oligonucleotide: Ptpn6-2191
uucuuuuuuuuuuuuuuuuu

SEQ ID NO: 5940 - RNA, 20 nt, Artificial Sequence
  Synthetic oligonucleotide: Ptpn6-2192
ucaccuuagccucuccauag

SEQ ID NO: 5941 - RNA, 20 nt, Artificial Sequence
  Synthetic oligonucleotide: Ptpn6-1563
caccuuagccucuccauagc

SEQ ID NO: 5942 - RNA, 20 nt, Artificial Sequence
  Synthetic oligonucleotide: Ptpn6-2194
ccucuccauagcuggaacca

SEQ ID NO: 5943 - RNA, 20 nt, Artificial Sequence
  Synthetic oligonucleotide: Ptpn6-2195
agcuaauuucuuauuuuuug

SEQ ID NO: 5944 - RNA, 20 nt, Artificial Sequence
  Synthetic oligonucleotide: Ptpn6-2196
uuucuuauuuuuuguagaga

SEQ ID NO: 5945 - RNA, 20 nt, Artificial Sequence
  Synthetic oligonucleotide: Ptpn6-2197
gccaggcuggucucaaacuc

SEQ ID NO: 5946 - RNA, 20 nt, Artificial Sequence
  Synthetic oligonucleotide: Ptpn6-2198
cgccucagccucccacagug

SEQ ID NO: 5947 - RNA, 20 nt, Artificial Sequence
  Synthetic oligonucleotide: Ptpn6-1572
gccucagccucccacagugc

SEQ ID NO: 5948 - RNA, 20 nt, Artificial Sequence
  Synthetic oligonucleotide: Ptpn6-2200
acagugcugggaucacaggu

SEQ ID NO: 5949 - RNA, 20 nt, Artificial Sequence
  Synthetic oligonucleotide: Ptpn6-2201
cuauuuucugcguaauacuu

SEQ ID NO: 5950 - RNA, 20 nt, Artificial Sequence
  Synthetic oligonucleotide: Ptpn6-2202
auuuucugcguaauacuucu

SEQ ID NO: 5951 - RNA, 20 nt, Artificial Sequence
  Synthetic oligonucleotide: Ptpn6-2203
aucugcaaugauccaauuua

SEQ ID NO: 5952 - RNA, 20 nt, Artificial Sequence
  Synthetic oligonucleotide: Ptpn6-2204
guucggucuguaaccuccca

SEQ ID NO: 5953 - RNA, 20 nt, Artificial Sequence
  Synthetic oligonucleotide: Ptpn6-1580
uucggucuguaaccucccac

SEQ ID NO: 5954 - RNA, 20 nt, Artificial Sequence
  Synthetic oligonucleotide: Ptpn6-2206
cccacuggaauguaagcucc

SEQ ID NO: 5955 - RNA, 20 nt, Artificial Sequence
  Synthetic oligonucleotide: Ptpn6-2207
cacuggaauguaagcuccgu

SEQ ID NO: 5956 - RNA, 20 nt, Artificial Sequence
  Synthetic oligonucleotide: Ptpn6-2208
gaauguaagcuccgugagag

SEQ ID NO: 5957 - RNA, 17 nt, Artificial Sequence
  Synthetic oligonucleotide: Ptpn6-2209
uuuuuuuuuuuuuuuuu

SEQ ID NO: 5958 - RNA, 17 nt, Artificial Sequence
  Synthetic oligonucleotide: Ptpn6-2210
ccuuagccucuccauag

SEQ ID NO: 5959 - RNA, 17 nt, Artificial Sequence
  Synthetic oligonucleotide: Ptpn6-1634
cuuagccucuccauagc

SEQ ID NO: 5960 - RNA, 17 nt, Artificial Sequence
  Synthetic oligonucleotide: Ptpn6-2212
cuccauagcuggaacca

SEQ ID NO: 5961 - RNA, 17 nt, Artificial Sequence
  Synthetic oligonucleotide: Ptpn6-2213
uaauuucuuauuuuuug

SEQ ID NO: 5962 - RNA, 17 nt, Artificial Sequence
  Synthetic oligonucleotide: Ptpn6-2214
cuuauuuuuuguagaga

SEQ ID NO: 5963 - RNA, 17 nt, Artificial Sequence
  Synthetic oligonucleotide: Ptpn6-2215
aggcuggucucaaacuc

SEQ ID NO: 5964 - RNA, 17 nt, Artificial Sequence
  Synthetic oligonucleotide: Ptpn6-2216
cucagccucccacagug

SEQ ID NO: 5965 - RNA, 17 nt, Artificial Sequence
  Synthetic oligonucleotide: Ptpn6-1643
ucagccucccacagugc

SEQ ID NO: 5966 - RNA, 17 nt, Artificial Sequence
  Synthetic oligonucleotide: Ptpn6-2218
gugcugggaucacaggu

SEQ ID NO: 5967 - RNA, 17 nt, Artificial Sequence
  Synthetic oligonucleotide: Ptpn6-2219
uuuucugcguaauacuu

SEQ ID NO: 5968 - RNA, 17 nt, Artificial Sequence
  Synthetic oligonucleotide: Ptpn6-2220
uucugcguaauacuucu

SEQ ID NO: 5969 - RNA, 17 nt, Artificial Sequence
  Synthetic oligonucleotide: Ptpn6-2221
ugcaaugauccaauuua

SEQ ID NO: 5970 - RNA, 17 nt, Artificial Sequence
  Synthetic oligonucleotide: Ptpn6-2222
cggucuguaaccuccca

SEQ ID NO: 5971 - RNA, 17 nt, Artificial Sequence
  Synthetic oligonucleotide: Ptpn6-1651
ggucuguaaccucccac

SEQ ID NO: 5972 - RNA, 17 nt, Artificial Sequence
  Synthetic oligonucleotide: Ptpn6-2224
acuggaauguaagcucc

SEQ ID NO: 5973 - RNA, 17 nt, Artificial Sequence
  Synthetic oligonucleotide: Ptpn6-2225
uggaauguaagcuccgu

SEQ ID NO: 5974 - RNA, 17 nt, Artificial Sequence
  Synthetic oligonucleotide: Ptpn6-2226
uguaagcuccgugagag

SEQ ID NO: 5975 - RNA, 20 nt, Artificial Sequence
  Synthetic oligonucleotide: Ptpn6-2227
ugggucccucagcgcccugg

SEQ ID NO: 5976 - RNA, 20 nt, Artificial Sequence
  Synthetic oligonucleotide: Ptpn6-2228
uccccuucccccggggcagg

SEQ ID NO: 5977 - RNA, 20 nt, Artificial Sequence
  Synthetic oligonucleotide: Ptpn6-2229
cccuucccccggggcagguu

SEQ ID NO: 5978 - RNA, 20 nt, Artificial Sequence
  Synthetic oligonucleotide: Ptpn6-2230
ccuuuccaggccccaucccc

SEQ ID NO: 5979 - RNA, 20 nt, Artificial Sequence
  Synthetic oligonucleotide: Ptpn6-2231
gcuccucccuaugguccugg

SEQ ID NO: 5980 - RNA, 20 nt, Artificial Sequence
  Synthetic oligonucleotide: Ptpn6-2232
ggcugggccuaacccugccc

SEQ ID NO: 5981 - RNA, 20 nt, Artificial Sequence
  Synthetic oligonucleotide: Ptpn6-2233
gccccagggccuaacccuac

SEQ ID NO: 5982 - RNA, 20 nt, Artificial Sequence
  Synthetic oligonucleotide: Ptpn6-2234
cugaggcuccuccccuuccc

SEQ ID NO: 5983 - RNA, 20 nt, Artificial Sequence
  Synthetic oligonucleotide: Ptpn6-1398
ugaggcuccuccccuucccc

SEQ ID NO: 5984 - RNA, 20 nt, Artificial Sequence
  Synthetic oligonucleotide: Ptpn6-2236
ccccggggcagguugagagg

SEQ ID NO: 5985 - RNA, 20 nt, Artificial Sequence
  Synthetic oligonucleotide: Ptpn6-1403
cccggggcagguugagaggc

SEQ ID NO: 5986 - RNA, 20 nt, Artificial Sequence
  Synthetic oligonucleotide: Ptpn6-2238
gggcagguugagaggcugga

SEQ ID NO: 5987 - RNA, 20 nt, Artificial Sequence
  Synthetic oligonucleotide: Ptpn6-2239
ggagugggucccucagcgcc

SEQ ID NO: 5988 - RNA, 20 nt, Artificial Sequence
  Synthetic oligonucleotide: Ptpn6-2240
ucccucagcgcccugggugg

SEQ ID NO: 5989 - RNA, 17 nt, Artificial Sequence
  Synthetic oligonucleotide: Ptpn6-2241
gucccucagcgcccugg

SEQ ID NO: 5990 - RNA, 17 nt, Artificial Sequence
  Synthetic oligonucleotide: Ptpn6-2242
ccuucccccggggcagg

SEQ ID NO: 5991 - RNA, 17 nt, Artificial Sequence
  Synthetic oligonucleotide: Ptpn6-2243
uucccccggggcagguu

SEQ ID NO: 5992 - RNA, 17 nt, Artificial Sequence
  Synthetic oligonucleotide: Ptpn6-2244
uuccaggccccaucccc

SEQ ID NO: 5993 - RNA, 17 nt, Artificial Sequence
  Synthetic oligonucleotide: Ptpn6-2245
ccucccuaugguccugg

SEQ ID NO: 5994 - RNA, 17 nt, Artificial Sequence
  Synthetic oligonucleotide: Ptpn6-2246
ugggccuaacccugccc

SEQ ID NO: 5995 - RNA, 17 nt, Artificial Sequence
  Synthetic oligonucleotide: Ptpn6-2247
ccagggccuaacccuac

SEQ ID NO: 5996 - RNA, 17 nt, Artificial Sequence
  Synthetic oligonucleotide: Ptpn6-2248
aggcuccuccccuuccc

SEQ ID NO: 5997 - RNA, 17 nt, Artificial Sequence
  Synthetic oligonucleotide: Ptpn6-1458
ggcuccuccccuucccc

SEQ ID NO: 5998 - RNA, 17 nt, Artificial Sequence
  Synthetic oligonucleotide: Ptpn6-2250
cggggcagguugagagg

SEQ ID NO: 5999 - RNA, 17 nt, Artificial Sequence
  Synthetic oligonucleotide: Ptpn6-1463
ggggcagguugagaggc

SEQ ID NO: 6000 - RNA, 17 nt, Artificial Sequence
  Synthetic oligonucleotide: Ptpn6-2252
cagguugagaggcugga

SEQ ID NO: 6001 - RNA, 17 nt, Artificial Sequence
  Synthetic oligonucleotide: Ptpn6-2253
gugggucccucagcgcc

SEQ ID NO: 6002 - RNA, 17 nt, Artificial Sequence
  Synthetic oligonucleotide: Ptpn6-2254
cucagcgcccugggugg

SEQ ID NO: 6003 - RNA, 20 nt, Artificial Sequence
  Synthetic oligonucleotide: Ptpn6-2255
gggaggagcuguucaggggg

SEQ ID NO: 6004 - RNA, 20 nt, Artificial Sequence
  Synthetic oligonucleotide: Ptpn6-1538
ggaggagcuguucaggggga

SEQ ID NO: 6005 - RNA, 20 nt, Artificial Sequence
  Synthetic oligonucleotide: Ptpn6-1545
cuggaaaggcagagggaauc

SEQ ID NO: 6006 - RNA, 20 nt, Artificial Sequence
  Synthetic oligonucleotide: Ptpn6-1546
uggaaaggcagagggaauca

SEQ ID NO: 6007 - RNA, 20 nt, Artificial Sequence
  Synthetic oligonucleotide: Ptpn6-2259
aaaggcagagggaaucaggg

SEQ ID NO: 6008 - RNA, 20 nt, Artificial Sequence
  Synthetic oligonucleotide: Ptpn6-1510
cccacccacccagggcgcug

SEQ ID NO: 6009 - RNA, 20 nt, Artificial Sequence
  Synthetic oligonucleotide: Ptpn6-2261
gccucagguaggguuaggcc

SEQ ID NO: 6010 - RNA, 20 nt, Artificial Sequence
  Synthetic oligonucleotide: Ptpn6-2262
ggggcaggguuaggcccagc

SEQ ID NO: 6011 - RNA, 20 nt, Artificial Sequence
  Synthetic oligonucleotide: Ptpn6-2263
gcuguucagggggauggggc

SEQ ID NO: 6012 - RNA, 20 nt, Artificial Sequence
  Synthetic oligonucleotide: Ptpn6-1541
cuguucagggggauggggcc

SEQ ID NO: 6013 - RNA, 20 nt, Artificial Sequence
  Synthetic oligonucleotide: Ptpn6-2265
aggcccacccacccagggcg

SEQ ID NO: 6014 - RNA, 20 nt, Artificial Sequence
  Synthetic oligonucleotide: Ptpn6-2266
gcccacccacccagggcgcu

SEQ ID NO: 6015 - RNA, 20 nt, Artificial Sequence
  Synthetic oligonucleotide: Ptpn6-2267
cuccagccucucaaccugcc

SEQ ID NO: 6016 - RNA, 20 nt, Artificial Sequence
  Synthetic oligonucleotide: Ptpn6-1512
uccagccucucaaccugccc

SEQ ID NO: 6017 - RNA, 20 nt, Artificial Sequence
  Synthetic oligonucleotide: Ptpn6-1513
ccagccucucaaccugcccc

SEQ ID NO: 6018 - RNA, 20 nt, Artificial Sequence
  Synthetic oligonucleotide: Ptpn6-1514
cagccucucaaccugccccg

SEQ ID NO: 6019 - RNA, 20 nt, Artificial Sequence
  Synthetic oligonucleotide: Ptpn6-1515
agccucucaaccugccccgg

SEQ ID NO: 6020 - RNA, 20 nt, Artificial Sequence
  Synthetic oligonucleotide: Ptpn6-2272
cucucaaccugccccggggg

SEQ ID NO: 6021 - RNA, 20 nt, Artificial Sequence
  Synthetic oligonucleotide: Ptpn6-1516
ucucaaccugccccggggga

SEQ ID NO: 6022 - RNA, 20 nt, Artificial Sequence
  Synthetic oligonucleotide: Ptpn6-1517
cucaaccugccccgggggaa

SEQ ID NO: 6023 - RNA, 20 nt, Artificial Sequence
  Synthetic oligonucleotide: Ptpn6-1518
ucaaccugccccgggggaag

SEQ ID NO: 6024 - RNA, 20 nt, Artificial Sequence
  Synthetic oligonucleotide: Ptpn6-2276
aaccugccccgggggaaggg

SEQ ID NO: 6025 - RNA, 20 nt, Artificial Sequence
  Synthetic oligonucleotide: Ptpn6-1519
accugccccgggggaagggg

SEQ ID NO: 6026 - RNA, 20 nt, Artificial Sequence
  Synthetic oligonucleotide: Ptpn6-2278
ggaaggggaggagccucagg

SEQ ID NO: 6027 - RNA, 20 nt, Artificial Sequence
  Synthetic oligonucleotide: Ptpn6-1524
ccucagguaggguuaggccc

SEQ ID NO: 6028 - RNA, 20 nt, Artificial Sequence
  Synthetic oligonucleotide: Ptpn6-2280
gguaggguuaggcccugggg

SEQ ID NO: 6029 - RNA, 20 nt, Artificial Sequence
  Synthetic oligonucleotide: Ptpn6-2281
guuaggcccagccaggacca

SEQ ID NO: 6030 - RNA, 20 nt, Artificial Sequence
  Synthetic oligonucleotide: Ptpn6-1531
uuaggcccagccaggaccau

SEQ ID NO: 6031 - RNA, 20 nt, Artificial Sequence
  Synthetic oligonucleotide: Ptpn6-1532
uaggcccagccaggaccaua

SEQ ID NO: 6032 - RNA, 20 nt, Artificial Sequence
  Synthetic oligonucleotide: Ptpn6-2284
ggcccagccaggaccauagg

SEQ ID NO: 6033 - RNA, 20 nt, Artificial Sequence
  Synthetic oligonucleotide: Ptpn6-1533
gcccagccaggaccauaggg

SEQ ID NO: 6034 - RNA, 20 nt, Artificial Sequence
  Synthetic oligonucleotide: Ptpn6-2286
gaccauagggaggagcuguu

SEQ ID NO: 6035 - RNA, 20 nt, Artificial Sequence
  Synthetic oligonucleotide: Ptpn6-1534
accauagggaggagcuguuc

SEQ ID NO: 6036 - RNA, 20 nt, Artificial Sequence
  Synthetic oligonucleotide: Ptpn6-1535
ccauagggaggagcuguuca

SEQ ID NO: 6037 - RNA, 20 nt, Artificial Sequence
  Synthetic oligonucleotide: Ptpn6-1536
cauagggaggagcuguucag

SEQ ID NO: 6038 - RNA, 20 nt, Artificial Sequence
  Synthetic oligonucleotide: Ptpn6-2290
ggggauggggccuggaaagg

SEQ ID NO: 6039 - RNA, 20 nt, Artificial Sequence
  Synthetic oligonucleotide: Ptpn6-2291
ggauggggccuggaaaggca

SEQ ID NO: 6040 - RNA, 20 nt, Artificial Sequence
  Synthetic oligonucleotide: Ptpn6-1543
gauggggccuggaaaggcag

SEQ ID NO: 6041 - RNA, 20 nt, Artificial Sequence
  Synthetic oligonucleotide: Ptpn6-1544
auggggccuggaaaggcaga

SEQ ID NO: 6042 - RNA, 20 nt, Artificial Sequence
  Synthetic oligonucleotide: Ptpn6-2294
ccuggaaaggcagagggaau

SEQ ID NO: 6043 - RNA, 20 nt, Artificial Sequence
  Synthetic oligonucleotide: Ptpn6-1547
aaggcagagggaaucaggga

SEQ ID NO: 6044 - RNA, 20 nt, Artificial Sequence
  Synthetic oligonucleotide: Ptpn6-2296
ggcagagggaaucagggaag

SEQ ID NO: 6045 - RNA, 20 nt, Artificial Sequence
  Synthetic oligonucleotide: Ptpn6-2297
agggaaucagggaaggagag

SEQ ID NO: 6046 - RNA, 20 nt, Artificial Sequence
  Synthetic oligonucleotide: Ptpn6-1548
gggaaucagggaaggagaga

SEQ ID NO: 6047 - RNA, 20 nt, Artificial Sequence
  Synthetic oligonucleotide: Ptpn6-1549
ggaaucagggaaggagagau

SEQ ID NO: 6048 - RNA, 20 nt, Artificial Sequence
  Synthetic oligonucleotide: Ptpn6-2300
auggggguugucagguccgc

SEQ ID NO: 6049 - RNA, 17 nt, Artificial Sequence
  Synthetic oligonucleotide: Ptpn6-2301
aggagcuguucaggggg

SEQ ID NO: 6050 - RNA, 17 nt, Artificial Sequence
  Synthetic oligonucleotide: Ptpn6-1609
ggagcuguucaggggga

SEQ ID NO: 6051 - RNA, 17 nt, Artificial Sequence
  Synthetic oligonucleotide: Ptpn6-1616
gaaaggcagagggaauc

SEQ ID NO: 6052 - RNA, 17 nt, Artificial Sequence
  Synthetic oligonucleotide: Ptpn6-1617
aaaggcagagggaauca

SEQ ID NO: 6053 - RNA, 17 nt, Artificial Sequence
  Synthetic oligonucleotide: Ptpn6-2305
ggcagagggaaucaggg

SEQ ID NO: 6054 - RNA, 17 nt, Artificial Sequence
  Synthetic oligonucleotide: Ptpn6-1581
acccacccagggcgcug

SEQ ID NO: 6055 - RNA, 17 nt, Artificial Sequence
  Synthetic oligonucleotide: Ptpn6-2307
ucagguaggguuaggcc

SEQ ID NO: 6056 - RNA, 17 nt, Artificial Sequence
  Synthetic oligonucleotide: Ptpn6-2308
gcaggguuaggcccagc

SEQ ID NO: 6057 - RNA, 17 nt, Artificial Sequence
  Synthetic oligonucleotide: Ptpn6-2309
guucagggggauggggc

SEQ ID NO: 6058 - RNA, 17 nt, Artificial Sequence
  Synthetic oligonucleotide: Ptpn6-1612
uucagggggauggggcc

SEQ ID NO: 6059 - RNA, 17 nt, Artificial Sequence
  Synthetic oligonucleotide: Ptpn6-2311
cccacccacccagggcg

SEQ ID NO: 6060 - RNA, 17 nt, Artificial Sequence
  Synthetic oligonucleotide: Ptpn6-2312
cacccacccagggcgcu

SEQ ID NO: 6061 - RNA, 17 nt, Artificial Sequence
  Synthetic oligonucleotide: Ptpn6-2313
cagccucucaaccugcc

SEQ ID NO: 6062 - RNA, 17 nt, Artificial Sequence
  Synthetic oligonucleotide: Ptpn6-1583
agccucucaaccugccc

SEQ ID NO: 6063 - RNA, 17 nt, Artificial Sequence
  Synthetic oligonucleotide: Ptpn6-1584
gccucucaaccugcccc

SEQ ID NO: 6064 - RNA, 17 nt, Artificial Sequence
  Synthetic oligonucleotide: Ptpn6-1585
ccucucaaccugccccg

SEQ ID NO: 6065 - RNA, 17 nt, Artificial Sequence
  Synthetic oligonucleotide: Ptpn6-1586
cucucaaccugccccgg

SEQ ID NO: 6066 - RNA, 17 nt, Artificial Sequence
  Synthetic oligonucleotide: Ptpn6-2318
ucaaccugccccggggg

SEQ ID NO: 6067 - RNA, 17 nt, Artificial Sequence
  Synthetic oligonucleotide: Ptpn6-1587
caaccugccccggggga

SEQ ID NO: 6068 - RNA, 17 nt, Artificial Sequence
  Synthetic oligonucleotide: Ptpn6-1588
aaccugccccgggggaa

SEQ ID NO: 6069 - RNA, 17 nt, Artificial Sequence
  Synthetic oligonucleotide: Ptpn6-1589
accugccccgggggaag

SEQ ID NO: 6070 - RNA, 17 nt, Artificial Sequence
  Synthetic oligonucleotide: Ptpn6-2322
cugccccgggggaaggg

SEQ ID NO: 6071 - RNA, 17 nt, Artificial Sequence
  Synthetic oligonucleotide: Ptpn6-1590
ugccccgggggaagggg

SEQ ID NO: 6072 - RNA, 17 nt, Artificial Sequence
  Synthetic oligonucleotide: Ptpn6-2324
aggggaggagccucagg

SEQ ID NO: 6073 - RNA, 17 nt, Artificial Sequence
  Synthetic oligonucleotide: Ptpn6-1595
cagguaggguuaggccc

SEQ ID NO: 6074 - RNA, 17 nt, Artificial Sequence
  Synthetic oligonucleotide: Ptpn6-2326
aggguuaggcccugggg

SEQ ID NO: 6075 - RNA, 17 nt, Artificial Sequence
  Synthetic oligonucleotide: Ptpn6-2327
aggcccagccaggacca

SEQ ID NO: 6076 - RNA, 17 nt, Artificial Sequence
  Synthetic oligonucleotide: Ptpn6-1602
ggcccagccaggaccau

SEQ ID NO: 6077 - RNA, 17 nt, Artificial Sequence
  Synthetic oligonucleotide: Ptpn6-1603
gcccagccaggaccaua

SEQ ID NO: 6078 - RNA, 17 nt, Artificial Sequence
  Synthetic oligonucleotide: Ptpn6-2330
ccagccaggaccauagg

SEQ ID NO: 6079 - RNA, 17 nt, Artificial Sequence
  Synthetic oligonucleotide: Ptpn6-1604
cagccaggaccauaggg

SEQ ID NO: 6080 - RNA, 17 nt, Artificial Sequence
  Synthetic oligonucleotide: Ptpn6-2332
cauagggaggagcuguu

SEQ ID NO: 6081 - RNA, 17 nt, Artificial Sequence
  Synthetic oligonucleotide: Ptpn6-1605
auagggaggagcuguuc

SEQ ID NO: 6082 - RNA, 17 nt, Artificial Sequence
  Synthetic oligonucleotide: Ptpn6-1606
uagggaggagcuguuca

SEQ ID NO: 6083 - RNA, 17 nt, Artificial Sequence
  Synthetic oligonucleotide: Ptpn6-1607
agggaggagcuguucag

SEQ ID NO: 6084 - RNA, 17 nt, Artificial Sequence
  Synthetic oligonucleotide: Ptpn6-2336
gauggggccuggaaagg

SEQ ID NO: 6085 - RNA, 17 nt, Artificial Sequence
  Synthetic oligonucleotide: Ptpn6-2337
uggggccuggaaaggca

SEQ ID NO: 6086 - RNA, 17 nt, Artificial Sequence
  Synthetic oligonucleotide: Ptpn6-1614
ggggccuggaaaggcag

SEQ ID NO: 6087 - RNA, 17 nt, Artificial Sequence
  Synthetic oligonucleotide: Ptpn6-1615
gggccuggaaaggcaga

SEQ ID NO: 6088 - RNA, 17 nt, Artificial Sequence
  Synthetic oligonucleotide: Ptpn6-2340
ggaaaggcagagggaau

SEQ ID NO: 6089 - RNA, 17 nt, Artificial Sequence
  Synthetic oligonucleotide: Ptpn6-1618
gcagagggaaucaggga

SEQ ID NO: 6090 - RNA, 17 nt, Artificial Sequence
  Synthetic oligonucleotide: Ptpn6-2342
agagggaaucagggaag

SEQ ID NO: 6091 - RNA, 17 nt, Artificial Sequence
  Synthetic oligonucleotide: Ptpn6-2343
gaaucagggaaggagag

SEQ ID NO: 6092 - RNA, 17 nt, Artificial Sequence
  Synthetic oligonucleotide: Ptpn6-1619
aaucagggaaggagaga

SEQ ID NO: 6093 - RNA, 17 nt, Artificial Sequence
  Synthetic oligonucleotide: Ptpn6-1620
aucagggaaggagagau

SEQ ID NO: 6094 - RNA, 17 nt, Artificial Sequence
  Synthetic oligonucleotide: Ptpn6-2346
gggguugucagguccgc

SEQ ID NO: 6095 - RNA, 20 nt, Artificial Sequence
  Synthetic oligonucleotide: Ptpn6-1657
ucucugaggaacugggcugu

SEQ ID NO: 6096 - RNA, 20 nt, Artificial Sequence
  Synthetic oligonucleotide: Ptpn6-2348
ggcaggaucgaggaggaagu

SEQ ID NO: 6097 - RNA, 17 nt, Artificial Sequence
  Synthetic oligonucleotide: Ptpn6-1720
cugaggaacugggcugu

SEQ ID NO: 6098 - RNA, 17 nt, Artificial Sequence
  Synthetic oligonucleotide: Ptpn6-2350
aggaucgaggaggaagu

SEQ ID NO: 6099 - RNA, 20 nt, Artificial Sequence
  Synthetic oligonucleotide: Ptpn6-2351
acuuccuccucgauccugcc

SEQ ID NO: 6100 - RNA, 20 nt, Artificial Sequence
  Synthetic oligonucleotide: Ptpn6-1230
acagcccaguuccucagaga

SEQ ID NO: 6101 - RNA, 17 nt, Artificial Sequence
  Synthetic oligonucleotide: Ptpn6-2353
acuuccuccucgauccu

SEQ ID NO: 6102 - RNA, 17 nt, Artificial Sequence
  Synthetic oligonucleotide: Ptpn6-2354
acagcccaguuccucag

SEQ ID NO: 6103 - RNA, 20 nt, Artificial Sequence
  Synthetic oligonucleotide: Ptpn6-2355
aacccaauaaauuggaucau

SEQ ID NO: 6104 - RNA, 20 nt, Artificial Sequence
  Synthetic oligonucleotide: Ptpn6-2356
cacugugggaggcugaggcg

SEQ ID NO: 6105 - RNA, 20 nt, Artificial Sequence
  Synthetic oligonucleotide: Ptpn6-2357
gaggucaaggcugcagucag

SEQ ID NO: 6106 - RNA, 17 nt, Artificial Sequence
  Synthetic oligonucleotide: Ptpn6-2358
ccaauaaauuggaucau

SEQ ID NO: 6107 - RNA, 17 nt, Artificial Sequence
  Synthetic oligonucleotide: Ptpn6-2359
ugugggaggcugaggcg

SEQ ID NO: 6108 - RNA, 20 nt, Artificial Sequence
  Synthetic oligonucleotide: Ptpn6-2360
gacaacccccaucucuccuu

SEQ ID NO: 6109 - RNA, 17 nt, Artificial Sequence
  Synthetic oligonucleotide: Ptpn6-2361
aacccccaucucuccuu

SEQ ID NO: 6110 - RNA, 17 nt, Artificial Sequence
  Synthetic oligonucleotide: Ptpn6-2362
gucaaggcugcagucag

SEQ ID NO: 6111 - RNA, 20 nt, Artificial Sequence
  Synthetic oligonucleotide: Ptpn6-2363
cugacugcagccuugaccuc

SEQ ID NO: 6112 - RNA, 20 nt, Artificial Sequence
  Synthetic oligonucleotide: Ptpn6-2198
cgccucagccucccacagug

SEQ ID NO: 6113 - RNA, 20 nt, Artificial Sequence
  Synthetic oligonucleotide: Ptpn6-2365
augauccaauuuauuggguu

SEQ ID NO: 6114 - RNA, 17 nt, Artificial Sequence
  Synthetic oligonucleotide: Ptpn6-2366
cugacugcagccuugac

SEQ ID NO: 6115 - RNA, 17 nt, Artificial Sequence
  Synthetic oligonucleotide: Ptpn6-2367
cgccucagccucccaca

SEQ ID NO: 6116 - RNA, 17 nt, Artificial Sequence
  Synthetic oligonucleotide: Ptpn6-2368
augauccaauuuauugg

SEQ ID NO: 6117 - RNA, 20 nt, Artificial Sequence
  Synthetic oligonucleotide: Ptpn6-1552
aaggagagauggggguuguc

SEQ ID NO: 6118 - RNA, 17 nt, Artificial Sequence
  Synthetic oligonucleotide: Ptpn6-2370
aaggagagauggggguu

SEQ ID NO: 6119 - DNA, 20 bp, Artificial Sequence
  Synthetic oligonucleotide: CBLB-2289
gggtattattgatgctattc

SEQ ID NO: 6120 - DNA, 20 bp, Artificial Sequence
  Synthetic oligonucleotide: CBLB-2299
gatctgcggcagcttgctta

SEQ ID NO: 6121 - DNA, 20 bp, Artificial Sequence
  Synthetic oligonucleotide: CBLB-2293
gcaggaccgtggagaagact

SEQ ID NO: 6122 - DNA, 20 bp, Artificial Sequence
  Synthetic oligonucleotide: CBLB-2305
ggatttcctcctcgaccacc

SEQ ID NO: 6123 - DNA, 20 bp, Artificial Sequence
  Synthetic oligonucleotide: CBLB-2306
gatttcctcctcgaccacca

SEQ ID NO: 6124 - DNA, 20 bp, Artificial Sequence
  Synthetic oligonucleotide: CBLB-2315
gtactcattctcactgagtt

SEQ ID NO: 6125 - DNA, 17 bp, Artificial Sequence
  Synthetic oligonucleotide: CBLB-2327
gtatgaagaacagtcac

SEQ ID NO: 6126 - DNA, 17 bp, Artificial Sequence
  Synthetic oligonucleotide: CBLB-2360
gcggcagcttgcttagg

SEQ ID NO: 6127 - DNA, 20 bp, Artificial Sequence
  Synthetic oligonucleotide: CBLB-2286
cgaggaggaaatccccgaaa

SEQ ID NO: 6128 - DNA, 20 bp, Artificial Sequence
  Synthetic oligonucleotide: CBLB-2287
tccccgaaaaggtcgaattt

SEQ ID NO: 6129 - DNA, 20 bp, Artificial Sequence
  Synthetic oligonucleotide: CBLB-2288
ccccgaaaaggtcgaatttt

SEQ ID NO: 6130 - DNA, 20 bp, Artificial Sequence
  Synthetic oligonucleotide: CBLB-2291
agcaagctgccgcagatcgc

SEQ ID NO: 6131 - DNA, 20 bp, Artificial Sequence
  Synthetic oligonucleotide: CBLB-2292
tgccgcagatcgcaggaccg

SEQ ID NO: 6132 - DNA, 20 bp, Artificial Sequence
  Synthetic oligonucleotide: CBLB-2297
ctccacggtcctgcgatctg

SEQ ID NO: 6133 - DNA, 20 bp, Artificial Sequence
  Synthetic oligonucleotide: CBLB-2298
cgatctgcggcagcttgctt

SEQ ID NO: 6134 - DNA, 20 bp, Artificial Sequence
  Synthetic oligonucleotide: CBLB-2300
atctgcggcagcttgcttag

SEQ ID NO: 6135 - DNA, 20 bp, Artificial Sequence
  Synthetic oligonucleotide: CBLB-2301
tctgcggcagcttgcttagg

SEQ ID NO: 6136 - DNA, 20 bp, Artificial Sequence
  Synthetic oligonucleotide: CBLB-2302
tacccaaaattcgacctttt

SEQ ID NO: 6137 - DNA, 20 bp, Artificial Sequence
  Synthetic oligonucleotide: CBLB-2303
acccaaaattcgaccttttc

SEQ ID NO: 6138 - DNA, 20 bp, Artificial Sequence
  Synthetic oligonucleotide: CBLB-2304
cccaaaattcgaccttttcg

SEQ ID NO: 6139 - DNA, 20 bp, Artificial Sequence
  Synthetic oligonucleotide: CBLB-2313
cccgttttgactttttcata

SEQ ID NO: 6140 - DNA, 20 bp, Artificial Sequence
  Synthetic oligonucleotide: CBLB-2314
agtactcattctcactgagt

SEQ ID NO: 6141 - DNA, 20 bp, Artificial Sequence
  Synthetic oligonucleotide: CBLB-2317
cgtaaatgctgatatgtatc

SEQ ID NO: 6142 - DNA, 17 bp, Artificial Sequence
  Synthetic oligonucleotide: CBLB-2331
actcattctcactgagt

SEQ ID NO: 6143 - DNA, 17 bp, Artificial Sequence
  Synthetic oligonucleotide: CBLB-2332
ctcattctcactgagtt

SEQ ID NO: 6144 - DNA, 17 bp, Artificial Sequence
  Synthetic oligonucleotide: CBLB-2333
tgagttgggcaagtttc

SEQ ID NO: 6145 - DNA, 17 bp, Artificial Sequence
  Synthetic oligonucleotide: CBLB-2334
aaatgctgatatgtatc

SEQ ID NO: 6146 - DNA, 17 bp, Artificial Sequence
  Synthetic oligonucleotide: CBLB-2337
tatcaagtatatatggt

SEQ ID NO: 6147 - DNA, 17 bp, Artificial Sequence
  Synthetic oligonucleotide: CBLB-2346
ccgaaaaggtcgaattt

SEQ ID NO: 6148 - DNA, 17 bp, Artificial Sequence
  Synthetic oligonucleotide: CBLB-2350
aagctgccgcagatcgc

SEQ ID NO: 6149 - DNA, 17 bp, Artificial Sequence
  Synthetic oligonucleotide: CBLB-2351
cgcagatcgcaggaccg

SEQ ID NO: 6150 - DNA, 17 bp, Artificial Sequence
  Synthetic oligonucleotide: CBLB-2359
tgcggcagcttgcttag

SEQ ID NO: 6151 - DNA, 17 bp, Artificial Sequence
  Synthetic oligonucleotide: CBLB-2363
aaaattcgaccttttcg

SEQ ID NO: 6152 - DNA, 20 bp, Artificial Sequence
  Synthetic oligonucleotide: CBLB-2284
ggcagaaaccctggtggtcg

SEQ ID NO: 6153 - DNA, 20 bp, Artificial Sequence
  Synthetic oligonucleotide: CBLB-2290
gatgctattcaggatgcagt

SEQ ID NO: 6154 - DNA, 20 bp, Artificial Sequence
  Synthetic oligonucleotide: CBLB-2294
ggagaagacttggaagctca

SEQ ID NO: 6155 - DNA, 20 bp, Artificial Sequence
  Synthetic oligonucleotide: CBLB-2296
gagcttccaagtcttctcca

SEQ ID NO: 6156 - DNA, 20 bp, Artificial Sequence
  Synthetic oligonucleotide: CBLB-2308
gccttatgaaaaagtcaaaa

SEQ ID NO: 6157 - DNA, 20 bp, Artificial Sequence
  Synthetic oligonucleotide: CBLB-2312
gaagaatatttcagatgttt

SEQ ID NO: 6158 - DNA, 20 bp, Artificial Sequence
  Synthetic oligonucleotide: CBLB-2318
ggcaaaatatcaagtatata

SEQ ID NO: 6159 - DNA, 20 bp, Artificial Sequence
  Synthetic oligonucleotide: CBLB-2321
gctatttttcaactgaagtt

SEQ ID NO: 6160 - DNA, 17 bp, Artificial Sequence
  Synthetic oligonucleotide: CBLB-2329
gaatatttcagatgttt

SEQ ID NO: 6161 - DNA, 17 bp, Artificial Sequence
  Synthetic oligonucleotide: CBLB-2330
gttttgactttttcata

SEQ ID NO: 6162 - DNA, 17 bp, Artificial Sequence
  Synthetic oligonucleotide: CBLB-2345
ggaggaaatccccgaaa

SEQ ID NO: 6163 - DNA, 17 bp, Artificial Sequence
  Synthetic oligonucleotide: CBLB-2349
gctattcaggatgcagt

SEQ ID NO: 6164 - DNA, 17 bp, Artificial Sequence
  Synthetic oligonucleotide: CBLB-2352
ggaccgtggagaagact

SEQ ID NO: 6165 - DNA, 17 bp, Artificial Sequence
  Synthetic oligonucleotide: CBLB-2353
gaagacttggaagctca

SEQ ID NO: 6166 - DNA, 17 bp, Artificial Sequence
  Synthetic oligonucleotide: CBLB-2354
gaagctcatggacaaag

SEQ ID NO: 6167 - DNA, 20 bp, Artificial Sequence
  Synthetic oligonucleotide: CBLB-2282
tcaatgaatggcagaaaccc

SEQ ID NO: 6168 - DNA, 20 bp, Artificial Sequence
  Synthetic oligonucleotide: CBLB-2283
atgaatggcagaaaccctgg

SEQ ID NO: 6169 - DNA, 20 bp, Artificial Sequence
  Synthetic oligonucleotide: CBLB-2285
agaaaccctggtggtcgagg

SEQ ID NO: 6170 - DNA, 20 bp, Artificial Sequence
  Synthetic oligonucleotide: CBLB-2295
ttggaagctcatggacaaag

SEQ ID NO: 6171 - DNA, 20 bp, Artificial Sequence
  Synthetic oligonucleotide: CBLB-2307
ttatttttatctttgttttt

SEQ ID NO: 6172 - DNA, 20 bp, Artificial Sequence
  Synthetic oligonucleotide: CBLB-2309
ccttatgaaaaagtcaaaac

SEQ ID NO: 6173 - DNA, 20 bp, Artificial Sequence
  Synthetic oligonucleotide: CBLB-2310
aatgtatgaagaacagtcac

SEQ ID NO: 6174 - DNA, 20 bp, Artificial Sequence
  Synthetic oligonucleotide: CBLB-2311
atgaagaacagtcacaggac

SEQ ID NO: 6175 - DNA, 20 bp, Artificial Sequence
  Synthetic oligonucleotide: CBLB-2316
cactgagttgggcaagtttc

SEQ ID NO: 6176 - DNA, 20 bp, Artificial Sequence
  Synthetic oligonucleotide: CBLB-2319
aaaatatcaagtatatatgg

SEQ ID NO: 6177 - DNA, 20 bp, Artificial Sequence
  Synthetic oligonucleotide: CBLB-2320
aaatatcaagtatatatggt

SEQ ID NO: 6178 - DNA, 20 bp, Artificial Sequence
  Synthetic oligonucleotide: CBLB-2322
ctatttttcaactgaagttt

SEQ ID NO: 6179 - DNA, 20 bp, Artificial Sequence
  Synthetic oligonucleotide: CBLB-2323
tcaactgaagtttgggattt

SEQ ID NO: 6180 - DNA, 17 bp, Artificial Sequence
  Synthetic oligonucleotide: CBLB-2324
tttttatctttgttttt

SEQ ID NO: 6181 - DNA, 17 bp, Artificial Sequence
  Synthetic oligonucleotide: CBLB-2325
ttatgaaaaagtcaaaa

SEQ ID NO: 6182 - DNA, 17 bp, Artificial Sequence
  Synthetic oligonucleotide: CBLB-2326
tatgaaaaagtcaaaac

SEQ ID NO: 6183 - DNA, 17 bp, Artificial Sequence
  Synthetic oligonucleotide: CBLB-2328
aagaacagtcacaggac

SEQ ID NO: 6184 - DNA, 17 bp, Artificial Sequence
  Synthetic oligonucleotide: CBLB-2335
aaaatatcaagtatata

SEQ ID NO: 6185 - DNA, 17 bp, Artificial Sequence
  Synthetic oligonucleotide: CBLB-2336
atatcaagtatatatgg

SEQ ID NO: 6186 - DNA, 17 bp, Artificial Sequence
  Synthetic oligonucleotide: CBLB-2338
atttttcaactgaagtt

SEQ ID NO: 6187 - DNA, 17 bp, Artificial Sequence
  Synthetic oligonucleotide: CBLB-2339
tttttcaactgaagttt

SEQ ID NO: 6188 - DNA, 17 bp, Artificial Sequence
  Synthetic oligonucleotide: CBLB-2340
actgaagtttgggattt

SEQ ID NO: 6189 - DNA, 17 bp, Artificial Sequence
  Synthetic oligonucleotide: CBLB-2341
atgaatggcagaaaccc

SEQ ID NO: 6190 - DNA, 17 bp, Artificial Sequence
  Synthetic oligonucleotide: CBLB-2342
aatggcagaaaccctgg

SEQ ID NO: 6191 - DNA, 17 bp, Artificial Sequence
  Synthetic oligonucleotide: CBLB-2343
agaaaccctggtggtcg

SEQ ID NO: 6192 - DNA, 17 bp, Artificial Sequence
  Synthetic oligonucleotide: CBLB-2344
aaccctggtggtcgagg

SEQ ID NO: 6193 - DNA, 17 bp, Artificial Sequence
  Synthetic oligonucleotide: CBLB-2347
cgaaaaggtcgaatttt

SEQ ID NO: 6194 - DNA, 17 bp, Artificial Sequence
  Synthetic oligonucleotide: CBLB-2348
tattattgatgctattc

SEQ ID NO: 6195 - DNA, 17 bp, Artificial Sequence
  Synthetic oligonucleotide: CBLB-2355
cttccaagtcttctcca

SEQ ID NO: 6196 - DNA, 17 bp, Artificial Sequence
  Synthetic oligonucleotide: CBLB-2356
cacggtcctgcgatctg

SEQ ID NO: 6197 - DNA, 17 bp, Artificial Sequence
  Synthetic oligonucleotide: CBLB-2357
tctgcggcagcttgctt

SEQ ID NO: 6198 - DNA, 17 bp, Artificial Sequence
  Synthetic oligonucleotide: CBLB-2358
ctgcggcagcttgctta

SEQ ID NO: 6199 - DNA, 17 bp, Artificial Sequence
  Synthetic oligonucleotide: CBLB-2361
ccaaaattcgacctttt

SEQ ID NO: 6200 - DNA, 17 bp, Artificial Sequence
  Synthetic oligonucleotide: CBLB-2362
caaaattcgaccttttc

SEQ ID NO: 6201 - DNA, 17 bp, Artificial Sequence
  Synthetic oligonucleotide: CBLB-2364
tttcctcctcgaccacc

SEQ ID NO: 6202 - DNA, 17 bp, Artificial Sequence
  Synthetic oligonucleotide: CBLB-2365
ttcctcctcgaccacca

SEQ ID NO: 6203 - DNA, 20 bp, Artificial Sequence
  Synthetic oligonucleotide: CBLB-2312
gaagaatatttcagatgttt

SEQ ID NO: 6204 - DNA, 20 bp, Artificial Sequence
  Synthetic oligonucleotide: CBLB-630
ccttatcttcagtcacatgc

SEQ ID NO: 6205 - DNA, 20 bp, Artificial Sequence
  Synthetic oligonucleotide: CBLB-631
atcaaagcaatctttcccaa

SEQ ID NO: 6206 - DNA, 20 bp, Artificial Sequence
  Synthetic oligonucleotide: CBLB-632
ctttcccaatggtcaattcc

SEQ ID NO: 6207 - DNA, 20 bp, Artificial Sequence
  Synthetic oligonucleotide: CBLB-633
tttcccaatggtcaattcca

SEQ ID NO: 6208 - DNA, 20 bp, Artificial Sequence
  Synthetic oligonucleotide: CBLB-634
aagcagatgctgctgaattc

SEQ ID NO: 6209 - DNA, 20 bp, Artificial Sequence
  Synthetic oligonucleotide: CBLB-635
gaattctggagaaagttttt

SEQ ID NO: 6210 - DNA, 20 bp, Artificial Sequence
  Synthetic oligonucleotide: CBLB-636
aaaaatcatttttatagctg

SEQ ID NO: 6211 - DNA, 20 bp, Artificial Sequence
  Synthetic oligonucleotide: CBLB-637
tgcacagaactatcgtacca

SEQ ID NO: 6212 - DNA, 20 bp, Artificial Sequence
  Synthetic oligonucleotide: CBLB-638
attcagacagtgccttcatg

SEQ ID NO: 6213 - DNA, 20 bp, Artificial Sequence
  Synthetic oligonucleotide: CBLB-639
gaggtccaccagattagctc

SEQ ID NO: 6214 - DNA, 20 bp, Artificial Sequence
  Synthetic oligonucleotide: CBLB-640
ccaccagattagctctggcc

SEQ ID NO: 6215 - DNA, 20 bp, Artificial Sequence
  Synthetic oligonucleotide: CBLB-641
tagctctggcctggaagcaa

SEQ ID NO: 6216 - DNA, 20 bp, Artificial Sequence
  Synthetic oligonucleotide: CBLB-642
ttgaatttgatatttttacc

SEQ ID NO: 6217 - DNA, 20 bp, Artificial Sequence
  Synthetic oligonucleotide: CBLB-643
tatttttaccaggctgtttc

SEQ ID NO: 6218 - DNA, 20 bp, Artificial Sequence
  Synthetic oligonucleotide: CBLB-644
atttttttattttttagcct

SEQ ID NO: 6219 - DNA, 20 bp, Artificial Sequence
  Synthetic oligonucleotide: CBLB-645
tttttttattttttagcctt

SEQ ID NO: 6220 - DNA, 20 bp, Artificial Sequence
  Synthetic oligonucleotide: CBLB-646
ttttttattttttagccttg

SEQ ID NO: 6221 - DNA, 20 bp, Artificial Sequence
  Synthetic oligonucleotide: CBLB-647
agccttggggctctattttg

SEQ ID NO: 6222 - DNA, 20 bp, Artificial Sequence
  Synthetic oligonucleotide: CBLB-648
ggggctctattttgcggaat

SEQ ID NO: 6223 - DNA, 20 bp, Artificial Sequence
  Synthetic oligonucleotide: CBLB-649
ttcttagctgtgacacatcc

SEQ ID NO: 6224 - DNA, 20 bp, Artificial Sequence
  Synthetic oligonucleotide: CBLB-650
tgtgacacatccaggttaca

SEQ ID NO: 6225 - DNA, 20 bp, Artificial Sequence
  Synthetic oligonucleotide: CBLB-651
cagaaatatagcaccaaacc

SEQ ID NO: 6226 - DNA, 20 bp, Artificial Sequence
  Synthetic oligonucleotide: CBLB-652
aatatagcaccaaacccgga

SEQ ID NO: 6227 - DNA, 20 bp, Artificial Sequence
  Synthetic oligonucleotide: CBLB-653
tgttttgcagctatattttc

SEQ ID NO: 6228 - DNA, 20 bp, Artificial Sequence
  Synthetic oligonucleotide: CBLB-654
ccggttaagttgcactcgat

SEQ ID NO: 6229 - DNA, 20 bp, Artificial Sequence
  Synthetic oligonucleotide: CBLB-655
cggttaagttgcactcgatt

SEQ ID NO: 6230 - DNA, 20 bp, Artificial Sequence
  Synthetic oligonucleotide: CBLB-656
gttgcactcgattgggacag

SEQ ID NO: 6231 - DNA, 20 bp, Artificial Sequence
  Synthetic oligonucleotide: CBLB-657
ttgcactcgattgggacagt

SEQ ID NO: 6232 - DNA, 20 bp, Artificial Sequence
  Synthetic oligonucleotide: CBLB-658
cgattgggacagtgggccat

SEQ ID NO: 6233 - DNA, 20 bp, Artificial Sequence
  Synthetic oligonucleotide: CBLB-659
tgggccattggctatgtgac

SEQ ID NO: 6234 - DNA, 20 bp, Artificial Sequence
  Synthetic oligonucleotide: CBLB-660
gggccattggctatgtgact

SEQ ID NO: 6235 - DNA, 20 bp, Artificial Sequence
  Synthetic oligonucleotide: CBLB-661
ggccattggctatgtgactg

SEQ ID NO: 6236 - DNA, 20 bp, Artificial Sequence
  Synthetic oligonucleotide: CBLB-662
attggctatgtgactgggga

SEQ ID NO: 6237 - DNA, 20 bp, Artificial Sequence
  Synthetic oligonucleotide: CBLB-663
ttggctatgtgactggggat

SEQ ID NO: 6238 - DNA, 20 bp, Artificial Sequence
  Synthetic oligonucleotide: CBLB-664
ttatttcaagccctgattga

SEQ ID NO: 6239 - DNA, 20 bp, Artificial Sequence
  Synthetic oligonucleotide: CBLB-665
aagccctgattgatggcagc

SEQ ID NO: 6240 - DNA, 20 bp, Artificial Sequence
  Synthetic oligonucleotide: CBLB-666
agccctgattgatggcagca

SEQ ID NO: 6241 - DNA, 20 bp, Artificial Sequence
  Synthetic oligonucleotide: CBLB-667
ctgattgatggcagcaggga

SEQ ID NO: 6242 - DNA, 20 bp, Artificial Sequence
  Synthetic oligonucleotide: CBLB-668
aggattgtaagtatgagaaa

SEQ ID NO: 6243 - DNA, 20 bp, Artificial Sequence
  Synthetic oligonucleotide: CBLB-669
taagtatgagaaatggaagt

SEQ ID NO: 6244 - DNA, 20 bp, Artificial Sequence
  Synthetic oligonucleotide: CBLB-670
ttcagttatctttatcctga

SEQ ID NO: 6245 - DNA, 20 bp, Artificial Sequence
  Synthetic oligonucleotide: CBLB-671
tcagttatctttatcctgat

SEQ ID NO: 6246 - DNA, 20 bp, Artificial Sequence
  Synthetic oligonucleotide: CBLB-672
gttatctttatcctgatggg

SEQ ID NO: 6247 - DNA, 20 bp, Artificial Sequence
  Synthetic oligonucleotide: CBLB-673
agttataatcctgatttaac

SEQ ID NO: 6248 - DNA, 20 bp, Artificial Sequence
  Synthetic oligonucleotide: CBLB-674
tgaccatataaaagttacac

SEQ ID NO: 6249 - DNA, 20 bp, Artificial Sequence
  Synthetic oligonucleotide: CBLB-675
atataaaagttacacaggta

SEQ ID NO: 6250 - DNA, 20 bp, Artificial Sequence
  Synthetic oligonucleotide: CBLB-676
ctccctcctccccaaattcc

SEQ ID NO: 6251 - DNA, 20 bp, Artificial Sequence
  Synthetic oligonucleotide: CBLB-677
atatgaattatattgtgaaa

SEQ ID NO: 6252 - DNA, 20 bp, Artificial Sequence
  Synthetic oligonucleotide: CBLB-678
tatgaattatattgtgaaat

SEQ ID NO: 6253 - DNA, 20 bp, Artificial Sequence
  Synthetic oligonucleotide: CBLB-679
gatgtcaagattgagccttg

SEQ ID NO: 6254 - DNA, 20 bp, Artificial Sequence
  Synthetic oligonucleotide: CBLB-680
atgtcaagattgagccttgt

SEQ ID NO: 6255 - DNA, 20 bp, Artificial Sequence
  Synthetic oligonucleotide: CBLB-681
gatgtgcacctcttgcctta

SEQ ID NO: 6256 - DNA, 20 bp, Artificial Sequence
  Synthetic oligonucleotide: CBLB-682
gcacctcttgccttacggca

SEQ ID NO: 6257 - DNA, 20 bp, Artificial Sequence
  Synthetic oligonucleotide: CBLB-683
ctcttgccttacggcatggc

SEQ ID NO: 6258 - DNA, 20 bp, Artificial Sequence
  Synthetic oligonucleotide: CBLB-684
aggtataatcattagcaaca

SEQ ID NO: 6259 - DNA, 20 bp, Artificial Sequence
  Synthetic oligonucleotide: CBLB-685
catgcattttctatttgttt

SEQ ID NO: 6260 - DNA, 20 bp, Artificial Sequence
  Synthetic oligonucleotide: CBLB-686
ttttctatttgtttaggagt

SEQ ID NO: 6261 - DNA, 20 bp, Artificial Sequence
  Synthetic oligonucleotide: CBLB-687
ctatttgtttaggagtcgga

SEQ ID NO: 6262 - DNA, 20 bp, Artificial Sequence
  Synthetic oligonucleotide: CBLB-688
tgtttaggagtcggatggtc

SEQ ID NO: 6263 - DNA, 20 bp, Artificial Sequence
  Synthetic oligonucleotide: CBLB-689
gtttaggagtcggatggtca

SEQ ID NO: 6264 - DNA, 20 bp, Artificial Sequence
  Synthetic oligonucleotide: CBLB-690
ttctgtcgttgtgaaataaa

SEQ ID NO: 6265 - DNA, 20 bp, Artificial Sequence
  Synthetic oligonucleotide: CBLB-691
aggaactgagcccataatcg

SEQ ID NO: 6266 - DNA, 20 bp, Artificial Sequence
  Synthetic oligonucleotide: CBLB-692
ccctttgatccaagagatga

SEQ ID NO: 6267 - DNA, 20 bp, Artificial Sequence
  Synthetic oligonucleotide: CBLB-693
atccaagagatgaaggctcc

SEQ ID NO: 6268 - DNA, 20 bp, Artificial Sequence
  Synthetic oligonucleotide: CBLB-694
tgcagcatcattgacccctt

SEQ ID NO: 6269 - DNA, 20 bp, Artificial Sequence
  Synthetic oligonucleotide: CBLB-695
tggcatgccgatgctagact

SEQ ID NO: 6270 - DNA, 20 bp, Artificial Sequence
  Synthetic oligonucleotide: CBLB-696
ggacgacgatgatgatcgtg

SEQ ID NO: 6271 - DNA, 20 bp, Artificial Sequence
  Synthetic oligonucleotide: CBLB-697
aggagtccttgatgatgaat

SEQ ID NO: 6272 - DNA, 20 bp, Artificial Sequence
  Synthetic oligonucleotide: CBLB-698
gtccttgatgatgaatcggt

SEQ ID NO: 6273 - DNA, 20 bp, Artificial Sequence
  Synthetic oligonucleotide: CBLB-699
tcggttggcaaacgtccgaa

SEQ ID NO: 6274 - DNA, 20 bp, Artificial Sequence
  Synthetic oligonucleotide: CBLB-700
gaaaggtaaaactagaaaca

SEQ ID NO: 6275 - DNA, 20 bp, Artificial Sequence
  Synthetic oligonucleotide: CBLB-701
aaaggtaaaactagaaacat

SEQ ID NO: 6276 - DNA, 20 bp, Artificial Sequence
  Synthetic oligonucleotide: CBLB-702
tagaaacatgggtttagtta

SEQ ID NO: 6277 - DNA, 20 bp, Artificial Sequence
  Synthetic oligonucleotide: CBLB-703
ttctgttctagtgcactgac

SEQ ID NO: 6278 - DNA, 20 bp, Artificial Sequence
  Synthetic oligonucleotide: CBLB-704
aactcaccagtcacatcacc

SEQ ID NO: 6279 - DNA, 20 bp, Artificial Sequence
  Synthetic oligonucleotide: CBLB-705
gccacccgtgcctcctcgcc

SEQ ID NO: 6280 - DNA, 20 bp, Artificial Sequence
  Synthetic oligonucleotide: CBLB-706
cgcctggatctaattcagaa

SEQ ID NO: 6281 - DNA, 20 bp, Artificial Sequence
  Synthetic oligonucleotide: CBLB-707
ggcatagttagatctccctg

SEQ ID NO: 6282 - DNA, 20 bp, Artificial Sequence
  Synthetic oligonucleotide: CBLB-708
atctccctgtggcagcccaa

SEQ ID NO: 6283 - DNA, 20 bp, Artificial Sequence
  Synthetic oligonucleotide: CBLB-709
tctccctgtggcagcccaac

SEQ ID NO: 6284 - DNA, 20 bp, Artificial Sequence
  Synthetic oligonucleotide: CBLB-710
cagcccaacgggttcaccaa

SEQ ID NO: 6285 - DNA, 20 bp, Artificial Sequence
  Synthetic oligonucleotide: CBLB-711
tctttagtcttctccttgca

SEQ ID NO: 6286 - DNA, 20 bp, Artificial Sequence
  Synthetic oligonucleotide: CBLB-712
gagtagacacatccatcatg

SEQ ID NO: 6287 - DNA, 20 bp, Artificial Sequence
  Synthetic oligonucleotide: CBLB-713
cgccaatgcctcttgaagca

SEQ ID NO: 6288 - DNA, 20 bp, Artificial Sequence
  Synthetic oligonucleotide: CBLB-714
ctcttgaagcatggtgccct

SEQ ID NO: 6289 - DNA, 20 bp, Artificial Sequence
  Synthetic oligonucleotide: CBLB-715
tcttgaagcatggtgccctc

SEQ ID NO: 6290 - DNA, 20 bp, Artificial Sequence
  Synthetic oligonucleotide: CBLB-716
tggtgccctcgggatgtgtt

SEQ ID NO: 6291 - DNA, 20 bp, Artificial Sequence
  Synthetic oligonucleotide: CBLB-717
ggtgccctcgggatgtgttt

SEQ ID NO: 6292 - DNA, 20 bp, Artificial Sequence
  Synthetic oligonucleotide: CBLB-718
gtttgggactaatcagcttg

SEQ ID NO: 6293 - DNA, 20 bp, Artificial Sequence
  Synthetic oligonucleotide: CBLB-719
tttgggactaatcagcttgt

SEQ ID NO: 6294 - DNA, 20 bp, Artificial Sequence
  Synthetic oligonucleotide: CBLB-720
cttgtgggatgtcgactcct

SEQ ID NO: 6295 - DNA, 20 bp, Artificial Sequence
  Synthetic oligonucleotide: CBLB-721
ttgtgggatgtcgactccta

SEQ ID NO: 6296 - DNA, 20 bp, Artificial Sequence
  Synthetic oligonucleotide: CBLB-722
tgtgggatgtcgactcctag

SEQ ID NO: 6297 - DNA, 20 bp, Artificial Sequence
  Synthetic oligonucleotide: CBLB-723
gggatgtcgactcctagggg

SEQ ID NO: 6298 - DNA, 20 bp, Artificial Sequence
  Synthetic oligonucleotide: CBLB-724
ggatgtcgactcctagggga

SEQ ID NO: 6299 - DNA, 20 bp, Artificial Sequence
  Synthetic oligonucleotide: CBLB-725
ggggagggctctccaaaacc

SEQ ID NO: 6300 - DNA, 20 bp, Artificial Sequence
  Synthetic oligonucleotide: CBLB-726
acagcgagttcaaatgtcaa

SEQ ID NO: 6301 - DNA, 20 bp, Artificial Sequence
  Synthetic oligonucleotide: CBLB-727
cgagttcaaatgtcaatgga

SEQ ID NO: 6302 - DNA, 20 bp, Artificial Sequence
  Synthetic oligonucleotide: CBLB-728
caatggaaggcacagtagag

SEQ ID NO: 6303 - DNA, 20 bp, Artificial Sequence
  Synthetic oligonucleotide: CBLB-729
aatggaaggcacagtagagt

SEQ ID NO: 6304 - DNA, 20 bp, Artificial Sequence
  Synthetic oligonucleotide: CBLB-730
gctctgacccagtgcttatg

SEQ ID NO: 6305 - DNA, 20 bp, Artificial Sequence
  Synthetic oligonucleotide: CBLB-731
cgccatgatttgcctttaga

SEQ ID NO: 6306 - DNA, 20 bp, Artificial Sequence
  Synthetic oligonucleotide: CBLB-732
tttgcctttagaaggagcta

SEQ ID NO: 6307 - DNA, 20 bp, Artificial Sequence
  Synthetic oligonucleotide: CBLB-733
taacaatttgatttactttc

SEQ ID NO: 6308 - DNA, 20 bp, Artificial Sequence
  Synthetic oligonucleotide: CBLB-734
tactttcaggtcttttccaa

SEQ ID NO: 6309 - DNA, 20 bp, Artificial Sequence
  Synthetic oligonucleotide: CBLB-735
gtcttttccaatggtcacct

SEQ ID NO: 6310 - DNA, 20 bp, Artificial Sequence
  Synthetic oligonucleotide: CBLB-736
aagaatatgatgttcctccc

SEQ ID NO: 6311 - DNA, 20 bp, Artificial Sequence
  Synthetic oligonucleotide: CBLB-737
aaagtgagttttgttgaatt

SEQ ID NO: 6312 - DNA, 20 bp, Artificial Sequence
  Synthetic oligonucleotide: CBLB-738
agattggattttttttcccc

SEQ ID NO: 6313 - DNA, 20 bp, Artificial Sequence
  Synthetic oligonucleotide: CBLB-739
tggattttttttcccctggt

SEQ ID NO: 6314 - DNA, 20 bp, Artificial Sequence
  Synthetic oligonucleotide: CBLB-740
ttttcccctggtaggtgtac

SEQ ID NO: 6315 - DNA, 20 bp, Artificial Sequence
  Synthetic oligonucleotide: CBLB-741
gaaaacaagagacccagtag

SEQ ID NO: 6316 - DNA, 20 bp, Artificial Sequence
  Synthetic oligonucleotide: CBLB-742
ataatgtaaaacctcctgtt

SEQ ID NO: 6317 - DNA, 20 bp, Artificial Sequence
  Synthetic oligonucleotide: CBLB-743
cctcctgttcggtaagagta

SEQ ID NO: 6318 - DNA, 20 bp, Artificial Sequence
  Synthetic oligonucleotide: CBLB-744
ctcctgttcggtaagagtat

SEQ ID NO: 6319 - DNA, 20 bp, Artificial Sequence
  Synthetic oligonucleotide: CBLB-745
tttactctgaactgtccttt

SEQ ID NO: 6320 - DNA, 20 bp, Artificial Sequence
  Synthetic oligonucleotide: CBLB-746
tcctttaggtcttgtgataa

SEQ ID NO: 6321 - DNA, 20 bp, Artificial Sequence
  Synthetic oligonucleotide: CBLB-747
aatggtcactgtatgctgaa

SEQ ID NO: 6322 - DNA, 20 bp, Artificial Sequence
  Synthetic oligonucleotide: CBLB-748
tgtatgctgaatggaacaca

SEQ ID NO: 6323 - DNA, 20 bp, Artificial Sequence
  Synthetic oligonucleotide: CBLB-749
tgacttaagcatatatttaa

SEQ ID NO: 6324 - DNA, 20 bp, Artificial Sequence
  Synthetic oligonucleotide: CBLB-750
gacttaagcatatatttaaa

SEQ ID NO: 6325 - DNA, 20 bp, Artificial Sequence
  Synthetic oligonucleotide: CBLB-751
aaggttttgtgttatcctct

SEQ ID NO: 6326 - DNA, 20 bp, Artificial Sequence
  Synthetic oligonucleotide: CBLB-752
ccgtgccattaccacctgcc

SEQ ID NO: 6327 - DNA, 20 bp, Artificial Sequence
  Synthetic oligonucleotide: CBLB-753
cacctgccaggcctccaact

SEQ ID NO: 6328 - DNA, 20 bp, Artificial Sequence
  Synthetic oligonucleotide: CBLB-754
acctgccaggcctccaactc

SEQ ID NO: 6329 - DNA, 20 bp, Artificial Sequence
  Synthetic oligonucleotide: CBLB-755
actcgggacaatccaaagca

SEQ ID NO: 6330 - DNA, 20 bp, Artificial Sequence
  Synthetic oligonucleotide: CBLB-756
agcatggttcttcactcaac

SEQ ID NO: 6331 - DNA, 20 bp, Artificial Sequence
  Synthetic oligonucleotide: CBLB-757
gatcttctcatccctccatt

SEQ ID NO: 6332 - DNA, 20 bp, Artificial Sequence
  Synthetic oligonucleotide: CBLB-758
atcgacctttctttaaatgc

SEQ ID NO: 6333 - DNA, 20 bp, Artificial Sequence
  Synthetic oligonucleotide: CBLB-759
cacctcccccacctcctgca

SEQ ID NO: 6334 - DNA, 20 bp, Artificial Sequence
  Synthetic oligonucleotide: CBLB-760
attgaacattcaaaacctcc

SEQ ID NO: 6335 - DNA, 20 bp, Artificial Sequence
  Synthetic oligonucleotide: CBLB-761
aacctcctggctccagtagc

SEQ ID NO: 6336 - DNA, 20 bp, Artificial Sequence
  Synthetic oligonucleotide: CBLB-762
tccagtagccggccatcctc

SEQ ID NO: 6337 - DNA, 20 bp, Artificial Sequence
  Synthetic oligonucleotide: CBLB-763
tagccggccatcctcaggac

SEQ ID NO: 6338 - DNA, 20 bp, Artificial Sequence
  Synthetic oligonucleotide: CBLB-764
gatctttttcttcttccttc

SEQ ID NO: 6339 - DNA, 20 bp, Artificial Sequence
  Synthetic oligonucleotide: CBLB-765
tttttcttcttccttcaggt

SEQ ID NO: 6340 - DNA, 20 bp, Artificial Sequence
  Synthetic oligonucleotide: CBLB-766
ttcttcttccttcaggtagg

SEQ ID NO: 6341 - DNA, 20 bp, Artificial Sequence
  Synthetic oligonucleotide: CBLB-767
tcttcttccttcaggtagga

SEQ ID NO: 6342 - DNA, 20 bp, Artificial Sequence
  Synthetic oligonucleotide: CBLB-768
ccctttgttgatctagcaag

SEQ ID NO: 6343 - DNA, 20 bp, Artificial Sequence
  Synthetic oligonucleotide: CBLB-769
ttcctttgcctcctgctaga

SEQ ID NO: 6344 - DNA, 20 bp, Artificial Sequence
  Synthetic oligonucleotide: CBLB-770
cctcctgctagaaggttacc

SEQ ID NO: 6345 - DNA, 20 bp, Artificial Sequence
  Synthetic oligonucleotide: CBLB-771
caaaactaacagaacatcac

SEQ ID NO: 6346 - DNA, 20 bp, Artificial Sequence
  Synthetic oligonucleotide: CBLB-772
gatcagcttccttcatgttc

SEQ ID NO: 6347 - DNA, 20 bp, Artificial Sequence
  Synthetic oligonucleotide: CBLB-773
tccttcatgttcaggtgagt

SEQ ID NO: 6348 - DNA, 20 bp, Artificial Sequence
  Synthetic oligonucleotide: CBLB-774
tctttaaaaatctacacaga

SEQ ID NO: 6349 - DNA, 20 bp, Artificial Sequence
  Synthetic oligonucleotide: CBLB-775
aatctacacagatggttcac

SEQ ID NO: 6350 - DNA, 20 bp, Artificial Sequence
  Synthetic oligonucleotide: CBLB-776
cccctaaaccacgaccgcgc

SEQ ID NO: 6351 - DNA, 20 bp, Artificial Sequence
  Synthetic oligonucleotide: CBLB-777
attcaccacagaaaacccca

SEQ ID NO: 6352 - DNA, 20 bp, Artificial Sequence
  Synthetic oligonucleotide: CBLB-778
ttcaccacagaaaaccccat

SEQ ID NO: 6353 - DNA, 20 bp, Artificial Sequence
  Synthetic oligonucleotide: CBLB-779
cagaaaaccccatgggcctg

SEQ ID NO: 6354 - DNA, 20 bp, Artificial Sequence
  Synthetic oligonucleotide: CBLB-780
aaaaccccatgggcctgagg

SEQ ID NO: 6355 - DNA, 20 bp, Artificial Sequence
  Synthetic oligonucleotide: CBLB-781
ccatgggcctgaggcggcat

SEQ ID NO: 6356 - DNA, 20 bp, Artificial Sequence
  Synthetic oligonucleotide: CBLB-782
tgcaaaaattgcaaaactca

SEQ ID NO: 6357 - DNA, 20 bp, Artificial Sequence
  Synthetic oligonucleotide: CBLB-783
gcaaaaattgcaaaactcat

SEQ ID NO: 6358 - DNA, 20 bp, Artificial Sequence
  Synthetic oligonucleotide: CBLB-784
aattgcaaaactcatgggag

SEQ ID NO: 6359 - DNA, 20 bp, Artificial Sequence
  Synthetic oligonucleotide: CBLB-785
attgcaaaactcatgggaga

SEQ ID NO: 6360 - DNA, 20 bp, Artificial Sequence
  Synthetic oligonucleotide: CBLB-786
agagggttatgcctttgaag

SEQ ID NO: 6361 - DNA, 20 bp, Artificial Sequence
  Synthetic oligonucleotide: CBLB-787
agaataatgtcgaagttgcc

SEQ ID NO: 6362 - DNA, 20 bp, Artificial Sequence
  Synthetic oligonucleotide: CBLB-788
cagaactgtagacaccaaaa

SEQ ID NO: 6363 - DNA, 17 bp, Artificial Sequence
  Synthetic oligonucleotide: CBLB-2329
gaatatttcagatgttt

SEQ ID NO: 6364 - DNA, 17 bp, Artificial Sequence
  Synthetic oligonucleotide: CBLB-790
tatcttcagtcacatgc

SEQ ID NO: 6365 - DNA, 17 bp, Artificial Sequence
  Synthetic oligonucleotide: CBLB-791
aaagcaatctttcccaa

SEQ ID NO: 6366 - DNA, 17 bp, Artificial Sequence
  Synthetic oligonucleotide: CBLB-792
tcccaatggtcaattcc

SEQ ID NO: 6367 - DNA, 17 bp, Artificial Sequence
  Synthetic oligonucleotide: CBLB-793
cccaatggtcaattcca

SEQ ID NO: 6368 - DNA, 17 bp, Artificial Sequence
  Synthetic oligonucleotide: CBLB-794
cagatgctgctgaattc

SEQ ID NO: 6369 - DNA, 17 bp, Artificial Sequence
  Synthetic oligonucleotide: CBLB-795
ttctggagaaagttttt

SEQ ID NO: 6370 - DNA, 17 bp, Artificial Sequence
  Synthetic oligonucleotide: CBLB-796
aatcatttttatagctg

SEQ ID NO: 6371 - DNA, 17 bp, Artificial Sequence
  Synthetic oligonucleotide: CBLB-797
acagaactatcgtacca

SEQ ID NO: 6372 - DNA, 17 bp, Artificial Sequence
  Synthetic oligonucleotide: CBLB-798
cagacagtgccttcatg

SEQ ID NO: 6373 - DNA, 17 bp, Artificial Sequence
  Synthetic oligonucleotide: CBLB-799
gtccaccagattagctc

SEQ ID NO: 6374 - DNA, 17 bp, Artificial Sequence
  Synthetic oligonucleotide: CBLB-800
ccagattagctctggcc

SEQ ID NO: 6375 - DNA, 17 bp, Artificial Sequence
  Synthetic oligonucleotide: CBLB-801
ctctggcctggaagcaa

SEQ ID NO: 6376 - DNA, 17 bp, Artificial Sequence
  Synthetic oligonucleotide: CBLB-802
aatttgatatttttacc

SEQ ID NO: 6377 - DNA, 17 bp, Artificial Sequence
  Synthetic oligonucleotide: CBLB-803
ttttaccaggctgtttc

SEQ ID NO: 6378 - DNA, 17 bp, Artificial Sequence
  Synthetic oligonucleotide: CBLB-804
tttttattttttagcct

SEQ ID NO: 6379 - DNA, 17 bp, Artificial Sequence
  Synthetic oligonucleotide: CBLB-805
ttttattttttagcctt

SEQ ID NO: 6380 - DNA, 17 bp, Artificial Sequence
  Synthetic oligonucleotide: CBLB-806
tttattttttagccttg

SEQ ID NO: 6381 - DNA, 17 bp, Artificial Sequence
  Synthetic oligonucleotide: CBLB-807
cttggggctctattttg

SEQ ID NO: 6382 - DNA, 17 bp, Artificial Sequence
  Synthetic oligonucleotide: CBLB-808
gctctattttgcggaat

SEQ ID NO: 6383 - DNA, 17 bp, Artificial Sequence
  Synthetic oligonucleotide: CBLB-809
ttagctgtgacacatcc

SEQ ID NO: 6384 - DNA, 17 bp, Artificial Sequence
  Synthetic oligonucleotide: CBLB-810
gacacatccaggttaca

SEQ ID NO: 6385 - DNA, 17 bp, Artificial Sequence
  Synthetic oligonucleotide: CBLB-811
aaatatagcaccaaacc

SEQ ID NO: 6386 - DNA, 17 bp, Artificial Sequence
  Synthetic oligonucleotide: CBLB-812
atagcaccaaacccgga

SEQ ID NO: 6387 - DNA, 17 bp, Artificial Sequence
  Synthetic oligonucleotide: CBLB-813
tttgcagctatattttc

SEQ ID NO: 6388 - DNA, 17 bp, Artificial Sequence
  Synthetic oligonucleotide: CBLB-814
gttaagttgcactcgat

SEQ ID NO: 6389 - DNA, 17 bp, Artificial Sequence
  Synthetic oligonucleotide: CBLB-815
ttaagttgcactcgatt

SEQ ID NO: 6390 - DNA, 17 bp, Artificial Sequence
  Synthetic oligonucleotide: CBLB-816
gcactcgattgggacag

SEQ ID NO: 6391 - DNA, 17 bp, Artificial Sequence
  Synthetic oligonucleotide: CBLB-817
cactcgattgggacagt

SEQ ID NO: 6392 - DNA, 17 bp, Artificial Sequence
  Synthetic oligonucleotide: CBLB-818
ttgggacagtgggccat

SEQ ID NO: 6393 - DNA, 17 bp, Artificial Sequence
  Synthetic oligonucleotide: CBLB-819
gccattggctatgtgac

SEQ ID NO: 6394 - DNA, 17 bp, Artificial Sequence
  Synthetic oligonucleotide: CBLB-820
ccattggctatgtgact

SEQ ID NO: 6395 - DNA, 17 bp, Artificial Sequence
  Synthetic oligonucleotide: CBLB-821
cattggctatgtgactg

SEQ ID NO: 6396 - DNA, 17 bp, Artificial Sequence
  Synthetic oligonucleotide: CBLB-822
ggctatgtgactgggga

SEQ ID NO: 6397 - DNA, 17 bp, Artificial Sequence
  Synthetic oligonucleotide: CBLB-823
gctatgtgactggggat

SEQ ID NO: 6398 - DNA, 17 bp, Artificial Sequence
  Synthetic oligonucleotide: CBLB-824
tttcaagccctgattga

SEQ ID NO: 6399 - DNA, 17 bp, Artificial Sequence
  Synthetic oligonucleotide: CBLB-825
ccctgattgatggcagc

SEQ ID NO: 6400 - DNA, 17 bp, Artificial Sequence
  Synthetic oligonucleotide: CBLB-826
cctgattgatggcagca

SEQ ID NO: 6401 - DNA, 17 bp, Artificial Sequence
  Synthetic oligonucleotide: CBLB-827
attgatggcagcaggga

SEQ ID NO: 6402 - DNA, 17 bp, Artificial Sequence
  Synthetic oligonucleotide: CBLB-828
attgtaagtatgagaaa

SEQ ID NO: 6403 - DNA, 17 bp, Artificial Sequence
  Synthetic oligonucleotide: CBLB-829
gtatgagaaatggaagt

SEQ ID NO: 6404 - DNA, 17 bp, Artificial Sequence
  Synthetic oligonucleotide: CBLB-830
agttatctttatcctga

SEQ ID NO: 6405 - DNA, 17 bp, Artificial Sequence
  Synthetic oligonucleotide: CBLB-831
gttatctttatcctgat

SEQ ID NO: 6406 - DNA, 17 bp, Artificial Sequence
  Synthetic oligonucleotide: CBLB-832
atctttatcctgatggg

SEQ ID NO: 6407 - DNA, 17 bp, Artificial Sequence
  Synthetic oligonucleotide: CBLB-833
tataatcctgatttaac

SEQ ID NO: 6408 - DNA, 17 bp, Artificial Sequence
  Synthetic oligonucleotide: CBLB-834
ccatataaaagttacac

SEQ ID NO: 6409 - DNA, 17 bp, Artificial Sequence
  Synthetic oligonucleotide: CBLB-835
taaaagttacacaggta

SEQ ID NO: 6410 - DNA, 17 bp, Artificial Sequence
  Synthetic oligonucleotide: CBLB-836
cctcctccccaaattcc

SEQ ID NO: 6411 - DNA, 17 bp, Artificial Sequence
  Synthetic oligonucleotide: CBLB-837
tgaattatattgtgaaa

SEQ ID NO: 6412 - DNA, 17 bp, Artificial Sequence
  Synthetic oligonucleotide: CBLB-838
gaattatattgtgaaat

SEQ ID NO: 6413 - DNA, 17 bp, Artificial Sequence
  Synthetic oligonucleotide: CBLB-839
gtcaagattgagccttg

SEQ ID NO: 6414 - DNA, 17 bp, Artificial Sequence
  Synthetic oligonucleotide: CBLB-840
tcaagattgagccttgt

SEQ ID NO: 6415 - DNA, 17 bp, Artificial Sequence
  Synthetic oligonucleotide: CBLB-841
gtgcacctcttgcctta

SEQ ID NO: 6416 - DNA, 17 bp, Artificial Sequence
  Synthetic oligonucleotide: CBLB-842
cctcttgccttacggca

SEQ ID NO: 6417 - DNA, 17 bp, Artificial Sequence
  Synthetic oligonucleotide: CBLB-843
ttgccttacggcatggc

SEQ ID NO: 6418 - DNA, 17 bp, Artificial Sequence
  Synthetic oligonucleotide: CBLB-844
tataatcattagcaaca

SEQ ID NO: 6419 - DNA, 17 bp, Artificial Sequence
  Synthetic oligonucleotide: CBLB-845
gcattttctatttgttt

SEQ ID NO: 6420 - DNA, 17 bp, Artificial Sequence
  Synthetic oligonucleotide: CBLB-846
tctatttgtttaggagt

SEQ ID NO: 6421 - DNA, 17 bp, Artificial Sequence
  Synthetic oligonucleotide: CBLB-847
tttgtttaggagtcgga

SEQ ID NO: 6422 - DNA, 17 bp, Artificial Sequence
  Synthetic oligonucleotide: CBLB-848
ttaggagtcggatggtc

SEQ ID NO: 6423 - DNA, 17 bp, Artificial Sequence
  Synthetic oligonucleotide: CBLB-849
taggagtcggatggtca

SEQ ID NO: 6424 - DNA, 17 bp, Artificial Sequence
  Synthetic oligonucleotide: CBLB-850
tgtcgttgtgaaataaa

SEQ ID NO: 6425 - DNA, 17 bp, Artificial Sequence
  Synthetic oligonucleotide: CBLB-851
aactgagcccataatcg

SEQ ID NO: 6426 - DNA, 17 bp, Artificial Sequence
  Synthetic oligonucleotide: CBLB-852
tttgatccaagagatga

SEQ ID NO: 6427 - DNA, 17 bp, Artificial Sequence
  Synthetic oligonucleotide: CBLB-853
caagagatgaaggctcc

SEQ ID NO: 6428 - DNA, 17 bp, Artificial Sequence
  Synthetic oligonucleotide: CBLB-854
agcatcattgacccctt

SEQ ID NO: 6429 - DNA, 17 bp, Artificial Sequence
  Synthetic oligonucleotide: CBLB-855
catgccgatgctagact

SEQ ID NO: 6430 - DNA, 17 bp, Artificial Sequence
  Synthetic oligonucleotide: CBLB-856
cgacgatgatgatcgtg

SEQ ID NO: 6431 - DNA, 17 bp, Artificial Sequence
  Synthetic oligonucleotide: CBLB-857
agtccttgatgatgaat

SEQ ID NO: 6432 - DNA, 17 bp, Artificial Sequence
  Synthetic oligonucleotide: CBLB-858
cttgatgatgaatcggt

SEQ ID NO: 6433 - DNA, 17 bp, Artificial Sequence
  Synthetic oligonucleotide: CBLB-859
gttggcaaacgtccgaa

SEQ ID NO: 6434 - DNA, 17 bp, Artificial Sequence
  Synthetic oligonucleotide: CBLB-860
aggtaaaactagaaaca

SEQ ID NO: 6435 - DNA, 17 bp, Artificial Sequence
  Synthetic oligonucleotide: CBLB-861
ggtaaaactagaaacat

SEQ ID NO: 6436 - DNA, 17 bp, Artificial Sequence
  Synthetic oligonucleotide: CBLB-862
aaacatgggtttagtta

SEQ ID NO: 6437 - DNA, 17 bp, Artificial Sequence
  Synthetic oligonucleotide: CBLB-863
tgttctagtgcactgac

SEQ ID NO: 6438 - DNA, 17 bp, Artificial Sequence
  Synthetic oligonucleotide: CBLB-864
tcaccagtcacatcacc

SEQ ID NO: 6439 - DNA, 17 bp, Artificial Sequence
  Synthetic oligonucleotide: CBLB-865
acccgtgcctcctcgcc

SEQ ID NO: 6440 - DNA, 17 bp, Artificial Sequence
  Synthetic oligonucleotide: CBLB-866
ctggatctaattcagaa

SEQ ID NO: 6441 - DNA, 17 bp, Artificial Sequence
  Synthetic oligonucleotide: CBLB-867
atagttagatctccctg

SEQ ID NO: 6442 - DNA, 17 bp, Artificial Sequence
  Synthetic oligonucleotide: CBLB-868
tccctgtggcagcccaa

SEQ ID NO: 6443 - DNA, 17 bp, Artificial Sequence
  Synthetic oligonucleotide: CBLB-869
ccctgtggcagcccaac

SEQ ID NO: 6444 - DNA, 17 bp, Artificial Sequence
  Synthetic oligonucleotide: CBLB-870
cccaacgggttcaccaa

SEQ ID NO: 6445 - DNA, 17 bp, Artificial Sequence
  Synthetic oligonucleotide: CBLB-871
ttagtcttctccttgca

SEQ ID NO: 6446 - DNA, 17 bp, Artificial Sequence
  Synthetic oligonucleotide: CBLB-872
tagacacatccatcatg

SEQ ID NO: 6447 - DNA, 17 bp, Artificial Sequence
  Synthetic oligonucleotide: CBLB-873
caatgcctcttgaagca

SEQ ID NO: 6448 - DNA, 17 bp, Artificial Sequence
  Synthetic oligonucleotide: CBLB-874
ttgaagcatggtgccct

SEQ ID NO: 6449 - DNA, 17 bp, Artificial Sequence
  Synthetic oligonucleotide: CBLB-875
tgaagcatggtgccctc

SEQ ID NO: 6450 - DNA, 17 bp, Artificial Sequence
  Synthetic oligonucleotide: CBLB-876
tgccctcgggatgtgtt

SEQ ID NO: 6451 - DNA, 17 bp, Artificial Sequence
  Synthetic oligonucleotide: CBLB-877
gccctcgggatgtgttt

SEQ ID NO: 6452 - DNA, 17 bp, Artificial Sequence
  Synthetic oligonucleotide: CBLB-878
tgggactaatcagcttg

SEQ ID NO: 6453 - DNA, 17 bp, Artificial Sequence
  Synthetic oligonucleotide: CBLB-879
gggactaatcagcttgt

SEQ ID NO: 6454 - DNA, 17 bp, Artificial Sequence
  Synthetic oligonucleotide: CBLB-880
gtgggatgtcgactcct

SEQ ID NO: 6455 - DNA, 17 bp, Artificial Sequence
  Synthetic oligonucleotide: CBLB-881
tgggatgtcgactccta

SEQ ID NO: 6456 - DNA, 17 bp, Artificial Sequence
  Synthetic oligonucleotide: CBLB-882
gggatgtcgactcctag

SEQ ID NO: 6457 - DNA, 17 bp, Artificial Sequence
  Synthetic oligonucleotide: CBLB-883
atgtcgactcctagggg

SEQ ID NO: 6458 - DNA, 17 bp, Artificial Sequence
  Synthetic oligonucleotide: CBLB-884
tgtcgactcctagggga

SEQ ID NO: 6459 - DNA, 17 bp, Artificial Sequence
  Synthetic oligonucleotide: CBLB-885
gagggctctccaaaacc

SEQ ID NO: 6460 - DNA, 17 bp, Artificial Sequence
  Synthetic oligonucleotide: CBLB-886
gcgagttcaaatgtcaa

SEQ ID NO: 6461 - DNA, 17 bp, Artificial Sequence
  Synthetic oligonucleotide: CBLB-887
gttcaaatgtcaatgga

SEQ ID NO: 6462 - DNA, 17 bp, Artificial Sequence
  Synthetic oligonucleotide: CBLB-888
tggaaggcacagtagag

SEQ ID NO: 6463 - DNA, 17 bp, Artificial Sequence
  Synthetic oligonucleotide: CBLB-889
ggaaggcacagtagagt

SEQ ID NO: 6464 - DNA, 17 bp, Artificial Sequence
  Synthetic oligonucleotide: CBLB-890
ctgacccagtgcttatg

SEQ ID NO: 6465 - DNA, 17 bp, Artificial Sequence
  Synthetic oligonucleotide: CBLB-891
catgatttgcctttaga

SEQ ID NO: 6466 - DNA, 17 bp, Artificial Sequence
  Synthetic oligonucleotide: CBLB-892
gcctttagaaggagcta

SEQ ID NO: 6467 - DNA, 17 bp, Artificial Sequence
  Synthetic oligonucleotide: CBLB-893
caatttgatttactttc

SEQ ID NO: 6468 - DNA, 17 bp, Artificial Sequence
  Synthetic oligonucleotide: CBLB-894
tttcaggtcttttccaa

SEQ ID NO: 6469 - DNA, 17 bp, Artificial Sequence
  Synthetic oligonucleotide: CBLB-895
ttttccaatggtcacct

SEQ ID NO: 6470 - DNA, 17 bp, Artificial Sequence
  Synthetic oligonucleotide: CBLB-896
aatatgatgttcctccc

SEQ ID NO: 6471 - DNA, 17 bp, Artificial Sequence
  Synthetic oligonucleotide: CBLB-897
gtgagttttgttgaatt

SEQ ID NO: 6472 - DNA, 17 bp, Artificial Sequence
  Synthetic oligonucleotide: CBLB-898
ttggattttttttcccc

SEQ ID NO: 6473 - DNA, 17 bp, Artificial Sequence
  Synthetic oligonucleotide: CBLB-899
attttttttcccctggt

SEQ ID NO: 6474 - DNA, 17 bp, Artificial Sequence
  Synthetic oligonucleotide: CBLB-900
tcccctggtaggtgtac

SEQ ID NO: 6475 - DNA, 17 bp, Artificial Sequence
  Synthetic oligonucleotide: CBLB-901
aacaagagacccagtag

SEQ ID NO: 6476 - DNA, 17 bp, Artificial Sequence
  Synthetic oligonucleotide: CBLB-902
atgtaaaacctcctgtt

SEQ ID NO: 6477 - DNA, 17 bp, Artificial Sequence
  Synthetic oligonucleotide: CBLB-903
cctgttcggtaagagta

SEQ ID NO: 6478 - DNA, 17 bp, Artificial Sequence
  Synthetic oligonucleotide: CBLB-904
ctgttcggtaagagtat

SEQ ID NO: 6479 - DNA, 17 bp, Artificial Sequence
  Synthetic oligonucleotide: CBLB-905
actctgaactgtccttt

SEQ ID NO: 6480 - DNA, 17 bp, Artificial Sequence
  Synthetic oligonucleotide: CBLB-906
tttaggtcttgtgataa

SEQ ID NO: 6481 - DNA, 17 bp, Artificial Sequence
  Synthetic oligonucleotide: CBLB-907
ggtcactgtatgctgaa

SEQ ID NO: 6482 - DNA, 17 bp, Artificial Sequence
  Synthetic oligonucleotide: CBLB-908
atgctgaatggaacaca

SEQ ID NO: 6483 - DNA, 17 bp, Artificial Sequence
  Synthetic oligonucleotide: CBLB-909
cttaagcatatatttaa

SEQ ID NO: 6484 - DNA, 17 bp, Artificial Sequence
  Synthetic oligonucleotide: CBLB-910
ttaagcatatatttaaa

SEQ ID NO: 6485 - DNA, 17 bp, Artificial Sequence
  Synthetic oligonucleotide: CBLB-911
gttttgtgttatcctct

SEQ ID NO: 6486 - DNA, 17 bp, Artificial Sequence
  Synthetic oligonucleotide: CBLB-912
tgccattaccacctgcc

SEQ ID NO: 6487 - DNA, 17 bp, Artificial Sequence
  Synthetic oligonucleotide: CBLB-913
ctgccaggcctccaact

SEQ ID NO: 6488 - DNA, 17 bp, Artificial Sequence
  Synthetic oligonucleotide: CBLB-914
tgccaggcctccaactc

SEQ ID NO: 6489 - DNA, 17 bp, Artificial Sequence
  Synthetic oligonucleotide: CBLB-915
cgggacaatccaaagca

SEQ ID NO: 6490 - DNA, 17 bp, Artificial Sequence
  Synthetic oligonucleotide: CBLB-916
atggttcttcactcaac

SEQ ID NO: 6491 - DNA, 17 bp, Artificial Sequence
  Synthetic oligonucleotide: CBLB-917
cttctcatccctccatt

SEQ ID NO: 6492 - DNA, 17 bp, Artificial Sequence
  Synthetic oligonucleotide: CBLB-918
gacctttctttaaatgc

SEQ ID NO: 6493 - DNA, 17 bp, Artificial Sequence
  Synthetic oligonucleotide: CBLB-919
ctcccccacctcctgca

SEQ ID NO: 6494 - DNA, 17 bp, Artificial Sequence
  Synthetic oligonucleotide: CBLB-920
gaacattcaaaacctcc

SEQ ID NO: 6495 - DNA, 17 bp, Artificial Sequence
  Synthetic oligonucleotide: CBLB-921
ctcctggctccagtagc

SEQ ID NO: 6496 - DNA, 17 bp, Artificial Sequence
  Synthetic oligonucleotide: CBLB-922
agtagccggccatcctc

SEQ ID NO: 6497 - DNA, 17 bp, Artificial Sequence
  Synthetic oligonucleotide: CBLB-923
ccggccatcctcaggac

SEQ ID NO: 6498 - DNA, 17 bp, Artificial Sequence
  Synthetic oligonucleotide: CBLB-924
ctttttcttcttccttc

SEQ ID NO: 6499 - DNA, 17 bp, Artificial Sequence
  Synthetic oligonucleotide: CBLB-925
ttcttcttccttcaggt

SEQ ID NO: 6500 - DNA, 17 bp, Artificial Sequence
  Synthetic oligonucleotide: CBLB-926
ttcttccttcaggtagg

SEQ ID NO: 6501 - DNA, 17 bp, Artificial Sequence
  Synthetic oligonucleotide: CBLB-927
tcttccttcaggtagga

SEQ ID NO: 6502 - DNA, 17 bp, Artificial Sequence
  Synthetic oligonucleotide: CBLB-928
tttgttgatctagcaag

SEQ ID NO: 6503 - DNA, 17 bp, Artificial Sequence
  Synthetic oligonucleotide: CBLB-929
ctttgcctcctgctaga

SEQ ID NO: 6504 - DNA, 17 bp, Artificial Sequence
  Synthetic oligonucleotide: CBLB-930
cctgctagaaggttacc

SEQ ID NO: 6505 - DNA, 17 bp, Artificial Sequence
  Synthetic oligonucleotide: CBLB-931
aactaacagaacatcac

SEQ ID NO: 6506 - DNA, 17 bp, Artificial Sequence
  Synthetic oligonucleotide: CBLB-932
cagcttccttcatgttc

SEQ ID NO: 6507 - DNA, 17 bp, Artificial Sequence
  Synthetic oligonucleotide: CBLB-933
ttcatgttcaggtgagt

SEQ ID NO: 6508 - DNA, 17 bp, Artificial Sequence
  Synthetic oligonucleotide: CBLB-934
ttaaaaatctacacaga

SEQ ID NO: 6509 - DNA, 17 bp, Artificial Sequence
  Synthetic oligonucleotide: CBLB-935
ctacacagatggttcac

SEQ ID NO: 6510 - DNA, 17 bp, Artificial Sequence
  Synthetic oligonucleotide: CBLB-936
ctaaaccacgaccgcgc

SEQ ID NO: 6511 - RNA, 17 nt, Artificial Sequence
  Synthetic oligonucleotide: CBLB-937
caccacagaaaacccca

SEQ ID NO: 6512 - DNA, 17 bp, Artificial Sequence
  Synthetic oligonucleotide: CBLB-938
accacagaaaaccccat

SEQ ID NO: 6513 - DNA, 17 bp, Artificial Sequence
  Synthetic oligonucleotide: CBLB-939
aaaaccccatgggcctg

SEQ ID NO: 6514 - DNA, 17 bp, Artificial Sequence
  Synthetic oligonucleotide: CBLB-940
accccatgggcctgagg

SEQ ID NO: 6515 - DNA, 17 bp, Artificial Sequence
  Synthetic oligonucleotide: CBLB-941
tgggcctgaggcggcat

SEQ ID NO: 6516 - DNA, 17 bp, Artificial Sequence
  Synthetic oligonucleotide: CBLB-942
aaaaattgcaaaactca

SEQ ID NO: 6517 - DNA, 17 bp, Artificial Sequence
  Synthetic oligonucleotide: CBLB-943
aaaattgcaaaactcat

SEQ ID NO: 6518 - DNA, 17 bp, Artificial Sequence
  Synthetic oligonucleotide: CBLB-944
tgcaaaactcatgggag

SEQ ID NO: 6519 - DNA, 17 bp, Artificial Sequence
  Synthetic oligonucleotide: CBLB-945
gcaaaactcatgggaga

SEQ ID NO: 6520 - DNA, 17 bp, Artificial Sequence
  Synthetic oligonucleotide: CBLB-946
gggttatgcctttgaag

SEQ ID NO: 6521 - DNA, 17 bp, Artificial Sequence
  Synthetic oligonucleotide: CBLB-947
ataatgtcgaagttgcc

SEQ ID NO: 6522 - DNA, 17 bp, Artificial Sequence
  Synthetic oligonucleotide: CBLB-948
aactgtagacaccaaaa

SEQ ID NO: 6523 - DNA, 20 bp, Artificial Sequence
  Synthetic oligonucleotide: CBLB-949
gatttcgtctgtaggcacaa

SEQ ID NO: 6524 - DNA, 20 bp, Artificial Sequence
  Synthetic oligonucleotide: CBLB-950
agatttcgtctgtaggcaca

SEQ ID NO: 6525 - DNA, 20 bp, Artificial Sequence
  Synthetic oligonucleotide: CBLB-951
ttttgtgagatttcgtctgt

SEQ ID NO: 6526 - DNA, 20 bp, Artificial Sequence
  Synthetic oligonucleotide: CBLB-952
cagcatgtgactgaagataa

SEQ ID NO: 6527 - DNA, 20 bp, Artificial Sequence
  Synthetic oligonucleotide: CBLB-953
ccagcatgtgactgaagata

SEQ ID NO: 6528 - DNA, 20 bp, Artificial Sequence
  Synthetic oligonucleotide: CBLB-954
tctccctggaattgaccatt

SEQ ID NO: 6529 - DNA, 20 bp, Artificial Sequence
  Synthetic oligonucleotide: CBLB-955
atctccctggaattgaccat

SEQ ID NO: 6530 - DNA, 20 bp, Artificial Sequence
  Synthetic oligonucleotide: CBLB-956
tgatacgaaagttatctccc

SEQ ID NO: 6531 - DNA, 20 bp, Artificial Sequence
  Synthetic oligonucleotide: CBLB-957
ctgtgcaaggtggaaaaaaa

SEQ ID NO: 6532 - DNA, 20 bp, Artificial Sequence
  Synthetic oligonucleotide: CBLB-958
tctgtgcaaggtggaaaaaa

SEQ ID NO: 6533 - DNA, 20 bp, Artificial Sequence
  Synthetic oligonucleotide: CBLB-959
tacgatagttctgtgcaagg

SEQ ID NO: 6534 - DNA, 20 bp, Artificial Sequence
  Synthetic oligonucleotide: CBLB-960
tggtacgatagttctgtgca

SEQ ID NO: 6535 - DNA, 20 bp, Artificial Sequence
  Synthetic oligonucleotide: CBLB-961
cactgtctgaatactttcca

SEQ ID NO: 6536 - DNA, 20 bp, Artificial Sequence
  Synthetic oligonucleotide: CBLB-962
taatctggtggacctcatga

SEQ ID NO: 6537 - DNA, 20 bp, Artificial Sequence
  Synthetic oligonucleotide: CBLB-963
ccaggccagagctaatctgg

SEQ ID NO: 6538 - DNA, 20 bp, Artificial Sequence
  Synthetic oligonucleotide: CBLB-964
cttccaggccagagctaatc

SEQ ID NO: 6539 - DNA, 20 bp, Artificial Sequence
  Synthetic oligonucleotide: CBLB-965
attttagagccattgcttcc

SEQ ID NO: 6540 - DNA, 20 bp, Artificial Sequence
  Synthetic oligonucleotide: CBLB-966
taaacttacctgaaacagcc

SEQ ID NO: 6541 - DNA, 20 bp, Artificial Sequence
  Synthetic oligonucleotide: CBLB-967
ttccgcaaaatagagcccca

SEQ ID NO: 6542 - DNA, 20 bp, Artificial Sequence
  Synthetic oligonucleotide: CBLB-968
gtgagaaatgccatgtaacc

SEQ ID NO: 6543 - DNA, 20 bp, Artificial Sequence
  Synthetic oligonucleotide: CBLB-969
aaagtcttaccttccgggtt

SEQ ID NO: 6544 - DNA, 20 bp, Artificial Sequence
  Synthetic oligonucleotide: CBLB-970
gctaaaaagtcttaccttcc

SEQ ID NO: 6545 - DNA, 20 bp, Artificial Sequence
  Synthetic oligonucleotide: CBLB-971
tgctaaaaagtcttaccttc

SEQ ID NO: 6546 - DNA, 20 bp, Artificial Sequence
  Synthetic oligonucleotide: CBLB-972
ccaatcgagtgcaacttaac

SEQ ID NO: 6547 - DNA, 20 bp, Artificial Sequence
  Synthetic oligonucleotide: CBLB-973
atccccagtcacatagccaa

SEQ ID NO: 6548 - DNA, 20 bp, Artificial Sequence
  Synthetic oligonucleotide: CBLB-974
taagggcttgttatgaggta

SEQ ID NO: 6549 - DNA, 20 bp, Artificial Sequence
  Synthetic oligonucleotide: CBLB-975
tgaaataagggcttgttatg

SEQ ID NO: 6550 - DNA, 20 bp, Artificial Sequence
  Synthetic oligonucleotide: CBLB-976
tcaatcagggcttgaaataa

SEQ ID NO: 6551 - DNA, 20 bp, Artificial Sequence
  Synthetic oligonucleotide: CBLB-977
atcaatcagggcttgaaata

SEQ ID NO: 6552 - DNA, 20 bp, Artificial Sequence
  Synthetic oligonucleotide: CBLB-978
ttccctgctgccatcaatca

SEQ ID NO: 6553 - DNA, 20 bp, Artificial Sequence
  Synthetic oligonucleotide: CBLB-979
cttccctgctgccatcaatc

SEQ ID NO: 6554 - DNA, 20 bp, Artificial Sequence
  Synthetic oligonucleotide: CBLB-980
ggattataactcctcccatc

SEQ ID NO: 6555 - DNA, 20 bp, Artificial Sequence
  Synthetic oligonucleotide: CBLB-981
tcacataatccagttaaatc

SEQ ID NO: 6556 - DNA, 20 bp, Artificial Sequence
  Synthetic oligonucleotide: CBLB-982
tttatatggtcatgaggtgt

SEQ ID NO: 6557 - DNA, 20 bp, Artificial Sequence
  Synthetic oligonucleotide: CBLB-983
gtaacttttatatggtcatg

SEQ ID NO: 6558 - DNA, 20 bp, Artificial Sequence
  Synthetic oligonucleotide: CBLB-984
ttacctgtgtaacttttata

SEQ ID NO: 6559 - DNA, 20 bp, Artificial Sequence
  Synthetic oligonucleotide: CBLB-985
ttcctggaatttggggagga

SEQ ID NO: 6560 - DNA, 20 bp, Artificial Sequence
  Synthetic oligonucleotide: CBLB-986
gttcctggaatttggggagg

SEQ ID NO: 6561 - DNA, 20 bp, Artificial Sequence
  Synthetic oligonucleotide: CBLB-987
attgttcctggaatttgggg

SEQ ID NO: 6562 - DNA, 20 bp, Artificial Sequence
  Synthetic oligonucleotide: CBLB-988
catattgttcctggaatttg

SEQ ID NO: 6563 - DNA, 20 bp, Artificial Sequence
  Synthetic oligonucleotide: CBLB-989
tcatattgttcctggaattt

SEQ ID NO: 6564 - DNA, 20 bp, Artificial Sequence
  Synthetic oligonucleotide: CBLB-990
ttcatattgttcctggaatt

SEQ ID NO: 6565 - DNA, 20 bp, Artificial Sequence
  Synthetic oligonucleotide: CBLB-991
aatataattcatattgttcc

SEQ ID NO: 6566 - DNA, 20 bp, Artificial Sequence
  Synthetic oligonucleotide: CBLB-992
aatcttacagagctgaaaag

SEQ ID NO: 6567 - DNA, 20 bp, Artificial Sequence
  Synthetic oligonucleotide: CBLB-993
gtgcacatcaaatgcccaca

SEQ ID NO: 6568 - DNA, 20 bp, Artificial Sequence
  Synthetic oligonucleotide: CBLB-994
ctgccatgccgtaaggcaag

SEQ ID NO: 6569 - DNA, 20 bp, Artificial Sequence
  Synthetic oligonucleotide: CBLB-995
attatacctgccatgccgta

SEQ ID NO: 6570 - DNA, 20 bp, Artificial Sequence
  Synthetic oligonucleotide: CBLB-996
caaatagaaaatgcatggat

SEQ ID NO: 6571 - DNA, 20 bp, Artificial Sequence
  Synthetic oligonucleotide: CBLB-997
ctaaacaaatagaaaatgca

SEQ ID NO: 6572 - DNA, 20 bp, Artificial Sequence
  Synthetic oligonucleotide: CBLB-998
ttatttcacaacgacagaaa

SEQ ID NO: 6573 - DNA, 20 bp, Artificial Sequence
  Synthetic oligonucleotide: CBLB-999
tttatttcacaacgacagaa

SEQ ID NO: 6574 - DNA, 20 bp, Artificial Sequence
  Synthetic oligonucleotide: CBLB-1000
tcaaaggggtccacgattat

SEQ ID NO: 6575 - DNA, 20 bp, Artificial Sequence
  Synthetic oligonucleotide: CBLB-1001
atcaaaggggtccacgatta

SEQ ID NO: 6576 - DNA, 20 bp, Artificial Sequence
  Synthetic oligonucleotide: CBLB-1002
cttcatctcttggatcaaag

SEQ ID NO: 6577 - DNA, 20 bp, Artificial Sequence
  Synthetic oligonucleotide: CBLB-1003
ccttcatctcttggatcaaa

SEQ ID NO: 6578 - DNA, 20 bp, Artificial Sequence
  Synthetic oligonucleotide: CBLB-1004
gccttcatctcttggatcaa

SEQ ID NO: 6579 - DNA, 20 bp, Artificial Sequence
  Synthetic oligonucleotide: CBLB-1005
cacctggagccttcatctct

SEQ ID NO: 6580 - DNA, 20 bp, Artificial Sequence
  Synthetic oligonucleotide: CBLB-1006
gtcaatgatgctgcaacacc

SEQ ID NO: 6581 - DNA, 20 bp, Artificial Sequence
  Synthetic oligonucleotide: CBLB-1007
ctagcatcggcatgccaaag

SEQ ID NO: 6582 - DNA, 20 bp, Artificial Sequence
  Synthetic oligonucleotide: CBLB-1008
tctagcatcggcatgccaaa

SEQ ID NO: 6583 - DNA, 20 bp, Artificial Sequence
  Synthetic oligonucleotide: CBLB-1009
gtctagcatcggcatgccaa

SEQ ID NO: 6584 - DNA, 20 bp, Artificial Sequence
  Synthetic oligonucleotide: CBLB-1010
tcgtcgtccaagtctagcat

SEQ ID NO: 6585 - DNA, 20 bp, Artificial Sequence
  Synthetic oligonucleotide: CBLB-1011
tgccaaccgattcatcatca

SEQ ID NO: 6586 - DNA, 20 bp, Artificial Sequence
  Synthetic oligonucleotide: CBLB-1012
atgtttctagttttaccttt

SEQ ID NO: 6587 - DNA, 20 bp, Artificial Sequence
  Synthetic oligonucleotide: CBLB-1013
gaggatcctggtgatgtgac

SEQ ID NO: 6588 - DNA, 20 bp, Artificial Sequence
  Synthetic oligonucleotide: CBLB-1014
tgggcaaggggagaggatcc

SEQ ID NO: 6589 - DNA, 20 bp, Artificial Sequence
  Synthetic oligonucleotide: CBLB-1015
tcttctctgggcaaggggag

SEQ ID NO: 6590 - DNA, 20 bp, Artificial Sequence
  Synthetic oligonucleotide: CBLB-1016
ggctttcttctctgggcaag

SEQ ID NO: 6591 - DNA, 20 bp, Artificial Sequence
  Synthetic oligonucleotide: CBLB-1017
tggctttcttctctgggcaa

SEQ ID NO: 6592 - DNA, 20 bp, Artificial Sequence
  Synthetic oligonucleotide: CBLB-1018
gtggctttcttctctgggca

SEQ ID NO: 6593 - DNA, 20 bp, Artificial Sequence
  Synthetic oligonucleotide: CBLB-1019
aggctgtggctttcttctct

SEQ ID NO: 6594 - DNA, 20 bp, Artificial Sequence
  Synthetic oligonucleotide: CBLB-1020
caggctgtggctttcttctc

SEQ ID NO: 6595 - DNA, 20 bp, Artificial Sequence
  Synthetic oligonucleotide: CBLB-1021
atctggagtgggtcaggctg

SEQ ID NO: 6596 - DNA, 20 bp, Artificial Sequence
  Synthetic oligonucleotide: CBLB-1022
tgtgggatctggagtgggtc

SEQ ID NO: 6597 - DNA, 20 bp, Artificial Sequence
  Synthetic oligonucleotide: CBLB-1023
ttagatgtgggatctggagt

SEQ ID NO: 6598 - DNA, 20 bp, Artificial Sequence
  Synthetic oligonucleotide: CBLB-1024
cttagatgtgggatctggag

SEQ ID NO: 6599 - DNA, 20 bp, Artificial Sequence
  Synthetic oligonucleotide: CBLB-1025
gcaggcttagatgtgggatc

SEQ ID NO: 6600 - DNA, 20 bp, Artificial Sequence
  Synthetic oligonucleotide: CBLB-1026
cgggtggcaggcttagatgt

SEQ ID NO: 6601 - DNA, 20 bp, Artificial Sequence
  Synthetic oligonucleotide: CBLB-1027
acgggtggcaggcttagatg

SEQ ID NO: 6602 - DNA, 20 bp, Artificial Sequence
  Synthetic oligonucleotide: CBLB-1028
ggcgaggaggcacgggtggc

SEQ ID NO: 6603 - DNA, 20 bp, Artificial Sequence
  Synthetic oligonucleotide: CBLB-1029
tccaggcgaggaggcacggg

SEQ ID NO: 6604 - DNA, 20 bp, Artificial Sequence
  Synthetic oligonucleotide: CBLB-1030
agatccaggcgaggaggcac

SEQ ID NO: 6605 - DNA, 20 bp, Artificial Sequence
  Synthetic oligonucleotide: CBLB-1031
tagatccaggcgaggaggca

SEQ ID NO: 6606 - DNA, 20 bp, Artificial Sequence
  Synthetic oligonucleotide: CBLB-1032
tgaattagatccaggcgagg

SEQ ID NO: 6607 - DNA, 20 bp, Artificial Sequence
  Synthetic oligonucleotide: CBLB-1033
ttctgaattagatccaggcg

SEQ ID NO: 6608 - DNA, 20 bp, Artificial Sequence
  Synthetic oligonucleotide: CBLB-1034
tgcctttctgaattagatcc

SEQ ID NO: 6609 - DNA, 20 bp, Artificial Sequence
  Synthetic oligonucleotide: CBLB-1035
gaacccgttgggctgccaca

SEQ ID NO: 6610 - DNA, 20 bp, Artificial Sequence
  Synthetic oligonucleotide: CBLB-1036
tgaacccgttgggctgccac

SEQ ID NO: 6611 - DNA, 20 bp, Artificial Sequence
  Synthetic oligonucleotide: CBLB-1037
ctacctttggtgaacccgtt

SEQ ID NO: 6612 - DNA, 20 bp, Artificial Sequence
  Synthetic oligonucleotide: CBLB-1038
tctacctttggtgaacccgt

SEQ ID NO: 6613 - DNA, 20 bp, Artificial Sequence
  Synthetic oligonucleotide: CBLB-1039
taataaaattgatctacctt

SEQ ID NO: 6614 - DNA, 20 bp, Artificial Sequence
  Synthetic oligonucleotide: CBLB-1040
tcttgttttctcaccatgca

SEQ ID NO: 6615 - DNA, 20 bp, Artificial Sequence
  Synthetic oligonucleotide: CBLB-1041
ggaggaggtggtgctgggag

SEQ ID NO: 6616 - DNA, 20 bp, Artificial Sequence
  Synthetic oligonucleotide: CBLB-1042
ttaagggaggaggtggtgct

SEQ ID NO: 6617 - DNA, 20 bp, Artificial Sequence
  Synthetic oligonucleotide: CBLB-1043
cttaagggaggaggtggtgc

SEQ ID NO: 6618 - DNA, 20 bp, Artificial Sequence
  Synthetic oligonucleotide: CBLB-1044
ggatctcttaagggaggagg

SEQ ID NO: 6619 - DNA, 20 bp, Artificial Sequence
  Synthetic oligonucleotide: CBLB-1045
ggaggatctcttaagggagg

SEQ ID NO: 6620 - DNA, 20 bp, Artificial Sequence
  Synthetic oligonucleotide: CBLB-1046
ggaggaggatctcttaaggg

SEQ ID NO: 6621 - DNA, 20 bp, Artificial Sequence
  Synthetic oligonucleotide: CBLB-1047
ggtggaggaggatctcttaa

SEQ ID NO: 6622 - DNA, 20 bp, Artificial Sequence
  Synthetic oligonucleotide: CBLB-1048
cggtggaggaggatctctta

SEQ ID NO: 6623 - DNA, 20 bp, Artificial Sequence
  Synthetic oligonucleotide: CBLB-1049
ctttcaggtggcggtggagg

SEQ ID NO: 6624 - DNA, 20 bp, Artificial Sequence
  Synthetic oligonucleotide: CBLB-1050
ggtctttcaggtggcggtgg

SEQ ID NO: 6625 - DNA, 20 bp, Artificial Sequence
  Synthetic oligonucleotide: CBLB-1051
ggaggtctttcaggtggcgg

SEQ ID NO: 6626 - DNA, 20 bp, Artificial Sequence
  Synthetic oligonucleotide: CBLB-1052
ggtggaggtctttcaggtgg

SEQ ID NO: 6627 - DNA, 20 bp, Artificial Sequence
  Synthetic oligonucleotide: CBLB-1053
attggtggaggtctttcagg

SEQ ID NO: 6628 - DNA, 20 bp, Artificial Sequence
  Synthetic oligonucleotide: CBLB-1054
gggattggtggaggtctttc

SEQ ID NO: 6629 - DNA, 20 bp, Artificial Sequence
  Synthetic oligonucleotide: CBLB-1055
ttgtctggtgggattggtgg

SEQ ID NO: 6630 - DNA, 20 bp, Artificial Sequence
  Synthetic oligonucleotide: CBLB-1056
ctattgtctggtgggattgg

SEQ ID NO: 6631 - DNA, 20 bp, Artificial Sequence
  Synthetic oligonucleotide: CBLB-1057
agtctattgtctggtgggat

SEQ ID NO: 6632 - DNA, 20 bp, Artificial Sequence
  Synthetic oligonucleotide: CBLB-1058
tactcagtctattgtctggt

SEQ ID NO: 6633 - DNA, 20 bp, Artificial Sequence
  Synthetic oligonucleotide: CBLB-1059
ctactcagtctattgtctgg

SEQ ID NO: 6634 - DNA, 20 bp, Artificial Sequence
  Synthetic oligonucleotide: CBLB-1060
tgtctactcagtctattgtc

SEQ ID NO: 6635 - DNA, 20 bp, Artificial Sequence
  Synthetic oligonucleotide: CBLB-1061
aaggcacgctttccacatga

SEQ ID NO: 6636 - DNA, 20 bp, Artificial Sequence
  Synthetic oligonucleotide: CBLB-1062
ggcattggcgggtctctgga

SEQ ID NO: 6637 - DNA, 20 bp, Artificial Sequence
  Synthetic oligonucleotide: CBLB-1063
aagaggcattggcgggtctc

SEQ ID NO: 6638 - DNA, 20 bp, Artificial Sequence
  Synthetic oligonucleotide: CBLB-1064
atgcttcaagaggcattggc

SEQ ID NO: 6639 - DNA, 20 bp, Artificial Sequence
  Synthetic oligonucleotide: CBLB-1065
catgcttcaagaggcattgg

SEQ ID NO: 6640 - DNA, 20 bp, Artificial Sequence
  Synthetic oligonucleotide: CBLB-1066
caccatgcttcaagaggcat

SEQ ID NO: 6641 - DNA, 20 bp, Artificial Sequence
  Synthetic oligonucleotide: CBLB-1067
cgagggcaccatgcttcaag

SEQ ID NO: 6642 - DNA, 20 bp, Artificial Sequence
  Synthetic oligonucleotide: CBLB-1068
tagtcccaaacacatcccga

SEQ ID NO: 6643 - DNA, 20 bp, Artificial Sequence
  Synthetic oligonucleotide: CBLB-1069
ttagtcccaaacacatcccg

SEQ ID NO: 6644 - DNA, 20 bp, Artificial Sequence
  Synthetic oligonucleotide: CBLB-1070
gttttggagagccctcccct

SEQ ID NO: 6645 - DNA, 20 bp, Artificial Sequence
  Synthetic oligonucleotide: CBLB-1071
ctcgctgtgattccaggttt

SEQ ID NO: 6646 - DNA, 20 bp, Artificial Sequence
  Synthetic oligonucleotide: CBLB-1072
tttgaactcgctgtgattcc

SEQ ID NO: 6647 - DNA, 20 bp, Artificial Sequence
  Synthetic oligonucleotide: CBLB-1073
tgtgtttccgcataagcact

SEQ ID NO: 6648 - DNA, 20 bp, Artificial Sequence
  Synthetic oligonucleotide: CBLB-1074
ctgtgtttccgcataagcac

SEQ ID NO: 6649 - DNA, 20 bp, Artificial Sequence
  Synthetic oligonucleotide: CBLB-1075
ctccttctaaaggcaaatca

SEQ ID NO: 6650 - DNA, 20 bp, Artificial Sequence
  Synthetic oligonucleotide: CBLB-1076
cttaccttagctccttctaa

SEQ ID NO: 6651 - DNA, 20 bp, Artificial Sequence
  Synthetic oligonucleotide: CBLB-1077
ttcacttccaaggtgaccat

SEQ ID NO: 6652 - DNA, 20 bp, Artificial Sequence
  Synthetic oligonucleotide: CBLB-1078
catcatattcttcacttcca

SEQ ID NO: 6653 - RNA, 20 nt, Artificial Sequence
  Synthetic oligonucleotide: CBLB-1079
ggaggaggagaaagccgggg

SEQ ID NO: 6654 - RNA, 20 nt, Artificial Sequence
  Synthetic oligonucleotide: CBLB-1080
ggaggaggaggagaaagccg

SEQ ID NO: 6655 - DNA, 20 bp, Artificial Sequence
  Synthetic oligonucleotide: CBLB-1081
tggaggaggaggagaaagcc

SEQ ID NO: 6656 - DNA, 20 bp, Artificial Sequence
  Synthetic oligonucleotide: CBLB-1082
ctggaggaggaggagaaagc

SEQ ID NO: 6657 - DNA, 20 bp, Artificial Sequence
  Synthetic oligonucleotide: CBLB-1083
agggtggtaactggaggagg

SEQ ID NO: 6658 - DNA, 20 bp, Artificial Sequence
  Synthetic oligonucleotide: CBLB-1084
aggagggtggtaactggagg

SEQ ID NO: 6659 - DNA, 20 bp, Artificial Sequence
  Synthetic oligonucleotide: CBLB-1085
gggaggagggtggtaactgg

SEQ ID NO: 6660 - DNA, 20 bp, Artificial Sequence
  Synthetic oligonucleotide: CBLB-1086
ctagggaggagggtggtaac

SEQ ID NO: 6661 - DNA, 20 bp, Artificial Sequence
  Synthetic oligonucleotide: CBLB-1087
ctttatgctagggaggaggg

SEQ ID NO: 6662 - DNA, 20 bp, Artificial Sequence
  Synthetic oligonucleotide: CBLB-1088
tcactttatgctagggagga

SEQ ID NO: 6663 - DNA, 20 bp, Artificial Sequence
  Synthetic oligonucleotide: CBLB-1089
ctcactttatgctagggagg

SEQ ID NO: 6664 - DNA, 20 bp, Artificial Sequence
  Synthetic oligonucleotide: CBLB-1090
aaactcactttatgctaggg

SEQ ID NO: 6665 - DNA, 20 bp, Artificial Sequence
  Synthetic oligonucleotide: CBLB-1091
acaaaactcactttatgcta

SEQ ID NO: 6666 - DNA, 20 bp, Artificial Sequence
  Synthetic oligonucleotide: CBLB-1092
aacaaaactcactttatgct

SEQ ID NO: 6667 - DNA, 20 bp, Artificial Sequence
  Synthetic oligonucleotide: CBLB-1093
cggaccagtacacctaccag

SEQ ID NO: 6668 - DNA, 20 bp, Artificial Sequence
  Synthetic oligonucleotide: CBLB-1094
acggaccagtacacctacca

SEQ ID NO: 6669 - DNA, 20 bp, Artificial Sequence
  Synthetic oligonucleotide: CBLB-1095
aacggaccagtacacctacc

SEQ ID NO: 6670 - DNA, 20 bp, Artificial Sequence
  Synthetic oligonucleotide: CBLB-1096
tctgaaagagaatttgctaa

SEQ ID NO: 6671 - DNA, 20 bp, Artificial Sequence
  Synthetic oligonucleotide: CBLB-1097
catcatcatcttcctctact

SEQ ID NO: 6672 - DNA, 20 bp, Artificial Sequence
  Synthetic oligonucleotide: CBLB-1098
tcatcatcatcttcctctac

SEQ ID NO: 6673 - DNA, 20 bp, Artificial Sequence
  Synthetic oligonucleotide: CBLB-1099
agggaaacagggtgggatga

SEQ ID NO: 6674 - DNA, 20 bp, Artificial Sequence
  Synthetic oligonucleotide: CBLB-1100
tgaattcagggaaacagggt

SEQ ID NO: 6675 - DNA, 20 bp, Artificial Sequence
  Synthetic oligonucleotide: CBLB-1101
gtgaattcagggaaacaggg

SEQ ID NO: 6676 - DNA, 20 bp, Artificial Sequence
  Synthetic oligonucleotide: CBLB-1102
gttgtgaattcagggaaaca

SEQ ID NO: 6677 - DNA, 20 bp, Artificial Sequence
  Synthetic oligonucleotide: CBLB-1103
ggttgtgaattcagggaaac

SEQ ID NO: 6678 - DNA, 20 bp, Artificial Sequence
  Synthetic oligonucleotide: CBLB-1104
atgagatggttgtgaattca

SEQ ID NO: 6679 - DNA, 20 bp, Artificial Sequence
  Synthetic oligonucleotide: CBLB-1105
aatgagatggttgtgaattc

SEQ ID NO: 6680 - DNA, 20 bp, Artificial Sequence
  Synthetic oligonucleotide: CBLB-1106
tttacattatgacaatgaga

SEQ ID NO: 6681 - DNA, 20 bp, Artificial Sequence
  Synthetic oligonucleotide: CBLB-1107
ccatactcttaccgaacagg

SEQ ID NO: 6682 - DNA, 20 bp, Artificial Sequence
  Synthetic oligonucleotide: CBLB-1108
tgcccatactcttaccgaac

SEQ ID NO: 6683 - DNA, 20 bp, Artificial Sequence
  Synthetic oligonucleotide: CBLB-1109
accattatcacaagacctaa

SEQ ID NO: 6684 - DNA, 20 bp, Artificial Sequence
  Synthetic oligonucleotide: CBLB-1110
tttgatttcttctctgaaga

SEQ ID NO: 6685 - DNA, 20 bp, Artificial Sequence
  Synthetic oligonucleotide: CBLB-1111
ttaaatatatgcttaagtca

SEQ ID NO: 6686 - DNA, 20 bp, Artificial Sequence
  Synthetic oligonucleotide: CBLB-1112
tttaaatatatgcttaagtc

SEQ ID NO: 6687 - DNA, 20 bp, Artificial Sequence
  Synthetic oligonucleotide: CBLB-1113
gaatcaaaaacatctcctag

SEQ ID NO: 6688 - DNA, 20 bp, Artificial Sequence
  Synthetic oligonucleotide: CBLB-1114
tggtaatggcacgggatcag

SEQ ID NO: 6689 - DNA, 20 bp, Artificial Sequence
  Synthetic oligonucleotide: CBLB-1115
ctggcaggtggtaatggcac

SEQ ID NO: 6690 - DNA, 20 bp, Artificial Sequence
  Synthetic oligonucleotide: CBLB-1116
cctggcaggtggtaatggca

SEQ ID NO: 6691 - DNA, 20 bp, Artificial Sequence
  Synthetic oligonucleotide: CBLB-1117
ggaggcctggcaggtggtaa

SEQ ID NO: 6692 - DNA, 20 bp, Artificial Sequence
  Synthetic oligonucleotide: CBLB-1118
cgagttggaggcctggcagg

SEQ ID NO: 6693 - DNA, 20 bp, Artificial Sequence
  Synthetic oligonucleotide: CBLB-1119
tcccgagttggaggcctggc

SEQ ID NO: 6694 - DNA, 20 bp, Artificial Sequence
  Synthetic oligonucleotide: CBLB-1120
attgtcccgagttggaggcc

SEQ ID NO: 6695 - DNA, 20 bp, Artificial Sequence
  Synthetic oligonucleotide: CBLB-1121
tttggattgtcccgagttgg

SEQ ID NO: 6696 - DNA, 20 bp, Artificial Sequence
  Synthetic oligonucleotide: CBLB-1122
tgctttggattgtcccgagt

SEQ ID NO: 6697 - DNA, 20 bp, Artificial Sequence
  Synthetic oligonucleotide: CBLB-1123
ttgagtgaagaaccatgctt

SEQ ID NO: 6698 - DNA, 20 bp, Artificial Sequence
  Synthetic oligonucleotide: CBLB-1124
atgagaagatcataatcaga

SEQ ID NO: 6699 - DNA, 20 bp, Artificial Sequence
  Synthetic oligonucleotide: CBLB-1125
gatgagaagatcataatcag

SEQ ID NO: 6700 - DNA, 20 bp, Artificial Sequence
  Synthetic oligonucleotide: CBLB-1126
aaaggtttcaacctaatgga

SEQ ID NO: 6701 - DNA, 20 bp, Artificial Sequence
  Synthetic oligonucleotide: CBLB-1127
taaaggtttcaacctaatgg

SEQ ID NO: 6702 - DNA, 20 bp, Artificial Sequence
  Synthetic oligonucleotide: CBLB-1128
ttttaaaggtttcaacctaa

SEQ ID NO: 6703 - DNA, 20 bp, Artificial Sequence
  Synthetic oligonucleotide: CBLB-1129
gttgttcaaaacttttttaa

SEQ ID NO: 6704 - DNA, 20 bp, Artificial Sequence
  Synthetic oligonucleotide: CBLB-1130
cttcacctgcatttaaagaa

SEQ ID NO: 6705 - DNA, 20 bp, Artificial Sequence
  Synthetic oligonucleotide: CBLB-1131
aggtgggagagatggaggga

SEQ ID NO: 6706 - DNA, 20 bp, Artificial Sequence
  Synthetic oligonucleotide: CBLB-1132
gaggtgggagagatggaggg

SEQ ID NO: 6707 - DNA, 20 bp, Artificial Sequence
  Synthetic oligonucleotide: CBLB-1133
ggggaggtgggagagatgga

SEQ ID NO: 6708 - DNA, 20 bp, Artificial Sequence
  Synthetic oligonucleotide: CBLB-1134
gggggaggtgggagagatgg

SEQ ID NO: 6709 - DNA, 20 bp, Artificial Sequence
  Synthetic oligonucleotide: CBLB-1135
ggtgggggaggtgggagaga

SEQ ID NO: 6710 - DNA, 20 bp, Artificial Sequence
  Synthetic oligonucleotide: CBLB-1136
ttgcaggaggtgggggaggt

SEQ ID NO: 6711 - DNA, 20 bp, Artificial Sequence
  Synthetic oligonucleotide: CBLB-1137
cttgcaggaggtgggggagg

SEQ ID NO: 6712 - DNA, 20 bp, Artificial Sequence
  Synthetic oligonucleotide: CBLB-1138
tgccttgcaggaggtggggg

SEQ ID NO: 6713 - DNA, 20 bp, Artificial Sequence
  Synthetic oligonucleotide: CBLB-1139
ctatgccttgcaggaggtgg

SEQ ID NO: 6714 - DNA, 20 bp, Artificial Sequence
  Synthetic oligonucleotide: CBLB-1140
actatgccttgcaggaggtg

SEQ ID NO: 6715 - DNA, 20 bp, Artificial Sequence
  Synthetic oligonucleotide: CBLB-1141
gactatgccttgcaggaggt

SEQ ID NO: 6716 - DNA, 20 bp, Artificial Sequence
  Synthetic oligonucleotide: CBLB-1142
agactatgccttgcaggagg

SEQ ID NO: 6717 - DNA, 20 bp, Artificial Sequence
  Synthetic oligonucleotide: CBLB-1143
atgagactatgccttgcagg

SEQ ID NO: 6718 - DNA, 20 bp, Artificial Sequence
  Synthetic oligonucleotide: CBLB-1144
tcaatgagactatgccttgc

SEQ ID NO: 6719 - DNA, 20 bp, Artificial Sequence
  Synthetic oligonucleotide: CBLB-1145
ggccggctactggagccagg

SEQ ID NO: 6720 - DNA, 20 bp, Artificial Sequence
  Synthetic oligonucleotide: CBLB-1146
gatggccggctactggagcc

SEQ ID NO: 6721 - DNA, 20 bp, Artificial Sequence
  Synthetic oligonucleotide: CBLB-1147
tcctgaggatggccggctac

SEQ ID NO: 6722 - DNA, 20 bp, Artificial Sequence
  Synthetic oligonucleotide: CBLB-1148
gatcctgtcctgaggatggc

SEQ ID NO: 6723 - DNA, 20 bp, Artificial Sequence
  Synthetic oligonucleotide: CBLB-1149
aaaagatcctgtcctgagga

SEQ ID NO: 6724 - DNA, 20 bp, Artificial Sequence
  Synthetic oligonucleotide: CBLB-1150
aagaaaaagatcctgtcctg

SEQ ID NO: 6725 - DNA, 20 bp, Artificial Sequence
  Synthetic oligonucleotide: CBLB-1151
ggcttttccctcctacctga

SEQ ID NO: 6726 - DNA, 20 bp, Artificial Sequence
  Synthetic oligonucleotide: CBLB-1152
ccacttgctagatcaacaaa

SEQ ID NO: 6727 - DNA, 20 bp, Artificial Sequence
  Synthetic oligonucleotide: CBLB-1153
gccacttgctagatcaacaa

SEQ ID NO: 6728 - DNA, 20 bp, Artificial Sequence
  Synthetic oligonucleotide: CBLB-1154
tagcaggaggcaaaggaact

SEQ ID NO: 6729 - DNA, 20 bp, Artificial Sequence
  Synthetic oligonucleotide: CBLB-1155
aaccttctagcaggaggcaa

SEQ ID NO: 6730 - DNA, 20 bp, Artificial Sequence
  Synthetic oligonucleotide: CBLB-1156
cctggtaaccttctagcagg

SEQ ID NO: 6731 - DNA, 20 bp, Artificial Sequence
  Synthetic oligonucleotide: CBLB-1157
tcacctggtaaccttctagc

SEQ ID NO: 6732 - DNA, 20 bp, Artificial Sequence
  Synthetic oligonucleotide: CBLB-1158
ttagttttgacattttcacc

SEQ ID NO: 6733 - DNA, 20 bp, Artificial Sequence
  Synthetic oligonucleotide: CBLB-1159
gccaactcacctgaacatga

SEQ ID NO: 6734 - DNA, 20 bp, Artificial Sequence
  Synthetic oligonucleotide: CBLB-1160
cgtggtttagggggtctggc

SEQ ID NO: 6735 - DNA, 20 bp, Artificial Sequence
  Synthetic oligonucleotide: CBLB-1161
cggtcgtggtttagggggtc

SEQ ID NO: 6736 - DNA, 20 bp, Artificial Sequence
  Synthetic oligonucleotide: CBLB-1162
ctgcgcggtcgtggtttagg

SEQ ID NO: 6737 - DNA, 20 bp, Artificial Sequence
  Synthetic oligonucleotide: CBLB-1163
cctgcgcggtcgtggtttag

SEQ ID NO: 6738 - DNA, 20 bp, Artificial Sequence
  Synthetic oligonucleotide: CBLB-1164
tcctgcgcggtcgtggttta

SEQ ID NO: 6739 - DNA, 20 bp, Artificial Sequence
  Synthetic oligonucleotide: CBLB-1165
gtcctgcgcggtcgtggttt

SEQ ID NO: 6740 - DNA, 20 bp, Artificial Sequence
  Synthetic oligonucleotide: CBLB-1166
ggtgcagtcctgcgcggtcg

SEQ ID NO: 6741 - DNA, 20 bp, Artificial Sequence
  Synthetic oligonucleotide: CBLB-1167
atttctggtgcagtcctgcg

SEQ ID NO: 6742 - DNA, 20 bp, Artificial Sequence
  Synthetic oligonucleotide: CBLB-1168
ggttttctgtggtgaatttc

SEQ ID NO: 6743 - DNA, 20 bp, Artificial Sequence
  Synthetic oligonucleotide: CBLB-1169
caggcccatggggttttctg

SEQ ID NO: 6744 - DNA, 20 bp, Artificial Sequence
  Synthetic oligonucleotide: CBLB-1170
aatgccgcctcaggcccatg

SEQ ID NO: 6745 - DNA, 20 bp, Artificial Sequence
  Synthetic oligonucleotide: CBLB-1171
caatgccgcctcaggcccat

SEQ ID NO: 6746 - DNA, 20 bp, Artificial Sequence
  Synthetic oligonucleotide: CBLB-1172
ccaatgccgcctcaggccca

SEQ ID NO: 6747 - DNA, 20 bp, Artificial Sequence
  Synthetic oligonucleotide: CBLB-1173
acattttccaatgccgcctc

SEQ ID NO: 6748 - DNA, 20 bp, Artificial Sequence
  Synthetic oligonucleotide: CBLB-1174
ggctctcttcacctcttcaa

SEQ ID NO: 6749 - DNA, 20 bp, Artificial Sequence
  Synthetic oligonucleotide: CBLB-1175
attattctgggctatctcta

SEQ ID NO: 6750 - DNA, 20 bp, Artificial Sequence
  Synthetic oligonucleotide: CBLB-1176
ggcaacttcgacattattct

SEQ ID NO: 6751 - DNA, 20 bp, Artificial Sequence
  Synthetic oligonucleotide: CBLB-1177
gggcaacttcgacattattc

SEQ ID NO: 6752 - DNA, 20 bp, Artificial Sequence
  Synthetic oligonucleotide: CBLB-1178
aaattctcggaggatgctcc

SEQ ID NO: 6753 - DNA, 20 bp, Artificial Sequence
  Synthetic oligonucleotide: CBLB-1179
caaattctcggaggatgctc

SEQ ID NO: 6754 - DNA, 20 bp, Artificial Sequence
  Synthetic oligonucleotide: CBLB-1180
gagggaaggcaaattctcgg

SEQ ID NO: 6755 - DNA, 20 bp, Artificial Sequence
  Synthetic oligonucleotide: CBLB-1181
gaggagggaaggcaaattct

SEQ ID NO: 6756 - DNA, 20 bp, Artificial Sequence
  Synthetic oligonucleotide: CBLB-1182
tggggatactggaggaggga

SEQ ID NO: 6757 - DNA, 20 bp, Artificial Sequence
  Synthetic oligonucleotide: CBLB-1183
gacgtggggatactggagga

SEQ ID NO: 6758 - DNA, 20 bp, Artificial Sequence
  Synthetic oligonucleotide: CBLB-1184
agacgtggggatactggagg

SEQ ID NO: 6759 - DNA, 20 bp, Artificial Sequence
  Synthetic oligonucleotide: CBLB-1185
tttagacgtggggatactgg

SEQ ID NO: 6760 - DNA, 20 bp, Artificial Sequence
  Synthetic oligonucleotide: CBLB-1186
agatttagacgtggggatac

SEQ ID NO: 6761 - DNA, 20 bp, Artificial Sequence
  Synthetic oligonucleotide: CBLB-1187
ctgctatagatttagacgtg

SEQ ID NO: 6762 - DNA, 20 bp, Artificial Sequence
  Synthetic oligonucleotide: CBLB-1188
gctgctatagatttagacgt

SEQ ID NO: 6763 - DNA, 20 bp, Artificial Sequence
  Synthetic oligonucleotide: CBLB-1189
ggctgctatagatttagacg

SEQ ID NO: 6764 - DNA, 20 bp, Artificial Sequence
  Synthetic oligonucleotide: CBLB-1190
cattttggtgtctacagttc

SEQ ID NO: 6765 - DNA, 17 bp, Artificial Sequence
  Synthetic oligonucleotide: CBLB-1191
ttcgtctgtaggcacaa

SEQ ID NO: 6766 - DNA, 17 bp, Artificial Sequence
  Synthetic oligonucleotide: CBLB-1192
tttcgtctgtaggcaca

SEQ ID NO: 6767 - DNA, 17 bp, Artificial Sequence
  Synthetic oligonucleotide: CBLB-1193
tgtgagatttcgtctgt

SEQ ID NO: 6768 - DNA, 17 bp, Artificial Sequence
  Synthetic oligonucleotide: CBLB-1194
catgtgactgaagataa

SEQ ID NO: 6769 - DNA, 17 bp, Artificial Sequence
  Synthetic oligonucleotide: CBLB-1195
gcatgtgactgaagata

SEQ ID NO: 6770 - DNA, 17 bp, Artificial Sequence
  Synthetic oligonucleotide: CBLB-1196
ccctggaattgaccatt

SEQ ID NO: 6771 - DNA, 17 bp, Artificial Sequence
  Synthetic oligonucleotide: CBLB-1197
tccctggaattgaccat

SEQ ID NO: 6772 - DNA, 17 bp, Artificial Sequence
  Synthetic oligonucleotide: CBLB-1198
tacgaaagttatctccc

SEQ ID NO: 6773 - DNA, 17 bp, Artificial Sequence
  Synthetic oligonucleotide: CBLB-1199
tgcaaggtggaaaaaaa

SEQ ID NO: 6774 - DNA, 17 bp, Artificial Sequence
  Synthetic oligonucleotide: CBLB-1200
gtgcaaggtggaaaaaa

SEQ ID NO: 6775 - DNA, 17 bp, Artificial Sequence
  Synthetic oligonucleotide: CBLB-1201
gatagttctgtgcaagg

SEQ ID NO: 6776 - DNA, 17 bp, Artificial Sequence
  Synthetic oligonucleotide: CBLB-1202
tacgatagttctgtgca

SEQ ID NO: 6777 - DNA, 17 bp, Artificial Sequence
  Synthetic oligonucleotide: CBLB-1203
tgtctgaatactttcca

SEQ ID NO: 6778 - DNA, 17 bp, Artificial Sequence
  Synthetic oligonucleotide: CBLB-1204
tctggtggacctcatga

SEQ ID NO: 6779 - DNA, 17 bp, Artificial Sequence
  Synthetic oligonucleotide: CBLB-1205
ggccagagctaatctgg

SEQ ID NO: 6780 - DNA, 17 bp, Artificial Sequence
  Synthetic oligonucleotide: CBLB-1206
ccaggccagagctaatc

SEQ ID NO: 6781 - DNA, 17 bp, Artificial Sequence
  Synthetic oligonucleotide: CBLB-1207
ttagagccattgcttcc

SEQ ID NO: 6782 - DNA, 17 bp, Artificial Sequence
  Synthetic oligonucleotide: CBLB-1208
acttacctgaaacagcc

SEQ ID NO: 6783 - DNA, 17 bp, Artificial Sequence
  Synthetic oligonucleotide: CBLB-1209
cgcaaaatagagcccca

SEQ ID NO: 6784 - DNA, 17 bp, Artificial Sequence
  Synthetic oligonucleotide: CBLB-1210
agaaatgccatgtaacc

SEQ ID NO: 6785 - DNA, 17 bp, Artificial Sequence
  Synthetic oligonucleotide: CBLB-1211
gtcttaccttccgggtt

SEQ ID NO: 6786 - DNA, 17 bp, Artificial Sequence
  Synthetic oligonucleotide: CBLB-1212
aaaaagtcttaccttcc

SEQ ID NO: 6787 - DNA, 17 bp, Artificial Sequence
  Synthetic oligonucleotide: CBLB-1213
taaaaagtcttaccttc

SEQ ID NO: 6788 - DNA, 17 bp, Artificial Sequence
  Synthetic oligonucleotide: CBLB-1214
atcgagtgcaacttaac

SEQ ID NO: 6789 - DNA, 17 bp, Artificial Sequence
  Synthetic oligonucleotide: CBLB-1215
cccagtcacatagccaa

SEQ ID NO: 6790 - DNA, 17 bp, Artificial Sequence
  Synthetic oligonucleotide: CBLB-1216
gggcttgttatgaggta

SEQ ID NO: 6791 - DNA, 17 bp, Artificial Sequence
  Synthetic oligonucleotide: CBLB-1217
aataagggcttgttatg

SEQ ID NO: 6792 - DNA, 17 bp, Artificial Sequence
  Synthetic oligonucleotide: CBLB-1218
atcagggcttgaaataa

SEQ ID NO: 6793 - DNA, 17 bp, Artificial Sequence
  Synthetic oligonucleotide: CBLB-1219
aatcagggcttgaaata

SEQ ID NO: 6794 - DNA, 17 bp, Artificial Sequence
  Synthetic oligonucleotide: CBLB-1220
cctgctgccatcaatca

SEQ ID NO: 6795 - DNA, 17 bp, Artificial Sequence
  Synthetic oligonucleotide: CBLB-1221
ccctgctgccatcaatc

SEQ ID NO: 6796 - DNA, 17 bp, Artificial Sequence
  Synthetic oligonucleotide: CBLB-1222
ttataactcctcccatc

SEQ ID NO: 6797 - DNA, 17 bp, Artificial Sequence
  Synthetic oligonucleotide: CBLB-1223
cataatccagttaaatc

SEQ ID NO: 6798 - DNA, 17 bp, Artificial Sequence
  Synthetic oligonucleotide: CBLB-1224
atatggtcatgaggtgt

SEQ ID NO: 6799 - DNA, 17 bp, Artificial Sequence
  Synthetic oligonucleotide: CBLB-1225
acttttatatggtcatg

SEQ ID NO: 6800 - DNA, 17 bp, Artificial Sequence
  Synthetic oligonucleotide: CBLB-1226
cctgtgtaacttttata

SEQ ID NO: 6801 - DNA, 17 bp, Artificial Sequence
  Synthetic oligonucleotide: CBLB-1227
ctggaatttggggagga

SEQ ID NO: 6802 - DNA, 17 bp, Artificial Sequence
  Synthetic oligonucleotide: CBLB-1228
cctggaatttggggagg

SEQ ID NO: 6803 - DNA, 17 bp, Artificial Sequence
  Synthetic oligonucleotide: CBLB-1229
gttcctggaatttgggg

SEQ ID NO: 6804 - DNA, 17 bp, Artificial Sequence
  Synthetic oligonucleotide: CBLB-1230
attgttcctggaatttg

SEQ ID NO: 6805 - DNA, 17 bp, Artificial Sequence
  Synthetic oligonucleotide: CBLB-1231
tattgttcctggaattt

SEQ ID NO: 6806 - DNA, 17 bp, Artificial Sequence
  Synthetic oligonucleotide: CBLB-1232
atattgttcctggaatt

SEQ ID NO: 6807 - DNA, 17 bp, Artificial Sequence
  Synthetic oligonucleotide: CBLB-1233
ataattcatattgttcc

SEQ ID NO: 6808 - DNA, 17 bp, Artificial Sequence
  Synthetic oligonucleotide: CBLB-1234
cttacagagctgaaaag

SEQ ID NO: 6809 - DNA, 17 bp, Artificial Sequence
  Synthetic oligonucleotide: CBLB-1235
cacatcaaatgcccaca

SEQ ID NO: 6810 - DNA, 17 bp, Artificial Sequence
  Synthetic oligonucleotide: CBLB-1236
ccatgccgtaaggcaag

SEQ ID NO: 6811 - DNA, 17 bp, Artificial Sequence
  Synthetic oligonucleotide: CBLB-1237
atacctgccatgccgta

SEQ ID NO: 6812 - DNA, 17 bp, Artificial Sequence
  Synthetic oligonucleotide: CBLB-1238
atagaaaatgcatggat

SEQ ID NO: 6813 - DNA, 17 bp, Artificial Sequence
  Synthetic oligonucleotide: CBLB-1239
aacaaatagaaaatgca

SEQ ID NO: 6814 - DNA, 17 bp, Artificial Sequence
  Synthetic oligonucleotide: CBLB-1240
tttcacaacgacagaaa

SEQ ID NO: 6815 - DNA, 17 bp, Artificial Sequence
  Synthetic oligonucleotide: CBLB-1241
atttcacaacgacagaa

SEQ ID NO: 6816 - DNA, 17 bp, Artificial Sequence
  Synthetic oligonucleotide: CBLB-1242
aaggggtccacgattat

SEQ ID NO: 6817 - DNA, 17 bp, Artificial Sequence
  Synthetic oligonucleotide: CBLB-1243
aaaggggtccacgatta

SEQ ID NO: 6818 - DNA, 17 bp, Artificial Sequence
  Synthetic oligonucleotide: CBLB-1244
catctcttggatcaaag

SEQ ID NO: 6819 - DNA, 17 bp, Artificial Sequence
  Synthetic oligonucleotide: CBLB-1245
tcatctcttggatcaaa

SEQ ID NO: 6820 - DNA, 17 bp, Artificial Sequence
  Synthetic oligonucleotide: CBLB-1246
ttcatctcttggatcaa

SEQ ID NO: 6821 - DNA, 17 bp, Artificial Sequence
  Synthetic oligonucleotide: CBLB-1247
ctggagccttcatctct

SEQ ID NO: 6822 - DNA, 17 bp, Artificial Sequence
  Synthetic oligonucleotide: CBLB-1248
aatgatgctgcaacacc

SEQ ID NO: 6823 - DNA, 17 bp, Artificial Sequence
  Synthetic oligonucleotide: CBLB-1249
gcatcggcatgccaaag

SEQ ID NO: 6824 - DNA, 17 bp, Artificial Sequence
  Synthetic oligonucleotide: CBLB-1250
agcatcggcatgccaaa

SEQ ID NO: 6825 - DNA, 17 bp, Artificial Sequence
  Synthetic oligonucleotide: CBLB-1251
tagcatcggcatgccaa

SEQ ID NO: 6826 - DNA, 17 bp, Artificial Sequence
  Synthetic oligonucleotide: CBLB-1252
tcgtccaagtctagcat

SEQ ID NO: 6827 - DNA, 17 bp, Artificial Sequence
  Synthetic oligonucleotide: CBLB-1253
caaccgattcatcatca

SEQ ID NO: 6828 - DNA, 17 bp, Artificial Sequence
  Synthetic oligonucleotide: CBLB-1254
tttctagttttaccttt

SEQ ID NO: 6829 - DNA, 17 bp, Artificial Sequence
  Synthetic oligonucleotide: CBLB-1255
gatcctggtgatgtgac

SEQ ID NO: 6830 - DNA, 17 bp, Artificial Sequence
  Synthetic oligonucleotide: CBLB-1256
gcaaggggagaggatcc

SEQ ID NO: 6831 - DNA, 17 bp, Artificial Sequence
  Synthetic oligonucleotide: CBLB-1257
tctctgggcaaggggag

SEQ ID NO: 6832 - DNA, 17 bp, Artificial Sequence
  Synthetic oligonucleotide: CBLB-1258
tttcttctctgggcaag

SEQ ID NO: 6833 - DNA, 17 bp, Artificial Sequence
  Synthetic oligonucleotide: CBLB-1259
ctttcttctctgggcaa

SEQ ID NO: 6834 - DNA, 17 bp, Artificial Sequence
  Synthetic oligonucleotide: CBLB-1260
gctttcttctctgggca

SEQ ID NO: 6835 - DNA, 17 bp, Artificial Sequence
  Synthetic oligonucleotide: CBLB-1261
ctgtggctttcttctct

SEQ ID NO: 6836 - DNA, 17 bp, Artificial Sequence
  Synthetic oligonucleotide: CBLB-1262
gctgtggctttcttctc

SEQ ID NO: 6837 - DNA, 17 bp, Artificial Sequence
  Synthetic oligonucleotide: CBLB-1263
tggagtgggtcaggctg

SEQ ID NO: 6838 - DNA, 17 bp, Artificial Sequence
  Synthetic oligonucleotide: CBLB-1264
gggatctggagtgggtc

SEQ ID NO: 6839 - DNA, 17 bp, Artificial Sequence
  Synthetic oligonucleotide: CBLB-1265
gatgtgggatctggagt

SEQ ID NO: 6840 - DNA, 17 bp, Artificial Sequence
  Synthetic oligonucleotide: CBLB-1266
agatgtgggatctggag

SEQ ID NO: 6841 - DNA, 17 bp, Artificial Sequence
  Synthetic oligonucleotide: CBLB-1267
ggcttagatgtgggatc

SEQ ID NO: 6842 - DNA, 17 bp, Artificial Sequence
  Synthetic oligonucleotide: CBLB-1268
gtggcaggcttagatgt

SEQ ID NO: 6843 - DNA, 17 bp, Artificial Sequence
  Synthetic oligonucleotide: CBLB-1269
ggtggcaggcttagatg

SEQ ID NO: 6844 - DNA, 17 bp, Artificial Sequence
  Synthetic oligonucleotide: CBLB-1270
gaggaggcacgggtggc

SEQ ID NO: 6845 - RNA, 17 nt, Artificial Sequence
  Synthetic oligonucleotide: CBLB-1271
aggcgaggaggcacggg

SEQ ID NO: 6846 - DNA, 17 bp, Artificial Sequence
  Synthetic oligonucleotide: CBLB-1272
tccaggcgaggaggcac

SEQ ID NO: 6847 - DNA, 17 bp, Artificial Sequence
  Synthetic oligonucleotide: CBLB-1273
atccaggcgaggaggca

SEQ ID NO: 6848 - DNA, 17 bp, Artificial Sequence
  Synthetic oligonucleotide: CBLB-1274
attagatccaggcgagg

SEQ ID NO: 6849 - DNA, 17 bp, Artificial Sequence
  Synthetic oligonucleotide: CBLB-1275
tgaattagatccaggcg

SEQ ID NO: 6850 - DNA, 17 bp, Artificial Sequence
  Synthetic oligonucleotide: CBLB-1276
ctttctgaattagatcc

SEQ ID NO: 6851 - DNA, 17 bp, Artificial Sequence
  Synthetic oligonucleotide: CBLB-1277
cccgttgggctgccaca

SEQ ID NO: 6852 - DNA, 17 bp, Artificial Sequence
  Synthetic oligonucleotide: CBLB-1278
acccgttgggctgccac

SEQ ID NO: 6853 - DNA, 17 bp, Artificial Sequence
  Synthetic oligonucleotide: CBLB-1279
cctttggtgaacccgtt

SEQ ID NO: 6854 - DNA, 17 bp, Artificial Sequence
  Synthetic oligonucleotide: CBLB-1280
acctttggtgaacccgt

SEQ ID NO: 6855 - DNA, 17 bp, Artificial Sequence
  Synthetic oligonucleotide: CBLB-1281
taaaattgatctacctt

SEQ ID NO: 6856 - DNA, 17 bp, Artificial Sequence
  Synthetic oligonucleotide: CBLB-1282
tgttttctcaccatgca

SEQ ID NO: 6857 - DNA, 17 bp, Artificial Sequence
  Synthetic oligonucleotide: CBLB-1283
ggaggtggtgctgggag

SEQ ID NO: 6858 - DNA, 17 bp, Artificial Sequence
  Synthetic oligonucleotide: CBLB-1284
agggaggaggtggtgct

SEQ ID NO: 6859 - DNA, 17 bp, Artificial Sequence
  Synthetic oligonucleotide: CBLB-1285
aagggaggaggtggtgc

SEQ ID NO: 6860 - DNA, 17 bp, Artificial Sequence
  Synthetic oligonucleotide: CBLB-1286
tctcttaagggaggagg

SEQ ID NO: 6861 - DNA, 17 bp, Artificial Sequence
  Synthetic oligonucleotide: CBLB-1287
ggatctcttaagggagg

SEQ ID NO: 6862 - DNA, 17 bp, Artificial Sequence
  Synthetic oligonucleotide: CBLB-1288
ggaggatctcttaaggg

SEQ ID NO: 6863 - DNA, 17 bp, Artificial Sequence
  Synthetic oligonucleotide: CBLB-1289
ggaggaggatctcttaa

SEQ ID NO: 6864 - DNA, 17 bp, Artificial Sequence
  Synthetic oligonucleotide: CBLB-1290
tggaggaggatctctta

SEQ ID NO: 6865 - DNA, 17 bp, Artificial Sequence
  Synthetic oligonucleotide: CBLB-1291
tcaggtggcggtggagg

SEQ ID NO: 6866 - DNA, 17 bp, Artificial Sequence
  Synthetic oligonucleotide: CBLB-1292
ctttcaggtggcggtgg

SEQ ID NO: 6867 - DNA, 17 bp, Artificial Sequence
  Synthetic oligonucleotide: CBLB-1293
ggtctttcaggtggcgg

SEQ ID NO: 6868 - DNA, 17 bp, Artificial Sequence
  Synthetic oligonucleotide: CBLB-1294
ggaggtctttcaggtgg

SEQ ID NO: 6869 - DNA, 17 bp, Artificial Sequence
  Synthetic oligonucleotide: CBLB-1295
ggtggaggtctttcagg

SEQ ID NO: 6870 - DNA, 17 bp, Artificial Sequence
  Synthetic oligonucleotide: CBLB-1296
attggtggaggtctttc

SEQ ID NO: 6871 - DNA, 17 bp, Artificial Sequence
  Synthetic oligonucleotide: CBLB-1297
tctggtgggattggtgg

SEQ ID NO: 6872 - DNA, 17 bp, Artificial Sequence
  Synthetic oligonucleotide: CBLB-1298
ttgtctggtgggattgg

SEQ ID NO: 6873 - DNA, 17 bp, Artificial Sequence
  Synthetic oligonucleotide: CBLB-1299
ctattgtctggtgggat

SEQ ID NO: 6874 - DNA, 17 bp, Artificial Sequence
  Synthetic oligonucleotide: CBLB-1300
tcagtctattgtctggt

SEQ ID NO: 6875 - DNA, 17 bp, Artificial Sequence
  Synthetic oligonucleotide: CBLB-1301
ctcagtctattgtctgg

SEQ ID NO: 6876 - DNA, 17 bp, Artificial Sequence
  Synthetic oligonucleotide: CBLB-1302
ctactcagtctattgtc

SEQ ID NO: 6877 - DNA, 17 bp, Artificial Sequence
  Synthetic oligonucleotide: CBLB-1303
gcacgctttccacatga

SEQ ID NO: 6878 - DNA, 17 bp, Artificial Sequence
  Synthetic oligonucleotide: CBLB-1304
attggcgggtctctgga

SEQ ID NO: 6879 - DNA, 17 bp, Artificial Sequence
  Synthetic oligonucleotide: CBLB-1305
aggcattggcgggtctc

SEQ ID NO: 6880 - DNA, 17 bp, Artificial Sequence
  Synthetic oligonucleotide: CBLB-1306
cttcaagaggcattggc

SEQ ID NO: 6881 - DNA, 17 bp, Artificial Sequence
  Synthetic oligonucleotide: CBLB-1307
gcttcaagaggcattgg

SEQ ID NO: 6882 - DNA, 17 bp, Artificial Sequence
  Synthetic oligonucleotide: CBLB-1308
catgcttcaagaggcat

SEQ ID NO: 6883 - DNA, 17 bp, Artificial Sequence
  Synthetic oligonucleotide: CBLB-1309
gggcaccatgcttcaag

SEQ ID NO: 6884 - DNA, 17 bp, Artificial Sequence
  Synthetic oligonucleotide: CBLB-1310
tcccaaacacatcccga

SEQ ID NO: 6885 - DNA, 17 bp, Artificial Sequence
  Synthetic oligonucleotide: CBLB-1311
gtcccaaacacatcccg

SEQ ID NO: 6886 - DNA, 17 bp, Artificial Sequence
  Synthetic oligonucleotide: CBLB-1312
ttggagagccctcccct

SEQ ID NO: 6887 - DNA, 17 bp, Artificial Sequence
  Synthetic oligonucleotide: CBLB-1313
gctgtgattccaggttt

SEQ ID NO: 6888 - DNA, 17 bp, Artificial Sequence
  Synthetic oligonucleotide: CBLB-1314
gaactcgctgtgattcc

SEQ ID NO: 6889 - DNA, 17 bp, Artificial Sequence
  Synthetic oligonucleotide: CBLB-1315
gtttccgcataagcact

SEQ ID NO: 6890 - DNA, 17 bp, Artificial Sequence
  Synthetic oligonucleotide: CBLB-1316
tgtttccgcataagcac

SEQ ID NO: 6891 - DNA, 17 bp, Artificial Sequence
  Synthetic oligonucleotide: CBLB-1317
cttctaaaggcaaatca

SEQ ID NO: 6892 - DNA, 17 bp, Artificial Sequence
  Synthetic oligonucleotide: CBLB-1318
accttagctccttctaa

SEQ ID NO: 6893 - DNA, 17 bp, Artificial Sequence
  Synthetic oligonucleotide: CBLB-1319
acttccaaggtgaccat

SEQ ID NO: 6894 - DNA, 17 bp, Artificial Sequence
  Synthetic oligonucleotide: CBLB-1320
catattcttcacttcca

SEQ ID NO: 6895 - RNA, 17 nt, Artificial Sequence
  Synthetic oligonucleotide: CBLB-1321
ggaggagaaagccgggg

SEQ ID NO: 6896 - RNA, 17 nt, Artificial Sequence
  Synthetic oligonucleotide: CBLB-1322
ggaggaggagaaagccg

SEQ ID NO: 6897 - RNA, 17 nt, Artificial Sequence
  Synthetic oligonucleotide: CBLB-1323
aggaggaggagaaagcc

SEQ ID NO: 6898 - RNA, 17 nt, Artificial Sequence
  Synthetic oligonucleotide: CBLB-1324
gaggaggaggagaaagc

SEQ ID NO: 6899 - DNA, 17 bp, Artificial Sequence
  Synthetic oligonucleotide: CBLB-1325
gtggtaactggaggagg

SEQ ID NO: 6900 - DNA, 17 bp, Artificial Sequence
  Synthetic oligonucleotide: CBLB-1326
agggtggtaactggagg

SEQ ID NO: 6901 - DNA, 17 bp, Artificial Sequence
  Synthetic oligonucleotide: CBLB-1327
aggagggtggtaactgg

SEQ ID NO: 6902 - DNA, 17 bp, Artificial Sequence
  Synthetic oligonucleotide: CBLB-1328
gggaggagggtggtaac

SEQ ID NO: 6903 - DNA, 17 bp, Artificial Sequence
  Synthetic oligonucleotide: CBLB-1329
tatgctagggaggaggg

SEQ ID NO: 6904 - DNA, 17 bp, Artificial Sequence
  Synthetic oligonucleotide: CBLB-1330
ctttatgctagggagga

SEQ ID NO: 6905 - DNA, 17 bp, Artificial Sequence
  Synthetic oligonucleotide: CBLB-1331
actttatgctagggagg

SEQ ID NO: 6906 - DNA, 17 bp, Artificial Sequence
  Synthetic oligonucleotide: CBLB-1332
ctcactttatgctaggg

SEQ ID NO: 6907 - DNA, 17 bp, Artificial Sequence
  Synthetic oligonucleotide: CBLB-1333
aaactcactttatgcta

SEQ ID NO: 6908 - DNA, 17 bp, Artificial Sequence
  Synthetic oligonucleotide: CBLB-1334
aaaactcactttatgct

SEQ ID NO: 6909 - DNA, 17 bp, Artificial Sequence
  Synthetic oligonucleotide: CBLB-1335
accagtacacctaccag

SEQ ID NO: 6910 - DNA, 17 bp, Artificial Sequence
  Synthetic oligonucleotide: CBLB-1336
gaccagtacacctacca

SEQ ID NO: 6911 - DNA, 17 bp, Artificial Sequence
  Synthetic oligonucleotide: CBLB-1337
ggaccagtacacctacc

SEQ ID NO: 6912 - DNA, 17 bp, Artificial Sequence
  Synthetic oligonucleotide: CBLB-1338
gaaagagaatttgctaa

SEQ ID NO: 6913 - DNA, 17 bp, Artificial Sequence
  Synthetic oligonucleotide: CBLB-1339
catcatcttcctctact

SEQ ID NO: 6914 - DNA, 17 bp, Artificial Sequence
  Synthetic oligonucleotide: CBLB-1340
tcatcatcttcctctac

SEQ ID NO: 6915 - DNA, 17 bp, Artificial Sequence
  Synthetic oligonucleotide: CBLB-1341
gaaacagggtgggatga

SEQ ID NO: 6916 - DNA, 17 bp, Artificial Sequence
  Synthetic oligonucleotide: CBLB-1342
attcagggaaacagggt

SEQ ID NO: 6917 - DNA, 17 bp, Artificial Sequence
  Synthetic oligonucleotide: CBLB-1343
aattcagggaaacaggg

SEQ ID NO: 6918 - DNA, 17 bp, Artificial Sequence
  Synthetic oligonucleotide: CBLB-1344
gtgaattcagggaaaca

SEQ ID NO: 6919 - DNA, 17 bp, Artificial Sequence
  Synthetic oligonucleotide: CBLB-1345
tgtgaattcagggaaac

SEQ ID NO: 6920 - DNA, 17 bp, Artificial Sequence
  Synthetic oligonucleotide: CBLB-1346
agatggttgtgaattca

SEQ ID NO: 6921 - DNA, 17 bp, Artificial Sequence
  Synthetic oligonucleotide: CBLB-1347
gagatggttgtgaattc

SEQ ID NO: 6922 - DNA, 17 bp, Artificial Sequence
  Synthetic oligonucleotide: CBLB-1348
acattatgacaatgaga

SEQ ID NO: 6923 - DNA, 17 bp, Artificial Sequence
  Synthetic oligonucleotide: CBLB-1349
tactcttaccgaacagg

SEQ ID NO: 6924 - DNA, 17 bp, Artificial Sequence
  Synthetic oligonucleotide: CBLB-1350
ccatactcttaccgaac

SEQ ID NO: 6925 - DNA, 17 bp, Artificial Sequence
  Synthetic oligonucleotide: CBLB-1351
attatcacaagacctaa

SEQ ID NO: 6926 - DNA, 17 bp, Artificial Sequence
  Synthetic oligonucleotide: CBLB-1352
gatttcttctctgaaga

SEQ ID NO: 6927 - DNA, 17 bp, Artificial Sequence
  Synthetic oligonucleotide: CBLB-1353
aatatatgcttaagtca

SEQ ID NO: 6928 - DNA, 17 bp, Artificial Sequence
  Synthetic oligonucleotide: CBLB-1354
aaatatatgcttaagtc

SEQ ID NO: 6929 - DNA, 17 bp, Artificial Sequence
  Synthetic oligonucleotide: CBLB-1355
tcaaaaacatctcctag

SEQ ID NO: 6930 - DNA, 17 bp, Artificial Sequence
  Synthetic oligonucleotide: CBLB-1356
taatggcacgggatcag

SEQ ID NO: 6931 - DNA, 17 bp, Artificial Sequence
  Synthetic oligonucleotide: CBLB-1357
gcaggtggtaatggcac

SEQ ID NO: 6932 - DNA, 17 bp, Artificial Sequence
  Synthetic oligonucleotide: CBLB-1358
ggcaggtggtaatggca

SEQ ID NO: 6933 - DNA, 17 bp, Artificial Sequence
  Synthetic oligonucleotide: CBLB-1359
ggcctggcaggtggtaa

SEQ ID NO: 6934 - DNA, 17 bp, Artificial Sequence
  Synthetic oligonucleotide: CBLB-1360
gttggaggcctggcagg

SEQ ID NO: 6935 - DNA, 17 bp, Artificial Sequence
  Synthetic oligonucleotide: CBLB-1361
cgagttggaggcctggc

SEQ ID NO: 6936 - DNA, 17 bp, Artificial Sequence
  Synthetic oligonucleotide: CBLB-1362
gtcccgagttggaggcc

SEQ ID NO: 6937 - DNA, 17 bp, Artificial Sequence
  Synthetic oligonucleotide: CBLB-1363
ggattgtcccgagttgg

SEQ ID NO: 6938 - DNA, 17 bp, Artificial Sequence
  Synthetic oligonucleotide: CBLB-1364
tttggattgtcccgagt

SEQ ID NO: 6939 - DNA, 17 bp, Artificial Sequence
  Synthetic oligonucleotide: CBLB-1365
agtgaagaaccatgctt

SEQ ID NO: 6940 - DNA, 17 bp, Artificial Sequence
  Synthetic oligonucleotide: CBLB-1366
agaagatcataatcaga

SEQ ID NO: 6941 - DNA, 17 bp, Artificial Sequence
  Synthetic oligonucleotide: CBLB-1367
gagaagatcataatcag

SEQ ID NO: 6942 - DNA, 17 bp, Artificial Sequence
  Synthetic oligonucleotide: CBLB-1368
ggtttcaacctaatgga

SEQ ID NO: 6943 - DNA, 17 bp, Artificial Sequence
  Synthetic oligonucleotide: CBLB-1369
aggtttcaacctaatgg

SEQ ID NO: 6944 - DNA, 17 bp, Artificial Sequence
  Synthetic oligonucleotide: CBLB-1370
taaaggtttcaacctaa

SEQ ID NO: 6945 - DNA, 17 bp, Artificial Sequence
  Synthetic oligonucleotide: CBLB-1371
gttcaaaacttttttaa

SEQ ID NO: 6946 - DNA, 17 bp, Artificial Sequence
  Synthetic oligonucleotide: CBLB-1372
cacctgcatttaaagaa

SEQ ID NO: 6947 - DNA, 17 bp, Artificial Sequence
  Synthetic oligonucleotide: CBLB-1373
tgggagagatggaggga

SEQ ID NO: 6948 - DNA, 17 bp, Artificial Sequence
  Synthetic oligonucleotide: CBLB-1374
gtgggagagatggaggg

SEQ ID NO: 6949 - DNA, 17 bp, Artificial Sequence
  Synthetic oligonucleotide: CBLB-1375
gaggtgggagagatgga

SEQ ID NO: 6950 - DNA, 17 bp, Artificial Sequence
  Synthetic oligonucleotide: CBLB-1376
ggaggtgggagagatgg

SEQ ID NO: 6951 - DNA, 17 bp, Artificial Sequence
  Synthetic oligonucleotide: CBLB-1377
gggggaggtgggagaga

SEQ ID NO: 6952 - DNA, 17 bp, Artificial Sequence
  Synthetic oligonucleotide: CBLB-1378
caggaggtgggggaggt

SEQ ID NO: 6953 - DNA, 17 bp, Artificial Sequence
  Synthetic oligonucleotide: CBLB-1379
gcaggaggtgggggagg

SEQ ID NO: 6954 - DNA, 17 bp, Artificial Sequence
  Synthetic oligonucleotide: CBLB-1380
cttgcaggaggtggggg

SEQ ID NO: 6955 - DNA, 17 bp, Artificial Sequence
  Synthetic oligonucleotide: CBLB-1381
tgccttgcaggaggtgg

SEQ ID NO: 6956 - DNA, 17 bp, Artificial Sequence
  Synthetic oligonucleotide: CBLB-1382
atgccttgcaggaggtg

SEQ ID NO: 6957 - DNA, 17 bp, Artificial Sequence
  Synthetic oligonucleotide: CBLB-1383
tatgccttgcaggaggt

SEQ ID NO: 6958 - DNA, 17 bp, Artificial Sequence
  Synthetic oligonucleotide: CBLB-1384
ctatgccttgcaggagg

SEQ ID NO: 6959 - DNA, 17 bp, Artificial Sequence
  Synthetic oligonucleotide: CBLB-1385
agactatgccttgcagg

SEQ ID NO: 6960 - DNA, 17 bp, Artificial Sequence
  Synthetic oligonucleotide: CBLB-1386
atgagactatgccttgc

SEQ ID NO: 6961 - DNA, 17 bp, Artificial Sequence
  Synthetic oligonucleotide: CBLB-1387
cggctactggagccagg

SEQ ID NO: 6962 - DNA, 17 bp, Artificial Sequence
  Synthetic oligonucleotide: CBLB-1388
ggccggctactggagcc

SEQ ID NO: 6963 - DNA, 17 bp, Artificial Sequence
  Synthetic oligonucleotide: CBLB-1389
tgaggatggccggctac

SEQ ID NO: 6964 - DNA, 17 bp, Artificial Sequence
  Synthetic oligonucleotide: CBLB-1390
cctgtcctgaggatggc

SEQ ID NO: 6965 - DNA, 17 bp, Artificial Sequence
  Synthetic oligonucleotide: CBLB-1391
agatcctgtcctgagga

SEQ ID NO: 6966 - DNA, 17 bp, Artificial Sequence
  Synthetic oligonucleotide: CBLB-1392
aaaaagatcctgtcctg

SEQ ID NO: 6967 - DNA, 17 bp, Artificial Sequence
  Synthetic oligonucleotide: CBLB-1393
ttttccctcctacctga

SEQ ID NO: 6968 - DNA, 17 bp, Artificial Sequence
  Synthetic oligonucleotide: CBLB-1394
cttgctagatcaacaaa

SEQ ID NO: 6969 - DNA, 17 bp, Artificial Sequence
  Synthetic oligonucleotide: CBLB-1395
acttgctagatcaacaa

SEQ ID NO: 6970 - DNA, 17 bp, Artificial Sequence
  Synthetic oligonucleotide: CBLB-1396
caggaggcaaaggaact

SEQ ID NO: 6971 - DNA, 17 bp, Artificial Sequence
  Synthetic oligonucleotide: CBLB-1397
cttctagcaggaggcaa

SEQ ID NO: 6972 - DNA, 17 bp, Artificial Sequence
  Synthetic oligonucleotide: CBLB-1398
ggtaaccttctagcagg

SEQ ID NO: 6973 - DNA, 17 bp, Artificial Sequence
  Synthetic oligonucleotide: CBLB-1399
cctggtaaccttctagc

SEQ ID NO: 6974 - DNA, 17 bp, Artificial Sequence
  Synthetic oligonucleotide: CBLB-1400
gttttgacattttcacc

SEQ ID NO: 6975 - DNA, 17 bp, Artificial Sequence
  Synthetic oligonucleotide: CBLB-1401
aactcacctgaacatga

SEQ ID NO: 6976 - DNA, 17 bp, Artificial Sequence
  Synthetic oligonucleotide: CBLB-1402
ggtttagggggtctggc

SEQ ID NO: 6977 - DNA, 17 bp, Artificial Sequence
  Synthetic oligonucleotide: CBLB-1403
tcgtggtttagggggtc

SEQ ID NO: 6978 - DNA, 17 bp, Artificial Sequence
  Synthetic oligonucleotide: CBLB-1404
cgcggtcgtggtttagg

SEQ ID NO: 6979 - DNA, 17 bp, Artificial Sequence
  Synthetic oligonucleotide: CBLB-1405
gcgcggtcgtggtttag

SEQ ID NO: 6980 - DNA, 17 bp, Artificial Sequence
  Synthetic oligonucleotide: CBLB-1406
tgcgcggtcgtggttta

SEQ ID NO: 6981 - DNA, 17 bp, Artificial Sequence
  Synthetic oligonucleotide: CBLB-1407
ctgcgcggtcgtggttt

SEQ ID NO: 6982 - DNA, 17 bp, Artificial Sequence
  Synthetic oligonucleotide: CBLB-1408
gcagtcctgcgcggtcg

SEQ ID NO: 6983 - DNA, 17 bp, Artificial Sequence
  Synthetic oligonucleotide: CBLB-1409
tctggtgcagtcctgcg

SEQ ID NO: 6984 - DNA, 17 bp, Artificial Sequence
  Synthetic oligonucleotide: CBLB-1410
tttctgtggtgaatttc

SEQ ID NO: 6985 - DNA, 17 bp, Artificial Sequence
  Synthetic oligonucleotide: CBLB-1411
gcccatggggttttctg

SEQ ID NO: 6986 - DNA, 17 bp, Artificial Sequence
  Synthetic oligonucleotide: CBLB-1412
gccgcctcaggcccatg

SEQ ID NO: 6987 - DNA, 17 bp, Artificial Sequence
  Synthetic oligonucleotide: CBLB-1413
tgccgcctcaggcccat

SEQ ID NO: 6988 - DNA, 17 bp, Artificial Sequence
  Synthetic oligonucleotide: CBLB-1414
atgccgcctcaggccca

SEQ ID NO: 6989 - DNA, 17 bp, Artificial Sequence
  Synthetic oligonucleotide: CBLB-1415
ttttccaatgccgcctc

SEQ ID NO: 6990 - DNA, 17 bp, Artificial Sequence
  Synthetic oligonucleotide: CBLB-1416
tctcttcacctcttcaa

SEQ ID NO: 6991 - DNA, 17 bp, Artificial Sequence
  Synthetic oligonucleotide: CBLB-1417
attctgggctatctcta

SEQ ID NO: 6992 - DNA, 17 bp, Artificial Sequence
  Synthetic oligonucleotide: CBLB-1418
aacttcgacattattct

SEQ ID NO: 6993 - DNA, 17 bp, Artificial Sequence
  Synthetic oligonucleotide: CBLB-1419
caacttcgacattattc

SEQ ID NO: 6994 - DNA, 17 bp, Artificial Sequence
  Synthetic oligonucleotide: CBLB-1420
ttctcggaggatgctcc

SEQ ID NO: 6995 - DNA, 17 bp, Artificial Sequence
  Synthetic oligonucleotide: CBLB-1421
attctcggaggatgctc

SEQ ID NO: 6996 - DNA, 17 bp, Artificial Sequence
  Synthetic oligonucleotide: CBLB-1422
ggaaggcaaattctcgg

SEQ ID NO: 6997 - DNA, 17 bp, Artificial Sequence
  Synthetic oligonucleotide: CBLB-1423
gagggaaggcaaattct

SEQ ID NO: 6998 - DNA, 17 bp, Artificial Sequence
  Synthetic oligonucleotide: CBLB-1424
ggatactggaggaggga

SEQ ID NO: 6999 - DNA, 17 bp, Artificial Sequence
  Synthetic oligonucleotide: CBLB-1425
gtggggatactggagga

SEQ ID NO: 7000 - DNA, 17 bp, Artificial Sequence
  Synthetic oligonucleotide: CBLB-1426
cgtggggatactggagg

SEQ ID NO: 7001 - DNA, 17 bp, Artificial Sequence
  Synthetic oligonucleotide: CBLB-1427
agacgtggggatactgg

SEQ ID NO: 7002 - DNA, 17 bp, Artificial Sequence
  Synthetic oligonucleotide: CBLB-1428
tttagacgtggggatac

SEQ ID NO: 7003 - DNA, 17 bp, Artificial Sequence
  Synthetic oligonucleotide: CBLB-1429
ctatagatttagacgtg

SEQ ID NO: 7004 - DNA, 17 bp, Artificial Sequence
  Synthetic oligonucleotide: CBLB-1430
gctatagatttagacgt

SEQ ID NO: 7005 - DNA, 17 bp, Artificial Sequence
  Synthetic oligonucleotide: CBLB-1431
tgctatagatttagacg

SEQ ID NO: 7006 - DNA, 17 bp, Artificial Sequence
  Synthetic oligonucleotide: CBLB-1432
tttggtgtctacagttc

SEQ ID NO: 7007 - DNA, 20 bp, Artificial Sequence
  Synthetic oligonucleotide: CBLB-01
aattccagatggcaaactca

SEQ ID NO: 7008 - DNA, 20 bp, Artificial Sequence
  Synthetic oligonucleotide: CBLB-02
atggcaaactcaatgaatgg

SEQ ID NO: 7009 - DNA, 20 bp, Artificial Sequence
  Synthetic oligonucleotide: CBLB-03
aatggcagaaaccctggtgg

SEQ ID NO: 7010 - DNA, 20 bp, Artificial Sequence
  Synthetic oligonucleotide: CBLB-04
tggcagaaaccctggtggtc

SEQ ID NO: 7011 - DNA, 20 bp, Artificial Sequence
  Synthetic oligonucleotide: CBLB-2284
ggcagaaaccctggtggtcg

SEQ ID NO: 7012 - DNA, 20 bp, Artificial Sequence
  Synthetic oligonucleotide: CBLB-06
cagaaaccctggtggtcgag

SEQ ID NO: 7013 - DNA, 20 bp, Artificial Sequence
  Synthetic oligonucleotide: CBLB-2285
agaaaccctggtggtcgagg

SEQ ID NO: 7014 - DNA, 20 bp, Artificial Sequence
  Synthetic oligonucleotide: CBLB-08
ggtggtcgaggaggaaatcc

SEQ ID NO: 7015 - DNA, 20 bp, Artificial Sequence
  Synthetic oligonucleotide: CBLB-09
ggaggaaatccccgaaaagg

SEQ ID NO: 7016 - DNA, 20 bp, Artificial Sequence
  Synthetic oligonucleotide: CBLB-10
atccccgaaaaggtcgaatt

SEQ ID NO: 7017 - DNA, 20 bp, Artificial Sequence
  Synthetic oligonucleotide: CBLB-11
tgggtattattgatgctatt

SEQ ID NO: 7018 - DNA, 20 bp, Artificial Sequence
  Synthetic oligonucleotide: CBLB-12
tgatgctattcaggatgcag

SEQ ID NO: 7019 - DNA, 20 bp, Artificial Sequence
  Synthetic oligonucleotide: CBLB-13
aagcaagctgccgcagatcg

SEQ ID NO: 7020 - DNA, 20 bp, Artificial Sequence
  Synthetic oligonucleotide: CBLB-14
ctgccgcagatcgcaggacc

SEQ ID NO: 7021 - DNA, 20 bp, Artificial Sequence
  Synthetic oligonucleotide: CBLB-2292
tgccgcagatcgcaggaccg

SEQ ID NO: 7022 - DNA, 20 bp, Artificial Sequence
  Synthetic oligonucleotide: CBLB-16
ccgcagatcgcaggaccgtg

SEQ ID NO: 7023 - DNA, 20 bp, Artificial Sequence
  Synthetic oligonucleotide: CBLB-17
cgcaggaccgtggagaagac

SEQ ID NO: 7024 - DNA, 20 bp, Artificial Sequence
  Synthetic oligonucleotide: CBLB-2293
gcaggaccgtggagaagact

SEQ ID NO: 7025 - DNA, 20 bp, Artificial Sequence
  Synthetic oligonucleotide: CBLB-19
tggagaagacttggaagctc

SEQ ID NO: 7026 - DNA, 20 bp, Artificial Sequence
  Synthetic oligonucleotide: CBLB-20
ttctgtctgacgttgcctgt

SEQ ID NO: 7027 - DNA, 20 bp, Artificial Sequence
  Synthetic oligonucleotide: CBLB-21
gccaaaatcccaaacttcag

SEQ ID NO: 7028 - DNA, 20 bp, Artificial Sequence
  Synthetic oligonucleotide: CBLB-22
atcagcatttacgacttata

SEQ ID NO: 7029 - DNA, 20 bp, Artificial Sequence
  Synthetic oligonucleotide: CBLB-23
tgagtaaatatgatgacaac

SEQ ID NO: 7030 - DNA, 20 bp, Artificial Sequence
  Synthetic oligonucleotide: CBLB-24
ccagaaacttgcccaactca

SEQ ID NO: 7031 - DNA, 20 bp, Artificial Sequence
  Synthetic oligonucleotide: CBLB-25
agaaacttgcccaactcagt

SEQ ID NO: 7032 - DNA, 20 bp, Artificial Sequence
  Synthetic oligonucleotide: CBLB-26
acttgcccaactcagtgaga

SEQ ID NO: 7033 - DNA, 20 bp, Artificial Sequence
  Synthetic oligonucleotide: CBLB-27
aaatctacattgatagcctt

SEQ ID NO: 7034 - DNA, 20 bp, Artificial Sequence
  Synthetic oligonucleotide: CBLB-28
agccttatgaaaaagtcaaa

SEQ ID NO: 7035 - DNA, 20 bp, Artificial Sequence
  Synthetic oligonucleotide: CBLB-29
acgggcaataagactcttta

SEQ ID NO: 7036 - DNA, 20 bp, Artificial Sequence
  Synthetic oligonucleotide: CBLB-30
taagactctttaaagaaggc

SEQ ID NO: 7037 - DNA, 20 bp, Artificial Sequence
  Synthetic oligonucleotide: CBLB-31
aagactctttaaagaaggca

SEQ ID NO: 7038 - DNA, 20 bp, Artificial Sequence
  Synthetic oligonucleotide: CBLB-32
gactctttaaagaaggcaag

SEQ ID NO: 7039 - DNA, 20 bp, Artificial Sequence
  Synthetic oligonucleotide: CBLB-33
ctctttaaagaaggcaagga

SEQ ID NO: 7040 - DNA, 20 bp, Artificial Sequence
  Synthetic oligonucleotide: CBLB-34
agaaggcaaggagagaatgt

SEQ ID NO: 7041 - DNA, 20 bp, Artificial Sequence
  Synthetic oligonucleotide: CBLB-35
aggcaaggagagaatgtatg

SEQ ID NO: 7042 - DNA, 17 bp, Artificial Sequence
  Synthetic oligonucleotide: CBLB-36
tccagatggcaaactca

SEQ ID NO: 7043 - DNA, 17 bp, Artificial Sequence
  Synthetic oligonucleotide: CBLB-37
gcaaactcaatgaatgg

SEQ ID NO: 7044 - DNA, 17 bp, Artificial Sequence
  Synthetic oligonucleotide: CBLB-38
ggcagaaaccctggtgg

SEQ ID NO: 7045 - DNA, 17 bp, Artificial Sequence
  Synthetic oligonucleotide: CBLB-39
cagaaaccctggtggtc

SEQ ID NO: 7046 - DNA, 17 bp, Artificial Sequence
  Synthetic oligonucleotide: CBLB-2343
agaaaccctggtggtcg

SEQ ID NO: 7047 - DNA, 17 bp, Artificial Sequence
  Synthetic oligonucleotide: CBLB-41
aaaccctggtggtcgag

SEQ ID NO: 7048 - DNA, 17 bp, Artificial Sequence
  Synthetic oligonucleotide: CBLB-2344
aaccctggtggtcgagg

SEQ ID NO: 7049 - DNA, 17 bp, Artificial Sequence
  Synthetic oligonucleotide: CBLB-43
ggtcgaggaggaaatcc

SEQ ID NO: 7050 - DNA, 17 bp, Artificial Sequence
  Synthetic oligonucleotide: CBLB-44
ggaaatccccgaaaagg

SEQ ID NO: 7051 - DNA, 17 bp, Artificial Sequence
  Synthetic oligonucleotide: CBLB-45
cccgaaaaggtcgaatt

SEQ ID NO: 7052 - DNA, 17 bp, Artificial Sequence
  Synthetic oligonucleotide: CBLB-46
gtattattgatgctatt

SEQ ID NO: 7053 - DNA, 17 bp, Artificial Sequence
  Synthetic oligonucleotide: CBLB-47
tgctattcaggatgcag

SEQ ID NO: 7054 - DNA, 17 bp, Artificial Sequence
  Synthetic oligonucleotide: CBLB-48
caagctgccgcagatcg

SEQ ID NO: 7055 - DNA, 17 bp, Artificial Sequence
  Synthetic oligonucleotide: CBLB-49
ccgcagatcgcaggacc

SEQ ID NO: 7056 - DNA, 17 bp, Artificial Sequence
  Synthetic oligonucleotide: CBLB-2351
cgcagatcgcaggaccg

SEQ ID NO: 7057 - DNA, 17 bp, Artificial Sequence
  Synthetic oligonucleotide: CBLB-51
cagatcgcaggaccgtg

SEQ ID NO: 7058 - DNA, 17 bp, Artificial Sequence
  Synthetic oligonucleotide: CBLB-52
aggaccgtggagaagac

SEQ ID NO: 7059 - DNA, 17 bp, Artificial Sequence
  Synthetic oligonucleotide: CBLB-2352
ggaccgtggagaagact

SEQ ID NO: 7060 - DNA, 17 bp, Artificial Sequence
  Synthetic oligonucleotide: CBLB-54
agaagacttggaagctc

SEQ ID NO: 7061 - DNA, 17 bp, Artificial Sequence
  Synthetic oligonucleotide: CBLB-55
tgtctgacgttgcctgt

SEQ ID NO: 7062 - DNA, 17 bp, Artificial Sequence
  Synthetic oligonucleotide: CBLB-56
aaaatcccaaacttcag

SEQ ID NO: 7063 - DNA, 17 bp, Artificial Sequence
  Synthetic oligonucleotide: CBLB-57
agcatttacgacttata

SEQ ID NO: 7064 - DNA, 17 bp, Artificial Sequence
  Synthetic oligonucleotide: CBLB-58
gtaaatatgatgacaac

SEQ ID NO: 7065 - DNA, 17 bp, Artificial Sequence
  Synthetic oligonucleotide: CBLB-59
gaaacttgcccaactca

SEQ ID NO: 7066 - DNA, 17 bp, Artificial Sequence
  Synthetic oligonucleotide: CBLB-60
aacttgcccaactcagt

SEQ ID NO: 7067 - DNA, 17 bp, Artificial Sequence
  Synthetic oligonucleotide: CBLB-61
tgcccaactcagtgaga

SEQ ID NO: 7068 - DNA, 17 bp, Artificial Sequence
  Synthetic oligonucleotide: CBLB-62
tctacattgatagcctt

SEQ ID NO: 7069 - DNA, 17 bp, Artificial Sequence
  Synthetic oligonucleotide: CBLB-63
cttatgaaaaagtcaaa

SEQ ID NO: 7070 - DNA, 17 bp, Artificial Sequence
  Synthetic oligonucleotide: CBLB-64
ggcaataagactcttta

SEQ ID NO: 7071 - DNA, 17 bp, Artificial Sequence
  Synthetic oligonucleotide: CBLB-65
gactctttaaagaaggc

SEQ ID NO: 7072 - DNA, 17 bp, Artificial Sequence
  Synthetic oligonucleotide: CBLB-66
actctttaaagaaggca

SEQ ID NO: 7073 - DNA, 17 bp, Artificial Sequence
  Synthetic oligonucleotide: CBLB-67
tctttaaagaaggcaag

SEQ ID NO: 7074 - DNA, 17 bp, Artificial Sequence
  Synthetic oligonucleotide: CBLB-68
tttaaagaaggcaagga

SEQ ID NO: 7075 - DNA, 17 bp, Artificial Sequence
  Synthetic oligonucleotide: CBLB-69
aggcaaggagagaatgt

SEQ ID NO: 7076 - DNA, 17 bp, Artificial Sequence
  Synthetic oligonucleotide: CBLB-70
caaggagagaatgtatg

SEQ ID NO: 7077 - DNA, 20 bp, Artificial Sequence
  Synthetic oligonucleotide: CBLB-71
cattcattgagtttgccatc

SEQ ID NO: 7078 - DNA, 20 bp, Artificial Sequence
  Synthetic oligonucleotide: CBLB-72
ccattcattgagtttgccat

SEQ ID NO: 7079 - DNA, 20 bp, Artificial Sequence
  Synthetic oligonucleotide: CBLB-73
accagggtttctgccattca

SEQ ID NO: 7080 - DNA, 20 bp, Artificial Sequence
  Synthetic oligonucleotide: CBLB-74
gggatttcctcctcgaccac

SEQ ID NO: 7081 - DNA, 20 bp, Artificial Sequence
  Synthetic oligonucleotide: CBLB-2303
acccaaaattcgaccttttc

SEQ ID NO: 7082 - DNA, 20 bp, Artificial Sequence
  Synthetic oligonucleotide: CBLB-2302
tacccaaaattcgacctttt

SEQ ID NO: 7083 - DNA, 20 bp, Artificial Sequence
  Synthetic oligonucleotide: CBLB-77
atacccaaaattcgaccttt

SEQ ID NO: 7084 - DNA, 20 bp, Artificial Sequence
  Synthetic oligonucleotide: CBLB-78
ttagggggtccaactgcatc

SEQ ID NO: 7085 - DNA, 20 bp, Artificial Sequence
  Synthetic oligonucleotide: CBLB-2299
gatctgcggcagcttgctta

SEQ ID NO: 7086 - DNA, 20 bp, Artificial Sequence
  Synthetic oligonucleotide: CBLB-2298
cgatctgcggcagcttgctt

SEQ ID NO: 7087 - DNA, 20 bp, Artificial Sequence
  Synthetic oligonucleotide: CBLB-81
gcgatctgcggcagcttgct

SEQ ID NO: 7088 - DNA, 20 bp, Artificial Sequence
  Synthetic oligonucleotide: CBLB-82
cagaacttaccactttgtcc

SEQ ID NO: 7089 - DNA, 20 bp, Artificial Sequence
  Synthetic oligonucleotide: CBLB-83
ttcgcacaggcaacgtcaga

SEQ ID NO: 7090 - DNA, 20 bp, Artificial Sequence
  Synthetic oligonucleotide: CBLB-2321
gctatttttcaactgaagtt

SEQ ID NO: 7091 - DNA, 20 bp, Artificial Sequence
  Synthetic oligonucleotide: CBLB-85
ggctatttttcaactgaagt

SEQ ID NO: 7092 - DNA, 20 bp, Artificial Sequence
  Synthetic oligonucleotide: CBLB-86
tatggtgggctatttttcaa

SEQ ID NO: 7093 - DNA, 20 bp, Artificial Sequence
  Synthetic oligonucleotide: CBLB-87
caaaatatcaagtatatatg

SEQ ID NO: 7094 - DNA, 20 bp, Artificial Sequence
  Synthetic oligonucleotide: CBLB-88
aagtactcattctcactgag

SEQ ID NO: 7095 - DNA, 20 bp, Artificial Sequence
  Synthetic oligonucleotide: CBLB-89
ttttaaagtactcattctca

SEQ ID NO: 7096 - DNA, 20 bp, Artificial Sequence
  Synthetic oligonucleotide: CBLB-90
ttctctccttgccttcttta

SEQ ID NO: 7097 - DNA, 17 bp, Artificial Sequence
  Synthetic oligonucleotide: CBLB-91
tcattgagtttgccatc

SEQ ID NO: 7098 - DNA, 17 bp, Artificial Sequence
  Synthetic oligonucleotide: CBLB-92
ttcattgagtttgccat

SEQ ID NO: 7099 - DNA, 17 bp, Artificial Sequence
  Synthetic oligonucleotide: CBLB-93
agggtttctgccattca

SEQ ID NO: 7100 - DNA, 17 bp, Artificial Sequence
  Synthetic oligonucleotide: CBLB-94
atttcctcctcgaccac

SEQ ID NO: 7101 - DNA, 17 bp, Artificial Sequence
  Synthetic oligonucleotide: CBLB-2362
caaaattcgaccttttc

SEQ ID NO: 7102 - DNA, 17 bp, Artificial Sequence
  Synthetic oligonucleotide: CBLB-2361
ccaaaattcgacctttt

SEQ ID NO: 7103 - DNA, 17 bp, Artificial Sequence
  Synthetic oligonucleotide: CBLB-97
cccaaaattcgaccttt

SEQ ID NO: 7104 - DNA, 17 bp, Artificial Sequence
  Synthetic oligonucleotide: CBLB-98
gggggtccaactgcatc

SEQ ID NO: 7105 - DNA, 17 bp, Artificial Sequence
  Synthetic oligonucleotide: CBLB-2358
ctgcggcagcttgctta

SEQ ID NO: 7106 - DNA, 17 bp, Artificial Sequence
  Synthetic oligonucleotide: CBLB-2357
tctgcggcagcttgctt

SEQ ID NO: 7107 - DNA, 17 bp, Artificial Sequence
  Synthetic oligonucleotide: CBLB-101
atctgcggcagcttgct

SEQ ID NO: 7108 - DNA, 17 bp, Artificial Sequence
  Synthetic oligonucleotide: CBLB-102
aacttaccactttgtcc

SEQ ID NO: 7109 - DNA, 17 bp, Artificial Sequence
  Synthetic oligonucleotide: CBLB-103
gcacaggcaacgtcaga

SEQ ID NO: 7110 - DNA, 17 bp, Artificial Sequence
  Synthetic oligonucleotide: CBLB-2338
atttttcaactgaagtt

SEQ ID NO: 7111 - DNA, 17 bp, Artificial Sequence
  Synthetic oligonucleotide: CBLB-105
tatttttcaactgaagt

SEQ ID NO: 7112 - DNA, 17 bp, Artificial Sequence
  Synthetic oligonucleotide: CBLB-106
ggtgggctatttttcaa

SEQ ID NO: 7113 - DNA, 17 bp, Artificial Sequence
  Synthetic oligonucleotide: CBLB-107
aatatcaagtatatatg

SEQ ID NO: 7114 - DNA, 17 bp, Artificial Sequence
  Synthetic oligonucleotide: CBLB-108
tactcattctcactgag

SEQ ID NO: 7115 - DNA, 17 bp, Artificial Sequence
  Synthetic oligonucleotide: CBLB-109
taaagtactcattctca

SEQ ID NO: 7116 - DNA, 17 bp, Artificial Sequence
  Synthetic oligonucleotide: CBLB-110
tctccttgccttcttta

SEQ ID NO: 7117 - DNA, 20 bp, Artificial Sequence
  Synthetic oligonucleotide: CBLB-111
tttttcccttgtgcctacag

SEQ ID NO: 7118 - DNA, 20 bp, Artificial Sequence
  Synthetic oligonucleotide: CBLB-112
tatcttcagtcacatgctgg

SEQ ID NO: 7119 - DNA, 20 bp, Artificial Sequence
  Synthetic oligonucleotide: CBLB-113
tctttcccaatggtcaattc

SEQ ID NO: 7120 - DNA, 20 bp, Artificial Sequence
  Synthetic oligonucleotide: CBLB-632
ctttcccaatggtcaattcc

SEQ ID NO: 7121 - DNA, 20 bp, Artificial Sequence
  Synthetic oligonucleotide: CBLB-633
tttcccaatggtcaattcca

SEQ ID NO: 7122 - DNA, 20 bp, Artificial Sequence
  Synthetic oligonucleotide: CBLB-116
tatcacaaaagcagatgctg

SEQ ID NO: 7123 - DNA, 20 bp, Artificial Sequence
  Synthetic oligonucleotide: CBLB-117
aaagcagatgctgctgaatt

SEQ ID NO: 7124 - DNA, 20 bp, Artificial Sequence
  Synthetic oligonucleotide: CBLB-634
aagcagatgctgctgaattc

SEQ ID NO: 7125 - DNA, 20 bp, Artificial Sequence
  Synthetic oligonucleotide: CBLB-119
gcagatgctgctgaattctg

SEQ ID NO: 7126 - DNA, 20 bp, Artificial Sequence
  Synthetic oligonucleotide: CBLB-120
tgaattctggagaaagtttt

SEQ ID NO: 7127 - DNA, 20 bp, Artificial Sequence
  Synthetic oligonucleotide: CBLB-635
gaattctggagaaagttttt

SEQ ID NO: 7128 - DNA, 20 bp, Artificial Sequence
  Synthetic oligonucleotide: CBLB-122
taaaaatcatttttatagct

SEQ ID NO: 7129 - DNA, 20 bp, Artificial Sequence
  Synthetic oligonucleotide: CBLB-123
ccctttttttccaccttgca

SEQ ID NO: 7130 - DNA, 20 bp, Artificial Sequence
  Synthetic oligonucleotide: CBLB-124
ttgcacagaactatcgtacc

SEQ ID NO: 7131 - DNA, 20 bp, Artificial Sequence
  Synthetic oligonucleotide: CBLB-637
tgcacagaactatcgtacca

SEQ ID NO: 7132 - DNA, 20 bp, Artificial Sequence
  Synthetic oligonucleotide: CBLB-126
agtattcagacagtgccttc

SEQ ID NO: 7133 - DNA, 20 bp, Artificial Sequence
  Synthetic oligonucleotide: CBLB-127
tccaccagattagctctggc

SEQ ID NO: 7134 - DNA, 20 bp, Artificial Sequence
  Synthetic oligonucleotide: CBLB-640
ccaccagattagctctggcc

SEQ ID NO: 7135 - DNA, 20 bp, Artificial Sequence
  Synthetic oligonucleotide: CBLB-129
caatgattacatttcagttt

SEQ ID NO: 7136 - DNA, 20 bp, Artificial Sequence
  Synthetic oligonucleotide: CBLB-130
aatttttttattttttagcc

SEQ ID NO: 7137 - DNA, 20 bp, Artificial Sequence
  Synthetic oligonucleotide: CBLB-644
atttttttattttttagcct

SEQ ID NO: 7138 - DNA, 20 bp, Artificial Sequence
  Synthetic oligonucleotide: CBLB-132
tagccttggggctctatttt

SEQ ID NO: 7139 - DNA, 20 bp, Artificial Sequence
  Synthetic oligonucleotide: CBLB-647
agccttggggctctattttg

SEQ ID NO: 7140 - DNA, 20 bp, Artificial Sequence
  Synthetic oligonucleotide: CBLB-134
tggggctctattttgcggaa

SEQ ID NO: 7141 - DNA, 20 bp, Artificial Sequence
  Synthetic oligonucleotide: CBLB-648
ggggctctattttgcggaat

SEQ ID NO: 7142 - DNA, 20 bp, Artificial Sequence
  Synthetic oligonucleotide: CBLB-136
catggcatttctcacatatg

SEQ ID NO: 7143 - DNA, 20 bp, Artificial Sequence
  Synthetic oligonucleotide: CBLB-137
atgaagttaaagcacgacta

SEQ ID NO: 7144 - DNA, 20 bp, Artificial Sequence
  Synthetic oligonucleotide: CBLB-138
acagaaatatagcaccaaac

SEQ ID NO: 7145 - DNA, 20 bp, Artificial Sequence
  Synthetic oligonucleotide: CBLB-651
cagaaatatagcaccaaacc

SEQ ID NO: 7146 - DNA, 20 bp, Artificial Sequence
  Synthetic oligonucleotide: CBLB-140
tccggttaagttgcactcga

SEQ ID NO: 7147 - DNA, 20 bp, Artificial Sequence
  Synthetic oligonucleotide: CBLB-654
ccggttaagttgcactcgat

SEQ ID NO: 7148 - DNA, 20 bp, Artificial Sequence
  Synthetic oligonucleotide: CBLB-142
agttgcactcgattgggaca

SEQ ID NO: 7149 - DNA, 20 bp, Artificial Sequence
  Synthetic oligonucleotide: CBLB-143
gtgggccattggctatgtga

SEQ ID NO: 7150 - DNA, 20 bp, Artificial Sequence
  Synthetic oligonucleotide: CBLB-659
tgggccattggctatgtgac

SEQ ID NO: 7151 - DNA, 20 bp, Artificial Sequence
  Synthetic oligonucleotide: CBLB-660
gggccattggctatgtgact

SEQ ID NO: 7152 - DNA, 20 bp, Artificial Sequence
  Synthetic oligonucleotide: CBLB-146
cattggctatgtgactgggg

SEQ ID NO: 7153 - DNA, 20 bp, Artificial Sequence
  Synthetic oligonucleotide: CBLB-662
attggctatgtgactgggga

SEQ ID NO: 7154 - DNA, 20 bp, Artificial Sequence
  Synthetic oligonucleotide: CBLB-663
ttggctatgtgactggggat

SEQ ID NO: 7155 - DNA, 20 bp, Artificial Sequence
  Synthetic oligonucleotide: CBLB-149
caagccctgattgatggcag

SEQ ID NO: 7156 - DNA, 20 bp, Artificial Sequence
  Synthetic oligonucleotide: CBLB-665
aagccctgattgatggcagc

SEQ ID NO: 7157 - DNA, 20 bp, Artificial Sequence
  Synthetic oligonucleotide: CBLB-666
agccctgattgatggcagca

SEQ ID NO: 7158 - DNA, 20 bp, Artificial Sequence
  Synthetic oligonucleotide: CBLB-152
cctgattgatggcagcaggg

SEQ ID NO: 7159 - DNA, 20 bp, Artificial Sequence
  Synthetic oligonucleotide: CBLB-153
agcagggaaggattgtaagt

SEQ ID NO: 7160 - DNA, 20 bp, Artificial Sequence
  Synthetic oligonucleotide: CBLB-154
cagggaaggattgtaagtat

SEQ ID NO: 7161 - DNA, 20 bp, Artificial Sequence
  Synthetic oligonucleotide: CBLB-155
aaggattgtaagtatgagaa

SEQ ID NO: 7162 - DNA, 20 bp, Artificial Sequence
  Synthetic oligonucleotide: CBLB-668
aggattgtaagtatgagaaa

SEQ ID NO: 7163 - DNA, 20 bp, Artificial Sequence
  Synthetic oligonucleotide: CBLB-157
gtaagtatgagaaatggaag

SEQ ID NO: 7164 - DNA, 20 bp, Artificial Sequence
  Synthetic oligonucleotide: CBLB-669
taagtatgagaaatggaagt

SEQ ID NO: 7165 - DNA, 20 bp, Artificial Sequence
  Synthetic oligonucleotide: CBLB-159
attcagttatctttatcctg

SEQ ID NO: 7166 - DNA, 20 bp, Artificial Sequence
  Synthetic oligonucleotide: CBLB-670
ttcagttatctttatcctga

SEQ ID NO: 7167 - DNA, 20 bp, Artificial Sequence
  Synthetic oligonucleotide: CBLB-671
tcagttatctttatcctgat

SEQ ID NO: 7168 - DNA, 20 bp, Artificial Sequence
  Synthetic oligonucleotide: CBLB-162
agttatctttatcctgatgg

SEQ ID NO: 7169 - DNA, 20 bp, Artificial Sequence
  Synthetic oligonucleotide: CBLB-672
gttatctttatcctgatggg

SEQ ID NO: 7170 - DNA, 20 bp, Artificial Sequence
  Synthetic oligonucleotide: CBLB-164
gagttataatcctgatttaa

SEQ ID NO: 7171 - DNA, 20 bp, Artificial Sequence
  Synthetic oligonucleotide: CBLB-165
tcctgatttaactggattat

SEQ ID NO: 7172 - DNA, 20 bp, Artificial Sequence
  Synthetic oligonucleotide: CBLB-166
catataaaagttacacaggt

SEQ ID NO: 7173 - DNA, 20 bp, Artificial Sequence
  Synthetic oligonucleotide: CBLB-167
acacaggtaaggataattgc

SEQ ID NO: 7174 - DNA, 20 bp, Artificial Sequence
  Synthetic oligonucleotide: CBLB-168
tctccctcctccccaaattc

SEQ ID NO: 7175 - DNA, 20 bp, Artificial Sequence
  Synthetic oligonucleotide: CBLB-676
ctccctcctccccaaattcc

SEQ ID NO: 7176 - DNA, 20 bp, Artificial Sequence
  Synthetic oligonucleotide: CBLB-170
ccccaaattccaggaacaat

SEQ ID NO: 7177 - DNA, 20 bp, Artificial Sequence
  Synthetic oligonucleotide: CBLB-171
ggaacaatatgaattatatt

SEQ ID NO: 7178 - DNA, 20 bp, Artificial Sequence
  Synthetic oligonucleotide: CBLB-172
aatatgaattatattgtgaa

SEQ ID NO: 7179 - DNA, 20 bp, Artificial Sequence
  Synthetic oligonucleotide: CBLB-173
tcagctctgtaagatttgtg

SEQ ID NO: 7180 - DNA, 20 bp, Artificial Sequence
  Synthetic oligonucleotide: CBLB-174
agctctgtaagatttgtgca

SEQ ID NO: 7181 - DNA, 20 bp, Artificial Sequence
  Synthetic oligonucleotide: CBLB-175
gaatgacaaagatgtcaaga

SEQ ID NO: 7182 - DNA, 20 bp, Artificial Sequence
  Synthetic oligonucleotide: CBLB-176
agatgtcaagattgagcctt

SEQ ID NO: 7183 - DNA, 20 bp, Artificial Sequence
  Synthetic oligonucleotide: CBLB-177
caggtataatcattagcaac

SEQ ID NO: 7184 - DNA, 20 bp, Artificial Sequence
  Synthetic oligonucleotide: CBLB-178
ccatgcattttctatttgtt

SEQ ID NO: 7185 - DNA, 20 bp, Artificial Sequence
  Synthetic oligonucleotide: CBLB-685
catgcattttctatttgttt

SEQ ID NO: 7186 - DNA, 20 bp, Artificial Sequence
  Synthetic oligonucleotide: CBLB-180
attttctatttgtttaggag

SEQ ID NO: 7187 - DNA, 20 bp, Artificial Sequence
  Synthetic oligonucleotide: CBLB-181
ttgtttaggagtcggatggt

SEQ ID NO: 7188 - DNA, 20 bp, Artificial Sequence
  Synthetic oligonucleotide: CBLB-182
gggctgccctttctgtcgtt

SEQ ID NO: 7189 - DNA, 20 bp, Artificial Sequence
  Synthetic oligonucleotide: CBLB-183
tttctgtcgttgtgaaataa

SEQ ID NO: 7190 - DNA, 20 bp, Artificial Sequence
  Synthetic oligonucleotide: CBLB-690
ttctgtcgttgtgaaataaa

SEQ ID NO: 7191 - DNA, 20 bp, Artificial Sequence
  Synthetic oligonucleotide: CBLB-185
tcgttgtgaaataaaaggaa

SEQ ID NO: 7192 - DNA, 20 bp, Artificial Sequence
  Synthetic oligonucleotide: CBLB-186
aaggaactgagcccataatc

SEQ ID NO: 7193 - DNA, 20 bp, Artificial Sequence
  Synthetic oligonucleotide: CBLB-187
atcgtggacccctttgatcc

SEQ ID NO: 7194 - DNA, 20 bp, Artificial Sequence
  Synthetic oligonucleotide: CBLB-188
ggacccctttgatccaagag

SEQ ID NO: 7195 - DNA, 20 bp, Artificial Sequence
  Synthetic oligonucleotide: CBLB-189
ttggcatgccgatgctagac

SEQ ID NO: 7196 - DNA, 20 bp, Artificial Sequence
  Synthetic oligonucleotide: CBLB-190
cttggacgacgatgatgatc

SEQ ID NO: 7197 - DNA, 20 bp, Artificial Sequence
  Synthetic oligonucleotide: CBLB-191
tggacgacgatgatgatcgt

SEQ ID NO: 7198 - DNA, 20 bp, Artificial Sequence
  Synthetic oligonucleotide: CBLB-696
ggacgacgatgatgatcgtg

SEQ ID NO: 7199 - DNA, 20 bp, Artificial Sequence
  Synthetic oligonucleotide: CBLB-193
atcgtgaggagtccttgatg

SEQ ID NO: 7200 - DNA, 20 bp, Artificial Sequence
  Synthetic oligonucleotide: CBLB-194
atgaatcggttggcaaacgt

SEQ ID NO: 7201 - DNA, 20 bp, Artificial Sequence
  Synthetic oligonucleotide: CBLB-195
aaacgtccgaaaggtaaaac

SEQ ID NO: 7202 - DNA, 20 bp, Artificial Sequence
  Synthetic oligonucleotide: CBLB-196
cgaaaggtaaaactagaaac

SEQ ID NO: 7203 - DNA, 20 bp, Artificial Sequence
  Synthetic oligonucleotide: CBLB-197
tgttctagtgcactgacagg

SEQ ID NO: 7204 - DNA, 20 bp, Artificial Sequence
  Synthetic oligonucleotide: CBLB-198
gaactcaccagtcacatcac

SEQ ID NO: 7205 - DNA, 20 bp, Artificial Sequence
  Synthetic oligonucleotide: CBLB-199
caggatcctctccccttgcc

SEQ ID NO: 7206 - DNA, 20 bp, Artificial Sequence
  Synthetic oligonucleotide: CBLB-200
ggatcctctccccttgccca

SEQ ID NO: 7207 - DNA, 20 bp, Artificial Sequence
  Synthetic oligonucleotide: CBLB-201
tcctctccccttgcccagag

SEQ ID NO: 7208 - DNA, 20 bp, Artificial Sequence
  Synthetic oligonucleotide: CBLB-202
tgccacccgtgcctcctcgc

SEQ ID NO: 7209 - DNA, 20 bp, Artificial Sequence
  Synthetic oligonucleotide: CBLB-203
ctcctcgcctggatctaatt

SEQ ID NO: 7210 - DNA, 20 bp, Artificial Sequence
  Synthetic oligonucleotide: CBLB-204
gatctccctgtggcagccca

SEQ ID NO: 7211 - DNA, 20 bp, Artificial Sequence
  Synthetic oligonucleotide: CBLB-205
caaaggtagatcaattttat

SEQ ID NO: 7212 - DNA, 20 bp, Artificial Sequence
  Synthetic oligonucleotide: CBLB-206
tttagtcttctccttgcatg

SEQ ID NO: 7213 - DNA, 20 bp, Artificial Sequence
  Synthetic oligonucleotide: CBLB-207
tagtcttctccttgcatggt

SEQ ID NO: 7214 - DNA, 20 bp, Artificial Sequence
  Synthetic oligonucleotide: CBLB-208
ccagcaccacctcctccctt

SEQ ID NO: 7215 - DNA, 17 bp, Artificial Sequence
  Synthetic oligonucleotide: CBLB-209
ttcccttgtgcctacag

SEQ ID NO: 7216 - DNA, 17 bp, Artificial Sequence
  Synthetic oligonucleotide: CBLB-210
cttcagtcacatgctgg

SEQ ID NO: 7217 - DNA, 17 bp, Artificial Sequence
  Synthetic oligonucleotide: CBLB-211
ttcccaatggtcaattc

SEQ ID NO: 7218 - DNA, 17 bp, Artificial Sequence
  Synthetic oligonucleotide: CBLB-792
tcccaatggtcaattcc

SEQ ID NO: 7219 - DNA, 17 bp, Artificial Sequence
  Synthetic oligonucleotide: CBLB-793
cccaatggtcaattcca

SEQ ID NO: 7220 - DNA, 17 bp, Artificial Sequence
  Synthetic oligonucleotide: CBLB-214
cacaaaagcagatgctg

SEQ ID NO: 7221 - DNA, 17 bp, Artificial Sequence
  Synthetic oligonucleotide: CBLB-215
gcagatgctgctgaatt

SEQ ID NO: 7222 - DNA, 17 bp, Artificial Sequence
  Synthetic oligonucleotide: CBLB-794
cagatgctgctgaattc

SEQ ID NO: 7223 - DNA, 17 bp, Artificial Sequence
  Synthetic oligonucleotide: CBLB-217
gatgctgctgaattctg

SEQ ID NO: 7224 - DNA, 17 bp, Artificial Sequence
  Synthetic oligonucleotide: CBLB-218
attctggagaaagtttt

SEQ ID NO: 7225 - DNA, 17 bp, Artificial Sequence
  Synthetic oligonucleotide: CBLB-795
ttctggagaaagttttt

SEQ ID NO: 7226 - DNA, 17 bp, Artificial Sequence
  Synthetic oligonucleotide: CBLB-220
aaatcatttttatagct

SEQ ID NO: 7227 - DNA, 17 bp, Artificial Sequence
  Synthetic oligonucleotide: CBLB-221
tttttttccaccttgca

SEQ ID NO: 7228 - DNA, 17 bp, Artificial Sequence
  Synthetic oligonucleotide: CBLB-222
cacagaactatcgtacc

SEQ ID NO: 7229 - DNA, 17 bp, Artificial Sequence
  Synthetic oligonucleotide: CBLB-797
acagaactatcgtacca

SEQ ID NO: 7230 - DNA, 17 bp, Artificial Sequence
  Synthetic oligonucleotide: CBLB-224
attcagacagtgccttc

SEQ ID NO: 7231 - DNA, 17 bp, Artificial Sequence
  Synthetic oligonucleotide: CBLB-225
accagattagctctggc

SEQ ID NO: 7232 - DNA, 17 bp, Artificial Sequence
  Synthetic oligonucleotide: CBLB-800
ccagattagctctggcc

SEQ ID NO: 7233 - DNA, 17 bp, Artificial Sequence
  Synthetic oligonucleotide: CBLB-227
tgattacatttcagttt

SEQ ID NO: 7234 - DNA, 17 bp, Artificial Sequence
  Synthetic oligonucleotide: CBLB-228
ttttttattttttagcc

SEQ ID NO: 7235 - DNA, 17 bp, Artificial Sequence
  Synthetic oligonucleotide: CBLB-804
tttttattttttagcct

SEQ ID NO: 7236 - DNA, 17 bp, Artificial Sequence
  Synthetic oligonucleotide: CBLB-230
ccttggggctctatttt

SEQ ID NO: 7237 - DNA, 17 bp, Artificial Sequence
  Synthetic oligonucleotide: CBLB-807
cttggggctctattttg

SEQ ID NO: 7238 - DNA, 17 bp, Artificial Sequence
  Synthetic oligonucleotide: CBLB-232
ggctctattttgcggaa

SEQ ID NO: 7239 - DNA, 17 bp, Artificial Sequence
  Synthetic oligonucleotide: CBLB-808
gctctattttgcggaat

SEQ ID NO: 7240 - DNA, 17 bp, Artificial Sequence
  Synthetic oligonucleotide: CBLB-234
ggcatttctcacatatg

SEQ ID NO: 7241 - DNA, 17 bp, Artificial Sequence
  Synthetic oligonucleotide: CBLB-235
aagttaaagcacgacta

SEQ ID NO: 7242 - DNA, 17 bp, Artificial Sequence
  Synthetic oligonucleotide: CBLB-236
gaaatatagcaccaaac

SEQ ID NO: 7243 - DNA, 17 bp, Artificial Sequence
  Synthetic oligonucleotide: CBLB-811
aaatatagcaccaaacc

SEQ ID NO: 7244 - DNA, 17 bp, Artificial Sequence
  Synthetic oligonucleotide: CBLB-238
ggttaagttgcactcga

SEQ ID NO: 7245 - DNA, 17 bp, Artificial Sequence
  Synthetic oligonucleotide: CBLB-814
gttaagttgcactcgat

SEQ ID NO: 7246 - DNA, 17 bp, Artificial Sequence
  Synthetic oligonucleotide: CBLB-240
tgcactcgattgggaca

SEQ ID NO: 7247 - DNA, 17 bp, Artificial Sequence
  Synthetic oligonucleotide: CBLB-241
ggccattggctatgtga

SEQ ID NO: 7248 - DNA, 17 bp, Artificial Sequence
  Synthetic oligonucleotide: CBLB-819
gccattggctatgtgac

SEQ ID NO: 7249 - DNA, 17 bp, Artificial Sequence
  Synthetic oligonucleotide: CBLB-820
ccattggctatgtgact

SEQ ID NO: 7250 - DNA, 17 bp, Artificial Sequence
  Synthetic oligonucleotide: CBLB-244
tggctatgtgactgggg

SEQ ID NO: 7251 - DNA, 17 bp, Artificial Sequence
  Synthetic oligonucleotide: CBLB-822
ggctatgtgactgggga

SEQ ID NO: 7252 - DNA, 17 bp, Artificial Sequence
  Synthetic oligonucleotide: CBLB-823
gctatgtgactggggat

SEQ ID NO: 7253 - DNA, 17 bp, Artificial Sequence
  Synthetic oligonucleotide: CBLB-247
gccctgattgatggcag

SEQ ID NO: 7254 - DNA, 17 bp, Artificial Sequence
  Synthetic oligonucleotide: CBLB-825
ccctgattgatggcagc

SEQ ID NO: 7255 - DNA, 17 bp, Artificial Sequence
  Synthetic oligonucleotide: CBLB-826
cctgattgatggcagca

SEQ ID NO: 7256 - DNA, 17 bp, Artificial Sequence
  Synthetic oligonucleotide: CBLB-250
gattgatggcagcaggg

SEQ ID NO: 7257 - DNA, 17 bp, Artificial Sequence
  Synthetic oligonucleotide: CBLB-251
agggaaggattgtaagt

SEQ ID NO: 7258 - DNA, 17 bp, Artificial Sequence
  Synthetic oligonucleotide: CBLB-252
ggaaggattgtaagtat

SEQ ID NO: 7259 - DNA, 17 bp, Artificial Sequence
  Synthetic oligonucleotide: CBLB-253
gattgtaagtatgagaa

SEQ ID NO: 7260 - DNA, 17 bp, Artificial Sequence
  Synthetic oligonucleotide: CBLB-828
attgtaagtatgagaaa

SEQ ID NO: 7261 - DNA, 17 bp, Artificial Sequence
  Synthetic oligonucleotide: CBLB-255
agtatgagaaatggaag

SEQ ID NO: 7262 - DNA, 17 bp, Artificial Sequence
  Synthetic oligonucleotide: CBLB-829
gtatgagaaatggaagt

SEQ ID NO: 7263 - DNA, 17 bp, Artificial Sequence
  Synthetic oligonucleotide: CBLB-257
cagttatctttatcctg

SEQ ID NO: 7264 - DNA, 17 bp, Artificial Sequence
  Synthetic oligonucleotide: CBLB-830
agttatctttatcctga

SEQ ID NO: 7265 - DNA, 17 bp, Artificial Sequence
  Synthetic oligonucleotide: CBLB-831
gttatctttatcctgat

SEQ ID NO: 7266 - DNA, 17 bp, Artificial Sequence
  Synthetic oligonucleotide: CBLB-260
tatctttatcctgatgg

SEQ ID NO: 7267 - DNA, 17 bp, Artificial Sequence
  Synthetic oligonucleotide: CBLB-832
atctttatcctgatggg

SEQ ID NO: 7268 - DNA, 17 bp, Artificial Sequence
  Synthetic oligonucleotide: CBLB-262
ttataatcctgatttaa

SEQ ID NO: 7269 - DNA, 17 bp, Artificial Sequence
  Synthetic oligonucleotide: CBLB-263
tgatttaactggattat

SEQ ID NO: 7270 - DNA, 17 bp, Artificial Sequence
  Synthetic oligonucleotide: CBLB-264
ataaaagttacacaggt

SEQ ID NO: 7271 - DNA, 17 bp, Artificial Sequence
  Synthetic oligonucleotide: CBLB-265
caggtaaggataattgc

SEQ ID NO: 7272 - DNA, 17 bp, Artificial Sequence
  Synthetic oligonucleotide: CBLB-266
ccctcctccccaaattc

SEQ ID NO: 7273 - DNA, 17 bp, Artificial Sequence
  Synthetic oligonucleotide: CBLB-836
cctcctccccaaattcc

SEQ ID NO: 7274 - DNA, 17 bp, Artificial Sequence
  Synthetic oligonucleotide: CBLB-268
caaattccaggaacaat

SEQ ID NO: 7275 - DNA, 17 bp, Artificial Sequence
  Synthetic oligonucleotide: CBLB-269
acaatatgaattatatt

SEQ ID NO: 7276 - DNA, 17 bp, Artificial Sequence
  Synthetic oligonucleotide: CBLB-270
atgaattatattgtgaa

SEQ ID NO: 7277 - DNA, 17 bp, Artificial Sequence
  Synthetic oligonucleotide: CBLB-271
gctctgtaagatttgtg

SEQ ID NO: 7278 - DNA, 17 bp, Artificial Sequence
  Synthetic oligonucleotide: CBLB-272
tctgtaagatttgtgca

SEQ ID NO: 7279 - DNA, 17 bp, Artificial Sequence
  Synthetic oligonucleotide: CBLB-273
tgacaaagatgtcaaga

SEQ ID NO: 7280 - DNA, 17 bp, Artificial Sequence
  Synthetic oligonucleotide: CBLB-274
tgtcaagattgagcctt

SEQ ID NO: 7281 - DNA, 17 bp, Artificial Sequence
  Synthetic oligonucleotide: CBLB-275
gtataatcattagcaac

SEQ ID NO: 7282 - DNA, 17 bp, Artificial Sequence
  Synthetic oligonucleotide: CBLB-276
tgcattttctatttgtt

SEQ ID NO: 7283 - DNA, 17 bp, Artificial Sequence
  Synthetic oligonucleotide: CBLB-845
gcattttctatttgttt

SEQ ID NO: 7284 - DNA, 17 bp, Artificial Sequence
  Synthetic oligonucleotide: CBLB-278
ttctatttgtttaggag

SEQ ID NO: 7285 - DNA, 17 bp, Artificial Sequence
  Synthetic oligonucleotide: CBLB-279
tttaggagtcggatggt

SEQ ID NO: 7286 - DNA, 17 bp, Artificial Sequence
  Synthetic oligonucleotide: CBLB-280
ctgccctttctgtcgtt

SEQ ID NO: 7287 - DNA, 17 bp, Artificial Sequence
  Synthetic oligonucleotide: CBLB-281
ctgtcgttgtgaaataa

SEQ ID NO: 7288 - DNA, 17 bp, Artificial Sequence
  Synthetic oligonucleotide: CBLB-850
tgtcgttgtgaaataaa

SEQ ID NO: 7289 - DNA, 17 bp, Artificial Sequence
  Synthetic oligonucleotide: CBLB-283
ttgtgaaataaaaggaa

SEQ ID NO: 7290 - DNA, 17 bp, Artificial Sequence
  Synthetic oligonucleotide: CBLB-284
gaactgagcccataatc

SEQ ID NO: 7291 - DNA, 17 bp, Artificial Sequence
  Synthetic oligonucleotide: CBLB-285
gtggacccctttgatcc

SEQ ID NO: 7292 - DNA, 17 bp, Artificial Sequence
  Synthetic oligonucleotide: CBLB-286
cccctttgatccaagag

SEQ ID NO: 7293 - DNA, 17 bp, Artificial Sequence
  Synthetic oligonucleotide: CBLB-287
gcatgccgatgctagac

SEQ ID NO: 7294 - DNA, 17 bp, Artificial Sequence
  Synthetic oligonucleotide: CBLB-288
ggacgacgatgatgatc

SEQ ID NO: 7295 - DNA, 17 bp, Artificial Sequence
  Synthetic oligonucleotide: CBLB-289
acgacgatgatgatcgt

SEQ ID NO: 7296 - DNA, 17 bp, Artificial Sequence
  Synthetic oligonucleotide: CBLB-856
cgacgatgatgatcgtg

SEQ ID NO: 7297 - DNA, 17 bp, Artificial Sequence
  Synthetic oligonucleotide: CBLB-291
gtgaggagtccttgatg

SEQ ID NO: 7298 - DNA, 17 bp, Artificial Sequence
  Synthetic oligonucleotide: CBLB-292
aatcggttggcaaacgt

SEQ ID NO: 7299 - DNA, 17 bp, Artificial Sequence
  Synthetic oligonucleotide: CBLB-293
cgtccgaaaggtaaaac

SEQ ID NO: 7300 - DNA, 17 bp, Artificial Sequence
  Synthetic oligonucleotide: CBLB-294
aaggtaaaactagaaac

SEQ ID NO: 7301 - DNA, 17 bp, Artificial Sequence
  Synthetic oligonucleotide: CBLB-295
tctagtgcactgacagg

SEQ ID NO: 7302 - DNA, 17 bp, Artificial Sequence
  Synthetic oligonucleotide: CBLB-296
ctcaccagtcacatcac

SEQ ID NO: 7303 - DNA, 17 bp, Artificial Sequence
  Synthetic oligonucleotide: CBLB-297
gatcctctccccttgcc

SEQ ID NO: 7304 - DNA, 17 bp, Artificial Sequence
  Synthetic oligonucleotide: CBLB-298
tcctctccccttgccca

SEQ ID NO: 7305 - DNA, 17 bp, Artificial Sequence
  Synthetic oligonucleotide: CBLB-299
tctccccttgcccagag

SEQ ID NO: 7306 - DNA, 17 bp, Artificial Sequence
  Synthetic oligonucleotide: CBLB-300
cacccgtgcctcctcgc

SEQ ID NO: 7307 - DNA, 17 bp, Artificial Sequence
  Synthetic oligonucleotide: CBLB-301
ctcgcctggatctaatt

SEQ ID NO: 7308 - DNA, 17 bp, Artificial Sequence
  Synthetic oligonucleotide: CBLB-302
ctccctgtggcagccca

SEQ ID NO: 7309 - DNA, 17 bp, Artificial Sequence
  Synthetic oligonucleotide: CBLB-303
aggtagatcaattttat

SEQ ID NO: 7310 - DNA, 17 bp, Artificial Sequence
  Synthetic oligonucleotide: CBLB-304
agtcttctccttgcatg

SEQ ID NO: 7311 - DNA, 17 bp, Artificial Sequence
  Synthetic oligonucleotide: CBLB-305
tcttctccttgcatggt

SEQ ID NO: 7312 - DNA, 17 bp, Artificial Sequence
  Synthetic oligonucleotide: CBLB-306
gcaccacctcctccctt

SEQ ID NO: 7313 - DNA, 20 bp, Artificial Sequence
  Synthetic oligonucleotide: CBLB-307
tgtaggcacaagggaaaaaa

SEQ ID NO: 7314 - DNA, 20 bp, Artificial Sequence
  Synthetic oligonucleotide: CBLB-949
gatttcgtctgtaggcacaa

SEQ ID NO: 7315 - DNA, 20 bp, Artificial Sequence
  Synthetic oligonucleotide: CBLB-950
agatttcgtctgtaggcaca

SEQ ID NO: 7316 - DNA, 20 bp, Artificial Sequence
  Synthetic oligonucleotide: CBLB-310
gagatttcgtctgtaggcac

SEQ ID NO: 7317 - DNA, 20 bp, Artificial Sequence
  Synthetic oligonucleotide: CBLB-311
tgaagataagggacagtttt

SEQ ID NO: 7318 - DNA, 20 bp, Artificial Sequence
  Synthetic oligonucleotide: CBLB-953
ccagcatgtgactgaagata

SEQ ID NO: 7319 - DNA, 20 bp, Artificial Sequence
  Synthetic oligonucleotide: CBLB-313
gccagcatgtgactgaagat

SEQ ID NO: 7320 - DNA, 20 bp, Artificial Sequence
  Synthetic oligonucleotide: CBLB-314
tgatttctgccagcatgtga

SEQ ID NO: 7321 - DNA, 20 bp, Artificial Sequence
  Synthetic oligonucleotide: CBLB-954
tctccctggaattgaccatt

SEQ ID NO: 7322 - DNA, 20 bp, Artificial Sequence
  Synthetic oligonucleotide: CBLB-955
atctccctggaattgaccat

SEQ ID NO: 7323 - DNA, 20 bp, Artificial Sequence
  Synthetic oligonucleotide: CBLB-317
tatctccctggaattgacca

SEQ ID NO: 7324 - DNA, 20 bp, Artificial Sequence
  Synthetic oligonucleotide: CBLB-956
tgatacgaaagttatctccc

SEQ ID NO: 7325 - DNA, 20 bp, Artificial Sequence
  Synthetic oligonucleotide: CBLB-319
gtgatacgaaagttatctcc

SEQ ID NO: 7326 - DNA, 20 bp, Artificial Sequence
  Synthetic oligonucleotide: CBLB-320
gcagcatctgcttttgtgat

SEQ ID NO: 7327 - DNA, 20 bp, Artificial Sequence
  Synthetic oligonucleotide: CBLB-321
tgtctccaaaaaactttctc

SEQ ID NO: 7328 - DNA, 20 bp, Artificial Sequence
  Synthetic oligonucleotide: CBLB-957
ctgtgcaaggtggaaaaaaa

SEQ ID NO: 7329 - DNA, 20 bp, Artificial Sequence
  Synthetic oligonucleotide: CBLB-958
tctgtgcaaggtggaaaaaa

SEQ ID NO: 7330 - DNA, 20 bp, Artificial Sequence
  Synthetic oligonucleotide: CBLB-324
ttctgtgcaaggtggaaaaa

SEQ ID NO: 7331 - DNA, 20 bp, Artificial Sequence
  Synthetic oligonucleotide: CBLB-959
tacgatagttctgtgcaagg

SEQ ID NO: 7332 - DNA, 20 bp, Artificial Sequence
  Synthetic oligonucleotide: CBLB-326
gtacgatagttctgtgcaag

SEQ ID NO: 7333 - DNA, 20 bp, Artificial Sequence
  Synthetic oligonucleotide: CBLB-327
ggacctcatgaaggcactgt

SEQ ID NO: 7334 - DNA, 20 bp, Artificial Sequence
  Synthetic oligonucleotide: CBLB-328
gagctaatctggtggacctc

SEQ ID NO: 7335 - DNA, 20 bp, Artificial Sequence
  Synthetic oligonucleotide: CBLB-329
tccaggccagagctaatctg

SEQ ID NO: 7336 - DNA, 20 bp, Artificial Sequence
  Synthetic oligonucleotide: CBLB-330
tagagccattgcttccaggc

SEQ ID NO: 7337 - DNA, 20 bp, Artificial Sequence
  Synthetic oligonucleotide: CBLB-331
gttaaatcaattgttgattt

SEQ ID NO: 7338 - DNA, 20 bp, Artificial Sequence
  Synthetic oligonucleotide: CBLB-332
aaaaatatcaaattcaaaaa

SEQ ID NO: 7339 - DNA, 20 bp, Artificial Sequence
  Synthetic oligonucleotide: CBLB-333
ctaagcaagtataaacttac

SEQ ID NO: 7340 - DNA, 20 bp, Artificial Sequence
  Synthetic oligonucleotide: CBLB-334
ctaaaaaataaaaaaattaa

SEQ ID NO: 7341 - DNA, 20 bp, Artificial Sequence
  Synthetic oligonucleotide: CBLB-335
gaaattccaattccgcaaaa

SEQ ID NO: 7342 - DNA, 20 bp, Artificial Sequence
  Synthetic oligonucleotide: CBLB-336
aacctggatgtgtcacagct

SEQ ID NO: 7343 - DNA, 20 bp, Artificial Sequence
  Synthetic oligonucleotide: CBLB-337
tgtgagaaatgccatgtaac

SEQ ID NO: 7344 - DNA, 20 bp, Artificial Sequence
  Synthetic oligonucleotide: CBLB-338
gctttaacttcatcatatgt

SEQ ID NO: 7345 - DNA, 20 bp, Artificial Sequence
  Synthetic oligonucleotide: CBLB-339
gtgctttaacttcatcatat

SEQ ID NO: 7346 - DNA, 20 bp, Artificial Sequence
  Synthetic oligonucleotide: CBLB-340
ctgctaaaaagtcttacctt

SEQ ID NO: 7347 - DNA, 20 bp, Artificial Sequence
  Synthetic oligonucleotide: CBLB-341
aaaatatagctgcaaaacat

SEQ ID NO: 7348 - DNA, 20 bp, Artificial Sequence
  Synthetic oligonucleotide: CBLB-972
ccaatcgagtgcaacttaac

SEQ ID NO: 7349 - DNA, 20 bp, Artificial Sequence
  Synthetic oligonucleotide: CBLB-343
cccaatcgagtgcaacttaa

SEQ ID NO: 7350 - DNA, 20 bp, Artificial Sequence
  Synthetic oligonucleotide: CBLB-344
ccaatggcccactgtcccaa

SEQ ID NO: 7351 - DNA, 20 bp, Artificial Sequence
  Synthetic oligonucleotide: CBLB-345
gcttgaaataagggcttgtt

SEQ ID NO: 7352 - DNA, 20 bp, Artificial Sequence
  Synthetic oligonucleotide: CBLB-346
catcaatcagggcttgaaat

SEQ ID NO: 7353 - DNA, 20 bp, Artificial Sequence
  Synthetic oligonucleotide: CBLB-347
ctgctgccatcaatcagggc

SEQ ID NO: 7354 - DNA, 20 bp, Artificial Sequence
  Synthetic oligonucleotide: CBLB-348
ccttccctgctgccatcaat

SEQ ID NO: 7355 - DNA, 20 bp, Artificial Sequence
  Synthetic oligonucleotide: CBLB-349
taaagataactgaatttaaa

SEQ ID NO: 7356 - DNA, 20 bp, Artificial Sequence
  Synthetic oligonucleotide: CBLB-350
tcccatcaggataaagataa

SEQ ID NO: 7357 - DNA, 20 bp, Artificial Sequence
  Synthetic oligonucleotide: CBLB-351
aggattataactcctcccat

SEQ ID NO: 7358 - DNA, 20 bp, Artificial Sequence
  Synthetic oligonucleotide: CBLB-352
ttcacataatccagttaaat

SEQ ID NO: 7359 - DNA, 20 bp, Artificial Sequence
  Synthetic oligonucleotide: CBLB-353
tgtgtaacttttatatggtc

SEQ ID NO: 7360 - DNA, 20 bp, Artificial Sequence
  Synthetic oligonucleotide: CBLB-354
cctggaatttggggaggagg

SEQ ID NO: 7361 - DNA, 20 bp, Artificial Sequence
  Synthetic oligonucleotide: CBLB-985
ttcctggaatttggggagga

SEQ ID NO: 7362 - DNA, 20 bp, Artificial Sequence
  Synthetic oligonucleotide: CBLB-986
gttcctggaatttggggagg

SEQ ID NO: 7363 - DNA, 20 bp, Artificial Sequence
  Synthetic oligonucleotide: CBLB-357
tgttcctggaatttggggag

SEQ ID NO: 7364 - DNA, 20 bp, Artificial Sequence
  Synthetic oligonucleotide: CBLB-987
attgttcctggaatttgggg

SEQ ID NO: 7365 - DNA, 20 bp, Artificial Sequence
  Synthetic oligonucleotide: CBLB-359
tattgttcctggaatttggg

SEQ ID NO: 7366 - DNA, 20 bp, Artificial Sequence
  Synthetic oligonucleotide: CBLB-988
catattgttcctggaatttg

SEQ ID NO: 7367 - DNA, 20 bp, Artificial Sequence
  Synthetic oligonucleotide: CBLB-989
tcatattgttcctggaattt

SEQ ID NO: 7368 - DNA, 20 bp, Artificial Sequence
  Synthetic oligonucleotide: CBLB-990
ttcatattgttcctggaatt

SEQ ID NO: 7369 - DNA, 20 bp, Artificial Sequence
  Synthetic oligonucleotide: CBLB-363
attcatattgttcctggaat

SEQ ID NO: 7370 - DNA, 20 bp, Artificial Sequence
  Synthetic oligonucleotide: CBLB-991
aatataattcatattgttcc

SEQ ID NO: 7371 - DNA, 20 bp, Artificial Sequence
  Synthetic oligonucleotide: CBLB-365
caatataattcatattgttc

SEQ ID NO: 7372 - DNA, 20 bp, Artificial Sequence
  Synthetic oligonucleotide: CBLB-992
aatcttacagagctgaaaag

SEQ ID NO: 7373 - DNA, 20 bp, Artificial Sequence
  Synthetic oligonucleotide: CBLB-367
aaatcttacagagctgaaaa

SEQ ID NO: 7374 - DNA, 20 bp, Artificial Sequence
  Synthetic oligonucleotide: CBLB-368
tctgcacaaatcttacagag

SEQ ID NO: 7375 - DNA, 20 bp, Artificial Sequence
  Synthetic oligonucleotide: CBLB-369
cattctctgcacaaatctta

SEQ ID NO: 7376 - DNA, 20 bp, Artificial Sequence
  Synthetic oligonucleotide: CBLB-370
tacctgccatgccgtaaggc

SEQ ID NO: 7377 - DNA, 20 bp, Artificial Sequence
  Synthetic oligonucleotide: CBLB-371
cctaaacaaatagaaaatgc

SEQ ID NO: 7378 - DNA, 20 bp, Artificial Sequence
  Synthetic oligonucleotide: CBLB-372
ccatccgactcctaaacaaa

SEQ ID NO: 7379 - DNA, 20 bp, Artificial Sequence
  Synthetic oligonucleotide: CBLB-373
ttttatttcacaacgacaga

SEQ ID NO: 7380 - DNA, 20 bp, Artificial Sequence
  Synthetic oligonucleotide: CBLB-374
ttccttttatttcacaacga

SEQ ID NO: 7381 - DNA, 20 bp, Artificial Sequence
  Synthetic oligonucleotide: CBLB-375
gatcaaaggggtccacgatt

SEQ ID NO: 7382 - DNA, 20 bp, Artificial Sequence
  Synthetic oligonucleotide: CBLB-1004
gccttcatctcttggatcaa

SEQ ID NO: 7383 - DNA, 20 bp, Artificial Sequence
  Synthetic oligonucleotide: CBLB-377
agccttcatctcttggatca

SEQ ID NO: 7384 - DNA, 20 bp, Artificial Sequence
  Synthetic oligonucleotide: CBLB-378
acacctggagccttcatctc

SEQ ID NO: 7385 - DNA, 20 bp, Artificial Sequence
  Synthetic oligonucleotide: CBLB-1006
gtcaatgatgctgcaacacc

SEQ ID NO: 7386 - DNA, 20 bp, Artificial Sequence
  Synthetic oligonucleotide: CBLB-380
ggtcaatgatgctgcaacac

SEQ ID NO: 7387 - DNA, 20 bp, Artificial Sequence
  Synthetic oligonucleotide: CBLB-1009
gtctagcatcggcatgccaa

SEQ ID NO: 7388 - DNA, 20 bp, Artificial Sequence
  Synthetic oligonucleotide: CBLB-382
agtctagcatcggcatgcca

SEQ ID NO: 7389 - DNA, 20 bp, Artificial Sequence
  Synthetic oligonucleotide: CBLB-383
ttgccaaccgattcatcatc

SEQ ID NO: 7390 - DNA, 20 bp, Artificial Sequence
  Synthetic oligonucleotide: CBLB-384
catgtttctagttttacctt

SEQ ID NO: 7391 - DNA, 20 bp, Artificial Sequence
  Synthetic oligonucleotide: CBLB-385
agtgcactagaacagaaaaa

SEQ ID NO: 7392 - DNA, 20 bp, Artificial Sequence
  Synthetic oligonucleotide: CBLB-386
tcagtgcactagaacagaaa

SEQ ID NO: 7393 - DNA, 20 bp, Artificial Sequence
  Synthetic oligonucleotide: CBLB-387
tgcctgtcagtgcactagaa

SEQ ID NO: 7394 - DNA, 20 bp, Artificial Sequence
  Synthetic oligonucleotide: CBLB-388
agttctgcctgtcagtgcac

SEQ ID NO: 7395 - DNA, 20 bp, Artificial Sequence
  Synthetic oligonucleotide: CBLB-389
ggatcctggtgatgtgactg

SEQ ID NO: 7396 - DNA, 20 bp, Artificial Sequence
  Synthetic oligonucleotide: CBLB-390
ttcttctctgggcaagggga

SEQ ID NO: 7397 - DNA, 20 bp, Artificial Sequence
  Synthetic oligonucleotide: CBLB-391
ctttcttctctgggcaaggg

SEQ ID NO: 7398 - DNA, 20 bp, Artificial Sequence
  Synthetic oligonucleotide: CBLB-1016
ggctttcttctctgggcaag

SEQ ID NO: 7399 - DNA, 20 bp, Artificial Sequence
  Synthetic oligonucleotide: CBLB-1017
tggctttcttctctgggcaa

SEQ ID NO: 7400 - DNA, 20 bp, Artificial Sequence
  Synthetic oligonucleotide: CBLB-1018
gtggctttcttctctgggca

SEQ ID NO: 7401 - DNA, 20 bp, Artificial Sequence
  Synthetic oligonucleotide: CBLB-395
tgtggctttcttctctgggc

SEQ ID NO: 7402 - DNA, 20 bp, Artificial Sequence
  Synthetic oligonucleotide: CBLB-396
tcaggctgtggctttcttct

SEQ ID NO: 7403 - DNA, 20 bp, Artificial Sequence
  Synthetic oligonucleotide: CBLB-397
gcttagatgtgggatctgga

SEQ ID NO: 7404 - DNA, 20 bp, Artificial Sequence
  Synthetic oligonucleotide: CBLB-1025
gcaggcttagatgtgggatc

SEQ ID NO: 7405 - DNA, 20 bp, Artificial Sequence
  Synthetic oligonucleotide: CBLB-399
ggcaggcttagatgtgggat

SEQ ID NO: 7406 - DNA, 20 bp, Artificial Sequence
  Synthetic oligonucleotide: CBLB-1027
acgggtggcaggcttagatg

SEQ ID NO: 7407 - DNA, 20 bp, Artificial Sequence
  Synthetic oligonucleotide: CBLB-401
cacgggtggcaggcttagat

SEQ ID NO: 7408 - DNA, 20 bp, Artificial Sequence
  Synthetic oligonucleotide: CBLB-402
ttagatccaggcgaggaggc

SEQ ID NO: 7409 - DNA, 20 bp, Artificial Sequence
  Synthetic oligonucleotide: CBLB-1033
ttctgaattagatccaggcg

SEQ ID NO: 7410 - DNA, 20 bp, Artificial Sequence
  Synthetic oligonucleotide: CBLB-404
tttctgaattagatccaggc

SEQ ID NO: 7411 - DNA, 20 bp, Artificial Sequence
  Synthetic oligonucleotide: CBLB-405
cctttctgaattagatccag

SEQ ID NO: 7412 - DNA, 20 bp, Artificial Sequence
  Synthetic oligonucleotide: CBLB-406
ggagatctaactatgccttt

SEQ ID NO: 7413 - DNA, 20 bp, Artificial Sequence
  Synthetic oligonucleotide: CBLB-1035
gaacccgttgggctgccaca

SEQ ID NO: 7414 - DNA, 20 bp, Artificial Sequence
  Synthetic oligonucleotide: CBLB-1036
tgaacccgttgggctgccac

SEQ ID NO: 7415 - DNA, 20 bp, Artificial Sequence
  Synthetic oligonucleotide: CBLB-409
gtgaacccgttgggctgcca

SEQ ID NO: 7416 - DNA, 20 bp, Artificial Sequence
  Synthetic oligonucleotide: CBLB-410
atctacctttggtgaacccg

SEQ ID NO: 7417 - DNA, 20 bp, Artificial Sequence
  Synthetic oligonucleotide: CBLB-411
ataaaattgatctacctttg

SEQ ID NO: 7418 - DNA, 20 bp, Artificial Sequence
  Synthetic oligonucleotide: CBLB-412
agaagactaaagaaacagaa

SEQ ID NO: 7419 - DNA, 20 bp, Artificial Sequence
  Synthetic oligonucleotide: CBLB-413
ggagaagactaaagaaacag

SEQ ID NO: 7420 - DNA, 20 bp, Artificial Sequence
  Synthetic oligonucleotide: CBLB-414
caaggagaagactaaagaaa

SEQ ID NO: 7421 - DNA, 20 bp, Artificial Sequence
  Synthetic oligonucleotide: CBLB-415
accatgcaaggagaagacta

SEQ ID NO: 7422 - DNA, 20 bp, Artificial Sequence
  Synthetic oligonucleotide: CBLB-416
ttgttttctcaccatgcaag

SEQ ID NO: 7423 - DNA, 20 bp, Artificial Sequence
  Synthetic oligonucleotide: CBLB-1040
tcttgttttctcaccatgca

SEQ ID NO: 7424 - DNA, 20 bp, Artificial Sequence
  Synthetic oligonucleotide: CBLB-418
atcttgttttctcaccatgc

SEQ ID NO: 7425 - DNA, 20 bp, Artificial Sequence
  Synthetic oligonucleotide: CBLB-1042
ttaagggaggaggtggtgct

SEQ ID NO: 7426 - DNA, 20 bp, Artificial Sequence
  Synthetic oligonucleotide: CBLB-1043
cttaagggaggaggtggtgc

SEQ ID NO: 7427 - DNA, 20 bp, Artificial Sequence
  Synthetic oligonucleotide: CBLB-421
tcttaagggaggaggtggtg

SEQ ID NO: 7428 - DNA, 20 bp, Artificial Sequence
  Synthetic oligonucleotide: CBLB-1046
ggaggaggatctcttaaggg

SEQ ID NO: 7429 - DNA, 20 bp, Artificial Sequence
  Synthetic oligonucleotide: CBLB-423
tggaggaggatctcttaagg

SEQ ID NO: 7430 - DNA, 20 bp, Artificial Sequence
  Synthetic oligonucleotide: CBLB-1047
ggtggaggaggatctcttaa

SEQ ID NO: 7431 - DNA, 20 bp, Artificial Sequence
  Synthetic oligonucleotide: CBLB-1048
cggtggaggaggatctctta

SEQ ID NO: 7432 - DNA, 20 bp, Artificial Sequence
  Synthetic oligonucleotide: CBLB-426
gcggtggaggaggatctctt

SEQ ID NO: 7433 - DNA, 20 bp, Artificial Sequence
  Synthetic oligonucleotide: CBLB-427
tctttcaggtggcggtggag

SEQ ID NO: 7434 - DNA, 20 bp, Artificial Sequence
  Synthetic oligonucleotide: CBLB-1050
ggtctttcaggtggcggtgg

SEQ ID NO: 7435 - DNA, 20 bp, Artificial Sequence
  Synthetic oligonucleotide: CBLB-429
aggtctttcaggtggcggtg

SEQ ID NO: 7436 - DNA, 20 bp, Artificial Sequence
  Synthetic oligonucleotide: CBLB-1051
ggaggtctttcaggtggcgg

SEQ ID NO: 7437 - DNA, 20 bp, Artificial Sequence
  Synthetic oligonucleotide: CBLB-431
tggaggtctttcaggtggcg

SEQ ID NO: 7438 - DNA, 20 bp, Artificial Sequence
  Synthetic oligonucleotide: CBLB-1056
ctattgtctggtgggattgg

SEQ ID NO: 7439 - DNA, 20 bp, Artificial Sequence
  Synthetic oligonucleotide: CBLB-433
tctattgtctggtgggattg

SEQ ID NO: 7440 - RNA, 17 nt, Artificial Sequence
  Synthetic oligonucleotide: CBLB-434
aggcacaagggaaaaaa

SEQ ID NO: 7441 - DNA, 17 bp, Artificial Sequence
  Synthetic oligonucleotide: CBLB-1191
ttcgtctgtaggcacaa

SEQ ID NO: 7442 - DNA, 17 bp, Artificial Sequence
  Synthetic oligonucleotide: CBLB-1192
tttcgtctgtaggcaca

SEQ ID NO: 7443 - DNA, 17 bp, Artificial Sequence
  Synthetic oligonucleotide: CBLB-437
atttcgtctgtaggcac

SEQ ID NO: 7444 - DNA, 17 bp, Artificial Sequence
  Synthetic oligonucleotide: CBLB-438
agataagggacagtttt

SEQ ID NO: 7445 - DNA, 17 bp, Artificial Sequence
  Synthetic oligonucleotide: CBLB-1195
gcatgtgactgaagata

SEQ ID NO: 7446 - DNA, 17 bp, Artificial Sequence
  Synthetic oligonucleotide: CBLB-440
agcatgtgactgaagat

SEQ ID NO: 7447 - DNA, 17 bp, Artificial Sequence
  Synthetic oligonucleotide: CBLB-441
tttctgccagcatgtga

SEQ ID NO: 7448 - DNA, 17 bp, Artificial Sequence
  Synthetic oligonucleotide: CBLB-1196
ccctggaattgaccatt

SEQ ID NO: 7449 - DNA, 17 bp, Artificial Sequence
  Synthetic oligonucleotide: CBLB-1197
tccctggaattgaccat

SEQ ID NO: 7450 - DNA, 17 bp, Artificial Sequence
  Synthetic oligonucleotide: CBLB-444
ctccctggaattgacca

SEQ ID NO: 7451 - DNA, 17 bp, Artificial Sequence
  Synthetic oligonucleotide: CBLB-1198
tacgaaagttatctccc

SEQ ID NO: 7452 - DNA, 17 bp, Artificial Sequence
  Synthetic oligonucleotide: CBLB-446
atacgaaagttatctcc

SEQ ID NO: 7453 - DNA, 17 bp, Artificial Sequence
  Synthetic oligonucleotide: CBLB-447
gcatctgcttttgtgat

SEQ ID NO: 7454 - DNA, 17 bp, Artificial Sequence
  Synthetic oligonucleotide: CBLB-448
ctccaaaaaactttctc

SEQ ID NO: 7455 - DNA, 17 bp, Artificial Sequence
  Synthetic oligonucleotide: CBLB-1199
tgcaaggtggaaaaaaa

SEQ ID NO: 7456 - DNA, 17 bp, Artificial Sequence
  Synthetic oligonucleotide: CBLB-1200
gtgcaaggtggaaaaaa

SEQ ID NO: 7457 - DNA, 17 bp, Artificial Sequence
  Synthetic oligonucleotide: CBLB-451
tgtgcaaggtggaaaaa

SEQ ID NO: 7458 - DNA, 17 bp, Artificial Sequence
  Synthetic oligonucleotide: CBLB-1201
gatagttctgtgcaagg

SEQ ID NO: 7459 - DNA, 17 bp, Artificial Sequence
  Synthetic oligonucleotide: CBLB-453
cgatagttctgtgcaag

SEQ ID NO: 7460 - DNA, 17 bp, Artificial Sequence
  Synthetic oligonucleotide: CBLB-454
cctcatgaaggcactgt

SEQ ID NO: 7461 - DNA, 17 bp, Artificial Sequence
  Synthetic oligonucleotide: CBLB-455
ctaatctggtggacctc

SEQ ID NO: 7462 - DNA, 17 bp, Artificial Sequence
  Synthetic oligonucleotide: CBLB-456
aggccagagctaatctg

SEQ ID NO: 7463 - DNA, 17 bp, Artificial Sequence
  Synthetic oligonucleotide: CBLB-457
agccattgcttccaggc

SEQ ID NO: 7464 - DNA, 17 bp, Artificial Sequence
  Synthetic oligonucleotide: CBLB-458
aaatcaattgttgattt

SEQ ID NO: 7465 - DNA, 17 bp, Artificial Sequence
  Synthetic oligonucleotide: CBLB-459
aatatcaaattcaaaaa

SEQ ID NO: 7466 - DNA, 17 bp, Artificial Sequence
  Synthetic oligonucleotide: CBLB-460
agcaagtataaacttac

SEQ ID NO: 7467 - DNA, 17 bp, Artificial Sequence
  Synthetic oligonucleotide: CBLB-461
aaaaataaaaaaattaa

SEQ ID NO: 7468 - DNA, 17 bp, Artificial Sequence
  Synthetic oligonucleotide: CBLB-462
attccaattccgcaaaa

SEQ ID NO: 7469 - DNA, 17 bp, Artificial Sequence
  Synthetic oligonucleotide: CBLB-463
ctggatgtgtcacagct

SEQ ID NO: 7470 - DNA, 17 bp, Artificial Sequence
  Synthetic oligonucleotide: CBLB-464
gagaaatgccatgtaac

SEQ ID NO: 7471 - DNA, 17 bp, Artificial Sequence
  Synthetic oligonucleotide: CBLB-465
ttaacttcatcatatgt

SEQ ID NO: 7472 - DNA, 17 bp, Artificial Sequence
  Synthetic oligonucleotide: CBLB-466
ctttaacttcatcatat

SEQ ID NO: 7473 - DNA, 17 bp, Artificial Sequence
  Synthetic oligonucleotide: CBLB-467
ctaaaaagtcttacctt

SEQ ID NO: 7474 - DNA, 17 bp, Artificial Sequence
  Synthetic oligonucleotide: CBLB-468
atatagctgcaaaacat

SEQ ID NO: 7475 - DNA, 17 bp, Artificial Sequence
  Synthetic oligonucleotide: CBLB-1214
atcgagtgcaacttaac

SEQ ID NO: 7476 - DNA, 17 bp, Artificial Sequence
  Synthetic oligonucleotide: CBLB-470
aatcgagtgcaacttaa

SEQ ID NO: 7477 - DNA, 17 bp, Artificial Sequence
  Synthetic oligonucleotide: CBLB-471
atggcccactgtcccaa

SEQ ID NO: 7478 - DNA, 17 bp, Artificial Sequence
  Synthetic oligonucleotide: CBLB-472
tgaaataagggcttgtt

SEQ ID NO: 7479 - DNA, 17 bp, Artificial Sequence
  Synthetic oligonucleotide: CBLB-473
caatcagggcttgaaat

SEQ ID NO: 7480 - DNA, 17 bp, Artificial Sequence
  Synthetic oligonucleotide: CBLB-474
ctgccatcaatcagggc

SEQ ID NO: 7481 - DNA, 17 bp, Artificial Sequence
  Synthetic oligonucleotide: CBLB-475
tccctgctgccatcaat

SEQ ID NO: 7482 - DNA, 17 bp, Artificial Sequence
  Synthetic oligonucleotide: CBLB-476
agataactgaatttaaa

SEQ ID NO: 7483 - DNA, 17 bp, Artificial Sequence
  Synthetic oligonucleotide: CBLB-477
catcaggataaagataa

SEQ ID NO: 7484 - DNA, 17 bp, Artificial Sequence
  Synthetic oligonucleotide: CBLB-478
attataactcctcccat

SEQ ID NO: 7485 - DNA, 17 bp, Artificial Sequence
  Synthetic oligonucleotide: CBLB-479
acataatccagttaaat

SEQ ID NO: 7486 - DNA, 17 bp, Artificial Sequence
  Synthetic oligonucleotide: CBLB-480
gtaacttttatatggtc

SEQ ID NO: 7487 - DNA, 17 bp, Artificial Sequence
  Synthetic oligonucleotide: CBLB-481
ggaatttggggaggagg

SEQ ID NO: 7488 - DNA, 17 bp, Artificial Sequence
  Synthetic oligonucleotide: CBLB-1227
ctggaatttggggagga

SEQ ID NO: 7489 - DNA, 17 bp, Artificial Sequence
  Synthetic oligonucleotide: CBLB-1228
cctggaatttggggagg

SEQ ID NO: 7490 - DNA, 17 bp, Artificial Sequence
  Synthetic oligonucleotide: CBLB-484
tcctggaatttggggag

SEQ ID NO: 7491 - DNA, 17 bp, Artificial Sequence
  Synthetic oligonucleotide: CBLB-1229
gttcctggaatttgggg

SEQ ID NO: 7492 - DNA, 17 bp, Artificial Sequence
  Synthetic oligonucleotide: CBLB-486
tgttcctggaatttggg

SEQ ID NO: 7493 - DNA, 17 bp, Artificial Sequence
  Synthetic oligonucleotide: CBLB-1230
attgttcctggaatttg

SEQ ID NO: 7494 - DNA, 17 bp, Artificial Sequence
  Synthetic oligonucleotide: CBLB-1231
tattgttcctggaattt

SEQ ID NO: 7495 - DNA, 17 bp, Artificial Sequence
  Synthetic oligonucleotide: CBLB-1232
atattgttcctggaatt

SEQ ID NO: 7496 - DNA, 17 bp, Artificial Sequence
  Synthetic oligonucleotide: CBLB-490
catattgttcctggaat

SEQ ID NO: 7497 - DNA, 17 bp, Artificial Sequence
  Synthetic oligonucleotide: CBLB-1233
ataattcatattgttcc

SEQ ID NO: 7498 - DNA, 17 bp, Artificial Sequence
  Synthetic oligonucleotide: CBLB-492
tataattcatattgttc

SEQ ID NO: 7499 - DNA, 17 bp, Artificial Sequence
  Synthetic oligonucleotide: CBLB-1234
cttacagagctgaaaag

SEQ ID NO: 7500 - DNA, 17 bp, Artificial Sequence
  Synthetic oligonucleotide: CBLB-494
tcttacagagctgaaaa

SEQ ID NO: 7501 - DNA, 17 bp, Artificial Sequence
  Synthetic oligonucleotide: CBLB-495
gcacaaatcttacagag

SEQ ID NO: 7502 - DNA, 17 bp, Artificial Sequence
  Synthetic oligonucleotide: CBLB-496
tctctgcacaaatctta

SEQ ID NO: 7503 - DNA, 17 bp, Artificial Sequence
  Synthetic oligonucleotide: CBLB-497
ctgccatgccgtaaggc

SEQ ID NO: 7504 - DNA, 17 bp, Artificial Sequence
  Synthetic oligonucleotide: CBLB-498
aaacaaatagaaaatgc

SEQ ID NO: 7505 - DNA, 17 bp, Artificial Sequence
  Synthetic oligonucleotide: CBLB-499
tccgactcctaaacaaa

SEQ ID NO: 7506 - DNA, 17 bp, Artificial Sequence
  Synthetic oligonucleotide: CBLB-500
tatttcacaacgacaga

SEQ ID NO: 7507 - DNA, 17 bp, Artificial Sequence
  Synthetic oligonucleotide: CBLB-501
cttttatttcacaacga

SEQ ID NO: 7508 - DNA, 17 bp, Artificial Sequence
  Synthetic oligonucleotide: CBLB-502
caaaggggtccacgatt

SEQ ID NO: 7509 - DNA, 17 bp, Artificial Sequence
  Synthetic oligonucleotide: CBLB-1246
ttcatctcttggatcaa

SEQ ID NO: 7510 - DNA, 17 bp, Artificial Sequence
  Synthetic oligonucleotide: CBLB-504
cttcatctcttggatca

SEQ ID NO: 7511 - DNA, 17 bp, Artificial Sequence
  Synthetic oligonucleotide: CBLB-505
cctggagccttcatctc

SEQ ID NO: 7512 - DNA, 17 bp, Artificial Sequence
  Synthetic oligonucleotide: CBLB-1248
aatgatgctgcaacacc

SEQ ID NO: 7513 - DNA, 17 bp, Artificial Sequence
  Synthetic oligonucleotide: CBLB-507
caatgatgctgcaacac

SEQ ID NO: 7514 - DNA, 17 bp, Artificial Sequence
  Synthetic oligonucleotide: CBLB-1251
tagcatcggcatgccaa

SEQ ID NO: 7515 - DNA, 17 bp, Artificial Sequence
  Synthetic oligonucleotide: CBLB-509
ctagcatcggcatgcca

SEQ ID NO: 7516 - DNA, 17 bp, Artificial Sequence
  Synthetic oligonucleotide: CBLB-510
ccaaccgattcatcatc

SEQ ID NO: 7517 - DNA, 17 bp, Artificial Sequence
  Synthetic oligonucleotide: CBLB-511
gtttctagttttacctt

SEQ ID NO: 7518 - DNA, 17 bp, Artificial Sequence
  Synthetic oligonucleotide: CBLB-512
gcactagaacagaaaaa

SEQ ID NO: 7519 - DNA, 17 bp, Artificial Sequence
  Synthetic oligonucleotide: CBLB-513
gtgcactagaacagaaa

SEQ ID NO: 7520 - DNA, 17 bp, Artificial Sequence
  Synthetic oligonucleotide: CBLB-514
ctgtcagtgcactagaa

SEQ ID NO: 7521 - DNA, 17 bp, Artificial Sequence
  Synthetic oligonucleotide: CBLB-515
tctgcctgtcagtgcac

SEQ ID NO: 7522 - DNA, 17 bp, Artificial Sequence
  Synthetic oligonucleotide: CBLB-516
tcctggtgatgtgactg

SEQ ID NO: 7523 - DNA, 17 bp, Artificial Sequence
  Synthetic oligonucleotide: CBLB-517
ttctctgggcaagggga

SEQ ID NO: 7524 - DNA, 17 bp, Artificial Sequence
  Synthetic oligonucleotide: CBLB-518
tcttctctgggcaaggg

SEQ ID NO: 7525 - DNA, 17 bp, Artificial Sequence
  Synthetic oligonucleotide: CBLB-1258
tttcttctctgggcaag

SEQ ID NO: 7526 - DNA, 17 bp, Artificial Sequence
  Synthetic oligonucleotide: CBLB-1259
ctttcttctctgggcaa

SEQ ID NO: 7527 - DNA, 17 bp, Artificial Sequence
  Synthetic oligonucleotide: CBLB-1260
gctttcttctctgggca

SEQ ID NO: 7528 - DNA, 17 bp, Artificial Sequence
  Synthetic oligonucleotide: CBLB-522
ggctttcttctctgggc

SEQ ID NO: 7529 - DNA, 17 bp, Artificial Sequence
  Synthetic oligonucleotide: CBLB-523
ggctgtggctttcttct

SEQ ID NO: 7530 - DNA, 17 bp, Artificial Sequence
  Synthetic oligonucleotide: CBLB-524
tagatgtgggatctgga

SEQ ID NO: 7531 - DNA, 17 bp, Artificial Sequence
  Synthetic oligonucleotide: CBLB-1267
ggcttagatgtgggatc

SEQ ID NO: 7532 - DNA, 17 bp, Artificial Sequence
  Synthetic oligonucleotide: CBLB-526
aggcttagatgtgggat

SEQ ID NO: 7533 - DNA, 17 bp, Artificial Sequence
  Synthetic oligonucleotide: CBLB-1269
ggtggcaggcttagatg

SEQ ID NO: 7534 - DNA, 17 bp, Artificial Sequence
  Synthetic oligonucleotide: CBLB-528
gggtggcaggcttagat

SEQ ID NO: 7535 - DNA, 17 bp, Artificial Sequence
  Synthetic oligonucleotide: CBLB-529
gatccaggcgaggaggc

SEQ ID NO: 7536 - DNA, 17 bp, Artificial Sequence
  Synthetic oligonucleotide: CBLB-1275
tgaattagatccaggcg

SEQ ID NO: 7537 - DNA, 17 bp, Artificial Sequence
  Synthetic oligonucleotide: CBLB-531
ctgaattagatccaggc

SEQ ID NO: 7538 - DNA, 17 bp, Artificial Sequence
  Synthetic oligonucleotide: CBLB-532
ttctgaattagatccag

SEQ ID NO: 7539 - DNA, 17 bp, Artificial Sequence
  Synthetic oligonucleotide: CBLB-533
gatctaactatgccttt

SEQ ID NO: 7540 - DNA, 17 bp, Artificial Sequence
  Synthetic oligonucleotide: CBLB-1277
cccgttgggctgccaca

SEQ ID NO: 7541 - DNA, 17 bp, Artificial Sequence
  Synthetic oligonucleotide: CBLB-1278
acccgttgggctgccac

SEQ ID NO: 7542 - DNA, 17 bp, Artificial Sequence
  Synthetic oligonucleotide: CBLB-536
aacccgttgggctgcca

SEQ ID NO: 7543 - DNA, 17 bp, Artificial Sequence
  Synthetic oligonucleotide: CBLB-537
tacctttggtgaacccg

SEQ ID NO: 7544 - DNA, 17 bp, Artificial Sequence
  Synthetic oligonucleotide: CBLB-538
aaattgatctacctttg

SEQ ID NO: 7545 - DNA, 17 bp, Artificial Sequence
  Synthetic oligonucleotide: CBLB-539
agactaaagaaacagaa

SEQ ID NO: 7546 - DNA, 17 bp, Artificial Sequence
  Synthetic oligonucleotide: CBLB-540
gaagactaaagaaacag

SEQ ID NO: 7547 - DNA, 17 bp, Artificial Sequence
  Synthetic oligonucleotide: CBLB-541
ggagaagactaaagaaa

SEQ ID NO: 7548 - DNA, 17 bp, Artificial Sequence
  Synthetic oligonucleotide: CBLB-542
atgcaaggagaagacta

SEQ ID NO: 7549 - DNA, 17 bp, Artificial Sequence
  Synthetic oligonucleotide: CBLB-543
ttttctcaccatgcaag

SEQ ID NO: 7550 - DNA, 17 bp, Artificial Sequence
  Synthetic oligonucleotide: CBLB-1282
tgttttctcaccatgca

SEQ ID NO: 7551 - DNA, 17 bp, Artificial Sequence
  Synthetic oligonucleotide: CBLB-545
ttgttttctcaccatgc

SEQ ID NO: 7552 - DNA, 17 bp, Artificial Sequence
  Synthetic oligonucleotide: CBLB-1284
agggaggaggtggtgct

SEQ ID NO: 7553 - DNA, 17 bp, Artificial Sequence
  Synthetic oligonucleotide: CBLB-1285
aagggaggaggtggtgc

SEQ ID NO: 7554 - DNA, 17 bp, Artificial Sequence
  Synthetic oligonucleotide: CBLB-548
taagggaggaggtggtg

SEQ ID NO: 7555 - DNA, 17 bp, Artificial Sequence
  Synthetic oligonucleotide: CBLB-1288
ggaggatctcttaaggg

SEQ ID NO: 7556 - DNA, 17 bp, Artificial Sequence
  Synthetic oligonucleotide: CBLB-550
aggaggatctcttaagg

SEQ ID NO: 7557 - DNA, 17 bp, Artificial Sequence
  Synthetic oligonucleotide: CBLB-1289
ggaggaggatctcttaa

SEQ ID NO: 7558 - DNA, 17 bp, Artificial Sequence
  Synthetic oligonucleotide: CBLB-1290
tggaggaggatctctta

SEQ ID NO: 7559 - DNA, 17 bp, Artificial Sequence
  Synthetic oligonucleotide: CBLB-553
gtggaggaggatctctt

SEQ ID NO: 7560 - DNA, 17 bp, Artificial Sequence
  Synthetic oligonucleotide: CBLB-554
ttcaggtggcggtggag

SEQ ID NO: 7561 - DNA, 17 bp, Artificial Sequence
  Synthetic oligonucleotide: CBLB-1292
ctttcaggtggcggtgg

SEQ ID NO: 7562 - DNA, 17 bp, Artificial Sequence
  Synthetic oligonucleotide: CBLB-556
tctttcaggtggcggtg

SEQ ID NO: 7563 - DNA, 17 bp, Artificial Sequence
  Synthetic oligonucleotide: CBLB-1293
ggtctttcaggtggcgg

SEQ ID NO: 7564 - DNA, 17 bp, Artificial Sequence
  Synthetic oligonucleotide: CBLB-558
aggtctttcaggtggcg

SEQ ID NO: 7565 - DNA, 17 bp, Artificial Sequence
  Synthetic oligonucleotide: CBLB-1298
ttgtctggtgggattgg

SEQ ID NO: 7566 - DNA, 17 bp, Artificial Sequence
  Synthetic oligonucleotide: CBLB-560
attgtctggtgggattg

SEQ ID NO: 7567 - DNA, 20 bp, Artificial Sequence
  Synthetic oligonucleotide: CBLB-561
ggaattttagttctttaaaa

SEQ ID NO: 7568 - DNA, 20 bp, Artificial Sequence
  Synthetic oligonucleotide: CBLB-2302
tacccaaaattcgacctttt

SEQ ID NO: 7569 - DNA, 20 bp, Artificial Sequence
  Synthetic oligonucleotide: CBLB-85
ggctatttttcaactgaagt

SEQ ID NO: 7570 - DNA, 20 bp, Artificial Sequence
  Synthetic oligonucleotide: CBLB-564
ctttttcataaggctatcaa

SEQ ID NO: 7571 - DNA, 17 bp, Artificial Sequence
  Synthetic oligonucleotide: CBLB-565
attttagttctttaaaa

SEQ ID NO: 7572 - DNA, 17 bp, Artificial Sequence
  Synthetic oligonucleotide: CBLB-2361
ccaaaattcgacctttt

SEQ ID NO: 7573 - DNA, 17 bp, Artificial Sequence
  Synthetic oligonucleotide: CBLB-105
tatttttcaactgaagt

SEQ ID NO: 7574 - DNA, 17 bp, Artificial Sequence
  Synthetic oligonucleotide: CBLB-568
tttcataaggctatcaa

SEQ ID NO: 7575 - DNA, 20 bp, Artificial Sequence
  Synthetic oligonucleotide: CBLB-569
acagtgccttcatgaggtcc

SEQ ID NO: 7576 - DNA, 20 bp, Artificial Sequence
  Synthetic oligonucleotide: CBLB-570
gcaatggctctaaaatcaac

SEQ ID NO: 7577 - DNA, 20 bp, Artificial Sequence
  Synthetic oligonucleotide: CBLB-571
tcaacaattgatttaacttg

SEQ ID NO: 7578 - DNA, 20 bp, Artificial Sequence
  Synthetic oligonucleotide: CBLB-572
atattttccggttaagttgc

SEQ ID NO: 7579 - DNA, 20 bp, Artificial Sequence
  Synthetic oligonucleotide: CBLB-573
taacaagcccttatttcaag

SEQ ID NO: 7580 - DNA, 20 bp, Artificial Sequence
  Synthetic oligonucleotide: CBLB-574
ccctgattgatggcagcagg

SEQ ID NO: 7581 - DNA, 20 bp, Artificial Sequence
  Synthetic oligonucleotide: CBLB-575
cctgatgggaggagttataa

SEQ ID NO: 7582 - DNA, 20 bp, Artificial Sequence
  Synthetic oligonucleotide: CBLB-576
ggagttataatcctgattta

SEQ ID NO: 7583 - DNA, 20 bp, Artificial Sequence
  Synthetic oligonucleotide: CBLB-577
gggctccacttttcagctct

SEQ ID NO: 7584 - DNA, 20 bp, Artificial Sequence
  Synthetic oligonucleotide: CBLB-578
tgcagagaatgacaaagatg

SEQ ID NO: 7585 - DNA, 20 bp, Artificial Sequence
  Synthetic oligonucleotide: CBLB-579
cttatgcggaaacacagacg

SEQ ID NO: 7586 - DNA, 20 bp, Artificial Sequence
  Synthetic oligonucleotide: CBLB-580
agaggaagatgatgatgaat

SEQ ID NO: 7587 - DNA, 20 bp, Artificial Sequence
  Synthetic oligonucleotide: CBLB-581
tcctgttcggtaagagtatg

SEQ ID NO: 7588 - DNA, 20 bp, Artificial Sequence
  Synthetic oligonucleotide: CBLB-582
tgttatcctctaggagatgt

SEQ ID NO: 7589 - DNA, 20 bp, Artificial Sequence
  Synthetic oligonucleotide: CBLB-583
tcttcactcaacaggacgcc

SEQ ID NO: 7590 - DNA, 17 bp, Artificial Sequence
  Synthetic oligonucleotide: CBLB-584
gtgccttcatgaggtcc

SEQ ID NO: 7591 - DNA, 17 bp, Artificial Sequence
  Synthetic oligonucleotide: CBLB-585
atggctctaaaatcaac

SEQ ID NO: 7592 - DNA, 17 bp, Artificial Sequence
  Synthetic oligonucleotide: CBLB-586
acaattgatttaacttg

SEQ ID NO: 7593 - DNA, 17 bp, Artificial Sequence
  Synthetic oligonucleotide: CBLB-587
ttttccggttaagttgc

SEQ ID NO: 7594 - DNA, 17 bp, Artificial Sequence
  Synthetic oligonucleotide: CBLB-588
caagcccttatttcaag

SEQ ID NO: 7595 - DNA, 17 bp, Artificial Sequence
  Synthetic oligonucleotide: CBLB-589
tgattgatggcagcagg

SEQ ID NO: 7596 - DNA, 17 bp, Artificial Sequence
  Synthetic oligonucleotide: CBLB-590
gatgggaggagttataa

SEQ ID NO: 7597 - DNA, 17 bp, Artificial Sequence
  Synthetic oligonucleotide: CBLB-591
gttataatcctgattta

SEQ ID NO: 7598 - DNA, 17 bp, Artificial Sequence
  Synthetic oligonucleotide: CBLB-592
ctccacttttcagctct

SEQ ID NO: 7599 - DNA, 17 bp, Artificial Sequence
  Synthetic oligonucleotide: CBLB-593
agagaatgacaaagatg

SEQ ID NO: 7600 - DNA, 17 bp, Artificial Sequence
  Synthetic oligonucleotide: CBLB-594
atgcggaaacacagacg

SEQ ID NO: 7601 - DNA, 17 bp, Artificial Sequence
  Synthetic oligonucleotide: CBLB-595
ggaagatgatgatgaat

SEQ ID NO: 7602 - DNA, 17 bp, Artificial Sequence
  Synthetic oligonucleotide: CBLB-596
tgttcggtaagagtatg

SEQ ID NO: 7603 - DNA, 17 bp, Artificial Sequence
  Synthetic oligonucleotide: CBLB-597
tatcctctaggagatgt

SEQ ID NO: 7604 - DNA, 17 bp, Artificial Sequence
  Synthetic oligonucleotide: CBLB-598
tcactcaacaggacgcc

SEQ ID NO: 7605 - DNA, 20 bp, Artificial Sequence
  Synthetic oligonucleotide: CBLB-311
tgaagataagggacagtttt

SEQ ID NO: 7606 - DNA, 20 bp, Artificial Sequence
  Synthetic oligonucleotide: CBLB-600
ttgaccattgggaaagattg

SEQ ID NO: 7607 - DNA, 20 bp, Artificial Sequence
  Synthetic oligonucleotide: CBLB-601
tccctggaattgaccattgg

SEQ ID NO: 7608 - DNA, 20 bp, Artificial Sequence
  Synthetic oligonucleotide: CBLB-602
tcattgcaagttaaatcaat

SEQ ID NO: 7609 - DNA, 20 bp, Artificial Sequence
  Synthetic oligonucleotide: CBLB-334
ctaaaaaataaaaaaattaa

SEQ ID NO: 7610 - DNA, 20 bp, Artificial Sequence
  Synthetic oligonucleotide: CBLB-604
gttcacataatccagttaaa

SEQ ID NO: 7611 - DNA, 20 bp, Artificial Sequence
  Synthetic oligonucleotide: CBLB-605
  misc_feature (1)..(2): n is a, c, g, or t
nngaaagacatccatgttgc

SEQ ID NO: 7612 - DNA, 20 bp, Artificial Sequence
  Synthetic oligonucleotide: CBLB-606
tcctaaacaaatagaaaatg

SEQ ID NO: 7613 - DNA, 20 bp, Artificial Sequence
  Synthetic oligonucleotide: CBLB-607
atctcttggatcaaaggggt

SEQ ID NO: 7614 - DNA, 20 bp, Artificial Sequence
  Synthetic oligonucleotide: CBLB-608
ttacctttcggacgtttgcc

SEQ ID NO: 7615 - DNA, 20 bp, Artificial Sequence
  Synthetic oligonucleotide: CBLB-609
tctactcagtctattgtctg

SEQ ID NO: 7616 - DNA, 20 bp, Artificial Sequence
  Synthetic oligonucleotide: CBLB-610
ctaggagtcgacatcccaca

SEQ ID NO: 7617 - DNA, 20 bp, Artificial Sequence
  Synthetic oligonucleotide: CBLB-611
tccattgacatttgaactcg

SEQ ID NO: 7618 - DNA, 20 bp, Artificial Sequence
  Synthetic oligonucleotide: CBLB-612
tatatgcttaagtcagggat

SEQ ID NO: 7619 - DNA, 20 bp, Artificial Sequence
  Synthetic oligonucleotide: CBLB-613
tgttgagtgaagaaccatgc

SEQ ID NO: 7620 - DNA, 17 bp, Artificial Sequence
  Synthetic oligonucleotide: CBLB-438
agataagggacagtttt

SEQ ID NO: 7621 - DNA, 17 bp, Artificial Sequence
  Synthetic oligonucleotide: CBLB-615
accattgggaaagattg

SEQ ID NO: 7622 - DNA, 17 bp, Artificial Sequence
  Synthetic oligonucleotide: CBLB-616
ctggaattgaccattgg

SEQ ID NO: 7623 - DNA, 17 bp, Artificial Sequence
  Synthetic oligonucleotide: CBLB-617
ttgcaagttaaatcaat

SEQ ID NO: 7624 - DNA, 17 bp, Artificial Sequence
  Synthetic oligonucleotide: CBLB-461
aaaaataaaaaaattaa

SEQ ID NO: 7625 - DNA, 17 bp, Artificial Sequence
  Synthetic oligonucleotide: CBLB-619
cacataatccagttaaa

SEQ ID NO: 7626 - DNA, 17 bp, Artificial Sequence
  Synthetic oligonucleotide: CBLB-620
aaagacatccatgttgc

SEQ ID NO: 7627 - DNA, 17 bp, Artificial Sequence
  Synthetic oligonucleotide: CBLB-621
taaacaaatagaaaatg

SEQ ID NO: 7628 - DNA, 17 bp, Artificial Sequence
  Synthetic oligonucleotide: CBLB-622
tcttggatcaaaggggt

SEQ ID NO: 7629 - DNA, 17 bp, Artificial Sequence
  Synthetic oligonucleotide: CBLB-623
cctttcggacgtttgcc

SEQ ID NO: 7630 - DNA, 17 bp, Artificial Sequence
  Synthetic oligonucleotide: CBLB-624
actcagtctattgtctg

SEQ ID NO: 7631 - DNA, 17 bp, Artificial Sequence
  Synthetic oligonucleotide: CBLB-625
ggagtcgacatcccaca

SEQ ID NO: 7632 - DNA, 17 bp, Artificial Sequence
  Synthetic oligonucleotide: CBLB-626
attgacatttgaactcg

SEQ ID NO: 7633 - DNA, 17 bp, Artificial Sequence
  Synthetic oligonucleotide: CBLB-627
atgcttaagtcagggat

SEQ ID NO: 7634 - DNA, 17 bp, Artificial Sequence
  Synthetic oligonucleotide: CBLB-628
tgagtgaagaaccatgc

SEQ ID NO: 7635 - DNA, 20 bp, Artificial Sequence
  Synthetic oligonucleotide: CBLB-2367
gaaagtgaagtttctgcgta

SEQ ID NO: 7636 - DNA, 20 bp, Artificial Sequence
  Synthetic oligonucleotide: CBLB-2369
gataggaccttcagttgttc

SEQ ID NO: 7637 - DNA, 20 bp, Artificial Sequence
  Synthetic oligonucleotide: CBLB-2386
ggttttgctctaatcgatgg

SEQ ID NO: 7638 - DNA, 20 bp, Artificial Sequence
  Synthetic oligonucleotide: CBLB-2289
gggtattattgatgctattc

SEQ ID NO: 7639 - DNA, 20 bp, Artificial Sequence
  Synthetic oligonucleotide: CBLB-2293
gcaggaccgtggagaagact

SEQ ID NO: 7640 - DNA, 20 bp, Artificial Sequence
  Synthetic oligonucleotide: CBLB-2414
gtgtatggccatagaatgct

SEQ ID NO: 7641 - DNA, 20 bp, Artificial Sequence
  Synthetic oligonucleotide: CBLB-2299
gatctgcggcagcttgctta

SEQ ID NO: 7642 - DNA, 20 bp, Artificial Sequence
  Synthetic oligonucleotide: CBLB-2305
ggatttcctcctcgaccacc

SEQ ID NO: 7643 - DNA, 20 bp, Artificial Sequence
  Synthetic oligonucleotide: CBLB-2306
gatttcctcctcgaccacca

SEQ ID NO: 7644 - DNA, 20 bp, Artificial Sequence
  Synthetic oligonucleotide: CBLB-2439
gctcacgtttcaagtagcta

SEQ ID NO: 7645 - DNA, 20 bp, Artificial Sequence
  Synthetic oligonucleotide: CBLB-2442
gaaggtcctatcatacattt

SEQ ID NO: 7646 - DNA, 17 bp, Artificial Sequence
  Synthetic oligonucleotide: CBLB-2462
gatgaatccggaacttt

SEQ ID NO: 7647 - DNA, 17 bp, Artificial Sequence
  Synthetic oligonucleotide: CBLB-2463
ggttttgctctaatcga

SEQ ID NO: 7648 - DNA, 17 bp, Artificial Sequence
  Synthetic oligonucleotide: CBLB-2345
ggaggaaatccccgaaa

SEQ ID NO: 7649 - DNA, 17 bp, Artificial Sequence
  Synthetic oligonucleotide: CBLB-2352
ggaccgtggagaagact

SEQ ID NO: 7650 - DNA, 17 bp, Artificial Sequence
  Synthetic oligonucleotide: CBLB-2360
gcggcagcttgcttagg

SEQ ID NO: 7651 - DNA, 17 bp, Artificial Sequence
  Synthetic oligonucleotide: CBLB-2520
ggtcctatcatacattt

SEQ ID NO: 7652 - DNA, 20 bp, Artificial Sequence
  Synthetic oligonucleotide: CBLB-2381
tagctacttgaaacgtgagc

SEQ ID NO: 7653 - DNA, 20 bp, Artificial Sequence
  Synthetic oligonucleotide: CBLB-2385
tttggttttgctctaatcga

SEQ ID NO: 7654 - DNA, 20 bp, Artificial Sequence
  Synthetic oligonucleotide: CBLB-2286
cgaggaggaaatccccgaaa

SEQ ID NO: 7655 - DNA, 20 bp, Artificial Sequence
  Synthetic oligonucleotide: CBLB-2287
tccccgaaaaggtcgaattt

SEQ ID NO: 7656 - DNA, 20 bp, Artificial Sequence
  Synthetic oligonucleotide: CBLB-2288
ccccgaaaaggtcgaatttt

SEQ ID NO: 7657 - DNA, 20 bp, Artificial Sequence
  Synthetic oligonucleotide: CBLB-2291
agcaagctgccgcagatcgc

SEQ ID NO: 7658 - DNA, 20 bp, Artificial Sequence
  Synthetic oligonucleotide: CBLB-2292
tgccgcagatcgcaggaccg

SEQ ID NO: 7659 - DNA, 20 bp, Artificial Sequence
  Synthetic oligonucleotide: CBLB-2418
ttacatactgagtcatgtag

SEQ ID NO: 7660 - DNA, 20 bp, Artificial Sequence
  Synthetic oligonucleotide: CBLB-2422
attgttgccataacaatggt

SEQ ID NO: 7661 - DNA, 20 bp, Artificial Sequence
  Synthetic oligonucleotide: CBLB-2424
aagtgaatagtgtttcgcac

SEQ ID NO: 7662 - DNA, 20 bp, Artificial Sequence
  Synthetic oligonucleotide: CBLB-2297
ctccacggtcctgcgatctg

SEQ ID NO: 7663 - DNA, 20 bp, Artificial Sequence
  Synthetic oligonucleotide: CBLB-2298
cgatctgcggcagcttgctt

SEQ ID NO: 7664 - DNA, 20 bp, Artificial Sequence
  Synthetic oligonucleotide: CBLB-2300
atctgcggcagcttgcttag

SEQ ID NO: 7665 - DNA, 20 bp, Artificial Sequence
  Synthetic oligonucleotide: CBLB-2301
tctgcggcagcttgcttagg

SEQ ID NO: 7666 - DNA, 20 bp, Artificial Sequence
  Synthetic oligonucleotide: CBLB-2302
tacccaaaattcgacctttt

SEQ ID NO: 7667 - DNA, 20 bp, Artificial Sequence
  Synthetic oligonucleotide: CBLB-2303
acccaaaattcgaccttttc

SEQ ID NO: 7668 - DNA, 20 bp, Artificial Sequence
  Synthetic oligonucleotide: CBLB-2304
cccaaaattcgaccttttcg

SEQ ID NO: 7669 - DNA, 17 bp, Artificial Sequence
  Synthetic oligonucleotide: CBLB-2445
agtgaagtttctgcgta

SEQ ID NO: 7670 - DNA, 17 bp, Artificial Sequence
  Synthetic oligonucleotide: CBLB-2459
ctacttgaaacgtgagc

SEQ ID NO: 7671 - DNA, 17 bp, Artificial Sequence
  Synthetic oligonucleotide: CBLB-2464
tttgctctaatcgatgg

SEQ ID NO: 7672 - DNA, 17 bp, Artificial Sequence
  Synthetic oligonucleotide: CBLB-2346
ccgaaaaggtcgaattt

SEQ ID NO: 7673 - DNA, 17 bp, Artificial Sequence
  Synthetic oligonucleotide: CBLB-2347
cgaaaaggtcgaatttt

SEQ ID NO: 7674 - DNA, 17 bp, Artificial Sequence
  Synthetic oligonucleotide: CBLB-2350
aagctgccgcagatcgc

SEQ ID NO: 7675 - DNA, 17 bp, Artificial Sequence
  Synthetic oligonucleotide: CBLB-2351
cgcagatcgcaggaccg

SEQ ID NO: 7676 - DNA, 17 bp, Artificial Sequence
  Synthetic oligonucleotide: CBLB-2502
tgaatagtgtttcgcac

SEQ ID NO: 7677 - DNA, 17 bp, Artificial Sequence
  Synthetic oligonucleotide: CBLB-2356
cacggtcctgcgatctg

SEQ ID NO: 7678 - DNA, 17 bp, Artificial Sequence
  Synthetic oligonucleotide: CBLB-2358
ctgcggcagcttgctta

SEQ ID NO: 7679 - DNA, 17 bp, Artificial Sequence
  Synthetic oligonucleotide: CBLB-2359
tgcggcagcttgcttag

SEQ ID NO: 7680 - DNA, 17 bp, Artificial Sequence
  Synthetic oligonucleotide: CBLB-2362
caaaattcgaccttttc

SEQ ID NO: 7681 - DNA, 17 bp, Artificial Sequence
  Synthetic oligonucleotide: CBLB-2363
aaaattcgaccttttcg

SEQ ID NO: 7682 - DNA, 17 bp, Artificial Sequence
  Synthetic oligonucleotide: CBLB-2517
cacgtttcaagtagcta

SEQ ID NO: 7683 - DNA, 20 bp, Artificial Sequence
  Synthetic oligonucleotide: CBLB-2370
gttgttctggtattttgaat

SEQ ID NO: 7684 - DNA, 20 bp, Artificial Sequence
  Synthetic oligonucleotide: CBLB-2371
ggtattttgaattggaatta

SEQ ID NO: 7685 - DNA, 20 bp, Artificial Sequence
  Synthetic oligonucleotide: CBLB-2374
gaattggaattaaggcagga

SEQ ID NO: 7686 - DNA, 20 bp, Artificial Sequence
  Synthetic oligonucleotide: CBLB-2389
gttagtctctagttttctgg

SEQ ID NO: 7687 - DNA, 20 bp, Artificial Sequence
  Synthetic oligonucleotide: CBLB-2284
ggcagaaaccctggtggtcg

SEQ ID NO: 7688 - DNA, 20 bp, Artificial Sequence
  Synthetic oligonucleotide: CBLB-2290
gatgctattcaggatgcagt

SEQ ID NO: 7689 - DNA, 20 bp, Artificial Sequence
  Synthetic oligonucleotide: CBLB-2294
ggagaagacttggaagctca

SEQ ID NO: 7690 - DNA, 20 bp, Artificial Sequence
  Synthetic oligonucleotide: CBLB-2413
ggctgctttttgttggtgta

SEQ ID NO: 7691 - DNA, 20 bp, Artificial Sequence
  Synthetic oligonucleotide: CBLB-2296
gagcttccaagtcttctcca

SEQ ID NO: 7692 - DNA, 17 bp, Artificial Sequence
  Synthetic oligonucleotide: CBLB-2448
gttctggtattttgaat

SEQ ID NO: 7693 - DNA, 17 bp, Artificial Sequence
  Synthetic oligonucleotide: CBLB-2465
gatggaggaagatgcag

SEQ ID NO: 7694 - DNA, 17 bp, Artificial Sequence
  Synthetic oligonucleotide: CBLB-2466
gttagtctctagttttc

SEQ ID NO: 7695 - DNA, 17 bp, Artificial Sequence
  Synthetic oligonucleotide: CBLB-2468
gtctctagttttctggt

SEQ ID NO: 7696 - DNA, 17 bp, Artificial Sequence
  Synthetic oligonucleotide: CBLB-2349
gctattcaggatgcagt

SEQ ID NO: 7697 - DNA, 17 bp, Artificial Sequence
  Synthetic oligonucleotide: CBLB-2353
gaagacttggaagctca

SEQ ID NO: 7698 - DNA, 17 bp, Artificial Sequence
  Synthetic oligonucleotide: CBLB-2354
gaagctcatggacaaag

SEQ ID NO: 7699 - DNA, 17 bp, Artificial Sequence
  Synthetic oligonucleotide: CBLB-2499
gattgttgccataacaa

SEQ ID NO: 7700 - DNA, 17 bp, Artificial Sequence
  Synthetic oligonucleotide: CBLB-2500
gttgccataacaatggt

SEQ ID NO: 7701 - DNA, 17 bp, Artificial Sequence
  Synthetic oligonucleotide: CBLB-2521
gtcctatcatacatttt

SEQ ID NO: 7702 - DNA, 20 bp, Artificial Sequence
  Synthetic oligonucleotide: CBLB-2366
atctttatgtttatgtaact

SEQ ID NO: 7703 - DNA, 20 bp, Artificial Sequence
  Synthetic oligonucleotide: CBLB-2368
aggctcccaaaatgtatgat

SEQ ID NO: 7704 - DNA, 20 bp, Artificial Sequence
  Synthetic oligonucleotide: CBLB-2372
ttttgaattggaattaaggc

SEQ ID NO: 7705 - DNA, 20 bp, Artificial Sequence
  Synthetic oligonucleotide: CBLB-2373
tgaattggaattaaggcagg

SEQ ID NO: 7706 - DNA, 20 bp, Artificial Sequence
  Synthetic oligonucleotide: CBLB-2375
aattggaattaaggcaggag

SEQ ID NO: 7707 - DNA, 20 bp, Artificial Sequence
  Synthetic oligonucleotide: CBLB-2376
agaacattctgtttttatct

SEQ ID NO: 7708 - DNA, 20 bp, Artificial Sequence
  Synthetic oligonucleotide: CBLB-2377
acattctgtttttatctagg

SEQ ID NO: 7709 - DNA, 20 bp, Artificial Sequence
  Synthetic oligonucleotide: CBLB-2378
cattctgtttttatctaggt

SEQ ID NO: 7710 - DNA, 20 bp, Artificial Sequence
  Synthetic oligonucleotide: CBLB-2379
attctgtttttatctaggtg

SEQ ID NO: 7711 - DNA, 20 bp, Artificial Sequence
  Synthetic oligonucleotide: CBLB-2380
ttctgtttttatctaggtgg

SEQ ID NO: 7712 - DNA, 20 bp, Artificial Sequence
  Synthetic oligonucleotide: CBLB-2382
agtattgtaaaagcaaatct

SEQ ID NO: 7713 - DNA, 20 bp, Artificial Sequence
  Synthetic oligonucleotide: CBLB-2383
cttattgataaagatgaatc

SEQ ID NO: 7714 - DNA, 20 bp, Artificial Sequence
  Synthetic oligonucleotide: CBLB-2384
aaagatgaatccggaacttt

SEQ ID NO: 7715 - DNA, 20 bp, Artificial Sequence
  Synthetic oligonucleotide: CBLB-2387
atcgatggaggaagatgcag

SEQ ID NO: 7716 - DNA, 20 bp, Artificial Sequence
  Synthetic oligonucleotide: CBLB-2388
caagttagtctctagttttc

SEQ ID NO: 7717 - DNA, 20 bp, Artificial Sequence
  Synthetic oligonucleotide: CBLB-2390
ttagtctctagttttctggt

SEQ ID NO: 7718 - DNA, 20 bp, Artificial Sequence
  Synthetic oligonucleotide: CBLB-2391
taaagaactaaaattccaga

SEQ ID NO: 7719 - DNA, 20 bp, Artificial Sequence
  Synthetic oligonucleotide: CBLB-2392
cagatggcaaactcaatgaa

SEQ ID NO: 7720 - DNA, 20 bp, Artificial Sequence
  Synthetic oligonucleotide: CBLB-2282
tcaatgaatggcagaaaccc

SEQ ID NO: 7721 - DNA, 20 bp, Artificial Sequence
  Synthetic oligonucleotide: CBLB-2283
atgaatggcagaaaccctgg

SEQ ID NO: 7722 - DNA, 20 bp, Artificial Sequence
  Synthetic oligonucleotide: CBLB-2285
agaaaccctggtggtcgagg

SEQ ID NO: 7723 - DNA, 20 bp, Artificial Sequence
  Synthetic oligonucleotide: CBLB-2295
ttggaagctcatggacaaag

SEQ ID NO: 7724 - DNA, 20 bp, Artificial Sequence
  Synthetic oligonucleotide: CBLB-2407
aacactattcactttgtctg

SEQ ID NO: 7725 - DNA, 20 bp, Artificial Sequence
  Synthetic oligonucleotide: CBLB-2408
attaataccaaccattgtta

SEQ ID NO: 7726 - DNA, 20 bp, Artificial Sequence
  Synthetic oligonucleotide: CBLB-2409
ctctgtgttttttgaaaagt

SEQ ID NO: 7727 - DNA, 20 bp, Artificial Sequence
  Synthetic oligonucleotide: CBLB-2410
ttcatcctttctactcttta

SEQ ID NO: 7728 - DNA, 20 bp, Artificial Sequence
  Synthetic oligonucleotide: CBLB-2411
agtatgtaaagttttaccat

SEQ ID NO: 7729 - DNA, 20 bp, Artificial Sequence
  Synthetic oligonucleotide: CBLB-2412
taccattggctgctttttgt

SEQ ID NO: 7730 - DNA, 20 bp, Artificial Sequence
  Synthetic oligonucleotide: CBLB-2415
tgtttgttctgtcttctgtg

SEQ ID NO: 7731 - DNA, 20 bp, Artificial Sequence
  Synthetic oligonucleotide: CBLB-2416
aaacacttccaagcattcta

SEQ ID NO: 7732 - RNA, 20 nt, Artificial Sequence
  Synthetic oligonucleotide: CBLB-2417
caccaacaaaaagcagccaa

SEQ ID NO: 7733 - DNA, 20 bp, Artificial Sequence
  Synthetic oligonucleotide: CBLB-2419
ctgaaccttaaagagtagaa

SEQ ID NO: 7734 - DNA, 20 bp, Artificial Sequence
  Synthetic oligonucleotide: CBLB-2420
taaagagtagaaaggatgaa

SEQ ID NO: 7735 - DNA, 20 bp, Artificial Sequence
  Synthetic oligonucleotide: CBLB-2421
aaagattgttgccataacaa

SEQ ID NO: 7736 - DNA, 20 bp, Artificial Sequence
  Synthetic oligonucleotide: CBLB-2423
attaacagtataaataaatc

SEQ ID NO: 7737 - DNA, 20 bp, Artificial Sequence
  Synthetic oligonucleotide: CBLB-71
cattcattgagtttgccatc

SEQ ID NO: 7738 - DNA, 20 bp, Artificial Sequence
  Synthetic oligonucleotide: CBLB-2437
ttaaaaaaagaaaagttagt

SEQ ID NO: 7739 - DNA, 20 bp, Artificial Sequence
  Synthetic oligonucleotide: CBLB-2438
tagagcaaaaccaaaagttc

SEQ ID NO: 7740 - DNA, 20 bp, Artificial Sequence
  Synthetic oligonucleotide: CBLB-2440
agaacaaacaaaacttaaac

SEQ ID NO: 7741 - DNA, 20 bp, Artificial Sequence
  Synthetic oligonucleotide: CBLB-2441
caaaataccagaacaactga

SEQ ID NO: 7742 - DNA, 20 bp, Artificial Sequence
  Synthetic oligonucleotide: CBLB-2443
aaggtcctatcatacatttt

SEQ ID NO: 7743 - DNA, 17 bp, Artificial Sequence
  Synthetic oligonucleotide: CBLB-2444
tttatgtttatgtaact

SEQ ID NO: 7744 - DNA, 17 bp, Artificial Sequence
  Synthetic oligonucleotide: CBLB-2446
ctcccaaaatgtatgat

SEQ ID NO: 7745 - DNA, 17 bp, Artificial Sequence
  Synthetic oligonucleotide: CBLB-2447
aggaccttcagttgttc

SEQ ID NO: 7746 - DNA, 17 bp, Artificial Sequence
  Synthetic oligonucleotide: CBLB-2449
attttgaattggaatta

SEQ ID NO: 7747 - DNA, 17 bp, Artificial Sequence
  Synthetic oligonucleotide: CBLB-2450
tgaattggaattaaggc

SEQ ID NO: 7748 - DNA, 17 bp, Artificial Sequence
  Synthetic oligonucleotide: CBLB-2451
attggaattaaggcagg

SEQ ID NO: 7749 - DNA, 17 bp, Artificial Sequence
  Synthetic oligonucleotide: CBLB-2452
ttggaattaaggcagga

SEQ ID NO: 7750 - DNA, 17 bp, Artificial Sequence
  Synthetic oligonucleotide: CBLB-2453
tggaattaaggcaggag

SEQ ID NO: 7751 - DNA, 17 bp, Artificial Sequence
  Synthetic oligonucleotide: CBLB-2454
acattctgtttttatct

SEQ ID NO: 7752 - DNA, 17 bp, Artificial Sequence
  Synthetic oligonucleotide: CBLB-2455
ttctgtttttatctagg

SEQ ID NO: 7753 - DNA, 17 bp, Artificial Sequence
  Synthetic oligonucleotide: CBLB-2456
tctgtttttatctaggt

SEQ ID NO: 7754 - DNA, 17 bp, Artificial Sequence
  Synthetic oligonucleotide: CBLB-2457
ctgtttttatctaggtg

SEQ ID NO: 7755 - DNA, 17 bp, Artificial Sequence
  Synthetic oligonucleotide: CBLB-2458
tgtttttatctaggtgg

SEQ ID NO: 7756 - DNA, 17 bp, Artificial Sequence
  Synthetic oligonucleotide: CBLB-2460
attgtaaaagcaaatct

SEQ ID NO: 7757 - DNA, 17 bp, Artificial Sequence
  Synthetic oligonucleotide: CBLB-2461
attgataaagatgaatc

SEQ ID NO: 7758 - DNA, 17 bp, Artificial Sequence
  Synthetic oligonucleotide: CBLB-2467
agtctctagttttctgg

SEQ ID NO: 7759 - DNA, 17 bp, Artificial Sequence
  Synthetic oligonucleotide: CBLB-2469
agaactaaaattccaga

SEQ ID NO: 7760 - DNA, 17 bp, Artificial Sequence
  Synthetic oligonucleotide: CBLB-2470
atggcaaactcaatgaa

SEQ ID NO: 7761 - DNA, 17 bp, Artificial Sequence
  Synthetic oligonucleotide: CBLB-2341
atgaatggcagaaaccc

SEQ ID NO: 7762 - DNA, 17 bp, Artificial Sequence
  Synthetic oligonucleotide: CBLB-2342
aatggcagaaaccctgg

SEQ ID NO: 7763 - DNA, 17 bp, Artificial Sequence
  Synthetic oligonucleotide: CBLB-2343
agaaaccctggtggtcg

SEQ ID NO: 7764 - DNA, 17 bp, Artificial Sequence
  Synthetic oligonucleotide: CBLB-2344
aaccctggtggtcgagg

SEQ ID NO: 7765 - DNA, 17 bp, Artificial Sequence
  Synthetic oligonucleotide: CBLB-2348
tattattgatgctattc

SEQ ID NO: 7766 - DNA, 17 bp, Artificial Sequence
  Synthetic oligonucleotide: CBLB-2485
actattcactttgtctg

SEQ ID NO: 7767 - DNA, 17 bp, Artificial Sequence
  Synthetic oligonucleotide: CBLB-2486
aataccaaccattgtta

SEQ ID NO: 7768 - DNA, 17 bp, Artificial Sequence
  Synthetic oligonucleotide: CBLB-2487
tgtgttttttgaaaagt

SEQ ID NO: 7769 - DNA, 17 bp, Artificial Sequence
  Synthetic oligonucleotide: CBLB-2488
atcctttctactcttta

SEQ ID NO: 7770 - DNA, 17 bp, Artificial Sequence
  Synthetic oligonucleotide: CBLB-2489
atgtaaagttttaccat

SEQ ID NO: 7771 - DNA, 17 bp, Artificial Sequence
  Synthetic oligonucleotide: CBLB-2490
cattggctgctttttgt

SEQ ID NO: 7772 - DNA, 17 bp, Artificial Sequence
  Synthetic oligonucleotide: CBLB-2491
tgctttttgttggtgta

SEQ ID NO: 7773 - DNA, 17 bp, Artificial Sequence
  Synthetic oligonucleotide: CBLB-2492
tatggccatagaatgct

SEQ ID NO: 7774 - DNA, 17 bp, Artificial Sequence
  Synthetic oligonucleotide: CBLB-2493
ttgttctgtcttctgtg

SEQ ID NO: 7775 - DNA, 17 bp, Artificial Sequence
  Synthetic oligonucleotide: CBLB-2494
cacttccaagcattcta

SEQ ID NO: 7776 - RNA, 17 nt, Artificial Sequence
  Synthetic oligonucleotide: CBLB-2495
caacaaaaagcagccaa

SEQ ID NO: 7777 - DNA, 17 bp, Artificial Sequence
  Synthetic oligonucleotide: CBLB-2496
catactgagtcatgtag

SEQ ID NO: 7778 - DNA, 17 bp, Artificial Sequence
  Synthetic oligonucleotide: CBLB-2497
aaccttaaagagtagaa

SEQ ID NO: 7779 - DNA, 17 bp, Artificial Sequence
  Synthetic oligonucleotide: CBLB-2498
agagtagaaaggatgaa

SEQ ID NO: 7780 - DNA, 17 bp, Artificial Sequence
  Synthetic oligonucleotide: CBLB-2501
aacagtataaataaatc

SEQ ID NO: 7781 - DNA, 17 bp, Artificial Sequence
  Synthetic oligonucleotide: CBLB-2355
cttccaagtcttctcca

SEQ ID NO: 7782 - DNA, 17 bp, Artificial Sequence
  Synthetic oligonucleotide: CBLB-2357
tctgcggcagcttgctt

SEQ ID NO: 7783 - DNA, 17 bp, Artificial Sequence
  Synthetic oligonucleotide: CBLB-2361
ccaaaattcgacctttt

SEQ ID NO: 7784 - DNA, 17 bp, Artificial Sequence
  Synthetic oligonucleotide: CBLB-2364
tttcctcctcgaccacc

SEQ ID NO: 7785 - DNA, 17 bp, Artificial Sequence
  Synthetic oligonucleotide: CBLB-2365
ttcctcctcgaccacca

SEQ ID NO: 7786 - DNA, 17 bp, Artificial Sequence
  Synthetic oligonucleotide: CBLB-91
tcattgagtttgccatc

SEQ ID NO: 7787 - DNA, 17 bp, Artificial Sequence
  Synthetic oligonucleotide: CBLB-2515
aaaaaagaaaagttagt

SEQ ID NO: 7788 - DNA, 17 bp, Artificial Sequence
  Synthetic oligonucleotide: CBLB-2516
agcaaaaccaaaagttc

SEQ ID NO: 7789 - DNA, 17 bp, Artificial Sequence
  Synthetic oligonucleotide: CBLB-2518
acaaacaaaacttaaac

SEQ ID NO: 7790 - DNA, 17 bp, Artificial Sequence
  Synthetic oligonucleotide: CBLB-2519
aataccagaacaactga

SEQ ID NO: 7791 - RNA, 20 nt, Artificial Sequence
  Synthetic oligonucleotide: CBLB-2030
aacccgcaggccggggagga

SEQ ID NO: 7792 - RNA, 20 nt, Artificial Sequence
  Synthetic oligonucleotide: CBLB-2031
gcaggccggggaggagggag

SEQ ID NO: 7793 - RNA, 20 nt, Artificial Sequence
  Synthetic oligonucleotide: CBLB-2032
caggccggggaggagggaga

SEQ ID NO: 7794 - DNA, 20 bp, Artificial Sequence
  Synthetic oligonucleotide: CBLB-2033
ggaggagggagagggcgtcc

SEQ ID NO: 7795 - DNA, 20 bp, Artificial Sequence
  Synthetic oligonucleotide: CBLB-2034
ggagagggcgtccaggcaga

SEQ ID NO: 7796 - DNA, 20 bp, Artificial Sequence
  Synthetic oligonucleotide: CBLB-2035
gagggcgtccaggcagacgg

SEQ ID NO: 7797 - DNA, 20 bp, Artificial Sequence
  Synthetic oligonucleotide: CBLB-2036
cgtccaggcagacggcggtg

SEQ ID NO: 7798 - DNA, 20 bp, Artificial Sequence
  Synthetic oligonucleotide: CBLB-2037
acggcggtgaggactgcagc

SEQ ID NO: 7799 - DNA, 20 bp, Artificial Sequence
  Synthetic oligonucleotide: CBLB-2038
gcggtgaggactgcagcagg

SEQ ID NO: 7800 - DNA, 20 bp, Artificial Sequence
  Synthetic oligonucleotide: CBLB-2039
tgaggactgcagcaggcggc

SEQ ID NO: 7801 - DNA, 20 bp, Artificial Sequence
  Synthetic oligonucleotide: CBLB-2040
gaggactgcagcaggcggcc

SEQ ID NO: 7802 - DNA, 20 bp, Artificial Sequence
  Synthetic oligonucleotide: CBLB-2041
gactgcagcaggcggccggg

SEQ ID NO: 7803 - DNA, 20 bp, Artificial Sequence
  Synthetic oligonucleotide: CBLB-2042
gccgggaggcgcgtccaccc

SEQ ID NO: 7804 - DNA, 20 bp, Artificial Sequence
  Synthetic oligonucleotide: CBLB-2043
tgtccctcccgcgccctaga

SEQ ID NO: 7805 - DNA, 20 bp, Artificial Sequence
  Synthetic oligonucleotide: CBLB-2044
cctcccgcgccctagacgga

SEQ ID NO: 7806 - DNA, 20 bp, Artificial Sequence
  Synthetic oligonucleotide: CBLB-2045
gccctagacggacggtgctg

SEQ ID NO: 7807 - DNA, 20 bp, Artificial Sequence
  Synthetic oligonucleotide: CBLB-2046
ccctagacggacggtgctgc

SEQ ID NO: 7808 - DNA, 20 bp, Artificial Sequence
  Synthetic oligonucleotide: CBLB-2047
gacggacggtgctgcgggca

SEQ ID NO: 7809 - DNA, 20 bp, Artificial Sequence
  Synthetic oligonucleotide: CBLB-2048
acggacggtgctgcgggcac

SEQ ID NO: 7810 - DNA, 20 bp, Artificial Sequence
  Synthetic oligonucleotide: CBLB-2049
gacggtgctgcgggcacggg

SEQ ID NO: 7811 - DNA, 20 bp, Artificial Sequence
  Synthetic oligonucleotide: CBLB-2050
acggtgctgcgggcacggga

SEQ ID NO: 7812 - DNA, 20 bp, Artificial Sequence
  Synthetic oligonucleotide: CBLB-2051
cctcctgcagctcagacccg

SEQ ID NO: 7813 - DNA, 20 bp, Artificial Sequence
  Synthetic oligonucleotide: CBLB-2052
ctcctgcagctcagacccga

SEQ ID NO: 7814 - DNA, 20 bp, Artificial Sequence
  Synthetic oligonucleotide: CBLB-2053
tcctgcagctcagacccgag

SEQ ID NO: 7815 - DNA, 20 bp, Artificial Sequence
  Synthetic oligonucleotide: CBLB-2054
gcagctcagacccgaggggc

SEQ ID NO: 7816 - DNA, 20 bp, Artificial Sequence
  Synthetic oligonucleotide: CBLB-2055
cagctcagacccgaggggcc

SEQ ID NO: 7817 - DNA, 20 bp, Artificial Sequence
  Synthetic oligonucleotide: CBLB-2056
tcagacccgaggggccggga

SEQ ID NO: 7818 - RNA, 20 nt, Artificial Sequence
  Synthetic oligonucleotide: CBLB-2057
cagacccgaggggccgggaa

SEQ ID NO: 7819 - RNA, 20 nt, Artificial Sequence
  Synthetic oligonucleotide: CBLB-2058
agacccgaggggccgggaag

SEQ ID NO: 7820 - DNA, 20 bp, Artificial Sequence
  Synthetic oligonucleotide: CBLB-2059
ggccgggaaggggcctgagc

SEQ ID NO: 7821 - DNA, 20 bp, Artificial Sequence
  Synthetic oligonucleotide: CBLB-2060
gccgggaaggggcctgagca

SEQ ID NO: 7822 - DNA, 20 bp, Artificial Sequence
  Synthetic oligonucleotide: CBLB-2061
ggaaggggcctgagcaggga

SEQ ID NO: 7823 - DNA, 20 bp, Artificial Sequence
  Synthetic oligonucleotide: CBLB-2062
gaaggggcctgagcagggaa

SEQ ID NO: 7824 - DNA, 20 bp, Artificial Sequence
  Synthetic oligonucleotide: CBLB-2063
cctgagcagggaagggacac

SEQ ID NO: 7825 - DNA, 20 bp, Artificial Sequence
  Synthetic oligonucleotide: CBLB-2064
ggcgtcctgaaacaaagctt

SEQ ID NO: 7826 - DNA, 20 bp, Artificial Sequence
  Synthetic oligonucleotide: CBLB-2065
gcgtcctgaaacaaagcttt

SEQ ID NO: 7827 - DNA, 20 bp, Artificial Sequence
  Synthetic oligonucleotide: CBLB-2066
tgaaacaaagctttgggttg

SEQ ID NO: 7828 - DNA, 20 bp, Artificial Sequence
  Synthetic oligonucleotide: CBLB-2067
gaaacaaagctttgggttga

SEQ ID NO: 7829 - DNA, 20 bp, Artificial Sequence
  Synthetic oligonucleotide: CBLB-2068
aagctttgggttgagggcag

SEQ ID NO: 7830 - DNA, 20 bp, Artificial Sequence
  Synthetic oligonucleotide: CBLB-2069
ttgggttgagggcagaggcg

SEQ ID NO: 7831 - DNA, 20 bp, Artificial Sequence
  Synthetic oligonucleotide: CBLB-2070
aagtgaactcctcctttccg

SEQ ID NO: 7832 - DNA, 20 bp, Artificial Sequence
  Synthetic oligonucleotide: CBLB-2071
ttctcttttctcttttcaaa

SEQ ID NO: 7833 - DNA, 20 bp, Artificial Sequence
  Synthetic oligonucleotide: CBLB-2072
tctcttttctcttttcaaat

SEQ ID NO: 7834 - DNA, 20 bp, Artificial Sequence
  Synthetic oligonucleotide: CBLB-2073
atttgtgtgttaatttcatt

SEQ ID NO: 7835 - DNA, 20 bp, Artificial Sequence
  Synthetic oligonucleotide: CBLB-2074
tgttaatttcatttggttct

SEQ ID NO: 7836 - DNA, 20 bp, Artificial Sequence
  Synthetic oligonucleotide: CBLB-2075
gttaatttcatttggttctt

SEQ ID NO: 7837 - DNA, 20 bp, Artificial Sequence
  Synthetic oligonucleotide: CBLB-2076
caccgcgttgatttaaagaa

SEQ ID NO: 7838 - DNA, 20 bp, Artificial Sequence
  Synthetic oligonucleotide: CBLB-2077
ggtgttcgtgtgtccgtact

SEQ ID NO: 7839 - DNA, 20 bp, Artificial Sequence
  Synthetic oligonucleotide: CBLB-2078
gttcgtgtgtccgtacttgg

SEQ ID NO: 7840 - DNA, 20 bp, Artificial Sequence
  Synthetic oligonucleotide: CBLB-2079
cgtacttggtggttttagtg

SEQ ID NO: 7841 - DNA, 20 bp, Artificial Sequence
  Synthetic oligonucleotide: CBLB-2080
gtacttggtggttttagtgt

SEQ ID NO: 7842 - DNA, 20 bp, Artificial Sequence
  Synthetic oligonucleotide: CBLB-2081
gctgtcccttacgtttgtgt

SEQ ID NO: 7843 - DNA, 20 bp, Artificial Sequence
  Synthetic oligonucleotide: CBLB-2366
atctttatgtttatgtaact

SEQ ID NO: 7844 - DNA, 20 bp, Artificial Sequence
  Synthetic oligonucleotide: CBLB-2083
gataacaaaagagtaccagc

SEQ ID NO: 7845 - DNA, 20 bp, Artificial Sequence
  Synthetic oligonucleotide: CBLB-2084
gaccactcatgacaatcatc

SEQ ID NO: 7846 - DNA, 20 bp, Artificial Sequence
  Synthetic oligonucleotide: CBLB-2085
atgatactgaaaatatttac

SEQ ID NO: 7847 - DNA, 20 bp, Artificial Sequence
  Synthetic oligonucleotide: CBLB-2086
tgatactgaaaatatttact

SEQ ID NO: 7848 - DNA, 20 bp, Artificial Sequence
  Synthetic oligonucleotide: CBLB-2087
gatactgaaaatatttactg

SEQ ID NO: 7849 - DNA, 20 bp, Artificial Sequence
  Synthetic oligonucleotide: CBLB-2088
aagtgaagaagcagtagttg

SEQ ID NO: 7850 - DNA, 20 bp, Artificial Sequence
  Synthetic oligonucleotide: CBLB-2089
agtgaagaagcagtagttga

SEQ ID NO: 7851 - DNA, 20 bp, Artificial Sequence
  Synthetic oligonucleotide: CBLB-2090
gaaactttttttgttgttaa

SEQ ID NO: 7852 - DNA, 20 bp, Artificial Sequence
  Synthetic oligonucleotide: CBLB-2091
aaactttttttgttgttaat

SEQ ID NO: 7853 - DNA, 20 bp, Artificial Sequence
  Synthetic oligonucleotide: CBLB-2092
ctactattccattttgaaac

SEQ ID NO: 7854 - DNA, 20 bp, Artificial Sequence
  Synthetic oligonucleotide: CBLB-2093
tgaaacaggaaacctttcga

SEQ ID NO: 7855 - DNA, 20 bp, Artificial Sequence
  Synthetic oligonucleotide: CBLB-2094
ggcacattgtttattgtgaa

SEQ ID NO: 7856 - DNA, 20 bp, Artificial Sequence
  Synthetic oligonucleotide: CBLB-2095
tgtgaaaggaaaatttatgt

SEQ ID NO: 7857 - DNA, 20 bp, Artificial Sequence
  Synthetic oligonucleotide: CBLB-2096
gtgaaaggaaaatttatgtt

SEQ ID NO: 7858 - DNA, 20 bp, Artificial Sequence
  Synthetic oligonucleotide: CBLB-2097
tgaaaggaaaatttatgttg

SEQ ID NO: 7859 - DNA, 20 bp, Artificial Sequence
  Synthetic oligonucleotide: CBLB-2098
gaaaggaaaatttatgttgg

SEQ ID NO: 7860 - DNA, 20 bp, Artificial Sequence
  Synthetic oligonucleotide: CBLB-2099
aggaaaatttatgttggggg

SEQ ID NO: 7861 - DNA, 20 bp, Artificial Sequence
  Synthetic oligonucleotide: CBLB-2100
aatttatgttgggggtggtg

SEQ ID NO: 7862 - DNA, 20 bp, Artificial Sequence
  Synthetic oligonucleotide: CBLB-2101
gagagtatcagaaacctctg

SEQ ID NO: 7863 - DNA, 20 bp, Artificial Sequence
  Synthetic oligonucleotide: CBLB-2102
ttcacaagaagaaatcatga

SEQ ID NO: 7864 - DNA, 20 bp, Artificial Sequence
  Synthetic oligonucleotide: CBLB-2103
tcacaagaagaaatcatgat

SEQ ID NO: 7865 - RNA, 17 nt, Artificial Sequence
  Synthetic oligonucleotide: CBLB-2104
ccgcaggccggggagga

SEQ ID NO: 7866 - RNA, 17 nt, Artificial Sequence
  Synthetic oligonucleotide: CBLB-2105
ggccggggaggagggag

SEQ ID NO: 7867 - RNA, 17 nt, Artificial Sequence
  Synthetic oligonucleotide: CBLB-2106
gccggggaggagggaga

SEQ ID NO: 7868 - DNA, 17 bp, Artificial Sequence
  Synthetic oligonucleotide: CBLB-2107
ggagggagagggcgtcc

SEQ ID NO: 7869 - DNA, 17 bp, Artificial Sequence
  Synthetic oligonucleotide: CBLB-2108
gagggcgtccaggcaga

SEQ ID NO: 7870 - DNA, 17 bp, Artificial Sequence
  Synthetic oligonucleotide: CBLB-2109
ggcgtccaggcagacgg

SEQ ID NO: 7871 - DNA, 17 bp, Artificial Sequence
  Synthetic oligonucleotide: CBLB-2110
ccaggcagacggcggtg

SEQ ID NO: 7872 - DNA, 17 bp, Artificial Sequence
  Synthetic oligonucleotide: CBLB-2111
gcggtgaggactgcagc

SEQ ID NO: 7873 - DNA, 17 bp, Artificial Sequence
  Synthetic oligonucleotide: CBLB-2112
gtgaggactgcagcagg

SEQ ID NO: 7874 - DNA, 17 bp, Artificial Sequence
  Synthetic oligonucleotide: CBLB-2113
ggactgcagcaggcggc

SEQ ID NO: 7875 - DNA, 17 bp, Artificial Sequence
  Synthetic oligonucleotide: CBLB-2114
gactgcagcaggcggcc

SEQ ID NO: 7876 - DNA, 17 bp, Artificial Sequence
  Synthetic oligonucleotide: CBLB-2115
tgcagcaggcggccggg

SEQ ID NO: 7877 - DNA, 17 bp, Artificial Sequence
  Synthetic oligonucleotide: CBLB-2116
gggaggcgcgtccaccc

SEQ ID NO: 7878 - DNA, 17 bp, Artificial Sequence
  Synthetic oligonucleotide: CBLB-2117
ccctcccgcgccctaga

SEQ ID NO: 7879 - DNA, 17 bp, Artificial Sequence
  Synthetic oligonucleotide: CBLB-2118
cccgcgccctagacgga

SEQ ID NO: 7880 - DNA, 17 bp, Artificial Sequence
  Synthetic oligonucleotide: CBLB-2119
ctagacggacggtgctg

SEQ ID NO: 7881 - DNA, 17 bp, Artificial Sequence
  Synthetic oligonucleotide: CBLB-2120
tagacggacggtgctgc

SEQ ID NO: 7882 - DNA, 17 bp, Artificial Sequence
  Synthetic oligonucleotide: CBLB-2121
ggacggtgctgcgggca

SEQ ID NO: 7883 - DNA, 17 bp, Artificial Sequence
  Synthetic oligonucleotide: CBLB-2122
gacggtgctgcgggcac

SEQ ID NO: 7884 - DNA, 17 bp, Artificial Sequence
  Synthetic oligonucleotide: CBLB-2123
ggtgctgcgggcacggg

SEQ ID NO: 7885 - DNA, 17 bp, Artificial Sequence
  Synthetic oligonucleotide: CBLB-2124
gtgctgcgggcacggga

SEQ ID NO: 7886 - DNA, 17 bp, Artificial Sequence
  Synthetic oligonucleotide: CBLB-2125
cctgcagctcagacccg

SEQ ID NO: 7887 - DNA, 17 bp, Artificial Sequence
  Synthetic oligonucleotide: CBLB-2126
ctgcagctcagacccga

SEQ ID NO: 7888 - DNA, 17 bp, Artificial Sequence
  Synthetic oligonucleotide: CBLB-2127
tgcagctcagacccgag

SEQ ID NO: 7889 - DNA, 17 bp, Artificial Sequence
  Synthetic oligonucleotide: CBLB-2128
gctcagacccgaggggc

SEQ ID NO: 7890 - DNA, 17 bp, Artificial Sequence
  Synthetic oligonucleotide: CBLB-2129
ctcagacccgaggggcc

SEQ ID NO: 7891 - RNA, 17 nt, Artificial Sequence
  Synthetic oligonucleotide: CBLB-2130
gacccgaggggccggga

SEQ ID NO: 7892 - RNA, 17 nt, Artificial Sequence
  Synthetic oligonucleotide: CBLB-2131
acccgaggggccgggaa

SEQ ID NO: 7893 - RNA, 17 nt, Artificial Sequence
  Synthetic oligonucleotide: CBLB-2132
cccgaggggccgggaag

SEQ ID NO: 7894 - DNA, 17 bp, Artificial Sequence
  Synthetic oligonucleotide: CBLB-2133
cgggaaggggcctgagc

SEQ ID NO: 7895 - DNA, 17 bp, Artificial Sequence
  Synthetic oligonucleotide: CBLB-2134
gggaaggggcctgagca

SEQ ID NO: 7896 - DNA, 17 bp, Artificial Sequence
  Synthetic oligonucleotide: CBLB-2135
aggggcctgagcaggga

SEQ ID NO: 7897 - DNA, 17 bp, Artificial Sequence
  Synthetic oligonucleotide: CBLB-2136
ggggcctgagcagggaa

SEQ ID NO: 7898 - RNA, 17 nt, Artificial Sequence
  Synthetic oligonucleotide: CBLB-2137
gagcagggaagggacac

SEQ ID NO: 7899 - DNA, 17 bp, Artificial Sequence
  Synthetic oligonucleotide: CBLB-2138
gtcctgaaacaaagctt

SEQ ID NO: 7900 - DNA, 17 bp, Artificial Sequence
  Synthetic oligonucleotide: CBLB-2139
tcctgaaacaaagcttt

SEQ ID NO: 7901 - DNA, 17 bp, Artificial Sequence
  Synthetic oligonucleotide: CBLB-2140
aacaaagctttgggttg

SEQ ID NO: 7902 - DNA, 17 bp, Artificial Sequence
  Synthetic oligonucleotide: CBLB-2141
acaaagctttgggttga

SEQ ID NO: 7903 - DNA, 17 bp, Artificial Sequence
  Synthetic oligonucleotide: CBLB-2142
ctttgggttgagggcag

SEQ ID NO: 7904 - DNA, 17 bp, Artificial Sequence
  Synthetic oligonucleotide: CBLB-2143
ggttgagggcagaggcg

SEQ ID NO: 7905 - DNA, 17 bp, Artificial Sequence
  Synthetic oligonucleotide: CBLB-2144
tgaactcctcctttccg

SEQ ID NO: 7906 - DNA, 17 bp, Artificial Sequence
  Synthetic oligonucleotide: CBLB-2145
tcttttctcttttcaaa

SEQ ID NO: 7907 - DNA, 17 bp, Artificial Sequence
  Synthetic oligonucleotide: CBLB-2146
cttttctcttttcaaat

SEQ ID NO: 7908 - DNA, 17 bp, Artificial Sequence
  Synthetic oligonucleotide: CBLB-2147
tgtgtgttaatttcatt

SEQ ID NO: 7909 - DNA, 17 bp, Artificial Sequence
  Synthetic oligonucleotide: CBLB-2148
taatttcatttggttct

SEQ ID NO: 7910 - DNA, 17 bp, Artificial Sequence
  Synthetic oligonucleotide: CBLB-2149
aatttcatttggttctt

SEQ ID NO: 7911 - DNA, 17 bp, Artificial Sequence
  Synthetic oligonucleotide: CBLB-2150
cgcgttgatttaaagaa

SEQ ID NO: 7912 - DNA, 17 bp, Artificial Sequence
  Synthetic oligonucleotide: CBLB-2151
gttcgtgtgtccgtact

SEQ ID NO: 7913 - DNA, 17 bp, Artificial Sequence
  Synthetic oligonucleotide: CBLB-2152
cgtgtgtccgtacttgg

SEQ ID NO: 7914 - DNA, 17 bp, Artificial Sequence
  Synthetic oligonucleotide: CBLB-2153
acttggtggttttagtg

SEQ ID NO: 7915 - DNA, 17 bp, Artificial Sequence
  Synthetic oligonucleotide: CBLB-2154
cttggtggttttagtgt

SEQ ID NO: 7916 - DNA, 17 bp, Artificial Sequence
  Synthetic oligonucleotide: CBLB-2155
gtcccttacgtttgtgt

SEQ ID NO: 7917 - DNA, 17 bp, Artificial Sequence
  Synthetic oligonucleotide: CBLB-2444
tttatgtttatgtaact

SEQ ID NO: 7918 - DNA, 17 bp, Artificial Sequence
  Synthetic oligonucleotide: CBLB-2157
aacaaaagagtaccagc

SEQ ID NO: 7919 - DNA, 17 bp, Artificial Sequence
  Synthetic oligonucleotide: CBLB-2158
cactcatgacaatcatc

SEQ ID NO: 7920 - DNA, 17 bp, Artificial Sequence
  Synthetic oligonucleotide: CBLB-2159
atactgaaaatatttac

SEQ ID NO: 7921 - DNA, 17 bp, Artificial Sequence
  Synthetic oligonucleotide: CBLB-2160
tactgaaaatatttact

SEQ ID NO: 7922 - DNA, 17 bp, Artificial Sequence
  Synthetic oligonucleotide: CBLB-2161
actgaaaatatttactg

SEQ ID NO: 7923 - DNA, 17 bp, Artificial Sequence
  Synthetic oligonucleotide: CBLB-2162
tgaagaagcagtagttg

SEQ ID NO: 7924 - DNA, 17 bp, Artificial Sequence
  Synthetic oligonucleotide: CBLB-2163
gaagaagcagtagttga

SEQ ID NO: 7925 - DNA, 17 bp, Artificial Sequence
  Synthetic oligonucleotide: CBLB-2164
actttttttgttgttaa

SEQ ID NO: 7926 - DNA, 17 bp, Artificial Sequence
  Synthetic oligonucleotide: CBLB-2165
ctttttttgttgttaat

SEQ ID NO: 7927 - DNA, 17 bp, Artificial Sequence
  Synthetic oligonucleotide: CBLB-2166
ctattccattttgaaac

SEQ ID NO: 7928 - DNA, 17 bp, Artificial Sequence
  Synthetic oligonucleotide: CBLB-2167
aacaggaaacctttcga

SEQ ID NO: 7929 - DNA, 17 bp, Artificial Sequence
  Synthetic oligonucleotide: CBLB-2168
acattgtttattgtgaa

SEQ ID NO: 7930 - DNA, 17 bp, Artificial Sequence
  Synthetic oligonucleotide: CBLB-2169
gaaaggaaaatttatgt

SEQ ID NO: 7931 - DNA, 17 bp, Artificial Sequence
  Synthetic oligonucleotide: CBLB-2170
aaaggaaaatttatgtt

SEQ ID NO: 7932 - DNA, 17 bp, Artificial Sequence
  Synthetic oligonucleotide: CBLB-2171
aaggaaaatttatgttg

SEQ ID NO: 7933 - DNA, 17 bp, Artificial Sequence
  Synthetic oligonucleotide: CBLB-2172
aggaaaatttatgttgg

SEQ ID NO: 7934 - DNA, 17 bp, Artificial Sequence
  Synthetic oligonucleotide: CBLB-2173
aaaatttatgttggggg

SEQ ID NO: 7935 - DNA, 17 bp, Artificial Sequence
  Synthetic oligonucleotide: CBLB-2174
ttatgttgggggtggtg

SEQ ID NO: 7936 - DNA, 17 bp, Artificial Sequence
  Synthetic oligonucleotide: CBLB-2175
agtatcagaaacctctg

SEQ ID NO: 7937 - DNA, 17 bp, Artificial Sequence
  Synthetic oligonucleotide: CBLB-2176
acaagaagaaatcatga

SEQ ID NO: 7938 - DNA, 17 bp, Artificial Sequence
  Synthetic oligonucleotide: CBLB-2177
caagaagaaatcatgat

SEQ ID NO: 7939 - DNA, 20 bp, Artificial Sequence
  Synthetic oligonucleotide: CBLB-2178
ctccctcctccccggcctgc

SEQ ID NO: 7940 - DNA, 20 bp, Artificial Sequence
  Synthetic oligonucleotide: CBLB-2179
tctccctcctccccggcctg

SEQ ID NO: 7941 - DNA, 20 bp, Artificial Sequence
  Synthetic oligonucleotide: CBLB-2180
gacgccctctccctcctccc

SEQ ID NO: 7942 - DNA, 20 bp, Artificial Sequence
  Synthetic oligonucleotide: CBLB-2181
agtcctcaccgccgtctgcc

SEQ ID NO: 7943 - DNA, 20 bp, Artificial Sequence
  Synthetic oligonucleotide: CBLB-2182
gcctgggtggacgcgcctcc

SEQ ID NO: 7944 - DNA, 20 bp, Artificial Sequence
  Synthetic oligonucleotide: CBLB-2183
ctgtgggctcggcgcctggg

SEQ ID NO: 7945 - DNA, 20 bp, Artificial Sequence
  Synthetic oligonucleotide: CBLB-2184
acactgtgggctcggcgcct

SEQ ID NO: 7946 - DNA, 20 bp, Artificial Sequence
  Synthetic oligonucleotide: CBLB-2185
gacactgtgggctcggcgcc

SEQ ID NO: 7947 - DNA, 20 bp, Artificial Sequence
  Synthetic oligonucleotide: CBLB-2186
cgggagggacactgtgggct

SEQ ID NO: 7948 - DNA, 20 bp, Artificial Sequence
  Synthetic oligonucleotide: CBLB-2187
gggcgcgggagggacactgt

SEQ ID NO: 7949 - DNA, 20 bp, Artificial Sequence
  Synthetic oligonucleotide: CBLB-2188
agggcgcgggagggacactg

SEQ ID NO: 7950 - DNA, 20 bp, Artificial Sequence
  Synthetic oligonucleotide: CBLB-2189
cgtccgtctagggcgcggga

SEQ ID NO: 7951 - DNA, 20 bp, Artificial Sequence
  Synthetic oligonucleotide: CBLB-2190
ccgtccgtctagggcgcggg

SEQ ID NO: 7952 - DNA, 20 bp, Artificial Sequence
  Synthetic oligonucleotide: CBLB-2191
gcaccgtccgtctagggcgc

SEQ ID NO: 7953 - DNA, 20 bp, Artificial Sequence
  Synthetic oligonucleotide: CBLB-2192
agcaccgtccgtctagggcg

SEQ ID NO: 7954 - DNA, 20 bp, Artificial Sequence
  Synthetic oligonucleotide: CBLB-2193
cccgcagcaccgtccgtcta

SEQ ID NO: 7955 - DNA, 20 bp, Artificial Sequence
  Synthetic oligonucleotide: CBLB-2194
gcccgcagcaccgtccgtct

SEQ ID NO: 7956 - DNA, 20 bp, Artificial Sequence
  Synthetic oligonucleotide: CBLB-2195
ggaggaaggtggactgggag

SEQ ID NO: 7957 - DNA, 20 bp, Artificial Sequence
  Synthetic oligonucleotide: CBLB-2196
aggaggaaggtggactggga

SEQ ID NO: 7958 - DNA, 20 bp, Artificial Sequence
  Synthetic oligonucleotide: CBLB-2197
caggaggaaggtggactggg

SEQ ID NO: 7959 - DNA, 20 bp, Artificial Sequence
  Synthetic oligonucleotide: CBLB-2198
ctgcaggaggaaggtggact

SEQ ID NO: 7960 - DNA, 20 bp, Artificial Sequence
  Synthetic oligonucleotide: CBLB-2199
gctgcaggaggaaggtggac

SEQ ID NO: 7961 - DNA, 20 bp, Artificial Sequence
  Synthetic oligonucleotide: CBLB-2200
tctgagctgcaggaggaagg

SEQ ID NO: 7962 - DNA, 20 bp, Artificial Sequence
  Synthetic oligonucleotide: CBLB-2201
gggtctgagctgcaggagga

SEQ ID NO: 7963 - DNA, 20 bp, Artificial Sequence
  Synthetic oligonucleotide: CBLB-2202
cctcgggtctgagctgcagg

SEQ ID NO: 7964 - DNA, 20 bp, Artificial Sequence
  Synthetic oligonucleotide: CBLB-2203
gcccctcgggtctgagctgc

SEQ ID NO: 7965 - DNA, 20 bp, Artificial Sequence
  Synthetic oligonucleotide: CBLB-2204
aggccccttcccggcccctc

SEQ ID NO: 7966 - DNA, 20 bp, Artificial Sequence
  Synthetic oligonucleotide: CBLB-2205
caggccccttcccggcccct

SEQ ID NO: 7967 - DNA, 20 bp, Artificial Sequence
  Synthetic oligonucleotide: CBLB-2206
tccctgctcaggccccttcc

SEQ ID NO: 7968 - DNA, 20 bp, Artificial Sequence
  Synthetic oligonucleotide: CBLB-2207
cctgtgtcccttccctgctc

SEQ ID NO: 7969 - DNA, 20 bp, Artificial Sequence
  Synthetic oligonucleotide: CBLB-2208
tcaacccaaagctttgtttc

SEQ ID NO: 7970 - DNA, 20 bp, Artificial Sequence
  Synthetic oligonucleotide: CBLB-2209
aaaggaggagttcacttctc

SEQ ID NO: 7971 - RNA, 20 nt, Artificial Sequence
  Synthetic oligonucleotide: CBLB-2210
caagagcggccacggaaagg

SEQ ID NO: 7972 - DNA, 20 bp, Artificial Sequence
  Synthetic oligonucleotide: CBLB-2211
tgacaagagcggccacggaa

SEQ ID NO: 7973 - DNA, 20 bp, Artificial Sequence
  Synthetic oligonucleotide: CBLB-2212
aaaaatgacaagagcggcca

SEQ ID NO: 7974 - DNA, 20 bp, Artificial Sequence
  Synthetic oligonucleotide: CBLB-2213
aaagagaaaaatgacaagag

SEQ ID NO: 7975 - DNA, 20 bp, Artificial Sequence
  Synthetic oligonucleotide: CBLB-2214
cacctttctttaaatcaacg

SEQ ID NO: 7976 - DNA, 20 bp, Artificial Sequence
  Synthetic oligonucleotide: CBLB-2215
cacactaaaaccaccaagta

SEQ ID NO: 7977 - DNA, 20 bp, Artificial Sequence
  Synthetic oligonucleotide: CBLB-2216
ctgttgtcaacaaaagcgca

SEQ ID NO: 7978 - DNA, 20 bp, Artificial Sequence
  Synthetic oligonucleotide: CBLB-2217
tctgttgtcaacaaaagcgc

SEQ ID NO: 7979 - DNA, 20 bp, Artificial Sequence
  Synthetic oligonucleotide: CBLB-2218
attatcctacacaaacgtaa

SEQ ID NO: 7980 - DNA, 20 bp, Artificial Sequence
  Synthetic oligonucleotide: CBLB-2219
gattatcctacacaaacgta

SEQ ID NO: 7981 - DNA, 20 bp, Artificial Sequence
  Synthetic oligonucleotide: CBLB-2220
caaagacttaaataacctgc

SEQ ID NO: 7982 - DNA, 20 bp, Artificial Sequence
  Synthetic oligonucleotide: CBLB-2221
taccagatgattgtcatgag

SEQ ID NO: 7983 - DNA, 20 bp, Artificial Sequence
  Synthetic oligonucleotide: CBLB-2222
tgaattctcaaagatgaaaa

SEQ ID NO: 7984 - DNA, 20 bp, Artificial Sequence
  Synthetic oligonucleotide: CBLB-2223
aaaggtttcctgtttcaaaa

SEQ ID NO: 7985 - DNA, 20 bp, Artificial Sequence
  Synthetic oligonucleotide: CBLB-2224
ataaacaatgtgccatcgaa

SEQ ID NO: 7986 - DNA, 20 bp, Artificial Sequence
  Synthetic oligonucleotide: CBLB-2225
gcaacatgcagaaaccacag

SEQ ID NO: 7987 - DNA, 20 bp, Artificial Sequence
  Synthetic oligonucleotide: CBLB-2226
ggtattcagattgacttctc

SEQ ID NO: 7988 - DNA, 20 bp, Artificial Sequence
  Synthetic oligonucleotide: CBLB-2227
tttctgagtaaatctctgta

SEQ ID NO: 7989 - DNA, 20 bp, Artificial Sequence
  Synthetic oligonucleotide: CBLB-2228
ataatcatacttagtaaggt

SEQ ID NO: 7990 - DNA, 20 bp, Artificial Sequence
  Synthetic oligonucleotide: CBLB-2229
ttttataatcatacttagta

SEQ ID NO: 7991 - DNA, 17 bp, Artificial Sequence
  Synthetic oligonucleotide: CBLB-2230
cctcctccccggcctgc

SEQ ID NO: 7992 - DNA, 17 bp, Artificial Sequence
  Synthetic oligonucleotide: CBLB-2231
ccctcctccccggcctg

SEQ ID NO: 7993 - DNA, 17 bp, Artificial Sequence
  Synthetic oligonucleotide: CBLB-2232
gccctctccctcctccc

SEQ ID NO: 7994 - DNA, 17 bp, Artificial Sequence
  Synthetic oligonucleotide: CBLB-2233
cctcaccgccgtctgcc

SEQ ID NO: 7995 - DNA, 17 bp, Artificial Sequence
  Synthetic oligonucleotide: CBLB-2234
tgggtggacgcgcctcc

SEQ ID NO: 7996 - DNA, 17 bp, Artificial Sequence
  Synthetic oligonucleotide: CBLB-2235
tgggctcggcgcctggg

SEQ ID NO: 7997 - DNA, 17 bp, Artificial Sequence
  Synthetic oligonucleotide: CBLB-2236
ctgtgggctcggcgcct

SEQ ID NO: 7998 - DNA, 17 bp, Artificial Sequence
  Synthetic oligonucleotide: CBLB-2237
actgtgggctcggcgcc

SEQ ID NO: 7999 - DNA, 17 bp, Artificial Sequence
  Synthetic oligonucleotide: CBLB-2238
gagggacactgtgggct

SEQ ID NO: 8000 - DNA, 17 bp, Artificial Sequence
  Synthetic oligonucleotide: CBLB-2239
cgcgggagggacactgt

SEQ ID NO: 8001 - DNA, 17 bp, Artificial Sequence
  Synthetic oligonucleotide: CBLB-2240
gcgcgggagggacactg

SEQ ID NO: 8002 - DNA, 17 bp, Artificial Sequence
  Synthetic oligonucleotide: CBLB-2241
ccgtctagggcgcggga

SEQ ID NO: 8003 - DNA, 17 bp, Artificial Sequence
  Synthetic oligonucleotide: CBLB-2242
tccgtctagggcgcggg

SEQ ID NO: 8004 - DNA, 17 bp, Artificial Sequence
  Synthetic oligonucleotide: CBLB-2243
ccgtccgtctagggcgc

SEQ ID NO: 8005 - DNA, 17 bp, Artificial Sequence
  Synthetic oligonucleotide: CBLB-2244
accgtccgtctagggcg

SEQ ID NO: 8006 - DNA, 17 bp, Artificial Sequence
  Synthetic oligonucleotide: CBLB-2245
gcagcaccgtccgtcta

SEQ ID NO: 8007 - DNA, 17 bp, Artificial Sequence
  Synthetic oligonucleotide: CBLB-2246
cgcagcaccgtccgtct

SEQ ID NO: 8008 - DNA, 17 bp, Artificial Sequence
  Synthetic oligonucleotide: CBLB-2247
ggaaggtggactgggag

SEQ ID NO: 8009 - DNA, 17 bp, Artificial Sequence
  Synthetic oligonucleotide: CBLB-2248
aggaaggtggactggga

SEQ ID NO: 8010 - DNA, 17 bp, Artificial Sequence
  Synthetic oligonucleotide: CBLB-2249
gaggaaggtggactggg

SEQ ID NO: 8011 - DNA, 17 bp, Artificial Sequence
  Synthetic oligonucleotide: CBLB-2250
caggaggaaggtggact

SEQ ID NO: 8012 - DNA, 17 bp, Artificial Sequence
  Synthetic oligonucleotide: CBLB-2251
gcaggaggaaggtggac

SEQ ID NO: 8013 - DNA, 17 bp, Artificial Sequence
  Synthetic oligonucleotide: CBLB-2252
gagctgcaggaggaagg

SEQ ID NO: 8014 - DNA, 17 bp, Artificial Sequence
  Synthetic oligonucleotide: CBLB-2253
tctgagctgcaggagga

SEQ ID NO: 8015 - DNA, 17 bp, Artificial Sequence
  Synthetic oligonucleotide: CBLB-2254
cgggtctgagctgcagg

SEQ ID NO: 8016 - DNA, 17 bp, Artificial Sequence
  Synthetic oligonucleotide: CBLB-2255
cctcgggtctgagctgc

SEQ ID NO: 8017 - DNA, 17 bp, Artificial Sequence
  Synthetic oligonucleotide: CBLB-2256
ccccttcccggcccctc

SEQ ID NO: 8018 - DNA, 17 bp, Artificial Sequence
  Synthetic oligonucleotide: CBLB-2257
gccccttcccggcccct

SEQ ID NO: 8019 - DNA, 17 bp, Artificial Sequence
  Synthetic oligonucleotide: CBLB-2258
ctgctcaggccccttcc

SEQ ID NO: 8020 - DNA, 17 bp, Artificial Sequence
  Synthetic oligonucleotide: CBLB-2259
gtgtcccttccctgctc

SEQ ID NO: 8021 - DNA, 17 bp, Artificial Sequence
  Synthetic oligonucleotide: CBLB-2260
acccaaagctttgtttc

SEQ ID NO: 8022 - DNA, 17 bp, Artificial Sequence
  Synthetic oligonucleotide: CBLB-2261
ggaggagttcacttctc

SEQ ID NO: 8023 - RNA, 17 nt, Artificial Sequence
  Synthetic oligonucleotide: CBLB-2262
gagcggccacggaaagg

SEQ ID NO: 8024 - RNA, 17 nt, Artificial Sequence
  Synthetic oligonucleotide: CBLB-2263
caagagcggccacggaa

SEQ ID NO: 8025 - DNA, 17 bp, Artificial Sequence
  Synthetic oligonucleotide: CBLB-2264
aatgacaagagcggcca

SEQ ID NO: 8026 - DNA, 17 bp, Artificial Sequence
  Synthetic oligonucleotide: CBLB-2265
gagaaaaatgacaagag

SEQ ID NO: 8027 - DNA, 17 bp, Artificial Sequence
  Synthetic oligonucleotide: CBLB-2266
ctttctttaaatcaacg

SEQ ID NO: 8028 - DNA, 17 bp, Artificial Sequence
  Synthetic oligonucleotide: CBLB-2267
actaaaaccaccaagta

SEQ ID NO: 8029 - DNA, 17 bp, Artificial Sequence
  Synthetic oligonucleotide: CBLB-2268
ttgtcaacaaaagcgca

SEQ ID NO: 8030 - DNA, 17 bp, Artificial Sequence
  Synthetic oligonucleotide: CBLB-2269
gttgtcaacaaaagcgc

SEQ ID NO: 8031 - DNA, 17 bp, Artificial Sequence
  Synthetic oligonucleotide: CBLB-2270
atcctacacaaacgtaa

SEQ ID NO: 8032 - DNA, 17 bp, Artificial Sequence
  Synthetic oligonucleotide: CBLB-2271
tatcctacacaaacgta

SEQ ID NO: 8033 - DNA, 17 bp, Artificial Sequence
  Synthetic oligonucleotide: CBLB-2272
agacttaaataacctgc

SEQ ID NO: 8034 - DNA, 17 bp, Artificial Sequence
  Synthetic oligonucleotide: CBLB-2273
cagatgattgtcatgag

SEQ ID NO: 8035 - DNA, 17 bp, Artificial Sequence
  Synthetic oligonucleotide: CBLB-2274
attctcaaagatgaaaa

SEQ ID NO: 8036 - DNA, 17 bp, Artificial Sequence
  Synthetic oligonucleotide: CBLB-2275
ggtttcctgtttcaaaa

SEQ ID NO: 8037 - DNA, 17 bp, Artificial Sequence
  Synthetic oligonucleotide: CBLB-2276
aacaatgtgccatcgaa

SEQ ID NO: 8038 - DNA, 17 bp, Artificial Sequence
  Synthetic oligonucleotide: CBLB-2277
acatgcagaaaccacag

SEQ ID NO: 8039 - DNA, 17 bp, Artificial Sequence
  Synthetic oligonucleotide: CBLB-2278
attcagattgacttctc

SEQ ID NO: 8040 - DNA, 17 bp, Artificial Sequence
  Synthetic oligonucleotide: CBLB-2279
ctgagtaaatctctgta

SEQ ID NO: 8041 - DNA, 17 bp, Artificial Sequence
  Synthetic oligonucleotide: CBLB-2280
atcatacttagtaaggt

SEQ ID NO: 8042 - DNA, 17 bp, Artificial Sequence
  Synthetic oligonucleotide: CBLB-2281
tataatcatacttagta

SEQ ID NO: 8043 - DNA, 20 bp, Artificial Sequence
  Synthetic oligonucleotide: CBLB-1433
aatctttatgtttatgtaac

SEQ ID NO: 8044 - DNA, 20 bp, Artificial Sequence
  Synthetic oligonucleotide: CBLB-2366
atctttatgtttatgtaact

SEQ ID NO: 8045 - DNA, 20 bp, Artificial Sequence
  Synthetic oligonucleotide: CBLB-1435
ctttatgtttatgtaacttg

SEQ ID NO: 8046 - DNA, 20 bp, Artificial Sequence
  Synthetic oligonucleotide: CBLB-1436
tgtaacttggagaaatctaa

SEQ ID NO: 8047 - DNA, 20 bp, Artificial Sequence
  Synthetic oligonucleotide: CBLB-1437
acttggagaaatctaacaga

SEQ ID NO: 8048 - DNA, 20 bp, Artificial Sequence
  Synthetic oligonucleotide: CBLB-1438
agaaatctaacagagtgaaa

SEQ ID NO: 8049 - DNA, 20 bp, Artificial Sequence
  Synthetic oligonucleotide: CBLB-1439
aaggctcccaaaatgtatga

SEQ ID NO: 8050 - DNA, 20 bp, Artificial Sequence
  Synthetic oligonucleotide: CBLB-1440
ccttcagttgttctggtatt

SEQ ID NO: 8051 - DNA, 20 bp, Artificial Sequence
  Synthetic oligonucleotide: CBLB-1441
agttgttctggtattttgaa

SEQ ID NO: 8052 - DNA, 20 bp, Artificial Sequence
  Synthetic oligonucleotide: CBLB-2370
gttgttctggtattttgaat

SEQ ID NO: 8053 - DNA, 20 bp, Artificial Sequence
  Synthetic oligonucleotide: CBLB-1443
attttgaattggaattaagg

SEQ ID NO: 8054 - DNA, 20 bp, Artificial Sequence
  Synthetic oligonucleotide: CBLB-2372
ttttgaattggaattaaggc

SEQ ID NO: 8055 - DNA, 20 bp, Artificial Sequence
  Synthetic oligonucleotide: CBLB-1445
ttgaattggaattaaggcag

SEQ ID NO: 8056 - DNA, 20 bp, Artificial Sequence
  Synthetic oligonucleotide: CBLB-2373
tgaattggaattaaggcagg

SEQ ID NO: 8057 - DNA, 20 bp, Artificial Sequence
  Synthetic oligonucleotide: CBLB-2374
gaattggaattaaggcagga

SEQ ID NO: 8058 - DNA, 20 bp, Artificial Sequence
  Synthetic oligonucleotide: CBLB-2375
aattggaattaaggcaggag

SEQ ID NO: 8059 - DNA, 20 bp, Artificial Sequence
  Synthetic oligonucleotide: CBLB-1449
tggaattaaggcaggagggg

SEQ ID NO: 8060 - DNA, 20 bp, Artificial Sequence
  Synthetic oligonucleotide: CBLB-1450
aacattctgtttttatctag

SEQ ID NO: 8061 - DNA, 20 bp, Artificial Sequence
  Synthetic oligonucleotide: CBLB-2377
acattctgtttttatctagg

SEQ ID NO: 8062 - DNA, 20 bp, Artificial Sequence
  Synthetic oligonucleotide: CBLB-2378
cattctgtttttatctaggt

SEQ ID NO: 8063 - DNA, 20 bp, Artificial Sequence
  Synthetic oligonucleotide: CBLB-2379
attctgtttttatctaggtg

SEQ ID NO: 8064 - DNA, 20 bp, Artificial Sequence
  Synthetic oligonucleotide: CBLB-2380
ttctgtttttatctaggtgg

SEQ ID NO: 8065 - DNA, 20 bp, Artificial Sequence
  Synthetic oligonucleotide: CBLB-1455
ttgttctttttttttttttt

SEQ ID NO: 8066 - DNA, 20 bp, Artificial Sequence
  Synthetic oligonucleotide: CBLB-1456
cttttttttttttttatgag

SEQ ID NO: 8067 - DNA, 20 bp, Artificial Sequence
  Synthetic oligonucleotide: CBLB-1457
attagttcagccttagctac

SEQ ID NO: 8068 - DNA, 20 bp, Artificial Sequence
  Synthetic oligonucleotide: CBLB-1458
cagccttagctacttgaaac

SEQ ID NO: 8069 - DNA, 20 bp, Artificial Sequence
  Synthetic oligonucleotide: CBLB-1459
ttagctacttgaaacgtgag

SEQ ID NO: 8070 - DNA, 20 bp, Artificial Sequence
  Synthetic oligonucleotide: CBLB-1460
tagtattgtaaaagcaaatc

SEQ ID NO: 8071 - DNA, 20 bp, Artificial Sequence
  Synthetic oligonucleotide: CBLB-1461
aaaactactgtgtgtaaaga

SEQ ID NO: 8072 - DNA, 20 bp, Artificial Sequence
  Synthetic oligonucleotide: CBLB-1462
aactactgtgtgtaaagatt

SEQ ID NO: 8073 - DNA, 20 bp, Artificial Sequence
  Synthetic oligonucleotide: CBLB-1463
tcacaagcttattgataaag

SEQ ID NO: 8074 - DNA, 20 bp, Artificial Sequence
  Synthetic oligonucleotide: CBLB-1464
gcttattgataaagatgaat

SEQ ID NO: 8075 - DNA, 20 bp, Artificial Sequence
  Synthetic oligonucleotide: CBLB-2383
cttattgataaagatgaatc

SEQ ID NO: 8076 - DNA, 20 bp, Artificial Sequence
  Synthetic oligonucleotide: CBLB-1466
ttttggttttgctctaatcg

SEQ ID NO: 8077 - DNA, 20 bp, Artificial Sequence
  Synthetic oligonucleotide: CBLB-2385
tttggttttgctctaatcga

SEQ ID NO: 8078 - DNA, 20 bp, Artificial Sequence
  Synthetic oligonucleotide: CBLB-1468
tggttttgctctaatcgatg

SEQ ID NO: 8079 - DNA, 20 bp, Artificial Sequence
  Synthetic oligonucleotide: CBLB-2386
ggttttgctctaatcgatgg

SEQ ID NO: 8080 - DNA, 20 bp, Artificial Sequence
  Synthetic oligonucleotide: CBLB-1470
agttagtctctagttttctg

SEQ ID NO: 8081 - DNA, 20 bp, Artificial Sequence
  Synthetic oligonucleotide: CBLB-1471
ttttttaaatctgcctttta

SEQ ID NO: 8082 - DNA, 20 bp, Artificial Sequence
  Synthetic oligonucleotide: CBLB-01
aattccagatggcaaactca

SEQ ID NO: 8083 - DNA, 20 bp, Artificial Sequence
  Synthetic oligonucleotide: CBLB-02
atggcaaactcaatgaatgg

SEQ ID NO: 8084 - DNA, 20 bp, Artificial Sequence
  Synthetic oligonucleotide: CBLB-03
aatggcagaaaccctggtgg

SEQ ID NO: 8085 - DNA, 20 bp, Artificial Sequence
  Synthetic oligonucleotide: CBLB-04
tggcagaaaccctggtggtc

SEQ ID NO: 8086 - DNA, 20 bp, Artificial Sequence
  Synthetic oligonucleotide: CBLB-2284
ggcagaaaccctggtggtcg

SEQ ID NO: 8087 - DNA, 20 bp, Artificial Sequence
  Synthetic oligonucleotide: CBLB-06
cagaaaccctggtggtcgag

SEQ ID NO: 8088 - DNA, 20 bp, Artificial Sequence
  Synthetic oligonucleotide: CBLB-2285
agaaaccctggtggtcgagg

SEQ ID NO: 8089 - DNA, 20 bp, Artificial Sequence
  Synthetic oligonucleotide: CBLB-08
ggtggtcgaggaggaaatcc

SEQ ID NO: 8090 - DNA, 20 bp, Artificial Sequence
  Synthetic oligonucleotide: CBLB-09
ggaggaaatccccgaaaagg

SEQ ID NO: 8091 - DNA, 20 bp, Artificial Sequence
  Synthetic oligonucleotide: CBLB-10
atccccgaaaaggtcgaatt

SEQ ID NO: 8092 - DNA, 20 bp, Artificial Sequence
  Synthetic oligonucleotide: CBLB-11
tgggtattattgatgctatt

SEQ ID NO: 8093 - DNA, 20 bp, Artificial Sequence
  Synthetic oligonucleotide: CBLB-12
tgatgctattcaggatgcag

SEQ ID NO: 8094 - DNA, 20 bp, Artificial Sequence
  Synthetic oligonucleotide: CBLB-13
aagcaagctgccgcagatcg

SEQ ID NO: 8095 - DNA, 20 bp, Artificial Sequence
  Synthetic oligonucleotide: CBLB-14
ctgccgcagatcgcaggacc

SEQ ID NO: 8096 - DNA, 20 bp, Artificial Sequence
  Synthetic oligonucleotide: CBLB-2292
tgccgcagatcgcaggaccg

SEQ ID NO: 8097 - DNA, 20 bp, Artificial Sequence
  Synthetic oligonucleotide: CBLB-16
ccgcagatcgcaggaccgtg

SEQ ID NO: 8098 - DNA, 20 bp, Artificial Sequence
  Synthetic oligonucleotide: CBLB-17
cgcaggaccgtggagaagac

SEQ ID NO: 8099 - DNA, 20 bp, Artificial Sequence
  Synthetic oligonucleotide: CBLB-2293
gcaggaccgtggagaagact

SEQ ID NO: 8100 - DNA, 20 bp, Artificial Sequence
  Synthetic oligonucleotide: CBLB-19
tggagaagacttggaagctc

SEQ ID NO: 8101 - DNA, 20 bp, Artificial Sequence
  Synthetic oligonucleotide: CBLB-20
ttctgtctgacgttgcctgt

SEQ ID NO: 8102 - DNA, 20 bp, Artificial Sequence
  Synthetic oligonucleotide: CBLB-1492
tttcttcaactctgtgtttt

SEQ ID NO: 8103 - DNA, 20 bp, Artificial Sequence
  Synthetic oligonucleotide: CBLB-1493
actctgtgttttttgaaaag

SEQ ID NO: 8104 - DNA, 20 bp, Artificial Sequence
  Synthetic oligonucleotide: CBLB-1494
cctttctactctttaaggtt

SEQ ID NO: 8105 - DNA, 20 bp, Artificial Sequence
  Synthetic oligonucleotide: CBLB-1495
tttttgttggtgtatggcca

SEQ ID NO: 8106 - DNA, 20 bp, Artificial Sequence
  Synthetic oligonucleotide: CBLB-1496
ggtgtatggccatagaatgc

SEQ ID NO: 8107 - DNA, 20 bp, Artificial Sequence
  Synthetic oligonucleotide: CBLB-2414
gtgtatggccatagaatgct

SEQ ID NO: 8108 - DNA, 20 bp, Artificial Sequence
  Synthetic oligonucleotide: CBLB-1498
aagtgtttgttctgtcttct

SEQ ID NO: 8109 - DNA, 17 bp, Artificial Sequence
  Synthetic oligonucleotide: CBLB-1499
ctttatgtttatgtaac

SEQ ID NO: 8110 - DNA, 17 bp, Artificial Sequence
  Synthetic oligonucleotide: CBLB-2444
tttatgtttatgtaact

SEQ ID NO: 8111 - DNA, 17 bp, Artificial Sequence
  Synthetic oligonucleotide: CBLB-1501
tatgtttatgtaacttg

SEQ ID NO: 8112 - DNA, 17 bp, Artificial Sequence
  Synthetic oligonucleotide: CBLB-1502
aacttggagaaatctaa

SEQ ID NO: 8113 - DNA, 17 bp, Artificial Sequence
  Synthetic oligonucleotide: CBLB-1503
tggagaaatctaacaga

SEQ ID NO: 8114 - DNA, 17 bp, Artificial Sequence
  Synthetic oligonucleotide: CBLB-1504
aatctaacagagtgaaa

SEQ ID NO: 8115 - DNA, 17 bp, Artificial Sequence
  Synthetic oligonucleotide: CBLB-1505
gctcccaaaatgtatga

SEQ ID NO: 8116 - DNA, 17 bp, Artificial Sequence
  Synthetic oligonucleotide: CBLB-1506
tcagttgttctggtatt

SEQ ID NO: 8117 - DNA, 17 bp, Artificial Sequence
  Synthetic oligonucleotide: CBLB-1507
tgttctggtattttgaa

SEQ ID NO: 8118 - DNA, 17 bp, Artificial Sequence
  Synthetic oligonucleotide: CBLB-2448
gttctggtattttgaat

SEQ ID NO: 8119 - DNA, 17 bp, Artificial Sequence
  Synthetic oligonucleotide: CBLB-1509
ttgaattggaattaagg

SEQ ID NO: 8120 - DNA, 17 bp, Artificial Sequence
  Synthetic oligonucleotide: CBLB-2450
tgaattggaattaaggc

SEQ ID NO: 8121 - DNA, 17 bp, Artificial Sequence
  Synthetic oligonucleotide: CBLB-1511
aattggaattaaggcag

SEQ ID NO: 8122 - DNA, 17 bp, Artificial Sequence
  Synthetic oligonucleotide: CBLB-2451
attggaattaaggcagg

SEQ ID NO: 8123 - DNA, 17 bp, Artificial Sequence
  Synthetic oligonucleotide: CBLB-2452
ttggaattaaggcagga

SEQ ID NO: 8124 - DNA, 17 bp, Artificial Sequence
  Synthetic oligonucleotide: CBLB-2453
tggaattaaggcaggag

SEQ ID NO: 8125 - DNA, 17 bp, Artificial Sequence
  Synthetic oligonucleotide: CBLB-1515
aattaaggcaggagggg

SEQ ID NO: 8126 - DNA, 17 bp, Artificial Sequence
  Synthetic oligonucleotide: CBLB-1516
attctgtttttatctag

SEQ ID NO: 8127 - DNA, 17 bp, Artificial Sequence
  Synthetic oligonucleotide: CBLB-2455
ttctgtttttatctagg

SEQ ID NO: 8128 - DNA, 17 bp, Artificial Sequence
  Synthetic oligonucleotide: CBLB-2456
tctgtttttatctaggt

SEQ ID NO: 8129 - DNA, 17 bp, Artificial Sequence
  Synthetic oligonucleotide: CBLB-2457
ctgtttttatctaggtg

SEQ ID NO: 8130 - DNA, 17 bp, Artificial Sequence
  Synthetic oligonucleotide: CBLB-2458
tgtttttatctaggtgg

SEQ ID NO: 8131 - DNA, 17 bp, Artificial Sequence
  Synthetic oligonucleotide: CBLB-1521
ttctttttttttttttt

SEQ ID NO: 8132 - DNA, 17 bp, Artificial Sequence
  Synthetic oligonucleotide: CBLB-1522
ttttttttttttatgag

SEQ ID NO: 8133 - DNA, 17 bp, Artificial Sequence
  Synthetic oligonucleotide: CBLB-1523
agttcagccttagctac

SEQ ID NO: 8134 - DNA, 17 bp, Artificial Sequence
  Synthetic oligonucleotide: CBLB-1524
ccttagctacttgaaac

SEQ ID NO: 8135 - DNA, 17 bp, Artificial Sequence
  Synthetic oligonucleotide: CBLB-1525
gctacttgaaacgtgag

SEQ ID NO: 8136 - DNA, 17 bp, Artificial Sequence
  Synthetic oligonucleotide: CBLB-1526
tattgtaaaagcaaatc

SEQ ID NO: 8137 - DNA, 17 bp, Artificial Sequence
  Synthetic oligonucleotide: CBLB-1527
actactgtgtgtaaaga

SEQ ID NO: 8138 - DNA, 17 bp, Artificial Sequence
  Synthetic oligonucleotide: CBLB-1528
tactgtgtgtaaagatt

SEQ ID NO: 8139 - DNA, 17 bp, Artificial Sequence
  Synthetic oligonucleotide: CBLB-1529
caagcttattgataaag

SEQ ID NO: 8140 - DNA, 17 bp, Artificial Sequence
  Synthetic oligonucleotide: CBLB-1530
tattgataaagatgaat

SEQ ID NO: 8141 - DNA, 17 bp, Artificial Sequence
  Synthetic oligonucleotide: CBLB-2461
attgataaagatgaatc

SEQ ID NO: 8142 - DNA, 17 bp, Artificial Sequence
  Synthetic oligonucleotide: CBLB-1532
tggttttgctctaatcg

SEQ ID NO: 8143 - DNA, 17 bp, Artificial Sequence
  Synthetic oligonucleotide: CBLB-2463
ggttttgctctaatcga

SEQ ID NO: 8144 - DNA, 17 bp, Artificial Sequence
  Synthetic oligonucleotide: CBLB-1534
ttttgctctaatcgatg

SEQ ID NO: 8145 - DNA, 17 bp, Artificial Sequence
  Synthetic oligonucleotide: CBLB-2464
tttgctctaatcgatgg

SEQ ID NO: 8146 - DNA, 17 bp, Artificial Sequence
  Synthetic oligonucleotide: CBLB-1536
tagtctctagttttctg

SEQ ID NO: 8147 - DNA, 17 bp, Artificial Sequence
  Synthetic oligonucleotide: CBLB-1537
tttaaatctgcctttta

SEQ ID NO: 8148 - DNA, 17 bp, Artificial Sequence
  Synthetic oligonucleotide: CBLB-36
tccagatggcaaactca

SEQ ID NO: 8149 - DNA, 17 bp, Artificial Sequence
  Synthetic oligonucleotide: CBLB-37
gcaaactcaatgaatgg

SEQ ID NO: 8150 - DNA, 17 bp, Artificial Sequence
  Synthetic oligonucleotide: CBLB-38
ggcagaaaccctggtgg

SEQ ID NO: 8151 - DNA, 17 bp, Artificial Sequence
  Synthetic oligonucleotide: CBLB-39
cagaaaccctggtggtc

SEQ ID NO: 8152 - DNA, 17 bp, Artificial Sequence
  Synthetic oligonucleotide: CBLB-2343
agaaaccctggtggtcg

SEQ ID NO: 8153 - DNA, 17 bp, Artificial Sequence
  Synthetic oligonucleotide: CBLB-41
aaaccctggtggtcgag

SEQ ID NO: 8154 - DNA, 17 bp, Artificial Sequence
  Synthetic oligonucleotide: CBLB-2344
aaccctggtggtcgagg

SEQ ID NO: 8155 - DNA, 17 bp, Artificial Sequence
  Synthetic oligonucleotide: CBLB-43
ggtcgaggaggaaatcc

SEQ ID NO: 8156 - DNA, 17 bp, Artificial Sequence
  Synthetic oligonucleotide: CBLB-44
ggaaatccccgaaaagg

SEQ ID NO: 8157 - DNA, 17 bp, Artificial Sequence
  Synthetic oligonucleotide: CBLB-45
cccgaaaaggtcgaatt

SEQ ID NO: 8158 - DNA, 17 bp, Artificial Sequence
  Synthetic oligonucleotide: CBLB-46
gtattattgatgctatt

SEQ ID NO: 8159 - DNA, 17 bp, Artificial Sequence
  Synthetic oligonucleotide: CBLB-47
tgctattcaggatgcag

SEQ ID NO: 8160 - DNA, 17 bp, Artificial Sequence
  Synthetic oligonucleotide: CBLB-48
caagctgccgcagatcg

SEQ ID NO: 8161 - DNA, 17 bp, Artificial Sequence
  Synthetic oligonucleotide: CBLB-49
ccgcagatcgcaggacc

SEQ ID NO: 8162 - DNA, 17 bp, Artificial Sequence
  Synthetic oligonucleotide: CBLB-2351
cgcagatcgcaggaccg

SEQ ID NO: 8163 - DNA, 17 bp, Artificial Sequence
  Synthetic oligonucleotide: CBLB-51
cagatcgcaggaccgtg

SEQ ID NO: 8164 - DNA, 17 bp, Artificial Sequence
  Synthetic oligonucleotide: CBLB-52
aggaccgtggagaagac

SEQ ID NO: 8165 - DNA, 17 bp, Artificial Sequence
  Synthetic oligonucleotide: CBLB-2352
ggaccgtggagaagact

SEQ ID NO: 8166 - DNA, 17 bp, Artificial Sequence
  Synthetic oligonucleotide: CBLB-54
agaagacttggaagctc

SEQ ID NO: 8167 - DNA, 17 bp, Artificial Sequence
  Synthetic oligonucleotide: CBLB-55
tgtctgacgttgcctgt

SEQ ID NO: 8168 - DNA, 17 bp, Artificial Sequence
  Synthetic oligonucleotide: CBLB-1558
cttcaactctgtgtttt

SEQ ID NO: 8169 - DNA, 17 bp, Artificial Sequence
  Synthetic oligonucleotide: CBLB-1559
ctgtgttttttgaaaag

SEQ ID NO: 8170 - DNA, 17 bp, Artificial Sequence
  Synthetic oligonucleotide: CBLB-1560
ttctactctttaaggtt

SEQ ID NO: 8171 - DNA, 17 bp, Artificial Sequence
  Synthetic oligonucleotide: CBLB-1561
ttgttggtgtatggcca

SEQ ID NO: 8172 - DNA, 17 bp, Artificial Sequence
  Synthetic oligonucleotide: CBLB-1562
gtatggccatagaatgc

SEQ ID NO: 8173 - DNA, 17 bp, Artificial Sequence
  Synthetic oligonucleotide: CBLB-2492
tatggccatagaatgct

SEQ ID NO: 8174 - DNA, 17 bp, Artificial Sequence
  Synthetic oligonucleotide: CBLB-1564
tgtttgttctgtcttct

SEQ ID NO: 8175 - DNA, 20 bp, Artificial Sequence
  Synthetic oligonucleotide: CBLB-1565
tacattttgggagccttacg

SEQ ID NO: 8176 - DNA, 20 bp, Artificial Sequence
  Synthetic oligonucleotide: CBLB-2443
aaggtcctatcatacatttt

SEQ ID NO: 8177 - DNA, 20 bp, Artificial Sequence
  Synthetic oligonucleotide: CBLB-2442
gaaggtcctatcatacattt

SEQ ID NO: 8178 - DNA, 20 bp, Artificial Sequence
  Synthetic oligonucleotide: CBLB-1568
tgaaggtcctatcatacatt

SEQ ID NO: 8179 - DNA, 20 bp, Artificial Sequence
  Synthetic oligonucleotide: CBLB-1569
aattcaaaataccagaacaa

SEQ ID NO: 8180 - DNA, 20 bp, Artificial Sequence
  Synthetic oligonucleotide: CBLB-1570
ttaattccaattcaaaatac

SEQ ID NO: 8181 - DNA, 20 bp, Artificial Sequence
  Synthetic oligonucleotide: CBLB-1571
ttcccccacctagataaaaa

SEQ ID NO: 8182 - DNA, 20 bp, Artificial Sequence
  Synthetic oligonucleotide: CBLB-1572
caactcataaaaaaaaaaaa

SEQ ID NO: 8183 - DNA, 20 bp, Artificial Sequence
  Synthetic oligonucleotide: CBLB-1573
cacgtttcaagtagctaagg

SEQ ID NO: 8184 - DNA, 20 bp, Artificial Sequence
  Synthetic oligonucleotide: CBLB-1574
agatttgcttttacaatact

SEQ ID NO: 8185 - DNA, 20 bp, Artificial Sequence
  Synthetic oligonucleotide: CBLB-1575
tctttacacacagtagtttt

SEQ ID NO: 8186 - DNA, 20 bp, Artificial Sequence
  Synthetic oligonucleotide: CBLB-1576
tcatctttatcaataagctt

SEQ ID NO: 8187 - DNA, 20 bp, Artificial Sequence
  Synthetic oligonucleotide: CBLB-1577
ttagagcaaaaccaaaagtt

SEQ ID NO: 8188 - DNA, 20 bp, Artificial Sequence
  Synthetic oligonucleotide: CBLB-1578
ctgcatcttcctccatcgat

SEQ ID NO: 8189 - DNA, 20 bp, Artificial Sequence
  Synthetic oligonucleotide: CBLB-1579
atatttacccaccagaaaac

SEQ ID NO: 8190 - DNA, 20 bp, Artificial Sequence
  Synthetic oligonucleotide: CBLB-1580
ttttgaaaatatttacccac

SEQ ID NO: 8191 - DNA, 20 bp, Artificial Sequence
  Synthetic oligonucleotide: CBLB-1581
aaaagaaaagttagttggtt

SEQ ID NO: 8192 - DNA, 20 bp, Artificial Sequence
  Synthetic oligonucleotide: CBLB-1582
ttaaaaggcagatttaaaaa

SEQ ID NO: 8193 - DNA, 20 bp, Artificial Sequence
  Synthetic oligonucleotide: CBLB-71
cattcattgagtttgccatc

SEQ ID NO: 8194 - DNA, 20 bp, Artificial Sequence
  Synthetic oligonucleotide: CBLB-72
ccattcattgagtttgccat

SEQ ID NO: 8195 - DNA, 20 bp, Artificial Sequence
  Synthetic oligonucleotide: CBLB-73
accagggtttctgccattca

SEQ ID NO: 8196 - DNA, 20 bp, Artificial Sequence
  Synthetic oligonucleotide: CBLB-74
gggatttcctcctcgaccac

SEQ ID NO: 8197 - DNA, 20 bp, Artificial Sequence
  Synthetic oligonucleotide: CBLB-2303
acccaaaattcgaccttttc

SEQ ID NO: 8198 - DNA, 20 bp, Artificial Sequence
  Synthetic oligonucleotide: CBLB-2302
tacccaaaattcgacctttt

SEQ ID NO: 8199 - DNA, 20 bp, Artificial Sequence
  Synthetic oligonucleotide: CBLB-77
atacccaaaattcgaccttt

SEQ ID NO: 8200 - DNA, 20 bp, Artificial Sequence
  Synthetic oligonucleotide: CBLB-78
ttagggggtccaactgcatc

SEQ ID NO: 8201 - DNA, 20 bp, Artificial Sequence
  Synthetic oligonucleotide: CBLB-2299
gatctgcggcagcttgctta

SEQ ID NO: 8202 - DNA, 20 bp, Artificial Sequence
  Synthetic oligonucleotide: CBLB-2298
cgatctgcggcagcttgctt

SEQ ID NO: 8203 - DNA, 20 bp, Artificial Sequence
  Synthetic oligonucleotide: CBLB-81
gcgatctgcggcagcttgct

SEQ ID NO: 8204 - DNA, 20 bp, Artificial Sequence
  Synthetic oligonucleotide: CBLB-82
cagaacttaccactttgtcc

SEQ ID NO: 8205 - DNA, 20 bp, Artificial Sequence
  Synthetic oligonucleotide: CBLB-83
ttcgcacaggcaacgtcaga

SEQ ID NO: 8206 - DNA, 20 bp, Artificial Sequence
  Synthetic oligonucleotide: CBLB-1596
ctggagaaaccacagacaaa

SEQ ID NO: 8207 - DNA, 20 bp, Artificial Sequence
  Synthetic oligonucleotide: CBLB-1597
taacagtataaataaatctg

SEQ ID NO: 8208 - DNA, 20 bp, Artificial Sequence
  Synthetic oligonucleotide: CBLB-2423
attaacagtataaataaatc

SEQ ID NO: 8209 - DNA, 20 bp, Artificial Sequence
  Synthetic oligonucleotide: CBLB-1599
aattaacagtataaataaat

SEQ ID NO: 8210 - DNA, 20 bp, Artificial Sequence
  Synthetic oligonucleotide: CBLB-1600
agttgaagaaaaatgatgaa

SEQ ID NO: 8211 - DNA, 20 bp, Artificial Sequence
  Synthetic oligonucleotide: CBLB-1601
cacagagttgaagaaaaatg

SEQ ID NO: 8212 - DNA, 20 bp, Artificial Sequence
  Synthetic oligonucleotide: CBLB-1602
tttcaaaaaacacagagttg

SEQ ID NO: 8213 - DNA, 20 bp, Artificial Sequence
  Synthetic oligonucleotide: CBLB-1603
acttttcaaaaaacacagag

SEQ ID NO: 8214 - DNA, 20 bp, Artificial Sequence
  Synthetic oligonucleotide: CBLB-1604
atccaacttttcaaaaaaca

SEQ ID NO: 8215 - DNA, 20 bp, Artificial Sequence
  Synthetic oligonucleotide: CBLB-1605
gttaaaaaacaaaaaagtct

SEQ ID NO: 8216 - DNA, 20 bp, Artificial Sequence
  Synthetic oligonucleotide: CBLB-1606
aaccttaaagagtagaaagg

SEQ ID NO: 8217 - DNA, 20 bp, Artificial Sequence
  Synthetic oligonucleotide: CBLB-1607
tctgaaccttaaagagtaga

SEQ ID NO: 8218 - DNA, 20 bp, Artificial Sequence
  Synthetic oligonucleotide: CBLB-1608
gaactctgaaccttaaagag

SEQ ID NO: 8219 - DNA, 20 bp, Artificial Sequence
  Synthetic oligonucleotide: CBLB-1609
tagaggaactctgaacctta

SEQ ID NO: 8220 - DNA, 20 bp, Artificial Sequence
  Synthetic oligonucleotide: CBLB-1610
ctgagtcatgtagaggaact

SEQ ID NO: 8221 - DNA, 20 bp, Artificial Sequence
  Synthetic oligonucleotide: CBLB-2418
ttacatactgagtcatgtag

SEQ ID NO: 8222 - DNA, 20 bp, Artificial Sequence
  Synthetic oligonucleotide: CBLB-1612
tttacatactgagtcatgta

SEQ ID NO: 8223 - DNA, 20 bp, Artificial Sequence
  Synthetic oligonucleotide: CBLB-1613
actttacatactgagtcatg

SEQ ID NO: 8224 - DNA, 20 bp, Artificial Sequence
  Synthetic oligonucleotide: CBLB-1614
caatggtaaaactttacata

SEQ ID NO: 8225 - DNA, 20 bp, Artificial Sequence
  Synthetic oligonucleotide: CBLB-1615
caacacaacctcacagaaga

SEQ ID NO: 8226 - DNA, 20 bp, Artificial Sequence
  Synthetic oligonucleotide: CBLB-1616
gagcaacacaacctcacaga

SEQ ID NO: 8227 - DNA, 17 bp, Artificial Sequence
  Synthetic oligonucleotide: CBLB-1617
attttgggagccttacg

SEQ ID NO: 8228 - DNA, 17 bp, Artificial Sequence
  Synthetic oligonucleotide: CBLB-2521
gtcctatcatacatttt

SEQ ID NO: 8229 - DNA, 17 bp, Artificial Sequence
  Synthetic oligonucleotide: CBLB-2520
ggtcctatcatacattt

SEQ ID NO: 8230 - DNA, 17 bp, Artificial Sequence
  Synthetic oligonucleotide: CBLB-1620
aggtcctatcatacatt

SEQ ID NO: 8231 - DNA, 17 bp, Artificial Sequence
  Synthetic oligonucleotide: CBLB-1621
tcaaaataccagaacaa

SEQ ID NO: 8232 - DNA, 17 bp, Artificial Sequence
  Synthetic oligonucleotide: CBLB-1622
attccaattcaaaatac

SEQ ID NO: 8233 - DNA, 17 bp, Artificial Sequence
  Synthetic oligonucleotide: CBLB-1623
ccccacctagataaaaa

SEQ ID NO: 8234 - DNA, 17 bp, Artificial Sequence
  Synthetic oligonucleotide: CBLB-1624
ctcataaaaaaaaaaaa

SEQ ID NO: 8235 - DNA, 17 bp, Artificial Sequence
  Synthetic oligonucleotide: CBLB-1625
gtttcaagtagctaagg

SEQ ID NO: 8236 - DNA, 17 bp, Artificial Sequence
  Synthetic oligonucleotide: CBLB-1626
tttgcttttacaatact

SEQ ID NO: 8237 - DNA, 17 bp, Artificial Sequence
  Synthetic oligonucleotide: CBLB-1627
ttacacacagtagtttt

SEQ ID NO: 8238 - DNA, 17 bp, Artificial Sequence
  Synthetic oligonucleotide: CBLB-1628
tctttatcaataagctt

SEQ ID NO: 8239 - DNA, 17 bp, Artificial Sequence
  Synthetic oligonucleotide: CBLB-1629
gagcaaaaccaaaagtt

SEQ ID NO: 8240 - DNA, 17 bp, Artificial Sequence
  Synthetic oligonucleotide: CBLB-1630
catcttcctccatcgat

SEQ ID NO: 8241 - DNA, 17 bp, Artificial Sequence
  Synthetic oligonucleotide: CBLB-1631
tttacccaccagaaaac

SEQ ID NO: 8242 - DNA, 17 bp, Artificial Sequence
  Synthetic oligonucleotide: CBLB-1632
tgaaaatatttacccac

SEQ ID NO: 8243 - DNA, 17 bp, Artificial Sequence
  Synthetic oligonucleotide: CBLB-1633
agaaaagttagttggtt

SEQ ID NO: 8244 - DNA, 17 bp, Artificial Sequence
  Synthetic oligonucleotide: CBLB-1634
aaaggcagatttaaaaa

SEQ ID NO: 8245 - DNA, 17 bp, Artificial Sequence
  Synthetic oligonucleotide: CBLB-91
tcattgagtttgccatc

SEQ ID NO: 8246 - DNA, 17 bp, Artificial Sequence
  Synthetic oligonucleotide: CBLB-92
ttcattgagtttgccat

SEQ ID NO: 8247 - DNA, 17 bp, Artificial Sequence
  Synthetic oligonucleotide: CBLB-93
agggtttctgccattca

SEQ ID NO: 8248 - DNA, 17 bp, Artificial Sequence
  Synthetic oligonucleotide: CBLB-94
atttcctcctcgaccac

SEQ ID NO: 8249 - DNA, 17 bp, Artificial Sequence
  Synthetic oligonucleotide: CBLB-2362
caaaattcgaccttttc

SEQ ID NO: 8250 - DNA, 17 bp, Artificial Sequence
  Synthetic oligonucleotide: CBLB-2361
ccaaaattcgacctttt

SEQ ID NO: 8251 - DNA, 17 bp, Artificial Sequence
  Synthetic oligonucleotide: CBLB-97
cccaaaattcgaccttt

SEQ ID NO: 8252 - DNA, 17 bp, Artificial Sequence
  Synthetic oligonucleotide: CBLB-98
gggggtccaactgcatc

SEQ ID NO: 8253 - DNA, 17 bp, Artificial Sequence
  Synthetic oligonucleotide: CBLB-2358
ctgcggcagcttgctta

SEQ ID NO: 8254 - DNA, 17 bp, Artificial Sequence
  Synthetic oligonucleotide: CBLB-2357
tctgcggcagcttgctt

SEQ ID NO: 8255 - DNA, 17 bp, Artificial Sequence
  Synthetic oligonucleotide: CBLB-101
atctgcggcagcttgct

SEQ ID NO: 8256 - DNA, 17 bp, Artificial Sequence
  Synthetic oligonucleotide: CBLB-102
aacttaccactttgtcc

SEQ ID NO: 8257 - DNA, 17 bp, Artificial Sequence
  Synthetic oligonucleotide: CBLB-103
gcacaggcaacgtcaga

SEQ ID NO: 8258 - RNA, 17 nt, Artificial Sequence
  Synthetic oligonucleotide: CBLB-1648
gagaaaccacagacaaa

SEQ ID NO: 8259 - DNA, 17 bp, Artificial Sequence
  Synthetic oligonucleotide: CBLB-1649
cagtataaataaatctg

SEQ ID NO: 8260 - DNA, 17 bp, Artificial Sequence
  Synthetic oligonucleotide: CBLB-2501
aacagtataaataaatc

SEQ ID NO: 8261 - DNA, 17 bp, Artificial Sequence
  Synthetic oligonucleotide: CBLB-1651
taacagtataaataaat

SEQ ID NO: 8262 - DNA, 17 bp, Artificial Sequence
  Synthetic oligonucleotide: CBLB-1652
tgaagaaaaatgatgaa

SEQ ID NO: 8263 - DNA, 17 bp, Artificial Sequence
  Synthetic oligonucleotide: CBLB-1653
agagttgaagaaaaatg

SEQ ID NO: 8264 - DNA, 17 bp, Artificial Sequence
  Synthetic oligonucleotide: CBLB-1654
caaaaaacacagagttg

SEQ ID NO: 8265 - DNA, 17 bp, Artificial Sequence
  Synthetic oligonucleotide: CBLB-1655
tttcaaaaaacacagag

SEQ ID NO: 8266 - DNA, 17 bp, Artificial Sequence
  Synthetic oligonucleotide: CBLB-1656
caacttttcaaaaaaca

SEQ ID NO: 8267 - DNA, 17 bp, Artificial Sequence
  Synthetic oligonucleotide: CBLB-1657
aaaaaacaaaaaagtct

SEQ ID NO: 8268 - DNA, 17 bp, Artificial Sequence
  Synthetic oligonucleotide: CBLB-1658
cttaaagagtagaaagg

SEQ ID NO: 8269 - DNA, 17 bp, Artificial Sequence
  Synthetic oligonucleotide: CBLB-1659
gaaccttaaagagtaga

SEQ ID NO: 8270 - DNA, 17 bp, Artificial Sequence
  Synthetic oligonucleotide: CBLB-1660
ctctgaaccttaaagag

SEQ ID NO: 8271 - DNA, 17 bp, Artificial Sequence
  Synthetic oligonucleotide: CBLB-1661
aggaactctgaacctta

SEQ ID NO: 8272 - DNA, 17 bp, Artificial Sequence
  Synthetic oligonucleotide: CBLB-1662
agtcatgtagaggaact

SEQ ID NO: 8273 - DNA, 17 bp, Artificial Sequence
  Synthetic oligonucleotide: CBLB-2496
catactgagtcatgtag

SEQ ID NO: 8274 - DNA, 17 bp, Artificial Sequence
  Synthetic oligonucleotide: CBLB-1664
acatactgagtcatgta

SEQ ID NO: 8275 - DNA, 17 bp, Artificial Sequence
  Synthetic oligonucleotide: CBLB-1665
ttacatactgagtcatg

SEQ ID NO: 8276 - DNA, 17 bp, Artificial Sequence
  Synthetic oligonucleotide: CBLB-1666
tggtaaaactttacata

SEQ ID NO: 8277 - DNA, 17 bp, Artificial Sequence
  Synthetic oligonucleotide: CBLB-1667
cacaacctcacagaaga

SEQ ID NO: 8278 - RNA, 20 nt, Artificial Sequence
  Synthetic oligonucleotide: CBLB-2030
aacccgcaggccggggagga

SEQ ID NO: 8279 - RNA, 20 nt, Artificial Sequence
  Synthetic oligonucleotide: CBLB-1669
cccgcaggccggggaggagg

SEQ ID NO: 8280 - RNA, 20 nt, Artificial Sequence
  Synthetic oligonucleotide: CBLB-1670
cgcaggccggggaggaggga

SEQ ID NO: 8281 - DNA, 20 bp, Artificial Sequence
  Synthetic oligonucleotide: CBLB-1671
gggcgtccaggcagacggcg

SEQ ID NO: 8282 - DNA, 20 bp, Artificial Sequence
  Synthetic oligonucleotide: CBLB-1672
gcgtccaggcagacggcggt

SEQ ID NO: 8283 - DNA, 20 bp, Artificial Sequence
  Synthetic oligonucleotide: CBLB-1673
gtgaggactgcagcaggcgg

SEQ ID NO: 8284 - DNA, 20 bp, Artificial Sequence
  Synthetic oligonucleotide: CBLB-2039
tgaggactgcagcaggcggc

SEQ ID NO: 8285 - DNA, 20 bp, Artificial Sequence
  Synthetic oligonucleotide: CBLB-2040
gaggactgcagcaggcggcc

SEQ ID NO: 8286 - DNA, 20 bp, Artificial Sequence
  Synthetic oligonucleotide: CBLB-1676
gaggcgcgtccacccaggcg

SEQ ID NO: 8287 - DNA, 20 bp, Artificial Sequence
  Synthetic oligonucleotide: CBLB-1677
gtgtccctcccgcgccctag

SEQ ID NO: 8288 - DNA, 20 bp, Artificial Sequence
  Synthetic oligonucleotide: CBLB-1678
cgccctagacggacggtgct

SEQ ID NO: 8289 - DNA, 20 bp, Artificial Sequence
  Synthetic oligonucleotide: CBLB-1679
agacggacggtgctgcgggc

SEQ ID NO: 8290 - DNA, 20 bp, Artificial Sequence
  Synthetic oligonucleotide: CBLB-2047
gacggacggtgctgcgggca

SEQ ID NO: 8291 - DNA, 20 bp, Artificial Sequence
  Synthetic oligonucleotide: CBLB-2048
acggacggtgctgcgggcac

SEQ ID NO: 8292 - DNA, 20 bp, Artificial Sequence
  Synthetic oligonucleotide: CBLB-1682
ggacggtgctgcgggcacgg

SEQ ID NO: 8293 - DNA, 20 bp, Artificial Sequence
  Synthetic oligonucleotide: CBLB-2049
gacggtgctgcgggcacggg

SEQ ID NO: 8294 - DNA, 20 bp, Artificial Sequence
  Synthetic oligonucleotide: CBLB-1684
cttcctcctgcagctcagac

SEQ ID NO: 8295 - DNA, 20 bp, Artificial Sequence
  Synthetic oligonucleotide: CBLB-1685
tcctcctgcagctcagaccc

SEQ ID NO: 8296 - DNA, 20 bp, Artificial Sequence
  Synthetic oligonucleotide: CBLB-2051
cctcctgcagctcagacccg

SEQ ID NO: 8297 - DNA, 20 bp, Artificial Sequence
  Synthetic oligonucleotide: CBLB-1687
tgcagctcagacccgagggg

SEQ ID NO: 8298 - DNA, 20 bp, Artificial Sequence
  Synthetic oligonucleotide: CBLB-2054
gcagctcagacccgaggggc

SEQ ID NO: 8299 - DNA, 20 bp, Artificial Sequence
  Synthetic oligonucleotide: CBLB-2055
cagctcagacccgaggggcc

SEQ ID NO: 8300 - DNA, 20 bp, Artificial Sequence
  Synthetic oligonucleotide: CBLB-1690
ctcagacccgaggggccggg

SEQ ID NO: 8301 - DNA, 20 bp, Artificial Sequence
  Synthetic oligonucleotide: CBLB-2056
tcagacccgaggggccggga

SEQ ID NO: 8302 - RNA, 20 nt, Artificial Sequence
  Synthetic oligonucleotide: CBLB-1692
ccgaggggccgggaaggggc

SEQ ID NO: 8303 - DNA, 20 bp, Artificial Sequence
  Synthetic oligonucleotide: CBLB-1693
gggccgggaaggggcctgag

SEQ ID NO: 8304 - DNA, 20 bp, Artificial Sequence
  Synthetic oligonucleotide: CBLB-2059
ggccgggaaggggcctgagc

SEQ ID NO: 8305 - DNA, 20 bp, Artificial Sequence
  Synthetic oligonucleotide: CBLB-2060
gccgggaaggggcctgagca

SEQ ID NO: 8306 - DNA, 20 bp, Artificial Sequence
  Synthetic oligonucleotide: CBLB-1696
gggaaggggcctgagcaggg

SEQ ID NO: 8307 - DNA, 20 bp, Artificial Sequence
  Synthetic oligonucleotide: CBLB-2061
ggaaggggcctgagcaggga

SEQ ID NO: 8308 - DNA, 20 bp, Artificial Sequence
  Synthetic oligonucleotide: CBLB-1698
agggaagggacacaggcgtc

SEQ ID NO: 8309 - DNA, 20 bp, Artificial Sequence
  Synthetic oligonucleotide: CBLB-1699
aggcgtcctgaaacaaagct

SEQ ID NO: 8310 - DNA, 20 bp, Artificial Sequence
  Synthetic oligonucleotide: CBLB-1700
tcctgaaacaaagctttggg

SEQ ID NO: 8311 - DNA, 20 bp, Artificial Sequence
  Synthetic oligonucleotide: CBLB-1701
ctgaaacaaagctttgggtt

SEQ ID NO: 8312 - DNA, 20 bp, Artificial Sequence
  Synthetic oligonucleotide: CBLB-1702
acaaagctttgggttgaggg

SEQ ID NO: 8313 - DNA, 20 bp, Artificial Sequence
  Synthetic oligonucleotide: CBLB-1703
gctttgggttgagggcagag

SEQ ID NO: 8314 - DNA, 20 bp, Artificial Sequence
  Synthetic oligonucleotide: CBLB-1704
tttgggttgagggcagaggc

SEQ ID NO: 8315 - DNA, 20 bp, Artificial Sequence
  Synthetic oligonucleotide: CBLB-2069
ttgggttgagggcagaggcg

SEQ ID NO: 8316 - DNA, 20 bp, Artificial Sequence
  Synthetic oligonucleotide: CBLB-1706
tgagggcagaggcgaggagc

SEQ ID NO: 8317 - RNA, 20 nt, Artificial Sequence
  Synthetic oligonucleotide: CBLB-1707
agggcagaggcgaggagcca

SEQ ID NO: 8318 - RNA, 20 nt, Artificial Sequence
  Synthetic oligonucleotide: CBLB-1708
agaggcgaggagccagagaa

SEQ ID NO: 8319 - DNA, 20 bp, Artificial Sequence
  Synthetic oligonucleotide: CBLB-1709
tttctcttttctcttttcaa

SEQ ID NO: 8320 - DNA, 20 bp, Artificial Sequence
  Synthetic oligonucleotide: CBLB-1710
gtgttaatttcatttggttc

SEQ ID NO: 8321 - DNA, 20 bp, Artificial Sequence
  Synthetic oligonucleotide: CBLB-2074
tgttaatttcatttggttct

SEQ ID NO: 8322 - DNA, 20 bp, Artificial Sequence
  Synthetic oligonucleotide: CBLB-2075
gttaatttcatttggttctt

SEQ ID NO: 8323 - DNA, 20 bp, Artificial Sequence
  Synthetic oligonucleotide: CBLB-1713
cgactcaccgcgttgattta

SEQ ID NO: 8324 - DNA, 20 bp, Artificial Sequence
  Synthetic oligonucleotide: CBLB-1714
ccgtacttggtggttttagt

SEQ ID NO: 8325 - DNA, 20 bp, Artificial Sequence
  Synthetic oligonucleotide: CBLB-2079
cgtacttggtggttttagtg

SEQ ID NO: 8326 - DNA, 20 bp, Artificial Sequence
  Synthetic oligonucleotide: CBLB-1716
ccctgcgcttttgttgacaa

SEQ ID NO: 8327 - DNA, 20 bp, Artificial Sequence
  Synthetic oligonucleotide: CBLB-1717
agctgtcccttacgtttgtg

SEQ ID NO: 8328 - DNA, 20 bp, Artificial Sequence
  Synthetic oligonucleotide: CBLB-1433
aatctttatgtttatgtaac

SEQ ID NO: 8329 - DNA, 20 bp, Artificial Sequence
  Synthetic oligonucleotide: CBLB-2366
atctttatgtttatgtaact

SEQ ID NO: 8330 - DNA, 20 bp, Artificial Sequence
  Synthetic oligonucleotide: CBLB-1435
ctttatgtttatgtaacttg

SEQ ID NO: 8331 - DNA, 20 bp, Artificial Sequence
  Synthetic oligonucleotide: CBLB-1721
gtgttgctcttagataacaa

SEQ ID NO: 8332 - DNA, 20 bp, Artificial Sequence
  Synthetic oligonucleotide: CBLB-1722
gacaatcatctggtatgata

SEQ ID NO: 8333 - DNA, 20 bp, Artificial Sequence
  Synthetic oligonucleotide: CBLB-1723
tatgatactgaaaatattta

SEQ ID NO: 8334 - DNA, 20 bp, Artificial Sequence
  Synthetic oligonucleotide: CBLB-2085
atgatactgaaaatatttac

SEQ ID NO: 8335 - DNA, 20 bp, Artificial Sequence
  Synthetic oligonucleotide: CBLB-2086
tgatactgaaaatatttact

SEQ ID NO: 8336 - DNA, 20 bp, Artificial Sequence
  Synthetic oligonucleotide: CBLB-2087
gatactgaaaatatttactg

SEQ ID NO: 8337 - DNA, 20 bp, Artificial Sequence
  Synthetic oligonucleotide: CBLB-1727
ctgaaaatatttactgggga

SEQ ID NO: 8338 - DNA, 20 bp, Artificial Sequence
  Synthetic oligonucleotide: CBLB-1728
agaaacagattagttcttaa

SEQ ID NO: 8339 - DNA, 20 bp, Artificial Sequence
  Synthetic oligonucleotide: CBLB-1729
aacagattagttcttaagtg

SEQ ID NO: 8340 - DNA, 20 bp, Artificial Sequence
  Synthetic oligonucleotide: CBLB-1730
cttaagtgaagaagcagtag

SEQ ID NO: 8341 - DNA, 20 bp, Artificial Sequence
  Synthetic oligonucleotide: CBLB-1731
taagtgaagaagcagtagtt

SEQ ID NO: 8342 - DNA, 20 bp, Artificial Sequence
  Synthetic oligonucleotide: CBLB-2088
aagtgaagaagcagtagttg

SEQ ID NO: 8343 - DNA, 20 bp, Artificial Sequence
  Synthetic oligonucleotide: CBLB-2089
agtgaagaagcagtagttga

SEQ ID NO: 8344 - DNA, 20 bp, Artificial Sequence
  Synthetic oligonucleotide: CBLB-1734
gggagtttccattttcatct

SEQ ID NO: 8345 - DNA, 20 bp, Artificial Sequence
  Synthetic oligonucleotide: CBLB-1735
gagtttccattttcatcttt

SEQ ID NO: 8346 - DNA, 20 bp, Artificial Sequence
  Synthetic oligonucleotide: CBLB-1736
tttgagaattcatcttcatt

SEQ ID NO: 8347 - DNA, 20 bp, Artificial Sequence
  Synthetic oligonucleotide: CBLB-1737
agaaactttttttgttgtta

SEQ ID NO: 8348 - DNA, 20 bp, Artificial Sequence
  Synthetic oligonucleotide: CBLB-2090
gaaactttttttgttgttaa

SEQ ID NO: 8349 - DNA, 20 bp, Artificial Sequence
  Synthetic oligonucleotide: CBLB-2091
aaactttttttgttgttaat

SEQ ID NO: 8350 - DNA, 20 bp, Artificial Sequence
  Synthetic oligonucleotide: CBLB-1740
actttttttgttgttaatgg

SEQ ID NO: 8351 - DNA, 20 bp, Artificial Sequence
  Synthetic oligonucleotide: CBLB-1741
ctttcatctactattccatt

SEQ ID NO: 8352 - DNA, 20 bp, Artificial Sequence
  Synthetic oligonucleotide: CBLB-1742
tctactattccattttgaaa

SEQ ID NO: 8353 - DNA, 20 bp, Artificial Sequence
  Synthetic oligonucleotide: CBLB-2092
ctactattccattttgaaac

SEQ ID NO: 8354 - DNA, 20 bp, Artificial Sequence
  Synthetic oligonucleotide: CBLB-1744
tcgatggcacattgtttatt

SEQ ID NO: 8355 - DNA, 20 bp, Artificial Sequence
  Synthetic oligonucleotide: CBLB-1745
tggcacattgtttattgtga

SEQ ID NO: 8356 - DNA, 20 bp, Artificial Sequence
  Synthetic oligonucleotide: CBLB-2094
ggcacattgtttattgtgaa

SEQ ID NO: 8357 - DNA, 20 bp, Artificial Sequence
  Synthetic oligonucleotide: CBLB-1747
ttgtgaaaggaaaatttatg

SEQ ID NO: 8358 - DNA, 20 bp, Artificial Sequence
  Synthetic oligonucleotide: CBLB-2095
tgtgaaaggaaaatttatgt

SEQ ID NO: 8359 - DNA, 20 bp, Artificial Sequence
  Synthetic oligonucleotide: CBLB-2096
gtgaaaggaaaatttatgtt

SEQ ID NO: 8360 - DNA, 20 bp, Artificial Sequence
  Synthetic oligonucleotide: CBLB-1750
gaaaatttatgttgggggtg

SEQ ID NO: 8361 - DNA, 20 bp, Artificial Sequence
  Synthetic oligonucleotide: CBLB-1751
ttatgttgggggtggtgagg

SEQ ID NO: 8362 - DNA, 20 bp, Artificial Sequence
  Synthetic oligonucleotide: CBLB-1752
atgttgggggtggtgaggct

SEQ ID NO: 8363 - DNA, 20 bp, Artificial Sequence
  Synthetic oligonucleotide: CBLB-1753
ggtggtgaggctgagagtat

SEQ ID NO: 8364 - DNA, 20 bp, Artificial Sequence
  Synthetic oligonucleotide: CBLB-1754
cagacaaactataatttcac

SEQ ID NO: 8365 - DNA, 20 bp, Artificial Sequence
  Synthetic oligonucleotide: CBLB-1755
acaaactataatttcacaag

SEQ ID NO: 8366 - DNA, 20 bp, Artificial Sequence
  Synthetic oligonucleotide: CBLB-1756
tttcacaagaagaaatcatg

SEQ ID NO: 8367 - DNA, 20 bp, Artificial Sequence
  Synthetic oligonucleotide: CBLB-1757
tcatgatgggtgtcagtatc

SEQ ID NO: 8368 - DNA, 20 bp, Artificial Sequence
  Synthetic oligonucleotide: CBLB-1758
atgatgggtgtcagtatcca

SEQ ID NO: 8369 - DNA, 20 bp, Artificial Sequence
  Synthetic oligonucleotide: CBLB-1759
cagtatccagagaagtcaat

SEQ ID NO: 8370 - DNA, 20 bp, Artificial Sequence
  Synthetic oligonucleotide: CBLB-1760
aagtcaatctgaatacctta

SEQ ID NO: 8371 - DNA, 20 bp, Artificial Sequence
  Synthetic oligonucleotide: CBLB-1761
ataccttacagagatttact

SEQ ID NO: 8372 - RNA, 17 nt, Artificial Sequence
  Synthetic oligonucleotide: CBLB-2104
ccgcaggccggggagga

SEQ ID NO: 8373 - RNA, 17 nt, Artificial Sequence
  Synthetic oligonucleotide: CBLB-1763
gcaggccggggaggagg

SEQ ID NO: 8374 - RNA, 17 nt, Artificial Sequence
  Synthetic oligonucleotide: CBLB-1764
aggccggggaggaggga

SEQ ID NO: 8375 - DNA, 17 bp, Artificial Sequence
  Synthetic oligonucleotide: CBLB-1765
cgtccaggcagacggcg

SEQ ID NO: 8376 - DNA, 17 bp, Artificial Sequence
  Synthetic oligonucleotide: CBLB-1766
tccaggcagacggcggt

SEQ ID NO: 8377 - DNA, 17 bp, Artificial Sequence
  Synthetic oligonucleotide: CBLB-1767
aggactgcagcaggcgg

SEQ ID NO: 8378 - DNA, 17 bp, Artificial Sequence
  Synthetic oligonucleotide: CBLB-2113
ggactgcagcaggcggc

SEQ ID NO: 8379 - DNA, 17 bp, Artificial Sequence
  Synthetic oligonucleotide: CBLB-2114
gactgcagcaggcggcc

SEQ ID NO: 8380 - DNA, 17 bp, Artificial Sequence
  Synthetic oligonucleotide: CBLB-1770
gcgcgtccacccaggcg

SEQ ID NO: 8381 - DNA, 17 bp, Artificial Sequence
  Synthetic oligonucleotide: CBLB-1771
tccctcccgcgccctag

SEQ ID NO: 8382 - DNA, 17 bp, Artificial Sequence
  Synthetic oligonucleotide: CBLB-1772
cctagacggacggtgct

SEQ ID NO: 8383 - DNA, 17 bp, Artificial Sequence
  Synthetic oligonucleotide: CBLB-1773
cggacggtgctgcgggc

SEQ ID NO: 8384 - DNA, 17 bp, Artificial Sequence
  Synthetic oligonucleotide: CBLB-2121
ggacggtgctgcgggca

SEQ ID NO: 8385 - DNA, 17 bp, Artificial Sequence
  Synthetic oligonucleotide: CBLB-2122
gacggtgctgcgggcac

SEQ ID NO: 8386 - DNA, 17 bp, Artificial Sequence
  Synthetic oligonucleotide: CBLB-1776
cggtgctgcgggcacgg

SEQ ID NO: 8387 - DNA, 17 bp, Artificial Sequence
  Synthetic oligonucleotide: CBLB-2123
ggtgctgcgggcacggg

SEQ ID NO: 8388 - DNA, 17 bp, Artificial Sequence
  Synthetic oligonucleotide: CBLB-1778
cctcctgcagctcagac

SEQ ID NO: 8389 - DNA, 17 bp, Artificial Sequence
  Synthetic oligonucleotide: CBLB-1779
tcctgcagctcagaccc

SEQ ID NO: 8390 - DNA, 17 bp, Artificial Sequence
  Synthetic oligonucleotide: CBLB-2125
cctgcagctcagacccg

SEQ ID NO: 8391 - DNA, 17 bp, Artificial Sequence
  Synthetic oligonucleotide: CBLB-1781
agctcagacccgagggg

SEQ ID NO: 8392 - DNA, 17 bp, Artificial Sequence
  Synthetic oligonucleotide: CBLB-2128
gctcagacccgaggggc

SEQ ID NO: 8393 - DNA, 17 bp, Artificial Sequence
  Synthetic oligonucleotide: CBLB-2129
ctcagacccgaggggcc

SEQ ID NO: 8394 - RNA, 17 nt, Artificial Sequence
  Synthetic oligonucleotide: CBLB-1784
agacccgaggggccggg

SEQ ID NO: 8395 - RNA, 17 nt, Artificial Sequence
  Synthetic oligonucleotide: CBLB-2130
gacccgaggggccggga

SEQ ID NO: 8396 - RNA, 17 nt, Artificial Sequence
  Synthetic oligonucleotide: CBLB-1786
aggggccgggaaggggc

SEQ ID NO: 8397 - DNA, 17 bp, Artificial Sequence
  Synthetic oligonucleotide: CBLB-1787
ccgggaaggggcctgag

SEQ ID NO: 8398 - DNA, 17 bp, Artificial Sequence
  Synthetic oligonucleotide: CBLB-2133
cgggaaggggcctgagc

SEQ ID NO: 8399 - DNA, 17 bp, Artificial Sequence
  Synthetic oligonucleotide: CBLB-2134
gggaaggggcctgagca

SEQ ID NO: 8400 - DNA, 17 bp, Artificial Sequence
  Synthetic oligonucleotide: CBLB-1790
aaggggcctgagcaggg

SEQ ID NO: 8401 - DNA, 17 bp, Artificial Sequence
  Synthetic oligonucleotide: CBLB-2135
aggggcctgagcaggga

SEQ ID NO: 8402 - DNA, 17 bp, Artificial Sequence
  Synthetic oligonucleotide: CBLB-1792
gaagggacacaggcgtc

SEQ ID NO: 8403 - DNA, 17 bp, Artificial Sequence
  Synthetic oligonucleotide: CBLB-1793
cgtcctgaaacaaagct

SEQ ID NO: 8404 - DNA, 17 bp, Artificial Sequence
  Synthetic oligonucleotide: CBLB-1794
tgaaacaaagctttggg

SEQ ID NO: 8405 - DNA, 17 bp, Artificial Sequence
  Synthetic oligonucleotide: CBLB-1795
aaacaaagctttgggtt

SEQ ID NO: 8406 - DNA, 17 bp, Artificial Sequence
  Synthetic oligonucleotide: CBLB-1796
aagctttgggttgaggg

SEQ ID NO: 8407 - DNA, 17 bp, Artificial Sequence
  Synthetic oligonucleotide: CBLB-1797
ttgggttgagggcagag

SEQ ID NO: 8408 - DNA, 17 bp, Artificial Sequence
  Synthetic oligonucleotide: CBLB-1798
gggttgagggcagaggc

SEQ ID NO: 8409 - DNA, 17 bp, Artificial Sequence
  Synthetic oligonucleotide: CBLB-2143
ggttgagggcagaggcg

SEQ ID NO: 8410 - RNA, 17 nt, Artificial Sequence
  Synthetic oligonucleotide: CBLB-1800
gggcagaggcgaggagc

SEQ ID NO: 8411 - RNA, 17 nt, Artificial Sequence
  Synthetic oligonucleotide: CBLB-1801
gcagaggcgaggagcca

SEQ ID NO: 8412 - RNA, 17 nt, Artificial Sequence
  Synthetic oligonucleotide: CBLB-1802
ggcgaggagccagagaa

SEQ ID NO: 8413 - DNA, 17 bp, Artificial Sequence
  Synthetic oligonucleotide: CBLB-1803
ctcttttctcttttcaa

SEQ ID NO: 8414 - DNA, 17 bp, Artificial Sequence
  Synthetic oligonucleotide: CBLB-1804
ttaatttcatttggttc

SEQ ID NO: 8415 - DNA, 17 bp, Artificial Sequence
  Synthetic oligonucleotide: CBLB-2148
taatttcatttggttct

SEQ ID NO: 8416 - DNA, 17 bp, Artificial Sequence
  Synthetic oligonucleotide: CBLB-2149
aatttcatttggttctt

SEQ ID NO: 8417 - DNA, 17 bp, Artificial Sequence
  Synthetic oligonucleotide: CBLB-1807
ctcaccgcgttgattta

SEQ ID NO: 8418 - DNA, 17 bp, Artificial Sequence
  Synthetic oligonucleotide: CBLB-1808
tacttggtggttttagt

SEQ ID NO: 8419 - DNA, 17 bp, Artificial Sequence
  Synthetic oligonucleotide: CBLB-2153
acttggtggttttagtg

SEQ ID NO: 8420 - DNA, 17 bp, Artificial Sequence
  Synthetic oligonucleotide: CBLB-1810
tgcgcttttgttgacaa

SEQ ID NO: 8421 - DNA, 17 bp, Artificial Sequence
  Synthetic oligonucleotide: CBLB-1811
tgtcccttacgtttgtg

SEQ ID NO: 8422 - DNA, 17 bp, Artificial Sequence
  Synthetic oligonucleotide: CBLB-1499
ctttatgtttatgtaac

SEQ ID NO: 8423 - DNA, 17 bp, Artificial Sequence
  Synthetic oligonucleotide: CBLB-2444
tttatgtttatgtaact

SEQ ID NO: 8424 - DNA, 17 bp, Artificial Sequence
  Synthetic oligonucleotide: CBLB-1501
tatgtttatgtaacttg

SEQ ID NO: 8425 - DNA, 17 bp, Artificial Sequence
  Synthetic oligonucleotide: CBLB-1815
ttgctcttagataacaa

SEQ ID NO: 8426 - DNA, 17 bp, Artificial Sequence
  Synthetic oligonucleotide: CBLB-1816
aatcatctggtatgata

SEQ ID NO: 8427 - DNA, 17 bp, Artificial Sequence
  Synthetic oligonucleotide: CBLB-1817
gatactgaaaatattta

SEQ ID NO: 8428 - DNA, 17 bp, Artificial Sequence
  Synthetic oligonucleotide: CBLB-2159
atactgaaaatatttac

SEQ ID NO: 8429 - DNA, 17 bp, Artificial Sequence
  Synthetic oligonucleotide: CBLB-2160
tactgaaaatatttact

SEQ ID NO: 8430 - DNA, 17 bp, Artificial Sequence
  Synthetic oligonucleotide: CBLB-2161
actgaaaatatttactg

SEQ ID NO: 8431 - DNA, 17 bp, Artificial Sequence
  Synthetic oligonucleotide: CBLB-1821
aaaatatttactgggga

SEQ ID NO: 8432 - DNA, 17 bp, Artificial Sequence
  Synthetic oligonucleotide: CBLB-1822
aacagattagttcttaa

SEQ ID NO: 8433 - DNA, 17 bp, Artificial Sequence
  Synthetic oligonucleotide: CBLB-1823
agattagttcttaagtg

SEQ ID NO: 8434 - DNA, 17 bp, Artificial Sequence
  Synthetic oligonucleotide: CBLB-1824
aagtgaagaagcagtag

SEQ ID NO: 8435 - DNA, 17 bp, Artificial Sequence
  Synthetic oligonucleotide: CBLB-1825
gtgaagaagcagtagtt

SEQ ID NO: 8436 - DNA, 17 bp, Artificial Sequence
  Synthetic oligonucleotide: CBLB-2162
tgaagaagcagtagttg

SEQ ID NO: 8437 - DNA, 17 bp, Artificial Sequence
  Synthetic oligonucleotide: CBLB-2163
gaagaagcagtagttga

SEQ ID NO: 8438 - DNA, 17 bp, Artificial Sequence
  Synthetic oligonucleotide: CBLB-1828
agtttccattttcatct

SEQ ID NO: 8439 - DNA, 17 bp, Artificial Sequence
  Synthetic oligonucleotide: CBLB-1829
tttccattttcatcttt

SEQ ID NO: 8440 - DNA, 17 bp, Artificial Sequence
  Synthetic oligonucleotide: CBLB-1830
gagaattcatcttcatt

SEQ ID NO: 8441 - DNA, 17 bp, Artificial Sequence
  Synthetic oligonucleotide: CBLB-1831
aactttttttgttgtta

SEQ ID NO: 8442 - DNA, 17 bp, Artificial Sequence
  Synthetic oligonucleotide: CBLB-2164
actttttttgttgttaa

SEQ ID NO: 8443 - DNA, 17 bp, Artificial Sequence
  Synthetic oligonucleotide: CBLB-2165
ctttttttgttgttaat

SEQ ID NO: 8444 - DNA, 17 bp, Artificial Sequence
  Synthetic oligonucleotide: CBLB-1834
ttttttgttgttaatgg

SEQ ID NO: 8445 - DNA, 17 bp, Artificial Sequence
  Synthetic oligonucleotide: CBLB-1835
tcatctactattccatt

SEQ ID NO: 8446 - DNA, 17 bp, Artificial Sequence
  Synthetic oligonucleotide: CBLB-1836
actattccattttgaaa

SEQ ID NO: 8447 - DNA, 17 bp, Artificial Sequence
  Synthetic oligonucleotide: CBLB-2166
ctattccattttgaaac

SEQ ID NO: 8448 - DNA, 17 bp, Artificial Sequence
  Synthetic oligonucleotide: CBLB-1838
atggcacattgtttatt

SEQ ID NO: 8449 - DNA, 17 bp, Artificial Sequence
  Synthetic oligonucleotide: CBLB-1839
cacattgtttattgtga

SEQ ID NO: 8450 - DNA, 17 bp, Artificial Sequence
  Synthetic oligonucleotide: CBLB-2168
acattgtttattgtgaa

SEQ ID NO: 8451 - DNA, 17 bp, Artificial Sequence
  Synthetic oligonucleotide: CBLB-1841
tgaaaggaaaatttatg

SEQ ID NO: 8452 - DNA, 17 bp, Artificial Sequence
  Synthetic oligonucleotide: CBLB-2169
gaaaggaaaatttatgt

SEQ ID NO: 8453 - DNA, 17 bp, Artificial Sequence
  Synthetic oligonucleotide: CBLB-2170
aaaggaaaatttatgtt

SEQ ID NO: 8454 - DNA, 17 bp, Artificial Sequence
  Synthetic oligonucleotide: CBLB-1844
aatttatgttgggggtg

SEQ ID NO: 8455 - DNA, 17 bp, Artificial Sequence
  Synthetic oligonucleotide: CBLB-1845
tgttgggggtggtgagg

SEQ ID NO: 8456 - DNA, 17 bp, Artificial Sequence
  Synthetic oligonucleotide: CBLB-1846
ttgggggtggtgaggct

SEQ ID NO: 8457 - DNA, 17 bp, Artificial Sequence
  Synthetic oligonucleotide: CBLB-1847
ggtgaggctgagagtat

SEQ ID NO: 8458 - DNA, 17 bp, Artificial Sequence
  Synthetic oligonucleotide: CBLB-1848
acaaactataatttcac

SEQ ID NO: 8459 - DNA, 17 bp, Artificial Sequence
  Synthetic oligonucleotide: CBLB-1849
aactataatttcacaag

SEQ ID NO: 8460 - DNA, 17 bp, Artificial Sequence
  Synthetic oligonucleotide: CBLB-1850
cacaagaagaaatcatg

SEQ ID NO: 8461 - DNA, 17 bp, Artificial Sequence
  Synthetic oligonucleotide: CBLB-1851
tgatgggtgtcagtatc

SEQ ID NO: 8462 - DNA, 17 bp, Artificial Sequence
  Synthetic oligonucleotide: CBLB-1852
atgggtgtcagtatcca

SEQ ID NO: 8463 - DNA, 17 bp, Artificial Sequence
  Synthetic oligonucleotide: CBLB-1853
tatccagagaagtcaat

SEQ ID NO: 8464 - DNA, 17 bp, Artificial Sequence
  Synthetic oligonucleotide: CBLB-1854
tcaatctgaatacctta

SEQ ID NO: 8465 - DNA, 17 bp, Artificial Sequence
  Synthetic oligonucleotide: CBLB-1855
ccttacagagatttact

SEQ ID NO: 8466 - DNA, 20 bp, Artificial Sequence
  Synthetic oligonucleotide: CBLB-1856
ctctccctcctccccggcct

SEQ ID NO: 8467 - DNA, 20 bp, Artificial Sequence
  Synthetic oligonucleotide: CBLB-1857
cagtcctcaccgccgtctgc

SEQ ID NO: 8468 - DNA, 20 bp, Artificial Sequence
  Synthetic oligonucleotide: CBLB-1858
actgtgggctcggcgcctgg

SEQ ID NO: 8469 - DNA, 20 bp, Artificial Sequence
  Synthetic oligonucleotide: CBLB-1859
ggacactgtgggctcggcgc

SEQ ID NO: 8470 - DNA, 20 bp, Artificial Sequence
  Synthetic oligonucleotide: CBLB-1860
tagggcgcgggagggacact

SEQ ID NO: 8471 - DNA, 20 bp, Artificial Sequence
  Synthetic oligonucleotide: CBLB-2190
ccgtccgtctagggcgcggg

SEQ ID NO: 8472 - DNA, 20 bp, Artificial Sequence
  Synthetic oligonucleotide: CBLB-1862
accgtccgtctagggcgcgg

SEQ ID NO: 8473 - DNA, 20 bp, Artificial Sequence
  Synthetic oligonucleotide: CBLB-2191
gcaccgtccgtctagggcgc

SEQ ID NO: 8474 - DNA, 20 bp, Artificial Sequence
  Synthetic oligonucleotide: CBLB-2192
agcaccgtccgtctagggcg

SEQ ID NO: 8475 - DNA, 20 bp, Artificial Sequence
  Synthetic oligonucleotide: CBLB-1865
cagcaccgtccgtctagggc

SEQ ID NO: 8476 - DNA, 20 bp, Artificial Sequence
  Synthetic oligonucleotide: CBLB-1866
tgcccgcagcaccgtccgtc

SEQ ID NO: 8477 - DNA, 20 bp, Artificial Sequence
  Synthetic oligonucleotide: CBLB-2196
aggaggaaggtggactggga

SEQ ID NO: 8478 - DNA, 20 bp, Artificial Sequence
  Synthetic oligonucleotide: CBLB-2197
caggaggaaggtggactggg

SEQ ID NO: 8479 - DNA, 20 bp, Artificial Sequence
  Synthetic oligonucleotide: CBLB-1869
gcaggaggaaggtggactgg

SEQ ID NO: 8480 - DNA, 20 bp, Artificial Sequence
  Synthetic oligonucleotide: CBLB-2198
ctgcaggaggaaggtggact

SEQ ID NO: 8481 - DNA, 20 bp, Artificial Sequence
  Synthetic oligonucleotide: CBLB-2199
gctgcaggaggaaggtggac

SEQ ID NO: 8482 - DNA, 20 bp, Artificial Sequence
  Synthetic oligonucleotide: CBLB-1872
agctgcaggaggaaggtgga

SEQ ID NO: 8483 - DNA, 20 bp, Artificial Sequence
  Synthetic oligonucleotide: CBLB-1873
gtctgagctgcaggaggaag

SEQ ID NO: 8484 - DNA, 20 bp, Artificial Sequence
  Synthetic oligonucleotide: CBLB-2202
cctcgggtctgagctgcagg

SEQ ID NO: 8485 - DNA, 20 bp, Artificial Sequence
  Synthetic oligonucleotide: CBLB-1875
ccctcgggtctgagctgcag

SEQ ID NO: 8486 - DNA, 20 bp, Artificial Sequence
  Synthetic oligonucleotide: CBLB-2203
gcccctcgggtctgagctgc

SEQ ID NO: 8487 - DNA, 20 bp, Artificial Sequence
  Synthetic oligonucleotide: CBLB-1877
ggcccctcgggtctgagctg

SEQ ID NO: 8488 - DNA, 20 bp, Artificial Sequence
  Synthetic oligonucleotide: CBLB-1878
cccttcccggcccctcgggt

SEQ ID NO: 8489 - DNA, 20 bp, Artificial Sequence
  Synthetic oligonucleotide: CBLB-1879
tcaggccccttcccggcccc

SEQ ID NO: 8490 - DNA, 20 bp, Artificial Sequence
  Synthetic oligonucleotide: CBLB-1880
ctcaacccaaagctttgttt

SEQ ID NO: 8491 - RNA, 20 nt, Artificial Sequence
  Synthetic oligonucleotide: CBLB-2210
caagagcggccacggaaagg

SEQ ID NO: 8492 - RNA, 20 nt, Artificial Sequence
  Synthetic oligonucleotide: CBLB-1882
acaagagcggccacggaaag

SEQ ID NO: 8493 - DNA, 20 bp, Artificial Sequence
  Synthetic oligonucleotide: CBLB-2211
tgacaagagcggccacggaa

SEQ ID NO: 8494 - DNA, 20 bp, Artificial Sequence
  Synthetic oligonucleotide: CBLB-1884
atgacaagagcggccacgga

SEQ ID NO: 8495 - DNA, 20 bp, Artificial Sequence
  Synthetic oligonucleotide: CBLB-2212
aaaaatgacaagagcggcca

SEQ ID NO: 8496 - DNA, 20 bp, Artificial Sequence
  Synthetic oligonucleotide: CBLB-1886
gaaaaatgacaagagcggcc

SEQ ID NO: 8497 - DNA, 20 bp, Artificial Sequence
  Synthetic oligonucleotide: CBLB-1887
agagaaaagagaaaaatgac

SEQ ID NO: 8498 - DNA, 20 bp, Artificial Sequence
  Synthetic oligonucleotide: CBLB-1888
gcccatttgaaaagagaaaa

SEQ ID NO: 8499 - DNA, 20 bp, Artificial Sequence
  Synthetic oligonucleotide: CBLB-1889
tagcccatttgaaaagagaa

SEQ ID NO: 8500 - DNA, 20 bp, Artificial Sequence
  Synthetic oligonucleotide: CBLB-1890
acaaatagcccatttgaaaa

SEQ ID NO: 8501 - DNA, 20 bp, Artificial Sequence
  Synthetic oligonucleotide: CBLB-1891
acacaaatagcccatttgaa

SEQ ID NO: 8502 - DNA, 20 bp, Artificial Sequence
  Synthetic oligonucleotide: CBLB-1892
ttaacacacaaatagcccat

SEQ ID NO: 8503 - DNA, 20 bp, Artificial Sequence
  Synthetic oligonucleotide: CBLB-1893
tcgttattcccaagaaccaa

SEQ ID NO: 8504 - DNA, 20 bp, Artificial Sequence
  Synthetic oligonucleotide: CBLB-1894
cgcggtgagtcgttattccc

SEQ ID NO: 8505 - DNA, 20 bp, Artificial Sequence
  Synthetic oligonucleotide: CBLB-1895
cctttctttaaatcaacgcg

SEQ ID NO: 8506 - DNA, 20 bp, Artificial Sequence
  Synthetic oligonucleotide: CBLB-1896
aaaccaccaagtacggacac

SEQ ID NO: 8507 - DNA, 20 bp, Artificial Sequence
  Synthetic oligonucleotide: CBLB-1897
ccacactaaaaccaccaagt

SEQ ID NO: 8508 - DNA, 20 bp, Artificial Sequence
  Synthetic oligonucleotide: CBLB-1898
ctctgttgtcaacaaaagcg

SEQ ID NO: 8509 - DNA, 20 bp, Artificial Sequence
  Synthetic oligonucleotide: CBLB-2219
gattatcctacacaaacgta

SEQ ID NO: 8510 - DNA, 20 bp, Artificial Sequence
  Synthetic oligonucleotide: CBLB-1900
agattatcctacacaaacgt

SEQ ID NO: 8511 - DNA, 20 bp, Artificial Sequence
  Synthetic oligonucleotide: CBLB-1615
caacacaacctcacagaaga

SEQ ID NO: 8512 - DNA, 20 bp, Artificial Sequence
  Synthetic oligonucleotide: CBLB-1902
ctaagagcaacacaacctca

SEQ ID NO: 8513 - DNA, 20 bp, Artificial Sequence
  Synthetic oligonucleotide: CBLB-1903
ctggtactcttttgttatct

SEQ ID NO: 8514 - DNA, 20 bp, Artificial Sequence
  Synthetic oligonucleotide: CBLB-1904
tatcataccagatgattgtc

SEQ ID NO: 8515 - DNA, 20 bp, Artificial Sequence
  Synthetic oligonucleotide: CBLB-1905
caactactgcttcttcactt

SEQ ID NO: 8516 - DNA, 20 bp, Artificial Sequence
  Synthetic oligonucleotide: CBLB-2222
tgaattctcaaagatgaaaa

SEQ ID NO: 8517 - DNA, 20 bp, Artificial Sequence
  Synthetic oligonucleotide: CBLB-1907
atgaattctcaaagatgaaa

SEQ ID NO: 8518 - DNA, 20 bp, Artificial Sequence
  Synthetic oligonucleotide: CBLB-1908
atgaagatgaattctcaaag

SEQ ID NO: 8519 - DNA, 20 bp, Artificial Sequence
  Synthetic oligonucleotide: CBLB-1909
aaaaaagtttcttaatgaag

SEQ ID NO: 8520 - DNA, 20 bp, Artificial Sequence
  Synthetic oligonucleotide: CBLB-1910
acaacaaaaaaagtttctta

SEQ ID NO: 8521 - DNA, 20 bp, Artificial Sequence
  Synthetic oligonucleotide: CBLB-1911
caaaatggaatagtagatga

SEQ ID NO: 8522 - DNA, 20 bp, Artificial Sequence
  Synthetic oligonucleotide: CBLB-1912
gtttcaaaatggaatagtag

SEQ ID NO: 8523 - DNA, 20 bp, Artificial Sequence
  Synthetic oligonucleotide: CBLB-2223
aaaggtttcctgtttcaaaa

SEQ ID NO: 8524 - DNA, 20 bp, Artificial Sequence
  Synthetic oligonucleotide: CBLB-1914
gaaaggtttcctgtttcaaa

SEQ ID NO: 8525 - DNA, 20 bp, Artificial Sequence
  Synthetic oligonucleotide: CBLB-1915
tcacaataaacaatgtgcca

SEQ ID NO: 8526 - DNA, 20 bp, Artificial Sequence
  Synthetic oligonucleotide: CBLB-1916
aaagcaacatgcagaaacca

SEQ ID NO: 8527 - DNA, 20 bp, Artificial Sequence
  Synthetic oligonucleotide: CBLB-1917
gtttgtctgaaagcaacatg

SEQ ID NO: 8528 - DNA, 20 bp, Artificial Sequence
  Synthetic oligonucleotide: CBLB-1918
cttgtgaaattatagtttgt

SEQ ID NO: 8529 - DNA, 20 bp, Artificial Sequence
  Synthetic oligonucleotide: CBLB-1919
acccatcatgatttcttctt

SEQ ID NO: 8530 - DNA, 20 bp, Artificial Sequence
  Synthetic oligonucleotide: CBLB-1920
aggtattcagattgacttct

SEQ ID NO: 8531 - DNA, 20 bp, Artificial Sequence
  Synthetic oligonucleotide: CBLB-1921
gatactgacagctacagttt

SEQ ID NO: 8532 - DNA, 20 bp, Artificial Sequence
  Synthetic oligonucleotide: CBLB-1922
tataatcatacttagtaagg

SEQ ID NO: 8533 - DNA, 17 bp, Artificial Sequence
  Synthetic oligonucleotide: CBLB-1923
tccctcctccccggcct

SEQ ID NO: 8534 - DNA, 17 bp, Artificial Sequence
  Synthetic oligonucleotide: CBLB-1924
tcctcaccgccgtctgc

SEQ ID NO: 8535 - DNA, 17 bp, Artificial Sequence
  Synthetic oligonucleotide: CBLB-1925
gtgggctcggcgcctgg

SEQ ID NO: 8536 - DNA, 17 bp, Artificial Sequence
  Synthetic oligonucleotide: CBLB-1926
cactgtgggctcggcgc

SEQ ID NO: 8537 - DNA, 17 bp, Artificial Sequence
  Synthetic oligonucleotide: CBLB-1927
ggcgcgggagggacact

SEQ ID NO: 8538 - DNA, 17 bp, Artificial Sequence
  Synthetic oligonucleotide: CBLB-2242
tccgtctagggcgcggg

SEQ ID NO: 8539 - DNA, 17 bp, Artificial Sequence
  Synthetic oligonucleotide: CBLB-1929
gtccgtctagggcgcgg

SEQ ID NO: 8540 - DNA, 17 bp, Artificial Sequence
  Synthetic oligonucleotide: CBLB-2243
ccgtccgtctagggcgc

SEQ ID NO: 8541 - DNA, 17 bp, Artificial Sequence
  Synthetic oligonucleotide: CBLB-2244
accgtccgtctagggcg

SEQ ID NO: 8542 - DNA, 17 bp, Artificial Sequence
  Synthetic oligonucleotide: CBLB-1932
caccgtccgtctagggc

SEQ ID NO: 8543 - DNA, 17 bp, Artificial Sequence
  Synthetic oligonucleotide: CBLB-1933
ccgcagcaccgtccgtc

SEQ ID NO: 8544 - DNA, 17 bp, Artificial Sequence
  Synthetic oligonucleotide: CBLB-2248
aggaaggtggactggga

SEQ ID NO: 8545 - DNA, 17 bp, Artificial Sequence
  Synthetic oligonucleotide: CBLB-2249
gaggaaggtggactggg

SEQ ID NO: 8546 - DNA, 17 bp, Artificial Sequence
  Synthetic oligonucleotide: CBLB-1936
ggaggaaggtggactgg

SEQ ID NO: 8547 - DNA, 17 bp, Artificial Sequence
  Synthetic oligonucleotide: CBLB-2250
caggaggaaggtggact

SEQ ID NO: 8548 - DNA, 17 bp, Artificial Sequence
  Synthetic oligonucleotide: CBLB-2251
gcaggaggaaggtggac

SEQ ID NO: 8549 - DNA, 17 bp, Artificial Sequence
  Synthetic oligonucleotide: CBLB-1939
tgcaggaggaaggtgga

SEQ ID NO: 8550 - DNA, 17 bp, Artificial Sequence
  Synthetic oligonucleotide: CBLB-1940
tgagctgcaggaggaag

SEQ ID NO: 8551 - DNA, 17 bp, Artificial Sequence
  Synthetic oligonucleotide: CBLB-2254
cgggtctgagctgcagg

SEQ ID NO: 8552 - DNA, 17 bp, Artificial Sequence
  Synthetic oligonucleotide: CBLB-1942
tcgggtctgagctgcag

SEQ ID NO: 8553 - DNA, 17 bp, Artificial Sequence
  Synthetic oligonucleotide: CBLB-2255
cctcgggtctgagctgc

SEQ ID NO: 8554 - DNA, 17 bp, Artificial Sequence
  Synthetic oligonucleotide: CBLB-1944
ccctcgggtctgagctg

SEQ ID NO: 8555 - DNA, 17 bp, Artificial Sequence
  Synthetic oligonucleotide: CBLB-1945
ttcccggcccctcgggt

SEQ ID NO: 8556 - DNA, 17 bp, Artificial Sequence
  Synthetic oligonucleotide: CBLB-1946
ggccccttcccggcccc

SEQ ID NO: 8557 - DNA, 17 bp, Artificial Sequence
  Synthetic oligonucleotide: CBLB-1947
aacccaaagctttgttt

SEQ ID NO: 8558 - RNA, 17 nt, Artificial Sequence
  Synthetic oligonucleotide: CBLB-2262
gagcggccacggaaagg

SEQ ID NO: 8559 - RNA, 17 nt, Artificial Sequence
  Synthetic oligonucleotide: CBLB-1949
agagcggccacggaaag

SEQ ID NO: 8560 - RNA, 17 nt, Artificial Sequence
  Synthetic oligonucleotide: CBLB-2263
caagagcggccacggaa

SEQ ID NO: 8561 - RNA, 17 nt, Artificial Sequence
  Synthetic oligonucleotide: CBLB-1951
acaagagcggccacgga

SEQ ID NO: 8562 - DNA, 17 bp, Artificial Sequence
  Synthetic oligonucleotide: CBLB-2264
aatgacaagagcggcca

SEQ ID NO: 8563 - DNA, 17 bp, Artificial Sequence
  Synthetic oligonucleotide: CBLB-1953
aaatgacaagagcggcc

SEQ ID NO: 8564 - DNA, 17 bp, Artificial Sequence
  Synthetic oligonucleotide: CBLB-1954
gaaaagagaaaaatgac

SEQ ID NO: 8565 - DNA, 17 bp, Artificial Sequence
  Synthetic oligonucleotide: CBLB-1955
catttgaaaagagaaaa

SEQ ID NO: 8566 - DNA, 17 bp, Artificial Sequence
  Synthetic oligonucleotide: CBLB-1956
cccatttgaaaagagaa

SEQ ID NO: 8567 - DNA, 17 bp, Artificial Sequence
  Synthetic oligonucleotide: CBLB-1957
aatagcccatttgaaaa

SEQ ID NO: 8568 - DNA, 17 bp, Artificial Sequence
  Synthetic oligonucleotide: CBLB-1958
caaatagcccatttgaa

SEQ ID NO: 8569 - DNA, 17 bp, Artificial Sequence
  Synthetic oligonucleotide: CBLB-1959
acacacaaatagcccat

SEQ ID NO: 8570 - DNA, 17 bp, Artificial Sequence
  Synthetic oligonucleotide: CBLB-1960
ttattcccaagaaccaa

SEQ ID NO: 8571 - DNA, 17 bp, Artificial Sequence
  Synthetic oligonucleotide: CBLB-1961
ggtgagtcgttattccc

SEQ ID NO: 8572 - DNA, 17 bp, Artificial Sequence
  Synthetic oligonucleotide: CBLB-1962
ttctttaaatcaacgcg

SEQ ID NO: 8573 - DNA, 17 bp, Artificial Sequence
  Synthetic oligonucleotide: CBLB-1963
ccaccaagtacggacac

SEQ ID NO: 8574 - DNA, 17 bp, Artificial Sequence
  Synthetic oligonucleotide: CBLB-1964
cactaaaaccaccaagt

SEQ ID NO: 8575 - DNA, 17 bp, Artificial Sequence
  Synthetic oligonucleotide: CBLB-1965
tgttgtcaacaaaagcg

SEQ ID NO: 8576 - DNA, 17 bp, Artificial Sequence
  Synthetic oligonucleotide: CBLB-2271
tatcctacacaaacgta

SEQ ID NO: 8577 - DNA, 17 bp, Artificial Sequence
  Synthetic oligonucleotide: CBLB-1967
ttatcctacacaaacgt

SEQ ID NO: 8578 - DNA, 17 bp, Artificial Sequence
  Synthetic oligonucleotide: CBLB-1667
cacaacctcacagaaga

SEQ ID NO: 8579 - DNA, 17 bp, Artificial Sequence
  Synthetic oligonucleotide: CBLB-1969
agagcaacacaacctca

SEQ ID NO: 8580 - DNA, 17 bp, Artificial Sequence
  Synthetic oligonucleotide: CBLB-1970
gtactcttttgttatct

SEQ ID NO: 8581 - DNA, 17 bp, Artificial Sequence
  Synthetic oligonucleotide: CBLB-1971
cataccagatgattgtc

SEQ ID NO: 8582 - DNA, 17 bp, Artificial Sequence
  Synthetic oligonucleotide: CBLB-1972
ctactgcttcttcactt

SEQ ID NO: 8583 - DNA, 17 bp, Artificial Sequence
  Synthetic oligonucleotide: CBLB-2274
attctcaaagatgaaaa

SEQ ID NO: 8584 - DNA, 17 bp, Artificial Sequence
  Synthetic oligonucleotide: CBLB-1974
aattctcaaagatgaaa

SEQ ID NO: 8585 - DNA, 17 bp, Artificial Sequence
  Synthetic oligonucleotide: CBLB-1975
aagatgaattctcaaag

SEQ ID NO: 8586 - DNA, 17 bp, Artificial Sequence
  Synthetic oligonucleotide: CBLB-1976
aaagtttcttaatgaag

SEQ ID NO: 8587 - DNA, 17 bp, Artificial Sequence
  Synthetic oligonucleotide: CBLB-1977
acaaaaaaagtttctta

SEQ ID NO: 8588 - DNA, 17 bp, Artificial Sequence
  Synthetic oligonucleotide: CBLB-1978
aatggaatagtagatga

SEQ ID NO: 8589 - DNA, 17 bp, Artificial Sequence
  Synthetic oligonucleotide: CBLB-1979
tcaaaatggaatagtag

SEQ ID NO: 8590 - DNA, 17 bp, Artificial Sequence
  Synthetic oligonucleotide: CBLB-2275
ggtttcctgtttcaaaa

SEQ ID NO: 8591 - DNA, 17 bp, Artificial Sequence
  Synthetic oligonucleotide: CBLB-1981
aggtttcctgtttcaaa

SEQ ID NO: 8592 - DNA, 17 bp, Artificial Sequence
  Synthetic oligonucleotide: CBLB-1982
caataaacaatgtgcca

SEQ ID NO: 8593 - DNA, 17 bp, Artificial Sequence
  Synthetic oligonucleotide: CBLB-1983
gcaacatgcagaaacca

SEQ ID NO: 8594 - DNA, 17 bp, Artificial Sequence
  Synthetic oligonucleotide: CBLB-1984
tgtctgaaagcaacatg

SEQ ID NO: 8595 - DNA, 17 bp, Artificial Sequence
  Synthetic oligonucleotide: CBLB-1985
gtgaaattatagtttgt

SEQ ID NO: 8596 - DNA, 17 bp, Artificial Sequence
  Synthetic oligonucleotide: CBLB-1986
catcatgatttcttctt

SEQ ID NO: 8597 - DNA, 17 bp, Artificial Sequence
  Synthetic oligonucleotide: CBLB-1987
tattcagattgacttct

SEQ ID NO: 8598 - DNA, 17 bp, Artificial Sequence
  Synthetic oligonucleotide: CBLB-1988
actgacagctacagttt

SEQ ID NO: 8599 - DNA, 17 bp, Artificial Sequence
  Synthetic oligonucleotide: CBLB-1989
aatcatacttagtaagg

SEQ ID NO: 8600 - DNA, 20 bp, Artificial Sequence
  Synthetic oligonucleotide: CBLB-1990
gctcttaaaactactgtgtg

SEQ ID NO: 8601 - DNA, 20 bp, Artificial Sequence
  Synthetic oligonucleotide: CBLB-1991
ttcactttgtctgtggtttc

SEQ ID NO: 8602 - DNA, 20 bp, Artificial Sequence
  Synthetic oligonucleotide: CBLB-1992
ccattgttatggcaacaatc

SEQ ID NO: 8603 - DNA, 20 bp, Artificial Sequence
  Synthetic oligonucleotide: CBLB-1993
aactctgtgttttttgaaaa

SEQ ID NO: 8604 - DNA, 17 bp, Artificial Sequence
  Synthetic oligonucleotide: CBLB-1994
cttaaaactactgtgtg

SEQ ID NO: 8605 - DNA, 17 bp, Artificial Sequence
  Synthetic oligonucleotide: CBLB-1995
actttgtctgtggtttc

SEQ ID NO: 8606 - DNA, 17 bp, Artificial Sequence
  Synthetic oligonucleotide: CBLB-1996
ttgttatggcaacaatc

SEQ ID NO: 8607 - DNA, 17 bp, Artificial Sequence
  Synthetic oligonucleotide: CBLB-1997
tctgtgttttttgaaaa

SEQ ID NO: 8608 - DNA, 20 bp, Artificial Sequence
  Synthetic oligonucleotide: CBLB-1998
ttctccaagttacataaaca

SEQ ID NO: 8609 - DNA, 20 bp, Artificial Sequence
  Synthetic oligonucleotide: CBLB-1999
agaaacttcactttcactct

SEQ ID NO: 8610 - DNA, 20 bp, Artificial Sequence
  Synthetic oligonucleotide: CBLB-2000
gtagttttaagagcagtgat

SEQ ID NO: 8611 - DNA, 20 bp, Artificial Sequence
  Synthetic oligonucleotide: CBLB-2001
attagagcaaaaccaaaagt

SEQ ID NO: 8612 - DNA, 20 bp, Artificial Sequence
  Synthetic oligonucleotide: CBLB-2002
tgtaccactgcatcttcctc

SEQ ID NO: 8613 - DNA, 20 bp, Artificial Sequence
  Synthetic oligonucleotide: CBLB-561
ggaattttagttctttaaaa

SEQ ID NO: 8614 - DNA, 20 bp, Artificial Sequence
  Synthetic oligonucleotide: CBLB-2302
tacccaaaattcgacctttt

SEQ ID NO: 8615 - DNA, 20 bp, Artificial Sequence
  Synthetic oligonucleotide: CBLB-2005
aaaaatgatgaattgaaatc

SEQ ID NO: 8616 - DNA, 17 bp, Artificial Sequence
  Synthetic oligonucleotide: CBLB-2006
tccaagttacataaaca

SEQ ID NO: 8617 - DNA, 17 bp, Artificial Sequence
  Synthetic oligonucleotide: CBLB-2007
aacttcactttcactct

SEQ ID NO: 8618 - DNA, 17 bp, Artificial Sequence
  Synthetic oligonucleotide: CBLB-2008
gttttaagagcagtgat

SEQ ID NO: 8619 - DNA, 17 bp, Artificial Sequence
  Synthetic oligonucleotide: CBLB-2009
agagcaaaaccaaaagt

SEQ ID NO: 8620 - DNA, 17 bp, Artificial Sequence
  Synthetic oligonucleotide: CBLB-2010
accactgcatcttcctc

SEQ ID NO: 8621 - DNA, 17 bp, Artificial Sequence
  Synthetic oligonucleotide: CBLB-565
attttagttctttaaaa

SEQ ID NO: 8622 - DNA, 17 bp, Artificial Sequence
  Synthetic oligonucleotide: CBLB-2361
ccaaaattcgacctttt

SEQ ID NO: 8623 - DNA, 17 bp, Artificial Sequence
  Synthetic oligonucleotide: CBLB-2013
aatgatgaattgaaatc

SEQ ID NO: 8624 - DNA, 20 bp, Artificial Sequence
  Synthetic oligonucleotide: CBLB-2014
ttgggaataacgactcaccg

SEQ ID NO: 8625 - DNA, 20 bp, Artificial Sequence
  Synthetic oligonucleotide: CBLB-2015
aaatatttactggggaaaga

SEQ ID NO: 8626 - DNA, 20 bp, Artificial Sequence
  Synthetic oligonucleotide: CBLB-1760
aagtcaatctgaatacctta

SEQ ID NO: 8627 - DNA, 20 bp, Artificial Sequence
  Synthetic oligonucleotide: CBLB-2017
tcagtatcctaccttactaa

SEQ ID NO: 8628 - DNA, 17 bp, Artificial Sequence
  Synthetic oligonucleotide: CBLB-2018
ggaataacgactcaccg

SEQ ID NO: 8629 - DNA, 17 bp, Artificial Sequence
  Synthetic oligonucleotide: CBLB-2019
tatttactggggaaaga

SEQ ID NO: 8630 - DNA, 17 bp, Artificial Sequence
  Synthetic oligonucleotide: CBLB-1854
tcaatctgaatacctta

SEQ ID NO: 8631 - DNA, 17 bp, Artificial Sequence
  Synthetic oligonucleotide: CBLB-2021
gtatcctaccttactaa

SEQ ID NO: 8632 - DNA, 20 bp, Artificial Sequence
  Synthetic oligonucleotide: CBLB-1998
ttctccaagttacataaaca

SEQ ID NO: 8633 - DNA, 20 bp, Artificial Sequence
  Synthetic oligonucleotide: CBLB-2023
aatattttcagtatcatacc

SEQ ID NO: 8634 - DNA, 20 bp, Artificial Sequence
  Synthetic oligonucleotide: CBLB-2024
tctctggatactgacaccca

SEQ ID NO: 8635 - DNA, 20 bp, Artificial Sequence
  Synthetic oligonucleotide: CBLB-2025
gagtaaatctctgtaaggta

SEQ ID NO: 8636 - DNA, 17 bp, Artificial Sequence
  Synthetic oligonucleotide: CBLB-2006
tccaagttacataaaca

SEQ ID NO: 8637 - DNA, 17 bp, Artificial Sequence
  Synthetic oligonucleotide: CBLB-2027
attttcagtatcatacc

SEQ ID NO: 8638 - DNA, 17 bp, Artificial Sequence
  Synthetic oligonucleotide: CBLB-2028
ctggatactgacaccca

SEQ ID NO: 8639 - DNA, 17 bp, Artificial Sequence
  Synthetic oligonucleotide: CBLB-2029
taaatctctgtaaggta

SEQ ID NO: 8640 - RNA, 17 nt, Artificial Sequence
  Synthetic oligonucleotide: FAS-32
gacugacaucaacucca

SEQ ID NO: 8641 - RNA, 20 nt, Artificial Sequence
  Synthetic oligonucleotide: FAS-60
gacugcgugcccugccaaga

SEQ ID NO: 8642 - RNA, 20 nt, Artificial Sequence
  Synthetic oligonucleotide: FAS-3
gagggcucaccagagguagg

SEQ ID NO: 8643 - RNA, 17 nt, Artificial Sequence
  Synthetic oligonucleotide: FAS-85
gcgugcccugccaagaa

SEQ ID NO: 8644 - RNA, 20 nt, Artificial Sequence
  Synthetic oligonucleotide: FAS-57
gcuagggacugcacagucaa

SEQ ID NO: 8645 - RNA, 17 nt, Artificial Sequence
  Synthetic oligonucleotide: FAS-9
gcucaccagagguagga

SEQ ID NO: 8646 - RNA, 17 nt, Artificial Sequence
  Synthetic oligonucleotide: FAS-83
ggacugcacagucaaug

SEQ ID NO: 8647 - RNA, 17 nt, Artificial Sequence
  Synthetic oligonucleotide: FAS-8
ggcucaccagagguagg

SEQ ID NO: 8648 - RNA, 20 nt, Artificial Sequence
  Synthetic oligonucleotide: FAS-13
gugacugacaucaacuccaa

SEQ ID NO: 8649 - RNA, 20 nt, Artificial Sequence
  Synthetic oligonucleotide: FAS-22
guguaacauaccuggaggac

SEQ ID NO: 8650 - RNA, 20 nt, Artificial Sequence
  Synthetic oligonucleotide: FAS-17
guugagacucagaacuugga

SEQ ID NO: 8651 - RNA, 17 nt, Artificial Sequence
  Synthetic oligonucleotide: FAS-40
guuuuguguaacauacc

SEQ ID NO: 8652 - RNA, 20 nt, Artificial Sequence
  Synthetic oligonucleotide: FAS-61
acugcgugcccugccaagaa

SEQ ID NO: 8653 - RNA, 20 nt, Artificial Sequence
  Synthetic oligonucleotide: FAS-4
agggcucaccagagguagga

SEQ ID NO: 8654 - RNA, 17 nt, Artificial Sequence
  Synthetic oligonucleotide: FAS-45
agggcuuauggcagaau

SEQ ID NO: 8655 - RNA, 20 nt, Artificial Sequence
  Synthetic oligonucleotide: FAS-30
cacuugggcauuaacacuuu

SEQ ID NO: 8656 - RNA, 20 nt, Artificial Sequence
  Synthetic oligonucleotide: FAS-2
caucuggacccuccuaccuc

SEQ ID NO: 8657 - RNA, 20 nt, Artificial Sequence
  Synthetic oligonucleotide: FAS-58
cuagggacugcacagucaau

SEQ ID NO: 8658 - RNA, 17 nt, Artificial Sequence
  Synthetic oligonucleotide: FAS-42
uaacauaccuggaggac

SEQ ID NO: 8659 - RNA, 20 nt, Artificial Sequence
  Synthetic oligonucleotide: FAS-59
uagggacugcacagucaaug

SEQ ID NO: 8660 - RNA, 17 nt, Artificial Sequence
  Synthetic oligonucleotide: FAS-90
ucuacaucuucugcauu

SEQ ID NO: 8661 - RNA, 20 nt, Artificial Sequence
  Synthetic oligonucleotide: FAS-72
ucuuggcagggcacgcaguc

SEQ ID NO: 8662 - RNA, 17 nt, Artificial Sequence
  Synthetic oligonucleotide: FAS-84
ugcgugcccugccaaga

SEQ ID NO: 8663 - RNA, 17 nt, Artificial Sequence
  Synthetic oligonucleotide: FAS-96
uggcagggcacgcaguc

SEQ ID NO: 8664 - RNA, 20 nt, Artificial Sequence
  Synthetic oligonucleotide: FAS-23
uguaacauaccuggaggaca

SEQ ID NO: 8665 - RNA, 17 nt, Artificial Sequence
  Synthetic oligonucleotide: FAS-41
uuguguaacauaccugg

SEQ ID NO: 8666 - RNA, 17 nt, Artificial Sequence
  Synthetic oligonucleotide: FAS-38
gaaggccugcaucauga

SEQ ID NO: 8667 - RNA, 20 nt, Artificial Sequence
  Synthetic oligonucleotide: FAS-25
gacagggcuuauggcagaau

SEQ ID NO: 8668 - RNA, 17 nt, Artificial Sequence
  Synthetic oligonucleotide: FAS-37
gagacucagaacuugga

SEQ ID NO: 8669 - RNA, 20 nt, Artificial Sequence
  Synthetic oligonucleotide: FAS-5
gaggguccagaugcccagca

SEQ ID NO: 8670 - RNA, 20 nt, Artificial Sequence
  Synthetic oligonucleotide: FAS-20
gauguuuuguguaacauacc

SEQ ID NO: 8671 - RNA, 17 nt, Artificial Sequence
  Synthetic oligonucleotide: FAS-92
gcauuuggaagaaaaau

SEQ ID NO: 8672 - RNA, 17 nt, Artificial Sequence
  Synthetic oligonucleotide: FAS-86
gcccugccaagaaggga

SEQ ID NO: 8673 - RNA, 20 nt, Artificial Sequence
  Synthetic oligonucleotide: FAS-73
gcuuuccuuucaccugccca

SEQ ID NO: 8674 - RNA, 20 nt, Artificial Sequence
  Synthetic oligonucleotide: FAS-29
ggaguugaugucagucacuu

SEQ ID NO: 8675 - RNA, 20 nt, Artificial Sequence
  Synthetic oligonucleotide: FAS-56
ggcaggugaaaggaaagcua

SEQ ID NO: 8676 - RNA, 17 nt, Artificial Sequence
  Synthetic oligonucleotide: FAS-82
gggacugcacagucaau

SEQ ID NO: 8677 - RNA, 20 nt, Artificial Sequence
  Synthetic oligonucleotide: FAS-55
gggcaggugaaaggaaagcu

SEQ ID NO: 8678 - RNA, 17 nt, Artificial Sequence
  Synthetic oligonucleotide: FAS-10
gguccagaugcccagca

SEQ ID NO: 8679 - RNA, 20 nt, Artificial Sequence
  Synthetic oligonucleotide: FAS-70
guacuccuucccuucuuggc

SEQ ID NO: 8680 - RNA, 17 nt, Artificial Sequence
  Synthetic oligonucleotide: FAS-49
guugaugucagucacuu

SEQ ID NO: 8681 - RNA, 20 nt, Artificial Sequence
  Synthetic oligonucleotide: FAS-21
guuuuguguaacauaccugg

SEQ ID NO: 8682 - RNA, 17 nt, Artificial Sequence
  Synthetic oligonucleotide: FAS-43
aacauaccuggaggaca

SEQ ID NO: 8683 - RNA, 20 nt, Artificial Sequence
  Synthetic oligonucleotide: FAS-51
acacuugcuccuuuuuuccu

SEQ ID NO: 8684 - RNA, 17 nt, Artificial Sequence
  Synthetic oligonucleotide: FAS-98
accugcccaaggaaaaa

SEQ ID NO: 8685 - RNA, 20 nt, Artificial Sequence
  Synthetic oligonucleotide: FAS-15
acuccaagggauuggaauug

SEQ ID NO: 8686 - RNA, 17 nt, Artificial Sequence
  Synthetic oligonucleotide: FAS-33
acugacaucaacuccaa

SEQ ID NO: 8687 - RNA, 20 nt, Artificial Sequence
  Synthetic oligonucleotide: FAS-26
agaauuggccaucaugaugc

SEQ ID NO: 8688 - RNA, 20 nt, Artificial Sequence
  Synthetic oligonucleotide: FAS-63
agauguagauugugugauga

SEQ ID NO: 8689 - RNA, 20 nt, Artificial Sequence
  Synthetic oligonucleotide: FAS-64
agauugugugaugaaggaca

SEQ ID NO: 8690 - RNA, 17 nt, Artificial Sequence
  Synthetic oligonucleotide: FAS-81
agggacugcacagucaa

SEQ ID NO: 8691 - RNA, 17 nt, Artificial Sequence
  Synthetic oligonucleotide: FAS-80
aggugaaaggaaagcua

SEQ ID NO: 8692 - RNA, 20 nt, Artificial Sequence
  Synthetic oligonucleotide: FAS-12
agugacugacaucaacucca

SEQ ID NO: 8693 - RNA, 17 nt, Artificial Sequence
  Synthetic oligonucleotide: FAS-36
aguugagacucagaacu

SEQ ID NO: 8694 - RNA, 17 nt, Artificial Sequence
  Synthetic oligonucleotide: FAS-48
aguugaugucagucacu

SEQ ID NO: 8695 - RNA, 17 nt, Artificial Sequence
  Synthetic oligonucleotide: FAS-46
auuggccaucaugaugc

SEQ ID NO: 8696 - RNA, 20 nt, Artificial Sequence
  Synthetic oligonucleotide: FAS-1
caacaaccaugcugggcauc

SEQ ID NO: 8697 - RNA, 17 nt, Artificial Sequence
  Synthetic oligonucleotide: FAS-6
caaccaugcugggcauc

SEQ ID NO: 8698 - RNA, 20 nt, Artificial Sequence
  Synthetic oligonucleotide: FAS-66
caaucuacaucuucugcauu

SEQ ID NO: 8699 - RNA, 20 nt, Artificial Sequence
  Synthetic oligonucleotide: FAS-52
cacuugcuccuuuuuuccuu

SEQ ID NO: 8700 - RNA, 17 nt, Artificial Sequence
  Synthetic oligonucleotide: FAS-79
caggugaaaggaaagcu

SEQ ID NO: 8701 - RNA, 17 nt, Artificial Sequence
  Synthetic oligonucleotide: FAS-39
cauaagcccuguccucc

SEQ ID NO: 8702 - RNA, 17 nt, Artificial Sequence
  Synthetic oligonucleotide: FAS-34
caucaacuccaagggau

SEQ ID NO: 8703 - RNA, 17 nt, Artificial Sequence
  Synthetic oligonucleotide: FAS-35
ccaagggauuggaauug

SEQ ID NO: 8704 - RNA, 17 nt, Artificial Sequence
  Synthetic oligonucleotide: FAS-47
ccucaauuccaaucccu

SEQ ID NO: 8705 - RNA, 20 nt, Artificial Sequence
  Synthetic oligonucleotide: FAS-62
cgugcccugccaagaaggga

SEQ ID NO: 8706 - RNA, 17 nt, Artificial Sequence
  Synthetic oligonucleotide: FAS-94
cuccuucccuucuuggc

SEQ ID NO: 8707 - RNA, 17 nt, Artificial Sequence
  Synthetic oligonucleotide: FAS-7
cuggacccuccuaccuc

SEQ ID NO: 8708 - RNA, 17 nt, Artificial Sequence
  Synthetic oligonucleotide: FAS-44
cuggaggacagggcuua

SEQ ID NO: 8709 - RNA, 20 nt, Artificial Sequence
  Synthetic oligonucleotide: FAS-69
cuguguacuccuucccuucu

SEQ ID NO: 8710 - RNA, 20 nt, Artificial Sequence
  Synthetic oligonucleotide: FAS-27
cuuccucaauuccaaucccu

SEQ ID NO: 8711 - RNA, 17 nt, Artificial Sequence
  Synthetic oligonucleotide: FAS-75
cuugcuccuuuuuuccu

SEQ ID NO: 8712 - RNA, 17 nt, Artificial Sequence
  Synthetic oligonucleotide: FAS-89
uaaaaugcaauugaaag

SEQ ID NO: 8713 - RNA, 20 nt, Artificial Sequence
  Synthetic oligonucleotide: FAS-16
uacaguugagacucagaacu

SEQ ID NO: 8714 - RNA, 20 nt, Artificial Sequence
  Synthetic oligonucleotide: FAS-24
uaccuggaggacagggcuua

SEQ ID NO: 8715 - RNA, 20 nt, Artificial Sequence
  Synthetic oligonucleotide: FAS-71
uacuccuucccuucuuggca

SEQ ID NO: 8716 - RNA, 17 nt, Artificial Sequence
  Synthetic oligonucleotide: FAS-31
ucaugcuuuuauuuuac

SEQ ID NO: 8717 - RNA, 17 nt, Artificial Sequence
  Synthetic oligonucleotide: FAS-95
uccuucccuucuuggca

SEQ ID NO: 8718 - RNA, 17 nt, Artificial Sequence
  Synthetic oligonucleotide: FAS-77
uccuuuuuuccuugggc

SEQ ID NO: 8719 - RNA, 20 nt, Artificial Sequence
  Synthetic oligonucleotide: FAS-68
ucugcauuuggaagaaaaau

SEQ ID NO: 8720 - RNA, 20 nt, Artificial Sequence
  Synthetic oligonucleotide: FAS-65
ucuuaaaaugcaauugaaag

SEQ ID NO: 8721 - RNA, 20 nt, Artificial Sequence
  Synthetic oligonucleotide: FAS-11
ucuucaugcuuuuauuuuac

SEQ ID NO: 8722 - RNA, 20 nt, Artificial Sequence
  Synthetic oligonucleotide: FAS-14
ugacaucaacuccaagggau

SEQ ID NO: 8723 - RNA, 17 nt, Artificial Sequence
  Synthetic oligonucleotide: FAS-91
ugcauuuggaagaaaaa

SEQ ID NO: 8724 - RNA, 20 nt, Artificial Sequence
  Synthetic oligonucleotide: FAS-19
ugccauaagcccuguccucc

SEQ ID NO: 8725 - RNA, 20 nt, Artificial Sequence
  Synthetic oligonucleotide: FAS-53
ugcuccuuuuuuccuugggc

SEQ ID NO: 8726 - RNA, 20 nt, Artificial Sequence
  Synthetic oligonucleotide: FAS-28
uggaguugaugucagucacu

SEQ ID NO: 8727 - RNA, 17 nt, Artificial Sequence
  Synthetic oligonucleotide: FAS-93
uguacuccuucccuucu

SEQ ID NO: 8728 - RNA, 17 nt, Artificial Sequence
  Synthetic oligonucleotide: FAS-87
uguagauugugugauga

SEQ ID NO: 8729 - RNA, 20 nt, Artificial Sequence
  Synthetic oligonucleotide: FAS-74
uucaccugcccaaggaaaaa

SEQ ID NO: 8730 - RNA, 17 nt, Artificial Sequence
  Synthetic oligonucleotide: FAS-78
uuccuugggcaggugaa

SEQ ID NO: 8731 - RNA, 17 nt, Artificial Sequence
  Synthetic oligonucleotide: FAS-97
uuccuuucaccugccca

SEQ ID NO: 8732 - RNA, 20 nt, Artificial Sequence
  Synthetic oligonucleotide: FAS-67
uucugcauuuggaagaaaaa

SEQ ID NO: 8733 - RNA, 17 nt, Artificial Sequence
  Synthetic oligonucleotide: FAS-76
uugcuccuuuuuuccuu

SEQ ID NO: 8734 - RNA, 20 nt, Artificial Sequence
  Synthetic oligonucleotide: FAS-18
uuggaaggccugcaucauga

SEQ ID NO: 8735 - RNA, 17 nt, Artificial Sequence
  Synthetic oligonucleotide: FAS-50
uugggcauuaacacuuu

SEQ ID NO: 8736 - RNA, 17 nt, Artificial Sequence
  Synthetic oligonucleotide: FAS-88
uugugugaugaaggaca

SEQ ID NO: 8737 - RNA, 20 nt, Artificial Sequence
  Synthetic oligonucleotide: FAS-54
uuuuuccuugggcaggugaa

SEQ ID NO: 8738 - RNA, 20 nt, Artificial Sequence
  Synthetic oligonucleotide: FAS-245
aguuuccaaacugauuuucu

SEQ ID NO: 8739 - RNA, 20 nt, Artificial Sequence
  Synthetic oligonucleotide: FAS-246
ugauuuucuaggcuuagaag

SEQ ID NO: 8740 - RNA, 20 nt, Artificial Sequence
  Synthetic oligonucleotide: FAS-247
aaguggaaauaaacugcacc

SEQ ID NO: 8741 - RNA, 20 nt, Artificial Sequence
  Synthetic oligonucleotide: FAS-248
uuuuuuucuagaugugaaca

SEQ ID NO: 8742 - RNA, 20 nt, Artificial Sequence
  Synthetic oligonucleotide: FAS-249
augugaacauggaaucauca

SEQ ID NO: 8743 - RNA, 20 nt, Artificial Sequence
  Synthetic oligonucleotide: FAS-250
cagcaacaccaagugcaaag

SEQ ID NO: 8744 - RNA, 20 nt, Artificial Sequence
  Synthetic oligonucleotide: FAS-251
aacaccaagugcaaagagga

SEQ ID NO: 8745 - RNA, 20 nt, Artificial Sequence
  Synthetic oligonucleotide: FAS-252
ggaagguaauuauuuuuuua

SEQ ID NO: 8746 - RNA, 20 nt, Artificial Sequence
  Synthetic oligonucleotide: FAS-253
uguccaauguuccaaccuac

SEQ ID NO: 8747 - RNA, 20 nt, Artificial Sequence
  Synthetic oligonucleotide: FAS-254
uacaggauccagaucuaacu

SEQ ID NO: 8748 - RNA, 20 nt, Artificial Sequence
  Synthetic oligonucleotide: FAS-255
acaggauccagaucuaacuu

SEQ ID NO: 8749 - RNA, 20 nt, Artificial Sequence
  Synthetic oligonucleotide: FAS-256
caggauccagaucuaacuug

SEQ ID NO: 8750 - RNA, 20 nt, Artificial Sequence
  Synthetic oligonucleotide: FAS-257
gauccagaucuaacuugggg

SEQ ID NO: 8751 - RNA, 20 nt, Artificial Sequence
  Synthetic oligonucleotide: FAS-258
ugccaauuccacuaauuguu

SEQ ID NO: 8752 - RNA, 20 nt, Artificial Sequence
  Synthetic oligonucleotide: FAS-259
gccaauuccacuaauuguuu

SEQ ID NO: 8753 - RNA, 20 nt, Artificial Sequence
  Synthetic oligonucleotide: FAS-260
ccaauuccacuaauuguuug

SEQ ID NO: 8754 - RNA, 20 nt, Artificial Sequence
  Synthetic oligonucleotide: FAS-261
uguucuuucagugaagagaa

SEQ ID NO: 8755 - RNA, 20 nt, Artificial Sequence
  Synthetic oligonucleotide: FAS-262
aacaugcagaaagcacagaa

SEQ ID NO: 8756 - RNA, 20 nt, Artificial Sequence
  Synthetic oligonucleotide: FAS-263
aagcacagaaaggaaaacca

SEQ ID NO: 8757 - RNA, 20 nt, Artificial Sequence
  Synthetic oligonucleotide: FAS-264
ucuccaacuuuaaauccugu

SEQ ID NO: 8758 - RNA, 20 nt, Artificial Sequence
  Synthetic oligonucleotide: FAS-265
aauccuguagguauugaaau

SEQ ID NO: 8759 - RNA, 20 nt, Artificial Sequence
  Synthetic oligonucleotide: FAS-266
gcuuccauuuuuugcuuucu

SEQ ID NO: 8760 - RNA, 20 nt, Artificial Sequence
  Synthetic oligonucleotide: FAS-267
uuuugcuuucuaggaaacag

SEQ ID NO: 8761 - RNA, 20 nt, Artificial Sequence
  Synthetic oligonucleotide: FAS-268
acaguggcaauaaauuuauc

SEQ ID NO: 8762 - RNA, 20 nt, Artificial Sequence
  Synthetic oligonucleotide: FAS-269
ggcaauaaauuuaucuggua

SEQ ID NO: 8763 - RNA, 20 nt, Artificial Sequence
  Synthetic oligonucleotide: FAS-270
aaauauaucaccacuauugc

SEQ ID NO: 8764 - RNA, 20 nt, Artificial Sequence
  Synthetic oligonucleotide: FAS-271
augacacuaagucaaguuaa

SEQ ID NO: 8765 - RNA, 20 nt, Artificial Sequence
  Synthetic oligonucleotide: FAS-272
aaaggcuuuguucgaaagaa

SEQ ID NO: 8766 - RNA, 20 nt, Artificial Sequence
  Synthetic oligonucleotide: FAS-273
aaguucaacugcuucguaau

SEQ ID NO: 8767 - RNA, 20 nt, Artificial Sequence
  Synthetic oligonucleotide: FAS-274
cguaauuggcaucaacuuca

SEQ ID NO: 8768 - RNA, 20 nt, Artificial Sequence
  Synthetic oligonucleotide: FAS-275
aauucagacuaucauccuca

SEQ ID NO: 8769 - RNA, 20 nt, Artificial Sequence
  Synthetic oligonucleotide: FAS-276
cagaaaugaaauccaaagcu

SEQ ID NO: 8770 - RNA, 17 nt, Artificial Sequence
  Synthetic oligonucleotide: FAS-277
uuccaaacugauuuucu

SEQ ID NO: 8771 - RNA, 17 nt, Artificial Sequence
  Synthetic oligonucleotide: FAS-278
uuuucuaggcuuagaag

SEQ ID NO: 8772 - RNA, 17 nt, Artificial Sequence
  Synthetic oligonucleotide: FAS-279
uggaaauaaacugcacc

SEQ ID NO: 8773 - RNA, 17 nt, Artificial Sequence
  Synthetic oligonucleotide: FAS-280
uuuucuagaugugaaca

SEQ ID NO: 8774 - RNA, 17 nt, Artificial Sequence
  Synthetic oligonucleotide: FAS-281
ugaacauggaaucauca

SEQ ID NO: 8775 - RNA, 17 nt, Artificial Sequence
  Synthetic oligonucleotide: FAS-282
caacaccaagugcaaag

SEQ ID NO: 8776 - RNA, 17 nt, Artificial Sequence
  Synthetic oligonucleotide: FAS-283
accaagugcaaagagga

SEQ ID NO: 8777 - RNA, 17 nt, Artificial Sequence
  Synthetic oligonucleotide: FAS-284
agguaauuauuuuuuua

SEQ ID NO: 8778 - RNA, 17 nt, Artificial Sequence
  Synthetic oligonucleotide: FAS-285
ccaauguuccaaccuac

SEQ ID NO: 8779 - RNA, 17 nt, Artificial Sequence
  Synthetic oligonucleotide: FAS-286
aggauccagaucuaacu

SEQ ID NO: 8780 - RNA, 17 nt, Artificial Sequence
  Synthetic oligonucleotide: FAS-287
ggauccagaucuaacuu

SEQ ID NO: 8781 - RNA, 17 nt, Artificial Sequence
  Synthetic oligonucleotide: FAS-288
gauccagaucuaacuug

SEQ ID NO: 8782 - RNA, 17 nt, Artificial Sequence
  Synthetic oligonucleotide: FAS-289
ccagaucuaacuugggg

SEQ ID NO: 8783 - RNA, 17 nt, Artificial Sequence
  Synthetic oligonucleotide: FAS-290
caauuccacuaauuguu

SEQ ID NO: 8784 - RNA, 17 nt, Artificial Sequence
  Synthetic oligonucleotide: FAS-291
aauuccacuaauuguuu

SEQ ID NO: 8785 - RNA, 17 nt, Artificial Sequence
  Synthetic oligonucleotide: FAS-292
auuccacuaauuguuug

SEQ ID NO: 8786 - RNA, 17 nt, Artificial Sequence
  Synthetic oligonucleotide: FAS-293
ucuuucagugaagagaa

SEQ ID NO: 8787 - RNA, 17 nt, Artificial Sequence
  Synthetic oligonucleotide: FAS-294
augcagaaagcacagaa

SEQ ID NO: 8788 - RNA, 17 nt, Artificial Sequence
  Synthetic oligonucleotide: FAS-295
cacagaaaggaaaacca

SEQ ID NO: 8789 - RNA, 17 nt, Artificial Sequence
  Synthetic oligonucleotide: FAS-296
ccaacuuuaaauccugu

SEQ ID NO: 8790 - RNA, 17 nt, Artificial Sequence
  Synthetic oligonucleotide: FAS-297
ccuguagguauugaaau

SEQ ID NO: 8791 - RNA, 17 nt, Artificial Sequence
  Synthetic oligonucleotide: FAS-298
uccauuuuuugcuuucu

SEQ ID NO: 8792 - RNA, 17 nt, Artificial Sequence
  Synthetic oligonucleotide: FAS-299
ugcuuucuaggaaacag

SEQ ID NO: 8793 - RNA, 17 nt, Artificial Sequence
  Synthetic oligonucleotide: FAS-300
guggcaauaaauuuauc

SEQ ID NO: 8794 - RNA, 17 nt, Artificial Sequence
  Synthetic oligonucleotide: FAS-301
aauaaauuuaucuggua

SEQ ID NO: 8795 - RNA, 17 nt, Artificial Sequence
  Synthetic oligonucleotide: FAS-302
uauaucaccacuauugc

SEQ ID NO: 8796 - RNA, 17 nt, Artificial Sequence
  Synthetic oligonucleotide: FAS-303
acacuaagucaaguuaa

SEQ ID NO: 8797 - RNA, 17 nt, Artificial Sequence
  Synthetic oligonucleotide: FAS-304
ggcuuuguucgaaagaa

SEQ ID NO: 8798 - RNA, 17 nt, Artificial Sequence
  Synthetic oligonucleotide: FAS-305
uucaacugcuucguaau

SEQ ID NO: 8799 - RNA, 17 nt, Artificial Sequence
  Synthetic oligonucleotide: FAS-306
aauuggcaucaacuuca

SEQ ID NO: 8800 - RNA, 17 nt, Artificial Sequence
  Synthetic oligonucleotide: FAS-307
ucagacuaucauccuca

SEQ ID NO: 8801 - RNA, 17 nt, Artificial Sequence
  Synthetic oligonucleotide: FAS-308
aaaugaaauccaaagcu

SEQ ID NO: 8802 - RNA, 20 nt, Artificial Sequence
  Synthetic oligonucleotide: FAS-309
uuucacucuagaccaagcuu

SEQ ID NO: 8803 - RNA, 20 nt, Artificial Sequence
  Synthetic oligonucleotide: FAS-310
agucacuaguaauguccuug

SEQ ID NO: 8804 - RNA, 20 nt, Artificial Sequence
  Synthetic oligonucleotide: FAS-311
cucugcaagaguacaaagau

SEQ ID NO: 8805 - RNA, 20 nt, Artificial Sequence
  Synthetic oligonucleotide: FAS-312
cuuucuguucugcugugucu

SEQ ID NO: 8806 - RNA, 20 nt, Artificial Sequence
  Synthetic oligonucleotide: FAS-313
auucuugaucucaucuauuu

SEQ ID NO: 8807 - RNA, 20 nt, Artificial Sequence
  Synthetic oligonucleotide: FAS-314
ugucaugacuccagcaauag

SEQ ID NO: 8808 - RNA, 20 nt, Artificial Sequence
  Synthetic oligonucleotide: FAS-315
guuuccuagaaagcaaaaaa

SEQ ID NO: 8809 - RNA, 20 nt, Artificial Sequence
  Synthetic oligonucleotide: FAS-316
auaccuauuucaauaccuac

SEQ ID NO: 8810 - RNA, 20 nt, Artificial Sequence
  Synthetic oligonucleotide: FAS-317
auaccuacaggauuuaaagu

SEQ ID NO: 8811 - RNA, 20 nt, Artificial Sequence
  Synthetic oligonucleotide: FAS-318
uuggagauucaugagaaccu

SEQ ID NO: 8812 - RNA, 20 nt, Artificial Sequence
  Synthetic oligonucleotide: FAS-319
aacuuaccccaaacaauuag

SEQ ID NO: 8813 - RNA, 20 nt, Artificial Sequence
  Synthetic oligonucleotide: FAS-320
ccccaaacaauuaguggaau

SEQ ID NO: 8814 - RNA, 20 nt, Artificial Sequence
  Synthetic oligonucleotide: FAS-321
aagccaccccaaguuagauc

SEQ ID NO: 8815 - RNA, 20 nt, Artificial Sequence
  Synthetic oligonucleotide: FAS-322
aaguuagaucuggauccugu

SEQ ID NO: 8816 - RNA, 20 nt, Artificial Sequence
  Synthetic oligonucleotide: FAS-323
uagaucuggauccuguaggu

SEQ ID NO: 8817 - RNA, 20 nt, Artificial Sequence
  Synthetic oligonucleotide: FAS-324
gauccuguagguuggaacau

SEQ ID NO: 8818 - RNA, 20 nt, Artificial Sequence
  Synthetic oligonucleotide: FAS-325
auuaccuuccucuuugcacu

SEQ ID NO: 8819 - RNA, 20 nt, Artificial Sequence
  Synthetic oligonucleotide: FAS-326
cucuuugcacuugguguugc

SEQ ID NO: 8820 - RNA, 20 nt, Artificial Sequence
  Synthetic oligonucleotide: FAS-327
acaucuagaaaaaaaaauac

SEQ ID NO: 8821 - RNA, 20 nt, Artificial Sequence
  Synthetic oligonucleotide: FAS-328
gagaaagacuaaaacuuacu

SEQ ID NO: 8822 - RNA, 20 nt, Artificial Sequence
  Synthetic oligonucleotide: FAS-329
acuaaaacuuacuuggugca

SEQ ID NO: 8823 - RNA, 20 nt, Artificial Sequence
  Synthetic oligonucleotide: FAS-330
cuaaaacuuacuuggugcaa

SEQ ID NO: 8824 - RNA, 20 nt, Artificial Sequence
  Synthetic oligonucleotide: FAS-331
guagaguuacaaaaaaaguu

SEQ ID NO: 8825 - RNA, 20 nt, Artificial Sequence
  Synthetic oligonucleotide: FAS-332
guuugguuuacaucugcacu

SEQ ID NO: 8826 - RNA, 20 nt, Artificial Sequence
  Synthetic oligonucleotide: FAS-333
uacaucugcacuugguauuc

SEQ ID NO: 8827 - RNA, 20 nt, Artificial Sequence
  Synthetic oligonucleotide: FAS-334
acaucugcacuugguauucu

SEQ ID NO: 8828 - RNA, 20 nt, Artificial Sequence
  Synthetic oligonucleotide: FAS-335
ugcacuugguauucuggguc

SEQ ID NO: 8829 - RNA, 20 nt, Artificial Sequence
  Synthetic oligonucleotide: FAS-336
gcacuugguauucugggucc

SEQ ID NO: 8830 - RNA, 20 nt, Artificial Sequence
  Synthetic oligonucleotide: FAS-337
cuaagccuagaaaaucaguu

SEQ ID NO: 8831 - RNA, 17 nt, Artificial Sequence
  Synthetic oligonucleotide: FAS-338
cacucuagaccaagcuu

SEQ ID NO: 8832 - RNA, 17 nt, Artificial Sequence
  Synthetic oligonucleotide: FAS-339
cacuaguaauguccuug

SEQ ID NO: 8833 - RNA, 17 nt, Artificial Sequence
  Synthetic oligonucleotide: FAS-340
ugcaagaguacaaagau

SEQ ID NO: 8834 - RNA, 17 nt, Artificial Sequence
  Synthetic oligonucleotide: FAS-341
ucuguucugcugugucu

SEQ ID NO: 8835 - RNA, 17 nt, Artificial Sequence
  Synthetic oligonucleotide: FAS-342
cuugaucucaucuauuu

SEQ ID NO: 8836 - RNA, 17 nt, Artificial Sequence
  Synthetic oligonucleotide: FAS-343
caugacuccagcaauag

SEQ ID NO: 8837 - RNA, 17 nt, Artificial Sequence
  Synthetic oligonucleotide: FAS-344
uccuagaaagcaaaaaa

SEQ ID NO: 8838 - RNA, 17 nt, Artificial Sequence
  Synthetic oligonucleotide: FAS-345
ccuauuucaauaccuac

SEQ ID NO: 8839 - RNA, 17 nt, Artificial Sequence
  Synthetic oligonucleotide: FAS-346
ccuacaggauuuaaagu

SEQ ID NO: 8840 - RNA, 17 nt, Artificial Sequence
  Synthetic oligonucleotide: FAS-347
gagauucaugagaaccu

SEQ ID NO: 8841 - RNA, 17 nt, Artificial Sequence
  Synthetic oligonucleotide: FAS-348
uuaccccaaacaauuag

SEQ ID NO: 8842 - RNA, 17 nt, Artificial Sequence
  Synthetic oligonucleotide: FAS-349
caaacaauuaguggaau

SEQ ID NO: 8843 - RNA, 17 nt, Artificial Sequence
  Synthetic oligonucleotide: FAS-350
ccaccccaaguuagauc

SEQ ID NO: 8844 - RNA, 17 nt, Artificial Sequence
  Synthetic oligonucleotide: FAS-351
uuagaucuggauccugu

SEQ ID NO: 8845 - RNA, 17 nt, Artificial Sequence
  Synthetic oligonucleotide: FAS-352
aucuggauccuguaggu

SEQ ID NO: 8846 - RNA, 17 nt, Artificial Sequence
  Synthetic oligonucleotide: FAS-353
ccuguagguuggaacau

SEQ ID NO: 8847 - RNA, 17 nt, Artificial Sequence
  Synthetic oligonucleotide: FAS-354
accuuccucuuugcacu

SEQ ID NO: 8848 - RNA, 17 nt, Artificial Sequence
  Synthetic oligonucleotide: FAS-355
uuugcacuugguguugc

SEQ ID NO: 8849 - RNA, 17 nt, Artificial Sequence
  Synthetic oligonucleotide: FAS-356
ucuagaaaaaaaaauac

SEQ ID NO: 8850 - RNA, 17 nt, Artificial Sequence
  Synthetic oligonucleotide: FAS-357
aaagacuaaaacuuacu

SEQ ID NO: 8851 - RNA, 17 nt, Artificial Sequence
  Synthetic oligonucleotide: FAS-358
aaaacuuacuuggugca

SEQ ID NO: 8852 - RNA, 17 nt, Artificial Sequence
  Synthetic oligonucleotide: FAS-359
aaacuuacuuggugcaa

SEQ ID NO: 8853 - RNA, 17 nt, Artificial Sequence
  Synthetic oligonucleotide: FAS-360
gaguuacaaaaaaaguu

SEQ ID NO: 8854 - RNA, 17 nt, Artificial Sequence
  Synthetic oligonucleotide: FAS-361
ugguuuacaucugcacu

SEQ ID NO: 8855 - RNA, 17 nt, Artificial Sequence
  Synthetic oligonucleotide: FAS-362
aucugcacuugguauuc

SEQ ID NO: 8856 - RNA, 17 nt, Artificial Sequence
  Synthetic oligonucleotide: FAS-363
ucugcacuugguauucu

SEQ ID NO: 8857 - RNA, 17 nt, Artificial Sequence
  Synthetic oligonucleotide: FAS-364
acuugguauucuggguc

SEQ ID NO: 8858 - RNA, 17 nt, Artificial Sequence
  Synthetic oligonucleotide: FAS-365
cuugguauucugggucc

SEQ ID NO: 8859 - RNA, 17 nt, Artificial Sequence
  Synthetic oligonucleotide: FAS-366
agccuagaaaaucaguu

SEQ ID NO: 8860 - RNA, 20 nt, Artificial Sequence
  Synthetic oligonucleotide: FAS-99
ucaacaaccaugcugggcau

SEQ ID NO: 8861 - RNA, 20 nt, Artificial Sequence
  Synthetic oligonucleotide: FAS-100
ucuggacccuccuaccucug

SEQ ID NO: 8862 - RNA, 17 nt, Artificial Sequence
  Synthetic oligonucleotide: FAS-101
acaaccaugcugggcau

SEQ ID NO: 8863 - RNA, 17 nt, Artificial Sequence
  Synthetic oligonucleotide: FAS-102
ggacccuccuaccucug

SEQ ID NO: 8864 - RNA, 20 nt, Artificial Sequence
  Synthetic oligonucleotide: FAS-103
ccgggcaggagagggcucac

SEQ ID NO: 8865 - RNA, 20 nt, Artificial Sequence
  Synthetic oligonucleotide: FAS-104
aggagagggcucaccagagg

SEQ ID NO: 8866 - RNA, 20 nt, Artificial Sequence
  Synthetic oligonucleotide: FAS-105
ggagagggcucaccagaggu

SEQ ID NO: 8867 - RNA, 20 nt, Artificial Sequence
  Synthetic oligonucleotide: FAS-106
agagggcucaccagagguag

SEQ ID NO: 8868 - RNA, 20 nt, Artificial Sequence
  Synthetic oligonucleotide: FAS-107
ccagaugcccagcaugguug

SEQ ID NO: 8869 - RNA, 20 nt, Artificial Sequence
  Synthetic oligonucleotide: FAS-108
cagaugcccagcaugguugu

SEQ ID NO: 8870 - RNA, 20 nt, Artificial Sequence
  Synthetic oligonucleotide: FAS-109
agaugcccagcaugguuguu

SEQ ID NO: 8871 - RNA, 20 nt, Artificial Sequence
  Synthetic oligonucleotide: FAS-110
gaugcccagcaugguuguug

SEQ ID NO: 8872 - RNA, 20 nt, Artificial Sequence
  Synthetic oligonucleotide: FAS-111
augcccagcaugguuguuga

SEQ ID NO: 8873 - RNA, 20 nt, Artificial Sequence
  Synthetic oligonucleotide: FAS-112
ugcccagcaugguuguugag

SEQ ID NO: 8874 - RNA, 17 nt, Artificial Sequence
  Synthetic oligonucleotide: FAS-113
ggcaggagagggcucac

SEQ ID NO: 8875 - RNA, 17 nt, Artificial Sequence
  Synthetic oligonucleotide: FAS-114
agagggcucaccagagg

SEQ ID NO: 8876 - RNA, 17 nt, Artificial Sequence
  Synthetic oligonucleotide: FAS-115
gagggcucaccagaggu

SEQ ID NO: 8877 - RNA, 17 nt, Artificial Sequence
  Synthetic oligonucleotide: FAS-116
gggcucaccagagguag

SEQ ID NO: 8878 - RNA, 17 nt, Artificial Sequence
  Synthetic oligonucleotide: FAS-117
gaugcccagcaugguug

SEQ ID NO: 8879 - RNA, 17 nt, Artificial Sequence
  Synthetic oligonucleotide: FAS-118
augcccagcaugguugu

SEQ ID NO: 8880 - RNA, 17 nt, Artificial Sequence
  Synthetic oligonucleotide: FAS-119
ugcccagcaugguuguu

SEQ ID NO: 8881 - RNA, 17 nt, Artificial Sequence
  Synthetic oligonucleotide: FAS-120
gcccagcaugguuguug

SEQ ID NO: 8882 - RNA, 17 nt, Artificial Sequence
  Synthetic oligonucleotide: FAS-121
cccagcaugguuguuga

SEQ ID NO: 8883 - RNA, 17 nt, Artificial Sequence
  Synthetic oligonucleotide: FAS-122
ccagcaugguuguugag

SEQ ID NO: 8884 - RNA, 20 nt, Artificial Sequence
  Synthetic oligonucleotide: FAS-123
aagugacugacaucaacucc

SEQ ID NO: 8885 - RNA, 20 nt, Artificial Sequence
  Synthetic oligonucleotide: FAS-12
agugacugacaucaacucca

SEQ ID NO: 8886 - RNA, 20 nt, Artificial Sequence
  Synthetic oligonucleotide: FAS-125
cugacaucaacuccaaggga

SEQ ID NO: 8887 - RNA, 20 nt, Artificial Sequence
  Synthetic oligonucleotide: FAS-14
ugacaucaacuccaagggau

SEQ ID NO: 8888 - RNA, 20 nt, Artificial Sequence
  Synthetic oligonucleotide: FAS-127
ucaacuccaagggauuggaa

SEQ ID NO: 8889 - RNA, 20 nt, Artificial Sequence
  Synthetic oligonucleotide: FAS-128
aacuccaagggauuggaauu

SEQ ID NO: 8890 - RNA, 20 nt, Artificial Sequence
  Synthetic oligonucleotide: FAS-15
acuccaagggauuggaauug

SEQ ID NO: 8891 - RNA, 20 nt, Artificial Sequence
  Synthetic oligonucleotide: FAS-130
gaggaagacuguuacuacag

SEQ ID NO: 8892 - RNA, 20 nt, Artificial Sequence
  Synthetic oligonucleotide: FAS-131
cuguuacuacaguugagacu

SEQ ID NO: 8893 - RNA, 20 nt, Artificial Sequence
  Synthetic oligonucleotide: FAS-132
cuacaguugagacucagaac

SEQ ID NO: 8894 - RNA, 20 nt, Artificial Sequence
  Synthetic oligonucleotide: FAS-16
uacaguugagacucagaacu

SEQ ID NO: 8895 - RNA, 20 nt, Artificial Sequence
  Synthetic oligonucleotide: FAS-134
gguauguuacacaaaacauc

SEQ ID NO: 8896 - RNA, 17 nt, Artificial Sequence
  Synthetic oligonucleotide: FAS-135
ugacugacaucaacucc

SEQ ID NO: 8897 - RNA, 17 nt, Artificial Sequence
  Synthetic oligonucleotide: FAS-32
gacugacaucaacucca

SEQ ID NO: 8898 - RNA, 17 nt, Artificial Sequence
  Synthetic oligonucleotide: FAS-137
acaucaacuccaaggga

SEQ ID NO: 8899 - RNA, 17 nt, Artificial Sequence
  Synthetic oligonucleotide: FAS-34
caucaacuccaagggau

SEQ ID NO: 8900 - RNA, 17 nt, Artificial Sequence
  Synthetic oligonucleotide: FAS-139
acuccaagggauuggaa

SEQ ID NO: 8901 - RNA, 17 nt, Artificial Sequence
  Synthetic oligonucleotide: FAS-140
uccaagggauuggaauu

SEQ ID NO: 8902 - RNA, 17 nt, Artificial Sequence
  Synthetic oligonucleotide: FAS-35
ccaagggauuggaauug

SEQ ID NO: 8903 - RNA, 17 nt, Artificial Sequence
  Synthetic oligonucleotide: FAS-142
gaagacuguuacuacag

SEQ ID NO: 8904 - RNA, 17 nt, Artificial Sequence
  Synthetic oligonucleotide: FAS-143
uuacuacaguugagacu

SEQ ID NO: 8905 - RNA, 17 nt, Artificial Sequence
  Synthetic oligonucleotide: FAS-144
caguugagacucagaac

SEQ ID NO: 8906 - RNA, 17 nt, Artificial Sequence
  Synthetic oligonucleotide: FAS-36
aguugagacucagaacu

SEQ ID NO: 8907 - RNA, 17 nt, Artificial Sequence
  Synthetic oligonucleotide: FAS-146
auguuacacaaaacauc

SEQ ID NO: 8908 - RNA, 20 nt, Artificial Sequence
  Synthetic oligonucleotide: FAS-147
ggauguuuuguguaacauac

SEQ ID NO: 8909 - RNA, 20 nt, Artificial Sequence
  Synthetic oligonucleotide: FAS-20
gauguuuuguguaacauacc

SEQ ID NO: 8910 - RNA, 20 nt, Artificial Sequence
  Synthetic oligonucleotide: FAS-149
uguuuuguguaacauaccug

SEQ ID NO: 8911 - RNA, 20 nt, Artificial Sequence
  Synthetic oligonucleotide: FAS-150
uguguaacauaccuggagga

SEQ ID NO: 8912 - RNA, 20 nt, Artificial Sequence
  Synthetic oligonucleotide: FAS-151
cuggaggacagggcuuaugg

SEQ ID NO: 8913 - RNA, 20 nt, Artificial Sequence
  Synthetic oligonucleotide: FAS-152
ugaugcaggccuuccaaguu

SEQ ID NO: 8914 - RNA, 20 nt, Artificial Sequence
  Synthetic oligonucleotide: FAS-153
ucuuccucaauuccaauccc

SEQ ID NO: 8915 - RNA, 20 nt, Artificial Sequence
  Synthetic oligonucleotide: FAS-27
cuuccucaauuccaaucccu

SEQ ID NO: 8916 - RNA, 20 nt, Artificial Sequence
  Synthetic oligonucleotide: FAS-155
uuggaguugaugucagucac

SEQ ID NO: 8917 - RNA, 20 nt, Artificial Sequence
  Synthetic oligonucleotide: FAS-156
ucacuugggcauuaacacuu

SEQ ID NO: 8918 - RNA, 20 nt, Artificial Sequence
  Synthetic oligonucleotide: FAS-157
gauaaucuagcaacagacgu

SEQ ID NO: 8919 - RNA, 20 nt, Artificial Sequence
  Synthetic oligonucleotide: FAS-158
agaaccuguaaaauaaaagc

SEQ ID NO: 8920 - RNA, 20 nt, Artificial Sequence
  Synthetic oligonucleotide: FAS-159
accuguaaaauaaaagcaug

SEQ ID NO: 8921 - RNA, 20 nt, Artificial Sequence
  Synthetic oligonucleotide: FAS-160
cuguaaaauaaaagcaugaa

SEQ ID NO: 8922 - RNA, 17 nt, Artificial Sequence
  Synthetic oligonucleotide: FAS-161
uguuuuguguaacauac

SEQ ID NO: 8923 - RNA, 17 nt, Artificial Sequence
  Synthetic oligonucleotide: FAS-40
guuuuguguaacauacc

SEQ ID NO: 8924 - RNA, 17 nt, Artificial Sequence
  Synthetic oligonucleotide: FAS-163
uuuguguaacauaccug

SEQ ID NO: 8925 - RNA, 17 nt, Artificial Sequence
  Synthetic oligonucleotide: FAS-164
guaacauaccuggagga

SEQ ID NO: 8926 - RNA, 17 nt, Artificial Sequence
  Synthetic oligonucleotide: FAS-165
gaggacagggcuuaugg

SEQ ID NO: 8927 - RNA, 17 nt, Artificial Sequence
  Synthetic oligonucleotide: FAS-166
ugcaggccuuccaaguu

SEQ ID NO: 8928 - RNA, 17 nt, Artificial Sequence
  Synthetic oligonucleotide: FAS-167
uccucaauuccaauccc

SEQ ID NO: 8929 - RNA, 17 nt, Artificial Sequence
  Synthetic oligonucleotide: FAS-47
ccucaauuccaaucccu

SEQ ID NO: 8930 - RNA, 17 nt, Artificial Sequence
  Synthetic oligonucleotide: FAS-169
gaguugaugucagucac

SEQ ID NO: 8931 - RNA, 17 nt, Artificial Sequence
  Synthetic oligonucleotide: FAS-170
cuugggcauuaacacuu

SEQ ID NO: 8932 - RNA, 17 nt, Artificial Sequence
  Synthetic oligonucleotide: FAS-171
aaucuagcaacagacgu

SEQ ID NO: 8933 - RNA, 17 nt, Artificial Sequence
  Synthetic oligonucleotide: FAS-172
accuguaaaauaaaagc

SEQ ID NO: 8934 - RNA, 17 nt, Artificial Sequence
  Synthetic oligonucleotide: FAS-173
uguaaaauaaaagcaug

SEQ ID NO: 8935 - RNA, 17 nt, Artificial Sequence
  Synthetic oligonucleotide: FAS-174
uaaaauaaaagcaugaa

SEQ ID NO: 8936 - RNA, 20 nt, Artificial Sequence
  Synthetic oligonucleotide: FAS-175
aacacuugcuccuuuuuucc

SEQ ID NO: 8937 - RNA, 20 nt, Artificial Sequence
  Synthetic oligonucleotide: FAS-176
cuccuuuuuuccuugggcag

SEQ ID NO: 8938 - RNA, 20 nt, Artificial Sequence
  Synthetic oligonucleotide: FAS-177
uuuuuuccuugggcagguga

SEQ ID NO: 8939 - RNA, 20 nt, Artificial Sequence
  Synthetic oligonucleotide: FAS-54
uuuuuccuugggcaggugaa

SEQ ID NO: 8940 - RNA, 20 nt, Artificial Sequence
  Synthetic oligonucleotide: FAS-179
ugggcaggugaaaggaaagc

SEQ ID NO: 8941 - RNA, 20 nt, Artificial Sequence
  Synthetic oligonucleotide: FAS-55
gggcaggugaaaggaaagcu

SEQ ID NO: 8942 - RNA, 20 nt, Artificial Sequence
  Synthetic oligonucleotide: FAS-181
agcuagggacugcacaguca

SEQ ID NO: 8943 - RNA, 20 nt, Artificial Sequence
  Synthetic oligonucleotide: FAS-57
gcuagggacugcacagucaa

SEQ ID NO: 8944 - RNA, 20 nt, Artificial Sequence
  Synthetic oligonucleotide: FAS-58
cuagggacugcacagucaau

SEQ ID NO: 8945 - RNA, 20 nt, Artificial Sequence
  Synthetic oligonucleotide: FAS-184
ggacugcacagucaaugggg

SEQ ID NO: 8946 - RNA, 20 nt, Artificial Sequence
  Synthetic oligonucleotide: FAS-185
accagacugcgugcccugcc

SEQ ID NO: 8947 - RNA, 20 nt, Artificial Sequence
  Synthetic oligonucleotide: FAS-186
agacugcgugcccugccaag

SEQ ID NO: 8948 - RNA, 20 nt, Artificial Sequence
  Synthetic oligonucleotide: FAS-60
gacugcgugcccugccaaga

SEQ ID NO: 8949 - RNA, 20 nt, Artificial Sequence
  Synthetic oligonucleotide: FAS-61
acugcgugcccugccaagaa

SEQ ID NO: 8950 - RNA, 20 nt, Artificial Sequence
  Synthetic oligonucleotide: FAS-189
gcgugcccugccaagaaggg

SEQ ID NO: 8951 - RNA, 20 nt, Artificial Sequence
  Synthetic oligonucleotide: FAS-62
cgugcccugccaagaaggga

SEQ ID NO: 8952 - RNA, 20 nt, Artificial Sequence
  Synthetic oligonucleotide: FAS-191
gcccauuuuucuuccaaaug

SEQ ID NO: 8953 - RNA, 20 nt, Artificial Sequence
  Synthetic oligonucleotide: FAS-192
cagaagauguagauugugug

SEQ ID NO: 8954 - RNA, 20 nt, Artificial Sequence
  Synthetic oligonucleotide: FAS-193
aagauguagauugugugaug

SEQ ID NO: 8955 - RNA, 20 nt, Artificial Sequence
  Synthetic oligonucleotide: FAS-194
ugugugaugaaggacauggu

SEQ ID NO: 8956 - RNA, 20 nt, Artificial Sequence
  Synthetic oligonucleotide: FAS-195
guaagagucuuaaaaugcaa

SEQ ID NO: 8957 - RNA, 20 nt, Artificial Sequence
  Synthetic oligonucleotide: FAS-196
gagucuuaaaaugcaauuga

SEQ ID NO: 8958 - RNA, 17 nt, Artificial Sequence
  Synthetic oligonucleotide: FAS-197
acuugcuccuuuuuucc

SEQ ID NO: 8959 - RNA, 17 nt, Artificial Sequence
  Synthetic oligonucleotide: FAS-198
cuuuuuuccuugggcag

SEQ ID NO: 8960 - RNA, 17 nt, Artificial Sequence
  Synthetic oligonucleotide: FAS-199
uuuccuugggcagguga

SEQ ID NO: 8961 - RNA, 17 nt, Artificial Sequence
  Synthetic oligonucleotide: FAS-78
uuccuugggcaggugaa

SEQ ID NO: 8962 - RNA, 17 nt, Artificial Sequence
  Synthetic oligonucleotide: FAS-201
gcaggugaaaggaaagc

SEQ ID NO: 8963 - RNA, 17 nt, Artificial Sequence
  Synthetic oligonucleotide: FAS-79
caggugaaaggaaagcu

SEQ ID NO: 8964 - RNA, 17 nt, Artificial Sequence
  Synthetic oligonucleotide: FAS-203
uagggacugcacaguca

SEQ ID NO: 8965 - RNA, 17 nt, Artificial Sequence
  Synthetic oligonucleotide: FAS-81
agggacugcacagucaa

SEQ ID NO: 8966 - RNA, 17 nt, Artificial Sequence
  Synthetic oligonucleotide: FAS-82
gggacugcacagucaau

SEQ ID NO: 8967 - RNA, 17 nt, Artificial Sequence
  Synthetic oligonucleotide: FAS-206
cugcacagucaaugggg

SEQ ID NO: 8968 - RNA, 17 nt, Artificial Sequence
  Synthetic oligonucleotide: FAS-207
agacugcgugcccugcc

SEQ ID NO: 8969 - RNA, 17 nt, Artificial Sequence
  Synthetic oligonucleotide: FAS-208
cugcgugcccugccaag

SEQ ID NO: 8970 - RNA, 17 nt, Artificial Sequence
  Synthetic oligonucleotide: FAS-84
ugcgugcccugccaaga

SEQ ID NO: 8971 - RNA, 17 nt, Artificial Sequence
  Synthetic oligonucleotide: FAS-85
gcgugcccugccaagaa

SEQ ID NO: 8972 - RNA, 17 nt, Artificial Sequence
  Synthetic oligonucleotide: FAS-211
ugcccugccaagaaggg

SEQ ID NO: 8973 - RNA, 17 nt, Artificial Sequence
  Synthetic oligonucleotide: FAS-86
gcccugccaagaaggga

SEQ ID NO: 8974 - RNA, 17 nt, Artificial Sequence
  Synthetic oligonucleotide: FAS-213
cauuuuucuuccaaaug

SEQ ID NO: 8975 - RNA, 17 nt, Artificial Sequence
  Synthetic oligonucleotide: FAS-214
aagauguagauugugug

SEQ ID NO: 8976 - RNA, 17 nt, Artificial Sequence
  Synthetic oligonucleotide: FAS-215
auguagauugugugaug

SEQ ID NO: 8977 - RNA, 17 nt, Artificial Sequence
  Synthetic oligonucleotide: FAS-216
gugaugaaggacauggu

SEQ ID NO: 8978 - RNA, 17 nt, Artificial Sequence
  Synthetic oligonucleotide: FAS-217
agagucuuaaaaugcaa

SEQ ID NO: 8979 - RNA, 17 nt, Artificial Sequence
  Synthetic oligonucleotide: FAS-218
ucuuaaaaugcaauuga

SEQ ID NO: 8980 - RNA, 20 nt, Artificial Sequence
  Synthetic oligonucleotide: FAS-219
acaaucuacaucuucugcau

SEQ ID NO: 8981 - RNA, 20 nt, Artificial Sequence
  Synthetic oligonucleotide: FAS-66
caaucuacaucuucugcauu

SEQ ID NO: 8982 - RNA, 20 nt, Artificial Sequence
  Synthetic oligonucleotide: FAS-221
ucuacaucuucugcauuugg

SEQ ID NO: 8983 - RNA, 20 nt, Artificial Sequence
  Synthetic oligonucleotide: FAS-222
cuucugcauuuggaagaaaa

SEQ ID NO: 8984 - RNA, 20 nt, Artificial Sequence
  Synthetic oligonucleotide: FAS-223
uguacuccuucccuucuugg

SEQ ID NO: 8985 - RNA, 20 nt, Artificial Sequence
  Synthetic oligonucleotide: FAS-224
agcuuuccuuucaccugccc

SEQ ID NO: 8986 - RNA, 20 nt, Artificial Sequence
  Synthetic oligonucleotide: FAS-73
gcuuuccuuucaccugccca

SEQ ID NO: 8987 - RNA, 20 nt, Artificial Sequence
  Synthetic oligonucleotide: FAS-226
uuucaccugcccaaggaaaa

SEQ ID NO: 8988 - RNA, 20 nt, Artificial Sequence
  Synthetic oligonucleotide: FAS-74
uucaccugcccaaggaaaaa

SEQ ID NO: 8989 - RNA, 17 nt, Artificial Sequence
  Synthetic oligonucleotide: FAS-228
aucuacaucuucugcau

SEQ ID NO: 8990 - RNA, 17 nt, Artificial Sequence
  Synthetic oligonucleotide: FAS-90
ucuacaucuucugcauu

SEQ ID NO: 8991 - RNA, 17 nt, Artificial Sequence
  Synthetic oligonucleotide: FAS-230
acaucuucugcauuugg

SEQ ID NO: 8992 - RNA, 17 nt, Artificial Sequence
  Synthetic oligonucleotide: FAS-231
cugcauuuggaagaaaa

SEQ ID NO: 8993 - RNA, 17 nt, Artificial Sequence
  Synthetic oligonucleotide: FAS-232
acuccuucccuucuugg

SEQ ID NO: 8994 - RNA, 17 nt, Artificial Sequence
  Synthetic oligonucleotide: FAS-233
uuuccuuucaccugccc

SEQ ID NO: 8995 - RNA, 17 nt, Artificial Sequence
  Synthetic oligonucleotide: FAS-97
uuccuuucaccugccca

SEQ ID NO: 8996 - RNA, 17 nt, Artificial Sequence
  Synthetic oligonucleotide: FAS-235
caccugcccaaggaaaa

SEQ ID NO: 8997 - RNA, 17 nt, Artificial Sequence
  Synthetic oligonucleotide: FAS-98
accugcccaaggaaaaa

SEQ ID NO: 8998 - RNA, 20 nt, Artificial Sequence
  Synthetic oligonucleotide: FAS-367
ccaaacugauuuucuaggcu

SEQ ID NO: 8999 - RNA, 20 nt, Artificial Sequence
  Synthetic oligonucleotide: FAS-368
cugauuuucuaggcuuagaa

SEQ ID NO: 9000 - RNA, 20 nt, Artificial Sequence
  Synthetic oligonucleotide: FAS-246
ugauuuucuaggcuuagaag

SEQ ID NO: 9001 - RNA, 20 nt, Artificial Sequence
  Synthetic oligonucleotide: FAS-370
gaaguggaaauaaacugcac

SEQ ID NO: 9002 - RNA, 20 nt, Artificial Sequence
  Synthetic oligonucleotide: FAS-371
aaauaaacugcacccggacc

SEQ ID NO: 9003 - RNA, 20 nt, Artificial Sequence
  Synthetic oligonucleotide: FAS-372
uuuuuguaacucuacuguau

SEQ ID NO: 9004 - RNA, 20 nt, Artificial Sequence
  Synthetic oligonucleotide: FAS-373
cuguauuuuuuuuucuagau

SEQ ID NO: 9005 - RNA, 20 nt, Artificial Sequence
  Synthetic oligonucleotide: FAS-374
uuuuuuuucuagaugugaac

SEQ ID NO: 9006 - RNA, 20 nt, Artificial Sequence
  Synthetic oligonucleotide: FAS-248
uuuuuuucuagaugugaaca

SEQ ID NO: 9007 - RNA, 20 nt, Artificial Sequence
  Synthetic oligonucleotide: FAS-376
gaugugaacauggaaucauc

SEQ ID NO: 9008 - RNA, 20 nt, Artificial Sequence
  Synthetic oligonucleotide: FAS-249
augugaacauggaaucauca

SEQ ID NO: 9009 - RNA, 20 nt, Artificial Sequence
  Synthetic oligonucleotide: FAS-378
caccagcaacaccaagugca

SEQ ID NO: 9010 - RNA, 20 nt, Artificial Sequence
  Synthetic oligonucleotide: FAS-379
ccagcaacaccaagugcaaa

SEQ ID NO: 9011 - RNA, 20 nt, Artificial Sequence
  Synthetic oligonucleotide: FAS-250
cagcaacaccaagugcaaag

SEQ ID NO: 9012 - RNA, 20 nt, Artificial Sequence
  Synthetic oligonucleotide: FAS-381
auguccaauguuccaaccua

SEQ ID NO: 9013 - RNA, 20 nt, Artificial Sequence
  Synthetic oligonucleotide: FAS-382
cuacaggauccagaucuaac

SEQ ID NO: 9014 - RNA, 20 nt, Artificial Sequence
  Synthetic oligonucleotide: FAS-254
uacaggauccagaucuaacu

SEQ ID NO: 9015 - RNA, 20 nt, Artificial Sequence
  Synthetic oligonucleotide: FAS-384
uugccaauuccacuaauugu

SEQ ID NO: 9016 - RNA, 20 nt, Artificial Sequence
  Synthetic oligonucleotide: FAS-258
ugccaauuccacuaauuguu

SEQ ID NO: 9017 - RNA, 20 nt, Artificial Sequence
  Synthetic oligonucleotide: FAS-386
aaaauuucuuuguucuuuca

SEQ ID NO: 9018 - RNA, 20 nt, Artificial Sequence
  Synthetic oligonucleotide: FAS-387
auuucuuuguucuuucagug

SEQ ID NO: 9019 - RNA, 20 nt, Artificial Sequence
  Synthetic oligonucleotide: FAS-388
uucuuuguucuuucagugaa

SEQ ID NO: 9020 - RNA, 20 nt, Artificial Sequence
  Synthetic oligonucleotide: FAS-389
uuguucuuucagugaagaga

SEQ ID NO: 9021 - RNA, 20 nt, Artificial Sequence
  Synthetic oligonucleotide: FAS-261
uguucuuucagugaagagaa

SEQ ID NO: 9022 - RNA, 20 nt, Artificial Sequence
  Synthetic oligonucleotide: FAS-391
cagugaagagaaaggaagua

SEQ ID NO: 9023 - RNA, 20 nt, Artificial Sequence
  Synthetic oligonucleotide: FAS-392
aaggaaguacagaaaacaug

SEQ ID NO: 9024 - RNA, 20 nt, Artificial Sequence
  Synthetic oligonucleotide: FAS-393
cagaaaacaugcagaaagca

SEQ ID NO: 9025 - RNA, 20 nt, Artificial Sequence
  Synthetic oligonucleotide: FAS-394
aaacaugcagaaagcacaga

SEQ ID NO: 9026 - RNA, 20 nt, Artificial Sequence
  Synthetic oligonucleotide: FAS-262
aacaugcagaaagcacagaa

SEQ ID NO: 9027 - RNA, 20 nt, Artificial Sequence
  Synthetic oligonucleotide: FAS-396
aaaggaaaaccaagguucuc

SEQ ID NO: 9028 - RNA, 20 nt, Artificial Sequence
  Synthetic oligonucleotide: FAS-397
aacuuuaaauccuguaggua

SEQ ID NO: 9029 - RNA, 20 nt, Artificial Sequence
  Synthetic oligonucleotide: FAS-398
ugcuuccauuuuuugcuuuc

SEQ ID NO: 9030 - RNA, 20 nt, Artificial Sequence
  Synthetic oligonucleotide: FAS-266
gcuuccauuuuuugcuuucu

SEQ ID NO: 9031 - RNA, 20 nt, Artificial Sequence
  Synthetic oligonucleotide: FAS-400
gcuuuuaucauuuuauuuca

SEQ ID NO: 9032 - RNA, 20 nt, Artificial Sequence
  Synthetic oligonucleotide: FAS-401
ucuauuuuucagauguugac

SEQ ID NO: 9033 - RNA, 20 nt, Artificial Sequence
  Synthetic oligonucleotide: FAS-402
uaaauauaucaccacuauug

SEQ ID NO: 9034 - RNA, 20 nt, Artificial Sequence
  Synthetic oligonucleotide: FAS-270
aaauauaucaccacuauugc

SEQ ID NO: 9035 - RNA, 20 nt, Artificial Sequence
  Synthetic oligonucleotide: FAS-404
agucaaguuaaaggcuuugu

SEQ ID NO: 9036 - RNA, 20 nt, Artificial Sequence
  Synthetic oligonucleotide: FAS-405
aaguuaaaggcuuuguucga

SEQ ID NO: 9037 - RNA, 20 nt, Artificial Sequence
  Synthetic oligonucleotide: FAS-406
uguucgaaagaaugguguca

SEQ ID NO: 9038 - RNA, 20 nt, Artificial Sequence
  Synthetic oligonucleotide: FAS-407
ugucaaugaagccaaaauag

SEQ ID NO: 9039 - RNA, 20 nt, Artificial Sequence
  Synthetic oligonucleotide: FAS-408
aagccaaaauagaugagauc

SEQ ID NO: 9040 - RNA, 20 nt, Artificial Sequence
  Synthetic oligonucleotide: FAS-409
ugacaauguccaagacacag

SEQ ID NO: 9041 - RNA, 20 nt, Artificial Sequence
  Synthetic oligonucleotide: FAS-410
auguccaagacacagcagaa

SEQ ID NO: 9042 - RNA, 20 nt, Artificial Sequence
  Synthetic oligonucleotide: FAS-411
ucguaauuggcaucaacuuc

SEQ ID NO: 9043 - RNA, 20 nt, Artificial Sequence
  Synthetic oligonucleotide: FAS-274
cguaauuggcaucaacuuca

SEQ ID NO: 9044 - RNA, 20 nt, Artificial Sequence
  Synthetic oligonucleotide: FAS-413
auuggcaucaacuucaugga

SEQ ID NO: 9045 - RNA, 20 nt, Artificial Sequence
  Synthetic oligonucleotide: FAS-414
gcaucaacuucauggaaaga

SEQ ID NO: 9046 - RNA, 20 nt, Artificial Sequence
  Synthetic oligonucleotide: FAS-415
agccaaucuuuguacucuug

SEQ ID NO: 9047 - RNA, 20 nt, Artificial Sequence
  Synthetic oligonucleotide: FAS-416
ccaaucuuuguacucuugca

SEQ ID NO: 9048 - RNA, 20 nt, Artificial Sequence
  Synthetic oligonucleotide: FAS-417
aaauucagacuaucauccuc

SEQ ID NO: 9049 - RNA, 20 nt, Artificial Sequence
  Synthetic oligonucleotide: FAS-418
caaggacauuacuagugacu

SEQ ID NO: 9050 - RNA, 20 nt, Artificial Sequence
  Synthetic oligonucleotide: FAS-419
gacucagaaaauucaaacuu

SEQ ID NO: 9051 - RNA, 20 nt, Artificial Sequence
  Synthetic oligonucleotide: FAS-420
agaaaauucaaacuucagaa

SEQ ID NO: 9052 - RNA, 20 nt, Artificial Sequence
  Synthetic oligonucleotide: FAS-421
augaaauccaaagcuugguc

SEQ ID NO: 9053 - RNA, 20 nt, Artificial Sequence
  Synthetic oligonucleotide: FAS-422
aauccaaagcuuggucuaga

SEQ ID NO: 9054 - RNA, 20 nt, Artificial Sequence
  Synthetic oligonucleotide: FAS-423
gaaaaacaacaaauucaguu

SEQ ID NO: 9055 - RNA, 17 nt, Artificial Sequence
  Synthetic oligonucleotide: FAS-424
aacugauuuucuaggcu

SEQ ID NO: 9056 - RNA, 17 nt, Artificial Sequence
  Synthetic oligonucleotide: FAS-425
auuuucuaggcuuagaa

SEQ ID NO: 9057 - RNA, 17 nt, Artificial Sequence
  Synthetic oligonucleotide: FAS-278
uuuucuaggcuuagaag

SEQ ID NO: 9058 - RNA, 17 nt, Artificial Sequence
  Synthetic oligonucleotide: FAS-427
guggaaauaaacugcac

SEQ ID NO: 9059 - RNA, 17 nt, Artificial Sequence
  Synthetic oligonucleotide: FAS-428
uaaacugcacccggacc

SEQ ID NO: 9060 - RNA, 17 nt, Artificial Sequence
  Synthetic oligonucleotide: FAS-429
uuguaacucuacuguau

SEQ ID NO: 9061 - RNA, 17 nt, Artificial Sequence
  Synthetic oligonucleotide: FAS-430
uauuuuuuuuucuagau

SEQ ID NO: 9062 - RNA, 17 nt, Artificial Sequence
  Synthetic oligonucleotide: FAS-431
uuuuucuagaugugaac

SEQ ID NO: 9063 - RNA, 17 nt, Artificial Sequence
  Synthetic oligonucleotide: FAS-280
uuuucuagaugugaaca

SEQ ID NO: 9064 - RNA, 17 nt, Artificial Sequence
  Synthetic oligonucleotide: FAS-433
gugaacauggaaucauc

SEQ ID NO: 9065 - RNA, 17 nt, Artificial Sequence
  Synthetic oligonucleotide: FAS-281
ugaacauggaaucauca

SEQ ID NO: 9066 - RNA, 17 nt, Artificial Sequence
  Synthetic oligonucleotide: FAS-435
cagcaacaccaagugca

SEQ ID NO: 9067 - RNA, 17 nt, Artificial Sequence
  Synthetic oligonucleotide: FAS-436
gcaacaccaagugcaaa

SEQ ID NO: 9068 - RNA, 17 nt, Artificial Sequence
  Synthetic oligonucleotide: FAS-282
caacaccaagugcaaag

SEQ ID NO: 9069 - RNA, 17 nt, Artificial Sequence
  Synthetic oligonucleotide: FAS-438
uccaauguuccaaccua

SEQ ID NO: 9070 - RNA, 17 nt, Artificial Sequence
  Synthetic oligonucleotide: FAS-439
caggauccagaucuaac

SEQ ID NO: 9071 - RNA, 17 nt, Artificial Sequence
  Synthetic oligonucleotide: FAS-286
aggauccagaucuaacu

SEQ ID NO: 9072 - RNA, 17 nt, Artificial Sequence
  Synthetic oligonucleotide: FAS-441
ccaauuccacuaauugu

SEQ ID NO: 9073 - RNA, 17 nt, Artificial Sequence
  Synthetic oligonucleotide: FAS-290
caauuccacuaauuguu

SEQ ID NO: 9074 - RNA, 17 nt, Artificial Sequence
  Synthetic oligonucleotide: FAS-443
auuucuuuguucuuuca

SEQ ID NO: 9075 - RNA, 17 nt, Artificial Sequence
  Synthetic oligonucleotide: FAS-444
ucuuuguucuuucagug

SEQ ID NO: 9076 - RNA, 17 nt, Artificial Sequence
  Synthetic oligonucleotide: FAS-445
uuuguucuuucagugaa

SEQ ID NO: 9077 - RNA, 17 nt, Artificial Sequence
  Synthetic oligonucleotide: FAS-446
uucuuucagugaagaga

SEQ ID NO: 9078 - RNA, 17 nt, Artificial Sequence
  Synthetic oligonucleotide: FAS-293
ucuuucagugaagagaa

SEQ ID NO: 9079 - RNA, 17 nt, Artificial Sequence
  Synthetic oligonucleotide: FAS-448
ugaagagaaaggaagua

SEQ ID NO: 9080 - RNA, 17 nt, Artificial Sequence
  Synthetic oligonucleotide: FAS-449
gaaguacagaaaacaug

SEQ ID NO: 9081 - RNA, 17 nt, Artificial Sequence
  Synthetic oligonucleotide: FAS-450
aaaacaugcagaaagca

SEQ ID NO: 9082 - RNA, 17 nt, Artificial Sequence
  Synthetic oligonucleotide: FAS-451
caugcagaaagcacaga

SEQ ID NO: 9083 - RNA, 17 nt, Artificial Sequence
  Synthetic oligonucleotide: FAS-294
augcagaaagcacagaa

SEQ ID NO: 9084 - RNA, 17 nt, Artificial Sequence
  Synthetic oligonucleotide: FAS-453
ggaaaaccaagguucuc

SEQ ID NO: 9085 - RNA, 17 nt, Artificial Sequence
  Synthetic oligonucleotide: FAS-454
uuuaaauccuguaggua

SEQ ID NO: 9086 - RNA, 17 nt, Artificial Sequence
  Synthetic oligonucleotide: FAS-455
uuccauuuuuugcuuuc

SEQ ID NO: 9087 - RNA, 17 nt, Artificial Sequence
  Synthetic oligonucleotide: FAS-298
uccauuuuuugcuuucu

SEQ ID NO: 9088 - RNA, 17 nt, Artificial Sequence
  Synthetic oligonucleotide: FAS-457
uuuaucauuuuauuuca

SEQ ID NO: 9089 - RNA, 17 nt, Artificial Sequence
  Synthetic oligonucleotide: FAS-458
auuuuucagauguugac

SEQ ID NO: 9090 - RNA, 17 nt, Artificial Sequence
  Synthetic oligonucleotide: FAS-459
auauaucaccacuauug

SEQ ID NO: 9091 - RNA, 17 nt, Artificial Sequence
  Synthetic oligonucleotide: FAS-302
uauaucaccacuauugc

SEQ ID NO: 9092 - RNA, 17 nt, Artificial Sequence
  Synthetic oligonucleotide: FAS-461
caaguuaaaggcuuugu

SEQ ID NO: 9093 - RNA, 17 nt, Artificial Sequence
  Synthetic oligonucleotide: FAS-462
uuaaaggcuuuguucga

SEQ ID NO: 9094 - RNA, 17 nt, Artificial Sequence
  Synthetic oligonucleotide: FAS-463
ucgaaagaaugguguca

SEQ ID NO: 9095 - RNA, 17 nt, Artificial Sequence
  Synthetic oligonucleotide: FAS-464
caaugaagccaaaauag

SEQ ID NO: 9096 - RNA, 17 nt, Artificial Sequence
  Synthetic oligonucleotide: FAS-465
ccaaaauagaugagauc

SEQ ID NO: 9097 - RNA, 17 nt, Artificial Sequence
  Synthetic oligonucleotide: FAS-466
caauguccaagacacag

SEQ ID NO: 9098 - RNA, 17 nt, Artificial Sequence
  Synthetic oligonucleotide: FAS-467
uccaagacacagcagaa

SEQ ID NO: 9099 - RNA, 17 nt, Artificial Sequence
  Synthetic oligonucleotide: FAS-468
uaauuggcaucaacuuc

SEQ ID NO: 9100 - RNA, 17 nt, Artificial Sequence
  Synthetic oligonucleotide: FAS-306
aauuggcaucaacuuca

SEQ ID NO: 9101 - RNA, 17 nt, Artificial Sequence
  Synthetic oligonucleotide: FAS-470
ggcaucaacuucaugga

SEQ ID NO: 9102 - RNA, 17 nt, Artificial Sequence
  Synthetic oligonucleotide: FAS-471
ucaacuucauggaaaga

SEQ ID NO: 9103 - RNA, 17 nt, Artificial Sequence
  Synthetic oligonucleotide: FAS-472
caaucuuuguacucuug

SEQ ID NO: 9104 - RNA, 17 nt, Artificial Sequence
  Synthetic oligonucleotide: FAS-473
aucuuuguacucuugca

SEQ ID NO: 9105 - RNA, 17 nt, Artificial Sequence
  Synthetic oligonucleotide: FAS-474
uucagacuaucauccuc

SEQ ID NO: 9106 - RNA, 17 nt, Artificial Sequence
  Synthetic oligonucleotide: FAS-475
ggacauuacuagugacu

SEQ ID NO: 9107 - RNA, 17 nt, Artificial Sequence
  Synthetic oligonucleotide: FAS-476
ucagaaaauucaaacuu

SEQ ID NO: 9108 - RNA, 17 nt, Artificial Sequence
  Synthetic oligonucleotide: FAS-477
aaauucaaacuucagaa

SEQ ID NO: 9109 - RNA, 17 nt, Artificial Sequence
  Synthetic oligonucleotide: FAS-478
aaauccaaagcuugguc

SEQ ID NO: 9110 - RNA, 17 nt, Artificial Sequence
  Synthetic oligonucleotide: FAS-479
ccaaagcuuggucuaga

SEQ ID NO: 9111 - RNA, 17 nt, Artificial Sequence
  Synthetic oligonucleotide: FAS-480
aaacaacaaauucaguu

SEQ ID NO: 9112 - RNA, 20 nt, Artificial Sequence
  Synthetic oligonucleotide: FAS-481
uuuucacucuagaccaagcu

SEQ ID NO: 9113 - RNA, 20 nt, Artificial Sequence
  Synthetic oligonucleotide: FAS-482
ccaagcuuuggauuucauuu

SEQ ID NO: 9114 - RNA, 20 nt, Artificial Sequence
  Synthetic oligonucleotide: FAS-483
uuggauuucauuucugaagu

SEQ ID NO: 9115 - RNA, 20 nt, Artificial Sequence
  Synthetic oligonucleotide: FAS-484
auuucugaaguuugaauuuu

SEQ ID NO: 9116 - RNA, 20 nt, Artificial Sequence
  Synthetic oligonucleotide: FAS-485
cugagucacuaguaaugucc

SEQ ID NO: 9117 - RNA, 20 nt, Artificial Sequence
  Synthetic oligonucleotide: FAS-486
gagucacuaguaauguccuu

SEQ ID NO: 9118 - RNA, 20 nt, Artificial Sequence
  Synthetic oligonucleotide: FAS-487
auguccuugaggaugauagu

SEQ ID NO: 9119 - RNA, 20 nt, Artificial Sequence
  Synthetic oligonucleotide: FAS-488
auagucugaauuuucucugc

SEQ ID NO: 9120 - RNA, 20 nt, Artificial Sequence
  Synthetic oligonucleotide: FAS-489
gaguacaaagauuggcuuuu

SEQ ID NO: 9121 - RNA, 20 nt, Artificial Sequence
  Synthetic oligonucleotide: FAS-490
ucauacgcuucuuucuuucc

SEQ ID NO: 9122 - RNA, 20 nt, Artificial Sequence
  Synthetic oligonucleotide: FAS-491
ccaugaaguugaugccaauu

SEQ ID NO: 9123 - RNA, 20 nt, Artificial Sequence
  Synthetic oligonucleotide: FAS-492
ugaugccaauuacgaagcag

SEQ ID NO: 9124 - RNA, 20 nt, Artificial Sequence
  Synthetic oligonucleotide: FAS-493
acuuucuguucugcuguguc

SEQ ID NO: 9125 - RNA, 20 nt, Artificial Sequence
  Synthetic oligonucleotide: FAS-494
gcuucauugacaccauucuu

SEQ ID NO: 9126 - RNA, 20 nt, Artificial Sequence
  Synthetic oligonucleotide: FAS-495
auauuuacucaagucaacau

SEQ ID NO: 9127 - RNA, 20 nt, Artificial Sequence
  Synthetic oligonucleotide: FAS-496
ucaagucaacaucugaaaaa

SEQ ID NO: 9128 - RNA, 20 nt, Artificial Sequence
  Synthetic oligonucleotide: FAS-497
ucugaaaaauagaaaauagu

SEQ ID NO: 9129 - RNA, 20 nt, Artificial Sequence
  Synthetic oligonucleotide: FAS-498
aauuuauugccacuguuucc

SEQ ID NO: 9130 - RNA, 20 nt, Artificial Sequence
  Synthetic oligonucleotide: FAS-499
uguuuccuagaaagcaaaaa

SEQ ID NO: 9131 - RNA, 20 nt, Artificial Sequence
  Synthetic oligonucleotide: FAS-315
guuuccuagaaagcaaaaaa

SEQ ID NO: 9132 - RNA, 20 nt, Artificial Sequence
  Synthetic oligonucleotide: FAS-501
uagaaagcaaaaaauggaag

SEQ ID NO: 9133 - RNA, 20 nt, Artificial Sequence
  Synthetic oligonucleotide: FAS-502
gaaagcaaaaaauggaagca

SEQ ID NO: 9134 - RNA, 20 nt, Artificial Sequence
  Synthetic oligonucleotide: FAS-503
gauaccuauuucaauaccua

SEQ ID NO: 9135 - RNA, 20 nt, Artificial Sequence
  Synthetic oligonucleotide: FAS-504
aauaccuacaggauuuaaag

SEQ ID NO: 9136 - RNA, 20 nt, Artificial Sequence
  Synthetic oligonucleotide: FAS-317
auaccuacaggauuuaaagu

SEQ ID NO: 9137 - RNA, 20 nt, Artificial Sequence
  Synthetic oligonucleotide: FAS-506
ggauuuaaaguuggagauuc

SEQ ID NO: 9138 - RNA, 20 nt, Artificial Sequence
  Synthetic oligonucleotide: FAS-507
auuuaaaguuggagauucau

SEQ ID NO: 9139 - RNA, 20 nt, Artificial Sequence
  Synthetic oligonucleotide: FAS-508
cuguacuuccuuucucuuca

SEQ ID NO: 9140 - RNA, 20 nt, Artificial Sequence
  Synthetic oligonucleotide: FAS-509
acuuccuuucucuucacuga

SEQ ID NO: 9141 - RNA, 20 nt, Artificial Sequence
  Synthetic oligonucleotide: FAS-510
uucucuucacugaaagaaca

SEQ ID NO: 9142 - RNA, 20 nt, Artificial Sequence
  Synthetic oligonucleotide: FAS-511
aucugcaguuugaacaaagc

SEQ ID NO: 9143 - RNA, 20 nt, Artificial Sequence
  Synthetic oligonucleotide: FAS-512
gaacuuaccccaaacaauua

SEQ ID NO: 9144 - RNA, 20 nt, Artificial Sequence
  Synthetic oligonucleotide: FAS-319
aacuuaccccaaacaauuag

SEQ ID NO: 9145 - RNA, 20 nt, Artificial Sequence
  Synthetic oligonucleotide: FAS-514
acaauuaguggaauuggcaa

SEQ ID NO: 9146 - RNA, 20 nt, Artificial Sequence
  Synthetic oligonucleotide: FAS-515
auuaguggaauuggcaaaag

SEQ ID NO: 9147 - RNA, 20 nt, Artificial Sequence
  Synthetic oligonucleotide: FAS-516
aaagccaccccaaguuagau

SEQ ID NO: 9148 - RNA, 20 nt, Artificial Sequence
  Synthetic oligonucleotide: FAS-517
uuagaucuggauccuguagg

SEQ ID NO: 9149 - RNA, 20 nt, Artificial Sequence
  Synthetic oligonucleotide: FAS-323
uagaucuggauccuguaggu

SEQ ID NO: 9150 - RNA, 20 nt, Artificial Sequence
  Synthetic oligonucleotide: FAS-519
ggauccuguagguuggaaca

SEQ ID NO: 9151 - RNA, 20 nt, Artificial Sequence
  Synthetic oligonucleotide: FAS-520
cuuugcacuugguguugcug

SEQ ID NO: 9152 - RNA, 20 nt, Artificial Sequence
  Synthetic oligonucleotide: FAS-521
gaugauuccauguucacauc

SEQ ID NO: 9153 - RNA, 20 nt, Artificial Sequence
  Synthetic oligonucleotide: FAS-522
cacaucuagaaaaaaaaaua

SEQ ID NO: 9154 - RNA, 20 nt, Artificial Sequence
  Synthetic oligonucleotide: FAS-327
acaucuagaaaaaaaaauac

SEQ ID NO: 9155 - RNA, 20 nt, Artificial Sequence
  Synthetic oligonucleotide: FAS-524
aucuagaaaaaaaaauacag

SEQ ID NO: 9156 - RNA, 20 nt, Artificial Sequence
  Synthetic oligonucleotide: FAS-525
gacuaaaacuuacuuggugc

SEQ ID NO: 9157 - RNA, 20 nt, Artificial Sequence
  Synthetic oligonucleotide: FAS-526
gucacaguguucacauacag

SEQ ID NO: 9158 - RNA, 20 nt, Artificial Sequence
  Synthetic oligonucleotide: FAS-527
uuacaucugcacuugguauu

SEQ ID NO: 9159 - RNA, 20 nt, Artificial Sequence
  Synthetic oligonucleotide: FAS-528
cugcacuugguauucugggu

SEQ ID NO: 9160 - RNA, 20 nt, Artificial Sequence
  Synthetic oligonucleotide: FAS-529
uuuauuuccacuucuaagcc

SEQ ID NO: 9161 - RNA, 20 nt, Artificial Sequence
  Synthetic oligonucleotide: FAS-530
ucuaagccuagaaaaucagu

SEQ ID NO: 9162 - RNA, 20 nt, Artificial Sequence
  Synthetic oligonucleotide: FAS-337
cuaagccuagaaaaucaguu

SEQ ID NO: 9163 - RNA, 17 nt, Artificial Sequence
  Synthetic oligonucleotide: FAS-532
ucacucuagaccaagcu

SEQ ID NO: 9164 - RNA, 17 nt, Artificial Sequence
  Synthetic oligonucleotide: FAS-533
agcuuuggauuucauuu

SEQ ID NO: 9165 - RNA, 17 nt, Artificial Sequence
  Synthetic oligonucleotide: FAS-534
gauuucauuucugaagu

SEQ ID NO: 9166 - RNA, 17 nt, Artificial Sequence
  Synthetic oligonucleotide: FAS-535
ucugaaguuugaauuuu

SEQ ID NO: 9167 - RNA, 17 nt, Artificial Sequence
  Synthetic oligonucleotide: FAS-536
agucacuaguaaugucc

SEQ ID NO: 9168 - RNA, 17 nt, Artificial Sequence
  Synthetic oligonucleotide: FAS-537
ucacuaguaauguccuu

SEQ ID NO: 9169 - RNA, 17 nt, Artificial Sequence
  Synthetic oligonucleotide: FAS-538
uccuugaggaugauagu

SEQ ID NO: 9170 - RNA, 17 nt, Artificial Sequence
  Synthetic oligonucleotide: FAS-539
gucugaauuuucucugc

SEQ ID NO: 9171 - RNA, 17 nt, Artificial Sequence
  Synthetic oligonucleotide: FAS-540
uacaaagauuggcuuuu

SEQ ID NO: 9172 - RNA, 17 nt, Artificial Sequence
  Synthetic oligonucleotide: FAS-541
uacgcuucuuucuuucc

SEQ ID NO: 9173 - RNA, 17 nt, Artificial Sequence
  Synthetic oligonucleotide: FAS-542
ugaaguugaugccaauu

SEQ ID NO: 9174 - RNA, 17 nt, Artificial Sequence
  Synthetic oligonucleotide: FAS-543
ugccaauuacgaagcag

SEQ ID NO: 9175 - RNA, 17 nt, Artificial Sequence
  Synthetic oligonucleotide: FAS-544
uucuguucugcuguguc

SEQ ID NO: 9176 - RNA, 17 nt, Artificial Sequence
  Synthetic oligonucleotide: FAS-545
ucauugacaccauucuu

SEQ ID NO: 9177 - RNA, 17 nt, Artificial Sequence
  Synthetic oligonucleotide: FAS-546
uuuacucaagucaacau

SEQ ID NO: 9178 - RNA, 17 nt, Artificial Sequence
  Synthetic oligonucleotide: FAS-547
agucaacaucugaaaaa

SEQ ID NO: 9179 - RNA, 17 nt, Artificial Sequence
  Synthetic oligonucleotide: FAS-548
gaaaaauagaaaauagu

SEQ ID NO: 9180 - RNA, 17 nt, Artificial Sequence
  Synthetic oligonucleotide: FAS-549
uuauugccacuguuucc

SEQ ID NO: 9181 - RNA, 17 nt, Artificial Sequence
  Synthetic oligonucleotide: FAS-550
uuccuagaaagcaaaaa

SEQ ID NO: 9182 - RNA, 17 nt, Artificial Sequence
  Synthetic oligonucleotide: FAS-344
uccuagaaagcaaaaaa

SEQ ID NO: 9183 - RNA, 17 nt, Artificial Sequence
  Synthetic oligonucleotide: FAS-552
aaagcaaaaaauggaag

SEQ ID NO: 9184 - RNA, 17 nt, Artificial Sequence
  Synthetic oligonucleotide: FAS-553
agcaaaaaauggaagca

SEQ ID NO: 9185 - RNA, 17 nt, Artificial Sequence
  Synthetic oligonucleotide: FAS-554
accuauuucaauaccua

SEQ ID NO: 9186 - RNA, 17 nt, Artificial Sequence
  Synthetic oligonucleotide: FAS-555
accuacaggauuuaaag

SEQ ID NO: 9187 - RNA, 17 nt, Artificial Sequence
  Synthetic oligonucleotide: FAS-346
ccuacaggauuuaaagu

SEQ ID NO: 9188 - RNA, 17 nt, Artificial Sequence
  Synthetic oligonucleotide: FAS-557
uuuaaaguuggagauuc

SEQ ID NO: 9189 - RNA, 17 nt, Artificial Sequence
  Synthetic oligonucleotide: FAS-558
uaaaguuggagauucau

SEQ ID NO: 9190 - RNA, 17 nt, Artificial Sequence
  Synthetic oligonucleotide: FAS-559
uacuuccuuucucuuca

SEQ ID NO: 9191 - RNA, 17 nt, Artificial Sequence
  Synthetic oligonucleotide: FAS-560
uccuuucucuucacuga

SEQ ID NO: 9192 - RNA, 17 nt, Artificial Sequence
  Synthetic oligonucleotide: FAS-561
ucuucacugaaagaaca

SEQ ID NO: 9193 - RNA, 17 nt, Artificial Sequence
  Synthetic oligonucleotide: FAS-562
ugcaguuugaacaaagc

SEQ ID NO: 9194 - RNA, 17 nt, Artificial Sequence
  Synthetic oligonucleotide: FAS-563
cuuaccccaaacaauua

SEQ ID NO: 9195 - RNA, 17 nt, Artificial Sequence
  Synthetic oligonucleotide: FAS-348
uuaccccaaacaauuag

SEQ ID NO: 9196 - RNA, 17 nt, Artificial Sequence
  Synthetic oligonucleotide: FAS-565
auuaguggaauuggcaa

SEQ ID NO: 9197 - RNA, 17 nt, Artificial Sequence
  Synthetic oligonucleotide: FAS-566
aguggaauuggcaaaag

SEQ ID NO: 9198 - RNA, 17 nt, Artificial Sequence
  Synthetic oligonucleotide: FAS-567
gccaccccaaguuagau

SEQ ID NO: 9199 - RNA, 17 nt, Artificial Sequence
  Synthetic oligonucleotide: FAS-568
gaucuggauccuguagg

SEQ ID NO: 9200 - RNA, 17 nt, Artificial Sequence
  Synthetic oligonucleotide: FAS-352
aucuggauccuguaggu

SEQ ID NO: 9201 - RNA, 17 nt, Artificial Sequence
  Synthetic oligonucleotide: FAS-570
uccuguagguuggaaca

SEQ ID NO: 9202 - RNA, 17 nt, Artificial Sequence
  Synthetic oligonucleotide: FAS-571
ugcacuugguguugcug

SEQ ID NO: 9203 - RNA, 17 nt, Artificial Sequence
  Synthetic oligonucleotide: FAS-572
gauuccauguucacauc

SEQ ID NO: 9204 - RNA, 17 nt, Artificial Sequence
  Synthetic oligonucleotide: FAS-573
aucuagaaaaaaaaaua

SEQ ID NO: 9205 - RNA, 17 nt, Artificial Sequence
  Synthetic oligonucleotide: FAS-356
ucuagaaaaaaaaauac

SEQ ID NO: 9206 - RNA, 17 nt, Artificial Sequence
  Synthetic oligonucleotide: FAS-575
uagaaaaaaaaauacag

SEQ ID NO: 9207 - RNA, 17 nt, Artificial Sequence
  Synthetic oligonucleotide: FAS-576
uaaaacuuacuuggugc

SEQ ID NO: 9208 - RNA, 17 nt, Artificial Sequence
  Synthetic oligonucleotide: FAS-577
acaguguucacauacag

SEQ ID NO: 9209 - RNA, 17 nt, Artificial Sequence
  Synthetic oligonucleotide: FAS-578
caucugcacuugguauu

SEQ ID NO: 9210 - RNA, 17 nt, Artificial Sequence
  Synthetic oligonucleotide: FAS-579
cacuugguauucugggu

SEQ ID NO: 9211 - RNA, 17 nt, Artificial Sequence
  Synthetic oligonucleotide: FAS-580
auuuccacuucuaagcc

SEQ ID NO: 9212 - RNA, 17 nt, Artificial Sequence
  Synthetic oligonucleotide: FAS-581
aagccuagaaaaucagu

SEQ ID NO: 9213 - RNA, 17 nt, Artificial Sequence
  Synthetic oligonucleotide: FAS-366
agccuagaaaaucaguu

SEQ ID NO: 9214 - RNA, 20 nt, Artificial Sequence
  Synthetic oligonucleotide: FAS-237
uacagguucuuacgucuguu

SEQ ID NO: 9215 - RNA, 20 nt, Artificial Sequence
  Synthetic oligonucleotide: FAS-123
aagugacugacaucaacucc

SEQ ID NO: 9216 - RNA, 20 nt, Artificial Sequence
  Synthetic oligonucleotide: FAS-134
gguauguuacacaaaacauc

SEQ ID NO: 9217 - RNA, 17 nt, Artificial Sequence
  Synthetic oligonucleotide: FAS-240
agguucuuacgucuguu

SEQ ID NO: 9218 - RNA, 17 nt, Artificial Sequence
  Synthetic oligonucleotide: FAS-135
ugacugacaucaacucc

SEQ ID NO: 9219 - RNA, 17 nt, Artificial Sequence
  Synthetic oligonucleotide: FAS-146
auguuacacaaaacauc

SEQ ID NO: 9220 - RNA, 20 nt, Artificial Sequence
  Synthetic oligonucleotide: FAS-243
uuucuuccaaaugcagaaga

SEQ ID NO: 9221 - RNA, 17 nt, Artificial Sequence
  Synthetic oligonucleotide: FAS-244
cuuccaaaugcagaaga

SEQ ID NO: 9222 - RNA, 20 nt, Artificial Sequence
  Synthetic oligonucleotide: FAS-583
ccaaguaaguuuuagucuuu

SEQ ID NO: 9223 - RNA, 20 nt, Artificial Sequence
  Synthetic oligonucleotide: FAS-584
aaagaaagaagcguaugaca

SEQ ID NO: 9224 - RNA, 17 nt, Artificial Sequence
  Synthetic oligonucleotide: FAS-585
aguaaguuuuagucuuu

SEQ ID NO: 9225 - RNA, 17 nt, Artificial Sequence
  Synthetic oligonucleotide: FAS-586
gaaagaagcguaugaca

SEQ ID NO: 9226 - RNA, 20 nt, Artificial Sequence
  Synthetic oligonucleotide: FAS-587
uuuuucacucuagaccaagc

SEQ ID NO: 9227 - RNA, 20 nt, Artificial Sequence
  Synthetic oligonucleotide: FAS-588
gaauuuucucugcaagagua

SEQ ID NO: 9228 - RNA, 20 nt, Artificial Sequence
  Synthetic oligonucleotide: FAS-589
ugauaccuauuucaauaccu

SEQ ID NO: 9229 - RNA, 20 nt, Artificial Sequence
  Synthetic oligonucleotide: FAS-317
auaccuacaggauuuaaagu

SEQ ID NO: 9230 - RNA, 20 nt, Artificial Sequence
  Synthetic oligonucleotide: FAS-591
gcuggugagugugcauuccu

SEQ ID NO: 9231 - RNA, 17 nt, Artificial Sequence
  Synthetic oligonucleotide: FAS-592
uucacucuagaccaagc

SEQ ID NO: 9232 - RNA, 17 nt, Artificial Sequence
  Synthetic oligonucleotide: FAS-593
uuuucucugcaagagua

SEQ ID NO: 9233 - RNA, 17 nt, Artificial Sequence
  Synthetic oligonucleotide: FAS-594
uaccuauuucaauaccu

SEQ ID NO: 9234 - RNA, 17 nt, Artificial Sequence
  Synthetic oligonucleotide: FAS-346
ccuacaggauuuaaagu

SEQ ID NO: 9235 - RNA, 17 nt, Artificial Sequence
  Synthetic oligonucleotide: FAS-596
ggugagugugcauuccu

SEQ ID NO: 9236 - RNA, 20 nt, Artificial Sequence
  Synthetic oligonucleotide: FAS-636
gaagcgguuuacgagugacu

SEQ ID NO: 9237 - RNA, 20 nt, Artificial Sequence
  Synthetic oligonucleotide: FAS-653
guugguggacccgcucagua

SEQ ID NO: 9238 - RNA, 20 nt, Artificial Sequence
  Synthetic oligonucleotide: FAS-654
ggacccgcucaguacggagu

SEQ ID NO: 9239 - RNA, 20 nt, Artificial Sequence
  Synthetic oligonucleotide: FAS-655
gacccgcucaguacggaguu

SEQ ID NO: 9240 - RNA, 20 nt, Artificial Sequence
  Synthetic oligonucleotide: FAS-658
gggaagcucuuucacuucgg

SEQ ID NO: 9241 - RNA, 20 nt, Artificial Sequence
  Synthetic oligonucleotide: FAS-659
ggauugcucaacaaccaugc

SEQ ID NO: 9242 - RNA, 20 nt, Artificial Sequence
  Synthetic oligonucleotide: FAS-667
ggcuuaccccgucuuagucc

SEQ ID NO: 9243 - RNA, 20 nt, Artificial Sequence
  Synthetic oligonucleotide: FAS-668
gcuuaccccgucuuaguccc

SEQ ID NO: 9244 - RNA, 20 nt, Artificial Sequence
  Synthetic oligonucleotide: FAS-672
gucccggggauaggcaaagu

SEQ ID NO: 9245 - RNA, 20 nt, Artificial Sequence
  Synthetic oligonucleotide: FAS-680
gcgggacgcgugcgggauug

SEQ ID NO: 9246 - RNA, 20 nt, Artificial Sequence
  Synthetic oligonucleotide: FAS-689
gccuauccccgggacuaaga

SEQ ID NO: 9247 - RNA, 20 nt, Artificial Sequence
  Synthetic oligonucleotide: FAS-693
gacgggguaagccuccaccc

SEQ ID NO: 9248 - RNA, 20 nt, Artificial Sequence
  Synthetic oligonucleotide: FAS-705
gagcggguccaccaacccgc

SEQ ID NO: 9249 - RNA, 20 nt, Artificial Sequence
  Synthetic oligonucleotide: FAS-715
gacgagcucacgaaaagccc

SEQ ID NO: 9250 - RNA, 20 nt, Artificial Sequence
  Synthetic oligonucleotide: FAS-716
gagcucacgaaaagccccgg

SEQ ID NO: 9251 - RNA, 20 nt, Artificial Sequence
  Synthetic oligonucleotide: FAS-718
gaaaagccccgguggucagg

SEQ ID NO: 9252 - RNA, 20 nt, Artificial Sequence
  Synthetic oligonucleotide: FAS-732
gcuccauugauucagcaacu

SEQ ID NO: 9253 - RNA, 20 nt, Artificial Sequence
  Synthetic oligonucleotide: FAS-747
gucaggguucguugcacaaa

SEQ ID NO: 9254 - RNA, 20 nt, Artificial Sequence
  Synthetic oligonucleotide: FAS-752
gucccggggcguuccugcag

SEQ ID NO: 9255 - RNA, 20 nt, Artificial Sequence
  Synthetic oligonucleotide: FAS-754
guggcuggcaugcucacuuc

SEQ ID NO: 9256 - RNA, 20 nt, Artificial Sequence
  Synthetic oligonucleotide: FAS-758
gcuucugcuguaguucaacc

SEQ ID NO: 9257 - RNA, 20 nt, Artificial Sequence
  Synthetic oligonucleotide: FAS-761
guaguucaaccugggaaguu

SEQ ID NO: 9258 - RNA, 20 nt, Artificial Sequence
  Synthetic oligonucleotide: FAS-776
gacuugcggggcauuugacu

SEQ ID NO: 9259 - RNA, 20 nt, Artificial Sequence
  Synthetic oligonucleotide: FAS-779
gagaggcucacagacguuuc

SEQ ID NO: 9260 - RNA, 20 nt, Artificial Sequence
  Synthetic oligonucleotide: FAS-784
gcgccauagggcucugaaaa

SEQ ID NO: 9261 - RNA, 17 nt, Artificial Sequence
  Synthetic oligonucleotide: FAS-791
gcuggggcuaugcgauu

SEQ ID NO: 9262 - RNA, 17 nt, Artificial Sequence
  Synthetic oligonucleotide: FAS-820
gcgcaagagugacacac

SEQ ID NO: 9263 - RNA, 17 nt, Artificial Sequence
  Synthetic oligonucleotide: FAS-821
guguucaaagacgcuuc

SEQ ID NO: 9264 - RNA, 17 nt, Artificial Sequence
  Synthetic oligonucleotide: FAS-827
gcgguuuacgagugacu

SEQ ID NO: 9265 - RNA, 17 nt, Artificial Sequence
  Synthetic oligonucleotide: FAS-844
gguggacccgcucagua

SEQ ID NO: 9266 - RNA, 17 nt, Artificial Sequence
  Synthetic oligonucleotide: FAS-848
gggaagcucuuucacuu

SEQ ID NO: 9267 - RNA, 17 nt, Artificial Sequence
  Synthetic oligonucleotide: FAS-861
gucuuagucccggggau

SEQ ID NO: 9268 - RNA, 17 nt, Artificial Sequence
  Synthetic oligonucleotide: FAS-865
ggauaggcaaagugggg

SEQ ID NO: 9269 - RNA, 17 nt, Artificial Sequence
  Synthetic oligonucleotide: FAS-871
ggacgcgugcgggauug

SEQ ID NO: 9270 - RNA, 17 nt, Artificial Sequence
  Synthetic oligonucleotide: FAS-877
ggcgcacgcgggcaccu

SEQ ID NO: 9271 - RNA, 17 nt, Artificial Sequence
  Synthetic oligonucleotide: FAS-884
gggguaagccuccaccc

SEQ ID NO: 9272 - RNA, 17 nt, Artificial Sequence
  Synthetic oligonucleotide: FAS-895
gcggguccaccaacccg

SEQ ID NO: 9273 - RNA, 17 nt, Artificial Sequence
  Synthetic oligonucleotide: FAS-906
gagcucacgaaaagccc

SEQ ID NO: 9274 - RNA, 17 nt, Artificial Sequence
  Synthetic oligonucleotide: FAS-908
gaaaagccccggugguc

SEQ ID NO: 9275 - RNA, 17 nt, Artificial Sequence
  Synthetic oligonucleotide: FAS-924
gcaacuuggccugcgcg

SEQ ID NO: 9276 - RNA, 17 nt, Artificial Sequence
  Synthetic oligonucleotide: FAS-939
ggguucguugcacaaau

SEQ ID NO: 9277 - RNA, 17 nt, Artificial Sequence
  Synthetic oligonucleotide: FAS-945
gcuggcaugcucacuuc

SEQ ID NO: 9278 - RNA, 17 nt, Artificial Sequence
  Synthetic oligonucleotide: FAS-952
guucaaccugggaaguu

SEQ ID NO: 9279 - RNA, 17 nt, Artificial Sequence
  Synthetic oligonucleotide: FAS-974
gccauagggcucugaaa

SEQ ID NO: 9280 - RNA, 20 nt, Artificial Sequence
  Synthetic oligonucleotide: FAS-600
auagcuggggcuaugcgauu

SEQ ID NO: 9281 - RNA, 20 nt, Artificial Sequence
  Synthetic oligonucleotide: FAS-620
cugcaggaacgccccgggac

SEQ ID NO: 9282 - RNA, 20 nt, Artificial Sequence
  Synthetic oligonucleotide: FAS-625
aacccgggcguuccccagcg

SEQ ID NO: 9283 - RNA, 20 nt, Artificial Sequence
  Synthetic oligonucleotide: FAS-629
cucgcgcaagagugacacac

SEQ ID NO: 9284 - RNA, 20 nt, Artificial Sequence
  Synthetic oligonucleotide: FAS-630
cagguguucaaagacgcuuc

SEQ ID NO: 9285 - RNA, 20 nt, Artificial Sequence
  Synthetic oligonucleotide: FAS-637
cgguuuacgagugacuuggc

SEQ ID NO: 9286 - RNA, 20 nt, Artificial Sequence
  Synthetic oligonucleotide: FAS-656
acccgcucaguacggaguug

SEQ ID NO: 9287 - RNA, 20 nt, Artificial Sequence
  Synthetic oligonucleotide: FAS-657
uuggggaagcucuuucacuu

SEQ ID NO: 9288 - RNA, 20 nt, Artificial Sequence
  Synthetic oligonucleotide: FAS-669
cuuaccccgucuuagucccg

SEQ ID NO: 9289 - RNA, 20 nt, Artificial Sequence
  Synthetic oligonucleotide: FAS-670
cccgucuuagucccggggau

SEQ ID NO: 9290 - RNA, 20 nt, Artificial Sequence
  Synthetic oligonucleotide: FAS-674
cggggauaggcaaagugggg

SEQ ID NO: 9291 - RNA, 20 nt, Artificial Sequence
  Synthetic oligonucleotide: FAS-686
agcggcgcacgcgggcaccu

SEQ ID NO: 9292 - RNA, 20 nt, Artificial Sequence
  Synthetic oligonucleotide: FAS-687
cgccccacuuugccuauccc

SEQ ID NO: 9293 - RNA, 20 nt, Artificial Sequence
  Synthetic oligonucleotide: FAS-690
ccuauccccgggacuaagac

SEQ ID NO: 9294 - RNA, 20 nt, Artificial Sequence
  Synthetic oligonucleotide: FAS-691
cuauccccgggacuaagacg

SEQ ID NO: 9295 - RNA, 20 nt, Artificial Sequence
  Synthetic oligonucleotide: FAS-692
agacgggguaagccuccacc

SEQ ID NO: 9296 - RNA, 20 nt, Artificial Sequence
  Synthetic oligonucleotide: FAS-704
ugagcggguccaccaacccg

SEQ ID NO: 9297 - RNA, 20 nt, Artificial Sequence
  Synthetic oligonucleotide: FAS-706
ccaccaacccgcgggagaag

SEQ ID NO: 9298 - RNA, 20 nt, Artificial Sequence
  Synthetic oligonucleotide: FAS-717
cacgaaaagccccggugguc

SEQ ID NO: 9299 - RNA, 20 nt, Artificial Sequence
  Synthetic oligonucleotide: FAS-725
aagccucgcuggggaacgcc

SEQ ID NO: 9300 - RNA, 20 nt, Artificial Sequence
  Synthetic oligonucleotide: FAS-727
ucgcuggggaacgcccgggu

SEQ ID NO: 9301 - RNA, 20 nt, Artificial Sequence
  Synthetic oligonucleotide: FAS-733
ucagcaacuuggccugcgcg

SEQ ID NO: 9302 - RNA, 20 nt, Artificial Sequence
  Synthetic oligonucleotide: FAS-736
acuuggccugcgcgcgggua

SEQ ID NO: 9303 - RNA, 20 nt, Artificial Sequence
  Synthetic oligonucleotide: FAS-748
ucaggguucguugcacaaau

SEQ ID NO: 9304 - RNA, 20 nt, Artificial Sequence
  Synthetic oligonucleotide: FAS-757
cggccuccugcccuuucuaa

SEQ ID NO: 9305 - RNA, 20 nt, Artificial Sequence
  Synthetic oligonucleotide: FAS-759
cuucugcuguaguucaaccu

SEQ ID NO: 9306 - RNA, 20 nt, Artificial Sequence
  Synthetic oligonucleotide: FAS-760
uguaguucaaccugggaagu

SEQ ID NO: 9307 - RNA, 20 nt, Artificial Sequence
  Synthetic oligonucleotide: FAS-773
ucacucagagaaagacuugc

SEQ ID NO: 9308 - RNA, 20 nt, Artificial Sequence
  Synthetic oligonucleotide: FAS-775
agacuugcggggcauuugac

SEQ ID NO: 9309 - RNA, 20 nt, Artificial Sequence
  Synthetic oligonucleotide: FAS-778
uguuguggcugcaacaugag

SEQ ID NO: 9310 - RNA, 20 nt, Artificial Sequence
  Synthetic oligonucleotide: FAS-781
aaguacagauguugcgccau

SEQ ID NO: 9311 - RNA, 20 nt, Artificial Sequence
  Synthetic oligonucleotide: FAS-783
ugcgccauagggcucugaaa

SEQ ID NO: 9312 - RNA, 20 nt, Artificial Sequence
  Synthetic oligonucleotide: FAS-785
ccauagggcucugaaaaggg

SEQ ID NO: 9313 - RNA, 17 nt, Artificial Sequence
  Synthetic oligonucleotide: FAS-811
caggaacgccccgggac

SEQ ID NO: 9314 - RNA, 17 nt, Artificial Sequence
  Synthetic oligonucleotide: FAS-816
ccgggcguuccccagcg

SEQ ID NO: 9315 - RNA, 17 nt, Artificial Sequence
  Synthetic oligonucleotide: FAS-828
uuuacgagugacuuggc

SEQ ID NO: 9316 - RNA, 17 nt, Artificial Sequence
  Synthetic oligonucleotide: FAS-845
cccgcucaguacggagu

SEQ ID NO: 9317 - RNA, 17 nt, Artificial Sequence
  Synthetic oligonucleotide: FAS-846
ccgcucaguacggaguu

SEQ ID NO: 9318 - RNA, 17 nt, Artificial Sequence
  Synthetic oligonucleotide: FAS-847
cgcucaguacggaguug

SEQ ID NO: 9319 - RNA, 17 nt, Artificial Sequence
  Synthetic oligonucleotide: FAS-849
aagcucuuucacuucgg

SEQ ID NO: 9320 - RNA, 17 nt, Artificial Sequence
  Synthetic oligonucleotide: FAS-850
uugcucaacaaccaugc

SEQ ID NO: 9321 - RNA, 17 nt, Artificial Sequence
  Synthetic oligonucleotide: FAS-858
uuaccccgucuuagucc

SEQ ID NO: 9322 - RNA, 17 nt, Artificial Sequence
  Synthetic oligonucleotide: FAS-859
uaccccgucuuaguccc

SEQ ID NO: 9323 - RNA, 17 nt, Artificial Sequence
  Synthetic oligonucleotide: FAS-860
accccgucuuagucccg

SEQ ID NO: 9324 - RNA, 17 nt, Artificial Sequence
  Synthetic oligonucleotide: FAS-863
ccggggauaggcaaagu

SEQ ID NO: 9325 - RNA, 17 nt, Artificial Sequence
  Synthetic oligonucleotide: FAS-878
cccacuuugccuauccc

SEQ ID NO: 9326 - RNA, 17 nt, Artificial Sequence
  Synthetic oligonucleotide: FAS-880
uauccccgggacuaaga

SEQ ID NO: 9327 - RNA, 17 nt, Artificial Sequence
  Synthetic oligonucleotide: FAS-881
auccccgggacuaagac

SEQ ID NO: 9328 - RNA, 17 nt, Artificial Sequence
  Synthetic oligonucleotide: FAS-882
uccccgggacuaagacg

SEQ ID NO: 9329 - RNA, 17 nt, Artificial Sequence
  Synthetic oligonucleotide: FAS-883
cgggguaagccuccacc

SEQ ID NO: 9330 - RNA, 17 nt, Artificial Sequence
  Synthetic oligonucleotide: FAS-896
cggguccaccaacccgc

SEQ ID NO: 9331 - RNA, 17 nt, Artificial Sequence
  Synthetic oligonucleotide: FAS-897
ccaacccgcgggagaag

SEQ ID NO: 9332 - RNA, 17 nt, Artificial Sequence
  Synthetic oligonucleotide: FAS-907
cucacgaaaagccccgg

SEQ ID NO: 9333 - RNA, 17 nt, Artificial Sequence
  Synthetic oligonucleotide: FAS-909
aagccccgguggucagg

SEQ ID NO: 9334 - RNA, 17 nt, Artificial Sequence
  Synthetic oligonucleotide: FAS-916
ccucgcuggggaacgcc

SEQ ID NO: 9335 - RNA, 17 nt, Artificial Sequence
  Synthetic oligonucleotide: FAS-918
cuggggaacgcccgggu

SEQ ID NO: 9336 - RNA, 17 nt, Artificial Sequence
  Synthetic oligonucleotide: FAS-923
ccauugauucagcaacu

SEQ ID NO: 9337 - RNA, 17 nt, Artificial Sequence
  Synthetic oligonucleotide: FAS-927
uggccugcgcgcgggua

SEQ ID NO: 9338 - RNA, 17 nt, Artificial Sequence
  Synthetic oligonucleotide: FAS-938
aggguucguugcacaaa

SEQ ID NO: 9339 - RNA, 17 nt, Artificial Sequence
  Synthetic oligonucleotide: FAS-943
ccggggcguuccugcag

SEQ ID NO: 9340 - RNA, 17 nt, Artificial Sequence
  Synthetic oligonucleotide: FAS-948
ccuccugcccuuucuaa

SEQ ID NO: 9341 - RNA, 17 nt, Artificial Sequence
  Synthetic oligonucleotide: FAS-949
ucugcuguaguucaacc

SEQ ID NO: 9342 - RNA, 17 nt, Artificial Sequence
  Synthetic oligonucleotide: FAS-950
cugcuguaguucaaccu

SEQ ID NO: 9343 - RNA, 17 nt, Artificial Sequence
  Synthetic oligonucleotide: FAS-951
aguucaaccugggaagu

SEQ ID NO: 9344 - RNA, 17 nt, Artificial Sequence
  Synthetic oligonucleotide: FAS-964
cucagagaaagacuugc

SEQ ID NO: 9345 - RNA, 17 nt, Artificial Sequence
  Synthetic oligonucleotide: FAS-966
cuugcggggcauuugac

SEQ ID NO: 9346 - RNA, 17 nt, Artificial Sequence
  Synthetic oligonucleotide: FAS-967
uugcggggcauuugacu

SEQ ID NO: 9347 - RNA, 17 nt, Artificial Sequence
  Synthetic oligonucleotide: FAS-969
uguggcugcaacaugag

SEQ ID NO: 9348 - RNA, 17 nt, Artificial Sequence
  Synthetic oligonucleotide: FAS-970
aggcucacagacguuuc

SEQ ID NO: 9349 - RNA, 17 nt, Artificial Sequence
  Synthetic oligonucleotide: FAS-972
uacagauguugcgccau

SEQ ID NO: 9350 - RNA, 17 nt, Artificial Sequence
  Synthetic oligonucleotide: FAS-975
ccauagggcucugaaaa

SEQ ID NO: 9351 - RNA, 17 nt, Artificial Sequence
  Synthetic oligonucleotide: FAS-976
uagggcucugaaaaggg

SEQ ID NO: 9352 - RNA, 17 nt, Artificial Sequence
  Synthetic oligonucleotide: FAS-921
gaacgcccggguugggg

SEQ ID NO: 9353 - RNA, 17 nt, Artificial Sequence
  Synthetic oligonucleotide: FAS-898
gaagaggcagcuccgcc

SEQ ID NO: 9354 - RNA, 20 nt, Artificial Sequence
  Synthetic oligonucleotide: FAS-766
gaauggagcucagagcgcag

SEQ ID NO: 9355 - RNA, 17 nt, Artificial Sequence
  Synthetic oligonucleotide: FAS-789
gaauguuuaauauagcu

SEQ ID NO: 9356 - RNA, 17 nt, Artificial Sequence
  Synthetic oligonucleotide: FAS-801
gaccuccccaacuuccc

SEQ ID NO: 9357 - RNA, 17 nt, Artificial Sequence
  Synthetic oligonucleotide: FAS-824
gacgcuucuggggagug

SEQ ID NO: 9358 - RNA, 17 nt, Artificial Sequence
  Synthetic oligonucleotide: FAS-829
gacuuggcuggagccuc

SEQ ID NO: 9359 - RNA, 17 nt, Artificial Sequence
  Synthetic oligonucleotide: FAS-794
gagaaauaaaaacuaag

SEQ ID NO: 9360 - RNA, 20 nt, Artificial Sequence
  Synthetic oligonucleotide: FAS-708
gagaagaggcagcuccgccu

SEQ ID NO: 9361 - RNA, 17 nt, Artificial Sequence
  Synthetic oligonucleotide: FAS-962
gagccuuggcuaauugc

SEQ ID NO: 9362 - RNA, 20 nt, Artificial Sequence
  Synthetic oligonucleotide: FAS-647
gaggccagcccuggcugccc

SEQ ID NO: 9363 - RNA, 17 nt, Artificial Sequence
  Synthetic oligonucleotide: FAS-115
gagggcucaccagaggu

SEQ ID NO: 9364 - RNA, 20 nt, Artificial Sequence
  Synthetic oligonucleotide: FAS-3
gagggcucaccagagguagg

SEQ ID NO: 9365 - RNA, 20 nt, Artificial Sequence
  Synthetic oligonucleotide: FAS-743
gagggggagaagucagggug

SEQ ID NO: 9366 - RNA, 20 nt, Artificial Sequence
  Synthetic oligonucleotide: FAS-5
gaggguccagaugcccagca

SEQ ID NO: 9367 - RNA, 17 nt, Artificial Sequence
  Synthetic oligonucleotide: FAS-956
gaggucuugaaggagaa

SEQ ID NO: 9368 - RNA, 17 nt, Artificial Sequence
  Synthetic oligonucleotide: FAS-866
gauaggcaaaguggggc

SEQ ID NO: 9369 - RNA, 20 nt, Artificial Sequence
  Synthetic oligonucleotide: FAS-723
gaugggaaggaagccucgcu

SEQ ID NO: 9370 - RNA, 20 nt, Artificial Sequence
  Synthetic oligonucleotide: FAS-660
gauugcucaacaaccaugcu

SEQ ID NO: 9371 - RNA, 17 nt, Artificial Sequence
  Synthetic oligonucleotide: FAS-867
gcaaaguggggcgggcg

SEQ ID NO: 9372 - RNA, 17 nt, Artificial Sequence
  Synthetic oligonucleotide: FAS-836
gcacggaacacacccug

SEQ ID NO: 9373 - RNA, 17 nt, Artificial Sequence
  Synthetic oligonucleotide: FAS-803
gcagaagccuuuagaaa

SEQ ID NO: 9374 - RNA, 20 nt, Artificial Sequence
  Synthetic oligonucleotide: FAS-709
gcagcuccgccugggcagcc

SEQ ID NO: 9375 - RNA, 17 nt, Artificial Sequence
  Synthetic oligonucleotide: FAS-838
gccagcccuggcugccc

SEQ ID NO: 9376 - RNA, 20 nt, Artificial Sequence
  Synthetic oligonucleotide: FAS-648
gccagcccuggcugcccagg

SEQ ID NO: 9377 - RNA, 17 nt, Artificial Sequence
  Synthetic oligonucleotide: FAS-905
gccagugcccgccccug

SEQ ID NO: 9378 - RNA, 20 nt, Artificial Sequence
  Synthetic oligonucleotide: FAS-688
gccccacuuugccuaucccc

SEQ ID NO: 9379 - RNA, 20 nt, Artificial Sequence
  Synthetic oligonucleotide: FAS-720
gccccgguggucaggaggau

SEQ ID NO: 9380 - RNA, 17 nt, Artificial Sequence
  Synthetic oligonucleotide: FAS-856
gcccucuccugcccggg

SEQ ID NO: 9381 - RNA, 20 nt, Artificial Sequence
  Synthetic oligonucleotide: FAS-666
gcccucuccugcccgggugg

SEQ ID NO: 9382 - RNA, 17 nt, Artificial Sequence
  Synthetic oligonucleotide: FAS-834
gccucaggggcgggcac

SEQ ID NO: 9383 - RNA, 20 nt, Artificial Sequence
  Synthetic oligonucleotide: FAS-696
gccuccacccgggcaggaga

SEQ ID NO: 9384 - RNA, 20 nt, Artificial Sequence
  Synthetic oligonucleotide: FAS-739
gccugcgcgcggguagggag

SEQ ID NO: 9385 - RNA, 17 nt, Artificial Sequence
  Synthetic oligonucleotide: FAS-902
gccugggcagccagggc

SEQ ID NO: 9386 - RNA, 17 nt, Artificial Sequence
  Synthetic oligonucleotide: FAS-959
gcgcagagguccugccu

SEQ ID NO: 9387 - RNA, 17 nt, Artificial Sequence
  Synthetic oligonucleotide: FAS-931
gcgcgcggguagggagg

SEQ ID NO: 9388 - RNA, 17 nt, Artificial Sequence
  Synthetic oligonucleotide: FAS-875
gcggcagcggcgcacgc

SEQ ID NO: 9389 - RNA, 20 nt, Artificial Sequence
  Synthetic oligonucleotide: FAS-684
gcggcggcagcggcgcacgc

SEQ ID NO: 9390 - RNA, 20 nt, Artificial Sequence
  Synthetic oligonucleotide: FAS-780
gcucacagacguuucuggaa

SEQ ID NO: 9391 - RNA, 17 nt, Artificial Sequence
  Synthetic oligonucleotide: FAS-9
gcucaccagagguagga

SEQ ID NO: 9392 - RNA, 17 nt, Artificial Sequence
  Synthetic oligonucleotide: FAS-900
gcuccgccugggcagcc

SEQ ID NO: 9393 - RNA, 17 nt, Artificial Sequence
  Synthetic oligonucleotide: FAS-841
gcugccucuucucccgc

SEQ ID NO: 9394 - RNA, 17 nt, Artificial Sequence
  Synthetic oligonucleotide: FAS-833
gcuggagccucaggggc

SEQ ID NO: 9395 - RNA, 20 nt, Artificial Sequence
  Synthetic oligonucleotide: FAS-729
gcuggggaacgcccggguug

SEQ ID NO: 9396 - RNA, 17 nt, Artificial Sequence
  Synthetic oligonucleotide: FAS-915
ggaaggaagccucgcug

SEQ ID NO: 9397 - RNA, 20 nt, Artificial Sequence
  Synthetic oligonucleotide: FAS-764
ggaaguuggggaggucuuga

SEQ ID NO: 9398 - RNA, 20 nt, Artificial Sequence
  Synthetic oligonucleotide: FAS-681
ggacgcgugcgggauugcgg

SEQ ID NO: 9399 - RNA, 20 nt, Artificial Sequence
  Synthetic oligonucleotide: FAS-707
ggagaagaggcagcuccgcc

SEQ ID NO: 9400 - RNA, 20 nt, Artificial Sequence
  Synthetic oligonucleotide: FAS-105
ggagagggcucaccagaggu

SEQ ID NO: 9401 - RNA, 17 nt, Artificial Sequence
  Synthetic oligonucleotide: FAS-815
ggagcccuccccaaccc

SEQ ID NO: 9402 - RNA, 20 nt, Artificial Sequence
  Synthetic oligonucleotide: FAS-643
ggagccucaggggcgggcac

SEQ ID NO: 9403 - RNA, 20 nt, Artificial Sequence
  Synthetic oligonucleotide: FAS-650
ggagcugccucuucucccgc

SEQ ID NO: 9404 - RNA, 20 nt, Artificial Sequence
  Synthetic oligonucleotide: FAS-722
ggaugggaaggaagccucgc

SEQ ID NO: 9405 - RNA, 20 nt, Artificial Sequence
  Synthetic oligonucleotide: FAS-713
ggcagccagggcuggccuca

SEQ ID NO: 9406 - RNA, 20 nt, Artificial Sequence
  Synthetic oligonucleotide: FAS-697
ggcaggagagggcucaccag

SEQ ID NO: 9407 - RNA, 20 nt, Artificial Sequence
  Synthetic oligonucleotide: FAS-738
ggccugcgcgcggguaggga

SEQ ID NO: 9408 - RNA, 17 nt, Artificial Sequence
  Synthetic oligonucleotide: FAS-874
ggcggcagcggcgcacg

SEQ ID NO: 9409 - RNA, 20 nt, Artificial Sequence
  Synthetic oligonucleotide: FAS-679
ggcgggcgcgggacgcgugc

SEQ ID NO: 9410 - RNA, 17 nt, Artificial Sequence
  Synthetic oligonucleotide: FAS-944
ggcguuccugcaguggc

SEQ ID NO: 9411 - RNA, 17 nt, Artificial Sequence
  Synthetic oligonucleotide: FAS-8
ggcucaccagagguagg

SEQ ID NO: 9412 - RNA, 17 nt, Artificial Sequence
  Synthetic oligonucleotide: FAS-800
ggcuccuguacccaggc

SEQ ID NO: 9413 - RNA, 17 nt, Artificial Sequence
  Synthetic oligonucleotide: FAS-832
ggcuggagccucagggg

SEQ ID NO: 9414 - RNA, 20 nt, Artificial Sequence
  Synthetic oligonucleotide: FAS-731
gggaacgcccggguugggga

SEQ ID NO: 9415 - RNA, 17 nt, Artificial Sequence
  Synthetic oligonucleotide: FAS-914
gggaaggaagccucgcu

SEQ ID NO: 9416 - RNA, 20 nt, Artificial Sequence
  Synthetic oligonucleotide: FAS-744
gggagaagucagggugagga

SEQ ID NO: 9417 - RNA, 17 nt, Artificial Sequence
  Synthetic oligonucleotide: FAS-933
gggagggggagaaguca

SEQ ID NO: 9418 - RNA, 20 nt, Artificial Sequence
  Synthetic oligonucleotide: FAS-712
gggcagccagggcuggccuc

SEQ ID NO: 9419 - RNA, 20 nt, Artificial Sequence
  Synthetic oligonucleotide: FAS-616
gggcaggaggccggcucucg

SEQ ID NO: 9420 - RNA, 17 nt, Artificial Sequence
  Synthetic oligonucleotide: FAS-870
gggcgcgggacgcgugc

SEQ ID NO: 9421 - RNA, 20 nt, Artificial Sequence
  Synthetic oligonucleotide: FAS-678
gggcgggcgcgggacgcgug

SEQ ID NO: 9422 - RNA, 17 nt, Artificial Sequence
  Synthetic oligonucleotide: FAS-920
ggggaacgcccggguug

SEQ ID NO: 9423 - RNA, 20 nt, Artificial Sequence
  Synthetic oligonucleotide: FAS-730
ggggaacgcccggguugggg

SEQ ID NO: 9424 - RNA, 17 nt, Artificial Sequence
  Synthetic oligonucleotide: FAS-934
ggggagaagucagggug

SEQ ID NO: 9425 - RNA, 20 nt, Artificial Sequence
  Synthetic oligonucleotide: FAS-765
ggggaggucuugaaggagaa

SEQ ID NO: 9426 - RNA, 20 nt, Artificial Sequence
  Synthetic oligonucleotide: FAS-675
ggggauaggcaaaguggggc

SEQ ID NO: 9427 - RNA, 20 nt, Artificial Sequence
  Synthetic oligonucleotide: FAS-694
ggguaagccuccacccgggc

SEQ ID NO: 9428 - RNA, 17 nt, Artificial Sequence
  Synthetic oligonucleotide: FAS-937
gggugaggaaggaguca

SEQ ID NO: 9429 - RNA, 20 nt, Artificial Sequence
  Synthetic oligonucleotide: FAS-741
gguagggagggggagaaguc

SEQ ID NO: 9430 - RNA, 17 nt, Artificial Sequence
  Synthetic oligonucleotide: FAS-10
gguccagaugcccagca

SEQ ID NO: 9431 - RNA, 20 nt, Artificial Sequence
  Synthetic oligonucleotide: FAS-632
gguguucaaagacgcuucug

SEQ ID NO: 9432 - RNA, 20 nt, Artificial Sequence
  Synthetic oligonucleotide: FAS-742
guagggagggggagaaguca

SEQ ID NO: 9433 - RNA, 20 nt, Artificial Sequence
  Synthetic oligonucleotide: FAS-772
gucacucagagaaagacuug

SEQ ID NO: 9434 - RNA, 20 nt, Artificial Sequence
  Synthetic oligonucleotide: FAS-745
gucagggugaggaaggaguc

SEQ ID NO: 9435 - RNA, 20 nt, Artificial Sequence
  Synthetic oligonucleotide: FAS-599
gugaauguuuaauauagcug

SEQ ID NO: 9436 - RNA, 20 nt, Artificial Sequence
  Synthetic oligonucleotide: FAS-607
gugacuccagcaauuagcca

SEQ ID NO: 9437 - RNA, 20 nt, Artificial Sequence
  Synthetic oligonucleotide: FAS-639
gugacuuggcuggagccuca

SEQ ID NO: 9438 - RNA, 20 nt, Artificial Sequence
  Synthetic oligonucleotide: FAS-617
gugagcaugccagccacugc

SEQ ID NO: 9439 - RNA, 17 nt, Artificial Sequence
  Synthetic oligonucleotide: FAS-854
gugagcccucuccugcc

SEQ ID NO: 9440 - RNA, 17 nt, Artificial Sequence
  Synthetic oligonucleotide: FAS-947
gugaggaccucgagagc

SEQ ID NO: 9441 - RNA, 20 nt, Artificial Sequence
  Synthetic oligonucleotide: FAS-682
gugcgggauugcggcggcag

SEQ ID NO: 9442 - RNA, 17 nt, Artificial Sequence
  Synthetic oligonucleotide: FAS-823
guucaaagacgcuucug

SEQ ID NO: 9443 - RNA, 20 nt, Artificial Sequence
  Synthetic oligonucleotide: FAS-633
aaagacgcuucuggggagug

SEQ ID NO: 9444 - RNA, 20 nt, Artificial Sequence
  Synthetic oligonucleotide: FAS-751
aaaugggcauuccugucccg

SEQ ID NO: 9445 - RNA, 20 nt, Artificial Sequence
  Synthetic oligonucleotide: FAS-605
aacaucuguacuuuuucaua

SEQ ID NO: 9446 - RNA, 17 nt, Artificial Sequence
  Synthetic oligonucleotide: FAS-954
aaccugggaaguugggg

SEQ ID NO: 9447 - RNA, 17 nt, Artificial Sequence
  Synthetic oligonucleotide: FAS-922
aacgcccggguugggga

SEQ ID NO: 9448 - RNA, 20 nt, Artificial Sequence
  Synthetic oligonucleotide: FAS-735
aacuuggccugcgcgcgggu

SEQ ID NO: 9449 - RNA, 20 nt, Artificial Sequence
  Synthetic oligonucleotide: FAS-634
aagacgcuucuggggaguga

SEQ ID NO: 9450 - RNA, 17 nt, Artificial Sequence
  Synthetic oligonucleotide: FAS-899
aagaggcagcuccgccu

SEQ ID NO: 9451 - RNA, 17 nt, Artificial Sequence
  Synthetic oligonucleotide: FAS-804
aagccuuuagaaagggc

SEQ ID NO: 9452 - RNA, 20 nt, Artificial Sequence
  Synthetic oligonucleotide: FAS-614
aagccuuuagaaagggcagg

SEQ ID NO: 9453 - RNA, 20 nt, Artificial Sequence
  Synthetic oligonucleotide: FAS-624
aauggagcccuccccaaccc

SEQ ID NO: 9454 - RNA, 17 nt, Artificial Sequence
  Synthetic oligonucleotide: FAS-940
aaugggcauuccugucc

SEQ ID NO: 9455 - RNA, 17 nt, Artificial Sequence
  Synthetic oligonucleotide: FAS-790
aauguuuaauauagcug

SEQ ID NO: 9456 - RNA, 20 nt, Artificial Sequence
  Synthetic oligonucleotide: FAS-749
acaaaugggcauuccugucc

SEQ ID NO: 9457 - RNA, 20 nt, Artificial Sequence
  Synthetic oligonucleotide: FAS-646
acacacccugaggccagccc

SEQ ID NO: 9458 - RNA, 17 nt, Artificial Sequence
  Synthetic oligonucleotide: FAS-973
acagauguugcgccaua

SEQ ID NO: 9459 - RNA, 20 nt, Artificial Sequence
  Synthetic oligonucleotide: FAS-612
acagcagaagccuuuagaaa

SEQ ID NO: 9460 - RNA, 17 nt, Artificial Sequence
  Synthetic oligonucleotide: FAS-825
acgcuucuggggaguga

SEQ ID NO: 9461 - RNA, 17 nt, Artificial Sequence
  Synthetic oligonucleotide: FAS-963
acucagagaaagacuug

SEQ ID NO: 9462 - RNA, 17 nt, Artificial Sequence
  Synthetic oligonucleotide: FAS-798
acuccagcaauuagcca

SEQ ID NO: 9463 - RNA, 17 nt, Artificial Sequence
  Synthetic oligonucleotide: FAS-830
acuuggcuggagccuca

SEQ ID NO: 9464 - RNA, 17 nt, Artificial Sequence
  Synthetic oligonucleotide: FAS-935
agaagucagggugagga

SEQ ID NO: 9465 - RNA, 20 nt, Artificial Sequence
  Synthetic oligonucleotide: FAS-768
agagcgcagagguccugccu

SEQ ID NO: 9466 - RNA, 17 nt, Artificial Sequence
  Synthetic oligonucleotide: FAS-802
agcagaagccuuuagaa

SEQ ID NO: 9467 - RNA, 17 nt, Artificial Sequence
  Synthetic oligonucleotide: FAS-808
agcaugccagccacugc

SEQ ID NO: 9468 - RNA, 20 nt, Artificial Sequence
  Synthetic oligonucleotide: FAS-619
agccacugcaggaacgcccc

SEQ ID NO: 9469 - RNA, 17 nt, Artificial Sequence
  Synthetic oligonucleotide: FAS-904
agccagggcuggccuca

SEQ ID NO: 9470 - RNA, 20 nt, Artificial Sequence
  Synthetic oligonucleotide: FAS-719
agccccgguggucaggagga

SEQ ID NO: 9471 - RNA, 17 nt, Artificial Sequence
  Synthetic oligonucleotide: FAS-839
agcccuggcugcccagg

SEQ ID NO: 9472 - RNA, 20 nt, Artificial Sequence
  Synthetic oligonucleotide: FAS-695
agccuccacccgggcaggag

SEQ ID NO: 9473 - RNA, 20 nt, Artificial Sequence
  Synthetic oligonucleotide: FAS-726
agccucgcuggggaacgccc

SEQ ID NO: 9474 - RNA, 17 nt, Artificial Sequence
  Synthetic oligonucleotide: FAS-958
agcgcagagguccugcc

SEQ ID NO: 9475 - RNA, 17 nt, Artificial Sequence
  Synthetic oligonucleotide: FAS-840
agcugccucuucucccg

SEQ ID NO: 9476 - RNA, 17 nt, Artificial Sequence
  Synthetic oligonucleotide: FAS-888
aggagagggcucaccag

SEQ ID NO: 9477 - RNA, 20 nt, Artificial Sequence
  Synthetic oligonucleotide: FAS-677
aggcaaaguggggcgggcgc

SEQ ID NO: 9478 - RNA, 20 nt, Artificial Sequence
  Synthetic oligonucleotide: FAS-622
aggccaaguugcugaaucaa

SEQ ID NO: 9479 - RNA, 17 nt, Artificial Sequence
  Synthetic oligonucleotide: FAS-932
agggagggggagaaguc

SEQ ID NO: 9480 - RNA, 20 nt, Artificial Sequence
  Synthetic oligonucleotide: FAS-4
agggcucaccagagguagga

SEQ ID NO: 9481 - RNA, 17 nt, Artificial Sequence
  Synthetic oligonucleotide: FAS-977
agggcucugaaaaggga

SEQ ID NO: 9482 - RNA, 17 nt, Artificial Sequence
  Synthetic oligonucleotide: FAS-835
aggggcgggcacuggca

SEQ ID NO: 9483 - RNA, 17 nt, Artificial Sequence
  Synthetic oligonucleotide: FAS-936
agggugaggaaggaguc

SEQ ID NO: 9484 - RNA, 17 nt, Artificial Sequence
  Synthetic oligonucleotide: FAS-960
agguccugccuggguac

SEQ ID NO: 9485 - RNA, 20 nt, Artificial Sequence
  Synthetic oligonucleotide: FAS-631
agguguucaaagacgcuucu

SEQ ID NO: 9486 - RNA, 20 nt, Artificial Sequence
  Synthetic oligonucleotide: FAS-782
aguacagauguugcgccaua

SEQ ID NO: 9487 - RNA, 20 nt, Artificial Sequence
  Synthetic oligonucleotide: FAS-671
agucccggggauaggcaaag

SEQ ID NO: 9488 - RNA, 20 nt, Artificial Sequence
  Synthetic oligonucleotide: FAS-638
agugacuuggcuggagccuc

SEQ ID NO: 9489 - RNA, 17 nt, Artificial Sequence
  Synthetic oligonucleotide: FAS-955
aguuggggaggucuuga

SEQ ID NO: 9490 - RNA, 17 nt, Artificial Sequence
  Synthetic oligonucleotide: FAS-978
aguuuuuauuucucaag

SEQ ID NO: 9491 - RNA, 17 nt, Artificial Sequence
  Synthetic oligonucleotide: FAS-796
aucuguacuuuuucaua

SEQ ID NO: 9492 - RNA, 20 nt, Artificial Sequence
  Synthetic oligonucleotide: FAS-724
augggaaggaagccucgcug

SEQ ID NO: 9493 - RNA, 17 nt, Artificial Sequence
  Synthetic oligonucleotide: FAS-941
augggcauuccuguccc

SEQ ID NO: 9494 - RNA, 17 nt, Artificial Sequence
  Synthetic oligonucleotide: FAS-797
auguugcagccacaaca

SEQ ID NO: 9495 - RNA, 17 nt, Artificial Sequence
  Synthetic oligonucleotide: FAS-868
caaaguggggcgggcgc

SEQ ID NO: 9496 - RNA, 20 nt, Artificial Sequence
  Synthetic oligonucleotide: FAS-750
caaaugggcauuccuguccc

SEQ ID NO: 9497 - RNA, 20 nt, Artificial Sequence
  Synthetic oligonucleotide: FAS-1
caacaaccaugcugggcauc

SEQ ID NO: 9498 - RNA, 17 nt, Artificial Sequence
  Synthetic oligonucleotide: FAS-6
caaccaugcugggcauc

SEQ ID NO: 9499 - RNA, 17 nt, Artificial Sequence
  Synthetic oligonucleotide: FAS-925
caacuuggccugcgcgc

SEQ ID NO: 9500 - RNA, 20 nt, Artificial Sequence
  Synthetic oligonucleotide: FAS-610
caagaccuccccaacuuccc

SEQ ID NO: 9501 - RNA, 20 nt, Artificial Sequence
  Synthetic oligonucleotide: FAS-609
caaggcuccuguacccaggc

SEQ ID NO: 9502 - RNA, 20 nt, Artificial Sequence
  Synthetic oligonucleotide: FAS-623
caauggagcccuccccaacc

SEQ ID NO: 9503 - RNA, 17 nt, Artificial Sequence
  Synthetic oligonucleotide: FAS-971
cacagacguuucuggaa

SEQ ID NO: 9504 - RNA, 17 nt, Artificial Sequence
  Synthetic oligonucleotide: FAS-837
cacccugaggccagccc

SEQ ID NO: 9505 - RNA, 20 nt, Artificial Sequence
  Synthetic oligonucleotide: FAS-774
cacucagagaaagacuugcg

SEQ ID NO: 9506 - RNA, 17 nt, Artificial Sequence
  Synthetic oligonucleotide: FAS-810
cacugcaggaacgcccc

SEQ ID NO: 9507 - RNA, 20 nt, Artificial Sequence
  Synthetic oligonucleotide: FAS-613
cagaagccuuuagaaagggc

SEQ ID NO: 9508 - RNA, 20 nt, Artificial Sequence
  Synthetic oligonucleotide: FAS-767
cagagcgcagagguccugcc

SEQ ID NO: 9509 - RNA, 20 nt, Artificial Sequence
  Synthetic oligonucleotide: FAS-769
cagagguccugccuggguac

SEQ ID NO: 9510 - RNA, 20 nt, Artificial Sequence
  Synthetic oligonucleotide: FAS-734
cagcaacuuggccugcgcgc

SEQ ID NO: 9511 - RNA, 20 nt, Artificial Sequence
  Synthetic oligonucleotide: FAS-618
cagccacugcaggaacgccc

SEQ ID NO: 9512 - RNA, 17 nt, Artificial Sequence
  Synthetic oligonucleotide: FAS-903
cagccagggcuggccuc

SEQ ID NO: 9513 - RNA, 20 nt, Artificial Sequence
  Synthetic oligonucleotide: FAS-685
cagcggcgcacgcgggcacc

SEQ ID NO: 9514 - RNA, 20 nt, Artificial Sequence
  Synthetic oligonucleotide: FAS-710
cagcuccgccugggcagcca

SEQ ID NO: 9515 - RNA, 20 nt, Artificial Sequence
  Synthetic oligonucleotide: FAS-771
caggagccuuggcuaauugc

SEQ ID NO: 9516 - RNA, 17 nt, Artificial Sequence
  Synthetic oligonucleotide: FAS-807
caggaggccggcucucg

SEQ ID NO: 9517 - RNA, 20 nt, Artificial Sequence
  Synthetic oligonucleotide: FAS-756
caggugaggaccucgagagc

SEQ ID NO: 9518 - RNA, 20 nt, Artificial Sequence
  Synthetic oligonucleotide: FAS-786
cauagggcucugaaaaggga

SEQ ID NO: 9519 - RNA, 17 nt, Artificial Sequence
  Synthetic oligonucleotide: FAS-819
cauccuccugaccaccg

SEQ ID NO: 9520 - RNA, 20 nt, Artificial Sequence
  Synthetic oligonucleotide: FAS-2
caucuggacccuccuaccuc

SEQ ID NO: 9521 - RNA, 17 nt, Artificial Sequence
  Synthetic oligonucleotide: FAS-946
caugcucacuucaggug

SEQ ID NO: 9522 - RNA, 17 nt, Artificial Sequence
  Synthetic oligonucleotide: FAS-894
ccaacuccguacugagc

SEQ ID NO: 9523 - RNA, 17 nt, Artificial Sequence
  Synthetic oligonucleotide: FAS-799
ccaaggcuccuguaccc

SEQ ID NO: 9524 - RNA, 17 nt, Artificial Sequence
  Synthetic oligonucleotide: FAS-813
ccaaguugcugaaucaa

SEQ ID NO: 9525 - RNA, 17 nt, Artificial Sequence
  Synthetic oligonucleotide: FAS-809
ccacugcaggaacgccc

SEQ ID NO: 9526 - RNA, 17 nt, Artificial Sequence
  Synthetic oligonucleotide: FAS-879
ccacuuugccuaucccc

SEQ ID NO: 9527 - RNA, 17 nt, Artificial Sequence
  Synthetic oligonucleotide: FAS-818
ccauccuccugaccacc

SEQ ID NO: 9528 - RNA, 17 nt, Artificial Sequence
  Synthetic oligonucleotide: FAS-893
cccaacuccguacugag

SEQ ID NO: 9529 - RNA, 17 nt, Artificial Sequence
  Synthetic oligonucleotide: FAS-817
cccauccuccugaccac

SEQ ID NO: 9530 - RNA, 20 nt, Artificial Sequence
  Synthetic oligonucleotide: FAS-621
cccccucccuacccgcgcgc

SEQ ID NO: 9531 - RNA, 17 nt, Artificial Sequence
  Synthetic oligonucleotide: FAS-862
cccggggauaggcaaag

SEQ ID NO: 9532 - RNA, 17 nt, Artificial Sequence
  Synthetic oligonucleotide: FAS-910
cccgguggucaggagga

SEQ ID NO: 9533 - RNA, 17 nt, Artificial Sequence
  Synthetic oligonucleotide: FAS-795
cccuuuucagagcccua

SEQ ID NO: 9534 - RNA, 17 nt, Artificial Sequence
  Synthetic oligonucleotide: FAS-911
ccgguggucaggaggau

SEQ ID NO: 9535 - RNA, 17 nt, Artificial Sequence
  Synthetic oligonucleotide: FAS-812
ccucccuacccgcgcgc

SEQ ID NO: 9536 - RNA, 20 nt, Artificial Sequence
  Synthetic oligonucleotide: FAS-604
ccucccuuuucagagcccua

SEQ ID NO: 9537 - RNA, 17 nt, Artificial Sequence
  Synthetic oligonucleotide: FAS-842
ccucuucucccgcgggu

SEQ ID NO: 9538 - RNA, 20 nt, Artificial Sequence
  Synthetic oligonucleotide: FAS-652
ccucuucucccgcggguugg

SEQ ID NO: 9539 - RNA, 17 nt, Artificial Sequence
  Synthetic oligonucleotide: FAS-928
ccugcgcgcggguaggg

SEQ ID NO: 9540 - RNA, 20 nt, Artificial Sequence
  Synthetic oligonucleotide: FAS-740
ccugcgcgcggguagggagg

SEQ ID NO: 9541 - RNA, 17 nt, Artificial Sequence
  Synthetic oligonucleotide: FAS-961
ccuggguacaggagccu

SEQ ID NO: 9542 - RNA, 17 nt, Artificial Sequence
  Synthetic oligonucleotide: FAS-805
ccuuuagaaagggcagg

SEQ ID NO: 9543 - RNA, 17 nt, Artificial Sequence
  Synthetic oligonucleotide: FAS-872
cgcgugcgggauugcgg

SEQ ID NO: 9544 - RNA, 20 nt, Artificial Sequence
  Synthetic oligonucleotide: FAS-728
cgcuggggaacgcccggguu

SEQ ID NO: 9545 - RNA, 20 nt, Artificial Sequence
  Synthetic oligonucleotide: FAS-649
cggagcugccucuucucccg

SEQ ID NO: 9546 - RNA, 17 nt, Artificial Sequence
  Synthetic oligonucleotide: FAS-876
cggcgcacgcgggcacc

SEQ ID NO: 9547 - RNA, 17 nt, Artificial Sequence
  Synthetic oligonucleotide: FAS-873
cgggauugcggcggcag

SEQ ID NO: 9548 - RNA, 17 nt, Artificial Sequence
  Synthetic oligonucleotide: FAS-869
cgggcgcgggacgcgug

SEQ ID NO: 9549 - RNA, 17 nt, Artificial Sequence
  Synthetic oligonucleotide: FAS-864
cggggauaggcaaagug

SEQ ID NO: 9550 - RNA, 20 nt, Artificial Sequence
  Synthetic oligonucleotide: FAS-753
cggggcguuccugcaguggc

SEQ ID NO: 9551 - RNA, 20 nt, Artificial Sequence
  Synthetic oligonucleotide: FAS-721
cgguggucaggaggauggga

SEQ ID NO: 9552 - RNA, 20 nt, Artificial Sequence
  Synthetic oligonucleotide: FAS-714
cgugccagugcccgccccug

SEQ ID NO: 9553 - RNA, 20 nt, Artificial Sequence
  Synthetic oligonucleotide: FAS-644
cucaggggcgggcacuggca

SEQ ID NO: 9554 - RNA, 20 nt, Artificial Sequence
  Synthetic oligonucleotide: FAS-606
cucauguugcagccacaaca

SEQ ID NO: 9555 - RNA, 17 nt, Artificial Sequence
  Synthetic oligonucleotide: FAS-886
cuccacccgggcaggag

SEQ ID NO: 9556 - RNA, 17 nt, Artificial Sequence
  Synthetic oligonucleotide: FAS-901
cuccgccugggcagcca

SEQ ID NO: 9557 - RNA, 17 nt, Artificial Sequence
  Synthetic oligonucleotide: FAS-917
cucgcuggggaacgccc

SEQ ID NO: 9558 - RNA, 17 nt, Artificial Sequence
  Synthetic oligonucleotide: FAS-857
cucuccugcccgggugg

SEQ ID NO: 9559 - RNA, 20 nt, Artificial Sequence
  Synthetic oligonucleotide: FAS-601
cucuugagaaauaaaaacua

SEQ ID NO: 9560 - RNA, 20 nt, Artificial Sequence
  Synthetic oligonucleotide: FAS-651
cugccucuucucccgcgggu

SEQ ID NO: 9561 - RNA, 20 nt, Artificial Sequence
  Synthetic oligonucleotide: FAS-770
cugccuggguacaggagccu

SEQ ID NO: 9562 - RNA, 17 nt, Artificial Sequence
  Synthetic oligonucleotide: FAS-929
cugcgcgcggguaggga

SEQ ID NO: 9563 - RNA, 17 nt, Artificial Sequence
  Synthetic oligonucleotide: FAS-7
cuggacccuccuaccuc

SEQ ID NO: 9564 - RNA, 20 nt, Artificial Sequence
  Synthetic oligonucleotide: FAS-645
cuggcacggaacacacccug

SEQ ID NO: 9565 - RNA, 17 nt, Artificial Sequence
  Synthetic oligonucleotide: FAS-968
cugggcuguccauguug

SEQ ID NO: 9566 - RNA, 17 nt, Artificial Sequence
  Synthetic oligonucleotide: FAS-826
cuggggagugagggaag

SEQ ID NO: 9567 - RNA, 20 nt, Artificial Sequence
  Synthetic oligonucleotide: FAS-663
cuggugagcccucuccugcc

SEQ ID NO: 9568 - RNA, 20 nt, Artificial Sequence
  Synthetic oligonucleotide: FAS-787
cuuaguuuuuauuucucaag

SEQ ID NO: 9569 - RNA, 20 nt, Artificial Sequence
  Synthetic oligonucleotide: FAS-626
cuucccauccuccugaccac

SEQ ID NO: 9570 - RNA, 17 nt, Artificial Sequence
  Synthetic oligonucleotide: FAS-843
cuucucccgcggguugg

SEQ ID NO: 9571 - RNA, 20 nt, Artificial Sequence
  Synthetic oligonucleotide: FAS-635
cuucuggggagugagggaag

SEQ ID NO: 9572 - RNA, 20 nt, Artificial Sequence
  Synthetic oligonucleotide: FAS-603
cuugagaaauaaaaacuaag

SEQ ID NO: 9573 - RNA, 17 nt, Artificial Sequence
  Synthetic oligonucleotide: FAS-831
cuuggcuggagccucag

SEQ ID NO: 9574 - RNA, 20 nt, Artificial Sequence
  Synthetic oligonucleotide: FAS-641
cuuggcuggagccucagggg

SEQ ID NO: 9575 - RNA, 20 nt, Artificial Sequence
  Synthetic oligonucleotide: FAS-615
cuuuagaaagggcaggaggc

SEQ ID NO: 9576 - RNA, 17 nt, Artificial Sequence
  Synthetic oligonucleotide: FAS-885
uaagccuccacccgggc

SEQ ID NO: 9577 - RNA, 20 nt, Artificial Sequence
  Synthetic oligonucleotide: FAS-611
uacagcagaagccuuuagaa

SEQ ID NO: 9578 - RNA, 17 nt, Artificial Sequence
  Synthetic oligonucleotide: FAS-806
uagaaagggcaggaggc

SEQ ID NO: 9579 - RNA, 20 nt, Artificial Sequence
  Synthetic oligonucleotide: FAS-608
uagccaaggcuccuguaccc

SEQ ID NO: 9580 - RNA, 20 nt, Artificial Sequence
  Synthetic oligonucleotide: FAS-676
uaggcaaaguggggcgggcg

SEQ ID NO: 9581 - RNA, 20 nt, Artificial Sequence
  Synthetic oligonucleotide: FAS-762
uaguucaaccugggaaguug

SEQ ID NO: 9582 - RNA, 17 nt, Artificial Sequence
  Synthetic oligonucleotide: FAS-965
ucagagaaagacuugcg

SEQ ID NO: 9583 - RNA, 20 nt, Artificial Sequence
  Synthetic oligonucleotide: FAS-746
ucagggugaggaaggaguca

SEQ ID NO: 9584 - RNA, 17 nt, Artificial Sequence
  Synthetic oligonucleotide: FAS-887
uccacccgggcaggaga

SEQ ID NO: 9585 - RNA, 20 nt, Artificial Sequence
  Synthetic oligonucleotide: FAS-628
ucccauccuccugaccaccg

SEQ ID NO: 9586 - RNA, 20 nt, Artificial Sequence
  Synthetic oligonucleotide: FAS-703
uccccaacuccguacugagc

SEQ ID NO: 9587 - RNA, 20 nt, Artificial Sequence
  Synthetic oligonucleotide: FAS-673
ucccggggauaggcaaagug

SEQ ID NO: 9588 - RNA, 20 nt, Artificial Sequence
  Synthetic oligonucleotide: FAS-711
uccgccugggcagccagggc

SEQ ID NO: 9589 - RNA, 20 nt, Artificial Sequence
  Synthetic oligonucleotide: FAS-602
ucuugagaaauaaaaacuaa

SEQ ID NO: 9590 - RNA, 17 nt, Artificial Sequence
  Synthetic oligonucleotide: FAS-788
ugaauguuuaauauagc

SEQ ID NO: 9591 - RNA, 20 nt, Artificial Sequence
  Synthetic oligonucleotide: FAS-777
ugacugggcuguccauguug

SEQ ID NO: 9592 - RNA, 20 nt, Artificial Sequence
  Synthetic oligonucleotide: FAS-640
ugacuuggcuggagccucag

SEQ ID NO: 9593 - RNA, 17 nt, Artificial Sequence
  Synthetic oligonucleotide: FAS-793
ugagaaauaaaaacuaa

SEQ ID NO: 9594 - RNA, 17 nt, Artificial Sequence
  Synthetic oligonucleotide: FAS-855
ugagcccucuccugccc

SEQ ID NO: 9595 - RNA, 20 nt, Artificial Sequence
  Synthetic oligonucleotide: FAS-665
ugagcccucuccugcccggg

SEQ ID NO: 9596 - RNA, 17 nt, Artificial Sequence
  Synthetic oligonucleotide: FAS-930
ugcgcgcggguagggag

SEQ ID NO: 9597 - RNA, 20 nt, Artificial Sequence
  Synthetic oligonucleotide: FAS-683
ugcggcggcagcggcgcacg

SEQ ID NO: 9598 - RNA, 17 nt, Artificial Sequence
  Synthetic oligonucleotide: FAS-851
ugcucaacaaccaugcu

SEQ ID NO: 9599 - RNA, 17 nt, Artificial Sequence
  Synthetic oligonucleotide: FAS-814
uggagcccuccccaacc

SEQ ID NO: 9600 - RNA, 17 nt, Artificial Sequence
  Synthetic oligonucleotide: FAS-957
uggagcucagagcgcag

SEQ ID NO: 9601 - RNA, 20 nt, Artificial Sequence
  Synthetic oligonucleotide: FAS-755
uggcaugcucacuucaggug

SEQ ID NO: 9602 - RNA, 20 nt, Artificial Sequence
  Synthetic oligonucleotide: FAS-737
uggccugcgcgcggguaggg

SEQ ID NO: 9603 - RNA, 17 nt, Artificial Sequence
  Synthetic oligonucleotide: FAS-913
ugggaaggaagccucgc

SEQ ID NO: 9604 - RNA, 17 nt, Artificial Sequence
  Synthetic oligonucleotide: FAS-942
ugggcauuccugucccg

SEQ ID NO: 9605 - RNA, 17 nt, Artificial Sequence
  Synthetic oligonucleotide: FAS-919
uggggaacgcccggguu

SEQ ID NO: 9606 - RNA, 17 nt, Artificial Sequence
  Synthetic oligonucleotide: FAS-912
uggucaggaggauggga

SEQ ID NO: 9607 - RNA, 20 nt, Artificial Sequence
  Synthetic oligonucleotide: FAS-664
uggugagcccucuccugccc

SEQ ID NO: 9608 - RNA, 20 nt, Artificial Sequence
  Synthetic oligonucleotide: FAS-598
ugugaauguuuaauauagcu

SEQ ID NO: 9609 - RNA, 17 nt, Artificial Sequence
  Synthetic oligonucleotide: FAS-822
uguucaaagacgcuucu

SEQ ID NO: 9610 - RNA, 17 nt, Artificial Sequence
  Synthetic oligonucleotide: FAS-953
uucaaccugggaaguug

SEQ ID NO: 9611 - RNA, 20 nt, Artificial Sequence
  Synthetic oligonucleotide: FAS-763
uucaaccugggaaguugggg

SEQ ID NO: 9612 - RNA, 20 nt, Artificial Sequence
  Synthetic oligonucleotide: FAS-627
uucccauccuccugaccacc

SEQ ID NO: 9613 - RNA, 20 nt, Artificial Sequence
  Synthetic oligonucleotide: FAS-702
uuccccaacuccguacugag

SEQ ID NO: 9614 - RNA, 17 nt, Artificial Sequence
  Synthetic oligonucleotide: FAS-792
uugagaaauaaaaacua

SEQ ID NO: 9615 - RNA, 17 nt, Artificial Sequence
  Synthetic oligonucleotide: FAS-926
uuggccugcgcgcgggu

SEQ ID NO: 9616 - RNA, 20 nt, Artificial Sequence
  Synthetic oligonucleotide: FAS-642
uuggcuggagccucaggggc

SEQ ID NO: 9617 - RNA, 20 nt, Artificial Sequence
  Synthetic oligonucleotide: FAS-597
uugugaauguuuaauauagc

SEQ ID NO: 9618 - RNA, 20 nt, Artificial Sequence
  Synthetic oligonucleotide: FAS-1779
ccuaucaacaccuacaagac

SEQ ID NO: 9619 - RNA, 20 nt, Artificial Sequence
  Synthetic oligonucleotide: FAS-1780
aucaacaccuacaagacugg

SEQ ID NO: 9620 - RNA, 20 nt, Artificial Sequence
  Synthetic oligonucleotide: FAS-1781
cagugacagaugcaaaacac

SEQ ID NO: 9621 - RNA, 20 nt, Artificial Sequence
  Synthetic oligonucleotide: FAS-1782
agugacagaugcaaaacaca

SEQ ID NO: 9622 - RNA, 20 nt, Artificial Sequence
  Synthetic oligonucleotide: FAS-1783
agaugcaaaacacaggguga

SEQ ID NO: 9623 - RNA, 20 nt, Artificial Sequence
  Synthetic oligonucleotide: FAS-1784
cagggugauggaaagcccuc

SEQ ID NO: 9624 - RNA, 20 nt, Artificial Sequence
  Synthetic oligonucleotide: FAS-1785
ggugauggaaagcccucagg

SEQ ID NO: 9625 - RNA, 20 nt, Artificial Sequence
  Synthetic oligonucleotide: FAS-1786
gugauggaaagcccucagga

SEQ ID NO: 9626 - RNA, 20 nt, Artificial Sequence
  Synthetic oligonucleotide: FAS-1787
gguaaccuaaccuagauuug

SEQ ID NO: 9627 - RNA, 20 nt, Artificial Sequence
  Synthetic oligonucleotide: FAS-1788
guaaccuaaccuagauuuga

SEQ ID NO: 9628 - RNA, 20 nt, Artificial Sequence
  Synthetic oligonucleotide: FAS-1789
cuagauuugagggcccaaac

SEQ ID NO: 9629 - RNA, 20 nt, Artificial Sequence
  Synthetic oligonucleotide: FAS-1790
agaagaaaaugucaacugag

SEQ ID NO: 9630 - RNA, 20 nt, Artificial Sequence
  Synthetic oligonucleotide: FAS-1791
ucaacugagaggaagccuga

SEQ ID NO: 9631 - RNA, 20 nt, Artificial Sequence
  Synthetic oligonucleotide: FAS-1792
gaagccugaaggaugaacag

SEQ ID NO: 9632 - RNA, 20 nt, Artificial Sequence
  Synthetic oligonucleotide: FAS-1793
aagccugaaggaugaacagu

SEQ ID NO: 9633 - RNA, 20 nt, Artificial Sequence
  Synthetic oligonucleotide: FAS-1794
augaacagugggcuaagcaa

SEQ ID NO: 9634 - RNA, 20 nt, Artificial Sequence
  Synthetic oligonucleotide: FAS-1795
ugaacagugggcuaagcaaa

SEQ ID NO: 9635 - RNA, 20 nt, Artificial Sequence
  Synthetic oligonucleotide: FAS-1796
gguuauuaauguguuauuaa

SEQ ID NO: 9636 - RNA, 20 nt, Artificial Sequence
  Synthetic oligonucleotide: FAS-1797
guuauuaauguguuauuaau

SEQ ID NO: 9637 - RNA, 20 nt, Artificial Sequence
  Synthetic oligonucleotide: FAS-1798
auuaauggguugaaucuaau

SEQ ID NO: 9638 - RNA, 20 nt, Artificial Sequence
  Synthetic oligonucleotide: FAS-1799
uuaauggguugaaucuaauu

SEQ ID NO: 9639 - RNA, 20 nt, Artificial Sequence
  Synthetic oligonucleotide: FAS-1800
uggguugaaucuaauuggga

SEQ ID NO: 9640 - RNA, 20 nt, Artificial Sequence
  Synthetic oligonucleotide: FAS-1801
ggguugaaucuaauugggaa

SEQ ID NO: 9641 - RNA, 20 nt, Artificial Sequence
  Synthetic oligonucleotide: FAS-1802
aucuaauugggaagggagag

SEQ ID NO: 9642 - RNA, 20 nt, Artificial Sequence
  Synthetic oligonucleotide: FAS-1803
gggagagagguugcagagug

SEQ ID NO: 9643 - RNA, 20 nt, Artificial Sequence
  Synthetic oligonucleotide: FAS-1804
gcagagugaggugcagagcu

SEQ ID NO: 9644 - RNA, 20 nt, Artificial Sequence
  Synthetic oligonucleotide: FAS-1805
gagugaggugcagagcuugg

SEQ ID NO: 9645 - RNA, 20 nt, Artificial Sequence
  Synthetic oligonucleotide: FAS-1806
agcuugguggacgaugccaa

SEQ ID NO: 9646 - RNA, 20 nt, Artificial Sequence
  Synthetic oligonucleotide: FAS-1807
aaccuuuaguguguccaguc

SEQ ID NO: 9647 - RNA, 20 nt, Artificial Sequence
  Synthetic oligonucleotide: FAS-1808
cuggaacugcauccaaauuc

SEQ ID NO: 9648 - RNA, 20 nt, Artificial Sequence
  Synthetic oligonucleotide: FAS-1809
gauuuuuuuuuaaagaaaau

SEQ ID NO: 9649 - RNA, 20 nt, Artificial Sequence
  Synthetic oligonucleotide: FAS-1810
uuuuuuaaagaaaauuggcc

SEQ ID NO: 9650 - RNA, 20 nt, Artificial Sequence
  Synthetic oligonucleotide: FAS-1811
caggaaauaaugaguaacga

SEQ ID NO: 9651 - RNA, 20 nt, Artificial Sequence
  Synthetic oligonucleotide: FAS-1812
aauaaugaguaacgaaggac

SEQ ID NO: 9652 - RNA, 17 nt, Artificial Sequence
  Synthetic oligonucleotide: FAS-1813
aucaacaccuacaagac

SEQ ID NO: 9653 - RNA, 17 nt, Artificial Sequence
  Synthetic oligonucleotide: FAS-1814
aacaccuacaagacugg

SEQ ID NO: 9654 - RNA, 17 nt, Artificial Sequence
  Synthetic oligonucleotide: FAS-1815
ugacagaugcaaaacac

SEQ ID NO: 9655 - RNA, 17 nt, Artificial Sequence
  Synthetic oligonucleotide: FAS-1816
gacagaugcaaaacaca

SEQ ID NO: 9656 - RNA, 17 nt, Artificial Sequence
  Synthetic oligonucleotide: FAS-1817
ugcaaaacacaggguga

SEQ ID NO: 9657 - RNA, 17 nt, Artificial Sequence
  Synthetic oligonucleotide: FAS-1818
ggugauggaaagcccuc

SEQ ID NO: 9658 - RNA, 17 nt, Artificial Sequence
  Synthetic oligonucleotide: FAS-1819
gauggaaagcccucagg

SEQ ID NO: 9659 - RNA, 17 nt, Artificial Sequence
  Synthetic oligonucleotide: FAS-1820
auggaaagcccucagga

SEQ ID NO: 9660 - RNA, 17 nt, Artificial Sequence
  Synthetic oligonucleotide: FAS-1821
aaccuaaccuagauuug

SEQ ID NO: 9661 - RNA, 17 nt, Artificial Sequence
  Synthetic oligonucleotide: FAS-1822
accuaaccuagauuuga

SEQ ID NO: 9662 - RNA, 17 nt, Artificial Sequence
  Synthetic oligonucleotide: FAS-1823
gauuugagggcccaaac

SEQ ID NO: 9663 - RNA, 17 nt, Artificial Sequence
  Synthetic oligonucleotide: FAS-1824
agaaaaugucaacugag

SEQ ID NO: 9664 - RNA, 17 nt, Artificial Sequence
  Synthetic oligonucleotide: FAS-1825
acugagaggaagccuga

SEQ ID NO: 9665 - RNA, 17 nt, Artificial Sequence
  Synthetic oligonucleotide: FAS-1826
gccugaaggaugaacag

SEQ ID NO: 9666 - RNA, 17 nt, Artificial Sequence
  Synthetic oligonucleotide: FAS-1827
ccugaaggaugaacagu

SEQ ID NO: 9667 - RNA, 17 nt, Artificial Sequence
  Synthetic oligonucleotide: FAS-1828
aacagugggcuaagcaa

SEQ ID NO: 9668 - RNA, 17 nt, Artificial Sequence
  Synthetic oligonucleotide: FAS-1829
acagugggcuaagcaaa

SEQ ID NO: 9669 - RNA, 17 nt, Artificial Sequence
  Synthetic oligonucleotide: FAS-1830
uauuaauguguuauuaa

SEQ ID NO: 9670 - RNA, 17 nt, Artificial Sequence
  Synthetic oligonucleotide: FAS-1831
auuaauguguuauuaau

SEQ ID NO: 9671 - RNA, 17 nt, Artificial Sequence
  Synthetic oligonucleotide: FAS-1832
aauggguugaaucuaau

SEQ ID NO: 9672 - RNA, 17 nt, Artificial Sequence
  Synthetic oligonucleotide: FAS-1833
auggguugaaucuaauu

SEQ ID NO: 9673 - RNA, 17 nt, Artificial Sequence
  Synthetic oligonucleotide: FAS-1834
guugaaucuaauuggga

SEQ ID NO: 9674 - RNA, 17 nt, Artificial Sequence
  Synthetic oligonucleotide: FAS-1835
uugaaucuaauugggaa

SEQ ID NO: 9675 - RNA, 17 nt, Artificial Sequence
  Synthetic oligonucleotide: FAS-1836
uaauugggaagggagag

SEQ ID NO: 9676 - RNA, 17 nt, Artificial Sequence
  Synthetic oligonucleotide: FAS-1837
agagagguugcagagug

SEQ ID NO: 9677 - RNA, 17 nt, Artificial Sequence
  Synthetic oligonucleotide: FAS-1838
gagugaggugcagagcu

SEQ ID NO: 9678 - RNA, 17 nt, Artificial Sequence
  Synthetic oligonucleotide: FAS-1839
ugaggugcagagcuugg

SEQ ID NO: 9679 - RNA, 17 nt, Artificial Sequence
  Synthetic oligonucleotide: FAS-1840
uugguggacgaugccaa

SEQ ID NO: 9680 - RNA, 17 nt, Artificial Sequence
  Synthetic oligonucleotide: FAS-1841
cuuuaguguguccaguc

SEQ ID NO: 9681 - RNA, 17 nt, Artificial Sequence
  Synthetic oligonucleotide: FAS-1842
gaacugcauccaaauuc

SEQ ID NO: 9682 - RNA, 17 nt, Artificial Sequence
  Synthetic oligonucleotide: FAS-1843
uuuuuuuuaaagaaaau

SEQ ID NO: 9683 - RNA, 17 nt, Artificial Sequence
  Synthetic oligonucleotide: FAS-1844
uuuaaagaaaauuggcc

SEQ ID NO: 9684 - RNA, 17 nt, Artificial Sequence
  Synthetic oligonucleotide: FAS-1845
gaaauaaugaguaacga

SEQ ID NO: 9685 - RNA, 17 nt, Artificial Sequence
  Synthetic oligonucleotide: FAS-1846
aaugaguaacgaaggac

SEQ ID NO: 9686 - RNA, 20 nt, Artificial Sequence
  Synthetic oligonucleotide: FAS-1847
cuucguuacucauuauuucc

SEQ ID NO: 9687 - RNA, 20 nt, Artificial Sequence
  Synthetic oligonucleotide: FAS-1848
cuuguaauucuuucgugcuc

SEQ ID NO: 9688 - RNA, 20 nt, Artificial Sequence
  Synthetic oligonucleotide: FAS-1849
guucaaagucacuauugcuu

SEQ ID NO: 9689 - RNA, 20 nt, Artificial Sequence
  Synthetic oligonucleotide: FAS-1850
aagucacuauugcuuuggaa

SEQ ID NO: 9690 - RNA, 20 nt, Artificial Sequence
  Synthetic oligonucleotide: FAS-1851
uggaacgguagauagcucuu

SEQ ID NO: 9691 - RNA, 20 nt, Artificial Sequence
  Synthetic oligonucleotide: FAS-1852
uuuagcaugaauuuuacaga

SEQ ID NO: 9692 - RNA, 20 nt, Artificial Sequence
  Synthetic oligonucleotide: FAS-1853
aauuuuacagaagguauguu

SEQ ID NO: 9693 - RNA, 20 nt, Artificial Sequence
  Synthetic oligonucleotide: FAS-1854
aucauuacugaaccugaauu

SEQ ID NO: 9694 - RNA, 20 nt, Artificial Sequence
  Synthetic oligonucleotide: FAS-1855
auuuggaugcaguuccagac

SEQ ID NO: 9695 - RNA, 20 nt, Artificial Sequence
  Synthetic oligonucleotide: FAS-1856
uuccagacuggacacacuaa

SEQ ID NO: 9696 - RNA, 20 nt, Artificial Sequence
  Synthetic oligonucleotide: FAS-1857
uaaagguuucaguauuccuu

SEQ ID NO: 9697 - RNA, 20 nt, Artificial Sequence
  Synthetic oligonucleotide: FAS-1858
uagcccacuguucauccuuc

SEQ ID NO: 9698 - RNA, 20 nt, Artificial Sequence
  Synthetic oligonucleotide: FAS-1859
ucucaguugacauuuucuuc

SEQ ID NO: 9699 - RNA, 20 nt, Artificial Sequence
  Synthetic oligonucleotide: FAS-1860
auuuucuucuggagccuguu

SEQ ID NO: 9700 - RNA, 20 nt, Artificial Sequence
  Synthetic oligonucleotide: FAS-1861
uuuucuucuggagccuguuu

SEQ ID NO: 9701 - RNA, 20 nt, Artificial Sequence
  Synthetic oligonucleotide: FAS-1862
cuguuugggcccucaaaucu

SEQ ID NO: 9702 - RNA, 20 nt, Artificial Sequence
  Synthetic oligonucleotide: FAS-1863
ugggcccucaaaucuagguu

SEQ ID NO: 9703 - RNA, 20 nt, Artificial Sequence
  Synthetic oligonucleotide: FAS-1864
uagguuagguuacccuccug

SEQ ID NO: 9704 - RNA, 20 nt, Artificial Sequence
  Synthetic oligonucleotide: FAS-1865
agguuagguuacccuccuga

SEQ ID NO: 9705 - RNA, 20 nt, Artificial Sequence
  Synthetic oligonucleotide: FAS-1866
gcacuuaccaccagucuugu

SEQ ID NO: 9706 - RNA, 20 nt, Artificial Sequence
  Synthetic oligonucleotide: FAS-1867
ccagucuuguagguguugau

SEQ ID NO: 9707 - RNA, 17 nt, Artificial Sequence
  Synthetic oligonucleotide: FAS-1868
cguuacucauuauuucc

SEQ ID NO: 9708 - RNA, 17 nt, Artificial Sequence
  Synthetic oligonucleotide: FAS-1869
guaauucuuucgugcuc

SEQ ID NO: 9709 - RNA, 17 nt, Artificial Sequence
  Synthetic oligonucleotide: FAS-1870
caaagucacuauugcuu

SEQ ID NO: 9710 - RNA, 17 nt, Artificial Sequence
  Synthetic oligonucleotide: FAS-1871
ucacuauugcuuuggaa

SEQ ID NO: 9711 - RNA, 17 nt, Artificial Sequence
  Synthetic oligonucleotide: FAS-1872
aacgguagauagcucuu

SEQ ID NO: 9712 - RNA, 17 nt, Artificial Sequence
  Synthetic oligonucleotide: FAS-1873
agcaugaauuuuacaga

SEQ ID NO: 9713 - RNA, 17 nt, Artificial Sequence
  Synthetic oligonucleotide: FAS-1874
uuuacagaagguauguu

SEQ ID NO: 9714 - RNA, 17 nt, Artificial Sequence
  Synthetic oligonucleotide: FAS-1875
auuacugaaccugaauu

SEQ ID NO: 9715 - RNA, 17 nt, Artificial Sequence
  Synthetic oligonucleotide: FAS-1876
uggaugcaguuccagac

SEQ ID NO: 9716 - RNA, 17 nt, Artificial Sequence
  Synthetic oligonucleotide: FAS-1877
cagacuggacacacuaa

SEQ ID NO: 9717 - RNA, 17 nt, Artificial Sequence
  Synthetic oligonucleotide: FAS-1878
agguuucaguauuccuu

SEQ ID NO: 9718 - RNA, 17 nt, Artificial Sequence
  Synthetic oligonucleotide: FAS-1879
cccacuguucauccuuc

SEQ ID NO: 9719 - RNA, 17 nt, Artificial Sequence
  Synthetic oligonucleotide: FAS-1880
caguugacauuuucuuc

SEQ ID NO: 9720 - RNA, 17 nt, Artificial Sequence
  Synthetic oligonucleotide: FAS-1881
uucuucuggagccuguu

SEQ ID NO: 9721 - RNA, 17 nt, Artificial Sequence
  Synthetic oligonucleotide: FAS-1882
ucuucuggagccuguuu

SEQ ID NO: 9722 - RNA, 17 nt, Artificial Sequence
  Synthetic oligonucleotide: FAS-1883
uuugggcccucaaaucu

SEQ ID NO: 9723 - RNA, 17 nt, Artificial Sequence
  Synthetic oligonucleotide: FAS-1884
gcccucaaaucuagguu

SEQ ID NO: 9724 - RNA, 17 nt, Artificial Sequence
  Synthetic oligonucleotide: FAS-1885
guuagguuacccuccug

SEQ ID NO: 9725 - RNA, 17 nt, Artificial Sequence
  Synthetic oligonucleotide: FAS-1886
uuagguuacccuccuga

SEQ ID NO: 9726 - RNA, 17 nt, Artificial Sequence
  Synthetic oligonucleotide: FAS-1887
cuuaccaccagucuugu

SEQ ID NO: 9727 - RNA, 17 nt, Artificial Sequence
  Synthetic oligonucleotide: FAS-1888
gucuuguagguguugau

SEQ ID NO: 9728 - RNA, 20 nt, Artificial Sequence
  Synthetic oligonucleotide: FAS-685
cagcggcgcacgcgggcacc

SEQ ID NO: 9729 - RNA, 20 nt, Artificial Sequence
  Synthetic oligonucleotide: FAS-686
agcggcgcacgcgggcaccu

SEQ ID NO: 9730 - RNA, 20 nt, Artificial Sequence
  Synthetic oligonucleotide: FAS-1891
cgcacgcgggcaccugggag

SEQ ID NO: 9731 - RNA, 20 nt, Artificial Sequence
  Synthetic oligonucleotide: FAS-1892
acgcgggcaccugggagcgg

SEQ ID NO: 9732 - RNA, 20 nt, Artificial Sequence
  Synthetic oligonucleotide: FAS-1893
cgcgggcaccugggagcggc

SEQ ID NO: 9733 - RNA, 20 nt, Artificial Sequence
  Synthetic oligonucleotide: FAS-1894
cugggagcggcgggcugcug

SEQ ID NO: 9734 - RNA, 20 nt, Artificial Sequence
  Synthetic oligonucleotide: FAS-1895
ugggagcggcgggcugcugc

SEQ ID NO: 9735 - RNA, 20 nt, Artificial Sequence
  Synthetic oligonucleotide: FAS-1896
gagcggcgggcugcugcggg

SEQ ID NO: 9736 - RNA, 20 nt, Artificial Sequence
  Synthetic oligonucleotide: FAS-1897
cgggcugcugcgggaggcgu

SEQ ID NO: 9737 - RNA, 20 nt, Artificial Sequence
  Synthetic oligonucleotide: FAS-1898
cugcgggaggcguuggagac

SEQ ID NO: 9738 - RNA, 20 nt, Artificial Sequence
  Synthetic oligonucleotide: FAS-1899
aggcguuggagacuggcucc

SEQ ID NO: 9739 - RNA, 20 nt, Artificial Sequence
  Synthetic oligonucleotide: FAS-1900
ggcguuggagacuggcuccc

SEQ ID NO: 9740 - RNA, 20 nt, Artificial Sequence
  Synthetic oligonucleotide: FAS-1901
gcguuggagacuggcucccg

SEQ ID NO: 9741 - RNA, 20 nt, Artificial Sequence
  Synthetic oligonucleotide: FAS-1902
cguuggagacuggcucccgg

SEQ ID NO: 9742 - RNA, 20 nt, Artificial Sequence
  Synthetic oligonucleotide: FAS-1903
acuggcucccgggggcuguu

SEQ ID NO: 9743 - RNA, 20 nt, Artificial Sequence
  Synthetic oligonucleotide: FAS-1904
ggcuguuaggaccuucccuc

SEQ ID NO: 9744 - RNA, 20 nt, Artificial Sequence
  Synthetic oligonucleotide: FAS-1905
uuaggaccuucccucaggcc

SEQ ID NO: 9745 - RNA, 20 nt, Artificial Sequence
  Synthetic oligonucleotide: FAS-1906
uaggaccuucccucaggccc

SEQ ID NO: 9746 - RNA, 20 nt, Artificial Sequence
  Synthetic oligonucleotide: FAS-1907
ggcccgggugcucagaacgc

SEQ ID NO: 9747 - RNA, 20 nt, Artificial Sequence
  Synthetic oligonucleotide: FAS-1908
ccgggugcucagaacgcugg

SEQ ID NO: 9748 - RNA, 20 nt, Artificial Sequence
  Synthetic oligonucleotide: FAS-1909
gcuggaggacuugcuuuucu

SEQ ID NO: 9749 - RNA, 20 nt, Artificial Sequence
  Synthetic oligonucleotide: FAS-1910
cuggaggacuugcuuuucuu

SEQ ID NO: 9750 - RNA, 20 nt, Artificial Sequence
  Synthetic oligonucleotide: FAS-1911
augcgaagugcugaccccgc

SEQ ID NO: 9751 - RNA, 20 nt, Artificial Sequence
  Synthetic oligonucleotide: FAS-1912
ugcgaagugcugaccccgcu

SEQ ID NO: 9752 - RNA, 20 nt, Artificial Sequence
  Synthetic oligonucleotide: FAS-1913
aagugcugaccccgcugggc

SEQ ID NO: 9753 - RNA, 20 nt, Artificial Sequence
  Synthetic oligonucleotide: FAS-1914
ugcugaccccgcugggcagg

SEQ ID NO: 9754 - RNA, 20 nt, Artificial Sequence
  Synthetic oligonucleotide: FAS-1915
gcugaccccgcugggcaggc

SEQ ID NO: 9755 - RNA, 20 nt, Artificial Sequence
  Synthetic oligonucleotide: FAS-1916
cugaccccgcugggcaggcg

SEQ ID NO: 9756 - RNA, 20 nt, Artificial Sequence
  Synthetic oligonucleotide: FAS-1917
cugggcaggcggggcagcuc

SEQ ID NO: 9757 - RNA, 20 nt, Artificial Sequence
  Synthetic oligonucleotide: FAS-1918
ggggcagcuccggcgcuccu

SEQ ID NO: 9758 - RNA, 20 nt, Artificial Sequence
  Synthetic oligonucleotide: FAS-1919
gaccacugcgcuccacguug

SEQ ID NO: 9759 - RNA, 20 nt, Artificial Sequence
  Synthetic oligonucleotide: FAS-1920
cacugcgcuccacguugagg

SEQ ID NO: 9760 - RNA, 20 nt, Artificial Sequence
  Synthetic oligonucleotide: FAS-1921
acugcgcuccacguugaggu

SEQ ID NO: 9761 - RNA, 20 nt, Artificial Sequence
  Synthetic oligonucleotide: FAS-1922
gcuccacguugaggugggcg

SEQ ID NO: 9762 - RNA, 20 nt, Artificial Sequence
  Synthetic oligonucleotide: FAS-1923
cuccacguugaggugggcgu

SEQ ID NO: 9763 - RNA, 20 nt, Artificial Sequence
  Synthetic oligonucleotide: FAS-1924
uccacguugaggugggcgug

SEQ ID NO: 9764 - RNA, 20 nt, Artificial Sequence
  Synthetic oligonucleotide: FAS-1925
guugaggugggcguggggug

SEQ ID NO: 9765 - RNA, 20 nt, Artificial Sequence
  Synthetic oligonucleotide: FAS-1926
ggugggcguggggugcggac

SEQ ID NO: 9766 - RNA, 20 nt, Artificial Sequence
  Synthetic oligonucleotide: FAS-1927
ggugcggacaggaauugaag

SEQ ID NO: 9767 - RNA, 20 nt, Artificial Sequence
  Synthetic oligonucleotide: FAS-1928
caggaauugaagcggaaguc

SEQ ID NO: 9768 - RNA, 20 nt, Artificial Sequence
  Synthetic oligonucleotide: FAS-1929
aggaauugaagcggaagucu

SEQ ID NO: 9769 - RNA, 20 nt, Artificial Sequence
  Synthetic oligonucleotide: FAS-1930
gcggaagucugggaagcuuu

SEQ ID NO: 9770 - RNA, 20 nt, Artificial Sequence
  Synthetic oligonucleotide: FAS-1931
cggaagucugggaagcuuua

SEQ ID NO: 9771 - RNA, 20 nt, Artificial Sequence
  Synthetic oligonucleotide: FAS-1932
cugggaagcuuuagggucgc

SEQ ID NO: 9772 - RNA, 20 nt, Artificial Sequence
  Synthetic oligonucleotide: FAS-1933
ggaagcuuuagggucgcugg

SEQ ID NO: 9773 - RNA, 20 nt, Artificial Sequence
  Synthetic oligonucleotide: FAS-1934
gaagcuuuagggucgcugga

SEQ ID NO: 9774 - RNA, 20 nt, Artificial Sequence
  Synthetic oligonucleotide: FAS-1935
aagcuuuagggucgcuggag

SEQ ID NO: 9775 - RNA, 20 nt, Artificial Sequence
  Synthetic oligonucleotide: FAS-1936
agcuuuagggucgcuggagg

SEQ ID NO: 9776 - RNA, 20 nt, Artificial Sequence
  Synthetic oligonucleotide: FAS-1937
gggucgcuggagggggaccc

SEQ ID NO: 9777 - RNA, 20 nt, Artificial Sequence
  Synthetic oligonucleotide: FAS-1938
cgcuggagggggaccccggu

SEQ ID NO: 9778 - RNA, 20 nt, Artificial Sequence
  Synthetic oligonucleotide: FAS-1939
gggggaccccgguuggagag

SEQ ID NO: 9779 - RNA, 20 nt, Artificial Sequence
  Synthetic oligonucleotide: FAS-1940
accccgguuggagagaggag

SEQ ID NO: 9780 - RNA, 20 nt, Artificial Sequence
  Synthetic oligonucleotide: FAS-1941
ggagagaggagcggaacucc

SEQ ID NO: 9781 - RNA, 20 nt, Artificial Sequence
  Synthetic oligonucleotide: FAS-1942
gcccugacaagccaagccaa

SEQ ID NO: 9782 - RNA, 20 nt, Artificial Sequence
  Synthetic oligonucleotide: FAS-1943
gccaagccaaagguccgcuc

SEQ ID NO: 9783 - RNA, 20 nt, Artificial Sequence
  Synthetic oligonucleotide: FAS-1944
gccaaagguccgcuccggcg

SEQ ID NO: 9784 - RNA, 20 nt, Artificial Sequence
  Synthetic oligonucleotide: FAS-1945
ccaaagguccgcuccggcgc

SEQ ID NO: 9785 - RNA, 20 nt, Artificial Sequence
  Synthetic oligonucleotide: FAS-1946
aagguccgcuccggcgcggg

SEQ ID NO: 9786 - RNA, 20 nt, Artificial Sequence
  Synthetic oligonucleotide: FAS-1947
agguccgcuccggcgcgggu

SEQ ID NO: 9787 - RNA, 20 nt, Artificial Sequence
  Synthetic oligonucleotide: FAS-1948
ggugagugcgcgccgccccg

SEQ ID NO: 9788 - RNA, 20 nt, Artificial Sequence
  Synthetic oligonucleotide: FAS-1949
gugagugcgcgccgccccgc

SEQ ID NO: 9789 - RNA, 20 nt, Artificial Sequence
  Synthetic oligonucleotide: FAS-1950
ugagugcgcgccgccccgcg

SEQ ID NO: 9790 - RNA, 20 nt, Artificial Sequence
  Synthetic oligonucleotide: FAS-1951
gagugcgcgccgccccgcgg

SEQ ID NO: 9791 - RNA, 20 nt, Artificial Sequence
  Synthetic oligonucleotide: FAS-1952
ugcgcgccgccccgcggggg

SEQ ID NO: 9792 - RNA, 20 nt, Artificial Sequence
  Synthetic oligonucleotide: FAS-1953
gcgcgccgccccgcgggggc

SEQ ID NO: 9793 - RNA, 20 nt, Artificial Sequence
  Synthetic oligonucleotide: FAS-1954
cgcgccgccccgcgggggcg

SEQ ID NO: 9794 - RNA, 20 nt, Artificial Sequence
  Synthetic oligonucleotide: FAS-1955
aacagauauugcucauuuuc

SEQ ID NO: 9795 - RNA, 20 nt, Artificial Sequence
  Synthetic oligonucleotide: FAS-1956
uucuggcaguucucagacgu

SEQ ID NO: 9796 - RNA, 20 nt, Artificial Sequence
  Synthetic oligonucleotide: FAS-1957
auaagucagcaccgaagcag

SEQ ID NO: 9797 - RNA, 20 nt, Artificial Sequence
  Synthetic oligonucleotide: FAS-1958
caccgaagcagugguuaagc

SEQ ID NO: 9798 - RNA, 20 nt, Artificial Sequence
  Synthetic oligonucleotide: FAS-1959
cgaagcagugguuaagccgg

SEQ ID NO: 9799 - RNA, 20 nt, Artificial Sequence
  Synthetic oligonucleotide: FAS-1960
gaagcagugguuaagccgga

SEQ ID NO: 9800 - RNA, 20 nt, Artificial Sequence
  Synthetic oligonucleotide: FAS-1961
agugguuaagccggagggcu

SEQ ID NO: 9801 - RNA, 20 nt, Artificial Sequence
  Synthetic oligonucleotide: FAS-1962
agccggagggcucggaagaa

SEQ ID NO: 9802 - RNA, 20 nt, Artificial Sequence
  Synthetic oligonucleotide: FAS-1963
ucuuucucgaaaaaguuaua

SEQ ID NO: 9803 - RNA, 20 nt, Artificial Sequence
  Synthetic oligonucleotide: FAS-1964
cuuucucgaaaaaguuauau

SEQ ID NO: 9804 - RNA, 20 nt, Artificial Sequence
  Synthetic oligonucleotide: FAS-1965
uuucucgaaaaaguuauaug

SEQ ID NO: 9805 - RNA, 20 nt, Artificial Sequence
  Synthetic oligonucleotide: FAS-1966
uucucgaaaaaguuauaugg

SEQ ID NO: 9806 - RNA, 20 nt, Artificial Sequence
  Synthetic oligonucleotide: FAS-1967
ucucgaaaaaguuauauggg

SEQ ID NO: 9807 - RNA, 20 nt, Artificial Sequence
  Synthetic oligonucleotide: FAS-1968
cucgaaaaaguuauaugggg

SEQ ID NO: 9808 - RNA, 20 nt, Artificial Sequence
  Synthetic oligonucleotide: FAS-1969
ucgaaaaaguuauauggggg

SEQ ID NO: 9809 - RNA, 17 nt, Artificial Sequence
  Synthetic oligonucleotide: FAS-876
cggcgcacgcgggcacc

SEQ ID NO: 9810 - RNA, 17 nt, Artificial Sequence
  Synthetic oligonucleotide: FAS-877
ggcgcacgcgggcaccu

SEQ ID NO: 9811 - RNA, 17 nt, Artificial Sequence
  Synthetic oligonucleotide: FAS-1972
acgcgggcaccugggag

SEQ ID NO: 9812 - RNA, 17 nt, Artificial Sequence
  Synthetic oligonucleotide: FAS-1973
cgggcaccugggagcgg

SEQ ID NO: 9813 - RNA, 17 nt, Artificial Sequence
  Synthetic oligonucleotide: FAS-1974
gggcaccugggagcggc

SEQ ID NO: 9814 - RNA, 17 nt, Artificial Sequence
  Synthetic oligonucleotide: FAS-1975
ggagcggcgggcugcug

SEQ ID NO: 9815 - RNA, 17 nt, Artificial Sequence
  Synthetic oligonucleotide: FAS-1976
gagcggcgggcugcugc

SEQ ID NO: 9816 - RNA, 17 nt, Artificial Sequence
  Synthetic oligonucleotide: FAS-1977
cggcgggcugcugcggg

SEQ ID NO: 9817 - RNA, 17 nt, Artificial Sequence
  Synthetic oligonucleotide: FAS-1978
gcugcugcgggaggcgu

SEQ ID NO: 9818 - RNA, 17 nt, Artificial Sequence
  Synthetic oligonucleotide: FAS-1979
cgggaggcguuggagac

SEQ ID NO: 9819 - RNA, 17 nt, Artificial Sequence
  Synthetic oligonucleotide: FAS-1980
cguuggagacuggcucc

SEQ ID NO: 9820 - RNA, 17 nt, Artificial Sequence
  Synthetic oligonucleotide: FAS-1981
guuggagacuggcuccc

SEQ ID NO: 9821 - RNA, 17 nt, Artificial Sequence
  Synthetic oligonucleotide: FAS-1982
uuggagacuggcucccg

SEQ ID NO: 9822 - RNA, 17 nt, Artificial Sequence
  Synthetic oligonucleotide: FAS-1983
uggagacuggcucccgg

SEQ ID NO: 9823 - RNA, 17 nt, Artificial Sequence
  Synthetic oligonucleotide: FAS-1984
ggcucccgggggcuguu

SEQ ID NO: 9824 - RNA, 17 nt, Artificial Sequence
  Synthetic oligonucleotide: FAS-1985
uguuaggaccuucccuc

SEQ ID NO: 9825 - RNA, 17 nt, Artificial Sequence
  Synthetic oligonucleotide: FAS-1986
ggaccuucccucaggcc

SEQ ID NO: 9826 - RNA, 17 nt, Artificial Sequence
  Synthetic oligonucleotide: FAS-1987
gaccuucccucaggccc

SEQ ID NO: 9827 - RNA, 17 nt, Artificial Sequence
  Synthetic oligonucleotide: FAS-1988
ccgggugcucagaacgc

SEQ ID NO: 9828 - RNA, 17 nt, Artificial Sequence
  Synthetic oligonucleotide: FAS-1989
ggugcucagaacgcugg

SEQ ID NO: 9829 - RNA, 17 nt, Artificial Sequence
  Synthetic oligonucleotide: FAS-1990
ggaggacuugcuuuucu

SEQ ID NO: 9830 - RNA, 17 nt, Artificial Sequence
  Synthetic oligonucleotide: FAS-1991
gaggacuugcuuuucuu

SEQ ID NO: 9831 - RNA, 17 nt, Artificial Sequence
  Synthetic oligonucleotide: FAS-1992
cgaagugcugaccccgc

SEQ ID NO: 9832 - RNA, 17 nt, Artificial Sequence
  Synthetic oligonucleotide: FAS-1993
gaagugcugaccccgcu

SEQ ID NO: 9833 - RNA, 17 nt, Artificial Sequence
  Synthetic oligonucleotide: FAS-1994
ugcugaccccgcugggc

SEQ ID NO: 9834 - RNA, 17 nt, Artificial Sequence
  Synthetic oligonucleotide: FAS-1995
ugaccccgcugggcagg

SEQ ID NO: 9835 - RNA, 17 nt, Artificial Sequence
  Synthetic oligonucleotide: FAS-1996
gaccccgcugggcaggc

SEQ ID NO: 9836 - RNA, 17 nt, Artificial Sequence
  Synthetic oligonucleotide: FAS-1997
accccgcugggcaggcg

SEQ ID NO: 9837 - RNA, 17 nt, Artificial Sequence
  Synthetic oligonucleotide: FAS-1998
ggcaggcggggcagcuc

SEQ ID NO: 9838 - RNA, 17 nt, Artificial Sequence
  Synthetic oligonucleotide: FAS-1999
gcagcuccggcgcuccu

SEQ ID NO: 9839 - RNA, 17 nt, Artificial Sequence
  Synthetic oligonucleotide: FAS-2000
cacugcgcuccacguug

SEQ ID NO: 9840 - RNA, 17 nt, Artificial Sequence
  Synthetic oligonucleotide: FAS-2001
ugcgcuccacguugagg

SEQ ID NO: 9841 - RNA, 17 nt, Artificial Sequence
  Synthetic oligonucleotide: FAS-2002
gcgcuccacguugaggu

SEQ ID NO: 9842 - RNA, 17 nt, Artificial Sequence
  Synthetic oligonucleotide: FAS-2003
ccacguugaggugggcg

SEQ ID NO: 9843 - RNA, 17 nt, Artificial Sequence
  Synthetic oligonucleotide: FAS-2004
cacguugaggugggcgu

SEQ ID NO: 9844 - RNA, 17 nt, Artificial Sequence
  Synthetic oligonucleotide: FAS-2005
acguugaggugggcgug

SEQ ID NO: 9845 - RNA, 17 nt, Artificial Sequence
  Synthetic oligonucleotide: FAS-2006
gaggugggcguggggug

SEQ ID NO: 9846 - RNA, 17 nt, Artificial Sequence
  Synthetic oligonucleotide: FAS-2007
gggcguggggugcggac

SEQ ID NO: 9847 - RNA, 17 nt, Artificial Sequence
  Synthetic oligonucleotide: FAS-2008
gcggacaggaauugaag

SEQ ID NO: 9848 - RNA, 17 nt, Artificial Sequence
  Synthetic oligonucleotide: FAS-2009
gaauugaagcggaaguc

SEQ ID NO: 9849 - RNA, 17 nt, Artificial Sequence
  Synthetic oligonucleotide: FAS-2010
aauugaagcggaagucu

SEQ ID NO: 9850 - RNA, 17 nt, Artificial Sequence
  Synthetic oligonucleotide: FAS-2011
gaagucugggaagcuuu

SEQ ID NO: 9851 - RNA, 17 nt, Artificial Sequence
  Synthetic oligonucleotide: FAS-2012
aagucugggaagcuuua

SEQ ID NO: 9852 - RNA, 17 nt, Artificial Sequence
  Synthetic oligonucleotide: FAS-2013
ggaagcuuuagggucgc

SEQ ID NO: 9853 - RNA, 17 nt, Artificial Sequence
  Synthetic oligonucleotide: FAS-2014
agcuuuagggucgcugg

SEQ ID NO: 9854 - RNA, 17 nt, Artificial Sequence
  Synthetic oligonucleotide: FAS-2015
gcuuuagggucgcugga

SEQ ID NO: 9855 - RNA, 17 nt, Artificial Sequence
  Synthetic oligonucleotide: FAS-2016
cuuuagggucgcuggag

SEQ ID NO: 9856 - RNA, 17 nt, Artificial Sequence
  Synthetic oligonucleotide: FAS-2017
uuuagggucgcuggagg

SEQ ID NO: 9857 - RNA, 17 nt, Artificial Sequence
  Synthetic oligonucleotide: FAS-2018
ucgcuggagggggaccc

SEQ ID NO: 9858 - RNA, 17 nt, Artificial Sequence
  Synthetic oligonucleotide: FAS-2019
uggagggggaccccggu

SEQ ID NO: 9859 - RNA, 17 nt, Artificial Sequence
  Synthetic oligonucleotide: FAS-2020
ggaccccgguuggagag

SEQ ID NO: 9860 - RNA, 17 nt, Artificial Sequence
  Synthetic oligonucleotide: FAS-2021
ccgguuggagagaggag

SEQ ID NO: 9861 - RNA, 17 nt, Artificial Sequence
  Synthetic oligonucleotide: FAS-2022
gagaggagcggaacucc

SEQ ID NO: 9862 - RNA, 17 nt, Artificial Sequence
  Synthetic oligonucleotide: FAS-2023
cugacaagccaagccaa

SEQ ID NO: 9863 - RNA, 17 nt, Artificial Sequence
  Synthetic oligonucleotide: FAS-2024
aagccaaagguccgcuc

SEQ ID NO: 9864 - RNA, 17 nt, Artificial Sequence
  Synthetic oligonucleotide: FAS-2025
aaagguccgcuccggcg

SEQ ID NO: 9865 - RNA, 17 nt, Artificial Sequence
  Synthetic oligonucleotide: FAS-2026
aagguccgcuccggcgc

SEQ ID NO: 9866 - RNA, 17 nt, Artificial Sequence
  Synthetic oligonucleotide: FAS-2027
guccgcuccggcgcggg

SEQ ID NO: 9867 - RNA, 17 nt, Artificial Sequence
  Synthetic oligonucleotide: FAS-2028
uccgcuccggcgcgggu

SEQ ID NO: 9868 - RNA, 17 nt, Artificial Sequence
  Synthetic oligonucleotide: FAS-2029
gagugcgcgccgccccg

SEQ ID NO: 9869 - RNA, 17 nt, Artificial Sequence
  Synthetic oligonucleotide: FAS-2030
agugcgcgccgccccgc

SEQ ID NO: 9870 - RNA, 17 nt, Artificial Sequence
  Synthetic oligonucleotide: FAS-2031
gugcgcgccgccccgcg

SEQ ID NO: 9871 - RNA, 17 nt, Artificial Sequence
  Synthetic oligonucleotide: FAS-2032
ugcgcgccgccccgcgg

SEQ ID NO: 9872 - RNA, 17 nt, Artificial Sequence
  Synthetic oligonucleotide: FAS-2033
gcgccgccccgcggggg

SEQ ID NO: 9873 - RNA, 17 nt, Artificial Sequence
  Synthetic oligonucleotide: FAS-2034
cgccgccccgcgggggc

SEQ ID NO: 9874 - RNA, 17 nt, Artificial Sequence
  Synthetic oligonucleotide: FAS-2035
gccgccccgcgggggcg

SEQ ID NO: 9875 - RNA, 17 nt, Artificial Sequence
  Synthetic oligonucleotide: FAS-2036
agauauugcucauuuuc

SEQ ID NO: 9876 - RNA, 17 nt, Artificial Sequence
  Synthetic oligonucleotide: FAS-2037
uggcaguucucagacgu

SEQ ID NO: 9877 - RNA, 17 nt, Artificial Sequence
  Synthetic oligonucleotide: FAS-2038
agucagcaccgaagcag

SEQ ID NO: 9878 - RNA, 17 nt, Artificial Sequence
  Synthetic oligonucleotide: FAS-2039
cgaagcagugguuaagc

SEQ ID NO: 9879 - RNA, 17 nt, Artificial Sequence
  Synthetic oligonucleotide: FAS-2040
agcagugguuaagccgg

SEQ ID NO: 9880 - RNA, 17 nt, Artificial Sequence
  Synthetic oligonucleotide: FAS-2041
gcagugguuaagccgga

SEQ ID NO: 9881 - RNA, 17 nt, Artificial Sequence
  Synthetic oligonucleotide: FAS-2042
gguuaagccggagggcu

SEQ ID NO: 9882 - RNA, 17 nt, Artificial Sequence
  Synthetic oligonucleotide: FAS-2043
cggagggcucggaagaa

SEQ ID NO: 9883 - RNA, 17 nt, Artificial Sequence
  Synthetic oligonucleotide: FAS-2044
uucucgaaaaaguuaua

SEQ ID NO: 9884 - RNA, 17 nt, Artificial Sequence
  Synthetic oligonucleotide: FAS-2045
ucucgaaaaaguuauau

SEQ ID NO: 9885 - RNA, 17 nt, Artificial Sequence
  Synthetic oligonucleotide: FAS-2046
cucgaaaaaguuauaug

SEQ ID NO: 9886 - RNA, 17 nt, Artificial Sequence
  Synthetic oligonucleotide: FAS-2047
ucgaaaaaguuauaugg

SEQ ID NO: 9887 - RNA, 17 nt, Artificial Sequence
  Synthetic oligonucleotide: FAS-2048
cgaaaaaguuauauggg

SEQ ID NO: 9888 - RNA, 17 nt, Artificial Sequence
  Synthetic oligonucleotide: FAS-2049
gaaaaaguuauaugggg

SEQ ID NO: 9889 - RNA, 17 nt, Artificial Sequence
  Synthetic oligonucleotide: FAS-2050
aaaaaguuauauggggg

SEQ ID NO: 9890 - RNA, 20 nt, Artificial Sequence
  Synthetic oligonucleotide: FAS-2051
uaacuuuuucgagaaagaaa

SEQ ID NO: 9891 - RNA, 20 nt, Artificial Sequence
  Synthetic oligonucleotide: FAS-2052
ugccguucuuccgagcccuc

SEQ ID NO: 9892 - RNA, 20 nt, Artificial Sequence
  Synthetic oligonucleotide: FAS-2053
cuccggcuuaaccacugcuu

SEQ ID NO: 9893 - RNA, 20 nt, Artificial Sequence
  Synthetic oligonucleotide: FAS-2054
augagcaauaucuguucuga

SEQ ID NO: 9894 - RNA, 20 nt, Artificial Sequence
  Synthetic oligonucleotide: FAS-2055
auaucuguucugaaggcugc

SEQ ID NO: 9895 - RNA, 20 nt, Artificial Sequence
  Synthetic oligonucleotide: FAS-2056
aggcucucuccccgcccccg

SEQ ID NO: 9896 - RNA, 20 nt, Artificial Sequence
  Synthetic oligonucleotide: FAS-2057
ggcucucuccccgcccccgc

SEQ ID NO: 9897 - RNA, 20 nt, Artificial Sequence
  Synthetic oligonucleotide: FAS-2058
gcucucuccccgcccccgcg

SEQ ID NO: 9898 - RNA, 20 nt, Artificial Sequence
  Synthetic oligonucleotide: FAS-2059
cucuccccgcccccgcgggg

SEQ ID NO: 9899 - RNA, 20 nt, Artificial Sequence
  Synthetic oligonucleotide: FAS-2060
gcgcacucacccacccgcgc

SEQ ID NO: 9900 - RNA, 20 nt, Artificial Sequence
  Synthetic oligonucleotide: FAS-2061
cucacccacccgcgccggag

SEQ ID NO: 9901 - RNA, 20 nt, Artificial Sequence
  Synthetic oligonucleotide: FAS-2062
cccgcgccggagcggaccuu

SEQ ID NO: 9902 - RNA, 20 nt, Artificial Sequence
  Synthetic oligonucleotide: FAS-2063
gccggagcggaccuuuggcu

SEQ ID NO: 9903 - RNA, 20 nt, Artificial Sequence
  Synthetic oligonucleotide: FAS-2064
gaccuuuggcuuggcuuguc

SEQ ID NO: 9904 - RNA, 20 nt, Artificial Sequence
  Synthetic oligonucleotide: FAS-2065
accuuuggcuuggcuuguca

SEQ ID NO: 9905 - RNA, 20 nt, Artificial Sequence
  Synthetic oligonucleotide: FAS-2066
uggcuugucagggcuugucc

SEQ ID NO: 9906 - RNA, 20 nt, Artificial Sequence
  Synthetic oligonucleotide: FAS-2067
guuccgcuccucucuccaac

SEQ ID NO: 9907 - RNA, 20 nt, Artificial Sequence
  Synthetic oligonucleotide: FAS-2068
uuccgcuccucucuccaacc

SEQ ID NO: 9908 - RNA, 20 nt, Artificial Sequence
  Synthetic oligonucleotide: FAS-2069
uccgcuccucucuccaaccg

SEQ ID NO: 9909 - RNA, 20 nt, Artificial Sequence
  Synthetic oligonucleotide: FAS-2070
accccacgcccaccucaacg

SEQ ID NO: 9910 - RNA, 20 nt, Artificial Sequence
  Synthetic oligonucleotide: FAS-2071
caccucaacguggagcgcag

SEQ ID NO: 9911 - RNA, 20 nt, Artificial Sequence
  Synthetic oligonucleotide: FAS-2072
guggagcgcaguggucuccg

SEQ ID NO: 9912 - RNA, 20 nt, Artificial Sequence
  Synthetic oligonucleotide: FAS-2073
caguggucuccgaggagcgc

SEQ ID NO: 9913 - RNA, 20 nt, Artificial Sequence
  Synthetic oligonucleotide: FAS-2074
gagcugccccgccugcccag

SEQ ID NO: 9914 - RNA, 20 nt, Artificial Sequence
  Synthetic oligonucleotide: FAS-2075
agcugccccgccugcccagc

SEQ ID NO: 9915 - RNA, 20 nt, Artificial Sequence
  Synthetic oligonucleotide: FAS-2076
gcugccccgccugcccagcg

SEQ ID NO: 9916 - RNA, 20 nt, Artificial Sequence
  Synthetic oligonucleotide: FAS-2077
ggggucagcacuucgcauca

SEQ ID NO: 9917 - RNA, 20 nt, Artificial Sequence
  Synthetic oligonucleotide: FAS-2078
ccuccagcguucugagcacc

SEQ ID NO: 9918 - RNA, 20 nt, Artificial Sequence
  Synthetic oligonucleotide: FAS-2079
cuccagcguucugagcaccc

SEQ ID NO: 9919 - RNA, 20 nt, Artificial Sequence
  Synthetic oligonucleotide: FAS-2080
guucugagcacccgggccug

SEQ ID NO: 9920 - RNA, 20 nt, Artificial Sequence
  Synthetic oligonucleotide: FAS-2081
uucugagcacccgggccuga

SEQ ID NO: 9921 - RNA, 20 nt, Artificial Sequence
  Synthetic oligonucleotide: FAS-2082
gagcacccgggccugaggga

SEQ ID NO: 9922 - RNA, 20 nt, Artificial Sequence
  Synthetic oligonucleotide: FAS-2083
gggaagguccuaacagcccc

SEQ ID NO: 9923 - RNA, 20 nt, Artificial Sequence
  Synthetic oligonucleotide: FAS-2084
ggaagguccuaacagccccc

SEQ ID NO: 9924 - RNA, 20 nt, Artificial Sequence
  Synthetic oligonucleotide: FAS-2085
cgcagcagcccgccgcuccc

SEQ ID NO: 9925 - RNA, 17 nt, Artificial Sequence
  Synthetic oligonucleotide: FAS-2086
cuuuuucgagaaagaaa

SEQ ID NO: 9926 - RNA, 17 nt, Artificial Sequence
  Synthetic oligonucleotide: FAS-2087
cguucuuccgagcccuc

SEQ ID NO: 9927 - RNA, 17 nt, Artificial Sequence
  Synthetic oligonucleotide: FAS-2088
cggcuuaaccacugcuu

SEQ ID NO: 9928 - RNA, 17 nt, Artificial Sequence
  Synthetic oligonucleotide: FAS-2089
agcaauaucuguucuga

SEQ ID NO: 9929 - RNA, 17 nt, Artificial Sequence
  Synthetic oligonucleotide: FAS-2090
ucuguucugaaggcugc

SEQ ID NO: 9930 - RNA, 17 nt, Artificial Sequence
  Synthetic oligonucleotide: FAS-2091
cucucuccccgcccccg

SEQ ID NO: 9931 - RNA, 17 nt, Artificial Sequence
  Synthetic oligonucleotide: FAS-2092
ucucuccccgcccccgc

SEQ ID NO: 9932 - RNA, 17 nt, Artificial Sequence
  Synthetic oligonucleotide: FAS-2093
cucuccccgcccccgcg

SEQ ID NO: 9933 - RNA, 17 nt, Artificial Sequence
  Synthetic oligonucleotide: FAS-2094
uccccgcccccgcgggg

SEQ ID NO: 9934 - RNA, 17 nt, Artificial Sequence
  Synthetic oligonucleotide: FAS-2095
cacucacccacccgcgc

SEQ ID NO: 9935 - RNA, 17 nt, Artificial Sequence
  Synthetic oligonucleotide: FAS-2096
acccacccgcgccggag

SEQ ID NO: 9936 - RNA, 17 nt, Artificial Sequence
  Synthetic oligonucleotide: FAS-2097
gcgccggagcggaccuu

SEQ ID NO: 9937 - RNA, 17 nt, Artificial Sequence
  Synthetic oligonucleotide: FAS-2098
ggagcggaccuuuggcu

SEQ ID NO: 9938 - RNA, 17 nt, Artificial Sequence
  Synthetic oligonucleotide: FAS-2099
cuuuggcuuggcuuguc

SEQ ID NO: 9939 - RNA, 17 nt, Artificial Sequence
  Synthetic oligonucleotide: FAS-2100
uuuggcuuggcuuguca

SEQ ID NO: 9940 - RNA, 17 nt, Artificial Sequence
  Synthetic oligonucleotide: FAS-2101
cuugucagggcuugucc

SEQ ID NO: 9941 - RNA, 17 nt, Artificial Sequence
  Synthetic oligonucleotide: FAS-2102
ccgcuccucucuccaac

SEQ ID NO: 9942 - RNA, 17 nt, Artificial Sequence
  Synthetic oligonucleotide: FAS-2103
cgcuccucucuccaacc

SEQ ID NO: 9943 - RNA, 17 nt, Artificial Sequence
  Synthetic oligonucleotide: FAS-2104
gcuccucucuccaaccg

SEQ ID NO: 9944 - RNA, 17 nt, Artificial Sequence
  Synthetic oligonucleotide: FAS-2105
ccacgcccaccucaacg

SEQ ID NO: 9945 - RNA, 17 nt, Artificial Sequence
  Synthetic oligonucleotide: FAS-2106
cucaacguggagcgcag

SEQ ID NO: 9946 - RNA, 17 nt, Artificial Sequence
  Synthetic oligonucleotide: FAS-2107
gagcgcaguggucuccg

SEQ ID NO: 9947 - RNA, 17 nt, Artificial Sequence
  Synthetic oligonucleotide: FAS-2108
uggucuccgaggagcgc

SEQ ID NO: 9948 - RNA, 17 nt, Artificial Sequence
  Synthetic oligonucleotide: FAS-2109
cugccccgccugcccag

SEQ ID NO: 9949 - RNA, 17 nt, Artificial Sequence
  Synthetic oligonucleotide: FAS-2110
ugccccgccugcccagc

SEQ ID NO: 9950 - RNA, 17 nt, Artificial Sequence
  Synthetic oligonucleotide: FAS-2111
gccccgccugcccagcg

SEQ ID NO: 9951 - RNA, 17 nt, Artificial Sequence
  Synthetic oligonucleotide: FAS-2112
gucagcacuucgcauca

SEQ ID NO: 9952 - RNA, 17 nt, Artificial Sequence
  Synthetic oligonucleotide: FAS-2113
ccagcguucugagcacc

SEQ ID NO: 9953 - RNA, 17 nt, Artificial Sequence
  Synthetic oligonucleotide: FAS-2114
cagcguucugagcaccc

SEQ ID NO: 9954 - RNA, 17 nt, Artificial Sequence
  Synthetic oligonucleotide: FAS-2115
cugagcacccgggccug

SEQ ID NO: 9955 - RNA, 17 nt, Artificial Sequence
  Synthetic oligonucleotide: FAS-2116
ugagcacccgggccuga

SEQ ID NO: 9956 - RNA, 17 nt, Artificial Sequence
  Synthetic oligonucleotide: FAS-2117
cacccgggccugaggga

SEQ ID NO: 9957 - RNA, 17 nt, Artificial Sequence
  Synthetic oligonucleotide: FAS-2118
aagguccuaacagcccc

SEQ ID NO: 9958 - RNA, 17 nt, Artificial Sequence
  Synthetic oligonucleotide: FAS-2119
agguccuaacagccccc

SEQ ID NO: 9959 - RNA, 17 nt, Artificial Sequence
  Synthetic oligonucleotide: FAS-2120
agcagcccgccgcuccc

SEQ ID NO: 9960 - RNA, 20 nt, Artificial Sequence
  Synthetic oligonucleotide: FAS-979
acgaaggacaggaaguaauu

SEQ ID NO: 9961 - RNA, 20 nt, Artificial Sequence
  Synthetic oligonucleotide: FAS-980
auugugaauguuuaauauag

SEQ ID NO: 9962 - RNA, 20 nt, Artificial Sequence
  Synthetic oligonucleotide: FAS-597
uugugaauguuuaauauagc

SEQ ID NO: 9963 - RNA, 20 nt, Artificial Sequence
  Synthetic oligonucleotide: FAS-982
uuguuagcuuuguuuuccuc

SEQ ID NO: 9964 - RNA, 20 nt, Artificial Sequence
  Synthetic oligonucleotide: FAS-983
guuagcuuuguuuuccucuu

SEQ ID NO: 9965 - RNA, 20 nt, Artificial Sequence
  Synthetic oligonucleotide: FAS-984
ccucuugagaaauaaaaacu

SEQ ID NO: 9966 - RNA, 20 nt, Artificial Sequence
  Synthetic oligonucleotide: FAS-601
cucuugagaaauaaaaacua

SEQ ID NO: 9967 - RNA, 20 nt, Artificial Sequence
  Synthetic oligonucleotide: FAS-986
acuaaggggcccucccuuuu

SEQ ID NO: 9968 - RNA, 20 nt, Artificial Sequence
  Synthetic oligonucleotide: FAS-987
auaugguuaacuguccauuc

SEQ ID NO: 9969 - RNA, 20 nt, Artificial Sequence
  Synthetic oligonucleotide: FAS-988
uguccauuccagaaacgucu

SEQ ID NO: 9970 - RNA, 20 nt, Artificial Sequence
  Synthetic oligonucleotide: FAS-989
ucucauguugcagccacaac

SEQ ID NO: 9971 - RNA, 20 nt, Artificial Sequence
  Synthetic oligonucleotide: FAS-990
aaugccccgcaagucuuucu

SEQ ID NO: 9972 - RNA, 20 nt, Artificial Sequence
  Synthetic oligonucleotide: FAS-991
ccaaggcuccuguacccagg

SEQ ID NO: 9973 - RNA, 20 nt, Artificial Sequence
  Synthetic oligonucleotide: FAS-992
ccaggcaggaccucugcgcu

SEQ ID NO: 9974 - RNA, 20 nt, Artificial Sequence
  Synthetic oligonucleotide: FAS-993
gaccuccccaacuucccagg

SEQ ID NO: 9975 - RNA, 20 nt, Artificial Sequence
  Synthetic oligonucleotide: FAS-994
cuucccagguugaacuacag

SEQ ID NO: 9976 - RNA, 20 nt, Artificial Sequence
  Synthetic oligonucleotide: FAS-995
ugaacuacagcagaagccuu

SEQ ID NO: 9977 - RNA, 20 nt, Artificial Sequence
  Synthetic oligonucleotide: FAS-996
cuacagcagaagccuuuaga

SEQ ID NO: 9978 - RNA, 20 nt, Artificial Sequence
  Synthetic oligonucleotide: FAS-997
gcagaagccuuuagaaaggg

SEQ ID NO: 9979 - RNA, 20 nt, Artificial Sequence
  Synthetic oligonucleotide: FAS-613
cagaagccuuuagaaagggc

SEQ ID NO: 9980 - RNA, 20 nt, Artificial Sequence
  Synthetic oligonucleotide: FAS-999
aaagggcaggaggccggcuc

SEQ ID NO: 9981 - RNA, 20 nt, Artificial Sequence
  Synthetic oligonucleotide: FAS-1000
ccggcucucgagguccucac

SEQ ID NO: 9982 - RNA, 20 nt, Artificial Sequence
  Synthetic oligonucleotide: FAS-1001
ucucgagguccucaccugaa

SEQ ID NO: 9983 - RNA, 20 nt, Artificial Sequence
  Synthetic oligonucleotide: FAS-1002
agugagcaugccagccacug

SEQ ID NO: 9984 - RNA, 20 nt, Artificial Sequence
  Synthetic oligonucleotide: FAS-617
gugagcaugccagccacugc

SEQ ID NO: 9985 - RNA, 20 nt, Artificial Sequence
  Synthetic oligonucleotide: FAS-1004
ccagccacugcaggaacgcc

SEQ ID NO: 9986 - RNA, 20 nt, Artificial Sequence
  Synthetic oligonucleotide: FAS-618
cagccacugcaggaacgccc

SEQ ID NO: 9987 - RNA, 20 nt, Artificial Sequence
  Synthetic oligonucleotide: FAS-1006
acugcaggaacgccccggga

SEQ ID NO: 9988 - RNA, 20 nt, Artificial Sequence
  Synthetic oligonucleotide: FAS-620
cugcaggaacgccccgggac

SEQ ID NO: 9989 - RNA, 20 nt, Artificial Sequence
  Synthetic oligonucleotide: FAS-1008
caggaaugcccauuugugca

SEQ ID NO: 9990 - RNA, 20 nt, Artificial Sequence
  Synthetic oligonucleotide: FAS-1009
cccgcgcgcaggccaaguug

SEQ ID NO: 9991 - RNA, 20 nt, Artificial Sequence
  Synthetic oligonucleotide: FAS-1010
caggccaaguugcugaauca

SEQ ID NO: 9992 - RNA, 20 nt, Artificial Sequence
  Synthetic oligonucleotide: FAS-622
aggccaaguugcugaaucaa

SEQ ID NO: 9993 - RNA, 20 nt, Artificial Sequence
  Synthetic oligonucleotide: FAS-1012
ucaauggagcccuccccaac

SEQ ID NO: 9994 - RNA, 20 nt, Artificial Sequence
  Synthetic oligonucleotide: FAS-1013
cccaacccgggcguucccca

SEQ ID NO: 9995 - RNA, 20 nt, Artificial Sequence
  Synthetic oligonucleotide: FAS-1014
ccuucccauccuccugacca

SEQ ID NO: 9996 - RNA, 20 nt, Artificial Sequence
  Synthetic oligonucleotide: FAS-626
cuucccauccuccugaccac

SEQ ID NO: 9997 - RNA, 20 nt, Artificial Sequence
  Synthetic oligonucleotide: FAS-1016
ccugaccaccggggcuuuuc

SEQ ID NO: 9998 - RNA, 20 nt, Artificial Sequence
  Synthetic oligonucleotide: FAS-1017
gcucgucucugaucucgcgc

SEQ ID NO: 9999 - RNA, 20 nt, Artificial Sequence
  Synthetic oligonucleotide: FAS-1018
acagguguucaaagacgcuu

SEQ ID NO: 10000 - RNA, 20 nt, Artificial Sequence
  Synthetic oligonucleotide: FAS-630
cagguguucaaagacgcuuc

SEQ ID NO: 10001 - RNA, 20 nt, Artificial Sequence
  Synthetic oligonucleotide: FAS-631
agguguucaaagacgcuucu

SEQ ID NO: 10002 - RNA, 20 nt, Artificial Sequence
  Synthetic oligonucleotide: FAS-632
gguguucaaagacgcuucug

SEQ ID NO: 10003 - RNA, 20 nt, Artificial Sequence
  Synthetic oligonucleotide: FAS-1022
uucaaagacgcuucugggga

SEQ ID NO: 10004 - RNA, 20 nt, Artificial Sequence
  Synthetic oligonucleotide: FAS-1023
caaagacgcuucuggggagu

SEQ ID NO: 10005 - RNA, 20 nt, Artificial Sequence
  Synthetic oligonucleotide: FAS-633
aaagacgcuucuggggagug

SEQ ID NO: 10006 - RNA, 20 nt, Artificial Sequence
  Synthetic oligonucleotide: FAS-634
aagacgcuucuggggaguga

SEQ ID NO: 10007 - RNA, 20 nt, Artificial Sequence
  Synthetic oligonucleotide: FAS-1026
gggagugagggaagcgguuu

SEQ ID NO: 10008 - RNA, 20 nt, Artificial Sequence
  Synthetic oligonucleotide: FAS-1027
gcgguuuacgagugacuugg

SEQ ID NO: 10009 - RNA, 20 nt, Artificial Sequence
  Synthetic oligonucleotide: FAS-637
cgguuuacgagugacuuggc

SEQ ID NO: 10010 - RNA, 20 nt, Artificial Sequence
  Synthetic oligonucleotide: FAS-1029
gagugacuuggcuggagccu

SEQ ID NO: 10011 - RNA, 20 nt, Artificial Sequence
  Synthetic oligonucleotide: FAS-638
agugacuuggcuggagccuc

SEQ ID NO: 10012 - RNA, 20 nt, Artificial Sequence
  Synthetic oligonucleotide: FAS-1031
acuuggcuggagccucaggg

SEQ ID NO: 10013 - RNA, 20 nt, Artificial Sequence
  Synthetic oligonucleotide: FAS-1032
ccucaggggcgggcacuggc

SEQ ID NO: 10014 - RNA, 20 nt, Artificial Sequence
  Synthetic oligonucleotide: FAS-644
cucaggggcgggcacuggca

SEQ ID NO: 10015 - RNA, 20 nt, Artificial Sequence
  Synthetic oligonucleotide: FAS-1034
gcacuggcacggaacacacc

SEQ ID NO: 10016 - RNA, 20 nt, Artificial Sequence
  Synthetic oligonucleotide: FAS-1035
ggccagcccuggcugcccag

SEQ ID NO: 10017 - RNA, 20 nt, Artificial Sequence
  Synthetic oligonucleotide: FAS-648
gccagcccuggcugcccagg

SEQ ID NO: 10018 - RNA, 20 nt, Artificial Sequence
  Synthetic oligonucleotide: FAS-1037
gcggagcugccucuucuccc

SEQ ID NO: 10019 - RNA, 20 nt, Artificial Sequence
  Synthetic oligonucleotide: FAS-1038
gccucuucucccgcggguug

SEQ ID NO: 10020 - RNA, 20 nt, Artificial Sequence
  Synthetic oligonucleotide: FAS-1039
gguugguggacccgcucagu

SEQ ID NO: 10021 - RNA, 20 nt, Artificial Sequence
  Synthetic oligonucleotide: FAS-653
guugguggacccgcucagua

SEQ ID NO: 10022 - RNA, 20 nt, Artificial Sequence
  Synthetic oligonucleotide: FAS-1041
uggacccgcucaguacggag

SEQ ID NO: 10023 - RNA, 20 nt, Artificial Sequence
  Synthetic oligonucleotide: FAS-654
ggacccgcucaguacggagu

SEQ ID NO: 10024 - RNA, 20 nt, Artificial Sequence
  Synthetic oligonucleotide: FAS-655
gacccgcucaguacggaguu

SEQ ID NO: 10025 - RNA, 20 nt, Artificial Sequence
  Synthetic oligonucleotide: FAS-656
acccgcucaguacggaguug

SEQ ID NO: 10026 - RNA, 20 nt, Artificial Sequence
  Synthetic oligonucleotide: FAS-1045
guuggggaagcucuuucacu

SEQ ID NO: 10027 - RNA, 20 nt, Artificial Sequence
  Synthetic oligonucleotide: FAS-657
uuggggaagcucuuucacuu

SEQ ID NO: 10028 - RNA, 20 nt, Artificial Sequence
  Synthetic oligonucleotide: FAS-1047
ggggaagcucuuucacuucg

SEQ ID NO: 10029 - RNA, 20 nt, Artificial Sequence
  Synthetic oligonucleotide: FAS-1048
aggauugcucaacaaccaug

SEQ ID NO: 10030 - RNA, 20 nt, Artificial Sequence
  Synthetic oligonucleotide: FAS-99
ucaacaaccaugcugggcau

SEQ ID NO: 10031 - RNA, 20 nt, Artificial Sequence
  Synthetic oligonucleotide: FAS-100
ucuggacccuccuaccucug

SEQ ID NO: 10032 - RNA, 20 nt, Artificial Sequence
  Synthetic oligonucleotide: FAS-1051
ucuggugagcccucuccugc

SEQ ID NO: 10033 - RNA, 20 nt, Artificial Sequence
  Synthetic oligonucleotide: FAS-1052
gugagcccucuccugcccgg

SEQ ID NO: 10034 - RNA, 20 nt, Artificial Sequence
  Synthetic oligonucleotide: FAS-665
ugagcccucuccugcccggg

SEQ ID NO: 10035 - RNA, 20 nt, Artificial Sequence
  Synthetic oligonucleotide: FAS-1054
aggcuuaccccgucuuaguc

SEQ ID NO: 10036 - RNA, 20 nt, Artificial Sequence
  Synthetic oligonucleotide: FAS-667
ggcuuaccccgucuuagucc

SEQ ID NO: 10037 - RNA, 20 nt, Artificial Sequence
  Synthetic oligonucleotide: FAS-668
gcuuaccccgucuuaguccc

SEQ ID NO: 10038 - RNA, 20 nt, Artificial Sequence
  Synthetic oligonucleotide: FAS-1057
uagucccggggauaggcaaa

SEQ ID NO: 10039 - RNA, 20 nt, Artificial Sequence
  Synthetic oligonucleotide: FAS-671
agucccggggauaggcaaag

SEQ ID NO: 10040 - RNA, 20 nt, Artificial Sequence
  Synthetic oligonucleotide: FAS-1059
ccggggauaggcaaaguggg

SEQ ID NO: 10041 - RNA, 20 nt, Artificial Sequence
  Synthetic oligonucleotide: FAS-1060
auaggcaaaguggggcgggc

SEQ ID NO: 10042 - RNA, 20 nt, Artificial Sequence
  Synthetic oligonucleotide: FAS-676
uaggcaaaguggggcgggcg

SEQ ID NO: 10043 - RNA, 20 nt, Artificial Sequence
  Synthetic oligonucleotide: FAS-1062
ggggcgggcgcgggacgcgu

SEQ ID NO: 10044 - RNA, 20 nt, Artificial Sequence
  Synthetic oligonucleotide: FAS-678
gggcgggcgcgggacgcgug

SEQ ID NO: 10045 - RNA, 20 nt, Artificial Sequence
  Synthetic oligonucleotide: FAS-1064
uugcggcggcagcggcgcac

SEQ ID NO: 10046 - RNA, 20 nt, Artificial Sequence
  Synthetic oligonucleotide: FAS-1065
gcagcggcgcacgcgggcac

SEQ ID NO: 10047 - RNA, 20 nt, Artificial Sequence
  Synthetic oligonucleotide: FAS-685
cagcggcgcacgcgggcacc

SEQ ID NO: 10048 - RNA, 20 nt, Artificial Sequence
  Synthetic oligonucleotide: FAS-686
agcggcgcacgcgggcaccu

SEQ ID NO: 10049 - RNA, 17 nt, Artificial Sequence
  Synthetic oligonucleotide: FAS-1068
aaggacaggaaguaauu

SEQ ID NO: 10050 - RNA, 17 nt, Artificial Sequence
  Synthetic oligonucleotide: FAS-1069
gugaauguuuaauauag

SEQ ID NO: 10051 - RNA, 17 nt, Artificial Sequence
  Synthetic oligonucleotide: FAS-788
ugaauguuuaauauagc

SEQ ID NO: 10052 - RNA, 17 nt, Artificial Sequence
  Synthetic oligonucleotide: FAS-1071
uuagcuuuguuuuccuc

SEQ ID NO: 10053 - RNA, 17 nt, Artificial Sequence
  Synthetic oligonucleotide: FAS-1072
agcuuuguuuuccucuu

SEQ ID NO: 10054 - RNA, 17 nt, Artificial Sequence
  Synthetic oligonucleotide: FAS-1073
cuugagaaauaaaaacu

SEQ ID NO: 10055 - RNA, 17 nt, Artificial Sequence
  Synthetic oligonucleotide: FAS-792
uugagaaauaaaaacua

SEQ ID NO: 10056 - RNA, 17 nt, Artificial Sequence
  Synthetic oligonucleotide: FAS-1075
aaggggcccucccuuuu

SEQ ID NO: 10057 - RNA, 17 nt, Artificial Sequence
  Synthetic oligonucleotide: FAS-1076
ugguuaacuguccauuc

SEQ ID NO: 10058 - RNA, 17 nt, Artificial Sequence
  Synthetic oligonucleotide: FAS-1077
ccauuccagaaacgucu

SEQ ID NO: 10059 - RNA, 17 nt, Artificial Sequence
  Synthetic oligonucleotide: FAS-1078
cauguugcagccacaac

SEQ ID NO: 10060 - RNA, 17 nt, Artificial Sequence
  Synthetic oligonucleotide: FAS-1079
gccccgcaagucuuucu

SEQ ID NO: 10061 - RNA, 17 nt, Artificial Sequence
  Synthetic oligonucleotide: FAS-1080
aggcuccuguacccagg

SEQ ID NO: 10062 - RNA, 17 nt, Artificial Sequence
  Synthetic oligonucleotide: FAS-1081
ggcaggaccucugcgcu

SEQ ID NO: 10063 - RNA, 17 nt, Artificial Sequence
  Synthetic oligonucleotide: FAS-1082
cuccccaacuucccagg

SEQ ID NO: 10064 - RNA, 17 nt, Artificial Sequence
  Synthetic oligonucleotide: FAS-1083
cccagguugaacuacag

SEQ ID NO: 10065 - RNA, 17 nt, Artificial Sequence
  Synthetic oligonucleotide: FAS-1084
acuacagcagaagccuu

SEQ ID NO: 10066 - RNA, 17 nt, Artificial Sequence
  Synthetic oligonucleotide: FAS-1085
cagcagaagccuuuaga

SEQ ID NO: 10067 - RNA, 17 nt, Artificial Sequence
  Synthetic oligonucleotide: FAS-1086
gaagccuuuagaaaggg

SEQ ID NO: 10068 - RNA, 17 nt, Artificial Sequence
  Synthetic oligonucleotide: FAS-804
aagccuuuagaaagggc

SEQ ID NO: 10069 - RNA, 17 nt, Artificial Sequence
  Synthetic oligonucleotide: FAS-1088
gggcaggaggccggcuc

SEQ ID NO: 10070 - RNA, 17 nt, Artificial Sequence
  Synthetic oligonucleotide: FAS-1089
gcucucgagguccucac

SEQ ID NO: 10071 - RNA, 17 nt, Artificial Sequence
  Synthetic oligonucleotide: FAS-1090
cgagguccucaccugaa

SEQ ID NO: 10072 - RNA, 17 nt, Artificial Sequence
  Synthetic oligonucleotide: FAS-1091
gagcaugccagccacug

SEQ ID NO: 10073 - RNA, 17 nt, Artificial Sequence
  Synthetic oligonucleotide: FAS-808
agcaugccagccacugc

SEQ ID NO: 10074 - RNA, 17 nt, Artificial Sequence
  Synthetic oligonucleotide: FAS-1093
gccacugcaggaacgcc

SEQ ID NO: 10075 - RNA, 17 nt, Artificial Sequence
  Synthetic oligonucleotide: FAS-809
ccacugcaggaacgccc

SEQ ID NO: 10076 - RNA, 17 nt, Artificial Sequence
  Synthetic oligonucleotide: FAS-1095
gcaggaacgccccggga

SEQ ID NO: 10077 - RNA, 17 nt, Artificial Sequence
  Synthetic oligonucleotide: FAS-811
caggaacgccccgggac

SEQ ID NO: 10078 - RNA, 17 nt, Artificial Sequence
  Synthetic oligonucleotide: FAS-1097
gaaugcccauuugugca

SEQ ID NO: 10079 - RNA, 17 nt, Artificial Sequence
  Synthetic oligonucleotide: FAS-1098
gcgcgcaggccaaguug

SEQ ID NO: 10080 - RNA, 17 nt, Artificial Sequence
  Synthetic oligonucleotide: FAS-1099
gccaaguugcugaauca

SEQ ID NO: 10081 - RNA, 17 nt, Artificial Sequence
  Synthetic oligonucleotide: FAS-813
ccaaguugcugaaucaa

SEQ ID NO: 10082 - RNA, 17 nt, Artificial Sequence
  Synthetic oligonucleotide: FAS-1101
auggagcccuccccaac

SEQ ID NO: 10083 - RNA, 17 nt, Artificial Sequence
  Synthetic oligonucleotide: FAS-1102
aacccgggcguucccca

SEQ ID NO: 10084 - RNA, 17 nt, Artificial Sequence
  Synthetic oligonucleotide: FAS-1103
ucccauccuccugacca

SEQ ID NO: 10085 - RNA, 17 nt, Artificial Sequence
  Synthetic oligonucleotide: FAS-817
cccauccuccugaccac

SEQ ID NO: 10086 - RNA, 17 nt, Artificial Sequence
  Synthetic oligonucleotide: FAS-1105
gaccaccggggcuuuuc

SEQ ID NO: 10087 - RNA, 17 nt, Artificial Sequence
  Synthetic oligonucleotide: FAS-1106
cgucucugaucucgcgc

SEQ ID NO: 10088 - RNA, 17 nt, Artificial Sequence
  Synthetic oligonucleotide: FAS-1107
gguguucaaagacgcuu

SEQ ID NO: 10089 - RNA, 17 nt, Artificial Sequence
  Synthetic oligonucleotide: FAS-821
guguucaaagacgcuuc

SEQ ID NO: 10090 - RNA, 17 nt, Artificial Sequence
  Synthetic oligonucleotide: FAS-822
uguucaaagacgcuucu

SEQ ID NO: 10091 - RNA, 17 nt, Artificial Sequence
  Synthetic oligonucleotide: FAS-823
guucaaagacgcuucug

SEQ ID NO: 10092 - RNA, 17 nt, Artificial Sequence
  Synthetic oligonucleotide: FAS-1111
aaagacgcuucugggga

SEQ ID NO: 10093 - RNA, 17 nt, Artificial Sequence
  Synthetic oligonucleotide: FAS-1112
agacgcuucuggggagu

SEQ ID NO: 10094 - RNA, 17 nt, Artificial Sequence
  Synthetic oligonucleotide: FAS-824
gacgcuucuggggagug

SEQ ID NO: 10095 - RNA, 17 nt, Artificial Sequence
  Synthetic oligonucleotide: FAS-825
acgcuucuggggaguga

SEQ ID NO: 10096 - RNA, 17 nt, Artificial Sequence
  Synthetic oligonucleotide: FAS-1115
agugagggaagcgguuu

SEQ ID NO: 10097 - RNA, 17 nt, Artificial Sequence
  Synthetic oligonucleotide: FAS-1116
guuuacgagugacuugg

SEQ ID NO: 10098 - RNA, 17 nt, Artificial Sequence
  Synthetic oligonucleotide: FAS-828
uuuacgagugacuuggc

SEQ ID NO: 10099 - RNA, 17 nt, Artificial Sequence
  Synthetic oligonucleotide: FAS-1118
ugacuuggcuggagccu

SEQ ID NO: 10100 - RNA, 17 nt, Artificial Sequence
  Synthetic oligonucleotide: FAS-829
gacuuggcuggagccuc

SEQ ID NO: 10101 - RNA, 17 nt, Artificial Sequence
  Synthetic oligonucleotide: FAS-1120
uggcuggagccucaggg

SEQ ID NO: 10102 - RNA, 17 nt, Artificial Sequence
  Synthetic oligonucleotide: FAS-1121
caggggcgggcacuggc

SEQ ID NO: 10103 - RNA, 17 nt, Artificial Sequence
  Synthetic oligonucleotide: FAS-835
aggggcgggcacuggca

SEQ ID NO: 10104 - RNA, 17 nt, Artificial Sequence
  Synthetic oligonucleotide: FAS-1123
cuggcacggaacacacc

SEQ ID NO: 10105 - RNA, 17 nt, Artificial Sequence
  Synthetic oligonucleotide: FAS-1124
cagcccuggcugcccag

SEQ ID NO: 10106 - RNA, 17 nt, Artificial Sequence
  Synthetic oligonucleotide: FAS-839
agcccuggcugcccagg

SEQ ID NO: 10107 - RNA, 17 nt, Artificial Sequence
  Synthetic oligonucleotide: FAS-1126
gagcugccucuucuccc

SEQ ID NO: 10108 - RNA, 17 nt, Artificial Sequence
  Synthetic oligonucleotide: FAS-1127
ucuucucccgcggguug

SEQ ID NO: 10109 - RNA, 17 nt, Artificial Sequence
  Synthetic oligonucleotide: FAS-1128
ugguggacccgcucagu

SEQ ID NO: 10110 - RNA, 17 nt, Artificial Sequence
  Synthetic oligonucleotide: FAS-844
gguggacccgcucagua

SEQ ID NO: 10111 - RNA, 17 nt, Artificial Sequence
  Synthetic oligonucleotide: FAS-1130
acccgcucaguacggag

SEQ ID NO: 10112 - RNA, 17 nt, Artificial Sequence
  Synthetic oligonucleotide: FAS-845
cccgcucaguacggagu

SEQ ID NO: 10113 - RNA, 17 nt, Artificial Sequence
  Synthetic oligonucleotide: FAS-846
ccgcucaguacggaguu

SEQ ID NO: 10114 - RNA, 17 nt, Artificial Sequence
  Synthetic oligonucleotide: FAS-847
cgcucaguacggaguug

SEQ ID NO: 10115 - RNA, 17 nt, Artificial Sequence
  Synthetic oligonucleotide: FAS-1134
ggggaagcucuuucacu

SEQ ID NO: 10116 - RNA, 17 nt, Artificial Sequence
  Synthetic oligonucleotide: FAS-848
gggaagcucuuucacuu

SEQ ID NO: 10117 - RNA, 17 nt, Artificial Sequence
  Synthetic oligonucleotide: FAS-1136
gaagcucuuucacuucg

SEQ ID NO: 10118 - RNA, 17 nt, Artificial Sequence
  Synthetic oligonucleotide: FAS-1137
auugcucaacaaccaug

SEQ ID NO: 10119 - RNA, 17 nt, Artificial Sequence
  Synthetic oligonucleotide: FAS-101
acaaccaugcugggcau

SEQ ID NO: 10120 - RNA, 17 nt, Artificial Sequence
  Synthetic oligonucleotide: FAS-102
ggacccuccuaccucug

SEQ ID NO: 10121 - RNA, 17 nt, Artificial Sequence
  Synthetic oligonucleotide: FAS-1140
ggugagcccucuccugc

SEQ ID NO: 10122 - RNA, 17 nt, Artificial Sequence
  Synthetic oligonucleotide: FAS-1141
agcccucuccugcccgg

SEQ ID NO: 10123 - RNA, 17 nt, Artificial Sequence
  Synthetic oligonucleotide: FAS-856
gcccucuccugcccggg

SEQ ID NO: 10124 - RNA, 17 nt, Artificial Sequence
  Synthetic oligonucleotide: FAS-1143
cuuaccccgucuuaguc

SEQ ID NO: 10125 - RNA, 17 nt, Artificial Sequence
  Synthetic oligonucleotide: FAS-858
uuaccccgucuuagucc

SEQ ID NO: 10126 - RNA, 17 nt, Artificial Sequence
  Synthetic oligonucleotide: FAS-859
uaccccgucuuaguccc

SEQ ID NO: 10127 - RNA, 17 nt, Artificial Sequence
  Synthetic oligonucleotide: FAS-1146
ucccggggauaggcaaa

SEQ ID NO: 10128 - RNA, 17 nt, Artificial Sequence
  Synthetic oligonucleotide: FAS-862
cccggggauaggcaaag

SEQ ID NO: 10129 - RNA, 17 nt, Artificial Sequence
  Synthetic oligonucleotide: FAS-1148
gggauaggcaaaguggg

SEQ ID NO: 10130 - RNA, 17 nt, Artificial Sequence
  Synthetic oligonucleotide: FAS-1149
ggcaaaguggggcgggc

SEQ ID NO: 10131 - RNA, 17 nt, Artificial Sequence
  Synthetic oligonucleotide: FAS-867
gcaaaguggggcgggcg

SEQ ID NO: 10132 - RNA, 17 nt, Artificial Sequence
  Synthetic oligonucleotide: FAS-1151
gcgggcgcgggacgcgu

SEQ ID NO: 10133 - RNA, 17 nt, Artificial Sequence
  Synthetic oligonucleotide: FAS-869
cgggcgcgggacgcgug

SEQ ID NO: 10134 - RNA, 17 nt, Artificial Sequence
  Synthetic oligonucleotide: FAS-1153
cggcggcagcggcgcac

SEQ ID NO: 10135 - RNA, 17 nt, Artificial Sequence
  Synthetic oligonucleotide: FAS-1154
gcggcgcacgcgggcac

SEQ ID NO: 10136 - RNA, 17 nt, Artificial Sequence
  Synthetic oligonucleotide: FAS-876
cggcgcacgcgggcacc

SEQ ID NO: 10137 - RNA, 17 nt, Artificial Sequence
  Synthetic oligonucleotide: FAS-877
ggcgcacgcgggcaccu

SEQ ID NO: 10138 - RNA, 20 nt, Artificial Sequence
  Synthetic oligonucleotide: FAS-1157
ccgccccacuuugccuaucc

SEQ ID NO: 10139 - RNA, 20 nt, Artificial Sequence
  Synthetic oligonucleotide: FAS-687
cgccccacuuugccuauccc

SEQ ID NO: 10140 - RNA, 20 nt, Artificial Sequence
  Synthetic oligonucleotide: FAS-1159
ugccuauccccgggacuaag

SEQ ID NO: 10141 - RNA, 20 nt, Artificial Sequence
  Synthetic oligonucleotide: FAS-689
gccuauccccgggacuaaga

SEQ ID NO: 10142 - RNA, 20 nt, Artificial Sequence
  Synthetic oligonucleotide: FAS-1161
aagacgggguaagccuccac

SEQ ID NO: 10143 - RNA, 20 nt, Artificial Sequence
  Synthetic oligonucleotide: FAS-1162
gggguaagccuccacccggg

SEQ ID NO: 10144 - RNA, 20 nt, Artificial Sequence
  Synthetic oligonucleotide: FAS-694
ggguaagccuccacccgggc

SEQ ID NO: 10145 - RNA, 20 nt, Artificial Sequence
  Synthetic oligonucleotide: FAS-1164
guaagccuccacccgggcag

SEQ ID NO: 10146 - RNA, 20 nt, Artificial Sequence
  Synthetic oligonucleotide: FAS-1165
aagccuccacccgggcagga

SEQ ID NO: 10147 - RNA, 20 nt, Artificial Sequence
  Synthetic oligonucleotide: FAS-103
ccgggcaggagagggcucac

SEQ ID NO: 10148 - RNA, 20 nt, Artificial Sequence
  Synthetic oligonucleotide: FAS-104
aggagagggcucaccagagg

SEQ ID NO: 10149 - RNA, 20 nt, Artificial Sequence
  Synthetic oligonucleotide: FAS-105
ggagagggcucaccagaggu

SEQ ID NO: 10150 - RNA, 20 nt, Artificial Sequence
  Synthetic oligonucleotide: FAS-106
agagggcucaccagagguag

SEQ ID NO: 10151 - RNA, 20 nt, Artificial Sequence
  Synthetic oligonucleotide: FAS-107
ccagaugcccagcaugguug

SEQ ID NO: 10152 - RNA, 20 nt, Artificial Sequence
  Synthetic oligonucleotide: FAS-1171
caugguuguugagcaauccu

SEQ ID NO: 10153 - RNA, 20 nt, Artificial Sequence
  Synthetic oligonucleotide: FAS-1172
uuguugagcaauccuccgaa

SEQ ID NO: 10154 - RNA, 20 nt, Artificial Sequence
  Synthetic oligonucleotide: FAS-1173
ugagcaauccuccgaaguga

SEQ ID NO: 10155 - RNA, 20 nt, Artificial Sequence
  Synthetic oligonucleotide: FAS-1174
agagcuuccccaacuccgua

SEQ ID NO: 10156 - RNA, 20 nt, Artificial Sequence
  Synthetic oligonucleotide: FAS-1175
cuuccccaacuccguacuga

SEQ ID NO: 10157 - RNA, 20 nt, Artificial Sequence
  Synthetic oligonucleotide: FAS-1176
cugagcggguccaccaaccc

SEQ ID NO: 10158 - RNA, 20 nt, Artificial Sequence
  Synthetic oligonucleotide: FAS-704
ugagcggguccaccaacccg

SEQ ID NO: 10159 - RNA, 20 nt, Artificial Sequence
  Synthetic oligonucleotide: FAS-705
gagcggguccaccaacccgc

SEQ ID NO: 10160 - RNA, 20 nt, Artificial Sequence
  Synthetic oligonucleotide: FAS-1179
gcggguccaccaacccgcgg

SEQ ID NO: 10161 - RNA, 20 nt, Artificial Sequence
  Synthetic oligonucleotide: FAS-1180
gguccaccaacccgcgggag

SEQ ID NO: 10162 - RNA, 20 nt, Artificial Sequence
  Synthetic oligonucleotide: FAS-1181
gggagaagaggcagcuccgc

SEQ ID NO: 10163 - RNA, 20 nt, Artificial Sequence
  Synthetic oligonucleotide: FAS-1182
ggcagcuccgccugggcagc

SEQ ID NO: 10164 - RNA, 20 nt, Artificial Sequence
  Synthetic oligonucleotide: FAS-1183
ugggcagccagggcuggccu

SEQ ID NO: 10165 - RNA, 20 nt, Artificial Sequence
  Synthetic oligonucleotide: FAS-1184
uuccgugccagugcccgccc

SEQ ID NO: 10166 - RNA, 20 nt, Artificial Sequence
  Synthetic oligonucleotide: FAS-1185
aaaccgcuucccucacuccc

SEQ ID NO: 10167 - RNA, 20 nt, Artificial Sequence
  Synthetic oligonucleotide: FAS-1186
cucacuccccagaagcgucu

SEQ ID NO: 10168 - RNA, 20 nt, Artificial Sequence
  Synthetic oligonucleotide: FAS-1187
caccugugugucacucuugc

SEQ ID NO: 10169 - RNA, 20 nt, Artificial Sequence
  Synthetic oligonucleotide: FAS-1188
gugucacucuugcgcgagau

SEQ ID NO: 10170 - RNA, 20 nt, Artificial Sequence
  Synthetic oligonucleotide: FAS-1189
acucuugcgcgagaucagag

SEQ ID NO: 10171 - RNA, 20 nt, Artificial Sequence
  Synthetic oligonucleotide: FAS-1190
gcgagaucagagacgagcuc

SEQ ID NO: 10172 - RNA, 20 nt, Artificial Sequence
  Synthetic oligonucleotide: FAS-1191
ucacgaaaagccccgguggu

SEQ ID NO: 10173 - RNA, 20 nt, Artificial Sequence
  Synthetic oligonucleotide: FAS-717
cacgaaaagccccggugguc

SEQ ID NO: 10174 - RNA, 20 nt, Artificial Sequence
  Synthetic oligonucleotide: FAS-1193
cgaaaagccccgguggucag

SEQ ID NO: 10175 - RNA, 20 nt, Artificial Sequence
  Synthetic oligonucleotide: FAS-1194
aagccccgguggucaggagg

SEQ ID NO: 10176 - RNA, 20 nt, Artificial Sequence
  Synthetic oligonucleotide: FAS-719
agccccgguggucaggagga

SEQ ID NO: 10177 - RNA, 20 nt, Artificial Sequence
  Synthetic oligonucleotide: FAS-720
gccccgguggucaggaggau

SEQ ID NO: 10178 - RNA, 20 nt, Artificial Sequence
  Synthetic oligonucleotide: FAS-1197
ccgguggucaggaggauggg

SEQ ID NO: 10179 - RNA, 20 nt, Artificial Sequence
  Synthetic oligonucleotide: FAS-721
cgguggucaggaggauggga

SEQ ID NO: 10180 - RNA, 20 nt, Artificial Sequence
  Synthetic oligonucleotide: FAS-1199
aggaugggaaggaagccucg

SEQ ID NO: 10181 - RNA, 20 nt, Artificial Sequence
  Synthetic oligonucleotide: FAS-722
ggaugggaaggaagccucgc

SEQ ID NO: 10182 - RNA, 20 nt, Artificial Sequence
  Synthetic oligonucleotide: FAS-723
gaugggaaggaagccucgcu

SEQ ID NO: 10183 - RNA, 20 nt, Artificial Sequence
  Synthetic oligonucleotide: FAS-724
augggaaggaagccucgcug

SEQ ID NO: 10184 - RNA, 20 nt, Artificial Sequence
  Synthetic oligonucleotide: FAS-1203
gaagccucgcuggggaacgc

SEQ ID NO: 10185 - RNA, 20 nt, Artificial Sequence
  Synthetic oligonucleotide: FAS-1204
cucgcuggggaacgcccggg

SEQ ID NO: 10186 - RNA, 20 nt, Artificial Sequence
  Synthetic oligonucleotide: FAS-727
ucgcuggggaacgcccgggu

SEQ ID NO: 10187 - RNA, 20 nt, Artificial Sequence
  Synthetic oligonucleotide: FAS-728
cgcuggggaacgcccggguu

SEQ ID NO: 10188 - RNA, 20 nt, Artificial Sequence
  Synthetic oligonucleotide: FAS-729
gcuggggaacgcccggguug

SEQ ID NO: 10189 - RNA, 20 nt, Artificial Sequence
  Synthetic oligonucleotide: FAS-1208
uggggaacgcccggguuggg

SEQ ID NO: 10190 - RNA, 20 nt, Artificial Sequence
  Synthetic oligonucleotide: FAS-1209
uucagcaacuuggccugcgc

SEQ ID NO: 10191 - RNA, 20 nt, Artificial Sequence
  Synthetic oligonucleotide: FAS-1210
caacuuggccugcgcgcggg

SEQ ID NO: 10192 - RNA, 20 nt, Artificial Sequence
  Synthetic oligonucleotide: FAS-735
aacuuggccugcgcgcgggu

SEQ ID NO: 10193 - RNA, 20 nt, Artificial Sequence
  Synthetic oligonucleotide: FAS-736
acuuggccugcgcgcgggua

SEQ ID NO: 10194 - RNA, 20 nt, Artificial Sequence
  Synthetic oligonucleotide: FAS-1213
uuggccugcgcgcggguagg

SEQ ID NO: 10195 - RNA, 20 nt, Artificial Sequence
  Synthetic oligonucleotide: FAS-737
uggccugcgcgcggguaggg

SEQ ID NO: 10196 - RNA, 20 nt, Artificial Sequence
  Synthetic oligonucleotide: FAS-738
ggccugcgcgcggguaggga

SEQ ID NO: 10197 - RNA, 20 nt, Artificial Sequence
  Synthetic oligonucleotide: FAS-739
gccugcgcgcggguagggag

SEQ ID NO: 10198 - RNA, 20 nt, Artificial Sequence
  Synthetic oligonucleotide: FAS-740
ccugcgcgcggguagggagg

SEQ ID NO: 10199 - RNA, 20 nt, Artificial Sequence
  Synthetic oligonucleotide: FAS-1218
ugcgcgcggguagggagggg

SEQ ID NO: 10200 - RNA, 20 nt, Artificial Sequence
  Synthetic oligonucleotide: FAS-1219
ggguagggagggggagaagu

SEQ ID NO: 10201 - RNA, 20 nt, Artificial Sequence
  Synthetic oligonucleotide: FAS-1220
agggagggggagaagucagg

SEQ ID NO: 10202 - RNA, 20 nt, Artificial Sequence
  Synthetic oligonucleotide: FAS-1221
ggagggggagaagucagggu

SEQ ID NO: 10203 - RNA, 20 nt, Artificial Sequence
  Synthetic oligonucleotide: FAS-743
gagggggagaagucagggug

SEQ ID NO: 10204 - RNA, 20 nt, Artificial Sequence
  Synthetic oligonucleotide: FAS-1223
ggggagaagucagggugagg

SEQ ID NO: 10205 - RNA, 20 nt, Artificial Sequence
  Synthetic oligonucleotide: FAS-744
gggagaagucagggugagga

SEQ ID NO: 10206 - RNA, 20 nt, Artificial Sequence
  Synthetic oligonucleotide: FAS-1225
agucagggugaggaaggagu

SEQ ID NO: 10207 - RNA, 20 nt, Artificial Sequence
  Synthetic oligonucleotide: FAS-1226
agucaggguucguugcacaa

SEQ ID NO: 10208 - RNA, 20 nt, Artificial Sequence
  Synthetic oligonucleotide: FAS-1227
cacaaaugggcauuccuguc

SEQ ID NO: 10209 - RNA, 20 nt, Artificial Sequence
  Synthetic oligonucleotide: FAS-749
acaaaugggcauuccugucc

SEQ ID NO: 10210 - RNA, 20 nt, Artificial Sequence
  Synthetic oligonucleotide: FAS-1229
ggcuggcaugcucacuucag

SEQ ID NO: 10211 - RNA, 20 nt, Artificial Sequence
  Synthetic oligonucleotide: FAS-1230
cuggcaugcucacuucaggu

SEQ ID NO: 10212 - RNA, 20 nt, Artificial Sequence
  Synthetic oligonucleotide: FAS-1231
gcucacuucaggugaggacc

SEQ ID NO: 10213 - RNA, 20 nt, Artificial Sequence
  Synthetic oligonucleotide: FAS-1232
ucacuucaggugaggaccuc

SEQ ID NO: 10214 - RNA, 20 nt, Artificial Sequence
  Synthetic oligonucleotide: FAS-1233
ggcuucugcuguaguucaac

SEQ ID NO: 10215 - RNA, 20 nt, Artificial Sequence
  Synthetic oligonucleotide: FAS-758
gcuucugcuguaguucaacc

SEQ ID NO: 10216 - RNA, 20 nt, Artificial Sequence
  Synthetic oligonucleotide: FAS-759
cuucugcuguaguucaaccu

SEQ ID NO: 10217 - RNA, 20 nt, Artificial Sequence
  Synthetic oligonucleotide: FAS-1236
cuguaguucaaccugggaag

SEQ ID NO: 10218 - RNA, 20 nt, Artificial Sequence
  Synthetic oligonucleotide: FAS-760
uguaguucaaccugggaagu

SEQ ID NO: 10219 - RNA, 20 nt, Artificial Sequence
  Synthetic oligonucleotide: FAS-761
guaguucaaccugggaaguu

SEQ ID NO: 10220 - RNA, 20 nt, Artificial Sequence
  Synthetic oligonucleotide: FAS-762
uaguucaaccugggaaguug

SEQ ID NO: 10221 - RNA, 20 nt, Artificial Sequence
  Synthetic oligonucleotide: FAS-1240
ccugggaaguuggggagguc

SEQ ID NO: 10222 - RNA, 20 nt, Artificial Sequence
  Synthetic oligonucleotide: FAS-1241
gggaaguuggggaggucuug

SEQ ID NO: 10223 - RNA, 20 nt, Artificial Sequence
  Synthetic oligonucleotide: FAS-764
ggaaguuggggaggucuuga

SEQ ID NO: 10224 - RNA, 20 nt, Artificial Sequence
  Synthetic oligonucleotide: FAS-1243
aaguuggggaggucuugaag

SEQ ID NO: 10225 - RNA, 20 nt, Artificial Sequence
  Synthetic oligonucleotide: FAS-1244
uggggaggucuugaaggaga

SEQ ID NO: 10226 - RNA, 20 nt, Artificial Sequence
  Synthetic oligonucleotide: FAS-765
ggggaggucuugaaggagaa

SEQ ID NO: 10227 - RNA, 20 nt, Artificial Sequence
  Synthetic oligonucleotide: FAS-1246
ucuugaaggagaauggagcu

SEQ ID NO: 10228 - RNA, 20 nt, Artificial Sequence
  Synthetic oligonucleotide: FAS-1247
ggagaauggagcucagagcg

SEQ ID NO: 10229 - RNA, 20 nt, Artificial Sequence
  Synthetic oligonucleotide: FAS-1248
ucagagcgcagagguccugc

SEQ ID NO: 10230 - RNA, 20 nt, Artificial Sequence
  Synthetic oligonucleotide: FAS-1249
gcagagguccugccugggua

SEQ ID NO: 10231 - RNA, 20 nt, Artificial Sequence
  Synthetic oligonucleotide: FAS-769
cagagguccugccuggguac

SEQ ID NO: 10232 - RNA, 20 nt, Artificial Sequence
  Synthetic oligonucleotide: FAS-1251
acaggagccuuggcuaauug

SEQ ID NO: 10233 - RNA, 20 nt, Artificial Sequence
  Synthetic oligonucleotide: FAS-771
caggagccuuggcuaauugc

SEQ ID NO: 10234 - RNA, 20 nt, Artificial Sequence
  Synthetic oligonucleotide: FAS-1253
ggcuaauugcuggagucacu

SEQ ID NO: 10235 - RNA, 20 nt, Artificial Sequence
  Synthetic oligonucleotide: FAS-1254
cuaauugcuggagucacuca

SEQ ID NO: 10236 - RNA, 20 nt, Artificial Sequence
  Synthetic oligonucleotide: FAS-1255
agucacucagagaaagacuu

SEQ ID NO: 10237 - RNA, 20 nt, Artificial Sequence
  Synthetic oligonucleotide: FAS-772
gucacucagagaaagacuug

SEQ ID NO: 10238 - RNA, 20 nt, Artificial Sequence
  Synthetic oligonucleotide: FAS-1257
aagacuugcggggcauuuga

SEQ ID NO: 10239 - RNA, 20 nt, Artificial Sequence
  Synthetic oligonucleotide: FAS-1258
guccauguuguggcugcaac

SEQ ID NO: 10240 - RNA, 20 nt, Artificial Sequence
  Synthetic oligonucleotide: FAS-1259
ccauguuguggcugcaacau

SEQ ID NO: 10241 - RNA, 20 nt, Artificial Sequence
  Synthetic oligonucleotide: FAS-1260
ugagaggcucacagacguuu

SEQ ID NO: 10242 - RNA, 20 nt, Artificial Sequence
  Synthetic oligonucleotide: FAS-779
gagaggcucacagacguuuc

SEQ ID NO: 10243 - RNA, 20 nt, Artificial Sequence
  Synthetic oligonucleotide: FAS-1262
ggcucacagacguuucugga

SEQ ID NO: 10244 - RNA, 20 nt, Artificial Sequence
  Synthetic oligonucleotide: FAS-1263
uggaauggacaguuaaccau

SEQ ID NO: 10245 - RNA, 20 nt, Artificial Sequence
  Synthetic oligonucleotide: FAS-1264
aaaguacagauguugcgcca

SEQ ID NO: 10246 - RNA, 20 nt, Artificial Sequence
  Synthetic oligonucleotide: FAS-1265
agauguugcgccauagggcu

SEQ ID NO: 10247 - RNA, 20 nt, Artificial Sequence
  Synthetic oligonucleotide: FAS-1266
uugcgccauagggcucugaa

SEQ ID NO: 10248 - RNA, 20 nt, Artificial Sequence
  Synthetic oligonucleotide: FAS-783
ugcgccauagggcucugaaa

SEQ ID NO: 10249 - RNA, 20 nt, Artificial Sequence
  Synthetic oligonucleotide: FAS-784
gcgccauagggcucugaaaa

SEQ ID NO: 10250 - RNA, 20 nt, Artificial Sequence
  Synthetic oligonucleotide: FAS-1269
gccauagggcucugaaaagg

SEQ ID NO: 10251 - RNA, 20 nt, Artificial Sequence
  Synthetic oligonucleotide: FAS-1270
ccccuuaguuuuuauuucuc

SEQ ID NO: 10252 - RNA, 20 nt, Artificial Sequence
  Synthetic oligonucleotide: FAS-1271
ccuuaguuuuuauuucucaa

SEQ ID NO: 10253 - RNA, 20 nt, Artificial Sequence
  Synthetic oligonucleotide: FAS-787
cuuaguuuuuauuucucaag

SEQ ID NO: 10254 - RNA, 17 nt, Artificial Sequence
  Synthetic oligonucleotide: FAS-1273
ccccacuuugccuaucc

SEQ ID NO: 10255 - RNA, 17 nt, Artificial Sequence
  Synthetic oligonucleotide: FAS-878
cccacuuugccuauccc

SEQ ID NO: 10256 - RNA, 17 nt, Artificial Sequence
  Synthetic oligonucleotide: FAS-1275
cuauccccgggacuaag

SEQ ID NO: 10257 - RNA, 17 nt, Artificial Sequence
  Synthetic oligonucleotide: FAS-880
uauccccgggacuaaga

SEQ ID NO: 10258 - RNA, 17 nt, Artificial Sequence
  Synthetic oligonucleotide: FAS-1277
acgggguaagccuccac

SEQ ID NO: 10259 - RNA, 17 nt, Artificial Sequence
  Synthetic oligonucleotide: FAS-1278
guaagccuccacccggg

SEQ ID NO: 10260 - RNA, 17 nt, Artificial Sequence
  Synthetic oligonucleotide: FAS-885
uaagccuccacccgggc

SEQ ID NO: 10261 - RNA, 17 nt, Artificial Sequence
  Synthetic oligonucleotide: FAS-1280
agccuccacccgggcag

SEQ ID NO: 10262 - RNA, 17 nt, Artificial Sequence
  Synthetic oligonucleotide: FAS-1281
ccuccacccgggcagga

SEQ ID NO: 10263 - RNA, 17 nt, Artificial Sequence
  Synthetic oligonucleotide: FAS-113
ggcaggagagggcucac

SEQ ID NO: 10264 - RNA, 17 nt, Artificial Sequence
  Synthetic oligonucleotide: FAS-114
agagggcucaccagagg

SEQ ID NO: 10265 - RNA, 17 nt, Artificial Sequence
  Synthetic oligonucleotide: FAS-115
gagggcucaccagaggu

SEQ ID NO: 10266 - RNA, 17 nt, Artificial Sequence
  Synthetic oligonucleotide: FAS-116
gggcucaccagagguag

SEQ ID NO: 10267 - RNA, 17 nt, Artificial Sequence
  Synthetic oligonucleotide: FAS-117
gaugcccagcaugguug

SEQ ID NO: 10268 - RNA, 17 nt, Artificial Sequence
  Synthetic oligonucleotide: FAS-1287
gguuguugagcaauccu

SEQ ID NO: 10269 - RNA, 17 nt, Artificial Sequence
  Synthetic oligonucleotide: FAS-1288
uugagcaauccuccgaa

SEQ ID NO: 10270 - RNA, 17 nt, Artificial Sequence
  Synthetic oligonucleotide: FAS-1289
gcaauccuccgaaguga

SEQ ID NO: 10271 - RNA, 17 nt, Artificial Sequence
  Synthetic oligonucleotide: FAS-1290
gcuuccccaacuccgua

SEQ ID NO: 10272 - RNA, 17 nt, Artificial Sequence
  Synthetic oligonucleotide: FAS-1291
ccccaacuccguacuga

SEQ ID NO: 10273 - RNA, 17 nt, Artificial Sequence
  Synthetic oligonucleotide: FAS-1292
agcggguccaccaaccc

SEQ ID NO: 10274 - RNA, 17 nt, Artificial Sequence
  Synthetic oligonucleotide: FAS-895
gcggguccaccaacccg

SEQ ID NO: 10275 - RNA, 17 nt, Artificial Sequence
  Synthetic oligonucleotide: FAS-896
cggguccaccaacccgc

SEQ ID NO: 10276 - RNA, 17 nt, Artificial Sequence
  Synthetic oligonucleotide: FAS-1295
gguccaccaacccgcgg

SEQ ID NO: 10277 - RNA, 17 nt, Artificial Sequence
  Synthetic oligonucleotide: FAS-1296
ccaccaacccgcgggag

SEQ ID NO: 10278 - RNA, 17 nt, Artificial Sequence
  Synthetic oligonucleotide: FAS-1297
agaagaggcagcuccgc

SEQ ID NO: 10279 - RNA, 17 nt, Artificial Sequence
  Synthetic oligonucleotide: FAS-1298
agcuccgccugggcagc

SEQ ID NO: 10280 - RNA, 17 nt, Artificial Sequence
  Synthetic oligonucleotide: FAS-1299
gcagccagggcuggccu

SEQ ID NO: 10281 - RNA, 17 nt, Artificial Sequence
  Synthetic oligonucleotide: FAS-1300
cgugccagugcccgccc

SEQ ID NO: 10282 - RNA, 17 nt, Artificial Sequence
  Synthetic oligonucleotide: FAS-1301
ccgcuucccucacuccc

SEQ ID NO: 10283 - RNA, 17 nt, Artificial Sequence
  Synthetic oligonucleotide: FAS-1302
acuccccagaagcgucu

SEQ ID NO: 10284 - RNA, 17 nt, Artificial Sequence
  Synthetic oligonucleotide: FAS-1303
cugugugucacucuugc

SEQ ID NO: 10285 - RNA, 17 nt, Artificial Sequence
  Synthetic oligonucleotide: FAS-1304
ucacucuugcgcgagau

SEQ ID NO: 10286 - RNA, 17 nt, Artificial Sequence
  Synthetic oligonucleotide: FAS-1305
cuugcgcgagaucagag

SEQ ID NO: 10287 - RNA, 17 nt, Artificial Sequence
  Synthetic oligonucleotide: FAS-1306
agaucagagacgagcuc

SEQ ID NO: 10288 - RNA, 17 nt, Artificial Sequence
  Synthetic oligonucleotide: FAS-1307
cgaaaagccccgguggu

SEQ ID NO: 10289 - RNA, 17 nt, Artificial Sequence
  Synthetic oligonucleotide: FAS-908
gaaaagccccggugguc

SEQ ID NO: 10290 - RNA, 17 nt, Artificial Sequence
  Synthetic oligonucleotide: FAS-1309
aaagccccgguggucag

SEQ ID NO: 10291 - RNA, 17 nt, Artificial Sequence
  Synthetic oligonucleotide: FAS-1310
ccccgguggucaggagg

SEQ ID NO: 10292 - RNA, 17 nt, Artificial Sequence
  Synthetic oligonucleotide: FAS-910
cccgguggucaggagga

SEQ ID NO: 10293 - RNA, 17 nt, Artificial Sequence
  Synthetic oligonucleotide: FAS-911
ccgguggucaggaggau

SEQ ID NO: 10294 - RNA, 17 nt, Artificial Sequence
  Synthetic oligonucleotide: FAS-1313
guggucaggaggauggg

SEQ ID NO: 10295 - RNA, 17 nt, Artificial Sequence
  Synthetic oligonucleotide: FAS-912
uggucaggaggauggga

SEQ ID NO: 10296 - RNA, 17 nt, Artificial Sequence
  Synthetic oligonucleotide: FAS-1315
augggaaggaagccucg

SEQ ID NO: 10297 - RNA, 17 nt, Artificial Sequence
  Synthetic oligonucleotide: FAS-913
ugggaaggaagccucgc

SEQ ID NO: 10298 - RNA, 17 nt, Artificial Sequence
  Synthetic oligonucleotide: FAS-914
gggaaggaagccucgcu

SEQ ID NO: 10299 - RNA, 17 nt, Artificial Sequence
  Synthetic oligonucleotide: FAS-915
ggaaggaagccucgcug

SEQ ID NO: 10300 - RNA, 17 nt, Artificial Sequence
  Synthetic oligonucleotide: FAS-1319
gccucgcuggggaacgc

SEQ ID NO: 10301 - RNA, 17 nt, Artificial Sequence
  Synthetic oligonucleotide: FAS-1320
gcuggggaacgcccggg

SEQ ID NO: 10302 - RNA, 17 nt, Artificial Sequence
  Synthetic oligonucleotide: FAS-918
cuggggaacgcccgggu

SEQ ID NO: 10303 - RNA, 17 nt, Artificial Sequence
  Synthetic oligonucleotide: FAS-919
uggggaacgcccggguu

SEQ ID NO: 10304 - RNA, 17 nt, Artificial Sequence
  Synthetic oligonucleotide: FAS-920
ggggaacgcccggguug

SEQ ID NO: 10305 - RNA, 17 nt, Artificial Sequence
  Synthetic oligonucleotide: FAS-1324
ggaacgcccggguuggg

SEQ ID NO: 10306 - RNA, 17 nt, Artificial Sequence
  Synthetic oligonucleotide: FAS-1325
agcaacuuggccugcgc

SEQ ID NO: 10307 - RNA, 17 nt, Artificial Sequence
  Synthetic oligonucleotide: FAS-1326
cuuggccugcgcgcggg

SEQ ID NO: 10308 - RNA, 17 nt, Artificial Sequence
  Synthetic oligonucleotide: FAS-926
uuggccugcgcgcgggu

SEQ ID NO: 10309 - RNA, 17 nt, Artificial Sequence
  Synthetic oligonucleotide: FAS-927
uggccugcgcgcgggua

SEQ ID NO: 10310 - RNA, 17 nt, Artificial Sequence
  Synthetic oligonucleotide: FAS-1329
gccugcgcgcggguagg

SEQ ID NO: 10311 - RNA, 17 nt, Artificial Sequence
  Synthetic oligonucleotide: FAS-928
ccugcgcgcggguaggg

SEQ ID NO: 10312 - RNA, 17 nt, Artificial Sequence
  Synthetic oligonucleotide: FAS-929
cugcgcgcggguaggga

SEQ ID NO: 10313 - RNA, 17 nt, Artificial Sequence
  Synthetic oligonucleotide: FAS-930
ugcgcgcggguagggag

SEQ ID NO: 10314 - RNA, 17 nt, Artificial Sequence
  Synthetic oligonucleotide: FAS-931
gcgcgcggguagggagg

SEQ ID NO: 10315 - RNA, 17 nt, Artificial Sequence
  Synthetic oligonucleotide: FAS-1334
gcgcggguagggagggg

SEQ ID NO: 10316 - RNA, 17 nt, Artificial Sequence
  Synthetic oligonucleotide: FAS-1335
uagggagggggagaagu

SEQ ID NO: 10317 - RNA, 17 nt, Artificial Sequence
  Synthetic oligonucleotide: FAS-1336
gagggggagaagucagg

SEQ ID NO: 10318 - RNA, 17 nt, Artificial Sequence
  Synthetic oligonucleotide: FAS-1337
gggggagaagucagggu

SEQ ID NO: 10319 - RNA, 17 nt, Artificial Sequence
  Synthetic oligonucleotide: FAS-934
ggggagaagucagggug

SEQ ID NO: 10320 - RNA, 17 nt, Artificial Sequence
  Synthetic oligonucleotide: FAS-1339
gagaagucagggugagg

SEQ ID NO: 10321 - RNA, 17 nt, Artificial Sequence
  Synthetic oligonucleotide: FAS-935
agaagucagggugagga

SEQ ID NO: 10322 - RNA, 17 nt, Artificial Sequence
  Synthetic oligonucleotide: FAS-1341
cagggugaggaaggagu

SEQ ID NO: 10323 - RNA, 17 nt, Artificial Sequence
  Synthetic oligonucleotide: FAS-1342
caggguucguugcacaa

SEQ ID NO: 10324 - RNA, 17 nt, Artificial Sequence
  Synthetic oligonucleotide: FAS-1343
aaaugggcauuccuguc

SEQ ID NO: 10325 - RNA, 17 nt, Artificial Sequence
  Synthetic oligonucleotide: FAS-940
aaugggcauuccugucc

SEQ ID NO: 10326 - RNA, 17 nt, Artificial Sequence
  Synthetic oligonucleotide: FAS-1345
uggcaugcucacuucag

SEQ ID NO: 10327 - RNA, 17 nt, Artificial Sequence
  Synthetic oligonucleotide: FAS-1346
gcaugcucacuucaggu

SEQ ID NO: 10328 - RNA, 17 nt, Artificial Sequence
  Synthetic oligonucleotide: FAS-1347
cacuucaggugaggacc

SEQ ID NO: 10329 - RNA, 17 nt, Artificial Sequence
  Synthetic oligonucleotide: FAS-1348
cuucaggugaggaccuc

SEQ ID NO: 10330 - RNA, 17 nt, Artificial Sequence
  Synthetic oligonucleotide: FAS-1349
uucugcuguaguucaac

SEQ ID NO: 10331 - RNA, 17 nt, Artificial Sequence
  Synthetic oligonucleotide: FAS-949
ucugcuguaguucaacc

SEQ ID NO: 10332 - RNA, 17 nt, Artificial Sequence
  Synthetic oligonucleotide: FAS-950
cugcuguaguucaaccu

SEQ ID NO: 10333 - RNA, 17 nt, Artificial Sequence
  Synthetic oligonucleotide: FAS-1352
uaguucaaccugggaag

SEQ ID NO: 10334 - RNA, 17 nt, Artificial Sequence
  Synthetic oligonucleotide: FAS-951
aguucaaccugggaagu

SEQ ID NO: 10335 - RNA, 17 nt, Artificial Sequence
  Synthetic oligonucleotide: FAS-952
guucaaccugggaaguu

SEQ ID NO: 10336 - RNA, 17 nt, Artificial Sequence
  Synthetic oligonucleotide: FAS-953
uucaaccugggaaguug

SEQ ID NO: 10337 - RNA, 17 nt, Artificial Sequence
  Synthetic oligonucleotide: FAS-1356
gggaaguuggggagguc

SEQ ID NO: 10338 - RNA, 17 nt, Artificial Sequence
  Synthetic oligonucleotide: FAS-1357
aaguuggggaggucuug

SEQ ID NO: 10339 - RNA, 17 nt, Artificial Sequence
  Synthetic oligonucleotide: FAS-955
aguuggggaggucuuga

SEQ ID NO: 10340 - RNA, 17 nt, Artificial Sequence
  Synthetic oligonucleotide: FAS-1359
uuggggaggucuugaag

SEQ ID NO: 10341 - RNA, 17 nt, Artificial Sequence
  Synthetic oligonucleotide: FAS-1360
ggaggucuugaaggaga

SEQ ID NO: 10342 - RNA, 17 nt, Artificial Sequence
  Synthetic oligonucleotide: FAS-956
gaggucuugaaggagaa

SEQ ID NO: 10343 - RNA, 17 nt, Artificial Sequence
  Synthetic oligonucleotide: FAS-1362
ugaaggagaauggagcu

SEQ ID NO: 10344 - RNA, 17 nt, Artificial Sequence
  Synthetic oligonucleotide: FAS-1363
gaauggagcucagagcg

SEQ ID NO: 10345 - RNA, 17 nt, Artificial Sequence
  Synthetic oligonucleotide: FAS-1364
gagcgcagagguccugc

SEQ ID NO: 10346 - RNA, 17 nt, Artificial Sequence
  Synthetic oligonucleotide: FAS-1365
gagguccugccugggua

SEQ ID NO: 10347 - RNA, 17 nt, Artificial Sequence
  Synthetic oligonucleotide: FAS-960
agguccugccuggguac

SEQ ID NO: 10348 - RNA, 17 nt, Artificial Sequence
  Synthetic oligonucleotide: FAS-1367
ggagccuuggcuaauug

SEQ ID NO: 10349 - RNA, 17 nt, Artificial Sequence
  Synthetic oligonucleotide: FAS-962
gagccuuggcuaauugc

SEQ ID NO: 10350 - RNA, 17 nt, Artificial Sequence
  Synthetic oligonucleotide: FAS-1369
uaauugcuggagucacu

SEQ ID NO: 10351 - RNA, 17 nt, Artificial Sequence
  Synthetic oligonucleotide: FAS-1370
auugcuggagucacuca

SEQ ID NO: 10352 - RNA, 17 nt, Artificial Sequence
  Synthetic oligonucleotide: FAS-1371
cacucagagaaagacuu

SEQ ID NO: 10353 - RNA, 17 nt, Artificial Sequence
  Synthetic oligonucleotide: FAS-963
acucagagaaagacuug

SEQ ID NO: 10354 - RNA, 17 nt, Artificial Sequence
  Synthetic oligonucleotide: FAS-1373
acuugcggggcauuuga

SEQ ID NO: 10355 - RNA, 17 nt, Artificial Sequence
  Synthetic oligonucleotide: FAS-1374
cauguuguggcugcaac

SEQ ID NO: 10356 - RNA, 17 nt, Artificial Sequence
  Synthetic oligonucleotide: FAS-1375
uguuguggcugcaacau

SEQ ID NO: 10357 - RNA, 17 nt, Artificial Sequence
  Synthetic oligonucleotide: FAS-1376
gaggcucacagacguuu

SEQ ID NO: 10358 - RNA, 17 nt, Artificial Sequence
  Synthetic oligonucleotide: FAS-970
aggcucacagacguuuc

SEQ ID NO: 10359 - RNA, 17 nt, Artificial Sequence
  Synthetic oligonucleotide: FAS-1378
ucacagacguuucugga

SEQ ID NO: 10360 - RNA, 17 nt, Artificial Sequence
  Synthetic oligonucleotide: FAS-1379
aauggacaguuaaccau

SEQ ID NO: 10361 - RNA, 17 nt, Artificial Sequence
  Synthetic oligonucleotide: FAS-1380
guacagauguugcgcca

SEQ ID NO: 10362 - RNA, 17 nt, Artificial Sequence
  Synthetic oligonucleotide: FAS-1381
uguugcgccauagggcu

SEQ ID NO: 10363 - RNA, 17 nt, Artificial Sequence
  Synthetic oligonucleotide: FAS-1382
cgccauagggcucugaa

SEQ ID NO: 10364 - RNA, 17 nt, Artificial Sequence
  Synthetic oligonucleotide: FAS-974
gccauagggcucugaaa

SEQ ID NO: 10365 - RNA, 17 nt, Artificial Sequence
  Synthetic oligonucleotide: FAS-975
ccauagggcucugaaaa

SEQ ID NO: 10366 - RNA, 17 nt, Artificial Sequence
  Synthetic oligonucleotide: FAS-1385
auagggcucugaaaagg

SEQ ID NO: 10367 - RNA, 17 nt, Artificial Sequence
  Synthetic oligonucleotide: FAS-1386
cuuaguuuuuauuucuc

SEQ ID NO: 10368 - RNA, 17 nt, Artificial Sequence
  Synthetic oligonucleotide: FAS-1387
uaguuuuuauuucucaa

SEQ ID NO: 10369 - RNA, 17 nt, Artificial Sequence
  Synthetic oligonucleotide: FAS-978
aguuuuuauuucucaag

SEQ ID NO: 10370 - RNA, 20 nt, Artificial Sequence
  Synthetic oligonucleotide: FAS-1389
gcagugacagaugcaaaaca

SEQ ID NO: 10371 - RNA, 20 nt, Artificial Sequence
  Synthetic oligonucleotide: FAS-1390
cagaugcaaaacacagggug

SEQ ID NO: 10372 - RNA, 20 nt, Artificial Sequence
  Synthetic oligonucleotide: FAS-1783
agaugcaaaacacaggguga

SEQ ID NO: 10373 - RNA, 20 nt, Artificial Sequence
  Synthetic oligonucleotide: FAS-1392
acagggugauggaaagcccu

SEQ ID NO: 10374 - RNA, 20 nt, Artificial Sequence
  Synthetic oligonucleotide: FAS-1784
cagggugauggaaagcccuc

SEQ ID NO: 10375 - RNA, 20 nt, Artificial Sequence
  Synthetic oligonucleotide: FAS-1394
gggugauggaaagcccucag

SEQ ID NO: 10376 - RNA, 20 nt, Artificial Sequence
  Synthetic oligonucleotide: FAS-1395
gaggguaaccuaaccuagau

SEQ ID NO: 10377 - RNA, 20 nt, Artificial Sequence
  Synthetic oligonucleotide: FAS-1396
ggguaaccuaaccuagauuu

SEQ ID NO: 10378 - RNA, 20 nt, Artificial Sequence
  Synthetic oligonucleotide: FAS-1397
uugagggcccaaacaggcuc

SEQ ID NO: 10379 - RNA, 20 nt, Artificial Sequence
  Synthetic oligonucleotide: FAS-1398
agggcccaaacaggcuccag

SEQ ID NO: 10380 - RNA, 20 nt, Artificial Sequence
  Synthetic oligonucleotide: FAS-1399
gcuccagaagaaaaugucaa

SEQ ID NO: 10381 - RNA, 20 nt, Artificial Sequence
  Synthetic oligonucleotide: FAS-1400
uccagaagaaaaugucaacu

SEQ ID NO: 10382 - RNA, 20 nt, Artificial Sequence
  Synthetic oligonucleotide: FAS-1401
cagaagaaaaugucaacuga

SEQ ID NO: 10383 - RNA, 20 nt, Artificial Sequence
  Synthetic oligonucleotide: FAS-1790
agaagaaaaugucaacugag

SEQ ID NO: 10384 - RNA, 20 nt, Artificial Sequence
  Synthetic oligonucleotide: FAS-1403
aaugucaacugagaggaagc

SEQ ID NO: 10385 - RNA, 20 nt, Artificial Sequence
  Synthetic oligonucleotide: FAS-1404
gucaacugagaggaagccug

SEQ ID NO: 10386 - RNA, 20 nt, Artificial Sequence
  Synthetic oligonucleotide: FAS-1405
acugagaggaagccugaagg

SEQ ID NO: 10387 - RNA, 20 nt, Artificial Sequence
  Synthetic oligonucleotide: FAS-1406
ggaagccugaaggaugaaca

SEQ ID NO: 10388 - RNA, 20 nt, Artificial Sequence
  Synthetic oligonucleotide: FAS-1407
gaugaacagugggcuaagca

SEQ ID NO: 10389 - RNA, 20 nt, Artificial Sequence
  Synthetic oligonucleotide: FAS-1408
ggguuauuaauguguuauua

SEQ ID NO: 10390 - RNA, 20 nt, Artificial Sequence
  Synthetic oligonucleotide: FAS-1409
auuaauguguuauuaauggg

SEQ ID NO: 10391 - RNA, 20 nt, Artificial Sequence
  Synthetic oligonucleotide: FAS-1410
uauuaauggguugaaucuaa

SEQ ID NO: 10392 - RNA, 20 nt, Artificial Sequence
  Synthetic oligonucleotide: FAS-1798
auuaauggguugaaucuaau

SEQ ID NO: 10393 - RNA, 20 nt, Artificial Sequence
  Synthetic oligonucleotide: FAS-1799
uuaauggguugaaucuaauu

SEQ ID NO: 10394 - RNA, 20 nt, Artificial Sequence
  Synthetic oligonucleotide: FAS-1413
auggguugaaucuaauuggg

SEQ ID NO: 10395 - RNA, 20 nt, Artificial Sequence
  Synthetic oligonucleotide: FAS-1800
uggguugaaucuaauuggga

SEQ ID NO: 10396 - RNA, 20 nt, Artificial Sequence
  Synthetic oligonucleotide: FAS-1801
ggguugaaucuaauugggaa

SEQ ID NO: 10397 - RNA, 20 nt, Artificial Sequence
  Synthetic oligonucleotide: FAS-1416
guugaaucuaauugggaagg

SEQ ID NO: 10398 - RNA, 20 nt, Artificial Sequence
  Synthetic oligonucleotide: FAS-1417
ugaaucuaauugggaaggga

SEQ ID NO: 10399 - RNA, 20 nt, Artificial Sequence
  Synthetic oligonucleotide: FAS-1418
uugggaagggagagagguug

SEQ ID NO: 10400 - RNA, 20 nt, Artificial Sequence
  Synthetic oligonucleotide: FAS-1419
gaagggagagagguugcaga

SEQ ID NO: 10401 - RNA, 20 nt, Artificial Sequence
  Synthetic oligonucleotide: FAS-1420
agagguugcagagugaggug

SEQ ID NO: 10402 - RNA, 20 nt, Artificial Sequence
  Synthetic oligonucleotide: FAS-1421
agagugaggugcagagcuug

SEQ ID NO: 10403 - RNA, 20 nt, Artificial Sequence
  Synthetic oligonucleotide: FAS-1422
gagcuugguggacgaugcca

SEQ ID NO: 10404 - RNA, 20 nt, Artificial Sequence
  Synthetic oligonucleotide: FAS-1806
agcuugguggacgaugccaa

SEQ ID NO: 10405 - RNA, 20 nt, Artificial Sequence
  Synthetic oligonucleotide: FAS-1424
uggacgaugccaaaggaaua

SEQ ID NO: 10406 - RNA, 20 nt, Artificial Sequence
  Synthetic oligonucleotide: FAS-1425
aaaccuuuaguguguccagu

SEQ ID NO: 10407 - RNA, 20 nt, Artificial Sequence
  Synthetic oligonucleotide: FAS-1807
aaccuuuaguguguccaguc

SEQ ID NO: 10408 - RNA, 20 nt, Artificial Sequence
  Synthetic oligonucleotide: FAS-1427
aaauucaugcuaaacuaccu

SEQ ID NO: 10409 - RNA, 20 nt, Artificial Sequence
  Synthetic oligonucleotide: FAS-1428
guuccaaagcaauagugacu

SEQ ID NO: 10410 - RNA, 20 nt, Artificial Sequence
  Synthetic oligonucleotide: FAS-1429
ugacuuugaacaguguucac

SEQ ID NO: 10411 - RNA, 20 nt, Artificial Sequence
  Synthetic oligonucleotide: FAS-1430
ugaacaguguucaccagagc

SEQ ID NO: 10412 - RNA, 20 nt, Artificial Sequence
  Synthetic oligonucleotide: FAS-1431
caguguucaccagagcacga

SEQ ID NO: 10413 - RNA, 20 nt, Artificial Sequence
  Synthetic oligonucleotide: FAS-1432
aauuacaagauuuuuuuuua

SEQ ID NO: 10414 - RNA, 20 nt, Artificial Sequence
  Synthetic oligonucleotide: FAS-1433
uuuuuuuaaagaaaauuggc

SEQ ID NO: 10415 - RNA, 20 nt, Artificial Sequence
  Synthetic oligonucleotide: FAS-1810
uuuuuuaaagaaaauuggcc

SEQ ID NO: 10416 - RNA, 20 nt, Artificial Sequence
  Synthetic oligonucleotide: FAS-1435
agaaaauuggccaggaaaua

SEQ ID NO: 10417 - RNA, 20 nt, Artificial Sequence
  Synthetic oligonucleotide: FAS-1436
uggccaggaaauaaugagua

SEQ ID NO: 10418 - RNA, 20 nt, Artificial Sequence
  Synthetic oligonucleotide: FAS-1437
ccaggaaauaaugaguaacg

SEQ ID NO: 10419 - RNA, 20 nt, Artificial Sequence
  Synthetic oligonucleotide: FAS-1438
aaauaaugaguaacgaagga

SEQ ID NO: 10420 - RNA, 20 nt, Artificial Sequence
  Synthetic oligonucleotide: FAS-1812
aauaaugaguaacgaaggac

SEQ ID NO: 10421 - RNA, 20 nt, Artificial Sequence
  Synthetic oligonucleotide: FAS-979
acgaaggacaggaaguaauu

SEQ ID NO: 10422 - RNA, 17 nt, Artificial Sequence
  Synthetic oligonucleotide: FAS-1441
gugacagaugcaaaaca

SEQ ID NO: 10423 - RNA, 17 nt, Artificial Sequence
  Synthetic oligonucleotide: FAS-1442
augcaaaacacagggug

SEQ ID NO: 10424 - RNA, 17 nt, Artificial Sequence
  Synthetic oligonucleotide: FAS-1817
ugcaaaacacaggguga

SEQ ID NO: 10425 - RNA, 17 nt, Artificial Sequence
  Synthetic oligonucleotide: FAS-1444
gggugauggaaagcccu

SEQ ID NO: 10426 - RNA, 17 nt, Artificial Sequence
  Synthetic oligonucleotide: FAS-1818
ggugauggaaagcccuc

SEQ ID NO: 10427 - RNA, 17 nt, Artificial Sequence
  Synthetic oligonucleotide: FAS-1446
ugauggaaagcccucag

SEQ ID NO: 10428 - RNA, 17 nt, Artificial Sequence
  Synthetic oligonucleotide: FAS-1447
gguaaccuaaccuagau

SEQ ID NO: 10429 - RNA, 17 nt, Artificial Sequence
  Synthetic oligonucleotide: FAS-1448
uaaccuaaccuagauuu

SEQ ID NO: 10430 - RNA, 17 nt, Artificial Sequence
  Synthetic oligonucleotide: FAS-1449
agggcccaaacaggcuc

SEQ ID NO: 10431 - RNA, 17 nt, Artificial Sequence
  Synthetic oligonucleotide: FAS-1450
gcccaaacaggcuccag

SEQ ID NO: 10432 - RNA, 17 nt, Artificial Sequence
  Synthetic oligonucleotide: FAS-1451
ccagaagaaaaugucaa

SEQ ID NO: 10433 - RNA, 17 nt, Artificial Sequence
  Synthetic oligonucleotide: FAS-1452
agaagaaaaugucaacu

SEQ ID NO: 10434 - RNA, 17 nt, Artificial Sequence
  Synthetic oligonucleotide: FAS-1453
aagaaaaugucaacuga

SEQ ID NO: 10435 - RNA, 17 nt, Artificial Sequence
  Synthetic oligonucleotide: FAS-1824
agaaaaugucaacugag

SEQ ID NO: 10436 - RNA, 17 nt, Artificial Sequence
  Synthetic oligonucleotide: FAS-1455
gucaacugagaggaagc

SEQ ID NO: 10437 - RNA, 17 nt, Artificial Sequence
  Synthetic oligonucleotide: FAS-1456
aacugagaggaagccug

SEQ ID NO: 10438 - RNA, 17 nt, Artificial Sequence
  Synthetic oligonucleotide: FAS-1457
gagaggaagccugaagg

SEQ ID NO: 10439 - RNA, 17 nt, Artificial Sequence
  Synthetic oligonucleotide: FAS-1458
agccugaaggaugaaca

SEQ ID NO: 10440 - RNA, 17 nt, Artificial Sequence
  Synthetic oligonucleotide: FAS-1459
gaacagugggcuaagca

SEQ ID NO: 10441 - RNA, 17 nt, Artificial Sequence
  Synthetic oligonucleotide: FAS-1460
uuauuaauguguuauua

SEQ ID NO: 10442 - RNA, 17 nt, Artificial Sequence
  Synthetic oligonucleotide: FAS-1461
aauguguuauuaauggg

SEQ ID NO: 10443 - RNA, 17 nt, Artificial Sequence
  Synthetic oligonucleotide: FAS-1462
uaauggguugaaucuaa

SEQ ID NO: 10444 - RNA, 17 nt, Artificial Sequence
  Synthetic oligonucleotide: FAS-1832
aauggguugaaucuaau

SEQ ID NO: 10445 - RNA, 17 nt, Artificial Sequence
  Synthetic oligonucleotide: FAS-1833
auggguugaaucuaauu

SEQ ID NO: 10446 - RNA, 17 nt, Artificial Sequence
  Synthetic oligonucleotide: FAS-1465
gguugaaucuaauuggg

SEQ ID NO: 10447 - RNA, 17 nt, Artificial Sequence
  Synthetic oligonucleotide: FAS-1834
guugaaucuaauuggga

SEQ ID NO: 10448 - RNA, 17 nt, Artificial Sequence
  Synthetic oligonucleotide: FAS-1835
uugaaucuaauugggaa

SEQ ID NO: 10449 - RNA, 17 nt, Artificial Sequence
  Synthetic oligonucleotide: FAS-1468
gaaucuaauugggaagg

SEQ ID NO: 10450 - RNA, 17 nt, Artificial Sequence
  Synthetic oligonucleotide: FAS-1469
aucuaauugggaaggga

SEQ ID NO: 10451 - RNA, 17 nt, Artificial Sequence
  Synthetic oligonucleotide: FAS-1470
ggaagggagagagguug

SEQ ID NO: 10452 - RNA, 17 nt, Artificial Sequence
  Synthetic oligonucleotide: FAS-1471
gggagagagguugcaga

SEQ ID NO: 10453 - RNA, 17 nt, Artificial Sequence
  Synthetic oligonucleotide: FAS-1472
gguugcagagugaggug

SEQ ID NO: 10454 - RNA, 17 nt, Artificial Sequence
  Synthetic oligonucleotide: FAS-1473
gugaggugcagagcuug

SEQ ID NO: 10455 - RNA, 17 nt, Artificial Sequence
  Synthetic oligonucleotide: FAS-1474
cuugguggacgaugcca

SEQ ID NO: 10456 - RNA, 17 nt, Artificial Sequence
  Synthetic oligonucleotide: FAS-1840
uugguggacgaugccaa

SEQ ID NO: 10457 - RNA, 17 nt, Artificial Sequence
  Synthetic oligonucleotide: FAS-1476
acgaugccaaaggaaua

SEQ ID NO: 10458 - RNA, 17 nt, Artificial Sequence
  Synthetic oligonucleotide: FAS-1477
ccuuuaguguguccagu

SEQ ID NO: 10459 - RNA, 17 nt, Artificial Sequence
  Synthetic oligonucleotide: FAS-1841
cuuuaguguguccaguc

SEQ ID NO: 10460 - RNA, 17 nt, Artificial Sequence
  Synthetic oligonucleotide: FAS-1479
uucaugcuaaacuaccu

SEQ ID NO: 10461 - RNA, 17 nt, Artificial Sequence
  Synthetic oligonucleotide: FAS-1480
ccaaagcaauagugacu

SEQ ID NO: 10462 - RNA, 17 nt, Artificial Sequence
  Synthetic oligonucleotide: FAS-1481
cuuugaacaguguucac

SEQ ID NO: 10463 - RNA, 17 nt, Artificial Sequence
  Synthetic oligonucleotide: FAS-1482
acaguguucaccagagc

SEQ ID NO: 10464 - RNA, 17 nt, Artificial Sequence
  Synthetic oligonucleotide: FAS-1483
uguucaccagagcacga

SEQ ID NO: 10465 - RNA, 17 nt, Artificial Sequence
  Synthetic oligonucleotide: FAS-1484
uacaagauuuuuuuuua

SEQ ID NO: 10466 - RNA, 17 nt, Artificial Sequence
  Synthetic oligonucleotide: FAS-1485
uuuuaaagaaaauuggc

SEQ ID NO: 10467 - RNA, 17 nt, Artificial Sequence
  Synthetic oligonucleotide: FAS-1844
uuuaaagaaaauuggcc

SEQ ID NO: 10468 - RNA, 17 nt, Artificial Sequence
  Synthetic oligonucleotide: FAS-1487
aaauuggccaggaaaua

SEQ ID NO: 10469 - RNA, 17 nt, Artificial Sequence
  Synthetic oligonucleotide: FAS-1488
ccaggaaauaaugagua

SEQ ID NO: 10470 - RNA, 17 nt, Artificial Sequence
  Synthetic oligonucleotide: FAS-1489
ggaaauaaugaguaacg

SEQ ID NO: 10471 - RNA, 17 nt, Artificial Sequence
  Synthetic oligonucleotide: FAS-1490
uaaugaguaacgaagga

SEQ ID NO: 10472 - RNA, 17 nt, Artificial Sequence
  Synthetic oligonucleotide: FAS-1846
aaugaguaacgaaggac

SEQ ID NO: 10473 - RNA, 17 nt, Artificial Sequence
  Synthetic oligonucleotide: FAS-1068
aaggacaggaaguaauu

SEQ ID NO: 10474 - RNA, 20 nt, Artificial Sequence
  Synthetic oligonucleotide: FAS-1493
uguaauucuuucgugcucug

SEQ ID NO: 10475 - RNA, 20 nt, Artificial Sequence
  Synthetic oligonucleotide: FAS-1494
uguucaaagucacuauugcu

SEQ ID NO: 10476 - RNA, 20 nt, Artificial Sequence
  Synthetic oligonucleotide: FAS-1849
guucaaagucacuauugcuu

SEQ ID NO: 10477 - RNA, 20 nt, Artificial Sequence
  Synthetic oligonucleotide: FAS-1496
uagcucuuagguaguuuagc

SEQ ID NO: 10478 - RNA, 20 nt, Artificial Sequence
  Synthetic oligonucleotide: FAS-1497
guaguuuagcaugaauuuua

SEQ ID NO: 10479 - RNA, 20 nt, Artificial Sequence
  Synthetic oligonucleotide: FAS-1498
gaauuuuacagaagguaugu

SEQ ID NO: 10480 - RNA, 20 nt, Artificial Sequence
  Synthetic oligonucleotide: FAS-1499
uuuggauaaugacaucauua

SEQ ID NO: 10481 - RNA, 20 nt, Artificial Sequence
  Synthetic oligonucleotide: FAS-1500
uaaugacaucauuacugaac

SEQ ID NO: 10482 - RNA, 20 nt, Artificial Sequence
  Synthetic oligonucleotide: FAS-1501
caucauuacugaaccugaau

SEQ ID NO: 10483 - RNA, 20 nt, Artificial Sequence
  Synthetic oligonucleotide: FAS-1502
aauuuggaugcaguuccaga

SEQ ID NO: 10484 - RNA, 20 nt, Artificial Sequence
  Synthetic oligonucleotide: FAS-1503
cucucaguugacauuuucuu

SEQ ID NO: 10485 - RNA, 20 nt, Artificial Sequence
  Synthetic oligonucleotide: FAS-1859
ucucaguugacauuuucuuc

SEQ ID NO: 10486 - RNA, 20 nt, Artificial Sequence
  Synthetic oligonucleotide: FAS-1505
cauuuucuucuggagccugu

SEQ ID NO: 10487 - RNA, 20 nt, Artificial Sequence
  Synthetic oligonucleotide: FAS-1506
aucuagguuagguuacccuc

SEQ ID NO: 10488 - RNA, 20 nt, Artificial Sequence
  Synthetic oligonucleotide: FAS-1507
cuagguuagguuacccuccu

SEQ ID NO: 10489 - RNA, 17 nt, Artificial Sequence
  Synthetic oligonucleotide: FAS-1508
aauucuuucgugcucug

SEQ ID NO: 10490 - RNA, 17 nt, Artificial Sequence
  Synthetic oligonucleotide: FAS-1509
ucaaagucacuauugcu

SEQ ID NO: 10491 - RNA, 17 nt, Artificial Sequence
  Synthetic oligonucleotide: FAS-1870
caaagucacuauugcuu

SEQ ID NO: 10492 - RNA, 17 nt, Artificial Sequence
  Synthetic oligonucleotide: FAS-1511
cucuuagguaguuuagc

SEQ ID NO: 10493 - RNA, 17 nt, Artificial Sequence
  Synthetic oligonucleotide: FAS-1512
guuuagcaugaauuuua

SEQ ID NO: 10494 - RNA, 17 nt, Artificial Sequence
  Synthetic oligonucleotide: FAS-1513
uuuuacagaagguaugu

SEQ ID NO: 10495 - RNA, 17 nt, Artificial Sequence
  Synthetic oligonucleotide: FAS-1514
ggauaaugacaucauua

SEQ ID NO: 10496 - RNA, 17 nt, Artificial Sequence
  Synthetic oligonucleotide: FAS-1515
ugacaucauuacugaac

SEQ ID NO: 10497 - RNA, 17 nt, Artificial Sequence
  Synthetic oligonucleotide: FAS-1516
cauuacugaaccugaau

SEQ ID NO: 10498 - RNA, 17 nt, Artificial Sequence
  Synthetic oligonucleotide: FAS-1517
uuggaugcaguuccaga

SEQ ID NO: 10499 - RNA, 17 nt, Artificial Sequence
  Synthetic oligonucleotide: FAS-1518
ucaguugacauuuucuu

SEQ ID NO: 10500 - RNA, 17 nt, Artificial Sequence
  Synthetic oligonucleotide: FAS-1880
caguugacauuuucuuc

SEQ ID NO: 10501 - RNA, 17 nt, Artificial Sequence
  Synthetic oligonucleotide: FAS-1520
uuucuucuggagccugu

SEQ ID NO: 10502 - RNA, 17 nt, Artificial Sequence
  Synthetic oligonucleotide: FAS-1521
uagguuagguuacccuc

SEQ ID NO: 10503 - RNA, 17 nt, Artificial Sequence
  Synthetic oligonucleotide: FAS-1522
gguuagguuacccuccu

SEQ ID NO: 10504 - RNA, 20 nt, Artificial Sequence
  Synthetic oligonucleotide: FAS-1065
gcagcggcgcacgcgggcac

SEQ ID NO: 10505 - RNA, 20 nt, Artificial Sequence
  Synthetic oligonucleotide: FAS-685
cagcggcgcacgcgggcacc

SEQ ID NO: 10506 - RNA, 20 nt, Artificial Sequence
  Synthetic oligonucleotide: FAS-686
agcggcgcacgcgggcaccu

SEQ ID NO: 10507 - RNA, 20 nt, Artificial Sequence
  Synthetic oligonucleotide: FAS-1526
cacgcgggcaccugggagcg

SEQ ID NO: 10508 - RNA, 20 nt, Artificial Sequence
  Synthetic oligonucleotide: FAS-1527
ccugggagcggcgggcugcu

SEQ ID NO: 10509 - RNA, 20 nt, Artificial Sequence
  Synthetic oligonucleotide: FAS-1894
cugggagcggcgggcugcug

SEQ ID NO: 10510 - RNA, 20 nt, Artificial Sequence
  Synthetic oligonucleotide: FAS-1895
ugggagcggcgggcugcugc

SEQ ID NO: 10511 - RNA, 20 nt, Artificial Sequence
  Synthetic oligonucleotide: FAS-1530
gcgggcugcugcgggaggcg

SEQ ID NO: 10512 - RNA, 20 nt, Artificial Sequence
  Synthetic oligonucleotide: FAS-1897
cgggcugcugcgggaggcgu

SEQ ID NO: 10513 - RNA, 20 nt, Artificial Sequence
  Synthetic oligonucleotide: FAS-1532
gaggcguuggagacuggcuc

SEQ ID NO: 10514 - RNA, 20 nt, Artificial Sequence
  Synthetic oligonucleotide: FAS-1899
aggcguuggagacuggcucc

SEQ ID NO: 10515 - RNA, 20 nt, Artificial Sequence
  Synthetic oligonucleotide: FAS-1900
ggcguuggagacuggcuccc

SEQ ID NO: 10516 - RNA, 20 nt, Artificial Sequence
  Synthetic oligonucleotide: FAS-1535
gacuggcucccgggggcugu

SEQ ID NO: 10517 - RNA, 20 nt, Artificial Sequence
  Synthetic oligonucleotide: FAS-1536
guuaggaccuucccucaggc

SEQ ID NO: 10518 - RNA, 20 nt, Artificial Sequence
  Synthetic oligonucleotide: FAS-1537
uucccucaggcccgggugcu

SEQ ID NO: 10519 - RNA, 20 nt, Artificial Sequence
  Synthetic oligonucleotide: FAS-1538
aggcccgggugcucagaacg

SEQ ID NO: 10520 - RNA, 20 nt, Artificial Sequence
  Synthetic oligonucleotide: FAS-1907
ggcccgggugcucagaacgc

SEQ ID NO: 10521 - RNA, 20 nt, Artificial Sequence
  Synthetic oligonucleotide: FAS-1540
cccgggugcucagaacgcug

SEQ ID NO: 10522 - RNA, 20 nt, Artificial Sequence
  Synthetic oligonucleotide: FAS-1541
cgcuggaggacuugcuuuuc

SEQ ID NO: 10523 - RNA, 20 nt, Artificial Sequence
  Synthetic oligonucleotide: FAS-1542
ugcuuuucuugggccuugau

SEQ ID NO: 10524 - RNA, 20 nt, Artificial Sequence
  Synthetic oligonucleotide: FAS-1543
gaugcgaagugcugaccccg

SEQ ID NO: 10525 - RNA, 20 nt, Artificial Sequence
  Synthetic oligonucleotide: FAS-1544
gugcugaccccgcugggcag

SEQ ID NO: 10526 - RNA, 20 nt, Artificial Sequence
  Synthetic oligonucleotide: FAS-1914
ugcugaccccgcugggcagg

SEQ ID NO: 10527 - RNA, 20 nt, Artificial Sequence
  Synthetic oligonucleotide: FAS-1546
cggggcagcuccggcgcucc

SEQ ID NO: 10528 - RNA, 20 nt, Artificial Sequence
  Synthetic oligonucleotide: FAS-1918
ggggcagcuccggcgcuccu

SEQ ID NO: 10529 - RNA, 20 nt, Artificial Sequence
  Synthetic oligonucleotide: FAS-1548
ggagaccacugcgcuccacg

SEQ ID NO: 10530 - RNA, 20 nt, Artificial Sequence
  Synthetic oligonucleotide: FAS-1549
ccacugcgcuccacguugag

SEQ ID NO: 10531 - RNA, 20 nt, Artificial Sequence
  Synthetic oligonucleotide: FAS-1550
cgcuccacguugaggugggc

SEQ ID NO: 10532 - RNA, 20 nt, Artificial Sequence
  Synthetic oligonucleotide: FAS-1922
gcuccacguugaggugggcg

SEQ ID NO: 10533 - RNA, 20 nt, Artificial Sequence
  Synthetic oligonucleotide: FAS-1552
cguugaggugggcguggggu

SEQ ID NO: 10534 - RNA, 20 nt, Artificial Sequence
  Synthetic oligonucleotide: FAS-1553
aggugggcguggggugcgga

SEQ ID NO: 10535 - RNA, 20 nt, Artificial Sequence
  Synthetic oligonucleotide: FAS-1926
ggugggcguggggugcggac

SEQ ID NO: 10536 - RNA, 20 nt, Artificial Sequence
  Synthetic oligonucleotide: FAS-1555
gcguggggugcggacaggaa

SEQ ID NO: 10537 - RNA, 20 nt, Artificial Sequence
  Synthetic oligonucleotide: FAS-1556
gggugcggacaggaauugaa

SEQ ID NO: 10538 - RNA, 20 nt, Artificial Sequence
  Synthetic oligonucleotide: FAS-1927
ggugcggacaggaauugaag

SEQ ID NO: 10539 - RNA, 20 nt, Artificial Sequence
  Synthetic oligonucleotide: FAS-1558
acaggaauugaagcggaagu

SEQ ID NO: 10540 - RNA, 20 nt, Artificial Sequence
  Synthetic oligonucleotide: FAS-1928
caggaauugaagcggaaguc

SEQ ID NO: 10541 - RNA, 20 nt, Artificial Sequence
  Synthetic oligonucleotide: FAS-1929
aggaauugaagcggaagucu

SEQ ID NO: 10542 - RNA, 20 nt, Artificial Sequence
  Synthetic oligonucleotide: FAS-1561
agcggaagucugggaagcuu

SEQ ID NO: 10543 - RNA, 20 nt, Artificial Sequence
  Synthetic oligonucleotide: FAS-1562
ucugggaagcuuuagggucg

SEQ ID NO: 10544 - RNA, 20 nt, Artificial Sequence
  Synthetic oligonucleotide: FAS-1932
cugggaagcuuuagggucgc

SEQ ID NO: 10545 - RNA, 20 nt, Artificial Sequence
  Synthetic oligonucleotide: FAS-1564
gggaagcuuuagggucgcug

SEQ ID NO: 10546 - RNA, 20 nt, Artificial Sequence
  Synthetic oligonucleotide: FAS-1933
ggaagcuuuagggucgcugg

SEQ ID NO: 10547 - RNA, 20 nt, Artificial Sequence
  Synthetic oligonucleotide: FAS-1934
gaagcuuuagggucgcugga

SEQ ID NO: 10548 - RNA, 20 nt, Artificial Sequence
  Synthetic oligonucleotide: FAS-1935
aagcuuuagggucgcuggag

SEQ ID NO: 10549 - RNA, 20 nt, Artificial Sequence
  Synthetic oligonucleotide: FAS-1568
ucgcuggagggggaccccgg

SEQ ID NO: 10550 - RNA, 20 nt, Artificial Sequence
  Synthetic oligonucleotide: FAS-1938
cgcuggagggggaccccggu

SEQ ID NO: 10551 - RNA, 20 nt, Artificial Sequence
  Synthetic oligonucleotide: FAS-1570
cuggagggggaccccgguug

SEQ ID NO: 10552 - RNA, 20 nt, Artificial Sequence
  Synthetic oligonucleotide: FAS-1571
ggagggggaccccgguugga

SEQ ID NO: 10553 - RNA, 20 nt, Artificial Sequence
  Synthetic oligonucleotide: FAS-1572
agggggaccccgguuggaga

SEQ ID NO: 10554 - RNA, 20 nt, Artificial Sequence
  Synthetic oligonucleotide: FAS-1939
gggggaccccgguuggagag

SEQ ID NO: 10555 - RNA, 20 nt, Artificial Sequence
  Synthetic oligonucleotide: FAS-1574
gaccccgguuggagagagga

SEQ ID NO: 10556 - RNA, 20 nt, Artificial Sequence
  Synthetic oligonucleotide: FAS-1940
accccgguuggagagaggag

SEQ ID NO: 10557 - RNA, 20 nt, Artificial Sequence
  Synthetic oligonucleotide: FAS-1576
uggagagaggagcggaacuc

SEQ ID NO: 10558 - RNA, 20 nt, Artificial Sequence
  Synthetic oligonucleotide: FAS-1577
agccaaagguccgcuccggc

SEQ ID NO: 10559 - RNA, 20 nt, Artificial Sequence
  Synthetic oligonucleotide: FAS-1578
aaagguccgcuccggcgcgg

SEQ ID NO: 10560 - RNA, 20 nt, Artificial Sequence
  Synthetic oligonucleotide: FAS-1579
guccgcuccggcgcgggugg

SEQ ID NO: 10561 - RNA, 20 nt, Artificial Sequence
  Synthetic oligonucleotide: FAS-1580
gggugagugcgcgccgcccc

SEQ ID NO: 10562 - RNA, 20 nt, Artificial Sequence
  Synthetic oligonucleotide: FAS-1948
ggugagugcgcgccgccccg

SEQ ID NO: 10563 - RNA, 20 nt, Artificial Sequence
  Synthetic oligonucleotide: FAS-1949
gugagugcgcgccgccccgc

SEQ ID NO: 10564 - RNA, 20 nt, Artificial Sequence
  Synthetic oligonucleotide: FAS-1583
gugcgcgccgccccgcgggg

SEQ ID NO: 10565 - RNA, 20 nt, Artificial Sequence
  Synthetic oligonucleotide: FAS-1952
ugcgcgccgccccgcggggg

SEQ ID NO: 10566 - RNA, 20 nt, Artificial Sequence
  Synthetic oligonucleotide: FAS-1953
gcgcgccgccccgcgggggc

SEQ ID NO: 10567 - RNA, 20 nt, Artificial Sequence
  Synthetic oligonucleotide: FAS-1954
cgcgccgccccgcgggggcg

SEQ ID NO: 10568 - RNA, 20 nt, Artificial Sequence
  Synthetic oligonucleotide: FAS-1587
cgccgccccgcgggggcggg

SEQ ID NO: 10569 - RNA, 20 nt, Artificial Sequence
  Synthetic oligonucleotide: FAS-1588
ccgccccgcgggggcgggga

SEQ ID NO: 10570 - RNA, 20 nt, Artificial Sequence
  Synthetic oligonucleotide: FAS-1589
gggagagagccugcagccuu

SEQ ID NO: 10571 - RNA, 20 nt, Artificial Sequence
  Synthetic oligonucleotide: FAS-1590
uuucuggcaguucucagacg

SEQ ID NO: 10572 - RNA, 20 nt, Artificial Sequence
  Synthetic oligonucleotide: FAS-1956
uucuggcaguucucagacgu

SEQ ID NO: 10573 - RNA, 20 nt, Artificial Sequence
  Synthetic oligonucleotide: FAS-1592
acguaggaaauaagucagca

SEQ ID NO: 10574 - RNA, 20 nt, Artificial Sequence
  Synthetic oligonucleotide: FAS-1593
gcaccgaagcagugguuaag

SEQ ID NO: 10575 - RNA, 20 nt, Artificial Sequence
  Synthetic oligonucleotide: FAS-1958
caccgaagcagugguuaagc

SEQ ID NO: 10576 - RNA, 20 nt, Artificial Sequence
  Synthetic oligonucleotide: FAS-1595
ccgaagcagugguuaagccg

SEQ ID NO: 10577 - RNA, 20 nt, Artificial Sequence
  Synthetic oligonucleotide: FAS-1596
cagugguuaagccggagggc

SEQ ID NO: 10578 - RNA, 20 nt, Artificial Sequence
  Synthetic oligonucleotide: FAS-1961
agugguuaagccggagggcu

SEQ ID NO: 10579 - RNA, 20 nt, Artificial Sequence
  Synthetic oligonucleotide: FAS-1598
gguuaagccggagggcucgg

SEQ ID NO: 10580 - RNA, 20 nt, Artificial Sequence
  Synthetic oligonucleotide: FAS-1599
agaacggcaccuuuucuuuc

SEQ ID NO: 10581 - RNA, 20 nt, Artificial Sequence
  Synthetic oligonucleotide: FAS-1600
uucuuucucgaaaaaguuau

SEQ ID NO: 10582 - RNA, 20 nt, Artificial Sequence
  Synthetic oligonucleotide: FAS-1963
ucuuucucgaaaaaguuaua

SEQ ID NO: 10583 - RNA, 20 nt, Artificial Sequence
  Synthetic oligonucleotide: FAS-1964
cuuucucgaaaaaguuauau

SEQ ID NO: 10584 - RNA, 20 nt, Artificial Sequence
  Synthetic oligonucleotide: FAS-1965
uuucucgaaaaaguuauaug

SEQ ID NO: 10585 - RNA, 20 nt, Artificial Sequence
  Synthetic oligonucleotide: FAS-1966
uucucgaaaaaguuauaugg

SEQ ID NO: 10586 - RNA, 20 nt, Artificial Sequence
  Synthetic oligonucleotide: FAS-1967
ucucgaaaaaguuauauggg

SEQ ID NO: 10587 - RNA, 20 nt, Artificial Sequence
  Synthetic oligonucleotide: FAS-1968
cucgaaaaaguuauaugggg

SEQ ID NO: 10588 - RNA, 20 nt, Artificial Sequence
  Synthetic oligonucleotide: FAS-1969
ucgaaaaaguuauauggggg

SEQ ID NO: 10589 - RNA, 17 nt, Artificial Sequence
  Synthetic oligonucleotide: FAS-1154
gcggcgcacgcgggcac

SEQ ID NO: 10590 - RNA, 17 nt, Artificial Sequence
  Synthetic oligonucleotide: FAS-876
cggcgcacgcgggcacc

SEQ ID NO: 10591 - RNA, 17 nt, Artificial Sequence
  Synthetic oligonucleotide: FAS-877
ggcgcacgcgggcaccu

SEQ ID NO: 10592 - RNA, 17 nt, Artificial Sequence
  Synthetic oligonucleotide: FAS-1611
gcgggcaccugggagcg

SEQ ID NO: 10593 - RNA, 17 nt, Artificial Sequence
  Synthetic oligonucleotide: FAS-1612
gggagcggcgggcugcu

SEQ ID NO: 10594 - RNA, 17 nt, Artificial Sequence
  Synthetic oligonucleotide: FAS-1975
ggagcggcgggcugcug

SEQ ID NO: 10595 - RNA, 17 nt, Artificial Sequence
  Synthetic oligonucleotide: FAS-1976
gagcggcgggcugcugc

SEQ ID NO: 10596 - RNA, 17 nt, Artificial Sequence
  Synthetic oligonucleotide: FAS-1615
ggcugcugcgggaggcg

SEQ ID NO: 10597 - RNA, 17 nt, Artificial Sequence
  Synthetic oligonucleotide: FAS-1978
gcugcugcgggaggcgu

SEQ ID NO: 10598 - RNA, 17 nt, Artificial Sequence
  Synthetic oligonucleotide: FAS-1617
gcguuggagacuggcuc

SEQ ID NO: 10599 - RNA, 17 nt, Artificial Sequence
  Synthetic oligonucleotide: FAS-1980
cguuggagacuggcucc

SEQ ID NO: 10600 - RNA, 17 nt, Artificial Sequence
  Synthetic oligonucleotide: FAS-1981
guuggagacuggcuccc

SEQ ID NO: 10601 - RNA, 17 nt, Artificial Sequence
  Synthetic oligonucleotide: FAS-1620
uggcucccgggggcugu

SEQ ID NO: 10602 - RNA, 17 nt, Artificial Sequence
  Synthetic oligonucleotide: FAS-1621
aggaccuucccucaggc

SEQ ID NO: 10603 - RNA, 17 nt, Artificial Sequence
  Synthetic oligonucleotide: FAS-1622
ccucaggcccgggugcu

SEQ ID NO: 10604 - RNA, 17 nt, Artificial Sequence
  Synthetic oligonucleotide: FAS-1623
cccgggugcucagaacg

SEQ ID NO: 10605 - RNA, 17 nt, Artificial Sequence
  Synthetic oligonucleotide: FAS-1988
ccgggugcucagaacgc

SEQ ID NO: 10606 - RNA, 17 nt, Artificial Sequence
  Synthetic oligonucleotide: FAS-1625
gggugcucagaacgcug

SEQ ID NO: 10607 - RNA, 17 nt, Artificial Sequence
  Synthetic oligonucleotide: FAS-1626
uggaggacuugcuuuuc

SEQ ID NO: 10608 - RNA, 17 nt, Artificial Sequence
  Synthetic oligonucleotide: FAS-1627
uuuucuugggccuugau

SEQ ID NO: 10609 - RNA, 17 nt, Artificial Sequence
  Synthetic oligonucleotide: FAS-1628
gcgaagugcugaccccg

SEQ ID NO: 10610 - RNA, 17 nt, Artificial Sequence
  Synthetic oligonucleotide: FAS-1629
cugaccccgcugggcag

SEQ ID NO: 10611 - RNA, 17 nt, Artificial Sequence
  Synthetic oligonucleotide: FAS-1995
ugaccccgcugggcagg

SEQ ID NO: 10612 - RNA, 17 nt, Artificial Sequence
  Synthetic oligonucleotide: FAS-1631
ggcagcuccggcgcucc

SEQ ID NO: 10613 - RNA, 17 nt, Artificial Sequence
  Synthetic oligonucleotide: FAS-1999
gcagcuccggcgcuccu

SEQ ID NO: 10614 - RNA, 17 nt, Artificial Sequence
  Synthetic oligonucleotide: FAS-1633
gaccacugcgcuccacg

SEQ ID NO: 10615 - RNA, 17 nt, Artificial Sequence
  Synthetic oligonucleotide: FAS-1634
cugcgcuccacguugag

SEQ ID NO: 10616 - RNA, 17 nt, Artificial Sequence
  Synthetic oligonucleotide: FAS-1635
uccacguugaggugggc

SEQ ID NO: 10617 - RNA, 17 nt, Artificial Sequence
  Synthetic oligonucleotide: FAS-2003
ccacguugaggugggcg

SEQ ID NO: 10618 - RNA, 17 nt, Artificial Sequence
  Synthetic oligonucleotide: FAS-1637
ugaggugggcguggggu

SEQ ID NO: 10619 - RNA, 17 nt, Artificial Sequence
  Synthetic oligonucleotide: FAS-1638
ugggcguggggugcgga

SEQ ID NO: 10620 - RNA, 17 nt, Artificial Sequence
  Synthetic oligonucleotide: FAS-2007
gggcguggggugcggac

SEQ ID NO: 10621 - RNA, 17 nt, Artificial Sequence
  Synthetic oligonucleotide: FAS-1640
uggggugcggacaggaa

SEQ ID NO: 10622 - RNA, 17 nt, Artificial Sequence
  Synthetic oligonucleotide: FAS-1641
ugcggacaggaauugaa

SEQ ID NO: 10623 - RNA, 17 nt, Artificial Sequence
  Synthetic oligonucleotide: FAS-2008
gcggacaggaauugaag

SEQ ID NO: 10624 - RNA, 17 nt, Artificial Sequence
  Synthetic oligonucleotide: FAS-1643
ggaauugaagcggaagu

SEQ ID NO: 10625 - RNA, 17 nt, Artificial Sequence
  Synthetic oligonucleotide: FAS-2009
gaauugaagcggaaguc

SEQ ID NO: 10626 - RNA, 17 nt, Artificial Sequence
  Synthetic oligonucleotide: FAS-2010
aauugaagcggaagucu

SEQ ID NO: 10627 - RNA, 17 nt, Artificial Sequence
  Synthetic oligonucleotide: FAS-1646
ggaagucugggaagcuu

SEQ ID NO: 10628 - RNA, 17 nt, Artificial Sequence
  Synthetic oligonucleotide: FAS-1647
gggaagcuuuagggucg

SEQ ID NO: 10629 - RNA, 17 nt, Artificial Sequence
  Synthetic oligonucleotide: FAS-2013
ggaagcuuuagggucgc

SEQ ID NO: 10630 - RNA, 17 nt, Artificial Sequence
  Synthetic oligonucleotide: FAS-1649
aagcuuuagggucgcug

SEQ ID NO: 10631 - RNA, 17 nt, Artificial Sequence
  Synthetic oligonucleotide: FAS-2014
agcuuuagggucgcugg

SEQ ID NO: 10632 - RNA, 17 nt, Artificial Sequence
  Synthetic oligonucleotide: FAS-2015
gcuuuagggucgcugga

SEQ ID NO: 10633 - RNA, 17 nt, Artificial Sequence
  Synthetic oligonucleotide: FAS-2016
cuuuagggucgcuggag

SEQ ID NO: 10634 - RNA, 17 nt, Artificial Sequence
  Synthetic oligonucleotide: FAS-1653
cuggagggggaccccgg

SEQ ID NO: 10635 - RNA, 17 nt, Artificial Sequence
  Synthetic oligonucleotide: FAS-2019
uggagggggaccccggu

SEQ ID NO: 10636 - RNA, 17 nt, Artificial Sequence
  Synthetic oligonucleotide: FAS-1655
gagggggaccccgguug

SEQ ID NO: 10637 - RNA, 17 nt, Artificial Sequence
  Synthetic oligonucleotide: FAS-1656
gggggaccccgguugga

SEQ ID NO: 10638 - RNA, 17 nt, Artificial Sequence
  Synthetic oligonucleotide: FAS-1657
gggaccccgguuggaga

SEQ ID NO: 10639 - RNA, 17 nt, Artificial Sequence
  Synthetic oligonucleotide: FAS-2020
ggaccccgguuggagag

SEQ ID NO: 10640 - RNA, 17 nt, Artificial Sequence
  Synthetic oligonucleotide: FAS-1659
cccgguuggagagagga

SEQ ID NO: 10641 - RNA, 17 nt, Artificial Sequence
  Synthetic oligonucleotide: FAS-2021
ccgguuggagagaggag

SEQ ID NO: 10642 - RNA, 17 nt, Artificial Sequence
  Synthetic oligonucleotide: FAS-1661
agagaggagcggaacuc

SEQ ID NO: 10643 - RNA, 17 nt, Artificial Sequence
  Synthetic oligonucleotide: FAS-1662
caaagguccgcuccggc

SEQ ID NO: 10644 - RNA, 17 nt, Artificial Sequence
  Synthetic oligonucleotide: FAS-1663
gguccgcuccggcgcgg

SEQ ID NO: 10645 - RNA, 17 nt, Artificial Sequence
  Synthetic oligonucleotide: FAS-1664
cgcuccggcgcgggugg

SEQ ID NO: 10646 - RNA, 17 nt, Artificial Sequence
  Synthetic oligonucleotide: FAS-1665
ugagugcgcgccgcccc

SEQ ID NO: 10647 - RNA, 17 nt, Artificial Sequence
  Synthetic oligonucleotide: FAS-2029
gagugcgcgccgccccg

SEQ ID NO: 10648 - RNA, 17 nt, Artificial Sequence
  Synthetic oligonucleotide: FAS-2030
agugcgcgccgccccgc

SEQ ID NO: 10649 - RNA, 17 nt, Artificial Sequence
  Synthetic oligonucleotide: FAS-1668
cgcgccgccccgcgggg

SEQ ID NO: 10650 - RNA, 17 nt, Artificial Sequence
  Synthetic oligonucleotide: FAS-2033
gcgccgccccgcggggg

SEQ ID NO: 10651 - RNA, 17 nt, Artificial Sequence
  Synthetic oligonucleotide: FAS-2034
cgccgccccgcgggggc

SEQ ID NO: 10652 - RNA, 17 nt, Artificial Sequence
  Synthetic oligonucleotide: FAS-2035
gccgccccgcgggggcg

SEQ ID NO: 10653 - RNA, 17 nt, Artificial Sequence
  Synthetic oligonucleotide: FAS-1672
cgccccgcgggggcggg

SEQ ID NO: 10654 - RNA, 17 nt, Artificial Sequence
  Synthetic oligonucleotide: FAS-1673
ccccgcgggggcgggga

SEQ ID NO: 10655 - RNA, 17 nt, Artificial Sequence
  Synthetic oligonucleotide: FAS-1674
agagagccugcagccuu

SEQ ID NO: 10656 - RNA, 17 nt, Artificial Sequence
  Synthetic oligonucleotide: FAS-1675
cuggcaguucucagacg

SEQ ID NO: 10657 - RNA, 17 nt, Artificial Sequence
  Synthetic oligonucleotide: FAS-2037
uggcaguucucagacgu

SEQ ID NO: 10658 - RNA, 17 nt, Artificial Sequence
  Synthetic oligonucleotide: FAS-1677
uaggaaauaagucagca

SEQ ID NO: 10659 - RNA, 17 nt, Artificial Sequence
  Synthetic oligonucleotide: FAS-1678
ccgaagcagugguuaag

SEQ ID NO: 10660 - RNA, 17 nt, Artificial Sequence
  Synthetic oligonucleotide: FAS-2039
cgaagcagugguuaagc

SEQ ID NO: 10661 - RNA, 17 nt, Artificial Sequence
  Synthetic oligonucleotide: FAS-1680
aagcagugguuaagccg

SEQ ID NO: 10662 - RNA, 17 nt, Artificial Sequence
  Synthetic oligonucleotide: FAS-1681
ugguuaagccggagggc

SEQ ID NO: 10663 - RNA, 17 nt, Artificial Sequence
  Synthetic oligonucleotide: FAS-2042
gguuaagccggagggcu

SEQ ID NO: 10664 - RNA, 17 nt, Artificial Sequence
  Synthetic oligonucleotide: FAS-1683
uaagccggagggcucgg

SEQ ID NO: 10665 - RNA, 17 nt, Artificial Sequence
  Synthetic oligonucleotide: FAS-1684
acggcaccuuuucuuuc

SEQ ID NO: 10666 - RNA, 17 nt, Artificial Sequence
  Synthetic oligonucleotide: FAS-1685
uuucucgaaaaaguuau

SEQ ID NO: 10667 - RNA, 17 nt, Artificial Sequence
  Synthetic oligonucleotide: FAS-2044
uucucgaaaaaguuaua

SEQ ID NO: 10668 - RNA, 17 nt, Artificial Sequence
  Synthetic oligonucleotide: FAS-2045
ucucgaaaaaguuauau

SEQ ID NO: 10669 - RNA, 17 nt, Artificial Sequence
  Synthetic oligonucleotide: FAS-2046
cucgaaaaaguuauaug

SEQ ID NO: 10670 - RNA, 17 nt, Artificial Sequence
  Synthetic oligonucleotide: FAS-2047
ucgaaaaaguuauaugg

SEQ ID NO: 10671 - RNA, 17 nt, Artificial Sequence
  Synthetic oligonucleotide: FAS-2048
cgaaaaaguuauauggg

SEQ ID NO: 10672 - RNA, 17 nt, Artificial Sequence
  Synthetic oligonucleotide: FAS-2049
gaaaaaguuauaugggg

SEQ ID NO: 10673 - RNA, 17 nt, Artificial Sequence
  Synthetic oligonucleotide: FAS-2050
aaaaaguuauauggggg

SEQ ID NO: 10674 - RNA, 20 nt, Artificial Sequence
  Synthetic oligonucleotide: FAS-1693
cccauauaacuuuuucgaga

SEQ ID NO: 10675 - RNA, 20 nt, Artificial Sequence
  Synthetic oligonucleotide: FAS-1694
aaagaaaaggugccguucuu

SEQ ID NO: 10676 - RNA, 20 nt, Artificial Sequence
  Synthetic oligonucleotide: FAS-1695
ugcugacuuauuuccuacgu

SEQ ID NO: 10677 - RNA, 20 nt, Artificial Sequence
  Synthetic oligonucleotide: FAS-1696
cugacuuauuuccuacgucu

SEQ ID NO: 10678 - RNA, 20 nt, Artificial Sequence
  Synthetic oligonucleotide: FAS-1697
uuccuacgucugagaacugc

SEQ ID NO: 10679 - RNA, 20 nt, Artificial Sequence
  Synthetic oligonucleotide: FAS-1698
cgucugagaacugccagaaa

SEQ ID NO: 10680 - RNA, 20 nt, Artificial Sequence
  Synthetic oligonucleotide: FAS-1699
gaaaaugagcaauaucuguu

SEQ ID NO: 10681 - RNA, 20 nt, Artificial Sequence
  Synthetic oligonucleotide: FAS-1700
caggcucucuccccgccccc

SEQ ID NO: 10682 - RNA, 20 nt, Artificial Sequence
  Synthetic oligonucleotide: FAS-2056
aggcucucuccccgcccccg

SEQ ID NO: 10683 - RNA, 20 nt, Artificial Sequence
  Synthetic oligonucleotide: FAS-1702
cgcgcacucacccacccgcg

SEQ ID NO: 10684 - RNA, 20 nt, Artificial Sequence
  Synthetic oligonucleotide: FAS-2060
gcgcacucacccacccgcgc

SEQ ID NO: 10685 - RNA, 20 nt, Artificial Sequence
  Synthetic oligonucleotide: FAS-1704
acucacccacccgcgccgga

SEQ ID NO: 10686 - RNA, 20 nt, Artificial Sequence
  Synthetic oligonucleotide: FAS-1705
ggaccuuuggcuuggcuugu

SEQ ID NO: 10687 - RNA, 20 nt, Artificial Sequence
  Synthetic oligonucleotide: FAS-1706
uuggcuugucagggcuuguc

SEQ ID NO: 10688 - RNA, 20 nt, Artificial Sequence
  Synthetic oligonucleotide: FAS-2066
uggcuugucagggcuugucc

SEQ ID NO: 10689 - RNA, 20 nt, Artificial Sequence
  Synthetic oligonucleotide: FAS-1708
aguuccgcuccucucuccaa

SEQ ID NO: 10690 - RNA, 20 nt, Artificial Sequence
  Synthetic oligonucleotide: FAS-2067
guuccgcuccucucuccaac

SEQ ID NO: 10691 - RNA, 20 nt, Artificial Sequence
  Synthetic oligonucleotide: FAS-1710
caccccacgcccaccucaac

SEQ ID NO: 10692 - RNA, 20 nt, Artificial Sequence
  Synthetic oligonucleotide: FAS-2070
accccacgcccaccucaacg

SEQ ID NO: 10693 - RNA, 20 nt, Artificial Sequence
  Synthetic oligonucleotide: FAS-1712
aacguggagcgcaguggucu

SEQ ID NO: 10694 - RNA, 20 nt, Artificial Sequence
  Synthetic oligonucleotide: FAS-1713
cguggagcgcaguggucucc

SEQ ID NO: 10695 - RNA, 20 nt, Artificial Sequence
  Synthetic oligonucleotide: FAS-2072
guggagcgcaguggucuccg

SEQ ID NO: 10696 - RNA, 20 nt, Artificial Sequence
  Synthetic oligonucleotide: FAS-1715
gcaguggucuccgaggagcg

SEQ ID NO: 10697 - RNA, 20 nt, Artificial Sequence
  Synthetic oligonucleotide: FAS-2073
caguggucuccgaggagcgc

SEQ ID NO: 10698 - RNA, 20 nt, Artificial Sequence
  Synthetic oligonucleotide: FAS-1717
ggagcugccccgccugccca

SEQ ID NO: 10699 - RNA, 20 nt, Artificial Sequence
  Synthetic oligonucleotide: FAS-2074
gagcugccccgccugcccag

SEQ ID NO: 10700 - RNA, 20 nt, Artificial Sequence
  Synthetic oligonucleotide: FAS-1719
agcacuucgcaucaaggccc

SEQ ID NO: 10701 - RNA, 20 nt, Artificial Sequence
  Synthetic oligonucleotide: FAS-1720
aaagcaaguccuccagcguu

SEQ ID NO: 10702 - RNA, 20 nt, Artificial Sequence
  Synthetic oligonucleotide: FAS-1721
uccuccagcguucugagcac

SEQ ID NO: 10703 - RNA, 20 nt, Artificial Sequence
  Synthetic oligonucleotide: FAS-1722
agcguucugagcacccgggc

SEQ ID NO: 10704 - RNA, 20 nt, Artificial Sequence
  Synthetic oligonucleotide: FAS-1723
cguucugagcacccgggccu

SEQ ID NO: 10705 - RNA, 20 nt, Artificial Sequence
  Synthetic oligonucleotide: FAS-2080
guucugagcacccgggccug

SEQ ID NO: 10706 - RNA, 20 nt, Artificial Sequence
  Synthetic oligonucleotide: FAS-2081
uucugagcacccgggccuga

SEQ ID NO: 10707 - RNA, 20 nt, Artificial Sequence
  Synthetic oligonucleotide: FAS-1726
agggaagguccuaacagccc

SEQ ID NO: 10708 - RNA, 20 nt, Artificial Sequence
  Synthetic oligonucleotide: FAS-2083
gggaagguccuaacagcccc

SEQ ID NO: 10709 - RNA, 20 nt, Artificial Sequence
  Synthetic oligonucleotide: FAS-2084
ggaagguccuaacagccccc

SEQ ID NO: 10710 - RNA, 17 nt, Artificial Sequence
  Synthetic oligonucleotide: FAS-1729
auauaacuuuuucgaga

SEQ ID NO: 10711 - RNA, 17 nt, Artificial Sequence
  Synthetic oligonucleotide: FAS-1730
gaaaaggugccguucuu

SEQ ID NO: 10712 - RNA, 17 nt, Artificial Sequence
  Synthetic oligonucleotide: FAS-1731
ugacuuauuuccuacgu

SEQ ID NO: 10713 - RNA, 17 nt, Artificial Sequence
  Synthetic oligonucleotide: FAS-1732
acuuauuuccuacgucu

SEQ ID NO: 10714 - RNA, 17 nt, Artificial Sequence
  Synthetic oligonucleotide: FAS-1733
cuacgucugagaacugc

SEQ ID NO: 10715 - RNA, 17 nt, Artificial Sequence
  Synthetic oligonucleotide: FAS-1734
cugagaacugccagaaa

SEQ ID NO: 10716 - RNA, 17 nt, Artificial Sequence
  Synthetic oligonucleotide: FAS-1735
aaugagcaauaucuguu

SEQ ID NO: 10717 - RNA, 17 nt, Artificial Sequence
  Synthetic oligonucleotide: FAS-1736
gcucucuccccgccccc

SEQ ID NO: 10718 - RNA, 17 nt, Artificial Sequence
  Synthetic oligonucleotide: FAS-2091
cucucuccccgcccccg

SEQ ID NO: 10719 - RNA, 17 nt, Artificial Sequence
  Synthetic oligonucleotide: FAS-1738
gcacucacccacccgcg

SEQ ID NO: 10720 - RNA, 17 nt, Artificial Sequence
  Synthetic oligonucleotide: FAS-2095
cacucacccacccgcgc

SEQ ID NO: 10721 - RNA, 17 nt, Artificial Sequence
  Synthetic oligonucleotide: FAS-1740
cacccacccgcgccgga

SEQ ID NO: 10722 - RNA, 17 nt, Artificial Sequence
  Synthetic oligonucleotide: FAS-1741
ccuuuggcuuggcuugu

SEQ ID NO: 10723 - RNA, 17 nt, Artificial Sequence
  Synthetic oligonucleotide: FAS-1742
gcuugucagggcuuguc

SEQ ID NO: 10724 - RNA, 17 nt, Artificial Sequence
  Synthetic oligonucleotide: FAS-2101
cuugucagggcuugucc

SEQ ID NO: 10725 - RNA, 17 nt, Artificial Sequence
  Synthetic oligonucleotide: FAS-1744
uccgcuccucucuccaa

SEQ ID NO: 10726 - RNA, 17 nt, Artificial Sequence
  Synthetic oligonucleotide: FAS-2102
ccgcuccucucuccaac

SEQ ID NO: 10727 - RNA, 17 nt, Artificial Sequence
  Synthetic oligonucleotide: FAS-1746
cccacgcccaccucaac

SEQ ID NO: 10728 - RNA, 17 nt, Artificial Sequence
  Synthetic oligonucleotide: FAS-2105
ccacgcccaccucaacg

SEQ ID NO: 10729 - RNA, 17 nt, Artificial Sequence
  Synthetic oligonucleotide: FAS-1748
guggagcgcaguggucu

SEQ ID NO: 10730 - RNA, 17 nt, Artificial Sequence
  Synthetic oligonucleotide: FAS-1749
ggagcgcaguggucucc

SEQ ID NO: 10731 - RNA, 17 nt, Artificial Sequence
  Synthetic oligonucleotide: FAS-2107
gagcgcaguggucuccg

SEQ ID NO: 10732 - RNA, 17 nt, Artificial Sequence
  Synthetic oligonucleotide: FAS-1751
guggucuccgaggagcg

SEQ ID NO: 10733 - RNA, 17 nt, Artificial Sequence
  Synthetic oligonucleotide: FAS-2108
uggucuccgaggagcgc

SEQ ID NO: 10734 - RNA, 17 nt, Artificial Sequence
  Synthetic oligonucleotide: FAS-1753
gcugccccgccugccca

SEQ ID NO: 10735 - RNA, 17 nt, Artificial Sequence
  Synthetic oligonucleotide: FAS-2109
cugccccgccugcccag

SEQ ID NO: 10736 - RNA, 17 nt, Artificial Sequence
  Synthetic oligonucleotide: FAS-1755
acuucgcaucaaggccc

SEQ ID NO: 10737 - RNA, 17 nt, Artificial Sequence
  Synthetic oligonucleotide: FAS-1756
gcaaguccuccagcguu

SEQ ID NO: 10738 - RNA, 17 nt, Artificial Sequence
  Synthetic oligonucleotide: FAS-1757
uccagcguucugagcac

SEQ ID NO: 10739 - RNA, 17 nt, Artificial Sequence
  Synthetic oligonucleotide: FAS-1758
guucugagcacccgggc

SEQ ID NO: 10740 - RNA, 17 nt, Artificial Sequence
  Synthetic oligonucleotide: FAS-1759
ucugagcacccgggccu

SEQ ID NO: 10741 - RNA, 17 nt, Artificial Sequence
  Synthetic oligonucleotide: FAS-2115
cugagcacccgggccug

SEQ ID NO: 10742 - RNA, 17 nt, Artificial Sequence
  Synthetic oligonucleotide: FAS-2116
ugagcacccgggccuga

SEQ ID NO: 10743 - RNA, 17 nt, Artificial Sequence
  Synthetic oligonucleotide: FAS-1762
gaagguccuaacagccc

SEQ ID NO: 10744 - RNA, 17 nt, Artificial Sequence
  Synthetic oligonucleotide: FAS-2118
aagguccuaacagcccc

SEQ ID NO: 10745 - RNA, 17 nt, Artificial Sequence
  Synthetic oligonucleotide: FAS-2119
agguccuaacagccccc

SEQ ID NO: 10746 - RNA, 20 nt, Artificial Sequence
  Synthetic oligonucleotide: FAS-1765
uguuuaauauagcuggggcu

SEQ ID NO: 10747 - RNA, 20 nt, Artificial Sequence
  Synthetic oligonucleotide: FAS-1766
uggggaagcucuuucacuuc

SEQ ID NO: 10748 - RNA, 20 nt, Artificial Sequence
  Synthetic oligonucleotide: FAS-1062
ggggcgggcgcgggacgcgu

SEQ ID NO: 10749 - RNA, 17 nt, Artificial Sequence
  Synthetic oligonucleotide: FAS-1768
uuaauauagcuggggcu

SEQ ID NO: 10750 - RNA, 17 nt, Artificial Sequence
  Synthetic oligonucleotide: FAS-1769
ggaagcucuuucacuuc

SEQ ID NO: 10751 - RNA, 17 nt, Artificial Sequence
  Synthetic oligonucleotide: FAS-1151
gcgggcgcgggacgcgu

SEQ ID NO: 10752 - RNA, 20 nt, Artificial Sequence
  Synthetic oligonucleotide: FAS-1771
gcccggguuggggagggcuc

SEQ ID NO: 10753 - RNA, 17 nt, Artificial Sequence
  Synthetic oligonucleotide: FAS-1772
cggguuggggagggcuc

SEQ ID NO: 10754 - RNA, 20 nt, Artificial Sequence
  Synthetic oligonucleotide: FAS-1773
cccucaggaggguaaccuaa

SEQ ID NO: 10755 - RNA, 20 nt, Artificial Sequence
  Synthetic oligonucleotide: FAS-1774
caccagagcacgaaagaauu

SEQ ID NO: 10756 - RNA, 17 nt, Artificial Sequence
  Synthetic oligonucleotide: FAS-1775
ucaggaggguaaccuaa

SEQ ID NO: 10757 - RNA, 17 nt, Artificial Sequence
  Synthetic oligonucleotide: FAS-1776
cagagcacgaaagaauu

SEQ ID NO: 10758 - RNA, 20 nt, Artificial Sequence
  Synthetic oligonucleotide: FAS-1777
gcaaccucucucccuuccca

SEQ ID NO: 10759 - RNA, 17 nt, Artificial Sequence
  Synthetic oligonucleotide: FAS-1778
accucucucccuuccca

SEQ ID NO: 10760 - RNA, 17 nt, Artificial Sequence
  Synthetic oligonucleotide: BID-231
gaacaccagccggucgg

SEQ ID NO: 10761 - RNA, 20 nt, Artificial Sequence
  Synthetic oligonucleotide: BID-199
gaacaccagccggucggagg

SEQ ID NO: 10762 - RNA, 17 nt, Artificial Sequence
  Synthetic oligonucleotide: BID-157
gaaccguuguugaccug

SEQ ID NO: 10763 - RNA, 17 nt, Artificial Sequence
  Synthetic oligonucleotide: BID-31
gaaugugcagcggugcu

SEQ ID NO: 10764 - RNA, 17 nt, Artificial Sequence
  Synthetic oligonucleotide: BID-236
gaccguagcaucccucc

SEQ ID NO: 10765 - RNA, 20 nt, Artificial Sequence
  Synthetic oligonucleotide: BID-7
gauggcucggugggcagcga

SEQ ID NO: 10766 - RNA, 17 nt, Artificial Sequence
  Synthetic oligonucleotide: BID-244
gcaccucgcccaggucg

SEQ ID NO: 10767 - RNA, 20 nt, Artificial Sequence
  Synthetic oligonucleotide: BID-5
gcggauucuguaagugggcu

SEQ ID NO: 10768 - RNA, 20 nt, Artificial Sequence
  Synthetic oligonucleotide: BID-104
gcucaucguagcccucccac

SEQ ID NO: 10769 - RNA, 17 nt, Artificial Sequence
  Synthetic oligonucleotide: BID-36
gcucggugggcagcgag

SEQ ID NO: 10770 - RNA, 20 nt, Artificial Sequence
  Synthetic oligonucleotide: BID-107
ggaaccguuguugaccugag

SEQ ID NO: 10771 - RNA, 17 nt, Artificial Sequence
  Synthetic oligonucleotide: BID-239
ggaccguagcaucccuc

SEQ ID NO: 10772 - RNA, 17 nt, Artificial Sequence
  Synthetic oligonucleotide: BID-245
ggcccggagggaugcua

SEQ ID NO: 10773 - RNA, 17 nt, Artificial Sequence
  Synthetic oligonucleotide: BID-247
gggccugaggaccgcgu

SEQ ID NO: 10774 - RNA, 17 nt, Artificial Sequence
  Synthetic oligonucleotide: BID-32
gggucaugauggcucgg

SEQ ID NO: 10775 - RNA, 17 nt, Artificial Sequence
  Synthetic oligonucleotide: BID-28
ggucaugauggcucggu

SEQ ID NO: 10776 - RNA, 20 nt, Artificial Sequence
  Synthetic oligonucleotide: BID-205
gguccaugcuguccccgacc

SEQ ID NO: 10777 - RNA, 17 nt, Artificial Sequence
  Synthetic oligonucleotide: BID-86
gguucacagugucccag

SEQ ID NO: 10778 - RNA, 20 nt, Artificial Sequence
  Synthetic oligonucleotide: BID-202
guccaugcuguccccgaccu

SEQ ID NO: 10779 - RNA, 20 nt, Artificial Sequence
  Synthetic oligonucleotide: BID-58
gucccaguggcgaccuggaa

SEQ ID NO: 10780 - RNA, 20 nt, Artificial Sequence
  Synthetic oligonucleotide: BID-59
gucccuuuccaggucgccac

SEQ ID NO: 10781 - RNA, 17 nt, Artificial Sequence
  Synthetic oligonucleotide: BID-156
gugcaucacaaaccuac

SEQ ID NO: 10782 - RNA, 17 nt, Artificial Sequence
  Synthetic oligonucleotide: BID-27
gugcggauucuguaagu

SEQ ID NO: 10783 - RNA, 17 nt, Artificial Sequence
  Synthetic oligonucleotide: BID-81
gugucccaguggcgacc

SEQ ID NO: 10784 - RNA, 17 nt, Artificial Sequence
  Synthetic oligonucleotide: BID-143
aaccguuguugaccuga

SEQ ID NO: 10785 - RNA, 17 nt, Artificial Sequence
  Synthetic oligonucleotide: BID-35
aaugugcagcggugcug

SEQ ID NO: 10786 - RNA, 17 nt, Artificial Sequence
  Synthetic oligonucleotide: BID-153
acaacgguuccagccuc

SEQ ID NO: 10787 - RNA, 20 nt, Artificial Sequence
  Synthetic oligonucleotide: BID-15
acagugcggauucuguaagu

SEQ ID NO: 10788 - RNA, 20 nt, Artificial Sequence
  Synthetic oligonucleotide: BID-194
acaucauccggaauauugcc

SEQ ID NO: 10789 - RNA, 17 nt, Artificial Sequence
  Synthetic oligonucleotide: BID-150
accguuguugaccugag

SEQ ID NO: 10790 - RNA, 20 nt, Artificial Sequence
  Synthetic oligonucleotide: BID-4
acgaaugugcagcggugcug

SEQ ID NO: 10791 - RNA, 20 nt, Artificial Sequence
  Synthetic oligonucleotide: BID-207
acucaccuccuccgaccggc

SEQ ID NO: 10792 - RNA, 17 nt, Artificial Sequence
  Synthetic oligonucleotide: BID-158
agcagccacucccgcuu

SEQ ID NO: 10793 - RNA, 20 nt, Artificial Sequence
  Synthetic oligonucleotide: BID-195
aggccguucaccaggcccgg

SEQ ID NO: 10794 - RNA, 20 nt, Artificial Sequence
  Synthetic oligonucleotide: BID-1
auacgaaugugcagcggugc

SEQ ID NO: 10795 - RNA, 20 nt, Artificial Sequence
  Synthetic oligonucleotide: BID-201
aucccuccgggccuggugaa

SEQ ID NO: 10796 - RNA, 17 nt, Artificial Sequence
  Synthetic oligonucleotide: BID-152
aucguagcccucccacu

SEQ ID NO: 10797 - RNA, 20 nt, Artificial Sequence
  Synthetic oligonucleotide: BID-198
auggaccguagcaucccucc

SEQ ID NO: 10798 - RNA, 20 nt, Artificial Sequence
  Synthetic oligonucleotide: BID-2
caacaaauacgaaugugcag

SEQ ID NO: 10799 - RNA, 17 nt, Artificial Sequence
  Synthetic oligonucleotide: BID-154
caacgguuccagccuca

SEQ ID NO: 10800 - RNA, 17 nt, Artificial Sequence
  Synthetic oligonucleotide: BID-243
caccagccggucggagg

SEQ ID NO: 10801 - RNA, 17 nt, Artificial Sequence
  Synthetic oligonucleotide: BID-246
caccuccuccgaccggc

SEQ ID NO: 10802 - RNA, 20 nt, Artificial Sequence
  Synthetic oligonucleotide: BID-200
caggaacaccagccggucgg

SEQ ID NO: 10803 - RNA, 17 nt, Artificial Sequence
  Synthetic oligonucleotide: BID-151
caucguagcccucccac

SEQ ID NO: 10804 - RNA, 17 nt, Artificial Sequence
  Synthetic oligonucleotide: BID-248
caugcuguccccgaccu

SEQ ID NO: 10805 - RNA, 20 nt, Artificial Sequence
  Synthetic oligonucleotide: BID-197
cauggaccguagcaucccuc

SEQ ID NO: 10806 - RNA, 20 nt, Artificial Sequence
  Synthetic oligonucleotide: BID-57
ccacugggacacugugaacc

SEQ ID NO: 10807 - RNA, 17 nt, Artificial Sequence
  Synthetic oligonucleotide: BID-155
ccgcuugggaagaauag

SEQ ID NO: 10808 - RNA, 20 nt, Artificial Sequence
  Synthetic oligonucleotide: BID-209
ccggucggaggaggugagug

SEQ ID NO: 10809 - RNA, 20 nt, Artificial Sequence
  Synthetic oligonucleotide: BID-196
ccguagcaucccuccgggcc

SEQ ID NO: 10810 - RNA, 17 nt, Artificial Sequence
  Synthetic oligonucleotide: BID-242
ccguucaccaggcccgg

SEQ ID NO: 10811 - RNA, 20 nt, Artificial Sequence
  Synthetic oligonucleotide: BID-62
ccugguucacagugucccag

SEQ ID NO: 10812 - RNA, 17 nt, Artificial Sequence
  Synthetic oligonucleotide: BID-80
ccuuuccaggucgccac

SEQ ID NO: 10813 - RNA, 17 nt, Artificial Sequence
  Synthetic oligonucleotide: BID-26
cgaaugugcagcggugc

SEQ ID NO: 10814 - RNA, 20 nt, Artificial Sequence
  Synthetic oligonucleotide: BID-206
cgaggugccuggcaauauuc

SEQ ID NO: 10815 - RNA, 20 nt, Artificial Sequence
  Synthetic oligonucleotide: BID-113
cgcagcagccacucccgcuu

SEQ ID NO: 10816 - RNA, 20 nt, Artificial Sequence
  Synthetic oligonucleotide: BID-17
cggauucuguaagugggcug

SEQ ID NO: 10817 - RNA, 20 nt, Artificial Sequence
  Synthetic oligonucleotide: BID-208
cggucggaggaggugaguga

SEQ ID NO: 10818 - RNA, 17 nt, Artificial Sequence
  Synthetic oligonucleotide: BID-241
cguucaccaggcccgga

SEQ ID NO: 10819 - RNA, 20 nt, Artificial Sequence
  Synthetic oligonucleotide: BID-114
cguuguugaccugaggggaa

SEQ ID NO: 10820 - RNA, 20 nt, Artificial Sequence
  Synthetic oligonucleotide: BID-112
cuauucuucccaagcgggag

SEQ ID NO: 10821 - RNA, 20 nt, Artificial Sequence
  Synthetic oligonucleotide: BID-109
cucaucguagcccucccacu

SEQ ID NO: 10822 - RNA, 20 nt, Artificial Sequence
  Synthetic oligonucleotide: BID-110
cucccgcuugggaagaauag

SEQ ID NO: 10823 - RNA, 17 nt, Artificial Sequence
  Synthetic oligonucleotide: BID-79
cuuuccaggucgccacu

SEQ ID NO: 10824 - RNA, 20 nt, Artificial Sequence
  Synthetic oligonucleotide: BID-14
uacgaaugugcagcggugcu

SEQ ID NO: 10825 - RNA, 20 nt, Artificial Sequence
  Synthetic oligonucleotide: BID-111
uacgaugagcugcagacuga

SEQ ID NO: 10826 - RNA, 17 nt, Artificial Sequence
  Synthetic oligonucleotide: BID-237
uagcaucccuccgggcc

SEQ ID NO: 10827 - RNA, 20 nt, Artificial Sequence
  Synthetic oligonucleotide: BID-210
uauugccaggcaccucgccc

SEQ ID NO: 10828 - RNA, 20 nt, Artificial Sequence
  Synthetic oligonucleotide: BID-106
ucaacaacgguuccagccuc

SEQ ID NO: 10829 - RNA, 17 nt, Artificial Sequence
  Synthetic oligonucleotide: BID-240
ucauccggaauauugcc

SEQ ID NO: 10830 - RNA, 20 nt, Artificial Sequence
  Synthetic oligonucleotide: BID-134
ucaucguagcccucccacug

SEQ ID NO: 10831 - RNA, 17 nt, Artificial Sequence
  Synthetic oligonucleotide: BID-159
uccccucaggucaacaa

SEQ ID NO: 10832 - RNA, 20 nt, Artificial Sequence
  Synthetic oligonucleotide: BID-203
uccgggccuggugaacggcc

SEQ ID NO: 10833 - RNA, 20 nt, Artificial Sequence
  Synthetic oligonucleotide: BID-56
ucggagcugccgcgcugccc

SEQ ID NO: 10834 - RNA, 17 nt, Artificial Sequence
  Synthetic oligonucleotide: BID-148
ucguagcccucccacug

SEQ ID NO: 10835 - RNA, 20 nt, Artificial Sequence
  Synthetic oligonucleotide: BID-204
ugagggccugaggaccgcgu

SEQ ID NO: 10836 - RNA, 20 nt, Artificial Sequence
  Synthetic oligonucleotide: BID-108
ugagugcaucacaaaccuac

SEQ ID NO: 10837 - RNA, 20 nt, Artificial Sequence
  Synthetic oligonucleotide: BID-6
ugcggauucuguaagugggc

SEQ ID NO: 10838 - RNA, 20 nt, Artificial Sequence
  Synthetic oligonucleotide: BID-105
uggaaccguuguugaccuga

SEQ ID NO: 10839 - RNA, 20 nt, Artificial Sequence
  Synthetic oligonucleotide: BID-3
uggggucaugauggcucggu

SEQ ID NO: 10840 - RNA, 17 nt, Artificial Sequence
  Synthetic oligonucleotide: BID-102
gaaagggacacacagag

SEQ ID NO: 10841 - RNA, 17 nt, Artificial Sequence
  Synthetic oligonucleotide: BID-187
gaagaauagaggcaggu

SEQ ID NO: 10842 - RNA, 20 nt, Artificial Sequence
  Synthetic oligonucleotide: BID-149
gaagaauagaggcagguagg

SEQ ID NO: 10843 - RNA, 17 nt, Artificial Sequence
  Synthetic oligonucleotide: BID-190
gaauagaggcagguagg

SEQ ID NO: 10844 - RNA, 17 nt, Artificial Sequence
  Synthetic oligonucleotide: BID-257
gaaucuguguucaggca

SEQ ID NO: 10845 - RNA, 20 nt, Artificial Sequence
  Synthetic oligonucleotide: BID-65
gaccucacaguccauggccu

SEQ ID NO: 10846 - RNA, 17 nt, Artificial Sequence
  Synthetic oligonucleotide: BID-270
gaccugggcgaggugcc

SEQ ID NO: 10847 - RNA, 17 nt, Artificial Sequence
  Synthetic oligonucleotide: BID-186
gacuccccuuuccccuc

SEQ ID NO: 10848 - RNA, 20 nt, Artificial Sequence
  Synthetic oligonucleotide: BID-220
gacuuucagaaucuguguuc

SEQ ID NO: 10849 - RNA, 20 nt, Artificial Sequence
  Synthetic oligonucleotide: BID-138
gagccagcacuggcagcucg

SEQ ID NO: 10850 - RNA, 17 nt, Artificial Sequence
  Synthetic oligonucleotide: BID-89
gagcugccgcgcugccc

SEQ ID NO: 10851 - RNA, 17 nt, Artificial Sequence
  Synthetic oligonucleotide: BID-93
gaggccagauccccugc

SEQ ID NO: 10852 - RNA, 17 nt, Artificial Sequence
  Synthetic oligonucleotide: BID-191
gaggggaaaggggaguc

SEQ ID NO: 10853 - RNA, 17 nt, Artificial Sequence
  Synthetic oligonucleotide: BID-166
gaugagcugcagacuga

SEQ ID NO: 10854 - RNA, 20 nt, Artificial Sequence
  Synthetic oligonucleotide: BID-126
gaugcacucaucccugaggc

SEQ ID NO: 10855 - RNA, 17 nt, Artificial Sequence
  Synthetic oligonucleotide: BID-42
gauucuguaagugggcu

SEQ ID NO: 10856 - RNA, 17 nt, Artificial Sequence
  Synthetic oligonucleotide: BID-168
gcacucaucccugaggc

SEQ ID NO: 10857 - RNA, 17 nt, Artificial Sequence
  Synthetic oligonucleotide: BID-50
gcagcgaggggccgggc

SEQ ID NO: 10858 - RNA, 20 nt, Artificial Sequence
  Synthetic oligonucleotide: BID-228
gcagggccaggccguucacc

SEQ ID NO: 10859 - RNA, 20 nt, Artificial Sequence
  Synthetic oligonucleotide: BID-219
gccaggcaccucgcccaggu

SEQ ID NO: 10860 - RNA, 20 nt, Artificial Sequence
  Synthetic oligonucleotide: BID-229
gccaggccguucaccaggcc

SEQ ID NO: 10861 - RNA, 20 nt, Artificial Sequence
  Synthetic oligonucleotide: BID-128
gccagugcuggcuccccagu

SEQ ID NO: 10862 - RNA, 20 nt, Artificial Sequence
  Synthetic oligonucleotide: BID-72
gccauggacugugaggucag

SEQ ID NO: 10863 - RNA, 20 nt, Artificial Sequence
  Synthetic oligonucleotide: BID-73
gccucugaccucacagucca

SEQ ID NO: 10864 - RNA, 17 nt, Artificial Sequence
  Synthetic oligonucleotide: BID-277
gccuggcccugcagcuc

SEQ ID NO: 10865 - RNA, 20 nt, Artificial Sequence
  Synthetic oligonucleotide: BID-214
gcucaggaacaccagccggu

SEQ ID NO: 10866 - RNA, 17 nt, Artificial Sequence
  Synthetic oligonucleotide: BID-47
gcuggaggagcacagug

SEQ ID NO: 10867 - RNA, 17 nt, Artificial Sequence
  Synthetic oligonucleotide: BID-181
gcuggcuccccaguggg

SEQ ID NO: 10868 - RNA, 20 nt, Artificial Sequence
  Synthetic oligonucleotide: BID-225
gcugguguuccugagcugca

SEQ ID NO: 10869 - RNA, 17 nt, Artificial Sequence
  Synthetic oligonucleotide: BID-161
ggaagccaaacaccagu

SEQ ID NO: 10870 - RNA, 20 nt, Artificial Sequence
  Synthetic oligonucleotide: BID-140
ggaggaagccaaacaccagu

SEQ ID NO: 10871 - RNA, 17 nt, Artificial Sequence
  Synthetic oligonucleotide: BID-38
ggauucuguaagugggc

SEQ ID NO: 10872 - RNA, 20 nt, Artificial Sequence
  Synthetic oligonucleotide: BID-16
ggauucuguaagugggcugg

SEQ ID NO: 10873 - RNA, 17 nt, Artificial Sequence
  Synthetic oligonucleotide: BID-83
ggcacccgcaggggauc

SEQ ID NO: 10874 - RNA, 17 nt, Artificial Sequence
  Synthetic oligonucleotide: BID-263
ggcaccucgcccagguc

SEQ ID NO: 10875 - RNA, 20 nt, Artificial Sequence
  Synthetic oligonucleotide: BID-211
ggccguucaccaggcccgga

SEQ ID NO: 10876 - RNA, 17 nt, Artificial Sequence
  Synthetic oligonucleotide: BID-37
ggcucggugggcagcga

SEQ ID NO: 10877 - RNA, 20 nt, Artificial Sequence
  Synthetic oligonucleotide: BID-235
ggcugguguuccugagcugc

SEQ ID NO: 10878 - RNA, 17 nt, Artificial Sequence
  Synthetic oligonucleotide: BID-99
gggacacacagaguggg

SEQ ID NO: 10879 - RNA, 20 nt, Artificial Sequence
  Synthetic oligonucleotide: BID-129
gggccacgagcugccagugc

SEQ ID NO: 10880 - RNA, 17 nt, Artificial Sequence
  Synthetic oligonucleotide: BID-260
gggccaggccguucacc

SEQ ID NO: 10881 - RNA, 17 nt, Artificial Sequence
  Synthetic oligonucleotide: BID-253
gggccuggugaacggcc

SEQ ID NO: 10882 - RNA, 17 nt, Artificial Sequence
  Synthetic oligonucleotide: BID-192
ggggaaggagguggggc

SEQ ID NO: 10883 - RNA, 17 nt, Artificial Sequence
  Synthetic oligonucleotide: BID-53
ggggccgggccggcugg

SEQ ID NO: 10884 - RNA, 17 nt, Artificial Sequence
  Synthetic oligonucleotide: BID-259
ggugccuggcaauauuc

SEQ ID NO: 10885 - RNA, 17 nt, Artificial Sequence
  Synthetic oligonucleotide: BID-54
ggugggcagcgaggggc

SEQ ID NO: 10886 - RNA, 17 nt, Artificial Sequence
  Synthetic oligonucleotide: BID-262
gguguuccugagcugca

SEQ ID NO: 10887 - RNA, 17 nt, Artificial Sequence
  Synthetic oligonucleotide: BID-51
guaagugggcugggggc

SEQ ID NO: 10888 - RNA, 17 nt, Artificial Sequence
  Synthetic oligonucleotide: BID-258
gucaagaagacaucauc

SEQ ID NO: 10889 - RNA, 20 nt, Artificial Sequence
  Synthetic oligonucleotide: BID-75
gucagaggccagauccccug

SEQ ID NO: 10890 - RNA, 17 nt, Artificial Sequence
  Synthetic oligonucleotide: BID-273
gucggaggaggugagug

SEQ ID NO: 10891 - RNA, 17 nt, Artificial Sequence
  Synthetic oligonucleotide: BID-85
gugaaccaggagugagu

SEQ ID NO: 10892 - RNA, 20 nt, Artificial Sequence
  Synthetic oligonucleotide: BID-213
gugagggccugaggaccgcg

SEQ ID NO: 10893 - RNA, 17 nt, Artificial Sequence
  Synthetic oligonucleotide: BID-167
gugcguccagcucucug

SEQ ID NO: 10894 - RNA, 20 nt, Artificial Sequence
  Synthetic oligonucleotide: BID-147
gugcuggcuccccaguggga

SEQ ID NO: 10895 - RNA, 20 nt, Artificial Sequence
  Synthetic oligonucleotide: BID-11
gugcuggggucaugauggcu

SEQ ID NO: 10896 - RNA, 17 nt, Artificial Sequence
  Synthetic oligonucleotide: BID-52
gugggcagcgaggggcc

SEQ ID NO: 10897 - RNA, 17 nt, Artificial Sequence
  Synthetic oligonucleotide: BID-170
guugaccugaggggaaa

SEQ ID NO: 10898 - RNA, 20 nt, Artificial Sequence
  Synthetic oligonucleotide: BID-135
guuguugaccugaggggaaa

SEQ ID NO: 10899 - RNA, 17 nt, Artificial Sequence
  Synthetic oligonucleotide: BID-98
aaagggacacacagagu

SEQ ID NO: 10900 - RNA, 20 nt, Artificial Sequence
  Synthetic oligonucleotide: BID-74
aaagggacacacagaguggg

SEQ ID NO: 10901 - RNA, 20 nt, Artificial Sequence
  Synthetic oligonucleotide: BID-224
aaagucaagaagacaucauc

SEQ ID NO: 10902 - RNA, 20 nt, Artificial Sequence
  Synthetic oligonucleotide: BID-132
aauagaggcagguaggcggc

SEQ ID NO: 10903 - RNA, 17 nt, Artificial Sequence
  Synthetic oligonucleotide: BID-269
aaucuguguucaggcag

SEQ ID NO: 10904 - RNA, 20 nt, Artificial Sequence
  Synthetic oligonucleotide: BID-223
aaucuguguucaggcagggg

SEQ ID NO: 10905 - RNA, 17 nt, Artificial Sequence
  Synthetic oligonucleotide: BID-160
acaaaccuacugguguu

SEQ ID NO: 10906 - RNA, 20 nt, Artificial Sequence
  Synthetic oligonucleotide: BID-60
acagugucccaguggcgacc

SEQ ID NO: 10907 - RNA, 20 nt, Artificial Sequence
  Synthetic oligonucleotide: BID-232
acggccuggcccugcagcuc

SEQ ID NO: 10908 - RNA, 20 nt, Artificial Sequence
  Synthetic oligonucleotide: BID-68
acugugaaccaggagugagu

SEQ ID NO: 10909 - RNA, 17 nt, Artificial Sequence
  Synthetic oligonucleotide: BID-268
agaaucuguguucaggc

SEQ ID NO: 10910 - RNA, 17 nt, Artificial Sequence
  Synthetic oligonucleotide: BID-162
agagagcuggacgcacu

SEQ ID NO: 10911 - RNA, 17 nt, Artificial Sequence
  Synthetic oligonucleotide: BID-185
agaggcagguaggcggc

SEQ ID NO: 10912 - RNA, 17 nt, Artificial Sequence
  Synthetic oligonucleotide: BID-101
agaggccagauccccug

SEQ ID NO: 10913 - RNA, 17 nt, Artificial Sequence
  Synthetic oligonucleotide: BID-180
agcgggaguggcugcug

SEQ ID NO: 10914 - RNA, 17 nt, Artificial Sequence
  Synthetic oligonucleotide: BID-265
agcucaggaacaccagc

SEQ ID NO: 10915 - RNA, 20 nt, Artificial Sequence
  Synthetic oligonucleotide: BID-136
agcuguugucagaacagcuu

SEQ ID NO: 10916 - RNA, 20 nt, Artificial Sequence
  Synthetic oligonucleotide: BID-238
aggaggugagugagggccug

SEQ ID NO: 10917 - RNA, 17 nt, Artificial Sequence
  Synthetic oligonucleotide: BID-264
aggcaccucgcccaggu

SEQ ID NO: 10918 - RNA, 17 nt, Artificial Sequence
  Synthetic oligonucleotide: BID-256
aggccguucaccaggcc

SEQ ID NO: 10919 - RNA, 17 nt, Artificial Sequence
  Synthetic oligonucleotide: BID-254
agggccugaggaccgcg

SEQ ID NO: 10920 - RNA, 17 nt, Artificial Sequence
  Synthetic oligonucleotide: BID-275
aggugagugagggccug

SEQ ID NO: 10921 - RNA, 20 nt, Artificial Sequence
  Synthetic oligonucleotide: BID-71
aguccauggccugggcagcg

SEQ ID NO: 10922 - RNA, 17 nt, Artificial Sequence
  Synthetic oligonucleotide: BID-34
agugcggauucuguaag

SEQ ID NO: 10923 - RNA, 17 nt, Artificial Sequence
  Synthetic oligonucleotide: BID-188
agugcuggcuccccagu

SEQ ID NO: 10924 - RNA, 20 nt, Artificial Sequence
  Synthetic oligonucleotide: BID-142
agugcuggcuccccaguggg

SEQ ID NO: 10925 - RNA, 20 nt, Artificial Sequence
  Synthetic oligonucleotide: BID-120
aucacaaaccuacugguguu

SEQ ID NO: 10926 - RNA, 17 nt, Artificial Sequence
  Synthetic oligonucleotide: BID-96
auggacugugaggucag

SEQ ID NO: 10927 - RNA, 20 nt, Artificial Sequence
  Synthetic oligonucleotide: BID-18
auggcucggugggcagcgag

SEQ ID NO: 10928 - RNA, 17 nt, Artificial Sequence
  Synthetic oligonucleotide: BID-41
auucuguaagugggcug

SEQ ID NO: 10929 - RNA, 17 nt, Artificial Sequence
  Synthetic oligonucleotide: BID-33
caaauacgaaugugcag

SEQ ID NO: 10930 - RNA, 20 nt, Artificial Sequence
  Synthetic oligonucleotide: BID-115
caacaacgguuccagccuca

SEQ ID NO: 10931 - RNA, 20 nt, Artificial Sequence
  Synthetic oligonucleotide: BID-124
caacagcuuccgcagagagc

SEQ ID NO: 10932 - RNA, 20 nt, Artificial Sequence
  Synthetic oligonucleotide: BID-10
cacagugcggauucuguaag

SEQ ID NO: 10933 - RNA, 17 nt, Artificial Sequence
  Synthetic oligonucleotide: BID-251
cacucaccuccuccgac

SEQ ID NO: 10934 - RNA, 20 nt, Artificial Sequence
  Synthetic oligonucleotide: BID-77
cacucugugugucccuuucc

SEQ ID NO: 10935 - RNA, 17 nt, Artificial Sequence
  Synthetic oligonucleotide: BID-184
cacuggggagccagcac

SEQ ID NO: 10936 - RNA, 17 nt, Artificial Sequence
  Synthetic oligonucleotide: BID-46
cacugugcuccuccagc

SEQ ID NO: 10937 - RNA, 20 nt, Artificial Sequence
  Synthetic oligonucleotide: BID-230
cagaaucuguguucaggcag

SEQ ID NO: 10938 - RNA, 17 nt, Artificial Sequence
  Synthetic oligonucleotide: BID-169
cagagagcuggacgcac

SEQ ID NO: 10939 - RNA, 17 nt, Artificial Sequence
  Synthetic oligonucleotide: BID-189
cagcagccacucccgcu

SEQ ID NO: 10940 - RNA, 20 nt, Artificial Sequence
  Synthetic oligonucleotide: BID-23
cagcgaggggccgggccggc

SEQ ID NO: 10941 - RNA, 20 nt, Artificial Sequence
  Synthetic oligonucleotide: BID-20
cagcggugcuggggucauga

SEQ ID NO: 10942 - RNA, 17 nt, Artificial Sequence
  Synthetic oligonucleotide: BID-84
cagcuccgacucacucc

SEQ ID NO: 10943 - RNA, 17 nt, Artificial Sequence
  Synthetic oligonucleotide: BID-174
cagcuuccgcagagagc

SEQ ID NO: 10944 - RNA, 17 nt, Artificial Sequence
  Synthetic oligonucleotide: BID-250
caggaacaccagccggu

SEQ ID NO: 10945 - RNA, 20 nt, Artificial Sequence
  Synthetic oligonucleotide: BID-218
caggcaccucgcccaggucg

SEQ ID NO: 10946 - RNA, 17 nt, Artificial Sequence
  Synthetic oligonucleotide: BID-182
cagugcuggcuccccag

SEQ ID NO: 10947 - RNA, 17 nt, Artificial Sequence
  Synthetic oligonucleotide: BID-82
caguggcgaccuggaaa

SEQ ID NO: 10948 - RNA, 20 nt, Artificial Sequence
  Synthetic oligonucleotide: BID-133
ccaagcgggaguggcugcug

SEQ ID NO: 10949 - RNA, 17 nt, Artificial Sequence
  Synthetic oligonucleotide: BID-163
ccacgagcugccagugc

SEQ ID NO: 10950 - RNA, 17 nt, Artificial Sequence
  Synthetic oligonucleotide: BID-176
ccagcacuggcagcucg

SEQ ID NO: 10951 - RNA, 20 nt, Artificial Sequence
  Synthetic oligonucleotide: BID-234
ccaggcaccucgcccagguc

SEQ ID NO: 10952 - RNA, 17 nt, Artificial Sequence
  Synthetic oligonucleotide: BID-95
ccaggccauggacugug

SEQ ID NO: 10953 - RNA, 20 nt, Artificial Sequence
  Synthetic oligonucleotide: BID-212
ccaggcccggagggaugcua

SEQ ID NO: 10954 - RNA, 17 nt, Artificial Sequence
  Synthetic oligonucleotide: BID-261
ccaggucggggacagca

SEQ ID NO: 10955 - RNA, 20 nt, Artificial Sequence
  Synthetic oligonucleotide: BID-131
ccagugcguccagcucucug

SEQ ID NO: 10956 - RNA, 17 nt, Artificial Sequence
  Synthetic oligonucleotide: BID-91
ccaguggcgaccuggaa

SEQ ID NO: 10957 - RNA, 17 nt, Artificial Sequence
  Synthetic oligonucleotide: BID-249
ccaugcuguccccgacc

SEQ ID NO: 10958 - RNA, 17 nt, Artificial Sequence
  Synthetic oligonucleotide: BID-94
ccauggccugggcagcg

SEQ ID NO: 10959 - RNA, 20 nt, Artificial Sequence
  Synthetic oligonucleotide: BID-217
cccgaccugggcgaggugcc

SEQ ID NO: 10960 - RNA, 20 nt, Artificial Sequence
  Synthetic oligonucleotide: BID-13
ccgcacugugcuccuccagc

SEQ ID NO: 10961 - RNA, 20 nt, Artificial Sequence
  Synthetic oligonucleotide: BID-117
ccgcagagagcuggacgcac

SEQ ID NO: 10962 - RNA, 20 nt, Artificial Sequence
  Synthetic oligonucleotide: BID-137
ccgcagcagccacucccgcu

SEQ ID NO: 10963 - RNA, 17 nt, Artificial Sequence
  Synthetic oligonucleotide: BID-90
ccgcgcugcccaggcca

SEQ ID NO: 10964 - RNA, 20 nt, Artificial Sequence
  Synthetic oligonucleotide: BID-12
ccggcuggaggagcacagug

SEQ ID NO: 10965 - RNA, 17 nt, Artificial Sequence
  Synthetic oligonucleotide: BID-97
ccucacaguccauggcc

SEQ ID NO: 10966 - RNA, 20 nt, Artificial Sequence
  Synthetic oligonucleotide: BID-222
ccucacucaccuccuccgac

SEQ ID NO: 10967 - RNA, 17 nt, Artificial Sequence
  Synthetic oligonucleotide: BID-252
ccuccgggccuggugaa

SEQ ID NO: 10968 - RNA, 17 nt, Artificial Sequence
  Synthetic oligonucleotide: BID-165
ccucuauucuucccaag

SEQ ID NO: 10969 - RNA, 20 nt, Artificial Sequence
  Synthetic oligonucleotide: BID-146
ccugacuccccuuuccccuc

SEQ ID NO: 10970 - RNA, 20 nt, Artificial Sequence
  Synthetic oligonucleotide: BID-144
ccugaggggaaaggggaguc

SEQ ID NO: 10971 - RNA, 17 nt, Artificial Sequence
  Synthetic oligonucleotide: BID-48
cgaggggccgggccggc

SEQ ID NO: 10972 - RNA, 20 nt, Artificial Sequence
  Synthetic oligonucleotide: BID-25
cgaggggccgggccggcugg

SEQ ID NO: 10973 - RNA, 20 nt, Artificial Sequence
  Synthetic oligonucleotide: BID-116
cgcagagagcuggacgcacu

SEQ ID NO: 10974 - RNA, 20 nt, Artificial Sequence
  Synthetic oligonucleotide: BID-216
cgcccaggucggggacagca

SEQ ID NO: 10975 - RNA, 20 nt, Artificial Sequence
  Synthetic oligonucleotide: BID-119
cgcuugggaagaauagaggc

SEQ ID NO: 10976 - RNA, 20 nt, Artificial Sequence
  Synthetic oligonucleotide: BID-63
cggcagcuccgacucacucc

SEQ ID NO: 10977 - RNA, 17 nt, Artificial Sequence
  Synthetic oligonucleotide: BID-43
cggugcuggggucauga

SEQ ID NO: 10978 - RNA, 17 nt, Artificial Sequence
  Synthetic oligonucleotide: BID-88
cucacaguccauggccu

SEQ ID NO: 10979 - RNA, 20 nt, Artificial Sequence
  Synthetic oligonucleotide: BID-24
cucggugggcagcgaggggc

SEQ ID NO: 10980 - RNA, 17 nt, Artificial Sequence
  Synthetic oligonucleotide: BID-178
cucuauucuucccaagc

SEQ ID NO: 10981 - RNA, 20 nt, Artificial Sequence
  Synthetic oligonucleotide: BID-66
cugccgcgcugcccaggcca

SEQ ID NO: 10982 - RNA, 20 nt, Artificial Sequence
  Synthetic oligonucleotide: BID-141
cugccucuauucuucccaag

SEQ ID NO: 10983 - RNA, 20 nt, Artificial Sequence
  Synthetic oligonucleotide: BID-78
cuggaaagggacacacagag

SEQ ID NO: 10984 - RNA, 20 nt, Artificial Sequence
  Synthetic oligonucleotide: BID-118
cuggaaccguuguugaccug

SEQ ID NO: 10985 - RNA, 17 nt, Artificial Sequence
  Synthetic oligonucleotide: BID-183
cuggcuccccaguggga

SEQ ID NO: 10986 - RNA, 17 nt, Artificial Sequence
  Synthetic oligonucleotide: BID-87
cugggacacugugaacc

SEQ ID NO: 10987 - RNA, 17 nt, Artificial Sequence
  Synthetic oligonucleotide: BID-44
cuggggucaugauggcu

SEQ ID NO: 10988 - RNA, 20 nt, Artificial Sequence
  Synthetic oligonucleotide: BID-8
cuggggucaugauggcucgg

SEQ ID NO: 10989 - RNA, 20 nt, Artificial Sequence
  Synthetic oligonucleotide: BID-30
cuguaagugggcugggggcu

SEQ ID NO: 10990 - RNA, 20 nt, Artificial Sequence
  Synthetic oligonucleotide: BID-21
cugugcuccuccagccggcc

SEQ ID NO: 10991 - RNA, 17 nt, Artificial Sequence
  Synthetic oligonucleotide: BID-274
cuguguucaggcagggg

SEQ ID NO: 10992 - RNA, 20 nt, Artificial Sequence
  Synthetic oligonucleotide: BID-127
cuuuccccucaggucaacaa

SEQ ID NO: 10993 - RNA, 17 nt, Artificial Sequence
  Synthetic oligonucleotide: BID-49
uaagugggcugggggcu

SEQ ID NO: 10994 - RNA, 20 nt, Artificial Sequence
  Synthetic oligonucleotide: BID-227
ucagaaucuguguucaggca

SEQ ID NO: 10995 - RNA, 20 nt, Artificial Sequence
  Synthetic oligonucleotide: BID-69
ucagaggccagauccccugc

SEQ ID NO: 10996 - RNA, 20 nt, Artificial Sequence
  Synthetic oligonucleotide: BID-121
ucccacuggggagccagcac

SEQ ID NO: 10997 - RNA, 20 nt, Artificial Sequence
  Synthetic oligonucleotide: BID-64
ucccaguggcgaccuggaaa

SEQ ID NO: 10998 - RNA, 20 nt, Artificial Sequence
  Synthetic oligonucleotide: BID-61
ucccuuuccaggucgccacu

SEQ ID NO: 10999 - RNA, 17 nt, Artificial Sequence
  Synthetic oligonucleotide: BID-276
uccugagcugcagggcc

SEQ ID NO: 11000 - RNA, 17 nt, Artificial Sequence
  Synthetic oligonucleotide: BID-267
ucggaggaggugaguga

SEQ ID NO: 11001 - RNA, 20 nt, Artificial Sequence
  Synthetic oligonucleotide: BID-19
ucggugggcagcgaggggcc

SEQ ID NO: 11002 - RNA, 17 nt, Artificial Sequence
  Synthetic oligonucleotide: BID-92
ucugaccucacagucca

SEQ ID NO: 11003 - RNA, 20 nt, Artificial Sequence
  Synthetic oligonucleotide: BID-22
ucuguaagugggcugggggc

SEQ ID NO: 11004 - RNA, 17 nt, Artificial Sequence
  Synthetic oligonucleotide: BID-100
ucugugugucccuuucc

SEQ ID NO: 11005 - RNA, 20 nt, Artificial Sequence
  Synthetic oligonucleotide: BID-70
ugaccucacaguccauggcc

SEQ ID NO: 11006 - RNA, 17 nt, Artificial Sequence
  Synthetic oligonucleotide: BID-171
ugaugcacucaucccug

SEQ ID NO: 11007 - RNA, 20 nt, Artificial Sequence
  Synthetic oligonucleotide: BID-9
ugauggcucggugggcagcg

SEQ ID NO: 11008 - RNA, 20 nt, Artificial Sequence
  Synthetic oligonucleotide: BID-221
ugcagcucaggaacaccagc

SEQ ID NO: 11009 - RNA, 17 nt, Artificial Sequence
  Synthetic oligonucleotide: BID-266
ugccaggcaccucgccc

SEQ ID NO: 11010 - RNA, 20 nt, Artificial Sequence
  Synthetic oligonucleotide: BID-139
ugccagugcuggcuccccag

SEQ ID NO: 11011 - RNA, 20 nt, Artificial Sequence
  Synthetic oligonucleotide: BID-67
ugcccaggccauggacugug

SEQ ID NO: 11012 - RNA, 20 nt, Artificial Sequence
  Synthetic oligonucleotide: BID-123
ugccucuauucuucccaagc

SEQ ID NO: 11013 - RNA, 17 nt, Artificial Sequence
  Synthetic oligonucleotide: BID-45
ugcuccuccagccggcc

SEQ ID NO: 11014 - RNA, 20 nt, Artificial Sequence
  Synthetic oligonucleotide: BID-215
ugcuguccccgaccugggcg

SEQ ID NO: 11015 - RNA, 20 nt, Artificial Sequence
  Synthetic oligonucleotide: BID-76
uggaaagggacacacagagu

SEQ ID NO: 11016 - RNA, 17 nt, Artificial Sequence
  Synthetic oligonucleotide: BID-39
uggcucggugggcagcg

SEQ ID NO: 11017 - RNA, 20 nt, Artificial Sequence
  Synthetic oligonucleotide: BID-145
ugggaagaauagaggcaggu

SEQ ID NO: 11018 - RNA, 20 nt, Artificial Sequence
  Synthetic oligonucleotide: BID-29
ugggcagcgaggggccgggc

SEQ ID NO: 11019 - RNA, 17 nt, Artificial Sequence
  Synthetic oligonucleotide: BID-271
ugguguuccugagcugc

SEQ ID NO: 11020 - RNA, 17 nt, Artificial Sequence
  Synthetic oligonucleotide: BID-177
ugucagaacagcuuugg

SEQ ID NO: 11021 - RNA, 17 nt, Artificial Sequence
  Synthetic oligonucleotide: BID-255
uguccccgaccugggcg

SEQ ID NO: 11022 - RNA, 20 nt, Artificial Sequence
  Synthetic oligonucleotide: BID-233
uguuccugagcugcagggcc

SEQ ID NO: 11023 - RNA, 17 nt, Artificial Sequence
  Synthetic oligonucleotide: BID-175
uguugaccugaggggaa

SEQ ID NO: 11024 - RNA, 17 nt, Artificial Sequence
  Synthetic oligonucleotide: BID-173
uguugucagaacagcuu

SEQ ID NO: 11025 - RNA, 20 nt, Artificial Sequence
  Synthetic oligonucleotide: BID-122
uguugucagaacagcuuugg

SEQ ID NO: 11026 - RNA, 20 nt, Artificial Sequence
  Synthetic oligonucleotide: BID-226
uucagaaucuguguucaggc

SEQ ID NO: 11027 - RNA, 17 nt, Artificial Sequence
  Synthetic oligonucleotide: BID-40
uucuguaagugggcugg

SEQ ID NO: 11028 - RNA, 17 nt, Artificial Sequence
  Synthetic oligonucleotide: BID-164
uucuucccaagcgggag

SEQ ID NO: 11029 - RNA, 17 nt, Artificial Sequence
  Synthetic oligonucleotide: BID-172
uugaccugaggggaaag

SEQ ID NO: 11030 - RNA, 17 nt, Artificial Sequence
  Synthetic oligonucleotide: BID-179
uugggaagaauagaggc

SEQ ID NO: 11031 - RNA, 20 nt, Artificial Sequence
  Synthetic oligonucleotide: BID-125
uugugaugcacucaucccug

SEQ ID NO: 11032 - RNA, 20 nt, Artificial Sequence
  Synthetic oligonucleotide: BID-130
uuguugaccugaggggaaag

SEQ ID NO: 11033 - RNA, 17 nt, Artificial Sequence
  Synthetic oligonucleotide: BID-272
uuucagaaucuguguuc

SEQ ID NO: 11034 - RNA, 20 nt, Artificial Sequence
  Synthetic oligonucleotide: BID-278
uucugugugccccucugugc

SEQ ID NO: 11035 - RNA, 20 nt, Artificial Sequence
  Synthetic oligonucleotide: BID-279
ugugccccucugugcaggac

SEQ ID NO: 11036 - RNA, 20 nt, Artificial Sequence
  Synthetic oligonucleotide: BID-280
ccucugugcaggaccggaac

SEQ ID NO: 11037 - RNA, 20 nt, Artificial Sequence
  Synthetic oligonucleotide: BID-281
cucugugcaggaccggaaca

SEQ ID NO: 11038 - RNA, 20 nt, Artificial Sequence
  Synthetic oligonucleotide: BID-282
gcaggaccggaacagggacc

SEQ ID NO: 11039 - RNA, 20 nt, Artificial Sequence
  Synthetic oligonucleotide: BID-283
cagggaccuggccacugccc

SEQ ID NO: 11040 - RNA, 20 nt, Artificial Sequence
  Synthetic oligonucleotide: BID-284
ugcccuggagcagcugcugc

SEQ ID NO: 11041 - RNA, 20 nt, Artificial Sequence
  Synthetic oligonucleotide: BID-285
gcaggccuacccuagagaca

SEQ ID NO: 11042 - RNA, 20 nt, Artificial Sequence
  Synthetic oligonucleotide: BID-286
cuacccuagagacauggaga

SEQ ID NO: 11043 - RNA, 20 nt, Artificial Sequence
  Synthetic oligonucleotide: BID-287
ggagaaggagaagaccaugc

SEQ ID NO: 11044 - RNA, 20 nt, Artificial Sequence
  Synthetic oligonucleotide: BID-288
ggagaagaccaugcuggugc

SEQ ID NO: 11045 - RNA, 20 nt, Artificial Sequence
  Synthetic oligonucleotide: BID-289
gcuggugcuggcccugcugc

SEQ ID NO: 11046 - RNA, 20 nt, Artificial Sequence
  Synthetic oligonucleotide: BID-290
ggcccugcugcuggccaaga

SEQ ID NO: 11047 - RNA, 20 nt, Artificial Sequence
  Synthetic oligonucleotide: BID-291
ccugcugcuggccaagaagg

SEQ ID NO: 11048 - RNA, 20 nt, Artificial Sequence
  Synthetic oligonucleotide: BID-292
agaaccuacgcaccuacgug

SEQ ID NO: 11049 - RNA, 20 nt, Artificial Sequence
  Synthetic oligonucleotide: BID-293
cagaaauguaagaacccuug

SEQ ID NO: 11050 - RNA, 17 nt, Artificial Sequence
  Synthetic oligonucleotide: BID-294
ugugugccccucugugc

SEQ ID NO: 11051 - RNA, 17 nt, Artificial Sequence
  Synthetic oligonucleotide: BID-295
gccccucugugcaggac

SEQ ID NO: 11052 - RNA, 17 nt, Artificial Sequence
  Synthetic oligonucleotide: BID-296
cugugcaggaccggaac

SEQ ID NO: 11053 - RNA, 17 nt, Artificial Sequence
  Synthetic oligonucleotide: BID-297
ugugcaggaccggaaca

SEQ ID NO: 11054 - RNA, 17 nt, Artificial Sequence
  Synthetic oligonucleotide: BID-298
ggaccggaacagggacc

SEQ ID NO: 11055 - RNA, 17 nt, Artificial Sequence
  Synthetic oligonucleotide: BID-299
ggaccuggccacugccc

SEQ ID NO: 11056 - RNA, 17 nt, Artificial Sequence
  Synthetic oligonucleotide: BID-300
ccuggagcagcugcugc

SEQ ID NO: 11057 - RNA, 17 nt, Artificial Sequence
  Synthetic oligonucleotide: BID-301
ggccuacccuagagaca

SEQ ID NO: 11058 - RNA, 17 nt, Artificial Sequence
  Synthetic oligonucleotide: BID-302
cccuagagacauggaga

SEQ ID NO: 11059 - RNA, 17 nt, Artificial Sequence
  Synthetic oligonucleotide: BID-303
gaaggagaagaccaugc

SEQ ID NO: 11060 - RNA, 17 nt, Artificial Sequence
  Synthetic oligonucleotide: BID-304
gaagaccaugcuggugc

SEQ ID NO: 11061 - RNA, 17 nt, Artificial Sequence
  Synthetic oligonucleotide: BID-305
ggugcuggcccugcugc

SEQ ID NO: 11062 - RNA, 17 nt, Artificial Sequence
  Synthetic oligonucleotide: BID-306
ccugcugcuggccaaga

SEQ ID NO: 11063 - RNA, 17 nt, Artificial Sequence
  Synthetic oligonucleotide: BID-307
gcugcuggccaagaagg

SEQ ID NO: 11064 - RNA, 17 nt, Artificial Sequence
  Synthetic oligonucleotide: BID-308
accuacgcaccuacgug

SEQ ID NO: 11065 - RNA, 17 nt, Artificial Sequence
  Synthetic oligonucleotide: BID-309
aaauguaagaacccuug

SEQ ID NO: 11066 - RNA, 20 nt, Artificial Sequence
  Synthetic oligonucleotide: BID-310
agggaaggagcugaccucaa

SEQ ID NO: 11067 - RNA, 20 nt, Artificial Sequence
  Synthetic oligonucleotide: BID-311
cucaaggguucuuacauuuc

SEQ ID NO: 11068 - RNA, 20 nt, Artificial Sequence
  Synthetic oligonucleotide: BID-312
ucuggcuaagcuccucacgu

SEQ ID NO: 11069 - RNA, 20 nt, Artificial Sequence
  Synthetic oligonucleotide: BID-313
agcuccucacguaggugcgu

SEQ ID NO: 11070 - RNA, 20 nt, Artificial Sequence
  Synthetic oligonucleotide: BID-314
ucacguaggugcguagguuc

SEQ ID NO: 11071 - RNA, 20 nt, Artificial Sequence
  Synthetic oligonucleotide: BID-315
cuguugugugaaagacauca

SEQ ID NO: 11072 - RNA, 20 nt, Artificial Sequence
  Synthetic oligonucleotide: BID-316
gugaaagacaucacggagca

SEQ ID NO: 11073 - RNA, 20 nt, Artificial Sequence
  Synthetic oligonucleotide: BID-317
aagacaucacggagcaagga

SEQ ID NO: 11074 - RNA, 20 nt, Artificial Sequence
  Synthetic oligonucleotide: BID-318
gagcaaggacggcgugugac

SEQ ID NO: 11075 - RNA, 20 nt, Artificial Sequence
  Synthetic oligonucleotide: BID-319
cgugugacuggccaccuucu

SEQ ID NO: 11076 - RNA, 20 nt, Artificial Sequence
  Synthetic oligonucleotide: BID-320
ccaccuucuuggccagcagc

SEQ ID NO: 11077 - RNA, 20 nt, Artificial Sequence
  Synthetic oligonucleotide: BID-321
caccuucuuggccagcagca

SEQ ID NO: 11078 - RNA, 20 nt, Artificial Sequence
  Synthetic oligonucleotide: BID-322
cagcagggccagcaccagca

SEQ ID NO: 11079 - RNA, 20 nt, Artificial Sequence
  Synthetic oligonucleotide: BID-323
uucuccuucuccaugucucu

SEQ ID NO: 11080 - RNA, 20 nt, Artificial Sequence
  Synthetic oligonucleotide: BID-324
ucuccuucuccaugucucua

SEQ ID NO: 11081 - RNA, 20 nt, Artificial Sequence
  Synthetic oligonucleotide: BID-325
cuucuccaugucucuagggu

SEQ ID NO: 11082 - RNA, 20 nt, Artificial Sequence
  Synthetic oligonucleotide: BID-326
aggccugcagcagcugcucc

SEQ ID NO: 11083 - RNA, 20 nt, Artificial Sequence
  Synthetic oligonucleotide: BID-327
ggccugcagcagcugcucca

SEQ ID NO: 11084 - RNA, 20 nt, Artificial Sequence
  Synthetic oligonucleotide: BID-328
cagcagcugcuccagggcag

SEQ ID NO: 11085 - RNA, 20 nt, Artificial Sequence
  Synthetic oligonucleotide: BID-329
gcugcuccagggcaguggcc

SEQ ID NO: 11086 - RNA, 20 nt, Artificial Sequence
  Synthetic oligonucleotide: BID-330
caguggccaggucccuguuc

SEQ ID NO: 11087 - RNA, 20 nt, Artificial Sequence
  Synthetic oligonucleotide: BID-331
ccuguuccgguccugcacag

SEQ ID NO: 11088 - RNA, 20 nt, Artificial Sequence
  Synthetic oligonucleotide: BID-332
cuguuccgguccugcacaga

SEQ ID NO: 11089 - RNA, 20 nt, Artificial Sequence
  Synthetic oligonucleotide: BID-333
uguuccgguccugcacagag

SEQ ID NO: 11090 - RNA, 20 nt, Artificial Sequence
  Synthetic oligonucleotide: BID-334
acagaggggcacacagaacc

SEQ ID NO: 11091 - RNA, 17 nt, Artificial Sequence
  Synthetic oligonucleotide: BID-335
gaaggagcugaccucaa

SEQ ID NO: 11092 - RNA, 17 nt, Artificial Sequence
  Synthetic oligonucleotide: BID-336
aaggguucuuacauuuc

SEQ ID NO: 11093 - RNA, 17 nt, Artificial Sequence
  Synthetic oligonucleotide: BID-337
ggcuaagcuccucacgu

SEQ ID NO: 11094 - RNA, 17 nt, Artificial Sequence
  Synthetic oligonucleotide: BID-338
uccucacguaggugcgu

SEQ ID NO: 11095 - RNA, 17 nt, Artificial Sequence
  Synthetic oligonucleotide: BID-339
cguaggugcguagguuc

SEQ ID NO: 11096 - RNA, 17 nt, Artificial Sequence
  Synthetic oligonucleotide: BID-340
uugugugaaagacauca

SEQ ID NO: 11097 - RNA, 17 nt, Artificial Sequence
  Synthetic oligonucleotide: BID-341
aaagacaucacggagca

SEQ ID NO: 11098 - RNA, 17 nt, Artificial Sequence
  Synthetic oligonucleotide: BID-342
acaucacggagcaagga

SEQ ID NO: 11099 - RNA, 17 nt, Artificial Sequence
  Synthetic oligonucleotide: BID-343
caaggacggcgugugac

SEQ ID NO: 11100 - RNA, 17 nt, Artificial Sequence
  Synthetic oligonucleotide: BID-344
gugacuggccaccuucu

SEQ ID NO: 11101 - RNA, 17 nt, Artificial Sequence
  Synthetic oligonucleotide: BID-345
ccuucuuggccagcagc

SEQ ID NO: 11102 - RNA, 17 nt, Artificial Sequence
  Synthetic oligonucleotide: BID-346
cuucuuggccagcagca

SEQ ID NO: 11103 - RNA, 17 nt, Artificial Sequence
  Synthetic oligonucleotide: BID-347
cagggccagcaccagca

SEQ ID NO: 11104 - RNA, 17 nt, Artificial Sequence
  Synthetic oligonucleotide: BID-348
uccuucuccaugucucu

SEQ ID NO: 11105 - RNA, 17 nt, Artificial Sequence
  Synthetic oligonucleotide: BID-349
ccuucuccaugucucua

SEQ ID NO: 11106 - RNA, 17 nt, Artificial Sequence
  Synthetic oligonucleotide: BID-350
cuccaugucucuagggu

SEQ ID NO: 11107 - RNA, 17 nt, Artificial Sequence
  Synthetic oligonucleotide: BID-351
ccugcagcagcugcucc

SEQ ID NO: 11108 - RNA, 17 nt, Artificial Sequence
  Synthetic oligonucleotide: BID-352
cugcagcagcugcucca

SEQ ID NO: 11109 - RNA, 17 nt, Artificial Sequence
  Synthetic oligonucleotide: BID-353
cagcugcuccagggcag

SEQ ID NO: 11110 - RNA, 17 nt, Artificial Sequence
  Synthetic oligonucleotide: BID-354
gcuccagggcaguggcc

SEQ ID NO: 11111 - RNA, 17 nt, Artificial Sequence
  Synthetic oligonucleotide: BID-355
uggccaggucccuguuc

SEQ ID NO: 11112 - RNA, 17 nt, Artificial Sequence
  Synthetic oligonucleotide: BID-356
guuccgguccugcacag

SEQ ID NO: 11113 - RNA, 17 nt, Artificial Sequence
  Synthetic oligonucleotide: BID-357
uuccgguccugcacaga

SEQ ID NO: 11114 - RNA, 17 nt, Artificial Sequence
  Synthetic oligonucleotide: BID-358
uccgguccugcacagag

SEQ ID NO: 11115 - RNA, 17 nt, Artificial Sequence
  Synthetic oligonucleotide: BID-359
gaggggcacacagaacc

SEQ ID NO: 11116 - RNA, 20 nt, Artificial Sequence
  Synthetic oligonucleotide: BID-360
cauucauucauucaacaaau

SEQ ID NO: 11117 - RNA, 20 nt, Artificial Sequence
  Synthetic oligonucleotide: BID-361
aauacgaaugugcagcggug

SEQ ID NO: 11118 - RNA, 20 nt, Artificial Sequence
  Synthetic oligonucleotide: BID-1
auacgaaugugcagcggugc

SEQ ID NO: 11119 - RNA, 20 nt, Artificial Sequence
  Synthetic oligonucleotide: BID-363
gcuggggucaugauggcucg

SEQ ID NO: 11120 - RNA, 20 nt, Artificial Sequence
  Synthetic oligonucleotide: BID-364
ucaugauggcucggugggca

SEQ ID NO: 11121 - RNA, 20 nt, Artificial Sequence
  Synthetic oligonucleotide: BID-365
augauggcucggugggcagc

SEQ ID NO: 11122 - RNA, 20 nt, Artificial Sequence
  Synthetic oligonucleotide: BID-9
ugauggcucggugggcagcg

SEQ ID NO: 11123 - RNA, 20 nt, Artificial Sequence
  Synthetic oligonucleotide: BID-367
gcucggugggcagcgagggg

SEQ ID NO: 11124 - RNA, 20 nt, Artificial Sequence
  Synthetic oligonucleotide: BID-368
gcagcgaggggccgggccgg

SEQ ID NO: 11125 - RNA, 20 nt, Artificial Sequence
  Synthetic oligonucleotide: BID-23
cagcgaggggccgggccggc

SEQ ID NO: 11126 - RNA, 20 nt, Artificial Sequence
  Synthetic oligonucleotide: BID-370
gcgaggggccgggccggcug

SEQ ID NO: 11127 - RNA, 20 nt, Artificial Sequence
  Synthetic oligonucleotide: BID-25
cgaggggccgggccggcugg

SEQ ID NO: 11128 - RNA, 20 nt, Artificial Sequence
  Synthetic oligonucleotide: BID-372
gccggcuggaggagcacagu

SEQ ID NO: 11129 - RNA, 20 nt, Artificial Sequence
  Synthetic oligonucleotide: BID-373
gcacagugcggauucuguaa

SEQ ID NO: 11130 - RNA, 20 nt, Artificial Sequence
  Synthetic oligonucleotide: BID-374
gugcggauucuguaaguggg

SEQ ID NO: 11131 - RNA, 20 nt, Artificial Sequence
  Synthetic oligonucleotide: BID-6
ugcggauucuguaagugggc

SEQ ID NO: 11132 - RNA, 20 nt, Artificial Sequence
  Synthetic oligonucleotide: BID-5
gcggauucuguaagugggcu

SEQ ID NO: 11133 - RNA, 20 nt, Artificial Sequence
  Synthetic oligonucleotide: BID-377
uucuguaagugggcuggggg

SEQ ID NO: 11134 - RNA, 20 nt, Artificial Sequence
  Synthetic oligonucleotide: BID-378
ugucccuuuccaggucgcca

SEQ ID NO: 11135 - RNA, 20 nt, Artificial Sequence
  Synthetic oligonucleotide: BID-59
gucccuuuccaggucgccac

SEQ ID NO: 11136 - RNA, 20 nt, Artificial Sequence
  Synthetic oligonucleotide: BID-380
caggucgccacugggacacu

SEQ ID NO: 11137 - RNA, 20 nt, Artificial Sequence
  Synthetic oligonucleotide: BID-381
gccacugggacacugugaac

SEQ ID NO: 11138 - RNA, 20 nt, Artificial Sequence
  Synthetic oligonucleotide: BID-57
ccacugggacacugugaacc

SEQ ID NO: 11139 - RNA, 20 nt, Artificial Sequence
  Synthetic oligonucleotide: BID-383
ugggacacugugaaccagga

SEQ ID NO: 11140 - RNA, 20 nt, Artificial Sequence
  Synthetic oligonucleotide: BID-384
cacugugaaccaggagugag

SEQ ID NO: 11141 - RNA, 20 nt, Artificial Sequence
  Synthetic oligonucleotide: BID-68
acugugaaccaggagugagu

SEQ ID NO: 11142 - RNA, 20 nt, Artificial Sequence
  Synthetic oligonucleotide: BID-386
gcugccgcgcugcccaggcc

SEQ ID NO: 11143 - RNA, 20 nt, Artificial Sequence
  Synthetic oligonucleotide: BID-387
cgcugcccaggccauggacu

SEQ ID NO: 11144 - RNA, 20 nt, Artificial Sequence
  Synthetic oligonucleotide: BID-388
caggccauggacugugaggu

SEQ ID NO: 11145 - RNA, 20 nt, Artificial Sequence
  Synthetic oligonucleotide: BID-389
ggucagaggccagauccccu

SEQ ID NO: 11146 - RNA, 20 nt, Artificial Sequence
  Synthetic oligonucleotide: BID-390
gucaacaacgguuccagccu

SEQ ID NO: 11147 - RNA, 20 nt, Artificial Sequence
  Synthetic oligonucleotide: BID-106
ucaacaacgguuccagccuc

SEQ ID NO: 11148 - RNA, 20 nt, Artificial Sequence
  Synthetic oligonucleotide: BID-392
caacgguuccagccucaggg

SEQ ID NO: 11149 - RNA, 20 nt, Artificial Sequence
  Synthetic oligonucleotide: BID-393
uguucugacaacagcuuccg

SEQ ID NO: 11150 - RNA, 20 nt, Artificial Sequence
  Synthetic oligonucleotide: BID-394
uucugacaacagcuuccgca

SEQ ID NO: 11151 - RNA, 20 nt, Artificial Sequence
  Synthetic oligonucleotide: BID-395
acaacagcuuccgcagagag

SEQ ID NO: 11152 - RNA, 20 nt, Artificial Sequence
  Synthetic oligonucleotide: BID-396
uccgcagagagcuggacgca

SEQ ID NO: 11153 - RNA, 20 nt, Artificial Sequence
  Synthetic oligonucleotide: BID-397
agagcuggacgcacugggcc

SEQ ID NO: 11154 - RNA, 20 nt, Artificial Sequence
  Synthetic oligonucleotide: BID-398
cugccagugcuggcucccca

SEQ ID NO: 11155 - RNA, 20 nt, Artificial Sequence
  Synthetic oligonucleotide: BID-139
ugccagugcuggcuccccag

SEQ ID NO: 11156 - RNA, 20 nt, Artificial Sequence
  Synthetic oligonucleotide: BID-128
gccagugcuggcuccccagu

SEQ ID NO: 11157 - RNA, 20 nt, Artificial Sequence
  Synthetic oligonucleotide: BID-401
cagugcuggcuccccagugg

SEQ ID NO: 11158 - RNA, 20 nt, Artificial Sequence
  Synthetic oligonucleotide: BID-402
uccccagugggagggcuacg

SEQ ID NO: 11159 - RNA, 20 nt, Artificial Sequence
  Synthetic oligonucleotide: BID-403
accgcagcagccacucccgc

SEQ ID NO: 11160 - RNA, 20 nt, Artificial Sequence
  Synthetic oligonucleotide: BID-137
ccgcagcagccacucccgcu

SEQ ID NO: 11161 - RNA, 20 nt, Artificial Sequence
  Synthetic oligonucleotide: BID-113
cgcagcagccacucccgcuu

SEQ ID NO: 11162 - RNA, 20 nt, Artificial Sequence
  Synthetic oligonucleotide: BID-406
agcagccacucccgcuuggg

SEQ ID NO: 11163 - RNA, 20 nt, Artificial Sequence
  Synthetic oligonucleotide: BID-407
ccacucccgcuugggaagaa

SEQ ID NO: 11164 - RNA, 20 nt, Artificial Sequence
  Synthetic oligonucleotide: BID-408
ucugucucugccgccccugc

SEQ ID NO: 11165 - RNA, 20 nt, Artificial Sequence
  Synthetic oligonucleotide: BID-409
ccccugccugaacacagauu

SEQ ID NO: 11166 - RNA, 20 nt, Artificial Sequence
  Synthetic oligonucleotide: BID-410
gaacacagauucugaaaguc

SEQ ID NO: 11167 - RNA, 20 nt, Artificial Sequence
  Synthetic oligonucleotide: BID-411
gaaagucaagaagacaucau

SEQ ID NO: 11168 - RNA, 20 nt, Artificial Sequence
  Synthetic oligonucleotide: BID-224
aaagucaagaagacaucauc

SEQ ID NO: 11169 - RNA, 20 nt, Artificial Sequence
  Synthetic oligonucleotide: BID-413
ugccaggcaccucgcccagg

SEQ ID NO: 11170 - RNA, 20 nt, Artificial Sequence
  Synthetic oligonucleotide: BID-219
gccaggcaccucgcccaggu

SEQ ID NO: 11171 - RNA, 20 nt, Artificial Sequence
  Synthetic oligonucleotide: BID-234
ccaggcaccucgcccagguc

SEQ ID NO: 11172 - RNA, 20 nt, Artificial Sequence
  Synthetic oligonucleotide: BID-416
ucgcccaggucggggacagc

SEQ ID NO: 11173 - RNA, 20 nt, Artificial Sequence
  Synthetic oligonucleotide: BID-417
gcauggaccguagcaucccu

SEQ ID NO: 11174 - RNA, 20 nt, Artificial Sequence
  Synthetic oligonucleotide: BID-418
guagcaucccuccgggccug

SEQ ID NO: 11175 - RNA, 20 nt, Artificial Sequence
  Synthetic oligonucleotide: BID-419
aacggccuggcccugcagcu

SEQ ID NO: 11176 - RNA, 20 nt, Artificial Sequence
  Synthetic oligonucleotide: BID-232
acggccuggcccugcagcuc

SEQ ID NO: 11177 - RNA, 20 nt, Artificial Sequence
  Synthetic oligonucleotide: BID-421
agcucaggaacaccagccgg

SEQ ID NO: 11178 - RNA, 20 nt, Artificial Sequence
  Synthetic oligonucleotide: BID-214
gcucaggaacaccagccggu

SEQ ID NO: 11179 - RNA, 20 nt, Artificial Sequence
  Synthetic oligonucleotide: BID-423
ucaggaacaccagccggucg

SEQ ID NO: 11180 - RNA, 20 nt, Artificial Sequence
  Synthetic oligonucleotide: BID-200
caggaacaccagccggucgg

SEQ ID NO: 11181 - RNA, 20 nt, Artificial Sequence
  Synthetic oligonucleotide: BID-425
acaccagccggucggaggag

SEQ ID NO: 11182 - RNA, 20 nt, Artificial Sequence
  Synthetic oligonucleotide: BID-426
cagccggucggaggagguga

SEQ ID NO: 11183 - RNA, 20 nt, Artificial Sequence
  Synthetic oligonucleotide: BID-427
gccggucggaggaggugagu

SEQ ID NO: 11184 - RNA, 20 nt, Artificial Sequence
  Synthetic oligonucleotide: BID-428
cggaggaggugagugagggc

SEQ ID NO: 11185 - RNA, 20 nt, Artificial Sequence
  Synthetic oligonucleotide: BID-429
gaggaggugagugagggccu

SEQ ID NO: 11186 - RNA, 20 nt, Artificial Sequence
  Synthetic oligonucleotide: BID-430
agugagggccugaggaccgc

SEQ ID NO: 11187 - RNA, 17 nt, Artificial Sequence
  Synthetic oligonucleotide: BID-431
ucauucauucaacaaau

SEQ ID NO: 11188 - RNA, 17 nt, Artificial Sequence
  Synthetic oligonucleotide: BID-432
acgaaugugcagcggug

SEQ ID NO: 11189 - RNA, 17 nt, Artificial Sequence
  Synthetic oligonucleotide: BID-26
cgaaugugcagcggugc

SEQ ID NO: 11190 - RNA, 17 nt, Artificial Sequence
  Synthetic oligonucleotide: BID-434
ggggucaugauggcucg

SEQ ID NO: 11191 - RNA, 17 nt, Artificial Sequence
  Synthetic oligonucleotide: BID-435
ugauggcucggugggca

SEQ ID NO: 11192 - RNA, 17 nt, Artificial Sequence
  Synthetic oligonucleotide: BID-436
auggcucggugggcagc

SEQ ID NO: 11193 - RNA, 17 nt, Artificial Sequence
  Synthetic oligonucleotide: BID-39
uggcucggugggcagcg

SEQ ID NO: 11194 - RNA, 17 nt, Artificial Sequence
  Synthetic oligonucleotide: BID-438
cggugggcagcgagggg

SEQ ID NO: 11195 - RNA, 17 nt, Artificial Sequence
  Synthetic oligonucleotide: BID-439
gcgaggggccgggccgg

SEQ ID NO: 11196 - RNA, 17 nt, Artificial Sequence
  Synthetic oligonucleotide: BID-48
cgaggggccgggccggc

SEQ ID NO: 11197 - RNA, 17 nt, Artificial Sequence
  Synthetic oligonucleotide: BID-441
aggggccgggccggcug

SEQ ID NO: 11198 - RNA, 17 nt, Artificial Sequence
  Synthetic oligonucleotide: BID-53
ggggccgggccggcugg

SEQ ID NO: 11199 - RNA, 17 nt, Artificial Sequence
  Synthetic oligonucleotide: BID-443
ggcuggaggagcacagu

SEQ ID NO: 11200 - RNA, 17 nt, Artificial Sequence
  Synthetic oligonucleotide: BID-444
cagugcggauucuguaa

SEQ ID NO: 11201 - RNA, 17 nt, Artificial Sequence
  Synthetic oligonucleotide: BID-445
cggauucuguaaguggg

SEQ ID NO: 11202 - RNA, 17 nt, Artificial Sequence
  Synthetic oligonucleotide: BID-38
ggauucuguaagugggc

SEQ ID NO: 11203 - RNA, 17 nt, Artificial Sequence
  Synthetic oligonucleotide: BID-42
gauucuguaagugggcu

SEQ ID NO: 11204 - RNA, 17 nt, Artificial Sequence
  Synthetic oligonucleotide: BID-448
uguaagugggcuggggg

SEQ ID NO: 11205 - RNA, 17 nt, Artificial Sequence
  Synthetic oligonucleotide: BID-449
cccuuuccaggucgcca

SEQ ID NO: 11206 - RNA, 17 nt, Artificial Sequence
  Synthetic oligonucleotide: BID-80
ccuuuccaggucgccac

SEQ ID NO: 11207 - RNA, 17 nt, Artificial Sequence
  Synthetic oligonucleotide: BID-451
gucgccacugggacacu

SEQ ID NO: 11208 - RNA, 17 nt, Artificial Sequence
  Synthetic oligonucleotide: BID-452
acugggacacugugaac

SEQ ID NO: 11209 - RNA, 17 nt, Artificial Sequence
  Synthetic oligonucleotide: BID-87
cugggacacugugaacc

SEQ ID NO: 11210 - RNA, 17 nt, Artificial Sequence
  Synthetic oligonucleotide: BID-454
gacacugugaaccagga

SEQ ID NO: 11211 - RNA, 17 nt, Artificial Sequence
  Synthetic oligonucleotide: BID-455
ugugaaccaggagugag

SEQ ID NO: 11212 - RNA, 17 nt, Artificial Sequence
  Synthetic oligonucleotide: BID-85
gugaaccaggagugagu

SEQ ID NO: 11213 - RNA, 17 nt, Artificial Sequence
  Synthetic oligonucleotide: BID-457
gccgcgcugcccaggcc

SEQ ID NO: 11214 - RNA, 17 nt, Artificial Sequence
  Synthetic oligonucleotide: BID-458
ugcccaggccauggacu

SEQ ID NO: 11215 - RNA, 17 nt, Artificial Sequence
  Synthetic oligonucleotide: BID-459
gccauggacugugaggu

SEQ ID NO: 11216 - RNA, 17 nt, Artificial Sequence
  Synthetic oligonucleotide: BID-460
cagaggccagauccccu

SEQ ID NO: 11217 - RNA, 17 nt, Artificial Sequence
  Synthetic oligonucleotide: BID-461
aacaacgguuccagccu

SEQ ID NO: 11218 - RNA, 17 nt, Artificial Sequence
  Synthetic oligonucleotide: BID-153
acaacgguuccagccuc

SEQ ID NO: 11219 - RNA, 17 nt, Artificial Sequence
  Synthetic oligonucleotide: BID-463
cgguuccagccucaggg

SEQ ID NO: 11220 - RNA, 17 nt, Artificial Sequence
  Synthetic oligonucleotide: BID-464
ucugacaacagcuuccg

SEQ ID NO: 11221 - RNA, 17 nt, Artificial Sequence
  Synthetic oligonucleotide: BID-465
ugacaacagcuuccgca

SEQ ID NO: 11222 - RNA, 17 nt, Artificial Sequence
  Synthetic oligonucleotide: BID-466
acagcuuccgcagagag

SEQ ID NO: 11223 - RNA, 17 nt, Artificial Sequence
  Synthetic oligonucleotide: BID-467
gcagagagcuggacgca

SEQ ID NO: 11224 - RNA, 17 nt, Artificial Sequence
  Synthetic oligonucleotide: BID-468
gcuggacgcacugggcc

SEQ ID NO: 11225 - RNA, 17 nt, Artificial Sequence
  Synthetic oligonucleotide: BID-469
ccagugcuggcucccca

SEQ ID NO: 11226 - RNA, 17 nt, Artificial Sequence
  Synthetic oligonucleotide: BID-182
cagugcuggcuccccag

SEQ ID NO: 11227 - RNA, 17 nt, Artificial Sequence
  Synthetic oligonucleotide: BID-188
agugcuggcuccccagu

SEQ ID NO: 11228 - RNA, 17 nt, Artificial Sequence
  Synthetic oligonucleotide: BID-472
ugcuggcuccccagugg

SEQ ID NO: 11229 - RNA, 17 nt, Artificial Sequence
  Synthetic oligonucleotide: BID-473
ccagugggagggcuacg

SEQ ID NO: 11230 - RNA, 17 nt, Artificial Sequence
  Synthetic oligonucleotide: BID-474
gcagcagccacucccgc

SEQ ID NO: 11231 - RNA, 17 nt, Artificial Sequence
  Synthetic oligonucleotide: BID-189
cagcagccacucccgcu

SEQ ID NO: 11232 - RNA, 17 nt, Artificial Sequence
  Synthetic oligonucleotide: BID-158
agcagccacucccgcuu

SEQ ID NO: 11233 - RNA, 17 nt, Artificial Sequence
  Synthetic oligonucleotide: BID-477
agccacucccgcuuggg

SEQ ID NO: 11234 - RNA, 17 nt, Artificial Sequence
  Synthetic oligonucleotide: BID-478
cucccgcuugggaagaa

SEQ ID NO: 11235 - RNA, 17 nt, Artificial Sequence
  Synthetic oligonucleotide: BID-479
gucucugccgccccugc

SEQ ID NO: 11236 - RNA, 17 nt, Artificial Sequence
  Synthetic oligonucleotide: BID-480
cugccugaacacagauu

SEQ ID NO: 11237 - RNA, 17 nt, Artificial Sequence
  Synthetic oligonucleotide: BID-481
cacagauucugaaaguc

SEQ ID NO: 11238 - RNA, 17 nt, Artificial Sequence
  Synthetic oligonucleotide: BID-482
agucaagaagacaucau

SEQ ID NO: 11239 - RNA, 17 nt, Artificial Sequence
  Synthetic oligonucleotide: BID-258
gucaagaagacaucauc

SEQ ID NO: 11240 - RNA, 17 nt, Artificial Sequence
  Synthetic oligonucleotide: BID-484
caggcaccucgcccagg

SEQ ID NO: 11241 - RNA, 17 nt, Artificial Sequence
  Synthetic oligonucleotide: BID-264
aggcaccucgcccaggu

SEQ ID NO: 11242 - RNA, 17 nt, Artificial Sequence
  Synthetic oligonucleotide: BID-263
ggcaccucgcccagguc

SEQ ID NO: 11243 - RNA, 17 nt, Artificial Sequence
  Synthetic oligonucleotide: BID-487
cccaggucggggacagc

SEQ ID NO: 11244 - RNA, 17 nt, Artificial Sequence
  Synthetic oligonucleotide: BID-488
uggaccguagcaucccu

SEQ ID NO: 11245 - RNA, 17 nt, Artificial Sequence
  Synthetic oligonucleotide: BID-489
gcaucccuccgggccug

SEQ ID NO: 11246 - RNA, 17 nt, Artificial Sequence
  Synthetic oligonucleotide: BID-490
ggccuggcccugcagcu

SEQ ID NO: 11247 - RNA, 17 nt, Artificial Sequence
  Synthetic oligonucleotide: BID-277
gccuggcccugcagcuc

SEQ ID NO: 11248 - RNA, 17 nt, Artificial Sequence
  Synthetic oligonucleotide: BID-492
ucaggaacaccagccgg

SEQ ID NO: 11249 - RNA, 17 nt, Artificial Sequence
  Synthetic oligonucleotide: BID-250
caggaacaccagccggu

SEQ ID NO: 11250 - RNA, 17 nt, Artificial Sequence
  Synthetic oligonucleotide: BID-494
ggaacaccagccggucg

SEQ ID NO: 11251 - RNA, 17 nt, Artificial Sequence
  Synthetic oligonucleotide: BID-231
gaacaccagccggucgg

SEQ ID NO: 11252 - RNA, 17 nt, Artificial Sequence
  Synthetic oligonucleotide: BID-496
ccagccggucggaggag

SEQ ID NO: 11253 - RNA, 17 nt, Artificial Sequence
  Synthetic oligonucleotide: BID-497
ccggucggaggagguga

SEQ ID NO: 11254 - RNA, 17 nt, Artificial Sequence
  Synthetic oligonucleotide: BID-498
ggucggaggaggugagu

SEQ ID NO: 11255 - RNA, 17 nt, Artificial Sequence
  Synthetic oligonucleotide: BID-499
aggaggugagugagggc

SEQ ID NO: 11256 - RNA, 17 nt, Artificial Sequence
  Synthetic oligonucleotide: BID-500
gaggugagugagggccu

SEQ ID NO: 11257 - RNA, 17 nt, Artificial Sequence
  Synthetic oligonucleotide: BID-501
gagggccugaggaccgc

SEQ ID NO: 11258 - RNA, 20 nt, Artificial Sequence
  Synthetic oligonucleotide: BID-502
ccuccgaccggcugguguuc

SEQ ID NO: 11259 - RNA, 20 nt, Artificial Sequence
  Synthetic oligonucleotide: BID-503
cggcugguguuccugagcug

SEQ ID NO: 11260 - RNA, 20 nt, Artificial Sequence
  Synthetic oligonucleotide: BID-504
ggccaggccguucaccaggc

SEQ ID NO: 11261 - RNA, 20 nt, Artificial Sequence
  Synthetic oligonucleotide: BID-229
gccaggccguucaccaggcc

SEQ ID NO: 11262 - RNA, 20 nt, Artificial Sequence
  Synthetic oligonucleotide: BID-506
caggccguucaccaggcccg

SEQ ID NO: 11263 - RNA, 20 nt, Artificial Sequence
  Synthetic oligonucleotide: BID-195
aggccguucaccaggcccgg

SEQ ID NO: 11264 - RNA, 20 nt, Artificial Sequence
  Synthetic oligonucleotide: BID-508
cgguccaugcuguccccgac

SEQ ID NO: 11265 - RNA, 20 nt, Artificial Sequence
  Synthetic oligonucleotide: BID-509
ccaugcuguccccgaccugg

SEQ ID NO: 11266 - RNA, 20 nt, Artificial Sequence
  Synthetic oligonucleotide: BID-510
gcgaggugccuggcaauauu

SEQ ID NO: 11267 - RNA, 20 nt, Artificial Sequence
  Synthetic oligonucleotide: BID-511
gaugaugucuucuugacuuu

SEQ ID NO: 11268 - RNA, 20 nt, Artificial Sequence
  Synthetic oligonucleotide: BID-512
uuucagaaucuguguucagg

SEQ ID NO: 11269 - RNA, 20 nt, Artificial Sequence
  Synthetic oligonucleotide: BID-226
uucagaaucuguguucaggc

SEQ ID NO: 11270 - RNA, 20 nt, Artificial Sequence
  Synthetic oligonucleotide: BID-514
cuguguucaggcaggggcgg

SEQ ID NO: 11271 - RNA, 20 nt, Artificial Sequence
  Synthetic oligonucleotide: BID-515
ccugccucuauucuucccaa

SEQ ID NO: 11272 - RNA, 20 nt, Artificial Sequence
  Synthetic oligonucleotide: BID-141
cugccucuauucuucccaag

SEQ ID NO: 11273 - RNA, 20 nt, Artificial Sequence
  Synthetic oligonucleotide: BID-123
ugccucuauucuucccaagc

SEQ ID NO: 11274 - RNA, 20 nt, Artificial Sequence
  Synthetic oligonucleotide: BID-518
agcucaucguagcccuccca

SEQ ID NO: 11275 - RNA, 20 nt, Artificial Sequence
  Synthetic oligonucleotide: BID-104
gcucaucguagcccucccac

SEQ ID NO: 11276 - RNA, 20 nt, Artificial Sequence
  Synthetic oligonucleotide: BID-109
cucaucguagcccucccacu

SEQ ID NO: 11277 - RNA, 20 nt, Artificial Sequence
  Synthetic oligonucleotide: BID-134
ucaucguagcccucccacug

SEQ ID NO: 11278 - RNA, 20 nt, Artificial Sequence
  Synthetic oligonucleotide: BID-522
cccagugcguccagcucucu

SEQ ID NO: 11279 - RNA, 20 nt, Artificial Sequence
  Synthetic oligonucleotide: BID-131
ccagugcguccagcucucug

SEQ ID NO: 11280 - RNA, 20 nt, Artificial Sequence
  Synthetic oligonucleotide: BID-524
cucucugcggaagcuguugu

SEQ ID NO: 11281 - RNA, 20 nt, Artificial Sequence
  Synthetic oligonucleotide: BID-525
aagcuguugucagaacagcu

SEQ ID NO: 11282 - RNA, 20 nt, Artificial Sequence
  Synthetic oligonucleotide: BID-136
agcuguugucagaacagcuu

SEQ ID NO: 11283 - RNA, 20 nt, Artificial Sequence
  Synthetic oligonucleotide: BID-527
cuguugucagaacagcuuug

SEQ ID NO: 11284 - RNA, 20 nt, Artificial Sequence
  Synthetic oligonucleotide: BID-122
uguugucagaacagcuuugg

SEQ ID NO: 11285 - RNA, 20 nt, Artificial Sequence
  Synthetic oligonucleotide: BID-529
gguuugugaugcacucaucc

SEQ ID NO: 11286 - RNA, 20 nt, Artificial Sequence
  Synthetic oligonucleotide: BID-530
ugaugcacucaucccugagg

SEQ ID NO: 11287 - RNA, 20 nt, Artificial Sequence
  Synthetic oligonucleotide: BID-126
gaugcacucaucccugaggc

SEQ ID NO: 11288 - RNA, 20 nt, Artificial Sequence
  Synthetic oligonucleotide: BID-532
aggcuggaaccguuguugac

SEQ ID NO: 11289 - RNA, 20 nt, Artificial Sequence
  Synthetic oligonucleotide: BID-533
gcuggaaccguuguugaccu

SEQ ID NO: 11290 - RNA, 20 nt, Artificial Sequence
  Synthetic oligonucleotide: BID-118
cuggaaccguuguugaccug

SEQ ID NO: 11291 - RNA, 20 nt, Artificial Sequence
  Synthetic oligonucleotide: BID-105
uggaaccguuguugaccuga

SEQ ID NO: 11292 - RNA, 20 nt, Artificial Sequence
  Synthetic oligonucleotide: BID-107
ggaaccguuguugaccugag

SEQ ID NO: 11293 - RNA, 20 nt, Artificial Sequence
  Synthetic oligonucleotide: BID-537
ccguuguugaccugagggga

SEQ ID NO: 11294 - RNA, 20 nt, Artificial Sequence
  Synthetic oligonucleotide: BID-114
cguuguugaccugaggggaa

SEQ ID NO: 11295 - RNA, 20 nt, Artificial Sequence
  Synthetic oligonucleotide: BID-135
guuguugaccugaggggaaa

SEQ ID NO: 11296 - RNA, 20 nt, Artificial Sequence
  Synthetic oligonucleotide: BID-130
uuguugaccugaggggaaag

SEQ ID NO: 11297 - RNA, 20 nt, Artificial Sequence
  Synthetic oligonucleotide: BID-541
accugaggggaaaggggagu

SEQ ID NO: 11298 - RNA, 20 nt, Artificial Sequence
  Synthetic oligonucleotide: BID-144
ccugaggggaaaggggaguc

SEQ ID NO: 11299 - RNA, 20 nt, Artificial Sequence
  Synthetic oligonucleotide: BID-543
gggaaaggggagucaggaag

SEQ ID NO: 11300 - RNA, 20 nt, Artificial Sequence
  Synthetic oligonucleotide: BID-544
cugaccucacaguccauggc

SEQ ID NO: 11301 - RNA, 20 nt, Artificial Sequence
  Synthetic oligonucleotide: BID-545
cacagugucccaguggcgac

SEQ ID NO: 11302 - RNA, 20 nt, Artificial Sequence
  Synthetic oligonucleotide: BID-60
acagugucccaguggcgacc

SEQ ID NO: 11303 - RNA, 20 nt, Artificial Sequence
  Synthetic oligonucleotide: BID-547
ugucccaguggcgaccugga

SEQ ID NO: 11304 - RNA, 20 nt, Artificial Sequence
  Synthetic oligonucleotide: BID-58
gucccaguggcgaccuggaa

SEQ ID NO: 11305 - RNA, 20 nt, Artificial Sequence
  Synthetic oligonucleotide: BID-549
gcgaccuggaaagggacaca

SEQ ID NO: 11306 - RNA, 20 nt, Artificial Sequence
  Synthetic oligonucleotide: BID-550
ccuggaaagggacacacaga

SEQ ID NO: 11307 - RNA, 20 nt, Artificial Sequence
  Synthetic oligonucleotide: BID-551
cccagcccccagcccacuua

SEQ ID NO: 11308 - RNA, 20 nt, Artificial Sequence
  Synthetic oligonucleotide: BID-552
gcccggccccucgcugccca

SEQ ID NO: 11309 - RNA, 20 nt, Artificial Sequence
  Synthetic oligonucleotide: BID-553
ccgcugcacauucguauuug

SEQ ID NO: 11310 - RNA, 20 nt, Artificial Sequence
  Synthetic oligonucleotide: BID-554
ugcacauucguauuuguuga

SEQ ID NO: 11311 - RNA, 20 nt, Artificial Sequence
  Synthetic oligonucleotide: BID-555
cauucguauuuguugaauga

SEQ ID NO: 11312 - RNA, 20 nt, Artificial Sequence
  Synthetic oligonucleotide: BID-556
cguauuuguugaaugaauga

SEQ ID NO: 11313 - RNA, 17 nt, Artificial Sequence
  Synthetic oligonucleotide: BID-557
ccgaccggcugguguuc

SEQ ID NO: 11314 - RNA, 17 nt, Artificial Sequence
  Synthetic oligonucleotide: BID-558
cugguguuccugagcug

SEQ ID NO: 11315 - RNA, 17 nt, Artificial Sequence
  Synthetic oligonucleotide: BID-559
caggccguucaccaggc

SEQ ID NO: 11316 - RNA, 17 nt, Artificial Sequence
  Synthetic oligonucleotide: BID-256
aggccguucaccaggcc

SEQ ID NO: 11317 - RNA, 17 nt, Artificial Sequence
  Synthetic oligonucleotide: BID-561
gccguucaccaggcccg

SEQ ID NO: 11318 - RNA, 17 nt, Artificial Sequence
  Synthetic oligonucleotide: BID-242
ccguucaccaggcccgg

SEQ ID NO: 11319 - RNA, 17 nt, Artificial Sequence
  Synthetic oligonucleotide: BID-563
uccaugcuguccccgac

SEQ ID NO: 11320 - RNA, 17 nt, Artificial Sequence
  Synthetic oligonucleotide: BID-564
ugcuguccccgaccugg

SEQ ID NO: 11321 - RNA, 17 nt, Artificial Sequence
  Synthetic oligonucleotide: BID-565
aggugccuggcaauauu

SEQ ID NO: 11322 - RNA, 17 nt, Artificial Sequence
  Synthetic oligonucleotide: BID-566
gaugucuucuugacuuu

SEQ ID NO: 11323 - RNA, 17 nt, Artificial Sequence
  Synthetic oligonucleotide: BID-567
cagaaucuguguucagg

SEQ ID NO: 11324 - RNA, 17 nt, Artificial Sequence
  Synthetic oligonucleotide: BID-268
agaaucuguguucaggc

SEQ ID NO: 11325 - RNA, 17 nt, Artificial Sequence
  Synthetic oligonucleotide: BID-569
uguucaggcaggggcgg

SEQ ID NO: 11326 - RNA, 17 nt, Artificial Sequence
  Synthetic oligonucleotide: BID-570
gccucuauucuucccaa

SEQ ID NO: 11327 - RNA, 17 nt, Artificial Sequence
  Synthetic oligonucleotide: BID-165
ccucuauucuucccaag

SEQ ID NO: 11328 - RNA, 17 nt, Artificial Sequence
  Synthetic oligonucleotide: BID-178
cucuauucuucccaagc

SEQ ID NO: 11329 - RNA, 17 nt, Artificial Sequence
  Synthetic oligonucleotide: BID-573
ucaucguagcccuccca

SEQ ID NO: 11330 - RNA, 17 nt, Artificial Sequence
  Synthetic oligonucleotide: BID-151
caucguagcccucccac

SEQ ID NO: 11331 - RNA, 17 nt, Artificial Sequence
  Synthetic oligonucleotide: BID-152
aucguagcccucccacu

SEQ ID NO: 11332 - RNA, 17 nt, Artificial Sequence
  Synthetic oligonucleotide: BID-148
ucguagcccucccacug

SEQ ID NO: 11333 - RNA, 17 nt, Artificial Sequence
  Synthetic oligonucleotide: BID-577
agugcguccagcucucu

SEQ ID NO: 11334 - RNA, 17 nt, Artificial Sequence
  Synthetic oligonucleotide: BID-167
gugcguccagcucucug

SEQ ID NO: 11335 - RNA, 17 nt, Artificial Sequence
  Synthetic oligonucleotide: BID-579
ucugcggaagcuguugu

SEQ ID NO: 11336 - RNA, 17 nt, Artificial Sequence
  Synthetic oligonucleotide: BID-580
cuguugucagaacagcu

SEQ ID NO: 11337 - RNA, 17 nt, Artificial Sequence
  Synthetic oligonucleotide: BID-173
uguugucagaacagcuu

SEQ ID NO: 11338 - RNA, 17 nt, Artificial Sequence
  Synthetic oligonucleotide: BID-582
uugucagaacagcuuug

SEQ ID NO: 11339 - RNA, 17 nt, Artificial Sequence
  Synthetic oligonucleotide: BID-177
ugucagaacagcuuugg

SEQ ID NO: 11340 - RNA, 17 nt, Artificial Sequence
  Synthetic oligonucleotide: BID-584
uugugaugcacucaucc

SEQ ID NO: 11341 - RNA, 17 nt, Artificial Sequence
  Synthetic oligonucleotide: BID-585
ugcacucaucccugagg

SEQ ID NO: 11342 - RNA, 17 nt, Artificial Sequence
  Synthetic oligonucleotide: BID-168
gcacucaucccugaggc

SEQ ID NO: 11343 - RNA, 17 nt, Artificial Sequence
  Synthetic oligonucleotide: BID-587
cuggaaccguuguugac

SEQ ID NO: 11344 - RNA, 17 nt, Artificial Sequence
  Synthetic oligonucleotide: BID-588
ggaaccguuguugaccu

SEQ ID NO: 11345 - RNA, 17 nt, Artificial Sequence
  Synthetic oligonucleotide: BID-157
gaaccguuguugaccug

SEQ ID NO: 11346 - RNA, 17 nt, Artificial Sequence
  Synthetic oligonucleotide: BID-143
aaccguuguugaccuga

SEQ ID NO: 11347 - RNA, 17 nt, Artificial Sequence
  Synthetic oligonucleotide: BID-150
accguuguugaccugag

SEQ ID NO: 11348 - RNA, 17 nt, Artificial Sequence
  Synthetic oligonucleotide: BID-592
uuguugaccugagggga

SEQ ID NO: 11349 - RNA, 17 nt, Artificial Sequence
  Synthetic oligonucleotide: BID-175
uguugaccugaggggaa

SEQ ID NO: 11350 - RNA, 17 nt, Artificial Sequence
  Synthetic oligonucleotide: BID-170
guugaccugaggggaaa

SEQ ID NO: 11351 - RNA, 17 nt, Artificial Sequence
  Synthetic oligonucleotide: BID-172
uugaccugaggggaaag

SEQ ID NO: 11352 - RNA, 17 nt, Artificial Sequence
  Synthetic oligonucleotide: BID-596
ugaggggaaaggggagu

SEQ ID NO: 11353 - RNA, 17 nt, Artificial Sequence
  Synthetic oligonucleotide: BID-191
gaggggaaaggggaguc

SEQ ID NO: 11354 - RNA, 17 nt, Artificial Sequence
  Synthetic oligonucleotide: BID-598
aaaggggagucaggaag

SEQ ID NO: 11355 - RNA, 17 nt, Artificial Sequence
  Synthetic oligonucleotide: BID-599
accucacaguccauggc

SEQ ID NO: 11356 - RNA, 17 nt, Artificial Sequence
  Synthetic oligonucleotide: BID-600
agugucccaguggcgac

SEQ ID NO: 11357 - RNA, 17 nt, Artificial Sequence
  Synthetic oligonucleotide: BID-81
gugucccaguggcgacc

SEQ ID NO: 11358 - RNA, 17 nt, Artificial Sequence
  Synthetic oligonucleotide: BID-602
cccaguggcgaccugga

SEQ ID NO: 11359 - RNA, 17 nt, Artificial Sequence
  Synthetic oligonucleotide: BID-91
ccaguggcgaccuggaa

SEQ ID NO: 11360 - RNA, 17 nt, Artificial Sequence
  Synthetic oligonucleotide: BID-604
accuggaaagggacaca

SEQ ID NO: 11361 - RNA, 17 nt, Artificial Sequence
  Synthetic oligonucleotide: BID-605
ggaaagggacacacaga

SEQ ID NO: 11362 - RNA, 17 nt, Artificial Sequence
  Synthetic oligonucleotide: BID-606
agcccccagcccacuua

SEQ ID NO: 11363 - RNA, 17 nt, Artificial Sequence
  Synthetic oligonucleotide: BID-607
cggccccucgcugccca

SEQ ID NO: 11364 - RNA, 17 nt, Artificial Sequence
  Synthetic oligonucleotide: BID-608
cugcacauucguauuug

SEQ ID NO: 11365 - RNA, 17 nt, Artificial Sequence
  Synthetic oligonucleotide: BID-609
acauucguauuuguuga

SEQ ID NO: 11366 - RNA, 17 nt, Artificial Sequence
  Synthetic oligonucleotide: BID-610
ucguauuuguugaauga

SEQ ID NO: 11367 - RNA, 17 nt, Artificial Sequence
  Synthetic oligonucleotide: BID-611
auuuguugaaugaauga

SEQ ID NO: 11368 - RNA, 20 nt, Artificial Sequence
  Synthetic oligonucleotide: BID-612
guucugugugccccucugug

SEQ ID NO: 11369 - RNA, 20 nt, Artificial Sequence
  Synthetic oligonucleotide: BID-613
gugugccccucugugcagga

SEQ ID NO: 11370 - RNA, 20 nt, Artificial Sequence
  Synthetic oligonucleotide: BID-279
ugugccccucugugcaggac

SEQ ID NO: 11371 - RNA, 20 nt, Artificial Sequence
  Synthetic oligonucleotide: BID-615
cccucugugcaggaccggaa

SEQ ID NO: 11372 - RNA, 20 nt, Artificial Sequence
  Synthetic oligonucleotide: BID-280
ccucugugcaggaccggaac

SEQ ID NO: 11373 - RNA, 20 nt, Artificial Sequence
  Synthetic oligonucleotide: BID-617
acagggaccuggccacugcc

SEQ ID NO: 11374 - RNA, 20 nt, Artificial Sequence
  Synthetic oligonucleotide: BID-283
cagggaccuggccacugccc

SEQ ID NO: 11375 - RNA, 20 nt, Artificial Sequence
  Synthetic oligonucleotide: BID-619
cagcugcugcaggccuaccc

SEQ ID NO: 11376 - RNA, 20 nt, Artificial Sequence
  Synthetic oligonucleotide: BID-620
ugcaggccuacccuagagac

SEQ ID NO: 11377 - RNA, 20 nt, Artificial Sequence
  Synthetic oligonucleotide: BID-285
gcaggccuacccuagagaca

SEQ ID NO: 11378 - RNA, 20 nt, Artificial Sequence
  Synthetic oligonucleotide: BID-622
aggccuacccuagagacaug

SEQ ID NO: 11379 - RNA, 20 nt, Artificial Sequence
  Synthetic oligonucleotide: BID-623
ccuacccuagagacauggag

SEQ ID NO: 11380 - RNA, 20 nt, Artificial Sequence
  Synthetic oligonucleotide: BID-286
cuacccuagagacauggaga

SEQ ID NO: 11381 - RNA, 20 nt, Artificial Sequence
  Synthetic oligonucleotide: BID-625
acccuagagacauggagaag

SEQ ID NO: 11382 - RNA, 20 nt, Artificial Sequence
  Synthetic oligonucleotide: BID-626
ugcuggcccugcugcuggcc

SEQ ID NO: 11383 - RNA, 20 nt, Artificial Sequence
  Synthetic oligonucleotide: BID-627
gugaugucuuucacacaaca

SEQ ID NO: 11384 - RNA, 20 nt, Artificial Sequence
  Synthetic oligonucleotide: BID-628
caacagugaauuuuauuaac

SEQ ID NO: 11385 - RNA, 20 nt, Artificial Sequence
  Synthetic oligonucleotide: BID-629
accagaaccuacgcaccuac

SEQ ID NO: 11386 - RNA, 20 nt, Artificial Sequence
  Synthetic oligonucleotide: BID-630
cagaaccuacgcaccuacgu

SEQ ID NO: 11387 - RNA, 20 nt, Artificial Sequence
  Synthetic oligonucleotide: BID-292
agaaccuacgcaccuacgug

SEQ ID NO: 11388 - RNA, 20 nt, Artificial Sequence
  Synthetic oligonucleotide: BID-632
accuacgugaggagcuuagc

SEQ ID NO: 11389 - RNA, 20 nt, Artificial Sequence
  Synthetic oligonucleotide: BID-633
aggagcuuagccagaaaugu

SEQ ID NO: 11390 - RNA, 20 nt, Artificial Sequence
  Synthetic oligonucleotide: BID-634
agccagaaauguaagaaccc

SEQ ID NO: 11391 - RNA, 17 nt, Artificial Sequence
  Synthetic oligonucleotide: BID-635
cugugugccccucugug

SEQ ID NO: 11392 - RNA, 17 nt, Artificial Sequence
  Synthetic oligonucleotide: BID-636
ugccccucugugcagga

SEQ ID NO: 11393 - RNA, 17 nt, Artificial Sequence
  Synthetic oligonucleotide: BID-295
gccccucugugcaggac

SEQ ID NO: 11394 - RNA, 17 nt, Artificial Sequence
  Synthetic oligonucleotide: BID-638
ucugugcaggaccggaa

SEQ ID NO: 11395 - RNA, 17 nt, Artificial Sequence
  Synthetic oligonucleotide: BID-296
cugugcaggaccggaac

SEQ ID NO: 11396 - RNA, 17 nt, Artificial Sequence
  Synthetic oligonucleotide: BID-640
gggaccuggccacugcc

SEQ ID NO: 11397 - RNA, 17 nt, Artificial Sequence
  Synthetic oligonucleotide: BID-299
ggaccuggccacugccc

SEQ ID NO: 11398 - RNA, 17 nt, Artificial Sequence
  Synthetic oligonucleotide: BID-642
cugcugcaggccuaccc

SEQ ID NO: 11399 - RNA, 17 nt, Artificial Sequence
  Synthetic oligonucleotide: BID-643
aggccuacccuagagac

SEQ ID NO: 11400 - RNA, 17 nt, Artificial Sequence
  Synthetic oligonucleotide: BID-301
ggccuacccuagagaca

SEQ ID NO: 11401 - RNA, 17 nt, Artificial Sequence
  Synthetic oligonucleotide: BID-645
ccuacccuagagacaug

SEQ ID NO: 11402 - RNA, 17 nt, Artificial Sequence
  Synthetic oligonucleotide: BID-646
acccuagagacauggag

SEQ ID NO: 11403 - RNA, 17 nt, Artificial Sequence
  Synthetic oligonucleotide: BID-302
cccuagagacauggaga

SEQ ID NO: 11404 - RNA, 17 nt, Artificial Sequence
  Synthetic oligonucleotide: BID-648
cuagagacauggagaag

SEQ ID NO: 11405 - RNA, 17 nt, Artificial Sequence
  Synthetic oligonucleotide: BID-649
uggcccugcugcuggcc

SEQ ID NO: 11406 - RNA, 17 nt, Artificial Sequence
  Synthetic oligonucleotide: BID-650
augucuuucacacaaca

SEQ ID NO: 11407 - RNA, 17 nt, Artificial Sequence
  Synthetic oligonucleotide: BID-651
cagugaauuuuauuaac

SEQ ID NO: 11408 - RNA, 17 nt, Artificial Sequence
  Synthetic oligonucleotide: BID-652
agaaccuacgcaccuac

SEQ ID NO: 11409 - RNA, 17 nt, Artificial Sequence
  Synthetic oligonucleotide: BID-653
aaccuacgcaccuacgu

SEQ ID NO: 11410 - RNA, 17 nt, Artificial Sequence
  Synthetic oligonucleotide: BID-308
accuacgcaccuacgug

SEQ ID NO: 11411 - RNA, 17 nt, Artificial Sequence
  Synthetic oligonucleotide: BID-655
uacgugaggagcuuagc

SEQ ID NO: 11412 - RNA, 17 nt, Artificial Sequence
  Synthetic oligonucleotide: BID-656
agcuuagccagaaaugu

SEQ ID NO: 11413 - RNA, 17 nt, Artificial Sequence
  Synthetic oligonucleotide: BID-657
cagaaauguaagaaccc

SEQ ID NO: 11414 - RNA, 20 nt, Artificial Sequence
  Synthetic oligonucleotide: BID-658
uuaauaaaauucacuguugu

SEQ ID NO: 11415 - RNA, 20 nt, Artificial Sequence
  Synthetic oligonucleotide: BID-659
acuguugugugaaagacauc

SEQ ID NO: 11416 - RNA, 20 nt, Artificial Sequence
  Synthetic oligonucleotide: BID-315
cuguugugugaaagacauca

SEQ ID NO: 11417 - RNA, 20 nt, Artificial Sequence
  Synthetic oligonucleotide: BID-661
ugugaaagacaucacggagc

SEQ ID NO: 11418 - RNA, 20 nt, Artificial Sequence
  Synthetic oligonucleotide: BID-662
gccaccuucuuggccagcag

SEQ ID NO: 11419 - RNA, 20 nt, Artificial Sequence
  Synthetic oligonucleotide: BID-663
cuucuccuucuccaugucuc

SEQ ID NO: 11420 - RNA, 20 nt, Artificial Sequence
  Synthetic oligonucleotide: BID-664
uaggccugcagcagcugcuc

SEQ ID NO: 11421 - RNA, 20 nt, Artificial Sequence
  Synthetic oligonucleotide: BID-665
gucccuguuccgguccugca

SEQ ID NO: 11422 - RNA, 20 nt, Artificial Sequence
  Synthetic oligonucleotide: BID-666
cccuguuccgguccugcaca

SEQ ID NO: 11423 - RNA, 20 nt, Artificial Sequence
  Synthetic oligonucleotide: BID-331
ccuguuccgguccugcacag

SEQ ID NO: 11424 - RNA, 20 nt, Artificial Sequence
  Synthetic oligonucleotide: BID-668
guccugcacagaggggcaca

SEQ ID NO: 11425 - RNA, 17 nt, Artificial Sequence
  Synthetic oligonucleotide: BID-669
auaaaauucacuguugu

SEQ ID NO: 11426 - RNA, 17 nt, Artificial Sequence
  Synthetic oligonucleotide: BID-670
guugugugaaagacauc

SEQ ID NO: 11427 - RNA, 17 nt, Artificial Sequence
  Synthetic oligonucleotide: BID-340
uugugugaaagacauca

SEQ ID NO: 11428 - RNA, 17 nt, Artificial Sequence
  Synthetic oligonucleotide: BID-672
gaaagacaucacggagc

SEQ ID NO: 11429 - RNA, 17 nt, Artificial Sequence
  Synthetic oligonucleotide: BID-673
accuucuuggccagcag

SEQ ID NO: 11430 - RNA, 17 nt, Artificial Sequence
  Synthetic oligonucleotide: BID-674
cuccuucuccaugucuc

SEQ ID NO: 11431 - RNA, 17 nt, Artificial Sequence
  Synthetic oligonucleotide: BID-675
gccugcagcagcugcuc

SEQ ID NO: 11432 - RNA, 17 nt, Artificial Sequence
  Synthetic oligonucleotide: BID-676
ccuguuccgguccugca

SEQ ID NO: 11433 - RNA, 17 nt, Artificial Sequence
  Synthetic oligonucleotide: BID-677
uguuccgguccugcaca

SEQ ID NO: 11434 - RNA, 17 nt, Artificial Sequence
  Synthetic oligonucleotide: BID-356
guuccgguccugcacag

SEQ ID NO: 11435 - RNA, 17 nt, Artificial Sequence
  Synthetic oligonucleotide: BID-679
cugcacagaggggcaca

SEQ ID NO: 11436 - RNA, 20 nt, Artificial Sequence
  Synthetic oligonucleotide: BID-680
ggccggcuggaggagcacag

SEQ ID NO: 11437 - RNA, 20 nt, Artificial Sequence
  Synthetic oligonucleotide: BID-681
cucugccgccccugccugaa

SEQ ID NO: 11438 - RNA, 17 nt, Artificial Sequence
  Synthetic oligonucleotide: BID-682
cggcuggaggagcacag

SEQ ID NO: 11439 - RNA, 17 nt, Artificial Sequence
  Synthetic oligonucleotide: BID-683
ugccgccccugccugaa

SEQ ID NO: 11440 - RNA, 20 nt, Artificial Sequence
  Synthetic oligonucleotide: BID-2075
gaaaacccgcgggccuggcc

SEQ ID NO: 11441 - RNA, 20 nt, Artificial Sequence
  Synthetic oligonucleotide: BID-2171
gaaagaccacggugugggcg

SEQ ID NO: 11442 - RNA, 20 nt, Artificial Sequence
  Synthetic oligonucleotide: BID-1988
gaagcgcgcggggcgccaua

SEQ ID NO: 11443 - RNA, 20 nt, Artificial Sequence
  Synthetic oligonucleotide: BID-2099
gaaugaccccaggggacccu

SEQ ID NO: 11444 - RNA, 20 nt, Artificial Sequence
  Synthetic oligonucleotide: BID-2254
gacuacccgcuuccuccuua

SEQ ID NO: 11445 - RNA, 20 nt, Artificial Sequence
  Synthetic oligonucleotide: BID-2073
gaggagaaaacccgcgggcc

SEQ ID NO: 11446 - RNA, 20 nt, Artificial Sequence
  Synthetic oligonucleotide: BID-2040
gagggucggguccgccucgg

SEQ ID NO: 11447 - RNA, 20 nt, Artificial Sequence
  Synthetic oligonucleotide: BID-1989
gcgcgcggggcgccauaagg

SEQ ID NO: 11448 - RNA, 20 nt, Artificial Sequence
  Synthetic oligonucleotide: BID-5
gcggauucuguaagugggcu

SEQ ID NO: 11449 - RNA, 20 nt, Artificial Sequence
  Synthetic oligonucleotide: BID-2204
gcgggagagacccggcccuc

SEQ ID NO: 11450 - RNA, 20 nt, Artificial Sequence
  Synthetic oligonucleotide: BID-2083
gcuccucccgagcggagcuc

SEQ ID NO: 11451 - RNA, 20 nt, Artificial Sequence
  Synthetic oligonucleotide: BID-2238
gcucggcgcguaccccggga

SEQ ID NO: 11452 - RNA, 20 nt, Artificial Sequence
  Synthetic oligonucleotide: BID-2039
gcugagggucggguccgccu

SEQ ID NO: 11453 - RNA, 20 nt, Artificial Sequence
  Synthetic oligonucleotide: BID-2174
ggauuccgauccgccggcaa

SEQ ID NO: 11454 - RNA, 20 nt, Artificial Sequence
  Synthetic oligonucleotide: BID-2079
ggccacccuugccggcggau

SEQ ID NO: 11455 - RNA, 20 nt, Artificial Sequence
  Synthetic oligonucleotide: BID-2237
ggcucggcgcguaccccggg

SEQ ID NO: 11456 - RNA, 20 nt, Artificial Sequence
  Synthetic oligonucleotide: BID-2173
gggauuccgauccgccggca

SEQ ID NO: 11457 - RNA, 20 nt, Artificial Sequence
  Synthetic oligonucleotide: BID-1991
gggcgccauaaggaggaagc

SEQ ID NO: 11458 - RNA, 20 nt, Artificial Sequence
  Synthetic oligonucleotide: BID-2172
gggcggggauuccgauccgc

SEQ ID NO: 11459 - RNA, 20 nt, Artificial Sequence
  Synthetic oligonucleotide: BID-2088
ggucagagcggccgcuuacu

SEQ ID NO: 11460 - RNA, 20 nt, Artificial Sequence
  Synthetic oligonucleotide: BID-2041
ggucggguccgccucggagg

SEQ ID NO: 11461 - RNA, 20 nt, Artificial Sequence
  Synthetic oligonucleotide: BID-2089
gucagagcggccgcuuacug

SEQ ID NO: 11462 - RNA, 20 nt, Artificial Sequence
  Synthetic oligonucleotide: BID-1992
gucgaccguguccgcgcgcc

SEQ ID NO: 11463 - RNA, 20 nt, Artificial Sequence
  Synthetic oligonucleotide: BID-2042
gucggguccgccucggaggc

SEQ ID NO: 11464 - RNA, 20 nt, Artificial Sequence
  Synthetic oligonucleotide: BID-2253
gucucccaggcgcgcggaca

SEQ ID NO: 11465 - RNA, 20 nt, Artificial Sequence
  Synthetic oligonucleotide: BID-2078
gugcaggccacccuugccgg

SEQ ID NO: 11466 - RNA, 17 nt, Artificial Sequence
  Synthetic oligonucleotide: BID-31
gaaugugcagcggugcu

SEQ ID NO: 11467 - RNA, 17 nt, Artificial Sequence
  Synthetic oligonucleotide: BID-2263
gaccguguccgcgcgcc

SEQ ID NO: 11468 - RNA, 17 nt, Artificial Sequence
  Synthetic oligonucleotide: BID-2344
gagaaaacccgcgggcc

SEQ ID NO: 11469 - RNA, 17 nt, Artificial Sequence
  Synthetic oligonucleotide: BID-2310
gagggucggguccgccu

SEQ ID NO: 11470 - RNA, 17 nt, Artificial Sequence
  Synthetic oligonucleotide: BID-42
gauucuguaagugggcu

SEQ ID NO: 11471 - RNA, 17 nt, Artificial Sequence
  Synthetic oligonucleotide: BID-2437
gcaggugucugcggugc

SEQ ID NO: 11472 - RNA, 17 nt, Artificial Sequence
  Synthetic oligonucleotide: BID-2414
gccgguccagccgcaga

SEQ ID NO: 11473 - RNA, 17 nt, Artificial Sequence
  Synthetic oligonucleotide: BID-2259
gcgcgcggggcgccaua

SEQ ID NO: 11474 - RNA, 17 nt, Artificial Sequence
  Synthetic oligonucleotide: BID-2435
gcucgggaggagccggc

SEQ ID NO: 11475 - RNA, 17 nt, Artificial Sequence
  Synthetic oligonucleotide: BID-2476
ggagagacccggcccuc

SEQ ID NO: 11476 - RNA, 17 nt, Artificial Sequence
  Synthetic oligonucleotide: BID-2342
ggagaggagaaaacccg

SEQ ID NO: 11477 - RNA, 17 nt, Artificial Sequence
  Synthetic oligonucleotide: BID-38
ggauucuguaagugggc

SEQ ID NO: 11478 - RNA, 17 nt, Artificial Sequence
  Synthetic oligonucleotide: BID-2508
ggcucggcgcguacccc

SEQ ID NO: 11479 - RNA, 17 nt, Artificial Sequence
  Synthetic oligonucleotide: BID-2430
gggcgagccccaguaag

SEQ ID NO: 11480 - RNA, 17 nt, Artificial Sequence
  Synthetic oligonucleotide: BID-2507
gggcucggcgcguaccc

SEQ ID NO: 11481 - RNA, 17 nt, Artificial Sequence
  Synthetic oligonucleotide: BID-2313
ggguccgccucggaggc

SEQ ID NO: 11482 - RNA, 17 nt, Artificial Sequence
  Synthetic oligonucleotide: BID-2454
ggguuuucuccucuccg

SEQ ID NO: 11483 - RNA, 17 nt, Artificial Sequence
  Synthetic oligonucleotide: BID-28
ggucaugauggcucggu

SEQ ID NO: 11484 - RNA, 17 nt, Artificial Sequence
  Synthetic oligonucleotide: BID-2314
gguccgccucggaggcg

SEQ ID NO: 11485 - RNA, 17 nt, Artificial Sequence
  Synthetic oligonucleotide: BID-2311
ggucggguccgccucgg

SEQ ID NO: 11486 - RNA, 17 nt, Artificial Sequence
  Synthetic oligonucleotide: BID-27
gugcggauucuguaagu

SEQ ID NO: 11487 - RNA, 20 nt, Artificial Sequence
  Synthetic oligonucleotide: BID-2142
aaggccgguccagccgcaga

SEQ ID NO: 11488 - RNA, 20 nt, Artificial Sequence
  Synthetic oligonucleotide: BID-15
acagugcggauucuguaagu

SEQ ID NO: 11489 - RNA, 20 nt, Artificial Sequence
  Synthetic oligonucleotide: BID-2155
acaucauugccagugcucua

SEQ ID NO: 11490 - RNA, 20 nt, Artificial Sequence
  Synthetic oligonucleotide: BID-4
acgaaugugcagcggugcug

SEQ ID NO: 11491 - RNA, 20 nt, Artificial Sequence
  Synthetic oligonucleotide: BID-2189
agccuuccccgccuccgagg

SEQ ID NO: 11492 - RNA, 20 nt, Artificial Sequence
  Synthetic oligonucleotide: BID-2158
agcgggcgagccccaguaag

SEQ ID NO: 11493 - RNA, 20 nt, Artificial Sequence
  Synthetic oligonucleotide: BID-1
auacgaaugugcagcggugc

SEQ ID NO: 11494 - RNA, 20 nt, Artificial Sequence
  Synthetic oligonucleotide: BID-2
caacaaauacgaaugugcag

SEQ ID NO: 11495 - RNA, 20 nt, Artificial Sequence
  Synthetic oligonucleotide: BID-2215
caccgcggucgggcccaggg

SEQ ID NO: 11496 - RNA, 20 nt, Artificial Sequence
  Synthetic oligonucleotide: BID-2071
cccggagaggagaaaacccg

SEQ ID NO: 11497 - RNA, 20 nt, Artificial Sequence
  Synthetic oligonucleotide: BID-2013
ccgaccgcggugggagccag

SEQ ID NO: 11498 - RNA, 20 nt, Artificial Sequence
  Synthetic oligonucleotide: BID-2181
ccgcggguuuucuccucucc

SEQ ID NO: 11499 - RNA, 20 nt, Artificial Sequence
  Synthetic oligonucleotide: BID-2165
ccggcaggugucugcggugc

SEQ ID NO: 11500 - RNA, 20 nt, Artificial Sequence
  Synthetic oligonucleotide: BID-2182
cgcggguuuucuccucuccg

SEQ ID NO: 11501 - RNA, 20 nt, Artificial Sequence
  Synthetic oligonucleotide: BID-2080
cggaauccccgcccacaccg

SEQ ID NO: 11502 - RNA, 20 nt, Artificial Sequence
  Synthetic oligonucleotide: BID-17
cggauucuguaagugggcug

SEQ ID NO: 11503 - RNA, 20 nt, Artificial Sequence
  Synthetic oligonucleotide: BID-2176
cggcaaggguggccugcacc

SEQ ID NO: 11504 - RNA, 20 nt, Artificial Sequence
  Synthetic oligonucleotide: BID-2087
cggucagagcggccgcuuac

SEQ ID NO: 11505 - RNA, 20 nt, Artificial Sequence
  Synthetic oligonucleotide: BID-2213
cucccaccgcggucgggccc

SEQ ID NO: 11506 - RNA, 20 nt, Artificial Sequence
  Synthetic oligonucleotide: BID-2084
cuccucccgagcggagcuca

SEQ ID NO: 11507 - RNA, 20 nt, Artificial Sequence
  Synthetic oligonucleotide: BID-2212
cucuggcucccaccgcgguc

SEQ ID NO: 11508 - RNA, 20 nt, Artificial Sequence
  Synthetic oligonucleotide: BID-2086
cugacaaagcgcggucagag

SEQ ID NO: 11509 - RNA, 20 nt, Artificial Sequence
  Synthetic oligonucleotide: BID-2235
cuggggcucggcgcguaccc

SEQ ID NO: 11510 - RNA, 20 nt, Artificial Sequence
  Synthetic oligonucleotide: BID-14
uacgaaugugcagcggugcu

SEQ ID NO: 11511 - RNA, 20 nt, Artificial Sequence
  Synthetic oligonucleotide: BID-2214
ucccaccgcggucgggccca

SEQ ID NO: 11512 - RNA, 20 nt, Artificial Sequence
  Synthetic oligonucleotide: BID-2163
uccgcucgggaggagccggc

SEQ ID NO: 11513 - RNA, 20 nt, Artificial Sequence
  Synthetic oligonucleotide: BID-1993
ucgaccguguccgcgcgccu

SEQ ID NO: 11514 - RNA, 20 nt, Artificial Sequence
  Synthetic oligonucleotide: BID-2090
ucgcccgcuccuuagagcac

SEQ ID NO: 11515 - RNA, 20 nt, Artificial Sequence
  Synthetic oligonucleotide: BID-2043
ucggguccgccucggaggcg

SEQ ID NO: 11516 - RNA, 20 nt, Artificial Sequence
  Synthetic oligonucleotide: BID-6
ugcggauucuguaagugggc

SEQ ID NO: 11517 - RNA, 20 nt, Artificial Sequence
  Synthetic oligonucleotide: BID-2236
uggggcucggcgcguacccc

SEQ ID NO: 11518 - RNA, 20 nt, Artificial Sequence
  Synthetic oligonucleotide: BID-3
uggggucaugauggcucggu

SEQ ID NO: 11519 - RNA, 20 nt, Artificial Sequence
  Synthetic oligonucleotide: BID-2175
uuccgauccgccggcaaggg

SEQ ID NO: 11520 - RNA, 17 nt, Artificial Sequence
  Synthetic oligonucleotide: BID-2346
aacccgcgggccuggcc

SEQ ID NO: 11521 - RNA, 17 nt, Artificial Sequence
  Synthetic oligonucleotide: BID-2351
aauccccgcccacaccg

SEQ ID NO: 11522 - RNA, 17 nt, Artificial Sequence
  Synthetic oligonucleotide: BID-35
aaugugcagcggugcug

SEQ ID NO: 11523 - RNA, 17 nt, Artificial Sequence
  Synthetic oligonucleotide: BID-2357
acaaagcgcggucagag

SEQ ID NO: 11524 - RNA, 17 nt, Artificial Sequence
  Synthetic oligonucleotide: BID-2284
accgcggugggagccag

SEQ ID NO: 11525 - RNA, 17 nt, Artificial Sequence
  Synthetic oligonucleotide: BID-2264
accguguccgcgcgccu

SEQ ID NO: 11526 - RNA, 17 nt, Artificial Sequence
  Synthetic oligonucleotide: BID-2443
agaccacggugugggcg

SEQ ID NO: 11527 - RNA, 17 nt, Artificial Sequence
  Synthetic oligonucleotide: BID-2360
agagcggccgcuuacug

SEQ ID NO: 11528 - RNA, 17 nt, Artificial Sequence
  Synthetic oligonucleotide: BID-2445
auuccgauccgccggca

SEQ ID NO: 11529 - RNA, 17 nt, Artificial Sequence
  Synthetic oligonucleotide: BID-41
auucuguaagugggcug

SEQ ID NO: 11530 - RNA, 17 nt, Artificial Sequence
  Synthetic oligonucleotide: BID-33
caaauacgaaugugcag

SEQ ID NO: 11531 - RNA, 17 nt, Artificial Sequence
  Synthetic oligonucleotide: BID-2448
caaggguggccugcacc

SEQ ID NO: 11532 - RNA, 17 nt, Artificial Sequence
  Synthetic oligonucleotide: BID-2350
cacccuugccggcggau

SEQ ID NO: 11533 - RNA, 17 nt, Artificial Sequence
  Synthetic oligonucleotide: BID-2486
caccgcggucgggccca

SEQ ID NO: 11534 - RNA, 17 nt, Artificial Sequence
  Synthetic oligonucleotide: BID-2359
cagagcggccgcuuacu

SEQ ID NO: 11535 - RNA, 17 nt, Artificial Sequence
  Synthetic oligonucleotide: BID-2349
caggccacccuugccgg

SEQ ID NO: 11536 - RNA, 17 nt, Artificial Sequence
  Synthetic oligonucleotide: BID-2485
ccaccgcggucgggccc

SEQ ID NO: 11537 - RNA, 17 nt, Artificial Sequence
  Synthetic oligonucleotide: BID-2361
cccgcuccuuagagcac

SEQ ID NO: 11538 - RNA, 17 nt, Artificial Sequence
  Synthetic oligonucleotide: BID-2354
ccucccgagcggagcuc

SEQ ID NO: 11539 - RNA, 17 nt, Artificial Sequence
  Synthetic oligonucleotide: BID-26
cgaaugugcagcggugc

SEQ ID NO: 11540 - RNA, 17 nt, Artificial Sequence
  Synthetic oligonucleotide: BID-2447
cgauccgccggcaaggg

SEQ ID NO: 11541 - RNA, 17 nt, Artificial Sequence
  Synthetic oligonucleotide: BID-2262
cgccauaaggaggaagc

SEQ ID NO: 11542 - RNA, 17 nt, Artificial Sequence
  Synthetic oligonucleotide: BID-2260
cgcggggcgccauaagg

SEQ ID NO: 11543 - RNA, 17 nt, Artificial Sequence
  Synthetic oligonucleotide: BID-2487
cgcggucgggcccaggg

SEQ ID NO: 11544 - RNA, 17 nt, Artificial Sequence
  Synthetic oligonucleotide: BID-2510
cggcgcguaccccggga

SEQ ID NO: 11545 - RNA, 17 nt, Artificial Sequence
  Synthetic oligonucleotide: BID-2444
cggggauuccgauccgc

SEQ ID NO: 11546 - RNA, 17 nt, Artificial Sequence
  Synthetic oligonucleotide: BID-2312
cggguccgccucggagg

SEQ ID NO: 11547 - RNA, 17 nt, Artificial Sequence
  Synthetic oligonucleotide: BID-2453
cggguuuucuccucucc

SEQ ID NO: 11548 - RNA, 17 nt, Artificial Sequence
  Synthetic oligonucleotide: BID-2355
cucccgagcggagcuca

SEQ ID NO: 11549 - RNA, 17 nt, Artificial Sequence
  Synthetic oligonucleotide: BID-2461
cuuccccgccuccgagg

SEQ ID NO: 11550 - RNA, 17 nt, Artificial Sequence
  Synthetic oligonucleotide: BID-2526
uacccgcuuccuccuua

SEQ ID NO: 11551 - RNA, 17 nt, Artificial Sequence
  Synthetic oligonucleotide: BID-2358
ucagagcggccgcuuac

SEQ ID NO: 11552 - RNA, 17 nt, Artificial Sequence
  Synthetic oligonucleotide: BID-2427
ucauugccagugcucua

SEQ ID NO: 11553 - RNA, 17 nt, Artificial Sequence
  Synthetic oligonucleotide: BID-2525
ucccaggcgcgcggaca

SEQ ID NO: 11554 - RNA, 17 nt, Artificial Sequence
  Synthetic oligonucleotide: BID-2509
ucggcgcguaccccggg

SEQ ID NO: 11555 - RNA, 17 nt, Artificial Sequence
  Synthetic oligonucleotide: BID-2370
ugaccccaggggacccu

SEQ ID NO: 11556 - RNA, 17 nt, Artificial Sequence
  Synthetic oligonucleotide: BID-2484
uggcucccaccgcgguc

SEQ ID NO: 11557 - RNA, 17 nt, Artificial Sequence
  Synthetic oligonucleotide: BID-2446
uuccgauccgccggcaa

SEQ ID NO: 11558 - RNA, 17 nt, Artificial Sequence
  Synthetic oligonucleotide: BID-2256
ccgaaggaggaagcgcg

SEQ ID NO: 11559 - RNA, 17 nt, Artificial Sequence
  Synthetic oligonucleotide: BID-2411
gccccaacccugccugc

SEQ ID NO: 11560 - RNA, 20 nt, Artificial Sequence
  Synthetic oligonucleotide: BID-2190
gacccucagcaccgaccugc

SEQ ID NO: 11561 - RNA, 20 nt, Artificial Sequence
  Synthetic oligonucleotide: BID-2020
gagccagaggaggggaggcg

SEQ ID NO: 11562 - RNA, 20 nt, Artificial Sequence
  Synthetic oligonucleotide: BID-2224
gagcuccacgccggggcagg

SEQ ID NO: 11563 - RNA, 20 nt, Artificial Sequence
  Synthetic oligonucleotide: BID-2162
gagcuccgcucgggaggagc

SEQ ID NO: 11564 - RNA, 20 nt, Artificial Sequence
  Synthetic oligonucleotide: BID-2152
gagcucucccaggguccccu

SEQ ID NO: 11565 - RNA, 20 nt, Artificial Sequence
  Synthetic oligonucleotide: BID-2164
gaggagccggcaggugucug

SEQ ID NO: 11566 - RNA, 20 nt, Artificial Sequence
  Synthetic oligonucleotide: BID-2198
gaggagggcgcccgggcgga

SEQ ID NO: 11567 - RNA, 20 nt, Artificial Sequence
  Synthetic oligonucleotide: BID-2149
gagggcuucagagcucuccc

SEQ ID NO: 11568 - RNA, 20 nt, Artificial Sequence
  Synthetic oligonucleotide: BID-2203
gaggggaggcgggagagacc

SEQ ID NO: 11569 - RNA, 20 nt, Artificial Sequence
  Synthetic oligonucleotide: BID-2061
gaggggugcggggcgcgggg

SEQ ID NO: 11570 - RNA, 20 nt, Artificial Sequence
  Synthetic oligonucleotide: BID-2001
gagugcacccgcgccccucc

SEQ ID NO: 11571 - RNA, 20 nt, Artificial Sequence
  Synthetic oligonucleotide: BID-2097
gaguggcugaaugaccccag

SEQ ID NO: 11572 - RNA, 20 nt, Artificial Sequence
  Synthetic oligonucleotide: BID-7
gauggcucggugggcagcga

SEQ ID NO: 11573 - RNA, 20 nt, Artificial Sequence
  Synthetic oligonucleotide: BID-2232
gcaggcaggggucacgggcu

SEQ ID NO: 11574 - RNA, 20 nt, Artificial Sequence
  Synthetic oligonucleotide: BID-2038
gcaggucggugcugaggguc

SEQ ID NO: 11575 - RNA, 20 nt, Artificial Sequence
  Synthetic oligonucleotide: BID-2022
gccagaggaggggaggcggg

SEQ ID NO: 11576 - RNA, 20 nt, Artificial Sequence
  Synthetic oligonucleotide: BID-2147
gcccagccacuugguggcug

SEQ ID NO: 11577 - RNA, 20 nt, Artificial Sequence
  Synthetic oligonucleotide: BID-2255
gccccgcgcgcuuccuccuu

SEQ ID NO: 11578 - RNA, 20 nt, Artificial Sequence
  Synthetic oligonucleotide: BID-2010
gcccgcccugggcccgaccg

SEQ ID NO: 11579 - RNA, 20 nt, Artificial Sequence
  Synthetic oligonucleotide: BID-1998
gcccgcgcccccgcggcugg

SEQ ID NO: 11580 - RNA, 20 nt, Artificial Sequence
  Synthetic oligonucleotide: BID-2101
gcccucagccaccaaguggc

SEQ ID NO: 11581 - RNA, 20 nt, Artificial Sequence
  Synthetic oligonucleotide: BID-2012
gcccugggcccgaccgcggu

SEQ ID NO: 11582 - RNA, 20 nt, Artificial Sequence
  Synthetic oligonucleotide: BID-1987
gccgaaggaggaagcgcgcg

SEQ ID NO: 11583 - RNA, 20 nt, Artificial Sequence
  Synthetic oligonucleotide: BID-2194
gccgcgccgaggagggcgcc

SEQ ID NO: 11584 - RNA, 20 nt, Artificial Sequence
  Synthetic oligonucleotide: BID-2227
gccggggcaggcggcaggca

SEQ ID NO: 11585 - RNA, 20 nt, Artificial Sequence
  Synthetic oligonucleotide: BID-2005
gccugccgccugccccggcg

SEQ ID NO: 11586 - RNA, 20 nt, Artificial Sequence
  Synthetic oligonucleotide: BID-2000
gcgcccccgcggcuggaggg

SEQ ID NO: 11587 - RNA, 20 nt, Artificial Sequence
  Synthetic oligonucleotide: BID-2201
gcgcccgggcggaggggagg

SEQ ID NO: 11588 - RNA, 20 nt, Artificial Sequence
  Synthetic oligonucleotide: BID-1994
gcgccugggagacgcugccu

SEQ ID NO: 11589 - RNA, 20 nt, Artificial Sequence
  Synthetic oligonucleotide: BID-2250
gcgcgggcgcguccgggccg

SEQ ID NO: 11590 - RNA, 20 nt, Artificial Sequence
  Synthetic oligonucleotide: BID-2220
gcgggcccugagcuccacgc

SEQ ID NO: 11591 - RNA, 20 nt, Artificial Sequence
  Synthetic oligonucleotide: BID-2068
gcggggagggggaggggccg

SEQ ID NO: 11592 - RNA, 20 nt, Artificial Sequence
  Synthetic oligonucleotide: BID-2066
gcggggcgcggggaggggga

SEQ ID NO: 11593 - RNA, 20 nt, Artificial Sequence
  Synthetic oligonucleotide: BID-2249
gcgggggcgcgggcgcgucc

SEQ ID NO: 11594 - RNA, 20 nt, Artificial Sequence
  Synthetic oligonucleotide: BID-2217
gcggucgggcccagggcggg

SEQ ID NO: 11595 - RNA, 20 nt, Artificial Sequence
  Synthetic oligonucleotide: BID-2241
gcguaccccgggaggggcgc

SEQ ID NO: 11596 - RNA, 20 nt, Artificial Sequence
  Synthetic oligonucleotide: BID-2094
gcugcugggaaacuguugag

SEQ ID NO: 11597 - RNA, 20 nt, Artificial Sequence
  Synthetic oligonucleotide: BID-2131
gcugggggcugggccuucug

SEQ ID NO: 11598 - RNA, 20 nt, Artificial Sequence
  Synthetic oligonucleotide: BID-2170
ggaaagaccacggugugggc

SEQ ID NO: 11599 - RNA, 20 nt, Artificial Sequence
  Synthetic oligonucleotide: BID-2019
ggagccagaggaggggaggc

SEQ ID NO: 11600 - RNA, 20 nt, Artificial Sequence
  Synthetic oligonucleotide: BID-2069
ggaggggccgaggccagccc

SEQ ID NO: 11601 - RNA, 20 nt, Artificial Sequence
  Synthetic oligonucleotide: BID-2093
ggauccucgcugcugcugcu

SEQ ID NO: 11602 - RNA, 20 nt, Artificial Sequence
  Synthetic oligonucleotide: BID-2057
ggauucaggggaggggugcg

SEQ ID NO: 11603 - RNA, 20 nt, Artificial Sequence
  Synthetic oligonucleotide: BID-16
ggauucuguaagugggcugg

SEQ ID NO: 11604 - RNA, 20 nt, Artificial Sequence
  Synthetic oligonucleotide: BID-2252
ggcagcgucucccaggcgcg

SEQ ID NO: 11605 - RNA, 20 nt, Artificial Sequence
  Synthetic oligonucleotide: BID-2231
ggcaggcaggggucacgggc

SEQ ID NO: 11606 - RNA, 20 nt, Artificial Sequence
  Synthetic oligonucleotide: BID-2037
ggcaggucggugcugagggu

SEQ ID NO: 11607 - RNA, 20 nt, Artificial Sequence
  Synthetic oligonucleotide: BID-1986
ggccgaaggaggaagcgcgc

SEQ ID NO: 11608 - RNA, 20 nt, Artificial Sequence
  Synthetic oligonucleotide: BID-2070
ggccgaggccagccccggag

SEQ ID NO: 11609 - RNA, 20 nt, Artificial Sequence
  Synthetic oligonucleotide: BID-2036
ggccggcaggucggugcuga

SEQ ID NO: 11610 - RNA, 20 nt, Artificial Sequence
  Synthetic oligonucleotide: BID-2054
ggccuggggauucaggggag

SEQ ID NO: 11611 - RNA, 20 nt, Artificial Sequence
  Synthetic oligonucleotide: BID-2032
ggcgcccuccucggcgcggc

SEQ ID NO: 11612 - RNA, 20 nt, Artificial Sequence
  Synthetic oligonucleotide: BID-2018
gggagccagaggaggggagg

SEQ ID NO: 11613 - RNA, 20 nt, Artificial Sequence
  Synthetic oligonucleotide: BID-2056
gggauucaggggaggggugc

SEQ ID NO: 11614 - RNA, 20 nt, Artificial Sequence
  Synthetic oligonucleotide: BID-2222
gggcccugagcuccacgccg

SEQ ID NO: 11615 - RNA, 20 nt, Artificial Sequence
  Synthetic oligonucleotide: BID-2251
gggccgaggcagcgucuccc

SEQ ID NO: 11616 - RNA, 20 nt, Artificial Sequence
  Synthetic oligonucleotide: BID-2060
ggggaggggugcggggcgcg

SEQ ID NO: 11617 - RNA, 20 nt, Artificial Sequence
  Synthetic oligonucleotide: BID-2055
ggggauucaggggaggggug

SEQ ID NO: 11618 - RNA, 20 nt, Artificial Sequence
  Synthetic oligonucleotide: BID-1990
ggggcgccauaaggaggaag

SEQ ID NO: 11619 - RNA, 20 nt, Artificial Sequence
  Synthetic oligonucleotide: BID-2132
ggggcugggccuucugcggc

SEQ ID NO: 11620 - RNA, 20 nt, Artificial Sequence
  Synthetic oligonucleotide: BID-2063
ggggugcggggcgcggggag

SEQ ID NO: 11621 - RNA, 20 nt, Artificial Sequence
  Synthetic oligonucleotide: BID-2064
gggugcggggcgcggggagg

SEQ ID NO: 11622 - RNA, 20 nt, Artificial Sequence
  Synthetic oligonucleotide: BID-2017
ggugggagccagaggagggg

SEQ ID NO: 11623 - RNA, 20 nt, Artificial Sequence
  Synthetic oligonucleotide: BID-2183
gguuuucuccucuccggggc

SEQ ID NO: 11624 - RNA, 20 nt, Artificial Sequence
  Synthetic oligonucleotide: BID-2160
gucagcccugagcuccgcuc

SEQ ID NO: 11625 - RNA, 20 nt, Artificial Sequence
  Synthetic oligonucleotide: BID-2044
guccgccucggaggcgggga

SEQ ID NO: 11626 - RNA, 20 nt, Artificial Sequence
  Synthetic oligonucleotide: BID-2218
gucgggcccagggcgggcgg

SEQ ID NO: 11627 - RNA, 20 nt, Artificial Sequence
  Synthetic oligonucleotide: BID-2003
gugcacccgcgccccucccg

SEQ ID NO: 11628 - RNA, 20 nt, Artificial Sequence
  Synthetic oligonucleotide: BID-2167
gugcuggaaagaccacggug

SEQ ID NO: 11629 - RNA, 20 nt, Artificial Sequence
  Synthetic oligonucleotide: BID-11
gugcuggggucaugauggcu

SEQ ID NO: 11630 - RNA, 20 nt, Artificial Sequence
  Synthetic oligonucleotide: BID-2052
guggccuggggauucagggg

SEQ ID NO: 11631 - RNA, 20 nt, Artificial Sequence
  Synthetic oligonucleotide: BID-2047
guguccucuccacguggccu

SEQ ID NO: 11632 - RNA, 20 nt, Artificial Sequence
  Synthetic oligonucleotide: BID-2154
guuucccagcagcagcagcg

SEQ ID NO: 11633 - RNA, 17 nt, Artificial Sequence
  Synthetic oligonucleotide: BID-2258
gaaggaggaagcgcgcg

SEQ ID NO: 11634 - RNA, 17 nt, Artificial Sequence
  Synthetic oligonucleotide: BID-2405
gaccggccuucaccugc

SEQ ID NO: 11635 - RNA, 17 nt, Artificial Sequence
  Synthetic oligonucleotide: BID-2266
gagacgcugccucggcc

SEQ ID NO: 11636 - RNA, 17 nt, Artificial Sequence
  Synthetic oligonucleotide: BID-2343
gagaggagaaaacccgc

SEQ ID NO: 11637 - RNA, 17 nt, Artificial Sequence
  Synthetic oligonucleotide: BID-2436
gagccggcaggugucug

SEQ ID NO: 11638 - RNA, 17 nt, Artificial Sequence
  Synthetic oligonucleotide: BID-2495
gagcuccacgccggggc

SEQ ID NO: 11639 - RNA, 17 nt, Artificial Sequence
  Synthetic oligonucleotide: BID-2470
gagggcgcccgggcgga

SEQ ID NO: 11640 - RNA, 17 nt, Artificial Sequence
  Synthetic oligonucleotide: BID-2331
gaggggugcggggcgcg

SEQ ID NO: 11641 - RNA, 17 nt, Artificial Sequence
  Synthetic oligonucleotide: BID-2326
gauucaggggaggggug

SEQ ID NO: 11642 - RNA, 17 nt, Artificial Sequence
  Synthetic oligonucleotide: BID-2273
gcacccgcgccccuccc

SEQ ID NO: 11643 - RNA, 17 nt, Artificial Sequence
  Synthetic oligonucleotide: BID-2450
gcacccggccaggcccg

SEQ ID NO: 11644 - RNA, 17 nt, Artificial Sequence
  Synthetic oligonucleotide: BID-2352
gcaccgcagacaccugc

SEQ ID NO: 11645 - RNA, 17 nt, Artificial Sequence
  Synthetic oligonucleotide: BID-2362
gcacuggcaaugaugug

SEQ ID NO: 11646 - RNA, 17 nt, Artificial Sequence
  Synthetic oligonucleotide: BID-2298
gcagcgaccugagggcc

SEQ ID NO: 11647 - RNA, 17 nt, Artificial Sequence
  Synthetic oligonucleotide: BID-50
gcagcgaggggccgggc

SEQ ID NO: 11648 - RNA, 17 nt, Artificial Sequence
  Synthetic oligonucleotide: BID-2505
gcaggggucacgggcug

SEQ ID NO: 11649 - RNA, 17 nt, Artificial Sequence
  Synthetic oligonucleotide: BID-2290
gccagaggaggggaggc

SEQ ID NO: 11650 - RNA, 17 nt, Artificial Sequence
  Synthetic oligonucleotide: BID-2428
gccagugcucuaaggag

SEQ ID NO: 11651 - RNA, 17 nt, Artificial Sequence
  Synthetic oligonucleotide: BID-2411
gccccaacccugccugc

SEQ ID NO: 11652 - RNA, 17 nt, Artificial Sequence
  Synthetic oligonucleotide: BID-2277
gccccggcguggagcuc

SEQ ID NO: 11653 - RNA, 17 nt, Artificial Sequence
  Synthetic oligonucleotide: BID-2268
gcccgcgcccccgcggc

SEQ ID NO: 11654 - RNA, 17 nt, Artificial Sequence
  Synthetic oligonucleotide: BID-2303
gcccuccucggcgcggc

SEQ ID NO: 11655 - RNA, 17 nt, Artificial Sequence
  Synthetic oligonucleotide: BID-2493
gcccugagcuccacgcc

SEQ ID NO: 11656 - RNA, 17 nt, Artificial Sequence
  Synthetic oligonucleotide: BID-2465
gccggccgcgccgagga

SEQ ID NO: 11657 - RNA, 17 nt, Artificial Sequence
  Synthetic oligonucleotide: BID-2295
gccucagcagcgaccug

SEQ ID NO: 11658 - RNA, 17 nt, Artificial Sequence
  Synthetic oligonucleotide: BID-2323
gccuggggauucagggg

SEQ ID NO: 11659 - RNA, 17 nt, Artificial Sequence
  Synthetic oligonucleotide: BID-2407
gccuucaccugcaggca

SEQ ID NO: 11660 - RNA, 17 nt, Artificial Sequence
  Synthetic oligonucleotide: BID-2404
gccuucugcggcuggac

SEQ ID NO: 11661 - RNA, 17 nt, Artificial Sequence
  Synthetic oligonucleotide: BID-2261
gcgccauaaggaggaag

SEQ ID NO: 11662 - RNA, 17 nt, Artificial Sequence
  Synthetic oligonucleotide: BID-2270
gcgcccccgcggcugga

SEQ ID NO: 11663 - RNA, 17 nt, Artificial Sequence
  Synthetic oligonucleotide: BID-2472
gcgcccgggcggagggg

SEQ ID NO: 11664 - RNA, 17 nt, Artificial Sequence
  Synthetic oligonucleotide: BID-2466
gcgccgaggagggcgcc

SEQ ID NO: 11665 - RNA, 17 nt, Artificial Sequence
  Synthetic oligonucleotide: BID-2501
gcggcaggcagggguca

SEQ ID NO: 11666 - RNA, 17 nt, Artificial Sequence
  Synthetic oligonucleotide: BID-2452
gcggguuuucuccucuc

SEQ ID NO: 11667 - RNA, 17 nt, Artificial Sequence
  Synthetic oligonucleotide: BID-2488
gcggucgggcccagggc

SEQ ID NO: 11668 - RNA, 17 nt, Artificial Sequence
  Synthetic oligonucleotide: BID-2285
gcggugggagccagagg

SEQ ID NO: 11669 - RNA, 17 nt, Artificial Sequence
  Synthetic oligonucleotide: BID-36
gcucggugggcagcgag

SEQ ID NO: 11670 - RNA, 17 nt, Artificial Sequence
  Synthetic oligonucleotide: BID-2423
gcucucccagggucccc

SEQ ID NO: 11671 - RNA, 17 nt, Artificial Sequence
  Synthetic oligonucleotide: BID-47
gcuggaggagcacagug

SEQ ID NO: 11672 - RNA, 17 nt, Artificial Sequence
  Synthetic oligonucleotide: BID-2365
gcugggaaacuguugag

SEQ ID NO: 11673 - RNA, 17 nt, Artificial Sequence
  Synthetic oligonucleotide: BID-2403
gcugggccuucugcggc

SEQ ID NO: 11674 - RNA, 17 nt, Artificial Sequence
  Synthetic oligonucleotide: BID-2422
gcuucagagcucuccca

SEQ ID NO: 11675 - RNA, 17 nt, Artificial Sequence
  Synthetic oligonucleotide: BID-2469
ggagggcgcccgggcgg

SEQ ID NO: 11676 - RNA, 17 nt, Artificial Sequence
  Synthetic oligonucleotide: BID-2330
ggaggggugcggggcgc

SEQ ID NO: 11677 - RNA, 17 nt, Artificial Sequence
  Synthetic oligonucleotide: BID-2504
ggcaggggucacgggcu

SEQ ID NO: 11678 - RNA, 17 nt, Artificial Sequence
  Synthetic oligonucleotide: BID-2491
ggcccagggcgggcggc

SEQ ID NO: 11679 - RNA, 17 nt, Artificial Sequence
  Synthetic oligonucleotide: BID-2280
ggcccgccgcccgcccu

SEQ ID NO: 11680 - RNA, 17 nt, Artificial Sequence
  Synthetic oligonucleotide: BID-2492
ggcccugagcuccacgc

SEQ ID NO: 11681 - RNA, 17 nt, Artificial Sequence
  Synthetic oligonucleotide: BID-2406
ggccuucaccugcaggc

SEQ ID NO: 11682 - RNA, 17 nt, Artificial Sequence
  Synthetic oligonucleotide: BID-2338
ggcgcggggagggggag

SEQ ID NO: 11683 - RNA, 17 nt, Artificial Sequence
  Synthetic oligonucleotide: BID-2511
ggcgcguaccccgggag

SEQ ID NO: 11684 - RNA, 17 nt, Artificial Sequence
  Synthetic oligonucleotide: BID-37
ggcucggugggcagcga

SEQ ID NO: 11685 - RNA, 17 nt, Artificial Sequence
  Synthetic oligonucleotide: BID-2421
ggcuucagagcucuccc

SEQ ID NO: 11686 - RNA, 17 nt, Artificial Sequence
  Synthetic oligonucleotide: BID-2288
gggagccagaggagggg

SEQ ID NO: 11687 - RNA, 17 nt, Artificial Sequence
  Synthetic oligonucleotide: BID-2475
gggaggcgggagagacc

SEQ ID NO: 11688 - RNA, 17 nt, Artificial Sequence
  Synthetic oligonucleotide: BID-2339
gggagggggaggggccg

SEQ ID NO: 11689 - RNA, 17 nt, Artificial Sequence
  Synthetic oligonucleotide: BID-2329
gggaggggugcggggcg

SEQ ID NO: 11690 - RNA, 17 nt, Artificial Sequence
  Synthetic oligonucleotide: BID-2500
gggcaggcggcaggcag

SEQ ID NO: 11691 - RNA, 17 nt, Artificial Sequence
  Synthetic oligonucleotide: BID-2490
gggcccagggcgggcgg

SEQ ID NO: 11692 - RNA, 17 nt, Artificial Sequence
  Synthetic oligonucleotide: BID-2279
gggcccgccgcccgccc

SEQ ID NO: 11693 - RNA, 17 nt, Artificial Sequence
  Synthetic oligonucleotide: BID-2302
gggcgcccuccucggcg

SEQ ID NO: 11694 - RNA, 17 nt, Artificial Sequence
  Synthetic oligonucleotide: BID-2337
gggcgcggggaggggga

SEQ ID NO: 11695 - RNA, 17 nt, Artificial Sequence
  Synthetic oligonucleotide: BID-2499
ggggcaggcggcaggca

SEQ ID NO: 11696 - RNA, 17 nt, Artificial Sequence
  Synthetic oligonucleotide: BID-2340
ggggccgaggccagccc

SEQ ID NO: 11697 - RNA, 17 nt, Artificial Sequence
  Synthetic oligonucleotide: BID-53
ggggccgggccggcugg

SEQ ID NO: 11698 - RNA, 17 nt, Artificial Sequence
  Synthetic oligonucleotide: BID-2521
ggggcgcgggcgcgucc

SEQ ID NO: 11699 - RNA, 17 nt, Artificial Sequence
  Synthetic oligonucleotide: BID-2336
ggggcgcggggaggggg

SEQ ID NO: 11700 - RNA, 17 nt, Artificial Sequence
  Synthetic oligonucleotide: BID-2520
gggggcgcgggcgcguc

SEQ ID NO: 11701 - RNA, 17 nt, Artificial Sequence
  Synthetic oligonucleotide: BID-2402
gggggcugggccuucug

SEQ ID NO: 11702 - RNA, 17 nt, Artificial Sequence
  Synthetic oligonucleotide: BID-32
gggucaugauggcucgg

SEQ ID NO: 11703 - RNA, 17 nt, Artificial Sequence
  Synthetic oligonucleotide: BID-2332
gggugcggggcgcgggg

SEQ ID NO: 11704 - RNA, 17 nt, Artificial Sequence
  Synthetic oligonucleotide: BID-2506
ggucacgggcuggggcu

SEQ ID NO: 11705 - RNA, 17 nt, Artificial Sequence
  Synthetic oligonucleotide: BID-2479
ggucgcugcugaggccu

SEQ ID NO: 11706 - RNA, 17 nt, Artificial Sequence
  Synthetic oligonucleotide: BID-2309
ggucggugcugaggguc

SEQ ID NO: 11707 - RNA, 17 nt, Artificial Sequence
  Synthetic oligonucleotide: BID-2333
ggugcggggcgcgggga

SEQ ID NO: 11708 - RNA, 17 nt, Artificial Sequence
  Synthetic oligonucleotide: BID-2287
ggugggagccagaggag

SEQ ID NO: 11709 - RNA, 17 nt, Artificial Sequence
  Synthetic oligonucleotide: BID-54
ggugggcagcgaggggc

SEQ ID NO: 11710 - RNA, 17 nt, Artificial Sequence
  Synthetic oligonucleotide: BID-51
guaagugggcugggggc

SEQ ID NO: 11711 - RNA, 17 nt, Artificial Sequence
  Synthetic oligonucleotide: BID-2512
guaccccgggaggggcg

SEQ ID NO: 11712 - RNA, 17 nt, Artificial Sequence
  Synthetic oligonucleotide: BID-2317
guccucuccacguggcc

SEQ ID NO: 11713 - RNA, 17 nt, Artificial Sequence
  Synthetic oligonucleotide: BID-2480
gucgcugcugaggccug

SEQ ID NO: 11714 - RNA, 17 nt, Artificial Sequence
  Synthetic oligonucleotide: BID-2489
gucgggcccagggcggg

SEQ ID NO: 11715 - RNA, 17 nt, Artificial Sequence
  Synthetic oligonucleotide: BID-2348
gugcaggccacccuugc

SEQ ID NO: 11716 - RNA, 17 nt, Artificial Sequence
  Synthetic oligonucleotide: BID-2334
gugcggggcgcggggag

SEQ ID NO: 11717 - RNA, 17 nt, Artificial Sequence
  Synthetic oligonucleotide: BID-2449
guggccugcacccggcc

SEQ ID NO: 11718 - RNA, 17 nt, Artificial Sequence
  Synthetic oligonucleotide: BID-2322
guggccuggggauucag

SEQ ID NO: 11719 - RNA, 17 nt, Artificial Sequence
  Synthetic oligonucleotide: BID-2367
guggcugaaugacccca

SEQ ID NO: 11720 - RNA, 17 nt, Artificial Sequence
  Synthetic oligonucleotide: BID-52
gugggcagcgaggggcc

SEQ ID NO: 11721 - RNA, 17 nt, Artificial Sequence
  Synthetic oligonucleotide: BID-2316
guuguguccucuccacg

SEQ ID NO: 11722 - RNA, 20 nt, Artificial Sequence
  Synthetic oligonucleotide: BID-2187
aauccccaggccacguggag

SEQ ID NO: 11723 - RNA, 20 nt, Artificial Sequence
  Synthetic oligonucleotide: BID-2104
accaaguggcugggcuggca

SEQ ID NO: 11724 - RNA, 20 nt, Artificial Sequence
  Synthetic oligonucleotide: BID-2209
accccccgccuccccuccuc

SEQ ID NO: 11725 - RNA, 20 nt, Artificial Sequence
  Synthetic oligonucleotide: BID-2246
acccuccagccgcgggggcg

SEQ ID NO: 11726 - RNA, 20 nt, Artificial Sequence
  Synthetic oligonucleotide: BID-2216
accgcggucgggcccagggc

SEQ ID NO: 11727 - RNA, 20 nt, Artificial Sequence
  Synthetic oligonucleotide: BID-2014
accgcggugggagccagagg

SEQ ID NO: 11728 - RNA, 20 nt, Artificial Sequence
  Synthetic oligonucleotide: BID-2135
accggccuucaccugcaggc

SEQ ID NO: 11729 - RNA, 20 nt, Artificial Sequence
  Synthetic oligonucleotide: BID-2192
accugccggccgcgccgagg

SEQ ID NO: 11730 - RNA, 20 nt, Artificial Sequence
  Synthetic oligonucleotide: BID-2082
accugccggcuccucccgag

SEQ ID NO: 11731 - RNA, 20 nt, Artificial Sequence
  Synthetic oligonucleotide: BID-2243
acucaccacccuccagccgc

SEQ ID NO: 11732 - RNA, 20 nt, Artificial Sequence
  Synthetic oligonucleotide: BID-2074
agaaaacccgcgggccuggc

SEQ ID NO: 11733 - RNA, 20 nt, Artificial Sequence
  Synthetic oligonucleotide: BID-2091
agagcacuggcaaugaugug

SEQ ID NO: 11734 - RNA, 20 nt, Artificial Sequence
  Synthetic oligonucleotide: BID-2151
agagcucucccagggucccc

SEQ ID NO: 11735 - RNA, 20 nt, Artificial Sequence
  Synthetic oligonucleotide: BID-2021
agccagaggaggggaggcgg

SEQ ID NO: 11736 - RNA, 20 nt, Artificial Sequence
  Synthetic oligonucleotide: BID-2161
agcccugagcuccgcucggg

SEQ ID NO: 11737 - RNA, 20 nt, Artificial Sequence
  Synthetic oligonucleotide: BID-2085
agcucagggcugacaaagcg

SEQ ID NO: 11738 - RNA, 20 nt, Artificial Sequence
  Synthetic oligonucleotide: BID-2153
agcucucccaggguccccug

SEQ ID NO: 11739 - RNA, 20 nt, Artificial Sequence
  Synthetic oligonucleotide: BID-2199
aggagggcgcccgggcggag

SEQ ID NO: 11740 - RNA, 20 nt, Artificial Sequence
  Synthetic oligonucleotide: BID-2025
aggccucagcagcgaccuga

SEQ ID NO: 11741 - RNA, 20 nt, Artificial Sequence
  Synthetic oligonucleotide: BID-2230
aggcggcaggcaggggucac

SEQ ID NO: 11742 - RNA, 20 nt, Artificial Sequence
  Synthetic oligonucleotide: BID-2023
aggcggggggucagagcccc

SEQ ID NO: 11743 - RNA, 20 nt, Artificial Sequence
  Synthetic oligonucleotide: BID-2200
agggcgcccgggcggagggg

SEQ ID NO: 11744 - RNA, 20 nt, Artificial Sequence
  Synthetic oligonucleotide: BID-2150
agggcuucagagcucuccca

SEQ ID NO: 11745 - RNA, 20 nt, Artificial Sequence
  Synthetic oligonucleotide: BID-2059
aggggaggggugcggggcgc

SEQ ID NO: 11746 - RNA, 20 nt, Artificial Sequence
  Synthetic oligonucleotide: BID-2234
aggggucacgggcuggggcu

SEQ ID NO: 11747 - RNA, 20 nt, Artificial Sequence
  Synthetic oligonucleotide: BID-2062
aggggugcggggcgcgggga

SEQ ID NO: 11748 - RNA, 20 nt, Artificial Sequence
  Synthetic oligonucleotide: BID-2177
aggguggccugcacccggcc

SEQ ID NO: 11749 - RNA, 20 nt, Artificial Sequence
  Synthetic oligonucleotide: BID-2002
agugcacccgcgccccuccc

SEQ ID NO: 11750 - RNA, 20 nt, Artificial Sequence
  Synthetic oligonucleotide: BID-18
auggcucggugggcagcgag

SEQ ID NO: 11751 - RNA, 20 nt, Artificial Sequence
  Synthetic oligonucleotide: BID-2156
auugccagugcucuaaggag

SEQ ID NO: 11752 - RNA, 20 nt, Artificial Sequence
  Synthetic oligonucleotide: BID-2188
caaagccuuccccgccuccg

SEQ ID NO: 11753 - RNA, 20 nt, Artificial Sequence
  Synthetic oligonucleotide: BID-10
cacagugcggauucuguaag

SEQ ID NO: 11754 - RNA, 20 nt, Artificial Sequence
  Synthetic oligonucleotide: BID-2185
caccccuccccugaaucccc

SEQ ID NO: 11755 - RNA, 20 nt, Artificial Sequence
  Synthetic oligonucleotide: BID-2051
cacguggccuggggauucag

SEQ ID NO: 11756 - RNA, 20 nt, Artificial Sequence
  Synthetic oligonucleotide: BID-2242
cacucaccacccuccagccg

SEQ ID NO: 11757 - RNA, 20 nt, Artificial Sequence
  Synthetic oligonucleotide: BID-2103
cagccaccaaguggcugggc

SEQ ID NO: 11758 - RNA, 20 nt, Artificial Sequence
  Synthetic oligonucleotide: BID-23
cagcgaggggccgggccggc

SEQ ID NO: 11759 - RNA, 20 nt, Artificial Sequence
  Synthetic oligonucleotide: BID-20
cagcggugcuggggucauga

SEQ ID NO: 11760 - RNA, 20 nt, Artificial Sequence
  Synthetic oligonucleotide: BID-2233
caggcaggggucacgggcug

SEQ ID NO: 11761 - RNA, 20 nt, Artificial Sequence
  Synthetic oligonucleotide: BID-2024
caggccucagcagcgaccug

SEQ ID NO: 11762 - RNA, 20 nt, Artificial Sequence
  Synthetic oligonucleotide: BID-2229
caggcggcaggcagggguca

SEQ ID NO: 11763 - RNA, 20 nt, Artificial Sequence
  Synthetic oligonucleotide: BID-2009
cagggcccgccgcccgcccu

SEQ ID NO: 11764 - RNA, 20 nt, Artificial Sequence
  Synthetic oligonucleotide: BID-2058
caggggaggggugcggggcg

SEQ ID NO: 11765 - RNA, 20 nt, Artificial Sequence
  Synthetic oligonucleotide: BID-2208
caggucgcugcugaggccug

SEQ ID NO: 11766 - RNA, 20 nt, Artificial Sequence
  Synthetic oligonucleotide: BID-2140
ccaacccugccugcagguga

SEQ ID NO: 11767 - RNA, 20 nt, Artificial Sequence
  Synthetic oligonucleotide: BID-2105
ccaaguggcugggcuggcaa

SEQ ID NO: 11768 - RNA, 20 nt, Artificial Sequence
  Synthetic oligonucleotide: BID-2050
ccacguggccuggggauuca

SEQ ID NO: 11769 - RNA, 20 nt, Artificial Sequence
  Synthetic oligonucleotide: BID-2081
ccagcaccgcagacaccugc

SEQ ID NO: 11770 - RNA, 20 nt, Artificial Sequence
  Synthetic oligonucleotide: BID-2148
cccagccacuugguggcuga

SEQ ID NO: 11771 - RNA, 20 nt, Artificial Sequence
  Synthetic oligonucleotide: BID-2004
ccccugccugccgccugccc

SEQ ID NO: 11772 - RNA, 20 nt, Artificial Sequence
  Synthetic oligonucleotide: BID-1999
cccgcgcccccgcggcugga

SEQ ID NO: 11773 - RNA, 20 nt, Artificial Sequence
  Synthetic oligonucleotide: BID-2180
cccgcggguuuucuccucuc

SEQ ID NO: 11774 - RNA, 20 nt, Artificial Sequence
  Synthetic oligonucleotide: BID-2031
cccgggcgcccuccucggcg

SEQ ID NO: 11775 - RNA, 20 nt, Artificial Sequence
  Synthetic oligonucleotide: BID-2102
cccucagccaccaaguggcu

SEQ ID NO: 11776 - RNA, 20 nt, Artificial Sequence
  Synthetic oligonucleotide: BID-2247
cccuccagccgcgggggcgc

SEQ ID NO: 11777 - RNA, 20 nt, Artificial Sequence
  Synthetic oligonucleotide: BID-2033
cccuccucggcgcggccggc

SEQ ID NO: 11778 - RNA, 20 nt, Artificial Sequence
  Synthetic oligonucleotide: BID-2210
cccuccucuggcucccaccg

SEQ ID NO: 11779 - RNA, 20 nt, Artificial Sequence
  Synthetic oligonucleotide: BID-2186
cccugaauccccaggccacg

SEQ ID NO: 11780 - RNA, 20 nt, Artificial Sequence
  Synthetic oligonucleotide: BID-2141
cccugccugcaggugaaggc

SEQ ID NO: 11781 - RNA, 20 nt, Artificial Sequence
  Synthetic oligonucleotide: BID-2145
cccuugccagcccagccacu

SEQ ID NO: 11782 - RNA, 20 nt, Artificial Sequence
  Synthetic oligonucleotide: BID-2191
ccgaccugccggccgcgccg

SEQ ID NO: 11783 - RNA, 20 nt, Artificial Sequence
  Synthetic oligonucleotide: BID-13
ccgcacugugcuccuccagc

SEQ ID NO: 11784 - RNA, 20 nt, Artificial Sequence
  Synthetic oligonucleotide: BID-2195
ccgcgccgaggagggcgccc

SEQ ID NO: 11785 - RNA, 20 nt, Artificial Sequence
  Synthetic oligonucleotide: BID-2076
ccgcgggccuggccgggugc

SEQ ID NO: 11786 - RNA, 20 nt, Artificial Sequence
  Synthetic oligonucleotide: BID-2015
ccgcggugggagccagagga

SEQ ID NO: 11787 - RNA, 20 nt, Artificial Sequence
  Synthetic oligonucleotide: BID-2072
ccggagaggagaaaacccgc

SEQ ID NO: 11788 - RNA, 20 nt, Artificial Sequence
  Synthetic oligonucleotide: BID-2136
ccggccuucaccugcaggca

SEQ ID NO: 11789 - RNA, 20 nt, Artificial Sequence
  Synthetic oligonucleotide: BID-12
ccggcuggaggagcacagug

SEQ ID NO: 11790 - RNA, 20 nt, Artificial Sequence
  Synthetic oligonucleotide: BID-2228
ccggggcaggcggcaggcag

SEQ ID NO: 11791 - RNA, 20 nt, Artificial Sequence
  Synthetic oligonucleotide: BID-2034
ccucggcgcggccggcaggu

SEQ ID NO: 11792 - RNA, 20 nt, Artificial Sequence
  Synthetic oligonucleotide: BID-2211
ccucuggcucccaccgcggu

SEQ ID NO: 11793 - RNA, 20 nt, Artificial Sequence
  Synthetic oligonucleotide: BID-2223
ccugagcuccacgccggggc

SEQ ID NO: 11794 - RNA, 20 nt, Artificial Sequence
  Synthetic oligonucleotide: BID-2178
ccugcacccggccaggcccg

SEQ ID NO: 11795 - RNA, 20 nt, Artificial Sequence
  Synthetic oligonucleotide: BID-2006
ccugccccggcguggagcuc

SEQ ID NO: 11796 - RNA, 20 nt, Artificial Sequence
  Synthetic oligonucleotide: BID-2193
ccugccggccgcgccgagga

SEQ ID NO: 11797 - RNA, 20 nt, Artificial Sequence
  Synthetic oligonucleotide: BID-2137
ccuucaccugcaggcagggu

SEQ ID NO: 11798 - RNA, 20 nt, Artificial Sequence
  Synthetic oligonucleotide: BID-2197
cgaggagggcgcccgggcgg

SEQ ID NO: 11799 - RNA, 20 nt, Artificial Sequence
  Synthetic oligonucleotide: BID-25
cgaggggccgggccggcugg

SEQ ID NO: 11800 - RNA, 20 nt, Artificial Sequence
  Synthetic oligonucleotide: BID-2202
cgcccgggcggaggggaggc

SEQ ID NO: 11801 - RNA, 20 nt, Artificial Sequence
  Synthetic oligonucleotide: BID-2011
cgcccugggcccgaccgcgg

SEQ ID NO: 11802 - RNA, 20 nt, Artificial Sequence
  Synthetic oligonucleotide: BID-2196
cgccgaggagggcgcccggg

SEQ ID NO: 11803 - RNA, 20 nt, Artificial Sequence
  Synthetic oligonucleotide: BID-2226
cgccggggcaggcggcaggc

SEQ ID NO: 11804 - RNA, 20 nt, Artificial Sequence
  Synthetic oligonucleotide: BID-1997
cgcgcccgcgcccccgcggc

SEQ ID NO: 11805 - RNA, 20 nt, Artificial Sequence
  Synthetic oligonucleotide: BID-2248
cgcgggggcgcgggcgcguc

SEQ ID NO: 11806 - RNA, 20 nt, Artificial Sequence
  Synthetic oligonucleotide: BID-2016
cgcggugggagccagaggag

SEQ ID NO: 11807 - RNA, 20 nt, Artificial Sequence
  Synthetic oligonucleotide: BID-2240
cgcguaccccgggaggggcg

SEQ ID NO: 11808 - RNA, 20 nt, Artificial Sequence
  Synthetic oligonucleotide: BID-1996
cggacgcgcccgcgcccccg

SEQ ID NO: 11809 - RNA, 20 nt, Artificial Sequence
  Synthetic oligonucleotide: BID-2092
cggauccucgcugcugcugc

SEQ ID NO: 11810 - RNA, 20 nt, Artificial Sequence
  Synthetic oligonucleotide: BID-2205
cggcccucaggucgcugcug

SEQ ID NO: 11811 - RNA, 20 nt, Artificial Sequence
  Synthetic oligonucleotide: BID-2035
cggccggcaggucggugcug

SEQ ID NO: 11812 - RNA, 20 nt, Artificial Sequence
  Synthetic oligonucleotide: BID-2221
cgggcccugagcuccacgcc

SEQ ID NO: 11813 - RNA, 20 nt, Artificial Sequence
  Synthetic oligonucleotide: BID-2067
cggggcgcggggagggggag

SEQ ID NO: 11814 - RNA, 20 nt, Artificial Sequence
  Synthetic oligonucleotide: BID-2077
cgggugcaggccacccuugc

SEQ ID NO: 11815 - RNA, 20 nt, Artificial Sequence
  Synthetic oligonucleotide: BID-2244
cucaccacccuccagccgcg

SEQ ID NO: 11816 - RNA, 20 nt, Artificial Sequence
  Synthetic oligonucleotide: BID-2026
cucagcagcgaccugagggc

SEQ ID NO: 11817 - RNA, 20 nt, Artificial Sequence
  Synthetic oligonucleotide: BID-2206
cucaggucgcugcugaggcc

SEQ ID NO: 11818 - RNA, 20 nt, Artificial Sequence
  Synthetic oligonucleotide: BID-2029
cucccgccuccccuccgccc

SEQ ID NO: 11819 - RNA, 20 nt, Artificial Sequence
  Synthetic oligonucleotide: BID-2030
cuccgcccgggcgcccuccu

SEQ ID NO: 11820 - RNA, 20 nt, Artificial Sequence
  Synthetic oligonucleotide: BID-2184
cuccucuccggggcuggccu

SEQ ID NO: 11821 - RNA, 20 nt, Artificial Sequence
  Synthetic oligonucleotide: BID-2239
cucggcgcguaccccgggag

SEQ ID NO: 11822 - RNA, 20 nt, Artificial Sequence
  Synthetic oligonucleotide: BID-24
cucggugggcagcgaggggc

SEQ ID NO: 11823 - RNA, 20 nt, Artificial Sequence
  Synthetic oligonucleotide: BID-2179
cugcacccggccaggcccgc

SEQ ID NO: 11824 - RNA, 20 nt, Artificial Sequence
  Synthetic oligonucleotide: BID-2007
cugccccggcguggagcuca

SEQ ID NO: 11825 - RNA, 20 nt, Artificial Sequence
  Synthetic oligonucleotide: BID-2166
cugcggugcuggaaagacca

SEQ ID NO: 11826 - RNA, 20 nt, Artificial Sequence
  Synthetic oligonucleotide: BID-2134
cuggaccggccuucaccugc

SEQ ID NO: 11827 - RNA, 20 nt, Artificial Sequence
  Synthetic oligonucleotide: BID-8
cuggggucaugauggcucgg

SEQ ID NO: 11828 - RNA, 20 nt, Artificial Sequence
  Synthetic oligonucleotide: BID-30
cuguaagugggcugggggcu

SEQ ID NO: 11829 - RNA, 20 nt, Artificial Sequence
  Synthetic oligonucleotide: BID-21
cugugcuccuccagccggcc

SEQ ID NO: 11830 - RNA, 20 nt, Artificial Sequence
  Synthetic oligonucleotide: BID-2138
cuucaccugcaggcaggguu

SEQ ID NO: 11831 - RNA, 20 nt, Artificial Sequence
  Synthetic oligonucleotide: BID-2245
ucaccacccuccagccgcgg

SEQ ID NO: 11832 - RNA, 20 nt, Artificial Sequence
  Synthetic oligonucleotide: BID-2027
ucagcagcgaccugagggcc

SEQ ID NO: 11833 - RNA, 20 nt, Artificial Sequence
  Synthetic oligonucleotide: BID-2008
ucagggcccgccgcccgccc

SEQ ID NO: 11834 - RNA, 20 nt, Artificial Sequence
  Synthetic oligonucleotide: BID-2207
ucaggucgcugcugaggccu

SEQ ID NO: 11835 - RNA, 20 nt, Artificial Sequence
  Synthetic oligonucleotide: BID-2225
uccacgccggggcaggcggc

SEQ ID NO: 11836 - RNA, 20 nt, Artificial Sequence
  Synthetic oligonucleotide: BID-2049
uccacguggccuggggauuc

SEQ ID NO: 11837 - RNA, 20 nt, Artificial Sequence
  Synthetic oligonucleotide: BID-2219
ucgggcccagggcgggcggc

SEQ ID NO: 11838 - RNA, 20 nt, Artificial Sequence
  Synthetic oligonucleotide: BID-19
ucggugggcagcgaggggcc

SEQ ID NO: 11839 - RNA, 20 nt, Artificial Sequence
  Synthetic oligonucleotide: BID-2028
ucucccgccuccccuccgcc

SEQ ID NO: 11840 - RNA, 20 nt, Artificial Sequence
  Synthetic oligonucleotide: BID-22
ucuguaagugggcugggggc

SEQ ID NO: 11841 - RNA, 20 nt, Artificial Sequence
  Synthetic oligonucleotide: BID-2100
ugaagcccucagccaccaag

SEQ ID NO: 11842 - RNA, 20 nt, Artificial Sequence
  Synthetic oligonucleotide: BID-2098
ugaaugaccccaggggaccc

SEQ ID NO: 11843 - RNA, 20 nt, Artificial Sequence
  Synthetic oligonucleotide: BID-2096
ugaguggcugaaugacccca

SEQ ID NO: 11844 - RNA, 20 nt, Artificial Sequence
  Synthetic oligonucleotide: BID-9
ugauggcucggugggcagcg

SEQ ID NO: 11845 - RNA, 20 nt, Artificial Sequence
  Synthetic oligonucleotide: BID-2065
ugcggggcgcggggaggggg

SEQ ID NO: 11846 - RNA, 20 nt, Artificial Sequence
  Synthetic oligonucleotide: BID-2168
ugcuggaaagaccacggugu

SEQ ID NO: 11847 - RNA, 20 nt, Artificial Sequence
  Synthetic oligonucleotide: BID-2169
uggaaagaccacgguguggg

SEQ ID NO: 11848 - RNA, 20 nt, Artificial Sequence
  Synthetic oligonucleotide: BID-2053
uggccuggggauucagggga

SEQ ID NO: 11849 - RNA, 20 nt, Artificial Sequence
  Synthetic oligonucleotide: BID-1995
ugggagacgcugccucggcc

SEQ ID NO: 11850 - RNA, 20 nt, Artificial Sequence
  Synthetic oligonucleotide: BID-29
ugggcagcgaggggccgggc

SEQ ID NO: 11851 - RNA, 20 nt, Artificial Sequence
  Synthetic oligonucleotide: BID-2133
ugggccuucugcggcuggac

SEQ ID NO: 11852 - RNA, 20 nt, Artificial Sequence
  Synthetic oligonucleotide: BID-2159
ugucagcccugagcuccgcu

SEQ ID NO: 11853 - RNA, 20 nt, Artificial Sequence
  Synthetic oligonucleotide: BID-2048
uguccucuccacguggccug

SEQ ID NO: 11854 - RNA, 20 nt, Artificial Sequence
  Synthetic oligonucleotide: BID-2046
uguguccucuccacguggcc

SEQ ID NO: 11855 - RNA, 20 nt, Artificial Sequence
  Synthetic oligonucleotide: BID-2139
uucaccugcaggcaggguug

SEQ ID NO: 11856 - RNA, 20 nt, Artificial Sequence
  Synthetic oligonucleotide: BID-2095
uugaguggcugaaugacccc

SEQ ID NO: 11857 - RNA, 20 nt, Artificial Sequence
  Synthetic oligonucleotide: BID-2146
uugccagcccagccacuugg

SEQ ID NO: 11858 - RNA, 20 nt, Artificial Sequence
  Synthetic oligonucleotide: BID-2157
uugccagugcucuaaggagc

SEQ ID NO: 11859 - RNA, 20 nt, Artificial Sequence
  Synthetic oligonucleotide: BID-2045
uuuguuguguccucuccacg

SEQ ID NO: 11860 - RNA, 17 nt, Artificial Sequence
  Synthetic oligonucleotide: BID-2345
aaacccgcgggccuggc

SEQ ID NO: 11861 - RNA, 17 nt, Artificial Sequence
  Synthetic oligonucleotide: BID-2441
aaagaccacgguguggg

SEQ ID NO: 11862 - RNA, 17 nt, Artificial Sequence
  Synthetic oligonucleotide: BID-2442
aagaccacggugugggc

SEQ ID NO: 11863 - RNA, 17 nt, Artificial Sequence
  Synthetic oligonucleotide: BID-2375
aaguggcugggcuggca

SEQ ID NO: 11864 - RNA, 17 nt, Artificial Sequence
  Synthetic oligonucleotide: BID-2516
accacccuccagccgcg

SEQ ID NO: 11865 - RNA, 17 nt, Artificial Sequence
  Synthetic oligonucleotide: BID-2412
acccugccugcagguga

SEQ ID NO: 11866 - RNA, 17 nt, Artificial Sequence
  Synthetic oligonucleotide: BID-2410
accugcaggcaggguug

SEQ ID NO: 11867 - RNA, 17 nt, Artificial Sequence
  Synthetic oligonucleotide: BID-2463
accugccggccgcgccg

SEQ ID NO: 11868 - RNA, 17 nt, Artificial Sequence
  Synthetic oligonucleotide: BID-2497
acgccggggcaggcggc

SEQ ID NO: 11869 - RNA, 17 nt, Artificial Sequence
  Synthetic oligonucleotide: BID-2267
acgcgcccgcgcccccg

SEQ ID NO: 11870 - RNA, 17 nt, Artificial Sequence
  Synthetic oligonucleotide: BID-2320
acguggccuggggauuc

SEQ ID NO: 11871 - RNA, 17 nt, Artificial Sequence
  Synthetic oligonucleotide: BID-2293
agaggaggggaggcggg

SEQ ID NO: 11872 - RNA, 17 nt, Artificial Sequence
  Synthetic oligonucleotide: BID-2297
agcagcgaccugagggc

SEQ ID NO: 11873 - RNA, 17 nt, Artificial Sequence
  Synthetic oligonucleotide: BID-2420
agccacuugguggcuga

SEQ ID NO: 11874 - RNA, 17 nt, Artificial Sequence
  Synthetic oligonucleotide: BID-2289
agccagaggaggggagg

SEQ ID NO: 11875 - RNA, 17 nt, Artificial Sequence
  Synthetic oligonucleotide: BID-2371
agcccucagccaccaag

SEQ ID NO: 11876 - RNA, 17 nt, Artificial Sequence
  Synthetic oligonucleotide: BID-2432
agcccugagcuccgcuc

SEQ ID NO: 11877 - RNA, 17 nt, Artificial Sequence
  Synthetic oligonucleotide: BID-2460
agccuuccccgccuccg

SEQ ID NO: 11878 - RNA, 17 nt, Artificial Sequence
  Synthetic oligonucleotide: BID-2524
agcgucucccaggcgcg

SEQ ID NO: 11879 - RNA, 17 nt, Artificial Sequence
  Synthetic oligonucleotide: BID-2503
aggcaggggucacgggc

SEQ ID NO: 11880 - RNA, 17 nt, Artificial Sequence
  Synthetic oligonucleotide: BID-2471
agggcgcccgggcggag

SEQ ID NO: 11881 - RNA, 17 nt, Artificial Sequence
  Synthetic oligonucleotide: BID-2478
aggucgcugcugaggcc

SEQ ID NO: 11882 - RNA, 17 nt, Artificial Sequence
  Synthetic oligonucleotide: BID-2308
aggucggugcugagggu

SEQ ID NO: 11883 - RNA, 17 nt, Artificial Sequence
  Synthetic oligonucleotide: BID-34
agugcggauucuguaag

SEQ ID NO: 11884 - RNA, 17 nt, Artificial Sequence
  Synthetic oligonucleotide: BID-2366
aguggcugaaugacccc

SEQ ID NO: 11885 - RNA, 17 nt, Artificial Sequence
  Synthetic oligonucleotide: BID-2376
aguggcugggcuggcaa

SEQ ID NO: 11886 - RNA, 17 nt, Artificial Sequence
  Synthetic oligonucleotide: BID-2363
auccucgcugcugcugc

SEQ ID NO: 11887 - RNA, 17 nt, Artificial Sequence
  Synthetic oligonucleotide: BID-2369
augaccccaggggaccc

SEQ ID NO: 11888 - RNA, 17 nt, Artificial Sequence
  Synthetic oligonucleotide: BID-2327
auucaggggaggggugc

SEQ ID NO: 11889 - RNA, 17 nt, Artificial Sequence
  Synthetic oligonucleotide: BID-2515
caccacccuccagccgc

SEQ ID NO: 11890 - RNA, 17 nt, Artificial Sequence
  Synthetic oligonucleotide: BID-2274
cacccgcgccccucccg

SEQ ID NO: 11891 - RNA, 17 nt, Artificial Sequence
  Synthetic oligonucleotide: BID-2451
cacccggccaggcccgc

SEQ ID NO: 11892 - RNA, 17 nt, Artificial Sequence
  Synthetic oligonucleotide: BID-2409
caccugcaggcaggguu

SEQ ID NO: 11893 - RNA, 17 nt, Artificial Sequence
  Synthetic oligonucleotide: BID-46
cacugugcuccuccagc

SEQ ID NO: 11894 - RNA, 17 nt, Artificial Sequence
  Synthetic oligonucleotide: BID-2292
cagaggaggggaggcgg

SEQ ID NO: 11895 - RNA, 17 nt, Artificial Sequence
  Synthetic oligonucleotide: BID-2419
cagccacuugguggcug

SEQ ID NO: 11896 - RNA, 17 nt, Artificial Sequence
  Synthetic oligonucleotide: BID-2431
cagcccugagcuccgcu

SEQ ID NO: 11897 - RNA, 17 nt, Artificial Sequence
  Synthetic oligonucleotide: BID-2374
ccaccaaguggcugggc

SEQ ID NO: 11898 - RNA, 17 nt, Artificial Sequence
  Synthetic oligonucleotide: BID-2517
ccacccuccagccgcgg

SEQ ID NO: 11899 - RNA, 17 nt, Artificial Sequence
  Synthetic oligonucleotide: BID-2291
ccagaggaggggaggcg

SEQ ID NO: 11900 - RNA, 17 nt, Artificial Sequence
  Synthetic oligonucleotide: BID-2418
ccagcccagccacuugg

SEQ ID NO: 11901 - RNA, 17 nt, Artificial Sequence
  Synthetic oligonucleotide: BID-2429
ccagugcucuaaggagc

SEQ ID NO: 11902 - RNA, 17 nt, Artificial Sequence
  Synthetic oligonucleotide: BID-2459
ccccaggccacguggag

SEQ ID NO: 11903 - RNA, 17 nt, Artificial Sequence
  Synthetic oligonucleotide: BID-2271
cccccgcggcuggaggg

SEQ ID NO: 11904 - RNA, 17 nt, Artificial Sequence
  Synthetic oligonucleotide: BID-2481
ccccgccuccccuccuc

SEQ ID NO: 11905 - RNA, 17 nt, Artificial Sequence
  Synthetic oligonucleotide: BID-2278
ccccggcguggagcuca

SEQ ID NO: 11906 - RNA, 17 nt, Artificial Sequence
  Synthetic oligonucleotide: BID-2299
cccgccuccccuccgcc

SEQ ID NO: 11907 - RNA, 17 nt, Artificial Sequence
  Synthetic oligonucleotide: BID-2473
cccgggcggaggggagg

SEQ ID NO: 11908 - RNA, 17 nt, Artificial Sequence
  Synthetic oligonucleotide: BID-2477
cccucaggucgcugcug

SEQ ID NO: 11909 - RNA, 17 nt, Artificial Sequence
  Synthetic oligonucleotide: BID-2457
cccuccccugaaucccc

SEQ ID NO: 11910 - RNA, 17 nt, Artificial Sequence
  Synthetic oligonucleotide: BID-2494
cccugagcuccacgccg

SEQ ID NO: 11911 - RNA, 17 nt, Artificial Sequence
  Synthetic oligonucleotide: BID-2256
ccgaaggaggaagcgcg

SEQ ID NO: 11912 - RNA, 17 nt, Artificial Sequence
  Synthetic oligonucleotide: BID-2523
ccgaggcagcgucuccc

SEQ ID NO: 11913 - RNA, 17 nt, Artificial Sequence
  Synthetic oligonucleotide: BID-2300
ccgccuccccuccgccc

SEQ ID NO: 11914 - RNA, 17 nt, Artificial Sequence
  Synthetic oligonucleotide: BID-2527
ccgcgcgcuuccuccuu

SEQ ID NO: 11915 - RNA, 17 nt, Artificial Sequence
  Synthetic oligonucleotide: BID-2306
ccggcaggucggugcug

SEQ ID NO: 11916 - RNA, 17 nt, Artificial Sequence
  Synthetic oligonucleotide: BID-2474
ccgggcggaggggaggc

SEQ ID NO: 11917 - RNA, 17 nt, Artificial Sequence
  Synthetic oligonucleotide: BID-2462
ccucagcaccgaccugc

SEQ ID NO: 11918 - RNA, 17 nt, Artificial Sequence
  Synthetic oligonucleotide: BID-2296
ccucagcagcgaccuga

SEQ ID NO: 11919 - RNA, 17 nt, Artificial Sequence
  Synthetic oligonucleotide: BID-2319
ccucuccacguggccug

SEQ ID NO: 11920 - RNA, 17 nt, Artificial Sequence
  Synthetic oligonucleotide: BID-2433
ccugagcuccgcucggg

SEQ ID NO: 11921 - RNA, 17 nt, Artificial Sequence
  Synthetic oligonucleotide: BID-2265
ccugggagacgcugccu

SEQ ID NO: 11922 - RNA, 17 nt, Artificial Sequence
  Synthetic oligonucleotide: BID-2282
ccugggcccgaccgcgg

SEQ ID NO: 11923 - RNA, 17 nt, Artificial Sequence
  Synthetic oligonucleotide: BID-2324
ccuggggauucagggga

SEQ ID NO: 11924 - RNA, 17 nt, Artificial Sequence
  Synthetic oligonucleotide: BID-2257
cgaaggaggaagcgcgc

SEQ ID NO: 11925 - RNA, 17 nt, Artificial Sequence
  Synthetic oligonucleotide: BID-2468
cgaggagggcgcccggg

SEQ ID NO: 11926 - RNA, 17 nt, Artificial Sequence
  Synthetic oligonucleotide: BID-2341
cgaggccagccccggag

SEQ ID NO: 11927 - RNA, 17 nt, Artificial Sequence
  Synthetic oligonucleotide: BID-48
cgaggggccgggccggc

SEQ ID NO: 11928 - RNA, 17 nt, Artificial Sequence
  Synthetic oligonucleotide: BID-2301
cgcccgggcgcccuccu

SEQ ID NO: 11929 - RNA, 17 nt, Artificial Sequence
  Synthetic oligonucleotide: BID-2281
cgcccugggcccgaccg

SEQ ID NO: 11930 - RNA, 17 nt, Artificial Sequence
  Synthetic oligonucleotide: BID-2467
cgccgaggagggcgccc

SEQ ID NO: 11931 - RNA, 17 nt, Artificial Sequence
  Synthetic oligonucleotide: BID-2315
cgccucggaggcgggga

SEQ ID NO: 11932 - RNA, 17 nt, Artificial Sequence
  Synthetic oligonucleotide: BID-2269
cgcgcccccgcggcugg

SEQ ID NO: 11933 - RNA, 17 nt, Artificial Sequence
  Synthetic oligonucleotide: BID-2502
cggcaggcaggggucac

SEQ ID NO: 11934 - RNA, 17 nt, Artificial Sequence
  Synthetic oligonucleotide: BID-2307
cggcaggucggugcuga

SEQ ID NO: 11935 - RNA, 17 nt, Artificial Sequence
  Synthetic oligonucleotide: BID-2305
cggcgcggccggcaggu

SEQ ID NO: 11936 - RNA, 17 nt, Artificial Sequence
  Synthetic oligonucleotide: BID-2347
cgggccuggccgggugc

SEQ ID NO: 11937 - RNA, 17 nt, Artificial Sequence
  Synthetic oligonucleotide: BID-2522
cgggcgcguccgggccg

SEQ ID NO: 11938 - RNA, 17 nt, Artificial Sequence
  Synthetic oligonucleotide: BID-2498
cggggcaggcggcaggc

SEQ ID NO: 11939 - RNA, 17 nt, Artificial Sequence
  Synthetic oligonucleotide: BID-2294
cggggggucagagcccc

SEQ ID NO: 11940 - RNA, 17 nt, Artificial Sequence
  Synthetic oligonucleotide: BID-2438
cggugcuggaaagacca

SEQ ID NO: 11941 - RNA, 17 nt, Artificial Sequence
  Synthetic oligonucleotide: BID-43
cggugcuggggucauga

SEQ ID NO: 11942 - RNA, 17 nt, Artificial Sequence
  Synthetic oligonucleotide: BID-2286
cggugggagccagagga

SEQ ID NO: 11943 - RNA, 17 nt, Artificial Sequence
  Synthetic oligonucleotide: BID-2321
cguggccuggggauuca

SEQ ID NO: 11944 - RNA, 17 nt, Artificial Sequence
  Synthetic oligonucleotide: BID-2372
cucagccaccaaguggc

SEQ ID NO: 11945 - RNA, 17 nt, Artificial Sequence
  Synthetic oligonucleotide: BID-2496
cuccacgccggggcagg

SEQ ID NO: 11946 - RNA, 17 nt, Artificial Sequence
  Synthetic oligonucleotide: BID-2518
cuccagccgcgggggcg

SEQ ID NO: 11947 - RNA, 17 nt, Artificial Sequence
  Synthetic oligonucleotide: BID-2434
cuccgcucgggaggagc

SEQ ID NO: 11948 - RNA, 17 nt, Artificial Sequence
  Synthetic oligonucleotide: BID-2424
cucucccaggguccccu

SEQ ID NO: 11949 - RNA, 17 nt, Artificial Sequence
  Synthetic oligonucleotide: BID-2456
cucuccggggcuggccu

SEQ ID NO: 11950 - RNA, 17 nt, Artificial Sequence
  Synthetic oligonucleotide: BID-2275
cugccugccgccugccc

SEQ ID NO: 11951 - RNA, 17 nt, Artificial Sequence
  Synthetic oligonucleotide: BID-2439
cuggaaagaccacggug

SEQ ID NO: 11952 - RNA, 17 nt, Artificial Sequence
  Synthetic oligonucleotide: BID-2483
cuggcucccaccgcggu

SEQ ID NO: 11953 - RNA, 17 nt, Artificial Sequence
  Synthetic oligonucleotide: BID-2283
cugggcccgaccgcggu

SEQ ID NO: 11954 - RNA, 17 nt, Artificial Sequence
  Synthetic oligonucleotide: BID-2325
cuggggauucaggggag

SEQ ID NO: 11955 - RNA, 17 nt, Artificial Sequence
  Synthetic oligonucleotide: BID-44
cuggggucaugauggcu

SEQ ID NO: 11956 - RNA, 17 nt, Artificial Sequence
  Synthetic oligonucleotide: BID-49
uaagugggcugggggcu

SEQ ID NO: 11957 - RNA, 17 nt, Artificial Sequence
  Synthetic oligonucleotide: BID-2513
uaccccgggaggggcgc

SEQ ID NO: 11958 - RNA, 17 nt, Artificial Sequence
  Synthetic oligonucleotide: BID-2514
ucaccacccuccagccg

SEQ ID NO: 11959 - RNA, 17 nt, Artificial Sequence
  Synthetic oligonucleotide: BID-2408
ucaccugcaggcagggu

SEQ ID NO: 11960 - RNA, 17 nt, Artificial Sequence
  Synthetic oligonucleotide: BID-2373
ucagccaccaaguggcu

SEQ ID NO: 11961 - RNA, 17 nt, Artificial Sequence
  Synthetic oligonucleotide: BID-2356
ucagggcugacaaagcg

SEQ ID NO: 11962 - RNA, 17 nt, Artificial Sequence
  Synthetic oligonucleotide: BID-2519
uccagccgcgggggcgc

SEQ ID NO: 11963 - RNA, 17 nt, Artificial Sequence
  Synthetic oligonucleotide: BID-2426
ucccagcagcagcagcg

SEQ ID NO: 11964 - RNA, 17 nt, Artificial Sequence
  Synthetic oligonucleotide: BID-2364
uccucgcugcugcugcu

SEQ ID NO: 11965 - RNA, 17 nt, Artificial Sequence
  Synthetic oligonucleotide: BID-2304
uccucggcgcggccggc

SEQ ID NO: 11966 - RNA, 17 nt, Artificial Sequence
  Synthetic oligonucleotide: BID-2318
uccucuccacguggccu

SEQ ID NO: 11967 - RNA, 17 nt, Artificial Sequence
  Synthetic oligonucleotide: BID-2482
uccucuggcucccaccg

SEQ ID NO: 11968 - RNA, 17 nt, Artificial Sequence
  Synthetic oligonucleotide: BID-2425
ucucccaggguccccug

SEQ ID NO: 11969 - RNA, 17 nt, Artificial Sequence
  Synthetic oligonucleotide: BID-2458
ugaauccccaggccacg

SEQ ID NO: 11970 - RNA, 17 nt, Artificial Sequence
  Synthetic oligonucleotide: BID-2272
ugcacccgcgccccucc

SEQ ID NO: 11971 - RNA, 17 nt, Artificial Sequence
  Synthetic oligonucleotide: BID-2276
ugccgccugccccggcg

SEQ ID NO: 11972 - RNA, 17 nt, Artificial Sequence
  Synthetic oligonucleotide: BID-2464
ugccggccgcgccgagg

SEQ ID NO: 11973 - RNA, 17 nt, Artificial Sequence
  Synthetic oligonucleotide: BID-2353
ugccggcuccucccgag

SEQ ID NO: 11974 - RNA, 17 nt, Artificial Sequence
  Synthetic oligonucleotide: BID-2413
ugccugcaggugaaggc

SEQ ID NO: 11975 - RNA, 17 nt, Artificial Sequence
  Synthetic oligonucleotide: BID-2335
ugcggggcgcggggagg

SEQ ID NO: 11976 - RNA, 17 nt, Artificial Sequence
  Synthetic oligonucleotide: BID-45
ugcuccuccagccggcc

SEQ ID NO: 11977 - RNA, 17 nt, Artificial Sequence
  Synthetic oligonucleotide: BID-2440
uggaaagaccacggugu

SEQ ID NO: 11978 - RNA, 17 nt, Artificial Sequence
  Synthetic oligonucleotide: BID-39
uggcucggugggcagcg

SEQ ID NO: 11979 - RNA, 17 nt, Artificial Sequence
  Synthetic oligonucleotide: BID-2368
uggcugaaugaccccag

SEQ ID NO: 11980 - RNA, 17 nt, Artificial Sequence
  Synthetic oligonucleotide: BID-2328
uucaggggaggggugcg

SEQ ID NO: 11981 - RNA, 17 nt, Artificial Sequence
  Synthetic oligonucleotide: BID-40
uucuguaagugggcugg

SEQ ID NO: 11982 - RNA, 17 nt, Artificial Sequence
  Synthetic oligonucleotide: BID-2417
uugccagcccagccacu

SEQ ID NO: 11983 - RNA, 17 nt, Artificial Sequence
  Synthetic oligonucleotide: BID-2455
uuucuccucuccggggc

SEQ ID NO: 11984 - RNA, 20 nt, Artificial Sequence
  Synthetic oligonucleotide: BID-684
gaccagccugagaccuccag

SEQ ID NO: 11985 - RNA, 20 nt, Artificial Sequence
  Synthetic oligonucleotide: BID-685
cagccugagaccuccagagg

SEQ ID NO: 11986 - RNA, 20 nt, Artificial Sequence
  Synthetic oligonucleotide: BID-686
aaacugaaaaagaaauuagu

SEQ ID NO: 11987 - RNA, 20 nt, Artificial Sequence
  Synthetic oligonucleotide: BID-687
aacugaaaaagaaauuaguu

SEQ ID NO: 11988 - RNA, 20 nt, Artificial Sequence
  Synthetic oligonucleotide: BID-688
aaaaagaaauuaguugggug

SEQ ID NO: 11989 - RNA, 20 nt, Artificial Sequence
  Synthetic oligonucleotide: BID-689
aaagaauaaacaacaagcac

SEQ ID NO: 11990 - RNA, 20 nt, Artificial Sequence
  Synthetic oligonucleotide: BID-690
aagaauaaacaacaagcaca

SEQ ID NO: 11991 - RNA, 20 nt, Artificial Sequence
  Synthetic oligonucleotide: BID-691
uaaacaacaagcacagggac

SEQ ID NO: 11992 - RNA, 20 nt, Artificial Sequence
  Synthetic oligonucleotide: BID-692
aacaagcacagggacuggug

SEQ ID NO: 11993 - RNA, 20 nt, Artificial Sequence
  Synthetic oligonucleotide: BID-693
acaagcacagggacugguga

SEQ ID NO: 11994 - RNA, 20 nt, Artificial Sequence
  Synthetic oligonucleotide: BID-694
caagcacagggacuggugag

SEQ ID NO: 11995 - RNA, 20 nt, Artificial Sequence
  Synthetic oligonucleotide: BID-695
cacagggacuggugaggggc

SEQ ID NO: 11996 - RNA, 20 nt, Artificial Sequence
  Synthetic oligonucleotide: BID-696
acagggacuggugaggggcu

SEQ ID NO: 11997 - RNA, 20 nt, Artificial Sequence
  Synthetic oligonucleotide: BID-697
cagauucucugcaacccaca

SEQ ID NO: 11998 - RNA, 20 nt, Artificial Sequence
  Synthetic oligonucleotide: BID-698
ucacccacuuuccaaacccc

SEQ ID NO: 11999 - RNA, 20 nt, Artificial Sequence
  Synthetic oligonucleotide: BID-699
uccaaaccccugguuccgug

SEQ ID NO: 12000 - RNA, 20 nt, Artificial Sequence
  Synthetic oligonucleotide: BID-700
agacuguuccagaaacagcc

SEQ ID NO: 12001 - RNA, 20 nt, Artificial Sequence
  Synthetic oligonucleotide: BID-701
gacuguuccagaaacagccu

SEQ ID NO: 12002 - RNA, 20 nt, Artificial Sequence
  Synthetic oligonucleotide: BID-702
acuguuccagaaacagccug

SEQ ID NO: 12003 - RNA, 20 nt, Artificial Sequence
  Synthetic oligonucleotide: BID-703
auguuucccagagaaucauu

SEQ ID NO: 12004 - RNA, 20 nt, Artificial Sequence
  Synthetic oligonucleotide: BID-704
aucauuaggaauuaucccag

SEQ ID NO: 12005 - RNA, 20 nt, Artificial Sequence
  Synthetic oligonucleotide: BID-705
aggaauuaucccagcggcgc

SEQ ID NO: 12006 - RNA, 20 nt, Artificial Sequence
  Synthetic oligonucleotide: BID-706
cccagcggcgcuggaguaag

SEQ ID NO: 12007 - RNA, 20 nt, Artificial Sequence
  Synthetic oligonucleotide: BID-707
guaaguggccaacuuaaagu

SEQ ID NO: 12008 - RNA, 20 nt, Artificial Sequence
  Synthetic oligonucleotide: BID-708
cugucugaaacagucgcgua

SEQ ID NO: 12009 - RNA, 20 nt, Artificial Sequence
  Synthetic oligonucleotide: BID-709
ugucugaaacagucgcguaa

SEQ ID NO: 12010 - RNA, 20 nt, Artificial Sequence
  Synthetic oligonucleotide: BID-710
gucugaaacagucgcguaag

SEQ ID NO: 12011 - RNA, 20 nt, Artificial Sequence
  Synthetic oligonucleotide: BID-711
aaacagucgcguaaggggua

SEQ ID NO: 12012 - RNA, 20 nt, Artificial Sequence
  Synthetic oligonucleotide: BID-712
aacagucgcguaagggguaa

SEQ ID NO: 12013 - RNA, 20 nt, Artificial Sequence
  Synthetic oligonucleotide: BID-713
agucgcguaagggguaaggg

SEQ ID NO: 12014 - RNA, 20 nt, Artificial Sequence
  Synthetic oligonucleotide: BID-714
agggguaaggguggaaagcc

SEQ ID NO: 12015 - RNA, 20 nt, Artificial Sequence
  Synthetic oligonucleotide: BID-715
ccugguucucacugcgcugc

SEQ ID NO: 12016 - RNA, 20 nt, Artificial Sequence
  Synthetic oligonucleotide: BID-716
cccgcuccacagccccgcgc

SEQ ID NO: 12017 - RNA, 20 nt, Artificial Sequence
  Synthetic oligonucleotide: BID-717
uccacagccccgcgccggcg

SEQ ID NO: 12018 - RNA, 20 nt, Artificial Sequence
  Synthetic oligonucleotide: BID-718
ccacagccccgcgccggcgc

SEQ ID NO: 12019 - RNA, 20 nt, Artificial Sequence
  Synthetic oligonucleotide: BID-719
ccgcgccggcgcgggcuccc

SEQ ID NO: 12020 - RNA, 20 nt, Artificial Sequence
  Synthetic oligonucleotide: BID-720
cgcgccggcgcgggcucccc

SEQ ID NO: 12021 - RNA, 17 nt, Artificial Sequence
  Synthetic oligonucleotide: BID-721
cagccugagaccuccag

SEQ ID NO: 12022 - RNA, 17 nt, Artificial Sequence
  Synthetic oligonucleotide: BID-722
ccugagaccuccagagg

SEQ ID NO: 12023 - RNA, 17 nt, Artificial Sequence
  Synthetic oligonucleotide: BID-723
cugaaaaagaaauuagu

SEQ ID NO: 12024 - RNA, 17 nt, Artificial Sequence
  Synthetic oligonucleotide: BID-724
ugaaaaagaaauuaguu

SEQ ID NO: 12025 - RNA, 17 nt, Artificial Sequence
  Synthetic oligonucleotide: BID-725
aagaaauuaguugggug

SEQ ID NO: 12026 - RNA, 17 nt, Artificial Sequence
  Synthetic oligonucleotide: BID-726
gaauaaacaacaagcac

SEQ ID NO: 12027 - RNA, 17 nt, Artificial Sequence
  Synthetic oligonucleotide: BID-727
aauaaacaacaagcaca

SEQ ID NO: 12028 - RNA, 17 nt, Artificial Sequence
  Synthetic oligonucleotide: BID-728
acaacaagcacagggac

SEQ ID NO: 12029 - RNA, 17 nt, Artificial Sequence
  Synthetic oligonucleotide: BID-729
aagcacagggacuggug

SEQ ID NO: 12030 - RNA, 17 nt, Artificial Sequence
  Synthetic oligonucleotide: BID-730
agcacagggacugguga

SEQ ID NO: 12031 - RNA, 17 nt, Artificial Sequence
  Synthetic oligonucleotide: BID-731
gcacagggacuggugag

SEQ ID NO: 12032 - RNA, 17 nt, Artificial Sequence
  Synthetic oligonucleotide: BID-732
agggacuggugaggggc

SEQ ID NO: 12033 - RNA, 17 nt, Artificial Sequence
  Synthetic oligonucleotide: BID-733
gggacuggugaggggcu

SEQ ID NO: 12034 - RNA, 17 nt, Artificial Sequence
  Synthetic oligonucleotide: BID-734
auucucugcaacccaca

SEQ ID NO: 12035 - RNA, 17 nt, Artificial Sequence
  Synthetic oligonucleotide: BID-735
cccacuuuccaaacccc

SEQ ID NO: 12036 - RNA, 17 nt, Artificial Sequence
  Synthetic oligonucleotide: BID-736
aaaccccugguuccgug

SEQ ID NO: 12037 - RNA, 17 nt, Artificial Sequence
  Synthetic oligonucleotide: BID-737
cuguuccagaaacagcc

SEQ ID NO: 12038 - RNA, 17 nt, Artificial Sequence
  Synthetic oligonucleotide: BID-738
uguuccagaaacagccu

SEQ ID NO: 12039 - RNA, 17 nt, Artificial Sequence
  Synthetic oligonucleotide: BID-739
guuccagaaacagccug

SEQ ID NO: 12040 - RNA, 17 nt, Artificial Sequence
  Synthetic oligonucleotide: BID-740
uuucccagagaaucauu

SEQ ID NO: 12041 - RNA, 17 nt, Artificial Sequence
  Synthetic oligonucleotide: BID-741
auuaggaauuaucccag

SEQ ID NO: 12042 - RNA, 17 nt, Artificial Sequence
  Synthetic oligonucleotide: BID-742
aauuaucccagcggcgc

SEQ ID NO: 12043 - RNA, 17 nt, Artificial Sequence
  Synthetic oligonucleotide: BID-743
agcggcgcuggaguaag

SEQ ID NO: 12044 - RNA, 17 nt, Artificial Sequence
  Synthetic oligonucleotide: BID-744
aguggccaacuuaaagu

SEQ ID NO: 12045 - RNA, 17 nt, Artificial Sequence
  Synthetic oligonucleotide: BID-745
ucugaaacagucgcgua

SEQ ID NO: 12046 - RNA, 17 nt, Artificial Sequence
  Synthetic oligonucleotide: BID-746
cugaaacagucgcguaa

SEQ ID NO: 12047 - RNA, 17 nt, Artificial Sequence
  Synthetic oligonucleotide: BID-747
ugaaacagucgcguaag

SEQ ID NO: 12048 - RNA, 17 nt, Artificial Sequence
  Synthetic oligonucleotide: BID-748
cagucgcguaaggggua

SEQ ID NO: 12049 - RNA, 17 nt, Artificial Sequence
  Synthetic oligonucleotide: BID-749
agucgcguaagggguaa

SEQ ID NO: 12050 - RNA, 17 nt, Artificial Sequence
  Synthetic oligonucleotide: BID-750
cgcguaagggguaaggg

SEQ ID NO: 12051 - RNA, 17 nt, Artificial Sequence
  Synthetic oligonucleotide: BID-751
gguaaggguggaaagcc

SEQ ID NO: 12052 - RNA, 17 nt, Artificial Sequence
  Synthetic oligonucleotide: BID-752
gguucucacugcgcugc

SEQ ID NO: 12053 - RNA, 17 nt, Artificial Sequence
  Synthetic oligonucleotide: BID-753
gcuccacagccccgcgc

SEQ ID NO: 12054 - RNA, 17 nt, Artificial Sequence
  Synthetic oligonucleotide: BID-754
acagccccgcgccggcg

SEQ ID NO: 12055 - RNA, 17 nt, Artificial Sequence
  Synthetic oligonucleotide: BID-755
cagccccgcgccggcgc

SEQ ID NO: 12056 - RNA, 17 nt, Artificial Sequence
  Synthetic oligonucleotide: BID-756
cgccggcgcgggcuccc

SEQ ID NO: 12057 - RNA, 17 nt, Artificial Sequence
  Synthetic oligonucleotide: BID-757
gccggcgcgggcucccc

SEQ ID NO: 12058 - RNA, 20 nt, Artificial Sequence
  Synthetic oligonucleotide: BID-758
gggacccggggagcccgcgc

SEQ ID NO: 12059 - RNA, 20 nt, Artificial Sequence
  Synthetic oligonucleotide: BID-759
ccggggagcccgcgccggcg

SEQ ID NO: 12060 - RNA, 20 nt, Artificial Sequence
  Synthetic oligonucleotide: BID-760
cggggagcccgcgccggcgc

SEQ ID NO: 12061 - RNA, 20 nt, Artificial Sequence
  Synthetic oligonucleotide: BID-761
ggggagcccgcgccggcgcg

SEQ ID NO: 12062 - RNA, 20 nt, Artificial Sequence
  Synthetic oligonucleotide: BID-762
cccgcgccggcgcggggcug

SEQ ID NO: 12063 - RNA, 20 nt, Artificial Sequence
  Synthetic oligonucleotide: BID-763
gccggcgcggggcuguggag

SEQ ID NO: 12064 - RNA, 20 nt, Artificial Sequence
  Synthetic oligonucleotide: BID-764
ccggcgcggggcuguggagc

SEQ ID NO: 12065 - RNA, 20 nt, Artificial Sequence
  Synthetic oligonucleotide: BID-765
cggcgcggggcuguggagcg

SEQ ID NO: 12066 - RNA, 20 nt, Artificial Sequence
  Synthetic oligonucleotide: BID-766
cgcggggcuguggagcgggg

SEQ ID NO: 12067 - RNA, 20 nt, Artificial Sequence
  Synthetic oligonucleotide: BID-767
gcggggcuguggagcggggc

SEQ ID NO: 12068 - RNA, 20 nt, Artificial Sequence
  Synthetic oligonucleotide: BID-768
cggggcuguggagcggggcg

SEQ ID NO: 12069 - RNA, 20 nt, Artificial Sequence
  Synthetic oligonucleotide: BID-769
uguggagcggggcggggagc

SEQ ID NO: 12070 - RNA, 20 nt, Artificial Sequence
  Synthetic oligonucleotide: BID-770
ccggcagcgcagugagaacc

SEQ ID NO: 12071 - RNA, 20 nt, Artificial Sequence
  Synthetic oligonucleotide: BID-771
agugucguccaacuuuaagu

SEQ ID NO: 12072 - RNA, 20 nt, Artificial Sequence
  Synthetic oligonucleotide: BID-772
gccacuuacuccagcgccgc

SEQ ID NO: 12073 - RNA, 20 nt, Artificial Sequence
  Synthetic oligonucleotide: BID-773
ccacuuacuccagcgccgcu

SEQ ID NO: 12074 - RNA, 20 nt, Artificial Sequence
  Synthetic oligonucleotide: BID-774
gauaauuccuaaugauucuc

SEQ ID NO: 12075 - RNA, 20 nt, Artificial Sequence
  Synthetic oligonucleotide: BID-775
auaauuccuaaugauucucu

SEQ ID NO: 12076 - RNA, 20 nt, Artificial Sequence
  Synthetic oligonucleotide: BID-776
gggaaacauucagaaucccc

SEQ ID NO: 12077 - RNA, 20 nt, Artificial Sequence
  Synthetic oligonucleotide: BID-777
cagaauccccaggcuguuuc

SEQ ID NO: 12078 - RNA, 20 nt, Artificial Sequence
  Synthetic oligonucleotide: BID-778
aggcuguuucuggaacaguc

SEQ ID NO: 12079 - RNA, 20 nt, Artificial Sequence
  Synthetic oligonucleotide: BID-779
ggcuguuucuggaacagucu

SEQ ID NO: 12080 - RNA, 20 nt, Artificial Sequence
  Synthetic oligonucleotide: BID-780
gcuguuucuggaacagucug

SEQ ID NO: 12081 - RNA, 20 nt, Artificial Sequence
  Synthetic oligonucleotide: BID-781
guuucuggaacagucugggg

SEQ ID NO: 12082 - RNA, 20 nt, Artificial Sequence
  Synthetic oligonucleotide: BID-782
cagucugggguggucauucu

SEQ ID NO: 12083 - RNA, 20 nt, Artificial Sequence
  Synthetic oligonucleotide: BID-783
guggucauucuagguccuca

SEQ ID NO: 12084 - RNA, 20 nt, Artificial Sequence
  Synthetic oligonucleotide: BID-784
uucuagguccucacggaacc

SEQ ID NO: 12085 - RNA, 20 nt, Artificial Sequence
  Synthetic oligonucleotide: BID-785
ucuagguccucacggaacca

SEQ ID NO: 12086 - RNA, 20 nt, Artificial Sequence
  Synthetic oligonucleotide: BID-786
cuagguccucacggaaccag

SEQ ID NO: 12087 - RNA, 20 nt, Artificial Sequence
  Synthetic oligonucleotide: BID-787
uccucacggaaccagggguu

SEQ ID NO: 12088 - RNA, 20 nt, Artificial Sequence
  Synthetic oligonucleotide: BID-788
ggaaccagggguuuggaaag

SEQ ID NO: 12089 - RNA, 20 nt, Artificial Sequence
  Synthetic oligonucleotide: BID-789
gaaccagggguuuggaaagu

SEQ ID NO: 12090 - RNA, 20 nt, Artificial Sequence
  Synthetic oligonucleotide: BID-790
ggaaagugggugaagccaug

SEQ ID NO: 12091 - RNA, 20 nt, Artificial Sequence
  Synthetic oligonucleotide: BID-791
gaaagugggugaagccaugu

SEQ ID NO: 12092 - RNA, 20 nt, Artificial Sequence
  Synthetic oligonucleotide: BID-792
cauguggguugcagagaauc

SEQ ID NO: 12093 - RNA, 20 nt, Artificial Sequence
  Synthetic oligonucleotide: BID-793
uuguuuauucuuuaauuauu

SEQ ID NO: 12094 - RNA, 20 nt, Artificial Sequence
  Synthetic oligonucleotide: BID-794
guuuaacauauagauaaugc

SEQ ID NO: 12095 - RNA, 20 nt, Artificial Sequence
  Synthetic oligonucleotide: BID-795
uuuaacauauagauaaugcu

SEQ ID NO: 12096 - RNA, 20 nt, Artificial Sequence
  Synthetic oligonucleotide: BID-796
auagauaaugcugggacuac

SEQ ID NO: 12097 - RNA, 20 nt, Artificial Sequence
  Synthetic oligonucleotide: BID-797
auuucuuuuucaguuuuuag

SEQ ID NO: 12098 - RNA, 20 nt, Artificial Sequence
  Synthetic oligonucleotide: BID-798
ucuuuuucaguuuuuagugg

SEQ ID NO: 12099 - RNA, 20 nt, Artificial Sequence
  Synthetic oligonucleotide: BID-799
uuuucaguuuuuaguggagg

SEQ ID NO: 12100 - RNA, 20 nt, Artificial Sequence
  Synthetic oligonucleotide: BID-800
ucaguuuuuaguggaggugg

SEQ ID NO: 12101 - RNA, 20 nt, Artificial Sequence
  Synthetic oligonucleotide: BID-801
caguuuuuaguggagguggu

SEQ ID NO: 12102 - RNA, 20 nt, Artificial Sequence
  Synthetic oligonucleotide: BID-802
aguuuuuaguggagguggug

SEQ ID NO: 12103 - RNA, 20 nt, Artificial Sequence
  Synthetic oligonucleotide: BID-803
guuuuuaguggagguggugg

SEQ ID NO: 12104 - RNA, 20 nt, Artificial Sequence
  Synthetic oligonucleotide: BID-804
uuuuuaguggaggugguggg

SEQ ID NO: 12105 - RNA, 20 nt, Artificial Sequence
  Synthetic oligonucleotide: BID-805
uuuuaguggagguggugggg

SEQ ID NO: 12106 - RNA, 20 nt, Artificial Sequence
  Synthetic oligonucleotide: BID-806
uuuaguggaggugguggggg

SEQ ID NO: 12107 - RNA, 20 nt, Artificial Sequence
  Synthetic oligonucleotide: BID-807
uuaguggagguggugggggg

SEQ ID NO: 12108 - RNA, 20 nt, Artificial Sequence
  Synthetic oligonucleotide: BID-808
uaguggaggugguggggggg

SEQ ID NO: 12109 - RNA, 20 nt, Artificial Sequence
  Synthetic oligonucleotide: BID-809
ggggggggggucuccaccuc

SEQ ID NO: 12110 - RNA, 20 nt, Artificial Sequence
  Synthetic oligonucleotide: BID-810
gggggggucuccaccucugg

SEQ ID NO: 12111 - RNA, 20 nt, Artificial Sequence
  Synthetic oligonucleotide: BID-811
ucuccaccucuggaggucuc

SEQ ID NO: 12112 - RNA, 20 nt, Artificial Sequence
  Synthetic oligonucleotide: BID-812
caccucuggaggucucaggc

SEQ ID NO: 12113 - RNA, 17 nt, Artificial Sequence
  Synthetic oligonucleotide: BID-813
acccggggagcccgcgc

SEQ ID NO: 12114 - RNA, 17 nt, Artificial Sequence
  Synthetic oligonucleotide: BID-814
gggagcccgcgccggcg

SEQ ID NO: 12115 - RNA, 17 nt, Artificial Sequence
  Synthetic oligonucleotide: BID-815
ggagcccgcgccggcgc

SEQ ID NO: 12116 - RNA, 17 nt, Artificial Sequence
  Synthetic oligonucleotide: BID-816
gagcccgcgccggcgcg

SEQ ID NO: 12117 - RNA, 17 nt, Artificial Sequence
  Synthetic oligonucleotide: BID-817
gcgccggcgcggggcug

SEQ ID NO: 12118 - RNA, 17 nt, Artificial Sequence
  Synthetic oligonucleotide: BID-818
ggcgcggggcuguggag

SEQ ID NO: 12119 - RNA, 17 nt, Artificial Sequence
  Synthetic oligonucleotide: BID-819
gcgcggggcuguggagc

SEQ ID NO: 12120 - RNA, 17 nt, Artificial Sequence
  Synthetic oligonucleotide: BID-820
cgcggggcuguggagcg

SEQ ID NO: 12121 - RNA, 17 nt, Artificial Sequence
  Synthetic oligonucleotide: BID-821
ggggcuguggagcgggg

SEQ ID NO: 12122 - RNA, 17 nt, Artificial Sequence
  Synthetic oligonucleotide: BID-822
gggcuguggagcggggc

SEQ ID NO: 12123 - RNA, 17 nt, Artificial Sequence
  Synthetic oligonucleotide: BID-823
ggcuguggagcggggcg

SEQ ID NO: 12124 - RNA, 17 nt, Artificial Sequence
  Synthetic oligonucleotide: BID-824
ggagcggggcggggagc

SEQ ID NO: 12125 - RNA, 17 nt, Artificial Sequence
  Synthetic oligonucleotide: BID-825
gcagcgcagugagaacc

SEQ ID NO: 12126 - RNA, 17 nt, Artificial Sequence
  Synthetic oligonucleotide: BID-826
gucguccaacuuuaagu

SEQ ID NO: 12127 - RNA, 17 nt, Artificial Sequence
  Synthetic oligonucleotide: BID-827
acuuacuccagcgccgc

SEQ ID NO: 12128 - RNA, 17 nt, Artificial Sequence
  Synthetic oligonucleotide: BID-828
cuuacuccagcgccgcu

SEQ ID NO: 12129 - RNA, 17 nt, Artificial Sequence
  Synthetic oligonucleotide: BID-829
aauuccuaaugauucuc

SEQ ID NO: 12130 - RNA, 17 nt, Artificial Sequence
  Synthetic oligonucleotide: BID-830
auuccuaaugauucucu

SEQ ID NO: 12131 - RNA, 17 nt, Artificial Sequence
  Synthetic oligonucleotide: BID-831
aaacauucagaaucccc

SEQ ID NO: 12132 - RNA, 17 nt, Artificial Sequence
  Synthetic oligonucleotide: BID-832
aauccccaggcuguuuc

SEQ ID NO: 12133 - RNA, 17 nt, Artificial Sequence
  Synthetic oligonucleotide: BID-833
cuguuucuggaacaguc

SEQ ID NO: 12134 - RNA, 17 nt, Artificial Sequence
  Synthetic oligonucleotide: BID-834
uguuucuggaacagucu

SEQ ID NO: 12135 - RNA, 17 nt, Artificial Sequence
  Synthetic oligonucleotide: BID-835
guuucuggaacagucug

SEQ ID NO: 12136 - RNA, 17 nt, Artificial Sequence
  Synthetic oligonucleotide: BID-836
ucuggaacagucugggg

SEQ ID NO: 12137 - RNA, 17 nt, Artificial Sequence
  Synthetic oligonucleotide: BID-837
ucugggguggucauucu

SEQ ID NO: 12138 - RNA, 17 nt, Artificial Sequence
  Synthetic oligonucleotide: BID-838
gucauucuagguccuca

SEQ ID NO: 12139 - RNA, 17 nt, Artificial Sequence
  Synthetic oligonucleotide: BID-839
uagguccucacggaacc

SEQ ID NO: 12140 - RNA, 17 nt, Artificial Sequence
  Synthetic oligonucleotide: BID-840
agguccucacggaacca

SEQ ID NO: 12141 - RNA, 17 nt, Artificial Sequence
  Synthetic oligonucleotide: BID-841
gguccucacggaaccag

SEQ ID NO: 12142 - RNA, 17 nt, Artificial Sequence
  Synthetic oligonucleotide: BID-842
ucacggaaccagggguu

SEQ ID NO: 12143 - RNA, 17 nt, Artificial Sequence
  Synthetic oligonucleotide: BID-843
accagggguuuggaaag

SEQ ID NO: 12144 - RNA, 17 nt, Artificial Sequence
  Synthetic oligonucleotide: BID-844
ccagggguuuggaaagu

SEQ ID NO: 12145 - RNA, 17 nt, Artificial Sequence
  Synthetic oligonucleotide: BID-845
aagugggugaagccaug

SEQ ID NO: 12146 - RNA, 17 nt, Artificial Sequence
  Synthetic oligonucleotide: BID-846
agugggugaagccaugu

SEQ ID NO: 12147 - RNA, 17 nt, Artificial Sequence
  Synthetic oligonucleotide: BID-847
guggguugcagagaauc

SEQ ID NO: 12148 - RNA, 17 nt, Artificial Sequence
  Synthetic oligonucleotide: BID-848
uuuauucuuuaauuauu

SEQ ID NO: 12149 - RNA, 17 nt, Artificial Sequence
  Synthetic oligonucleotide: BID-849
uaacauauagauaaugc

SEQ ID NO: 12150 - RNA, 17 nt, Artificial Sequence
  Synthetic oligonucleotide: BID-850
aacauauagauaaugcu

SEQ ID NO: 12151 - RNA, 17 nt, Artificial Sequence
  Synthetic oligonucleotide: BID-851
gauaaugcugggacuac

SEQ ID NO: 12152 - RNA, 17 nt, Artificial Sequence
  Synthetic oligonucleotide: BID-852
ucuuuuucaguuuuuag

SEQ ID NO: 12153 - RNA, 17 nt, Artificial Sequence
  Synthetic oligonucleotide: BID-853
uuuucaguuuuuagugg

SEQ ID NO: 12154 - RNA, 17 nt, Artificial Sequence
  Synthetic oligonucleotide: BID-854
ucaguuuuuaguggagg

SEQ ID NO: 12155 - RNA, 17 nt, Artificial Sequence
  Synthetic oligonucleotide: BID-855
guuuuuaguggaggugg

SEQ ID NO: 12156 - RNA, 17 nt, Artificial Sequence
  Synthetic oligonucleotide: BID-856
uuuuuaguggagguggu

SEQ ID NO: 12157 - RNA, 17 nt, Artificial Sequence
  Synthetic oligonucleotide: BID-857
uuuuaguggagguggug

SEQ ID NO: 12158 - RNA, 17 nt, Artificial Sequence
  Synthetic oligonucleotide: BID-858
uuuaguggagguggugg

SEQ ID NO: 12159 - RNA, 17 nt, Artificial Sequence
  Synthetic oligonucleotide: BID-859
uuaguggaggugguggg

SEQ ID NO: 12160 - RNA, 17 nt, Artificial Sequence
  Synthetic oligonucleotide: BID-860
uaguggagguggugggg

SEQ ID NO: 12161 - RNA, 17 nt, Artificial Sequence
  Synthetic oligonucleotide: BID-861
aguggaggugguggggg

SEQ ID NO: 12162 - RNA, 17 nt, Artificial Sequence
  Synthetic oligonucleotide: BID-862
guggagguggugggggg

SEQ ID NO: 12163 - RNA, 17 nt, Artificial Sequence
  Synthetic oligonucleotide: BID-863
uggaggugguggggggg

SEQ ID NO: 12164 - RNA, 17 nt, Artificial Sequence
  Synthetic oligonucleotide: BID-864
gggggggucuccaccuc

SEQ ID NO: 12165 - RNA, 17 nt, Artificial Sequence
  Synthetic oligonucleotide: BID-865
ggggucuccaccucugg

SEQ ID NO: 12166 - RNA, 17 nt, Artificial Sequence
  Synthetic oligonucleotide: BID-866
ccaccucuggaggucuc

SEQ ID NO: 12167 - RNA, 17 nt, Artificial Sequence
  Synthetic oligonucleotide: BID-867
cucuggaggucucaggc

SEQ ID NO: 12168 - RNA, 20 nt, Artificial Sequence
  Synthetic oligonucleotide: BID-868
cagagcucuuccaccuucuc

SEQ ID NO: 12169 - RNA, 20 nt, Artificial Sequence
  Synthetic oligonucleotide: BID-869
ucaggcuugcacccccuucc

SEQ ID NO: 12170 - RNA, 20 nt, Artificial Sequence
  Synthetic oligonucleotide: BID-870
cucaguccucgcucucacug

SEQ ID NO: 12171 - RNA, 20 nt, Artificial Sequence
  Synthetic oligonucleotide: BID-871
ucaguccucgcucucacugu

SEQ ID NO: 12172 - RNA, 20 nt, Artificial Sequence
  Synthetic oligonucleotide: BID-872
caguccucgcucucacugug

SEQ ID NO: 12173 - RNA, 20 nt, Artificial Sequence
  Synthetic oligonucleotide: BID-873
aguccucgcucucacugugg

SEQ ID NO: 12174 - RNA, 20 nt, Artificial Sequence
  Synthetic oligonucleotide: BID-874
ucacugugggggagcugcag

SEQ ID NO: 12175 - RNA, 20 nt, Artificial Sequence
  Synthetic oligonucleotide: BID-875
ugggggagcugcagaggaug

SEQ ID NO: 12176 - RNA, 20 nt, Artificial Sequence
  Synthetic oligonucleotide: BID-876
cacauuccaucuccacccac

SEQ ID NO: 12177 - RNA, 20 nt, Artificial Sequence
  Synthetic oligonucleotide: BID-877
auuccaucuccacccacagg

SEQ ID NO: 12178 - RNA, 20 nt, Artificial Sequence
  Synthetic oligonucleotide: BID-878
acccacaggaggcuuugaga

SEQ ID NO: 12179 - RNA, 20 nt, Artificial Sequence
  Synthetic oligonucleotide: BID-879
cccacaggaggcuuugagau

SEQ ID NO: 12180 - RNA, 20 nt, Artificial Sequence
  Synthetic oligonucleotide: BID-880
ccacaggaggcuuugagaug

SEQ ID NO: 12181 - RNA, 20 nt, Artificial Sequence
  Synthetic oligonucleotide: BID-881
cacaggaggcuuugagaugg

SEQ ID NO: 12182 - RNA, 20 nt, Artificial Sequence
  Synthetic oligonucleotide: BID-882
acaggaggcuuugagauggg

SEQ ID NO: 12183 - RNA, 20 nt, Artificial Sequence
  Synthetic oligonucleotide: BID-883
ugagauggggggagcucucc

SEQ ID NO: 12184 - RNA, 20 nt, Artificial Sequence
  Synthetic oligonucleotide: BID-884
gagauggggggagcucuccu

SEQ ID NO: 12185 - RNA, 20 nt, Artificial Sequence
  Synthetic oligonucleotide: BID-885
ggccugaaugugugccgucc

SEQ ID NO: 12186 - RNA, 20 nt, Artificial Sequence
  Synthetic oligonucleotide: BID-886
gccugaaugugugccguccu

SEQ ID NO: 12187 - RNA, 20 nt, Artificial Sequence
  Synthetic oligonucleotide: BID-887
ccugaaugugugccguccug

SEQ ID NO: 12188 - RNA, 20 nt, Artificial Sequence
  Synthetic oligonucleotide: BID-888
ccuggggcccugcagucccc

SEQ ID NO: 12189 - RNA, 20 nt, Artificial Sequence
  Synthetic oligonucleotide: BID-889
cuggggcccugcaguccccu

SEQ ID NO: 12190 - RNA, 20 nt, Artificial Sequence
  Synthetic oligonucleotide: BID-890
cgagaccagauucccugagc

SEQ ID NO: 12191 - RNA, 20 nt, Artificial Sequence
  Synthetic oligonucleotide: BID-891
gagaccagauucccugagcu

SEQ ID NO: 12192 - RNA, 20 nt, Artificial Sequence
  Synthetic oligonucleotide: BID-892
agaccagauucccugagcug

SEQ ID NO: 12193 - RNA, 20 nt, Artificial Sequence
  Synthetic oligonucleotide: BID-893
uucccugagcuggggucuua

SEQ ID NO: 12194 - RNA, 20 nt, Artificial Sequence
  Synthetic oligonucleotide: BID-894
ucccugagcuggggucuuaa

SEQ ID NO: 12195 - RNA, 20 nt, Artificial Sequence
  Synthetic oligonucleotide: BID-895
gagcuggggucuuaagggug

SEQ ID NO: 12196 - RNA, 20 nt, Artificial Sequence
  Synthetic oligonucleotide: BID-896
agcuggggucuuaagggugu

SEQ ID NO: 12197 - RNA, 20 nt, Artificial Sequence
  Synthetic oligonucleotide: BID-897
gcuggggucuuaagggugug

SEQ ID NO: 12198 - RNA, 20 nt, Artificial Sequence
  Synthetic oligonucleotide: BID-898
uaaggguguggggagcgcag

SEQ ID NO: 12199 - RNA, 20 nt, Artificial Sequence
  Synthetic oligonucleotide: BID-899
aaggguguggggagcgcaga

SEQ ID NO: 12200 - RNA, 20 nt, Artificial Sequence
  Synthetic oligonucleotide: BID-900
gggagcgcagagggauccuc

SEQ ID NO: 12201 - RNA, 20 nt, Artificial Sequence
  Synthetic oligonucleotide: BID-901
cagagggauccucuggcauc

SEQ ID NO: 12202 - RNA, 20 nt, Artificial Sequence
  Synthetic oligonucleotide: BID-902
uccucuggcaucaggaguug

SEQ ID NO: 12203 - RNA, 20 nt, Artificial Sequence
  Synthetic oligonucleotide: BID-903
guugagguagacagagcucc

SEQ ID NO: 12204 - RNA, 20 nt, Artificial Sequence
  Synthetic oligonucleotide: BID-904
uugagguagacagagcucca

SEQ ID NO: 12205 - RNA, 20 nt, Artificial Sequence
  Synthetic oligonucleotide: BID-905
agguagacagagcuccaggg

SEQ ID NO: 12206 - RNA, 20 nt, Artificial Sequence
  Synthetic oligonucleotide: BID-906
gagcuccagggaggcacugc

SEQ ID NO: 12207 - RNA, 20 nt, Artificial Sequence
  Synthetic oligonucleotide: BID-907
agcuccagggaggcacugcc

SEQ ID NO: 12208 - RNA, 20 nt, Artificial Sequence
  Synthetic oligonucleotide: BID-908
uccagggaggcacugccggg

SEQ ID NO: 12209 - RNA, 20 nt, Artificial Sequence
  Synthetic oligonucleotide: BID-909
cacugccgggaggacgaccc

SEQ ID NO: 12210 - RNA, 20 nt, Artificial Sequence
  Synthetic oligonucleotide: BID-910
ccuggccaagccucugccug

SEQ ID NO: 12211 - RNA, 20 nt, Artificial Sequence
  Synthetic oligonucleotide: BID-911
caagccucugccugcggccc

SEQ ID NO: 12212 - RNA, 20 nt, Artificial Sequence
  Synthetic oligonucleotide: BID-912
aagccucugccugcggccca

SEQ ID NO: 12213 - RNA, 20 nt, Artificial Sequence
  Synthetic oligonucleotide: BID-913
cccuucugccccucuugccc

SEQ ID NO: 12214 - RNA, 20 nt, Artificial Sequence
  Synthetic oligonucleotide: BID-914
ccuucugccccucuugccca

SEQ ID NO: 12215 - RNA, 20 nt, Artificial Sequence
  Synthetic oligonucleotide: BID-915
ucugccccucuugcccaggg

SEQ ID NO: 12216 - RNA, 20 nt, Artificial Sequence
  Synthetic oligonucleotide: BID-916
cugccccucuugcccaggga

SEQ ID NO: 12217 - RNA, 20 nt, Artificial Sequence
  Synthetic oligonucleotide: BID-917
cucuugcccagggagggaag

SEQ ID NO: 12218 - RNA, 20 nt, Artificial Sequence
  Synthetic oligonucleotide: BID-918
cagggagggaagaggaaaug

SEQ ID NO: 12219 - RNA, 20 nt, Artificial Sequence
  Synthetic oligonucleotide: BID-919
agggagggaagaggaaaugc

SEQ ID NO: 12220 - RNA, 20 nt, Artificial Sequence
  Synthetic oligonucleotide: BID-920
gggagggaagaggaaaugcg

SEQ ID NO: 12221 - RNA, 20 nt, Artificial Sequence
  Synthetic oligonucleotide: BID-921
aaugcggggucagcaguucg

SEQ ID NO: 12222 - RNA, 20 nt, Artificial Sequence
  Synthetic oligonucleotide: BID-922
cggggucagcaguucguggc

SEQ ID NO: 12223 - RNA, 20 nt, Artificial Sequence
  Synthetic oligonucleotide: BID-923
ggggucagcaguucguggcu

SEQ ID NO: 12224 - RNA, 20 nt, Artificial Sequence
  Synthetic oligonucleotide: BID-924
gggucagcaguucguggcug

SEQ ID NO: 12225 - RNA, 20 nt, Artificial Sequence
  Synthetic oligonucleotide: BID-925
aguucguggcugggguuuaa

SEQ ID NO: 12226 - RNA, 20 nt, Artificial Sequence
  Synthetic oligonucleotide: BID-926
cguggcugggguuuaaaggc

SEQ ID NO: 12227 - RNA, 20 nt, Artificial Sequence
  Synthetic oligonucleotide: BID-927
guggcugggguuuaaaggca

SEQ ID NO: 12228 - RNA, 20 nt, Artificial Sequence
  Synthetic oligonucleotide: BID-928
uuuaaaggcagggaucuccc

SEQ ID NO: 12229 - RNA, 20 nt, Artificial Sequence
  Synthetic oligonucleotide: BID-929
aaggcagggaucucccagga

SEQ ID NO: 12230 - RNA, 20 nt, Artificial Sequence
  Synthetic oligonucleotide: BID-930
aggcagggaucucccaggac

SEQ ID NO: 12231 - RNA, 20 nt, Artificial Sequence
  Synthetic oligonucleotide: BID-931
ggaucucccaggacgggcac

SEQ ID NO: 12232 - RNA, 20 nt, Artificial Sequence
  Synthetic oligonucleotide: BID-932
gaucucccaggacgggcaca

SEQ ID NO: 12233 - RNA, 20 nt, Artificial Sequence
  Synthetic oligonucleotide: BID-933
ggacgggcacagggagcaug

SEQ ID NO: 12234 - RNA, 17 nt, Artificial Sequence
  Synthetic oligonucleotide: BID-934
agcucuuccaccuucuc

SEQ ID NO: 12235 - RNA, 17 nt, Artificial Sequence
  Synthetic oligonucleotide: BID-935
ggcuugcacccccuucc

SEQ ID NO: 12236 - RNA, 17 nt, Artificial Sequence
  Synthetic oligonucleotide: BID-936
aguccucgcucucacug

SEQ ID NO: 12237 - RNA, 17 nt, Artificial Sequence
  Synthetic oligonucleotide: BID-937
guccucgcucucacugu

SEQ ID NO: 12238 - RNA, 17 nt, Artificial Sequence
  Synthetic oligonucleotide: BID-938
uccucgcucucacugug

SEQ ID NO: 12239 - RNA, 17 nt, Artificial Sequence
  Synthetic oligonucleotide: BID-939
ccucgcucucacugugg

SEQ ID NO: 12240 - RNA, 17 nt, Artificial Sequence
  Synthetic oligonucleotide: BID-940
cugugggggagcugcag

SEQ ID NO: 12241 - RNA, 17 nt, Artificial Sequence
  Synthetic oligonucleotide: BID-941
gggagcugcagaggaug

SEQ ID NO: 12242 - RNA, 17 nt, Artificial Sequence
  Synthetic oligonucleotide: BID-942
auuccaucuccacccac

SEQ ID NO: 12243 - RNA, 17 nt, Artificial Sequence
  Synthetic oligonucleotide: BID-943
ccaucuccacccacagg

SEQ ID NO: 12244 - RNA, 17 nt, Artificial Sequence
  Synthetic oligonucleotide: BID-944
cacaggaggcuuugaga

SEQ ID NO: 12245 - RNA, 17 nt, Artificial Sequence
  Synthetic oligonucleotide: BID-945
acaggaggcuuugagau

SEQ ID NO: 12246 - RNA, 17 nt, Artificial Sequence
  Synthetic oligonucleotide: BID-946
caggaggcuuugagaug

SEQ ID NO: 12247 - RNA, 17 nt, Artificial Sequence
  Synthetic oligonucleotide: BID-947
aggaggcuuugagaugg

SEQ ID NO: 12248 - RNA, 17 nt, Artificial Sequence
  Synthetic oligonucleotide: BID-948
ggaggcuuugagauggg

SEQ ID NO: 12249 - RNA, 17 nt, Artificial Sequence
  Synthetic oligonucleotide: BID-949
gauggggggagcucucc

SEQ ID NO: 12250 - RNA, 17 nt, Artificial Sequence
  Synthetic oligonucleotide: BID-950
auggggggagcucuccu

SEQ ID NO: 12251 - RNA, 17 nt, Artificial Sequence
  Synthetic oligonucleotide: BID-951
cugaaugugugccgucc

SEQ ID NO: 12252 - RNA, 17 nt, Artificial Sequence
  Synthetic oligonucleotide: BID-952
ugaaugugugccguccu

SEQ ID NO: 12253 - RNA, 17 nt, Artificial Sequence
  Synthetic oligonucleotide: BID-953
gaaugugugccguccug

SEQ ID NO: 12254 - RNA, 17 nt, Artificial Sequence
  Synthetic oligonucleotide: BID-954
ggggcccugcagucccc

SEQ ID NO: 12255 - RNA, 17 nt, Artificial Sequence
  Synthetic oligonucleotide: BID-955
gggcccugcaguccccu

SEQ ID NO: 12256 - RNA, 17 nt, Artificial Sequence
  Synthetic oligonucleotide: BID-956
gaccagauucccugagc

SEQ ID NO: 12257 - RNA, 17 nt, Artificial Sequence
  Synthetic oligonucleotide: BID-957
accagauucccugagcu

SEQ ID NO: 12258 - RNA, 17 nt, Artificial Sequence
  Synthetic oligonucleotide: BID-958
ccagauucccugagcug

SEQ ID NO: 12259 - RNA, 17 nt, Artificial Sequence
  Synthetic oligonucleotide: BID-959
ccugagcuggggucuua

SEQ ID NO: 12260 - RNA, 17 nt, Artificial Sequence
  Synthetic oligonucleotide: BID-960
cugagcuggggucuuaa

SEQ ID NO: 12261 - RNA, 17 nt, Artificial Sequence
  Synthetic oligonucleotide: BID-961
cuggggucuuaagggug

SEQ ID NO: 12262 - RNA, 17 nt, Artificial Sequence
  Synthetic oligonucleotide: BID-962
uggggucuuaagggugu

SEQ ID NO: 12263 - RNA, 17 nt, Artificial Sequence
  Synthetic oligonucleotide: BID-963
ggggucuuaagggugug

SEQ ID NO: 12264 - RNA, 17 nt, Artificial Sequence
  Synthetic oligonucleotide: BID-964
ggguguggggagcgcag

SEQ ID NO: 12265 - RNA, 17 nt, Artificial Sequence
  Synthetic oligonucleotide: BID-965
gguguggggagcgcaga

SEQ ID NO: 12266 - RNA, 17 nt, Artificial Sequence
  Synthetic oligonucleotide: BID-966
agcgcagagggauccuc

SEQ ID NO: 12267 - RNA, 17 nt, Artificial Sequence
  Synthetic oligonucleotide: BID-967
agggauccucuggcauc

SEQ ID NO: 12268 - RNA, 17 nt, Artificial Sequence
  Synthetic oligonucleotide: BID-968
ucuggcaucaggaguug

SEQ ID NO: 12269 - RNA, 17 nt, Artificial Sequence
  Synthetic oligonucleotide: BID-969
gagguagacagagcucc

SEQ ID NO: 12270 - RNA, 17 nt, Artificial Sequence
  Synthetic oligonucleotide: BID-970
agguagacagagcucca

SEQ ID NO: 12271 - RNA, 17 nt, Artificial Sequence
  Synthetic oligonucleotide: BID-971
uagacagagcuccaggg

SEQ ID NO: 12272 - RNA, 17 nt, Artificial Sequence
  Synthetic oligonucleotide: BID-972
cuccagggaggcacugc

SEQ ID NO: 12273 - RNA, 17 nt, Artificial Sequence
  Synthetic oligonucleotide: BID-973
uccagggaggcacugcc

SEQ ID NO: 12274 - RNA, 17 nt, Artificial Sequence
  Synthetic oligonucleotide: BID-974
agggaggcacugccggg

SEQ ID NO: 12275 - RNA, 17 nt, Artificial Sequence
  Synthetic oligonucleotide: BID-975
ugccgggaggacgaccc

SEQ ID NO: 12276 - RNA, 17 nt, Artificial Sequence
  Synthetic oligonucleotide: BID-976
ggccaagccucugccug

SEQ ID NO: 12277 - RNA, 17 nt, Artificial Sequence
  Synthetic oligonucleotide: BID-977
gccucugccugcggccc

SEQ ID NO: 12278 - RNA, 17 nt, Artificial Sequence
  Synthetic oligonucleotide: BID-978
ccucugccugcggccca

SEQ ID NO: 12279 - RNA, 17 nt, Artificial Sequence
  Synthetic oligonucleotide: BID-979
uucugccccucuugccc

SEQ ID NO: 12280 - RNA, 17 nt, Artificial Sequence
  Synthetic oligonucleotide: BID-980
ucugccccucuugccca

SEQ ID NO: 12281 - RNA, 17 nt, Artificial Sequence
  Synthetic oligonucleotide: BID-981
gccccucuugcccaggg

SEQ ID NO: 12282 - RNA, 17 nt, Artificial Sequence
  Synthetic oligonucleotide: BID-982
ccccucuugcccaggga

SEQ ID NO: 12283 - RNA, 17 nt, Artificial Sequence
  Synthetic oligonucleotide: BID-983
uugcccagggagggaag

SEQ ID NO: 12284 - RNA, 17 nt, Artificial Sequence
  Synthetic oligonucleotide: BID-984
ggagggaagaggaaaug

SEQ ID NO: 12285 - RNA, 17 nt, Artificial Sequence
  Synthetic oligonucleotide: BID-985
gagggaagaggaaaugc

SEQ ID NO: 12286 - RNA, 17 nt, Artificial Sequence
  Synthetic oligonucleotide: BID-986
agggaagaggaaaugcg

SEQ ID NO: 12287 - RNA, 17 nt, Artificial Sequence
  Synthetic oligonucleotide: BID-987
gcggggucagcaguucg

SEQ ID NO: 12288 - RNA, 17 nt, Artificial Sequence
  Synthetic oligonucleotide: BID-988
ggucagcaguucguggc

SEQ ID NO: 12289 - RNA, 17 nt, Artificial Sequence
  Synthetic oligonucleotide: BID-989
gucagcaguucguggcu

SEQ ID NO: 12290 - RNA, 17 nt, Artificial Sequence
  Synthetic oligonucleotide: BID-990
ucagcaguucguggcug

SEQ ID NO: 12291 - RNA, 17 nt, Artificial Sequence
  Synthetic oligonucleotide: BID-991
ucguggcugggguuuaa

SEQ ID NO: 12292 - RNA, 17 nt, Artificial Sequence
  Synthetic oligonucleotide: BID-992
ggcugggguuuaaaggc

SEQ ID NO: 12293 - RNA, 17 nt, Artificial Sequence
  Synthetic oligonucleotide: BID-993
gcugggguuuaaaggca

SEQ ID NO: 12294 - RNA, 17 nt, Artificial Sequence
  Synthetic oligonucleotide: BID-994
aaaggcagggaucuccc

SEQ ID NO: 12295 - RNA, 17 nt, Artificial Sequence
  Synthetic oligonucleotide: BID-995
gcagggaucucccagga

SEQ ID NO: 12296 - RNA, 17 nt, Artificial Sequence
  Synthetic oligonucleotide: BID-996
cagggaucucccaggac

SEQ ID NO: 12297 - RNA, 17 nt, Artificial Sequence
  Synthetic oligonucleotide: BID-997
ucucccaggacgggcac

SEQ ID NO: 12298 - RNA, 17 nt, Artificial Sequence
  Synthetic oligonucleotide: BID-998
cucccaggacgggcaca

SEQ ID NO: 12299 - RNA, 17 nt, Artificial Sequence
  Synthetic oligonucleotide: BID-999
cgggcacagggagcaug

SEQ ID NO: 12300 - RNA, 20 nt, Artificial Sequence
  Synthetic oligonucleotide: BID-1000
caugcucccugugcccgucc

SEQ ID NO: 12301 - RNA, 20 nt, Artificial Sequence
  Synthetic oligonucleotide: BID-1001
augcucccugugcccguccu

SEQ ID NO: 12302 - RNA, 20 nt, Artificial Sequence
  Synthetic oligonucleotide: BID-1002
cgcauuuccucuucccuccc

SEQ ID NO: 12303 - RNA, 20 nt, Artificial Sequence
  Synthetic oligonucleotide: BID-1003
gcauuuccucuucccucccu

SEQ ID NO: 12304 - RNA, 20 nt, Artificial Sequence
  Synthetic oligonucleotide: BID-1004
cucuucccucccugggcaag

SEQ ID NO: 12305 - RNA, 20 nt, Artificial Sequence
  Synthetic oligonucleotide: BID-1005
ucuucccucccugggcaaga

SEQ ID NO: 12306 - RNA, 20 nt, Artificial Sequence
  Synthetic oligonucleotide: BID-1006
cuucccucccugggcaagag

SEQ ID NO: 12307 - RNA, 20 nt, Artificial Sequence
  Synthetic oligonucleotide: BID-1007
cccugggcaagaggggcaga

SEQ ID NO: 12308 - RNA, 20 nt, Artificial Sequence
  Synthetic oligonucleotide: BID-1008
ccugggcaagaggggcagaa

SEQ ID NO: 12309 - RNA, 20 nt, Artificial Sequence
  Synthetic oligonucleotide: BID-1009
cugggcaagaggggcagaag

SEQ ID NO: 12310 - RNA, 20 nt, Artificial Sequence
  Synthetic oligonucleotide: BID-1010
gcaagaggggcagaaggggc

SEQ ID NO: 12311 - RNA, 20 nt, Artificial Sequence
  Synthetic oligonucleotide: BID-1011
caagaggggcagaaggggca

SEQ ID NO: 12312 - RNA, 20 nt, Artificial Sequence
  Synthetic oligonucleotide: BID-1012
aggggcagggacgcacaccc

SEQ ID NO: 12313 - RNA, 20 nt, Artificial Sequence
  Synthetic oligonucleotide: BID-1013
ggggcagggacgcacacccu

SEQ ID NO: 12314 - RNA, 20 nt, Artificial Sequence
  Synthetic oligonucleotide: BID-1014
ggacgcacacccugggccgc

SEQ ID NO: 12315 - RNA, 20 nt, Artificial Sequence
  Synthetic oligonucleotide: BID-1015
acacccugggccgcaggcag

SEQ ID NO: 12316 - RNA, 20 nt, Artificial Sequence
  Synthetic oligonucleotide: BID-1016
cugggccgcaggcagaggcu

SEQ ID NO: 12317 - RNA, 20 nt, Artificial Sequence
  Synthetic oligonucleotide: BID-1017
ccgcaggcagaggcuuggcc

SEQ ID NO: 12318 - RNA, 20 nt, Artificial Sequence
  Synthetic oligonucleotide: BID-1018
cgcaggcagaggcuuggcca

SEQ ID NO: 12319 - RNA, 20 nt, Artificial Sequence
  Synthetic oligonucleotide: BID-1019
cuuggccagggucguccucc

SEQ ID NO: 12320 - RNA, 20 nt, Artificial Sequence
  Synthetic oligonucleotide: BID-1020
uccucccggcagugccuccc

SEQ ID NO: 12321 - RNA, 20 nt, Artificial Sequence
  Synthetic oligonucleotide: BID-1021
accucaacuccugaugccag

SEQ ID NO: 12322 - RNA, 20 nt, Artificial Sequence
  Synthetic oligonucleotide: BID-1022
cacccuuaagaccccagcuc

SEQ ID NO: 12323 - RNA, 20 nt, Artificial Sequence
  Synthetic oligonucleotide: BID-1023
acccuuaagaccccagcuca

SEQ ID NO: 12324 - RNA, 20 nt, Artificial Sequence
  Synthetic oligonucleotide: BID-1024
agaccccagcucagggaauc

SEQ ID NO: 12325 - RNA, 20 nt, Artificial Sequence
  Synthetic oligonucleotide: BID-1025
cagcucagggaaucuggucu

SEQ ID NO: 12326 - RNA, 20 nt, Artificial Sequence
  Synthetic oligonucleotide: BID-1026
uggucucggucaucacuccc

SEQ ID NO: 12327 - RNA, 20 nt, Artificial Sequence
  Synthetic oligonucleotide: BID-1027
ggucucggucaucacuccca

SEQ ID NO: 12328 - RNA, 20 nt, Artificial Sequence
  Synthetic oligonucleotide: BID-1028
gucucggucaucacucccag

SEQ ID NO: 12329 - RNA, 20 nt, Artificial Sequence
  Synthetic oligonucleotide: BID-1029
caucacucccaggggacugc

SEQ ID NO: 12330 - RNA, 20 nt, Artificial Sequence
  Synthetic oligonucleotide: BID-1030
aucacucccaggggacugca

SEQ ID NO: 12331 - RNA, 20 nt, Artificial Sequence
  Synthetic oligonucleotide: BID-1031
ccaggggacugcagggcccc

SEQ ID NO: 12332 - RNA, 20 nt, Artificial Sequence
  Synthetic oligonucleotide: BID-1032
gggacugcagggccccagga

SEQ ID NO: 12333 - RNA, 20 nt, Artificial Sequence
  Synthetic oligonucleotide: BID-1033
ccccaggacggcacacauuc

SEQ ID NO: 12334 - RNA, 20 nt, Artificial Sequence
  Synthetic oligonucleotide: BID-1034
gacggcacacauucaggccc

SEQ ID NO: 12335 - RNA, 20 nt, Artificial Sequence
  Synthetic oligonucleotide: BID-1035
ccccaucucaaagccuccug

SEQ ID NO: 12336 - RNA, 20 nt, Artificial Sequence
  Synthetic oligonucleotide: BID-1036
cccaucucaaagccuccugu

SEQ ID NO: 12337 - RNA, 20 nt, Artificial Sequence
  Synthetic oligonucleotide: BID-1037
aucucaaagccuccuguggg

SEQ ID NO: 12338 - RNA, 20 nt, Artificial Sequence
  Synthetic oligonucleotide: BID-1038
aagccuccuguggguggaga

SEQ ID NO: 12339 - RNA, 20 nt, Artificial Sequence
  Synthetic oligonucleotide: BID-1039
cuguggguggagauggaaug

SEQ ID NO: 12340 - RNA, 20 nt, Artificial Sequence
  Synthetic oligonucleotide: BID-1040
gcucccccacagugagagcg

SEQ ID NO: 12341 - RNA, 20 nt, Artificial Sequence
  Synthetic oligonucleotide: BID-1041
cacagugagagcgaggacug

SEQ ID NO: 12342 - RNA, 20 nt, Artificial Sequence
  Synthetic oligonucleotide: BID-1042
acagugagagcgaggacuga

SEQ ID NO: 12343 - RNA, 20 nt, Artificial Sequence
  Synthetic oligonucleotide: BID-1043
gagagcgaggacugagggug

SEQ ID NO: 12344 - RNA, 20 nt, Artificial Sequence
  Synthetic oligonucleotide: BID-1044
gaggacugaggguguggaua

SEQ ID NO: 12345 - RNA, 20 nt, Artificial Sequence
  Synthetic oligonucleotide: BID-1045
gaggguguggauaaggcucc

SEQ ID NO: 12346 - RNA, 20 nt, Artificial Sequence
  Synthetic oligonucleotide: BID-1046
guguggauaaggcuccagga

SEQ ID NO: 12347 - RNA, 20 nt, Artificial Sequence
  Synthetic oligonucleotide: BID-1047
uguggauaaggcuccaggaa

SEQ ID NO: 12348 - RNA, 20 nt, Artificial Sequence
  Synthetic oligonucleotide: BID-1048
guggauaaggcuccaggaag

SEQ ID NO: 12349 - RNA, 20 nt, Artificial Sequence
  Synthetic oligonucleotide: BID-1049
uggauaaggcuccaggaagg

SEQ ID NO: 12350 - RNA, 20 nt, Artificial Sequence
  Synthetic oligonucleotide: BID-1050
aagggggugcaagccugaga

SEQ ID NO: 12351 - RNA, 20 nt, Artificial Sequence
  Synthetic oligonucleotide: BID-1051
ggggugcaagccugagaagg

SEQ ID NO: 12352 - RNA, 20 nt, Artificial Sequence
  Synthetic oligonucleotide: BID-1052
cugagaagguggaagagcuc

SEQ ID NO: 12353 - RNA, 20 nt, Artificial Sequence
  Synthetic oligonucleotide: BID-1053
ugagaagguggaagagcucu

SEQ ID NO: 12354 - RNA, 20 nt, Artificial Sequence
  Synthetic oligonucleotide: BID-1054
gaagguggaagagcucuggg

SEQ ID NO: 12355 - RNA, 20 nt, Artificial Sequence
  Synthetic oligonucleotide: BID-1055
aagguggaagagcucugggu

SEQ ID NO: 12356 - RNA, 17 nt, Artificial Sequence
  Synthetic oligonucleotide: BID-1056
gcucccugugcccgucc

SEQ ID NO: 12357 - RNA, 17 nt, Artificial Sequence
  Synthetic oligonucleotide: BID-1057
cucccugugcccguccu

SEQ ID NO: 12358 - RNA, 17 nt, Artificial Sequence
  Synthetic oligonucleotide: BID-1058
auuuccucuucccuccc

SEQ ID NO: 12359 - RNA, 17 nt, Artificial Sequence
  Synthetic oligonucleotide: BID-1059
uuuccucuucccucccu

SEQ ID NO: 12360 - RNA, 17 nt, Artificial Sequence
  Synthetic oligonucleotide: BID-1060
uucccucccugggcaag

SEQ ID NO: 12361 - RNA, 17 nt, Artificial Sequence
  Synthetic oligonucleotide: BID-1061
ucccucccugggcaaga

SEQ ID NO: 12362 - RNA, 17 nt, Artificial Sequence
  Synthetic oligonucleotide: BID-1062
cccucccugggcaagag

SEQ ID NO: 12363 - RNA, 17 nt, Artificial Sequence
  Synthetic oligonucleotide: BID-1063
ugggcaagaggggcaga

SEQ ID NO: 12364 - RNA, 17 nt, Artificial Sequence
  Synthetic oligonucleotide: BID-1064
gggcaagaggggcagaa

SEQ ID NO: 12365 - RNA, 17 nt, Artificial Sequence
  Synthetic oligonucleotide: BID-1065
ggcaagaggggcagaag

SEQ ID NO: 12366 - RNA, 17 nt, Artificial Sequence
  Synthetic oligonucleotide: BID-1066
agaggggcagaaggggc

SEQ ID NO: 12367 - RNA, 17 nt, Artificial Sequence
  Synthetic oligonucleotide: BID-1067
gaggggcagaaggggca

SEQ ID NO: 12368 - RNA, 17 nt, Artificial Sequence
  Synthetic oligonucleotide: BID-1068
ggcagggacgcacaccc

SEQ ID NO: 12369 - RNA, 17 nt, Artificial Sequence
  Synthetic oligonucleotide: BID-1069
gcagggacgcacacccu

SEQ ID NO: 12370 - RNA, 17 nt, Artificial Sequence
  Synthetic oligonucleotide: BID-1070
cgcacacccugggccgc

SEQ ID NO: 12371 - RNA, 17 nt, Artificial Sequence
  Synthetic oligonucleotide: BID-1071
cccugggccgcaggcag

SEQ ID NO: 12372 - RNA, 17 nt, Artificial Sequence
  Synthetic oligonucleotide: BID-1072
ggccgcaggcagaggcu

SEQ ID NO: 12373 - RNA, 17 nt, Artificial Sequence
  Synthetic oligonucleotide: BID-1073
caggcagaggcuuggcc

SEQ ID NO: 12374 - RNA, 17 nt, Artificial Sequence
  Synthetic oligonucleotide: BID-1074
aggcagaggcuuggcca

SEQ ID NO: 12375 - RNA, 17 nt, Artificial Sequence
  Synthetic oligonucleotide: BID-1075
ggccagggucguccucc

SEQ ID NO: 12376 - RNA, 17 nt, Artificial Sequence
  Synthetic oligonucleotide: BID-1076
ucccggcagugccuccc

SEQ ID NO: 12377 - RNA, 17 nt, Artificial Sequence
  Synthetic oligonucleotide: BID-1077
ucaacuccugaugccag

SEQ ID NO: 12378 - RNA, 17 nt, Artificial Sequence
  Synthetic oligonucleotide: BID-1078
ccuuaagaccccagcuc

SEQ ID NO: 12379 - RNA, 17 nt, Artificial Sequence
  Synthetic oligonucleotide: BID-1079
cuuaagaccccagcuca

SEQ ID NO: 12380 - RNA, 17 nt, Artificial Sequence
  Synthetic oligonucleotide: BID-1080
ccccagcucagggaauc

SEQ ID NO: 12381 - RNA, 17 nt, Artificial Sequence
  Synthetic oligonucleotide: BID-1081
cucagggaaucuggucu

SEQ ID NO: 12382 - RNA, 17 nt, Artificial Sequence
  Synthetic oligonucleotide: BID-1082
ucucggucaucacuccc

SEQ ID NO: 12383 - RNA, 17 nt, Artificial Sequence
  Synthetic oligonucleotide: BID-1083
cucggucaucacuccca

SEQ ID NO: 12384 - RNA, 17 nt, Artificial Sequence
  Synthetic oligonucleotide: BID-1084
ucggucaucacucccag

SEQ ID NO: 12385 - RNA, 17 nt, Artificial Sequence
  Synthetic oligonucleotide: BID-1085
cacucccaggggacugc

SEQ ID NO: 12386 - RNA, 17 nt, Artificial Sequence
  Synthetic oligonucleotide: BID-1086
acucccaggggacugca

SEQ ID NO: 12387 - RNA, 17 nt, Artificial Sequence
  Synthetic oligonucleotide: BID-1087
ggggacugcagggcccc

SEQ ID NO: 12388 - RNA, 17 nt, Artificial Sequence
  Synthetic oligonucleotide: BID-1088
acugcagggccccagga

SEQ ID NO: 12389 - RNA, 17 nt, Artificial Sequence
  Synthetic oligonucleotide: BID-1089
caggacggcacacauuc

SEQ ID NO: 12390 - RNA, 17 nt, Artificial Sequence
  Synthetic oligonucleotide: BID-1090
ggcacacauucaggccc

SEQ ID NO: 12391 - RNA, 17 nt, Artificial Sequence
  Synthetic oligonucleotide: BID-1091
caucucaaagccuccug

SEQ ID NO: 12392 - RNA, 17 nt, Artificial Sequence
  Synthetic oligonucleotide: BID-1092
aucucaaagccuccugu

SEQ ID NO: 12393 - RNA, 17 nt, Artificial Sequence
  Synthetic oligonucleotide: BID-1093
ucaaagccuccuguggg

SEQ ID NO: 12394 - RNA, 17 nt, Artificial Sequence
  Synthetic oligonucleotide: BID-1094
ccuccuguggguggaga

SEQ ID NO: 12395 - RNA, 17 nt, Artificial Sequence
  Synthetic oligonucleotide: BID-1095
uggguggagauggaaug

SEQ ID NO: 12396 - RNA, 17 nt, Artificial Sequence
  Synthetic oligonucleotide: BID-1096
cccccacagugagagcg

SEQ ID NO: 12397 - RNA, 17 nt, Artificial Sequence
  Synthetic oligonucleotide: BID-1097
agugagagcgaggacug

SEQ ID NO: 12398 - RNA, 17 nt, Artificial Sequence
  Synthetic oligonucleotide: BID-1098
gugagagcgaggacuga

SEQ ID NO: 12399 - RNA, 17 nt, Artificial Sequence
  Synthetic oligonucleotide: BID-1099
agcgaggacugagggug

SEQ ID NO: 12400 - RNA, 17 nt, Artificial Sequence
  Synthetic oligonucleotide: BID-1100
gacugaggguguggaua

SEQ ID NO: 12401 - RNA, 17 nt, Artificial Sequence
  Synthetic oligonucleotide: BID-1101
gguguggauaaggcucc

SEQ ID NO: 12402 - RNA, 17 nt, Artificial Sequence
  Synthetic oligonucleotide: BID-1102
uggauaaggcuccagga

SEQ ID NO: 12403 - RNA, 17 nt, Artificial Sequence
  Synthetic oligonucleotide: BID-1103
ggauaaggcuccaggaa

SEQ ID NO: 12404 - RNA, 17 nt, Artificial Sequence
  Synthetic oligonucleotide: BID-1104
gauaaggcuccaggaag

SEQ ID NO: 12405 - RNA, 17 nt, Artificial Sequence
  Synthetic oligonucleotide: BID-1105
auaaggcuccaggaagg

SEQ ID NO: 12406 - RNA, 17 nt, Artificial Sequence
  Synthetic oligonucleotide: BID-1106
ggggugcaagccugaga

SEQ ID NO: 12407 - RNA, 17 nt, Artificial Sequence
  Synthetic oligonucleotide: BID-1107
gugcaagccugagaagg

SEQ ID NO: 12408 - RNA, 17 nt, Artificial Sequence
  Synthetic oligonucleotide: BID-1108
agaagguggaagagcuc

SEQ ID NO: 12409 - RNA, 17 nt, Artificial Sequence
  Synthetic oligonucleotide: BID-1109
gaagguggaagagcucu

SEQ ID NO: 12410 - RNA, 17 nt, Artificial Sequence
  Synthetic oligonucleotide: BID-1110
gguggaagagcucuggg

SEQ ID NO: 12411 - RNA, 17 nt, Artificial Sequence
  Synthetic oligonucleotide: BID-1111
guggaagagcucugggu

SEQ ID NO: 12412 - RNA, 20 nt, Artificial Sequence
  Synthetic oligonucleotide: BID-1112
gggccgaaggaggaagcgcg

SEQ ID NO: 12413 - RNA, 20 nt, Artificial Sequence
  Synthetic oligonucleotide: BID-1113
ggaagcgcgcggggcgccau

SEQ ID NO: 12414 - RNA, 20 nt, Artificial Sequence
  Synthetic oligonucleotide: BID-1988
gaagcgcgcggggcgccaua

SEQ ID NO: 12415 - RNA, 20 nt, Artificial Sequence
  Synthetic oligonucleotide: BID-1115
agcgcgcggggcgccauaag

SEQ ID NO: 12416 - RNA, 20 nt, Artificial Sequence
  Synthetic oligonucleotide: BID-1989
gcgcgcggggcgccauaagg

SEQ ID NO: 12417 - RNA, 20 nt, Artificial Sequence
  Synthetic oligonucleotide: BID-1117
cggggcgccauaaggaggaa

SEQ ID NO: 12418 - RNA, 20 nt, Artificial Sequence
  Synthetic oligonucleotide: BID-1118
agucgaccguguccgcgcgc

SEQ ID NO: 12419 - RNA, 20 nt, Artificial Sequence
  Synthetic oligonucleotide: BID-1992
gucgaccguguccgcgcgcc

SEQ ID NO: 12420 - RNA, 20 nt, Artificial Sequence
  Synthetic oligonucleotide: BID-1993
ucgaccguguccgcgcgccu

SEQ ID NO: 12421 - RNA, 20 nt, Artificial Sequence
  Synthetic oligonucleotide: BID-1121
cugggagacgcugccucggc

SEQ ID NO: 12422 - RNA, 20 nt, Artificial Sequence
  Synthetic oligonucleotide: BID-1122
acgcgcccgcgcccccgcgg

SEQ ID NO: 12423 - RNA, 20 nt, Artificial Sequence
  Synthetic oligonucleotide: BID-1997
cgcgcccgcgcccccgcggc

SEQ ID NO: 12424 - RNA, 20 nt, Artificial Sequence
  Synthetic oligonucleotide: BID-1124
cgcccgcgcccccgcggcug

SEQ ID NO: 12425 - RNA, 20 nt, Artificial Sequence
  Synthetic oligonucleotide: BID-1125
gcccccgcggcuggagggug

SEQ ID NO: 12426 - RNA, 20 nt, Artificial Sequence
  Synthetic oligonucleotide: BID-1126
ugagugcacccgcgccccuc

SEQ ID NO: 12427 - RNA, 20 nt, Artificial Sequence
  Synthetic oligonucleotide: BID-2001
gagugcacccgcgccccucc

SEQ ID NO: 12428 - RNA, 20 nt, Artificial Sequence
  Synthetic oligonucleotide: BID-1128
cgccccucccgggguacgcg

SEQ ID NO: 12429 - RNA, 20 nt, Artificial Sequence
  Synthetic oligonucleotide: BID-1129
ugccugccgccugccccggc

SEQ ID NO: 12430 - RNA, 20 nt, Artificial Sequence
  Synthetic oligonucleotide: BID-2005
gccugccgccugccccggcg

SEQ ID NO: 12431 - RNA, 20 nt, Artificial Sequence
  Synthetic oligonucleotide: BID-1131
gccugccccggcguggagcu

SEQ ID NO: 12432 - RNA, 20 nt, Artificial Sequence
  Synthetic oligonucleotide: BID-1132
cucagggcccgccgcccgcc

SEQ ID NO: 12433 - RNA, 20 nt, Artificial Sequence
  Synthetic oligonucleotide: BID-1133
ccgcccugggcccgaccgcg

SEQ ID NO: 12434 - RNA, 20 nt, Artificial Sequence
  Synthetic oligonucleotide: BID-2011
cgcccugggcccgaccgcgg

SEQ ID NO: 12435 - RNA, 20 nt, Artificial Sequence
  Synthetic oligonucleotide: BID-2012
gcccugggcccgaccgcggu

SEQ ID NO: 12436 - RNA, 20 nt, Artificial Sequence
  Synthetic oligonucleotide: BID-1136
ggcccgaccgcggugggagc

SEQ ID NO: 12437 - RNA, 20 nt, Artificial Sequence
  Synthetic oligonucleotide: BID-1137
cccgaccgcggugggagcca

SEQ ID NO: 12438 - RNA, 20 nt, Artificial Sequence
  Synthetic oligonucleotide: BID-2013
ccgaccgcggugggagccag

SEQ ID NO: 12439 - RNA, 20 nt, Artificial Sequence
  Synthetic oligonucleotide: BID-1139
gaccgcggugggagccagag

SEQ ID NO: 12440 - RNA, 20 nt, Artificial Sequence
  Synthetic oligonucleotide: BID-2014
accgcggugggagccagagg

SEQ ID NO: 12441 - RNA, 20 nt, Artificial Sequence
  Synthetic oligonucleotide: BID-2015
ccgcggugggagccagagga

SEQ ID NO: 12442 - RNA, 20 nt, Artificial Sequence
  Synthetic oligonucleotide: BID-2016
cgcggugggagccagaggag

SEQ ID NO: 12443 - RNA, 20 nt, Artificial Sequence
  Synthetic oligonucleotide: BID-1143
ugggagccagaggaggggag

SEQ ID NO: 12444 - RNA, 20 nt, Artificial Sequence
  Synthetic oligonucleotide: BID-2018
gggagccagaggaggggagg

SEQ ID NO: 12445 - RNA, 20 nt, Artificial Sequence
  Synthetic oligonucleotide: BID-2019
ggagccagaggaggggaggc

SEQ ID NO: 12446 - RNA, 20 nt, Artificial Sequence
  Synthetic oligonucleotide: BID-2020
gagccagaggaggggaggcg

SEQ ID NO: 12447 - RNA, 20 nt, Artificial Sequence
  Synthetic oligonucleotide: BID-1147
gaggaggggaggcggggggu

SEQ ID NO: 12448 - RNA, 20 nt, Artificial Sequence
  Synthetic oligonucleotide: BID-1148
ccccaggccucagcagcgac

SEQ ID NO: 12449 - RNA, 20 nt, Artificial Sequence
  Synthetic oligonucleotide: BID-1149
ccaggccucagcagcgaccu

SEQ ID NO: 12450 - RNA, 20 nt, Artificial Sequence
  Synthetic oligonucleotide: BID-1150
ccucagcagcgaccugaggg

SEQ ID NO: 12451 - RNA, 20 nt, Artificial Sequence
  Synthetic oligonucleotide: BID-1151
cucucccgccuccccuccgc

SEQ ID NO: 12452 - RNA, 20 nt, Artificial Sequence
  Synthetic oligonucleotide: BID-1152
gcgcggccggcaggucggug

SEQ ID NO: 12453 - RNA, 20 nt, Artificial Sequence
  Synthetic oligonucleotide: BID-1153
gcggccggcaggucggugcu

SEQ ID NO: 12454 - RNA, 20 nt, Artificial Sequence
  Synthetic oligonucleotide: BID-1154
cggcaggucggugcugaggg

SEQ ID NO: 12455 - RNA, 20 nt, Artificial Sequence
  Synthetic oligonucleotide: BID-1155
ugcugagggucggguccgcc

SEQ ID NO: 12456 - RNA, 20 nt, Artificial Sequence
  Synthetic oligonucleotide: BID-2039
gcugagggucggguccgccu

SEQ ID NO: 12457 - RNA, 20 nt, Artificial Sequence
  Synthetic oligonucleotide: BID-1157
gggucggguccgccucggag

SEQ ID NO: 12458 - RNA, 20 nt, Artificial Sequence
  Synthetic oligonucleotide: BID-2041
ggucggguccgccucggagg

SEQ ID NO: 12459 - RNA, 20 nt, Artificial Sequence
  Synthetic oligonucleotide: BID-2042
gucggguccgccucggaggc

SEQ ID NO: 12460 - RNA, 20 nt, Artificial Sequence
  Synthetic oligonucleotide: BID-2043
ucggguccgccucggaggcg

SEQ ID NO: 12461 - RNA, 20 nt, Artificial Sequence
  Synthetic oligonucleotide: BID-1161
uuguguccucuccacguggc

SEQ ID NO: 12462 - RNA, 20 nt, Artificial Sequence
  Synthetic oligonucleotide: BID-2046
uguguccucuccacguggcc

SEQ ID NO: 12463 - RNA, 20 nt, Artificial Sequence
  Synthetic oligonucleotide: BID-2047
guguccucuccacguggccu

SEQ ID NO: 12464 - RNA, 20 nt, Artificial Sequence
  Synthetic oligonucleotide: BID-1164
cuccacguggccuggggauu

SEQ ID NO: 12465 - RNA, 20 nt, Artificial Sequence
  Synthetic oligonucleotide: BID-2049
uccacguggccuggggauuc

SEQ ID NO: 12466 - RNA, 20 nt, Artificial Sequence
  Synthetic oligonucleotide: BID-2050
ccacguggccuggggauuca

SEQ ID NO: 12467 - RNA, 20 nt, Artificial Sequence
  Synthetic oligonucleotide: BID-2051
cacguggccuggggauucag

SEQ ID NO: 12468 - RNA, 20 nt, Artificial Sequence
  Synthetic oligonucleotide: BID-1168
cguggccuggggauucaggg

SEQ ID NO: 12469 - RNA, 20 nt, Artificial Sequence
  Synthetic oligonucleotide: BID-2052
guggccuggggauucagggg

SEQ ID NO: 12470 - RNA, 20 nt, Artificial Sequence
  Synthetic oligonucleotide: BID-1170
uggggauucaggggaggggu

SEQ ID NO: 12471 - RNA, 20 nt, Artificial Sequence
  Synthetic oligonucleotide: BID-2055
ggggauucaggggaggggug

SEQ ID NO: 12472 - RNA, 20 nt, Artificial Sequence
  Synthetic oligonucleotide: BID-1172
ucaggggaggggugcggggc

SEQ ID NO: 12473 - RNA, 20 nt, Artificial Sequence
  Synthetic oligonucleotide: BID-2058
caggggaggggugcggggcg

SEQ ID NO: 12474 - RNA, 20 nt, Artificial Sequence
  Synthetic oligonucleotide: BID-2059
aggggaggggugcggggcgc

SEQ ID NO: 12475 - RNA, 20 nt, Artificial Sequence
  Synthetic oligonucleotide: BID-2060
ggggaggggugcggggcgcg

SEQ ID NO: 12476 - RNA, 20 nt, Artificial Sequence
  Synthetic oligonucleotide: BID-1176
ggaggggugcggggcgcggg

SEQ ID NO: 12477 - RNA, 20 nt, Artificial Sequence
  Synthetic oligonucleotide: BID-2061
gaggggugcggggcgcgggg

SEQ ID NO: 12478 - RNA, 20 nt, Artificial Sequence
  Synthetic oligonucleotide: BID-2062
aggggugcggggcgcgggga

SEQ ID NO: 12479 - RNA, 20 nt, Artificial Sequence
  Synthetic oligonucleotide: BID-2063
ggggugcggggcgcggggag

SEQ ID NO: 12480 - RNA, 20 nt, Artificial Sequence
  Synthetic oligonucleotide: BID-2064
gggugcggggcgcggggagg

SEQ ID NO: 12481 - RNA, 20 nt, Artificial Sequence
  Synthetic oligonucleotide: BID-1181
gugcggggcgcggggagggg

SEQ ID NO: 12482 - RNA, 20 nt, Artificial Sequence
  Synthetic oligonucleotide: BID-2065
ugcggggcgcggggaggggg

SEQ ID NO: 12483 - RNA, 20 nt, Artificial Sequence
  Synthetic oligonucleotide: BID-1183
ggcgcggggagggggagggg

SEQ ID NO: 12484 - RNA, 20 nt, Artificial Sequence
  Synthetic oligonucleotide: BID-1184
gggaggggccgaggccagcc

SEQ ID NO: 12485 - RNA, 20 nt, Artificial Sequence
  Synthetic oligonucleotide: BID-2069
ggaggggccgaggccagccc

SEQ ID NO: 12486 - RNA, 20 nt, Artificial Sequence
  Synthetic oligonucleotide: BID-1186
aggggccgaggccagccccg

SEQ ID NO: 12487 - RNA, 20 nt, Artificial Sequence
  Synthetic oligonucleotide: BID-1187
gggccgaggccagccccgga

SEQ ID NO: 12488 - RNA, 20 nt, Artificial Sequence
  Synthetic oligonucleotide: BID-2070
ggccgaggccagccccggag

SEQ ID NO: 12489 - RNA, 20 nt, Artificial Sequence
  Synthetic oligonucleotide: BID-1189
ccgaggccagccccggagag

SEQ ID NO: 12490 - RNA, 20 nt, Artificial Sequence
  Synthetic oligonucleotide: BID-1190
ccccggagaggagaaaaccc

SEQ ID NO: 12491 - RNA, 20 nt, Artificial Sequence
  Synthetic oligonucleotide: BID-1191
gagaaaacccgcgggccugg

SEQ ID NO: 12492 - RNA, 20 nt, Artificial Sequence
  Synthetic oligonucleotide: BID-1192
ggugcaggccacccuugccg

SEQ ID NO: 12493 - RNA, 20 nt, Artificial Sequence
  Synthetic oligonucleotide: BID-1193
aggccacccuugccggcgga

SEQ ID NO: 12494 - RNA, 20 nt, Artificial Sequence
  Synthetic oligonucleotide: BID-2079
ggccacccuugccggcggau

SEQ ID NO: 12495 - RNA, 20 nt, Artificial Sequence
  Synthetic oligonucleotide: BID-1195
cagacaccugccggcuccuc

SEQ ID NO: 12496 - RNA, 20 nt, Artificial Sequence
  Synthetic oligonucleotide: BID-1196
caccugccggcuccucccga

SEQ ID NO: 12497 - RNA, 20 nt, Artificial Sequence
  Synthetic oligonucleotide: BID-2082
accugccggcuccucccgag

SEQ ID NO: 12498 - RNA, 20 nt, Artificial Sequence
  Synthetic oligonucleotide: BID-1198
ggcuccucccgagcggagcu

SEQ ID NO: 12499 - RNA, 20 nt, Artificial Sequence
  Synthetic oligonucleotide: BID-1199
cagggcugacaaagcgcggu

SEQ ID NO: 12500 - RNA, 20 nt, Artificial Sequence
  Synthetic oligonucleotide: BID-1200
gcggucagagcggccgcuua

SEQ ID NO: 12501 - RNA, 20 nt, Artificial Sequence
  Synthetic oligonucleotide: BID-2087
cggucagagcggccgcuuac

SEQ ID NO: 12502 - RNA, 20 nt, Artificial Sequence
  Synthetic oligonucleotide: BID-1202
acuggggcucgcccgcuccu

SEQ ID NO: 12503 - RNA, 20 nt, Artificial Sequence
  Synthetic oligonucleotide: BID-1203
uagagcacuggcaaugaugu

SEQ ID NO: 12504 - RNA, 20 nt, Artificial Sequence
  Synthetic oligonucleotide: BID-1204
gcggauccucgcugcugcug

SEQ ID NO: 12505 - RNA, 20 nt, Artificial Sequence
  Synthetic oligonucleotide: BID-2092
cggauccucgcugcugcugc

SEQ ID NO: 12506 - RNA, 20 nt, Artificial Sequence
  Synthetic oligonucleotide: BID-2093
ggauccucgcugcugcugcu

SEQ ID NO: 12507 - RNA, 20 nt, Artificial Sequence
  Synthetic oligonucleotide: BID-1207
cugcugcugcugggaaacug

SEQ ID NO: 12508 - RNA, 20 nt, Artificial Sequence
  Synthetic oligonucleotide: BID-1208
gcugggaaacuguugagugg

SEQ ID NO: 12509 - RNA, 20 nt, Artificial Sequence
  Synthetic oligonucleotide: BID-1209
guugaguggcugaaugaccc

SEQ ID NO: 12510 - RNA, 20 nt, Artificial Sequence
  Synthetic oligonucleotide: BID-2095
uugaguggcugaaugacccc

SEQ ID NO: 12511 - RNA, 20 nt, Artificial Sequence
  Synthetic oligonucleotide: BID-2096
ugaguggcugaaugacccca

SEQ ID NO: 12512 - RNA, 20 nt, Artificial Sequence
  Synthetic oligonucleotide: BID-1212
cugaaugaccccaggggacc

SEQ ID NO: 12513 - RNA, 20 nt, Artificial Sequence
  Synthetic oligonucleotide: BID-2098
ugaaugaccccaggggaccc

SEQ ID NO: 12514 - RNA, 20 nt, Artificial Sequence
  Synthetic oligonucleotide: BID-2099
gaaugaccccaggggacccu

SEQ ID NO: 12515 - RNA, 20 nt, Artificial Sequence
  Synthetic oligonucleotide: BID-1215
augaccccaggggacccugg

SEQ ID NO: 12516 - RNA, 20 nt, Artificial Sequence
  Synthetic oligonucleotide: BID-1216
caggggacccugggagagcu

SEQ ID NO: 12517 - RNA, 20 nt, Artificial Sequence
  Synthetic oligonucleotide: BID-1217
agcccucagccaccaagugg

SEQ ID NO: 12518 - RNA, 20 nt, Artificial Sequence
  Synthetic oligonucleotide: BID-1218
caccaaguggcugggcuggc

SEQ ID NO: 12519 - RNA, 20 nt, Artificial Sequence
  Synthetic oligonucleotide: BID-360
cauucauucauucaacaaau

SEQ ID NO: 12520 - RNA, 20 nt, Artificial Sequence
  Synthetic oligonucleotide: BID-361
aauacgaaugugcagcggug

SEQ ID NO: 12521 - RNA, 20 nt, Artificial Sequence
  Synthetic oligonucleotide: BID-1
auacgaaugugcagcggugc

SEQ ID NO: 12522 - RNA, 20 nt, Artificial Sequence
  Synthetic oligonucleotide: BID-363
gcuggggucaugauggcucg

SEQ ID NO: 12523 - RNA, 20 nt, Artificial Sequence
  Synthetic oligonucleotide: BID-364
ucaugauggcucggugggca

SEQ ID NO: 12524 - RNA, 20 nt, Artificial Sequence
  Synthetic oligonucleotide: BID-365
augauggcucggugggcagc

SEQ ID NO: 12525 - RNA, 20 nt, Artificial Sequence
  Synthetic oligonucleotide: BID-9
ugauggcucggugggcagcg

SEQ ID NO: 12526 - RNA, 20 nt, Artificial Sequence
  Synthetic oligonucleotide: BID-367
gcucggugggcagcgagggg

SEQ ID NO: 12527 - RNA, 20 nt, Artificial Sequence
  Synthetic oligonucleotide: BID-368
gcagcgaggggccgggccgg

SEQ ID NO: 12528 - RNA, 20 nt, Artificial Sequence
  Synthetic oligonucleotide: BID-23
cagcgaggggccgggccggc

SEQ ID NO: 12529 - RNA, 20 nt, Artificial Sequence
  Synthetic oligonucleotide: BID-370
gcgaggggccgggccggcug

SEQ ID NO: 12530 - RNA, 20 nt, Artificial Sequence
  Synthetic oligonucleotide: BID-25
cgaggggccgggccggcugg

SEQ ID NO: 12531 - RNA, 20 nt, Artificial Sequence
  Synthetic oligonucleotide: BID-372
gccggcuggaggagcacagu

SEQ ID NO: 12532 - RNA, 20 nt, Artificial Sequence
  Synthetic oligonucleotide: BID-373
gcacagugcggauucuguaa

SEQ ID NO: 12533 - RNA, 20 nt, Artificial Sequence
  Synthetic oligonucleotide: BID-374
gugcggauucuguaaguggg

SEQ ID NO: 12534 - RNA, 20 nt, Artificial Sequence
  Synthetic oligonucleotide: BID-6
ugcggauucuguaagugggc

SEQ ID NO: 12535 - RNA, 20 nt, Artificial Sequence
  Synthetic oligonucleotide: BID-5
gcggauucuguaagugggcu

SEQ ID NO: 12536 - RNA, 20 nt, Artificial Sequence
  Synthetic oligonucleotide: BID-377
uucuguaagugggcuggggg

SEQ ID NO: 12537 - RNA, 20 nt, Artificial Sequence
  Synthetic oligonucleotide: BID-1237
gggggcugggccuucugcgg

SEQ ID NO: 12538 - RNA, 20 nt, Artificial Sequence
  Synthetic oligonucleotide: BID-1238
gaccggccuucaccugcagg

SEQ ID NO: 12539 - RNA, 20 nt, Artificial Sequence
  Synthetic oligonucleotide: BID-1239
gccuucaccugcaggcaggg

SEQ ID NO: 12540 - RNA, 20 nt, Artificial Sequence
  Synthetic oligonucleotide: BID-2137
ccuucaccugcaggcagggu

SEQ ID NO: 12541 - RNA, 17 nt, Artificial Sequence
  Synthetic oligonucleotide: BID-2256
ccgaaggaggaagcgcg

SEQ ID NO: 12542 - RNA, 17 nt, Artificial Sequence
  Synthetic oligonucleotide: BID-1242
agcgcgcggggcgccau

SEQ ID NO: 12543 - RNA, 17 nt, Artificial Sequence
  Synthetic oligonucleotide: BID-2259
gcgcgcggggcgccaua

SEQ ID NO: 12544 - RNA, 17 nt, Artificial Sequence
  Synthetic oligonucleotide: BID-1244
gcgcggggcgccauaag

SEQ ID NO: 12545 - RNA, 17 nt, Artificial Sequence
  Synthetic oligonucleotide: BID-2260
cgcggggcgccauaagg

SEQ ID NO: 12546 - RNA, 17 nt, Artificial Sequence
  Synthetic oligonucleotide: BID-1246
ggcgccauaaggaggaa

SEQ ID NO: 12547 - RNA, 17 nt, Artificial Sequence
  Synthetic oligonucleotide: BID-1247
cgaccguguccgcgcgc

SEQ ID NO: 12548 - RNA, 17 nt, Artificial Sequence
  Synthetic oligonucleotide: BID-2263
gaccguguccgcgcgcc

SEQ ID NO: 12549 - RNA, 17 nt, Artificial Sequence
  Synthetic oligonucleotide: BID-2264
accguguccgcgcgccu

SEQ ID NO: 12550 - RNA, 17 nt, Artificial Sequence
  Synthetic oligonucleotide: BID-1250
ggagacgcugccucggc

SEQ ID NO: 12551 - RNA, 17 nt, Artificial Sequence
  Synthetic oligonucleotide: BID-1251
cgcccgcgcccccgcgg

SEQ ID NO: 12552 - RNA, 17 nt, Artificial Sequence
  Synthetic oligonucleotide: BID-2268
gcccgcgcccccgcggc

SEQ ID NO: 12553 - RNA, 17 nt, Artificial Sequence
  Synthetic oligonucleotide: BID-1253
ccgcgcccccgcggcug

SEQ ID NO: 12554 - RNA, 17 nt, Artificial Sequence
  Synthetic oligonucleotide: BID-1254
cccgcggcuggagggug

SEQ ID NO: 12555 - RNA, 17 nt, Artificial Sequence
  Synthetic oligonucleotide: BID-1255
gugcacccgcgccccuc

SEQ ID NO: 12556 - RNA, 17 nt, Artificial Sequence
  Synthetic oligonucleotide: BID-2272
ugcacccgcgccccucc

SEQ ID NO: 12557 - RNA, 17 nt, Artificial Sequence
  Synthetic oligonucleotide: BID-1257
cccucccgggguacgcg

SEQ ID NO: 12558 - RNA, 17 nt, Artificial Sequence
  Synthetic oligonucleotide: BID-1258
cugccgccugccccggc

SEQ ID NO: 12559 - RNA, 17 nt, Artificial Sequence
  Synthetic oligonucleotide: BID-2276
ugccgccugccccggcg

SEQ ID NO: 12560 - RNA, 17 nt, Artificial Sequence
  Synthetic oligonucleotide: BID-1260
ugccccggcguggagcu

SEQ ID NO: 12561 - RNA, 17 nt, Artificial Sequence
  Synthetic oligonucleotide: BID-1261
agggcccgccgcccgcc

SEQ ID NO: 12562 - RNA, 17 nt, Artificial Sequence
  Synthetic oligonucleotide: BID-1262
cccugggcccgaccgcg

SEQ ID NO: 12563 - RNA, 17 nt, Artificial Sequence
  Synthetic oligonucleotide: BID-2282
ccugggcccgaccgcgg

SEQ ID NO: 12564 - RNA, 17 nt, Artificial Sequence
  Synthetic oligonucleotide: BID-2283
cugggcccgaccgcggu

SEQ ID NO: 12565 - RNA, 17 nt, Artificial Sequence
  Synthetic oligonucleotide: BID-1265
ccgaccgcggugggagc

SEQ ID NO: 12566 - RNA, 17 nt, Artificial Sequence
  Synthetic oligonucleotide: BID-1266
gaccgcggugggagcca

SEQ ID NO: 12567 - RNA, 17 nt, Artificial Sequence
  Synthetic oligonucleotide: BID-2284
accgcggugggagccag

SEQ ID NO: 12568 - RNA, 17 nt, Artificial Sequence
  Synthetic oligonucleotide: BID-1268
cgcggugggagccagag

SEQ ID NO: 12569 - RNA, 17 nt, Artificial Sequence
  Synthetic oligonucleotide: BID-2285
gcggugggagccagagg

SEQ ID NO: 12570 - RNA, 17 nt, Artificial Sequence
  Synthetic oligonucleotide: BID-2286
cggugggagccagagga

SEQ ID NO: 12571 - RNA, 17 nt, Artificial Sequence
  Synthetic oligonucleotide: BID-2287
ggugggagccagaggag

SEQ ID NO: 12572 - RNA, 17 nt, Artificial Sequence
  Synthetic oligonucleotide: BID-1272
gagccagaggaggggag

SEQ ID NO: 12573 - RNA, 17 nt, Artificial Sequence
  Synthetic oligonucleotide: BID-2289
agccagaggaggggagg

SEQ ID NO: 12574 - RNA, 17 nt, Artificial Sequence
  Synthetic oligonucleotide: BID-2290
gccagaggaggggaggc

SEQ ID NO: 12575 - RNA, 17 nt, Artificial Sequence
  Synthetic oligonucleotide: BID-2291
ccagaggaggggaggcg

SEQ ID NO: 12576 - RNA, 17 nt, Artificial Sequence
  Synthetic oligonucleotide: BID-1276
gaggggaggcggggggu

SEQ ID NO: 12577 - RNA, 17 nt, Artificial Sequence
  Synthetic oligonucleotide: BID-1277
caggccucagcagcgac

SEQ ID NO: 12578 - RNA, 17 nt, Artificial Sequence
  Synthetic oligonucleotide: BID-1278
ggccucagcagcgaccu

SEQ ID NO: 12579 - RNA, 17 nt, Artificial Sequence
  Synthetic oligonucleotide: BID-1279
cagcagcgaccugaggg

SEQ ID NO: 12580 - RNA, 17 nt, Artificial Sequence
  Synthetic oligonucleotide: BID-1280
ucccgccuccccuccgc

SEQ ID NO: 12581 - RNA, 17 nt, Artificial Sequence
  Synthetic oligonucleotide: BID-1281
cggccggcaggucggug

SEQ ID NO: 12582 - RNA, 17 nt, Artificial Sequence
  Synthetic oligonucleotide: BID-1282
gccggcaggucggugcu

SEQ ID NO: 12583 - RNA, 17 nt, Artificial Sequence
  Synthetic oligonucleotide: BID-1283
caggucggugcugaggg

SEQ ID NO: 12584 - RNA, 17 nt, Artificial Sequence
  Synthetic oligonucleotide: BID-1284
ugagggucggguccgcc

SEQ ID NO: 12585 - RNA, 17 nt, Artificial Sequence
  Synthetic oligonucleotide: BID-2310
gagggucggguccgccu

SEQ ID NO: 12586 - RNA, 17 nt, Artificial Sequence
  Synthetic oligonucleotide: BID-1286
ucggguccgccucggag

SEQ ID NO: 12587 - RNA, 17 nt, Artificial Sequence
  Synthetic oligonucleotide: BID-2312
cggguccgccucggagg

SEQ ID NO: 12588 - RNA, 17 nt, Artificial Sequence
  Synthetic oligonucleotide: BID-2313
ggguccgccucggaggc

SEQ ID NO: 12589 - RNA, 17 nt, Artificial Sequence
  Synthetic oligonucleotide: BID-2314
gguccgccucggaggcg

SEQ ID NO: 12590 - RNA, 17 nt, Artificial Sequence
  Synthetic oligonucleotide: BID-1290
uguccucuccacguggc

SEQ ID NO: 12591 - RNA, 17 nt, Artificial Sequence
  Synthetic oligonucleotide: BID-2317
guccucuccacguggcc

SEQ ID NO: 12592 - RNA, 17 nt, Artificial Sequence
  Synthetic oligonucleotide: BID-2318
uccucuccacguggccu

SEQ ID NO: 12593 - RNA, 17 nt, Artificial Sequence
  Synthetic oligonucleotide: BID-1293
cacguggccuggggauu

SEQ ID NO: 12594 - RNA, 17 nt, Artificial Sequence
  Synthetic oligonucleotide: BID-2320
acguggccuggggauuc

SEQ ID NO: 12595 - RNA, 17 nt, Artificial Sequence
  Synthetic oligonucleotide: BID-2321
cguggccuggggauuca

SEQ ID NO: 12596 - RNA, 17 nt, Artificial Sequence
  Synthetic oligonucleotide: BID-2322
guggccuggggauucag

SEQ ID NO: 12597 - RNA, 17 nt, Artificial Sequence
  Synthetic oligonucleotide: BID-1297
ggccuggggauucaggg

SEQ ID NO: 12598 - RNA, 17 nt, Artificial Sequence
  Synthetic oligonucleotide: BID-2323
gccuggggauucagggg

SEQ ID NO: 12599 - RNA, 17 nt, Artificial Sequence
  Synthetic oligonucleotide: BID-1299
ggauucaggggaggggu

SEQ ID NO: 12600 - RNA, 17 nt, Artificial Sequence
  Synthetic oligonucleotide: BID-2326
gauucaggggaggggug

SEQ ID NO: 12601 - RNA, 17 nt, Artificial Sequence
  Synthetic oligonucleotide: BID-1301
ggggaggggugcggggc

SEQ ID NO: 12602 - RNA, 17 nt, Artificial Sequence
  Synthetic oligonucleotide: BID-2329
gggaggggugcggggcg

SEQ ID NO: 12603 - RNA, 17 nt, Artificial Sequence
  Synthetic oligonucleotide: BID-2330
ggaggggugcggggcgc

SEQ ID NO: 12604 - RNA, 17 nt, Artificial Sequence
  Synthetic oligonucleotide: BID-2331
gaggggugcggggcgcg

SEQ ID NO: 12605 - RNA, 17 nt, Artificial Sequence
  Synthetic oligonucleotide: BID-1305
ggggugcggggcgcggg

SEQ ID NO: 12606 - RNA, 17 nt, Artificial Sequence
  Synthetic oligonucleotide: BID-2332
gggugcggggcgcgggg

SEQ ID NO: 12607 - RNA, 17 nt, Artificial Sequence
  Synthetic oligonucleotide: BID-2333
ggugcggggcgcgggga

SEQ ID NO: 12608 - RNA, 17 nt, Artificial Sequence
  Synthetic oligonucleotide: BID-2334
gugcggggcgcggggag

SEQ ID NO: 12609 - RNA, 17 nt, Artificial Sequence
  Synthetic oligonucleotide: BID-2335
ugcggggcgcggggagg

SEQ ID NO: 12610 - RNA, 17 nt, Artificial Sequence
  Synthetic oligonucleotide: BID-1310
cggggcgcggggagggg

SEQ ID NO: 12611 - RNA, 17 nt, Artificial Sequence
  Synthetic oligonucleotide: BID-2336
ggggcgcggggaggggg

SEQ ID NO: 12612 - RNA, 17 nt, Artificial Sequence
  Synthetic oligonucleotide: BID-1312
gcggggagggggagggg

SEQ ID NO: 12613 - RNA, 17 nt, Artificial Sequence
  Synthetic oligonucleotide: BID-1313
aggggccgaggccagcc

SEQ ID NO: 12614 - RNA, 17 nt, Artificial Sequence
  Synthetic oligonucleotide: BID-2340
ggggccgaggccagccc

SEQ ID NO: 12615 - RNA, 17 nt, Artificial Sequence
  Synthetic oligonucleotide: BID-1315
ggccgaggccagccccg

SEQ ID NO: 12616 - RNA, 17 nt, Artificial Sequence
  Synthetic oligonucleotide: BID-1316
ccgaggccagccccgga

SEQ ID NO: 12617 - RNA, 17 nt, Artificial Sequence
  Synthetic oligonucleotide: BID-2341
cgaggccagccccggag

SEQ ID NO: 12618 - RNA, 17 nt, Artificial Sequence
  Synthetic oligonucleotide: BID-1318
aggccagccccggagag

SEQ ID NO: 12619 - RNA, 17 nt, Artificial Sequence
  Synthetic oligonucleotide: BID-1319
cggagaggagaaaaccc

SEQ ID NO: 12620 - RNA, 17 nt, Artificial Sequence
  Synthetic oligonucleotide: BID-1320
aaaacccgcgggccugg

SEQ ID NO: 12621 - RNA, 17 nt, Artificial Sequence
  Synthetic oligonucleotide: BID-1321
gcaggccacccuugccg

SEQ ID NO: 12622 - RNA, 17 nt, Artificial Sequence
  Synthetic oligonucleotide: BID-1322
ccacccuugccggcgga

SEQ ID NO: 12623 - RNA, 17 nt, Artificial Sequence
  Synthetic oligonucleotide: BID-2350
cacccuugccggcggau

SEQ ID NO: 12624 - RNA, 17 nt, Artificial Sequence
  Synthetic oligonucleotide: BID-1324
acaccugccggcuccuc

SEQ ID NO: 12625 - RNA, 17 nt, Artificial Sequence
  Synthetic oligonucleotide: BID-1325
cugccggcuccucccga

SEQ ID NO: 12626 - RNA, 17 nt, Artificial Sequence
  Synthetic oligonucleotide: BID-2353
ugccggcuccucccgag

SEQ ID NO: 12627 - RNA, 17 nt, Artificial Sequence
  Synthetic oligonucleotide: BID-1327
uccucccgagcggagcu

SEQ ID NO: 12628 - RNA, 17 nt, Artificial Sequence
  Synthetic oligonucleotide: BID-1328
ggcugacaaagcgcggu

SEQ ID NO: 12629 - RNA, 17 nt, Artificial Sequence
  Synthetic oligonucleotide: BID-1329
gucagagcggccgcuua

SEQ ID NO: 12630 - RNA, 17 nt, Artificial Sequence
  Synthetic oligonucleotide: BID-2358
ucagagcggccgcuuac

SEQ ID NO: 12631 - RNA, 17 nt, Artificial Sequence
  Synthetic oligonucleotide: BID-1331
ggggcucgcccgcuccu

SEQ ID NO: 12632 - RNA, 17 nt, Artificial Sequence
  Synthetic oligonucleotide: BID-1332
agcacuggcaaugaugu

SEQ ID NO: 12633 - RNA, 17 nt, Artificial Sequence
  Synthetic oligonucleotide: BID-1333
gauccucgcugcugcug

SEQ ID NO: 12634 - RNA, 17 nt, Artificial Sequence
  Synthetic oligonucleotide: BID-2363
auccucgcugcugcugc

SEQ ID NO: 12635 - RNA, 17 nt, Artificial Sequence
  Synthetic oligonucleotide: BID-2364
uccucgcugcugcugcu

SEQ ID NO: 12636 - RNA, 17 nt, Artificial Sequence
  Synthetic oligonucleotide: BID-1336
cugcugcugggaaacug

SEQ ID NO: 12637 - RNA, 17 nt, Artificial Sequence
  Synthetic oligonucleotide: BID-1337
gggaaacuguugagugg

SEQ ID NO: 12638 - RNA, 17 nt, Artificial Sequence
  Synthetic oligonucleotide: BID-1338
gaguggcugaaugaccc

SEQ ID NO: 12639 - RNA, 17 nt, Artificial Sequence
  Synthetic oligonucleotide: BID-2366
aguggcugaaugacccc

SEQ ID NO: 12640 - RNA, 17 nt, Artificial Sequence
  Synthetic oligonucleotide: BID-2367
guggcugaaugacccca

SEQ ID NO: 12641 - RNA, 17 nt, Artificial Sequence
  Synthetic oligonucleotide: BID-1341
aaugaccccaggggacc

SEQ ID NO: 12642 - RNA, 17 nt, Artificial Sequence
  Synthetic oligonucleotide: BID-2369
augaccccaggggaccc

SEQ ID NO: 12643 - RNA, 17 nt, Artificial Sequence
  Synthetic oligonucleotide: BID-2370
ugaccccaggggacccu

SEQ ID NO: 12644 - RNA, 17 nt, Artificial Sequence
  Synthetic oligonucleotide: BID-1344
accccaggggacccugg

SEQ ID NO: 12645 - RNA, 17 nt, Artificial Sequence
  Synthetic oligonucleotide: BID-1345
gggacccugggagagcu

SEQ ID NO: 12646 - RNA, 17 nt, Artificial Sequence
  Synthetic oligonucleotide: BID-1346
ccucagccaccaagugg

SEQ ID NO: 12647 - RNA, 17 nt, Artificial Sequence
  Synthetic oligonucleotide: BID-1347
caaguggcugggcuggc

SEQ ID NO: 12648 - RNA, 17 nt, Artificial Sequence
  Synthetic oligonucleotide: BID-431
ucauucauucaacaaau

SEQ ID NO: 12649 - RNA, 17 nt, Artificial Sequence
  Synthetic oligonucleotide: BID-432
acgaaugugcagcggug

SEQ ID NO: 12650 - RNA, 17 nt, Artificial Sequence
  Synthetic oligonucleotide: BID-26
cgaaugugcagcggugc

SEQ ID NO: 12651 - RNA, 17 nt, Artificial Sequence
  Synthetic oligonucleotide: BID-434
ggggucaugauggcucg

SEQ ID NO: 12652 - RNA, 17 nt, Artificial Sequence
  Synthetic oligonucleotide: BID-435
ugauggcucggugggca

SEQ ID NO: 12653 - RNA, 17 nt, Artificial Sequence
  Synthetic oligonucleotide: BID-436
auggcucggugggcagc

SEQ ID NO: 12654 - RNA, 17 nt, Artificial Sequence
  Synthetic oligonucleotide: BID-39
uggcucggugggcagcg

SEQ ID NO: 12655 - RNA, 17 nt, Artificial Sequence
  Synthetic oligonucleotide: BID-438
cggugggcagcgagggg

SEQ ID NO: 12656 - RNA, 17 nt, Artificial Sequence
  Synthetic oligonucleotide: BID-439
gcgaggggccgggccgg

SEQ ID NO: 12657 - RNA, 17 nt, Artificial Sequence
  Synthetic oligonucleotide: BID-48
cgaggggccgggccggc

SEQ ID NO: 12658 - RNA, 17 nt, Artificial Sequence
  Synthetic oligonucleotide: BID-441
aggggccgggccggcug

SEQ ID NO: 12659 - RNA, 17 nt, Artificial Sequence
  Synthetic oligonucleotide: BID-53
ggggccgggccggcugg

SEQ ID NO: 12660 - RNA, 17 nt, Artificial Sequence
  Synthetic oligonucleotide: BID-443
ggcuggaggagcacagu

SEQ ID NO: 12661 - RNA, 17 nt, Artificial Sequence
  Synthetic oligonucleotide: BID-444
cagugcggauucuguaa

SEQ ID NO: 12662 - RNA, 17 nt, Artificial Sequence
  Synthetic oligonucleotide: BID-445
cggauucuguaaguggg

SEQ ID NO: 12663 - RNA, 17 nt, Artificial Sequence
  Synthetic oligonucleotide: BID-38
ggauucuguaagugggc

SEQ ID NO: 12664 - RNA, 17 nt, Artificial Sequence
  Synthetic oligonucleotide: BID-42
gauucuguaagugggcu

SEQ ID NO: 12665 - RNA, 17 nt, Artificial Sequence
  Synthetic oligonucleotide: BID-448
uguaagugggcuggggg

SEQ ID NO: 12666 - RNA, 17 nt, Artificial Sequence
  Synthetic oligonucleotide: BID-1366
ggcugggccuucugcgg

SEQ ID NO: 12667 - RNA, 17 nt, Artificial Sequence
  Synthetic oligonucleotide: BID-1367
cggccuucaccugcagg

SEQ ID NO: 12668 - RNA, 17 nt, Artificial Sequence
  Synthetic oligonucleotide: BID-1368
uucaccugcaggcaggg

SEQ ID NO: 12669 - RNA, 17 nt, Artificial Sequence
  Synthetic oligonucleotide: BID-2408
ucaccugcaggcagggu

SEQ ID NO: 12670 - RNA, 20 nt, Artificial Sequence
  Synthetic oligonucleotide: BID-1370
ugccccaacccugccugcag

SEQ ID NO: 12671 - RNA, 20 nt, Artificial Sequence
  Synthetic oligonucleotide: BID-1371
ggugaaggccgguccagccg

SEQ ID NO: 12672 - RNA, 20 nt, Artificial Sequence
  Synthetic oligonucleotide: BID-551
cccagcccccagcccacuua

SEQ ID NO: 12673 - RNA, 20 nt, Artificial Sequence
  Synthetic oligonucleotide: BID-552
gcccggccccucgcugccca

SEQ ID NO: 12674 - RNA, 20 nt, Artificial Sequence
  Synthetic oligonucleotide: BID-553
ccgcugcacauucguauuug

SEQ ID NO: 12675 - RNA, 20 nt, Artificial Sequence
  Synthetic oligonucleotide: BID-554
ugcacauucguauuuguuga

SEQ ID NO: 12676 - RNA, 20 nt, Artificial Sequence
  Synthetic oligonucleotide: BID-555
cauucguauuuguugaauga

SEQ ID NO: 12677 - RNA, 20 nt, Artificial Sequence
  Synthetic oligonucleotide: BID-556
cguauuuguugaaugaauga

SEQ ID NO: 12678 - RNA, 20 nt, Artificial Sequence
  Synthetic oligonucleotide: BID-1378
ccagcccagccacuuggugg

SEQ ID NO: 12679 - RNA, 20 nt, Artificial Sequence
  Synthetic oligonucleotide: BID-1379
agcccagccacuugguggcu

SEQ ID NO: 12680 - RNA, 20 nt, Artificial Sequence
  Synthetic oligonucleotide: BID-1380
cacuugguggcugagggcuu

SEQ ID NO: 12681 - RNA, 20 nt, Artificial Sequence
  Synthetic oligonucleotide: BID-1381
ugagggcuucagagcucucc

SEQ ID NO: 12682 - RNA, 20 nt, Artificial Sequence
  Synthetic oligonucleotide: BID-1382
cagagcucucccaggguccc

SEQ ID NO: 12683 - RNA, 20 nt, Artificial Sequence
  Synthetic oligonucleotide: BID-2151
agagcucucccagggucccc

SEQ ID NO: 12684 - RNA, 20 nt, Artificial Sequence
  Synthetic oligonucleotide: BID-1384
acaguuucccagcagcagca

SEQ ID NO: 12685 - RNA, 20 nt, Artificial Sequence
  Synthetic oligonucleotide: BID-1385
aguuucccagcagcagcagc

SEQ ID NO: 12686 - RNA, 20 nt, Artificial Sequence
  Synthetic oligonucleotide: BID-1386
cacaucauugccagugcucu

SEQ ID NO: 12687 - RNA, 20 nt, Artificial Sequence
  Synthetic oligonucleotide: BID-2155
acaucauugccagugcucua

SEQ ID NO: 12688 - RNA, 20 nt, Artificial Sequence
  Synthetic oligonucleotide: BID-1388
cauugccagugcucuaagga

SEQ ID NO: 12689 - RNA, 20 nt, Artificial Sequence
  Synthetic oligonucleotide: BID-1389
gccagugcucuaaggagcgg

SEQ ID NO: 12690 - RNA, 20 nt, Artificial Sequence
  Synthetic oligonucleotide: BID-1390
cugaccgcgcuuugucagcc

SEQ ID NO: 12691 - RNA, 20 nt, Artificial Sequence
  Synthetic oligonucleotide: BID-1391
uugucagcccugagcuccgc

SEQ ID NO: 12692 - RNA, 20 nt, Artificial Sequence
  Synthetic oligonucleotide: BID-2159
ugucagcccugagcuccgcu

SEQ ID NO: 12693 - RNA, 20 nt, Artificial Sequence
  Synthetic oligonucleotide: BID-2160
gucagcccugagcuccgcuc

SEQ ID NO: 12694 - RNA, 20 nt, Artificial Sequence
  Synthetic oligonucleotide: BID-1394
cagcccugagcuccgcucgg

SEQ ID NO: 12695 - RNA, 20 nt, Artificial Sequence
  Synthetic oligonucleotide: BID-2161
agcccugagcuccgcucggg

SEQ ID NO: 12696 - RNA, 20 nt, Artificial Sequence
  Synthetic oligonucleotide: BID-1396
gccggcaggugucugcggug

SEQ ID NO: 12697 - RNA, 20 nt, Artificial Sequence
  Synthetic oligonucleotide: BID-2165
ccggcaggugucugcggugc

SEQ ID NO: 12698 - RNA, 20 nt, Artificial Sequence
  Synthetic oligonucleotide: BID-1398
ggugcuggaaagaccacggu

SEQ ID NO: 12699 - RNA, 20 nt, Artificial Sequence
  Synthetic oligonucleotide: BID-1399
cuggaaagaccacggugugg

SEQ ID NO: 12700 - RNA, 20 nt, Artificial Sequence
  Synthetic oligonucleotide: BID-2169
uggaaagaccacgguguggg

SEQ ID NO: 12701 - RNA, 20 nt, Artificial Sequence
  Synthetic oligonucleotide: BID-2170
ggaaagaccacggugugggc

SEQ ID NO: 12702 - RNA, 20 nt, Artificial Sequence
  Synthetic oligonucleotide: BID-1402
ggggauuccgauccgccggc

SEQ ID NO: 12703 - RNA, 20 nt, Artificial Sequence
  Synthetic oligonucleotide: BID-1403
gccugcacccggccaggccc

SEQ ID NO: 12704 - RNA, 20 nt, Artificial Sequence
  Synthetic oligonucleotide: BID-1404
gcccgcggguuuucuccucu

SEQ ID NO: 12705 - RNA, 20 nt, Artificial Sequence
  Synthetic oligonucleotide: BID-2180
cccgcggguuuucuccucuc

SEQ ID NO: 12706 - RNA, 20 nt, Artificial Sequence
  Synthetic oligonucleotide: BID-1406
ccgcgccccgcaccccuccc

SEQ ID NO: 12707 - RNA, 20 nt, Artificial Sequence
  Synthetic oligonucleotide: BID-1407
ccccugaauccccaggccac

SEQ ID NO: 12708 - RNA, 20 nt, Artificial Sequence
  Synthetic oligonucleotide: BID-2186
cccugaauccccaggccacg

SEQ ID NO: 12709 - RNA, 20 nt, Artificial Sequence
  Synthetic oligonucleotide: BID-1409
cugaauccccaggccacgug

SEQ ID NO: 12710 - RNA, 20 nt, Artificial Sequence
  Synthetic oligonucleotide: BID-1410
gaauccccaggccacgugga

SEQ ID NO: 12711 - RNA, 20 nt, Artificial Sequence
  Synthetic oligonucleotide: BID-1411
caacaaagccuuccccgccu

SEQ ID NO: 12712 - RNA, 20 nt, Artificial Sequence
  Synthetic oligonucleotide: BID-1412
aagccuuccccgccuccgag

SEQ ID NO: 12713 - RNA, 20 nt, Artificial Sequence
  Synthetic oligonucleotide: BID-1413
gcaccgaccugccggccgcg

SEQ ID NO: 12714 - RNA, 20 nt, Artificial Sequence
  Synthetic oligonucleotide: BID-1414
accgaccugccggccgcgcc

SEQ ID NO: 12715 - RNA, 20 nt, Artificial Sequence
  Synthetic oligonucleotide: BID-2191
ccgaccugccggccgcgccg

SEQ ID NO: 12716 - RNA, 20 nt, Artificial Sequence
  Synthetic oligonucleotide: BID-1416
gaccugccggccgcgccgag

SEQ ID NO: 12717 - RNA, 20 nt, Artificial Sequence
  Synthetic oligonucleotide: BID-1417
ggccgcgccgaggagggcgc

SEQ ID NO: 12718 - RNA, 20 nt, Artificial Sequence
  Synthetic oligonucleotide: BID-1418
gcgccgaggagggcgcccgg

SEQ ID NO: 12719 - RNA, 20 nt, Artificial Sequence
  Synthetic oligonucleotide: BID-2196
cgccgaggagggcgcccggg

SEQ ID NO: 12720 - RNA, 20 nt, Artificial Sequence
  Synthetic oligonucleotide: BID-1420
ccgaggagggcgcccgggcg

SEQ ID NO: 12721 - RNA, 20 nt, Artificial Sequence
  Synthetic oligonucleotide: BID-2197
cgaggagggcgcccgggcgg

SEQ ID NO: 12722 - RNA, 20 nt, Artificial Sequence
  Synthetic oligonucleotide: BID-2198
gaggagggcgcccgggcgga

SEQ ID NO: 12723 - RNA, 20 nt, Artificial Sequence
  Synthetic oligonucleotide: BID-2199
aggagggcgcccgggcggag

SEQ ID NO: 12724 - RNA, 20 nt, Artificial Sequence
  Synthetic oligonucleotide: BID-1424
ggcgcccgggcggaggggag

SEQ ID NO: 12725 - RNA, 20 nt, Artificial Sequence
  Synthetic oligonucleotide: BID-2201
gcgcccgggcggaggggagg

SEQ ID NO: 12726 - RNA, 20 nt, Artificial Sequence
  Synthetic oligonucleotide: BID-2202
cgcccgggcggaggggaggc

SEQ ID NO: 12727 - RNA, 20 nt, Artificial Sequence
  Synthetic oligonucleotide: BID-1427
cccgggcggaggggaggcgg

SEQ ID NO: 12728 - RNA, 20 nt, Artificial Sequence
  Synthetic oligonucleotide: BID-1428
acccggcccucaggucgcug

SEQ ID NO: 12729 - RNA, 20 nt, Artificial Sequence
  Synthetic oligonucleotide: BID-1429
ccucaggucgcugcugaggc

SEQ ID NO: 12730 - RNA, 20 nt, Artificial Sequence
  Synthetic oligonucleotide: BID-2206
cucaggucgcugcugaggcc

SEQ ID NO: 12731 - RNA, 20 nt, Artificial Sequence
  Synthetic oligonucleotide: BID-1431
uccucuggcucccaccgcgg

SEQ ID NO: 12732 - RNA, 20 nt, Artificial Sequence
  Synthetic oligonucleotide: BID-1432
gcucccaccgcggucgggcc

SEQ ID NO: 12733 - RNA, 20 nt, Artificial Sequence
  Synthetic oligonucleotide: BID-1433
ccaccgcggucgggcccagg

SEQ ID NO: 12734 - RNA, 20 nt, Artificial Sequence
  Synthetic oligonucleotide: BID-1434
ggucgggcccagggcgggcg

SEQ ID NO: 12735 - RNA, 20 nt, Artificial Sequence
  Synthetic oligonucleotide: BID-1435
cccagggcgggcggcgggcc

SEQ ID NO: 12736 - RNA, 20 nt, Artificial Sequence
  Synthetic oligonucleotide: BID-1436
ggcgggcccugagcuccacg

SEQ ID NO: 12737 - RNA, 20 nt, Artificial Sequence
  Synthetic oligonucleotide: BID-2220
gcgggcccugagcuccacgc

SEQ ID NO: 12738 - RNA, 20 nt, Artificial Sequence
  Synthetic oligonucleotide: BID-1438
acgccggggcaggcggcagg

SEQ ID NO: 12739 - RNA, 20 nt, Artificial Sequence
  Synthetic oligonucleotide: BID-2226
cgccggggcaggcggcaggc

SEQ ID NO: 12740 - RNA, 20 nt, Artificial Sequence
  Synthetic oligonucleotide: BID-1440
gcaggcggcaggcagggguc

SEQ ID NO: 12741 - RNA, 20 nt, Artificial Sequence
  Synthetic oligonucleotide: BID-1441
cggcaggcaggggucacggg

SEQ ID NO: 12742 - RNA, 20 nt, Artificial Sequence
  Synthetic oligonucleotide: BID-2231
ggcaggcaggggucacgggc

SEQ ID NO: 12743 - RNA, 20 nt, Artificial Sequence
  Synthetic oligonucleotide: BID-1443
gcuggggcucggcgcguacc

SEQ ID NO: 12744 - RNA, 20 nt, Artificial Sequence
  Synthetic oligonucleotide: BID-2235
cuggggcucggcgcguaccc

SEQ ID NO: 12745 - RNA, 20 nt, Artificial Sequence
  Synthetic oligonucleotide: BID-2236
uggggcucggcgcguacccc

SEQ ID NO: 12746 - RNA, 20 nt, Artificial Sequence
  Synthetic oligonucleotide: BID-1446
gggcucggcgcguaccccgg

SEQ ID NO: 12747 - RNA, 20 nt, Artificial Sequence
  Synthetic oligonucleotide: BID-2237
ggcucggcgcguaccccggg

SEQ ID NO: 12748 - RNA, 20 nt, Artificial Sequence
  Synthetic oligonucleotide: BID-1448
gcgcguaccccgggaggggc

SEQ ID NO: 12749 - RNA, 20 nt, Artificial Sequence
  Synthetic oligonucleotide: BID-1449
gcacucaccacccuccagcc

SEQ ID NO: 12750 - RNA, 20 nt, Artificial Sequence
  Synthetic oligonucleotide: BID-2242
cacucaccacccuccagccg

SEQ ID NO: 12751 - RNA, 20 nt, Artificial Sequence
  Synthetic oligonucleotide: BID-2243
acucaccacccuccagccgc

SEQ ID NO: 12752 - RNA, 20 nt, Artificial Sequence
  Synthetic oligonucleotide: BID-1452
cacccuccagccgcgggggc

SEQ ID NO: 12753 - RNA, 20 nt, Artificial Sequence
  Synthetic oligonucleotide: BID-1453
ccgcgggggcgcgggcgcgu

SEQ ID NO: 12754 - RNA, 20 nt, Artificial Sequence
  Synthetic oligonucleotide: BID-1454
ggggcgcgggcgcguccggg

SEQ ID NO: 12755 - RNA, 20 nt, Artificial Sequence
  Synthetic oligonucleotide: BID-1455
aggcagcgucucccaggcgc

SEQ ID NO: 12756 - RNA, 17 nt, Artificial Sequence
  Synthetic oligonucleotide: BID-1456
cccaacccugccugcag

SEQ ID NO: 12757 - RNA, 17 nt, Artificial Sequence
  Synthetic oligonucleotide: BID-1457
gaaggccgguccagccg

SEQ ID NO: 12758 - RNA, 17 nt, Artificial Sequence
  Synthetic oligonucleotide: BID-606
agcccccagcccacuua

SEQ ID NO: 12759 - RNA, 17 nt, Artificial Sequence
  Synthetic oligonucleotide: BID-607
cggccccucgcugccca

SEQ ID NO: 12760 - RNA, 17 nt, Artificial Sequence
  Synthetic oligonucleotide: BID-608
cugcacauucguauuug

SEQ ID NO: 12761 - RNA, 17 nt, Artificial Sequence
  Synthetic oligonucleotide: BID-609
acauucguauuuguuga

SEQ ID NO: 12762 - RNA, 17 nt, Artificial Sequence
  Synthetic oligonucleotide: BID-610
ucguauuuguugaauga

SEQ ID NO: 12763 - RNA, 17 nt, Artificial Sequence
  Synthetic oligonucleotide: BID-611
auuuguugaaugaauga

SEQ ID NO: 12764 - RNA, 17 nt, Artificial Sequence
  Synthetic oligonucleotide: BID-1464
gcccagccacuuggugg

SEQ ID NO: 12765 - RNA, 17 nt, Artificial Sequence
  Synthetic oligonucleotide: BID-1465
ccagccacuugguggcu

SEQ ID NO: 12766 - RNA, 17 nt, Artificial Sequence
  Synthetic oligonucleotide: BID-1466
uugguggcugagggcuu

SEQ ID NO: 12767 - RNA, 17 nt, Artificial Sequence
  Synthetic oligonucleotide: BID-1467
gggcuucagagcucucc

SEQ ID NO: 12768 - RNA, 17 nt, Artificial Sequence
  Synthetic oligonucleotide: BID-1468
agcucucccaggguccc

SEQ ID NO: 12769 - RNA, 17 nt, Artificial Sequence
  Synthetic oligonucleotide: BID-2423
gcucucccagggucccc

SEQ ID NO: 12770 - RNA, 17 nt, Artificial Sequence
  Synthetic oligonucleotide: BID-1470
guuucccagcagcagca

SEQ ID NO: 12771 - RNA, 17 nt, Artificial Sequence
  Synthetic oligonucleotide: BID-1471
uucccagcagcagcagc

SEQ ID NO: 12772 - RNA, 17 nt, Artificial Sequence
  Synthetic oligonucleotide: BID-1472
aucauugccagugcucu

SEQ ID NO: 12773 - RNA, 17 nt, Artificial Sequence
  Synthetic oligonucleotide: BID-2427
ucauugccagugcucua

SEQ ID NO: 12774 - RNA, 17 nt, Artificial Sequence
  Synthetic oligonucleotide: BID-1474
ugccagugcucuaagga

SEQ ID NO: 12775 - RNA, 17 nt, Artificial Sequence
  Synthetic oligonucleotide: BID-1475
agugcucuaaggagcgg

SEQ ID NO: 12776 - RNA, 17 nt, Artificial Sequence
  Synthetic oligonucleotide: BID-1476
accgcgcuuugucagcc

SEQ ID NO: 12777 - RNA, 17 nt, Artificial Sequence
  Synthetic oligonucleotide: BID-1477
ucagcccugagcuccgc

SEQ ID NO: 12778 - RNA, 17 nt, Artificial Sequence
  Synthetic oligonucleotide: BID-2431
cagcccugagcuccgcu

SEQ ID NO: 12779 - RNA, 17 nt, Artificial Sequence
  Synthetic oligonucleotide: BID-2432
agcccugagcuccgcuc

SEQ ID NO: 12780 - RNA, 17 nt, Artificial Sequence
  Synthetic oligonucleotide: BID-1480
cccugagcuccgcucgg

SEQ ID NO: 12781 - RNA, 17 nt, Artificial Sequence
  Synthetic oligonucleotide: BID-2433
ccugagcuccgcucggg

SEQ ID NO: 12782 - RNA, 17 nt, Artificial Sequence
  Synthetic oligonucleotide: BID-1482
ggcaggugucugcggug

SEQ ID NO: 12783 - RNA, 17 nt, Artificial Sequence
  Synthetic oligonucleotide: BID-2437
gcaggugucugcggugc

SEQ ID NO: 12784 - RNA, 17 nt, Artificial Sequence
  Synthetic oligonucleotide: BID-1484
gcuggaaagaccacggu

SEQ ID NO: 12785 - RNA, 17 nt, Artificial Sequence
  Synthetic oligonucleotide: BID-1485
gaaagaccacggugugg

SEQ ID NO: 12786 - RNA, 17 nt, Artificial Sequence
  Synthetic oligonucleotide: BID-2441
aaagaccacgguguggg

SEQ ID NO: 12787 - RNA, 17 nt, Artificial Sequence
  Synthetic oligonucleotide: BID-2442
aagaccacggugugggc

SEQ ID NO: 12788 - RNA, 17 nt, Artificial Sequence
  Synthetic oligonucleotide: BID-1488
gauuccgauccgccggc

SEQ ID NO: 12789 - RNA, 17 nt, Artificial Sequence
  Synthetic oligonucleotide: BID-1489
ugcacccggccaggccc

SEQ ID NO: 12790 - RNA, 17 nt, Artificial Sequence
  Synthetic oligonucleotide: BID-1490
cgcggguuuucuccucu

SEQ ID NO: 12791 - RNA, 17 nt, Artificial Sequence
  Synthetic oligonucleotide: BID-2452
gcggguuuucuccucuc

SEQ ID NO: 12792 - RNA, 17 nt, Artificial Sequence
  Synthetic oligonucleotide: BID-1492
cgccccgcaccccuccc

SEQ ID NO: 12793 - RNA, 17 nt, Artificial Sequence
  Synthetic oligonucleotide: BID-1493
cugaauccccaggccac

SEQ ID NO: 12794 - RNA, 17 nt, Artificial Sequence
  Synthetic oligonucleotide: BID-2458
ugaauccccaggccacg

SEQ ID NO: 12795 - RNA, 17 nt, Artificial Sequence
  Synthetic oligonucleotide: BID-1495
aauccccaggccacgug

SEQ ID NO: 12796 - RNA, 17 nt, Artificial Sequence
  Synthetic oligonucleotide: BID-1496
uccccaggccacgugga

SEQ ID NO: 12797 - RNA, 17 nt, Artificial Sequence
  Synthetic oligonucleotide: BID-1497
caaagccuuccccgccu

SEQ ID NO: 12798 - RNA, 17 nt, Artificial Sequence
  Synthetic oligonucleotide: BID-1498
ccuuccccgccuccgag

SEQ ID NO: 12799 - RNA, 17 nt, Artificial Sequence
  Synthetic oligonucleotide: BID-1499
ccgaccugccggccgcg

SEQ ID NO: 12800 - RNA, 17 nt, Artificial Sequence
  Synthetic oligonucleotide: BID-1500
gaccugccggccgcgcc

SEQ ID NO: 12801 - RNA, 17 nt, Artificial Sequence
  Synthetic oligonucleotide: BID-2463
accugccggccgcgccg

SEQ ID NO: 12802 - RNA, 17 nt, Artificial Sequence
  Synthetic oligonucleotide: BID-1502
cugccggccgcgccgag

SEQ ID NO: 12803 - RNA, 17 nt, Artificial Sequence
  Synthetic oligonucleotide: BID-1503
cgcgccgaggagggcgc

SEQ ID NO: 12804 - RNA, 17 nt, Artificial Sequence
  Synthetic oligonucleotide: BID-1504
ccgaggagggcgcccgg

SEQ ID NO: 12805 - RNA, 17 nt, Artificial Sequence
  Synthetic oligonucleotide: BID-2468
cgaggagggcgcccggg

SEQ ID NO: 12806 - RNA, 17 nt, Artificial Sequence
  Synthetic oligonucleotide: BID-1506
aggagggcgcccgggcg

SEQ ID NO: 12807 - RNA, 17 nt, Artificial Sequence
  Synthetic oligonucleotide: BID-2469
ggagggcgcccgggcgg

SEQ ID NO: 12808 - RNA, 17 nt, Artificial Sequence
  Synthetic oligonucleotide: BID-2470
gagggcgcccgggcgga

SEQ ID NO: 12809 - RNA, 17 nt, Artificial Sequence
  Synthetic oligonucleotide: BID-2471
agggcgcccgggcggag

SEQ ID NO: 12810 - RNA, 17 nt, Artificial Sequence
  Synthetic oligonucleotide: BID-1510
gcccgggcggaggggag

SEQ ID NO: 12811 - RNA, 17 nt, Artificial Sequence
  Synthetic oligonucleotide: BID-2473
cccgggcggaggggagg

SEQ ID NO: 12812 - RNA, 17 nt, Artificial Sequence
  Synthetic oligonucleotide: BID-2474
ccgggcggaggggaggc

SEQ ID NO: 12813 - RNA, 17 nt, Artificial Sequence
  Synthetic oligonucleotide: BID-1513
gggcggaggggaggcgg

SEQ ID NO: 12814 - RNA, 17 nt, Artificial Sequence
  Synthetic oligonucleotide: BID-1514
cggcccucaggucgcug

SEQ ID NO: 12815 - RNA, 17 nt, Artificial Sequence
  Synthetic oligonucleotide: BID-1515
caggucgcugcugaggc

SEQ ID NO: 12816 - RNA, 17 nt, Artificial Sequence
  Synthetic oligonucleotide: BID-2478
aggucgcugcugaggcc

SEQ ID NO: 12817 - RNA, 17 nt, Artificial Sequence
  Synthetic oligonucleotide: BID-1517
ucuggcucccaccgcgg

SEQ ID NO: 12818 - RNA, 17 nt, Artificial Sequence
  Synthetic oligonucleotide: BID-1518
cccaccgcggucgggcc

SEQ ID NO: 12819 - RNA, 17 nt, Artificial Sequence
  Synthetic oligonucleotide: BID-1519
ccgcggucgggcccagg

SEQ ID NO: 12820 - RNA, 17 nt, Artificial Sequence
  Synthetic oligonucleotide: BID-1520
cgggcccagggcgggcg

SEQ ID NO: 12821 - RNA, 17 nt, Artificial Sequence
  Synthetic oligonucleotide: BID-1521
agggcgggcggcgggcc

SEQ ID NO: 12822 - RNA, 17 nt, Artificial Sequence
  Synthetic oligonucleotide: BID-1522
gggcccugagcuccacg

SEQ ID NO: 12823 - RNA, 17 nt, Artificial Sequence
  Synthetic oligonucleotide: BID-2492
ggcccugagcuccacgc

SEQ ID NO: 12824 - RNA, 17 nt, Artificial Sequence
  Synthetic oligonucleotide: BID-1524
ccggggcaggcggcagg

SEQ ID NO: 12825 - RNA, 17 nt, Artificial Sequence
  Synthetic oligonucleotide: BID-2498
cggggcaggcggcaggc

SEQ ID NO: 12826 - RNA, 17 nt, Artificial Sequence
  Synthetic oligonucleotide: BID-1526
ggcggcaggcagggguc

SEQ ID NO: 12827 - RNA, 17 nt, Artificial Sequence
  Synthetic oligonucleotide: BID-1527
caggcaggggucacggg

SEQ ID NO: 12828 - RNA, 17 nt, Artificial Sequence
  Synthetic oligonucleotide: BID-2503
aggcaggggucacgggc

SEQ ID NO: 12829 - RNA, 17 nt, Artificial Sequence
  Synthetic oligonucleotide: BID-1529
ggggcucggcgcguacc

SEQ ID NO: 12830 - RNA, 17 nt, Artificial Sequence
  Synthetic oligonucleotide: BID-2507
gggcucggcgcguaccc

SEQ ID NO: 12831 - RNA, 17 nt, Artificial Sequence
  Synthetic oligonucleotide: BID-2508
ggcucggcgcguacccc

SEQ ID NO: 12832 - RNA, 17 nt, Artificial Sequence
  Synthetic oligonucleotide: BID-1532
cucggcgcguaccccgg

SEQ ID NO: 12833 - RNA, 17 nt, Artificial Sequence
  Synthetic oligonucleotide: BID-2509
ucggcgcguaccccggg

SEQ ID NO: 12834 - RNA, 17 nt, Artificial Sequence
  Synthetic oligonucleotide: BID-1534
cguaccccgggaggggc

SEQ ID NO: 12835 - RNA, 17 nt, Artificial Sequence
  Synthetic oligonucleotide: BID-1535
cucaccacccuccagcc

SEQ ID NO: 12836 - RNA, 17 nt, Artificial Sequence
  Synthetic oligonucleotide: BID-2514
ucaccacccuccagccg

SEQ ID NO: 12837 - RNA, 17 nt, Artificial Sequence
  Synthetic oligonucleotide: BID-2515
caccacccuccagccgc

SEQ ID NO: 12838 - RNA, 17 nt, Artificial Sequence
  Synthetic oligonucleotide: BID-1538
ccuccagccgcgggggc

SEQ ID NO: 12839 - RNA, 17 nt, Artificial Sequence
  Synthetic oligonucleotide: BID-1539
cgggggcgcgggcgcgu

SEQ ID NO: 12840 - RNA, 17 nt, Artificial Sequence
  Synthetic oligonucleotide: BID-1540
gcgcgggcgcguccggg

SEQ ID NO: 12841 - RNA, 17 nt, Artificial Sequence
  Synthetic oligonucleotide: BID-1541
cagcgucucccaggcgc

SEQ ID NO: 12842 - RNA, 20 nt, Artificial Sequence
  Synthetic oligonucleotide: BID-1542
ccagccugagaccuccagag

SEQ ID NO: 12843 - RNA, 20 nt, Artificial Sequence
  Synthetic oligonucleotide: BID-685
cagccugagaccuccagagg

SEQ ID NO: 12844 - RNA, 20 nt, Artificial Sequence
  Synthetic oligonucleotide: BID-1544
cccaccaccuccacuaaaaa

SEQ ID NO: 12845 - RNA, 20 nt, Artificial Sequence
  Synthetic oligonucleotide: BID-1545
accuccacuaaaaacugaaa

SEQ ID NO: 12846 - RNA, 20 nt, Artificial Sequence
  Synthetic oligonucleotide: BID-1546
aaaacugaaaaagaaauuag

SEQ ID NO: 12847 - RNA, 20 nt, Artificial Sequence
  Synthetic oligonucleotide: BID-1547
guuaaacugauguuuuaaau

SEQ ID NO: 12848 - RNA, 20 nt, Artificial Sequence
  Synthetic oligonucleotide: BID-1548
aguugauauccaaauaauua

SEQ ID NO: 12849 - RNA, 20 nt, Artificial Sequence
  Synthetic oligonucleotide: BID-1549
uaaagaauaaacaacaagca

SEQ ID NO: 12850 - RNA, 20 nt, Artificial Sequence
  Synthetic oligonucleotide: BID-689
aaagaauaaacaacaagcac

SEQ ID NO: 12851 - RNA, 20 nt, Artificial Sequence
  Synthetic oligonucleotide: BID-1551
aacaacaagcacagggacug

SEQ ID NO: 12852 - RNA, 20 nt, Artificial Sequence
  Synthetic oligonucleotide: BID-1552
caacaagcacagggacuggu

SEQ ID NO: 12853 - RNA, 20 nt, Artificial Sequence
  Synthetic oligonucleotide: BID-692
aacaagcacagggacuggug

SEQ ID NO: 12854 - RNA, 20 nt, Artificial Sequence
  Synthetic oligonucleotide: BID-1554
gcacagggacuggugagggg

SEQ ID NO: 12855 - RNA, 20 nt, Artificial Sequence
  Synthetic oligonucleotide: BID-1555
cuuuccaaaccccugguucc

SEQ ID NO: 12856 - RNA, 20 nt, Artificial Sequence
  Synthetic oligonucleotide: BID-1556
uuccaaaccccugguuccgu

SEQ ID NO: 12857 - RNA, 20 nt, Artificial Sequence
  Synthetic oligonucleotide: BID-1557
ccccugguuccgugaggacc

SEQ ID NO: 12858 - RNA, 20 nt, Artificial Sequence
  Synthetic oligonucleotide: BID-1558
augaccaccccagacuguuc

SEQ ID NO: 12859 - RNA, 20 nt, Artificial Sequence
  Synthetic oligonucleotide: BID-1559
cagacuguuccagaaacagc

SEQ ID NO: 12860 - RNA, 20 nt, Artificial Sequence
  Synthetic oligonucleotide: BID-700
agacuguuccagaaacagcc

SEQ ID NO: 12861 - RNA, 20 nt, Artificial Sequence
  Synthetic oligonucleotide: BID-701
gacuguuccagaaacagccu

SEQ ID NO: 12862 - RNA, 20 nt, Artificial Sequence
  Synthetic oligonucleotide: BID-1562
ccagaaacagccuggggauu

SEQ ID NO: 12863 - RNA, 20 nt, Artificial Sequence
  Synthetic oligonucleotide: BID-1563
uggggauucugaauguuucc

SEQ ID NO: 12864 - RNA, 20 nt, Artificial Sequence
  Synthetic oligonucleotide: BID-1564
gggauucugaauguuuccca

SEQ ID NO: 12865 - RNA, 20 nt, Artificial Sequence
  Synthetic oligonucleotide: BID-1565
aauguuucccagagaaucau

SEQ ID NO: 12866 - RNA, 20 nt, Artificial Sequence
  Synthetic oligonucleotide: BID-703
auguuucccagagaaucauu

SEQ ID NO: 12867 - RNA, 20 nt, Artificial Sequence
  Synthetic oligonucleotide: BID-1567
uaggaauuaucccagcggcg

SEQ ID NO: 12868 - RNA, 20 nt, Artificial Sequence
  Synthetic oligonucleotide: BID-705
aggaauuaucccagcggcgc

SEQ ID NO: 12869 - RNA, 20 nt, Artificial Sequence
  Synthetic oligonucleotide: BID-1569
aguaaguggccaacuuaaag

SEQ ID NO: 12870 - RNA, 20 nt, Artificial Sequence
  Synthetic oligonucleotide: BID-1570
uuaaaguuggacgacacugu

SEQ ID NO: 12871 - RNA, 20 nt, Artificial Sequence
  Synthetic oligonucleotide: BID-1571
acugucugaaacagucgcgu

SEQ ID NO: 12872 - RNA, 20 nt, Artificial Sequence
  Synthetic oligonucleotide: BID-708
cugucugaaacagucgcgua

SEQ ID NO: 12873 - RNA, 20 nt, Artificial Sequence
  Synthetic oligonucleotide: BID-1573
gaaacagucgcguaaggggu

SEQ ID NO: 12874 - RNA, 20 nt, Artificial Sequence
  Synthetic oligonucleotide: BID-1574
cagucgcguaagggguaagg

SEQ ID NO: 12875 - RNA, 20 nt, Artificial Sequence
  Synthetic oligonucleotide: BID-713
agucgcguaagggguaaggg

SEQ ID NO: 12876 - RNA, 20 nt, Artificial Sequence
  Synthetic oligonucleotide: BID-1576
cuccacagccccgcgccggc

SEQ ID NO: 12877 - RNA, 20 nt, Artificial Sequence
  Synthetic oligonucleotide: BID-1577
cccgcgccggcgcgggcucc

SEQ ID NO: 12878 - RNA, 17 nt, Artificial Sequence
  Synthetic oligonucleotide: BID-1578
gccugagaccuccagag

SEQ ID NO: 12879 - RNA, 17 nt, Artificial Sequence
  Synthetic oligonucleotide: BID-722
ccugagaccuccagagg

SEQ ID NO: 12880 - RNA, 17 nt, Artificial Sequence
  Synthetic oligonucleotide: BID-1580
accaccuccacuaaaaa

SEQ ID NO: 12881 - RNA, 17 nt, Artificial Sequence
  Synthetic oligonucleotide: BID-1581
uccacuaaaaacugaaa

SEQ ID NO: 12882 - RNA, 17 nt, Artificial Sequence
  Synthetic oligonucleotide: BID-1582
acugaaaaagaaauuag

SEQ ID NO: 12883 - RNA, 17 nt, Artificial Sequence
  Synthetic oligonucleotide: BID-1583
aaacugauguuuuaaau

SEQ ID NO: 12884 - RNA, 17 nt, Artificial Sequence
  Synthetic oligonucleotide: BID-1584
ugauauccaaauaauua

SEQ ID NO: 12885 - RNA, 17 nt, Artificial Sequence
  Synthetic oligonucleotide: BID-1585
agaauaaacaacaagca

SEQ ID NO: 12886 - RNA, 17 nt, Artificial Sequence
  Synthetic oligonucleotide: BID-726
gaauaaacaacaagcac

SEQ ID NO: 12887 - RNA, 17 nt, Artificial Sequence
  Synthetic oligonucleotide: BID-1587
aacaagcacagggacug

SEQ ID NO: 12888 - RNA, 17 nt, Artificial Sequence
  Synthetic oligonucleotide: BID-1588
caagcacagggacuggu

SEQ ID NO: 12889 - RNA, 17 nt, Artificial Sequence
  Synthetic oligonucleotide: BID-729
aagcacagggacuggug

SEQ ID NO: 12890 - RNA, 17 nt, Artificial Sequence
  Synthetic oligonucleotide: BID-1590
cagggacuggugagggg

SEQ ID NO: 12891 - RNA, 17 nt, Artificial Sequence
  Synthetic oligonucleotide: BID-1591
uccaaaccccugguucc

SEQ ID NO: 12892 - RNA, 17 nt, Artificial Sequence
  Synthetic oligonucleotide: BID-1592
caaaccccugguuccgu

SEQ ID NO: 12893 - RNA, 17 nt, Artificial Sequence
  Synthetic oligonucleotide: BID-1593
cugguuccgugaggacc

SEQ ID NO: 12894 - RNA, 17 nt, Artificial Sequence
  Synthetic oligonucleotide: BID-1594
accaccccagacuguuc

SEQ ID NO: 12895 - RNA, 17 nt, Artificial Sequence
  Synthetic oligonucleotide: BID-1595
acuguuccagaaacagc

SEQ ID NO: 12896 - RNA, 17 nt, Artificial Sequence
  Synthetic oligonucleotide: BID-737
cuguuccagaaacagcc

SEQ ID NO: 12897 - RNA, 17 nt, Artificial Sequence
  Synthetic oligonucleotide: BID-738
uguuccagaaacagccu

SEQ ID NO: 12898 - RNA, 17 nt, Artificial Sequence
  Synthetic oligonucleotide: BID-1598
gaaacagccuggggauu

SEQ ID NO: 12899 - RNA, 17 nt, Artificial Sequence
  Synthetic oligonucleotide: BID-1599
ggauucugaauguuucc

SEQ ID NO: 12900 - RNA, 17 nt, Artificial Sequence
  Synthetic oligonucleotide: BID-1600
auucugaauguuuccca

SEQ ID NO: 12901 - RNA, 17 nt, Artificial Sequence
  Synthetic oligonucleotide: BID-1601
guuucccagagaaucau

SEQ ID NO: 12902 - RNA, 17 nt, Artificial Sequence
  Synthetic oligonucleotide: BID-740
uuucccagagaaucauu

SEQ ID NO: 12903 - RNA, 17 nt, Artificial Sequence
  Synthetic oligonucleotide: BID-1603
gaauuaucccagcggcg

SEQ ID NO: 12904 - RNA, 17 nt, Artificial Sequence
  Synthetic oligonucleotide: BID-742
aauuaucccagcggcgc

SEQ ID NO: 12905 - RNA, 17 nt, Artificial Sequence
  Synthetic oligonucleotide: BID-1605
aaguggccaacuuaaag

SEQ ID NO: 12906 - RNA, 17 nt, Artificial Sequence
  Synthetic oligonucleotide: BID-1606
aaguuggacgacacugu

SEQ ID NO: 12907 - RNA, 17 nt, Artificial Sequence
  Synthetic oligonucleotide: BID-1607
gucugaaacagucgcgu

SEQ ID NO: 12908 - RNA, 17 nt, Artificial Sequence
  Synthetic oligonucleotide: BID-745
ucugaaacagucgcgua

SEQ ID NO: 12909 - RNA, 17 nt, Artificial Sequence
  Synthetic oligonucleotide: BID-1609
acagucgcguaaggggu

SEQ ID NO: 12910 - RNA, 17 nt, Artificial Sequence
  Synthetic oligonucleotide: BID-1610
ucgcguaagggguaagg

SEQ ID NO: 12911 - RNA, 17 nt, Artificial Sequence
  Synthetic oligonucleotide: BID-750
cgcguaagggguaaggg

SEQ ID NO: 12912 - RNA, 17 nt, Artificial Sequence
  Synthetic oligonucleotide: BID-1612
cacagccccgcgccggc

SEQ ID NO: 12913 - RNA, 17 nt, Artificial Sequence
  Synthetic oligonucleotide: BID-1613
gcgccggcgcgggcucc

SEQ ID NO: 12914 - RNA, 20 nt, Artificial Sequence
  Synthetic oligonucleotide: BID-1614
cccggggagcccgcgccggc

SEQ ID NO: 12915 - RNA, 20 nt, Artificial Sequence
  Synthetic oligonucleotide: BID-759
ccggggagcccgcgccggcg

SEQ ID NO: 12916 - RNA, 20 nt, Artificial Sequence
  Synthetic oligonucleotide: BID-1616
gcccgcgccggcgcggggcu

SEQ ID NO: 12917 - RNA, 20 nt, Artificial Sequence
  Synthetic oligonucleotide: BID-762
cccgcgccggcgcggggcug

SEQ ID NO: 12918 - RNA, 20 nt, Artificial Sequence
  Synthetic oligonucleotide: BID-1618
cgccggcgcggggcugugga

SEQ ID NO: 12919 - RNA, 20 nt, Artificial Sequence
  Synthetic oligonucleotide: BID-763
gccggcgcggggcuguggag

SEQ ID NO: 12920 - RNA, 20 nt, Artificial Sequence
  Synthetic oligonucleotide: BID-1620
gcgcggggcuguggagcggg

SEQ ID NO: 12921 - RNA, 20 nt, Artificial Sequence
  Synthetic oligonucleotide: BID-766
cgcggggcuguggagcgggg

SEQ ID NO: 12922 - RNA, 20 nt, Artificial Sequence
  Synthetic oligonucleotide: BID-767
gcggggcuguggagcggggc

SEQ ID NO: 12923 - RNA, 20 nt, Artificial Sequence
  Synthetic oligonucleotide: BID-768
cggggcuguggagcggggcg

SEQ ID NO: 12924 - RNA, 20 nt, Artificial Sequence
  Synthetic oligonucleotide: BID-1624
ggcggggagccggcagcgca

SEQ ID NO: 12925 - RNA, 20 nt, Artificial Sequence
  Synthetic oligonucleotide: BID-1625
cggggagccggcagcgcagu

SEQ ID NO: 12926 - RNA, 20 nt, Artificial Sequence
  Synthetic oligonucleotide: BID-1626
ggccacuuacuccagcgccg

SEQ ID NO: 12927 - RNA, 20 nt, Artificial Sequence
  Synthetic oligonucleotide: BID-772
gccacuuacuccagcgccgc

SEQ ID NO: 12928 - RNA, 20 nt, Artificial Sequence
  Synthetic oligonucleotide: BID-1628
ggauaauuccuaaugauucu

SEQ ID NO: 12929 - RNA, 20 nt, Artificial Sequence
  Synthetic oligonucleotide: BID-774
gauaauuccuaaugauucuc

SEQ ID NO: 12930 - RNA, 20 nt, Artificial Sequence
  Synthetic oligonucleotide: BID-775
auaauuccuaaugauucucu

SEQ ID NO: 12931 - RNA, 20 nt, Artificial Sequence
  Synthetic oligonucleotide: BID-1631
augauucucugggaaacauu

SEQ ID NO: 12932 - RNA, 20 nt, Artificial Sequence
  Synthetic oligonucleotide: BID-1632
ucagaauccccaggcuguuu

SEQ ID NO: 12933 - RNA, 20 nt, Artificial Sequence
  Synthetic oligonucleotide: BID-777
cagaauccccaggcuguuuc

SEQ ID NO: 12934 - RNA, 20 nt, Artificial Sequence
  Synthetic oligonucleotide: BID-1634
caggcuguuucuggaacagu

SEQ ID NO: 12935 - RNA, 20 nt, Artificial Sequence
  Synthetic oligonucleotide: BID-778
aggcuguuucuggaacaguc

SEQ ID NO: 12936 - RNA, 20 nt, Artificial Sequence
  Synthetic oligonucleotide: BID-1636
gguggucauucuagguccuc

SEQ ID NO: 12937 - RNA, 20 nt, Artificial Sequence
  Synthetic oligonucleotide: BID-783
guggucauucuagguccuca

SEQ ID NO: 12938 - RNA, 20 nt, Artificial Sequence
  Synthetic oligonucleotide: BID-1638
auucuagguccucacggaac

SEQ ID NO: 12939 - RNA, 20 nt, Artificial Sequence
  Synthetic oligonucleotide: BID-784
uucuagguccucacggaacc

SEQ ID NO: 12940 - RNA, 20 nt, Artificial Sequence
  Synthetic oligonucleotide: BID-1640
guccucacggaaccaggggu

SEQ ID NO: 12941 - RNA, 20 nt, Artificial Sequence
  Synthetic oligonucleotide: BID-787
uccucacggaaccagggguu

SEQ ID NO: 12942 - RNA, 20 nt, Artificial Sequence
  Synthetic oligonucleotide: BID-1642
cggaaccagggguuuggaaa

SEQ ID NO: 12943 - RNA, 20 nt, Artificial Sequence
  Synthetic oligonucleotide: BID-1643
accagggguuuggaaagugg

SEQ ID NO: 12944 - RNA, 20 nt, Artificial Sequence
  Synthetic oligonucleotide: BID-1644
uggaaagugggugaagccau

SEQ ID NO: 12945 - RNA, 20 nt, Artificial Sequence
  Synthetic oligonucleotide: BID-1645
gggugaagccauguggguug

SEQ ID NO: 12946 - RNA, 20 nt, Artificial Sequence
  Synthetic oligonucleotide: BID-1646
gugaagccauguggguugca

SEQ ID NO: 12947 - RNA, 20 nt, Artificial Sequence
  Synthetic oligonucleotide: BID-1647
guuguuuauucuuuaauuau

SEQ ID NO: 12948 - RNA, 20 nt, Artificial Sequence
  Synthetic oligonucleotide: BID-1648
aguuuaacauauagauaaug

SEQ ID NO: 12949 - RNA, 20 nt, Artificial Sequence
  Synthetic oligonucleotide: BID-794
guuuaacauauagauaaugc

SEQ ID NO: 12950 - RNA, 20 nt, Artificial Sequence
  Synthetic oligonucleotide: BID-1650
aauuucuuuuucaguuuuua

SEQ ID NO: 12951 - RNA, 20 nt, Artificial Sequence
  Synthetic oligonucleotide: BID-797
auuucuuuuucaguuuuuag

SEQ ID NO: 12952 - RNA, 20 nt, Artificial Sequence
  Synthetic oligonucleotide: BID-1652
uucaguuuuuaguggaggug

SEQ ID NO: 12953 - RNA, 20 nt, Artificial Sequence
  Synthetic oligonucleotide: BID-800
ucaguuuuuaguggaggugg

SEQ ID NO: 12954 - RNA, 20 nt, Artificial Sequence
  Synthetic oligonucleotide: BID-801
caguuuuuaguggagguggu

SEQ ID NO: 12955 - RNA, 20 nt, Artificial Sequence
  Synthetic oligonucleotide: BID-802
aguuuuuaguggagguggug

SEQ ID NO: 12956 - RNA, 20 nt, Artificial Sequence
  Synthetic oligonucleotide: BID-803
guuuuuaguggagguggugg

SEQ ID NO: 12957 - RNA, 20 nt, Artificial Sequence
  Synthetic oligonucleotide: BID-804
uuuuuaguggaggugguggg

SEQ ID NO: 12958 - RNA, 20 nt, Artificial Sequence
  Synthetic oligonucleotide: BID-805
uuuuaguggagguggugggg

SEQ ID NO: 12959 - RNA, 20 nt, Artificial Sequence
  Synthetic oligonucleotide: BID-806
uuuaguggaggugguggggg

SEQ ID NO: 12960 - RNA, 20 nt, Artificial Sequence
  Synthetic oligonucleotide: BID-1660
uggggggggggucuccaccu

SEQ ID NO: 12961 - RNA, 20 nt, Artificial Sequence
  Synthetic oligonucleotide: BID-809
ggggggggggucuccaccuc

SEQ ID NO: 12962 - RNA, 17 nt, Artificial Sequence
  Synthetic oligonucleotide: BID-1662
ggggagcccgcgccggc

SEQ ID NO: 12963 - RNA, 17 nt, Artificial Sequence
  Synthetic oligonucleotide: BID-814
gggagcccgcgccggcg

SEQ ID NO: 12964 - RNA, 17 nt, Artificial Sequence
  Synthetic oligonucleotide: BID-1664
cgcgccggcgcggggcu

SEQ ID NO: 12965 - RNA, 17 nt, Artificial Sequence
  Synthetic oligonucleotide: BID-817
gcgccggcgcggggcug

SEQ ID NO: 12966 - RNA, 17 nt, Artificial Sequence
  Synthetic oligonucleotide: BID-1666
cggcgcggggcugugga

SEQ ID NO: 12967 - RNA, 17 nt, Artificial Sequence
  Synthetic oligonucleotide: BID-818
ggcgcggggcuguggag

SEQ ID NO: 12968 - RNA, 17 nt, Artificial Sequence
  Synthetic oligonucleotide: BID-1668
cggggcuguggagcggg

SEQ ID NO: 12969 - RNA, 17 nt, Artificial Sequence
  Synthetic oligonucleotide: BID-821
ggggcuguggagcgggg

SEQ ID NO: 12970 - RNA, 17 nt, Artificial Sequence
  Synthetic oligonucleotide: BID-822
gggcuguggagcggggc

SEQ ID NO: 12971 - RNA, 17 nt, Artificial Sequence
  Synthetic oligonucleotide: BID-823
ggcuguggagcggggcg

SEQ ID NO: 12972 - RNA, 17 nt, Artificial Sequence
  Synthetic oligonucleotide: BID-1672
ggggagccggcagcgca

SEQ ID NO: 12973 - RNA, 17 nt, Artificial Sequence
  Synthetic oligonucleotide: BID-1673
ggagccggcagcgcagu

SEQ ID NO: 12974 - RNA, 17 nt, Artificial Sequence
  Synthetic oligonucleotide: BID-1674
cacuuacuccagcgccg

SEQ ID NO: 12975 - RNA, 17 nt, Artificial Sequence
  Synthetic oligonucleotide: BID-827
acuuacuccagcgccgc

SEQ ID NO: 12976 - RNA, 17 nt, Artificial Sequence
  Synthetic oligonucleotide: BID-1676
uaauuccuaaugauucu

SEQ ID NO: 12977 - RNA, 17 nt, Artificial Sequence
  Synthetic oligonucleotide: BID-829
aauuccuaaugauucuc

SEQ ID NO: 12978 - RNA, 17 nt, Artificial Sequence
  Synthetic oligonucleotide: BID-830
auuccuaaugauucucu

SEQ ID NO: 12979 - RNA, 17 nt, Artificial Sequence
  Synthetic oligonucleotide: BID-1679
auucucugggaaacauu

SEQ ID NO: 12980 - RNA, 17 nt, Artificial Sequence
  Synthetic oligonucleotide: BID-1680
gaauccccaggcuguuu

SEQ ID NO: 12981 - RNA, 17 nt, Artificial Sequence
  Synthetic oligonucleotide: BID-832
aauccccaggcuguuuc

SEQ ID NO: 12982 - RNA, 17 nt, Artificial Sequence
  Synthetic oligonucleotide: BID-1682
gcuguuucuggaacagu

SEQ ID NO: 12983 - RNA, 17 nt, Artificial Sequence
  Synthetic oligonucleotide: BID-833
cuguuucuggaacaguc

SEQ ID NO: 12984 - RNA, 17 nt, Artificial Sequence
  Synthetic oligonucleotide: BID-1684
ggucauucuagguccuc

SEQ ID NO: 12985 - RNA, 17 nt, Artificial Sequence
  Synthetic oligonucleotide: BID-838
gucauucuagguccuca

SEQ ID NO: 12986 - RNA, 17 nt, Artificial Sequence
  Synthetic oligonucleotide: BID-1686
cuagguccucacggaac

SEQ ID NO: 12987 - RNA, 17 nt, Artificial Sequence
  Synthetic oligonucleotide: BID-839
uagguccucacggaacc

SEQ ID NO: 12988 - RNA, 17 nt, Artificial Sequence
  Synthetic oligonucleotide: BID-1688
cucacggaaccaggggu

SEQ ID NO: 12989 - RNA, 17 nt, Artificial Sequence
  Synthetic oligonucleotide: BID-842
ucacggaaccagggguu

SEQ ID NO: 12990 - RNA, 17 nt, Artificial Sequence
  Synthetic oligonucleotide: BID-1690
aaccagggguuuggaaa

SEQ ID NO: 12991 - RNA, 17 nt, Artificial Sequence
  Synthetic oligonucleotide: BID-1691
agggguuuggaaagugg

SEQ ID NO: 12992 - RNA, 17 nt, Artificial Sequence
  Synthetic oligonucleotide: BID-1692
aaagugggugaagccau

SEQ ID NO: 12993 - RNA, 17 nt, Artificial Sequence
  Synthetic oligonucleotide: BID-1693
ugaagccauguggguug

SEQ ID NO: 12994 - RNA, 17 nt, Artificial Sequence
  Synthetic oligonucleotide: BID-1694
aagccauguggguugca

SEQ ID NO: 12995 - RNA, 17 nt, Artificial Sequence
  Synthetic oligonucleotide: BID-1695
guuuauucuuuaauuau

SEQ ID NO: 12996 - RNA, 17 nt, Artificial Sequence
  Synthetic oligonucleotide: BID-1696
uuaacauauagauaaug

SEQ ID NO: 12997 - RNA, 17 nt, Artificial Sequence
  Synthetic oligonucleotide: BID-849
uaacauauagauaaugc

SEQ ID NO: 12998 - RNA, 17 nt, Artificial Sequence
  Synthetic oligonucleotide: BID-1698
uucuuuuucaguuuuua

SEQ ID NO: 12999 - RNA, 17 nt, Artificial Sequence
  Synthetic oligonucleotide: BID-852
ucuuuuucaguuuuuag

SEQ ID NO: 13000 - RNA, 17 nt, Artificial Sequence
  Synthetic oligonucleotide: BID-1700
aguuuuuaguggaggug

SEQ ID NO: 13001 - RNA, 17 nt, Artificial Sequence
  Synthetic oligonucleotide: BID-855
guuuuuaguggaggugg

SEQ ID NO: 13002 - RNA, 17 nt, Artificial Sequence
  Synthetic oligonucleotide: BID-856
uuuuuaguggagguggu

SEQ ID NO: 13003 - RNA, 17 nt, Artificial Sequence
  Synthetic oligonucleotide: BID-857
uuuuaguggagguggug

SEQ ID NO: 13004 - RNA, 17 nt, Artificial Sequence
  Synthetic oligonucleotide: BID-858
uuuaguggagguggugg

SEQ ID NO: 13005 - RNA, 17 nt, Artificial Sequence
  Synthetic oligonucleotide: BID-859
uuaguggaggugguggg

SEQ ID NO: 13006 - RNA, 17 nt, Artificial Sequence
  Synthetic oligonucleotide: BID-860
uaguggagguggugggg

SEQ ID NO: 13007 - RNA, 17 nt, Artificial Sequence
  Synthetic oligonucleotide: BID-861
aguggaggugguggggg

SEQ ID NO: 13008 - RNA, 17 nt, Artificial Sequence
  Synthetic oligonucleotide: BID-1708
ggggggggucuccaccu

SEQ ID NO: 13009 - RNA, 17 nt, Artificial Sequence
  Synthetic oligonucleotide: BID-864
gggggggucuccaccuc

SEQ ID NO: 13010 - RNA, 20 nt, Artificial Sequence
  Synthetic oligonucleotide: BID-1710
gaggagcagauggacccacc

SEQ ID NO: 13011 - RNA, 20 nt, Artificial Sequence
  Synthetic oligonucleotide: BID-1711
cucaggcuugcacccccuuc

SEQ ID NO: 13012 - RNA, 20 nt, Artificial Sequence
  Synthetic oligonucleotide: BID-869
ucaggcuugcacccccuucc

SEQ ID NO: 13013 - RNA, 20 nt, Artificial Sequence
  Synthetic oligonucleotide: BID-1713
ccucaguccucgcucucacu

SEQ ID NO: 13014 - RNA, 20 nt, Artificial Sequence
  Synthetic oligonucleotide: BID-870
cucaguccucgcucucacug

SEQ ID NO: 13015 - RNA, 20 nt, Artificial Sequence
  Synthetic oligonucleotide: BID-871
ucaguccucgcucucacugu

SEQ ID NO: 13016 - RNA, 20 nt, Artificial Sequence
  Synthetic oligonucleotide: BID-872
caguccucgcucucacugug

SEQ ID NO: 13017 - RNA, 20 nt, Artificial Sequence
  Synthetic oligonucleotide: BID-873
aguccucgcucucacugugg

SEQ ID NO: 13018 - RNA, 20 nt, Artificial Sequence
  Synthetic oligonucleotide: BID-1718
cucucacugugggggagcug

SEQ ID NO: 13019 - RNA, 20 nt, Artificial Sequence
  Synthetic oligonucleotide: BID-1719
cucacugugggggagcugca

SEQ ID NO: 13020 - RNA, 20 nt, Artificial Sequence
  Synthetic oligonucleotide: BID-1720
ccacauuccaucuccaccca

SEQ ID NO: 13021 - RNA, 20 nt, Artificial Sequence
  Synthetic oligonucleotide: BID-876
cacauuccaucuccacccac

SEQ ID NO: 13022 - RNA, 20 nt, Artificial Sequence
  Synthetic oligonucleotide: BID-1722
aucuccacccacaggaggcu

SEQ ID NO: 13023 - RNA, 20 nt, Artificial Sequence
  Synthetic oligonucleotide: BID-1723
cacccacaggaggcuuugag

SEQ ID NO: 13024 - RNA, 20 nt, Artificial Sequence
  Synthetic oligonucleotide: BID-878
acccacaggaggcuuugaga

SEQ ID NO: 13025 - RNA, 20 nt, Artificial Sequence
  Synthetic oligonucleotide: BID-879
cccacaggaggcuuugagau

SEQ ID NO: 13026 - RNA, 20 nt, Artificial Sequence
  Synthetic oligonucleotide: BID-880
ccacaggaggcuuugagaug

SEQ ID NO: 13027 - RNA, 20 nt, Artificial Sequence
  Synthetic oligonucleotide: BID-881
cacaggaggcuuugagaugg

SEQ ID NO: 13028 - RNA, 20 nt, Artificial Sequence
  Synthetic oligonucleotide: BID-882
acaggaggcuuugagauggg

SEQ ID NO: 13029 - RNA, 20 nt, Artificial Sequence
  Synthetic oligonucleotide: BID-1729
uugagauggggggagcucuc

SEQ ID NO: 13030 - RNA, 20 nt, Artificial Sequence
  Synthetic oligonucleotide: BID-1730
uggggggagcucuccugggc

SEQ ID NO: 13031 - RNA, 20 nt, Artificial Sequence
  Synthetic oligonucleotide: BID-1731
gggccugaaugugugccguc

SEQ ID NO: 13032 - RNA, 20 nt, Artificial Sequence
  Synthetic oligonucleotide: BID-885
ggccugaaugugugccgucc

SEQ ID NO: 13033 - RNA, 20 nt, Artificial Sequence
  Synthetic oligonucleotide: BID-1733
uccuggggcccugcaguccc

SEQ ID NO: 13034 - RNA, 20 nt, Artificial Sequence
  Synthetic oligonucleotide: BID-888
ccuggggcccugcagucccc

SEQ ID NO: 13035 - RNA, 20 nt, Artificial Sequence
  Synthetic oligonucleotide: BID-889
cuggggcccugcaguccccu

SEQ ID NO: 13036 - RNA, 20 nt, Artificial Sequence
  Synthetic oligonucleotide: BID-1736
caguccccugggagugauga

SEQ ID NO: 13037 - RNA, 20 nt, Artificial Sequence
  Synthetic oligonucleotide: BID-1737
gaugaccgagaccagauucc

SEQ ID NO: 13038 - RNA, 20 nt, Artificial Sequence
  Synthetic oligonucleotide: BID-1738
ccgagaccagauucccugag

SEQ ID NO: 13039 - RNA, 20 nt, Artificial Sequence
  Synthetic oligonucleotide: BID-890
cgagaccagauucccugagc

SEQ ID NO: 13040 - RNA, 20 nt, Artificial Sequence
  Synthetic oligonucleotide: BID-1740
auucccugagcuggggucuu

SEQ ID NO: 13041 - RNA, 20 nt, Artificial Sequence
  Synthetic oligonucleotide: BID-1741
ugagcuggggucuuaagggu

SEQ ID NO: 13042 - RNA, 20 nt, Artificial Sequence
  Synthetic oligonucleotide: BID-895
gagcuggggucuuaagggug

SEQ ID NO: 13043 - RNA, 20 nt, Artificial Sequence
  Synthetic oligonucleotide: BID-896
agcuggggucuuaagggugu

SEQ ID NO: 13044 - RNA, 20 nt, Artificial Sequence
  Synthetic oligonucleotide: BID-897
gcuggggucuuaagggugug

SEQ ID NO: 13045 - RNA, 20 nt, Artificial Sequence
  Synthetic oligonucleotide: BID-1745
ucuuaaggguguggggagcg

SEQ ID NO: 13046 - RNA, 20 nt, Artificial Sequence
  Synthetic oligonucleotide: BID-1746
uuaaggguguggggagcgca

SEQ ID NO: 13047 - RNA, 20 nt, Artificial Sequence
  Synthetic oligonucleotide: BID-898
uaaggguguggggagcgcag

SEQ ID NO: 13048 - RNA, 20 nt, Artificial Sequence
  Synthetic oligonucleotide: BID-1748
gcagagggauccucuggcau

SEQ ID NO: 13049 - RNA, 20 nt, Artificial Sequence
  Synthetic oligonucleotide: BID-901
cagagggauccucuggcauc

SEQ ID NO: 13050 - RNA, 20 nt, Artificial Sequence
  Synthetic oligonucleotide: BID-1750
ggauccucuggcaucaggag

SEQ ID NO: 13051 - RNA, 20 nt, Artificial Sequence
  Synthetic oligonucleotide: BID-1751
gcaucaggaguugagguaga

SEQ ID NO: 13052 - RNA, 20 nt, Artificial Sequence
  Synthetic oligonucleotide: BID-1752
aguugagguagacagagcuc

SEQ ID NO: 13053 - RNA, 20 nt, Artificial Sequence
  Synthetic oligonucleotide: BID-903
guugagguagacagagcucc

SEQ ID NO: 13054 - RNA, 20 nt, Artificial Sequence
  Synthetic oligonucleotide: BID-904
uugagguagacagagcucca

SEQ ID NO: 13055 - RNA, 20 nt, Artificial Sequence
  Synthetic oligonucleotide: BID-1755
agagcuccagggaggcacug

SEQ ID NO: 13056 - RNA, 20 nt, Artificial Sequence
  Synthetic oligonucleotide: BID-906
gagcuccagggaggcacugc

SEQ ID NO: 13057 - RNA, 20 nt, Artificial Sequence
  Synthetic oligonucleotide: BID-907
agcuccagggaggcacugcc

SEQ ID NO: 13058 - RNA, 20 nt, Artificial Sequence
  Synthetic oligonucleotide: BID-1758
cuccagggaggcacugccgg

SEQ ID NO: 13059 - RNA, 20 nt, Artificial Sequence
  Synthetic oligonucleotide: BID-1759
ccaagccucugccugcggcc

SEQ ID NO: 13060 - RNA, 20 nt, Artificial Sequence
  Synthetic oligonucleotide: BID-1760
ccccuucugccccucuugcc

SEQ ID NO: 13061 - RNA, 20 nt, Artificial Sequence
  Synthetic oligonucleotide: BID-913
cccuucugccccucuugccc

SEQ ID NO: 13062 - RNA, 20 nt, Artificial Sequence
  Synthetic oligonucleotide: BID-914
ccuucugccccucuugccca

SEQ ID NO: 13063 - RNA, 20 nt, Artificial Sequence
  Synthetic oligonucleotide: BID-1763
uucugccccucuugcccagg

SEQ ID NO: 13064 - RNA, 20 nt, Artificial Sequence
  Synthetic oligonucleotide: BID-915
ucugccccucuugcccaggg

SEQ ID NO: 13065 - RNA, 20 nt, Artificial Sequence
  Synthetic oligonucleotide: BID-916
cugccccucuugcccaggga

SEQ ID NO: 13066 - RNA, 20 nt, Artificial Sequence
  Synthetic oligonucleotide: BID-1766
ccccucuugcccagggaggg

SEQ ID NO: 13067 - RNA, 20 nt, Artificial Sequence
  Synthetic oligonucleotide: BID-1767
ccucuugcccagggagggaa

SEQ ID NO: 13068 - RNA, 20 nt, Artificial Sequence
  Synthetic oligonucleotide: BID-917
cucuugcccagggagggaag

SEQ ID NO: 13069 - RNA, 20 nt, Artificial Sequence
  Synthetic oligonucleotide: BID-1769
ccagggagggaagaggaaau

SEQ ID NO: 13070 - RNA, 20 nt, Artificial Sequence
  Synthetic oligonucleotide: BID-918
cagggagggaagaggaaaug

SEQ ID NO: 13071 - RNA, 20 nt, Artificial Sequence
  Synthetic oligonucleotide: BID-1771
gcggggucagcaguucgugg

SEQ ID NO: 13072 - RNA, 20 nt, Artificial Sequence
  Synthetic oligonucleotide: BID-922
cggggucagcaguucguggc

SEQ ID NO: 13073 - RNA, 20 nt, Artificial Sequence
  Synthetic oligonucleotide: BID-1773
ucguggcugggguuuaaagg

SEQ ID NO: 13074 - RNA, 20 nt, Artificial Sequence
  Synthetic oligonucleotide: BID-926
cguggcugggguuuaaaggc

SEQ ID NO: 13075 - RNA, 20 nt, Artificial Sequence
  Synthetic oligonucleotide: BID-1775
guuuaaaggcagggaucucc

SEQ ID NO: 13076 - RNA, 20 nt, Artificial Sequence
  Synthetic oligonucleotide: BID-1776
aaaggcagggaucucccagg

SEQ ID NO: 13077 - RNA, 20 nt, Artificial Sequence
  Synthetic oligonucleotide: BID-1777
gggaucucccaggacgggca

SEQ ID NO: 13078 - RNA, 20 nt, Artificial Sequence
  Synthetic oligonucleotide: BID-931
ggaucucccaggacgggcac

SEQ ID NO: 13079 - RNA, 20 nt, Artificial Sequence
  Synthetic oligonucleotide: BID-932
gaucucccaggacgggcaca

SEQ ID NO: 13080 - RNA, 20 nt, Artificial Sequence
  Synthetic oligonucleotide: BID-1780
ccaggacgggcacagggagc

SEQ ID NO: 13081 - RNA, 20 nt, Artificial Sequence
  Synthetic oligonucleotide: BID-1781
aggacgggcacagggagcau

SEQ ID NO: 13082 - RNA, 20 nt, Artificial Sequence
  Synthetic oligonucleotide: BID-933
ggacgggcacagggagcaug

SEQ ID NO: 13083 - RNA, 17 nt, Artificial Sequence
  Synthetic oligonucleotide: BID-1783
gagcagauggacccacc

SEQ ID NO: 13084 - RNA, 17 nt, Artificial Sequence
  Synthetic oligonucleotide: BID-1784
aggcuugcacccccuuc

SEQ ID NO: 13085 - RNA, 17 nt, Artificial Sequence
  Synthetic oligonucleotide: BID-935
ggcuugcacccccuucc

SEQ ID NO: 13086 - RNA, 17 nt, Artificial Sequence
  Synthetic oligonucleotide: BID-1786
caguccucgcucucacu

SEQ ID NO: 13087 - RNA, 17 nt, Artificial Sequence
  Synthetic oligonucleotide: BID-936
aguccucgcucucacug

SEQ ID NO: 13088 - RNA, 17 nt, Artificial Sequence
  Synthetic oligonucleotide: BID-937
guccucgcucucacugu

SEQ ID NO: 13089 - RNA, 17 nt, Artificial Sequence
  Synthetic oligonucleotide: BID-938
uccucgcucucacugug

SEQ ID NO: 13090 - RNA, 17 nt, Artificial Sequence
  Synthetic oligonucleotide: BID-939
ccucgcucucacugugg

SEQ ID NO: 13091 - RNA, 17 nt, Artificial Sequence
  Synthetic oligonucleotide: BID-1791
ucacugugggggagcug

SEQ ID NO: 13092 - RNA, 17 nt, Artificial Sequence
  Synthetic oligonucleotide: BID-1792
acugugggggagcugca

SEQ ID NO: 13093 - RNA, 17 nt, Artificial Sequence
  Synthetic oligonucleotide: BID-1793
cauuccaucuccaccca

SEQ ID NO: 13094 - RNA, 17 nt, Artificial Sequence
  Synthetic oligonucleotide: BID-942
auuccaucuccacccac

SEQ ID NO: 13095 - RNA, 17 nt, Artificial Sequence
  Synthetic oligonucleotide: BID-1795
uccacccacaggaggcu

SEQ ID NO: 13096 - RNA, 17 nt, Artificial Sequence
  Synthetic oligonucleotide: BID-1796
ccacaggaggcuuugag

SEQ ID NO: 13097 - RNA, 17 nt, Artificial Sequence
  Synthetic oligonucleotide: BID-944
cacaggaggcuuugaga

SEQ ID NO: 13098 - RNA, 17 nt, Artificial Sequence
  Synthetic oligonucleotide: BID-945
acaggaggcuuugagau

SEQ ID NO: 13099 - RNA, 17 nt, Artificial Sequence
  Synthetic oligonucleotide: BID-946
caggaggcuuugagaug

SEQ ID NO: 13100 - RNA, 17 nt, Artificial Sequence
  Synthetic oligonucleotide: BID-947
aggaggcuuugagaugg

SEQ ID NO: 13101 - RNA, 17 nt, Artificial Sequence
  Synthetic oligonucleotide: BID-948
ggaggcuuugagauggg

SEQ ID NO: 13102 - RNA, 17 nt, Artificial Sequence
  Synthetic oligonucleotide: BID-1802
agauggggggagcucuc

SEQ ID NO: 13103 - RNA, 17 nt, Artificial Sequence
  Synthetic oligonucleotide: BID-1803
ggggagcucuccugggc

SEQ ID NO: 13104 - RNA, 17 nt, Artificial Sequence
  Synthetic oligonucleotide: BID-1804
ccugaaugugugccguc

SEQ ID NO: 13105 - RNA, 17 nt, Artificial Sequence
  Synthetic oligonucleotide: BID-951
cugaaugugugccgucc

SEQ ID NO: 13106 - RNA, 17 nt, Artificial Sequence
  Synthetic oligonucleotide: BID-1806
uggggcccugcaguccc

SEQ ID NO: 13107 - RNA, 17 nt, Artificial Sequence
  Synthetic oligonucleotide: BID-954
ggggcccugcagucccc

SEQ ID NO: 13108 - RNA, 17 nt, Artificial Sequence
  Synthetic oligonucleotide: BID-955
gggcccugcaguccccu

SEQ ID NO: 13109 - RNA, 17 nt, Artificial Sequence
  Synthetic oligonucleotide: BID-1809
uccccugggagugauga

SEQ ID NO: 13110 - RNA, 17 nt, Artificial Sequence
  Synthetic oligonucleotide: BID-1810
gaccgagaccagauucc

SEQ ID NO: 13111 - RNA, 17 nt, Artificial Sequence
  Synthetic oligonucleotide: BID-1811
agaccagauucccugag

SEQ ID NO: 13112 - RNA, 17 nt, Artificial Sequence
  Synthetic oligonucleotide: BID-956
gaccagauucccugagc

SEQ ID NO: 13113 - RNA, 17 nt, Artificial Sequence
  Synthetic oligonucleotide: BID-1813
cccugagcuggggucuu

SEQ ID NO: 13114 - RNA, 17 nt, Artificial Sequence
  Synthetic oligonucleotide: BID-1814
gcuggggucuuaagggu

SEQ ID NO: 13115 - RNA, 17 nt, Artificial Sequence
  Synthetic oligonucleotide: BID-961
cuggggucuuaagggug

SEQ ID NO: 13116 - RNA, 17 nt, Artificial Sequence
  Synthetic oligonucleotide: BID-962
uggggucuuaagggugu

SEQ ID NO: 13117 - RNA, 17 nt, Artificial Sequence
  Synthetic oligonucleotide: BID-963
ggggucuuaagggugug

SEQ ID NO: 13118 - RNA, 17 nt, Artificial Sequence
  Synthetic oligonucleotide: BID-1818
uaaggguguggggagcg

SEQ ID NO: 13119 - RNA, 17 nt, Artificial Sequence
  Synthetic oligonucleotide: BID-1819
aggguguggggagcgca

SEQ ID NO: 13120 - RNA, 17 nt, Artificial Sequence
  Synthetic oligonucleotide: BID-964
ggguguggggagcgcag

SEQ ID NO: 13121 - RNA, 17 nt, Artificial Sequence
  Synthetic oligonucleotide: BID-1821
gagggauccucuggcau

SEQ ID NO: 13122 - RNA, 17 nt, Artificial Sequence
  Synthetic oligonucleotide: BID-967
agggauccucuggcauc

SEQ ID NO: 13123 - RNA, 17 nt, Artificial Sequence
  Synthetic oligonucleotide: BID-1823
uccucuggcaucaggag

SEQ ID NO: 13124 - RNA, 17 nt, Artificial Sequence
  Synthetic oligonucleotide: BID-1824
ucaggaguugagguaga

SEQ ID NO: 13125 - RNA, 17 nt, Artificial Sequence
  Synthetic oligonucleotide: BID-1825
ugagguagacagagcuc

SEQ ID NO: 13126 - RNA, 17 nt, Artificial Sequence
  Synthetic oligonucleotide: BID-969
gagguagacagagcucc

SEQ ID NO: 13127 - RNA, 17 nt, Artificial Sequence
  Synthetic oligonucleotide: BID-970
agguagacagagcucca

SEQ ID NO: 13128 - RNA, 17 nt, Artificial Sequence
  Synthetic oligonucleotide: BID-1828
gcuccagggaggcacug

SEQ ID NO: 13129 - RNA, 17 nt, Artificial Sequence
  Synthetic oligonucleotide: BID-972
cuccagggaggcacugc

SEQ ID NO: 13130 - RNA, 17 nt, Artificial Sequence
  Synthetic oligonucleotide: BID-973
uccagggaggcacugcc

SEQ ID NO: 13131 - RNA, 17 nt, Artificial Sequence
  Synthetic oligonucleotide: BID-1831
cagggaggcacugccgg

SEQ ID NO: 13132 - RNA, 17 nt, Artificial Sequence
  Synthetic oligonucleotide: BID-1832
agccucugccugcggcc

SEQ ID NO: 13133 - RNA, 17 nt, Artificial Sequence
  Synthetic oligonucleotide: BID-1833
cuucugccccucuugcc

SEQ ID NO: 13134 - RNA, 17 nt, Artificial Sequence
  Synthetic oligonucleotide: BID-979
uucugccccucuugccc

SEQ ID NO: 13135 - RNA, 17 nt, Artificial Sequence
  Synthetic oligonucleotide: BID-980
ucugccccucuugccca

SEQ ID NO: 13136 - RNA, 17 nt, Artificial Sequence
  Synthetic oligonucleotide: BID-1836
ugccccucuugcccagg

SEQ ID NO: 13137 - RNA, 17 nt, Artificial Sequence
  Synthetic oligonucleotide: BID-981
gccccucuugcccaggg

SEQ ID NO: 13138 - RNA, 17 nt, Artificial Sequence
  Synthetic oligonucleotide: BID-982
ccccucuugcccaggga

SEQ ID NO: 13139 - RNA, 17 nt, Artificial Sequence
  Synthetic oligonucleotide: BID-1839
cucuugcccagggaggg

SEQ ID NO: 13140 - RNA, 17 nt, Artificial Sequence
  Synthetic oligonucleotide: BID-1840
cuugcccagggagggaa

SEQ ID NO: 13141 - RNA, 17 nt, Artificial Sequence
  Synthetic oligonucleotide: BID-983
uugcccagggagggaag

SEQ ID NO: 13142 - RNA, 17 nt, Artificial Sequence
  Synthetic oligonucleotide: BID-1842
gggagggaagaggaaau

SEQ ID NO: 13143 - RNA, 17 nt, Artificial Sequence
  Synthetic oligonucleotide: BID-984
ggagggaagaggaaaug

SEQ ID NO: 13144 - RNA, 17 nt, Artificial Sequence
  Synthetic oligonucleotide: BID-1844
gggucagcaguucgugg

SEQ ID NO: 13145 - RNA, 17 nt, Artificial Sequence
  Synthetic oligonucleotide: BID-988
ggucagcaguucguggc

SEQ ID NO: 13146 - RNA, 17 nt, Artificial Sequence
  Synthetic oligonucleotide: BID-1846
uggcugggguuuaaagg

SEQ ID NO: 13147 - RNA, 17 nt, Artificial Sequence
  Synthetic oligonucleotide: BID-992
ggcugggguuuaaaggc

SEQ ID NO: 13148 - RNA, 17 nt, Artificial Sequence
  Synthetic oligonucleotide: BID-1848
uaaaggcagggaucucc

SEQ ID NO: 13149 - RNA, 17 nt, Artificial Sequence
  Synthetic oligonucleotide: BID-1849
ggcagggaucucccagg

SEQ ID NO: 13150 - RNA, 17 nt, Artificial Sequence
  Synthetic oligonucleotide: BID-1850
aucucccaggacgggca

SEQ ID NO: 13151 - RNA, 17 nt, Artificial Sequence
  Synthetic oligonucleotide: BID-997
ucucccaggacgggcac

SEQ ID NO: 13152 - RNA, 17 nt, Artificial Sequence
  Synthetic oligonucleotide: BID-998
cucccaggacgggcaca

SEQ ID NO: 13153 - RNA, 17 nt, Artificial Sequence
  Synthetic oligonucleotide: BID-1853
ggacgggcacagggagc

SEQ ID NO: 13154 - RNA, 17 nt, Artificial Sequence
  Synthetic oligonucleotide: BID-1854
acgggcacagggagcau

SEQ ID NO: 13155 - RNA, 17 nt, Artificial Sequence
  Synthetic oligonucleotide: BID-999
cgggcacagggagcaug

SEQ ID NO: 13156 - RNA, 20 nt, Artificial Sequence
  Synthetic oligonucleotide: BID-1856
ucaugcucccugugcccguc

SEQ ID NO: 13157 - RNA, 20 nt, Artificial Sequence
  Synthetic oligonucleotide: BID-1000
caugcucccugugcccgucc

SEQ ID NO: 13158 - RNA, 20 nt, Artificial Sequence
  Synthetic oligonucleotide: BID-1001
augcucccugugcccguccu

SEQ ID NO: 13159 - RNA, 20 nt, Artificial Sequence
  Synthetic oligonucleotide: BID-1859
ccugccuuuaaaccccagcc

SEQ ID NO: 13160 - RNA, 20 nt, Artificial Sequence
  Synthetic oligonucleotide: BID-1860
ccgcauuuccucuucccucc

SEQ ID NO: 13161 - RNA, 20 nt, Artificial Sequence
  Synthetic oligonucleotide: BID-1861
uuccucuucccucccugggc

SEQ ID NO: 13162 - RNA, 20 nt, Artificial Sequence
  Synthetic oligonucleotide: BID-1862
ccucuucccucccugggcaa

SEQ ID NO: 13163 - RNA, 20 nt, Artificial Sequence
  Synthetic oligonucleotide: BID-1004
cucuucccucccugggcaag

SEQ ID NO: 13164 - RNA, 20 nt, Artificial Sequence
  Synthetic oligonucleotide: BID-1864
cccucccugggcaagagggg

SEQ ID NO: 13165 - RNA, 20 nt, Artificial Sequence
  Synthetic oligonucleotide: BID-1865
ucccugggcaagaggggcag

SEQ ID NO: 13166 - RNA, 20 nt, Artificial Sequence
  Synthetic oligonucleotide: BID-1007
cccugggcaagaggggcaga

SEQ ID NO: 13167 - RNA, 20 nt, Artificial Sequence
  Synthetic oligonucleotide: BID-1867
ggcaagaggggcagaagggg

SEQ ID NO: 13168 - RNA, 20 nt, Artificial Sequence
  Synthetic oligonucleotide: BID-1010
gcaagaggggcagaaggggc

SEQ ID NO: 13169 - RNA, 20 nt, Artificial Sequence
  Synthetic oligonucleotide: BID-1869
aaggggcagggacgcacacc

SEQ ID NO: 13170 - RNA, 20 nt, Artificial Sequence
  Synthetic oligonucleotide: BID-1870
cgcacacccugggccgcagg

SEQ ID NO: 13171 - RNA, 20 nt, Artificial Sequence
  Synthetic oligonucleotide: BID-1871
gccgcaggcagaggcuuggc

SEQ ID NO: 13172 - RNA, 20 nt, Artificial Sequence
  Synthetic oligonucleotide: BID-1872
guccucccggcagugccucc

SEQ ID NO: 13173 - RNA, 20 nt, Artificial Sequence
  Synthetic oligonucleotide: BID-1020
uccucccggcagugccuccc

SEQ ID NO: 13174 - RNA, 20 nt, Artificial Sequence
  Synthetic oligonucleotide: BID-1874
ucuaccucaacuccugaugc

SEQ ID NO: 13175 - RNA, 20 nt, Artificial Sequence
  Synthetic oligonucleotide: BID-1875
uaccucaacuccugaugcca

SEQ ID NO: 13176 - RNA, 20 nt, Artificial Sequence
  Synthetic oligonucleotide: BID-1876
acacccuuaagaccccagcu

SEQ ID NO: 13177 - RNA, 20 nt, Artificial Sequence
  Synthetic oligonucleotide: BID-1022
cacccuuaagaccccagcuc

SEQ ID NO: 13178 - RNA, 20 nt, Artificial Sequence
  Synthetic oligonucleotide: BID-1023
acccuuaagaccccagcuca

SEQ ID NO: 13179 - RNA, 20 nt, Artificial Sequence
  Synthetic oligonucleotide: BID-1879
cuggucucggucaucacucc

SEQ ID NO: 13180 - RNA, 20 nt, Artificial Sequence
  Synthetic oligonucleotide: BID-1026
uggucucggucaucacuccc

SEQ ID NO: 13181 - RNA, 20 nt, Artificial Sequence
  Synthetic oligonucleotide: BID-1027
ggucucggucaucacuccca

SEQ ID NO: 13182 - RNA, 20 nt, Artificial Sequence
  Synthetic oligonucleotide: BID-1882
ucaucacucccaggggacug

SEQ ID NO: 13183 - RNA, 20 nt, Artificial Sequence
  Synthetic oligonucleotide: BID-1883
cccaggggacugcagggccc

SEQ ID NO: 13184 - RNA, 20 nt, Artificial Sequence
  Synthetic oligonucleotide: BID-1884
ggacggcacacauucaggcc

SEQ ID NO: 13185 - RNA, 20 nt, Artificial Sequence
  Synthetic oligonucleotide: BID-1034
gacggcacacauucaggccc

SEQ ID NO: 13186 - RNA, 20 nt, Artificial Sequence
  Synthetic oligonucleotide: BID-1886
cggcacacauucaggcccag

SEQ ID NO: 13187 - RNA, 20 nt, Artificial Sequence
  Synthetic oligonucleotide: BID-1887
cccccaucucaaagccuccu

SEQ ID NO: 13188 - RNA, 20 nt, Artificial Sequence
  Synthetic oligonucleotide: BID-1888
caucucaaagccuccugugg

SEQ ID NO: 13189 - RNA, 20 nt, Artificial Sequence
  Synthetic oligonucleotide: BID-1037
aucucaaagccuccuguggg

SEQ ID NO: 13190 - RNA, 20 nt, Artificial Sequence
  Synthetic oligonucleotide: BID-1890
aaagccuccuguggguggag

SEQ ID NO: 13191 - RNA, 20 nt, Artificial Sequence
  Synthetic oligonucleotide: BID-1038
aagccuccuguggguggaga

SEQ ID NO: 13192 - RNA, 20 nt, Artificial Sequence
  Synthetic oligonucleotide: BID-1892
ccuguggguggagauggaau

SEQ ID NO: 13193 - RNA, 20 nt, Artificial Sequence
  Synthetic oligonucleotide: BID-1039
cuguggguggagauggaaug

SEQ ID NO: 13194 - RNA, 20 nt, Artificial Sequence
  Synthetic oligonucleotide: BID-1894
uccucugcagcucccccaca

SEQ ID NO: 13195 - RNA, 20 nt, Artificial Sequence
  Synthetic oligonucleotide: BID-1895
cucugcagcucccccacagu

SEQ ID NO: 13196 - RNA, 20 nt, Artificial Sequence
  Synthetic oligonucleotide: BID-1896
gcagcucccccacagugaga

SEQ ID NO: 13197 - RNA, 20 nt, Artificial Sequence
  Synthetic oligonucleotide: BID-1897
agcucccccacagugagagc

SEQ ID NO: 13198 - RNA, 20 nt, Artificial Sequence
  Synthetic oligonucleotide: BID-1898
ccccacagugagagcgagga

SEQ ID NO: 13199 - RNA, 20 nt, Artificial Sequence
  Synthetic oligonucleotide: BID-1899
ccacagugagagcgaggacu

SEQ ID NO: 13200 - RNA, 20 nt, Artificial Sequence
  Synthetic oligonucleotide: BID-1900
ugagagcgaggacugagggu

SEQ ID NO: 13201 - RNA, 20 nt, Artificial Sequence
  Synthetic oligonucleotide: BID-1901
ugaggguguggauaaggcuc

SEQ ID NO: 13202 - RNA, 20 nt, Artificial Sequence
  Synthetic oligonucleotide: BID-1045
gaggguguggauaaggcucc

SEQ ID NO: 13203 - RNA, 20 nt, Artificial Sequence
  Synthetic oligonucleotide: BID-1903
gguguggauaaggcuccagg

SEQ ID NO: 13204 - RNA, 20 nt, Artificial Sequence
  Synthetic oligonucleotide: BID-1046
guguggauaaggcuccagga

SEQ ID NO: 13205 - RNA, 20 nt, Artificial Sequence
  Synthetic oligonucleotide: BID-1047
uguggauaaggcuccaggaa

SEQ ID NO: 13206 - RNA, 20 nt, Artificial Sequence
  Synthetic oligonucleotide: BID-1906
uccaggaagggggugcaagc

SEQ ID NO: 13207 - RNA, 20 nt, Artificial Sequence
  Synthetic oligonucleotide: BID-1907
caggaagggggugcaagccu

SEQ ID NO: 13208 - RNA, 20 nt, Artificial Sequence
  Synthetic oligonucleotide: BID-1908
gggggugcaagccugagaag

SEQ ID NO: 13209 - RNA, 20 nt, Artificial Sequence
  Synthetic oligonucleotide: BID-1051
ggggugcaagccugagaagg

SEQ ID NO: 13210 - RNA, 20 nt, Artificial Sequence
  Synthetic oligonucleotide: BID-1910
gugcaagccugagaaggugg

SEQ ID NO: 13211 - RNA, 20 nt, Artificial Sequence
  Synthetic oligonucleotide: BID-1911
ccugagaagguggaagagcu

SEQ ID NO: 13212 - RNA, 20 nt, Artificial Sequence
  Synthetic oligonucleotide: BID-1912
agaagguggaagagcucugg

SEQ ID NO: 13213 - RNA, 17 nt, Artificial Sequence
  Synthetic oligonucleotide: BID-1913
ugcucccugugcccguc

SEQ ID NO: 13214 - RNA, 17 nt, Artificial Sequence
  Synthetic oligonucleotide: BID-1056
gcucccugugcccgucc

SEQ ID NO: 13215 - RNA, 17 nt, Artificial Sequence
  Synthetic oligonucleotide: BID-1057
cucccugugcccguccu

SEQ ID NO: 13216 - RNA, 17 nt, Artificial Sequence
  Synthetic oligonucleotide: BID-1916
gccuuuaaaccccagcc

SEQ ID NO: 13217 - RNA, 17 nt, Artificial Sequence
  Synthetic oligonucleotide: BID-1917
cauuuccucuucccucc

SEQ ID NO: 13218 - RNA, 17 nt, Artificial Sequence
  Synthetic oligonucleotide: BID-1918
cucuucccucccugggc

SEQ ID NO: 13219 - RNA, 17 nt, Artificial Sequence
  Synthetic oligonucleotide: BID-1919
cuucccucccugggcaa

SEQ ID NO: 13220 - RNA, 17 nt, Artificial Sequence
  Synthetic oligonucleotide: BID-1060
uucccucccugggcaag

SEQ ID NO: 13221 - RNA, 17 nt, Artificial Sequence
  Synthetic oligonucleotide: BID-1921
ucccugggcaagagggg

SEQ ID NO: 13222 - RNA, 17 nt, Artificial Sequence
  Synthetic oligonucleotide: BID-1922
cugggcaagaggggcag

SEQ ID NO: 13223 - RNA, 17 nt, Artificial Sequence
  Synthetic oligonucleotide: BID-1063
ugggcaagaggggcaga

SEQ ID NO: 13224 - RNA, 17 nt, Artificial Sequence
  Synthetic oligonucleotide: BID-1924
aagaggggcagaagggg

SEQ ID NO: 13225 - RNA, 17 nt, Artificial Sequence
  Synthetic oligonucleotide: BID-1066
agaggggcagaaggggc

SEQ ID NO: 13226 - RNA, 17 nt, Artificial Sequence
  Synthetic oligonucleotide: BID-1926
gggcagggacgcacacc

SEQ ID NO: 13227 - RNA, 17 nt, Artificial Sequence
  Synthetic oligonucleotide: BID-1927
acacccugggccgcagg

SEQ ID NO: 13228 - RNA, 17 nt, Artificial Sequence
  Synthetic oligonucleotide: BID-1928
gcaggcagaggcuuggc

SEQ ID NO: 13229 - RNA, 17 nt, Artificial Sequence
  Synthetic oligonucleotide: BID-1929
cucccggcagugccucc

SEQ ID NO: 13230 - RNA, 17 nt, Artificial Sequence
  Synthetic oligonucleotide: BID-1076
ucccggcagugccuccc

SEQ ID NO: 13231 - RNA, 17 nt, Artificial Sequence
  Synthetic oligonucleotide: BID-1931
accucaacuccugaugc

SEQ ID NO: 13232 - RNA, 17 nt, Artificial Sequence
  Synthetic oligonucleotide: BID-1932
cucaacuccugaugcca

SEQ ID NO: 13233 - RNA, 17 nt, Artificial Sequence
  Synthetic oligonucleotide: BID-1933
cccuuaagaccccagcu

SEQ ID NO: 13234 - RNA, 17 nt, Artificial Sequence
  Synthetic oligonucleotide: BID-1078
ccuuaagaccccagcuc

SEQ ID NO: 13235 - RNA, 17 nt, Artificial Sequence
  Synthetic oligonucleotide: BID-1079
cuuaagaccccagcuca

SEQ ID NO: 13236 - RNA, 17 nt, Artificial Sequence
  Synthetic oligonucleotide: BID-1936
gucucggucaucacucc

SEQ ID NO: 13237 - RNA, 17 nt, Artificial Sequence
  Synthetic oligonucleotide: BID-1082
ucucggucaucacuccc

SEQ ID NO: 13238 - RNA, 17 nt, Artificial Sequence
  Synthetic oligonucleotide: BID-1083
cucggucaucacuccca

SEQ ID NO: 13239 - RNA, 17 nt, Artificial Sequence
  Synthetic oligonucleotide: BID-1939
ucacucccaggggacug

SEQ ID NO: 13240 - RNA, 17 nt, Artificial Sequence
  Synthetic oligonucleotide: BID-1940
aggggacugcagggccc

SEQ ID NO: 13241 - RNA, 17 nt, Artificial Sequence
  Synthetic oligonucleotide: BID-1941
cggcacacauucaggcc

SEQ ID NO: 13242 - RNA, 17 nt, Artificial Sequence
  Synthetic oligonucleotide: BID-1090
ggcacacauucaggccc

SEQ ID NO: 13243 - RNA, 17 nt, Artificial Sequence
  Synthetic oligonucleotide: BID-1943
cacacauucaggcccag

SEQ ID NO: 13244 - RNA, 17 nt, Artificial Sequence
  Synthetic oligonucleotide: BID-1944
ccaucucaaagccuccu

SEQ ID NO: 13245 - RNA, 17 nt, Artificial Sequence
  Synthetic oligonucleotide: BID-1945
cucaaagccuccugugg

SEQ ID NO: 13246 - RNA, 17 nt, Artificial Sequence
  Synthetic oligonucleotide: BID-1093
ucaaagccuccuguggg

SEQ ID NO: 13247 - RNA, 17 nt, Artificial Sequence
  Synthetic oligonucleotide: BID-1947
gccuccuguggguggag

SEQ ID NO: 13248 - RNA, 17 nt, Artificial Sequence
  Synthetic oligonucleotide: BID-1094
ccuccuguggguggaga

SEQ ID NO: 13249 - RNA, 17 nt, Artificial Sequence
  Synthetic oligonucleotide: BID-1949
guggguggagauggaau

SEQ ID NO: 13250 - RNA, 17 nt, Artificial Sequence
  Synthetic oligonucleotide: BID-1095
uggguggagauggaaug

SEQ ID NO: 13251 - RNA, 17 nt, Artificial Sequence
  Synthetic oligonucleotide: BID-1951
ucugcagcucccccaca

SEQ ID NO: 13252 - RNA, 17 nt, Artificial Sequence
  Synthetic oligonucleotide: BID-1952
ugcagcucccccacagu

SEQ ID NO: 13253 - RNA, 17 nt, Artificial Sequence
  Synthetic oligonucleotide: BID-1953
gcucccccacagugaga

SEQ ID NO: 13254 - RNA, 17 nt, Artificial Sequence
  Synthetic oligonucleotide: BID-1954
ucccccacagugagagc

SEQ ID NO: 13255 - RNA, 17 nt, Artificial Sequence
  Synthetic oligonucleotide: BID-1955
cacagugagagcgagga

SEQ ID NO: 13256 - RNA, 17 nt, Artificial Sequence
  Synthetic oligonucleotide: BID-1956
cagugagagcgaggacu

SEQ ID NO: 13257 - RNA, 17 nt, Artificial Sequence
  Synthetic oligonucleotide: BID-1957
gagcgaggacugagggu

SEQ ID NO: 13258 - RNA, 17 nt, Artificial Sequence
  Synthetic oligonucleotide: BID-1958
ggguguggauaaggcuc

SEQ ID NO: 13259 - RNA, 17 nt, Artificial Sequence
  Synthetic oligonucleotide: BID-1101
gguguggauaaggcucc

SEQ ID NO: 13260 - RNA, 17 nt, Artificial Sequence
  Synthetic oligonucleotide: BID-1960
guggauaaggcuccagg

SEQ ID NO: 13261 - RNA, 17 nt, Artificial Sequence
  Synthetic oligonucleotide: BID-1102
uggauaaggcuccagga

SEQ ID NO: 13262 - RNA, 17 nt, Artificial Sequence
  Synthetic oligonucleotide: BID-1103
ggauaaggcuccaggaa

SEQ ID NO: 13263 - RNA, 17 nt, Artificial Sequence
  Synthetic oligonucleotide: BID-1963
aggaagggggugcaagc

SEQ ID NO: 13264 - RNA, 17 nt, Artificial Sequence
  Synthetic oligonucleotide: BID-1964
gaagggggugcaagccu

SEQ ID NO: 13265 - RNA, 17 nt, Artificial Sequence
  Synthetic oligonucleotide: BID-1965
ggugcaagccugagaag

SEQ ID NO: 13266 - RNA, 17 nt, Artificial Sequence
  Synthetic oligonucleotide: BID-1107
gugcaagccugagaagg

SEQ ID NO: 13267 - RNA, 17 nt, Artificial Sequence
  Synthetic oligonucleotide: BID-1967
caagccugagaaggugg

SEQ ID NO: 13268 - RNA, 17 nt, Artificial Sequence
  Synthetic oligonucleotide: BID-1968
gagaagguggaagagcu

SEQ ID NO: 13269 - RNA, 17 nt, Artificial Sequence
  Synthetic oligonucleotide: BID-1969
agguggaagagcucugg

SEQ ID NO: 13270 - RNA, 20 nt, Artificial Sequence
  Synthetic oligonucleotide: BID-2046
uguguccucuccacguggcc

SEQ ID NO: 13271 - RNA, 20 nt, Artificial Sequence
  Synthetic oligonucleotide: BID-680
ggccggcuggaggagcacag

SEQ ID NO: 13272 - RNA, 17 nt, Artificial Sequence
  Synthetic oligonucleotide: BID-2317
guccucuccacguggcc

SEQ ID NO: 13273 - RNA, 17 nt, Artificial Sequence
  Synthetic oligonucleotide: BID-682
cggcuggaggagcacag

SEQ ID NO: 13274 - RNA, 20 nt, Artificial Sequence
  Synthetic oligonucleotide: BID-2169
uggaaagaccacgguguggg

SEQ ID NO: 13275 - RNA, 17 nt, Artificial Sequence
  Synthetic oligonucleotide: BID-2441
aaagaccacgguguggg

SEQ ID NO: 13276 - RNA, 20 nt, Artificial Sequence
  Synthetic oligonucleotide: BID-1976
agggacuggugaggggcugg

SEQ ID NO: 13277 - RNA, 20 nt, Artificial Sequence
  Synthetic oligonucleotide: BID-700
agacuguuccagaaacagcc

SEQ ID NO: 13278 - RNA, 17 nt, Artificial Sequence
  Synthetic oligonucleotide: BID-1978
gacuggugaggggcugg

SEQ ID NO: 13279 - RNA, 17 nt, Artificial Sequence
  Synthetic oligonucleotide: BID-737
cuguuccagaaacagcc

SEQ ID NO: 13280 - RNA, 20 nt, Artificial Sequence
  Synthetic oligonucleotide: BID-1980
agcgccgcugggauaauucc

SEQ ID NO: 13281 - RNA, 20 nt, Artificial Sequence
  Synthetic oligonucleotide: BID-1981
uuuaauuauuuggauaucaa

SEQ ID NO: 13282 - RNA, 17 nt, Artificial Sequence
  Synthetic oligonucleotide: BID-1982
gccgcugggauaauucc

SEQ ID NO: 13283 - RNA, 17 nt, Artificial Sequence
  Synthetic oligonucleotide: BID-1983
aauuauuuggauaucaa

SEQ ID NO: 13284 - RNA, 20 nt, Artificial Sequence
  Synthetic oligonucleotide: BID-1984
cccugggagugaugaccgag

SEQ ID NO: 13285 - RNA, 17 nt, Artificial Sequence
  Synthetic oligonucleotide: BID-1985
ugggagugaugaccgag

SEQ ID NO: 13286 - RNA, 17 nt, Artificial Sequence
  Synthetic oligonucleotide: CTLA4-92
ggugacagugcuucggc

SEQ ID NO: 13287 - RNA, 20 nt, Artificial Sequence
  Synthetic oligonucleotide: CTLA4-25
gugcggcaaccuacaugaug

SEQ ID NO: 13288 - RNA, 17 nt, Artificial Sequence
  Synthetic oligonucleotide: CTLA4-96
gcggcaaccuacaugau

SEQ ID NO: 13289 - RNA, 20 nt, Artificial Sequence
  Synthetic oligonucleotide: CTLA4-56
ggccacgugcauugcuagca

SEQ ID NO: 13290 - RNA, 20 nt, Artificial Sequence
  Synthetic oligonucleotide: CTLA4-72
gcuuuaugggagcgguguuc

SEQ ID NO: 13291 - RNA, 20 nt, Artificial Sequence
  Synthetic oligonucleotide: CTLA4-1
acaccgcucccauaaagcca

SEQ ID NO: 13292 - RNA, 17 nt, Artificial Sequence
  Synthetic oligonucleotide: CTLA4-73
ccgcucccauaaagcca

SEQ ID NO: 13293 - RNA, 20 nt, Artificial Sequence
  Synthetic oligonucleotide: CTLA4-4
ccuuggauuucagcggcaca

SEQ ID NO: 13294 - RNA, 17 nt, Artificial Sequence
  Synthetic oligonucleotide: CTLA4-76
uggauuucagcggcaca

SEQ ID NO: 13295 - RNA, 20 nt, Artificial Sequence
  Synthetic oligonucleotide: CTLA4-7
ugaaccuggcuaccaggacc

SEQ ID NO: 13296 - RNA, 17 nt, Artificial Sequence
  Synthetic oligonucleotide: CTLA4-79
accuggcuaccaggacc

SEQ ID NO: 13297 - RNA, 20 nt, Artificial Sequence
  Synthetic oligonucleotide: CTLA4-19
agguccgggugacagugcuu

SEQ ID NO: 13298 - RNA, 20 nt, Artificial Sequence
  Synthetic oligonucleotide: CTLA4-20
ccgggugacagugcuucggc

SEQ ID NO: 13299 - RNA, 17 nt, Artificial Sequence
  Synthetic oligonucleotide: CTLA4-91
uccgggugacagugcuu

SEQ ID NO: 13300 - RNA, 20 nt, Artificial Sequence
  Synthetic oligonucleotide: CTLA4-23
cugugcggcaaccuacauga

SEQ ID NO: 13301 - RNA, 20 nt, Artificial Sequence
  Synthetic oligonucleotide: CTLA4-24
ugugcggcaaccuacaugau

SEQ ID NO: 13302 - RNA, 17 nt, Artificial Sequence
  Synthetic oligonucleotide: CTLA4-95
ugcggcaaccuacauga

SEQ ID NO: 13303 - RNA, 17 nt, Artificial Sequence
  Synthetic oligonucleotide: CTLA4-97
cggcaaccuacaugaug

SEQ ID NO: 13304 - RNA, 17 nt, Artificial Sequence
  Synthetic oligonucleotide: CTLA4-128
cacgugcauugcuagca

SEQ ID NO: 13305 - RNA, 20 nt, Artificial Sequence
  Synthetic oligonucleotide: CTLA4-67
ccuugugccgcugaaaucca

SEQ ID NO: 13306 - RNA, 17 nt, Artificial Sequence
  Synthetic oligonucleotide: CTLA4-139
ugugccgcugaaaucca

SEQ ID NO: 13307 - RNA, 17 nt, Artificial Sequence
  Synthetic oligonucleotide: CTLA4-144
uuaugggagcgguguuc

SEQ ID NO: 13308 - RNA, 20 nt, Artificial Sequence
  Synthetic oligonucleotide: CTLA4-65
gagagugcagggccaggucc

SEQ ID NO: 13309 - RNA, 20 nt, Artificial Sequence
  Synthetic oligonucleotide: CTLA4-40
gagguucacuugauuuccac

SEQ ID NO: 13310 - RNA, 17 nt, Artificial Sequence
  Synthetic oligonucleotide: CTLA4-99
gaugauuccaucugcac

SEQ ID NO: 13311 - RNA, 17 nt, Artificial Sequence
  Synthetic oligonucleotide: CTLA4-116
gauggaaucaucuagga

SEQ ID NO: 13312 - RNA, 20 nt, Artificial Sequence
  Synthetic oligonucleotide: CTLA4-37
gauguagagucccgugucca

SEQ ID NO: 13313 - RNA, 17 nt, Artificial Sequence
  Synthetic oligonucleotide: CTLA4-89
gcaaagccacugagguc

SEQ ID NO: 13314 - RNA, 20 nt, Artificial Sequence
  Synthetic oligonucleotide: CTLA4-9
gcaaaggugagugagacuuu

SEQ ID NO: 13315 - RNA, 17 nt, Artificial Sequence
  Synthetic oligonucleotide: CTLA4-142
gcaagccauggcuuuau

SEQ ID NO: 13316 - RNA, 20 nt, Artificial Sequence
  Synthetic oligonucleotide: CTLA4-5
gcacaaggcucagcugaacc

SEQ ID NO: 13317 - RNA, 20 nt, Artificial Sequence
  Synthetic oligonucleotide: CTLA4-12
gcacguggcccagccugcug

SEQ ID NO: 13318 - RNA, 20 nt, Artificial Sequence
  Synthetic oligonucleotide: CTLA4-44
gcagauggaaucaucuagga

SEQ ID NO: 13319 - RNA, 17 nt, Artificial Sequence
  Synthetic oligonucleotide: CTLA4-138
gccagguccugguagcc

SEQ ID NO: 13320 - RNA, 17 nt, Artificial Sequence
  Synthetic oligonucleotide: CTLA4-119
gccgaagcacugucacc

SEQ ID NO: 13321 - RNA, 20 nt, Artificial Sequence
  Synthetic oligonucleotide: CTLA4-58
gcuagcauggaaaagccaaa

SEQ ID NO: 13322 - RNA, 20 nt, Artificial Sequence
  Synthetic oligonucleotide: CTLA4-52
gcuggcgaugccucggcugc

SEQ ID NO: 13323 - RNA, 20 nt, Artificial Sequence
  Synthetic oligonucleotide: CTLA4-21
gcuucggcaggcugacagcc

SEQ ID NO: 13324 - RNA, 20 nt, Artificial Sequence
  Synthetic oligonucleotide: CTLA4-34
ggacugagggccauggacac

SEQ ID NO: 13325 - RNA, 17 nt, Artificial Sequence
  Synthetic oligonucleotide: CTLA4-114
ggaggugcccgugcaga

SEQ ID NO: 13326 - RNA, 20 nt, Artificial Sequence
  Synthetic oligonucleotide: CTLA4-61
ggaugaagagaagaaaaaac

SEQ ID NO: 13327 - RNA, 17 nt, Artificial Sequence
  Synthetic oligonucleotide: CTLA4-141
ggcaagccauggcuuua

SEQ ID NO: 13328 - RNA, 20 nt, Artificial Sequence
  Synthetic oligonucleotide: CTLA4-55
ggccaguaccacagcaggcu

SEQ ID NO: 13329 - RNA, 20 nt, Artificial Sequence
  Synthetic oligonucleotide: CTLA4-13
ggcccagccugcugugguac

SEQ ID NO: 13330 - RNA, 17 nt, Artificial Sequence
  Synthetic oligonucleotide: CTLA4-124
ggcgaugccucggcugc

SEQ ID NO: 13331 - RNA, 17 nt, Artificial Sequence
  Synthetic oligonucleotide: CTLA4-107
gggacucuacaucugca

SEQ ID NO: 13332 - RNA, 20 nt, Artificial Sequence
  Synthetic oligonucleotide: CTLA4-36
gggacucuacaucugcaagg

SEQ ID NO: 13333 - RNA, 17 nt, Artificial Sequence
  Synthetic oligonucleotide: CTLA4-94
ggugacugaagucugug

SEQ ID NO: 13334 - RNA, 17 nt, Artificial Sequence
  Synthetic oligonucleotide: CTLA4-86
guacuggccagcagccg

SEQ ID NO: 13335 - RNA, 17 nt, Artificial Sequence
  Synthetic oligonucleotide: CTLA4-109
guagagucccgugucca

SEQ ID NO: 13336 - RNA, 17 nt, Artificial Sequence
  Synthetic oligonucleotide: CTLA4-101
gugaaccucacuaucca

SEQ ID NO: 13337 - RNA, 20 nt, Artificial Sequence
  Synthetic oligonucleotide: CTLA4-14
gugguacuggccagcagccg

SEQ ID NO: 13338 - RNA, 20 nt, Artificial Sequence
  Synthetic oligonucleotide: CTLA4-15
gugugugaguaugcaucucc

SEQ ID NO: 13339 - RNA, 17 nt, Artificial Sequence
  Synthetic oligonucleotide: CTLA4-112
guucacuugauuuccac

SEQ ID NO: 13340 - RNA, 20 nt, Artificial Sequence
  Synthetic oligonucleotide: CTLA4-41
guucacuugauuuccacugg

SEQ ID NO: 13341 - RNA, 20 nt, Artificial Sequence
  Synthetic oligonucleotide: CTLA4-2
cauaaagccauggcuugccu

SEQ ID NO: 13342 - RNA, 17 nt, Artificial Sequence
  Synthetic oligonucleotide: CTLA4-134
aaaaaacaggagagugc

SEQ ID NO: 13343 - RNA, 17 nt, Artificial Sequence
  Synthetic oligonucleotide: CTLA4-135
aaaaacaggagagugca

SEQ ID NO: 13344 - RNA, 20 nt, Artificial Sequence
  Synthetic oligonucleotide: CTLA4-64
aaacaggagagugcagggcc

SEQ ID NO: 13345 - RNA, 17 nt, Artificial Sequence
  Synthetic oligonucleotide: CTLA4-74
aaagccauggcuugccu

SEQ ID NO: 13346 - RNA, 17 nt, Artificial Sequence
  Synthetic oligonucleotide: CTLA4-140
aaauccaaggcaagcca

SEQ ID NO: 13347 - RNA, 20 nt, Artificial Sequence
  Synthetic oligonucleotide: CTLA4-62
aagaaaaaacaggagagugc

SEQ ID NO: 13348 - RNA, 20 nt, Artificial Sequence
  Synthetic oligonucleotide: CTLA4-71
aagccauggcuuuaugggag

SEQ ID NO: 13349 - RNA, 20 nt, Artificial Sequence
  Synthetic oligonucleotide: CTLA4-70
aaggcaagccauggcuuuau

SEQ ID NO: 13350 - RNA, 17 nt, Artificial Sequence
  Synthetic oligonucleotide: CTLA4-81
aaggugagugagacuuu

SEQ ID NO: 13351 - RNA, 20 nt, Artificial Sequence
  Synthetic oligonucleotide: CTLA4-51
acacaaagcuggcgaugccu

SEQ ID NO: 13352 - RNA, 20 nt, Artificial Sequence
  Synthetic oligonucleotide: CTLA4-30
accucacuauccaaggacug

SEQ ID NO: 13353 - RNA, 17 nt, Artificial Sequence
  Synthetic oligonucleotide: CTLA4-121
accucaguggcuuugcc

SEQ ID NO: 13354 - RNA, 20 nt, Artificial Sequence
  Synthetic oligonucleotide: CTLA4-60
acucaccuuugcagaagaca

SEQ ID NO: 13355 - RNA, 17 nt, Artificial Sequence
  Synthetic oligonucleotide: CTLA4-108
acucuacaucugcaagg

SEQ ID NO: 13356 - RNA, 17 nt, Artificial Sequence
  Synthetic oligonucleotide: CTLA4-105
acugagggccauggaca

SEQ ID NO: 13357 - RNA, 20 nt, Artificial Sequence
  Synthetic oligonucleotide: CTLA4-42
acuggaggugcccgugcaga

SEQ ID NO: 13358 - RNA, 20 nt, Artificial Sequence
  Synthetic oligonucleotide: CTLA4-63
agaaaaaacaggagagugca

SEQ ID NO: 13359 - RNA, 20 nt, Artificial Sequence
  Synthetic oligonucleotide: CTLA4-10
agacuuuuggagcaugaaga

SEQ ID NO: 13360 - RNA, 17 nt, Artificial Sequence
  Synthetic oligonucleotide: CTLA4-98
agaugauuccaucugca

SEQ ID NO: 13361 - RNA, 17 nt, Artificial Sequence
  Synthetic oligonucleotide: CTLA4-130
agcauggaaaagccaaa

SEQ ID NO: 13362 - RNA, 17 nt, Artificial Sequence
  Synthetic oligonucleotide: CTLA4-78
agcugaaccuggcuacc

SEQ ID NO: 13363 - RNA, 20 nt, Artificial Sequence
  Synthetic oligonucleotide: CTLA4-33
aggacugagggccauggaca

SEQ ID NO: 13364 - RNA, 20 nt, Artificial Sequence
  Synthetic oligonucleotide: CTLA4-18
aggcaaagccacugaggucc

SEQ ID NO: 13365 - RNA, 20 nt, Artificial Sequence
  Synthetic oligonucleotide: CTLA4-66
agggccagguccugguagcc

SEQ ID NO: 13366 - RNA, 17 nt, Artificial Sequence
  Synthetic oligonucleotide: CTLA4-137
agugcagggccaggucc

SEQ ID NO: 13367 - RNA, 17 nt, Artificial Sequence
  Synthetic oligonucleotide: CTLA4-122
auacucacacacaaagc

SEQ ID NO: 13368 - RNA, 17 nt, Artificial Sequence
  Synthetic oligonucleotide: CTLA4-80
aucccugucuucugcaa

SEQ ID NO: 13369 - RNA, 20 nt, Artificial Sequence
  Synthetic oligonucleotide: CTLA4-16
aucuccaggcaaagccacug

SEQ ID NO: 13370 - RNA, 20 nt, Artificial Sequence
  Synthetic oligonucleotide: CTLA4-28
aucugcacgggcaccuccag

SEQ ID NO: 13371 - RNA, 17 nt, Artificial Sequence
  Synthetic oligonucleotide: CTLA4-90
caaagccacugaggucc

SEQ ID NO: 13372 - RNA, 17 nt, Artificial Sequence
  Synthetic oligonucleotide: CTLA4-123
caaagcuggcgaugccu

SEQ ID NO: 13373 - RNA, 20 nt, Artificial Sequence
  Synthetic oligonucleotide: CTLA4-45
caacucauuccccaucaugu

SEQ ID NO: 13374 - RNA, 20 nt, Artificial Sequence
  Synthetic oligonucleotide: CTLA4-69
caaggcaagccauggcuuua

SEQ ID NO: 13375 - RNA, 17 nt, Artificial Sequence
  Synthetic oligonucleotide: CTLA4-77
caaggcucagcugaacc

SEQ ID NO: 13376 - RNA, 20 nt, Artificial Sequence
  Synthetic oligonucleotide: CTLA4-29
caagugaaccucacuaucca

SEQ ID NO: 13377 - RNA, 17 nt, Artificial Sequence
  Synthetic oligonucleotide: CTLA4-118
cacagacuucagucacc

SEQ ID NO: 13378 - RNA, 17 nt, Artificial Sequence
  Synthetic oligonucleotide: CTLA4-132
caccuuugcagaagaca

SEQ ID NO: 13379 - RNA, 20 nt, Artificial Sequence
  Synthetic oligonucleotide: CTLA4-35
cacgggacucuacaucugca

SEQ ID NO: 13380 - RNA, 17 nt, Artificial Sequence
  Synthetic oligonucleotide: CTLA4-103
cacuauccaaggacuga

SEQ ID NO: 13381 - RNA, 20 nt, Artificial Sequence
  Synthetic oligonucleotide: CTLA4-59
cacucaccuuugcagaagac

SEQ ID NO: 13382 - RNA, 20 nt, Artificial Sequence
  Synthetic oligonucleotide: CTLA4-48
cacugucacccggaccucag

SEQ ID NO: 13383 - RNA, 17 nt, Artificial Sequence
  Synthetic oligonucleotide: CTLA4-113
cacuugauuuccacugg

SEQ ID NO: 13384 - RNA, 17 nt, Artificial Sequence
  Synthetic oligonucleotide: CTLA4-136
caggagagugcagggcc

SEQ ID NO: 13385 - RNA, 20 nt, Artificial Sequence
  Synthetic oligonucleotide: CTLA4-17
caggcaaagccacugagguc

SEQ ID NO: 13386 - RNA, 17 nt, Artificial Sequence
  Synthetic oligonucleotide: CTLA4-127
caguaccacagcaggcu

SEQ ID NO: 13387 - RNA, 17 nt, Artificial Sequence
  Synthetic oligonucleotide: CTLA4-83
caugcuagcaaugcacg

SEQ ID NO: 13388 - RNA, 17 nt, Artificial Sequence
  Synthetic oligonucleotide: CTLA4-104
ccaaggacugagggcca

SEQ ID NO: 13389 - RNA, 17 nt, Artificial Sequence
  Synthetic oligonucleotide: CTLA4-85
ccagccugcugugguac

SEQ ID NO: 13390 - RNA, 20 nt, Artificial Sequence
  Synthetic oligonucleotide: CTLA4-22
ccaggugacugaagucugug

SEQ ID NO: 13391 - RNA, 17 nt, Artificial Sequence
  Synthetic oligonucleotide: CTLA4-126
ccaguaccacagcaggc

SEQ ID NO: 13392 - RNA, 17 nt, Artificial Sequence
  Synthetic oligonucleotide: CTLA4-110
ccauggcccucaguccu

SEQ ID NO: 13393 - RNA, 17 nt, Artificial Sequence
  Synthetic oligonucleotide: CTLA4-143
ccauggcuuuaugggag

SEQ ID NO: 13394 - RNA, 20 nt, Artificial Sequence
  Synthetic oligonucleotide: CTLA4-39
cccucaguccuuggauagug

SEQ ID NO: 13395 - RNA, 20 nt, Artificial Sequence
  Synthetic oligonucleotide: CTLA4-46
ccgcacagacuucagucacc

SEQ ID NO: 13396 - RNA, 20 nt, Artificial Sequence
  Synthetic oligonucleotide: CTLA4-43
ccgugcagauggaaucaucu

SEQ ID NO: 13397 - RNA, 20 nt, Artificial Sequence
  Synthetic oligonucleotide: CTLA4-26
ccuagaugauuccaucugca

SEQ ID NO: 13398 - RNA, 20 nt, Artificial Sequence
  Synthetic oligonucleotide: CTLA4-31
ccucacuauccaaggacuga

SEQ ID NO: 13399 - RNA, 20 nt, Artificial Sequence
  Synthetic oligonucleotide: CTLA4-47
ccugccgaagcacugucacc

SEQ ID NO: 13400 - RNA, 20 nt, Artificial Sequence
  Synthetic oligonucleotide: CTLA4-49
cggaccucaguggcuuugcc

SEQ ID NO: 13401 - RNA, 17 nt, Artificial Sequence
  Synthetic oligonucleotide: CTLA4-84
cguggcccagccugcug

SEQ ID NO: 13402 - RNA, 20 nt, Artificial Sequence
  Synthetic oligonucleotide: CTLA4-27
cuagaugauuccaucugcac

SEQ ID NO: 13403 - RNA, 20 nt, Artificial Sequence
  Synthetic oligonucleotide: CTLA4-6
cucagcugaaccuggcuacc

SEQ ID NO: 13404 - RNA, 17 nt, Artificial Sequence
  Synthetic oligonucleotide: CTLA4-117
cucauuccccaucaugu

SEQ ID NO: 13405 - RNA, 20 nt, Artificial Sequence
  Synthetic oligonucleotide: CTLA4-68
cugaaauccaaggcaagcca

SEQ ID NO: 13406 - RNA, 17 nt, Artificial Sequence
  Synthetic oligonucleotide: CTLA4-106
cugagggccauggacac

SEQ ID NO: 13407 - RNA, 20 nt, Artificial Sequence
  Synthetic oligonucleotide: CTLA4-53
cugcuggccaguaccacagc

SEQ ID NO: 13408 - RNA, 17 nt, Artificial Sequence
  Synthetic oligonucleotide: CTLA4-125
cuggccaguaccacagc

SEQ ID NO: 13409 - RNA, 17 nt, Artificial Sequence
  Synthetic oligonucleotide: CTLA4-75
cuugccuuggauuucag

SEQ ID NO: 13410 - RNA, 17 nt, Artificial Sequence
  Synthetic oligonucleotide: CTLA4-82
cuuuuggagcaugaaga

SEQ ID NO: 13411 - RNA, 17 nt, Artificial Sequence
  Synthetic oligonucleotide: CTLA4-129
uagcauggaaaagccaa

SEQ ID NO: 13412 - RNA, 20 nt, Artificial Sequence
  Synthetic oligonucleotide: CTLA4-32
uauccaaggacugagggcca

SEQ ID NO: 13413 - RNA, 17 nt, Artificial Sequence
  Synthetic oligonucleotide: CTLA4-131
ucaccuuugcagaagac

SEQ ID NO: 13414 - RNA, 17 nt, Artificial Sequence
  Synthetic oligonucleotide: CTLA4-102
ucacuauccaaggacug

SEQ ID NO: 13415 - RNA, 17 nt, Artificial Sequence
  Synthetic oligonucleotide: CTLA4-111
ucaguccuuggauagug

SEQ ID NO: 13416 - RNA, 17 nt, Artificial Sequence
  Synthetic oligonucleotide: CTLA4-88
uccaggcaaagccacug

SEQ ID NO: 13417 - RNA, 17 nt, Artificial Sequence
  Synthetic oligonucleotide: CTLA4-93
ucggcaggcugacagcc

SEQ ID NO: 13418 - RNA, 17 nt, Artificial Sequence
  Synthetic oligonucleotide: CTLA4-133
ugaagagaagaaaaaac

SEQ ID NO: 13419 - RNA, 17 nt, Artificial Sequence
  Synthetic oligonucleotide: CTLA4-100
ugcacgggcaccuccag

SEQ ID NO: 13420 - RNA, 17 nt, Artificial Sequence
  Synthetic oligonucleotide: CTLA4-115
ugcagauggaaucaucu

SEQ ID NO: 13421 - RNA, 20 nt, Artificial Sequence
  Synthetic oligonucleotide: CTLA4-50
ugcauacucacacacaaagc

SEQ ID NO: 13422 - RNA, 20 nt, Artificial Sequence
  Synthetic oligonucleotide: CTLA4-57
ugcuagcauggaaaagccaa

SEQ ID NO: 13423 - RNA, 20 nt, Artificial Sequence
  Synthetic oligonucleotide: CTLA4-54
uggccaguaccacagcaggc

SEQ ID NO: 13424 - RNA, 20 nt, Artificial Sequence
  Synthetic oligonucleotide: CTLA4-3
uggcuugccuuggauuucag

SEQ ID NO: 13425 - RNA, 17 nt, Artificial Sequence
  Synthetic oligonucleotide: CTLA4-120
ugucacccggaccucag

SEQ ID NO: 13426 - RNA, 20 nt, Artificial Sequence
  Synthetic oligonucleotide: CTLA4-38
uguccauggcccucaguccu

SEQ ID NO: 13427 - RNA, 17 nt, Artificial Sequence
  Synthetic oligonucleotide: CTLA4-87
ugugaguaugcaucucc

SEQ ID NO: 13428 - RNA, 20 nt, Artificial Sequence
  Synthetic oligonucleotide: CTLA4-8
uucaucccugucuucugcaa

SEQ ID NO: 13429 - RNA, 20 nt, Artificial Sequence
  Synthetic oligonucleotide: CTLA4-11
uuccaugcuagcaaugcacg

SEQ ID NO: 13430 - RNA, 20 nt, Artificial Sequence
  Synthetic oligonucleotide: CTLA4-145
uacuaccugggcauaggcaa

SEQ ID NO: 13431 - RNA, 20 nt, Artificial Sequence
  Synthetic oligonucleotide: CTLA4-146
ggaacccagauuuauguaau

SEQ ID NO: 13432 - RNA, 20 nt, Artificial Sequence
  Synthetic oligonucleotide: CTLA4-147
cagauucugacuuccuccuc

SEQ ID NO: 13433 - RNA, 20 nt, Artificial Sequence
  Synthetic oligonucleotide: CTLA4-148
gauccuugcagcaguuaguu

SEQ ID NO: 13434 - RNA, 20 nt, Artificial Sequence
  Synthetic oligonucleotide: CTLA4-149
auccuugcagcaguuaguuc

SEQ ID NO: 13435 - RNA, 20 nt, Artificial Sequence
  Synthetic oligonucleotide: CTLA4-150
uccuugcagcaguuaguucg

SEQ ID NO: 13436 - RNA, 20 nt, Artificial Sequence
  Synthetic oligonucleotide: CTLA4-151
agcuguuucuuugagcaaaa

SEQ ID NO: 13437 - RNA, 20 nt, Artificial Sequence
  Synthetic oligonucleotide: CTLA4-152
uuugagcaaaauggugagug

SEQ ID NO: 13438 - RNA, 20 nt, Artificial Sequence
  Synthetic oligonucleotide: CTLA4-153
aauggugaguguggugcuga

SEQ ID NO: 13439 - RNA, 20 nt, Artificial Sequence
  Synthetic oligonucleotide: CTLA4-154
aaaagaagcccucuuacaac

SEQ ID NO: 13440 - RNA, 20 nt, Artificial Sequence
  Synthetic oligonucleotide: CTLA4-155
aaagaagcccucuuacaaca

SEQ ID NO: 13441 - RNA, 20 nt, Artificial Sequence
  Synthetic oligonucleotide: CTLA4-156
aagaagcccucuuacaacag

SEQ ID NO: 13442 - RNA, 17 nt, Artificial Sequence
  Synthetic oligonucleotide: CTLA4-157
uaccugggcauaggcaa

SEQ ID NO: 13443 - RNA, 17 nt, Artificial Sequence
  Synthetic oligonucleotide: CTLA4-158
acccagauuuauguaau

SEQ ID NO: 13444 - RNA, 17 nt, Artificial Sequence
  Synthetic oligonucleotide: CTLA4-159
auucugacuuccuccuc

SEQ ID NO: 13445 - RNA, 17 nt, Artificial Sequence
  Synthetic oligonucleotide: CTLA4-160
ccuugcagcaguuaguu

SEQ ID NO: 13446 - RNA, 17 nt, Artificial Sequence
  Synthetic oligonucleotide: CTLA4-161
cuugcagcaguuaguuc

SEQ ID NO: 13447 - RNA, 17 nt, Artificial Sequence
  Synthetic oligonucleotide: CTLA4-162
uugcagcaguuaguucg

SEQ ID NO: 13448 - RNA, 17 nt, Artificial Sequence
  Synthetic oligonucleotide: CTLA4-163
uguuucuuugagcaaaa

SEQ ID NO: 13449 - RNA, 17 nt, Artificial Sequence
  Synthetic oligonucleotide: CTLA4-164
gagcaaaauggugagug

SEQ ID NO: 13450 - RNA, 17 nt, Artificial Sequence
  Synthetic oligonucleotide: CTLA4-165
ggugaguguggugcuga

SEQ ID NO: 13451 - RNA, 17 nt, Artificial Sequence
  Synthetic oligonucleotide: CTLA4-166
agaagcccucuuacaac

SEQ ID NO: 13452 - RNA, 17 nt, Artificial Sequence
  Synthetic oligonucleotide: CTLA4-167
gaagcccucuuacaaca

SEQ ID NO: 13453 - RNA, 17 nt, Artificial Sequence
  Synthetic oligonucleotide: CTLA4-168
aagcccucuuacaacag

SEQ ID NO: 13454 - RNA, 20 nt, Artificial Sequence
  Synthetic oligonucleotide: CTLA4-169
uugccuaugcccagguagua

SEQ ID NO: 13455 - RNA, 20 nt, Artificial Sequence
  Synthetic oligonucleotide: CTLA4-170
ggguuccguugccuaugccc

SEQ ID NO: 13456 - RNA, 20 nt, Artificial Sequence
  Synthetic oligonucleotide: CTLA4-171
cucaccaauuacauaaaucu

SEQ ID NO: 13457 - RNA, 20 nt, Artificial Sequence
  Synthetic oligonucleotide: CTLA4-172
gcucaccaauuacauaaauc

SEQ ID NO: 13458 - RNA, 20 nt, Artificial Sequence
  Synthetic oligonucleotide: CTLA4-173
ucagaaucugggcacgguuc

SEQ ID NO: 13459 - RNA, 20 nt, Artificial Sequence
  Synthetic oligonucleotide: CTLA4-174
aggaagucagaaucugggca

SEQ ID NO: 13460 - RNA, 20 nt, Artificial Sequence
  Synthetic oligonucleotide: CTLA4-175
agaggaggaagucagaaucu

SEQ ID NO: 13461 - RNA, 20 nt, Artificial Sequence
  Synthetic oligonucleotide: CTLA4-176
cagaggaggaagucagaauc

SEQ ID NO: 13462 - RNA, 20 nt, Artificial Sequence
  Synthetic oligonucleotide: CTLA4-177
cugcugcaaggauccagagg

SEQ ID NO: 13463 - RNA, 20 nt, Artificial Sequence
  Synthetic oligonucleotide: CTLA4-178
uaacugcugcaaggauccag

SEQ ID NO: 13464 - RNA, 20 nt, Artificial Sequence
  Synthetic oligonucleotide: CTLA4-179
accccgaacuaacugcugca

SEQ ID NO: 13465 - RNA, 20 nt, Artificial Sequence
  Synthetic oligonucleotide: CTLA4-180
ugcucaaagaaacagcugug

SEQ ID NO: 13466 - RNA, 20 nt, Artificial Sequence
  Synthetic oligonucleotide: CTLA4-181
cauagaccccuguuguaaga

SEQ ID NO: 13467 - RNA, 20 nt, Artificial Sequence
  Synthetic oligonucleotide: CTLA4-182
acauagaccccuguuguaag

SEQ ID NO: 13468 - RNA, 20 nt, Artificial Sequence
  Synthetic oligonucleotide: CTLA4-183
ucacauucuggcucuguugg

SEQ ID NO: 13469 - RNA, 20 nt, Artificial Sequence
  Synthetic oligonucleotide: CTLA4-184
uucacauucuggcucuguug

SEQ ID NO: 13470 - RNA, 20 nt, Artificial Sequence
  Synthetic oligonucleotide: CTLA4-185
uuucacauucuggcucuguu

SEQ ID NO: 13471 - RNA, 20 nt, Artificial Sequence
  Synthetic oligonucleotide: CTLA4-186
uuuucacauucuggcucugu

SEQ ID NO: 13472 - RNA, 20 nt, Artificial Sequence
  Synthetic oligonucleotide: CTLA4-187
ugaaauugcuuuucacauuc

SEQ ID NO: 13473 - RNA, 20 nt, Artificial Sequence
  Synthetic oligonucleotide: CTLA4-188
caauugaugggaauaaaaua

SEQ ID NO: 13474 - RNA, 20 nt, Artificial Sequence
  Synthetic oligonucleotide: CTLA4-189
auaaugguuucucaauugau

SEQ ID NO: 13475 - RNA, 20 nt, Artificial Sequence
  Synthetic oligonucleotide: CTLA4-190
cauaaugguuucucaauuga

SEQ ID NO: 13476 - RNA, 20 nt, Artificial Sequence
  Synthetic oligonucleotide: CTLA4-191
auggacucucuucuucauaa

SEQ ID NO: 13477 - RNA, 17 nt, Artificial Sequence
  Synthetic oligonucleotide: CTLA4-192
ccuaugcccagguagua

SEQ ID NO: 13478 - RNA, 17 nt, Artificial Sequence
  Synthetic oligonucleotide: CTLA4-193
uuccguugccuaugccc

SEQ ID NO: 13479 - RNA, 17 nt, Artificial Sequence
  Synthetic oligonucleotide: CTLA4-194
accaauuacauaaaucu

SEQ ID NO: 13480 - RNA, 17 nt, Artificial Sequence
  Synthetic oligonucleotide: CTLA4-195
caccaauuacauaaauc

SEQ ID NO: 13481 - RNA, 17 nt, Artificial Sequence
  Synthetic oligonucleotide: CTLA4-196
gugucaacucagugaaa

SEQ ID NO: 13482 - RNA, 17 nt, Artificial Sequence
  Synthetic oligonucleotide: CTLA4-197
gaaucugggcacgguuc

SEQ ID NO: 13483 - RNA, 17 nt, Artificial Sequence
  Synthetic oligonucleotide: CTLA4-198
aagucagaaucugggca

SEQ ID NO: 13484 - RNA, 17 nt, Artificial Sequence
  Synthetic oligonucleotide: CTLA4-199
ggaggaagucagaaucu

SEQ ID NO: 13485 - RNA, 17 nt, Artificial Sequence
  Synthetic oligonucleotide: CTLA4-200
aggaggaagucagaauc

SEQ ID NO: 13486 - RNA, 17 nt, Artificial Sequence
  Synthetic oligonucleotide: CTLA4-201
cugcaaggauccagagg

SEQ ID NO: 13487 - RNA, 17 nt, Artificial Sequence
  Synthetic oligonucleotide: CTLA4-202
cugcugcaaggauccag

SEQ ID NO: 13488 - RNA, 17 nt, Artificial Sequence
  Synthetic oligonucleotide: CTLA4-203
ccgaacuaacugcugca

SEQ ID NO: 13489 - RNA, 17 nt, Artificial Sequence
  Synthetic oligonucleotide: CTLA4-204
ucaaagaaacagcugug

SEQ ID NO: 13490 - RNA, 17 nt, Artificial Sequence
  Synthetic oligonucleotide: CTLA4-205
agaccccuguuguaaga

SEQ ID NO: 13491 - RNA, 17 nt, Artificial Sequence
  Synthetic oligonucleotide: CTLA4-206
uagaccccuguuguaag

SEQ ID NO: 13492 - RNA, 17 nt, Artificial Sequence
  Synthetic oligonucleotide: CTLA4-207
cauucuggcucuguugg

SEQ ID NO: 13493 - RNA, 17 nt, Artificial Sequence
  Synthetic oligonucleotide: CTLA4-208
acauucuggcucuguug

SEQ ID NO: 13494 - RNA, 17 nt, Artificial Sequence
  Synthetic oligonucleotide: CTLA4-209
cacauucuggcucuguu

SEQ ID NO: 13495 - RNA, 17 nt, Artificial Sequence
  Synthetic oligonucleotide: CTLA4-210
ucacauucuggcucugu

SEQ ID NO: 13496 - RNA, 17 nt, Artificial Sequence
  Synthetic oligonucleotide: CTLA4-211
aauugcuuuucacauuc

SEQ ID NO: 13497 - RNA, 17 nt, Artificial Sequence
  Synthetic oligonucleotide: CTLA4-212
uugaugggaauaaaaua

SEQ ID NO: 13498 - RNA, 17 nt, Artificial Sequence
  Synthetic oligonucleotide: CTLA4-213
augguuucucaauugau

SEQ ID NO: 13499 - RNA, 17 nt, Artificial Sequence
  Synthetic oligonucleotide: CTLA4-214
aaugguuucucaauuga

SEQ ID NO: 13500 - RNA, 17 nt, Artificial Sequence
  Synthetic oligonucleotide: CTLA4-215
gacucucuucuucauaa

SEQ ID NO: 13501 - RNA, 20 nt, Artificial Sequence
  Synthetic oligonucleotide: CTLA4-216
ccauaaagccauggcuugcc

SEQ ID NO: 13502 - RNA, 20 nt, Artificial Sequence
  Synthetic oligonucleotide: CTLA4-217
uucagcggcacaaggcucag

SEQ ID NO: 13503 - RNA, 20 nt, Artificial Sequence
  Synthetic oligonucleotide: CTLA4-218
gcucagcugaaccuggcuac

SEQ ID NO: 13504 - RNA, 20 nt, Artificial Sequence
  Synthetic oligonucleotide: CTLA4-219
caucccugucuucugcaaag

SEQ ID NO: 13505 - RNA, 20 nt, Artificial Sequence
  Synthetic oligonucleotide: CTLA4-220
ccugucuucugcaaagguga

SEQ ID NO: 13506 - RNA, 20 nt, Artificial Sequence
  Synthetic oligonucleotide: CTLA4-221
ugcaaaggugagugagacuu

SEQ ID NO: 13507 - RNA, 20 nt, Artificial Sequence
  Synthetic oligonucleotide: CTLA4-9
gcaaaggugagugagacuuu

SEQ ID NO: 13508 - RNA, 20 nt, Artificial Sequence
  Synthetic oligonucleotide: CTLA4-223
gugagugagacuuuuggagc

SEQ ID NO: 13509 - RNA, 20 nt, Artificial Sequence
  Synthetic oligonucleotide: CTLA4-224
gcugugguacuggccagcag

SEQ ID NO: 13510 - RNA, 20 nt, Artificial Sequence
  Synthetic oligonucleotide: CTLA4-225
aggcaucgccagcuuugugu

SEQ ID NO: 13511 - RNA, 20 nt, Artificial Sequence
  Synthetic oligonucleotide: CTLA4-226
ugcaucuccaggcaaagcca

SEQ ID NO: 13512 - RNA, 20 nt, Artificial Sequence
  Synthetic oligonucleotide: CTLA4-227
ccaggcaaagccacugaggu

SEQ ID NO: 13513 - RNA, 20 nt, Artificial Sequence
  Synthetic oligonucleotide: CTLA4-228
gcaggcugacagccagguga

SEQ ID NO: 13514 - RNA, 20 nt, Artificial Sequence
  Synthetic oligonucleotide: CTLA4-229
ucugugcggcaaccuacaug

SEQ ID NO: 13515 - RNA, 20 nt, Artificial Sequence
  Synthetic oligonucleotide: CTLA4-23
cugugcggcaaccuacauga

SEQ ID NO: 13516 - RNA, 20 nt, Artificial Sequence
  Synthetic oligonucleotide: CTLA4-24
ugugcggcaaccuacaugau

SEQ ID NO: 13517 - RNA, 20 nt, Artificial Sequence
  Synthetic oligonucleotide: CTLA4-25
gugcggcaaccuacaugaug

SEQ ID NO: 13518 - RNA, 20 nt, Artificial Sequence
  Synthetic oligonucleotide: CTLA4-233
ggcaaccuacaugaugggga

SEQ ID NO: 13519 - RNA, 20 nt, Artificial Sequence
  Synthetic oligonucleotide: CTLA4-234
uccuagaugauuccaucugc

SEQ ID NO: 13520 - RNA, 20 nt, Artificial Sequence
  Synthetic oligonucleotide: CTLA4-235
caucugcacgggcaccucca

SEQ ID NO: 13521 - RNA, 20 nt, Artificial Sequence
  Synthetic oligonucleotide: CTLA4-28
aucugcacgggcaccuccag

SEQ ID NO: 13522 - RNA, 20 nt, Artificial Sequence
  Synthetic oligonucleotide: CTLA4-237
gcaccuccaguggaaaucaa

SEQ ID NO: 13523 - RNA, 20 nt, Artificial Sequence
  Synthetic oligonucleotide: CTLA4-238
ucaagugaaccucacuaucc

SEQ ID NO: 13524 - RNA, 20 nt, Artificial Sequence
  Synthetic oligonucleotide: CTLA4-239
ugaaccucacuauccaagga

SEQ ID NO: 13525 - RNA, 20 nt, Artificial Sequence
  Synthetic oligonucleotide: CTLA4-240
aaccucacuauccaaggacu

SEQ ID NO: 13526 - RNA, 20 nt, Artificial Sequence
  Synthetic oligonucleotide: CTLA4-241
cuauccaaggacugagggcc

SEQ ID NO: 13527 - RNA, 20 nt, Artificial Sequence
  Synthetic oligonucleotide: CTLA4-242
aaggacugagggccauggac

SEQ ID NO: 13528 - RNA, 20 nt, Artificial Sequence
  Synthetic oligonucleotide: CTLA4-33
aggacugagggccauggaca

SEQ ID NO: 13529 - RNA, 20 nt, Artificial Sequence
  Synthetic oligonucleotide: CTLA4-244
cgggacucuacaucugcaag

SEQ ID NO: 13530 - RNA, 20 nt, Artificial Sequence
  Synthetic oligonucleotide: CTLA4-36
gggacucuacaucugcaagg

SEQ ID NO: 13531 - RNA, 17 nt, Artificial Sequence
  Synthetic oligonucleotide: CTLA4-246
uaaagccauggcuugcc

SEQ ID NO: 13532 - RNA, 17 nt, Artificial Sequence
  Synthetic oligonucleotide: CTLA4-247
agcggcacaaggcucag

SEQ ID NO: 13533 - RNA, 17 nt, Artificial Sequence
  Synthetic oligonucleotide: CTLA4-248
cagcugaaccuggcuac

SEQ ID NO: 13534 - RNA, 17 nt, Artificial Sequence
  Synthetic oligonucleotide: CTLA4-249
cccugucuucugcaaag

SEQ ID NO: 13535 - RNA, 17 nt, Artificial Sequence
  Synthetic oligonucleotide: CTLA4-250
gucuucugcaaagguga

SEQ ID NO: 13536 - RNA, 17 nt, Artificial Sequence
  Synthetic oligonucleotide: CTLA4-251
aaaggugagugagacuu

SEQ ID NO: 13537 - RNA, 17 nt, Artificial Sequence
  Synthetic oligonucleotide: CTLA4-81
aaggugagugagacuuu

SEQ ID NO: 13538 - RNA, 17 nt, Artificial Sequence
  Synthetic oligonucleotide: CTLA4-253
agugagacuuuuggagc

SEQ ID NO: 13539 - RNA, 17 nt, Artificial Sequence
  Synthetic oligonucleotide: CTLA4-254
gugguacuggccagcag

SEQ ID NO: 13540 - RNA, 17 nt, Artificial Sequence
  Synthetic oligonucleotide: CTLA4-255
caucgccagcuuugugu

SEQ ID NO: 13541 - RNA, 17 nt, Artificial Sequence
  Synthetic oligonucleotide: CTLA4-256
aucuccaggcaaagcca

SEQ ID NO: 13542 - RNA, 17 nt, Artificial Sequence
  Synthetic oligonucleotide: CTLA4-257
ggcaaagccacugaggu

SEQ ID NO: 13543 - RNA, 17 nt, Artificial Sequence
  Synthetic oligonucleotide: CTLA4-258
ggcugacagccagguga

SEQ ID NO: 13544 - RNA, 17 nt, Artificial Sequence
  Synthetic oligonucleotide: CTLA4-259
gugcggcaaccuacaug

SEQ ID NO: 13545 - RNA, 17 nt, Artificial Sequence
  Synthetic oligonucleotide: CTLA4-95
ugcggcaaccuacauga

SEQ ID NO: 13546 - RNA, 17 nt, Artificial Sequence
  Synthetic oligonucleotide: CTLA4-96
gcggcaaccuacaugau

SEQ ID NO: 13547 - RNA, 17 nt, Artificial Sequence
  Synthetic oligonucleotide: CTLA4-97
cggcaaccuacaugaug

SEQ ID NO: 13548 - RNA, 17 nt, Artificial Sequence
  Synthetic oligonucleotide: CTLA4-263
aaccuacaugaugggga

SEQ ID NO: 13549 - RNA, 17 nt, Artificial Sequence
  Synthetic oligonucleotide: CTLA4-264
uagaugauuccaucugc

SEQ ID NO: 13550 - RNA, 17 nt, Artificial Sequence
  Synthetic oligonucleotide: CTLA4-265
cugcacgggcaccucca

SEQ ID NO: 13551 - RNA, 17 nt, Artificial Sequence
  Synthetic oligonucleotide: CTLA4-100
ugcacgggcaccuccag

SEQ ID NO: 13552 - RNA, 17 nt, Artificial Sequence
  Synthetic oligonucleotide: CTLA4-267
ccuccaguggaaaucaa

SEQ ID NO: 13553 - RNA, 17 nt, Artificial Sequence
  Synthetic oligonucleotide: CTLA4-268
agugaaccucacuaucc

SEQ ID NO: 13554 - RNA, 17 nt, Artificial Sequence
  Synthetic oligonucleotide: CTLA4-269
accucacuauccaagga

SEQ ID NO: 13555 - RNA, 17 nt, Artificial Sequence
  Synthetic oligonucleotide: CTLA4-270
cucacuauccaaggacu

SEQ ID NO: 13556 - RNA, 17 nt, Artificial Sequence
  Synthetic oligonucleotide: CTLA4-271
uccaaggacugagggcc

SEQ ID NO: 13557 - RNA, 17 nt, Artificial Sequence
  Synthetic oligonucleotide: CTLA4-272
gacugagggccauggac

SEQ ID NO: 13558 - RNA, 17 nt, Artificial Sequence
  Synthetic oligonucleotide: CTLA4-105
acugagggccauggaca

SEQ ID NO: 13559 - RNA, 17 nt, Artificial Sequence
  Synthetic oligonucleotide: CTLA4-274
gacucuacaucugcaag

SEQ ID NO: 13560 - RNA, 17 nt, Artificial Sequence
  Synthetic oligonucleotide: CTLA4-108
acucuacaucugcaagg

SEQ ID NO: 13561 - RNA, 20 nt, Artificial Sequence
  Synthetic oligonucleotide: CTLA4-70
aaggcaagccauggcuuuau

SEQ ID NO: 13562 - RNA, 20 nt, Artificial Sequence
  Synthetic oligonucleotide: CTLA4-69
caaggcaagccauggcuuua

SEQ ID NO: 13563 - RNA, 20 nt, Artificial Sequence
  Synthetic oligonucleotide: CTLA4-278
ccaaggcaagccauggcuuu

SEQ ID NO: 13564 - RNA, 20 nt, Artificial Sequence
  Synthetic oligonucleotide: CTLA4-279
uucagcugagccuugugccg

SEQ ID NO: 13565 - RNA, 20 nt, Artificial Sequence
  Synthetic oligonucleotide: CTLA4-280
guccugguagccagguucag

SEQ ID NO: 13566 - RNA, 20 nt, Artificial Sequence
  Synthetic oligonucleotide: CTLA4-281
gaagaaaaaacaggagagug

SEQ ID NO: 13567 - RNA, 20 nt, Artificial Sequence
  Synthetic oligonucleotide: CTLA4-282
augaagagaagaaaaaacag

SEQ ID NO: 13568 - RNA, 20 nt, Artificial Sequence
  Synthetic oligonucleotide: CTLA4-61
ggaugaagagaagaaaaaac

SEQ ID NO: 13569 - RNA, 20 nt, Artificial Sequence
  Synthetic oligonucleotide: CTLA4-284
gggaugaagagaagaaaaaa

SEQ ID NO: 13570 - RNA, 20 nt, Artificial Sequence
  Synthetic oligonucleotide: CTLA4-285
cagaagacagggaugaagag

SEQ ID NO: 13571 - RNA, 20 nt, Artificial Sequence
  Synthetic oligonucleotide: CTLA4-286
uugcagaagacagggaugaa

SEQ ID NO: 13572 - RNA, 20 nt, Artificial Sequence
  Synthetic oligonucleotide: CTLA4-287
cuuugcagaagacagggaug

SEQ ID NO: 13573 - RNA, 20 nt, Artificial Sequence
  Synthetic oligonucleotide: CTLA4-288
caccuuugcagaagacaggg

SEQ ID NO: 13574 - RNA, 20 nt, Artificial Sequence
  Synthetic oligonucleotide: CTLA4-59
cacucaccuuugcagaagac

SEQ ID NO: 13575 - RNA, 20 nt, Artificial Sequence
  Synthetic oligonucleotide: CTLA4-290
ucacucaccuuugcagaaga

SEQ ID NO: 13576 - RNA, 20 nt, Artificial Sequence
  Synthetic oligonucleotide: CTLA4-291
aaaagucucacucaccuuug

SEQ ID NO: 13577 - RNA, 20 nt, Artificial Sequence
  Synthetic oligonucleotide: CTLA4-58
gcuagcauggaaaagccaaa

SEQ ID NO: 13578 - RNA, 20 nt, Artificial Sequence
  Synthetic oligonucleotide: CTLA4-57
ugcuagcauggaaaagccaa

SEQ ID NO: 13579 - RNA, 20 nt, Artificial Sequence
  Synthetic oligonucleotide: CTLA4-294
uugcuagcauggaaaagcca

SEQ ID NO: 13580 - RNA, 20 nt, Artificial Sequence
  Synthetic oligonucleotide: CTLA4-56
ggccacgugcauugcuagca

SEQ ID NO: 13581 - RNA, 20 nt, Artificial Sequence
  Synthetic oligonucleotide: CTLA4-296
gggccacgugcauugcuagc

SEQ ID NO: 13582 - RNA, 20 nt, Artificial Sequence
  Synthetic oligonucleotide: CTLA4-297
cuggccaguaccacagcagg

SEQ ID NO: 13583 - RNA, 20 nt, Artificial Sequence
  Synthetic oligonucleotide: CTLA4-49
cggaccucaguggcuuugcc

SEQ ID NO: 13584 - RNA, 20 nt, Artificial Sequence
  Synthetic oligonucleotide: CTLA4-299
ccggaccucaguggcuuugc

SEQ ID NO: 13585 - RNA, 20 nt, Artificial Sequence
  Synthetic oligonucleotide: CTLA4-300
gccugccgaagcacugucac

SEQ ID NO: 13586 - RNA, 20 nt, Artificial Sequence
  Synthetic oligonucleotide: CTLA4-301
gucaccuggcugucagccug

SEQ ID NO: 13587 - RNA, 20 nt, Artificial Sequence
  Synthetic oligonucleotide: CTLA4-43
ccgugcagauggaaucaucu

SEQ ID NO: 13588 - RNA, 20 nt, Artificial Sequence
  Synthetic oligonucleotide: CTLA4-303
cccgugcagauggaaucauc

SEQ ID NO: 13589 - RNA, 20 nt, Artificial Sequence
  Synthetic oligonucleotide: CTLA4-42
acuggaggugcccgugcaga

SEQ ID NO: 13590 - RNA, 20 nt, Artificial Sequence
  Synthetic oligonucleotide: CTLA4-305
cacuggaggugcccgugcag

SEQ ID NO: 13591 - RNA, 20 nt, Artificial Sequence
  Synthetic oligonucleotide: CTLA4-40
gagguucacuugauuuccac

SEQ ID NO: 13592 - RNA, 20 nt, Artificial Sequence
  Synthetic oligonucleotide: CTLA4-307
ugagguucacuugauuucca

SEQ ID NO: 13593 - RNA, 20 nt, Artificial Sequence
  Synthetic oligonucleotide: CTLA4-308
uggcccucaguccuuggaua

SEQ ID NO: 13594 - RNA, 20 nt, Artificial Sequence
  Synthetic oligonucleotide: CTLA4-309
guguccauggcccucagucc

SEQ ID NO: 13595 - RNA, 20 nt, Artificial Sequence
  Synthetic oligonucleotide: CTLA4-310
ugagcuccaccuugcagaug

SEQ ID NO: 13596 - RNA, 17 nt, Artificial Sequence
  Synthetic oligonucleotide: CTLA4-142
gcaagccauggcuuuau

SEQ ID NO: 13597 - RNA, 17 nt, Artificial Sequence
  Synthetic oligonucleotide: CTLA4-141
ggcaagccauggcuuua

SEQ ID NO: 13598 - RNA, 17 nt, Artificial Sequence
  Synthetic oligonucleotide: CTLA4-313
aggcaagccauggcuuu

SEQ ID NO: 13599 - RNA, 17 nt, Artificial Sequence
  Synthetic oligonucleotide: CTLA4-314
agcugagccuugugccg

SEQ ID NO: 13600 - RNA, 17 nt, Artificial Sequence
  Synthetic oligonucleotide: CTLA4-315
cugguagccagguucag

SEQ ID NO: 13601 - RNA, 17 nt, Artificial Sequence
  Synthetic oligonucleotide: CTLA4-316
gaaaaaacaggagagug

SEQ ID NO: 13602 - RNA, 17 nt, Artificial Sequence
  Synthetic oligonucleotide: CTLA4-317
aagagaagaaaaaacag

SEQ ID NO: 13603 - RNA, 17 nt, Artificial Sequence
  Synthetic oligonucleotide: CTLA4-133
ugaagagaagaaaaaac

SEQ ID NO: 13604 - RNA, 17 nt, Artificial Sequence
  Synthetic oligonucleotide: CTLA4-319
augaagagaagaaaaaa

SEQ ID NO: 13605 - RNA, 17 nt, Artificial Sequence
  Synthetic oligonucleotide: CTLA4-320
aagacagggaugaagag

SEQ ID NO: 13606 - RNA, 17 nt, Artificial Sequence
  Synthetic oligonucleotide: CTLA4-321
cagaagacagggaugaa

SEQ ID NO: 13607 - RNA, 17 nt, Artificial Sequence
  Synthetic oligonucleotide: CTLA4-322
ugcagaagacagggaug

SEQ ID NO: 13608 - RNA, 17 nt, Artificial Sequence
  Synthetic oligonucleotide: CTLA4-323
cuuugcagaagacaggg

SEQ ID NO: 13609 - RNA, 17 nt, Artificial Sequence
  Synthetic oligonucleotide: CTLA4-131
ucaccuuugcagaagac

SEQ ID NO: 13610 - RNA, 17 nt, Artificial Sequence
  Synthetic oligonucleotide: CTLA4-325
cucaccuuugcagaaga

SEQ ID NO: 13611 - RNA, 17 nt, Artificial Sequence
  Synthetic oligonucleotide: CTLA4-326
agucucacucaccuuug

SEQ ID NO: 13612 - RNA, 17 nt, Artificial Sequence
  Synthetic oligonucleotide: CTLA4-130
agcauggaaaagccaaa

SEQ ID NO: 13613 - RNA, 17 nt, Artificial Sequence
  Synthetic oligonucleotide: CTLA4-129
uagcauggaaaagccaa

SEQ ID NO: 13614 - RNA, 17 nt, Artificial Sequence
  Synthetic oligonucleotide: CTLA4-329
cuagcauggaaaagcca

SEQ ID NO: 13615 - RNA, 17 nt, Artificial Sequence
  Synthetic oligonucleotide: CTLA4-128
cacgugcauugcuagca

SEQ ID NO: 13616 - RNA, 17 nt, Artificial Sequence
  Synthetic oligonucleotide: CTLA4-331
ccacgugcauugcuagc

SEQ ID NO: 13617 - RNA, 17 nt, Artificial Sequence
  Synthetic oligonucleotide: CTLA4-332
gccaguaccacagcagg

SEQ ID NO: 13618 - RNA, 17 nt, Artificial Sequence
  Synthetic oligonucleotide: CTLA4-121
accucaguggcuuugcc

SEQ ID NO: 13619 - RNA, 17 nt, Artificial Sequence
  Synthetic oligonucleotide: CTLA4-334
gaccucaguggcuuugc

SEQ ID NO: 13620 - RNA, 17 nt, Artificial Sequence
  Synthetic oligonucleotide: CTLA4-335
ugccgaagcacugucac

SEQ ID NO: 13621 - RNA, 17 nt, Artificial Sequence
  Synthetic oligonucleotide: CTLA4-336
accuggcugucagccug

SEQ ID NO: 13622 - RNA, 17 nt, Artificial Sequence
  Synthetic oligonucleotide: CTLA4-115
ugcagauggaaucaucu

SEQ ID NO: 13623 - RNA, 17 nt, Artificial Sequence
  Synthetic oligonucleotide: CTLA4-338
gugcagauggaaucauc

SEQ ID NO: 13624 - RNA, 17 nt, Artificial Sequence
  Synthetic oligonucleotide: CTLA4-114
ggaggugcccgugcaga

SEQ ID NO: 13625 - RNA, 17 nt, Artificial Sequence
  Synthetic oligonucleotide: CTLA4-340
uggaggugcccgugcag

SEQ ID NO: 13626 - RNA, 17 nt, Artificial Sequence
  Synthetic oligonucleotide: CTLA4-112
guucacuugauuuccac

SEQ ID NO: 13627 - RNA, 17 nt, Artificial Sequence
  Synthetic oligonucleotide: CTLA4-342
gguucacuugauuucca

SEQ ID NO: 13628 - RNA, 17 nt, Artificial Sequence
  Synthetic oligonucleotide: CTLA4-343
cccucaguccuuggaua

SEQ ID NO: 13629 - RNA, 17 nt, Artificial Sequence
  Synthetic oligonucleotide: CTLA4-344
uccauggcccucagucc

SEQ ID NO: 13630 - RNA, 17 nt, Artificial Sequence
  Synthetic oligonucleotide: CTLA4-345
gcuccaccuugcagaug

SEQ ID NO: 13631 - RNA, 20 nt, Artificial Sequence
  Synthetic oligonucleotide: CTLA4-346
auacuaccugggcauaggca

SEQ ID NO: 13632 - RNA, 20 nt, Artificial Sequence
  Synthetic oligonucleotide: CTLA4-145
uacuaccugggcauaggcaa

SEQ ID NO: 13633 - RNA, 20 nt, Artificial Sequence
  Synthetic oligonucleotide: CTLA4-348
aacccagauuuauguaauug

SEQ ID NO: 13634 - RNA, 20 nt, Artificial Sequence
  Synthetic oligonucleotide: CTLA4-349
uggugagcaaagccauuuca

SEQ ID NO: 13635 - RNA, 20 nt, Artificial Sequence
  Synthetic oligonucleotide: CTLA4-350
uuuguuuucuguugcagauc

SEQ ID NO: 13636 - RNA, 20 nt, Artificial Sequence
  Synthetic oligonucleotide: CTLA4-351
ccagauucugacuuccuccu

SEQ ID NO: 13637 - RNA, 20 nt, Artificial Sequence
  Synthetic oligonucleotide: CTLA4-352
ggauccuugcagcaguuagu

SEQ ID NO: 13638 - RNA, 20 nt, Artificial Sequence
  Synthetic oligonucleotide: CTLA4-148
gauccuugcagcaguuaguu

SEQ ID NO: 13639 - RNA, 20 nt, Artificial Sequence
  Synthetic oligonucleotide: CTLA4-354
uucuccucacagcuguuucu

SEQ ID NO: 13640 - RNA, 20 nt, Artificial Sequence
  Synthetic oligonucleotide: CTLA4-355
cuguuucuuugagcaaaaug

SEQ ID NO: 13641 - RNA, 20 nt, Artificial Sequence
  Synthetic oligonucleotide: CTLA4-356
cuuuuuguguuugacagcua

SEQ ID NO: 13642 - RNA, 20 nt, Artificial Sequence
  Synthetic oligonucleotide: CTLA4-357
uguguuugacagcuaaagaa

SEQ ID NO: 13643 - RNA, 20 nt, Artificial Sequence
  Synthetic oligonucleotide: CTLA4-358
gaaaagaagcccucuuacaa

SEQ ID NO: 13644 - RNA, 20 nt, Artificial Sequence
  Synthetic oligonucleotide: CTLA4-154
aaaagaagcccucuuacaac

SEQ ID NO: 13645 - RNA, 20 nt, Artificial Sequence
  Synthetic oligonucleotide: CTLA4-360
cucuuacaacaggggucuau

SEQ ID NO: 13646 - RNA, 20 nt, Artificial Sequence
  Synthetic oligonucleotide: CTLA4-361
cuaugugaaaaugcccccaa

SEQ ID NO: 13647 - RNA, 20 nt, Artificial Sequence
  Synthetic oligonucleotide: CTLA4-362
gaaaaugcccccaacagagc

SEQ ID NO: 13648 - RNA, 20 nt, Artificial Sequence
  Synthetic oligonucleotide: CTLA4-363
gcccccaacagagccagaau

SEQ ID NO: 13649 - RNA, 20 nt, Artificial Sequence
  Synthetic oligonucleotide: CTLA4-364
ccuuauuuuauucccaucaa

SEQ ID NO: 13650 - RNA, 20 nt, Artificial Sequence
  Synthetic oligonucleotide: CTLA4-365
uuauuuuauucccaucaauu

SEQ ID NO: 13651 - RNA, 20 nt, Artificial Sequence
  Synthetic oligonucleotide: CTLA4-366
ccaucaauugagaaaccauu

SEQ ID NO: 13652 - RNA, 20 nt, Artificial Sequence
  Synthetic oligonucleotide: CTLA4-367
ucaauugagaaaccauuaug

SEQ ID NO: 13653 - RNA, 20 nt, Artificial Sequence
  Synthetic oligonucleotide: CTLA4-368
auugagaaaccauuaugaag

SEQ ID NO: 13654 - RNA, 20 nt, Artificial Sequence
  Synthetic oligonucleotide: CTLA4-369
ugagaaaccauuaugaagaa

SEQ ID NO: 13655 - RNA, 17 nt, Artificial Sequence
  Synthetic oligonucleotide: CTLA4-370
cuaccugggcauaggca

SEQ ID NO: 13656 - RNA, 17 nt, Artificial Sequence
  Synthetic oligonucleotide: CTLA4-157
uaccugggcauaggcaa

SEQ ID NO: 13657 - RNA, 17 nt, Artificial Sequence
  Synthetic oligonucleotide: CTLA4-372
ccagauuuauguaauug

SEQ ID NO: 13658 - RNA, 17 nt, Artificial Sequence
  Synthetic oligonucleotide: CTLA4-373
ugagcaaagccauuuca

SEQ ID NO: 13659 - RNA, 17 nt, Artificial Sequence
  Synthetic oligonucleotide: CTLA4-374
guuuucuguugcagauc

SEQ ID NO: 13660 - RNA, 17 nt, Artificial Sequence
  Synthetic oligonucleotide: CTLA4-375
gauucugacuuccuccu

SEQ ID NO: 13661 - RNA, 17 nt, Artificial Sequence
  Synthetic oligonucleotide: CTLA4-376
uccuugcagcaguuagu

SEQ ID NO: 13662 - RNA, 17 nt, Artificial Sequence
  Synthetic oligonucleotide: CTLA4-160
ccuugcagcaguuaguu

SEQ ID NO: 13663 - RNA, 17 nt, Artificial Sequence
  Synthetic oligonucleotide: CTLA4-378
uccucacagcuguuucu

SEQ ID NO: 13664 - RNA, 17 nt, Artificial Sequence
  Synthetic oligonucleotide: CTLA4-379
uuucuuugagcaaaaug

SEQ ID NO: 13665 - RNA, 17 nt, Artificial Sequence
  Synthetic oligonucleotide: CTLA4-380
uuuguguuugacagcua

SEQ ID NO: 13666 - RNA, 17 nt, Artificial Sequence
  Synthetic oligonucleotide: CTLA4-381
guuugacagcuaaagaa

SEQ ID NO: 13667 - RNA, 17 nt, Artificial Sequence
  Synthetic oligonucleotide: CTLA4-382
aagaagcccucuuacaa

SEQ ID NO: 13668 - RNA, 17 nt, Artificial Sequence
  Synthetic oligonucleotide: CTLA4-166
agaagcccucuuacaac

SEQ ID NO: 13669 - RNA, 17 nt, Artificial Sequence
  Synthetic oligonucleotide: CTLA4-384
uuacaacaggggucuau

SEQ ID NO: 13670 - RNA, 17 nt, Artificial Sequence
  Synthetic oligonucleotide: CTLA4-385
ugugaaaaugcccccaa

SEQ ID NO: 13671 - RNA, 17 nt, Artificial Sequence
  Synthetic oligonucleotide: CTLA4-386
aaugcccccaacagagc

SEQ ID NO: 13672 - RNA, 17 nt, Artificial Sequence
  Synthetic oligonucleotide: CTLA4-387
cccaacagagccagaau

SEQ ID NO: 13673 - RNA, 17 nt, Artificial Sequence
  Synthetic oligonucleotide: CTLA4-388
uauuuuauucccaucaa

SEQ ID NO: 13674 - RNA, 17 nt, Artificial Sequence
  Synthetic oligonucleotide: CTLA4-389
uuuuauucccaucaauu

SEQ ID NO: 13675 - RNA, 17 nt, Artificial Sequence
  Synthetic oligonucleotide: CTLA4-390
ucaauugagaaaccauu

SEQ ID NO: 13676 - RNA, 17 nt, Artificial Sequence
  Synthetic oligonucleotide: CTLA4-391
auugagaaaccauuaug

SEQ ID NO: 13677 - RNA, 17 nt, Artificial Sequence
  Synthetic oligonucleotide: CTLA4-392
gagaaaccauuaugaag

SEQ ID NO: 13678 - RNA, 17 nt, Artificial Sequence
  Synthetic oligonucleotide: CTLA4-393
gaaaccauuaugaagaa

SEQ ID NO: 13679 - RNA, 20 nt, Artificial Sequence
  Synthetic oligonucleotide: CTLA4-394
ugcucaccaauuacauaaau

SEQ ID NO: 13680 - RNA, 20 nt, Artificial Sequence
  Synthetic oligonucleotide: CTLA4-395
aucugcaacagaaaacaaag

SEQ ID NO: 13681 - RNA, 20 nt, Artificial Sequence
  Synthetic oligonucleotide: CTLA4-396
gcacgguucuggaucugcaa

SEQ ID NO: 13682 - RNA, 20 nt, Artificial Sequence
  Synthetic oligonucleotide: CTLA4-397
gucagaaucugggcacgguu

SEQ ID NO: 13683 - RNA, 20 nt, Artificial Sequence
  Synthetic oligonucleotide: CTLA4-398
ccagaggaggaagucagaau

SEQ ID NO: 13684 - RNA, 20 nt, Artificial Sequence
  Synthetic oligonucleotide: CTLA4-399
aaggauccagaggaggaagu

SEQ ID NO: 13685 - RNA, 20 nt, Artificial Sequence
  Synthetic oligonucleotide: CTLA4-177
cugcugcaaggauccagagg

SEQ ID NO: 13686 - RNA, 20 nt, Artificial Sequence
  Synthetic oligonucleotide: CTLA4-401
acugcugcaaggauccagag

SEQ ID NO: 13687 - RNA, 20 nt, Artificial Sequence
  Synthetic oligonucleotide: CTLA4-178
uaacugcugcaaggauccag

SEQ ID NO: 13688 - RNA, 20 nt, Artificial Sequence
  Synthetic oligonucleotide: CTLA4-403
cuaacugcugcaaggaucca

SEQ ID NO: 13689 - RNA, 20 nt, Artificial Sequence
  Synthetic oligonucleotide: CTLA4-404
aacuaacugcugcaaggauc

SEQ ID NO: 13690 - RNA, 20 nt, Artificial Sequence
  Synthetic oligonucleotide: CTLA4-405
aaccccgaacuaacugcugc

SEQ ID NO: 13691 - RNA, 20 nt, Artificial Sequence
  Synthetic oligonucleotide: CTLA4-406
aaagcuauaaaaaaacaacc

SEQ ID NO: 13692 - RNA, 20 nt, Artificial Sequence
  Synthetic oligonucleotide: CTLA4-407
cucaaagaaacagcugugag

SEQ ID NO: 13693 - RNA, 20 nt, Artificial Sequence
  Synthetic oligonucleotide: CTLA4-180
ugcucaaagaaacagcugug

SEQ ID NO: 13694 - RNA, 20 nt, Artificial Sequence
  Synthetic oligonucleotide: CTLA4-409
uugcucaaagaaacagcugu

SEQ ID NO: 13695 - RNA, 20 nt, Artificial Sequence
  Synthetic oligonucleotide: CTLA4-410
uuuugcucaaagaaacagcu

SEQ ID NO: 13696 - RNA, 20 nt, Artificial Sequence
  Synthetic oligonucleotide: CTLA4-411
cacacucaccauuuugcuca

SEQ ID NO: 13697 - RNA, 20 nt, Artificial Sequence
  Synthetic oligonucleotide: CTLA4-412
cuuuagcugucaaacacaaa

SEQ ID NO: 13698 - RNA, 20 nt, Artificial Sequence
  Synthetic oligonucleotide: CTLA4-413
cacauagaccccuguuguaa

SEQ ID NO: 13699 - RNA, 20 nt, Artificial Sequence
  Synthetic oligonucleotide: CTLA4-414
uucacauagaccccuguugu

SEQ ID NO: 13700 - RNA, 20 nt, Artificial Sequence
  Synthetic oligonucleotide: CTLA4-185
uuucacauucuggcucuguu

SEQ ID NO: 13701 - RNA, 20 nt, Artificial Sequence
  Synthetic oligonucleotide: CTLA4-186
uuuucacauucuggcucugu

SEQ ID NO: 13702 - RNA, 20 nt, Artificial Sequence
  Synthetic oligonucleotide: CTLA4-417
cuuuucacauucuggcucug

SEQ ID NO: 13703 - RNA, 20 nt, Artificial Sequence
  Synthetic oligonucleotide: CTLA4-418
uugaugggaauaaaauaagg

SEQ ID NO: 13704 - RNA, 20 nt, Artificial Sequence
  Synthetic oligonucleotide: CTLA4-189
auaaugguuucucaauugau

SEQ ID NO: 13705 - RNA, 20 nt, Artificial Sequence
  Synthetic oligonucleotide: CTLA4-190
cauaaugguuucucaauuga

SEQ ID NO: 13706 - RNA, 20 nt, Artificial Sequence
  Synthetic oligonucleotide: CTLA4-421
ucauaaugguuucucaauug

SEQ ID NO: 13707 - RNA, 20 nt, Artificial Sequence
  Synthetic oligonucleotide: CTLA4-421
ucauaaugguuucucaauug

SEQ ID NO: 13708 - RNA, 17 nt, Artificial Sequence
  Synthetic oligonucleotide: CTLA4-423
ucaccaauuacauaaau

SEQ ID NO: 13709 - RNA, 17 nt, Artificial Sequence
  Synthetic oligonucleotide: CTLA4-424
ugcaacagaaaacaaag

SEQ ID NO: 13710 - RNA, 17 nt, Artificial Sequence
  Synthetic oligonucleotide: CTLA4-425
cgguucuggaucugcaa

SEQ ID NO: 13711 - RNA, 17 nt, Artificial Sequence
  Synthetic oligonucleotide: CTLA4-426
agaaucugggcacgguu

SEQ ID NO: 13712 - RNA, 17 nt, Artificial Sequence
  Synthetic oligonucleotide: CTLA4-427
gaggaggaagucagaau

SEQ ID NO: 13713 - RNA, 17 nt, Artificial Sequence
  Synthetic oligonucleotide: CTLA4-428
gauccagaggaggaagu

SEQ ID NO: 13714 - RNA, 17 nt, Artificial Sequence
  Synthetic oligonucleotide: CTLA4-201
cugcaaggauccagagg

SEQ ID NO: 13715 - RNA, 17 nt, Artificial Sequence
  Synthetic oligonucleotide: CTLA4-430
gcugcaaggauccagag

SEQ ID NO: 13716 - RNA, 17 nt, Artificial Sequence
  Synthetic oligonucleotide: CTLA4-202
cugcugcaaggauccag

SEQ ID NO: 13717 - RNA, 17 nt, Artificial Sequence
  Synthetic oligonucleotide: CTLA4-432
acugcugcaaggaucca

SEQ ID NO: 13718 - RNA, 17 nt, Artificial Sequence
  Synthetic oligonucleotide: CTLA4-433
uaacugcugcaaggauc

SEQ ID NO: 13719 - RNA, 17 nt, Artificial Sequence
  Synthetic oligonucleotide: CTLA4-434
cccgaacuaacugcugc

SEQ ID NO: 13720 - RNA, 17 nt, Artificial Sequence
  Synthetic oligonucleotide: CTLA4-435
gcuauaaaaaaacaacc

SEQ ID NO: 13721 - RNA, 17 nt, Artificial Sequence
  Synthetic oligonucleotide: CTLA4-436
aaagaaacagcugugag

SEQ ID NO: 13722 - RNA, 17 nt, Artificial Sequence
  Synthetic oligonucleotide: CTLA4-204
ucaaagaaacagcugug

SEQ ID NO: 13723 - RNA, 17 nt, Artificial Sequence
  Synthetic oligonucleotide: CTLA4-438
cucaaagaaacagcugu

SEQ ID NO: 13724 - RNA, 17 nt, Artificial Sequence
  Synthetic oligonucleotide: CTLA4-439
ugcucaaagaaacagcu

SEQ ID NO: 13725 - RNA, 17 nt, Artificial Sequence
  Synthetic oligonucleotide: CTLA4-440
acucaccauuuugcuca

SEQ ID NO: 13726 - RNA, 17 nt, Artificial Sequence
  Synthetic oligonucleotide: CTLA4-441
uagcugucaaacacaaa

SEQ ID NO: 13727 - RNA, 17 nt, Artificial Sequence
  Synthetic oligonucleotide: CTLA4-442
auagaccccuguuguaa

SEQ ID NO: 13728 - RNA, 17 nt, Artificial Sequence
  Synthetic oligonucleotide: CTLA4-443
acauagaccccuguugu

SEQ ID NO: 13729 - RNA, 17 nt, Artificial Sequence
  Synthetic oligonucleotide: CTLA4-209
cacauucuggcucuguu

SEQ ID NO: 13730 - RNA, 17 nt, Artificial Sequence
  Synthetic oligonucleotide: CTLA4-210
ucacauucuggcucugu

SEQ ID NO: 13731 - RNA, 17 nt, Artificial Sequence
  Synthetic oligonucleotide: CTLA4-446
uucacauucuggcucug

SEQ ID NO: 13732 - RNA, 17 nt, Artificial Sequence
  Synthetic oligonucleotide: CTLA4-447
augggaauaaaauaagg

SEQ ID NO: 13733 - RNA, 17 nt, Artificial Sequence
  Synthetic oligonucleotide: CTLA4-213
augguuucucaauugau

SEQ ID NO: 13734 - RNA, 17 nt, Artificial Sequence
  Synthetic oligonucleotide: CTLA4-214
aaugguuucucaauuga

SEQ ID NO: 13735 - RNA, 17 nt, Artificial Sequence
  Synthetic oligonucleotide: CTLA4-450
uaaugguuucucaauug

SEQ ID NO: 13736 - RNA, 20 nt, Artificial Sequence
  Synthetic oligonucleotide: CTLA4-1370
cccauaaagccauggcuugc

SEQ ID NO: 13737 - RNA, 20 nt, Artificial Sequence
  Synthetic oligonucleotide: CTLA4-451
gggaaugaguugaccuuccu

SEQ ID NO: 13738 - RNA, 17 nt, Artificial Sequence
  Synthetic oligonucleotide: CTLA4-452
auaaagccauggcuugc

SEQ ID NO: 13739 - RNA, 17 nt, Artificial Sequence
  Synthetic oligonucleotide: CTLA4-453
aaugaguugaccuuccu

SEQ ID NO: 13740 - RNA, 20 nt, Artificial Sequence
  Synthetic oligonucleotide: CTLA4-454
guccuuggauagugagguuc

SEQ ID NO: 13741 - RNA, 17 nt, Artificial Sequence
  Synthetic oligonucleotide: CTLA4-455
cuuggauagugagguuc

SEQ ID NO: 13742 - RNA, 20 nt, Artificial Sequence
  Synthetic oligonucleotide: CTLA4-456
ccugggcauaggcaacggaa

SEQ ID NO: 13743 - RNA, 20 nt, Artificial Sequence
  Synthetic oligonucleotide: CTLA4-457
guugcagauccagaaccgug

SEQ ID NO: 13744 - RNA, 17 nt, Artificial Sequence
  Synthetic oligonucleotide: CTLA4-458
gggcauaggcaacggaa

SEQ ID NO: 13745 - RNA, 17 nt, Artificial Sequence
  Synthetic oligonucleotide: CTLA4-459
gcagauccagaaccgug

SEQ ID NO: 13746 - RNA, 17 nt, Artificial Sequence
  Synthetic oligonucleotide: CTLA4-622
gcucagaacagagcgcc

SEQ ID NO: 13747 - RNA, 20 nt, Artificial Sequence
  Synthetic oligonucleotide: CTLA4-513
gagcgccagguauuuaguag

SEQ ID NO: 13748 - RNA, 17 nt, Artificial Sequence
  Synthetic oligonucleotide: CTLA4-624
gcgccagguauuuagua

SEQ ID NO: 13749 - RNA, 20 nt, Artificial Sequence
  Synthetic oligonucleotide: CTLA4-72
gcuuuaugggagcgguguuc

SEQ ID NO: 13750 - RNA, 20 nt, Artificial Sequence
  Synthetic oligonucleotide: CTLA4-548
ggagcgguguucaggucuuc

SEQ ID NO: 13751 - RNA, 17 nt, Artificial Sequence
  Synthetic oligonucleotide: CTLA4-660
gcgguguucaggucuuc

SEQ ID NO: 13752 - RNA, 17 nt, Artificial Sequence
  Synthetic oligonucleotide: CTLA4-144
uuaugggagcgguguuc

SEQ ID NO: 13753 - RNA, 20 nt, Artificial Sequence
  Synthetic oligonucleotide: CTLA4-475
cgacguaacagcuaaaccca

SEQ ID NO: 13754 - RNA, 17 nt, Artificial Sequence
  Synthetic oligonucleotide: CTLA4-587
cguaacagcuaaaccca

SEQ ID NO: 13755 - RNA, 20 nt, Artificial Sequence
  Synthetic oligonucleotide: CTLA4-1
acaccgcucccauaaagcca

SEQ ID NO: 13756 - RNA, 17 nt, Artificial Sequence
  Synthetic oligonucleotide: CTLA4-73
ccgcucccauaaagcca

SEQ ID NO: 13757 - RNA, 20 nt, Artificial Sequence
  Synthetic oligonucleotide: CTLA4-4
ccuuggauuucagcggcaca

SEQ ID NO: 13758 - RNA, 17 nt, Artificial Sequence
  Synthetic oligonucleotide: CTLA4-76
uggauuucagcggcaca

SEQ ID NO: 13759 - RNA, 20 nt, Artificial Sequence
  Synthetic oligonucleotide: CTLA4-7
ugaaccuggcuaccaggacc

SEQ ID NO: 13760 - RNA, 17 nt, Artificial Sequence
  Synthetic oligonucleotide: CTLA4-79
accuggcuaccaggacc

SEQ ID NO: 13761 - RNA, 20 nt, Artificial Sequence
  Synthetic oligonucleotide: CTLA4-501
aaacuccaaucuggcuuggc

SEQ ID NO: 13762 - RNA, 17 nt, Artificial Sequence
  Synthetic oligonucleotide: CTLA4-613
cuccaaucuggcuuggc

SEQ ID NO: 13763 - RNA, 20 nt, Artificial Sequence
  Synthetic oligonucleotide: CTLA4-509
caguugggcggcagcaaaua

SEQ ID NO: 13764 - RNA, 20 nt, Artificial Sequence
  Synthetic oligonucleotide: CTLA4-510
auagcucagaacagagcgcc

SEQ ID NO: 13765 - RNA, 17 nt, Artificial Sequence
  Synthetic oligonucleotide: CTLA4-621
uugggcggcagcaaaua

SEQ ID NO: 13766 - RNA, 20 nt, Artificial Sequence
  Synthetic oligonucleotide: CTLA4-512
agagcgccagguauuuagua

SEQ ID NO: 13767 - RNA, 17 nt, Artificial Sequence
  Synthetic oligonucleotide: CTLA4-625
cgccagguauuuaguag

SEQ ID NO: 13768 - RNA, 20 nt, Artificial Sequence
  Synthetic oligonucleotide: CTLA4-67
ccuugugccgcugaaaucca

SEQ ID NO: 13769 - RNA, 17 nt, Artificial Sequence
  Synthetic oligonucleotide: CTLA4-139
ugugccgcugaaaucca

SEQ ID NO: 13770 - RNA, 20 nt, Artificial Sequence
  Synthetic oligonucleotide: CTLA4-555
uuuacgagaaaggaagccgu

SEQ ID NO: 13771 - RNA, 17 nt, Artificial Sequence
  Synthetic oligonucleotide: CTLA4-667
acgagaaaggaagccgu

SEQ ID NO: 13772 - RNA, 20 nt, Artificial Sequence
  Synthetic oligonucleotide: CTLA4-533
gaaacaaaugaaacccaggu

SEQ ID NO: 13773 - RNA, 20 nt, Artificial Sequence
  Synthetic oligonucleotide: CTLA4-556
gaacaaaacaagccaaucca

SEQ ID NO: 13774 - RNA, 17 nt, Artificial Sequence
  Synthetic oligonucleotide: CTLA4-662
gaacccacacagaauca

SEQ ID NO: 13775 - RNA, 17 nt, Artificial Sequence
  Synthetic oligonucleotide: CTLA4-580
gaagauugaauaaaauu

SEQ ID NO: 13776 - RNA, 20 nt, Artificial Sequence
  Synthetic oligonucleotide: CTLA4-558
gaagcuucauguucacuuug

SEQ ID NO: 13777 - RNA, 20 nt, Artificial Sequence
  Synthetic oligonucleotide: CTLA4-549
gaaguagagcaaaaccuuuc

SEQ ID NO: 13778 - RNA, 17 nt, Artificial Sequence
  Synthetic oligonucleotide: CTLA4-581
gaauaaaauugggauuu

SEQ ID NO: 13779 - RNA, 20 nt, Artificial Sequence
  Synthetic oligonucleotide: CTLA4-470
gaauaaaauugggauuuagg

SEQ ID NO: 13780 - RNA, 17 nt, Artificial Sequence
  Synthetic oligonucleotide: CTLA4-675
gaauuuccuggaguaca

SEQ ID NO: 13781 - RNA, 20 nt, Artificial Sequence
  Synthetic oligonucleotide: CTLA4-564
gagaauuuccuggaguacaa

SEQ ID NO: 13782 - RNA, 20 nt, Artificial Sequence
  Synthetic oligonucleotide: CTLA4-517
gagacuggaagugauuuaag

SEQ ID NO: 13783 - RNA, 20 nt, Artificial Sequence
  Synthetic oligonucleotide: CTLA4-65
gagagugcagggccaggucc

SEQ ID NO: 13784 - RNA, 17 nt, Artificial Sequence
  Synthetic oligonucleotide: CTLA4-606
gagcaugaagauggagg

SEQ ID NO: 13785 - RNA, 17 nt, Artificial Sequence
  Synthetic oligonucleotide: CTLA4-583
gaggacccuuguacucc

SEQ ID NO: 13786 - RNA, 20 nt, Artificial Sequence
  Synthetic oligonucleotide: CTLA4-495
gaggagguguuucuccuacc

SEQ ID NO: 13787 - RNA, 17 nt, Artificial Sequence
  Synthetic oligonucleotide: CTLA4-607
gagguguuucuccuacc

SEQ ID NO: 13788 - RNA, 20 nt, Artificial Sequence
  Synthetic oligonucleotide: CTLA4-463
gaguugucaaugaaaugaau

SEQ ID NO: 13789 - RNA, 17 nt, Artificial Sequence
  Synthetic oligonucleotide: CTLA4-610
gcaaagccagaaguuaa

SEQ ID NO: 13790 - RNA, 20 nt, Artificial Sequence
  Synthetic oligonucleotide: CTLA4-9
gcaaaggugagugagacuuu

SEQ ID NO: 13791 - RNA, 17 nt, Artificial Sequence
  Synthetic oligonucleotide: CTLA4-142
gcaagccauggcuuuau

SEQ ID NO: 13792 - RNA, 20 nt, Artificial Sequence
  Synthetic oligonucleotide: CTLA4-5
gcacaaggcucagcugaacc

SEQ ID NO: 13793 - RNA, 20 nt, Artificial Sequence
  Synthetic oligonucleotide: CTLA4-477
gcacauguguaauacauauc

SEQ ID NO: 13794 - RNA, 17 nt, Artificial Sequence
  Synthetic oligonucleotide: CTLA4-619
gccagcagggagcaguu

SEQ ID NO: 13795 - RNA, 20 nt, Artificial Sequence
  Synthetic oligonucleotide: CTLA4-508
gccagcagggagcaguuggg

SEQ ID NO: 13796 - RNA, 17 nt, Artificial Sequence
  Synthetic oligonucleotide: CTLA4-138
gccagguccugguagcc

SEQ ID NO: 13797 - RNA, 17 nt, Artificial Sequence
  Synthetic oligonucleotide: CTLA4-640
gcccaacugcucccugc

SEQ ID NO: 13798 - RNA, 17 nt, Artificial Sequence
  Synthetic oligonucleotide: CTLA4-683
gcccuugggcuaauggc

SEQ ID NO: 13799 - RNA, 20 nt, Artificial Sequence
  Synthetic oligonucleotide: CTLA4-528
gccgcccaacugcucccugc

SEQ ID NO: 13800 - RNA, 17 nt, Artificial Sequence
  Synthetic oligonucleotide: CTLA4-615
gcuggcucuguauucca

SEQ ID NO: 13801 - RNA, 17 nt, Artificial Sequence
  Synthetic oligonucleotide: CTLA4-670
gcuucauguucacuuug

SEQ ID NO: 13802 - RNA, 20 nt, Artificial Sequence
  Synthetic oligonucleotide: CTLA4-519
ggaagugauuuaagagggaa

SEQ ID NO: 13803 - RNA, 20 nt, Artificial Sequence
  Synthetic oligonucleotide: CTLA4-563
ggagaauuuccuggaguaca

SEQ ID NO: 13804 - RNA, 20 nt, Artificial Sequence
  Synthetic oligonucleotide: CTLA4-531
ggaguuuuaccuuuaacuuc

SEQ ID NO: 13805 - RNA, 17 nt, Artificial Sequence
  Synthetic oligonucleotide: CTLA4-672
ggaucuggauaacuaag

SEQ ID NO: 13806 - RNA, 20 nt, Artificial Sequence
  Synthetic oligonucleotide: CTLA4-61
ggaugaagagaagaaaaaac

SEQ ID NO: 13807 - RNA, 17 nt, Artificial Sequence
  Synthetic oligonucleotide: CTLA4-141
ggcaagccauggcuuua

SEQ ID NO: 13808 - RNA, 17 nt, Artificial Sequence
  Synthetic oligonucleotide: CTLA4-618
ggccagcagggagcagu

SEQ ID NO: 13809 - RNA, 17 nt, Artificial Sequence
  Synthetic oligonucleotide: CTLA4-614
ggcuggcucuguauucc

SEQ ID NO: 13810 - RNA, 20 nt, Artificial Sequence
  Synthetic oligonucleotide: CTLA4-500
gguaaaacuccaaucuggcu

SEQ ID NO: 13811 - RNA, 17 nt, Artificial Sequence
  Synthetic oligonucleotide: CTLA4-588
guaaaaccaaaacaaaa

SEQ ID NO: 13812 - RNA, 17 nt, Artificial Sequence
  Synthetic oligonucleotide: CTLA4-661
guagagcaaaaccuuuc

SEQ ID NO: 13813 - RNA, 17 nt, Artificial Sequence
  Synthetic oligonucleotide: CTLA4-617
guauuccagggccagca

SEQ ID NO: 13814 - RNA, 20 nt, Artificial Sequence
  Synthetic oligonucleotide: CTLA4-464
gucaaugaaaugaauuggac

SEQ ID NO: 13815 - RNA, 20 nt, Artificial Sequence
  Synthetic oligonucleotide: CTLA4-521
guccugaauacauuugagcu

SEQ ID NO: 13816 - RNA, 17 nt, Artificial Sequence
  Synthetic oligonucleotide: CTLA4-586
guucaguugagugcuug

SEQ ID NO: 13817 - RNA, 17 nt, Artificial Sequence
  Synthetic oligonucleotide: CTLA4-627
guuuaguagagagacac

SEQ ID NO: 13818 - RNA, 17 nt, Artificial Sequence
  Synthetic oligonucleotide: CTLA4-643
guuuuaccuuuaacuuc

SEQ ID NO: 13819 - RNA, 17 nt, Artificial Sequence
  Synthetic oligonucleotide: CTLA4-134
aaaaaacaggagagugc

SEQ ID NO: 13820 - RNA, 17 nt, Artificial Sequence
  Synthetic oligonucleotide: CTLA4-135
aaaaacaggagagugca

SEQ ID NO: 13821 - RNA, 20 nt, Artificial Sequence
  Synthetic oligonucleotide: CTLA4-557
aaaacaagccaauccaugga

SEQ ID NO: 13822 - RNA, 17 nt, Artificial Sequence
  Synthetic oligonucleotide: CTLA4-612
aaaacuccaaucuggcu

SEQ ID NO: 13823 - RNA, 20 nt, Artificial Sequence
  Synthetic oligonucleotide: CTLA4-64
aaacaggagagugcagggcc

SEQ ID NO: 13824 - RNA, 17 nt, Artificial Sequence
  Synthetic oligonucleotide: CTLA4-74
aaagccauggcuugccu

SEQ ID NO: 13825 - RNA, 17 nt, Artificial Sequence
  Synthetic oligonucleotide: CTLA4-140
aaauccaaggcaagcca

SEQ ID NO: 13826 - RNA, 20 nt, Artificial Sequence
  Synthetic oligonucleotide: CTLA4-461
aaauccugccauuagcccaa

SEQ ID NO: 13827 - RNA, 17 nt, Artificial Sequence
  Synthetic oligonucleotide: CTLA4-577
aaaugaauuggacugga

SEQ ID NO: 13828 - RNA, 17 nt, Artificial Sequence
  Synthetic oligonucleotide: CTLA4-636
aaauguauucaggacua

SEQ ID NO: 13829 - RNA, 20 nt, Artificial Sequence
  Synthetic oligonucleotide: CTLA4-523
aacccagcucaaauguauuc

SEQ ID NO: 13830 - RNA, 20 nt, Artificial Sequence
  Synthetic oligonucleotide: CTLA4-62
aagaaaaaacaggagagugc

SEQ ID NO: 13831 - RNA, 20 nt, Artificial Sequence
  Synthetic oligonucleotide: CTLA4-71
aagccauggcuuuaugggag

SEQ ID NO: 13832 - RNA, 20 nt, Artificial Sequence
  Synthetic oligonucleotide: CTLA4-70
aaggcaagccauggcuuuau

SEQ ID NO: 13833 - RNA, 17 nt, Artificial Sequence
  Synthetic oligonucleotide: CTLA4-611
aagguaaaacuccaauc

SEQ ID NO: 13834 - RNA, 17 nt, Artificial Sequence
  Synthetic oligonucleotide: CTLA4-81
aaggugagugagacuuu

SEQ ID NO: 13835 - RNA, 17 nt, Artificial Sequence
  Synthetic oligonucleotide: CTLA4-591
aaguccuugauucugug

SEQ ID NO: 13836 - RNA, 17 nt, Artificial Sequence
  Synthetic oligonucleotide: CTLA4-584
aauacauuuuccaucca

SEQ ID NO: 13837 - RNA, 20 nt, Artificial Sequence
  Synthetic oligonucleotide: CTLA4-552
aauagaaagccuuuuuguuu

SEQ ID NO: 13838 - RNA, 17 nt, Artificial Sequence
  Synthetic oligonucleotide: CTLA4-576
aaugaaaugaauuggac

SEQ ID NO: 13839 - RNA, 17 nt, Artificial Sequence
  Synthetic oligonucleotide: CTLA4-676
aauuuccuggaguacaa

SEQ ID NO: 13840 - RNA, 17 nt, Artificial Sequence
  Synthetic oligonucleotide: CTLA4-677
aauuuuauucaaucuuc

SEQ ID NO: 13841 - RNA, 17 nt, Artificial Sequence
  Synthetic oligonucleotide: CTLA4-645
acaaaugaaacccaggu

SEQ ID NO: 13842 - RNA, 17 nt, Artificial Sequence
  Synthetic oligonucleotide: CTLA4-679
acaacuccaaaacuacu

SEQ ID NO: 13843 - RNA, 17 nt, Artificial Sequence
  Synthetic oligonucleotide: CTLA4-669
acaagccaauccaugga

SEQ ID NO: 13844 - RNA, 17 nt, Artificial Sequence
  Synthetic oligonucleotide: CTLA4-593
acacauuucaaagcuuc

SEQ ID NO: 13845 - RNA, 17 nt, Artificial Sequence
  Synthetic oligonucleotide: CTLA4-663
acaugugcacacacaga

SEQ ID NO: 13846 - RNA, 20 nt, Artificial Sequence
  Synthetic oligonucleotide: CTLA4-60
acucaccuuugcagaagaca

SEQ ID NO: 13847 - RNA, 17 nt, Artificial Sequence
  Synthetic oligonucleotide: CTLA4-629
acuggaagugauuuaag

SEQ ID NO: 13848 - RNA, 17 nt, Artificial Sequence
  Synthetic oligonucleotide: CTLA4-637
acuuccagucucauaga

SEQ ID NO: 13849 - RNA, 20 nt, Artificial Sequence
  Synthetic oligonucleotide: CTLA4-63
agaaaaaacaggagagugca

SEQ ID NO: 13850 - RNA, 17 nt, Artificial Sequence
  Synthetic oligonucleotide: CTLA4-664
agaaagccuuuuuguuu

SEQ ID NO: 13851 - RNA, 17 nt, Artificial Sequence
  Synthetic oligonucleotide: CTLA4-579
agaagauugaauaaaau

SEQ ID NO: 13852 - RNA, 17 nt, Artificial Sequence
  Synthetic oligonucleotide: CTLA4-628
agacccuucuaugagac

SEQ ID NO: 13853 - RNA, 20 nt, Artificial Sequence
  Synthetic oligonucleotide: CTLA4-518
agacuggaagugauuuaaga

SEQ ID NO: 13854 - RNA, 17 nt, Artificial Sequence
  Synthetic oligonucleotide: CTLA4-674
agacuuggagaauuucc

SEQ ID NO: 13855 - RNA, 20 nt, Artificial Sequence
  Synthetic oligonucleotide: CTLA4-10
agacuuuuggagcaugaaga

SEQ ID NO: 13856 - RNA, 17 nt, Artificial Sequence
  Synthetic oligonucleotide: CTLA4-620
agcagggagcaguuggg

SEQ ID NO: 13857 - RNA, 17 nt, Artificial Sequence
  Synthetic oligonucleotide: CTLA4-642
agccagccaagccagau

SEQ ID NO: 13858 - RNA, 17 nt, Artificial Sequence
  Synthetic oligonucleotide: CTLA4-639
agccccuacuaaauacc

SEQ ID NO: 13859 - RNA, 17 nt, Artificial Sequence
  Synthetic oligonucleotide: CTLA4-623
agcgccagguauuuagu

SEQ ID NO: 13860 - RNA, 17 nt, Artificial Sequence
  Synthetic oligonucleotide: CTLA4-78
agcugaaccuggcuacc

SEQ ID NO: 13861 - RNA, 17 nt, Artificial Sequence
  Synthetic oligonucleotide: CTLA4-594
agcuucaggauccugaa

SEQ ID NO: 13862 - RNA, 20 nt, Artificial Sequence
  Synthetic oligonucleotide: CTLA4-496
aggagguguuucuccuaccu

SEQ ID NO: 13863 - RNA, 20 nt, Artificial Sequence
  Synthetic oligonucleotide: CTLA4-507
agggccagcagggagcaguu

SEQ ID NO: 13864 - RNA, 20 nt, Artificial Sequence
  Synthetic oligonucleotide: CTLA4-66
agggccagguccugguagcc

SEQ ID NO: 13865 - RNA, 17 nt, Artificial Sequence
  Synthetic oligonucleotide: CTLA4-608
agguguuucuccuaccu

SEQ ID NO: 13866 - RNA, 20 nt, Artificial Sequence
  Synthetic oligonucleotide: CTLA4-520
aguccugaauacauuugagc

SEQ ID NO: 13867 - RNA, 17 nt, Artificial Sequence
  Synthetic oligonucleotide: CTLA4-592
aguccuugauucugugu

SEQ ID NO: 13868 - RNA, 17 nt, Artificial Sequence
  Synthetic oligonucleotide: CTLA4-631
agugauuuaagagggaa

SEQ ID NO: 13869 - RNA, 17 nt, Artificial Sequence
  Synthetic oligonucleotide: CTLA4-137
agugcagggccaggucc

SEQ ID NO: 13870 - RNA, 20 nt, Artificial Sequence
  Synthetic oligonucleotide: CTLA4-462
aguuagcagccuaguaguuu

SEQ ID NO: 13871 - RNA, 20 nt, Artificial Sequence
  Synthetic oligonucleotide: CTLA4-479
auaaaguccuugauucugug

SEQ ID NO: 13872 - RNA, 17 nt, Artificial Sequence
  Synthetic oligonucleotide: CTLA4-673
auaacuaaguggagacu

SEQ ID NO: 13873 - RNA, 20 nt, Artificial Sequence
  Synthetic oligonucleotide: CTLA4-522
auacauuugagcuggguuuc

SEQ ID NO: 13874 - RNA, 20 nt, Artificial Sequence
  Synthetic oligonucleotide: CTLA4-498
auagcaaagccagaaguuaa

SEQ ID NO: 13875 - RNA, 20 nt, Artificial Sequence
  Synthetic oligonucleotide: CTLA4-525
aucacuuccagucucauaga

SEQ ID NO: 13876 - RNA, 17 nt, Artificial Sequence
  Synthetic oligonucleotide: CTLA4-80
aucccugucuucugcaa

SEQ ID NO: 13877 - RNA, 17 nt, Artificial Sequence
  Synthetic oligonucleotide: CTLA4-572
auccugccauuagccca

SEQ ID NO: 13878 - RNA, 20 nt, Artificial Sequence
  Synthetic oligonucleotide: CTLA4-465
augaaaugaauuggacugga

SEQ ID NO: 13879 - RNA, 17 nt, Artificial Sequence
  Synthetic oligonucleotide: CTLA4-590
auguguaauacauaucu

SEQ ID NO: 13880 - RNA, 20 nt, Artificial Sequence
  Synthetic oligonucleotide: CTLA4-469
auugaauaaaauugggauuu

SEQ ID NO: 13881 - RNA, 17 nt, Artificial Sequence
  Synthetic oligonucleotide: CTLA4-578
auuggacuggaugguua

SEQ ID NO: 13882 - RNA, 17 nt, Artificial Sequence
  Synthetic oligonucleotide: CTLA4-678
auuuuauucaaucuucu

SEQ ID NO: 13883 - RNA, 17 nt, Artificial Sequence
  Synthetic oligonucleotide: CTLA4-585
auuuuccauccauggau

SEQ ID NO: 13884 - RNA, 17 nt, Artificial Sequence
  Synthetic oligonucleotide: CTLA4-668
caaaacaagccaaucca

SEQ ID NO: 13885 - RNA, 20 nt, Artificial Sequence
  Synthetic oligonucleotide: CTLA4-481
caaacacauuucaaagcuuc

SEQ ID NO: 13886 - RNA, 20 nt, Artificial Sequence
  Synthetic oligonucleotide: CTLA4-482
caaagcuucaggauccugaa

SEQ ID NO: 13887 - RNA, 20 nt, Artificial Sequence
  Synthetic oligonucleotide: CTLA4-460
caaauccugccauuagccca

SEQ ID NO: 13888 - RNA, 20 nt, Artificial Sequence
  Synthetic oligonucleotide: CTLA4-529
caacugcucccugcuggccc

SEQ ID NO: 13889 - RNA, 20 nt, Artificial Sequence
  Synthetic oligonucleotide: CTLA4-69
caaggcaagccauggcuuua

SEQ ID NO: 13890 - RNA, 17 nt, Artificial Sequence
  Synthetic oligonucleotide: CTLA4-77
caaggcucagcugaacc

SEQ ID NO: 13891 - RNA, 20 nt, Artificial Sequence
  Synthetic oligonucleotide: CTLA4-478
cacauguguaauacauaucu

SEQ ID NO: 13892 - RNA, 17 nt, Artificial Sequence
  Synthetic oligonucleotide: CTLA4-132
caccuuugcagaagaca

SEQ ID NO: 13893 - RNA, 20 nt, Artificial Sequence
  Synthetic oligonucleotide: CTLA4-59
cacucaccuuugcagaagac

SEQ ID NO: 13894 - RNA, 20 nt, Artificial Sequence
  Synthetic oligonucleotide: CTLA4-530
cagagccagccaagccagau

SEQ ID NO: 13895 - RNA, 20 nt, Artificial Sequence
  Synthetic oligonucleotide: CTLA4-511
cagagcgccagguauuuagu

SEQ ID NO: 13896 - RNA, 17 nt, Artificial Sequence
  Synthetic oligonucleotide: CTLA4-136
caggagagugcagggcc

SEQ ID NO: 13897 - RNA, 20 nt, Artificial Sequence
  Synthetic oligonucleotide: CTLA4-506
cagggccagcagggagcagu

SEQ ID NO: 13898 - RNA, 20 nt, Artificial Sequence
  Synthetic oligonucleotide: CTLA4-2
cauaaagccauggcuugccu

SEQ ID NO: 13899 - RNA, 17 nt, Artificial Sequence
  Synthetic oligonucleotide: CTLA4-626
caugaaugcaugugagu

SEQ ID NO: 13900 - RNA, 17 nt, Artificial Sequence
  Synthetic oligonucleotide: CTLA4-589
cauguguaauacauauc

SEQ ID NO: 13901 - RNA, 17 nt, Artificial Sequence
  Synthetic oligonucleotide: CTLA4-634
cauuugagcuggguuuc

SEQ ID NO: 13902 - RNA, 20 nt, Artificial Sequence
  Synthetic oligonucleotide: CTLA4-566
ccaauuuuauucaaucuucu

SEQ ID NO: 13903 - RNA, 20 nt, Artificial Sequence
  Synthetic oligonucleotide: CTLA4-468
ccagaagauugaauaaaauu

SEQ ID NO: 13904 - RNA, 17 nt, Artificial Sequence
  Synthetic oligonucleotide: CTLA4-635
ccagcucaaauguauuc

SEQ ID NO: 13905 - RNA, 17 nt, Artificial Sequence
  Synthetic oligonucleotide: CTLA4-143
ccauggcuuuaugggag

SEQ ID NO: 13906 - RNA, 20 nt, Artificial Sequence
  Synthetic oligonucleotide: CTLA4-565
cccaauuuuauucaaucuuc

SEQ ID NO: 13907 - RNA, 20 nt, Artificial Sequence
  Synthetic oligonucleotide: CTLA4-467
cccagaagauugaauaaaau

SEQ ID NO: 13908 - RNA, 17 nt, Artificial Sequence
  Synthetic oligonucleotide: CTLA4-632
ccugaauacauuugagc

SEQ ID NO: 13909 - RNA, 17 nt, Artificial Sequence
  Synthetic oligonucleotide: CTLA4-680
cuaacuuucugagcccu

SEQ ID NO: 13910 - RNA, 20 nt, Artificial Sequence
  Synthetic oligonucleotide: CTLA4-524
cucaaauguauucaggacua

SEQ ID NO: 13911 - RNA, 20 nt, Artificial Sequence
  Synthetic oligonucleotide: CTLA4-6
cucagcugaaccuggcuacc

SEQ ID NO: 13912 - RNA, 20 nt, Artificial Sequence
  Synthetic oligonucleotide: CTLA4-476
cucguaaaaccaaaacaaaa

SEQ ID NO: 13913 - RNA, 20 nt, Artificial Sequence
  Synthetic oligonucleotide: CTLA4-504
cucuguauuccagggccagc

SEQ ID NO: 13914 - RNA, 20 nt, Artificial Sequence
  Synthetic oligonucleotide: CTLA4-68
cugaaauccaaggcaagcca

SEQ ID NO: 13915 - RNA, 17 nt, Artificial Sequence
  Synthetic oligonucleotide: CTLA4-633
cugaauacauuugagcu

SEQ ID NO: 13916 - RNA, 17 nt, Artificial Sequence
  Synthetic oligonucleotide: CTLA4-682
cugagcccuugggcuaa

SEQ ID NO: 13917 - RNA, 20 nt, Artificial Sequence
  Synthetic oligonucleotide: CTLA4-568
cugcuaacuuucugagcccu

SEQ ID NO: 13918 - RNA, 17 nt, Artificial Sequence
  Synthetic oligonucleotide: CTLA4-641
cugcucccugcuggccc

SEQ ID NO: 13919 - RNA, 17 nt, Artificial Sequence
  Synthetic oligonucleotide: CTLA4-630
cuggaagugauuuaaga

SEQ ID NO: 13920 - RNA, 20 nt, Artificial Sequence
  Synthetic oligonucleotide: CTLA4-514
cuucaugaaugcaugugagu

SEQ ID NO: 13921 - RNA, 17 nt, Artificial Sequence
  Synthetic oligonucleotide: CTLA4-638
cuuccagucucauagaa

SEQ ID NO: 13922 - RNA, 17 nt, Artificial Sequence
  Synthetic oligonucleotide: CTLA4-75
cuugccuuggauuucag

SEQ ID NO: 13923 - RNA, 20 nt, Artificial Sequence
  Synthetic oligonucleotide: CTLA4-502
cuuggcuggcucuguauucc

SEQ ID NO: 13924 - RNA, 17 nt, Artificial Sequence
  Synthetic oligonucleotide: CTLA4-82
cuuuuggagcaugaaga

SEQ ID NO: 13925 - RNA, 20 nt, Artificial Sequence
  Synthetic oligonucleotide: CTLA4-493
cuuuuggagcaugaagaugg

SEQ ID NO: 13926 - RNA, 17 nt, Artificial Sequence
  Synthetic oligonucleotide: CTLA4-582
uaaaauugggauuuagg

SEQ ID NO: 13927 - RNA, 20 nt, Artificial Sequence
  Synthetic oligonucleotide: CTLA4-480
uaaaguccuugauucugugu

SEQ ID NO: 13928 - RNA, 17 nt, Artificial Sequence
  Synthetic oligonucleotide: CTLA4-681
uaacuuucugagcccuu

SEQ ID NO: 13929 - RNA, 20 nt, Artificial Sequence
  Synthetic oligonucleotide: CTLA4-551
uacacaugugcacacacaga

SEQ ID NO: 13930 - RNA, 20 nt, Artificial Sequence
  Synthetic oligonucleotide: CTLA4-473
uacauuuuccauccauggau

SEQ ID NO: 13931 - RNA, 17 nt, Artificial Sequence
  Synthetic oligonucleotide: CTLA4-666
uacgagaaaggaagccg

SEQ ID NO: 13932 - RNA, 17 nt, Artificial Sequence
  Synthetic oligonucleotide: CTLA4-574
uagcagccuaguaguuu

SEQ ID NO: 13933 - RNA, 20 nt, Artificial Sequence
  Synthetic oligonucleotide: CTLA4-471
uaggaggacccuuguacucc

SEQ ID NO: 13934 - RNA, 17 nt, Artificial Sequence
  Synthetic oligonucleotide: CTLA4-131
ucaccuuugcagaagac

SEQ ID NO: 13935 - RNA, 20 nt, Artificial Sequence
  Synthetic oligonucleotide: CTLA4-526
ucacuuccagucucauagaa

SEQ ID NO: 13936 - RNA, 20 nt, Artificial Sequence
  Synthetic oligonucleotide: CTLA4-559
ucauguucacuuugaggauc

SEQ ID NO: 13937 - RNA, 20 nt, Artificial Sequence
  Synthetic oligonucleotide: CTLA4-497
ucauuuguuucagcagucaa

SEQ ID NO: 13938 - RNA, 17 nt, Artificial Sequence
  Synthetic oligonucleotide: CTLA4-573
uccugccauuagcccaa

SEQ ID NO: 13939 - RNA, 20 nt, Artificial Sequence
  Synthetic oligonucleotide: CTLA4-505
ucuguauuccagggccagca

SEQ ID NO: 13940 - RNA, 17 nt, Artificial Sequence
  Synthetic oligonucleotide: CTLA4-644
ugaaacaaaugaaaccc

SEQ ID NO: 13941 - RNA, 17 nt, Artificial Sequence
  Synthetic oligonucleotide: CTLA4-133
ugaagagaagaaaaaac

SEQ ID NO: 13942 - RNA, 20 nt, Artificial Sequence
  Synthetic oligonucleotide: CTLA4-527
ugaagccccuacuaaauacc

SEQ ID NO: 13943 - RNA, 20 nt, Artificial Sequence
  Synthetic oligonucleotide: CTLA4-466
ugaauuggacuggaugguua

SEQ ID NO: 13944 - RNA, 20 nt, Artificial Sequence
  Synthetic oligonucleotide: CTLA4-571
ugagcccuugggcuaauggc

SEQ ID NO: 13945 - RNA, 20 nt, Artificial Sequence
  Synthetic oligonucleotide: CTLA4-560
ugaggaucuggauaacuaag

SEQ ID NO: 13946 - RNA, 20 nt, Artificial Sequence
  Synthetic oligonucleotide: CTLA4-569
ugcuaacuuucugagcccuu

SEQ ID NO: 13947 - RNA, 20 nt, Artificial Sequence
  Synthetic oligonucleotide: CTLA4-532
ugcugaaacaaaugaaaccc

SEQ ID NO: 13948 - RNA, 20 nt, Artificial Sequence
  Synthetic oligonucleotide: CTLA4-562
uggagacuuggagaauuucc

SEQ ID NO: 13949 - RNA, 20 nt, Artificial Sequence
  Synthetic oligonucleotide: CTLA4-561
uggauaacuaaguggagacu

SEQ ID NO: 13950 - RNA, 20 nt, Artificial Sequence
  Synthetic oligonucleotide: CTLA4-3
uggcuugccuuggauuucag

SEQ ID NO: 13951 - RNA, 17 nt, Artificial Sequence
  Synthetic oligonucleotide: CTLA4-616
uguauuccagggccagc

SEQ ID NO: 13952 - RNA, 17 nt, Artificial Sequence
  Synthetic oligonucleotide: CTLA4-671
uguucacuuugaggauc

SEQ ID NO: 13953 - RNA, 20 nt, Artificial Sequence
  Synthetic oligonucleotide: CTLA4-499
uuaaagguaaaacuccaauc

SEQ ID NO: 13954 - RNA, 20 nt, Artificial Sequence
  Synthetic oligonucleotide: CTLA4-516
uucagacccuucuaugagac

SEQ ID NO: 13955 - RNA, 20 nt, Artificial Sequence
  Synthetic oligonucleotide: CTLA4-8
uucaucccugucuucugcaa

SEQ ID NO: 13956 - RNA, 20 nt, Artificial Sequence
  Synthetic oligonucleotide: CTLA4-472
uugaauacauuuuccaucca

SEQ ID NO: 13957 - RNA, 20 nt, Artificial Sequence
  Synthetic oligonucleotide: CTLA4-567
uugacaacuccaaaacuacu

SEQ ID NO: 13958 - RNA, 17 nt, Artificial Sequence
  Synthetic oligonucleotide: CTLA4-605
uuggagcaugaagaugg

SEQ ID NO: 13959 - RNA, 20 nt, Artificial Sequence
  Synthetic oligonucleotide: CTLA4-494
uuggagcaugaagauggagg

SEQ ID NO: 13960 - RNA, 20 nt, Artificial Sequence
  Synthetic oligonucleotide: CTLA4-503
uuggcuggcucuguauucca

SEQ ID NO: 13961 - RNA, 20 nt, Artificial Sequence
  Synthetic oligonucleotide: CTLA4-515
uugguuuaguagagagacac

SEQ ID NO: 13962 - RNA, 17 nt, Artificial Sequence
  Synthetic oligonucleotide: CTLA4-575
uugucaaugaaaugaau

SEQ ID NO: 13963 - RNA, 20 nt, Artificial Sequence
  Synthetic oligonucleotide: CTLA4-553
uuguuuugguuuuacgagaa

SEQ ID NO: 13964 - RNA, 20 nt, Artificial Sequence
  Synthetic oligonucleotide: CTLA4-570
uuucugagcccuugggcuaa

SEQ ID NO: 13965 - RNA, 20 nt, Artificial Sequence
  Synthetic oligonucleotide: CTLA4-550
uuugaacccacacagaauca

SEQ ID NO: 13966 - RNA, 20 nt, Artificial Sequence
  Synthetic oligonucleotide: CTLA4-474
uuuguucaguugagugcuug

SEQ ID NO: 13967 - RNA, 17 nt, Artificial Sequence
  Synthetic oligonucleotide: CTLA4-609
uuuguuucagcagucaa

SEQ ID NO: 13968 - RNA, 20 nt, Artificial Sequence
  Synthetic oligonucleotide: CTLA4-554
uuuuacgagaaaggaagccg

SEQ ID NO: 13969 - RNA, 17 nt, Artificial Sequence
  Synthetic oligonucleotide: CTLA4-665
uuuugguuuuacgagaa

SEQ ID NO: 13970 - RNA, 20 nt, Artificial Sequence
  Synthetic oligonucleotide: CTLA4-684
augaaaacucuccagauuua

SEQ ID NO: 13971 - RNA, 20 nt, Artificial Sequence
  Synthetic oligonucleotide: CTLA4-685
aaacucuccagauuuaagga

SEQ ID NO: 13972 - RNA, 20 nt, Artificial Sequence
  Synthetic oligonucleotide: CTLA4-686
aauucuuuuuguuagaucau

SEQ ID NO: 13973 - RNA, 20 nt, Artificial Sequence
  Synthetic oligonucleotide: CTLA4-687
cuacagcugucacaaauuua

SEQ ID NO: 13974 - RNA, 20 nt, Artificial Sequence
  Synthetic oligonucleotide: CTLA4-688
ugucacaaauuuaaggacuc

SEQ ID NO: 13975 - RNA, 20 nt, Artificial Sequence
  Synthetic oligonucleotide: CTLA4-689
aaaaaaagucuauccuuuua

SEQ ID NO: 13976 - RNA, 20 nt, Artificial Sequence
  Synthetic oligonucleotide: CTLA4-690
aaagucuauccuuuuaugga

SEQ ID NO: 13977 - RNA, 20 nt, Artificial Sequence
  Synthetic oligonucleotide: CTLA4-691
cucuaaucucuugaaucauu

SEQ ID NO: 13978 - RNA, 20 nt, Artificial Sequence
  Synthetic oligonucleotide: CTLA4-692
ucuaaucucuugaaucauuu

SEQ ID NO: 13979 - RNA, 20 nt, Artificial Sequence
  Synthetic oligonucleotide: CTLA4-693
aucucuugaaucauuugggu

SEQ ID NO: 13980 - RNA, 20 nt, Artificial Sequence
  Synthetic oligonucleotide: CTLA4-694
cauuuggguuggcuuuucuu

SEQ ID NO: 13981 - RNA, 20 nt, Artificial Sequence
  Synthetic oligonucleotide: CTLA4-695
guuuugucucuguugaguua

SEQ ID NO: 13982 - RNA, 20 nt, Artificial Sequence
  Synthetic oligonucleotide: CTLA4-696
cuuuccuucugcaaaaccag

SEQ ID NO: 13983 - RNA, 20 nt, Artificial Sequence
  Synthetic oligonucleotide: CTLA4-697
ucucuuaaccaaaugcuaaa

SEQ ID NO: 13984 - RNA, 20 nt, Artificial Sequence
  Synthetic oligonucleotide: CTLA4-698
accaaaugcuaaauggauuu

SEQ ID NO: 13985 - RNA, 20 nt, Artificial Sequence
  Synthetic oligonucleotide: CTLA4-699
acuuauuuguaaagcuguca

SEQ ID NO: 13986 - RNA, 20 nt, Artificial Sequence
  Synthetic oligonucleotide: CTLA4-700
cuuauuuguaaagcugucaa

SEQ ID NO: 13987 - RNA, 20 nt, Artificial Sequence
  Synthetic oligonucleotide: CTLA4-701
gcugucaagggaccauuaga

SEQ ID NO: 13988 - RNA, 20 nt, Artificial Sequence
  Synthetic oligonucleotide: CTLA4-702
ucaagggaccauuagaagga

SEQ ID NO: 13989 - RNA, 20 nt, Artificial Sequence
  Synthetic oligonucleotide: CTLA4-703
uuuuuuugcuauacaauuca

SEQ ID NO: 13990 - RNA, 20 nt, Artificial Sequence
  Synthetic oligonucleotide: CTLA4-704
cuauacaauucaagguuuua

SEQ ID NO: 13991 - RNA, 20 nt, Artificial Sequence
  Synthetic oligonucleotide: CTLA4-705
auucaagguuuuaagguccu

SEQ ID NO: 13992 - RNA, 20 nt, Artificial Sequence
  Synthetic oligonucleotide: CTLA4-706
agccagcuuguuuaaaaugu

SEQ ID NO: 13993 - RNA, 20 nt, Artificial Sequence
  Synthetic oligonucleotide: CTLA4-707
gccagcuuguuuaaaaugua

SEQ ID NO: 13994 - RNA, 20 nt, Artificial Sequence
  Synthetic oligonucleotide: CTLA4-708
uuuaaaauguagggaaauug

SEQ ID NO: 13995 - RNA, 20 nt, Artificial Sequence
  Synthetic oligonucleotide: CTLA4-709
uuaaaauguagggaaauugu

SEQ ID NO: 13996 - RNA, 20 nt, Artificial Sequence
  Synthetic oligonucleotide: CTLA4-710
ugccuucuuuacuuaauuca

SEQ ID NO: 13997 - RNA, 20 nt, Artificial Sequence
  Synthetic oligonucleotide: CTLA4-711
uuacuuaauucaagguuuua

SEQ ID NO: 13998 - RNA, 20 nt, Artificial Sequence
  Synthetic oligonucleotide: CTLA4-712
auugccaaaaaaaaaagaca

SEQ ID NO: 13999 - RNA, 20 nt, Artificial Sequence
  Synthetic oligonucleotide: CTLA4-713
aaaaaaaaaagacaaggaaa

SEQ ID NO: 14000 - RNA, 20 nt, Artificial Sequence
  Synthetic oligonucleotide: CTLA4-714
aagaaagccaccagucuguu

SEQ ID NO: 14001 - RNA, 20 nt, Artificial Sequence
  Synthetic oligonucleotide: CTLA4-715
auuguugccugaccuacgug

SEQ ID NO: 14002 - RNA, 20 nt, Artificial Sequence
  Synthetic oligonucleotide: CTLA4-716
uuguugccugaccuacgugu

SEQ ID NO: 14003 - RNA, 20 nt, Artificial Sequence
  Synthetic oligonucleotide: CTLA4-717
gcucuucagagacugacacc

SEQ ID NO: 14004 - RNA, 20 nt, Artificial Sequence
  Synthetic oligonucleotide: CTLA4-718
cugacaccagguuuguuaca

SEQ ID NO: 14005 - RNA, 20 nt, Artificial Sequence
  Synthetic oligonucleotide: CTLA4-719
uaucucucucuagaccuucu

SEQ ID NO: 14006 - RNA, 20 nt, Artificial Sequence
  Synthetic oligonucleotide: CTLA4-720
ccauguaguuuguaugaagu

SEQ ID NO: 14007 - RNA, 20 nt, Artificial Sequence
  Synthetic oligonucleotide: CTLA4-721
uuugaugauuuaauuuuuac

SEQ ID NO: 14008 - RNA, 17 nt, Artificial Sequence
  Synthetic oligonucleotide: CTLA4-722
aaaacucuccagauuua

SEQ ID NO: 14009 - RNA, 17 nt, Artificial Sequence
  Synthetic oligonucleotide: CTLA4-723
cucuccagauuuaagga

SEQ ID NO: 14010 - RNA, 17 nt, Artificial Sequence
  Synthetic oligonucleotide: CTLA4-724
ucuuuuuguuagaucau

SEQ ID NO: 14011 - RNA, 17 nt, Artificial Sequence
  Synthetic oligonucleotide: CTLA4-725
cagcugucacaaauuua

SEQ ID NO: 14012 - RNA, 17 nt, Artificial Sequence
  Synthetic oligonucleotide: CTLA4-726
cacaaauuuaaggacuc

SEQ ID NO: 14013 - RNA, 17 nt, Artificial Sequence
  Synthetic oligonucleotide: CTLA4-727
aaaagucuauccuuuua

SEQ ID NO: 14014 - RNA, 17 nt, Artificial Sequence
  Synthetic oligonucleotide: CTLA4-728
gucuauccuuuuaugga

SEQ ID NO: 14015 - RNA, 17 nt, Artificial Sequence
  Synthetic oligonucleotide: CTLA4-729
uaaucucuugaaucauu

SEQ ID NO: 14016 - RNA, 17 nt, Artificial Sequence
  Synthetic oligonucleotide: CTLA4-730
aaucucuugaaucauuu

SEQ ID NO: 14017 - RNA, 17 nt, Artificial Sequence
  Synthetic oligonucleotide: CTLA4-731
ucuugaaucauuugggu

SEQ ID NO: 14018 - RNA, 17 nt, Artificial Sequence
  Synthetic oligonucleotide: CTLA4-732
uuggguuggcuuuucuu

SEQ ID NO: 14019 - RNA, 17 nt, Artificial Sequence
  Synthetic oligonucleotide: CTLA4-733
uugucucuguugaguua

SEQ ID NO: 14020 - RNA, 17 nt, Artificial Sequence
  Synthetic oligonucleotide: CTLA4-734
uccuucugcaaaaccag

SEQ ID NO: 14021 - RNA, 17 nt, Artificial Sequence
  Synthetic oligonucleotide: CTLA4-735
cuuaaccaaaugcuaaa

SEQ ID NO: 14022 - RNA, 17 nt, Artificial Sequence
  Synthetic oligonucleotide: CTLA4-736
aaaugcuaaauggauuu

SEQ ID NO: 14023 - RNA, 17 nt, Artificial Sequence
  Synthetic oligonucleotide: CTLA4-737
uauuuguaaagcuguca

SEQ ID NO: 14024 - RNA, 17 nt, Artificial Sequence
  Synthetic oligonucleotide: CTLA4-738
auuuguaaagcugucaa

SEQ ID NO: 14025 - RNA, 17 nt, Artificial Sequence
  Synthetic oligonucleotide: CTLA4-739
gucaagggaccauuaga

SEQ ID NO: 14026 - RNA, 17 nt, Artificial Sequence
  Synthetic oligonucleotide: CTLA4-740
agggaccauuagaagga

SEQ ID NO: 14027 - RNA, 17 nt, Artificial Sequence
  Synthetic oligonucleotide: CTLA4-741
uuuugcuauacaauuca

SEQ ID NO: 14028 - RNA, 17 nt, Artificial Sequence
  Synthetic oligonucleotide: CTLA4-742
uacaauucaagguuuua

SEQ ID NO: 14029 - RNA, 17 nt, Artificial Sequence
  Synthetic oligonucleotide: CTLA4-743
caagguuuuaagguccu

SEQ ID NO: 14030 - RNA, 17 nt, Artificial Sequence
  Synthetic oligonucleotide: CTLA4-744
cagcuuguuuaaaaugu

SEQ ID NO: 14031 - RNA, 17 nt, Artificial Sequence
  Synthetic oligonucleotide: CTLA4-745
agcuuguuuaaaaugua

SEQ ID NO: 14032 - RNA, 17 nt, Artificial Sequence
  Synthetic oligonucleotide: CTLA4-746
aaaauguagggaaauug

SEQ ID NO: 14033 - RNA, 17 nt, Artificial Sequence
  Synthetic oligonucleotide: CTLA4-747
aaauguagggaaauugu

SEQ ID NO: 14034 - RNA, 17 nt, Artificial Sequence
  Synthetic oligonucleotide: CTLA4-748
cuucuuuacuuaauuca

SEQ ID NO: 14035 - RNA, 17 nt, Artificial Sequence
  Synthetic oligonucleotide: CTLA4-749
cuuaauucaagguuuua

SEQ ID NO: 14036 - RNA, 17 nt, Artificial Sequence
  Synthetic oligonucleotide: CTLA4-750
gccaaaaaaaaaagaca

SEQ ID NO: 14037 - RNA, 17 nt, Artificial Sequence
  Synthetic oligonucleotide: CTLA4-751
aaaaaaagacaaggaaa

SEQ ID NO: 14038 - RNA, 17 nt, Artificial Sequence
  Synthetic oligonucleotide: CTLA4-752
aaagccaccagucuguu

SEQ ID NO: 14039 - RNA, 17 nt, Artificial Sequence
  Synthetic oligonucleotide: CTLA4-753
guugccugaccuacgug

SEQ ID NO: 14040 - RNA, 17 nt, Artificial Sequence
  Synthetic oligonucleotide: CTLA4-754
uugccugaccuacgugu

SEQ ID NO: 14041 - RNA, 17 nt, Artificial Sequence
  Synthetic oligonucleotide: CTLA4-755
cuucagagacugacacc

SEQ ID NO: 14042 - RNA, 17 nt, Artificial Sequence
  Synthetic oligonucleotide: CTLA4-756
acaccagguuuguuaca

SEQ ID NO: 14043 - RNA, 17 nt, Artificial Sequence
  Synthetic oligonucleotide: CTLA4-757
cucucucuagaccuucu

SEQ ID NO: 14044 - RNA, 17 nt, Artificial Sequence
  Synthetic oligonucleotide: CTLA4-758
uguaguuuguaugaagu

SEQ ID NO: 14045 - RNA, 17 nt, Artificial Sequence
  Synthetic oligonucleotide: CTLA4-759
gaugauuuaauuuuuac

SEQ ID NO: 14046 - RNA, 20 nt, Artificial Sequence
  Synthetic oligonucleotide: CTLA4-760
uaaagaaagaaacauucaug

SEQ ID NO: 14047 - RNA, 20 nt, Artificial Sequence
  Synthetic oligonucleotide: CTLA4-761
auaaagaaagaaacauucau

SEQ ID NO: 14048 - RNA, 20 nt, Artificial Sequence
  Synthetic oligonucleotide: CTLA4-762
aauaaagaaagaaacauuca

SEQ ID NO: 14049 - RNA, 20 nt, Artificial Sequence
  Synthetic oligonucleotide: CTLA4-763
uugaggaccuuccuuaaauc

SEQ ID NO: 14050 - RNA, 20 nt, Artificial Sequence
  Synthetic oligonucleotide: CTLA4-764
aaaaagaauuugaaacauug

SEQ ID NO: 14051 - RNA, 20 nt, Artificial Sequence
  Synthetic oligonucleotide: CTLA4-765
aauuugugacagcuguagac

SEQ ID NO: 14052 - RNA, 20 nt, Artificial Sequence
  Synthetic oligonucleotide: CTLA4-766
agauuagagccguccauaaa

SEQ ID NO: 14053 - RNA, 20 nt, Artificial Sequence
  Synthetic oligonucleotide: CTLA4-767
agacaaaacagaguugaaga

SEQ ID NO: 14054 - RNA, 20 nt, Artificial Sequence
  Synthetic oligonucleotide: CTLA4-768
uuugcagaaggaaagaauuc

SEQ ID NO: 14055 - RNA, 20 nt, Artificial Sequence
  Synthetic oligonucleotide: CTLA4-769
gcugccucugguuuugcaga

SEQ ID NO: 14056 - RNA, 20 nt, Artificial Sequence
  Synthetic oligonucleotide: CTLA4-770
ggcggaaaagaagcugccuc

SEQ ID NO: 14057 - RNA, 20 nt, Artificial Sequence
  Synthetic oligonucleotide: CTLA4-771
agaaauaaacugaaaauagg

SEQ ID NO: 14058 - RNA, 20 nt, Artificial Sequence
  Synthetic oligonucleotide: CTLA4-772
acaagaaauaaacugaaaau

SEQ ID NO: 14059 - RNA, 20 nt, Artificial Sequence
  Synthetic oligonucleotide: CTLA4-773
uccuaaauccauuuagcauu

SEQ ID NO: 14060 - RNA, 20 nt, Artificial Sequence
  Synthetic oligonucleotide: CTLA4-774
gugaagcaccauccuucuaa

SEQ ID NO: 14061 - RNA, 20 nt, Artificial Sequence
  Synthetic oligonucleotide: CTLA4-775
auagcaaaaaaacucuuccc

SEQ ID NO: 14062 - RNA, 20 nt, Artificial Sequence
  Synthetic oligonucleotide: CTLA4-776
uuauaaaguauaugaauccg

SEQ ID NO: 14063 - RNA, 20 nt, Artificial Sequence
  Synthetic oligonucleotide: CTLA4-777
ucccuacauuuuaaacaagc

SEQ ID NO: 14064 - RNA, 20 nt, Artificial Sequence
  Synthetic oligonucleotide: CTLA4-778
aaccuugaauuaaguaaaga

SEQ ID NO: 14065 - RNA, 20 nt, Artificial Sequence
  Synthetic oligonucleotide: CTLA4-779
aacuuuuauuuuuaaauaau

SEQ ID NO: 14066 - RNA, 20 nt, Artificial Sequence
  Synthetic oligonucleotide: CTLA4-780
uuuuccuugucuuuuuuuuu

SEQ ID NO: 14067 - RNA, 20 nt, Artificial Sequence
  Synthetic oligonucleotide: CTLA4-781
uuguaugccaaacagacugg

SEQ ID NO: 14068 - RNA, 20 nt, Artificial Sequence
  Synthetic oligonucleotide: CTLA4-782
guauuguaugccaaacagac

SEQ ID NO: 14069 - RNA, 20 nt, Artificial Sequence
  Synthetic oligonucleotide: CTLA4-783
cugaaacccacacguagguc

SEQ ID NO: 14070 - RNA, 20 nt, Artificial Sequence
  Synthetic oligonucleotide: CTLA4-784
ugcaucugaaacccacacgu

SEQ ID NO: 14071 - RNA, 20 nt, Artificial Sequence
  Synthetic oligonucleotide: CTLA4-785
cucugaagagcugaaaacug

SEQ ID NO: 14072 - RNA, 20 nt, Artificial Sequence
  Synthetic oligonucleotide: CTLA4-786
uuuaagccguguaacaaacc

SEQ ID NO: 14073 - RNA, 20 nt, Artificial Sequence
  Synthetic oligonucleotide: CTLA4-787
gagauaagguugagauucaa

SEQ ID NO: 14074 - RNA, 20 nt, Artificial Sequence
  Synthetic oligonucleotide: CTLA4-788
agaaggucuagagagagaua

SEQ ID NO: 14075 - RNA, 20 nt, Artificial Sequence
  Synthetic oligonucleotide: CTLA4-789
acaugguuucuuaaccaaga

SEQ ID NO: 14076 - RNA, 20 nt, Artificial Sequence
  Synthetic oligonucleotide: CTLA4-790
ccuacuucauacaaacuaca

SEQ ID NO: 14077 - RNA, 17 nt, Artificial Sequence
  Synthetic oligonucleotide: CTLA4-791
agaaagaaacauucaug

SEQ ID NO: 14078 - RNA, 17 nt, Artificial Sequence
  Synthetic oligonucleotide: CTLA4-792
aagaaagaaacauucau

SEQ ID NO: 14079 - RNA, 17 nt, Artificial Sequence
  Synthetic oligonucleotide: CTLA4-793
aaagaaagaaacauuca

SEQ ID NO: 14080 - RNA, 17 nt, Artificial Sequence
  Synthetic oligonucleotide: CTLA4-794
aggaccuuccuuaaauc

SEQ ID NO: 14081 - RNA, 17 nt, Artificial Sequence
  Synthetic oligonucleotide: CTLA4-795
aagaauuugaaacauug

SEQ ID NO: 14082 - RNA, 17 nt, Artificial Sequence
  Synthetic oligonucleotide: CTLA4-796
uugugacagcuguagac

SEQ ID NO: 14083 - RNA, 17 nt, Artificial Sequence
  Synthetic oligonucleotide: CTLA4-797
uuagagccguccauaaa

SEQ ID NO: 14084 - RNA, 17 nt, Artificial Sequence
  Synthetic oligonucleotide: CTLA4-798
caaaacagaguugaaga

SEQ ID NO: 14085 - RNA, 17 nt, Artificial Sequence
  Synthetic oligonucleotide: CTLA4-799
gcagaaggaaagaauuc

SEQ ID NO: 14086 - RNA, 17 nt, Artificial Sequence
  Synthetic oligonucleotide: CTLA4-800
gccucugguuuugcaga

SEQ ID NO: 14087 - RNA, 17 nt, Artificial Sequence
  Synthetic oligonucleotide: CTLA4-801
ggaaaagaagcugccuc

SEQ ID NO: 14088 - RNA, 17 nt, Artificial Sequence
  Synthetic oligonucleotide: CTLA4-802
aauaaacugaaaauagg

SEQ ID NO: 14089 - RNA, 17 nt, Artificial Sequence
  Synthetic oligonucleotide: CTLA4-803
agaaauaaacugaaaau

SEQ ID NO: 14090 - RNA, 17 nt, Artificial Sequence
  Synthetic oligonucleotide: CTLA4-804
uaaauccauuuagcauu

SEQ ID NO: 14091 - RNA, 17 nt, Artificial Sequence
  Synthetic oligonucleotide: CTLA4-805
aagcaccauccuucuaa

SEQ ID NO: 14092 - RNA, 17 nt, Artificial Sequence
  Synthetic oligonucleotide: CTLA4-806
gcaaaaaaacucuuccc

SEQ ID NO: 14093 - RNA, 17 nt, Artificial Sequence
  Synthetic oligonucleotide: CTLA4-807
uaaaguauaugaauccg

SEQ ID NO: 14094 - RNA, 17 nt, Artificial Sequence
  Synthetic oligonucleotide: CTLA4-808
cuacauuuuaaacaagc

SEQ ID NO: 14095 - RNA, 17 nt, Artificial Sequence
  Synthetic oligonucleotide: CTLA4-809
cuugaauuaaguaaaga

SEQ ID NO: 14096 - RNA, 17 nt, Artificial Sequence
  Synthetic oligonucleotide: CTLA4-810
uuuuauuuuuaaauaau

SEQ ID NO: 14097 - RNA, 17 nt, Artificial Sequence
  Synthetic oligonucleotide: CTLA4-811
uccuugucuuuuuuuuu

SEQ ID NO: 14098 - RNA, 17 nt, Artificial Sequence
  Synthetic oligonucleotide: CTLA4-812
uaugccaaacagacugg

SEQ ID NO: 14099 - RNA, 17 nt, Artificial Sequence
  Synthetic oligonucleotide: CTLA4-813
uuguaugccaaacagac

SEQ ID NO: 14100 - RNA, 17 nt, Artificial Sequence
  Synthetic oligonucleotide: CTLA4-814
aaacccacacguagguc

SEQ ID NO: 14101 - RNA, 17 nt, Artificial Sequence
  Synthetic oligonucleotide: CTLA4-815
aucugaaacccacacgu

SEQ ID NO: 14102 - RNA, 17 nt, Artificial Sequence
  Synthetic oligonucleotide: CTLA4-816
ugaagagcugaaaacug

SEQ ID NO: 14103 - RNA, 17 nt, Artificial Sequence
  Synthetic oligonucleotide: CTLA4-817
aagccguguaacaaacc

SEQ ID NO: 14104 - RNA, 17 nt, Artificial Sequence
  Synthetic oligonucleotide: CTLA4-818
auaagguugagauucaa

SEQ ID NO: 14105 - RNA, 17 nt, Artificial Sequence
  Synthetic oligonucleotide: CTLA4-819
aggucuagagagagaua

SEQ ID NO: 14106 - RNA, 17 nt, Artificial Sequence
  Synthetic oligonucleotide: CTLA4-820
ugguuucuuaaccaaga

SEQ ID NO: 14107 - RNA, 17 nt, Artificial Sequence
  Synthetic oligonucleotide: CTLA4-821
acuucauacaaacuaca

SEQ ID NO: 14108 - RNA, 20 nt, Artificial Sequence
  Synthetic oligonucleotide: CTLA4-822
acaaauccugccauuagccc

SEQ ID NO: 14109 - RNA, 20 nt, Artificial Sequence
  Synthetic oligonucleotide: CTLA4-823
cugccauuagcccaagggcu

SEQ ID NO: 14110 - RNA, 20 nt, Artificial Sequence
  Synthetic oligonucleotide: CTLA4-824
aaguuagcagccuaguaguu

SEQ ID NO: 14111 - RNA, 20 nt, Artificial Sequence
  Synthetic oligonucleotide: CTLA4-462
aguuagcagccuaguaguuu

SEQ ID NO: 14112 - RNA, 20 nt, Artificial Sequence
  Synthetic oligonucleotide: CTLA4-826
uaguaguuuuggaguuguca

SEQ ID NO: 14113 - RNA, 20 nt, Artificial Sequence
  Synthetic oligonucleotide: CTLA4-827
guuuuggaguugucaaugaa

SEQ ID NO: 14114 - RNA, 20 nt, Artificial Sequence
  Synthetic oligonucleotide: CTLA4-828
ggaguugucaaugaaaugaa

SEQ ID NO: 14115 - RNA, 20 nt, Artificial Sequence
  Synthetic oligonucleotide: CTLA4-829
ugucaaugaaaugaauugga

SEQ ID NO: 14116 - RNA, 20 nt, Artificial Sequence
  Synthetic oligonucleotide: CTLA4-830
augaauuggacuggaugguu

SEQ ID NO: 14117 - RNA, 20 nt, Artificial Sequence
  Synthetic oligonucleotide: CTLA4-831
acuggaugguuaaggaugcc

SEQ ID NO: 14118 - RNA, 20 nt, Artificial Sequence
  Synthetic oligonucleotide: CTLA4-832
gguuaaggaugcccagaaga

SEQ ID NO: 14119 - RNA, 20 nt, Artificial Sequence
  Synthetic oligonucleotide: CTLA4-833
gcccagaagauugaauaaaa

SEQ ID NO: 14120 - RNA, 20 nt, Artificial Sequence
  Synthetic oligonucleotide: CTLA4-467
cccagaagauugaauaaaau

SEQ ID NO: 14121 - RNA, 20 nt, Artificial Sequence
  Synthetic oligonucleotide: CTLA4-835
gauugaauaaaauugggauu

SEQ ID NO: 14122 - RNA, 20 nt, Artificial Sequence
  Synthetic oligonucleotide: CTLA4-469
auugaauaaaauugggauuu

SEQ ID NO: 14123 - RNA, 20 nt, Artificial Sequence
  Synthetic oligonucleotide: CTLA4-837
ugaauaaaauugggauuuag

SEQ ID NO: 14124 - RNA, 20 nt, Artificial Sequence
  Synthetic oligonucleotide: CTLA4-838
uuaggaggacccuuguacuc

SEQ ID NO: 14125 - RNA, 20 nt, Artificial Sequence
  Synthetic oligonucleotide: CTLA4-471
uaggaggacccuuguacucc

SEQ ID NO: 14126 - RNA, 20 nt, Artificial Sequence
  Synthetic oligonucleotide: CTLA4-840
uaguuauccagauccucaaa

SEQ ID NO: 14127 - RNA, 20 nt, Artificial Sequence
  Synthetic oligonucleotide: CTLA4-841
uccagauccucaaagugaac

SEQ ID NO: 14128 - RNA, 20 nt, Artificial Sequence
  Synthetic oligonucleotide: CTLA4-842
caugaagcuucaguuucaaa

SEQ ID NO: 14129 - RNA, 20 nt, Artificial Sequence
  Synthetic oligonucleotide: CTLA4-843
auugaauacauuuuccaucc

SEQ ID NO: 14130 - RNA, 20 nt, Artificial Sequence
  Synthetic oligonucleotide: CTLA4-844
gauuggcuuguuuuguucag

SEQ ID NO: 14131 - RNA, 20 nt, Artificial Sequence
  Synthetic oligonucleotide: CTLA4-845
uguuuuguucaguugagugc

SEQ ID NO: 14132 - RNA, 20 nt, Artificial Sequence
  Synthetic oligonucleotide: CTLA4-846
ugcacauguguaauacauau

SEQ ID NO: 14133 - RNA, 20 nt, Artificial Sequence
  Synthetic oligonucleotide: CTLA4-477
gcacauguguaauacauauc

SEQ ID NO: 14134 - RNA, 20 nt, Artificial Sequence
  Synthetic oligonucleotide: CTLA4-848
uauaaaguccuugauucugu

SEQ ID NO: 14135 - RNA, 20 nt, Artificial Sequence
  Synthetic oligonucleotide: CTLA4-849
ucaaacacauuucaaagcuu

SEQ ID NO: 14136 - RNA, 20 nt, Artificial Sequence
  Synthetic oligonucleotide: CTLA4-850
cauuucaaagcuucaggauc

SEQ ID NO: 14137 - RNA, 20 nt, Artificial Sequence
  Synthetic oligonucleotide: CTLA4-851
gaaagguuuugcucuacuuc

SEQ ID NO: 14138 - RNA, 20 nt, Artificial Sequence
  Synthetic oligonucleotide: CTLA4-852
uugcucuacuuccugaagac

SEQ ID NO: 14139 - RNA, 20 nt, Artificial Sequence
  Synthetic oligonucleotide: CTLA4-216
ccauaaagccauggcuugcc

SEQ ID NO: 14140 - RNA, 20 nt, Artificial Sequence
  Synthetic oligonucleotide: CTLA4-217
uucagcggcacaaggcucag

SEQ ID NO: 14141 - RNA, 20 nt, Artificial Sequence
  Synthetic oligonucleotide: CTLA4-218
gcucagcugaaccuggcuac

SEQ ID NO: 14142 - RNA, 20 nt, Artificial Sequence
  Synthetic oligonucleotide: CTLA4-219
caucccugucuucugcaaag

SEQ ID NO: 14143 - RNA, 20 nt, Artificial Sequence
  Synthetic oligonucleotide: CTLA4-220
ccugucuucugcaaagguga

SEQ ID NO: 14144 - RNA, 20 nt, Artificial Sequence
  Synthetic oligonucleotide: CTLA4-221
ugcaaaggugagugagacuu

SEQ ID NO: 14145 - RNA, 20 nt, Artificial Sequence
  Synthetic oligonucleotide: CTLA4-9
gcaaaggugagugagacuuu

SEQ ID NO: 14146 - RNA, 20 nt, Artificial Sequence
  Synthetic oligonucleotide: CTLA4-223
gugagugagacuuuuggagc

SEQ ID NO: 14147 - RNA, 20 nt, Artificial Sequence
  Synthetic oligonucleotide: CTLA4-861
gagacuuuuggagcaugaag

SEQ ID NO: 14148 - RNA, 20 nt, Artificial Sequence
  Synthetic oligonucleotide: CTLA4-10
agacuuuuggagcaugaaga

SEQ ID NO: 14149 - RNA, 20 nt, Artificial Sequence
  Synthetic oligonucleotide: CTLA4-863
acuuuuggagcaugaagaug

SEQ ID NO: 14150 - RNA, 20 nt, Artificial Sequence
  Synthetic oligonucleotide: CTLA4-493
cuuuuggagcaugaagaugg

SEQ ID NO: 14151 - RNA, 20 nt, Artificial Sequence
  Synthetic oligonucleotide: CTLA4-865
ggaggagguguuucuccuac

SEQ ID NO: 14152 - RNA, 20 nt, Artificial Sequence
  Synthetic oligonucleotide: CTLA4-866
gcagugauuuauagcaaagc

SEQ ID NO: 14153 - RNA, 20 nt, Artificial Sequence
  Synthetic oligonucleotide: CTLA4-867
gcuuggcuggcucuguauuc

SEQ ID NO: 14154 - RNA, 20 nt, Artificial Sequence
  Synthetic oligonucleotide: CTLA4-868
gcucuguauuccagggccag

SEQ ID NO: 14155 - RNA, 20 nt, Artificial Sequence
  Synthetic oligonucleotide: CTLA4-504
cucuguauuccagggccagc

SEQ ID NO: 14156 - RNA, 20 nt, Artificial Sequence
  Synthetic oligonucleotide: CTLA4-505
ucuguauuccagggccagca

SEQ ID NO: 14157 - RNA, 20 nt, Artificial Sequence
  Synthetic oligonucleotide: CTLA4-871
ccagggccagcagggagcag

SEQ ID NO: 14158 - RNA, 20 nt, Artificial Sequence
  Synthetic oligonucleotide: CTLA4-872
gggcggcagcaaauaaggca

SEQ ID NO: 14159 - RNA, 20 nt, Artificial Sequence
  Synthetic oligonucleotide: CTLA4-873
aauaaggcaaagagauagcu

SEQ ID NO: 14160 - RNA, 20 nt, Artificial Sequence
  Synthetic oligonucleotide: CTLA4-874
ggcaaagagauagcucagaa

SEQ ID NO: 14161 - RNA, 20 nt, Artificial Sequence
  Synthetic oligonucleotide: CTLA4-875
acagagcgccagguauuuag

SEQ ID NO: 14162 - RNA, 20 nt, Artificial Sequence
  Synthetic oligonucleotide: CTLA4-511
cagagcgccagguauuuagu

SEQ ID NO: 14163 - RNA, 20 nt, Artificial Sequence
  Synthetic oligonucleotide: CTLA4-877
agguauuuaguaggggcuuc

SEQ ID NO: 14164 - RNA, 20 nt, Artificial Sequence
  Synthetic oligonucleotide: CTLA4-878
uaggggcuucaugaaugcau

SEQ ID NO: 14165 - RNA, 20 nt, Artificial Sequence
  Synthetic oligonucleotide: CTLA4-879
augcaugugaguugguuuag

SEQ ID NO: 14166 - RNA, 20 nt, Artificial Sequence
  Synthetic oligonucleotide: CTLA4-880
gcaugugaguugguuuagua

SEQ ID NO: 14167 - RNA, 20 nt, Artificial Sequence
  Synthetic oligonucleotide: CTLA4-881
aggcaauuucagacccuucu

SEQ ID NO: 14168 - RNA, 20 nt, Artificial Sequence
  Synthetic oligonucleotide: CTLA4-882
uuucagacccuucuaugaga

SEQ ID NO: 14169 - RNA, 20 nt, Artificial Sequence
  Synthetic oligonucleotide: CTLA4-516
uucagacccuucuaugagac

SEQ ID NO: 14170 - RNA, 20 nt, Artificial Sequence
  Synthetic oligonucleotide: CTLA4-884
uaugagacuggaagugauuu

SEQ ID NO: 14171 - RNA, 20 nt, Artificial Sequence
  Synthetic oligonucleotide: CTLA4-885
ugagacuggaagugauuuaa

SEQ ID NO: 14172 - RNA, 20 nt, Artificial Sequence
  Synthetic oligonucleotide: CTLA4-517
gagacuggaagugauuuaag

SEQ ID NO: 14173 - RNA, 20 nt, Artificial Sequence
  Synthetic oligonucleotide: CTLA4-518
agacuggaagugauuuaaga

SEQ ID NO: 14174 - RNA, 20 nt, Artificial Sequence
  Synthetic oligonucleotide: CTLA4-888
uggaagugauuuaagaggga

SEQ ID NO: 14175 - RNA, 20 nt, Artificial Sequence
  Synthetic oligonucleotide: CTLA4-889
gggaaaggauagccauaguc

SEQ ID NO: 14176 - RNA, 20 nt, Artificial Sequence
  Synthetic oligonucleotide: CTLA4-890
agccauaguccugaauacau

SEQ ID NO: 14177 - RNA, 20 nt, Artificial Sequence
  Synthetic oligonucleotide: CTLA4-891
uaguccugaauacauuugag

SEQ ID NO: 14178 - RNA, 20 nt, Artificial Sequence
  Synthetic oligonucleotide: CTLA4-892
aauacauuugagcuggguuu

SEQ ID NO: 14179 - RNA, 20 nt, Artificial Sequence
  Synthetic oligonucleotide: CTLA4-893
cauuugagcuggguuucagg

SEQ ID NO: 14180 - RNA, 17 nt, Artificial Sequence
  Synthetic oligonucleotide: CTLA4-894
aauccugccauuagccc

SEQ ID NO: 14181 - RNA, 17 nt, Artificial Sequence
  Synthetic oligonucleotide: CTLA4-895
ccauuagcccaagggcu

SEQ ID NO: 14182 - RNA, 17 nt, Artificial Sequence
  Synthetic oligonucleotide: CTLA4-896
uuagcagccuaguaguu

SEQ ID NO: 14183 - RNA, 17 nt, Artificial Sequence
  Synthetic oligonucleotide: CTLA4-574
uagcagccuaguaguuu

SEQ ID NO: 14184 - RNA, 17 nt, Artificial Sequence
  Synthetic oligonucleotide: CTLA4-898
uaguuuuggaguuguca

SEQ ID NO: 14185 - RNA, 17 nt, Artificial Sequence
  Synthetic oligonucleotide: CTLA4-899
uuggaguugucaaugaa

SEQ ID NO: 14186 - RNA, 17 nt, Artificial Sequence
  Synthetic oligonucleotide: CTLA4-900
guugucaaugaaaugaa

SEQ ID NO: 14187 - RNA, 17 nt, Artificial Sequence
  Synthetic oligonucleotide: CTLA4-901
caaugaaaugaauugga

SEQ ID NO: 14188 - RNA, 17 nt, Artificial Sequence
  Synthetic oligonucleotide: CTLA4-902
aauuggacuggaugguu

SEQ ID NO: 14189 - RNA, 17 nt, Artificial Sequence
  Synthetic oligonucleotide: CTLA4-903
ggaugguuaaggaugcc

SEQ ID NO: 14190 - RNA, 17 nt, Artificial Sequence
  Synthetic oligonucleotide: CTLA4-904
uaaggaugcccagaaga

SEQ ID NO: 14191 - RNA, 17 nt, Artificial Sequence
  Synthetic oligonucleotide: CTLA4-905
cagaagauugaauaaaa

SEQ ID NO: 14192 - RNA, 17 nt, Artificial Sequence
  Synthetic oligonucleotide: CTLA4-579
agaagauugaauaaaau

SEQ ID NO: 14193 - RNA, 17 nt, Artificial Sequence
  Synthetic oligonucleotide: CTLA4-907
ugaauaaaauugggauu

SEQ ID NO: 14194 - RNA, 17 nt, Artificial Sequence
  Synthetic oligonucleotide: CTLA4-581
gaauaaaauugggauuu

SEQ ID NO: 14195 - RNA, 17 nt, Artificial Sequence
  Synthetic oligonucleotide: CTLA4-909
auaaaauugggauuuag

SEQ ID NO: 14196 - RNA, 17 nt, Artificial Sequence
  Synthetic oligonucleotide: CTLA4-910
ggaggacccuuguacuc

SEQ ID NO: 14197 - RNA, 17 nt, Artificial Sequence
  Synthetic oligonucleotide: CTLA4-583
gaggacccuuguacucc

SEQ ID NO: 14198 - RNA, 17 nt, Artificial Sequence
  Synthetic oligonucleotide: CTLA4-912
uuauccagauccucaaa

SEQ ID NO: 14199 - RNA, 17 nt, Artificial Sequence
  Synthetic oligonucleotide: CTLA4-913
agauccucaaagugaac

SEQ ID NO: 14200 - RNA, 17 nt, Artificial Sequence
  Synthetic oligonucleotide: CTLA4-914
gaagcuucaguuucaaa

SEQ ID NO: 14201 - RNA, 17 nt, Artificial Sequence
  Synthetic oligonucleotide: CTLA4-915
gaauacauuuuccaucc

SEQ ID NO: 14202 - RNA, 17 nt, Artificial Sequence
  Synthetic oligonucleotide: CTLA4-916
uggcuuguuuuguucag

SEQ ID NO: 14203 - RNA, 17 nt, Artificial Sequence
  Synthetic oligonucleotide: CTLA4-917
uuuguucaguugagugc

SEQ ID NO: 14204 - RNA, 17 nt, Artificial Sequence
  Synthetic oligonucleotide: CTLA4-918
acauguguaauacauau

SEQ ID NO: 14205 - RNA, 17 nt, Artificial Sequence
  Synthetic oligonucleotide: CTLA4-589
cauguguaauacauauc

SEQ ID NO: 14206 - RNA, 17 nt, Artificial Sequence
  Synthetic oligonucleotide: CTLA4-920
aaaguccuugauucugu

SEQ ID NO: 14207 - RNA, 17 nt, Artificial Sequence
  Synthetic oligonucleotide: CTLA4-921
aacacauuucaaagcuu

SEQ ID NO: 14208 - RNA, 17 nt, Artificial Sequence
  Synthetic oligonucleotide: CTLA4-922
uucaaagcuucaggauc

SEQ ID NO: 14209 - RNA, 17 nt, Artificial Sequence
  Synthetic oligonucleotide: CTLA4-923
agguuuugcucuacuuc

SEQ ID NO: 14210 - RNA, 17 nt, Artificial Sequence
  Synthetic oligonucleotide: CTLA4-924
cucuacuuccugaagac

SEQ ID NO: 14211 - RNA, 17 nt, Artificial Sequence
  Synthetic oligonucleotide: CTLA4-246
uaaagccauggcuugcc

SEQ ID NO: 14212 - RNA, 17 nt, Artificial Sequence
  Synthetic oligonucleotide: CTLA4-247
agcggcacaaggcucag

SEQ ID NO: 14213 - RNA, 17 nt, Artificial Sequence
  Synthetic oligonucleotide: CTLA4-248
cagcugaaccuggcuac

SEQ ID NO: 14214 - RNA, 17 nt, Artificial Sequence
  Synthetic oligonucleotide: CTLA4-249
cccugucuucugcaaag

SEQ ID NO: 14215 - RNA, 17 nt, Artificial Sequence
  Synthetic oligonucleotide: CTLA4-250
gucuucugcaaagguga

SEQ ID NO: 14216 - RNA, 17 nt, Artificial Sequence
  Synthetic oligonucleotide: CTLA4-251
aaaggugagugagacuu

SEQ ID NO: 14217 - RNA, 17 nt, Artificial Sequence
  Synthetic oligonucleotide: CTLA4-81
aaggugagugagacuuu

SEQ ID NO: 14218 - RNA, 17 nt, Artificial Sequence
  Synthetic oligonucleotide: CTLA4-253
agugagacuuuuggagc

SEQ ID NO: 14219 - RNA, 17 nt, Artificial Sequence
  Synthetic oligonucleotide: CTLA4-933
acuuuuggagcaugaag

SEQ ID NO: 14220 - RNA, 17 nt, Artificial Sequence
  Synthetic oligonucleotide: CTLA4-82
cuuuuggagcaugaaga

SEQ ID NO: 14221 - RNA, 17 nt, Artificial Sequence
  Synthetic oligonucleotide: CTLA4-935
uuuggagcaugaagaug

SEQ ID NO: 14222 - RNA, 17 nt, Artificial Sequence
  Synthetic oligonucleotide: CTLA4-605
uuggagcaugaagaugg

SEQ ID NO: 14223 - RNA, 17 nt, Artificial Sequence
  Synthetic oligonucleotide: CTLA4-937
ggagguguuucuccuac

SEQ ID NO: 14224 - RNA, 17 nt, Artificial Sequence
  Synthetic oligonucleotide: CTLA4-938
gugauuuauagcaaagc

SEQ ID NO: 14225 - RNA, 17 nt, Artificial Sequence
  Synthetic oligonucleotide: CTLA4-939
uggcuggcucuguauuc

SEQ ID NO: 14226 - RNA, 17 nt, Artificial Sequence
  Synthetic oligonucleotide: CTLA4-940
cuguauuccagggccag

SEQ ID NO: 14227 - RNA, 17 nt, Artificial Sequence
  Synthetic oligonucleotide: CTLA4-616
uguauuccagggccagc

SEQ ID NO: 14228 - RNA, 17 nt, Artificial Sequence
  Synthetic oligonucleotide: CTLA4-617
guauuccagggccagca

SEQ ID NO: 14229 - RNA, 17 nt, Artificial Sequence
  Synthetic oligonucleotide: CTLA4-943
gggccagcagggagcag

SEQ ID NO: 14230 - RNA, 17 nt, Artificial Sequence
  Synthetic oligonucleotide: CTLA4-944
cggcagcaaauaaggca

SEQ ID NO: 14231 - RNA, 17 nt, Artificial Sequence
  Synthetic oligonucleotide: CTLA4-945
aaggcaaagagauagcu

SEQ ID NO: 14232 - RNA, 17 nt, Artificial Sequence
  Synthetic oligonucleotide: CTLA4-946
aaagagauagcucagaa

SEQ ID NO: 14233 - RNA, 17 nt, Artificial Sequence
  Synthetic oligonucleotide: CTLA4-947
gagcgccagguauuuag

SEQ ID NO: 14234 - RNA, 17 nt, Artificial Sequence
  Synthetic oligonucleotide: CTLA4-623
agcgccagguauuuagu

SEQ ID NO: 14235 - RNA, 17 nt, Artificial Sequence
  Synthetic oligonucleotide: CTLA4-949
uauuuaguaggggcuuc

SEQ ID NO: 14236 - RNA, 17 nt, Artificial Sequence
  Synthetic oligonucleotide: CTLA4-950
gggcuucaugaaugcau

SEQ ID NO: 14237 - RNA, 17 nt, Artificial Sequence
  Synthetic oligonucleotide: CTLA4-951
caugugaguugguuuag

SEQ ID NO: 14238 - RNA, 17 nt, Artificial Sequence
  Synthetic oligonucleotide: CTLA4-952
ugugaguugguuuagua

SEQ ID NO: 14239 - RNA, 17 nt, Artificial Sequence
  Synthetic oligonucleotide: CTLA4-953
caauuucagacccuucu

SEQ ID NO: 14240 - RNA, 17 nt, Artificial Sequence
  Synthetic oligonucleotide: CTLA4-954
cagacccuucuaugaga

SEQ ID NO: 14241 - RNA, 17 nt, Artificial Sequence
  Synthetic oligonucleotide: CTLA4-628
agacccuucuaugagac

SEQ ID NO: 14242 - RNA, 17 nt, Artificial Sequence
  Synthetic oligonucleotide: CTLA4-956
gagacuggaagugauuu

SEQ ID NO: 14243 - RNA, 17 nt, Artificial Sequence
  Synthetic oligonucleotide: CTLA4-957
gacuggaagugauuuaa

SEQ ID NO: 14244 - RNA, 17 nt, Artificial Sequence
  Synthetic oligonucleotide: CTLA4-629
acuggaagugauuuaag

SEQ ID NO: 14245 - RNA, 17 nt, Artificial Sequence
  Synthetic oligonucleotide: CTLA4-630
cuggaagugauuuaaga

SEQ ID NO: 14246 - RNA, 17 nt, Artificial Sequence
  Synthetic oligonucleotide: CTLA4-960
aagugauuuaagaggga

SEQ ID NO: 14247 - RNA, 17 nt, Artificial Sequence
  Synthetic oligonucleotide: CTLA4-961
aaaggauagccauaguc

SEQ ID NO: 14248 - RNA, 17 nt, Artificial Sequence
  Synthetic oligonucleotide: CTLA4-962
cauaguccugaauacau

SEQ ID NO: 14249 - RNA, 17 nt, Artificial Sequence
  Synthetic oligonucleotide: CTLA4-963
uccugaauacauuugag

SEQ ID NO: 14250 - RNA, 17 nt, Artificial Sequence
  Synthetic oligonucleotide: CTLA4-964
acauuugagcuggguuu

SEQ ID NO: 14251 - RNA, 17 nt, Artificial Sequence
  Synthetic oligonucleotide: CTLA4-965
uugagcuggguuucagg

SEQ ID NO: 14252 - RNA, 20 nt, Artificial Sequence
  Synthetic oligonucleotide: CTLA4-966
cugagcccuugggcuaaugg

SEQ ID NO: 14253 - RNA, 20 nt, Artificial Sequence
  Synthetic oligonucleotide: CTLA4-967
gcugcuaacuuucugagccc

SEQ ID NO: 14254 - RNA, 20 nt, Artificial Sequence
  Synthetic oligonucleotide: CTLA4-968
acuacuaggcugcuaacuuu

SEQ ID NO: 14255 - RNA, 20 nt, Artificial Sequence
  Synthetic oligonucleotide: CTLA4-969
ucccaauuuuauucaaucuu

SEQ ID NO: 14256 - RNA, 20 nt, Artificial Sequence
  Synthetic oligonucleotide: CTLA4-970
uggagaauuuccuggaguac

SEQ ID NO: 14257 - RNA, 20 nt, Artificial Sequence
  Synthetic oligonucleotide: CTLA4-562
uggagacuuggagaauuucc

SEQ ID NO: 14258 - RNA, 20 nt, Artificial Sequence
  Synthetic oligonucleotide: CTLA4-972
guggagacuuggagaauuuc

SEQ ID NO: 14259 - RNA, 20 nt, Artificial Sequence
  Synthetic oligonucleotide: CTLA4-973
gauaacuaaguggagacuug

SEQ ID NO: 14260 - RNA, 20 nt, Artificial Sequence
  Synthetic oligonucleotide: CTLA4-561
uggauaacuaaguggagacu

SEQ ID NO: 14261 - RNA, 20 nt, Artificial Sequence
  Synthetic oligonucleotide: CTLA4-975
cuggauaacuaaguggagac

SEQ ID NO: 14262 - RNA, 20 nt, Artificial Sequence
  Synthetic oligonucleotide: CTLA4-560
ugaggaucuggauaacuaag

SEQ ID NO: 14263 - RNA, 20 nt, Artificial Sequence
  Synthetic oligonucleotide: CTLA4-977
uugaggaucuggauaacuaa

SEQ ID NO: 14264 - RNA, 20 nt, Artificial Sequence
  Synthetic oligonucleotide: CTLA4-978
uucauguucacuuugaggau

SEQ ID NO: 14265 - RNA, 20 nt, Artificial Sequence
  Synthetic oligonucleotide: CTLA4-979
ugaagcuucauguucacuuu

SEQ ID NO: 14266 - RNA, 20 nt, Artificial Sequence
  Synthetic oligonucleotide: CTLA4-980
acugaagcuucauguucacu

SEQ ID NO: 14267 - RNA, 20 nt, Artificial Sequence
  Synthetic oligonucleotide: CTLA4-981
aaaauguauucaauuugaaa

SEQ ID NO: 14268 - RNA, 20 nt, Artificial Sequence
  Synthetic oligonucleotide: CTLA4-982
ggauggaaaauguauucaau

SEQ ID NO: 14269 - RNA, 20 nt, Artificial Sequence
  Synthetic oligonucleotide: CTLA4-557
aaaacaagccaauccaugga

SEQ ID NO: 14270 - RNA, 20 nt, Artificial Sequence
  Synthetic oligonucleotide: CTLA4-984
caaaacaagccaauccaugg

SEQ ID NO: 14271 - RNA, 20 nt, Artificial Sequence
  Synthetic oligonucleotide: CTLA4-985
ugaacaaaacaagccaaucc

SEQ ID NO: 14272 - RNA, 20 nt, Artificial Sequence
  Synthetic oligonucleotide: CTLA4-986
agacaaccucaagcacucaa

SEQ ID NO: 14273 - RNA, 20 nt, Artificial Sequence
  Synthetic oligonucleotide: CTLA4-987
ccguggguuuagcuguuacg

SEQ ID NO: 14274 - RNA, 20 nt, Artificial Sequence
  Synthetic oligonucleotide: CTLA4-988
guuuuacgagaaaggaagcc

SEQ ID NO: 14275 - RNA, 20 nt, Artificial Sequence
  Synthetic oligonucleotide: CTLA4-553
uuguuuugguuuuacgagaa

SEQ ID NO: 14276 - RNA, 20 nt, Artificial Sequence
  Synthetic oligonucleotide: CTLA4-990
uuuguuuugguuuuacgaga

SEQ ID NO: 14277 - RNA, 20 nt, Artificial Sequence
  Synthetic oligonucleotide: CTLA4-991
ccuuuuuguuuugguuuuac

SEQ ID NO: 14278 - RNA, 20 nt, Artificial Sequence
  Synthetic oligonucleotide: CTLA4-992
agccuuuuuguuuugguuuu

SEQ ID NO: 14279 - RNA, 20 nt, Artificial Sequence
  Synthetic oligonucleotide: CTLA4-993
acacacagaaggcacuugaa

SEQ ID NO: 14280 - RNA, 20 nt, Artificial Sequence
  Synthetic oligonucleotide: CTLA4-994
ugugcacacacagaaggcac

SEQ ID NO: 14281 - RNA, 20 nt, Artificial Sequence
  Synthetic oligonucleotide: CTLA4-995
guauuacacaugugcacaca

SEQ ID NO: 14282 - RNA, 20 nt, Artificial Sequence
  Synthetic oligonucleotide: CTLA4-996
guuugaacccacacagaauc

SEQ ID NO: 14283 - RNA, 20 nt, Artificial Sequence
  Synthetic oligonucleotide: CTLA4-997
gaaauguguuugaacccaca

SEQ ID NO: 14284 - RNA, 20 nt, Artificial Sequence
  Synthetic oligonucleotide: CTLA4-998
ccugaagcuuugaaaugugu

SEQ ID NO: 14285 - RNA, 20 nt, Artificial Sequence
  Synthetic oligonucleotide: CTLA4-999
ccuuucaggauccugaagcu

SEQ ID NO: 14286 - RNA, 20 nt, Artificial Sequence
  Synthetic oligonucleotide: CTLA4-1000
gagcaaaaccuuucaggauc

SEQ ID NO: 14287 - RNA, 20 nt, Artificial Sequence
  Synthetic oligonucleotide: CTLA4-1001
ggaaguagagcaaaaccuuu

SEQ ID NO: 14288 - RNA, 20 nt, Artificial Sequence
  Synthetic oligonucleotide: CTLA4-1002
guguucaggucuucaggaag

SEQ ID NO: 14289 - RNA, 20 nt, Artificial Sequence
  Synthetic oligonucleotide: CTLA4-548
ggagcgguguucaggucuuc

SEQ ID NO: 14290 - RNA, 20 nt, Artificial Sequence
  Synthetic oligonucleotide: CTLA4-1004
gggagcgguguucaggucuu

SEQ ID NO: 14291 - RNA, 20 nt, Artificial Sequence
  Synthetic oligonucleotide: CTLA4-70
aaggcaagccauggcuuuau

SEQ ID NO: 14292 - RNA, 20 nt, Artificial Sequence
  Synthetic oligonucleotide: CTLA4-69
caaggcaagccauggcuuua

SEQ ID NO: 14293 - RNA, 20 nt, Artificial Sequence
  Synthetic oligonucleotide: CTLA4-278
ccaaggcaagccauggcuuu

SEQ ID NO: 14294 - RNA, 20 nt, Artificial Sequence
  Synthetic oligonucleotide: CTLA4-279
uucagcugagccuugugccg

SEQ ID NO: 14295 - RNA, 20 nt, Artificial Sequence
  Synthetic oligonucleotide: CTLA4-280
guccugguagccagguucag

SEQ ID NO: 14296 - RNA, 20 nt, Artificial Sequence
  Synthetic oligonucleotide: CTLA4-281
gaagaaaaaacaggagagug

SEQ ID NO: 14297 - RNA, 20 nt, Artificial Sequence
  Synthetic oligonucleotide: CTLA4-282
augaagagaagaaaaaacag

SEQ ID NO: 14298 - RNA, 20 nt, Artificial Sequence
  Synthetic oligonucleotide: CTLA4-61
ggaugaagagaagaaaaaac

SEQ ID NO: 14299 - RNA, 20 nt, Artificial Sequence
  Synthetic oligonucleotide: CTLA4-284
gggaugaagagaagaaaaaa

SEQ ID NO: 14300 - RNA, 20 nt, Artificial Sequence
  Synthetic oligonucleotide: CTLA4-285
cagaagacagggaugaagag

SEQ ID NO: 14301 - RNA, 20 nt, Artificial Sequence
  Synthetic oligonucleotide: CTLA4-286
uugcagaagacagggaugaa

SEQ ID NO: 14302 - RNA, 20 nt, Artificial Sequence
  Synthetic oligonucleotide: CTLA4-287
cuuugcagaagacagggaug

SEQ ID NO: 14303 - RNA, 20 nt, Artificial Sequence
  Synthetic oligonucleotide: CTLA4-288
caccuuugcagaagacaggg

SEQ ID NO: 14304 - RNA, 20 nt, Artificial Sequence
  Synthetic oligonucleotide: CTLA4-59
cacucaccuuugcagaagac

SEQ ID NO: 14305 - RNA, 20 nt, Artificial Sequence
  Synthetic oligonucleotide: CTLA4-290
ucacucaccuuugcagaaga

SEQ ID NO: 14306 - RNA, 20 nt, Artificial Sequence
  Synthetic oligonucleotide: CTLA4-291
aaaagucucacucaccuuug

SEQ ID NO: 14307 - RNA, 20 nt, Artificial Sequence
  Synthetic oligonucleotide: CTLA4-1021
aacaaaugaaacccagguag

SEQ ID NO: 14308 - RNA, 20 nt, Artificial Sequence
  Synthetic oligonucleotide: CTLA4-533
gaaacaaaugaaacccaggu

SEQ ID NO: 14309 - RNA, 20 nt, Artificial Sequence
  Synthetic oligonucleotide: CTLA4-1023
ugaaacaaaugaaacccagg

SEQ ID NO: 14310 - RNA, 20 nt, Artificial Sequence
  Synthetic oligonucleotide: CTLA4-1024
gccuuugacugcugaaacaa

SEQ ID NO: 14311 - RNA, 20 nt, Artificial Sequence
  Synthetic oligonucleotide: CTLA4-1025
uaaaucacugccuuugacug

SEQ ID NO: 14312 - RNA, 20 nt, Artificial Sequence
  Synthetic oligonucleotide: CTLA4-530
cagagccagccaagccagau

SEQ ID NO: 14313 - RNA, 20 nt, Artificial Sequence
  Synthetic oligonucleotide: CTLA4-1027
acagagccagccaagccaga

SEQ ID NO: 14314 - RNA, 20 nt, Artificial Sequence
  Synthetic oligonucleotide: CTLA4-1028
ucccugcuggcccuggaaua

SEQ ID NO: 14315 - RNA, 20 nt, Artificial Sequence
  Synthetic oligonucleotide: CTLA4-529
caacugcucccugcuggccc

SEQ ID NO: 14316 - RNA, 20 nt, Artificial Sequence
  Synthetic oligonucleotide: CTLA4-1030
ccaacugcucccugcuggcc

SEQ ID NO: 14317 - RNA, 20 nt, Artificial Sequence
  Synthetic oligonucleotide: CTLA4-1031
uaaauaccuggcgcucuguu

SEQ ID NO: 14318 - RNA, 20 nt, Artificial Sequence
  Synthetic oligonucleotide: CTLA4-1032
aaaccaacucacaugcauuc

SEQ ID NO: 14319 - RNA, 20 nt, Artificial Sequence
  Synthetic oligonucleotide: CTLA4-1033
uuccagucucauagaagggu

SEQ ID NO: 14320 - RNA, 20 nt, Artificial Sequence
  Synthetic oligonucleotide: CTLA4-1034
aaucacuuccagucucauag

SEQ ID NO: 14321 - RNA, 20 nt, Artificial Sequence
  Synthetic oligonucleotide: CTLA4-1035
uuaaaucacuuccagucuca

SEQ ID NO: 14322 - RNA, 20 nt, Artificial Sequence
  Synthetic oligonucleotide: CTLA4-1036
aaacccagcucaaauguauu

SEQ ID NO: 14323 - RNA, 20 nt, Artificial Sequence
  Synthetic oligonucleotide: CTLA4-1037
aaggaacuugugagcucauc

SEQ ID NO: 14324 - RNA, 20 nt, Artificial Sequence
  Synthetic oligonucleotide: CTLA4-1038
aauuuuuuuuaaaggaacuu

SEQ ID NO: 14325 - RNA, 20 nt, Artificial Sequence
  Synthetic oligonucleotide: CTLA4-1039
aagucaauuuuuuuuaaagg

SEQ ID NO: 14326 - RNA, 20 nt, Artificial Sequence
  Synthetic oligonucleotide: CTLA4-1039
aagucaauuuuuuuuaaagg

SEQ ID NO: 14327 - RNA, 17 nt, Artificial Sequence
  Synthetic oligonucleotide: CTLA4-1041
agcccuugggcuaaugg

SEQ ID NO: 14328 - RNA, 17 nt, Artificial Sequence
  Synthetic oligonucleotide: CTLA4-1042
gcuaacuuucugagccc

SEQ ID NO: 14329 - RNA, 17 nt, Artificial Sequence
  Synthetic oligonucleotide: CTLA4-1043
acuaggcugcuaacuuu

SEQ ID NO: 14330 - RNA, 17 nt, Artificial Sequence
  Synthetic oligonucleotide: CTLA4-1044
caauuuuauucaaucuu

SEQ ID NO: 14331 - RNA, 17 nt, Artificial Sequence
  Synthetic oligonucleotide: CTLA4-1045
agaauuuccuggaguac

SEQ ID NO: 14332 - RNA, 17 nt, Artificial Sequence
  Synthetic oligonucleotide: CTLA4-674
agacuuggagaauuucc

SEQ ID NO: 14333 - RNA, 17 nt, Artificial Sequence
  Synthetic oligonucleotide: CTLA4-1047
gagacuuggagaauuuc

SEQ ID NO: 14334 - RNA, 17 nt, Artificial Sequence
  Synthetic oligonucleotide: CTLA4-1048
aacuaaguggagacuug

SEQ ID NO: 14335 - RNA, 17 nt, Artificial Sequence
  Synthetic oligonucleotide: CTLA4-673
auaacuaaguggagacu

SEQ ID NO: 14336 - RNA, 17 nt, Artificial Sequence
  Synthetic oligonucleotide: CTLA4-1050
gauaacuaaguggagac

SEQ ID NO: 14337 - RNA, 17 nt, Artificial Sequence
  Synthetic oligonucleotide: CTLA4-672
ggaucuggauaacuaag

SEQ ID NO: 14338 - RNA, 17 nt, Artificial Sequence
  Synthetic oligonucleotide: CTLA4-1052
aggaucuggauaacuaa

SEQ ID NO: 14339 - RNA, 17 nt, Artificial Sequence
  Synthetic oligonucleotide: CTLA4-1053
auguucacuuugaggau

SEQ ID NO: 14340 - RNA, 17 nt, Artificial Sequence
  Synthetic oligonucleotide: CTLA4-1054
agcuucauguucacuuu

SEQ ID NO: 14341 - RNA, 17 nt, Artificial Sequence
  Synthetic oligonucleotide: CTLA4-1055
gaagcuucauguucacu

SEQ ID NO: 14342 - RNA, 17 nt, Artificial Sequence
  Synthetic oligonucleotide: CTLA4-1056
auguauucaauuugaaa

SEQ ID NO: 14343 - RNA, 17 nt, Artificial Sequence
  Synthetic oligonucleotide: CTLA4-1057
uggaaaauguauucaau

SEQ ID NO: 14344 - RNA, 17 nt, Artificial Sequence
  Synthetic oligonucleotide: CTLA4-669
acaagccaauccaugga

SEQ ID NO: 14345 - RNA, 17 nt, Artificial Sequence
  Synthetic oligonucleotide: CTLA4-1059
aacaagccaauccaugg

SEQ ID NO: 14346 - RNA, 17 nt, Artificial Sequence
  Synthetic oligonucleotide: CTLA4-1060
acaaaacaagccaaucc

SEQ ID NO: 14347 - RNA, 17 nt, Artificial Sequence
  Synthetic oligonucleotide: CTLA4-1061
caaccucaagcacucaa

SEQ ID NO: 14348 - RNA, 17 nt, Artificial Sequence
  Synthetic oligonucleotide: CTLA4-1062
uggguuuagcuguuacg

SEQ ID NO: 14349 - RNA, 17 nt, Artificial Sequence
  Synthetic oligonucleotide: CTLA4-1063
uuacgagaaaggaagcc

SEQ ID NO: 14350 - RNA, 17 nt, Artificial Sequence
  Synthetic oligonucleotide: CTLA4-665
uuuugguuuuacgagaa

SEQ ID NO: 14351 - RNA, 17 nt, Artificial Sequence
  Synthetic oligonucleotide: CTLA4-1065
guuuugguuuuacgaga

SEQ ID NO: 14352 - RNA, 17 nt, Artificial Sequence
  Synthetic oligonucleotide: CTLA4-1066
uuuuguuuugguuuuac

SEQ ID NO: 14353 - RNA, 17 nt, Artificial Sequence
  Synthetic oligonucleotide: CTLA4-1067
cuuuuuguuuugguuuu

SEQ ID NO: 14354 - RNA, 17 nt, Artificial Sequence
  Synthetic oligonucleotide: CTLA4-1068
cacagaaggcacuugaa

SEQ ID NO: 14355 - RNA, 17 nt, Artificial Sequence
  Synthetic oligonucleotide: CTLA4-1069
gcacacacagaaggcac

SEQ ID NO: 14356 - RNA, 17 nt, Artificial Sequence
  Synthetic oligonucleotide: CTLA4-1070
uuacacaugugcacaca

SEQ ID NO: 14357 - RNA, 17 nt, Artificial Sequence
  Synthetic oligonucleotide: CTLA4-1071
ugaacccacacagaauc

SEQ ID NO: 14358 - RNA, 17 nt, Artificial Sequence
  Synthetic oligonucleotide: CTLA4-1072
auguguuugaacccaca

SEQ ID NO: 14359 - RNA, 17 nt, Artificial Sequence
  Synthetic oligonucleotide: CTLA4-1073
gaagcuuugaaaugugu

SEQ ID NO: 14360 - RNA, 17 nt, Artificial Sequence
  Synthetic oligonucleotide: CTLA4-1074
uucaggauccugaagcu

SEQ ID NO: 14361 - RNA, 17 nt, Artificial Sequence
  Synthetic oligonucleotide: CTLA4-1075
caaaaccuuucaggauc

SEQ ID NO: 14362 - RNA, 17 nt, Artificial Sequence
  Synthetic oligonucleotide: CTLA4-1076
aguagagcaaaaccuuu

SEQ ID NO: 14363 - RNA, 17 nt, Artificial Sequence
  Synthetic oligonucleotide: CTLA4-1077
uucaggucuucaggaag

SEQ ID NO: 14364 - RNA, 17 nt, Artificial Sequence
  Synthetic oligonucleotide: CTLA4-660
gcgguguucaggucuuc

SEQ ID NO: 14365 - RNA, 17 nt, Artificial Sequence
  Synthetic oligonucleotide: CTLA4-1079
agcgguguucaggucuu

SEQ ID NO: 14366 - RNA, 17 nt, Artificial Sequence
  Synthetic oligonucleotide: CTLA4-142
gcaagccauggcuuuau

SEQ ID NO: 14367 - RNA, 17 nt, Artificial Sequence
  Synthetic oligonucleotide: CTLA4-141
ggcaagccauggcuuua

SEQ ID NO: 14368 - RNA, 17 nt, Artificial Sequence
  Synthetic oligonucleotide: CTLA4-313
aggcaagccauggcuuu

SEQ ID NO: 14369 - RNA, 17 nt, Artificial Sequence
  Synthetic oligonucleotide: CTLA4-314
agcugagccuugugccg

SEQ ID NO: 14370 - RNA, 17 nt, Artificial Sequence
  Synthetic oligonucleotide: CTLA4-315
cugguagccagguucag

SEQ ID NO: 14371 - RNA, 17 nt, Artificial Sequence
  Synthetic oligonucleotide: CTLA4-316
gaaaaaacaggagagug

SEQ ID NO: 14372 - RNA, 17 nt, Artificial Sequence
  Synthetic oligonucleotide: CTLA4-317
aagagaagaaaaaacag

SEQ ID NO: 14373 - RNA, 17 nt, Artificial Sequence
  Synthetic oligonucleotide: CTLA4-133
ugaagagaagaaaaaac

SEQ ID NO: 14374 - RNA, 17 nt, Artificial Sequence
  Synthetic oligonucleotide: CTLA4-319
augaagagaagaaaaaa

SEQ ID NO: 14375 - RNA, 17 nt, Artificial Sequence
  Synthetic oligonucleotide: CTLA4-320
aagacagggaugaagag

SEQ ID NO: 14376 - RNA, 17 nt, Artificial Sequence
  Synthetic oligonucleotide: CTLA4-321
cagaagacagggaugaa

SEQ ID NO: 14377 - RNA, 17 nt, Artificial Sequence
  Synthetic oligonucleotide: CTLA4-322
ugcagaagacagggaug

SEQ ID NO: 14378 - RNA, 17 nt, Artificial Sequence
  Synthetic oligonucleotide: CTLA4-323
cuuugcagaagacaggg

SEQ ID NO: 14379 - RNA, 17 nt, Artificial Sequence
  Synthetic oligonucleotide: CTLA4-131
ucaccuuugcagaagac

SEQ ID NO: 14380 - RNA, 17 nt, Artificial Sequence
  Synthetic oligonucleotide: CTLA4-325
cucaccuuugcagaaga

SEQ ID NO: 14381 - RNA, 17 nt, Artificial Sequence
  Synthetic oligonucleotide: CTLA4-326
agucucacucaccuuug

SEQ ID NO: 14382 - RNA, 17 nt, Artificial Sequence
  Synthetic oligonucleotide: CTLA4-1096
aaaugaaacccagguag

SEQ ID NO: 14383 - RNA, 17 nt, Artificial Sequence
  Synthetic oligonucleotide: CTLA4-645
acaaaugaaacccaggu

SEQ ID NO: 14384 - RNA, 17 nt, Artificial Sequence
  Synthetic oligonucleotide: CTLA4-1098
aacaaaugaaacccagg

SEQ ID NO: 14385 - RNA, 17 nt, Artificial Sequence
  Synthetic oligonucleotide: CTLA4-1099
uuugacugcugaaacaa

SEQ ID NO: 14386 - RNA, 17 nt, Artificial Sequence
  Synthetic oligonucleotide: CTLA4-1100
aucacugccuuugacug

SEQ ID NO: 14387 - RNA, 17 nt, Artificial Sequence
  Synthetic oligonucleotide: CTLA4-642
agccagccaagccagau

SEQ ID NO: 14388 - RNA, 17 nt, Artificial Sequence
  Synthetic oligonucleotide: CTLA4-1102
gagccagccaagccaga

SEQ ID NO: 14389 - RNA, 17 nt, Artificial Sequence
  Synthetic oligonucleotide: CTLA4-1103
cugcuggcccuggaaua

SEQ ID NO: 14390 - RNA, 17 nt, Artificial Sequence
  Synthetic oligonucleotide: CTLA4-641
cugcucccugcuggccc

SEQ ID NO: 14391 - RNA, 17 nt, Artificial Sequence
  Synthetic oligonucleotide: CTLA4-1105
acugcucccugcuggcc

SEQ ID NO: 14392 - RNA, 17 nt, Artificial Sequence
  Synthetic oligonucleotide: CTLA4-1106
auaccuggcgcucuguu

SEQ ID NO: 14393 - RNA, 17 nt, Artificial Sequence
  Synthetic oligonucleotide: CTLA4-1107
ccaacucacaugcauuc

SEQ ID NO: 14394 - RNA, 17 nt, Artificial Sequence
  Synthetic oligonucleotide: CTLA4-1108
cagucucauagaagggu

SEQ ID NO: 14395 - RNA, 17 nt, Artificial Sequence
  Synthetic oligonucleotide: CTLA4-1109
cacuuccagucucauag

SEQ ID NO: 14396 - RNA, 17 nt, Artificial Sequence
  Synthetic oligonucleotide: CTLA4-1110
aaucacuuccagucuca

SEQ ID NO: 14397 - RNA, 17 nt, Artificial Sequence
  Synthetic oligonucleotide: CTLA4-1111
cccagcucaaauguauu

SEQ ID NO: 14398 - RNA, 17 nt, Artificial Sequence
  Synthetic oligonucleotide: CTLA4-1112
gaacuugugagcucauc

SEQ ID NO: 14399 - RNA, 17 nt, Artificial Sequence
  Synthetic oligonucleotide: CTLA4-1113
uuuuuuuaaaggaacuu

SEQ ID NO: 14400 - RNA, 17 nt, Artificial Sequence
  Synthetic oligonucleotide: CTLA4-1114
aagucaauuuuuuuuaa

SEQ ID NO: 14401 - RNA, 20 nt, Artificial Sequence
  Synthetic oligonucleotide: CTLA4-1115
uucuuucuuuauuaaaaugu

SEQ ID NO: 14402 - RNA, 20 nt, Artificial Sequence
  Synthetic oligonucleotide: CTLA4-1116
uaugaaaacucuccagauuu

SEQ ID NO: 14403 - RNA, 20 nt, Artificial Sequence
  Synthetic oligonucleotide: CTLA4-684
augaaaacucuccagauuua

SEQ ID NO: 14404 - RNA, 20 nt, Artificial Sequence
  Synthetic oligonucleotide: CTLA4-1118
ucuacagcugucacaaauuu

SEQ ID NO: 14405 - RNA, 20 nt, Artificial Sequence
  Synthetic oligonucleotide: CTLA4-1119
guuauauuuaaucuucacuu

SEQ ID NO: 14406 - RNA, 20 nt, Artificial Sequence
  Synthetic oligonucleotide: CTLA4-1120
uucacuuuugaauuuucugc

SEQ ID NO: 14407 - RNA, 20 nt, Artificial Sequence
  Synthetic oligonucleotide: CTLA4-1121
ucugcuugaaaaauuuguau

SEQ ID NO: 14408 - RNA, 20 nt, Artificial Sequence
  Synthetic oligonucleotide: CTLA4-1122
aaaaaaaagucuauccuuuu

SEQ ID NO: 14409 - RNA, 20 nt, Artificial Sequence
  Synthetic oligonucleotide: CTLA4-1123
uuauggacggcucuaaucuc

SEQ ID NO: 14410 - RNA, 20 nt, Artificial Sequence
  Synthetic oligonucleotide: CTLA4-1124
gcucuaaucucuugaaucau

SEQ ID NO: 14411 - RNA, 20 nt, Artificial Sequence
  Synthetic oligonucleotide: CTLA4-1125
ucauuuggguuggcuuuucu

SEQ ID NO: 14412 - RNA, 20 nt, Artificial Sequence
  Synthetic oligonucleotide: CTLA4-1126
ucaacucuguuuugucucug

SEQ ID NO: 14413 - RNA, 20 nt, Artificial Sequence
  Synthetic oligonucleotide: CTLA4-1127
ucuguugaguuaaggcuuuu

SEQ ID NO: 14414 - RNA, 20 nt, Artificial Sequence
  Synthetic oligonucleotide: CTLA4-1128
guuaaggcuuuuaagaacac

SEQ ID NO: 14415 - RNA, 20 nt, Artificial Sequence
  Synthetic oligonucleotide: CTLA4-1129
auucuuuccuucugcaaaac

SEQ ID NO: 14416 - RNA, 20 nt, Artificial Sequence
  Synthetic oligonucleotide: CTLA4-1130
uucucuuaaccaaaugcuaa

SEQ ID NO: 14417 - RNA, 20 nt, Artificial Sequence
  Synthetic oligonucleotide: CTLA4-1131
aaccaaaugcuaaauggauu

SEQ ID NO: 14418 - RNA, 20 nt, Artificial Sequence
  Synthetic oligonucleotide: CTLA4-698
accaaaugcuaaauggauuu

SEQ ID NO: 14419 - RNA, 20 nt, Artificial Sequence
  Synthetic oligonucleotide: CTLA4-1133
caaaugcuaaauggauuuag

SEQ ID NO: 14420 - RNA, 20 nt, Artificial Sequence
  Synthetic oligonucleotide: CTLA4-1134
aacuuauuuguaaagcuguc

SEQ ID NO: 14421 - RNA, 20 nt, Artificial Sequence
  Synthetic oligonucleotide: CTLA4-699
acuuauuuguaaagcuguca

SEQ ID NO: 14422 - RNA, 20 nt, Artificial Sequence
  Synthetic oligonucleotide: CTLA4-1136
uaaagcugucaagggaccau

SEQ ID NO: 14423 - RNA, 20 nt, Artificial Sequence
  Synthetic oligonucleotide: CTLA4-1137
agcugucaagggaccauuag

SEQ ID NO: 14424 - RNA, 20 nt, Artificial Sequence
  Synthetic oligonucleotide: CTLA4-1138
gaaggauggugcuucacaga

SEQ ID NO: 14425 - RNA, 20 nt, Artificial Sequence
  Synthetic oligonucleotide: CTLA4-1139
aauucaagguuuuaaggucc

SEQ ID NO: 14426 - RNA, 20 nt, Artificial Sequence
  Synthetic oligonucleotide: CTLA4-1140
cggauucauauacuuuauaa

SEQ ID NO: 14427 - RNA, 20 nt, Artificial Sequence
  Synthetic oligonucleotide: CTLA4-1141
uagccagcuuguuuaaaaug

SEQ ID NO: 14428 - RNA, 20 nt, Artificial Sequence
  Synthetic oligonucleotide: CTLA4-706
agccagcuuguuuaaaaugu

SEQ ID NO: 14429 - RNA, 20 nt, Artificial Sequence
  Synthetic oligonucleotide: CTLA4-707
gccagcuuguuuaaaaugua

SEQ ID NO: 14430 - RNA, 20 nt, Artificial Sequence
  Synthetic oligonucleotide: CTLA4-1144
guuuaaaauguagggaaauu

SEQ ID NO: 14431 - RNA, 20 nt, Artificial Sequence
  Synthetic oligonucleotide: CTLA4-708
uuuaaaauguagggaaauug

SEQ ID NO: 14432 - RNA, 20 nt, Artificial Sequence
  Synthetic oligonucleotide: CTLA4-709
uuaaaauguagggaaauugu

SEQ ID NO: 14433 - RNA, 20 nt, Artificial Sequence
  Synthetic oligonucleotide: CTLA4-1147
aaauguagggaaauuguggg

SEQ ID NO: 14434 - RNA, 20 nt, Artificial Sequence
  Synthetic oligonucleotide: CTLA4-1148
aauuauuuaaaaauaaaagu

SEQ ID NO: 14435 - RNA, 20 nt, Artificial Sequence
  Synthetic oligonucleotide: CTLA4-1149
aauugccaaaaaaaaaagac

SEQ ID NO: 14436 - RNA, 20 nt, Artificial Sequence
  Synthetic oligonucleotide: CTLA4-712
auugccaaaaaaaaaagaca

SEQ ID NO: 14437 - RNA, 20 nt, Artificial Sequence
  Synthetic oligonucleotide: CTLA4-1151
caaaaaaaaaagacaaggaa

SEQ ID NO: 14438 - RNA, 20 nt, Artificial Sequence
  Synthetic oligonucleotide: CTLA4-713
aaaaaaaaaagacaaggaaa

SEQ ID NO: 14439 - RNA, 20 nt, Artificial Sequence
  Synthetic oligonucleotide: CTLA4-1153
aaaaaagacaaggaaaagga

SEQ ID NO: 14440 - RNA, 20 nt, Artificial Sequence
  Synthetic oligonucleotide: CTLA4-1154
aagacaaggaaaaggaaaga

SEQ ID NO: 14441 - RNA, 20 nt, Artificial Sequence
  Synthetic oligonucleotide: CTLA4-1155
aauuguugccugaccuacgu

SEQ ID NO: 14442 - RNA, 20 nt, Artificial Sequence
  Synthetic oligonucleotide: CTLA4-1156
auccucaguuuucagcucuu

SEQ ID NO: 14443 - RNA, 20 nt, Artificial Sequence
  Synthetic oligonucleotide: CTLA4-1157
uuguuacacggcuuaaaaug

SEQ ID NO: 14444 - RNA, 20 nt, Artificial Sequence
  Synthetic oligonucleotide: CTLA4-1158
uaaaaugaugaguauaucca

SEQ ID NO: 14445 - RNA, 20 nt, Artificial Sequence
  Synthetic oligonucleotide: CTLA4-1159
cucucuagaccuucuugguu

SEQ ID NO: 14446 - RNA, 20 nt, Artificial Sequence
  Synthetic oligonucleotide: CTLA4-1160
uaagaaaccauguaguuugu

SEQ ID NO: 14447 - RNA, 20 nt, Artificial Sequence
  Synthetic oligonucleotide: CTLA4-1161
auuugaugauuuaauuuuua

SEQ ID NO: 14448 - RNA, 20 nt, Artificial Sequence
  Synthetic oligonucleotide: CTLA4-721
uuugaugauuuaauuuuuac

SEQ ID NO: 14449 - RNA, 20 nt, Artificial Sequence
  Synthetic oligonucleotide: CTLA4-1163
ugaugauuuaauuuuuacug

SEQ ID NO: 14450 - RNA, 20 nt, Artificial Sequence
  Synthetic oligonucleotide: CTLA4-1164
ugauuuaauuuuuacuggag

SEQ ID NO: 14451 - RNA, 17 nt, Artificial Sequence
  Synthetic oligonucleotide: CTLA4-1165
uuucuuuauuaaaaugu

SEQ ID NO: 14452 - RNA, 17 nt, Artificial Sequence
  Synthetic oligonucleotide: CTLA4-1166
gaaaacucuccagauuu

SEQ ID NO: 14453 - RNA, 17 nt, Artificial Sequence
  Synthetic oligonucleotide: CTLA4-722
aaaacucuccagauuua

SEQ ID NO: 14454 - RNA, 17 nt, Artificial Sequence
  Synthetic oligonucleotide: CTLA4-1168
acagcugucacaaauuu

SEQ ID NO: 14455 - RNA, 17 nt, Artificial Sequence
  Synthetic oligonucleotide: CTLA4-1169
auauuuaaucuucacuu

SEQ ID NO: 14456 - RNA, 17 nt, Artificial Sequence
  Synthetic oligonucleotide: CTLA4-1170
acuuuugaauuuucugc

SEQ ID NO: 14457 - RNA, 17 nt, Artificial Sequence
  Synthetic oligonucleotide: CTLA4-1171
gcuugaaaaauuuguau

SEQ ID NO: 14458 - RNA, 17 nt, Artificial Sequence
  Synthetic oligonucleotide: CTLA4-1172
aaaaagucuauccuuuu

SEQ ID NO: 14459 - RNA, 17 nt, Artificial Sequence
  Synthetic oligonucleotide: CTLA4-1173
uggacggcucuaaucuc

SEQ ID NO: 14460 - RNA, 17 nt, Artificial Sequence
  Synthetic oligonucleotide: CTLA4-1174
cuaaucucuugaaucau

SEQ ID NO: 14461 - RNA, 17 nt, Artificial Sequence
  Synthetic oligonucleotide: CTLA4-1175
uuuggguuggcuuuucu

SEQ ID NO: 14462 - RNA, 17 nt, Artificial Sequence
  Synthetic oligonucleotide: CTLA4-1176
acucuguuuugucucug

SEQ ID NO: 14463 - RNA, 17 nt, Artificial Sequence
  Synthetic oligonucleotide: CTLA4-1177
guugaguuaaggcuuuu

SEQ ID NO: 14464 - RNA, 17 nt, Artificial Sequence
  Synthetic oligonucleotide: CTLA4-1178
aaggcuuuuaagaacac

SEQ ID NO: 14465 - RNA, 17 nt, Artificial Sequence
  Synthetic oligonucleotide: CTLA4-1179
cuuuccuucugcaaaac

SEQ ID NO: 14466 - RNA, 17 nt, Artificial Sequence
  Synthetic oligonucleotide: CTLA4-1180
ucuuaaccaaaugcuaa

SEQ ID NO: 14467 - RNA, 17 nt, Artificial Sequence
  Synthetic oligonucleotide: CTLA4-1181
caaaugcuaaauggauu

SEQ ID NO: 14468 - RNA, 17 nt, Artificial Sequence
  Synthetic oligonucleotide: CTLA4-736
aaaugcuaaauggauuu

SEQ ID NO: 14469 - RNA, 17 nt, Artificial Sequence
  Synthetic oligonucleotide: CTLA4-1183
augcuaaauggauuuag

SEQ ID NO: 14470 - RNA, 17 nt, Artificial Sequence
  Synthetic oligonucleotide: CTLA4-1184
uuauuuguaaagcuguc

SEQ ID NO: 14471 - RNA, 17 nt, Artificial Sequence
  Synthetic oligonucleotide: CTLA4-737
uauuuguaaagcuguca

SEQ ID NO: 14472 - RNA, 17 nt, Artificial Sequence
  Synthetic oligonucleotide: CTLA4-1186
agcugucaagggaccau

SEQ ID NO: 14473 - RNA, 17 nt, Artificial Sequence
  Synthetic oligonucleotide: CTLA4-1187
ugucaagggaccauuag

SEQ ID NO: 14474 - RNA, 17 nt, Artificial Sequence
  Synthetic oligonucleotide: CTLA4-1188
ggauggugcuucacaga

SEQ ID NO: 14475 - RNA, 17 nt, Artificial Sequence
  Synthetic oligonucleotide: CTLA4-1189
ucaagguuuuaaggucc

SEQ ID NO: 14476 - RNA, 17 nt, Artificial Sequence
  Synthetic oligonucleotide: CTLA4-1190
auucauauacuuuauaa

SEQ ID NO: 14477 - RNA, 17 nt, Artificial Sequence
  Synthetic oligonucleotide: CTLA4-1191
ccagcuuguuuaaaaug

SEQ ID NO: 14478 - RNA, 17 nt, Artificial Sequence
  Synthetic oligonucleotide: CTLA4-744
cagcuuguuuaaaaugu

SEQ ID NO: 14479 - RNA, 17 nt, Artificial Sequence
  Synthetic oligonucleotide: CTLA4-745
agcuuguuuaaaaugua

SEQ ID NO: 14480 - RNA, 17 nt, Artificial Sequence
  Synthetic oligonucleotide: CTLA4-1194
uaaaauguagggaaauu

SEQ ID NO: 14481 - RNA, 17 nt, Artificial Sequence
  Synthetic oligonucleotide: CTLA4-746
aaaauguagggaaauug

SEQ ID NO: 14482 - RNA, 17 nt, Artificial Sequence
  Synthetic oligonucleotide: CTLA4-747
aaauguagggaaauugu

SEQ ID NO: 14483 - RNA, 17 nt, Artificial Sequence
  Synthetic oligonucleotide: CTLA4-1197
uguagggaaauuguggg

SEQ ID NO: 14484 - RNA, 17 nt, Artificial Sequence
  Synthetic oligonucleotide: CTLA4-1198
uauuuaaaaauaaaagu

SEQ ID NO: 14485 - RNA, 17 nt, Artificial Sequence
  Synthetic oligonucleotide: CTLA4-1199
ugccaaaaaaaaaagac

SEQ ID NO: 14486 - RNA, 17 nt, Artificial Sequence
  Synthetic oligonucleotide: CTLA4-750
gccaaaaaaaaaagaca

SEQ ID NO: 14487 - RNA, 17 nt, Artificial Sequence
  Synthetic oligonucleotide: CTLA4-1201
aaaaaaaagacaaggaa

SEQ ID NO: 14488 - RNA, 17 nt, Artificial Sequence
  Synthetic oligonucleotide: CTLA4-751
aaaaaaagacaaggaaa

SEQ ID NO: 14489 - RNA, 17 nt, Artificial Sequence
  Synthetic oligonucleotide: CTLA4-1203
aaagacaaggaaaagga

SEQ ID NO: 14490 - RNA, 17 nt, Artificial Sequence
  Synthetic oligonucleotide: CTLA4-1204
acaaggaaaaggaaaga

SEQ ID NO: 14491 - RNA, 17 nt, Artificial Sequence
  Synthetic oligonucleotide: CTLA4-1205
uguugccugaccuacgu

SEQ ID NO: 14492 - RNA, 17 nt, Artificial Sequence
  Synthetic oligonucleotide: CTLA4-1206
cucaguuuucagcucuu

SEQ ID NO: 14493 - RNA, 17 nt, Artificial Sequence
  Synthetic oligonucleotide: CTLA4-1207
uuacacggcuuaaaaug

SEQ ID NO: 14494 - RNA, 17 nt, Artificial Sequence
  Synthetic oligonucleotide: CTLA4-1208
aaugaugaguauaucca

SEQ ID NO: 14495 - RNA, 17 nt, Artificial Sequence
  Synthetic oligonucleotide: CTLA4-1209
ucuagaccuucuugguu

SEQ ID NO: 14496 - RNA, 17 nt, Artificial Sequence
  Synthetic oligonucleotide: CTLA4-1210
gaaaccauguaguuugu

SEQ ID NO: 14497 - RNA, 17 nt, Artificial Sequence
  Synthetic oligonucleotide: CTLA4-1211
ugaugauuuaauuuuua

SEQ ID NO: 14498 - RNA, 17 nt, Artificial Sequence
  Synthetic oligonucleotide: CTLA4-759
gaugauuuaauuuuuac

SEQ ID NO: 14499 - RNA, 17 nt, Artificial Sequence
  Synthetic oligonucleotide: CTLA4-1213
ugauuuaauuuuuacug

SEQ ID NO: 14500 - RNA, 17 nt, Artificial Sequence
  Synthetic oligonucleotide: CTLA4-1214
uuuaauuuuuacuggag

SEQ ID NO: 14501 - RNA, 20 nt, Artificial Sequence
  Synthetic oligonucleotide: CTLA4-762
aauaaagaaagaaacauuca

SEQ ID NO: 14502 - RNA, 20 nt, Artificial Sequence
  Synthetic oligonucleotide: CTLA4-1216
uaauaaagaaagaaacauuc

SEQ ID NO: 14503 - RNA, 20 nt, Artificial Sequence
  Synthetic oligonucleotide: CTLA4-1217
uucauacauuuuaauaaaga

SEQ ID NO: 14504 - RNA, 20 nt, Artificial Sequence
  Synthetic oligonucleotide: CTLA4-1218
aguuuucauacauuuuaaua

SEQ ID NO: 14505 - RNA, 20 nt, Artificial Sequence
  Synthetic oligonucleotide: CTLA4-1219
gaggaccuuccuuaaaucug

SEQ ID NO: 14506 - RNA, 20 nt, Artificial Sequence
  Synthetic oligonucleotide: CTLA4-763
uugaggaccuuccuuaaauc

SEQ ID NO: 14507 - RNA, 20 nt, Artificial Sequence
  Synthetic oligonucleotide: CTLA4-1221
auugaggaccuuccuuaaau

SEQ ID NO: 14508 - RNA, 20 nt, Artificial Sequence
  Synthetic oligonucleotide: CTLA4-1222
caaaaagaauuugaaacauu

SEQ ID NO: 14509 - RNA, 20 nt, Artificial Sequence
  Synthetic oligonucleotide: CTLA4-1223
aacaaaaagaauuugaaaca

SEQ ID NO: 14510 - RNA, 20 nt, Artificial Sequence
  Synthetic oligonucleotide: CTLA4-1224
aaugaucuaacaaaaagaau

SEQ ID NO: 14511 - RNA, 20 nt, Artificial Sequence
  Synthetic oligonucleotide: CTLA4-1225
aggaccaaugaucuaacaaa

SEQ ID NO: 14512 - RNA, 20 nt, Artificial Sequence
  Synthetic oligonucleotide: CTLA4-1226
aaauuugugacagcuguaga

SEQ ID NO: 14513 - RNA, 20 nt, Artificial Sequence
  Synthetic oligonucleotide: CTLA4-1227
aagugaagauuaaauauaac

SEQ ID NO: 14514 - RNA, 20 nt, Artificial Sequence
  Synthetic oligonucleotide: CTLA4-1228
uucaagcagaaaauucaaaa

SEQ ID NO: 14515 - RNA, 20 nt, Artificial Sequence
  Synthetic oligonucleotide: CTLA4-1229
ucuaauacaaauuuuucaag

SEQ ID NO: 14516 - RNA, 20 nt, Artificial Sequence
  Synthetic oligonucleotide: CTLA4-1230
gagauuagagccguccauaa

SEQ ID NO: 14517 - RNA, 20 nt, Artificial Sequence
  Synthetic oligonucleotide: CTLA4-1231
acccaaaugauucaagagau

SEQ ID NO: 14518 - RNA, 20 nt, Artificial Sequence
  Synthetic oligonucleotide: CTLA4-1232
aaagccaacccaaaugauuc

SEQ ID NO: 14519 - RNA, 20 nt, Artificial Sequence
  Synthetic oligonucleotide: CTLA4-1233
acagaguugaagaaggucca

SEQ ID NO: 14520 - RNA, 20 nt, Artificial Sequence
  Synthetic oligonucleotide: CTLA4-1234
acagagacaaaacagaguug

SEQ ID NO: 14521 - RNA, 20 nt, Artificial Sequence
  Synthetic oligonucleotide: CTLA4-1235
ucaacagagacaaaacagag

SEQ ID NO: 14522 - RNA, 20 nt, Artificial Sequence
  Synthetic oligonucleotide: CTLA4-1236
uuaacucaacagagacaaaa

SEQ ID NO: 14523 - RNA, 20 nt, Artificial Sequence
  Synthetic oligonucleotide: CTLA4-1237
ucuuaaaagccuuaacucaa

SEQ ID NO: 14524 - RNA, 20 nt, Artificial Sequence
  Synthetic oligonucleotide: CTLA4-1238
ccucugguuuugcagaagga

SEQ ID NO: 14525 - RNA, 20 nt, Artificial Sequence
  Synthetic oligonucleotide: CTLA4-769
gcugccucugguuuugcaga

SEQ ID NO: 14526 - RNA, 20 nt, Artificial Sequence
  Synthetic oligonucleotide: CTLA4-1240
agcugccucugguuuugcag

SEQ ID NO: 14527 - RNA, 20 nt, Artificial Sequence
  Synthetic oligonucleotide: CTLA4-1241
agaagcugccucugguuuug

SEQ ID NO: 14528 - RNA, 20 nt, Artificial Sequence
  Synthetic oligonucleotide: CTLA4-1242
uaaacugaaaauaggcggaa

SEQ ID NO: 14529 - RNA, 20 nt, Artificial Sequence
  Synthetic oligonucleotide: CTLA4-771
agaaauaaacugaaaauagg

SEQ ID NO: 14530 - RNA, 20 nt, Artificial Sequence
  Synthetic oligonucleotide: CTLA4-1244
aagaaauaaacugaaaauag

SEQ ID NO: 14531 - RNA, 20 nt, Artificial Sequence
  Synthetic oligonucleotide: CTLA4-1245
cuaaaaucacaagaaauaaa

SEQ ID NO: 14532 - RNA, 20 nt, Artificial Sequence
  Synthetic oligonucleotide: CTLA4-1246
gagaaaaaaacuaaaaucac

SEQ ID NO: 14533 - RNA, 20 nt, Artificial Sequence
  Synthetic oligonucleotide: CTLA4-1247
uccauuuagcauuugguuaa

SEQ ID NO: 14534 - RNA, 20 nt, Artificial Sequence
  Synthetic oligonucleotide: CTLA4-1248
aauccauuuagcauuugguu

SEQ ID NO: 14535 - RNA, 20 nt, Artificial Sequence
  Synthetic oligonucleotide: CTLA4-1249
auaaaaacuguauucuaucu

SEQ ID NO: 14536 - RNA, 20 nt, Artificial Sequence
  Synthetic oligonucleotide: CTLA4-1250
uauagcaaaaaaacucuucc

SEQ ID NO: 14537 - RNA, 20 nt, Artificial Sequence
  Synthetic oligonucleotide: CTLA4-1251
aauccgaggaccuuaaaacc

SEQ ID NO: 14538 - RNA, 20 nt, Artificial Sequence
  Synthetic oligonucleotide: CTLA4-1252
uuuauaaaguauaugaaucc

SEQ ID NO: 14539 - RNA, 20 nt, Artificial Sequence
  Synthetic oligonucleotide: CTLA4-1253
cauuuauaaaguauaugaau

SEQ ID NO: 14540 - RNA, 20 nt, Artificial Sequence
  Synthetic oligonucleotide: CTLA4-1254
cuaauucauuuauaaaguau

SEQ ID NO: 14541 - RNA, 20 nt, Artificial Sequence
  Synthetic oligonucleotide: CTLA4-1255
uuaaaaccuugaauuaagua

SEQ ID NO: 14542 - RNA, 20 nt, Artificial Sequence
  Synthetic oligonucleotide: CTLA4-1256
auuaagagaaccuuaaaacc

SEQ ID NO: 14543 - RNA, 20 nt, Artificial Sequence
  Synthetic oligonucleotide: CTLA4-1257
uagcuaguagaauugauuaa

SEQ ID NO: 14544 - RNA, 20 nt, Artificial Sequence
  Synthetic oligonucleotide: CTLA4-1258
auuagcuaguagaauugauu

SEQ ID NO: 14545 - RNA, 20 nt, Artificial Sequence
  Synthetic oligonucleotide: CTLA4-1259
auaauuggcuaauuagcuag

SEQ ID NO: 14546 - RNA, 20 nt, Artificial Sequence
  Synthetic oligonucleotide: CTLA4-1260
ugaaaacugaggaucugcau

SEQ ID NO: 14547 - RNA, 20 nt, Artificial Sequence
  Synthetic oligonucleotide: CTLA4-1261
ucucugaagagcugaaaacu

SEQ ID NO: 14548 - RNA, 20 nt, Artificial Sequence
  Synthetic oligonucleotide: CTLA4-1262
agucucugaagagcugaaaa

SEQ ID NO: 14549 - RNA, 20 nt, Artificial Sequence
  Synthetic oligonucleotide: CTLA4-1263
uggugucagucucugaagag

SEQ ID NO: 14550 - RNA, 20 nt, Artificial Sequence
  Synthetic oligonucleotide: CTLA4-1264
aaaccuggugucagucucug

SEQ ID NO: 14551 - RNA, 20 nt, Artificial Sequence
  Synthetic oligonucleotide: CTLA4-1265
aacaaaccuggugucagucu

SEQ ID NO: 14552 - RNA, 20 nt, Artificial Sequence
  Synthetic oligonucleotide: CTLA4-1266
agagauaagguugagauuca

SEQ ID NO: 14553 - RNA, 20 nt, Artificial Sequence
  Synthetic oligonucleotide: CTLA4-1267
aggucuagagagagauaagg

SEQ ID NO: 14554 - RNA, 20 nt, Artificial Sequence
  Synthetic oligonucleotide: CTLA4-1268
cuuaaccaagaaggucuaga

SEQ ID NO: 14555 - RNA, 20 nt, Artificial Sequence
  Synthetic oligonucleotide: CTLA4-1269
uucuuaaccaagaaggucua

SEQ ID NO: 14556 - RNA, 20 nt, Artificial Sequence
  Synthetic oligonucleotide: CTLA4-1270
guuucuuaaccaagaagguc

SEQ ID NO: 14557 - RNA, 20 nt, Artificial Sequence
  Synthetic oligonucleotide: CTLA4-1271
aacuacaugguuucuuaacc

SEQ ID NO: 14558 - RNA, 20 nt, Artificial Sequence
  Synthetic oligonucleotide: CTLA4-1272
auuaaaucaucaaauaucuu

SEQ ID NO: 14559 - RNA, 17 nt, Artificial Sequence
  Synthetic oligonucleotide: CTLA4-793
aaagaaagaaacauuca

SEQ ID NO: 14560 - RNA, 17 nt, Artificial Sequence
  Synthetic oligonucleotide: CTLA4-1274
uaaagaaagaaacauuc

SEQ ID NO: 14561 - RNA, 17 nt, Artificial Sequence
  Synthetic oligonucleotide: CTLA4-1275
auacauuuuaauaaaga

SEQ ID NO: 14562 - RNA, 17 nt, Artificial Sequence
  Synthetic oligonucleotide: CTLA4-1276
uuucauacauuuuaaua

SEQ ID NO: 14563 - RNA, 17 nt, Artificial Sequence
  Synthetic oligonucleotide: CTLA4-1277
gaccuuccuuaaaucug

SEQ ID NO: 14564 - RNA, 17 nt, Artificial Sequence
  Synthetic oligonucleotide: CTLA4-794
aggaccuuccuuaaauc

SEQ ID NO: 14565 - RNA, 17 nt, Artificial Sequence
  Synthetic oligonucleotide: CTLA4-1279
gaggaccuuccuuaaau

SEQ ID NO: 14566 - RNA, 17 nt, Artificial Sequence
  Synthetic oligonucleotide: CTLA4-1280
aaagaauuugaaacauu

SEQ ID NO: 14567 - RNA, 17 nt, Artificial Sequence
  Synthetic oligonucleotide: CTLA4-1281
aaaaagaauuugaaaca

SEQ ID NO: 14568 - RNA, 17 nt, Artificial Sequence
  Synthetic oligonucleotide: CTLA4-1282
gaucuaacaaaaagaau

SEQ ID NO: 14569 - RNA, 17 nt, Artificial Sequence
  Synthetic oligonucleotide: CTLA4-1283
accaaugaucuaacaaa

SEQ ID NO: 14570 - RNA, 17 nt, Artificial Sequence
  Synthetic oligonucleotide: CTLA4-1284
uuugugacagcuguaga

SEQ ID NO: 14571 - RNA, 17 nt, Artificial Sequence
  Synthetic oligonucleotide: CTLA4-1285
ugaagauuaaauauaac

SEQ ID NO: 14572 - RNA, 17 nt, Artificial Sequence
  Synthetic oligonucleotide: CTLA4-1286
aagcagaaaauucaaaa

SEQ ID NO: 14573 - RNA, 17 nt, Artificial Sequence
  Synthetic oligonucleotide: CTLA4-1287
aauacaaauuuuucaag

SEQ ID NO: 14574 - RNA, 17 nt, Artificial Sequence
  Synthetic oligonucleotide: CTLA4-1288
auuagagccguccauaa

SEQ ID NO: 14575 - RNA, 17 nt, Artificial Sequence
  Synthetic oligonucleotide: CTLA4-1289
caaaugauucaagagau

SEQ ID NO: 14576 - RNA, 17 nt, Artificial Sequence
  Synthetic oligonucleotide: CTLA4-1290
gccaacccaaaugauuc

SEQ ID NO: 14577 - RNA, 17 nt, Artificial Sequence
  Synthetic oligonucleotide: CTLA4-1291
gaguugaagaaggucca

SEQ ID NO: 14578 - RNA, 17 nt, Artificial Sequence
  Synthetic oligonucleotide: CTLA4-1292
gagacaaaacagaguug

SEQ ID NO: 14579 - RNA, 17 nt, Artificial Sequence
  Synthetic oligonucleotide: CTLA4-1293
acagagacaaaacagag

SEQ ID NO: 14580 - RNA, 17 nt, Artificial Sequence
  Synthetic oligonucleotide: CTLA4-1294
acucaacagagacaaaa

SEQ ID NO: 14581 - RNA, 17 nt, Artificial Sequence
  Synthetic oligonucleotide: CTLA4-1295
uaaaagccuuaacucaa

SEQ ID NO: 14582 - RNA, 17 nt, Artificial Sequence
  Synthetic oligonucleotide: CTLA4-1296
cugguuuugcagaagga

SEQ ID NO: 14583 - RNA, 17 nt, Artificial Sequence
  Synthetic oligonucleotide: CTLA4-800
gccucugguuuugcaga

SEQ ID NO: 14584 - RNA, 17 nt, Artificial Sequence
  Synthetic oligonucleotide: CTLA4-1298
ugccucugguuuugcag

SEQ ID NO: 14585 - RNA, 17 nt, Artificial Sequence
  Synthetic oligonucleotide: CTLA4-1299
agcugccucugguuuug

SEQ ID NO: 14586 - RNA, 17 nt, Artificial Sequence
  Synthetic oligonucleotide: CTLA4-1300
acugaaaauaggcggaa

SEQ ID NO: 14587 - RNA, 17 nt, Artificial Sequence
  Synthetic oligonucleotide: CTLA4-802
aauaaacugaaaauagg

SEQ ID NO: 14588 - RNA, 17 nt, Artificial Sequence
  Synthetic oligonucleotide: CTLA4-1302
aaauaaacugaaaauag

SEQ ID NO: 14589 - RNA, 17 nt, Artificial Sequence
  Synthetic oligonucleotide: CTLA4-1303
aaaucacaagaaauaaa

SEQ ID NO: 14590 - RNA, 17 nt, Artificial Sequence
  Synthetic oligonucleotide: CTLA4-1304
aaaaaaacuaaaaucac

SEQ ID NO: 14591 - RNA, 17 nt, Artificial Sequence
  Synthetic oligonucleotide: CTLA4-1305
auuuagcauuugguuaa

SEQ ID NO: 14592 - RNA, 17 nt, Artificial Sequence
  Synthetic oligonucleotide: CTLA4-1306
ccauuuagcauuugguu

SEQ ID NO: 14593 - RNA, 17 nt, Artificial Sequence
  Synthetic oligonucleotide: CTLA4-1307
aaaacuguauucuaucu

SEQ ID NO: 14594 - RNA, 17 nt, Artificial Sequence
  Synthetic oligonucleotide: CTLA4-1308
agcaaaaaaacucuucc

SEQ ID NO: 14595 - RNA, 17 nt, Artificial Sequence
  Synthetic oligonucleotide: CTLA4-1309
ccgaggaccuuaaaacc

SEQ ID NO: 14596 - RNA, 17 nt, Artificial Sequence
  Synthetic oligonucleotide: CTLA4-1310
auaaaguauaugaaucc

SEQ ID NO: 14597 - RNA, 17 nt, Artificial Sequence
  Synthetic oligonucleotide: CTLA4-1311
uuauaaaguauaugaau

SEQ ID NO: 14598 - RNA, 17 nt, Artificial Sequence
  Synthetic oligonucleotide: CTLA4-1312
auucauuuauaaaguau

SEQ ID NO: 14599 - RNA, 17 nt, Artificial Sequence
  Synthetic oligonucleotide: CTLA4-1313
aaaccuugaauuaagua

SEQ ID NO: 14600 - RNA, 17 nt, Artificial Sequence
  Synthetic oligonucleotide: CTLA4-1314
aagagaaccuuaaaacc

SEQ ID NO: 14601 - RNA, 17 nt, Artificial Sequence
  Synthetic oligonucleotide: CTLA4-1315
cuaguagaauugauuaa

SEQ ID NO: 14602 - RNA, 17 nt, Artificial Sequence
  Synthetic oligonucleotide: CTLA4-1316
agcuaguagaauugauu

SEQ ID NO: 14603 - RNA, 17 nt, Artificial Sequence
  Synthetic oligonucleotide: CTLA4-1317
auuggcuaauuagcuag

SEQ ID NO: 14604 - RNA, 17 nt, Artificial Sequence
  Synthetic oligonucleotide: CTLA4-1318
aaacugaggaucugcau

SEQ ID NO: 14605 - RNA, 17 nt, Artificial Sequence
  Synthetic oligonucleotide: CTLA4-1319
cugaagagcugaaaacu

SEQ ID NO: 14606 - RNA, 17 nt, Artificial Sequence
  Synthetic oligonucleotide: CTLA4-1320
cucugaagagcugaaaa

SEQ ID NO: 14607 - RNA, 17 nt, Artificial Sequence
  Synthetic oligonucleotide: CTLA4-1321
ugucagucucugaagag

SEQ ID NO: 14608 - RNA, 17 nt, Artificial Sequence
  Synthetic oligonucleotide: CTLA4-1322
ccuggugucagucucug

SEQ ID NO: 14609 - RNA, 17 nt, Artificial Sequence
  Synthetic oligonucleotide: CTLA4-1323
aaaccuggugucagucu

SEQ ID NO: 14610 - RNA, 17 nt, Artificial Sequence
  Synthetic oligonucleotide: CTLA4-1324
gauaagguugagauuca

SEQ ID NO: 14611 - RNA, 17 nt, Artificial Sequence
  Synthetic oligonucleotide: CTLA4-1325
ucuagagagagauaagg

SEQ ID NO: 14612 - RNA, 17 nt, Artificial Sequence
  Synthetic oligonucleotide: CTLA4-1326
aaccaagaaggucuaga

SEQ ID NO: 14613 - RNA, 17 nt, Artificial Sequence
  Synthetic oligonucleotide: CTLA4-1327
uuaaccaagaaggucua

SEQ ID NO: 14614 - RNA, 17 nt, Artificial Sequence
  Synthetic oligonucleotide: CTLA4-1328
ucuuaaccaagaagguc

SEQ ID NO: 14615 - RNA, 17 nt, Artificial Sequence
  Synthetic oligonucleotide: CTLA4-1329
uacaugguuucuuaacc

SEQ ID NO: 14616 - RNA, 17 nt, Artificial Sequence
  Synthetic oligonucleotide: CTLA4-1330
aaaucaucaaauaucuu

SEQ ID NO: 14617 - RNA, 20 nt, Artificial Sequence
  Synthetic oligonucleotide: CTLA4-1331
cuggaugguuaaggaugccc

SEQ ID NO: 14618 - RNA, 20 nt, Artificial Sequence
  Synthetic oligonucleotide: CTLA4-833
gcccagaagauugaauaaaa

SEQ ID NO: 14619 - RNA, 20 nt, Artificial Sequence
  Synthetic oligonucleotide: CTLA4-1333
aauugaauacauuuuccauc

SEQ ID NO: 14620 - RNA, 20 nt, Artificial Sequence
  Synthetic oligonucleotide: CTLA4-1334
caaagcuaucuauauaaagu

SEQ ID NO: 14621 - RNA, 20 nt, Artificial Sequence
  Synthetic oligonucleotide: CTLA4-1370
cccauaaagccauggcuugc

SEQ ID NO: 14622 - RNA, 20 nt, Artificial Sequence
  Synthetic oligonucleotide: CTLA4-1336
uuuguuucagcagucaaagg

SEQ ID NO: 14623 - RNA, 20 nt, Artificial Sequence
  Synthetic oligonucleotide: CTLA4-1337
agacccuucuaugagacugg

SEQ ID NO: 14624 - RNA, 17 nt, Artificial Sequence
  Synthetic oligonucleotide: CTLA4-1338
gaugguuaaggaugccc

SEQ ID NO: 14625 - RNA, 17 nt, Artificial Sequence
  Synthetic oligonucleotide: CTLA4-905
cagaagauugaauaaaa

SEQ ID NO: 14626 - RNA, 17 nt, Artificial Sequence
  Synthetic oligonucleotide: CTLA4-1340
ugaauacauuuuccauc

SEQ ID NO: 14627 - RNA, 17 nt, Artificial Sequence
  Synthetic oligonucleotide: CTLA4-1341
agcuaucuauauaaagu

SEQ ID NO: 14628 - RNA, 17 nt, Artificial Sequence
  Synthetic oligonucleotide: CTLA4-452
auaaagccauggcuugc

SEQ ID NO: 14629 - RNA, 17 nt, Artificial Sequence
  Synthetic oligonucleotide: CTLA4-1343
guuucagcagucaaagg

SEQ ID NO: 14630 - RNA, 17 nt, Artificial Sequence
  Synthetic oligonucleotide: CTLA4-1344
cccuucuaugagacugg

SEQ ID NO: 14631 - RNA, 20 nt, Artificial Sequence
  Synthetic oligonucleotide: CTLA4-1345
ucugagcccuugggcuaaug

SEQ ID NO: 14632 - RNA, 20 nt, Artificial Sequence
  Synthetic oligonucleotide: CTLA4-1346
uggaauacagagccagccaa

SEQ ID NO: 14633 - RNA, 17 nt, Artificial Sequence
  Synthetic oligonucleotide: CTLA4-1347
gagcccuugggcuaaug

SEQ ID NO: 14634 - RNA, 17 nt, Artificial Sequence
  Synthetic oligonucleotide: CTLA4-1348
aauacagagccagccaa

SEQ ID NO: 14635 - RNA, 20 nt, Artificial Sequence
  Synthetic oligonucleotide: CTLA4-1349
auuaaaauguaugaaaacuc

SEQ ID NO: 14636 - RNA, 20 nt, Artificial Sequence
  Synthetic oligonucleotide: CTLA4-1350
gccuauuuucaguuuauuuc

SEQ ID NO: 14637 - RNA, 20 nt, Artificial Sequence
  Synthetic oligonucleotide: CTLA4-1351
uuucucuuaaccaaaugcua

SEQ ID NO: 14638 - RNA, 17 nt, Artificial Sequence
  Synthetic oligonucleotide: CTLA4-1352
aaaauguaugaaaacuc

SEQ ID NO: 14639 - RNA, 17 nt, Artificial Sequence
  Synthetic oligonucleotide: CTLA4-1353
uauuuucaguuuauuuc

SEQ ID NO: 14640 - RNA, 17 nt, Artificial Sequence
  Synthetic oligonucleotide: CTLA4-1354
cucuuaaccaaaugcua

SEQ ID NO: 14641 - RNA, 20 nt, Artificial Sequence
  Synthetic oligonucleotide: CTLA4-1355
caauucaagguuuuaagguc

SEQ ID NO: 14642 - RNA, 20 nt, Artificial Sequence
  Synthetic oligonucleotide: CTLA4-1356
guagguacucaaaagauauu

SEQ ID NO: 14643 - RNA, 17 nt, Artificial Sequence
  Synthetic oligonucleotide: CTLA4-1357
uucaagguuuuaagguc

SEQ ID NO: 14644 - RNA, 17 nt, Artificial Sequence
  Synthetic oligonucleotide: CTLA4-1358
gguacucaaaagauauu

SEQ ID NO: 14645 - RNA, 20 nt, Artificial Sequence
  Synthetic oligonucleotide: CTLA4-1359
ucaagcagaaaauucaaaag

SEQ ID NO: 14646 - RNA, 20 nt, Artificial Sequence
  Synthetic oligonucleotide: CTLA4-1232
aaagccaacccaaaugauuc

SEQ ID NO: 14647 - RNA, 20 nt, Artificial Sequence
  Synthetic oligonucleotide: CTLA4-1361
guccaaagaaaagccaaccc

SEQ ID NO: 14648 - RNA, 17 nt, Artificial Sequence
  Synthetic oligonucleotide: CTLA4-1362
agcagaaaauucaaaag

SEQ ID NO: 14649 - RNA, 17 nt, Artificial Sequence
  Synthetic oligonucleotide: CTLA4-1290
gccaacccaaaugauuc

SEQ ID NO: 14650 - RNA, 17 nt, Artificial Sequence
  Synthetic oligonucleotide: CTLA4-1364
caaagaaaagccaaccc

SEQ ID NO: 14651 - RNA, 20 nt, Artificial Sequence
  Synthetic oligonucleotide: CTLA4-1365
guauagcaaaaaaacucuuc

SEQ ID NO: 14652 - RNA, 20 nt, Artificial Sequence
  Synthetic oligonucleotide: CTLA4-1366
auuggcuaauuagcuaguag

SEQ ID NO: 14653 - RNA, 20 nt, Artificial Sequence
  Synthetic oligonucleotide: CTLA4-1267
aggucuagagagagauaagg

SEQ ID NO: 14654 - RNA, 17 nt, Artificial Sequence
  Synthetic oligonucleotide: CTLA4-1368
uagcaaaaaaacucuuc

SEQ ID NO: 14655 - RNA, 17 nt, Artificial Sequence
  Synthetic oligonucleotide: CTLA4-1369
ggcuaauuagcuaguag

SEQ ID NO: 14656 - RNA, 17 nt, Artificial Sequence
  Synthetic oligonucleotide: CTLA4-1325
ucuagagagagauaagg

SEQ ID NO: 14657 - RNA, 17 nt, Artificial Sequence
  Synthetic oligonucleotide: PDCD1-206
uucggucaccacgagca

SEQ ID NO: 14658 - RNA, 17 nt, Artificial Sequence
  Synthetic oligonucleotide: PDCD1-145
ccacaugagcgugguca

SEQ ID NO: 14659 - RNA, 17 nt, Artificial Sequence
  Synthetic oligonucleotide: PDCD1-131
cugcucguggugaccga

SEQ ID NO: 14660 - RNA, 17 nt, Artificial Sequence
  Synthetic oligonucleotide: PDCD1-193
gcugcgguccucgggga

SEQ ID NO: 14661 - RNA, 17 nt, Artificial Sequence
  Synthetic oligonucleotide: PDCD1-135
agagcuucgugcuaaac

SEQ ID NO: 14662 - RNA, 17 nt, Artificial Sequence
  Synthetic oligonucleotide: PDCD1-234
cugggcggugcuacaac

SEQ ID NO: 14663 - RNA, 17 nt, Artificial Sequence
  Synthetic oligonucleotide: PDCD1-249
agcaccgcccagacgac

SEQ ID NO: 14664 - RNA, 17 nt, Artificial Sequence
  Synthetic oligonucleotide: PDCD1-179
gccgcugucauugcgcc

SEQ ID NO: 14665 - RNA, 17 nt, Artificial Sequence
  Synthetic oligonucleotide: PDCD1-250
cgcccagacgacuggcc

SEQ ID NO: 14666 - RNA, 17 nt, Artificial Sequence
  Synthetic oligonucleotide: PDCD1-248
cuaccuaagaaccaucc

SEQ ID NO: 14667 - RNA, 17 nt, Artificial Sequence
  Synthetic oligonucleotide: PDCD1-185
cacggaagcggcagucc

SEQ ID NO: 14668 - RNA, 17 nt, Artificial Sequence
  Synthetic oligonucleotide: PDCD1-137
caaccagacggacaagc

SEQ ID NO: 14669 - RNA, 17 nt, Artificial Sequence
  Synthetic oligonucleotide: PDCD1-205
cuucggucaccacgagc

SEQ ID NO: 14670 - RNA, 17 nt, Artificial Sequence
  Synthetic oligonucleotide: PDCD1-178
ugccgcugucauugcgc

SEQ ID NO: 14671 - RNA, 17 nt, Artificial Sequence
  Synthetic oligonucleotide: PDCD1-196
cuuguccgucugguugc

SEQ ID NO: 14672 - RNA, 17 nt, Artificial Sequence
  Synthetic oligonucleotide: PDCD1-231
cgcccuggccagucguc

SEQ ID NO: 14673 - RNA, 17 nt, Artificial Sequence
  Synthetic oligonucleotide: PDCD1-144
uccacaugagcgugguc

SEQ ID NO: 14674 - RNA, 17 nt, Artificial Sequence
  Synthetic oligonucleotide: PDCD1-147
gcccggcgcaaugacag

SEQ ID NO: 14675 - RNA, 17 nt, Artificial Sequence
  Synthetic oligonucleotide: PDCD1-143
ugacuuccacaugagcg

SEQ ID NO: 14676 - RNA, 17 nt, Artificial Sequence
  Synthetic oligonucleotide: PDCD1-160
gacaggugcggccucgg

SEQ ID NO: 14677 - RNA, 17 nt, Artificial Sequence
  Synthetic oligonucleotide: PDCD1-180
cccugaccacgcucaug

SEQ ID NO: 14678 - RNA, 17 nt, Artificial Sequence
  Synthetic oligonucleotide: PDCD1-169
cucuuugaucugcgccu

SEQ ID NO: 14679 - RNA, 17 nt, Artificial Sequence
  Synthetic oligonucleotide: PDCD1-197
uuguccgucugguugcu

SEQ ID NO: 14680 - RNA, 17 nt, Artificial Sequence
  Synthetic oligonucleotide: PDCD1-181
guggaagucacgcccgu

SEQ ID NO: 14681 - RNA, 17 nt, Artificial Sequence
  Synthetic oligonucleotide: PDCD1-149
gcggcaccuaccucugu

SEQ ID NO: 14682 - RNA, 17 nt, Artificial Sequence
  Synthetic oligonucleotide: PDCD1-200
gaagcucuccgaugugu

SEQ ID NO: 14683 - RNA, 17 nt, Artificial Sequence
  Synthetic oligonucleotide: PDCD1-182
uggaagucacgcccguu

SEQ ID NO: 14684 - RNA, 20 nt, Artificial Sequence
  Synthetic oligonucleotide: PDCD1-14
cgugucacacaacugcccaa

SEQ ID NO: 14685 - RNA, 20 nt, Artificial Sequence
  Synthetic oligonucleotide: PDCD1-56
cguugggcaguugugugaca

SEQ ID NO: 14686 - RNA, 20 nt, Artificial Sequence
  Synthetic oligonucleotide: PDCD1-47
gaucugcgccuugggggcca

SEQ ID NO: 14687 - RNA, 20 nt, Artificial Sequence
  Synthetic oligonucleotide: PDCD1-124
accgcccagacgacuggcca

SEQ ID NO: 14688 - RNA, 20 nt, Artificial Sequence
  Synthetic oligonucleotide: PDCD1-79
cccuucggucaccacgagca

SEQ ID NO: 14689 - RNA, 20 nt, Artificial Sequence
  Synthetic oligonucleotide: PDCD1-18
cuuccacaugagcgugguca

SEQ ID NO: 14690 - RNA, 20 nt, Artificial Sequence
  Synthetic oligonucleotide: PDCD1-4
gcccugcucguggugaccga

SEQ ID NO: 14691 - RNA, 20 nt, Artificial Sequence
  Synthetic oligonucleotide: PDCD1-8
cggagagcuucgugcuaaac

SEQ ID NO: 14692 - RNA, 20 nt, Artificial Sequence
  Synthetic oligonucleotide: PDCD1-107
cgucugggcggugcuacaac

SEQ ID NO: 14693 - RNA, 20 nt, Artificial Sequence
  Synthetic oligonucleotide: PDCD1-15
gugucacacaacugcccaac

SEQ ID NO: 14694 - RNA, 20 nt, Artificial Sequence
  Synthetic oligonucleotide: PDCD1-122
uguagcaccgcccagacgac

SEQ ID NO: 14695 - RNA, 20 nt, Artificial Sequence
  Synthetic oligonucleotide: PDCD1-111
cuacaacugggcuggcggcc

SEQ ID NO: 14696 - RNA, 20 nt, Artificial Sequence
  Synthetic oligonucleotide: PDCD1-19
acaugagcguggucagggcc

SEQ ID NO: 14697 - RNA, 20 nt, Artificial Sequence
  Synthetic oligonucleotide: PDCD1-46
ugaucugcgccuugggggcc

SEQ ID NO: 14698 - RNA, 20 nt, Artificial Sequence
  Synthetic oligonucleotide: PDCD1-123
caccgcccagacgacuggcc

SEQ ID NO: 14699 - RNA, 20 nt, Artificial Sequence
  Synthetic oligonucleotide: PDCD1-60
cggaagcggcaguccuggcc

SEQ ID NO: 14700 - RNA, 20 nt, Artificial Sequence
  Synthetic oligonucleotide: PDCD1-121
caccuaccuaagaaccaucc

SEQ ID NO: 14701 - RNA, 20 nt, Artificial Sequence
  Synthetic oligonucleotide: PDCD1-78
ccccuucggucaccacgagc

SEQ ID NO: 14702 - RNA, 20 nt, Artificial Sequence
  Synthetic oligonucleotide: PDCD1-69
cagcuuguccgucugguugc

SEQ ID NO: 14703 - RNA, 20 nt, Artificial Sequence
  Synthetic oligonucleotide: PDCD1-64
ccgggcuggcugcgguccuc

SEQ ID NO: 14704 - RNA, 20 nt, Artificial Sequence
  Synthetic oligonucleotide: PDCD1-68
aggcggccagcuuguccguc

SEQ ID NO: 14705 - RNA, 20 nt, Artificial Sequence
  Synthetic oligonucleotide: PDCD1-104
aggcgcccuggccagucguc

SEQ ID NO: 14706 - RNA, 20 nt, Artificial Sequence
  Synthetic oligonucleotide: PDCD1-6
ccugcucguggugaccgaag

SEQ ID NO: 14707 - RNA, 20 nt, Artificial Sequence
  Synthetic oligonucleotide: PDCD1-20
agggcccggcgcaaugacag

SEQ ID NO: 14708 - RNA, 20 nt, Artificial Sequence
  Synthetic oligonucleotide: PDCD1-11
caagcuggccgccuuccccg

SEQ ID NO: 14709 - RNA, 20 nt, Artificial Sequence
  Synthetic oligonucleotide: PDCD1-16
gcgugacuuccacaugagcg

SEQ ID NO: 14710 - RNA, 20 nt, Artificial Sequence
  Synthetic oligonucleotide: PDCD1-33
ggugacaggugcggccucgg

SEQ ID NO: 14711 - RNA, 20 nt, Artificial Sequence
  Synthetic oligonucleotide: PDCD1-53
gggcccugaccacgcucaug

SEQ ID NO: 14712 - RNA, 20 nt, Artificial Sequence
  Synthetic oligonucleotide: PDCD1-71
gcuuguccgucugguugcug

SEQ ID NO: 14713 - RNA, 20 nt, Artificial Sequence
  Synthetic oligonucleotide: PDCD1-117
ggaugguucuuagguaggug

SEQ ID NO: 14714 - RNA, 20 nt, Artificial Sequence
  Synthetic oligonucleotide: PDCD1-108
gucugggcggugcuacaacu

SEQ ID NO: 14715 - RNA, 20 nt, Artificial Sequence
  Synthetic oligonucleotide: PDCD1-42
gcucucuuugaucugcgccu

SEQ ID NO: 14716 - RNA, 20 nt, Artificial Sequence
  Synthetic oligonucleotide: PDCD1-81
cggucaccacgagcagggcu

SEQ ID NO: 14717 - RNA, 20 nt, Artificial Sequence
  Synthetic oligonucleotide: PDCD1-105
ggcgcccuggccagucgucu

SEQ ID NO: 14718 - RNA, 20 nt, Artificial Sequence
  Synthetic oligonucleotide: PDCD1-116
aggaugguucuuagguaggu

SEQ ID NO: 14719 - RNA, 20 nt, Artificial Sequence
  Synthetic oligonucleotide: PDCD1-114
ggccaggaugguucuuaggu

SEQ ID NO: 14720 - RNA, 20 nt, Artificial Sequence
  Synthetic oligonucleotide: PDCD1-118
gguucuuagguagguggggu

SEQ ID NO: 14721 - RNA, 20 nt, Artificial Sequence
  Synthetic oligonucleotide: PDCD1-126
cgacuggccagggcgccugu

SEQ ID NO: 14722 - RNA, 20 nt, Artificial Sequence
  Synthetic oligonucleotide: PDCD1-73
cacgaagcucuccgaugugu

SEQ ID NO: 14723 - RNA, 20 nt, Artificial Sequence
  Synthetic oligonucleotide: PDCD1-43
cucucuuugaucugcgccuu

SEQ ID NO: 14724 - RNA, 20 nt, Artificial Sequence
  Synthetic oligonucleotide: PDCD1-55
auguggaagucacgcccguu

SEQ ID NO: 14725 - RNA, 17 nt, Artificial Sequence
  Synthetic oligonucleotide: PDCD1-141
gucacacaacugcccaa

SEQ ID NO: 14726 - RNA, 17 nt, Artificial Sequence
  Synthetic oligonucleotide: PDCD1-132
ugcucguggugaccgaa

SEQ ID NO: 14727 - RNA, 17 nt, Artificial Sequence
  Synthetic oligonucleotide: PDCD1-226
uggagagaggugaggaa

SEQ ID NO: 14728 - RNA, 17 nt, Artificial Sequence
  Synthetic oligonucleotide: PDCD1-183
ugggcaguugugugaca

SEQ ID NO: 14729 - RNA, 17 nt, Artificial Sequence
  Synthetic oligonucleotide: PDCD1-152
caucucccuggccccca

SEQ ID NO: 14730 - RNA, 17 nt, Artificial Sequence
  Synthetic oligonucleotide: PDCD1-174
cugcgccuugggggcca

SEQ ID NO: 14731 - RNA, 17 nt, Artificial Sequence
  Synthetic oligonucleotide: PDCD1-251
gcccagacgacuggcca

SEQ ID NO: 14732 - RNA, 17 nt, Artificial Sequence
  Synthetic oligonucleotide: PDCD1-218
aagguggggggguucca

SEQ ID NO: 14733 - RNA, 17 nt, Artificial Sequence
  Synthetic oligonucleotide: PDCD1-165
ucggaggccccggggca

SEQ ID NO: 14734 - RNA, 17 nt, Artificial Sequence
  Synthetic oligonucleotide: PDCD1-156
ccugcgggcagagcuca

SEQ ID NO: 14735 - RNA, 17 nt, Artificial Sequence
  Synthetic oligonucleotide: PDCD1-136
gagccccagcaaccaga

SEQ ID NO: 14736 - RNA, 17 nt, Artificial Sequence
  Synthetic oligonucleotide: PDCD1-222
cuggggagucugagaga

SEQ ID NO: 14737 - RNA, 17 nt, Artificial Sequence
  Synthetic oligonucleotide: PDCD1-175
cuugggggccagggaga

SEQ ID NO: 14738 - RNA, 17 nt, Artificial Sequence
  Synthetic oligonucleotide: PDCD1-210
gagcagggcuggggaga

SEQ ID NO: 14739 - RNA, 17 nt, Artificial Sequence
  Synthetic oligonucleotide: PDCD1-239
ugggcuggcggccagga

SEQ ID NO: 14740 - RNA, 17 nt, Artificial Sequence
  Synthetic oligonucleotide: PDCD1-225
auggagagaggugagga

SEQ ID NO: 14741 - RNA, 17 nt, Artificial Sequence
  Synthetic oligonucleotide: PDCD1-202
ggagaagcugcagguga

SEQ ID NO: 14742 - RNA, 17 nt, Artificial Sequence
  Synthetic oligonucleotide: PDCD1-142
ucacacaacugcccaac

SEQ ID NO: 14743 - RNA, 17 nt, Artificial Sequence
  Synthetic oligonucleotide: PDCD1-229
aggcaugcagaucccac

SEQ ID NO: 14744 - RNA, 17 nt, Artificial Sequence
  Synthetic oligonucleotide: PDCD1-128
ucucagacuccccagac

SEQ ID NO: 14745 - RNA, 17 nt, Artificial Sequence
  Synthetic oligonucleotide: PDCD1-157
gcagagcucagggugac

SEQ ID NO: 14746 - RNA, 17 nt, Artificial Sequence
  Synthetic oligonucleotide: PDCD1-162
gcggccucggaggcccc

SEQ ID NO: 14747 - RNA, 17 nt, Artificial Sequence
  Synthetic oligonucleotide: PDCD1-230
agaucccacaggcgccc

SEQ ID NO: 14748 - RNA, 17 nt, Artificial Sequence
  Synthetic oligonucleotide: PDCD1-129
acuccccagacaggccc

SEQ ID NO: 14749 - RNA, 17 nt, Artificial Sequence
  Synthetic oligonucleotide: PDCD1-161
ugcggccucggaggccc

SEQ ID NO: 14750 - RNA, 17 nt, Artificial Sequence
  Synthetic oligonucleotide: PDCD1-151
cuguggggccaucuccc

SEQ ID NO: 14751 - RNA, 17 nt, Artificial Sequence
  Synthetic oligonucleotide: PDCD1-139
gaggaccgcagccagcc

SEQ ID NO: 14752 - RNA, 17 nt, Artificial Sequence
  Synthetic oligonucleotide: PDCD1-140
ccgcagccagcccggcc

SEQ ID NO: 14753 - RNA, 17 nt, Artificial Sequence
  Synthetic oligonucleotide: PDCD1-238
caacugggcuggcggcc

SEQ ID NO: 14754 - RNA, 17 nt, Artificial Sequence
  Synthetic oligonucleotide: PDCD1-146
ugagcguggucagggcc

SEQ ID NO: 14755 - RNA, 17 nt, Artificial Sequence
  Synthetic oligonucleotide: PDCD1-173
ucugcgccuugggggcc

SEQ ID NO: 14756 - RNA, 17 nt, Artificial Sequence
  Synthetic oligonucleotide: PDCD1-187
aagcggcaguccuggcc

SEQ ID NO: 14757 - RNA, 17 nt, Artificial Sequence
  Synthetic oligonucleotide: PDCD1-254
ugugggaucugcaugcc

SEQ ID NO: 14758 - RNA, 17 nt, Artificial Sequence
  Synthetic oligonucleotide: PDCD1-228
ucugguggggcugcucc

SEQ ID NO: 14759 - RNA, 17 nt, Artificial Sequence
  Synthetic oligonucleotide: PDCD1-217
gaagguggggggguucc

SEQ ID NO: 14760 - RNA, 17 nt, Artificial Sequence
  Synthetic oligonucleotide: PDCD1-168
cccugagcucugcccgc

SEQ ID NO: 14761 - RNA, 17 nt, Artificial Sequence
  Synthetic oligonucleotide: PDCD1-207
gucaccacgagcagggc

SEQ ID NO: 14762 - RNA, 17 nt, Artificial Sequence
  Synthetic oligonucleotide: PDCD1-188
ggcaguccuggccgggc

SEQ ID NO: 14763 - RNA, 17 nt, Artificial Sequence
  Synthetic oligonucleotide: PDCD1-164
cucggaggccccggggc

SEQ ID NO: 14764 - RNA, 17 nt, Artificial Sequence
  Synthetic oligonucleotide: PDCD1-236
cggugcuacaacugggc

SEQ ID NO: 14765 - RNA, 17 nt, Artificial Sequence
  Synthetic oligonucleotide: PDCD1-186
gaagcggcaguccuggc

SEQ ID NO: 14766 - RNA, 17 nt, Artificial Sequence
  Synthetic oligonucleotide: PDCD1-154
gaucaaagagagccugc

SEQ ID NO: 14767 - RNA, 17 nt, Artificial Sequence
  Synthetic oligonucleotide: PDCD1-201
uguguuggagaagcugc

SEQ ID NO: 14768 - RNA, 17 nt, Artificial Sequence
  Synthetic oligonucleotide: PDCD1-191
ggcuggcugcgguccuc

SEQ ID NO: 14769 - RNA, 17 nt, Artificial Sequence
  Synthetic oligonucleotide: PDCD1-155
gccugcgggcagagcuc

SEQ ID NO: 14770 - RNA, 17 nt, Artificial Sequence
  Synthetic oligonucleotide: PDCD1-195
cggccagcuuguccguc

SEQ ID NO: 14771 - RNA, 17 nt, Artificial Sequence
  Synthetic oligonucleotide: PDCD1-247
agguggggucggcgguc

SEQ ID NO: 14772 - RNA, 17 nt, Artificial Sequence
  Synthetic oligonucleotide: PDCD1-219
ggguuccagggccuguc

SEQ ID NO: 14773 - RNA, 17 nt, Artificial Sequence
  Synthetic oligonucleotide: PDCD1-133
gcucguggugaccgaag

SEQ ID NO: 14774 - RNA, 17 nt, Artificial Sequence
  Synthetic oligonucleotide: PDCD1-227
ggagagaggugaggaag

SEQ ID NO: 14775 - RNA, 17 nt, Artificial Sequence
  Synthetic oligonucleotide: PDCD1-184
guugugugacacggaag

SEQ ID NO: 14776 - RNA, 17 nt, Artificial Sequence
  Synthetic oligonucleotide: PDCD1-176
gggagauggccccacag

SEQ ID NO: 14777 - RNA, 17 nt, Artificial Sequence
  Synthetic oligonucleotide: PDCD1-166
cggaggccccggggcag

SEQ ID NO: 14778 - RNA, 17 nt, Artificial Sequence
  Synthetic oligonucleotide: PDCD1-223
gucugagagauggagag

SEQ ID NO: 14779 - RNA, 17 nt, Artificial Sequence
  Synthetic oligonucleotide: PDCD1-163
cggccucggaggccccg

SEQ ID NO: 14780 - RNA, 17 nt, Artificial Sequence
  Synthetic oligonucleotide: PDCD1-138
gcuggccgccuuccccg

SEQ ID NO: 14781 - RNA, 17 nt, Artificial Sequence
  Synthetic oligonucleotide: PDCD1-167
cugccccggggccuccg

SEQ ID NO: 14782 - RNA, 17 nt, Artificial Sequence
  Synthetic oligonucleotide: PDCD1-192
gcuggcugcgguccucg

SEQ ID NO: 14783 - RNA, 17 nt, Artificial Sequence
  Synthetic oligonucleotide: PDCD1-130
cuccccagcccugcucg

SEQ ID NO: 14784 - RNA, 17 nt, Artificial Sequence
  Synthetic oligonucleotide: PDCD1-211
cagggcuggggagaagg

SEQ ID NO: 14785 - RNA, 17 nt, Artificial Sequence
  Synthetic oligonucleotide: PDCD1-194
gcgguccucggggaagg

SEQ ID NO: 14786 - RNA, 17 nt, Artificial Sequence
  Synthetic oligonucleotide: PDCD1-203
gaagcugcaggugaagg

SEQ ID NO: 14787 - RNA, 17 nt, Artificial Sequence
  Synthetic oligonucleotide: PDCD1-242
gaugguucuuagguagg

SEQ ID NO: 14788 - RNA, 17 nt, Artificial Sequence
  Synthetic oligonucleotide: PDCD1-246
uagguagguggggucgg

SEQ ID NO: 14789 - RNA, 17 nt, Artificial Sequence
  Synthetic oligonucleotide: PDCD1-216
cuggggagaaggugggg

SEQ ID NO: 14790 - RNA, 17 nt, Artificial Sequence
  Synthetic oligonucleotide: PDCD1-233
cuggccagucgucuggg

SEQ ID NO: 14791 - RNA, 17 nt, Artificial Sequence
  Synthetic oligonucleotide: PDCD1-215
gcuggggagaagguggg

SEQ ID NO: 14792 - RNA, 17 nt, Artificial Sequence
  Synthetic oligonucleotide: PDCD1-237
ugcuacaacugggcugg

SEQ ID NO: 14793 - RNA, 17 nt, Artificial Sequence
  Synthetic oligonucleotide: PDCD1-214
ggcuggggagaaggugg

SEQ ID NO: 14794 - RNA, 17 nt, Artificial Sequence
  Synthetic oligonucleotide: PDCD1-172
uuugaucugcgccuugg

SEQ ID NO: 14795 - RNA, 17 nt, Artificial Sequence
  Synthetic oligonucleotide: PDCD1-199
gguugcuggggcucaug

SEQ ID NO: 14796 - RNA, 17 nt, Artificial Sequence
  Synthetic oligonucleotide: PDCD1-153
agaucaaagagagccug

SEQ ID NO: 14797 - RNA, 17 nt, Artificial Sequence
  Synthetic oligonucleotide: PDCD1-252
acuggccagggcgccug

SEQ ID NO: 14798 - RNA, 17 nt, Artificial Sequence
  Synthetic oligonucleotide: PDCD1-209
caccacgagcagggcug

SEQ ID NO: 14799 - RNA, 17 nt, Artificial Sequence
  Synthetic oligonucleotide: PDCD1-189
ccuggccgggcuggcug

SEQ ID NO: 14800 - RNA, 17 nt, Artificial Sequence
  Synthetic oligonucleotide: PDCD1-198
uguccgucugguugcug

SEQ ID NO: 14801 - RNA, 17 nt, Artificial Sequence
  Synthetic oligonucleotide: PDCD1-148
agcggcaccuaccucug

SEQ ID NO: 14802 - RNA, 17 nt, Artificial Sequence
  Synthetic oligonucleotide: PDCD1-221
guuccagggccugucug

SEQ ID NO: 14803 - RNA, 17 nt, Artificial Sequence
  Synthetic oligonucleotide: PDCD1-213
gggcuggggagaaggug

SEQ ID NO: 14804 - RNA, 17 nt, Artificial Sequence
  Synthetic oligonucleotide: PDCD1-158
gcucagggugacaggug

SEQ ID NO: 14805 - RNA, 17 nt, Artificial Sequence
  Synthetic oligonucleotide: PDCD1-224
agagauggagagaggug

SEQ ID NO: 14806 - RNA, 17 nt, Artificial Sequence
  Synthetic oligonucleotide: PDCD1-244
ugguucuuagguaggug

SEQ ID NO: 14807 - RNA, 17 nt, Artificial Sequence
  Synthetic oligonucleotide: PDCD1-150
cggcaccuaccucugug

SEQ ID NO: 14808 - RNA, 17 nt, Artificial Sequence
  Synthetic oligonucleotide: PDCD1-171
cuuugaucugcgccuug

SEQ ID NO: 14809 - RNA, 17 nt, Artificial Sequence
  Synthetic oligonucleotide: PDCD1-134
cagcuucuccaacacau

SEQ ID NO: 14810 - RNA, 17 nt, Artificial Sequence
  Synthetic oligonucleotide: PDCD1-235
ugggcggugcuacaacu

SEQ ID NO: 14811 - RNA, 17 nt, Artificial Sequence
  Synthetic oligonucleotide: PDCD1-159
ggugacaggugcggccu

SEQ ID NO: 14812 - RNA, 17 nt, Artificial Sequence
  Synthetic oligonucleotide: PDCD1-190
gggcuggcugcgguccu

SEQ ID NO: 14813 - RNA, 17 nt, Artificial Sequence
  Synthetic oligonucleotide: PDCD1-208
ucaccacgagcagggcu

SEQ ID NO: 14814 - RNA, 17 nt, Artificial Sequence
  Synthetic oligonucleotide: PDCD1-232
gcccuggccagucgucu

SEQ ID NO: 14815 - RNA, 17 nt, Artificial Sequence
  Synthetic oligonucleotide: PDCD1-220
gguuccagggccugucu

SEQ ID NO: 14816 - RNA, 17 nt, Artificial Sequence
  Synthetic oligonucleotide: PDCD1-212
agggcuggggagaaggu

SEQ ID NO: 14817 - RNA, 17 nt, Artificial Sequence
  Synthetic oligonucleotide: PDCD1-177
gauggccccacagaggu

SEQ ID NO: 14818 - RNA, 17 nt, Artificial Sequence
  Synthetic oligonucleotide: PDCD1-243
augguucuuagguaggu

SEQ ID NO: 14819 - RNA, 17 nt, Artificial Sequence
  Synthetic oligonucleotide: PDCD1-241
caggaugguucuuaggu

SEQ ID NO: 14820 - RNA, 17 nt, Artificial Sequence
  Synthetic oligonucleotide: PDCD1-245
ucuuagguagguggggu

SEQ ID NO: 14821 - RNA, 17 nt, Artificial Sequence
  Synthetic oligonucleotide: PDCD1-253
cuggccagggcgccugu

SEQ ID NO: 14822 - RNA, 17 nt, Artificial Sequence
  Synthetic oligonucleotide: PDCD1-204
gguggcguuguccccuu

SEQ ID NO: 14823 - RNA, 17 nt, Artificial Sequence
  Synthetic oligonucleotide: PDCD1-170
ucuuugaucugcgccuu

SEQ ID NO: 14824 - RNA, 17 nt, Artificial Sequence
  Synthetic oligonucleotide: PDCD1-240
cggccaggaugguucuu

SEQ ID NO: 14825 - RNA, 20 nt, Artificial Sequence
  Synthetic oligonucleotide: PDCD1-5
cccugcucguggugaccgaa

SEQ ID NO: 14826 - RNA, 20 nt, Artificial Sequence
  Synthetic oligonucleotide: PDCD1-99
agauggagagaggugaggaa

SEQ ID NO: 14827 - RNA, 20 nt, Artificial Sequence
  Synthetic oligonucleotide: PDCD1-25
ggccaucucccuggccccca

SEQ ID NO: 14828 - RNA, 20 nt, Artificial Sequence
  Synthetic oligonucleotide: PDCD1-91
gagaagguggggggguucca

SEQ ID NO: 14829 - RNA, 20 nt, Artificial Sequence
  Synthetic oligonucleotide: PDCD1-38
gccucggaggccccggggca

SEQ ID NO: 14830 - RNA, 20 nt, Artificial Sequence
  Synthetic oligonucleotide: PDCD1-29
gagccugcgggcagagcuca

SEQ ID NO: 14831 - RNA, 20 nt, Artificial Sequence
  Synthetic oligonucleotide: PDCD1-9
caugagccccagcaaccaga

SEQ ID NO: 14832 - RNA, 20 nt, Artificial Sequence
  Synthetic oligonucleotide: PDCD1-95
ugucuggggagucugagaga

SEQ ID NO: 14833 - RNA, 20 nt, Artificial Sequence
  Synthetic oligonucleotide: PDCD1-48
cgccuugggggccagggaga

SEQ ID NO: 14834 - RNA, 20 nt, Artificial Sequence
  Synthetic oligonucleotide: PDCD1-83
cacgagcagggcuggggaga

SEQ ID NO: 14835 - RNA, 20 nt, Artificial Sequence
  Synthetic oligonucleotide: PDCD1-112
aacugggcuggcggccagga

SEQ ID NO: 14836 - RNA, 20 nt, Artificial Sequence
  Synthetic oligonucleotide: PDCD1-98
gagauggagagaggugagga

SEQ ID NO: 14837 - RNA, 20 nt, Artificial Sequence
  Synthetic oligonucleotide: PDCD1-66
cuggcugcgguccucgggga

SEQ ID NO: 14838 - RNA, 20 nt, Artificial Sequence
  Synthetic oligonucleotide: PDCD1-75
guuggagaagcugcagguga

SEQ ID NO: 14839 - RNA, 20 nt, Artificial Sequence
  Synthetic oligonucleotide: PDCD1-102
uccaggcaugcagaucccac

SEQ ID NO: 14840 - RNA, 20 nt, Artificial Sequence
  Synthetic oligonucleotide: PDCD1-1
aucucucagacuccccagac

SEQ ID NO: 14841 - RNA, 20 nt, Artificial Sequence
  Synthetic oligonucleotide: PDCD1-30
cgggcagagcucagggugac

SEQ ID NO: 14842 - RNA, 20 nt, Artificial Sequence
  Synthetic oligonucleotide: PDCD1-35
ggugcggccucggaggcccc

SEQ ID NO: 14843 - RNA, 20 nt, Artificial Sequence
  Synthetic oligonucleotide: PDCD1-103
ugcagaucccacaggcgccc

SEQ ID NO: 14844 - RNA, 20 nt, Artificial Sequence
  Synthetic oligonucleotide: PDCD1-2
cagacuccccagacaggccc

SEQ ID NO: 14845 - RNA, 20 nt, Artificial Sequence
  Synthetic oligonucleotide: PDCD1-34
aggugcggccucggaggccc

SEQ ID NO: 14846 - RNA, 20 nt, Artificial Sequence
  Synthetic oligonucleotide: PDCD1-24
ccucuguggggccaucuccc

SEQ ID NO: 14847 - RNA, 20 nt, Artificial Sequence
  Synthetic oligonucleotide: PDCD1-12
cccgaggaccgcagccagcc

SEQ ID NO: 14848 - RNA, 20 nt, Artificial Sequence
  Synthetic oligonucleotide: PDCD1-52
ggugccgcugucauugcgcc

SEQ ID NO: 14849 - RNA, 20 nt, Artificial Sequence
  Synthetic oligonucleotide: PDCD1-13
ggaccgcagccagcccggcc

SEQ ID NO: 14850 - RNA, 20 nt, Artificial Sequence
  Synthetic oligonucleotide: PDCD1-127
gccugugggaucugcaugcc

SEQ ID NO: 14851 - RNA, 20 nt, Artificial Sequence
  Synthetic oligonucleotide: PDCD1-101
cacucugguggggcugcucc

SEQ ID NO: 14852 - RNA, 20 nt, Artificial Sequence
  Synthetic oligonucleotide: PDCD1-58
ugacacggaagcggcagucc

SEQ ID NO: 14853 - RNA, 20 nt, Artificial Sequence
  Synthetic oligonucleotide: PDCD1-90
ggagaagguggggggguucc

SEQ ID NO: 14854 - RNA, 20 nt, Artificial Sequence
  Synthetic oligonucleotide: PDCD1-10
cagcaaccagacggacaagc

SEQ ID NO: 14855 - RNA, 20 nt, Artificial Sequence
  Synthetic oligonucleotide: PDCD1-41
ucacccugagcucugcccgc

SEQ ID NO: 14856 - RNA, 20 nt, Artificial Sequence
  Synthetic oligonucleotide: PDCD1-51
aggugccgcugucauugcgc

SEQ ID NO: 14857 - RNA, 20 nt, Artificial Sequence
  Synthetic oligonucleotide: PDCD1-80
ucggucaccacgagcagggc

SEQ ID NO: 14858 - RNA, 20 nt, Artificial Sequence
  Synthetic oligonucleotide: PDCD1-61
agcggcaguccuggccgggc

SEQ ID NO: 14859 - RNA, 20 nt, Artificial Sequence
  Synthetic oligonucleotide: PDCD1-37
ggccucggaggccccggggc

SEQ ID NO: 14860 - RNA, 20 nt, Artificial Sequence
  Synthetic oligonucleotide: PDCD1-109
gggcggugcuacaacugggc

SEQ ID NO: 14861 - RNA, 20 nt, Artificial Sequence
  Synthetic oligonucleotide: PDCD1-59
acggaagcggcaguccuggc

SEQ ID NO: 14862 - RNA, 20 nt, Artificial Sequence
  Synthetic oligonucleotide: PDCD1-27
gcagaucaaagagagccugc

SEQ ID NO: 14863 - RNA, 20 nt, Artificial Sequence
  Synthetic oligonucleotide: PDCD1-74
cgauguguuggagaagcugc

SEQ ID NO: 14864 - RNA, 20 nt, Artificial Sequence
  Synthetic oligonucleotide: PDCD1-28
agagccugcgggcagagcuc

SEQ ID NO: 14865 - RNA, 20 nt, Artificial Sequence
  Synthetic oligonucleotide: PDCD1-120
gguagguggggucggcgguc

SEQ ID NO: 14866 - RNA, 20 nt, Artificial Sequence
  Synthetic oligonucleotide: PDCD1-17
acuuccacaugagcgugguc

SEQ ID NO: 14867 - RNA, 20 nt, Artificial Sequence
  Synthetic oligonucleotide: PDCD1-92
gggggguuccagggccuguc

SEQ ID NO: 14868 - RNA, 20 nt, Artificial Sequence
  Synthetic oligonucleotide: PDCD1-100
gauggagagaggugaggaag

SEQ ID NO: 14869 - RNA, 20 nt, Artificial Sequence
  Synthetic oligonucleotide: PDCD1-57
gcaguugugugacacggaag

SEQ ID NO: 14870 - RNA, 20 nt, Artificial Sequence
  Synthetic oligonucleotide: PDCD1-49
ccagggagauggccccacag

SEQ ID NO: 14871 - RNA, 20 nt, Artificial Sequence
  Synthetic oligonucleotide: PDCD1-39
ccucggaggccccggggcag

SEQ ID NO: 14872 - RNA, 20 nt, Artificial Sequence
  Synthetic oligonucleotide: PDCD1-96
ggagucugagagauggagag

SEQ ID NO: 14873 - RNA, 20 nt, Artificial Sequence
  Synthetic oligonucleotide: PDCD1-36
gugcggccucggaggccccg

SEQ ID NO: 14874 - RNA, 20 nt, Artificial Sequence
  Synthetic oligonucleotide: PDCD1-40
ccccugccccggggccuccg

SEQ ID NO: 14875 - RNA, 20 nt, Artificial Sequence
  Synthetic oligonucleotide: PDCD1-65
cgggcuggcugcgguccucg

SEQ ID NO: 14876 - RNA, 20 nt, Artificial Sequence
  Synthetic oligonucleotide: PDCD1-3
cuucuccccagcccugcucg

SEQ ID NO: 14877 - RNA, 20 nt, Artificial Sequence
  Synthetic oligonucleotide: PDCD1-84
gagcagggcuggggagaagg

SEQ ID NO: 14878 - RNA, 20 nt, Artificial Sequence
  Synthetic oligonucleotide: PDCD1-67
gcugcgguccucggggaagg

SEQ ID NO: 14879 - RNA, 20 nt, Artificial Sequence
  Synthetic oligonucleotide: PDCD1-76
ggagaagcugcaggugaagg

SEQ ID NO: 14880 - RNA, 20 nt, Artificial Sequence
  Synthetic oligonucleotide: PDCD1-115
caggaugguucuuagguagg

SEQ ID NO: 14881 - RNA, 20 nt, Artificial Sequence
  Synthetic oligonucleotide: PDCD1-119
ucuuagguagguggggucgg

SEQ ID NO: 14882 - RNA, 20 nt, Artificial Sequence
  Synthetic oligonucleotide: PDCD1-89
gggcuggggagaaggugggg

SEQ ID NO: 14883 - RNA, 20 nt, Artificial Sequence
  Synthetic oligonucleotide: PDCD1-106
gcccuggccagucgucuggg

SEQ ID NO: 14884 - RNA, 20 nt, Artificial Sequence
  Synthetic oligonucleotide: PDCD1-88
agggcuggggagaagguggg

SEQ ID NO: 14885 - RNA, 20 nt, Artificial Sequence
  Synthetic oligonucleotide: PDCD1-110
cggugcuacaacugggcugg

SEQ ID NO: 14886 - RNA, 20 nt, Artificial Sequence
  Synthetic oligonucleotide: PDCD1-87
cagggcuggggagaaggugg

SEQ ID NO: 14887 - RNA, 20 nt, Artificial Sequence
  Synthetic oligonucleotide: PDCD1-45
cucuuugaucugcgccuugg

SEQ ID NO: 14888 - RNA, 20 nt, Artificial Sequence
  Synthetic oligonucleotide: PDCD1-72
ucugguugcuggggcucaug

SEQ ID NO: 14889 - RNA, 20 nt, Artificial Sequence
  Synthetic oligonucleotide: PDCD1-26
cgcagaucaaagagagccug

SEQ ID NO: 14890 - RNA, 20 nt, Artificial Sequence
  Synthetic oligonucleotide: PDCD1-125
acgacuggccagggcgccug

SEQ ID NO: 14891 - RNA, 20 nt, Artificial Sequence
  Synthetic oligonucleotide: PDCD1-82
ggucaccacgagcagggcug

SEQ ID NO: 14892 - RNA, 20 nt, Artificial Sequence
  Synthetic oligonucleotide: PDCD1-62
aguccuggccgggcuggcug

SEQ ID NO: 14893 - RNA, 20 nt, Artificial Sequence
  Synthetic oligonucleotide: PDCD1-21
gacagcggcaccuaccucug

SEQ ID NO: 14894 - RNA, 20 nt, Artificial Sequence
  Synthetic oligonucleotide: PDCD1-94
gggguuccagggccugucug

SEQ ID NO: 14895 - RNA, 20 nt, Artificial Sequence
  Synthetic oligonucleotide: PDCD1-86
gcagggcuggggagaaggug

SEQ ID NO: 14896 - RNA, 20 nt, Artificial Sequence
  Synthetic oligonucleotide: PDCD1-31
agagcucagggugacaggug

SEQ ID NO: 14897 - RNA, 20 nt, Artificial Sequence
  Synthetic oligonucleotide: PDCD1-97
cugagagauggagagaggug

SEQ ID NO: 14898 - RNA, 20 nt, Artificial Sequence
  Synthetic oligonucleotide: PDCD1-23
cagcggcaccuaccucugug

SEQ ID NO: 14899 - RNA, 20 nt, Artificial Sequence
  Synthetic oligonucleotide: PDCD1-44
ucucuuugaucugcgccuug

SEQ ID NO: 14900 - RNA, 20 nt, Artificial Sequence
  Synthetic oligonucleotide: PDCD1-7
cugcagcuucuccaacacau

SEQ ID NO: 14901 - RNA, 20 nt, Artificial Sequence
  Synthetic oligonucleotide: PDCD1-32
cagggugacaggugcggccu

SEQ ID NO: 14902 - RNA, 20 nt, Artificial Sequence
  Synthetic oligonucleotide: PDCD1-63
gccgggcuggcugcgguccu

SEQ ID NO: 14903 - RNA, 20 nt, Artificial Sequence
  Synthetic oligonucleotide: PDCD1-70
agcuuguccgucugguugcu

SEQ ID NO: 14904 - RNA, 20 nt, Artificial Sequence
  Synthetic oligonucleotide: PDCD1-93
ggggguuccagggccugucu

SEQ ID NO: 14905 - RNA, 20 nt, Artificial Sequence
  Synthetic oligonucleotide: PDCD1-54
cauguggaagucacgcccgu

SEQ ID NO: 14906 - RNA, 20 nt, Artificial Sequence
  Synthetic oligonucleotide: PDCD1-85
agcagggcuggggagaaggu

SEQ ID NO: 14907 - RNA, 20 nt, Artificial Sequence
  Synthetic oligonucleotide: PDCD1-50
ggagauggccccacagaggu

SEQ ID NO: 14908 - RNA, 20 nt, Artificial Sequence
  Synthetic oligonucleotide: PDCD1-22
acagcggcaccuaccucugu

SEQ ID NO: 14909 - RNA, 20 nt, Artificial Sequence
  Synthetic oligonucleotide: PDCD1-77
gaagguggcguuguccccuu

SEQ ID NO: 14910 - RNA, 20 nt, Artificial Sequence
  Synthetic oligonucleotide: PDCD1-113
uggcggccaggaugguucuu

SEQ ID NO: 14911 - RNA, 17 nt, Artificial Sequence
  Synthetic oligonucleotide: PDCD1-487
ccuucuuugaggagaaa

SEQ ID NO: 14912 - RNA, 17 nt, Artificial Sequence
  Synthetic oligonucleotide: PDCD1-446
ucucuggaagggcacaa

SEQ ID NO: 14913 - RNA, 17 nt, Artificial Sequence
  Synthetic oligonucleotide: PDCD1-509
uccgcuaggaaagacaa

SEQ ID NO: 14914 - RNA, 17 nt, Artificial Sequence
  Synthetic oligonucleotide: PDCD1-306
ugcccuuccagagagaa

SEQ ID NO: 14915 - RNA, 17 nt, Artificial Sequence
  Synthetic oligonucleotide: PDCD1-488
uccuucuuugaggagaa

SEQ ID NO: 14916 - RNA, 17 nt, Artificial Sequence
  Synthetic oligonucleotide: PDCD1-342
ugucuuuccuagcggaa

SEQ ID NO: 14917 - RNA, 17 nt, Artificial Sequence
  Synthetic oligonucleotide: PDCD1-447
ugcccuucucucuggaa

SEQ ID NO: 14918 - RNA, 17 nt, Artificial Sequence
  Synthetic oligonucleotide: PDCD1-504
gucugcucagggacaca

SEQ ID NO: 14919 - RNA, 17 nt, Artificial Sequence
  Synthetic oligonucleotide: PDCD1-466
cacgacaccaaccacca

SEQ ID NO: 14920 - RNA, 17 nt, Artificial Sequence
  Synthetic oligonucleotide: PDCD1-483
aagagugagacucacca

SEQ ID NO: 14921 - RNA, 17 nt, Artificial Sequence
  Synthetic oligonucleotide: PDCD1-528
cagaacacugguggcca

SEQ ID NO: 14922 - RNA, 17 nt, Artificial Sequence
  Synthetic oligonucleotide: PDCD1-345
cucaucccccgcccgca

SEQ ID NO: 14923 - RNA, 17 nt, Artificial Sequence
  Synthetic oligonucleotide: PDCD1-493
cacagagaacacaggca

SEQ ID NO: 14924 - RNA, 17 nt, Artificial Sequence
  Synthetic oligonucleotide: PDCD1-503
cucagggacacagggca

SEQ ID NO: 14925 - RNA, 17 nt, Artificial Sequence
  Synthetic oligonucleotide: PDCD1-326
aaguguguuucucugca

SEQ ID NO: 14926 - RNA, 17 nt, Artificial Sequence
  Synthetic oligonucleotide: PDCD1-506
cauacuccgucugcuca

SEQ ID NO: 14927 - RNA, 17 nt, Artificial Sequence
  Synthetic oligonucleotide: PDCD1-444
gaagggcacaaagguca

SEQ ID NO: 14928 - RNA, 17 nt, Artificial Sequence
  Synthetic oligonucleotide: PDCD1-331
cccuuucuccucaaaga

SEQ ID NO: 14929 - RNA, 17 nt, Artificial Sequence
  Synthetic oligonucleotide: PDCD1-340
cugugucccugagcaga

SEQ ID NO: 14930 - RNA, 17 nt, Artificial Sequence
  Synthetic oligonucleotide: PDCD1-525
caaggaagccggucaga

SEQ ID NO: 14931 - RNA, 17 nt, Artificial Sequence
  Synthetic oligonucleotide: PDCD1-305
gugcccuuccagagaga

SEQ ID NO: 14932 - RNA, 17 nt, Artificial Sequence
  Synthetic oligonucleotide: PDCD1-485
uugaggagaaagggaga

SEQ ID NO: 14933 - RNA, 17 nt, Artificial Sequence
  Synthetic oligonucleotide: PDCD1-518
guggcugggcacuccga

SEQ ID NO: 14934 - RNA, 17 nt, Artificial Sequence
  Synthetic oligonucleotide: PDCD1-351
ccacugaggccugagga

SEQ ID NO: 14935 - RNA, 17 nt, Artificial Sequence
  Synthetic oligonucleotide: PDCD1-448
cugcccuucucucugga

SEQ ID NO: 14936 - RNA, 17 nt, Artificial Sequence
  Synthetic oligonucleotide: PDCD1-471
ggcccgggagcagauga

SEQ ID NO: 14937 - RNA, 17 nt, Artificial Sequence
  Synthetic oligonucleotide: PDCD1-347
cgcaggggcucagcuga

SEQ ID NO: 14938 - RNA, 17 nt, Artificial Sequence
  Synthetic oligonucleotide: PDCD1-491
aacacaggcacggcuga

SEQ ID NO: 14939 - RNA, 17 nt, Artificial Sequence
  Synthetic oligonucleotide: PDCD1-458
ccggcuggccuggguga

SEQ ID NO: 14940 - RNA, 17 nt, Artificial Sequence
  Synthetic oligonucleotide: PDCD1-334
guguucucuguggacua

SEQ ID NO: 14941 - RNA, 17 nt, Artificial Sequence
  Synthetic oligonucleotide: PDCD1-464
ccaccaggguuuggaac

SEQ ID NO: 14942 - RNA, 17 nt, Artificial Sequence
  Synthetic oligonucleotide: PDCD1-494
uaguccacagagaacac

SEQ ID NO: 14943 - RNA, 17 nt, Artificial Sequence
  Synthetic oligonucleotide: PDCD1-505
cgucugcucagggacac

SEQ ID NO: 14944 - RNA, 17 nt, Artificial Sequence
  Synthetic oligonucleotide: PDCD1-495
gggucuucucucgccac

SEQ ID NO: 14945 - RNA, 17 nt, Artificial Sequence
  Synthetic oligonucleotide: PDCD1-329
auaggagccaggcgcac

SEQ ID NO: 14946 - RNA, 17 nt, Artificial Sequence
  Synthetic oligonucleotide: PDCD1-502
ucagggacacagggcac

SEQ ID NO: 14947 - RNA, 17 nt, Artificial Sequence
  Synthetic oligonucleotide: PDCD1-353
cucuuggccccucugac

SEQ ID NO: 14948 - RNA, 17 nt, Artificial Sequence
  Synthetic oligonucleotide: PDCD1-467
ccacgacaccaaccacc

SEQ ID NO: 14949 - RNA, 17 nt, Artificial Sequence
  Synthetic oligonucleotide: PDCD1-469
cccagacuagcagcacc

SEQ ID NO: 14950 - RNA, 17 nt, Artificial Sequence
  Synthetic oligonucleotide: PDCD1-484
aaagagugagacucacc

SEQ ID NO: 14951 - RNA, 17 nt, Artificial Sequence
  Synthetic oligonucleotide: PDCD1-475
acacacuuggggucacc

SEQ ID NO: 14952 - RNA, 17 nt, Artificial Sequence
  Synthetic oligonucleotide: PDCD1-309
cggccaguuccaaaccc

SEQ ID NO: 14953 - RNA, 17 nt, Artificial Sequence
  Synthetic oligonucleotide: PDCD1-307
accccagccccucaccc

SEQ ID NO: 14954 - RNA, 17 nt, Artificial Sequence
  Synthetic oligonucleotide: PDCD1-339
guggcgagagaagaccc

SEQ ID NO: 14955 - RNA, 17 nt, Artificial Sequence
  Synthetic oligonucleotide: PDCD1-330
gcgcaccggccagcccc

SEQ ID NO: 14956 - RNA, 17 nt, Artificial Sequence
  Synthetic oligonucleotide: PDCD1-472
guuaccucgugcggccc

SEQ ID NO: 14957 - RNA, 17 nt, Artificial Sequence
  Synthetic oligonucleotide: PDCD1-322
ggccgucaucugcuccc

SEQ ID NO: 14958 - RNA, 17 nt, Artificial Sequence
  Synthetic oligonucleotide: PDCD1-317
cggccugcugggcagcc

SEQ ID NO: 14959 - RNA, 17 nt, Artificial Sequence
  Synthetic oligonucleotide: PDCD1-328
cagggacaauaggagcc

SEQ ID NO: 14960 - RNA, 17 nt, Artificial Sequence
  Synthetic oligonucleotide: PDCD1-479
gggcuggccggugcgcc

SEQ ID NO: 14961 - RNA, 17 nt, Artificial Sequence
  Synthetic oligonucleotide: PDCD1-470
gggagcagaugacggcc

SEQ ID NO: 14962 - RNA, 17 nt, Artificial Sequence
  Synthetic oligonucleotide: PDCD1-473
cguuaccucgugcggcc

SEQ ID NO: 14963 - RNA, 17 nt, Artificial Sequence
  Synthetic oligonucleotide: PDCD1-461
gaacuggccggcuggcc

SEQ ID NO: 14964 - RNA, 17 nt, Artificial Sequence
  Synthetic oligonucleotide: PDCD1-497
agggcacggggggcucc

SEQ ID NO: 14965 - RNA, 17 nt, Artificial Sequence
  Synthetic oligonucleotide: PDCD1-321
uggccgucaucugcucc

SEQ ID NO: 14966 - RNA, 17 nt, Artificial Sequence
  Synthetic oligonucleotide: PDCD1-320
gcugcuagucugggucc

SEQ ID NO: 14967 - RNA, 17 nt, Artificial Sequence
  Synthetic oligonucleotide: PDCD1-527
cugguggccaaggaagc

SEQ ID NO: 14968 - RNA, 17 nt, Artificial Sequence
  Synthetic oligonucleotide: PDCD1-468
gcaccaggcugcccagc

SEQ ID NO: 14969 - RNA, 17 nt, Artificial Sequence
  Synthetic oligonucleotide: PDCD1-308
cccucacccaggccagc

SEQ ID NO: 14970 - RNA, 17 nt, Artificial Sequence
  Synthetic oligonucleotide: PDCD1-337
uguggacuauggggagc

SEQ ID NO: 14971 - RNA, 17 nt, Artificial Sequence
  Synthetic oligonucleotide: PDCD1-344
ccucaucccccgcccgc

SEQ ID NO: 14972 - RNA, 17 nt, Artificial Sequence
  Synthetic oligonucleotide: PDCD1-462
guuuggaacuggccggc

SEQ ID NO: 14973 - RNA, 17 nt, Artificial Sequence
  Synthetic oligonucleotide: PDCD1-514
gcugagccccugcgggc

SEQ ID NO: 14974 - RNA, 17 nt, Artificial Sequence
  Synthetic oligonucleotide: PDCD1-481
ugagacucaccaggggc

SEQ ID NO: 14975 - RNA, 17 nt, Artificial Sequence
  Synthetic oligonucleotide: PDCD1-456
uggccugggugaggggc

SEQ ID NO: 14976 - RNA, 17 nt, Artificial Sequence
  Synthetic oligonucleotide: PDCD1-463
caggguuuggaacuggc

SEQ ID NO: 14977 - RNA, 17 nt, Artificial Sequence
  Synthetic oligonucleotide: PDCD1-480
acucaccaggggcuggc

SEQ ID NO: 14978 - RNA, 17 nt, Artificial Sequence
  Synthetic oligonucleotide: PDCD1-521
ccucaggccucaguggc

SEQ ID NO: 14979 - RNA, 17 nt, Artificial Sequence
  Synthetic oligonucleotide: PDCD1-516
gucagcugagccccugc

SEQ ID NO: 14980 - RNA, 17 nt, Artificial Sequence
  Synthetic oligonucleotide: PDCD1-315
ugucgugggcggccugc

SEQ ID NO: 14981 - RNA, 17 nt, Artificial Sequence
  Synthetic oligonucleotide: PDCD1-325
caaguguguuucucugc

SEQ ID NO: 14982 - RNA, 17 nt, Artificial Sequence
  Synthetic oligonucleotide: PDCD1-523
gagcaguguccauccuc

SEQ ID NO: 14983 - RNA, 17 nt, Artificial Sequence
  Synthetic oligonucleotide: PDCD1-498
cagggcacggggggcuc

SEQ ID NO: 14984 - RNA, 17 nt, Artificial Sequence
  Synthetic oligonucleotide: PDCD1-507
gcauacuccgucugcuc

SEQ ID NO: 14985 - RNA, 17 nt, Artificial Sequence
  Synthetic oligonucleotide: PDCD1-449
acuucugcccuucucuc

SEQ ID NO: 14986 - RNA, 17 nt, Artificial Sequence
  Synthetic oligonucleotide: PDCD1-318
gccuggugcugcuaguc

SEQ ID NO: 14987 - RNA, 17 nt, Artificial Sequence
  Synthetic oligonucleotide: PDCD1-445
ggaagggcacaaagguc

SEQ ID NO: 14988 - RNA, 17 nt, Artificial Sequence
  Synthetic oligonucleotide: PDCD1-482
agagugagacucaccag

SEQ ID NO: 14989 - RNA, 17 nt, Artificial Sequence
  Synthetic oligonucleotide: PDCD1-338
gggagcuggauuuccag

SEQ ID NO: 14990 - RNA, 17 nt, Artificial Sequence
  Synthetic oligonucleotide: PDCD1-346
ucaucccccgcccgcag

SEQ ID NO: 14991 - RNA, 17 nt, Artificial Sequence
  Synthetic oligonucleotide: PDCD1-522
ccauccucaggccucag

SEQ ID NO: 14992 - RNA, 17 nt, Artificial Sequence
  Synthetic oligonucleotide: PDCD1-443
aagggcacaaaggucag

SEQ ID NO: 14993 - RNA, 17 nt, Artificial Sequence
  Synthetic oligonucleotide: PDCD1-526
ccaaggaagccggucag

SEQ ID NO: 14994 - RNA, 17 nt, Artificial Sequence
  Synthetic oligonucleotide: PDCD1-524
aaggaagccggucagag

SEQ ID NO: 14995 - RNA, 17 nt, Artificial Sequence
  Synthetic oligonucleotide: PDCD1-486
uuugaggagaaagggag

SEQ ID NO: 14996 - RNA, 17 nt, Artificial Sequence
  Synthetic oligonucleotide: PDCD1-490
acacaggcacggcugag

SEQ ID NO: 14997 - RNA, 17 nt, Artificial Sequence
  Synthetic oligonucleotide: PDCD1-457
cggcuggccugggugag

SEQ ID NO: 14998 - RNA, 17 nt, Artificial Sequence
  Synthetic oligonucleotide: PDCD1-341
accauugucuuuccuag

SEQ ID NO: 14999 - RNA, 17 nt, Artificial Sequence
  Synthetic oligonucleotide: PDCD1-323
ugcucccgggccgcacg

SEQ ID NO: 15000 - RNA, 17 nt, Artificial Sequence
  Synthetic oligonucleotide: PDCD1-501
cagggacacagggcacg

SEQ ID NO: 15001 - RNA, 17 nt, Artificial Sequence
  Synthetic oligonucleotide: PDCD1-519
aguggcugggcacuccg

SEQ ID NO: 15002 - RNA, 17 nt, Artificial Sequence
  Synthetic oligonucleotide: PDCD1-496
gggcacggggggcuccg

SEQ ID NO: 15003 - RNA, 17 nt, Artificial Sequence
  Synthetic oligonucleotide: PDCD1-513
cugagccccugcgggcg

SEQ ID NO: 15004 - RNA, 17 nt, Artificial Sequence
  Synthetic oligonucleotide: PDCD1-312
ccuggugguuggugucg

SEQ ID NO: 15005 - RNA, 17 nt, Artificial Sequence
  Synthetic oligonucleotide: PDCD1-332
uuucuccucaaagaagg

SEQ ID NO: 15006 - RNA, 17 nt, Artificial Sequence
  Synthetic oligonucleotide: PDCD1-500
agggacacagggcacgg

SEQ ID NO: 15007 - RNA, 17 nt, Artificial Sequence
  Synthetic oligonucleotide: PDCD1-512
ugagccccugcgggcgg

SEQ ID NO: 15008 - RNA, 17 nt, Artificial Sequence
  Synthetic oligonucleotide: PDCD1-499
gggacacagggcacggg

SEQ ID NO: 15009 - RNA, 17 nt, Artificial Sequence
  Synthetic oligonucleotide: PDCD1-515
agcugagccccugcggg

SEQ ID NO: 15010 - RNA, 17 nt, Artificial Sequence
  Synthetic oligonucleotide: PDCD1-453
ugggugaggggcugggg

SEQ ID NO: 15011 - RNA, 17 nt, Artificial Sequence
  Synthetic oligonucleotide: PDCD1-314
gugguuggugucguggg

SEQ ID NO: 15012 - RNA, 17 nt, Artificial Sequence
  Synthetic oligonucleotide: PDCD1-508
gcuaggaaagacaaugg

SEQ ID NO: 15013 - RNA, 17 nt, Artificial Sequence
  Synthetic oligonucleotide: PDCD1-310
ccaguuccaaacccugg

SEQ ID NO: 15014 - RNA, 17 nt, Artificial Sequence
  Synthetic oligonucleotide: PDCD1-511
ccugcgggcgggggaug

SEQ ID NO: 15015 - RNA, 17 nt, Artificial Sequence
  Synthetic oligonucleotide: PDCD1-336
guucucuguggacuaug

SEQ ID NO: 15016 - RNA, 17 nt, Artificial Sequence
  Synthetic oligonucleotide: PDCD1-349
ggagugcccagccacug

SEQ ID NO: 15017 - RNA, 17 nt, Artificial Sequence
  Synthetic oligonucleotide: PDCD1-517
cgucagcugagccccug

SEQ ID NO: 15018 - RNA, 17 nt, Artificial Sequence
  Synthetic oligonucleotide: PDCD1-350
ccagccacugaggccug

SEQ ID NO: 15019 - RNA, 17 nt, Artificial Sequence
  Synthetic oligonucleotide: PDCD1-492
gaacacaggcacggcug

SEQ ID NO: 15020 - RNA, 17 nt, Artificial Sequence
  Synthetic oligonucleotide: PDCD1-454
gccugggugaggggcug

SEQ ID NO: 15021 - RNA, 17 nt, Artificial Sequence
  Synthetic oligonucleotide: PDCD1-451
ggggcuggggugggcug

SEQ ID NO: 15022 - RNA, 17 nt, Artificial Sequence
  Synthetic oligonucleotide: PDCD1-333
cgugccuguguucucug

SEQ ID NO: 15023 - RNA, 17 nt, Artificial Sequence
  Synthetic oligonucleotide: PDCD1-474
gaugacguuaccucgug

SEQ ID NO: 15024 - RNA, 17 nt, Artificial Sequence
  Synthetic oligonucleotide: PDCD1-459
gccggcuggccugggug

SEQ ID NO: 15025 - RNA, 17 nt, Artificial Sequence
  Synthetic oligonucleotide: PDCD1-476
gcagagaaacacacuug

SEQ ID NO: 15026 - RNA, 17 nt, Artificial Sequence
  Synthetic oligonucleotide: PDCD1-489
gggguccuccuucuuug

SEQ ID NO: 15027 - RNA, 17 nt, Artificial Sequence
  Synthetic oligonucleotide: PDCD1-327
uucucugcagggacaau

SEQ ID NO: 15028 - RNA, 17 nt, Artificial Sequence
  Synthetic oligonucleotide: PDCD1-343
gucuuuccuagcggaau

SEQ ID NO: 15029 - RNA, 17 nt, Artificial Sequence
  Synthetic oligonucleotide: PDCD1-335
uguucucuguggacuau

SEQ ID NO: 15030 - RNA, 17 nt, Artificial Sequence
  Synthetic oligonucleotide: PDCD1-478
cugcagagaaacacacu

SEQ ID NO: 15031 - RNA, 17 nt, Artificial Sequence
  Synthetic oligonucleotide: PDCD1-324
acgucaucccagccccu

SEQ ID NO: 15032 - RNA, 17 nt, Artificial Sequence
  Synthetic oligonucleotide: PDCD1-348
gcucagcugacggcccu

SEQ ID NO: 15033 - RNA, 17 nt, Artificial Sequence
  Synthetic oligonucleotide: PDCD1-460
aacuggccggcuggccu

SEQ ID NO: 15034 - RNA, 17 nt, Artificial Sequence
  Synthetic oligonucleotide: PDCD1-354
ccucugaccggcuuccu

SEQ ID NO: 15035 - RNA, 17 nt, Artificial Sequence
  Synthetic oligonucleotide: PDCD1-510
gaggugcccauuccgcu

SEQ ID NO: 15036 - RNA, 17 nt, Artificial Sequence
  Synthetic oligonucleotide: PDCD1-3187
gggcaggccgaggggcu

SEQ ID NO: 15037 - RNA, 17 nt, Artificial Sequence
  Synthetic oligonucleotide: PDCD1-455
ggccugggugaggggcu

SEQ ID NO: 15038 - RNA, 17 nt, Artificial Sequence
  Synthetic oligonucleotide: PDCD1-520
cucaggccucaguggcu

SEQ ID NO: 15039 - RNA, 17 nt, Artificial Sequence
  Synthetic oligonucleotide: PDCD1-316
gucgugggcggccugcu

SEQ ID NO: 15040 - RNA, 17 nt, Artificial Sequence
  Synthetic oligonucleotide: PDCD1-352
aggauggacacugcucu

SEQ ID NO: 15041 - RNA, 17 nt, Artificial Sequence
  Synthetic oligonucleotide: PDCD1-319
ccuggugcugcuagucu

SEQ ID NO: 15042 - RNA, 17 nt, Artificial Sequence
  Synthetic oligonucleotide: PDCD1-313
cuggugguuggugucgu

SEQ ID NO: 15043 - RNA, 17 nt, Artificial Sequence
  Synthetic oligonucleotide: PDCD1-452
gggugaggggcuggggu

SEQ ID NO: 15044 - RNA, 17 nt, Artificial Sequence
  Synthetic oligonucleotide: PDCD1-311
uuccaaacccugguggu

SEQ ID NO: 15045 - RNA, 17 nt, Artificial Sequence
  Synthetic oligonucleotide: PDCD1-450
gggcuggggugggcugu

SEQ ID NO: 15046 - RNA, 17 nt, Artificial Sequence
  Synthetic oligonucleotide: PDCD1-477
ugcagagaaacacacuu

SEQ ID NO: 15047 - RNA, 17 nt, Artificial Sequence
  Synthetic oligonucleotide: PDCD1-465
caccaaccaccaggguu

SEQ ID NO: 15048 - RNA, 17 nt, Artificial Sequence
  Synthetic oligonucleotide: PDCD1-442
cacaaaggucagggguu

SEQ ID NO: 15049 - RNA, 20 nt, Artificial Sequence
  Synthetic oligonucleotide: PDCD1-400
ccuccuucuuugaggagaaa

SEQ ID NO: 15050 - RNA, 20 nt, Artificial Sequence
  Synthetic oligonucleotide: PDCD1-359
uucucucuggaagggcacaa

SEQ ID NO: 15051 - RNA, 20 nt, Artificial Sequence
  Synthetic oligonucleotide: PDCD1-422
cauuccgcuaggaaagacaa

SEQ ID NO: 15052 - RNA, 20 nt, Artificial Sequence
  Synthetic oligonucleotide: PDCD1-256
uugugcccuuccagagagaa

SEQ ID NO: 15053 - RNA, 20 nt, Artificial Sequence
  Synthetic oligonucleotide: PDCD1-401
uccuccuucuuugaggagaa

SEQ ID NO: 15054 - RNA, 20 nt, Artificial Sequence
  Synthetic oligonucleotide: PDCD1-292
cauugucuuuccuagcggaa

SEQ ID NO: 15055 - RNA, 20 nt, Artificial Sequence
  Synthetic oligonucleotide: PDCD1-360
uucugcccuucucucuggaa

SEQ ID NO: 15056 - RNA, 20 nt, Artificial Sequence
  Synthetic oligonucleotide: PDCD1-417
uccgucugcucagggacaca

SEQ ID NO: 15057 - RNA, 20 nt, Artificial Sequence
  Synthetic oligonucleotide: PDCD1-379
gcccacgacaccaaccacca

SEQ ID NO: 15058 - RNA, 20 nt, Artificial Sequence
  Synthetic oligonucleotide: PDCD1-396
gaaaagagugagacucacca

SEQ ID NO: 15059 - RNA, 20 nt, Artificial Sequence
  Synthetic oligonucleotide: PDCD1-441
cugcagaacacugguggcca

SEQ ID NO: 15060 - RNA, 20 nt, Artificial Sequence
  Synthetic oligonucleotide: PDCD1-295
caccucaucccccgcccgca

SEQ ID NO: 15061 - RNA, 20 nt, Artificial Sequence
  Synthetic oligonucleotide: PDCD1-406
guccacagagaacacaggca

SEQ ID NO: 15062 - RNA, 20 nt, Artificial Sequence
  Synthetic oligonucleotide: PDCD1-416
cugcucagggacacagggca

SEQ ID NO: 15063 - RNA, 20 nt, Artificial Sequence
  Synthetic oligonucleotide: PDCD1-276
cccaaguguguuucucugca

SEQ ID NO: 15064 - RNA, 20 nt, Artificial Sequence
  Synthetic oligonucleotide: PDCD1-419
uggcauacuccgucugcuca

SEQ ID NO: 15065 - RNA, 20 nt, Artificial Sequence
  Synthetic oligonucleotide: PDCD1-357
cuggaagggcacaaagguca

SEQ ID NO: 15066 - RNA, 20 nt, Artificial Sequence
  Synthetic oligonucleotide: PDCD1-281
ucucccuuucuccucaaaga

SEQ ID NO: 15067 - RNA, 20 nt, Artificial Sequence
  Synthetic oligonucleotide: PDCD1-290
gcccugugucccugagcaga

SEQ ID NO: 15068 - RNA, 20 nt, Artificial Sequence
  Synthetic oligonucleotide: PDCD1-438
ggccaaggaagccggucaga

SEQ ID NO: 15069 - RNA, 20 nt, Artificial Sequence
  Synthetic oligonucleotide: PDCD1-255
uuugugcccuuccagagaga

SEQ ID NO: 15070 - RNA, 20 nt, Artificial Sequence
  Synthetic oligonucleotide: PDCD1-398
ucuuugaggagaaagggaga

SEQ ID NO: 15071 - RNA, 20 nt, Artificial Sequence
  Synthetic oligonucleotide: PDCD1-431
ucaguggcugggcacuccga

SEQ ID NO: 15072 - RNA, 20 nt, Artificial Sequence
  Synthetic oligonucleotide: PDCD1-301
cagccacugaggccugagga

SEQ ID NO: 15073 - RNA, 20 nt, Artificial Sequence
  Synthetic oligonucleotide: PDCD1-361
cuucugcccuucucucugga

SEQ ID NO: 15074 - RNA, 20 nt, Artificial Sequence
  Synthetic oligonucleotide: PDCD1-384
ugcggcccgggagcagauga

SEQ ID NO: 15075 - RNA, 20 nt, Artificial Sequence
  Synthetic oligonucleotide: PDCD1-297
gcccgcaggggcucagcuga

SEQ ID NO: 15076 - RNA, 20 nt, Artificial Sequence
  Synthetic oligonucleotide: PDCD1-404
gagaacacaggcacggcuga

SEQ ID NO: 15077 - RNA, 20 nt, Artificial Sequence
  Synthetic oligonucleotide: PDCD1-371
uggccggcuggccuggguga

SEQ ID NO: 15078 - RNA, 20 nt, Artificial Sequence
  Synthetic oligonucleotide: PDCD1-284
ccuguguucucuguggacua

SEQ ID NO: 15079 - RNA, 20 nt, Artificial Sequence
  Synthetic oligonucleotide: PDCD1-377
caaccaccaggguuuggaac

SEQ ID NO: 15080 - RNA, 20 nt, Artificial Sequence
  Synthetic oligonucleotide: PDCD1-407
ccauaguccacagagaacac

SEQ ID NO: 15081 - RNA, 20 nt, Artificial Sequence
  Synthetic oligonucleotide: PDCD1-418
cuccgucugcucagggacac

SEQ ID NO: 15082 - RNA, 20 nt, Artificial Sequence
  Synthetic oligonucleotide: PDCD1-408
ccggggucuucucucgccac

SEQ ID NO: 15083 - RNA, 20 nt, Artificial Sequence
  Synthetic oligonucleotide: PDCD1-279
acaauaggagccaggcgcac

SEQ ID NO: 15084 - RNA, 20 nt, Artificial Sequence
  Synthetic oligonucleotide: PDCD1-415
ugcucagggacacagggcac

SEQ ID NO: 15085 - RNA, 20 nt, Artificial Sequence
  Synthetic oligonucleotide: PDCD1-303
cugcucuuggccccucugac

SEQ ID NO: 15086 - RNA, 20 nt, Artificial Sequence
  Synthetic oligonucleotide: PDCD1-380
cgcccacgacaccaaccacc

SEQ ID NO: 15087 - RNA, 20 nt, Artificial Sequence
  Synthetic oligonucleotide: PDCD1-382
ggacccagacuagcagcacc

SEQ ID NO: 15088 - RNA, 20 nt, Artificial Sequence
  Synthetic oligonucleotide: PDCD1-397
ggaaaagagugagacucacc

SEQ ID NO: 15089 - RNA, 20 nt, Artificial Sequence
  Synthetic oligonucleotide: PDCD1-388
gaaacacacuuggggucacc

SEQ ID NO: 15090 - RNA, 20 nt, Artificial Sequence
  Synthetic oligonucleotide: PDCD1-259
agccggccaguuccaaaccc

SEQ ID NO: 15091 - RNA, 20 nt, Artificial Sequence
  Synthetic oligonucleotide: PDCD1-257
cccaccccagccccucaccc

SEQ ID NO: 15092 - RNA, 20 nt, Artificial Sequence
  Synthetic oligonucleotide: PDCD1-289
ccaguggcgagagaagaccc

SEQ ID NO: 15093 - RNA, 20 nt, Artificial Sequence
  Synthetic oligonucleotide: PDCD1-280
caggcgcaccggccagcccc

SEQ ID NO: 15094 - RNA, 20 nt, Artificial Sequence
  Synthetic oligonucleotide: PDCD1-385
gacguuaccucgugcggccc

SEQ ID NO: 15095 - RNA, 20 nt, Artificial Sequence
  Synthetic oligonucleotide: PDCD1-272
ccuggccgucaucugcuccc

SEQ ID NO: 15096 - RNA, 20 nt, Artificial Sequence
  Synthetic oligonucleotide: PDCD1-267
gggcggccugcugggcagcc

SEQ ID NO: 15097 - RNA, 20 nt, Artificial Sequence
  Synthetic oligonucleotide: PDCD1-278
cugcagggacaauaggagcc

SEQ ID NO: 15098 - RNA, 20 nt, Artificial Sequence
  Synthetic oligonucleotide: PDCD1-392
caggggcuggccggugcgcc

SEQ ID NO: 15099 - RNA, 20 nt, Artificial Sequence
  Synthetic oligonucleotide: PDCD1-383
cccgggagcagaugacggcc

SEQ ID NO: 15100 - RNA, 20 nt, Artificial Sequence
  Synthetic oligonucleotide: PDCD1-386
ugacguuaccucgugcggcc

SEQ ID NO: 15101 - RNA, 20 nt, Artificial Sequence
  Synthetic oligonucleotide: PDCD1-374
uuggaacuggccggcuggcc

SEQ ID NO: 15102 - RNA, 20 nt, Artificial Sequence
  Synthetic oligonucleotide: PDCD1-410
cacagggcacggggggcucc

SEQ ID NO: 15103 - RNA, 20 nt, Artificial Sequence
  Synthetic oligonucleotide: PDCD1-271
uccuggccgucaucugcucc

SEQ ID NO: 15104 - RNA, 20 nt, Artificial Sequence
  Synthetic oligonucleotide: PDCD1-270
ggugcugcuagucugggucc

SEQ ID NO: 15105 - RNA, 20 nt, Artificial Sequence
  Synthetic oligonucleotide: PDCD1-440
acacugguggccaaggaagc

SEQ ID NO: 15106 - RNA, 20 nt, Artificial Sequence
  Synthetic oligonucleotide: PDCD1-381
gcagcaccaggcugcccagc

SEQ ID NO: 15107 - RNA, 20 nt, Artificial Sequence
  Synthetic oligonucleotide: PDCD1-258
agccccucacccaggccagc

SEQ ID NO: 15108 - RNA, 20 nt, Artificial Sequence
  Synthetic oligonucleotide: PDCD1-287
cucuguggacuauggggagc

SEQ ID NO: 15109 - RNA, 20 nt, Artificial Sequence
  Synthetic oligonucleotide: PDCD1-294
gcaccucaucccccgcccgc

SEQ ID NO: 15110 - RNA, 20 nt, Artificial Sequence
  Synthetic oligonucleotide: PDCD1-375
aggguuuggaacuggccggc

SEQ ID NO: 15111 - RNA, 20 nt, Artificial Sequence
  Synthetic oligonucleotide: PDCD1-427
ucagcugagccccugcgggc

SEQ ID NO: 15112 - RNA, 20 nt, Artificial Sequence
  Synthetic oligonucleotide: PDCD1-394
gagugagacucaccaggggc

SEQ ID NO: 15113 - RNA, 20 nt, Artificial Sequence
  Synthetic oligonucleotide: PDCD1-369
ggcuggccugggugaggggc

SEQ ID NO: 15114 - RNA, 20 nt, Artificial Sequence
  Synthetic oligonucleotide: PDCD1-376
caccaggguuuggaacuggc

SEQ ID NO: 15115 - RNA, 20 nt, Artificial Sequence
  Synthetic oligonucleotide: PDCD1-393
gagacucaccaggggcuggc

SEQ ID NO: 15116 - RNA, 20 nt, Artificial Sequence
  Synthetic oligonucleotide: PDCD1-434
cauccucaggccucaguggc

SEQ ID NO: 15117 - RNA, 20 nt, Artificial Sequence
  Synthetic oligonucleotide: PDCD1-429
gccgucagcugagccccugc

SEQ ID NO: 15118 - RNA, 20 nt, Artificial Sequence
  Synthetic oligonucleotide: PDCD1-265
uggugucgugggcggccugc

SEQ ID NO: 15119 - RNA, 20 nt, Artificial Sequence
  Synthetic oligonucleotide: PDCD1-275
ccccaaguguguuucucugc

SEQ ID NO: 15120 - RNA, 20 nt, Artificial Sequence
  Synthetic oligonucleotide: PDCD1-436
caagagcaguguccauccuc

SEQ ID NO: 15121 - RNA, 20 nt, Artificial Sequence
  Synthetic oligonucleotide: PDCD1-411
acacagggcacggggggcuc

SEQ ID NO: 15122 - RNA, 20 nt, Artificial Sequence
  Synthetic oligonucleotide: PDCD1-420
guggcauacuccgucugcuc

SEQ ID NO: 15123 - RNA, 20 nt, Artificial Sequence
  Synthetic oligonucleotide: PDCD1-362
ggcacuucugcccuucucuc

SEQ ID NO: 15124 - RNA, 20 nt, Artificial Sequence
  Synthetic oligonucleotide: PDCD1-268
gcagccuggugcugcuaguc

SEQ ID NO: 15125 - RNA, 20 nt, Artificial Sequence
  Synthetic oligonucleotide: PDCD1-358
ucuggaagggcacaaagguc

SEQ ID NO: 15126 - RNA, 20 nt, Artificial Sequence
  Synthetic oligonucleotide: PDCD1-395
aaaagagugagacucaccag

SEQ ID NO: 15127 - RNA, 20 nt, Artificial Sequence
  Synthetic oligonucleotide: PDCD1-288
auggggagcuggauuuccag

SEQ ID NO: 15128 - RNA, 20 nt, Artificial Sequence
  Synthetic oligonucleotide: PDCD1-296
accucaucccccgcccgcag

SEQ ID NO: 15129 - RNA, 20 nt, Artificial Sequence
  Synthetic oligonucleotide: PDCD1-435
uguccauccucaggccucag

SEQ ID NO: 15130 - RNA, 20 nt, Artificial Sequence
  Synthetic oligonucleotide: PDCD1-356
uggaagggcacaaaggucag

SEQ ID NO: 15131 - RNA, 20 nt, Artificial Sequence
  Synthetic oligonucleotide: PDCD1-439
uggccaaggaagccggucag

SEQ ID NO: 15132 - RNA, 20 nt, Artificial Sequence
  Synthetic oligonucleotide: PDCD1-437
gccaaggaagccggucagag

SEQ ID NO: 15133 - RNA, 20 nt, Artificial Sequence
  Synthetic oligonucleotide: PDCD1-399
uucuuugaggagaaagggag

SEQ ID NO: 15134 - RNA, 20 nt, Artificial Sequence
  Synthetic oligonucleotide: PDCD1-403
agaacacaggcacggcugag

SEQ ID NO: 15135 - RNA, 20 nt, Artificial Sequence
  Synthetic oligonucleotide: PDCD1-370
ggccggcuggccugggugag

SEQ ID NO: 15136 - RNA, 20 nt, Artificial Sequence
  Synthetic oligonucleotide: PDCD1-291
gccaccauugucuuuccuag

SEQ ID NO: 15137 - RNA, 20 nt, Artificial Sequence
  Synthetic oligonucleotide: PDCD1-273
aucugcucccgggccgcacg

SEQ ID NO: 15138 - RNA, 20 nt, Artificial Sequence
  Synthetic oligonucleotide: PDCD1-414
gcucagggacacagggcacg

SEQ ID NO: 15139 - RNA, 20 nt, Artificial Sequence
  Synthetic oligonucleotide: PDCD1-432
cucaguggcugggcacuccg

SEQ ID NO: 15140 - RNA, 20 nt, Artificial Sequence
  Synthetic oligonucleotide: PDCD1-409
acagggcacggggggcuccg

SEQ ID NO: 15141 - RNA, 20 nt, Artificial Sequence
  Synthetic oligonucleotide: PDCD1-426
cagcugagccccugcgggcg

SEQ ID NO: 15142 - RNA, 20 nt, Artificial Sequence
  Synthetic oligonucleotide: PDCD1-262
aacccuggugguuggugucg

SEQ ID NO: 15143 - RNA, 20 nt, Artificial Sequence
  Synthetic oligonucleotide: PDCD1-282
cccuuucuccucaaagaagg

SEQ ID NO: 15144 - RNA, 20 nt, Artificial Sequence
  Synthetic oligonucleotide: PDCD1-413
cucagggacacagggcacgg

SEQ ID NO: 15145 - RNA, 20 nt, Artificial Sequence
  Synthetic oligonucleotide: PDCD1-425
agcugagccccugcgggcgg

SEQ ID NO: 15146 - RNA, 20 nt, Artificial Sequence
  Synthetic oligonucleotide: PDCD1-412
ucagggacacagggcacggg

SEQ ID NO: 15147 - RNA, 20 nt, Artificial Sequence
  Synthetic oligonucleotide: PDCD1-428
gucagcugagccccugcggg

SEQ ID NO: 15148 - RNA, 20 nt, Artificial Sequence
  Synthetic oligonucleotide: PDCD1-366
gccugggugaggggcugggg

SEQ ID NO: 15149 - RNA, 20 nt, Artificial Sequence
  Synthetic oligonucleotide: PDCD1-264
cuggugguuggugucguggg

SEQ ID NO: 15150 - RNA, 20 nt, Artificial Sequence
  Synthetic oligonucleotide: PDCD1-421
uccgcuaggaaagacaaugg

SEQ ID NO: 15151 - RNA, 20 nt, Artificial Sequence
  Synthetic oligonucleotide: PDCD1-260
cggccaguuccaaacccugg

SEQ ID NO: 15152 - RNA, 20 nt, Artificial Sequence
  Synthetic oligonucleotide: PDCD1-424
gccccugcgggcgggggaug

SEQ ID NO: 15153 - RNA, 20 nt, Artificial Sequence
  Synthetic oligonucleotide: PDCD1-286
uguguucucuguggacuaug

SEQ ID NO: 15154 - RNA, 20 nt, Artificial Sequence
  Synthetic oligonucleotide: PDCD1-299
cucggagugcccagccacug

SEQ ID NO: 15155 - RNA, 20 nt, Artificial Sequence
  Synthetic oligonucleotide: PDCD1-430
ggccgucagcugagccccug

SEQ ID NO: 15156 - RNA, 20 nt, Artificial Sequence
  Synthetic oligonucleotide: PDCD1-300
ugcccagccacugaggccug

SEQ ID NO: 15157 - RNA, 20 nt, Artificial Sequence
  Synthetic oligonucleotide: PDCD1-405
agagaacacaggcacggcug

SEQ ID NO: 15158 - RNA, 20 nt, Artificial Sequence
  Synthetic oligonucleotide: PDCD1-367
cuggccugggugaggggcug

SEQ ID NO: 15159 - RNA, 20 nt, Artificial Sequence
  Synthetic oligonucleotide: PDCD1-364
ugaggggcuggggugggcug

SEQ ID NO: 15160 - RNA, 20 nt, Artificial Sequence
  Synthetic oligonucleotide: PDCD1-283
agccgugccuguguucucug

SEQ ID NO: 15161 - RNA, 20 nt, Artificial Sequence
  Synthetic oligonucleotide: PDCD1-387
ugggaugacguuaccucgug

SEQ ID NO: 15162 - RNA, 20 nt, Artificial Sequence
  Synthetic oligonucleotide: PDCD1-372
cuggccggcuggccugggug

SEQ ID NO: 15163 - RNA, 20 nt, Artificial Sequence
  Synthetic oligonucleotide: PDCD1-389
ccugcagagaaacacacuug

SEQ ID NO: 15164 - RNA, 20 nt, Artificial Sequence
  Synthetic oligonucleotide: PDCD1-402
ugagggguccuccuucuuug

SEQ ID NO: 15165 - RNA, 20 nt, Artificial Sequence
  Synthetic oligonucleotide: PDCD1-277
uguuucucugcagggacaau

SEQ ID NO: 15166 - RNA, 20 nt, Artificial Sequence
  Synthetic oligonucleotide: PDCD1-293
auugucuuuccuagcggaau

SEQ ID NO: 15167 - RNA, 20 nt, Artificial Sequence
  Synthetic oligonucleotide: PDCD1-285
cuguguucucuguggacuau

SEQ ID NO: 15168 - RNA, 20 nt, Artificial Sequence
  Synthetic oligonucleotide: PDCD1-391
ucccugcagagaaacacacu

SEQ ID NO: 15169 - RNA, 20 nt, Artificial Sequence
  Synthetic oligonucleotide: PDCD1-274
guaacgucaucccagccccu

SEQ ID NO: 15170 - RNA, 20 nt, Artificial Sequence
  Synthetic oligonucleotide: PDCD1-298
ggggcucagcugacggcccu

SEQ ID NO: 15171 - RNA, 20 nt, Artificial Sequence
  Synthetic oligonucleotide: PDCD1-373
uggaacuggccggcuggccu

SEQ ID NO: 15172 - RNA, 20 nt, Artificial Sequence
  Synthetic oligonucleotide: PDCD1-304
gccccucugaccggcuuccu

SEQ ID NO: 15173 - RNA, 20 nt, Artificial Sequence
  Synthetic oligonucleotide: PDCD1-423
gaugaggugcccauuccgcu

SEQ ID NO: 15174 - RNA, 20 nt, Artificial Sequence
  Synthetic oligonucleotide: PDCD1-368
gcuggccugggugaggggcu

SEQ ID NO: 15175 - RNA, 20 nt, Artificial Sequence
  Synthetic oligonucleotide: PDCD1-433
auccucaggccucaguggcu

SEQ ID NO: 15176 - RNA, 20 nt, Artificial Sequence
  Synthetic oligonucleotide: PDCD1-266
ggugucgugggcggccugcu

SEQ ID NO: 15177 - RNA, 20 nt, Artificial Sequence
  Synthetic oligonucleotide: PDCD1-302
cugaggauggacacugcucu

SEQ ID NO: 15178 - RNA, 20 nt, Artificial Sequence
  Synthetic oligonucleotide: PDCD1-269
cagccuggugcugcuagucu

SEQ ID NO: 15179 - RNA, 20 nt, Artificial Sequence
  Synthetic oligonucleotide: PDCD1-263
acccuggugguuggugucgu

SEQ ID NO: 15180 - RNA, 20 nt, Artificial Sequence
  Synthetic oligonucleotide: PDCD1-365
ccugggugaggggcuggggu

SEQ ID NO: 15181 - RNA, 20 nt, Artificial Sequence
  Synthetic oligonucleotide: PDCD1-261
caguuccaaacccugguggu

SEQ ID NO: 15182 - RNA, 20 nt, Artificial Sequence
  Synthetic oligonucleotide: PDCD1-363
gaggggcuggggugggcugu

SEQ ID NO: 15183 - RNA, 20 nt, Artificial Sequence
  Synthetic oligonucleotide: PDCD1-390
cccugcagagaaacacacuu

SEQ ID NO: 15184 - RNA, 20 nt, Artificial Sequence
  Synthetic oligonucleotide: PDCD1-378
cgacaccaaccaccaggguu

SEQ ID NO: 15185 - RNA, 20 nt, Artificial Sequence
  Synthetic oligonucleotide: PDCD1-355
gggcacaaaggucagggguu

SEQ ID NO: 15186 - RNA, 18 nt, Artificial Sequence
  Synthetic oligonucleotide: PDCD1-3188
gacuggccagggcgccug

SEQ ID NO: 15187 - RNA, 19 nt, Artificial Sequence
  Synthetic oligonucleotide: PDCD1-3189
cgacuggccagggcgccug

SEQ ID NO: 15188 - RNA, 20 nt, Artificial Sequence
  Synthetic oligonucleotide: PDCD1-125
acgacuggccagggcgccug

SEQ ID NO: 15189 - RNA, 21 nt, Artificial Sequence
  Synthetic oligonucleotide: PDCD1-3190
gacgacuggccagggcgccug

SEQ ID NO: 15190 - RNA, 22 nt, Artificial Sequence
  Synthetic oligonucleotide: PDCD1-3191
agacgacuggccagggcgccug

SEQ ID NO: 15191 - RNA, 23 nt, Artificial Sequence
  Synthetic oligonucleotide: PDCD1-3192
cagacgacuggccagggcgccug

SEQ ID NO: 15192 - RNA, 24 nt, Artificial Sequence
  Synthetic oligonucleotide: PDCD1-3193
ccagacgacuggccagggcgccug

SEQ ID NO: 15193 - RNA, 21 nt, Artificial Sequence
  Synthetic oligonucleotide: PDCD1-3194
ggggguuccagggccugucug

SEQ ID NO: 15194 - RNA, 22 nt, Artificial Sequence
  Synthetic oligonucleotide: PDCD1-3195
gggggguuccagggccugucug

SEQ ID NO: 15195 - RNA, 23 nt, Artificial Sequence
  Synthetic oligonucleotide: PDCD1-3196
ggggggguuccagggccugucug

SEQ ID NO: 15196 - RNA, 24 nt, Artificial Sequence
  Synthetic oligonucleotide: PDCD1-3197
uggggggguuccagggccugucug

SEQ ID NO: 15197 - RNA, 18 nt, Artificial Sequence
  Synthetic oligonucleotide: PDCD1-3198
uacaacugggcuggcggc

SEQ ID NO: 15198 - RNA, 19 nt, Artificial Sequence
  Synthetic oligonucleotide: PDCD1-3199
cuacaacugggcuggcggc

SEQ ID NO: 15199 - RNA, 20 nt, Artificial Sequence
  Synthetic oligonucleotide: PDCD1-531
gcuacaacugggcuggcggc

SEQ ID NO: 15200 - RNA, 21 nt, Artificial Sequence
  Synthetic oligonucleotide: PDCD1-3200
ugcuacaacugggcuggcggc

SEQ ID NO: 15201 - RNA, 22 nt, Artificial Sequence
  Synthetic oligonucleotide: PDCD1-3201
gugcuacaacugggcuggcggc

SEQ ID NO: 15202 - RNA, 23 nt, Artificial Sequence
  Synthetic oligonucleotide: PDCD1-3202
ggugcuacaacugggcuggcggc

SEQ ID NO: 15203 - RNA, 24 nt, Artificial Sequence
  Synthetic oligonucleotide: PDCD1-3203
cggugcuacaacugggcuggcggc

SEQ ID NO: 15204 - RNA, 18 nt, Artificial Sequence
  Synthetic oligonucleotide: PDCD1-3204
ggaugguucuuagguagg

SEQ ID NO: 15205 - RNA, 19 nt, Artificial Sequence
  Synthetic oligonucleotide: PDCD1-3205
aggaugguucuuagguagg

SEQ ID NO: 15206 - RNA, 20 nt, Artificial Sequence
  Synthetic oligonucleotide: PDCD1-115
caggaugguucuuagguagg

SEQ ID NO: 15207 - RNA, 21 nt, Artificial Sequence
  Synthetic oligonucleotide: PDCD1-3206
ccaggaugguucuuagguagg

SEQ ID NO: 15208 - RNA, 22 nt, Artificial Sequence
  Synthetic oligonucleotide: PDCD1-3207
gccaggaugguucuuagguagg

SEQ ID NO: 15209 - RNA, 23 nt, Artificial Sequence
  Synthetic oligonucleotide: PDCD1-3208
ggccaggaugguucuuagguagg

SEQ ID NO: 15210 - RNA, 24 nt, Artificial Sequence
  Synthetic oligonucleotide: PDCD1-3209
cggccaggaugguucuuagguagg

SEQ ID NO: 15211 - RNA, 21 nt, Artificial Sequence
  Synthetic oligonucleotide: PDCD1-3210
agagagccugcgggcagagcu

SEQ ID NO: 15212 - RNA, 22 nt, Artificial Sequence
  Synthetic oligonucleotide: PDCD1-3211
aagagagccugcgggcagagcu

SEQ ID NO: 15213 - RNA, 23 nt, Artificial Sequence
  Synthetic oligonucleotide: PDCD1-3212
aaagagagccugcgggcagagcu

SEQ ID NO: 15214 - RNA, 24 nt, Artificial Sequence
  Synthetic oligonucleotide: PDCD1-3213
caaagagagccugcgggcagagcu

SEQ ID NO: 15215 - RNA, 18 nt, Artificial Sequence
  Synthetic oligonucleotide: PDCD1-3214
ugccuggagcagccccac

SEQ ID NO: 15216 - RNA, 19 nt, Artificial Sequence
  Synthetic oligonucleotide: PDCD1-3215
augccuggagcagccccac

SEQ ID NO: 15217 - RNA, 20 nt, Artificial Sequence
  Synthetic oligonucleotide: PDCD1-587
caugccuggagcagccccac

SEQ ID NO: 15218 - RNA, 21 nt, Artificial Sequence
  Synthetic oligonucleotide: PDCD1-3216
gcaugccuggagcagccccac

SEQ ID NO: 15219 - RNA, 22 nt, Artificial Sequence
  Synthetic oligonucleotide: PDCD1-3217
ugcaugccuggagcagccccac

SEQ ID NO: 15220 - RNA, 23 nt, Artificial Sequence
  Synthetic oligonucleotide: PDCD1-3218
cugcaugccuggagcagccccac

SEQ ID NO: 15221 - RNA, 24 nt, Artificial Sequence
  Synthetic oligonucleotide: PDCD1-3219
ucugcaugccuggagcagccccac

SEQ ID NO: 15222 - RNA, 18 nt, Artificial Sequence
  Synthetic oligonucleotide: PDCD1-3220
gggcuggggagaaggugg

SEQ ID NO: 15223 - RNA, 19 nt, Artificial Sequence
  Synthetic oligonucleotide: PDCD1-3221
agggcuggggagaaggugg

SEQ ID NO: 15224 - RNA, 20 nt, Artificial Sequence
  Synthetic oligonucleotide: PDCD1-87
cagggcuggggagaaggugg

SEQ ID NO: 15225 - RNA, 21 nt, Artificial Sequence
  Synthetic oligonucleotide: PDCD1-3222
gcagggcuggggagaaggugg

SEQ ID NO: 15226 - RNA, 22 nt, Artificial Sequence
  Synthetic oligonucleotide: PDCD1-3223
agcagggcuggggagaaggugg

SEQ ID NO: 15227 - RNA, 23 nt, Artificial Sequence
  Synthetic oligonucleotide: PDCD1-3224
gagcagggcuggggagaaggugg

SEQ ID NO: 15228 - RNA, 24 nt, Artificial Sequence
  Synthetic oligonucleotide: PDCD1-3225
cgagcagggcuggggagaaggugg

SEQ ID NO: 15229 - RNA, 18 nt, Artificial Sequence
  Synthetic oligonucleotide: PDCD1-3226
gguuccagggccugucug

SEQ ID NO: 15230 - RNA, 19 nt, Artificial Sequence
  Synthetic oligonucleotide: PDCD1-3227
ggguuccagggccugucug

SEQ ID NO: 15231 - RNA, 20 nt, Artificial Sequence
  Synthetic oligonucleotide: PDCD1-94
gggguuccagggccugucug

SEQ ID NO: 15232 - RNA, 18 nt, Artificial Sequence
  Synthetic oligonucleotide: PDCD1-3228
ccucggaggccccggggc

SEQ ID NO: 15233 - RNA, 19 nt, Artificial Sequence
  Synthetic oligonucleotide: PDCD1-3229
gccucggaggccccggggc

SEQ ID NO: 15234 - RNA, 20 nt, Artificial Sequence
  Synthetic oligonucleotide: PDCD1-37
ggccucggaggccccggggc

SEQ ID NO: 15235 - RNA, 21 nt, Artificial Sequence
  Synthetic oligonucleotide: PDCD1-3230
cggccucggaggccccggggc

SEQ ID NO: 15236 - RNA, 22 nt, Artificial Sequence
  Synthetic oligonucleotide: PDCD1-3231
gcggccucggaggccccggggc

SEQ ID NO: 15237 - RNA, 23 nt, Artificial Sequence
  Synthetic oligonucleotide: PDCD1-3232
ugcggccucggaggccccggggc

SEQ ID NO: 15238 - RNA, 24 nt, Artificial Sequence
  Synthetic oligonucleotide: PDCD1-3233
gugcggccucggaggccccggggc

SEQ ID NO: 15239 - RNA, 18 nt, Artificial Sequence
  Synthetic oligonucleotide: PDCD1-3234
gagccugcgggcagagcu

SEQ ID NO: 15240 - RNA, 19 nt, Artificial Sequence
  Synthetic oligonucleotide: PDCD1-3235
agagccugcgggcagagcu

SEQ ID NO: 15241 - RNA, 20 nt, Artificial Sequence
  Synthetic oligonucleotide: PDCD1-557
gagagccugcgggcagagcu

SEQ ID NO: 15242 - RNA, 18 nt, Artificial Sequence
  Synthetic oligonucleotide: PDCD1-3236
uugggcaguugugugaca

SEQ ID NO: 15243 - RNA, 19 nt, Artificial Sequence
  Synthetic oligonucleotide: PDCD1-3237
guugggcaguugugugaca

SEQ ID NO: 15244 - RNA, 20 nt, Artificial Sequence
  Synthetic oligonucleotide: PDCD1-56
cguugggcaguugugugaca

SEQ ID NO: 15245 - RNA, 21 nt, Artificial Sequence
  Synthetic oligonucleotide: PDCD1-3238
ccguugggcaguugugugaca

SEQ ID NO: 15246 - RNA, 22 nt, Artificial Sequence
  Synthetic oligonucleotide: PDCD1-3239
cccguugggcaguugugugaca

SEQ ID NO: 15247 - RNA, 23 nt, Artificial Sequence
  Synthetic oligonucleotide: PDCD1-3240
gcccguugggcaguugugugaca

SEQ ID NO: 15248 - RNA, 24 nt, Artificial Sequence
  Synthetic oligonucleotide: PDCD1-3241
cgcccguugggcaguugugugaca

SEQ ID NO: 15249 - RNA, 18 nt, Artificial Sequence
  Synthetic oligonucleotide: PDCD1-3242
gccagggagauggcccca

SEQ ID NO: 15250 - RNA, 19 nt, Artificial Sequence
  Synthetic oligonucleotide: PDCD1-3243
ggccagggagauggcccca

SEQ ID NO: 15251 - RNA, 20 nt, Artificial Sequence
  Synthetic oligonucleotide: PDCD1-640
gggccagggagauggcccca

SEQ ID NO: 15252 - RNA, 21 nt, Artificial Sequence
  Synthetic oligonucleotide: PDCD1-3244
ggggccagggagauggcccca

SEQ ID NO: 15253 - RNA, 22 nt, Artificial Sequence
  Synthetic oligonucleotide: PDCD1-3245
gggggccagggagauggcccca

SEQ ID NO: 15254 - RNA, 23 nt, Artificial Sequence
  Synthetic oligonucleotide: PDCD1-3246
ugggggccagggagauggcccca

SEQ ID NO: 15255 - RNA, 24 nt, Artificial Sequence
  Synthetic oligonucleotide: PDCD1-3247
uugggggccagggagauggcccca

SEQ ID NO: 15256 - RNA, 18 nt, Artificial Sequence
  Synthetic oligonucleotide: PDCD1-3248
ucugcgccuugggggcca

SEQ ID NO: 15257 - RNA, 19 nt, Artificial Sequence
  Synthetic oligonucleotide: PDCD1-3249
aucugcgccuugggggcca

SEQ ID NO: 15258 - RNA, 20 nt, Artificial Sequence
  Synthetic oligonucleotide: PDCD1-47
gaucugcgccuugggggcca

SEQ ID NO: 15259 - RNA, 21 nt, Artificial Sequence
  Synthetic oligonucleotide: PDCD1-3250
ugaucugcgccuugggggcca

SEQ ID NO: 15260 - RNA, 22 nt, Artificial Sequence
  Synthetic oligonucleotide: PDCD1-3251
uugaucugcgccuugggggcca

SEQ ID NO: 15261 - RNA, 23 nt, Artificial Sequence
  Synthetic oligonucleotide: PDCD1-3252
uuugaucugcgccuugggggcca

SEQ ID NO: 15262 - RNA, 24 nt, Artificial Sequence
  Synthetic oligonucleotide: PDCD1-3253
cuuugaucugcgccuugggggcca

SEQ ID NO: 15263 - RNA, 18 nt, Artificial Sequence
  Synthetic oligonucleotide: PDCD1-3254
ucuggggagucugagaga

SEQ ID NO: 15264 - RNA, 19 nt, Artificial Sequence
  Synthetic oligonucleotide: PDCD1-3255
gucuggggagucugagaga

SEQ ID NO: 15265 - RNA, 20 nt, Artificial Sequence
  Synthetic oligonucleotide: PDCD1-95
ugucuggggagucugagaga

SEQ ID NO: 15266 - RNA, 21 nt, Artificial Sequence
  Synthetic oligonucleotide: PDCD1-3256
cugucuggggagucugagaga

SEQ ID NO: 15267 - RNA, 22 nt, Artificial Sequence
  Synthetic oligonucleotide: PDCD1-3257
ccugucuggggagucugagaga

SEQ ID NO: 15268 - RNA, 23 nt, Artificial Sequence
  Synthetic oligonucleotide: PDCD1-3258
gccugucuggggagucugagaga

SEQ ID NO: 15269 - RNA, 24 nt, Artificial Sequence
  Synthetic oligonucleotide: PDCD1-3259
ggccugucuggggagucugagaga

SEQ ID NO: 15270 - RNA, 18 nt, Artificial Sequence
  Synthetic oligonucleotide: PDCD1-3260
gauggagagaggugagga

SEQ ID NO: 15271 - RNA, 19 nt, Artificial Sequence
  Synthetic oligonucleotide: PDCD1-3261
agauggagagaggugagga

SEQ ID NO: 15272 - RNA, 20 nt, Artificial Sequence
  Synthetic oligonucleotide: PDCD1-98
gagauggagagaggugagga

SEQ ID NO: 15273 - RNA, 21 nt, Artificial Sequence
  Synthetic oligonucleotide: PDCD1-3262
agagauggagagaggugagga

SEQ ID NO: 15274 - RNA, 22 nt, Artificial Sequence
  Synthetic oligonucleotide: PDCD1-3263
gagagauggagagaggugagga

SEQ ID NO: 15275 - RNA, 23 nt, Artificial Sequence
  Synthetic oligonucleotide: PDCD1-3264
ugagagauggagagaggugagga

SEQ ID NO: 15276 - RNA, 24 nt, Artificial Sequence
  Synthetic oligonucleotide: PDCD1-3265
cugagagauggagagaggugagga

SEQ ID NO: 15277 - RNA, 18 nt, Artificial Sequence
  Synthetic oligonucleotide: PDCD1-3266
gggagucugagagaugga

SEQ ID NO: 15278 - RNA, 19 nt, Artificial Sequence
  Synthetic oligonucleotide: PDCD1-3267
ggggagucugagagaugga

SEQ ID NO: 15279 - RNA, 20 nt, Artificial Sequence
  Synthetic oligonucleotide: PDCD1-599
uggggagucugagagaugga

SEQ ID NO: 15280 - RNA, 21 nt, Artificial Sequence
  Synthetic oligonucleotide: PDCD1-3268
cuggggagucugagagaugga

SEQ ID NO: 15281 - RNA, 22 nt, Artificial Sequence
  Synthetic oligonucleotide: PDCD1-3269
ucuggggagucugagagaugga

SEQ ID NO: 15282 - RNA, 23 nt, Artificial Sequence
  Synthetic oligonucleotide: PDCD1-3270
gucuggggagucugagagaugga

SEQ ID NO: 15283 - RNA, 24 nt, Artificial Sequence
  Synthetic oligonucleotide: PDCD1-3271
ugucuggggagucugagagaugga

SEQ ID NO: 15284 - RNA, 18 nt, Artificial Sequence
  Synthetic oligonucleotide: PDCD1-3272
guugggcaguugugugac

SEQ ID NO: 15285 - RNA, 19 nt, Artificial Sequence
  Synthetic oligonucleotide: PDCD1-3273
cguugggcaguugugugac

SEQ ID NO: 15286 - RNA, 20 nt, Artificial Sequence
  Synthetic oligonucleotide: PDCD1-635
ccguugggcaguugugugac

SEQ ID NO: 15287 - RNA, 21 nt, Artificial Sequence
  Synthetic oligonucleotide: PDCD1-3274
cccguugggcaguugugugac

SEQ ID NO: 15288 - RNA, 22 nt, Artificial Sequence
  Synthetic oligonucleotide: PDCD1-3275
gcccguugggcaguugugugac

SEQ ID NO: 15289 - RNA, 23 nt, Artificial Sequence
  Synthetic oligonucleotide: PDCD1-3276
cgcccguugggcaguugugugac

SEQ ID NO: 15290 - RNA, 24 nt, Artificial Sequence
  Synthetic oligonucleotide: PDCD1-3277
acgcccguugggcaguugugugac

SEQ ID NO: 15291 - RNA, 18 nt, Artificial Sequence
  Synthetic oligonucleotide: PDCD1-3278
uuguccccuucggucacc

SEQ ID NO: 15292 - RNA, 19 nt, Artificial Sequence
  Synthetic oligonucleotide: PDCD1-3279
guuguccccuucggucacc

SEQ ID NO: 15293 - RNA, 20 nt, Artificial Sequence
  Synthetic oligonucleotide: PDCD1-621
cguuguccccuucggucacc

SEQ ID NO: 15294 - RNA, 21 nt, Artificial Sequence
  Synthetic oligonucleotide: PDCD1-3280
gcguuguccccuucggucacc

SEQ ID NO: 15295 - RNA, 22 nt, Artificial Sequence
  Synthetic oligonucleotide: PDCD1-3281
ggcguuguccccuucggucacc

SEQ ID NO: 15296 - RNA, 23 nt, Artificial Sequence
  Synthetic oligonucleotide: PDCD1-3282
uggcguuguccccuucggucacc

SEQ ID NO: 15297 - RNA, 24 nt, Artificial Sequence
  Synthetic oligonucleotide: PDCD1-3283
guggcguuguccccuucggucacc

SEQ ID NO: 15298 - RNA, 18 nt, Artificial Sequence
  Synthetic oligonucleotide: PDCD1-3284
gaggccgcaccugucacc

SEQ ID NO: 15299 - RNA, 19 nt, Artificial Sequence
  Synthetic oligonucleotide: PDCD1-3285
cgaggccgcaccugucacc

SEQ ID NO: 15300 - RNA, 20 nt, Artificial Sequence
  Synthetic oligonucleotide: PDCD1-807
ccgaggccgcaccugucacc

SEQ ID NO: 15301 - RNA, 21 nt, Artificial Sequence
  Synthetic oligonucleotide: PDCD1-3286
uccgaggccgcaccugucacc

SEQ ID NO: 15302 - RNA, 22 nt, Artificial Sequence
  Synthetic oligonucleotide: PDCD1-3287
cuccgaggccgcaccugucacc

SEQ ID NO: 15303 - RNA, 23 nt, Artificial Sequence
  Synthetic oligonucleotide: PDCD1-3288
ccuccgaggccgcaccugucacc

SEQ ID NO: 15304 - RNA, 24 nt, Artificial Sequence
  Synthetic oligonucleotide: PDCD1-3289
gccuccgaggccgcaccugucacc

SEQ ID NO: 15305 - RNA, 18 nt, Artificial Sequence
  Synthetic oligonucleotide: PDCD1-3290
cucucuuugaucugcgcc

SEQ ID NO: 15306 - RNA, 19 nt, Artificial Sequence
  Synthetic oligonucleotide: PDCD1-3291
gcucucuuugaucugcgcc

SEQ ID NO: 15307 - RNA, 20 nt, Artificial Sequence
  Synthetic oligonucleotide: PDCD1-646
ggcucucuuugaucugcgcc

SEQ ID NO: 15308 - RNA, 21 nt, Artificial Sequence
  Synthetic oligonucleotide: PDCD1-3292
aggcucucuuugaucugcgcc

SEQ ID NO: 15309 - RNA, 22 nt, Artificial Sequence
  Synthetic oligonucleotide: PDCD1-3293
caggcucucuuugaucugcgcc

SEQ ID NO: 15310 - RNA, 23 nt, Artificial Sequence
  Synthetic oligonucleotide: PDCD1-3294
gcaggcucucuuugaucugcgcc

SEQ ID NO: 15311 - RNA, 24 nt, Artificial Sequence
  Synthetic oligonucleotide: PDCD1-3295
cgcaggcucucuuugaucugcgcc

SEQ ID NO: 15312 - RNA, 18 nt, Artificial Sequence
  Synthetic oligonucleotide: PDCD1-3296
aucugcgccuugggggcc

SEQ ID NO: 15313 - RNA, 19 nt, Artificial Sequence
  Synthetic oligonucleotide: PDCD1-3297
gaucugcgccuugggggcc

SEQ ID NO: 15314 - RNA, 20 nt, Artificial Sequence
  Synthetic oligonucleotide: PDCD1-46
ugaucugcgccuugggggcc

SEQ ID NO: 15315 - RNA, 21 nt, Artificial Sequence
  Synthetic oligonucleotide: PDCD1-3298
uugaucugcgccuugggggcc

SEQ ID NO: 15316 - RNA, 22 nt, Artificial Sequence
  Synthetic oligonucleotide: PDCD1-3299
uuugaucugcgccuugggggcc

SEQ ID NO: 15317 - RNA, 23 nt, Artificial Sequence
  Synthetic oligonucleotide: PDCD1-3300
cuuugaucugcgccuugggggcc

SEQ ID NO: 15318 - RNA, 24 nt, Artificial Sequence
  Synthetic oligonucleotide: PDCD1-3301
ucuuugaucugcgccuugggggcc

SEQ ID NO: 15319 - RNA, 18 nt, Artificial Sequence
  Synthetic oligonucleotide: PDCD1-3302
cugugggaucugcaugcc

SEQ ID NO: 15320 - RNA, 19 nt, Artificial Sequence
  Synthetic oligonucleotide: PDCD1-3303
ccugugggaucugcaugcc

SEQ ID NO: 15321 - RNA, 20 nt, Artificial Sequence
  Synthetic oligonucleotide: PDCD1-127
gccugugggaucugcaugcc

SEQ ID NO: 15322 - RNA, 21 nt, Artificial Sequence
  Synthetic oligonucleotide: PDCD1-3304
cgccugugggaucugcaugcc

SEQ ID NO: 15323 - RNA, 22 nt, Artificial Sequence
  Synthetic oligonucleotide: PDCD1-3305
gcgccugugggaucugcaugcc

SEQ ID NO: 15324 - RNA, 23 nt, Artificial Sequence
  Synthetic oligonucleotide: PDCD1-3306
ggcgccugugggaucugcaugcc

SEQ ID NO: 15325 - RNA, 24 nt, Artificial Sequence
  Synthetic oligonucleotide: PDCD1-3307
gggcgccugugggaucugcaugcc

SEQ ID NO: 15326 - RNA, 18 nt, Artificial Sequence
  Synthetic oligonucleotide: PDCD1-3308
ccgggcuggcugcggucc

SEQ ID NO: 15327 - RNA, 19 nt, Artificial Sequence
  Synthetic oligonucleotide: PDCD1-3309
gccgggcuggcugcggucc

SEQ ID NO: 15328 - RNA, 20 nt, Artificial Sequence
  Synthetic oligonucleotide: PDCD1-632
ggccgggcuggcugcggucc

SEQ ID NO: 15329 - RNA, 21 nt, Artificial Sequence
  Synthetic oligonucleotide: PDCD1-3310
uggccgggcuggcugcggucc

SEQ ID NO: 15330 - RNA, 22 nt, Artificial Sequence
  Synthetic oligonucleotide: PDCD1-3311
cuggccgggcuggcugcggucc

SEQ ID NO: 15331 - RNA, 23 nt, Artificial Sequence
  Synthetic oligonucleotide: PDCD1-3312
ccuggccgggcuggcugcggucc

SEQ ID NO: 15332 - RNA, 24 nt, Artificial Sequence
  Synthetic oligonucleotide: PDCD1-3313
uccuggccgggcuggcugcggucc

SEQ ID NO: 15333 - RNA, 18 nt, Artificial Sequence
  Synthetic oligonucleotide: PDCD1-3314
augcgguaccaguuuagc

SEQ ID NO: 15334 - RNA, 19 nt, Artificial Sequence
  Synthetic oligonucleotide: PDCD1-3315
caugcgguaccaguuuagc

SEQ ID NO: 15335 - RNA, 20 nt, Artificial Sequence
  Synthetic oligonucleotide: PDCD1-626
ucaugcgguaccaguuuagc

SEQ ID NO: 15336 - RNA, 21 nt, Artificial Sequence
  Synthetic oligonucleotide: PDCD1-3316
cucaugcgguaccaguuuagc

SEQ ID NO: 15337 - RNA, 22 nt, Artificial Sequence
  Synthetic oligonucleotide: PDCD1-3317
gcucaugcgguaccaguuuagc

SEQ ID NO: 15338 - RNA, 23 nt, Artificial Sequence
  Synthetic oligonucleotide: PDCD1-3318
ggcucaugcgguaccaguuuagc

SEQ ID NO: 15339 - RNA, 24 nt, Artificial Sequence
  Synthetic oligonucleotide: PDCD1-3319
gggcucaugcgguaccaguuuagc

SEQ ID NO: 15340 - RNA, 18 nt, Artificial Sequence
  Synthetic oligonucleotide: PDCD1-3320
ggucaccacgagcagggc

SEQ ID NO: 15341 - RNA, 19 nt, Artificial Sequence
  Synthetic oligonucleotide: PDCD1-3321
cggucaccacgagcagggc

SEQ ID NO: 15342 - RNA, 20 nt, Artificial Sequence
  Synthetic oligonucleotide: PDCD1-80
ucggucaccacgagcagggc

SEQ ID NO: 15343 - RNA, 21 nt, Artificial Sequence
  Synthetic oligonucleotide: PDCD1-3322
uucggucaccacgagcagggc

SEQ ID NO: 15344 - RNA, 22 nt, Artificial Sequence
  Synthetic oligonucleotide: PDCD1-3323
cuucggucaccacgagcagggc

SEQ ID NO: 15345 - RNA, 23 nt, Artificial Sequence
  Synthetic oligonucleotide: PDCD1-3324
ccuucggucaccacgagcagggc

SEQ ID NO: 15346 - RNA, 24 nt, Artificial Sequence
  Synthetic oligonucleotide: PDCD1-3325
cccuucggucaccacgagcagggc

SEQ ID NO: 15347 - RNA, 18 nt, Artificial Sequence
  Synthetic oligonucleotide: PDCD1-3326
gaucugcgccuugggggc

SEQ ID NO: 15348 - RNA, 19 nt, Artificial Sequence
  Synthetic oligonucleotide: PDCD1-3327
ugaucugcgccuugggggc

SEQ ID NO: 15349 - RNA, 20 nt, Artificial Sequence
  Synthetic oligonucleotide: PDCD1-643
uugaucugcgccuugggggc

SEQ ID NO: 15350 - RNA, 21 nt, Artificial Sequence
  Synthetic oligonucleotide: PDCD1-3328
uuugaucugcgccuugggggc

SEQ ID NO: 15351 - RNA, 22 nt, Artificial Sequence
  Synthetic oligonucleotide: PDCD1-3329
cuuugaucugcgccuugggggc

SEQ ID NO: 15352 - RNA, 23 nt, Artificial Sequence
  Synthetic oligonucleotide: PDCD1-3330
ucuuugaucugcgccuugggggc

SEQ ID NO: 15353 - RNA, 24 nt, Artificial Sequence
  Synthetic oligonucleotide: PDCD1-3331
cucuuugaucugcgccuugggggc

SEQ ID NO: 15354 - RNA, 18 nt, Artificial Sequence
  Synthetic oligonucleotide: PDCD1-3332
accgcccagacgacuggc

SEQ ID NO: 15355 - RNA, 19 nt, Artificial Sequence
  Synthetic oligonucleotide: PDCD1-3333
caccgcccagacgacuggc

SEQ ID NO: 15356 - RNA, 20 nt, Artificial Sequence
  Synthetic oligonucleotide: PDCD1-592
gcaccgcccagacgacuggc

SEQ ID NO: 15357 - RNA, 21 nt, Artificial Sequence
  Synthetic oligonucleotide: PDCD1-3334
agcaccgcccagacgacuggc

SEQ ID NO: 15358 - RNA, 22 nt, Artificial Sequence
  Synthetic oligonucleotide: PDCD1-3335
uagcaccgcccagacgacuggc

SEQ ID NO: 15359 - RNA, 23 nt, Artificial Sequence
  Synthetic oligonucleotide: PDCD1-3336
guagcaccgcccagacgacuggc

SEQ ID NO: 15360 - RNA, 24 nt, Artificial Sequence
  Synthetic oligonucleotide: PDCD1-3337
uguagcaccgcccagacgacuggc

SEQ ID NO: 15361 - RNA, 18 nt, Artificial Sequence
  Synthetic oligonucleotide: PDCD1-3338
ccugugggaucugcaugc

SEQ ID NO: 15362 - RNA, 19 nt, Artificial Sequence
  Synthetic oligonucleotide: PDCD1-3339
gccugugggaucugcaugc

SEQ ID NO: 15363 - RNA, 20 nt, Artificial Sequence
  Synthetic oligonucleotide: PDCD1-589
cgccugugggaucugcaugc

SEQ ID NO: 15364 - RNA, 21 nt, Artificial Sequence
  Synthetic oligonucleotide: PDCD1-3340
gcgccugugggaucugcaugc

SEQ ID NO: 15365 - RNA, 22 nt, Artificial Sequence
  Synthetic oligonucleotide: PDCD1-3341
ggcgccugugggaucugcaugc

SEQ ID NO: 15366 - RNA, 23 nt, Artificial Sequence
  Synthetic oligonucleotide: PDCD1-3342
gggcgccugugggaucugcaugc

SEQ ID NO: 15367 - RNA, 24 nt, Artificial Sequence
  Synthetic oligonucleotide: PDCD1-3343
agggcgccugugggaucugcaugc

SEQ ID NO: 15368 - RNA, 18 nt, Artificial Sequence
  Synthetic oligonucleotide: PDCD1-3344
gcuuguccgucugguugc

SEQ ID NO: 15369 - RNA, 19 nt, Artificial Sequence
  Synthetic oligonucleotide: PDCD1-3345
agcuuguccgucugguugc

SEQ ID NO: 15370 - RNA, 20 nt, Artificial Sequence
  Synthetic oligonucleotide: PDCD1-69
cagcuuguccgucugguugc

SEQ ID NO: 15371 - RNA, 21 nt, Artificial Sequence
  Synthetic oligonucleotide: PDCD1-3346
ccagcuuguccgucugguugc

SEQ ID NO: 15372 - RNA, 22 nt, Artificial Sequence
  Synthetic oligonucleotide: PDCD1-3347
gccagcuuguccgucugguugc

SEQ ID NO: 15373 - RNA, 23 nt, Artificial Sequence
  Synthetic oligonucleotide: PDCD1-3348
ggccagcuuguccgucugguugc

SEQ ID NO: 15374 - RNA, 24 nt, Artificial Sequence
  Synthetic oligonucleotide: PDCD1-3349
cggccagcuuguccgucugguugc

SEQ ID NO: 15375 - RNA, 18 nt, Artificial Sequence
  Synthetic oligonucleotide: PDCD1-3350
gggcuggcugcgguccuc

SEQ ID NO: 15376 - RNA, 19 nt, Artificial Sequence
  Synthetic oligonucleotide: PDCD1-3351
cgggcuggcugcgguccuc

SEQ ID NO: 15377 - RNA, 20 nt, Artificial Sequence
  Synthetic oligonucleotide: PDCD1-64
ccgggcuggcugcgguccuc

SEQ ID NO: 15378 - RNA, 21 nt, Artificial Sequence
  Synthetic oligonucleotide: PDCD1-3352
gccgggcuggcugcgguccuc

SEQ ID NO: 15379 - RNA, 22 nt, Artificial Sequence
  Synthetic oligonucleotide: PDCD1-3353
ggccgggcuggcugcgguccuc

SEQ ID NO: 15380 - RNA, 23 nt, Artificial Sequence
  Synthetic oligonucleotide: PDCD1-3354
uggccgggcuggcugcgguccuc

SEQ ID NO: 15381 - RNA, 24 nt, Artificial Sequence
  Synthetic oligonucleotide: PDCD1-3355
cuggccgggcuggcugcgguccuc

SEQ ID NO: 15382 - RNA, 18 nt, Artificial Sequence
  Synthetic oligonucleotide: PDCD1-3356
gggguuccagggccuguc

SEQ ID NO: 15383 - RNA, 19 nt, Artificial Sequence
  Synthetic oligonucleotide: PDCD1-3357
ggggguuccagggccuguc

SEQ ID NO: 15384 - RNA, 20 nt, Artificial Sequence
  Synthetic oligonucleotide: PDCD1-92
gggggguuccagggccuguc

SEQ ID NO: 15385 - RNA, 21 nt, Artificial Sequence
  Synthetic oligonucleotide: PDCD1-3358
ggggggguuccagggccuguc

SEQ ID NO: 15386 - RNA, 22 nt, Artificial Sequence
  Synthetic oligonucleotide: PDCD1-3359
uggggggguuccagggccuguc

SEQ ID NO: 15387 - RNA, 23 nt, Artificial Sequence
  Synthetic oligonucleotide: PDCD1-3360
guggggggguuccagggccuguc

SEQ ID NO: 15388 - RNA, 24 nt, Artificial Sequence
  Synthetic oligonucleotide: PDCD1-3361
gguggggggguuccagggccuguc

SEQ ID NO: 15389 - RNA, 18 nt, Artificial Sequence
  Synthetic oligonucleotide: PDCD1-3362
gagaagguggggggguuc

SEQ ID NO: 15390 - RNA, 19 nt, Artificial Sequence
  Synthetic oligonucleotide: PDCD1-3363
ggagaagguggggggguuc

SEQ ID NO: 15391 - RNA, 20 nt, Artificial Sequence
  Synthetic oligonucleotide: PDCD1-609
gggagaagguggggggguuc

SEQ ID NO: 15392 - RNA, 21 nt, Artificial Sequence
  Synthetic oligonucleotide: PDCD1-3364
ggggagaagguggggggguuc

SEQ ID NO: 15393 - RNA, 22 nt, Artificial Sequence
  Synthetic oligonucleotide: PDCD1-3365
uggggagaagguggggggguuc

SEQ ID NO: 15394 - RNA, 23 nt, Artificial Sequence
  Synthetic oligonucleotide: PDCD1-3366
cuggggagaagguggggggguuc

SEQ ID NO: 15395 - RNA, 24 nt, Artificial Sequence
  Synthetic oligonucleotide: PDCD1-3367
gcuggggagaagguggggggguuc

SEQ ID NO: 15396 - RNA, 18 nt, Artificial Sequence
  Synthetic oligonucleotide: PDCD1-3368
agcagggcuggggagaag

SEQ ID NO: 15397 - RNA, 19 nt, Artificial Sequence
  Synthetic oligonucleotide: PDCD1-3369
gagcagggcuggggagaag

SEQ ID NO: 15398 - RNA, 20 nt, Artificial Sequence
  Synthetic oligonucleotide: PDCD1-614
cgagcagggcuggggagaag

SEQ ID NO: 15399 - RNA, 21 nt, Artificial Sequence
  Synthetic oligonucleotide: PDCD1-3370
acgagcagggcuggggagaag

SEQ ID NO: 15400 - RNA, 22 nt, Artificial Sequence
  Synthetic oligonucleotide: PDCD1-3371
cacgagcagggcuggggagaag

SEQ ID NO: 15401 - RNA, 23 nt, Artificial Sequence
  Synthetic oligonucleotide: PDCD1-3372
ccacgagcagggcuggggagaag

SEQ ID NO: 15402 - RNA, 24 nt, Artificial Sequence
  Synthetic oligonucleotide: PDCD1-3373
accacgagcagggcuggggagaag

SEQ ID NO: 15403 - RNA, 18 nt, Artificial Sequence
  Synthetic oligonucleotide: PDCD1-3374
guguuggagaagcugcag

SEQ ID NO: 15404 - RNA, 19 nt, Artificial Sequence
  Synthetic oligonucleotide: PDCD1-3375
uguguuggagaagcugcag

SEQ ID NO: 15405 - RNA, 20 nt, Artificial Sequence
  Synthetic oligonucleotide: PDCD1-622
auguguuggagaagcugcag

SEQ ID NO: 15406 - RNA, 21 nt, Artificial Sequence
  Synthetic oligonucleotide: PDCD1-3376
gauguguuggagaagcugcag

SEQ ID NO: 15407 - RNA, 22 nt, Artificial Sequence
  Synthetic oligonucleotide: PDCD1-3377
cgauguguuggagaagcugcag

SEQ ID NO: 15408 - RNA, 23 nt, Artificial Sequence
  Synthetic oligonucleotide: PDCD1-3378
ccgauguguuggagaagcugcag

SEQ ID NO: 15409 - RNA, 24 nt, Artificial Sequence
  Synthetic oligonucleotide: PDCD1-3379
uccgauguguuggagaagcugcag

SEQ ID NO: 15410 - RNA, 18 nt, Artificial Sequence
  Synthetic oligonucleotide: PDCD1-3380
ucugagagauggagagag

SEQ ID NO: 15411 - RNA, 19 nt, Artificial Sequence
  Synthetic oligonucleotide: PDCD1-3381
gucugagagauggagagag

SEQ ID NO: 15412 - RNA, 20 nt, Artificial Sequence
  Synthetic oligonucleotide: PDCD1-598
agucugagagauggagagag

SEQ ID NO: 15413 - RNA, 21 nt, Artificial Sequence
  Synthetic oligonucleotide: PDCD1-3382
gagucugagagauggagagag

SEQ ID NO: 15414 - RNA, 22 nt, Artificial Sequence
  Synthetic oligonucleotide: PDCD1-3383
ggagucugagagauggagagag

SEQ ID NO: 15415 - RNA, 23 nt, Artificial Sequence
  Synthetic oligonucleotide: PDCD1-3384
gggagucugagagauggagagag

SEQ ID NO: 15416 - RNA, 24 nt, Artificial Sequence
  Synthetic oligonucleotide: PDCD1-3385
ggggagucugagagauggagagag

SEQ ID NO: 15417 - RNA, 18 nt, Artificial Sequence
  Synthetic oligonucleotide: PDCD1-3386
gucuggggagucugagag

SEQ ID NO: 15418 - RNA, 19 nt, Artificial Sequence
  Synthetic oligonucleotide: PDCD1-3387
ugucuggggagucugagag

SEQ ID NO: 15419 - RNA, 20 nt, Artificial Sequence
  Synthetic oligonucleotide: PDCD1-602
cugucuggggagucugagag

SEQ ID NO: 15420 - RNA, 21 nt, Artificial Sequence
  Synthetic oligonucleotide: PDCD1-3388
ccugucuggggagucugagag

SEQ ID NO: 15421 - RNA, 22 nt, Artificial Sequence
  Synthetic oligonucleotide: PDCD1-3389
gccugucuggggagucugagag

SEQ ID NO: 15422 - RNA, 23 nt, Artificial Sequence
  Synthetic oligonucleotide: PDCD1-3390
ggccugucuggggagucugagag

SEQ ID NO: 15423 - RNA, 24 nt, Artificial Sequence
  Synthetic oligonucleotide: PDCD1-3391
gggccugucuggggagucugagag

SEQ ID NO: 15424 - RNA, 18 nt, Artificial Sequence
  Synthetic oligonucleotide: PDCD1-3392
cccuucggucaccacgag

SEQ ID NO: 15425 - RNA, 19 nt, Artificial Sequence
  Synthetic oligonucleotide: PDCD1-3393
ccccuucggucaccacgag

SEQ ID NO: 15426 - RNA, 20 nt, Artificial Sequence
  Synthetic oligonucleotide: PDCD1-620
uccccuucggucaccacgag

SEQ ID NO: 15427 - RNA, 21 nt, Artificial Sequence
  Synthetic oligonucleotide: PDCD1-3394
guccccuucggucaccacgag

SEQ ID NO: 15428 - RNA, 22 nt, Artificial Sequence
  Synthetic oligonucleotide: PDCD1-3395
uguccccuucggucaccacgag

SEQ ID NO: 15429 - RNA, 23 nt, Artificial Sequence
  Synthetic oligonucleotide: PDCD1-3396
uuguccccuucggucaccacgag

SEQ ID NO: 15430 - RNA, 24 nt, Artificial Sequence
  Synthetic oligonucleotide: PDCD1-3397
guuguccccuucggucaccacgag

SEQ ID NO: 15431 - RNA, 18 nt, Artificial Sequence
  Synthetic oligonucleotide: PDCD1-3398
auguggaagucacgcccg

SEQ ID NO: 15432 - RNA, 19 nt, Artificial Sequence
  Synthetic oligonucleotide: PDCD1-3399
cauguggaagucacgcccg

SEQ ID NO: 15433 - RNA, 20 nt, Artificial Sequence
  Synthetic oligonucleotide: PDCD1-636
ucauguggaagucacgcccg

SEQ ID NO: 15434 - RNA, 21 nt, Artificial Sequence
  Synthetic oligonucleotide: PDCD1-3400
cucauguggaagucacgcccg

SEQ ID NO: 15435 - RNA, 22 nt, Artificial Sequence
  Synthetic oligonucleotide: PDCD1-3401
gcucauguggaagucacgcccg

SEQ ID NO: 15436 - RNA, 23 nt, Artificial Sequence
  Synthetic oligonucleotide: PDCD1-3402
cgcucauguggaagucacgcccg

SEQ ID NO: 15437 - RNA, 24 nt, Artificial Sequence
  Synthetic oligonucleotide: PDCD1-3403
acgcucauguggaagucacgcccg

SEQ ID NO: 15438 - RNA, 18 nt, Artificial Sequence
  Synthetic oligonucleotide: PDCD1-3404
ggugccgcugucauugcg

SEQ ID NO: 15439 - RNA, 19 nt, Artificial Sequence
  Synthetic oligonucleotide: PDCD1-3405
aggugccgcugucauugcg

SEQ ID NO: 15440 - RNA, 20 nt, Artificial Sequence
  Synthetic oligonucleotide: PDCD1-639
uaggugccgcugucauugcg

SEQ ID NO: 15441 - RNA, 21 nt, Artificial Sequence
  Synthetic oligonucleotide: PDCD1-3406
guaggugccgcugucauugcg

SEQ ID NO: 15442 - RNA, 22 nt, Artificial Sequence
  Synthetic oligonucleotide: PDCD1-3407
gguaggugccgcugucauugcg

SEQ ID NO: 15443 - RNA, 23 nt, Artificial Sequence
  Synthetic oligonucleotide: PDCD1-3408
agguaggugccgcugucauugcg

SEQ ID NO: 15444 - RNA, 24 nt, Artificial Sequence
  Synthetic oligonucleotide: PDCD1-3409
gagguaggugccgcugucauugcg

SEQ ID NO: 15445 - RNA, 18 nt, Artificial Sequence
  Synthetic oligonucleotide: PDCD1-3410
ggcuggcugcgguccucg

SEQ ID NO: 15446 - RNA, 19 nt, Artificial Sequence
  Synthetic oligonucleotide: PDCD1-3411
gggcuggcugcgguccucg

SEQ ID NO: 15447 - RNA, 20 nt, Artificial Sequence
  Synthetic oligonucleotide: PDCD1-65
cgggcuggcugcgguccucg

SEQ ID NO: 15448 - RNA, 21 nt, Artificial Sequence
  Synthetic oligonucleotide: PDCD1-3412
ccgggcuggcugcgguccucg

SEQ ID NO: 15449 - RNA, 22 nt, Artificial Sequence
  Synthetic oligonucleotide: PDCD1-3413
gccgggcuggcugcgguccucg

SEQ ID NO: 15450 - RNA, 23 nt, Artificial Sequence
  Synthetic oligonucleotide: PDCD1-3414
ggccgggcuggcugcgguccucg

SEQ ID NO: 15451 - RNA, 24 nt, Artificial Sequence
  Synthetic oligonucleotide: PDCD1-3415
uggccgggcuggcugcgguccucg

SEQ ID NO: 15452 - RNA, 18 nt, Artificial Sequence
  Synthetic oligonucleotide: PDCD1-3416
gcagggcuggggagaagg

SEQ ID NO: 15453 - RNA, 19 nt, Artificial Sequence
  Synthetic oligonucleotide: PDCD1-3417
agcagggcuggggagaagg

SEQ ID NO: 15454 - RNA, 20 nt, Artificial Sequence
  Synthetic oligonucleotide: PDCD1-84
gagcagggcuggggagaagg

SEQ ID NO: 15455 - RNA, 21 nt, Artificial Sequence
  Synthetic oligonucleotide: PDCD1-3418
cgagcagggcuggggagaagg

SEQ ID NO: 15456 - RNA, 22 nt, Artificial Sequence
  Synthetic oligonucleotide: PDCD1-3419
acgagcagggcuggggagaagg

SEQ ID NO: 15457 - RNA, 23 nt, Artificial Sequence
  Synthetic oligonucleotide: PDCD1-3420
cacgagcagggcuggggagaagg

SEQ ID NO: 15458 - RNA, 24 nt, Artificial Sequence
  Synthetic oligonucleotide: PDCD1-3421
ccacgagcagggcuggggagaagg

SEQ ID NO: 15459 - RNA, 18 nt, Artificial Sequence
  Synthetic oligonucleotide: PDCD1-3422
agauggagagaggugagg

SEQ ID NO: 15460 - RNA, 19 nt, Artificial Sequence
  Synthetic oligonucleotide: PDCD1-3423
gagauggagagaggugagg

SEQ ID NO: 15461 - RNA, 20 nt, Artificial Sequence
  Synthetic oligonucleotide: PDCD1-595
agagauggagagaggugagg

SEQ ID NO: 15462 - RNA, 21 nt, Artificial Sequence
  Synthetic oligonucleotide: PDCD1-3424
gagagauggagagaggugagg

SEQ ID NO: 15463 - RNA, 22 nt, Artificial Sequence
  Synthetic oligonucleotide: PDCD1-3425
ugagagauggagagaggugagg

SEQ ID NO: 15464 - RNA, 23 nt, Artificial Sequence
  Synthetic oligonucleotide: PDCD1-3426
cugagagauggagagaggugagg

SEQ ID NO: 15465 - RNA, 24 nt, Artificial Sequence
  Synthetic oligonucleotide: PDCD1-3427
ucugagagauggagagaggugagg

SEQ ID NO: 15466 - RNA, 18 nt, Artificial Sequence
  Synthetic oligonucleotide: PDCD1-3428
cggucaccacgagcaggg

SEQ ID NO: 15467 - RNA, 19 nt, Artificial Sequence
  Synthetic oligonucleotide: PDCD1-3429
ucggucaccacgagcaggg

SEQ ID NO: 15468 - RNA, 20 nt, Artificial Sequence
  Synthetic oligonucleotide: PDCD1-619
uucggucaccacgagcaggg

SEQ ID NO: 15469 - RNA, 21 nt, Artificial Sequence
  Synthetic oligonucleotide: PDCD1-3430
cuucggucaccacgagcaggg

SEQ ID NO: 15470 - RNA, 22 nt, Artificial Sequence
  Synthetic oligonucleotide: PDCD1-3431
ccuucggucaccacgagcaggg

SEQ ID NO: 15471 - RNA, 23 nt, Artificial Sequence
  Synthetic oligonucleotide: PDCD1-3432
cccuucggucaccacgagcaggg

SEQ ID NO: 15472 - RNA, 24 nt, Artificial Sequence
  Synthetic oligonucleotide: PDCD1-3433
ccccuucggucaccacgagcaggg

SEQ ID NO: 15473 - RNA, 18 nt, Artificial Sequence
  Synthetic oligonucleotide: PDCD1-3434
accacgagcagggcuggg

SEQ ID NO: 15474 - RNA, 19 nt, Artificial Sequence
  Synthetic oligonucleotide: PDCD1-3435
caccacgagcagggcuggg

SEQ ID NO: 15475 - RNA, 20 nt, Artificial Sequence
  Synthetic oligonucleotide: PDCD1-615
ucaccacgagcagggcuggg

SEQ ID NO: 15476 - RNA, 21 nt, Artificial Sequence
  Synthetic oligonucleotide: PDCD1-3436
gucaccacgagcagggcuggg

SEQ ID NO: 15477 - RNA, 22 nt, Artificial Sequence
  Synthetic oligonucleotide: PDCD1-3437
ggucaccacgagcagggcuggg

SEQ ID NO: 15478 - RNA, 23 nt, Artificial Sequence
  Synthetic oligonucleotide: PDCD1-3438
cggucaccacgagcagggcuggg

SEQ ID NO: 15479 - RNA, 24 nt, Artificial Sequence
  Synthetic oligonucleotide: PDCD1-3439
ucggucaccacgagcagggcuggg

SEQ ID NO: 15480 - RNA, 18 nt, Artificial Sequence
  Synthetic oligonucleotide: PDCD1-3440
cggaagcggcaguccugg

SEQ ID NO: 15481 - RNA, 19 nt, Artificial Sequence
  Synthetic oligonucleotide: PDCD1-3441
acggaagcggcaguccugg

SEQ ID NO: 15482 - RNA, 20 nt, Artificial Sequence
  Synthetic oligonucleotide: PDCD1-633
cacggaagcggcaguccugg

SEQ ID NO: 15483 - RNA, 21 nt, Artificial Sequence
  Synthetic oligonucleotide: PDCD1-3442
acacggaagcggcaguccugg

SEQ ID NO: 15484 - RNA, 22 nt, Artificial Sequence
  Synthetic oligonucleotide: PDCD1-3443
gacacggaagcggcaguccugg

SEQ ID NO: 15485 - RNA, 23 nt, Artificial Sequence
  Synthetic oligonucleotide: PDCD1-3444
ugacacggaagcggcaguccugg

SEQ ID NO: 15486 - RNA, 24 nt, Artificial Sequence
  Synthetic oligonucleotide: PDCD1-3445
gugacacggaagcggcaguccugg

SEQ ID NO: 15487 - RNA, 18 nt, Artificial Sequence
  Synthetic oligonucleotide: PDCD1-3446
gcccugaccacgcucaug

SEQ ID NO: 15488 - RNA, 19 nt, Artificial Sequence
  Synthetic oligonucleotide: PDCD1-3447
ggcccugaccacgcucaug

SEQ ID NO: 15489 - RNA, 20 nt, Artificial Sequence
  Synthetic oligonucleotide: PDCD1-53
gggcccugaccacgcucaug

SEQ ID NO: 15490 - RNA, 21 nt, Artificial Sequence
  Synthetic oligonucleotide: PDCD1-3448
cgggcccugaccacgcucaug

SEQ ID NO: 15491 - RNA, 22 nt, Artificial Sequence
  Synthetic oligonucleotide: PDCD1-3449
ccgggcccugaccacgcucaug

SEQ ID NO: 15492 - RNA, 23 nt, Artificial Sequence
  Synthetic oligonucleotide: PDCD1-3450
gccgggcccugaccacgcucaug

SEQ ID NO: 15493 - RNA, 24 nt, Artificial Sequence
  Synthetic oligonucleotide: PDCD1-3451
cgccgggcccugaccacgcucaug

SEQ ID NO: 15494 - RNA, 18 nt, Artificial Sequence
  Synthetic oligonucleotide: PDCD1-3452
uggggagucugagagaug

SEQ ID NO: 15495 - RNA, 19 nt, Artificial Sequence
  Synthetic oligonucleotide: PDCD1-3453
cuggggagucugagagaug

SEQ ID NO: 15496 - RNA, 20 nt, Artificial Sequence
  Synthetic oligonucleotide: PDCD1-600
ucuggggagucugagagaug

SEQ ID NO: 15497 - RNA, 21 nt, Artificial Sequence
  Synthetic oligonucleotide: PDCD1-3454
gucuggggagucugagagaug

SEQ ID NO: 15498 - RNA, 22 nt, Artificial Sequence
  Synthetic oligonucleotide: PDCD1-3455
ugucuggggagucugagagaug

SEQ ID NO: 15499 - RNA, 23 nt, Artificial Sequence
  Synthetic oligonucleotide: PDCD1-3456
cugucuggggagucugagagaug

SEQ ID NO: 15500 - RNA, 24 nt, Artificial Sequence
  Synthetic oligonucleotide: PDCD1-3457
ccugucuggggagucugagagaug

SEQ ID NO: 15501 - RNA, 18 nt, Artificial Sequence
  Synthetic oligonucleotide: PDCD1-3458
ucaccacgagcagggcug

SEQ ID NO: 15502 - RNA, 19 nt, Artificial Sequence
  Synthetic oligonucleotide: PDCD1-3459
gucaccacgagcagggcug

SEQ ID NO: 15503 - RNA, 20 nt, Artificial Sequence
  Synthetic oligonucleotide: PDCD1-82
ggucaccacgagcagggcug

SEQ ID NO: 15504 - RNA, 21 nt, Artificial Sequence
  Synthetic oligonucleotide: PDCD1-3460
cggucaccacgagcagggcug

SEQ ID NO: 15505 - RNA, 22 nt, Artificial Sequence
  Synthetic oligonucleotide: PDCD1-3461
ucggucaccacgagcagggcug

SEQ ID NO: 15506 - RNA, 23 nt, Artificial Sequence
  Synthetic oligonucleotide: PDCD1-3462
uucggucaccacgagcagggcug

SEQ ID NO: 15507 - RNA, 24 nt, Artificial Sequence
  Synthetic oligonucleotide: PDCD1-3463
cuucggucaccacgagcagggcug

SEQ ID NO: 15508 - RNA, 18 nt, Artificial Sequence
  Synthetic oligonucleotide: PDCD1-3464
agggcuggggagaaggug

SEQ ID NO: 15509 - RNA, 19 nt, Artificial Sequence
  Synthetic oligonucleotide: PDCD1-3465
cagggcuggggagaaggug

SEQ ID NO: 15510 - RNA, 20 nt, Artificial Sequence
  Synthetic oligonucleotide: PDCD1-86
gcagggcuggggagaaggug

SEQ ID NO: 15511 - RNA, 21 nt, Artificial Sequence
  Synthetic oligonucleotide: PDCD1-3466
agcagggcuggggagaaggug

SEQ ID NO: 15512 - RNA, 22 nt, Artificial Sequence
  Synthetic oligonucleotide: PDCD1-3467
gagcagggcuggggagaaggug

SEQ ID NO: 15513 - RNA, 23 nt, Artificial Sequence
  Synthetic oligonucleotide: PDCD1-3468
cgagcagggcuggggagaaggug

SEQ ID NO: 15514 - RNA, 24 nt, Artificial Sequence
  Synthetic oligonucleotide: PDCD1-3469
acgagcagggcuggggagaaggug

SEQ ID NO: 15515 - RNA, 18 nt, Artificial Sequence
  Synthetic oligonucleotide: PDCD1-3470
gagagauggagagaggug

SEQ ID NO: 15516 - RNA, 19 nt, Artificial Sequence
  Synthetic oligonucleotide: PDCD1-3471
ugagagauggagagaggug

SEQ ID NO: 15517 - RNA, 20 nt, Artificial Sequence
  Synthetic oligonucleotide: PDCD1-97
cugagagauggagagaggug

SEQ ID NO: 15518 - RNA, 21 nt, Artificial Sequence
  Synthetic oligonucleotide: PDCD1-3472
ucugagagauggagagaggug

SEQ ID NO: 15519 - RNA, 22 nt, Artificial Sequence
  Synthetic oligonucleotide: PDCD1-3473
gucugagagauggagagaggug

SEQ ID NO: 15520 - RNA, 23 nt, Artificial Sequence
  Synthetic oligonucleotide: PDCD1-3474
agucugagagauggagagaggug

SEQ ID NO: 15521 - RNA, 24 nt, Artificial Sequence
  Synthetic oligonucleotide: PDCD1-3475
gagucugagagauggagagaggug

SEQ ID NO: 15522 - RNA, 18 nt, Artificial Sequence
  Synthetic oligonucleotide: PDCD1-3476
acgaagcucuccgaugug

SEQ ID NO: 15523 - RNA, 19 nt, Artificial Sequence
  Synthetic oligonucleotide: PDCD1-3477
cacgaagcucuccgaugug

SEQ ID NO: 15524 - RNA, 20 nt, Artificial Sequence
  Synthetic oligonucleotide: PDCD1-625
gcacgaagcucuccgaugug

SEQ ID NO: 15525 - RNA, 21 nt, Artificial Sequence
  Synthetic oligonucleotide: PDCD1-3478
agcacgaagcucuccgaugug

SEQ ID NO: 15526 - RNA, 22 nt, Artificial Sequence
  Synthetic oligonucleotide: PDCD1-3479
uagcacgaagcucuccgaugug

SEQ ID NO: 15527 - RNA, 23 nt, Artificial Sequence
  Synthetic oligonucleotide: PDCD1-3480
uuagcacgaagcucuccgaugug

SEQ ID NO: 15528 - RNA, 24 nt, Artificial Sequence
  Synthetic oligonucleotide: PDCD1-3481
uuuagcacgaagcucuccgaugug

SEQ ID NO: 15529 - RNA, 18 nt, Artificial Sequence
  Synthetic oligonucleotide: PDCD1-3482
agcuuguccgucugguug

SEQ ID NO: 15530 - RNA, 19 nt, Artificial Sequence
  Synthetic oligonucleotide: PDCD1-3483
cagcuuguccgucugguug

SEQ ID NO: 15531 - RNA, 20 nt, Artificial Sequence
  Synthetic oligonucleotide: PDCD1-628
ccagcuuguccgucugguug

SEQ ID NO: 15532 - RNA, 21 nt, Artificial Sequence
  Synthetic oligonucleotide: PDCD1-3484
gccagcuuguccgucugguug

SEQ ID NO: 15533 - RNA, 22 nt, Artificial Sequence
  Synthetic oligonucleotide: PDCD1-3485
ggccagcuuguccgucugguug

SEQ ID NO: 15534 - RNA, 23 nt, Artificial Sequence
  Synthetic oligonucleotide: PDCD1-3486
cggccagcuuguccgucugguug

SEQ ID NO: 15535 - RNA, 24 nt, Artificial Sequence
  Synthetic oligonucleotide: PDCD1-3487
gcggccagcuuguccgucugguug

SEQ ID NO: 15536 - RNA, 18 nt, Artificial Sequence
  Synthetic oligonucleotide: PDCD1-3488
aagcucuccgauguguug

SEQ ID NO: 15537 - RNA, 19 nt, Artificial Sequence
  Synthetic oligonucleotide: PDCD1-3489
gaagcucuccgauguguug

SEQ ID NO: 15538 - RNA, 20 nt, Artificial Sequence
  Synthetic oligonucleotide: PDCD1-623
cgaagcucuccgauguguug

SEQ ID NO: 15539 - RNA, 21 nt, Artificial Sequence
  Synthetic oligonucleotide: PDCD1-3490
acgaagcucuccgauguguug

SEQ ID NO: 15540 - RNA, 22 nt, Artificial Sequence
  Synthetic oligonucleotide: PDCD1-3491
cacgaagcucuccgauguguug

SEQ ID NO: 15541 - RNA, 23 nt, Artificial Sequence
  Synthetic oligonucleotide: PDCD1-3492
gcacgaagcucuccgauguguug

SEQ ID NO: 15542 - RNA, 24 nt, Artificial Sequence
  Synthetic oligonucleotide: PDCD1-3493
agcacgaagcucuccgauguguug

SEQ ID NO: 15543 - RNA, 18 nt, Artificial Sequence
  Synthetic oligonucleotide: PDCD1-3494
ggcccugaccacgcucau

SEQ ID NO: 15544 - RNA, 19 nt, Artificial Sequence
  Synthetic oligonucleotide: PDCD1-3495
gggcccugaccacgcucau

SEQ ID NO: 15545 - RNA, 20 nt, Artificial Sequence
  Synthetic oligonucleotide: PDCD1-638
cgggcccugaccacgcucau

SEQ ID NO: 15546 - RNA, 21 nt, Artificial Sequence
  Synthetic oligonucleotide: PDCD1-3496
ccgggcccugaccacgcucau

SEQ ID NO: 15547 - RNA, 22 nt, Artificial Sequence
  Synthetic oligonucleotide: PDCD1-3497
gccgggcccugaccacgcucau

SEQ ID NO: 15548 - RNA, 23 nt, Artificial Sequence
  Synthetic oligonucleotide: PDCD1-3498
cgccgggcccugaccacgcucau

SEQ ID NO: 15549 - RNA, 24 nt, Artificial Sequence
  Synthetic oligonucleotide: PDCD1-3499
gcgccgggcccugaccacgcucau

SEQ ID NO: 15550 - RNA, 18 nt, Artificial Sequence
  Synthetic oligonucleotide: PDCD1-3500
cgccgaccccaccuaccu

SEQ ID NO: 15551 - RNA, 19 nt, Artificial Sequence
  Synthetic oligonucleotide: PDCD1-3501
ccgccgaccccaccuaccu

SEQ ID NO: 15552 - RNA, 20 nt, Artificial Sequence
  Synthetic oligonucleotide: PDCD1-593
accgccgaccccaccuaccu

SEQ ID NO: 15553 - RNA, 21 nt, Artificial Sequence
  Synthetic oligonucleotide: PDCD1-3502
gaccgccgaccccaccuaccu

SEQ ID NO: 15554 - RNA, 22 nt, Artificial Sequence
  Synthetic oligonucleotide: PDCD1-3503
ugaccgccgaccccaccuaccu

SEQ ID NO: 15555 - RNA, 23 nt, Artificial Sequence
  Synthetic oligonucleotide: PDCD1-3504
cugaccgccgaccccaccuaccu

SEQ ID NO: 15556 - RNA, 24 nt, Artificial Sequence
  Synthetic oligonucleotide: PDCD1-3505
ccugaccgccgaccccaccuaccu

SEQ ID NO: 15557 - RNA, 18 nt, Artificial Sequence
  Synthetic oligonucleotide: PDCD1-3506
cgacuggccagggcgccu

SEQ ID NO: 15558 - RNA, 19 nt, Artificial Sequence
  Synthetic oligonucleotide: PDCD1-3507
acgacuggccagggcgccu

SEQ ID NO: 15559 - RNA, 20 nt, Artificial Sequence
  Synthetic oligonucleotide: PDCD1-591
gacgacuggccagggcgccu

SEQ ID NO: 15560 - RNA, 21 nt, Artificial Sequence
  Synthetic oligonucleotide: PDCD1-3508
agacgacuggccagggcgccu

SEQ ID NO: 15561 - RNA, 22 nt, Artificial Sequence
  Synthetic oligonucleotide: PDCD1-3509
cagacgacuggccagggcgccu

SEQ ID NO: 15562 - RNA, 23 nt, Artificial Sequence
  Synthetic oligonucleotide: PDCD1-3510
ccagacgacuggccagggcgccu

SEQ ID NO: 15563 - RNA, 24 nt, Artificial Sequence
  Synthetic oligonucleotide: PDCD1-3511
cccagacgacuggccagggcgccu

SEQ ID NO: 15564 - RNA, 18 nt, Artificial Sequence
  Synthetic oligonucleotide: PDCD1-3512
ucucuuugaucugcgccu

SEQ ID NO: 15565 - RNA, 19 nt, Artificial Sequence
  Synthetic oligonucleotide: PDCD1-3513
cucucuuugaucugcgccu

SEQ ID NO: 15566 - RNA, 20 nt, Artificial Sequence
  Synthetic oligonucleotide: PDCD1-42
gcucucuuugaucugcgccu

SEQ ID NO: 15567 - RNA, 21 nt, Artificial Sequence
  Synthetic oligonucleotide: PDCD1-3514
ggcucucuuugaucugcgccu

SEQ ID NO: 15568 - RNA, 22 nt, Artificial Sequence
  Synthetic oligonucleotide: PDCD1-3515
aggcucucuuugaucugcgccu

SEQ ID NO: 15569 - RNA, 23 nt, Artificial Sequence
  Synthetic oligonucleotide: PDCD1-3516
caggcucucuuugaucugcgccu

SEQ ID NO: 15570 - RNA, 24 nt, Artificial Sequence
  Synthetic oligonucleotide: PDCD1-3517
gcaggcucucuuugaucugcgccu

SEQ ID NO: 15571 - RNA, 18 nt, Artificial Sequence
  Synthetic oligonucleotide: PDCD1-3518
cgggcuggcugcgguccu

SEQ ID NO: 15572 - RNA, 19 nt, Artificial Sequence
  Synthetic oligonucleotide: PDCD1-3519
ccgggcuggcugcgguccu

SEQ ID NO: 15573 - RNA, 20 nt, Artificial Sequence
  Synthetic oligonucleotide: PDCD1-63
gccgggcuggcugcgguccu

SEQ ID NO: 15574 - RNA, 21 nt, Artificial Sequence
  Synthetic oligonucleotide: PDCD1-3520
ggccgggcuggcugcgguccu

SEQ ID NO: 15575 - RNA, 22 nt, Artificial Sequence
  Synthetic oligonucleotide: PDCD1-3521
uggccgggcuggcugcgguccu

SEQ ID NO: 15576 - RNA, 23 nt, Artificial Sequence
  Synthetic oligonucleotide: PDCD1-3522
cuggccgggcuggcugcgguccu

SEQ ID NO: 15577 - RNA, 24 nt, Artificial Sequence
  Synthetic oligonucleotide: PDCD1-3523
ccuggccgggcuggcugcgguccu

SEQ ID NO: 15578 - RNA, 18 nt, Artificial Sequence
  Synthetic oligonucleotide: PDCD1-3524
gucaccacgagcagggcu

SEQ ID NO: 15579 - RNA, 19 nt, Artificial Sequence
  Synthetic oligonucleotide: PDCD1-3525
ggucaccacgagcagggcu

SEQ ID NO: 15580 - RNA, 20 nt, Artificial Sequence
  Synthetic oligonucleotide: PDCD1-81
cggucaccacgagcagggcu

SEQ ID NO: 15581 - RNA, 21 nt, Artificial Sequence
  Synthetic oligonucleotide: PDCD1-3526
ucggucaccacgagcagggcu

SEQ ID NO: 15582 - RNA, 22 nt, Artificial Sequence
  Synthetic oligonucleotide: PDCD1-3527
uucggucaccacgagcagggcu

SEQ ID NO: 15583 - RNA, 23 nt, Artificial Sequence
  Synthetic oligonucleotide: PDCD1-3528
cuucggucaccacgagcagggcu

SEQ ID NO: 15584 - RNA, 24 nt, Artificial Sequence
  Synthetic oligonucleotide: PDCD1-3529
ccuucggucaccacgagcagggcu

SEQ ID NO: 15585 - RNA, 18 nt, Artificial Sequence
  Synthetic oligonucleotide: PDCD1-3530
ggccugucuggggagucu

SEQ ID NO: 15586 - RNA, 19 nt, Artificial Sequence
  Synthetic oligonucleotide: PDCD1-3531
gggccugucuggggagucu

SEQ ID NO: 15587 - RNA, 20 nt, Artificial Sequence
  Synthetic oligonucleotide: PDCD1-603
agggccugucuggggagucu

SEQ ID NO: 15588 - RNA, 21 nt, Artificial Sequence
  Synthetic oligonucleotide: PDCD1-3532
cagggccugucuggggagucu

SEQ ID NO: 15589 - RNA, 22 nt, Artificial Sequence
  Synthetic oligonucleotide: PDCD1-3533
ccagggccugucuggggagucu

SEQ ID NO: 15590 - RNA, 23 nt, Artificial Sequence
  Synthetic oligonucleotide: PDCD1-3534
uccagggccugucuggggagucu

SEQ ID NO: 15591 - RNA, 24 nt, Artificial Sequence
  Synthetic oligonucleotide: PDCD1-3535
uuccagggccugucuggggagucu

SEQ ID NO: 15592 - RNA, 18 nt, Artificial Sequence
  Synthetic oligonucleotide: PDCD1-3536
ggguuccagggccugucu

SEQ ID NO: 15593 - RNA, 19 nt, Artificial Sequence
  Synthetic oligonucleotide: PDCD1-3537
gggguuccagggccugucu

SEQ ID NO: 15594 - RNA, 20 nt, Artificial Sequence
  Synthetic oligonucleotide: PDCD1-93
ggggguuccagggccugucu

SEQ ID NO: 15595 - RNA, 21 nt, Artificial Sequence
  Synthetic oligonucleotide: PDCD1-3538
gggggguuccagggccugucu

SEQ ID NO: 15596 - RNA, 22 nt, Artificial Sequence
  Synthetic oligonucleotide: PDCD1-3539
ggggggguuccagggccugucu

SEQ ID NO: 15597 - RNA, 23 nt, Artificial Sequence
  Synthetic oligonucleotide: PDCD1-3540
uggggggguuccagggccugucu

SEQ ID NO: 15598 - RNA, 24 nt, Artificial Sequence
  Synthetic oligonucleotide: PDCD1-3541
guggggggguuccagggccugucu

SEQ ID NO: 15599 - RNA, 18 nt, Artificial Sequence
  Synthetic oligonucleotide: PDCD1-3542
agggccugucuggggagu

SEQ ID NO: 15600 - RNA, 19 nt, Artificial Sequence
  Synthetic oligonucleotide: PDCD1-3543
cagggccugucuggggagu

SEQ ID NO: 15601 - RNA, 20 nt, Artificial Sequence
  Synthetic oligonucleotide: PDCD1-604
ccagggccugucuggggagu

SEQ ID NO: 15602 - RNA, 21 nt, Artificial Sequence
  Synthetic oligonucleotide: PDCD1-3544
uccagggccugucuggggagu

SEQ ID NO: 15603 - RNA, 22 nt, Artificial Sequence
  Synthetic oligonucleotide: PDCD1-3545
uuccagggccugucuggggagu

SEQ ID NO: 15604 - RNA, 23 nt, Artificial Sequence
  Synthetic oligonucleotide: PDCD1-3546
guuccagggccugucuggggagu

SEQ ID NO: 15605 - RNA, 24 nt, Artificial Sequence
  Synthetic oligonucleotide: PDCD1-3547
gguuccagggccugucuggggagu

SEQ ID NO: 15606 - RNA, 18 nt, Artificial Sequence
  Synthetic oligonucleotide: PDCD1-3548
cagggcuggggagaaggu

SEQ ID NO: 15607 - RNA, 19 nt, Artificial Sequence
  Synthetic oligonucleotide: PDCD1-3549
gcagggcuggggagaaggu

SEQ ID NO: 15608 - RNA, 20 nt, Artificial Sequence
  Synthetic oligonucleotide: PDCD1-85
agcagggcuggggagaaggu

SEQ ID NO: 15609 - RNA, 21 nt, Artificial Sequence
  Synthetic oligonucleotide: PDCD1-3550
gagcagggcuggggagaaggu

SEQ ID NO: 15610 - RNA, 22 nt, Artificial Sequence
  Synthetic oligonucleotide: PDCD1-3551
cgagcagggcuggggagaaggu

SEQ ID NO: 15611 - RNA, 23 nt, Artificial Sequence
  Synthetic oligonucleotide: PDCD1-3552
acgagcagggcuggggagaaggu

SEQ ID NO: 15612 - RNA, 24 nt, Artificial Sequence
  Synthetic oligonucleotide: PDCD1-3553
cacgagcagggcuggggagaaggu

SEQ ID NO: 15613 - RNA, 18 nt, Artificial Sequence
  Synthetic oligonucleotide: PDCD1-3554
ugagagauggagagaggu

SEQ ID NO: 15614 - RNA, 19 nt, Artificial Sequence
  Synthetic oligonucleotide: PDCD1-3555
cugagagauggagagaggu

SEQ ID NO: 15615 - RNA, 20 nt, Artificial Sequence
  Synthetic oligonucleotide: PDCD1-597
ucugagagauggagagaggu

SEQ ID NO: 15616 - RNA, 21 nt, Artificial Sequence
  Synthetic oligonucleotide: PDCD1-3556
gucugagagauggagagaggu

SEQ ID NO: 15617 - RNA, 22 nt, Artificial Sequence
  Synthetic oligonucleotide: PDCD1-3557
agucugagagauggagagaggu

SEQ ID NO: 15618 - RNA, 23 nt, Artificial Sequence
  Synthetic oligonucleotide: PDCD1-3558
gagucugagagauggagagaggu

SEQ ID NO: 15619 - RNA, 24 nt, Artificial Sequence
  Synthetic oligonucleotide: PDCD1-3559
ggagucugagagauggagagaggu

SEQ ID NO: 15620 - RNA, 18 nt, Artificial Sequence
  Synthetic oligonucleotide: PDCD1-3560
ggggguuccagggccugu

SEQ ID NO: 15621 - RNA, 19 nt, Artificial Sequence
  Synthetic oligonucleotide: PDCD1-3561
gggggguuccagggccugu

SEQ ID NO: 15622 - RNA, 20 nt, Artificial Sequence
  Synthetic oligonucleotide: PDCD1-608
ggggggguuccagggccugu

SEQ ID NO: 15623 - RNA, 21 nt, Artificial Sequence
  Synthetic oligonucleotide: PDCD1-3562
uggggggguuccagggccugu

SEQ ID NO: 15624 - RNA, 22 nt, Artificial Sequence
  Synthetic oligonucleotide: PDCD1-3563
guggggggguuccagggccugu

SEQ ID NO: 15625 - RNA, 23 nt, Artificial Sequence
  Synthetic oligonucleotide: PDCD1-3564
gguggggggguuccagggccugu

SEQ ID NO: 15626 - RNA, 24 nt, Artificial Sequence
  Synthetic oligonucleotide: PDCD1-3565
agguggggggguuccagggccugu

SEQ ID NO: 15627 - RNA, 18 nt, Artificial Sequence
  Synthetic oligonucleotide: PDCD1-3566
cgaagcucuccgaugugu

SEQ ID NO: 15628 - RNA, 19 nt, Artificial Sequence
  Synthetic oligonucleotide: PDCD1-3567
acgaagcucuccgaugugu

SEQ ID NO: 15629 - RNA, 20 nt, Artificial Sequence
  Synthetic oligonucleotide: PDCD1-73
cacgaagcucuccgaugugu

SEQ ID NO: 15630 - RNA, 21 nt, Artificial Sequence
  Synthetic oligonucleotide: PDCD1-3568
gcacgaagcucuccgaugugu

SEQ ID NO: 15631 - RNA, 22 nt, Artificial Sequence
  Synthetic oligonucleotide: PDCD1-3569
agcacgaagcucuccgaugugu

SEQ ID NO: 15632 - RNA, 23 nt, Artificial Sequence
  Synthetic oligonucleotide: PDCD1-3570
uagcacgaagcucuccgaugugu

SEQ ID NO: 15633 - RNA, 24 nt, Artificial Sequence
  Synthetic oligonucleotide: PDCD1-3571
uuagcacgaagcucuccgaugugu

SEQ ID NO: 15634 - RNA, 18 nt, Artificial Sequence
  Synthetic oligonucleotide: PDCD1-3572
cucuuugaucugcgccuu

SEQ ID NO: 15635 - RNA, 19 nt, Artificial Sequence
  Synthetic oligonucleotide: PDCD1-3573
ucucuuugaucugcgccuu

SEQ ID NO: 15636 - RNA, 20 nt, Artificial Sequence
  Synthetic oligonucleotide: PDCD1-43
cucucuuugaucugcgccuu

SEQ ID NO: 15637 - RNA, 21 nt, Artificial Sequence
  Synthetic oligonucleotide: PDCD1-3574
gcucucuuugaucugcgccuu

SEQ ID NO: 15638 - RNA, 22 nt, Artificial Sequence
  Synthetic oligonucleotide: PDCD1-3575
ggcucucuuugaucugcgccuu

SEQ ID NO: 15639 - RNA, 23 nt, Artificial Sequence
  Synthetic oligonucleotide: PDCD1-3576
aggcucucuuugaucugcgccuu

SEQ ID NO: 15640 - RNA, 24 nt, Artificial Sequence
  Synthetic oligonucleotide: PDCD1-3577
caggcucucuuugaucugcgccuu

SEQ ID NO: 15641 - RNA, 18 nt, Artificial Sequence
  Synthetic oligonucleotide: PDCD1-3578
cccaaggcgcagaucaaa

SEQ ID NO: 15642 - RNA, 19 nt, Artificial Sequence
  Synthetic oligonucleotide: PDCD1-3579
ccccaaggcgcagaucaaa

SEQ ID NO: 15643 - RNA, 20 nt, Artificial Sequence
  Synthetic oligonucleotide: PDCD1-554
cccccaaggcgcagaucaaa

SEQ ID NO: 15644 - RNA, 21 nt, Artificial Sequence
  Synthetic oligonucleotide: PDCD1-3580
gcccccaaggcgcagaucaaa

SEQ ID NO: 15645 - RNA, 22 nt, Artificial Sequence
  Synthetic oligonucleotide: PDCD1-3581
ggcccccaaggcgcagaucaaa

SEQ ID NO: 15646 - RNA, 23 nt, Artificial Sequence
  Synthetic oligonucleotide: PDCD1-3582
uggcccccaaggcgcagaucaaa

SEQ ID NO: 15647 - RNA, 24 nt, Artificial Sequence
  Synthetic oligonucleotide: PDCD1-3583
cuggcccccaaggcgcagaucaaa

SEQ ID NO: 15648 - RNA, 18 nt, Artificial Sequence
  Synthetic oligonucleotide: PDCD1-3584
gucugggcggugcuacaa

SEQ ID NO: 15649 - RNA, 19 nt, Artificial Sequence
  Synthetic oligonucleotide: PDCD1-3585
cgucugggcggugcuacaa

SEQ ID NO: 15650 - RNA, 20 nt, Artificial Sequence
  Synthetic oligonucleotide: PDCD1-530
ucgucugggcggugcuacaa

SEQ ID NO: 15651 - RNA, 21 nt, Artificial Sequence
  Synthetic oligonucleotide: PDCD1-3586
gucgucugggcggugcuacaa

SEQ ID NO: 15652 - RNA, 22 nt, Artificial Sequence
  Synthetic oligonucleotide: PDCD1-3587
agucgucugggcggugcuacaa

SEQ ID NO: 15653 - RNA, 23 nt, Artificial Sequence
  Synthetic oligonucleotide: PDCD1-3588
cagucgucugggcggugcuacaa

SEQ ID NO: 15654 - RNA, 24 nt, Artificial Sequence
  Synthetic oligonucleotide: PDCD1-3589
ccagucgucugggcggugcuacaa

SEQ ID NO: 15655 - RNA, 18 nt, Artificial Sequence
  Synthetic oligonucleotide: PDCD1-3590
cugcucguggugaccgaa

SEQ ID NO: 15656 - RNA, 19 nt, Artificial Sequence
  Synthetic oligonucleotide: PDCD1-3591
ccugcucguggugaccgaa

SEQ ID NO: 15657 - RNA, 20 nt, Artificial Sequence
  Synthetic oligonucleotide: PDCD1-5
cccugcucguggugaccgaa

SEQ ID NO: 15658 - RNA, 21 nt, Artificial Sequence
  Synthetic oligonucleotide: PDCD1-3592
gcccugcucguggugaccgaa

SEQ ID NO: 15659 - RNA, 22 nt, Artificial Sequence
  Synthetic oligonucleotide: PDCD1-3593
agcccugcucguggugaccgaa

SEQ ID NO: 15660 - RNA, 23 nt, Artificial Sequence
  Synthetic oligonucleotide: PDCD1-3594
cagcccugcucguggugaccgaa

SEQ ID NO: 15661 - RNA, 24 nt, Artificial Sequence
  Synthetic oligonucleotide: PDCD1-3595
ccagcccugcucguggugaccgaa

SEQ ID NO: 15662 - RNA, 18 nt, Artificial Sequence
  Synthetic oligonucleotide: PDCD1-3596
ugcagcuucuccaacaca

SEQ ID NO: 15663 - RNA, 19 nt, Artificial Sequence
  Synthetic oligonucleotide: PDCD1-3597
cugcagcuucuccaacaca

SEQ ID NO: 15664 - RNA, 20 nt, Artificial Sequence
  Synthetic oligonucleotide: PDCD1-540
ccugcagcuucuccaacaca

SEQ ID NO: 15665 - RNA, 21 nt, Artificial Sequence
  Synthetic oligonucleotide: PDCD1-3598
accugcagcuucuccaacaca

SEQ ID NO: 15666 - RNA, 22 nt, Artificial Sequence
  Synthetic oligonucleotide: PDCD1-3599
caccugcagcuucuccaacaca

SEQ ID NO: 15667 - RNA, 23 nt, Artificial Sequence
  Synthetic oligonucleotide: PDCD1-3600
ucaccugcagcuucuccaacaca

SEQ ID NO: 15668 - RNA, 24 nt, Artificial Sequence
  Synthetic oligonucleotide: PDCD1-3601
uucaccugcagcuucuccaacaca

SEQ ID NO: 15669 - RNA, 18 nt, Artificial Sequence
  Synthetic oligonucleotide: PDCD1-3602
gugucacacaacugccca

SEQ ID NO: 15670 - RNA, 19 nt, Artificial Sequence
  Synthetic oligonucleotide: PDCD1-3603
cgugucacacaacugccca

SEQ ID NO: 15671 - RNA, 20 nt, Artificial Sequence
  Synthetic oligonucleotide: PDCD1-548
ccgugucacacaacugccca

SEQ ID NO: 15672 - RNA, 21 nt, Artificial Sequence
  Synthetic oligonucleotide: PDCD1-3604
uccgugucacacaacugccca

SEQ ID NO: 15673 - RNA, 22 nt, Artificial Sequence
  Synthetic oligonucleotide: PDCD1-3605
uuccgugucacacaacugccca

SEQ ID NO: 15674 - RNA, 23 nt, Artificial Sequence
  Synthetic oligonucleotide: PDCD1-3606
cuuccgugucacacaacugccca

SEQ ID NO: 15675 - RNA, 24 nt, Artificial Sequence
  Synthetic oligonucleotide: PDCD1-3607
gcuuccgugucacacaacugccca

SEQ ID NO: 15676 - RNA, 18 nt, Artificial Sequence
  Synthetic oligonucleotide: PDCD1-3608
cccccaaggcgcagauca

SEQ ID NO: 15677 - RNA, 19 nt, Artificial Sequence
  Synthetic oligonucleotide: PDCD1-3609
gcccccaaggcgcagauca

SEQ ID NO: 15678 - RNA, 20 nt, Artificial Sequence
  Synthetic oligonucleotide: PDCD1-553
ggcccccaaggcgcagauca

SEQ ID NO: 15679 - RNA, 21 nt, Artificial Sequence
  Synthetic oligonucleotide: PDCD1-3610
uggcccccaaggcgcagauca

SEQ ID NO: 15680 - RNA, 22 nt, Artificial Sequence
  Synthetic oligonucleotide: PDCD1-3611
cuggcccccaaggcgcagauca

SEQ ID NO: 15681 - RNA, 23 nt, Artificial Sequence
  Synthetic oligonucleotide: PDCD1-3612
ccuggcccccaaggcgcagauca

SEQ ID NO: 15682 - RNA, 24 nt, Artificial Sequence
  Synthetic oligonucleotide: PDCD1-3613
cccuggcccccaaggcgcagauca

SEQ ID NO: 15683 - RNA, 18 nt, Artificial Sequence
  Synthetic oligonucleotide: PDCD1-3614
ccugcucguggugaccga

SEQ ID NO: 15684 - RNA, 19 nt, Artificial Sequence
  Synthetic oligonucleotide: PDCD1-3615
cccugcucguggugaccga

SEQ ID NO: 15685 - RNA, 20 nt, Artificial Sequence
  Synthetic oligonucleotide: PDCD1-4
gcccugcucguggugaccga

SEQ ID NO: 15686 - RNA, 21 nt, Artificial Sequence
  Synthetic oligonucleotide: PDCD1-3616
agcccugcucguggugaccga

SEQ ID NO: 15687 - RNA, 22 nt, Artificial Sequence
  Synthetic oligonucleotide: PDCD1-3617
cagcccugcucguggugaccga

SEQ ID NO: 15688 - RNA, 23 nt, Artificial Sequence
  Synthetic oligonucleotide: PDCD1-3618
ccagcccugcucguggugaccga

SEQ ID NO: 15689 - RNA, 24 nt, Artificial Sequence
  Synthetic oligonucleotide: PDCD1-3619
cccagcccugcucguggugaccga

SEQ ID NO: 15690 - RNA, 18 nt, Artificial Sequence
  Synthetic oligonucleotide: PDCD1-3620
cagcccugcucgugguga

SEQ ID NO: 15691 - RNA, 19 nt, Artificial Sequence
  Synthetic oligonucleotide: PDCD1-3621
ccagcccugcucgugguga

SEQ ID NO: 15692 - RNA, 20 nt, Artificial Sequence
  Synthetic oligonucleotide: PDCD1-536
cccagcccugcucgugguga

SEQ ID NO: 15693 - RNA, 21 nt, Artificial Sequence
  Synthetic oligonucleotide: PDCD1-3622
ccccagcccugcucgugguga

SEQ ID NO: 15694 - RNA, 22 nt, Artificial Sequence
  Synthetic oligonucleotide: PDCD1-3623
uccccagcccugcucgugguga

SEQ ID NO: 15695 - RNA, 23 nt, Artificial Sequence
  Synthetic oligonucleotide: PDCD1-3624
cuccccagcccugcucgugguga

SEQ ID NO: 15696 - RNA, 24 nt, Artificial Sequence
  Synthetic oligonucleotide: PDCD1-3625
ucuccccagcccugcucgugguga

SEQ ID NO: 15697 - RNA, 18 nt, Artificial Sequence
  Synthetic oligonucleotide: PDCD1-3626
aacgggcgugacuuccac

SEQ ID NO: 15698 - RNA, 19 nt, Artificial Sequence
  Synthetic oligonucleotide: PDCD1-3627
caacgggcgugacuuccac

SEQ ID NO: 15699 - RNA, 20 nt, Artificial Sequence
  Synthetic oligonucleotide: PDCD1-549
ccaacgggcgugacuuccac

SEQ ID NO: 15700 - RNA, 21 nt, Artificial Sequence
  Synthetic oligonucleotide: PDCD1-3628
cccaacgggcgugacuuccac

SEQ ID NO: 15701 - RNA, 22 nt, Artificial Sequence
  Synthetic oligonucleotide: PDCD1-3629
gcccaacgggcgugacuuccac

SEQ ID NO: 15702 - RNA, 23 nt, Artificial Sequence
  Synthetic oligonucleotide: PDCD1-3630
ugcccaacgggcgugacuuccac

SEQ ID NO: 15703 - RNA, 24 nt, Artificial Sequence
  Synthetic oligonucleotide: PDCD1-3631
cugcccaacgggcgugacuuccac

SEQ ID NO: 15704 - RNA, 18 nt, Artificial Sequence
  Synthetic oligonucleotide: PDCD1-3632
aagcuggccgccuucccc

SEQ ID NO: 15705 - RNA, 19 nt, Artificial Sequence
  Synthetic oligonucleotide: PDCD1-3633
caagcuggccgccuucccc

SEQ ID NO: 15706 - RNA, 20 nt, Artificial Sequence
  Synthetic oligonucleotide: PDCD1-546
acaagcuggccgccuucccc

SEQ ID NO: 15707 - RNA, 21 nt, Artificial Sequence
  Synthetic oligonucleotide: PDCD1-3634
gacaagcuggccgccuucccc

SEQ ID NO: 15708 - RNA, 22 nt, Artificial Sequence
  Synthetic oligonucleotide: PDCD1-3635
ggacaagcuggccgccuucccc

SEQ ID NO: 15709 - RNA, 23 nt, Artificial Sequence
  Synthetic oligonucleotide: PDCD1-3636
cggacaagcuggccgccuucccc

SEQ ID NO: 15710 - RNA, 24 nt, Artificial Sequence
  Synthetic oligonucleotide: PDCD1-3637
acggacaagcuggccgccuucccc

SEQ ID NO: 15711 - RNA, 18 nt, Artificial Sequence
  Synthetic oligonucleotide: PDCD1-3638
gacuccccagacaggccc

SEQ ID NO: 15712 - RNA, 19 nt, Artificial Sequence
  Synthetic oligonucleotide: PDCD1-3639
agacuccccagacaggccc

SEQ ID NO: 15713 - RNA, 20 nt, Artificial Sequence
  Synthetic oligonucleotide: PDCD1-2
cagacuccccagacaggccc

SEQ ID NO: 15714 - RNA, 21 nt, Artificial Sequence
  Synthetic oligonucleotide: PDCD1-3640
ucagacuccccagacaggccc

SEQ ID NO: 15715 - RNA, 22 nt, Artificial Sequence
  Synthetic oligonucleotide: PDCD1-3641
cucagacuccccagacaggccc

SEQ ID NO: 15716 - RNA, 23 nt, Artificial Sequence
  Synthetic oligonucleotide: PDCD1-3642
ucucagacuccccagacaggccc

SEQ ID NO: 15717 - RNA, 24 nt, Artificial Sequence
  Synthetic oligonucleotide: PDCD1-3643
cucucagacuccccagacaggccc

SEQ ID NO: 15718 - RNA, 18 nt, Artificial Sequence
  Synthetic oligonucleotide: PDCD1-3644
gugcggccucggaggccc

SEQ ID NO: 15719 - RNA, 19 nt, Artificial Sequence
  Synthetic oligonucleotide: PDCD1-3645
ggugcggccucggaggccc

SEQ ID NO: 15720 - RNA, 20 nt, Artificial Sequence
  Synthetic oligonucleotide: PDCD1-34
aggugcggccucggaggccc

SEQ ID NO: 15721 - RNA, 21 nt, Artificial Sequence
  Synthetic oligonucleotide: PDCD1-3646
caggugcggccucggaggccc

SEQ ID NO: 15722 - RNA, 22 nt, Artificial Sequence
  Synthetic oligonucleotide: PDCD1-3647
acaggugcggccucggaggccc

SEQ ID NO: 15723 - RNA, 23 nt, Artificial Sequence
  Synthetic oligonucleotide: PDCD1-3648
gacaggugcggccucggaggccc

SEQ ID NO: 15724 - RNA, 24 nt, Artificial Sequence
  Synthetic oligonucleotide: PDCD1-3649
ugacaggugcggccucggaggccc

SEQ ID NO: 15725 - RNA, 18 nt, Artificial Sequence
  Synthetic oligonucleotide: PDCD1-3650
agacuccccagacaggcc

SEQ ID NO: 15726 - RNA, 19 nt, Artificial Sequence
  Synthetic oligonucleotide: PDCD1-3651
cagacuccccagacaggcc

SEQ ID NO: 15727 - RNA, 20 nt, Artificial Sequence
  Synthetic oligonucleotide: PDCD1-534
ucagacuccccagacaggcc

SEQ ID NO: 15728 - RNA, 21 nt, Artificial Sequence
  Synthetic oligonucleotide: PDCD1-3652
cucagacuccccagacaggcc

SEQ ID NO: 15729 - RNA, 22 nt, Artificial Sequence
  Synthetic oligonucleotide: PDCD1-3653
ucucagacuccccagacaggcc

SEQ ID NO: 15730 - RNA, 23 nt, Artificial Sequence
  Synthetic oligonucleotide: PDCD1-3654
cucucagacuccccagacaggcc

SEQ ID NO: 15731 - RNA, 24 nt, Artificial Sequence
  Synthetic oligonucleotide: PDCD1-3655
ucucucagacuccccagacaggcc

SEQ ID NO: 15732 - RNA, 18 nt, Artificial Sequence
  Synthetic oligonucleotide: PDCD1-3656
ggugcggccucggaggcc

SEQ ID NO: 15733 - RNA, 19 nt, Artificial Sequence
  Synthetic oligonucleotide: PDCD1-3657
aggugcggccucggaggcc

SEQ ID NO: 15734 - RNA, 20 nt, Artificial Sequence
  Synthetic oligonucleotide: PDCD1-709
caggugcggccucggaggcc

SEQ ID NO: 15735 - RNA, 21 nt, Artificial Sequence
  Synthetic oligonucleotide: PDCD1-3658
acaggugcggccucggaggcc

SEQ ID NO: 15736 - RNA, 22 nt, Artificial Sequence
  Synthetic oligonucleotide: PDCD1-3659
gacaggugcggccucggaggcc

SEQ ID NO: 15737 - RNA, 23 nt, Artificial Sequence
  Synthetic oligonucleotide: PDCD1-3660
ugacaggugcggccucggaggcc

SEQ ID NO: 15738 - RNA, 24 nt, Artificial Sequence
  Synthetic oligonucleotide: PDCD1-3661
gugacaggugcggccucggaggcc

SEQ ID NO: 15739 - RNA, 18 nt, Artificial Sequence
  Synthetic oligonucleotide: PDCD1-3662
agggugacaggugcggcc

SEQ ID NO: 15740 - RNA, 19 nt, Artificial Sequence
  Synthetic oligonucleotide: PDCD1-3663
cagggugacaggugcggcc

SEQ ID NO: 15741 - RNA, 20 nt, Artificial Sequence
  Synthetic oligonucleotide: PDCD1-707
ucagggugacaggugcggcc

SEQ ID NO: 15742 - RNA, 21 nt, Artificial Sequence
  Synthetic oligonucleotide: PDCD1-3664
cucagggugacaggugcggcc

SEQ ID NO: 15743 - RNA, 22 nt, Artificial Sequence
  Synthetic oligonucleotide: PDCD1-3665
gcucagggugacaggugcggcc

SEQ ID NO: 15744 - RNA, 23 nt, Artificial Sequence
  Synthetic oligonucleotide: PDCD1-3666
agcucagggugacaggugcggcc

SEQ ID NO: 15745 - RNA, 24 nt, Artificial Sequence
  Synthetic oligonucleotide: PDCD1-3667
gagcucagggugacaggugcggcc

SEQ ID NO: 15746 - RNA, 18 nt, Artificial Sequence
  Synthetic oligonucleotide: PDCD1-3668
acaagcuggccgccuucc

SEQ ID NO: 15747 - RNA, 19 nt, Artificial Sequence
  Synthetic oligonucleotide: PDCD1-3669
gacaagcuggccgccuucc

SEQ ID NO: 15748 - RNA, 20 nt, Artificial Sequence
  Synthetic oligonucleotide: PDCD1-545
ggacaagcuggccgccuucc

SEQ ID NO: 15749 - RNA, 21 nt, Artificial Sequence
  Synthetic oligonucleotide: PDCD1-3670
cggacaagcuggccgccuucc

SEQ ID NO: 15750 - RNA, 22 nt, Artificial Sequence
  Synthetic oligonucleotide: PDCD1-3671
acggacaagcuggccgccuucc

SEQ ID NO: 15751 - RNA, 23 nt, Artificial Sequence
  Synthetic oligonucleotide: PDCD1-3672
gacggacaagcuggccgccuucc

SEQ ID NO: 15752 - RNA, 24 nt, Artificial Sequence
  Synthetic oligonucleotide: PDCD1-3673
agacggacaagcuggccgccuucc

SEQ ID NO: 15753 - RNA, 18 nt, Artificial Sequence
  Synthetic oligonucleotide: PDCD1-3674
gugcuaaacugguaccgc

SEQ ID NO: 15754 - RNA, 19 nt, Artificial Sequence
  Synthetic oligonucleotide: PDCD1-3675
cgugcuaaacugguaccgc

SEQ ID NO: 15755 - RNA, 20 nt, Artificial Sequence
  Synthetic oligonucleotide: PDCD1-543
ucgugcuaaacugguaccgc

SEQ ID NO: 15756 - RNA, 21 nt, Artificial Sequence
  Synthetic oligonucleotide: PDCD1-3676
uucgugcuaaacugguaccgc

SEQ ID NO: 15757 - RNA, 22 nt, Artificial Sequence
  Synthetic oligonucleotide: PDCD1-3677
cuucgugcuaaacugguaccgc

SEQ ID NO: 15758 - RNA, 23 nt, Artificial Sequence
  Synthetic oligonucleotide: PDCD1-3678
gcuucgugcuaaacugguaccgc

SEQ ID NO: 15759 - RNA, 24 nt, Artificial Sequence
  Synthetic oligonucleotide: PDCD1-3679
agcuucgugcuaaacugguaccgc

SEQ ID NO: 15760 - RNA, 18 nt, Artificial Sequence
  Synthetic oligonucleotide: PDCD1-3680
gaccgcagccagcccggc

SEQ ID NO: 15761 - RNA, 19 nt, Artificial Sequence
  Synthetic oligonucleotide: PDCD1-3681
ggaccgcagccagcccggc

SEQ ID NO: 15762 - RNA, 20 nt, Artificial Sequence
  Synthetic oligonucleotide: PDCD1-547
aggaccgcagccagcccggc

SEQ ID NO: 15763 - RNA, 21 nt, Artificial Sequence
  Synthetic oligonucleotide: PDCD1-3682
gaggaccgcagccagcccggc

SEQ ID NO: 15764 - RNA, 22 nt, Artificial Sequence
  Synthetic oligonucleotide: PDCD1-3683
cgaggaccgcagccagcccggc

SEQ ID NO: 15765 - RNA, 23 nt, Artificial Sequence
  Synthetic oligonucleotide: PDCD1-3684
ccgaggaccgcagccagcccggc

SEQ ID NO: 15766 - RNA, 24 nt, Artificial Sequence
  Synthetic oligonucleotide: PDCD1-3685
cccgaggaccgcagccagcccggc

SEQ ID NO: 15767 - RNA, 18 nt, Artificial Sequence
  Synthetic oligonucleotide: PDCD1-3686
augagccccagcaaccag

SEQ ID NO: 15768 - RNA, 19 nt, Artificial Sequence
  Synthetic oligonucleotide: PDCD1-3687
caugagccccagcaaccag

SEQ ID NO: 15769 - RNA, 20 nt, Artificial Sequence
  Synthetic oligonucleotide: PDCD1-544
gcaugagccccagcaaccag

SEQ ID NO: 15770 - RNA, 21 nt, Artificial Sequence
  Synthetic oligonucleotide: PDCD1-3688
cgcaugagccccagcaaccag

SEQ ID NO: 15771 - RNA, 22 nt, Artificial Sequence
  Synthetic oligonucleotide: PDCD1-3689
ccgcaugagccccagcaaccag

SEQ ID NO: 15772 - RNA, 23 nt, Artificial Sequence
  Synthetic oligonucleotide: PDCD1-3690
accgcaugagccccagcaaccag

SEQ ID NO: 15773 - RNA, 24 nt, Artificial Sequence
  Synthetic oligonucleotide: PDCD1-3691
uaccgcaugagccccagcaaccag

SEQ ID NO: 15774 - RNA, 18 nt, Artificial Sequence
  Synthetic oligonucleotide: PDCD1-3692
aggaugguucuuagguag

SEQ ID NO: 15775 - RNA, 19 nt, Artificial Sequence
  Synthetic oligonucleotide: PDCD1-3693
caggaugguucuuagguag

SEQ ID NO: 15776 - RNA, 20 nt, Artificial Sequence
  Synthetic oligonucleotide: PDCD1-532
ccaggaugguucuuagguag

SEQ ID NO: 15777 - RNA, 21 nt, Artificial Sequence
  Synthetic oligonucleotide: PDCD1-3694
gccaggaugguucuuagguag

SEQ ID NO: 15778 - RNA, 22 nt, Artificial Sequence
  Synthetic oligonucleotide: PDCD1-3695
ggccaggaugguucuuagguag

SEQ ID NO: 15779 - RNA, 23 nt, Artificial Sequence
  Synthetic oligonucleotide: PDCD1-3696
cggccaggaugguucuuagguag

SEQ ID NO: 15780 - RNA, 24 nt, Artificial Sequence
  Synthetic oligonucleotide: PDCD1-3697
gcggccaggaugguucuuagguag

SEQ ID NO: 15781 - RNA, 18 nt, Artificial Sequence
  Synthetic oligonucleotide: PDCD1-3698
cccugcucguggugaccg

SEQ ID NO: 15782 - RNA, 19 nt, Artificial Sequence
  Synthetic oligonucleotide: PDCD1-3699
gcccugcucguggugaccg

SEQ ID NO: 15783 - RNA, 20 nt, Artificial Sequence
  Synthetic oligonucleotide: PDCD1-537
agcccugcucguggugaccg

SEQ ID NO: 15784 - RNA, 21 nt, Artificial Sequence
  Synthetic oligonucleotide: PDCD1-3700
cagcccugcucguggugaccg

SEQ ID NO: 15785 - RNA, 22 nt, Artificial Sequence
  Synthetic oligonucleotide: PDCD1-3701
ccagcccugcucguggugaccg

SEQ ID NO: 15786 - RNA, 23 nt, Artificial Sequence
  Synthetic oligonucleotide: PDCD1-3702
cccagcccugcucguggugaccg

SEQ ID NO: 15787 - RNA, 24 nt, Artificial Sequence
  Synthetic oligonucleotide: PDCD1-3703
ccccagcccugcucguggugaccg

SEQ ID NO: 15788 - RNA, 18 nt, Artificial Sequence
  Synthetic oligonucleotide: PDCD1-3704
agcuucuccaacacaucg

SEQ ID NO: 15789 - RNA, 19 nt, Artificial Sequence
  Synthetic oligonucleotide: PDCD1-3705
cagcuucuccaacacaucg

SEQ ID NO: 15790 - RNA, 20 nt, Artificial Sequence
  Synthetic oligonucleotide: PDCD1-542
gcagcuucuccaacacaucg

SEQ ID NO: 15791 - RNA, 21 nt, Artificial Sequence
  Synthetic oligonucleotide: PDCD1-3706
ugcagcuucuccaacacaucg

SEQ ID NO: 15792 - RNA, 22 nt, Artificial Sequence
  Synthetic oligonucleotide: PDCD1-3707
cugcagcuucuccaacacaucg

SEQ ID NO: 15793 - RNA, 23 nt, Artificial Sequence
  Synthetic oligonucleotide: PDCD1-3708
ccugcagcuucuccaacacaucg

SEQ ID NO: 15794 - RNA, 24 nt, Artificial Sequence
  Synthetic oligonucleotide: PDCD1-3709
accugcagcuucuccaacacaucg

SEQ ID NO: 15795 - RNA, 18 nt, Artificial Sequence
  Synthetic oligonucleotide: PDCD1-3710
ucaaagagagccugcggg

SEQ ID NO: 15796 - RNA, 19 nt, Artificial Sequence
  Synthetic oligonucleotide: PDCD1-3711
aucaaagagagccugcggg

SEQ ID NO: 15797 - RNA, 20 nt, Artificial Sequence
  Synthetic oligonucleotide: PDCD1-556
gaucaaagagagccugcggg

SEQ ID NO: 15798 - RNA, 21 nt, Artificial Sequence
  Synthetic oligonucleotide: PDCD1-3712
agaucaaagagagccugcggg

SEQ ID NO: 15799 - RNA, 22 nt, Artificial Sequence
  Synthetic oligonucleotide: PDCD1-3713
cagaucaaagagagccugcggg

SEQ ID NO: 15800 - RNA, 23 nt, Artificial Sequence
  Synthetic oligonucleotide: PDCD1-3714
gcagaucaaagagagccugcggg

SEQ ID NO: 15801 - RNA, 24 nt, Artificial Sequence
  Synthetic oligonucleotide: PDCD1-3715
cgcagaucaaagagagccugcggg

SEQ ID NO: 15802 - RNA, 18 nt, Artificial Sequence
  Synthetic oligonucleotide: PDCD1-3716
gccucggaggccccgggg

SEQ ID NO: 15803 - RNA, 19 nt, Artificial Sequence
  Synthetic oligonucleotide: PDCD1-3717
ggccucggaggccccgggg

SEQ ID NO: 15804 - RNA, 20 nt, Artificial Sequence
  Synthetic oligonucleotide: PDCD1-711
cggccucggaggccccgggg

SEQ ID NO: 15805 - RNA, 21 nt, Artificial Sequence
  Synthetic oligonucleotide: PDCD1-3718
gcggccucggaggccccgggg

SEQ ID NO: 15806 - RNA, 22 nt, Artificial Sequence
  Synthetic oligonucleotide: PDCD1-3719
ugcggccucggaggccccgggg

SEQ ID NO: 15807 - RNA, 23 nt, Artificial Sequence
  Synthetic oligonucleotide: PDCD1-3720
gugcggccucggaggccccgggg

SEQ ID NO: 15808 - RNA, 24 nt, Artificial Sequence
  Synthetic oligonucleotide: PDCD1-3721
ggugcggccucggaggccccgggg

SEQ ID NO: 15809 - RNA, 18 nt, Artificial Sequence
  Synthetic oligonucleotide: PDCD1-3722
cagcggcaccuaccucug

SEQ ID NO: 15810 - RNA, 19 nt, Artificial Sequence
  Synthetic oligonucleotide: PDCD1-3723
acagcggcaccuaccucug

SEQ ID NO: 15811 - RNA, 20 nt, Artificial Sequence
  Synthetic oligonucleotide: PDCD1-21
gacagcggcaccuaccucug

SEQ ID NO: 15812 - RNA, 21 nt, Artificial Sequence
  Synthetic oligonucleotide: PDCD1-3724
ugacagcggcaccuaccucug

SEQ ID NO: 15813 - RNA, 22 nt, Artificial Sequence
  Synthetic oligonucleotide: PDCD1-3725
augacagcggcaccuaccucug

SEQ ID NO: 15814 - RNA, 23 nt, Artificial Sequence
  Synthetic oligonucleotide: PDCD1-3726
aaugacagcggcaccuaccucug

SEQ ID NO: 15815 - RNA, 24 nt, Artificial Sequence
  Synthetic oligonucleotide: PDCD1-3727
caaugacagcggcaccuaccucug

SEQ ID NO: 15816 - RNA, 18 nt, Artificial Sequence
  Synthetic oligonucleotide: PDCD1-3728
gcagcuucuccaacacau

SEQ ID NO: 15817 - RNA, 19 nt, Artificial Sequence
  Synthetic oligonucleotide: PDCD1-3729
ugcagcuucuccaacacau

SEQ ID NO: 15818 - RNA, 20 nt, Artificial Sequence
  Synthetic oligonucleotide: PDCD1-7
cugcagcuucuccaacacau

SEQ ID NO: 15819 - RNA, 21 nt, Artificial Sequence
  Synthetic oligonucleotide: PDCD1-3730
ccugcagcuucuccaacacau

SEQ ID NO: 15820 - RNA, 22 nt, Artificial Sequence
  Synthetic oligonucleotide: PDCD1-3731
accugcagcuucuccaacacau

SEQ ID NO: 15821 - RNA, 23 nt, Artificial Sequence
  Synthetic oligonucleotide: PDCD1-3732
caccugcagcuucuccaacacau

SEQ ID NO: 15822 - RNA, 24 nt, Artificial Sequence
  Synthetic oligonucleotide: PDCD1-3733
ucaccugcagcuucuccaacacau

SEQ ID NO: 15823 - RNA, 18 nt, Artificial Sequence
  Synthetic oligonucleotide: PDCD1-3734
gcagaucaaagagagccu

SEQ ID NO: 15824 - RNA, 19 nt, Artificial Sequence
  Synthetic oligonucleotide: PDCD1-3735
cgcagaucaaagagagccu

SEQ ID NO: 15825 - RNA, 20 nt, Artificial Sequence
  Synthetic oligonucleotide: PDCD1-555
gcgcagaucaaagagagccu

SEQ ID NO: 15826 - RNA, 21 nt, Artificial Sequence
  Synthetic oligonucleotide: PDCD1-3736
ggcgcagaucaaagagagccu

SEQ ID NO: 15827 - RNA, 22 nt, Artificial Sequence
  Synthetic oligonucleotide: PDCD1-3737
aggcgcagaucaaagagagccu

SEQ ID NO: 15828 - RNA, 23 nt, Artificial Sequence
  Synthetic oligonucleotide: PDCD1-3738
aaggcgcagaucaaagagagccu

SEQ ID NO: 15829 - RNA, 24 nt, Artificial Sequence
  Synthetic oligonucleotide: PDCD1-3739
caaggcgcagaucaaagagagccu

SEQ ID NO: 15830 - RNA, 18 nt, Artificial Sequence
  Synthetic oligonucleotide: PDCD1-3740
gggugacaggugcggccu

SEQ ID NO: 15831 - RNA, 19 nt, Artificial Sequence
  Synthetic oligonucleotide: PDCD1-3741
agggugacaggugcggccu

SEQ ID NO: 15832 - RNA, 20 nt, Artificial Sequence
  Synthetic oligonucleotide: PDCD1-32
cagggugacaggugcggccu

SEQ ID NO: 15833 - RNA, 21 nt, Artificial Sequence
  Synthetic oligonucleotide: PDCD1-3742
ucagggugacaggugcggccu

SEQ ID NO: 15834 - RNA, 22 nt, Artificial Sequence
  Synthetic oligonucleotide: PDCD1-3743
cucagggugacaggugcggccu

SEQ ID NO: 15835 - RNA, 23 nt, Artificial Sequence
  Synthetic oligonucleotide: PDCD1-3744
gcucagggugacaggugcggccu

SEQ ID NO: 15836 - RNA, 24 nt, Artificial Sequence
  Synthetic oligonucleotide: PDCD1-3745
agcucagggugacaggugcggccu

SEQ ID NO: 15837 - RNA, 18 nt, Artificial Sequence
  Synthetic oligonucleotide: PDCD1-3746
acagcggcaccuaccucu

SEQ ID NO: 15838 - RNA, 19 nt, Artificial Sequence
  Synthetic oligonucleotide: PDCD1-3747
gacagcggcaccuaccucu

SEQ ID NO: 15839 - RNA, 20 nt, Artificial Sequence
  Synthetic oligonucleotide: PDCD1-551
ugacagcggcaccuaccucu

SEQ ID NO: 15840 - RNA, 21 nt, Artificial Sequence
  Synthetic oligonucleotide: PDCD1-3748
augacagcggcaccuaccucu

SEQ ID NO: 15841 - RNA, 22 nt, Artificial Sequence
  Synthetic oligonucleotide: PDCD1-3749
aaugacagcggcaccuaccucu

SEQ ID NO: 15842 - RNA, 23 nt, Artificial Sequence
  Synthetic oligonucleotide: PDCD1-3750
caaugacagcggcaccuaccucu

SEQ ID NO: 15843 - RNA, 24 nt, Artificial Sequence
  Synthetic oligonucleotide: PDCD1-3751
gcaaugacagcggcaccuaccucu

SEQ ID NO: 15844 - RNA, 18 nt, Artificial Sequence
  Synthetic oligonucleotide: PDCD1-3752
ggcgcccuggccagucgu

SEQ ID NO: 15845 - RNA, 19 nt, Artificial Sequence
  Synthetic oligonucleotide: PDCD1-3753
aggcgcccuggccagucgu

SEQ ID NO: 15846 - RNA, 20 nt, Artificial Sequence
  Synthetic oligonucleotide: PDCD1-529
caggcgcccuggccagucgu

SEQ ID NO: 15847 - RNA, 21 nt, Artificial Sequence
  Synthetic oligonucleotide: PDCD1-3754
acaggcgcccuggccagucgu

SEQ ID NO: 15848 - RNA, 22 nt, Artificial Sequence
  Synthetic oligonucleotide: PDCD1-3755
cacaggcgcccuggccagucgu

SEQ ID NO: 15849 - RNA, 23 nt, Artificial Sequence
  Synthetic oligonucleotide: PDCD1-3756
ccacaggcgcccuggccagucgu

SEQ ID NO: 15850 - RNA, 24 nt, Artificial Sequence
  Synthetic oligonucleotide: PDCD1-3757
cccacaggcgcccuggccagucgu

SEQ ID NO: 15851 - RNA, 18 nt, Artificial Sequence
  Synthetic oligonucleotide: PDCD1-3758
cuuccacaugagcguggu

SEQ ID NO: 15852 - RNA, 19 nt, Artificial Sequence
  Synthetic oligonucleotide: PDCD1-3759
acuuccacaugagcguggu

SEQ ID NO: 15853 - RNA, 20 nt, Artificial Sequence
  Synthetic oligonucleotide: PDCD1-550
gacuuccacaugagcguggu

SEQ ID NO: 15854 - RNA, 21 nt, Artificial Sequence
  Synthetic oligonucleotide: PDCD1-3760
ugacuuccacaugagcguggu

SEQ ID NO: 15855 - RNA, 22 nt, Artificial Sequence
  Synthetic oligonucleotide: PDCD1-3761
gugacuuccacaugagcguggu

SEQ ID NO: 15856 - RNA, 23 nt, Artificial Sequence
  Synthetic oligonucleotide: PDCD1-3762
cgugacuuccacaugagcguggu

SEQ ID NO: 15857 - RNA, 24 nt, Artificial Sequence
  Synthetic oligonucleotide: PDCD1-3763
gcgugacuuccacaugagcguggu

SEQ ID NO: 15858 - RNA, 18 nt, Artificial Sequence
  Synthetic oligonucleotide: PDCD1-3764
uuugaggagaaagggaga

SEQ ID NO: 15859 - RNA, 19 nt, Artificial Sequence
  Synthetic oligonucleotide: PDCD1-3765
cuuugaggagaaagggaga

SEQ ID NO: 15860 - RNA, 20 nt, Artificial Sequence
  Synthetic oligonucleotide: PDCD1-398
ucuuugaggagaaagggaga

SEQ ID NO: 15861 - RNA, 21 nt, Artificial Sequence
  Synthetic oligonucleotide: PDCD1-3766
uucuuugaggagaaagggaga

SEQ ID NO: 15862 - RNA, 22 nt, Artificial Sequence
  Synthetic oligonucleotide: PDCD1-3767
cuucuuugaggagaaagggaga

SEQ ID NO: 15863 - RNA, 23 nt, Artificial Sequence
  Synthetic oligonucleotide: PDCD1-3768
ccuucuuugaggagaaagggaga

SEQ ID NO: 15864 - RNA, 24 nt, Artificial Sequence
  Synthetic oligonucleotide: PDCD1-3769
uccuucuuugaggagaaagggaga

SEQ ID NO: 15865 - RNA, 18 nt, Artificial Sequence
  Synthetic oligonucleotide: PDCD1-3770
gcccacgacaccaaccac

SEQ ID NO: 15866 - RNA, 19 nt, Artificial Sequence
  Synthetic oligonucleotide: PDCD1-3771
cgcccacgacaccaaccac

SEQ ID NO: 15867 - RNA, 20 nt, Artificial Sequence
  Synthetic oligonucleotide: PDCD1-824
ccgcccacgacaccaaccac

SEQ ID NO: 15868 - RNA, 21 nt, Artificial Sequence
  Synthetic oligonucleotide: PDCD1-3772
gccgcccacgacaccaaccac

SEQ ID NO: 15869 - RNA, 22 nt, Artificial Sequence
  Synthetic oligonucleotide: PDCD1-3773
ggccgcccacgacaccaaccac

SEQ ID NO: 15870 - RNA, 23 nt, Artificial Sequence
  Synthetic oligonucleotide: PDCD1-3774
aggccgcccacgacaccaaccac

SEQ ID NO: 15871 - RNA, 24 nt, Artificial Sequence
  Synthetic oligonucleotide: PDCD1-3775
caggccgcccacgacaccaaccac

SEQ ID NO: 15872 - RNA, 18 nt, Artificial Sequence
  Synthetic oligonucleotide: PDCD1-3776
cuggccugggugaggggc

SEQ ID NO: 15873 - RNA, 19 nt, Artificial Sequence
  Synthetic oligonucleotide: PDCD1-3777
gcuggccugggugaggggc

SEQ ID NO: 15874 - RNA, 20 nt, Artificial Sequence
  Synthetic oligonucleotide: PDCD1-369
ggcuggccugggugaggggc

SEQ ID NO: 15875 - RNA, 21 nt, Artificial Sequence
  Synthetic oligonucleotide: PDCD1-3778
cggcuggccugggugaggggc

SEQ ID NO: 15876 - RNA, 22 nt, Artificial Sequence
  Synthetic oligonucleotide: PDCD1-3779
ccggcuggccugggugaggggc

SEQ ID NO: 15877 - RNA, 23 nt, Artificial Sequence
  Synthetic oligonucleotide: PDCD1-3780
gccggcuggccugggugaggggc

SEQ ID NO: 15878 - RNA, 24 nt, Artificial Sequence
  Synthetic oligonucleotide: PDCD1-3781
ggccggcuggccugggugaggggc

SEQ ID NO: 15879 - RNA, 18 nt, Artificial Sequence
  Synthetic oligonucleotide: PDCD1-3782
uggaacuggccggcuggc

SEQ ID NO: 15880 - RNA, 19 nt, Artificial Sequence
  Synthetic oligonucleotide: PDCD1-3783
uuggaacuggccggcuggc

SEQ ID NO: 15881 - RNA, 20 nt, Artificial Sequence
  Synthetic oligonucleotide: PDCD1-821
uuuggaacuggccggcuggc

SEQ ID NO: 15882 - RNA, 21 nt, Artificial Sequence
  Synthetic oligonucleotide: PDCD1-3784
guuuggaacuggccggcuggc

SEQ ID NO: 15883 - RNA, 22 nt, Artificial Sequence
  Synthetic oligonucleotide: PDCD1-3785
gguuuggaacuggccggcuggc

SEQ ID NO: 15884 - RNA, 23 nt, Artificial Sequence
  Synthetic oligonucleotide: PDCD1-3786
ggguuuggaacuggccggcuggc

SEQ ID NO: 15885 - RNA, 24 nt, Artificial Sequence
  Synthetic oligonucleotide: PDCD1-3787
aggguuuggaacuggccggcuggc

SEQ ID NO: 15886 - RNA, 18 nt, Artificial Sequence
  Synthetic oligonucleotide: PDCD1-3788
acagggcacggggggcuc

SEQ ID NO: 15887 - RNA, 19 nt, Artificial Sequence
  Synthetic oligonucleotide: PDCD1-3789
cacagggcacggggggcuc

SEQ ID NO: 15888 - RNA, 20 nt, Artificial Sequence
  Synthetic oligonucleotide: PDCD1-411
acacagggcacggggggcuc

SEQ ID NO: 15889 - RNA, 21 nt, Artificial Sequence
  Synthetic oligonucleotide: PDCD1-3790
gacacagggcacggggggcuc

SEQ ID NO: 15890 - RNA, 22 nt, Artificial Sequence
  Synthetic oligonucleotide: PDCD1-3791
ggacacagggcacggggggcuc

SEQ ID NO: 15891 - RNA, 23 nt, Artificial Sequence
  Synthetic oligonucleotide: PDCD1-3792
gggacacagggcacggggggcuc

SEQ ID NO: 15892 - RNA, 24 nt, Artificial Sequence
  Synthetic oligonucleotide: PDCD1-3793
agggacacagggcacggggggcuc

SEQ ID NO: 15893 - RNA, 18 nt, Artificial Sequence
  Synthetic oligonucleotide: PDCD1-3794
uggaagggcacaaagguc

SEQ ID NO: 15894 - RNA, 19 nt, Artificial Sequence
  Synthetic oligonucleotide: PDCD1-3795
cuggaagggcacaaagguc

SEQ ID NO: 15895 - RNA, 20 nt, Artificial Sequence
  Synthetic oligonucleotide: PDCD1-358
ucuggaagggcacaaagguc

SEQ ID NO: 15896 - RNA, 21 nt, Artificial Sequence
  Synthetic oligonucleotide: PDCD1-3796
cucuggaagggcacaaagguc

SEQ ID NO: 15897 - RNA, 22 nt, Artificial Sequence
  Synthetic oligonucleotide: PDCD1-3797
ucucuggaagggcacaaagguc

SEQ ID NO: 15898 - RNA, 23 nt, Artificial Sequence
  Synthetic oligonucleotide: PDCD1-3798
cucucuggaagggcacaaagguc

SEQ ID NO: 15899 - RNA, 24 nt, Artificial Sequence
  Synthetic oligonucleotide: PDCD1-3799
ucucucuggaagggcacaaagguc

SEQ ID NO: 15900 - RNA, 18 nt, Artificial Sequence
  Synthetic oligonucleotide: PDCD1-3800
gcugagccccugcgggcg

SEQ ID NO: 15901 - RNA, 19 nt, Artificial Sequence
  Synthetic oligonucleotide: PDCD1-3801
agcugagccccugcgggcg

SEQ ID NO: 15902 - RNA, 20 nt, Artificial Sequence
  Synthetic oligonucleotide: PDCD1-426
cagcugagccccugcgggcg

SEQ ID NO: 15903 - RNA, 21 nt, Artificial Sequence
  Synthetic oligonucleotide: PDCD1-3802
ucagcugagccccugcgggcg

SEQ ID NO: 15904 - RNA, 22 nt, Artificial Sequence
  Synthetic oligonucleotide: PDCD1-3803
gucagcugagccccugcgggcg

SEQ ID NO: 15905 - RNA, 23 nt, Artificial Sequence
  Synthetic oligonucleotide: PDCD1-3804
cgucagcugagccccugcgggcg

SEQ ID NO: 15906 - RNA, 24 nt, Artificial Sequence
  Synthetic oligonucleotide: PDCD1-3805
ccgucagcugagccccugcgggcg

SEQ ID NO: 15907 - RNA, 18 nt, Artificial Sequence
  Synthetic oligonucleotide: PDCD1-3806
agaacacaggcacggcug

SEQ ID NO: 15908 - RNA, 19 nt, Artificial Sequence
  Synthetic oligonucleotide: PDCD1-3807
gagaacacaggcacggcug

SEQ ID NO: 15909 - RNA, 20 nt, Artificial Sequence
  Synthetic oligonucleotide: PDCD1-405
agagaacacaggcacggcug

SEQ ID NO: 15910 - RNA, 21 nt, Artificial Sequence
  Synthetic oligonucleotide: PDCD1-3808
cagagaacacaggcacggcug

SEQ ID NO: 15911 - RNA, 22 nt, Artificial Sequence
  Synthetic oligonucleotide: PDCD1-3809
acagagaacacaggcacggcug

SEQ ID NO: 15912 - RNA, 23 nt, Artificial Sequence
  Synthetic oligonucleotide: PDCD1-3810
cacagagaacacaggcacggcug

SEQ ID NO: 15913 - RNA, 24 nt, Artificial Sequence
  Synthetic oligonucleotide: PDCD1-3811
ccacagagaacacaggcacggcug

SEQ ID NO: 15914 - RNA, 18 nt, Artificial Sequence
  Synthetic oligonucleotide: PDCD1-3812
ccugcagagaaacacacu

SEQ ID NO: 15915 - RNA, 19 nt, Artificial Sequence
  Synthetic oligonucleotide: PDCD1-3813
cccugcagagaaacacacu

SEQ ID NO: 15916 - RNA, 20 nt, Artificial Sequence
  Synthetic oligonucleotide: PDCD1-391
ucccugcagagaaacacacu

SEQ ID NO: 15917 - RNA, 21 nt, Artificial Sequence
  Synthetic oligonucleotide: PDCD1-3814
gucccugcagagaaacacacu

SEQ ID NO: 15918 - RNA, 22 nt, Artificial Sequence
  Synthetic oligonucleotide: PDCD1-3815
ugucccugcagagaaacacacu

SEQ ID NO: 15919 - RNA, 23 nt, Artificial Sequence
  Synthetic oligonucleotide: PDCD1-3816
uugucccugcagagaaacacacu

SEQ ID NO: 15920 - RNA, 24 nt, Artificial Sequence
  Synthetic oligonucleotide: PDCD1-3817
auugucccugcagagaaacacacu

SEQ ID NO: 15921 - RNA, 18 nt, Artificial Sequence
  Synthetic oligonucleotide: PDCD1-3818
ccugugucccugagcaga

SEQ ID NO: 15922 - RNA, 19 nt, Artificial Sequence
  Synthetic oligonucleotide: PDCD1-3819
cccugugucccugagcaga

SEQ ID NO: 15923 - RNA, 20 nt, Artificial Sequence
  Synthetic oligonucleotide: PDCD1-290
gcccugugucccugagcaga

SEQ ID NO: 15924 - RNA, 21 nt, Artificial Sequence
  Synthetic oligonucleotide: PDCD1-3820
ugcccugugucccugagcaga

SEQ ID NO: 15925 - RNA, 22 nt, Artificial Sequence
  Synthetic oligonucleotide: PDCD1-3821
gugcccugugucccugagcaga

SEQ ID NO: 15926 - RNA, 23 nt, Artificial Sequence
  Synthetic oligonucleotide: PDCD1-3822
cgugcccugugucccugagcaga

SEQ ID NO: 15927 - RNA, 24 nt, Artificial Sequence
  Synthetic oligonucleotide: PDCD1-3823
ccgugcccugugucccugagcaga

SEQ ID NO: 15928 - RNA, 18 nt, Artificial Sequence
  Synthetic oligonucleotide: PDCD1-3824
ucuguggacuauggggag

SEQ ID NO: 15929 - RNA, 19 nt, Artificial Sequence
  Synthetic oligonucleotide: PDCD1-3825
cucuguggacuauggggag

SEQ ID NO: 15930 - RNA, 20 nt, Artificial Sequence
  Synthetic oligonucleotide: PDCD1-737
ucucuguggacuauggggag

SEQ ID NO: 15931 - RNA, 21 nt, Artificial Sequence
  Synthetic oligonucleotide: PDCD1-3826
uucucuguggacuauggggag

SEQ ID NO: 15932 - RNA, 22 nt, Artificial Sequence
  Synthetic oligonucleotide: PDCD1-3827
guucucuguggacuauggggag

SEQ ID NO: 15933 - RNA, 23 nt, Artificial Sequence
  Synthetic oligonucleotide: PDCD1-3828
uguucucuguggacuauggggag

SEQ ID NO: 15934 - RNA, 24 nt, Artificial Sequence
  Synthetic oligonucleotide: PDCD1-3829
guguucucuguggacuauggggag

SEQ ID NO: 15935 - RNA, 18 nt, Artificial Sequence
  Synthetic oligonucleotide: PDCD1-3830
caccauugucuuuccuag

SEQ ID NO: 15936 - RNA, 19 nt, Artificial Sequence
  Synthetic oligonucleotide: PDCD1-3831
ccaccauugucuuuccuag

SEQ ID NO: 15937 - RNA, 20 nt, Artificial Sequence
  Synthetic oligonucleotide: PDCD1-291
gccaccauugucuuuccuag

SEQ ID NO: 15938 - RNA, 21 nt, Artificial Sequence
  Synthetic oligonucleotide: PDCD1-3832
ugccaccauugucuuuccuag

SEQ ID NO: 15939 - RNA, 22 nt, Artificial Sequence
  Synthetic oligonucleotide: PDCD1-3833
augccaccauugucuuuccuag

SEQ ID NO: 15940 - RNA, 23 nt, Artificial Sequence
  Synthetic oligonucleotide: PDCD1-3834
uaugccaccauugucuuuccuag

SEQ ID NO: 15941 - RNA, 24 nt, Artificial Sequence
  Synthetic oligonucleotide: PDCD1-3835
guaugccaccauugucuuuccuag

SEQ ID NO: 15942 - RNA, 18 nt, Artificial Sequence
  Synthetic oligonucleotide: PDCD1-3836
cgcaccggccagccccug

SEQ ID NO: 15943 - RNA, 19 nt, Artificial Sequence
  Synthetic oligonucleotide: PDCD1-3837
gcgcaccggccagccccug

SEQ ID NO: 15944 - RNA, 20 nt, Artificial Sequence
  Synthetic oligonucleotide: PDCD1-727
ggcgcaccggccagccccug

SEQ ID NO: 15945 - RNA, 21 nt, Artificial Sequence
  Synthetic oligonucleotide: PDCD1-3838
aggcgcaccggccagccccug

SEQ ID NO: 15946 - RNA, 22 nt, Artificial Sequence
  Synthetic oligonucleotide: PDCD1-3839
caggcgcaccggccagccccug

SEQ ID NO: 15947 - RNA, 23 nt, Artificial Sequence
  Synthetic oligonucleotide: PDCD1-3840
ccaggcgcaccggccagccccug

SEQ ID NO: 15948 - RNA, 24 nt, Artificial Sequence
  Synthetic oligonucleotide: PDCD1-3841
gccaggcgcaccggccagccccug

SEQ ID NO: 15949 - RNA, 18 nt, Artificial Sequence
  Synthetic oligonucleotide: PDCD1-3842
ggcucagcugacggcccu

SEQ ID NO: 15950 - RNA, 19 nt, Artificial Sequence
  Synthetic oligonucleotide: PDCD1-3843
gggcucagcugacggcccu

SEQ ID NO: 15951 - RNA, 20 nt, Artificial Sequence
  Synthetic oligonucleotide: PDCD1-298
ggggcucagcugacggcccu

SEQ ID NO: 15952 - RNA, 21 nt, Artificial Sequence
  Synthetic oligonucleotide: PDCD1-3844
aggggcucagcugacggcccu

SEQ ID NO: 15953 - RNA, 22 nt, Artificial Sequence
  Synthetic oligonucleotide: PDCD1-3845
caggggcucagcugacggcccu

SEQ ID NO: 15954 - RNA, 23 nt, Artificial Sequence
  Synthetic oligonucleotide: PDCD1-3846
gcaggggcucagcugacggcccu

SEQ ID NO: 15955 - RNA, 24 nt, Artificial Sequence
  Synthetic oligonucleotide: PDCD1-3847
cgcaggggcucagcugacggcccu

SEQ ID NO: 15956 - RNA, 18 nt, Artificial Sequence
  Synthetic oligonucleotide: PDCD1-3848
gcccagccacugaggccu

SEQ ID NO: 15957 - RNA, 19 nt, Artificial Sequence
  Synthetic oligonucleotide: PDCD1-3849
ugcccagccacugaggccu

SEQ ID NO: 15958 - RNA, 20 nt, Artificial Sequence
  Synthetic oligonucleotide: PDCD1-755
gugcccagccacugaggccu

SEQ ID NO: 15959 - RNA, 21 nt, Artificial Sequence
  Synthetic oligonucleotide: PDCD1-3850
agugcccagccacugaggccu

SEQ ID NO: 15960 - RNA, 22 nt, Artificial Sequence
  Synthetic oligonucleotide: PDCD1-3851
gagugcccagccacugaggccu

SEQ ID NO: 15961 - RNA, 23 nt, Artificial Sequence
  Synthetic oligonucleotide: PDCD1-3852
ggagugcccagccacugaggccu

SEQ ID NO: 15962 - RNA, 24 nt, Artificial Sequence
  Synthetic oligonucleotide: PDCD1-3853
cggagugcccagccacugaggccu

SEQ ID NO: 15963 - RNA, 18 nt, Artificial Sequence
  Synthetic oligonucleotide: PDCD1-3854
cagccuggugcugcuagu

SEQ ID NO: 15964 - RNA, 19 nt, Artificial Sequence
  Synthetic oligonucleotide: PDCD1-3855
gcagccuggugcugcuagu

SEQ ID NO: 15965 - RNA, 20 nt, Artificial Sequence
  Synthetic oligonucleotide: PDCD1-720
ggcagccuggugcugcuagu

SEQ ID NO: 15966 - RNA, 21 nt, Artificial Sequence
  Synthetic oligonucleotide: PDCD1-3856
gggcagccuggugcugcuagu

SEQ ID NO: 15967 - RNA, 22 nt, Artificial Sequence
  Synthetic oligonucleotide: PDCD1-3857
ugggcagccuggugcugcuagu

SEQ ID NO: 15968 - RNA, 23 nt, Artificial Sequence
  Synthetic oligonucleotide: PDCD1-3858
cugggcagccuggugcugcuagu

SEQ ID NO: 15969 - RNA, 24 nt, Artificial Sequence
  Synthetic oligonucleotide: PDCD1-3859
gcugggcagccuggugcugcuagu

SEQ ID NO: 15970 - RNA, 18 nt, Artificial Sequence
  Synthetic oligonucleotide: PDCD1-3860
uccuucuuugaggagaaa

SEQ ID NO: 15971 - RNA, 19 nt, Artificial Sequence
  Synthetic oligonucleotide: PDCD1-3861
cuccuucuuugaggagaaa

SEQ ID NO: 15972 - RNA, 20 nt, Artificial Sequence
  Synthetic oligonucleotide: PDCD1-400
ccuccuucuuugaggagaaa

SEQ ID NO: 15973 - RNA, 21 nt, Artificial Sequence
  Synthetic oligonucleotide: PDCD1-3862
uccuccuucuuugaggagaaa

SEQ ID NO: 15974 - RNA, 22 nt, Artificial Sequence
  Synthetic oligonucleotide: PDCD1-3863
guccuccuucuuugaggagaaa

SEQ ID NO: 15975 - RNA, 23 nt, Artificial Sequence
  Synthetic oligonucleotide: PDCD1-3864
gguccuccuucuuugaggagaaa

SEQ ID NO: 15976 - RNA, 24 nt, Artificial Sequence
  Synthetic oligonucleotide: PDCD1-3865
ggguccuccuucuuugaggagaaa

SEQ ID NO: 15977 - RNA, 18 nt, Artificial Sequence
  Synthetic oligonucleotide: PDCD1-3866
cuccuucuuugaggagaa

SEQ ID NO: 15978 - RNA, 19 nt, Artificial Sequence
  Synthetic oligonucleotide: PDCD1-3867
ccuccuucuuugaggagaa

SEQ ID NO: 15979 - RNA, 20 nt, Artificial Sequence
  Synthetic oligonucleotide: PDCD1-401
uccuccuucuuugaggagaa

SEQ ID NO: 15980 - RNA, 21 nt, Artificial Sequence
  Synthetic oligonucleotide: PDCD1-3868
guccuccuucuuugaggagaa

SEQ ID NO: 15981 - RNA, 22 nt, Artificial Sequence
  Synthetic oligonucleotide: PDCD1-3869
gguccuccuucuuugaggagaa

SEQ ID NO: 15982 - RNA, 23 nt, Artificial Sequence
  Synthetic oligonucleotide: PDCD1-3870
ggguccuccuucuuugaggagaa

SEQ ID NO: 15983 - RNA, 24 nt, Artificial Sequence
  Synthetic oligonucleotide: PDCD1-3871
gggguccuccuucuuugaggagaa

SEQ ID NO: 15984 - RNA, 18 nt, Artificial Sequence
  Synthetic oligonucleotide: PDCD1-3872
agcuccccauaguccaca

SEQ ID NO: 15985 - RNA, 19 nt, Artificial Sequence
  Synthetic oligonucleotide: PDCD1-3873
cagcuccccauaguccaca

SEQ ID NO: 15986 - RNA, 20 nt, Artificial Sequence
  Synthetic oligonucleotide: PDCD1-849
ccagcuccccauaguccaca

SEQ ID NO: 15987 - RNA, 21 nt, Artificial Sequence
  Synthetic oligonucleotide: PDCD1-3874
uccagcuccccauaguccaca

SEQ ID NO: 15988 - RNA, 22 nt, Artificial Sequence
  Synthetic oligonucleotide: PDCD1-3875
auccagcuccccauaguccaca

SEQ ID NO: 15989 - RNA, 23 nt, Artificial Sequence
  Synthetic oligonucleotide: PDCD1-3876
aauccagcuccccauaguccaca

SEQ ID NO: 15990 - RNA, 24 nt, Artificial Sequence
  Synthetic oligonucleotide: PDCD1-3877
aaauccagcuccccauaguccaca

SEQ ID NO: 15991 - RNA, 18 nt, Artificial Sequence
  Synthetic oligonucleotide: PDCD1-3878
uccgucugcucagggaca

SEQ ID NO: 15992 - RNA, 19 nt, Artificial Sequence
  Synthetic oligonucleotide: PDCD1-3879
cuccgucugcucagggaca

SEQ ID NO: 15993 - RNA, 20 nt, Artificial Sequence
  Synthetic oligonucleotide: PDCD1-859
acuccgucugcucagggaca

SEQ ID NO: 15994 - RNA, 21 nt, Artificial Sequence
  Synthetic oligonucleotide: PDCD1-3880
uacuccgucugcucagggaca

SEQ ID NO: 15995 - RNA, 22 nt, Artificial Sequence
  Synthetic oligonucleotide: PDCD1-3881
auacuccgucugcucagggaca

SEQ ID NO: 15996 - RNA, 23 nt, Artificial Sequence
  Synthetic oligonucleotide: PDCD1-3882
cauacuccgucugcucagggaca

SEQ ID NO: 15997 - RNA, 24 nt, Artificial Sequence
  Synthetic oligonucleotide: PDCD1-3883
gcauacuccgucugcucagggaca

SEQ ID NO: 15998 - RNA, 18 nt, Artificial Sequence
  Synthetic oligonucleotide: PDCD1-3884
cggggucuucucucgcca

SEQ ID NO: 15999 - RNA, 19 nt, Artificial Sequence
  Synthetic oligonucleotide: PDCD1-3885
ccggggucuucucucgcca

SEQ ID NO: 16000 - RNA, 20 nt, Artificial Sequence
  Synthetic oligonucleotide: PDCD1-852
uccggggucuucucucgcca

SEQ ID NO: 16001 - RNA, 21 nt, Artificial Sequence
  Synthetic oligonucleotide: PDCD1-3886
cuccggggucuucucucgcca

SEQ ID NO: 16002 - RNA, 22 nt, Artificial Sequence
  Synthetic oligonucleotide: PDCD1-3887
gcuccggggucuucucucgcca

SEQ ID NO: 16003 - RNA, 23 nt, Artificial Sequence
  Synthetic oligonucleotide: PDCD1-3888
ggcuccggggucuucucucgcca

SEQ ID NO: 16004 - RNA, 24 nt, Artificial Sequence
  Synthetic oligonucleotide: PDCD1-3889
gggcuccggggucuucucucgcca

SEQ ID NO: 16005 - RNA, 18 nt, Artificial Sequence
  Synthetic oligonucleotide: PDCD1-3890
gcagaacacugguggcca

SEQ ID NO: 16006 - RNA, 19 nt, Artificial Sequence
  Synthetic oligonucleotide: PDCD1-3891
ugcagaacacugguggcca

SEQ ID NO: 16007 - RNA, 20 nt, Artificial Sequence
  Synthetic oligonucleotide: PDCD1-441
cugcagaacacugguggcca

SEQ ID NO: 16008 - RNA, 18 nt, Artificial Sequence
  Synthetic oligonucleotide: PDCD1-3892
ccagcuccccauagucca

SEQ ID NO: 16009 - RNA, 19 nt, Artificial Sequence
  Synthetic oligonucleotide: PDCD1-3893
uccagcuccccauagucca

SEQ ID NO: 16010 - RNA, 20 nt, Artificial Sequence
  Synthetic oligonucleotide: PDCD1-850
auccagcuccccauagucca

SEQ ID NO: 16011 - RNA, 21 nt, Artificial Sequence
  Synthetic oligonucleotide: PDCD1-3894
aauccagcuccccauagucca

SEQ ID NO: 16012 - RNA, 22 nt, Artificial Sequence
  Synthetic oligonucleotide: PDCD1-3895
aaauccagcuccccauagucca

SEQ ID NO: 16013 - RNA, 23 nt, Artificial Sequence
  Synthetic oligonucleotide: PDCD1-3896
gaaauccagcuccccauagucca

SEQ ID NO: 16014 - RNA, 24 nt, Artificial Sequence
  Synthetic oligonucleotide: PDCD1-3897
ggaaauccagcuccccauagucca

SEQ ID NO: 16015 - RNA, 18 nt, Artificial Sequence
  Synthetic oligonucleotide: PDCD1-3898
gcucagggacacagggca

SEQ ID NO: 16016 - RNA, 19 nt, Artificial Sequence
  Synthetic oligonucleotide: PDCD1-3899
ugcucagggacacagggca

SEQ ID NO: 16017 - RNA, 20 nt, Artificial Sequence
  Synthetic oligonucleotide: PDCD1-416
cugcucagggacacagggca

SEQ ID NO: 16018 - RNA, 21 nt, Artificial Sequence
  Synthetic oligonucleotide: PDCD1-3900
ucugcucagggacacagggca

SEQ ID NO: 16019 - RNA, 22 nt, Artificial Sequence
  Synthetic oligonucleotide: PDCD1-3901
gucugcucagggacacagggca

SEQ ID NO: 16020 - RNA, 23 nt, Artificial Sequence
  Synthetic oligonucleotide: PDCD1-3902
cgucugcucagggacacagggca

SEQ ID NO: 16021 - RNA, 24 nt, Artificial Sequence
  Synthetic oligonucleotide: PDCD1-3903
ccgucugcucagggacacagggca

SEQ ID NO: 16022 - RNA, 18 nt, Artificial Sequence
  Synthetic oligonucleotide: PDCD1-3904
gcuccuauugucccugca

SEQ ID NO: 16023 - RNA, 19 nt, Artificial Sequence
  Synthetic oligonucleotide: PDCD1-3905
ggcuccuauugucccugca

SEQ ID NO: 16024 - RNA, 20 nt, Artificial Sequence
  Synthetic oligonucleotide: PDCD1-831
uggcuccuauugucccugca

SEQ ID NO: 16025 - RNA, 21 nt, Artificial Sequence
  Synthetic oligonucleotide: PDCD1-3906
cuggcuccuauugucccugca

SEQ ID NO: 16026 - RNA, 22 nt, Artificial Sequence
  Synthetic oligonucleotide: PDCD1-3907
ccuggcuccuauugucccugca

SEQ ID NO: 16027 - RNA, 23 nt, Artificial Sequence
  Synthetic oligonucleotide: PDCD1-3908
gccuggcuccuauugucccugca

SEQ ID NO: 16028 - RNA, 24 nt, Artificial Sequence
  Synthetic oligonucleotide: PDCD1-3909
cgccuggcuccuauugucccugca

SEQ ID NO: 16029 - RNA, 18 nt, Artificial Sequence
  Synthetic oligonucleotide: PDCD1-3910
ggccaaggaagccgguca

SEQ ID NO: 16030 - RNA, 19 nt, Artificial Sequence
  Synthetic oligonucleotide: PDCD1-3911
uggccaaggaagccgguca

SEQ ID NO: 16031 - RNA, 20 nt, Artificial Sequence
  Synthetic oligonucleotide: PDCD1-876
guggccaaggaagccgguca

SEQ ID NO: 16032 - RNA, 21 nt, Artificial Sequence
  Synthetic oligonucleotide: PDCD1-3912
gguggccaaggaagccgguca

SEQ ID NO: 16033 - RNA, 22 nt, Artificial Sequence
  Synthetic oligonucleotide: PDCD1-3913
ugguggccaaggaagccgguca

SEQ ID NO: 16034 - RNA, 23 nt, Artificial Sequence
  Synthetic oligonucleotide: PDCD1-3914
cugguggccaaggaagccgguca

SEQ ID NO: 16035 - RNA, 24 nt, Artificial Sequence
  Synthetic oligonucleotide: PDCD1-3915
acugguggccaaggaagccgguca

SEQ ID NO: 16036 - RNA, 18 nt, Artificial Sequence
  Synthetic oligonucleotide: PDCD1-3916
ccuccuucuuugaggaga

SEQ ID NO: 16037 - RNA, 19 nt, Artificial Sequence
  Synthetic oligonucleotide: PDCD1-3917
uccuccuucuuugaggaga

SEQ ID NO: 16038 - RNA, 20 nt, Artificial Sequence
  Synthetic oligonucleotide: PDCD1-841
guccuccuucuuugaggaga

SEQ ID NO: 16039 - RNA, 21 nt, Artificial Sequence
  Synthetic oligonucleotide: PDCD1-3918
gguccuccuucuuugaggaga

SEQ ID NO: 16040 - RNA, 22 nt, Artificial Sequence
  Synthetic oligonucleotide: PDCD1-3919
ggguccuccuucuuugaggaga

SEQ ID NO: 16041 - RNA, 23 nt, Artificial Sequence
  Synthetic oligonucleotide: PDCD1-3920
gggguccuccuucuuugaggaga

SEQ ID NO: 16042 - RNA, 24 nt, Artificial Sequence
  Synthetic oligonucleotide: PDCD1-3921
agggguccuccuucuuugaggaga

SEQ ID NO: 16043 - RNA, 18 nt, Artificial Sequence
  Synthetic oligonucleotide: PDCD1-3922
ucuuugaggagaaaggga

SEQ ID NO: 16044 - RNA, 19 nt, Artificial Sequence
  Synthetic oligonucleotide: PDCD1-3923
uucuuugaggagaaaggga

SEQ ID NO: 16045 - RNA, 20 nt, Artificial Sequence
  Synthetic oligonucleotide: PDCD1-837
cuucuuugaggagaaaggga

SEQ ID NO: 16046 - RNA, 21 nt, Artificial Sequence
  Synthetic oligonucleotide: PDCD1-3924
ccuucuuugaggagaaaggga

SEQ ID NO: 16047 - RNA, 22 nt, Artificial Sequence
  Synthetic oligonucleotide: PDCD1-3925
uccuucuuugaggagaaaggga

SEQ ID NO: 16048 - RNA, 23 nt, Artificial Sequence
  Synthetic oligonucleotide: PDCD1-3926
cuccuucuuugaggagaaaggga

SEQ ID NO: 16049 - RNA, 24 nt, Artificial Sequence
  Synthetic oligonucleotide: PDCD1-3927
ccuccuucuuugaggagaaaggga

SEQ ID NO: 16050 - RNA, 18 nt, Artificial Sequence
  Synthetic oligonucleotide: PDCD1-3928
cccugcagagaaacacac

SEQ ID NO: 16051 - RNA, 19 nt, Artificial Sequence
  Synthetic oligonucleotide: PDCD1-3929
ucccugcagagaaacacac

SEQ ID NO: 16052 - RNA, 20 nt, Artificial Sequence
  Synthetic oligonucleotide: PDCD1-830
gucccugcagagaaacacac

SEQ ID NO: 16053 - RNA, 21 nt, Artificial Sequence
  Synthetic oligonucleotide: PDCD1-3930
ugucccugcagagaaacacac

SEQ ID NO: 16054 - RNA, 22 nt, Artificial Sequence
  Synthetic oligonucleotide: PDCD1-3931
uugucccugcagagaaacacac

SEQ ID NO: 16055 - RNA, 23 nt, Artificial Sequence
  Synthetic oligonucleotide: PDCD1-3932
auugucccugcagagaaacacac

SEQ ID NO: 16056 - RNA, 24 nt, Artificial Sequence
  Synthetic oligonucleotide: PDCD1-3933
uauugucccugcagagaaacacac

SEQ ID NO: 16057 - RNA, 18 nt, Artificial Sequence
  Synthetic oligonucleotide: PDCD1-3934
ggggucuucucucgccac

SEQ ID NO: 16058 - RNA, 19 nt, Artificial Sequence
  Synthetic oligonucleotide: PDCD1-3935
cggggucuucucucgccac

SEQ ID NO: 16059 - RNA, 20 nt, Artificial Sequence
  Synthetic oligonucleotide: PDCD1-408
ccggggucuucucucgccac

SEQ ID NO: 16060 - RNA, 21 nt, Artificial Sequence
  Synthetic oligonucleotide: PDCD1-3936
uccggggucuucucucgccac

SEQ ID NO: 16061 - RNA, 22 nt, Artificial Sequence
  Synthetic oligonucleotide: PDCD1-3937
cuccggggucuucucucgccac

SEQ ID NO: 16062 - RNA, 23 nt, Artificial Sequence
  Synthetic oligonucleotide: PDCD1-3938
gcuccggggucuucucucgccac

SEQ ID NO: 16063 - RNA, 24 nt, Artificial Sequence
  Synthetic oligonucleotide: PDCD1-3939
ggcuccggggucuucucucgccac

SEQ ID NO: 16064 - RNA, 18 nt, Artificial Sequence
  Synthetic oligonucleotide: PDCD1-3940
cucagggacacagggcac

SEQ ID NO: 16065 - RNA, 19 nt, Artificial Sequence
  Synthetic oligonucleotide: PDCD1-3941
gcucagggacacagggcac

SEQ ID NO: 16066 - RNA, 20 nt, Artificial Sequence
  Synthetic oligonucleotide: PDCD1-415
ugcucagggacacagggcac

SEQ ID NO: 16067 - RNA, 21 nt, Artificial Sequence
  Synthetic oligonucleotide: PDCD1-3942
cugcucagggacacagggcac

SEQ ID NO: 16068 - RNA, 22 nt, Artificial Sequence
  Synthetic oligonucleotide: PDCD1-3943
ucugcucagggacacagggcac

SEQ ID NO: 16069 - RNA, 23 nt, Artificial Sequence
  Synthetic oligonucleotide: PDCD1-3944
gucugcucagggacacagggcac

SEQ ID NO: 16070 - RNA, 24 nt, Artificial Sequence
  Synthetic oligonucleotide: PDCD1-3945
cgucugcucagggacacagggcac

SEQ ID NO: 16071 - RNA, 18 nt, Artificial Sequence
  Synthetic oligonucleotide: PDCD1-3946
gaaaagagugagacucac

SEQ ID NO: 16072 - RNA, 19 nt, Artificial Sequence
  Synthetic oligonucleotide: PDCD1-3947
ggaaaagagugagacucac

SEQ ID NO: 16073 - RNA, 20 nt, Artificial Sequence
  Synthetic oligonucleotide: PDCD1-834
aggaaaagagugagacucac

SEQ ID NO: 16074 - RNA, 21 nt, Artificial Sequence
  Synthetic oligonucleotide: PDCD1-3948
caggaaaagagugagacucac

SEQ ID NO: 16075 - RNA, 22 nt, Artificial Sequence
  Synthetic oligonucleotide: PDCD1-3949
gcaggaaaagagugagacucac

SEQ ID NO: 16076 - RNA, 23 nt, Artificial Sequence
  Synthetic oligonucleotide: PDCD1-3950
ugcaggaaaagagugagacucac

SEQ ID NO: 16077 - RNA, 24 nt, Artificial Sequence
  Synthetic oligonucleotide: PDCD1-3951
augcaggaaaagagugagacucac

SEQ ID NO: 16078 - RNA, 18 nt, Artificial Sequence
  Synthetic oligonucleotide: PDCD1-3952
aaaagagugagacucacc

SEQ ID NO: 16079 - RNA, 19 nt, Artificial Sequence
  Synthetic oligonucleotide: PDCD1-3953
gaaaagagugagacucacc

SEQ ID NO: 16080 - RNA, 20 nt, Artificial Sequence
  Synthetic oligonucleotide: PDCD1-397
ggaaaagagugagacucacc

SEQ ID NO: 16081 - RNA, 21 nt, Artificial Sequence
  Synthetic oligonucleotide: PDCD1-3954
aggaaaagagugagacucacc

SEQ ID NO: 16082 - RNA, 22 nt, Artificial Sequence
  Synthetic oligonucleotide: PDCD1-3955
caggaaaagagugagacucacc

SEQ ID NO: 16083 - RNA, 23 nt, Artificial Sequence
  Synthetic oligonucleotide: PDCD1-3956
gcaggaaaagagugagacucacc

SEQ ID NO: 16084 - RNA, 24 nt, Artificial Sequence
  Synthetic oligonucleotide: PDCD1-3957
ugcaggaaaagagugagacucacc

SEQ ID NO: 16085 - RNA, 18 nt, Artificial Sequence
  Synthetic oligonucleotide: PDCD1-3958
cguuaccucgugcggccc

SEQ ID NO: 16086 - RNA, 19 nt, Artificial Sequence
  Synthetic oligonucleotide: PDCD1-3959
acguuaccucgugcggccc

SEQ ID NO: 16087 - RNA, 20 nt, Artificial Sequence
  Synthetic oligonucleotide: PDCD1-385
gacguuaccucgugcggccc

SEQ ID NO: 16088 - RNA, 21 nt, Artificial Sequence
  Synthetic oligonucleotide: PDCD1-3960
ugacguuaccucgugcggccc

SEQ ID NO: 16089 - RNA, 22 nt, Artificial Sequence
  Synthetic oligonucleotide: PDCD1-3961
augacguuaccucgugcggccc

SEQ ID NO: 16090 - RNA, 23 nt, Artificial Sequence
  Synthetic oligonucleotide: PDCD1-3962
gaugacguuaccucgugcggccc

SEQ ID NO: 16091 - RNA, 24 nt, Artificial Sequence
  Synthetic oligonucleotide: PDCD1-3963
ggaugacguuaccucgugcggccc

SEQ ID NO: 16092 - RNA, 18 nt, Artificial Sequence
  Synthetic oligonucleotide: PDCD1-3964
acguuaccucgugcggcc

SEQ ID NO: 16093 - RNA, 19 nt, Artificial Sequence
  Synthetic oligonucleotide: PDCD1-3965
gacguuaccucgugcggcc

SEQ ID NO: 16094 - RNA, 20 nt, Artificial Sequence
  Synthetic oligonucleotide: PDCD1-386
ugacguuaccucgugcggcc

SEQ ID NO: 16095 - RNA, 21 nt, Artificial Sequence
  Synthetic oligonucleotide: PDCD1-3966
augacguuaccucgugcggcc

SEQ ID NO: 16096 - RNA, 22 nt, Artificial Sequence
  Synthetic oligonucleotide: PDCD1-3967
gaugacguuaccucgugcggcc

SEQ ID NO: 16097 - RNA, 23 nt, Artificial Sequence
  Synthetic oligonucleotide: PDCD1-3968
ggaugacguuaccucgugcggcc

SEQ ID NO: 16098 - RNA, 24 nt, Artificial Sequence
  Synthetic oligonucleotide: PDCD1-3969
gggaugacguuaccucgugcggcc

SEQ ID NO: 16099 - RNA, 18 nt, Artificial Sequence
  Synthetic oligonucleotide: PDCD1-3970
aagccggucagaggggcc

SEQ ID NO: 16100 - RNA, 19 nt, Artificial Sequence
  Synthetic oligonucleotide: PDCD1-3971
gaagccggucagaggggcc

SEQ ID NO: 16101 - RNA, 20 nt, Artificial Sequence
  Synthetic oligonucleotide: PDCD1-874
ggaagccggucagaggggcc

SEQ ID NO: 16102 - RNA, 21 nt, Artificial Sequence
  Synthetic oligonucleotide: PDCD1-3972
aggaagccggucagaggggcc

SEQ ID NO: 16103 - RNA, 22 nt, Artificial Sequence
  Synthetic oligonucleotide: PDCD1-3973
aaggaagccggucagaggggcc

SEQ ID NO: 16104 - RNA, 23 nt, Artificial Sequence
  Synthetic oligonucleotide: PDCD1-3974
caaggaagccggucagaggggcc

SEQ ID NO: 16105 - RNA, 24 nt, Artificial Sequence
  Synthetic oligonucleotide: PDCD1-3975
ccaaggaagccggucagaggggcc

SEQ ID NO: 16106 - RNA, 18 nt, Artificial Sequence
  Synthetic oligonucleotide: PDCD1-3976
ucaguggcugggcacucc

SEQ ID NO: 16107 - RNA, 19 nt, Artificial Sequence
  Synthetic oligonucleotide: PDCD1-3977
cucaguggcugggcacucc

SEQ ID NO: 16108 - RNA, 20 nt, Artificial Sequence
  Synthetic oligonucleotide: PDCD1-871
ccucaguggcugggcacucc

SEQ ID NO: 16109 - RNA, 21 nt, Artificial Sequence
  Synthetic oligonucleotide: PDCD1-3978
gccucaguggcugggcacucc

SEQ ID NO: 16110 - RNA, 22 nt, Artificial Sequence
  Synthetic oligonucleotide: PDCD1-3979
ggccucaguggcugggcacucc

SEQ ID NO: 16111 - RNA, 23 nt, Artificial Sequence
  Synthetic oligonucleotide: PDCD1-3980
aggccucaguggcugggcacucc

SEQ ID NO: 16112 - RNA, 24 nt, Artificial Sequence
  Synthetic oligonucleotide: PDCD1-3981
caggccucaguggcugggcacucc

SEQ ID NO: 16113 - RNA, 18 nt, Artificial Sequence
  Synthetic oligonucleotide: PDCD1-3982
augaggugcccauuccgc

SEQ ID NO: 16114 - RNA, 19 nt, Artificial Sequence
  Synthetic oligonucleotide: PDCD1-3983
gaugaggugcccauuccgc

SEQ ID NO: 16115 - RNA, 20 nt, Artificial Sequence
  Synthetic oligonucleotide: PDCD1-863
ggaugaggugcccauuccgc

SEQ ID NO: 16116 - RNA, 21 nt, Artificial Sequence
  Synthetic oligonucleotide: PDCD1-3984
gggaugaggugcccauuccgc

SEQ ID NO: 16117 - RNA, 22 nt, Artificial Sequence
  Synthetic oligonucleotide: PDCD1-3985
ggggaugaggugcccauuccgc

SEQ ID NO: 16118 - RNA, 23 nt, Artificial Sequence
  Synthetic oligonucleotide: PDCD1-3986
gggggaugaggugcccauuccgc

SEQ ID NO: 16119 - RNA, 24 nt, Artificial Sequence
  Synthetic oligonucleotide: PDCD1-3987
cgggggaugaggugcccauuccgc

SEQ ID NO: 16120 - RNA, 18 nt, Artificial Sequence
  Synthetic oligonucleotide: PDCD1-3988
ccgggagcagaugacggc

SEQ ID NO: 16121 - RNA, 19 nt, Artificial Sequence
  Synthetic oligonucleotide: PDCD1-3989
cccgggagcagaugacggc

SEQ ID NO: 16122 - RNA, 20 nt, Artificial Sequence
  Synthetic oligonucleotide: PDCD1-825
gcccgggagcagaugacggc

SEQ ID NO: 16123 - RNA, 21 nt, Artificial Sequence
  Synthetic oligonucleotide: PDCD1-3990
ggcccgggagcagaugacggc

SEQ ID NO: 16124 - RNA, 22 nt, Artificial Sequence
  Synthetic oligonucleotide: PDCD1-3991
cggcccgggagcagaugacggc

SEQ ID NO: 16125 - RNA, 23 nt, Artificial Sequence
  Synthetic oligonucleotide: PDCD1-3992
gcggcccgggagcagaugacggc

SEQ ID NO: 16126 - RNA, 24 nt, Artificial Sequence
  Synthetic oligonucleotide: PDCD1-3993
ugcggcccgggagcagaugacggc

SEQ ID NO: 16127 - RNA, 18 nt, Artificial Sequence
  Synthetic oligonucleotide: PDCD1-3994
gacguuaccucgugcggc

SEQ ID NO: 16128 - RNA, 19 nt, Artificial Sequence
  Synthetic oligonucleotide: PDCD1-3995
ugacguuaccucgugcggc

SEQ ID NO: 16129 - RNA, 20 nt, Artificial Sequence
  Synthetic oligonucleotide: PDCD1-828
augacguuaccucgugcggc

SEQ ID NO: 16130 - RNA, 21 nt, Artificial Sequence
  Synthetic oligonucleotide: PDCD1-3996
gaugacguuaccucgugcggc

SEQ ID NO: 16131 - RNA, 22 nt, Artificial Sequence
  Synthetic oligonucleotide: PDCD1-3997
ggaugacguuaccucgugcggc

SEQ ID NO: 16132 - RNA, 23 nt, Artificial Sequence
  Synthetic oligonucleotide: PDCD1-3998
gggaugacguuaccucgugcggc

SEQ ID NO: 16133 - RNA, 24 nt, Artificial Sequence
  Synthetic oligonucleotide: PDCD1-3999
ugggaugacguuaccucgugcggc

SEQ ID NO: 16134 - RNA, 18 nt, Artificial Sequence
  Synthetic oligonucleotide: PDCD1-4000
ugcucagggacacagggc

SEQ ID NO: 16135 - RNA, 19 nt, Artificial Sequence
  Synthetic oligonucleotide: PDCD1-4001
cugcucagggacacagggc

SEQ ID NO: 16136 - RNA, 20 nt, Artificial Sequence
  Synthetic oligonucleotide: PDCD1-858
ucugcucagggacacagggc

SEQ ID NO: 16137 - RNA, 21 nt, Artificial Sequence
  Synthetic oligonucleotide: PDCD1-4002
gucugcucagggacacagggc

SEQ ID NO: 16138 - RNA, 22 nt, Artificial Sequence
  Synthetic oligonucleotide: PDCD1-4003
cgucugcucagggacacagggc

SEQ ID NO: 16139 - RNA, 23 nt, Artificial Sequence
  Synthetic oligonucleotide: PDCD1-4004
ccgucugcucagggacacagggc

SEQ ID NO: 16140 - RNA, 24 nt, Artificial Sequence
  Synthetic oligonucleotide: PDCD1-4005
uccgucugcucagggacacagggc

SEQ ID NO: 16141 - RNA, 18 nt, Artificial Sequence
  Synthetic oligonucleotide: PDCD1-4006
agcugagccccugcgggc

SEQ ID NO: 16142 - RNA, 19 nt, Artificial Sequence
  Synthetic oligonucleotide: PDCD1-4007
cagcugagccccugcgggc

SEQ ID NO: 16143 - RNA, 20 nt, Artificial Sequence
  Synthetic oligonucleotide: PDCD1-427
ucagcugagccccugcgggc

SEQ ID NO: 16144 - RNA, 21 nt, Artificial Sequence
  Synthetic oligonucleotide: PDCD1-4008
gucagcugagccccugcgggc

SEQ ID NO: 16145 - RNA, 22 nt, Artificial Sequence
  Synthetic oligonucleotide: PDCD1-4009
cgucagcugagccccugcgggc

SEQ ID NO: 16146 - RNA, 23 nt, Artificial Sequence
  Synthetic oligonucleotide: PDCD1-4010
ccgucagcugagccccugcgggc

SEQ ID NO: 16147 - RNA, 24 nt, Artificial Sequence
  Synthetic oligonucleotide: PDCD1-4011
gccgucagcugagccccugcgggc

SEQ ID NO: 16148 - RNA, 18 nt, Artificial Sequence
  Synthetic oligonucleotide: PDCD1-4012
ggcauacuccgucugcuc

SEQ ID NO: 16149 - RNA, 19 nt, Artificial Sequence
  Synthetic oligonucleotide: PDCD1-4013
uggcauacuccgucugcuc

SEQ ID NO: 16150 - RNA, 20 nt, Artificial Sequence
  Synthetic oligonucleotide: PDCD1-420
guggcauacuccgucugcuc

SEQ ID NO: 16151 - RNA, 21 nt, Artificial Sequence
  Synthetic oligonucleotide: PDCD1-4014
gguggcauacuccgucugcuc

SEQ ID NO: 16152 - RNA, 22 nt, Artificial Sequence
  Synthetic oligonucleotide: PDCD1-4015
ugguggcauacuccgucugcuc

SEQ ID NO: 16153 - RNA, 23 nt, Artificial Sequence
  Synthetic oligonucleotide: PDCD1-4016
augguggcauacuccgucugcuc

SEQ ID NO: 16154 - RNA, 24 nt, Artificial Sequence
  Synthetic oligonucleotide: PDCD1-4017
aaugguggcauacuccgucugcuc

SEQ ID NO: 16155 - RNA, 18 nt, Artificial Sequence
  Synthetic oligonucleotide: PDCD1-4018
cacuucugcccuucucuc

SEQ ID NO: 16156 - RNA, 19 nt, Artificial Sequence
  Synthetic oligonucleotide: PDCD1-4019
gcacuucugcccuucucuc

SEQ ID NO: 16157 - RNA, 20 nt, Artificial Sequence
  Synthetic oligonucleotide: PDCD1-362
ggcacuucugcccuucucuc

SEQ ID NO: 16158 - RNA, 21 nt, Artificial Sequence
  Synthetic oligonucleotide: PDCD1-4020
gggcacuucugcccuucucuc

SEQ ID NO: 16159 - RNA, 22 nt, Artificial Sequence
  Synthetic oligonucleotide: PDCD1-4021
ugggcacuucugcccuucucuc

SEQ ID NO: 16160 - RNA, 23 nt, Artificial Sequence
  Synthetic oligonucleotide: PDCD1-4022
gugggcacuucugcccuucucuc

SEQ ID NO: 16161 - RNA, 24 nt, Artificial Sequence
  Synthetic oligonucleotide: PDCD1-4023
ugugggcacuucugcccuucucuc

SEQ ID NO: 16162 - RNA, 18 nt, Artificial Sequence
  Synthetic oligonucleotide: PDCD1-4024
cacuccgagggccgucag

SEQ ID NO: 16163 - RNA, 19 nt, Artificial Sequence
  Synthetic oligonucleotide: PDCD1-4025
gcacuccgagggccgucag

SEQ ID NO: 16164 - RNA, 20 nt, Artificial Sequence
  Synthetic oligonucleotide: PDCD1-870
ggcacuccgagggccgucag

SEQ ID NO: 16165 - RNA, 21 nt, Artificial Sequence
  Synthetic oligonucleotide: PDCD1-4026
gggcacuccgagggccgucag

SEQ ID NO: 16166 - RNA, 22 nt, Artificial Sequence
  Synthetic oligonucleotide: PDCD1-4027
ugggcacuccgagggccgucag

SEQ ID NO: 16167 - RNA, 23 nt, Artificial Sequence
  Synthetic oligonucleotide: PDCD1-4028
cugggcacuccgagggccgucag

SEQ ID NO: 16168 - RNA, 24 nt, Artificial Sequence
  Synthetic oligonucleotide: PDCD1-4029
gcugggcacuccgagggccgucag

SEQ ID NO: 16169 - RNA, 18 nt, Artificial Sequence
  Synthetic oligonucleotide: PDCD1-4030
gccaaggaagccggucag

SEQ ID NO: 16170 - RNA, 19 nt, Artificial Sequence
  Synthetic oligonucleotide: PDCD1-4031
ggccaaggaagccggucag

SEQ ID NO: 16171 - RNA, 20 nt, Artificial Sequence
  Synthetic oligonucleotide: PDCD1-439
uggccaaggaagccggucag

SEQ ID NO: 16172 - RNA, 21 nt, Artificial Sequence
  Synthetic oligonucleotide: PDCD1-4032
guggccaaggaagccggucag

SEQ ID NO: 16173 - RNA, 22 nt, Artificial Sequence
  Synthetic oligonucleotide: PDCD1-4033
gguggccaaggaagccggucag

SEQ ID NO: 16174 - RNA, 23 nt, Artificial Sequence
  Synthetic oligonucleotide: PDCD1-4034
ugguggccaaggaagccggucag

SEQ ID NO: 16175 - RNA, 24 nt, Artificial Sequence
  Synthetic oligonucleotide: PDCD1-4035
cugguggccaaggaagccggucag

SEQ ID NO: 16176 - RNA, 18 nt, Artificial Sequence
  Synthetic oligonucleotide: PDCD1-4036
cuuugaggagaaagggag

SEQ ID NO: 16177 - RNA, 19 nt, Artificial Sequence
  Synthetic oligonucleotide: PDCD1-4037
ucuuugaggagaaagggag

SEQ ID NO: 16178 - RNA, 20 nt, Artificial Sequence
  Synthetic oligonucleotide: PDCD1-399
uucuuugaggagaaagggag

SEQ ID NO: 16179 - RNA, 21 nt, Artificial Sequence
  Synthetic oligonucleotide: PDCD1-4038
cuucuuugaggagaaagggag

SEQ ID NO: 16180 - RNA, 22 nt, Artificial Sequence
  Synthetic oligonucleotide: PDCD1-4039
ccuucuuugaggagaaagggag

SEQ ID NO: 16181 - RNA, 23 nt, Artificial Sequence
  Synthetic oligonucleotide: PDCD1-4040
uccuucuuugaggagaaagggag

SEQ ID NO: 16182 - RNA, 24 nt, Artificial Sequence
  Synthetic oligonucleotide: PDCD1-4041
cuccuucuuugaggagaaagggag

SEQ ID NO: 16183 - RNA, 18 nt, Artificial Sequence
  Synthetic oligonucleotide: PDCD1-4042
ggguccuccuucuuugag

SEQ ID NO: 16184 - RNA, 19 nt, Artificial Sequence
  Synthetic oligonucleotide: PDCD1-4043
gggguccuccuucuuugag

SEQ ID NO: 16185 - RNA, 20 nt, Artificial Sequence
  Synthetic oligonucleotide: PDCD1-842
agggguccuccuucuuugag

SEQ ID NO: 16186 - RNA, 21 nt, Artificial Sequence
  Synthetic oligonucleotide: PDCD1-4044
gagggguccuccuucuuugag

SEQ ID NO: 16187 - RNA, 22 nt, Artificial Sequence
  Synthetic oligonucleotide: PDCD1-4045
ugagggguccuccuucuuugag

SEQ ID NO: 16188 - RNA, 23 nt, Artificial Sequence
  Synthetic oligonucleotide: PDCD1-4046
cugagggguccuccuucuuugag

SEQ ID NO: 16189 - RNA, 24 nt, Artificial Sequence
  Synthetic oligonucleotide: PDCD1-4047
gcugagggguccuccuucuuugag

SEQ ID NO: 16190 - RNA, 18 nt, Artificial Sequence
  Synthetic oligonucleotide: PDCD1-4048
ucagggacacagggcacg

SEQ ID NO: 16191 - RNA, 19 nt, Artificial Sequence
  Synthetic oligonucleotide: PDCD1-4049
cucagggacacagggcacg

SEQ ID NO: 16192 - RNA, 20 nt, Artificial Sequence
  Synthetic oligonucleotide: PDCD1-414
gcucagggacacagggcacg

SEQ ID NO: 16193 - RNA, 21 nt, Artificial Sequence
  Synthetic oligonucleotide: PDCD1-4050
ugcucagggacacagggcacg

SEQ ID NO: 16194 - RNA, 22 nt, Artificial Sequence
  Synthetic oligonucleotide: PDCD1-4051
cugcucagggacacagggcacg

SEQ ID NO: 16195 - RNA, 23 nt, Artificial Sequence
  Synthetic oligonucleotide: PDCD1-4052
ucugcucagggacacagggcacg

SEQ ID NO: 16196 - RNA, 24 nt, Artificial Sequence
  Synthetic oligonucleotide: PDCD1-4053
gucugcucagggacacagggcacg

SEQ ID NO: 16197 - RNA, 18 nt, Artificial Sequence
  Synthetic oligonucleotide: PDCD1-4054
cuucuuugaggagaaagg

SEQ ID NO: 16198 - RNA, 19 nt, Artificial Sequence
  Synthetic oligonucleotide: PDCD1-4055
ccuucuuugaggagaaagg

SEQ ID NO: 16199 - RNA, 20 nt, Artificial Sequence
  Synthetic oligonucleotide: PDCD1-838
uccuucuuugaggagaaagg

SEQ ID NO: 16200 - RNA, 21 nt, Artificial Sequence
  Synthetic oligonucleotide: PDCD1-4056
cuccuucuuugaggagaaagg

SEQ ID NO: 16201 - RNA, 22 nt, Artificial Sequence
  Synthetic oligonucleotide: PDCD1-4057
ccuccuucuuugaggagaaagg

SEQ ID NO: 16202 - RNA, 23 nt, Artificial Sequence
  Synthetic oligonucleotide: PDCD1-4058
uccuccuucuuugaggagaaagg

SEQ ID NO: 16203 - RNA, 24 nt, Artificial Sequence
  Synthetic oligonucleotide: PDCD1-4059
guccuccuucuuugaggagaaagg

SEQ ID NO: 16204 - RNA, 18 nt, Artificial Sequence
  Synthetic oligonucleotide: PDCD1-4060
cagagaacacaggcacgg

SEQ ID NO: 16205 - RNA, 19 nt, Artificial Sequence
  Synthetic oligonucleotide: PDCD1-4061
acagagaacacaggcacgg

SEQ ID NO: 16206 - RNA, 20 nt, Artificial Sequence
  Synthetic oligonucleotide: PDCD1-848
cacagagaacacaggcacgg

SEQ ID NO: 16207 - RNA, 21 nt, Artificial Sequence
  Synthetic oligonucleotide: PDCD1-4062
ccacagagaacacaggcacgg

SEQ ID NO: 16208 - RNA, 22 nt, Artificial Sequence
  Synthetic oligonucleotide: PDCD1-4063
uccacagagaacacaggcacgg

SEQ ID NO: 16209 - RNA, 23 nt, Artificial Sequence
  Synthetic oligonucleotide: PDCD1-4064
guccacagagaacacaggcacgg

SEQ ID NO: 16210 - RNA, 24 nt, Artificial Sequence
  Synthetic oligonucleotide: PDCD1-4065
aguccacagagaacacaggcacgg

SEQ ID NO: 16211 - RNA, 18 nt, Artificial Sequence
  Synthetic oligonucleotide: PDCD1-4066
ucagcugagccccugcgg

SEQ ID NO: 16212 - RNA, 19 nt, Artificial Sequence
  Synthetic oligonucleotide: PDCD1-4067
gucagcugagccccugcgg

SEQ ID NO: 16213 - RNA, 20 nt, Artificial Sequence
  Synthetic oligonucleotide: PDCD1-868
cgucagcugagccccugcgg

SEQ ID NO: 16214 - RNA, 21 nt, Artificial Sequence
  Synthetic oligonucleotide: PDCD1-4068
ccgucagcugagccccugcgg

SEQ ID NO: 16215 - RNA, 22 nt, Artificial Sequence
  Synthetic oligonucleotide: PDCD1-4069
gccgucagcugagccccugcgg

SEQ ID NO: 16216 - RNA, 23 nt, Artificial Sequence
  Synthetic oligonucleotide: PDCD1-4070
ggccgucagcugagccccugcgg

SEQ ID NO: 16217 - RNA, 24 nt, Artificial Sequence
  Synthetic oligonucleotide: PDCD1-4071
gggccgucagcugagccccugcgg

SEQ ID NO: 16218 - RNA, 18 nt, Artificial Sequence
  Synthetic oligonucleotide: PDCD1-4072
cagcugagccccugcggg

SEQ ID NO: 16219 - RNA, 19 nt, Artificial Sequence
  Synthetic oligonucleotide: PDCD1-4073
ucagcugagccccugcggg

SEQ ID NO: 16220 - RNA, 20 nt, Artificial Sequence
  Synthetic oligonucleotide: PDCD1-428
gucagcugagccccugcggg

SEQ ID NO: 16221 - RNA, 21 nt, Artificial Sequence
  Synthetic oligonucleotide: PDCD1-4074
cgucagcugagccccugcggg

SEQ ID NO: 16222 - RNA, 22 nt, Artificial Sequence
  Synthetic oligonucleotide: PDCD1-4075
ccgucagcugagccccugcggg

SEQ ID NO: 16223 - RNA, 23 nt, Artificial Sequence
  Synthetic oligonucleotide: PDCD1-4076
gccgucagcugagccccugcggg

SEQ ID NO: 16224 - RNA, 24 nt, Artificial Sequence
  Synthetic oligonucleotide: PDCD1-4077
ggccgucagcugagccccugcggg

SEQ ID NO: 16225 - RNA, 18 nt, Artificial Sequence
  Synthetic oligonucleotide: PDCD1-4078
gcuggccugggugagggg

SEQ ID NO: 16226 - RNA, 19 nt, Artificial Sequence
  Synthetic oligonucleotide: PDCD1-4079
ggcuggccugggugagggg

SEQ ID NO: 16227 - RNA, 20 nt, Artificial Sequence
  Synthetic oligonucleotide: PDCD1-817
cggcuggccugggugagggg

SEQ ID NO: 16228 - RNA, 21 nt, Artificial Sequence
  Synthetic oligonucleotide: PDCD1-4080
ccggcuggccugggugagggg

SEQ ID NO: 16229 - RNA, 22 nt, Artificial Sequence
  Synthetic oligonucleotide: PDCD1-4081
gccggcuggccugggugagggg

SEQ ID NO: 16230 - RNA, 23 nt, Artificial Sequence
  Synthetic oligonucleotide: PDCD1-4082
ggccggcuggccugggugagggg

SEQ ID NO: 16231 - RNA, 24 nt, Artificial Sequence
  Synthetic oligonucleotide: PDCD1-4083
uggccggcuggccugggugagggg

SEQ ID NO: 16232 - RNA, 18 nt, Artificial Sequence
  Synthetic oligonucleotide: PDCD1-4084
agccccugcgggcggggg

SEQ ID NO: 16233 - RNA, 19 nt, Artificial Sequence
  Synthetic oligonucleotide: PDCD1-4085
gagccccugcgggcggggg

SEQ ID NO: 16234 - RNA, 20 nt, Artificial Sequence
  Synthetic oligonucleotide: PDCD1-864
ugagccccugcgggcggggg

SEQ ID NO: 16235 - RNA, 21 nt, Artificial Sequence
  Synthetic oligonucleotide: PDCD1-4086
cugagccccugcgggcggggg

SEQ ID NO: 16236 - RNA, 22 nt, Artificial Sequence
  Synthetic oligonucleotide: PDCD1-4087
gcugagccccugcgggcggggg

SEQ ID NO: 16237 - RNA, 23 nt, Artificial Sequence
  Synthetic oligonucleotide: PDCD1-4088
agcugagccccugcgggcggggg

SEQ ID NO: 16238 - RNA, 24 nt, Artificial Sequence
  Synthetic oligonucleotide: PDCD1-4089
cagcugagccccugcgggcggggg

SEQ ID NO: 16239 - RNA, 18 nt, Artificial Sequence
  Synthetic oligonucleotide: PDCD1-4090
ccugggugaggggcuggg

SEQ ID NO: 16240 - RNA, 19 nt, Artificial Sequence
  Synthetic oligonucleotide: PDCD1-4091
gccugggugaggggcuggg

SEQ ID NO: 16241 - RNA, 20 nt, Artificial Sequence
  Synthetic oligonucleotide: PDCD1-815
ggccugggugaggggcuggg

SEQ ID NO: 16242 - RNA, 21 nt, Artificial Sequence
  Synthetic oligonucleotide: PDCD1-4092
uggccugggugaggggcuggg

SEQ ID NO: 16243 - RNA, 22 nt, Artificial Sequence
  Synthetic oligonucleotide: PDCD1-4093
cuggccugggugaggggcuggg

SEQ ID NO: 16244 - RNA, 23 nt, Artificial Sequence
  Synthetic oligonucleotide: PDCD1-4094
gcuggccugggugaggggcuggg

SEQ ID NO: 16245 - RNA, 24 nt, Artificial Sequence
  Synthetic oligonucleotide: PDCD1-4095
ggcuggccugggugaggggcuggg

SEQ ID NO: 16246 - RNA, 18 nt, Artificial Sequence
  Synthetic oligonucleotide: PDCD1-4096
acuggccggcuggccugg

SEQ ID NO: 16247 - RNA, 19 nt, Artificial Sequence
  Synthetic oligonucleotide: PDCD1-4097
aacuggccggcuggccugg

SEQ ID NO: 16248 - RNA, 20 nt, Artificial Sequence
  Synthetic oligonucleotide: PDCD1-820
gaacuggccggcuggccugg

SEQ ID NO: 16249 - RNA, 21 nt, Artificial Sequence
  Synthetic oligonucleotide: PDCD1-4098
ggaacuggccggcuggccugg

SEQ ID NO: 16250 - RNA, 22 nt, Artificial Sequence
  Synthetic oligonucleotide: PDCD1-4099
uggaacuggccggcuggccugg

SEQ ID NO: 16251 - RNA, 23 nt, Artificial Sequence
  Synthetic oligonucleotide: PDCD1-4100
uuggaacuggccggcuggccugg

SEQ ID NO: 16252 - RNA, 24 nt, Artificial Sequence
  Synthetic oligonucleotide: PDCD1-4101
uuuggaacuggccggcuggccugg

SEQ ID NO: 16253 - RNA, 18 nt, Artificial Sequence
  Synthetic oligonucleotide: PDCD1-4102
uucugcccuucucucugg

SEQ ID NO: 16254 - RNA, 19 nt, Artificial Sequence
  Synthetic oligonucleotide: PDCD1-4103
cuucugcccuucucucugg

SEQ ID NO: 16255 - RNA, 20 nt, Artificial Sequence
  Synthetic oligonucleotide: PDCD1-811
acuucugcccuucucucugg

SEQ ID NO: 16256 - RNA, 21 nt, Artificial Sequence
  Synthetic oligonucleotide: PDCD1-4104
cacuucugcccuucucucugg

SEQ ID NO: 16257 - RNA, 22 nt, Artificial Sequence
  Synthetic oligonucleotide: PDCD1-4105
gcacuucugcccuucucucugg

SEQ ID NO: 16258 - RNA, 23 nt, Artificial Sequence
  Synthetic oligonucleotide: PDCD1-4106
ggcacuucugcccuucucucugg

SEQ ID NO: 16259 - RNA, 24 nt, Artificial Sequence
  Synthetic oligonucleotide: PDCD1-4107
gggcacuucugcccuucucucugg

SEQ ID NO: 16260 - RNA, 18 nt, Artificial Sequence
  Synthetic oligonucleotide: PDCD1-4108
auccucaggccucagugg

SEQ ID NO: 16261 - RNA, 19 nt, Artificial Sequence
  Synthetic oligonucleotide: PDCD1-4109
cauccucaggccucagugg

SEQ ID NO: 16262 - RNA, 20 nt, Artificial Sequence
  Synthetic oligonucleotide: PDCD1-873
ccauccucaggccucagugg

SEQ ID NO: 16263 - RNA, 21 nt, Artificial Sequence
  Synthetic oligonucleotide: PDCD1-4110
uccauccucaggccucagugg

SEQ ID NO: 16264 - RNA, 22 nt, Artificial Sequence
  Synthetic oligonucleotide: PDCD1-4111
guccauccucaggccucagugg

SEQ ID NO: 16265 - RNA, 23 nt, Artificial Sequence
  Synthetic oligonucleotide: PDCD1-4112
uguccauccucaggccucagugg

SEQ ID NO: 16266 - RNA, 24 nt, Artificial Sequence
  Synthetic oligonucleotide: PDCD1-4113
guguccauccucaggccucagugg

SEQ ID NO: 16267 - RNA, 18 nt, Artificial Sequence
  Synthetic oligonucleotide: PDCD1-4114
uggcuccuauugucccug

SEQ ID NO: 16268 - RNA, 19 nt, Artificial Sequence
  Synthetic oligonucleotide: PDCD1-4115
cuggcuccuauugucccug

SEQ ID NO: 16269 - RNA, 20 nt, Artificial Sequence
  Synthetic oligonucleotide: PDCD1-832
ccuggcuccuauugucccug

SEQ ID NO: 16270 - RNA, 21 nt, Artificial Sequence
  Synthetic oligonucleotide: PDCD1-4116
gccuggcuccuauugucccug

SEQ ID NO: 16271 - RNA, 22 nt, Artificial Sequence
  Synthetic oligonucleotide: PDCD1-4117
cgccuggcuccuauugucccug

SEQ ID NO: 16272 - RNA, 23 nt, Artificial Sequence
  Synthetic oligonucleotide: PDCD1-4118
gcgccuggcuccuauugucccug

SEQ ID NO: 16273 - RNA, 24 nt, Artificial Sequence
  Synthetic oligonucleotide: PDCD1-4119
ugcgccuggcuccuauugucccug

SEQ ID NO: 16274 - RNA, 18 nt, Artificial Sequence
  Synthetic oligonucleotide: PDCD1-4120
ggccggcuggccugggug

SEQ ID NO: 16275 - RNA, 19 nt, Artificial Sequence
  Synthetic oligonucleotide: PDCD1-4121
uggccggcuggccugggug

SEQ ID NO: 16276 - RNA, 20 nt, Artificial Sequence
  Synthetic oligonucleotide: PDCD1-372
cuggccggcuggccugggug

SEQ ID NO: 16277 - RNA, 21 nt, Artificial Sequence
  Synthetic oligonucleotide: PDCD1-4122
acuggccggcuggccugggug

SEQ ID NO: 16278 - RNA, 22 nt, Artificial Sequence
  Synthetic oligonucleotide: PDCD1-4123
aacuggccggcuggccugggug

SEQ ID NO: 16279 - RNA, 23 nt, Artificial Sequence
  Synthetic oligonucleotide: PDCD1-4124
gaacuggccggcuggccugggug

SEQ ID NO: 16280 - RNA, 24 nt, Artificial Sequence
  Synthetic oligonucleotide: PDCD1-4125
ggaacuggccggcuggccugggug

SEQ ID NO: 16281 - RNA, 18 nt, Artificial Sequence
  Synthetic oligonucleotide: PDCD1-4126
agggguccuccuucuuug

SEQ ID NO: 16282 - RNA, 19 nt, Artificial Sequence
  Synthetic oligonucleotide: PDCD1-4127
gagggguccuccuucuuug

SEQ ID NO: 16283 - RNA, 20 nt, Artificial Sequence
  Synthetic oligonucleotide: PDCD1-402
ugagggguccuccuucuuug

SEQ ID NO: 16284 - RNA, 21 nt, Artificial Sequence
  Synthetic oligonucleotide: PDCD1-4128
cugagggguccuccuucuuug

SEQ ID NO: 16285 - RNA, 22 nt, Artificial Sequence
  Synthetic oligonucleotide: PDCD1-4129
gcugagggguccuccuucuuug

SEQ ID NO: 16286 - RNA, 23 nt, Artificial Sequence
  Synthetic oligonucleotide: PDCD1-4130
ggcugagggguccuccuucuuug

SEQ ID NO: 16287 - RNA, 24 nt, Artificial Sequence
  Synthetic oligonucleotide: PDCD1-4131
cggcugagggguccuccuucuuug

SEQ ID NO: 16288 - RNA, 18 nt, Artificial Sequence
  Synthetic oligonucleotide: PDCD1-4132
ccucaguggcugggcacu

SEQ ID NO: 16289 - RNA, 19 nt, Artificial Sequence
  Synthetic oligonucleotide: PDCD1-4133
gccucaguggcugggcacu

SEQ ID NO: 16290 - RNA, 20 nt, Artificial Sequence
  Synthetic oligonucleotide: PDCD1-872
ggccucaguggcugggcacu

SEQ ID NO: 16291 - RNA, 21 nt, Artificial Sequence
  Synthetic oligonucleotide: PDCD1-4134
aggccucaguggcugggcacu

SEQ ID NO: 16292 - RNA, 22 nt, Artificial Sequence
  Synthetic oligonucleotide: PDCD1-4135
caggccucaguggcugggcacu

SEQ ID NO: 16293 - RNA, 23 nt, Artificial Sequence
  Synthetic oligonucleotide: PDCD1-4136
ucaggccucaguggcugggcacu

SEQ ID NO: 16294 - RNA, 24 nt, Artificial Sequence
  Synthetic oligonucleotide: PDCD1-4137
cucaggccucaguggcugggcacu

SEQ ID NO: 16295 - RNA, 18 nt, Artificial Sequence
  Synthetic oligonucleotide: PDCD1-4138
gccgucagcugagccccu

SEQ ID NO: 16296 - RNA, 19 nt, Artificial Sequence
  Synthetic oligonucleotide: PDCD1-4139
ggccgucagcugagccccu

SEQ ID NO: 16297 - RNA, 20 nt, Artificial Sequence
  Synthetic oligonucleotide: PDCD1-869
gggccgucagcugagccccu

SEQ ID NO: 16298 - RNA, 21 nt, Artificial Sequence
  Synthetic oligonucleotide: PDCD1-4140
agggccgucagcugagccccu

SEQ ID NO: 16299 - RNA, 22 nt, Artificial Sequence
  Synthetic oligonucleotide: PDCD1-4141
gagggccgucagcugagccccu

SEQ ID NO: 16300 - RNA, 23 nt, Artificial Sequence
  Synthetic oligonucleotide: PDCD1-4142
cgagggccgucagcugagccccu

SEQ ID NO: 16301 - RNA, 24 nt, Artificial Sequence
  Synthetic oligonucleotide: PDCD1-4143
ccgagggccgucagcugagccccu

SEQ ID NO: 16302 - RNA, 18 nt, Artificial Sequence
  Synthetic oligonucleotide: PDCD1-4144
ugaggugcccauuccgcu

SEQ ID NO: 16303 - RNA, 19 nt, Artificial Sequence
  Synthetic oligonucleotide: PDCD1-4145
augaggugcccauuccgcu

SEQ ID NO: 16304 - RNA, 20 nt, Artificial Sequence
  Synthetic oligonucleotide: PDCD1-423
gaugaggugcccauuccgcu

SEQ ID NO: 16305 - RNA, 21 nt, Artificial Sequence
  Synthetic oligonucleotide: PDCD1-4146
ggaugaggugcccauuccgcu

SEQ ID NO: 16306 - RNA, 22 nt, Artificial Sequence
  Synthetic oligonucleotide: PDCD1-4147
gggaugaggugcccauuccgcu

SEQ ID NO: 16307 - RNA, 23 nt, Artificial Sequence
  Synthetic oligonucleotide: PDCD1-4148
ggggaugaggugcccauuccgcu

SEQ ID NO: 16308 - RNA, 24 nt, Artificial Sequence
  Synthetic oligonucleotide: PDCD1-4149
gggggaugaggugcccauuccgcu

SEQ ID NO: 16309 - RNA, 18 nt, Artificial Sequence
  Synthetic oligonucleotide: PDCD1-4150
gagaacacaggcacggcu

SEQ ID NO: 16310 - RNA, 19 nt, Artificial Sequence
  Synthetic oligonucleotide: PDCD1-4151
agagaacacaggcacggcu

SEQ ID NO: 16311 - RNA, 20 nt, Artificial Sequence
  Synthetic oligonucleotide: PDCD1-847
cagagaacacaggcacggcu

SEQ ID NO: 16312 - RNA, 21 nt, Artificial Sequence
  Synthetic oligonucleotide: PDCD1-4152
acagagaacacaggcacggcu

SEQ ID NO: 16313 - RNA, 22 nt, Artificial Sequence
  Synthetic oligonucleotide: PDCD1-4153
cacagagaacacaggcacggcu

SEQ ID NO: 16314 - RNA, 23 nt, Artificial Sequence
  Synthetic oligonucleotide: PDCD1-4154
ccacagagaacacaggcacggcu

SEQ ID NO: 16315 - RNA, 24 nt, Artificial Sequence
  Synthetic oligonucleotide: PDCD1-4155
uccacagagaacacaggcacggcu

SEQ ID NO: 16316 - RNA, 18 nt, Artificial Sequence
  Synthetic oligonucleotide: PDCD1-4156
cacagggcacggggggcu

SEQ ID NO: 16317 - RNA, 19 nt, Artificial Sequence
  Synthetic oligonucleotide: PDCD1-4157
acacagggcacggggggcu

SEQ ID NO: 16318 - RNA, 20 nt, Artificial Sequence
  Synthetic oligonucleotide: PDCD1-854
gacacagggcacggggggcu

SEQ ID NO: 16319 - RNA, 21 nt, Artificial Sequence
  Synthetic oligonucleotide: PDCD1-4158
ggacacagggcacggggggcu

SEQ ID NO: 16320 - RNA, 22 nt, Artificial Sequence
  Synthetic oligonucleotide: PDCD1-4159
gggacacagggcacggggggcu

SEQ ID NO: 16321 - RNA, 23 nt, Artificial Sequence
  Synthetic oligonucleotide: PDCD1-4160
agggacacagggcacggggggcu

SEQ ID NO: 16322 - RNA, 24 nt, Artificial Sequence
  Synthetic oligonucleotide: PDCD1-4161
cagggacacagggcacggggggcu

SEQ ID NO: 16323 - RNA, 18 nt, Artificial Sequence
  Synthetic oligonucleotide: PDCD1-4162
gaggggcuggggugggcu

SEQ ID NO: 16324 - RNA, 19 nt, Artificial Sequence
  Synthetic oligonucleotide: PDCD1-4163
ugaggggcuggggugggcu

SEQ ID NO: 16325 - RNA, 20 nt, Artificial Sequence
  Synthetic oligonucleotide: PDCD1-814
gugaggggcuggggugggcu

SEQ ID NO: 16326 - RNA, 21 nt, Artificial Sequence
  Synthetic oligonucleotide: PDCD1-4164
ggugaggggcuggggugggcu

SEQ ID NO: 16327 - RNA, 22 nt, Artificial Sequence
  Synthetic oligonucleotide: PDCD1-4165
gggugaggggcuggggugggcu

SEQ ID NO: 16328 - RNA, 23 nt, Artificial Sequence
  Synthetic oligonucleotide: PDCD1-4166
ugggugaggggcuggggugggcu

SEQ ID NO: 16329 - RNA, 24 nt, Artificial Sequence
  Synthetic oligonucleotide: PDCD1-4167
cugggugaggggcuggggugggcu

SEQ ID NO: 16330 - RNA, 18 nt, Artificial Sequence
  Synthetic oligonucleotide: PDCD1-4168
uggcauacuccgucugcu

SEQ ID NO: 16331 - RNA, 19 nt, Artificial Sequence
  Synthetic oligonucleotide: PDCD1-4169
guggcauacuccgucugcu

SEQ ID NO: 16332 - RNA, 20 nt, Artificial Sequence
  Synthetic oligonucleotide: PDCD1-861
gguggcauacuccgucugcu

SEQ ID NO: 16333 - RNA, 21 nt, Artificial Sequence
  Synthetic oligonucleotide: PDCD1-4170
ugguggcauacuccgucugcu

SEQ ID NO: 16334 - RNA, 22 nt, Artificial Sequence
  Synthetic oligonucleotide: PDCD1-4171
augguggcauacuccgucugcu

SEQ ID NO: 16335 - RNA, 23 nt, Artificial Sequence
  Synthetic oligonucleotide: PDCD1-4172
aaugguggcauacuccgucugcu

SEQ ID NO: 16336 - RNA, 24 nt, Artificial Sequence
  Synthetic oligonucleotide: PDCD1-4173
caaugguggcauacuccgucugcu

SEQ ID NO: 16337 - RNA, 18 nt, Artificial Sequence
  Synthetic oligonucleotide: PDCD1-4174
gcacuucugcccuucucu

SEQ ID NO: 16338 - RNA, 19 nt, Artificial Sequence
  Synthetic oligonucleotide: PDCD1-4175
ggcacuucugcccuucucu

SEQ ID NO: 16339 - RNA, 20 nt, Artificial Sequence
  Synthetic oligonucleotide: PDCD1-813
gggcacuucugcccuucucu

SEQ ID NO: 16340 - RNA, 21 nt, Artificial Sequence
  Synthetic oligonucleotide: PDCD1-4176
ugggcacuucugcccuucucu

SEQ ID NO: 16341 - RNA, 22 nt, Artificial Sequence
  Synthetic oligonucleotide: PDCD1-4177
gugggcacuucugcccuucucu

SEQ ID NO: 16342 - RNA, 23 nt, Artificial Sequence
  Synthetic oligonucleotide: PDCD1-4178
ugugggcacuucugcccuucucu

SEQ ID NO: 16343 - RNA, 24 nt, Artificial Sequence
  Synthetic oligonucleotide: PDCD1-4179
cugugggcacuucugcccuucucu

SEQ ID NO: 16344 - RNA, 18 nt, Artificial Sequence
  Synthetic oligonucleotide: PDCD1-4180
cugagggguccuccuucu

SEQ ID NO: 16345 - RNA, 19 nt, Artificial Sequence
  Synthetic oligonucleotide: PDCD1-4181
gcugagggguccuccuucu

SEQ ID NO: 16346 - RNA, 20 nt, Artificial Sequence
  Synthetic oligonucleotide: PDCD1-845
ggcugagggguccuccuucu

SEQ ID NO: 16347 - RNA, 21 nt, Artificial Sequence
  Synthetic oligonucleotide: PDCD1-4182
cggcugagggguccuccuucu

SEQ ID NO: 16348 - RNA, 22 nt, Artificial Sequence
  Synthetic oligonucleotide: PDCD1-4183
acggcugagggguccuccuucu

SEQ ID NO: 16349 - RNA, 23 nt, Artificial Sequence
  Synthetic oligonucleotide: PDCD1-4184
cacggcugagggguccuccuucu

SEQ ID NO: 16350 - RNA, 24 nt, Artificial Sequence
  Synthetic oligonucleotide: PDCD1-4185
gcacggcugagggguccuccuucu

SEQ ID NO: 16351 - RNA, 18 nt, Artificial Sequence
  Synthetic oligonucleotide: PDCD1-4186
cuggaagggcacaaaggu

SEQ ID NO: 16352 - RNA, 19 nt, Artificial Sequence
  Synthetic oligonucleotide: PDCD1-4187
ucuggaagggcacaaaggu

SEQ ID NO: 16353 - RNA, 20 nt, Artificial Sequence
  Synthetic oligonucleotide: PDCD1-810
cucuggaagggcacaaaggu

SEQ ID NO: 16354 - RNA, 21 nt, Artificial Sequence
  Synthetic oligonucleotide: PDCD1-4188
ucucuggaagggcacaaaggu

SEQ ID NO: 16355 - RNA, 22 nt, Artificial Sequence
  Synthetic oligonucleotide: PDCD1-4189
cucucuggaagggcacaaaggu

SEQ ID NO: 16356 - RNA, 23 nt, Artificial Sequence
  Synthetic oligonucleotide: PDCD1-4190
ucucucuggaagggcacaaaggu

SEQ ID NO: 16357 - RNA, 24 nt, Artificial Sequence
  Synthetic oligonucleotide: PDCD1-4191
uucucucuggaagggcacaaaggu

SEQ ID NO: 16358 - RNA, 18 nt, Artificial Sequence
  Synthetic oligonucleotide: PDCD1-4192
guggccaaggaagccggu

SEQ ID NO: 16359 - RNA, 19 nt, Artificial Sequence
  Synthetic oligonucleotide: PDCD1-4193
gguggccaaggaagccggu

SEQ ID NO: 16360 - RNA, 20 nt, Artificial Sequence
  Synthetic oligonucleotide: PDCD1-877
ugguggccaaggaagccggu

SEQ ID NO: 16361 - RNA, 21 nt, Artificial Sequence
  Synthetic oligonucleotide: PDCD1-4194
cugguggccaaggaagccggu

SEQ ID NO: 16362 - RNA, 22 nt, Artificial Sequence
  Synthetic oligonucleotide: PDCD1-4195
acugguggccaaggaagccggu

SEQ ID NO: 16363 - RNA, 23 nt, Artificial Sequence
  Synthetic oligonucleotide: PDCD1-4196
cacugguggccaaggaagccggu

SEQ ID NO: 16364 - RNA, 24 nt, Artificial Sequence
  Synthetic oligonucleotide: PDCD1-4197
acacugguggccaaggaagccggu

SEQ ID NO: 16365 - RNA, 18 nt, Artificial Sequence
  Synthetic oligonucleotide: PDCD1-4198
gacaccaaccaccagggu

SEQ ID NO: 16366 - RNA, 19 nt, Artificial Sequence
  Synthetic oligonucleotide: PDCD1-4199
cgacaccaaccaccagggu

SEQ ID NO: 16367 - RNA, 20 nt, Artificial Sequence
  Synthetic oligonucleotide: PDCD1-823
acgacaccaaccaccagggu

SEQ ID NO: 16368 - RNA, 21 nt, Artificial Sequence
  Synthetic oligonucleotide: PDCD1-4200
cacgacaccaaccaccagggu

SEQ ID NO: 16369 - RNA, 22 nt, Artificial Sequence
  Synthetic oligonucleotide: PDCD1-4201
ccacgacaccaaccaccagggu

SEQ ID NO: 16370 - RNA, 23 nt, Artificial Sequence
  Synthetic oligonucleotide: PDCD1-4202
cccacgacaccaaccaccagggu

SEQ ID NO: 16371 - RNA, 24 nt, Artificial Sequence
  Synthetic oligonucleotide: PDCD1-4203
gcccacgacaccaaccaccagggu

SEQ ID NO: 16372 - RNA, 18 nt, Artificial Sequence
  Synthetic oligonucleotide: PDCD1-4204
ggcacaaaggucaggggu

SEQ ID NO: 16373 - RNA, 19 nt, Artificial Sequence
  Synthetic oligonucleotide: PDCD1-4205
gggcacaaaggucaggggu

SEQ ID NO: 16374 - RNA, 20 nt, Artificial Sequence
  Synthetic oligonucleotide: PDCD1-808
agggcacaaaggucaggggu

SEQ ID NO: 16375 - RNA, 21 nt, Artificial Sequence
  Synthetic oligonucleotide: PDCD1-4206
aagggcacaaaggucaggggu

SEQ ID NO: 16376 - RNA, 22 nt, Artificial Sequence
  Synthetic oligonucleotide: PDCD1-4207
gaagggcacaaaggucaggggu

SEQ ID NO: 16377 - RNA, 23 nt, Artificial Sequence
  Synthetic oligonucleotide: PDCD1-4208
ggaagggcacaaaggucaggggu

SEQ ID NO: 16378 - RNA, 24 nt, Artificial Sequence
  Synthetic oligonucleotide: PDCD1-4209
uggaagggcacaaaggucaggggu

SEQ ID NO: 16379 - RNA, 18 nt, Artificial Sequence
  Synthetic oligonucleotide: PDCD1-4210
uggccggcuggccugggu

SEQ ID NO: 16380 - RNA, 19 nt, Artificial Sequence
  Synthetic oligonucleotide: PDCD1-4211
cuggccggcuggccugggu

SEQ ID NO: 16381 - RNA, 20 nt, Artificial Sequence
  Synthetic oligonucleotide: PDCD1-819
acuggccggcuggccugggu

SEQ ID NO: 16382 - RNA, 21 nt, Artificial Sequence
  Synthetic oligonucleotide: PDCD1-4212
aacuggccggcuggccugggu

SEQ ID NO: 16383 - RNA, 22 nt, Artificial Sequence
  Synthetic oligonucleotide: PDCD1-4213
gaacuggccggcuggccugggu

SEQ ID NO: 16384 - RNA, 23 nt, Artificial Sequence
  Synthetic oligonucleotide: PDCD1-4214
ggaacuggccggcuggccugggu

SEQ ID NO: 16385 - RNA, 24 nt, Artificial Sequence
  Synthetic oligonucleotide: PDCD1-4215
uggaacuggccggcuggccugggu

SEQ ID NO: 16386 - RNA, 18 nt, Artificial Sequence
  Synthetic oligonucleotide: PDCD1-4216
acaccaaccaccaggguu

SEQ ID NO: 16387 - RNA, 19 nt, Artificial Sequence
  Synthetic oligonucleotide: PDCD1-4217
gacaccaaccaccaggguu

SEQ ID NO: 16388 - RNA, 20 nt, Artificial Sequence
  Synthetic oligonucleotide: PDCD1-378
cgacaccaaccaccaggguu

SEQ ID NO: 16389 - RNA, 21 nt, Artificial Sequence
  Synthetic oligonucleotide: PDCD1-4218
acgacaccaaccaccaggguu

SEQ ID NO: 16390 - RNA, 22 nt, Artificial Sequence
  Synthetic oligonucleotide: PDCD1-4219
cacgacaccaaccaccaggguu

SEQ ID NO: 16391 - RNA, 23 nt, Artificial Sequence
  Synthetic oligonucleotide: PDCD1-4220
ccacgacaccaaccaccaggguu

SEQ ID NO: 16392 - RNA, 24 nt, Artificial Sequence
  Synthetic oligonucleotide: PDCD1-4221
cccacgacaccaaccaccaggguu

SEQ ID NO: 16393 - RNA, 18 nt, Artificial Sequence
  Synthetic oligonucleotide: PDCD1-4222
gagggguccuccuucuuu

SEQ ID NO: 16394 - RNA, 19 nt, Artificial Sequence
  Synthetic oligonucleotide: PDCD1-4223
ugagggguccuccuucuuu

SEQ ID NO: 16395 - RNA, 20 nt, Artificial Sequence
  Synthetic oligonucleotide: PDCD1-844
cugagggguccuccuucuuu

SEQ ID NO: 16396 - RNA, 21 nt, Artificial Sequence
  Synthetic oligonucleotide: PDCD1-4224
gcugagggguccuccuucuuu

SEQ ID NO: 16397 - RNA, 22 nt, Artificial Sequence
  Synthetic oligonucleotide: PDCD1-4225
ggcugagggguccuccuucuuu

SEQ ID NO: 16398 - RNA, 23 nt, Artificial Sequence
  Synthetic oligonucleotide: PDCD1-4226
cggcugagggguccuccuucuuu

SEQ ID NO: 16399 - RNA, 24 nt, Artificial Sequence
  Synthetic oligonucleotide: PDCD1-4227
acggcugagggguccuccuucuuu

SEQ ID NO: 16400 - RNA, 18 nt, Artificial Sequence
  Synthetic oligonucleotide: PDCD1-4228
guuucucugcagggacaa

SEQ ID NO: 16401 - RNA, 19 nt, Artificial Sequence
  Synthetic oligonucleotide: PDCD1-4229
uguuucucugcagggacaa

SEQ ID NO: 16402 - RNA, 20 nt, Artificial Sequence
  Synthetic oligonucleotide: PDCD1-725
guguuucucugcagggacaa

SEQ ID NO: 16403 - RNA, 21 nt, Artificial Sequence
  Synthetic oligonucleotide: PDCD1-4230
uguguuucucugcagggacaa

SEQ ID NO: 16404 - RNA, 22 nt, Artificial Sequence
  Synthetic oligonucleotide: PDCD1-4231
guguguuucucugcagggacaa

SEQ ID NO: 16405 - RNA, 23 nt, Artificial Sequence
  Synthetic oligonucleotide: PDCD1-4232
aguguguuucucugcagggacaa

SEQ ID NO: 16406 - RNA, 24 nt, Artificial Sequence
  Synthetic oligonucleotide: PDCD1-4233
aaguguguuucucugcagggacaa

SEQ ID NO: 16407 - RNA, 18 nt, Artificial Sequence
  Synthetic oligonucleotide: PDCD1-4234
ccucggagugcccagcca

SEQ ID NO: 16408 - RNA, 19 nt, Artificial Sequence
  Synthetic oligonucleotide: PDCD1-4235
cccucggagugcccagcca

SEQ ID NO: 16409 - RNA, 20 nt, Artificial Sequence
  Synthetic oligonucleotide: PDCD1-753
gcccucggagugcccagcca

SEQ ID NO: 16410 - RNA, 21 nt, Artificial Sequence
  Synthetic oligonucleotide: PDCD1-4236
ggcccucggagugcccagcca

SEQ ID NO: 16411 - RNA, 22 nt, Artificial Sequence
  Synthetic oligonucleotide: PDCD1-4237
cggcccucggagugcccagcca

SEQ ID NO: 16412 - RNA, 23 nt, Artificial Sequence
  Synthetic oligonucleotide: PDCD1-4238
acggcccucggagugcccagcca

SEQ ID NO: 16413 - RNA, 24 nt, Artificial Sequence
  Synthetic oligonucleotide: PDCD1-4239
gacggcccucggagugcccagcca

SEQ ID NO: 16414 - RNA, 18 nt, Artificial Sequence
  Synthetic oligonucleotide: PDCD1-4240
gaccuuugugcccuucca

SEQ ID NO: 16415 - RNA, 19 nt, Artificial Sequence
  Synthetic oligonucleotide: PDCD1-4241
ugaccuuugugcccuucca

SEQ ID NO: 16416 - RNA, 20 nt, Artificial Sequence
  Synthetic oligonucleotide: PDCD1-714
cugaccuuugugcccuucca

SEQ ID NO: 16417 - RNA, 21 nt, Artificial Sequence
  Synthetic oligonucleotide: PDCD1-4242
ccugaccuuugugcccuucca

SEQ ID NO: 16418 - RNA, 22 nt, Artificial Sequence
  Synthetic oligonucleotide: PDCD1-4243
cccugaccuuugugcccuucca

SEQ ID NO: 16419 - RNA, 23 nt, Artificial Sequence
  Synthetic oligonucleotide: PDCD1-4244
ccccugaccuuugugcccuucca

SEQ ID NO: 16420 - RNA, 24 nt, Artificial Sequence
  Synthetic oligonucleotide: PDCD1-4245
accccugaccuuugugcccuucca

SEQ ID NO: 16421 - RNA, 18 nt, Artificial Sequence
  Synthetic oligonucleotide: PDCD1-4246
ccucucccuuucuccuca

SEQ ID NO: 16422 - RNA, 19 nt, Artificial Sequence
  Synthetic oligonucleotide: PDCD1-4247
cccucucccuuucuccuca

SEQ ID NO: 16423 - RNA, 20 nt, Artificial Sequence
  Synthetic oligonucleotide: PDCD1-728
ucccucucccuuucuccuca

SEQ ID NO: 16424 - RNA, 21 nt, Artificial Sequence
  Synthetic oligonucleotide: PDCD1-4248
cucccucucccuuucuccuca

SEQ ID NO: 16425 - RNA, 22 nt, Artificial Sequence
  Synthetic oligonucleotide: PDCD1-4249
acucccucucccuuucuccuca

SEQ ID NO: 16426 - RNA, 23 nt, Artificial Sequence
  Synthetic oligonucleotide: PDCD1-4250
gacucccucucccuuucuccuca

SEQ ID NO: 16427 - RNA, 24 nt, Artificial Sequence
  Synthetic oligonucleotide: PDCD1-4251
ugacucccucucccuuucuccuca

SEQ ID NO: 16428 - RNA, 18 nt, Artificial Sequence
  Synthetic oligonucleotide: PDCD1-4252
ucccuuucuccucaaaga

SEQ ID NO: 16429 - RNA, 19 nt, Artificial Sequence
  Synthetic oligonucleotide: PDCD1-4253
cucccuuucuccucaaaga

SEQ ID NO: 16430 - RNA, 20 nt, Artificial Sequence
  Synthetic oligonucleotide: PDCD1-281
ucucccuuucuccucaaaga

SEQ ID NO: 16431 - RNA, 21 nt, Artificial Sequence
  Synthetic oligonucleotide: PDCD1-4254
cucucccuuucuccucaaaga

SEQ ID NO: 16432 - RNA, 22 nt, Artificial Sequence
  Synthetic oligonucleotide: PDCD1-4255
ccucucccuuucuccucaaaga

SEQ ID NO: 16433 - RNA, 23 nt, Artificial Sequence
  Synthetic oligonucleotide: PDCD1-4256
cccucucccuuucuccucaaaga

SEQ ID NO: 16434 - RNA, 24 nt, Artificial Sequence
  Synthetic oligonucleotide: PDCD1-4257
ucccucucccuuucuccucaaaga

SEQ ID NO: 16435 - RNA, 18 nt, Artificial Sequence
  Synthetic oligonucleotide: PDCD1-4258
ccuuugugcccuuccaga

SEQ ID NO: 16436 - RNA, 19 nt, Artificial Sequence
  Synthetic oligonucleotide: PDCD1-4259
accuuugugcccuuccaga

SEQ ID NO: 16437 - RNA, 20 nt, Artificial Sequence
  Synthetic oligonucleotide: PDCD1-715
gaccuuugugcccuuccaga

SEQ ID NO: 16438 - RNA, 21 nt, Artificial Sequence
  Synthetic oligonucleotide: PDCD1-4260
ugaccuuugugcccuuccaga

SEQ ID NO: 16439 - RNA, 22 nt, Artificial Sequence
  Synthetic oligonucleotide: PDCD1-4261
cugaccuuugugcccuuccaga

SEQ ID NO: 16440 - RNA, 23 nt, Artificial Sequence
  Synthetic oligonucleotide: PDCD1-4262
ccugaccuuugugcccuuccaga

SEQ ID NO: 16441 - RNA, 24 nt, Artificial Sequence
  Synthetic oligonucleotide: PDCD1-4263
cccugaccuuugugcccuuccaga

SEQ ID NO: 16442 - RNA, 18 nt, Artificial Sequence
  Synthetic oligonucleotide: PDCD1-4264
cuggauuuccaguggcga

SEQ ID NO: 16443 - RNA, 19 nt, Artificial Sequence
  Synthetic oligonucleotide: PDCD1-4265
gcuggauuuccaguggcga

SEQ ID NO: 16444 - RNA, 20 nt, Artificial Sequence
  Synthetic oligonucleotide: PDCD1-740
agcuggauuuccaguggcga

SEQ ID NO: 16445 - RNA, 21 nt, Artificial Sequence
  Synthetic oligonucleotide: PDCD1-4266
gagcuggauuuccaguggcga

SEQ ID NO: 16446 - RNA, 22 nt, Artificial Sequence
  Synthetic oligonucleotide: PDCD1-4267
ggagcuggauuuccaguggcga

SEQ ID NO: 16447 - RNA, 23 nt, Artificial Sequence
  Synthetic oligonucleotide: PDCD1-4268
gggagcuggauuuccaguggcga

SEQ ID NO: 16448 - RNA, 24 nt, Artificial Sequence
  Synthetic oligonucleotide: PDCD1-4269
ggggagcuggauuuccaguggcga

SEQ ID NO: 16449 - RNA, 18 nt, Artificial Sequence
  Synthetic oligonucleotide: PDCD1-4270
auugucuuuccuagcgga

SEQ ID NO: 16450 - RNA, 19 nt, Artificial Sequence
  Synthetic oligonucleotide: PDCD1-4271
cauugucuuuccuagcgga

SEQ ID NO: 16451 - RNA, 20 nt, Artificial Sequence
  Synthetic oligonucleotide: PDCD1-748
ccauugucuuuccuagcgga

SEQ ID NO: 16452 - RNA, 21 nt, Artificial Sequence
  Synthetic oligonucleotide: PDCD1-4272
accauugucuuuccuagcgga

SEQ ID NO: 16453 - RNA, 22 nt, Artificial Sequence
  Synthetic oligonucleotide: PDCD1-4273
caccauugucuuuccuagcgga

SEQ ID NO: 16454 - RNA, 23 nt, Artificial Sequence
  Synthetic oligonucleotide: PDCD1-4274
ccaccauugucuuuccuagcgga

SEQ ID NO: 16455 - RNA, 24 nt, Artificial Sequence
  Synthetic oligonucleotide: PDCD1-4275
gccaccauugucuuuccuagcgga

SEQ ID NO: 16456 - RNA, 18 nt, Artificial Sequence
  Synthetic oligonucleotide: PDCD1-4276
uguguucucuguggacua

SEQ ID NO: 16457 - RNA, 19 nt, Artificial Sequence
  Synthetic oligonucleotide: PDCD1-4277
cuguguucucuguggacua

SEQ ID NO: 16458 - RNA, 20 nt, Artificial Sequence
  Synthetic oligonucleotide: PDCD1-284
ccuguguucucuguggacua

SEQ ID NO: 16459 - RNA, 21 nt, Artificial Sequence
  Synthetic oligonucleotide: PDCD1-4278
gccuguguucucuguggacua

SEQ ID NO: 16460 - RNA, 22 nt, Artificial Sequence
  Synthetic oligonucleotide: PDCD1-4279
ugccuguguucucuguggacua

SEQ ID NO: 16461 - RNA, 23 nt, Artificial Sequence
  Synthetic oligonucleotide: PDCD1-4280
gugccuguguucucuguggacua

SEQ ID NO: 16462 - RNA, 24 nt, Artificial Sequence
  Synthetic oligonucleotide: PDCD1-4281
cgugccuguguucucuguggacua

SEQ ID NO: 16463 - RNA, 18 nt, Artificial Sequence
  Synthetic oligonucleotide: PDCD1-4282
ccaccauugucuuuccua

SEQ ID NO: 16464 - RNA, 19 nt, Artificial Sequence
  Synthetic oligonucleotide: PDCD1-4283
gccaccauugucuuuccua

SEQ ID NO: 16465 - RNA, 20 nt, Artificial Sequence
  Synthetic oligonucleotide: PDCD1-746
ugccaccauugucuuuccua

SEQ ID NO: 16466 - RNA, 21 nt, Artificial Sequence
  Synthetic oligonucleotide: PDCD1-4284
augccaccauugucuuuccua

SEQ ID NO: 16467 - RNA, 22 nt, Artificial Sequence
  Synthetic oligonucleotide: PDCD1-4285
uaugccaccauugucuuuccua

SEQ ID NO: 16468 - RNA, 23 nt, Artificial Sequence
  Synthetic oligonucleotide: PDCD1-4286
guaugccaccauugucuuuccua

SEQ ID NO: 16469 - RNA, 24 nt, Artificial Sequence
  Synthetic oligonucleotide: PDCD1-4287
aguaugccaccauugucuuuccua

SEQ ID NO: 16470 - RNA, 18 nt, Artificial Sequence
  Synthetic oligonucleotide: PDCD1-4288
caguggcgagagaagacc

SEQ ID NO: 16471 - RNA, 19 nt, Artificial Sequence
  Synthetic oligonucleotide: PDCD1-4289
ccaguggcgagagaagacc

SEQ ID NO: 16472 - RNA, 20 nt, Artificial Sequence
  Synthetic oligonucleotide: PDCD1-741
uccaguggcgagagaagacc

SEQ ID NO: 16473 - RNA, 21 nt, Artificial Sequence
  Synthetic oligonucleotide: PDCD1-4290
uuccaguggcgagagaagacc

SEQ ID NO: 16474 - RNA, 22 nt, Artificial Sequence
  Synthetic oligonucleotide: PDCD1-4291
uuuccaguggcgagagaagacc

SEQ ID NO: 16475 - RNA, 23 nt, Artificial Sequence
  Synthetic oligonucleotide: PDCD1-4292
auuuccaguggcgagagaagacc

SEQ ID NO: 16476 - RNA, 24 nt, Artificial Sequence
  Synthetic oligonucleotide: PDCD1-4293
gauuuccaguggcgagagaagacc

SEQ ID NO: 16477 - RNA, 18 nt, Artificial Sequence
  Synthetic oligonucleotide: PDCD1-4294
aguggcgagagaagaccc

SEQ ID NO: 16478 - RNA, 19 nt, Artificial Sequence
  Synthetic oligonucleotide: PDCD1-4295
caguggcgagagaagaccc

SEQ ID NO: 16479 - RNA, 20 nt, Artificial Sequence
  Synthetic oligonucleotide: PDCD1-289
ccaguggcgagagaagaccc

SEQ ID NO: 16480 - RNA, 21 nt, Artificial Sequence
  Synthetic oligonucleotide: PDCD1-4296
uccaguggcgagagaagaccc

SEQ ID NO: 16481 - RNA, 22 nt, Artificial Sequence
  Synthetic oligonucleotide: PDCD1-4297
uuccaguggcgagagaagaccc

SEQ ID NO: 16482 - RNA, 23 nt, Artificial Sequence
  Synthetic oligonucleotide: PDCD1-4298
uuuccaguggcgagagaagaccc

SEQ ID NO: 16483 - RNA, 24 nt, Artificial Sequence
  Synthetic oligonucleotide: PDCD1-4299
auuuccaguggcgagagaagaccc

SEQ ID NO: 16484 - RNA, 18 nt, Artificial Sequence
  Synthetic oligonucleotide: PDCD1-4300
gggcucagcugacggccc

SEQ ID NO: 16485 - RNA, 19 nt, Artificial Sequence
  Synthetic oligonucleotide: PDCD1-4301
ggggcucagcugacggccc

SEQ ID NO: 16486 - RNA, 20 nt, Artificial Sequence
  Synthetic oligonucleotide: PDCD1-751
aggggcucagcugacggccc

SEQ ID NO: 16487 - RNA, 21 nt, Artificial Sequence
  Synthetic oligonucleotide: PDCD1-4302
caggggcucagcugacggccc

SEQ ID NO: 16488 - RNA, 22 nt, Artificial Sequence
  Synthetic oligonucleotide: PDCD1-4303
gcaggggcucagcugacggccc

SEQ ID NO: 16489 - RNA, 23 nt, Artificial Sequence
  Synthetic oligonucleotide: PDCD1-4304
cgcaggggcucagcugacggccc

SEQ ID NO: 16490 - RNA, 24 nt, Artificial Sequence
  Synthetic oligonucleotide: PDCD1-4305
ccgcaggggcucagcugacggccc

SEQ ID NO: 16491 - RNA, 18 nt, Artificial Sequence
  Synthetic oligonucleotide: PDCD1-4306
cccccgugcccugugucc

SEQ ID NO: 16492 - RNA, 19 nt, Artificial Sequence
  Synthetic oligonucleotide: PDCD1-4307
ccccccgugcccugugucc

SEQ ID NO: 16493 - RNA, 20 nt, Artificial Sequence
  Synthetic oligonucleotide: PDCD1-743
gccccccgugcccugugucc

SEQ ID NO: 16494 - RNA, 21 nt, Artificial Sequence
  Synthetic oligonucleotide: PDCD1-4308
agccccccgugcccugugucc

SEQ ID NO: 16495 - RNA, 22 nt, Artificial Sequence
  Synthetic oligonucleotide: PDCD1-4309
gagccccccgugcccugugucc

SEQ ID NO: 16496 - RNA, 23 nt, Artificial Sequence
  Synthetic oligonucleotide: PDCD1-4310
ggagccccccgugcccugugucc

SEQ ID NO: 16497 - RNA, 24 nt, Artificial Sequence
  Synthetic oligonucleotide: PDCD1-4311
cggagccccccgugcccugugucc

SEQ ID NO: 16498 - RNA, 18 nt, Artificial Sequence
  Synthetic oligonucleotide: PDCD1-4312
accucaucccccgcccgc

SEQ ID NO: 16499 - RNA, 19 nt, Artificial Sequence
  Synthetic oligonucleotide: PDCD1-4313
caccucaucccccgcccgc

SEQ ID NO: 16500 - RNA, 20 nt, Artificial Sequence
  Synthetic oligonucleotide: PDCD1-294
gcaccucaucccccgcccgc

SEQ ID NO: 16501 - RNA, 21 nt, Artificial Sequence
  Synthetic oligonucleotide: PDCD1-4314
ggcaccucaucccccgcccgc

SEQ ID NO: 16502 - RNA, 22 nt, Artificial Sequence
  Synthetic oligonucleotide: PDCD1-4315
gggcaccucaucccccgcccgc

SEQ ID NO: 16503 - RNA, 23 nt, Artificial Sequence
  Synthetic oligonucleotide: PDCD1-4316
ugggcaccucaucccccgcccgc

SEQ ID NO: 16504 - RNA, 24 nt, Artificial Sequence
  Synthetic oligonucleotide: PDCD1-4317
augggcaccucaucccccgcccgc

SEQ ID NO: 16505 - RNA, 18 nt, Artificial Sequence
  Synthetic oligonucleotide: PDCD1-4318
caucugcucccgggccgc

SEQ ID NO: 16506 - RNA, 19 nt, Artificial Sequence
  Synthetic oligonucleotide: PDCD1-4319
ucaucugcucccgggccgc

SEQ ID NO: 16507 - RNA, 20 nt, Artificial Sequence
  Synthetic oligonucleotide: PDCD1-722
gucaucugcucccgggccgc

SEQ ID NO: 16508 - RNA, 21 nt, Artificial Sequence
  Synthetic oligonucleotide: PDCD1-4320
cgucaucugcucccgggccgc

SEQ ID NO: 16509 - RNA, 22 nt, Artificial Sequence
  Synthetic oligonucleotide: PDCD1-4321
ccgucaucugcucccgggccgc

SEQ ID NO: 16510 - RNA, 23 nt, Artificial Sequence
  Synthetic oligonucleotide: PDCD1-4322
gccgucaucugcucccgggccgc

SEQ ID NO: 16511 - RNA, 24 nt, Artificial Sequence
  Synthetic oligonucleotide: PDCD1-4323
ggccgucaucugcucccgggccgc

SEQ ID NO: 16512 - RNA, 18 nt, Artificial Sequence
  Synthetic oligonucleotide: PDCD1-4324
gugcccagccacugaggc

SEQ ID NO: 16513 - RNA, 19 nt, Artificial Sequence
  Synthetic oligonucleotide: PDCD1-4325
agugcccagccacugaggc

SEQ ID NO: 16514 - RNA, 20 nt, Artificial Sequence
  Synthetic oligonucleotide: PDCD1-754
gagugcccagccacugaggc

SEQ ID NO: 16515 - RNA, 21 nt, Artificial Sequence
  Synthetic oligonucleotide: PDCD1-4326
ggagugcccagccacugaggc

SEQ ID NO: 16516 - RNA, 22 nt, Artificial Sequence
  Synthetic oligonucleotide: PDCD1-4327
cggagugcccagccacugaggc

SEQ ID NO: 16517 - RNA, 23 nt, Artificial Sequence
  Synthetic oligonucleotide: PDCD1-4328
ucggagugcccagccacugaggc

SEQ ID NO: 16518 - RNA, 24 nt, Artificial Sequence
  Synthetic oligonucleotide: PDCD1-4329
cucggagugcccagccacugaggc

SEQ ID NO: 16519 - RNA, 18 nt, Artificial Sequence
  Synthetic oligonucleotide: PDCD1-4330
agcuggauuuccaguggc

SEQ ID NO: 16520 - RNA, 19 nt, Artificial Sequence
  Synthetic oligonucleotide: PDCD1-4331
gagcuggauuuccaguggc

SEQ ID NO: 16521 - RNA, 20 nt, Artificial Sequence
  Synthetic oligonucleotide: PDCD1-739
ggagcuggauuuccaguggc

SEQ ID NO: 16522 - RNA, 21 nt, Artificial Sequence
  Synthetic oligonucleotide: PDCD1-4332
gggagcuggauuuccaguggc

SEQ ID NO: 16523 - RNA, 22 nt, Artificial Sequence
  Synthetic oligonucleotide: PDCD1-4333
ggggagcuggauuuccaguggc

SEQ ID NO: 16524 - RNA, 23 nt, Artificial Sequence
  Synthetic oligonucleotide: PDCD1-4334
uggggagcuggauuuccaguggc

SEQ ID NO: 16525 - RNA, 24 nt, Artificial Sequence
  Synthetic oligonucleotide: PDCD1-4335
auggggagcuggauuuccaguggc

SEQ ID NO: 16526 - RNA, 18 nt, Artificial Sequence
  Synthetic oligonucleotide: PDCD1-4336
ccaaguguguuucucugc

SEQ ID NO: 16527 - RNA, 19 nt, Artificial Sequence
  Synthetic oligonucleotide: PDCD1-4337
cccaaguguguuucucugc

SEQ ID NO: 16528 - RNA, 20 nt, Artificial Sequence
  Synthetic oligonucleotide: PDCD1-275
ccccaaguguguuucucugc

SEQ ID NO: 16529 - RNA, 21 nt, Artificial Sequence
  Synthetic oligonucleotide: PDCD1-4338
accccaaguguguuucucugc

SEQ ID NO: 16530 - RNA, 22 nt, Artificial Sequence
  Synthetic oligonucleotide: PDCD1-4339
gaccccaaguguguuucucugc

SEQ ID NO: 16531 - RNA, 23 nt, Artificial Sequence
  Synthetic oligonucleotide: PDCD1-4340
ugaccccaaguguguuucucugc

SEQ ID NO: 16532 - RNA, 24 nt, Artificial Sequence
  Synthetic oligonucleotide: PDCD1-4341
gugaccccaaguguguuucucugc

SEQ ID NO: 16533 - RNA, 18 nt, Artificial Sequence
  Synthetic oligonucleotide: PDCD1-4342
ccuggccgucaucugcuc

SEQ ID NO: 16534 - RNA, 19 nt, Artificial Sequence
  Synthetic oligonucleotide: PDCD1-4343
uccuggccgucaucugcuc

SEQ ID NO: 16535 - RNA, 20 nt, Artificial Sequence
  Synthetic oligonucleotide: PDCD1-721
guccuggccgucaucugcuc

SEQ ID NO: 16536 - RNA, 21 nt, Artificial Sequence
  Synthetic oligonucleotide: PDCD1-4344
gguccuggccgucaucugcuc

SEQ ID NO: 16537 - RNA, 22 nt, Artificial Sequence
  Synthetic oligonucleotide: PDCD1-4345
ggguccuggccgucaucugcuc

SEQ ID NO: 16538 - RNA, 23 nt, Artificial Sequence
  Synthetic oligonucleotide: PDCD1-4346
uggguccuggccgucaucugcuc

SEQ ID NO: 16539 - RNA, 24 nt, Artificial Sequence
  Synthetic oligonucleotide: PDCD1-4347
cuggguccuggccgucaucugcuc

SEQ ID NO: 16540 - RNA, 18 nt, Artificial Sequence
  Synthetic oligonucleotide: PDCD1-4348
acccuggugguugguguc

SEQ ID NO: 16541 - RNA, 19 nt, Artificial Sequence
  Synthetic oligonucleotide: PDCD1-4349
aacccuggugguugguguc

SEQ ID NO: 16542 - RNA, 20 nt, Artificial Sequence
  Synthetic oligonucleotide: PDCD1-718
aaacccuggugguugguguc

SEQ ID NO: 16543 - RNA, 21 nt, Artificial Sequence
  Synthetic oligonucleotide: PDCD1-4350
caaacccuggugguugguguc

SEQ ID NO: 16544 - RNA, 22 nt, Artificial Sequence
  Synthetic oligonucleotide: PDCD1-4351
ccaaacccuggugguugguguc

SEQ ID NO: 16545 - RNA, 23 nt, Artificial Sequence
  Synthetic oligonucleotide: PDCD1-4352
uccaaacccuggugguugguguc

SEQ ID NO: 16546 - RNA, 24 nt, Artificial Sequence
  Synthetic oligonucleotide: PDCD1-4353
uuccaaacccuggugguugguguc

SEQ ID NO: 16547 - RNA, 18 nt, Artificial Sequence
  Synthetic oligonucleotide: PDCD1-4354
cugaccuuugugcccuuc

SEQ ID NO: 16548 - RNA, 19 nt, Artificial Sequence
  Synthetic oligonucleotide: PDCD1-4355
ccugaccuuugugcccuuc

SEQ ID NO: 16549 - RNA, 20 nt, Artificial Sequence
  Synthetic oligonucleotide: PDCD1-713
cccugaccuuugugcccuuc

SEQ ID NO: 16550 - RNA, 21 nt, Artificial Sequence
  Synthetic oligonucleotide: PDCD1-4356
ccccugaccuuugugcccuuc

SEQ ID NO: 16551 - RNA, 22 nt, Artificial Sequence
  Synthetic oligonucleotide: PDCD1-4357
accccugaccuuugugcccuuc

SEQ ID NO: 16552 - RNA, 23 nt, Artificial Sequence
  Synthetic oligonucleotide: PDCD1-4358
aaccccugaccuuugugcccuuc

SEQ ID NO: 16553 - RNA, 24 nt, Artificial Sequence
  Synthetic oligonucleotide: PDCD1-4359
uaaccccugaccuuugugcccuuc

SEQ ID NO: 16554 - RNA, 18 nt, Artificial Sequence
  Synthetic oligonucleotide: PDCD1-4360
cucccuuucuccucaaag

SEQ ID NO: 16555 - RNA, 19 nt, Artificial Sequence
  Synthetic oligonucleotide: PDCD1-4361
ucucccuuucuccucaaag

SEQ ID NO: 16556 - RNA, 20 nt, Artificial Sequence
  Synthetic oligonucleotide: PDCD1-729
cucucccuuucuccucaaag

SEQ ID NO: 16557 - RNA, 21 nt, Artificial Sequence
  Synthetic oligonucleotide: PDCD1-4362
ccucucccuuucuccucaaag

SEQ ID NO: 16558 - RNA, 22 nt, Artificial Sequence
  Synthetic oligonucleotide: PDCD1-4363
cccucucccuuucuccucaaag

SEQ ID NO: 16559 - RNA, 23 nt, Artificial Sequence
  Synthetic oligonucleotide: PDCD1-4364
ucccucucccuuucuccucaaag

SEQ ID NO: 16560 - RNA, 24 nt, Artificial Sequence
  Synthetic oligonucleotide: PDCD1-4365
cucccucucccuuucuccucaaag

SEQ ID NO: 16561 - RNA, 18 nt, Artificial Sequence
  Synthetic oligonucleotide: PDCD1-4366
ccuuucuccucaaagaag

SEQ ID NO: 16562 - RNA, 19 nt, Artificial Sequence
  Synthetic oligonucleotide: PDCD1-4367
cccuuucuccucaaagaag

SEQ ID NO: 16563 - RNA, 20 nt, Artificial Sequence
  Synthetic oligonucleotide: PDCD1-731
ucccuuucuccucaaagaag

SEQ ID NO: 16564 - RNA, 21 nt, Artificial Sequence
  Synthetic oligonucleotide: PDCD1-4368
cucccuuucuccucaaagaag

SEQ ID NO: 16565 - RNA, 22 nt, Artificial Sequence
  Synthetic oligonucleotide: PDCD1-4369
ucucccuuucuccucaaagaag

SEQ ID NO: 16566 - RNA, 23 nt, Artificial Sequence
  Synthetic oligonucleotide: PDCD1-4370
cucucccuuucuccucaaagaag

SEQ ID NO: 16567 - RNA, 24 nt, Artificial Sequence
  Synthetic oligonucleotide: PDCD1-4371
ccucucccuuucuccucaaagaag

SEQ ID NO: 16568 - RNA, 18 nt, Artificial Sequence
  Synthetic oligonucleotide: PDCD1-4372
cccugugucccugagcag

SEQ ID NO: 16569 - RNA, 19 nt, Artificial Sequence
  Synthetic oligonucleotide: PDCD1-4373
gcccugugucccugagcag

SEQ ID NO: 16570 - RNA, 20 nt, Artificial Sequence
  Synthetic oligonucleotide: PDCD1-744
ugcccugugucccugagcag

SEQ ID NO: 16571 - RNA, 21 nt, Artificial Sequence
  Synthetic oligonucleotide: PDCD1-4374
gugcccugugucccugagcag

SEQ ID NO: 16572 - RNA, 22 nt, Artificial Sequence
  Synthetic oligonucleotide: PDCD1-4375
cgugcccugugucccugagcag

SEQ ID NO: 16573 - RNA, 23 nt, Artificial Sequence
  Synthetic oligonucleotide: PDCD1-4376
ccgugcccugugucccugagcag

SEQ ID NO: 16574 - RNA, 24 nt, Artificial Sequence
  Synthetic oligonucleotide: PDCD1-4377
cccgugcccugugucccugagcag

SEQ ID NO: 16575 - RNA, 18 nt, Artificial Sequence
  Synthetic oligonucleotide: PDCD1-4378
uugugcccuuccagagag

SEQ ID NO: 16576 - RNA, 19 nt, Artificial Sequence
  Synthetic oligonucleotide: PDCD1-4379
uuugugcccuuccagagag

SEQ ID NO: 16577 - RNA, 20 nt, Artificial Sequence
  Synthetic oligonucleotide: PDCD1-716
cuuugugcccuuccagagag

SEQ ID NO: 16578 - RNA, 21 nt, Artificial Sequence
  Synthetic oligonucleotide: PDCD1-4380
ccuuugugcccuuccagagag

SEQ ID NO: 16579 - RNA, 22 nt, Artificial Sequence
  Synthetic oligonucleotide: PDCD1-4381
accuuugugcccuuccagagag

SEQ ID NO: 16580 - RNA, 23 nt, Artificial Sequence
  Synthetic oligonucleotide: PDCD1-4382
gaccuuugugcccuuccagagag

SEQ ID NO: 16581 - RNA, 24 nt, Artificial Sequence
  Synthetic oligonucleotide: PDCD1-4383
ugaccuuugugcccuuccagagag

SEQ ID NO: 16582 - RNA, 18 nt, Artificial Sequence
  Synthetic oligonucleotide: PDCD1-4384
caccucaucccccgcccg

SEQ ID NO: 16583 - RNA, 19 nt, Artificial Sequence
  Synthetic oligonucleotide: PDCD1-4385
gcaccucaucccccgcccg

SEQ ID NO: 16584 - RNA, 20 nt, Artificial Sequence
  Synthetic oligonucleotide: PDCD1-749
ggcaccucaucccccgcccg

SEQ ID NO: 16585 - RNA, 21 nt, Artificial Sequence
  Synthetic oligonucleotide: PDCD1-4386
gggcaccucaucccccgcccg

SEQ ID NO: 16586 - RNA, 22 nt, Artificial Sequence
  Synthetic oligonucleotide: PDCD1-4387
ugggcaccucaucccccgcccg

SEQ ID NO: 16587 - RNA, 23 nt, Artificial Sequence
  Synthetic oligonucleotide: PDCD1-4388
augggcaccucaucccccgcccg

SEQ ID NO: 16588 - RNA, 24 nt, Artificial Sequence
  Synthetic oligonucleotide: PDCD1-4389
aaugggcaccucaucccccgcccg

SEQ ID NO: 16589 - RNA, 18 nt, Artificial Sequence
  Synthetic oligonucleotide: PDCD1-4390
agccacugaggccugagg

SEQ ID NO: 16590 - RNA, 19 nt, Artificial Sequence
  Synthetic oligonucleotide: PDCD1-4391
cagccacugaggccugagg

SEQ ID NO: 16591 - RNA, 20 nt, Artificial Sequence
  Synthetic oligonucleotide: PDCD1-756
ccagccacugaggccugagg

SEQ ID NO: 16592 - RNA, 21 nt, Artificial Sequence
  Synthetic oligonucleotide: PDCD1-4392
cccagccacugaggccugagg

SEQ ID NO: 16593 - RNA, 22 nt, Artificial Sequence
  Synthetic oligonucleotide: PDCD1-4393
gcccagccacugaggccugagg

SEQ ID NO: 16594 - RNA, 23 nt, Artificial Sequence
  Synthetic oligonucleotide: PDCD1-4394
ugcccagccacugaggccugagg

SEQ ID NO: 16595 - RNA, 24 nt, Artificial Sequence
  Synthetic oligonucleotide: PDCD1-4395
gugcccagccacugaggccugagg

SEQ ID NO: 16596 - RNA, 18 nt, Artificial Sequence
  Synthetic oligonucleotide: PDCD1-4396
cccuuccagagagaaggg

SEQ ID NO: 16597 - RNA, 19 nt, Artificial Sequence
  Synthetic oligonucleotide: PDCD1-4397
gcccuuccagagagaaggg

SEQ ID NO: 16598 - RNA, 20 nt, Artificial Sequence
  Synthetic oligonucleotide: PDCD1-717
ugcccuuccagagagaaggg

SEQ ID NO: 16599 - RNA, 21 nt, Artificial Sequence
  Synthetic oligonucleotide: PDCD1-4398
gugcccuuccagagagaaggg

SEQ ID NO: 16600 - RNA, 22 nt, Artificial Sequence
  Synthetic oligonucleotide: PDCD1-4399
ugugcccuuccagagagaaggg

SEQ ID NO: 16601 - RNA, 23 nt, Artificial Sequence
  Synthetic oligonucleotide: PDCD1-4400
uugugcccuuccagagagaaggg

SEQ ID NO: 16602 - RNA, 24 nt, Artificial Sequence
  Synthetic oligonucleotide: PDCD1-4401
uuugugcccuuccagagagaaggg

SEQ ID NO: 16603 - RNA, 18 nt, Artificial Sequence
  Synthetic oligonucleotide: PDCD1-4402
uguucucuguggacuaug

SEQ ID NO: 16604 - RNA, 19 nt, Artificial Sequence
  Synthetic oligonucleotide: PDCD1-4403
guguucucuguggacuaug

SEQ ID NO: 16605 - RNA, 20 nt, Artificial Sequence
  Synthetic oligonucleotide: PDCD1-286
uguguucucuguggacuaug

SEQ ID NO: 16606 - RNA, 21 nt, Artificial Sequence
  Synthetic oligonucleotide: PDCD1-4404
cuguguucucuguggacuaug

SEQ ID NO: 16607 - RNA, 22 nt, Artificial Sequence
  Synthetic oligonucleotide: PDCD1-4405
ccuguguucucuguggacuaug

SEQ ID NO: 16608 - RNA, 23 nt, Artificial Sequence
  Synthetic oligonucleotide: PDCD1-4406
gccuguguucucuguggacuaug

SEQ ID NO: 16609 - RNA, 24 nt, Artificial Sequence
  Synthetic oligonucleotide: PDCD1-4407
ugccuguguucucuguggacuaug

SEQ ID NO: 16610 - RNA, 18 nt, Artificial Sequence
  Synthetic oligonucleotide: PDCD1-4408
ggugucgugggcggccug

SEQ ID NO: 16611 - RNA, 19 nt, Artificial Sequence
  Synthetic oligonucleotide: PDCD1-4409
uggugucgugggcggccug

SEQ ID NO: 16612 - RNA, 20 nt, Artificial Sequence
  Synthetic oligonucleotide: PDCD1-719
uuggugucgugggcggccug

SEQ ID NO: 16613 - RNA, 21 nt, Artificial Sequence
  Synthetic oligonucleotide: PDCD1-4410
guuggugucgugggcggccug

SEQ ID NO: 16614 - RNA, 22 nt, Artificial Sequence
  Synthetic oligonucleotide: PDCD1-4411
gguuggugucgugggcggccug

SEQ ID NO: 16615 - RNA, 23 nt, Artificial Sequence
  Synthetic oligonucleotide: PDCD1-4412
ugguuggugucgugggcggccug

SEQ ID NO: 16616 - RNA, 24 nt, Artificial Sequence
  Synthetic oligonucleotide: PDCD1-4413
gugguuggugucgugggcggccug

SEQ ID NO: 16617 - RNA, 18 nt, Artificial Sequence
  Synthetic oligonucleotide: PDCD1-4414
cccaaguguguuucucug

SEQ ID NO: 16618 - RNA, 19 nt, Artificial Sequence
  Synthetic oligonucleotide: PDCD1-4415
ccccaaguguguuucucug

SEQ ID NO: 16619 - RNA, 20 nt, Artificial Sequence
  Synthetic oligonucleotide: PDCD1-723
accccaaguguguuucucug

SEQ ID NO: 16620 - RNA, 21 nt, Artificial Sequence
  Synthetic oligonucleotide: PDCD1-4416
gaccccaaguguguuucucug

SEQ ID NO: 16621 - RNA, 22 nt, Artificial Sequence
  Synthetic oligonucleotide: PDCD1-4417
ugaccccaaguguguuucucug

SEQ ID NO: 16622 - RNA, 23 nt, Artificial Sequence
  Synthetic oligonucleotide: PDCD1-4418
gugaccccaaguguguuucucug

SEQ ID NO: 16623 - RNA, 24 nt, Artificial Sequence
  Synthetic oligonucleotide: PDCD1-4419
ggugaccccaaguguguuucucug

SEQ ID NO: 16624 - RNA, 18 nt, Artificial Sequence
  Synthetic oligonucleotide: PDCD1-4420
ggagcuggauuuccagug

SEQ ID NO: 16625 - RNA, 19 nt, Artificial Sequence
  Synthetic oligonucleotide: PDCD1-4421
gggagcuggauuuccagug

SEQ ID NO: 16626 - RNA, 20 nt, Artificial Sequence
  Synthetic oligonucleotide: PDCD1-738
ggggagcuggauuuccagug

SEQ ID NO: 16627 - RNA, 21 nt, Artificial Sequence
  Synthetic oligonucleotide: PDCD1-4422
uggggagcuggauuuccagug

SEQ ID NO: 16628 - RNA, 22 nt, Artificial Sequence
  Synthetic oligonucleotide: PDCD1-4423
auggggagcuggauuuccagug

SEQ ID NO: 16629 - RNA, 23 nt, Artificial Sequence
  Synthetic oligonucleotide: PDCD1-4424
uauggggagcuggauuuccagug

SEQ ID NO: 16630 - RNA, 24 nt, Artificial Sequence
  Synthetic oligonucleotide: PDCD1-4425
cuauggggagcuggauuuccagug

SEQ ID NO: 16631 - RNA, 18 nt, Artificial Sequence
  Synthetic oligonucleotide: PDCD1-4426
uuucucugcagggacaau

SEQ ID NO: 16632 - RNA, 19 nt, Artificial Sequence
  Synthetic oligonucleotide: PDCD1-4427
guuucucugcagggacaau

SEQ ID NO: 16633 - RNA, 20 nt, Artificial Sequence
  Synthetic oligonucleotide: PDCD1-277
uguuucucugcagggacaau

SEQ ID NO: 16634 - RNA, 21 nt, Artificial Sequence
  Synthetic oligonucleotide: PDCD1-4428
guguuucucugcagggacaau

SEQ ID NO: 16635 - RNA, 22 nt, Artificial Sequence
  Synthetic oligonucleotide: PDCD1-4429
uguguuucucugcagggacaau

SEQ ID NO: 16636 - RNA, 23 nt, Artificial Sequence
  Synthetic oligonucleotide: PDCD1-4430
guguguuucucugcagggacaau

SEQ ID NO: 16637 - RNA, 24 nt, Artificial Sequence
  Synthetic oligonucleotide: PDCD1-4431
aguguguuucucugcagggacaau

SEQ ID NO: 16638 - RNA, 18 nt, Artificial Sequence
  Synthetic oligonucleotide: PDCD1-4432
guguucucuguggacuau

SEQ ID NO: 16639 - RNA, 19 nt, Artificial Sequence
  Synthetic oligonucleotide: PDCD1-4433
uguguucucuguggacuau

SEQ ID NO: 16640 - RNA, 20 nt, Artificial Sequence
  Synthetic oligonucleotide: PDCD1-285
cuguguucucuguggacuau

SEQ ID NO: 16641 - RNA, 21 nt, Artificial Sequence
  Synthetic oligonucleotide: PDCD1-4434
ccuguguucucuguggacuau

SEQ ID NO: 16642 - RNA, 22 nt, Artificial Sequence
  Synthetic oligonucleotide: PDCD1-4435
gccuguguucucuguggacuau

SEQ ID NO: 16643 - RNA, 23 nt, Artificial Sequence
  Synthetic oligonucleotide: PDCD1-4436
ugccuguguucucuguggacuau

SEQ ID NO: 16644 - RNA, 24 nt, Artificial Sequence
  Synthetic oligonucleotide: PDCD1-4437
gugccuguguucucuguggacuau

SEQ ID NO: 16645 - RNA, 18 nt, Artificial Sequence
  Synthetic oligonucleotide: PDCD1-4438
cuguguucucuguggacu

SEQ ID NO: 16646 - RNA, 19 nt, Artificial Sequence
  Synthetic oligonucleotide: PDCD1-4439
ccuguguucucuguggacu

SEQ ID NO: 16647 - RNA, 20 nt, Artificial Sequence
  Synthetic oligonucleotide: PDCD1-733
gccuguguucucuguggacu

SEQ ID NO: 16648 - RNA, 21 nt, Artificial Sequence
  Synthetic oligonucleotide: PDCD1-4440
ugccuguguucucuguggacu

SEQ ID NO: 16649 - RNA, 22 nt, Artificial Sequence
  Synthetic oligonucleotide: PDCD1-4441
gugccuguguucucuguggacu

SEQ ID NO: 16650 - RNA, 23 nt, Artificial Sequence
  Synthetic oligonucleotide: PDCD1-4442
cgugccuguguucucuguggacu

SEQ ID NO: 16651 - RNA, 24 nt, Artificial Sequence
  Synthetic oligonucleotide: PDCD1-4443
ccgugccuguguucucuguggacu

SEQ ID NO: 16652 - RNA, 18 nt, Artificial Sequence
  Synthetic oligonucleotide: PDCD1-4444
gccgugccuguguucucu

SEQ ID NO: 16653 - RNA, 19 nt, Artificial Sequence
  Synthetic oligonucleotide: PDCD1-4445
agccgugccuguguucucu

SEQ ID NO: 16654 - RNA, 20 nt, Artificial Sequence
  Synthetic oligonucleotide: PDCD1-732
cagccgugccuguguucucu

SEQ ID NO: 16655 - RNA, 21 nt, Artificial Sequence
  Synthetic oligonucleotide: PDCD1-4446
ucagccgugccuguguucucu

SEQ ID NO: 16656 - RNA, 22 nt, Artificial Sequence
  Synthetic oligonucleotide: PDCD1-4447
cucagccgugccuguguucucu

SEQ ID NO: 16657 - RNA, 23 nt, Artificial Sequence
  Synthetic oligonucleotide: PDCD1-4448
ccucagccgugccuguguucucu

SEQ ID NO: 16658 - RNA, 24 nt, Artificial Sequence
  Synthetic oligonucleotide: PDCD1-4449
cccucagccgugccuguguucucu

SEQ ID NO: 16659 - RNA, 17 nt, Artificial Sequence
  Synthetic oligonucleotide: PDCD1-4450
gccagcccggccaggac

SEQ ID NO: 16660 - RNA, 17 nt, Artificial Sequence
  Synthetic oligonucleotide: PDCD1-4451
acaacgccaccuucacc

SEQ ID NO: 16661 - RNA, 17 nt, Artificial Sequence
  Synthetic oligonucleotide: PDCD1-4452
gguccucggggaaggcg

SEQ ID NO: 16662 - RNA, 17 nt, Artificial Sequence
  Synthetic oligonucleotide: PDCD1-571
gcuucuccaacacaucg

SEQ ID NO: 16663 - RNA, 20 nt, Artificial Sequence
  Synthetic oligonucleotide: PDCD1-4453
gcagccagcccggccaggac

SEQ ID NO: 16664 - RNA, 20 nt, Artificial Sequence
  Synthetic oligonucleotide: PDCD1-4454
gggacaacgccaccuucacc

SEQ ID NO: 16665 - RNA, 20 nt, Artificial Sequence
  Synthetic oligonucleotide: PDCD1-4455
ugcgguccucggggaaggcg

SEQ ID NO: 16666 - RNA, 20 nt, Artificial Sequence
  Synthetic oligonucleotide: PDCD1-542
gcagcuucuccaacacaucg

SEQ ID NO: 16667 - RNA, 17 nt, Artificial Sequence
  Synthetic oligonucleotide: PDCD1-954
ucuguggacuaugggga

SEQ ID NO: 16668 - RNA, 17 nt, Artificial Sequence
  Synthetic oligonucleotide: PDCD1-4456
ugcucuuggccccucug

SEQ ID NO: 16669 - RNA, 20 nt, Artificial Sequence
  Synthetic oligonucleotide: PDCD1-953
uucucuguggacuaugggga

SEQ ID NO: 16670 - RNA, 20 nt, Artificial Sequence
  Synthetic oligonucleotide: PDCD1-4457
cacugcucuuggccccucug

SEQ ID NO: 16671 - RNA, 17 nt, Artificial Sequence
  Synthetic oligonucleotide: PDCD1-2652
gcagcucgggcgggaua

SEQ ID NO: 16672 - RNA, 17 nt, Artificial Sequence
  Synthetic oligonucleotide: PDCD1-2666
gagacccccacggggua

SEQ ID NO: 16673 - RNA, 17 nt, Artificial Sequence
  Synthetic oligonucleotide: PDCD1-234
cugggcggugcuacaac

SEQ ID NO: 16674 - RNA, 17 nt, Artificial Sequence
  Synthetic oligonucleotide: PDCD1-249
agcaccgcccagacgac

SEQ ID NO: 16675 - RNA, 17 nt, Artificial Sequence
  Synthetic oligonucleotide: PDCD1-250
cgcccagacgacuggcc

SEQ ID NO: 16676 - RNA, 17 nt, Artificial Sequence
  Synthetic oligonucleotide: PDCD1-248
cuaccuaagaaccaucc

SEQ ID NO: 16677 - RNA, 17 nt, Artificial Sequence
  Synthetic oligonucleotide: PDCD1-2888
cauucugucggagccuc

SEQ ID NO: 16678 - RNA, 17 nt, Artificial Sequence
  Synthetic oligonucleotide: PDCD1-231
cgcccuggccagucguc

SEQ ID NO: 16679 - RNA, 17 nt, Artificial Sequence
  Synthetic oligonucleotide: PDCD1-2496
ucccggagcgagggguc

SEQ ID NO: 16680 - RNA, 17 nt, Artificial Sequence
  Synthetic oligonucleotide: PDCD1-2673
ugucacucucgcccacg

SEQ ID NO: 16681 - RNA, 17 nt, Artificial Sequence
  Synthetic oligonucleotide: PDCD1-2589
cacgcccuaccccgugg

SEQ ID NO: 16682 - RNA, 17 nt, Artificial Sequence
  Synthetic oligonucleotide: PDCD1-2675
cgcccacguggaugugg

SEQ ID NO: 16683 - RNA, 17 nt, Artificial Sequence
  Synthetic oligonucleotide: PDCD1-2674
ucucgcccacguggaug

SEQ ID NO: 16684 - RNA, 17 nt, Artificial Sequence
  Synthetic oligonucleotide: PDCD1-3120
ccgacagaaugggagug

SEQ ID NO: 16685 - RNA, 17 nt, Artificial Sequence
  Synthetic oligonucleotide: PDCD1-2669
ccacgggguagggcgug

SEQ ID NO: 16686 - RNA, 17 nt, Artificial Sequence
  Synthetic oligonucleotide: PDCD1-3123
agaggcuccgacagaau

SEQ ID NO: 16687 - RNA, 17 nt, Artificial Sequence
  Synthetic oligonucleotide: PDCD1-3121
uccgacagaaugggagu

SEQ ID NO: 16688 - RNA, 17 nt, Artificial Sequence
  Synthetic oligonucleotide: PDCD1-2523
ccucucagccgguccuu

SEQ ID NO: 16689 - RNA, 20 nt, Artificial Sequence
  Synthetic oligonucleotide: PDCD1-2233
ucaggcggaggugagcggaa

SEQ ID NO: 16690 - RNA, 20 nt, Artificial Sequence
  Synthetic oligonucleotide: PDCD1-124
accgcccagacgacuggcca

SEQ ID NO: 16691 - RNA, 20 nt, Artificial Sequence
  Synthetic oligonucleotide: PDCD1-2232
cucaggcggaggugagcgga

SEQ ID NO: 16692 - RNA, 20 nt, Artificial Sequence
  Synthetic oligonucleotide: PDCD1-2236
acugucccaggucagguuga

SEQ ID NO: 16693 - RNA, 20 nt, Artificial Sequence
  Synthetic oligonucleotide: PDCD1-107
cgucugggcggugcuacaac

SEQ ID NO: 16694 - RNA, 20 nt, Artificial Sequence
  Synthetic oligonucleotide: PDCD1-122
uguagcaccgcccagacgac

SEQ ID NO: 16695 - RNA, 20 nt, Artificial Sequence
  Synthetic oligonucleotide: PDCD1-2138
ggaaggucccuccagacccc

SEQ ID NO: 16696 - RNA, 20 nt, Artificial Sequence
  Synthetic oligonucleotide: PDCD1-111
cuacaacugggcuggcggcc

SEQ ID NO: 16697 - RNA, 20 nt, Artificial Sequence
  Synthetic oligonucleotide: PDCD1-123
caccgcccagacgacuggcc

SEQ ID NO: 16698 - RNA, 20 nt, Artificial Sequence
  Synthetic oligonucleotide: PDCD1-121
caccuaccuaagaaccaucc

SEQ ID NO: 16699 - RNA, 20 nt, Artificial Sequence
  Synthetic oligonucleotide: PDCD1-2205
cuuugggcagcucgaacucc

SEQ ID NO: 16700 - RNA, 20 nt, Artificial Sequence
  Synthetic oligonucleotide: PDCD1-2764
ucccauucugucggagccuc

SEQ ID NO: 16701 - RNA, 20 nt, Artificial Sequence
  Synthetic oligonucleotide: PDCD1-2207
cgaacuccuggguuccucuc

SEQ ID NO: 16702 - RNA, 20 nt, Artificial Sequence
  Synthetic oligonucleotide: PDCD1-104
aggcgcccuggccagucguc

SEQ ID NO: 16703 - RNA, 20 nt, Artificial Sequence
  Synthetic oligonucleotide: PDCD1-2189
gggucccggagcgagggguc

SEQ ID NO: 16704 - RNA, 20 nt, Artificial Sequence
  Synthetic oligonucleotide: PDCD1-2346
cucgggcgggauauggaaag

SEQ ID NO: 16705 - RNA, 20 nt, Artificial Sequence
  Synthetic oligonucleotide: PDCD1-2366
cucugucacucucgcccacg

SEQ ID NO: 16706 - RNA, 20 nt, Artificial Sequence
  Synthetic oligonucleotide: PDCD1-2367
cacucucgcccacguggaug

SEQ ID NO: 16707 - RNA, 20 nt, Artificial Sequence
  Synthetic oligonucleotide: PDCD1-2999
gcuccgacagaaugggagug

SEQ ID NO: 16708 - RNA, 20 nt, Artificial Sequence
  Synthetic oligonucleotide: PDCD1-117
ggaugguucuuagguaggug

SEQ ID NO: 16709 - RNA, 20 nt, Artificial Sequence
  Synthetic oligonucleotide: PDCD1-2388
gagaaggcggcacucuggug

SEQ ID NO: 16710 - RNA, 20 nt, Artificial Sequence
  Synthetic oligonucleotide: PDCD1-3002
cccagaggcuccgacagaau

SEQ ID NO: 16711 - RNA, 20 nt, Artificial Sequence
  Synthetic oligonucleotide: PDCD1-108
gucugggcggugcuacaacu

SEQ ID NO: 16712 - RNA, 20 nt, Artificial Sequence
  Synthetic oligonucleotide: PDCD1-2206
uuugggcagcucgaacuccu

SEQ ID NO: 16713 - RNA, 20 nt, Artificial Sequence
  Synthetic oligonucleotide: PDCD1-2765
cccauucugucggagccucu

SEQ ID NO: 16714 - RNA, 20 nt, Artificial Sequence
  Synthetic oligonucleotide: PDCD1-105
ggcgcccuggccagucgucu

SEQ ID NO: 16715 - RNA, 20 nt, Artificial Sequence
  Synthetic oligonucleotide: PDCD1-116
aggaugguucuuagguaggu

SEQ ID NO: 16716 - RNA, 20 nt, Artificial Sequence
  Synthetic oligonucleotide: PDCD1-114
ggccaggaugguucuuaggu

SEQ ID NO: 16717 - RNA, 20 nt, Artificial Sequence
  Synthetic oligonucleotide: PDCD1-118
gguucuuagguagguggggu

SEQ ID NO: 16718 - RNA, 20 nt, Artificial Sequence
  Synthetic oligonucleotide: PDCD1-126
cgacuggccagggcgccugu

SEQ ID NO: 16719 - RNA, 17 nt, Artificial Sequence
  Synthetic oligonucleotide: PDCD1-2683
agagggggcgggagcaa

SEQ ID NO: 16720 - RNA, 17 nt, Artificial Sequence
  Synthetic oligonucleotide: PDCD1-3124
cagaggcuccgacagaa

SEQ ID NO: 16721 - RNA, 17 nt, Artificial Sequence
  Synthetic oligonucleotide: PDCD1-2642
gggaugggggaggagaa

SEQ ID NO: 16722 - RNA, 17 nt, Artificial Sequence
  Synthetic oligonucleotide: PDCD1-2657
gagacacagaggaggaa

SEQ ID NO: 16723 - RNA, 17 nt, Artificial Sequence
  Synthetic oligonucleotide: PDCD1-2540
ggcggaggugagcggaa

SEQ ID NO: 16724 - RNA, 17 nt, Artificial Sequence
  Synthetic oligonucleotide: PDCD1-2431
cagggacugagagugaa

SEQ ID NO: 16725 - RNA, 17 nt, Artificial Sequence
  Synthetic oligonucleotide: PDCD1-2544
ucccaggucagguugaa

SEQ ID NO: 16726 - RNA, 17 nt, Artificial Sequence
  Synthetic oligonucleotide: PDCD1-2420
cacacagcucaggguaa

SEQ ID NO: 16727 - RNA, 17 nt, Artificial Sequence
  Synthetic oligonucleotide: PDCD1-2576
agagagagacagagaca

SEQ ID NO: 16728 - RNA, 17 nt, Artificial Sequence
  Synthetic oligonucleotide: PDCD1-2662
agcuggggagaccccca

SEQ ID NO: 16729 - RNA, 17 nt, Artificial Sequence
  Synthetic oligonucleotide: PDCD1-2629
gggaggcccggccccca

SEQ ID NO: 16730 - RNA, 17 nt, Artificial Sequence
  Synthetic oligonucleotide: PDCD1-2490
cuggcccuggcagccca

SEQ ID NO: 16731 - RNA, 17 nt, Artificial Sequence
  Synthetic oligonucleotide: PDCD1-2472
caggugucccagagcca

SEQ ID NO: 16732 - RNA, 17 nt, Artificial Sequence
  Synthetic oligonucleotide: PDCD1-2426
ggcagagcugggggcca

SEQ ID NO: 16733 - RNA, 17 nt, Artificial Sequence
  Synthetic oligonucleotide: PDCD1-2671
guagggcgugggggcca

SEQ ID NO: 16734 - RNA, 17 nt, Artificial Sequence
  Synthetic oligonucleotide: PDCD1-2409
agaggggacuugggcca

SEQ ID NO: 16735 - RNA, 17 nt, Artificial Sequence
  Synthetic oligonucleotide: PDCD1-251
gcccagacgacuggcca

SEQ ID NO: 16736 - RNA, 17 nt, Artificial Sequence
  Synthetic oligonucleotide: PDCD1-2430
caccccccgaccugcca

SEQ ID NO: 16737 - RNA, 17 nt, Artificial Sequence
  Synthetic oligonucleotide: PDCD1-2437
ggaccccugggcugcca

SEQ ID NO: 16738 - RNA, 17 nt, Artificial Sequence
  Synthetic oligonucleotide: PDCD1-2682
aagagggggcgggagca

SEQ ID NO: 16739 - RNA, 17 nt, Artificial Sequence
  Synthetic oligonucleotide: PDCD1-2625
cccaccuuccccaggca

SEQ ID NO: 16740 - RNA, 17 nt, Artificial Sequence
  Synthetic oligonucleotide: PDCD1-2418
caaagccacacagcuca

SEQ ID NO: 16741 - RNA, 17 nt, Artificial Sequence
  Synthetic oligonucleotide: PDCD1-2591
ggggucuccccagcuca

SEQ ID NO: 16742 - RNA, 17 nt, Artificial Sequence
  Synthetic oligonucleotide: PDCD1-2404
cugcccaggagcaaaga

SEQ ID NO: 16743 - RNA, 17 nt, Artificial Sequence
  Synthetic oligonucleotide: PDCD1-2677
guggauguggaggaaga

SEQ ID NO: 16744 - RNA, 17 nt, Artificial Sequence
  Synthetic oligonucleotide: PDCD1-2620
aggaaccugagcccaga

SEQ ID NO: 16745 - RNA, 17 nt, Artificial Sequence
  Synthetic oligonucleotide: PDCD1-2578
cagggagacagaggaga

SEQ ID NO: 16746 - RNA, 17 nt, Artificial Sequence
  Synthetic oligonucleotide: PDCD1-2641
ggggaugggggaggaga

SEQ ID NO: 16747 - RNA, 17 nt, Artificial Sequence
  Synthetic oligonucleotide: PDCD1-2630
cccggcccccagggaga

SEQ ID NO: 16748 - RNA, 17 nt, Artificial Sequence
  Synthetic oligonucleotide: PDCD1-2568
ggguaggacuggggaga

SEQ ID NO: 16749 - RNA, 17 nt, Artificial Sequence
  Synthetic oligonucleotide: PDCD1-2690
cgccugagcaguggaga

SEQ ID NO: 16750 - RNA, 17 nt, Artificial Sequence
  Synthetic oligonucleotide: PDCD1-2399
ccaaggaccggcugaga

SEQ ID NO: 16751 - RNA, 17 nt, Artificial Sequence
  Synthetic oligonucleotide: PDCD1-2494
caggggucccggagcga

SEQ ID NO: 16752 - RNA, 17 nt, Artificial Sequence
  Synthetic oligonucleotide: PDCD1-239
ugggcuggcggccagga

SEQ ID NO: 16753 - RNA, 17 nt, Artificial Sequence
  Synthetic oligonucleotide: PDCD1-2646
acccggcagccucagga

SEQ ID NO: 16754 - RNA, 17 nt, Artificial Sequence
  Synthetic oligonucleotide: PDCD1-2656
agagacacagaggagga

SEQ ID NO: 16755 - RNA, 17 nt, Artificial Sequence
  Synthetic oligonucleotide: PDCD1-2556
gcagugcugggggagga

SEQ ID NO: 16756 - RNA, 17 nt, Artificial Sequence
  Synthetic oligonucleotide: PDCD1-2560
gggaggaggggugagga

SEQ ID NO: 16757 - RNA, 17 nt, Artificial Sequence
  Synthetic oligonucleotide: PDCD1-2539
aggcggaggugagcgga

SEQ ID NO: 16758 - RNA, 17 nt, Artificial Sequence
  Synthetic oligonucleotide: PDCD1-2546
aggucagguugaaggga

SEQ ID NO: 16759 - RNA, 17 nt, Artificial Sequence
  Synthetic oligonucleotide: PDCD1-2636
cagggagauggggggga

SEQ ID NO: 16760 - RNA, 17 nt, Artificial Sequence
  Synthetic oligonucleotide: PDCD1-2574
ggggagaggguggggga

SEQ ID NO: 16761 - RNA, 17 nt, Artificial Sequence
  Synthetic oligonucleotide: PDCD1-2610
gccucccugccugggga

SEQ ID NO: 16762 - RNA, 17 nt, Artificial Sequence
  Synthetic oligonucleotide: PDCD1-2476
agagccaggggucugga

SEQ ID NO: 16763 - RNA, 17 nt, Artificial Sequence
  Synthetic oligonucleotide: PDCD1-2498
ggagcgaggggucugga

SEQ ID NO: 16764 - RNA, 17 nt, Artificial Sequence
  Synthetic oligonucleotide: PDCD1-2444
cagggacugagggugga

SEQ ID NO: 16765 - RNA, 17 nt, Artificial Sequence
  Synthetic oligonucleotide: PDCD1-2442
gaccugccagggacuga

SEQ ID NO: 16766 - RNA, 17 nt, Artificial Sequence
  Synthetic oligonucleotide: PDCD1-4458
uuccugggcugcaguga

SEQ ID NO: 16767 - RNA, 17 nt, Artificial Sequence
  Synthetic oligonucleotide: PDCD1-2543
gucccaggucagguuga

SEQ ID NO: 16768 - RNA, 17 nt, Artificial Sequence
  Synthetic oligonucleotide: PDCD1-2419
ccacacagcucagggua

SEQ ID NO: 16769 - RNA, 17 nt, Artificial Sequence
  Synthetic oligonucleotide: PDCD1-2663
gcuggggagacccccac

SEQ ID NO: 16770 - RNA, 17 nt, Artificial Sequence
  Synthetic oligonucleotide: PDCD1-229
aggcaugcagaucccac

SEQ ID NO: 16771 - RNA, 17 nt, Artificial Sequence
  Synthetic oligonucleotide: PDCD1-2672
uagggcgugggggccac

SEQ ID NO: 16772 - RNA, 17 nt, Artificial Sequence
  Synthetic oligonucleotide: PDCD1-2575
gagagagagacagagac

SEQ ID NO: 16773 - RNA, 17 nt, Artificial Sequence
  Synthetic oligonucleotide: PDCD1-2397
cacgcagccccaaggac

SEQ ID NO: 16774 - RNA, 17 nt, Artificial Sequence
  Synthetic oligonucleotide: PDCD1-2564
ugaggaggggguaggac

SEQ ID NO: 16775 - RNA, 17 nt, Artificial Sequence
  Synthetic oligonucleotide: PDCD1-2643
aagggccugcccccacc

SEQ ID NO: 16776 - RNA, 17 nt, Artificial Sequence
  Synthetic oligonucleotide: PDCD1-2687
cucccuucaaccugacc

SEQ ID NO: 16777 - RNA, 17 nt, Artificial Sequence
  Synthetic oligonucleotide: PDCD1-2416
ggcccagagaggaaccc

SEQ ID NO: 16778 - RNA, 17 nt, Artificial Sequence
  Synthetic oligonucleotide: PDCD1-2445
aggucccuccagacccc

SEQ ID NO: 16779 - RNA, 17 nt, Artificial Sequence
  Synthetic oligonucleotide: PDCD1-2434
ccucgcuccgggacccc

SEQ ID NO: 16780 - RNA, 17 nt, Artificial Sequence
  Synthetic oligonucleotide: PDCD1-2628
agggaggcccggccccc

SEQ ID NO: 16781 - RNA, 17 nt, Artificial Sequence
  Synthetic oligonucleotide: PDCD1-2516
ggccccaacuccucccc

SEQ ID NO: 16782 - RNA, 17 nt, Artificial Sequence
  Synthetic oligonucleotide: PDCD1-2623
ggccacccaccuucccc

SEQ ID NO: 16783 - RNA, 17 nt, Artificial Sequence
  Synthetic oligonucleotide: PDCD1-2489
ccuggcccuggcagccc

SEQ ID NO: 16784 - RNA, 17 nt, Artificial Sequence
  Synthetic oligonucleotide: PDCD1-4459
accccucacugcagccc

SEQ ID NO: 16785 - RNA, 17 nt, Artificial Sequence
  Synthetic oligonucleotide: PDCD1-230
agaucccacaggcgccc

SEQ ID NO: 16786 - RNA, 17 nt, Artificial Sequence
  Synthetic oligonucleotide: PDCD1-2488
ugaggcgggccuggccc

SEQ ID NO: 16787 - RNA, 17 nt, Artificial Sequence
  Synthetic oligonucleotide: PDCD1-2402
agagguccugccugccc

SEQ ID NO: 16788 - RNA, 17 nt, Artificial Sequence
  Synthetic oligonucleotide: PDCD1-2601
caucccccccaucuccc

SEQ ID NO: 16789 - RNA, 17 nt, Artificial Sequence
  Synthetic oligonucleotide: PDCD1-2477
cuuccacccucaguccc

SEQ ID NO: 16790 - RNA, 17 nt, Artificial Sequence
  Synthetic oligonucleotide: PDCD1-2499
cuuucacucucaguccc

SEQ ID NO: 16791 - RNA, 17 nt, Artificial Sequence
  Synthetic oligonucleotide: PDCD1-2541
ggaagggaaacuguccc

SEQ ID NO: 16792 - RNA, 17 nt, Artificial Sequence
  Synthetic oligonucleotide: PDCD1-3127
agaggcugugggcagcc

SEQ ID NO: 16793 - RNA, 17 nt, Artificial Sequence
  Synthetic oligonucleotide: PDCD1-2471
ucaggugucccagagcc

SEQ ID NO: 16794 - RNA, 17 nt, Artificial Sequence
  Synthetic oligonucleotide: PDCD1-2627
ccccaggcagggaggcc

SEQ ID NO: 16795 - RNA, 17 nt, Artificial Sequence
  Synthetic oligonucleotide: PDCD1-238
caacugggcuggcggcc

SEQ ID NO: 16796 - RNA, 17 nt, Artificial Sequence
  Synthetic oligonucleotide: PDCD1-2438
ccugggcugccagggcc

SEQ ID NO: 16797 - RNA, 17 nt, Artificial Sequence
  Synthetic oligonucleotide: PDCD1-2487
gggugcugaggcgggcc

SEQ ID NO: 16798 - RNA, 17 nt, Artificial Sequence
  Synthetic oligonucleotide: PDCD1-2606
ccaucucccugggggcc

SEQ ID NO: 16799 - RNA, 17 nt, Artificial Sequence
  Synthetic oligonucleotide: PDCD1-2408
aagaggggacuugggcc

SEQ ID NO: 16800 - RNA, 17 nt, Artificial Sequence
  Synthetic oligonucleotide: PDCD1-254
ugugggaucugcaugcc

SEQ ID NO: 16801 - RNA, 17 nt, Artificial Sequence
  Synthetic oligonucleotide: PDCD1-2429
gcaccccccgaccugcc

SEQ ID NO: 16802 - RNA, 17 nt, Artificial Sequence
  Synthetic oligonucleotide: PDCD1-2607
ggccgggccucccugcc

SEQ ID NO: 16803 - RNA, 17 nt, Artificial Sequence
  Synthetic oligonucleotide: PDCD1-2595
ccccuccugaggcugcc

SEQ ID NO: 16804 - RNA, 17 nt, Artificial Sequence
  Synthetic oligonucleotide: PDCD1-2436
gggaccccugggcugcc

SEQ ID NO: 16805 - RNA, 17 nt, Artificial Sequence
  Synthetic oligonucleotide: PDCD1-2512
ugggcagcucgaacucc

SEQ ID NO: 16806 - RNA, 17 nt, Artificial Sequence
  Synthetic oligonucleotide: PDCD1-2890
agccucugggagccucc

SEQ ID NO: 16807 - RNA, 17 nt, Artificial Sequence
  Synthetic oligonucleotide: PDCD1-2433
uccagaccccucgcucc

SEQ ID NO: 16808 - RNA, 17 nt, Artificial Sequence
  Synthetic oligonucleotide: PDCD1-228
ucugguggggcugcucc

SEQ ID NO: 16809 - RNA, 17 nt, Artificial Sequence
  Synthetic oligonucleotide: PDCD1-2517
aguccccucuuugcucc

SEQ ID NO: 16810 - RNA, 17 nt, Artificial Sequence
  Synthetic oligonucleotide: PDCD1-2492
uggcagcccaggggucc

SEQ ID NO: 16811 - RNA, 17 nt, Artificial Sequence
  Synthetic oligonucleotide: PDCD1-2617
cucugggcucagguucc

SEQ ID NO: 16812 - RNA, 17 nt, Artificial Sequence
  Synthetic oligonucleotide: PDCD1-2521
cucuguccccucucagc

SEQ ID NO: 16813 - RNA, 17 nt, Artificial Sequence
  Synthetic oligonucleotide: PDCD1-2422
aggguaaggggcagagc

SEQ ID NO: 16814 - RNA, 17 nt, Artificial Sequence
  Synthetic oligonucleotide: PDCD1-2659
aggaaggggcccugagc

SEQ ID NO: 16815 - RNA, 17 nt, Artificial Sequence
  Synthetic oligonucleotide: PDCD1-2427
gagcugggggccaaggc

SEQ ID NO: 16816 - RNA, 17 nt, Artificial Sequence
  Synthetic oligonucleotide: PDCD1-2624
acccaccuuccccaggc

SEQ ID NO: 16817 - RNA, 17 nt, Artificial Sequence
  Synthetic oligonucleotide: PDCD1-2520
uuugcuccugggcaggc

SEQ ID NO: 16818 - RNA, 17 nt, Artificial Sequence
  Synthetic oligonucleotide: PDCD1-2486
ucggggggugcugaggc

SEQ ID NO: 16819 - RNA, 17 nt, Artificial Sequence
  Synthetic oligonucleotide: PDCD1-2651
ggaggggcagcucgggc

SEQ ID NO: 16820 - RNA, 17 nt, Artificial Sequence
  Synthetic oligonucleotide: PDCD1-2686
gggcgggagcaaggggc

SEQ ID NO: 16821 - RNA, 17 nt, Artificial Sequence
  Synthetic oligonucleotide: PDCD1-2681
guggaggaagagggggc

SEQ ID NO: 16822 - RNA, 17 nt, Artificial Sequence
  Synthetic oligonucleotide: PDCD1-2605
cccaucucccugggggc

SEQ ID NO: 16823 - RNA, 17 nt, Artificial Sequence
  Synthetic oligonucleotide: PDCD1-2600
ggcugccgggugggggc

SEQ ID NO: 16824 - RNA, 17 nt, Artificial Sequence
  Synthetic oligonucleotide: PDCD1-236
cggugcuacaacugggc

SEQ ID NO: 16825 - RNA, 17 nt, Artificial Sequence
  Synthetic oligonucleotide: PDCD1-2519
ccucuuugcuccugggc

SEQ ID NO: 16826 - RNA, 17 nt, Artificial Sequence
  Synthetic oligonucleotide: PDCD1-2478
cacccucagucccuggc

SEQ ID NO: 16827 - RNA, 17 nt, Artificial Sequence
  Synthetic oligonucleotide: PDCD1-2500
cacucucagucccuggc

SEQ ID NO: 16828 - RNA, 17 nt, Artificial Sequence
  Synthetic oligonucleotide: PDCD1-2507
ucggggggugcuguggc

SEQ ID NO: 16829 - RNA, 17 nt, Artificial Sequence
  Synthetic oligonucleotide: PDCD1-2594
gccccuccugaggcugc

SEQ ID NO: 16830 - RNA, 17 nt, Artificial Sequence
  Synthetic oligonucleotide: PDCD1-2550
agugacagaggcagugc

SEQ ID NO: 16831 - RNA, 17 nt, Artificial Sequence
  Synthetic oligonucleotide: PDCD1-2692
uggagaaggcggcacuc

SEQ ID NO: 16832 - RNA, 17 nt, Artificial Sequence
  Synthetic oligonucleotide: PDCD1-2614
agguggguggcccccuc

SEQ ID NO: 16833 - RNA, 17 nt, Artificial Sequence
  Synthetic oligonucleotide: PDCD1-2644
ccccacccggcagccuc

SEQ ID NO: 16834 - RNA, 17 nt, Artificial Sequence
  Synthetic oligonucleotide: PDCD1-2417
ccaaagccacacagcuc

SEQ ID NO: 16835 - RNA, 17 nt, Artificial Sequence
  Synthetic oligonucleotide: PDCD1-2590
gggggucuccccagcuc

SEQ ID NO: 16836 - RNA, 17 nt, Artificial Sequence
  Synthetic oligonucleotide: PDCD1-2649
cucaggaggggcagcuc

SEQ ID NO: 16837 - RNA, 17 nt, Artificial Sequence
  Synthetic oligonucleotide: PDCD1-2432
cuccagaccccucgcuc

SEQ ID NO: 16838 - RNA, 17 nt, Artificial Sequence
  Synthetic oligonucleotide: PDCD1-2616
uggcccccucugggcuc

SEQ ID NO: 16839 - RNA, 17 nt, Artificial Sequence
  Synthetic oligonucleotide: PDCD1-2446
cuccagaccccuggcuc

SEQ ID NO: 16840 - RNA, 17 nt, Artificial Sequence
  Synthetic oligonucleotide: PDCD1-2535
cgccuucuccacugcuc

SEQ ID NO: 16841 - RNA, 17 nt, Artificial Sequence
  Synthetic oligonucleotide: PDCD1-2514
acuccuggguuccucuc

SEQ ID NO: 16842 - RNA, 17 nt, Artificial Sequence
  Synthetic oligonucleotide: PDCD1-2542
ggaaacugucccagguc

SEQ ID NO: 16843 - RNA, 17 nt, Artificial Sequence
  Synthetic oligonucleotide: PDCD1-2480
ucagucccuggcagguc

SEQ ID NO: 16844 - RNA, 17 nt, Artificial Sequence
  Synthetic oligonucleotide: PDCD1-247
agguggggucggcgguc

SEQ ID NO: 16845 - RNA, 17 nt, Artificial Sequence
  Synthetic oligonucleotide: PDCD1-2474
ucccagagccagggguc

SEQ ID NO: 16846 - RNA, 17 nt, Artificial Sequence
  Synthetic oligonucleotide: PDCD1-2403
ccugcccaggagcaaag

SEQ ID NO: 16847 - RNA, 17 nt, Artificial Sequence
  Synthetic oligonucleotide: PDCD1-2653
gggcgggauauggaaag

SEQ ID NO: 16848 - RNA, 17 nt, Artificial Sequence
  Synthetic oligonucleotide: PDCD1-2684
gagggggcgggagcaag

SEQ ID NO: 16849 - RNA, 17 nt, Artificial Sequence
  Synthetic oligonucleotide: PDCD1-2658
agacacagaggaggaag

SEQ ID NO: 16850 - RNA, 17 nt, Artificial Sequence
  Synthetic oligonucleotide: PDCD1-2676
cguggauguggaggaag

SEQ ID NO: 16851 - RNA, 17 nt, Artificial Sequence
  Synthetic oligonucleotide: PDCD1-2421
acacagcucaggguaag

SEQ ID NO: 16852 - RNA, 17 nt, Artificial Sequence
  Synthetic oligonucleotide: PDCD1-2654
agugagcagagacacag

SEQ ID NO: 16853 - RNA, 17 nt, Artificial Sequence
  Synthetic oligonucleotide: PDCD1-2577
cagagacagggagacag

SEQ ID NO: 16854 - RNA, 17 nt, Artificial Sequence
  Synthetic oligonucleotide: PDCD1-2401
cggcugagaggggacag

SEQ ID NO: 16855 - RNA, 17 nt, Artificial Sequence
  Synthetic oligonucleotide: PDCD1-2549
gugggcgagagugacag

SEQ ID NO: 16856 - RNA, 17 nt, Artificial Sequence
  Synthetic oligonucleotide: PDCD1-2491
uggcccuggcagcccag

SEQ ID NO: 16857 - RNA, 17 nt, Artificial Sequence
  Synthetic oligonucleotide: PDCD1-2619
caggaaccugagcccag

SEQ ID NO: 16858 - RNA, 17 nt, Artificial Sequence
  Synthetic oligonucleotide: PDCD1-3125
agccgggaggcucccag

SEQ ID NO: 16859 - RNA, 17 nt, Artificial Sequence
  Synthetic oligonucleotide: PDCD1-2473
aggugucccagagccag

SEQ ID NO: 16860 - RNA, 17 nt, Artificial Sequence
  Synthetic oligonucleotide: PDCD1-2410
gaggggacuugggccag

SEQ ID NO: 16861 - RNA, 17 nt, Artificial Sequence
  Synthetic oligonucleotide: PDCD1-2689
caccuccgccugagcag

SEQ ID NO: 16862 - RNA, 17 nt, Artificial Sequence
  Synthetic oligonucleotide: PDCD1-2405
ugcccaggagcaaagag

SEQ ID NO: 16863 - RNA, 17 nt, Artificial Sequence
  Synthetic oligonucleotide: PDCD1-2678
uggauguggaggaagag

SEQ ID NO: 16864 - RNA, 17 nt, Artificial Sequence
  Synthetic oligonucleotide: PDCD1-2621
ggaaccugagcccagag

SEQ ID NO: 16865 - RNA, 17 nt, Artificial Sequence
  Synthetic oligonucleotide: PDCD1-2415
ggaguuggggcccagag

SEQ ID NO: 16866 - RNA, 17 nt, Artificial Sequence
  Synthetic oligonucleotide: PDCD1-2400
caaggaccggcugagag

SEQ ID NO: 16867 - RNA, 17 nt, Artificial Sequence
  Synthetic oligonucleotide: PDCD1-2495
aggggucccggagcgag

SEQ ID NO: 16868 - RNA, 17 nt, Artificial Sequence
  Synthetic oligonucleotide: PDCD1-2647
cccggcagccucaggag

SEQ ID NO: 16869 - RNA, 17 nt, Artificial Sequence
  Synthetic oligonucleotide: PDCD1-2557
cagugcugggggaggag

SEQ ID NO: 16870 - RNA, 17 nt, Artificial Sequence
  Synthetic oligonucleotide: PDCD1-2561
ggaggaggggugaggag

SEQ ID NO: 16871 - RNA, 17 nt, Artificial Sequence
  Synthetic oligonucleotide: PDCD1-2567
gggguaggacuggggag

SEQ ID NO: 16872 - RNA, 17 nt, Artificial Sequence
  Synthetic oligonucleotide: PDCD1-3122
cuccgacagaaugggag

SEQ ID NO: 16873 - RNA, 17 nt, Artificial Sequence
  Synthetic oligonucleotide: PDCD1-2398
cccaaggaccggcugag

SEQ ID NO: 16874 - RNA, 17 nt, Artificial Sequence
  Synthetic oligonucleotide: PDCD1-4460
uccugggcugcagugag

SEQ ID NO: 16875 - RNA, 17 nt, Artificial Sequence
  Synthetic oligonucleotide: PDCD1-2538
gcucaggcggaggugag

SEQ ID NO: 16876 - RNA, 17 nt, Artificial Sequence
  Synthetic oligonucleotide: PDCD1-2664
cuggggagacccccacg

SEQ ID NO: 16877 - RNA, 17 nt, Artificial Sequence
  Synthetic oligonucleotide: PDCD1-2547
cuuccuccacauccacg

SEQ ID NO: 16878 - RNA, 17 nt, Artificial Sequence
  Synthetic oligonucleotide: PDCD1-2586
ccccacgcccuaccccg

SEQ ID NO: 16879 - RNA, 17 nt, Artificial Sequence
  Synthetic oligonucleotide: PDCD1-2585
gggaggaggugggcccg

SEQ ID NO: 16880 - RNA, 17 nt, Artificial Sequence
  Synthetic oligonucleotide: PDCD1-2493
ccaggggucccggagcg

SEQ ID NO: 16881 - RNA, 17 nt, Artificial Sequence
  Synthetic oligonucleotide: PDCD1-2667
ccccacgggguagggcg

SEQ ID NO: 16882 - RNA, 17 nt, Artificial Sequence
  Synthetic oligonucleotide: PDCD1-2481
cagucccuggcaggucg

SEQ ID NO: 16883 - RNA, 17 nt, Artificial Sequence
  Synthetic oligonucleotide: PDCD1-2691
cugagcaguggagaagg

SEQ ID NO: 16884 - RNA, 17 nt, Artificial Sequence
  Synthetic oligonucleotide: PDCD1-2611
ucccugccuggggaagg

SEQ ID NO: 16885 - RNA, 17 nt, Artificial Sequence
  Synthetic oligonucleotide: PDCD1-2645
cacccggcagccucagg

SEQ ID NO: 16886 - RNA, 17 nt, Artificial Sequence
  Synthetic oligonucleotide: PDCD1-2536
cuucuccacugcucagg

SEQ ID NO: 16887 - RNA, 17 nt, Artificial Sequence
  Synthetic oligonucleotide: PDCD1-2679
ggauguggaggaagagg

SEQ ID NO: 16888 - RNA, 17 nt, Artificial Sequence
  Synthetic oligonucleotide: PDCD1-2655
gagcagagacacagagg

SEQ ID NO: 16889 - RNA, 17 nt, Artificial Sequence
  Synthetic oligonucleotide: PDCD1-2622
gaaccugagcccagagg

SEQ ID NO: 16890 - RNA, 17 nt, Artificial Sequence
  Synthetic oligonucleotide: PDCD1-2583
aggagauggggaggagg

SEQ ID NO: 16891 - RNA, 17 nt, Artificial Sequence
  Synthetic oligonucleotide: PDCD1-2562
gaggaggggugaggagg

SEQ ID NO: 16892 - RNA, 17 nt, Artificial Sequence
  Synthetic oligonucleotide: PDCD1-2555
ggcagugcugggggagg

SEQ ID NO: 16893 - RNA, 17 nt, Artificial Sequence
  Synthetic oligonucleotide: PDCD1-2582
cagaggagauggggagg

SEQ ID NO: 16894 - RNA, 17 nt, Artificial Sequence
  Synthetic oligonucleotide: PDCD1-2485
gucggggggugcugagg

SEQ ID NO: 16895 - RNA, 17 nt, Artificial Sequence
  Synthetic oligonucleotide: PDCD1-2559
ggggaggaggggugagg

SEQ ID NO: 16896 - RNA, 17 nt, Artificial Sequence
  Synthetic oligonucleotide: PDCD1-242
gaugguucuuagguagg

SEQ ID NO: 16897 - RNA, 17 nt, Artificial Sequence
  Synthetic oligonucleotide: PDCD1-2537
cuccacugcucaggcgg

SEQ ID NO: 16898 - RNA, 17 nt, Artificial Sequence
  Synthetic oligonucleotide: PDCD1-2482
agucccuggcaggucgg

SEQ ID NO: 16899 - RNA, 17 nt, Artificial Sequence
  Synthetic oligonucleotide: PDCD1-246
uagguagguggggucgg

SEQ ID NO: 16900 - RNA, 17 nt, Artificial Sequence
  Synthetic oligonucleotide: PDCD1-2545
caggucagguugaaggg

SEQ ID NO: 16901 - RNA, 17 nt, Artificial Sequence
  Synthetic oligonucleotide: PDCD1-2626
accuuccccaggcaggg

SEQ ID NO: 16902 - RNA, 17 nt, Artificial Sequence
  Synthetic oligonucleotide: PDCD1-2569
uaggacuggggagaggg

SEQ ID NO: 16903 - RNA, 17 nt, Artificial Sequence
  Synthetic oligonucleotide: PDCD1-2443
cugccagggacugaggg

SEQ ID NO: 16904 - RNA, 17 nt, Artificial Sequence
  Synthetic oligonucleotide: PDCD1-3126
ggcugugggcagccggg

SEQ ID NO: 16905 - RNA, 17 nt, Artificial Sequence
  Synthetic oligonucleotide: PDCD1-2596
cuccugaggcugccggg

SEQ ID NO: 16906 - RNA, 17 nt, Artificial Sequence
  Synthetic oligonucleotide: PDCD1-2650
aggaggggcagcucggg

SEQ ID NO: 16907 - RNA, 17 nt, Artificial Sequence
  Synthetic oligonucleotide: PDCD1-2483
gucccuggcaggucggg

SEQ ID NO: 16908 - RNA, 17 nt, Artificial Sequence
  Synthetic oligonucleotide: PDCD1-2685
ggggcgggagcaagggg

SEQ ID NO: 16909 - RNA, 17 nt, Artificial Sequence
  Synthetic oligonucleotide: PDCD1-2411
gggacuugggccagggg

SEQ ID NO: 16910 - RNA, 17 nt, Artificial Sequence
  Synthetic oligonucleotide: PDCD1-4461
ugggcugcagugagggg

SEQ ID NO: 16911 - RNA, 17 nt, Artificial Sequence
  Synthetic oligonucleotide: PDCD1-2680
uguggaggaagaggggg

SEQ ID NO: 16912 - RNA, 17 nt, Artificial Sequence
  Synthetic oligonucleotide: PDCD1-2640
gaugggggggauggggg

SEQ ID NO: 16913 - RNA, 17 nt, Artificial Sequence
  Synthetic oligonucleotide: PDCD1-2554
agaggcagugcuggggg

SEQ ID NO: 16914 - RNA, 17 nt, Artificial Sequence
  Synthetic oligonucleotide: PDCD1-2573
uggggagaggguggggg

SEQ ID NO: 16915 - RNA, 17 nt, Artificial Sequence
  Synthetic oligonucleotide: PDCD1-2581
agacagaggagaugggg

SEQ ID NO: 16916 - RNA, 17 nt, Artificial Sequence
  Synthetic oligonucleotide: PDCD1-2635
cccccagggagaugggg

SEQ ID NO: 16917 - RNA, 17 nt, Artificial Sequence
  Synthetic oligonucleotide: PDCD1-2634
gcccccagggagauggg

SEQ ID NO: 16918 - RNA, 17 nt, Artificial Sequence
  Synthetic oligonucleotide: PDCD1-233
cuggccagucgucuggg

SEQ ID NO: 16919 - RNA, 17 nt, Artificial Sequence
  Synthetic oligonucleotide: PDCD1-2613
ugccuggggaagguggg

SEQ ID NO: 16920 - RNA, 17 nt, Artificial Sequence
  Synthetic oligonucleotide: PDCD1-2633
ggcccccagggagaugg

SEQ ID NO: 16921 - RNA, 17 nt, Artificial Sequence
  Synthetic oligonucleotide: PDCD1-2639
ggagaugggggggaugg

SEQ ID NO: 16922 - RNA, 17 nt, Artificial Sequence
  Synthetic oligonucleotide: PDCD1-2604
cccccccaucucccugg

SEQ ID NO: 16923 - RNA, 17 nt, Artificial Sequence
  Synthetic oligonucleotide: PDCD1-2425
guaaggggcagagcugg

SEQ ID NO: 16924 - RNA, 17 nt, Artificial Sequence
  Synthetic oligonucleotide: PDCD1-237
ugcuacaacugggcugg

SEQ ID NO: 16925 - RNA, 17 nt, Artificial Sequence
  Synthetic oligonucleotide: PDCD1-2553
gacagaggcagugcugg

SEQ ID NO: 16926 - RNA, 17 nt, Artificial Sequence
  Synthetic oligonucleotide: PDCD1-2693
agaaggcggcacucugg

SEQ ID NO: 16927 - RNA, 17 nt, Artificial Sequence
  Synthetic oligonucleotide: PDCD1-2475
cagagccaggggucugg

SEQ ID NO: 16928 - RNA, 17 nt, Artificial Sequence
  Synthetic oligonucleotide: PDCD1-2497
cggagcgaggggucugg

SEQ ID NO: 16929 - RNA, 17 nt, Artificial Sequence
  Synthetic oligonucleotide: PDCD1-2670
cacgggguagggcgugg

SEQ ID NO: 16930 - RNA, 17 nt, Artificial Sequence
  Synthetic oligonucleotide: PDCD1-2572
gacuggggagagggugg

SEQ ID NO: 16931 - RNA, 17 nt, Artificial Sequence
  Synthetic oligonucleotide: PDCD1-2599
cugaggcugccgggugg

SEQ ID NO: 16932 - RNA, 17 nt, Artificial Sequence
  Synthetic oligonucleotide: PDCD1-2580
gggagacagaggagaug

SEQ ID NO: 16933 - RNA, 17 nt, Artificial Sequence
  Synthetic oligonucleotide: PDCD1-2632
cggcccccagggagaug

SEQ ID NO: 16934 - RNA, 17 nt, Artificial Sequence
  Synthetic oligonucleotide: PDCD1-2638
gggagaugggggggaug

SEQ ID NO: 16935 - RNA, 17 nt, Artificial Sequence
  Synthetic oligonucleotide: PDCD1-2566
aggaggggguaggacug

SEQ ID NO: 16936 - RNA, 17 nt, Artificial Sequence
  Synthetic oligonucleotide: PDCD1-2441
cgaccugccagggacug

SEQ ID NO: 16937 - RNA, 17 nt, Artificial Sequence
  Synthetic oligonucleotide: PDCD1-2603
ucccccccaucucccug

SEQ ID NO: 16938 - RNA, 17 nt, Artificial Sequence
  Synthetic oligonucleotide: PDCD1-252
acuggccagggcgccug

SEQ ID NO: 16939 - RNA, 17 nt, Artificial Sequence
  Synthetic oligonucleotide: PDCD1-2609
ccgggccucccugccug

SEQ ID NO: 16940 - RNA, 17 nt, Artificial Sequence
  Synthetic oligonucleotide: PDCD1-2593
ccgagcugccccuccug

SEQ ID NO: 16941 - RNA, 17 nt, Artificial Sequence
  Synthetic oligonucleotide: PDCD1-2424
gguaaggggcagagcug

SEQ ID NO: 16942 - RNA, 17 nt, Artificial Sequence
  Synthetic oligonucleotide: PDCD1-2661
gaaggggcccugagcug

SEQ ID NO: 16943 - RNA, 17 nt, Artificial Sequence
  Synthetic oligonucleotide: PDCD1-2592
gucucugcucacugcug

SEQ ID NO: 16944 - RNA, 17 nt, Artificial Sequence
  Synthetic oligonucleotide: PDCD1-2552
ugacagaggcagugcug

SEQ ID NO: 16945 - RNA, 17 nt, Artificial Sequence
  Synthetic oligonucleotide: PDCD1-4462
guuccugggcugcagug

SEQ ID NO: 16946 - RNA, 17 nt, Artificial Sequence
  Synthetic oligonucleotide: PDCD1-2588
ccacgcccuaccccgug

SEQ ID NO: 16947 - RNA, 17 nt, Artificial Sequence
  Synthetic oligonucleotide: PDCD1-244
ugguucuuagguaggug

SEQ ID NO: 16948 - RNA, 17 nt, Artificial Sequence
  Synthetic oligonucleotide: PDCD1-2571
ggacuggggagagggug

SEQ ID NO: 16949 - RNA, 17 nt, Artificial Sequence
  Synthetic oligonucleotide: PDCD1-2598
ccugaggcugccgggug

SEQ ID NO: 16950 - RNA, 17 nt, Artificial Sequence
  Synthetic oligonucleotide: PDCD1-2558
cugggggaggaggggug

SEQ ID NO: 16951 - RNA, 17 nt, Artificial Sequence
  Synthetic oligonucleotide: PDCD1-2695
aaggcggcacucuggug

SEQ ID NO: 16952 - RNA, 17 nt, Artificial Sequence
  Synthetic oligonucleotide: PDCD1-2509
ccuuacccugagcugug

SEQ ID NO: 16953 - RNA, 17 nt, Artificial Sequence
  Synthetic oligonucleotide: PDCD1-2524
cucucagccgguccuug

SEQ ID NO: 16954 - RNA, 17 nt, Artificial Sequence
  Synthetic oligonucleotide: PDCD1-2414
ggccaggggaggaguug

SEQ ID NO: 16955 - RNA, 17 nt, Artificial Sequence
  Synthetic oligonucleotide: PDCD1-2579
agggagacagaggagau

SEQ ID NO: 16956 - RNA, 17 nt, Artificial Sequence
  Synthetic oligonucleotide: PDCD1-2631
ccggcccccagggagau

SEQ ID NO: 16957 - RNA, 17 nt, Artificial Sequence
  Synthetic oligonucleotide: PDCD1-2637
agggagaugggggggau

SEQ ID NO: 16958 - RNA, 17 nt, Artificial Sequence
  Synthetic oligonucleotide: PDCD1-235
ugggcggugcuacaacu

SEQ ID NO: 16959 - RNA, 17 nt, Artificial Sequence
  Synthetic oligonucleotide: PDCD1-2565
gaggaggggguaggacu

SEQ ID NO: 16960 - RNA, 17 nt, Artificial Sequence
  Synthetic oligonucleotide: PDCD1-2406
ggagcaaagaggggacu

SEQ ID NO: 16961 - RNA, 17 nt, Artificial Sequence
  Synthetic oligonucleotide: PDCD1-2688
ucccuucaaccugaccu

SEQ ID NO: 16962 - RNA, 17 nt, Artificial Sequence
  Synthetic oligonucleotide: PDCD1-2435
cucgcuccgggaccccu

SEQ ID NO: 16963 - RNA, 17 nt, Artificial Sequence
  Synthetic oligonucleotide: PDCD1-2602
aucccccccaucucccu

SEQ ID NO: 16964 - RNA, 17 nt, Artificial Sequence
  Synthetic oligonucleotide: PDCD1-2508
uguggcaggcccagccu

SEQ ID NO: 16965 - RNA, 17 nt, Artificial Sequence
  Synthetic oligonucleotide: PDCD1-2608
gccgggccucccugccu

SEQ ID NO: 16966 - RNA, 17 nt, Artificial Sequence
  Synthetic oligonucleotide: PDCD1-2513
gggcagcucgaacuccu

SEQ ID NO: 16967 - RNA, 17 nt, Artificial Sequence
  Synthetic oligonucleotide: PDCD1-2518
guccccucuuugcuccu

SEQ ID NO: 16968 - RNA, 17 nt, Artificial Sequence
  Synthetic oligonucleotide: PDCD1-2522
cccucucagccgguccu

SEQ ID NO: 16969 - RNA, 17 nt, Artificial Sequence
  Synthetic oligonucleotide: PDCD1-2618
ucugggcucagguuccu

SEQ ID NO: 16970 - RNA, 17 nt, Artificial Sequence
  Synthetic oligonucleotide: PDCD1-2648
ccucaggaggggcagcu

SEQ ID NO: 16971 - RNA, 17 nt, Artificial Sequence
  Synthetic oligonucleotide: PDCD1-2423
ggguaaggggcagagcu

SEQ ID NO: 16972 - RNA, 17 nt, Artificial Sequence
  Synthetic oligonucleotide: PDCD1-2660
ggaaggggcccugagcu

SEQ ID NO: 16973 - RNA, 17 nt, Artificial Sequence
  Synthetic oligonucleotide: PDCD1-2428
agcugggggccaaggcu

SEQ ID NO: 16974 - RNA, 17 nt, Artificial Sequence
  Synthetic oligonucleotide: PDCD1-2551
gugacagaggcagugcu

SEQ ID NO: 16975 - RNA, 17 nt, Artificial Sequence
  Synthetic oligonucleotide: PDCD1-2615
gguggguggcccccucu

SEQ ID NO: 16976 - RNA, 17 nt, Artificial Sequence
  Synthetic oligonucleotide: PDCD1-2889
auucugucggagccucu

SEQ ID NO: 16977 - RNA, 17 nt, Artificial Sequence
  Synthetic oligonucleotide: PDCD1-2447
uccagaccccuggcucu

SEQ ID NO: 16978 - RNA, 17 nt, Artificial Sequence
  Synthetic oligonucleotide: PDCD1-2515
cuccuggguuccucucu

SEQ ID NO: 16979 - RNA, 17 nt, Artificial Sequence
  Synthetic oligonucleotide: PDCD1-232
gcccuggccagucgucu

SEQ ID NO: 16980 - RNA, 17 nt, Artificial Sequence
  Synthetic oligonucleotide: PDCD1-2412
ugggccaggggaggagu

SEQ ID NO: 16981 - RNA, 17 nt, Artificial Sequence
  Synthetic oligonucleotide: PDCD1-2548
uuccuccacauccacgu

SEQ ID NO: 16982 - RNA, 17 nt, Artificial Sequence
  Synthetic oligonucleotide: PDCD1-2587
cccacgcccuaccccgu

SEQ ID NO: 16983 - RNA, 17 nt, Artificial Sequence
  Synthetic oligonucleotide: PDCD1-2668
cccacgggguagggcgu

SEQ ID NO: 16984 - RNA, 17 nt, Artificial Sequence
  Synthetic oligonucleotide: PDCD1-2612
cccugccuggggaaggu

SEQ ID NO: 16985 - RNA, 17 nt, Artificial Sequence
  Synthetic oligonucleotide: PDCD1-2479
cucagucccuggcaggu

SEQ ID NO: 16986 - RNA, 17 nt, Artificial Sequence
  Synthetic oligonucleotide: PDCD1-2584
ggagauggggaggaggu

SEQ ID NO: 16987 - RNA, 17 nt, Artificial Sequence
  Synthetic oligonucleotide: PDCD1-243
augguucuuagguaggu

SEQ ID NO: 16988 - RNA, 17 nt, Artificial Sequence
  Synthetic oligonucleotide: PDCD1-241
caggaugguucuuaggu

SEQ ID NO: 16989 - RNA, 17 nt, Artificial Sequence
  Synthetic oligonucleotide: PDCD1-2570
aggacuggggagagggu

SEQ ID NO: 16990 - RNA, 17 nt, Artificial Sequence
  Synthetic oligonucleotide: PDCD1-2597
uccugaggcugccgggu

SEQ ID NO: 16991 - RNA, 17 nt, Artificial Sequence
  Synthetic oligonucleotide: PDCD1-4463
gggcugcagugaggggu

SEQ ID NO: 16992 - RNA, 17 nt, Artificial Sequence
  Synthetic oligonucleotide: PDCD1-2665
ggagacccccacggggu

SEQ ID NO: 16993 - RNA, 17 nt, Artificial Sequence
  Synthetic oligonucleotide: PDCD1-2563
aggggugaggagggggu

SEQ ID NO: 16994 - RNA, 17 nt, Artificial Sequence
  Synthetic oligonucleotide: PDCD1-245
ucuuagguagguggggu

SEQ ID NO: 16995 - RNA, 17 nt, Artificial Sequence
  Synthetic oligonucleotide: PDCD1-2694
gaaggcggcacucuggu

SEQ ID NO: 16996 - RNA, 17 nt, Artificial Sequence
  Synthetic oligonucleotide: PDCD1-253
cuggccagggcgccugu

SEQ ID NO: 16997 - RNA, 17 nt, Artificial Sequence
  Synthetic oligonucleotide: PDCD1-2887
ccccacucccauucugu

SEQ ID NO: 16998 - RNA, 17 nt, Artificial Sequence
  Synthetic oligonucleotide: PDCD1-2407
gagcaaagaggggacuu

SEQ ID NO: 16999 - RNA, 17 nt, Artificial Sequence
  Synthetic oligonucleotide: PDCD1-2510
ccugagcuguguggcuu

SEQ ID NO: 17000 - RNA, 17 nt, Artificial Sequence
  Synthetic oligonucleotide: PDCD1-240
cggccaggaugguucuu

SEQ ID NO: 17001 - RNA, 17 nt, Artificial Sequence
  Synthetic oligonucleotide: PDCD1-2413
gggccaggggaggaguu

SEQ ID NO: 17002 - RNA, 17 nt, Artificial Sequence
  Synthetic oligonucleotide: PDCD1-2511
cugagcuguguggcuuu

SEQ ID NO: 17003 - RNA, 20 nt, Artificial Sequence
  Synthetic oligonucleotide: PDCD1-2376
ggaagagggggcgggagcaa

SEQ ID NO: 17004 - RNA, 20 nt, Artificial Sequence
  Synthetic oligonucleotide: PDCD1-3003
ucccagaggcuccgacagaa

SEQ ID NO: 17005 - RNA, 20 nt, Artificial Sequence
  Synthetic oligonucleotide: PDCD1-2335
ggggggaugggggaggagaa

SEQ ID NO: 17006 - RNA, 20 nt, Artificial Sequence
  Synthetic oligonucleotide: PDCD1-2350
gcagagacacagaggaggaa

SEQ ID NO: 17007 - RNA, 20 nt, Artificial Sequence
  Synthetic oligonucleotide: PDCD1-2124
ugccagggacugagagugaa

SEQ ID NO: 17008 - RNA, 20 nt, Artificial Sequence
  Synthetic oligonucleotide: PDCD1-2237
cugucccaggucagguugaa

SEQ ID NO: 17009 - RNA, 20 nt, Artificial Sequence
  Synthetic oligonucleotide: PDCD1-2113
agccacacagcucaggguaa

SEQ ID NO: 17010 - RNA, 20 nt, Artificial Sequence
  Synthetic oligonucleotide: PDCD1-2269
gggagagagagacagagaca

SEQ ID NO: 17011 - RNA, 20 nt, Artificial Sequence
  Synthetic oligonucleotide: PDCD1-2355
cugagcuggggagaccccca

SEQ ID NO: 17012 - RNA, 20 nt, Artificial Sequence
  Synthetic oligonucleotide: PDCD1-2322
gcagggaggcccggccccca

SEQ ID NO: 17013 - RNA, 20 nt, Artificial Sequence
  Synthetic oligonucleotide: PDCD1-2183
ggccuggcccuggcagccca

SEQ ID NO: 17014 - RNA, 20 nt, Artificial Sequence
  Synthetic oligonucleotide: PDCD1-2165
ggucaggugucccagagcca

SEQ ID NO: 17015 - RNA, 20 nt, Artificial Sequence
  Synthetic oligonucleotide: PDCD1-2119
aggggcagagcugggggcca

SEQ ID NO: 17016 - RNA, 20 nt, Artificial Sequence
  Synthetic oligonucleotide: PDCD1-2364
gggguagggcgugggggcca

SEQ ID NO: 17017 - RNA, 20 nt, Artificial Sequence
  Synthetic oligonucleotide: PDCD1-2102
caaagaggggacuugggcca

SEQ ID NO: 17018 - RNA, 20 nt, Artificial Sequence
  Synthetic oligonucleotide: PDCD1-2123
cagcaccccccgaccugcca

SEQ ID NO: 17019 - RNA, 20 nt, Artificial Sequence
  Synthetic oligonucleotide: PDCD1-2130
ccgggaccccugggcugcca

SEQ ID NO: 17020 - RNA, 20 nt, Artificial Sequence
  Synthetic oligonucleotide: PDCD1-2375
aggaagagggggcgggagca

SEQ ID NO: 17021 - RNA, 20 nt, Artificial Sequence
  Synthetic oligonucleotide: PDCD1-2318
ccacccaccuuccccaggca

SEQ ID NO: 17022 - RNA, 20 nt, Artificial Sequence
  Synthetic oligonucleotide: PDCD1-2111
gcccaaagccacacagcuca

SEQ ID NO: 17023 - RNA, 20 nt, Artificial Sequence
  Synthetic oligonucleotide: PDCD1-2284
gugggggucuccccagcuca

SEQ ID NO: 17024 - RNA, 20 nt, Artificial Sequence
  Synthetic oligonucleotide: PDCD1-2097
ugccugcccaggagcaaaga

SEQ ID NO: 17025 - RNA, 20 nt, Artificial Sequence
  Synthetic oligonucleotide: PDCD1-2370
cacguggauguggaggaaga

SEQ ID NO: 17026 - RNA, 20 nt, Artificial Sequence
  Synthetic oligonucleotide: PDCD1-2313
cccaggaaccugagcccaga

SEQ ID NO: 17027 - RNA, 20 nt, Artificial Sequence
  Synthetic oligonucleotide: PDCD1-2271
agacagggagacagaggaga

SEQ ID NO: 17028 - RNA, 20 nt, Artificial Sequence
  Synthetic oligonucleotide: PDCD1-2334
gggggggaugggggaggaga

SEQ ID NO: 17029 - RNA, 20 nt, Artificial Sequence
  Synthetic oligonucleotide: PDCD1-2323
aggcccggcccccagggaga

SEQ ID NO: 17030 - RNA, 20 nt, Artificial Sequence
  Synthetic oligonucleotide: PDCD1-2261
aggggguaggacuggggaga

SEQ ID NO: 17031 - RNA, 20 nt, Artificial Sequence
  Synthetic oligonucleotide: PDCD1-2383
cuccgccugagcaguggaga

SEQ ID NO: 17032 - RNA, 20 nt, Artificial Sequence
  Synthetic oligonucleotide: PDCD1-2092
gccccaaggaccggcugaga

SEQ ID NO: 17033 - RNA, 20 nt, Artificial Sequence
  Synthetic oligonucleotide: PDCD1-2187
gcccaggggucccggagcga

SEQ ID NO: 17034 - RNA, 20 nt, Artificial Sequence
  Synthetic oligonucleotide: PDCD1-112
aacugggcuggcggccagga

SEQ ID NO: 17035 - RNA, 20 nt, Artificial Sequence
  Synthetic oligonucleotide: PDCD1-2339
cccacccggcagccucagga

SEQ ID NO: 17036 - RNA, 20 nt, Artificial Sequence
  Synthetic oligonucleotide: PDCD1-2349
agcagagacacagaggagga

SEQ ID NO: 17037 - RNA, 20 nt, Artificial Sequence
  Synthetic oligonucleotide: PDCD1-2249
gaggcagugcugggggagga

SEQ ID NO: 17038 - RNA, 20 nt, Artificial Sequence
  Synthetic oligonucleotide: PDCD1-2253
ugggggaggaggggugagga

SEQ ID NO: 17039 - RNA, 20 nt, Artificial Sequence
  Synthetic oligonucleotide: PDCD1-2239
cccaggucagguugaaggga

SEQ ID NO: 17040 - RNA, 20 nt, Artificial Sequence
  Synthetic oligonucleotide: PDCD1-2329
ccccagggagauggggggga

SEQ ID NO: 17041 - RNA, 20 nt, Artificial Sequence
  Synthetic oligonucleotide: PDCD1-2267
acuggggagaggguggggga

SEQ ID NO: 17042 - RNA, 20 nt, Artificial Sequence
  Synthetic oligonucleotide: PDCD1-2303
cgggccucccugccugggga

SEQ ID NO: 17043 - RNA, 20 nt, Artificial Sequence
  Synthetic oligonucleotide: PDCD1-2169
cccagagccaggggucugga

SEQ ID NO: 17044 - RNA, 20 nt, Artificial Sequence
  Synthetic oligonucleotide: PDCD1-2191
cccggagcgaggggucugga

SEQ ID NO: 17045 - RNA, 20 nt, Artificial Sequence
  Synthetic oligonucleotide: PDCD1-2137
ugccagggacugagggugga

SEQ ID NO: 17046 - RNA, 20 nt, Artificial Sequence
  Synthetic oligonucleotide: PDCD1-2135
cccgaccugccagggacuga

SEQ ID NO: 17047 - RNA, 20 nt, Artificial Sequence
  Synthetic oligonucleotide: PDCD1-4464
agguuccugggcugcaguga

SEQ ID NO: 17048 - RNA, 20 nt, Artificial Sequence
  Synthetic oligonucleotide: PDCD1-2345
ggggcagcucgggcgggaua

SEQ ID NO: 17049 - RNA, 20 nt, Artificial Sequence
  Synthetic oligonucleotide: PDCD1-2112
aagccacacagcucagggua

SEQ ID NO: 17050 - RNA, 20 nt, Artificial Sequence
  Synthetic oligonucleotide: PDCD1-2359
ggggagacccccacggggua

SEQ ID NO: 17051 - RNA, 20 nt, Artificial Sequence
  Synthetic oligonucleotide: PDCD1-2356
ugagcuggggagacccccac

SEQ ID NO: 17052 - RNA, 20 nt, Artificial Sequence
  Synthetic oligonucleotide: PDCD1-102
uccaggcaugcagaucccac

SEQ ID NO: 17053 - RNA, 20 nt, Artificial Sequence
  Synthetic oligonucleotide: PDCD1-2365
ggguagggcgugggggccac

SEQ ID NO: 17054 - RNA, 20 nt, Artificial Sequence
  Synthetic oligonucleotide: PDCD1-2268
agggagagagagacagagac

SEQ ID NO: 17055 - RNA, 20 nt, Artificial Sequence
  Synthetic oligonucleotide: PDCD1-2257
gggugaggaggggguaggac

SEQ ID NO: 17056 - RNA, 20 nt, Artificial Sequence
  Synthetic oligonucleotide: PDCD1-2336
gagaagggccugcccccacc

SEQ ID NO: 17057 - RNA, 20 nt, Artificial Sequence
  Synthetic oligonucleotide: PDCD1-2380
acccucccuucaaccugacc

SEQ ID NO: 17058 - RNA, 20 nt, Artificial Sequence
  Synthetic oligonucleotide: PDCD1-2109
uggggcccagagaggaaccc

SEQ ID NO: 17059 - RNA, 20 nt, Artificial Sequence
  Synthetic oligonucleotide: PDCD1-2127
accccucgcuccgggacccc

SEQ ID NO: 17060 - RNA, 20 nt, Artificial Sequence
  Synthetic oligonucleotide: PDCD1-2321
ggcagggaggcccggccccc

SEQ ID NO: 17061 - RNA, 20 nt, Artificial Sequence
  Synthetic oligonucleotide: PDCD1-2209
cugggccccaacuccucccc

SEQ ID NO: 17062 - RNA, 20 nt, Artificial Sequence
  Synthetic oligonucleotide: PDCD1-2316
gggggccacccaccuucccc

SEQ ID NO: 17063 - RNA, 20 nt, Artificial Sequence
  Synthetic oligonucleotide: PDCD1-2182
gggccuggcccuggcagccc

SEQ ID NO: 17064 - RNA, 20 nt, Artificial Sequence
  Synthetic oligonucleotide: PDCD1-4465
cccaccccucacugcagccc

SEQ ID NO: 17065 - RNA, 20 nt, Artificial Sequence
  Synthetic oligonucleotide: PDCD1-103
ugcagaucccacaggcgccc

SEQ ID NO: 17066 - RNA, 20 nt, Artificial Sequence
  Synthetic oligonucleotide: PDCD1-2181
ugcugaggcgggccuggccc

SEQ ID NO: 17067 - RNA, 20 nt, Artificial Sequence
  Synthetic oligonucleotide: PDCD1-2095
gacagagguccugccugccc

SEQ ID NO: 17068 - RNA, 20 nt, Artificial Sequence
  Synthetic oligonucleotide: PDCD1-2294
ccccaucccccccaucuccc

SEQ ID NO: 17069 - RNA, 20 nt, Artificial Sequence
  Synthetic oligonucleotide: PDCD1-2170
gaccuuccacccucaguccc

SEQ ID NO: 17070 - RNA, 20 nt, Artificial Sequence
  Synthetic oligonucleotide: PDCD1-2192
gaccuuucacucucaguccc

SEQ ID NO: 17071 - RNA, 20 nt, Artificial Sequence
  Synthetic oligonucleotide: PDCD1-2234
agcggaagggaaacuguccc

SEQ ID NO: 17072 - RNA, 20 nt, Artificial Sequence
  Synthetic oligonucleotide: PDCD1-2164
cggucaggugucccagagcc

SEQ ID NO: 17073 - RNA, 20 nt, Artificial Sequence
  Synthetic oligonucleotide: PDCD1-2320
cuuccccaggcagggaggcc

SEQ ID NO: 17074 - RNA, 20 nt, Artificial Sequence
  Synthetic oligonucleotide: PDCD1-2131
accccugggcugccagggcc

SEQ ID NO: 17075 - RNA, 20 nt, Artificial Sequence
  Synthetic oligonucleotide: PDCD1-2180
ggggggugcugaggcgggcc

SEQ ID NO: 17076 - RNA, 20 nt, Artificial Sequence
  Synthetic oligonucleotide: PDCD1-2299
cccccaucucccugggggcc

SEQ ID NO: 17077 - RNA, 20 nt, Artificial Sequence
  Synthetic oligonucleotide: PDCD1-2101
gcaaagaggggacuugggcc

SEQ ID NO: 17078 - RNA, 20 nt, Artificial Sequence
  Synthetic oligonucleotide: PDCD1-127
gccugugggaucugcaugcc

SEQ ID NO: 17079 - RNA, 20 nt, Artificial Sequence
  Synthetic oligonucleotide: PDCD1-2122
acagcaccccccgaccugcc

SEQ ID NO: 17080 - RNA, 20 nt, Artificial Sequence
  Synthetic oligonucleotide: PDCD1-2132
ucagcaccccccgaccugcc

SEQ ID NO: 17081 - RNA, 20 nt, Artificial Sequence
  Synthetic oligonucleotide: PDCD1-2300
gggggccgggccucccugcc

SEQ ID NO: 17082 - RNA, 20 nt, Artificial Sequence
  Synthetic oligonucleotide: PDCD1-2288
cugccccuccugaggcugcc

SEQ ID NO: 17083 - RNA, 20 nt, Artificial Sequence
  Synthetic oligonucleotide: PDCD1-2129
uccgggaccccugggcugcc

SEQ ID NO: 17084 - RNA, 20 nt, Artificial Sequence
  Synthetic oligonucleotide: PDCD1-2766
cggagccucugggagccucc

SEQ ID NO: 17085 - RNA, 20 nt, Artificial Sequence
  Synthetic oligonucleotide: PDCD1-2126
cccuccagaccccucgcucc

SEQ ID NO: 17086 - RNA, 20 nt, Artificial Sequence
  Synthetic oligonucleotide: PDCD1-101
cacucugguggggcugcucc

SEQ ID NO: 17087 - RNA, 20 nt, Artificial Sequence
  Synthetic oligonucleotide: PDCD1-2210
ccaaguccccucuuugcucc

SEQ ID NO: 17088 - RNA, 20 nt, Artificial Sequence
  Synthetic oligonucleotide: PDCD1-2185
cccuggcagcccaggggucc

SEQ ID NO: 17089 - RNA, 20 nt, Artificial Sequence
  Synthetic oligonucleotide: PDCD1-2310
ccccucugggcucagguucc

SEQ ID NO: 17090 - RNA, 20 nt, Artificial Sequence
  Synthetic oligonucleotide: PDCD1-2214
gaccucuguccccucucagc

SEQ ID NO: 17091 - RNA, 20 nt, Artificial Sequence
  Synthetic oligonucleotide: PDCD1-2115
cucaggguaaggggcagagc

SEQ ID NO: 17092 - RNA, 20 nt, Artificial Sequence
  Synthetic oligonucleotide: PDCD1-2352
aggaggaaggggcccugagc

SEQ ID NO: 17093 - RNA, 20 nt, Artificial Sequence
  Synthetic oligonucleotide: PDCD1-2120
gcagagcugggggccaaggc

SEQ ID NO: 17094 - RNA, 20 nt, Artificial Sequence
  Synthetic oligonucleotide: PDCD1-2317
gccacccaccuuccccaggc

SEQ ID NO: 17095 - RNA, 20 nt, Artificial Sequence
  Synthetic oligonucleotide: PDCD1-2213
cucuuugcuccugggcaggc

SEQ ID NO: 17096 - RNA, 20 nt, Artificial Sequence
  Synthetic oligonucleotide: PDCD1-2179
aggucggggggugcugaggc

SEQ ID NO: 17097 - RNA, 20 nt, Artificial Sequence
  Synthetic oligonucleotide: PDCD1-2344
ucaggaggggcagcucgggc

SEQ ID NO: 17098 - RNA, 20 nt, Artificial Sequence
  Synthetic oligonucleotide: PDCD1-2379
agggggcgggagcaaggggc

SEQ ID NO: 17099 - RNA, 20 nt, Artificial Sequence
  Synthetic oligonucleotide: PDCD1-2374
gauguggaggaagagggggc

SEQ ID NO: 17100 - RNA, 20 nt, Artificial Sequence
  Synthetic oligonucleotide: PDCD1-2298
ccccccaucucccugggggc

SEQ ID NO: 17101 - RNA, 20 nt, Artificial Sequence
  Synthetic oligonucleotide: PDCD1-2293
ugaggcugccgggugggggc

SEQ ID NO: 17102 - RNA, 20 nt, Artificial Sequence
  Synthetic oligonucleotide: PDCD1-109
gggcggugcuacaacugggc

SEQ ID NO: 17103 - RNA, 20 nt, Artificial Sequence
  Synthetic oligonucleotide: PDCD1-2212
uccccucuuugcuccugggc

SEQ ID NO: 17104 - RNA, 20 nt, Artificial Sequence
  Synthetic oligonucleotide: PDCD1-2171
uuccacccucagucccuggc

SEQ ID NO: 17105 - RNA, 20 nt, Artificial Sequence
  Synthetic oligonucleotide: PDCD1-2193
uuucacucucagucccuggc

SEQ ID NO: 17106 - RNA, 20 nt, Artificial Sequence
  Synthetic oligonucleotide: PDCD1-2200
aggucggggggugcuguggc

SEQ ID NO: 17107 - RNA, 20 nt, Artificial Sequence
  Synthetic oligonucleotide: PDCD1-2287
gcugccccuccugaggcugc

SEQ ID NO: 17108 - RNA, 20 nt, Artificial Sequence
  Synthetic oligonucleotide: PDCD1-2243
gagagugacagaggcagugc

SEQ ID NO: 17109 - RNA, 20 nt, Artificial Sequence
  Synthetic oligonucleotide: PDCD1-2385
caguggagaaggcggcacuc

SEQ ID NO: 17110 - RNA, 20 nt, Artificial Sequence
  Synthetic oligonucleotide: PDCD1-2307
ggaagguggguggcccccuc

SEQ ID NO: 17111 - RNA, 20 nt, Artificial Sequence
  Synthetic oligonucleotide: PDCD1-2337
ugcccccacccggcagccuc

SEQ ID NO: 17112 - RNA, 20 nt, Artificial Sequence
  Synthetic oligonucleotide: PDCD1-2110
ugcccaaagccacacagcuc

SEQ ID NO: 17113 - RNA, 20 nt, Artificial Sequence
  Synthetic oligonucleotide: PDCD1-2283
cgugggggucuccccagcuc

SEQ ID NO: 17114 - RNA, 20 nt, Artificial Sequence
  Synthetic oligonucleotide: PDCD1-2342
agccucaggaggggcagcuc

SEQ ID NO: 17115 - RNA, 20 nt, Artificial Sequence
  Synthetic oligonucleotide: PDCD1-2125
ucccuccagaccccucgcuc

SEQ ID NO: 17116 - RNA, 20 nt, Artificial Sequence
  Synthetic oligonucleotide: PDCD1-2309
ggguggcccccucugggcuc

SEQ ID NO: 17117 - RNA, 20 nt, Artificial Sequence
  Synthetic oligonucleotide: PDCD1-2139
ucccuccagaccccuggcuc

SEQ ID NO: 17118 - RNA, 20 nt, Artificial Sequence
  Synthetic oligonucleotide: PDCD1-2228
ugccgccuucuccacugcuc

SEQ ID NO: 17119 - RNA, 20 nt, Artificial Sequence
  Synthetic oligonucleotide: PDCD1-2235
aagggaaacugucccagguc

SEQ ID NO: 17120 - RNA, 20 nt, Artificial Sequence
  Synthetic oligonucleotide: PDCD1-2173
cccucagucccuggcagguc

SEQ ID NO: 17121 - RNA, 20 nt, Artificial Sequence
  Synthetic oligonucleotide: PDCD1-2195
cucucagucccuggcagguc

SEQ ID NO: 17122 - RNA, 20 nt, Artificial Sequence
  Synthetic oligonucleotide: PDCD1-120
gguagguggggucggcgguc

SEQ ID NO: 17123 - RNA, 20 nt, Artificial Sequence
  Synthetic oligonucleotide: PDCD1-2167
gugucccagagccagggguc

SEQ ID NO: 17124 - RNA, 20 nt, Artificial Sequence
  Synthetic oligonucleotide: PDCD1-2096
cugccugcccaggagcaaag

SEQ ID NO: 17125 - RNA, 20 nt, Artificial Sequence
  Synthetic oligonucleotide: PDCD1-2377
gaagagggggcgggagcaag

SEQ ID NO: 17126 - RNA, 20 nt, Artificial Sequence
  Synthetic oligonucleotide: PDCD1-2351
cagagacacagaggaggaag

SEQ ID NO: 17127 - RNA, 20 nt, Artificial Sequence
  Synthetic oligonucleotide: PDCD1-2369
ccacguggauguggaggaag

SEQ ID NO: 17128 - RNA, 20 nt, Artificial Sequence
  Synthetic oligonucleotide: PDCD1-2114
gccacacagcucaggguaag

SEQ ID NO: 17129 - RNA, 20 nt, Artificial Sequence
  Synthetic oligonucleotide: PDCD1-2347
agcagugagcagagacacag

SEQ ID NO: 17130 - RNA, 20 nt, Artificial Sequence
  Synthetic oligonucleotide: PDCD1-2270
agacagagacagggagacag

SEQ ID NO: 17131 - RNA, 20 nt, Artificial Sequence
  Synthetic oligonucleotide: PDCD1-2094
gaccggcugagaggggacag

SEQ ID NO: 17132 - RNA, 20 nt, Artificial Sequence
  Synthetic oligonucleotide: PDCD1-2242
cacgugggcgagagugacag

SEQ ID NO: 17133 - RNA, 20 nt, Artificial Sequence
  Synthetic oligonucleotide: PDCD1-2184
gccuggcccuggcagcccag

SEQ ID NO: 17134 - RNA, 20 nt, Artificial Sequence
  Synthetic oligonucleotide: PDCD1-2312
gcccaggaaccugagcccag

SEQ ID NO: 17135 - RNA, 20 nt, Artificial Sequence
  Synthetic oligonucleotide: PDCD1-3004
ggcagccgggaggcucccag

SEQ ID NO: 17136 - RNA, 20 nt, Artificial Sequence
  Synthetic oligonucleotide: PDCD1-2166
gucaggugucccagagccag

SEQ ID NO: 17137 - RNA, 20 nt, Artificial Sequence
  Synthetic oligonucleotide: PDCD1-2103
aaagaggggacuugggccag

SEQ ID NO: 17138 - RNA, 20 nt, Artificial Sequence
  Synthetic oligonucleotide: PDCD1-2382
gcucaccuccgccugagcag

SEQ ID NO: 17139 - RNA, 20 nt, Artificial Sequence
  Synthetic oligonucleotide: PDCD1-2098
gccugcccaggagcaaagag

SEQ ID NO: 17140 - RNA, 20 nt, Artificial Sequence
  Synthetic oligonucleotide: PDCD1-2371
acguggauguggaggaagag

SEQ ID NO: 17141 - RNA, 20 nt, Artificial Sequence
  Synthetic oligonucleotide: PDCD1-2314
ccaggaaccugagcccagag

SEQ ID NO: 17142 - RNA, 20 nt, Artificial Sequence
  Synthetic oligonucleotide: PDCD1-2108
ggaggaguuggggcccagag

SEQ ID NO: 17143 - RNA, 20 nt, Artificial Sequence
  Synthetic oligonucleotide: PDCD1-2093
ccccaaggaccggcugagag

SEQ ID NO: 17144 - RNA, 20 nt, Artificial Sequence
  Synthetic oligonucleotide: PDCD1-2188
cccaggggucccggagcgag

SEQ ID NO: 17145 - RNA, 20 nt, Artificial Sequence
  Synthetic oligonucleotide: PDCD1-2340
ccacccggcagccucaggag

SEQ ID NO: 17146 - RNA, 20 nt, Artificial Sequence
  Synthetic oligonucleotide: PDCD1-2250
aggcagugcugggggaggag

SEQ ID NO: 17147 - RNA, 20 nt, Artificial Sequence
  Synthetic oligonucleotide: PDCD1-2254
gggggaggaggggugaggag

SEQ ID NO: 17148 - RNA, 20 nt, Artificial Sequence
  Synthetic oligonucleotide: PDCD1-2260
gaggggguaggacuggggag

SEQ ID NO: 17149 - RNA, 20 nt, Artificial Sequence
  Synthetic oligonucleotide: PDCD1-3001
aggcuccgacagaaugggag

SEQ ID NO: 17150 - RNA, 20 nt, Artificial Sequence
  Synthetic oligonucleotide: PDCD1-2091
agccccaaggaccggcugag

SEQ ID NO: 17151 - RNA, 20 nt, Artificial Sequence
  Synthetic oligonucleotide: PDCD1-4466
gguuccugggcugcagugag

SEQ ID NO: 17152 - RNA, 20 nt, Artificial Sequence
  Synthetic oligonucleotide: PDCD1-2231
acugcucaggcggaggugag

SEQ ID NO: 17153 - RNA, 20 nt, Artificial Sequence
  Synthetic oligonucleotide: PDCD1-2357
gagcuggggagacccccacg

SEQ ID NO: 17154 - RNA, 20 nt, Artificial Sequence
  Synthetic oligonucleotide: PDCD1-2240
ccucuuccuccacauccacg

SEQ ID NO: 17155 - RNA, 20 nt, Artificial Sequence
  Synthetic oligonucleotide: PDCD1-2279
ggcccccacgcccuaccccg

SEQ ID NO: 17156 - RNA, 20 nt, Artificial Sequence
  Synthetic oligonucleotide: PDCD1-2278
auggggaggaggugggcccg

SEQ ID NO: 17157 - RNA, 20 nt, Artificial Sequence
  Synthetic oligonucleotide: PDCD1-2186
agcccaggggucccggagcg

SEQ ID NO: 17158 - RNA, 20 nt, Artificial Sequence
  Synthetic oligonucleotide: PDCD1-2360
gacccccacgggguagggcg

SEQ ID NO: 17159 - RNA, 20 nt, Artificial Sequence
  Synthetic oligonucleotide: PDCD1-2174
ccucagucccuggcaggucg

SEQ ID NO: 17160 - RNA, 20 nt, Artificial Sequence
  Synthetic oligonucleotide: PDCD1-2196
ucucagucccuggcaggucg

SEQ ID NO: 17161 - RNA, 20 nt, Artificial Sequence
  Synthetic oligonucleotide: PDCD1-2384
cgccugagcaguggagaagg

SEQ ID NO: 17162 - RNA, 20 nt, Artificial Sequence
  Synthetic oligonucleotide: PDCD1-2304
gccucccugccuggggaagg

SEQ ID NO: 17163 - RNA, 20 nt, Artificial Sequence
  Synthetic oligonucleotide: PDCD1-2338
ccccacccggcagccucagg

SEQ ID NO: 17164 - RNA, 20 nt, Artificial Sequence
  Synthetic oligonucleotide: PDCD1-2229
cgccuucuccacugcucagg

SEQ ID NO: 17165 - RNA, 20 nt, Artificial Sequence
  Synthetic oligonucleotide: PDCD1-2372
cguggauguggaggaagagg

SEQ ID NO: 17166 - RNA, 20 nt, Artificial Sequence
  Synthetic oligonucleotide: PDCD1-2348
agugagcagagacacagagg

SEQ ID NO: 17167 - RNA, 20 nt, Artificial Sequence
  Synthetic oligonucleotide: PDCD1-2315
caggaaccugagcccagagg

SEQ ID NO: 17168 - RNA, 20 nt, Artificial Sequence
  Synthetic oligonucleotide: PDCD1-2276
cagaggagauggggaggagg

SEQ ID NO: 17169 - RNA, 20 nt, Artificial Sequence
  Synthetic oligonucleotide: PDCD1-2255
ggggaggaggggugaggagg

SEQ ID NO: 17170 - RNA, 20 nt, Artificial Sequence
  Synthetic oligonucleotide: PDCD1-2248
agaggcagugcugggggagg

SEQ ID NO: 17171 - RNA, 20 nt, Artificial Sequence
  Synthetic oligonucleotide: PDCD1-2275
agacagaggagauggggagg

SEQ ID NO: 17172 - RNA, 20 nt, Artificial Sequence
  Synthetic oligonucleotide: PDCD1-2178
caggucggggggugcugagg

SEQ ID NO: 17173 - RNA, 20 nt, Artificial Sequence
  Synthetic oligonucleotide: PDCD1-2252
cugggggaggaggggugagg

SEQ ID NO: 17174 - RNA, 20 nt, Artificial Sequence
  Synthetic oligonucleotide: PDCD1-115
caggaugguucuuagguagg

SEQ ID NO: 17175 - RNA, 20 nt, Artificial Sequence
  Synthetic oligonucleotide: PDCD1-2230
cuucuccacugcucaggcgg

SEQ ID NO: 17176 - RNA, 20 nt, Artificial Sequence
  Synthetic oligonucleotide: PDCD1-2175
cucagucccuggcaggucgg

SEQ ID NO: 17177 - RNA, 20 nt, Artificial Sequence
  Synthetic oligonucleotide: PDCD1-119
ucuuagguagguggggucgg

SEQ ID NO: 17178 - RNA, 20 nt, Artificial Sequence
  Synthetic oligonucleotide: PDCD1-2238
ucccaggucagguugaaggg

SEQ ID NO: 17179 - RNA, 20 nt, Artificial Sequence
  Synthetic oligonucleotide: PDCD1-2319
cccaccuuccccaggcaggg

SEQ ID NO: 17180 - RNA, 20 nt, Artificial Sequence
  Synthetic oligonucleotide: PDCD1-2262
ggguaggacuggggagaggg

SEQ ID NO: 17181 - RNA, 20 nt, Artificial Sequence
  Synthetic oligonucleotide: PDCD1-2136
gaccugccagggacugaggg

SEQ ID NO: 17182 - RNA, 20 nt, Artificial Sequence
  Synthetic oligonucleotide: PDCD1-3005
agaggcugugggcagccggg

SEQ ID NO: 17183 - RNA, 20 nt, Artificial Sequence
  Synthetic oligonucleotide: PDCD1-2289
ccccuccugaggcugccggg

SEQ ID NO: 17184 - RNA, 20 nt, Artificial Sequence
  Synthetic oligonucleotide: PDCD1-2343
cucaggaggggcagcucggg

SEQ ID NO: 17185 - RNA, 20 nt, Artificial Sequence
  Synthetic oligonucleotide: PDCD1-2176
ucagucccuggcaggucggg

SEQ ID NO: 17186 - RNA, 20 nt, Artificial Sequence
  Synthetic oligonucleotide: PDCD1-2378
gagggggcgggagcaagggg

SEQ ID NO: 17187 - RNA, 20 nt, Artificial Sequence
  Synthetic oligonucleotide: PDCD1-2104
gaggggacuugggccagggg

SEQ ID NO: 17188 - RNA, 20 nt, Artificial Sequence
  Synthetic oligonucleotide: PDCD1-4467
uccugggcugcagugagggg

SEQ ID NO: 17189 - RNA, 20 nt, Artificial Sequence
  Synthetic oligonucleotide: PDCD1-2373
ggauguggaggaagaggggg

SEQ ID NO: 17190 - RNA, 20 nt, Artificial Sequence
  Synthetic oligonucleotide: PDCD1-2333
ggagaugggggggauggggg

SEQ ID NO: 17191 - RNA, 20 nt, Artificial Sequence
  Synthetic oligonucleotide: PDCD1-2247
gacagaggcagugcuggggg

SEQ ID NO: 17192 - RNA, 20 nt, Artificial Sequence
  Synthetic oligonucleotide: PDCD1-2266
gacuggggagaggguggggg

SEQ ID NO: 17193 - RNA, 20 nt, Artificial Sequence
  Synthetic oligonucleotide: PDCD1-2274
gggagacagaggagaugggg

SEQ ID NO: 17194 - RNA, 20 nt, Artificial Sequence
  Synthetic oligonucleotide: PDCD1-2328
cggcccccagggagaugggg

SEQ ID NO: 17195 - RNA, 20 nt, Artificial Sequence
  Synthetic oligonucleotide: PDCD1-2327
ccggcccccagggagauggg

SEQ ID NO: 17196 - RNA, 20 nt, Artificial Sequence
  Synthetic oligonucleotide: PDCD1-106
gcccuggccagucgucuggg

SEQ ID NO: 17197 - RNA, 20 nt, Artificial Sequence
  Synthetic oligonucleotide: PDCD1-2306
cccugccuggggaagguggg

SEQ ID NO: 17198 - RNA, 20 nt, Artificial Sequence
  Synthetic oligonucleotide: PDCD1-2326
cccggcccccagggagaugg

SEQ ID NO: 17199 - RNA, 20 nt, Artificial Sequence
  Synthetic oligonucleotide: PDCD1-2332
cagggagaugggggggaugg

SEQ ID NO: 17200 - RNA, 20 nt, Artificial Sequence
  Synthetic oligonucleotide: PDCD1-2297
caucccccccaucucccugg

SEQ ID NO: 17201 - RNA, 20 nt, Artificial Sequence
  Synthetic oligonucleotide: PDCD1-2118
aggguaaggggcagagcugg

SEQ ID NO: 17202 - RNA, 20 nt, Artificial Sequence
  Synthetic oligonucleotide: PDCD1-110
cggugcuacaacugggcugg

SEQ ID NO: 17203 - RNA, 20 nt, Artificial Sequence
  Synthetic oligonucleotide: PDCD1-2246
agugacagaggcagugcugg

SEQ ID NO: 17204 - RNA, 20 nt, Artificial Sequence
  Synthetic oligonucleotide: PDCD1-2386
uggagaaggcggcacucugg

SEQ ID NO: 17205 - RNA, 20 nt, Artificial Sequence
  Synthetic oligonucleotide: PDCD1-2168
ucccagagccaggggucugg

SEQ ID NO: 17206 - RNA, 20 nt, Artificial Sequence
  Synthetic oligonucleotide: PDCD1-2190
ucccggagcgaggggucugg

SEQ ID NO: 17207 - RNA, 20 nt, Artificial Sequence
  Synthetic oligonucleotide: PDCD1-2282
ccccacgcccuaccccgugg

SEQ ID NO: 17208 - RNA, 20 nt, Artificial Sequence
  Synthetic oligonucleotide: PDCD1-2363
ccccacgggguagggcgugg

SEQ ID NO: 17209 - RNA, 20 nt, Artificial Sequence
  Synthetic oligonucleotide: PDCD1-2265
uaggacuggggagagggugg

SEQ ID NO: 17210 - RNA, 20 nt, Artificial Sequence
  Synthetic oligonucleotide: PDCD1-2292
cuccugaggcugccgggugg

SEQ ID NO: 17211 - RNA, 20 nt, Artificial Sequence
  Synthetic oligonucleotide: PDCD1-2368
ucucgcccacguggaugugg

SEQ ID NO: 17212 - RNA, 20 nt, Artificial Sequence
  Synthetic oligonucleotide: PDCD1-2273
acagggagacagaggagaug

SEQ ID NO: 17213 - RNA, 20 nt, Artificial Sequence
  Synthetic oligonucleotide: PDCD1-2325
gcccggcccccagggagaug

SEQ ID NO: 17214 - RNA, 20 nt, Artificial Sequence
  Synthetic oligonucleotide: PDCD1-2331
ccagggagaugggggggaug

SEQ ID NO: 17215 - RNA, 20 nt, Artificial Sequence
  Synthetic oligonucleotide: PDCD1-2259
gugaggaggggguaggacug

SEQ ID NO: 17216 - RNA, 20 nt, Artificial Sequence
  Synthetic oligonucleotide: PDCD1-2134
ccccgaccugccagggacug

SEQ ID NO: 17217 - RNA, 20 nt, Artificial Sequence
  Synthetic oligonucleotide: PDCD1-2296
ccaucccccccaucucccug

SEQ ID NO: 17218 - RNA, 20 nt, Artificial Sequence
  Synthetic oligonucleotide: PDCD1-125
acgacuggccagggcgccug

SEQ ID NO: 17219 - RNA, 20 nt, Artificial Sequence
  Synthetic oligonucleotide: PDCD1-2302
gggccgggccucccugccug

SEQ ID NO: 17220 - RNA, 20 nt, Artificial Sequence
  Synthetic oligonucleotide: PDCD1-2286
cgcccgagcugccccuccug

SEQ ID NO: 17221 - RNA, 20 nt, Artificial Sequence
  Synthetic oligonucleotide: PDCD1-2117
caggguaaggggcagagcug

SEQ ID NO: 17222 - RNA, 20 nt, Artificial Sequence
  Synthetic oligonucleotide: PDCD1-2354
gaggaaggggcccugagcug

SEQ ID NO: 17223 - RNA, 20 nt, Artificial Sequence
  Synthetic oligonucleotide: PDCD1-2285
ugugucucugcucacugcug

SEQ ID NO: 17224 - RNA, 20 nt, Artificial Sequence
  Synthetic oligonucleotide: PDCD1-2245
gagugacagaggcagugcug

SEQ ID NO: 17225 - RNA, 20 nt, Artificial Sequence
  Synthetic oligonucleotide: PDCD1-4468
cagguuccugggcugcagug

SEQ ID NO: 17226 - RNA, 20 nt, Artificial Sequence
  Synthetic oligonucleotide: PDCD1-2281
cccccacgcccuaccccgug

SEQ ID NO: 17227 - RNA, 20 nt, Artificial Sequence
  Synthetic oligonucleotide: PDCD1-2362
cccccacgggguagggcgug

SEQ ID NO: 17228 - RNA, 20 nt, Artificial Sequence
  Synthetic oligonucleotide: PDCD1-2264
guaggacuggggagagggug

SEQ ID NO: 17229 - RNA, 20 nt, Artificial Sequence
  Synthetic oligonucleotide: PDCD1-2291
ccuccugaggcugccgggug

SEQ ID NO: 17230 - RNA, 20 nt, Artificial Sequence
  Synthetic oligonucleotide: PDCD1-2251
gugcugggggaggaggggug

SEQ ID NO: 17231 - RNA, 20 nt, Artificial Sequence
  Synthetic oligonucleotide: PDCD1-2202
gccccuuacccugagcugug

SEQ ID NO: 17232 - RNA, 20 nt, Artificial Sequence
  Synthetic oligonucleotide: PDCD1-2217
ccccucucagccgguccuug

SEQ ID NO: 17233 - RNA, 20 nt, Artificial Sequence
  Synthetic oligonucleotide: PDCD1-2107
uugggccaggggaggaguug

SEQ ID NO: 17234 - RNA, 20 nt, Artificial Sequence
  Synthetic oligonucleotide: PDCD1-2272
gacagggagacagaggagau

SEQ ID NO: 17235 - RNA, 20 nt, Artificial Sequence
  Synthetic oligonucleotide: PDCD1-2324
ggcccggcccccagggagau

SEQ ID NO: 17236 - RNA, 20 nt, Artificial Sequence
  Synthetic oligonucleotide: PDCD1-2330
cccagggagaugggggggau

SEQ ID NO: 17237 - RNA, 20 nt, Artificial Sequence
  Synthetic oligonucleotide: PDCD1-2258
ggugaggaggggguaggacu

SEQ ID NO: 17238 - RNA, 20 nt, Artificial Sequence
  Synthetic oligonucleotide: PDCD1-2099
ccaggagcaaagaggggacu

SEQ ID NO: 17239 - RNA, 20 nt, Artificial Sequence
  Synthetic oligonucleotide: PDCD1-2381
cccucccuucaaccugaccu

SEQ ID NO: 17240 - RNA, 20 nt, Artificial Sequence
  Synthetic oligonucleotide: PDCD1-2128
ccccucgcuccgggaccccu

SEQ ID NO: 17241 - RNA, 20 nt, Artificial Sequence
  Synthetic oligonucleotide: PDCD1-2295
cccaucccccccaucucccu

SEQ ID NO: 17242 - RNA, 20 nt, Artificial Sequence
  Synthetic oligonucleotide: PDCD1-2201
ugcuguggcaggcccagccu

SEQ ID NO: 17243 - RNA, 20 nt, Artificial Sequence
  Synthetic oligonucleotide: PDCD1-2301
ggggccgggccucccugccu

SEQ ID NO: 17244 - RNA, 20 nt, Artificial Sequence
  Synthetic oligonucleotide: PDCD1-2211
caaguccccucuuugcuccu

SEQ ID NO: 17245 - RNA, 20 nt, Artificial Sequence
  Synthetic oligonucleotide: PDCD1-2215
guccccucucagccgguccu

SEQ ID NO: 17246 - RNA, 20 nt, Artificial Sequence
  Synthetic oligonucleotide: PDCD1-2311
cccucugggcucagguuccu

SEQ ID NO: 17247 - RNA, 20 nt, Artificial Sequence
  Synthetic oligonucleotide: PDCD1-2341
cagccucaggaggggcagcu

SEQ ID NO: 17248 - RNA, 20 nt, Artificial Sequence
  Synthetic oligonucleotide: PDCD1-2116
ucaggguaaggggcagagcu

SEQ ID NO: 17249 - RNA, 20 nt, Artificial Sequence
  Synthetic oligonucleotide: PDCD1-2353
ggaggaaggggcccugagcu

SEQ ID NO: 17250 - RNA, 20 nt, Artificial Sequence
  Synthetic oligonucleotide: PDCD1-2121
cagagcugggggccaaggcu

SEQ ID NO: 17251 - RNA, 20 nt, Artificial Sequence
  Synthetic oligonucleotide: PDCD1-2244
agagugacagaggcagugcu

SEQ ID NO: 17252 - RNA, 20 nt, Artificial Sequence
  Synthetic oligonucleotide: PDCD1-2308
gaagguggguggcccccucu

SEQ ID NO: 17253 - RNA, 20 nt, Artificial Sequence
  Synthetic oligonucleotide: PDCD1-2140
cccuccagaccccuggcucu

SEQ ID NO: 17254 - RNA, 20 nt, Artificial Sequence
  Synthetic oligonucleotide: PDCD1-2208
gaacuccuggguuccucucu

SEQ ID NO: 17255 - RNA, 20 nt, Artificial Sequence
  Synthetic oligonucleotide: PDCD1-2105
acuugggccaggggaggagu

SEQ ID NO: 17256 - RNA, 20 nt, Artificial Sequence
  Synthetic oligonucleotide: PDCD1-3000
ggcuccgacagaaugggagu

SEQ ID NO: 17257 - RNA, 20 nt, Artificial Sequence
  Synthetic oligonucleotide: PDCD1-2241
cucuuccuccacauccacgu

SEQ ID NO: 17258 - RNA, 20 nt, Artificial Sequence
  Synthetic oligonucleotide: PDCD1-2280
gcccccacgcccuaccccgu

SEQ ID NO: 17259 - RNA, 20 nt, Artificial Sequence
  Synthetic oligonucleotide: PDCD1-2361
acccccacgggguagggcgu

SEQ ID NO: 17260 - RNA, 20 nt, Artificial Sequence
  Synthetic oligonucleotide: PDCD1-2305
ccucccugccuggggaaggu

SEQ ID NO: 17261 - RNA, 20 nt, Artificial Sequence
  Synthetic oligonucleotide: PDCD1-2172
acccucagucccuggcaggu

SEQ ID NO: 17262 - RNA, 20 nt, Artificial Sequence
  Synthetic oligonucleotide: PDCD1-2194
acucucagucccuggcaggu

SEQ ID NO: 17263 - RNA, 20 nt, Artificial Sequence
  Synthetic oligonucleotide: PDCD1-2277
agaggagauggggaggaggu

SEQ ID NO: 17264 - RNA, 20 nt, Artificial Sequence
  Synthetic oligonucleotide: PDCD1-2263
gguaggacuggggagagggu

SEQ ID NO: 17265 - RNA, 20 nt, Artificial Sequence
  Synthetic oligonucleotide: PDCD1-2290
cccuccugaggcugccgggu

SEQ ID NO: 17266 - RNA, 20 nt, Artificial Sequence
  Synthetic oligonucleotide: PDCD1-4469
ccugggcugcagugaggggu

SEQ ID NO: 17267 - RNA, 20 nt, Artificial Sequence
  Synthetic oligonucleotide: PDCD1-2358
uggggagacccccacggggu

SEQ ID NO: 17268 - RNA, 20 nt, Artificial Sequence
  Synthetic oligonucleotide: PDCD1-2256
aggaggggugaggagggggu

SEQ ID NO: 17269 - RNA, 20 nt, Artificial Sequence
  Synthetic oligonucleotide: PDCD1-2387
ggagaaggcggcacucuggu

SEQ ID NO: 17270 - RNA, 20 nt, Artificial Sequence
  Synthetic oligonucleotide: PDCD1-2763
caaccccacucccauucugu

SEQ ID NO: 17271 - RNA, 20 nt, Artificial Sequence
  Synthetic oligonucleotide: PDCD1-2100
caggagcaaagaggggacuu

SEQ ID NO: 17272 - RNA, 20 nt, Artificial Sequence
  Synthetic oligonucleotide: PDCD1-2216
uccccucucagccgguccuu

SEQ ID NO: 17273 - RNA, 20 nt, Artificial Sequence
  Synthetic oligonucleotide: PDCD1-2203
uacccugagcuguguggcuu

SEQ ID NO: 17274 - RNA, 20 nt, Artificial Sequence
  Synthetic oligonucleotide: PDCD1-113
uggcggccaggaugguucuu

SEQ ID NO: 17275 - RNA, 20 nt, Artificial Sequence
  Synthetic oligonucleotide: PDCD1-2106
cuugggccaggggaggaguu

SEQ ID NO: 17276 - RNA, 20 nt, Artificial Sequence
  Synthetic oligonucleotide: PDCD1-2204
acccugagcuguguggcuuu

SEQ ID NO: 17277 - RNA, 17 nt, Artificial Sequence
  Synthetic oligonucleotide: PDCD1-2942
gcccggcguuugugaaa

SEQ ID NO: 17278 - RNA, 17 nt, Artificial Sequence
  Synthetic oligonucleotide: PDCD1-2943
cauuuuauuacagcgaa

SEQ ID NO: 17279 - RNA, 17 nt, Artificial Sequence
  Synthetic oligonucleotide: PDCD1-3144
accugugccccagcgaa

SEQ ID NO: 17280 - RNA, 17 nt, Artificial Sequence
  Synthetic oligonucleotide: PDCD1-3165
gaaggucaaggcuggaa

SEQ ID NO: 17281 - RNA, 17 nt, Artificial Sequence
  Synthetic oligonucleotide: PDCD1-2861
cacggauggucugaaca

SEQ ID NO: 17282 - RNA, 17 nt, Artificial Sequence
  Synthetic oligonucleotide: PDCD1-2878
ccaagguuagucccaca

SEQ ID NO: 17283 - RNA, 17 nt, Artificial Sequence
  Synthetic oligonucleotide: PDCD1-3154
gugugaggccauccaca

SEQ ID NO: 17284 - RNA, 17 nt, Artificial Sequence
  Synthetic oligonucleotide: PDCD1-3160
cuguugcaggcaucaca

SEQ ID NO: 17285 - RNA, 17 nt, Artificial Sequence
  Synthetic oligonucleotide: PDCD1-3186
gcucagcacagaauaca

SEQ ID NO: 17286 - RNA, 17 nt, Artificial Sequence
  Synthetic oligonucleotide: PDCD1-2906
uggauggccucacacca

SEQ ID NO: 17287 - RNA, 17 nt, Artificial Sequence
  Synthetic oligonucleotide: PDCD1-2883
aacucgagugaggacca

SEQ ID NO: 17288 - RNA, 17 nt, Artificial Sequence
  Synthetic oligonucleotide: PDCD1-2858
ggccaaggccuccccca

SEQ ID NO: 17289 - RNA, 17 nt, Artificial Sequence
  Synthetic oligonucleotide: PDCD1-2390
gccacgcagacucccca

SEQ ID NO: 17290 - RNA, 17 nt, Artificial Sequence
  Synthetic oligonucleotide: PDCD1-2849
uguacacagagggccca

SEQ ID NO: 17291 - RNA, 17 nt, Artificial Sequence
  Synthetic oligonucleotide: PDCD1-2877
uugacgucguaaagcca

SEQ ID NO: 17292 - RNA, 17 nt, Artificial Sequence
  Synthetic oligonucleotide: PDCD1-3148
ggggagccgauuagcca

SEQ ID NO: 17293 - RNA, 17 nt, Artificial Sequence
  Synthetic oligonucleotide: PDCD1-2857
ccgggagagugaggcca

SEQ ID NO: 17294 - RNA, 17 nt, Artificial Sequence
  Synthetic oligonucleotide: PDCD1-2391
cagacuccccacggcca

SEQ ID NO: 17295 - RNA, 17 nt, Artificial Sequence
  Synthetic oligonucleotide: PDCD1-3156
aucuggaacuguggcca

SEQ ID NO: 17296 - RNA, 17 nt, Artificial Sequence
  Synthetic oligonucleotide: PDCD1-3080
ugcaccuggggaugcca

SEQ ID NO: 17297 - RNA, 17 nt, Artificial Sequence
  Synthetic oligonucleotide: PDCD1-2927
ccagcccacucgugcca

SEQ ID NO: 17298 - RNA, 17 nt, Artificial Sequence
  Synthetic oligonucleotide: PDCD1-2902
ugaaugacaacugucca

SEQ ID NO: 17299 - RNA, 17 nt, Artificial Sequence
  Synthetic oligonucleotide: PDCD1-3101
ucucugcccagauucca

SEQ ID NO: 17300 - RNA, 17 nt, Artificial Sequence
  Synthetic oligonucleotide: PDCD1-3133
ggcaccugcccccagca

SEQ ID NO: 17301 - RNA, 17 nt, Artificial Sequence
  Synthetic oligonucleotide: PDCD1-3173
gagugggcuggagggca

SEQ ID NO: 17302 - RNA, 17 nt, Artificial Sequence
  Synthetic oligonucleotide: PDCD1-2886
ccaaggaugccugggca

SEQ ID NO: 17303 - RNA, 17 nt, Artificial Sequence
  Synthetic oligonucleotide: PDCD1-2919
gggcuggggcgguggca

SEQ ID NO: 17304 - RNA, 17 nt, Artificial Sequence
  Synthetic oligonucleotide: PDCD1-3168
cccggggaagaagguca

SEQ ID NO: 17305 - RNA, 17 nt, Artificial Sequence
  Synthetic oligonucleotide: PDCD1-2850
cagagggcccaggguca

SEQ ID NO: 17306 - RNA, 17 nt, Artificial Sequence
  Synthetic oligonucleotide: PDCD1-2933
caggguggggugguuca

SEQ ID NO: 17307 - RNA, 17 nt, Artificial Sequence
  Synthetic oligonucleotide: PDCD1-3169
cagggccccggggaaga

SEQ ID NO: 17308 - RNA, 17 nt, Artificial Sequence
  Synthetic oligonucleotide: PDCD1-2847
gucacaguguacacaga

SEQ ID NO: 17309 - RNA, 17 nt, Artificial Sequence
  Synthetic oligonucleotide: PDCD1-2841
ggccagccgggcacaga

SEQ ID NO: 17310 - RNA, 17 nt, Artificial Sequence
  Synthetic oligonucleotide: PDCD1-2837
ggcuggcugggcacaga

SEQ ID NO: 17311 - RNA, 17 nt, Artificial Sequence
  Synthetic oligonucleotide: PDCD1-3091
cccggaucgaggagaga

SEQ ID NO: 17312 - RNA, 17 nt, Artificial Sequence
  Synthetic oligonucleotide: PDCD1-3145
caccugugccccagcga

SEQ ID NO: 17313 - RNA, 17 nt, Artificial Sequence
  Synthetic oligonucleotide: PDCD1-3117
ucgaguuuuccuaagga

SEQ ID NO: 17314 - RNA, 17 nt, Artificial Sequence
  Synthetic oligonucleotide: PDCD1-2873
acaauccccacccagga

SEQ ID NO: 17315 - RNA, 17 nt, Artificial Sequence
  Synthetic oligonucleotide: PDCD1-2859
aaggccucccccacgga

SEQ ID NO: 17316 - RNA, 17 nt, Artificial Sequence
  Synthetic oligonucleotide: PDCD1-3137
agggggaugggccggga

SEQ ID NO: 17317 - RNA, 17 nt, Artificial Sequence
  Synthetic oligonucleotide: PDCD1-3141
gccccagcgaaggggga

SEQ ID NO: 17318 - RNA, 17 nt, Artificial Sequence
  Synthetic oligonucleotide: PDCD1-3166
agaaggucaaggcugga

SEQ ID NO: 17319 - RNA, 17 nt, Artificial Sequence
  Synthetic oligonucleotide: PDCD1-3175
ggcacgagugggcugga

SEQ ID NO: 17320 - RNA, 17 nt, Artificial Sequence
  Synthetic oligonucleotide: PDCD1-2905
agcuuccaccuugugga

SEQ ID NO: 17321 - RNA, 17 nt, Artificial Sequence
  Synthetic oligonucleotide: PDCD1-2907
ugccugcaacagccuga

SEQ ID NO: 17322 - RNA, 17 nt, Artificial Sequence
  Synthetic oligonucleotide: PDCD1-3151
caagguggaagcuuuga

SEQ ID NO: 17323 - RNA, 17 nt, Artificial Sequence
  Synthetic oligonucleotide: PDCD1-3118
ucacucgaguuuuccua

SEQ ID NO: 17324 - RNA, 17 nt, Artificial Sequence
  Synthetic oligonucleotide: PDCD1-3146
acaguugucauucagua

SEQ ID NO: 17325 - RNA, 17 nt, Artificial Sequence
  Synthetic oligonucleotide: PDCD1-2944
uacagcgaauggaaaac

SEQ ID NO: 17326 - RNA, 17 nt, Artificial Sequence
  Synthetic oligonucleotide: PDCD1-2875
acuguccucacucgaac

SEQ ID NO: 17327 - RNA, 17 nt, Artificial Sequence
  Synthetic oligonucleotide: PDCD1-2860
ccacggauggucugaac

SEQ ID NO: 17328 - RNA, 17 nt, Artificial Sequence
  Synthetic oligonucleotide: PDCD1-3181
cagccaggcccaggcac

SEQ ID NO: 17329 - RNA, 17 nt, Artificial Sequence
  Synthetic oligonucleotide: PDCD1-2901
ccccuucgcuggggcac

SEQ ID NO: 17330 - RNA, 17 nt, Artificial Sequence
  Synthetic oligonucleotide: PDCD1-2851
agagggcccagggucac

SEQ ID NO: 17331 - RNA, 17 nt, Artificial Sequence
  Synthetic oligonucleotide: PDCD1-2908
gccugcaacagccugac

SEQ ID NO: 17332 - RNA, 17 nt, Artificial Sequence
  Synthetic oligonucleotide: PDCD1-3083
cccagccagccugcacc

SEQ ID NO: 17333 - RNA, 17 nt, Artificial Sequence
  Synthetic oligonucleotide: PDCD1-3180
ccugaaccaccccaccc

SEQ ID NO: 17334 - RNA, 17 nt, Artificial Sequence
  Synthetic oligonucleotide: PDCD1-2871
gggcacaauccccaccc

SEQ ID NO: 17335 - RNA, 17 nt, Artificial Sequence
  Synthetic oligonucleotide: PDCD1-2868
aaucugggcagagaccc

SEQ ID NO: 17336 - RNA, 17 nt, Artificial Sequence
  Synthetic oligonucleotide: PDCD1-3088
ugggcugcccgugaccc

SEQ ID NO: 17337 - RNA, 17 nt, Artificial Sequence
  Synthetic oligonucleotide: PDCD1-3171
cuggagggcagggcccc

SEQ ID NO: 17338 - RNA, 17 nt, Artificial Sequence
  Synthetic oligonucleotide: PDCD1-2831
caggccuuggcaucccc

SEQ ID NO: 17339 - RNA, 17 nt, Artificial Sequence
  Synthetic oligonucleotide: PDCD1-2924
ccuugaccuucuucccc

SEQ ID NO: 17340 - RNA, 17 nt, Artificial Sequence
  Synthetic oligonucleotide: PDCD1-2852
agggucacgggcagccc

SEQ ID NO: 17341 - RNA, 17 nt, Artificial Sequence
  Synthetic oligonucleotide: PDCD1-2865
gggcucggggagagccc

SEQ ID NO: 17342 - RNA, 17 nt, Artificial Sequence
  Synthetic oligonucleotide: PDCD1-3182
ggccgccagccaggccc

SEQ ID NO: 17343 - RNA, 17 nt, Artificial Sequence
  Synthetic oligonucleotide: PDCD1-3172
gcuggagggcagggccc

SEQ ID NO: 17344 - RNA, 17 nt, Artificial Sequence
  Synthetic oligonucleotide: PDCD1-2848
guguacacagagggccc

SEQ ID NO: 17345 - RNA, 17 nt, Artificial Sequence
  Synthetic oligonucleotide: PDCD1-4470
gcggcucugccuugccc

SEQ ID NO: 17346 - RNA, 17 nt, Artificial Sequence
  Synthetic oligonucleotide: PDCD1-2923
gccuugaccuucuuccc

SEQ ID NO: 17347 - RNA, 17 nt, Artificial Sequence
  Synthetic oligonucleotide: PDCD1-3183
acgccgggccgccagcc

SEQ ID NO: 17348 - RNA, 17 nt, Artificial Sequence
  Synthetic oligonucleotide: PDCD1-2839
ggcacagagggccagcc

SEQ ID NO: 17349 - RNA, 17 nt, Artificial Sequence
  Synthetic oligonucleotide: PDCD1-3184
gccauuucacaaacgcc

SEQ ID NO: 17350 - RNA, 17 nt, Artificial Sequence
  Synthetic oligonucleotide: PDCD1-3104
uggggauugugcccgcc

SEQ ID NO: 17351 - RNA, 17 nt, Artificial Sequence
  Synthetic oligonucleotide: PDCD1-3079
cuggggaugccaaggcc

SEQ ID NO: 17352 - RNA, 17 nt, Artificial Sequence
  Synthetic oligonucleotide: PDCD1-3135
ccgggaaggcagaggcc

SEQ ID NO: 17353 - RNA, 17 nt, Artificial Sequence
  Synthetic oligonucleotide: PDCD1-2941
gggccuggcuggcggcc

SEQ ID NO: 17354 - RNA, 17 nt, Artificial Sequence
  Synthetic oligonucleotide: PDCD1-3138
gcgaagggggaugggcc

SEQ ID NO: 17355 - RNA, 17 nt, Artificial Sequence
  Synthetic oligonucleotide: PDCD1-2938
gguccagugccugggcc

SEQ ID NO: 17356 - RNA, 17 nt, Artificial Sequence
  Synthetic oligonucleotide: PDCD1-2884
ugaggaccaaggaugcc

SEQ ID NO: 17357 - RNA, 17 nt, Artificial Sequence
  Synthetic oligonucleotide: PDCD1-2936
ucaggggguccagugcc

SEQ ID NO: 17358 - RNA, 17 nt, Artificial Sequence
  Synthetic oligonucleotide: PDCD1-2926
uccagcccacucgugcc

SEQ ID NO: 17359 - RNA, 17 nt, Artificial Sequence
  Synthetic oligonucleotide: PDCD1-2896
ugcugggggcaggugcc

SEQ ID NO: 17360 - RNA, 17 nt, Artificial Sequence
  Synthetic oligonucleotide: PDCD1-3085
ccuggacccucugugcc

SEQ ID NO: 17361 - RNA, 17 nt, Artificial Sequence
  Synthetic oligonucleotide: PDCD1-2855
cccucucuccucgaucc

SEQ ID NO: 17362 - RNA, 17 nt, Artificial Sequence
  Synthetic oligonucleotide: PDCD1-2874
ccacccaggagggaucc

SEQ ID NO: 17363 - RNA, 17 nt, Artificial Sequence
  Synthetic oligonucleotide: PDCD1-3109
gucuccaggaucccucc

SEQ ID NO: 17364 - RNA, 17 nt, Artificial Sequence
  Synthetic oligonucleotide: PDCD1-3086
ugaccacagcccgcucc

SEQ ID NO: 17365 - RNA, 17 nt, Artificial Sequence
  Synthetic oligonucleotide: PDCD1-3094
ccuuggccucacucucc

SEQ ID NO: 17366 - RNA, 17 nt, Artificial Sequence
  Synthetic oligonucleotide: PDCD1-3110
acaguucuucugucucc

SEQ ID NO: 17367 - RNA, 17 nt, Artificial Sequence
  Synthetic oligonucleotide: PDCD1-2842
ccgggcacagagggucc

SEQ ID NO: 17368 - RNA, 17 nt, Artificial Sequence
  Synthetic oligonucleotide: PDCD1-3102
gucucugcccagauucc

SEQ ID NO: 17369 - RNA, 17 nt, Artificial Sequence
  Synthetic oligonucleotide: PDCD1-2897
ccuggccucugccuucc

SEQ ID NO: 17370 - RNA, 17 nt, Artificial Sequence
  Synthetic oligonucleotide: PDCD1-3090
gagagggagccucuucc

SEQ ID NO: 17371 - RNA, 17 nt, Artificial Sequence
  Synthetic oligonucleotide: PDCD1-3134
aggcaccugcccccagc

SEQ ID NO: 17372 - RNA, 17 nt, Artificial Sequence
  Synthetic oligonucleotide: PDCD1-2838
gggcacagagggccagc

SEQ ID NO: 17373 - RNA, 17 nt, Artificial Sequence
  Synthetic oligonucleotide: PDCD1-2844
acagaggguccaggagc

SEQ ID NO: 17374 - RNA, 17 nt, Artificial Sequence
  Synthetic oligonucleotide: PDCD1-3112
ucaaaguuuagaugagc

SEQ ID NO: 17375 - RNA, 17 nt, Artificial Sequence
  Synthetic oligonucleotide: PDCD1-3185
agccauuucacaaacgc

SEQ ID NO: 17376 - RNA, 17 nt, Artificial Sequence
  Synthetic oligonucleotide: PDCD1-2898
ggcccaucccccuucgc

SEQ ID NO: 17377 - RNA, 17 nt, Artificial Sequence
  Synthetic oligonucleotide: PDCD1-3167
gggaagaaggucaaggc

SEQ ID NO: 17378 - RNA, 17 nt, Artificial Sequence
  Synthetic oligonucleotide: PDCD1-2870
ugggcagagacccaggc

SEQ ID NO: 17379 - RNA, 17 nt, Artificial Sequence
  Synthetic oligonucleotide: PDCD1-2833
cauccccaggugcaggc

SEQ ID NO: 17380 - RNA, 17 nt, Artificial Sequence
  Synthetic oligonucleotide: PDCD1-2528
agaaugacgggucaggc

SEQ ID NO: 17381 - RNA, 17 nt, Artificial Sequence
  Synthetic oligonucleotide: PDCD1-3084
gacccucugugcccggc

SEQ ID NO: 17382 - RNA, 17 nt, Artificial Sequence
  Synthetic oligonucleotide: PDCD1-3174
cgagugggcuggagggc

SEQ ID NO: 17383 - RNA, 17 nt, Artificial Sequence
  Synthetic oligonucleotide: PDCD1-2921
ggggcgguggcaggggc

SEQ ID NO: 17384 - RNA, 17 nt, Artificial Sequence
  Synthetic oligonucleotide: PDCD1-2913
cagccugacgggggggc

SEQ ID NO: 17385 - RNA, 17 nt, Artificial Sequence
  Synthetic oligonucleotide: PDCD1-3139
agcgaagggggaugggc

SEQ ID NO: 17386 - RNA, 17 nt, Artificial Sequence
  Synthetic oligonucleotide: PDCD1-3177
cccuggcacgagugggc

SEQ ID NO: 17387 - RNA, 17 nt, Artificial Sequence
  Synthetic oligonucleotide: PDCD1-2939
cagugccugggccuggc

SEQ ID NO: 17388 - RNA, 17 nt, Artificial Sequence
  Synthetic oligonucleotide: PDCD1-2834
cccaggugcaggcuggc

SEQ ID NO: 17389 - RNA, 17 nt, Artificial Sequence
  Synthetic oligonucleotide: PDCD1-2918
ggggcuggggcgguggc

SEQ ID NO: 17390 - RNA, 17 nt, Artificial Sequence
  Synthetic oligonucleotide: PDCD1-2832
uuggcauccccaggugc

SEQ ID NO: 17391 - RNA, 17 nt, Artificial Sequence
  Synthetic oligonucleotide: PDCD1-3161
ccccgucaggcuguugc

SEQ ID NO: 17392 - RNA, 17 nt, Artificial Sequence
  Synthetic oligonucleotide: PDCD1-2866
gggagagcccuggaauc

SEQ ID NO: 17393 - RNA, 17 nt, Artificial Sequence
  Synthetic oligonucleotide: PDCD1-3158
cacacgguggaaagauc

SEQ ID NO: 17394 - RNA, 17 nt, Artificial Sequence
  Synthetic oligonucleotide: PDCD1-2854
ucccucucuccucgauc

SEQ ID NO: 17395 - RNA, 17 nt, Artificial Sequence
  Synthetic oligonucleotide: PDCD1-2863
uggucugaacagggcuc

SEQ ID NO: 17396 - RNA, 17 nt, Artificial Sequence
  Synthetic oligonucleotide: PDCD1-3162
gccccagcccccccguc

SEQ ID NO: 17397 - RNA, 17 nt, Artificial Sequence
  Synthetic oligonucleotide: PDCD1-4471
uagugaugagaugcguc

SEQ ID NO: 17398 - RNA, 17 nt, Artificial Sequence
  Synthetic oligonucleotide: PDCD1-2527
cuguagaaugacggguc

SEQ ID NO: 17399 - RNA, 17 nt, Artificial Sequence
  Synthetic oligonucleotide: PDCD1-2395
gccaagguuugggguuc

SEQ ID NO: 17400 - RNA, 17 nt, Artificial Sequence
  Synthetic oligonucleotide: PDCD1-2932
ccaggguggggugguuc

SEQ ID NO: 17401 - RNA, 17 nt, Artificial Sequence
  Synthetic oligonucleotide: PDCD1-3143
ccugugccccagcgaag

SEQ ID NO: 17402 - RNA, 17 nt, Artificial Sequence
  Synthetic oligonucleotide: PDCD1-2853
acgggcagcccaggaag

SEQ ID NO: 17403 - RNA, 17 nt, Artificial Sequence
  Synthetic oligonucleotide: PDCD1-3164
aaggucaaggcuggaag

SEQ ID NO: 17404 - RNA, 17 nt, Artificial Sequence
  Synthetic oligonucleotide: PDCD1-2846
ggucacaguguacacag

SEQ ID NO: 17405 - RNA, 17 nt, Artificial Sequence
  Synthetic oligonucleotide: PDCD1-2840
gggccagccgggcacag

SEQ ID NO: 17406 - RNA, 17 nt, Artificial Sequence
  Synthetic oligonucleotide: PDCD1-2836
aggcuggcugggcacag

SEQ ID NO: 17407 - RNA, 17 nt, Artificial Sequence
  Synthetic oligonucleotide: PDCD1-3132
gcaccugcccccagcag

SEQ ID NO: 17408 - RNA, 17 nt, Artificial Sequence
  Synthetic oligonucleotide: PDCD1-3136
augggccgggaaggcag

SEQ ID NO: 17409 - RNA, 17 nt, Artificial Sequence
  Synthetic oligonucleotide: PDCD1-2920
ggcuggggcgguggcag

SEQ ID NO: 17410 - RNA, 17 nt, Artificial Sequence
  Synthetic oligonucleotide: PDCD1-2934
aggguggggugguucag

SEQ ID NO: 17411 - RNA, 17 nt, Artificial Sequence
  Synthetic oligonucleotide: PDCD1-3092
ucccggaucgaggagag

SEQ ID NO: 17412 - RNA, 17 nt, Artificial Sequence
  Synthetic oligonucleotide: PDCD1-3179
ccccacccuggcacgag

SEQ ID NO: 17413 - RNA, 17 nt, Artificial Sequence
  Synthetic oligonucleotide: PDCD1-2843
cacagaggguccaggag

SEQ ID NO: 17414 - RNA, 17 nt, Artificial Sequence
  Synthetic oligonucleotide: PDCD1-3150
aagguggaagcuuugag

SEQ ID NO: 17415 - RNA, 17 nt, Artificial Sequence
  Synthetic oligonucleotide: PDCD1-2909
ccugcaacagccugacg

SEQ ID NO: 17416 - RNA, 17 nt, Artificial Sequence
  Synthetic oligonucleotide: PDCD1-3170
uggagggcagggccccg

SEQ ID NO: 17417 - RNA, 17 nt, Artificial Sequence
  Synthetic oligonucleotide: PDCD1-2925
cuugaccuucuuccccg

SEQ ID NO: 17418 - RNA, 17 nt, Artificial Sequence
  Synthetic oligonucleotide: PDCD1-2530
accccaaaccuuggccg

SEQ ID NO: 17419 - RNA, 17 nt, Artificial Sequence
  Synthetic oligonucleotide: PDCD1-3100
ccuguucagaccauccg

SEQ ID NO: 17420 - RNA, 17 nt, Artificial Sequence
  Synthetic oligonucleotide: PDCD1-4472
uuaaaauaaccgaagcg

SEQ ID NO: 17421 - RNA, 17 nt, Artificial Sequence
  Synthetic oligonucleotide: PDCD1-2533
gccguggggagucugcg

SEQ ID NO: 17422 - RNA, 17 nt, Artificial Sequence
  Synthetic oligonucleotide: PDCD1-3093
cucacucucccggaucg

SEQ ID NO: 17423 - RNA, 17 nt, Artificial Sequence
  Synthetic oligonucleotide: PDCD1-2864
ggucugaacagggcucg

SEQ ID NO: 17424 - RNA, 17 nt, Artificial Sequence
  Synthetic oligonucleotide: PDCD1-3153
ugaggccauccacaagg

SEQ ID NO: 17425 - RNA, 17 nt, Artificial Sequence
  Synthetic oligonucleotide: PDCD1-3142
cugugccccagcgaagg

SEQ ID NO: 17426 - RNA, 17 nt, Artificial Sequence
  Synthetic oligonucleotide: PDCD1-2872
cacaauccccacccagg

SEQ ID NO: 17427 - RNA, 17 nt, Artificial Sequence
  Synthetic oligonucleotide: PDCD1-2869
cugggcagagacccagg

SEQ ID NO: 17428 - RNA, 17 nt, Artificial Sequence
  Synthetic oligonucleotide: PDCD1-2935
ggguggggugguucagg

SEQ ID NO: 17429 - RNA, 17 nt, Artificial Sequence
  Synthetic oligonucleotide: PDCD1-3149
agguggaagcuuugagg

SEQ ID NO: 17430 - RNA, 17 nt, Artificial Sequence
  Synthetic oligonucleotide: PDCD1-3159
uugcaggcaucacacgg

SEQ ID NO: 17431 - RNA, 17 nt, Artificial Sequence
  Synthetic oligonucleotide: PDCD1-2910
cugcaacagccugacgg

SEQ ID NO: 17432 - RNA, 17 nt, Artificial Sequence
  Synthetic oligonucleotide: PDCD1-2917
cgggggggcuggggcgg

SEQ ID NO: 17433 - RNA, 17 nt, Artificial Sequence
  Synthetic oligonucleotide: PDCD1-2928
gcccacucgugccaggg

SEQ ID NO: 17434 - RNA, 17 nt, Artificial Sequence
  Synthetic oligonucleotide: PDCD1-2911
ugcaacagccugacggg

SEQ ID NO: 17435 - RNA, 17 nt, Artificial Sequence
  Synthetic oligonucleotide: PDCD1-3163
gucaaggcuggaagggg

SEQ ID NO: 17436 - RNA, 17 nt, Artificial Sequence
  Synthetic oligonucleotide: PDCD1-2912
gcaacagccugacgggg

SEQ ID NO: 17437 - RNA, 17 nt, Artificial Sequence
  Synthetic oligonucleotide: PDCD1-3096
cagaccauccguggggg

SEQ ID NO: 17438 - RNA, 17 nt, Artificial Sequence
  Synthetic oligonucleotide: PDCD1-2916
ugacgggggggcugggg

SEQ ID NO: 17439 - RNA, 17 nt, Artificial Sequence
  Synthetic oligonucleotide: PDCD1-2931
cucgugccagggugggg

SEQ ID NO: 17440 - RNA, 17 nt, Artificial Sequence
  Synthetic oligonucleotide: PDCD1-3107
ccaggaucccuccuggg

SEQ ID NO: 17441 - RNA, 17 nt, Artificial Sequence
  Synthetic oligonucleotide: PDCD1-3176
uggcacgagugggcugg

SEQ ID NO: 17442 - RNA, 17 nt, Artificial Sequence
  Synthetic oligonucleotide: PDCD1-2940
ugccugggccuggcugg

SEQ ID NO: 17443 - RNA, 17 nt, Artificial Sequence
  Synthetic oligonucleotide: PDCD1-3097
guucagaccauccgugg

SEQ ID NO: 17444 - RNA, 17 nt, Artificial Sequence
  Synthetic oligonucleotide: PDCD1-2534
guggggagucugcgugg

SEQ ID NO: 17445 - RNA, 17 nt, Artificial Sequence
  Synthetic oligonucleotide: PDCD1-2880
aagguuagucccacaug

SEQ ID NO: 17446 - RNA, 17 nt, Artificial Sequence
  Synthetic oligonucleotide: PDCD1-3115
augggaugagccccaug

SEQ ID NO: 17447 - RNA, 17 nt, Artificial Sequence
  Synthetic oligonucleotide: PDCD1-3157
ggaaagaucuggaacug

SEQ ID NO: 17448 - RNA, 17 nt, Artificial Sequence
  Synthetic oligonucleotide: PDCD1-3081
cagccagccugcaccug

SEQ ID NO: 17449 - RNA, 17 nt, Artificial Sequence
  Synthetic oligonucleotide: PDCD1-2900
cccaucccccuucgcug

SEQ ID NO: 17450 - RNA, 17 nt, Artificial Sequence
  Synthetic oligonucleotide: PDCD1-2845
gguccaggagcgggcug

SEQ ID NO: 17451 - RNA, 17 nt, Artificial Sequence
  Synthetic oligonucleotide: PDCD1-2915
gccugacgggggggcug

SEQ ID NO: 17452 - RNA, 17 nt, Artificial Sequence
  Synthetic oligonucleotide: PDCD1-2856
cucgauccgggagagug

SEQ ID NO: 17453 - RNA, 17 nt, Artificial Sequence
  Synthetic oligonucleotide: PDCD1-2882
uuaggaaaacucgagug

SEQ ID NO: 17454 - RNA, 17 nt, Artificial Sequence
  Synthetic oligonucleotide: PDCD1-3111
guguaccuguucgagug

SEQ ID NO: 17455 - RNA, 17 nt, Artificial Sequence
  Synthetic oligonucleotide: PDCD1-2532
cccaaaccuuggccgug

SEQ ID NO: 17456 - RNA, 17 nt, Artificial Sequence
  Synthetic oligonucleotide: PDCD1-3098
uguucagaccauccgug

SEQ ID NO: 17457 - RNA, 17 nt, Artificial Sequence
  Synthetic oligonucleotide: PDCD1-2930
ccacucgugccagggug

SEQ ID NO: 17458 - RNA, 17 nt, Artificial Sequence
  Synthetic oligonucleotide: PDCD1-3105
aggaucccuccugggug

SEQ ID NO: 17459 - RNA, 17 nt, Artificial Sequence
  Synthetic oligonucleotide: PDCD1-2922
ggcaggggcuggcugug

SEQ ID NO: 17460 - RNA, 17 nt, Artificial Sequence
  Synthetic oligonucleotide: PDCD1-3155
acuguggccauggugug

SEQ ID NO: 17461 - RNA, 17 nt, Artificial Sequence
  Synthetic oligonucleotide: PDCD1-2904
ucaaagcuuccaccuug

SEQ ID NO: 17462 - RNA, 17 nt, Artificial Sequence
  Synthetic oligonucleotide: PDCD1-3152
acaagguggaagcuuug

SEQ ID NO: 17463 - RNA, 17 nt, Artificial Sequence
  Synthetic oligonucleotide: PDCD1-2394
cccacggccaagguuug

SEQ ID NO: 17464 - RNA, 17 nt, Artificial Sequence
  Synthetic oligonucleotide: PDCD1-2903
aacuguccauggcuaau

SEQ ID NO: 17465 - RNA, 17 nt, Artificial Sequence
  Synthetic oligonucleotide: PDCD1-2879
caagguuagucccacau

SEQ ID NO: 17466 - RNA, 17 nt, Artificial Sequence
  Synthetic oligonucleotide: PDCD1-3116
cgaguuuuccuaaggau

SEQ ID NO: 17467 - RNA, 17 nt, Artificial Sequence
  Synthetic oligonucleotide: PDCD1-3140
ccccagcgaagggggau

SEQ ID NO: 17468 - RNA, 17 nt, Artificial Sequence
  Synthetic oligonucleotide: PDCD1-2529
gccagaaccccaaaccu

SEQ ID NO: 17469 - RNA, 17 nt, Artificial Sequence
  Synthetic oligonucleotide: PDCD1-3113
ccaugugggacuaaccu

SEQ ID NO: 17470 - RNA, 17 nt, Artificial Sequence
  Synthetic oligonucleotide: PDCD1-3082
ccagccagccugcaccu

SEQ ID NO: 17471 - RNA, 17 nt, Artificial Sequence
  Synthetic oligonucleotide: PDCD1-3087
gggcugcccgugacccu

SEQ ID NO: 17472 - RNA, 17 nt, Artificial Sequence
  Synthetic oligonucleotide: PDCD1-3103
ggggauugugcccgccu

SEQ ID NO: 17473 - RNA, 17 nt, Artificial Sequence
  Synthetic oligonucleotide: PDCD1-3095
auccgugggggaggccu

SEQ ID NO: 17474 - RNA, 17 nt, Artificial Sequence
  Synthetic oligonucleotide: PDCD1-2885
gaggaccaaggaugccu

SEQ ID NO: 17475 - RNA, 17 nt, Artificial Sequence
  Synthetic oligonucleotide: PDCD1-2937
caggggguccagugccu

SEQ ID NO: 17476 - RNA, 17 nt, Artificial Sequence
  Synthetic oligonucleotide: PDCD1-3119
ccuugcccaggcauccu

SEQ ID NO: 17477 - RNA, 17 nt, Artificial Sequence
  Synthetic oligonucleotide: PDCD1-3108
ucuccaggaucccuccu

SEQ ID NO: 17478 - RNA, 17 nt, Artificial Sequence
  Synthetic oligonucleotide: PDCD1-3089
agagggagccucuuccu

SEQ ID NO: 17479 - RNA, 17 nt, Artificial Sequence
  Synthetic oligonucleotide: PDCD1-2899
gcccaucccccuucgcu

SEQ ID NO: 17480 - RNA, 17 nt, Artificial Sequence
  Synthetic oligonucleotide: PDCD1-2862
auggucugaacagggcu

SEQ ID NO: 17481 - RNA, 17 nt, Artificial Sequence
  Synthetic oligonucleotide: PDCD1-2914
agccugacgggggggcu

SEQ ID NO: 17482 - RNA, 17 nt, Artificial Sequence
  Synthetic oligonucleotide: PDCD1-2835
ccaggugcaggcuggcu

SEQ ID NO: 17483 - RNA, 17 nt, Artificial Sequence
  Synthetic oligonucleotide: PDCD1-2867
ggagagcccuggaaucu

SEQ ID NO: 17484 - RNA, 17 nt, Artificial Sequence
  Synthetic oligonucleotide: PDCD1-3147
gacaguugucauucagu

SEQ ID NO: 17485 - RNA, 17 nt, Artificial Sequence
  Synthetic oligonucleotide: PDCD1-3178
cccacccuggcacgagu

SEQ ID NO: 17486 - RNA, 17 nt, Artificial Sequence
  Synthetic oligonucleotide: PDCD1-2531
ccccaaaccuuggccgu

SEQ ID NO: 17487 - RNA, 17 nt, Artificial Sequence
  Synthetic oligonucleotide: PDCD1-3099
cuguucagaccauccgu

SEQ ID NO: 17488 - RNA, 17 nt, Artificial Sequence
  Synthetic oligonucleotide: PDCD1-2929
cccacucgugccagggu

SEQ ID NO: 17489 - RNA, 17 nt, Artificial Sequence
  Synthetic oligonucleotide: PDCD1-3106
caggaucccuccugggu

SEQ ID NO: 17490 - RNA, 17 nt, Artificial Sequence
  Synthetic oligonucleotide: PDCD1-3114
ugggaugagccccaugu

SEQ ID NO: 17491 - RNA, 17 nt, Artificial Sequence
  Synthetic oligonucleotide: PDCD1-2876
cucgaacagguacacuu

SEQ ID NO: 17492 - RNA, 17 nt, Artificial Sequence
  Synthetic oligonucleotide: PDCD1-2881
gggcucaucccauccuu

SEQ ID NO: 17493 - RNA, 17 nt, Artificial Sequence
  Synthetic oligonucleotide: PDCD1-4473
gguuucuagccucgcuu

SEQ ID NO: 17494 - RNA, 17 nt, Artificial Sequence
  Synthetic oligonucleotide: PDCD1-2392
uccccacggccaagguu

SEQ ID NO: 17495 - RNA, 17 nt, Artificial Sequence
  Synthetic oligonucleotide: PDCD1-2393
ccccacggccaagguuu

SEQ ID NO: 17496 - RNA, 20 nt, Artificial Sequence
  Synthetic oligonucleotide: PDCD1-2818
gcggcccggcguuugugaaa

SEQ ID NO: 17497 - RNA, 20 nt, Artificial Sequence
  Synthetic oligonucleotide: PDCD1-2819
gagcauuuuauuacagcgaa

SEQ ID NO: 17498 - RNA, 20 nt, Artificial Sequence
  Synthetic oligonucleotide: PDCD1-3023
gucaccugugccccagcgaa

SEQ ID NO: 17499 - RNA, 20 nt, Artificial Sequence
  Synthetic oligonucleotide: PDCD1-3044
gaagaaggucaaggcuggaa

SEQ ID NO: 17500 - RNA, 20 nt, Artificial Sequence
  Synthetic oligonucleotide: PDCD1-2737
ccccacggauggucugaaca

SEQ ID NO: 17501 - RNA, 20 nt, Artificial Sequence
  Synthetic oligonucleotide: PDCD1-2754
aagccaagguuagucccaca

SEQ ID NO: 17502 - RNA, 20 nt, Artificial Sequence
  Synthetic oligonucleotide: PDCD1-3033
auggugugaggccauccaca

SEQ ID NO: 17503 - RNA, 20 nt, Artificial Sequence
  Synthetic oligonucleotide: PDCD1-3039
aggcuguugcaggcaucaca

SEQ ID NO: 17504 - RNA, 20 nt, Artificial Sequence
  Synthetic oligonucleotide: PDCD1-3065
aaugcucagcacagaauaca

SEQ ID NO: 17505 - RNA, 20 nt, Artificial Sequence
  Synthetic oligonucleotide: PDCD1-2782
uuguggauggccucacacca

SEQ ID NO: 17506 - RNA, 20 nt, Artificial Sequence
  Synthetic oligonucleotide: PDCD1-2759
gaaaacucgagugaggacca

SEQ ID NO: 17507 - RNA, 20 nt, Artificial Sequence
  Synthetic oligonucleotide: PDCD1-2734
ugaggccaaggccuccccca

SEQ ID NO: 17508 - RNA, 20 nt, Artificial Sequence
  Synthetic oligonucleotide: PDCD1-2083
gccgccacgcagacucccca

SEQ ID NO: 17509 - RNA, 20 nt, Artificial Sequence
  Synthetic oligonucleotide: PDCD1-2725
caguguacacagagggccca

SEQ ID NO: 17510 - RNA, 20 nt, Artificial Sequence
  Synthetic oligonucleotide: PDCD1-2753
acuuugacgucguaaagcca

SEQ ID NO: 17511 - RNA, 20 nt, Artificial Sequence
  Synthetic oligonucleotide: PDCD1-3027
gagggggagccgauuagcca

SEQ ID NO: 17512 - RNA, 20 nt, Artificial Sequence
  Synthetic oligonucleotide: PDCD1-2733
gauccgggagagugaggcca

SEQ ID NO: 17513 - RNA, 20 nt, Artificial Sequence
  Synthetic oligonucleotide: PDCD1-2084
acgcagacuccccacggcca

SEQ ID NO: 17514 - RNA, 20 nt, Artificial Sequence
  Synthetic oligonucleotide: PDCD1-3035
aagaucuggaacuguggcca

SEQ ID NO: 17515 - RNA, 20 nt, Artificial Sequence
  Synthetic oligonucleotide: PDCD1-2959
gccugcaccuggggaugcca

SEQ ID NO: 17516 - RNA, 20 nt, Artificial Sequence
  Synthetic oligonucleotide: PDCD1-2803
ccuccagcccacucgugcca

SEQ ID NO: 17517 - RNA, 20 nt, Artificial Sequence
  Synthetic oligonucleotide: PDCD1-2778
uacugaaugacaacugucca

SEQ ID NO: 17518 - RNA, 20 nt, Artificial Sequence
  Synthetic oligonucleotide: PDCD1-2980
gggucucugcccagauucca

SEQ ID NO: 17519 - RNA, 20 nt, Artificial Sequence
  Synthetic oligonucleotide: PDCD1-3012
ccaggcaccugcccccagca

SEQ ID NO: 17520 - RNA, 20 nt, Artificial Sequence
  Synthetic oligonucleotide: PDCD1-3052
cacgagugggcuggagggca

SEQ ID NO: 17521 - RNA, 20 nt, Artificial Sequence
  Synthetic oligonucleotide: PDCD1-2762
ggaccaaggaugccugggca

SEQ ID NO: 17522 - RNA, 20 nt, Artificial Sequence
  Synthetic oligonucleotide: PDCD1-2795
ggggggcuggggcgguggca

SEQ ID NO: 17523 - RNA, 20 nt, Artificial Sequence
  Synthetic oligonucleotide: PDCD1-3047
ggccccggggaagaagguca

SEQ ID NO: 17524 - RNA, 20 nt, Artificial Sequence
  Synthetic oligonucleotide: PDCD1-2726
acacagagggcccaggguca

SEQ ID NO: 17525 - RNA, 20 nt, Artificial Sequence
  Synthetic oligonucleotide: PDCD1-2809
ugccaggguggggugguuca

SEQ ID NO: 17526 - RNA, 20 nt, Artificial Sequence
  Synthetic oligonucleotide: PDCD1-3048
gggcagggccccggggaaga

SEQ ID NO: 17527 - RNA, 20 nt, Artificial Sequence
  Synthetic oligonucleotide: PDCD1-2723
guggucacaguguacacaga

SEQ ID NO: 17528 - RNA, 20 nt, Artificial Sequence
  Synthetic oligonucleotide: PDCD1-2717
gagggccagccgggcacaga

SEQ ID NO: 17529 - RNA, 20 nt, Artificial Sequence
  Synthetic oligonucleotide: PDCD1-2713
gcaggcuggcugggcacaga

SEQ ID NO: 17530 - RNA, 20 nt, Artificial Sequence
  Synthetic oligonucleotide: PDCD1-2970
ucucccggaucgaggagaga

SEQ ID NO: 17531 - RNA, 20 nt, Artificial Sequence
  Synthetic oligonucleotide: PDCD1-3024
ggucaccugugccccagcga

SEQ ID NO: 17532 - RNA, 20 nt, Artificial Sequence
  Synthetic oligonucleotide: PDCD1-2996
cacucgaguuuuccuaagga

SEQ ID NO: 17533 - RNA, 20 nt, Artificial Sequence
  Synthetic oligonucleotide: PDCD1-2749
ggcacaauccccacccagga

SEQ ID NO: 17534 - RNA, 20 nt, Artificial Sequence
  Synthetic oligonucleotide: PDCD1-2735
gccaaggccucccccacgga

SEQ ID NO: 17535 - RNA, 20 nt, Artificial Sequence
  Synthetic oligonucleotide: PDCD1-3016
cgaagggggaugggccggga

SEQ ID NO: 17536 - RNA, 20 nt, Artificial Sequence
  Synthetic oligonucleotide: PDCD1-3020
ugugccccagcgaaggggga

SEQ ID NO: 17537 - RNA, 20 nt, Artificial Sequence
  Synthetic oligonucleotide: PDCD1-3045
ggaagaaggucaaggcugga

SEQ ID NO: 17538 - RNA, 20 nt, Artificial Sequence
  Synthetic oligonucleotide: PDCD1-3054
ccuggcacgagugggcugga

SEQ ID NO: 17539 - RNA, 20 nt, Artificial Sequence
  Synthetic oligonucleotide: PDCD1-2781
caaagcuuccaccuugugga

SEQ ID NO: 17540 - RNA, 20 nt, Artificial Sequence
  Synthetic oligonucleotide: PDCD1-2783
ugaugccugcaacagccuga

SEQ ID NO: 17541 - RNA, 20 nt, Artificial Sequence
  Synthetic oligonucleotide: PDCD1-3030
ccacaagguggaagcuuuga

SEQ ID NO: 17542 - RNA, 20 nt, Artificial Sequence
  Synthetic oligonucleotide: PDCD1-2997
uccucacucgaguuuuccua

SEQ ID NO: 17543 - RNA, 20 nt, Artificial Sequence
  Synthetic oligonucleotide: PDCD1-3025
uggacaguugucauucagua

SEQ ID NO: 17544 - RNA, 20 nt, Artificial Sequence
  Synthetic oligonucleotide: PDCD1-2820
uauuacagcgaauggaaaac

SEQ ID NO: 17545 - RNA, 20 nt, Artificial Sequence
  Synthetic oligonucleotide: PDCD1-2751
agaacuguccucacucgaac

SEQ ID NO: 17546 - RNA, 20 nt, Artificial Sequence
  Synthetic oligonucleotide: PDCD1-2736
cccccacggauggucugaac

SEQ ID NO: 17547 - RNA, 20 nt, Artificial Sequence
  Synthetic oligonucleotide: PDCD1-3060
cgccagccaggcccaggcac

SEQ ID NO: 17548 - RNA, 20 nt, Artificial Sequence
  Synthetic oligonucleotide: PDCD1-2777
aucccccuucgcuggggcac

SEQ ID NO: 17549 - RNA, 20 nt, Artificial Sequence
  Synthetic oligonucleotide: PDCD1-2727
cacagagggcccagggucac

SEQ ID NO: 17550 - RNA, 20 nt, Artificial Sequence
  Synthetic oligonucleotide: PDCD1-2784
gaugccugcaacagccugac

SEQ ID NO: 17551 - RNA, 20 nt, Artificial Sequence
  Synthetic oligonucleotide: PDCD1-2962
gugcccagccagccugcacc

SEQ ID NO: 17552 - RNA, 20 nt, Artificial Sequence
  Synthetic oligonucleotide: PDCD1-3059
cccccugaaccaccccaccc

SEQ ID NO: 17553 - RNA, 20 nt, Artificial Sequence
  Synthetic oligonucleotide: PDCD1-2747
ggcgggcacaauccccaccc

SEQ ID NO: 17554 - RNA, 20 nt, Artificial Sequence
  Synthetic oligonucleotide: PDCD1-2744
uggaaucugggcagagaccc

SEQ ID NO: 17555 - RNA, 20 nt, Artificial Sequence
  Synthetic oligonucleotide: PDCD1-2967
uccugggcugcccgugaccc

SEQ ID NO: 17556 - RNA, 20 nt, Artificial Sequence
  Synthetic oligonucleotide: PDCD1-3050
gggcuggagggcagggcccc

SEQ ID NO: 17557 - RNA, 20 nt, Artificial Sequence
  Synthetic oligonucleotide: PDCD1-2800
cagccuugaccuucuucccc

SEQ ID NO: 17558 - RNA, 20 nt, Artificial Sequence
  Synthetic oligonucleotide: PDCD1-2728
cccagggucacgggcagccc

SEQ ID NO: 17559 - RNA, 20 nt, Artificial Sequence
  Synthetic oligonucleotide: PDCD1-2741
acagggcucggggagagccc

SEQ ID NO: 17560 - RNA, 20 nt, Artificial Sequence
  Synthetic oligonucleotide: PDCD1-3061
ccgggccgccagccaggccc

SEQ ID NO: 17561 - RNA, 20 nt, Artificial Sequence
  Synthetic oligonucleotide: PDCD1-3051
ugggcuggagggcagggccc

SEQ ID NO: 17562 - RNA, 20 nt, Artificial Sequence
  Synthetic oligonucleotide: PDCD1-2724
acaguguacacagagggccc

SEQ ID NO: 17563 - RNA, 20 nt, Artificial Sequence
  Synthetic oligonucleotide: PDCD1-4474
guggcggcucugccuugccc

SEQ ID NO: 17564 - RNA, 20 nt, Artificial Sequence
  Synthetic oligonucleotide: PDCD1-2799
ccagccuugaccuucuuccc

SEQ ID NO: 17565 - RNA, 20 nt, Artificial Sequence
  Synthetic oligonucleotide: PDCD1-3062
caaacgccgggccgccagcc

SEQ ID NO: 17566 - RNA, 20 nt, Artificial Sequence
  Synthetic oligonucleotide: PDCD1-2715
cugggcacagagggccagcc

SEQ ID NO: 17567 - RNA, 20 nt, Artificial Sequence
  Synthetic oligonucleotide: PDCD1-3063
caagccauuucacaaacgcc

SEQ ID NO: 17568 - RNA, 20 nt, Artificial Sequence
  Synthetic oligonucleotide: PDCD1-2983
ggguggggauugugcccgcc

SEQ ID NO: 17569 - RNA, 20 nt, Artificial Sequence
  Synthetic oligonucleotide: PDCD1-2958
caccuggggaugccaaggcc

SEQ ID NO: 17570 - RNA, 20 nt, Artificial Sequence
  Synthetic oligonucleotide: PDCD1-3014
gggccgggaaggcagaggcc

SEQ ID NO: 17571 - RNA, 20 nt, Artificial Sequence
  Synthetic oligonucleotide: PDCD1-2817
ccugggccuggcuggcggcc

SEQ ID NO: 17572 - RNA, 20 nt, Artificial Sequence
  Synthetic oligonucleotide: PDCD1-3017
ccagcgaagggggaugggcc

SEQ ID NO: 17573 - RNA, 20 nt, Artificial Sequence
  Synthetic oligonucleotide: PDCD1-2814
ggggguccagugccugggcc

SEQ ID NO: 17574 - RNA, 20 nt, Artificial Sequence
  Synthetic oligonucleotide: PDCD1-2760
gagugaggaccaaggaugcc

SEQ ID NO: 17575 - RNA, 20 nt, Artificial Sequence
  Synthetic oligonucleotide: PDCD1-2812
gguucaggggguccagugcc

SEQ ID NO: 17576 - RNA, 20 nt, Artificial Sequence
  Synthetic oligonucleotide: PDCD1-2802
cccuccagcccacucgugcc

SEQ ID NO: 17577 - RNA, 20 nt, Artificial Sequence
  Synthetic oligonucleotide: PDCD1-2772
cccugcugggggcaggugcc

SEQ ID NO: 17578 - RNA, 20 nt, Artificial Sequence
  Synthetic oligonucleotide: PDCD1-2964
gcuccuggacccucugugcc

SEQ ID NO: 17579 - RNA, 20 nt, Artificial Sequence
  Synthetic oligonucleotide: PDCD1-2731
gcucccucucuccucgaucc

SEQ ID NO: 17580 - RNA, 20 nt, Artificial Sequence
  Synthetic oligonucleotide: PDCD1-2750
uccccacccaggagggaucc

SEQ ID NO: 17581 - RNA, 20 nt, Artificial Sequence
  Synthetic oligonucleotide: PDCD1-2988
ucugucuccaggaucccucc

SEQ ID NO: 17582 - RNA, 20 nt, Artificial Sequence
  Synthetic oligonucleotide: PDCD1-2965
cugugaccacagcccgcucc

SEQ ID NO: 17583 - RNA, 20 nt, Artificial Sequence
  Synthetic oligonucleotide: PDCD1-2973
aggccuuggccucacucucc

SEQ ID NO: 17584 - RNA, 20 nt, Artificial Sequence
  Synthetic oligonucleotide: PDCD1-2989
aggacaguucuucugucucc

SEQ ID NO: 17585 - RNA, 20 nt, Artificial Sequence
  Synthetic oligonucleotide: PDCD1-2718
cagccgggcacagagggucc

SEQ ID NO: 17586 - RNA, 20 nt, Artificial Sequence
  Synthetic oligonucleotide: PDCD1-2981
ugggucucugcccagauucc

SEQ ID NO: 17587 - RNA, 20 nt, Artificial Sequence
  Synthetic oligonucleotide: PDCD1-2773
gugccuggccucugccuucc

SEQ ID NO: 17588 - RNA, 20 nt, Artificial Sequence
  Synthetic oligonucleotide: PDCD1-2969
ggagagagggagccucuucc

SEQ ID NO: 17589 - RNA, 20 nt, Artificial Sequence
  Synthetic oligonucleotide: PDCD1-3013
gccaggcaccugcccccagc

SEQ ID NO: 17590 - RNA, 20 nt, Artificial Sequence
  Synthetic oligonucleotide: PDCD1-2714
gcugggcacagagggccagc

SEQ ID NO: 17591 - RNA, 20 nt, Artificial Sequence
  Synthetic oligonucleotide: PDCD1-2720
ggcacagaggguccaggagc

SEQ ID NO: 17592 - RNA, 20 nt, Artificial Sequence
  Synthetic oligonucleotide: PDCD1-2991
acgucaaaguuuagaugagc

SEQ ID NO: 17593 - RNA, 20 nt, Artificial Sequence
  Synthetic oligonucleotide: PDCD1-3064
gcaagccauuucacaaacgc

SEQ ID NO: 17594 - RNA, 20 nt, Artificial Sequence
  Synthetic oligonucleotide: PDCD1-2774
cccggcccaucccccuucgc

SEQ ID NO: 17595 - RNA, 20 nt, Artificial Sequence
  Synthetic oligonucleotide: PDCD1-3046
ccggggaagaaggucaaggc

SEQ ID NO: 17596 - RNA, 20 nt, Artificial Sequence
  Synthetic oligonucleotide: PDCD1-2746
aucugggcagagacccaggc

SEQ ID NO: 17597 - RNA, 20 nt, Artificial Sequence
  Synthetic oligonucleotide: PDCD1-2709
uggcauccccaggugcaggc

SEQ ID NO: 17598 - RNA, 20 nt, Artificial Sequence
  Synthetic oligonucleotide: PDCD1-2221
uguagaaugacgggucaggc

SEQ ID NO: 17599 - RNA, 20 nt, Artificial Sequence
  Synthetic oligonucleotide: PDCD1-2963
cuggacccucugugcccggc

SEQ ID NO: 17600 - RNA, 20 nt, Artificial Sequence
  Synthetic oligonucleotide: PDCD1-3053
gcacgagugggcuggagggc

SEQ ID NO: 17601 - RNA, 20 nt, Artificial Sequence
  Synthetic oligonucleotide: PDCD1-2797
gcuggggcgguggcaggggc

SEQ ID NO: 17602 - RNA, 20 nt, Artificial Sequence
  Synthetic oligonucleotide: PDCD1-2789
caacagccugacgggggggc

SEQ ID NO: 17603 - RNA, 20 nt, Artificial Sequence
  Synthetic oligonucleotide: PDCD1-3018
cccagcgaagggggaugggc

SEQ ID NO: 17604 - RNA, 20 nt, Artificial Sequence
  Synthetic oligonucleotide: PDCD1-3056
ccacccuggcacgagugggc

SEQ ID NO: 17605 - RNA, 20 nt, Artificial Sequence
  Synthetic oligonucleotide: PDCD1-2815
guccagugccugggccuggc

SEQ ID NO: 17606 - RNA, 20 nt, Artificial Sequence
  Synthetic oligonucleotide: PDCD1-2710
auccccaggugcaggcuggc

SEQ ID NO: 17607 - RNA, 20 nt, Artificial Sequence
  Synthetic oligonucleotide: PDCD1-2794
gggggggcuggggcgguggc

SEQ ID NO: 17608 - RNA, 20 nt, Artificial Sequence
  Synthetic oligonucleotide: PDCD1-2708
gccuuggcauccccaggugc

SEQ ID NO: 17609 - RNA, 20 nt, Artificial Sequence
  Synthetic oligonucleotide: PDCD1-3040
cccccccgucaggcuguugc

SEQ ID NO: 17610 - RNA, 20 nt, Artificial Sequence
  Synthetic oligonucleotide: PDCD1-2742
ucggggagagcccuggaauc

SEQ ID NO: 17611 - RNA, 20 nt, Artificial Sequence
  Synthetic oligonucleotide: PDCD1-3037
caucacacgguggaaagauc

SEQ ID NO: 17612 - RNA, 20 nt, Artificial Sequence
  Synthetic oligonucleotide: PDCD1-2730
ggcucccucucuccucgauc

SEQ ID NO: 17613 - RNA, 20 nt, Artificial Sequence
  Synthetic oligonucleotide: PDCD1-2739
ggauggucugaacagggcuc

SEQ ID NO: 17614 - RNA, 20 nt, Artificial Sequence
  Synthetic oligonucleotide: PDCD1-3041
accgccccagcccccccguc

SEQ ID NO: 17615 - RNA, 20 nt, Artificial Sequence
  Synthetic oligonucleotide: PDCD1-4475
uauuagugaugagaugcguc

SEQ ID NO: 17616 - RNA, 20 nt, Artificial Sequence
  Synthetic oligonucleotide: PDCD1-2220
uuucuguagaaugacggguc

SEQ ID NO: 17617 - RNA, 20 nt, Artificial Sequence
  Synthetic oligonucleotide: PDCD1-2088
acggccaagguuugggguuc

SEQ ID NO: 17618 - RNA, 20 nt, Artificial Sequence
  Synthetic oligonucleotide: PDCD1-2808
gugccaggguggggugguuc

SEQ ID NO: 17619 - RNA, 20 nt, Artificial Sequence
  Synthetic oligonucleotide: PDCD1-3022
ucaccugugccccagcgaag

SEQ ID NO: 17620 - RNA, 20 nt, Artificial Sequence
  Synthetic oligonucleotide: PDCD1-2729
gucacgggcagcccaggaag

SEQ ID NO: 17621 - RNA, 20 nt, Artificial Sequence
  Synthetic oligonucleotide: PDCD1-3043
aagaaggucaaggcuggaag

SEQ ID NO: 17622 - RNA, 20 nt, Artificial Sequence
  Synthetic oligonucleotide: PDCD1-2722
uguggucacaguguacacag

SEQ ID NO: 17623 - RNA, 20 nt, Artificial Sequence
  Synthetic oligonucleotide: PDCD1-2716
agagggccagccgggcacag

SEQ ID NO: 17624 - RNA, 20 nt, Artificial Sequence
  Synthetic oligonucleotide: PDCD1-2712
ugcaggcuggcugggcacag

SEQ ID NO: 17625 - RNA, 20 nt, Artificial Sequence
  Synthetic oligonucleotide: PDCD1-3011
caggcaccugcccccagcag

SEQ ID NO: 17626 - RNA, 20 nt, Artificial Sequence
  Synthetic oligonucleotide: PDCD1-3015
gggaugggccgggaaggcag

SEQ ID NO: 17627 - RNA, 20 nt, Artificial Sequence
  Synthetic oligonucleotide: PDCD1-2796
gggggcuggggcgguggcag

SEQ ID NO: 17628 - RNA, 20 nt, Artificial Sequence
  Synthetic oligonucleotide: PDCD1-2810
gccaggguggggugguucag

SEQ ID NO: 17629 - RNA, 20 nt, Artificial Sequence
  Synthetic oligonucleotide: PDCD1-2971
cucucccggaucgaggagag

SEQ ID NO: 17630 - RNA, 20 nt, Artificial Sequence
  Synthetic oligonucleotide: PDCD1-3058
ccaccccacccuggcacgag

SEQ ID NO: 17631 - RNA, 20 nt, Artificial Sequence
  Synthetic oligonucleotide: PDCD1-2719
gggcacagaggguccaggag

SEQ ID NO: 17632 - RNA, 20 nt, Artificial Sequence
  Synthetic oligonucleotide: PDCD1-3029
cacaagguggaagcuuugag

SEQ ID NO: 17633 - RNA, 20 nt, Artificial Sequence
  Synthetic oligonucleotide: PDCD1-2785
augccugcaacagccugacg

SEQ ID NO: 17634 - RNA, 20 nt, Artificial Sequence
  Synthetic oligonucleotide: PDCD1-3049
ggcuggagggcagggccccg

SEQ ID NO: 17635 - RNA, 20 nt, Artificial Sequence
  Synthetic oligonucleotide: PDCD1-2801
agccuugaccuucuuccccg

SEQ ID NO: 17636 - RNA, 20 nt, Artificial Sequence
  Synthetic oligonucleotide: PDCD1-2223
agaaccccaaaccuuggccg

SEQ ID NO: 17637 - RNA, 20 nt, Artificial Sequence
  Synthetic oligonucleotide: PDCD1-2979
agcccuguucagaccauccg

SEQ ID NO: 17638 - RNA, 20 nt, Artificial Sequence
  Synthetic oligonucleotide: PDCD1-4476
agcuuaaaauaaccgaagcg

SEQ ID NO: 17639 - RNA, 20 nt, Artificial Sequence
  Synthetic oligonucleotide: PDCD1-2226
uuggccguggggagucugcg

SEQ ID NO: 17640 - RNA, 20 nt, Artificial Sequence
  Synthetic oligonucleotide: PDCD1-2972
ggccucacucucccggaucg

SEQ ID NO: 17641 - RNA, 20 nt, Artificial Sequence
  Synthetic oligonucleotide: PDCD1-2740
gauggucugaacagggcucg

SEQ ID NO: 17642 - RNA, 20 nt, Artificial Sequence
  Synthetic oligonucleotide: PDCD1-3032
gugugaggccauccacaagg

SEQ ID NO: 17643 - RNA, 20 nt, Artificial Sequence
  Synthetic oligonucleotide: PDCD1-3021
caccugugccccagcgaagg

SEQ ID NO: 17644 - RNA, 20 nt, Artificial Sequence
  Synthetic oligonucleotide: PDCD1-2748
gggcacaauccccacccagg

SEQ ID NO: 17645 - RNA, 20 nt, Artificial Sequence
  Synthetic oligonucleotide: PDCD1-2745
aaucugggcagagacccagg

SEQ ID NO: 17646 - RNA, 20 nt, Artificial Sequence
  Synthetic oligonucleotide: PDCD1-2811
ccaggguggggugguucagg

SEQ ID NO: 17647 - RNA, 20 nt, Artificial Sequence
  Synthetic oligonucleotide: PDCD1-3028
acaagguggaagcuuugagg

SEQ ID NO: 17648 - RNA, 20 nt, Artificial Sequence
  Synthetic oligonucleotide: PDCD1-3038
cuguugcaggcaucacacgg

SEQ ID NO: 17649 - RNA, 20 nt, Artificial Sequence
  Synthetic oligonucleotide: PDCD1-2786
ugccugcaacagccugacgg

SEQ ID NO: 17650 - RNA, 20 nt, Artificial Sequence
  Synthetic oligonucleotide: PDCD1-2793
ugacgggggggcuggggcgg

SEQ ID NO: 17651 - RNA, 20 nt, Artificial Sequence
  Synthetic oligonucleotide: PDCD1-2804
ccagcccacucgugccaggg

SEQ ID NO: 17652 - RNA, 20 nt, Artificial Sequence
  Synthetic oligonucleotide: PDCD1-2787
gccugcaacagccugacggg

SEQ ID NO: 17653 - RNA, 20 nt, Artificial Sequence
  Synthetic oligonucleotide: PDCD1-3042
aaggucaaggcuggaagggg

SEQ ID NO: 17654 - RNA, 20 nt, Artificial Sequence
  Synthetic oligonucleotide: PDCD1-2788
ccugcaacagccugacgggg

SEQ ID NO: 17655 - RNA, 20 nt, Artificial Sequence
  Synthetic oligonucleotide: PDCD1-2975
guucagaccauccguggggg

SEQ ID NO: 17656 - RNA, 20 nt, Artificial Sequence
  Synthetic oligonucleotide: PDCD1-2792
gccugacgggggggcugggg

SEQ ID NO: 17657 - RNA, 20 nt, Artificial Sequence
  Synthetic oligonucleotide: PDCD1-2807
ccacucgugccagggugggg

SEQ ID NO: 17658 - RNA, 20 nt, Artificial Sequence
  Synthetic oligonucleotide: PDCD1-2986
ucuccaggaucccuccuggg

SEQ ID NO: 17659 - RNA, 20 nt, Artificial Sequence
  Synthetic oligonucleotide: PDCD1-3055
cccuggcacgagugggcugg

SEQ ID NO: 17660 - RNA, 20 nt, Artificial Sequence
  Synthetic oligonucleotide: PDCD1-2816
cagugccugggccuggcugg

SEQ ID NO: 17661 - RNA, 20 nt, Artificial Sequence
  Synthetic oligonucleotide: PDCD1-2976
ccuguucagaccauccgugg

SEQ ID NO: 17662 - RNA, 20 nt, Artificial Sequence
  Synthetic oligonucleotide: PDCD1-2227
gccguggggagucugcgugg

SEQ ID NO: 17663 - RNA, 20 nt, Artificial Sequence
  Synthetic oligonucleotide: PDCD1-2756
gccaagguuagucccacaug

SEQ ID NO: 17664 - RNA, 20 nt, Artificial Sequence
  Synthetic oligonucleotide: PDCD1-2994
aggaugggaugagccccaug

SEQ ID NO: 17665 - RNA, 20 nt, Artificial Sequence
  Synthetic oligonucleotide: PDCD1-3036
gguggaaagaucuggaacug

SEQ ID NO: 17666 - RNA, 20 nt, Artificial Sequence
  Synthetic oligonucleotide: PDCD1-2960
gcccagccagccugcaccug

SEQ ID NO: 17667 - RNA, 20 nt, Artificial Sequence
  Synthetic oligonucleotide: PDCD1-2776
cggcccaucccccuucgcug

SEQ ID NO: 17668 - RNA, 20 nt, Artificial Sequence
  Synthetic oligonucleotide: PDCD1-2721
gaggguccaggagcgggcug

SEQ ID NO: 17669 - RNA, 20 nt, Artificial Sequence
  Synthetic oligonucleotide: PDCD1-2791
acagccugacgggggggcug

SEQ ID NO: 17670 - RNA, 20 nt, Artificial Sequence
  Synthetic oligonucleotide: PDCD1-2732
cuccucgauccgggagagug

SEQ ID NO: 17671 - RNA, 20 nt, Artificial Sequence
  Synthetic oligonucleotide: PDCD1-2758
uccuuaggaaaacucgagug

SEQ ID NO: 17672 - RNA, 20 nt, Artificial Sequence
  Synthetic oligonucleotide: PDCD1-2990
aaaguguaccuguucgagug

SEQ ID NO: 17673 - RNA, 20 nt, Artificial Sequence
  Synthetic oligonucleotide: PDCD1-2225
aaccccaaaccuuggccgug

SEQ ID NO: 17674 - RNA, 20 nt, Artificial Sequence
  Synthetic oligonucleotide: PDCD1-2977
cccuguucagaccauccgug

SEQ ID NO: 17675 - RNA, 20 nt, Artificial Sequence
  Synthetic oligonucleotide: PDCD1-2806
agcccacucgugccagggug

SEQ ID NO: 17676 - RNA, 20 nt, Artificial Sequence
  Synthetic oligonucleotide: PDCD1-2984
uccaggaucccuccugggug

SEQ ID NO: 17677 - RNA, 20 nt, Artificial Sequence
  Synthetic oligonucleotide: PDCD1-2798
gguggcaggggcuggcugug

SEQ ID NO: 17678 - RNA, 20 nt, Artificial Sequence
  Synthetic oligonucleotide: PDCD1-3034
ggaacuguggccauggugug

SEQ ID NO: 17679 - RNA, 20 nt, Artificial Sequence
  Synthetic oligonucleotide: PDCD1-2780
cccucaaagcuuccaccuug

SEQ ID NO: 17680 - RNA, 20 nt, Artificial Sequence
  Synthetic oligonucleotide: PDCD1-3031
uccacaagguggaagcuuug

SEQ ID NO: 17681 - RNA, 20 nt, Artificial Sequence
  Synthetic oligonucleotide: PDCD1-2087
cuccccacggccaagguuug

SEQ ID NO: 17682 - RNA, 20 nt, Artificial Sequence
  Synthetic oligonucleotide: PDCD1-2779
gacaacuguccauggcuaau

SEQ ID NO: 17683 - RNA, 20 nt, Artificial Sequence
  Synthetic oligonucleotide: PDCD1-2755
agccaagguuagucccacau

SEQ ID NO: 17684 - RNA, 20 nt, Artificial Sequence
  Synthetic oligonucleotide: PDCD1-2995
acucgaguuuuccuaaggau

SEQ ID NO: 17685 - RNA, 20 nt, Artificial Sequence
  Synthetic oligonucleotide: PDCD1-3019
gugccccagcgaagggggau

SEQ ID NO: 17686 - RNA, 20 nt, Artificial Sequence
  Synthetic oligonucleotide: PDCD1-2222
cuggccagaaccccaaaccu

SEQ ID NO: 17687 - RNA, 20 nt, Artificial Sequence
  Synthetic oligonucleotide: PDCD1-2992
gccccaugugggacuaaccu

SEQ ID NO: 17688 - RNA, 20 nt, Artificial Sequence
  Synthetic oligonucleotide: PDCD1-2961
ugcccagccagccugcaccu

SEQ ID NO: 17689 - RNA, 20 nt, Artificial Sequence
  Synthetic oligonucleotide: PDCD1-2966
ccugggcugcccgugacccu

SEQ ID NO: 17690 - RNA, 20 nt, Artificial Sequence
  Synthetic oligonucleotide: PDCD1-2982
gguggggauugugcccgccu

SEQ ID NO: 17691 - RNA, 20 nt, Artificial Sequence
  Synthetic oligonucleotide: PDCD1-2974
accauccgugggggaggccu

SEQ ID NO: 17692 - RNA, 20 nt, Artificial Sequence
  Synthetic oligonucleotide: PDCD1-2761
agugaggaccaaggaugccu

SEQ ID NO: 17693 - RNA, 20 nt, Artificial Sequence
  Synthetic oligonucleotide: PDCD1-2813
guucaggggguccagugccu

SEQ ID NO: 17694 - RNA, 20 nt, Artificial Sequence
  Synthetic oligonucleotide: PDCD1-2998
cugccuugcccaggcauccu

SEQ ID NO: 17695 - RNA, 20 nt, Artificial Sequence
  Synthetic oligonucleotide: PDCD1-2987
cugucuccaggaucccuccu

SEQ ID NO: 17696 - RNA, 20 nt, Artificial Sequence
  Synthetic oligonucleotide: PDCD1-2968
gagagagggagccucuuccu

SEQ ID NO: 17697 - RNA, 20 nt, Artificial Sequence
  Synthetic oligonucleotide: PDCD1-2775
ccggcccaucccccuucgcu

SEQ ID NO: 17698 - RNA, 20 nt, Artificial Sequence
  Synthetic oligonucleotide: PDCD1-2738
cggauggucugaacagggcu

SEQ ID NO: 17699 - RNA, 20 nt, Artificial Sequence
  Synthetic oligonucleotide: PDCD1-2790
aacagccugacgggggggcu

SEQ ID NO: 17700 - RNA, 20 nt, Artificial Sequence
  Synthetic oligonucleotide: PDCD1-2711
uccccaggugcaggcuggcu

SEQ ID NO: 17701 - RNA, 20 nt, Artificial Sequence
  Synthetic oligonucleotide: PDCD1-2743
cggggagagcccuggaaucu

SEQ ID NO: 17702 - RNA, 20 nt, Artificial Sequence
  Synthetic oligonucleotide: PDCD1-3026
auggacaguugucauucagu

SEQ ID NO: 17703 - RNA, 20 nt, Artificial Sequence
  Synthetic oligonucleotide: PDCD1-3057
caccccacccuggcacgagu

SEQ ID NO: 17704 - RNA, 20 nt, Artificial Sequence
  Synthetic oligonucleotide: PDCD1-2224
gaaccccaaaccuuggccgu

SEQ ID NO: 17705 - RNA, 20 nt, Artificial Sequence
  Synthetic oligonucleotide: PDCD1-2978
gcccuguucagaccauccgu

SEQ ID NO: 17706 - RNA, 20 nt, Artificial Sequence
  Synthetic oligonucleotide: PDCD1-2805
cagcccacucgugccagggu

SEQ ID NO: 17707 - RNA, 20 nt, Artificial Sequence
  Synthetic oligonucleotide: PDCD1-2985
cuccaggaucccuccugggu

SEQ ID NO: 17708 - RNA, 20 nt, Artificial Sequence
  Synthetic oligonucleotide: PDCD1-2993
ggaugggaugagccccaugu

SEQ ID NO: 17709 - RNA, 20 nt, Artificial Sequence
  Synthetic oligonucleotide: PDCD1-2752
ucacucgaacagguacacuu

SEQ ID NO: 17710 - RNA, 20 nt, Artificial Sequence
  Synthetic oligonucleotide: PDCD1-2757
auggggcucaucccauccuu

SEQ ID NO: 17711 - RNA, 20 nt, Artificial Sequence
  Synthetic oligonucleotide: PDCD1-4477
ggcgguuucuagccucgcuu

SEQ ID NO: 17712 - RNA, 20 nt, Artificial Sequence
  Synthetic oligonucleotide: PDCD1-2085
gacuccccacggccaagguu

SEQ ID NO: 17713 - RNA, 20 nt, Artificial Sequence
  Synthetic oligonucleotide: PDCD1-2086
acuccccacggccaagguuu

SEQ ID NO: 17714 - RNA, 21 nt, Artificial Sequence
  Synthetic oligonucleotide: PDCD1-4478
uuggggcccagagaggaaccc

SEQ ID NO: 17715 - RNA, 22 nt, Artificial Sequence
  Synthetic oligonucleotide: PDCD1-4479
guuggggcccagagaggaaccc

SEQ ID NO: 17716 - RNA, 23 nt, Artificial Sequence
  Synthetic oligonucleotide: PDCD1-4480
aguuggggcccagagaggaaccc

SEQ ID NO: 17717 - RNA, 24 nt, Artificial Sequence
  Synthetic oligonucleotide: PDCD1-4481
gaguuggggcccagagaggaaccc

SEQ ID NO: 17718 - RNA, 18 nt, Artificial Sequence
  Synthetic oligonucleotide: PDCD1-4482
cuccacauccacgugggc

SEQ ID NO: 17719 - RNA, 19 nt, Artificial Sequence
  Synthetic oligonucleotide: PDCD1-4483
ccuccacauccacgugggc

SEQ ID NO: 17720 - RNA, 20 nt, Artificial Sequence
  Synthetic oligonucleotide: PDCD1-1034
uccuccacauccacgugggc

SEQ ID NO: 17721 - RNA, 21 nt, Artificial Sequence
  Synthetic oligonucleotide: PDCD1-4484
uuccuccacauccacgugggc

SEQ ID NO: 17722 - RNA, 22 nt, Artificial Sequence
  Synthetic oligonucleotide: PDCD1-4485
cuuccuccacauccacgugggc

SEQ ID NO: 17723 - RNA, 23 nt, Artificial Sequence
  Synthetic oligonucleotide: PDCD1-4486
ucuuccuccacauccacgugggc

SEQ ID NO: 17724 - RNA, 24 nt, Artificial Sequence
  Synthetic oligonucleotide: PDCD1-4487
cucuuccuccacauccacgugggc

SEQ ID NO: 17725 - RNA, 18 nt, Artificial Sequence
  Synthetic oligonucleotide: PDCD1-4488
cccaggucagguugaagg

SEQ ID NO: 17726 - RNA, 19 nt, Artificial Sequence
  Synthetic oligonucleotide: PDCD1-4489
ucccaggucagguugaagg

SEQ ID NO: 17727 - RNA, 20 nt, Artificial Sequence
  Synthetic oligonucleotide: PDCD1-1031
gucccaggucagguugaagg

SEQ ID NO: 17728 - RNA, 21 nt, Artificial Sequence
  Synthetic oligonucleotide: PDCD1-4490
ugucccaggucagguugaagg

SEQ ID NO: 17729 - RNA, 22 nt, Artificial Sequence
  Synthetic oligonucleotide: PDCD1-4491
cugucccaggucagguugaagg

SEQ ID NO: 17730 - RNA, 23 nt, Artificial Sequence
  Synthetic oligonucleotide: PDCD1-4492
acugucccaggucagguugaagg

SEQ ID NO: 17731 - RNA, 24 nt, Artificial Sequence
  Synthetic oligonucleotide: PDCD1-4493
aacugucccaggucagguugaagg

SEQ ID NO: 17732 - RNA, 18 nt, Artificial Sequence
  Synthetic oligonucleotide: PDCD1-3188
gacuggccagggcgccug

SEQ ID NO: 17733 - RNA, 19 nt, Artificial Sequence
  Synthetic oligonucleotide: PDCD1-3189
cgacuggccagggcgccug

SEQ ID NO: 17734 - RNA, 20 nt, Artificial Sequence
  Synthetic oligonucleotide: PDCD1-125
acgacuggccagggcgccug

SEQ ID NO: 17735 - RNA, 21 nt, Artificial Sequence
  Synthetic oligonucleotide: PDCD1-3190
gacgacuggccagggcgccug

SEQ ID NO: 17736 - RNA, 22 nt, Artificial Sequence
  Synthetic oligonucleotide: PDCD1-3191
agacgacuggccagggcgccug

SEQ ID NO: 17737 - RNA, 23 nt, Artificial Sequence
  Synthetic oligonucleotide: PDCD1-3192
cagacgacuggccagggcgccug

SEQ ID NO: 17738 - RNA, 24 nt, Artificial Sequence
  Synthetic oligonucleotide: PDCD1-3193
ccagacgacuggccagggcgccug

SEQ ID NO: 17739 - RNA, 21 nt, Artificial Sequence
  Synthetic oligonucleotide: PDCD1-4494
gagcugccccuccugaggcug

SEQ ID NO: 17740 - RNA, 22 nt, Artificial Sequence
  Synthetic oligonucleotide: PDCD1-4495
cgagcugccccuccugaggcug

SEQ ID NO: 17741 - RNA, 23 nt, Artificial Sequence
  Synthetic oligonucleotide: PDCD1-4496
ccgagcugccccuccugaggcug

SEQ ID NO: 17742 - RNA, 24 nt, Artificial Sequence
  Synthetic oligonucleotide: PDCD1-4497
cccgagcugccccuccugaggcug

SEQ ID NO: 17743 - RNA, 21 nt, Artificial Sequence
  Synthetic oligonucleotide: PDCD1-4498
ucagguuccugggcugcagug

SEQ ID NO: 17744 - RNA, 22 nt, Artificial Sequence
  Synthetic oligonucleotide: PDCD1-4499
cucagguuccugggcugcagug

SEQ ID NO: 17745 - RNA, 23 nt, Artificial Sequence
  Synthetic oligonucleotide: PDCD1-4500
gcucagguuccugggcugcagug

SEQ ID NO: 17746 - RNA, 24 nt, Artificial Sequence
  Synthetic oligonucleotide: PDCD1-4501
ggcucagguuccugggcugcagug

SEQ ID NO: 17747 - RNA, 18 nt, Artificial Sequence
  Synthetic oligonucleotide: PDCD1-4502
ccccacgcccuaccccgu

SEQ ID NO: 17748 - RNA, 19 nt, Artificial Sequence
  Synthetic oligonucleotide: PDCD1-4503
cccccacgcccuaccccgu

SEQ ID NO: 17749 - RNA, 20 nt, Artificial Sequence
  Synthetic oligonucleotide: PDCD1-2280
gcccccacgcccuaccccgu

SEQ ID NO: 17750 - RNA, 21 nt, Artificial Sequence
  Synthetic oligonucleotide: PDCD1-4504
ggcccccacgcccuaccccgu

SEQ ID NO: 17751 - RNA, 22 nt, Artificial Sequence
  Synthetic oligonucleotide: PDCD1-4505
uggcccccacgcccuaccccgu

SEQ ID NO: 17752 - RNA, 23 nt, Artificial Sequence
  Synthetic oligonucleotide: PDCD1-4506
guggcccccacgcccuaccccgu

SEQ ID NO: 17753 - RNA, 24 nt, Artificial Sequence
  Synthetic oligonucleotide: PDCD1-4507
cguggcccccacgcccuaccccgu

SEQ ID NO: 17754 - RNA, 21 nt, Artificial Sequence
  Synthetic oligonucleotide: PDCD1-4508
ccugagcuggggagaccccca

SEQ ID NO: 17755 - RNA, 22 nt, Artificial Sequence
  Synthetic oligonucleotide: PDCD1-4509
cccugagcuggggagaccccca

SEQ ID NO: 17756 - RNA, 23 nt, Artificial Sequence
  Synthetic oligonucleotide: PDCD1-4510
gcccugagcuggggagaccccca

SEQ ID NO: 17757 - RNA, 24 nt, Artificial Sequence
  Synthetic oligonucleotide: PDCD1-4511
ggcccugagcuggggagaccccca

SEQ ID NO: 17758 - RNA, 21 nt, Artificial Sequence
  Synthetic oligonucleotide: PDCD1-4512
ggaggcucccagaggcuccga

SEQ ID NO: 17759 - RNA, 22 nt, Artificial Sequence
  Synthetic oligonucleotide: PDCD1-4513
gggaggcucccagaggcuccga

SEQ ID NO: 17760 - RNA, 23 nt, Artificial Sequence
  Synthetic oligonucleotide: PDCD1-4514
cgggaggcucccagaggcuccga

SEQ ID NO: 17761 - RNA, 24 nt, Artificial Sequence
  Synthetic oligonucleotide: PDCD1-4515
ccgggaggcucccagaggcuccga

SEQ ID NO: 17762 - RNA, 18 nt, Artificial Sequence
  Synthetic oligonucleotide: PDCD1-4516
ucugucacucucgcccac

SEQ ID NO: 17763 - RNA, 19 nt, Artificial Sequence
  Synthetic oligonucleotide: PDCD1-4517
cucugucacucucgcccac

SEQ ID NO: 17764 - RNA, 20 nt, Artificial Sequence
  Synthetic oligonucleotide: PDCD1-1470
ccucugucacucucgcccac

SEQ ID NO: 17765 - RNA, 21 nt, Artificial Sequence
  Synthetic oligonucleotide: PDCD1-4518
gccucugucacucucgcccac

SEQ ID NO: 17766 - RNA, 22 nt, Artificial Sequence
  Synthetic oligonucleotide: PDCD1-4519
ugccucugucacucucgcccac

SEQ ID NO: 17767 - RNA, 23 nt, Artificial Sequence
  Synthetic oligonucleotide: PDCD1-4520
cugccucugucacucucgcccac

SEQ ID NO: 17768 - RNA, 24 nt, Artificial Sequence
  Synthetic oligonucleotide: PDCD1-4521
acugccucugucacucucgcccac

SEQ ID NO: 17769 - RNA, 18 nt, Artificial Sequence
  Synthetic oligonucleotide: PDCD1-4522
gucaggugucccagagcc

SEQ ID NO: 17770 - RNA, 19 nt, Artificial Sequence
  Synthetic oligonucleotide: PDCD1-4523
ggucaggugucccagagcc

SEQ ID NO: 17771 - RNA, 20 nt, Artificial Sequence
  Synthetic oligonucleotide: PDCD1-2164
cggucaggugucccagagcc

SEQ ID NO: 17772 - RNA, 21 nt, Artificial Sequence
  Synthetic oligonucleotide: PDCD1-4524
gcggucaggugucccagagcc

SEQ ID NO: 17773 - RNA, 22 nt, Artificial Sequence
  Synthetic oligonucleotide: PDCD1-4525
ggcggucaggugucccagagcc

SEQ ID NO: 17774 - RNA, 23 nt, Artificial Sequence
  Synthetic oligonucleotide: PDCD1-4526
cggcggucaggugucccagagcc

SEQ ID NO: 17775 - RNA, 24 nt, Artificial Sequence
  Synthetic oligonucleotide: PDCD1-4527
ucggcggucaggugucccagagcc

SEQ ID NO: 17776 - RNA, 18 nt, Artificial Sequence
  Synthetic oligonucleotide: PDCD1-3198
uacaacugggcuggcggc

SEQ ID NO: 17777 - RNA, 19 nt, Artificial Sequence
  Synthetic oligonucleotide: PDCD1-3199
cuacaacugggcuggcggc

SEQ ID NO: 17778 - RNA, 20 nt, Artificial Sequence
  Synthetic oligonucleotide: PDCD1-531
gcuacaacugggcuggcggc

SEQ ID NO: 17779 - RNA, 21 nt, Artificial Sequence
  Synthetic oligonucleotide: PDCD1-3200
ugcuacaacugggcuggcggc

SEQ ID NO: 17780 - RNA, 22 nt, Artificial Sequence
  Synthetic oligonucleotide: PDCD1-3201
gugcuacaacugggcuggcggc

SEQ ID NO: 17781 - RNA, 23 nt, Artificial Sequence
  Synthetic oligonucleotide: PDCD1-3202
ggugcuacaacugggcuggcggc

SEQ ID NO: 17782 - RNA, 24 nt, Artificial Sequence
  Synthetic oligonucleotide: PDCD1-3203
cggugcuacaacugggcuggcggc

SEQ ID NO: 17783 - RNA, 18 nt, Artificial Sequence
  Synthetic oligonucleotide: PDCD1-4528
uuugggcagcucgaacuc

SEQ ID NO: 17784 - RNA, 19 nt, Artificial Sequence
  Synthetic oligonucleotide: PDCD1-4529
cuuugggcagcucgaacuc

SEQ ID NO: 17785 - RNA, 20 nt, Artificial Sequence
  Synthetic oligonucleotide: PDCD1-1411
gcuuugggcagcucgaacuc

SEQ ID NO: 17786 - RNA, 21 nt, Artificial Sequence
  Synthetic oligonucleotide: PDCD1-4530
ggcuuugggcagcucgaacuc

SEQ ID NO: 17787 - RNA, 22 nt, Artificial Sequence
  Synthetic oligonucleotide: PDCD1-4531
uggcuuugggcagcucgaacuc

SEQ ID NO: 17788 - RNA, 23 nt, Artificial Sequence
  Synthetic oligonucleotide: PDCD1-4532
guggcuuugggcagcucgaacuc

SEQ ID NO: 17789 - RNA, 24 nt, Artificial Sequence
  Synthetic oligonucleotide: PDCD1-4533
uguggcuuugggcagcucgaacuc

SEQ ID NO: 17790 - RNA, 21 nt, Artificial Sequence
  Synthetic oligonucleotide: PDCD1-4534
gaggcuccgacagaaugggag

SEQ ID NO: 17791 - RNA, 22 nt, Artificial Sequence
  Synthetic oligonucleotide: PDCD1-4535
agaggcuccgacagaaugggag

SEQ ID NO: 17792 - RNA, 23 nt, Artificial Sequence
  Synthetic oligonucleotide: PDCD1-4536
cagaggcuccgacagaaugggag

SEQ ID NO: 17793 - RNA, 24 nt, Artificial Sequence
  Synthetic oligonucleotide: PDCD1-4537
ccagaggcuccgacagaaugggag

SEQ ID NO: 17794 - RNA, 18 nt, Artificial Sequence
  Synthetic oligonucleotide: PDCD1-4538
cccaggggucccggagcg

SEQ ID NO: 17795 - RNA, 19 nt, Artificial Sequence
  Synthetic oligonucleotide: PDCD1-4539
gcccaggggucccggagcg

SEQ ID NO: 17796 - RNA, 20 nt, Artificial Sequence
  Synthetic oligonucleotide: PDCD1-2186
agcccaggggucccggagcg

SEQ ID NO: 17797 - RNA, 21 nt, Artificial Sequence
  Synthetic oligonucleotide: PDCD1-4540
cagcccaggggucccggagcg

SEQ ID NO: 17798 - RNA, 22 nt, Artificial Sequence
  Synthetic oligonucleotide: PDCD1-4541
gcagcccaggggucccggagcg

SEQ ID NO: 17799 - RNA, 23 nt, Artificial Sequence
  Synthetic oligonucleotide: PDCD1-4542
ggcagcccaggggucccggagcg

SEQ ID NO: 17800 - RNA, 24 nt, Artificial Sequence
  Synthetic oligonucleotide: PDCD1-4543
uggcagcccaggggucccggagcg

SEQ ID NO: 17801 - RNA, 18 nt, Artificial Sequence
  Synthetic oligonucleotide: PDCD1-3204
ggaugguucuuagguagg

SEQ ID NO: 17802 - RNA, 19 nt, Artificial Sequence
  Synthetic oligonucleotide: PDCD1-3205
aggaugguucuuagguagg

SEQ ID NO: 17803 - RNA, 20 nt, Artificial Sequence
  Synthetic oligonucleotide: PDCD1-115
caggaugguucuuagguagg

SEQ ID NO: 17804 - RNA, 21 nt, Artificial Sequence
  Synthetic oligonucleotide: PDCD1-3206
ccaggaugguucuuagguagg

SEQ ID NO: 17805 - RNA, 22 nt, Artificial Sequence
  Synthetic oligonucleotide: PDCD1-3207
gccaggaugguucuuagguagg

SEQ ID NO: 17806 - RNA, 23 nt, Artificial Sequence
  Synthetic oligonucleotide: PDCD1-3208
ggccaggaugguucuuagguagg

SEQ ID NO: 17807 - RNA, 24 nt, Artificial Sequence
  Synthetic oligonucleotide: PDCD1-3209
cggccaggaugguucuuagguagg

SEQ ID NO: 17808 - RNA, 21 nt, Artificial Sequence
  Synthetic oligonucleotide: PDCD1-4544
cccggcccccagggagauggg

SEQ ID NO: 17809 - RNA, 22 nt, Artificial Sequence
  Synthetic oligonucleotide: PDCD1-4545
gcccggcccccagggagauggg

SEQ ID NO: 17810 - RNA, 23 nt, Artificial Sequence
  Synthetic oligonucleotide: PDCD1-4546
ggcccggcccccagggagauggg

SEQ ID NO: 17811 - RNA, 24 nt, Artificial Sequence
  Synthetic oligonucleotide: PDCD1-4547
aggcccggcccccagggagauggg

SEQ ID NO: 17812 - RNA, 18 nt, Artificial Sequence
  Synthetic oligonucleotide: PDCD1-4548
cagaggcuccgacagaau

SEQ ID NO: 17813 - RNA, 19 nt, Artificial Sequence
  Synthetic oligonucleotide: PDCD1-4549
ccagaggcuccgacagaau

SEQ ID NO: 17814 - RNA, 20 nt, Artificial Sequence
  Synthetic oligonucleotide: PDCD1-3002
cccagaggcuccgacagaau

SEQ ID NO: 17815 - RNA, 21 nt, Artificial Sequence
  Synthetic oligonucleotide: PDCD1-4550
ucccagaggcuccgacagaau

SEQ ID NO: 17816 - RNA, 22 nt, Artificial Sequence
  Synthetic oligonucleotide: PDCD1-4551
cucccagaggcuccgacagaau

SEQ ID NO: 17817 - RNA, 23 nt, Artificial Sequence
  Synthetic oligonucleotide: PDCD1-4552
gcucccagaggcuccgacagaau

SEQ ID NO: 17818 - RNA, 24 nt, Artificial Sequence
  Synthetic oligonucleotide: PDCD1-4553
ggcucccagaggcuccgacagaau

SEQ ID NO: 17819 - RNA, 18 nt, Artificial Sequence
  Synthetic oligonucleotide: PDCD1-4554
ggggaggaggggugagga

SEQ ID NO: 17820 - RNA, 19 nt, Artificial Sequence
  Synthetic oligonucleotide: PDCD1-4555
gggggaggaggggugagga

SEQ ID NO: 17821 - RNA, 20 nt, Artificial Sequence
  Synthetic oligonucleotide: PDCD1-2253
ugggggaggaggggugagga

SEQ ID NO: 17822 - RNA, 21 nt, Artificial Sequence
  Synthetic oligonucleotide: PDCD1-4556
cugggggaggaggggugagga

SEQ ID NO: 17823 - RNA, 22 nt, Artificial Sequence
  Synthetic oligonucleotide: PDCD1-4557
gcugggggaggaggggugagga

SEQ ID NO: 17824 - RNA, 23 nt, Artificial Sequence
  Synthetic oligonucleotide: PDCD1-4558
ugcugggggaggaggggugagga

SEQ ID NO: 17825 - RNA, 24 nt, Artificial Sequence
  Synthetic oligonucleotide: PDCD1-4559
gugcugggggaggaggggugagga

SEQ ID NO: 17826 - RNA, 18 nt, Artificial Sequence
  Synthetic oligonucleotide: PDCD1-4560
aggggguaggacugggga

SEQ ID NO: 17827 - RNA, 19 nt, Artificial Sequence
  Synthetic oligonucleotide: PDCD1-4561
gaggggguaggacugggga

SEQ ID NO: 17828 - RNA, 20 nt, Artificial Sequence
  Synthetic oligonucleotide: PDCD1-1057
ggaggggguaggacugggga

SEQ ID NO: 17829 - RNA, 21 nt, Artificial Sequence
  Synthetic oligonucleotide: PDCD1-4562
aggaggggguaggacugggga

SEQ ID NO: 17830 - RNA, 22 nt, Artificial Sequence
  Synthetic oligonucleotide: PDCD1-4563
gaggaggggguaggacugggga

SEQ ID NO: 17831 - RNA, 23 nt, Artificial Sequence
  Synthetic oligonucleotide: PDCD1-4564
ugaggaggggguaggacugggga

SEQ ID NO: 17832 - RNA, 24 nt, Artificial Sequence
  Synthetic oligonucleotide: PDCD1-4565
gugaggaggggguaggacugggga

SEQ ID NO: 17833 - RNA, 18 nt, Artificial Sequence
  Synthetic oligonucleotide: PDCD1-3214
ugccuggagcagccccac

SEQ ID NO: 17834 - RNA, 19 nt, Artificial Sequence
  Synthetic oligonucleotide: PDCD1-3215
augccuggagcagccccac

SEQ ID NO: 17835 - RNA, 20 nt, Artificial Sequence
  Synthetic oligonucleotide: PDCD1-587
caugccuggagcagccccac

SEQ ID NO: 17836 - RNA, 21 nt, Artificial Sequence
  Synthetic oligonucleotide: PDCD1-3216
gcaugccuggagcagccccac

SEQ ID NO: 17837 - RNA, 22 nt, Artificial Sequence
  Synthetic oligonucleotide: PDCD1-3217
ugcaugccuggagcagccccac

SEQ ID NO: 17838 - RNA, 23 nt, Artificial Sequence
  Synthetic oligonucleotide: PDCD1-3218
cugcaugccuggagcagccccac

SEQ ID NO: 17839 - RNA, 24 nt, Artificial Sequence
  Synthetic oligonucleotide: PDCD1-3219
ucugcaugccuggagcagccccac

SEQ ID NO: 17840 - RNA, 18 nt, Artificial Sequence
  Synthetic oligonucleotide: PDCD1-4566
gggcccagagaggaaccc

SEQ ID NO: 17841 - RNA, 19 nt, Artificial Sequence
  Synthetic oligonucleotide: PDCD1-4567
ggggcccagagaggaaccc

SEQ ID NO: 17842 - RNA, 20 nt, Artificial Sequence
  Synthetic oligonucleotide: PDCD1-2109
uggggcccagagaggaaccc

SEQ ID NO: 17843 - RNA, 18 nt, Artificial Sequence
  Synthetic oligonucleotide: PDCD1-4568
ccucccugccuggggaag

SEQ ID NO: 17844 - RNA, 19 nt, Artificial Sequence
  Synthetic oligonucleotide: PDCD1-4569
gccucccugccuggggaag

SEQ ID NO: 17845 - RNA, 20 nt, Artificial Sequence
  Synthetic oligonucleotide: PDCD1-1101
ggccucccugccuggggaag

SEQ ID NO: 17846 - RNA, 21 nt, Artificial Sequence
  Synthetic oligonucleotide: PDCD1-4570
gggccucccugccuggggaag

SEQ ID NO: 17847 - RNA, 22 nt, Artificial Sequence
  Synthetic oligonucleotide: PDCD1-4571
cgggccucccugccuggggaag

SEQ ID NO: 17848 - RNA, 23 nt, Artificial Sequence
  Synthetic oligonucleotide: PDCD1-4572
ccgggccucccugccuggggaag

SEQ ID NO: 17849 - RNA, 24 nt, Artificial Sequence
  Synthetic oligonucleotide: PDCD1-4573
gccgggccucccugccuggggaag

SEQ ID NO: 17850 - RNA, 18 nt, Artificial Sequence
  Synthetic oligonucleotide: PDCD1-4574
aggcagugcugggggagg

SEQ ID NO: 17851 - RNA, 19 nt, Artificial Sequence
  Synthetic oligonucleotide: PDCD1-4575
gaggcagugcugggggagg

SEQ ID NO: 17852 - RNA, 20 nt, Artificial Sequence
  Synthetic oligonucleotide: PDCD1-2248
agaggcagugcugggggagg

SEQ ID NO: 17853 - RNA, 21 nt, Artificial Sequence
  Synthetic oligonucleotide: PDCD1-4576
cagaggcagugcugggggagg

SEQ ID NO: 17854 - RNA, 22 nt, Artificial Sequence
  Synthetic oligonucleotide: PDCD1-4577
acagaggcagugcugggggagg

SEQ ID NO: 17855 - RNA, 23 nt, Artificial Sequence
  Synthetic oligonucleotide: PDCD1-4578
gacagaggcagugcugggggagg

SEQ ID NO: 17856 - RNA, 24 nt, Artificial Sequence
  Synthetic oligonucleotide: PDCD1-4579
ugacagaggcagugcugggggagg

SEQ ID NO: 17857 - RNA, 18 nt, Artificial Sequence
  Synthetic oligonucleotide: PDCD1-4580
ggggacuugggccagggg

SEQ ID NO: 17858 - RNA, 19 nt, Artificial Sequence
  Synthetic oligonucleotide: PDCD1-4581
aggggacuugggccagggg

SEQ ID NO: 17859 - RNA, 20 nt, Artificial Sequence
  Synthetic oligonucleotide: PDCD1-2104
gaggggacuugggccagggg

SEQ ID NO: 17860 - RNA, 21 nt, Artificial Sequence
  Synthetic oligonucleotide: PDCD1-4582
agaggggacuugggccagggg

SEQ ID NO: 17861 - RNA, 22 nt, Artificial Sequence
  Synthetic oligonucleotide: PDCD1-4583
aagaggggacuugggccagggg

SEQ ID NO: 17862 - RNA, 23 nt, Artificial Sequence
  Synthetic oligonucleotide: PDCD1-4584
aaagaggggacuugggccagggg

SEQ ID NO: 17863 - RNA, 24 nt, Artificial Sequence
  Synthetic oligonucleotide: PDCD1-4585
caaagaggggacuugggccagggg

SEQ ID NO: 17864 - RNA, 18 nt, Artificial Sequence
  Synthetic oligonucleotide: PDCD1-4586
cugccccuccugaggcug

SEQ ID NO: 17865 - RNA, 19 nt, Artificial Sequence
  Synthetic oligonucleotide: PDCD1-4587
gcugccccuccugaggcug

SEQ ID NO: 17866 - RNA, 20 nt, Artificial Sequence
  Synthetic oligonucleotide: PDCD1-1089
agcugccccuccugaggcug

SEQ ID NO: 17867 - RNA, 18 nt, Artificial Sequence
  Synthetic oligonucleotide: PDCD1-4588
gguuccugggcugcagug

SEQ ID NO: 17868 - RNA, 19 nt, Artificial Sequence
  Synthetic oligonucleotide: PDCD1-4589
agguuccugggcugcagug

SEQ ID NO: 17869 - RNA, 20 nt, Artificial Sequence
  Synthetic oligonucleotide: PDCD1-4468
cagguuccugggcugcagug

SEQ ID NO: 17870 - RNA, 18 nt, Artificial Sequence
  Synthetic oligonucleotide: PDCD1-4590
cccgaccugccagggacu

SEQ ID NO: 17871 - RNA, 19 nt, Artificial Sequence
  Synthetic oligonucleotide: PDCD1-4591
ccccgaccugccagggacu

SEQ ID NO: 17872 - RNA, 20 nt, Artificial Sequence
  Synthetic oligonucleotide: PDCD1-998
cccccgaccugccagggacu

SEQ ID NO: 17873 - RNA, 21 nt, Artificial Sequence
  Synthetic oligonucleotide: PDCD1-4592
ccccccgaccugccagggacu

SEQ ID NO: 17874 - RNA, 22 nt, Artificial Sequence
  Synthetic oligonucleotide: PDCD1-4593
accccccgaccugccagggacu

SEQ ID NO: 17875 - RNA, 23 nt, Artificial Sequence
  Synthetic oligonucleotide: PDCD1-4594
caccccccgaccugccagggacu

SEQ ID NO: 17876 - RNA, 24 nt, Artificial Sequence
  Synthetic oligonucleotide: PDCD1-4595
gcaccccccgaccugccagggacu

SEQ ID NO: 17877 - RNA, 18 nt, Artificial Sequence
  Synthetic oligonucleotide: PDCD1-4596
gcccaaagccacacagcu

SEQ ID NO: 17878 - RNA, 19 nt, Artificial Sequence
  Synthetic oligonucleotide: PDCD1-4597
ugcccaaagccacacagcu

SEQ ID NO: 17879 - RNA, 20 nt, Artificial Sequence
  Synthetic oligonucleotide: PDCD1-987
cugcccaaagccacacagcu

SEQ ID NO: 17880 - RNA, 21 nt, Artificial Sequence
  Synthetic oligonucleotide: PDCD1-4598
gcugcccaaagccacacagcu

SEQ ID NO: 17881 - RNA, 22 nt, Artificial Sequence
  Synthetic oligonucleotide: PDCD1-4599
agcugcccaaagccacacagcu

SEQ ID NO: 17882 - RNA, 23 nt, Artificial Sequence
  Synthetic oligonucleotide: PDCD1-4600
gagcugcccaaagccacacagcu

SEQ ID NO: 17883 - RNA, 24 nt, Artificial Sequence
  Synthetic oligonucleotide: PDCD1-4601
cgagcugcccaaagccacacagcu

SEQ ID NO: 17884 - RNA, 18 nt, Artificial Sequence
  Synthetic oligonucleotide: PDCD1-4602
gagcuggggagaccccca

SEQ ID NO: 17885 - RNA, 19 nt, Artificial Sequence
  Synthetic oligonucleotide: PDCD1-4603
ugagcuggggagaccccca

SEQ ID NO: 17886 - RNA, 20 nt, Artificial Sequence
  Synthetic oligonucleotide: PDCD1-2355
cugagcuggggagaccccca

SEQ ID NO: 17887 - RNA, 18 nt, Artificial Sequence
  Synthetic oligonucleotide: PDCD1-4604
ggcucccagaggcuccga

SEQ ID NO: 17888 - RNA, 19 nt, Artificial Sequence
  Synthetic oligonucleotide: PDCD1-4605
aggcucccagaggcuccga

SEQ ID NO: 17889 - RNA, 20 nt, Artificial Sequence
  Synthetic oligonucleotide: PDCD1-1909
gaggcucccagaggcuccga

SEQ ID NO: 17890 - RNA, 18 nt, Artificial Sequence
  Synthetic oligonucleotide: PDCD1-4606
gccuggcccuggcagccc

SEQ ID NO: 17891 - RNA, 19 nt, Artificial Sequence
  Synthetic oligonucleotide: PDCD1-4607
ggccuggcccuggcagccc

SEQ ID NO: 17892 - RNA, 20 nt, Artificial Sequence
  Synthetic oligonucleotide: PDCD1-2182
gggccuggcccuggcagccc

SEQ ID NO: 17893 - RNA, 21 nt, Artificial Sequence
  Synthetic oligonucleotide: PDCD1-4608
cgggccuggcccuggcagccc

SEQ ID NO: 17894 - RNA, 22 nt, Artificial Sequence
  Synthetic oligonucleotide: PDCD1-4609
gcgggccuggcccuggcagccc

SEQ ID NO: 17895 - RNA, 23 nt, Artificial Sequence
  Synthetic oligonucleotide: PDCD1-4610
ggcgggccuggcccuggcagccc

SEQ ID NO: 17896 - RNA, 24 nt, Artificial Sequence
  Synthetic oligonucleotide: PDCD1-4611
aggcgggccuggcccuggcagccc

SEQ ID NO: 17897 - RNA, 18 nt, Artificial Sequence
  Synthetic oligonucleotide: PDCD1-4612
gcuccgacagaaugggag

SEQ ID NO: 17898 - RNA, 19 nt, Artificial Sequence
  Synthetic oligonucleotide: PDCD1-4613
ggcuccgacagaaugggag

SEQ ID NO: 17899 - RNA, 20 nt, Artificial Sequence
  Synthetic oligonucleotide: PDCD1-3001
aggcuccgacagaaugggag

SEQ ID NO: 17900 - RNA, 18 nt, Artificial Sequence
  Synthetic oligonucleotide: PDCD1-4614
ucagucccuggcaggucg

SEQ ID NO: 17901 - RNA, 19 nt, Artificial Sequence
  Synthetic oligonucleotide: PDCD1-4615
cucagucccuggcaggucg

SEQ ID NO: 17902 - RNA, 20 nt, Artificial Sequence
  Synthetic oligonucleotide: PDCD1-2174
ccucagucccuggcaggucg

SEQ ID NO: 17903 - RNA, 21 nt, Artificial Sequence
  Synthetic oligonucleotide: PDCD1-4616
cccucagucccuggcaggucg

SEQ ID NO: 17904 - RNA, 22 nt, Artificial Sequence
  Synthetic oligonucleotide: PDCD1-4617
acccucagucccuggcaggucg

SEQ ID NO: 17905 - RNA, 23 nt, Artificial Sequence
  Synthetic oligonucleotide: PDCD1-4618
cacccucagucccuggcaggucg

SEQ ID NO: 17906 - RNA, 24 nt, Artificial Sequence
  Synthetic oligonucleotide: PDCD1-4619
ccacccucagucccuggcaggucg

SEQ ID NO: 17907 - RNA, 20 nt, Artificial Sequence
  Synthetic oligonucleotide: PDCD1-2196
ucucagucccuggcaggucg

SEQ ID NO: 17908 - RNA, 21 nt, Artificial Sequence
  Synthetic oligonucleotide: PDCD1-4620
cucucagucccuggcaggucg

SEQ ID NO: 17909 - RNA, 22 nt, Artificial Sequence
  Synthetic oligonucleotide: PDCD1-4621
acucucagucccuggcaggucg

SEQ ID NO: 17910 - RNA, 23 nt, Artificial Sequence
  Synthetic oligonucleotide: PDCD1-4622
cacucucagucccuggcaggucg

SEQ ID NO: 17911 - RNA, 24 nt, Artificial Sequence
  Synthetic oligonucleotide: PDCD1-4623
ucacucucagucccuggcaggucg

SEQ ID NO: 17912 - RNA, 18 nt, Artificial Sequence
  Synthetic oligonucleotide: PDCD1-4624
caggaggggcagcucggg

SEQ ID NO: 17913 - RNA, 19 nt, Artificial Sequence
  Synthetic oligonucleotide: PDCD1-4625
ucaggaggggcagcucggg

SEQ ID NO: 17914 - RNA, 20 nt, Artificial Sequence
  Synthetic oligonucleotide: PDCD1-2343
cucaggaggggcagcucggg

SEQ ID NO: 17915 - RNA, 21 nt, Artificial Sequence
  Synthetic oligonucleotide: PDCD1-4626
ccucaggaggggcagcucggg

SEQ ID NO: 17916 - RNA, 22 nt, Artificial Sequence
  Synthetic oligonucleotide: PDCD1-4627
gccucaggaggggcagcucggg

SEQ ID NO: 17917 - RNA, 23 nt, Artificial Sequence
  Synthetic oligonucleotide: PDCD1-4628
agccucaggaggggcagcucggg

SEQ ID NO: 17918 - RNA, 24 nt, Artificial Sequence
  Synthetic oligonucleotide: PDCD1-4629
cagccucaggaggggcagcucggg

SEQ ID NO: 17919 - RNA, 18 nt, Artificial Sequence
  Synthetic oligonucleotide: PDCD1-4630
ggcccccagggagauggg

SEQ ID NO: 17920 - RNA, 19 nt, Artificial Sequence
  Synthetic oligonucleotide: PDCD1-4631
cggcccccagggagauggg

SEQ ID NO: 17921 - RNA, 20 nt, Artificial Sequence
  Synthetic oligonucleotide: PDCD1-2327
ccggcccccagggagauggg

SEQ ID NO: 17922 - RNA, 18 nt, Artificial Sequence
  Synthetic oligonucleotide: PDCD1-4632
ugccugcccaggagcaaa

SEQ ID NO: 17923 - RNA, 19 nt, Artificial Sequence
  Synthetic oligonucleotide: PDCD1-4633
cugccugcccaggagcaaa

SEQ ID NO: 17924 - RNA, 20 nt, Artificial Sequence
  Synthetic oligonucleotide: PDCD1-968
ccugccugcccaggagcaaa

SEQ ID NO: 17925 - RNA, 21 nt, Artificial Sequence
  Synthetic oligonucleotide: PDCD1-4634
uccugccugcccaggagcaaa

SEQ ID NO: 17926 - RNA, 22 nt, Artificial Sequence
  Synthetic oligonucleotide: PDCD1-4635
guccugccugcccaggagcaaa

SEQ ID NO: 17927 - RNA, 23 nt, Artificial Sequence
  Synthetic oligonucleotide: PDCD1-4636
gguccugccugcccaggagcaaa

SEQ ID NO: 17928 - RNA, 24 nt, Artificial Sequence
  Synthetic oligonucleotide: PDCD1-4637
agguccugccugcccaggagcaaa

SEQ ID NO: 17929 - RNA, 18 nt, Artificial Sequence
  Synthetic oligonucleotide: PDCD1-4638
aggcggaggugagcggaa

SEQ ID NO: 17930 - RNA, 19 nt, Artificial Sequence
  Synthetic oligonucleotide: PDCD1-4639
caggcggaggugagcggaa

SEQ ID NO: 17931 - RNA, 20 nt, Artificial Sequence
  Synthetic oligonucleotide: PDCD1-2233
ucaggcggaggugagcggaa

SEQ ID NO: 17932 - RNA, 21 nt, Artificial Sequence
  Synthetic oligonucleotide: PDCD1-4640
cucaggcggaggugagcggaa

SEQ ID NO: 17933 - RNA, 22 nt, Artificial Sequence
  Synthetic oligonucleotide: PDCD1-4641
gcucaggcggaggugagcggaa

SEQ ID NO: 17934 - RNA, 23 nt, Artificial Sequence
  Synthetic oligonucleotide: PDCD1-4642
ugcucaggcggaggugagcggaa

SEQ ID NO: 17935 - RNA, 24 nt, Artificial Sequence
  Synthetic oligonucleotide: PDCD1-4643
cugcucaggcggaggugagcggaa

SEQ ID NO: 17936 - RNA, 18 nt, Artificial Sequence
  Synthetic oligonucleotide: PDCD1-4644
gucccaggucagguugaa

SEQ ID NO: 17937 - RNA, 19 nt, Artificial Sequence
  Synthetic oligonucleotide: PDCD1-4645
ugucccaggucagguugaa

SEQ ID NO: 17938 - RNA, 20 nt, Artificial Sequence
  Synthetic oligonucleotide: PDCD1-2237
cugucccaggucagguugaa

SEQ ID NO: 17939 - RNA, 21 nt, Artificial Sequence
  Synthetic oligonucleotide: PDCD1-4646
acugucccaggucagguugaa

SEQ ID NO: 17940 - RNA, 22 nt, Artificial Sequence
  Synthetic oligonucleotide: PDCD1-4647
aacugucccaggucagguugaa

SEQ ID NO: 17941 - RNA, 23 nt, Artificial Sequence
  Synthetic oligonucleotide: PDCD1-4648
aaacugucccaggucagguugaa

SEQ ID NO: 17942 - RNA, 24 nt, Artificial Sequence
  Synthetic oligonucleotide: PDCD1-4649
gaaacugucccaggucagguugaa

SEQ ID NO: 17943 - RNA, 18 nt, Artificial Sequence
  Synthetic oligonucleotide: PDCD1-4650
gagagagagacagagaca

SEQ ID NO: 17944 - RNA, 19 nt, Artificial Sequence
  Synthetic oligonucleotide: PDCD1-4651
ggagagagagacagagaca

SEQ ID NO: 17945 - RNA, 20 nt, Artificial Sequence
  Synthetic oligonucleotide: PDCD1-2269
gggagagagagacagagaca

SEQ ID NO: 17946 - RNA, 21 nt, Artificial Sequence
  Synthetic oligonucleotide: PDCD1-4652
agggagagagagacagagaca

SEQ ID NO: 17947 - RNA, 22 nt, Artificial Sequence
  Synthetic oligonucleotide: PDCD1-4653
gagggagagagagacagagaca

SEQ ID NO: 17948 - RNA, 23 nt, Artificial Sequence
  Synthetic oligonucleotide: PDCD1-4654
ggagggagagagagacagagaca

SEQ ID NO: 17949 - RNA, 24 nt, Artificial Sequence
  Synthetic oligonucleotide: PDCD1-4655
gggagggagagagagacagagaca

SEQ ID NO: 17950 - RNA, 18 nt, Artificial Sequence
  Synthetic oligonucleotide: PDCD1-4656
gacagagacagggagaca

SEQ ID NO: 17951 - RNA, 19 nt, Artificial Sequence
  Synthetic oligonucleotide: PDCD1-4657
agacagagacagggagaca

SEQ ID NO: 17952 - RNA, 20 nt, Artificial Sequence
  Synthetic oligonucleotide: PDCD1-1074
gagacagagacagggagaca

SEQ ID NO: 17953 - RNA, 21 nt, Artificial Sequence
  Synthetic oligonucleotide: PDCD1-4658
agagacagagacagggagaca

SEQ ID NO: 17954 - RNA, 22 nt, Artificial Sequence
  Synthetic oligonucleotide: PDCD1-4659
gagagacagagacagggagaca

SEQ ID NO: 17955 - RNA, 23 nt, Artificial Sequence
  Synthetic oligonucleotide: PDCD1-4660
agagagacagagacagggagaca

SEQ ID NO: 17956 - RNA, 24 nt, Artificial Sequence
  Synthetic oligonucleotide: PDCD1-4661
gagagagacagagacagggagaca

SEQ ID NO: 17957 - RNA, 18 nt, Artificial Sequence
  Synthetic oligonucleotide: PDCD1-4662
gggaggaguuggggccca

SEQ ID NO: 17958 - RNA, 19 nt, Artificial Sequence
  Synthetic oligonucleotide: PDCD1-4663
ggggaggaguuggggccca

SEQ ID NO: 17959 - RNA, 20 nt, Artificial Sequence
  Synthetic oligonucleotide: PDCD1-981
aggggaggaguuggggccca

SEQ ID NO: 17960 - RNA, 21 nt, Artificial Sequence
  Synthetic oligonucleotide: PDCD1-4664
caggggaggaguuggggccca

SEQ ID NO: 17961 - RNA, 22 nt, Artificial Sequence
  Synthetic oligonucleotide: PDCD1-4665
ccaggggaggaguuggggccca

SEQ ID NO: 17962 - RNA, 23 nt, Artificial Sequence
  Synthetic oligonucleotide: PDCD1-4666
gccaggggaggaguuggggccca

SEQ ID NO: 17963 - RNA, 24 nt, Artificial Sequence
  Synthetic oligonucleotide: PDCD1-4667
ggccaggggaggaguuggggccca

SEQ ID NO: 17964 - RNA, 18 nt, Artificial Sequence
  Synthetic oligonucleotide: PDCD1-4668
aagaggggacuugggcca

SEQ ID NO: 17965 - RNA, 19 nt, Artificial Sequence
  Synthetic oligonucleotide: PDCD1-4669
aaagaggggacuugggcca

SEQ ID NO: 17966 - RNA, 20 nt, Artificial Sequence
  Synthetic oligonucleotide: PDCD1-2102
caaagaggggacuugggcca

SEQ ID NO: 17967 - RNA, 21 nt, Artificial Sequence
  Synthetic oligonucleotide: PDCD1-4670
gcaaagaggggacuugggcca

SEQ ID NO: 17968 - RNA, 22 nt, Artificial Sequence
  Synthetic oligonucleotide: PDCD1-4671
agcaaagaggggacuugggcca

SEQ ID NO: 17969 - RNA, 23 nt, Artificial Sequence
  Synthetic oligonucleotide: PDCD1-4672
gagcaaagaggggacuugggcca

SEQ ID NO: 17970 - RNA, 24 nt, Artificial Sequence
  Synthetic oligonucleotide: PDCD1-4673
ggagcaaagaggggacuugggcca

SEQ ID NO: 17971 - RNA, 18 nt, Artificial Sequence
  Synthetic oligonucleotide: PDCD1-4674
ccugccugcccaggagca

SEQ ID NO: 17972 - RNA, 19 nt, Artificial Sequence
  Synthetic oligonucleotide: PDCD1-4675
uccugccugcccaggagca

SEQ ID NO: 17973 - RNA, 20 nt, Artificial Sequence
  Synthetic oligonucleotide: PDCD1-967
guccugccugcccaggagca

SEQ ID NO: 17974 - RNA, 21 nt, Artificial Sequence
  Synthetic oligonucleotide: PDCD1-4676
gguccugccugcccaggagca

SEQ ID NO: 17975 - RNA, 22 nt, Artificial Sequence
  Synthetic oligonucleotide: PDCD1-4677
agguccugccugcccaggagca

SEQ ID NO: 17976 - RNA, 23 nt, Artificial Sequence
  Synthetic oligonucleotide: PDCD1-4678
gagguccugccugcccaggagca

SEQ ID NO: 17977 - RNA, 24 nt, Artificial Sequence
  Synthetic oligonucleotide: PDCD1-4679
agagguccugccugcccaggagca

SEQ ID NO: 17978 - RNA, 18 nt, Artificial Sequence
  Synthetic oligonucleotide: PDCD1-4680
ucagguuccugggcugca

SEQ ID NO: 17979 - RNA, 19 nt, Artificial Sequence
  Synthetic oligonucleotide: PDCD1-4681
cucagguuccugggcugca

SEQ ID NO: 17980 - RNA, 20 nt, Artificial Sequence
  Synthetic oligonucleotide: PDCD1-4682
gcucagguuccugggcugca

SEQ ID NO: 17981 - RNA, 21 nt, Artificial Sequence
  Synthetic oligonucleotide: PDCD1-4683
ggcucagguuccugggcugca

SEQ ID NO: 17982 - RNA, 22 nt, Artificial Sequence
  Synthetic oligonucleotide: PDCD1-4684
gggcucagguuccugggcugca

SEQ ID NO: 17983 - RNA, 23 nt, Artificial Sequence
  Synthetic oligonucleotide: PDCD1-4685
ugggcucagguuccugggcugca

SEQ ID NO: 17984 - RNA, 24 nt, Artificial Sequence
  Synthetic oligonucleotide: PDCD1-4686
cugggcucagguuccugggcugca

SEQ ID NO: 17985 - RNA, 18 nt, Artificial Sequence
  Synthetic oligonucleotide: PDCD1-4687
ccugcccaggagcaaaga

SEQ ID NO: 17986 - RNA, 19 nt, Artificial Sequence
  Synthetic oligonucleotide: PDCD1-4688
gccugcccaggagcaaaga

SEQ ID NO: 17987 - RNA, 20 nt, Artificial Sequence
  Synthetic oligonucleotide: PDCD1-2097
ugccugcccaggagcaaaga

SEQ ID NO: 17988 - RNA, 21 nt, Artificial Sequence
  Synthetic oligonucleotide: PDCD1-4689
cugccugcccaggagcaaaga

SEQ ID NO: 17989 - RNA, 22 nt, Artificial Sequence
  Synthetic oligonucleotide: PDCD1-4690
ccugccugcccaggagcaaaga

SEQ ID NO: 17990 - RNA, 23 nt, Artificial Sequence
  Synthetic oligonucleotide: PDCD1-4691
uccugccugcccaggagcaaaga

SEQ ID NO: 17991 - RNA, 24 nt, Artificial Sequence
  Synthetic oligonucleotide: PDCD1-4692
guccugccugcccaggagcaaaga

SEQ ID NO: 17992 - RNA, 18 nt, Artificial Sequence
  Synthetic oligonucleotide: PDCD1-4693
gaggaguuggggcccaga

SEQ ID NO: 17993 - RNA, 19 nt, Artificial Sequence
  Synthetic oligonucleotide: PDCD1-4694
ggaggaguuggggcccaga

SEQ ID NO: 17994 - RNA, 20 nt, Artificial Sequence
  Synthetic oligonucleotide: PDCD1-982
gggaggaguuggggcccaga

SEQ ID NO: 17995 - RNA, 21 nt, Artificial Sequence
  Synthetic oligonucleotide: PDCD1-4695
ggggaggaguuggggcccaga

SEQ ID NO: 17996 - RNA, 22 nt, Artificial Sequence
  Synthetic oligonucleotide: PDCD1-4696
aggggaggaguuggggcccaga

SEQ ID NO: 17997 - RNA, 23 nt, Artificial Sequence
  Synthetic oligonucleotide: PDCD1-4697
caggggaggaguuggggcccaga

SEQ ID NO: 17998 - RNA, 24 nt, Artificial Sequence
  Synthetic oligonucleotide: PDCD1-4698
ccaggggaggaguuggggcccaga

SEQ ID NO: 17999 - RNA, 18 nt, Artificial Sequence
  Synthetic oligonucleotide: PDCD1-4699
gggagagagagacagaga

SEQ ID NO: 18000 - RNA, 19 nt, Artificial Sequence
  Synthetic oligonucleotide: PDCD1-4700
agggagagagagacagaga

SEQ ID NO: 18001 - RNA, 20 nt, Artificial Sequence
  Synthetic oligonucleotide: PDCD1-1070
gagggagagagagacagaga

SEQ ID NO: 18002 - RNA, 21 nt, Artificial Sequence
  Synthetic oligonucleotide: PDCD1-4701
ggagggagagagagacagaga

SEQ ID NO: 18003 - RNA, 22 nt, Artificial Sequence
  Synthetic oligonucleotide: PDCD1-4702
gggagggagagagagacagaga

SEQ ID NO: 18004 - RNA, 23 nt, Artificial Sequence
  Synthetic oligonucleotide: PDCD1-4703
ggggagggagagagagacagaga

SEQ ID NO: 18005 - RNA, 24 nt, Artificial Sequence
  Synthetic oligonucleotide: PDCD1-4704
gggggagggagagagagacagaga

SEQ ID NO: 18006 - RNA, 18 nt, Artificial Sequence
  Synthetic oligonucleotide: PDCD1-4705
gggggagggagagagaga

SEQ ID NO: 18007 - RNA, 19 nt, Artificial Sequence
  Synthetic oligonucleotide: PDCD1-4706
ugggggagggagagagaga

SEQ ID NO: 18008 - RNA, 20 nt, Artificial Sequence
  Synthetic oligonucleotide: PDCD1-1069
gugggggagggagagagaga

SEQ ID NO: 18009 - RNA, 21 nt, Artificial Sequence
  Synthetic oligonucleotide: PDCD1-4707
ggugggggagggagagagaga

SEQ ID NO: 18010 - RNA, 22 nt, Artificial Sequence
  Synthetic oligonucleotide: PDCD1-4708
gggugggggagggagagagaga

SEQ ID NO: 18011 - RNA, 23 nt, Artificial Sequence
  Synthetic oligonucleotide: PDCD1-4709
agggugggggagggagagagaga

SEQ ID NO: 18012 - RNA, 24 nt, Artificial Sequence
  Synthetic oligonucleotide: PDCD1-4710
gagggugggggagggagagagaga

SEQ ID NO: 18013 - RNA, 18 nt, Artificial Sequence
  Synthetic oligonucleotide: PDCD1-4711
acagggagacagaggaga

SEQ ID NO: 18014 - RNA, 19 nt, Artificial Sequence
  Synthetic oligonucleotide: PDCD1-4712
gacagggagacagaggaga

SEQ ID NO: 18015 - RNA, 20 nt, Artificial Sequence
  Synthetic oligonucleotide: PDCD1-2271
agacagggagacagaggaga

SEQ ID NO: 18016 - RNA, 21 nt, Artificial Sequence
  Synthetic oligonucleotide: PDCD1-4713
gagacagggagacagaggaga

SEQ ID NO: 18017 - RNA, 22 nt, Artificial Sequence
  Synthetic oligonucleotide: PDCD1-4714
agagacagggagacagaggaga

SEQ ID NO: 18018 - RNA, 23 nt, Artificial Sequence
  Synthetic oligonucleotide: PDCD1-4715
cagagacagggagacagaggaga

SEQ ID NO: 18019 - RNA, 24 nt, Artificial Sequence
  Synthetic oligonucleotide: PDCD1-4716
acagagacagggagacagaggaga

SEQ ID NO: 18020 - RNA, 18 nt, Artificial Sequence
  Synthetic oligonucleotide: PDCD1-4717
gagacagagacagggaga

SEQ ID NO: 18021 - RNA, 19 nt, Artificial Sequence
  Synthetic oligonucleotide: PDCD1-4718
agagacagagacagggaga

SEQ ID NO: 18022 - RNA, 20 nt, Artificial Sequence
  Synthetic oligonucleotide: PDCD1-1073
gagagacagagacagggaga

SEQ ID NO: 18023 - RNA, 21 nt, Artificial Sequence
  Synthetic oligonucleotide: PDCD1-4719
agagagacagagacagggaga

SEQ ID NO: 18024 - RNA, 22 nt, Artificial Sequence
  Synthetic oligonucleotide: PDCD1-4720
gagagagacagagacagggaga

SEQ ID NO: 18025 - RNA, 23 nt, Artificial Sequence
  Synthetic oligonucleotide: PDCD1-4721
agagagagacagagacagggaga

SEQ ID NO: 18026 - RNA, 24 nt, Artificial Sequence
  Synthetic oligonucleotide: PDCD1-4722
gagagagagacagagacagggaga

SEQ ID NO: 18027 - RNA, 18 nt, Artificial Sequence
  Synthetic oligonucleotide: PDCD1-4723
gagggugggggagggaga

SEQ ID NO: 18028 - RNA, 19 nt, Artificial Sequence
  Synthetic oligonucleotide: PDCD1-4724
agagggugggggagggaga

SEQ ID NO: 18029 - RNA, 20 nt, Artificial Sequence
  Synthetic oligonucleotide: PDCD1-1068
gagagggugggggagggaga

SEQ ID NO: 18030 - RNA, 21 nt, Artificial Sequence
  Synthetic oligonucleotide: PDCD1-4725
ggagagggugggggagggaga

SEQ ID NO: 18031 - RNA, 22 nt, Artificial Sequence
  Synthetic oligonucleotide: PDCD1-4726
gggagagggugggggagggaga

SEQ ID NO: 18032 - RNA, 23 nt, Artificial Sequence
  Synthetic oligonucleotide: PDCD1-4727
ggggagagggugggggagggaga

SEQ ID NO: 18033 - RNA, 24 nt, Artificial Sequence
  Synthetic oligonucleotide: PDCD1-4728
uggggagagggugggggagggaga

SEQ ID NO: 18034 - RNA, 18 nt, Artificial Sequence
  Synthetic oligonucleotide: PDCD1-4729
accugccagggacugaga

SEQ ID NO: 18035 - RNA, 19 nt, Artificial Sequence
  Synthetic oligonucleotide: PDCD1-4730
gaccugccagggacugaga

SEQ ID NO: 18036 - RNA, 20 nt, Artificial Sequence
  Synthetic oligonucleotide: PDCD1-999
cgaccugccagggacugaga

SEQ ID NO: 18037 - RNA, 21 nt, Artificial Sequence
  Synthetic oligonucleotide: PDCD1-4731
ccgaccugccagggacugaga

SEQ ID NO: 18038 - RNA, 22 nt, Artificial Sequence
  Synthetic oligonucleotide: PDCD1-4732
cccgaccugccagggacugaga

SEQ ID NO: 18039 - RNA, 23 nt, Artificial Sequence
  Synthetic oligonucleotide: PDCD1-4733
ccccgaccugccagggacugaga

SEQ ID NO: 18040 - RNA, 24 nt, Artificial Sequence
  Synthetic oligonucleotide: PDCD1-4734
cccccgaccugccagggacugaga

SEQ ID NO: 18041 - RNA, 18 nt, Artificial Sequence
  Synthetic oligonucleotide: PDCD1-4735
cccaaggaccggcugaga

SEQ ID NO: 18042 - RNA, 19 nt, Artificial Sequence
  Synthetic oligonucleotide: PDCD1-4736
ccccaaggaccggcugaga

SEQ ID NO: 18043 - RNA, 20 nt, Artificial Sequence
  Synthetic oligonucleotide: PDCD1-2092
gccccaaggaccggcugaga

SEQ ID NO: 18044 - RNA, 21 nt, Artificial Sequence
  Synthetic oligonucleotide: PDCD1-4737
agccccaaggaccggcugaga

SEQ ID NO: 18045 - RNA, 22 nt, Artificial Sequence
  Synthetic oligonucleotide: PDCD1-4738
cagccccaaggaccggcugaga

SEQ ID NO: 18046 - RNA, 23 nt, Artificial Sequence
  Synthetic oligonucleotide: PDCD1-4739
gcagccccaaggaccggcugaga

SEQ ID NO: 18047 - RNA, 24 nt, Artificial Sequence
  Synthetic oligonucleotide: PDCD1-4740
cgcagccccaaggaccggcugaga

SEQ ID NO: 18048 - RNA, 18 nt, Artificial Sequence
  Synthetic oligonucleotide: PDCD1-4741
ggugaggaggggguagga

SEQ ID NO: 18049 - RNA, 19 nt, Artificial Sequence
  Synthetic oligonucleotide: PDCD1-4742
gggugaggaggggguagga

SEQ ID NO: 18050 - RNA, 20 nt, Artificial Sequence
  Synthetic oligonucleotide: PDCD1-1052
ggggugaggaggggguagga

SEQ ID NO: 18051 - RNA, 21 nt, Artificial Sequence
  Synthetic oligonucleotide: PDCD1-4743
aggggugaggaggggguagga

SEQ ID NO: 18052 - RNA, 22 nt, Artificial Sequence
  Synthetic oligonucleotide: PDCD1-4744
gaggggugaggaggggguagga

SEQ ID NO: 18053 - RNA, 23 nt, Artificial Sequence
  Synthetic oligonucleotide: PDCD1-4745
ggaggggugaggaggggguagga

SEQ ID NO: 18054 - RNA, 24 nt, Artificial Sequence
  Synthetic oligonucleotide: PDCD1-4746
aggaggggugaggaggggguagga

SEQ ID NO: 18055 - RNA, 18 nt, Artificial Sequence
  Synthetic oligonucleotide: PDCD1-4747
caggcggaggugagcgga

SEQ ID NO: 18056 - RNA, 19 nt, Artificial Sequence
  Synthetic oligonucleotide: PDCD1-4748
ucaggcggaggugagcgga

SEQ ID NO: 18057 - RNA, 20 nt, Artificial Sequence
  Synthetic oligonucleotide: PDCD1-2232
cucaggcggaggugagcgga

SEQ ID NO: 18058 - RNA, 21 nt, Artificial Sequence
  Synthetic oligonucleotide: PDCD1-4749
gcucaggcggaggugagcgga

SEQ ID NO: 18059 - RNA, 22 nt, Artificial Sequence
  Synthetic oligonucleotide: PDCD1-4750
ugcucaggcggaggugagcgga

SEQ ID NO: 18060 - RNA, 23 nt, Artificial Sequence
  Synthetic oligonucleotide: PDCD1-4751
cugcucaggcggaggugagcgga

SEQ ID NO: 18061 - RNA, 24 nt, Artificial Sequence
  Synthetic oligonucleotide: PDCD1-4752
acugcucaggcggaggugagcgga

SEQ ID NO: 18062 - RNA, 18 nt, Artificial Sequence
  Synthetic oligonucleotide: PDCD1-4753
cccccgaccugccaggga

SEQ ID NO: 18063 - RNA, 19 nt, Artificial Sequence
  Synthetic oligonucleotide: PDCD1-4754
ccccccgaccugccaggga

SEQ ID NO: 18064 - RNA, 20 nt, Artificial Sequence
  Synthetic oligonucleotide: PDCD1-997
accccccgaccugccaggga

SEQ ID NO: 18065 - RNA, 21 nt, Artificial Sequence
  Synthetic oligonucleotide: PDCD1-4755
caccccccgaccugccaggga

SEQ ID NO: 18066 - RNA, 22 nt, Artificial Sequence
  Synthetic oligonucleotide: PDCD1-4756
gcaccccccgaccugccaggga

SEQ ID NO: 18067 - RNA, 23 nt, Artificial Sequence
  Synthetic oligonucleotide: PDCD1-4757
agcaccccccgaccugccaggga

SEQ ID NO: 18068 - RNA, 24 nt, Artificial Sequence
  Synthetic oligonucleotide: PDCD1-4758
cagcaccccccgaccugccaggga

SEQ ID NO: 18069 - RNA, 18 nt, Artificial Sequence
  Synthetic oligonucleotide: PDCD1-4759
gagagggugggggaggga

SEQ ID NO: 18070 - RNA, 19 nt, Artificial Sequence
  Synthetic oligonucleotide: PDCD1-4760
ggagagggugggggaggga

SEQ ID NO: 18071 - RNA, 20 nt, Artificial Sequence
  Synthetic oligonucleotide: PDCD1-1067
gggagagggugggggaggga

SEQ ID NO: 18072 - RNA, 21 nt, Artificial Sequence
  Synthetic oligonucleotide: PDCD1-4761
ggggagagggugggggaggga

SEQ ID NO: 18073 - RNA, 22 nt, Artificial Sequence
  Synthetic oligonucleotide: PDCD1-4762
uggggagagggugggggaggga

SEQ ID NO: 18074 - RNA, 23 nt, Artificial Sequence
  Synthetic oligonucleotide: PDCD1-4763
cuggggagagggugggggaggga

SEQ ID NO: 18075 - RNA, 24 nt, Artificial Sequence
  Synthetic oligonucleotide: PDCD1-4764
acuggggagagggugggggaggga

SEQ ID NO: 18076 - RNA, 18 nt, Artificial Sequence
  Synthetic oligonucleotide: PDCD1-4765
ggaccggcugagagggga

SEQ ID NO: 18077 - RNA, 19 nt, Artificial Sequence
  Synthetic oligonucleotide: PDCD1-4766
aggaccggcugagagggga

SEQ ID NO: 18078 - RNA, 20 nt, Artificial Sequence
  Synthetic oligonucleotide: PDCD1-964
aaggaccggcugagagggga

SEQ ID NO: 18079 - RNA, 21 nt, Artificial Sequence
  Synthetic oligonucleotide: PDCD1-4767
caaggaccggcugagagggga

SEQ ID NO: 18080 - RNA, 22 nt, Artificial Sequence
  Synthetic oligonucleotide: PDCD1-4768
ccaaggaccggcugagagggga

SEQ ID NO: 18081 - RNA, 23 nt, Artificial Sequence
  Synthetic oligonucleotide: PDCD1-4769
cccaaggaccggcugagagggga

SEQ ID NO: 18082 - RNA, 24 nt, Artificial Sequence
  Synthetic oligonucleotide: PDCD1-4770
ccccaaggaccggcugagagggga

SEQ ID NO: 18083 - RNA, 18 nt, Artificial Sequence
  Synthetic oligonucleotide: PDCD1-4771
uggggagaggguggggga

SEQ ID NO: 18084 - RNA, 19 nt, Artificial Sequence
  Synthetic oligonucleotide: PDCD1-4772
cuggggagaggguggggga

SEQ ID NO: 18085 - RNA, 20 nt, Artificial Sequence
  Synthetic oligonucleotide: PDCD1-2267
acuggggagaggguggggga

SEQ ID NO: 18086 - RNA, 21 nt, Artificial Sequence
  Synthetic oligonucleotide: PDCD1-4773
gacuggggagaggguggggga

SEQ ID NO: 18087 - RNA, 22 nt, Artificial Sequence
  Synthetic oligonucleotide: PDCD1-4774
ggacuggggagaggguggggga

SEQ ID NO: 18088 - RNA, 23 nt, Artificial Sequence
  Synthetic oligonucleotide: PDCD1-4775
aggacuggggagaggguggggga

SEQ ID NO: 18089 - RNA, 24 nt, Artificial Sequence
  Synthetic oligonucleotide: PDCD1-4776
uaggacuggggagaggguggggga

SEQ ID NO: 18090 - RNA, 18 nt, Artificial Sequence
  Synthetic oligonucleotide: PDCD1-4777
gccccaaggaccggcuga

SEQ ID NO: 18091 - RNA, 19 nt, Artificial Sequence
  Synthetic oligonucleotide: PDCD1-4778
agccccaaggaccggcuga

SEQ ID NO: 18092 - RNA, 20 nt, Artificial Sequence
  Synthetic oligonucleotide: PDCD1-961
cagccccaaggaccggcuga

SEQ ID NO: 18093 - RNA, 21 nt, Artificial Sequence
  Synthetic oligonucleotide: PDCD1-4779
gcagccccaaggaccggcuga

SEQ ID NO: 18094 - RNA, 22 nt, Artificial Sequence
  Synthetic oligonucleotide: PDCD1-4780
cgcagccccaaggaccggcuga

SEQ ID NO: 18095 - RNA, 23 nt, Artificial Sequence
  Synthetic oligonucleotide: PDCD1-4781
acgcagccccaaggaccggcuga

SEQ ID NO: 18096 - RNA, 24 nt, Artificial Sequence
  Synthetic oligonucleotide: PDCD1-4782
cacgcagccccaaggaccggcuga

SEQ ID NO: 18097 - RNA, 18 nt, Artificial Sequence
  Synthetic oligonucleotide: PDCD1-4783
ccacgugggcgagaguga

SEQ ID NO: 18098 - RNA, 19 nt, Artificial Sequence
  Synthetic oligonucleotide: PDCD1-4784
uccacgugggcgagaguga

SEQ ID NO: 18099 - RNA, 20 nt, Artificial Sequence
  Synthetic oligonucleotide: PDCD1-1035
auccacgugggcgagaguga

SEQ ID NO: 18100 - RNA, 21 nt, Artificial Sequence
  Synthetic oligonucleotide: PDCD1-4785
cauccacgugggcgagaguga

SEQ ID NO: 18101 - RNA, 22 nt, Artificial Sequence
  Synthetic oligonucleotide: PDCD1-4786
acauccacgugggcgagaguga

SEQ ID NO: 18102 - RNA, 23 nt, Artificial Sequence
  Synthetic oligonucleotide: PDCD1-4787
cacauccacgugggcgagaguga

SEQ ID NO: 18103 - RNA, 24 nt, Artificial Sequence
  Synthetic oligonucleotide: PDCD1-4788
ccacauccacgugggcgagaguga

SEQ ID NO: 18104 - RNA, 18 nt, Artificial Sequence
  Synthetic oligonucleotide: PDCD1-4789
cugcucaggcggagguga

SEQ ID NO: 18105 - RNA, 19 nt, Artificial Sequence
  Synthetic oligonucleotide: PDCD1-4790
acugcucaggcggagguga

SEQ ID NO: 18106 - RNA, 20 nt, Artificial Sequence
  Synthetic oligonucleotide: PDCD1-1022
cacugcucaggcggagguga

SEQ ID NO: 18107 - RNA, 21 nt, Artificial Sequence
  Synthetic oligonucleotide: PDCD1-4791
ccacugcucaggcggagguga

SEQ ID NO: 18108 - RNA, 22 nt, Artificial Sequence
  Synthetic oligonucleotide: PDCD1-4792
uccacugcucaggcggagguga

SEQ ID NO: 18109 - RNA, 23 nt, Artificial Sequence
  Synthetic oligonucleotide: PDCD1-4793
cuccacugcucaggcggagguga

SEQ ID NO: 18110 - RNA, 24 nt, Artificial Sequence
  Synthetic oligonucleotide: PDCD1-4794
ucuccacugcucaggcggagguga

SEQ ID NO: 18111 - RNA, 18 nt, Artificial Sequence
  Synthetic oligonucleotide: PDCD1-4795
ugucccaggucagguuga

SEQ ID NO: 18112 - RNA, 19 nt, Artificial Sequence
  Synthetic oligonucleotide: PDCD1-4796
cugucccaggucagguuga

SEQ ID NO: 18113 - RNA, 20 nt, Artificial Sequence
  Synthetic oligonucleotide: PDCD1-2236
acugucccaggucagguuga

SEQ ID NO: 18114 - RNA, 21 nt, Artificial Sequence
  Synthetic oligonucleotide: PDCD1-4797
aacugucccaggucagguuga

SEQ ID NO: 18115 - RNA, 22 nt, Artificial Sequence
  Synthetic oligonucleotide: PDCD1-4798
aaacugucccaggucagguuga

SEQ ID NO: 18116 - RNA, 23 nt, Artificial Sequence
  Synthetic oligonucleotide: PDCD1-4799
gaaacugucccaggucagguuga

SEQ ID NO: 18117 - RNA, 24 nt, Artificial Sequence
  Synthetic oligonucleotide: PDCD1-4800
ggaaacugucccaggucagguuga

SEQ ID NO: 18118 - RNA, 18 nt, Artificial Sequence
  Synthetic oligonucleotide: PDCD1-4801
gccacacagcucagggua

SEQ ID NO: 18119 - RNA, 19 nt, Artificial Sequence
  Synthetic oligonucleotide: PDCD1-4802
agccacacagcucagggua

SEQ ID NO: 18120 - RNA, 20 nt, Artificial Sequence
  Synthetic oligonucleotide: PDCD1-2112
aagccacacagcucagggua

SEQ ID NO: 18121 - RNA, 21 nt, Artificial Sequence
  Synthetic oligonucleotide: PDCD1-4803
aaagccacacagcucagggua

SEQ ID NO: 18122 - RNA, 22 nt, Artificial Sequence
  Synthetic oligonucleotide: PDCD1-4804
caaagccacacagcucagggua

SEQ ID NO: 18123 - RNA, 23 nt, Artificial Sequence
  Synthetic oligonucleotide: PDCD1-4805
ccaaagccacacagcucagggua

SEQ ID NO: 18124 - RNA, 24 nt, Artificial Sequence
  Synthetic oligonucleotide: PDCD1-4806
cccaaagccacacagcucagggua

SEQ ID NO: 18125 - RNA, 18 nt, Artificial Sequence
  Synthetic oligonucleotide: PDCD1-4807
cucuuccuccacauccac

SEQ ID NO: 18126 - RNA, 19 nt, Artificial Sequence
  Synthetic oligonucleotide: PDCD1-4808
ccucuuccuccacauccac

SEQ ID NO: 18127 - RNA, 20 nt, Artificial Sequence
  Synthetic oligonucleotide: PDCD1-1032
cccucuuccuccacauccac

SEQ ID NO: 18128 - RNA, 21 nt, Artificial Sequence
  Synthetic oligonucleotide: PDCD1-4809
ccccucuuccuccacauccac

SEQ ID NO: 18129 - RNA, 22 nt, Artificial Sequence
  Synthetic oligonucleotide: PDCD1-4810
cccccucuuccuccacauccac

SEQ ID NO: 18130 - RNA, 23 nt, Artificial Sequence
  Synthetic oligonucleotide: PDCD1-4811
gcccccucuuccuccacauccac

SEQ ID NO: 18131 - RNA, 24 nt, Artificial Sequence
  Synthetic oligonucleotide: PDCD1-4812
cgcccccucuuccuccacauccac

SEQ ID NO: 18132 - RNA, 18 nt, Artificial Sequence
  Synthetic oligonucleotide: PDCD1-4813
ggagagagagacagagac

SEQ ID NO: 18133 - RNA, 19 nt, Artificial Sequence
  Synthetic oligonucleotide: PDCD1-4814
gggagagagagacagagac

SEQ ID NO: 18134 - RNA, 20 nt, Artificial Sequence
  Synthetic oligonucleotide: PDCD1-2268
agggagagagagacagagac

SEQ ID NO: 18135 - RNA, 21 nt, Artificial Sequence
  Synthetic oligonucleotide: PDCD1-4815
gagggagagagagacagagac

SEQ ID NO: 18136 - RNA, 22 nt, Artificial Sequence
  Synthetic oligonucleotide: PDCD1-4816
ggagggagagagagacagagac

SEQ ID NO: 18137 - RNA, 23 nt, Artificial Sequence
  Synthetic oligonucleotide: PDCD1-4817
gggagggagagagagacagagac

SEQ ID NO: 18138 - RNA, 24 nt, Artificial Sequence
  Synthetic oligonucleotide: PDCD1-4818
ggggagggagagagagacagagac

SEQ ID NO: 18139 - RNA, 18 nt, Artificial Sequence
  Synthetic oligonucleotide: PDCD1-4819
gugaggaggggguaggac

SEQ ID NO: 18140 - RNA, 19 nt, Artificial Sequence
  Synthetic oligonucleotide: PDCD1-4820
ggugaggaggggguaggac

SEQ ID NO: 18141 - RNA, 20 nt, Artificial Sequence
  Synthetic oligonucleotide: PDCD1-2257
gggugaggaggggguaggac

SEQ ID NO: 18142 - RNA, 21 nt, Artificial Sequence
  Synthetic oligonucleotide: PDCD1-4821
ggggugaggaggggguaggac

SEQ ID NO: 18143 - RNA, 22 nt, Artificial Sequence
  Synthetic oligonucleotide: PDCD1-4822
aggggugaggaggggguaggac

SEQ ID NO: 18144 - RNA, 23 nt, Artificial Sequence
  Synthetic oligonucleotide: PDCD1-4823
gaggggugaggaggggguaggac

SEQ ID NO: 18145 - RNA, 24 nt, Artificial Sequence
  Synthetic oligonucleotide: PDCD1-4824
ggaggggugaggaggggguaggac

SEQ ID NO: 18146 - RNA, 18 nt, Artificial Sequence
  Synthetic oligonucleotide: PDCD1-4825
caggagcaaagaggggac

SEQ ID NO: 18147 - RNA, 19 nt, Artificial Sequence
  Synthetic oligonucleotide: PDCD1-4826
ccaggagcaaagaggggac

SEQ ID NO: 18148 - RNA, 20 nt, Artificial Sequence
  Synthetic oligonucleotide: PDCD1-971
cccaggagcaaagaggggac

SEQ ID NO: 18149 - RNA, 21 nt, Artificial Sequence
  Synthetic oligonucleotide: PDCD1-4827
gcccaggagcaaagaggggac

SEQ ID NO: 18150 - RNA, 22 nt, Artificial Sequence
  Synthetic oligonucleotide: PDCD1-4828
ugcccaggagcaaagaggggac

SEQ ID NO: 18151 - RNA, 23 nt, Artificial Sequence
  Synthetic oligonucleotide: PDCD1-4829
cugcccaggagcaaagaggggac

SEQ ID NO: 18152 - RNA, 24 nt, Artificial Sequence
  Synthetic oligonucleotide: PDCD1-4830
ccugcccaggagcaaagaggggac

SEQ ID NO: 18153 - RNA, 18 nt, Artificial Sequence
  Synthetic oligonucleotide: PDCD1-4831
ggggcccagagaggaacc

SEQ ID NO: 18154 - RNA, 19 nt, Artificial Sequence
  Synthetic oligonucleotide: PDCD1-4832
uggggcccagagaggaacc

SEQ ID NO: 18155 - RNA, 20 nt, Artificial Sequence
  Synthetic oligonucleotide: PDCD1-984
uuggggcccagagaggaacc

SEQ ID NO: 18156 - RNA, 21 nt, Artificial Sequence
  Synthetic oligonucleotide: PDCD1-4833
guuggggcccagagaggaacc

SEQ ID NO: 18157 - RNA, 22 nt, Artificial Sequence
  Synthetic oligonucleotide: PDCD1-4834
aguuggggcccagagaggaacc

SEQ ID NO: 18158 - RNA, 23 nt, Artificial Sequence
  Synthetic oligonucleotide: PDCD1-4835
gaguuggggcccagagaggaacc

SEQ ID NO: 18159 - RNA, 24 nt, Artificial Sequence
  Synthetic oligonucleotide: PDCD1-4836
ggaguuggggcccagagaggaacc

SEQ ID NO: 18160 - RNA, 18 nt, Artificial Sequence
  Synthetic oligonucleotide: PDCD1-4837
ccccucgcuccgggaccc

SEQ ID NO: 18161 - RNA, 19 nt, Artificial Sequence
  Synthetic oligonucleotide: PDCD1-4838
accccucgcuccgggaccc

SEQ ID NO: 18162 - RNA, 20 nt, Artificial Sequence
  Synthetic oligonucleotide: PDCD1-1002
gaccccucgcuccgggaccc

SEQ ID NO: 18163 - RNA, 21 nt, Artificial Sequence
  Synthetic oligonucleotide: PDCD1-4839
agaccccucgcuccgggaccc

SEQ ID NO: 18164 - RNA, 22 nt, Artificial Sequence
  Synthetic oligonucleotide: PDCD1-4840
cagaccccucgcuccgggaccc

SEQ ID NO: 18165 - RNA, 23 nt, Artificial Sequence
  Synthetic oligonucleotide: PDCD1-4841
ccagaccccucgcuccgggaccc

SEQ ID NO: 18166 - RNA, 24 nt, Artificial Sequence
  Synthetic oligonucleotide: PDCD1-4842
uccagaccccucgcuccgggaccc

SEQ ID NO: 18167 - RNA, 18 nt, Artificial Sequence
  Synthetic oligonucleotide: PDCD1-4843
gcccccacgcccuacccc

SEQ ID NO: 18168 - RNA, 19 nt, Artificial Sequence
  Synthetic oligonucleotide: PDCD1-4844
ggcccccacgcccuacccc

SEQ ID NO: 18169 - RNA, 20 nt, Artificial Sequence
  Synthetic oligonucleotide: PDCD1-1083
uggcccccacgcccuacccc

SEQ ID NO: 18170 - RNA, 21 nt, Artificial Sequence
  Synthetic oligonucleotide: PDCD1-4845
guggcccccacgcccuacccc

SEQ ID NO: 18171 - RNA, 22 nt, Artificial Sequence
  Synthetic oligonucleotide: PDCD1-4846
cguggcccccacgcccuacccc

SEQ ID NO: 18172 - RNA, 23 nt, Artificial Sequence
  Synthetic oligonucleotide: PDCD1-4847
ccguggcccccacgcccuacccc

SEQ ID NO: 18173 - RNA, 24 nt, Artificial Sequence
  Synthetic oligonucleotide: PDCD1-4848
cccguggcccccacgcccuacccc

SEQ ID NO: 18174 - RNA, 18 nt, Artificial Sequence
  Synthetic oligonucleotide: PDCD1-4849
cagagguccugccugccc

SEQ ID NO: 18175 - RNA, 19 nt, Artificial Sequence
  Synthetic oligonucleotide: PDCD1-4850
acagagguccugccugccc

SEQ ID NO: 18176 - RNA, 20 nt, Artificial Sequence
  Synthetic oligonucleotide: PDCD1-2095
gacagagguccugccugccc

SEQ ID NO: 18177 - RNA, 21 nt, Artificial Sequence
  Synthetic oligonucleotide: PDCD1-4851
ggacagagguccugccugccc

SEQ ID NO: 18178 - RNA, 22 nt, Artificial Sequence
  Synthetic oligonucleotide: PDCD1-4852
gggacagagguccugccugccc

SEQ ID NO: 18179 - RNA, 23 nt, Artificial Sequence
  Synthetic oligonucleotide: PDCD1-4853
ggggacagagguccugccugccc

SEQ ID NO: 18180 - RNA, 24 nt, Artificial Sequence
  Synthetic oligonucleotide: PDCD1-4854
aggggacagagguccugccugccc

SEQ ID NO: 18181 - RNA, 18 nt, Artificial Sequence
  Synthetic oligonucleotide: PDCD1-4855
ccaucccccccaucuccc

SEQ ID NO: 18182 - RNA, 19 nt, Artificial Sequence
  Synthetic oligonucleotide: PDCD1-4856
cccaucccccccaucuccc

SEQ ID NO: 18183 - RNA, 20 nt, Artificial Sequence
  Synthetic oligonucleotide: PDCD1-2294
ccccaucccccccaucuccc

SEQ ID NO: 18184 - RNA, 21 nt, Artificial Sequence
  Synthetic oligonucleotide: PDCD1-4857
cccccaucccccccaucuccc

SEQ ID NO: 18185 - RNA, 22 nt, Artificial Sequence
  Synthetic oligonucleotide: PDCD1-4858
ucccccaucccccccaucuccc

SEQ ID NO: 18186 - RNA, 23 nt, Artificial Sequence
  Synthetic oligonucleotide: PDCD1-4859
cucccccaucccccccaucuccc

SEQ ID NO: 18187 - RNA, 24 nt, Artificial Sequence
  Synthetic oligonucleotide: PDCD1-4860
ccucccccaucccccccaucuccc

SEQ ID NO: 18188 - RNA, 18 nt, Artificial Sequence
  Synthetic oligonucleotide: PDCD1-4861
aggggaggaguuggggcc

SEQ ID NO: 18189 - RNA, 19 nt, Artificial Sequence
  Synthetic oligonucleotide: PDCD1-4862
caggggaggaguuggggcc

SEQ ID NO: 18190 - RNA, 20 nt, Artificial Sequence
  Synthetic oligonucleotide: PDCD1-980
ccaggggaggaguuggggcc

SEQ ID NO: 18191 - RNA, 21 nt, Artificial Sequence
  Synthetic oligonucleotide: PDCD1-4863
gccaggggaggaguuggggcc

SEQ ID NO: 18192 - RNA, 22 nt, Artificial Sequence
  Synthetic oligonucleotide: PDCD1-4864
ggccaggggaggaguuggggcc

SEQ ID NO: 18193 - RNA, 23 nt, Artificial Sequence
  Synthetic oligonucleotide: PDCD1-4865
gggccaggggaggaguuggggcc

SEQ ID NO: 18194 - RNA, 24 nt, Artificial Sequence
  Synthetic oligonucleotide: PDCD1-4866
ugggccaggggaggaguuggggcc

SEQ ID NO: 18195 - RNA, 18 nt, Artificial Sequence
  Synthetic oligonucleotide: PDCD1-4867
aaagaggggacuugggcc

SEQ ID NO: 18196 - RNA, 19 nt, Artificial Sequence
  Synthetic oligonucleotide: PDCD1-4868
caaagaggggacuugggcc

SEQ ID NO: 18197 - RNA, 20 nt, Artificial Sequence
  Synthetic oligonucleotide: PDCD1-2101
gcaaagaggggacuugggcc

SEQ ID NO: 18198 - RNA, 21 nt, Artificial Sequence
  Synthetic oligonucleotide: PDCD1-4869
agcaaagaggggacuugggcc

SEQ ID NO: 18199 - RNA, 22 nt, Artificial Sequence
  Synthetic oligonucleotide: PDCD1-4870
gagcaaagaggggacuugggcc

SEQ ID NO: 18200 - RNA, 23 nt, Artificial Sequence
  Synthetic oligonucleotide: PDCD1-4871
ggagcaaagaggggacuugggcc

SEQ ID NO: 18201 - RNA, 24 nt, Artificial Sequence
  Synthetic oligonucleotide: PDCD1-4872
aggagcaaagaggggacuugggcc

SEQ ID NO: 18202 - RNA, 18 nt, Artificial Sequence
  Synthetic oligonucleotide: PDCD1-3302
cugugggaucugcaugcc

SEQ ID NO: 18203 - RNA, 19 nt, Artificial Sequence
  Synthetic oligonucleotide: PDCD1-3303
ccugugggaucugcaugcc

SEQ ID NO: 18204 - RNA, 20 nt, Artificial Sequence
  Synthetic oligonucleotide: PDCD1-127
gccugugggaucugcaugcc

SEQ ID NO: 18205 - RNA, 21 nt, Artificial Sequence
  Synthetic oligonucleotide: PDCD1-3304
cgccugugggaucugcaugcc

SEQ ID NO: 18206 - RNA, 22 nt, Artificial Sequence
  Synthetic oligonucleotide: PDCD1-3305
gcgccugugggaucugcaugcc

SEQ ID NO: 18207 - RNA, 23 nt, Artificial Sequence
  Synthetic oligonucleotide: PDCD1-3306
ggcgccugugggaucugcaugcc

SEQ ID NO: 18208 - RNA, 24 nt, Artificial Sequence
  Synthetic oligonucleotide: PDCD1-3307
gggcgccugugggaucugcaugcc

SEQ ID NO: 18209 - RNA, 18 nt, Artificial Sequence
  Synthetic oligonucleotide: PDCD1-4873
agcaccccccgaccugcc

SEQ ID NO: 18210 - RNA, 19 nt, Artificial Sequence
  Synthetic oligonucleotide: PDCD1-4874
cagcaccccccgaccugcc

SEQ ID NO: 18211 - RNA, 20 nt, Artificial Sequence
  Synthetic oligonucleotide: PDCD1-2122
acagcaccccccgaccugcc

SEQ ID NO: 18212 - RNA, 21 nt, Artificial Sequence
  Synthetic oligonucleotide: PDCD1-4875
cacagcaccccccgaccugcc

SEQ ID NO: 18213 - RNA, 22 nt, Artificial Sequence
  Synthetic oligonucleotide: PDCD1-4876
ccacagcaccccccgaccugcc

SEQ ID NO: 18214 - RNA, 23 nt, Artificial Sequence
  Synthetic oligonucleotide: PDCD1-4877
gccacagcaccccccgaccugcc

SEQ ID NO: 18215 - RNA, 24 nt, Artificial Sequence
  Synthetic oligonucleotide: PDCD1-4878
ugccacagcaccccccgaccugcc

SEQ ID NO: 18216 - RNA, 20 nt, Artificial Sequence
  Synthetic oligonucleotide: PDCD1-2132
ucagcaccccccgaccugcc

SEQ ID NO: 18217 - RNA, 21 nt, Artificial Sequence
  Synthetic oligonucleotide: PDCD1-4879
cucagcaccccccgaccugcc

SEQ ID NO: 18218 - RNA, 22 nt, Artificial Sequence
  Synthetic oligonucleotide: PDCD1-4880
ccucagcaccccccgaccugcc

SEQ ID NO: 18219 - RNA, 23 nt, Artificial Sequence
  Synthetic oligonucleotide: PDCD1-4881
gccucagcaccccccgaccugcc

SEQ ID NO: 18220 - RNA, 24 nt, Artificial Sequence
  Synthetic oligonucleotide: PDCD1-4882
cgccucagcaccccccgaccugcc

SEQ ID NO: 18221 - RNA, 18 nt, Artificial Sequence
  Synthetic oligonucleotide: PDCD1-4883
gggccgggccucccugcc

SEQ ID NO: 18222 - RNA, 19 nt, Artificial Sequence
  Synthetic oligonucleotide: PDCD1-4884
ggggccgggccucccugcc

SEQ ID NO: 18223 - RNA, 20 nt, Artificial Sequence
  Synthetic oligonucleotide: PDCD1-2300
gggggccgggccucccugcc

SEQ ID NO: 18224 - RNA, 21 nt, Artificial Sequence
  Synthetic oligonucleotide: PDCD1-4885
ugggggccgggccucccugcc

SEQ ID NO: 18225 - RNA, 22 nt, Artificial Sequence
  Synthetic oligonucleotide: PDCD1-4886
cugggggccgggccucccugcc

SEQ ID NO: 18226 - RNA, 23 nt, Artificial Sequence
  Synthetic oligonucleotide: PDCD1-4887
ccugggggccgggccucccugcc

SEQ ID NO: 18227 - RNA, 24 nt, Artificial Sequence
  Synthetic oligonucleotide: PDCD1-4888
cccugggggccgggccucccugcc

SEQ ID NO: 18228 - RNA, 18 nt, Artificial Sequence
  Synthetic oligonucleotide: PDCD1-4889
acagagguccugccugcc

SEQ ID NO: 18229 - RNA, 19 nt, Artificial Sequence
  Synthetic oligonucleotide: PDCD1-4890
gacagagguccugccugcc

SEQ ID NO: 18230 - RNA, 20 nt, Artificial Sequence
  Synthetic oligonucleotide: PDCD1-965
ggacagagguccugccugcc

SEQ ID NO: 18231 - RNA, 21 nt, Artificial Sequence
  Synthetic oligonucleotide: PDCD1-4891
gggacagagguccugccugcc

SEQ ID NO: 18232 - RNA, 22 nt, Artificial Sequence
  Synthetic oligonucleotide: PDCD1-4892
ggggacagagguccugccugcc

SEQ ID NO: 18233 - RNA, 23 nt, Artificial Sequence
  Synthetic oligonucleotide: PDCD1-4893
aggggacagagguccugccugcc

SEQ ID NO: 18234 - RNA, 24 nt, Artificial Sequence
  Synthetic oligonucleotide: PDCD1-4894
gaggggacagagguccugccugcc

SEQ ID NO: 18235 - RNA, 18 nt, Artificial Sequence
  Synthetic oligonucleotide: PDCD1-4895
cccaucccccccaucucc

SEQ ID NO: 18236 - RNA, 19 nt, Artificial Sequence
  Synthetic oligonucleotide: PDCD1-4896
ccccaucccccccaucucc

SEQ ID NO: 18237 - RNA, 20 nt, Artificial Sequence
  Synthetic oligonucleotide: PDCD1-1093
cccccaucccccccaucucc

SEQ ID NO: 18238 - RNA, 21 nt, Artificial Sequence
  Synthetic oligonucleotide: PDCD1-4897
ucccccaucccccccaucucc

SEQ ID NO: 18239 - RNA, 22 nt, Artificial Sequence
  Synthetic oligonucleotide: PDCD1-4898
cucccccaucccccccaucucc

SEQ ID NO: 18240 - RNA, 23 nt, Artificial Sequence
  Synthetic oligonucleotide: PDCD1-4899
ccucccccaucccccccaucucc

SEQ ID NO: 18241 - RNA, 24 nt, Artificial Sequence
  Synthetic oligonucleotide: PDCD1-4900
uccucccccaucccccccaucucc

SEQ ID NO: 18242 - RNA, 18 nt, Artificial Sequence
  Synthetic oligonucleotide: PDCD1-4901
caggguaaggggcagagc

SEQ ID NO: 18243 - RNA, 19 nt, Artificial Sequence
  Synthetic oligonucleotide: PDCD1-4902
ucaggguaaggggcagagc

SEQ ID NO: 18244 - RNA, 20 nt, Artificial Sequence
  Synthetic oligonucleotide: PDCD1-2115
cucaggguaaggggcagagc

SEQ ID NO: 18245 - RNA, 21 nt, Artificial Sequence
  Synthetic oligonucleotide: PDCD1-4903
gcucaggguaaggggcagagc

SEQ ID NO: 18246 - RNA, 22 nt, Artificial Sequence
  Synthetic oligonucleotide: PDCD1-4904
agcucaggguaaggggcagagc

SEQ ID NO: 18247 - RNA, 23 nt, Artificial Sequence
  Synthetic oligonucleotide: PDCD1-4905
cagcucaggguaaggggcagagc

SEQ ID NO: 18248 - RNA, 24 nt, Artificial Sequence
  Synthetic oligonucleotide: PDCD1-4906
acagcucaggguaaggggcagagc

SEQ ID NO: 18249 - RNA, 18 nt, Artificial Sequence
  Synthetic oligonucleotide: PDCD1-4907
ccucuuuccauaucccgc

SEQ ID NO: 18250 - RNA, 19 nt, Artificial Sequence
  Synthetic oligonucleotide: PDCD1-4908
gccucuuuccauaucccgc

SEQ ID NO: 18251 - RNA, 20 nt, Artificial Sequence
  Synthetic oligonucleotide: PDCD1-1087
ggccucuuuccauaucccgc

SEQ ID NO: 18252 - RNA, 21 nt, Artificial Sequence
  Synthetic oligonucleotide: PDCD1-4909
uggccucuuuccauaucccgc

SEQ ID NO: 18253 - RNA, 22 nt, Artificial Sequence
  Synthetic oligonucleotide: PDCD1-4910
guggccucuuuccauaucccgc

SEQ ID NO: 18254 - RNA, 23 nt, Artificial Sequence
  Synthetic oligonucleotide: PDCD1-4911
uguggccucuuuccauaucccgc

SEQ ID NO: 18255 - RNA, 24 nt, Artificial Sequence
  Synthetic oligonucleotide: PDCD1-4912
cuguggccucuuuccauaucccgc

SEQ ID NO: 18256 - RNA, 18 nt, Artificial Sequence
  Synthetic oligonucleotide: PDCD1-4913
caaagaggggacuugggc

SEQ ID NO: 18257 - RNA, 19 nt, Artificial Sequence
  Synthetic oligonucleotide: PDCD1-4914
gcaaagaggggacuugggc

SEQ ID NO: 18258 - RNA, 20 nt, Artificial Sequence
  Synthetic oligonucleotide: PDCD1-972
agcaaagaggggacuugggc

SEQ ID NO: 18259 - RNA, 21 nt, Artificial Sequence
  Synthetic oligonucleotide: PDCD1-4915
gagcaaagaggggacuugggc

SEQ ID NO: 18260 - RNA, 22 nt, Artificial Sequence
  Synthetic oligonucleotide: PDCD1-4916
ggagcaaagaggggacuugggc

SEQ ID NO: 18261 - RNA, 23 nt, Artificial Sequence
  Synthetic oligonucleotide: PDCD1-4917
aggagcaaagaggggacuugggc

SEQ ID NO: 18262 - RNA, 24 nt, Artificial Sequence
  Synthetic oligonucleotide: PDCD1-4918
caggagcaaagaggggacuugggc

SEQ ID NO: 18263 - RNA, 18 nt, Artificial Sequence
  Synthetic oligonucleotide: PDCD1-3332
accgcccagacgacuggc

SEQ ID NO: 18264 - RNA, 19 nt, Artificial Sequence
  Synthetic oligonucleotide: PDCD1-3333
caccgcccagacgacuggc

SEQ ID NO: 18265 - RNA, 20 nt, Artificial Sequence
  Synthetic oligonucleotide: PDCD1-592
gcaccgcccagacgacuggc

SEQ ID NO: 18266 - RNA, 21 nt, Artificial Sequence
  Synthetic oligonucleotide: PDCD1-3334
agcaccgcccagacgacuggc

SEQ ID NO: 18267 - RNA, 22 nt, Artificial Sequence
  Synthetic oligonucleotide: PDCD1-3335
uagcaccgcccagacgacuggc

SEQ ID NO: 18268 - RNA, 23 nt, Artificial Sequence
  Synthetic oligonucleotide: PDCD1-3336
guagcaccgcccagacgacuggc

SEQ ID NO: 18269 - RNA, 24 nt, Artificial Sequence
  Synthetic oligonucleotide: PDCD1-3337
uguagcaccgcccagacgacuggc

SEQ ID NO: 18270 - RNA, 18 nt, Artificial Sequence
  Synthetic oligonucleotide: PDCD1-3338
ccugugggaucugcaugc

SEQ ID NO: 18271 - RNA, 19 nt, Artificial Sequence
  Synthetic oligonucleotide: PDCD1-3339
gccugugggaucugcaugc

SEQ ID NO: 18272 - RNA, 20 nt, Artificial Sequence
  Synthetic oligonucleotide: PDCD1-589
cgccugugggaucugcaugc

SEQ ID NO: 18273 - RNA, 21 nt, Artificial Sequence
  Synthetic oligonucleotide: PDCD1-3340
gcgccugugggaucugcaugc

SEQ ID NO: 18274 - RNA, 22 nt, Artificial Sequence
  Synthetic oligonucleotide: PDCD1-3341
ggcgccugugggaucugcaugc

SEQ ID NO: 18275 - RNA, 23 nt, Artificial Sequence
  Synthetic oligonucleotide: PDCD1-3342
gggcgccugugggaucugcaugc

SEQ ID NO: 18276 - RNA, 24 nt, Artificial Sequence
  Synthetic oligonucleotide: PDCD1-3343
agggcgccugugggaucugcaugc

SEQ ID NO: 18277 - RNA, 18 nt, Artificial Sequence
  Synthetic oligonucleotide: PDCD1-4919
cagcaccccccgaccugc

SEQ ID NO: 18278 - RNA, 19 nt, Artificial Sequence
  Synthetic oligonucleotide: PDCD1-4920
acagcaccccccgaccugc

SEQ ID NO: 18279 - RNA, 20 nt, Artificial Sequence
  Synthetic oligonucleotide: PDCD1-995
cacagcaccccccgaccugc

SEQ ID NO: 18280 - RNA, 21 nt, Artificial Sequence
  Synthetic oligonucleotide: PDCD1-4921
ccacagcaccccccgaccugc

SEQ ID NO: 18281 - RNA, 22 nt, Artificial Sequence
  Synthetic oligonucleotide: PDCD1-4922
gccacagcaccccccgaccugc

SEQ ID NO: 18282 - RNA, 23 nt, Artificial Sequence
  Synthetic oligonucleotide: PDCD1-4923
ugccacagcaccccccgaccugc

SEQ ID NO: 18283 - RNA, 24 nt, Artificial Sequence
  Synthetic oligonucleotide: PDCD1-4924
cugccacagcaccccccgaccugc

SEQ ID NO: 18284 - RNA, 19 nt, Artificial Sequence
  Synthetic oligonucleotide: PDCD1-4925
ucagcaccccccgaccugc

SEQ ID NO: 18285 - RNA, 20 nt, Artificial Sequence
  Synthetic oligonucleotide: PDCD1-1004
cucagcaccccccgaccugc

SEQ ID NO: 18286 - RNA, 21 nt, Artificial Sequence
  Synthetic oligonucleotide: PDCD1-4926
ccucagcaccccccgaccugc

SEQ ID NO: 18287 - RNA, 22 nt, Artificial Sequence
  Synthetic oligonucleotide: PDCD1-4927
gccucagcaccccccgaccugc

SEQ ID NO: 18288 - RNA, 23 nt, Artificial Sequence
  Synthetic oligonucleotide: PDCD1-4928
cgccucagcaccccccgaccugc

SEQ ID NO: 18289 - RNA, 24 nt, Artificial Sequence
  Synthetic oligonucleotide: PDCD1-4929
ccgccucagcaccccccgaccugc

SEQ ID NO: 18290 - RNA, 18 nt, Artificial Sequence
  Synthetic oligonucleotide: PDCD1-4930
ggggccgggccucccugc

SEQ ID NO: 18291 - RNA, 19 nt, Artificial Sequence
  Synthetic oligonucleotide: PDCD1-4931
gggggccgggccucccugc

SEQ ID NO: 18292 - RNA, 20 nt, Artificial Sequence
  Synthetic oligonucleotide: PDCD1-1097
ugggggccgggccucccugc

SEQ ID NO: 18293 - RNA, 21 nt, Artificial Sequence
  Synthetic oligonucleotide: PDCD1-4932
cugggggccgggccucccugc

SEQ ID NO: 18294 - RNA, 22 nt, Artificial Sequence
  Synthetic oligonucleotide: PDCD1-4933
ccugggggccgggccucccugc

SEQ ID NO: 18295 - RNA, 23 nt, Artificial Sequence
  Synthetic oligonucleotide: PDCD1-4934
cccugggggccgggccucccugc

SEQ ID NO: 18296 - RNA, 24 nt, Artificial Sequence
  Synthetic oligonucleotide: PDCD1-4935
ucccugggggccgggccucccugc

SEQ ID NO: 18297 - RNA, 18 nt, Artificial Sequence
  Synthetic oligonucleotide: PDCD1-4936
ccgggaccccugggcugc

SEQ ID NO: 18298 - RNA, 19 nt, Artificial Sequence
  Synthetic oligonucleotide: PDCD1-4937
uccgggaccccugggcugc

SEQ ID NO: 18299 - RNA, 20 nt, Artificial Sequence
  Synthetic oligonucleotide: PDCD1-1003
cuccgggaccccugggcugc

SEQ ID NO: 18300 - RNA, 21 nt, Artificial Sequence
  Synthetic oligonucleotide: PDCD1-4938
gcuccgggaccccugggcugc

SEQ ID NO: 18301 - RNA, 22 nt, Artificial Sequence
  Synthetic oligonucleotide: PDCD1-4939
cgcuccgggaccccugggcugc

SEQ ID NO: 18302 - RNA, 23 nt, Artificial Sequence
  Synthetic oligonucleotide: PDCD1-4940
ucgcuccgggaccccugggcugc

SEQ ID NO: 18303 - RNA, 24 nt, Artificial Sequence
  Synthetic oligonucleotide: PDCD1-4941
cucgcuccgggaccccugggcugc

SEQ ID NO: 18304 - RNA, 18 nt, Artificial Sequence
  Synthetic oligonucleotide: PDCD1-4942
gagugacagaggcagugc

SEQ ID NO: 18305 - RNA, 19 nt, Artificial Sequence
  Synthetic oligonucleotide: PDCD1-4943
agagugacagaggcagugc

SEQ ID NO: 18306 - RNA, 20 nt, Artificial Sequence
  Synthetic oligonucleotide: PDCD1-2243
gagagugacagaggcagugc

SEQ ID NO: 18307 - RNA, 21 nt, Artificial Sequence
  Synthetic oligonucleotide: PDCD1-4944
cgagagugacagaggcagugc

SEQ ID NO: 18308 - RNA, 22 nt, Artificial Sequence
  Synthetic oligonucleotide: PDCD1-4945
gcgagagugacagaggcagugc

SEQ ID NO: 18309 - RNA, 23 nt, Artificial Sequence
  Synthetic oligonucleotide: PDCD1-4946
ggcgagagugacagaggcagugc

SEQ ID NO: 18310 - RNA, 24 nt, Artificial Sequence
  Synthetic oligonucleotide: PDCD1-4947
gggcgagagugacagaggcagugc

SEQ ID NO: 18311 - RNA, 18 nt, Artificial Sequence
  Synthetic oligonucleotide: PDCD1-4948
ccgcccgagcugccccuc

SEQ ID NO: 18312 - RNA, 19 nt, Artificial Sequence
  Synthetic oligonucleotide: PDCD1-4949
cccgcccgagcugccccuc

SEQ ID NO: 18313 - RNA, 20 nt, Artificial Sequence
  Synthetic oligonucleotide: PDCD1-1088
ucccgcccgagcugccccuc

SEQ ID NO: 18314 - RNA, 21 nt, Artificial Sequence
  Synthetic oligonucleotide: PDCD1-4950
aucccgcccgagcugccccuc

SEQ ID NO: 18315 - RNA, 22 nt, Artificial Sequence
  Synthetic oligonucleotide: PDCD1-4951
uaucccgcccgagcugccccuc

SEQ ID NO: 18316 - RNA, 23 nt, Artificial Sequence
  Synthetic oligonucleotide: PDCD1-4952
auaucccgcccgagcugccccuc

SEQ ID NO: 18317 - RNA, 24 nt, Artificial Sequence
  Synthetic oligonucleotide: PDCD1-4953
cauaucccgcccgagcugccccuc

SEQ ID NO: 18318 - RNA, 18 nt, Artificial Sequence
  Synthetic oligonucleotide: PDCD1-4954
ccauucugucggagccuc

SEQ ID NO: 18319 - RNA, 19 nt, Artificial Sequence
  Synthetic oligonucleotide: PDCD1-4955
cccauucugucggagccuc

SEQ ID NO: 18320 - RNA, 20 nt, Artificial Sequence
  Synthetic oligonucleotide: PDCD1-2764
ucccauucugucggagccuc

SEQ ID NO: 18321 - RNA, 21 nt, Artificial Sequence
  Synthetic oligonucleotide: PDCD1-4956
cucccauucugucggagccuc

SEQ ID NO: 18322 - RNA, 22 nt, Artificial Sequence
  Synthetic oligonucleotide: PDCD1-4957
acucccauucugucggagccuc

SEQ ID NO: 18323 - RNA, 23 nt, Artificial Sequence
  Synthetic oligonucleotide: PDCD1-4958
cacucccauucugucggagccuc

SEQ ID NO: 18324 - RNA, 24 nt, Artificial Sequence
  Synthetic oligonucleotide: PDCD1-4959
ccacucccauucugucggagccuc

SEQ ID NO: 18325 - RNA, 18 nt, Artificial Sequence
  Synthetic oligonucleotide: PDCD1-4960
ccuccagaccccucgcuc

SEQ ID NO: 18326 - RNA, 19 nt, Artificial Sequence
  Synthetic oligonucleotide: PDCD1-4961
cccuccagaccccucgcuc

SEQ ID NO: 18327 - RNA, 20 nt, Artificial Sequence
  Synthetic oligonucleotide: PDCD1-2125
ucccuccagaccccucgcuc

SEQ ID NO: 18328 - RNA, 21 nt, Artificial Sequence
  Synthetic oligonucleotide: PDCD1-4962
gucccuccagaccccucgcuc

SEQ ID NO: 18329 - RNA, 22 nt, Artificial Sequence
  Synthetic oligonucleotide: PDCD1-4963
ggucccuccagaccccucgcuc

SEQ ID NO: 18330 - RNA, 23 nt, Artificial Sequence
  Synthetic oligonucleotide: PDCD1-4964
aggucccuccagaccccucgcuc

SEQ ID NO: 18331 - RNA, 24 nt, Artificial Sequence
  Synthetic oligonucleotide: PDCD1-4965
aaggucccuccagaccccucgcuc

SEQ ID NO: 18332 - RNA, 18 nt, Artificial Sequence
  Synthetic oligonucleotide: PDCD1-4966
ccuccagaccccuggcuc

SEQ ID NO: 18333 - RNA, 19 nt, Artificial Sequence
  Synthetic oligonucleotide: PDCD1-4967
cccuccagaccccuggcuc

SEQ ID NO: 18334 - RNA, 20 nt, Artificial Sequence
  Synthetic oligonucleotide: PDCD1-2139
ucccuccagaccccuggcuc

SEQ ID NO: 18335 - RNA, 21 nt, Artificial Sequence
  Synthetic oligonucleotide: PDCD1-4968
gucccuccagaccccuggcuc

SEQ ID NO: 18336 - RNA, 22 nt, Artificial Sequence
  Synthetic oligonucleotide: PDCD1-4969
ggucccuccagaccccuggcuc

SEQ ID NO: 18337 - RNA, 23 nt, Artificial Sequence
  Synthetic oligonucleotide: PDCD1-4970
aggucccuccagaccccuggcuc

SEQ ID NO: 18338 - RNA, 24 nt, Artificial Sequence
  Synthetic oligonucleotide: PDCD1-4971
aaggucccuccagaccccuggcuc

SEQ ID NO: 18339 - RNA, 18 nt, Artificial Sequence
  Synthetic oligonucleotide: PDCD1-4972
cccucugggcucagguuc

SEQ ID NO: 18340 - RNA, 19 nt, Artificial Sequence
  Synthetic oligonucleotide: PDCD1-4973
ccccucugggcucagguuc

SEQ ID NO: 18341 - RNA, 20 nt, Artificial Sequence
  Synthetic oligonucleotide: PDCD1-1103
cccccucugggcucagguuc

SEQ ID NO: 18342 - RNA, 21 nt, Artificial Sequence
  Synthetic oligonucleotide: PDCD1-4974
gcccccucugggcucagguuc

SEQ ID NO: 18343 - RNA, 22 nt, Artificial Sequence
  Synthetic oligonucleotide: PDCD1-4975
ggcccccucugggcucagguuc

SEQ ID NO: 18344 - RNA, 23 nt, Artificial Sequence
  Synthetic oligonucleotide: PDCD1-4976
uggcccccucugggcucagguuc

SEQ ID NO: 18345 - RNA, 24 nt, Artificial Sequence
  Synthetic oligonucleotide: PDCD1-4977
guggcccccucugggcucagguuc

SEQ ID NO: 18346 - RNA, 18 nt, Artificial Sequence
  Synthetic oligonucleotide: PDCD1-4978
gccugcccaggagcaaag

SEQ ID NO: 18347 - RNA, 19 nt, Artificial Sequence
  Synthetic oligonucleotide: PDCD1-4979
ugccugcccaggagcaaag

SEQ ID NO: 18348 - RNA, 20 nt, Artificial Sequence
  Synthetic oligonucleotide: PDCD1-2096
cugccugcccaggagcaaag

SEQ ID NO: 18349 - RNA, 21 nt, Artificial Sequence
  Synthetic oligonucleotide: PDCD1-4980
ccugccugcccaggagcaaag

SEQ ID NO: 18350 - RNA, 22 nt, Artificial Sequence
  Synthetic oligonucleotide: PDCD1-4981
uccugccugcccaggagcaaag

SEQ ID NO: 18351 - RNA, 23 nt, Artificial Sequence
  Synthetic oligonucleotide: PDCD1-4982
guccugccugcccaggagcaaag

SEQ ID NO: 18352 - RNA, 24 nt, Artificial Sequence
  Synthetic oligonucleotide: PDCD1-4983
gguccugccugcccaggagcaaag

SEQ ID NO: 18353 - RNA, 18 nt, Artificial Sequence
  Synthetic oligonucleotide: PDCD1-4984
acagagacagggagacag

SEQ ID NO: 18354 - RNA, 19 nt, Artificial Sequence
  Synthetic oligonucleotide: PDCD1-4985
gacagagacagggagacag

SEQ ID NO: 18355 - RNA, 20 nt, Artificial Sequence
  Synthetic oligonucleotide: PDCD1-2270
agacagagacagggagacag

SEQ ID NO: 18356 - RNA, 21 nt, Artificial Sequence
  Synthetic oligonucleotide: PDCD1-4986
gagacagagacagggagacag

SEQ ID NO: 18357 - RNA, 22 nt, Artificial Sequence
  Synthetic oligonucleotide: PDCD1-4987
agagacagagacagggagacag

SEQ ID NO: 18358 - RNA, 23 nt, Artificial Sequence
  Synthetic oligonucleotide: PDCD1-4988
gagagacagagacagggagacag

SEQ ID NO: 18359 - RNA, 24 nt, Artificial Sequence
  Synthetic oligonucleotide: PDCD1-4989
agagagacagagacagggagacag

SEQ ID NO: 18360 - RNA, 18 nt, Artificial Sequence
  Synthetic oligonucleotide: PDCD1-4990
agaggggacuugggccag

SEQ ID NO: 18361 - RNA, 19 nt, Artificial Sequence
  Synthetic oligonucleotide: PDCD1-4991
aagaggggacuugggccag

SEQ ID NO: 18362 - RNA, 20 nt, Artificial Sequence
  Synthetic oligonucleotide: PDCD1-2103
aaagaggggacuugggccag

SEQ ID NO: 18363 - RNA, 21 nt, Artificial Sequence
  Synthetic oligonucleotide: PDCD1-4992
caaagaggggacuugggccag

SEQ ID NO: 18364 - RNA, 22 nt, Artificial Sequence
  Synthetic oligonucleotide: PDCD1-4993
gcaaagaggggacuugggccag

SEQ ID NO: 18365 - RNA, 23 nt, Artificial Sequence
  Synthetic oligonucleotide: PDCD1-4994
agcaaagaggggacuugggccag

SEQ ID NO: 18366 - RNA, 24 nt, Artificial Sequence
  Synthetic oligonucleotide: PDCD1-4995
gagcaaagaggggacuugggccag

SEQ ID NO: 18367 - RNA, 18 nt, Artificial Sequence
  Synthetic oligonucleotide: PDCD1-4996
gccuucuccacugcucag

SEQ ID NO: 18368 - RNA, 19 nt, Artificial Sequence
  Synthetic oligonucleotide: PDCD1-4997
cgccuucuccacugcucag

SEQ ID NO: 18369 - RNA, 20 nt, Artificial Sequence
  Synthetic oligonucleotide: PDCD1-1019
ccgccuucuccacugcucag

SEQ ID NO: 18370 - RNA, 21 nt, Artificial Sequence
  Synthetic oligonucleotide: PDCD1-4998
gccgccuucuccacugcucag

SEQ ID NO: 18371 - RNA, 22 nt, Artificial Sequence
  Synthetic oligonucleotide: PDCD1-4999
ugccgccuucuccacugcucag

SEQ ID NO: 18372 - RNA, 23 nt, Artificial Sequence
  Synthetic oligonucleotide: PDCD1-5000
gugccgccuucuccacugcucag

SEQ ID NO: 18373 - RNA, 24 nt, Artificial Sequence
  Synthetic oligonucleotide: PDCD1-5001
agugccgccuucuccacugcucag

SEQ ID NO: 18374 - RNA, 18 nt, Artificial Sequence
  Synthetic oligonucleotide: PDCD1-5002
aggaguuggggcccagag

SEQ ID NO: 18375 - RNA, 19 nt, Artificial Sequence
  Synthetic oligonucleotide: PDCD1-5003
gaggaguuggggcccagag

SEQ ID NO: 18376 - RNA, 20 nt, Artificial Sequence
  Synthetic oligonucleotide: PDCD1-2108
ggaggaguuggggcccagag

SEQ ID NO: 18377 - RNA, 21 nt, Artificial Sequence
  Synthetic oligonucleotide: PDCD1-5004
gggaggaguuggggcccagag

SEQ ID NO: 18378 - RNA, 22 nt, Artificial Sequence
  Synthetic oligonucleotide: PDCD1-5005
ggggaggaguuggggcccagag

SEQ ID NO: 18379 - RNA, 23 nt, Artificial Sequence
  Synthetic oligonucleotide: PDCD1-5006
aggggaggaguuggggcccagag

SEQ ID NO: 18380 - RNA, 24 nt, Artificial Sequence
  Synthetic oligonucleotide: PDCD1-5007
caggggaggaguuggggcccagag

SEQ ID NO: 18381 - RNA, 18 nt, Artificial Sequence
  Synthetic oligonucleotide: PDCD1-5008
ucaggguaaggggcagag

SEQ ID NO: 18382 - RNA, 19 nt, Artificial Sequence
  Synthetic oligonucleotide: PDCD1-5009
cucaggguaaggggcagag

SEQ ID NO: 18383 - RNA, 20 nt, Artificial Sequence
  Synthetic oligonucleotide: PDCD1-991
gcucaggguaaggggcagag

SEQ ID NO: 18384 - RNA, 21 nt, Artificial Sequence
  Synthetic oligonucleotide: PDCD1-5010
agcucaggguaaggggcagag

SEQ ID NO: 18385 - RNA, 22 nt, Artificial Sequence
  Synthetic oligonucleotide: PDCD1-5011
cagcucaggguaaggggcagag

SEQ ID NO: 18386 - RNA, 23 nt, Artificial Sequence
  Synthetic oligonucleotide: PDCD1-5012
acagcucaggguaaggggcagag

SEQ ID NO: 18387 - RNA, 24 nt, Artificial Sequence
  Synthetic oligonucleotide: PDCD1-5013
cacagcucaggguaaggggcagag

SEQ ID NO: 18388 - RNA, 18 nt, Artificial Sequence
  Synthetic oligonucleotide: PDCD1-5014
gacagggagacagaggag

SEQ ID NO: 18389 - RNA, 19 nt, Artificial Sequence
  Synthetic oligonucleotide: PDCD1-5015
agacagggagacagaggag

SEQ ID NO: 18390 - RNA, 20 nt, Artificial Sequence
  Synthetic oligonucleotide: PDCD1-1076
gagacagggagacagaggag

SEQ ID NO: 18391 - RNA, 21 nt, Artificial Sequence
  Synthetic oligonucleotide: PDCD1-5016
agagacagggagacagaggag

SEQ ID NO: 18392 - RNA, 22 nt, Artificial Sequence
  Synthetic oligonucleotide: PDCD1-5017
cagagacagggagacagaggag

SEQ ID NO: 18393 - RNA, 23 nt, Artificial Sequence
  Synthetic oligonucleotide: PDCD1-5018
acagagacagggagacagaggag

SEQ ID NO: 18394 - RNA, 24 nt, Artificial Sequence
  Synthetic oligonucleotide: PDCD1-5019
gacagagacagggagacagaggag

SEQ ID NO: 18395 - RNA, 18 nt, Artificial Sequence
  Synthetic oligonucleotide: PDCD1-5020
cuugggccaggggaggag

SEQ ID NO: 18396 - RNA, 19 nt, Artificial Sequence
  Synthetic oligonucleotide: PDCD1-5021
acuugggccaggggaggag

SEQ ID NO: 18397 - RNA, 20 nt, Artificial Sequence
  Synthetic oligonucleotide: PDCD1-978
gacuugggccaggggaggag

SEQ ID NO: 18398 - RNA, 21 nt, Artificial Sequence
  Synthetic oligonucleotide: PDCD1-5022
ggacuugggccaggggaggag

SEQ ID NO: 18399 - RNA, 22 nt, Artificial Sequence
  Synthetic oligonucleotide: PDCD1-5023
gggacuugggccaggggaggag

SEQ ID NO: 18400 - RNA, 23 nt, Artificial Sequence
  Synthetic oligonucleotide: PDCD1-5024
ggggacuugggccaggggaggag

SEQ ID NO: 18401 - RNA, 24 nt, Artificial Sequence
  Synthetic oligonucleotide: PDCD1-5025
aggggacuugggccaggggaggag

SEQ ID NO: 18402 - RNA, 18 nt, Artificial Sequence
  Synthetic oligonucleotide: PDCD1-5026
agaggagauggggaggag

SEQ ID NO: 18403 - RNA, 19 nt, Artificial Sequence
  Synthetic oligonucleotide: PDCD1-5027
cagaggagauggggaggag

SEQ ID NO: 18404 - RNA, 20 nt, Artificial Sequence
  Synthetic oligonucleotide: PDCD1-1082
acagaggagauggggaggag

SEQ ID NO: 18405 - RNA, 21 nt, Artificial Sequence
  Synthetic oligonucleotide: PDCD1-5028
gacagaggagauggggaggag

SEQ ID NO: 18406 - RNA, 22 nt, Artificial Sequence
  Synthetic oligonucleotide: PDCD1-5029
agacagaggagauggggaggag

SEQ ID NO: 18407 - RNA, 23 nt, Artificial Sequence
  Synthetic oligonucleotide: PDCD1-5030
gagacagaggagauggggaggag

SEQ ID NO: 18408 - RNA, 24 nt, Artificial Sequence
  Synthetic oligonucleotide: PDCD1-5031
ggagacagaggagauggggaggag

SEQ ID NO: 18409 - RNA, 18 nt, Artificial Sequence
  Synthetic oligonucleotide: PDCD1-5032
uccacugcucaggcggag

SEQ ID NO: 18410 - RNA, 19 nt, Artificial Sequence
  Synthetic oligonucleotide: PDCD1-5033
cuccacugcucaggcggag

SEQ ID NO: 18411 - RNA, 20 nt, Artificial Sequence
  Synthetic oligonucleotide: PDCD1-1021
ucuccacugcucaggcggag

SEQ ID NO: 18412 - RNA, 21 nt, Artificial Sequence
  Synthetic oligonucleotide: PDCD1-5034
uucuccacugcucaggcggag

SEQ ID NO: 18413 - RNA, 22 nt, Artificial Sequence
  Synthetic oligonucleotide: PDCD1-5035
cuucuccacugcucaggcggag

SEQ ID NO: 18414 - RNA, 23 nt, Artificial Sequence
  Synthetic oligonucleotide: PDCD1-5036
ccuucuccacugcucaggcggag

SEQ ID NO: 18415 - RNA, 24 nt, Artificial Sequence
  Synthetic oligonucleotide: PDCD1-5037
gccuucuccacugcucaggcggag

SEQ ID NO: 18416 - RNA, 18 nt, Artificial Sequence
  Synthetic oligonucleotide: PDCD1-5038
gaggcagugcugggggag

SEQ ID NO: 18417 - RNA, 19 nt, Artificial Sequence
  Synthetic oligonucleotide: PDCD1-5039
agaggcagugcugggggag

SEQ ID NO: 18418 - RNA, 20 nt, Artificial Sequence
  Synthetic oligonucleotide: PDCD1-1043
cagaggcagugcugggggag

SEQ ID NO: 18419 - RNA, 21 nt, Artificial Sequence
  Synthetic oligonucleotide: PDCD1-5040
acagaggcagugcugggggag

SEQ ID NO: 18420 - RNA, 22 nt, Artificial Sequence
  Synthetic oligonucleotide: PDCD1-5041
gacagaggcagugcugggggag

SEQ ID NO: 18421 - RNA, 23 nt, Artificial Sequence
  Synthetic oligonucleotide: PDCD1-5042
ugacagaggcagugcugggggag

SEQ ID NO: 18422 - RNA, 24 nt, Artificial Sequence
  Synthetic oligonucleotide: PDCD1-5043
gugacagaggcagugcugggggag

SEQ ID NO: 18423 - RNA, 18 nt, Artificial Sequence
  Synthetic oligonucleotide: PDCD1-5044
ccccaaggaccggcugag

SEQ ID NO: 18424 - RNA, 19 nt, Artificial Sequence
  Synthetic oligonucleotide: PDCD1-5045
gccccaaggaccggcugag

SEQ ID NO: 18425 - RNA, 20 nt, Artificial Sequence
  Synthetic oligonucleotide: PDCD1-2091
agccccaaggaccggcugag

SEQ ID NO: 18426 - RNA, 21 nt, Artificial Sequence
  Synthetic oligonucleotide: PDCD1-5046
cagccccaaggaccggcugag

SEQ ID NO: 18427 - RNA, 22 nt, Artificial Sequence
  Synthetic oligonucleotide: PDCD1-5047
gcagccccaaggaccggcugag

SEQ ID NO: 18428 - RNA, 23 nt, Artificial Sequence
  Synthetic oligonucleotide: PDCD1-5048
cgcagccccaaggaccggcugag

SEQ ID NO: 18429 - RNA, 24 nt, Artificial Sequence
  Synthetic oligonucleotide: PDCD1-5049
acgcagccccaaggaccggcugag

SEQ ID NO: 18430 - RNA, 18 nt, Artificial Sequence
  Synthetic oligonucleotide: PDCD1-5050
ugcucaggcggaggugag

SEQ ID NO: 18431 - RNA, 19 nt, Artificial Sequence
  Synthetic oligonucleotide: PDCD1-5051
cugcucaggcggaggugag

SEQ ID NO: 18432 - RNA, 20 nt, Artificial Sequence
  Synthetic oligonucleotide: PDCD1-2231
acugcucaggcggaggugag

SEQ ID NO: 18433 - RNA, 21 nt, Artificial Sequence
  Synthetic oligonucleotide: PDCD1-5052
cacugcucaggcggaggugag

SEQ ID NO: 18434 - RNA, 22 nt, Artificial Sequence
  Synthetic oligonucleotide: PDCD1-5053
ccacugcucaggcggaggugag

SEQ ID NO: 18435 - RNA, 23 nt, Artificial Sequence
  Synthetic oligonucleotide: PDCD1-5054
uccacugcucaggcggaggugag

SEQ ID NO: 18436 - RNA, 24 nt, Artificial Sequence
  Synthetic oligonucleotide: PDCD1-5055
cuccacugcucaggcggaggugag

SEQ ID NO: 18437 - RNA, 18 nt, Artificial Sequence
  Synthetic oligonucleotide: PDCD1-5056
ugggggaggaggggugag

SEQ ID NO: 18438 - RNA, 19 nt, Artificial Sequence
  Synthetic oligonucleotide: PDCD1-5057
cugggggaggaggggugag

SEQ ID NO: 18439 - RNA, 20 nt, Artificial Sequence
  Synthetic oligonucleotide: PDCD1-1048
gcugggggaggaggggugag

SEQ ID NO: 18440 - RNA, 21 nt, Artificial Sequence
  Synthetic oligonucleotide: PDCD1-5058
ugcugggggaggaggggugag

SEQ ID NO: 18441 - RNA, 22 nt, Artificial Sequence
  Synthetic oligonucleotide: PDCD1-5059
gugcugggggaggaggggugag

SEQ ID NO: 18442 - RNA, 23 nt, Artificial Sequence
  Synthetic oligonucleotide: PDCD1-5060
agugcugggggaggaggggugag

SEQ ID NO: 18443 - RNA, 24 nt, Artificial Sequence
  Synthetic oligonucleotide: PDCD1-5061
cagugcugggggaggaggggugag

SEQ ID NO: 18444 - RNA, 18 nt, Artificial Sequence
  Synthetic oligonucleotide: PDCD1-5062
cccccacgcccuaccccg

SEQ ID NO: 18445 - RNA, 19 nt, Artificial Sequence
  Synthetic oligonucleotide: PDCD1-5063
gcccccacgcccuaccccg

SEQ ID NO: 18446 - RNA, 20 nt, Artificial Sequence
  Synthetic oligonucleotide: PDCD1-2279
ggcccccacgcccuaccccg

SEQ ID NO: 18447 - RNA, 21 nt, Artificial Sequence
  Synthetic oligonucleotide: PDCD1-5064
uggcccccacgcccuaccccg

SEQ ID NO: 18448 - RNA, 22 nt, Artificial Sequence
  Synthetic oligonucleotide: PDCD1-5065
guggcccccacgcccuaccccg

SEQ ID NO: 18449 - RNA, 23 nt, Artificial Sequence
  Synthetic oligonucleotide: PDCD1-5066
cguggcccccacgcccuaccccg

SEQ ID NO: 18450 - RNA, 24 nt, Artificial Sequence
  Synthetic oligonucleotide: PDCD1-5067
ccguggcccccacgcccuaccccg

SEQ ID NO: 18451 - RNA, 18 nt, Artificial Sequence
  Synthetic oligonucleotide: PDCD1-5068
cagagcugggggccaagg

SEQ ID NO: 18452 - RNA, 19 nt, Artificial Sequence
  Synthetic oligonucleotide: PDCD1-5069
gcagagcugggggccaagg

SEQ ID NO: 18453 - RNA, 20 nt, Artificial Sequence
  Synthetic oligonucleotide: PDCD1-994
ggcagagcugggggccaagg

SEQ ID NO: 18454 - RNA, 21 nt, Artificial Sequence
  Synthetic oligonucleotide: PDCD1-5070
gggcagagcugggggccaagg

SEQ ID NO: 18455 - RNA, 22 nt, Artificial Sequence
  Synthetic oligonucleotide: PDCD1-5071
ggggcagagcugggggccaagg

SEQ ID NO: 18456 - RNA, 23 nt, Artificial Sequence
  Synthetic oligonucleotide: PDCD1-5072
aggggcagagcugggggccaagg

SEQ ID NO: 18457 - RNA, 24 nt, Artificial Sequence
  Synthetic oligonucleotide: PDCD1-5073
aaggggcagagcugggggccaagg

SEQ ID NO: 18458 - RNA, 18 nt, Artificial Sequence
  Synthetic oligonucleotide: PDCD1-5074
ccuucuccacugcucagg

SEQ ID NO: 18459 - RNA, 19 nt, Artificial Sequence
  Synthetic oligonucleotide: PDCD1-5075
gccuucuccacugcucagg

SEQ ID NO: 18460 - RNA, 20 nt, Artificial Sequence
  Synthetic oligonucleotide: PDCD1-2229
cgccuucuccacugcucagg

SEQ ID NO: 18461 - RNA, 21 nt, Artificial Sequence
  Synthetic oligonucleotide: PDCD1-5076
ccgccuucuccacugcucagg

SEQ ID NO: 18462 - RNA, 22 nt, Artificial Sequence
  Synthetic oligonucleotide: PDCD1-5077
gccgccuucuccacugcucagg

SEQ ID NO: 18463 - RNA, 23 nt, Artificial Sequence
  Synthetic oligonucleotide: PDCD1-5078
ugccgccuucuccacugcucagg

SEQ ID NO: 18464 - RNA, 24 nt, Artificial Sequence
  Synthetic oligonucleotide: PDCD1-5079
gugccgccuucuccacugcucagg

SEQ ID NO: 18465 - RNA, 18 nt, Artificial Sequence
  Synthetic oligonucleotide: PDCD1-5080
aaacugucccaggucagg

SEQ ID NO: 18466 - RNA, 19 nt, Artificial Sequence
  Synthetic oligonucleotide: PDCD1-5081
gaaacugucccaggucagg

SEQ ID NO: 18467 - RNA, 20 nt, Artificial Sequence
  Synthetic oligonucleotide: PDCD1-1027
ggaaacugucccaggucagg

SEQ ID NO: 18468 - RNA, 21 nt, Artificial Sequence
  Synthetic oligonucleotide: PDCD1-5082
gggaaacugucccaggucagg

SEQ ID NO: 18469 - RNA, 22 nt, Artificial Sequence
  Synthetic oligonucleotide: PDCD1-5083
agggaaacugucccaggucagg

SEQ ID NO: 18470 - RNA, 23 nt, Artificial Sequence
  Synthetic oligonucleotide: PDCD1-5084
aagggaaacugucccaggucagg

SEQ ID NO: 18471 - RNA, 24 nt, Artificial Sequence
  Synthetic oligonucleotide: PDCD1-5085
gaagggaaacugucccaggucagg

SEQ ID NO: 18472 - RNA, 18 nt, Artificial Sequence
  Synthetic oligonucleotide: PDCD1-5086
gguaggacuggggagagg

SEQ ID NO: 18473 - RNA, 19 nt, Artificial Sequence
  Synthetic oligonucleotide: PDCD1-5087
ggguaggacuggggagagg

SEQ ID NO: 18474 - RNA, 20 nt, Artificial Sequence
  Synthetic oligonucleotide: PDCD1-1058
gggguaggacuggggagagg

SEQ ID NO: 18475 - RNA, 21 nt, Artificial Sequence
  Synthetic oligonucleotide: PDCD1-5088
ggggguaggacuggggagagg

SEQ ID NO: 18476 - RNA, 22 nt, Artificial Sequence
  Synthetic oligonucleotide: PDCD1-5089
aggggguaggacuggggagagg

SEQ ID NO: 18477 - RNA, 23 nt, Artificial Sequence
  Synthetic oligonucleotide: PDCD1-5090
gaggggguaggacuggggagagg

SEQ ID NO: 18478 - RNA, 24 nt, Artificial Sequence
  Synthetic oligonucleotide: PDCD1-5091
ggaggggguaggacuggggagagg

SEQ ID NO: 18479 - RNA, 18 nt, Artificial Sequence
  Synthetic oligonucleotide: PDCD1-5092
gggagagggugggggagg

SEQ ID NO: 18480 - RNA, 19 nt, Artificial Sequence
  Synthetic oligonucleotide: PDCD1-5093
ggggagagggugggggagg

SEQ ID NO: 18481 - RNA, 20 nt, Artificial Sequence
  Synthetic oligonucleotide: PDCD1-1066
uggggagagggugggggagg

SEQ ID NO: 18482 - RNA, 21 nt, Artificial Sequence
  Synthetic oligonucleotide: PDCD1-5094
cuggggagagggugggggagg

SEQ ID NO: 18483 - RNA, 22 nt, Artificial Sequence
  Synthetic oligonucleotide: PDCD1-5095
acuggggagagggugggggagg

SEQ ID NO: 18484 - RNA, 23 nt, Artificial Sequence
  Synthetic oligonucleotide: PDCD1-5096
gacuggggagagggugggggagg

SEQ ID NO: 18485 - RNA, 24 nt, Artificial Sequence
  Synthetic oligonucleotide: PDCD1-5097
ggacuggggagagggugggggagg

SEQ ID NO: 18486 - RNA, 18 nt, Artificial Sequence
  Synthetic oligonucleotide: PDCD1-5098
accugccagggacugagg

SEQ ID NO: 18487 - RNA, 19 nt, Artificial Sequence
  Synthetic oligonucleotide: PDCD1-5099
gaccugccagggacugagg

SEQ ID NO: 18488 - RNA, 20 nt, Artificial Sequence
  Synthetic oligonucleotide: PDCD1-1008
cgaccugccagggacugagg

SEQ ID NO: 18489 - RNA, 21 nt, Artificial Sequence
  Synthetic oligonucleotide: PDCD1-5100
ccgaccugccagggacugagg

SEQ ID NO: 18490 - RNA, 22 nt, Artificial Sequence
  Synthetic oligonucleotide: PDCD1-5101
cccgaccugccagggacugagg

SEQ ID NO: 18491 - RNA, 23 nt, Artificial Sequence
  Synthetic oligonucleotide: PDCD1-5102
ccccgaccugccagggacugagg

SEQ ID NO: 18492 - RNA, 24 nt, Artificial Sequence
  Synthetic oligonucleotide: PDCD1-5103
cccccgaccugccagggacugagg

SEQ ID NO: 18493 - RNA, 18 nt, Artificial Sequence
  Synthetic oligonucleotide: PDCD1-5104
gggggaggaggggugagg

SEQ ID NO: 18494 - RNA, 19 nt, Artificial Sequence
  Synthetic oligonucleotide: PDCD1-5105
ugggggaggaggggugagg

SEQ ID NO: 18495 - RNA, 20 nt, Artificial Sequence
  Synthetic oligonucleotide: PDCD1-2252
cugggggaggaggggugagg

SEQ ID NO: 18496 - RNA, 21 nt, Artificial Sequence
  Synthetic oligonucleotide: PDCD1-5106
gcugggggaggaggggugagg

SEQ ID NO: 18497 - RNA, 22 nt, Artificial Sequence
  Synthetic oligonucleotide: PDCD1-5107
ugcugggggaggaggggugagg

SEQ ID NO: 18498 - RNA, 23 nt, Artificial Sequence
  Synthetic oligonucleotide: PDCD1-5108
gugcugggggaggaggggugagg

SEQ ID NO: 18499 - RNA, 24 nt, Artificial Sequence
  Synthetic oligonucleotide: PDCD1-5109
agugcugggggaggaggggugagg

SEQ ID NO: 18500 - RNA, 18 nt, Artificial Sequence
  Synthetic oligonucleotide: PDCD1-5110
cgcagccccaaggaccgg

SEQ ID NO: 18501 - RNA, 19 nt, Artificial Sequence
  Synthetic oligonucleotide: PDCD1-5111
acgcagccccaaggaccgg

SEQ ID NO: 18502 - RNA, 20 nt, Artificial Sequence
  Synthetic oligonucleotide: PDCD1-959
cacgcagccccaaggaccgg

SEQ ID NO: 18503 - RNA, 18 nt, Artificial Sequence
  Synthetic oligonucleotide: PDCD1-5112
cccuccugaggcugccgg

SEQ ID NO: 18504 - RNA, 19 nt, Artificial Sequence
  Synthetic oligonucleotide: PDCD1-5113
ccccuccugaggcugccgg

SEQ ID NO: 18505 - RNA, 20 nt, Artificial Sequence
  Synthetic oligonucleotide: PDCD1-1090
gccccuccugaggcugccgg

SEQ ID NO: 18506 - RNA, 21 nt, Artificial Sequence
  Synthetic oligonucleotide: PDCD1-5114
ugccccuccugaggcugccgg

SEQ ID NO: 18507 - RNA, 22 nt, Artificial Sequence
  Synthetic oligonucleotide: PDCD1-5115
cugccccuccugaggcugccgg

SEQ ID NO: 18508 - RNA, 23 nt, Artificial Sequence
  Synthetic oligonucleotide: PDCD1-5116
gcugccccuccugaggcugccgg

SEQ ID NO: 18509 - RNA, 24 nt, Artificial Sequence
  Synthetic oligonucleotide: PDCD1-5117
agcugccccuccugaggcugccgg

SEQ ID NO: 18510 - RNA, 18 nt, Artificial Sequence
  Synthetic oligonucleotide: PDCD1-5118
ucaggcggaggugagcgg

SEQ ID NO: 18511 - RNA, 19 nt, Artificial Sequence
  Synthetic oligonucleotide: PDCD1-5119
cucaggcggaggugagcgg

SEQ ID NO: 18512 - RNA, 20 nt, Artificial Sequence
  Synthetic oligonucleotide: PDCD1-1024
gcucaggcggaggugagcgg

SEQ ID NO: 18513 - RNA, 21 nt, Artificial Sequence
  Synthetic oligonucleotide: PDCD1-5120
ugcucaggcggaggugagcgg

SEQ ID NO: 18514 - RNA, 22 nt, Artificial Sequence
  Synthetic oligonucleotide: PDCD1-5121
cugcucaggcggaggugagcgg

SEQ ID NO: 18515 - RNA, 23 nt, Artificial Sequence
  Synthetic oligonucleotide: PDCD1-5122
acugcucaggcggaggugagcgg

SEQ ID NO: 18516 - RNA, 24 nt, Artificial Sequence
  Synthetic oligonucleotide: PDCD1-5123
cacugcucaggcggaggugagcgg

SEQ ID NO: 18517 - RNA, 18 nt, Artificial Sequence
  Synthetic oligonucleotide: PDCD1-5124
aggggacuugggccaggg

SEQ ID NO: 18518 - RNA, 19 nt, Artificial Sequence
  Synthetic oligonucleotide: PDCD1-5125
gaggggacuugggccaggg

SEQ ID NO: 18519 - RNA, 20 nt, Artificial Sequence
  Synthetic oligonucleotide: PDCD1-976
agaggggacuugggccaggg

SEQ ID NO: 18520 - RNA, 21 nt, Artificial Sequence
  Synthetic oligonucleotide: PDCD1-5126
aagaggggacuugggccaggg

SEQ ID NO: 18521 - RNA, 22 nt, Artificial Sequence
  Synthetic oligonucleotide: PDCD1-5127
aaagaggggacuugggccaggg

SEQ ID NO: 18522 - RNA, 23 nt, Artificial Sequence
  Synthetic oligonucleotide: PDCD1-5128
caaagaggggacuugggccaggg

SEQ ID NO: 18523 - RNA, 24 nt, Artificial Sequence
  Synthetic oligonucleotide: PDCD1-5129
gcaaagaggggacuugggccaggg

SEQ ID NO: 18524 - RNA, 18 nt, Artificial Sequence
  Synthetic oligonucleotide: PDCD1-5130
guaggacuggggagaggg

SEQ ID NO: 18525 - RNA, 19 nt, Artificial Sequence
  Synthetic oligonucleotide: PDCD1-5131
gguaggacuggggagaggg

SEQ ID NO: 18526 - RNA, 20 nt, Artificial Sequence
  Synthetic oligonucleotide: PDCD1-2262
ggguaggacuggggagaggg

SEQ ID NO: 18527 - RNA, 21 nt, Artificial Sequence
  Synthetic oligonucleotide: PDCD1-5132
gggguaggacuggggagaggg

SEQ ID NO: 18528 - RNA, 22 nt, Artificial Sequence
  Synthetic oligonucleotide: PDCD1-5133
ggggguaggacuggggagaggg

SEQ ID NO: 18529 - RNA, 23 nt, Artificial Sequence
  Synthetic oligonucleotide: PDCD1-5134
aggggguaggacuggggagaggg

SEQ ID NO: 18530 - RNA, 24 nt, Artificial Sequence
  Synthetic oligonucleotide: PDCD1-5135
gaggggguaggacuggggagaggg

SEQ ID NO: 18531 - RNA, 18 nt, Artificial Sequence
  Synthetic oligonucleotide: PDCD1-5136
agugcugggggaggaggg

SEQ ID NO: 18532 - RNA, 19 nt, Artificial Sequence
  Synthetic oligonucleotide: PDCD1-5137
cagugcugggggaggaggg

SEQ ID NO: 18533 - RNA, 20 nt, Artificial Sequence
  Synthetic oligonucleotide: PDCD1-1045
gcagugcugggggaggaggg

SEQ ID NO: 18534 - RNA, 21 nt, Artificial Sequence
  Synthetic oligonucleotide: PDCD1-5138
ggcagugcugggggaggaggg

SEQ ID NO: 18535 - RNA, 22 nt, Artificial Sequence
  Synthetic oligonucleotide: PDCD1-5139
aggcagugcugggggaggaggg

SEQ ID NO: 18536 - RNA, 23 nt, Artificial Sequence
  Synthetic oligonucleotide: PDCD1-5140
gaggcagugcugggggaggaggg

SEQ ID NO: 18537 - RNA, 24 nt, Artificial Sequence
  Synthetic oligonucleotide: PDCD1-5141
agaggcagugcugggggaggaggg

SEQ ID NO: 18538 - RNA, 18 nt, Artificial Sequence
  Synthetic oligonucleotide: PDCD1-5142
ccugccagggacugaggg

SEQ ID NO: 18539 - RNA, 19 nt, Artificial Sequence
  Synthetic oligonucleotide: PDCD1-5143
accugccagggacugaggg

SEQ ID NO: 18540 - RNA, 20 nt, Artificial Sequence
  Synthetic oligonucleotide: PDCD1-2136
gaccugccagggacugaggg

SEQ ID NO: 18541 - RNA, 21 nt, Artificial Sequence
  Synthetic oligonucleotide: PDCD1-5144
cgaccugccagggacugaggg

SEQ ID NO: 18542 - RNA, 22 nt, Artificial Sequence
  Synthetic oligonucleotide: PDCD1-5145
ccgaccugccagggacugaggg

SEQ ID NO: 18543 - RNA, 23 nt, Artificial Sequence
  Synthetic oligonucleotide: PDCD1-5146
cccgaccugccagggacugaggg

SEQ ID NO: 18544 - RNA, 24 nt, Artificial Sequence
  Synthetic oligonucleotide: PDCD1-5147
ccccgaccugccagggacugaggg

SEQ ID NO: 18545 - RNA, 18 nt, Artificial Sequence
  Synthetic oligonucleotide: PDCD1-5148
ccugggcugcagugaggg

SEQ ID NO: 18546 - RNA, 19 nt, Artificial Sequence
  Synthetic oligonucleotide: PDCD1-5149
uccugggcugcagugaggg

SEQ ID NO: 18547 - RNA, 20 nt, Artificial Sequence
  Synthetic oligonucleotide: PDCD1-5150
uuccugggcugcagugaggg

SEQ ID NO: 18548 - RNA, 21 nt, Artificial Sequence
  Synthetic oligonucleotide: PDCD1-5151
guuccugggcugcagugaggg

SEQ ID NO: 18549 - RNA, 22 nt, Artificial Sequence
  Synthetic oligonucleotide: PDCD1-5152
gguuccugggcugcagugaggg

SEQ ID NO: 18550 - RNA, 23 nt, Artificial Sequence
  Synthetic oligonucleotide: PDCD1-5153
agguuccugggcugcagugaggg

SEQ ID NO: 18551 - RNA, 24 nt, Artificial Sequence
  Synthetic oligonucleotide: PDCD1-5154
cagguuccugggcugcagugaggg

SEQ ID NO: 18552 - RNA, 18 nt, Artificial Sequence
  Synthetic oligonucleotide: PDCD1-5155
ccuccugaggcugccggg

SEQ ID NO: 18553 - RNA, 19 nt, Artificial Sequence
  Synthetic oligonucleotide: PDCD1-5156
cccuccugaggcugccggg

SEQ ID NO: 18554 - RNA, 20 nt, Artificial Sequence
  Synthetic oligonucleotide: PDCD1-2289
ccccuccugaggcugccggg

SEQ ID NO: 18555 - RNA, 21 nt, Artificial Sequence
  Synthetic oligonucleotide: PDCD1-5157
gccccuccugaggcugccggg

SEQ ID NO: 18556 - RNA, 22 nt, Artificial Sequence
  Synthetic oligonucleotide: PDCD1-5158
ugccccuccugaggcugccggg

SEQ ID NO: 18557 - RNA, 23 nt, Artificial Sequence
  Synthetic oligonucleotide: PDCD1-5159
cugccccuccugaggcugccggg

SEQ ID NO: 18558 - RNA, 24 nt, Artificial Sequence
  Synthetic oligonucleotide: PDCD1-5160
gcugccccuccugaggcugccggg

SEQ ID NO: 18559 - RNA, 18 nt, Artificial Sequence
  Synthetic oligonucleotide: PDCD1-5161
acagcucaggguaagggg

SEQ ID NO: 18560 - RNA, 19 nt, Artificial Sequence
  Synthetic oligonucleotide: PDCD1-5162
cacagcucaggguaagggg

SEQ ID NO: 18561 - RNA, 20 nt, Artificial Sequence
  Synthetic oligonucleotide: PDCD1-990
acacagcucaggguaagggg

SEQ ID NO: 18562 - RNA, 21 nt, Artificial Sequence
  Synthetic oligonucleotide: PDCD1-5163
cacacagcucaggguaagggg

SEQ ID NO: 18563 - RNA, 22 nt, Artificial Sequence
  Synthetic oligonucleotide: PDCD1-5164
ccacacagcucaggguaagggg

SEQ ID NO: 18564 - RNA, 23 nt, Artificial Sequence
  Synthetic oligonucleotide: PDCD1-5165
gccacacagcucaggguaagggg

SEQ ID NO: 18565 - RNA, 24 nt, Artificial Sequence
  Synthetic oligonucleotide: PDCD1-5166
agccacacagcucaggguaagggg

SEQ ID NO: 18566 - RNA, 18 nt, Artificial Sequence
  Synthetic oligonucleotide: PDCD1-5167
ggaggggugaggaggggg

SEQ ID NO: 18567 - RNA, 19 nt, Artificial Sequence
  Synthetic oligonucleotide: PDCD1-5168
aggaggggugaggaggggg

SEQ ID NO: 18568 - RNA, 20 nt, Artificial Sequence
  Synthetic oligonucleotide: PDCD1-1051
gaggaggggugaggaggggg

SEQ ID NO: 18569 - RNA, 21 nt, Artificial Sequence
  Synthetic oligonucleotide: PDCD1-5169
ggaggaggggugaggaggggg

SEQ ID NO: 18570 - RNA, 22 nt, Artificial Sequence
  Synthetic oligonucleotide: PDCD1-5170
gggaggaggggugaggaggggg

SEQ ID NO: 18571 - RNA, 23 nt, Artificial Sequence
  Synthetic oligonucleotide: PDCD1-5171
ggggaggaggggugaggaggggg

SEQ ID NO: 18572 - RNA, 24 nt, Artificial Sequence
  Synthetic oligonucleotide: PDCD1-5172
gggggaggaggggugaggaggggg

SEQ ID NO: 18573 - RNA, 18 nt, Artificial Sequence
  Synthetic oligonucleotide: PDCD1-5173
cccccaucucccuggggg

SEQ ID NO: 18574 - RNA, 19 nt, Artificial Sequence
  Synthetic oligonucleotide: PDCD1-5174
ccccccaucucccuggggg

SEQ ID NO: 18575 - RNA, 20 nt, Artificial Sequence
  Synthetic oligonucleotide: PDCD1-1096
cccccccaucucccuggggg

SEQ ID NO: 18576 - RNA, 21 nt, Artificial Sequence
  Synthetic oligonucleotide: PDCD1-5175
ucccccccaucucccuggggg

SEQ ID NO: 18577 - RNA, 22 nt, Artificial Sequence
  Synthetic oligonucleotide: PDCD1-5176
aucccccccaucucccuggggg

SEQ ID NO: 18578 - RNA, 23 nt, Artificial Sequence
  Synthetic oligonucleotide: PDCD1-5177
caucccccccaucucccuggggg

SEQ ID NO: 18579 - RNA, 24 nt, Artificial Sequence
  Synthetic oligonucleotide: PDCD1-5178
ccaucccccccaucucccuggggg

SEQ ID NO: 18580 - RNA, 18 nt, Artificial Sequence
  Synthetic oligonucleotide: PDCD1-5179
cagaggcagugcuggggg

SEQ ID NO: 18581 - RNA, 19 nt, Artificial Sequence
  Synthetic oligonucleotide: PDCD1-5180
acagaggcagugcuggggg

SEQ ID NO: 18582 - RNA, 20 nt, Artificial Sequence
  Synthetic oligonucleotide: PDCD1-2247
gacagaggcagugcuggggg

SEQ ID NO: 18583 - RNA, 21 nt, Artificial Sequence
  Synthetic oligonucleotide: PDCD1-5181
ugacagaggcagugcuggggg

SEQ ID NO: 18584 - RNA, 22 nt, Artificial Sequence
  Synthetic oligonucleotide: PDCD1-5182
gugacagaggcagugcuggggg

SEQ ID NO: 18585 - RNA, 23 nt, Artificial Sequence
  Synthetic oligonucleotide: PDCD1-5183
agugacagaggcagugcuggggg

SEQ ID NO: 18586 - RNA, 24 nt, Artificial Sequence
  Synthetic oligonucleotide: PDCD1-5184
gagugacagaggcagugcuggggg

SEQ ID NO: 18587 - RNA, 18 nt, Artificial Sequence
  Synthetic oligonucleotide: PDCD1-5185
cuggggagaggguggggg

SEQ ID NO: 18588 - RNA, 19 nt, Artificial Sequence
  Synthetic oligonucleotide: PDCD1-5186
acuggggagaggguggggg

SEQ ID NO: 18589 - RNA, 20 nt, Artificial Sequence
  Synthetic oligonucleotide: PDCD1-2266
gacuggggagaggguggggg

SEQ ID NO: 18590 - RNA, 21 nt, Artificial Sequence
  Synthetic oligonucleotide: PDCD1-5187
ggacuggggagaggguggggg

SEQ ID NO: 18591 - RNA, 22 nt, Artificial Sequence
  Synthetic oligonucleotide: PDCD1-5188
aggacuggggagaggguggggg

SEQ ID NO: 18592 - RNA, 23 nt, Artificial Sequence
  Synthetic oligonucleotide: PDCD1-5189
uaggacuggggagaggguggggg

SEQ ID NO: 18593 - RNA, 24 nt, Artificial Sequence
  Synthetic oligonucleotide: PDCD1-5190
guaggacuggggagaggguggggg

SEQ ID NO: 18594 - RNA, 18 nt, Artificial Sequence
  Synthetic oligonucleotide: PDCD1-5191
gagacagaggagaugggg

SEQ ID NO: 18595 - RNA, 19 nt, Artificial Sequence
  Synthetic oligonucleotide: PDCD1-5192
ggagacagaggagaugggg

SEQ ID NO: 18596 - RNA, 20 nt, Artificial Sequence
  Synthetic oligonucleotide: PDCD1-2274
gggagacagaggagaugggg

SEQ ID NO: 18597 - RNA, 21 nt, Artificial Sequence
  Synthetic oligonucleotide: PDCD1-5193
agggagacagaggagaugggg

SEQ ID NO: 18598 - RNA, 22 nt, Artificial Sequence
  Synthetic oligonucleotide: PDCD1-5194
cagggagacagaggagaugggg

SEQ ID NO: 18599 - RNA, 23 nt, Artificial Sequence
  Synthetic oligonucleotide: PDCD1-5195
acagggagacagaggagaugggg

SEQ ID NO: 18600 - RNA, 24 nt, Artificial Sequence
  Synthetic oligonucleotide: PDCD1-5196
gacagggagacagaggagaugggg

SEQ ID NO: 18601 - RNA, 18 nt, Artificial Sequence
  Synthetic oligonucleotide: PDCD1-5197
acagaggcagugcugggg

SEQ ID NO: 18602 - RNA, 19 nt, Artificial Sequence
  Synthetic oligonucleotide: PDCD1-5198
gacagaggcagugcugggg

SEQ ID NO: 18603 - RNA, 20 nt, Artificial Sequence
  Synthetic oligonucleotide: PDCD1-1041
ugacagaggcagugcugggg

SEQ ID NO: 18604 - RNA, 21 nt, Artificial Sequence
  Synthetic oligonucleotide: PDCD1-5199
gugacagaggcagugcugggg

SEQ ID NO: 18605 - RNA, 22 nt, Artificial Sequence
  Synthetic oligonucleotide: PDCD1-5200
agugacagaggcagugcugggg

SEQ ID NO: 18606 - RNA, 23 nt, Artificial Sequence
  Synthetic oligonucleotide: PDCD1-5201
gagugacagaggcagugcugggg

SEQ ID NO: 18607 - RNA, 24 nt, Artificial Sequence
  Synthetic oligonucleotide: PDCD1-5202
agagugacagaggcagugcugggg

SEQ ID NO: 18608 - RNA, 18 nt, Artificial Sequence
  Synthetic oligonucleotide: PDCD1-5203
acuggggagagggugggg

SEQ ID NO: 18609 - RNA, 19 nt, Artificial Sequence
  Synthetic oligonucleotide: PDCD1-5204
gacuggggagagggugggg

SEQ ID NO: 18610 - RNA, 20 nt, Artificial Sequence
  Synthetic oligonucleotide: PDCD1-1063
ggacuggggagagggugggg

SEQ ID NO: 18611 - RNA, 21 nt, Artificial Sequence
  Synthetic oligonucleotide: PDCD1-5205
aggacuggggagagggugggg

SEQ ID NO: 18612 - RNA, 22 nt, Artificial Sequence
  Synthetic oligonucleotide: PDCD1-5206
uaggacuggggagagggugggg

SEQ ID NO: 18613 - RNA, 23 nt, Artificial Sequence
  Synthetic oligonucleotide: PDCD1-5207
guaggacuggggagagggugggg

SEQ ID NO: 18614 - RNA, 24 nt, Artificial Sequence
  Synthetic oligonucleotide: PDCD1-5208
gguaggacuggggagagggugggg

SEQ ID NO: 18615 - RNA, 18 nt, Artificial Sequence
  Synthetic oligonucleotide: PDCD1-5209
ggagacagaggagauggg

SEQ ID NO: 18616 - RNA, 19 nt, Artificial Sequence
  Synthetic oligonucleotide: PDCD1-5210
gggagacagaggagauggg

SEQ ID NO: 18617 - RNA, 20 nt, Artificial Sequence
  Synthetic oligonucleotide: PDCD1-1080
agggagacagaggagauggg

SEQ ID NO: 18618 - RNA, 21 nt, Artificial Sequence
  Synthetic oligonucleotide: PDCD1-5211
cagggagacagaggagauggg

SEQ ID NO: 18619 - RNA, 22 nt, Artificial Sequence
  Synthetic oligonucleotide: PDCD1-5212
acagggagacagaggagauggg

SEQ ID NO: 18620 - RNA, 23 nt, Artificial Sequence
  Synthetic oligonucleotide: PDCD1-5213
gacagggagacagaggagauggg

SEQ ID NO: 18621 - RNA, 24 nt, Artificial Sequence
  Synthetic oligonucleotide: PDCD1-5214
agacagggagacagaggagauggg

SEQ ID NO: 18622 - RNA, 18 nt, Artificial Sequence
  Synthetic oligonucleotide: PDCD1-5215
ggaggggguaggacuggg

SEQ ID NO: 18623 - RNA, 19 nt, Artificial Sequence
  Synthetic oligonucleotide: PDCD1-5216
aggaggggguaggacuggg

SEQ ID NO: 18624 - RNA, 20 nt, Artificial Sequence
  Synthetic oligonucleotide: PDCD1-1056
gaggaggggguaggacuggg

SEQ ID NO: 18625 - RNA, 21 nt, Artificial Sequence
  Synthetic oligonucleotide: PDCD1-5217
ugaggaggggguaggacuggg

SEQ ID NO: 18626 - RNA, 22 nt, Artificial Sequence
  Synthetic oligonucleotide: PDCD1-5218
gugaggaggggguaggacuggg

SEQ ID NO: 18627 - RNA, 23 nt, Artificial Sequence
  Synthetic oligonucleotide: PDCD1-5219
ggugaggaggggguaggacuggg

SEQ ID NO: 18628 - RNA, 24 nt, Artificial Sequence
  Synthetic oligonucleotide: PDCD1-5220
gggugaggaggggguaggacuggg

SEQ ID NO: 18629 - RNA, 18 nt, Artificial Sequence
  Synthetic oligonucleotide: PDCD1-5221
ugacagaggcagugcugg

SEQ ID NO: 18630 - RNA, 19 nt, Artificial Sequence
  Synthetic oligonucleotide: PDCD1-5222
gugacagaggcagugcugg

SEQ ID NO: 18631 - RNA, 20 nt, Artificial Sequence
  Synthetic oligonucleotide: PDCD1-2246
agugacagaggcagugcugg

SEQ ID NO: 18632 - RNA, 21 nt, Artificial Sequence
  Synthetic oligonucleotide: PDCD1-5223
gagugacagaggcagugcugg

SEQ ID NO: 18633 - RNA, 22 nt, Artificial Sequence
  Synthetic oligonucleotide: PDCD1-5224
agagugacagaggcagugcugg

SEQ ID NO: 18634 - RNA, 23 nt, Artificial Sequence
  Synthetic oligonucleotide: PDCD1-5225
gagagugacagaggcagugcugg

SEQ ID NO: 18635 - RNA, 24 nt, Artificial Sequence
  Synthetic oligonucleotide: PDCD1-5226
cgagagugacagaggcagugcugg

SEQ ID NO: 18636 - RNA, 18 nt, Artificial Sequence
  Synthetic oligonucleotide: PDCD1-5227
uccuccacauccacgugg

SEQ ID NO: 18637 - RNA, 19 nt, Artificial Sequence
  Synthetic oligonucleotide: PDCD1-5228
uuccuccacauccacgugg

SEQ ID NO: 18638 - RNA, 20 nt, Artificial Sequence
  Synthetic oligonucleotide: PDCD1-1033
cuuccuccacauccacgugg

SEQ ID NO: 18639 - RNA, 21 nt, Artificial Sequence
  Synthetic oligonucleotide: PDCD1-5229
ucuuccuccacauccacgugg

SEQ ID NO: 18640 - RNA, 22 nt, Artificial Sequence
  Synthetic oligonucleotide: PDCD1-5230
cucuuccuccacauccacgugg

SEQ ID NO: 18641 - RNA, 23 nt, Artificial Sequence
  Synthetic oligonucleotide: PDCD1-5231
ccucuuccuccacauccacgugg

SEQ ID NO: 18642 - RNA, 24 nt, Artificial Sequence
  Synthetic oligonucleotide: PDCD1-5232
cccucuuccuccacauccacgugg

SEQ ID NO: 18643 - RNA, 18 nt, Artificial Sequence
  Synthetic oligonucleotide: PDCD1-5233
ggacuggggagagggugg

SEQ ID NO: 18644 - RNA, 19 nt, Artificial Sequence
  Synthetic oligonucleotide: PDCD1-5234
aggacuggggagagggugg

SEQ ID NO: 18645 - RNA, 20 nt, Artificial Sequence
  Synthetic oligonucleotide: PDCD1-2265
uaggacuggggagagggugg

SEQ ID NO: 18646 - RNA, 21 nt, Artificial Sequence
  Synthetic oligonucleotide: PDCD1-5235
guaggacuggggagagggugg

SEQ ID NO: 18647 - RNA, 22 nt, Artificial Sequence
  Synthetic oligonucleotide: PDCD1-5236
gguaggacuggggagagggugg

SEQ ID NO: 18648 - RNA, 23 nt, Artificial Sequence
  Synthetic oligonucleotide: PDCD1-5237
ggguaggacuggggagagggugg

SEQ ID NO: 18649 - RNA, 24 nt, Artificial Sequence
  Synthetic oligonucleotide: PDCD1-5238
gggguaggacuggggagagggugg

SEQ ID NO: 18650 - RNA, 18 nt, Artificial Sequence
  Synthetic oligonucleotide: PDCD1-5239
agggagacagaggagaug

SEQ ID NO: 18651 - RNA, 19 nt, Artificial Sequence
  Synthetic oligonucleotide: PDCD1-5240
cagggagacagaggagaug

SEQ ID NO: 18652 - RNA, 20 nt, Artificial Sequence
  Synthetic oligonucleotide: PDCD1-2273
acagggagacagaggagaug

SEQ ID NO: 18653 - RNA, 21 nt, Artificial Sequence
  Synthetic oligonucleotide: PDCD1-5241
gacagggagacagaggagaug

SEQ ID NO: 18654 - RNA, 22 nt, Artificial Sequence
  Synthetic oligonucleotide: PDCD1-5242
agacagggagacagaggagaug

SEQ ID NO: 18655 - RNA, 23 nt, Artificial Sequence
  Synthetic oligonucleotide: PDCD1-5243
gagacagggagacagaggagaug

SEQ ID NO: 18656 - RNA, 24 nt, Artificial Sequence
  Synthetic oligonucleotide: PDCD1-5244
agagacagggagacagaggagaug

SEQ ID NO: 18657 - RNA, 18 nt, Artificial Sequence
  Synthetic oligonucleotide: PDCD1-5245
gaggaggggguaggacug

SEQ ID NO: 18658 - RNA, 19 nt, Artificial Sequence
  Synthetic oligonucleotide: PDCD1-5246
ugaggaggggguaggacug

SEQ ID NO: 18659 - RNA, 20 nt, Artificial Sequence
  Synthetic oligonucleotide: PDCD1-2259
gugaggaggggguaggacug

SEQ ID NO: 18660 - RNA, 21 nt, Artificial Sequence
  Synthetic oligonucleotide: PDCD1-5247
ggugaggaggggguaggacug

SEQ ID NO: 18661 - RNA, 22 nt, Artificial Sequence
  Synthetic oligonucleotide: PDCD1-5248
gggugaggaggggguaggacug

SEQ ID NO: 18662 - RNA, 23 nt, Artificial Sequence
  Synthetic oligonucleotide: PDCD1-5249
ggggugaggaggggguaggacug

SEQ ID NO: 18663 - RNA, 24 nt, Artificial Sequence
  Synthetic oligonucleotide: PDCD1-5250
aggggugaggaggggguaggacug

SEQ ID NO: 18664 - RNA, 18 nt, Artificial Sequence
  Synthetic oligonucleotide: PDCD1-5251
gccgggccucccugccug

SEQ ID NO: 18665 - RNA, 19 nt, Artificial Sequence
  Synthetic oligonucleotide: PDCD1-5252
ggccgggccucccugccug

SEQ ID NO: 18666 - RNA, 20 nt, Artificial Sequence
  Synthetic oligonucleotide: PDCD1-2302
gggccgggccucccugccug

SEQ ID NO: 18667 - RNA, 21 nt, Artificial Sequence
  Synthetic oligonucleotide: PDCD1-5253
ggggccgggccucccugccug

SEQ ID NO: 18668 - RNA, 22 nt, Artificial Sequence
  Synthetic oligonucleotide: PDCD1-5254
gggggccgggccucccugccug

SEQ ID NO: 18669 - RNA, 23 nt, Artificial Sequence
  Synthetic oligonucleotide: PDCD1-5255
ugggggccgggccucccugccug

SEQ ID NO: 18670 - RNA, 24 nt, Artificial Sequence
  Synthetic oligonucleotide: PDCD1-5256
cugggggccgggccucccugccug

SEQ ID NO: 18671 - RNA, 18 nt, Artificial Sequence
  Synthetic oligonucleotide: PDCD1-5257
gugacagaggcagugcug

SEQ ID NO: 18672 - RNA, 19 nt, Artificial Sequence
  Synthetic oligonucleotide: PDCD1-5258
agugacagaggcagugcug

SEQ ID NO: 18673 - RNA, 20 nt, Artificial Sequence
  Synthetic oligonucleotide: PDCD1-2245
gagugacagaggcagugcug

SEQ ID NO: 18674 - RNA, 21 nt, Artificial Sequence
  Synthetic oligonucleotide: PDCD1-5259
agagugacagaggcagugcug

SEQ ID NO: 18675 - RNA, 22 nt, Artificial Sequence
  Synthetic oligonucleotide: PDCD1-5260
gagagugacagaggcagugcug

SEQ ID NO: 18676 - RNA, 23 nt, Artificial Sequence
  Synthetic oligonucleotide: PDCD1-5261
cgagagugacagaggcagugcug

SEQ ID NO: 18677 - RNA, 24 nt, Artificial Sequence
  Synthetic oligonucleotide: PDCD1-5262
gcgagagugacagaggcagugcug

SEQ ID NO: 18678 - RNA, 18 nt, Artificial Sequence
  Synthetic oligonucleotide: PDCD1-5263
aaccccacucccauucug

SEQ ID NO: 18679 - RNA, 19 nt, Artificial Sequence
  Synthetic oligonucleotide: PDCD1-5264
caaccccacucccauucug

SEQ ID NO: 18680 - RNA, 20 nt, Artificial Sequence
  Synthetic oligonucleotide: PDCD1-1715
ucaaccccacucccauucug

SEQ ID NO: 18681 - RNA, 21 nt, Artificial Sequence
  Synthetic oligonucleotide: PDCD1-5265
cucaaccccacucccauucug

SEQ ID NO: 18682 - RNA, 22 nt, Artificial Sequence
  Synthetic oligonucleotide: PDCD1-5266
gcucaaccccacucccauucug

SEQ ID NO: 18683 - RNA, 23 nt, Artificial Sequence
  Synthetic oligonucleotide: PDCD1-5267
ggcucaaccccacucccauucug

SEQ ID NO: 18684 - RNA, 24 nt, Artificial Sequence
  Synthetic oligonucleotide: PDCD1-5268
gggcucaaccccacucccauucug

SEQ ID NO: 18685 - RNA, 18 nt, Artificial Sequence
  Synthetic oligonucleotide: PDCD1-5269
agagugacagaggcagug

SEQ ID NO: 18686 - RNA, 19 nt, Artificial Sequence
  Synthetic oligonucleotide: PDCD1-5270
gagagugacagaggcagug

SEQ ID NO: 18687 - RNA, 20 nt, Artificial Sequence
  Synthetic oligonucleotide: PDCD1-1036
cgagagugacagaggcagug

SEQ ID NO: 18688 - RNA, 21 nt, Artificial Sequence
  Synthetic oligonucleotide: PDCD1-5271
gcgagagugacagaggcagug

SEQ ID NO: 18689 - RNA, 22 nt, Artificial Sequence
  Synthetic oligonucleotide: PDCD1-5272
ggcgagagugacagaggcagug

SEQ ID NO: 18690 - RNA, 23 nt, Artificial Sequence
  Synthetic oligonucleotide: PDCD1-5273
gggcgagagugacagaggcagug

SEQ ID NO: 18691 - RNA, 24 nt, Artificial Sequence
  Synthetic oligonucleotide: PDCD1-5274
ugggcgagagugacagaggcagug

SEQ ID NO: 18692 - RNA, 18 nt, Artificial Sequence
  Synthetic oligonucleotide: PDCD1-5275
aggacuggggagagggug

SEQ ID NO: 18693 - RNA, 19 nt, Artificial Sequence
  Synthetic oligonucleotide: PDCD1-5276
uaggacuggggagagggug

SEQ ID NO: 18694 - RNA, 20 nt, Artificial Sequence
  Synthetic oligonucleotide: PDCD1-2264
guaggacuggggagagggug

SEQ ID NO: 18695 - RNA, 21 nt, Artificial Sequence
  Synthetic oligonucleotide: PDCD1-5277
gguaggacuggggagagggug

SEQ ID NO: 18696 - RNA, 22 nt, Artificial Sequence
  Synthetic oligonucleotide: PDCD1-5278
ggguaggacuggggagagggug

SEQ ID NO: 18697 - RNA, 23 nt, Artificial Sequence
  Synthetic oligonucleotide: PDCD1-5279
gggguaggacuggggagagggug

SEQ ID NO: 18698 - RNA, 24 nt, Artificial Sequence
  Synthetic oligonucleotide: PDCD1-5280
ggggguaggacuggggagagggug

SEQ ID NO: 18699 - RNA, 18 nt, Artificial Sequence
  Synthetic oligonucleotide: PDCD1-5281
gcugggggaggaggggug

SEQ ID NO: 18700 - RNA, 19 nt, Artificial Sequence
  Synthetic oligonucleotide: PDCD1-5282
ugcugggggaggaggggug

SEQ ID NO: 18701 - RNA, 20 nt, Artificial Sequence
  Synthetic oligonucleotide: PDCD1-2251
gugcugggggaggaggggug

SEQ ID NO: 18702 - RNA, 21 nt, Artificial Sequence
  Synthetic oligonucleotide: PDCD1-5283
agugcugggggaggaggggug

SEQ ID NO: 18703 - RNA, 22 nt, Artificial Sequence
  Synthetic oligonucleotide: PDCD1-5284
cagugcugggggaggaggggug

SEQ ID NO: 18704 - RNA, 23 nt, Artificial Sequence
  Synthetic oligonucleotide: PDCD1-5285
gcagugcugggggaggaggggug

SEQ ID NO: 18705 - RNA, 24 nt, Artificial Sequence
  Synthetic oligonucleotide: PDCD1-5286
ggcagugcugggggaggaggggug

SEQ ID NO: 18706 - RNA, 18 nt, Artificial Sequence
  Synthetic oligonucleotide: PDCD1-5287
cugucccaggucagguug

SEQ ID NO: 18707 - RNA, 19 nt, Artificial Sequence
  Synthetic oligonucleotide: PDCD1-5288
acugucccaggucagguug

SEQ ID NO: 18708 - RNA, 20 nt, Artificial Sequence
  Synthetic oligonucleotide: PDCD1-1028
aacugucccaggucagguug

SEQ ID NO: 18709 - RNA, 21 nt, Artificial Sequence
  Synthetic oligonucleotide: PDCD1-5289
aaacugucccaggucagguug

SEQ ID NO: 18710 - RNA, 22 nt, Artificial Sequence
  Synthetic oligonucleotide: PDCD1-5290
gaaacugucccaggucagguug

SEQ ID NO: 18711 - RNA, 23 nt, Artificial Sequence
  Synthetic oligonucleotide: PDCD1-5291
ggaaacugucccaggucagguug

SEQ ID NO: 18712 - RNA, 24 nt, Artificial Sequence
  Synthetic oligonucleotide: PDCD1-5292
gggaaacugucccaggucagguug

SEQ ID NO: 18713 - RNA, 18 nt, Artificial Sequence
  Synthetic oligonucleotide: PDCD1-5293
cagggagacagaggagau

SEQ ID NO: 18714 - RNA, 19 nt, Artificial Sequence
  Synthetic oligonucleotide: PDCD1-5294
acagggagacagaggagau

SEQ ID NO: 18715 - RNA, 20 nt, Artificial Sequence
  Synthetic oligonucleotide: PDCD1-2272
gacagggagacagaggagau

SEQ ID NO: 18716 - RNA, 21 nt, Artificial Sequence
  Synthetic oligonucleotide: PDCD1-5295
agacagggagacagaggagau

SEQ ID NO: 18717 - RNA, 22 nt, Artificial Sequence
  Synthetic oligonucleotide: PDCD1-5296
gagacagggagacagaggagau

SEQ ID NO: 18718 - RNA, 23 nt, Artificial Sequence
  Synthetic oligonucleotide: PDCD1-5297
agagacagggagacagaggagau

SEQ ID NO: 18719 - RNA, 24 nt, Artificial Sequence
  Synthetic oligonucleotide: PDCD1-5298
cagagacagggagacagaggagau

SEQ ID NO: 18720 - RNA, 18 nt, Artificial Sequence
  Synthetic oligonucleotide: PDCD1-5299
ugaggaggggguaggacu

SEQ ID NO: 18721 - RNA, 19 nt, Artificial Sequence
  Synthetic oligonucleotide: PDCD1-5300
gugaggaggggguaggacu

SEQ ID NO: 18722 - RNA, 20 nt, Artificial Sequence
  Synthetic oligonucleotide: PDCD1-2258
ggugaggaggggguaggacu

SEQ ID NO: 18723 - RNA, 21 nt, Artificial Sequence
  Synthetic oligonucleotide: PDCD1-5301
gggugaggaggggguaggacu

SEQ ID NO: 18724 - RNA, 22 nt, Artificial Sequence
  Synthetic oligonucleotide: PDCD1-5302
ggggugaggaggggguaggacu

SEQ ID NO: 18725 - RNA, 23 nt, Artificial Sequence
  Synthetic oligonucleotide: PDCD1-5303
aggggugaggaggggguaggacu

SEQ ID NO: 18726 - RNA, 24 nt, Artificial Sequence
  Synthetic oligonucleotide: PDCD1-5304
gaggggugaggaggggguaggacu

SEQ ID NO: 18727 - RNA, 18 nt, Artificial Sequence
  Synthetic oligonucleotide: PDCD1-3500
cgccgaccccaccuaccu

SEQ ID NO: 18728 - RNA, 19 nt, Artificial Sequence
  Synthetic oligonucleotide: PDCD1-3501
ccgccgaccccaccuaccu

SEQ ID NO: 18729 - RNA, 20 nt, Artificial Sequence
  Synthetic oligonucleotide: PDCD1-593
accgccgaccccaccuaccu

SEQ ID NO: 18730 - RNA, 21 nt, Artificial Sequence
  Synthetic oligonucleotide: PDCD1-3502
gaccgccgaccccaccuaccu

SEQ ID NO: 18731 - RNA, 22 nt, Artificial Sequence
  Synthetic oligonucleotide: PDCD1-3503
ugaccgccgaccccaccuaccu

SEQ ID NO: 18732 - RNA, 23 nt, Artificial Sequence
  Synthetic oligonucleotide: PDCD1-3504
cugaccgccgaccccaccuaccu

SEQ ID NO: 18733 - RNA, 24 nt, Artificial Sequence
  Synthetic oligonucleotide: PDCD1-3505
ccugaccgccgaccccaccuaccu

SEQ ID NO: 18734 - RNA, 18 nt, Artificial Sequence
  Synthetic oligonucleotide: PDCD1-5305
gaagguggguggcccccu

SEQ ID NO: 18735 - RNA, 19 nt, Artificial Sequence
  Synthetic oligonucleotide: PDCD1-5306
ggaagguggguggcccccu

SEQ ID NO: 18736 - RNA, 20 nt, Artificial Sequence
  Synthetic oligonucleotide: PDCD1-1102
gggaagguggguggcccccu

SEQ ID NO: 18737 - RNA, 21 nt, Artificial Sequence
  Synthetic oligonucleotide: PDCD1-5307
ggggaagguggguggcccccu

SEQ ID NO: 18738 - RNA, 22 nt, Artificial Sequence
  Synthetic oligonucleotide: PDCD1-5308
uggggaagguggguggcccccu

SEQ ID NO: 18739 - RNA, 23 nt, Artificial Sequence
  Synthetic oligonucleotide: PDCD1-5309
cuggggaagguggguggcccccu

SEQ ID NO: 18740 - RNA, 24 nt, Artificial Sequence
  Synthetic oligonucleotide: PDCD1-5310
ccuggggaagguggguggcccccu

SEQ ID NO: 18741 - RNA, 18 nt, Artificial Sequence
  Synthetic oligonucleotide: PDCD1-5311
caucccccccaucucccu

SEQ ID NO: 18742 - RNA, 19 nt, Artificial Sequence
  Synthetic oligonucleotide: PDCD1-5312
ccaucccccccaucucccu

SEQ ID NO: 18743 - RNA, 20 nt, Artificial Sequence
  Synthetic oligonucleotide: PDCD1-2295
cccaucccccccaucucccu

SEQ ID NO: 18744 - RNA, 21 nt, Artificial Sequence
  Synthetic oligonucleotide: PDCD1-5313
ccccaucccccccaucucccu

SEQ ID NO: 18745 - RNA, 22 nt, Artificial Sequence
  Synthetic oligonucleotide: PDCD1-5314
cccccaucccccccaucucccu

SEQ ID NO: 18746 - RNA, 23 nt, Artificial Sequence
  Synthetic oligonucleotide: PDCD1-5315
ucccccaucccccccaucucccu

SEQ ID NO: 18747 - RNA, 24 nt, Artificial Sequence
  Synthetic oligonucleotide: PDCD1-5316
cucccccaucccccccaucucccu

SEQ ID NO: 18748 - RNA, 18 nt, Artificial Sequence
  Synthetic oligonucleotide: PDCD1-5317
cccauucugucggagccu

SEQ ID NO: 18749 - RNA, 19 nt, Artificial Sequence
  Synthetic oligonucleotide: PDCD1-5318
ucccauucugucggagccu

SEQ ID NO: 18750 - RNA, 20 nt, Artificial Sequence
  Synthetic oligonucleotide: PDCD1-1717
cucccauucugucggagccu

SEQ ID NO: 18751 - RNA, 21 nt, Artificial Sequence
  Synthetic oligonucleotide: PDCD1-5319
acucccauucugucggagccu

SEQ ID NO: 18752 - RNA, 22 nt, Artificial Sequence
  Synthetic oligonucleotide: PDCD1-5320
cacucccauucugucggagccu

SEQ ID NO: 18753 - RNA, 23 nt, Artificial Sequence
  Synthetic oligonucleotide: PDCD1-5321
ccacucccauucugucggagccu

SEQ ID NO: 18754 - RNA, 24 nt, Artificial Sequence
  Synthetic oligonucleotide: PDCD1-5322
cccacucccauucugucggagccu

SEQ ID NO: 18755 - RNA, 18 nt, Artificial Sequence
  Synthetic oligonucleotide: PDCD1-3506
cgacuggccagggcgccu

SEQ ID NO: 18756 - RNA, 19 nt, Artificial Sequence
  Synthetic oligonucleotide: PDCD1-3507
acgacuggccagggcgccu

SEQ ID NO: 18757 - RNA, 20 nt, Artificial Sequence
  Synthetic oligonucleotide: PDCD1-591
gacgacuggccagggcgccu

SEQ ID NO: 18758 - RNA, 21 nt, Artificial Sequence
  Synthetic oligonucleotide: PDCD1-3508
agacgacuggccagggcgccu

SEQ ID NO: 18759 - RNA, 22 nt, Artificial Sequence
  Synthetic oligonucleotide: PDCD1-3509
cagacgacuggccagggcgccu

SEQ ID NO: 18760 - RNA, 23 nt, Artificial Sequence
  Synthetic oligonucleotide: PDCD1-3510
ccagacgacuggccagggcgccu

SEQ ID NO: 18761 - RNA, 24 nt, Artificial Sequence
  Synthetic oligonucleotide: PDCD1-3511
cccagacgacuggccagggcgccu

SEQ ID NO: 18762 - RNA, 18 nt, Artificial Sequence
  Synthetic oligonucleotide: PDCD1-5323
ggccgggccucccugccu

SEQ ID NO: 18763 - RNA, 19 nt, Artificial Sequence
  Synthetic oligonucleotide: PDCD1-5324
gggccgggccucccugccu

SEQ ID NO: 18764 - RNA, 20 nt, Artificial Sequence
  Synthetic oligonucleotide: PDCD1-2301
ggggccgggccucccugccu

SEQ ID NO: 18765 - RNA, 21 nt, Artificial Sequence
  Synthetic oligonucleotide: PDCD1-5325
gggggccgggccucccugccu

SEQ ID NO: 18766 - RNA, 22 nt, Artificial Sequence
  Synthetic oligonucleotide: PDCD1-5326
ugggggccgggccucccugccu

SEQ ID NO: 18767 - RNA, 23 nt, Artificial Sequence
  Synthetic oligonucleotide: PDCD1-5327
cugggggccgggccucccugccu

SEQ ID NO: 18768 - RNA, 24 nt, Artificial Sequence
  Synthetic oligonucleotide: PDCD1-5328
ccugggggccgggccucccugccu

SEQ ID NO: 18769 - RNA, 18 nt, Artificial Sequence
  Synthetic oligonucleotide: PDCD1-5329
gugggggucuccccagcu

SEQ ID NO: 18770 - RNA, 19 nt, Artificial Sequence
  Synthetic oligonucleotide: PDCD1-5330
cgugggggucuccccagcu

SEQ ID NO: 18771 - RNA, 20 nt, Artificial Sequence
  Synthetic oligonucleotide: PDCD1-1086
ccgugggggucuccccagcu

SEQ ID NO: 18772 - RNA, 21 nt, Artificial Sequence
  Synthetic oligonucleotide: PDCD1-5331
cccgugggggucuccccagcu

SEQ ID NO: 18773 - RNA, 22 nt, Artificial Sequence
  Synthetic oligonucleotide: PDCD1-5332
ccccgugggggucuccccagcu

SEQ ID NO: 18774 - RNA, 23 nt, Artificial Sequence
  Synthetic oligonucleotide: PDCD1-5333
accccgugggggucuccccagcu

SEQ ID NO: 18775 - RNA, 24 nt, Artificial Sequence
  Synthetic oligonucleotide: PDCD1-5334
uaccccgugggggucuccccagcu

SEQ ID NO: 18776 - RNA, 18 nt, Artificial Sequence
  Synthetic oligonucleotide: PDCD1-5335
aggguaaggggcagagcu

SEQ ID NO: 18777 - RNA, 19 nt, Artificial Sequence
  Synthetic oligonucleotide: PDCD1-5336
caggguaaggggcagagcu

SEQ ID NO: 18778 - RNA, 20 nt, Artificial Sequence
  Synthetic oligonucleotide: PDCD1-2116
ucaggguaaggggcagagcu

SEQ ID NO: 18779 - RNA, 21 nt, Artificial Sequence
  Synthetic oligonucleotide: PDCD1-5337
cucaggguaaggggcagagcu

SEQ ID NO: 18780 - RNA, 22 nt, Artificial Sequence
  Synthetic oligonucleotide: PDCD1-5338
gcucaggguaaggggcagagcu

SEQ ID NO: 18781 - RNA, 23 nt, Artificial Sequence
  Synthetic oligonucleotide: PDCD1-5339
agcucaggguaaggggcagagcu

SEQ ID NO: 18782 - RNA, 24 nt, Artificial Sequence
  Synthetic oligonucleotide: PDCD1-5340
cagcucaggguaaggggcagagcu

SEQ ID NO: 18783 - RNA, 18 nt, Artificial Sequence
  Synthetic oligonucleotide: PDCD1-5341
cccuccagaccccucgcu

SEQ ID NO: 18784 - RNA, 19 nt, Artificial Sequence
  Synthetic oligonucleotide: PDCD1-5342
ucccuccagaccccucgcu

SEQ ID NO: 18785 - RNA, 20 nt, Artificial Sequence
  Synthetic oligonucleotide: PDCD1-1000
gucccuccagaccccucgcu

SEQ ID NO: 18786 - RNA, 21 nt, Artificial Sequence
  Synthetic oligonucleotide: PDCD1-5343
ggucccuccagaccccucgcu

SEQ ID NO: 18787 - RNA, 22 nt, Artificial Sequence
  Synthetic oligonucleotide: PDCD1-5344
aggucccuccagaccccucgcu

SEQ ID NO: 18788 - RNA, 23 nt, Artificial Sequence
  Synthetic oligonucleotide: PDCD1-5345
aaggucccuccagaccccucgcu

SEQ ID NO: 18789 - RNA, 24 nt, Artificial Sequence
  Synthetic oligonucleotide: PDCD1-5346
aaaggucccuccagaccccucgcu

SEQ ID NO: 18790 - RNA, 18 nt, Artificial Sequence
  Synthetic oligonucleotide: PDCD1-5347
cagccccaaggaccggcu

SEQ ID NO: 18791 - RNA, 19 nt, Artificial Sequence
  Synthetic oligonucleotide: PDCD1-5348
gcagccccaaggaccggcu

SEQ ID NO: 18792 - RNA, 20 nt, Artificial Sequence
  Synthetic oligonucleotide: PDCD1-960
cgcagccccaaggaccggcu

SEQ ID NO: 18793 - RNA, 18 nt, Artificial Sequence
  Synthetic oligonucleotide: PDCD1-5349
cccuccagaccccuggcu

SEQ ID NO: 18794 - RNA, 19 nt, Artificial Sequence
  Synthetic oligonucleotide: PDCD1-5350
ucccuccagaccccuggcu

SEQ ID NO: 18795 - RNA, 20 nt, Artificial Sequence
  Synthetic oligonucleotide: PDCD1-1010
gucccuccagaccccuggcu

SEQ ID NO: 18796 - RNA, 21 nt, Artificial Sequence
  Synthetic oligonucleotide: PDCD1-5351
ggucccuccagaccccuggcu

SEQ ID NO: 18797 - RNA, 22 nt, Artificial Sequence
  Synthetic oligonucleotide: PDCD1-5352
aggucccuccagaccccuggcu

SEQ ID NO: 18798 - RNA, 23 nt, Artificial Sequence
  Synthetic oligonucleotide: PDCD1-5353
aaggucccuccagaccccuggcu

SEQ ID NO: 18799 - RNA, 24 nt, Artificial Sequence
  Synthetic oligonucleotide: PDCD1-5354
gaaggucccuccagaccccuggcu

SEQ ID NO: 18800 - RNA, 18 nt, Artificial Sequence
  Synthetic oligonucleotide: PDCD1-5355
agugacagaggcagugcu

SEQ ID NO: 18801 - RNA, 19 nt, Artificial Sequence
  Synthetic oligonucleotide: PDCD1-5356
gagugacagaggcagugcu

SEQ ID NO: 18802 - RNA, 20 nt, Artificial Sequence
  Synthetic oligonucleotide: PDCD1-2244
agagugacagaggcagugcu

SEQ ID NO: 18803 - RNA, 21 nt, Artificial Sequence
  Synthetic oligonucleotide: PDCD1-5357
gagagugacagaggcagugcu

SEQ ID NO: 18804 - RNA, 22 nt, Artificial Sequence
  Synthetic oligonucleotide: PDCD1-5358
cgagagugacagaggcagugcu

SEQ ID NO: 18805 - RNA, 23 nt, Artificial Sequence
  Synthetic oligonucleotide: PDCD1-5359
gcgagagugacagaggcagugcu

SEQ ID NO: 18806 - RNA, 24 nt, Artificial Sequence
  Synthetic oligonucleotide: PDCD1-5360
ggcgagagugacagaggcagugcu

SEQ ID NO: 18807 - RNA, 18 nt, Artificial Sequence
  Synthetic oligonucleotide: PDCD1-5361
cauucugucggagccucu

SEQ ID NO: 18808 - RNA, 19 nt, Artificial Sequence
  Synthetic oligonucleotide: PDCD1-5362
ccauucugucggagccucu

SEQ ID NO: 18809 - RNA, 20 nt, Artificial Sequence
  Synthetic oligonucleotide: PDCD1-2765
cccauucugucggagccucu

SEQ ID NO: 18810 - RNA, 21 nt, Artificial Sequence
  Synthetic oligonucleotide: PDCD1-5363
ucccauucugucggagccucu

SEQ ID NO: 18811 - RNA, 22 nt, Artificial Sequence
  Synthetic oligonucleotide: PDCD1-5364
cucccauucugucggagccucu

SEQ ID NO: 18812 - RNA, 23 nt, Artificial Sequence
  Synthetic oligonucleotide: PDCD1-5365
acucccauucugucggagccucu

SEQ ID NO: 18813 - RNA, 24 nt, Artificial Sequence
  Synthetic oligonucleotide: PDCD1-5366
cacucccauucugucggagccucu

SEQ ID NO: 18814 - RNA, 18 nt, Artificial Sequence
  Synthetic oligonucleotide: PDCD1-5367
agguuccugggcugcagu

SEQ ID NO: 18815 - RNA, 19 nt, Artificial Sequence
  Synthetic oligonucleotide: PDCD1-5368
cagguuccugggcugcagu

SEQ ID NO: 18816 - RNA, 20 nt, Artificial Sequence
  Synthetic oligonucleotide: PDCD1-5369
ucagguuccugggcugcagu

SEQ ID NO: 18817 - RNA, 21 nt, Artificial Sequence
  Synthetic oligonucleotide: PDCD1-5370
cucagguuccugggcugcagu

SEQ ID NO: 18818 - RNA, 22 nt, Artificial Sequence
  Synthetic oligonucleotide: PDCD1-5371
gcucagguuccugggcugcagu

SEQ ID NO: 18819 - RNA, 23 nt, Artificial Sequence
  Synthetic oligonucleotide: PDCD1-5372
ggcucagguuccugggcugcagu

SEQ ID NO: 18820 - RNA, 24 nt, Artificial Sequence
  Synthetic oligonucleotide: PDCD1-5373
gggcucagguuccugggcugcagu

SEQ ID NO: 18821 - RNA, 18 nt, Artificial Sequence
  Synthetic oligonucleotide: PDCD1-5374
agagaggaacccaggagu

SEQ ID NO: 18822 - RNA, 19 nt, Artificial Sequence
  Synthetic oligonucleotide: PDCD1-5375
cagagaggaacccaggagu

SEQ ID NO: 18823 - RNA, 20 nt, Artificial Sequence
  Synthetic oligonucleotide: PDCD1-986
ccagagaggaacccaggagu

SEQ ID NO: 18824 - RNA, 21 nt, Artificial Sequence
  Synthetic oligonucleotide: PDCD1-5376
cccagagaggaacccaggagu

SEQ ID NO: 18825 - RNA, 22 nt, Artificial Sequence
  Synthetic oligonucleotide: PDCD1-5377
gcccagagaggaacccaggagu

SEQ ID NO: 18826 - RNA, 23 nt, Artificial Sequence
  Synthetic oligonucleotide: PDCD1-5378
ggcccagagaggaacccaggagu

SEQ ID NO: 18827 - RNA, 24 nt, Artificial Sequence
  Synthetic oligonucleotide: PDCD1-5379
gggcccagagaggaacccaggagu

SEQ ID NO: 18828 - RNA, 18 nt, Artificial Sequence
  Synthetic oligonucleotide: PDCD1-5380
uugggccaggggaggagu

SEQ ID NO: 18829 - RNA, 19 nt, Artificial Sequence
  Synthetic oligonucleotide: PDCD1-5381
cuugggccaggggaggagu

SEQ ID NO: 18830 - RNA, 20 nt, Artificial Sequence
  Synthetic oligonucleotide: PDCD1-2105
acuugggccaggggaggagu

SEQ ID NO: 18831 - RNA, 21 nt, Artificial Sequence
  Synthetic oligonucleotide: PDCD1-5382
gacuugggccaggggaggagu

SEQ ID NO: 18832 - RNA, 22 nt, Artificial Sequence
  Synthetic oligonucleotide: PDCD1-5383
ggacuugggccaggggaggagu

SEQ ID NO: 18833 - RNA, 23 nt, Artificial Sequence
  Synthetic oligonucleotide: PDCD1-5384
gggacuugggccaggggaggagu

SEQ ID NO: 18834 - RNA, 24 nt, Artificial Sequence
  Synthetic oligonucleotide: PDCD1-5385
ggggacuugggccaggggaggagu

SEQ ID NO: 18835 - RNA, 18 nt, Artificial Sequence
  Synthetic oligonucleotide: PDCD1-5386
agccacacagcucagggu

SEQ ID NO: 18836 - RNA, 19 nt, Artificial Sequence
  Synthetic oligonucleotide: PDCD1-5387
aagccacacagcucagggu

SEQ ID NO: 18837 - RNA, 20 nt, Artificial Sequence
  Synthetic oligonucleotide: PDCD1-988
aaagccacacagcucagggu

SEQ ID NO: 18838 - RNA, 21 nt, Artificial Sequence
  Synthetic oligonucleotide: PDCD1-5388
caaagccacacagcucagggu

SEQ ID NO: 18839 - RNA, 22 nt, Artificial Sequence
  Synthetic oligonucleotide: PDCD1-5389
ccaaagccacacagcucagggu

SEQ ID NO: 18840 - RNA, 23 nt, Artificial Sequence
  Synthetic oligonucleotide: PDCD1-5390
cccaaagccacacagcucagggu

SEQ ID NO: 18841 - RNA, 24 nt, Artificial Sequence
  Synthetic oligonucleotide: PDCD1-5391
gcccaaagccacacagcucagggu

SEQ ID NO: 18842 - RNA, 18 nt, Artificial Sequence
  Synthetic oligonucleotide: PDCD1-5392
uaggacuggggagagggu

SEQ ID NO: 18843 - RNA, 19 nt, Artificial Sequence
  Synthetic oligonucleotide: PDCD1-5393
guaggacuggggagagggu

SEQ ID NO: 18844 - RNA, 20 nt, Artificial Sequence
  Synthetic oligonucleotide: PDCD1-2263
gguaggacuggggagagggu

SEQ ID NO: 18845 - RNA, 21 nt, Artificial Sequence
  Synthetic oligonucleotide: PDCD1-5394
ggguaggacuggggagagggu

SEQ ID NO: 18846 - RNA, 22 nt, Artificial Sequence
  Synthetic oligonucleotide: PDCD1-5395
gggguaggacuggggagagggu

SEQ ID NO: 18847 - RNA, 23 nt, Artificial Sequence
  Synthetic oligonucleotide: PDCD1-5396
ggggguaggacuggggagagggu

SEQ ID NO: 18848 - RNA, 24 nt, Artificial Sequence
  Synthetic oligonucleotide: PDCD1-5397
aggggguaggacuggggagagggu

SEQ ID NO: 18849 - RNA, 18 nt, Artificial Sequence
  Synthetic oligonucleotide: PDCD1-5398
cuccugaggcugccgggu

SEQ ID NO: 18850 - RNA, 19 nt, Artificial Sequence
  Synthetic oligonucleotide: PDCD1-5399
ccuccugaggcugccgggu

SEQ ID NO: 18851 - RNA, 20 nt, Artificial Sequence
  Synthetic oligonucleotide: PDCD1-2290
cccuccugaggcugccgggu

SEQ ID NO: 18852 - RNA, 21 nt, Artificial Sequence
  Synthetic oligonucleotide: PDCD1-5400
ccccuccugaggcugccgggu

SEQ ID NO: 18853 - RNA, 22 nt, Artificial Sequence
  Synthetic oligonucleotide: PDCD1-5401
gccccuccugaggcugccgggu

SEQ ID NO: 18854 - RNA, 23 nt, Artificial Sequence
  Synthetic oligonucleotide: PDCD1-5402
ugccccuccugaggcugccgggu

SEQ ID NO: 18855 - RNA, 24 nt, Artificial Sequence
  Synthetic oligonucleotide: PDCD1-5403
cugccccuccugaggcugccgggu

SEQ ID NO: 18856 - RNA, 18 nt, Artificial Sequence
  Synthetic oligonucleotide: PDCD1-5404
ugcugggggaggaggggu

SEQ ID NO: 18857 - RNA, 19 nt, Artificial Sequence
  Synthetic oligonucleotide: PDCD1-5405
gugcugggggaggaggggu

SEQ ID NO: 18858 - RNA, 20 nt, Artificial Sequence
  Synthetic oligonucleotide: PDCD1-1046
agugcugggggaggaggggu

SEQ ID NO: 18859 - RNA, 21 nt, Artificial Sequence
  Synthetic oligonucleotide: PDCD1-5406
cagugcugggggaggaggggu

SEQ ID NO: 18860 - RNA, 22 nt, Artificial Sequence
  Synthetic oligonucleotide: PDCD1-5407
gcagugcugggggaggaggggu

SEQ ID NO: 18861 - RNA, 23 nt, Artificial Sequence
  Synthetic oligonucleotide: PDCD1-5408
ggcagugcugggggaggaggggu

SEQ ID NO: 18862 - RNA, 24 nt, Artificial Sequence
  Synthetic oligonucleotide: PDCD1-5409
aggcagugcugggggaggaggggu

SEQ ID NO: 18863 - RNA, 18 nt, Artificial Sequence
  Synthetic oligonucleotide: PDCD1-5410
accccacucccauucugu

SEQ ID NO: 18864 - RNA, 19 nt, Artificial Sequence
  Synthetic oligonucleotide: PDCD1-5411
aaccccacucccauucugu

SEQ ID NO: 18865 - RNA, 20 nt, Artificial Sequence
  Synthetic oligonucleotide: PDCD1-2763
caaccccacucccauucugu

SEQ ID NO: 18866 - RNA, 21 nt, Artificial Sequence
  Synthetic oligonucleotide: PDCD1-5412
ucaaccccacucccauucugu

SEQ ID NO: 18867 - RNA, 22 nt, Artificial Sequence
  Synthetic oligonucleotide: PDCD1-5413
cucaaccccacucccauucugu

SEQ ID NO: 18868 - RNA, 23 nt, Artificial Sequence
  Synthetic oligonucleotide: PDCD1-5414
gcucaaccccacucccauucugu

SEQ ID NO: 18869 - RNA, 24 nt, Artificial Sequence
  Synthetic oligonucleotide: PDCD1-5415
ggcucaaccccacucccauucugu

SEQ ID NO: 18870 - RNA, 18 nt, Artificial Sequence
  Synthetic oligonucleotide: PDCD1-3584
gucugggcggugcuacaa

SEQ ID NO: 18871 - RNA, 19 nt, Artificial Sequence
  Synthetic oligonucleotide: PDCD1-3585
cgucugggcggugcuacaa

SEQ ID NO: 18872 - RNA, 20 nt, Artificial Sequence
  Synthetic oligonucleotide: PDCD1-530
ucgucugggcggugcuacaa

SEQ ID NO: 18873 - RNA, 21 nt, Artificial Sequence
  Synthetic oligonucleotide: PDCD1-3586
gucgucugggcggugcuacaa

SEQ ID NO: 18874 - RNA, 22 nt, Artificial Sequence
  Synthetic oligonucleotide: PDCD1-3587
agucgucugggcggugcuacaa

SEQ ID NO: 18875 - RNA, 23 nt, Artificial Sequence
  Synthetic oligonucleotide: PDCD1-3588
cagucgucugggcggugcuacaa

SEQ ID NO: 18876 - RNA, 24 nt, Artificial Sequence
  Synthetic oligonucleotide: PDCD1-3589
ccagucgucugggcggugcuacaa

SEQ ID NO: 18877 - RNA, 18 nt, Artificial Sequence
  Synthetic oligonucleotide: PDCD1-5416
ccagaggcuccgacagaa

SEQ ID NO: 18878 - RNA, 19 nt, Artificial Sequence
  Synthetic oligonucleotide: PDCD1-5417
cccagaggcuccgacagaa

SEQ ID NO: 18879 - RNA, 20 nt, Artificial Sequence
  Synthetic oligonucleotide: PDCD1-3003
ucccagaggcuccgacagaa

SEQ ID NO: 18880 - RNA, 21 nt, Artificial Sequence
  Synthetic oligonucleotide: PDCD1-5418
cucccagaggcuccgacagaa

SEQ ID NO: 18881 - RNA, 22 nt, Artificial Sequence
  Synthetic oligonucleotide: PDCD1-5419
gcucccagaggcuccgacagaa

SEQ ID NO: 18882 - RNA, 23 nt, Artificial Sequence
  Synthetic oligonucleotide: PDCD1-5420
ggcucccagaggcuccgacagaa

SEQ ID NO: 18883 - RNA, 24 nt, Artificial Sequence
  Synthetic oligonucleotide: PDCD1-5421
aggcucccagaggcuccgacagaa

SEQ ID NO: 18884 - RNA, 18 nt, Artificial Sequence
  Synthetic oligonucleotide: PDCD1-5422
cacguggauguggaggaa

SEQ ID NO: 18885 - RNA, 19 nt, Artificial Sequence
  Synthetic oligonucleotide: PDCD1-5423
ccacguggauguggaggaa

SEQ ID NO: 18886 - RNA, 20 nt, Artificial Sequence
  Synthetic oligonucleotide: PDCD1-1464
cccacguggauguggaggaa

SEQ ID NO: 18887 - RNA, 21 nt, Artificial Sequence
  Synthetic oligonucleotide: PDCD1-5424
gcccacguggauguggaggaa

SEQ ID NO: 18888 - RNA, 22 nt, Artificial Sequence
  Synthetic oligonucleotide: PDCD1-5425
cgcccacguggauguggaggaa

SEQ ID NO: 18889 - RNA, 23 nt, Artificial Sequence
  Synthetic oligonucleotide: PDCD1-5426
ucgcccacguggauguggaggaa

SEQ ID NO: 18890 - RNA, 24 nt, Artificial Sequence
  Synthetic oligonucleotide: PDCD1-5427
cucgcccacguggauguggaggaa

SEQ ID NO: 18891 - RNA, 18 nt, Artificial Sequence
  Synthetic oligonucleotide: PDCD1-5428
gcagugagcagagacaca

SEQ ID NO: 18892 - RNA, 19 nt, Artificial Sequence
  Synthetic oligonucleotide: PDCD1-5429
agcagugagcagagacaca

SEQ ID NO: 18893 - RNA, 20 nt, Artificial Sequence
  Synthetic oligonucleotide: PDCD1-1488
cagcagugagcagagacaca

SEQ ID NO: 18894 - RNA, 21 nt, Artificial Sequence
  Synthetic oligonucleotide: PDCD1-5430
acagcagugagcagagacaca

SEQ ID NO: 18895 - RNA, 22 nt, Artificial Sequence
  Synthetic oligonucleotide: PDCD1-5431
cacagcagugagcagagacaca

SEQ ID NO: 18896 - RNA, 23 nt, Artificial Sequence
  Synthetic oligonucleotide: PDCD1-5432
ccacagcagugagcagagacaca

SEQ ID NO: 18897 - RNA, 24 nt, Artificial Sequence
  Synthetic oligonucleotide: PDCD1-5433
gccacagcagugagcagagacaca

SEQ ID NO: 18898 - RNA, 18 nt, Artificial Sequence
  Synthetic oligonucleotide: PDCD1-5434
cagcagugagcagagaca

SEQ ID NO: 18899 - RNA, 19 nt, Artificial Sequence
  Synthetic oligonucleotide: PDCD1-5435
acagcagugagcagagaca

SEQ ID NO: 18900 - RNA, 20 nt, Artificial Sequence
  Synthetic oligonucleotide: PDCD1-1489
cacagcagugagcagagaca

SEQ ID NO: 18901 - RNA, 21 nt, Artificial Sequence
  Synthetic oligonucleotide: PDCD1-5436
ccacagcagugagcagagaca

SEQ ID NO: 18902 - RNA, 22 nt, Artificial Sequence
  Synthetic oligonucleotide: PDCD1-5437
gccacagcagugagcagagaca

SEQ ID NO: 18903 - RNA, 23 nt, Artificial Sequence
  Synthetic oligonucleotide: PDCD1-5438
ggccacagcagugagcagagaca

SEQ ID NO: 18904 - RNA, 24 nt, Artificial Sequence
  Synthetic oligonucleotide: PDCD1-5439
aggccacagcagugagcagagaca

SEQ ID NO: 18905 - RNA, 18 nt, Artificial Sequence
  Synthetic oligonucleotide: PDCD1-5440
agggaggcccggccccca

SEQ ID NO: 18906 - RNA, 19 nt, Artificial Sequence
  Synthetic oligonucleotide: PDCD1-5441
cagggaggcccggccccca

SEQ ID NO: 18907 - RNA, 20 nt, Artificial Sequence
  Synthetic oligonucleotide: PDCD1-2322
gcagggaggcccggccccca

SEQ ID NO: 18908 - RNA, 21 nt, Artificial Sequence
  Synthetic oligonucleotide: PDCD1-5442
ggcagggaggcccggccccca

SEQ ID NO: 18909 - RNA, 22 nt, Artificial Sequence
  Synthetic oligonucleotide: PDCD1-5443
aggcagggaggcccggccccca

SEQ ID NO: 18910 - RNA, 23 nt, Artificial Sequence
  Synthetic oligonucleotide: PDCD1-5444
caggcagggaggcccggccccca

SEQ ID NO: 18911 - RNA, 24 nt, Artificial Sequence
  Synthetic oligonucleotide: PDCD1-5445
ccaggcagggaggcccggccccca

SEQ ID NO: 18912 - RNA, 18 nt, Artificial Sequence
  Synthetic oligonucleotide: PDCD1-5446
cccaggaaccugagccca

SEQ ID NO: 18913 - RNA, 19 nt, Artificial Sequence
  Synthetic oligonucleotide: PDCD1-5447
gcccaggaaccugagccca

SEQ ID NO: 18914 - RNA, 20 nt, Artificial Sequence
  Synthetic oligonucleotide: PDCD1-1525
agcccaggaaccugagccca

SEQ ID NO: 18915 - RNA, 21 nt, Artificial Sequence
  Synthetic oligonucleotide: PDCD1-5448
cagcccaggaaccugagccca

SEQ ID NO: 18916 - RNA, 22 nt, Artificial Sequence
  Synthetic oligonucleotide: PDCD1-5449
gcagcccaggaaccugagccca

SEQ ID NO: 18917 - RNA, 23 nt, Artificial Sequence
  Synthetic oligonucleotide: PDCD1-5450
ugcagcccaggaaccugagccca

SEQ ID NO: 18918 - RNA, 24 nt, Artificial Sequence
  Synthetic oligonucleotide: PDCD1-5451
cugcagcccaggaaccugagccca

SEQ ID NO: 18919 - RNA, 18 nt, Artificial Sequence
  Synthetic oligonucleotide: PDCD1-5452
uggaaagaggccacagca

SEQ ID NO: 18920 - RNA, 19 nt, Artificial Sequence
  Synthetic oligonucleotide: PDCD1-5453
auggaaagaggccacagca

SEQ ID NO: 18921 - RNA, 20 nt, Artificial Sequence
  Synthetic oligonucleotide: PDCD1-1491
uauggaaagaggccacagca

SEQ ID NO: 18922 - RNA, 21 nt, Artificial Sequence
  Synthetic oligonucleotide: PDCD1-5454
auauggaaagaggccacagca

SEQ ID NO: 18923 - RNA, 22 nt, Artificial Sequence
  Synthetic oligonucleotide: PDCD1-5455
gauauggaaagaggccacagca

SEQ ID NO: 18924 - RNA, 23 nt, Artificial Sequence
  Synthetic oligonucleotide: PDCD1-5456
ggauauggaaagaggccacagca

SEQ ID NO: 18925 - RNA, 24 nt, Artificial Sequence
  Synthetic oligonucleotide: PDCD1-5457
gggauauggaaagaggccacagca

SEQ ID NO: 18926 - RNA, 18 nt, Artificial Sequence
  Synthetic oligonucleotide: PDCD1-5458
gaagagggggcgggagca

SEQ ID NO: 18927 - RNA, 19 nt, Artificial Sequence
  Synthetic oligonucleotide: PDCD1-5459
ggaagagggggcgggagca

SEQ ID NO: 18928 - RNA, 20 nt, Artificial Sequence
  Synthetic oligonucleotide: PDCD1-2375
aggaagagggggcgggagca

SEQ ID NO: 18929 - RNA, 21 nt, Artificial Sequence
  Synthetic oligonucleotide: PDCD1-5460
gaggaagagggggcgggagca

SEQ ID NO: 18930 - RNA, 22 nt, Artificial Sequence
  Synthetic oligonucleotide: PDCD1-5461
ggaggaagagggggcgggagca

SEQ ID NO: 18931 - RNA, 23 nt, Artificial Sequence
  Synthetic oligonucleotide: PDCD1-5462
uggaggaagagggggcgggagca

SEQ ID NO: 18932 - RNA, 24 nt, Artificial Sequence
  Synthetic oligonucleotide: PDCD1-5463
guggaggaagagggggcgggagca

SEQ ID NO: 18933 - RNA, 18 nt, Artificial Sequence
  Synthetic oligonucleotide: PDCD1-5464
cucaccuccgccugagca

SEQ ID NO: 18934 - RNA, 19 nt, Artificial Sequence
  Synthetic oligonucleotide: PDCD1-5465
gcucaccuccgccugagca

SEQ ID NO: 18935 - RNA, 20 nt, Artificial Sequence
  Synthetic oligonucleotide: PDCD1-1452
cgcucaccuccgccugagca

SEQ ID NO: 18936 - RNA, 21 nt, Artificial Sequence
  Synthetic oligonucleotide: PDCD1-5466
ccgcucaccuccgccugagca

SEQ ID NO: 18937 - RNA, 22 nt, Artificial Sequence
  Synthetic oligonucleotide: PDCD1-5467
uccgcucaccuccgccugagca

SEQ ID NO: 18938 - RNA, 23 nt, Artificial Sequence
  Synthetic oligonucleotide: PDCD1-5468
uuccgcucaccuccgccugagca

SEQ ID NO: 18939 - RNA, 24 nt, Artificial Sequence
  Synthetic oligonucleotide: PDCD1-5469
cuuccgcucaccuccgccugagca

SEQ ID NO: 18940 - RNA, 18 nt, Artificial Sequence
  Synthetic oligonucleotide: PDCD1-5470
acccaccuuccccaggca

SEQ ID NO: 18941 - RNA, 19 nt, Artificial Sequence
  Synthetic oligonucleotide: PDCD1-5471
cacccaccuuccccaggca

SEQ ID NO: 18942 - RNA, 20 nt, Artificial Sequence
  Synthetic oligonucleotide: PDCD1-2318
ccacccaccuuccccaggca

SEQ ID NO: 18943 - RNA, 21 nt, Artificial Sequence
  Synthetic oligonucleotide: PDCD1-5472
gccacccaccuuccccaggca

SEQ ID NO: 18944 - RNA, 22 nt, Artificial Sequence
  Synthetic oligonucleotide: PDCD1-5473
ggccacccaccuuccccaggca

SEQ ID NO: 18945 - RNA, 23 nt, Artificial Sequence
  Synthetic oligonucleotide: PDCD1-5474
gggccacccaccuuccccaggca

SEQ ID NO: 18946 - RNA, 24 nt, Artificial Sequence
  Synthetic oligonucleotide: PDCD1-5475
ggggccacccaccuuccccaggca

SEQ ID NO: 18947 - RNA, 18 nt, Artificial Sequence
  Synthetic oligonucleotide: PDCD1-5476
cguggauguggaggaaga

SEQ ID NO: 18948 - RNA, 19 nt, Artificial Sequence
  Synthetic oligonucleotide: PDCD1-5477
acguggauguggaggaaga

SEQ ID NO: 18949 - RNA, 20 nt, Artificial Sequence
  Synthetic oligonucleotide: PDCD1-2370
cacguggauguggaggaaga

SEQ ID NO: 18950 - RNA, 21 nt, Artificial Sequence
  Synthetic oligonucleotide: PDCD1-5478
ccacguggauguggaggaaga

SEQ ID NO: 18951 - RNA, 22 nt, Artificial Sequence
  Synthetic oligonucleotide: PDCD1-5479
cccacguggauguggaggaaga

SEQ ID NO: 18952 - RNA, 23 nt, Artificial Sequence
  Synthetic oligonucleotide: PDCD1-5480
gcccacguggauguggaggaaga

SEQ ID NO: 18953 - RNA, 24 nt, Artificial Sequence
  Synthetic oligonucleotide: PDCD1-5481
cgcccacguggauguggaggaaga

SEQ ID NO: 18954 - RNA, 18 nt, Artificial Sequence
  Synthetic oligonucleotide: PDCD1-5482
cccagaggcuccgacaga

SEQ ID NO: 18955 - RNA, 19 nt, Artificial Sequence
  Synthetic oligonucleotide: PDCD1-5483
ucccagaggcuccgacaga

SEQ ID NO: 18956 - RNA, 20 nt, Artificial Sequence
  Synthetic oligonucleotide: PDCD1-1908
cucccagaggcuccgacaga

SEQ ID NO: 18957 - RNA, 21 nt, Artificial Sequence
  Synthetic oligonucleotide: PDCD1-5484
gcucccagaggcuccgacaga

SEQ ID NO: 18958 - RNA, 22 nt, Artificial Sequence
  Synthetic oligonucleotide: PDCD1-5485
ggcucccagaggcuccgacaga

SEQ ID NO: 18959 - RNA, 23 nt, Artificial Sequence
  Synthetic oligonucleotide: PDCD1-5486
aggcucccagaggcuccgacaga

SEQ ID NO: 18960 - RNA, 24 nt, Artificial Sequence
  Synthetic oligonucleotide: PDCD1-5487
gaggcucccagaggcuccgacaga

SEQ ID NO: 18961 - RNA, 18 nt, Artificial Sequence
  Synthetic oligonucleotide: PDCD1-5488
caggaaccugagcccaga

SEQ ID NO: 18962 - RNA, 19 nt, Artificial Sequence
  Synthetic oligonucleotide: PDCD1-5489
ccaggaaccugagcccaga

SEQ ID NO: 18963 - RNA, 20 nt, Artificial Sequence
  Synthetic oligonucleotide: PDCD1-2313
cccaggaaccugagcccaga

SEQ ID NO: 18964 - RNA, 21 nt, Artificial Sequence
  Synthetic oligonucleotide: PDCD1-5490
gcccaggaaccugagcccaga

SEQ ID NO: 18965 - RNA, 22 nt, Artificial Sequence
  Synthetic oligonucleotide: PDCD1-5491
agcccaggaaccugagcccaga

SEQ ID NO: 18966 - RNA, 23 nt, Artificial Sequence
  Synthetic oligonucleotide: PDCD1-5492
cagcccaggaaccugagcccaga

SEQ ID NO: 18967 - RNA, 24 nt, Artificial Sequence
  Synthetic oligonucleotide: PDCD1-5493
gcagcccaggaaccugagcccaga

SEQ ID NO: 18968 - RNA, 18 nt, Artificial Sequence
  Synthetic oligonucleotide: PDCD1-5494
gcccggcccccagggaga

SEQ ID NO: 18969 - RNA, 19 nt, Artificial Sequence
  Synthetic oligonucleotide: PDCD1-5495
ggcccggcccccagggaga

SEQ ID NO: 18970 - RNA, 20 nt, Artificial Sequence
  Synthetic oligonucleotide: PDCD1-2323
aggcccggcccccagggaga

SEQ ID NO: 18971 - RNA, 21 nt, Artificial Sequence
  Synthetic oligonucleotide: PDCD1-5496
gaggcccggcccccagggaga

SEQ ID NO: 18972 - RNA, 22 nt, Artificial Sequence
  Synthetic oligonucleotide: PDCD1-5497
ggaggcccggcccccagggaga

SEQ ID NO: 18973 - RNA, 23 nt, Artificial Sequence
  Synthetic oligonucleotide: PDCD1-5498
gggaggcccggcccccagggaga

SEQ ID NO: 18974 - RNA, 24 nt, Artificial Sequence
  Synthetic oligonucleotide: PDCD1-5499
agggaggcccggcccccagggaga

SEQ ID NO: 18975 - RNA, 18 nt, Artificial Sequence
  Synthetic oligonucleotide: PDCD1-5500
cagagacacagaggagga

SEQ ID NO: 18976 - RNA, 19 nt, Artificial Sequence
  Synthetic oligonucleotide: PDCD1-5501
gcagagacacagaggagga

SEQ ID NO: 18977 - RNA, 20 nt, Artificial Sequence
  Synthetic oligonucleotide: PDCD1-2349
agcagagacacagaggagga

SEQ ID NO: 18978 - RNA, 21 nt, Artificial Sequence
  Synthetic oligonucleotide: PDCD1-5502
gagcagagacacagaggagga

SEQ ID NO: 18979 - RNA, 22 nt, Artificial Sequence
  Synthetic oligonucleotide: PDCD1-5503
ugagcagagacacagaggagga

SEQ ID NO: 18980 - RNA, 23 nt, Artificial Sequence
  Synthetic oligonucleotide: PDCD1-5504
gugagcagagacacagaggagga

SEQ ID NO: 18981 - RNA, 24 nt, Artificial Sequence
  Synthetic oligonucleotide: PDCD1-5505
agugagcagagacacagaggagga

SEQ ID NO: 18982 - RNA, 18 nt, Artificial Sequence
  Synthetic oligonucleotide: PDCD1-5506
cagcccaggggucccgga

SEQ ID NO: 18983 - RNA, 19 nt, Artificial Sequence
  Synthetic oligonucleotide: PDCD1-5507
gcagcccaggggucccgga

SEQ ID NO: 18984 - RNA, 20 nt, Artificial Sequence
  Synthetic oligonucleotide: PDCD1-1425
ggcagcccaggggucccgga

SEQ ID NO: 18985 - RNA, 21 nt, Artificial Sequence
  Synthetic oligonucleotide: PDCD1-5508
uggcagcccaggggucccgga

SEQ ID NO: 18986 - RNA, 22 nt, Artificial Sequence
  Synthetic oligonucleotide: PDCD1-5509
cuggcagcccaggggucccgga

SEQ ID NO: 18987 - RNA, 23 nt, Artificial Sequence
  Synthetic oligonucleotide: PDCD1-5510
ccuggcagcccaggggucccgga

SEQ ID NO: 18988 - RNA, 24 nt, Artificial Sequence
  Synthetic oligonucleotide: PDCD1-5511
cccuggcagcccaggggucccgga

SEQ ID NO: 18989 - RNA, 18 nt, Artificial Sequence
  Synthetic oligonucleotide: PDCD1-5512
ccagggagauggggggga

SEQ ID NO: 18990 - RNA, 19 nt, Artificial Sequence
  Synthetic oligonucleotide: PDCD1-5513
cccagggagauggggggga

SEQ ID NO: 18991 - RNA, 20 nt, Artificial Sequence
  Synthetic oligonucleotide: PDCD1-2329
ccccagggagauggggggga

SEQ ID NO: 18992 - RNA, 21 nt, Artificial Sequence
  Synthetic oligonucleotide: PDCD1-5514
cccccagggagauggggggga

SEQ ID NO: 18993 - RNA, 22 nt, Artificial Sequence
  Synthetic oligonucleotide: PDCD1-5515
gcccccagggagauggggggga

SEQ ID NO: 18994 - RNA, 23 nt, Artificial Sequence
  Synthetic oligonucleotide: PDCD1-5516
ggcccccagggagauggggggga

SEQ ID NO: 18995 - RNA, 24 nt, Artificial Sequence
  Synthetic oligonucleotide: PDCD1-5517
cggcccccagggagauggggggga

SEQ ID NO: 18996 - RNA, 18 nt, Artificial Sequence
  Synthetic oligonucleotide: PDCD1-5518
ggcuccgacagaauggga

SEQ ID NO: 18997 - RNA, 19 nt, Artificial Sequence
  Synthetic oligonucleotide: PDCD1-5519
aggcuccgacagaauggga

SEQ ID NO: 18998 - RNA, 20 nt, Artificial Sequence
  Synthetic oligonucleotide: PDCD1-1905
gaggcuccgacagaauggga

SEQ ID NO: 18999 - RNA, 21 nt, Artificial Sequence
  Synthetic oligonucleotide: PDCD1-5520
agaggcuccgacagaauggga

SEQ ID NO: 19000 - RNA, 22 nt, Artificial Sequence
  Synthetic oligonucleotide: PDCD1-5521
cagaggcuccgacagaauggga

SEQ ID NO: 19001 - RNA, 23 nt, Artificial Sequence
  Synthetic oligonucleotide: PDCD1-5522
ccagaggcuccgacagaauggga

SEQ ID NO: 19002 - RNA, 24 nt, Artificial Sequence
  Synthetic oligonucleotide: PDCD1-5523
cccagaggcuccgacagaauggga

SEQ ID NO: 19003 - RNA, 18 nt, Artificial Sequence
  Synthetic oligonucleotide: PDCD1-5524
gcucgggcgggauaugga

SEQ ID NO: 19004 - RNA, 19 nt, Artificial Sequence
  Synthetic oligonucleotide: PDCD1-5525
agcucgggcgggauaugga

SEQ ID NO: 19005 - RNA, 20 nt, Artificial Sequence
  Synthetic oligonucleotide: PDCD1-1492
cagcucgggcgggauaugga

SEQ ID NO: 19006 - RNA, 21 nt, Artificial Sequence
  Synthetic oligonucleotide: PDCD1-5526
gcagcucgggcgggauaugga

SEQ ID NO: 19007 - RNA, 22 nt, Artificial Sequence
  Synthetic oligonucleotide: PDCD1-5527
ggcagcucgggcgggauaugga

SEQ ID NO: 19008 - RNA, 23 nt, Artificial Sequence
  Synthetic oligonucleotide: PDCD1-5528
gggcagcucgggcgggauaugga

SEQ ID NO: 19009 - RNA, 24 nt, Artificial Sequence
  Synthetic oligonucleotide: PDCD1-5529
ggggcagcucgggcgggauaugga

SEQ ID NO: 19010 - RNA, 18 nt, Artificial Sequence
  Synthetic oligonucleotide: PDCD1-5530
ggcagcucgggcgggaua

SEQ ID NO: 19011 - RNA, 19 nt, Artificial Sequence
  Synthetic oligonucleotide: PDCD1-5531
gggcagcucgggcgggaua

SEQ ID NO: 19012 - RNA, 20 nt, Artificial Sequence
  Synthetic oligonucleotide: PDCD1-2345
ggggcagcucgggcgggaua

SEQ ID NO: 19013 - RNA, 21 nt, Artificial Sequence
  Synthetic oligonucleotide: PDCD1-5532
aggggcagcucgggcgggaua

SEQ ID NO: 19014 - RNA, 22 nt, Artificial Sequence
  Synthetic oligonucleotide: PDCD1-5533
gaggggcagcucgggcgggaua

SEQ ID NO: 19015 - RNA, 23 nt, Artificial Sequence
  Synthetic oligonucleotide: PDCD1-5534
ggaggggcagcucgggcgggaua

SEQ ID NO: 19016 - RNA, 24 nt, Artificial Sequence
  Synthetic oligonucleotide: PDCD1-5535
aggaggggcagcucgggcgggaua

SEQ ID NO: 19017 - RNA, 18 nt, Artificial Sequence
  Synthetic oligonucleotide: PDCD1-5536
ucacugcagcccaggaac

SEQ ID NO: 19018 - RNA, 19 nt, Artificial Sequence
  Synthetic oligonucleotide: PDCD1-5537
cucacugcagcccaggaac

SEQ ID NO: 19019 - RNA, 20 nt, Artificial Sequence
  Synthetic oligonucleotide: PDCD1-5538
ccucacugcagcccaggaac

SEQ ID NO: 19020 - RNA, 21 nt, Artificial Sequence
  Synthetic oligonucleotide: PDCD1-5539
cccucacugcagcccaggaac

SEQ ID NO: 19021 - RNA, 22 nt, Artificial Sequence
  Synthetic oligonucleotide: PDCD1-5540
ccccucacugcagcccaggaac

SEQ ID NO: 19022 - RNA, 23 nt, Artificial Sequence
  Synthetic oligonucleotide: PDCD1-5541
accccucacugcagcccaggaac

SEQ ID NO: 19023 - RNA, 24 nt, Artificial Sequence
  Synthetic oligonucleotide: PDCD1-5542
caccccucacugcagcccaggaac

SEQ ID NO: 19024 - RNA, 18 nt, Artificial Sequence
  Synthetic oligonucleotide: PDCD1-5543
cccucccuucaaccugac

SEQ ID NO: 19025 - RNA, 19 nt, Artificial Sequence
  Synthetic oligonucleotide: PDCD1-5544
acccucccuucaaccugac

SEQ ID NO: 19026 - RNA, 20 nt, Artificial Sequence
  Synthetic oligonucleotide: PDCD1-1455
cacccucccuucaaccugac

SEQ ID NO: 19027 - RNA, 21 nt, Artificial Sequence
  Synthetic oligonucleotide: PDCD1-5545
gcacccucccuucaaccugac

SEQ ID NO: 19028 - RNA, 22 nt, Artificial Sequence
  Synthetic oligonucleotide: PDCD1-5546
ggcacccucccuucaaccugac

SEQ ID NO: 19029 - RNA, 23 nt, Artificial Sequence
  Synthetic oligonucleotide: PDCD1-5547
gggcacccucccuucaaccugac

SEQ ID NO: 19030 - RNA, 24 nt, Artificial Sequence
  Synthetic oligonucleotide: PDCD1-5548
cgggcacccucccuucaaccugac

SEQ ID NO: 19031 - RNA, 18 nt, Artificial Sequence
  Synthetic oligonucleotide: PDCD1-5549
ccucccuucaaccugacc

SEQ ID NO: 19032 - RNA, 19 nt, Artificial Sequence
  Synthetic oligonucleotide: PDCD1-5550
cccucccuucaaccugacc

SEQ ID NO: 19033 - RNA, 20 nt, Artificial Sequence
  Synthetic oligonucleotide: PDCD1-2380
acccucccuucaaccugacc

SEQ ID NO: 19034 - RNA, 21 nt, Artificial Sequence
  Synthetic oligonucleotide: PDCD1-5551
cacccucccuucaaccugacc

SEQ ID NO: 19035 - RNA, 22 nt, Artificial Sequence
  Synthetic oligonucleotide: PDCD1-5552
gcacccucccuucaaccugacc

SEQ ID NO: 19036 - RNA, 23 nt, Artificial Sequence
  Synthetic oligonucleotide: PDCD1-5553
ggcacccucccuucaaccugacc

SEQ ID NO: 19037 - RNA, 24 nt, Artificial Sequence
  Synthetic oligonucleotide: PDCD1-5554
gggcacccucccuucaaccugacc

SEQ ID NO: 19038 - RNA, 18 nt, Artificial Sequence
  Synthetic oligonucleotide: PDCD1-5555
ccagcucugccccuuacc

SEQ ID NO: 19039 - RNA, 19 nt, Artificial Sequence
  Synthetic oligonucleotide: PDCD1-5556
cccagcucugccccuuacc

SEQ ID NO: 19040 - RNA, 20 nt, Artificial Sequence
  Synthetic oligonucleotide: PDCD1-1414
ccccagcucugccccuuacc

SEQ ID NO: 19041 - RNA, 21 nt, Artificial Sequence
  Synthetic oligonucleotide: PDCD1-5557
cccccagcucugccccuuacc

SEQ ID NO: 19042 - RNA, 22 nt, Artificial Sequence
  Synthetic oligonucleotide: PDCD1-5558
gcccccagcucugccccuuacc

SEQ ID NO: 19043 - RNA, 23 nt, Artificial Sequence
  Synthetic oligonucleotide: PDCD1-5559
ggcccccagcucugccccuuacc

SEQ ID NO: 19044 - RNA, 24 nt, Artificial Sequence
  Synthetic oligonucleotide: PDCD1-5560
uggcccccagcucugccccuuacc

SEQ ID NO: 19045 - RNA, 18 nt, Artificial Sequence
  Synthetic oligonucleotide: PDCD1-5561
ugagcuggggagaccccc

SEQ ID NO: 19046 - RNA, 19 nt, Artificial Sequence
  Synthetic oligonucleotide: PDCD1-5562
cugagcuggggagaccccc

SEQ ID NO: 19047 - RNA, 20 nt, Artificial Sequence
  Synthetic oligonucleotide: PDCD1-1477
ccugagcuggggagaccccc

SEQ ID NO: 19048 - RNA, 21 nt, Artificial Sequence
  Synthetic oligonucleotide: PDCD1-5563
cccugagcuggggagaccccc

SEQ ID NO: 19049 - RNA, 22 nt, Artificial Sequence
  Synthetic oligonucleotide: PDCD1-5564
gcccugagcuggggagaccccc

SEQ ID NO: 19050 - RNA, 23 nt, Artificial Sequence
  Synthetic oligonucleotide: PDCD1-5565
ggcccugagcuggggagaccccc

SEQ ID NO: 19051 - RNA, 24 nt, Artificial Sequence
  Synthetic oligonucleotide: PDCD1-5566
gggcccugagcuggggagaccccc

SEQ ID NO: 19052 - RNA, 18 nt, Artificial Sequence
  Synthetic oligonucleotide: PDCD1-5567
cagggaggcccggccccc

SEQ ID NO: 19053 - RNA, 19 nt, Artificial Sequence
  Synthetic oligonucleotide: PDCD1-5568
gcagggaggcccggccccc

SEQ ID NO: 19054 - RNA, 20 nt, Artificial Sequence
  Synthetic oligonucleotide: PDCD1-2321
ggcagggaggcccggccccc

SEQ ID NO: 19055 - RNA, 21 nt, Artificial Sequence
  Synthetic oligonucleotide: PDCD1-5569
aggcagggaggcccggccccc

SEQ ID NO: 19056 - RNA, 22 nt, Artificial Sequence
  Synthetic oligonucleotide: PDCD1-5570
caggcagggaggcccggccccc

SEQ ID NO: 19057 - RNA, 23 nt, Artificial Sequence
  Synthetic oligonucleotide: PDCD1-5571
ccaggcagggaggcccggccccc

SEQ ID NO: 19058 - RNA, 24 nt, Artificial Sequence
  Synthetic oligonucleotide: PDCD1-5572
cccaggcagggaggcccggccccc

SEQ ID NO: 19059 - RNA, 18 nt, Artificial Sequence
  Synthetic oligonucleotide: PDCD1-5573
gcagggaggcccggcccc

SEQ ID NO: 19060 - RNA, 19 nt, Artificial Sequence
  Synthetic oligonucleotide: PDCD1-5574
ggcagggaggcccggcccc

SEQ ID NO: 19061 - RNA, 20 nt, Artificial Sequence
  Synthetic oligonucleotide: PDCD1-1519
aggcagggaggcccggcccc

SEQ ID NO: 19062 - RNA, 21 nt, Artificial Sequence
  Synthetic oligonucleotide: PDCD1-5575
caggcagggaggcccggcccc

SEQ ID NO: 19063 - RNA, 22 nt, Artificial Sequence
  Synthetic oligonucleotide: PDCD1-5576
ccaggcagggaggcccggcccc

SEQ ID NO: 19064 - RNA, 23 nt, Artificial Sequence
  Synthetic oligonucleotide: PDCD1-5577
cccaggcagggaggcccggcccc

SEQ ID NO: 19065 - RNA, 24 nt, Artificial Sequence
  Synthetic oligonucleotide: PDCD1-5578
ccccaggcagggaggcccggcccc

SEQ ID NO: 19066 - RNA, 18 nt, Artificial Sequence
  Synthetic oligonucleotide: PDCD1-5579
caccccucacugcagccc

SEQ ID NO: 19067 - RNA, 19 nt, Artificial Sequence
  Synthetic oligonucleotide: PDCD1-5580
ccaccccucacugcagccc

SEQ ID NO: 19068 - RNA, 20 nt, Artificial Sequence
  Synthetic oligonucleotide: PDCD1-4465
cccaccccucacugcagccc

SEQ ID NO: 19069 - RNA, 21 nt, Artificial Sequence
  Synthetic oligonucleotide: PDCD1-5581
gcccaccccucacugcagccc

SEQ ID NO: 19070 - RNA, 22 nt, Artificial Sequence
  Synthetic oligonucleotide: PDCD1-5582
agcccaccccucacugcagccc

SEQ ID NO: 19071 - RNA, 23 nt, Artificial Sequence
  Synthetic oligonucleotide: PDCD1-5583
gagcccaccccucacugcagccc

SEQ ID NO: 19072 - RNA, 24 nt, Artificial Sequence
  Synthetic oligonucleotide: PDCD1-5584
ugagcccaccccucacugcagccc

SEQ ID NO: 19073 - RNA, 18 nt, Artificial Sequence
  Synthetic oligonucleotide: PDCD1-5585
ggccuggcccuggcagcc

SEQ ID NO: 19074 - RNA, 19 nt, Artificial Sequence
  Synthetic oligonucleotide: PDCD1-5586
gggccuggcccuggcagcc

SEQ ID NO: 19075 - RNA, 20 nt, Artificial Sequence
  Synthetic oligonucleotide: PDCD1-1429
cgggccuggcccuggcagcc

SEQ ID NO: 19076 - RNA, 21 nt, Artificial Sequence
  Synthetic oligonucleotide: PDCD1-5587
gcgggccuggcccuggcagcc

SEQ ID NO: 19077 - RNA, 22 nt, Artificial Sequence
  Synthetic oligonucleotide: PDCD1-5588
ggcgggccuggcccuggcagcc

SEQ ID NO: 19078 - RNA, 23 nt, Artificial Sequence
  Synthetic oligonucleotide: PDCD1-5589
aggcgggccuggcccuggcagcc

SEQ ID NO: 19079 - RNA, 24 nt, Artificial Sequence
  Synthetic oligonucleotide: PDCD1-5590
gaggcgggccuggcccuggcagcc

SEQ ID NO: 19080 - RNA, 18 nt, Artificial Sequence
  Synthetic oligonucleotide: PDCD1-5591
ccaccccucacugcagcc

SEQ ID NO: 19081 - RNA, 19 nt, Artificial Sequence
  Synthetic oligonucleotide: PDCD1-5592
cccaccccucacugcagcc

SEQ ID NO: 19082 - RNA, 20 nt, Artificial Sequence
  Synthetic oligonucleotide: PDCD1-5593
gcccaccccucacugcagcc

SEQ ID NO: 19083 - RNA, 21 nt, Artificial Sequence
  Synthetic oligonucleotide: PDCD1-5594
agcccaccccucacugcagcc

SEQ ID NO: 19084 - RNA, 22 nt, Artificial Sequence
  Synthetic oligonucleotide: PDCD1-5595
gagcccaccccucacugcagcc

SEQ ID NO: 19085 - RNA, 23 nt, Artificial Sequence
  Synthetic oligonucleotide: PDCD1-5596
ugagcccaccccucacugcagcc

SEQ ID NO: 19086 - RNA, 24 nt, Artificial Sequence
  Synthetic oligonucleotide: PDCD1-5597
uugagcccaccccucacugcagcc

SEQ ID NO: 19087 - RNA, 18 nt, Artificial Sequence
  Synthetic oligonucleotide: PDCD1-5598
agcccaggaaccugagcc

SEQ ID NO: 19088 - RNA, 19 nt, Artificial Sequence
  Synthetic oligonucleotide: PDCD1-5599
cagcccaggaaccugagcc

SEQ ID NO: 19089 - RNA, 20 nt, Artificial Sequence
  Synthetic oligonucleotide: PDCD1-1526
gcagcccaggaaccugagcc

SEQ ID NO: 19090 - RNA, 21 nt, Artificial Sequence
  Synthetic oligonucleotide: PDCD1-5600
ugcagcccaggaaccugagcc

SEQ ID NO: 19091 - RNA, 22 nt, Artificial Sequence
  Synthetic oligonucleotide: PDCD1-5601
cugcagcccaggaaccugagcc

SEQ ID NO: 19092 - RNA, 23 nt, Artificial Sequence
  Synthetic oligonucleotide: PDCD1-5602
acugcagcccaggaaccugagcc

SEQ ID NO: 19093 - RNA, 24 nt, Artificial Sequence
  Synthetic oligonucleotide: PDCD1-5603
cacugcagcccaggaaccugagcc

SEQ ID NO: 19094 - RNA, 18 nt, Artificial Sequence
  Synthetic oligonucleotide: PDCD1-5604
acagaggaggaaggggcc

SEQ ID NO: 19095 - RNA, 19 nt, Artificial Sequence
  Synthetic oligonucleotide: PDCD1-5605
cacagaggaggaaggggcc

SEQ ID NO: 19096 - RNA, 20 nt, Artificial Sequence
  Synthetic oligonucleotide: PDCD1-1482
acacagaggaggaaggggcc

SEQ ID NO: 19097 - RNA, 21 nt, Artificial Sequence
  Synthetic oligonucleotide: PDCD1-5606
gacacagaggaggaaggggcc

SEQ ID NO: 19098 - RNA, 22 nt, Artificial Sequence
  Synthetic oligonucleotide: PDCD1-5607
agacacagaggaggaaggggcc

SEQ ID NO: 19099 - RNA, 23 nt, Artificial Sequence
  Synthetic oligonucleotide: PDCD1-5608
gagacacagaggaggaaggggcc

SEQ ID NO: 19100 - RNA, 24 nt, Artificial Sequence
  Synthetic oligonucleotide: PDCD1-5609
agagacacagaggaggaaggggcc

SEQ ID NO: 19101 - RNA, 18 nt, Artificial Sequence
  Synthetic oligonucleotide: PDCD1-5610
ggguagggcgugggggcc

SEQ ID NO: 19102 - RNA, 19 nt, Artificial Sequence
  Synthetic oligonucleotide: PDCD1-5611
gggguagggcgugggggcc

SEQ ID NO: 19103 - RNA, 20 nt, Artificial Sequence
  Synthetic oligonucleotide: PDCD1-1471
cgggguagggcgugggggcc

SEQ ID NO: 19104 - RNA, 21 nt, Artificial Sequence
  Synthetic oligonucleotide: PDCD1-5612
acgggguagggcgugggggcc

SEQ ID NO: 19105 - RNA, 22 nt, Artificial Sequence
  Synthetic oligonucleotide: PDCD1-5613
cacgggguagggcgugggggcc

SEQ ID NO: 19106 - RNA, 23 nt, Artificial Sequence
  Synthetic oligonucleotide: PDCD1-5614
ccacgggguagggcgugggggcc

SEQ ID NO: 19107 - RNA, 24 nt, Artificial Sequence
  Synthetic oligonucleotide: PDCD1-5615
cccacgggguagggcgugggggcc

SEQ ID NO: 19108 - RNA, 18 nt, Artificial Sequence
  Synthetic oligonucleotide: PDCD1-5616
gggcagccgggaggcucc

SEQ ID NO: 19109 - RNA, 19 nt, Artificial Sequence
  Synthetic oligonucleotide: PDCD1-5617
ugggcagccgggaggcucc

SEQ ID NO: 19110 - RNA, 20 nt, Artificial Sequence
  Synthetic oligonucleotide: PDCD1-1910
gugggcagccgggaggcucc

SEQ ID NO: 19111 - RNA, 21 nt, Artificial Sequence
  Synthetic oligonucleotide: PDCD1-5618
ugugggcagccgggaggcucc

SEQ ID NO: 19112 - RNA, 22 nt, Artificial Sequence
  Synthetic oligonucleotide: PDCD1-5619
cugugggcagccgggaggcucc

SEQ ID NO: 19113 - RNA, 23 nt, Artificial Sequence
  Synthetic oligonucleotide: PDCD1-5620
gcugugggcagccgggaggcucc

SEQ ID NO: 19114 - RNA, 24 nt, Artificial Sequence
  Synthetic oligonucleotide: PDCD1-5621
ggcugugggcagccgggaggcucc

SEQ ID NO: 19115 - RNA, 18 nt, Artificial Sequence
  Synthetic oligonucleotide: PDCD1-5622
uccccucucagccggucc

SEQ ID NO: 19116 - RNA, 19 nt, Artificial Sequence
  Synthetic oligonucleotide: PDCD1-5623
guccccucucagccggucc

SEQ ID NO: 19117 - RNA, 20 nt, Artificial Sequence
  Synthetic oligonucleotide: PDCD1-1407
uguccccucucagccggucc

SEQ ID NO: 19118 - RNA, 21 nt, Artificial Sequence
  Synthetic oligonucleotide: PDCD1-5624
cuguccccucucagccggucc

SEQ ID NO: 19119 - RNA, 22 nt, Artificial Sequence
  Synthetic oligonucleotide: PDCD1-5625
ucuguccccucucagccggucc

SEQ ID NO: 19120 - RNA, 23 nt, Artificial Sequence
  Synthetic oligonucleotide: PDCD1-5626
cucuguccccucucagccggucc

SEQ ID NO: 19121 - RNA, 24 nt, Artificial Sequence
  Synthetic oligonucleotide: PDCD1-5627
ccucuguccccucucagccggucc

SEQ ID NO: 19122 - RNA, 18 nt, Artificial Sequence
  Synthetic oligonucleotide: PDCD1-5628
cuggcagcccaggggucc

SEQ ID NO: 19123 - RNA, 19 nt, Artificial Sequence
  Synthetic oligonucleotide: PDCD1-5629
ccuggcagcccaggggucc

SEQ ID NO: 19124 - RNA, 20 nt, Artificial Sequence
  Synthetic oligonucleotide: PDCD1-2185
cccuggcagcccaggggucc

SEQ ID NO: 19125 - RNA, 21 nt, Artificial Sequence
  Synthetic oligonucleotide: PDCD1-5630
gcccuggcagcccaggggucc

SEQ ID NO: 19126 - RNA, 22 nt, Artificial Sequence
  Synthetic oligonucleotide: PDCD1-5631
ggcccuggcagcccaggggucc

SEQ ID NO: 19127 - RNA, 23 nt, Artificial Sequence
  Synthetic oligonucleotide: PDCD1-5632
uggcccuggcagcccaggggucc

SEQ ID NO: 19128 - RNA, 24 nt, Artificial Sequence
  Synthetic oligonucleotide: PDCD1-5633
cuggcccuggcagcccaggggucc

SEQ ID NO: 19129 - RNA, 18 nt, Artificial Sequence
  Synthetic oligonucleotide: PDCD1-5634
gucggcggucaggugucc

SEQ ID NO: 19130 - RNA, 19 nt, Artificial Sequence
  Synthetic oligonucleotide: PDCD1-5635
ggucggcggucaggugucc

SEQ ID NO: 19131 - RNA, 20 nt, Artificial Sequence
  Synthetic oligonucleotide: PDCD1-1442
gggucggcggucaggugucc

SEQ ID NO: 19132 - RNA, 21 nt, Artificial Sequence
  Synthetic oligonucleotide: PDCD1-5636
ggggucggcggucaggugucc

SEQ ID NO: 19133 - RNA, 22 nt, Artificial Sequence
  Synthetic oligonucleotide: PDCD1-5637
uggggucggcggucaggugucc

SEQ ID NO: 19134 - RNA, 23 nt, Artificial Sequence
  Synthetic oligonucleotide: PDCD1-5638
guggggucggcggucaggugucc

SEQ ID NO: 19135 - RNA, 24 nt, Artificial Sequence
  Synthetic oligonucleotide: PDCD1-5639
gguggggucggcggucaggugucc

SEQ ID NO: 19136 - RNA, 18 nt, Artificial Sequence
  Synthetic oligonucleotide: PDCD1-5640
agccucaggaggggcagc

SEQ ID NO: 19137 - RNA, 19 nt, Artificial Sequence
  Synthetic oligonucleotide: PDCD1-5641
cagccucaggaggggcagc

SEQ ID NO: 19138 - RNA, 20 nt, Artificial Sequence
  Synthetic oligonucleotide: PDCD1-1497
gcagccucaggaggggcagc

SEQ ID NO: 19139 - RNA, 21 nt, Artificial Sequence
  Synthetic oligonucleotide: PDCD1-5642
ggcagccucaggaggggcagc

SEQ ID NO: 19140 - RNA, 22 nt, Artificial Sequence
  Synthetic oligonucleotide: PDCD1-5643
cggcagccucaggaggggcagc

SEQ ID NO: 19141 - RNA, 23 nt, Artificial Sequence
  Synthetic oligonucleotide: PDCD1-5644
ccggcagccucaggaggggcagc

SEQ ID NO: 19142 - RNA, 24 nt, Artificial Sequence
  Synthetic oligonucleotide: PDCD1-5645
cccggcagccucaggaggggcagc

SEQ ID NO: 19143 - RNA, 18 nt, Artificial Sequence
  Synthetic oligonucleotide: PDCD1-5646
uguguggcuuugggcagc

SEQ ID NO: 19144 - RNA, 19 nt, Artificial Sequence
  Synthetic oligonucleotide: PDCD1-5647
cuguguggcuuugggcagc

SEQ ID NO: 19145 - RNA, 20 nt, Artificial Sequence
  Synthetic oligonucleotide: PDCD1-1412
gcuguguggcuuugggcagc

SEQ ID NO: 19146 - RNA, 21 nt, Artificial Sequence
  Synthetic oligonucleotide: PDCD1-5648
agcuguguggcuuugggcagc

SEQ ID NO: 19147 - RNA, 22 nt, Artificial Sequence
  Synthetic oligonucleotide: PDCD1-5649
gagcuguguggcuuugggcagc

SEQ ID NO: 19148 - RNA, 23 nt, Artificial Sequence
  Synthetic oligonucleotide: PDCD1-5650
ugagcuguguggcuuugggcagc

SEQ ID NO: 19149 - RNA, 24 nt, Artificial Sequence
  Synthetic oligonucleotide: PDCD1-5651
cugagcuguguggcuuugggcagc

SEQ ID NO: 19150 - RNA, 18 nt, Artificial Sequence
  Synthetic oligonucleotide: PDCD1-5652
ggucaggugucccagagc

SEQ ID NO: 19151 - RNA, 19 nt, Artificial Sequence
  Synthetic oligonucleotide: PDCD1-5653
cggucaggugucccagagc

SEQ ID NO: 19152 - RNA, 20 nt, Artificial Sequence
  Synthetic oligonucleotide: PDCD1-1441
gcggucaggugucccagagc

SEQ ID NO: 19153 - RNA, 21 nt, Artificial Sequence
  Synthetic oligonucleotide: PDCD1-5654
ggcggucaggugucccagagc

SEQ ID NO: 19154 - RNA, 22 nt, Artificial Sequence
  Synthetic oligonucleotide: PDCD1-5655
cggcggucaggugucccagagc

SEQ ID NO: 19155 - RNA, 23 nt, Artificial Sequence
  Synthetic oligonucleotide: PDCD1-5656
ucggcggucaggugucccagagc

SEQ ID NO: 19156 - RNA, 24 nt, Artificial Sequence
  Synthetic oligonucleotide: PDCD1-5657
gucggcggucaggugucccagagc

SEQ ID NO: 19157 - RNA, 18 nt, Artificial Sequence
  Synthetic oligonucleotide: PDCD1-5658
gcccaggggucccggagc

SEQ ID NO: 19158 - RNA, 19 nt, Artificial Sequence
  Synthetic oligonucleotide: PDCD1-5659
agcccaggggucccggagc

SEQ ID NO: 19159 - RNA, 20 nt, Artificial Sequence
  Synthetic oligonucleotide: PDCD1-1424
cagcccaggggucccggagc

SEQ ID NO: 19160 - RNA, 21 nt, Artificial Sequence
  Synthetic oligonucleotide: PDCD1-5660
gcagcccaggggucccggagc

SEQ ID NO: 19161 - RNA, 22 nt, Artificial Sequence
  Synthetic oligonucleotide: PDCD1-5661
ggcagcccaggggucccggagc

SEQ ID NO: 19162 - RNA, 23 nt, Artificial Sequence
  Synthetic oligonucleotide: PDCD1-5662
uggcagcccaggggucccggagc

SEQ ID NO: 19163 - RNA, 24 nt, Artificial Sequence
  Synthetic oligonucleotide: PDCD1-5663
cuggcagcccaggggucccggagc

SEQ ID NO: 19164 - RNA, 18 nt, Artificial Sequence
  Synthetic oligonucleotide: PDCD1-5664
ggaagagggggcgggagc

SEQ ID NO: 19165 - RNA, 19 nt, Artificial Sequence
  Synthetic oligonucleotide: PDCD1-5665
aggaagagggggcgggagc

SEQ ID NO: 19166 - RNA, 20 nt, Artificial Sequence
  Synthetic oligonucleotide: PDCD1-1458
gaggaagagggggcgggagc

SEQ ID NO: 19167 - RNA, 21 nt, Artificial Sequence
  Synthetic oligonucleotide: PDCD1-5666
ggaggaagagggggcgggagc

SEQ ID NO: 19168 - RNA, 22 nt, Artificial Sequence
  Synthetic oligonucleotide: PDCD1-5667
uggaggaagagggggcgggagc

SEQ ID NO: 19169 - RNA, 23 nt, Artificial Sequence
  Synthetic oligonucleotide: PDCD1-5668
guggaggaagagggggcgggagc

SEQ ID NO: 19170 - RNA, 24 nt, Artificial Sequence
  Synthetic oligonucleotide: PDCD1-5669
uguggaggaagagggggcgggagc

SEQ ID NO: 19171 - RNA, 18 nt, Artificial Sequence
  Synthetic oligonucleotide: PDCD1-5670
gaggaaggggcccugagc

SEQ ID NO: 19172 - RNA, 19 nt, Artificial Sequence
  Synthetic oligonucleotide: PDCD1-5671
ggaggaaggggcccugagc

SEQ ID NO: 19173 - RNA, 20 nt, Artificial Sequence
  Synthetic oligonucleotide: PDCD1-2352
aggaggaaggggcccugagc

SEQ ID NO: 19174 - RNA, 21 nt, Artificial Sequence
  Synthetic oligonucleotide: PDCD1-5672
gaggaggaaggggcccugagc

SEQ ID NO: 19175 - RNA, 22 nt, Artificial Sequence
  Synthetic oligonucleotide: PDCD1-5673
agaggaggaaggggcccugagc

SEQ ID NO: 19176 - RNA, 23 nt, Artificial Sequence
  Synthetic oligonucleotide: PDCD1-5674
cagaggaggaaggggcccugagc

SEQ ID NO: 19177 - RNA, 24 nt, Artificial Sequence
  Synthetic oligonucleotide: PDCD1-5675
acagaggaggaaggggcccugagc

SEQ ID NO: 19178 - RNA, 18 nt, Artificial Sequence
  Synthetic oligonucleotide: PDCD1-5676
ccuuccgcucaccuccgc

SEQ ID NO: 19179 - RNA, 19 nt, Artificial Sequence
  Synthetic oligonucleotide: PDCD1-5677
cccuuccgcucaccuccgc

SEQ ID NO: 19180 - RNA, 20 nt, Artificial Sequence
  Synthetic oligonucleotide: PDCD1-1453
ucccuuccgcucaccuccgc

SEQ ID NO: 19181 - RNA, 21 nt, Artificial Sequence
  Synthetic oligonucleotide: PDCD1-5678
uucccuuccgcucaccuccgc

SEQ ID NO: 19182 - RNA, 22 nt, Artificial Sequence
  Synthetic oligonucleotide: PDCD1-5679
uuucccuuccgcucaccuccgc

SEQ ID NO: 19183 - RNA, 23 nt, Artificial Sequence
  Synthetic oligonucleotide: PDCD1-5680
guuucccuuccgcucaccuccgc

SEQ ID NO: 19184 - RNA, 24 nt, Artificial Sequence
  Synthetic oligonucleotide: PDCD1-5681
aguuucccuuccgcucaccuccgc

SEQ ID NO: 19185 - RNA, 18 nt, Artificial Sequence
  Synthetic oligonucleotide: PDCD1-5682
cacccaccuuccccaggc

SEQ ID NO: 19186 - RNA, 19 nt, Artificial Sequence
  Synthetic oligonucleotide: PDCD1-5683
ccacccaccuuccccaggc

SEQ ID NO: 19187 - RNA, 20 nt, Artificial Sequence
  Synthetic oligonucleotide: PDCD1-2317
gccacccaccuuccccaggc

SEQ ID NO: 19188 - RNA, 21 nt, Artificial Sequence
  Synthetic oligonucleotide: PDCD1-5684
ggccacccaccuuccccaggc

SEQ ID NO: 19189 - RNA, 22 nt, Artificial Sequence
  Synthetic oligonucleotide: PDCD1-5685
gggccacccaccuuccccaggc

SEQ ID NO: 19190 - RNA, 23 nt, Artificial Sequence
  Synthetic oligonucleotide: PDCD1-5686
ggggccacccaccuuccccaggc

SEQ ID NO: 19191 - RNA, 24 nt, Artificial Sequence
  Synthetic oligonucleotide: PDCD1-5687
gggggccacccaccuuccccaggc

SEQ ID NO: 19192 - RNA, 18 nt, Artificial Sequence
  Synthetic oligonucleotide: PDCD1-5688
acccccacgggguagggc

SEQ ID NO: 19193 - RNA, 19 nt, Artificial Sequence
  Synthetic oligonucleotide: PDCD1-5689
gacccccacgggguagggc

SEQ ID NO: 19194 - RNA, 20 nt, Artificial Sequence
  Synthetic oligonucleotide: PDCD1-1474
agacccccacgggguagggc

SEQ ID NO: 19195 - RNA, 21 nt, Artificial Sequence
  Synthetic oligonucleotide: PDCD1-5690
gagacccccacgggguagggc

SEQ ID NO: 19196 - RNA, 22 nt, Artificial Sequence
  Synthetic oligonucleotide: PDCD1-5691
ggagacccccacgggguagggc

SEQ ID NO: 19197 - RNA, 23 nt, Artificial Sequence
  Synthetic oligonucleotide: PDCD1-5692
gggagacccccacgggguagggc

SEQ ID NO: 19198 - RNA, 24 nt, Artificial Sequence
  Synthetic oligonucleotide: PDCD1-5693
ggggagacccccacgggguagggc

SEQ ID NO: 19199 - RNA, 18 nt, Artificial Sequence
  Synthetic oligonucleotide: PDCD1-5694
uguggaggaagagggggc

SEQ ID NO: 19200 - RNA, 19 nt, Artificial Sequence
  Synthetic oligonucleotide: PDCD1-5695
auguggaggaagagggggc

SEQ ID NO: 19201 - RNA, 20 nt, Artificial Sequence
  Synthetic oligonucleotide: PDCD1-2374
gauguggaggaagagggggc

SEQ ID NO: 19202 - RNA, 21 nt, Artificial Sequence
  Synthetic oligonucleotide: PDCD1-5696
ggauguggaggaagagggggc

SEQ ID NO: 19203 - RNA, 22 nt, Artificial Sequence
  Synthetic oligonucleotide: PDCD1-5697
uggauguggaggaagagggggc

SEQ ID NO: 19204 - RNA, 23 nt, Artificial Sequence
  Synthetic oligonucleotide: PDCD1-5698
guggauguggaggaagagggggc

SEQ ID NO: 19205 - RNA, 24 nt, Artificial Sequence
  Synthetic oligonucleotide: PDCD1-5699
cguggauguggaggaagagggggc

SEQ ID NO: 19206 - RNA, 18 nt, Artificial Sequence
  Synthetic oligonucleotide: PDCD1-5700
cccccacccggcagccuc

SEQ ID NO: 19207 - RNA, 19 nt, Artificial Sequence
  Synthetic oligonucleotide: PDCD1-5701
gcccccacccggcagccuc

SEQ ID NO: 19208 - RNA, 20 nt, Artificial Sequence
  Synthetic oligonucleotide: PDCD1-2337
ugcccccacccggcagccuc

SEQ ID NO: 19209 - RNA, 21 nt, Artificial Sequence
  Synthetic oligonucleotide: PDCD1-5702
cugcccccacccggcagccuc

SEQ ID NO: 19210 - RNA, 22 nt, Artificial Sequence
  Synthetic oligonucleotide: PDCD1-5703
ccugcccccacccggcagccuc

SEQ ID NO: 19211 - RNA, 23 nt, Artificial Sequence
  Synthetic oligonucleotide: PDCD1-5704
gccugcccccacccggcagccuc

SEQ ID NO: 19212 - RNA, 24 nt, Artificial Sequence
  Synthetic oligonucleotide: PDCD1-5705
ggccugcccccacccggcagccuc

SEQ ID NO: 19213 - RNA, 18 nt, Artificial Sequence
  Synthetic oligonucleotide: PDCD1-5706
caaguccccucuuugcuc

SEQ ID NO: 19214 - RNA, 19 nt, Artificial Sequence
  Synthetic oligonucleotide: PDCD1-5707
ccaaguccccucuuugcuc

SEQ ID NO: 19215 - RNA, 20 nt, Artificial Sequence
  Synthetic oligonucleotide: PDCD1-1409
cccaaguccccucuuugcuc

SEQ ID NO: 19216 - RNA, 21 nt, Artificial Sequence
  Synthetic oligonucleotide: PDCD1-5708
gcccaaguccccucuuugcuc

SEQ ID NO: 19217 - RNA, 22 nt, Artificial Sequence
  Synthetic oligonucleotide: PDCD1-5709
ggcccaaguccccucuuugcuc

SEQ ID NO: 19218 - RNA, 23 nt, Artificial Sequence
  Synthetic oligonucleotide: PDCD1-5710
uggcccaaguccccucuuugcuc

SEQ ID NO: 19219 - RNA, 24 nt, Artificial Sequence
  Synthetic oligonucleotide: PDCD1-5711
cuggcccaaguccccucuuugcuc

SEQ ID NO: 19220 - RNA, 18 nt, Artificial Sequence
  Synthetic oligonucleotide: PDCD1-5712
cucagucccuggcagguc

SEQ ID NO: 19221 - RNA, 19 nt, Artificial Sequence
  Synthetic oligonucleotide: PDCD1-5713
ccucagucccuggcagguc

SEQ ID NO: 19222 - RNA, 20 nt, Artificial Sequence
  Synthetic oligonucleotide: PDCD1-2173
cccucagucccuggcagguc

SEQ ID NO: 19223 - RNA, 21 nt, Artificial Sequence
  Synthetic oligonucleotide: PDCD1-5714
acccucagucccuggcagguc

SEQ ID NO: 19224 - RNA, 22 nt, Artificial Sequence
  Synthetic oligonucleotide: PDCD1-5715
cacccucagucccuggcagguc

SEQ ID NO: 19225 - RNA, 23 nt, Artificial Sequence
  Synthetic oligonucleotide: PDCD1-5716
ccacccucagucccuggcagguc

SEQ ID NO: 19226 - RNA, 24 nt, Artificial Sequence
  Synthetic oligonucleotide: PDCD1-5717
uccacccucagucccuggcagguc

SEQ ID NO: 19227 - RNA, 19 nt, Artificial Sequence
  Synthetic oligonucleotide: PDCD1-5718
ucucagucccuggcagguc

SEQ ID NO: 19228 - RNA, 20 nt, Artificial Sequence
  Synthetic oligonucleotide: PDCD1-2195
cucucagucccuggcagguc

SEQ ID NO: 19229 - RNA, 21 nt, Artificial Sequence
  Synthetic oligonucleotide: PDCD1-5719
acucucagucccuggcagguc

SEQ ID NO: 19230 - RNA, 22 nt, Artificial Sequence
  Synthetic oligonucleotide: PDCD1-5720
cacucucagucccuggcagguc

SEQ ID NO: 19231 - RNA, 23 nt, Artificial Sequence
  Synthetic oligonucleotide: PDCD1-5721
ucacucucagucccuggcagguc

SEQ ID NO: 19232 - RNA, 24 nt, Artificial Sequence
  Synthetic oligonucleotide: PDCD1-5722
uucacucucagucccuggcagguc

SEQ ID NO: 19233 - RNA, 18 nt, Artificial Sequence
  Synthetic oligonucleotide: PDCD1-5723
ccuggcagcccagggguc

SEQ ID NO: 19234 - RNA, 19 nt, Artificial Sequence
  Synthetic oligonucleotide: PDCD1-5724
cccuggcagcccagggguc

SEQ ID NO: 19235 - RNA, 20 nt, Artificial Sequence
  Synthetic oligonucleotide: PDCD1-1427
gcccuggcagcccagggguc

SEQ ID NO: 19236 - RNA, 21 nt, Artificial Sequence
  Synthetic oligonucleotide: PDCD1-5725
ggcccuggcagcccagggguc

SEQ ID NO: 19237 - RNA, 22 nt, Artificial Sequence
  Synthetic oligonucleotide: PDCD1-5726
uggcccuggcagcccagggguc

SEQ ID NO: 19238 - RNA, 23 nt, Artificial Sequence
  Synthetic oligonucleotide: PDCD1-5727
cuggcccuggcagcccagggguc

SEQ ID NO: 19239 - RNA, 24 nt, Artificial Sequence
  Synthetic oligonucleotide: PDCD1-5728
ccuggcccuggcagcccagggguc

SEQ ID NO: 19240 - RNA, 18 nt, Artificial Sequence
  Synthetic oligonucleotide: PDCD1-5729
gucccagagccagggguc

SEQ ID NO: 19241 - RNA, 19 nt, Artificial Sequence
  Synthetic oligonucleotide: PDCD1-5730
ugucccagagccagggguc

SEQ ID NO: 19242 - RNA, 20 nt, Artificial Sequence
  Synthetic oligonucleotide: PDCD1-2167
gugucccagagccagggguc

SEQ ID NO: 19243 - RNA, 21 nt, Artificial Sequence
  Synthetic oligonucleotide: PDCD1-5731
ggugucccagagccagggguc

SEQ ID NO: 19244 - RNA, 22 nt, Artificial Sequence
  Synthetic oligonucleotide: PDCD1-5732
aggugucccagagccagggguc

SEQ ID NO: 19245 - RNA, 23 nt, Artificial Sequence
  Synthetic oligonucleotide: PDCD1-5733
caggugucccagagccagggguc

SEQ ID NO: 19246 - RNA, 24 nt, Artificial Sequence
  Synthetic oligonucleotide: PDCD1-5734
ucaggugucccagagccagggguc

SEQ ID NO: 19247 - RNA, 18 nt, Artificial Sequence
  Synthetic oligonucleotide: PDCD1-5735
gucccggagcgagggguc

SEQ ID NO: 19248 - RNA, 19 nt, Artificial Sequence
  Synthetic oligonucleotide: PDCD1-5736
ggucccggagcgagggguc

SEQ ID NO: 19249 - RNA, 20 nt, Artificial Sequence
  Synthetic oligonucleotide: PDCD1-2189
gggucccggagcgagggguc

SEQ ID NO: 19250 - RNA, 21 nt, Artificial Sequence
  Synthetic oligonucleotide: PDCD1-5737
ggggucccggagcgagggguc

SEQ ID NO: 19251 - RNA, 22 nt, Artificial Sequence
  Synthetic oligonucleotide: PDCD1-5738
aggggucccggagcgagggguc

SEQ ID NO: 19252 - RNA, 23 nt, Artificial Sequence
  Synthetic oligonucleotide: PDCD1-5739
caggggucccggagcgagggguc

SEQ ID NO: 19253 - RNA, 24 nt, Artificial Sequence
  Synthetic oligonucleotide: PDCD1-5740
ccaggggucccggagcgagggguc

SEQ ID NO: 19254 - RNA, 18 nt, Artificial Sequence
  Synthetic oligonucleotide: PDCD1-5741
acguggauguggaggaag

SEQ ID NO: 19255 - RNA, 19 nt, Artificial Sequence
  Synthetic oligonucleotide: PDCD1-5742
cacguggauguggaggaag

SEQ ID NO: 19256 - RNA, 20 nt, Artificial Sequence
  Synthetic oligonucleotide: PDCD1-2369
ccacguggauguggaggaag

SEQ ID NO: 19257 - RNA, 21 nt, Artificial Sequence
  Synthetic oligonucleotide: PDCD1-5743
cccacguggauguggaggaag

SEQ ID NO: 19258 - RNA, 22 nt, Artificial Sequence
  Synthetic oligonucleotide: PDCD1-5744
gcccacguggauguggaggaag

SEQ ID NO: 19259 - RNA, 23 nt, Artificial Sequence
  Synthetic oligonucleotide: PDCD1-5745
cgcccacguggauguggaggaag

SEQ ID NO: 19260 - RNA, 24 nt, Artificial Sequence
  Synthetic oligonucleotide: PDCD1-5746
ucgcccacguggauguggaggaag

SEQ ID NO: 19261 - RNA, 18 nt, Artificial Sequence
  Synthetic oligonucleotide: PDCD1-5747
cagugagcagagacacag

SEQ ID NO: 19262 - RNA, 19 nt, Artificial Sequence
  Synthetic oligonucleotide: PDCD1-5748
gcagugagcagagacacag

SEQ ID NO: 19263 - RNA, 20 nt, Artificial Sequence
  Synthetic oligonucleotide: PDCD1-2347
agcagugagcagagacacag

SEQ ID NO: 19264 - RNA, 21 nt, Artificial Sequence
  Synthetic oligonucleotide: PDCD1-5749
cagcagugagcagagacacag

SEQ ID NO: 19265 - RNA, 22 nt, Artificial Sequence
  Synthetic oligonucleotide: PDCD1-5750
acagcagugagcagagacacag

SEQ ID NO: 19266 - RNA, 23 nt, Artificial Sequence
  Synthetic oligonucleotide: PDCD1-5751
cacagcagugagcagagacacag

SEQ ID NO: 19267 - RNA, 24 nt, Artificial Sequence
  Synthetic oligonucleotide: PDCD1-5752
ccacagcagugagcagagacacag

SEQ ID NO: 19268 - RNA, 18 nt, Artificial Sequence
  Synthetic oligonucleotide: PDCD1-5753
ccaggaaccugagcccag

SEQ ID NO: 19269 - RNA, 19 nt, Artificial Sequence
  Synthetic oligonucleotide: PDCD1-5754
cccaggaaccugagcccag

SEQ ID NO: 19270 - RNA, 20 nt, Artificial Sequence
  Synthetic oligonucleotide: PDCD1-2312
gcccaggaaccugagcccag

SEQ ID NO: 19271 - RNA, 21 nt, Artificial Sequence
  Synthetic oligonucleotide: PDCD1-5755
agcccaggaaccugagcccag

SEQ ID NO: 19272 - RNA, 22 nt, Artificial Sequence
  Synthetic oligonucleotide: PDCD1-5756
cagcccaggaaccugagcccag

SEQ ID NO: 19273 - RNA, 23 nt, Artificial Sequence
  Synthetic oligonucleotide: PDCD1-5757
gcagcccaggaaccugagcccag

SEQ ID NO: 19274 - RNA, 24 nt, Artificial Sequence
  Synthetic oligonucleotide: PDCD1-5758
ugcagcccaggaaccugagcccag

SEQ ID NO: 19275 - RNA, 18 nt, Artificial Sequence
  Synthetic oligonucleotide: PDCD1-5759
ucaccuccgccugagcag

SEQ ID NO: 19276 - RNA, 19 nt, Artificial Sequence
  Synthetic oligonucleotide: PDCD1-5760
cucaccuccgccugagcag

SEQ ID NO: 19277 - RNA, 20 nt, Artificial Sequence
  Synthetic oligonucleotide: PDCD1-2382
gcucaccuccgccugagcag

SEQ ID NO: 19278 - RNA, 21 nt, Artificial Sequence
  Synthetic oligonucleotide: PDCD1-5761
cgcucaccuccgccugagcag

SEQ ID NO: 19279 - RNA, 22 nt, Artificial Sequence
  Synthetic oligonucleotide: PDCD1-5762
ccgcucaccuccgccugagcag

SEQ ID NO: 19280 - RNA, 23 nt, Artificial Sequence
  Synthetic oligonucleotide: PDCD1-5763
uccgcucaccuccgccugagcag

SEQ ID NO: 19281 - RNA, 24 nt, Artificial Sequence
  Synthetic oligonucleotide: PDCD1-5764
uuccgcucaccuccgccugagcag

SEQ ID NO: 19282 - RNA, 18 nt, Artificial Sequence
  Synthetic oligonucleotide: PDCD1-5765
cccacccggcagccucag

SEQ ID NO: 19283 - RNA, 19 nt, Artificial Sequence
  Synthetic oligonucleotide: PDCD1-5766
ccccacccggcagccucag

SEQ ID NO: 19284 - RNA, 20 nt, Artificial Sequence
  Synthetic oligonucleotide: PDCD1-1499
cccccacccggcagccucag

SEQ ID NO: 19285 - RNA, 21 nt, Artificial Sequence
  Synthetic oligonucleotide: PDCD1-5767
gcccccacccggcagccucag

SEQ ID NO: 19286 - RNA, 22 nt, Artificial Sequence
  Synthetic oligonucleotide: PDCD1-5768
ugcccccacccggcagccucag

SEQ ID NO: 19287 - RNA, 23 nt, Artificial Sequence
  Synthetic oligonucleotide: PDCD1-5769
cugcccccacccggcagccucag

SEQ ID NO: 19288 - RNA, 24 nt, Artificial Sequence
  Synthetic oligonucleotide: PDCD1-5770
ccugcccccacccggcagccucag

SEQ ID NO: 19289 - RNA, 18 nt, Artificial Sequence
  Synthetic oligonucleotide: PDCD1-5771
gugagcagagacacagag

SEQ ID NO: 19290 - RNA, 19 nt, Artificial Sequence
  Synthetic oligonucleotide: PDCD1-5772
agugagcagagacacagag

SEQ ID NO: 19291 - RNA, 20 nt, Artificial Sequence
  Synthetic oligonucleotide: PDCD1-1486
cagugagcagagacacagag

SEQ ID NO: 19292 - RNA, 21 nt, Artificial Sequence
  Synthetic oligonucleotide: PDCD1-5773
gcagugagcagagacacagag

SEQ ID NO: 19293 - RNA, 22 nt, Artificial Sequence
  Synthetic oligonucleotide: PDCD1-5774
agcagugagcagagacacagag

SEQ ID NO: 19294 - RNA, 23 nt, Artificial Sequence
  Synthetic oligonucleotide: PDCD1-5775
cagcagugagcagagacacagag

SEQ ID NO: 19295 - RNA, 24 nt, Artificial Sequence
  Synthetic oligonucleotide: PDCD1-5776
acagcagugagcagagacacagag

SEQ ID NO: 19296 - RNA, 18 nt, Artificial Sequence
  Synthetic oligonucleotide: PDCD1-5777
ggggggaugggggaggag

SEQ ID NO: 19297 - RNA, 19 nt, Artificial Sequence
  Synthetic oligonucleotide: PDCD1-5778
gggggggaugggggaggag

SEQ ID NO: 19298 - RNA, 20 nt, Artificial Sequence
  Synthetic oligonucleotide: PDCD1-1502
ugggggggaugggggaggag

SEQ ID NO: 19299 - RNA, 21 nt, Artificial Sequence
  Synthetic oligonucleotide: PDCD1-5779
augggggggaugggggaggag

SEQ ID NO: 19300 - RNA, 22 nt, Artificial Sequence
  Synthetic oligonucleotide: PDCD1-5780
gaugggggggaugggggaggag

SEQ ID NO: 19301 - RNA, 23 nt, Artificial Sequence
  Synthetic oligonucleotide: PDCD1-5781
agaugggggggaugggggaggag

SEQ ID NO: 19302 - RNA, 24 nt, Artificial Sequence
  Synthetic oligonucleotide: PDCD1-5782
gagaugggggggaugggggaggag

SEQ ID NO: 19303 - RNA, 18 nt, Artificial Sequence
  Synthetic oligonucleotide: PDCD1-5783
ggcccggcccccagggag

SEQ ID NO: 19304 - RNA, 19 nt, Artificial Sequence
  Synthetic oligonucleotide: PDCD1-5784
aggcccggcccccagggag

SEQ ID NO: 19305 - RNA, 20 nt, Artificial Sequence
  Synthetic oligonucleotide: PDCD1-1516
gaggcccggcccccagggag

SEQ ID NO: 19306 - RNA, 21 nt, Artificial Sequence
  Synthetic oligonucleotide: PDCD1-5785
ggaggcccggcccccagggag

SEQ ID NO: 19307 - RNA, 22 nt, Artificial Sequence
  Synthetic oligonucleotide: PDCD1-5786
gggaggcccggcccccagggag

SEQ ID NO: 19308 - RNA, 23 nt, Artificial Sequence
  Synthetic oligonucleotide: PDCD1-5787
agggaggcccggcccccagggag

SEQ ID NO: 19309 - RNA, 24 nt, Artificial Sequence
  Synthetic oligonucleotide: PDCD1-5788
cagggaggcccggcccccagggag

SEQ ID NO: 19310 - RNA, 18 nt, Artificial Sequence
  Synthetic oligonucleotide: PDCD1-5789
augggggggaugggggag

SEQ ID NO: 19311 - RNA, 19 nt, Artificial Sequence
  Synthetic oligonucleotide: PDCD1-5790
gaugggggggaugggggag

SEQ ID NO: 19312 - RNA, 20 nt, Artificial Sequence
  Synthetic oligonucleotide: PDCD1-1503
agaugggggggaugggggag

SEQ ID NO: 19313 - RNA, 21 nt, Artificial Sequence
  Synthetic oligonucleotide: PDCD1-5791
gagaugggggggaugggggag

SEQ ID NO: 19314 - RNA, 22 nt, Artificial Sequence
  Synthetic oligonucleotide: PDCD1-5792
ggagaugggggggaugggggag

SEQ ID NO: 19315 - RNA, 23 nt, Artificial Sequence
  Synthetic oligonucleotide: PDCD1-5793
gggagaugggggggaugggggag

SEQ ID NO: 19316 - RNA, 24 nt, Artificial Sequence
  Synthetic oligonucleotide: PDCD1-5794
agggagaugggggggaugggggag

SEQ ID NO: 19317 - RNA, 18 nt, Artificial Sequence
  Synthetic oligonucleotide: PDCD1-5795
ggaggaaggggcccugag

SEQ ID NO: 19318 - RNA, 19 nt, Artificial Sequence
  Synthetic oligonucleotide: PDCD1-5796
aggaggaaggggcccugag

SEQ ID NO: 19319 - RNA, 20 nt, Artificial Sequence
  Synthetic oligonucleotide: PDCD1-1481
gaggaggaaggggcccugag

SEQ ID NO: 19320 - RNA, 21 nt, Artificial Sequence
  Synthetic oligonucleotide: PDCD1-5797
agaggaggaaggggcccugag

SEQ ID NO: 19321 - RNA, 22 nt, Artificial Sequence
  Synthetic oligonucleotide: PDCD1-5798
cagaggaggaaggggcccugag

SEQ ID NO: 19322 - RNA, 23 nt, Artificial Sequence
  Synthetic oligonucleotide: PDCD1-5799
acagaggaggaaggggcccugag

SEQ ID NO: 19323 - RNA, 24 nt, Artificial Sequence
  Synthetic oligonucleotide: PDCD1-5800
cacagaggaggaaggggcccugag

SEQ ID NO: 19324 - RNA, 18 nt, Artificial Sequence
  Synthetic oligonucleotide: PDCD1-5801
aggucggggggugcugag

SEQ ID NO: 19325 - RNA, 19 nt, Artificial Sequence
  Synthetic oligonucleotide: PDCD1-5802
caggucggggggugcugag

SEQ ID NO: 19326 - RNA, 20 nt, Artificial Sequence
  Synthetic oligonucleotide: PDCD1-1430
gcaggucggggggugcugag

SEQ ID NO: 19327 - RNA, 21 nt, Artificial Sequence
  Synthetic oligonucleotide: PDCD1-5803
ggcaggucggggggugcugag

SEQ ID NO: 19328 - RNA, 22 nt, Artificial Sequence
  Synthetic oligonucleotide: PDCD1-5804
uggcaggucggggggugcugag

SEQ ID NO: 19329 - RNA, 23 nt, Artificial Sequence
  Synthetic oligonucleotide: PDCD1-5805
cuggcaggucggggggugcugag

SEQ ID NO: 19330 - RNA, 24 nt, Artificial Sequence
  Synthetic oligonucleotide: PDCD1-5806
ccuggcaggucggggggugcugag

SEQ ID NO: 19331 - RNA, 18 nt, Artificial Sequence
  Synthetic oligonucleotide: PDCD1-5807
agaggccacagcagugag

SEQ ID NO: 19332 - RNA, 19 nt, Artificial Sequence
  Synthetic oligonucleotide: PDCD1-5808
aagaggccacagcagugag

SEQ ID NO: 19333 - RNA, 20 nt, Artificial Sequence
  Synthetic oligonucleotide: PDCD1-1490
aaagaggccacagcagugag

SEQ ID NO: 19334 - RNA, 21 nt, Artificial Sequence
  Synthetic oligonucleotide: PDCD1-5809
gaaagaggccacagcagugag

SEQ ID NO: 19335 - RNA, 22 nt, Artificial Sequence
  Synthetic oligonucleotide: PDCD1-5810
ggaaagaggccacagcagugag

SEQ ID NO: 19336 - RNA, 23 nt, Artificial Sequence
  Synthetic oligonucleotide: PDCD1-5811
uggaaagaggccacagcagugag

SEQ ID NO: 19337 - RNA, 24 nt, Artificial Sequence
  Synthetic oligonucleotide: PDCD1-5812
auggaaagaggccacagcagugag

SEQ ID NO: 19338 - RNA, 18 nt, Artificial Sequence
  Synthetic oligonucleotide: PDCD1-3692
aggaugguucuuagguag

SEQ ID NO: 19339 - RNA, 19 nt, Artificial Sequence
  Synthetic oligonucleotide: PDCD1-3693
caggaugguucuuagguag

SEQ ID NO: 19340 - RNA, 20 nt, Artificial Sequence
  Synthetic oligonucleotide: PDCD1-532
ccaggaugguucuuagguag

SEQ ID NO: 19341 - RNA, 21 nt, Artificial Sequence
  Synthetic oligonucleotide: PDCD1-3694
gccaggaugguucuuagguag

SEQ ID NO: 19342 - RNA, 22 nt, Artificial Sequence
  Synthetic oligonucleotide: PDCD1-3695
ggccaggaugguucuuagguag

SEQ ID NO: 19343 - RNA, 23 nt, Artificial Sequence
  Synthetic oligonucleotide: PDCD1-3696
cggccaggaugguucuuagguag

SEQ ID NO: 19344 - RNA, 24 nt, Artificial Sequence
  Synthetic oligonucleotide: PDCD1-3697
gcggccaggaugguucuuagguag

SEQ ID NO: 19345 - RNA, 18 nt, Artificial Sequence
  Synthetic oligonucleotide: PDCD1-5813
cccccacgggguagggcg

SEQ ID NO: 19346 - RNA, 19 nt, Artificial Sequence
  Synthetic oligonucleotide: PDCD1-5814
acccccacgggguagggcg

SEQ ID NO: 19347 - RNA, 20 nt, Artificial Sequence
  Synthetic oligonucleotide: PDCD1-2360
gacccccacgggguagggcg

SEQ ID NO: 19348 - RNA, 21 nt, Artificial Sequence
  Synthetic oligonucleotide: PDCD1-5815
agacccccacgggguagggcg

SEQ ID NO: 19349 - RNA, 22 nt, Artificial Sequence
  Synthetic oligonucleotide: PDCD1-5816
gagacccccacgggguagggcg

SEQ ID NO: 19350 - RNA, 23 nt, Artificial Sequence
  Synthetic oligonucleotide: PDCD1-5817
ggagacccccacgggguagggcg

SEQ ID NO: 19351 - RNA, 24 nt, Artificial Sequence
  Synthetic oligonucleotide: PDCD1-5818
gggagacccccacgggguagggcg

SEQ ID NO: 19352 - RNA, 18 nt, Artificial Sequence
  Synthetic oligonucleotide: PDCD1-5819
ccacccaccuuccccagg

SEQ ID NO: 19353 - RNA, 19 nt, Artificial Sequence
  Synthetic oligonucleotide: PDCD1-5820
gccacccaccuuccccagg

SEQ ID NO: 19354 - RNA, 20 nt, Artificial Sequence
  Synthetic oligonucleotide: PDCD1-1522
ggccacccaccuuccccagg

SEQ ID NO: 19355 - RNA, 21 nt, Artificial Sequence
  Synthetic oligonucleotide: PDCD1-5821
gggccacccaccuuccccagg

SEQ ID NO: 19356 - RNA, 22 nt, Artificial Sequence
  Synthetic oligonucleotide: PDCD1-5822
ggggccacccaccuuccccagg

SEQ ID NO: 19357 - RNA, 23 nt, Artificial Sequence
  Synthetic oligonucleotide: PDCD1-5823
gggggccacccaccuuccccagg

SEQ ID NO: 19358 - RNA, 24 nt, Artificial Sequence
  Synthetic oligonucleotide: PDCD1-5824
agggggccacccaccuuccccagg

SEQ ID NO: 19359 - RNA, 18 nt, Artificial Sequence
  Synthetic oligonucleotide: PDCD1-5825
ucuuugcuccugggcagg

SEQ ID NO: 19360 - RNA, 19 nt, Artificial Sequence
  Synthetic oligonucleotide: PDCD1-5826
cucuuugcuccugggcagg

SEQ ID NO: 19361 - RNA, 20 nt, Artificial Sequence
  Synthetic oligonucleotide: PDCD1-1408
ccucuuugcuccugggcagg

SEQ ID NO: 19362 - RNA, 21 nt, Artificial Sequence
  Synthetic oligonucleotide: PDCD1-5827
cccucuuugcuccugggcagg

SEQ ID NO: 19363 - RNA, 22 nt, Artificial Sequence
  Synthetic oligonucleotide: PDCD1-5828
ccccucuuugcuccugggcagg

SEQ ID NO: 19364 - RNA, 23 nt, Artificial Sequence
  Synthetic oligonucleotide: PDCD1-5829
uccccucuuugcuccugggcagg

SEQ ID NO: 19365 - RNA, 24 nt, Artificial Sequence
  Synthetic oligonucleotide: PDCD1-5830
guccccucuuugcuccugggcagg

SEQ ID NO: 19366 - RNA, 18 nt, Artificial Sequence
  Synthetic oligonucleotide: PDCD1-5831
cccucagucccuggcagg

SEQ ID NO: 19367 - RNA, 19 nt, Artificial Sequence
  Synthetic oligonucleotide: PDCD1-5832
acccucagucccuggcagg

SEQ ID NO: 19368 - RNA, 20 nt, Artificial Sequence
  Synthetic oligonucleotide: PDCD1-1435
cacccucagucccuggcagg

SEQ ID NO: 19369 - RNA, 21 nt, Artificial Sequence
  Synthetic oligonucleotide: PDCD1-5833
ccacccucagucccuggcagg

SEQ ID NO: 19370 - RNA, 22 nt, Artificial Sequence
  Synthetic oligonucleotide: PDCD1-5834
uccacccucagucccuggcagg

SEQ ID NO: 19371 - RNA, 23 nt, Artificial Sequence
  Synthetic oligonucleotide: PDCD1-5835
uuccacccucagucccuggcagg

SEQ ID NO: 19372 - RNA, 24 nt, Artificial Sequence
  Synthetic oligonucleotide: PDCD1-5836
cuuccacccucagucccuggcagg

SEQ ID NO: 19373 - RNA, 18 nt, Artificial Sequence
  Synthetic oligonucleotide: PDCD1-5837
cucucagucccuggcagg

SEQ ID NO: 19374 - RNA, 19 nt, Artificial Sequence
  Synthetic oligonucleotide: PDCD1-5838
acucucagucccuggcagg

SEQ ID NO: 19375 - RNA, 20 nt, Artificial Sequence
  Synthetic oligonucleotide: PDCD1-1418
cacucucagucccuggcagg

SEQ ID NO: 19376 - RNA, 21 nt, Artificial Sequence
  Synthetic oligonucleotide: PDCD1-5839
ucacucucagucccuggcagg

SEQ ID NO: 19377 - RNA, 22 nt, Artificial Sequence
  Synthetic oligonucleotide: PDCD1-5840
uucacucucagucccuggcagg

SEQ ID NO: 19378 - RNA, 23 nt, Artificial Sequence
  Synthetic oligonucleotide: PDCD1-5841
uuucacucucagucccuggcagg

SEQ ID NO: 19379 - RNA, 24 nt, Artificial Sequence
  Synthetic oligonucleotide: PDCD1-5842
cuuucacucucagucccuggcagg

SEQ ID NO: 19380 - RNA, 18 nt, Artificial Sequence
  Synthetic oligonucleotide: PDCD1-5843
ccacccggcagccucagg

SEQ ID NO: 19381 - RNA, 19 nt, Artificial Sequence
  Synthetic oligonucleotide: PDCD1-5844
cccacccggcagccucagg

SEQ ID NO: 19382 - RNA, 20 nt, Artificial Sequence
  Synthetic oligonucleotide: PDCD1-2338
ccccacccggcagccucagg

SEQ ID NO: 19383 - RNA, 21 nt, Artificial Sequence
  Synthetic oligonucleotide: PDCD1-5845
cccccacccggcagccucagg

SEQ ID NO: 19384 - RNA, 22 nt, Artificial Sequence
  Synthetic oligonucleotide: PDCD1-5846
gcccccacccggcagccucagg

SEQ ID NO: 19385 - RNA, 23 nt, Artificial Sequence
  Synthetic oligonucleotide: PDCD1-5847
ugcccccacccggcagccucagg

SEQ ID NO: 19386 - RNA, 24 nt, Artificial Sequence
  Synthetic oligonucleotide: PDCD1-5848
cugcccccacccggcagccucagg

SEQ ID NO: 19387 - RNA, 18 nt, Artificial Sequence
  Synthetic oligonucleotide: PDCD1-5849
ugagcagagacacagagg

SEQ ID NO: 19388 - RNA, 19 nt, Artificial Sequence
  Synthetic oligonucleotide: PDCD1-5850
gugagcagagacacagagg

SEQ ID NO: 19389 - RNA, 20 nt, Artificial Sequence
  Synthetic oligonucleotide: PDCD1-2348
agugagcagagacacagagg

SEQ ID NO: 19390 - RNA, 21 nt, Artificial Sequence
  Synthetic oligonucleotide: PDCD1-5851
cagugagcagagacacagagg

SEQ ID NO: 19391 - RNA, 22 nt, Artificial Sequence
  Synthetic oligonucleotide: PDCD1-5852
gcagugagcagagacacagagg

SEQ ID NO: 19392 - RNA, 23 nt, Artificial Sequence
  Synthetic oligonucleotide: PDCD1-5853
agcagugagcagagacacagagg

SEQ ID NO: 19393 - RNA, 24 nt, Artificial Sequence
  Synthetic oligonucleotide: PDCD1-5854
cagcagugagcagagacacagagg

SEQ ID NO: 19394 - RNA, 18 nt, Artificial Sequence
  Synthetic oligonucleotide: PDCD1-5855
gcagagacacagaggagg

SEQ ID NO: 19395 - RNA, 19 nt, Artificial Sequence
  Synthetic oligonucleotide: PDCD1-5856
agcagagacacagaggagg

SEQ ID NO: 19396 - RNA, 20 nt, Artificial Sequence
  Synthetic oligonucleotide: PDCD1-1484
gagcagagacacagaggagg

SEQ ID NO: 19397 - RNA, 21 nt, Artificial Sequence
  Synthetic oligonucleotide: PDCD1-5857
ugagcagagacacagaggagg

SEQ ID NO: 19398 - RNA, 22 nt, Artificial Sequence
  Synthetic oligonucleotide: PDCD1-5858
gugagcagagacacagaggagg

SEQ ID NO: 19399 - RNA, 23 nt, Artificial Sequence
  Synthetic oligonucleotide: PDCD1-5859
agugagcagagacacagaggagg

SEQ ID NO: 19400 - RNA, 24 nt, Artificial Sequence
  Synthetic oligonucleotide: PDCD1-5860
cagugagcagagacacagaggagg

SEQ ID NO: 19401 - RNA, 18 nt, Artificial Sequence
  Synthetic oligonucleotide: PDCD1-5861
cccacguggauguggagg

SEQ ID NO: 19402 - RNA, 19 nt, Artificial Sequence
  Synthetic oligonucleotide: PDCD1-5862
gcccacguggauguggagg

SEQ ID NO: 19403 - RNA, 20 nt, Artificial Sequence
  Synthetic oligonucleotide: PDCD1-1465
cgcccacguggauguggagg

SEQ ID NO: 19404 - RNA, 21 nt, Artificial Sequence
  Synthetic oligonucleotide: PDCD1-5863
ucgcccacguggauguggagg

SEQ ID NO: 19405 - RNA, 22 nt, Artificial Sequence
  Synthetic oligonucleotide: PDCD1-5864
cucgcccacguggauguggagg

SEQ ID NO: 19406 - RNA, 23 nt, Artificial Sequence
  Synthetic oligonucleotide: PDCD1-5865
ucucgcccacguggauguggagg

SEQ ID NO: 19407 - RNA, 24 nt, Artificial Sequence
  Synthetic oligonucleotide: PDCD1-5866
cucucgcccacguggauguggagg

SEQ ID NO: 19408 - RNA, 18 nt, Artificial Sequence
  Synthetic oligonucleotide: PDCD1-5867
ucaggaggggcagcucgg

SEQ ID NO: 19409 - RNA, 19 nt, Artificial Sequence
  Synthetic oligonucleotide: PDCD1-5868
cucaggaggggcagcucgg

SEQ ID NO: 19410 - RNA, 20 nt, Artificial Sequence
  Synthetic oligonucleotide: PDCD1-1496
ccucaggaggggcagcucgg

SEQ ID NO: 19411 - RNA, 21 nt, Artificial Sequence
  Synthetic oligonucleotide: PDCD1-5869
gccucaggaggggcagcucgg

SEQ ID NO: 19412 - RNA, 22 nt, Artificial Sequence
  Synthetic oligonucleotide: PDCD1-5870
agccucaggaggggcagcucgg

SEQ ID NO: 19413 - RNA, 23 nt, Artificial Sequence
  Synthetic oligonucleotide: PDCD1-5871
cagccucaggaggggcagcucgg

SEQ ID NO: 19414 - RNA, 24 nt, Artificial Sequence
  Synthetic oligonucleotide: PDCD1-5872
gcagccucaggaggggcagcucgg

SEQ ID NO: 19415 - RNA, 18 nt, Artificial Sequence
  Synthetic oligonucleotide: PDCD1-5873
agggggcgggagcaaggg

SEQ ID NO: 19416 - RNA, 19 nt, Artificial Sequence
  Synthetic oligonucleotide: PDCD1-5874
gagggggcgggagcaaggg

SEQ ID NO: 19417 - RNA, 20 nt, Artificial Sequence
  Synthetic oligonucleotide: PDCD1-1456
agagggggcgggagcaaggg

SEQ ID NO: 19418 - RNA, 21 nt, Artificial Sequence
  Synthetic oligonucleotide: PDCD1-5875
aagagggggcgggagcaaggg

SEQ ID NO: 19419 - RNA, 22 nt, Artificial Sequence
  Synthetic oligonucleotide: PDCD1-5876
gaagagggggcgggagcaaggg

SEQ ID NO: 19420 - RNA, 23 nt, Artificial Sequence
  Synthetic oligonucleotide: PDCD1-5877
ggaagagggggcgggagcaaggg

SEQ ID NO: 19421 - RNA, 24 nt, Artificial Sequence
  Synthetic oligonucleotide: PDCD1-5878
aggaagagggggcgggagcaaggg

SEQ ID NO: 19422 - RNA, 18 nt, Artificial Sequence
  Synthetic oligonucleotide: PDCD1-5879
gauguggaggaagagggg

SEQ ID NO: 19423 - RNA, 19 nt, Artificial Sequence
  Synthetic oligonucleotide: PDCD1-5880
ggauguggaggaagagggg

SEQ ID NO: 19424 - RNA, 20 nt, Artificial Sequence
  Synthetic oligonucleotide: PDCD1-1461
uggauguggaggaagagggg

SEQ ID NO: 19425 - RNA, 21 nt, Artificial Sequence
  Synthetic oligonucleotide: PDCD1-5881
guggauguggaggaagagggg

SEQ ID NO: 19426 - RNA, 22 nt, Artificial Sequence
  Synthetic oligonucleotide: PDCD1-5882
cguggauguggaggaagagggg

SEQ ID NO: 19427 - RNA, 23 nt, Artificial Sequence
  Synthetic oligonucleotide: PDCD1-5883
acguggauguggaggaagagggg

SEQ ID NO: 19428 - RNA, 24 nt, Artificial Sequence
  Synthetic oligonucleotide: PDCD1-5884
cacguggauguggaggaagagggg

SEQ ID NO: 19429 - RNA, 18 nt, Artificial Sequence
  Synthetic oligonucleotide: PDCD1-5885
ggggagacccccacgggg

SEQ ID NO: 19430 - RNA, 19 nt, Artificial Sequence
  Synthetic oligonucleotide: PDCD1-5886
uggggagacccccacgggg

SEQ ID NO: 19431 - RNA, 20 nt, Artificial Sequence
  Synthetic oligonucleotide: PDCD1-1475
cuggggagacccccacgggg

SEQ ID NO: 19432 - RNA, 21 nt, Artificial Sequence
  Synthetic oligonucleotide: PDCD1-5887
gcuggggagacccccacgggg

SEQ ID NO: 19433 - RNA, 22 nt, Artificial Sequence
  Synthetic oligonucleotide: PDCD1-5888
agcuggggagacccccacgggg

SEQ ID NO: 19434 - RNA, 23 nt, Artificial Sequence
  Synthetic oligonucleotide: PDCD1-5889
gagcuggggagacccccacgggg

SEQ ID NO: 19435 - RNA, 24 nt, Artificial Sequence
  Synthetic oligonucleotide: PDCD1-5890
ugagcuggggagacccccacgggg

SEQ ID NO: 19436 - RNA, 18 nt, Artificial Sequence
  Synthetic oligonucleotide: PDCD1-5891
auguggaggaagaggggg

SEQ ID NO: 19437 - RNA, 19 nt, Artificial Sequence
  Synthetic oligonucleotide: PDCD1-5892
gauguggaggaagaggggg

SEQ ID NO: 19438 - RNA, 20 nt, Artificial Sequence
  Synthetic oligonucleotide: PDCD1-2373
ggauguggaggaagaggggg

SEQ ID NO: 19439 - RNA, 21 nt, Artificial Sequence
  Synthetic oligonucleotide: PDCD1-5893
uggauguggaggaagaggggg

SEQ ID NO: 19440 - RNA, 22 nt, Artificial Sequence
  Synthetic oligonucleotide: PDCD1-5894
guggauguggaggaagaggggg

SEQ ID NO: 19441 - RNA, 23 nt, Artificial Sequence
  Synthetic oligonucleotide: PDCD1-5895
cguggauguggaggaagaggggg

SEQ ID NO: 19442 - RNA, 24 nt, Artificial Sequence
  Synthetic oligonucleotide: PDCD1-5896
acguggauguggaggaagaggggg

SEQ ID NO: 19443 - RNA, 18 nt, Artificial Sequence
  Synthetic oligonucleotide: PDCD1-5897
cccagggagauggggggg

SEQ ID NO: 19444 - RNA, 19 nt, Artificial Sequence
  Synthetic oligonucleotide: PDCD1-5898
ccccagggagauggggggg

SEQ ID NO: 19445 - RNA, 20 nt, Artificial Sequence
  Synthetic oligonucleotide: PDCD1-1510
cccccagggagauggggggg

SEQ ID NO: 19446 - RNA, 21 nt, Artificial Sequence
  Synthetic oligonucleotide: PDCD1-5899
gcccccagggagauggggggg

SEQ ID NO: 19447 - RNA, 22 nt, Artificial Sequence
  Synthetic oligonucleotide: PDCD1-5900
ggcccccagggagauggggggg

SEQ ID NO: 19448 - RNA, 23 nt, Artificial Sequence
  Synthetic oligonucleotide: PDCD1-5901
cggcccccagggagauggggggg

SEQ ID NO: 19449 - RNA, 24 nt, Artificial Sequence
  Synthetic oligonucleotide: PDCD1-5902
ccggcccccagggagauggggggg

SEQ ID NO: 19450 - RNA, 18 nt, Artificial Sequence
  Synthetic oligonucleotide: PDCD1-5903
agaugggggggauggggg

SEQ ID NO: 19451 - RNA, 19 nt, Artificial Sequence
  Synthetic oligonucleotide: PDCD1-5904
gagaugggggggauggggg

SEQ ID NO: 19452 - RNA, 20 nt, Artificial Sequence
  Synthetic oligonucleotide: PDCD1-2333
ggagaugggggggauggggg

SEQ ID NO: 19453 - RNA, 21 nt, Artificial Sequence
  Synthetic oligonucleotide: PDCD1-5905
gggagaugggggggauggggg

SEQ ID NO: 19454 - RNA, 22 nt, Artificial Sequence
  Synthetic oligonucleotide: PDCD1-5906
agggagaugggggggauggggg

SEQ ID NO: 19455 - RNA, 23 nt, Artificial Sequence
  Synthetic oligonucleotide: PDCD1-5907
cagggagaugggggggauggggg

SEQ ID NO: 19456 - RNA, 24 nt, Artificial Sequence
  Synthetic oligonucleotide: PDCD1-5908
ccagggagaugggggggauggggg

SEQ ID NO: 19457 - RNA, 18 nt, Artificial Sequence
  Synthetic oligonucleotide: PDCD1-5909
gagaugggggggaugggg

SEQ ID NO: 19458 - RNA, 19 nt, Artificial Sequence
  Synthetic oligonucleotide: PDCD1-5910
ggagaugggggggaugggg

SEQ ID NO: 19459 - RNA, 20 nt, Artificial Sequence
  Synthetic oligonucleotide: PDCD1-1505
gggagaugggggggaugggg

SEQ ID NO: 19460 - RNA, 21 nt, Artificial Sequence
  Synthetic oligonucleotide: PDCD1-5911
agggagaugggggggaugggg

SEQ ID NO: 19461 - RNA, 22 nt, Artificial Sequence
  Synthetic oligonucleotide: PDCD1-5912
cagggagaugggggggaugggg

SEQ ID NO: 19462 - RNA, 23 nt, Artificial Sequence
  Synthetic oligonucleotide: PDCD1-5913
ccagggagaugggggggaugggg

SEQ ID NO: 19463 - RNA, 24 nt, Artificial Sequence
  Synthetic oligonucleotide: PDCD1-5914
cccagggagaugggggggaugggg

SEQ ID NO: 19464 - RNA, 18 nt, Artificial Sequence
  Synthetic oligonucleotide: PDCD1-5915
gacagaaugggagugggg

SEQ ID NO: 19465 - RNA, 19 nt, Artificial Sequence
  Synthetic oligonucleotide: PDCD1-5916
cgacagaaugggagugggg

SEQ ID NO: 19466 - RNA, 20 nt, Artificial Sequence
  Synthetic oligonucleotide: PDCD1-1903
ccgacagaaugggagugggg

SEQ ID NO: 19467 - RNA, 21 nt, Artificial Sequence
  Synthetic oligonucleotide: PDCD1-5917
uccgacagaaugggagugggg

SEQ ID NO: 19468 - RNA, 22 nt, Artificial Sequence
  Synthetic oligonucleotide: PDCD1-5918
cuccgacagaaugggagugggg

SEQ ID NO: 19469 - RNA, 23 nt, Artificial Sequence
  Synthetic oligonucleotide: PDCD1-5919
gcuccgacagaaugggagugggg

SEQ ID NO: 19470 - RNA, 24 nt, Artificial Sequence
  Synthetic oligonucleotide: PDCD1-5920
ggcuccgacagaaugggagugggg

SEQ ID NO: 19471 - RNA, 18 nt, Artificial Sequence
  Synthetic oligonucleotide: PDCD1-5921
cggcccccagggagaugg

SEQ ID NO: 19472 - RNA, 19 nt, Artificial Sequence
  Synthetic oligonucleotide: PDCD1-5922
ccggcccccagggagaugg

SEQ ID NO: 19473 - RNA, 20 nt, Artificial Sequence
  Synthetic oligonucleotide: PDCD1-2326
cccggcccccagggagaugg

SEQ ID NO: 19474 - RNA, 21 nt, Artificial Sequence
  Synthetic oligonucleotide: PDCD1-5923
gcccggcccccagggagaugg

SEQ ID NO: 19475 - RNA, 22 nt, Artificial Sequence
  Synthetic oligonucleotide: PDCD1-5924
ggcccggcccccagggagaugg

SEQ ID NO: 19476 - RNA, 23 nt, Artificial Sequence
  Synthetic oligonucleotide: PDCD1-5925
aggcccggcccccagggagaugg

SEQ ID NO: 19477 - RNA, 24 nt, Artificial Sequence
  Synthetic oligonucleotide: PDCD1-5926
gaggcccggcccccagggagaugg

SEQ ID NO: 19478 - RNA, 18 nt, Artificial Sequence
  Synthetic oligonucleotide: PDCD1-5927
gggagaugggggggaugg

SEQ ID NO: 19479 - RNA, 19 nt, Artificial Sequence
  Synthetic oligonucleotide: PDCD1-5928
agggagaugggggggaugg

SEQ ID NO: 19480 - RNA, 20 nt, Artificial Sequence
  Synthetic oligonucleotide: PDCD1-2332
cagggagaugggggggaugg

SEQ ID NO: 19481 - RNA, 21 nt, Artificial Sequence
  Synthetic oligonucleotide: PDCD1-5929
ccagggagaugggggggaugg

SEQ ID NO: 19482 - RNA, 22 nt, Artificial Sequence
  Synthetic oligonucleotide: PDCD1-5930
cccagggagaugggggggaugg

SEQ ID NO: 19483 - RNA, 23 nt, Artificial Sequence
  Synthetic oligonucleotide: PDCD1-5931
ccccagggagaugggggggaugg

SEQ ID NO: 19484 - RNA, 24 nt, Artificial Sequence
  Synthetic oligonucleotide: PDCD1-5932
cccccagggagaugggggggaugg

SEQ ID NO: 19485 - RNA, 18 nt, Artificial Sequence
  Synthetic oligonucleotide: PDCD1-5933
gagaaggcggcacucugg

SEQ ID NO: 19486 - RNA, 19 nt, Artificial Sequence
  Synthetic oligonucleotide: PDCD1-5934
ggagaaggcggcacucugg

SEQ ID NO: 19487 - RNA, 20 nt, Artificial Sequence
  Synthetic oligonucleotide: PDCD1-2386
uggagaaggcggcacucugg

SEQ ID NO: 19488 - RNA, 21 nt, Artificial Sequence
  Synthetic oligonucleotide: PDCD1-5935
guggagaaggcggcacucugg

SEQ ID NO: 19489 - RNA, 22 nt, Artificial Sequence
  Synthetic oligonucleotide: PDCD1-5936
aguggagaaggcggcacucugg

SEQ ID NO: 19490 - RNA, 23 nt, Artificial Sequence
  Synthetic oligonucleotide: PDCD1-5937
caguggagaaggcggcacucugg

SEQ ID NO: 19491 - RNA, 24 nt, Artificial Sequence
  Synthetic oligonucleotide: PDCD1-5938
gcaguggagaaggcggcacucugg

SEQ ID NO: 19492 - RNA, 18 nt, Artificial Sequence
  Synthetic oligonucleotide: PDCD1-5939
ccagagccaggggucugg

SEQ ID NO: 19493 - RNA, 19 nt, Artificial Sequence
  Synthetic oligonucleotide: PDCD1-5940
cccagagccaggggucugg

SEQ ID NO: 19494 - RNA, 20 nt, Artificial Sequence
  Synthetic oligonucleotide: PDCD1-2168
ucccagagccaggggucugg

SEQ ID NO: 19495 - RNA, 21 nt, Artificial Sequence
  Synthetic oligonucleotide: PDCD1-5941
gucccagagccaggggucugg

SEQ ID NO: 19496 - RNA, 22 nt, Artificial Sequence
  Synthetic oligonucleotide: PDCD1-5942
ugucccagagccaggggucugg

SEQ ID NO: 19497 - RNA, 23 nt, Artificial Sequence
  Synthetic oligonucleotide: PDCD1-5943
gugucccagagccaggggucugg

SEQ ID NO: 19498 - RNA, 24 nt, Artificial Sequence
  Synthetic oligonucleotide: PDCD1-5944
ggugucccagagccaggggucugg

SEQ ID NO: 19499 - RNA, 18 nt, Artificial Sequence
  Synthetic oligonucleotide: PDCD1-5945
ccggagcgaggggucugg

SEQ ID NO: 19500 - RNA, 19 nt, Artificial Sequence
  Synthetic oligonucleotide: PDCD1-5946
cccggagcgaggggucugg

SEQ ID NO: 19501 - RNA, 20 nt, Artificial Sequence
  Synthetic oligonucleotide: PDCD1-2190
ucccggagcgaggggucugg

SEQ ID NO: 19502 - RNA, 21 nt, Artificial Sequence
  Synthetic oligonucleotide: PDCD1-5947
gucccggagcgaggggucugg

SEQ ID NO: 19503 - RNA, 22 nt, Artificial Sequence
  Synthetic oligonucleotide: PDCD1-5948
ggucccggagcgaggggucugg

SEQ ID NO: 19504 - RNA, 23 nt, Artificial Sequence
  Synthetic oligonucleotide: PDCD1-5949
gggucccggagcgaggggucugg

SEQ ID NO: 19505 - RNA, 24 nt, Artificial Sequence
  Synthetic oligonucleotide: PDCD1-5950
ggggucccggagcgaggggucugg

SEQ ID NO: 19506 - RNA, 18 nt, Artificial Sequence
  Synthetic oligonucleotide: PDCD1-5951
ucgcccacguggaugugg

SEQ ID NO: 19507 - RNA, 19 nt, Artificial Sequence
  Synthetic oligonucleotide: PDCD1-5952
cucgcccacguggaugugg

SEQ ID NO: 19508 - RNA, 20 nt, Artificial Sequence
  Synthetic oligonucleotide: PDCD1-2368
ucucgcccacguggaugugg

SEQ ID NO: 19509 - RNA, 21 nt, Artificial Sequence
  Synthetic oligonucleotide: PDCD1-5953
cucucgcccacguggaugugg

SEQ ID NO: 19510 - RNA, 22 nt, Artificial Sequence
  Synthetic oligonucleotide: PDCD1-5954
acucucgcccacguggaugugg

SEQ ID NO: 19511 - RNA, 23 nt, Artificial Sequence
  Synthetic oligonucleotide: PDCD1-5955
cacucucgcccacguggaugugg

SEQ ID NO: 19512 - RNA, 24 nt, Artificial Sequence
  Synthetic oligonucleotide: PDCD1-5956
ucacucucgcccacguggaugugg

SEQ ID NO: 19513 - RNA, 18 nt, Artificial Sequence
  Synthetic oligonucleotide: PDCD1-5957
ccggcccccagggagaug

SEQ ID NO: 19514 - RNA, 19 nt, Artificial Sequence
  Synthetic oligonucleotide: PDCD1-5958
cccggcccccagggagaug

SEQ ID NO: 19515 - RNA, 20 nt, Artificial Sequence
  Synthetic oligonucleotide: PDCD1-2325
gcccggcccccagggagaug

SEQ ID NO: 19516 - RNA, 21 nt, Artificial Sequence
  Synthetic oligonucleotide: PDCD1-5959
ggcccggcccccagggagaug

SEQ ID NO: 19517 - RNA, 22 nt, Artificial Sequence
  Synthetic oligonucleotide: PDCD1-5960
aggcccggcccccagggagaug

SEQ ID NO: 19518 - RNA, 23 nt, Artificial Sequence
  Synthetic oligonucleotide: PDCD1-5961
gaggcccggcccccagggagaug

SEQ ID NO: 19519 - RNA, 24 nt, Artificial Sequence
  Synthetic oligonucleotide: PDCD1-5962
ggaggcccggcccccagggagaug

SEQ ID NO: 19520 - RNA, 18 nt, Artificial Sequence
  Synthetic oligonucleotide: PDCD1-5963
agggagaugggggggaug

SEQ ID NO: 19521 - RNA, 19 nt, Artificial Sequence
  Synthetic oligonucleotide: PDCD1-5964
cagggagaugggggggaug

SEQ ID NO: 19522 - RNA, 20 nt, Artificial Sequence
  Synthetic oligonucleotide: PDCD1-2331
ccagggagaugggggggaug

SEQ ID NO: 19523 - RNA, 21 nt, Artificial Sequence
  Synthetic oligonucleotide: PDCD1-5965
cccagggagaugggggggaug

SEQ ID NO: 19524 - RNA, 22 nt, Artificial Sequence
  Synthetic oligonucleotide: PDCD1-5966
ccccagggagaugggggggaug

SEQ ID NO: 19525 - RNA, 23 nt, Artificial Sequence
  Synthetic oligonucleotide: PDCD1-5967
cccccagggagaugggggggaug

SEQ ID NO: 19526 - RNA, 24 nt, Artificial Sequence
  Synthetic oligonucleotide: PDCD1-5968
gcccccagggagaugggggggaug

SEQ ID NO: 19527 - RNA, 18 nt, Artificial Sequence
  Synthetic oligonucleotide: PDCD1-5969
cucucgcccacguggaug

SEQ ID NO: 19528 - RNA, 19 nt, Artificial Sequence
  Synthetic oligonucleotide: PDCD1-5970
acucucgcccacguggaug

SEQ ID NO: 19529 - RNA, 20 nt, Artificial Sequence
  Synthetic oligonucleotide: PDCD1-2367
cacucucgcccacguggaug

SEQ ID NO: 19530 - RNA, 21 nt, Artificial Sequence
  Synthetic oligonucleotide: PDCD1-5971
ucacucucgcccacguggaug

SEQ ID NO: 19531 - RNA, 22 nt, Artificial Sequence
  Synthetic oligonucleotide: PDCD1-5972
gucacucucgcccacguggaug

SEQ ID NO: 19532 - RNA, 23 nt, Artificial Sequence
  Synthetic oligonucleotide: PDCD1-5973
ugucacucucgcccacguggaug

SEQ ID NO: 19533 - RNA, 24 nt, Artificial Sequence
  Synthetic oligonucleotide: PDCD1-5974
cugucacucucgcccacguggaug

SEQ ID NO: 19534 - RNA, 18 nt, Artificial Sequence
  Synthetic oligonucleotide: PDCD1-5975
ggaaggggcccugagcug

SEQ ID NO: 19535 - RNA, 19 nt, Artificial Sequence
  Synthetic oligonucleotide: PDCD1-5976
aggaaggggcccugagcug

SEQ ID NO: 19536 - RNA, 20 nt, Artificial Sequence
  Synthetic oligonucleotide: PDCD1-2354
gaggaaggggcccugagcug

SEQ ID NO: 19537 - RNA, 21 nt, Artificial Sequence
  Synthetic oligonucleotide: PDCD1-5977
ggaggaaggggcccugagcug

SEQ ID NO: 19538 - RNA, 22 nt, Artificial Sequence
  Synthetic oligonucleotide: PDCD1-5978
aggaggaaggggcccugagcug

SEQ ID NO: 19539 - RNA, 23 nt, Artificial Sequence
  Synthetic oligonucleotide: PDCD1-5979
gaggaggaaggggcccugagcug

SEQ ID NO: 19540 - RNA, 24 nt, Artificial Sequence
  Synthetic oligonucleotide: PDCD1-5980
agaggaggaaggggcccugagcug

SEQ ID NO: 19541 - RNA, 18 nt, Artificial Sequence
  Synthetic oligonucleotide: PDCD1-5981
ggagaaggcggcacucug

SEQ ID NO: 19542 - RNA, 19 nt, Artificial Sequence
  Synthetic oligonucleotide: PDCD1-5982
uggagaaggcggcacucug

SEQ ID NO: 19543 - RNA, 20 nt, Artificial Sequence
  Synthetic oligonucleotide: PDCD1-1449
guggagaaggcggcacucug

SEQ ID NO: 19544 - RNA, 21 nt, Artificial Sequence
  Synthetic oligonucleotide: PDCD1-5983
aguggagaaggcggcacucug

SEQ ID NO: 19545 - RNA, 22 nt, Artificial Sequence
  Synthetic oligonucleotide: PDCD1-5984
caguggagaaggcggcacucug

SEQ ID NO: 19546 - RNA, 23 nt, Artificial Sequence
  Synthetic oligonucleotide: PDCD1-5985
gcaguggagaaggcggcacucug

SEQ ID NO: 19547 - RNA, 24 nt, Artificial Sequence
  Synthetic oligonucleotide: PDCD1-5986
agcaguggagaaggcggcacucug

SEQ ID NO: 19548 - RNA, 18 nt, Artificial Sequence
  Synthetic oligonucleotide: PDCD1-5987
cccagagccaggggucug

SEQ ID NO: 19549 - RNA, 19 nt, Artificial Sequence
  Synthetic oligonucleotide: PDCD1-5988
ucccagagccaggggucug

SEQ ID NO: 19550 - RNA, 20 nt, Artificial Sequence
  Synthetic oligonucleotide: PDCD1-1437
gucccagagccaggggucug

SEQ ID NO: 19551 - RNA, 21 nt, Artificial Sequence
  Synthetic oligonucleotide: PDCD1-5989
ugucccagagccaggggucug

SEQ ID NO: 19552 - RNA, 22 nt, Artificial Sequence
  Synthetic oligonucleotide: PDCD1-5990
gugucccagagccaggggucug

SEQ ID NO: 19553 - RNA, 23 nt, Artificial Sequence
  Synthetic oligonucleotide: PDCD1-5991
ggugucccagagccaggggucug

SEQ ID NO: 19554 - RNA, 24 nt, Artificial Sequence
  Synthetic oligonucleotide: PDCD1-5992
aggugucccagagccaggggucug

SEQ ID NO: 19555 - RNA, 18 nt, Artificial Sequence
  Synthetic oligonucleotide: PDCD1-5993
cccggagcgaggggucug

SEQ ID NO: 19556 - RNA, 19 nt, Artificial Sequence
  Synthetic oligonucleotide: PDCD1-5994
ucccggagcgaggggucug

SEQ ID NO: 19557 - RNA, 20 nt, Artificial Sequence
  Synthetic oligonucleotide: PDCD1-1420
gucccggagcgaggggucug

SEQ ID NO: 19558 - RNA, 21 nt, Artificial Sequence
  Synthetic oligonucleotide: PDCD1-5995
ggucccggagcgaggggucug

SEQ ID NO: 19559 - RNA, 22 nt, Artificial Sequence
  Synthetic oligonucleotide: PDCD1-5996
gggucccggagcgaggggucug

SEQ ID NO: 19560 - RNA, 23 nt, Artificial Sequence
  Synthetic oligonucleotide: PDCD1-5997
ggggucccggagcgaggggucug

SEQ ID NO: 19561 - RNA, 24 nt, Artificial Sequence
  Synthetic oligonucleotide: PDCD1-5998
aggggucccggagcgaggggucug

SEQ ID NO: 19562 - RNA, 18 nt, Artificial Sequence
  Synthetic oligonucleotide: PDCD1-5999
accuccgccugagcagug

SEQ ID NO: 19563 - RNA, 19 nt, Artificial Sequence
  Synthetic oligonucleotide: PDCD1-6000
caccuccgccugagcagug

SEQ ID NO: 19564 - RNA, 20 nt, Artificial Sequence
  Synthetic oligonucleotide: PDCD1-1450
ucaccuccgccugagcagug

SEQ ID NO: 19565 - RNA, 21 nt, Artificial Sequence
  Synthetic oligonucleotide: PDCD1-6001
cucaccuccgccugagcagug

SEQ ID NO: 19566 - RNA, 22 nt, Artificial Sequence
  Synthetic oligonucleotide: PDCD1-6002
gcucaccuccgccugagcagug

SEQ ID NO: 19567 - RNA, 23 nt, Artificial Sequence
  Synthetic oligonucleotide: PDCD1-6003
cgcucaccuccgccugagcagug

SEQ ID NO: 19568 - RNA, 24 nt, Artificial Sequence
  Synthetic oligonucleotide: PDCD1-6004
ccgcucaccuccgccugagcagug

SEQ ID NO: 19569 - RNA, 18 nt, Artificial Sequence
  Synthetic oligonucleotide: PDCD1-6005
cuggcaggucggggggug

SEQ ID NO: 19570 - RNA, 19 nt, Artificial Sequence
  Synthetic oligonucleotide: PDCD1-6006
ccuggcaggucggggggug

SEQ ID NO: 19571 - RNA, 20 nt, Artificial Sequence
  Synthetic oligonucleotide: PDCD1-1431
cccuggcaggucggggggug

SEQ ID NO: 19572 - RNA, 21 nt, Artificial Sequence
  Synthetic oligonucleotide: PDCD1-6007
ucccuggcaggucggggggug

SEQ ID NO: 19573 - RNA, 22 nt, Artificial Sequence
  Synthetic oligonucleotide: PDCD1-6008
gucccuggcaggucggggggug

SEQ ID NO: 19574 - RNA, 23 nt, Artificial Sequence
  Synthetic oligonucleotide: PDCD1-6009
agucccuggcaggucggggggug

SEQ ID NO: 19575 - RNA, 24 nt, Artificial Sequence
  Synthetic oligonucleotide: PDCD1-6010
cagucccuggcaggucggggggug

SEQ ID NO: 19576 - RNA, 18 nt, Artificial Sequence
  Synthetic oligonucleotide: PDCD1-6011
cucgcccacguggaugug

SEQ ID NO: 19577 - RNA, 19 nt, Artificial Sequence
  Synthetic oligonucleotide: PDCD1-6012
ucucgcccacguggaugug

SEQ ID NO: 19578 - RNA, 20 nt, Artificial Sequence
  Synthetic oligonucleotide: PDCD1-1467
cucucgcccacguggaugug

SEQ ID NO: 19579 - RNA, 21 nt, Artificial Sequence
  Synthetic oligonucleotide: PDCD1-6013
acucucgcccacguggaugug

SEQ ID NO: 19580 - RNA, 22 nt, Artificial Sequence
  Synthetic oligonucleotide: PDCD1-6014
cacucucgcccacguggaugug

SEQ ID NO: 19581 - RNA, 23 nt, Artificial Sequence
  Synthetic oligonucleotide: PDCD1-6015
ucacucucgcccacguggaugug

SEQ ID NO: 19582 - RNA, 24 nt, Artificial Sequence
  Synthetic oligonucleotide: PDCD1-6016
gucacucucgcccacguggaugug

SEQ ID NO: 19583 - RNA, 18 nt, Artificial Sequence
  Synthetic oligonucleotide: PDCD1-6017
cccggcccccagggagau

SEQ ID NO: 19584 - RNA, 19 nt, Artificial Sequence
  Synthetic oligonucleotide: PDCD1-6018
gcccggcccccagggagau

SEQ ID NO: 19585 - RNA, 20 nt, Artificial Sequence
  Synthetic oligonucleotide: PDCD1-2324
ggcccggcccccagggagau

SEQ ID NO: 19586 - RNA, 21 nt, Artificial Sequence
  Synthetic oligonucleotide: PDCD1-6019
aggcccggcccccagggagau

SEQ ID NO: 19587 - RNA, 22 nt, Artificial Sequence
  Synthetic oligonucleotide: PDCD1-6020
gaggcccggcccccagggagau

SEQ ID NO: 19588 - RNA, 23 nt, Artificial Sequence
  Synthetic oligonucleotide: PDCD1-6021
ggaggcccggcccccagggagau

SEQ ID NO: 19589 - RNA, 24 nt, Artificial Sequence
  Synthetic oligonucleotide: PDCD1-6022
gggaggcccggcccccagggagau

SEQ ID NO: 19590 - RNA, 18 nt, Artificial Sequence
  Synthetic oligonucleotide: PDCD1-6023
gggcagcucgggcgggau

SEQ ID NO: 19591 - RNA, 19 nt, Artificial Sequence
  Synthetic oligonucleotide: PDCD1-6024
ggggcagcucgggcgggau

SEQ ID NO: 19592 - RNA, 20 nt, Artificial Sequence
  Synthetic oligonucleotide: PDCD1-1494
aggggcagcucgggcgggau

SEQ ID NO: 19593 - RNA, 21 nt, Artificial Sequence
  Synthetic oligonucleotide: PDCD1-6025
gaggggcagcucgggcgggau

SEQ ID NO: 19594 - RNA, 22 nt, Artificial Sequence
  Synthetic oligonucleotide: PDCD1-6026
ggaggggcagcucgggcgggau

SEQ ID NO: 19595 - RNA, 23 nt, Artificial Sequence
  Synthetic oligonucleotide: PDCD1-6027
aggaggggcagcucgggcgggau

SEQ ID NO: 19596 - RNA, 24 nt, Artificial Sequence
  Synthetic oligonucleotide: PDCD1-6028
caggaggggcagcucgggcgggau

SEQ ID NO: 19597 - RNA, 18 nt, Artificial Sequence
  Synthetic oligonucleotide: PDCD1-6029
cagggagaugggggggau

SEQ ID NO: 19598 - RNA, 19 nt, Artificial Sequence
  Synthetic oligonucleotide: PDCD1-6030
ccagggagaugggggggau

SEQ ID NO: 19599 - RNA, 20 nt, Artificial Sequence
  Synthetic oligonucleotide: PDCD1-2330
cccagggagaugggggggau

SEQ ID NO: 19600 - RNA, 21 nt, Artificial Sequence
  Synthetic oligonucleotide: PDCD1-6031
ccccagggagaugggggggau

SEQ ID NO: 19601 - RNA, 22 nt, Artificial Sequence
  Synthetic oligonucleotide: PDCD1-6032
cccccagggagaugggggggau

SEQ ID NO: 19602 - RNA, 23 nt, Artificial Sequence
  Synthetic oligonucleotide: PDCD1-6033
gcccccagggagaugggggggau

SEQ ID NO: 19603 - RNA, 24 nt, Artificial Sequence
  Synthetic oligonucleotide: PDCD1-6034
ggcccccagggagaugggggggau

SEQ ID NO: 19604 - RNA, 18 nt, Artificial Sequence
  Synthetic oligonucleotide: PDCD1-6035
acucucgcccacguggau

SEQ ID NO: 19605 - RNA, 19 nt, Artificial Sequence
  Synthetic oligonucleotide: PDCD1-6036
cacucucgcccacguggau

SEQ ID NO: 19606 - RNA, 20 nt, Artificial Sequence
  Synthetic oligonucleotide: PDCD1-1469
ucacucucgcccacguggau

SEQ ID NO: 19607 - RNA, 21 nt, Artificial Sequence
  Synthetic oligonucleotide: PDCD1-6037
gucacucucgcccacguggau

SEQ ID NO: 19608 - RNA, 22 nt, Artificial Sequence
  Synthetic oligonucleotide: PDCD1-6038
ugucacucucgcccacguggau

SEQ ID NO: 19609 - RNA, 23 nt, Artificial Sequence
  Synthetic oligonucleotide: PDCD1-6039
cugucacucucgcccacguggau

SEQ ID NO: 19610 - RNA, 24 nt, Artificial Sequence
  Synthetic oligonucleotide: PDCD1-6040
ucugucacucucgcccacguggau

SEQ ID NO: 19611 - RNA, 18 nt, Artificial Sequence
  Synthetic oligonucleotide: PDCD1-6041
gcccccacccggcagccu

SEQ ID NO: 19612 - RNA, 19 nt, Artificial Sequence
  Synthetic oligonucleotide: PDCD1-6042
ugcccccacccggcagccu

SEQ ID NO: 19613 - RNA, 20 nt, Artificial Sequence
  Synthetic oligonucleotide: PDCD1-1501
cugcccccacccggcagccu

SEQ ID NO: 19614 - RNA, 21 nt, Artificial Sequence
  Synthetic oligonucleotide: PDCD1-6043
ccugcccccacccggcagccu

SEQ ID NO: 19615 - RNA, 22 nt, Artificial Sequence
  Synthetic oligonucleotide: PDCD1-6044
gccugcccccacccggcagccu

SEQ ID NO: 19616 - RNA, 23 nt, Artificial Sequence
  Synthetic oligonucleotide: PDCD1-6045
ggccugcccccacccggcagccu

SEQ ID NO: 19617 - RNA, 24 nt, Artificial Sequence
  Synthetic oligonucleotide: PDCD1-6046
gggccugcccccacccggcagccu

SEQ ID NO: 19618 - RNA, 18 nt, Artificial Sequence
  Synthetic oligonucleotide: PDCD1-6047
ccccucucagccgguccu

SEQ ID NO: 19619 - RNA, 19 nt, Artificial Sequence
  Synthetic oligonucleotide: PDCD1-6048
uccccucucagccgguccu

SEQ ID NO: 19620 - RNA, 20 nt, Artificial Sequence
  Synthetic oligonucleotide: PDCD1-2215
guccccucucagccgguccu

SEQ ID NO: 19621 - RNA, 21 nt, Artificial Sequence
  Synthetic oligonucleotide: PDCD1-6049
uguccccucucagccgguccu

SEQ ID NO: 19622 - RNA, 22 nt, Artificial Sequence
  Synthetic oligonucleotide: PDCD1-6050
cuguccccucucagccgguccu

SEQ ID NO: 19623 - RNA, 23 nt, Artificial Sequence
  Synthetic oligonucleotide: PDCD1-6051
ucuguccccucucagccgguccu

SEQ ID NO: 19624 - RNA, 24 nt, Artificial Sequence
  Synthetic oligonucleotide: PDCD1-6052
cucuguccccucucagccgguccu

SEQ ID NO: 19625 - RNA, 18 nt, Artificial Sequence
  Synthetic oligonucleotide: PDCD1-6053
aggaaggggcccugagcu

SEQ ID NO: 19626 - RNA, 19 nt, Artificial Sequence
  Synthetic oligonucleotide: PDCD1-6054
gaggaaggggcccugagcu

SEQ ID NO: 19627 - RNA, 20 nt, Artificial Sequence
  Synthetic oligonucleotide: PDCD1-2353
ggaggaaggggcccugagcu

SEQ ID NO: 19628 - RNA, 21 nt, Artificial Sequence
  Synthetic oligonucleotide: PDCD1-6055
aggaggaaggggcccugagcu

SEQ ID NO: 19629 - RNA, 22 nt, Artificial Sequence
  Synthetic oligonucleotide: PDCD1-6056
gaggaggaaggggcccugagcu

SEQ ID NO: 19630 - RNA, 23 nt, Artificial Sequence
  Synthetic oligonucleotide: PDCD1-6057
agaggaggaaggggcccugagcu

SEQ ID NO: 19631 - RNA, 24 nt, Artificial Sequence
  Synthetic oligonucleotide: PDCD1-6058
cagaggaggaaggggcccugagcu

SEQ ID NO: 19632 - RNA, 18 nt, Artificial Sequence
  Synthetic oligonucleotide: PDCD1-6059
acccugagcuguguggcu

SEQ ID NO: 19633 - RNA, 19 nt, Artificial Sequence
  Synthetic oligonucleotide: PDCD1-6060
uacccugagcuguguggcu

SEQ ID NO: 19634 - RNA, 20 nt, Artificial Sequence
  Synthetic oligonucleotide: PDCD1-1413
uuacccugagcuguguggcu

SEQ ID NO: 19635 - RNA, 21 nt, Artificial Sequence
  Synthetic oligonucleotide: PDCD1-6061
cuuacccugagcuguguggcu

SEQ ID NO: 19636 - RNA, 22 nt, Artificial Sequence
  Synthetic oligonucleotide: PDCD1-6062
ccuuacccugagcuguguggcu

SEQ ID NO: 19637 - RNA, 23 nt, Artificial Sequence
  Synthetic oligonucleotide: PDCD1-6063
cccuuacccugagcuguguggcu

SEQ ID NO: 19638 - RNA, 24 nt, Artificial Sequence
  Synthetic oligonucleotide: PDCD1-6064
ccccuuacccugagcuguguggcu

SEQ ID NO: 19639 - RNA, 18 nt, Artificial Sequence
  Synthetic oligonucleotide: PDCD1-6065
gaacuccuggguuccucu

SEQ ID NO: 19640 - RNA, 19 nt, Artificial Sequence
  Synthetic oligonucleotide: PDCD1-6066
cgaacuccuggguuccucu

SEQ ID NO: 19641 - RNA, 20 nt, Artificial Sequence
  Synthetic oligonucleotide: PDCD1-1410
ucgaacuccuggguuccucu

SEQ ID NO: 19642 - RNA, 21 nt, Artificial Sequence
  Synthetic oligonucleotide: PDCD1-6067
cucgaacuccuggguuccucu

SEQ ID NO: 19643 - RNA, 22 nt, Artificial Sequence
  Synthetic oligonucleotide: PDCD1-6068
gcucgaacuccuggguuccucu

SEQ ID NO: 19644 - RNA, 23 nt, Artificial Sequence
  Synthetic oligonucleotide: PDCD1-6069
agcucgaacuccuggguuccucu

SEQ ID NO: 19645 - RNA, 24 nt, Artificial Sequence
  Synthetic oligonucleotide: PDCD1-6070
cagcucgaacuccuggguuccucu

SEQ ID NO: 19646 - RNA, 18 nt, Artificial Sequence
  Synthetic oligonucleotide: PDCD1-6071
ccccacgggguagggcgu

SEQ ID NO: 19647 - RNA, 19 nt, Artificial Sequence
  Synthetic oligonucleotide: PDCD1-6072
cccccacgggguagggcgu

SEQ ID NO: 19648 - RNA, 20 nt, Artificial Sequence
  Synthetic oligonucleotide: PDCD1-2361
acccccacgggguagggcgu

SEQ ID NO: 19649 - RNA, 21 nt, Artificial Sequence
  Synthetic oligonucleotide: PDCD1-6073
gacccccacgggguagggcgu

SEQ ID NO: 19650 - RNA, 22 nt, Artificial Sequence
  Synthetic oligonucleotide: PDCD1-6074
agacccccacgggguagggcgu

SEQ ID NO: 19651 - RNA, 23 nt, Artificial Sequence
  Synthetic oligonucleotide: PDCD1-6075
gagacccccacgggguagggcgu

SEQ ID NO: 19652 - RNA, 24 nt, Artificial Sequence
  Synthetic oligonucleotide: PDCD1-6076
ggagacccccacgggguagggcgu

SEQ ID NO: 19653 - RNA, 18 nt, Artificial Sequence
  Synthetic oligonucleotide: PDCD1-3752
ggcgcccuggccagucgu

SEQ ID NO: 19654 - RNA, 19 nt, Artificial Sequence
  Synthetic oligonucleotide: PDCD1-3753
aggcgcccuggccagucgu

SEQ ID NO: 19655 - RNA, 20 nt, Artificial Sequence
  Synthetic oligonucleotide: PDCD1-529
caggcgcccuggccagucgu

SEQ ID NO: 19656 - RNA, 21 nt, Artificial Sequence
  Synthetic oligonucleotide: PDCD1-3754
acaggcgcccuggccagucgu

SEQ ID NO: 19657 - RNA, 22 nt, Artificial Sequence
  Synthetic oligonucleotide: PDCD1-3755
cacaggcgcccuggccagucgu

SEQ ID NO: 19658 - RNA, 23 nt, Artificial Sequence
  Synthetic oligonucleotide: PDCD1-3756
ccacaggcgcccuggccagucgu

SEQ ID NO: 19659 - RNA, 24 nt, Artificial Sequence
  Synthetic oligonucleotide: PDCD1-3757
cccacaggcgcccuggccagucgu

SEQ ID NO: 19660 - RNA, 18 nt, Artificial Sequence
  Synthetic oligonucleotide: PDCD1-6077
ccucagucccuggcaggu

SEQ ID NO: 19661 - RNA, 19 nt, Artificial Sequence
  Synthetic oligonucleotide: PDCD1-6078
cccucagucccuggcaggu

SEQ ID NO: 19662 - RNA, 20 nt, Artificial Sequence
  Synthetic oligonucleotide: PDCD1-2172
acccucagucccuggcaggu

SEQ ID NO: 19663 - RNA, 21 nt, Artificial Sequence
  Synthetic oligonucleotide: PDCD1-6079
cacccucagucccuggcaggu

SEQ ID NO: 19664 - RNA, 22 nt, Artificial Sequence
  Synthetic oligonucleotide: PDCD1-6080
ccacccucagucccuggcaggu

SEQ ID NO: 19665 - RNA, 23 nt, Artificial Sequence
  Synthetic oligonucleotide: PDCD1-6081
uccacccucagucccuggcaggu

SEQ ID NO: 19666 - RNA, 24 nt, Artificial Sequence
  Synthetic oligonucleotide: PDCD1-6082
uuccacccucagucccuggcaggu

SEQ ID NO: 19667 - RNA, 18 nt, Artificial Sequence
  Synthetic oligonucleotide: PDCD1-6083
ucucagucccuggcaggu

SEQ ID NO: 19668 - RNA, 19 nt, Artificial Sequence
  Synthetic oligonucleotide: PDCD1-6084
cucucagucccuggcaggu

SEQ ID NO: 19669 - RNA, 20 nt, Artificial Sequence
  Synthetic oligonucleotide: PDCD1-2194
acucucagucccuggcaggu

SEQ ID NO: 19670 - RNA, 21 nt, Artificial Sequence
  Synthetic oligonucleotide: PDCD1-6085
cacucucagucccuggcaggu

SEQ ID NO: 19671 - RNA, 22 nt, Artificial Sequence
  Synthetic oligonucleotide: PDCD1-6086
ucacucucagucccuggcaggu

SEQ ID NO: 19672 - RNA, 23 nt, Artificial Sequence
  Synthetic oligonucleotide: PDCD1-6087
uucacucucagucccuggcaggu

SEQ ID NO: 19673 - RNA, 24 nt, Artificial Sequence
  Synthetic oligonucleotide: PDCD1-6088
uuucacucucagucccuggcaggu

SEQ ID NO: 19674 - RNA, 18 nt, Artificial Sequence
  Synthetic oligonucleotide: PDCD1-6089
ugucccagagccaggggu

SEQ ID NO: 19675 - RNA, 19 nt, Artificial Sequence
  Synthetic oligonucleotide: PDCD1-6090
gugucccagagccaggggu

SEQ ID NO: 19676 - RNA, 20 nt, Artificial Sequence
  Synthetic oligonucleotide: PDCD1-1439
ggugucccagagccaggggu

SEQ ID NO: 19677 - RNA, 21 nt, Artificial Sequence
  Synthetic oligonucleotide: PDCD1-6091
aggugucccagagccaggggu

SEQ ID NO: 19678 - RNA, 22 nt, Artificial Sequence
  Synthetic oligonucleotide: PDCD1-6092
caggugucccagagccaggggu

SEQ ID NO: 19679 - RNA, 23 nt, Artificial Sequence
  Synthetic oligonucleotide: PDCD1-6093
ucaggugucccagagccaggggu

SEQ ID NO: 19680 - RNA, 24 nt, Artificial Sequence
  Synthetic oligonucleotide: PDCD1-6094
gucaggugucccagagccaggggu

SEQ ID NO: 19681 - RNA, 18 nt, Artificial Sequence
  Synthetic oligonucleotide: PDCD1-6095
ggucccggagcgaggggu

SEQ ID NO: 19682 - RNA, 19 nt, Artificial Sequence
  Synthetic oligonucleotide: PDCD1-6096
gggucccggagcgaggggu

SEQ ID NO: 19683 - RNA, 20 nt, Artificial Sequence
  Synthetic oligonucleotide: PDCD1-1422
ggggucccggagcgaggggu

SEQ ID NO: 19684 - RNA, 21 nt, Artificial Sequence
  Synthetic oligonucleotide: PDCD1-6097
aggggucccggagcgaggggu

SEQ ID NO: 19685 - RNA, 22 nt, Artificial Sequence
  Synthetic oligonucleotide: PDCD1-6098
caggggucccggagcgaggggu

SEQ ID NO: 19686 - RNA, 23 nt, Artificial Sequence
  Synthetic oligonucleotide: PDCD1-6099
ccaggggucccggagcgaggggu

SEQ ID NO: 19687 - RNA, 24 nt, Artificial Sequence
  Synthetic oligonucleotide: PDCD1-6100
cccaggggucccggagcgaggggu

SEQ ID NO: 19688 - RNA, 18 nt, Artificial Sequence
  Synthetic oligonucleotide: PDCD1-6101
gagggccagccgggcaca

SEQ ID NO: 19689 - RNA, 19 nt, Artificial Sequence
  Synthetic oligonucleotide: PDCD1-6102
agagggccagccgggcaca

SEQ ID NO: 19690 - RNA, 20 nt, Artificial Sequence
  Synthetic oligonucleotide: PDCD1-1665
cagagggccagccgggcaca

SEQ ID NO: 19691 - RNA, 21 nt, Artificial Sequence
  Synthetic oligonucleotide: PDCD1-6103
acagagggccagccgggcaca

SEQ ID NO: 19692 - RNA, 22 nt, Artificial Sequence
  Synthetic oligonucleotide: PDCD1-6104
cacagagggccagccgggcaca

SEQ ID NO: 19693 - RNA, 23 nt, Artificial Sequence
  Synthetic oligonucleotide: PDCD1-6105
gcacagagggccagccgggcaca

SEQ ID NO: 19694 - RNA, 24 nt, Artificial Sequence
  Synthetic oligonucleotide: PDCD1-6106
ggcacagagggccagccgggcaca

SEQ ID NO: 19695 - RNA, 18 nt, Artificial Sequence
  Synthetic oligonucleotide: PDCD1-6107
guaauaaaaugcucagca

SEQ ID NO: 19696 - RNA, 19 nt, Artificial Sequence
  Synthetic oligonucleotide: PDCD1-6108
uguaauaaaaugcucagca

SEQ ID NO: 19697 - RNA, 20 nt, Artificial Sequence
  Synthetic oligonucleotide: PDCD1-1965
cuguaauaaaaugcucagca

SEQ ID NO: 19698 - RNA, 21 nt, Artificial Sequence
  Synthetic oligonucleotide: PDCD1-6109
gcuguaauaaaaugcucagca

SEQ ID NO: 19699 - RNA, 22 nt, Artificial Sequence
  Synthetic oligonucleotide: PDCD1-6110
cgcuguaauaaaaugcucagca

SEQ ID NO: 19700 - RNA, 23 nt, Artificial Sequence
  Synthetic oligonucleotide: PDCD1-6111
ucgcuguaauaaaaugcucagca

SEQ ID NO: 19701 - RNA, 24 nt, Artificial Sequence
  Synthetic oligonucleotide: PDCD1-6112
uucgcuguaauaaaaugcucagca

SEQ ID NO: 19702 - RNA, 18 nt, Artificial Sequence
  Synthetic oligonucleotide: PDCD1-6113
ucccauccuuaggaaaac

SEQ ID NO: 19703 - RNA, 19 nt, Artificial Sequence
  Synthetic oligonucleotide: PDCD1-6114
aucccauccuuaggaaaac

SEQ ID NO: 19704 - RNA, 20 nt, Artificial Sequence
  Synthetic oligonucleotide: PDCD1-1710
caucccauccuuaggaaaac

SEQ ID NO: 19705 - RNA, 21 nt, Artificial Sequence
  Synthetic oligonucleotide: PDCD1-6115
ucaucccauccuuaggaaaac

SEQ ID NO: 19706 - RNA, 22 nt, Artificial Sequence
  Synthetic oligonucleotide: PDCD1-6116
cucaucccauccuuaggaaaac

SEQ ID NO: 19707 - RNA, 23 nt, Artificial Sequence
  Synthetic oligonucleotide: PDCD1-6117
gcucaucccauccuuaggaaaac

SEQ ID NO: 19708 - RNA, 24 nt, Artificial Sequence
  Synthetic oligonucleotide: PDCD1-6118
ggcucaucccauccuuaggaaaac

SEQ ID NO: 19709 - RNA, 18 nt, Artificial Sequence
  Synthetic oligonucleotide: PDCD1-6119
aaaacucgagugaggacc

SEQ ID NO: 19710 - RNA, 19 nt, Artificial Sequence
  Synthetic oligonucleotide: PDCD1-6120
gaaaacucgagugaggacc

SEQ ID NO: 19711 - RNA, 20 nt, Artificial Sequence
  Synthetic oligonucleotide: PDCD1-1713
ggaaaacucgagugaggacc

SEQ ID NO: 19712 - RNA, 21 nt, Artificial Sequence
  Synthetic oligonucleotide: PDCD1-6121
aggaaaacucgagugaggacc

SEQ ID NO: 19713 - RNA, 22 nt, Artificial Sequence
  Synthetic oligonucleotide: PDCD1-6122
uaggaaaacucgagugaggacc

SEQ ID NO: 19714 - RNA, 23 nt, Artificial Sequence
  Synthetic oligonucleotide: PDCD1-6123
uuaggaaaacucgagugaggacc

SEQ ID NO: 19715 - RNA, 24 nt, Artificial Sequence
  Synthetic oligonucleotide: PDCD1-6124
cuuaggaaaacucgagugaggacc

SEQ ID NO: 19716 - RNA, 18 nt, Artificial Sequence
  Synthetic oligonucleotide: PDCD1-6125
gaggccaaggccuccccc

SEQ ID NO: 19717 - RNA, 19 nt, Artificial Sequence
  Synthetic oligonucleotide: PDCD1-6126
ugaggccaaggccuccccc

SEQ ID NO: 19718 - RNA, 20 nt, Artificial Sequence
  Synthetic oligonucleotide: PDCD1-1681
gugaggccaaggccuccccc

SEQ ID NO: 19719 - RNA, 21 nt, Artificial Sequence
  Synthetic oligonucleotide: PDCD1-6127
agugaggccaaggccuccccc

SEQ ID NO: 19720 - RNA, 22 nt, Artificial Sequence
  Synthetic oligonucleotide: PDCD1-6128
gagugaggccaaggccuccccc

SEQ ID NO: 19721 - RNA, 23 nt, Artificial Sequence
  Synthetic oligonucleotide: PDCD1-6129
agagugaggccaaggccuccccc

SEQ ID NO: 19722 - RNA, 24 nt, Artificial Sequence
  Synthetic oligonucleotide: PDCD1-6130
gagagugaggccaaggccuccccc

SEQ ID NO: 19723 - RNA, 18 nt, Artificial Sequence
  Synthetic oligonucleotide: PDCD1-6131
agggcucggggagagccc

SEQ ID NO: 19724 - RNA, 19 nt, Artificial Sequence
  Synthetic oligonucleotide: PDCD1-6132
cagggcucggggagagccc

SEQ ID NO: 19725 - RNA, 20 nt, Artificial Sequence
  Synthetic oligonucleotide: PDCD1-2741
acagggcucggggagagccc

SEQ ID NO: 19726 - RNA, 21 nt, Artificial Sequence
  Synthetic oligonucleotide: PDCD1-6133
aacagggcucggggagagccc

SEQ ID NO: 19727 - RNA, 22 nt, Artificial Sequence
  Synthetic oligonucleotide: PDCD1-6134
gaacagggcucggggagagccc

SEQ ID NO: 19728 - RNA, 23 nt, Artificial Sequence
  Synthetic oligonucleotide: PDCD1-6135
ugaacagggcucggggagagccc

SEQ ID NO: 19729 - RNA, 24 nt, Artificial Sequence
  Synthetic oligonucleotide: PDCD1-6136
cugaacagggcucggggagagccc

SEQ ID NO: 19730 - RNA, 18 nt, Artificial Sequence
  Synthetic oligonucleotide: PDCD1-6137
caguguacacagagggcc

SEQ ID NO: 19731 - RNA, 19 nt, Artificial Sequence
  Synthetic oligonucleotide: PDCD1-6138
acaguguacacagagggcc

SEQ ID NO: 19732 - RNA, 20 nt, Artificial Sequence
  Synthetic oligonucleotide: PDCD1-1671
cacaguguacacagagggcc

SEQ ID NO: 19733 - RNA, 21 nt, Artificial Sequence
  Synthetic oligonucleotide: PDCD1-6139
ucacaguguacacagagggcc

SEQ ID NO: 19734 - RNA, 22 nt, Artificial Sequence
  Synthetic oligonucleotide: PDCD1-6140
gucacaguguacacagagggcc

SEQ ID NO: 19735 - RNA, 23 nt, Artificial Sequence
  Synthetic oligonucleotide: PDCD1-6141
ggucacaguguacacagagggcc

SEQ ID NO: 19736 - RNA, 24 nt, Artificial Sequence
  Synthetic oligonucleotide: PDCD1-6142
uggucacaguguacacagagggcc

SEQ ID NO: 19737 - RNA, 18 nt, Artificial Sequence
  Synthetic oligonucleotide: PDCD1-6143
gaaccaccccacccuggc

SEQ ID NO: 19738 - RNA, 19 nt, Artificial Sequence
  Synthetic oligonucleotide: PDCD1-6144
ugaaccaccccacccuggc

SEQ ID NO: 19739 - RNA, 20 nt, Artificial Sequence
  Synthetic oligonucleotide: PDCD1-1959
cugaaccaccccacccuggc

SEQ ID NO: 19740 - RNA, 21 nt, Artificial Sequence
  Synthetic oligonucleotide: PDCD1-6145
ccugaaccaccccacccuggc

SEQ ID NO: 19741 - RNA, 22 nt, Artificial Sequence
  Synthetic oligonucleotide: PDCD1-6146
cccugaaccaccccacccuggc

SEQ ID NO: 19742 - RNA, 23 nt, Artificial Sequence
  Synthetic oligonucleotide: PDCD1-6147
ccccugaaccaccccacccuggc

SEQ ID NO: 19743 - RNA, 24 nt, Artificial Sequence
  Synthetic oligonucleotide: PDCD1-6148
cccccugaaccaccccacccuggc

SEQ ID NO: 19744 - RNA, 18 nt, Artificial Sequence
  Synthetic oligonucleotide: PDCD1-6149
accugugccccagcgaag

SEQ ID NO: 19745 - RNA, 19 nt, Artificial Sequence
  Synthetic oligonucleotide: PDCD1-6150
caccugugccccagcgaag

SEQ ID NO: 19746 - RNA, 20 nt, Artificial Sequence
  Synthetic oligonucleotide: PDCD1-3022
ucaccugugccccagcgaag

SEQ ID NO: 19747 - RNA, 21 nt, Artificial Sequence
  Synthetic oligonucleotide: PDCD1-6151
gucaccugugccccagcgaag

SEQ ID NO: 19748 - RNA, 22 nt, Artificial Sequence
  Synthetic oligonucleotide: PDCD1-6152
ggucaccugugccccagcgaag

SEQ ID NO: 19749 - RNA, 23 nt, Artificial Sequence
  Synthetic oligonucleotide: PDCD1-6153
gggucaccugugccccagcgaag

SEQ ID NO: 19750 - RNA, 24 nt, Artificial Sequence
  Synthetic oligonucleotide: PDCD1-6154
agggucaccugugccccagcgaag

SEQ ID NO: 19751 - RNA, 18 nt, Artificial Sequence
  Synthetic oligonucleotide: PDCD1-6155
uggacaguugucauucag

SEQ ID NO: 19752 - RNA, 19 nt, Artificial Sequence
  Synthetic oligonucleotide: PDCD1-6156
auggacaguugucauucag

SEQ ID NO: 19753 - RNA, 20 nt, Artificial Sequence
  Synthetic oligonucleotide: PDCD1-1928
cauggacaguugucauucag

SEQ ID NO: 19754 - RNA, 21 nt, Artificial Sequence
  Synthetic oligonucleotide: PDCD1-6157
ccauggacaguugucauucag

SEQ ID NO: 19755 - RNA, 22 nt, Artificial Sequence
  Synthetic oligonucleotide: PDCD1-6158
gccauggacaguugucauucag

SEQ ID NO: 19756 - RNA, 23 nt, Artificial Sequence
  Synthetic oligonucleotide: PDCD1-6159
agccauggacaguugucauucag

SEQ ID NO: 19757 - RNA, 24 nt, Artificial Sequence
  Synthetic oligonucleotide: PDCD1-6160
uagccauggacaguugucauucag

SEQ ID NO: 19758 - RNA, 18 nt, Artificial Sequence
  Synthetic oligonucleotide: PDCD1-6161
gcacaauccccacccagg

SEQ ID NO: 19759 - RNA, 19 nt, Artificial Sequence
  Synthetic oligonucleotide: PDCD1-6162
ggcacaauccccacccagg

SEQ ID NO: 19760 - RNA, 20 nt, Artificial Sequence
  Synthetic oligonucleotide: PDCD1-2748
gggcacaauccccacccagg

SEQ ID NO: 19761 - RNA, 21 nt, Artificial Sequence
  Synthetic oligonucleotide: PDCD1-6163
cgggcacaauccccacccagg

SEQ ID NO: 19762 - RNA, 22 nt, Artificial Sequence
  Synthetic oligonucleotide: PDCD1-6164
gcgggcacaauccccacccagg

SEQ ID NO: 19763 - RNA, 23 nt, Artificial Sequence
  Synthetic oligonucleotide: PDCD1-6165
ggcgggcacaauccccacccagg

SEQ ID NO: 19764 - RNA, 24 nt, Artificial Sequence
  Synthetic oligonucleotide: PDCD1-6166
aggcgggcacaauccccacccagg

SEQ ID NO: 19765 - RNA, 18 nt, Artificial Sequence
  Synthetic oligonucleotide: PDCD1-6167
ccucucuccucgauccgg

SEQ ID NO: 19766 - RNA, 19 nt, Artificial Sequence
  Synthetic oligonucleotide: PDCD1-6168
cccucucuccucgauccgg

SEQ ID NO: 19767 - RNA, 20 nt, Artificial Sequence
  Synthetic oligonucleotide: PDCD1-1679
ucccucucuccucgauccgg

SEQ ID NO: 19768 - RNA, 21 nt, Artificial Sequence
  Synthetic oligonucleotide: PDCD1-6169
cucccucucuccucgauccgg

SEQ ID NO: 19769 - RNA, 22 nt, Artificial Sequence
  Synthetic oligonucleotide: PDCD1-6170
gcucccucucuccucgauccgg

SEQ ID NO: 19770 - RNA, 23 nt, Artificial Sequence
  Synthetic oligonucleotide: PDCD1-6171
ggcucccucucuccucgauccgg

SEQ ID NO: 19771 - RNA, 24 nt, Artificial Sequence
  Synthetic oligonucleotide: PDCD1-6172
aggcucccucucuccucgauccgg

SEQ ID NO: 19772 - RNA, 18 nt, Artificial Sequence
  Synthetic oligonucleotide: PDCD1-6173
cacucgaacagguacacu

SEQ ID NO: 19773 - RNA, 19 nt, Artificial Sequence
  Synthetic oligonucleotide: PDCD1-6174
ucacucgaacagguacacu

SEQ ID NO: 19774 - RNA, 20 nt, Artificial Sequence
  Synthetic oligonucleotide: PDCD1-1703
cucacucgaacagguacacu

SEQ ID NO: 19775 - RNA, 21 nt, Artificial Sequence
  Synthetic oligonucleotide: PDCD1-6175
ccucacucgaacagguacacu

SEQ ID NO: 19776 - RNA, 22 nt, Artificial Sequence
  Synthetic oligonucleotide: PDCD1-6176
uccucacucgaacagguacacu

SEQ ID NO: 19777 - RNA, 23 nt, Artificial Sequence
  Synthetic oligonucleotide: PDCD1-6177
guccucacucgaacagguacacu

SEQ ID NO: 19778 - RNA, 24 nt, Artificial Sequence
  Synthetic oligonucleotide: PDCD1-6178
uguccucacucgaacagguacacu

SEQ ID NO: 19779 - RNA, 18 nt, Artificial Sequence
  Synthetic oligonucleotide: PDCD1-6179
cuccccacggccaagguu

SEQ ID NO: 19780 - RNA, 19 nt, Artificial Sequence
  Synthetic oligonucleotide: PDCD1-6180
acuccccacggccaagguu

SEQ ID NO: 19781 - RNA, 20 nt, Artificial Sequence
  Synthetic oligonucleotide: PDCD1-2085
gacuccccacggccaagguu

SEQ ID NO: 19782 - RNA, 21 nt, Artificial Sequence
  Synthetic oligonucleotide: PDCD1-6181
agacuccccacggccaagguu

SEQ ID NO: 19783 - RNA, 22 nt, Artificial Sequence
  Synthetic oligonucleotide: PDCD1-6182
cagacuccccacggccaagguu

SEQ ID NO: 19784 - RNA, 23 nt, Artificial Sequence
  Synthetic oligonucleotide: PDCD1-6183
gcagacuccccacggccaagguu

SEQ ID NO: 19785 - RNA, 24 nt, Artificial Sequence
  Synthetic oligonucleotide: PDCD1-6184
cgcagacuccccacggccaagguu

SEQ ID NO: 19786 - RNA, 18 nt, Artificial Sequence
  Synthetic oligonucleotide: PDCD1-6185
gcugagcauuuuauuaca

SEQ ID NO: 19787 - RNA, 19 nt, Artificial Sequence
  Synthetic oligonucleotide: PDCD1-6186
ugcugagcauuuuauuaca

SEQ ID NO: 19788 - RNA, 20 nt, Artificial Sequence
  Synthetic oligonucleotide: PDCD1-1748
gugcugagcauuuuauuaca

SEQ ID NO: 19789 - RNA, 21 nt, Artificial Sequence
  Synthetic oligonucleotide: PDCD1-6187
ugugcugagcauuuuauuaca

SEQ ID NO: 19790 - RNA, 22 nt, Artificial Sequence
  Synthetic oligonucleotide: PDCD1-6188
cugugcugagcauuuuauuaca

SEQ ID NO: 19791 - RNA, 23 nt, Artificial Sequence
  Synthetic oligonucleotide: PDCD1-6189
ucugugcugagcauuuuauuaca

SEQ ID NO: 19792 - RNA, 24 nt, Artificial Sequence
  Synthetic oligonucleotide: PDCD1-6190
uucugugcugagcauuuuauuaca

SEQ ID NO: 19793 - RNA, 18 nt, Artificial Sequence
  Synthetic oligonucleotide: PDCD1-6191
ccaggguggggugguuca

SEQ ID NO: 19794 - RNA, 19 nt, Artificial Sequence
  Synthetic oligonucleotide: PDCD1-6192
gccaggguggggugguuca

SEQ ID NO: 19795 - RNA, 20 nt, Artificial Sequence
  Synthetic oligonucleotide: PDCD1-2809
ugccaggguggggugguuca

SEQ ID NO: 19796 - RNA, 21 nt, Artificial Sequence
  Synthetic oligonucleotide: PDCD1-6193
gugccaggguggggugguuca

SEQ ID NO: 19797 - RNA, 22 nt, Artificial Sequence
  Synthetic oligonucleotide: PDCD1-6194
cgugccaggguggggugguuca

SEQ ID NO: 19798 - RNA, 23 nt, Artificial Sequence
  Synthetic oligonucleotide: PDCD1-6195
ucgugccaggguggggugguuca

SEQ ID NO: 19799 - RNA, 24 nt, Artificial Sequence
  Synthetic oligonucleotide: PDCD1-6196
cucgugccaggguggggugguuca

SEQ ID NO: 19800 - RNA, 18 nt, Artificial Sequence
  Synthetic oligonucleotide: PDCD1-6197
cucgaguuuuccuaagga

SEQ ID NO: 19801 - RNA, 19 nt, Artificial Sequence
  Synthetic oligonucleotide: PDCD1-6198
acucgaguuuuccuaagga

SEQ ID NO: 19802 - RNA, 20 nt, Artificial Sequence
  Synthetic oligonucleotide: PDCD1-2996
cacucgaguuuuccuaagga

SEQ ID NO: 19803 - RNA, 21 nt, Artificial Sequence
  Synthetic oligonucleotide: PDCD1-6199
ucacucgaguuuuccuaagga

SEQ ID NO: 19804 - RNA, 22 nt, Artificial Sequence
  Synthetic oligonucleotide: PDCD1-6200
cucacucgaguuuuccuaagga

SEQ ID NO: 19805 - RNA, 23 nt, Artificial Sequence
  Synthetic oligonucleotide: PDCD1-6201
ccucacucgaguuuuccuaagga

SEQ ID NO: 19806 - RNA, 24 nt, Artificial Sequence
  Synthetic oligonucleotide: PDCD1-6202
uccucacucgaguuuuccuaagga

SEQ ID NO: 19807 - RNA, 18 nt, Artificial Sequence
  Synthetic oligonucleotide: PDCD1-6203
ggggcacaggugacccua

SEQ ID NO: 19808 - RNA, 19 nt, Artificial Sequence
  Synthetic oligonucleotide: PDCD1-6204
uggggcacaggugacccua

SEQ ID NO: 19809 - RNA, 20 nt, Artificial Sequence
  Synthetic oligonucleotide: PDCD1-1725
cuggggcacaggugacccua

SEQ ID NO: 19810 - RNA, 21 nt, Artificial Sequence
  Synthetic oligonucleotide: PDCD1-6205
gcuggggcacaggugacccua

SEQ ID NO: 19811 - RNA, 22 nt, Artificial Sequence
  Synthetic oligonucleotide: PDCD1-6206
cgcuggggcacaggugacccua

SEQ ID NO: 19812 - RNA, 23 nt, Artificial Sequence
  Synthetic oligonucleotide: PDCD1-6207
ucgcuggggcacaggugacccua

SEQ ID NO: 19813 - RNA, 24 nt, Artificial Sequence
  Synthetic oligonucleotide: PDCD1-6208
uucgcuggggcacaggugacccua

SEQ ID NO: 19814 - RNA, 18 nt, Artificial Sequence
  Synthetic oligonucleotide: PDCD1-6209
ggcauccuugguccucac

SEQ ID NO: 19815 - RNA, 19 nt, Artificial Sequence
  Synthetic oligonucleotide: PDCD1-6210
aggcauccuugguccucac

SEQ ID NO: 19816 - RNA, 20 nt, Artificial Sequence
  Synthetic oligonucleotide: PDCD1-1902
caggcauccuugguccucac

SEQ ID NO: 19817 - RNA, 21 nt, Artificial Sequence
  Synthetic oligonucleotide: PDCD1-6211
ccaggcauccuugguccucac

SEQ ID NO: 19818 - RNA, 22 nt, Artificial Sequence
  Synthetic oligonucleotide: PDCD1-6212
cccaggcauccuugguccucac

SEQ ID NO: 19819 - RNA, 23 nt, Artificial Sequence
  Synthetic oligonucleotide: PDCD1-6213
gcccaggcauccuugguccucac

SEQ ID NO: 19820 - RNA, 24 nt, Artificial Sequence
  Synthetic oligonucleotide: PDCD1-6214
ugcccaggcauccuugguccucac

SEQ ID NO: 19821 - RNA, 18 nt, Artificial Sequence
  Synthetic oligonucleotide: PDCD1-6215
gguggggauugugcccgc

SEQ ID NO: 19822 - RNA, 19 nt, Artificial Sequence
  Synthetic oligonucleotide: PDCD1-6216
ggguggggauugugcccgc

SEQ ID NO: 19823 - RNA, 20 nt, Artificial Sequence
  Synthetic oligonucleotide: PDCD1-1886
uggguggggauugugcccgc

SEQ ID NO: 19824 - RNA, 21 nt, Artificial Sequence
  Synthetic oligonucleotide: PDCD1-6217
cuggguggggauugugcccgc

SEQ ID NO: 19825 - RNA, 22 nt, Artificial Sequence
  Synthetic oligonucleotide: PDCD1-6218
ccuggguggggauugugcccgc

SEQ ID NO: 19826 - RNA, 23 nt, Artificial Sequence
  Synthetic oligonucleotide: PDCD1-6219
uccuggguggggauugugcccgc

SEQ ID NO: 19827 - RNA, 24 nt, Artificial Sequence
  Synthetic oligonucleotide: PDCD1-6220
cuccuggguggggauugugcccgc

SEQ ID NO: 19828 - RNA, 18 nt, Artificial Sequence
  Synthetic oligonucleotide: PDCD1-6221
ccuccagcccacucgugc

SEQ ID NO: 19829 - RNA, 19 nt, Artificial Sequence
  Synthetic oligonucleotide: PDCD1-6222
cccuccagcccacucgugc

SEQ ID NO: 19830 - RNA, 20 nt, Artificial Sequence
  Synthetic oligonucleotide: PDCD1-1739
gcccuccagcccacucgugc

SEQ ID NO: 19831 - RNA, 21 nt, Artificial Sequence
  Synthetic oligonucleotide: PDCD1-6223
ugcccuccagcccacucgugc

SEQ ID NO: 19832 - RNA, 22 nt, Artificial Sequence
  Synthetic oligonucleotide: PDCD1-6224
cugcccuccagcccacucgugc

SEQ ID NO: 19833 - RNA, 23 nt, Artificial Sequence
  Synthetic oligonucleotide: PDCD1-6225
ccugcccuccagcccacucgugc

SEQ ID NO: 19834 - RNA, 24 nt, Artificial Sequence
  Synthetic oligonucleotide: PDCD1-6226
cccugcccuccagcccacucgugc

SEQ ID NO: 19835 - RNA, 18 nt, Artificial Sequence
  Synthetic oligonucleotide: PDCD1-6227
cugucuccaggaucccuc

SEQ ID NO: 19836 - RNA, 19 nt, Artificial Sequence
  Synthetic oligonucleotide: PDCD1-6228
ucugucuccaggaucccuc

SEQ ID NO: 19837 - RNA, 20 nt, Artificial Sequence
  Synthetic oligonucleotide: PDCD1-1890
uucugucuccaggaucccuc

SEQ ID NO: 19838 - RNA, 21 nt, Artificial Sequence
  Synthetic oligonucleotide: PDCD1-6229
cuucugucuccaggaucccuc

SEQ ID NO: 19839 - RNA, 22 nt, Artificial Sequence
  Synthetic oligonucleotide: PDCD1-6230
ucuucugucuccaggaucccuc

SEQ ID NO: 19840 - RNA, 23 nt, Artificial Sequence
  Synthetic oligonucleotide: PDCD1-6231
uucuucugucuccaggaucccuc

SEQ ID NO: 19841 - RNA, 24 nt, Artificial Sequence
  Synthetic oligonucleotide: PDCD1-6232
guucuucugucuccaggaucccuc

SEQ ID NO: 19842 - RNA, 18 nt, Artificial Sequence
  Synthetic oligonucleotide: PDCD1-6233
ggccuuggccucacucuc

SEQ ID NO: 19843 - RNA, 19 nt, Artificial Sequence
  Synthetic oligonucleotide: PDCD1-6234
aggccuuggccucacucuc

SEQ ID NO: 19844 - RNA, 20 nt, Artificial Sequence
  Synthetic oligonucleotide: PDCD1-1878
gaggccuuggccucacucuc

SEQ ID NO: 19845 - RNA, 21 nt, Artificial Sequence
  Synthetic oligonucleotide: PDCD1-6235
ggaggccuuggccucacucuc

SEQ ID NO: 19846 - RNA, 22 nt, Artificial Sequence
  Synthetic oligonucleotide: PDCD1-6236
gggaggccuuggccucacucuc

SEQ ID NO: 19847 - RNA, 23 nt, Artificial Sequence
  Synthetic oligonucleotide: PDCD1-6237
ggggaggccuuggccucacucuc

SEQ ID NO: 19848 - RNA, 24 nt, Artificial Sequence
  Synthetic oligonucleotide: PDCD1-6238
gggggaggccuuggccucacucuc

SEQ ID NO: 19849 - RNA, 18 nt, Artificial Sequence
  Synthetic oligonucleotide: PDCD1-6239
ggacaguucuucugucuc

SEQ ID NO: 19850 - RNA, 19 nt, Artificial Sequence
  Synthetic oligonucleotide: PDCD1-6240
aggacaguucuucugucuc

SEQ ID NO: 19851 - RNA, 20 nt, Artificial Sequence
  Synthetic oligonucleotide: PDCD1-1891
gaggacaguucuucugucuc

SEQ ID NO: 19852 - RNA, 21 nt, Artificial Sequence
  Synthetic oligonucleotide: PDCD1-6241
ugaggacaguucuucugucuc

SEQ ID NO: 19853 - RNA, 22 nt, Artificial Sequence
  Synthetic oligonucleotide: PDCD1-6242
gugaggacaguucuucugucuc

SEQ ID NO: 19854 - RNA, 23 nt, Artificial Sequence
  Synthetic oligonucleotide: PDCD1-6243
agugaggacaguucuucugucuc

SEQ ID NO: 19855 - RNA, 24 nt, Artificial Sequence
  Synthetic oligonucleotide: PDCD1-6244
gagugaggacaguucuucugucuc

SEQ ID NO: 19856 - RNA, 18 nt, Artificial Sequence
  Synthetic oligonucleotide: PDCD1-6245
agcccacucgugccaggg

SEQ ID NO: 19857 - RNA, 19 nt, Artificial Sequence
  Synthetic oligonucleotide: PDCD1-6246
cagcccacucgugccaggg

SEQ ID NO: 19858 - RNA, 20 nt, Artificial Sequence
  Synthetic oligonucleotide: PDCD1-2804
ccagcccacucgugccaggg

SEQ ID NO: 19859 - RNA, 21 nt, Artificial Sequence
  Synthetic oligonucleotide: PDCD1-6247
uccagcccacucgugccaggg

SEQ ID NO: 19860 - RNA, 22 nt, Artificial Sequence
  Synthetic oligonucleotide: PDCD1-6248
cuccagcccacucgugccaggg

SEQ ID NO: 19861 - RNA, 23 nt, Artificial Sequence
  Synthetic oligonucleotide: PDCD1-6249
ccuccagcccacucgugccaggg

SEQ ID NO: 19862 - RNA, 24 nt, Artificial Sequence
  Synthetic oligonucleotide: PDCD1-6250
cccuccagcccacucgugccaggg

SEQ ID NO: 19863 - RNA, 18 nt, Artificial Sequence
  Synthetic oligonucleotide: PDCD1-6251
ccccaaaccuuggccgug

SEQ ID NO: 19864 - RNA, 19 nt, Artificial Sequence
  Synthetic oligonucleotide: PDCD1-6252
accccaaaccuuggccgug

SEQ ID NO: 19865 - RNA, 20 nt, Artificial Sequence
  Synthetic oligonucleotide: PDCD1-2225
aaccccaaaccuuggccgug

SEQ ID NO: 19866 - RNA, 21 nt, Artificial Sequence
  Synthetic oligonucleotide: PDCD1-6253
gaaccccaaaccuuggccgug

SEQ ID NO: 19867 - RNA, 22 nt, Artificial Sequence
  Synthetic oligonucleotide: PDCD1-6254
agaaccccaaaccuuggccgug

SEQ ID NO: 19868 - RNA, 23 nt, Artificial Sequence
  Synthetic oligonucleotide: PDCD1-6255
cagaaccccaaaccuuggccgug

SEQ ID NO: 19869 - RNA, 24 nt, Artificial Sequence
  Synthetic oligonucleotide: PDCD1-6256
ccagaaccccaaaccuuggccgug

SEQ ID NO: 19870 - RNA, 18 nt, Artificial Sequence
  Synthetic oligonucleotide: PDCD1-6257
cccagccagccugcaccu

SEQ ID NO: 19871 - RNA, 19 nt, Artificial Sequence
  Synthetic oligonucleotide: PDCD1-6258
gcccagccagccugcaccu

SEQ ID NO: 19872 - RNA, 20 nt, Artificial Sequence
  Synthetic oligonucleotide: PDCD1-2961
ugcccagccagccugcaccu

SEQ ID NO: 19873 - RNA, 21 nt, Artificial Sequence
  Synthetic oligonucleotide: PDCD1-6259
gugcccagccagccugcaccu

SEQ ID NO: 19874 - RNA, 22 nt, Artificial Sequence
  Synthetic oligonucleotide: PDCD1-6260
ugugcccagccagccugcaccu

SEQ ID NO: 19875 - RNA, 23 nt, Artificial Sequence
  Synthetic oligonucleotide: PDCD1-6261
cugugcccagccagccugcaccu

SEQ ID NO: 19876 - RNA, 24 nt, Artificial Sequence
  Synthetic oligonucleotide: PDCD1-6262
ucugugcccagccagccugcaccu

SEQ ID NO: 19877 - RNA, 18 nt, Artificial Sequence
  Synthetic oligonucleotide: PDCD1-6263
ccucacucgaguuuuccu

SEQ ID NO: 19878 - RNA, 19 nt, Artificial Sequence
  Synthetic oligonucleotide: PDCD1-6264
uccucacucgaguuuuccu

SEQ ID NO: 19879 - RNA, 20 nt, Artificial Sequence
  Synthetic oligonucleotide: PDCD1-1901
guccucacucgaguuuuccu

SEQ ID NO: 19880 - RNA, 21 nt, Artificial Sequence
  Synthetic oligonucleotide: PDCD1-6265
gguccucacucgaguuuuccu

SEQ ID NO: 19881 - RNA, 22 nt, Artificial Sequence
  Synthetic oligonucleotide: PDCD1-6266
ugguccucacucgaguuuuccu

SEQ ID NO: 19882 - RNA, 23 nt, Artificial Sequence
  Synthetic oligonucleotide: PDCD1-6267
uugguccucacucgaguuuuccu

SEQ ID NO: 19883 - RNA, 24 nt, Artificial Sequence
  Synthetic oligonucleotide: PDCD1-6268
cuugguccucacucgaguuuuccu

SEQ ID NO: 19884 - RNA, 18 nt, Artificial Sequence
  Synthetic oligonucleotide: PDCD1-6269
ccaggaucccuccugggu

SEQ ID NO: 19885 - RNA, 19 nt, Artificial Sequence
  Synthetic oligonucleotide: PDCD1-6270
uccaggaucccuccugggu

SEQ ID NO: 19886 - RNA, 20 nt, Artificial Sequence
  Synthetic oligonucleotide: PDCD1-2985
cuccaggaucccuccugggu

SEQ ID NO: 19887 - RNA, 21 nt, Artificial Sequence
  Synthetic oligonucleotide: PDCD1-6271
ucuccaggaucccuccugggu

SEQ ID NO: 19888 - RNA, 22 nt, Artificial Sequence
  Synthetic oligonucleotide: PDCD1-6272
gucuccaggaucccuccugggu

SEQ ID NO: 19889 - RNA, 23 nt, Artificial Sequence
  Synthetic oligonucleotide: PDCD1-6273
ugucuccaggaucccuccugggu

SEQ ID NO: 19890 - RNA, 24 nt, Artificial Sequence
  Synthetic oligonucleotide: PDCD1-6274
cugucuccaggaucccuccugggu

SEQ ID NO: 19891 - RNA, 18 nt, Artificial Sequence
  Synthetic oligonucleotide: PDCD1-6275
uauccaaaguguaccugu

SEQ ID NO: 19892 - RNA, 19 nt, Artificial Sequence
  Synthetic oligonucleotide: PDCD1-6276
auauccaaaguguaccugu

SEQ ID NO: 19893 - RNA, 20 nt, Artificial Sequence
  Synthetic oligonucleotide: PDCD1-1894
uauauccaaaguguaccugu

SEQ ID NO: 19894 - RNA, 21 nt, Artificial Sequence
  Synthetic oligonucleotide: PDCD1-6277
uuauauccaaaguguaccugu

SEQ ID NO: 19895 - RNA, 22 nt, Artificial Sequence
  Synthetic oligonucleotide: PDCD1-6278
auuauauccaaaguguaccugu

SEQ ID NO: 19896 - RNA, 23 nt, Artificial Sequence
  Synthetic oligonucleotide: PDCD1-6279
cauuauauccaaaguguaccugu

SEQ ID NO: 19897 - RNA, 24 nt, Artificial Sequence
  Synthetic oligonucleotide: PDCD1-6280
ucauuauauccaaaguguaccugu

SEQ ID NO: 19898 - RNA, 18 nt, Artificial Sequence
  Synthetic oligonucleotide: PDCD1-6281
ccucaaagcuuccaccuu

SEQ ID NO: 19899 - RNA, 19 nt, Artificial Sequence
  Synthetic oligonucleotide: PDCD1-6282
cccucaaagcuuccaccuu

SEQ ID NO: 19900 - RNA, 20 nt, Artificial Sequence
  Synthetic oligonucleotide: PDCD1-1726
ccccucaaagcuuccaccuu

SEQ ID NO: 19901 - RNA, 21 nt, Artificial Sequence
  Synthetic oligonucleotide: PDCD1-6283
cccccucaaagcuuccaccuu

SEQ ID NO: 19902 - RNA, 22 nt, Artificial Sequence
  Synthetic oligonucleotide: PDCD1-6284
ucccccucaaagcuuccaccuu

SEQ ID NO: 19903 - RNA, 23 nt, Artificial Sequence
  Synthetic oligonucleotide: PDCD1-6285
cucccccucaaagcuuccaccuu

SEQ ID NO: 19904 - RNA, 24 nt, Artificial Sequence
  Synthetic oligonucleotide: PDCD1-6286
gcucccccucaaagcuuccaccuu

SEQ ID NO: 19905 - RNA, 18 nt, Artificial Sequence
  Synthetic oligonucleotide: PDCD1-6287
caccugugccccagcgaa

SEQ ID NO: 19906 - RNA, 19 nt, Artificial Sequence
  Synthetic oligonucleotide: PDCD1-6288
ucaccugugccccagcgaa

SEQ ID NO: 19907 - RNA, 20 nt, Artificial Sequence
  Synthetic oligonucleotide: PDCD1-3023
gucaccugugccccagcgaa

SEQ ID NO: 19908 - RNA, 21 nt, Artificial Sequence
  Synthetic oligonucleotide: PDCD1-6289
ggucaccugugccccagcgaa

SEQ ID NO: 19909 - RNA, 22 nt, Artificial Sequence
  Synthetic oligonucleotide: PDCD1-6290
gggucaccugugccccagcgaa

SEQ ID NO: 19910 - RNA, 23 nt, Artificial Sequence
  Synthetic oligonucleotide: PDCD1-6291
agggucaccugugccccagcgaa

SEQ ID NO: 19911 - RNA, 24 nt, Artificial Sequence
  Synthetic oligonucleotide: PDCD1-6292
uagggucaccugugccccagcgaa

SEQ ID NO: 19912 - RNA, 18 nt, Artificial Sequence
  Synthetic oligonucleotide: PDCD1-6293
agaaggucaaggcuggaa

SEQ ID NO: 19913 - RNA, 19 nt, Artificial Sequence
  Synthetic oligonucleotide: PDCD1-6294
aagaaggucaaggcuggaa

SEQ ID NO: 19914 - RNA, 20 nt, Artificial Sequence
  Synthetic oligonucleotide: PDCD1-3044
gaagaaggucaaggcuggaa

SEQ ID NO: 19915 - RNA, 21 nt, Artificial Sequence
  Synthetic oligonucleotide: PDCD1-6295
ggaagaaggucaaggcuggaa

SEQ ID NO: 19916 - RNA, 22 nt, Artificial Sequence
  Synthetic oligonucleotide: PDCD1-6296
gggaagaaggucaaggcuggaa

SEQ ID NO: 19917 - RNA, 23 nt, Artificial Sequence
  Synthetic oligonucleotide: PDCD1-6297
ggggaagaaggucaaggcuggaa

SEQ ID NO: 19918 - RNA, 24 nt, Artificial Sequence
  Synthetic oligonucleotide: PDCD1-6298
cggggaagaaggucaaggcuggaa

SEQ ID NO: 19919 - RNA, 18 nt, Artificial Sequence
  Synthetic oligonucleotide: PDCD1-6299
ccccacggauggucugaa

SEQ ID NO: 19920 - RNA, 19 nt, Artificial Sequence
  Synthetic oligonucleotide: PDCD1-6300
cccccacggauggucugaa

SEQ ID NO: 19921 - RNA, 20 nt, Artificial Sequence
  Synthetic oligonucleotide: PDCD1-1683
ucccccacggauggucugaa

SEQ ID NO: 19922 - RNA, 21 nt, Artificial Sequence
  Synthetic oligonucleotide: PDCD1-6301
cucccccacggauggucugaa

SEQ ID NO: 19923 - RNA, 22 nt, Artificial Sequence
  Synthetic oligonucleotide: PDCD1-6302
ccucccccacggauggucugaa

SEQ ID NO: 19924 - RNA, 23 nt, Artificial Sequence
  Synthetic oligonucleotide: PDCD1-6303
gccucccccacggauggucugaa

SEQ ID NO: 19925 - RNA, 24 nt, Artificial Sequence
  Synthetic oligonucleotide: PDCD1-6304
ggccucccccacggauggucugaa

SEQ ID NO: 19926 - RNA, 18 nt, Artificial Sequence
  Synthetic oligonucleotide: PDCD1-6305
guggucacaguguacaca

SEQ ID NO: 19927 - RNA, 19 nt, Artificial Sequence
  Synthetic oligonucleotide: PDCD1-6306
uguggucacaguguacaca

SEQ ID NO: 19928 - RNA, 20 nt, Artificial Sequence
  Synthetic oligonucleotide: PDCD1-1670
cuguggucacaguguacaca

SEQ ID NO: 19929 - RNA, 21 nt, Artificial Sequence
  Synthetic oligonucleotide: PDCD1-6307
gcuguggucacaguguacaca

SEQ ID NO: 19930 - RNA, 22 nt, Artificial Sequence
  Synthetic oligonucleotide: PDCD1-6308
ggcuguggucacaguguacaca

SEQ ID NO: 19931 - RNA, 23 nt, Artificial Sequence
  Synthetic oligonucleotide: PDCD1-6309
gggcuguggucacaguguacaca

SEQ ID NO: 19932 - RNA, 24 nt, Artificial Sequence
  Synthetic oligonucleotide: PDCD1-6310
cgggcuguggucacaguguacaca

SEQ ID NO: 19933 - RNA, 18 nt, Artificial Sequence
  Synthetic oligonucleotide: PDCD1-6311
gccaagguuagucccaca

SEQ ID NO: 19934 - RNA, 19 nt, Artificial Sequence
  Synthetic oligonucleotide: PDCD1-6312
agccaagguuagucccaca

SEQ ID NO: 19935 - RNA, 20 nt, Artificial Sequence
  Synthetic oligonucleotide: PDCD1-2754
aagccaagguuagucccaca

SEQ ID NO: 19936 - RNA, 21 nt, Artificial Sequence
  Synthetic oligonucleotide: PDCD1-6313
aaagccaagguuagucccaca

SEQ ID NO: 19937 - RNA, 22 nt, Artificial Sequence
  Synthetic oligonucleotide: PDCD1-6314
uaaagccaagguuagucccaca

SEQ ID NO: 19938 - RNA, 23 nt, Artificial Sequence
  Synthetic oligonucleotide: PDCD1-6315
guaaagccaagguuagucccaca

SEQ ID NO: 19939 - RNA, 24 nt, Artificial Sequence
  Synthetic oligonucleotide: PDCD1-6316
cguaaagccaagguuagucccaca

SEQ ID NO: 19940 - RNA, 18 nt, Artificial Sequence
  Synthetic oligonucleotide: PDCD1-6317
gcaggcuggcugggcaca

SEQ ID NO: 19941 - RNA, 19 nt, Artificial Sequence
  Synthetic oligonucleotide: PDCD1-6318
ugcaggcuggcugggcaca

SEQ ID NO: 19942 - RNA, 20 nt, Artificial Sequence
  Synthetic oligonucleotide: PDCD1-1662
gugcaggcuggcugggcaca

SEQ ID NO: 19943 - RNA, 21 nt, Artificial Sequence
  Synthetic oligonucleotide: PDCD1-6319
ggugcaggcuggcugggcaca

SEQ ID NO: 19944 - RNA, 22 nt, Artificial Sequence
  Synthetic oligonucleotide: PDCD1-6320
aggugcaggcuggcugggcaca

SEQ ID NO: 19945 - RNA, 23 nt, Artificial Sequence
  Synthetic oligonucleotide: PDCD1-6321
caggugcaggcuggcugggcaca

SEQ ID NO: 19946 - RNA, 24 nt, Artificial Sequence
  Synthetic oligonucleotide: PDCD1-6322
ccaggugcaggcuggcugggcaca

SEQ ID NO: 19947 - RNA, 18 nt, Artificial Sequence
  Synthetic oligonucleotide: PDCD1-6323
ugcucagcacagaauaca

SEQ ID NO: 19948 - RNA, 19 nt, Artificial Sequence
  Synthetic oligonucleotide: PDCD1-6324
augcucagcacagaauaca

SEQ ID NO: 19949 - RNA, 20 nt, Artificial Sequence
  Synthetic oligonucleotide: PDCD1-3065
aaugcucagcacagaauaca

SEQ ID NO: 19950 - RNA, 21 nt, Artificial Sequence
  Synthetic oligonucleotide: PDCD1-6325
aaaugcucagcacagaauaca

SEQ ID NO: 19951 - RNA, 22 nt, Artificial Sequence
  Synthetic oligonucleotide: PDCD1-6326
aaaaugcucagcacagaauaca

SEQ ID NO: 19952 - RNA, 23 nt, Artificial Sequence
  Synthetic oligonucleotide: PDCD1-6327
uaaaaugcucagcacagaauaca

SEQ ID NO: 19953 - RNA, 24 nt, Artificial Sequence
  Synthetic oligonucleotide: PDCD1-6328
auaaaaugcucagcacagaauaca

SEQ ID NO: 19954 - RNA, 18 nt, Artificial Sequence
  Synthetic oligonucleotide: PDCD1-6329
cuguggucacaguguaca

SEQ ID NO: 19955 - RNA, 19 nt, Artificial Sequence
  Synthetic oligonucleotide: PDCD1-6330
gcuguggucacaguguaca

SEQ ID NO: 19956 - RNA, 20 nt, Artificial Sequence
  Synthetic oligonucleotide: PDCD1-1669
ggcuguggucacaguguaca

SEQ ID NO: 19957 - RNA, 21 nt, Artificial Sequence
  Synthetic oligonucleotide: PDCD1-6331
gggcuguggucacaguguaca

SEQ ID NO: 19958 - RNA, 22 nt, Artificial Sequence
  Synthetic oligonucleotide: PDCD1-6332
cgggcuguggucacaguguaca

SEQ ID NO: 19959 - RNA, 23 nt, Artificial Sequence
  Synthetic oligonucleotide: PDCD1-6333
gcgggcuguggucacaguguaca

SEQ ID NO: 19960 - RNA, 24 nt, Artificial Sequence
  Synthetic oligonucleotide: PDCD1-6334
agcgggcuguggucacaguguaca

SEQ ID NO: 19961 - RNA, 18 nt, Artificial Sequence
  Synthetic oligonucleotide: PDCD1-6335
agggucaccugugcccca

SEQ ID NO: 19962 - RNA, 19 nt, Artificial Sequence
  Synthetic oligonucleotide: PDCD1-6336
uagggucaccugugcccca

SEQ ID NO: 19963 - RNA, 20 nt, Artificial Sequence
  Synthetic oligonucleotide: PDCD1-1927
guagggucaccugugcccca

SEQ ID NO: 19964 - RNA, 21 nt, Artificial Sequence
  Synthetic oligonucleotide: PDCD1-6337
aguagggucaccugugcccca

SEQ ID NO: 19965 - RNA, 22 nt, Artificial Sequence
  Synthetic oligonucleotide: PDCD1-6338
caguagggucaccugugcccca

SEQ ID NO: 19966 - RNA, 23 nt, Artificial Sequence
  Synthetic oligonucleotide: PDCD1-6339
ucaguagggucaccugugcccca

SEQ ID NO: 19967 - RNA, 24 nt, Artificial Sequence
  Synthetic oligonucleotide: PDCD1-6340
uucaguagggucaccugugcccca

SEQ ID NO: 19968 - RNA, 18 nt, Artificial Sequence
  Synthetic oligonucleotide: PDCD1-6341
gccagccaggcccaggca

SEQ ID NO: 19969 - RNA, 19 nt, Artificial Sequence
  Synthetic oligonucleotide: PDCD1-6342
cgccagccaggcccaggca

SEQ ID NO: 19970 - RNA, 20 nt, Artificial Sequence
  Synthetic oligonucleotide: PDCD1-1961
ccgccagccaggcccaggca

SEQ ID NO: 19971 - RNA, 21 nt, Artificial Sequence
  Synthetic oligonucleotide: PDCD1-6343
gccgccagccaggcccaggca

SEQ ID NO: 19972 - RNA, 22 nt, Artificial Sequence
  Synthetic oligonucleotide: PDCD1-6344
ggccgccagccaggcccaggca

SEQ ID NO: 19973 - RNA, 23 nt, Artificial Sequence
  Synthetic oligonucleotide: PDCD1-6345
gggccgccagccaggcccaggca

SEQ ID NO: 19974 - RNA, 24 nt, Artificial Sequence
  Synthetic oligonucleotide: PDCD1-6346
cgggccgccagccaggcccaggca

SEQ ID NO: 19975 - RNA, 18 nt, Artificial Sequence
  Synthetic oligonucleotide: PDCD1-6347
cagagggccagccgggca

SEQ ID NO: 19976 - RNA, 19 nt, Artificial Sequence
  Synthetic oligonucleotide: PDCD1-6348
acagagggccagccgggca

SEQ ID NO: 19977 - RNA, 20 nt, Artificial Sequence
  Synthetic oligonucleotide: PDCD1-1664
cacagagggccagccgggca

SEQ ID NO: 19978 - RNA, 21 nt, Artificial Sequence
  Synthetic oligonucleotide: PDCD1-6349
gcacagagggccagccgggca

SEQ ID NO: 19979 - RNA, 22 nt, Artificial Sequence
  Synthetic oligonucleotide: PDCD1-6350
ggcacagagggccagccgggca

SEQ ID NO: 19980 - RNA, 23 nt, Artificial Sequence
  Synthetic oligonucleotide: PDCD1-6351
gggcacagagggccagccgggca

SEQ ID NO: 19981 - RNA, 24 nt, Artificial Sequence
  Synthetic oligonucleotide: PDCD1-6352
ugggcacagagggccagccgggca

SEQ ID NO: 19982 - RNA, 18 nt, Artificial Sequence
  Synthetic oligonucleotide: PDCD1-6353
gugcaggcuggcugggca

SEQ ID NO: 19983 - RNA, 19 nt, Artificial Sequence
  Synthetic oligonucleotide: PDCD1-6354
ggugcaggcuggcugggca

SEQ ID NO: 19984 - RNA, 20 nt, Artificial Sequence
  Synthetic oligonucleotide: PDCD1-1661
aggugcaggcuggcugggca

SEQ ID NO: 19985 - RNA, 21 nt, Artificial Sequence
  Synthetic oligonucleotide: PDCD1-6355
caggugcaggcuggcugggca

SEQ ID NO: 19986 - RNA, 22 nt, Artificial Sequence
  Synthetic oligonucleotide: PDCD1-6356
ccaggugcaggcuggcugggca

SEQ ID NO: 19987 - RNA, 23 nt, Artificial Sequence
  Synthetic oligonucleotide: PDCD1-6357
cccaggugcaggcuggcugggca

SEQ ID NO: 19988 - RNA, 24 nt, Artificial Sequence
  Synthetic oligonucleotide: PDCD1-6358
ccccaggugcaggcuggcugggca

SEQ ID NO: 19989 - RNA, 18 nt, Artificial Sequence
  Synthetic oligonucleotide: PDCD1-6359
ucuccucgauccgggaga

SEQ ID NO: 19990 - RNA, 19 nt, Artificial Sequence
  Synthetic oligonucleotide: PDCD1-6360
cucuccucgauccgggaga

SEQ ID NO: 19991 - RNA, 20 nt, Artificial Sequence
  Synthetic oligonucleotide: PDCD1-1680
ucucuccucgauccgggaga

SEQ ID NO: 19992 - RNA, 21 nt, Artificial Sequence
  Synthetic oligonucleotide: PDCD1-6361
cucucuccucgauccgggaga

SEQ ID NO: 19993 - RNA, 22 nt, Artificial Sequence
  Synthetic oligonucleotide: PDCD1-6362
ccucucuccucgauccgggaga

SEQ ID NO: 19994 - RNA, 23 nt, Artificial Sequence
  Synthetic oligonucleotide: PDCD1-6363
cccucucuccucgauccgggaga

SEQ ID NO: 19995 - RNA, 24 nt, Artificial Sequence
  Synthetic oligonucleotide: PDCD1-6364
ucccucucuccucgauccgggaga

SEQ ID NO: 19996 - RNA, 18 nt, Artificial Sequence
  Synthetic oligonucleotide: PDCD1-6365
caggagggauccuggaga

SEQ ID NO: 19997 - RNA, 19 nt, Artificial Sequence
  Synthetic oligonucleotide: PDCD1-6366
ccaggagggauccuggaga

SEQ ID NO: 19998 - RNA, 20 nt, Artificial Sequence
  Synthetic oligonucleotide: PDCD1-1700
cccaggagggauccuggaga

SEQ ID NO: 19999 - RNA, 21 nt, Artificial Sequence
  Synthetic oligonucleotide: PDCD1-6367
acccaggagggauccuggaga

SEQ ID NO: 20000 - RNA, 22 nt, Artificial Sequence
  Synthetic oligonucleotide: PDCD1-6368
cacccaggagggauccuggaga

SEQ ID NO: 20001 - RNA, 23 nt, Artificial Sequence
  Synthetic oligonucleotide: PDCD1-6369
ccacccaggagggauccuggaga

SEQ ID NO: 20002 - RNA, 24 nt, Artificial Sequence
  Synthetic oligonucleotide: PDCD1-6370
cccacccaggagggauccuggaga

SEQ ID NO: 20003 - RNA, 18 nt, Artificial Sequence
  Synthetic oligonucleotide: PDCD1-6371
caccccacccuggcacga

SEQ ID NO: 20004 - RNA, 19 nt, Artificial Sequence
  Synthetic oligonucleotide: PDCD1-6372
ccaccccacccuggcacga

SEQ ID NO: 20005 - RNA, 20 nt, Artificial Sequence
  Synthetic oligonucleotide: PDCD1-1958
accaccccacccuggcacga

SEQ ID NO: 20006 - RNA, 21 nt, Artificial Sequence
  Synthetic oligonucleotide: PDCD1-6373
aaccaccccacccuggcacga

SEQ ID NO: 20007 - RNA, 22 nt, Artificial Sequence
  Synthetic oligonucleotide: PDCD1-6374
gaaccaccccacccuggcacga

SEQ ID NO: 20008 - RNA, 23 nt, Artificial Sequence
  Synthetic oligonucleotide: PDCD1-6375
ugaaccaccccacccuggcacga

SEQ ID NO: 20009 - RNA, 24 nt, Artificial Sequence
  Synthetic oligonucleotide: PDCD1-6376
cugaaccaccccacccuggcacga

SEQ ID NO: 20010 - RNA, 18 nt, Artificial Sequence
  Synthetic oligonucleotide: PDCD1-6377
ucaccugugccccagcga

SEQ ID NO: 20011 - RNA, 19 nt, Artificial Sequence
  Synthetic oligonucleotide: PDCD1-6378
gucaccugugccccagcga

SEQ ID NO: 20012 - RNA, 20 nt, Artificial Sequence
  Synthetic oligonucleotide: PDCD1-3024
ggucaccugugccccagcga

SEQ ID NO: 20013 - RNA, 21 nt, Artificial Sequence
  Synthetic oligonucleotide: PDCD1-6379
gggucaccugugccccagcga

SEQ ID NO: 20014 - RNA, 22 nt, Artificial Sequence
  Synthetic oligonucleotide: PDCD1-6380
agggucaccugugccccagcga

SEQ ID NO: 20015 - RNA, 23 nt, Artificial Sequence
  Synthetic oligonucleotide: PDCD1-6381
uagggucaccugugccccagcga

SEQ ID NO: 20016 - RNA, 24 nt, Artificial Sequence
  Synthetic oligonucleotide: PDCD1-6382
guagggucaccugugccccagcga

SEQ ID NO: 20017 - RNA, 18 nt, Artificial Sequence
  Synthetic oligonucleotide: PDCD1-6383
auccuuaggaaaacucga

SEQ ID NO: 20018 - RNA, 19 nt, Artificial Sequence
  Synthetic oligonucleotide: PDCD1-6384
cauccuuaggaaaacucga

SEQ ID NO: 20019 - RNA, 20 nt, Artificial Sequence
  Synthetic oligonucleotide: PDCD1-1711
ccauccuuaggaaaacucga

SEQ ID NO: 20020 - RNA, 21 nt, Artificial Sequence
  Synthetic oligonucleotide: PDCD1-6385
cccauccuuaggaaaacucga

SEQ ID NO: 20021 - RNA, 22 nt, Artificial Sequence
  Synthetic oligonucleotide: PDCD1-6386
ucccauccuuaggaaaacucga

SEQ ID NO: 20022 - RNA, 23 nt, Artificial Sequence
  Synthetic oligonucleotide: PDCD1-6387
aucccauccuuaggaaaacucga

SEQ ID NO: 20023 - RNA, 24 nt, Artificial Sequence
  Synthetic oligonucleotide: PDCD1-6388
caucccauccuuaggaaaacucga

SEQ ID NO: 20024 - RNA, 18 nt, Artificial Sequence
  Synthetic oligonucleotide: PDCD1-6389
ggcacagaggguccagga

SEQ ID NO: 20025 - RNA, 19 nt, Artificial Sequence
  Synthetic oligonucleotide: PDCD1-6390
gggcacagaggguccagga

SEQ ID NO: 20026 - RNA, 20 nt, Artificial Sequence
  Synthetic oligonucleotide: PDCD1-1668
cgggcacagaggguccagga

SEQ ID NO: 20027 - RNA, 21 nt, Artificial Sequence
  Synthetic oligonucleotide: PDCD1-6391
ccgggcacagaggguccagga

SEQ ID NO: 20028 - RNA, 22 nt, Artificial Sequence
  Synthetic oligonucleotide: PDCD1-6392
gccgggcacagaggguccagga

SEQ ID NO: 20029 - RNA, 23 nt, Artificial Sequence
  Synthetic oligonucleotide: PDCD1-6393
agccgggcacagaggguccagga

SEQ ID NO: 20030 - RNA, 24 nt, Artificial Sequence
  Synthetic oligonucleotide: PDCD1-6394
cagccgggcacagaggguccagga

SEQ ID NO: 20031 - RNA, 18 nt, Artificial Sequence
  Synthetic oligonucleotide: PDCD1-6395
aagaaggucaaggcugga

SEQ ID NO: 20032 - RNA, 19 nt, Artificial Sequence
  Synthetic oligonucleotide: PDCD1-6396
gaagaaggucaaggcugga

SEQ ID NO: 20033 - RNA, 20 nt, Artificial Sequence
  Synthetic oligonucleotide: PDCD1-3045
ggaagaaggucaaggcugga

SEQ ID NO: 20034 - RNA, 21 nt, Artificial Sequence
  Synthetic oligonucleotide: PDCD1-6397
gggaagaaggucaaggcugga

SEQ ID NO: 20035 - RNA, 22 nt, Artificial Sequence
  Synthetic oligonucleotide: PDCD1-6398
ggggaagaaggucaaggcugga

SEQ ID NO: 20036 - RNA, 23 nt, Artificial Sequence
  Synthetic oligonucleotide: PDCD1-6399
cggggaagaaggucaaggcugga

SEQ ID NO: 20037 - RNA, 24 nt, Artificial Sequence
  Synthetic oligonucleotide: PDCD1-6400
ccggggaagaaggucaaggcugga

SEQ ID NO: 20038 - RNA, 18 nt, Artificial Sequence
  Synthetic oligonucleotide: PDCD1-6401
acaagguggaagcuuuga

SEQ ID NO: 20039 - RNA, 19 nt, Artificial Sequence
  Synthetic oligonucleotide: PDCD1-6402
cacaagguggaagcuuuga

SEQ ID NO: 20040 - RNA, 20 nt, Artificial Sequence
  Synthetic oligonucleotide: PDCD1-3030
ccacaagguggaagcuuuga

SEQ ID NO: 20041 - RNA, 21 nt, Artificial Sequence
  Synthetic oligonucleotide: PDCD1-6403
uccacaagguggaagcuuuga

SEQ ID NO: 20042 - RNA, 22 nt, Artificial Sequence
  Synthetic oligonucleotide: PDCD1-6404
auccacaagguggaagcuuuga

SEQ ID NO: 20043 - RNA, 23 nt, Artificial Sequence
  Synthetic oligonucleotide: PDCD1-6405
cauccacaagguggaagcuuuga

SEQ ID NO: 20044 - RNA, 24 nt, Artificial Sequence
  Synthetic oligonucleotide: PDCD1-6406
ccauccacaagguggaagcuuuga

SEQ ID NO: 20045 - RNA, 18 nt, Artificial Sequence
  Synthetic oligonucleotide: PDCD1-6407
agguacacuuuggauaua

SEQ ID NO: 20046 - RNA, 19 nt, Artificial Sequence
  Synthetic oligonucleotide: PDCD1-6408
cagguacacuuuggauaua

SEQ ID NO: 20047 - RNA, 20 nt, Artificial Sequence
  Synthetic oligonucleotide: PDCD1-1704
acagguacacuuuggauaua

SEQ ID NO: 20048 - RNA, 21 nt, Artificial Sequence
  Synthetic oligonucleotide: PDCD1-6409
aacagguacacuuuggauaua

SEQ ID NO: 20049 - RNA, 22 nt, Artificial Sequence
  Synthetic oligonucleotide: PDCD1-6410
gaacagguacacuuuggauaua

SEQ ID NO: 20050 - RNA, 23 nt, Artificial Sequence
  Synthetic oligonucleotide: PDCD1-6411
cgaacagguacacuuuggauaua

SEQ ID NO: 20051 - RNA, 24 nt, Artificial Sequence
  Synthetic oligonucleotide: PDCD1-6412
ucgaacagguacacuuuggauaua

SEQ ID NO: 20052 - RNA, 18 nt, Artificial Sequence
  Synthetic oligonucleotide: PDCD1-6413
gccugacccgucauucua

SEQ ID NO: 20053 - RNA, 19 nt, Artificial Sequence
  Synthetic oligonucleotide: PDCD1-6414
agccugacccgucauucua

SEQ ID NO: 20054 - RNA, 20 nt, Artificial Sequence
  Synthetic oligonucleotide: PDCD1-957
cagccugacccgucauucua

SEQ ID NO: 20055 - RNA, 21 nt, Artificial Sequence
  Synthetic oligonucleotide: PDCD1-6415
ccagccugacccgucauucua

SEQ ID NO: 20056 - RNA, 22 nt, Artificial Sequence
  Synthetic oligonucleotide: PDCD1-6416
gccagccugacccgucauucua

SEQ ID NO: 20057 - RNA, 23 nt, Artificial Sequence
  Synthetic oligonucleotide: PDCD1-6417
ggccagccugacccgucauucua

SEQ ID NO: 20058 - RNA, 24 nt, Artificial Sequence
  Synthetic oligonucleotide: PDCD1-6418
uggccagccugacccgucauucua

SEQ ID NO: 20059 - RNA, 18 nt, Artificial Sequence
  Synthetic oligonucleotide: PDCD1-6419
agccaagguuagucccac

SEQ ID NO: 20060 - RNA, 19 nt, Artificial Sequence
  Synthetic oligonucleotide: PDCD1-6420
aagccaagguuagucccac

SEQ ID NO: 20061 - RNA, 20 nt, Artificial Sequence
  Synthetic oligonucleotide: PDCD1-1706
aaagccaagguuagucccac

SEQ ID NO: 20062 - RNA, 21 nt, Artificial Sequence
  Synthetic oligonucleotide: PDCD1-6421
uaaagccaagguuagucccac

SEQ ID NO: 20063 - RNA, 22 nt, Artificial Sequence
  Synthetic oligonucleotide: PDCD1-6422
guaaagccaagguuagucccac

SEQ ID NO: 20064 - RNA, 23 nt, Artificial Sequence
  Synthetic oligonucleotide: PDCD1-6423
cguaaagccaagguuagucccac

SEQ ID NO: 20065 - RNA, 24 nt, Artificial Sequence
  Synthetic oligonucleotide: PDCD1-6424
ucguaaagccaagguuagucccac

SEQ ID NO: 20066 - RNA, 18 nt, Artificial Sequence
  Synthetic oligonucleotide: PDCD1-6425
cagaagaacuguccucac

SEQ ID NO: 20067 - RNA, 19 nt, Artificial Sequence
  Synthetic oligonucleotide: PDCD1-6426
acagaagaacuguccucac

SEQ ID NO: 20068 - RNA, 20 nt, Artificial Sequence
  Synthetic oligonucleotide: PDCD1-1702
gacagaagaacuguccucac

SEQ ID NO: 20069 - RNA, 21 nt, Artificial Sequence
  Synthetic oligonucleotide: PDCD1-6427
agacagaagaacuguccucac

SEQ ID NO: 20070 - RNA, 22 nt, Artificial Sequence
  Synthetic oligonucleotide: PDCD1-6428
gagacagaagaacuguccucac

SEQ ID NO: 20071 - RNA, 23 nt, Artificial Sequence
  Synthetic oligonucleotide: PDCD1-6429
ggagacagaagaacuguccucac

SEQ ID NO: 20072 - RNA, 24 nt, Artificial Sequence
  Synthetic oligonucleotide: PDCD1-6430
uggagacagaagaacuguccucac

SEQ ID NO: 20073 - RNA, 18 nt, Artificial Sequence
  Synthetic oligonucleotide: PDCD1-6431
augcucagcacagaauac

SEQ ID NO: 20074 - RNA, 19 nt, Artificial Sequence
  Synthetic oligonucleotide: PDCD1-6432
aaugcucagcacagaauac

SEQ ID NO: 20075 - RNA, 20 nt, Artificial Sequence
  Synthetic oligonucleotide: PDCD1-1964
aaaugcucagcacagaauac

SEQ ID NO: 20076 - RNA, 21 nt, Artificial Sequence
  Synthetic oligonucleotide: PDCD1-6433
aaaaugcucagcacagaauac

SEQ ID NO: 20077 - RNA, 22 nt, Artificial Sequence
  Synthetic oligonucleotide: PDCD1-6434
uaaaaugcucagcacagaauac

SEQ ID NO: 20078 - RNA, 23 nt, Artificial Sequence
  Synthetic oligonucleotide: PDCD1-6435
auaaaaugcucagcacagaauac

SEQ ID NO: 20079 - RNA, 24 nt, Artificial Sequence
  Synthetic oligonucleotide: PDCD1-6436
aauaaaaugcucagcacagaauac

SEQ ID NO: 20080 - RNA, 18 nt, Artificial Sequence
  Synthetic oligonucleotide: PDCD1-6437
gcgggcacaauccccacc

SEQ ID NO: 20081 - RNA, 19 nt, Artificial Sequence
  Synthetic oligonucleotide: PDCD1-6438
ggcgggcacaauccccacc

SEQ ID NO: 20082 - RNA, 20 nt, Artificial Sequence
  Synthetic oligonucleotide: PDCD1-1694
aggcgggcacaauccccacc

SEQ ID NO: 20083 - RNA, 21 nt, Artificial Sequence
  Synthetic oligonucleotide: PDCD1-6439
caggcgggcacaauccccacc

SEQ ID NO: 20084 - RNA, 22 nt, Artificial Sequence
  Synthetic oligonucleotide: PDCD1-6440
ccaggcgggcacaauccccacc

SEQ ID NO: 20085 - RNA, 23 nt, Artificial Sequence
  Synthetic oligonucleotide: PDCD1-6441
cccaggcgggcacaauccccacc

SEQ ID NO: 20086 - RNA, 24 nt, Artificial Sequence
  Synthetic oligonucleotide: PDCD1-6442
acccaggcgggcacaauccccacc

SEQ ID NO: 20087 - RNA, 18 nt, Artificial Sequence
  Synthetic oligonucleotide: PDCD1-6443
cgggcacaauccccaccc

SEQ ID NO: 20088 - RNA, 19 nt, Artificial Sequence
  Synthetic oligonucleotide: PDCD1-6444
gcgggcacaauccccaccc

SEQ ID NO: 20089 - RNA, 20 nt, Artificial Sequence
  Synthetic oligonucleotide: PDCD1-2747
ggcgggcacaauccccaccc

SEQ ID NO: 20090 - RNA, 21 nt, Artificial Sequence
  Synthetic oligonucleotide: PDCD1-6445
aggcgggcacaauccccaccc

SEQ ID NO: 20091 - RNA, 22 nt, Artificial Sequence
  Synthetic oligonucleotide: PDCD1-6446
caggcgggcacaauccccaccc

SEQ ID NO: 20092 - RNA, 23 nt, Artificial Sequence
  Synthetic oligonucleotide: PDCD1-6447
ccaggcgggcacaauccccaccc

SEQ ID NO: 20093 - RNA, 24 nt, Artificial Sequence
  Synthetic oligonucleotide: PDCD1-6448
cccaggcgggcacaauccccaccc

SEQ ID NO: 20094 - RNA, 18 nt, Artificial Sequence
  Synthetic oligonucleotide: PDCD1-6449
gcccaggcacuggacccc

SEQ ID NO: 20095 - RNA, 19 nt, Artificial Sequence
  Synthetic oligonucleotide: PDCD1-6450
ggcccaggcacuggacccc

SEQ ID NO: 20096 - RNA, 20 nt, Artificial Sequence
  Synthetic oligonucleotide: PDCD1-1960
aggcccaggcacuggacccc

SEQ ID NO: 20097 - RNA, 21 nt, Artificial Sequence
  Synthetic oligonucleotide: PDCD1-6451
caggcccaggcacuggacccc

SEQ ID NO: 20098 - RNA, 22 nt, Artificial Sequence
  Synthetic oligonucleotide: PDCD1-6452
ccaggcccaggcacuggacccc

SEQ ID NO: 20099 - RNA, 23 nt, Artificial Sequence
  Synthetic oligonucleotide: PDCD1-6453
gccaggcccaggcacuggacccc

SEQ ID NO: 20100 - RNA, 24 nt, Artificial Sequence
  Synthetic oligonucleotide: PDCD1-6454
agccaggcccaggcacuggacccc

SEQ ID NO: 20101 - RNA, 18 nt, Artificial Sequence
  Synthetic oligonucleotide: PDCD1-6455
gcuggagggcagggcccc

SEQ ID NO: 20102 - RNA, 19 nt, Artificial Sequence
  Synthetic oligonucleotide: PDCD1-6456
ggcuggagggcagggcccc

SEQ ID NO: 20103 - RNA, 20 nt, Artificial Sequence
  Synthetic oligonucleotide: PDCD1-3050
gggcuggagggcagggcccc

SEQ ID NO: 20104 - RNA, 21 nt, Artificial Sequence
  Synthetic oligonucleotide: PDCD1-6457
ugggcuggagggcagggcccc

SEQ ID NO: 20105 - RNA, 22 nt, Artificial Sequence
  Synthetic oligonucleotide: PDCD1-6458
gugggcuggagggcagggcccc

SEQ ID NO: 20106 - RNA, 23 nt, Artificial Sequence
  Synthetic oligonucleotide: PDCD1-6459
agugggcuggagggcagggcccc

SEQ ID NO: 20107 - RNA, 24 nt, Artificial Sequence
  Synthetic oligonucleotide: PDCD1-6460
gagugggcuggagggcagggcccc

SEQ ID NO: 20108 - RNA, 18 nt, Artificial Sequence
  Synthetic oligonucleotide: PDCD1-6461
cagggucacgggcagccc

SEQ ID NO: 20109 - RNA, 19 nt, Artificial Sequence
  Synthetic oligonucleotide: PDCD1-6462
ccagggucacgggcagccc

SEQ ID NO: 20110 - RNA, 20 nt, Artificial Sequence
  Synthetic oligonucleotide: PDCD1-2728
cccagggucacgggcagccc

SEQ ID NO: 20111 - RNA, 21 nt, Artificial Sequence
  Synthetic oligonucleotide: PDCD1-6463
gcccagggucacgggcagccc

SEQ ID NO: 20112 - RNA, 22 nt, Artificial Sequence
  Synthetic oligonucleotide: PDCD1-6464
ggcccagggucacgggcagccc

SEQ ID NO: 20113 - RNA, 23 nt, Artificial Sequence
  Synthetic oligonucleotide: PDCD1-6465
gggcccagggucacgggcagccc

SEQ ID NO: 20114 - RNA, 24 nt, Artificial Sequence
  Synthetic oligonucleotide: PDCD1-6466
agggcccagggucacgggcagccc

SEQ ID NO: 20115 - RNA, 18 nt, Artificial Sequence
  Synthetic oligonucleotide: PDCD1-6467
ggcuggagggcagggccc

SEQ ID NO: 20116 - RNA, 19 nt, Artificial Sequence
  Synthetic oligonucleotide: PDCD1-6468
gggcuggagggcagggccc

SEQ ID NO: 20117 - RNA, 20 nt, Artificial Sequence
  Synthetic oligonucleotide: PDCD1-3051
ugggcuggagggcagggccc

SEQ ID NO: 20118 - RNA, 21 nt, Artificial Sequence
  Synthetic oligonucleotide: PDCD1-6469
gugggcuggagggcagggccc

SEQ ID NO: 20119 - RNA, 22 nt, Artificial Sequence
  Synthetic oligonucleotide: PDCD1-6470
agugggcuggagggcagggccc

SEQ ID NO: 20120 - RNA, 23 nt, Artificial Sequence
  Synthetic oligonucleotide: PDCD1-6471
gagugggcuggagggcagggccc

SEQ ID NO: 20121 - RNA, 24 nt, Artificial Sequence
  Synthetic oligonucleotide: PDCD1-6472
cgagugggcuggagggcagggccc

SEQ ID NO: 20122 - RNA, 18 nt, Artificial Sequence
  Synthetic oligonucleotide: PDCD1-6473
ccagggucacgggcagcc

SEQ ID NO: 20123 - RNA, 19 nt, Artificial Sequence
  Synthetic oligonucleotide: PDCD1-6474
cccagggucacgggcagcc

SEQ ID NO: 20124 - RNA, 20 nt, Artificial Sequence
  Synthetic oligonucleotide: PDCD1-1673
gcccagggucacgggcagcc

SEQ ID NO: 20125 - RNA, 21 nt, Artificial Sequence
  Synthetic oligonucleotide: PDCD1-6475
ggcccagggucacgggcagcc

SEQ ID NO: 20126 - RNA, 22 nt, Artificial Sequence
  Synthetic oligonucleotide: PDCD1-6476
gggcccagggucacgggcagcc

SEQ ID NO: 20127 - RNA, 23 nt, Artificial Sequence
  Synthetic oligonucleotide: PDCD1-6477
agggcccagggucacgggcagcc

SEQ ID NO: 20128 - RNA, 24 nt, Artificial Sequence
  Synthetic oligonucleotide: PDCD1-6478
gagggcccagggucacgggcagcc

SEQ ID NO: 20129 - RNA, 18 nt, Artificial Sequence
  Synthetic oligonucleotide: PDCD1-6479
cagggcucggggagagcc

SEQ ID NO: 20130 - RNA, 19 nt, Artificial Sequence
  Synthetic oligonucleotide: PDCD1-6480
acagggcucggggagagcc

SEQ ID NO: 20131 - RNA, 20 nt, Artificial Sequence
  Synthetic oligonucleotide: PDCD1-1689
aacagggcucggggagagcc

SEQ ID NO: 20132 - RNA, 21 nt, Artificial Sequence
  Synthetic oligonucleotide: PDCD1-6481
gaacagggcucggggagagcc

SEQ ID NO: 20133 - RNA, 22 nt, Artificial Sequence
  Synthetic oligonucleotide: PDCD1-6482
ugaacagggcucggggagagcc

SEQ ID NO: 20134 - RNA, 23 nt, Artificial Sequence
  Synthetic oligonucleotide: PDCD1-6483
cugaacagggcucggggagagcc

SEQ ID NO: 20135 - RNA, 24 nt, Artificial Sequence
  Synthetic oligonucleotide: PDCD1-6484
ucugaacagggcucggggagagcc

SEQ ID NO: 20136 - RNA, 18 nt, Artificial Sequence
  Synthetic oligonucleotide: PDCD1-6485
agggggagccgauuagcc

SEQ ID NO: 20137 - RNA, 19 nt, Artificial Sequence
  Synthetic oligonucleotide: PDCD1-6486
gagggggagccgauuagcc

SEQ ID NO: 20138 - RNA, 20 nt, Artificial Sequence
  Synthetic oligonucleotide: PDCD1-1929
ugagggggagccgauuagcc

SEQ ID NO: 20139 - RNA, 21 nt, Artificial Sequence
  Synthetic oligonucleotide: PDCD1-6487
uugagggggagccgauuagcc

SEQ ID NO: 20140 - RNA, 22 nt, Artificial Sequence
  Synthetic oligonucleotide: PDCD1-6488
uuugagggggagccgauuagcc

SEQ ID NO: 20141 - RNA, 23 nt, Artificial Sequence
  Synthetic oligonucleotide: PDCD1-6489
cuuugagggggagccgauuagcc

SEQ ID NO: 20142 - RNA, 24 nt, Artificial Sequence
  Synthetic oligonucleotide: PDCD1-6490
gcuuugagggggagccgauuagcc

SEQ ID NO: 20143 - RNA, 18 nt, Artificial Sequence
  Synthetic oligonucleotide: PDCD1-6491
gggcuggagggcagggcc

SEQ ID NO: 20144 - RNA, 19 nt, Artificial Sequence
  Synthetic oligonucleotide: PDCD1-6492
ugggcuggagggcagggcc

SEQ ID NO: 20145 - RNA, 20 nt, Artificial Sequence
  Synthetic oligonucleotide: PDCD1-1953
gugggcuggagggcagggcc

SEQ ID NO: 20146 - RNA, 21 nt, Artificial Sequence
  Synthetic oligonucleotide: PDCD1-6493
agugggcuggagggcagggcc

SEQ ID NO: 20147 - RNA, 22 nt, Artificial Sequence
  Synthetic oligonucleotide: PDCD1-6494
gagugggcuggagggcagggcc

SEQ ID NO: 20148 - RNA, 23 nt, Artificial Sequence
  Synthetic oligonucleotide: PDCD1-6495
cgagugggcuggagggcagggcc

SEQ ID NO: 20149 - RNA, 24 nt, Artificial Sequence
  Synthetic oligonucleotide: PDCD1-6496
acgagugggcuggagggcagggcc

SEQ ID NO: 20150 - RNA, 18 nt, Artificial Sequence
  Synthetic oligonucleotide: PDCD1-6497
agcgaagggggaugggcc

SEQ ID NO: 20151 - RNA, 19 nt, Artificial Sequence
  Synthetic oligonucleotide: PDCD1-6498
cagcgaagggggaugggcc

SEQ ID NO: 20152 - RNA, 20 nt, Artificial Sequence
  Synthetic oligonucleotide: PDCD1-3017
ccagcgaagggggaugggcc

SEQ ID NO: 20153 - RNA, 21 nt, Artificial Sequence
  Synthetic oligonucleotide: PDCD1-6499
cccagcgaagggggaugggcc

SEQ ID NO: 20154 - RNA, 22 nt, Artificial Sequence
  Synthetic oligonucleotide: PDCD1-6500
ccccagcgaagggggaugggcc

SEQ ID NO: 20155 - RNA, 23 nt, Artificial Sequence
  Synthetic oligonucleotide: PDCD1-6501
gccccagcgaagggggaugggcc

SEQ ID NO: 20156 - RNA, 24 nt, Artificial Sequence
  Synthetic oligonucleotide: PDCD1-6502
ugccccagcgaagggggaugggcc

SEQ ID NO: 20157 - RNA, 18 nt, Artificial Sequence
  Synthetic oligonucleotide: PDCD1-6503
ucccucucuccucgaucc

SEQ ID NO: 20158 - RNA, 19 nt, Artificial Sequence
  Synthetic oligonucleotide: PDCD1-6504
cucccucucuccucgaucc

SEQ ID NO: 20159 - RNA, 20 nt, Artificial Sequence
  Synthetic oligonucleotide: PDCD1-2731
gcucccucucuccucgaucc

SEQ ID NO: 20160 - RNA, 21 nt, Artificial Sequence
  Synthetic oligonucleotide: PDCD1-6505
ggcucccucucuccucgaucc

SEQ ID NO: 20161 - RNA, 22 nt, Artificial Sequence
  Synthetic oligonucleotide: PDCD1-6506
aggcucccucucuccucgaucc

SEQ ID NO: 20162 - RNA, 23 nt, Artificial Sequence
  Synthetic oligonucleotide: PDCD1-6507
gaggcucccucucuccucgaucc

SEQ ID NO: 20163 - RNA, 24 nt, Artificial Sequence
  Synthetic oligonucleotide: PDCD1-6508
agaggcucccucucuccucgaucc

SEQ ID NO: 20164 - RNA, 18 nt, Artificial Sequence
  Synthetic oligonucleotide: PDCD1-6509
cccacccaggagggaucc

SEQ ID NO: 20165 - RNA, 19 nt, Artificial Sequence
  Synthetic oligonucleotide: PDCD1-6510
ccccacccaggagggaucc

SEQ ID NO: 20166 - RNA, 20 nt, Artificial Sequence
  Synthetic oligonucleotide: PDCD1-2750
uccccacccaggagggaucc

SEQ ID NO: 20167 - RNA, 21 nt, Artificial Sequence
  Synthetic oligonucleotide: PDCD1-6511
auccccacccaggagggaucc

SEQ ID NO: 20168 - RNA, 22 nt, Artificial Sequence
  Synthetic oligonucleotide: PDCD1-6512
aauccccacccaggagggaucc

SEQ ID NO: 20169 - RNA, 23 nt, Artificial Sequence
  Synthetic oligonucleotide: PDCD1-6513
caauccccacccaggagggaucc

SEQ ID NO: 20170 - RNA, 24 nt, Artificial Sequence
  Synthetic oligonucleotide: PDCD1-6514
acaauccccacccaggagggaucc

SEQ ID NO: 20171 - RNA, 18 nt, Artificial Sequence
  Synthetic oligonucleotide: PDCD1-6515
gccgggcacagagggucc

SEQ ID NO: 20172 - RNA, 19 nt, Artificial Sequence
  Synthetic oligonucleotide: PDCD1-6516
agccgggcacagagggucc

SEQ ID NO: 20173 - RNA, 20 nt, Artificial Sequence
  Synthetic oligonucleotide: PDCD1-2718
cagccgggcacagagggucc

SEQ ID NO: 20174 - RNA, 21 nt, Artificial Sequence
  Synthetic oligonucleotide: PDCD1-6517
ccagccgggcacagagggucc

SEQ ID NO: 20175 - RNA, 22 nt, Artificial Sequence
  Synthetic oligonucleotide: PDCD1-6518
gccagccgggcacagagggucc

SEQ ID NO: 20176 - RNA, 23 nt, Artificial Sequence
  Synthetic oligonucleotide: PDCD1-6519
ggccagccgggcacagagggucc

SEQ ID NO: 20177 - RNA, 24 nt, Artificial Sequence
  Synthetic oligonucleotide: PDCD1-6520
gggccagccgggcacagagggucc

SEQ ID NO: 20178 - RNA, 18 nt, Artificial Sequence
  Synthetic oligonucleotide: PDCD1-6521
caggcaccugcccccagc

SEQ ID NO: 20179 - RNA, 19 nt, Artificial Sequence
  Synthetic oligonucleotide: PDCD1-6522
ccaggcaccugcccccagc

SEQ ID NO: 20180 - RNA, 20 nt, Artificial Sequence
  Synthetic oligonucleotide: PDCD1-3013
gccaggcaccugcccccagc

SEQ ID NO: 20181 - RNA, 21 nt, Artificial Sequence
  Synthetic oligonucleotide: PDCD1-6523
ggccaggcaccugcccccagc

SEQ ID NO: 20182 - RNA, 22 nt, Artificial Sequence
  Synthetic oligonucleotide: PDCD1-6524
aggccaggcaccugcccccagc

SEQ ID NO: 20183 - RNA, 23 nt, Artificial Sequence
  Synthetic oligonucleotide: PDCD1-6525
gaggccaggcaccugcccccagc

SEQ ID NO: 20184 - RNA, 24 nt, Artificial Sequence
  Synthetic oligonucleotide: PDCD1-6526
agaggccaggcaccugcccccagc

SEQ ID NO: 20185 - RNA, 18 nt, Artificial Sequence
  Synthetic oligonucleotide: PDCD1-6527
ggggaagaaggucaaggc

SEQ ID NO: 20186 - RNA, 19 nt, Artificial Sequence
  Synthetic oligonucleotide: PDCD1-6528
cggggaagaaggucaaggc

SEQ ID NO: 20187 - RNA, 20 nt, Artificial Sequence
  Synthetic oligonucleotide: PDCD1-3046
ccggggaagaaggucaaggc

SEQ ID NO: 20188 - RNA, 21 nt, Artificial Sequence
  Synthetic oligonucleotide: PDCD1-6529
cccggggaagaaggucaaggc

SEQ ID NO: 20189 - RNA, 22 nt, Artificial Sequence
  Synthetic oligonucleotide: PDCD1-6530
ccccggggaagaaggucaaggc

SEQ ID NO: 20190 - RNA, 23 nt, Artificial Sequence
  Synthetic oligonucleotide: PDCD1-6531
gccccggggaagaaggucaaggc

SEQ ID NO: 20191 - RNA, 24 nt, Artificial Sequence
  Synthetic oligonucleotide: PDCD1-6532
ggccccggggaagaaggucaaggc

SEQ ID NO: 20192 - RNA, 18 nt, Artificial Sequence
  Synthetic oligonucleotide: PDCD1-6533
ggauggucugaacagggc

SEQ ID NO: 20193 - RNA, 19 nt, Artificial Sequence
  Synthetic oligonucleotide: PDCD1-6534
cggauggucugaacagggc

SEQ ID NO: 20194 - RNA, 20 nt, Artificial Sequence
  Synthetic oligonucleotide: PDCD1-1684
acggauggucugaacagggc

SEQ ID NO: 20195 - RNA, 21 nt, Artificial Sequence
  Synthetic oligonucleotide: PDCD1-6535
cacggauggucugaacagggc

SEQ ID NO: 20196 - RNA, 22 nt, Artificial Sequence
  Synthetic oligonucleotide: PDCD1-6536
ccacggauggucugaacagggc

SEQ ID NO: 20197 - RNA, 23 nt, Artificial Sequence
  Synthetic oligonucleotide: PDCD1-6537
cccacggauggucugaacagggc

SEQ ID NO: 20198 - RNA, 24 nt, Artificial Sequence
  Synthetic oligonucleotide: PDCD1-6538
ccccacggauggucugaacagggc

SEQ ID NO: 20199 - RNA, 18 nt, Artificial Sequence
  Synthetic oligonucleotide: PDCD1-6539
cagcgaagggggaugggc

SEQ ID NO: 20200 - RNA, 19 nt, Artificial Sequence
  Synthetic oligonucleotide: PDCD1-6540
ccagcgaagggggaugggc

SEQ ID NO: 20201 - RNA, 20 nt, Artificial Sequence
  Synthetic oligonucleotide: PDCD1-3018
cccagcgaagggggaugggc

SEQ ID NO: 20202 - RNA, 21 nt, Artificial Sequence
  Synthetic oligonucleotide: PDCD1-6541
ccccagcgaagggggaugggc

SEQ ID NO: 20203 - RNA, 22 nt, Artificial Sequence
  Synthetic oligonucleotide: PDCD1-6542
gccccagcgaagggggaugggc

SEQ ID NO: 20204 - RNA, 23 nt, Artificial Sequence
  Synthetic oligonucleotide: PDCD1-6543
ugccccagcgaagggggaugggc

SEQ ID NO: 20205 - RNA, 24 nt, Artificial Sequence
  Synthetic oligonucleotide: PDCD1-6544
gugccccagcgaagggggaugggc

SEQ ID NO: 20206 - RNA, 18 nt, Artificial Sequence
  Synthetic oligonucleotide: PDCD1-6545
acccuggcacgagugggc

SEQ ID NO: 20207 - RNA, 19 nt, Artificial Sequence
  Synthetic oligonucleotide: PDCD1-6546
cacccuggcacgagugggc

SEQ ID NO: 20208 - RNA, 20 nt, Artificial Sequence
  Synthetic oligonucleotide: PDCD1-3056
ccacccuggcacgagugggc

SEQ ID NO: 20209 - RNA, 21 nt, Artificial Sequence
  Synthetic oligonucleotide: PDCD1-6547
cccacccuggcacgagugggc

SEQ ID NO: 20210 - RNA, 22 nt, Artificial Sequence
  Synthetic oligonucleotide: PDCD1-6548
ccccacccuggcacgagugggc

SEQ ID NO: 20211 - RNA, 23 nt, Artificial Sequence
  Synthetic oligonucleotide: PDCD1-6549
accccacccuggcacgagugggc

SEQ ID NO: 20212 - RNA, 24 nt, Artificial Sequence
  Synthetic oligonucleotide: PDCD1-6550
caccccacccuggcacgagugggc

SEQ ID NO: 20213 - RNA, 18 nt, Artificial Sequence
  Synthetic oligonucleotide: PDCD1-6551
agugaggaccaaggaugc

SEQ ID NO: 20214 - RNA, 19 nt, Artificial Sequence
  Synthetic oligonucleotide: PDCD1-6552
gagugaggaccaaggaugc

SEQ ID NO: 20215 - RNA, 20 nt, Artificial Sequence
  Synthetic oligonucleotide: PDCD1-1714
cgagugaggaccaaggaugc

SEQ ID NO: 20216 - RNA, 21 nt, Artificial Sequence
  Synthetic oligonucleotide: PDCD1-6553
ucgagugaggaccaaggaugc

SEQ ID NO: 20217 - RNA, 22 nt, Artificial Sequence
  Synthetic oligonucleotide: PDCD1-6554
cucgagugaggaccaaggaugc

SEQ ID NO: 20218 - RNA, 23 nt, Artificial Sequence
  Synthetic oligonucleotide: PDCD1-6555
acucgagugaggaccaaggaugc

SEQ ID NO: 20219 - RNA, 24 nt, Artificial Sequence
  Synthetic oligonucleotide: PDCD1-6556
aacucgagugaggaccaaggaugc

SEQ ID NO: 20220 - RNA, 18 nt, Artificial Sequence
  Synthetic oligonucleotide: PDCD1-6557
ucacacgguggaaagauc

SEQ ID NO: 20221 - RNA, 19 nt, Artificial Sequence
  Synthetic oligonucleotide: PDCD1-6558
aucacacgguggaaagauc

SEQ ID NO: 20222 - RNA, 20 nt, Artificial Sequence
  Synthetic oligonucleotide: PDCD1-3037
caucacacgguggaaagauc

SEQ ID NO: 20223 - RNA, 21 nt, Artificial Sequence
  Synthetic oligonucleotide: PDCD1-6559
gcaucacacgguggaaagauc

SEQ ID NO: 20224 - RNA, 22 nt, Artificial Sequence
  Synthetic oligonucleotide: PDCD1-6560
ggcaucacacgguggaaagauc

SEQ ID NO: 20225 - RNA, 23 nt, Artificial Sequence
  Synthetic oligonucleotide: PDCD1-6561
aggcaucacacgguggaaagauc

SEQ ID NO: 20226 - RNA, 24 nt, Artificial Sequence
  Synthetic oligonucleotide: PDCD1-6562
caggcaucacacgguggaaagauc

SEQ ID NO: 20227 - RNA, 18 nt, Artificial Sequence
  Synthetic oligonucleotide: PDCD1-6563
cucccucucuccucgauc

SEQ ID NO: 20228 - RNA, 19 nt, Artificial Sequence
  Synthetic oligonucleotide: PDCD1-6564
gcucccucucuccucgauc

SEQ ID NO: 20229 - RNA, 20 nt, Artificial Sequence
  Synthetic oligonucleotide: PDCD1-2730
ggcucccucucuccucgauc

SEQ ID NO: 20230 - RNA, 21 nt, Artificial Sequence
  Synthetic oligonucleotide: PDCD1-6565
aggcucccucucuccucgauc

SEQ ID NO: 20231 - RNA, 22 nt, Artificial Sequence
  Synthetic oligonucleotide: PDCD1-6566
gaggcucccucucuccucgauc

SEQ ID NO: 20232 - RNA, 23 nt, Artificial Sequence
  Synthetic oligonucleotide: PDCD1-6567
agaggcucccucucuccucgauc

SEQ ID NO: 20233 - RNA, 24 nt, Artificial Sequence
  Synthetic oligonucleotide: PDCD1-6568
aagaggcucccucucuccucgauc

SEQ ID NO: 20234 - RNA, 18 nt, Artificial Sequence
  Synthetic oligonucleotide: PDCD1-6569
ccccacccaggagggauc

SEQ ID NO: 20235 - RNA, 19 nt, Artificial Sequence
  Synthetic oligonucleotide: PDCD1-6570
uccccacccaggagggauc

SEQ ID NO: 20236 - RNA, 20 nt, Artificial Sequence
  Synthetic oligonucleotide: PDCD1-1698
auccccacccaggagggauc

SEQ ID NO: 20237 - RNA, 21 nt, Artificial Sequence
  Synthetic oligonucleotide: PDCD1-6571
aauccccacccaggagggauc

SEQ ID NO: 20238 - RNA, 22 nt, Artificial Sequence
  Synthetic oligonucleotide: PDCD1-6572
caauccccacccaggagggauc

SEQ ID NO: 20239 - RNA, 23 nt, Artificial Sequence
  Synthetic oligonucleotide: PDCD1-6573
acaauccccacccaggagggauc

SEQ ID NO: 20240 - RNA, 24 nt, Artificial Sequence
  Synthetic oligonucleotide: PDCD1-6574
cacaauccccacccaggagggauc

SEQ ID NO: 20241 - RNA, 18 nt, Artificial Sequence
  Synthetic oligonucleotide: PDCD1-6575
auggucugaacagggcuc

SEQ ID NO: 20242 - RNA, 19 nt, Artificial Sequence
  Synthetic oligonucleotide: PDCD1-6576
gauggucugaacagggcuc

SEQ ID NO: 20243 - RNA, 20 nt, Artificial Sequence
  Synthetic oligonucleotide: PDCD1-2739
ggauggucugaacagggcuc

SEQ ID NO: 20244 - RNA, 21 nt, Artificial Sequence
  Synthetic oligonucleotide: PDCD1-6577
cggauggucugaacagggcuc

SEQ ID NO: 20245 - RNA, 22 nt, Artificial Sequence
  Synthetic oligonucleotide: PDCD1-6578
acggauggucugaacagggcuc

SEQ ID NO: 20246 - RNA, 23 nt, Artificial Sequence
  Synthetic oligonucleotide: PDCD1-6579
cacggauggucugaacagggcuc

SEQ ID NO: 20247 - RNA, 24 nt, Artificial Sequence
  Synthetic oligonucleotide: PDCD1-6580
ccacggauggucugaacagggcuc

SEQ ID NO: 20248 - RNA, 18 nt, Artificial Sequence
  Synthetic oligonucleotide: PDCD1-6581
cacagagggcccaggguc

SEQ ID NO: 20249 - RNA, 19 nt, Artificial Sequence
  Synthetic oligonucleotide: PDCD1-6582
acacagagggcccaggguc

SEQ ID NO: 20250 - RNA, 20 nt, Artificial Sequence
  Synthetic oligonucleotide: PDCD1-1672
uacacagagggcccaggguc

SEQ ID NO: 20251 - RNA, 21 nt, Artificial Sequence
  Synthetic oligonucleotide: PDCD1-6583
guacacagagggcccaggguc

SEQ ID NO: 20252 - RNA, 22 nt, Artificial Sequence
  Synthetic oligonucleotide: PDCD1-6584
uguacacagagggcccaggguc

SEQ ID NO: 20253 - RNA, 23 nt, Artificial Sequence
  Synthetic oligonucleotide: PDCD1-6585
guguacacagagggcccaggguc

SEQ ID NO: 20254 - RNA, 24 nt, Artificial Sequence
  Synthetic oligonucleotide: PDCD1-6586
aguguacacagagggcccaggguc

SEQ ID NO: 20255 - RNA, 18 nt, Artificial Sequence
  Synthetic oligonucleotide: PDCD1-6587
agccgggcacagaggguc

SEQ ID NO: 20256 - RNA, 19 nt, Artificial Sequence
  Synthetic oligonucleotide: PDCD1-6588
cagccgggcacagaggguc

SEQ ID NO: 20257 - RNA, 20 nt, Artificial Sequence
  Synthetic oligonucleotide: PDCD1-1666
ccagccgggcacagaggguc

SEQ ID NO: 20258 - RNA, 21 nt, Artificial Sequence
  Synthetic oligonucleotide: PDCD1-6589
gccagccgggcacagaggguc

SEQ ID NO: 20259 - RNA, 22 nt, Artificial Sequence
  Synthetic oligonucleotide: PDCD1-6590
ggccagccgggcacagaggguc

SEQ ID NO: 20260 - RNA, 23 nt, Artificial Sequence
  Synthetic oligonucleotide: PDCD1-6591
gggccagccgggcacagaggguc

SEQ ID NO: 20261 - RNA, 24 nt, Artificial Sequence
  Synthetic oligonucleotide: PDCD1-6592
agggccagccgggcacagaggguc

SEQ ID NO: 20262 - RNA, 18 nt, Artificial Sequence
  Synthetic oligonucleotide: PDCD1-6593
ugugaggccauccacaag

SEQ ID NO: 20263 - RNA, 19 nt, Artificial Sequence
  Synthetic oligonucleotide: PDCD1-6594
gugugaggccauccacaag

SEQ ID NO: 20264 - RNA, 20 nt, Artificial Sequence
  Synthetic oligonucleotide: PDCD1-1937
ggugugaggccauccacaag

SEQ ID NO: 20265 - RNA, 21 nt, Artificial Sequence
  Synthetic oligonucleotide: PDCD1-6595
uggugugaggccauccacaag

SEQ ID NO: 20266 - RNA, 22 nt, Artificial Sequence
  Synthetic oligonucleotide: PDCD1-6596
auggugugaggccauccacaag

SEQ ID NO: 20267 - RNA, 23 nt, Artificial Sequence
  Synthetic oligonucleotide: PDCD1-6597
cauggugugaggccauccacaag

SEQ ID NO: 20268 - RNA, 24 nt, Artificial Sequence
  Synthetic oligonucleotide: PDCD1-6598
ccauggugugaggccauccacaag

SEQ ID NO: 20269 - RNA, 18 nt, Artificial Sequence
  Synthetic oligonucleotide: PDCD1-6599
gaaggucaaggcuggaag

SEQ ID NO: 20270 - RNA, 19 nt, Artificial Sequence
  Synthetic oligonucleotide: PDCD1-6600
agaaggucaaggcuggaag

SEQ ID NO: 20271 - RNA, 20 nt, Artificial Sequence
  Synthetic oligonucleotide: PDCD1-3043
aagaaggucaaggcuggaag

SEQ ID NO: 20272 - RNA, 21 nt, Artificial Sequence
  Synthetic oligonucleotide: PDCD1-6601
gaagaaggucaaggcuggaag

SEQ ID NO: 20273 - RNA, 22 nt, Artificial Sequence
  Synthetic oligonucleotide: PDCD1-6602
ggaagaaggucaaggcuggaag

SEQ ID NO: 20274 - RNA, 23 nt, Artificial Sequence
  Synthetic oligonucleotide: PDCD1-6603
gggaagaaggucaaggcuggaag

SEQ ID NO: 20275 - RNA, 24 nt, Artificial Sequence
  Synthetic oligonucleotide: PDCD1-6604
ggggaagaaggucaaggcuggaag

SEQ ID NO: 20276 - RNA, 18 nt, Artificial Sequence
  Synthetic oligonucleotide: PDCD1-6605
gagggauccuggagacag

SEQ ID NO: 20277 - RNA, 19 nt, Artificial Sequence
  Synthetic oligonucleotide: PDCD1-6606
ggagggauccuggagacag

SEQ ID NO: 20278 - RNA, 20 nt, Artificial Sequence
  Synthetic oligonucleotide: PDCD1-1701
aggagggauccuggagacag

SEQ ID NO: 20279 - RNA, 21 nt, Artificial Sequence
  Synthetic oligonucleotide: PDCD1-6607
caggagggauccuggagacag

SEQ ID NO: 20280 - RNA, 22 nt, Artificial Sequence
  Synthetic oligonucleotide: PDCD1-6608
ccaggagggauccuggagacag

SEQ ID NO: 20281 - RNA, 23 nt, Artificial Sequence
  Synthetic oligonucleotide: PDCD1-6609
cccaggagggauccuggagacag

SEQ ID NO: 20282 - RNA, 24 nt, Artificial Sequence
  Synthetic oligonucleotide: PDCD1-6610
acccaggagggauccuggagacag

SEQ ID NO: 20283 - RNA, 18 nt, Artificial Sequence
  Synthetic oligonucleotide: PDCD1-6611
ggcacaauccccacccag

SEQ ID NO: 20284 - RNA, 19 nt, Artificial Sequence
  Synthetic oligonucleotide: PDCD1-6612
gggcacaauccccacccag

SEQ ID NO: 20285 - RNA, 20 nt, Artificial Sequence
  Synthetic oligonucleotide: PDCD1-1696
cgggcacaauccccacccag

SEQ ID NO: 20286 - RNA, 21 nt, Artificial Sequence
  Synthetic oligonucleotide: PDCD1-6613
gcgggcacaauccccacccag

SEQ ID NO: 20287 - RNA, 22 nt, Artificial Sequence
  Synthetic oligonucleotide: PDCD1-6614
ggcgggcacaauccccacccag

SEQ ID NO: 20288 - RNA, 23 nt, Artificial Sequence
  Synthetic oligonucleotide: PDCD1-6615
aggcgggcacaauccccacccag

SEQ ID NO: 20289 - RNA, 24 nt, Artificial Sequence
  Synthetic oligonucleotide: PDCD1-6616
caggcgggcacaauccccacccag

SEQ ID NO: 20290 - RNA, 18 nt, Artificial Sequence
  Synthetic oligonucleotide: PDCD1-6617
aucugggcagagacccag

SEQ ID NO: 20291 - RNA, 19 nt, Artificial Sequence
  Synthetic oligonucleotide: PDCD1-6618
aaucugggcagagacccag

SEQ ID NO: 20292 - RNA, 20 nt, Artificial Sequence
  Synthetic oligonucleotide: PDCD1-1693
gaaucugggcagagacccag

SEQ ID NO: 20293 - RNA, 21 nt, Artificial Sequence
  Synthetic oligonucleotide: PDCD1-6619
ggaaucugggcagagacccag

SEQ ID NO: 20294 - RNA, 22 nt, Artificial Sequence
  Synthetic oligonucleotide: PDCD1-6620
uggaaucugggcagagacccag

SEQ ID NO: 20295 - RNA, 23 nt, Artificial Sequence
  Synthetic oligonucleotide: PDCD1-6621
cuggaaucugggcagagacccag

SEQ ID NO: 20296 - RNA, 24 nt, Artificial Sequence
  Synthetic oligonucleotide: PDCD1-6622
ccuggaaucugggcagagacccag

SEQ ID NO: 20297 - RNA, 18 nt, Artificial Sequence
  Synthetic oligonucleotide: PDCD1-6623
ccaggcaccugcccccag

SEQ ID NO: 20298 - RNA, 19 nt, Artificial Sequence
  Synthetic oligonucleotide: PDCD1-6624
gccaggcaccugcccccag

SEQ ID NO: 20299 - RNA, 20 nt, Artificial Sequence
  Synthetic oligonucleotide: PDCD1-1917
ggccaggcaccugcccccag

SEQ ID NO: 20300 - RNA, 21 nt, Artificial Sequence
  Synthetic oligonucleotide: PDCD1-6625
aggccaggcaccugcccccag

SEQ ID NO: 20301 - RNA, 22 nt, Artificial Sequence
  Synthetic oligonucleotide: PDCD1-6626
gaggccaggcaccugcccccag

SEQ ID NO: 20302 - RNA, 23 nt, Artificial Sequence
  Synthetic oligonucleotide: PDCD1-6627
agaggccaggcaccugcccccag

SEQ ID NO: 20303 - RNA, 24 nt, Artificial Sequence
  Synthetic oligonucleotide: PDCD1-6628
cagaggccaggcaccugcccccag

SEQ ID NO: 20304 - RNA, 18 nt, Artificial Sequence
  Synthetic oligonucleotide: PDCD1-6629
cugggcacagagggccag

SEQ ID NO: 20305 - RNA, 19 nt, Artificial Sequence
  Synthetic oligonucleotide: PDCD1-6630
gcugggcacagagggccag

SEQ ID NO: 20306 - RNA, 20 nt, Artificial Sequence
  Synthetic oligonucleotide: PDCD1-1663
ggcugggcacagagggccag

SEQ ID NO: 20307 - RNA, 21 nt, Artificial Sequence
  Synthetic oligonucleotide: PDCD1-6631
uggcugggcacagagggccag

SEQ ID NO: 20308 - RNA, 22 nt, Artificial Sequence
  Synthetic oligonucleotide: PDCD1-6632
cuggcugggcacagagggccag

SEQ ID NO: 20309 - RNA, 23 nt, Artificial Sequence
  Synthetic oligonucleotide: PDCD1-6633
gcuggcugggcacagagggccag

SEQ ID NO: 20310 - RNA, 24 nt, Artificial Sequence
  Synthetic oligonucleotide: PDCD1-6634
ggcuggcugggcacagagggccag

SEQ ID NO: 20311 - RNA, 18 nt, Artificial Sequence
  Synthetic oligonucleotide: PDCD1-6635
caagguggaagcuuugag

SEQ ID NO: 20312 - RNA, 19 nt, Artificial Sequence
  Synthetic oligonucleotide: PDCD1-6636
acaagguggaagcuuugag

SEQ ID NO: 20313 - RNA, 20 nt, Artificial Sequence
  Synthetic oligonucleotide: PDCD1-3029
cacaagguggaagcuuugag

SEQ ID NO: 20314 - RNA, 21 nt, Artificial Sequence
  Synthetic oligonucleotide: PDCD1-6637
ccacaagguggaagcuuugag

SEQ ID NO: 20315 - RNA, 22 nt, Artificial Sequence
  Synthetic oligonucleotide: PDCD1-6638
uccacaagguggaagcuuugag

SEQ ID NO: 20316 - RNA, 23 nt, Artificial Sequence
  Synthetic oligonucleotide: PDCD1-6639
auccacaagguggaagcuuugag

SEQ ID NO: 20317 - RNA, 24 nt, Artificial Sequence
  Synthetic oligonucleotide: PDCD1-6640
cauccacaagguggaagcuuugag

SEQ ID NO: 20318 - RNA, 18 nt, Artificial Sequence
  Synthetic oligonucleotide: PDCD1-6641
caagccauuucacaaacg

SEQ ID NO: 20319 - RNA, 19 nt, Artificial Sequence
  Synthetic oligonucleotide: PDCD1-6642
gcaagccauuucacaaacg

SEQ ID NO: 20320 - RNA, 20 nt, Artificial Sequence
  Synthetic oligonucleotide: PDCD1-1962
agcaagccauuucacaaacg

SEQ ID NO: 20321 - RNA, 21 nt, Artificial Sequence
  Synthetic oligonucleotide: PDCD1-6643
aagcaagccauuucacaaacg

SEQ ID NO: 20322 - RNA, 22 nt, Artificial Sequence
  Synthetic oligonucleotide: PDCD1-6644
uaagcaagccauuucacaaacg

SEQ ID NO: 20323 - RNA, 23 nt, Artificial Sequence
  Synthetic oligonucleotide: PDCD1-6645
auaagcaagccauuucacaaacg

SEQ ID NO: 20324 - RNA, 24 nt, Artificial Sequence
  Synthetic oligonucleotide: PDCD1-6646
gauaagcaagccauuucacaaacg

SEQ ID NO: 20325 - RNA, 18 nt, Artificial Sequence
  Synthetic oligonucleotide: PDCD1-6647
uguugcaggcaucacacg

SEQ ID NO: 20326 - RNA, 19 nt, Artificial Sequence
  Synthetic oligonucleotide: PDCD1-6648
cuguugcaggcaucacacg

SEQ ID NO: 20327 - RNA, 20 nt, Artificial Sequence
  Synthetic oligonucleotide: PDCD1-1942
gcuguugcaggcaucacacg

SEQ ID NO: 20328 - RNA, 21 nt, Artificial Sequence
  Synthetic oligonucleotide: PDCD1-6649
ggcuguugcaggcaucacacg

SEQ ID NO: 20329 - RNA, 22 nt, Artificial Sequence
  Synthetic oligonucleotide: PDCD1-6650
aggcuguugcaggcaucacacg

SEQ ID NO: 20330 - RNA, 23 nt, Artificial Sequence
  Synthetic oligonucleotide: PDCD1-6651
caggcuguugcaggcaucacacg

SEQ ID NO: 20331 - RNA, 24 nt, Artificial Sequence
  Synthetic oligonucleotide: PDCD1-6652
ucaggcuguugcaggcaucacacg

SEQ ID NO: 20332 - RNA, 18 nt, Artificial Sequence
  Synthetic oligonucleotide: PDCD1-6653
cuggagggcagggccccg

SEQ ID NO: 20333 - RNA, 19 nt, Artificial Sequence
  Synthetic oligonucleotide: PDCD1-6654
gcuggagggcagggccccg

SEQ ID NO: 20334 - RNA, 20 nt, Artificial Sequence
  Synthetic oligonucleotide: PDCD1-3049
ggcuggagggcagggccccg

SEQ ID NO: 20335 - RNA, 21 nt, Artificial Sequence
  Synthetic oligonucleotide: PDCD1-6655
gggcuggagggcagggccccg

SEQ ID NO: 20336 - RNA, 22 nt, Artificial Sequence
  Synthetic oligonucleotide: PDCD1-6656
ugggcuggagggcagggccccg

SEQ ID NO: 20337 - RNA, 23 nt, Artificial Sequence
  Synthetic oligonucleotide: PDCD1-6657
gugggcuggagggcagggccccg

SEQ ID NO: 20338 - RNA, 24 nt, Artificial Sequence
  Synthetic oligonucleotide: PDCD1-6658
agugggcuggagggcagggccccg

SEQ ID NO: 20339 - RNA, 18 nt, Artificial Sequence
  Synthetic oligonucleotide: PDCD1-6659
gucaccugugccccagcg

SEQ ID NO: 20340 - RNA, 19 nt, Artificial Sequence
  Synthetic oligonucleotide: PDCD1-6660
ggucaccugugccccagcg

SEQ ID NO: 20341 - RNA, 20 nt, Artificial Sequence
  Synthetic oligonucleotide: PDCD1-1926
gggucaccugugccccagcg

SEQ ID NO: 20342 - RNA, 21 nt, Artificial Sequence
  Synthetic oligonucleotide: PDCD1-6661
agggucaccugugccccagcg

SEQ ID NO: 20343 - RNA, 22 nt, Artificial Sequence
  Synthetic oligonucleotide: PDCD1-6662
uagggucaccugugccccagcg

SEQ ID NO: 20344 - RNA, 23 nt, Artificial Sequence
  Synthetic oligonucleotide: PDCD1-6663
guagggucaccugugccccagcg

SEQ ID NO: 20345 - RNA, 24 nt, Artificial Sequence
  Synthetic oligonucleotide: PDCD1-6664
aguagggucaccugugccccagcg

SEQ ID NO: 20346 - RNA, 18 nt, Artificial Sequence
  Synthetic oligonucleotide: PDCD1-6665
uggucugaacagggcucg

SEQ ID NO: 20347 - RNA, 19 nt, Artificial Sequence
  Synthetic oligonucleotide: PDCD1-6666
auggucugaacagggcucg

SEQ ID NO: 20348 - RNA, 20 nt, Artificial Sequence
  Synthetic oligonucleotide: PDCD1-2740
gauggucugaacagggcucg

SEQ ID NO: 20349 - RNA, 21 nt, Artificial Sequence
  Synthetic oligonucleotide: PDCD1-6667
ggauggucugaacagggcucg

SEQ ID NO: 20350 - RNA, 22 nt, Artificial Sequence
  Synthetic oligonucleotide: PDCD1-6668
cggauggucugaacagggcucg

SEQ ID NO: 20351 - RNA, 23 nt, Artificial Sequence
  Synthetic oligonucleotide: PDCD1-6669
acggauggucugaacagggcucg

SEQ ID NO: 20352 - RNA, 24 nt, Artificial Sequence
  Synthetic oligonucleotide: PDCD1-6670
cacggauggucugaacagggcucg

SEQ ID NO: 20353 - RNA, 18 nt, Artificial Sequence
  Synthetic oligonucleotide: PDCD1-6671
gugaggccauccacaagg

SEQ ID NO: 20354 - RNA, 19 nt, Artificial Sequence
  Synthetic oligonucleotide: PDCD1-6672
ugugaggccauccacaagg

SEQ ID NO: 20355 - RNA, 20 nt, Artificial Sequence
  Synthetic oligonucleotide: PDCD1-3032
gugugaggccauccacaagg

SEQ ID NO: 20356 - RNA, 21 nt, Artificial Sequence
  Synthetic oligonucleotide: PDCD1-6673
ggugugaggccauccacaagg

SEQ ID NO: 20357 - RNA, 22 nt, Artificial Sequence
  Synthetic oligonucleotide: PDCD1-6674
uggugugaggccauccacaagg

SEQ ID NO: 20358 - RNA, 23 nt, Artificial Sequence
  Synthetic oligonucleotide: PDCD1-6675
auggugugaggccauccacaagg

SEQ ID NO: 20359 - RNA, 24 nt, Artificial Sequence
  Synthetic oligonucleotide: PDCD1-6676
cauggugugaggccauccacaagg

SEQ ID NO: 20360 - RNA, 18 nt, Artificial Sequence
  Synthetic oligonucleotide: PDCD1-6677
aaggaugccugggcaagg

SEQ ID NO: 20361 - RNA, 19 nt, Artificial Sequence
  Synthetic oligonucleotide: PDCD1-6678
caaggaugccugggcaagg

SEQ ID NO: 20362 - RNA, 20 nt, Artificial Sequence
  Synthetic oligonucleotide: PDCD1-6679
ccaaggaugccugggcaagg

SEQ ID NO: 20363 - RNA, 21 nt, Artificial Sequence
  Synthetic oligonucleotide: PDCD1-6680
accaaggaugccugggcaagg

SEQ ID NO: 20364 - RNA, 22 nt, Artificial Sequence
  Synthetic oligonucleotide: PDCD1-6681
gaccaaggaugccugggcaagg

SEQ ID NO: 20365 - RNA, 23 nt, Artificial Sequence
  Synthetic oligonucleotide: PDCD1-6682
ggaccaaggaugccugggcaagg

SEQ ID NO: 20366 - RNA, 24 nt, Artificial Sequence
  Synthetic oligonucleotide: PDCD1-6683
aggaccaaggaugccugggcaagg

SEQ ID NO: 20367 - RNA, 18 nt, Artificial Sequence
  Synthetic oligonucleotide: PDCD1-6684
cggggaagaaggucaagg

SEQ ID NO: 20368 - RNA, 19 nt, Artificial Sequence
  Synthetic oligonucleotide: PDCD1-6685
ccggggaagaaggucaagg

SEQ ID NO: 20369 - RNA, 20 nt, Artificial Sequence
  Synthetic oligonucleotide: PDCD1-1948
cccggggaagaaggucaagg

SEQ ID NO: 20370 - RNA, 21 nt, Artificial Sequence
  Synthetic oligonucleotide: PDCD1-6686
ccccggggaagaaggucaagg

SEQ ID NO: 20371 - RNA, 22 nt, Artificial Sequence
  Synthetic oligonucleotide: PDCD1-6687
gccccggggaagaaggucaagg

SEQ ID NO: 20372 - RNA, 23 nt, Artificial Sequence
  Synthetic oligonucleotide: PDCD1-6688
ggccccggggaagaaggucaagg

SEQ ID NO: 20373 - RNA, 24 nt, Artificial Sequence
  Synthetic oligonucleotide: PDCD1-6689
gggccccggggaagaaggucaagg

SEQ ID NO: 20374 - RNA, 18 nt, Artificial Sequence
  Synthetic oligonucleotide: PDCD1-6690
ggggaugggccgggaagg

SEQ ID NO: 20375 - RNA, 19 nt, Artificial Sequence
  Synthetic oligonucleotide: PDCD1-6691
gggggaugggccgggaagg

SEQ ID NO: 20376 - RNA, 20 nt, Artificial Sequence
  Synthetic oligonucleotide: PDCD1-1918
agggggaugggccgggaagg

SEQ ID NO: 20377 - RNA, 21 nt, Artificial Sequence
  Synthetic oligonucleotide: PDCD1-6692
aagggggaugggccgggaagg

SEQ ID NO: 20378 - RNA, 22 nt, Artificial Sequence
  Synthetic oligonucleotide: PDCD1-6693
gaagggggaugggccgggaagg

SEQ ID NO: 20379 - RNA, 23 nt, Artificial Sequence
  Synthetic oligonucleotide: PDCD1-6694
cgaagggggaugggccgggaagg

SEQ ID NO: 20380 - RNA, 24 nt, Artificial Sequence
  Synthetic oligonucleotide: PDCD1-6695
gcgaagggggaugggccgggaagg

SEQ ID NO: 20381 - RNA, 18 nt, Artificial Sequence
  Synthetic oligonucleotide: PDCD1-6696
ggucacgggcagcccagg

SEQ ID NO: 20382 - RNA, 19 nt, Artificial Sequence
  Synthetic oligonucleotide: PDCD1-6697
gggucacgggcagcccagg

SEQ ID NO: 20383 - RNA, 20 nt, Artificial Sequence
  Synthetic oligonucleotide: PDCD1-1675
agggucacgggcagcccagg

SEQ ID NO: 20384 - RNA, 21 nt, Artificial Sequence
  Synthetic oligonucleotide: PDCD1-6698
cagggucacgggcagcccagg

SEQ ID NO: 20385 - RNA, 22 nt, Artificial Sequence
  Synthetic oligonucleotide: PDCD1-6699
ccagggucacgggcagcccagg

SEQ ID NO: 20386 - RNA, 23 nt, Artificial Sequence
  Synthetic oligonucleotide: PDCD1-6700
cccagggucacgggcagcccagg

SEQ ID NO: 20387 - RNA, 24 nt, Artificial Sequence
  Synthetic oligonucleotide: PDCD1-6701
gcccagggucacgggcagcccagg

SEQ ID NO: 20388 - RNA, 18 nt, Artificial Sequence
  Synthetic oligonucleotide: PDCD1-6702
aagguggaagcuuugagg

SEQ ID NO: 20389 - RNA, 19 nt, Artificial Sequence
  Synthetic oligonucleotide: PDCD1-6703
caagguggaagcuuugagg

SEQ ID NO: 20390 - RNA, 20 nt, Artificial Sequence
  Synthetic oligonucleotide: PDCD1-3028
acaagguggaagcuuugagg

SEQ ID NO: 20391 - RNA, 21 nt, Artificial Sequence
  Synthetic oligonucleotide: PDCD1-6704
cacaagguggaagcuuugagg

SEQ ID NO: 20392 - RNA, 22 nt, Artificial Sequence
  Synthetic oligonucleotide: PDCD1-6705
ccacaagguggaagcuuugagg

SEQ ID NO: 20393 - RNA, 23 nt, Artificial Sequence
  Synthetic oligonucleotide: PDCD1-6706
uccacaagguggaagcuuugagg

SEQ ID NO: 20394 - RNA, 24 nt, Artificial Sequence
  Synthetic oligonucleotide: PDCD1-6707
auccacaagguggaagcuuugagg

SEQ ID NO: 20395 - RNA, 18 nt, Artificial Sequence
  Synthetic oligonucleotide: PDCD1-6708
guugcaggcaucacacgg

SEQ ID NO: 20396 - RNA, 19 nt, Artificial Sequence
  Synthetic oligonucleotide: PDCD1-6709
uguugcaggcaucacacgg

SEQ ID NO: 20397 - RNA, 20 nt, Artificial Sequence
  Synthetic oligonucleotide: PDCD1-3038
cuguugcaggcaucacacgg

SEQ ID NO: 20398 - RNA, 21 nt, Artificial Sequence
  Synthetic oligonucleotide: PDCD1-6710
gcuguugcaggcaucacacgg

SEQ ID NO: 20399 - RNA, 22 nt, Artificial Sequence
  Synthetic oligonucleotide: PDCD1-6711
ggcuguugcaggcaucacacgg

SEQ ID NO: 20400 - RNA, 23 nt, Artificial Sequence
  Synthetic oligonucleotide: PDCD1-6712
aggcuguugcaggcaucacacgg

SEQ ID NO: 20401 - RNA, 24 nt, Artificial Sequence
  Synthetic oligonucleotide: PDCD1-6713
caggcuguugcaggcaucacacgg

SEQ ID NO: 20402 - RNA, 18 nt, Artificial Sequence
  Synthetic oligonucleotide: PDCD1-6714
cacgagugggcuggaggg

SEQ ID NO: 20403 - RNA, 19 nt, Artificial Sequence
  Synthetic oligonucleotide: PDCD1-6715
gcacgagugggcuggaggg

SEQ ID NO: 20404 - RNA, 20 nt, Artificial Sequence
  Synthetic oligonucleotide: PDCD1-1954
ggcacgagugggcuggaggg

SEQ ID NO: 20405 - RNA, 21 nt, Artificial Sequence
  Synthetic oligonucleotide: PDCD1-6716
uggcacgagugggcuggaggg

SEQ ID NO: 20406 - RNA, 22 nt, Artificial Sequence
  Synthetic oligonucleotide: PDCD1-6717
cuggcacgagugggcuggaggg

SEQ ID NO: 20407 - RNA, 23 nt, Artificial Sequence
  Synthetic oligonucleotide: PDCD1-6718
ccuggcacgagugggcuggaggg

SEQ ID NO: 20408 - RNA, 24 nt, Artificial Sequence
  Synthetic oligonucleotide: PDCD1-6719
cccuggcacgagugggcuggaggg

SEQ ID NO: 20409 - RNA, 18 nt, Artificial Sequence
  Synthetic oligonucleotide: PDCD1-6720
gucugaacagggcucggg

SEQ ID NO: 20410 - RNA, 19 nt, Artificial Sequence
  Synthetic oligonucleotide: PDCD1-6721
ggucugaacagggcucggg

SEQ ID NO: 20411 - RNA, 20 nt, Artificial Sequence
  Synthetic oligonucleotide: PDCD1-1688
uggucugaacagggcucggg

SEQ ID NO: 20412 - RNA, 21 nt, Artificial Sequence
  Synthetic oligonucleotide: PDCD1-6722
auggucugaacagggcucggg

SEQ ID NO: 20413 - RNA, 22 nt, Artificial Sequence
  Synthetic oligonucleotide: PDCD1-6723
gauggucugaacagggcucggg

SEQ ID NO: 20414 - RNA, 23 nt, Artificial Sequence
  Synthetic oligonucleotide: PDCD1-6724
ggauggucugaacagggcucggg

SEQ ID NO: 20415 - RNA, 24 nt, Artificial Sequence
  Synthetic oligonucleotide: PDCD1-6725
cggauggucugaacagggcucggg

SEQ ID NO: 20416 - RNA, 18 nt, Artificial Sequence
  Synthetic oligonucleotide: PDCD1-6726
gagggcagggccccgggg

SEQ ID NO: 20417 - RNA, 19 nt, Artificial Sequence
  Synthetic oligonucleotide: PDCD1-6727
ggagggcagggccccgggg

SEQ ID NO: 20418 - RNA, 20 nt, Artificial Sequence
  Synthetic oligonucleotide: PDCD1-1949
uggagggcagggccccgggg

SEQ ID NO: 20419 - RNA, 21 nt, Artificial Sequence
  Synthetic oligonucleotide: PDCD1-6728
cuggagggcagggccccgggg

SEQ ID NO: 20420 - RNA, 22 nt, Artificial Sequence
  Synthetic oligonucleotide: PDCD1-6729
gcuggagggcagggccccgggg

SEQ ID NO: 20421 - RNA, 23 nt, Artificial Sequence
  Synthetic oligonucleotide: PDCD1-6730
ggcuggagggcagggccccgggg

SEQ ID NO: 20422 - RNA, 24 nt, Artificial Sequence
  Synthetic oligonucleotide: PDCD1-6731
gggcuggagggcagggccccgggg

SEQ ID NO: 20423 - RNA, 18 nt, Artificial Sequence
  Synthetic oligonucleotide: PDCD1-6732
gugccccagcgaaggggg

SEQ ID NO: 20424 - RNA, 19 nt, Artificial Sequence
  Synthetic oligonucleotide: PDCD1-6733
ugugccccagcgaaggggg

SEQ ID NO: 20425 - RNA, 20 nt, Artificial Sequence
  Synthetic oligonucleotide: PDCD1-1922
cugugccccagcgaaggggg

SEQ ID NO: 20426 - RNA, 21 nt, Artificial Sequence
  Synthetic oligonucleotide: PDCD1-6734
ccugugccccagcgaaggggg

SEQ ID NO: 20427 - RNA, 22 nt, Artificial Sequence
  Synthetic oligonucleotide: PDCD1-6735
accugugccccagcgaaggggg

SEQ ID NO: 20428 - RNA, 23 nt, Artificial Sequence
  Synthetic oligonucleotide: PDCD1-6736
caccugugccccagcgaaggggg

SEQ ID NO: 20429 - RNA, 24 nt, Artificial Sequence
  Synthetic oligonucleotide: PDCD1-6737
ucaccugugccccagcgaaggggg

SEQ ID NO: 20430 - RNA, 18 nt, Artificial Sequence
  Synthetic oligonucleotide: PDCD1-6738
ccagcgaagggggauggg

SEQ ID NO: 20431 - RNA, 19 nt, Artificial Sequence
  Synthetic oligonucleotide: PDCD1-6739
cccagcgaagggggauggg

SEQ ID NO: 20432 - RNA, 20 nt, Artificial Sequence
  Synthetic oligonucleotide: PDCD1-1921
ccccagcgaagggggauggg

SEQ ID NO: 20433 - RNA, 21 nt, Artificial Sequence
  Synthetic oligonucleotide: PDCD1-6740
gccccagcgaagggggauggg

SEQ ID NO: 20434 - RNA, 22 nt, Artificial Sequence
  Synthetic oligonucleotide: PDCD1-6741
ugccccagcgaagggggauggg

SEQ ID NO: 20435 - RNA, 23 nt, Artificial Sequence
  Synthetic oligonucleotide: PDCD1-6742
gugccccagcgaagggggauggg

SEQ ID NO: 20436 - RNA, 24 nt, Artificial Sequence
  Synthetic oligonucleotide: PDCD1-6743
ugugccccagcgaagggggauggg

SEQ ID NO: 20437 - RNA, 18 nt, Artificial Sequence
  Synthetic oligonucleotide: PDCD1-6744
agagcccuggaaucuggg

SEQ ID NO: 20438 - RNA, 19 nt, Artificial Sequence
  Synthetic oligonucleotide: PDCD1-6745
gagagcccuggaaucuggg

SEQ ID NO: 20439 - RNA, 20 nt, Artificial Sequence
  Synthetic oligonucleotide: PDCD1-1692
ggagagcccuggaaucuggg

SEQ ID NO: 20440 - RNA, 21 nt, Artificial Sequence
  Synthetic oligonucleotide: PDCD1-6746
gggagagcccuggaaucuggg

SEQ ID NO: 20441 - RNA, 22 nt, Artificial Sequence
  Synthetic oligonucleotide: PDCD1-6747
ggggagagcccuggaaucuggg

SEQ ID NO: 20442 - RNA, 23 nt, Artificial Sequence
  Synthetic oligonucleotide: PDCD1-6748
cggggagagcccuggaaucuggg

SEQ ID NO: 20443 - RNA, 24 nt, Artificial Sequence
  Synthetic oligonucleotide: PDCD1-6749
ucggggagagcccuggaaucuggg

SEQ ID NO: 20444 - RNA, 18 nt, Artificial Sequence
  Synthetic oligonucleotide: PDCD1-6750
cacccuggcacgaguggg

SEQ ID NO: 20445 - RNA, 19 nt, Artificial Sequence
  Synthetic oligonucleotide: PDCD1-6751
ccacccuggcacgaguggg

SEQ ID NO: 20446 - RNA, 20 nt, Artificial Sequence
  Synthetic oligonucleotide: PDCD1-1957
cccacccuggcacgaguggg

SEQ ID NO: 20447 - RNA, 21 nt, Artificial Sequence
  Synthetic oligonucleotide: PDCD1-6752
ccccacccuggcacgaguggg

SEQ ID NO: 20448 - RNA, 22 nt, Artificial Sequence
  Synthetic oligonucleotide: PDCD1-6753
accccacccuggcacgaguggg

SEQ ID NO: 20449 - RNA, 23 nt, Artificial Sequence
  Synthetic oligonucleotide: PDCD1-6754
caccccacccuggcacgaguggg

SEQ ID NO: 20450 - RNA, 24 nt, Artificial Sequence
  Synthetic oligonucleotide: PDCD1-6755
ccaccccacccuggcacgaguggg

SEQ ID NO: 20451 - RNA, 18 nt, Artificial Sequence
  Synthetic oligonucleotide: PDCD1-6756
gaagaaggucaaggcugg

SEQ ID NO: 20452 - RNA, 19 nt, Artificial Sequence
  Synthetic oligonucleotide: PDCD1-6757
ggaagaaggucaaggcugg

SEQ ID NO: 20453 - RNA, 20 nt, Artificial Sequence
  Synthetic oligonucleotide: PDCD1-1946
gggaagaaggucaaggcugg

SEQ ID NO: 20454 - RNA, 21 nt, Artificial Sequence
  Synthetic oligonucleotide: PDCD1-6758
ggggaagaaggucaaggcugg

SEQ ID NO: 20455 - RNA, 22 nt, Artificial Sequence
  Synthetic oligonucleotide: PDCD1-6759
cggggaagaaggucaaggcugg

SEQ ID NO: 20456 - RNA, 23 nt, Artificial Sequence
  Synthetic oligonucleotide: PDCD1-6760
ccggggaagaaggucaaggcugg

SEQ ID NO: 20457 - RNA, 24 nt, Artificial Sequence
  Synthetic oligonucleotide: PDCD1-6761
cccggggaagaaggucaaggcugg

SEQ ID NO: 20458 - RNA, 18 nt, Artificial Sequence
  Synthetic oligonucleotide: PDCD1-6762
uccccaggugcaggcugg

SEQ ID NO: 20459 - RNA, 19 nt, Artificial Sequence
  Synthetic oligonucleotide: PDCD1-6763
auccccaggugcaggcugg

SEQ ID NO: 20460 - RNA, 20 nt, Artificial Sequence
  Synthetic oligonucleotide: PDCD1-1660
cauccccaggugcaggcugg

SEQ ID NO: 20461 - RNA, 21 nt, Artificial Sequence
  Synthetic oligonucleotide: PDCD1-6764
gcauccccaggugcaggcugg

SEQ ID NO: 20462 - RNA, 22 nt, Artificial Sequence
  Synthetic oligonucleotide: PDCD1-6765
ggcauccccaggugcaggcugg

SEQ ID NO: 20463 - RNA, 23 nt, Artificial Sequence
  Synthetic oligonucleotide: PDCD1-6766
uggcauccccaggugcaggcugg

SEQ ID NO: 20464 - RNA, 24 nt, Artificial Sequence
  Synthetic oligonucleotide: PDCD1-6767
uuggcauccccaggugcaggcugg

SEQ ID NO: 20465 - RNA, 18 nt, Artificial Sequence
  Synthetic oligonucleotide: PDCD1-6768
uucgguuauuuuaagcug

SEQ ID NO: 20466 - RNA, 19 nt, Artificial Sequence
  Synthetic oligonucleotide: PDCD1-6769
cuucgguuauuuuaagcug

SEQ ID NO: 20467 - RNA, 20 nt, Artificial Sequence
  Synthetic oligonucleotide: PDCD1-6770
gcuucgguuauuuuaagcug

SEQ ID NO: 20468 - RNA, 21 nt, Artificial Sequence
  Synthetic oligonucleotide: PDCD1-6771
cgcuucgguuauuuuaagcug

SEQ ID NO: 20469 - RNA, 22 nt, Artificial Sequence
  Synthetic oligonucleotide: PDCD1-6772
ucgcuucgguuauuuuaagcug

SEQ ID NO: 20470 - RNA, 23 nt, Artificial Sequence
  Synthetic oligonucleotide: PDCD1-6773
cucgcuucgguuauuuuaagcug

SEQ ID NO: 20471 - RNA, 24 nt, Artificial Sequence
  Synthetic oligonucleotide: PDCD1-6774
ccucgcuucgguuauuuuaagcug

SEQ ID NO: 20472 - RNA, 18 nt, Artificial Sequence
  Synthetic oligonucleotide: PDCD1-6775
ccuggcacgagugggcug

SEQ ID NO: 20473 - RNA, 19 nt, Artificial Sequence
  Synthetic oligonucleotide: PDCD1-6776
cccuggcacgagugggcug

SEQ ID NO: 20474 - RNA, 20 nt, Artificial Sequence
  Synthetic oligonucleotide: PDCD1-1955
acccuggcacgagugggcug

SEQ ID NO: 20475 - RNA, 21 nt, Artificial Sequence
  Synthetic oligonucleotide: PDCD1-6777
cacccuggcacgagugggcug

SEQ ID NO: 20476 - RNA, 22 nt, Artificial Sequence
  Synthetic oligonucleotide: PDCD1-6778
ccacccuggcacgagugggcug

SEQ ID NO: 20477 - RNA, 23 nt, Artificial Sequence
  Synthetic oligonucleotide: PDCD1-6779
cccacccuggcacgagugggcug

SEQ ID NO: 20478 - RNA, 24 nt, Artificial Sequence
  Synthetic oligonucleotide: PDCD1-6780
ccccacccuggcacgagugggcug

SEQ ID NO: 20479 - RNA, 18 nt, Artificial Sequence
  Synthetic oligonucleotide: PDCD1-6781
cacaagguggaagcuuug

SEQ ID NO: 20480 - RNA, 19 nt, Artificial Sequence
  Synthetic oligonucleotide: PDCD1-6782
ccacaagguggaagcuuug

SEQ ID NO: 20481 - RNA, 20 nt, Artificial Sequence
  Synthetic oligonucleotide: PDCD1-3031
uccacaagguggaagcuuug

SEQ ID NO: 20482 - RNA, 21 nt, Artificial Sequence
  Synthetic oligonucleotide: PDCD1-6783
auccacaagguggaagcuuug

SEQ ID NO: 20483 - RNA, 22 nt, Artificial Sequence
  Synthetic oligonucleotide: PDCD1-6784
cauccacaagguggaagcuuug

SEQ ID NO: 20484 - RNA, 23 nt, Artificial Sequence
  Synthetic oligonucleotide: PDCD1-6785
ccauccacaagguggaagcuuug

SEQ ID NO: 20485 - RNA, 24 nt, Artificial Sequence
  Synthetic oligonucleotide: PDCD1-6786
gccauccacaagguggaagcuuug

SEQ ID NO: 20486 - RNA, 18 nt, Artificial Sequence
  Synthetic oligonucleotide: PDCD1-6787
cggggagagcccuggaau

SEQ ID NO: 20487 - RNA, 19 nt, Artificial Sequence
  Synthetic oligonucleotide: PDCD1-6788
ucggggagagcccuggaau

SEQ ID NO: 20488 - RNA, 20 nt, Artificial Sequence
  Synthetic oligonucleotide: PDCD1-1691
cucggggagagcccuggaau

SEQ ID NO: 20489 - RNA, 21 nt, Artificial Sequence
  Synthetic oligonucleotide: PDCD1-6789
gcucggggagagcccuggaau

SEQ ID NO: 20490 - RNA, 22 nt, Artificial Sequence
  Synthetic oligonucleotide: PDCD1-6790
ggcucggggagagcccuggaau

SEQ ID NO: 20491 - RNA, 23 nt, Artificial Sequence
  Synthetic oligonucleotide: PDCD1-6791
gggcucggggagagcccuggaau

SEQ ID NO: 20492 - RNA, 24 nt, Artificial Sequence
  Synthetic oligonucleotide: PDCD1-6792
agggcucggggagagcccuggaau

SEQ ID NO: 20493 - RNA, 18 nt, Artificial Sequence
  Synthetic oligonucleotide: PDCD1-6793
guacacuuuggauauaau

SEQ ID NO: 20494 - RNA, 19 nt, Artificial Sequence
  Synthetic oligonucleotide: PDCD1-6794
gguacacuuuggauauaau

SEQ ID NO: 20495 - RNA, 20 nt, Artificial Sequence
  Synthetic oligonucleotide: PDCD1-1705
agguacacuuuggauauaau

SEQ ID NO: 20496 - RNA, 21 nt, Artificial Sequence
  Synthetic oligonucleotide: PDCD1-6795
cagguacacuuuggauauaau

SEQ ID NO: 20497 - RNA, 22 nt, Artificial Sequence
  Synthetic oligonucleotide: PDCD1-6796
acagguacacuuuggauauaau

SEQ ID NO: 20498 - RNA, 23 nt, Artificial Sequence
  Synthetic oligonucleotide: PDCD1-6797
aacagguacacuuuggauauaau

SEQ ID NO: 20499 - RNA, 24 nt, Artificial Sequence
  Synthetic oligonucleotide: PDCD1-6798
gaacagguacacuuuggauauaau

SEQ ID NO: 20500 - RNA, 18 nt, Artificial Sequence
  Synthetic oligonucleotide: PDCD1-6799
aucacacgguggaaagau

SEQ ID NO: 20501 - RNA, 19 nt, Artificial Sequence
  Synthetic oligonucleotide: PDCD1-6800
caucacacgguggaaagau

SEQ ID NO: 20502 - RNA, 20 nt, Artificial Sequence
  Synthetic oligonucleotide: PDCD1-1940
gcaucacacgguggaaagau

SEQ ID NO: 20503 - RNA, 21 nt, Artificial Sequence
  Synthetic oligonucleotide: PDCD1-6801
ggcaucacacgguggaaagau

SEQ ID NO: 20504 - RNA, 22 nt, Artificial Sequence
  Synthetic oligonucleotide: PDCD1-6802
aggcaucacacgguggaaagau

SEQ ID NO: 20505 - RNA, 23 nt, Artificial Sequence
  Synthetic oligonucleotide: PDCD1-6803
caggcaucacacgguggaaagau

SEQ ID NO: 20506 - RNA, 24 nt, Artificial Sequence
  Synthetic oligonucleotide: PDCD1-6804
gcaggcaucacacgguggaaagau

SEQ ID NO: 20507 - RNA, 18 nt, Artificial Sequence
  Synthetic oligonucleotide: PDCD1-6805
gcucccucucuccucgau

SEQ ID NO: 20508 - RNA, 19 nt, Artificial Sequence
  Synthetic oligonucleotide: PDCD1-6806
ggcucccucucuccucgau

SEQ ID NO: 20509 - RNA, 20 nt, Artificial Sequence
  Synthetic oligonucleotide: PDCD1-1676
aggcucccucucuccucgau

SEQ ID NO: 20510 - RNA, 21 nt, Artificial Sequence
  Synthetic oligonucleotide: PDCD1-6807
gaggcucccucucuccucgau

SEQ ID NO: 20511 - RNA, 22 nt, Artificial Sequence
  Synthetic oligonucleotide: PDCD1-6808
agaggcucccucucuccucgau

SEQ ID NO: 20512 - RNA, 23 nt, Artificial Sequence
  Synthetic oligonucleotide: PDCD1-6809
aagaggcucccucucuccucgau

SEQ ID NO: 20513 - RNA, 24 nt, Artificial Sequence
  Synthetic oligonucleotide: PDCD1-6810
gaagaggcucccucucuccucgau

SEQ ID NO: 20514 - RNA, 18 nt, Artificial Sequence
  Synthetic oligonucleotide: PDCD1-6811
uggggcucaucccauccu

SEQ ID NO: 20515 - RNA, 19 nt, Artificial Sequence
  Synthetic oligonucleotide: PDCD1-6812
auggggcucaucccauccu

SEQ ID NO: 20516 - RNA, 20 nt, Artificial Sequence
  Synthetic oligonucleotide: PDCD1-1708
cauggggcucaucccauccu

SEQ ID NO: 20517 - RNA, 21 nt, Artificial Sequence
  Synthetic oligonucleotide: PDCD1-6813
acauggggcucaucccauccu

SEQ ID NO: 20518 - RNA, 22 nt, Artificial Sequence
  Synthetic oligonucleotide: PDCD1-6814
cacauggggcucaucccauccu

SEQ ID NO: 20519 - RNA, 23 nt, Artificial Sequence
  Synthetic oligonucleotide: PDCD1-6815
ccacauggggcucaucccauccu

SEQ ID NO: 20520 - RNA, 24 nt, Artificial Sequence
  Synthetic oligonucleotide: PDCD1-6816
cccacauggggcucaucccauccu

SEQ ID NO: 20521 - RNA, 18 nt, Artificial Sequence
  Synthetic oligonucleotide: PDCD1-6817
auccacaagguggaagcu

SEQ ID NO: 20522 - RNA, 19 nt, Artificial Sequence
  Synthetic oligonucleotide: PDCD1-6818
cauccacaagguggaagcu

SEQ ID NO: 20523 - RNA, 20 nt, Artificial Sequence
  Synthetic oligonucleotide: PDCD1-1935
ccauccacaagguggaagcu

SEQ ID NO: 20524 - RNA, 21 nt, Artificial Sequence
  Synthetic oligonucleotide: PDCD1-6819
gccauccacaagguggaagcu

SEQ ID NO: 20525 - RNA, 22 nt, Artificial Sequence
  Synthetic oligonucleotide: PDCD1-6820
ggccauccacaagguggaagcu

SEQ ID NO: 20526 - RNA, 23 nt, Artificial Sequence
  Synthetic oligonucleotide: PDCD1-6821
aggccauccacaagguggaagcu

SEQ ID NO: 20527 - RNA, 24 nt, Artificial Sequence
  Synthetic oligonucleotide: PDCD1-6822
gaggccauccacaagguggaagcu

SEQ ID NO: 20528 - RNA, 18 nt, Artificial Sequence
  Synthetic oligonucleotide: PDCD1-6823
gauggucugaacagggcu

SEQ ID NO: 20529 - RNA, 19 nt, Artificial Sequence
  Synthetic oligonucleotide: PDCD1-6824
ggauggucugaacagggcu

SEQ ID NO: 20530 - RNA, 20 nt, Artificial Sequence
  Synthetic oligonucleotide: PDCD1-2738
cggauggucugaacagggcu

SEQ ID NO: 20531 - RNA, 21 nt, Artificial Sequence
  Synthetic oligonucleotide: PDCD1-6825
acggauggucugaacagggcu

SEQ ID NO: 20532 - RNA, 22 nt, Artificial Sequence
  Synthetic oligonucleotide: PDCD1-6826
cacggauggucugaacagggcu

SEQ ID NO: 20533 - RNA, 23 nt, Artificial Sequence
  Synthetic oligonucleotide: PDCD1-6827
ccacggauggucugaacagggcu

SEQ ID NO: 20534 - RNA, 24 nt, Artificial Sequence
  Synthetic oligonucleotide: PDCD1-6828
cccacggauggucugaacagggcu

SEQ ID NO: 20535 - RNA, 18 nt, Artificial Sequence
  Synthetic oligonucleotide: PDCD1-6829
ccuuaggaaaacucgagu

SEQ ID NO: 20536 - RNA, 19 nt, Artificial Sequence
  Synthetic oligonucleotide: PDCD1-6830
uccuuaggaaaacucgagu

SEQ ID NO: 20537 - RNA, 20 nt, Artificial Sequence
  Synthetic oligonucleotide: PDCD1-1712
auccuuaggaaaacucgagu

SEQ ID NO: 20538 - RNA, 21 nt, Artificial Sequence
  Synthetic oligonucleotide: PDCD1-6831
cauccuuaggaaaacucgagu

SEQ ID NO: 20539 - RNA, 22 nt, Artificial Sequence
  Synthetic oligonucleotide: PDCD1-6832
ccauccuuaggaaaacucgagu

SEQ ID NO: 20540 - RNA, 23 nt, Artificial Sequence
  Synthetic oligonucleotide: PDCD1-6833
cccauccuuaggaaaacucgagu

SEQ ID NO: 20541 - RNA, 24 nt, Artificial Sequence
  Synthetic oligonucleotide: PDCD1-6834
ucccauccuuaggaaaacucgagu

SEQ ID NO: 20542 - RNA, 18 nt, Artificial Sequence
  Synthetic oligonucleotide: PDCD1-6835
acuccccacggccaaggu

SEQ ID NO: 20543 - RNA, 19 nt, Artificial Sequence
  Synthetic oligonucleotide: PDCD1-6836
gacuccccacggccaaggu

SEQ ID NO: 20544 - RNA, 20 nt, Artificial Sequence
  Synthetic oligonucleotide: PDCD1-955
agacuccccacggccaaggu

SEQ ID NO: 20545 - RNA, 21 nt, Artificial Sequence
  Synthetic oligonucleotide: PDCD1-6837
cagacuccccacggccaaggu

SEQ ID NO: 20546 - RNA, 22 nt, Artificial Sequence
  Synthetic oligonucleotide: PDCD1-6838
gcagacuccccacggccaaggu

SEQ ID NO: 20547 - RNA, 23 nt, Artificial Sequence
  Synthetic oligonucleotide: PDCD1-6839
cgcagacuccccacggccaaggu

SEQ ID NO: 20548 - RNA, 24 nt, Artificial Sequence
  Synthetic oligonucleotide: PDCD1-6840
acgcagacuccccacggccaaggu

SEQ ID NO: 20549 - RNA, 18 nt, Artificial Sequence
  Synthetic oligonucleotide: PDCD1-6841
uggaacuguggccauggu

SEQ ID NO: 20550 - RNA, 19 nt, Artificial Sequence
  Synthetic oligonucleotide: PDCD1-6842
cuggaacuguggccauggu

SEQ ID NO: 20551 - RNA, 20 nt, Artificial Sequence
  Synthetic oligonucleotide: PDCD1-1938
ucuggaacuguggccauggu

SEQ ID NO: 20552 - RNA, 21 nt, Artificial Sequence
  Synthetic oligonucleotide: PDCD1-6843
aucuggaacuguggccauggu

SEQ ID NO: 20553 - RNA, 22 nt, Artificial Sequence
  Synthetic oligonucleotide: PDCD1-6844
gaucuggaacuguggccauggu

SEQ ID NO: 20554 - RNA, 23 nt, Artificial Sequence
  Synthetic oligonucleotide: PDCD1-6845
agaucuggaacuguggccauggu

SEQ ID NO: 20555 - RNA, 24 nt, Artificial Sequence
  Synthetic oligonucleotide: PDCD1-6846
aagaucuggaacuguggccauggu

SEQ ID NO: 20556 - RNA, 18 nt, Artificial Sequence
  Synthetic oligonucleotide: PDCD1-6847
gccucccccacggauggu

SEQ ID NO: 20557 - RNA, 19 nt, Artificial Sequence
  Synthetic oligonucleotide: PDCD1-6848
ggccucccccacggauggu

SEQ ID NO: 20558 - RNA, 20 nt, Artificial Sequence
  Synthetic oligonucleotide: PDCD1-1682
aggccucccccacggauggu

SEQ ID NO: 20559 - RNA, 21 nt, Artificial Sequence
  Synthetic oligonucleotide: PDCD1-6849
aaggccucccccacggauggu

SEQ ID NO: 20560 - RNA, 22 nt, Artificial Sequence
  Synthetic oligonucleotide: PDCD1-6850
caaggccucccccacggauggu

SEQ ID NO: 20561 - RNA, 23 nt, Artificial Sequence
  Synthetic oligonucleotide: PDCD1-6851
ccaaggccucccccacggauggu

SEQ ID NO: 20562 - RNA, 24 nt, Artificial Sequence
  Synthetic oligonucleotide: PDCD1-6852
gccaaggccucccccacggauggu

SEQ ID NO: 20563 - RNA, 18 nt, Artificial Sequence
  Synthetic oligonucleotide: PDCD1-6853
ggggcucaucccauccuu

SEQ ID NO: 20564 - RNA, 19 nt, Artificial Sequence
  Synthetic oligonucleotide: PDCD1-6854
uggggcucaucccauccuu

SEQ ID NO: 20565 - RNA, 20 nt, Artificial Sequence
  Synthetic oligonucleotide: PDCD1-2757
auggggcucaucccauccuu

SEQ ID NO: 20566 - RNA, 21 nt, Artificial Sequence
  Synthetic oligonucleotide: PDCD1-6855
cauggggcucaucccauccuu

SEQ ID NO: 20567 - RNA, 22 nt, Artificial Sequence
  Synthetic oligonucleotide: PDCD1-6856
acauggggcucaucccauccuu

SEQ ID NO: 20568 - RNA, 23 nt, Artificial Sequence
  Synthetic oligonucleotide: PDCD1-6857
cacauggggcucaucccauccuu

SEQ ID NO: 20569 - RNA, 24 nt, Artificial Sequence
  Synthetic oligonucleotide: PDCD1-6858
ccacauggggcucaucccauccuu

SEQ ID NO: 20570 - RNA, 18 nt, Artificial Sequence
  Synthetic oligonucleotide: PDCD1-6859
ccacaagguggaagcuuu

SEQ ID NO: 20571 - RNA, 19 nt, Artificial Sequence
  Synthetic oligonucleotide: PDCD1-6860
uccacaagguggaagcuuu

SEQ ID NO: 20572 - RNA, 20 nt, Artificial Sequence
  Synthetic oligonucleotide: PDCD1-1934
auccacaagguggaagcuuu

SEQ ID NO: 20573 - RNA, 21 nt, Artificial Sequence
  Synthetic oligonucleotide: PDCD1-6861
cauccacaagguggaagcuuu

SEQ ID NO: 20574 - RNA, 22 nt, Artificial Sequence
  Synthetic oligonucleotide: PDCD1-6862
ccauccacaagguggaagcuuu

SEQ ID NO: 20575 - RNA, 23 nt, Artificial Sequence
  Synthetic oligonucleotide: PDCD1-6863
gccauccacaagguggaagcuuu

SEQ ID NO: 20576 - RNA, 24 nt, Artificial Sequence
  Synthetic oligonucleotide: PDCD1-6864
ggccauccacaagguggaagcuuu

SEQ ID NO: 20577 - RNA, 18 nt, Artificial Sequence
  Synthetic oligonucleotide: PDCD1-6865
auuacagcgaauggaaaa

SEQ ID NO: 20578 - RNA, 19 nt, Artificial Sequence
  Synthetic oligonucleotide: PDCD1-6866
uauuacagcgaauggaaaa

SEQ ID NO: 20579 - RNA, 20 nt, Artificial Sequence
  Synthetic oligonucleotide: PDCD1-1751
uuauuacagcgaauggaaaa

SEQ ID NO: 20580 - RNA, 21 nt, Artificial Sequence
  Synthetic oligonucleotide: PDCD1-6867
uuuauuacagcgaauggaaaa

SEQ ID NO: 20581 - RNA, 22 nt, Artificial Sequence
  Synthetic oligonucleotide: PDCD1-6868
uuuuauuacagcgaauggaaaa

SEQ ID NO: 20582 - RNA, 23 nt, Artificial Sequence
  Synthetic oligonucleotide: PDCD1-6869
auuuuauuacagcgaauggaaaa

SEQ ID NO: 20583 - RNA, 24 nt, Artificial Sequence
  Synthetic oligonucleotide: PDCD1-6870
cauuuuauuacagcgaauggaaaa

SEQ ID NO: 20584 - RNA, 18 nt, Artificial Sequence
  Synthetic oligonucleotide: PDCD1-6871
gaauggaaaacaggagaa

SEQ ID NO: 20585 - RNA, 19 nt, Artificial Sequence
  Synthetic oligonucleotide: PDCD1-6872
cgaauggaaaacaggagaa

SEQ ID NO: 20586 - RNA, 20 nt, Artificial Sequence
  Synthetic oligonucleotide: PDCD1-1754
gcgaauggaaaacaggagaa

SEQ ID NO: 20587 - RNA, 21 nt, Artificial Sequence
  Synthetic oligonucleotide: PDCD1-6873
agcgaauggaaaacaggagaa

SEQ ID NO: 20588 - RNA, 22 nt, Artificial Sequence
  Synthetic oligonucleotide: PDCD1-6874
cagcgaauggaaaacaggagaa

SEQ ID NO: 20589 - RNA, 23 nt, Artificial Sequence
  Synthetic oligonucleotide: PDCD1-6875
acagcgaauggaaaacaggagaa

SEQ ID NO: 20590 - RNA, 24 nt, Artificial Sequence
  Synthetic oligonucleotide: PDCD1-6876
uacagcgaauggaaaacaggagaa

SEQ ID NO: 20591 - RNA, 18 nt, Artificial Sequence
  Synthetic oligonucleotide: PDCD1-6877
cagcuuaaaauaaccgaa

SEQ ID NO: 20592 - RNA, 19 nt, Artificial Sequence
  Synthetic oligonucleotide: PDCD1-6878
ucagcuuaaaauaaccgaa

SEQ ID NO: 20593 - RNA, 20 nt, Artificial Sequence
  Synthetic oligonucleotide: PDCD1-6879
aucagcuuaaaauaaccgaa

SEQ ID NO: 20594 - RNA, 21 nt, Artificial Sequence
  Synthetic oligonucleotide: PDCD1-6880
caucagcuuaaaauaaccgaa

SEQ ID NO: 20595 - RNA, 22 nt, Artificial Sequence
  Synthetic oligonucleotide: PDCD1-6881
ucaucagcuuaaaauaaccgaa

SEQ ID NO: 20596 - RNA, 23 nt, Artificial Sequence
  Synthetic oligonucleotide: PDCD1-6882
cucaucagcuuaaaauaaccgaa

SEQ ID NO: 20597 - RNA, 24 nt, Artificial Sequence
  Synthetic oligonucleotide: PDCD1-6883
gcucaucagcuuaaaauaaccgaa

SEQ ID NO: 20598 - RNA, 18 nt, Artificial Sequence
  Synthetic oligonucleotide: PDCD1-6884
gcauuuuauuacagcgaa

SEQ ID NO: 20599 - RNA, 19 nt, Artificial Sequence
  Synthetic oligonucleotide: PDCD1-6885
agcauuuuauuacagcgaa

SEQ ID NO: 20600 - RNA, 20 nt, Artificial Sequence
  Synthetic oligonucleotide: PDCD1-2819
gagcauuuuauuacagcgaa

SEQ ID NO: 20601 - RNA, 21 nt, Artificial Sequence
  Synthetic oligonucleotide: PDCD1-6886
ugagcauuuuauuacagcgaa

SEQ ID NO: 20602 - RNA, 22 nt, Artificial Sequence
  Synthetic oligonucleotide: PDCD1-6887
cugagcauuuuauuacagcgaa

SEQ ID NO: 20603 - RNA, 23 nt, Artificial Sequence
  Synthetic oligonucleotide: PDCD1-6888
gcugagcauuuuauuacagcgaa

SEQ ID NO: 20604 - RNA, 24 nt, Artificial Sequence
  Synthetic oligonucleotide: PDCD1-6889
ugcugagcauuuuauuacagcgaa

SEQ ID NO: 20605 - RNA, 18 nt, Artificial Sequence
  Synthetic oligonucleotide: PDCD1-6890
cucaucagcuuaaaauaa

SEQ ID NO: 20606 - RNA, 19 nt, Artificial Sequence
  Synthetic oligonucleotide: PDCD1-6891
gcucaucagcuuaaaauaa

SEQ ID NO: 20607 - RNA, 20 nt, Artificial Sequence
  Synthetic oligonucleotide: PDCD1-6892
ggcucaucagcuuaaaauaa

SEQ ID NO: 20608 - RNA, 21 nt, Artificial Sequence
  Synthetic oligonucleotide: PDCD1-6893
aggcucaucagcuuaaaauaa

SEQ ID NO: 20609 - RNA, 22 nt, Artificial Sequence
  Synthetic oligonucleotide: PDCD1-6894
caggcucaucagcuuaaaauaa

SEQ ID NO: 20610 - RNA, 23 nt, Artificial Sequence
  Synthetic oligonucleotide: PDCD1-6895
ucaggcucaucagcuuaaaauaa

SEQ ID NO: 20611 - RNA, 24 nt, Artificial Sequence
  Synthetic oligonucleotide: PDCD1-6896
gucaggcucaucagcuuaaaauaa

SEQ ID NO: 20612 - RNA, 18 nt, Artificial Sequence
  Synthetic oligonucleotide: PDCD1-6897
ucccggaucgaggagaga

SEQ ID NO: 20613 - RNA, 19 nt, Artificial Sequence
  Synthetic oligonucleotide: PDCD1-6898
cucccggaucgaggagaga

SEQ ID NO: 20614 - RNA, 20 nt, Artificial Sequence
  Synthetic oligonucleotide: PDCD1-2970
ucucccggaucgaggagaga

SEQ ID NO: 20615 - RNA, 21 nt, Artificial Sequence
  Synthetic oligonucleotide: PDCD1-6899
cucucccggaucgaggagaga

SEQ ID NO: 20616 - RNA, 22 nt, Artificial Sequence
  Synthetic oligonucleotide: PDCD1-6900
acucucccggaucgaggagaga

SEQ ID NO: 20617 - RNA, 23 nt, Artificial Sequence
  Synthetic oligonucleotide: PDCD1-6901
cacucucccggaucgaggagaga

SEQ ID NO: 20618 - RNA, 24 nt, Artificial Sequence
  Synthetic oligonucleotide: PDCD1-6902
ucacucucccggaucgaggagaga

SEQ ID NO: 20619 - RNA, 18 nt, Artificial Sequence
  Synthetic oligonucleotide: PDCD1-6903
ucucccggaucgaggaga

SEQ ID NO: 20620 - RNA, 19 nt, Artificial Sequence
  Synthetic oligonucleotide: PDCD1-6904
cucucccggaucgaggaga

SEQ ID NO: 20621 - RNA, 20 nt, Artificial Sequence
  Synthetic oligonucleotide: PDCD1-1872
acucucccggaucgaggaga

SEQ ID NO: 20622 - RNA, 21 nt, Artificial Sequence
  Synthetic oligonucleotide: PDCD1-6905
cacucucccggaucgaggaga

SEQ ID NO: 20623 - RNA, 22 nt, Artificial Sequence
  Synthetic oligonucleotide: PDCD1-6906
ucacucucccggaucgaggaga

SEQ ID NO: 20624 - RNA, 23 nt, Artificial Sequence
  Synthetic oligonucleotide: PDCD1-6907
cucacucucccggaucgaggaga

SEQ ID NO: 20625 - RNA, 24 nt, Artificial Sequence
  Synthetic oligonucleotide: PDCD1-6908
ccucacucucccggaucgaggaga

SEQ ID NO: 20626 - RNA, 18 nt, Artificial Sequence
  Synthetic oligonucleotide: PDCD1-6909
agcauuuuauuacagcga

SEQ ID NO: 20627 - RNA, 19 nt, Artificial Sequence
  Synthetic oligonucleotide: PDCD1-6910
gagcauuuuauuacagcga

SEQ ID NO: 20628 - RNA, 20 nt, Artificial Sequence
  Synthetic oligonucleotide: PDCD1-1749
ugagcauuuuauuacagcga

SEQ ID NO: 20629 - RNA, 21 nt, Artificial Sequence
  Synthetic oligonucleotide: PDCD1-6911
cugagcauuuuauuacagcga

SEQ ID NO: 20630 - RNA, 22 nt, Artificial Sequence
  Synthetic oligonucleotide: PDCD1-6912
gcugagcauuuuauuacagcga

SEQ ID NO: 20631 - RNA, 23 nt, Artificial Sequence
  Synthetic oligonucleotide: PDCD1-6913
ugcugagcauuuuauuacagcga

SEQ ID NO: 20632 - RNA, 24 nt, Artificial Sequence
  Synthetic oligonucleotide: PDCD1-6914
gugcugagcauuuuauuacagcga

SEQ ID NO: 20633 - RNA, 18 nt, Artificial Sequence
  Synthetic oligonucleotide: PDCD1-6915
caaaguguaccuguucga

SEQ ID NO: 20634 - RNA, 19 nt, Artificial Sequence
  Synthetic oligonucleotide: PDCD1-6916
ccaaaguguaccuguucga

SEQ ID NO: 20635 - RNA, 20 nt, Artificial Sequence
  Synthetic oligonucleotide: PDCD1-1893
uccaaaguguaccuguucga

SEQ ID NO: 20636 - RNA, 21 nt, Artificial Sequence
  Synthetic oligonucleotide: PDCD1-6917
auccaaaguguaccuguucga

SEQ ID NO: 20637 - RNA, 22 nt, Artificial Sequence
  Synthetic oligonucleotide: PDCD1-6918
uauccaaaguguaccuguucga

SEQ ID NO: 20638 - RNA, 23 nt, Artificial Sequence
  Synthetic oligonucleotide: PDCD1-6919
auauccaaaguguaccuguucga

SEQ ID NO: 20639 - RNA, 24 nt, Artificial Sequence
  Synthetic oligonucleotide: PDCD1-6920
uauauccaaaguguaccuguucga

SEQ ID NO: 20640 - RNA, 18 nt, Artificial Sequence
  Synthetic oligonucleotide: PDCD1-6921
acucucccggaucgagga

SEQ ID NO: 20641 - RNA, 19 nt, Artificial Sequence
  Synthetic oligonucleotide: PDCD1-6922
cacucucccggaucgagga

SEQ ID NO: 20642 - RNA, 20 nt, Artificial Sequence
  Synthetic oligonucleotide: PDCD1-1873
ucacucucccggaucgagga

SEQ ID NO: 20643 - RNA, 21 nt, Artificial Sequence
  Synthetic oligonucleotide: PDCD1-6923
cucacucucccggaucgagga

SEQ ID NO: 20644 - RNA, 22 nt, Artificial Sequence
  Synthetic oligonucleotide: PDCD1-6924
ccucacucucccggaucgagga

SEQ ID NO: 20645 - RNA, 23 nt, Artificial Sequence
  Synthetic oligonucleotide: PDCD1-6925
gccucacucucccggaucgagga

SEQ ID NO: 20646 - RNA, 24 nt, Artificial Sequence
  Synthetic oligonucleotide: PDCD1-6926
ggccucacucucccggaucgagga

SEQ ID NO: 20647 - RNA, 18 nt, Artificial Sequence
  Synthetic oligonucleotide: PDCD1-6927
uggccucacucucccgga

SEQ ID NO: 20648 - RNA, 19 nt, Artificial Sequence
  Synthetic oligonucleotide: PDCD1-6928
uuggccucacucucccgga

SEQ ID NO: 20649 - RNA, 20 nt, Artificial Sequence
  Synthetic oligonucleotide: PDCD1-1877
cuuggccucacucucccgga

SEQ ID NO: 20650 - RNA, 21 nt, Artificial Sequence
  Synthetic oligonucleotide: PDCD1-6929
ccuuggccucacucucccgga

SEQ ID NO: 20651 - RNA, 22 nt, Artificial Sequence
  Synthetic oligonucleotide: PDCD1-6930
gccuuggccucacucucccgga

SEQ ID NO: 20652 - RNA, 23 nt, Artificial Sequence
  Synthetic oligonucleotide: PDCD1-6931
ggccuuggccucacucucccgga

SEQ ID NO: 20653 - RNA, 24 nt, Artificial Sequence
  Synthetic oligonucleotide: PDCD1-6932
aggccuuggccucacucucccgga

SEQ ID NO: 20654 - RNA, 18 nt, Artificial Sequence
  Synthetic oligonucleotide: PDCD1-6933
augccugcaacagccuga

SEQ ID NO: 20655 - RNA, 19 nt, Artificial Sequence
  Synthetic oligonucleotide: PDCD1-6934
gaugccugcaacagccuga

SEQ ID NO: 20656 - RNA, 20 nt, Artificial Sequence
  Synthetic oligonucleotide: PDCD1-2783
ugaugccugcaacagccuga

SEQ ID NO: 20657 - RNA, 21 nt, Artificial Sequence
  Synthetic oligonucleotide: PDCD1-6935
gugaugccugcaacagccuga

SEQ ID NO: 20658 - RNA, 22 nt, Artificial Sequence
  Synthetic oligonucleotide: PDCD1-6936
ugugaugccugcaacagccuga

SEQ ID NO: 20659 - RNA, 23 nt, Artificial Sequence
  Synthetic oligonucleotide: PDCD1-6937
gugugaugccugcaacagccuga

SEQ ID NO: 20660 - RNA, 24 nt, Artificial Sequence
  Synthetic oligonucleotide: PDCD1-6938
cgugugaugccugcaacagccuga

SEQ ID NO: 20661 - RNA, 18 nt, Artificial Sequence
  Synthetic oligonucleotide: PDCD1-6939
uuacagcgaauggaaaac

SEQ ID NO: 20662 - RNA, 19 nt, Artificial Sequence
  Synthetic oligonucleotide: PDCD1-6940
auuacagcgaauggaaaac

SEQ ID NO: 20663 - RNA, 20 nt, Artificial Sequence
  Synthetic oligonucleotide: PDCD1-2820
uauuacagcgaauggaaaac

SEQ ID NO: 20664 - RNA, 21 nt, Artificial Sequence
  Synthetic oligonucleotide: PDCD1-6941
uuauuacagcgaauggaaaac

SEQ ID NO: 20665 - RNA, 22 nt, Artificial Sequence
  Synthetic oligonucleotide: PDCD1-6942
uuuauuacagcgaauggaaaac

SEQ ID NO: 20666 - RNA, 23 nt, Artificial Sequence
  Synthetic oligonucleotide: PDCD1-6943
uuuuauuacagcgaauggaaaac

SEQ ID NO: 20667 - RNA, 24 nt, Artificial Sequence
  Synthetic oligonucleotide: PDCD1-6944
auuuuauuacagcgaauggaaaac

SEQ ID NO: 20668 - RNA, 18 nt, Artificial Sequence
  Synthetic oligonucleotide: PDCD1-6945
ugcccagccagccugcac

SEQ ID NO: 20669 - RNA, 19 nt, Artificial Sequence
  Synthetic oligonucleotide: PDCD1-6946
gugcccagccagccugcac

SEQ ID NO: 20670 - RNA, 20 nt, Artificial Sequence
  Synthetic oligonucleotide: PDCD1-1866
ugugcccagccagccugcac

SEQ ID NO: 20671 - RNA, 21 nt, Artificial Sequence
  Synthetic oligonucleotide: PDCD1-6947
cugugcccagccagccugcac

SEQ ID NO: 20672 - RNA, 22 nt, Artificial Sequence
  Synthetic oligonucleotide: PDCD1-6948
ucugugcccagccagccugcac

SEQ ID NO: 20673 - RNA, 23 nt, Artificial Sequence
  Synthetic oligonucleotide: PDCD1-6949
cucugugcccagccagccugcac

SEQ ID NO: 20674 - RNA, 24 nt, Artificial Sequence
  Synthetic oligonucleotide: PDCD1-6950
ccucugugcccagccagccugcac

SEQ ID NO: 20675 - RNA, 18 nt, Artificial Sequence
  Synthetic oligonucleotide: PDCD1-6951
ugccugcaacagccugac

SEQ ID NO: 20676 - RNA, 19 nt, Artificial Sequence
  Synthetic oligonucleotide: PDCD1-6952
augccugcaacagccugac

SEQ ID NO: 20677 - RNA, 20 nt, Artificial Sequence
  Synthetic oligonucleotide: PDCD1-2784
gaugccugcaacagccugac

SEQ ID NO: 20678 - RNA, 21 nt, Artificial Sequence
  Synthetic oligonucleotide: PDCD1-6953
ugaugccugcaacagccugac

SEQ ID NO: 20679 - RNA, 22 nt, Artificial Sequence
  Synthetic oligonucleotide: PDCD1-6954
gugaugccugcaacagccugac

SEQ ID NO: 20680 - RNA, 23 nt, Artificial Sequence
  Synthetic oligonucleotide: PDCD1-6955
ugugaugccugcaacagccugac

SEQ ID NO: 20681 - RNA, 24 nt, Artificial Sequence
  Synthetic oligonucleotide: PDCD1-6956
gugugaugccugcaacagccugac

SEQ ID NO: 20682 - RNA, 18 nt, Artificial Sequence
  Synthetic oligonucleotide: PDCD1-6957
gcccagccagccugcacc

SEQ ID NO: 20683 - RNA, 19 nt, Artificial Sequence
  Synthetic oligonucleotide: PDCD1-6958
ugcccagccagccugcacc

SEQ ID NO: 20684 - RNA, 20 nt, Artificial Sequence
  Synthetic oligonucleotide: PDCD1-2962
gugcccagccagccugcacc

SEQ ID NO: 20685 - RNA, 21 nt, Artificial Sequence
  Synthetic oligonucleotide: PDCD1-6959
ugugcccagccagccugcacc

SEQ ID NO: 20686 - RNA, 22 nt, Artificial Sequence
  Synthetic oligonucleotide: PDCD1-6960
cugugcccagccagccugcacc

SEQ ID NO: 20687 - RNA, 23 nt, Artificial Sequence
  Synthetic oligonucleotide: PDCD1-6961
ucugugcccagccagccugcacc

SEQ ID NO: 20688 - RNA, 24 nt, Artificial Sequence
  Synthetic oligonucleotide: PDCD1-6962
cucugugcccagccagccugcacc

SEQ ID NO: 20689 - RNA, 18 nt, Artificial Sequence
  Synthetic oligonucleotide: PDCD1-6963
ccugggcugcccgugacc

SEQ ID NO: 20690 - RNA, 19 nt, Artificial Sequence
  Synthetic oligonucleotide: PDCD1-6964
uccugggcugcccgugacc

SEQ ID NO: 20691 - RNA, 20 nt, Artificial Sequence
  Synthetic oligonucleotide: PDCD1-1868
uuccugggcugcccgugacc

SEQ ID NO: 20692 - RNA, 21 nt, Artificial Sequence
  Synthetic oligonucleotide: PDCD1-6965
cuuccugggcugcccgugacc

SEQ ID NO: 20693 - RNA, 22 nt, Artificial Sequence
  Synthetic oligonucleotide: PDCD1-6966
ucuuccugggcugcccgugacc

SEQ ID NO: 20694 - RNA, 23 nt, Artificial Sequence
  Synthetic oligonucleotide: PDCD1-6967
cucuuccugggcugcccgugacc

SEQ ID NO: 20695 - RNA, 24 nt, Artificial Sequence
  Synthetic oligonucleotide: PDCD1-6968
ccucuuccugggcugcccgugacc

SEQ ID NO: 20696 - RNA, 18 nt, Artificial Sequence
  Synthetic oligonucleotide: PDCD1-6969
agccuugaccuucuuccc

SEQ ID NO: 20697 - RNA, 19 nt, Artificial Sequence
  Synthetic oligonucleotide: PDCD1-6970
cagccuugaccuucuuccc

SEQ ID NO: 20698 - RNA, 20 nt, Artificial Sequence
  Synthetic oligonucleotide: PDCD1-2799
ccagccuugaccuucuuccc

SEQ ID NO: 20699 - RNA, 21 nt, Artificial Sequence
  Synthetic oligonucleotide: PDCD1-6971
uccagccuugaccuucuuccc

SEQ ID NO: 20700 - RNA, 22 nt, Artificial Sequence
  Synthetic oligonucleotide: PDCD1-6972
uuccagccuugaccuucuuccc

SEQ ID NO: 20701 - RNA, 23 nt, Artificial Sequence
  Synthetic oligonucleotide: PDCD1-6973
cuuccagccuugaccuucuuccc

SEQ ID NO: 20702 - RNA, 24 nt, Artificial Sequence
  Synthetic oligonucleotide: PDCD1-6974
ccuuccagccuugaccuucuuccc

SEQ ID NO: 20703 - RNA, 18 nt, Artificial Sequence
  Synthetic oligonucleotide: PDCD1-6975
gaaccccaaaccuuggcc

SEQ ID NO: 20704 - RNA, 19 nt, Artificial Sequence
  Synthetic oligonucleotide: PDCD1-6976
agaaccccaaaccuuggcc

SEQ ID NO: 20705 - RNA, 20 nt, Artificial Sequence
  Synthetic oligonucleotide: PDCD1-1402
cagaaccccaaaccuuggcc

SEQ ID NO: 20706 - RNA, 21 nt, Artificial Sequence
  Synthetic oligonucleotide: PDCD1-6977
ccagaaccccaaaccuuggcc

SEQ ID NO: 20707 - RNA, 22 nt, Artificial Sequence
  Synthetic oligonucleotide: PDCD1-6978
gccagaaccccaaaccuuggcc

SEQ ID NO: 20708 - RNA, 23 nt, Artificial Sequence
  Synthetic oligonucleotide: PDCD1-6979
ggccagaaccccaaaccuuggcc

SEQ ID NO: 20709 - RNA, 24 nt, Artificial Sequence
  Synthetic oligonucleotide: PDCD1-6980
uggccagaaccccaaaccuuggcc

SEQ ID NO: 20710 - RNA, 18 nt, Artificial Sequence
  Synthetic oligonucleotide: PDCD1-6981
gcccuguucagaccaucc

SEQ ID NO: 20711 - RNA, 19 nt, Artificial Sequence
  Synthetic oligonucleotide: PDCD1-6982
agcccuguucagaccaucc

SEQ ID NO: 20712 - RNA, 20 nt, Artificial Sequence
  Synthetic oligonucleotide: PDCD1-1883
gagcccuguucagaccaucc

SEQ ID NO: 20713 - RNA, 21 nt, Artificial Sequence
  Synthetic oligonucleotide: PDCD1-6983
cgagcccuguucagaccaucc

SEQ ID NO: 20714 - RNA, 22 nt, Artificial Sequence
  Synthetic oligonucleotide: PDCD1-6984
ccgagcccuguucagaccaucc

SEQ ID NO: 20715 - RNA, 23 nt, Artificial Sequence
  Synthetic oligonucleotide: PDCD1-6985
cccgagcccuguucagaccaucc

SEQ ID NO: 20716 - RNA, 24 nt, Artificial Sequence
  Synthetic oligonucleotide: PDCD1-6986
ccccgagcccuguucagaccaucc

SEQ ID NO: 20717 - RNA, 18 nt, Artificial Sequence
  Synthetic oligonucleotide: PDCD1-6987
cagauuccagggcucucc

SEQ ID NO: 20718 - RNA, 19 nt, Artificial Sequence
  Synthetic oligonucleotide: PDCD1-6988
ccagauuccagggcucucc

SEQ ID NO: 20719 - RNA, 20 nt, Artificial Sequence
  Synthetic oligonucleotide: PDCD1-1884
cccagauuccagggcucucc

SEQ ID NO: 20720 - RNA, 21 nt, Artificial Sequence
  Synthetic oligonucleotide: PDCD1-6989
gcccagauuccagggcucucc

SEQ ID NO: 20721 - RNA, 22 nt, Artificial Sequence
  Synthetic oligonucleotide: PDCD1-6990
ugcccagauuccagggcucucc

SEQ ID NO: 20722 - RNA, 23 nt, Artificial Sequence
  Synthetic oligonucleotide: PDCD1-6991
cugcccagauuccagggcucucc

SEQ ID NO: 20723 - RNA, 24 nt, Artificial Sequence
  Synthetic oligonucleotide: PDCD1-6992
ucugcccagauuccagggcucucc

SEQ ID NO: 20724 - RNA, 18 nt, Artificial Sequence
  Synthetic oligonucleotide: PDCD1-6993
cagccuugaccuucuucc

SEQ ID NO: 20725 - RNA, 19 nt, Artificial Sequence
  Synthetic oligonucleotide: PDCD1-6994
ccagccuugaccuucuucc

SEQ ID NO: 20726 - RNA, 20 nt, Artificial Sequence
  Synthetic oligonucleotide: PDCD1-1737
uccagccuugaccuucuucc

SEQ ID NO: 20727 - RNA, 21 nt, Artificial Sequence
  Synthetic oligonucleotide: PDCD1-6995
uuccagccuugaccuucuucc

SEQ ID NO: 20728 - RNA, 22 nt, Artificial Sequence
  Synthetic oligonucleotide: PDCD1-6996
cuuccagccuugaccuucuucc

SEQ ID NO: 20729 - RNA, 23 nt, Artificial Sequence
  Synthetic oligonucleotide: PDCD1-6997
ccuuccagccuugaccuucuucc

SEQ ID NO: 20730 - RNA, 24 nt, Artificial Sequence
  Synthetic oligonucleotide: PDCD1-6998
cccuuccagccuugaccuucuucc

SEQ ID NO: 20731 - RNA, 18 nt, Artificial Sequence
  Synthetic oligonucleotide: PDCD1-6999
cggcccaucccccuucgc

SEQ ID NO: 20732 - RNA, 19 nt, Artificial Sequence
  Synthetic oligonucleotide: PDCD1-7000
ccggcccaucccccuucgc

SEQ ID NO: 20733 - RNA, 20 nt, Artificial Sequence
  Synthetic oligonucleotide: PDCD1-2774
cccggcccaucccccuucgc

SEQ ID NO: 20734 - RNA, 21 nt, Artificial Sequence
  Synthetic oligonucleotide: PDCD1-7001
ucccggcccaucccccuucgc

SEQ ID NO: 20735 - RNA, 22 nt, Artificial Sequence
  Synthetic oligonucleotide: PDCD1-7002
uucccggcccaucccccuucgc

SEQ ID NO: 20736 - RNA, 23 nt, Artificial Sequence
  Synthetic oligonucleotide: PDCD1-7003
cuucccggcccaucccccuucgc

SEQ ID NO: 20737 - RNA, 24 nt, Artificial Sequence
  Synthetic oligonucleotide: PDCD1-7004
ccuucccggcccaucccccuucgc

SEQ ID NO: 20738 - RNA, 18 nt, Artificial Sequence
  Synthetic oligonucleotide: PDCD1-7005
aaauaaccgaagcgaggc

SEQ ID NO: 20739 - RNA, 19 nt, Artificial Sequence
  Synthetic oligonucleotide: PDCD1-7006
aaaauaaccgaagcgaggc

SEQ ID NO: 20740 - RNA, 20 nt, Artificial Sequence
  Synthetic oligonucleotide: PDCD1-7007
uaaaauaaccgaagcgaggc

SEQ ID NO: 20741 - RNA, 21 nt, Artificial Sequence
  Synthetic oligonucleotide: PDCD1-7008
uuaaaauaaccgaagcgaggc

SEQ ID NO: 20742 - RNA, 22 nt, Artificial Sequence
  Synthetic oligonucleotide: PDCD1-7009
cuuaaaauaaccgaagcgaggc

SEQ ID NO: 20743 - RNA, 23 nt, Artificial Sequence
  Synthetic oligonucleotide: PDCD1-7010
gcuuaaaauaaccgaagcgaggc

SEQ ID NO: 20744 - RNA, 24 nt, Artificial Sequence
  Synthetic oligonucleotide: PDCD1-7011
agcuuaaaauaaccgaagcgaggc

SEQ ID NO: 20745 - RNA, 18 nt, Artificial Sequence
  Synthetic oligonucleotide: PDCD1-7012
acagccugacgggggggc

SEQ ID NO: 20746 - RNA, 19 nt, Artificial Sequence
  Synthetic oligonucleotide: PDCD1-7013
aacagccugacgggggggc

SEQ ID NO: 20747 - RNA, 20 nt, Artificial Sequence
  Synthetic oligonucleotide: PDCD1-2789
caacagccugacgggggggc

SEQ ID NO: 20748 - RNA, 21 nt, Artificial Sequence
  Synthetic oligonucleotide: PDCD1-7014
gcaacagccugacgggggggc

SEQ ID NO: 20749 - RNA, 22 nt, Artificial Sequence
  Synthetic oligonucleotide: PDCD1-7015
ugcaacagccugacgggggggc

SEQ ID NO: 20750 - RNA, 23 nt, Artificial Sequence
  Synthetic oligonucleotide: PDCD1-7016
cugcaacagccugacgggggggc

SEQ ID NO: 20751 - RNA, 24 nt, Artificial Sequence
  Synthetic oligonucleotide: PDCD1-7017
ccugcaacagccugacgggggggc

SEQ ID NO: 20752 - RNA, 18 nt, Artificial Sequence
  Synthetic oligonucleotide: PDCD1-7018
augacgggucaggcuggc

SEQ ID NO: 20753 - RNA, 19 nt, Artificial Sequence
  Synthetic oligonucleotide: PDCD1-7019
aaugacgggucaggcuggc

SEQ ID NO: 20754 - RNA, 20 nt, Artificial Sequence
  Synthetic oligonucleotide: PDCD1-1403
gaaugacgggucaggcuggc

SEQ ID NO: 20755 - RNA, 21 nt, Artificial Sequence
  Synthetic oligonucleotide: PDCD1-7020
agaaugacgggucaggcuggc

SEQ ID NO: 20756 - RNA, 22 nt, Artificial Sequence
  Synthetic oligonucleotide: PDCD1-7021
uagaaugacgggucaggcuggc

SEQ ID NO: 20757 - RNA, 23 nt, Artificial Sequence
  Synthetic oligonucleotide: PDCD1-7022
guagaaugacgggucaggcuggc

SEQ ID NO: 20758 - RNA, 24 nt, Artificial Sequence
  Synthetic oligonucleotide: PDCD1-7023
uguagaaugacgggucaggcuggc

SEQ ID NO: 20759 - RNA, 18 nt, Artificial Sequence
  Synthetic oligonucleotide: PDCD1-7024
gggggcuggggcgguggc

SEQ ID NO: 20760 - RNA, 19 nt, Artificial Sequence
  Synthetic oligonucleotide: PDCD1-7025
ggggggcuggggcgguggc

SEQ ID NO: 20761 - RNA, 20 nt, Artificial Sequence
  Synthetic oligonucleotide: PDCD1-2794
gggggggcuggggcgguggc

SEQ ID NO: 20762 - RNA, 21 nt, Artificial Sequence
  Synthetic oligonucleotide: PDCD1-7026
cgggggggcuggggcgguggc

SEQ ID NO: 20763 - RNA, 22 nt, Artificial Sequence
  Synthetic oligonucleotide: PDCD1-7027
acgggggggcuggggcgguggc

SEQ ID NO: 20764 - RNA, 23 nt, Artificial Sequence
  Synthetic oligonucleotide: PDCD1-7028
gacgggggggcuggggcgguggc

SEQ ID NO: 20765 - RNA, 24 nt, Artificial Sequence
  Synthetic oligonucleotide: PDCD1-7029
ugacgggggggcuggggcgguggc

SEQ ID NO: 20766 - RNA, 18 nt, Artificial Sequence
  Synthetic oligonucleotide: PDCD1-7030
guucaggggguccagugc

SEQ ID NO: 20767 - RNA, 19 nt, Artificial Sequence
  Synthetic oligonucleotide: PDCD1-7031
gguucaggggguccagugc

SEQ ID NO: 20768 - RNA, 20 nt, Artificial Sequence
  Synthetic oligonucleotide: PDCD1-1745
ugguucaggggguccagugc

SEQ ID NO: 20769 - RNA, 21 nt, Artificial Sequence
  Synthetic oligonucleotide: PDCD1-7032
gugguucaggggguccagugc

SEQ ID NO: 20770 - RNA, 22 nt, Artificial Sequence
  Synthetic oligonucleotide: PDCD1-7033
ggugguucaggggguccagugc

SEQ ID NO: 20771 - RNA, 23 nt, Artificial Sequence
  Synthetic oligonucleotide: PDCD1-7034
gggugguucaggggguccagugc

SEQ ID NO: 20772 - RNA, 24 nt, Artificial Sequence
  Synthetic oligonucleotide: PDCD1-7035
ggggugguucaggggguccagugc

SEQ ID NO: 20773 - RNA, 18 nt, Artificial Sequence
  Synthetic oligonucleotide: PDCD1-7036
gccucacucucccggauc

SEQ ID NO: 20774 - RNA, 19 nt, Artificial Sequence
  Synthetic oligonucleotide: PDCD1-7037
ggccucacucucccggauc

SEQ ID NO: 20775 - RNA, 20 nt, Artificial Sequence
  Synthetic oligonucleotide: PDCD1-1876
uggccucacucucccggauc

SEQ ID NO: 20776 - RNA, 21 nt, Artificial Sequence
  Synthetic oligonucleotide: PDCD1-7038
uuggccucacucucccggauc

SEQ ID NO: 20777 - RNA, 22 nt, Artificial Sequence
  Synthetic oligonucleotide: PDCD1-7039
cuuggccucacucucccggauc

SEQ ID NO: 20778 - RNA, 23 nt, Artificial Sequence
  Synthetic oligonucleotide: PDCD1-7040
ccuuggccucacucucccggauc

SEQ ID NO: 20779 - RNA, 24 nt, Artificial Sequence
  Synthetic oligonucleotide: PDCD1-7041
gccuuggccucacucucccggauc

SEQ ID NO: 20780 - RNA, 18 nt, Artificial Sequence
  Synthetic oligonucleotide: PDCD1-7042
ugugaccacagcccgcuc

SEQ ID NO: 20781 - RNA, 19 nt, Artificial Sequence
  Synthetic oligonucleotide: PDCD1-7043
cugugaccacagcccgcuc

SEQ ID NO: 20782 - RNA, 20 nt, Artificial Sequence
  Synthetic oligonucleotide: PDCD1-1867
acugugaccacagcccgcuc

SEQ ID NO: 20783 - RNA, 21 nt, Artificial Sequence
  Synthetic oligonucleotide: PDCD1-7044
cacugugaccacagcccgcuc

SEQ ID NO: 20784 - RNA, 22 nt, Artificial Sequence
  Synthetic oligonucleotide: PDCD1-7045
acacugugaccacagcccgcuc

SEQ ID NO: 20785 - RNA, 23 nt, Artificial Sequence
  Synthetic oligonucleotide: PDCD1-7046
uacacugugaccacagcccgcuc

SEQ ID NO: 20786 - RNA, 24 nt, Artificial Sequence
  Synthetic oligonucleotide: PDCD1-7047
guacacugugaccacagcccgcuc

SEQ ID NO: 20787 - RNA, 18 nt, Artificial Sequence
  Synthetic oligonucleotide: PDCD1-7048
gggucucugcccagauuc

SEQ ID NO: 20788 - RNA, 19 nt, Artificial Sequence
  Synthetic oligonucleotide: PDCD1-7049
ugggucucugcccagauuc

SEQ ID NO: 20789 - RNA, 20 nt, Artificial Sequence
  Synthetic oligonucleotide: PDCD1-1885
cugggucucugcccagauuc

SEQ ID NO: 20790 - RNA, 21 nt, Artificial Sequence
  Synthetic oligonucleotide: PDCD1-7050
ccugggucucugcccagauuc

SEQ ID NO: 20791 - RNA, 22 nt, Artificial Sequence
  Synthetic oligonucleotide: PDCD1-7051
gccugggucucugcccagauuc

SEQ ID NO: 20792 - RNA, 23 nt, Artificial Sequence
  Synthetic oligonucleotide: PDCD1-7052
cgccugggucucugcccagauuc

SEQ ID NO: 20793 - RNA, 24 nt, Artificial Sequence
  Synthetic oligonucleotide: PDCD1-7053
ccgccugggucucugcccagauuc

SEQ ID NO: 20794 - RNA, 18 nt, Artificial Sequence
  Synthetic oligonucleotide: PDCD1-7054
gagagagggagccucuuc

SEQ ID NO: 20795 - RNA, 19 nt, Artificial Sequence
  Synthetic oligonucleotide: PDCD1-7055
ggagagagggagccucuuc

SEQ ID NO: 20796 - RNA, 20 nt, Artificial Sequence
  Synthetic oligonucleotide: PDCD1-1869
aggagagagggagccucuuc

SEQ ID NO: 20797 - RNA, 21 nt, Artificial Sequence
  Synthetic oligonucleotide: PDCD1-7056
gaggagagagggagccucuuc

SEQ ID NO: 20798 - RNA, 22 nt, Artificial Sequence
  Synthetic oligonucleotide: PDCD1-7057
cgaggagagagggagccucuuc

SEQ ID NO: 20799 - RNA, 23 nt, Artificial Sequence
  Synthetic oligonucleotide: PDCD1-7058
ucgaggagagagggagccucuuc

SEQ ID NO: 20800 - RNA, 24 nt, Artificial Sequence
  Synthetic oligonucleotide: PDCD1-7059
aucgaggagagagggagccucuuc

SEQ ID NO: 20801 - RNA, 18 nt, Artificial Sequence
  Synthetic oligonucleotide: PDCD1-7060
gccaggguggggugguuc

SEQ ID NO: 20802 - RNA, 19 nt, Artificial Sequence
  Synthetic oligonucleotide: PDCD1-7061
ugccaggguggggugguuc

SEQ ID NO: 20803 - RNA, 20 nt, Artificial Sequence
  Synthetic oligonucleotide: PDCD1-2808
gugccaggguggggugguuc

SEQ ID NO: 20804 - RNA, 21 nt, Artificial Sequence
  Synthetic oligonucleotide: PDCD1-7062
cgugccaggguggggugguuc

SEQ ID NO: 20805 - RNA, 22 nt, Artificial Sequence
  Synthetic oligonucleotide: PDCD1-7063
ucgugccaggguggggugguuc

SEQ ID NO: 20806 - RNA, 23 nt, Artificial Sequence
  Synthetic oligonucleotide: PDCD1-7064
cucgugccaggguggggugguuc

SEQ ID NO: 20807 - RNA, 24 nt, Artificial Sequence
  Synthetic oligonucleotide: PDCD1-7065
acucgugccaggguggggugguuc

SEQ ID NO: 20808 - RNA, 18 nt, Artificial Sequence
  Synthetic oligonucleotide: PDCD1-7066
acagcgaauggaaaacag

SEQ ID NO: 20809 - RNA, 19 nt, Artificial Sequence
  Synthetic oligonucleotide: PDCD1-7067
uacagcgaauggaaaacag

SEQ ID NO: 20810 - RNA, 20 nt, Artificial Sequence
  Synthetic oligonucleotide: PDCD1-1753
uuacagcgaauggaaaacag

SEQ ID NO: 20811 - RNA, 21 nt, Artificial Sequence
  Synthetic oligonucleotide: PDCD1-7068
auuacagcgaauggaaaacag

SEQ ID NO: 20812 - RNA, 22 nt, Artificial Sequence
  Synthetic oligonucleotide: PDCD1-7069
uauuacagcgaauggaaaacag

SEQ ID NO: 20813 - RNA, 23 nt, Artificial Sequence
  Synthetic oligonucleotide: PDCD1-7070
uuauuacagcgaauggaaaacag

SEQ ID NO: 20814 - RNA, 24 nt, Artificial Sequence
  Synthetic oligonucleotide: PDCD1-7071
uuuauuacagcgaauggaaaacag

SEQ ID NO: 20815 - RNA, 18 nt, Artificial Sequence
  Synthetic oligonucleotide: PDCD1-7072
cucccggaucgaggagag

SEQ ID NO: 20816 - RNA, 19 nt, Artificial Sequence
  Synthetic oligonucleotide: PDCD1-7073
ucucccggaucgaggagag

SEQ ID NO: 20817 - RNA, 20 nt, Artificial Sequence
  Synthetic oligonucleotide: PDCD1-2971
cucucccggaucgaggagag

SEQ ID NO: 20818 - RNA, 21 nt, Artificial Sequence
  Synthetic oligonucleotide: PDCD1-7074
acucucccggaucgaggagag

SEQ ID NO: 20819 - RNA, 22 nt, Artificial Sequence
  Synthetic oligonucleotide: PDCD1-7075
cacucucccggaucgaggagag

SEQ ID NO: 20820 - RNA, 23 nt, Artificial Sequence
  Synthetic oligonucleotide: PDCD1-7076
ucacucucccggaucgaggagag

SEQ ID NO: 20821 - RNA, 24 nt, Artificial Sequence
  Synthetic oligonucleotide: PDCD1-7077
cucacucucccggaucgaggagag

SEQ ID NO: 20822 - RNA, 18 nt, Artificial Sequence
  Synthetic oligonucleotide: PDCD1-7078
ucacucucccggaucgag

SEQ ID NO: 20823 - RNA, 19 nt, Artificial Sequence
  Synthetic oligonucleotide: PDCD1-7079
cucacucucccggaucgag

SEQ ID NO: 20824 - RNA, 20 nt, Artificial Sequence
  Synthetic oligonucleotide: PDCD1-1874
ccucacucucccggaucgag

SEQ ID NO: 20825 - RNA, 21 nt, Artificial Sequence
  Synthetic oligonucleotide: PDCD1-7080
gccucacucucccggaucgag

SEQ ID NO: 20826 - RNA, 22 nt, Artificial Sequence
  Synthetic oligonucleotide: PDCD1-7081
ggccucacucucccggaucgag

SEQ ID NO: 20827 - RNA, 23 nt, Artificial Sequence
  Synthetic oligonucleotide: PDCD1-7082
uggccucacucucccggaucgag

SEQ ID NO: 20828 - RNA, 24 nt, Artificial Sequence
  Synthetic oligonucleotide: PDCD1-7083
uuggccucacucucccggaucgag

SEQ ID NO: 20829 - RNA, 18 nt, Artificial Sequence
  Synthetic oligonucleotide: PDCD1-7084
uacgacgucaaaguuuag

SEQ ID NO: 20830 - RNA, 19 nt, Artificial Sequence
  Synthetic oligonucleotide: PDCD1-7085
uuacgacgucaaaguuuag

SEQ ID NO: 20831 - RNA, 20 nt, Artificial Sequence
  Synthetic oligonucleotide: PDCD1-1895
uuuacgacgucaaaguuuag

SEQ ID NO: 20832 - RNA, 21 nt, Artificial Sequence
  Synthetic oligonucleotide: PDCD1-7086
cuuuacgacgucaaaguuuag

SEQ ID NO: 20833 - RNA, 22 nt, Artificial Sequence
  Synthetic oligonucleotide: PDCD1-7087
gcuuuacgacgucaaaguuuag

SEQ ID NO: 20834 - RNA, 23 nt, Artificial Sequence
  Synthetic oligonucleotide: PDCD1-7088
ggcuuuacgacgucaaaguuuag

SEQ ID NO: 20835 - RNA, 24 nt, Artificial Sequence
  Synthetic oligonucleotide: PDCD1-7089
uggcuuuacgacgucaaaguuuag

SEQ ID NO: 20836 - RNA, 18 nt, Artificial Sequence
  Synthetic oligonucleotide: PDCD1-7090
gccugcaacagccugacg

SEQ ID NO: 20837 - RNA, 19 nt, Artificial Sequence
  Synthetic oligonucleotide: PDCD1-7091
ugccugcaacagccugacg

SEQ ID NO: 20838 - RNA, 20 nt, Artificial Sequence
  Synthetic oligonucleotide: PDCD1-2785
augccugcaacagccugacg

SEQ ID NO: 20839 - RNA, 21 nt, Artificial Sequence
  Synthetic oligonucleotide: PDCD1-7092
gaugccugcaacagccugacg

SEQ ID NO: 20840 - RNA, 22 nt, Artificial Sequence
  Synthetic oligonucleotide: PDCD1-7093
ugaugccugcaacagccugacg

SEQ ID NO: 20841 - RNA, 23 nt, Artificial Sequence
  Synthetic oligonucleotide: PDCD1-7094
gugaugccugcaacagccugacg

SEQ ID NO: 20842 - RNA, 24 nt, Artificial Sequence
  Synthetic oligonucleotide: PDCD1-7095
ugugaugccugcaacagccugacg

SEQ ID NO: 20843 - RNA, 18 nt, Artificial Sequence
  Synthetic oligonucleotide: PDCD1-7096
aaccccaaaccuuggccg

SEQ ID NO: 20844 - RNA, 19 nt, Artificial Sequence
  Synthetic oligonucleotide: PDCD1-7097
gaaccccaaaccuuggccg

SEQ ID NO: 20845 - RNA, 20 nt, Artificial Sequence
  Synthetic oligonucleotide: PDCD1-2223
agaaccccaaaccuuggccg

SEQ ID NO: 20846 - RNA, 21 nt, Artificial Sequence
  Synthetic oligonucleotide: PDCD1-7098
cagaaccccaaaccuuggccg

SEQ ID NO: 20847 - RNA, 22 nt, Artificial Sequence
  Synthetic oligonucleotide: PDCD1-7099
ccagaaccccaaaccuuggccg

SEQ ID NO: 20848 - RNA, 23 nt, Artificial Sequence
  Synthetic oligonucleotide: PDCD1-7100
gccagaaccccaaaccuuggccg

SEQ ID NO: 20849 - RNA, 24 nt, Artificial Sequence
  Synthetic oligonucleotide: PDCD1-7101
ggccagaaccccaaaccuuggccg

SEQ ID NO: 20850 - RNA, 18 nt, Artificial Sequence
  Synthetic oligonucleotide: PDCD1-7102
cccuguucagaccauccg

SEQ ID NO: 20851 - RNA, 19 nt, Artificial Sequence
  Synthetic oligonucleotide: PDCD1-7103
gcccuguucagaccauccg

SEQ ID NO: 20852 - RNA, 20 nt, Artificial Sequence
  Synthetic oligonucleotide: PDCD1-2979
agcccuguucagaccauccg

SEQ ID NO: 20853 - RNA, 21 nt, Artificial Sequence
  Synthetic oligonucleotide: PDCD1-7104
gagcccuguucagaccauccg

SEQ ID NO: 20854 - RNA, 22 nt, Artificial Sequence
  Synthetic oligonucleotide: PDCD1-7105
cgagcccuguucagaccauccg

SEQ ID NO: 20855 - RNA, 23 nt, Artificial Sequence
  Synthetic oligonucleotide: PDCD1-7106
ccgagcccuguucagaccauccg

SEQ ID NO: 20856 - RNA, 24 nt, Artificial Sequence
  Synthetic oligonucleotide: PDCD1-7107
cccgagcccuguucagaccauccg

SEQ ID NO: 20857 - RNA, 18 nt, Artificial Sequence
  Synthetic oligonucleotide: PDCD1-7108
ccucacucucccggaucg

SEQ ID NO: 20858 - RNA, 19 nt, Artificial Sequence
  Synthetic oligonucleotide: PDCD1-7109
gccucacucucccggaucg

SEQ ID NO: 20859 - RNA, 20 nt, Artificial Sequence
  Synthetic oligonucleotide: PDCD1-2972
ggccucacucucccggaucg

SEQ ID NO: 20860 - RNA, 21 nt, Artificial Sequence
  Synthetic oligonucleotide: PDCD1-7110
uggccucacucucccggaucg

SEQ ID NO: 20861 - RNA, 22 nt, Artificial Sequence
  Synthetic oligonucleotide: PDCD1-7111
uuggccucacucucccggaucg

SEQ ID NO: 20862 - RNA, 23 nt, Artificial Sequence
  Synthetic oligonucleotide: PDCD1-7112
cuuggccucacucucccggaucg

SEQ ID NO: 20863 - RNA, 24 nt, Artificial Sequence
  Synthetic oligonucleotide: PDCD1-7113
ccuuggccucacucucccggaucg

SEQ ID NO: 20864 - RNA, 18 nt, Artificial Sequence
  Synthetic oligonucleotide: PDCD1-7114
ccggcccaucccccuucg

SEQ ID NO: 20865 - RNA, 19 nt, Artificial Sequence
  Synthetic oligonucleotide: PDCD1-7115
cccggcccaucccccuucg

SEQ ID NO: 20866 - RNA, 20 nt, Artificial Sequence
  Synthetic oligonucleotide: PDCD1-1723
ucccggcccaucccccuucg

SEQ ID NO: 20867 - RNA, 21 nt, Artificial Sequence
  Synthetic oligonucleotide: PDCD1-7116
uucccggcccaucccccuucg

SEQ ID NO: 20868 - RNA, 22 nt, Artificial Sequence
  Synthetic oligonucleotide: PDCD1-7117
cuucccggcccaucccccuucg

SEQ ID NO: 20869 - RNA, 23 nt, Artificial Sequence
  Synthetic oligonucleotide: PDCD1-7118
ccuucccggcccaucccccuucg

SEQ ID NO: 20870 - RNA, 24 nt, Artificial Sequence
  Synthetic oligonucleotide: PDCD1-7119
gccuucccggcccaucccccuucg

SEQ ID NO: 20871 - RNA, 18 nt, Artificial Sequence
  Synthetic oligonucleotide: PDCD1-7120
acucgaguuuuccuaagg

SEQ ID NO: 20872 - RNA, 19 nt, Artificial Sequence
  Synthetic oligonucleotide: PDCD1-7121
cacucgaguuuuccuaagg

SEQ ID NO: 20873 - RNA, 20 nt, Artificial Sequence
  Synthetic oligonucleotide: PDCD1-1900
ucacucgaguuuuccuaagg

SEQ ID NO: 20874 - RNA, 21 nt, Artificial Sequence
  Synthetic oligonucleotide: PDCD1-7122
cucacucgaguuuuccuaagg

SEQ ID NO: 20875 - RNA, 22 nt, Artificial Sequence
  Synthetic oligonucleotide: PDCD1-7123
ccucacucgaguuuuccuaagg

SEQ ID NO: 20876 - RNA, 23 nt, Artificial Sequence
  Synthetic oligonucleotide: PDCD1-7124
uccucacucgaguuuuccuaagg

SEQ ID NO: 20877 - RNA, 24 nt, Artificial Sequence
  Synthetic oligonucleotide: PDCD1-7125
guccucacucgaguuuuccuaagg

SEQ ID NO: 20878 - RNA, 18 nt, Artificial Sequence
  Synthetic oligonucleotide: PDCD1-7126
cagcccacucgugccagg

SEQ ID NO: 20879 - RNA, 19 nt, Artificial Sequence
  Synthetic oligonucleotide: PDCD1-7127
ccagcccacucgugccagg

SEQ ID NO: 20880 - RNA, 20 nt, Artificial Sequence
  Synthetic oligonucleotide: PDCD1-1740
uccagcccacucgugccagg

SEQ ID NO: 20881 - RNA, 21 nt, Artificial Sequence
  Synthetic oligonucleotide: PDCD1-7128
cuccagcccacucgugccagg

SEQ ID NO: 20882 - RNA, 22 nt, Artificial Sequence
  Synthetic oligonucleotide: PDCD1-7129
ccuccagcccacucgugccagg

SEQ ID NO: 20883 - RNA, 23 nt, Artificial Sequence
  Synthetic oligonucleotide: PDCD1-7130
cccuccagcccacucgugccagg

SEQ ID NO: 20884 - RNA, 24 nt, Artificial Sequence
  Synthetic oligonucleotide: PDCD1-7131
gcccuccagcccacucgugccagg

SEQ ID NO: 20885 - RNA, 18 nt, Artificial Sequence
  Synthetic oligonucleotide: PDCD1-7132
ccugcaacagccugacgg

SEQ ID NO: 20886 - RNA, 19 nt, Artificial Sequence
  Synthetic oligonucleotide: PDCD1-7133
gccugcaacagccugacgg

SEQ ID NO: 20887 - RNA, 20 nt, Artificial Sequence
  Synthetic oligonucleotide: PDCD1-2786
ugccugcaacagccugacgg

SEQ ID NO: 20888 - RNA, 21 nt, Artificial Sequence
  Synthetic oligonucleotide: PDCD1-7134
augccugcaacagccugacgg

SEQ ID NO: 20889 - RNA, 22 nt, Artificial Sequence
  Synthetic oligonucleotide: PDCD1-7135
gaugccugcaacagccugacgg

SEQ ID NO: 20890 - RNA, 23 nt, Artificial Sequence
  Synthetic oligonucleotide: PDCD1-7136
ugaugccugcaacagccugacgg

SEQ ID NO: 20891 - RNA, 24 nt, Artificial Sequence
  Synthetic oligonucleotide: PDCD1-7137
gugaugccugcaacagccugacgg

SEQ ID NO: 20892 - RNA, 18 nt, Artificial Sequence
  Synthetic oligonucleotide: PDCD1-7138
aacagccugacggggggg

SEQ ID NO: 20893 - RNA, 19 nt, Artificial Sequence
  Synthetic oligonucleotide: PDCD1-7139
caacagccugacggggggg

SEQ ID NO: 20894 - RNA, 20 nt, Artificial Sequence
  Synthetic oligonucleotide: PDCD1-1732
gcaacagccugacggggggg

SEQ ID NO: 20895 - RNA, 21 nt, Artificial Sequence
  Synthetic oligonucleotide: PDCD1-7140
ugcaacagccugacggggggg

SEQ ID NO: 20896 - RNA, 22 nt, Artificial Sequence
  Synthetic oligonucleotide: PDCD1-7141
cugcaacagccugacggggggg

SEQ ID NO: 20897 - RNA, 23 nt, Artificial Sequence
  Synthetic oligonucleotide: PDCD1-7142
ccugcaacagccugacggggggg

SEQ ID NO: 20898 - RNA, 24 nt, Artificial Sequence
  Synthetic oligonucleotide: PDCD1-7143
gccugcaacagccugacggggggg

SEQ ID NO: 20899 - RNA, 18 nt, Artificial Sequence
  Synthetic oligonucleotide: PDCD1-7144
aguuuuccuaaggauggg

SEQ ID NO: 20900 - RNA, 19 nt, Artificial Sequence
  Synthetic oligonucleotide: PDCD1-7145
gaguuuuccuaaggauggg

SEQ ID NO: 20901 - RNA, 20 nt, Artificial Sequence
  Synthetic oligonucleotide: PDCD1-1898
cgaguuuuccuaaggauggg

SEQ ID NO: 20902 - RNA, 21 nt, Artificial Sequence
  Synthetic oligonucleotide: PDCD1-7146
ucgaguuuuccuaaggauggg

SEQ ID NO: 20903 - RNA, 22 nt, Artificial Sequence
  Synthetic oligonucleotide: PDCD1-7147
cucgaguuuuccuaaggauggg

SEQ ID NO: 20904 - RNA, 23 nt, Artificial Sequence
  Synthetic oligonucleotide: PDCD1-7148
acucgaguuuuccuaaggauggg

SEQ ID NO: 20905 - RNA, 24 nt, Artificial Sequence
  Synthetic oligonucleotide: PDCD1-7149
cacucgaguuuuccuaaggauggg

SEQ ID NO: 20906 - RNA, 18 nt, Artificial Sequence
  Synthetic oligonucleotide: PDCD1-7150
uccaggaucccuccuggg

SEQ ID NO: 20907 - RNA, 19 nt, Artificial Sequence
  Synthetic oligonucleotide: PDCD1-7151
cuccaggaucccuccuggg

SEQ ID NO: 20908 - RNA, 20 nt, Artificial Sequence
  Synthetic oligonucleotide: PDCD1-2986
ucuccaggaucccuccuggg

SEQ ID NO: 20909 - RNA, 21 nt, Artificial Sequence
  Synthetic oligonucleotide: PDCD1-7152
gucuccaggaucccuccuggg

SEQ ID NO: 20910 - RNA, 22 nt, Artificial Sequence
  Synthetic oligonucleotide: PDCD1-7153
ugucuccaggaucccuccuggg

SEQ ID NO: 20911 - RNA, 23 nt, Artificial Sequence
  Synthetic oligonucleotide: PDCD1-7154
cugucuccaggaucccuccuggg

SEQ ID NO: 20912 - RNA, 24 nt, Artificial Sequence
  Synthetic oligonucleotide: PDCD1-7155
ucugucuccaggaucccuccuggg

SEQ ID NO: 20913 - RNA, 18 nt, Artificial Sequence
  Synthetic oligonucleotide: PDCD1-7156
cuccaggaucccuccugg

SEQ ID NO: 20914 - RNA, 19 nt, Artificial Sequence
  Synthetic oligonucleotide: PDCD1-7157
ucuccaggaucccuccugg

SEQ ID NO: 20915 - RNA, 20 nt, Artificial Sequence
  Synthetic oligonucleotide: PDCD1-1889
gucuccaggaucccuccugg

SEQ ID NO: 20916 - RNA, 21 nt, Artificial Sequence
  Synthetic oligonucleotide: PDCD1-7158
ugucuccaggaucccuccugg

SEQ ID NO: 20917 - RNA, 22 nt, Artificial Sequence
  Synthetic oligonucleotide: PDCD1-7159
cugucuccaggaucccuccugg

SEQ ID NO: 20918 - RNA, 23 nt, Artificial Sequence
  Synthetic oligonucleotide: PDCD1-7160
ucugucuccaggaucccuccugg

SEQ ID NO: 20919 - RNA, 24 nt, Artificial Sequence
  Synthetic oligonucleotide: PDCD1-7161
uucugucuccaggaucccuccugg

SEQ ID NO: 20920 - RNA, 18 nt, Artificial Sequence
  Synthetic oligonucleotide: PDCD1-7162
uguucagaccauccgugg

SEQ ID NO: 20921 - RNA, 19 nt, Artificial Sequence
  Synthetic oligonucleotide: PDCD1-7163
cuguucagaccauccgugg

SEQ ID NO: 20922 - RNA, 20 nt, Artificial Sequence
  Synthetic oligonucleotide: PDCD1-2976
ccuguucagaccauccgugg

SEQ ID NO: 20923 - RNA, 21 nt, Artificial Sequence
  Synthetic oligonucleotide: PDCD1-7164
cccuguucagaccauccgugg

SEQ ID NO: 20924 - RNA, 22 nt, Artificial Sequence
  Synthetic oligonucleotide: PDCD1-7165
gcccuguucagaccauccgugg

SEQ ID NO: 20925 - RNA, 23 nt, Artificial Sequence
  Synthetic oligonucleotide: PDCD1-7166
agcccuguucagaccauccgugg

SEQ ID NO: 20926 - RNA, 24 nt, Artificial Sequence
  Synthetic oligonucleotide: PDCD1-7167
gagcccuguucagaccauccgugg

SEQ ID NO: 20927 - RNA, 18 nt, Artificial Sequence
  Synthetic oligonucleotide: PDCD1-7168
ggggggcuggggcggugg

SEQ ID NO: 20928 - RNA, 19 nt, Artificial Sequence
  Synthetic oligonucleotide: PDCD1-7169
gggggggcuggggcggugg

SEQ ID NO: 20929 - RNA, 20 nt, Artificial Sequence
  Synthetic oligonucleotide: PDCD1-1734
cgggggggcuggggcggugg

SEQ ID NO: 20930 - RNA, 21 nt, Artificial Sequence
  Synthetic oligonucleotide: PDCD1-7170
acgggggggcuggggcggugg

SEQ ID NO: 20931 - RNA, 22 nt, Artificial Sequence
  Synthetic oligonucleotide: PDCD1-7171
gacgggggggcuggggcggugg

SEQ ID NO: 20932 - RNA, 23 nt, Artificial Sequence
  Synthetic oligonucleotide: PDCD1-7172
ugacgggggggcuggggcggugg

SEQ ID NO: 20933 - RNA, 24 nt, Artificial Sequence
  Synthetic oligonucleotide: PDCD1-7173
cugacgggggggcuggggcggugg

SEQ ID NO: 20934 - RNA, 18 nt, Artificial Sequence
  Synthetic oligonucleotide: PDCD1-7174
gaugggaugagccccaug

SEQ ID NO: 20935 - RNA, 19 nt, Artificial Sequence
  Synthetic oligonucleotide: PDCD1-7175
ggaugggaugagccccaug

SEQ ID NO: 20936 - RNA, 20 nt, Artificial Sequence
  Synthetic oligonucleotide: PDCD1-2994
aggaugggaugagccccaug

SEQ ID NO: 20937 - RNA, 21 nt, Artificial Sequence
  Synthetic oligonucleotide: PDCD1-7176
aaggaugggaugagccccaug

SEQ ID NO: 20938 - RNA, 22 nt, Artificial Sequence
  Synthetic oligonucleotide: PDCD1-7177
uaaggaugggaugagccccaug

SEQ ID NO: 20939 - RNA, 23 nt, Artificial Sequence
  Synthetic oligonucleotide: PDCD1-7178
cuaaggaugggaugagccccaug

SEQ ID NO: 20940 - RNA, 24 nt, Artificial Sequence
  Synthetic oligonucleotide: PDCD1-7179
ccuaaggaugggaugagccccaug

SEQ ID NO: 20941 - RNA, 18 nt, Artificial Sequence
  Synthetic oligonucleotide: PDCD1-7180
gaugccugcaacagccug

SEQ ID NO: 20942 - RNA, 19 nt, Artificial Sequence
  Synthetic oligonucleotide: PDCD1-7181
ugaugccugcaacagccug

SEQ ID NO: 20943 - RNA, 20 nt, Artificial Sequence
  Synthetic oligonucleotide: PDCD1-1727
gugaugccugcaacagccug

SEQ ID NO: 20944 - RNA, 21 nt, Artificial Sequence
  Synthetic oligonucleotide: PDCD1-7182
ugugaugccugcaacagccug

SEQ ID NO: 20945 - RNA, 22 nt, Artificial Sequence
  Synthetic oligonucleotide: PDCD1-7183
gugugaugccugcaacagccug

SEQ ID NO: 20946 - RNA, 23 nt, Artificial Sequence
  Synthetic oligonucleotide: PDCD1-7184
cgugugaugccugcaacagccug

SEQ ID NO: 20947 - RNA, 24 nt, Artificial Sequence
  Synthetic oligonucleotide: PDCD1-7185
ccgugugaugccugcaacagccug

SEQ ID NO: 20948 - RNA, 18 nt, Artificial Sequence
  Synthetic oligonucleotide: PDCD1-7186
aaacugcugauauuagug

SEQ ID NO: 20949 - RNA, 19 nt, Artificial Sequence
  Synthetic oligonucleotide: PDCD1-7187
gaaacugcugauauuagug

SEQ ID NO: 20950 - RNA, 20 nt, Artificial Sequence
  Synthetic oligonucleotide: PDCD1-7188
ugaaacugcugauauuagug

SEQ ID NO: 20951 - RNA, 21 nt, Artificial Sequence
  Synthetic oligonucleotide: PDCD1-7189
augaaacugcugauauuagug

SEQ ID NO: 20952 - RNA, 22 nt, Artificial Sequence
  Synthetic oligonucleotide: PDCD1-7190
aaugaaacugcugauauuagug

SEQ ID NO: 20953 - RNA, 23 nt, Artificial Sequence
  Synthetic oligonucleotide: PDCD1-7191
aaaugaaacugcugauauuagug

SEQ ID NO: 20954 - RNA, 24 nt, Artificial Sequence
  Synthetic oligonucleotide: PDCD1-7192
gaaaugaaacugcugauauuagug

SEQ ID NO: 20955 - RNA, 18 nt, Artificial Sequence
  Synthetic oligonucleotide: PDCD1-7193
cuguucagaccauccgug

SEQ ID NO: 20956 - RNA, 19 nt, Artificial Sequence
  Synthetic oligonucleotide: PDCD1-7194
ccuguucagaccauccgug

SEQ ID NO: 20957 - RNA, 20 nt, Artificial Sequence
  Synthetic oligonucleotide: PDCD1-2977
cccuguucagaccauccgug

SEQ ID NO: 20958 - RNA, 21 nt, Artificial Sequence
  Synthetic oligonucleotide: PDCD1-7195
gcccuguucagaccauccgug

SEQ ID NO: 20959 - RNA, 22 nt, Artificial Sequence
  Synthetic oligonucleotide: PDCD1-7196
agcccuguucagaccauccgug

SEQ ID NO: 20960 - RNA, 23 nt, Artificial Sequence
  Synthetic oligonucleotide: PDCD1-7197
gagcccuguucagaccauccgug

SEQ ID NO: 20961 - RNA, 24 nt, Artificial Sequence
  Synthetic oligonucleotide: PDCD1-7198
cgagcccuguucagaccauccgug

SEQ ID NO: 20962 - RNA, 18 nt, Artificial Sequence
  Synthetic oligonucleotide: PDCD1-7199
aucuccuuguauucugug

SEQ ID NO: 20963 - RNA, 19 nt, Artificial Sequence
  Synthetic oligonucleotide: PDCD1-7200
uaucuccuuguauucugug

SEQ ID NO: 20964 - RNA, 20 nt, Artificial Sequence
  Synthetic oligonucleotide: PDCD1-1747
uuaucuccuuguauucugug

SEQ ID NO: 20965 - RNA, 21 nt, Artificial Sequence
  Synthetic oligonucleotide: PDCD1-7201
cuuaucuccuuguauucugug

SEQ ID NO: 20966 - RNA, 22 nt, Artificial Sequence
  Synthetic oligonucleotide: PDCD1-7202
gcuuaucuccuuguauucugug

SEQ ID NO: 20967 - RNA, 23 nt, Artificial Sequence
  Synthetic oligonucleotide: PDCD1-7203
ugcuuaucuccuuguauucugug

SEQ ID NO: 20968 - RNA, 24 nt, Artificial Sequence
  Synthetic oligonucleotide: PDCD1-7204
uugcuuaucuccuuguauucugug

SEQ ID NO: 20969 - RNA, 18 nt, Artificial Sequence
  Synthetic oligonucleotide: PDCD1-7205
ggaugggaugagccccau

SEQ ID NO: 20970 - RNA, 19 nt, Artificial Sequence
  Synthetic oligonucleotide: PDCD1-7206
aggaugggaugagccccau

SEQ ID NO: 20971 - RNA, 20 nt, Artificial Sequence
  Synthetic oligonucleotide: PDCD1-1897
aaggaugggaugagccccau

SEQ ID NO: 20972 - RNA, 21 nt, Artificial Sequence
  Synthetic oligonucleotide: PDCD1-7207
uaaggaugggaugagccccau

SEQ ID NO: 20973 - RNA, 22 nt, Artificial Sequence
  Synthetic oligonucleotide: PDCD1-7208
cuaaggaugggaugagccccau

SEQ ID NO: 20974 - RNA, 23 nt, Artificial Sequence
  Synthetic oligonucleotide: PDCD1-7209
ccuaaggaugggaugagccccau

SEQ ID NO: 20975 - RNA, 24 nt, Artificial Sequence
  Synthetic oligonucleotide: PDCD1-7210
uccuaaggaugggaugagccccau

SEQ ID NO: 20976 - RNA, 18 nt, Artificial Sequence
  Synthetic oligonucleotide: PDCD1-7211
cgguggcaggggcuggcu

SEQ ID NO: 20977 - RNA, 19 nt, Artificial Sequence
  Synthetic oligonucleotide: PDCD1-7212
gcgguggcaggggcuggcu

SEQ ID NO: 20978 - RNA, 20 nt, Artificial Sequence
  Synthetic oligonucleotide: PDCD1-1736
ggcgguggcaggggcuggcu

SEQ ID NO: 20979 - RNA, 21 nt, Artificial Sequence
  Synthetic oligonucleotide: PDCD1-7213
gggcgguggcaggggcuggcu

SEQ ID NO: 20980 - RNA, 22 nt, Artificial Sequence
  Synthetic oligonucleotide: PDCD1-7214
ggggcgguggcaggggcuggcu

SEQ ID NO: 20981 - RNA, 23 nt, Artificial Sequence
  Synthetic oligonucleotide: PDCD1-7215
uggggcgguggcaggggcuggcu

SEQ ID NO: 20982 - RNA, 24 nt, Artificial Sequence
  Synthetic oligonucleotide: PDCD1-7216
cuggggcgguggcaggggcuggcu

SEQ ID NO: 20983 - RNA, 18 nt, Artificial Sequence
  Synthetic oligonucleotide: PDCD1-7217
aaguguaccuguucgagu

SEQ ID NO: 20984 - RNA, 19 nt, Artificial Sequence
  Synthetic oligonucleotide: PDCD1-7218
aaaguguaccuguucgagu

SEQ ID NO: 20985 - RNA, 20 nt, Artificial Sequence
  Synthetic oligonucleotide: PDCD1-1892
caaaguguaccuguucgagu

SEQ ID NO: 20986 - RNA, 21 nt, Artificial Sequence
  Synthetic oligonucleotide: PDCD1-7219
ccaaaguguaccuguucgagu

SEQ ID NO: 20987 - RNA, 22 nt, Artificial Sequence
  Synthetic oligonucleotide: PDCD1-7220
uccaaaguguaccuguucgagu

SEQ ID NO: 20988 - RNA, 23 nt, Artificial Sequence
  Synthetic oligonucleotide: PDCD1-7221
auccaaaguguaccuguucgagu

SEQ ID NO: 20989 - RNA, 24 nt, Artificial Sequence
  Synthetic oligonucleotide: PDCD1-7222
uauccaaaguguaccuguucgagu

SEQ ID NO: 20990 - RNA, 18 nt, Artificial Sequence
  Synthetic oligonucleotide: PDCD1-7223
accccaaaccuuggccgu

SEQ ID NO: 20991 - RNA, 19 nt, Artificial Sequence
  Synthetic oligonucleotide: PDCD1-7224
aaccccaaaccuuggccgu

SEQ ID NO: 20992 - RNA, 20 nt, Artificial Sequence
  Synthetic oligonucleotide: PDCD1-2224
gaaccccaaaccuuggccgu

SEQ ID NO: 20993 - RNA, 21 nt, Artificial Sequence
  Synthetic oligonucleotide: PDCD1-7225
agaaccccaaaccuuggccgu

SEQ ID NO: 20994 - RNA, 22 nt, Artificial Sequence
  Synthetic oligonucleotide: PDCD1-7226
cagaaccccaaaccuuggccgu

SEQ ID NO: 20995 - RNA, 23 nt, Artificial Sequence
  Synthetic oligonucleotide: PDCD1-7227
ccagaaccccaaaccuuggccgu

SEQ ID NO: 20996 - RNA, 24 nt, Artificial Sequence
  Synthetic oligonucleotide: PDCD1-7228
gccagaaccccaaaccuuggccgu

SEQ ID NO: 20997 - RNA, 18 nt, Artificial Sequence
  Synthetic oligonucleotide: PDCD1-7229
ccuguucagaccauccgu

SEQ ID NO: 20998 - RNA, 19 nt, Artificial Sequence
  Synthetic oligonucleotide: PDCD1-7230
cccuguucagaccauccgu

SEQ ID NO: 20999 - RNA, 20 nt, Artificial Sequence
  Synthetic oligonucleotide: PDCD1-2978
gcccuguucagaccauccgu

SEQ ID NO: 21000 - RNA, 21 nt, Artificial Sequence
  Synthetic oligonucleotide: PDCD1-7231
agcccuguucagaccauccgu

SEQ ID NO: 21001 - RNA, 22 nt, Artificial Sequence
  Synthetic oligonucleotide: PDCD1-7232
gagcccuguucagaccauccgu

SEQ ID NO: 21002 - RNA, 23 nt, Artificial Sequence
  Synthetic oligonucleotide: PDCD1-7233
cgagcccuguucagaccauccgu

SEQ ID NO: 21003 - RNA, 24 nt, Artificial Sequence
  Synthetic oligonucleotide: PDCD1-7234
ccgagcccuguucagaccauccgu

SEQ ID NO: 21004 - RNA, 18 nt, Artificial Sequence
  Synthetic oligonucleotide: PDCD1-7235
ugccaggguggggugguu

SEQ ID NO: 21005 - RNA, 19 nt, Artificial Sequence
  Synthetic oligonucleotide: PDCD1-7236
gugccaggguggggugguu

SEQ ID NO: 21006 - RNA, 20 nt, Artificial Sequence
  Synthetic oligonucleotide: PDCD1-1742
cgugccaggguggggugguu

SEQ ID NO: 21007 - RNA, 21 nt, Artificial Sequence
  Synthetic oligonucleotide: PDCD1-7237
ucgugccaggguggggugguu

SEQ ID NO: 21008 - RNA, 22 nt, Artificial Sequence
  Synthetic oligonucleotide: PDCD1-7238
cucgugccaggguggggugguu

SEQ ID NO: 21009 - RNA, 23 nt, Artificial Sequence
  Synthetic oligonucleotide: PDCD1-7239
acucgugccaggguggggugguu

SEQ ID NO: 21010 - RNA, 24 nt, Artificial Sequence
  Synthetic oligonucleotide: PDCD1-7240
cacucgugccaggguggggugguu

SEQ ID NO: 21011 - RNA, 18 nt, Artificial Sequence
  Synthetic oligonucleotide: PDCD1-7241
gcuggcggcccggcguuu

SEQ ID NO: 21012 - RNA, 19 nt, Artificial Sequence
  Synthetic oligonucleotide: PDCD1-7242
ggcuggcggcccggcguuu

SEQ ID NO: 21013 - RNA, 20 nt, Artificial Sequence
  Synthetic oligonucleotide: PDCD1-1746
uggcuggcggcccggcguuu

SEQ ID NO: 21014 - RNA, 21 nt, Artificial Sequence
  Synthetic oligonucleotide: PDCD1-7243
cuggcuggcggcccggcguuu

SEQ ID NO: 21015 - RNA, 22 nt, Artificial Sequence
  Synthetic oligonucleotide: PDCD1-7244
ccuggcuggcggcccggcguuu

SEQ ID NO: 21016 - RNA, 23 nt, Artificial Sequence
  Synthetic oligonucleotide: PDCD1-7245
gccuggcuggcggcccggcguuu

SEQ ID NO: 21017 - RNA, 24 nt, Artificial Sequence
  Synthetic oligonucleotide: PDCD1-7246
ggccuggcuggcggcccggcguuu

SEQ ID NO: 21018 - RNA, 17 nt, Artificial Sequence
  Synthetic oligonucleotide: PDCD1-7247
ccccuuacccugagcug

SEQ ID NO: 21019 - RNA, 20 nt, Artificial Sequence
  Synthetic oligonucleotide: PDCD1-7248
cugccccuuacccugagcug

SEQ ID NO: 21020 - RNA, 17 nt, Artificial Sequence
  Synthetic oligonucleotide: PDCD1-7249
cggcccggcguuuguga

SEQ ID NO: 21021 - RNA, 17 nt, Artificial Sequence
  Synthetic oligonucleotide: PDCD1-7250
ccccaugugggacuaac

SEQ ID NO: 21022 - RNA, 17 nt, Artificial Sequence
  Synthetic oligonucleotide: PDCD1-7251
ugagaugcgucaggcuc

SEQ ID NO: 21023 - RNA, 17 nt, Artificial Sequence
  Synthetic oligonucleotide: PDCD1-2082
uggaagcuuugaggggg

SEQ ID NO: 21024 - RNA, 17 nt, Artificial Sequence
  Synthetic oligonucleotide: PDCD1-3107
ccaggaucccuccuggg

SEQ ID NO: 21025 - RNA, 17 nt, Artificial Sequence
  Synthetic oligonucleotide: PDCD1-7252
ccggcguuugugaaaug

SEQ ID NO: 21026 - RNA, 17 nt, Artificial Sequence
  Synthetic oligonucleotide: PDCD1-2080
gcccgccugggucucug

SEQ ID NO: 21027 - RNA, 17 nt, Artificial Sequence
  Synthetic oligonucleotide: PDCD1-7253
gcuaaucggcucccccu

SEQ ID NO: 21028 - RNA, 17 nt, Artificial Sequence
  Synthetic oligonucleotide: PDCD1-7254
gaggccauccacaaggu

SEQ ID NO: 21029 - RNA, 20 nt, Artificial Sequence
  Synthetic oligonucleotide: PDCD1-7255
uggcggcccggcguuuguga

SEQ ID NO: 21030 - RNA, 20 nt, Artificial Sequence
  Synthetic oligonucleotide: PDCD1-7256
gagccccaugugggacuaac

SEQ ID NO: 21031 - RNA, 20 nt, Artificial Sequence
  Synthetic oligonucleotide: PDCD1-7257
ugaugagaugcgucaggcuc

SEQ ID NO: 21032 - RNA, 20 nt, Artificial Sequence
  Synthetic oligonucleotide: PDCD1-2079
agguggaagcuuugaggggg

SEQ ID NO: 21033 - RNA, 20 nt, Artificial Sequence
  Synthetic oligonucleotide: PDCD1-2986
ucuccaggaucccuccuggg

SEQ ID NO: 21034 - RNA, 20 nt, Artificial Sequence
  Synthetic oligonucleotide: PDCD1-7258
ggcccggcguuugugaaaug

SEQ ID NO: 21035 - RNA, 20 nt, Artificial Sequence
  Synthetic oligonucleotide: PDCD1-2077
ugugcccgccugggucucug

SEQ ID NO: 21036 - RNA, 20 nt, Artificial Sequence
  Synthetic oligonucleotide: PDCD1-7259
auggcuaaucggcucccccu

SEQ ID NO: 21037 - RNA, 20 nt, Artificial Sequence
  Synthetic oligonucleotide: PDCD1-7260
ugugaggccauccacaaggu

SEQ ID NO: 21038 - RNA, 17 nt, Artificial Sequence
  Synthetic oligonucleotide: Ptpn6-34
cccagucgcaagaacca

SEQ ID NO: 21039 - RNA, 17 nt, Artificial Sequence
  Synthetic oligonucleotide: Ptpn6-9
guccugcaggaccgcga

SEQ ID NO: 21040 - RNA, 17 nt, Artificial Sequence
  Synthetic oligonucleotide: Ptpn6-52
aguucuggauccgaaua

SEQ ID NO: 21041 - RNA, 17 nt, Artificial Sequence
  Synthetic oligonucleotide: Ptpn6-1086
gcccgggacuuacccac

SEQ ID NO: 21042 - RNA, 17 nt, Artificial Sequence
  Synthetic oligonucleotide: Ptpn6-8
gcccagucgcaagaacc

SEQ ID NO: 21043 - RNA, 17 nt, Artificial Sequence
  Synthetic oligonucleotide: Ptpn6-1087
ggaccccgauggugccc

SEQ ID NO: 21044 - RNA, 17 nt, Artificial Sequence
  Synthetic oligonucleotide: Ptpn6-1258
ucccguggguaaguccc

SEQ ID NO: 21045 - RNA, 17 nt, Artificial Sequence
  Synthetic oligonucleotide: Ptpn6-2371
ugcgagguaaggcagcc

SEQ ID NO: 21046 - RNA, 17 nt, Artificial Sequence
  Synthetic oligonucleotide: Ptpn6-55
ugcgacugggccgagcc

SEQ ID NO: 21047 - RNA, 17 nt, Artificial Sequence
  Synthetic oligonucleotide: Ptpn6-2372
cgacuggccucaccgcc

SEQ ID NO: 21048 - RNA, 17 nt, Artificial Sequence
  Synthetic oligonucleotide: Ptpn6-44
acgcacaagaaacgucc

SEQ ID NO: 21049 - RNA, 17 nt, Artificial Sequence
  Synthetic oligonucleotide: Ptpn6-32
uguccacgguagcuucc

SEQ ID NO: 21050 - RNA, 17 nt, Artificial Sequence
  Synthetic oligonucleotide: Ptpn6-12
gaucggagcaguucagc

SEQ ID NO: 21051 - RNA, 17 nt, Artificial Sequence
  Synthetic oligonucleotide: Ptpn6-88
gcacgaagucuccaggc

SEQ ID NO: 21052 - RNA, 17 nt, Artificial Sequence
  Synthetic oligonucleotide: Ptpn6-126
ccgagaccucagugggc

SEQ ID NO: 21053 - RNA, 17 nt, Artificial Sequence
  Synthetic oligonucleotide: Ptpn6-51
ugccgucgcgguccugc

SEQ ID NO: 21054 - RNA, 17 nt, Artificial Sequence
  Synthetic oligonucleotide: Ptpn6-1261
aagucccgggcaccauc

SEQ ID NO: 21055 - RNA, 17 nt, Artificial Sequence
  Synthetic oligonucleotide: Ptpn6-29
uuucaccgagaccucag

SEQ ID NO: 21056 - RNA, 17 nt, Artificial Sequence
  Synthetic oligonucleotide: Ptpn6-2373
ccgaucccacuagugag

SEQ ID NO: 21057 - RNA, 17 nt, Artificial Sequence
  Synthetic oligonucleotide: Ptpn6-13
ggaugauggugccgucg

SEQ ID NO: 21058 - RNA, 17 nt, Artificial Sequence
  Synthetic oligonucleotide: Ptpn6-2374
gcucuccgucagguagg

SEQ ID NO: 21059 - RNA, 17 nt, Artificial Sequence
  Synthetic oligonucleotide: Ptpn6-2375
aaugcccgggguugcgg

SEQ ID NO: 21060 - RNA, 17 nt, Artificial Sequence
  Synthetic oligonucleotide: Ptpn6-49
aguucagcggguacuug

SEQ ID NO: 21061 - RNA, 17 nt, Artificial Sequence
  Synthetic oligonucleotide: Ptpn6-14
guucuggauccgaauau

SEQ ID NO: 21062 - RNA, 17 nt, Artificial Sequence
  Synthetic oligonucleotide: Ptpn6-54
cccugguucuugcgacu

SEQ ID NO: 21063 - RNA, 17 nt, Artificial Sequence
  Synthetic oligonucleotide: Ptpn6-2376
ucucggugaaaccaccu

SEQ ID NO: 21064 - RNA, 17 nt, Artificial Sequence
  Synthetic oligonucleotide: Ptpn6-30
uucaccgagaccucagu

SEQ ID NO: 21065 - RNA, 20 nt, Artificial Sequence
  Synthetic oligonucleotide: Ptpn6-61
gaugcagagacccugcucaa

SEQ ID NO: 21066 - RNA, 20 nt, Artificial Sequence
  Synthetic oligonucleotide: Ptpn6-17
cggcccagucgcaagaacca

SEQ ID NO: 21067 - RNA, 20 nt, Artificial Sequence
  Synthetic oligonucleotide: Ptpn6-71
gcccgccagacauguggcca

SEQ ID NO: 21068 - RNA, 20 nt, Artificial Sequence
  Synthetic oligonucleotide: Ptpn6-20
ucacgcacaagaaacgucca

SEQ ID NO: 21069 - RNA, 20 nt, Artificial Sequence
  Synthetic oligonucleotide: Ptpn6-92
cucaagggccgaggugucca

SEQ ID NO: 21070 - RNA, 20 nt, Artificial Sequence
  Synthetic oligonucleotide: Ptpn6-75
gacaccucggcccuugagca

SEQ ID NO: 21071 - RNA, 20 nt, Artificial Sequence
  Synthetic oligonucleotide: Ptpn6-24
cggguacuugagguggauga

SEQ ID NO: 21072 - RNA, 20 nt, Artificial Sequence
  Synthetic oligonucleotide: Ptpn6-26
cugaguucuggauccgaaua

SEQ ID NO: 21073 - RNA, 20 nt, Artificial Sequence
  Synthetic oligonucleotide: Ptpn6-1025
ggugcccgggacuuacccac

SEQ ID NO: 21074 - RNA, 20 nt, Artificial Sequence
  Synthetic oligonucleotide: Ptpn6-6
gucacccugguucuugcgac

SEQ ID NO: 21075 - RNA, 20 nt, Artificial Sequence
  Synthetic oligonucleotide: Ptpn6-16
ucggcccagucgcaagaacc

SEQ ID NO: 21076 - RNA, 20 nt, Artificial Sequence
  Synthetic oligonucleotide: Ptpn6-2377
gaggucucggugaaaccacc

SEQ ID NO: 21077 - RNA, 20 nt, Artificial Sequence
  Synthetic oligonucleotide: Ptpn6-1197
cugggaccccgauggugccc

SEQ ID NO: 21078 - RNA, 20 nt, Artificial Sequence
  Synthetic oligonucleotide: Ptpn6-973
cugucccguggguaaguccc

SEQ ID NO: 21079 - RNA, 20 nt, Artificial Sequence
  Synthetic oligonucleotide: Ptpn6-2378
augugcgagguaaggcagcc

SEQ ID NO: 21080 - RNA, 20 nt, Artificial Sequence
  Synthetic oligonucleotide: Ptpn6-28
ucuugcgacugggccgagcc

SEQ ID NO: 21081 - RNA, 20 nt, Artificial Sequence
  Synthetic oligonucleotide: Ptpn6-1187
acugggaccccgauggugcc

SEQ ID NO: 21082 - RNA, 20 nt, Artificial Sequence
  Synthetic oligonucleotide: Ptpn6-19
cucacgcacaagaaacgucc

SEQ ID NO: 21083 - RNA, 20 nt, Artificial Sequence
  Synthetic oligonucleotide: Ptpn6-93
agguguccacgguagcuucc

SEQ ID NO: 21084 - RNA, 20 nt, Artificial Sequence
  Synthetic oligonucleotide: Ptpn6-64
ggaguacuacacucagcagc

SEQ ID NO: 21085 - RNA, 20 nt, Artificial Sequence
  Synthetic oligonucleotide: Ptpn6-3
guuugcgacucugacagagc

SEQ ID NO: 21086 - RNA, 20 nt, Artificial Sequence
  Synthetic oligonucleotide: Ptpn6-7
ggacaccucggcccuugagc

SEQ ID NO: 21087 - RNA, 20 nt, Artificial Sequence
  Synthetic oligonucleotide: Ptpn6-116
aaagcacgaagucuccaggc

SEQ ID NO: 21088 - RNA, 20 nt, Artificial Sequence
  Synthetic oligonucleotide: Ptpn6-91
ucaccgagaccucagugggc

SEQ ID NO: 21089 - RNA, 20 nt, Artificial Sequence
  Synthetic oligonucleotide: Ptpn6-25
uggugccgucgcgguccugc

SEQ ID NO: 21090 - RNA, 20 nt, Artificial Sequence
  Synthetic oligonucleotide: Ptpn6-95
cauauucggauccagaacuc

SEQ ID NO: 21091 - RNA, 20 nt, Artificial Sequence
  Synthetic oligonucleotide: Ptpn6-2379
gugacuucucgcucuccguc

SEQ ID NO: 21092 - RNA, 20 nt, Artificial Sequence
  Synthetic oligonucleotide: Ptpn6-121
cauagaaauccccugaguuc

SEQ ID NO: 21093 - RNA, 20 nt, Artificial Sequence
  Synthetic oligonucleotide: Ptpn6-15
ugguuucaccgagaccucag

SEQ ID NO: 21094 - RNA, 20 nt, Artificial Sequence
  Synthetic oligonucleotide: Ptpn6-2380
gcuccgaucccacuagugag

SEQ ID NO: 21095 - RNA, 20 nt, Artificial Sequence
  Synthetic oligonucleotide: Ptpn6-73
gccgagccaggaagcuaccg

SEQ ID NO: 21096 - RNA, 20 nt, Artificial Sequence
  Synthetic oligonucleotide: Ptpn6-1151
uacagagagaugcugucccg

SEQ ID NO: 21097 - RNA, 20 nt, Artificial Sequence
  Synthetic oligonucleotide: Ptpn6-2381
ccacaucaaggucaugugcg

SEQ ID NO: 21098 - RNA, 20 nt, Artificial Sequence
  Synthetic oligonucleotide: Ptpn6-72
gguggaugauggugccgucg

SEQ ID NO: 21099 - RNA, 20 nt, Artificial Sequence
  Synthetic oligonucleotide: Ptpn6-2382
cucgcucuccgucagguagg

SEQ ID NO: 21100 - RNA, 20 nt, Artificial Sequence
  Synthetic oligonucleotide: Ptpn6-2383
ucucggugaaaccaccuggg

SEQ ID NO: 21101 - RNA, 20 nt, Artificial Sequence
  Synthetic oligonucleotide: Ptpn6-2384
ccucgcacaugaccuugaug

SEQ ID NO: 21102 - RNA, 20 nt, Artificial Sequence
  Synthetic oligonucleotide: Ptpn6-119
agcaguucagcggguacuug

SEQ ID NO: 21103 - RNA, 20 nt, Artificial Sequence
  Synthetic oligonucleotide: Ptpn6-122
ugaguucuggauccgaauau

SEQ ID NO: 21104 - RNA, 20 nt, Artificial Sequence
  Synthetic oligonucleotide: Ptpn6-27
ucacccugguucuugcgacu

SEQ ID NO: 21105 - RNA, 20 nt, Artificial Sequence
  Synthetic oligonucleotide: Ptpn6-74
ggaagcuaccguggacaccu

SEQ ID NO: 21106 - RNA, 20 nt, Artificial Sequence
  Synthetic oligonucleotide: Ptpn6-2385
aggucucggugaaaccaccu

SEQ ID NO: 21107 - RNA, 20 nt, Artificial Sequence
  Synthetic oligonucleotide: Ptpn6-21
aaacguccagggcucgcccu

SEQ ID NO: 21108 - RNA, 20 nt, Artificial Sequence
  Synthetic oligonucleotide: Ptpn6-94
uccacgguagcuuccuggcu

SEQ ID NO: 21109 - RNA, 20 nt, Artificial Sequence
  Synthetic oligonucleotide: Ptpn6-2386
ucgcucuccgucagguaggu

SEQ ID NO: 21110 - RNA, 20 nt, Artificial Sequence
  Synthetic oligonucleotide: Ptpn6-416
cucgcacaugaccuugaugu

SEQ ID NO: 21111 - RNA, 20 nt, Artificial Sequence
  Synthetic oligonucleotide: Ptpn6-1190
acgggacagcaucucucugu

SEQ ID NO: 21112 - RNA, 20 nt, Artificial Sequence
  Synthetic oligonucleotide: Ptpn6-2
gggaucaggugacccauauu

SEQ ID NO: 21113 - RNA, 17 nt, Artificial Sequence
  Synthetic oligonucleotide: Ptpn6-133
acgcugcugcaggccaa

SEQ ID NO: 21114 - RNA, 17 nt, Artificial Sequence
  Synthetic oligonucleotide: Ptpn6-76
gcagagacccugcucaa

SEQ ID NO: 21115 - RNA, 17 nt, Artificial Sequence
  Synthetic oligonucleotide: Ptpn6-2387
agguaagagugguacca

SEQ ID NO: 21116 - RNA, 17 nt, Artificial Sequence
  Synthetic oligonucleotide: Ptpn6-1322
ugcccgggacuuaccca

SEQ ID NO: 21117 - RNA, 17 nt, Artificial Sequence
  Synthetic oligonucleotide: Ptpn6-84
gcucagugaccagccca

SEQ ID NO: 21118 - RNA, 17 nt, Artificial Sequence
  Synthetic oligonucleotide: Ptpn6-1377
uagggagggggaagcca

SEQ ID NO: 21119 - RNA, 17 nt, Artificial Sequence
  Synthetic oligonucleotide: Ptpn6-82
gacgcugcugcaggcca

SEQ ID NO: 21120 - RNA, 17 nt, Artificial Sequence
  Synthetic oligonucleotide: Ptpn6-48
cgccagacauguggcca

SEQ ID NO: 21121 - RNA, 17 nt, Artificial Sequence
  Synthetic oligonucleotide: Ptpn6-45
cgcacaagaaacgucca

SEQ ID NO: 21122 - RNA, 17 nt, Artificial Sequence
  Synthetic oligonucleotide: Ptpn6-128
aagggccgaggugucca

SEQ ID NO: 21123 - RNA, 17 nt, Artificial Sequence
  Synthetic oligonucleotide: Ptpn6-129
uacuacacucagcagca

SEQ ID NO: 21124 - RNA, 17 nt, Artificial Sequence
  Synthetic oligonucleotide: Ptpn6-58
accucggcccuugagca

SEQ ID NO: 21125 - RNA, 17 nt, Artificial Sequence
  Synthetic oligonucleotide: Ptpn6-2388
ccugggcggcccaggca

SEQ ID NO: 21126 - RNA, 17 nt, Artificial Sequence
  Synthetic oligonucleotide: Ptpn6-2389
ugaucccccacccugca

SEQ ID NO: 21127 - RNA, 17 nt, Artificial Sequence
  Synthetic oligonucleotide: Ptpn6-2390
ccgccuggugcccugca

SEQ ID NO: 21128 - RNA, 17 nt, Artificial Sequence
  Synthetic oligonucleotide: Ptpn6-2391
cagggucacccacauca

SEQ ID NO: 21129 - RNA, 17 nt, Artificial Sequence
  Synthetic oligonucleotide: Ptpn6-37
uucggauccagaacuca

SEQ ID NO: 21130 - RNA, 17 nt, Artificial Sequence
  Synthetic oligonucleotide: Ptpn6-137
cccaggcuccccgcuca

SEQ ID NO: 21131 - RNA, 17 nt, Artificial Sequence
  Synthetic oligonucleotide: Ptpn6-127
ugcagagacccugcuca

SEQ ID NO: 21132 - RNA, 17 nt, Artificial Sequence
  Synthetic oligonucleotide: Ptpn6-2392
uagagaaggcagcguca

SEQ ID NO: 21133 - RNA, 17 nt, Artificial Sequence
  Synthetic oligonucleotide: Ptpn6-2393
gaaggcagcgucaggga

SEQ ID NO: 21134 - RNA, 17 nt, Artificial Sequence
  Synthetic oligonucleotide: Ptpn6-1105
gcaucucucuguaggga

SEQ ID NO: 21135 - RNA, 17 nt, Artificial Sequence
  Synthetic oligonucleotide: Ptpn6-40
ucuaugaccuguaugga

SEQ ID NO: 21136 - RNA, 17 nt, Artificial Sequence
  Synthetic oligonucleotide: Ptpn6-89
guacuugagguggauga

SEQ ID NO: 21137 - RNA, 17 nt, Artificial Sequence
  Synthetic oligonucleotide: Ptpn6-2394
ggggcccaccuaccuga

SEQ ID NO: 21138 - RNA, 17 nt, Artificial Sequence
  Synthetic oligonucleotide: Ptpn6-2395
ccacuagugagagguga

SEQ ID NO: 21139 - RNA, 17 nt, Artificial Sequence
  Synthetic oligonucleotide: Ptpn6-2396
aggucaugugcgaggua

SEQ ID NO: 21140 - RNA, 17 nt, Artificial Sequence
  Synthetic oligonucleotide: Ptpn6-77
gauuucuaugaccugua

SEQ ID NO: 21141 - RNA, 17 nt, Artificial Sequence
  Synthetic oligonucleotide: Ptpn6-1113
gacagcaucucucugua

SEQ ID NO: 21142 - RNA, 17 nt, Artificial Sequence
  Synthetic oligonucleotide: Ptpn6-53
acccugguucuugcgac

SEQ ID NO: 21143 - RNA, 17 nt, Artificial Sequence
  Synthetic oligonucleotide: Ptpn6-142
acuucuccccuccauac

SEQ ID NO: 21144 - RNA, 17 nt, Artificial Sequence
  Synthetic oligonucleotide: Ptpn6-2397
gucucggugaaaccacc

SEQ ID NO: 21145 - RNA, 17 nt, Artificial Sequence
  Synthetic oligonucleotide: Ptpn6-2398
ccacccugcagggcacc

SEQ ID NO: 21146 - RNA, 17 nt, Artificial Sequence
  Synthetic oligonucleotide: Ptpn6-2399
ugggccccccgcaaccc

SEQ ID NO: 21147 - RNA, 17 nt, Artificial Sequence
  Synthetic oligonucleotide: Ptpn6-144
agagcgagaagucaccc

SEQ ID NO: 21148 - RNA, 17 nt, Artificial Sequence
  Synthetic oligonucleotide: Ptpn6-2400
gggccccccgcaacccc

SEQ ID NO: 21149 - RNA, 17 nt, Artificial Sequence
  Synthetic oligonucleotide: Ptpn6-134
aggccaagggcgagccc

SEQ ID NO: 21150 - RNA, 17 nt, Artificial Sequence
  Synthetic oligonucleotide: Ptpn6-2401
cccugccugggccgccc

SEQ ID NO: 21151 - RNA, 17 nt, Artificial Sequence
  Synthetic oligonucleotide: Ptpn6-2402
aaccaccugggcggccc

SEQ ID NO: 21152 - RNA, 17 nt, Artificial Sequence
  Synthetic oligonucleotide: Ptpn6-136
cagcccaaggcuggccc

SEQ ID NO: 21153 - RNA, 17 nt, Artificial Sequence
  Synthetic oligonucleotide: Ptpn6-83
gagagccucagccagcc

SEQ ID NO: 21154 - RNA, 17 nt, Artificial Sequence
  Synthetic oligonucleotide: Ptpn6-138
acccugagcggggagcc

SEQ ID NO: 21155 - RNA, 17 nt, Artificial Sequence
  Synthetic oligonucleotide: Ptpn6-2403
gaggcucccccgccgcc

SEQ ID NO: 21156 - RNA, 17 nt, Artificial Sequence
  Synthetic oligonucleotide: Ptpn6-2404
cuccucacugcccugcc

SEQ ID NO: 21157 - RNA, 17 nt, Artificial Sequence
  Synthetic oligonucleotide: Ptpn6-1088
gggaccccgauggugcc

SEQ ID NO: 21158 - RNA, 17 nt, Artificial Sequence
  Synthetic oligonucleotide: Ptpn6-10
gaaagcacgaagucucc

SEQ ID NO: 21159 - RNA, 17 nt, Artificial Sequence
  Synthetic oligonucleotide: Ptpn6-964
gucccguggguaagucc

SEQ ID NO: 21160 - RNA, 17 nt, Artificial Sequence
  Synthetic oligonucleotide: Ptpn6-79
guacuacacucagcagc

SEQ ID NO: 21161 - RNA, 17 nt, Artificial Sequence
  Synthetic oligonucleotide: Ptpn6-42
ugcgacucugacagagc

SEQ ID NO: 21162 - RNA, 17 nt, Artificial Sequence
  Synthetic oligonucleotide: Ptpn6-2405
ugugggugacccugagc

SEQ ID NO: 21163 - RNA, 17 nt, Artificial Sequence
  Synthetic oligonucleotide: Ptpn6-57
caccucggcccuugagc

SEQ ID NO: 21164 - RNA, 17 nt, Artificial Sequence
  Synthetic oligonucleotide: Ptpn6-135
agugaccagcccaaggc

SEQ ID NO: 21165 - RNA, 17 nt, Artificial Sequence
  Synthetic oligonucleotide: Ptpn6-2406
accugggcggcccaggc

SEQ ID NO: 21166 - RNA, 17 nt, Artificial Sequence
  Synthetic oligonucleotide: Ptpn6-2407
uaaggcagccaggcggc

SEQ ID NO: 21167 - RNA, 17 nt, Artificial Sequence
  Synthetic oligonucleotide: Ptpn6-43
ccacaugucuggcgggc

SEQ ID NO: 21168 - RNA, 17 nt, Artificial Sequence
  Synthetic oligonucleotide: Ptpn6-140
cugggccagccuugggc

SEQ ID NO: 21169 - RNA, 17 nt, Artificial Sequence
  Synthetic oligonucleotide: Ptpn6-132
auggccacaugucuggc

SEQ ID NO: 21170 - RNA, 17 nt, Artificial Sequence
  Synthetic oligonucleotide: Ptpn6-2408
cugaucccccacccugc

SEQ ID NO: 21171 - RNA, 17 nt, Artificial Sequence
  Synthetic oligonucleotide: Ptpn6-2409
accgccuggugcccugc

SEQ ID NO: 21172 - RNA, 17 nt, Artificial Sequence
  Synthetic oligonucleotide: Ptpn6-80
gcagcaggguguccugc

SEQ ID NO: 21173 - RNA, 17 nt, Artificial Sequence
  Synthetic oligonucleotide: Ptpn6-81
ggcagagacgcugcugc

SEQ ID NO: 21174 - RNA, 17 nt, Artificial Sequence
  Synthetic oligonucleotide: Ptpn6-2410
cugcagggugggggauc

SEQ ID NO: 21175 - RNA, 17 nt, Artificial Sequence
  Synthetic oligonucleotide: Ptpn6-36
auucggauccagaacuc

SEQ ID NO: 21176 - RNA, 17 nt, Artificial Sequence
  Synthetic oligonucleotide: Ptpn6-85
gcccaggcuccccgcuc

SEQ ID NO: 21177 - RNA, 17 nt, Artificial Sequence
  Synthetic oligonucleotide: Ptpn6-2411
acuucucgcucuccguc

SEQ ID NO: 21178 - RNA, 17 nt, Artificial Sequence
  Synthetic oligonucleotide: Ptpn6-2412
cuagagaaggcagcguc

SEQ ID NO: 21179 - RNA, 17 nt, Artificial Sequence
  Synthetic oligonucleotide: Ptpn6-130
uaccauggccacauguc

SEQ ID NO: 21180 - RNA, 17 nt, Artificial Sequence
  Synthetic oligonucleotide: Ptpn6-143
agaaauccccugaguuc

SEQ ID NO: 21181 - RNA, 17 nt, Artificial Sequence
  Synthetic oligonucleotide: Ptpn6-38
ucggauccagaacucag

SEQ ID NO: 21182 - RNA, 17 nt, Artificial Sequence
  Synthetic oligonucleotide: Ptpn6-11
ggaucggagcaguucag

SEQ ID NO: 21183 - RNA, 17 nt, Artificial Sequence
  Synthetic oligonucleotide: Ptpn6-2413
gucagggaagguaagag

SEQ ID NO: 21184 - RNA, 17 nt, Artificial Sequence
  Synthetic oligonucleotide: Ptpn6-1357
caucucucuguagggag

SEQ ID NO: 21185 - RNA, 17 nt, Artificial Sequence
  Synthetic oligonucleotide: Ptpn6-41
cuaugaccuguauggag

SEQ ID NO: 21186 - RNA, 17 nt, Artificial Sequence
  Synthetic oligonucleotide: Ptpn6-2414
augugggugacccugag

SEQ ID NO: 21187 - RNA, 17 nt, Artificial Sequence
  Synthetic oligonucleotide: Ptpn6-2415
cccucaccucucacuag

SEQ ID NO: 21188 - RNA, 17 nt, Artificial Sequence
  Synthetic oligonucleotide: Ptpn6-90
gagccaggaagcuaccg

SEQ ID NO: 21189 - RNA, 17 nt, Artificial Sequence
  Synthetic oligonucleotide: Ptpn6-1281
agagagaugcugucccg

SEQ ID NO: 21190 - RNA, 17 nt, Artificial Sequence
  Synthetic oligonucleotide: Ptpn6-31
acccugcucaagggccg

SEQ ID NO: 21191 - RNA, 17 nt, Artificial Sequence
  Synthetic oligonucleotide: Ptpn6-2416
gugggugacccugagcg

SEQ ID NO: 21192 - RNA, 17 nt, Artificial Sequence
  Synthetic oligonucleotide: Ptpn6-2417
aaggcagccaggcggcg

SEQ ID NO: 21193 - RNA, 17 nt, Artificial Sequence
  Synthetic oligonucleotide: Ptpn6-2418
caucaaggucaugugcg

SEQ ID NO: 21194 - RNA, 17 nt, Artificial Sequence
  Synthetic oligonucleotide: Ptpn6-1259
agucccgggcaccaucg

SEQ ID NO: 21195 - RNA, 17 nt, Artificial Sequence
  Synthetic oligonucleotide: Ptpn6-2419
cccugcagggcaccagg

SEQ ID NO: 21196 - RNA, 17 nt, Artificial Sequence
  Synthetic oligonucleotide: Ptpn6-2420
ugccugggccgcccagg

SEQ ID NO: 21197 - RNA, 17 nt, Artificial Sequence
  Synthetic oligonucleotide: Ptpn6-2421
gagguaaggcagccagg

SEQ ID NO: 21198 - RNA, 17 nt, Artificial Sequence
  Synthetic oligonucleotide: Ptpn6-1351
aucucucuguagggagg

SEQ ID NO: 21199 - RNA, 17 nt, Artificial Sequence
  Synthetic oligonucleotide: Ptpn6-2422
caggcagggcagugagg

SEQ ID NO: 21200 - RNA, 17 nt, Artificial Sequence
  Synthetic oligonucleotide: Ptpn6-50
ucagcggguacuugagg

SEQ ID NO: 21201 - RNA, 17 nt, Artificial Sequence
  Synthetic oligonucleotide: Ptpn6-2423
guaaggcagccaggcgg

SEQ ID NO: 21202 - RNA, 17 nt, Artificial Sequence
  Synthetic oligonucleotide: Ptpn6-2424
aggcagccaggcggcgg

SEQ ID NO: 21203 - RNA, 17 nt, Artificial Sequence
  Synthetic oligonucleotide: Ptpn6-2425
ccuggugcccugcaggg

SEQ ID NO: 21204 - RNA, 17 nt, Artificial Sequence
  Synthetic oligonucleotide: Ptpn6-1347
agcaucucucuguaggg

SEQ ID NO: 21205 - RNA, 17 nt, Artificial Sequence
  Synthetic oligonucleotide: Ptpn6-2426
augcccgggguugcggg

SEQ ID NO: 21206 - RNA, 17 nt, Artificial Sequence
  Synthetic oligonucleotide: Ptpn6-2427
cggugaaaccaccuggg

SEQ ID NO: 21207 - RNA, 17 nt, Artificial Sequence
  Synthetic oligonucleotide: Ptpn6-39
uucuaugaccuguaugg

SEQ ID NO: 21208 - RNA, 17 nt, Artificial Sequence
  Synthetic oligonucleotide: Ptpn6-78
gacucugacagagcugg

SEQ ID NO: 21209 - RNA, 17 nt, Artificial Sequence
  Synthetic oligonucleotide: Ptpn6-131
cauggccacaugucugg

SEQ ID NO: 21210 - RNA, 17 nt, Artificial Sequence
  Synthetic oligonucleotide: Ptpn6-2428
ggugcccugcagggugg

SEQ ID NO: 21211 - RNA, 17 nt, Artificial Sequence
  Synthetic oligonucleotide: Ptpn6-47
ccugcccgccagacaug

SEQ ID NO: 21212 - RNA, 17 nt, Artificial Sequence
  Synthetic oligonucleotide: Ptpn6-499
cgcacaugaccuugaug

SEQ ID NO: 21213 - RNA, 17 nt, Artificial Sequence
  Synthetic oligonucleotide: Ptpn6-145
cugcauccagcccacug

SEQ ID NO: 21214 - RNA, 17 nt, Artificial Sequence
  Synthetic oligonucleotide: Ptpn6-141
agucuccaggcuggcug

SEQ ID NO: 21215 - RNA, 17 nt, Artificial Sequence
  Synthetic oligonucleotide: Ptpn6-2429
gcccaggcagggcagug

SEQ ID NO: 21216 - RNA, 17 nt, Artificial Sequence
  Synthetic oligonucleotide: Ptpn6-2430
cccacuagugagaggug

SEQ ID NO: 21217 - RNA, 17 nt, Artificial Sequence
  Synthetic oligonucleotide: Ptpn6-2431
cagggcaccaggcggug

SEQ ID NO: 21218 - RNA, 17 nt, Artificial Sequence
  Synthetic oligonucleotide: Ptpn6-2432
uggugcccugcagggug

SEQ ID NO: 21219 - RNA, 17 nt, Artificial Sequence
  Synthetic oligonucleotide: Ptpn6-2433
ugggaauggcgggggug

SEQ ID NO: 21220 - RNA, 17 nt, Artificial Sequence
  Synthetic oligonucleotide: Ptpn6-1260
uaagucccgggcaccau

SEQ ID NO: 21221 - RNA, 17 nt, Artificial Sequence
  Synthetic oligonucleotide: Ptpn6-2434
ccucucacuagugggau

SEQ ID NO: 21222 - RNA, 17 nt, Artificial Sequence
  Synthetic oligonucleotide: Ptpn6-56
agcuaccguggacaccu

SEQ ID NO: 21223 - RNA, 17 nt, Artificial Sequence
  Synthetic oligonucleotide: Ptpn6-46
cguccagggcucgcccu

SEQ ID NO: 21224 - RNA, 17 nt, Artificial Sequence
  Synthetic oligonucleotide: Ptpn6-86
ggagccugggccagccu

SEQ ID NO: 21225 - RNA, 17 nt, Artificial Sequence
  Synthetic oligonucleotide: Ptpn6-139
cccugagcggggagccu

SEQ ID NO: 21226 - RNA, 17 nt, Artificial Sequence
  Synthetic oligonucleotide: Ptpn6-2435
uccucacugcccugccu

SEQ ID NO: 21227 - RNA, 17 nt, Artificial Sequence
  Synthetic oligonucleotide: Ptpn6-33
acgguagcuuccuggcu

SEQ ID NO: 21228 - RNA, 17 nt, Artificial Sequence
  Synthetic oligonucleotide: Ptpn6-146
ccagcccacugaggucu

SEQ ID NO: 21229 - RNA, 17 nt, Artificial Sequence
  Synthetic oligonucleotide: Ptpn6-2436
ccucaccucucacuagu

SEQ ID NO: 21230 - RNA, 17 nt, Artificial Sequence
  Synthetic oligonucleotide: Ptpn6-1065
gagagaugcugucccgu

SEQ ID NO: 21231 - RNA, 17 nt, Artificial Sequence
  Synthetic oligonucleotide: Ptpn6-2437
cucgcucuccgucaggu

SEQ ID NO: 21232 - RNA, 17 nt, Artificial Sequence
  Synthetic oligonucleotide: Ptpn6-2438
cucuccgucagguaggu

SEQ ID NO: 21233 - RNA, 17 nt, Artificial Sequence
  Synthetic oligonucleotide: Ptpn6-2439
cuggugcccugcagggu

SEQ ID NO: 21234 - RNA, 17 nt, Artificial Sequence
  Synthetic oligonucleotide: Ptpn6-500
gcacaugaccuugaugu

SEQ ID NO: 21235 - RNA, 17 nt, Artificial Sequence
  Synthetic oligonucleotide: Ptpn6-1112
ggacagcaucucucugu

SEQ ID NO: 21236 - RNA, 17 nt, Artificial Sequence
  Synthetic oligonucleotide: Ptpn6-35
aucaggugacccauauu

SEQ ID NO: 21237 - RNA, 17 nt, Artificial Sequence
  Synthetic oligonucleotide: Ptpn6-87
gagccugggccagccuu

SEQ ID NO: 21238 - RNA, 20 nt, Artificial Sequence
  Synthetic oligonucleotide: Ptpn6-67
gagacgcugcugcaggccaa

SEQ ID NO: 21239 - RNA, 20 nt, Artificial Sequence
  Synthetic oligonucleotide: Ptpn6-2440
ggaagguaagagugguacca

SEQ ID NO: 21240 - RNA, 20 nt, Artificial Sequence
  Synthetic oligonucleotide: Ptpn6-995
uggugcccgggacuuaccca

SEQ ID NO: 21241 - RNA, 20 nt, Artificial Sequence
  Synthetic oligonucleotide: Ptpn6-108
ugugcucagugaccagccca

SEQ ID NO: 21242 - RNA, 20 nt, Artificial Sequence
  Synthetic oligonucleotide: Ptpn6-1245
cuguagggagggggaagcca

SEQ ID NO: 21243 - RNA, 20 nt, Artificial Sequence
  Synthetic oligonucleotide: Ptpn6-105
agagacgcugcugcaggcca

SEQ ID NO: 21244 - RNA, 20 nt, Artificial Sequence
  Synthetic oligonucleotide: Ptpn6-4
gaguacuacacucagcagca

SEQ ID NO: 21245 - RNA, 20 nt, Artificial Sequence
  Synthetic oligonucleotide: Ptpn6-2441
ccaccugggcggcccaggca

SEQ ID NO: 21246 - RNA, 20 nt, Artificial Sequence
  Synthetic oligonucleotide: Ptpn6-2442
accugaucccccacccugca

SEQ ID NO: 21247 - RNA, 20 nt, Artificial Sequence
  Synthetic oligonucleotide: Ptpn6-2443
ucaccgccuggugcccugca

SEQ ID NO: 21248 - RNA, 20 nt, Artificial Sequence
  Synthetic oligonucleotide: Ptpn6-2444
gcucagggucacccacauca

SEQ ID NO: 21249 - RNA, 20 nt, Artificial Sequence
  Synthetic oligonucleotide: Ptpn6-96
auauucggauccagaacuca

SEQ ID NO: 21250 - RNA, 20 nt, Artificial Sequence
  Synthetic oligonucleotide: Ptpn6-111
uggcccaggcuccccgcuca

SEQ ID NO: 21251 - RNA, 20 nt, Artificial Sequence
  Synthetic oligonucleotide: Ptpn6-60
ggaugcagagacccugcuca

SEQ ID NO: 21252 - RNA, 20 nt, Artificial Sequence
  Synthetic oligonucleotide: Ptpn6-65
gguguccugcaggaccgcga

SEQ ID NO: 21253 - RNA, 20 nt, Artificial Sequence
  Synthetic oligonucleotide: Ptpn6-2445
agagaaggcagcgucaggga

SEQ ID NO: 21254 - RNA, 20 nt, Artificial Sequence
  Synthetic oligonucleotide: Ptpn6-1215
acagcaucucucuguaggga

SEQ ID NO: 21255 - RNA, 20 nt, Artificial Sequence
  Synthetic oligonucleotide: Ptpn6-98
auuucuaugaccuguaugga

SEQ ID NO: 21256 - RNA, 20 nt, Artificial Sequence
  Synthetic oligonucleotide: Ptpn6-2446
cggggggcccaccuaccuga

SEQ ID NO: 21257 - RNA, 20 nt, Artificial Sequence
  Synthetic oligonucleotide: Ptpn6-2447
aucccacuagugagagguga

SEQ ID NO: 21258 - RNA, 20 nt, Artificial Sequence
  Synthetic oligonucleotide: Ptpn6-2448
ucaaggucaugugcgaggua

SEQ ID NO: 21259 - RNA, 20 nt, Artificial Sequence
  Synthetic oligonucleotide: Ptpn6-59
ggggauuucuaugaccugua

SEQ ID NO: 21260 - RNA, 20 nt, Artificial Sequence
  Synthetic oligonucleotide: Ptpn6-987
cgggacagcaucucucugua

SEQ ID NO: 21261 - RNA, 20 nt, Artificial Sequence
  Synthetic oligonucleotide: Ptpn6-120
caaacuucuccccuccauac

SEQ ID NO: 21262 - RNA, 20 nt, Artificial Sequence
  Synthetic oligonucleotide: Ptpn6-2449
cccccacccugcagggcacc

SEQ ID NO: 21263 - RNA, 20 nt, Artificial Sequence
  Synthetic oligonucleotide: Ptpn6-2450
aggugggccccccgcaaccc

SEQ ID NO: 21264 - RNA, 20 nt, Artificial Sequence
  Synthetic oligonucleotide: Ptpn6-123
cggagagcgagaagucaccc

SEQ ID NO: 21265 - RNA, 20 nt, Artificial Sequence
  Synthetic oligonucleotide: Ptpn6-2451
ggugggccccccgcaacccc

SEQ ID NO: 21266 - RNA, 20 nt, Artificial Sequence
  Synthetic oligonucleotide: Ptpn6-106
ugcaggccaagggcgagccc

SEQ ID NO: 21267 - RNA, 20 nt, Artificial Sequence
  Synthetic oligonucleotide: Ptpn6-2452
cugcccugccugggccgccc

SEQ ID NO: 21268 - RNA, 20 nt, Artificial Sequence
  Synthetic oligonucleotide: Ptpn6-2453
ugaaaccaccugggcggccc

SEQ ID NO: 21269 - RNA, 20 nt, Artificial Sequence
  Synthetic oligonucleotide: Ptpn6-68
gaccagcccaaggcuggccc

SEQ ID NO: 21270 - RNA, 20 nt, Artificial Sequence
  Synthetic oligonucleotide: Ptpn6-107
cgugagagccucagccagcc

SEQ ID NO: 21271 - RNA, 20 nt, Artificial Sequence
  Synthetic oligonucleotide: Ptpn6-69
gugacccugagcggggagcc

SEQ ID NO: 21272 - RNA, 20 nt, Artificial Sequence
  Synthetic oligonucleotide: Ptpn6-115
acagaaagcacgaagucucc

SEQ ID NO: 21273 - RNA, 20 nt, Artificial Sequence
  Synthetic oligonucleotide: Ptpn6-1007
gcugucccguggguaagucc

SEQ ID NO: 21274 - RNA, 20 nt, Artificial Sequence
  Synthetic oligonucleotide: Ptpn6-22
ugggaucggagcaguucagc

SEQ ID NO: 21275 - RNA, 20 nt, Artificial Sequence
  Synthetic oligonucleotide: Ptpn6-2454
ugaugugggugacccugagc

SEQ ID NO: 21276 - RNA, 20 nt, Artificial Sequence
  Synthetic oligonucleotide: Ptpn6-109
cucagugaccagcccaaggc

SEQ ID NO: 21277 - RNA, 20 nt, Artificial Sequence
  Synthetic oligonucleotide: Ptpn6-2455
accaccugggcggcccaggc

SEQ ID NO: 21278 - RNA, 20 nt, Artificial Sequence
  Synthetic oligonucleotide: Ptpn6-2456
agguaaggcagccaggcggc

SEQ ID NO: 21279 - RNA, 20 nt, Artificial Sequence
  Synthetic oligonucleotide: Ptpn6-104
uggccacaugucuggcgggc

SEQ ID NO: 21280 - RNA, 20 nt, Artificial Sequence
  Synthetic oligonucleotide: Ptpn6-114
agccugggccagccuugggc

SEQ ID NO: 21281 - RNA, 20 nt, Artificial Sequence
  Synthetic oligonucleotide: Ptpn6-103
accauggccacaugucuggc

SEQ ID NO: 21282 - RNA, 20 nt, Artificial Sequence
  Synthetic oligonucleotide: Ptpn6-2457
caccugaucccccacccugc

SEQ ID NO: 21283 - RNA, 20 nt, Artificial Sequence
  Synthetic oligonucleotide: Ptpn6-2458
cucaccgccuggugcccugc

SEQ ID NO: 21284 - RNA, 20 nt, Artificial Sequence
  Synthetic oligonucleotide: Ptpn6-101
ucagcagcaggguguccugc

SEQ ID NO: 21285 - RNA, 20 nt, Artificial Sequence
  Synthetic oligonucleotide: Ptpn6-66
gcaggcagagacgcugcugc

SEQ ID NO: 21286 - RNA, 20 nt, Artificial Sequence
  Synthetic oligonucleotide: Ptpn6-955
gguaagucccgggcaccauc

SEQ ID NO: 21287 - RNA, 20 nt, Artificial Sequence
  Synthetic oligonucleotide: Ptpn6-2459
gcccugcagggugggggauc

SEQ ID NO: 21288 - RNA, 20 nt, Artificial Sequence
  Synthetic oligonucleotide: Ptpn6-110
cuggcccaggcuccccgcuc

SEQ ID NO: 21289 - RNA, 20 nt, Artificial Sequence
  Synthetic oligonucleotide: Ptpn6-102
ugguaccauggccacauguc

SEQ ID NO: 21290 - RNA, 20 nt, Artificial Sequence
  Synthetic oligonucleotide: Ptpn6-97
uauucggauccagaacucag

SEQ ID NO: 21291 - RNA, 20 nt, Artificial Sequence
  Synthetic oligonucleotide: Ptpn6-5
gugggaucggagcaguucag

SEQ ID NO: 21292 - RNA, 20 nt, Artificial Sequence
  Synthetic oligonucleotide: Ptpn6-2460
agcgucagggaagguaagag

SEQ ID NO: 21293 - RNA, 20 nt, Artificial Sequence
  Synthetic oligonucleotide: Ptpn6-1228
cagcaucucucuguagggag

SEQ ID NO: 21294 - RNA, 20 nt, Artificial Sequence
  Synthetic oligonucleotide: Ptpn6-99
uuucuaugaccuguauggag

SEQ ID NO: 21295 - RNA, 20 nt, Artificial Sequence
  Synthetic oligonucleotide: Ptpn6-2461
uugaugugggugacccugag

SEQ ID NO: 21296 - RNA, 20 nt, Artificial Sequence
  Synthetic oligonucleotide: Ptpn6-2462
gagcccucaccucucacuag

SEQ ID NO: 21297 - RNA, 20 nt, Artificial Sequence
  Synthetic oligonucleotide: Ptpn6-62
gagacccugcucaagggccg

SEQ ID NO: 21298 - RNA, 20 nt, Artificial Sequence
  Synthetic oligonucleotide: Ptpn6-2463
gaugugggugacccugagcg

SEQ ID NO: 21299 - RNA, 20 nt, Artificial Sequence
  Synthetic oligonucleotide: Ptpn6-2464
gguaaggcagccaggcggcg

SEQ ID NO: 21300 - RNA, 20 nt, Artificial Sequence
  Synthetic oligonucleotide: Ptpn6-1005
guaagucccgggcaccaucg

SEQ ID NO: 21301 - RNA, 20 nt, Artificial Sequence
  Synthetic oligonucleotide: Ptpn6-2465
ccacccugcagggcaccagg

SEQ ID NO: 21302 - RNA, 20 nt, Artificial Sequence
  Synthetic oligonucleotide: Ptpn6-2466
cccugccugggccgcccagg

SEQ ID NO: 21303 - RNA, 20 nt, Artificial Sequence
  Synthetic oligonucleotide: Ptpn6-2467
ugcgagguaaggcagccagg

SEQ ID NO: 21304 - RNA, 20 nt, Artificial Sequence
  Synthetic oligonucleotide: Ptpn6-1222
agcaucucucuguagggagg

SEQ ID NO: 21305 - RNA, 20 nt, Artificial Sequence
  Synthetic oligonucleotide: Ptpn6-2468
gcccaggcagggcagugagg

SEQ ID NO: 21306 - RNA, 20 nt, Artificial Sequence
  Synthetic oligonucleotide: Ptpn6-23
aguucagcggguacuugagg

SEQ ID NO: 21307 - RNA, 20 nt, Artificial Sequence
  Synthetic oligonucleotide: Ptpn6-2469
gagguaaggcagccaggcgg

SEQ ID NO: 21308 - RNA, 20 nt, Artificial Sequence
  Synthetic oligonucleotide: Ptpn6-2470
guaaggcagccaggcggcgg

SEQ ID NO: 21309 - RNA, 20 nt, Artificial Sequence
  Synthetic oligonucleotide: Ptpn6-2471
ccgccuggugcccugcaggg

SEQ ID NO: 21310 - RNA, 20 nt, Artificial Sequence
  Synthetic oligonucleotide: Ptpn6-1043
gacagcaucucucuguaggg

SEQ ID NO: 21311 - RNA, 20 nt, Artificial Sequence
  Synthetic oligonucleotide: Ptpn6-63
gauuucuaugaccuguaugg

SEQ ID NO: 21312 - RNA, 20 nt, Artificial Sequence
  Synthetic oligonucleotide: Ptpn6-100
ugcgacucugacagagcugg

SEQ ID NO: 21313 - RNA, 20 nt, Artificial Sequence
  Synthetic oligonucleotide: Ptpn6-18
uaccauggccacaugucugg

SEQ ID NO: 21314 - RNA, 20 nt, Artificial Sequence
  Synthetic oligonucleotide: Ptpn6-2472
ccuggugcccugcagggugg

SEQ ID NO: 21315 - RNA, 20 nt, Artificial Sequence
  Synthetic oligonucleotide: Ptpn6-118
cugccugcccgccagacaug

SEQ ID NO: 21316 - RNA, 20 nt, Artificial Sequence
  Synthetic oligonucleotide: Ptpn6-124
ucucugcauccagcccacug

SEQ ID NO: 21317 - RNA, 20 nt, Artificial Sequence
  Synthetic oligonucleotide: Ptpn6-117
cgaagucuccaggcuggcug

SEQ ID NO: 21318 - RNA, 20 nt, Artificial Sequence
  Synthetic oligonucleotide: Ptpn6-2473
gcggcccaggcagggcagug

SEQ ID NO: 21319 - RNA, 20 nt, Artificial Sequence
  Synthetic oligonucleotide: Ptpn6-2474
gaucccacuagugagaggug

SEQ ID NO: 21320 - RNA, 20 nt, Artificial Sequence
  Synthetic oligonucleotide: Ptpn6-2475
cugcagggcaccaggcggug

SEQ ID NO: 21321 - RNA, 20 nt, Artificial Sequence
  Synthetic oligonucleotide: Ptpn6-2476
gccuggugcccugcagggug

SEQ ID NO: 21322 - RNA, 20 nt, Artificial Sequence
  Synthetic oligonucleotide: Ptpn6-954
ggguaagucccgggcaccau

SEQ ID NO: 21323 - RNA, 20 nt, Artificial Sequence
  Synthetic oligonucleotide: Ptpn6-2477
ucaccucucacuagugggau

SEQ ID NO: 21324 - RNA, 20 nt, Artificial Sequence
  Synthetic oligonucleotide: Ptpn6-113
cggggagccugggccagccu

SEQ ID NO: 21325 - RNA, 20 nt, Artificial Sequence
  Synthetic oligonucleotide: Ptpn6-112
ugacccugagcggggagccu

SEQ ID NO: 21326 - RNA, 20 nt, Artificial Sequence
  Synthetic oligonucleotide: Ptpn6-125
cauccagcccacugaggucu

SEQ ID NO: 21327 - RNA, 20 nt, Artificial Sequence
  Synthetic oligonucleotide: Ptpn6-1
gguuucaccgagaccucagu

SEQ ID NO: 21328 - RNA, 20 nt, Artificial Sequence
  Synthetic oligonucleotide: Ptpn6-2478
agcccucaccucucacuagu

SEQ ID NO: 21329 - RNA, 20 nt, Artificial Sequence
  Synthetic oligonucleotide: Ptpn6-971
acagagagaugcugucccgu

SEQ ID NO: 21330 - RNA, 20 nt, Artificial Sequence
  Synthetic oligonucleotide: Ptpn6-2479
cuucucgcucuccgucaggu

SEQ ID NO: 21331 - RNA, 20 nt, Artificial Sequence
  Synthetic oligonucleotide: Ptpn6-2480
cgccuggugcccugcagggu

SEQ ID NO: 21332 - RNA, 20 nt, Artificial Sequence
  Synthetic oligonucleotide: Ptpn6-70
ggggagccugggccagccuu

SEQ ID NO: 21333 - RNA, 17 nt, Artificial Sequence
  Synthetic oligonucleotide: Ptpn6-268
cagcggccagagaacaa

SEQ ID NO: 21334 - RNA, 17 nt, Artificial Sequence
  Synthetic oligonucleotide: Ptpn6-494
cugccgcagguagacaa

SEQ ID NO: 21335 - RNA, 17 nt, Artificial Sequence
  Synthetic oligonucleotide: Ptpn6-2481
gagaacaucuccaccaa

SEQ ID NO: 21336 - RNA, 17 nt, Artificial Sequence
  Synthetic oligonucleotide: Ptpn6-337
gacaaggagaagagcaa

SEQ ID NO: 21337 - RNA, 17 nt, Artificial Sequence
  Synthetic oligonucleotide: Ptpn6-2482
gaaggugguucgcagaa

SEQ ID NO: 21338 - RNA, 17 nt, Artificial Sequence
  Synthetic oligonucleotide: Ptpn6-286
acccgagagguggagaa

SEQ ID NO: 21339 - RNA, 17 nt, Artificial Sequence
  Synthetic oligonucleotide: Ptpn6-265
ugcaccagcgucuggaa

SEQ ID NO: 21340 - RNA, 17 nt, Artificial Sequence
  Synthetic oligonucleotide: Ptpn6-267
gcagcggccagagaaca

SEQ ID NO: 21341 - RNA, 17 nt, Artificial Sequence
  Synthetic oligonucleotide: Ptpn6-2483
gggcaaguacagacaca

SEQ ID NO: 21342 - RNA, 17 nt, Artificial Sequence
  Synthetic oligonucleotide: Ptpn6-2484
cagccugggugcucaca

SEQ ID NO: 21343 - RNA, 17 nt, Artificial Sequence
  Synthetic oligonucleotide: Ptpn6-335
gcagcggucagcagaca

SEQ ID NO: 21344 - RNA, 17 nt, Artificial Sequence
  Synthetic oligonucleotide: Ptpn6-471
uggucaugacgaugaca

SEQ ID NO: 21345 - RNA, 17 nt, Artificial Sequence
  Synthetic oligonucleotide: Ptpn6-315
ggagaacaucuccacca

SEQ ID NO: 21346 - RNA, 17 nt, Artificial Sequence
  Synthetic oligonucleotide: Ptpn6-301
cugagcuggcccgacca

SEQ ID NO: 21347 - RNA, 17 nt, Artificial Sequence
  Synthetic oligonucleotide: Ptpn6-452
gcucacuggggacccca

SEQ ID NO: 21348 - RNA, 17 nt, Artificial Sequence
  Synthetic oligonucleotide: Ptpn6-2485
uaauuuggcucccccca

SEQ ID NO: 21349 - RNA, 17 nt, Artificial Sequence
  Synthetic oligonucleotide: Ptpn6-258
guccgaggauacagcca

SEQ ID NO: 21350 - RNA, 17 nt, Artificial Sequence
  Synthetic oligonucleotide: Ptpn6-276
accuacaucgccagcca

SEQ ID NO: 21351 - RNA, 17 nt, Artificial Sequence
  Synthetic oligonucleotide: Ptpn6-279
ggguugucuggaggcca

SEQ ID NO: 21352 - RNA, 17 nt, Artificial Sequence
  Synthetic oligonucleotide: Ptpn6-2486
cuguccucagguggcca

SEQ ID NO: 21353 - RNA, 17 nt, Artificial Sequence
  Synthetic oligonucleotide: Ptpn6-330
gaagaaugcccaugcca

SEQ ID NO: 21354 - RNA, 17 nt, Artificial Sequence
  Synthetic oligonucleotide: Ptpn6-336
agacaaggagaagagca

SEQ ID NO: 21355 - RNA, 17 nt, Artificial Sequence
  Synthetic oligonucleotide: Ptpn6-2487
caggugcgugcagagca

SEQ ID NO: 21356 - RNA, 17 nt, Artificial Sequence
  Synthetic oligonucleotide: Ptpn6-312
aaagucugccucacgca

SEQ ID NO: 21357 - RNA, 17 nt, Artificial Sequence
  Synthetic oligonucleotide: Ptpn6-2488
caugguggggaccggca

SEQ ID NO: 21358 - RNA, 17 nt, Artificial Sequence
  Synthetic oligonucleotide: Ptpn6-321
ggcgcagcgcucgggca

SEQ ID NO: 21359 - RNA, 17 nt, Artificial Sequence
  Synthetic oligonucleotide: Ptpn6-421
ugcgggaggccuuggca

SEQ ID NO: 21360 - RNA, 17 nt, Artificial Sequence
  Synthetic oligonucleotide: Ptpn6-270
agccgagugauccugca

SEQ ID NO: 21361 - RNA, 17 nt, Artificial Sequence
  Synthetic oligonucleotide: Ptpn6-2489
gaggaguuugaggugca

SEQ ID NO: 21362 - RNA, 17 nt, Artificial Sequence
  Synthetic oligonucleotide: Ptpn6-2490
caaugccaacuacauca

SEQ ID NO: 21363 - RNA, 17 nt, Artificial Sequence
  Synthetic oligonucleotide: Ptpn6-477
ucuuagcguucucauca

SEQ ID NO: 21364 - RNA, 17 nt, Artificial Sequence
  Synthetic oligonucleotide: Ptpn6-244
gaccuucgacagccuca

SEQ ID NO: 21365 - RNA, 17 nt, Artificial Sequence
  Synthetic oligonucleotide: Ptpn6-314
ugucaucgacaugcuca

SEQ ID NO: 21366 - RNA, 17 nt, Artificial Sequence
  Synthetic oligonucleotide: Ptpn6-2491
ccgggcaguggcaguca

SEQ ID NO: 21367 - RNA, 17 nt, Artificial Sequence
  Synthetic oligonucleotide: Ptpn6-2492
cuaccugcggcagguca

SEQ ID NO: 21368 - RNA, 17 nt, Artificial Sequence
  Synthetic oligonucleotide: Ptpn6-423
ggcaugggcauucuuca

SEQ ID NO: 21369 - RNA, 17 nt, Artificial Sequence
  Synthetic oligonucleotide: Ptpn6-332
gcacacuaagaacaaga

SEQ ID NO: 21370 - RNA, 17 nt, Artificial Sequence
  Synthetic oligonucleotide: Ptpn6-247
ggagcauuucaagaaga

SEQ ID NO: 21371 - RNA, 17 nt, Artificial Sequence
  Synthetic oligonucleotide: Ptpn6-316
ccagaagaccauccaga

SEQ ID NO: 21372 - RNA, 17 nt, Artificial Sequence
  Synthetic oligonucleotide: Ptpn6-2493
ggaaggugguucgcaga

SEQ ID NO: 21373 - RNA, 17 nt, Artificial Sequence
  Synthetic oligonucleotide: Ptpn6-281
caaugacuucuggcaga

SEQ ID NO: 21374 - RNA, 17 nt, Artificial Sequence
  Synthetic oligonucleotide: Ptpn6-322
cucgggcauggugcaga

SEQ ID NO: 21375 - RNA, 17 nt, Artificial Sequence
  Synthetic oligonucleotide: Ptpn6-2494
gcggagaggaggcgaga

SEQ ID NO: 21376 - RNA, 17 nt, Artificial Sequence
  Synthetic oligonucleotide: Ptpn6-2495
accguacuaugccacga

SEQ ID NO: 21377 - RNA, 17 nt, Artificial Sequence
  Synthetic oligonucleotide: Ptpn6-433
uucaaugaacugggcga

SEQ ID NO: 21378 - RNA, 17 nt, Artificial Sequence
  Synthetic oligonucleotide: Ptpn6-498
guccgugaggcugucga

SEQ ID NO: 21379 - RNA, 17 nt, Artificial Sequence
  Synthetic oligonucleotide: Ptpn6-271
gagugauccugcaggga

SEQ ID NO: 21380 - RNA, 17 nt, Artificial Sequence
  Synthetic oligonucleotide: Ptpn6-2496
gcagagggacaguggga

SEQ ID NO: 21381 - RNA, 17 nt, Artificial Sequence
  Synthetic oligonucleotide: Ptpn6-435
cgcccgcaccaucugga

SEQ ID NO: 21382 - RNA, 17 nt, Artificial Sequence
  Synthetic oligonucleotide: Ptpn6-264
uugcaccagcgucugga

SEQ ID NO: 21383 - RNA, 17 nt, Artificial Sequence
  Synthetic oligonucleotide: Ptpn6-438
caugucgaugacaauga

SEQ ID NO: 21384 - RNA, 17 nt, Artificial Sequence
  Synthetic oligonucleotide: Ptpn6-2497
ccugcagugcacgauga

SEQ ID NO: 21385 - RNA, 17 nt, Artificial Sequence
  Synthetic oligonucleotide: Ptpn6-2498
gaggaugauaauccuga

SEQ ID NO: 21386 - RNA, 17 nt, Artificial Sequence
  Synthetic oligonucleotide: Ptpn6-2499
augccggcggccucuga

SEQ ID NO: 21387 - RNA, 17 nt, Artificial Sequence
  Synthetic oligonucleotide: Ptpn6-2500
aucuccaccaaggguga

SEQ ID NO: 21388 - RNA, 17 nt, Artificial Sequence
  Synthetic oligonucleotide: Ptpn6-2501
cgcucacuuccucuuga

SEQ ID NO: 21389 - RNA, 17 nt, Artificial Sequence
  Synthetic oligonucleotide: Ptpn6-466
cccaccucgggccagua

SEQ ID NO: 21390 - RNA, 17 nt, Artificial Sequence
  Synthetic oligonucleotide: Ptpn6-463
caguuggucacagagua

SEQ ID NO: 21391 - RNA, 17 nt, Artificial Sequence
  Synthetic oligonucleotide: Ptpn6-328
ggccaggagucggagua

SEQ ID NO: 21392 - RNA, 17 nt, Artificial Sequence
  Synthetic oligonucleotide: Ptpn6-493
acccucguggcauagua

SEQ ID NO: 21393 - RNA, 17 nt, Artificial Sequence
  Synthetic oligonucleotide: Ptpn6-459
gggagaccuguaaggua

SEQ ID NO: 21394 - RNA, 17 nt, Artificial Sequence
  Synthetic oligonucleotide: Ptpn6-2502
uggagaaaggccgggua

SEQ ID NO: 21395 - RNA, 17 nt, Artificial Sequence
  Synthetic oligonucleotide: Ptpn6-458
cagcggggagaccugua

SEQ ID NO: 21396 - RNA, 17 nt, Artificial Sequence
  Synthetic oligonucleotide: Ptpn6-292
ggcaugcagcgugcuua

SEQ ID NO: 21397 - RNA, 17 nt, Artificial Sequence
  Synthetic oligonucleotide: Ptpn6-431
uagugguuucaaugaac

SEQ ID NO: 21398 - RNA, 17 nt, Artificial Sequence
  Synthetic oligonucleotide: Ptpn6-313
gccggcaucggccgcac

SEQ ID NO: 21399 - RNA, 17 nt, Artificial Sequence
  Synthetic oligonucleotide: Ptpn6-449
gacacccccaggcucac

SEQ ID NO: 21400 - RNA, 17 nt, Artificial Sequence
  Synthetic oligonucleotide: Ptpn6-2503
gcagccugggugcucac

SEQ ID NO: 21401 - RNA, 17 nt, Artificial Sequence
  Synthetic oligonucleotide: Ptpn6-248
gagcauuucaagaagac

SEQ ID NO: 21402 - RNA, 17 nt, Artificial Sequence
  Synthetic oligonucleotide: Ptpn6-272
agugauccugcagggac

SEQ ID NO: 21403 - RNA, 17 nt, Artificial Sequence
  Synthetic oligonucleotide: Ptpn6-2504
aggugcaugguggggac

SEQ ID NO: 21404 - RNA, 17 nt, Artificial Sequence
  Synthetic oligonucleotide: Ptpn6-288
acaaaugcgucccauac

SEQ ID NO: 21405 - RNA, 17 nt, Artificial Sequence
  Synthetic oligonucleotide: Ptpn6-329
gccaggagucggaguac

SEQ ID NO: 21406 - RNA, 17 nt, Artificial Sequence
  Synthetic oligonucleotide: Ptpn6-456
cgggccagcucagguac

SEQ ID NO: 21407 - RNA, 17 nt, Artificial Sequence
  Synthetic oligonucleotide: Ptpn6-297
caaacuccguaccuuac

SEQ ID NO: 21408 - RNA, 17 nt, Artificial Sequence
  Synthetic oligonucleotide: Ptpn6-496
ucuugaaaugcuccacc

SEQ ID NO: 21409 - RNA, 17 nt, Artificial Sequence
  Synthetic oligonucleotide: Ptpn6-2505
caagggugaggggcacc

SEQ ID NO: 21410 - RNA, 17 nt, Artificial Sequence
  Synthetic oligonucleotide: Ptpn6-2506
acuugccccccugcacc

SEQ ID NO: 21411 - RNA, 17 nt, Artificial Sequence
  Synthetic oligonucleotide: Ptpn6-245
cgacagccucacggacc

SEQ ID NO: 21412 - RNA, 17 nt, Artificial Sequence
  Synthetic oligonucleotide: Ptpn6-480
auugauguagucggacc

SEQ ID NO: 21413 - RNA, 17 nt, Artificial Sequence
  Synthetic oligonucleotide: Ptpn6-2507
agggggggcgcccuacc

SEQ ID NO: 21414 - RNA, 17 nt, Artificial Sequence
  Synthetic oligonucleotide: Ptpn6-473
uggccuccagacaaccc

SEQ ID NO: 21415 - RNA, 17 nt, Artificial Sequence
  Synthetic oligonucleotide: Ptpn6-2508
cuguguagcguccaccc

SEQ ID NO: 21416 - RNA, 17 nt, Artificial Sequence
  Synthetic oligonucleotide: Ptpn6-2509
cuccccugugagcaccc

SEQ ID NO: 21417 - RNA, 17 nt, Artificial Sequence
  Synthetic oligonucleotide: Ptpn6-481
uugauguagucggaccc

SEQ ID NO: 21418 - RNA, 17 nt, Artificial Sequence
  Synthetic oligonucleotide: Ptpn6-2510
cccacccccaaaccccc

SEQ ID NO: 21419 - RNA, 17 nt, Artificial Sequence
  Synthetic oligonucleotide: Ptpn6-448
aagcugaggacaccccc

SEQ ID NO: 21420 - RNA, 17 nt, Artificial Sequence
  Synthetic oligonucleotide: Ptpn6-2511
cuaauuuggcucccccc

SEQ ID NO: 21421 - RNA, 17 nt, Artificial Sequence
  Synthetic oligonucleotide: Ptpn6-2512
cauagggucagugcccc

SEQ ID NO: 21422 - RNA, 17 nt, Artificial Sequence
  Synthetic oligonucleotide: Ptpn6-274
gggacaguaacaucccc

SEQ ID NO: 21423 - RNA, 17 nt, Artificial Sequence
  Synthetic oligonucleotide: Ptpn6-273
cgggacaguaacauccc

SEQ ID NO: 21424 - RNA, 17 nt, Artificial Sequence
  Synthetic oligonucleotide: Ptpn6-275
gaccuacaucgccagcc

SEQ ID NO: 21425 - RNA, 17 nt, Artificial Sequence
  Synthetic oligonucleotide: Ptpn6-2513
gggugaauggggcagcc

SEQ ID NO: 21426 - RNA, 17 nt, Artificial Sequence
  Synthetic oligonucleotide: Ptpn6-304
gggguccccagugagcc

SEQ ID NO: 21427 - RNA, 17 nt, Artificial Sequence
  Synthetic oligonucleotide: Ptpn6-2514
caaaccucagguccgcc

SEQ ID NO: 21428 - RNA, 17 nt, Artificial Sequence
  Synthetic oligonucleotide: Ptpn6-2515
agagguggagaaaggcc

SEQ ID NO: 21429 - RNA, 17 nt, Artificial Sequence
  Synthetic oligonucleotide: Ptpn6-2516
ugguucgcagaagggcc

SEQ ID NO: 21430 - RNA, 17 nt, Artificial Sequence
  Synthetic oligonucleotide: Ptpn6-2517
gcgugcagagcagggcc

SEQ ID NO: 21431 - RNA, 17 nt, Artificial Sequence
  Synthetic oligonucleotide: Ptpn6-2518
cccugacugccacugcc

SEQ ID NO: 21432 - RNA, 17 nt, Artificial Sequence
  Synthetic oligonucleotide: Ptpn6-429
ucccguacuccgacucc

SEQ ID NO: 21433 - RNA, 17 nt, Artificial Sequence
  Synthetic oligonucleotide: Ptpn6-2519
ucccgaaucaggucucc

SEQ ID NO: 21434 - RNA, 17 nt, Artificial Sequence
  Synthetic oligonucleotide: Ptpn6-437
ugucaaugucacagucc

SEQ ID NO: 21435 - RNA, 17 nt, Artificial Sequence
  Synthetic oligonucleotide: Ptpn6-446
gcugguugaucuggucc

SEQ ID NO: 21436 - RNA, 17 nt, Artificial Sequence
  Synthetic oligonucleotide: Ptpn6-308
ggguguccucagcuucc

SEQ ID NO: 21437 - RNA, 17 nt, Artificial Sequence
  Synthetic oligonucleotide: Ptpn6-256
ggaacugaacaagaagc

SEQ ID NO: 21438 - RNA, 17 nt, Artificial Sequence
  Synthetic oligonucleotide: Ptpn6-325
aaccacuaagaagaagc

SEQ ID NO: 21439 - RNA, 17 nt, Artificial Sequence
  Synthetic oligonucleotide: Ptpn6-2520
ucagaguuugcagaagc

SEQ ID NO: 21440 - RNA, 17 nt, Artificial Sequence
  Synthetic oligonucleotide: Ptpn6-2521
cacucacauuguccagc

SEQ ID NO: 21441 - RNA, 17 nt, Artificial Sequence
  Synthetic oligonucleotide: Ptpn6-478
caucagggccuagcagc

SEQ ID NO: 21442 - RNA, 17 nt, Artificial Sequence
  Synthetic oligonucleotide: Ptpn6-2522
gcaggugcgugcagagc

SEQ ID NO: 21443 - RNA, 17 nt, Artificial Sequence
  Synthetic oligonucleotide: Ptpn6-300
auuaccaguaccugagc

SEQ ID NO: 21444 - RNA, 17 nt, Artificial Sequence
  Synthetic oligonucleotide: Ptpn6-311
gaaagucugccucacgc

SEQ ID NO: 21445 - RNA, 17 nt, Artificial Sequence
  Synthetic oligonucleotide: Ptpn6-488
gcugcccuuccagacgc

SEQ ID NO: 21446 - RNA, 17 nt, Artificial Sequence
  Synthetic oligonucleotide: Ptpn6-298
cuuacaggucuccccgc

SEQ ID NO: 21447 - RNA, 17 nt, Artificial Sequence
  Synthetic oligonucleotide: Ptpn6-2523
gugccaucagaggccgc

SEQ ID NO: 21448 - RNA, 17 nt, Artificial Sequence
  Synthetic oligonucleotide: Ptpn6-2524
caccccugaccugccgc

SEQ ID NO: 21449 - RNA, 17 nt, Artificial Sequence
  Synthetic oligonucleotide: Ptpn6-444
gcagacuuuccugccgc

SEQ ID NO: 21450 - RNA, 17 nt, Artificial Sequence
  Synthetic oligonucleotide: Ptpn6-287
gagagguggagaaaggc

SEQ ID NO: 21451 - RNA, 17 nt, Artificial Sequence
  Synthetic oligonucleotide: Ptpn6-259
gaggauacagccaaggc

SEQ ID NO: 21452 - RNA, 17 nt, Artificial Sequence
  Synthetic oligonucleotide: Ptpn6-2525
gcaugguggggaccggc

SEQ ID NO: 21453 - RNA, 17 nt, Artificial Sequence
  Synthetic oligonucleotide: Ptpn6-310
ccagaucaaccagcggc

SEQ ID NO: 21454 - RNA, 17 nt, Artificial Sequence
  Synthetic oligonucleotide: Ptpn6-2526
cuuugucuaccugcggc

SEQ ID NO: 21455 - RNA, 17 nt, Artificial Sequence
  Synthetic oligonucleotide: Ptpn6-2527
guggggaccggcagggc

SEQ ID NO: 21456 - RNA, 17 nt, Artificial Sequence
  Synthetic oligonucleotide: Ptpn6-424
ugggcauucuucauggc

SEQ ID NO: 21457 - RNA, 17 nt, Artificial Sequence
  Synthetic oligonucleotide: Ptpn6-474
cuccagacaacccuggc

SEQ ID NO: 21458 - RNA, 17 nt, Artificial Sequence
  Synthetic oligonucleotide: Ptpn6-283
cuggcagauggcguggc

SEQ ID NO: 21459 - RNA, 17 nt, Artificial Sequence
  Synthetic oligonucleotide: Ptpn6-440
gccugugcggccgaugc

SEQ ID NO: 21460 - RNA, 17 nt, Artificial Sequence
  Synthetic oligonucleotide: Ptpn6-295
acucugugaccaacugc

SEQ ID NO: 21461 - RNA, 17 nt, Artificial Sequence
  Synthetic oligonucleotide: Ptpn6-2528
ccaucaucgugcacugc

SEQ ID NO: 21462 - RNA, 17 nt, Artificial Sequence
  Synthetic oligonucleotide: Ptpn6-2529
gcucugcacgcaccugc

SEQ ID NO: 21463 - RNA, 17 nt, Artificial Sequence
  Synthetic oligonucleotide: Ptpn6-483
uacugucccgucccugc

SEQ ID NO: 21464 - RNA, 17 nt, Artificial Sequence
  Synthetic oligonucleotide: Ptpn6-269
cagccgagugauccugc

SEQ ID NO: 21465 - RNA, 17 nt, Artificial Sequence
  Synthetic oligonucleotide: Ptpn6-2530
gaagcuggagguccugc

SEQ ID NO: 21466 - RNA, 17 nt, Artificial Sequence
  Synthetic oligonucleotide: Ptpn6-2531
ucacuuggacgaggugc

SEQ ID NO: 21467 - RNA, 17 nt, Artificial Sequence
  Synthetic oligonucleotide: Ptpn6-318
gaccauccagauggugc

SEQ ID NO: 21468 - RNA, 17 nt, Artificial Sequence
  Synthetic oligonucleotide: Ptpn6-419
ucuuguucuuagugugc

SEQ ID NO: 21469 - RNA, 17 nt, Artificial Sequence
  Synthetic oligonucleotide: Ptpn6-457
gccagaucucccgaauc

SEQ ID NO: 21470 - RNA, 17 nt, Artificial Sequence
  Synthetic oligonucleotide: Ptpn6-434
gcugcgcccgcaccauc

SEQ ID NO: 21471 - RNA, 17 nt, Artificial Sequence
  Synthetic oligonucleotide: Ptpn6-476
gucuuagcguucucauc

SEQ ID NO: 21472 - RNA, 17 nt, Artificial Sequence
  Synthetic oligonucleotide: Ptpn6-299
accugauucgggagauc

SEQ ID NO: 21473 - RNA, 17 nt, Artificial Sequence
  Synthetic oligonucleotide: Ptpn6-445
ccugccgcugguugauc

SEQ ID NO: 21474 - RNA, 17 nt, Artificial Sequence
  Synthetic oligonucleotide: Ptpn6-2532
gggggcagucaaaccuc

SEQ ID NO: 21475 - RNA, 17 nt, Artificial Sequence
  Synthetic oligonucleotide: Ptpn6-465
cgcugcaugcccaccuc

SEQ ID NO: 21476 - RNA, 17 nt, Artificial Sequence
  Synthetic oligonucleotide: Ptpn6-252
gggauugaggaggccuc

SEQ ID NO: 21477 - RNA, 17 nt, Artificial Sequence
  Synthetic oligonucleotide: Ptpn6-2533
ugagcggugcuguccuc

SEQ ID NO: 21478 - RNA, 17 nt, Artificial Sequence
  Synthetic oligonucleotide: Ptpn6-455
cauggucgggccagcuc

SEQ ID NO: 21479 - RNA, 17 nt, Artificial Sequence
  Synthetic oligonucleotide: Ptpn6-320
gugcgggcgcagcgcuc

SEQ ID NO: 21480 - RNA, 17 nt, Artificial Sequence
  Synthetic oligonucleotide: Ptpn6-469
gccuuucuccaccucuc

SEQ ID NO: 21481 - RNA, 17 nt, Artificial Sequence
  Synthetic oligonucleotide: Ptpn6-2534
cucccgaaucaggucuc

SEQ ID NO: 21482 - RNA, 17 nt, Artificial Sequence
  Synthetic oligonucleotide: Ptpn6-487
uucuugcccuuguucuc

SEQ ID NO: 21483 - RNA, 17 nt, Artificial Sequence
  Synthetic oligonucleotide: Ptpn6-2535
gccgggcaguggcaguc

SEQ ID NO: 21484 - RNA, 17 nt, Artificial Sequence
  Synthetic oligonucleotide: Ptpn6-263
gaacuugcaccagcguc

SEQ ID NO: 21485 - RNA, 17 nt, Artificial Sequence
  Synthetic oligonucleotide: Ptpn6-2536
ucuaccugcggcagguc

SEQ ID NO: 21486 - RNA, 17 nt, Artificial Sequence
  Synthetic oligonucleotide: Ptpn6-454
cuggggaccccaugguc

SEQ ID NO: 21487 - RNA, 17 nt, Artificial Sequence
  Synthetic oligonucleotide: Ptpn6-277
cgccagccaggguuguc

SEQ ID NO: 21488 - RNA, 17 nt, Artificial Sequence
  Synthetic oligonucleotide: Ptpn6-2537
ccccggagaccugauuc

SEQ ID NO: 21489 - RNA, 17 nt, Artificial Sequence
  Synthetic oligonucleotide: Ptpn6-280
ccacggucaaugacuuc

SEQ ID NO: 21490 - RNA, 17 nt, Artificial Sequence
  Synthetic oligonucleotide: Ptpn6-260
cagccaaggcuggcuuc

SEQ ID NO: 21491 - RNA, 17 nt, Artificial Sequence
  Synthetic oligonucleotide: Ptpn6-436
ccaucuggauggucuuc

SEQ ID NO: 21492 - RNA, 17 nt, Artificial Sequence
  Synthetic oligonucleotide: Ptpn6-331
ugcacacuaagaacaag

SEQ ID NO: 21493 - RNA, 17 nt, Artificial Sequence
  Synthetic oligonucleotide: Ptpn6-338
gcaaggguucccucaag

SEQ ID NO: 21494 - RNA, 17 nt, Artificial Sequence
  Synthetic oligonucleotide: Ptpn6-2538
ggguggacgcuacacag

SEQ ID NO: 21495 - RNA, 17 nt, Artificial Sequence
  Synthetic oligonucleotide: Ptpn6-2539
agccugggugcucacag

SEQ ID NO: 21496 - RNA, 17 nt, Artificial Sequence
  Synthetic oligonucleotide: Ptpn6-2540
ugugggcagagggacag

SEQ ID NO: 21497 - RNA, 17 nt, Artificial Sequence
  Synthetic oligonucleotide: Ptpn6-309
uggaccagaucaaccag

SEQ ID NO: 21498 - RNA, 17 nt, Artificial Sequence
  Synthetic oligonucleotide: Ptpn6-2541
ccacucacauuguccag

SEQ ID NO: 21499 - RNA, 17 nt, Artificial Sequence
  Synthetic oligonucleotide: Ptpn6-334
agaaagugaagaagcag

SEQ ID NO: 21500 - RNA, 17 nt, Artificial Sequence
  Synthetic oligonucleotide: Ptpn6-266
agcgucuggaagggcag

SEQ ID NO: 21501 - RNA, 17 nt, Artificial Sequence
  Synthetic oligonucleotide: Ptpn6-2542
gacgggggugccaucag

SEQ ID NO: 21502 - RNA, 17 nt, Artificial Sequence
  Synthetic oligonucleotide: Ptpn6-2543
uaccugcggcaggucag

SEQ ID NO: 21503 - RNA, 17 nt, Artificial Sequence
  Synthetic oligonucleotide: Ptpn6-284
cgucaugaccacccgag

SEQ ID NO: 21504 - RNA, 17 nt, Artificial Sequence
  Synthetic oligonucleotide: Ptpn6-2544
caccucguccaagugag

SEQ ID NO: 21505 - RNA, 17 nt, Artificial Sequence
  Synthetic oligonucleotide: Ptpn6-2545
ccucaagaggaagugag

SEQ ID NO: 21506 - RNA, 17 nt, Artificial Sequence
  Synthetic oligonucleotide: Ptpn6-2546
ucuccaccaagggugag

SEQ ID NO: 21507 - RNA, 17 nt, Artificial Sequence
  Synthetic oligonucleotide: Ptpn6-2547
ccgcuggacaaugugag

SEQ ID NO: 21508 - RNA, 17 nt, Artificial Sequence
  Synthetic oligonucleotide: Ptpn6-486
ggagaauguucuuguag

SEQ ID NO: 21509 - RNA, 17 nt, Artificial Sequence
  Synthetic oligonucleotide: Ptpn6-430
cuccagcuucuucuuag

SEQ ID NO: 21510 - RNA, 17 nt, Artificial Sequence
  Synthetic oligonucleotide: Ptpn6-2548
cagcagugugggccacg

SEQ ID NO: 21511 - RNA, 17 nt, Artificial Sequence
  Synthetic oligonucleotide: Ptpn6-2549
aaccguacuaugccacg

SEQ ID NO: 21512 - RNA, 17 nt, Artificial Sequence
  Synthetic oligonucleotide: Ptpn6-249
agcauuucaagaagacg

SEQ ID NO: 21513 - RNA, 17 nt, Artificial Sequence
  Synthetic oligonucleotide: Ptpn6-2550
ggccacucacuuggacg

SEQ ID NO: 21514 - RNA, 17 nt, Artificial Sequence
  Synthetic oligonucleotide: Ptpn6-324
guacaaguucaucuacg

SEQ ID NO: 21515 - RNA, 17 nt, Artificial Sequence
  Synthetic oligonucleotide: Ptpn6-472
ccagaagucauugaccg

SEQ ID NO: 21516 - RNA, 17 nt, Artificial Sequence
  Synthetic oligonucleotide: Ptpn6-482
ugauguagucggacccg

SEQ ID NO: 21517 - RNA, 17 nt, Artificial Sequence
  Synthetic oligonucleotide: Ptpn6-289
cgucccauacuggcccg

SEQ ID NO: 21518 - RNA, 17 nt, Artificial Sequence
  Synthetic oligonucleotide: Ptpn6-2551
cccgaaucaggucuccg

SEQ ID NO: 21519 - RNA, 17 nt, Artificial Sequence
  Synthetic oligonucleotide: Ptpn6-257
caagaagcaggaguccg

SEQ ID NO: 21520 - RNA, 17 nt, Artificial Sequence
  Synthetic oligonucleotide: Ptpn6-2552
acucacauuguccagcg

SEQ ID NO: 21521 - RNA, 17 nt, Artificial Sequence
  Synthetic oligonucleotide: Ptpn6-282
acuucuggcagauggcg

SEQ ID NO: 21522 - RNA, 17 nt, Artificial Sequence
  Synthetic oligonucleotide: Ptpn6-296
cucugugaccaacugcg

SEQ ID NO: 21523 - RNA, 17 nt, Artificial Sequence
  Synthetic oligonucleotide: Ptpn6-492
agccgcauucacccucg

SEQ ID NO: 21524 - RNA, 17 nt, Artificial Sequence
  Synthetic oligonucleotide: Ptpn6-2553
caaguacagacacaagg

SEQ ID NO: 21525 - RNA, 17 nt, Artificial Sequence
  Synthetic oligonucleotide: Ptpn6-2554
ggcggaugcggggaagg

SEQ ID NO: 21526 - RNA, 17 nt, Artificial Sequence
  Synthetic oligonucleotide: Ptpn6-2555
gagggacagugggaagg

SEQ ID NO: 21527 - RNA, 17 nt, Artificial Sequence
  Synthetic oligonucleotide: Ptpn6-2556
caaugucacaguccagg

SEQ ID NO: 21528 - RNA, 17 nt, Artificial Sequence
  Synthetic oligonucleotide: Ptpn6-2557
gaguuugcagaagcagg

SEQ ID NO: 21529 - RNA, 17 nt, Artificial Sequence
  Synthetic oligonucleotide: Ptpn6-2558
cugcagccgggugcagg

SEQ ID NO: 21530 - RNA, 17 nt, Artificial Sequence
  Synthetic oligonucleotide: Ptpn6-2559
gcggugcuguccucagg

SEQ ID NO: 21531 - RNA, 17 nt, Artificial Sequence
  Synthetic oligonucleotide: Ptpn6-285
caugaccacccgagagg

SEQ ID NO: 21532 - RNA, 17 nt, Artificial Sequence
  Synthetic oligonucleotide: Ptpn6-2560
gggagugggcggagagg

SEQ ID NO: 21533 - RNA, 17 nt, Artificial Sequence
  Synthetic oligonucleotide: Ptpn6-290
cccauacuggcccgagg

SEQ ID NO: 21534 - RNA, 17 nt, Artificial Sequence
  Synthetic oligonucleotide: Ptpn6-251
gaagacggggauugagg

SEQ ID NO: 21535 - RNA, 17 nt, Artificial Sequence
  Synthetic oligonucleotide: Ptpn6-323
gggcauggugcagacgg

SEQ ID NO: 21536 - RNA, 17 nt, Artificial Sequence
  Synthetic oligonucleotide: Ptpn6-2561
ugugcggccgaugccgg

SEQ ID NO: 21537 - RNA, 17 nt, Artificial Sequence
  Synthetic oligonucleotide: Ptpn6-2562
ccgaaucaggucuccgg

SEQ ID NO: 21538 - RNA, 17 nt, Artificial Sequence
  Synthetic oligonucleotide: Ptpn6-2563
gcggaugcggggaaggg

SEQ ID NO: 21539 - RNA, 17 nt, Artificial Sequence
  Synthetic oligonucleotide: Ptpn6-2564
uuuggcuccccccaggg

SEQ ID NO: 21540 - RNA, 17 nt, Artificial Sequence
  Synthetic oligonucleotide: Ptpn6-2565
ugcagccgggugcaggg

SEQ ID NO: 21541 - RNA, 17 nt, Artificial Sequence
  Synthetic oligonucleotide: Ptpn6-333
cacuaagaacaagaggg

SEQ ID NO: 21542 - RNA, 17 nt, Artificial Sequence
  Synthetic oligonucleotide: Ptpn6-2566
cuuggacgaggugcggg

SEQ ID NO: 21543 - RNA, 17 nt, Artificial Sequence
  Synthetic oligonucleotide: Ptpn6-470
uuucuccaccucucggg

SEQ ID NO: 21544 - RNA, 17 nt, Artificial Sequence
  Synthetic oligonucleotide: Ptpn6-2567
ggaaagggagggucggg

SEQ ID NO: 21545 - RNA, 17 nt, Artificial Sequence
  Synthetic oligonucleotide: Ptpn6-2568
cggaugcggggaagggg

SEQ ID NO: 21546 - RNA, 17 nt, Artificial Sequence
  Synthetic oligonucleotide: Ptpn6-2569
cugcggcaggucagggg

SEQ ID NO: 21547 - RNA, 17 nt, Artificial Sequence
  Synthetic oligonucleotide: Ptpn6-2570
agcagggccuggggggg

SEQ ID NO: 21548 - RNA, 17 nt, Artificial Sequence
  Synthetic oligonucleotide: Ptpn6-2571
gagcagggccugggggg

SEQ ID NO: 21549 - RNA, 17 nt, Artificial Sequence
  Synthetic oligonucleotide: Ptpn6-2572
agagcagggccuggggg

SEQ ID NO: 21550 - RNA, 17 nt, Artificial Sequence
  Synthetic oligonucleotide: Ptpn6-2573
accuggggguuuggggg

SEQ ID NO: 21551 - RNA, 17 nt, Artificial Sequence
  Synthetic oligonucleotide: Ptpn6-2574
cagagcagggccugggg

SEQ ID NO: 21552 - RNA, 17 nt, Artificial Sequence
  Synthetic oligonucleotide: Ptpn6-2575
guagcguccacccuggg

SEQ ID NO: 21553 - RNA, 17 nt, Artificial Sequence
  Synthetic oligonucleotide: Ptpn6-2576
gcagagcagggccuggg

SEQ ID NO: 21554 - RNA, 17 nt, Artificial Sequence
  Synthetic oligonucleotide: Ptpn6-262
caaggcuggcuucuggg

SEQ ID NO: 21555 - RNA, 17 nt, Artificial Sequence
  Synthetic oligonucleotide: Ptpn6-242
ggacgcuacacaguggg

SEQ ID NO: 21556 - RNA, 17 nt, Artificial Sequence
  Synthetic oligonucleotide: Ptpn6-2577
agugugggccacguggg

SEQ ID NO: 21557 - RNA, 17 nt, Artificial Sequence
  Synthetic oligonucleotide: Ptpn6-2578
aaacucugagauguggg

SEQ ID NO: 21558 - RNA, 17 nt, Artificial Sequence
  Synthetic oligonucleotide: Ptpn6-2579
gaguuugaggugcaugg

SEQ ID NO: 21559 - RNA, 17 nt, Artificial Sequence
  Synthetic oligonucleotide: Ptpn6-2580
gggugaggggcaccugg

SEQ ID NO: 21560 - RNA, 17 nt, Artificial Sequence
  Synthetic oligonucleotide: Ptpn6-246
cagccucacggaccugg

SEQ ID NO: 21561 - RNA, 17 nt, Artificial Sequence
  Synthetic oligonucleotide: Ptpn6-2581
uguagcguccacccugg

SEQ ID NO: 21562 - RNA, 17 nt, Artificial Sequence
  Synthetic oligonucleotide: Ptpn6-307
guccccagugagccugg

SEQ ID NO: 21563 - RNA, 17 nt, Artificial Sequence
  Synthetic oligonucleotide: Ptpn6-2582
ugcagagcagggccugg

SEQ ID NO: 21564 - RNA, 17 nt, Artificial Sequence
  Synthetic oligonucleotide: Ptpn6-326
cacuaagaagaagcugg

SEQ ID NO: 21565 - RNA, 17 nt, Artificial Sequence
  Synthetic oligonucleotide: Ptpn6-427
gcauucuucauggcugg

SEQ ID NO: 21566 - RNA, 17 nt, Artificial Sequence
  Synthetic oligonucleotide: Ptpn6-278
cagccaggguugucugg

SEQ ID NO: 21567 - RNA, 17 nt, Artificial Sequence
  Synthetic oligonucleotide: Ptpn6-2583
aauggggcagggcgugg

SEQ ID NO: 21568 - RNA, 17 nt, Artificial Sequence
  Synthetic oligonucleotide: Ptpn6-2584
gugccccucacccuugg

SEQ ID NO: 21569 - RNA, 17 nt, Artificial Sequence
  Synthetic oligonucleotide: Ptpn6-2585
ggcaccuggggguuugg

SEQ ID NO: 21570 - RNA, 17 nt, Artificial Sequence
  Synthetic oligonucleotide: Ptpn6-254
ugccacgagggugaaug

SEQ ID NO: 21571 - RNA, 17 nt, Artificial Sequence
  Synthetic oligonucleotide: Ptpn6-303
gagcuggcccgaccaug

SEQ ID NO: 21572 - RNA, 17 nt, Artificial Sequence
  Synthetic oligonucleotide: Ptpn6-2586
cugcaaacucugagaug

SEQ ID NO: 21573 - RNA, 17 nt, Artificial Sequence
  Synthetic oligonucleotide: Ptpn6-2587
agggucggguggggaug

SEQ ID NO: 21574 - RNA, 17 nt, Artificial Sequence
  Synthetic oligonucleotide: Ptpn6-294
uacucugugaccaacug

SEQ ID NO: 21575 - RNA, 17 nt, Artificial Sequence
  Synthetic oligonucleotide: Ptpn6-451
cacccccaggcucacug

SEQ ID NO: 21576 - RNA, 17 nt, Artificial Sequence
  Synthetic oligonucleotide: Ptpn6-2588
uguaccauggccaccug

SEQ ID NO: 21577 - RNA, 17 nt, Artificial Sequence
  Synthetic oligonucleotide: Ptpn6-2589
agggugaggggcaccug

SEQ ID NO: 21578 - RNA, 17 nt, Artificial Sequence
  Synthetic oligonucleotide: Ptpn6-2590
caguccaggcggaccug

SEQ ID NO: 21579 - RNA, 17 nt, Artificial Sequence
  Synthetic oligonucleotide: Ptpn6-253
gcgccuuugucuaccug

SEQ ID NO: 21580 - RNA, 17 nt, Artificial Sequence
  Synthetic oligonucleotide: Ptpn6-2591
guguagcguccacccug

SEQ ID NO: 21581 - RNA, 17 nt, Artificial Sequence
  Synthetic oligonucleotide: Ptpn6-306
gguccccagugagccug

SEQ ID NO: 21582 - RNA, 17 nt, Artificial Sequence
  Synthetic oligonucleotide: Ptpn6-495
guagacaaaggcgccug

SEQ ID NO: 21583 - RNA, 17 nt, Artificial Sequence
  Synthetic oligonucleotide: Ptpn6-2592
gugcagagcagggccug

SEQ ID NO: 21584 - RNA, 17 nt, Artificial Sequence
  Synthetic oligonucleotide: Ptpn6-447
ucugguccaggaagcug

SEQ ID NO: 21585 - RNA, 17 nt, Artificial Sequence
  Synthetic oligonucleotide: Ptpn6-485
gcaggaucacucggcug

SEQ ID NO: 21586 - RNA, 17 nt, Artificial Sequence
  Synthetic oligonucleotide: Ptpn6-2593
ggggaccggcagggcug

SEQ ID NO: 21587 - RNA, 17 nt, Artificial Sequence
  Synthetic oligonucleotide: Ptpn6-426
ggcauucuucauggcug

SEQ ID NO: 21588 - RNA, 17 nt, Artificial Sequence
  Synthetic oligonucleotide: Ptpn6-2594
caucaaggucagcagug

SEQ ID NO: 21589 - RNA, 17 nt, Artificial Sequence
  Synthetic oligonucleotide: Ptpn6-497
gcuccaccagguccgug

SEQ ID NO: 21590 - RNA, 17 nt, Artificial Sequence
  Synthetic oligonucleotide: Ptpn6-2595
gaauggggcagggcgug

SEQ ID NO: 21591 - RNA, 17 nt, Artificial Sequence
  Synthetic oligonucleotide: Ptpn6-443
augaugggcccugcgug

SEQ ID NO: 21592 - RNA, 17 nt, Artificial Sequence
  Synthetic oligonucleotide: Ptpn6-2596
aucgugcacugcaggug

SEQ ID NO: 21593 - RNA, 17 nt, Artificial Sequence
  Synthetic oligonucleotide: Ptpn6-2597
cucacuuggacgaggug

SEQ ID NO: 21594 - RNA, 17 nt, Artificial Sequence
  Synthetic oligonucleotide: Ptpn6-2598
caucuccaccaagggug

SEQ ID NO: 21595 - RNA, 17 nt, Artificial Sequence
  Synthetic oligonucleotide: Ptpn6-2599
aaagggagggucgggug

SEQ ID NO: 21596 - RNA, 17 nt, Artificial Sequence
  Synthetic oligonucleotide: Ptpn6-2600
acucugagaugugggug

SEQ ID NO: 21597 - RNA, 17 nt, Artificial Sequence
  Synthetic oligonucleotide: Ptpn6-2601
guuugaggugcauggug

SEQ ID NO: 21598 - RNA, 17 nt, Artificial Sequence
  Synthetic oligonucleotide: Ptpn6-317
agaccauccagauggug

SEQ ID NO: 21599 - RNA, 17 nt, Artificial Sequence
  Synthetic oligonucleotide: Ptpn6-439
caaugauggugccugug

SEQ ID NO: 21600 - RNA, 17 nt, Artificial Sequence
  Synthetic oligonucleotide: Ptpn6-250
caagaagacggggauug

SEQ ID NO: 21601 - RNA, 17 nt, Artificial Sequence
  Synthetic oligonucleotide: Ptpn6-2602
ccgcucacuuccucuug

SEQ ID NO: 21602 - RNA, 17 nt, Artificial Sequence
  Synthetic oligonucleotide: Ptpn6-2603
cuucugggaggaguuug

SEQ ID NO: 21603 - RNA, 17 nt, Artificial Sequence
  Synthetic oligonucleotide: Ptpn6-2604
gggcaccuggggguuug

SEQ ID NO: 21604 - RNA, 17 nt, Artificial Sequence
  Synthetic oligonucleotide: Ptpn6-2605
gccuagcagcugguuug

SEQ ID NO: 21605 - RNA, 17 nt, Artificial Sequence
  Synthetic oligonucleotide: Ptpn6-302
ugagcuggcccgaccau

SEQ ID NO: 21606 - RNA, 17 nt, Artificial Sequence
  Synthetic oligonucleotide: Ptpn6-2606
ucagaggccgccggcau

SEQ ID NO: 21607 - RNA, 17 nt, Artificial Sequence
  Synthetic oligonucleotide: Ptpn6-422
gcgggaggccuuggcau

SEQ ID NO: 21608 - RNA, 17 nt, Artificial Sequence
  Synthetic oligonucleotide: Ptpn6-428
cuucauggcugggggau

SEQ ID NO: 21609 - RNA, 17 nt, Artificial Sequence
  Synthetic oligonucleotide: Ptpn6-442
cugcagugcacgaugau

SEQ ID NO: 21610 - RNA, 17 nt, Artificial Sequence
  Synthetic oligonucleotide: Ptpn6-467
ccaccucgggccaguau

SEQ ID NO: 21611 - RNA, 17 nt, Artificial Sequence
  Synthetic oligonucleotide: Ptpn6-293
gcaugcagcgugcuuau

SEQ ID NO: 21612 - RNA, 17 nt, Artificial Sequence
  Synthetic oligonucleotide: Ptpn6-432
agugguuucaaugaacu

SEQ ID NO: 21613 - RNA, 17 nt, Artificial Sequence
  Synthetic oligonucleotide: Ptpn6-491
uguucaguuccaacacu

SEQ ID NO: 21614 - RNA, 17 nt, Artificial Sequence
  Synthetic oligonucleotide: Ptpn6-484
gucccugcaggaucacu

SEQ ID NO: 21615 - RNA, 17 nt, Artificial Sequence
  Synthetic oligonucleotide: Ptpn6-2607
agucagggccacucacu

SEQ ID NO: 21616 - RNA, 17 nt, Artificial Sequence
  Synthetic oligonucleotide: Ptpn6-450
acacccccaggcucacu

SEQ ID NO: 21617 - RNA, 17 nt, Artificial Sequence
  Synthetic oligonucleotide: Ptpn6-464
acgcugcaugcccaccu

SEQ ID NO: 21618 - RNA, 17 nt, Artificial Sequence
  Synthetic oligonucleotide: Ptpn6-2608
aagggugaggggcaccu

SEQ ID NO: 21619 - RNA, 17 nt, Artificial Sequence
  Synthetic oligonucleotide: Ptpn6-2609
uguguagcguccacccu

SEQ ID NO: 21620 - RNA, 17 nt, Artificial Sequence
  Synthetic oligonucleotide: Ptpn6-2610
caggugccccucacccu

SEQ ID NO: 21621 - RNA, 17 nt, Artificial Sequence
  Synthetic oligonucleotide: Ptpn6-489
cucccagaagccagccu

SEQ ID NO: 21622 - RNA, 17 nt, Artificial Sequence
  Synthetic oligonucleotide: Ptpn6-2611
ggugaauggggcagccu

SEQ ID NO: 21623 - RNA, 17 nt, Artificial Sequence
  Synthetic oligonucleotide: Ptpn6-305
ggguccccagugagccu

SEQ ID NO: 21624 - RNA, 17 nt, Artificial Sequence
  Synthetic oligonucleotide: Ptpn6-420
cgaggugcgggaggccu

SEQ ID NO: 21625 - RNA, 17 nt, Artificial Sequence
  Synthetic oligonucleotide: Ptpn6-2612
cgugcagagcagggccu

SEQ ID NO: 21626 - RNA, 17 nt, Artificial Sequence
  Synthetic oligonucleotide: Ptpn6-490
agccuuggcuguauccu

SEQ ID NO: 21627 - RNA, 17 nt, Artificial Sequence
  Synthetic oligonucleotide: Ptpn6-2613
cacugacccuauguccu

SEQ ID NO: 21628 - RNA, 17 nt, Artificial Sequence
  Synthetic oligonucleotide: Ptpn6-319
ggugcgggcgcagcgcu

SEQ ID NO: 21629 - RNA, 17 nt, Artificial Sequence
  Synthetic oligonucleotide: Ptpn6-2614
uggggaccggcagggcu

SEQ ID NO: 21630 - RNA, 17 nt, Artificial Sequence
  Synthetic oligonucleotide: Ptpn6-425
gggcauucuucauggcu

SEQ ID NO: 21631 - RNA, 17 nt, Artificial Sequence
  Synthetic oligonucleotide: Ptpn6-2615
accccaaaccagcugcu

SEQ ID NO: 21632 - RNA, 17 nt, Artificial Sequence
  Synthetic oligonucleotide: Ptpn6-468
ggccuuucuccaccucu

SEQ ID NO: 21633 - RNA, 17 nt, Artificial Sequence
  Synthetic oligonucleotide: Ptpn6-261
agccaaggcuggcuucu

SEQ ID NO: 21634 - RNA, 17 nt, Artificial Sequence
  Synthetic oligonucleotide: Ptpn6-241
gguggacgcuacacagu

SEQ ID NO: 21635 - RNA, 17 nt, Artificial Sequence
  Synthetic oligonucleotide: Ptpn6-2616
gugggcagagggacagu

SEQ ID NO: 21636 - RNA, 17 nt, Artificial Sequence
  Synthetic oligonucleotide: Ptpn6-461
gucaugcuccccgcagu

SEQ ID NO: 21637 - RNA, 17 nt, Artificial Sequence
  Synthetic oligonucleotide: Ptpn6-462
gcaguuggucacagagu

SEQ ID NO: 21638 - RNA, 17 nt, Artificial Sequence
  Synthetic oligonucleotide: Ptpn6-327
gcagaagggccaggagu

SEQ ID NO: 21639 - RNA, 17 nt, Artificial Sequence
  Synthetic oligonucleotide: Ptpn6-479
guuggcauugauguagu

SEQ ID NO: 21640 - RNA, 17 nt, Artificial Sequence
  Synthetic oligonucleotide: Ptpn6-2617
gcugaccuugauguagu

SEQ ID NO: 21641 - RNA, 17 nt, Artificial Sequence
  Synthetic oligonucleotide: Ptpn6-2618
agcagugugggccacgu

SEQ ID NO: 21642 - RNA, 17 nt, Artificial Sequence
  Synthetic oligonucleotide: Ptpn6-2619
ggaauggggcagggcgu

SEQ ID NO: 21643 - RNA, 17 nt, Artificial Sequence
  Synthetic oligonucleotide: Ptpn6-291
ccauacuggcccgaggu

SEQ ID NO: 21644 - RNA, 17 nt, Artificial Sequence
  Synthetic oligonucleotide: Ptpn6-2620
guggagaaaggccgggu

SEQ ID NO: 21645 - RNA, 17 nt, Artificial Sequence
  Synthetic oligonucleotide: Ptpn6-2621
gaaagggagggucgggu

SEQ ID NO: 21646 - RNA, 17 nt, Artificial Sequence
  Synthetic oligonucleotide: Ptpn6-2622
ugcggcaggucaggggu

SEQ ID NO: 21647 - RNA, 17 nt, Artificial Sequence
  Synthetic oligonucleotide: Ptpn6-2623
ccuggggguuugggggu

SEQ ID NO: 21648 - RNA, 17 nt, Artificial Sequence
  Synthetic oligonucleotide: Ptpn6-2624
aacucugagaugugggu

SEQ ID NO: 21649 - RNA, 17 nt, Artificial Sequence
  Synthetic oligonucleotide: Ptpn6-453
acuggggaccccauggu

SEQ ID NO: 21650 - RNA, 17 nt, Artificial Sequence
  Synthetic oligonucleotide: Ptpn6-2625
aguuugaggugcauggu

SEQ ID NO: 21651 - RNA, 17 nt, Artificial Sequence
  Synthetic oligonucleotide: Ptpn6-2626
ugcaaacucugagaugu

SEQ ID NO: 21652 - RNA, 17 nt, Artificial Sequence
  Synthetic oligonucleotide: Ptpn6-475
acccuggcuggcgaugu

SEQ ID NO: 21653 - RNA, 17 nt, Artificial Sequence
  Synthetic oligonucleotide: Ptpn6-2627
aucaaggucagcagugu

SEQ ID NO: 21654 - RNA, 17 nt, Artificial Sequence
  Synthetic oligonucleotide: Ptpn6-255
cauugagaaccgagugu

SEQ ID NO: 21655 - RNA, 17 nt, Artificial Sequence
  Synthetic oligonucleotide: Ptpn6-2628
cuggggggagccaaauu

SEQ ID NO: 21656 - RNA, 17 nt, Artificial Sequence
  Synthetic oligonucleotide: Ptpn6-2629
cugugaauggccuaauu

SEQ ID NO: 21657 - RNA, 17 nt, Artificial Sequence
  Synthetic oligonucleotide: Ptpn6-2630
cccccggagaccugauu

SEQ ID NO: 21658 - RNA, 17 nt, Artificial Sequence
  Synthetic oligonucleotide: Ptpn6-460
gguacggaguuuguauu

SEQ ID NO: 21659 - RNA, 17 nt, Artificial Sequence
  Synthetic oligonucleotide: Ptpn6-2631
aggggcaccuggggguu

SEQ ID NO: 21660 - RNA, 17 nt, Artificial Sequence
  Synthetic oligonucleotide: Ptpn6-2632
gggccuagcagcugguu

SEQ ID NO: 21661 - RNA, 17 nt, Artificial Sequence
  Synthetic oligonucleotide: Ptpn6-243
cuacacagugggugguu

SEQ ID NO: 21662 - RNA, 17 nt, Artificial Sequence
  Synthetic oligonucleotide: Ptpn6-2633
ggggcaccuggggguuu

SEQ ID NO: 21663 - RNA, 17 nt, Artificial Sequence
  Synthetic oligonucleotide: Ptpn6-2634
ggccuagcagcugguuu

SEQ ID NO: 21664 - RNA, 20 nt, Artificial Sequence
  Synthetic oligonucleotide: Ptpn6-173
gggcagcggccagagaacaa

SEQ ID NO: 21665 - RNA, 20 nt, Artificial Sequence
  Synthetic oligonucleotide: Ptpn6-2635
gaccugccgcagguagacaa

SEQ ID NO: 21666 - RNA, 20 nt, Artificial Sequence
  Synthetic oligonucleotide: Ptpn6-2636
auggagaacaucuccaccaa

SEQ ID NO: 21667 - RNA, 20 nt, Artificial Sequence
  Synthetic oligonucleotide: Ptpn6-239
gcagacaaggagaagagcaa

SEQ ID NO: 21668 - RNA, 20 nt, Artificial Sequence
  Synthetic oligonucleotide: Ptpn6-2637
ugggaaggugguucgcagaa

SEQ ID NO: 21669 - RNA, 20 nt, Artificial Sequence
  Synthetic oligonucleotide: Ptpn6-191
accacccgagagguggagaa

SEQ ID NO: 21670 - RNA, 20 nt, Artificial Sequence
  Synthetic oligonucleotide: Ptpn6-170
acuugcaccagcgucuggaa

SEQ ID NO: 21671 - RNA, 20 nt, Artificial Sequence
  Synthetic oligonucleotide: Ptpn6-172
agggcagcggccagagaaca

SEQ ID NO: 21672 - RNA, 20 nt, Artificial Sequence
  Synthetic oligonucleotide: Ptpn6-2638
ggggggcaaguacagacaca

SEQ ID NO: 21673 - RNA, 20 nt, Artificial Sequence
  Synthetic oligonucleotide: Ptpn6-2639
gggcagccugggugcucaca

SEQ ID NO: 21674 - RNA, 20 nt, Artificial Sequence
  Synthetic oligonucleotide: Ptpn6-237
gaagcagcggucagcagaca

SEQ ID NO: 21675 - RNA, 20 nt, Artificial Sequence
  Synthetic oligonucleotide: Ptpn6-388
ggguggucaugacgaugaca

SEQ ID NO: 21676 - RNA, 20 nt, Artificial Sequence
  Synthetic oligonucleotide: Ptpn6-218
cauggagaacaucuccacca

SEQ ID NO: 21677 - RNA, 20 nt, Artificial Sequence
  Synthetic oligonucleotide: Ptpn6-205
uaccugagcuggcccgacca

SEQ ID NO: 21678 - RNA, 20 nt, Artificial Sequence
  Synthetic oligonucleotide: Ptpn6-370
caggcucacuggggacccca

SEQ ID NO: 21679 - RNA, 20 nt, Artificial Sequence
  Synthetic oligonucleotide: Ptpn6-2640
gccuaauuuggcucccccca

SEQ ID NO: 21680 - RNA, 20 nt, Artificial Sequence
  Synthetic oligonucleotide: Ptpn6-163
ggaguccgaggauacagcca

SEQ ID NO: 21681 - RNA, 20 nt, Artificial Sequence
  Synthetic oligonucleotide: Ptpn6-181
aagaccuacaucgccagcca

SEQ ID NO: 21682 - RNA, 20 nt, Artificial Sequence
  Synthetic oligonucleotide: Ptpn6-184
ccaggguugucuggaggcca

SEQ ID NO: 21683 - RNA, 20 nt, Artificial Sequence
  Synthetic oligonucleotide: Ptpn6-2641
gugcuguccucagguggcca

SEQ ID NO: 21684 - RNA, 20 nt, Artificial Sequence
  Synthetic oligonucleotide: Ptpn6-232
caugaagaaugcccaugcca

SEQ ID NO: 21685 - RNA, 20 nt, Artificial Sequence
  Synthetic oligonucleotide: Ptpn6-238
agcagacaaggagaagagca

SEQ ID NO: 21686 - RNA, 20 nt, Artificial Sequence
  Synthetic oligonucleotide: Ptpn6-2642
cugcaggugcgugcagagca

SEQ ID NO: 21687 - RNA, 20 nt, Artificial Sequence
  Synthetic oligonucleotide: Ptpn6-216
aggaaagucugccucacgca

SEQ ID NO: 21688 - RNA, 20 nt, Artificial Sequence
  Synthetic oligonucleotide: Ptpn6-2643
gugcaugguggggaccggca

SEQ ID NO: 21689 - RNA, 20 nt, Artificial Sequence
  Synthetic oligonucleotide: Ptpn6-224
gcgggcgcagcgcucgggca

SEQ ID NO: 21690 - RNA, 20 nt, Artificial Sequence
  Synthetic oligonucleotide: Ptpn6-341
aggugcgggaggccuuggca

SEQ ID NO: 21691 - RNA, 20 nt, Artificial Sequence
  Synthetic oligonucleotide: Ptpn6-175
cacagccgagugauccugca

SEQ ID NO: 21692 - RNA, 20 nt, Artificial Sequence
  Synthetic oligonucleotide: Ptpn6-2644
ugggaggaguuugaggugca

SEQ ID NO: 21693 - RNA, 20 nt, Artificial Sequence
  Synthetic oligonucleotide: Ptpn6-2645
caucaaugccaacuacauca

SEQ ID NO: 21694 - RNA, 20 nt, Artificial Sequence
  Synthetic oligonucleotide: Ptpn6-394
aggucuuagcguucucauca

SEQ ID NO: 21695 - RNA, 20 nt, Artificial Sequence
  Synthetic oligonucleotide: Ptpn6-149
ggagaccuucgacagccuca

SEQ ID NO: 21696 - RNA, 20 nt, Artificial Sequence
  Synthetic oligonucleotide: Ptpn6-217
cauugucaucgacaugcuca

SEQ ID NO: 21697 - RNA, 20 nt, Artificial Sequence
  Synthetic oligonucleotide: Ptpn6-2646
ugucuaccugcggcagguca

SEQ ID NO: 21698 - RNA, 20 nt, Artificial Sequence
  Synthetic oligonucleotide: Ptpn6-343
cuuggcaugggcauucuuca

SEQ ID NO: 21699 - RNA, 20 nt, Artificial Sequence
  Synthetic oligonucleotide: Ptpn6-234
ccugcacacuaagaacaaga

SEQ ID NO: 21700 - RNA, 20 nt, Artificial Sequence
  Synthetic oligonucleotide: Ptpn6-152
gguggagcauuucaagaaga

SEQ ID NO: 21701 - RNA, 20 nt, Artificial Sequence
  Synthetic oligonucleotide: Ptpn6-219
cauccagaagaccauccaga

SEQ ID NO: 21702 - RNA, 20 nt, Artificial Sequence
  Synthetic oligonucleotide: Ptpn6-2647
gugggaaggugguucgcaga

SEQ ID NO: 21703 - RNA, 20 nt, Artificial Sequence
  Synthetic oligonucleotide: Ptpn6-186
ggucaaugacuucuggcaga

SEQ ID NO: 21704 - RNA, 20 nt, Artificial Sequence
  Synthetic oligonucleotide: Ptpn6-225
gcgcucgggcauggugcaga

SEQ ID NO: 21705 - RNA, 20 nt, Artificial Sequence
  Synthetic oligonucleotide: Ptpn6-2648
ugggcggagaggaggcgaga

SEQ ID NO: 21706 - RNA, 20 nt, Artificial Sequence
  Synthetic oligonucleotide: Ptpn6-2649
gcaaccguacuaugccacga

SEQ ID NO: 21707 - RNA, 20 nt, Artificial Sequence
  Synthetic oligonucleotide: Ptpn6-353
gguuucaaugaacugggcga

SEQ ID NO: 21708 - RNA, 20 nt, Artificial Sequence
  Synthetic oligonucleotide: Ptpn6-414
cagguccgugaggcugucga

SEQ ID NO: 21709 - RNA, 20 nt, Artificial Sequence
  Synthetic oligonucleotide: Ptpn6-176
gccgagugauccugcaggga

SEQ ID NO: 21710 - RNA, 20 nt, Artificial Sequence
  Synthetic oligonucleotide: Ptpn6-2650
ugggcagagggacaguggga

SEQ ID NO: 21711 - RNA, 20 nt, Artificial Sequence
  Synthetic oligonucleotide: Ptpn6-355
cugcgcccgcaccaucugga

SEQ ID NO: 21712 - RNA, 20 nt, Artificial Sequence
  Synthetic oligonucleotide: Ptpn6-169
aacuugcaccagcgucugga

SEQ ID NO: 21713 - RNA, 20 nt, Artificial Sequence
  Synthetic oligonucleotide: Ptpn6-358
gagcaugucgaugacaauga

SEQ ID NO: 21714 - RNA, 20 nt, Artificial Sequence
  Synthetic oligonucleotide: Ptpn6-2651
ucaccugcagugcacgauga

SEQ ID NO: 21715 - RNA, 20 nt, Artificial Sequence
  Synthetic oligonucleotide: Ptpn6-2652
ggugaggaugauaauccuga

SEQ ID NO: 21716 - RNA, 20 nt, Artificial Sequence
  Synthetic oligonucleotide: Ptpn6-2653
ccgaugccggcggccucuga

SEQ ID NO: 21717 - RNA, 20 nt, Artificial Sequence
  Synthetic oligonucleotide: Ptpn6-2654
aacaucuccaccaaggguga

SEQ ID NO: 21718 - RNA, 20 nt, Artificial Sequence
  Synthetic oligonucleotide: Ptpn6-2655
caccgcucacuuccucuuga

SEQ ID NO: 21719 - RNA, 20 nt, Artificial Sequence
  Synthetic oligonucleotide: Ptpn6-384
augcccaccucgggccagua

SEQ ID NO: 21720 - RNA, 20 nt, Artificial Sequence
  Synthetic oligonucleotide: Ptpn6-381
ccgcaguuggucacagagua

SEQ ID NO: 21721 - RNA, 20 nt, Artificial Sequence
  Synthetic oligonucleotide: Ptpn6-230
aagggccaggagucggagua

SEQ ID NO: 21722 - RNA, 20 nt, Artificial Sequence
  Synthetic oligonucleotide: Ptpn6-410
uucacccucguggcauagua

SEQ ID NO: 21723 - RNA, 20 nt, Artificial Sequence
  Synthetic oligonucleotide: Ptpn6-377
gcggggagaccuguaaggua

SEQ ID NO: 21724 - RNA, 20 nt, Artificial Sequence
  Synthetic oligonucleotide: Ptpn6-2656
agguggagaaaggccgggua

SEQ ID NO: 21725 - RNA, 20 nt, Artificial Sequence
  Synthetic oligonucleotide: Ptpn6-376
guccagcggggagaccugua

SEQ ID NO: 21726 - RNA, 20 nt, Artificial Sequence
  Synthetic oligonucleotide: Ptpn6-196
gugggcaugcagcgugcuua

SEQ ID NO: 21727 - RNA, 20 nt, Artificial Sequence
  Synthetic oligonucleotide: Ptpn6-351
ucuuagugguuucaaugaac

SEQ ID NO: 21728 - RNA, 20 nt, Artificial Sequence
  Synthetic oligonucleotide: Ptpn6-2657
gccgccggcaucggccgcac

SEQ ID NO: 21729 - RNA, 20 nt, Artificial Sequence
  Synthetic oligonucleotide: Ptpn6-367
gaggacacccccaggcucac

SEQ ID NO: 21730 - RNA, 20 nt, Artificial Sequence
  Synthetic oligonucleotide: Ptpn6-2658
ggggcagccugggugcucac

SEQ ID NO: 21731 - RNA, 20 nt, Artificial Sequence
  Synthetic oligonucleotide: Ptpn6-153
guggagcauuucaagaagac

SEQ ID NO: 21732 - RNA, 20 nt, Artificial Sequence
  Synthetic oligonucleotide: Ptpn6-177
ccgagugauccugcagggac

SEQ ID NO: 21733 - RNA, 20 nt, Artificial Sequence
  Synthetic oligonucleotide: Ptpn6-2659
uugaggugcaugguggggac

SEQ ID NO: 21734 - RNA, 20 nt, Artificial Sequence
  Synthetic oligonucleotide: Ptpn6-2660
ggaacaaaugcgucccauac

SEQ ID NO: 21735 - RNA, 20 nt, Artificial Sequence
  Synthetic oligonucleotide: Ptpn6-231
agggccaggagucggaguac

SEQ ID NO: 21736 - RNA, 20 nt, Artificial Sequence
  Synthetic oligonucleotide: Ptpn6-374
ggucgggccagcucagguac

(The sequence listing continues in the following parts.)
